United States Patent Application Publication US 2007/0054278 A1 - sequence listing, part 144

SEQ ID NO: 504851 - DNA, 201 bp, Homo sapiens
aatgctatacccagtaaacaataaattcgcttctccacgcacaccctgaccctggtaaccgccattctactttctattcctatgaatttgaccctttaaayacctcctttaggtggaatcatacagtatttgtctttttgtgactgtaccatgtatttgtattatactatcccttagcacaaagtcctcaaggttcatcca

SEQ ID NO: 504852 - DNA, 201 bp, Homo sapiens
caggctagagtgcaatggcgcgatctcggctcactgcaacctccacctctcgggctcaagcgattcttctgcctcagcctcccaagtagctgggattacaratacttgccaccatgcctggctaattttttgtatttttagtagagacagggttttaccatgttggccaggctggtctcaaactcctagcttcaggtgatc

SEQ ID NO: 504853 - DNA, 201 bp, Homo sapiens
gtaccatgtatttgtattatactatcccttagcacaaagtcctcaaggttcatccaggtggcagcatgaaaaagcacttacttttattaacactctccatrttgaaggcctcagacattcgaatacctgatttggctacagcataaattctgctttcctagggtaaaagagagagtttgaacagggtatttaaagcaaaaa

SEQ ID NO: 504854 - DNA, 201 bp, Homo sapiens
gattcactagagtacagcattattataaaaccatcatcggtgccaactaaaatatgccattgtgaatagtactgttgagatttttctccatctgttagttwttccattatttatctttttcccacatttttgtttgataaattattttgaagacgtgaagaaaaagtaagagaaagctttttcacaatcactgactacaca

SEQ ID NO: 504855 - DNA, 201 bp, Homo sapiens
gtgaagaaaaagtaagagaaagctttttcacaatcactgactacacataaacaccacctttaatattcttaccattctagaatatggttggcggtggggaraaaaaccatgagtggctataacattaagctagaaaccattctcaatcattgattacacataaacaccacttttaatattctactattctggaacatggtt

SEQ ID NO: 504856 - DNA, 201 bp, Homo sapiens
ggaaagtggttagtagtagaattagagagaggggactggaggcctgggaggacaagctgagccactgggagcaggggcaatggatgtcacttgtttctatyggaggtactgctgactatcacatgttgtccctctagagtgactattgtaatttgcatggtattccagttcaataaggataggctatgccttaaaataagc

SEQ ID NO: 504857 - DNA, 201 bp, Homo sapiens
tactgctgactatcacatgttgtccctctagagtgactattgtaatttgcatggtattccagttcaataaggataggctatgccttaaaataagctcttaraaatttttaaaataaactcatatttattgaggcaattagaatacatctcttttccttgaaacctgaaaatacctaataaacacagaaataaaatctcaga

SEQ ID NO: 504858 - DNA, 201 bp, Homo sapiens
ggaccccttcctcagatgtgtgactggagagggtggatgtgcatctggacttggatcttcctttgctcccgtcttcctcatcagagctccagtcactcacwggagccccagaattctgggagatgccaccatctgtggcaaagcttgttcttgttttccgattctgttctgagccacaaggggtttgatgcaatgttctct

SEQ ID NO: 504859 - DNA, 201 bp, Homo sapiens
gatcctcccacctcacctccctaaccagcccccaagtagctgagagtataggtgtgtgccaccatggccagctaattaaaaaaaactttttttgtagcgawggggtctcactatattgccaaggctggtctcaaactcctggcctcaagcagtcctctcaccttggcctcccaaaatgctgggattacaggagtgagccac

SEQ ID NO: 504860 - DNA, 201 bp, Homo sapiens
gtcatatttaaatgatgttaagtgagcattaagtacataaccccaatccccagtgcaattttttcctttttttttttttttttgagatggagtctcgctcrgtcgcccaggctggagtgcagtggtgcaatctcggctcactgcaagctccacctcctgggttcacgccgctctcctgcgtcagcctcccaagtagctggg

SEQ ID NO: 504861 - DNA, 201 bp, Homo sapiens
gctgggcatggtggctcatgcctgtaatcccagcaggttgggaggctgaggtgtgtggatcaggagttcaagacaggcctggccaacatggcaaaaccctktctcttcttaaaaaaaaaatacaaaaattagctgggtgtcgtggtgtatgcccatagtcccagctactcgggaggctgaggcacaagaatcacttgaacc

SEQ ID NO: 504862 - DNA, 201 bp, Homo sapiens
caaaacagtcatttgacttttttatcccacagaattgatcagcaatttgattaagttattggatcaaaaggacaagtgtatacatagtctcaaaactgctyattgaaaagaaaaatattgttcctagaaaaaataacaagattagataggtagtgcaaaacgaactatcatcccaaatgccagtaaaggaggagcattcca

SEQ ID NO: 504863 - DNA, 201 bp, Homo sapiens
ggcaatgttacttttctattaatagctattaacacccaaaaccttggcatcattgcagtctctcatactgacttttcagtcaataaatcctgtcaacaagmctttcagaatctatctagaatctgttcatctctcacatgtccacagcaccactaaaccacaatcccctctcacctggattactgcaatggctcctaaccc

SEQ ID NO: 504864 - DNA, 201 bp, Homo sapiens
catctcactcagagcaaaagctgaagggtggcagaatctgccaccccaacagatatcactttggcataagggttattttgaactaaaggcatttttaaaarcagcaggtgcaagaagggtgttctgaccctctgcgttttcttcccaaaggcaggagggaacctgcctttcataacgcctatatgaaagatatcctccctt

SEQ ID NO: 504865 - DNA, 201 bp, Homo sapiens
acctcactgtaaccttgaactcctgggcttcagggatccttccatctcagcctcccaaatagctagcactacaggcacatgccaccatgcccagctaattaaaaaaaaatgatttttttttggagatagggtcttgctacattgcccaggccagtctcagactcctgggctgaaagaatcctcctgcctcagcctcccaaa

SEQ ID NO: 504866 - DNA, 201 bp, Homo sapiens
cacatttttaacataagttcctttagccctccacttccacgcactaatttcagccttgataccactcttaccaacaggattagaaaatgacatatttgaasgaggctcatttccagggaggtaaagaatctctgaaaacagaggtgaaagtctatagcaaaattttcttccttatttccattaaattgatttgataattat

SEQ ID NO: 504867 - DNA, 201 bp, Homo sapiens
ttttacaattcaagaatacaaataaccccatttttaaaaatgctaaaaggatttagacagatactttaccaaaaaataaatatggatagcaagttaaataygtaaaaagatggtcaacatcattagtcattagagacatgcaaattagaactaaaatgaaatacaactacatacctattaatatggctaaaattacaaaga

SEQ ID NO: 504868 - DNA, 201 bp, Homo sapiens
gataataatacaaaggaagatgaagaaatattcaatgggtagttgaataatgtgaagatcactgttcagaagacagaaaatgatattgtgttaactttacsttctgcaaggacaatttatattatgtatgtgtgttataatttaaagtgtaggcacaattgtagatacagaagaaggagggcaaaacttactgtttaccct

SEQ ID NO: 504869 - DNA, 201 bp, Homo sapiens
gaagacagaaaatgatattgtgttaactttaccttctgcaaggacaatttatattatgtatgtgtgttataatttaaagtgtaggcacaattgtagatacrgaagaaggagggcaaaacttactgtttacccttaaaattttaagacacacaggtaatataaataattatctgccccaccctacaccagtctgcccggtat

SEQ ID NO: 504870 - DNA, 201 bp, Homo sapiens
gatgggctttggttgttagaatgctttgtaccttttgagactgggcctgaagagatttgcagcttacacttgctctttcttggagccctgaatcaccatgsacagagatctggctaccttgggagcggtttagtagggtggctcagatagtttccagttgtttcaccactcccagctgaggcatcagatatgtgagtgaaa

SEQ ID NO: 504871 - DNA, 201 bp, Homo sapiens
atatttccccttcccttaaaactgggccaccctgtgatgggctttggttgttagaatgctttgtaccttttgagactgggcctgaagagatttgcagcttmcacttgctctttcttggagccctgaatcaccatgcacagagatctggctaccttgggagcggtttagtagggtggctcagatagtttccagttgtttcac

SEQ ID NO: 504872 - DNA, 201 bp, Homo sapiens
tacatgtgaaacttaaaagataaaaacaattcaatttctcaatagacagaaacaagtttatgctagacaaccagaaggtgatccagtaactcctatcccaygtgctctttttccatgggatgtcctccatcaagagataaaagatatttccccttcccttaaaactgggccaccctgtgatgggctttggttgttagaatg

SEQ ID NO: 504873 - DNA, 201 bp, Homo sapiens
acatctcaaagaagtggggcttcaccaagttcaatgctgatgaatttgaagacatggtggctgaaaagcggctcatcccagatggctgtggggtcaagtayatccccaatcgtggccctctggacaagtggtgggccctgcactcatgagggcttccaatgtgctgcccccctcttaatactcaccaataaattctacttc

SEQ ID NO: 504874 - DNA, 201 bp, Homo sapiens
aagaagtggggcttcaccaagttcaatgctgatgaatttgaagacatggtggctgaaaagcggctcatcccagatggctgtggggtcaagtatatccccartcgtggccctctggacaagtggtgggccctgcactcatgagggcttccaatgtgctgcccccctcttaatactcaccaataaattctacttcctgtccac

SEQ ID NO: 504875 - DNA, 201 bp, Homo sapiens
acatggtgaaaccccatctccactaaaaatacaaaaaatttctctttcccttcagtgtgccactgaagatcctggtgtcgccatgggccgccgccccgccygttgttaccggtattgtaagaacaagccgtacccaaagtctcgcttctgccgaggtgtccctgatgccaagattcgcatttttgacctggggcggaaaaa

SEQ ID NO: 504876 - DNA, 201 bp, Homo sapiens
ggagctgtcagtggagagtccctgtgagctgcgggaacctgagccctcgcccttctcctctaagaggaccatgtatgagacagaggaggtgagacttggcsccacctcttcccaggaccccctcccgcccaccgcccgggttcctgccgtaggagccacctgtgtggctgtgggccagggcagcacgaccacctggggtgg

SEQ ID NO: 504877 - DNA, 201 bp, Homo sapiens
gatgaaagggaagaggagggcgatggagacaccctggacagtgatgagttctgcatccttgatgctcccggcctgggcatcccggtgcgtggtgggagggrtggaccagtttgccgtccaggcaggtgtgtttggagcggggacggaacactcaggggtggttgcctggccatctggagctcccgtggtgagagaagcagg

SEQ ID NO: 504878 - DNA, 201 bp, Homo sapiens
ttgaggggcagagaccagtgcagctggcatgggaagcaagagcagggtcaggtctggagggagaggcaggtccctgctgggcatagaatagagaaggggtwggggccgggcatggtggctcatgcctgtagtcccagcactttgggaggacgaggcaggcagatcacttgaggccaggagttcgagaccagcctggccaac

SEQ ID NO: 504879 - DNA, 201 bp, Homo sapiens
gcgcagcctacgggagctggcccagccttcaggtgaagtgggggtgctgtggggacagcagacacagtcaggcacccactgtgggcgcctctccaaactgrcctctctcctataggtggccacctccctcaggcgtcgcccatctccgtctacctattcccaggtgaacggagtggggccccacccccttcaccacctgtc

SEQ ID NO: 504880 - DNA, 201 bp, Homo sapiens
gcctggtcccccagtccccacccacctggaactcacctgctccgacctacatggtgagagcccccgagtgacagaacttggggcaagaggcctggcttctrggagagatgggcttggggctatggaaggggcccagtcacaacccgagcagtccctggcccaggcctttaccagctcttggggtcccagcactgcctgtcc

SEQ ID NO: 504881 - DNA, 201 bp, Homo sapiens
tgctgcagctggcaggggtccgcctgcactacgaggagctcccggcacaggtgagcgggctctgattcccacagcccctgtctcctctcccttgagcccaytgagcccctcccatcctttctgaccatctctgactccattttctcaacctttccctcttgtatcctcccgtctcccaggaagagcctccagagcccccct

SEQ ID NO: 504882 - DNA, 201 bp, Homo sapiens
ccgctgtcccgtcaggtgttcatcgtgcaggagctggaggtccgagaccggctcgcctcctcccagatcaacaagttcctgtacctacacacgagtgagcrgatgccgcgacgtgcccactctaacatggtatgagcgacctgcaccatccaccctggggcagggcaccagaccgttggggatacatcttcacgcatgcat

SEQ ID NO: 504883 - DNA, 201 bp, Homo sapiens
aaaattaaccatttgcagtggtgtgtgcctatagtcccagctactcaggaggctgaggcaggagagttgtttgagcccaagaggcagaggttgcagtgagytgagatcgccctattgcattccagcctgggcaacagagtaagactctgtttcaaaaaaaaaaaaaaatgctggaagctggaagcatcctgacatttccag

SEQ ID NO: 504884 - DNA, 201 bp, Homo sapiens
aaggaggtctacgagagcatctacaacaggtggagacccggggccagcagggcgggactggacactgggtgggcctggcctcccttacctgctgtccaccygcctatctcaggatcaacaacgacctgctcatgtgggagcctgcagatctgcttcccacccccgaccccgccgcccagccctcgggcttccccggcccct

SEQ ID NO: 504885 - DNA, 201 bp, Homo sapiens
ttggatgttgacctcttggaacttgtgattaaaacctggaaagggagcaccgagggcaaactggtgagtgaggctgtcactctggctcctggagccacagyaggtgcaggggccaagggagtcttcaggggctgctgctccctcacgtgcctgggctccggacacagttcatgcctgcccttcctgggctgcagttagcgc

SEQ ID NO: 504886 - DNA, 201 bp, Homo sapiens
ctggcctcccttacctgctgtccacccgcctatctcaggatcaacaacgacctgctcatgtgggagcctgcagatctgcttcccacccccgaccccgccgyccagccctcgggcttccccggcccctcaggcttctggcacgacagctttaagatgtgcaagtcagccttcaagctgggtatgagaggtgctaacgctggg

SEQ ID NO: 504887 - DNA, 201 bp, Homo sapiens
aagggaagaggagggcgatggagacaccctggacagtgatgagttctgcatccttgatgctcccggcctgggcatcccggtgcgtggtgggaggggtggamcagtttgccgtccaggcaggtgtgtttggagcggggacggaacactcaggggtggttgcctggccatctggagctcccgtggtgagagaagcaggcagga

SEQ ID NO: 504888 - DNA, 201 bp, Homo sapiens
cagctggagccctctgcaccacagctccctggttctgtcctcaaagctcctcagagtgggcagtctgggtatgacagccctactttatagagaaacagccrcggagaggctaagtgacttgcctgggacctccaagccaggtctcccgaggcccacaggggctcccatgcaggagcgggagtgccccccaggccttcagag

SEQ ID NO: 504889 - DNA, 201 bp, Homo sapiens
gggcatgcgcaaccagattgtccccgacgcccacaaggaccacgccctcaagtggcgctcggacagtgcccaagactgagcctggggtgcccggcacccaragggtgctgcccaccatgctcctgagcctcccaagagctgcagcccacgggcccggcccggcctggcccttcaggggatggccactgtgaaggacgcctt

SEQ ID NO: 504890 - DNA, 201 bp, Homo sapiens
gtgagcgggctctgattcccacagcccctgtctcctctcccttgagcccattgagcccctcccatcctttctgaccatctctgactccattttctcaaccyttccctcttgtatcctcccgtctcccaggaagagcctccagagccccccttgcagatcggcagctgctcagggtacatggagctgatggtgaagttgaag

SEQ ID NO: 504891 - DNA, 201 bp, Homo sapiens
aagcatggcccacctagtaggtagaaaaccatgcagggattaaggtgaagctgaagaatcccttcaaaatataagaagatggagggtgcggtggctcacamctgtaatcccagcactttgggaggctgaggcaggcagatcacaaggtcaggagttcgagaccagcctggccaatatggtgaaaccccgtctctactaaaa

SEQ ID NO: 504892 - DNA, 201 bp, Homo sapiens
ctggacactgtcgtgagggtggagcactctccgggtgatggggaacgtggtgtggccgtcgaggtccgtgtgcagaggtaagggcaggccgatctggggtrgactggtgtgaagatggggagtgggggctgctggatggtccccacccgcagcctaggttcctgggaagaggcagggtggatctggatgggcctcggtggt

SEQ ID NO: 504893 - DNA, 201 bp, Homo sapiens
ctcacaagcagtgtggcctcagccctctctgagctctccctctccgatgtagacctggcctcctctgtgcgcagcgacatggcctcccgccggctctctgyccaggcccacccagctggtgagttggagcaccctgggggtactccagggacaggaaggactggaagaggccttagtgccgtgggctgtcagaggcacaca

SEQ ID NO: 504894 - DNA, 201 bp, Homo sapiens
ccaacttccaggcggacgtggagctgggggccctggaccggctggccgccctactgcgcctggccaccgtacctgctgagcctccagccggcctgctggtragaggcccctgccagggccaggccgggggtgggtgcagggcctgggtccttcggctcttggtcacagtgggaggggctccgacggctgctctgaccccca

SEQ ID NO: 504895 - DNA, 201 bp, Homo sapiens
cccagtggagacggccctcatcaaccagcgtgacctggccgacgccctcctggacaccgagcgcagcctacgggagctggcccagccttcaggtgaagtgrgggtgctgtggggacagcagacacagtcaggcacccactgtgggcgcctctccaaactggcctctctcctataggtggccacctccctcaggcgtcgccc

SEQ ID NO: 504896 - DNA, 201 bp, Homo sapiens
gcctggcccaactcaactgctccgagctgaagctaaagcggctctgttgcaggcacgggtgagtccccagcaccccagcctctctccagggtccctgatcktccttctgttctggtcctgactggttgtgtggccttggccaagtcatcacccttctcagggcctcagtttctcctctgtaaaaaggacgcagttggctgg

SEQ ID NO: 504897 - DNA, 201 bp, Homo sapiens
ggaggctgaggcaggagaactgcttgaacctgggaggcggttgcagtgagccaagatcgcaccacttcactccagcctgggcaacggagcaagactccatytaaaaaaaaaaaaaaaggacacagtccctctgcacatgactgggtgggaccacagggagggtagagtgcccacagtacttgccacaggggtactgagtcc

SEQ ID NO: 504898 - DNA, 201 bp, Homo sapiens
gtgggtgcagggcctgggtccttcggctcttggtcacagtgggaggggctccgacggctgctctgacccccaatcctcctgcagacagagcccctgccggygatggagcagcagacggtatttcggctctctgcaccccgggccacgctgcggctgcgcttccccattgccgacctgcggcctgagcgggacccctgggcg

SEQ ID NO: 504899 - DNA, 201 bp, Homo sapiens
gtatgggcttgcctaccatccacccctcctgctagcctgggctgcagccccggtgtgcggtgggaccccagtgcgcggtgaggccccagtgcacggtgggrctggcctccccactgccctgactgcgcccccaccctcaggagttcctggtgacactgcggttgcacaaagccaccttgcgccactacatggccctgcccg

SEQ ID NO: 504900 - DNA, 201 bp, Homo sapiens
gggcacgggctgaccctacactctccagactggagtactgtgatgaggcagtgcgggacccaagccaggcgccgccggtggacgtgcatcagccgcctgcyttcctgcacaagctgctgcagctggcaggggtccgcctgcactacgaggagctcccggcacaggtgagcgggctctgattcccacagcccctgtctcctc

SEQ ID NO: 504901 - DNA, 201 bp, Homo sapiens
gcagacggtatttcggctctctgcaccccgggccacgctgcggctgcgcttccccattgccgacctgcggcctgagcgggacccctgggcgggccaggccrtgcgggctgagcagcttcggctggagctgagtgagccccagttccggtcagagcttagcagtgggcctggtcccccagtccccacccacctggaactcac

SEQ ID NO: 504902 - DNA, 201 bp, Homo sapiens
agtcccagctactcaggaggctgaggcaggagagttgtttgagcccaagaggcagaggttgcagtgagttgagatcgccctattgcattccagcctgggcracagagtaagactctgtttcaaaaaaaaaaaaaaatgctggaagctggaagcatcctgacatttccaggagcagcagagcctgtgcataaccagcgaccc

SEQ ID NO: 504903 - DNA, 201 bp, Homo sapiens
gcagcagacggtatttcggctctctgcaccccgggccacgctgcggctgcgcttccccattgccgacctgcggcctgagcgggacccctgggcgggccagrccgtgcgggctgagcagcttcggctggagctgagtgagccccagttccggtcagagcttagcagtgggcctggtcccccagtccccacccacctggaact

SEQ ID NO: 504904 - DNA, 201 bp, Homo sapiens
acccacagacctcttcttctccatggctggcctcacaagcagtgtggcctcagccctctctgagctctccctctccgatgtagacctggcctcctctgtgygcagcgacatggcctcccgccggctctctgcccaggcccacccagctggtgagttggagcaccctgggggtactccagggacaggaaggactggaagagg

SEQ ID NO: 504905 - DNA, 201 bp, Homo sapiens
gagcgggctctgattcccacagcccctgtctcctctcccttgagcccattgagcccctcccatcctttctgaccatctctgactccattttctcaaccttyccctcttgtatcctcccgtctcccaggaagagcctccagagccccccttgcagatcggcagctgctcagggtacatggagctgatggtgaagttgaagca

SEQ ID NO: 504906 - DNA, 201 bp, Homo sapiens
tggccggcatcaaccccgtggtcccaggggagacctccgctgagggtgagaggctgggccagggaggggagcgtctgggccttctgcctcccaggacagcmcaggttcccagtcattcctggccccatccccagtctgtgacctcccctcccctagctcgccccgagactcgagcccagcccagcagccccctggaagggc

SEQ ID NO: 504907 - DNA, 201 bp, Homo sapiens
taggccagggctccaggagccgccaacccccagagggcttgagggttgctgagtgcagctggggaagccaggctgtgtgctccttctgcaggatgagggtsggaagcggctggaggctgtgcacggggagctggtgctggacatggagcacggtaccctcttcagcgtctcccagtactgtggccagccaggacttggcta

SEQ ID NO: 504908 - DNA, 201 bp, Homo sapiens
cactggtgacagtgctgaaggggcggatcacagccctctgtgagaccaaggtgagtgcagccccgggcaggcgggccccaaacttcagagctcccattggyggcagagcaagaccagcgcgagcagctccaggtcaagaatgtggagagcaggaggcctgagtgggcagcgccagcccacccacgccagcctgcccaccct

SEQ ID NO: 504909 - DNA, 201 bp, Homo sapiens
tcctcagagtgggcagtctgggtatgacagccctactttatagagaaacagccacggagaggctaagtgacttgcctgggacctccaagccaggtctcccraggcccacaggggctcccatgcaggagcgggagtgccccccaggccttcagagcccactgtgtctcctgctcatggcatgtcttgtaaaggggggtggag

SEQ ID NO: 504910 - DNA, 201 bp, Homo sapiens
ccacttcactccagcctgggcaacggagcaagactccatctaaaaaaaaaaaaaaaggacacagtccctctgcacatgactgggtgggaccacagggaggstagagtgcccacagtacttgccacaggggtactgagtcctcctgaccccacaatccctccatgtgtggctctgcctcaccttctgcctcctcacctccct

SEQ ID NO: 504911 - DNA, 201 bp, Homo sapiens
ttcacgcatgcatggattcacacacatacacgcattcccacacaaacacccaggttgtttgtgagcctgggagaagggcagagctaggggctgtgttagcraagggaacagcgtgttcagaggcagggtggctgggtgagctgtcagggaacagctgggtgagctgctgccccagaggcccagcaggtgtccagaactcac

SEQ ID NO: 504912 - DNA, 201 bp, Homo sapiens
ttggcttggcagggggctcatgagacccctccccagcggccgtggatgactacccgctgcccagtcacctggaccttcccagtttcgctcccccggctcakctggccccaaccatctacccatcggaggaaggggtgaccgagcggggagcctcgggccgcaagggccagggccggggaccccacatgttgtccactgctg

SEQ ID NO: 504913 - DNA, 201 bp, Homo sapiens
ccccttaccaacccccttctcaacctggataacactggtgggtgtggggtcagaccgtggttggaggggcagctagtgtgggtgcagcagcctaggggctrgggtcggctgtccctgacactcctcacttcacccacagacctcttcttctccatggctggcctcacaagcagtgtggcctcagccctctctgagctctcc

SEQ ID NO: 504914 - DNA, 201 bp, Homo sapiens
gcgctctgcgcggaggctgcgcaggggccagcagcctgccgacctgcgggagggtgtggccaaggcctacgacacagtgcgagaggtgaccaggcccccgycctgccccagtcccccatgcccatctcctcacacagaccccgccctgacctctggcttccacagggcatcttggatacagctcagaccatctgtgacgtg

SEQ ID NO: 504915 - DNA, 201 bp, Homo sapiens
cagcaccccagcctctctccagggtccctgatcttccttctgttctggtcctgactggttgtgtggccttggccaagtcatcacccttctcagggcctcartttctcctctgtaaaaaggacgcagttggctgggcatgatggctcacacattcaggcattcgagaccagcctgaccaacatggtgaaacccccccgtctc

SEQ ID NO: 504916 - DNA, 201 bp, Homo sapiens
agcccttagaacagcacaggtgtgccatcagcactgtatctgtacggctatcatgcatccccagtagagaagggctcctatgaatgaatgaatgatgaacracaggagggcaggactgagaccagagacaggccccagccagcgtctctaagatgactctcctgctctttccacctcaccctgtccagatggtgatccctg

SEQ ID NO: 504917 - DNA, 201 bp, Homo sapiens
ccagggaggggagcgtctgggccttctgcctcccaggacagcacaggttcccagtcattcctggccccatccccagtctgtgacctcccctcccctagctygccccgagactcgagcccagcccagcagccccctggaagggcaggccgaaggcgtagagaccactggttcgcaggaggccccaggaggtggacacagccc

SEQ ID NO: 504918 - DNA, 201 bp, Homo sapiens
gagcccctgccggcgatggagcagcagacggtatttcggctctctgcaccccgggccacgctgcggctgcgcttccccattgccgacctgcggcctgagcsggacccctgggcgggccaggccgtgcgggctgagcagcttcggctggagctgagtgagccccagttccggtcagagcttagcagtgggcctggtccccca

SEQ ID NO: 504919 - DNA, 201 bp, Homo sapiens
tgtttattgagagcttattgtgtgtgggtgctaggctgggtgctttatcacatcctgtccttccagcaccctgaggagggttcagttgagcctgggcagarggcctggtctactggaggcaccagtgtcacccctgcctgaccaagccttctgccagagccacatggtggggcagacctggcctcccaacccccagcctgg

SEQ ID NO: 504920 - DNA, 201 bp, Homo sapiens
gggtccccaggcccctggggagggggtgagtaccccatctcaagactcctcctcctcagcaaggctgattatctacagcccacagtggggatgtcaagtgsgggatttacttccttcttggcagctaaagaaactgaggctgtaggccaggcacagggttcacacctgtaatcccagcactttgggaggccaaggtgggtg

SEQ ID NO: 504921 - DNA, 201 bp, Homo sapiens
ccaggcctggggtggccagggcacgggctgaccctacactctccagactggagtactgtgatgaggcagtgcgggacccaagccaggcgccgccggtggaygtgcatcagccgcctgccttcctgcacaagctgctgcagctggcaggggtccgcctgcactacgaggagctcccggcacaggtgagcgggctctgattcc

SEQ ID NO: 504922 - DNA, 201 bp, Homo sapiens
gagggcaaactggtgagtgaggctgtcactctggctcctggagccacagcaggtgcaggggccaagggagtcttcaggggctgctgctccctcacgtgccygggctccggacacagttcatgcctgcccttcctgggctgcagttagcgcccctcctgcaaagggccatagtacagccctggtgggggtgtcccttgatgc

SEQ ID NO: 504923 - DNA, 201 bp, Homo sapiens
gatcaacacctcgtgtgcctgggtcgctgcctacttcctgcttttgggagagtgggatgggccaagtgggtgtctagggagggactggatggcccccaccyacatctcccaccgacccccccggctcagtgtccctgcctggagggaggccctggaggaaaggtggggagatctggcttcaagccgggaggaggccaaggg

SEQ ID NO: 504924 - DNA, 201 bp, Homo sapiens
cagagtttagtttggtagccagcatcctgctttcccagggcgagggcaggcgggtggtagctcttagaggagctgggtggtgggcctaggctccatggctrcctccttggcccccagttggaggtggcgggacagctgggctccctgcacctgctcctgaccccgaggcagctccagcaacttcaggaactgctcagcgcc

SEQ ID NO: 504925 - DNA, 201 bp, Homo sapiens
aggtgtaaggtcagaggcttgaggctgggaacggtgaggagccctgactcacagctcagctgacctggggagctttgaaggagccaccaattagaggcgcrtcctggtcgatccaccaggtccagagcagcaggggtgggcatggaggcagggacttctcagttttgtggctggactcagggggctgctaatctgggcaga

SEQ ID NO: 504926 - DNA, 201 bp, Homo sapiens
aggggagcgtctgggccttctgcctcccaggacagcacaggttcccagtcattcctggccccatccccagtctgtgacctcccctcccctagctcgccccragactcgagcccagcccagcagccccctggaagggcaggccgaaggcgtagagaccactggttcgcaggaggccccaggaggtggacacagcccctcccc

SEQ ID NO: 504927 - DNA, 201 bp, Homo sapiens
gtgtctaggtttggaagccctcgaaactgcttttacccttgggcaacctagaagctgccattgggaataagaggaggaggtgggggcagggcagcctcggktgtctctgagcgctccttccccctagtccaagggttccgggacctgctgtggctgcccattgagcagtacaggaaggatggccgcctcatgcgggggctg

SEQ ID NO: 504928 - DNA, 201 bp, Homo sapiens
ccctcctgctagcctgggctgcagccccggtgtgcggtgggaccccagtgcgcggtgaggccccagtgcacggtggggctggcctccccactgccctgacygcgcccccaccctcaggagttcctggtgacactgcggttgcacaaagccaccttgcgccactacatggccctgcccgagcagagctggcattcccaggtg

SEQ ID NO: 504929 - DNA, 201 bp, Homo sapiens
ataaccagcccctcctccctcccagctcagcctgcaggccccgccttgaaggcccccaaagaaactgagtatctggggcctctgaagtggcatgaaaagaragaggcccgcatcccagtctcagtccctgttgtatactgggtgactagattagtcctgtctctaggcctcagtttcccgagctgtgggtctctgggtgag

SEQ ID NO: 504930 - DNA, 201 bp, Homo sapiens
gctacttgggaggctgaggcaggagaatcacttgaatctgggaggcggaggttacggtgagcgaagattgcgccactgcactccagcctgggtgacagagygagactccgtctcaaataaatacatagatagatagatagatagatagatagatagatagatagatagataaataaaaaatatagaaagatgccacagtac

SEQ ID NO: 504931 - DNA, 201 bp, Homo sapiens
actgctgtgcgcatccacctggacccccacaagaatgtgaaggtatgggcttgcctaccatccacccctcctgctagcctgggctgcagccccggtgtgcrgtgggaccccagtgcgcggtgaggccccagtgcacggtggggctggcctccccactgccctgactgcgcccccaccctcaggagttcctggtgacactgc

SEQ ID NO: 504932 - DNA, 201 bp, Homo sapiens
tgaggctccctgcggcaggatcgggctgggggatcaggcaccgggcgtagagaggccaggggaatcttgccctctcccaggcgtcagaggcaccccggctrgcctcttcagttccttaccagagccagaaactgagcgggaaggggtttctgtctccacgggaggagaaactgaggctggagagggcaagatcacctgtct

SEQ ID NO: 504933 - DNA, 201 bp, Homo sapiens
ccagtcattcctggccccatccccagtctgtgacctcccctcccctagctcgccccgagactcgagcccagcccagcagccccctggaagggcaggccgarggcgtagagaccactggttcgcaggaggccccaggaggtggacacagcccctcccctcctgaccagcagcccatctacttcaggtaggctgctggactgc

SEQ ID NO: 504934 - DNA, 201 bp, Homo sapiens
agcgctccttccccctagtccaagggttccgggacctgctgtggctgcccattgagcagtacaggaaggatggccgcctcatgcgggggctgcagcgaggrgctgcctcctttggctcatccacagcctctgccgccctggaactcagcaaccggttggtacaggctatccaggtgagtgggtgccctgtatctgggctgt

SEQ ID NO: 504935 - DNA, 201 bp, Homo sapiens
ggaggcagaggttgcagtgaactgtgattgtgccactgcactccagcctgggtgaccgaacatgacccgaccctgtctataaaaaaaaaaaaatgaaaaaraagtgaggccaggttgctggggctgggggcagctgggctggatcgaacatctgtgtcacacgtctacctggcctccctgcagccccgagatggggagcct

SEQ ID NO: 504936 - DNA, 201 bp, Homo sapiens
cccgccctgacctctggcttccacagggcatcttggatacagctcagaccatctgtgacgtggcatcgcggggccatgagcagaaggggctgacgggcgcygtggggggcgtgatccgccagctgcccccgactgtggtgaagccgctcatcctggccacggaggccacgtccagcctgctcgggggcatgcgcaaccaga

SEQ ID NO: 504937 - DNA, 201 bp, Homo sapiens
tgacctttcctggtacgctgggctcccaggcctcagctcggccctgcgcccatctgcgccacacacagatcctgcgccgtgtgcctaaggtaacccacccrctccaggccaccaggctgtccccatggcgtgttgaccccaccctggcctctgccagggcctcctctgctgcccagccctgtccctcttcccctgtgctcc

SEQ ID NO: 504938 - DNA, 201 bp, Homo sapiens
cccctcccctagctcgccccgagactcgagcccagcccagcagccccctggaagggcaggccgaaggcgtagagaccactggttcgcaggaggccccaggmggtggacacagcccctcccctcctgaccagcagcccatctacttcaggtaggctgctggactgcgggtggggggccctgggccagattgctgggggccag

SEQ ID NO: 504939 - DNA, 201 bp, Homo sapiens
tcagtgggggcatcaggtggcccacaggccgctgcccctgaggccccaagtcttcacttgcagagcaccttctctacactggtgacagtgctgaaggggcrgatcacagccctctgtgagaccaaggtgagtgcagccccgggcaggcgggccccaaacttcagagctcccattggcggcagagcaagaccagcgcgagca

SEQ ID NO: 504940 - DNA, 201 bp, Homo sapiens
cggagggtgggagcgcagcgacctgaggctccctgcggcaggatcgggctgggggatcaggcaccgggcgtagagaggccaggggaatcttgccctctcccaggcgtcagaggcaccccggctagcctcttcagttccttaccagagccagaaactgagcgggaaggggtttctgtctccacgggaggagaaactgaggct

SEQ ID NO: 504941 - DNA, 201 bp, Homo sapiens
cgacctgaggctccctgcggcaggatcgggctgggggatcaggcaccgggcgtagagaggccaggggaatcttgccctctcccaggcgtcagaggcacccyggctagcctcttcagttccttaccagagccagaaactgagcgggaaggggtttctgtctccacgggaggagaaactgaggctggagagggcaagatcacc

SEQ ID NO: 504942 - DNA, 201 bp, Homo sapiens
cccagtcacctggaccttcccagtttcgctcccccggctcagctggccccaaccatctacccatcggaggaaggggtgaccgagcggggagcctcgggccrcaagggccagggccggggaccccacatgttgtccactgctgtgcgcatccacctggacccccacaagaatgtgaaggtatgggcttgcctaccatccacc

SEQ ID NO: 504943 - DNA, 201 bp, Homo sapiens
agatgggaaattctgcctcccctttgctgctctacctgacctgagacccctccccaactcctcagtgcttcggaggatcaaagtgaccttcctggacactrtcgtgagggtggagcactctccgggtgatggggaacgtggtgtggccgtcgaggtccgtgtgcagaggtaagggcaggccgatctggggtggactggtgt

SEQ ID NO: 504944 - DNA, 201 bp, Homo sapiens
ctgtctgcatgtccctcgccagctctacaggcagcacggatgacacaagcgtggagatgatggctgcatccaggctgcacatggcgccaaagcacttgagragcagcagccgcagtgatgctcggtgttcctggcagggaaccctgcgtgctcagtgcctggaactcccccactatctaggtctctccattacccctcccc

SEQ ID NO: 504945 - DNA, 201 bp, Homo sapiens
catgccccccaccattttgtttcagtttccacacagtgacccccgctgctgcagccacctccaggcaccttgtctcctggtgacaggtctgcgatgtgccrcacagtgatgtcaatgagagccatcatgtctgtgtggtagaagatggcagctgtggccgggctgccaaacacgtcctgcaggaacttgaggacagagtgt

SEQ ID NO: 504946 - DNA, 201 bp, Homo sapiens
atggcaggaacaccctccagatagcaggaagttccctcctaccccgccctccagcctcaccctgcgtgtctgtctgcatgtccctcgccagctctacaggyagcacggatgacacaagcgtggagatgatggctgcatccaggctgcacatggcgccaaagcacttgaggagcagcagccgcagtgatgctcggtgttcct

SEQ ID NO: 504947 - DNA, 201 bp, Homo sapiens
ggaggctgagacagaattacttgacccctcatcctggggttggccttatgcatgtgcagcttatggctcagcacatatgccaaagacacggtgccagcacttttttttttttttttgagttggggtctcactctcacccaggctggagtgcagtggtgcaattgctcctgagcataagtgattcttccacctcagcctccc

SEQ ID NO: 504948 - DNA, 201 bp, Homo sapiens
gattccatctgaaaaaaaaaaaaaaaaaaaaaagcgggggctgggcgcggtggctcacacctgtaatcccagcactttgggagcctgagacaggtggatcrtctgagatcaggagttcgagaccagcctgaccaacatggtgaaaccccgtctctactaaaaatacaaaaattagctggatgtggtggtgggcacctgtaa

SEQ ID NO: 504949 - DNA, 201 bp, Homo sapiens
cacaaaacctgacaccacggaggcagacaggcaggggctctgccggggaagggtgttggagtcccaaaggaggcgtctgagtcaccttcgcaacctgggamgccttcttgcataagatgcctgagcagtgccttgaatgaccaaggggagatccgcatctgcaaaggaagggcagggagggatagggattgggggtgggca

SEQ ID NO: 504950 - DNA, 201 bp, Homo sapiens
caggaggttaagggttgcagtgagccaagatcacaccactgcactccagcctgggtgacagaacacgattccatctgaaaaaaaaaaaaaaaaaaaaaagsgggggctgggcgcggtggctcacacctgtaatcccagcactttgggagcctgagacaggtggatcgtctgagatcaggagttcgagaccagcctgaccaa

SEQ ID NO: 504951 - DNA, 201 bp, Homo sapiens
cccagggcagagaaccaatatagcgaaagcctggaatgctagacatagcacaaaaagttgaaccagaatatggaatggggttctcaaactgtatcactcasggagctgaggcacagggtgacccccatgctgccacattacatattaggtcctgatcaggattttaccccacagcaaggctcttggctaagatgtttctga

SEQ ID NO: 504952 - DNA, 201 bp, Homo sapiens
gtagtaaccaggccaggcgtggtggcttatgcgtgtaatcccagcattttgggaggcggaggtgagtgggtcacctgaggtcaggagttcaagaccagcckggccaacatggcgaaatcccatctgtactgaaaatacaggaattagccgggtgtggtggcaggcgcctgtaataccagctactggggaggctgaggcagg

SEQ ID NO: 504953 - DNA, 201 bp, Homo sapiens
gggaggtgccattcccccaccacccttgccaaccctcgcatttcccaggcccacctgccccatgacactcattgaagaaccccaccccaccatgctcaccrggaggtcccacttcactcccctcaacactcactggaggactccacgctgttccaggctgtacttgccaccatcccgcatggctgtgttgtgtacagcctc

SEQ ID NO: 504954 - DNA, 201 bp, Homo sapiens
tgagttcttctcaactctacccaaacactcccctttcttggggtggcttaatgctctgtctcattgcccttcctactgcctacccacatatcacatctacyaaccttccacgcagccatagacgtgttctatcaaagacagttccctccccaagaggacttctctgactaatcataatctgcctttggttgtaattttgtg

SEQ ID NO: 504955 - DNA, 201 bp, Homo sapiens
cctctgtaagccctgggagctgagaatgggtcaaagggacttgccctccccaaccctgctgctggccctcatccccacaagatgtctcagtaagcttccaracccaccctgggaagcagttctgtgtttgtggcaaaggataaacatgagagaggggcctagcccctgttccaggctctgtactgccatccccaacattcc

SEQ ID NO: 504956 - DNA, 201 bp, Homo sapiens
ggtactggtacgaggataggaagactaaaggaacgaaatccagagacaggcctgaagatgtgtggaaacttgaattttgacaagggtggttcttcagagcyaacatgaagaaagggttgttttcttttttttgtttccccaggagcaactctattaactgaaagaataggcttttcaataaatgatgctgggtcagttgga

SEQ ID NO: 504957 - DNA, 201 bp, Homo sapiens
gtgtcccggattttggtctgaaattttggtgcccatgagcgttctcatagctctgggagggggtactgtgtgaaatcctggggtagaggggacgatggctrgagaggggtctggggtgccagcaccccgaacaatagctttaactatcccatcagctagttttatgaaacatgtcgcgaccacctgcttgtttggatcgcc

SEQ ID NO: 504958 - DNA, 201 bp, Homo sapiens
tgcaaacttcagggtctgcatcagtctacagaaatgaggaagtgagagcatcagccaccatgagcggagctgtgcagccgcacaagagagggctgagcacrtatgtgtaggggagactcctagcactgtgagggatgctacagggtgggggccactgttccccatgtggggtatgtgtgtgggaccccacccttaccagaa

SEQ ID NO: 504959 - DNA, 201 bp, Homo sapiens
cgcccctcgtccgtcacgaccgcatgccttaaccccttgaagggactgacacagaaactcagtcctccccccaccctcggtgcattccagctctccctgcstaactcctggcacgcgccggtctcgccaggccaatgggtggacctggcgcaacagacgtcacgagaggagcggaggcgaggggtgaacgcggagcactcc

SEQ ID NO: 504960 - DNA, 201 bp, Homo sapiens
gggggggacaaggcaggcagtcagagtccccaaagatggcaggaaaccccagcagatggcaggaacaccctccagatagcaggaagttccctcctaccccrccctccagcctcaccctgcgtgtctgtctgcatgtccctcgccagctctacaggcagcacggatgacacaagcgtggagatgatggctgcatccaggctg

SEQ ID NO: 504961 - DNA, 201 bp, Homo sapiens
ctgccaaacacgtcctgcaggaacttgaggacagagtgtggtggctgtggctcatgtttgaagatgcgcacagggtcatctaggaggcaggggtcatagcrgtcagggtggaccttgtggggatcccagagtcaccccagggggttacgggagtcattgcaggggtcatggagtcacagggcatggaagtggtacccgcgc

SEQ ID NO: 504962 - DNA, 201 bp, Homo sapiens
tgggtgctgctcggcgaggctgtggtgggatctgggaagatggaagtgggatctggaagatggaagtaggatcttggaggacagactgacatctagagcgycagcgaggctcgggccctgagccctggctgtgggcaggactatggctctgggccgcatcactcctgagtggaccccttgagcctctggatgaagcctcaa

SEQ ID NO: 504963 - DNA, 201 bp, Homo sapiens
gtgggtgctgctcggcgaggctgtggtgggatctgggaagatggaagtgggatctggaagatggaagtaggatcttggaggacagactgacatctagagcrccagcgaggctcgggccctgagccctggctgtgggcaggactatggctctgggccgcatcactcctgagtggaccccttgagcctctggatgaagcctca

SEQ ID NO: 504964 - DNA, 201 bp, Homo sapiens
tctgggggtaggagtgaagggcagcgacccccatgtgcgggtggaggggaggacatgagcagcactcactgcaaagctaaggcaaagaatagagctggtgrgagatgcctcccctcaccccaggggcatggcttgctgaggcccaggatacagaccaggaggggtggggatgggggtctggtccagcctggagcggcagca

SEQ ID NO: 504965 - DNA, 201 bp, Homo sapiens
ggctgaggtagcagaatggcgtgaacctgggaggtgcagcttgcagtgagcctaaattgcgccactgcactccagcctgggtaacagagcgagactccgtytcaaaaaaaaaaaaaaaaattagctgggcatgctgttgtgcacctgcaatcccagctactctggaggatgaggcagaagtgcctgaacctgggacacaga

SEQ ID NO: 504966 - DNA, 201 bp, Homo sapiens
ttgccccaaaatgggagtcctgtcctcttccccagcttagagcctccatttccctgacacaggcagcacaaccattccaagcatagggtgcctccacctgmattcccctaaccctgccttcttaccactcccagaggccatcagggcctcgcggtctcggcgcttcactggtgggggcggtgtggtgggtgctgctcggcg

SEQ ID NO: 504967 - DNA, 201 bp, Homo sapiens
cccatgtctcttactgccaaggtcagcaaggcactaccctcacccacgccgtgtccattccttccctgcagccagacagaactcttggccacccgcatgtsgtcttatctgtcacctgccccaggtctcacctcctcctacagcacccactccctcactccctgtgttccagtcctgcaggccttgttccacttcctccca

SEQ ID NO: 504968 - DNA, 201 bp, Homo sapiens
ctgtaatccgcccacctcggcctcccaaagtgctgggattacaggcgtgagccactgcacctggccaagagaagatcttaaaggtgactttaagcaaactttttttttttttttttttacagagacgggagctggagtgcagtggctgttcacaagcgtgaaagcaaagattaaaaaatttgtttttatattaaaaaagtt

SEQ ID NO: 504969 - DNA, 201 bp, Homo sapiens
cacccatgtctcttactgccaaggtcagcaaggcactaccctcacccacgccgtgtccattccttccctgcagccagacagaactcttggccacccgcatstcgtcttatctgtcacctgccccaggtctcacctcctcctacagcacccactccctcactccctgtgttccagtcctgcaggccttgttccacttcctcc

SEQ ID NO: 504970 - DNA, 201 bp, Homo sapiens
ggttgcagtgagccaagatcacaccactgcactccagcctgggtgacagaacacgattccatctgaaaaaaaaaaaaaaaaaaaaaagcgggggctgggcrcggtggctcacacctgtaatcccagcactttgggagcctgagacaggtggatcgtctgagatcaggagttcgagaccagcctgaccaacatggtgaaacc

SEQ ID NO: 504971 - DNA, 201 bp, Homo sapiens
ccccatcatgtatgctgggctcactgcccccatcctgctcatgagtgccaaggatcccacccatcccatgatgcccacacacctcactccctctcatccawgtcagcacctaggactccatcccagctctcccagcacccatgtctcttactgccaaggtcagcaaggcactaccctcacccacgccgtgtccattccttc

SEQ ID NO: 504972 - DNA, 201 bp, Homo sapiens
agatagcaggaagttccctcctaccccgccctccagcctcaccctgcgtgtctgtctgcatgtccctcgccagctctacaggcagcacggatgacacaagygtggagatgatggctgcatccaggctgcacatggcgccaaagcacttgaggagcagcagccgcagtgatgctcggtgttcctggcagggaaccctgcgtg

SEQ ID NO: 504973 - DNA, 201 bp, Homo sapiens
ttgaaggttttctcatgttcttacctttagaaagagcactgttgccgattcaaaagcacaggcctgaaatatggtgtcctctttgcttcttgtctcccacrtacctcatatccaagccatgtctaagacctggccatcctacctcctacatatgccccaaattcatctccaacagcctctcctccaacctatactcccaac

SEQ ID NO: 504974 - DNA, 201 bp, Homo sapiens
gctactcgggaagctgaagtgggaggactgcttgagcacaggagttggacatcagccttgaaaagatagtgagactcaatctagaaaacagaaacaacacytctgactggtgtctgcctgtgggtttctgactctgctcccaaacttatggtgagaacttctttgctaacttgagagtctgcaagagtgaagtttttgcca

SEQ ID NO: 504975 - DNA, 201 bp, Homo sapiens
tgccccaaattcatctccaacagcctctcctccaacctatactcccaacacctctggctgaaccagttccaacagcccttatgatctatatatatatatcwtatatatatatatatatgatatatatatatatatatatcatttttttttttgagacagggtctcgtgctgtcacccaggctggagtgcagtggcatgatc

SEQ ID NO: 504976 - DNA, 201 bp, Homo sapiens
cctctcctccaacctatactcccaacacctctggctgaaccagttccaacagcccttatgatctatatatatatatcatatatatatatatatatgatatwtatatatatatatatcatttttttttttgagacagggtctcgtgctgtcacccaggctggagtgcagtggcatgatcttggctcactgcaacctctgact

SEQ ID NO: 504977 - DNA, 201 bp, Homo sapiens
ccccagggctgtggacctgaacatcagggctgcatccccagcacccacaatatacctggcacagaattggtcttcaatagtttttgagtaagcgaataaaygaatcatcccagccacagacagccccaagtatgtggcctgcccagggaagtcctgcccatcctttgaagctgggtctctcaaggtgcctctgtctatcag

SEQ ID NO: 504978 - DNA, 201 bp, Homo sapiens
cagcgtctaagctatagacaaatgcagagccatgtgcaggcctgaatgtcattcaccaccgcaaacctcaaacggacacacagcactgcctgagcctcccrctgcttttctctgctgtgtcactctcccttagagtagtaataatgtccaccttctctgtctttgaaacctacctaccttgtcagctggccttgtgcttca

SEQ ID NO: 504979 - DNA, 201 bp, Homo sapiens
actgcttttctctgctgtgtcactctcccttagagtagtaataatgtccaccttctctgtctttgaaacctacctaccttgtcagctggccttgtgcttcatagagaatacagaagtaatcttgcagaaacccgtctttcccctcagtacccacatctcacctgtccctaccagaatgagcagccctagctcctgtccatg

SEQ ID NO: 504980 - DNA, 201 bp, Homo sapiens
ctgcttttctctgctgtgtcactctcccttagagtagtaataatgtccaccttctctgtctttgaaacctacctaccttgtcagctggccttgtgcttcatagagaatacagaagtaatcttgcagaaacccgtctttcccctcagtacccacatctcacctgtccctaccagaatgagcagccctagctcctgtccatgt

SEQ ID NO: 504981 - DNA, 201 bp, Homo sapiens
ctgctcggcgaggctgtggtgggatctgggaagatggaagtgggatctggaagatggaagtaggatcttggaggacagactgacatctagagcgccagcgrggctcgggccctgagccctggctgtgggcaggactatggctctgggccgcatcactcctgagtggaccccttgagcctctggatgaagcctcaagttcca

SEQ ID NO: 504982 - DNA, 201 bp, Homo sapiens
caccggaagtgtgaggctttaagtgaggatgtgtgaggcatcccacctcctacaccacaccaacagcatgacctctctctctgtttcaggactcatatccrggctcaaatatccagtgtctcaacaaaacaagaatgcaccttccactgcaggcctgggatacggtaactccttatttctctggggtagggtggactggcc

SEQ ID NO: 504983 - DNA, 201 bp, Homo sapiens
aacaaaactaaagataaaatgttgcctgcgatttattcggctaagagaagtacaccagacatggtttgttgggatgcttctgaccccatttactggtcacrgtactcaatttatttagggttttattttttatcctgtaatttgagtctttgattgtgaagaggtacttaattataatttgccacaagaataattgtggta

SEQ ID NO: 504984 - DNA, 201 bp, Homo sapiens
ccgggctactttttatattttcctcaaagatgatcaataaaaatgctgaacaggatagcaccaagaatagaaccttatattgcattgggaatctcttcagrtgacactcagctgtttatttgcactatctgagtacagtctttctgtcagtatggatgagtgtgctaggggagtggtcgtgggcagagggtgaagaaaagc

SEQ ID NO: 504985 - DNA, 201 bp, Homo sapiens
gtgtgaggctttaagtgaggatgtgtgaggcatcccacctcctacaccacaccaacagcatgacctctctctctgtttcaggactcatatccaggctcaamtatccagtgtctcaacaaaacaagaatgcaccttccactgcaggcctgggatacggtaactccttatttctctggggtagggtggactggccagttgcaa

SEQ ID NO: 504986 - DNA, 201 bp, Homo sapiens
ctctgtcttgttttgtcctttggggtcccttcactatcaagttcaactgtgtgtccctgagactcctctgccccggaggacaggagactcgaaaaacgctyttcctggccagtctctttgctctgtgtctgccagcccccagcatctctcctctttcctgtaagcccctctccctgtgctgactgtcttcatagtacttta

SEQ ID NO: 504987 - DNA, 201 bp, Homo sapiens
aatttggggtagtgaagtatgggaaatggagaggccagtacgacgtggccatcaagatgatcaaagaaggctccatgtctgaagatgaattcattgaagamgccaaagtcatgatgtgagttatagcccaaactcaactctcaatctatttgctggagtctaggaattcacacaacaacccactgaggcttaaagatgact

SEQ ID NO: 504988 - DNA, 201 bp, Homo sapiens
aatagggatacatgggtcaatgaagcctttagaaaaagaaatactaagaggcagattctctgagaacatggtaaaagctcacgctccacgttatgaagttracctttgtgagctagggaaaggcctggctaggccagggtgtaggctacctgccttgagctgtaccaggccaaatgtcgccagggtcagagctggcttatt

SEQ ID NO: 504989 - DNA, 201 bp, Homo sapiens
agggagatgcgccaccgcttccagactcagcagctgctagagatgtgcaaggatgtctgtgaagccatggaatacctggagtcaaagcagttccttcaccragacctggtgggaccttagaaggattggcctaggacaaagggctgatggggtggaagtagcagtggaagatatatcatacatggttgaggggggctgctg

SEQ ID NO: 504990 - DNA, 201 bp, Homo sapiens
gagggagatgcgccaccgcttccagactcagcagctgctagagatgtgcaaggatgtctgtgaagccatggaatacctggagtcaaagcagttccttcacygagacctggtgggaccttagaaggattggcctaggacaaagggctgatggggtggaagtagcagtggaagatatatcatacatggttgaggggggctgct

SEQ ID NO: 504991 - DNA, 201 bp, Homo sapiens
ggagatgcgccaccgcttccagactcagcagctgctagagatgtgcaaggatgtctgtgaagccatggaatacctggagtcaaagcagttccttcaccgavacctggtgggaccttagaaggattggcctaggacaaagggctgatggggtggaagtagcagtggaagatatatcatacatggttgaggggggctgctggt

SEQ ID NO: 504992 - DNA, 201 bp, Homo sapiens
aaaagagcaatgcatcaaccaataaccattttttcttatttcattacagagaagaggtgaagagtccagtgaaatggagcaaatttcaatcattgaaaggktcccttatcccttccaggtgagttattttctctcaccaaatctcgaaaggcccctgtaacacaattagaaggggtggtggggtgcagggcagagggaagg

SEQ ID NO: 504993 - DNA, 201 bp, Homo sapiens
cctaagattagtactttcaaggtctttctccttttttctgaatcctaactgctgaagtctgtgttttcatcgacccaggttgtatatgatgaagggcctckctacgtcttctccccaactgaagaactaaggaagcggtggattcaccagctcaaaaacggtgagaattatttggaaaataaatgtttccaaagaaagaag

SEQ ID NO: 504994 - DNA, 201 bp, Homo sapiens
atgaaaaattctaagagcttttaaacgctacattcctagatatgaagagttcaggaatccttcagatagttcacataacctgaacaccattgctgactgargattctgcctttctttgttttctacaataaatatacaaattgtcccctaagattagtactttcaaggtctttctccttttttctgaatcctaactgctga

SEQ ID NO: 504995 - DNA, 201 bp, Homo sapiens
gccactaccgcctgagccagcagcagcaccagtctccacaagtgagctgaaaaaggttgtggccctttatgattacatgccaatgaatgcaaatgatctayagctgcggaagggtgatgaatattttatcttggaggaaagcaacttaccatggtggagagcacgagataaaaatgggtgagtccacaccagcccttcctg

SEQ ID NO: 504996 - DNA, 201 bp, Homo sapiens
aaggggagaaaagaaagagagagggaggggaggagggagacaggaaggaaggaagcaaggaaagaaggaaggggatgagggaggaaagaaagacaaataamaaagaaacaaaggaaagtttgtattttgtttcaatattagtaatacaattgagcttagtattccatcatatgaataaaagataaaatattagactaagag

SEQ ID NO: 504997 - DNA, 201 bp, Homo sapiens
ctttattgctattatgcagagccaaaaggagaagactagttccttgcctttcctgtaggaatctttcccatgagaagctggtgcagttgtatggcgtctgmaccaagcagcgccccatcttcatcatcactgagtacatggccaatggctgcctcctgaactacctgagggagatgcgccaccgcttccagactcagcagc

SEQ ID NO: 504998 - DNA, 201 bp, Homo sapiens
aatggtaattcatgccacatctacctctggggttgttgtaaggatcaaatgaagtaataatacatgtaaaagcacatggaaaactgtaaatcactgtataygaaagcactgtacatctctttgttgtggataaatatttcccaaggaaatatttcatattccttgctttgtgaggacctaaacttgaacagtttcagcatt

SEQ ID NO: 504999 - DNA, 201 bp, Homo sapiens
agctatggccgcagtgattctggagagcatctttctgaagcgatcccaacagaaaaagaaaacatcacctctaaacttcaagaagcgcctgtttctcttgmccgtgcacaaactctcctactatgagtatgactttgaacgtggggtaagtttctcgactatgaaaactgagtttcaagatatcaaggacttggccttaga

SEQ ID NO: 505000 - DNA, 201 bp, Homo sapiens
  misc_feature (1)...(201): n = A,T,C or G
ctccagaaagaagaagctatggccgcagtgattctggagagcatctttctgaagcgatcccaacagaaaaagaaaacatcacctctaaacttcaagaagcncctgtttctcttgaccgtgcacaaactctcctactatgagtatgactttgaacgtggggtaagtttctcgactatgaaaactgagtttcaagatatcaag

SEQ ID NO: 505001 - DNA, 201 bp, Homo sapiens
tgtattaaccatatgaggcagttatcttgtcatccccattttacagataagaaagctgaggtacagagaggttaagtaacttgcccaaaggccctcggttrgtaaatggcagggtcaggctttgaattcaggccccagactccatgtcctgaaccaatatactatctccagccacagaaatatttgcagagactgggataa

SEQ ID NO: 505002 - DNA, 201 bp, Homo sapiens
tatcaacagcacacaggtgaactccagaaagaagaagctatggccgcagtgattctggagagcatctttctgaagcgatcccaacagaaaaagaaaacatmacctctaaacttcaagaagcgcctgtttctcttgaccgtgcacaaactctcctactatgagtatgactttgaacgtggggtaagtttctcgactatgaaa

SEQ ID NO: 505003 - DNA, 201 bp, Homo sapiens; identical to SEQ ID NO: 276010

SEQ ID NO: 505004 - DNA, 201 bp, Homo sapiens
aaatgttgcctgcgatttattcggctaagagaagtacaccagacatggtttgttgggatgcttctgaccccatttactggtcacagtactcaatttatttwgggttttattttttatcctgtaatttgagtctttgattgtgaagaggtacttaattataatttgccacaagaataattgtggtatgattacagggctctc

SEQ ID NO: 505005 - DNA, 201 bp, Homo sapiens; identical to SEQ ID NO: 276012

SEQ ID NO: 505006 - DNA, 201 bp, Homo sapiens; identical to SEQ ID NO: 276013

SEQ ID NO: 505007 - DNA, 201 bp, Homo sapiens; identical to SEQ ID NO: 276014

SEQ ID NO: 505008 - DNA, 201 bp, Homo sapiens; identical to SEQ ID NO: 276015

SEQ ID NO: 505009 - DNA, 201 bp, Homo sapiens
agtgctggatctcagtatttgctataatttttactctgcctcagacctgccaatgtcccccagagggcctacctagagcaaataatatgacatttagaatraaagtgattggtgaccccaatcaagacatccttggataagttgcccagactccagcctctctggagcctcagttatttgataaaataatgtcactttcca

SEQ ID NO: 505010 - DNA, 201 bp, Homo sapiens; identical to SEQ ID NO: 276019

SEQ ID NO: 505011 - DNA, 201 bp, Homo sapiens; identical to SEQ ID NO: 276021

SEQ ID NO: 505012 - DNA, 201 bp, Homo sapiens
tttcacatcaaccatacagtgtgttcagataaacttgactgtaaatgcttgcagcacaggatgcatgcacacatatttgtgtgtatatatagccacatgtyaagtgactgagagattaactggttgagttgacatcaggaaaggctgcctagagaaacaggaaggatggcagactgataatggtatggttgggttattgca

SEQ ID NO: 505013 - DNA, 201 bp, Homo sapiens
ttattgcatgacagccctttgtcttaataaacatttagattctgatactcactggctggctataccagccttgtacactcccttgaatgcaagtttggttkgtcaaaattatattagccaagtctttcaaactgaaagggaacaggaggaacgaagatgaaggatcatctattcaattattgctatgtgccagatattgag

SEQ ID NO: 505014 - DNA, 201 bp, Homo sapiens
gagatgcgccaccgcttccagactcagcagctgctagagatgtgcaaggatgtctgtgaagccatggaatacctggagtcaaagcagttccttcaccgagrcctggtgggaccttagaaggattggcctaggacaaagggctgatggggtggaagtagcagtggaagatatatcatacatggttgaggggggctgctggtg

SEQ ID NO: 505015 - DNA, 201 bp, Homo sapiens
tattctatagtaaagctatgttgaatattacaaataggtgatatcctgcaatacacagttcagttcttggcatattttaagataaggggtctgctttagcyctggggctacaaaatgagcaaactctttaatactgcttattgtgatacaggctcttctttaagttctttacatatattaactttgtattaaccatatgag

SEQ ID NO: 505016 - DNA, 201 bp, Homo sapiens
tgaagcttccctggcttcattctactggtcagcagaagctttgtgcctttaacctctgtgctggggacggagtctcactggtctctgtttgcactacaggmagctcgaaactgtttggtaaacgatcaaggagttgttaaagtatctgatttcggcctgtccaggtgagtgtggctttttcatctttccctccagaagtaa

SEQ ID NO: 505017 - DNA, 201 bp, Homo sapiens
ttccctggcttcattctactggtcagcagaagctttgtgcctttaacctctgtgctggggacggagtctcactggtctctgtttgcactacaggcagctcvaaactgtttggtaaacgatcaaggagttgttaaagtatctgatttcggcctgtccaggtgagtgtggctttttcatctttccctccagaagtaaaaatag

SEQ ID NO: 505018 - DNA, 201 bp, Homo sapiens
cttccctggcttcattctactggtcagcagaagctttgtgcctttaacctctgtgctggggacggagtctcactggtctctgtttgcactacaggcagctbgaaactgtttggtaaacgatcaaggagttgttaaagtatctgatttcggcctgtccaggtgagtgtggctttttcatctttccctccagaagtaaaaata

SEQ ID NO: 505019 - DNA, 201 bp, Homo sapiens
ctggcttcattctactggtcagcagaagctttgtgcctttaacctctgtgctggggacggagtctcactggtctctgtttgcactacaggcagctcgaaastgtttggtaaacgatcaaggagttgttaaagtatctgatttcggcctgtccaggtgagtgtggctttttcatctttccctccagaagtaaaaatagcaca

SEQ ID NO: 505020 - DNA, 201 bp, Homo sapiens
gcagcgccccatcttcatcatcactgagtacatggccaatggctgcctcctgaactacctgagggagatgcgccaccgcttccagactcagcagctgctakagatgtgcaaggatgtctgtgaagccatggaatacctggagtcaaagcagttccttcaccgagacctggtgggaccttagaaggattggcctaggacaaa

SEQ ID NO: 505021 - DNA, 201 bp, Homo sapiens
cgccccatcttcatcatcactgagtacatggccaatggctgcctcctgaactacctgagggagatgcgccaccgcttccagactcagcagctgctagagaygtgcaaggatgtctgtgaagccatggaatacctggagtcaaagcagttccttcaccgagacctggtgggaccttagaaggattggcctaggacaaagggc

SEQ ID NO: 505022 - DNA, 201 bp, Homo sapiens
tggcttcattctactggtcagcagaagctttgtgcctttaacctctgtgctggggacggagtctcactggtctctgtttgcactacaggcagctcgaaacwgtttggtaaacgatcaaggagttgttaaagtatctgatttcggcctgtccaggtgagtgtggctttttcatctttccctccagaagtaaaaatagcacag

SEQ ID NO: 505023 - DNA, 201 bp, Homo sapiens; identical to SEQ ID NO: 276027

SEQ ID NO: 505024 - DNA, 201 bp, Homo sapiens
gtgcctttaacctctgtgctggggacggagtctcactggtctctgtttgcactacaggcagctcgaaactgtttggtaaacgatcaaggagttgttaaagwatctgatttcggcctgtccaggtgagtgtggctttttcatctttccctccagaagtaaaaatagcacagtatgaaacatgggtaggtgttacagttttaa

SEQ ID NO: 505025 - DNA, 201 bp, Homo sapiens; identical to SEQ ID NO: 276029

SEQ ID NO: 505026 - DNA, 201 bp, Homo sapiens
gtgctggggacggagtctcactggtctctgtttgcactacaggcagctcgaaactgtttggtaaacgatcaaggagttgttaaagtatctgatttcggccygtccaggtgagtgtggctttttcatctttccctccagaagtaaaaatagcacagtatgaaacatgggtaggtgttacagttttaatcctctccttttctt

SEQ ID NO: 505027 - DNA, 201 bp, Homo sapiens; identical to SEQ ID NO: 276031

SEQ ID NO: 505028 - DNA, 201 bp, Homo sapiens
ggggacggagtctcactggtctctgtttgcactacaggcagctcgaaactgtttggtaaacgatcaaggagttgttaaagtatctgatttcggcctgtccrggtgagtgtggctttttcatctttccctccagaagtaaaaatagcacagtatgaaacatgggtaggtgttacagttttaatcctctccttttcttttttt

SEQ ID NO: 505029 - DNA, 201 bp, Homo sapiens
acaggtgaactccagaaagaagaagctatggccgcagtgattctggagagcatctttctgaagcgatcccaacagaaaaagaaaacatcacctctaaactycaagaagcgcctgtttctcttgaccgtgcacaaactctcctactatgagtatgactttgaacgtggggtaagtttctcgactatgaaaactgagtttcaa

SEQ ID NO: 505030 - DNA, 201 bp, Homo sapiens; identical to SEQ ID NO: 276033

SEQ ID NO: 505031 - DNA, 201 bp, Homo sapiens
gggacggagtctcactggtctctgtttgcactacaggcagctcgaaactgtttggtaaacgatcaaggagttgttaaagtatctgatttcggcctgtccargtgagtgtggctttttcatctttccctccagaagtaaaaatagcacagtatgaaacatgggtaggtgttacagttttaatcctctccttttctttttttt

SEQ ID NO: 505032 - DNA, 201 bp, Homo sapiens; identical to SEQ ID NO: 276035

SEQ ID NO: 505033 - DNA, 201 bp, Homo sapiens; identical to SEQ ID NO: 276037

SEQ ID NO: 505034 - DNA, 201 bp, Homo sapiens
ctttcattatcaacagcacacaggtgaactccagaaagaagaagctatggccgcagtgattctggagagcatctttctgaagcgatcccaacagaaaaagdaaacatcacctctaaacttcaagaagcgcctgtttctcttgaccgtgcacaaactctcctactatgagtatgactttgaacgtggggtaagtttctcgac

SEQ ID NO: 505035 - DNA, 201 bp, Homo sapiens
ggtcctcaggaactttcattatcaacagcacacaggtgaactccagaaagaagaagctatggccgcagtgattctggagagcatctttctgaagcgatccyaacagaaaaagaaaacatcacctctaaacttcaagaagcgcctgtttctcttgaccgtgcacaaactctcctactatgagtatgactttgaacgtggggt

SEQ ID NO: 505036 - DNA, 201 bp, Homo sapiens
gtcctgggtcctcaggaactttcattatcaacagcacacaggtgaactccagaaagaagaagctatggccgcagtgattctggagagcatctttctgaagygatcccaacagaaaaagaaaacatcacctctaaacttcaagaagcgcctgtttctcttgaccgtgcacaaactctcctactatgagtatgactttgaacg

SEQ ID NO: 505037 - DNA, 201 bp, Homo sapiens
ccatttaaaccagggagtcagggtgtgtggcagggtggagggaaaggtttgcactcttgcccaatttttctcaaaatctaatttacaaaatattgaattamtccacctccagaagatagtggcatacacatggtagataagtggcaaagcgatcttccagaacacccctggtgttcctttgacgtattttcgtctccccag

SEQ ID NO: 505038 - DNA, 201 bp, Homo sapiens
atgtcctgggtcctcaggaactttcattatcaacagcacacaggtgaactccagaaagaagaagctatggccgcagtgattctggagagcatctttctgargcgatcccaacagaaaaagaaaacatcacctctaaacttcaagaagcgcctgtttctcttgaccgtgcacaaactctcctactatgagtatgactttgaa

SEQ ID NO: 505039 - DNA, 201 bp, Homo sapiens
ctcaaaatctaatttacaaaatattgaattaatccacctccagaagatagtggcatacacatggtagataagtggcaaagcgatcttccagaacacccctkgtgttcctttgacgtattttcgtctccccagcatgagaatagaacctcctacaccacaggaaagagcaaaataacagtgtggatagcccccaggctttga

SEQ ID NO: 505040 - DNA, 201 bp, Homo sapiens
ttaatgtcctgggtcctcaggaactttcattatcaacagcacacaggtgaactccagaaagaagaagctatggccgcagtgattctggagagcatctttcygaagcgatcccaacagaaaaagaaaacatcacctctaaacttcaagaagcgcctgtttctcttgaccgtgcacaaactctcctactatgagtatgacttt

SEQ ID NO: 505041 - DNA, 201 bp, Homo sapiens
agaatagaacctcctacaccacaggaaagagcaaaataacagtgtggatagcccccaggctttgataaaattcactcccttgctttcctagtgtgagcaawaatctgcttaaaaagtagaaaaaaactgctggctttattcattctgcttccacggtgccaccaaaagcataaggagtttacttaaaaaatagacacattc

SEQ ID NO: 505042 - DNA, 201 bp, Homo sapiens
atgacatttagaataaaagtgattggtgaccccaatcaagacatccttggataagttgcccagactccagcctctctggagcctcagttatttgataaaayaatgtcactttccaaataagccacaaaatgcaaatactcatggcaacctaaagcattatacccaaacagtgtcccttagggcttgtcctgtctattctga

SEQ ID NO: 505043 - DNA, 201 bp, Homo sapiens
tcaagacatccttggataagttgcccagactccagcctctctggagcctcagttatttgataaaataatgtcactttccaaataagccacaaaatgcaaawactcatggcaacctaaagcattatacccaaacagtgtcccttagggcttgtcctgtctattctgactccttttatattcaaactatttaaactgcttgct

SEQ ID NO: 505044 - DNA, 201 bp, Homo sapiens; identical to SEQ ID NO: 276043

SEQ ID NO: 505045 - DNA, 201 bp, Homo sapiens
actccagaaagaagaagctatggccgcagtgattctggagagcatctttctgaagcgatcccaacagaaaaagaaaacatcacctctaaacttcaagaagygcctgtttctcttgaccgtgcacaaactctcctactatgagtatgactttgaacgtggggtaagtttctcgactatgaaaactgagtttcaagatatcaa

SEQ ID NO: 505046 - DNA, 201 bp, Homo sapiens
catgaccccaaagaatcacaccaagactttattgttaggatcatgggaaattgatccaaaggacctgaccttcttgaaggagctggggactggacaatttrgggtagtgaagtatgggaaatggagaggccagtacgacgtggccatcaagatgatcaaagaaggctccatgtctgaagatgaattcattgaagaagccaa

SEQ ID NO: 505047 - DNA, 201 bp, Homo sapiens
gaatcacaccaagactttattgttaggatcatgggaaattgatccaaaggacctgaccttcttgaaggagctggggactggacaatttggggtagtgaagyatgggaaatggagaggccagtacgacgtggccatcaagatgatcaaagaaggctccatgtctgaagatgaattcattgaagaagccaaagtcatgatgtg

SEQ ID NO: 505048 - DNA, 201 bp, Homo sapiens
gtctccacaagtgagctgaaaaaggttgtggccctttatgattacatgccaatgaatgcaaatgatctacagctgcggaagggtgatgaatattttatctwggaggaaagcaacttaccatggtggagagcacgagataaaaatgggtgagtccacaccagcccttcctgagcctggtgcctgcccactccctacacgcaa

SEQ ID NO: 505049 - DNA, 201 bp, Homo sapiens
cccaagttactgactaagcatccacttcttcagggaccctcaaggggtgatacgtcattatgttgtgtgttccacacctcagagccagtattacctggctkagaagcaccttttcagcaccatccctgagctcattaactaccatcagcacaactctgcaggtgagtaccaggggcaactgagaagggagttacagacacc

SEQ ID NO: 505050 - DNA, 201 bp, Homo sapiens
attgatccaaaggacctgaccttcttgaaggagctggggactggacaatttggggtagtgaagtatgggaaatggagaggccagtacgacgtggccatcargatgatcaaagaaggctccatgtctgaagatgaattcattgaagaagccaaagtcatgatgtgagttatagcccaaactcaactctcaatctatttgctg

SEQ ID NO: 505051 - DNA, 201 bp, Homo sapiens; identical to SEQ ID NO: 276049

SEQ ID NO: 505052 - DNA, 201 bp, Homo sapiens; identical to SEQ ID NO: 276050

SEQ ID NO: 505053 - DNA, 201 bp, Homo sapiens; identical to SEQ ID NO: 276052

SEQ ID NO: 505054 - DNA, 201 bp, Homo sapiens
ccctgcaactccctgctgcttgcctttgcctgctactctccatttccatgaatcttcaatgccaacctgggtttgggaaagggatacagtgtgctatgcamatgacagatgctcagtaaatagggtttgagtgagttgactgaatcactgacatggacaagccctggagggtgctgtaacctccaatctgcttatgaccag

SEQ ID NO: 505055 - DNA, 201 bp, Homo sapiens; identical to SEQ ID NO: 276053

SEQ ID NO: 505056 - DNA, 201 bp, Homo sapiens
aatagggtttgagtgagttgactgaatcactgacatggacaagccctggagggtgctgtaacctccaatctgcttatgaccaggagccactcaagcagcaytctcccttcacaggtggtattccaaacacatgactcggagtcaggctgagcaactgctaaagcaagaggtaagtgtggaaccactagcacacagcattct

SEQ ID NO: 505057 - DNA, 201 bp, Homo sapiens; identical to SEQ ID NO: 276055

SEQ ID NO: 505058 - DNA, 201 bp, Homo sapiens; identical to SEQ ID NO: 276056

SEQ ID NO: 505059 - DNA, 201 bp, Homo sapiens; identical to SEQ ID NO: 276057

SEQ ID NO: 505060 - DNA, 201 bp, Homo sapiens; identical to SEQ ID NO: 276058

SEQ ID NO: 505061 - DNA, 201 bp, Homo sapiens; identical to SEQ ID NO: 276059

SEQ ID NO: 505062 - DNA, 201 bp, Homo sapiens; identical to SEQ ID NO: 276060

SEQ ID NO: 505063 - DNA, 201 bp, Homo sapiens
gtacatggccaatggctgcctcctgaactacctgagggagatgcgccaccgcttccagactcagcagctgctagagatgtgcaaggatgtctgtgaagccrtggaatacctggagtcaaagcagttccttcaccgagacctggtgggaccttagaaggattggcctaggacaaagggctgatggggtggaagtagcagtgg

SEQ ID NO: 505064 - DNA, 201 bp, Homo sapiens
gagtacatggccaatggctgcctcctgaactacctgagggagatgcgccaccgcttccagactcagcagctgctagagatgtgcaaggatgtctgtgaagmcatggaatacctggagtcaaagcagttccttcaccgagacctggtgggaccttagaaggattggcctaggacaaagggctgatggggtggaagtagcagt

SEQ ID NO: 505065 - DNA, 201 bp, Homo sapiens
atcactgagtacatggccaatggctgcctcctgaactacctgagggagatgcgccaccgcttccagactcagcagctgctagagatgtgcaaggatgtctdtgaagccatggaatacctggagtcaaagcagttccttcaccgagacctggtgggaccttagaaggattggcctaggacaaagggctgatggggtggaagt

SEQ ID NO: 505066 - DNA, 201 bp, Homo sapiens
cacaaaataatgatattattccactctttttgtttttttcttgtttgtttttatgtttttattatcctactcttgggtaaaatgcaccaataagaaatcaytgacatgaaaaggggacctcatgagaatactggttacctttgcagggatattgactgaagaggcatgaggtgctggatctcaaggaggttaaatgggtgt

SEQ ID NO: 505067 - DNA, 201 bp, Homo sapiens
ccatcttcatcatcactgagtacatggccaatggctgcctcctgaactacctgagggagatgcgccaccgcttccagactcagcagctgctagagatgtgvaaggatgtctgtgaagccatggaatacctggagtcaaagcagttccttcaccgagacctggtgggaccttagaaggattggcctaggacaaagggctgat

SEQ ID NO: 505068 - DNA, 201 bp, Homo sapiens
aagaagccttatttcccctcattatcgtattagcaagcttagtttattagagtggctaattgtcgattaggtattctttggcatgtctactggtgcccagycctgcagaagacagagcaaacttgaggatcttcaaatccctaggtgacagggagtggcatgcggggaggggccagagtgtggatgtggtaggagtaatca

SEQ ID NO: 505069 - DNA, 201 bp, Homo sapiens
gagtttacttaaaaaatagacacattcccacccccacccccccaccagaggaaaaatccctaccactaattaaacttgaatggagggctggtggttttttygttacttacttagtgtttttttgttgttgtttttgattttgttttttgagacggagtttcgctcttgttgccccgactggagtataatggcacaatctcg

SEQ ID NO: 505070 - DNA, 201 bp, Homo sapiens
ctgcaccaagcagcgccccatcttcatcatcactgagtacatggccaatggctgcctcctgaactacctgagggagatgcgccaccgcttccagactcagyagctgctagagatgtgcaaggatgtctgtgaagccatggaatacctggagtcaaagcagttccttcaccgagacctggtgggaccttagaaggattggcc

SEQ ID NO: 505071 - DNA, 201 bp, Homo sapiens
atgtgagccaccgcgccggcctagtgttctatttttatgacagcatttgttttcactttatctttccaatgaaagttcggaattagtaataatattacacygtgcataaactgtaagtgaataactgatatgaagtgttgcttggtgtgaataaaaaagccagtggtgactttgggaactttatttgtctttctgtgtttc

SEQ ID NO: 505072 - DNA, 201 bp, Homo sapiens
gttccttgcctttcctgtaggaatctttcccatgagaagctggtgcagttgtatggcgtctgcaccaagcagcgccccatcttcatcatcactgagtacakggccaatggctgcctcctgaactacctgagggagatgcgccaccgcttccagactcagcagctgctagagatgtgcaaggatgtctgtgaagccatggaa

SEQ ID NO: 505073 - DNA, 201 bp, Homo sapiens
ttataaacaccaatactaattcctcctctctgcatccactctattctttgcaaaatacttttactctgggagatcttttgggcctcacaactccatgaggraatgaagctgctgtgttacctctggcaatgagctcagtctacctcagtggccctaggaagattcaaatcatgttgattctagaggcaaagtcaccttcat

SEQ ID NO: 505074 - DNA, 201 bp, Homo sapiens
ccaccgcacccaccctggaattctttgtaaactccttatggtgcgaactaatgtaactttccatccagttatgggggattggtgcaattttaaattatcastatgatttgctatttccatttgagcaaatttcctatagagtttcctttcagtggactagacccatatcaggaagtgacttaggtataaagggaagataca

SEQ ID NO: 505075 - DNA, 201 bp, Homo sapiens
actagttccttgcctttcctgtaggaatctttcccatgagaagctggtgcagttgtatggcgtctgcaccaagcagcgccccatcttcatcatcactgagkacatggccaatggctgcctcctgaactacctgagggagatgcgccaccgcttccagactcagcagctgctagagatgtgcaaggatgtctgtgaagccat

SEQ ID NO: 505076 - DNA, 201 bp, Homo sapiens
tgaataactgatatgaagtgttgcttggtgtgaataaaaaagccagtggtgactttgggaactttatttgtctttctgtgtttcagttacctaaattgaayccttctggagtattgtaggtttggggaggctaaataagttgtgtttcataaatgaacagaggtggcatctatatcagtaagacagttgcatcacttttgc

SEQ ID NO: 505077 - DNA, 201 bp, Homo sapiens
atgaaaaaaaaaaaagatttgtctgcagtaaaaccagagttttaaaaatgattagaaatggaccagaaaagagataaggataatgagaaagggggctctcyaaaactatttggaactgaaattgggacaatgtttctggaaactattttggcagtatgtatcaaaatgcaaaatgcacatacttttttgactctggaaatg

SEQ ID NO: 505078 - DNA, 201 bp, Homo sapiens
ggagaatattgaaagtattaccactgatctgatctggcactgactataaacttgcagattggctctctggctctccttccatcatcagttggccagaatayattgtcgctaatgcaagacaaaaagagatgatgaatcacagagacctagaagtttccaaaaccacagaagaaaaatgtaaaatgctaaaaacataaggcc

SEQ ID NO: 505079 - DNA, 201 bp, Homo sapiens; identical to SEQ ID NO: 276071

SEQ ID NO: 505080 - DNA, 201 bp, Homo sapiens; identical to SEQ ID NO: 276072

SEQ ID NO: 505081 - DNA, 201 bp, Homo sapiens; identical to SEQ ID NO: 276073

SEQ ID NO: 505082 - DNA, 201 bp, Homo sapiens; identical to SEQ ID NO: 276074

SEQ ID NO: 505083 - DNA, 201 bp, Homo sapiens
tcctagtaactatgtcactgaagcagaagactccatagaaatgtatgagtaagtatgtttatgtcagtccacaatcttccaggaggaactctctctctctmtatatatatatatttatttatttatatatattttatatatatttatatatatatataacacacacaagtgtatatatgtatacatatgtatacatacact

SEQ ID NO: 505084 - DNA, 201 bp, Homo sapiens
acaaatatttatttatttatttatttatttatttatttatttatttatttattttgagatggagtttcgctcttgtcacccaggctggagtgcaatggcaygatctcggctcactgcaacctccgcctcccgagttcaagcgattctcctacctcagcctcccgagtagttgggatgacaggcgcctgccaccatgcccag

SEQ ID NO: 505085 - DNA, 201 bp, Homo sapiens
ggtcatagcataaggttgtacactttgggtgctaaacaaagggtcctgggggagggaggaggcacatgggggctgaaatccagctggtaatctgctctccragctatgtgacctggcatgcctagctactttttctaacttgcctaaaggcactcaatatggacggcaaagtccctgaccaaacctgtccttggccccttt

SEQ ID NO: 505086 - DNA, 201 bp, Homo sapiens
gaaattgatccaaaggacctgaccttcttgaaggagctggggactggacaatttggggtagtgaagtatgggaaatggagaggccagtacgacgtggccawcaagatgatcaaagaaggctccatgtctgaagatgaattcattgaagaagccaaagtcatgatgtgagttatagcccaaactcaactctcaatctatttg

SEQ ID NO: 505087 - DNA, 201 bp, Homo sapiens
gtcttagaattaccctgggacttggcagtgttaattggtattcttgctaagatgggggatttgttcttctaattaggatttcctcctcgatggaaagataraaggctctcagcaaccatgtaatccaatcacctgtttagaacaaaacctgatttttttaatgtaaagtttttgttgttgttttgtttttgcttttgtttt

SEQ ID NO: 505088 - DNA, 201 bp, Homo sapiens
taggatcatgggaaattgatccaaaggacctgaccttcttgaaggagctggggactggacaatttggggtagtgaagtatgggaaatggagaggccagtamgacgtggccatcaagatgatcaaagaaggctccatgtctgaagatgaattcattgaagaagccaaagtcatgatgtgagttatagcccaaactcaactct

SEQ ID NO: 505089 - DNA, 201 bp, Homo sapiens
tggagagcacgagataaaaatgggtgagtccacaccagcccttcctgagcctggtgcctgcccactccctacacgcaaaaagtgctgcggcataattcccrtgatcagcatcctcatcagagactgttcttcccacaccagactgaacatgctctccctccaagtacttcccagcgtgcagctccctatacatggcctctg

SEQ ID NO: 505090 - DNA, 201 bp, Homo sapiens
tgtaagaattatacattcatgaccccaaagaatcacaccaagactttattgttaggatcatgggaaattgatccaaaggacctgaccttcttgaaggagcyggggactggacaatttggggtagtgaagtatgggaaatggagaggccagtacgacgtggccatcaagatgatcaaagaaggctccatgtctgaagatgaa

SEQ ID NO: 505091 - DNA, 201 bp, Homo sapiens
tgggcagcagttagtgtgtgtccagaactgcaggtgcagcctccatatccttattagttcccttggttacagaccccagtgggacaatgtttgaaaaattrtattcaccgtctaggaaattgggaactgaaagtccaatatctgcctcagtggagttctggcacctgcattatcccttctgggtatatcaagatcaacagc

SEQ ID NO: 505092 - DNA, 201 bp, Homo sapiens
gtagaaaattaaactttcaagagaaatattctaatttagccttagcgttctttcattcctggacttgtttctttttcaattgatgggctccaaatccctgyttgcttccacattttaagcacttttgagatttagggtgggaaagaggaaaataaacttgctggtgtgaccccttatctgatgctctactcctaggtcagc

SEQ ID NO: 505093 - DNA, 201 bp, Homo sapiens
gggtcctccacctccacgttccattcctgttccacctcaaggtcactgggaacacctttcgcagcaaactgctaattcaatgaagacctggagggagccarttgttccagttcatctatcacatggccagttggtccattcaacaaatggttattggatgcccattatgtggcaggcactgttccgggggagaggtacagt

SEQ ID NO: 505094 - DNA, 201 bp, Homo sapiens
catctggttgcttaatccctcttaatctttctccattttcttcctcattctacttctcagagaagaggcagtaagaagggttcaatagatgttgagaagawcacttgtgttgaaacagtggttcctgaaaaaaatcctcctccagaaagacagattccggtaagaagagaccaatgtctgagatggggaacagcagatttg

SEQ ID NO: 505095 - DNA, 201 bp, Homo sapiens
ctagagcattccattgccttatacaagaactcagtttatatgagctcacaacatcgaaccaatccccccccaattcagtgtgcatccattatacctgaaamctgacagagctgggggctgtgggaggaggttggtaggaagaaattattttgtgagctgtgcacatttttgttccatttgaaactaggtagctaggctgag

SEQ ID NO: 505096 - DNA, 201 bp, Homo sapiens
ataaacttgcagattggctctctggctctccttccatcatcagttggccagaatatattgtcgctaatgcaagacaaaaagagatgatgaatcacagagamctagaagtttccaaaaccacagaagaaaaatgtaaaatgctaaaaacataaggccaggcgcggtggctcaagcctgtaatcccagcattttgggaggccg

SEQ ID NO: 505097 - DNA, 201 bp, Homo sapiens
aaattctctgtaaatagactggtgatgctgtgcaacgtggaacacggtcaagtttcctttaaaaattcttcactctaccatattggttataaagaatcttwgcttctttccttcatattcagaacatctcactaaacatggaaaatttgttaacacaaacttttaaatgatgctatatctagttttcaaactggtcagaga

SEQ ID NO: 505098 - DNA, 201 bp, Homo sapiens
gcctttgtgctcccactcaatacacaaaggcccctctctacatctgggaatgcacctcttctttgattccctgggatagtggcttctgagcaaaggccaaraaattattgtgcctgaaatttcccgagagaattaagacagactgaatttgcgatgaaaatattttttaggagggaggatgtaaatagccgcacaaagggg

SEQ ID NO: 505099 - DNA, 201 bp, Homo sapiens
taaataaataaataaataaaacatgaactgctgtggaagaaccagagagccctaaggcctcctgtaaatgactacagcaggagagtttccctggtcagcaygcagctttcgaaaattgagtttggcttgatgccttcatcacaaatttggtcccctgtagccttgactatgaagcttatcataaaataattgggtttcact

SEQ ID NO: 505100 - DNA, 201 bp, Homo sapiens
tcttggttctacttctcttctccacaagccccaatttcactttctcagaggaaatcccaagcttaggagccctggagcctttgtgctcccactcaatacamaaaggcccctctctacatctgggaatgcacctcttctttgattccctgggatagtggcttctgagcaaaggccaagaaattattgtgcctgaaatttccc

SEQ ID NO: 505101 - DNA, 201 bp, Homo sapiens
tggtcagcatgcagctttcgaaaattgagtttggcttgatgccttcatcacaaatttggtcccctgtagccttgactatgaagcttatcataaaataattrggtttcactggggcccgaacaaaagcatcttgggaatttaacaagattaaaggttgctttgttgctgtgggtatgatttttttttcttttttcttttttt

SEQ ID NO: 505102 - DNA, 201 bp, Homo sapiens
atatttgcagagactgggataagagctctgcaggacatgtatacttgtacttctttagttctctccacaatgcctcatacagcgccttgcacacagaaagsgatcagtagttgtgttaactgatttatctgtgggaataaacaaccatcaccagcttgggctccacatcgataaatggctaggttttagtctggaaatggg

SEQ ID NO: 505103 - DNA, 201 bp, Homo sapiens
cccatcttcatcatcactgagtacatggccaatggctgcctcctgaactacctgagggagatgcgccaccgcttccagactcagcagctgctagagatgtkcaaggatgtctgtgaagccatggaatacctggagtcaaagcagttccttcaccgagacctggtgggaccttagaaggattggcctaggacaaagggctga

SEQ ID NO: 505104 - DNA, 201 bp, Homo sapiens
ttcatcatcactgagtacatggccaatggctgcctcctgaactacctgagggagatgcgccaccgcttccagactcagcagctgctagagatgtgcaaggwtgtctgtgaagccatggaatacctggagtcaaagcagttccttcaccgagacctggtgggaccttagaaggattggcctaggacaaagggctgatggggt

SEQ ID NO: 505105 - DNA, 201 bp, Homo sapiens
catcactgagtacatggccaatggctgcctcctgaactacctgagggagatgcgccaccgcttccagactcagcagctgctagagatgtgcaaggatgtcygtgaagccatggaatacctggagtcaaagcagttccttcaccgagacctggtgggaccttagaaggattggcctaggacaaagggctgatggggtggaag

SEQ ID NO: 505106 - DNA, 201 bp, Homo sapiens
atacaaaggaagcaggggcatctgcagtgtagaggatggtgaggagacagaattgggctgagacacaggaggaggtggcagtggaataggggctgaagaamcgtgagagtctggggtatcttgcttgcacaaccctccaggaacacgcgtgggacctgagctgacactctgatcacccccttttttgttgggtggtctctg

SEQ ID NO: 505107 - DNA, 201 bp, Homo sapiens
gtgaggagacagaattgggctgagacacaggaggaggtggcagtggaataggggctgaagaaccgtgagagtctggggtatcttgcttgcacaaccctccrggaacacgcgtgggacctgagctgacactctgatcacccccttttttgttgggtggtctctgggaatgagataataaatatattaccactacctgctaca

SEQ ID NO: 505108 - DNA, 201 bp, Homo sapiens
tcaataatacagtattattaactatggtcactatattgcacattagatccccagagcttatacatcctataagtgaaagtttgtacaccaatgctgacacygaggtgggaggatcgcttgagctgttctctgttttggacatgctcctgctcattaatttcccctaagacgaggcactcagaactgaatgcaggactctag

SEQ ID NO: 505109 - DNA, 201 bp, Homo sapiens
tggagaggtcaccatgccctcaaatccagaagaatcacactcaaagaaaaaggagttgacgacctgatgaaagaattaaaatgtcaaactgctactgttgycctttcctccctaatcatggaagtggattgttctcaagtgccctagtccctgatctcttccctgcaactccctgctgcttgcctttgcctgctactctcc

SEQ ID NO: 505110 - DNA, 201 bp, Homo sapiens
cttccctgcaactccctgctgcttgcctttgcctgctactctccatttccatgaatcttcaatgccaacctgggtttgggaaagggatacagtgtgctatscacatgacagatgctcagtaaatagggtttgagtgagttgactgaatcactgacatggacaagccctggagggtgctgtaacctccaatctgcttatgac

SEQ ID NO: 505111 - DNA, 201 bp, Homo sapiens
agactttattgttaggatcatgggaaattgatccaaaggacctgaccttcttgaaggagctggggactggacaatttggggtagtgaagtatgggaaatgragaggccagtacgacgtggccatcaagatgatcaaagaaggctccatgtctgaagatgaattcattgaagaagccaaagtcatgatgtgagttatagccc

SEQ ID NO: 505112 - DNA, 201 bp, Homo sapiens
ggctgagggggaaccaagagggatgaggattaatgtcctgggtcctcaggaactttcattatcaacagcacacaggtgaactccagaaagaagaagctatkgccgcagtgattctggagagcatctttctgaagcgatcccaacagaaaaagaaaacatcacctctaaacttcaagaagcgcctgtttctcttgaccgtgc

SEQ ID NO: 505113 - DNA, 201 bp, Homo sapiens
taattaggaataatgttaaataagaacattagatctttttttggaaaaaggtaccttgaacggatggatggatggatagatacatacatacatgcatacayacatacatagatgttacgaaaaataggtaaattaactgaatgtgcaatatgatctcaaatattataagaaacacacacagaaaaaaatggaaggaatatg

SEQ ID NO: 505114 - DNA, 201 bp, Homo sapiens
tgcttaatccctcttaatctttctccattttcttcctcattctacttctcagagaagaggcagtaagaagggttcaatagatgttgagaagatcacttgtkttgaaacagtggttcctgaaaaaaatcctcctccagaaagacagattccggtaagaagagaccaatgtctgagatggggaacagcagatttgaagaaatt

SEQ ID NO: 505115 - DNA, 201 bp, Homo sapiens
ttcctactgtgtactcagcgatttcctcagttctagaggagaacacgggaacattctgagtcgaggtccttgtcctcaaagaacatacaggttagacaacwtcagaagaaagtttataagcactgtaaaatttctaaaaactgagacattagtgagggcatggatatgggggaacagcttcatcaagaaggtaggatgtga

SEQ ID NO: 505116 - DNA, 201 bp, Homo sapiens
agctccatgaagtctgccgtggtgggaatcagagcagtcactcactcccaaccccctaccacccacaagaaaatggtggggtctttcagtggccattctgsatttggaacagaagggactgtgcttcccaatgggactgctcctggcatggggccatcatttggttccttcagagtcacatactggggcctgtggatgcat

SEQ ID NO: 505117 - DNA, 201 bp, Homo sapiens
tgttaaagtatctgatttcggcctgtccaggtgagtgtggctttttcatctttccctccagaagtaaaaatagcacagtatgaaacatgggtaggtgttayagttttaatcctctccttttcttttttttctcattctagcgttttctgccgatctttctattctttttcttcctctgagttatttaagccacctctttca

SEQ ID NO: 505118 - DNA, 201 bp, Homo sapiens
gtaaatagactggtgatgctgtgcaacgtggaacacggtcaagtttcctttaaaaattcttcactctaccatattggttataaagaatcttagcttctttycttcatattcagaacatctcactaaacatggaaaatttgttaacacaaacttttaaatgatgctatatctagttttcaaactggtcagagatcattgatt

SEQ ID NO: 505119 - DNA, 201 bp, Homo sapiens
cttaagtaagtctgaatgtcataatcctagggctctgagtcacatgatatcctttaataccttactatttattctcttctcactttccggagcgagagacrtaaaacctactgatttttgagttcacttttaaaaaatatatatcaatttcagtattttctttttttcttttttttttctttttttagacagagtctcgct

SEQ ID NO: 505120 - DNA, 201 bp, Homo sapiens
acaacgttagtggttaaatatttgtcccaacaacaattttttagaaacctccattttcccagtgatttgaaatacctgagtctctcttgactgggtatgtrttgggtcgtattggatatgtgtccctattggcctatagaaagtaatcactaagaatcagccttgtctgtgcaggagaaacttctgaagccacagcaaaag

SEQ ID NO: 505121 - DNA, 201 bp, Homo sapiens
gtgatcttgctactgcactccatcctgggtgacagagtgagaccctgtctcaaaaaaatagaaggtatatttgatcaaagttttatattcacagtaagcartaagaaccctagggacagagaagggtggatgttccacctaaacactgtgctttcattccatcaacaatgaaacatccaggaaaggaaacaacaagtgact

SEQ ID NO: 505122 - DNA, 201 bp, Homo sapiens; identical to SEQ ID NO: 276022

SEQ ID NO: 505123 - DNA, 201 bp, Homo sapiens
agactaagaagagtcctcaagtgcaaaaaaagtatagttgacagttaccagagacagatcatccttaccagcctggaggaatattgcagaggaaagagctyaggatcttgaatactctcttatctcctgtatttaccaccatttcctctcttgctgaacattcctagaaaatggagaggagtttgtcacaactgctctttg

SEQ ID NO: 505124 - DNA, 201 bp, Homo sapiens
tagtgctttcaaggagaaatcaagagaaaacactacttcttggatattttggctaagtagtcatttgaagtacagttgactggttattttattttaaatcrtatctcatagactcttcccaatcataggctggctgtgtagttttctgaattttgctctggtattcttcttcttttttttttttatttttattttttattt

SEQ ID NO: 505125 - DNA, 201 bp, Homo sapiens
cgttaaaagtaacgtttgtagaagatactagttgaggaggagagacttttgagaaagcctgtgtgtgtttgtgacactcttgtgaccgtgccaagaaaacrtaagcaaatatcaagcctccaaatcctaatgcaacaagtcctgaatcccttgcaggtatgtcctggatgatgaatacacaagctcagtaggctccaaatt

SEQ ID NO: 505126 - DNA, 201 bp, Homo sapiens; identical to SEQ ID NO: 276026

SEQ ID NO: 505127 - DNA, 201 bp, Homo sapiens
cctggcagtcccttctggtgattagagaggccgaaagggtcctttccgacaagggctgagggtgggcggaacaggaagagaaaaatgtgacatgaggtgaycatccgaacaggtagcaaatgttagaaaggggtacctctggcaaacttagtggaaaagtaatattgcagggagcagtcagataaaaacaagcccttctgt

SEQ ID NO: 505128 - DNA, 201 bp, Homo sapiens
gtgtgtaccatctcagtagcatttgggggtagatgtagaaaattaaactttcaagagaaatattctaatttagccttagcgttctttcattcctggacttktttctttttcaattgatgggctccaaatccctgcttgcttccacattttaagcacttttgagatttagggtgggaaagaggaaaataaacttgctggtgt

SEQ ID NO: 505129 - DNA, 201 bp, Homo sapiens
aggctgagggggaaccaagagggatgaggattaatgtcctgggtcctcaggaactttcattatcaacagcacacaggtgaactccagaaagaagaagctayggccgcagtgattctggagagcatctttctgaagcgatcccaacagaaaaagaaaacatcacctctaaacttcaagaagcgcctgtttctcttgaccgtg

SEQ ID NO: 505130 - DNA, 201 bp, Homo sapiens; identical to SEQ ID NO: 276038

SEQ ID NO: 505131 - DNA, 201 bp, Homo sapiens
ttgttcattcctttgtgtgtcattggccctttcttctactttattagctgccaaccgtttctggctgaggtcctaaatgagatttttttttttttttttttgagaccgagtctttctctgtcgcccaggctggagtgcagtggcgtgatctcggctcaccgcaagccccgcctcctgggttcacagcattctcctgcctca

SEQ ID NO: 505132 - DNA, 201 bp, Homo sapiens
gcttaatccctcttaatctttctccattttcttcctcattctacttctcagagaagaggcagtaagaagggttcaatagatgttgagaagatcacttgtgwtgaaacagtggttcctgaaaaaaatcctcctccagaaagacagattccggtaagaagagaccaatgtctgagatggggaacagcagatttgaagaaattt

SEQ ID NO: 505133 - DNA, 201 bp, Homo sapiens; identical to SEQ ID NO: 276039

SEQ ID NO: 505134 - DNA, 201 bp, Homo sapiens; identical to SEQ ID NO: 276040

SEQ ID NO: 505135 - DNA, 201 bp, Homo sapiens
tacttctcagagaagaggcagtaagaagggttcaatagatgttgagaagatcacttgtgttgaaacagtggttcctgaaaaaaatcctcctccagaaagayagattccggtaagaagagaccaatgtctgagatggggaacagcagatttgaagaaatttgcaacatttaaattctctgtaaatagactggtgatgctgtg

SEQ ID NO: 505136 - DNA, 201 bp, Homo sapiens
gaagctatggccgcagtgattctggagagcatctttctgaagcgatcccaacagaaaaagaaaacatcacctctaaacttcaagaagcgcctgtttctctygaccgtgcacaaactctcctactatgagtatgactttgaacgtggggtaagtttctcgactatgaaaactgagtttcaagatatcaaggacttggcctta

SEQ ID NO: 505137 - DNA, 201 bp, Homo sapiens
gcattccatatcatcactggcttcttgttttgcaggcttaaaacctgggagttctcaccggaagacaaaaaagcctcttcccccaacgcctgaggaggacyaggtatacagggaaactgggtgctgccactgcttaaatggaaacttatagtcaagccctaagaacacactagagtcttagaattaccctgggacttggca

SEQ ID NO: 505138 - DNA, 201 bp, Homo sapiens
aattgatccaaaggacctgaccttcttgaaggagctggggactggacaatttggggtagtgaagtatgggaaatggagaggccagtacgacgtggccatcragatgatcaaagaaggctccatgtctgaagatgaattcattgaagaagccaaagtcatgatgtgagttatagcccaaactcaactctcaatctatttgct

SEQ ID NO: 505139 - DNA, 201 bp, Homo sapiens
ttgtggccctttatgattacatgccaatgaatgcaaatgatctacagctgcggaagggtgatgaatattttatcttggaggaaagcaacttaccatggtgragagcacgagataaaaatgggtgagtccacaccagcccttcctgagcctggtgcctgcccactccctacacgcaaaaagtgctgcggcataattcccgtg

SEQ ID NO: 505140 - DNA, 201 bp, Homo sapiens
gttgtggccctttatgattacatgccaatgaatgcaaatgatctacagctgcggaagggtgatgaatattttatcttggaggaaagcaacttaccatggtrgagagcacgagataaaaatgggtgagtccacaccagcccttcctgagcctggtgcctgcccactccctacacgcaaaaagtgctgcggcataattcccgt

SEQ ID NO: 505141 - DNA, 201 bp, Homo sapiens
cattagatccccagagcttatacatcctataagtgaaagtttgtacaccaatgctgacaccgaggtgggaggatcgcttgagctgttctctgttttggacrtgctcctgctcattaatttcccctaagacgaggcactcagaactgaatgcaggactctaggtgtggtctggctttgcagagtaagtggcatgttaccttc

SEQ ID NO: 505142 - DNA, 201 bp, Homo sapiens
cctttatgattacatgccaatgaatgcaaatgatctacagctgcggaagggtgatgaatattttatcttggaggaaagcaacttaccatggtggagagcaygagataaaaatgggtgagtccacaccagcccttcctgagcctggtgcctgcccactccctacacgcaaaaagtgctgcggcataattcccgtgatcagca

SEQ ID NO: 505143 - DNA, 201 bp, Homo sapiens
caccattcatagactaaccgggctactttttatattttcctcaaagatgatcaataaaaatgctgaacaggatagcaccaagaatagaaccttatattgcwttgggaatctcttcaggtgacactcagctgtttatttgcactatctgagtacagtctttctgtcagtatggatgagtgtgctaggggagtggtcgtgggc

SEQ ID NO: 505144 - DNA, 201 bp, Homo sapiens
atttgagatttgttctgagctcagggacgtgggcatatgaatctgtctcctggaggctggggaggtgctggatgaactgccacattgtttccttcacaggyaggaaggctacattcctagtaactatgtcactgaagcagaagactccatagaaatgtatgagtaagtatgtttatgtcagtccacaatcttccaggagga

SEQ ID NO: 505145 - DNA, 201 bp, Homo sapiens
gaagtaaaaatagcacagtatgaaacatgggtaggtgttacagttttaatcctctccttttcttttttttctcattctagcgttttctgccgatctttctwttctttttcttcctctgagttatttaagccacctctttcatccttttgttttattgtcatatccctttccttcctttctccctttatctctacctcctct

SEQ ID NO: 505146 - DNA, 201 bp, Homo sapiens
ggaggctggggaggtgctggatgaactgccacattgtttccttcacaggcaggaaggctacattcctagtaactatgtcactgaagcagaagactccatakaaatgtatgagtaagtatgtttatgtcagtccacaatcttccaggaggaactctctctctctatatatatatatatttatttatttatatatattttata

SEQ ID NO: 505147 - DNA, 201 bp, Homo sapiens
ttgactgaatcactgacatggacaagccctggagggtgctgtaacctccaatctgcttatgaccaggagccactcaagcagcactctcccttcacaggtgrtattccaaacacatgactcggagtcaggctgagcaactgctaaagcaagaggtaagtgtggaaccactagcacacagcattctccttgcataagtgagga

SEQ ID NO: 505148 - DNA, 201 bp, Homo sapiens
cttttctcctaactacatagatcttgaaaaagccactaccgcctgagccagcagcagcaccagtctccacaagtgagctgaaaaaggttgtggccctttakgattacatgccaatgaatgcaaatgatctacagctgcggaagggtgatgaatattttatcttggaggaaagcaacttaccatggtggagagcacgagata

SEQ ID NO: 505149 - DNA, 201 bp, Homo sapiens; identical to SEQ ID NO: 276042

SEQ ID NO: 505150 - DNA, 201 bp, Homo sapiens
ttgttaaagtatctgatttcggcctgtccaggtgagtgtggctttttcatctttccctccagaagtaaaaatagcacagtatgaaacatgggtaggtgttycagttttaatcctctccttttcttttttttctcattctagcgttttctgccgatctttctattctttttcttcctctgagttatttaagccacctctttc

SEQ ID NO: 505151 - DNA, 201 bp, Homo sapiens
attgctattatgcagagccaaaaggagaagactagttccttgcctttcctgtaggaatctttcccatgagaagctggtgcagttgtatggcgtctgcaccwagcagcgccccatcttcatcatcactgagtacatggccaatggctgcctcctgaactacctgagggagatgcgccaccgcttccagactcagcagctgct

SEQ ID NO: 505152 - DNA, 201 bp, Homo sapiens
ctgttgacctttgtgcccaagttactgactaagcatccacttcttcagggaccctcaaggggtgatacgtcattatgttgtgtgttccacacctcagagcyagtattacctggctgagaagcaccttttcagcaccatccctgagctcattaactaccatcagcacaactctgcaggtgagtaccaggggcaactgagaag

SEQ ID NO: 505153 - DNA, 201 bp, Homo sapiens; identical to SEQ ID NO: 276046

SEQ ID NO: 505154 - DNA, 201 bp, Homo sapiens
acctcaaaaagaatacatagcagcaccaattctatcatagtgtgtcttgtctatgataactgcattgagaaagatgctctgcttgttgagtgagcatttcwcttccttctggttctgactatctgtctaatagtggtcatgtgggttgaaaagatagaaaaggggagtagtattaggaagttcagtatgaggaagacttat

SEQ ID NO: 505155 - DNA, 201 bp, Homo sapiens
accctttgttggataaacaaaaatgttatctccagcaagggcagacggagaccttataaaataagtttatgcatgaattgaagcacaagtcaggaggaccwaagagtatgaaaaattctaagagcttttaaacgctacattcctagatatgaagagttcaggaatccttcagatagttcacataacctgaacaccattgct

SEQ ID NO: 505156 - DNA, 201 bp, Homo sapiens
agtgctgggattacgggcatgagccactgcgcctggacttattattcttaatagtattttatcttatgagcgaagataagagcccaagatggtttagtttwctgattctgcaagtgctatttctattaattccttggcatactgcagtttgtatgatggctgcactcttgttaataagcttcgtctttctgaattctgttg

SEQ ID NO: 505157 - DNA, 201 bp, Homo sapiens
attattcttaatagtattttatcttatgagcgaagataagagcccaagatggtttagtttactgattctgcaagtgctatttctattaattccttggcatwctgcagtttgtatgatggctgcactcttgttaataagcttcgtctttctgaattctgttgctccatagggagctgggaggctgcaaaaggtggccctgta

SEQ ID NO: 505158 - DNA, 201 bp, Homo sapiens
ttttattattgttttaaaattccctctaggggctgggcgtggtggctcatgcctgtaatcccaacactttgaggggcgatggggggcgggtgaatcacgargtcagaagttcgagaccatcctggccaatatggtgaaaccatgtctctgctaaaaacacaaaaattagccgggcttggtggtgcgtgcctgtagtcccag

SEQ ID NO: 505159 - DNA, 201 bp, Homo sapiens
ggggcgatggctagtgagagacttgcttacttcctcatagtcagagcagcactaaaccctgcccaaacacagatacttgagagagaggaagacttcctctygtacaaactggatttgttctaaaacagagaaagagtagaggcagcttccagaaggacctgtcttataggaagtaagagcaggggacaagaatgaaacaga

SEQ ID NO: 505160 - DNA, 201 bp, Homo sapiens
acctcaattttaaaagcatagcctcagatacctcatatccagctgccacattttctcaatggtgcttgccatgcaaaggttgtattcctgtgggcttagccacagactctctctttccatttccttaaatatggcagtgggcccttctatgttccagcaccacaaatatttgcctatacttattcttgaatctttggtcaa

SEQ ID NO: 505161 - DNA, 201 bp, Homo sapiens
aggaagaaattattttgtgagctgtgcacatttttgttccatttgaaactaggtagctaggctgagggggaaccaagagggatgaggattaatgtcctggstcctcaggaactttcattatcaacagcacacaggtgaactccagaaagaagaagctatggccgcagtgattctggagagcatctttctgaagcgatccca

SEQ ID NO: 505162 - DNA, 201 bp, Homo sapiens
gaaaataaacttgctggtgtgaccccttatctgatgctctactcctaggtcagccccttcctccccagcccctttattgctattatgcagagccaaaaggrgaagactagttccttgcctttcctgtaggaatctttcccatgagaagctggtgcagttgtatggcgtctgcaccaagcagcgccccatcttcatcatcac

SEQ ID NO: 505163 - DNA, 201 bp, Homo sapiens
tttcaaaattcttctgagcaatattctagatgtcatggatgaagaatcctgagctcgccaataagcttcttggttctacttctcttctccacaagccccawtttcactttctcagaggaaatcccaagcttaggagccctggagcctttgtgctcccactcaatacacaaaggcccctctctacatctgggaatgcacctc

SEQ ID NO: 505164 - DNA, 201 bp, Homo sapiens; identical to SEQ ID NO: 276054

SEQ ID NO: 505165 - DNA, 201 bp, Homo sapiens
caagccccaatttcactttctcagaggaaatcccaagcttaggagccctggagcctttgtgctcccactcaatacacaaaggcccctctctacatctgggratgcacctcttctttgattccctgggatagtggcttctgagcaaaggccaagaaattattgtgcctgaaatttcccgagagaattaagacagactgaatt

SEQ ID NO: 505166 - DNA, 201 bp, Homo sapiens
gcccctctctacatctgggaatgcacctcttctttgattccctgggatagtggcttctgagcaaaggccaagaaattattgtgcctgaaatttcccgagakaattaagacagactgaatttgcgatgaaaatattttttaggagggaggatgtaaatagccgcacaaaggggtccaacagctctttgagtaggcatttggt

SEQ ID NO: 505167 - DNA, 201 bp, Homo sapiens
gttgactgaatcactgacatggacaagccctggagggtgctgtaacctccaatctgcttatgaccaggagccactcaagcagcactctcccttcacaggtrgtattccaaacacatgactcggagtcaggctgagcaactgctaaagcaagaggtaagtgtggaaccactagcacacagcattctccttgcataagtgagg

SEQ ID NO: 505168 - DNA, 201 bp, Homo sapiens; identical to SEQ ID NO: 276061
  misc_feature (1)...(201): n = A,T,C or G

SEQ ID NO: 505169 - DNA, 201 bp, Homo sapiens; identical to SEQ ID NO: 276062

SEQ ID NO: 505170 - DNA, 201 bp, Homo sapiens
taacctccaatctgcttatgaccaggagccactcaagcagcactctcccttcacaggtggtattccaaacacatgactcggagtcaggctgagcaactgcyaaagcaagaggtaagtgtggaaccactagcacacagcattctccttgcataagtgaggatcttgaactgagggcctgttctgccccctacctttgggcaa

SEQ ID NO: 505171 - DNA, 201 bp, Homo sapiens
ttgttctattttctctctcaagtttgggcaggtgggatgcaggtgtgagcaccacttcctcctacagacagcttctttttcgttgtttcaggggaaagaargaggtttcattgtcagagactccagcaaagctggcaaatatacagtgtctgtgtttgctaaatccacagggtgagtgctactattccaaggccctgagga

SEQ ID NO: 505172 - DNA, 201 bp, Homo sapiens
attaagacagactgaatttgcgatgaaaatattttttaggagggaggatgtaaatagccgcacaaaggggtccaacagctctttgagtaggcatttggtaragcttgggggtgtgtgtgtgggggtggaccgaatttggcaagaatgaaatggtgtcataaagatgggaggggagggtgttttgataaaataaaattacta

SEQ ID NO: 505173 - DNA, 201 bp, Homo sapiens
tgttctattttctctctcaagtttgggcaggtgggatgcaggtgtgagcaccacttcctcctacagacagcttctttttcgttgtttcaggggaaagaagraggtttcattgtcagagactccagcaaagctggcaaatatacagtgtctgtgtttgctaaatccacagggtgagtgctactattccaaggccctgaggac

SEQ ID NO: 505174 - DNA, 201 bp, Homo sapiens
caccacttcctcctacagacagcttctttttcgttgtttcaggggaaagaaggaggtttcattgtcagagactccagcaaagctggcaaatatacagtgtytgtgtttgctaaatccacagggtgagtgctactattccaaggccctgaggacaaagaacaggggtaccctcctaatagctccttgatgctgtgcccgtcc

SEQ ID NO: 505175 - DNA, 201 bp, Homo sapiens
cacttcctcctacagacagcttctttttcgttgtttcaggggaaagaaggaggtttcattgtcagagactccagcaaagctggcaaatatacagtgtctgygtttgctaaatccacagggtgagtgctactattccaaggccctgaggacaaagaacaggggtaccctcctaatagctccttgatgctgtgcccgtcccac

SEQ ID NO: 505176 - DNA, 201 bp, Homo sapiens
tctgtctctgaaactcaaaactcatctcacttcacttcctgggttctgttgacctttgtgcccaagttactgactaagcatccacttcttcagggaccctyaaggggtgatacgtcattatgttgtgtgttccacacctcagagccagtattacctggctgagaagcaccttttcagcaccatccctgagctcattaacta

SEQ ID NO: 505177 - DNA, 201 bp, Homo sapiens; identical to SEQ ID NO: 276063

SEQ ID NO: 505178 - DNA, 201 bp, Homo sapiens
caaggggtgatacgtcattatgttgtgtgttccacacctcagagccagtattacctggctgagaagcaccttttcagcaccatccctgagctcattaactrccatcagcacaactctgcaggtgagtaccaggggcaactgagaagggagttacagacaccaggataagcaatgcaggacaaggtgataagaggaagaatc

SEQ ID NO: 505179 - DNA, 201 bp, Homo sapiens
aaggggtgatacgtcattatgttgtgtgttccacacctcagagccagtattacctggctgagaagcaccttttcagcaccatccctgagctcattaactamcatcagcacaactctgcaggtgagtaccaggggcaactgagaagggagttacagacaccaggataagcaatgcaggacaaggtgataagaggaagaatct

SEQ ID NO: 505180 - DNA, 201 bp, Homo sapiens
agcagcagcaccagtctccacaagtgagctgaaaaaggttgtggccctttatgattacatgccaatgaatgcaaatgatctacagctgcggaagggtgatkaatattttatcttggaggaaagcaacttaccatggtggagagcacgagataaaaatgggtgagtccacaccagcccttcctgagcctggtgcctgcccac

SEQ ID NO: 505181 - DNA, 201 bp, Homo sapiens
gggtgatacgtcattatgttgtgtgttccacacctcagagccagtattacctggctgagaagcaccttttcagcaccatccctgagctcattaactaccakcagcacaactctgcaggtgagtaccaggggcaactgagaagggagttacagacaccaggataagcaatgcaggacaaggtgataagaggaagaatctgcc

SEQ ID NO: 505182 - DNA, 201 bp, Homo sapiens
tgtgatctctctcttctttcctgctacagtaatccggtacaacagtgatctggttcagaaatatcacccttgcttctggatcgatgggcagtatctctgcbgctctcagacagccaaaaatgctatgggctgccaaattttggagaacaggaatggaagtaagcaatctgatcgatataatttctttctcctttgactgtt

SEQ ID NO: 505183 - DNA, 201 bp, Homo sapiens
ttgttggataaacaaaaatgttatctccagcaagggcagacggagaccttataaaataagtttatgcatgaattgaagcacaagtcaggaggacctaagartatgaaaaattctaagagcttttaaacgctacattcctagatatgaagagttcaggaatccttcagatagttcacataacctgaacaccattgctgactg

SEQ ID NO: 505184 - DNA, 201 bp, Homo sapiens
gatgtgatctctctcttctttcctgctacagtaatccggtacaacagtgatctggttcagaaatatcacccttgcttctggatcgatgggcagtatctctsctgctctcagacagccaaaaatgctatgggctgccaaattttggagaacaggaatggaagtaagcaatctgatcgatataatttctttctcctttgactg

SEQ ID NO: 505185 - DNA, 201 bp, Homo sapiens
gtggcttctcctccatgtcagatgtgatctctctcttctttcctgctacagtaatccggtacaacagtgatctggttcagaaatatcacccttgcttctgratcgatgggcagtatctctgctgctctcagacagccaaaaatgctatgggctgccaaattttggagaacaggaatggaagtaagcaatctgatcgatata

SEQ ID NO: 505186 - DNA, 201 bp, Homo sapiens; identical to SEQ ID NO: 276069

SEQ ID NO: 505187 - DNA, 201 bp, Homo sapiens
caaatggtggcttctcctccatgtcagatgtgatctctctcttctttcctgctacagtaatccggtacaacagtgatctggttcagaaatatcacccttgmttctggatcgatgggcagtatctctgctgctctcagacagccaaaaatgctatgggctgccaaattttggagaacaggaatggaagtaagcaatctgatc

SEQ ID NO: 505188 - DNA, 201 bp, Homo sapiens
aaacaccatcacttcagctgggtcatcagtgtgatcagggagtgtggctaggcacatctttgccttctcttcccttatgtttcaccaaaggcattttttttcccagtagttccacctgggtatagtcttgttgaaccgtcctgggctaacaacaagagccaaaaagtaggcaccttctgacaaataccatgattgctggga

SEQ ID NO: 505189 - DNA, 201 bp, Homo sapiens
ggagtttgtcacaactgctctttgatgatagccatggagaatgacaggggccccaaggcagatggcatcaacctcatcaaagaccaaaaaacaaataaacraacaaaaatccctccggtaggcagtgaaacaccacaaaaaaagcaagggctatagatgatataccaagagctacagatggatgaggttggacaagtcaca

SEQ ID NO: 505190 - DNA, 201 bp, Homo sapiens
accttaccaagcacacaggtgcgtgccatttaacatctagagcattccattgccttatacaagaactcagtttatatgagctcacaacatcgaaccaatcyccccccaattcagtgtgcatccattatacctgaaacctgacagagctgggggctgtgggaggaggttggtaggaagaaattattttgtgagctgtgcaca

SEQ ID NO: 505191 - DNA, 201 bp, Homo sapiens
tcttggaggaaagcaacttaccatggtggagagcacgagataaaaatgggtgagtccacaccagcccttcctgagcctggtgcctgcccactccctacacrcaaaaagtgctgcggcataattcccgtgatcagcatcctcatcagagactgttcttcccacaccagactgaacatgctctccctccaagtacttcccagc

SEQ ID NO: 505192 - DNA, 201 bp, Homo sapiens
ctttcctccctaatcatggaagtggattgttctcaagtgccctagtccctgatctcttccctgcaactccctgctgcttgcctttgcctgctactctccayttccatgaatcttcaatgccaacctgggtttgggaaagggatacagtgtgctatgcacatgacagatgctcagtaaatagggtttgagtgagttgactga

SEQ ID NO: 505193 - DNA, 201 bp, Homo sapiens; identical to SEQ ID NO: 276075

SEQ ID NO: 505194 - DNA, 201 bp, Homo sapiens; identical to SEQ ID NO: 276076

SEQ ID NO: 505195 - DNA, 201 bp, Homo sapiens
atacgtcattatgttgtgtgttccacacctcagagccagtattacctggctgagaagcaccttttcagcaccatccctgagctcattaactaccatcagcmcaactctgcaggtgagtaccaggggcaactgagaagggagttacagacaccaggataagcaatgcaggacaaggtgataagaggaagaatctgcctcaca

SEQ ID NO: 505196 - DNA, 201 bp, Homo sapiens
acgtcattatgttgtgtgttccacacctcagagccagtattacctggctgagaagcaccttttcagcaccatccctgagctcattaactaccatcagcacwactctgcaggtgagtaccaggggcaactgagaagggagttacagacaccaggataagcaatgcaggacaaggtgataagaggaagaatctgcctcacagg

SEQ ID NO: 505197 - DNA, 201 bp, Homo sapiens
aaagatacacaccggaagtgtgaggctttaagtgaggatgtgtgaggcatcccacctcctacaccacaccaacagcatgacctctctctctgtttcaggaytcatatccaggctcaaatatccagtgtctcaacaaaacaagaatgcaccttccactgcaggcctgggatacggtaactccttatttctctggggtagggt

SEQ ID NO: 505198 - DNA, 201 bp, Homo sapiens
tacacaccggaagtgtgaggctttaagtgaggatgtgtgaggcatcccacctcctacaccacaccaacagcatgacctctctctctgtttcaggactcatrtccaggctcaaatatccagtgtctcaacaaaacaagaatgcaccttccactgcaggcctgggatacggtaactccttatttctctggggtagggtggact

SEQ ID NO: 505199 - DNA, 201 bp, Homo sapiens
cttcctcatagtcagagcagcactaaaccctgcccaaacacagatacttgagagagaggaagacttcctcttgtacaaactggatttgttctaaaacagaraaagagtagaggcagcttccagaaggacctgtcttataggaagtaagagcaggggacaagaatgaaacagatggtgggtctaagcagggaatgtatccac

SEQ ID NO: 505200 - DNA, 201 bp, Homo sapiens
ttttacatttgttgtggagggaatttttttctgtttctggtcctataccaacactgaaatgataacctacctttgcaatacaggtgaacgttatccttacrtagaaaaaacaggccgaggttggtagctcacgcctgtaatcccagcactttgggaggccaaggtgggaggatcacaaggtcaagagatcgagaccatcct

SEQ ID NO: 505201 - DNA, 201 bp, Homo sapiens
atggaggggggctgttcttgaggtggagaagagacccatgaggcagggggaagctgggatgaagcctagattctcaaggtctggcctgatgcctgtcaggrggctcaggatccccaggcccatgaagagggcattgcactgctgagcgggcagctggcccagagtggggttccagcctctggccctttgggctcctaggac

SEQ ID NO: 505202 - DNA, 201 bp, Homo sapiens
gggggctgttcttgaggtggagaagagacccatgaggcagggggaagctgggatgaagcctagattctcaaggtctggcctgatgcctgtcagggggctcrggatccccaggcccatgaagagggcattgcactgctgagcgggcagctggcccagagtggggttccagcctctggccctttgggctcctaggaccctaga

SEQ ID NO: 505203 - DNA, 201 bp, Homo sapiens
ggaccctagagacatcctgagctctgatgtgaggcctgatgtctaataggccctgtggatattggctgaagaaatcaacaccatcagggtggtagggacayggagtgggtgctttcctgccgtgaaatgctgggtaagctccaaggagggaggatacagcaggagggacagtgcctgcccatcccatgtctcccccctcag

SEQ ID NO: 505204 - DNA, 201 bp, Homo sapiens
cagtgcctgcccatcccatgtctcccccctcagaatgtgtggtggaggccgagggccggagagtggcagatggagagagctggcgggaccccagcaatgcrtgcatcgcctgcacctgccatgtgagctggggtgggcctgggagggtggaggatctcgcagatggataaagggaggagtgtccaacactccaccagcaga

SEQ ID NO: 505205 - DNA, 201 bp, Homo sapiens
ggaactggggaagctgacaggaaccctttgcctctccgcagctgggtgcagtttgtggagcatcttggccagcaggtggcgctgcagggcgacagttgtgmtgagacgtgaggcccaggcaggcagggggtagcccagccacaggggtgggcgagctttttttgttgtcgttgttagagtaaaaatttattaagattgggg

SEQ ID NO: 505206 - DNA, 201 bp, Homo sapiens
gtttcatggcaggctttggccagtgaacaaatcctactctgaagctagacatgtgctttgaaatgattatcatcctaatatcatgggggaaaaaataccaratttaaattatatgttttgtgttctcatttattatcatttttttctgtacaaatctattatttctagatttttgtataacatgatagacataaaattggt

SEQ ID NO: 505207 - DNA, 201 bp, Homo sapiens
agggggtgaataaaattaaatactagggtacctttttccttagtcttattctatcgaaagtggacctttgggaaggcccatggtcgtggttgaaaatagcrtagttatatcgtttggcaagtggaagaggattggaaattctcctggtttatagcggaaagtggtaatgcgttcattgttggaaatcacttttccagaatc

SEQ ID NO: 505208 - DNA, 201 bp, Homo sapiens
cagggaagttagctttcagtccactggcgagtctgaatggaaggatactaattatacactcaacacagattccttggactgggtgagtgcttgataaggtkggggaaccttttgggccttggaaggaagggtcctagttcaaggggagaaaaaagcattttaatgttcattacagatttttttttaactagtaaatattgt

SEQ ID NO: 505209 - DNA, 201 bp, Homo sapiens
gactgggtgagtgcttgataaggtgggggaaccttttgggccttggaaggaagggtcctagttcaaggggagaaaaaagcattttaatgttcattacagakttttttttaactagtaaatattgttctttgcaggccttatatgaccacctaatggatttccttgccgaccgaggggtggacaacacttttgcagatgagc

SEQ ID NO: 505210 - DNA, 201 bp, Homo sapiens
ggtgtgtctggcctgctttgtgattatgaaacttcccacaagtactctaagggatgagtctctactacagcccttgttctttgtgaggcattcccttcccsgttccagggctgctctcggtgtttagcagaggcaccctccatcgcttcttcctttccttgcagggcaaattttctgacggggaaagtctcttaaaggggc

SEQ ID NO: 505211 - DNA, 201 bp, Homo sapiens
ccagcagggggagagaggtggggagtgagggaagagggttaaaacctgatgagtttcatgctgtcagtggccccctttcttcccctgagtctagcttgtcstggagaacccttcagtttcccaatattgtttcttctcaggttggacaagaagacgaggctgagagtgacatcttctctatcagggaagttagctttcagt

SEQ ID NO: 505212 - DNA, 201 bp, Homo sapiens
ccacaagtactctaagggatgagtctctactacagcccttgttctttgtgaggcattcccttccccgttccagggctgctctcggtgtttagcagaggcascctccatcgcttcttcctttccttgcagggcaaattttctgacggggaaagtctcttaaaggggcttctgttccatctcaccagcctctcaggtccttac

SEQ ID NO: 505213 - DNA, 201 bp, Homo sapiens
acctttttccttagtcttattctatcgaaagtggacctttgggaaggcccatggtcgtggttgaaaatagcatagttatatcgtttggcaagtggaagagkattggaaattctcctggtttatagcggaaagtggtaatgcgttcattgttggaaatcacttttccagaatcaggctcagcttcctactactattatggta

SEQ ID NO: 505214 - DNA, 201 bp, Homo sapiens
agaggattggaaattctcctggtttatagcggaaagtggtaatgcgttcattgttggaaatcacttttccagaatcaggctcagcttcctactactattayggtatttttaccgataaggaaacaggcttctagagtaaccgtaatagcagagagattagaaacagtccaggtttctggctgcaataacctgggtaatagt

SEQ ID NO: 505215 - DNA, 201 bp, Homo sapiens
gccaggatggtctcgatctcttgacctcgtgatctgcccacctcggcctcccaaagtgctgggattacaggcgtgagccactgcgcccagccttcatgtaytcttgtgtggaatggtgcctgccagagttgcatagcccagcagttttggttctaaaccttatgtcccaagaattttgactcaaactttggaacatgattt

SEQ ID NO: 505216 - DNA, 201 bp, Homo sapiens
actcccttaaccttgcaggacccatcctgggtcatccccagaagagccttgagttcaggtgtggatactttgataaatgggtttcaagagagtgaaggatwcatttggacaacttcgtaagccccaggcagtccattcaccgaacacaaatttgctgtgggctggttactaaggagacaaaaatgtagtgcaaaaaagtac

SEQ ID NO: 505217 - DNA, 201 bp, Homo sapiens
ggcgtgagccactgcgcccagccttcatgtactcttgtgtggaatggtgcctgccagagttgcatagcccagcagttttggttctaaaccttatgtcccargaattttgactcaaactttggaacatgatttgtcaggtgtggattcttgcaccttaaaattgtcactagttggtgtgtctggcctgctttgtgattatga

SEQ ID NO: 505218 - DNA, 201 bp, Homo sapiens
aatctattatttctagatttttgtataacatgatagacataaaattggtttatctcctccaaggcagtttgtctttttctattcctcccccttcaacctgygtcacaaaagaccaagaacagatgtcggaaaagtttttttttcttcagtattgtttaaaagtttcaatacaaaataagttataaataaaaggcttgtatg

SEQ ID NO: 505219 - DNA, 201 bp, Homo sapiens
gtgaacaaatcctactctgaagctagacatgtgctttgaaatgattatcatcctaatatcatgggggaaaaaataccaaatttaaattatatgttttgtgytctcatttattatcatttttttctgtacaaatctattatttctagatttttgtataacatgatagacataaaattggtttatctcctccaaggcagtttg

SEQ ID NO: 505220 - DNA, 201 bp, Homo sapiens
tctagcttagaccagcccagcagggggagagaggtggggagtgagggaagagggttaaaacctgatgagtttcatgctgtcagtggccccctttcttcccmtgagtctagcttgtcctggagaacccttcagtttcccaatattgtttcttctcaggttggacaagaagacgaggctgagagtgacatcttctctatcagg

SEQ ID NO: 505221 - DNA, 201 bp, Homo sapiens; identical to SEQ ID NO: 213914

SEQ ID NO: 505222 - DNA, 201 bp, Homo sapiens
cttcatttgggaatagtatggcataagactattcaaatggctacataatatcctaatagtggtggccatcagacactctgaacagagatccttgatccagscatccatctccttccagcagcagcatgtattgacttcttgtttccccagcctgaactgacatcaactcccaatttcgtggttgaagttataaagaatgat

SEQ ID NO: 505223 - DNA, 201 bp, Homo sapiens
atgtttagtatgggtgaaaatgaaaaatatgtaacttctatgtaacaggatggggttacactgtagtaagggctgccatcagaggtggggagtttgtgacstaagtcagctcccccatcatctcctaaactgttaaagtgtttacacttttctgcattatagtcatccataatctcattacacagataaacatttggcatc

SEQ ID NO: 505224 - DNA, 201 bp, Homo sapiens
tggaactgaatgggacagaagcgaaattagtgcggaaagttgccggggaaaagtaagtactggtctggggatcccagggcagcaactcccttaaccttgcrggacccatcctgggtcatccccagaagagccttgagttcaggtgtggatactttgataaatgggtttcaagagagtgaaggattcatttggacaacttcg

SEQ ID NO: 505225 - DNA, 201 bp, Homo sapiens
ttttcttgaagacctcaagagttttgtcaagagccagtagagcagacagatgctgaaagccatagtttcatggcaggctttggccagtgaacaaatcctamtctgaagctagacatgtgctttgaaatgattatcatcctaatatcatgggggaaaaaataccaaatttaaattatatgttttgtgttctcatttattatc

SEQ ID NO: 505226 - DNA, 201 bp, Homo sapiens
acctgtagtcccagctacttgtgaggctgaggcaggagatggcgtgaacccagaaggtggaggttgcagtgagccgagatcgtgccactgtactccagccygggcgacagagcgagactctgtctcaaaaaaataaaaaaatgaaagaagttgcaaaatgatggatgtaaatgttggatggtgggtcaagggtagaggtct

SEQ ID NO: 505227 - DNA, 201 bp, Homo sapiens
gccagcttgattctggcacttggtagcagatgcccatgaaggggaaaaataagcaggcaaaaaccaaaaaacagaaaccaactctcaaaactccagcagarggcaatgaagctgttaatattttggtgagttgtttccatctggcaaagaattctatttagagaagttgcaaggccgggcacagtggctcatgcctgtaat

SEQ ID NO: 505228 - DNA, 201 bp, Homo sapiens
ttaggtatagatttcgtagctatgaaaagaatgacccttaaaaaatgataatctggctttcacccaaattaaaacctttttctctttgagagatactgctrtggactcaactgtgttcccacaaaattgacatgttgaagccctaatccctaaaatgatggtatttggagatggggtctttgggaggtaattaggttaaat

SEQ ID NO: 505229 - DNA, 201 bp, Homo sapiens
tagtaaatgttgaactcagactgtttcttcccactttgttcttttcaaaattgtttcagctattctagtttgtcttttcacataaagtttataatactacrtctgtatgtataaaaagttttgcttgaattttaatagaaatacattaaatgtatatatcaatttggggaagaattgacatctttactgtgttaggtcttc

SEQ ID NO: 505230 - DNA, 201 bp, Homo sapiens
aatctctgctccagagctccgtgttgggctccggtctttctggcttcttgtcaggttatgatttgatgattcctctgtccaatatttctttttttaaaaawttttattattattatactttaagttttagggtacatgtgcacaacgtgcaggtttgttacatatgtatacatgtgccatgttggtgtgctgcacccatta

SEQ ID NO: 505231 - DNA, 201 bp, Homo sapiens
gtgagaatgcaaaattgcacaactgctttggaaaacatgtataatgttaatcatacacttataatagaacccagtaaccttactccaagatatttactcaygagaaatgaaaacttacgttcataccaagacctgtatgtaacagttacactggctttattcataatcatcaaaatctggaaacaaacgttcttcaactgg

SEQ ID NO: 505232 - DNA, 201 bp, Homo sapiens
ccagaagtcgaggggaggaaccgagggaacgcgcaagaaaggacgcagcgtcagcgcggacgttctcacgcacggcacacggaagcaagcacggcgtgagwtcgtccctctgcgcacgccccggtttcctcgcgtccgcggctgctcacccgaactccagatgacctccagggagttggaaactgccagctccaaccgagc

SEQ ID NO: 505233 - DNA, 201 bp, Homo sapiens
ggagttggaaactgccagctccaaccgagcctttcctcttccccaggaggacgcaacgcggatgcttgcagctggtcaccacgactccgactccgactcckggccgccgcccgcgcggctgtgcgctggccgtcatagcgcgcgggaggacgcgcctggcagcggcaggaagtgacgcgctcactaccccgtcccgcggcc

SEQ ID NO: 505234 - DNA, 201 bp, Homo sapiens
gagcatggaatgtttttccatttgtttgtttccctcttatttccttgagcaatggtttgtagttctccttgaagaggtccttcacatcccttgtaagttgkattcctaggtattttattctctttgtagcaattgtgaatgggagttcactcatgatttggctctctgtctgttattggtgtataggaatgcttgtgattt

SEQ ID NO: 505235 - DNA, 201 bp, Homo sapiens
gatattgattcttcctatccatgagcatggaatgtttttccatttgtttgtttccctcttatttccttgagcaatggtttgtagttctccttgaagaggtycttcacatcccttgtaagttgtattcctaggtattttattctctttgtagcaattgtgaatgggagttcactcatgatttggctctctgtctgttattgg

SEQ ID NO: 505236 - DNA, 201 bp, Homo sapiens
gtgaagccatagccaacctgcagcccctaacatgtaacatgagtgagaaatacactattgttgtaagccactgagatttacggggctgtttgttactgtarcacaatctagctaaagcagactaatacacatttttggttcttagttgtgctgaaatagaggatatatccttgttgatactttaaggaaaaattgtgttta

SEQ ID NO: 505237 - DNA, 201 bp, Homo sapiens
tttaatgattgccattctaacttacatgagatgctatctcattgtgatttggtttgcatttctctaatgaccagtgatgatgagctttttttcatatgttygttggccgcataaatgttttctttcgagaagtgtctattcatatcttttgcccactttttgatggggttgtttgtttttttttcttgtacatttgtttat

SEQ ID NO: 505238 - DNA, 201 bp, Homo sapiens
taaaatgaggttgcaatatccaattcttagtagaagctttgagtctttgctgtttgccagtaagtcaatattttcctcagacttgagaatatgtctcagtrgagactgtttgttcagcctaagtcctagaatgaaaagaaagatggagtgaagccatagccaacctgcagcccctaacatgtaacatgagtgagaaataca

SEQ ID NO: 505239 - DNA, 201 bp, Homo sapiens
tagaaatagataggttgattctaaaattggtatggaaacacaaataactagaataatagaaacagtttttaaaaagaaaacatttagagggttcacaccayttgatttcaagacttaggattaagccacagtaatcaagagagtatggtgttggtaaaaacatagacatatagatcagtgaaacaaaatggactggaaata

SEQ ID NO: 505240 - DNA, 201 bp, Homo sapiens
ttctagatcctggaggaattgccacactgtcttccacaatggttgaactaatttacacgcccaccaacagtgtaaaagtgttcctatttctctacattctytccagcatctgttgtttcctgactttttaatgattgccattctaacttacatgagatgctatctcattgtgatttggtttgcatttctctaatgaccagt

SEQ ID NO: 505241 - DNA, 201 bp, Homo sapiens
tttgaccaataaaatgaggttgcaatatccaattcttagtagaagctttgagtctttgctgtttgccagtaagtcaatattttcctcagacttgagaataygtctcagtagagactgtttgttcagcctaagtcctagaatgaaaagaaagatggagtgaagccatagccaacctgcagcccctaacatgtaacatgagtg

SEQ ID NO: 505242 - DNA, 201 bp, Homo sapiens; identical to SEQ ID NO: 347327

SEQ ID NO: 505243 - DNA, 201 bp, Homo sapiens
catttctagttctagatcctggaggaattgccacactgtcttccacaatggttgaactaatttacacgcccaccaacagtgtaaaagtgttcctatttctytacattctttccagcatctgttgtttcctgactttttaatgattgccattctaacttacatgagatgctatctcattgtgatttggtttgcatttctcta

SEQ ID NO: 505244 - DNA, 201 bp, Homo sapiens
agcaatgtgtgaatgattcatgcccatgtcagcatttttattgcactactttttattttagctaatctgacaggtgtgtagtaataccacattgttgtttyaatttttatttcccccaatgtctaaagatgttgaacatcttttcatgtgcttatttgctgtttatatgtcctccttgggaaaatatatgttcatgttttt

SEQ ID NO: 505245 - DNA, 201 bp, Homo sapiens
ttcttgtgcctctttttttttttttttttttttttttttgagacagggtctcactctatcacccaggttgtagtgcagtggtgtgatctcagctcactgcratgacctctcagatgaggcctcagatgggaagcacgacaaggctggggcagaacaggagaatcccctcctgccttcaacactatcctcatttatctaatg

SEQ ID NO: 505246 - DNA, 201 bp, Homo sapiens
gcccctcataaaactgtcagatctactgagaattcactcactatcatgagaacagcctgggggaaaccatccccgtgattcaattatctccgcctggtctytcccttgatatgtggggattatggggattataattcaagataagatttgggtggggacacagccaaaccatatcaactttcaatttactttgtgctttat

SEQ ID NO: 505247 - DNA, 201 bp, Homo sapiens
taaaatctataatttatggactagccctgatctttcatattcttaagggagagatataggtccgacttgcaggcatattgccttactccataatcccattytgaatgttagaaattgaatatttagtctggacacggtggctcaagcctgtaatccgagcactttggaaggccaaggcaggcgaatcacttgagtcaggag

SEQ ID NO: 505248 - DNA, 201 bp, Homo sapiens
tcaccatgttagccaggatggtctcgatctcctgacctcatgatccgcctgcttcggcctcccaaagtgctggaattacaggcgtgagccaccgcgccagmctggatgtgcttgattctactcccagacctgagcctcttgtttaaactcatccagtttcttttccctctttcctctggtctatccctatgtttgatattt

SEQ ID NO: 505249 - DNA, 201 bp, Homo sapiens
ggtatggtagccagaagaggaagaattttgatcattttcccaatctaccacacatactttgggctaattggaaaacttcagttttcccttaaataaaatawgaatgataaatacctataatacattatagagctactgaaaggcttaaatgggatccataagtacaggatatagtgtggtatatatctatagcaaacattc

SEQ ID NO: 505250 - DNA, 201 bp, Homo sapiens
gatcacctgaggttaggaattcgagatcagcctggccaacatggtgaaaccccgtctctactaataatacaaaaattagccaggcgcggtggctggtgccygtagtcccagctacttgggaggctgaggcaggagaatcgcttgaacccaggaggtggaagttgtgtgttgggagaaaagctgagtgttgggagagaagct

SEQ ID NO: 505251 - DNA, 201 bp, Homo sapiens
gctggagtacaatggcgcaatctctgctcactgcatcctctgcctcctgggttcaagcaattctcctgccttagcctccgaagtagctgggattacaggcrcccgccaccatgcccagataatttttttgtgtctgtgtatttttagtagagatggggttccactctgttggccaggctggtcttgaactcctgacctcat

SEQ ID NO: 505252 - DNA, 201 bp, Homo sapiens
acagttgtgctttgaatattcatcacccgtcagcctatccactcccagattcctgcaaaccatgcatttacatgtacaagccgcctgctcttaccaacctyggcaccactgcacattcttttttccgtgaatgacctcgcccaccatggtgcacccatttgccctgtagctcaaatcagcgtggtaccaggataaggatag

SEQ ID NO: 505253 - DNA, 201 bp, Homo sapiens
tgctaatagtgattgacagaggagcaacaaggatgctaaaaagtcatcaccttttactacttgtctttgcatcttggctctcactgcctagctttcatgcygtatcctctaatacgttttcatcataattttaatatcctgaacattgttgaagaagtgcaatgtttggagaacgttcggggtagctccaccaccccactt

SEQ ID NO: 505254 - DNA, 201 bp, Homo sapiens
ttcaaaatagcaaatttaagcattttgatctgtaaccatgccctcccctcttaacagtcccagccggtctctgaccctgggaggatggaacctgggagggrgtagagcgtagagtgtaatctgaggcctgtgctaatagtgattgacagaggagcaacaaggatgctaaaaagtcatcaccttttactacttgtctttgca

SEQ ID NO: 505255 - DNA, 201 bp, Homo sapiens
gaatataaacacaatgaaatactattccatcttaaaaattaattaaattttgacataagctacaacatagatgaaccttgaagacattatgctaagtgaagtcagccagtcacaaaaggacaaatattgtatgattttacacttatggtgaggtacctagagtaggcaaattcatagagacagaaaatagaatattggctg

SEQ ID NO: 505256 - DNA, 201 bp, Homo sapiens
ttttgacataagctacaacatagatgaaccttgaagacattatgctaagtgaagtcagccagtcacaaaaggacaaatattgtatgattttacacttatgrtgaggtacctagagtaggcaaattcatagagacagaaaatagaatattggctgcgaggggctaaaaggaaagggtattgggaagtatttaatgggtacat

SEQ ID NO: 505257 - DNA, 201 bp, Homo sapiens
caccacacagatctctggtttctgaaaattttttctattggcccagatttacttgatgtttgactacattagcttgatttcctaagaagctctctactacyactgtaaatggttccctctccccagtgctgcacccgcttatttattttttattatactttaagttctggggtacaagtgcagaacgtgcaggtttgttac

SEQ ID NO: 505258 - DNA, 201 bp, Homo sapiens
cagaatcccaaaaggtggtgtatatcatttttccttaagtaactcttgactgcaaccattggctctctaagtttcaggacttggtaagcatcttccagacygagccatcagccttttaactctattcttctgaagcaagtagtattgtccttttgattgacagaaatgtaaccacaccacacagatctctggtttctgaaa

SEQ ID NO: 505259 - DNA, 201 bp, Homo sapiens
ataattggaagctttttaattttttatagtgcctcttgaaaagcagaaggaccagatggtacaagcaggctggtgaccaataggatgtgacataaagtatsctatatgttttgccaggctaggtcataagaatccttgcagtttttttctcaggctcttagactactcactctagaggaaaaccagcaccatgtaaaaagt

SEQ ID NO: 505260 - DNA, 201 bp, Homo sapiens
gctggaatgctcctcatactggctattttgttctgctccagtatatccttatgttaatggcagcctctctgttctattttcatacctcttttatgtatctrttattattgagtcagctttttaccagaagataactgaggctgagaatattcctagcaatgaagtatgaagcaggccctccttaatttacctgaagaacat

SEQ ID NO: 505261 - DNA, 201 bp, Homo sapiens
aaccttggatgctgaatttacatctatgataggataggaggttggacacacctcattataccccctcccttgttaacagtcattaggttttcagccgggcyctgtggctcacacctgtaatcccagcactttgggaggctgaggcaggcagatcacctgaggttaggaattcgagatcagcctggccaacatggtgaaacc

SEQ ID NO: 505262 - DNA, 201 bp, Homo sapiens
gcacatgccaccacgcccagctaattgtgtatttttagtagagacggggtttctctgtgttggtcaggctagtctcaaacttctgacctcagatgatctgyctgcctcggcctcgcaaagtgctgggattacaggcgtgagctaccatgcctggcctgtttgttttttttttttgtaatgggggtctcattatgtcactca

SEQ ID NO: 505263 - DNA, 201 bp, Homo sapiens
gtggcgcaatctcgactcactgcaagctccgcctcctgggttcacgccattctcctgcctcaacctcccgagtagctaggactacaaacacccaccaccaygcccggctaatttttttgtatttttagtagagacagggtttcatcgtgttacccaggatggtttccatctcctgacctcgtgatccgcctgtctcggcct

SEQ ID NO: 505264 - DNA, 201 bp, Homo sapiens
aggctgctggagaaaaattacacaataggcacatttttgtaggtatatagtcaccatcaccaacctcagatggttcttaacacaccccagcaatcctgctrcttttttctgttaactttctttcctgcactctataatgaaaacttcaaaccctcttcactcccttcaaatttctgactccctcacctttcacctaatttc

SEQ ID NO: 505265 - DNA, 201 bp, Homo sapiens
gctgaactgctccacttaatatcaaaagtggtcatccttgtgggtggagctgagtttatgaagattatatatctgcagaggctagccttagcaggttcctyctctctctgggccttagaggacttggagagcctggctctggggtgatggtattcatcgtcccaggcattcctgttgaggtgagtaggccgctcctagaac

SEQ ID NO: 505266 - DNA, 201 bp, Homo sapiens
aggctggagtgcagtggcgcaatctcgactcactgcaagctccgcctcctgggttcacgccattctcctgcctcaacctcccgagtagctaggactacaarcacccaccaccacgcccggctaatttttttgtatttttagtagagacagggtttcatcgtgttacccaggatggtttccatctcctgacctcgtgatccg

SEQ ID NO: 505267 - DNA, 201 bp, Homo sapiens
aaaaaatccccatgaaaactggcaataccaaaggcaggtgaagatacagagttgttagaactctcatacattgttggtgagaatgcaaaattgcacaactkctttggaaaacatgtataatgttaatcatacacttataatagaacccagtaaccttactccaagatatttactcacgagaaatgaaaacttacgttcata

SEQ ID NO: 505268 - DNA, 201 bp, Homo sapiens
gagtttcttttttttttttttgagacggagtttcgctctttttgcccaggctggagtgcaatggcaccatctcggctcactgcaacctccacttccaccasggttcaagtgattctcctgcctcagcctcccgagtagcttggattacaggcatgcaccaccactctggctaattttgtatttttagtagagatggggttt

SEQ ID NO: 505269 - DNA, 201 bp, Homo sapiens
ttgtaagttgaaaatatagtcaagttgaaaatcttgttttcaacttacaatgggtctatttagatgtaaccccattgtaagtcgaggagcatctgtccttytaaatagttaaactagaaaacatttttcttctcctgaaaactttagcctgtgtggagaaaggtggcatgattcacataaagtacaaatggtcatgaaaaa

SEQ ID NO: 505270 - DNA, 201 bp, Homo sapiens
gttctcattggtttcaaagaacatctttatttctgccttaatttcgttatttacccagtagtaattcaggagcagcttgttcagtttccatgtagtagtgyggttttgaatgagtttcttttttttttttttgagacggagtttcgctctttttgcccaggctggagtgcaatggcaccatctcggctcactgcaacctcc

SEQ ID NO: 505271 - DNA, 201 bp, Homo sapiens
acagaggagcaacaaggatgctaaaaagtcatcaccttttactacttgtctttgcatcttggctctcactgcctagctttcatgccgtatcctctaatacsttttcatcataattttaatatcctgaacattgttgaagaagtgcaatgtttggagaacgttcggggtagctccaccaccccactttccacaagccatgct

SEQ ID NO: 505272 - DNA, 201 bp, Homo sapiens
ggtgactaacacatatgtaccccataaatgagtatttgagtaaaagctgctctaccttataccagtgtaacaaaatacagatgtccccagattaaatggtytgatttaatgatttttctattttacagtggtgcaaaagcaataacattcagtaggctccttatgatgggctatttccagataaactcgttgtaagttgaa

SEQ ID NO: 505273 - DNA, 201 bp, Homo sapiens
ttccctctacacactactttaaatgtgtcccagagattctggtacattgtatctttgttctcattggtttcaaagaacatctttatttctgccttaatttygttatttacccagtagtaattcaggagcagcttgttcagtttccatgtagtagtgtggttttgaatgagtttcttttttttttttttgagacggagtttc

SEQ ID NO: 505274 - DNA, 201 bp, Homo sapiens
caataaaacctggttatatgttatagcctgatctttactaagctttgaagagttggaatagcctaagtctaccctcccataaaggaatgacaagaaaggarcatcagcccagagaagcattaaagtcaaggaggatgcctttgatgtcagtatctctagtacccaaatggtgactaacacatatgtaccccataaatgagt

SEQ ID NO: 505275 - DNA, 201 bp, Homo sapiens
ttattgcgtctatttgattcttctctcttttcttctttattagtctggctagcagtctatcaattttgttgatcttttcaaaaagcagctcctggattcaytgattttttgaagggtttttcgtgtctctatctccttcagttctgctctgatcttagttatttcttgtcttctgctactgtttgaatttgtttgctcttg

SEQ ID NO: 505276 - DNA, 201 bp, Homo sapiens
agcaaaaccatatcagatatgatggcaaataagcacatgagaagatgctaaacgtcatgagtcattaggaaaataaaagcctaaaccaaactgaggtaccwctgcacatctattagaatgaataagaaaaaaatccccatgaaaactggcaataccaaaggcaggtgaagatacagagttgttagaactctcatacattgt

SEQ ID NO: 505277 - DNA, 201 bp, Homo sapiens
ctactcaggaatttgacttcttcctcgtttagtcttgggagtgtgtgtgtttgcaggaatttatccatttcttcaagattttctagtttatttgtgtagasgtgtttatagtagtctgatggtagtttgtatttctgtgggattagtggtgatatcccctttatcatttttttattgcgtctatttgattcttctctcttt

SEQ ID NO: 505278 - DNA, 201 bp, Homo sapiens
acttttctagtgtttaccaccatagtaaatgctctgtaagtgaatgaattttgtgatggattatattattatgccaaatattcattgtccctttccctatraaaggattgcacatctctgtccaaggccatgtgaatttagtgcatcccttggaaggagtatacacccctgccatagtatcaggcttagcaacgtgacttc

SEQ ID NO: 505279 - DNA, 201 bp, Homo sapiens
tggggattatgggagctacaattcaaggtgagatttgggtggggacacagcaaaaccatatcagatatgatggcaaataagcacatgagaagatgctaaaygtcatgagtcattaggaaaataaaagcctaaaccaaactgaggtacctctgcacatctattagaatgaataagaaaaaaatccccatgaaaactggcaat

SEQ ID NO: 505280 - DNA, 201 bp, Homo sapiens
atttcatttgccagtattttgttgccgatttttgcatcgatgttcaacagggatattggcctgaaattttctttttttgttgtatctctgccaggttttgstatcaggatgatgctggcctcgtaaaatgagttggggggattccttctttttctattgtttggagtagtttcagaaggaatggtaccagttcctctttgt

SEQ ID NO: 505281 - DNA, 201 bp, Homo sapiens
tgattacaggtgtgagccaccacacccagccttcttcactgcacttttctagtgtttaccaccatagtaaatgctctgtaagtgaatgaattttgtgatgkattatattattatgccaaatattcattgtccctttccctataaaaggattgcacatctctgtccaaggccatgtgaatttagtgcatcccttggaaggag

SEQ ID NO: 505282 - DNA, 201 bp, Homo sapiens
ccttctctctctctcatgcacacgtgtgtgcatatatgttctcttaaccctctacccttccaccatgggatgatacagcaagaaagcccttattagatgcmgtctcttgactttggtctttccagcctccataactgtcagaaataagtctctgttctttataaattaccaaacagaaaccatcccttatagtggcacaaa

SEQ ID NO: 505283 - DNA, 201 bp, Homo sapiens
tcatttgttctgtttatgtgatggattaggtttattgatttgtatatgttgaatcagccttgcatcccagggatgaagccgacttgatcgtggtggatacrctttttgatgtgctcttggatttcatttgccagtattttgttgccgatttttgcatcgatgttcaacagggatattggcctgaaattttctttttttgtt

SEQ ID NO: 505284 - DNA, 201 bp, Homo sapiens
tgctgtgattacaggtgtgagccaccacacccagccttcttcactgcacttttctagtgtttaccaccatagtaaatgctctgtaagtgaatgaattttgkgatggattatattattatgccaaatattcattgtccctttccctataaaaggattgcacatctctgtccaaggccatgtgaatttagtgcatcccttgga

SEQ ID NO: 505285 - DNA, 201 bp, Homo sapiens
atgcattaatgctaatatcttgagaggaggttagttattgtgggagtgggttcctgataaagagacgagttggcccttccaacttttcccttctctctctytcatgcacacgtgtgtgcatatatgttctcttaaccctctacccttccaccatgggatgatacagcaagaaagcccttattagatgcagtctcttgactt

SEQ ID NO: 505286 - DNA, 201 bp, Homo sapiens
cactttggggggctgaggtggatggatcatttaaggtcagctgttcaagaccagcctggccaacatggtgaaaccctgtctctactgaaaatacaaaaatyagcccggagtggtagcaggtgcctgtgatcccagctacttgggaggcggaagcaggagaatcacttgaacctgggaggcggagcttgcagtgagccgaga

SEQ ID NO: 505287 - DNA, 201 bp, Homo sapiens
tgagattaatggttcctttacctctcccctagatggctgcttcctctagtccctttttcttcaaatgttcaccttatcatatgtaaaatatagatttactkggctttaactaaagtctcataagtaggtaatcatttatctcactgctgtctcctgttttttaaggaaaatgtataaatactaaagctcctgtgaaccttt

SEQ ID NO: 505288 - DNA, 201 bp, Homo sapiens
tagggggtcagggaacagtggaatgagatacacacacaactgtggtgcgagagaccaggtgttacaggtgccaggacccctagaactcctcatgctcatcytcgctgtccaaagattctgtgcctacttcataatccttctccagggcagccaggtcctctcaggcccagagagctcaccttcctccatgcccctgtccac

SEQ ID NO: 505289 - DNA, 201 bp, Homo sapiens
gcccactgcctgggcagaattccacagagttccacatcgcttgcaatatccattgtatttgtagggggtcagggaacagtggaatgagatacacacacaaytgtggtgcgagagaccaggtgttacaggtgccaggacccctagaactcctcatgctcatcctcgctgtccaaagattctgtgcctacttcataatccttc

SEQ ID NO: 505290 - DNA, 201 bp, Homo sapiens
cccaaagtgctggattacaggcctgaatcactgcacccagcccagaatatataatacattttagtgtttctcatcctcaaaaaaaaaaaaaaaaaaaaaaagtcaacttcccattagtgtctctagggacaacaagctgaccatgtcctaaaggcagcctattcttcccttaagcagctaaagatcttcctaatatggagg

SEQ ID NO: 505291 - DNA, 201 bp, Homo sapiens
ggttgaggcgggcccaggcctcagtgatggctgtggtattgtttagcacgcagactgcccgctgcaccttggctacagcacccccgggcaccactgtgggkgactggtagttgatgccaacctaagaaaaaacaaagaagtataagcgcctggttctgtgtttcctggaagggtctgtacagggatccctggaactaggga

SEQ ID NO: 505292 - DNA, 201 bp, Homo sapiens
tttgcttggttttaatggtggcaatggtggcattctcgtccttgggcaccacttctccacagtagagcaggcagcaggccatgtacttgccgtggcgaggktcacacttggccatctgattggagggctcaaagtagacactggagatctctgccactgagagctgctcatggtaggccttcttagctgagataatgggtg

SEQ ID NO: 505293 - DNA, 201 bp, Homo sapiens
tcaggtcaaacttttggttgaggcgggcccaggcctcagtgatggctgtggtattgtttagcacgcagactgcccgctgcaccttggctacagcacccccrggcaccactgtgggggactggtagttgatgccaacctaagaaaaaacaaagaagtataagcgcctggttctgtgtttcctggaagggtctgtacagggat

SEQ ID NO: 505294 - DNA, 201 bp, Homo sapiens
agagttccacatcgcttgcaatatccattgtatttgtagggggtcagggaacagtggaatgagatacacacacaactgtggtgcgagagaccaggtgttayaggtgccaggacccctagaactcctcatgctcatcctcgctgtccaaagattctgtgcctacttcataatccttctccagggcagccaggtcctctcagg

SEQ ID NO: 505295 - DNA, 201 bp, Homo sapiens
caccaaacctgtcacagtcagcaggcccatgcccgtcaccaaggccatgccggtcaccaaacccatcacagtcaccaagtctgtgccggtcaccaaacccrtacctgtcaccaaacccattacggtaacaaagcttgtgacagttacgaaacccgtgccggtcaccaagccagtgacagtcagcaggcccattgtggtcag

SEQ ID NO: 505296 - DNA, 201 bp, Homo sapiens
cccagagcttcactggtggagctggaggagccggaggtggagggtggggtctggcagctgctgctggggcagcctcatgaggggaggggaggggaggggargggagcaggcactgggcgggggcctaggtgcactttgtccttgccaccaatggcgggaggagggtggacctgaacacctgcagggtgtggtgcctgcccc

SEQ ID NO: 505297 - DNA, 201 bp, Homo sapiens
ttcccctgggcacctgcctctccctacccttcctctcccctaccacccctgccgccctggtaactcagtggccccctgcattgtctggcacagacagccasagctttccttgggccaccgctgactctgaccctttagccatgagtaggggcttaggacagatctgggtcctccaagggctggggcactggcctgcctatg

SEQ ID NO: 505298 - DNA, 201 bp, Homo sapiens
tgtgctctcctccagtgttcagccttctggcactgcaggcctaggttggagcagcctcgtggagtagggacggactagttcgggccctggggtcttgctgrggcccataggcatgtggggcaggaagctgggcagagctggcctggctctgagtggccactgggggaaaggcagccttctgtctgccaatctgggtaggcc

SEQ ID NO: 505299 - DNA, 201 bp, Homo sapiens; identical to SEQ ID NO: 299326

SEQ ID NO: 505300 - DNA, 201 bp, Homo sapiens
tccagggctggggctgtccaccgagtgacagcccctgagcccatccctgtttctctccaccccatgtgtgcacacaggcctggtcaaagctgaggacaagrcccgagttcaccgctccaagaagcaggaggggccaggccctgaggacgcccggaagaaggtgccagctgcccccatcactgtcagcaaggaggcaccggc

SEQ ID NO: 505301 - DNA, 201 bp, Homo sapiens
ctgccgaggcgagtgttcttagagcagctggggtgtcttctggcctcaggctcaccctggtgctgtcgaattcacagctcaactacactcgaccagggctycccacgctgaacccccagctgctagaggcatggaagaatgaagtgaaggagaaaggccacgtcaactgtcccaacgacgtgagcggaggcagccgggtgg

SEQ ID NO: 505302 - DNA, 201 bp, Homo sapiens
aaggtatgggggctcgtcccaggtcagggaacagtggtgagaaaaggtatgggggctcgtcccaggtcagggaacagtggtaagaaaaggtatgggggctygtcccaggtcggggaacagtggtgagaaaaggtatgggggctcgttccaggtcagggtgctcctcggccacggcctgggggtaatggggcccacagttag

SEQ ID NO: 505303 - DNA, 201 bp, Homo sapiens
ccatgcccgtcaccaaggccatgccggtcaccaaacccatcacagtcaccaagtctgtgccggtcaccaaacccgtacctgtcaccaaacccattacggtmacaaagcttgtgacagttacgaaacccgtgccggtcaccaagccagtgacagtcagcaggcccattgtggtcagcaagccggtgacagtcagcaggccca

SEQ ID NO: 505304 - DNA, 201 bp, Homo sapiens
cctctgacctcgcaccccaccttcaccgcagtgcccccggtttctaacctcggacaacggtggcccaacacctgggcggggcggggccagggcagggctcygtggcgatggtgccgggtcaccgatgctcaccctgtccccagccctctgacgccgaggcctccgaagggggcgagcaggaggagcgcgagaggctgcgca

SEQ ID NO: 505305 - DNA, 201 bp, Homo sapiens
ctacacagcttccgagccttgctgtgttgtgtgctgcagggatgccggtggtccgtggtggacagacagtgcccggccaggcccctctctgctttgacccrggaagtccagccagtgacaagacagaagggaagaaaaaggggcggccaaaagccgagaaccaggccctccgagacattcctgtgagctccctcagggcca

SEQ ID NO: 505306 - DNA, 201 bp, Homo sapiens
accacactatggccgagcacagtgccaaggtaccgtcgggcccccagctcccgtccagcgtgacctctgacctcgcaccccaccttcaccgcagtgccccyggtttctaacctcggacaacggtggcccaacacctgggcggggcggggccagggcagggctccgtggcgatggtgccgggtcaccgatgctcaccctgtc

SEQ ID NO: 505307 - DNA, 201 bp, Homo sapiens
ctgcaggagatagcggaggacgagctggcccgcgactggaccaagcggcgcatgaaggatgaccttgtgcccgagaccgcacgggtgagctgccccccccrgggctgtggacagcgccgtggcctctgcgtggggcatgccttggcctgagacttgggacagccactgctgtgacctgggccacccgctgcccccgccatc

SEQ ID NO: 505308 - DNA, 201 bp, Homo sapiens
caggtggccctgaagagcagtggcagagggccatccatgagcgcggggaagccgtctgccccacctgcaacgtggtcacccggaagactctcgtggggctyaagaagcacatggaggtgtgtcagaaggtaaggcagctcccggaaggcgctgggagggaggcgccctggccccaggcaggcttctcacatgtgggccatc

SEQ ID NO: 505309 - DNA, 201 bp, Homo sapiens
cgcgtgtgtttcccacccctctctgtaagagacgtgtgtcctggtgggcgggagggtgaaacctccgtgttccctcgggttgcctgcgtcagccatgtccycagcacactgggaggcctgtgggtccaccggccttagggtggcctcgccgcgcgctgacctgactcttgctcccgcggctcactctagcctccatgcctt

SEQ ID NO: 505310 - DNA, 201 bp, Homo sapiens
cgagggctctgtgtccccgctgggctcgggagggccgaagccccttctcatccggggcgccagtcgcgtctctgcctcccaggctggccctggcctcaggycccactattctgaattcttctcccaggcttcagaaaaattggaagtggggcctcagcaggcacctgcaccccaggccaccggggtcatcaggtgctggga

SEQ ID NO: 505311 - DNA, 201 bp, Homo sapiens
aagtgccagcactgccggaagcagttcaagtccaaagccggcctcaactaccacactatggccgagcacagtgccaaggtaccgtcgggcccccagctccygtccagcgtgacctctgacctcgcaccccaccttcaccgcagtgcccccggtttctaacctcggacaacggtggcccaacacctgggcggggcggggcca

SEQ ID NO: 505312 - DNA, 201 bp, Homo sapiens
gagctgccccccccagggctgtggacagcgccgtggcctctgcgtggggcatgccttggcctgagacttgggacagccactgctgtgacctgggccacccrctgcccccgccatctgcggcgagtgtcgcctgctgccgaggcgagtgttcttagagcagctggggtgtcttctggcctcaggctcaccctggtgctgtcg

SEQ ID NO: 505313 - DNA, 201 bp, Homo sapiens; identical to SEQ ID NO: 299342

SEQ ID NO: 505314 - DNA, 201 bp, Homo sapiens
caccaaacccatcacagtcaccaagtctgtgccggtcaccaaacccgtacctgtcaccaaacccattacggtaacaaagcttgtgacagttacgaaacccrtgccggtcaccaagccagtgacagtcagcaggcccattgtggtcagcaagccggtgacagtcagcaggcccattgctatcagcagacacacaccgccctg

SEQ ID NO: 505315 - DNA, 201 bp, Homo sapiens
agatcctatcaaactgatgatgactcctgggttatctggggagaccttggctggcagcccctcccctaagtcagaagcccccatcacttgcttttcccacrtgaacaaaaccacaggaaggcaggcccctcttccctgaccagagaggacctgccaagggcagggctccagggcagcctcaccacgtgttccaagtggggc

SEQ ID NO: 505316 - DNA, 201 bp, Homo sapiens
atcctatcaaactgatgatgactcctgggttatctggggagaccttggctggcagcccctcccctaagtcagaagcccccatcacttgcttttcccacgtraacaaaaccacaggaaggcaggcccctcttccctgaccagagaggacctgccaagggcagggctccagggcagcctcaccacgtgttccaagtggggccc

SEQ ID NO: 505317 - DNA, 201 bp, Homo sapiens
ggtgcttgcctggtcctgaaggctgtgtccagccctgctgcaggtgcttgcctggtcctgaaggctgtgtccagccctgctgcaggtgcttgcctggtccygaaggctgtgtccagccccctgcaggtgcttgcctggtcccgaaggctgtgtccagccccctgctgcaggtgcctgcctggtcccgaaggctgtgtccag

SEQ ID NO: 505318 - DNA, 201 bp, Homo sapiens
agctggcccgcgactggaccaagcggcgcatgaaggatgaccttgtgcccgagaccgcacgggtgagctgccccccccagggctgtggacagcgccgtggyctctgcgtggggcatgccttggcctgagacttgggacagccactgctgtgacctgggccacccgctgcccccgccatctgcggcgagtgtcgcctgctgc

SEQ ID NO: 505319 - DNA, 201 bp, Homo sapiens
ccctgctgcaggtgcttgcctggtcccgaaggctgtgtccagccccctgcaggtgcttgcctggtcccgaaggctgtgtccagccccctgctgcaggtgcytgcctggtcccgaaggctgtgtccagccctgcggcaggtgcctgcctggtcctgaaggctgtgtccagccctgcggcaggtgcctgcctggtcctgaagg

SEQ ID NO: 505320 - DNA, 201 bp, Homo sapiens
acttgcttttcccacgtgaacaaaaccacaggaaggcaggcccctcttccctgaccagagaggacctgccaagggcagggctccagggcagcctcaccacrtgttccaagtggggcccgtcaggcttcacagattgtctacttgctctgcagagatgacggatcctttctgcgttggaggccgtcggctcccggggtccag

SEQ ID NO: 505321 - DNA, 201 bp, Homo sapiens
cacctcacctgctccctgcagggctgcggacagcctggacacctgcccaattccacccaagcaggccaggccagagaatggggagtacggcccctcctccrtgggccagagctcggccttccagctgagtgcagacaccagcagtggctccttgtcgccaggcagcaggccgtcagggggcatggaggcactgaaggctgc

SEQ ID NO: 505322 - DNA, 201 bp, Homo sapiens
aagggcccggaagggctgactcaccgggccgacgctcacacgaaaatgggatgcactttatttgctggtgcaaaggcaggtgagggtgcctcctgtgtgaycgttggccctcctgcctggtggcgctgaagggaaggagccagtgagcctgaccccgggaggggccgtccccgtgtgccgcgtttggcggggccccaggcg

SEQ ID NO: 505323 - DNA, 201 bp, Homo sapiens; identical to SEQ ID NO: 299355

SEQ ID NO: 505324 - DNA, 201 bp, Homo sapiens
gaaggatggcagccgaaaggaggtccgacttccaatgctgcatgacccaccgaagatgggtaagaggagtcagggccagagtcaattccagatggttctgrgcagcaagtggtaggagtggaccattgccctgggcgtcctgtctccaggtacccagctaggcccctagagttcccaaggaccttaccagggtaggggttg

SEQ ID NO: 505325 - DNA, 201 bp, Homo sapiens
caaggcacctctcccaggggcacaccccctcccagcactgggtaggagtgcatcaccttcggcatcatcttcgcagctgtggggctacgcacactgtggarctgcgtacactgtagagctgcgtgttgggaagggggtctggaagttggtgagggtctcaggacaggactagatcctatcaaactgatgatgactcctggg

SEQ ID NO: 505326 - DNA, 201 bp, Homo sapiens
tcaccaaacccatcacagtcaccaagtctgtgccggtcaccaaacccgtacctgtcaccaaacccattacggtaacaaagcttgtgacagttacgaaaccygtgccggtcaccaagccagtgacagtcagcaggcccattgtggtcagcaagccggtgacagtcagcaggcccattgctatcagcagacacacaccgccct

SEQ ID NO: 505327 - DNA, 201 bp, Homo sapiens; identical to SEQ ID NO: 299358

SEQ ID NO: 505328 - DNA, 201 bp, Homo sapiens
tgggccttcactgctggtgcttccacgacttgtttggctgaagtggtagtggtgggtctgtaggcagaggactgagaggatccagagagaggtggggggcrggtcagcctgccaagcctggagacaagtctgcgaagagcatcaggtaggatagttcagccggcacagggacgggagcttggtgcagtgccagattgggcc

SEQ ID NO: 505329 - DNA, 201 bp, Homo sapiens
gtcagccatgtccccagcacactgggaggcctgtgggtccaccggccttagggtggcctcgccgcgcgctgacctgactcttgctcccgcggctcactctrgcctccatgccttcctgccctccagccccctgaggagcccacagacaagtcccctgaggctgaggacccgctgggtgtggagcggaccccaagcgggcgt

SEQ ID NO: 505330 - DNA, 201 bp, Homo sapiens
gaagttggtgagggtctcaggacaggactagatcctatcaaactgatgatgactcctgggttatctggggagaccttggctggcagcccctcccctaagtsagaagcccccatcacttgcttttcccacgtgaacaaaaccacaggaaggcaggcccctcttccctgaccagagaggacctgccaagggcagggctccagg

SEQ ID NO: 505331 - DNA, 201 bp, Homo sapiens
cctcagctggccgcagcccctgcccccggtgccctcgtgttgggacagcggtgctcactgtgggcctgtgcagccgccggtggtaggcggtgctacacagyttccgagccttgctgtgttgtgtgctgcagggatgccggtggtccgtggtggacagacagtgcccggccaggcccctctctgctttgacccgggaagtcc

SEQ ID NO: 505332 - DNA, 201 bp, Homo sapiens; identical to SEQ ID NO: 274969

SEQ ID NO: 505333 - DNA, 201 bp, Homo sapiens; identical to SEQ ID NO: 274955

SEQ ID NO: 505334 - DNA, 201 bp, Homo sapiens; identical to SEQ ID NO: 274970

SEQ ID NO: 505335 - DNA, 201 bp, Homo sapiens; identical to SEQ ID NO: 274971

SEQ ID NO: 505336 - DNA, 201 bp, Homo sapiens; identical to SEQ ID NO: 274958

SEQ ID NO: 505337 - DNA, 201 bp, Homo sapiens; identical to SEQ ID NO: 274973

SEQ ID NO: 505338 - DNA, 201 bp, Homo sapiens; identical to SEQ ID NO: 274962

SEQ ID NO: 505339 - DNA, 201 bp, Homo sapiens; identical to SEQ ID NO: 54644

SEQ ID NO: 505340 - DNA, 201 bp, Homo sapiens; identical to SEQ ID NO: 274978

SEQ ID NO: 505341 - DNA, 201 bp, Homo sapiens; identical to SEQ ID NO: 274963

SEQ ID NO: 505342 - DNA, 201 bp, Homo sapiens; identical to SEQ ID NO: 274964

SEQ ID NO: 505343 - DNA, 201 bp, Homo sapiens; identical to SEQ ID NO: 274965

SEQ ID NO: 505344 - DNA, 201 bp, Homo sapiens; identical to SEQ ID NO: 274979

SEQ ID NO: 505345 - DNA, 201 bp, Homo sapiens; identical to SEQ ID NO: 274967

SEQ ID NO: 505346 - DNA, 201 bp, Homo sapiens; identical to SEQ ID NO: 274968

SEQ ID NO: 505347 - DNA, 201 bp, Homo sapiens; identical to SEQ ID NO: 276303

SEQ ID NO: 505348 - DNA, 201 bp, Homo sapiens; identical to SEQ ID NO: 276146

SEQ ID NO: 505349 - DNA, 201 bp, Homo sapiens; identical to SEQ ID NO: 276148

SEQ ID NO: 505350 - DNA, 201 bp, Homo sapiens; identical to SEQ ID NO: 276304

SEQ ID NO: 505351 - DNA, 201 bp, Homo sapiens; identical to SEQ ID NO: 276122

SEQ ID NO: 505352 - DNA, 201 bp, Homo sapiens; identical to SEQ ID NO: 276305

SEQ ID NO: 505353 - DNA, 201 bp, Homo sapiens; identical to SEQ ID NO: 276123

SEQ ID NO: 505354 - DNA, 201 bp, Homo sapiens; identical to SEQ ID NO: 55199

SEQ ID NO: 505355 - DNA, 201 bp, Homo sapiens; identical to SEQ ID NO: 276129

SEQ ID NO: 505356 - DNA, 201 bp, Homo sapiens; identical to SEQ ID NO: 276130

SEQ ID NO: 505357 - DNA, 201 bp, Homo sapiens; identical to SEQ ID NO: 276160

SEQ ID NO: 505358 - DNA, 201 bp, Homo sapiens; identical to SEQ ID NO: 276211

SEQ ID NO: 505359 - DNA, 201 bp, Homo sapiens; identical to SEQ ID NO: 55205

SEQ ID NO: 505360 - DNA, 201 bp, Homo sapiens; identical to SEQ ID NO: 276251

SEQ ID NO: 505361 - DNA, 201 bp, Homo sapiens; identical to SEQ ID NO: 276200

SEQ ID NO: 505362 - DNA, 201 bp, Homo sapiens; identical to SEQ ID NO: 276201

SEQ ID NO: 505363 - DNA, 201 bp, Homo sapiens; identical to SEQ ID NO: 276231

SEQ ID NO: 505364 - DNA, 201 bp, Homo sapiens; identical to SEQ ID NO: 276180

SEQ ID NO: 505365 - DNA, 201 bp, Homo sapiens; identical to SEQ ID NO: 276302

SEQ ID NO: 505366 - DNA, 201 bp, Homo sapiens; identical to SEQ ID NO: 56258

SEQ ID NO: 505367 - DNA, 201 bp, Homo sapiens; identical to SEQ ID NO: 56259

SEQ ID NO: 505368 - DNA, 201 bp, Homo sapiens; identical to SEQ ID NO: 56260

SEQ ID NO: 505369 - DNA, 201 bp, Homo sapiens; identical to SEQ ID NO: 56261

SEQ ID NO: 505370 - DNA, 201 bp, Homo sapiens
ataggagatagggtcagataagggaataaaagcaggctgccccagccaggggcagcaaccagctcaggtccccttccacactgtggaggctttgttttttygcgctttgcaataaatcttgctgctgctcactctttgggtccgcactgcctttatgagctctaacactcatcgcgaaggtctgcagcttcattcttgaag

SEQ ID NO: 505371 - DNA, 201 bp, Homo sapiens; identical to SEQ ID NO: 278666

SEQ ID NO: 505372 - DNA, 201 bp, Homo sapiens
gtcctgagtcctggagcaaggccagggaggcgcccaccccaccccggccagctgccctctctgctgtttgttctatttgttcttcttttcacccatagccytgtgttcctgtcatccctcctttcagcaaaagtccttttcccattccctctgtccccaccaactgctgttccccaagaaaataagctatcattgtatttg

SEQ ID NO: 505373 - DNA, 201 bp, Homo sapiens
agcaaggccagggaggcgcccaccccaccccggccagctgccctctctgctgtttgttctatttgttcttcttttcacccatagccttgtgttcctgtcawccctcctttcagcaaaagtccttttcccattccctctgtccccaccaactgctgttccccaagaaaataagctatcattgtatttgcaatctatggatta

SEQ ID NO: 505374 - DNA, 201 bp, Homo sapiens
ataaaatgttgtttaaagtacagtttagaaaactatggtaggtttatttcttgaactttcagaaattcaagcttaaagcatcacacgtttttctaatattrtgtggcattttctgtcattttacttttttaacctttatatggaataacaaccatcagccttgtctttcagatgtgccatttgggggtgctaaagctggtg

SEQ ID NO: 505375 - DNA, 201 bp, Homo sapiens
tttaacctttatatggaataacaaccatcagccttgtctttcagatgtgccatttgggggtgctaaagctggtgttaagatcaatcccaagaactatactrtaaatatgagagtgatacttgttttttgttgttgttgtttttgtttttctgagacagagtcttgctctgtcgcccaggctggagtgcaatggtgcaatct

SEQ ID NO: 505376 - DNA, 201 bp, Homo sapiens
aagacgatggccacgtgaaaagcaatgaagacttatctcccaagggtgaaggagtgttgcctctgtgaacagaacacatgaggcagccggggccactggcratgccattgagccagcatcccctatccagggtgctgaggccaagggggcagtctcccctaataagttctctctcaagaagtctttcaaattcagcagcct

SEQ ID NO: 505377 - DNA, 201 bp, Homo sapiens
gcgatgccattgagccagcatcccctatccagggtgctgaggccaagggggcagtctcccctaataagttctctctcaagaagtctttcaaattcagcagsctgctcttccacaaaaattggaaggaggacgggggcagttcttctgcctctcagccagaggaaatgcaggagcaaggtgcctgtagcaacaagggcactg

SEQ ID NO: 505378 - DNA, 201 bp, Homo sapiens
gtgtgagtctgggttggatactggctaccccccagcagacccccatcataggcagccagagctccaaggctcctcggaagacgtgaccaccaaggttgcgkcaggtgcttcccctgcaaaggccaacggacaagacgatggccacgtgaaaagcaatgaagacttatctcccaagggtgaaggagtgttgcctctgtgaac

SEQ ID NO: 505379 - DNA, 201 bp, Homo sapiens
aaaagcaatgaagacttatctcccaagggtgaaggagtgttgcctctgtgaacagaacacatgaggcagccggggccactggcgatgccattgagccagcrtcccctatccagggtgctgaggccaagggggcagtctcccctaataagttctctctcaagaagtctttcaaattcagcagcctgctcttccacaaaaatt

SEQ ID NO: 505380 - DNA, 201 bp, Homo sapiens
agcagacccccatcataggcagccagagctccaaggctcctcggaagacgtgaccaccaaggttgcggcaggtgcttcccctgcaaaggccaacggacaasacgatggccacgtgaaaagcaatgaagacttatctcccaagggtgaaggagtgttgcctctgtgaacagaacacatgaggcagccggggccactggcgat

SEQ ID NO: 505381 - DNA, 201 bp, Homo sapiens
ttaacttccagtgcctcccaaatctccaagcccaccctgtcccgtggtggcaactgaggcttctcgggggcatcagcctcagattacctgagaactgggcmgcctcgtcctgagaatgacggagaaggggacctggggctagggaatccctgattcaatcatgccgctccccaggagacgttcggagcccaggacatgtcg

SEQ ID NO: 505382 - DNA, 201 bp, Homo sapiens; identical to SEQ ID NO: 499420

SEQ ID NO: 505383 - DNA, 201 bp, Homo sapiens; identical to SEQ ID NO: 278432

SEQ ID NO: 505384 - DNA, 201 bp, Homo sapiens; identical to SEQ ID NO: 278433

SEQ ID NO: 505385 - DNA, 201 bp, Homo sapiens; identical to SEQ ID NO: 278400

SEQ ID NO: 505386 - DNA, 201 bp, Homo sapiens; identical to SEQ ID NO: 278401

SEQ ID NO: 505387 - DNA, 201 bp, Homo sapiens; identical to SEQ ID NO: 278403

SEQ ID NO: 505388 - DNA, 201 bp, Homo sapiens; identical to SEQ ID NO: 278461

SEQ ID NO: 505389 - DNA, 201 bp, Homo sapiens; identical to SEQ ID NO: 278462

SEQ ID NO: 505390 - DNA, 201 bp, Homo sapiens; identical to SEQ ID NO: 278463

SEQ ID NO: 505391 - DNA, 201 bp, Homo sapiens; identical to SEQ ID NO: 278534

SEQ ID NO: 505392 - DNA, 201 bp, Homo sapiens; identical to SEQ ID NO: 278427

SEQ ID NO: 505393 - DNA, 201 bp, Homo sapiens; identical to SEQ ID NO: 278535

SEQ ID NO: 505394 - DNA, 201 bp, Homo sapiens; identical to SEQ ID NO: 278430

SEQ ID NO: 505395 - DNA, 201 bp, Homo sapiens
aaaggacagtggtcgcaggtgtgcatggaatttatggaggatgcgagccgctccatcatccacaatgtaaaaggccccgtgtgcgagggcgatgtgctcaycctgttgcagtcagagccagaggtcgggaggttgcgctgagcttggctgctggctgggtcttggatgttgggttcgaccacttgaccagtgggaatggtg

SEQ ID NO: 505396 - DNA, 201 bp, Homo sapiens
taaagctagagatgaggtttgcaagcagctggcgggtggatgtacagtggggacaggtgagatctgaggaggatgtgcagcagctcgcactccgcctggtsaatacaaggtaacatcctgtgatgaaagtgctgtcaccgcaccaaaccagaagctaggaaatatttacaaagtttcaggttgacagtgctgcagtcttga

SEQ ID NO: 505397 - DNA, 201 bp, Homo sapiens
ctgtagttgctctcaaatttttcagaaggcttcacctctccctaccaaaaataaaacacactacagaaggcactgcagccactttacagacaagactgttrcacccttacaagatgatcagtgacgcagccacatactgtctatacaattactcataaagtgcttttcacaaataaggacttcttcctcgtttttttagga

SEQ ID NO: 505398 - DNA, 201 bp, Homo sapiens
ccagggcgctttgcagaacgacaggccgtgagagagacgtggggcagtccagctccagggatccggctgctcttcctgctagggtctccggtaggtgaggyggggcctgacctagactcactagtggcatgggagagccgtcgctacagtgacctgctgctctgggacttcctcgacgtcccattcaaccagacgctcaaa

SEQ ID NO: 505399 - DNA, 201 bp, Homo sapiens
cagctccagggatccggctgctcttcctgctagggtctccggtaggtgaggcggggcctgacctagactcactagtggcatgggagagccgtcgctacagygacctgctgctctgggacttcctcgacgtcccattcaaccagacgctcaaagacctgctgctgctggcctggctgggccgccactgccccaccgtgagtt

SEQ ID NO: 505400 - DNA, 201 bp, Homo sapiens
tgagagagacgtggggcagtccagctccagggatccggctgctcttcctgctagggtctccggtaggtgaggcggggcctgacctagactcactagtggcmtgggagagccgtcgctacagtgacctgctgctctgggacttcctcgacgtcccattcaaccagacgctcaaagacctgctgctgctggcctggctgggcc

SEQ ID NO: 505401 - DNA, 201 bp, Homo sapiens
agtcagaaccagggcgctttgcagaacgacaggccgtgagagagacgtggggcagtccagctccagggatccggctgctcttcctgctagggtctccggtrggtgaggcggggcctgacctagactcactagtggcatgggagagccgtcgctacagtgacctgctgctctgggacttcctcgacgtcccattcaaccaga

SEQ ID NO: 505402 - DNA, 201 bp, Homo sapiens
ggtcctgcctcctgtggtctggagccccccctcaaggaagaaacccatgctgtctgctcgcaactccatgatgtttggacacctcagccccgtgaggatcyctcgtctcagaggcaagtttaaccttcaacttccttcattagatgagcaggtgatcccagccaggctcctgaagatggaggtgagggcagaagagcccaa

SEQ ID NO: 505403 - DNA, 201 bp, Homo sapiens
tcttgtctgtgaggccttcccagctggccgggctcaccctgcagctcccgcacctgtgcctgccccgggaatctggggccgtttcccactcctcttcaacygtcagcgacaccttgggccttcttttccagtcaggtgggacggcgcccctgtcaggctgtgtcttatctctcggaacacgggcaccccacagaaggtcct

SEQ ID NO: 505404 - DNA, 201 bp, Homo sapiens
ttgtctgtgaggccttcccagctggccgggctcaccctgcagctcccgcacctgtgcctgccccgggaatctggggccgtttcccactcctcttcaaccgwcagcgacaccttgggccttcttttccagtcaggtgggacggcgcccctgtcaggctgtgtcttatctctcggaacacgggcaccccacagaaggtcctgc

SEQ ID NO: 505405 - DNA, 201 bp, Homo sapiens
ctgtgaggccttcccagctggccgggctcaccctgcagctcccgcacctgtgcctgccccgggaatctggggccgtttcccactcctcttcaaccgtcagygacaccttgggccttcttttccagtcaggtgggacggcgcccctgtcaggctgtgtcttatctctcggaacacgggcaccccacagaaggtcctgcctcc

SEQ ID NO: 505406 - DNA, 201 bp, Homo sapiens
cttcccagctggccgggctcaccctgcagctcccgcacctgtgcctgccccgggaatctggggccgtttcccactcctcttcaaccgtcagcgacaccttrggccttcttttccagtcaggtgggacggcgcccctgtcaggctgtgtcttatctctcggaacacgggcaccccacagaaggtcctgcctcctgtggtctg

SEQ ID NO: 505407 - DNA, 201 bp, Homo sapiens
tgtcaggctgtgtcttatctctcggaacacgggcaccccacagaaggtcctgcctcctgtggtctggagccccccctcaaggaagaaacccatgctgtctsctcgcaactccatgatgtttggacacctcagccccgtgaggatccctcgtctcagaggcaagtttaaccttcaacttccttcattagatgagcaggtgat

SEQ ID NO: 505408 - DNA, 201 bp, Homo sapiens
tgctgtctgctcgcaactccatgatgtttggacacctcagccccgtgaggatccctcgtctcagaggcaagtttaaccttcaacttccttcattagatgakcaggtgatcccagccaggctcctgaagatggaggtgagggcagaagagcccaaagaagcaacggaggtgaaagaccaggtagagacccaggggcaggagg

SEQ ID NO: 505409 - DNA, 201 bp, Homo sapiens
acctgtgcctgccccgggaatctggggccgtttcccactcctcttcaaccgtcagcgacaccttgggccttcttttccagtcaggtgggacggcgcccctrtcaggctgtgtcttatctctcggaacacgggcaccccacagaaggtcctgcctcctgtggtctggagccccccctcaaggaagaaacccatgctgtctgc

SEQ ID NO: 505410 - DNA, 201 bp, Homo sapiens
acacggcagggcaggcgtggtggctcatgcctgtaatccagcactttgggaggcccaggcgggcggatcacacttggcactcctcactttgcagacaggayggcggcgcaaccttccaagtgtgaagtgacagccttgtgtgtgatctttctgccctccccaagtttgcattttcgacattaaagtttactttttaattaa

SEQ ID NO: 505411 - DNA, 201 bp, Homo sapiens
aggctgtgtcttatctctcggaacacgggcaccccacagaaggtcctgcctcctgtggtctggagccccccctcaaggaagaaacccatgctgtctgctcrcaactccatgatgtttggacacctcagccccgtgaggatccctcgtctcagaggcaagtttaaccttcaacttccttcattagatgagcaggtgatccca

SEQ ID NO: 505412 - DNA, 201 bp, Homo sapiens
ggacacctcagccccgtgaggatccctcgtctcagaggcaagtttaaccttcaacttccttcattagatgagcaggtgatcccagccaggctcctgaagayggaggtgagggcagaagagcccaaagaagcaacggaggtgaaagaccaggtagagacccaggggcaggaggacaataaaatgggcccctgtagcaatggg

SEQ ID NO: 505413 - DNA, 201 bp, Homo sapiens
tttgttcctggtcccaccgcaggtcctggccacgccatcggcaacctgctcgtcttgtctgtgaggccttcccagctggccgggctcaccctgcagctccygcacctgtgcctgccccgggaatctggggccgtttcccactcctcttcaaccgtcagcgacaccttgggccttcttttccagtcaggtgggacggcgccc

SEQ ID NO: 505414 - DNA, 201 bp, Homo sapiens
ctgtgcctgccccgggaatctggggccgtttcccactcctcttcaaccgtcagcgacaccttgggccttcttttccagtcaggtgggacggcgcccctgtsaggctgtgtcttatctctcggaacacgggcaccccacagaaggtcctgcctcctgtggtctggagccccccctcaaggaagaaacccatgctgtctgctc

SEQ ID NO: 505415 - DNA, 201 bp, Homo sapiens
actgttggtgggtcaggcttcccaaagagaaggacgcctccagcagggcaacatgcgtaagaacatgagggtgttaagtagaacatcaaaattcaggagasgaaaacagctgcttaggaggagaaagaagacacggcagggcaggcgtggtggctcatgcctgtaatccagcactttgggaggcccaggcgggcggatcac

SEQ ID NO: 505416 - DNA, 201 bp, Homo sapiens
aatctggggccgtttcccactcctcttcaaccgtcagcgacaccttgggccttcttttccagtcaggtgggacggcgcccctgtcaggctgtgtcttatcyctcggaacacgggcaccccacagaaggtcctgcctcctgtggtctggagccccccctcaaggaagaaacccatgctgtctgctcgcaactccatgatgtt

SEQ ID NO: 505417 - DNA, 201 bp, Homo sapiens
cttatctctcggaacacgggcaccccacagaaggtcctgcctcctgtggtctggagccccccctcaaggaagaaacccatgctgtctgctcgcaactccakgatgtttggacacctcagccccgtgaggatccctcgtctcagaggcaagtttaaccttcaacttccttcattagatgagcaggtgatcccagccaggctc

SEQ ID NO: 505418 - DNA, 201 bp, Homo sapiens
ccagagaaggcggccttgaaggtgctgggtaaagaccacctgcccagctctccaggcttgctgatggtgggggaggacatgcagcccaaggatcctgcagytcttggatcaagtaggtcttctccacccagagctgccggccacaggtcccgcaaaagaaaactgtcggggccaccactgcagctgcaactgacccctccc

SEQ ID NO: 505419 - DNA, 201 bp, Homo sapiens
ttatctctcggaacacgggcaccccacagaaggtcctgcctcctgtggtctggagccccccctcaaggaagaaacccatgctgtctgctcgcaactccatratgtttggacacctcagccccgtgaggatccctcgtctcagaggcaagtttaaccttcaacttccttcattagatgagcaggtgatcccagccaggctcc

SEQ ID NO: 505420 - DNA, 201 bp, Homo sapiens
cacagaaggtcctgcctcctgtggtctggagccccccctcaaggaagaaacccatgctgtctgctcgcaactccatgatgtttggacacctcagccccgtraggatccctcgtctcagaggcaagtttaaccttcaacttccttcattagatgagcaggtgatcccagccaggctcctgaagatggaggtgagggcagaag

SEQ ID NO: 505421 - DNA, 201 bp, Homo sapiens
gccccgtgaggatccctcgtctcagaggcaagtttaaccttcaacttccttcattagatgagcaggtgatcccagccaggctcctgaagatggaggtgagsgcagaagagcccaaagaagcaacggaggtgaaagaccaggtagagacccaggggcaggaggacaataaaatgggcccctgtagcaatggggaagcagcct

SEQ ID NO: 505422 - DNA, 201 bp, Homo sapiens
tagtgactcaagcctgtaatcccagcactttgggaggccgaggcaggcggatcacctggggtcaggagttcgagaccagcctgaccaatgtggtgaaaccytgtctctactaaaaatacaaaaattagccgccgtggtggcccatgcctgtagtcccagctactcaggaggctgagacaggagaattgcttgaacccggga

SEQ ID NO: 505423 - DNA, 201 bp, Homo sapiens
taaggttttttcttttgtagcatatggtttataagtggaacccatttaaaaagcaaaatattggccaggcgcagtggctcatgcctgtaatcccagcactktgggaggctgaggtgggtggattgcttgagctcagaggtttgaaactagcctagacaacatggcaaaaccccgtctctataaaaaatacaaaaactagtt

SEQ ID NO: 505424 - DNA, 201 bp, Homo sapiens
aggtgttatgtgctgccttgccacacagataagacttgtcaatctctacattgagaatatgttccatcttaaccgtgttccatataaccaggctcatgacrtatattgcttctgtggagtttaaagtgtgtgacaaatctaatgctgcataagacatgccatacaaaaaggatgtttagtagtgtatttggggctgttcat

SEQ ID NO: 505425 - DNA, 201 bp, Homo sapiens
ttcttttgtagcatatggtttataagtggaacccatttaaaaagcaaaatattggccaggcgcagtggctcatgcctgtaatcccagcactttgggaggcygaggtgggtggattgcttgagctcagaggtttgaaactagcctagacaacatggcaaaaccccgtctctataaaaaatacaaaaactagttgggcaatgg

SEQ ID NO: 505426 - DNA, 201 bp, Homo sapiens
tcgtaggctttccgcaatatcagtggggaagttagactagcgttcagcttctgtgcgtttctcctttcatgagcttcaattattctctagaggagaaggckcacggtaacagctcctcactgtcccgtactacttctcatcctctgccccagaatacagactatatgctgagggtatagatcctagtgtccacttactgtc

SEQ ID NO: 505427 - DNA, 201 bp, Homo sapiens
aaaaattagccgggcgtggtggcgggcgcctataattacagctactggggaggctgaggcaggagaatcgcttgaacccaggaggtggaggttgcagtgarccgaggtcatgccactgcactccagcctgggcaacaagagtgaaactccatttcaaaagtaaataaataaataaaataatgatagtaataataattgaca

SEQ ID NO: 505428 - DNA, 201 bp, Homo sapiens
agggaatattttgatgttgaactatagtagcacataatttaaggtagtaaatgtccgtcatcaccatcagtttctatatattttggagatcgctgtacccygctacccttatttttcttgctcatcatttaggcagaaagaatccaggggccaagcacagtggctgagccctgtaatctcagctttggcaggctgaggtgg

SEQ ID NO: 505429 - DNA, 201 bp, Homo sapiens
gacaaatctaatgctgcataagacatgccatacaaaaaggatgtttagtagtgtatttggggctgttcatttgaagaggacttttaaggtcgtagacttartatattgagtatccacagaggcatatacatactctgttttttttgcttggtcagggtggaatgcatgtcaatggcgcacctcctctgatgcaagcttcta

SEQ ID NO: 505430 - DNA, 201 bp, Homo sapiens
caggtgactagtggataccatacaggacattacagatatagaacatttctatcatcgtaaaaagatctattggacagtgctggtctagactttccacctgrtgattcagagtccagctctacaagaattgataatgaagcaagtggatcgtttgtttcctgattcctagtctaataattccactgacatgttctctctccc

SEQ ID NO: 505431 - DNA, 201 bp, Homo sapiens
cattagtcattcctgtcactcttttcaggaatttttgaagttagcgtatttttctcttttaaccttttgtttctgaaatgacttgttaaaagaagtcaatrtgcctagttctctaacttaggttaacattgtccttccatgtgatcatgatccccagctttcctctgagaacagaaaatacactctcactttcctccacag

SEQ ID NO: 505432 - DNA, 201 bp, Homo sapiens
cagccaaatatgataatgggatccttaggtaaaattaatacacagctagaaagtatatatcttaggtggaggaaatagtagatttcttacgttaaatcctrtatgtctaattataagaacagggaaagggacagtaaagtgaaagagcatagtaaaacttccaagttaacaagggggaaaatggaatgagtggaaacaaaa

SEQ ID NO: 505433 - DNA, 201 bp, Homo sapiens
ttaaaatttggcttttttcctaaatgataatatcacagtatttgaaatgcctctttcttctcttgcctgccatgaccaaggtttttttgtgccatgcaaawactaatgataaagagcctcttgaatattacatttctcagaggggaatggctctaaatcactatcagtttctaagtcataagtattaaacctgaatctgct

SEQ ID NO: 505434 - DNA, 201 bp, Homo sapiens
gagctcatgttcttatgcattgttctgcaaactcatacatataatgaatattcgttgattcctccctaattatgaaccaaataacgaaattctagaatacrtggatttatatctctgtagcttttcttccatctatttggtgttattttcttgttagtattcatagactacatcagctctttgttggatgtttacttactg

SEQ ID NO: 505435 - DNA, 201 bp, Homo sapiens
aaaaaaagttttaaaaaatatttctgtgaggctgtcagagatataaggttatttatgttacagtgggcccaattaaagcatggcaatgttagcaggaaccytgtatgtgtgtaacatttgttcctgacacttggttctgctctccagattggtatacgatagagagacaggaaagccaaagggttatggcttctgtgaata

SEQ ID NO: 505436 - DNA, 201 bp, Homo sapiens
gctttccgcaatatcagtggggaagttagactagcgttcagcttctgtgcgtttctcctttcatgagcttcaattattctctagaggagaaggctcacggyaacagctcctcactgtcccgtactacttctcatcctctgccccagaatacagactatatgctgagggtatagatcctagtgtccacttactgtcctctcc

SEQ ID NO: 505437 - DNA, 201 bp, Homo sapiens
tgggaccacctcatcagggtccacccatgcaccatgtccctggccatgagagccgaggaccacccccacatgaactgaggggagggccattacccgagccyagacctctaatggcagaaccaagaggacccatgctagatcagaggggtccacccttggatggcagaggtaaggggagatcacattgcaaatgccataatg

SEQ ID NO: 505438 - DNA, 201 bp, Homo sapiens
tttgactgtgagagacccagcggtggatcgttctctacgttctgtgttcggtgagaggaattcgttgtagtcaagcttcggggagggactcccctctgcaycttctatctcatgaatcgctaccggagccgctgacggttcggacgtgcagttctccctgcttatcctgtagggcgtccaacctggtggactcatgagcaa

SEQ ID NO: 505439 - DNA, 201 bp, Homo sapiens
agaccttatcagtcttagatactgtcaataccatttactattaatatatcagcaactcttataatttacatcttagactttatattaacaattctcaaagmatttcatgcacatatttcagtatcttctcacaaaaaccttgggagataaatagtgtagatgttgttattcacagatgaggaaactgaggatcagagacaa

SEQ ID NO: 505440 - DNA, 201 bp, Homo sapiens
ggtttctaaaaatcgggtgctttagtgcttaaaatgaaaactgatgaaagtgtgaggtcaaagcatcagagtgctgaatgttcatccacatggacttcaawgttaagaatactctcagaagtaggaaaggagaggacatatgtgagccacatatttgataaatatcagggaataatctggaggtgacgggcaacagcaaca

SEQ ID NO: 505441 - DNA, 201 bp, Homo sapiens
agtaaagaaggtcactgtccaagagtgaactgtcagatttagagatttcagatatagctgtctggagcaatgtcaaagcctgaggacttgccttggaagtrggtttctaaaaatcgggtgctttagtgcttaaaatgaaaactgatgaaagtgtgaggtcaaagcatcagagtgctgaatgttcatccacatggacttcaa

SEQ ID NO: 505442 - DNA, 201 bp, Homo sapiens
aattcccatcactatccttaaagttcttgtttcttacacgaggtgtaatagttaatgctttgatactctctctagtcattggtcaaagctgcaatttaccrtcatatatttatctaaagcaaacttccttactgaataaggcaaaatgtcaacatagaagtgactaaataaagcaccaaattgtcaggataattcgtgaac

SEQ ID NO: 505443 - DNA, 201 bp, Homo sapiens
gcaaaggcaaaggttcatctaattgcaggcttcccttttatggagcgagaaccaaagttcagcaactcccagctggcctctggtttcaagcgggataaacyaactgtgcaggaaagacttccctggcatctgtgtttactcttgactgacacgttatcaagatcccaccctctgctactttctggaatcctgcgtaaaaaa

SEQ ID NO: 505444 - DNA, 201 bp, Homo sapiens
atttctgtcagcaaaggcaaaggttcatctaattgcaggcttcccttttatggagcgagaaccaaagttcagcaactcccagctggcctctggtttcaagygggataaactaactgtgcaggaaagacttccctggcatctgtgtttactcttgactgacacgttatcaagatcccaccctctgctactttctggaatcct

SEQ ID NO: 505445 - DNA, 201 bp, Homo sapiens
cagcactttgagaggccaaggtgggtggatcatgaggtcaggagatcgagaccatcctggctaacacagtgaaaccttgtctctactaaaaatacaaaaaattagccgggcgtggtggtgggcccctgtagtgccagctacttgggaggctgagacaggagaatggcatgaactggggaggccgagattgtgccactgcac

SEQ ID NO: 505446 - DNA, 201 bp, Homo sapiens
aacatctgaacatgcaccaaatgaggatgcctcacagggcctagtctgtcagtaagcacactgctctccatccccagaaatgagctgaccagaaatatcaycagggtaatttgacatttgctaagaatataaggtcccccacgtaccctcacagtatcataaatctcagtaatttctgtcagcaaaggcaaaggttcatct

SEQ ID NO: 505447 - DNA, 201 bp, Homo sapiens
actctgtaaaatggaccaatcagcactctgtaaaatggaccaatcaacgctctgtaaaatggatcaatcagcaggacatgggaggggacaaataagggaakaaaagcttgccaccccagccagcagcagcaacccacttgggtccccttccacgctgtgaaagttttgttcttttgctcttcacagtaaatcttgctgttg

SEQ ID NO: 505448 - DNA, 201 bp, Homo sapiens
ttgccagatggggtggcagctgggcagaggcactcctcacatcccagacagtgggcagctgggcagaggcgctccacacttcccagatggttgggcagccrggcagaggcgctcctcacatcccagatggggtggcagctgggcagaggtgctcctcacttcccagatggggcagcagccgggcagaggcactcctcatgc

SEQ ID NO: 505449 - DNA, 201 bp, Homo sapiens
aggagaggtttacatactaattacttaaaatgtgaagcagatagggaatcatctccttaagcaagatacaaatacctgaaaacaaagagaaaatattcagyaacttcagctacattaatagtaagaacttctgtgcttcaaaaacacacaaaaaaggaagtgaaaagacaattcacaaactggaacatatattataaacca

SEQ ID NO: 505450 - DNA, 201 bp, Homo sapiens
tgaagcagatagggaatcatctccttaagcaagatacaaatacctgaaaacaaagagaaaatattcagtaacttcagctacattaatagtaagaacttctrtgcttcaaaaacacacaaaaaaggaagtgaaaagacaattcacaaactggaacatatattataaaccaacagtatgagtcatcgttaatctgtttatgac

SEQ ID NO: 505451 - DNA, 201 bp, Homo sapiens
taaaccaacagtatgagtcatcgttaatctgtttatgacaccaggcaacagcaagtaaatagttctgtaaggaactccactcatactgcttttactgctarggtgtccagcttgctactgtgtccctgtgatttaaaagacacaggaaagatacatctttagtttagttttgtttttcctgcttctttaacatctctctgc

SEQ ID NO: 505452 - DNA, 201 bp, Homo sapiens
ctgggctgagccgagggtcaccagagaggaaagccattcagcttcggggtcccgacaacaagttggttgaccttgtggccatgagtggaactctcaaagtyacatcgcccaagtgagacttgcccttctatcctatctatcctgacccttgcctcctgggtcctaacgcctgtcagacaaacttcttctcgcctctcttct

SEQ ID NO: 505453 - DNA, 201 bp, Homo sapiens
aatcttgctgttgctcactctttgggtccacaccacctttaagagctgtgacactcatcacgaacgtccacggcttcattcttgaagtcagcgagaccacraacccaccaaaaggaagaaactctggacacatctgaaggaacaaactccagacacaccatccttaagagctgtaacactcaccgcgaaggtccgcggctt

SEQ ID NO: 505454 - DNA, 201 bp, Homo sapiens
caccaaatcagtgctctgtgtctagctaaaggattgtaaacacatcaatcagcactctgtaaaatggaccaatcagcactctgtaaaatggaccaatcaaygctctgtaaaatggatcaatcagcaggacatgggaggggacaaataagggaagaaaagcttgccaccccagccagcagcagcaacccacttgggtcccct

SEQ ID NO: 505455 - DNA, 201 bp, Homo sapiens
aaagaagaaaatcatttttcattgattttcaggcaaatatgatgctacttttaatagaaatgtgtctactacattcaaacaaaatgggaatatttcaacayccaaagcattctttaggttagttctcaaaggagatttttgagttggaactctctcctaaccaaaattatgctttcaataataactatatttttatgttaa

SEQ ID NO: 505456 - DNA, 201 bp, Homo sapiens
cctagacctcctcaatgctgagaaaggaggactctgcaccttcttaggggaagagtgttgtttttacactaaccagtcagggatagtaggaaacgctgccyggcatttacaggaaaaggcttctgaaatcagacaatgcctttcaaattcttataccaacctctggagttgcacaacatggcttctcccctttctaggtcc

SEQ ID NO: 505457 - DNA, 201 bp, Homo sapiens
cagggttaggaaaattgcctaacaactggtctgctcaaacgtgccagctgtttgcactcagccaaaccttaaagtacttacagaatcaggaaggagccatytataccaattctaagttaatatgggctgaatgaggtcttattaatagcaaagaataattgaaatcccaaacttacaaggttttcaacaaaagtaaagttt

SEQ ID NO: 505458 - DNA, 201 bp, Homo sapiens
ttcccgtctctgcagggccagccggggtgtccagaataccaagggccttcagatgttggatgaccagtatgtcaccaatatcacaccctgtgagggagatrgaaactaggcctgctggtaccaagagttgggctagggagggagtgagggtggaggacaaaagaacagggagaggaagctagctcatccgagaactttgat

SEQ ID NO: 505459 - DNA, 201 bp, Homo sapiens
gataattgaaggtcttctccgtggtactccagtaccaccttgttgtcagtgtaaacaagggcatagcccgaaagcactgaggccactgacaacccatagcyttcctaacaaaaatccttaacccagcaggtttcctaacaggggatctaaatcttaattaccatacaaaggtctgaccagaccaaggaggaactcccttca

SEQ ID NO: 505460 - DNA, 201 bp, Homo sapiens
aagacacaggaaagatacatctttagtttagttttgtttttcctgcttctttaacatctctctgcatcttggttcatgcacaattggagactcatcacacraacagtctaagactcgtcaaagtcatgcaactagaacagggttcttcagtagcctctgtgtctgtcctactcctcagttcatggctcagagctggagctc

SEQ ID NO: 505461 - DNA, 201 bp, Homo sapiens
tcctaagctattgggaccaatttgacccgcaaaccctgaaaaagaggcaacacatttttttctgcactatggcctggccccagtattctctctctgatggrgaaaaatggtcacctgagggaagtataaattacaatactatcctgcagcttgatcttttctgtaagagggaaggtaaatggagtgaaataccttatgtcc

SEQ ID NO: 505462 - DNA, 201 bp, Homo sapiens
taccagtcagttgggcggcagggcagagacgctcctcacttcccagatggggtggcggccaggcagagacactcttcacttactagacagggcagcggccrggcagaggtgctcctcagttcccagacagtgggcagctgggcagaggcacttctcacttcctggatggtgggcagtcagtccgaggtgctcctcacatgc

SEQ ID NO: 505463 - DNA, 201 bp, Homo sapiens
tggaagcgttggtttgcctggaaccaggttccacatctcctgtacttctgggctgagccgagggtcaccagagaggaaagccattcagcttcggggtcccracaacaagttggttgaccttgtggccatgagtggaactctcaaagtcacatcgcccaagtgagacttgcccttctatcctatctatcctgacccttgcct

SEQ ID NO: 505464 - DNA, 201 bp, Homo sapiens
gctcaccggacgctccctgaacccgtccctctggctgccgagcccccagcgccttcccgtttcggaaagaagcgggcgcagacccctcggggtgccccggsggacggcaggtcccgctggttgctacaggaagaggcggggcgctggaaccccagcgctgggagctgcgcgcaccgggatccgctggccgccttccgcgtg

SEQ ID NO: 505465 - DNA, 201 bp, Homo sapiens
gaacggcggagttctgcatggacgcggcgggagaaaggagcgggttagggtctgggctttttgtggctcgaaggacacacggagggaagcgtccgcgcgtrggaacaaggacttctcccaactccttccaagtgggtcgtccacggacgcacgggctttccgaattcgcccggcgttatgctgaccacttgcgagcgccgc

SEQ ID NO: 505466 - DNA, 201 bp, Homo sapiens
gccaaaacctcctacttatatctcatcggccttgccactgaagaatgatggtgccctggaacagacaccctggcaactacctttgcctcatccaagccaarggtaaccctgatggtggcaggtaggccagtatatttttaaattaataccaggcaacctactctgctttacctaatttttcaggaaccacccagtcctccc

SEQ ID NO: 505467 - DNA, 201 bp, Homo sapiens
agcaccctctttttatagtccctttgaaatcatatatggccaaacttttgtcttggggtctccacccttaccagactctgagccactcagatattacctcycctccttaatccagacatggtctttcattcgtgaagcagcaaataaggccatgcctctccctgttaacacctttttgtcctctgaacgtaactgtcttac

SEQ ID NO: 505468 - DNA, 201 bp, Homo sapiens
cggggcctgaaagcttaaggagatgaataactcctcccttctcaggcccagtcccaaggcgcaagggccacttgtgtcagcagtgtgcaccagcagcgtgygccggcaagatagcagaagcatgaaaagggccggccagaagacacctactctggctggaagacacgtacccctgaagatcaagaaagaagctatctggga

SEQ ID NO: 505469 - DNA, 201 bp, Homo sapiens
accatcttctttaaccccccaagcctcctcattgtcttctcagctgccatcttcccagtcagctgtatccacttatttttctacaccgtcccctcctcagracaattctaatattacctatacctattctcctccccaacgccctctcctgaggcttgtaaacctatcctgccaccttacgcctctgtctatcctccactg

SEQ ID NO: 505470 - DNA, 201 bp, Homo sapiens
aggcagagtttcaaatgcttgcctccaccatcaggggccctgcaggcccacggggccgcagctccacacagaagcctcctaaaaatccacctccacctggygcctatttcaagtgtggcaatgaaggccactggtccagacaatgcccaaacccaggtaaagccagcagtccatgcccctctctgcggagaaccccactgg

SEQ ID NO: 505471 - DNA, 201 bp, Homo sapiens
gcacagcctattacccaacctttccatctactccagaaggctctcacctcagcctcatcctcactctcccagacctcaccaaacctttctccctctatatmgacagatgatgtaaagttgcattatgtattctaacccagtctaagggacctaccgcccaggttgttgcctacctctctaaacagcttaaagccaccattc

SEQ ID NO: 505472 - DNA, 201 bp, Homo sapiens
gccaaaccattataccaggctgctaaaggccctctctatgtgccattaaactctgcacagcctattacccaacctttccatctactccagaaggctctcayctcagcctcatcctcactctcccagacctcaccaaacctttctccctctatatcgacagatgatgtaaagttgcattatgtattctaacccagtctaagg

SEQ ID NO: 505473 - DNA, 201 bp, Homo sapiens; identical to SEQ ID NO: 260955

SEQ ID NO: 505474 - DNA, 201 bp, Homo sapiens
ctcctattcatggtatttgagaacttctattgctcctggataccaggtattggctattgagatgatgcaattttgtctcaggttcatctttttagagactrtcctccactaatgcaccctaagtgttcctatatcatgttagatgttggatgatgttttttttttcccctgaaaatctcaagttcttttgagtctatgtcc

SEQ ID NO: 505475 - DNA, 201 bp, Homo sapiens; identical to SEQ ID NO: 260956

SEQ ID NO: 505476 - DNA, 201 bp, Homo sapiens
tcatgtttgacttcctcctctgtttcttttcctcttgcctatgctcttgagcctgaggtagtttattatattcttttctcctcttttagcatggcaaaagwccttgatctagttttctaagtctgaattctaatattgtaatggaaacaagaaaagccttatattcaagattattgtcttgctatatggatccagaattat

SEQ ID NO: 505477 - DNA, 201 bp, Homo sapiens; identical to SEQ ID NO: 261177

SEQ ID NO: 505478 - DNA, 201 bp, Homo sapiens; identical to SEQ ID NO: 260957

SEQ ID NO: 505479 - DNA, 201 bp, Homo sapiens
atattgtaatggaaacaagaaaagccttatattcaagattattgtcttgctatatggatccagaattattggcagacatcaaaatgtagactgcctttttwaattttatttatcttgtagcaatcttgatctttttagaggcaaatgctatgcctggcagaaaggtgaggtcagacacagagaaatgcaaaaggattgcat

SEQ ID NO: 505480 - DNA, 201 bp, Homo sapiens; identical to SEQ ID NO: 261181

SEQ ID NO: 505481 - DNA, 201 bp, Homo sapiens
aggggccaccttattctagcataacctcatcttaatttacatcttaattgcataaagattctttcttaataagatcatattcagggtaggacttcaacatrtctttcgggagtacataatttaacccacaacagatgttatgcagatgttggtctacttgatgcctgcacctggagttagggattgttattggtatgaatc

SEQ ID NO: 505482 - DNA, 201 bp, Homo sapiens; identical to SEQ ID NO: 260959

SEQ ID NO: 505483 - DNA, 201 bp, Homo sapiens
ctcttcttataaggttgccagtcatactagtttaaggggccaccttattctagcataacctcatcttaatttacatcttaattgcataaagattctttctkaataagatcatattcagggtaggacttcaacatatctttcgggagtacataatttaacccacaacagatgttatgcagatgttggtctacttgatgcctg

SEQ ID NO: 505484 - DNA, 201 bp, Homo sapiens
ataattaactcatgaaaattaaataatattccaggcaggaaagctgataagggaatgaagcattccatattattaattataacagactagaacacttagtsgtaaaaaaaaattacaagagcaagtttcatagaaattagggaaataaattagttgaaggaagaattaagaaagccctagtttagagcactatgtcatcta

SEQ ID NO: 505485 - DNA, 201 bp, Homo sapiens
ggatgtgtgtgtgtgtgtgtgtgtgtgtgtgtgtgtgtgtgtgtgttgcaatgtatagaatgatatacgtaaatttctttaaactcctaggcgataataaytactttaaattaaagatataatatgtttaaaattctaacgaatgcatgaaaatatagaaaatagcaaagacatacaaagaatagaatttgtgggggacat

SEQ ID NO: 505486 - DNA, 201 bp, Homo sapiens; identical to SEQ ID NO: 260960

SEQ ID NO: 505487 - DNA, 201 bp, Homo sapiens; identical to SEQ ID NO: 261184

SEQ ID NO: 505488 - DNA, 201 bp, Homo sapiens; identical to SEQ ID NO: 260574

SEQ ID NO: 505489 - DNA, 201 bp, Homo sapiens; identical to SEQ ID NO: 260577

SEQ ID NO: 505490 - DNA, 201 bp, Homo sapiens; identical to SEQ ID NO: 260579

SEQ ID NO: 505491 - DNA, 201 bp, Homo sapiens
atcatatttctcatgttattttgttttctgcttcttttccatctgacatgtccaaatagtgtttaaatgtaatgtggccatggacacagggaggggaacartacacacttgggcctttcaggggaatggggtgggggaagggataccatcaggataaatagctaatgcatgtggggcttaatacctaggggatgggttgat

SEQ ID NO: 505492 - DNA, 201 bp, Homo sapiens
gctgataaagaagacacatctggtcttcctttgttggggaatttataggaggtagtctcagctgtcaggccgctagtaactgataatgtaaaatacgatgytatgtgaagaattacagaggatctgtaagattcctgtacgactcttgctgcctgacagctgcattctgtaactcttccaaggacaaaagaaggactcatt

SEQ ID NO: 505493 - DNA, 201 bp, Homo sapiens; identical to SEQ ID NO: 261187

SEQ ID NO: 505494 - DNA, 201 bp, Homo sapiens
agacccgtgtggcaattcaaaccgatctttaggagaggattgccaggacagcttcctcctggatcagaattttatttcctaggcccacatccccttgcctrtgaggcacctttggcctcctaaatctctgctctccacagggaacaacttaattttctttttcagctggatgtgatgtgattcactgatcttcaccttatg

SEQ ID NO: 505495 - DNA, 201 bp, Homo sapiens
cattgatgctaaaatttctgtatcattgatgtcttttctaggctcttaatgttcctctttctgtctgtctttgtgggatgcgtggggtgcttctgtctttytacattttgtggtggtggtgtatgtataccagtatgttacattgataattttttgatatttcaatcgaatttactgaaatataaatctctaagagataaa

SEQ ID NO: 505496 - DNA, 201 bp, Homo sapiens
aatacctaggaatccaacttacaagggatgtgaaggacctcttcaaggagaactacaaaccactgcgcaacaaaataaaagaggagaagcttctgttttarggtctcaataattaactcatgaaaattaaataatattccaggcaggaaagctgataagggaatgaagcattccatattattaattataacagactagaac

SEQ ID NO: 505497 - DNA, 201 bp, Homo sapiens; identical to SEQ ID NO: 260972

SEQ ID NO: 505498 - DNA, 201 bp, Homo sapiens
acaagggatgtgaaggacctcttcaaggagaactacaaaccactgcgcaacaaaataaaagaggagaagcttctgttttagggtctcaataattaactcakgaaaattaaataatattccaggcaggaaagctgataagggaatgaagcattccatattattaattataacagactagaacacttagtggtaaaaaaaaat

SEQ ID NO: 505499 - DNA, 201 bp, Homo sapiens
gtttatatttatgacttttgcccaattttctattcagttgtctcattttcttattgatttatgaaagtttattgtatatattctgagtattgcaggtttcyttttatactccatggcttgtcatttcatattctacttggcatcttttggtaaacagaagtttttaatttaaatgcagtcaaactttaatgttttcccttg

SEQ ID NO: 505500 - DNA, 201 bp, Homo sapiens
taatttaaccttaattttctccttagaggccctattgccaaagacagtctaactgagtgttagagctttgccatatgaattgtgaggggatgcaattgagyccataacagaatgttttcctatagtacatactttttccatgtgacttctttctttaacatggtttgtgatattcatattgttcatgtaatcagggtttct

SEQ ID NO: 505501 - DNA, 201 bp, Homo sapiens
aattctaatattgtaatggaaacaagaaaagccttatattcaagattattgtcttgctatatggatccagaattattggcagacatcaaaatgtagactgsctttttaaattttatttatcttgtagcaatcttgatctttttagaggcaaatgctatgcctggcagaaaggtgaggtcagacacagagaaatgcaaaagg

SEQ ID NO: 505502 - DNA, 201 bp, Homo sapiens; identical to SEQ ID NO: 260584

SEQ ID NO: 505503 - DNA, 201 bp, Homo sapiens; identical to SEQ ID NO: 261392

SEQ ID NO: 505504 - DNA, 201 bp, Homo sapiens; identical to SEQ ID NO: 261394

SEQ ID NO: 505505 - DNA, 201 bp, Homo sapiens; identical to SEQ ID NO: 260342

SEQ ID NO: 505506 - DNA, 201 bp, Homo sapiens; identical to SEQ ID NO: 260587

SEQ ID NO: 505507 - DNA, 201 bp, Homo sapiens
accagcatggcacgcgtttacctaagtaacaaacctacatgtcctgcatctgtatcctggaacttaaaataaagtaaaattaaattttaaaaaaaaacttkgtgcggcaacaactgctatgccactgctatgcaatttctgtcataggacatggaaggatattatgccacataagtcaacgctgtctacctacattaatag

SEQ ID NO: 505508 - DNA, 201 bp, Homo sapiens; identical to SEQ ID NO: 261396

SEQ ID NO: 505509 - DNA, 201 bp, Homo sapiens; identical to SEQ ID NO: 260344

SEQ ID NO: 505510 - DNA, 201 bp, Homo sapiens; identical to SEQ ID NO: 260591

SEQ ID NO: 505511 - DNA, 201 bp, Homo sapiens
gaggtagaatggtttcatttggaaaccattccacctcccccatctttagaaaaaattgtcctggtgccaaaaagtttgaggactaccaattaaattaaccrtaagattttttttaataagttctaagttatcagagtctagatagaagcctgattcttgttggccgaagacatgtgttattagtttctttgactgccataa

SEQ ID NO: 505512 - DNA, 201 bp, Homo sapiens; identical to SEQ ID NO: 260346

SEQ ID NO: 505513 - DNA, 201 bp, Homo sapiens; identical to SEQ ID NO: 260347

SEQ ID NO: 505514 - DNA, 201 bp, Homo sapiens; identical to SEQ ID NO: 260348

SEQ ID NO: 505515 - DNA, 201 bp, Homo sapiens; identical to SEQ ID NO: 260351

SEQ ID NO: 505516 - DNA, 201 bp, Homo sapiens; identical to SEQ ID NO: 260353

SEQ ID NO: 505517 - DNA, 201 bp, Homo sapiens
acccaccagcctgaaagacccagaaggactctttcttccttcatcatcacagagtctaattaataaataaacaaaataggtaatgtccagtatgatatgayttaatcattttattgtgtggctcactagggcagtgattctcaatggaatagtaagccttttttgttgttgttctttaaagaacagtgataataataggaa

SEQ ID NO: 505518 - DNA, 201 bp, Homo sapiens; identical to SEQ ID NO: 260990

SEQ ID NO: 505519 - DNA, 201 bp, Homo sapiens; identical to SEQ ID NO: 260992

SEQ ID NO: 505520 - DNA, 201 bp, Homo sapiens
tttttttttttttgacacagttaactccattactttggctttttatgaaaacaaggaaacaaaactttctgtttgcccattaattcatttatactattctyagagctcacttttatcatttgactaatgcccctaccttcacatagttctaacatggagcttacatgggcccctttttgtcatatttcttctcagtatttc

SEQ ID NO: 505521 - DNA, 201 bp, Homo sapiens; identical to SEQ ID NO: 260124

SEQ ID NO: 505522 - DNA, 201 bp, Homo sapiens
gagttagggattgttattggtatgaatcaaagtctcttcctaatttctttatttagaagacatatatgctgtactctttcaaaatatacagtgtaaggttytgagtctgaaacagtgtttcgtagtcaagcccaatcagggctcagctattagaaatgccactttatattttgtccattttactcccagtgctgttactaa

SEQ ID NO: 505523 - DNA, 201 bp, Homo sapiens; identical to SEQ ID NO: 260607

SEQ ID NO: 505524 - DNA, 201 bp, Homo sapiens; identical to SEQ ID NO: 261411

SEQ ID NO: 505525 - DNA, 201 bp, Homo sapiens; identical to SEQ ID NO: 260608

SEQ ID NO: 505526 - DNA, 201 bp, Homo sapiens; identical to SEQ ID NO: 260366

SEQ ID NO: 505527 - DNA, 201 bp, Homo sapiens; identical to SEQ ID NO: 260609

SEQ ID NO: 505528 - DNA, 201 bp, Homo sapiens; identical to SEQ ID NO: 260140

SEQ ID NO: 505529 - DNA, 201 bp, Homo sapiens; identical to SEQ ID NO: 260368

SEQ ID NO: 505530 - DNA, 201 bp, Homo sapiens; identical to SEQ ID NO: 260610

SEQ ID NO: 505531 - DNA, 201 bp, Homo sapiens; identical to SEQ ID NO: 260370

SEQ ID NO: 505532 - DNA, 201 bp, Homo sapiens; identical to SEQ ID NO: 260612

SEQ ID NO: 505533 - DNA, 201 bp, Homo sapiens; identical to SEQ ID NO: 260371

SEQ ID NO: 505534 - DNA, 201 bp, Homo sapiens; identical to SEQ ID NO: 260372

SEQ ID NO: 505535 - DNA, 201 bp, Homo sapiens; identical to SEQ ID NO: 260373

SEQ ID NO: 505536 - DNA, 201 bp, Homo sapiens; identical to SEQ ID NO: 260375

SEQ ID NO: 505537 - DNA, 201 bp, Homo sapiens; identical to SEQ ID NO: 260377

SEQ ID NO: 505538 - DNA, 201 bp, Homo sapiens
tcttttgcctggtaatgttcatacattaattccctaattcttttatttcagagataacaaatgacagcaactcttcacatgtcaaaccttaactattcaayataaatatgttactttctttcatgagttccccctatgtcctttcacttctagaccaaatatccttggtctttcatctattcatcctatgctatgattgca

SEQ ID NO: 505539 - DNA, 201 bp, Homo sapiens; identical to SEQ ID NO: 261011

SEQ ID NO: 505540 - DNA, 201 bp, Homo sapiens; identical to SEQ ID NO: 260628

SEQ ID NO: 505541 - DNA, 201 bp, Homo sapiens; identical to SEQ ID NO: 260629

SEQ ID NO: 505542 - DNA, 201 bp, Homo sapiens
tttataacattttttccacactgacatctttactagtagtaattatttttcatctattattgtgtggctctgatttgggatttattaaagttttataattkatttattttcttgactatctgttctcttgtattaatttaattttctatgttgaatacttatagtttcagtaattttcactttgtaatgtaggttaacatc

SEQ ID NO: 505543 - DNA, 201 bp, Homo sapiens; identical to SEQ ID NO: 260631

SEQ ID NO: 505544 - DNA, 201 bp, Homo sapiens
aataattcgcatgttctttttttgtttcttattatctaagtatgtaccagaattgcttcacagggcaattaaattttttttttttttttttttttttttttagaaaaagctctatataagctctggggtaagttctggttgagaggcaaattacctttgtgatctcggacacatcacttaacttctttgtggcatagtatg

SEQ ID NO: 505545 - DNA, 201 bp, Homo sapiens; identical to SEQ ID NO: 260633

SEQ ID NO: 505546 - DNA, 201 bp, Homo sapiens
agggctggtgcaatctttctatttctgtcaatgtgtaaaatagaaacaaatatcacaagtgcttggtcaacttgacaatgactttcaattgaatttttctrttataggttgggctttaaaaatctcttacaacaattattacaatggcatccactgtgaacactctttttataaaattcaaatttagtagaaaaaatatga

SEQ ID NO: 505547 - DNA, 201 bp, Homo sapiens; identical to SEQ ID NO: 260634

SEQ ID NO: 505548 - DNA, 201 bp, Homo sapiens
caggggttcaagaccagcctggccaacatggtgaaaccctgtctctactgaaaatacaaaaattagctgagtgcggtggtgcacggctgtaatcccagctrctcgggaggctgaggcaggagaatcacttgaggttgcagtgagccaagattgtgccaccattgcacttcagcctgggtgacagagtgaatgagactccat

SEQ ID NO: 505549 - DNA, 201 bp, Homo sapiens; identical to SEQ ID NO: 260401

SEQ ID NO: 505550 - DNA, 201 bp, Homo sapiens; identical to SEQ ID NO: 260403

SEQ ID NO: 505551 - DNA, 201 bp, Homo sapiens
atttctagttaattcttattgtgaatagtgctactgagaatattgttgtacataatattcagcaacttttatagtggaattgcacagccataaggtgagayactatcaaaggagagatactaccaaactcttttccaaaataattacatgaatttctacccctaccagcaggatatgacagtaccattcttccacatcctt

SEQ ID NO: 505552 - DNA, 201 bp, Homo sapiens; identical to SEQ ID NO: 261428

SEQ ID NO: 505553 - DNA, 201 bp, Homo sapiens
tcttacaaggacaccagctgtatgagattagagcaccactctaaagacctaatttaaccttaattttctccttagaggccctattgccaaagacagtctamctgagtgttagagctttgccatatgaattgtgaggggatgcaattgagcccataacagaatgttttcctatagtacatactttttccatgtgacttcttt

SEQ ID NO: 505554 - DNA, 201 bp, Homo sapiens; identical to SEQ ID NO: 261429

SEQ ID NO: 505555 - DNA, 201 bp, Homo sapiens; identical to SEQ ID NO: 261432

SEQ ID NO: 505556 - DNA, 201 bp, Homo sapiens
tgaagacttacaaaatttatttgtccaaaatacacagttggtaagatgtagtgattgcagttatatcactattcttatgactgctttagtcaattaatcartgttgttttaaactgttagcatcttctattcagccaaataactttcttaaggggtgaatttaaaattcttacctatgtatgtaacagtcctttctggaaa

SEQ ID NO: 505557 - DNA, 201 bp, Homo sapiens; identical to SEQ ID NO: 261036

SEQ ID NO: 505558 - DNA, 201 bp, Homo sapiens; identical to SEQ ID NO: 260648

SEQ ID NO: 505559 - DNA, 201 bp, Homo sapiens; identical to SEQ ID NO: 261039

SEQ ID NO: 505560 - DNA, 201 bp, Homo sapiens; identical to SEQ ID NO: 261043

SEQ ID NO: 505561 - DNA, 201 bp, Homo sapiens; identical to SEQ ID NO: 260659

SEQ ID NO: 505562 - DNA, 201 bp, Homo sapiens; identical to SEQ ID NO: 260662

SEQ ID NO: 505563 - DNA, 201 bp, Homo sapiens
acttgttgcttgtctgttagaaaagtgtactgcaatgggttagatctaaactaacaagacagggaaattcatggacaaatttggtctggcttgctgaaaartgcttcttgtaggattgctttactgctcagcaatgtgccataagcgagctttatccagaggcagtgtcactcaggacagctatttttactcttgagtaag

SEQ ID NO: 505564 - DNA, 201 bp, Homo sapiens; identical to SEQ ID NO: 260665

SEQ ID NO: 505565 - DNA, 201 bp, Homo sapiens
gtgacctgaatgccttggcttcctaaggtgctgggattacaggcctgcaccactgtgcatggcctgtcttagctaatatatttgaaagtccttctgctgtygttttgtgcttccaatttgtcttttgtgttttttccccttgtactttttgtttttcctctttctgccttctttctcagtgggaaagtttcccattactat

SEQ ID NO: 505566 - DNA, 201 bp, Homo sapiens
taaagaataaagacttttcatctcttcttatattaattactgagagagtggtattacagaccttcaacaatgattaccaatttgcttatttctccctctakcttgatcagtttttgtgttatgaattttgaacctcttttatcaggtgcatacatatttaagattgtcatatctttctgatgagtttactcttttattatt

SEQ ID NO: 505567 - DNA, 201 bp, Homo sapiens
ttatctaagtatgtaccagaattgcttcacagggcaattaaattttttttttttttttttttttttttttagaaaaagctctatataagctctggggtaakttctggttgagaggcaaattacctttgtgatctcggacacatcacttaacttctttgtggcatagtatgtttgctccattcatttattgattcaaaatgt

SEQ ID NO: 505568 - DNA, 201 bp, Homo sapiens
tgggtgacatgaactccaatatccactgtcactgcttgacctctaatttctctaacatctctcatgcattctcaatcagtagcagtaactctctaaaatgyctcatgtattcttgtcctggacaagtatagctcaatccttggccaagaattcacagggaattctgctcagatatctgaaacctcccttctgagcagctac

SEQ ID NO: 505569 - DNA, 201 bp, Homo sapiens
gagaaacttgctttcctcatctataaaatgataatagccatctcatctttctaggtttctgtaagaattagtaatagcatgcataaagagacagtcacatwgtagttgttcactttgtattagcagttgttatctacacagtgaaaggcttttaacaagtgattttttttttttttttttgagactgagtctcactctgtc

SEQ ID NO: 505570 - DNA, 201 bp, Homo sapiens
tttcccaaatataataaacattcaacagtaaaattccgttagcttgtcccttatccattgtaccttcttttgcacatctttttttatatactaaaaactcyaccttgtgaaacgattattgcttttataaaaaatagcctatcttttaagaaataataaggaggaataacatcttatatttatgtctatttatttttatga

SEQ ID NO: 505571 - DNA, 201 bp, Homo sapiens; identical to SEQ ID NO: 261440

SEQ ID NO: 505572 - DNA, 201 bp, Homo sapiens
ataggtgcagcaaaccagcatggcacgcgtttacctaagtaacaaacctacatgtcctgcatctgtatcctggaacttaaaataaagtaaaattaaattttaaaaaaaaactttgtgcggcaacaactgctatgccactgctatgcaatttctgtcataggacatggaaggatattatgccacataagtcaacgctgtcta

SEQ ID NO: 505573 - DNA, 201 bp, Homo sapiens
ttttatttgttcattatggtagcataatttgttcttgtaaaataactctgaattcagtaacattgctaaatttactaattaaatctaatagttttctgcagactctttaaaaacattattttcattttaaatgtatttcatcatttattaaaagaaatgaattaaaattattttcattgatatttctagtgaaaataaaat

SEQ ID NO: 505574 - DNA, 201 bp, Homo sapiens; identical to SEQ ID NO: 260527

SEQ ID NO: 505575 - DNA, 201 bp, Homo sapiens
tggtgtaaccccatctctactaaaaatacaaaattagctgggcgtgctggcgcatgcctgtaatcccagctacttgggaggctaaggcaagagaatcgctygatcccgggaggcggaggttgcagtgagccgagatcgccctattgcactccagcctgggcaacaagggtgaaactccatctgaaaacaaacaaacaaaca

SEQ ID NO: 505576 - DNA, 201 bp, Homo sapiens; identical to SEQ ID NO: 260528

SEQ ID NO: 505577 - DNA, 201 bp, Homo sapiens
gtgtaaggaagggatccagtttcagctttctacatatagctagccagttttcccagcaccatttattaaatagggaatcctttccccattgcttgtttttstcaggtttgtcaaagatcagatggttgtagatatgtggcattatttctgaggactctgttctgttccattggtctatatctctgttttggtaccagtacc

SEQ ID NO: 505578 - DNA, 201 bp, Homo sapiens
aatagtgctgcggtaaacatacatgtgcatgtgtctttatagcagcatgatttataatcctttgggtatatacccagtaatgggatggctgggtcaaatgstatttctagttctagatccctgaggaattgccacactgacttccacaatggttgaactagtttacagtcccaccaacagtgtgaaagtgttcctatttct

SEQ ID NO: 505579 - DNA, 201 bp, Homo sapiens
ttgtagacacatatggggaatacagaacctttcaaacaactagttttgcagacagcccttggaatctaatatgtttataagaagagaagcttcttttttttgtttttattatactttaagttttagggtacagtgcacaacttgcaggtttgttacatatgtatacatgtgccatgttggtgtgctgcacccactaactcg

SEQ ID NO: 505580 - DNA, 201 bp, Homo sapiens; identical to SEQ ID NO: 260857

SEQ ID NO: 505581 - DNA, 201 bp, Homo sapiens
ttccatatgaaatttaaagtatttttttctcattctgtgaagaaagtcattggtagcttgatgggaatagtattgaatctgtaaattactttgggcagtaygaccattttcatgatattgattgttcccatccatgagcatggaatgtttttccatttgtttgtgtcctctcttttttctttgagcagtggtttgtagttc

SEQ ID NO: 505582 - DNA, 201 bp, Homo sapiens
atgagctttttttcatgtttgttggccacataaatattttcttttgagaagtgcctgttcatatccttcacccactttttgatggggttgtttgattttttcttgtaaatttgtttaaattccttgtagattttggatattagccctttgtcagatggatagattgcaaaaattttctcctattctctaggttgcctgttc

SEQ ID NO: 505583 - DNA, 201 bp, Homo sapiens
aggaatcaccacactctcttccacaatggctgaactaatttacactcccaccaacagcgtaaaagcattcctatttctccacatcctctccagtacctgtkgtttcctgactttttaatgatcgccattctaactggtgtgagttggtatgtcatcgtggttttgatttgcatttctctgatgaccagtgatgatgagctt

SEQ ID NO: 505584 - DNA, 201 bp, Homo sapiens; identical to SEQ ID NO: 261063

SEQ ID NO: 505585 - DNA, 201 bp, Homo sapiens; identical to SEQ ID NO: 261451

SEQ ID NO: 505586 - DNA, 201 bp, Homo sapiens; identical to SEQ ID NO: 260683

SEQ ID NO: 505587 - DNA, 201 bp, Homo sapiens
ttcaaggttgctttctttgtcatgtttctgtgatctctatgtgatatatttgctcagaatatcatagaattgcagagtccaagggaaccttagaggttttytagtccactccctgttgagggcaagtgtcccttttacaactttcctgattttattctatactgtcatgggcctctggaggaacttacaattatgacagca

SEQ ID NO: 505588 - DNA, 201 bp, Homo sapiens
atagttttaaggttggcaaatagtacaagaacccccataccctgagataataactttgaatttttaaaaaaattttttgatttgggaaagaatgcattttkctaagtaatgtagacctgtatttaaaatgctactccaagaatttttaaagactggatatggcataactgttaaaaaagatacaacatgatagtgaatatt

SEQ ID NO: 505589 - DNA, 201 bp, Homo sapiens
ttgtgatctgtttattgctaattgtcttagtttgcacttattagagtcaactcaagatggggattctcagttttgttagttggaatcagaaaaatgaaaayagaaataaaaacaagatagagcaggaaaattgcaagttaaaaatgcaacttagcagaagatcagcctggtcccacaagcatctctgcaacctgagggttc

SEQ ID NO: 505590 - DNA, 201 bp, Homo sapiens
tgtccctagatcgcagtaagccttaaatctggtcaagagcaaatggagagaggggggatcaatatgcacatttgttttgagagattctcctgggctgaccyggtctttatcataccagctggattgctgatgttgaaatgacaatcagtacatcaacaacaaatcaattttggcttcactataaagtaggtttaagagtat

SEQ ID NO: 505591 - DNA, 201 bp, Homo sapiens
aaatattgtgtgataacgagaatgagaaagacatactatattattatttttgaccactcctccatgtacatttagaagtttaaccttgaaaaaagtaagcrtttgaaataaaattgtcactttattagagcaagatataactaattggtataagtccaaatctggttggtgtaagaacggtcttataaaactattgtgttg

SEQ ID NO: 505592 - DNA, 201 bp, Homo sapiens
tttgtgtttttagaagagacggggtttcaccatgttagccatgctggtcttgaactcctgacctcaggtgatccacctgccttggcctcccaaagcgctgrgcttacaggtgtgagacattgtgcccggccttaacaagtgaatttcaaggttgctttctttgtcatgtttctgtgatctctatgtgatatatttgctcag

SEQ ID NO: 505593 - DNA, 201 bp, Homo sapiens; identical to SEQ ID NO: 261458

SEQ ID NO: 505594 - DNA, 201 bp, Homo sapiens; identical to SEQ ID NO: 261088

SEQ ID NO: 505595 - DNA, 201 bp, Homo sapiens; identical to SEQ ID NO: 261461

SEQ ID NO: 505596 - DNA, 201 bp, Homo sapiens; identical to SEQ ID NO: 261089

SEQ ID NO: 505597 - DNA, 201 bp, Homo sapiens; identical to SEQ ID NO: 260532

SEQ ID NO: 505598 - DNA, 201 bp, Homo sapiens; identical to SEQ ID NO: 261464

SEQ ID NO: 505599 - DNA, 201 bp, Homo sapiens; identical to SEQ ID NO: 260533

SEQ ID NO: 505600 - DNA, 201 bp, Homo sapiens; identical to SEQ ID NO: 261466

SEQ ID NO: 505601 - DNA, 201 bp, Homo sapiens; identical to SEQ ID NO: 261468

SEQ ID NO: 505602 - DNA, 201 bp, Homo sapiens; identical to SEQ ID NO: 261470

SEQ ID NO: 505603 - DNA, 201 bp, Homo sapiens; identical to SEQ ID NO: 261096

SEQ ID NO: 505604 - DNA, 201 bp, Homo sapiens; identical to SEQ ID NO: 260697

SEQ ID NO: 505605 - DNA, 201 bp, Homo sapiens; identical to SEQ ID NO: 260893

SEQ ID NO: 505606 - DNA, 201 bp, Homo sapiens
ttgtaaataaaaggaatttatttctcacagttctgggacatccaggctgaaggcagcagtagattcggtgtttggtgaggattgctctcggctttcaagawggcgccctgttgctgtgtcctcacatgatggaaggtgggagggcaaaaagaatggacagctccctcacacctcttttataagatcattaatcccatttgt

SEQ ID NO: 505607 - DNA, 201 bp, Homo sapiens
tcaataggagggtgagtgtgggtctactgttttggtgaaggaaatctgggtagggcaccaagagtcaatctgttatttcaggctgtaagaagatctctttrtcgttggtattctactgttttactagcttcttggtgcaaatttctttttatttattctgcttggaaaactctgtttcctgaacccaaatatttaattatg

SEQ ID NO: 505608 - DNA, 201 bp, Homo sapiens
cagtgagccgagatcgccctattgcactccagcctgggcaacaagggtgaaactccatctgaaaacaaacaaacaaacaaacaaaatctaatagtgcccawtttttaagggccatagacagatgaatttggatcttaatgtcacttgaaaagtgtatcgaaggaaaagtgagcaaatcttaagtgtacaactcaatacatt

SEQ ID NO: 505609 - DNA, 201 bp, Homo sapiens
gatgaaaaatactttttttatattaaaattggttttaattatttgatgcttttgaaatgcatagccatgaggtggtgaattatgagtttataacatttttyccacactgacatctttactagtagtaattatttttcatctattattgtgtggctctgatttgggatttattaaagttttataattgatttattttcttga

SEQ ID NO: 505610 - DNA, 201 bp, Homo sapiens; identical to SEQ ID NO: 260897

SEQ ID NO: 505611 - DNA, 201 bp, Homo sapiens
atgtatttgtgtgtgtgtttgggttgggggtgcagttagagaagtgaggtgggtgtggtgatggctttctatttctccactctagtattaaccagtgtttycatgagccctgaaggctctaagatgcttacagaatttgagggagttgcagaatgagagccagggcacttaacacagacatgtagagtgtgtagagtgcat

SEQ ID NO: 505612 - DNA, 201 bp, Homo sapiens; identical to SEQ ID NO: 261480

SEQ ID NO: 505613 - DNA, 201 bp, Homo sapiens
ttgaaaaaaatagcaccttgttagctggaaaataatgatacattgacttacattgttctgtatttgattaaaaaaaaaaaaaccagaagctttttgctgartttcttgcacaagttttatgagctggattatagcttataagagatgatgatcagaaaaataatgctggattttagttcatgtttatataaataaaagaaa

SEQ ID NO: 505614 - DNA, 201 bp, Homo sapiens
gtcttagaggaaatttcaacttagatgcctctaggcttacagagtttgtgttttagctttatatattacaaggcaggcccctagataaaaataaaatagarttatatgttccacagatgttaagtggtttaaaatttaaaccttttaaaaaagtggttgtatacaagatatgatatgctttggggagggtgaaataaattt

SEQ ID NO: 505615 - DNA, 201 bp, Homo sapiens; identical to SEQ ID NO: 260539

SEQ ID NO: 505616 - DNA, 201 bp, Homo sapiens; identical to SEQ ID NO: 261484

SEQ ID NO: 505617 - DNA, 201 bp, Homo sapiens
acataatatatattatatatggtaaggtataatacataatatatattttatatatatatatatttgagacagagtcttgttctgtcactcaggctggagarcagtggcacaatcttggctaacagcaacttctcctcccaggttcaagtacttcttgtgcctcagcctcccaagtagctgggattatgggtatgtgtcacc

SEQ ID NO: 505618 - DNA, 201 bp, Homo sapiens
caggcctgcaccactgtgcatggcctgtcttagctaatatatttgaaagtccttctgctgttgttttgtgcttccaatttgtcttttgtgttttttccccktgtactttttgtttttcctctttctgccttctttctcagtgggaaagtttcccattactattaaagttctttaatagagggaagaatatcattcaatttt

SEQ ID NO: 505619 - DNA, 201 bp, Homo sapiens
aacttgtgtttttaaattttctctatcatttgtctatttaattctttggcttctgttctgatttttgatattacttttcttttccttactttgggttcaawttgctcttccttttttcatttttttaagtcagaaacttagattttattttctagtatagataggcatttaaagctacacatcttctaatcaccatgctag

SEQ ID NO: 505620 - DNA, 201 bp, Homo sapiens
cttcacatagttctaacatggagcttacatgggcccctttttgtcatatttcttctcagtatttctcaacatcatgctatttttacagctgtactcaaaayttgctatttggctacagtgtacttaggtctttctacaataactgtatttagttcttttgcatactgtatgaattcctaactcttctactttttgagaatg

SEQ ID NO: 505621 - DNA, 201 bp, Homo sapiens
cagaagatcagcctggtcccacaagcatctctgcaacctgagggttccacaaaaatgtcccccattcatgctagggtactggcctttggtatccttttatmagtcatgctttggctgtgggctgtccctagagggagtatgaaacttttgagacatttccagtgataggaggacaattatcaataggagggtgagtgtggg

SEQ ID NO: 505622 - DNA, 201 bp, Homo sapiens; identical to SEQ ID NO: 260540

SEQ ID NO: 505623 - DNA, 201 bp, Homo sapiens
ttactcttaagagagtaaatctcatatgtccctagtcttaacgagtttcatggttccctttgtcctttctaaccaagcgaacgtcttagcctcatatttargggcctcgatggtctagccttaacctccgtgttctagcatgtgtatctgaggatctccagatacacatgctagaccctcctgttaagggtctcttgtctt

SEQ ID NO: 505624 - DNA, 201 bp, Homo sapiens; identical to SEQ ID NO: 260544

SEQ ID NO: 505625 - DNA, 201 bp, Homo sapiens; identical to SEQ ID NO: 260545

SEQ ID NO: 505626 - DNA, 201 bp, Homo sapiens; identical to SEQ ID NO: 260546

SEQ ID NO: 505627 - DNA, 201 bp, Homo sapiens; identical to SEQ ID NO: 260290

SEQ ID NO: 505628 - DNA, 201 bp, Homo sapiens
ggatatttctctttgagggttttattttgttattatgtttggttttggacattgttgatggtgattgttttagccagaggcaagaatcctgtattactacwaagtcatctttctggaacttcttcaggacagcttatacaaaaaacaagaaacccctaggtcaacttgtaagtgaatacttgatagctaagaaaacctgag

SEQ ID NO: 505629 - DNA, 201 bp, Homo sapiens; identical to SEQ ID NO: 260292

SEQ ID NO: 505630 - DNA, 201 bp, Homo sapiens
attgactctagaagatcagaaatgatcatttttggctaggaaccataatctggctagttcccatacctacacagctggccctgctgtattttgagaggttytaggaatggtttatgctccaccttggctagaattatgttatcttgtcttaagtgtctgaatgtgactgatttgtatttgaatatataaaaagtctgggct

SEQ ID NO: 505631 - DNA, 201 bp, Homo sapiens; identical to SEQ ID NO: 260293

SEQ ID NO: 505632 - DNA, 201 bp, Homo sapiens
tttatttgttcattatggtagcataatttgttcttgtaaaataactctgaattcagtaacattgctaaatttactaattaaatctaatagttttctgcagactctttaaaaacattattttcattttaaatgtatttcatcatttattaaaagaaatgaattaaaattattttcattgatatttctagtgaaaataaaatt

SEQ ID NO: 505633 - DNA, 201 bp, Homo sapiens
cagattaatttgaaaattgacatccttataatattgagtcttccatgtatgagcatgatgcatctctctccatttatttttgtttgctttatttcctttamatactattttgtagatttttggtgtagatatcacgaacatcttttgttagattttattctgagtatttgagatatttaattctcttttaaatgttataat

SEQ ID NO: 505634 - DNA, 201 bp, Homo sapiens; identical to SEQ ID NO: 260488

SEQ ID NO: 505635 - DNA, 201 bp, Homo sapiens; identical to SEQ ID NO: 260489

SEQ ID NO: 505636 - DNA, 201 bp, Homo sapiens; identical to SEQ ID NO: 260555

SEQ ID NO: 505637 - DNA, 201 bp, Homo sapiens; identical to SEQ ID NO: 260931

SEQ ID NO: 505638 - DNA, 201 bp, Homo sapiens
ggttttgatttgcatttctctgatgaccagtgatgatgagctttttttcatgtttgttggccacataaatattttcttttgagaagtgcctgttcatatcyttcacccactttttgatggggttgtttgattttttcttgtaaatttgtttaaattccttgtagattttggatattagccctttgtcagatggatagattg

SEQ ID NO: 505639 - DNA, 201 bp, Homo sapiens
gtctaatgtttaactctttaatccatcttgagttaatttttgcataaggtgtaaggaagggatccagtttcagctttctgcatatggctagccagttttcycaacacctttgtttaaatagggaatcctttccccattgctgctttttgtcaggtttgtcaaagagcagatggttgtagatgtgtgacattatttctgagg

SEQ ID NO: 505640 - DNA, 201 bp, Homo sapiens
ttatatactaaaaactctaccttgtgaaacgattattgcttttataaaaaatagcctatcttttaagaaataataaggaggaataacatcttatatttatrtctatttatttttatgactcttcccatctatggacatgacttttcatatagtttaatttttcccttttttatttaacattttttgtagtttatgtttgtt

SEQ ID NO: 505641 - DNA, 201 bp, Homo sapiens
ctaactgtttcacttaatctctgaactctatgtctcctgtagatcttgtcaagatttagctttaagctttgttagggtgaatctaaaacatatcttacttkagctcattatctccactcacaaagtatgactcataaagcagccaatttctcagctggctgcctggggtattagactgcattaatgaggtatctccactct

SEQ ID NO: 505642 - DNA, 201 bp, Homo sapiens
cttcccttcatgaaccccaggtggttggatgatatcagcttccatccttgtgtttaagtgctggaaatctgagcatatcctttctttcatccctcttgatrgaaatttccgcctgctctcttatcctgtcagtgcaaagaaactggttgcaatcccagtgtatgtcaaatataatatcagtttctgagacagtagttcact

SEQ ID NO: 505643 - DNA, 201 bp, Homo sapiens
aaaagataaagcctcccactatccttcgaacagttgtcaacaccatcacaggaagcaccaatgtgggtgaccaacttcccactggataactgtcaatggtrccttggcgaggtactggggtgaaatacaccaacaatgaggcctattttgatgtgattgaagagattgatgccattattgataaatcaggttctacaattg

SEQ ID NO: 505644 - DNA, 201 bp, Homo sapiens
ctcccctctatttgtcagagtttcttcactgagtagtggacacatttcaggactatgttggagtctgttcagaattagtgatgaaggacaatgtgattgtratttatgcggcatcagaagagacgcttggcaatgggtttccaagctgactcgttggctaccgagtcaaatatcctcaaagaaaagataaagcctcccact

SEQ ID NO: 505645 - DNA, 201 bp, Homo sapiens
gggaaaagtcatgaacactttttcatttcttatctaaaagtaaaaagtatcggcctgtctcctaggacagtcccctcctgggcccacacattcctttttcyccttagcctgcagtgctgtggaactaatcaagggaggaaagggtcaccagggagaactggacagaactgaaacacagcaaaaccagttctcaaggacaag

SEQ ID NO: 505646 - DNA, 201 bp, Homo sapiens
gttggctaccgagtcaaatatcctcaaagaaaagataaagcctcccactatccttcgaacagttgtcaacaccatcacaggaagcaccaatgtgggtgacyaacttcccactggataactgtcaatggtgccttggcgaggtactggggtgaaatacaccaacaatgaggcctattttgatgtgattgaagagattgatgc

SEQ ID NO: 505647 - DNA, 201 bp, Homo sapiens
ttcaggactatgttggagtctgttcagaattagtgatgaaggacaatgtgattgtgatttatgcggcatcagaagagacgcttggcaatgggtttccaagytgactcgttggctaccgagtcaaatatcctcaaagaaaagataaagcctcccactatccttcgaacagttgtcaacaccatcacaggaagcaccaatgtg

SEQ ID NO: 505648 - DNA, 201 bp, Homo sapiens; identical to SEQ ID NO: 210111

SEQ ID NO: 505649 - DNA, 201 bp, Homo sapiens; identical to SEQ ID NO: 210083

SEQ ID NO: 505650 - DNA, 201 bp, Homo sapiens; identical to SEQ ID NO: 210141

SEQ ID NO: 505651 - DNA, 201 bp, Homo sapiens; identical to SEQ ID NO: 210090

SEQ ID NO: 505652 - DNA, 201 bp, Homo sapiens; identical to SEQ ID NO: 210094

SEQ ID NO: 505653 - DNA, 201 bp, Homo sapiens; identical to SEQ ID NO: 210148

SEQ ID NO: 505654 - DNA, 201 bp, Homo sapiens
tggctaatgccagatgccaccccattgatccttgccaggccacagcgtctccatgccaccattctgtaaacccatctttccacccatgtgagaagtgccaygtcctggtcccccagtcccgggcagctgcgtgggccctggggttcccatggtgtggtgctcctgccaggagcaggggaaagatcttacaggggaatctag

SEQ ID NO: 505655 - DNA, 201 bp, Homo sapiens
tgactctcagtcccaccctaagtgatactatgggctgtcaccctgggggcgggtggagcagccctgagagctccctgcccaatgtcccttcagccttaagwcttcctgatggctaatgccagatgccaccccattgatccttgccaggccacagcgtctccatgccaccattctgtaaacccatctttccacccatgtgag

SEQ ID NO: 505656 - DNA, 201 bp, Homo sapiens
tggcgtttgtgatggggagccgggcggcccccaggtcatgccttgtttgtctcaccttcacctggaaggctgccaggtgggccacgggctggtggcctgcracctccgatggttgagccagctctgtcgggctgccagcagagaaagggcgggtatagctctgagagacagtcacagcccacacagggtggccagggagtc

SEQ ID NO: 505657 - DNA, 201 bp, Homo sapiens
ctgagtaactctaggtcctctccctgctttctctgcttagtctctgatcagggtgggttgtgtttgtggtgtttgtggcgtttgtgatggggagccgggcrgcccccaggtcatgccttgtttgtctcaccttcacctggaaggctgccaggtgggccacgggctggtggcctgcgacctccgatggttgagccagctctg

SEQ ID NO: 505658 - DNA, 201 bp, Homo sapiens
tttgtgatttgaagagaaatgaagacattttcatgggcttctaaaagtgctgtgggcctggccctgctcctcctgtaacctttcccaggaacgtccggctyggccaggctgggaccaggctggttctgaggacgtttatgctgcactgggcacagagtctggcatgtggtagaagcttagggtctccttcctgagtcatta

SEQ ID NO: 505659 - DNA, 201 bp, Homo sapiens; identical to SEQ ID NO: 102558

SEQ ID NO: 505660 - DNA, 201 bp, Homo sapiens; identical to SEQ ID NO: 102411

SEQ ID NO: 505661 - DNA, 201 bp, Homo sapiens
cgtaggatgtggtagccgctttataaccatacaatactgttcattcaagaaagatttattactttgtgtcagacactgtgtgatgtaagtcaaatgatagmacacacacacacacacacaaatagatttcatttggatgtatcacattttaaaaaggtgaaaacatggtgctagttagtgaaaacaaaatattttattttt

SEQ ID NO: 505662 - DNA, 201 bp, Homo sapiens
gcctcaaaccagcacatttttattaagggtttcaaaaggggagggggtgtaagaacagggagtaggtacaaaggtcacatgcttcaaaggacaaaaagcasaactactaataagggtctaacaaagatcacatgcttttgagggaacaggacaaaaggcataagcagaactactgataagggtccaacaaagatctcaagg

SEQ ID NO: 505663 - DNA, 201 bp, Homo sapiens
ctcaaggcaaagggcaaaagcagaactactgataagggtctatgttcagcggtgcatatattgtcttgataaacatcttaaacaacagaaaacagggttcragagcagagaaccagcctgaccacaaatttaccagggccacgtttttccccaccctagtaagcctgagggttctgcaggagaccagggcatatctcagtc

SEQ ID NO: 505664 - DNA, 201 bp, Homo sapiens
tgggtcactagggctgctcagggaaagggaatccagaagcctggcaggccagcaaaaggataagaatttcttaccaatcagatttctagcttctccctctgtgtgtgtgtgtgtgtgtgtgtgtgtgtgtgtgtgtgtaaactggataaagtttctctctggtcagttatgcccttgggaacttgaccttgtaaccatgtg

SEQ ID NO: 505665 - DNA, 201 bp, Homo sapiens
cccaccagcaccacgacagtttacaaattctatgacaatgtcaggaagttaccctatgtggtctaaaaagaggaggcatgaataatccaccccttgtttascatatcatcaagaaataaccataaaaataggcaatctgcagcccccaggctgctctgtctatggagtagctgttctttttttcttttactttcttaataa

SEQ ID NO: 505666 - DNA, 201 bp, Homo sapiens
atcattattattttaaaaaagggtcttgctctctcacccaggctggcatggtgctggctcactgcagcttcaacctcctgggttcaagcaatcctcccagytcagcctcctgtgtagctgggactctaggtttgcaccatggccacattcagctaatttatttatttattttttgtagagacggggtcttactctgttgcc

SEQ ID NO: 505667 - DNA, 201 bp, Homo sapiens
tttgctataccctcattacagggcaaagaaccctgcttgtcttacatttgcataaagaattgggccactctagtgactcttcaagaaataaataataggcygggcgcagtggctcatgcctgtaatcccaacactttggaaggccaaggtgggaggattgctggagcttgggagtttgagaccatcctgggcaacataatg

SEQ ID NO: 505668 - DNA, 201 bp, Homo sapiens
ttccaacacttcgggaggctcaggcgggcggatcacctaaggccaagagtttgagaccagcctggccaacatggtgaaaccccgtctctactaaaaatacaaaaaaaaaaaaaaaattagctaggcacggtggtgcattcctgtaattccagctacttgggaggctgaggcaggagaatcacttgaacctaggaggcagag

SEQ ID NO: 505669 - DNA, 201 bp, Homo sapiens
gcgtgagccactgtgcccagtgcctagttttacctacttctgtgcacgagtgtcccttccccatcaatgttagccagcttgtggtccgaggaacttgaaawgggaagggaaactccttccttcactcctagttagagctcttcacagataaatatggtggagtctccttcagcacaggtataatgaactatagactatgaa

SEQ ID NO: 505670 - DNA, 201 bp, Homo sapiens
ctgggtcactagggctgctcagggaaagggaatccagaagcctggcaggccagcaaaaggataagaatttcttaccaatcagatttctagcttctccctckgtgtgtgtgtgtgtgtgtgtgtgtgtgtgtgtgtgtgtaaactggataaagtttctctctggtcagttatgcccttgggaacttgaccttgtaaccatgt

SEQ ID NO: 505671 - DNA, 201 bp, Homo sapiens
accctcccatcagcaccatagcggtttacaaatgccatggcaacatcaggatgttaccctatatggtctaaaaaagggaggcatgaataatccaccctttrtttagcatatcatcaagaaataaccataaaaatgggcaaccagcagccccgctgctctgtctatggagtagctgttctttaattcctttactttcttaat

SEQ ID NO: 505672 - DNA, 201 bp, Homo sapiens
ttcaactctgttttatcaaatccccctgactcatctcttaatgatacctcaggaaaatcccatagattttcagtcacattcagttatttaaaattcagccyagtttgatgtactttttatttttttattttttttttaattttctgagacagagttttgctcttattgcccaggctggagtgcagtggcgcgatctcggct

SEQ ID NO: 505673 - DNA, 201 bp, Homo sapiens
taacccaggaggcagaggttgcagtgagccaagatcacaccaccgccctctagcctgggtgacagagtgagaccctgtctcaaaaaaaattaaaaaaaaarttaataacaattctataaatatttgatttgaactgaattcagtgaaaccattacttttcttgatcgagatgtttgttttagtgcaaactaaggatttgtt

SEQ ID NO: 505674 - DNA, 201 bp, Homo sapiens
tccacagcacaaaaatgactaaggattattattttttttttgagacggagtttcgttcttgttgcccaggctggagtgcaatggcgcgatctcggctcacygcaacctccgcctcccaggttcaagcaattctcctgcctcagcctcccgagtagctgggattacaggcatgcaccaccacgcctggctaattttgtattt

SEQ ID NO: 505675 - DNA, 201 bp, Homo sapiens; identical to SEQ ID NO: 299189

SEQ ID NO: 505676 - DNA, 201 bp, Homo sapiens
ccaagtagctgggactacaggtgcgtgccaccacgcccagctcattttttgtatttttagtagagatggagtttcaccatgttggccaggatggtctcgarctccagaccttgtgatccacccgccttggcctcccaaagtgctgggattacaggcgtgagccactgtgcctggccaagatagtttaaaaaattattggta

SEQ ID NO: 505677 - DNA, 201 bp, Homo sapiens
agtttgcgtgagtcgaggttgcgccatttcactccagcctgggcaacaagagcgaaactctaactcaaaaaaaaaaaaaaaaaaaaaaaaaaagtaaaaarggtattcaatgtagctgaaaaaattttctgtaaatattgatatagaataatctgtaagataatcttttccttaaacttctacaattgtttatttctcctg

SEQ ID NO: 505678 - DNA, 201 bp, Homo sapiens
tagtagagacgggtttctccatgttggtcaggctggtctcgaactctcaacctcaggtgatccgcccgccttggcctcccaaagtgctgggattacacgcrtgagccactgcgcccggcctagtttgtgctttttacttaccagttaggggttatattactgtgtaacaaaatggacggttatttctattcattaacaaga

SEQ ID NO: 505679 - DNA, 201 bp, Homo sapiens
ggtttctctatgttggtcagactggtctcaaactcccgacctcaggtgatccgccgcctcggcctcccaaagtgctgggattacaggtgtgagccaccacrcccggcctcaaggctgtgtttcagtgaaatatcccttgcaaatctttacctgggtgggttacagtgttttcactagactcttcaatagaattaatatttt

SEQ ID NO: 505680 - DNA, 201 bp, Homo sapiens
tatttttagtagagacgggtttctccatgttggtcaggctggtctcgaactctcaacctcaggtgatccgcccgccttggcctcccaaagtgctgggattrcacgcgtgagccactgcgcccggcctagtttgtgctttttacttaccagttaggggttatattactgtgtaacaaaatggacggttatttctattcatta

SEQ ID NO: 505681 - DNA, 201 bp, Homo sapiens
gtatgtgtatatgagctacctttaaaagagcagtcacccatgcgagcatttgttacccaattagtttgtacttttttttggtttttattttgttgttgttrtttgtttctttttgagatggagtctcgctcttctcacgcaggctggaatgcaataatggcataatcttggctcactgcaacctccgcctcccaggttcaa

SEQ ID NO: 505682 - DNA, 201 bp, Homo sapiens
tcatctttagctgggcagtggcccctcgaggctcgggcttccctgcacaaggtatttttgatccttgccagcggagggagagagagttatcttggtttcctttcacttgttttcgggctgcttcaaagcaaacatcccagttccaaatgttctttgtggtttgaatcctggcagaggccagggtcacatccaagtgggact

SEQ ID NO: 505683 - DNA, 201 bp, Homo sapiens
gaccaccctagtaggagggagggagaccagacggaggccaggcaaccgacccaggcagcatctggctcagacgcagacacatcttcatgttgagggacctrttcttacacagcaaaacccagagaagtcgactgctcagcctgagcctgtcatccctatatagactcagcttttaggagaagagggagagttgaggagata

SEQ ID NO: 505684 - DNA, 201 bp, Homo sapiens
agagatctcacagcttgaccaccctagtaggagggagggagaccagacggaggccaggcaaccgacccaggcagcatctggctcagacgcagacacatctkcatgttgagggacctattcttacacagcaaaacccagagaagtcgactgctcagcctgagcctgtcatccctatatagactcagcttttaggagaagagg

SEQ ID NO: 505685 - DNA, 201 bp, Homo sapiens
cacacaagactgcacacaagaaaaagtgctcaagaaactttggctttgaagggaattcagtgaagggaagcgattgtgcaggaggaagggaagaaacccaygatcaccctaaggggcggggggctggagggcgaggccctgagacaggctagggttaaagctgacgtcccacagctcaggacgtacaaccgatggcagttt

SEQ ID NO: 505686 - DNA, 201 bp, Homo sapiens
ctccagacaatttcaacatagcgccggtaacaccctagttttgctcaaactctgacttgtgctatctgtcccagacagttcacgactgcccgtcacttccstccttcacactgcaccaggaaaaggccacacctccctacacagcagcagccttttaggaaatgtgctctacaggaaaagtggtttttctgattaaacatc

SEQ ID NO: 505687 - DNA, 201 bp, Homo sapiens
ctcctgctgacagcatgcatgtgccttttggctaacacacactcttgtctaattcccagccaccttcaccccagggatgagttccagttggtttaagccaractggtgcatttaattctggctgcaacaactggattctgttaagtgcccattgctaagccaatgagctatctgctgggctgtgggaaagagaaatgcagt

SEQ ID NO: 505688 - DNA, 201 bp, Homo sapiens
ttacaaatctgccctcctttctcccctaaaaggtggctgaggggaggagaggtgcatgtagctccagctatagcaaatcagtgccctgactcactggggakacccagggggttgggatgttgctgacacctcatgggccacctcatcagcccatctttgtagcttcaggttcagctctgggtgctgcaggcagggacccct

SEQ ID NO: 505689 - DNA, 201 bp, Homo sapiens
tctgggtgctgcaggcagggacccctctgctccctgcctgaatgcagggccagtctccaaggaactctgtctgcagagtagaaagagctgtgggctgggawtcaggggcctgagggagcccctgccactgcctgcccagaaccagtgctcctcattctcctgctgacagcatgcatgtgccttttggctaacacacactct

SEQ ID NO: 505690 - DNA, 201 bp, Homo sapiens
ggccacagcagagaatgggattccatcaaagcctctcaaccagccgtttccctaaagaatcacccagatcttaactgccctctccaccttctttttttttyccctcctattttacattctattttctcatatccagcttttctctctaagcctaaccaaatgctttggtgaatgatgcttggaaaagctggagttttaaaa

SEQ ID NO: 505691 - DNA, 201 bp, Homo sapiens
gcagtggcccctcgaggctcgggcttccctgcacaaggtatttttgatccttgccagcggagggagagagagttatcttggtttcctttcacttgttttcrggctgcttcaaagcaaacatcccagttccaaatgttctttgtggtttgaatcctggcagaggccagggtcacatccaagtgggactggcctctagcacca

SEQ ID NO: 505692 - DNA, 201 bp, Homo sapiens
aggaaagcaggatcttgctgaagtcattcgaatgcatcccaaccagtgctcagctgcgtaacgacatggagagaggcaggggggaatagaaagcaaatttwaaaacaccaacacccaaacacacaagactgcacacaagaaaaagtgctcaagaaactttggctttgaagggaattcagtgaagggaagcgattgtgcagg

SEQ ID NO: 505693 - DNA, 201 bp, Homo sapiens
gctttgaagggaattcagtgaagggaagcgattgtgcaggaggaagggaagaaacccacgatcaccctaaggggcggggggctggagggcgaggccctgasacaggctagggttaaagctgacgtcccacagctcaggacgtacaaccgatggcagttttgtactaggaagaagctgagtgatgaggctgggtgatgggat

SEQ ID NO: 505694 - DNA, 201 bp, Homo sapiens
ggcttccctgcacaaggtatttttgatccttgccagcggagggagagagagttatcttggtttcctttcacttgttttcgggctgcttcaaagcaaacatyccagttccaaatgttctttgtggtttgaatcctggcagaggccagggtcacatccaagtgggactggcctctagcaccaccttctggccacagcagagaa

SEQ ID NO: 505695 - DNA, 201 bp, Homo sapiens
tctcacagcttgaccaccctagtaggagggagggagaccagacggaggccaggcaaccgacccaggcagcatctggctcagacgcagacacatcttcatgytgagggacctattcttacacagcaaaacccagagaagtcgactgctcagcctgagcctgtcatccctatatagactcagcttttaggagaagagggagag

SEQ ID NO: 505696 - DNA, 201 bp, Homo sapiens
cccagacagttcacgactgcccgtcacttccctccttcacactgcaccaggaaaaggccacacctccctacacagcagcagccttttaggaaatgtgctcwacaggaaaagtggtttttctgattaaacatcaggaactagagtcaacaatcgctgtcctctcccgtgcctgtcacgctccactccccacccagctgcaat

SEQ ID NO: 505697 - DNA, 201 bp, Homo sapiens
ggcgcaaatgcatgacccttgtagaaaagcaacaaacacacccaaacaataaaatagctctttgtttattcactttgatttggatcattggaaatattaamcaataaataaaacagagcgggggctgaggaaagcaggatcttgctgaagtcattcgaatgcatcccaaccagtgctcagctgcgtaacgacatggagaga

SEQ ID NO: 505698 - DNA, 201 bp, Homo sapiens
gggagggcccttgatcagtcatcaccctggaatccaggctcctgaaacctcatattccattctttgttcctaagatatgacataaatgtgtagcgtaaagraaggtgagctgagttagcatatctattaaactaatagtctggcttggaaagaatcatttgcagcacaggtaatgaagacactacaatatgtagccttttc

SEQ ID NO: 505699 - DNA, 201 bp, Homo sapiens
cccctttcctttcagatgctgctactttcgtatacttgttcataccaaacgtgagcacagattctccctgccattccaccacactttacatgaagactctragacaataaaatgtaaatgcaacatggcttaaagctgaatacaactgaaagctgctttgagttagagcactcaagtcccactgtaggattccctctataa

SEQ ID NO: 505700 - DNA, 201 bp, Homo sapiens
acctggagcctgaacctggaatcttccaagaccccagatcagcctctgctgacagttctcttgtaaagatactgaggataggattacaggtagtggctcaygcctgtaatcccaacactttgggaggctgaggcgggtggatcacttgagctcatgagttcaagaccagcctgggcaacatggcaaaactctgtctctaca

SEQ ID NO: 505701 - DNA, 201 bp, Homo sapiens
ttccactgggcacctggagcctgaacctggaatcttccaagaccccagatcagcctctgctgacagttctcttgtaaagatactgaggataggattacagrtagtggctcacgcctgtaatcccaacactttgggaggctgaggcgggtggatcacttgagctcatgagttcaagaccagcctgggcaacatggcaaaact

SEQ ID NO: 505702 - DNA, 201 bp, Homo sapiens
ataggattacaggtagtggctcacgcctgtaatcccaacactttgggaggctgaggcgggtggatcacttgagctcatgagttcaagaccagcctgggcarcatggcaaaactctgtctctacaaaaaatacaaaataatacaaaaataagctggatgtggttgtgtgcacctgtagtcccagctactcaggaggctgagg

SEQ ID NO: 505703 - DNA, 201 bp, Homo sapiens
atcctctgtagccttcttatttcccccacggtgagtacattctttagagataggatataaactttgaaatgaccattttctttttaaatgaatgataaacsattgttccttcattaggcatgtggccactctctaccctctcgcaagccttgccagagatgccatcctccacttccactgggcacctggagcctgaacctg

SEQ ID NO: 505704 - DNA, 201 bp, Homo sapiens
acgaggccccagggctgccgtggctcctgctgctccacatattgtggggcaccttgatagccgaggttgccttaagttacctccagctttgtttctgtcacctgcaaatcaaagagcccagcctaaaatcctctgtagccttcttatttcccccacggtgagtacattctttagagataggatataaactttgaaatgacc

SEQ ID NO: 505705 - DNA, 201 bp, Homo sapiens; identical to SEQ ID NO: 230302

SEQ ID NO: 505706 - DNA, 201 bp, Homo sapiens; identical to SEQ ID NO: 230240

SEQ ID NO: 505707 - DNA, 201 bp, Homo sapiens; identical to SEQ ID NO: 230283

SEQ ID NO: 505708 - DNA, 201 bp, Homo sapiens; identical to SEQ ID NO: 230343

SEQ ID NO: 505709 - DNA, 201 bp, Homo sapiens; identical to SEQ ID NO: 230235

SEQ ID NO: 505710 - DNA, 201 bp, Homo sapiens; identical to SEQ ID NO: 230329

SEQ ID NO: 505711 - DNA, 201 bp, Homo sapiens; identical to SEQ ID NO: 230334

SEQ ID NO: 505712 - DNA, 201 bp, Homo sapiens; identical to SEQ ID NO: 230335

SEQ ID NO: 505713 - DNA, 201 bp, Homo sapiens; identical to SEQ ID NO: 230345

SEQ ID NO: 505714 - DNA, 201 bp, Homo sapiens; identical to SEQ ID NO: 230365

SEQ ID NO: 505715 - DNA, 201 bp, Homo sapiens; identical to SEQ ID NO: 230238

SEQ ID NO: 505716 - DNA, 201 bp, Homo sapiens; identical to SEQ ID NO: 230239

SEQ ID NO: 505717 - DNA, 201 bp, Homo sapiens; identical to SEQ ID NO: 230272

SEQ ID NO: 505718 - DNA, 201 bp, Homo sapiens
aaccaatcagatgtttgcacaggtgtgcgacctttgtaacttcacttcagcctctgcttggctgctttctgcaaccaatcagactgattgcaggctacgamttcatttacatgaggtgagcatgaagtggcgggtaacttctagggggtatttggacccaagaagattctgtttcctggcccttgagccgctgctccggct

SEQ ID NO: 505719 - DNA, 201 bp, Homo sapiens
tttctgcaaccaatcagactgattgcaggctacgaattcatttacatgaggtgagcatgaagtggcgggtaacttctagggggtatttggacccaagaagrttctgtttcctggcccttgagccgctgctccggctgctcccacactgtggagtgtgctttcgttttcaatacatccctgctttccttcttttgttccttc

SEQ ID NO: 505720 - DNA, 201 bp, Homo sapiens
ataaatattaccaatgcgttttctggttgttgtctgatttttgattgaagtataatgagaatgacatgtctgttacttttggtttgaggacttcgctttarcttcataaatcttttggtattttagtatttcattgttttagcagagagggcagcaaaagttcattttccctgttagtaatgctgtggttcatgatcagtt

SEQ ID NO: 505721 - DNA, 201 bp, Homo sapiens
actgttctttataaaagaaaagaaaaaataagaaataaataataccctcaatgccgctggatactcacaagcagggttatgtagatcttgggcttgtttgmctaaatgaaagggtttaatttattttgtacctcctatgtgtgggatagtccaggatgcagagccaggacttgcttgtaattgcacctgctatacttaaat

SEQ ID NO: 505722 - DNA, 201 bp, Homo sapiens
cggcatccacaccatccggatgcctggattcaaatgccacgtcaccacttgccagctgcagtgccttcgacaagtttctcaatcactctgtgcctcagcgwcctcctctgtaaaacggcgaatgatggtagcgcctacctcataagcttgtgaggattaagtgagagtctatccagtgttgaggagagtggcataaataaa

SEQ ID NO: 505723 - DNA, 201 bp, Homo sapiens; identical to SEQ ID NO: 365019

SEQ ID NO: 505724 - DNA, 201 bp, Homo sapiens; identical to SEQ ID NO: 365024

SEQ ID NO: 505725 - DNA, 201 bp, Homo sapiens; identical to SEQ ID NO: 364815

SEQ ID NO: 505726 - DNA, 201 bp, Homo sapiens; identical to SEQ ID NO: 365042

SEQ ID NO: 505727 - DNA, 201 bp, Homo sapiens; identical to SEQ ID NO: 365044

SEQ ID NO: 505728 - DNA, 201 bp, Homo sapiens
atagtgaaagtcttaaagtctttgatctttcttataagtacatagaagaaagcgctgatgtatggtcttctctttctgtttcagctacctaaaagggaagsgccccctgtcctatgatcacgtgacttgcttcaccttgtcaatcacttggaagattcaccctccttaccctgccctccttgtcttgtatgcaataaatat

SEQ ID NO: 505729 - DNA, 201 bp, Homo sapiens
taaccccctccctgtggtgctatgatttaatggtcacatttcttgtccacttccacgttcctcccgtactcctggttcctctttgaagttcgtagtagatmgcagtagaagaaatagtgaaagtcttaaagtctttgatctttcttataagtacatagaagaaagcgctgatgtatggtcttctctttctgtttcagctac

SEQ ID NO: 505730 - DNA, 201 bp, Homo sapiens
ggaggctggatgttatccaggcctgcccgcagtcatccggaggcctaaccccctccctgtggtgctatgatttaatggtcacatttcttgtccacttccaygttcctcccgtactcctggttcctctttgaagttcgtagtagatagcagtagaagaaatagtgaaagtcttaaagtctttgatctttcttataagtacat

SEQ ID NO: 505731 - DNA, 201 bp, Homo sapiens
agttcgtagtagatagcagtagaagaaatagtgaaagtcttaaagtctttgatctttcttataagtacatagaagaaagcgctgatgtatggtcttctctytctgtttcagctacctaaaagggaagcgccccctgtcctatgatcacgtgacttgcttcaccttgtcaatcacttggaagattcaccctccttaccctgc

SEQ ID NO: 505732 - DNA, 201 bp, Homo sapiens
atgtcctaaaaagtgtcgcctgtgcccatcatctctcaggcttgggagcaggacaccgccggctcactttaaagccaagggaaagaatttggacaaccaastacgtctggagaagacaccaatgtcagcagagctccgctttcatctgtgggcgaaggattacctagatgccaaggcaagagactgaagacacaaactgtt

SEQ ID NO: 505733 - DNA, 201 bp, Homo sapiens; identical to SEQ ID NO: 273057

SEQ ID NO: 505734 - DNA, 201 bp, Homo sapiens; identical to SEQ ID NO: 273058

SEQ ID NO: 505735 - DNA, 201 bp, Homo sapiens; identical to SEQ ID NO: 273059

SEQ ID NO: 505736 - DNA, 201 bp, Homo sapiens; identical to SEQ ID NO: 273061

SEQ ID NO: 505737 - DNA, 201 bp, Homo sapiens; identical to SEQ ID NO: 273063

SEQ ID NO: 505738 - DNA, 201 bp, Homo sapiens; identical to SEQ ID NO: 273062

SEQ ID NO: 505739 - DNA, 201 bp, Homo sapiens; identical to SEQ ID NO: 273064

SEQ ID NO: 505740 - DNA, 201 bp, Homo sapiens; identical to SEQ ID NO: 273065

SEQ ID NO: 505741 - DNA, 201 bp, Homo sapiens; identical to SEQ ID NO: 273068

SEQ ID NO: 505742 - DNA, 201 bp, Homo sapiens; identical to SEQ ID NO: 273032

SEQ ID NO: 505743 - DNA, 201 bp, Homo sapiens; identical to SEQ ID NO: 273072

SEQ ID NO: 505744 - DNA, 201 bp, Homo sapiens; identical to SEQ ID NO: 273073

SEQ ID NO: 505745 - DNA, 201 bp, Homo sapiens; identical to SEQ ID NO: 273075

SEQ ID NO: 505746 - DNA, 201 bp, Homo sapiens; identical to SEQ ID NO: 273036

SEQ ID NO: 505747 - DNA, 201 bp, Homo sapiens; identical to SEQ ID NO: 273038

SEQ ID NO: 505748 - DNA, 201 bp, Homo sapiens; identical to SEQ ID NO: 273040

SEQ ID NO: 505749 - DNA, 201 bp, Homo sapiens; identical to SEQ ID NO: 273039

SEQ ID NO: 505750 - DNA, 201 bp, Homo sapiens; identical to SEQ ID NO: 273041

SEQ ID NO: 505751 - DNA, 201 bp, Homo sapiens; identical to SEQ ID NO: 273042

SEQ ID NO: 505752 - DNA, 201 bp, Homo sapiens; identical to SEQ ID NO: 273043

SEQ ID NO: 505753 - DNA, 201 bp, Homo sapiens; identical to SEQ ID NO: 273079

SEQ ID NO: 505754 - DNA, 201 bp, Homo sapiens; identical to SEQ ID NO: 273044

SEQ ID NO: 505755 - DNA, 201 bp, Homo sapiens; identical to SEQ ID NO: 273080

SEQ ID NO: 505756 - DNA, 201 bp, Homo sapiens; identical to SEQ ID NO: 273081

SEQ ID NO: 505757 - DNA, 201 bp, Homo sapiens; identical to SEQ ID NO: 273082

SEQ ID NO: 505758 - DNA, 201 bp, Homo sapiens; identical to SEQ ID NO: 273086

SEQ ID NO: 505759 - DNA, 201 bp, Homo sapiens; identical to SEQ ID NO: 273049

SEQ ID NO: 505760 - DNA, 201 bp, Homo sapiens; identical to SEQ ID NO: 273050

SEQ ID NO: 505761 - DNA, 201 bp, Homo sapiens
gggagcaggagccagactaggggaggaagaggactggcccgctcagggaatagctgggttgctgcaaaaaggggcggggagaaggcgggggcgctgcatgmagcgcgctggctccagcggtggccgcggggaatgtgacatcagcggcgccgggcgcttggggctggaggaggcagctcgcctcagctgcgctgtgcacac

SEQ ID NO: 505762 - DNA, 201 bp, Homo sapiens; identical to SEQ ID NO: 273097

SEQ ID NO: 505763 - DNA, 201 bp, Homo sapiens; identical to SEQ ID NO: 273099

SEQ ID NO: 505764 - DNA, 201 bp, Homo sapiens; identical to SEQ ID NO: 273055

SEQ ID NO: 505765 - DNA, 201 bp, Homo sapiens; identical to SEQ ID NO: 273056

SEQ ID NO: 505766 - DNA, 201 bp, Homo sapiens
acaataacagaacccaaggaaattggttagtattgtgtttctagaatactgtatcttcctgttagtttaacaaactttcaaccaatcaatcatcaacatctttttttttttttttttttagacagagtcttgctatatcacccaggctgcagtgagtggtgccatcatagctcactgcagcctcgacatctcaggctcaag

SEQ ID NO: 505767 - DNA, 201 bp, Homo sapiens
ttaagaagtttatctgacaataacagaacccaaggaaattggttagtattgtgtttctagaatactgtatcttcctgttagtttaacaaactttcaaccartcaatcatcaacatctttttttttttttttttttagacagagtcttgctatatcacccaggctgcagtgagtggtgccatcatagctcactgcagcctcg

SEQ ID NO: 505768 - DNA, 201 bp, Homo sapiens
ttttttttttagacagagtcttgctatatcacccaggctgcagtgagtggtgccatcatagctcactgcagcctcgacatctcaggctcaagtaatcctcycacctcagcctcctaagtatcgggaccacaggagggcatcaccacacccaaccctttttttattttttgtagagacagggtttcccaatgttgcccaggc

SEQ ID NO: 505769 - DNA, 201 bp, Homo sapiens
atgaaacacctagggatgaaatgttctctgttgattttttcttttcaatgtgaaatgtacagtttttgaagtcacaacgttggcacaattaagaagtttawctgacaataacagaacccaaggaaattggttagtattgtgtttctagaatactgtatcttcctgttagtttaacaaactttcaaccaatcaatcatcaac

SEQ ID NO: 505770 - DNA, 201 bp, Homo sapiens; identical to SEQ ID NO: 487806

SEQ ID NO: 505771 - DNA, 201 bp, Homo sapiens; identical to SEQ ID NO: 487850

SEQ ID NO: 505772 - DNA, 201 bp, Homo sapiens; identical to SEQ ID NO: 487807

SEQ ID NO: 505773 - DNA, 201 bp, Homo sapiens; identical to SEQ ID NO: 487811

SEQ ID NO: 505774 - DNA, 201 bp, Homo sapiens; identical to SEQ ID NO: 487812

SEQ ID NO: 505775 - DNA, 201 bp, Homo sapiens; identical to SEQ ID NO: 487832

SEQ ID NO: 505776 - DNA, 201 bp, Homo sapiens; identical to SEQ ID NO: 487862

SEQ ID NO: 505777 - DNA, 201 bp, Homo sapiens; identical to SEQ ID NO: 487863

SEQ ID NO: 505778 - DNA, 201 bp, Homo sapiens
ttcctgcctgactttaaatcagagggcaagggcctttttaacaaatgttatccttaatacataccaacaagtacagcggtagcaagagctgcaacacttgytacctgtaacaagagctacaatacttgttatatgtaacaagagcaagagctcaatacttgttatatgacttgaaaaatgtaaatattaccaggaatatct

SEQ ID NO: 505779 - DNA, 201 bp, Homo sapiens
cttataactccagcctccattaattttcaccatctctgcccttctagagtgtttaccacctgattttgtgatctaatggtaatataattagttcatatccktgtttgcctctcacatactctacagccagaccacattgctcacgtgctttgcatgcattactttcctgcctgactttaaatcagagggcaagggcctttt

SEQ ID NO: 505780 - DNA, 201 bp, Homo sapiens
ggaatcagtggcttatgctgtctctatgattttgaaaaccaaacttcagttctacccattccttaaggtctaacagtacttgggtcttttctatgaaacaktgttttattagtttcttataactccagcctccattaattttcaccatctctgcccttctagagtgtttaccacctgattttgtgatctaatggtaatata

SEQ ID NO: 505781 - DNA, 201 bp, Homo sapiens
agtggaagggggaatcagtggcttatgctgtctctatgattttgaaaaccaaacttcagttctacccattccttaaggtctaacagtacttgggtcttttmtatgaaacattgttttattagtttcttataactccagcctccattaattttcaccatctctgcccttctagagtgtttaccacctgattttgtgatctaa

SEQ ID NO: 505782 - DNA, 201 bp, Homo sapiens
cctccctggattctatttggaatttcagttattaacagtcctgcataccaccttcatcatctacttcatctagttactcacttacttctaaaaatacttayttttgacctcaggttggtaaaattagcctactctcatgtttgtttatgcttttgttctgctgctggtctctttggtcaatgtccatctattcatattatg

SEQ ID NO: 505783 - DNA, 201 bp, Homo sapiens
gcatggctggggaggcctcaggaaatttacaatcatggcagaaggtgaaggagaagcaggcacaatcttcacatggtggagcgggagggagagagtgagcraagagggaagtggtacatgctttcaaacgaccagatctcatgagaactctatcacaagaaaagcaaggcagggagtccaccccatgattcagtcatcttc

SEQ ID NO: 505784 - DNA, 201 bp, Homo sapiens
gtaaatattaccaggaatatctactatccactaaaagaactgatagcaaataaattgttccaattaaatattttgttcaagaggtcttgaaaacaagccaygtaagtcatcaagtgagtctaacctctacaacataaaggcatcgtattgaaagtgtttcactttaacctccctggattctatttggaatttcagttatta

SEQ ID NO: 505785 - DNA, 201 bp, Homo sapiens
aacatgagatttgggtggggacacagagccaaaccatatgaagtactttgtcagatgtatgtgttgcaaatatcttctctcattctgtgggctgctttttmtagtggaagggggaatcagtggcttatgctgtctctatgattttgaaaaccaaacttcagttctacccattccttaaggtctaacagtacttgggtcttt

SEQ ID NO: 505786 - DNA, 201 bp, Homo sapiens
agtagagatggagtttcaccatgttggccaggctggtctcaaactcctgacctcaaatgatccacctgcttcggcctcccgaatagctgggattataggcwtgtaccaccatgcctggctaattcttgtattttcagtagagacagggtttcaccatgttggccaggctggtctcaaactcctgacctcaaatgatccacc

SEQ ID NO: 505787 - DNA, 201 bp, Homo sapiens
aaggcccagagcccttttgaggccctcgaaggtcccaggctggggtcatcctctccagtttcagtttgagaaaacaaggcccagagaggtgaagggctgtycggtcattgcccatggagccaggggagctgtgggccttccgccgccaacctctgggctagccctgcagagatgctaggaggatgcagggaggtgaggtgg

SEQ ID NO: 505788 - DNA, 201 bp, Homo sapiens
ggtggctcacgcctgtaatcctagcactttgggaggctgaggtgggcggatcacctgaggtcaggagtttgagaccagcctggccaacatggtgaaacccyatctctactaaaaatacaaaattagccaggcatggtggtgccatgcctgtagtcccagctacttgggaggctgagacaggagaattacttgaacctggga

SEQ ID NO: 505789 - DNA, 201 bp, Homo sapiens
tcacatttagagtccaacttgtttgaatcatttttggtctgagagtcgtgatgtctgtgtctgcctgccacctccttctctgagtccttgagagttctacrgagagcagtactgctccaaacattccataaaacagccaggcgctcttaagccagctttacaattgtgcagatgaagtggagccgagttttcactctgctc

SEQ ID NO: 505790 - DNA, 201 bp, Homo sapiens
aacaaaacaaaacaaaaagtgaaacgtgaacattaagcatcttggaatagataaaacatgcataatttccaatctttttgctgaccatgcttccagctgcytcagagcagttgcacattctgttcctgctgcctggaataccctcccttcctttccactttgccctgttaacccagccatccctgatctcatgcgtactcc

SEQ ID NO: 505791 - DNA, 201 bp, Homo sapiens
taaacacgtctttaccttatgatccactgtggctgcttgagttccagccatcacattcatcgtccagcctgcaggaaggaggaaatgaagaacagaagatraaaggcccatgccagctgtctgtcaagaagctttttctggaagctgtcatatatcccttccacttacatctcactggacagaacttagtcacatggtcat

SEQ ID NO: 505792 - DNA, 201 bp, Homo sapiens
ggagctgctgggcgcgcacaggacaggtgctcctgagggatgcccgtgcgggggtgggtatgcaaataggaacaagctttgcagagtggacggatgcttgrtattattattattattttaatattataaaatactttattaaaattcaggaagggttaggtcaggtgtggctcatgcctgtaatcgcagaacattgggagg

SEQ ID NO: 505793 - DNA, 201 bp, Homo sapiens
ctggaagctgtcatatatcccttccacttacatctcactggacagaacttagtcacatggtcatactagctgcaaaggaagctgagaagtatcaacttcaytccagggtgccatgtgtctaaattaaaaattatgagtttttttagtcagggagagagagagaaaggatattgggtggacagcaagcagtgtggccacaca

SEQ ID NO: 505794 - DNA, 201 bp, Homo sapiens
ccctgttaacccagccatccctgatctcatgcgtactccaggatgccttccctgatcatcctgccgaggtcaaatcccctccccttcatagcacctagtayggctacaacagtctcgagtgtatagaggatggggtggggtgaggtcacaggaatgatgctcccttctatctggggttcaagggaggcttcttggaggagc

SEQ ID NO: 505795 - DNA, 201 bp, Homo sapiens
gtcatcctctccagtttcagtttgagaaaacaaggcccagagaggtgaagggctgttcggtcattgcccatggagccaggggagctgtgggccttccgccrccaacctctgggctagccctgcagagatgctaggaggatgcagggaggtgaggtgggggctgaggtaggactcagactgcccaggcccgcctgcacccgg

SEQ ID NO: 505796 - DNA, 201 bp, Homo sapiens
actgagccacatggttcggcttcatcaaagatagatttgccaaattgacatacaattcacatatcataaaattcagcctgtaaaattgtacaaaggctagrcatggtggctcatgcctgtaatcccagcactttgtgggggtgaagggggatgcttacttgagtccaggagtttgagaccagtctgggcaatataatgaga

SEQ ID NO: 505797 - DNA, 201 bp, Homo sapiens
attgtatgccaatttggcaaatctatctttgatgaagctgaccagtgtggcccagttcccacatggaacaattcagggcagggacagggagccaggtgtgrgggctgttgcctctgagccacctgtgacctgtgctgtgttctctgctgcagttgccaactagagttgagttttaccttttggatttattttttgccagtt

SEQ ID NO: 505798 - DNA, 201 bp, Homo sapiens
aaagaaagaacgctgtagtgagtgaagcctggcatttgggaagatgggtgtgtgggtgaccaaactcaccacgcaaggcccagagcccttttgaggccctygaaggtcccaggctggggtcatcctctccagtttcagtttgagaaaacaaggcccagagaggtgaagggctgttcggtcattgcccatggagccagggga

SEQ ID NO: 505799 - DNA, 201 bp, Homo sapiens
acatctatgcgaaggcacagattcttggtgttaacgagcatgcatattggcctgccatgtgattatatttgtatcatcaactcgcactcctggagttgggaatcatgtctttttacttaacacaggtaaggagccctgctcagggtgggaaacacagataatacttaacacgttttgggaaggagtaaagaagtgaaggcc

SEQ ID NO: 505800 - DNA, 201 bp, Homo sapiens
cagcagggagaaagcctcactctgacctggctctggttggctcagggctcttgctggatctgggcccccacctgccctggcctccttggcttccccttccrcccaaaccccagagccctcctgcttctggcctttgagactgaaccagagctagctaaaaaattcgaacccaggccgggagtggtggctcacacctgtaat

SEQ ID NO: 505801 - DNA, 201 bp, Homo sapiens
gttccacttgctcacctgtgtctcctcacagtcacataggtatcttcccttcagtgcctctttgctgaaaatcatctctgcaccaggcactgtgcgaggcyctggggatacagcagtgaatatgccgtgcatgggccctgcaggcatcaggtaccaggtgggaagggtgttccaggggtgggaacagccactgctaaggtc

SEQ ID NO: 505802 - DNA, 201 bp, Homo sapiens
ccagatccacgtgtggtcccctcatctccccagtgacttctctccaagcctctgtccccattccctgcaaccttggtcaccaaagtcaccctgattcccarttgtgggtcctccaatctcttccctttcagcatctaccagacaatgttccccgctgggatgcccctgcccagatcactctaaccttcagggccccaagtc

SEQ ID NO: 505803 - DNA, 201 bp, Homo sapiens
ggcacttgttttctccaatacatcattgaattctcaggtttcctgagggagaggagagaagtgaggaaaaagaaaggaagctaagaaaccgatttcatttrccaccaaactcaataagccacctcttcttgaggcatgtgttggtggttaccagtggggactggaacaagttgagagctgaacccactggggctgcgagga

SEQ ID NO: 505804 - DNA, 201 bp, Homo sapiens
ccttatgcaccagacattttgctgggctctgcacatccagtagaggactcctggtttatgactctgtaagaagctagaagtggccactccatcctaaaagyagaaagctgaacaaactgaaaaatcaactcatcatagggaaaactgctgcccccaaaattggaaggaccaacaaaaagttgaaaacagagaatcacaact

SEQ ID NO: 505805 - DNA, 201 bp, Homo sapiens
tggggttttacctccaggagcttgaccaggttctcacagagaagatgagagaaaaattcccttatgcttcctgtaggttgggggaggaaagttgccatttwaaactatgctagaacattctattttccctaaccaggcctgcgctcaagtggaattgttttaccagaccctaacctgttggggtttcattggaacttaact

SEQ ID NO: 505806 - DNA, 201 bp, Homo sapiens
tgcaaagagtttcttttgctgagtgtctgtaattcatttggttgcgggaagcttttctatggtagctcagaccaaagaccacatatctgcaaacagtttgyaggcacttgttttctccaatacatcattgaattctcaggtttcctgagggagaggagagaagtgaggaaaaagaaaggaagctaagaaaccgatttcatt

SEQ ID NO: 505807 - DNA, 201 bp, Homo sapiens
gaatggctggaggcttcgtgtggacacatctgagggttaaacactccaggggactcagtcataagggcccccaacactgtttggggttttacctccaggascttgaccaggttctcacagagaagatgagagaaaaattcccttatgcttcctgtaggttgggggaggaaagttgccattttaaactatgctagaacattc

SEQ ID NO: 505808 - DNA, 201 bp, Homo sapiens
acttgttttctccaatacatcattgaattctcaggtttcctgagggagaggagagaagtgaggaaaaagaaaggaagctaagaaaccgatttcatttgccrccaaactcaataagccacctcttcttgaggcatgtgttggtggttaccagtggggactggaacaagttgagagctgaacccactggggctgcgaggatgt

SEQ ID NO: 505809 - DNA, 201 bp, Homo sapiens
ccacctcttcttgaggcatgtgttggtggttaccagtggggactggaacaagttgagagctgaacccactggggctgcgaggatgtgggtgaggacccagygtggcaagagttccaggcttcgacctccagctgcacagcttggtgatggccaagggtgcggctgcatttggaggcttctgtaaagaggcaggggtgccac

SEQ ID NO: 505810 - DNA, 201 bp, Homo sapiens
ctgctgcccccaaaattggaaggaccaacaaaaagttgaaaacagagaatcacaacttactagagcagaaacacaggagcagaaaccataatgagaacccrtgccagggtagggaaacctgaactgtaatggatgaatggctggaggcttcgtgtggacacatctgagggttaaacactccaggggactcagtcataaggg

SEQ ID NO: 505811 - DNA, 201 bp, Homo sapiens
cagttcaaatctattgagcctccttatgcaccagacattttgctgggctctgcacatccagtagaggactcctggtttatgactctgtaagaagctagaartggccactccatcctaaaagtagaaagctgaacaaactgaaaaatcaactcatcatagggaaaactgctgcccccaaaattggaaggaccaacaaaaagt

SEQ ID NO: 505812 - DNA, 201 bp, Homo sapiens
atcttctgaagctcgtttccatgaaactcgccctgttaaatatctcccttcccgtgattcgtgagagagctagtctaaaaacaaaaaacctcccctttgcyccaggtcggagataattttcctctagttgctgacagtttggtgaccaggcattactgaaaatgtgcacgttgaaccagcagcagatttgtgtttaagaat

SEQ ID NO: 505813 - DNA, 201 bp, Homo sapiens
gttcttccttaccctcctaaaagttcttagatgatttgctaatttaccacggagaatgccaagtagctgtttgctcttacaggaaatgtgatttccagagwatacaccgtaagcttcagctcatgtgaagggtatcttctgaagctcgtttccatgaaactcgccctgttaaatatctcccttcccgtgattcgtgagaga

SEQ ID NO: 505814 - DNA, 201 bp, Homo sapiens
gtcccagctactcaggaggctgaggcaggagaatggcgtgaacccaggagacggagcttgcagtgagtcgtgatcgcaccactgcactctagcctgggtgrcagagcaagactctgtctcaaaaaataaataaataaataaaataaaataaaaaaataaaaaacaaaacaaaactagtttcaactttggaatcatacaaac

SEQ ID NO: 505815 - DNA, 201 bp, Homo sapiens
gccgaggcgggcggatcatgaggtcaggagatcgagaccatcctggctaacacggtgaaacaccgtctctactaaaaatacaaaaaattagctgggcatgstggtgggcgcctgtagtcccagctactcaggaggctgaggcaggagaatggcgtgaacccaggagacggagcttgcagtgagtcgtgatcgcaccactgc

SEQ ID NO: 505816 - DNA, 201 bp, Homo sapiens
tttgggaggccgaggcgggcggatcatgaggtcaggagatcgagaccatcctggctaacacggtgaaacaccgtctctactaaaaatacaaaaaattagcygggcatggtggtgggcgcctgtagtcccagctactcaggaggctgaggcaggagaatggcgtgaacccaggagacggagcttgcagtgagtcgtgatcgc

SEQ ID NO: 505817 - DNA, 201 bp, Homo sapiens
gaggccgaggcgggcggatcatgaggtcaggagatcgagaccatcctggctaacacggtgaaacaccgtctctactaaaaatacaaaaaattagctgggcrtggtggtgggcgcctgtagtcccagctactcaggaggctgaggcaggagaatggcgtgaacccaggagacggagcttgcagtgagtcgtgatcgcaccac

SEQ ID NO: 505818 - DNA, 201 bp, Homo sapiens
tgggtgcagcgcaccagcatggcacatgtatacatatgtaactaacctgcacaatgtgcacatgtaccctaaaacttaaagtataataattaaaaaaaaaattttttttaaaaggtattcagtaaaaagtctccctcccactccttggaccccagccatcctttttcctgttcgatgactggtttcttgtaagtcgattca

SEQ ID NO: 505819 - DNA, 201 bp, Homo sapiens
ctctctgagtgtacctttcttcaaagaaaactagttctagccaggtgtggtagctcatgcctgtaatcctagcactctgggaggccaagatgggaggatcrtttgaggccaggaattaaagaccaatctggccatcatagtgagaccccgtctctattttttaaaaaacaaacaagggggccgggcgcagtggctcacgcc

SEQ ID NO: 505820 - DNA, 201 bp, Homo sapiens; identical to SEQ ID NO: 128133

SEQ ID NO: 505821 - DNA, 201 bp, Homo sapiens; identical to SEQ ID NO: 128158

SEQ ID NO: 505822 - DNA, 201 bp, Homo sapiens; identical to SEQ ID NO: 127923

SEQ ID NO: 505823 - DNA, 201 bp, Homo sapiens; identical to SEQ ID NO: 127892

SEQ ID NO: 505824 - DNA, 201 bp, Homo sapiens; identical to SEQ ID NO: 128191

SEQ ID NO: 505825 - DNA, 201 bp, Homo sapiens
aattgtgtcactgcactccagcctgggtgacagagcaagactccgtccaaaaaaaaaaaaaaaaaaaaagggaccatgttctagtgtaggggtaagtggaytgttttggccccaaccccaagaggatcaagggagaccactgcagctgcccgagaaattcttgccctctgacaagaaacaccctatccagtctggggaatt

SEQ ID NO: 505826 - DNA, 201 bp, Homo sapiens
ctggggaatttgccagtccaacccctccccttggctcaagattctgggaaatcctaaatagtgtttaccattggccttttatcagctccagtataaatgcrtctggccagacttgctttacaactatgcataatggatagttgggccaggcttggtggctcatgcctagtgctttgggaggccgaggtgggaggatcactt

SEQ ID NO: 505827 - DNA, 201 bp, Homo sapiens
aaattacccgggcctggtggcgcatgcctgtaatcccagctgctcaggaggctgaggcaggagaatcgcttgaacccaggaggtggaggttgcggtgagcygagatcacgccattgcactccagcctggacaacaaaagcaaaactccgtcttaaaaaataaataaataaataacattaaactacgtcactcagcctgtga

SEQ ID NO: 505828 - DNA, 201 bp, Homo sapiens
ggggtaagtggattgttttggccccaaccccaagaggatcaagggagaccactgcagctgcccgagaaattcttgccctctgacaagaaacaccctatccrgtctggggaatttgccagtccaacccctccccttggctcaagattctgggaaatcctaaatagtgtttaccattggccttttatcagctccagtataaat

SEQ ID NO: 505829 - DNA, 201 bp, Homo sapiens
gcgtctgcagagtgagcctcagcattgggaccctgtgtgaccaaaggcaggacacggccatcgcagcacagaggggtcaccgacgcacaacagggctcccrgtgcacccgcagcagctttcttcaaaattacccagacattagagcaatgctagcccctcaacgtgggctccaagaacgtgggaagtcagcctgccagcca

SEQ ID NO: 505830 - DNA, 201 bp, Homo sapiens
ttcaacagtcatcaaaggtaacagacaaattagcattattagtacaaagtatacggttcagcaaaactaacaacacactgaaagatgaaaaatgatgactsgtgcatgtggcttttatttttaatgacacaaatctcatctctttgcagagtttgctatcttcttcaaactttgcagccaatctcacccacggattgaaga

SEQ ID NO: 505831 - DNA, 201 bp, Homo sapiens
accgacgcacaacagggctcccggtgcacccgcagcagctttcttcaaaattacccagacattagagcaatgctagcccctcaacgtgggctccaagaacktgggaagtcagcctgccagccacaaagctgccacgtcctcccatccgggtgtgaataaagcacccacaaatgcctccttagttggaactgaaaaaaaaaa

SEQ ID NO: 505832 - DNA, 201 bp, Homo sapiens
gctcactgcagcctcgaactcccaggcgcaagcaattctcccaccctagctgcctgagtagctgaaaccattacaggtgtacatcaccatgctcagccgattttttttttttttttttaattttttgtagagacgaggtctcactgtgtagcccaggctacatagtgagctcctgggctcaggccatcttcccgcctcaac

SEQ ID NO: 505833 - DNA, 201 bp, Homo sapiens
ctgggtctagaattagctttgtcacctgctaatgatgggacactgagcaagtcacttatcctgtctgtacctcagtgtcttcagtggaaaactagaaaccmtcatgcctccacagaatttttaaatctaatgatttttaaatctaatgctgtgtgcaggcagctgtcagtggtctttatgaagaaaaatctgagctagaag

SEQ ID NO: 505834 - DNA, 201 bp, Homo sapiens
tcactgtgtagcccaggctacatagtgagctcctgggctcaggccatcttcccgcctcaacttcccaaagtgttgggattataggcttgagccaccatackgggcctcagtgtctcataaactaaggagagatagctatgggaacatagtcatgaagataattatcgatttcagtgtctttaccctggcctcctaaaatca

SEQ ID NO: 505835 - DNA, 201 bp, Homo sapiens
aaaactagaaaccatcatgcctccacagaatttttaaatctaatgatttttaaatctaatgctgtgtgcaggcagctgtcagtggtctttatgaagaaaamtctgagctagaagaaagcactgttgtgttatggttaagagtagaggctttggagtcagactgacctggctttaactttcagctttgctgcttcctaagct

SEQ ID NO: 505836 - DNA, 201 bp, Homo sapiens
cgatttcagtgtctttaccctggcctcctaaaatcacttgttccaagctctggtttttttgttttgttttttgtttttgtaagagccctcaggttagtgawtctctctgtccctcctctgagttgaatagcattatctcagcacttctgggagagttgttaaggagacttccccctccttctgggtgcccctagggaaatc

SEQ ID NO: 505837 - DNA, 201 bp, Homo sapiens
acataagatcctctctctatatttcattattggtgaacccacattgtgctgtgttttgtgatattttatcattttctagattcttatgtggatctaataamgaccacttgaacccagtttcacagaatccttatttttctgttcaaattaggaattagggacatggatgaaattggaaatcttcattctcagtaaactatc

SEQ ID NO: 505838 - DNA, 201 bp, Homo sapiens
agtttggatgatggttgtgatggtgattataataaagttctagagtttgactcagtgtttttgagacaaggtctcatccaggctggagtgcagtggtgcartcatagctcactgcagcctcgaactcccaggcgcaagcaattctcccaccctagctgcctgagtagctgaaaccattacaggtgtacatcaccatgctca

SEQ ID NO: 505839 - DNA, 201 bp, Homo sapiens
tgtgagtttcaggtagccctgagtttataatcctagttctgactcgtactatctttggatatactagctgctgactactaactgaacaaggtagtaacctkgtcatcttgtaacttacctaagtctgtttcctcctctataaaacaaactatcaaaataaagccgatgaaaagattgaagtaaaacataaaacccttagca

SEQ ID NO: 505840 - DNA, 201 bp, Homo sapiens
agaggaaagcccatgaactcattttccatgaacataatataatagtactcacctatctcctctacccaacttgtgttttagatgagtccttttggatcttyttccccataatggcctctctccttttgctttacagtgcaatcagggcagaataacagatatgttgagtagctaatttatatttctgaagatctccataga

SEQ ID NO: 505841 - DNA, 201 bp, Homo sapiens; identical to SEQ ID NO: 149922

SEQ ID NO: 505842 - DNA, 201 bp, Homo sapiens; identical to SEQ ID NO: 149925

SEQ ID NO: 505843 - DNA, 201 bp, Homo sapiens
tagtggtgcacgcctgtagtcccagctactcgggaggctgaggcagaagaatcgcttgaaccaggcaggcggaggttgcagtgagccgacgtcatgccacygcactccagcctgggtgacagagcgagactctgtctcaaaataaaaaggcaacacgataaatgaagtgcatttattaggataatcaacagttaccaggtc

SEQ ID NO: 505844 - DNA, 201 bp, Homo sapiens
tgaaactaactgtaccctcgttaagtctcttagtgtgtggaactgtttcttcatctgaaaattgaaaacaacaagacatgcaaggtacagcatgaggtaaygtgctcagggtgctttcaacagctagacttgtatactagttccagctgcgcagctctctagctaggtgactttgaacaagcagtccaaccttctgagctc

SEQ ID NO: 505845 - DNA, 201 bp, Homo sapiens
tccggttctaaacggaatgaaaactaccagctctcctgaaactaactgtaccctcgttaagtctcttagtgtgtggaactgtttcttcatctgaaaattgraaacaacaagacatgcaaggtacagcatgaggtaatgtgctcagggtgctttcaacagctagacttgtatactagttccagctgcgcagctctctagcta

SEQ ID NO: 505846 - DNA, 201 bp, Homo sapiens
cacgaggtcaagagattgagaccatcctggccaaagtggtgaaaccccgtctctactaaaaatataaaaattagctgggtgtagtggtgcacgcctgtagwcccagctactcgggaggctgaggcagaagaatcgcttgaaccaggcaggcggaggttgcagtgagccgacgtcatgccaccgcactccagcctgggtgac

SEQ ID NO: 505847 - DNA, 201 bp, Homo sapiens
cactccagcctgggtgacagagcgagactctgtctcaaaataaaaaggcaacacgataaatgaagtgcatttattaggataatcaacagttaccaggtccrgttctaaacggaatgaaaactaccagctctcctgaaactaactgtaccctcgttaagtctcttagtgtgtggaactgtttcttcatctgaaaattgaaaa

SEQ ID NO: 505848 - DNA, 201 bp, Homo sapiens
tctatgactgctggatatgagatgtgatttgattaaagagacaggccaggcacggtgactcacgcctgtgaatcccagcactttgggaggccgaggcaggyggatcacgaggtcaagagattgagaccatcctggccaaagtggtgaaaccccgtctctactaaaaatataaaaattagctgggtgtagtggtgcacgcct

SEQ ID NO: 505849 - DNA, 201 bp, Homo sapiens
ttgaggagagctggtagtcttcattccatttagaaaccagatctggtattcaataattaaaaataattaataattaataagcagcccaaatttccaccaayggatgagtaggtaaacaccagattaaaagacttccaagcagtccatgattctagcatactcatctatgactgctggatatgagatgtgatttgattaaag

SEQ ID NO: 505850 - DNA, 201 bp, Homo sapiens
actaattaataatgaataacttgcaatgtgccaggtgctcttttaaaagcatttagatgttttaacttatttaactctgtaaacatttcttttaaaagtawgttatcagtaatgaaaatggcctacatcctactctataaaggccagtagtttacttcttggaatatcatcttggtcagtcatgatctgaggagaatatac

SEQ ID NO: 505851 - DNA, 201 bp, Homo sapiens
gtgcactccagatatatgattcatctactaattaataatgaataacttgcaatgtgccaggtgctcttttaaaagcatttagatgttttaacttatttaamtctgtaaacatttcttttaaaagtatgttatcagtaatgaaaatggcctacatcctactctataaaggccagtagtttacttcttggaatatcatcttgg

SEQ ID NO: 505852 - DNA, 201 bp, Homo sapiens
tgtacacgtattaactcctgatccctgcaaatagcctgctattacccccgcttgacaatggagaaggtgagccacagagaagttaactcttccctaagccsacacagctaataagggaaacagccaaggttcaccccagccaagccctgctccactgcacaagcccagaaaaatgtatctgtgctcaaagttaatatcata

SEQ ID NO: 505853 - DNA, 201 bp, Homo sapiens
tattaatgtttttgagatggagtcttgctctgtcacccaggctggagtgcagtggtgcaatctccgctcactgcaacctccgcctcctgggttcaagcaaytctcctgcctcagcctcccatgtagctgggattataggcactcactaccatgcccagctaatttttgtatttttagtggagacaggatttcaccatgttt

SEQ ID NO: 505854 - DNA, 201 bp, Homo sapiens
gtcaggcttctgagccttgtagggccatcatacacttccctgtgacatctgttttagcaatccctgctttgtcaatttagcaggattccctgcccctgatrtctgatcccccttggtgacatctgatcaggctccccatgctccaccatcccccatgctgtccaatcaccctggcctgccttcaacaggaatcctatgagg

SEQ ID NO: 505855 - DNA, 201 bp, Homo sapiens
taaagtctggtaccatgctttaacaaatgctattgattattttttttctttaacagttatcttacccagatgtcatttcctcttcctgggagctgccatgktccttcccctctcctgcagcacttagtccaatactgaatcttcatgatgtgactcttcataatgcgcatggttgacgcaggaaggagccctctcaccatc

SEQ ID NO: 505856 - DNA, 201 bp, Homo sapiens
cgggaggcggagcttgcagtgagccgagatagtgccactgcagtctggcctgggcgaaagagcgagactccgtcttaaaataaaataaaataaaataaatwaaataaaataaataaaataaaataaaataaataaaataaaataaaataataaaataaaataaaatagtgtaccatggctgggtgcagtggctcacgcctg

SEQ ID NO: 505857 - DNA, 201 bp, Homo sapiens
gtcacttaccgttcactgcagccccgggatgagctctgcgatgagcatccttttgcagacgaggacactgaagcacaggaaagttaggtcatttgcctaargacatgcagctggatggggacagagccaggatcgggcttgcagtggcttcagaccccacctttctgaccacagcgctcgtgctcttggagcgccttgaga

SEQ ID NO: 505858 - DNA, 201 bp, Homo sapiens
gtggcgcgatctcggctcactgtaacctccatctcccaggttcaagcgattctcctgcctcagcctcctgagtagctgggattacagacatgcaccgccamgcccagctgatttttatatttttagtagagatggggtttcaccatgtggtcaggctggtctccaactcctgatctcgtgatttgcctgcctcagcctccc

SEQ ID NO: 505859 - DNA, 201 bp, Homo sapiens
aggcggactggaggacgcagtttccagatgggatgccctggcgggcgactcccgtgcgcatgcccagcatcctgcgcaggcgctctcgtggccaggcctcygcaaacagtcagcacagaccgggagacagaaaactacactccctcagacgctttattgtttacaaaacagatggatcccatagggaaggaacacaatcat

SEQ ID NO: 505860 - DNA, 201 bp, Homo sapiens
gaatccaccccttgtttagcatatcctcaagaaataaccataaaaagggacagtcagcagccctggagctactctgcctttagagttgctattctttattsctttacttttttttttgagatggagtctcactccatcgcacaggctggagtgcagtggcgcgatctcggctcactgtaacctccatctcccaggttcaag

SEQ ID NO: 505861 - DNA, 201 bp, Homo sapiens
tcgtggccaggcctctgcaaacagtcagcacagaccgggagacagaaaactacactccctcagacgctttattgtttacaaaacagatggatcccataggraaggaacacaatcattatgctgacagcagcgaacagagaggggaagaaaaaaggtgagctttaaagtaatcgcaaatcactgcctatgcgaagaggctgc

SEQ ID NO: 505862 - DNA, 201 bp, Homo sapiens
ggaaaagacgacacccgaatgaagatcatctaaggaggcttcagtgaagggaccatttaccacggatgagacagcagggcgtgcgggcggcacgaggggcygctgtagcatctggagctgctaacagtggagctgtcactcccatgtcacactcccaggccagaagagaccaggggaggggactcagcccagacactggga

SEQ ID NO: 505863 - DNA, 201 bp, Homo sapiens
cttaggaacaagaggaaaggcagctgcttgcatgactcagctctcagcttcctgttttttcctattggaagggtgcattgcggtttttattttcctttcayaggacctactgtatttttgcaacttctgtgtggttcaaaattttatttcaaaggaaaaaatggtggggaagaaagtggtgaaagcagacactcttgcgtt

SEQ ID NO: 505864 - DNA, 201 bp, Homo sapiens
aactacactccctcagacgctttattgtttacaaaacagatggatcccatagggaaggaacacaatcattatgctgacagcagcgaacagagaggggaagmaaaaaggtgagctttaaagtaatcgcaaatcactgcctatgcgaagaggctgcttccgggcacctgggctgtgactcaggtgctgacatgaatacatcag

SEQ ID NO: 505865 - DNA, 201 bp, Homo sapiens
tgtcgcagctgaagtgtgaattggccttatgttccctgcctccagaccctattttcctgcctcacttaaaacaaaacaaaacaaaccaaaaaacaaaaacaaaaaaaaaaaactttaatgaggcatgtgttacatatcataaaactcacccatttcaagtataaaattcagtgattttagtaacttccctcagtgatgtag

SEQ ID NO: 505866 - DNA, 201 bp, Homo sapiens
gacagataacgtcttggtagtttgttccttttattgctgagtagaattctgttgatggatgtaccacattttgtcagcagagagccttttaaacttggatkccaacttcctgttgtctaaacggaaccctccgaacgtaggacttataggggaagctgctgtgcatgtcaaaaaaactactaatcagaatgagctttgtca

SEQ ID NO: 505867 - DNA, 201 bp, Homo sapiens
tccaataaatccatttaataagtatgagcatgtgtctgagtggacaagaaagtgaaaccatccatgctacattggataatttttcctcccccagactggayagggaatctcagctttcaaaacagagtaacctggctccacttacaaagctgcacaggcattaaagatcgtgctgcctttgttaggcagatttggagggga

SEQ ID NO: 505868 - DNA, 201 bp, Homo sapiens
atttaataagtatgagcatgtgtctgagtggacaagaaagtgaaaccatccatgctacattggataatttttcctcccccagactggacagggaatctcarctttcaaaacagagtaacctggctccacttacaaagctgcacaggcattaaagatcgtgctgcctttgttaggcagatttggaggggaggcccaacagca

SEQ ID NO: 505869 - DNA, 201 bp, Homo sapiens
ttgctttttttcccctaatcattacttggtagttattaatccttctttgggggagggacagggctttaaaactgaagaaaataattttcataaaaatatcraaaatggaaaaaaattactttgtaaaaaatttgctatacaaaccaaatggcagctgttgagaatctcaataaaatgttaagtgcatttgttggcagtggt

SEQ ID NO: 505870 - DNA, 201 bp, Homo sapiens
ctaatcattacttggtagttattaatccttctttgggggagggacagggctttaaaactgaagaaaataattttcataaaaatatcgaaaatggaaaaaarttactttgtaaaaaatttgctatacaaaccaaatggcagctgttgagaatctcaataaaatgttaagtgcatttgttggcagtggtacccttttgcctaa

SEQ ID NO: 505871 - DNA, 201 bp, Homo sapiens
cagctgaagtgtgaattggccttatgttccctgcctccagaccctattttcctgcctcacttaaaacaaaacaaaacaaaccaaaaaacaaaaacaaaaamaaaaaactttaatgaggcatgtgttacatatcataaaactcacccatttcaagtataaaattcagtgattttagtaacttccctcagtgatgtagccata

SEQ ID NO: 505872 - DNA, 201 bp, Homo sapiens
gagatggagatccaccaaccctagtaggtggcaggaaagagctggggttttggctgccaagccctgggctgacccagctgctgtccagaaggggcatgccracaccttcctctccaataatgctgcagcagtgttgaccattactcatgagagggtatcacctcacacaaactaggagttcctaggaggaggggaccagga

SEQ ID NO: 505873 - DNA, 201 bp, Homo sapiens
aataaaaaaaaattagccaggtctggtggcaaatgcctgtaatcccagctactcgggaggctgaggtgggaggattgcttgggcccaggagcctgaggctrcagtgagccataattgtaccactgcactccagtgcggacaacagagcaagaccctgtctcaaaaaaaaaaaaaagtgaataaaattatcaaagaaataat

SEQ ID NO: 505874 - DNA, 201 bp, Homo sapiens
gacagagaaagactctgtaaaaacaaacaaacaaaaacatttgtacaccatctctctgagtcaaatgcgccaaaggcttccttgtcacttccaggacaagrcagaaatctatgtgacccataggactgtacccgagatggctgtccgcctctccagctcatctcacgccgtgttcccgctccgtcctccagccattcttcc

SEQ ID NO: 505875 - DNA, 201 bp, Homo sapiens
ccgggcttcgtcctcagccctgtcctgtcccacatccctcttgatcatttggccagggacacagttgccaggcttcatttgaggagaacgtgaagcaaggwgaagggacatactcatgacctaaagaaagctcagaggcctggggtgtcaaagcagatctggggagatctgctggagagagccccagccaatgatggccac

SEQ ID NO: 505876 - DNA, 201 bp, Homo sapiens
tctgctcacccactgtttctcccaatggtttgcacagtatcttagatatagtagctgctgcaatatgaatgaatgaatcagaataaaattatcaacattcrttcaattttattaatctctaccatcatacaaaacataaccttttcagttctcatggactcttgatggaaacggaccatgtattcgattctcacaaggcct

SEQ ID NO: 505877 - DNA, 201 bp, Homo sapiens
aatcccagaactctgggaggccaaggcgggcagatcacttgagcccaagagtttgagactagcctgggctggtcacatgtttagtagagatggtgaaaccycatctctactaaaaatacaaaaaatagccaggtgtggtggcgcctgtagtcccatccacttgggaggctgaggtaagaggcccacctgagcctgggaggt

SEQ ID NO: 505878 - DNA, 201 bp, Homo sapiens
agccaccctctgcaccctggagagtttgggctggagagcagcatcaggggcatccgttcagatggctccgttttccggatgccaggttttccttcccacgmccctgcccttggcctaagcaatctgccggggctgagtcttcaggctctggagctctgcaaattcctgttaggtctctggcctgcctgcaccatgtctgcc

SEQ ID NO: 505879 - DNA, 201 bp, Homo sapiens
aaagccaagggtttgtgccgactctccctcaccgaaggacagaccccggacccacgacggcacctcaaagcccccgagtgcacagactggctcttgggtcrgagcctgggttgcttcatctgaaatggaggaccccaggcctccgaggctgcacttcctggaaaggctcttcgtggccacctgaacgagccctgggcaggt

SEQ ID NO: 505880 - DNA, 201 bp, Homo sapiens
tcatgtaatacagtgaatacattatgaagtcttgactataaacttttttgagacagagtctcgctctgtcccccaggctggagtacagtggtgcaatctcrgctcactgcaacctccgcctcccgggttcaagcgattctcctgactcagcctcctgagtagctgggattacagacatacgccaccacgcccagctaattt

SEQ ID NO: 505881 - DNA, 201 bp, Homo sapiens
ttcagtcaccacagattagttttgcttgcatttgaaattcatgtaatacagtgaatacattatgaagtcttgactataaacttttttgagacagagtctcsctctgtcccccaggctggagtacagtggtgcaatctcggctcactgcaacctccgcctcccgggttcaagcgattctcctgactcagcctcctgagtagc

SEQ ID NO: 505882 - DNA, 201 bp, Homo sapiens
gtcagctgaagcactgcagatcgagtcatccaactcaagcttcttcctcttattggaagggataaaccaggtaagactttttaatccagaaattattcctrttccctgcaatgtatagggtgctttctatctgcaaaactctaaactcaaatttctgcaggttcagattccaactgtctcatgcgcagagactctcccatc

SEQ ID NO: 505883 - DNA, 201 bp, Homo sapiens
atccgagtggagtgtgcagatgtgaaagttgaccagggtgggaaacggtcctgttgttctgtaagtgaacgtccttgtccttaggaaatctacactgaggraactgtatccagaggggcatgggctctaggacagttcgggctccagtggcccgggggcagagtccacattcagttctaagttaggaggagcttccactaa

SEQ ID NO: 505884 - DNA, 201 bp, Homo sapiens
ctgtggaaacccttggcctttcctcttgcctcttttagaactctcaatagagccatctgggccagataccgtgtttttttttttttattaaaaaaaaaaaatactgagctggaagcattaatgtccacctattttaagtgtacagccttcgtgactctttccacatgactatacctgaaccaccaccactcggatcagaat

SEQ ID NO: 505885 - DNA, 201 bp, Homo sapiens
ctgtccgttagaggcaatcagtcatgtttcagtgaagcttgaggcactgggccccccagtgaacaaaaccagacatcctgaccccctactcctgcggtctstgcagggcttgctttagcatgcttggcttgtggggagggggtgtggcagccattcccacacaaggtcacgcagggatgccacagtgcgttcaagagtaga

SEQ ID NO: 505886 - DNA, 201 bp, Homo sapiens
caacagaaacgcagactgtggaaacccttggcctttcctcttgcctcttttagaactctcaatagagccatctgggccagataccgtgtttttttttttttattaaaaaaaaaaaatactgagctggaagcattaatgtccacctattttaagtgtacagccttcgtgactctttccacatgactatacctgaaccaccac

SEQ ID NO: 505887 - DNA, 201 bp, Homo sapiens
gtttttgtttttagtagagacgggggtttcaccgtgttagccaggatggtctcgatctcctgaccttgtgatccgcccgcctcggcctccgaaagtgctgrgattacaggcgtgagccaccgcgcccggccgcacatcctaaatcttgatgttaaacattctgacatctgacaggctgctcatcctgccccagtgcaccag

SEQ ID NO: 505888 - DNA, 201 bp, Homo sapiens
gggccaggtgcagtggctcatggctgtaatcccaacactttgggaggccaaggcaggaggactgcttgagctcaggagtttaagaccagcctgggcaacayagaaccaatctctacaaaaactacaaaaaaaaattagccaagtatggtggcatgcacctgtagtcctagctacttgagaggctgaggtgggaggatggct

SEQ ID NO: 505889 - DNA, 201 bp, Homo sapiens
ataaagacaaatttcagctgctgcccaccagaggaggatcaaagggttttttttgcttgtgttttgccttttcttttcttttctttttttttttttttttggagactgagtctcgctctgtcacccaggctggagtgcagtggtgcaatctcggctcactgcaagctccgcctcccgggttcacgccattctcctgcctca

SEQ ID NO: 505890 - DNA, 201 bp, Homo sapiens
cacagtgcgttcaagagtagaatccacagccttctctccgtaactctgggccttgctgtaaatagcagaggcttgggctggggatcctgtatcactggacrggatgtgccaatgaagagaaggctgagaagcaagttggtgtaggagaagcccagtgctcctggtggacacaggcctgcattcaaccaaatgtctgaagac

SEQ ID NO: 505891 - DNA, 201 bp, Homo sapiens
actacaggcgcccgccaccacacccacctaattttttgtttttgtttttagtagagacgggggtttcaccgtgttagccaggatggtctcgatctcctgaycttgtgatccgcccgcctcggcctccgaaagtgctgagattacaggcgtgagccaccgcgcccggccgcacatcctaaatcttgatgttaaacattctga

SEQ ID NO: 505892 - DNA, 201 bp, Homo sapiens
cagctaaggccaaaagaaataaagacaaatttcagctgctgcccaccagaggaggatcaaagggttttttttgcttgtgttttgccttttcttttcttttytttttttttttttttttggagactgagtctcgctctgtcacccaggctggagtgcagtggtgcaatctcggctcactgcaagctccgcctcccgggttca

SEQ ID NO: 505893 - DNA, 201 bp, Homo sapiens
ggaaaccaatttcagagaaagaggctgagcgcttgctagtgcagggaggaactaagatgacgaagcatcgcacggatgagtcgtggccttgccggcttgayggcgggtagaatgcagtgccaccctccccaagaccaccatctggccaggagccccggccccacctttcctccttcccttgtgcctcctggcacttcccgc

SEQ ID NO: 505894 - DNA, 201 bp, Homo sapiens
gtggcacgatcttggctcactgcaagctccgcctcctgggttcacgccattctcctgcctcagcctcccacccccggccccgagtagctgggactacaggygcccgccaccacacccacctaattttttgtttttgtttttagtagagacgggggtttcaccgtgttagccaggatggtctcgatctcctgaccttgtgat

SEQ ID NO: 505895 - DNA, 201 bp, Homo sapiens
tgagtcgtggccttgccggcttgacggcgggtagaatgcagtgccaccctccccaagaccaccatctggccaggagccccggccccacctttcctccttcscttgtgcctcctggcacttcccgcagccctcccctgttgagtgtaggcgttctgcccggggcagtcgctgtgagagaggccatggcctggactagggtga

SEQ ID NO: 505896 - DNA, 201 bp, Homo sapiens
tctacagagctatgtcagcggtacaggctcagaaggaagccatctcggtctctttctggtcttcagtgcacagtggccaggacagcctcccccacttcacygaatcacatttcttcagcagtttccaacagtgaaatcatttctaggacaatggctgctaacacgtgtcagctgaagcactgcagatcgagtcatccaact

SEQ ID NO: 505897 - DNA, 201 bp, Homo sapiens
tccaaaacagaggccagacgcacatcctaagttttttttttttttttttttttttgagacagagtctgtctctgtcccccaggctggagtgcagtggcacratcttggctcactgcaagctccgcctcctgggttcacgccattctcctgcctcagcctcccacccccggccccgagtagctgggactacaggcgcccgcc

SEQ ID NO: 505898 - DNA, 201 bp, Homo sapiens
agtcatgcctcccaagagccctttaataaaggcaggtgccattactgtcaccattgtcacaaaggaactcgccaagaccccaagatcacaaattgctaagyggcagaataagctctaaacactgtccctaatcattatattccatcctcatcccaggattagaaatgatctccaccccagaaaatacaggtaaggcataaa

SEQ ID NO: 505899 - DNA, 201 bp, Homo sapiens
aaccaaaacacagcactccaaaacagaggccagacgcacatcctaagttttttttttttttttttttttttgagacagagtctgtctctgtcccccaggcyggagtgcagtggcacgatcttggctcactgcaagctccgcctcctgggttcacgccattctcctgcctcagcctcccacccccggccccgagtagctggg

SEQ ID NO: 505900 - DNA, 201 bp, Homo sapiens
aggcactttcctgccacatgaccagccatggtaaccaaaacacagcactccaaaacagaggccagacgcacatcctaagttttttttttttttttttttttttgagacagagtctgtctctgtcccccaggctggagtgcagtggcacgatcttggctcactgcaagctccgcctcctgggttcacgccattctcctgcct

SEQ ID NO: 505901 - DNA, 201 bp, Homo sapiens
aaaataatcacagccaggttttgtagacacgacttgtttagcatacatacagaactgtggggagtttctgtaaacagggaaggaccatgcaaacagcatcrtattggagatggagatccaccaaccctagtaggtggcaggaaagagctggggttttggctgccaagccctgggctgacccagctgctgtccagaaggggc

SEQ ID NO: 505902 - DNA, 201 bp, Homo sapiens
ggagatggagatccaccaaccctagtaggtggcaggaaagagctggggttttggctgccaagccctgggctgacccagctgctgtccagaaggggcatgcygacaccttcctctccaataatgctgcagcagtgttgaccattactcatgagagggtatcacctcacacaaactaggagttcctaggaggaggggaccagg

SEQ ID NO: 505903 - DNA, 201 bp, Homo sapiens
tcatgagagggtatcacctcacacaaactaggagttcctaggaggaggggaccaggatgcatgcctcctagcaagccaggcttaaactagaatctttgagrcattcaaagcaactggatttcattgttaaaattatgactaccctattgctgattgatttttttttttttaagacagggtcttactgtgttgcctaggctg

SEQ ID NO: 505904 - DNA, 201 bp, Homo sapiens
ggaggctgaggtaagaggcccacctgagcctgggaggtcaaggctgtggtgagctgcgattataccactacactccagcccaagcgagaagagaccctgtytcaaaacataataatactctcctaaataactgataaatcaaaatagaaagcacaatgggcctcagaaaactgagtaataaggaaaatatgacactaaaat

SEQ ID NO: 505905 - DNA, 201 bp, Homo sapiens
caggcatgaggcactgtccctggctggaatcaaagttttaaatcttgagttcagccgttaaatgcctgctgtaaaaaaaacaaaacaaaacaaaaaaaaaacacttcaccagattttctgcaattatataattcaaaactgctatacatatgaacaagaaaatgtgatctatgctcaagaagcaattgacagaaactgact

SEQ ID NO: 505906 - DNA, 201 bp, Homo sapiens
ttaggaaatctacactgaggaaactgtatccagaggggcatgggctctaggacagttcgggctccagtggcccgggggcagagtccacattcagttctaarttaggaggagcttccactaacgggcagcaccccgtcaaagccaagggtttgtgccgactctccctcaccgaaggacagaccccggacccacgacggcacc

SEQ ID NO: 505907 - DNA, 201 bp, Homo sapiens
cattagatctgtacgctgtcattattcaaaccaccacagctcccggttcatcattaggaatactggttctctcccctctgctgaggggtgatttcccccayccagggtcttgaaattttcttctacacactgaaagccttagcacaaagctccatatgcagagggggatggtgggtgaccctgcccatgcagttcctcatt

SEQ ID NO: 505908 - DNA, 201 bp, Homo sapiens
aagactgctctgtggtgctctgagtgtgaaggcatttgtcatgcgcatcccccacacagccaccatggggctctggttagggatggagccccctgagtccragctgcttcatctgaaatggggatgaaggtgcctcatagaaagtattgagtaaatatgaggcgctcttctggtttactgtgttctcatatatttcacaca

SEQ ID NO: 505909 - DNA, 201 bp, Homo sapiens
ccttcccttgtgcctcctggcacttcccgcagccctcccctgttgagtgtaggcgttctgcccggggcagtcgctgtgagagaggccatggcctggactasggtgatgcgaagaacagaacttgctaccagattggatgcagggttggggactccacagtgactccacacttcttaacctgaacaatgaattgccaaaata

SEQ ID NO: 505910 - DNA, 201 bp, Homo sapiens
agtcagggtttcaccatgttggccaggctggtctcgaactcctgacctcaggtaatctacccacctgggcctcccaaagtgctgggattacaggtgtgagycaccatgcccggcctgagtggataatctattgaaagaactaacgaagttcttcaacataaccagataaacagaaataaaaacgaaatatgtcagcaataa

SEQ ID NO: 505911 - DNA, 201 bp, Homo sapiens
tccgcttcgcttctggttcctttcatttggagtctgcctaaccagtttttctcttaagttccaagacatcttcttcctgttgagtagaacctgtaaaacaygccacctgtctgcaggcgaacagaggctctgaaggttccaaaatagctaagcccacgagctgtctccagcccccatggagtcctgggattctcaccagat

SEQ ID NO: 505912 - DNA, 201 bp, Homo sapiens
ttgcttgggcccaggagcctgaggctgcagtgagccataattgtaccactgcactccagtgcggacaacagagcaagaccctgtctcaaaaaaaaaaaaaagtgaataaaattatcaaagaaataatgtaatagttccaagaattaaagaacatggaggaaaaaaacatggatctctagatggaaagacccaccacgtgcc

SEQ ID NO: 505913 - DNA, 201 bp, Homo sapiens
gaccagcctgggcaacaaagcaagaccccatctctacaaaaaatttaaaaattagctggccatggtagtgtgcacctgtagtcccagttacctgggaggcygagacgggaggatcacttgagcctgggaggttgaggttctgataagctgtggttgtgccactgcactcctgcctgggtgacagtgagattctgtctctaa

SEQ ID NO: 505914 - DNA, 201 bp, Homo sapiens
gcctaggaattggaggctacagtgagcagtgatcacgtcactacaatccagcctgaatgatagagtgagaccctgttgcttaaagaaaaaaaaaaaaaaaactggaatccaaaatcaacaagggttcaggcatagtggcttatccctataaccccagcactttggggttacaggaggatcacttgagctcaggagtttgag

SEQ ID NO: 505915 - DNA, 201 bp, Homo sapiens
gaattcaggccaggcatggtggcccacgcctgtaatcccagaactttgggaggccgaggcgggcggatcacctgaggtcaggagttcaagaccagcctggycaacatgatgaaagcccgtctctactaaaaatacaaaaattagccaggcgtggtggcgcatgcctgtaaccccagctactcgggaggctgaggcaggaga

SEQ ID NO: 505916 - DNA, 201 bp, Homo sapiens
ataggggaacaacaatagatttacatgaatttcagcaaaattctcatcagaaatagtgaagactagaggacaatggaatgacacctttagaaaaagtaaaatgtgtcaacccagaattctatatccagtgacaatatctttcaagaatgaaagtgagggccaggtgcagtggctcatggctgtaatcccaacactttggga

SEQ ID NO: 505917 - DNA, 201 bp, Homo sapiens
cacacccaacccactgctgatattaaaacaagccataaaaacataaaaacaactgtcagctgctgttctgatccccagtaatactgggctgttattcaaaycaatcctctggctaaaaacaactttaaaatatacatgaaatacagaaaataccatgtataagccctgcctaaatctgatttctgaaatacacagagggca

SEQ ID NO: 505918 - DNA, 201 bp, Homo sapiens
ctcacgccgtgttcccgctccgtcctccagccattcttccattccttgaagaccatgctctctcccaccacagggcatctgcacaagccatttcccaggcstgggctgtccatctctaggctctttgtctcattcacgccaactcatccctcagatctcagttcagctgtcacctggtcagggaagccttttgtgactcag

SEQ ID NO: 505919 - DNA, 201 bp, Homo sapiens
cctaagcaatctgccggggctgagtcttcaggctctggagctctgcaaattcctgttaggtctctggcctgcctgcaccatgtctgcccttctgctacacrtaagagccttttttttttttaacctgatacacaataattgtacatatttatggggtacgtgtgatattttgatccatgcataaaatgtttaatgatcaaa

SEQ ID NO: 505920 - DNA, 201 bp, Homo sapiens
cttgaaccagggaggcagaggttgcagtgagccaagatcgtgccactgcactccagcctggcaacagagccagattccatctcaaaaaaaaaaaaatacayacacacacacacacacacacacacacacacaaatgaccaataagcacatgaaagggatgttcagcaccattagagaaatgcaaatcaaaaccacagtgag

SEQ ID NO: 505921 - DNA, 201 bp, Homo sapiens
gtgagaccctggacagagcatccagctaagccacgcccagactcctgaaccatgaaaactatgagatgggtttgtttttttggtttttttttttttttggktttttgacagggccttgctctgctgcccaggctggagtgcagtggtgtaatctcagctcgctgtagcctcgaactcctgggttcatgtgatcctcctaat

SEQ ID NO: 505922 - DNA, 201 bp, Homo sapiens
aataaaggcaggtgccattactgtcaccattgtcacaaaggaactcgccaagaccccaagatcacaaattgctaagtggcagaataagctctaaacactgkccctaatcattatattccatcctcatcccaggattagaaatgatctccaccccagaaaatacaggtaaggcataaacactgatggctctagggcctactc

SEQ ID NO: 505923 - DNA, 201 bp, Homo sapiens
aatgggcaaaagatacaaatagaaatttctccaaaaaatatatacaaatgggctgggcgcggtggctcacatctgtaatcccagcactttgggaagctgargtgggcagatcacgaggtcaggagatcgagaccatcctggccaacctggtgaaaccccgtctccactgaaaatacaaaaattagctaggcgtggtggtgc

SEQ ID NO: 505924 - DNA, 201 bp, Homo sapiens
atacgccaccacgcccagctaatttttgttatttttagtagagacagggtttcactctgttagccaggatggtcttgatctcctaacctcatgacccgccygcctcggactcccaaagtgctgggattacaggcgtgagccaccatgtctggcctacctttttttaaatttaactttgtttgcttgttttgagatgggggt

SEQ ID NO: 505925 - DNA, 201 bp, Homo sapiens
aaaaaaggacaactcaaaaattgggaggaagtatttgtaaatcatatatctgataaggatttagtattccaaatatataaagaattcttgggccgggcgcrgtggcttacgcctgtaatcccagcactttgggaggccgagacgggcggatcacaaggtcaggagatcgagaccatcctggctaacacgtgaaaccccgtc

SEQ ID NO: 505926 - DNA, 201 bp, Homo sapiens
aaaaaaaaaaaaggacaactcaaaaattgggaggaagtatttgtaaatcatatatctgataaggatttagtattccaaatatataaagaattcttgggccrggcgcggtggcttacgcctgtaatcccagcactttgggaggccgagacgggcggatcacaaggtcaggagatcgagaccatcctggctaacacgtgaaac

SEQ ID NO: 505927 - DNA, 201 bp, Homo sapiens
actgccaggcgcagtggcccatgcctatcatctcagtatctgggaggccaaggagggaggatctcttgaggctaggagtttgagaccagcttgggcaacayagcaagaccccgtctctacaaaataaataagtgtgtcacggtggcgccacctgtagtctcagctacagagaggctgaggcaggaggatctcttgagccta

SEQ ID NO: 505928 - DNA, 201 bp, Homo sapiens
agaaaaagtaaaatgtgtcaacccagaattctatatccagtgacaatatctttcaagaatgaaagtgagggccaggtgcagtggctcatggctgtaatccyaacactttgggaggccaaggcaggaggactgcttgagctcaggagtttaagaccagcctgggcaacatagaaccaatctctacaaaaactacaaaaaaaa

SEQ ID NO: 505929 - DNA, 201 bp, Homo sapiens
ttcaccgtgttagacaggatggtctcgatctcctgacctcgtgatccacccacctcggcctcccaaagtgctgggattacaggcgtgagccactgagcccrgccgccttccttttcttaaatttgagacaaagtctgtgtctgtcacccacactgcagtgcagtggtacaatcatagctcactgcagccttgatctcctaa

SEQ ID NO: 505930 - DNA, 201 bp, Homo sapiens
atgtcagcaataaacaattttttttaatagtgggtgacttctggtttgccccaaggtggtgaactagcatataggttgttggcttcctgccttagccaaascctgagtgctatagagattaaaggaaagcatattgattcagggaactaaagatcagaagaaaattctagggagagaaggcggttgtgagcaaatgtagag

SEQ ID NO: 505931 - DNA, 201 bp, Homo sapiens; identical to SEQ ID NO: 174497

SEQ ID NO: 505932 - DNA, 201 bp, Homo sapiens; identical to SEQ ID NO: 174352

SEQ ID NO: 505933 - DNA, 201 bp, Homo sapiens; identical to SEQ ID NO: 174355

SEQ ID NO: 505934 - DNA, 201 bp, Homo sapiens; identical to SEQ ID NO: 174602

SEQ ID NO: 505935 - DNA, 201 bp, Homo sapiens; identical to SEQ ID NO: 174298

SEQ ID NO: 505936 - DNA, 201 bp, Homo sapiens; identical to SEQ ID NO: 174299

SEQ ID NO: 505937 - DNA, 201 bp, Homo sapiens; identical to SEQ ID NO: 174553

SEQ ID NO: 505938 - DNA, 201 bp, Homo sapiens; identical to SEQ ID NO: 174495

SEQ ID NO: 505939 - DNA, 201 bp, Homo sapiens; identical to SEQ ID NO: 174496

SEQ ID NO: 505940 - DNA, 201 bp, Homo sapiens; identical to SEQ ID NO: 187093

SEQ ID NO: 505941 - DNA, 201 bp, Homo sapiens; identical to SEQ ID NO: 186998

SEQ ID NO: 505942 - DNA, 201 bp, Homo sapiens; identical to SEQ ID NO: 186820

SEQ ID NO: 505943 - DNA, 201 bp, Homo sapiens; identical to SEQ ID NO: 187095

SEQ ID NO: 505944 - DNA, 201 bp, Homo sapiens; identical to SEQ ID NO: 186822

SEQ ID NO: 505945 - DNA, 201 bp, Homo sapiens; identical to SEQ ID NO: 187097

SEQ ID NO: 505946 - DNA, 201 bp, Homo sapiens; identical to SEQ ID NO: 186999

SEQ ID NO: 505947 - DNA, 201 bp, Homo sapiens; identical to SEQ ID NO: 187118

SEQ ID NO: 505948 - DNA, 201 bp, Homo sapiens; identical to SEQ ID NO: 187099

SEQ ID NO: 505949 - DNA, 201 bp, Homo sapiens; identical to SEQ ID NO: 187203

SEQ ID NO: 505950 - DNA, 201 bp, Homo sapiens; identical to SEQ ID NO: 186824

SEQ ID NO: 505951 - DNA, 201 bp, Homo sapiens; identical to SEQ ID NO: 186886

SEQ ID NO: 505952 - DNA, 201 bp, Homo sapiens; identical to SEQ ID NO: 187105

SEQ ID NO: 505953 - DNA, 201 bp, Homo sapiens; identical to SEQ ID NO: 187090

SEQ ID NO: 505954 - DNA, 201 bp, Homo sapiens; identical to SEQ ID NO: 186724

SEQ ID NO: 505955 - DNA, 201 bp, Homo sapiens; identical to SEQ ID NO: 186725

SEQ ID NO: 505956 - DNA, 201 bp, Homo sapiens
atccatcttgagtaaatttttgtagacggtgagagatagggaaccagtttcattcttctgtgtatggctatccaattttccagcaccactgaatgaatagkgtgtcctttcccccattgtatgtttcagtctgctttgtcaaagatcagttggttgtagttatttggctttatatctgggttctctattctgtttcattgg

SEQ ID NO: 505957 - DNA, 201 bp, Homo sapiens
gattttattttgtaagtggaaataccgctactaaaaatggagtgctataaataggataatgtcttttgtttccaaagttgatatactagagcaatgcaaamataataatcatagggtgctattttgtggcaaatttactttggggtaaatgatgcagccgcaagtgccactggcgagtattctcagagcaaatggggaaag

SEQ ID NO: 505958 - DNA, 201 bp, Homo sapiens
aagattgcacaactgcactccagactgggtgacagagtaagatggaaaggaaagggaaagggaaagggaaatggaaggaagaagagatagagaaagagagmgagagagagagagagaaatagagaaagaaaaagagagagaaaaaaagaaagaaaaaggaaaagaaaagaaagaaaaagaaagaaagaaagaaagaaagaa

SEQ ID NO: 505959 - DNA, 201 bp, Homo sapiens
tcatttaattttacataaacacgttctttgaggctgaagcaaatctgactgatagtcaatgtgaaaataaaatataaaaactgttcttggagttatttctraacagaactaacattagaattgtctgaatcatcagaataatctatttcagaaaaactgaattcatgaaactaatccttggccaacaacttttcatgaaca

SEQ ID NO: 505960 - DNA, 201 bp, Homo sapiens
actgaattcatgaaactaatccttggccaacaacttttcatgaacaatgttagcatcatgtgtaggaatgctgttttctaagatttgacattttcagtggytgagattttattttgtaagtggaaataccgctactaaaaatggagtgctataaataggataatgtcttttgtttccaaagttgatatactagagcaatgc

SEQ ID NO: 505961 - DNA, 201 bp, Homo sapiens
cttttcctgttttcaaaaaaaggtgtggcttgctgccagcgctcatttaattttacataaacacgttctttgaggctgaagcaaatctgactgatagtcartgtgaaaataaaatataaaaactgttcttggagttatttctaaacagaactaacattagaattgtctgaatcatcagaataatctatttcagaaaaactg

SEQ ID NO: 505962 - DNA, 201 bp, Homo sapiens; identical to SEQ ID NO: 331681

SEQ ID NO: 505963 - DNA, 201 bp, Homo sapiens; identical to SEQ ID NO: 331879

SEQ ID NO: 505964 - DNA, 201 bp, Homo sapiens; identical to SEQ ID NO: 331771

SEQ ID NO: 505965 - DNA, 201 bp, Homo sapiens; identical to SEQ ID NO: 331773

SEQ ID NO: 505966 - DNA, 201 bp, Homo sapiens; identical to SEQ ID NO: 331587

SEQ ID NO: 505967 - DNA, 201 bp, Homo sapiens; identical to SEQ ID NO: 331677

SEQ ID NO: 505968 - DNA, 201 bp, Homo sapiens; identical to SEQ ID NO: 331679

SEQ ID NO: 505969 - DNA, 201 bp, Homo sapiens
atgttgctcaggctggtcttgaacttgtgagctcaggtgatccaccctcctcggcctcccaaagtgctgggattacaggtatgagccattgtatccaggctttttttttttttttttttttgagaggaggtttcactctgttgcccaggctgaagtgcagcggtagaatcactgctcactgcaacctctgcctcctaggtt

SEQ ID NO: 505970 - DNA, 201 bp, Homo sapiens
ctcattcctcctacacccaacagcacccagccctcctgcctcctcatgcccctcccttctgaaatccctcccagcagtgcagctctgggctaggacacagyctagggaacgtgactgagaaagagccaagaaaacactcagtgatgaagttggtgtttaagtaagattttcagtgaaaagtagaattgggtactacatgga

SEQ ID NO: 505971 - DNA, 201 bp, Homo sapiens; identical to SEQ ID NO: 137271

SEQ ID NO: 505972 - DNA, 201 bp, Homo sapiens
gagagtcagcgaagggagataggagaggggcagctttataggacttgggtaggcggtggaaagttacagtcaaaggcggtcatctgttgtcagcaggggarggggtcacaaggtgcatggtgggagaccatgagacccattgtccagaagaagaatgtcataaggtcgattgatcagttagggtagggcaggaacaagtcc

SEQ ID NO: 505973 - DNA, 201 bp, Homo sapiens
atgaagttggtgtttaagtaagattttcagtgaaaagtagaattgggtactacatggaggcttgagatgttcagagctttttgagaaagcagaacagaaartagaagggcaaccaggaaccagaggggccagagaaccggaagagcgggccctccgaggagacagggagtgggcacctggatcttgggcctgtcaacgaag

SEQ ID NO: 505974 - DNA, 201 bp, Homo sapiens
tgggtactacatggaggcttgagatgttcagagctttttgagaaagcagaacagaaagtagaagggcaaccaggaaccagaggggccagagaaccggaagmgcgggccctccgaggagacagggagtgggcacctggatcttgggcctgtcaacgaagagtcaaactcagtaaaatatttgaagagatgtattctcagcca

SEQ ID NO: 505975 - DNA, 201 bp, Homo sapiens
aggtccaattagttaatctgtttaggactgggaaggcctagaagaaaaagatccagctatgttaatagaggttctttacagatgcaaattttcccccaccrgggacaactttgcagggccatttcagatatggcaaagaaacatgttttggggtaaaatattttatctttcttctttgtcacataatgttgtgtctgagtc

SEQ ID NO: 505976 - DNA, 201 bp, Homo sapiens
tgaaaatggccggttcctgcctgaactgatgacattactttgtgaaatccgttctcctggacaatgagtctcagaagctcccccaccaagcaccttgtaayccccacccctgcccgcaagagaaaaatcccctttgactgtaattttccactactcacccaaatcctataaaactgtcccacccctatcactcttatcctg

SEQ ID NO: 505977 - DNA, 201 bp, Homo sapiens
ttgcccagggaaagctggagttagggctgtggagcaggggctctgttgctccgtgtcagcgcgctggatgagctgcgattgttttcatcttctttatctcsaggcagttcttgtttagctgctaaacaagcaaaagaaaaaccttgtggcaggcagaacagagttgactgttgaagtgtagggtgtgtgacctcacccttg

SEQ ID NO: 505978 - DNA, 201 bp, Homo sapiens
ggcactgaagaaccacaaaagaagtgaaaatggccggttcctgcctgaactgatgacattactttgtgaaatccgttctcctggacaatgagtctcagaarctcccccaccaagcaccttgtaacccccacccctgcccgcaagagaaaaatcccctttgactgtaattttccactactcacccaaatcctataaaactgt

SEQ ID NO: 505979 - DNA, 201 bp, Homo sapiens
tgtggagcaggggctctgttgctccgtgtcagcgcgctggatgagctgcgattgttttcatcttctttatctcgaggcagttcttgtttagctgctaaacwagcaaaagaaaaaccttgtggcaggcagaacagagttgactgttgaagtgtagggtgtgtgacctcacccttgcctggcacggcctgaggtcctggttgt

SEQ ID NO: 505980 - DNA, 201 bp, Homo sapiens
cctacctgtccaaaaactggacaagtattacaggttagttcaggatctgtgccttatcaaccaaattgttttgcctatccacccggtggtgcccaacccgyacactctttgtcctcaataccttcctccacaactcactattccgttcttgatcttaaagatgcttttttcactgttcccctgcacccctcataccagcct

SEQ ID NO: 505981 - DNA, 201 bp, Homo sapiens
tgagatacctttggccactaggggccaaagttggtaagtgggggctaaggattctatttttagttataggcgtgaggactaagctctgattttttttttttatctttcccaaattcctacctgtcagtcctctgagcccagcctgcgagtatacatccagatggcctgaggcactgaagaaccacaaaagaagtgaaaatg

SEQ ID NO: 505982 - DNA, 201 bp, Homo sapiens
gactcagacacaacattatgtgacaaagaagaaagataaaatattttaccccaaaacatgtttctttgccatatctgaaatggccctgcaaagttgtcccyggtgggggaaaatttgcatctgtaaagaacctctattaacatagctggatctttttcttctaggccttcccagtcctaaacagattaactaattggacct

SEQ ID NO: 505983 - DNA, 201 bp, Homo sapiens
gtgcctgacctcccctcccatcatggccaggaactcagttttaaggtttttctgagatacctttggccactaggggccaaagttggtaagtgggggctaasgattctatttttagttataggcgtgaggactaagctctgattttttttttttatctttcccaaattcctacctgtcagtcctctgagcccagcctgcgag

SEQ ID NO: 505984 - DNA, 201 bp, Homo sapiens
aacctaggaggcagaggttgcagtgagcagtgattctaccgctgcacttcagcctgggcaacagagtgaaacctcctctcaaaaaaaaaaaaaaaaaaaaagcctggatacaatggctcatacctgtaatcccagcactttgggaggccgaggagggtggatcacctgagctcacaagttcaagaccagcctgagcaacat

SEQ ID NO: 505985 - DNA, 201 bp, Homo sapiens
tccatgtagtacccaattctacttttcactgaaaatcttacttaaacaccaacttcatcactgagtgttttcttggctctttctcagtcacgttccctagrctgtgtcctagcccagagctgcactgctgggagggatttcagaagggaggggcatgaggaggcaggagggctgggtgctgttgggtgtaggaggaatgag

SEQ ID NO: 505986 - DNA, 201 bp, Homo sapiens
tacatctcttcaaatattttactgagtttgactcttcgttgacaggcccaagatccaggtgcccactccctgtctcctcggagggcccgctcttccggttstctggcccctctggttcctggttgcccttctactttctgttctgctttctcaaaaagctctgaacatctcaagcctccatgtagtacccaattctacttt

SEQ ID NO: 505987 - DNA, 201 bp, Homo sapiens
ggacttgttcctgccctaccctaactgatcaatcgaccttatgacattcttcttctggacaatgggtctcatggtctcccaccatgcaccttgtgaccccytcccctgctgacaacagatgaccgcctttgactgtaactttccaccgcctacccaagtcctataaagctgcccctctcctatctcccttcgctgactctc

SEQ ID NO: 505988 - DNA, 201 bp, Homo sapiens
cccagggcatttccttatttatttatttttgagacagggtctctctctgttgcccaggctggggtgcagtggtgcgatctgggctcactgcagccttgacytcccaggctcaagggatcttcctacctcagcctcctgattagctgggactgcaggcgcgtgccaccacacctggctaattttttttgtatgttttcgtat

SEQ ID NO: 505989 - DNA, 201 bp, Homo sapiens
acttttgccctctcttgtccccatgttatggaagggcagcggctggtgtcccaggccagcctgtctggagcctccctgcgcgtctcacagctcccttcccstggtagcgtgttcccatggcgcggtgacctacaaattacacaagggatgcatttgcaaatgacactttatttcttgttaagggtgacagcctgcaaggta

SEQ ID NO: 505990 - DNA, 201 bp, Homo sapiens
gaagtgtagggtgtgtgacctcacccttgcctggcacggcctgaggtcctggttgtgatttggtatctgattgccatgaagagtctgttctggttctgccsgtcttatgattctgttttaacattactgctggtcagttgtgtctaaactgcaaaagggaggggtgataatgaggcgtgcctgacctcccctcccatcatg

SEQ ID NO: 505991 - DNA, 201 bp, Homo sapiens
gagaaaaatcccctttgactgtaattttccactactcacccaaatcctataaaactgtcccacccctatcactcttatcctgctcaatgccaatatcccawcccacagcaggctttaaaaaggttaaagcctcttatcaccagcctgttacaatatggctttttaaagcctacaaactctccttacaactctcctgtccta

SEQ ID NO: 505992 - DNA, 201 bp, Homo sapiens
ggttaaagcctcttatcaccagcctgttacaatatggctttttaaagcctacaaactctccttacaactctcctgtcctacctgtccaaaaactggacaartattacaggttagttcaggatctgtgccttatcaaccaaattgttttgcctatccacccggtggtgcccaacccgtacactctttgtcctcaataccttc

SEQ ID NO: 505993 - DNA, 201 bp, Homo sapiens
ttggtatctgattgccatgaagagtctgttctggttctgccggtcttatgattctgttttaacattactgctggtcagttgtgtctaaactgcaaaagggmggggtgataatgaggcgtgcctgacctcccctcccatcatggccaggaactcagttttaaggtttttctgagatacctttggccactaggggccaaagtt

SEQ ID NO: 505994 - DNA, 201 bp, Homo sapiens
cttcgttgacaggcccaagatccaggtgcccactccctgtctcctcggagggcccgctcttccggttctctggcccctctggttcctggttgcccttctaytttctgttctgctttctcaaaaagctctgaacatctcaagcctccatgtagtacccaattctacttttcactgaaaatcttacttaaacaccaacttcat

SEQ ID NO: 505995 - DNA, 201 bp, Homo sapiens
tggctgagaatacatctcttcaaatattttactgagtttgactcttcgttgacaggcccaagatccaggtgcccactccctgtctcctcggagggcccgckcttccggttctctggcccctctggttcctggttgcccttctactttctgttctgctttctcaaaaagctctgaacatctcaagcctccatgtagtaccca

SEQ ID NO: 505996 - DNA, 201 bp, Homo sapiens
acatgtctcttgcttttttgcagcctgtataattgataggaaccttctgggtgcatgatgagtggatcttctgataagatacatttaaagtgtcccctgtkggtggcttctaatatggggctaaggatgtgaccaagaatggcctgtaatcctgaagcctgccaagattgcatcattgaaacaatgcttcctaccaggtgg

SEQ ID NO: 505997 - DNA, 201 bp, Homo sapiens
tgacccacctgcctcagcctcccaaagtgctgggattataggcatgagccaccgcgtctggccaggtggaagacttgcttctcccatgtggctgggcttayagcttctgccatgcgctctcagcacctcttttccaggctgctaagccctgccacttcctaccttgcaaagtgccatcaggttgccatcccctgctgcact

SEQ ID NO: 505998 - DNA, 201 bp, Homo sapiens
taaaatgagagtgggggaagtataatgggtccatacatcacttgcctgatttcttcttttccattgcttttccaaaggtagtatggtgtaaggggctttgrggaatccagacagacctggacttcacacgcccgtcatttatttcactactagtgaaatgctggcgtagttacgcctaagttctctgagactgtccctcat

SEQ ID NO: 505999 - DNA, 201 bp, Homo sapiens
cagcccgggacccttttgttgccaaatctgcctcggtctgcccaactcctcctgcgaaattttacactcagtatgcaggaagcctcgctcaaaatctgacmctcctccacgcccttggtccccaaatccattccttctctttgttttccaacccgagaacccctcgttttccccgctcagccttccccaccccgcttgtcc

SEQ ID NO: 506000 - DNA, 201 bp, Homo sapiens
actactagtgaaatgctggcgtagttacgcctaagttctctgagactgtccctcatctctaaaaccacccctcctctggtgaactaaggatggcgataacdctttatgtaaagtgcctggccagatactcaataaatgttaattttccaagcttatacatgcatcagtcactaagttctccaaacatttccatatcctgga

SEQ ID NO: 506001 - DNA, 201 bp, Homo sapiens
gccccaaaaaaatccatttcctccattcttcataccattaatgccttctatttatggttttgcttaatagttataacccctgccacccagccaacaaaacrgaacaacagcaacaaaaaactctgcctacatctctgtgcttccaaattgtttatgcatatgcttagaagaacatttattgaattggatttcaagtacttg

SEQ ID NO: 506002 - DNA, 201 bp, Homo sapiens
tcaaaatctgacactcctccacgcccttggtccccaaatccattccttctctttgttttccaacccgagaacccctcgttttccccgctcagccttccccrccccgcttgtcccccgcacacagcagggccgctccgagacttgtccactcagcaagagcagagctgagaatcagccagggacgccagctgaaggcccttc

SEQ ID NO: 506003 - DNA, 201 bp, Homo sapiens
tagaaagtttaaattcaggttgaatggatgaatgaagacagaataatcatttctgtttacaagggaaccatacctttttacatagacaaatgcttgtaaargtatttgatcctgatttatgtttgtctccattttctacttcagatgggccacctgttttaaatccaaaagctggtaggagtttcaggtacactgcatttg

SEQ ID NO: 506004 - DNA, 201 bp, Homo sapiens
cgcccttggtccccaaatccattccttctctttgttttccaacccgagaacccctcgttttccccgctcagccttccccaccccgcttgtcccccgcacayagcagggccgctccgagacttgtccactcagcaagagcagagctgagaatcagccagggacgccagctgaaggcccttctcccaaattaaggaaataatt

SEQ ID NO: 506005 - DNA, 201 bp, Homo sapiens
tctgatatcatgagtggctgaactagaattgtgccattagtggtacttggcatgcaggcttggatagattaatgctggggtttgttttttgttttgttttktttttgtttttaaagacaaggtctggctcagttgtctaggctggtctctatctcctggactcaagcgatcctcacaccccagccttctgagtagctagaa

SEQ ID NO: 506006 - DNA, 201 bp, Homo sapiens
tttgaggttcccactggctgtttaggtaaatccttcagacattaactcctatcaagtacaagcatccgggctcaggactgtgagagatcaagctgaacacrgtgccatacctgcccttgagaaagtgacagacactccctaacggtttggttggggagaggcaaattcaaatggccctggagactcattttctcacctgtt

SEQ ID NO: 506007 - DNA, 201 bp, Homo sapiens
tccactcagcaagagcagagctgagaatcagccagggacgccagctgaaggcccttctcccaaattaaggaaataattgttgagggcttaacttcacgccyctccccgccttcctaagtaaaatgtgtacaaggagtgagtctgagtctcagccgctgtcccttaatttggttatcatggctattttcagcctattagggc

SEQ ID NO: 506008 - DNA, 201 bp, Homo sapiens
gcttgggtggaagaaacagtccctccaagtttgctcattgttttggaagctggtttctaaagagtttcactaaaatagtatttgcttatcattttaatttmtatggtagatcagaaagcagaaggttttaaggccaggcgtgatagctcacgcctgtaatcccaacaccttgggaggccaaggtaggcagattgcttgagt

SEQ ID NO: 506009 - DNA, 201 bp, Homo sapiens
gaagatgtctgctcttcagctttgccaaggtgatattaaaatgagagtgggggaagtataatgggtccatacatcacttgcctgatttcttcttttccatkgcttttccaaaggtagtatggtgtaaggggctttggggaatccagacagacctggacttcacacgcccgtcatttatttcactactagtgaaatgctggc

SEQ ID NO: 506010 - DNA, 201 bp, Homo sapiens
gaaacagtccctccaagtttgctcattgttttggaagctggtttctaaagagtttcactaaaatagtatttgcttatcattttaatttctatggtagatcrgaaagcagaaggttttaaggccaggcgtgatagctcacgcctgtaatcccaacaccttgggaggccaaggtaggcagattgcttgagtccaggagttcca

SEQ ID NO: 506011 - DNA, 201 bp, Homo sapiens
ggatgtgaccaagaatggcctgtaatcctgaagcctgccaagattgcatcattgaaacaatgcttcctaccaggtggagagaaaatgcagtattcttatcygagacgtaatagaggccagagtgctgaacaacactatccaccagttccgtagccccatagggctggggaagccactggtatatggaaccttactgtaccc

SEQ ID NO: 506012 - DNA, 201 bp, Homo sapiens
gccaggcgtgatagctcacgcctgtaatcccaacaccttgggaggccaaggtaggcagattgcttgagtccaggagttccagaccacactggagagacccygtgtctgcaaaaaaaaaaaaaaaaaaaaaaagccaggcatggtggtgcatgcctatagtcccagctactcaggaggctgaggtgggaggatagcttgagc

SEQ ID NO: 506013 - DNA, 201 bp, Homo sapiens
aaaaaaaaaaaaaaaaaaaaagccaggcatggtggtgcatgcctatagtcccagctactcaggaggctgaggtgggaggatagcttgagcctaggaggtcraggccgcagtgaaccgtgatcgtgccactgaactccagcctgggcgacataatgagaccctgtctctaaataaataaataaatgttttttaaaaagaaat

SEQ ID NO: 506014 - DNA, 201 bp, Homo sapiens
ccccctgccaccctgcccccaatactggctggaaaaggggtaggtaggaagagagagtccagaatttggctattcacatccccagggctaagcttgggtgraagaaacagtccctccaagtttgctcattgttttggaagctggtttctaaagagtttcactaaaatagtatttgcttatcattttaatttctatggtaga

SEQ ID NO: 506015 - DNA, 201 bp, Homo sapiens
tgtttcctttagaaccccagtggcatcttatttatgatgagtagctcctagcaacaacaccctacctcttggtaatcaatcgtagtttcatcggctttgargttcccactggctgtttaggtaaatccttcagacattaactcctatcaagtacaagcatccgggctcaggactgtgagagatcaagctgaacacagtgcc

SEQ ID NO: 506016 - DNA, 201 bp, Homo sapiens
ctcagaaaagcagccaggctgatggggtgacacaaaaatctggaatggatttagctgctcttatgcagcaaaaccacagacaaactcacggctaacgggawgcctggaccagatataagagatttataggcacagttccagcagctatacacactaagttctaggacttggttccctgctccttccttaagggatacttta

SEQ ID NO: 506017 - DNA, 201 bp, Homo sapiens
taaaaataaaaattaatgcaaaaaaaattcacagtgaacaaaataccaaactcttaaacaaaaacaggatcccacagtgccatgtaagccatattagagcytgatgcaaaaagaaaaaacaatgcgcagcactaaatacatgctttttatggttttgttagtttgttttttgaaacggggtttctctgctgttgcccaggc

SEQ ID NO: 506018 - DNA, 201 bp, Homo sapiens
ggtttctccttttctcaggagtagagagggacaatgcttgagaaatacacagtcttacgtgtttcctttagaaccccagtggcatcttatttatgatgagkagctcctagcaacaacaccctacctcttggtaatcaatcgtagtttcatcggctttgaggttcccactggctgtttaggtaaatccttcagacattaact

SEQ ID NO: 506019 - DNA, 201 bp, Homo sapiens
cattgaaacaatgcttcctaccaggtggagagaaaatgcagtattcttatccgagacgtaatagaggccagagtgctgaacaacactatccaccagttccrtagccccatagggctggggaagccactggtatatggaaccttactgtaccctgttgaggcttaaacatgtcagtggccactattcttatagtgtctgata

SEQ ID NO: 506020 - DNA, 201 bp, Homo sapiens
cttcccagggacaaaagcattctctcccagggggccctgtcacccaagccccagtgtcagcaatcctggttgtgctgaggcagccctcgcatttgggaacscagaagataaaagggtgggaggatcatggtgggactgctgggcactaattcccccaaacaagtgtgacacccaaggaaaaccctgggccgcaagactgcc

SEQ ID NO: 506021 - DNA, 201 bp, Homo sapiens
aaaggtagtatggtgtaaggggctttggggaatccagacagacctggacttcacacgcccgtcatttatttcactactagtgaaatgctggcgtagttacrcctaagttctctgagactgtccctcatctctaaaaccacccctcctctggtgaactaaggatggcgataacactttatgtaaagtgcctggccagatact

SEQ ID NO: 506022 - DNA, 201 bp, Homo sapiens
aaccaatgtctggtttctttgtttttgtctgtgacatgtctcttgcttttttgcagcctgtataattgataggaaccttctgggtgcatgatgagtggatmttctgataagatacatttaaagtgtcccctgttggtggcttctaatatggggctaaggatgtgaccaagaatggcctgtaatcctgaagcctgccaagat

SEQ ID NO: 506023 - DNA, 201 bp, Homo sapiens
acttcacacgcccgtcatttatttcactactagtgaaatgctggcgtagttacgcctaagttctctgagactgtccctcatctctaaaaccacccctcctstggtgaactaaggatggcgataacactttatgtaaagtgcctggccagatactcaataaatgttaattttccaagcttatacatgcatcagtcactaagt

SEQ ID NO: 506024 - DNA, 201 bp, Homo sapiens; identical to SEQ ID NO: 115391

SEQ ID NO: 506025 - DNA, 201 bp, Homo sapiens; identical to SEQ ID NO: 115396

SEQ ID NO: 506026 - DNA, 201 bp, Homo sapiens
ctcatcctaggtgttaccacatctatagaatagtaactcaggagtgcaatagactgtcgcattaaaaggaaagaaaaataacttttcagcattatgtagcmctaaattttggaactggaaatggcctttatatcatctagtctttcattagaaaagcaggacaatcaacttggacattgtcctcgggcagataagagatag

SEQ ID NO: 506027 - DNA, 201 bp, Homo sapiens
taatacatttaagacacttatcctggtggcaagaaatagtaaatgctcgataaatattagctaaaagtatatatgccgatatacatgggttaatacagatrctacgatggagtattagataaagttctagctcactgcagccttcaccttccagactcaagcgattcttctgcctcagcctctcaagcagctgggaccaca

SEQ ID NO: 506028 - DNA, 201 bp, Homo sapiens
acatggctatgttgcccaggcaggtcttaaactcctggactcaagcagtcctctccccttggcctcccaaagtgctgcgattacaggtgtgagccactgtyccagccctgaggttcttgatagtctaggtagagaggaaaattaaagaagttatgtggaaaacatacattctttaggagagtttttcctggcaccaaataa

SEQ ID NO: 506029 - DNA, 201 bp, Homo sapiens
tctttatgtaggcaaatttagcaattctttcactaaaacttttctagtgaggtccttcccactcaaagatcataaaagactataaaaataattatcctttkgtttctttttttaaatttttgattacatctttgatccttctggaattaattttggtgcaaggactgaggtaggggctcacgtttccttcccgatgtcagc

SEQ ID NO: 506030 - DNA, 201 bp, Homo sapiens; identical to SEQ ID NO: 260636

SEQ ID NO: 506031 - DNA, 201 bp, Homo sapiens; identical to SEQ ID NO: 260603

SEQ ID NO: 506032 - DNA, 201 bp, Homo sapiens; identical to SEQ ID NO: 260604

SEQ ID NO: 506033 - DNA, 201 bp, Homo sapiens; identical to SEQ ID NO: 261322

SEQ ID NO: 506034 - DNA, 201 bp, Homo sapiens
agcgaaactgtctcaaaaagaaaaaaaaaaaaagatgggaaaacagaaaactcaatagtgtagattaaggagataagcattggctgggcgcagtggctcamgcctatcatctcagcactatgggaggctgaggtggaggaaccatgtgaggtcaggagttggagactagcctggccaatgtgatgaaactccacctctact

SEQ ID NO: 506035 - DNA, 201 bp, Homo sapiens
cctgtctgggcaacagagtgaaactccatcacaaaaaaaaaaaaaaaaaaaaaattctcgtgaacttaaccctaaccacacagtattgaagagggaatgtstgcccaaccacactgctttgtatctgcctgagaggaaaattctctggatgtcgtgttgaactggatggggaatcagacagagctggagtttgtattagtc

SEQ ID NO: 506036 - DNA, 201 bp, Homo sapiens
aaaaaattttcttcaataataaattaaccttagcttactgtaacttttaaaaagtttttaatatttcaaaaccttttgacttttgtaataacacattaaarcagaaaccttatttaaccatatgaaaatattttctttatgtcattataagtttctttctttcttttttttttttttttttttgagacggagtttcgctgt

SEQ ID NO: 506037 - DNA, 201 bp, Homo sapiens
ggtcaagagttcaagactagcctgaccaacatggtgagaccctgtctctactaaaaatacaaaaattagctgggcgtggtggcacgtgcctgtaatcccarctactcaggaggctgaggcaggagaatcacttgaacccgggagatggaggttgcagtgagccaagatcacgccactgaactcctgtctgggcaacagagt

SEQ ID NO: 506038 - DNA, 201 bp, Homo sapiens
tgaggcaggagaatcacttgaacccgggagatggaggttgcagtgagccaagatcacgccactgaactcctgtctgggcaacagagtgaaactccatcacaaaaaaaaaaaaaaaaaaaaaattctcgtgaacttaaccctaaccacacagtattgaagagggaatgtctgcccaaccacactgctttgtatctgcctgag

SEQ ID NO: 506039 - DNA, 201 bp, Homo sapiens
tagtatagtcattaaaacatgtcttattcagagtgaggtgcctggtttttttgactttttattcttgaaacctcagtctttgttaagtaagagaaagatamgagaaagccttcttcttttcttcttttttttttctgtcttttgagacagggtcttgctttgtcgcccaggctggagtgcaatggtgtgatcttggttcac

SEQ ID NO: 506040 - DNA, 201 bp, Homo sapiens
ctttctggatcacgaggtcaagagttcaagactagcctgaccaacatggtgagaccctgtctctactaaaaatacaaaaattagctgggcgtggtggcacrtgcctgtaatcccagctactcaggaggctgaggcaggagaatcacttgaacccgggagatggaggttgcagtgagccaagatcacgccactgaactcctg

SEQ ID NO: 506041 - DNA, 201 bp, Homo sapiens
ggcagtgcagtaggtttgtttacaccagcatcaccacaaacacatgagtaatggctcatgctaggaccttaggatggctataagtcactgcacaacaggamtttttcagccccattataatcttacatcgtatatgcagtccgctgttgaccaaaacagcacatgactgaggcacatgactgtacagtaaatgtcatagct

SEQ ID NO: 506042 - DNA, 201 bp, Homo sapiens
aatcctaccactgccggacaggaaggcaggtgaggctaagtagcctgtcagcaccgagcccttctccataggcagctgctataatggtacagaaacaggtyacttatggagttgcaacctgtttttaacctgtaattatagagttaaatataaccatataaacatcttgaaaataagtgggaaagattccctaatgttccc

SEQ ID NO: 506043 - DNA, 201 bp, Homo sapiens
tcaagatctccctgtcagaggagatgcggttacggaagaaaatctcaagctaaaatcagaaaaccaagtttcttagacaatacacagaaaatttcatgtcrgcttctagtgtttttcaaacaactgacacaaaaagcaaaagaaaatacagaattgaagcccttctgttttatggaattgctgctgacctttctttatatg

SEQ ID NO: 506044 - DNA, 201 bp, Homo sapiens
gcagggcaccataataggctcttacataggaaaggatcaaaatggaaatgtcacatgaatatacaatgggaatattttgccctgtgtttgtttccctgcakgttgtctctacctatgtggagctctctcagttctcccagagtgtgggcatcaaggacaagtggctgcactgtgagcagatggccattcagaaaagcagtt

SEQ ID NO: 506045 - DNA, 201 bp, Homo sapiens
tcagaccagccctgagaaagacctgttgaccacaaagccttgtcactgtaaggatatcctgaagttagtgctcttacccctcacccagcattgcttggtcrttggagaaaccacctgtgcattttattacctgctggaggctgcggctgcctgcttggacctgtcagataattatatggtgagcaggctctgtaatctgcc

SEQ ID NO: 506046 - DNA, 201 bp, Homo sapiens; identical to SEQ ID NO: 149815

SEQ ID NO: 506047 - DNA, 201 bp, Homo sapiens
aagtgagaagtcttcctaaaactgtagttaactagcctgagctttgcctttttgacctaaaactactctttttctatcaagtaatcttcaagcatctaacwgacaagcagataacaagacatgtaacagtcagcatacatatatatatgcatgtaacagataagtgtataacatacagttctaactcttccaccttactcc

SEQ ID NO: 506048 - DNA, 201 bp, Homo sapiens
gcatgtttttctagctgggttggaggcaagtggtgggataccaggagtttagactgggtgagcagcagggcaccataataggctcttacataggaaaggawcaaaatggaaatgtcacatgaatatacaatgggaatattttgccctgtgtttgtttccctgcaggttgtctctacctatgtggagctctctcagttctcc

SEQ ID NO: 506049 - DNA, 201 bp, Homo sapiens
agcctgagctttgcctttttgacctaaaactactctttttctatcaagtaatcttcaagcatctaacagacaagcagataacaagacatgtaacagtcagyatacatatatatatgcatgtaacagataagtgtataacatacagttctaactcttccaccttactcccccagccagttacatgtagcaaatagggattca

SEQ ID NO: 506050 - DNA, 201 bp, Homo sapiens
ggcagtccaattaaagtaatactagcaactttaaaaaggtatgtacagtcaatggtttatcttgggggctttgaaataacattgcctgtggccttacactyagtgtgtttcagggcctgggcatatgagtacacagcacttaacaggtatgaaggaagatacaaagcaggacatgaagaggagggagatgtgagacttttc

SEQ ID NO: 506051 - DNA, 201 bp, Homo sapiens
aaaaataaaacttcttgctgatgaaaatcatgatgatgatgaagaggaagaagattttgatgaagggaaaactgaagaaaaagctctagtgatgaaatttrtacaggatactccatccaaaaaatgcacaaagatcaaaccaaaataaaaaagactcagaactatcaagattaagaccaaaaggtcaagaatccttcaaaa

SEQ ID NO: 506052 - DNA, 201 bp, Homo sapiens
gtgtttcagggcctgggcatatgagtacacagcacttaacaggtatgaaggaagatacaaagcaggacatgaagaggagggagatgtgagacttttcagtrtatctggaaagtgatctgcccctggaagtgggtacatttctacaagaaaaaaataaaacttcttgctgatgaaaatcatgatgatgatgaagaggaagaa

SEQ ID NO: 506053 - DNA, 201 bp, Homo sapiens
tatctggaaagtgatctgcccctggaagtgggtacatttctacaagaaaaaaataaaacttcttgctgatgaaaatcatgatgatgatgaagaggaagaasattttgatgaagggaaaactgaagaaaaagctctagtgatgaaatttatacaggatactccatccaaaaaatgcacaaagatcaaaccaaaataaaaaag

SEQ ID NO: 506054 - DNA, 201 bp, Homo sapiens; identical to SEQ ID NO: 499982

SEQ ID NO: 506055 - DNA, 201 bp, Homo sapiens; identical to SEQ ID NO: 499983

SEQ ID NO: 506056 - DNA, 201 bp, Homo sapiens; identical to SEQ ID NO: 499984

SEQ ID NO: 506057 - DNA, 201 bp, Homo sapiens; identical to SEQ ID NO: 499985

SEQ ID NO: 506058 - DNA, 201 bp, Homo sapiens; identical to SEQ ID NO: 499986

SEQ ID NO: 506059 - DNA, 201 bp, Homo sapiens; identical to SEQ ID NO: 499987

SEQ ID NO: 506060 - DNA, 201 bp, Homo sapiens; identical to SEQ ID NO: 499988

SEQ ID NO: 506061 - DNA, 201 bp, Homo sapiens; identical to SEQ ID NO: 499989

SEQ ID NO: 506062 - DNA, 201 bp, Homo sapiens; identical to SEQ ID NO: 499990

SEQ ID NO: 506063 - DNA, 201 bp, Homo sapiens; identical to SEQ ID NO: 499991

SEQ ID NO: 506064 - DNA, 201 bp, Homo sapiens; identical to SEQ ID NO: 499992

SEQ ID NO: 506065 - DNA, 201 bp, Homo sapiens; identical to SEQ ID NO: 499993

SEQ ID NO: 506066 - DNA, 201 bp, Homo sapiens; identical to SEQ ID NO: 499994

SEQ ID NO: 506067 - DNA, 201 bp, Homo sapiens; identical to SEQ ID NO: 499995

SEQ ID NO: 506068 - DNA, 201 bp, Homo sapiens; identical to SEQ ID NO: 499996

SEQ ID NO: 506069 - DNA, 201 bp, Homo sapiens; identical to SEQ ID NO: 499997

SEQ ID NO: 506070 - DNA, 201 bp, Homo sapiens; identical to SEQ ID NO: 499998

SEQ ID NO: 506071 - DNA, 201 bp, Homo sapiens; identical to SEQ ID NO: 499999

SEQ ID NO: 506072 - DNA, 201 bp, Homo sapiens; identical to SEQ ID NO: 500000

SEQ ID NO: 506073 - DNA, 201 bp, Homo sapiens; identical to SEQ ID NO: 500001

SEQ ID NO: 506074 - DNA, 201 bp, Homo sapiens; identical to SEQ ID NO: 500002

SEQ ID NO: 506075 - DNA, 201 bp, Homo sapiens
gtctttacaacaaccctgcagtatagaactaatttttattcccacttaagagacaaggaaactaaagaacaaagaccctaggtaacttttctatggttgcrcagctaacaaacagcaatgtgatattagaaaataagtagctcattccatagattacattctttaaaaaatgctagaaggaggcagagctttgagtatgag

SEQ ID NO: 506076 - DNA, 201 bp, Homo sapiens
attttcagggcattaatgcttgtttgacaatgacagggtattgtcccctgcatggtctgaatgtacgtgtcaatccaaaattcatattttgaaacctaacyctaagatgacagtattaggaggtggggcctttgtgataagatcatgagggtggagtcttcttaagtaggattagtgctcatatgaaagaggctggagagt

SEQ ID NO: 506077 - DNA, 201 bp, Homo sapiens
caacatggtagcagagttacaactgagacaactaactgaacagagctccagatgacttttaacgtccatagatgcttagacttatgtctctgaggctccamgtaaaacaaagcatttgtacgatgtttatgcttcatcaaattatcctataattttgccatccaaactgctactaaactttgcttctgccaaactttgaaa

SEQ ID NO: 506078 - DNA, 201 bp, Homo sapiens
cacttggtctgttccatactaggaagggatatgggtgatctacttcttccctgatatctcatttactctatctttttaattctgttggcttcatatagtgrgcaattcttagagatccattgccccggcctacctgtcaattttaaaatcctacttgggcctctcaacctcctcattcacagcaagcaactgattggacct

SEQ ID NO: 506079 - DNA, 201 bp, Homo sapiens
actgagacaactaactgaacagagctccagatgacttttaacgtccatagatgcttagacttatgtctctgaggctccacgtaaaacaaagcatttgtacratgtttatgcttcatcaaattatcctataattttgccatccaaactgctactaaactttgcttctgccaaactttgaaatttcaagagatagcctgagtg

SEQ ID NO: 506080 - DNA, 201 bp, Homo sapiens
ttcctcggaaaaactttcggatcctgttcatggtacaaagctttccctagcagcctgccctcccttagcctgcttaccttgagtggagaggaagctgaagyagcagcagcagcagcagcagcagcagagttgccagaaagtgaccccctcccctgaacacagcaggaagcagcagtccaaggggaaagctcagttcctacc

SEQ ID NO: 506081 - DNA, 201 bp, Homo sapiens
ttgtgaactagctgctctgcacatctgggccagaatataagcagagcacaagagatgtgctaaggagatccacaagatagttttaaaagtcacagagtgcratggtgtgcatatacacacacacttaatctgtcatcgatctgtctggtctatctatcatctatttatatataccaatgatgattttattatttatcatgt

SEQ ID NO: 506082 - DNA, 201 bp, Homo sapiens
cattctttggtgaattacgtcttcaaatttttgatccatttgttaatggattggttttcttatcatttagggacatgaagaaacctttaaggatggaggtrtgtctactgtcttcatcctggtgatgctttcataggtatggacacaatatcaaaatgtattcaattgtacaccctagaaatgtgcactttattgtgtata

SEQ ID NO: 506083 - DNA, 201 bp, Homo sapiens
ttttcatcatagccattccaaaatgtatgaggtgatatcttattgtggttttgatttgcacttccttactgattagtgatgttaagcattttaaaaatatrcctgttggccatttgtatgtcttcttttgaaaaaggtctactcattttttttccctatttttaaatccagttgctttcttgatattgagttgagctcttt

SEQ ID NO: 506084 - DNA, 201 bp, Homo sapiens
cctctgggtttggtccaagtccacctcaaccttgagcacactctcctcagtttttctaacattctctttgccccatgcccctttcccatgtccccttaggrgaggtttcatctcttttatgctgctgtaaaaaatttttccttggtctggctgaactctgaatcctatccgctccctcctcacaatgtcttccttgatgac

SEQ ID NO: 506085 - DNA, 201 bp, Homo sapiens
gacattgctaatggtaaggccgatcactgcttggccccttattattttgtagatgattgcagactttcagagagcctcttgcagaacttcagagagcctcmtaataccctgggaccaaaataggccatctgacttctatttctgcatgtctttggatctctggatctcacccttgcctgttacttcccttttctttgagtc

SEQ ID NO: 506086 - DNA, 201 bp, Homo sapiens
ctaattggttgagggcccagatagaaaaaaaggcagaggaaaggtggattctgtctctgttagtgagctgggacatctttcttcttctgcctttggactaraactttagattctctggctttggcctctggggcttgtaccagtctgcccccacaacctccacatccctcactaggttctcaggcttttgacctcagactg

SEQ ID NO: 506087 - DNA, 201 bp, Homo sapiens
tacatgcccaaaacatgaagtaggtgacattgtctctgcccctaacaaccttaaaactcccctcagtagaacgccaccagtataataataataataataawaaaagaacgccaccagcaaaaaacatagcacacatctttagcatccacattcgaaaataaagtgagaattttttttagcatcatggataaatggtttgca

SEQ ID NO: 506088 - DNA, 201 bp, Homo sapiens
ctatgcctggcttatttcacttagtgtaacgtcctccaggttcatccacagtgttgcaaatgataggattttcttcttttttgaggcaaaataacattcttgtgtgtgtgtgtgtgtgtgtgtgtgtgtgtgtgtgtgatatatatgtatgtatgttgcactttctttattcattcatctgttgatggacacttaggtgaa

SEQ ID NO: 506089 - DNA, 201 bp, Homo sapiens
tatgcctggcttatttcacttagtgtaacgtcctccaggttcatccacagtgttgcaaatgataggattttcttcttttttgaggcaaaataacattcttgtgtgtgtgtgtgtgtgtgtgtgtgtgtgtgtgtgtgatatatatgtatgtatgttgcactttctttattcattcatctgttgatggacacttaggtgaat

SEQ ID NO: 506090 - DNA, 201 bp, Homo sapiens
atgcctggcttatttcacttagtgtaacgtcctccaggttcatccacagtgttgcaaatgataggattttcttcttttttgaggcaaaataacattcttgkgtgtgtgtgtgtgtgtgtgtgtgtgtgtgtgtgtgatatatatgtatgtatgttgcactttctttattcattcatctgttgatggacacttaggtgaatt

SEQ ID NO: 506091 - DNA, 201 bp, Homo sapiens
gagttacaactgagacaactaactgaacagagctccagatgacttttaacgtccatagatgcttagacttatgtctctgaggctccacgtaaaacaaagcrtttgtacgatgtttatgcttcatcaaattatcctataattttgccatccaaactgctactaaactttgcttctgccaaactttgaaatttcaagagatag

SEQ ID NO: 506092 - DNA, 201 bp, Homo sapiens
ctggtacttggacaactatagtagcctcctaactggcctccctacttcctttttcatcttcctaatatccattctctacacagtggccagaatgagctttsaaaatgtacatcagacagtttcgttcctatttaatattcttcattggcttcaccttatactgagaataatgcctacaatctttaagtgatgcacaaaact

SEQ ID NO: 506093 - DNA, 201 bp, Homo sapiens
gactctatttcaaatctcatggccaatatttctcaggtctttaaccattaatgccttctttaacttctctgtgcctcagtttcctcatctgcagaatgagrtaataaatggttcttattcaatagagttttgtagcctagtgataatgtacatacaaagcctagcagggttcctggcacaggaatttatgaaatggtagtt

SEQ ID NO: 506094 - DNA, 201 bp, Homo sapiens
atgtccaccttcctacaagcccaagaaaaggtgggggccagattgagactgccgtttctctcctccccgttctccgtctgcacgctgtaactcaacaccayttctcataaggaaaacatttcatgccattacccagaaaacttcattcagctctcaccttctgtgttatgtgagagcatgtgtgtttaaacggcaattaaa

SEQ ID NO: 506095 - DNA, 201 bp, Homo sapiens
aatatttaaggtgtacaacatgactttggatagccttatacattgtggtatgattgcctcaatgcagctgatctccattatctcacataattatctttttktgtgtgtggtgagaacatttaagatctactctcttagcaagtttcaagtatacaatatattattatcaactatggtcatcaggctgtacattagctctcc

SEQ ID NO: 506096 - DNA, 201 bp, Homo sapiens
gggcaaattactttaccatttgctcttttttcccccctcatctgttaataaagagaggtaacactttgctaatctggcatggccacaaggatcagatgaartaatatgcctgaaggatgaaaggcctcaactgcctggcatggcgcaccgctcctgattgataggcaatgagcaaatatcacgtgcaatgaaatgaactgc

SEQ ID NO: 506097 - DNA, 201 bp, Homo sapiens
agaatggaaccaagttggaaaacacacttcaggatattatccaggagaatgtccccaacctagccaacattcaaattcaggaaatacagagaacaccacaragatactccatgagaagagcaactccaagacacataattttcagattcaccaaagttgaaatgaagggaaaaatgttaaggacagccagatagaaaggtt

SEQ ID NO: 506098 - DNA, 201 bp, Homo sapiens
tatttctgcatgtctttggatctctggatctcacccttgcctgttacttcccttttctttgagtcctaaagggcaaattttagggaacagtagcatcaagscctgtcagattctggactcagattcttatctttaaactccttgtttggcgaggcatcctagagaaaatttttgtctgctgtctttgctgatctctaattt

SEQ ID NO: 506099 - DNA, 201 bp, Homo sapiens
aactgcaattccaaacctgctcctccagttttgagcctaccacccaccaagttgttcagataccagtcctagggtttgtttctgattggtgtcattcttaytctcttcacatcttatctgacggcaagtcctatacgttccatgtgcacaatctatgatgaagctgaccatttctcccatttaccctggcacctccctggt

SEQ ID NO: 506100 - DNA, 201 bp, Homo sapiens
tttatattagtttcttctgactgccatgacaaattaccacaaacttggtaacatattctgtcacatttctggggtccagaattctaaaaccaagatgtcartaggacctcagtccctccatatgttgtaggggacattctgttccttgcctctttcagcttctgctggcagtctttgacttgttgaatcactcaaatctct

SEQ ID NO: 506101 - DNA, 201 bp, Homo sapiens
tggttgcgcagctaacaaacagcaatgtgatattagaaaataagtagctcattccatagattacattctttaaaaaatgctagaaggaggcagagctttgrgtatgagaaggcttagagaacaagatgaggatagttatctagatgacagatcattatcactgaaatctgcaaactacctctcaattaatagaatttagca

SEQ ID NO: 506102 - DNA, 201 bp, Homo sapiens
aacccgctccatgtagtcttctgttcttggagatagcagtttcatctcctgaccaggctggaagggtcctattttcagggcattaatgcttgtttgacaaygacagggtattgtcccctgcatggtctgaatgtacgtgtcaatccaaaattcatattttgaaacctaactctaagatgacagtattaggaggtggggcct

SEQ ID NO: 506103 - DNA, 201 bp, Homo sapiens
aggtctttcaaatgtgcagctaaagttgagaaacactggtctagaaaaaaagtctcaattttttgtttgtttgtttttggtttttgaacattgcctatgaracatttaattttaggtgtctacttgactgggctaaggaacacccagagaaccagtaaagcattatttttaggtatatctgtgagggtgtttccagaagag

SEQ ID NO: 506104 - DNA, 201 bp, Homo sapiens
aaaagtctcaattttttgtttgtttgtttttggtttttgaacattgcctatgagacatttaattttaggtgtctacttgactgggctaaggaacacccagrgaaccagtaaagcattatttttaggtatatctgtgagggtgtttccagaagagattggcatttgactcagtgcactgagtggggaggagatgccctcacc

SEQ ID NO: 506105 - DNA, 201 bp, Homo sapiens
taagcaaggatgatcaatggatactaaaaaccattgggtaaaacattgtaagaaaaacagaatattttcatggatcaatgtgtcattccacaaattacttyttaatcccaaagtaaaggtttagctgtcaacatcttaactaacaaagttagtatcaacaatactggtgatattatgttatattatatgcctcttgatgag

SEQ ID NO: 506106 - DNA, 201 bp, Homo sapiens
tattttcactccaaaaacatttatcctgcaggtaacaagaggaaatcaaaaatttcagaacatggtcactggtaccaaacaaatggcatgaacttaaaatacacacacacacacacacacacacacacacacacacacacacactggtatttaaacaaagtgtgtgaggagttgacttttcagactaagaagaccaaagta

SEQ ID NO: 506107 - DNA, 201 bp, Homo sapiens
attttcactccaaaaacatttatcctgcaggtaacaagaggaaatcaaaaatttcagaacatggtcactggtaccaaacaaatggcatgaacttaaaatacacacacacacacacacacacacacacacacacacacacacactggtatttaaacaaagtgtgtgaggagttgacttttcagactaagaagaccaaagtat

SEQ ID NO: 506108 - DNA, 201 bp, Homo sapiens
aaagcctagcagggttcctggcacaggaatttatgaaatggtagttattgctatcattactagattatatgctagaagatagcattctgacttatttaatgttcccaagtggtttatgattgcctttccaactggctgtctgccaactgccatgggatttattcttttctcccattctgcttgtgtatgtacttatggcat

SEQ ID NO: 506109 - DNA, 201 bp, Homo sapiens
aaggagcatgtttaaacccatcaaaaggaagctaaaaaccttgaaaaaacactagacgaatggctaactagaataaacagtgtagagaagacctgaaatgrcctgatggagctgaaaaccatggcaagagaacttcgtgatgcatgcacaagcttcaatagccgatttaatcaagtggaagaaagggtatcagtgattgaa

SEQ ID NO: 506110 - DNA, 201 bp, Homo sapiens
ctgcccctcataaagggactcctatctacttactaattgggtactattcctgtttatgcttccaaggccacattttatgtttttcagccagtttttctctrtcatcccacagcttcttgagctcagtgtgattatggcagaaactctgaagctaaagaaacttcccatgttgctgtggtcacagctcaagggtaagctgtt

SEQ ID NO: 506111 - DNA, 201 bp, Homo sapiens
aaggaagaagccataagatcttaatttctttgccttccatagagtctaactgtaactctagttattaccagtaggcaaggcctcccgttaattgtgattcmattaaaagggatttgtgcaattgtagaggacatctaaactccactacttctaagtgcccatctccaaggagccatagttagatcattccaacatggtagc

SEQ ID NO: 506112 - DNA, 201 bp, Homo sapiens
aagttggaaaacacacttcaggatattatccaggagaatgtccccaacctagccaacattcaaattcaggaaatacagagaacaccacaaagatactccakgagaagagcaactccaagacacataattttcagattcaccaaagttgaaatgaagggaaaaatgttaaggacagccagatagaaaggttggcttacccac

SEQ ID NO: 506113 - DNA, 201 bp, Homo sapiens
gattccattaaaagggatttgtgcaattgtagaggacatctaaactccactacttctaagtgcccatctccaaggagccatagttagatcattccaacatsgtagcagagttacaactgagacaactaactgaacagagctccagatgacttttaacgtccatagatgcttagacttatgtctctgaggctccacgtaaaa

SEQ ID NO: 506114 - DNA, 201 bp, Homo sapiens
agcagtgtgtagagggaaatttatagcactaaatgcccacaaaagaaagcaggaaagatctaaaattgacaccctaacatcacaaattaaaagaactagasaagcaagagcttacacattcaaaagctagcagaaggcaagaaataactaagatcagagcagaactgaaggagatagagacacaaaaaacccttcaaaaaa

SEQ ID NO: 506115 - DNA, 201 bp, Homo sapiens
caagagcttacacattcaaaagctagcagaaggcaagaaataactaagatcagagcagaactgaaggagatagagacacaaaaaacccttcaaaaaatcartgaatccaggagctagttttttgaaaagatcaacaaaattgatagaccgctaacaagactaataagaaaagagagaagaatcaaatagatgcaataaaaa

SEQ ID NO: 506116 - DNA, 201 bp, Homo sapiens
atatttcaccttcattatgttacagcctagtctgaacccttttaacaagttttcctttttatgtcctgctctcctacatgacttttgagtgaaaaagagtrctgtgctctaacacacaaacacaaatgctcacaaatgcatgcacgtgcacacacaaatgaacacatacacactattcaaaaggcaccactgcattgctta

SEQ ID NO: 506117 - DNA, 201 bp, Homo sapiens
ctctggtcaattgatgagagaggaggtggagatgacatttgggctgatattgtattaaatatatatatatatatatatatatatatatatatatatatatwtttttttttttttttttttttttacaaagcttcccaggtctttcaaatgtgcagctaaagttgagaaacactggtctagaaaaaaagtctcaattttttg

SEQ ID NO: 506118 - DNA, 201 bp, Homo sapiens
attaagcatggaatgccattaaatttttctgaatgcagtctctcatcaagaatcttaactgtcactgcaatgccaattttggtgtgatgtatttgttgctyacttaaaatttcctctacaaagagaagacatttgttagcaaaccaatgaaatgagaagagcttcaaatatggggtccagttatgagaaaattaaactcag

SEQ ID NO: 506119 - DNA, 201 bp, Homo sapiens
ggaggaagagttagaaagcaggagagggagagatagagattttctccttacacatgaatgccagctaaataaaaaagaatgaattatagaaaagcaaattktcagtcctcagtgtaataattgatttaagcaaggatgatcaatggatactaaaaaccattgggtaaaacattgtaagaaaaacagaatattttcatggat

SEQ ID NO: 506120 - DNA, 201 bp, Homo sapiens
aagtgcacgtaaggcacaaatatacaagctatgccctctgtttctaaacctaaggtgtgtttaacttttaagaaactgccaaaatgtccccaaagtgcttrtatcatttcatattcccactgacacttccccacattttcagtaacacttaactttttaattgtagtcatttttgtgggtatatagtggtatctatttgtg

SEQ ID NO: 506121 - DNA, 201 bp, Homo sapiens
ggtagactatccatgacattcagtcaaaatcacctggctactgattcagaaaatttaagtcacactcatcacttctactccaaagttcttagccagctgcrgctgtggttgccatggtaaatgtaaagtcatcaaagtgacaggactcaggcttagaaatataagccaccagcataaacattcaccacttcaacaatagtc

SEQ ID NO: 506122 - DNA, 201 bp, Homo sapiens
agcgattgatgacactgtgaacagatctcaggagagtggaccacacttcatccacaaagcacatgatgacactggtggttgggaggttattgtgaactagstgctctgcacatctgggccagaatataagcagagcacaagagatgtgctaaggagatccacaagatagttttaaaagtcacagagtgcgatggtgtgcat

SEQ ID NO: 506123 - DNA, 201 bp, Homo sapiens
ctgattgaggggtaagtttggggaaaacacgcttcggtgcacggtctgggcttggctttctgttggggctggcttacttgtgtctgtttaagtggtcactwcaacagggaaagtttaagccccctgcagctcttcctgtggctggcttaatgcttgtgctgcaggcttatattctgaagaagtaataggaagcctccactt

SEQ ID NO: 506124 - DNA, 201 bp, Homo sapiens
aggcactgtttagctgttttctttttagaaagaaactagtagcagaatttgaactagtagcagaattgtgctttccattcttctcctctaatctttgttgwctttgttattccctttgttataaggagagtgggataaataaaagtattcaaaggcccagttcattgtcctttggccatatttcaccttcattatgttaca

SEQ ID NO: 506125 - DNA, 201 bp, Homo sapiens
tgaaggtactctttaaatgttagccattcatattgttgctaatactttgctgtaataggagtgtcggatgcatgtgggaggcaatgtaccagctcttcccmaaaaaacaagtagaaaactagtgactaacatgattctggcaatggggaagaaacaaatctgagtattttattttattcttgccattcttatttcctctaa

SEQ ID NO: 506126 - DNA, 201 bp, Homo sapiens
ccccacattttcagtaacacttaactttttaattgtagtcatttttgtgggtatatagtggtatctatttgtgttttaatttacatttccctaatgactarcaattttgagcagatttttctgtgcttatttgccaactgtctacattctttggtgaattacgtcttcaaatttttgatccatttgttaatggattggttt

SEQ ID NO: 506127 - DNA, 201 bp, Homo sapiens
taattggctcacggttctgcaggctgtacaggaagcatggctctgccatctgctcagctcttggtgaggcctcagggagcttttacccatggcagaagacraagtgggagcaggcatgttacatgacagagcaagcaagagacagtaaggtgaggtctctgacacttttaaccaaccaaatcttatatgaactgagggaga

SEQ ID NO: 506128 - DNA, 201 bp, Homo sapiens
gatagcagtttcatctcctgaccaggctggaagggtcctattttcagggcattaatgcttgtttgacaatgacagggtattgtcccctgcatggtctgaaygtacgtgtcaatccaaaattcatattttgaaacctaactctaagatgacagtattaggaggtggggcctttgtgataagatcatgagggtggagtcttct

SEQ ID NO: 506129 - DNA, 201 bp, Homo sapiens
agaccatcctggccaaccaacatggtgaaaccccgtctctactaaaaatacaaaaattagctgggcatagcggcacacgcctgtagtcccagctcctcgggaggctgaggcaggagagtcacttgaacccggcaggtggaggttgcagtgagccaagatcgtgccactgcactccagcctcgtcaacagagtgagactcca

SEQ ID NO: 506130 - DNA, 201 bp, Homo sapiens
ccaacctggccaacatggtgaaaccccatctctactaaaaatataaaaattagcggggcatgatggcgcgcgtctgtagtcccagctactcgggaggctgyggcaggagaattgcttgaaatcagaaggcggaggctgcagtgagccgagatcgcaccactgcgctccagcctggcaacagagcgagactctgtctcaaaa

SEQ ID NO: 506131 - DNA, 201 bp, Homo sapiens
atcacaaggccaagagctcaagaccatcctggccaaccaacatggtgaaaccccgtctctactaaaaatacaaaaattagctgggcatagcggcacacgcytgtagtcccagctcctcgggaggctgaggcaggagagtcacttgaacccggcaggtggaggttgcagtgagccaagatcgtgccactgcactccagcctc

SEQ ID NO: 506132 - DNA, 201 bp, Homo sapiens
ttgaacccaggaggcagaggatgcagtgagccgagactgcgacattgcactccagcctgggcaacaagaacgaaactccatctcgaagaaaaaaaaaaaaagattaattctaactcttagatttctataatattaaatttaacttgtaaagtttaattcttttctccaaattttgttacgttaagtatgcagtcacatttc

SEQ ID NO: 506133 - DNA, 201 bp, Homo sapiens
ctgccctccttctgtgggacaaaactaactccctggcgcacctccgctcccgagaagaggggcctggtggggacgcgggctcctcgcacctccagcgcagsacttgctcacggcctgggtggaagcaaggcccggagggaggggggagtcgggctgggcaacgccaagagcacgggatggagggtcagacgcgggcaccca

SEQ ID NO: 506134 - DNA, 201 bp, Homo sapiens
ttgaggtcaggagttcaagaccagcttgaccaacatggtgaaaccccgtctctaccaaaatacaaaacttaggtgggtgtggtggtgtgcacctgtaatcycagctacttgggaggctgaggcaggaggattgcttgaacccagaaggcaaaagtttcagtgagctgagatcacgccactgcactccagcctgggtgacgg

SEQ ID NO: 506135 - DNA, 201 bp, Homo sapiens
cctgccctccttctgtgggacaaaactaactccctggcgcacctccgctcccgagaagaggggcctggtggggacgcgggctcctcgcacctccagcgcascacttgctcacggcctgggtggaagcaaggcccggagggaggggggagtcgggctgggcaacgccaagagcacgggatggagggtcagacgcgggcaccc

SEQ ID NO: 506136 - DNA, 201 bp, Homo sapiens
ctggcagggtacagtggctcacgcctgtaatcccagcactttgggaggccgaggcgggcagatcacaaggtcaggagattgagaccatcctggctaacacygtgaaaccctgtctctactaaaataatataaaaaattagctgggcgtggtggcgggcgcctgtagtcccagctactcgggaggctgaggcaggagactgg

SEQ ID NO: 506137 - DNA, 201 bp, Homo sapiens
cgccagaactaacaatctgccaagaaaataggaccggccactgcggctccagcccggtcccgcgggacaaggcgggggaggggggccggcggccggggggsctgccctccttctgtgggacaaaactaactccctggcgcacctccgctcccgagaagaggggcctggtggggacgcgggctcctcgcacctccagcgcag

SEQ ID NO: 506138 - DNA, 201 bp, Homo sapiens
aagggatttctctgtactacaattacaaattttctgtaaattggtaacttcatgatttttctataaactttctaaaaaagtttattaataaaaaagagacatgttattgaatctcaaaagtgttatgctaaatgaaagaagccagtctcaaaaggctatatacactgtgtgatgccaatttatatggcattttgggaaagg

SEQ ID NO: 506139 - DNA, 201 bp, Homo sapiens
taagggatttctctgtactacaattacaaattttctgtaaattggtaacttcatgatttttctataaactttctaaaaaagtttattaataaaaaagagacatgttattgaatctcaaaagtgttatgctaaatgaaagaagccagtctcaaaaggctatatacactgtgtgatgccaatttatatggcattttgggaaag

SEQ ID NO: 506140 - DNA, 201 bp, Homo sapiens
atgaggcacgagaatcgcttgaacccaggaggaggaagttgcagtgagctgagatcgcgccactgcactccagcctgggcgacagagcgagactgcatttcaaaaaaaaaaaaggcattagaaagtcatcgtcttgatcgaaatcttcatattgtttcccattttcaacaaacttaattctagaaccttgcaggtttgacc

SEQ ID NO: 506141 - DNA, 201 bp, Homo sapiens
aggctgaggcagaattgcttgaacctgggaggcagaggttgcagtgagctgagatcgtgccactacattccagcctccatctcaaaaaaaaaaaaaaaaaagtagattagtggttaccaggggctgggttgagaagagaatgaacagtcactgcttaacagctacagagtttgtttgggatggtaaaaaatacaaaaaata

SEQ ID NO: 506142 - DNA, 201 bp, Homo sapiens
ggtatctaaccatgataattttctatgtctgcatatgtgtatcactgtatgtatgtgggagggggacaaggaaaggggatatagtcacagcaagagatccytattgaaagacattttgctgaccaagaagttttcaatctaactcagaatcccaacagtagtactgctttgtggagataattactgaactttgatctactt

SEQ ID NO: 506143 - DNA, 201 bp, Homo sapiens
aacagaaaaaaattgtaaaacctgtgatgaaaacattaaaacatgttatttgcaaagaaaactgcaggaaacacgcatataaaacacaaatagcaagacaytttgataagaaaaaacctactttagaatgtattaattcagccaaaattacggaatttatggaagaaactccatatgtgctttctacctacgtaaaatcac

SEQ ID NO: 506144 - DNA, 201 bp, Homo sapiens
ctgcactccagcctaggcgacagagcgagattcaaacagaaaaaaattgtaaaacctgtgatgaaaacattaaaacatgttatttgcaaagaaaactgcargaaacacgcatataaaacacaaatagcaagacactttgataagaaaaaacctactttagaatgtattaattcagccaaaattacggaatttatggaagaa

SEQ ID NO: 506145 - DNA, 201 bp, Homo sapiens
catggcttagggtgcagacatggccaagtccaagaaccacaccacacacaacattcccgaaaatggcacagaaatggtattaagaaactgcgatcaagccrggtgtggtggcttacgcccgtaatcccagcactttgggaggccaaggcgggtggatcacgaggtcaagagatcgagaccaacctggccaacatggtgaaa

SEQ ID NO: 506146 - DNA, 201 bp, Homo sapiens
ccagaaaaaaaaaaaaaaaagaaagaaggaagaaaagaaaagaatactggggtggacgtggtggcttatgcctgtaatctcagcgctttaggaggccaagktgggcccaggggttcaagaccagcctggacaatgtggcaaaacccctcctctacaaaaaacacaaaaattagccaggcgtgatggcacgtgcttgtagtc

SEQ ID NO: 506147 - DNA, 201 bp, Homo sapiens
aacatggtgaaatcccgtctctactaaaaacccaaaaattagccagatgtggtggcagacgcctgtaatcccagctactcaggaagctgagacaggaaaaycgcttgaacctgtgaggcggaggttgcagtgagccaagatcgtgccactgcactccagcctgggttacagagcgatattctatctaaaaaataaaaataa

SEQ ID NO: 506148 - DNA, 201 bp, Homo sapiens
agcagaactatacagaactttacacctaaaacagatgaattttactaagtgtaaattataccttaataagtatgacttttcaaaaagaatccttaacaatkgtagtatcatgtcatacatttcaatacacacagaattctagcctgataaatgtcattatgagatctagtcagatgaaactaggcgattcaagccgggcac

SEQ ID NO: 506149 - DNA, 201 bp, Homo sapiens
attctttagcctccatattactctattaaaacgattatccactgcacaactactataagcacattaataaaggccttaattctattttgacaaaaggcaayggttgcaccatagcttaatatccactagtagtcattattcctgaagactagtagtcttcagcccttaggagcaacattctacacataagtgattcacaac

SEQ ID NO: 506150 - DNA, 201 bp, Homo sapiens
tcctgaaataagagatttttccgccgcagttagaaactgaaattccctgaagaatatttccttagaaatcggctttgttatcccactaagttttatatttraaaaatattcttaaatctaaaggtattaacagaaattcaacttaaaaattgctgaatatagcttccggttctaggtgcttcaggagccatggcttagggt

SEQ ID NO: 506151 - DNA, 201 bp, Homo sapiens
caggaggcagaggatgcagtgagccgagactgcgacattgcactccagcctgggcaacaagaacgaaactccatctcgaagaaaaaaaaaaaaagattaaytctaactcttagatttctataatattaaatttaacttgtaaagtttaattcttttctccaaattttgttacgttaagtatgcagtcacatttccaagttg

SEQ ID NO: 506152 - DNA, 201 bp, Homo sapiens; identical to SEQ ID NO: 136794

SEQ ID NO: 506153 - DNA, 201 bp, Homo sapiens; identical to SEQ ID NO: 136695

SEQ ID NO: 506154 - DNA, 201 bp, Homo sapiens; identical to SEQ ID NO: 136640

SEQ ID NO: 506155 - DNA, 201 bp, Homo sapiens; identical to SEQ ID NO: 136829

SEQ ID NO: 506156 - DNA, 201 bp, Homo sapiens; identical to SEQ ID NO: 136481

SEQ ID NO: 506157 - DNA, 201 bp, Homo sapiens; identical to SEQ ID NO: 292647

SEQ ID NO: 506158 - DNA, 201 bp, Homo sapiens
cattggagagcagcggccatggctctgtgctgccctatggccatgggcctcaacaagggccacaaggtgaccgagaacatgaggacgcccaggcacagccrctgctgcaggcacctgaccaaatataccaagttcgtgccggacatgatctgagagctgtgtggcttcaccccatacgagcggtgcaccatggagttactg

SEQ ID NO: 506159 - DNA, 201 bp, Homo sapiens
ccccatacgagcggtgcaccatggagttactgaaggtctccaaggacaaatgggccctcaagttcatcaagacaagggtggggatgcaccaagaggaagcrggaggagctgagcaatgtcctggccaccatgacaaaagccgctgccaaggactgagcactctgccctgccctctctccgaaataaagaatagcttgacag

SEQ ID NO: 506160 - DNA, 201 bp, Homo sapiens
cctaaggctgctgaaaatcagtgcatggtggacacagcatttgtaaggcaggcccaaggagatatcaggcacaaattgcagaagttagaagctccgtaggygtgaatgcaactcagcttattaaagtggttacaaggtgtacattaactgagttcaggaggcagagaagaaagctgatcagaggcttaacaaaggctaatt

SEQ ID NO: 506161 - DNA, 201 bp, Homo sapiens
aaggaagaaattctacagctcttaaatgctgtataggccttaaaagatgtggcagagatgcactgcaaggggcaccataaaggaagaatactaaaggctaaaataaaataaataaataaataaataaataaataaatgagacaaagaggcaaagcaggacaaccccaccttctaaagaagaagccttagctatgcctctcc

SEQ ID NO: 506162 - DNA, 201 bp, Homo sapiens
aggaagaaattctacagctcttaaatgctgtataggccttaaaagatgtggcagagatgcactgcaaggggcaccataaaggaagaatactaaaggctaaaataaaataaataaataaataaataaataaataaatgagacaaagaggcaaagcaggacaaccccaccttctaaagaagaagccttagctatgcctctcct

SEQ ID NO: 506163 - DNA, 201 bp, Homo sapiens
cacgagagagggttgttttgtccgatgaggagtcctgaggcaagggaggtgtgtgaaagtgtgtgaaagagacggtctcaggagaggccaatgcggggagyaatgtggggaggcacagatcccttagcgcaggctgtgtgctcccaggcgagtgtgggggaaatcagtcctaggatgttgcatatggctgataggttgagc

SEQ ID NO: 506164 - DNA, 201 bp, Homo sapiens
ggaagaaattctacagctcttaaatgctgtataggccttaaaagatgtggcagagatgcactgcaaggggcaccataaaggaagaatactaaaggctaaaataaaataaataaataaataaataaataaataaatgagacaaagaggcaaagcaggacaaccccaccttctaaagaagaagccttagctatgcctctcctc

SEQ ID NO: 506165 - DNA, 201 bp, Homo sapiens
taacttgtgttcagaacaatccatgacaagggcttactccacccccaggagttcaggaaacagaagccatgccatgtgaaaaactgcttatgaacttcacygaattaccctgtgatgggggctatcagtacatgttggtgttcaccttttcaggataagtcaaggccttcctcaccgggacagagaaggaactagaggtga

SEQ ID NO: 506166 - DNA, 201 bp, Homo sapiens
gaagaaattctacagctcttaaatgctgtataggccttaaaagatgtggcagagatgcactgcaaggggcaccataaaggaagaatactaaaggctaaaataaaataaataaataaataaataaataaataaatgagacaaagaggcaaagcaggacaaccccaccttctaaagaagaagccttagctatgcctctcctcc

SEQ ID NO: 506167 - DNA, 201 bp, Homo sapiens
gattcaaaaccctcactggtgggtttttgtttattcttggcatctgcctcatcctcccttaccttttacccctgtttattaggaggattcagtcaactatrgaggcagtaataactcaacacactaccgcacagttgatggcattaaccaaatatcagccactgccagtagaagaagctcagctctgtgaagaggtggcaa

SEQ ID NO: 506168 - DNA, 201 bp, Homo sapiens
ggtgtcaaataagagagttcctaagggcagcaaggttctgctgcatttagatcccaaatttctagcttatggctaagccacaaagagaaggaaagaaagarcccctcctctaggaggctaaccaggagaagacttttaaagaaattaaaaaaaaaaaaaaagccttgactcaggccccagctttaggactgccagatctaa

SEQ ID NO: 506169 - DNA, 201 bp, Homo sapiens
aagaaattctacagctcttaaatgctgtataggccttaaaagatgtggcagagatgcactgcaaggggcaccataaaggaagaatactaaaggctaaaataaaataaataaataaataaataaataaataaatgagacaaagaggcaaagcaggacaaccccaccttctaaagaagaagccttagctatgcctctcctccc

SEQ ID NO: 506170 - DNA, 201 bp, Homo sapiens
agcaacacaaatgagaaatgctatatattgaaatagattggcattagattatcacttagcctctgaaggaagagtatgtggaaaatttaatttaaccaacygttgcctagaaattgctaataatggccgggttgtcatggaaatcagagctagaatgcacaagttggcccatgttccaattcagacttggtcctaatggtc

SEQ ID NO: 506171 - DNA, 201 bp, Homo sapiens
ttagatcccaaatttctagcttatggctaagccacaaagagaaggaaagaaagagcccctcctctaggaggctaaccaggagaagacttttaaagaaattaaaaaaaaaaaaaaagccttgactcaggccccagctttaggactgccagatctaactaactaagcttatcttcttgtatgcccataagtgaaagggaggcc

SEQ ID NO: 506172 - DNA, 201 bp, Homo sapiens
ctggtggaccttagagtgaaagtgcacctcaagggaggaaatgggaggaaaagcatggaaaccaactccttttggagtgcatgataaagaatttttaaaarggatttagagctgattatgggatgaaactggatgttcaaaagttaaggacatactgtgaattagaatagccctcttttagtgatggatggctgaccaatg

SEQ ID NO: 506173 - DNA, 201 bp, Homo sapiens
agaagacttttaaagaaattaaaaaaaaaaaaaaagccttgactcaggccccagctttaggactgccagatctaactaactaagcttatcttcttgtatgyccataagtgaaagggaggccatgaaggttctaactcaagccataaggtcatggcatcacccagtgacatacttatccaggcaattagattctgtggcact

SEQ ID NO: 506174 - DNA, 201 bp, Homo sapiens
tcacctgagaaggagaaattagagctccaggaagttaaagtgaaaggctggaaaagtcagggagggtgtctcaggtctggtcacgcccaagttatgcttaygcctcttaagaggacaagaggacacccactaggacccagatgatgcagtccagcttcagcacctacaaaagtgccaagaagcccttctgcaaaggctaaa

SEQ ID NO: 506175 - DNA, 201 bp, Homo sapiens
tcatcaagtcagtaccaggagacccccttcattgctgtgtaaatgtgatagatgaagtgttctcaagccagagagatttgacagataggccccttggggasccagacatagaatattttactgatggaagcagtttcatacgaaagggaatctgctgagctgggtatgcagtggtgactttggactcagtagtagaggtgc

SEQ ID NO: 506176 - DNA, 201 bp, Homo sapiens
gctccaggaagttaaagtgaaaggctggaaaagtcagggagggtgtctcaggtctggtcacgcccaagttatgcttacgcctcttaagaggacaagaggayacccactaggacccagatgatgcagtccagcttcagcacctacaaaagtgccaagaagcccttctgcaaaggctaaaggctggtaaaagaaaaaggcaac

SEQ ID NO: 506177 - DNA, 201 bp, Homo sapiens
tggaagcagtttcatacgaaagggaatctgctgagctgggtatgcagtggtgactttggactcagtagtagaggtgcagtctttgcctacagaaacttctrcttagaaagcagagctaatagctctgacaagagctctctggctagcaaaagaccaaaagacaaatatttacacagattccaaatatgcttctgacacttt

SEQ ID NO: 506178 - DNA, 201 bp, Homo sapiens
gtttattcttggcatctgcctcatcctcccttaccttttacccctgtttattaggaggattcagtcaactatagaggcagtaataactcaacacactaccrcacagttgatggcattaaccaaatatcagccactgccagtagaagaagctcagctctgtgaagaggtggcaaatagtggtgctttctattaacacctttg

SEQ ID NO: 506179 - DNA, 201 bp, Homo sapiens
gagactaaaaacaaaactctatggagaagcacccagaattactcctacttaccagatccaaatcctttatctccattctctaccctaagccacacttggcrtcaactagaggttccaaatgcttcgaaagcaccctctggcctatattggatctgtggagcatgggcatattggcaactgccagctaaatggacaggagca

SEQ ID NO: 506180 - DNA, 201 bp, Homo sapiens
tggttgttaaaaacctccataattggaaagtaccgtatcgcccgttggggaaaggctttcacagaggcagtaggagaaataacctgcctagggcaacagtrttatgatgagactaaaaacaaaactctatggagaagcacccagaattactcctacttaccagatccaaatcctttatctccattctctaccctaagccac

SEQ ID NO: 506181 - DNA, 201 bp, Homo sapiens
ctaccctaagccacacttggcatcaactagaggttccaaatgcttcgaaagcaccctctggcctatattggatctgtggagcatgggcatattggcaactkccagctaaatggacaggagcatgtgtgtagtaacaatcaagccattcttctttctaattcctctaaagcaaggggaactcttatggtatccagttgatga

SEQ ID NO: 506182 - DNA, 201 bp, Homo sapiens
cgttggggaaaggctttcacagaggcagtaggagaaataacctgcctagggcaacagtattatgatgagactaaaaacaaaactctatggagaagcacccrgaattactcctacttaccagatccaaatcctttatctccattctctaccctaagccacacttggcatcaactagaggttccaaatgcttcgaaagcaccc

SEQ ID NO: 506183 - DNA, 201 bp, Homo sapiens
gagataacagatttactgtctcctttgcccatgggactagggccctggggctgtggaagacctggcatccaaggcatgccatgggggagtttcacccggayggagactggctctccccgcatcctgcccagcagtgcaactgaacctgagatggggctgcaggatgacaccagcacttcaggaaccgcggtaaggagaaag

SEQ ID NO: 506184 - DNA, 201 bp, Homo sapiens
ttacgcccatgaagatgcccacgcacagccacgctggcctagagatgaaagaggttctgggggtgggtggggacaggacgagggtccgagtttgtgaacaagctttgcaggcatgtttccagggccccagtttcccaggtggcagggcacctagcagtcgattctcccctaagaactggcatcaaggagtccagctcctcc

SEQ ID NO: 506185 - DNA, 201 bp, Homo sapiens
acgcccatgaagatgcccacgcacagccacgctggcctagagatgaaagaggttctgggggtgggtggggacaggacgagggtccgagtttgtgaacaagctttgcaggcatgtttccagggccccagtttcccaggtggcagggcacctagcagtcgattctcccctaagaactggcatcaaggagtccagctcctcccg

SEQ ID NO: 506186 - DNA, 201 bp, Homo sapiens
cgcccatgaagatgcccacgcacagccacgctggcctagagatgaaagaggttctgggggtgggtggggacaggacgagggtccgagtttgtgaacaagctttgcaggcatgtttccagggccccagtttcccaggtggcagggcacctagcagtcgattctcccctaagaactggcatcaaggagtccagctcctcccgt

SEQ ID NO: 506187 - DNA, 201 bp, Homo sapiens
ttctaatttccctgtcctggaaaccaccttgaaaatattcttaaatattcttaggtggatttaagatgtctctgtctagtggttttttgtttgtttgtttgttttttaatccatcttagatttgaatgcccaaggaatgaacagtctcttggatcttgtatctcttccttttgttttttagaaaatagcttttattgattt

SEQ ID NO: 506188 - DNA, 201 bp, Homo sapiens
caaggcggggctaggtggcgtccgtgtgaacatgacacaggggctgagtgtgaggaagggggccggtccacacgacacaagctggaccgacagctgagctkgataaccctcaccaaataaggggcccgccaccttgggtttggcagcctgtgttgacacatcctttgtgacagggacacatgtgtcccacgcatcagaggg

SEQ ID NO: 506189 - DNA, 201 bp, Homo sapiens
gcccatgaagatgcccacgcacagccacgctggcctagagatgaaagaggttctgggggtgggtggggacaggacgagggtccgagtttgtgaacaagctttgcaggcatgtttccagggccccagtttcccaggtggcagggcacctagcagtcgattctcccctaagaactggcatcaaggagtccagctcctcccgta

SEQ ID NO: 506190 - DNA, 201 bp, Homo sapiens
ctgaggtcagaagttcaagaccaggtgaacatagcaaaacccgtctctactaaaaatacaaaaattagccgggcatggtggcgcatgcctgtaagtcccakctacttgggaggctgaggcaggagaatcgcttgaaccagggaggcagaggttgcagtgagctgagatccagccactgtacttcaggctgggttacagagc

SEQ ID NO: 506191 - DNA, 201 bp, Homo sapiens
ctttacctgttaaagcagtggctcctctcctgtgtgcatgggtcagtggatagcaccgcagcaaggccagcactttctacatccccaggggccaccagtcrctgtggtctgaggagtaaaggtggccctgcctactcttgaggtgtgtttatacctgtgtaggccaaacccccgcactgtgtcacacctccacattacaat

SEQ ID NO: 506192 - DNA, 201 bp, Homo sapiens
cccatgaagatgcccacgcacagccacgctggcctagagatgaaagaggttctgggggtgggtggggacaggacgagggtccgagtttgtgaacaagctttgcaggcatgtttccagggccccagtttcccaggtggcagggcacctagcagtcgattctcccctaagaactggcatcaaggagtccagctcctcccgtaa

SEQ ID NO: 506193 - DNA, 201 bp, Homo sapiens
ggcccatgccttatttcattggccatcttaacacattccccccagaaaagggcaccccggtcaggatgctcttcccctgactttctaggagtgtcttcctycctctgactcctatggacccggaccccaccagactatgttgggggtgggagggtcattggatgccagttgagacagctgatggccccccacctgtgcttc

SEQ ID NO: 506194 - DNA, 201 bp, Homo sapiens
gcaggccttctgagccttctttgttctggccgtgggtggggcacccggctccacctgcctcaggttttgcctgcaggtgcatttcctttgcacacctggcrcctgttggggacttagacctcttccacatcgccccaaggtcgggctgaagagatttggatcttctgagttgcaagctcccagaaacgatgctgttaggac

SEQ ID NO: 506195 - DNA, 201 bp, Homo sapiens
ggctgggcacaggcacatggccatggtgattgaccgcatttgcctcaccacttcacgtggggacctggcaaccacacaatggccctggggcatggtgtggrggctgagacatgaggcaatggtcttggtctcaaacaccccagcttccggctgctgggcgtcactgacttgctgtggcttcctggcctggctcagcattgg

SEQ ID NO: 506196 - DNA, 201 bp, Homo sapiens; identical to SEQ ID NO: 498925

SEQ ID NO: 506197 - DNA, 201 bp, Homo sapiens
ctgcaggtataggtagggaccaactgagaatgtgtcaaaaggctcgggcttcatcctgaggcctgggaggccactagtgggttctgagcaaagaaacactmtggcggatcactctggcataagccgggagacttggggcttgtgttgttaaatccctatggggaaatccctttggaaatgttgacctgagagacgagaaac

SEQ ID NO: 506198 - DNA, 201 bp, Homo sapiens; identical to SEQ ID NO: 498927

SEQ ID NO: 506199 - DNA, 201 bp, Homo sapiens
agaaaaaaaacaaaacaacaacaacaacaacaaaaaaaaaaaagggaatgagaaaggggacattgcaatagatacagaggagattttaaaataatagaaaygtatgcacaatcataggcataatttcaaaatctcaattaaatgcatgcttttctgaaaatatatatgttgctaattgagaaaaaattttcaatccttatc

SEQ ID NO: 506200 - DNA, 201 bp, Homo sapiens
cccatgccaaagagttgggcgttcagcactttggggttccttggaaggacagcagcagaaaaactaaagaagaaattgtgggtctgcagcagagggaggctggtcagggagtgtgcctgaagagggttcacccagtgaggcctataagggaatgcttattttaggggcctaactgttcctcaagcagagtggctgttgtga

SEQ ID NO: 506201 - DNA, 201 bp, Homo sapiens; identical to SEQ ID NO: 498928

SEQ ID NO: 506202 - DNA, 201 bp, Homo sapiens; identical to SEQ ID NO: 498929

SEQ ID NO: 506203 - DNA, 201 bp, Homo sapiens
aggaataagagcccacacaggtgctgcccattcagatgccagtgcagaacctggcagggagcatcccatgacttcatgcctgggaaagctttgtaaactgyagagggctgtagctgtgtgagcaggcctgctcattctcttgcccagcctgtctttctgagtcccaggagatcttgtgtttccttcttcactttggcaccc

SEQ ID NO: 506204 - DNA, 201 bp, Homo sapiens; identical to SEQ ID NO: 498930

SEQ ID NO: 506205 - DNA, 201 bp, Homo sapiens
ggagattgcggctctaagaatttgtcaaatgtcttactggactaacctcacccaactctcttgttatacagcacatgcgatatgccaggcataattgtaarcactttatacatactgttagctcatttaggttgaatacctttctggaggtcacagatctagtaagcctcagagccaggattagaacccaggcactggggt

SEQ ID NO: 506206 - DNA, 201 bp, Homo sapiens
ctagtaagcctcagagccaggattagaacccaggcactggggtcccagagtcgctggttgcaaagcctaccctagtaacagggcaagcaggactaggggcragctcttttttggtagcacagatgaagaggctcacccccacccccactttacaagtaagcatctccccagttgttcatgtaaaacatagaaagcattttc

SEQ ID NO: 506207 - DNA, 201 bp, Homo sapiens
aacaaaaactttaaaaaagcacatgggctttacaagtgagcatatgctttgcaaacatttctgtcagctaccagtaaccaactgcaaaaactcatattctrcccaaaacagaaattgtgccagtcggggagtcctttgatcaccatgcagtaaacctcgccaaaatattgtaaatttaaacaaactaaaacccaaccactt

SEQ ID NO: 506208 - DNA, 201 bp, Homo sapiens
cccagcctgagcaggcggcgggcttctttggagcagtccctcgaggggacagcccatcccagggctgactcagaatgcccttcaccccacaccccaccggrgaccgagcacctcctgtgtgcaggcagccggagaactgggtggacacggcccaggcagggtgagttgccacggctttcacctccagccagggcagctgcc

SEQ ID NO: 506209 - DNA, 201 bp, Homo sapiens
tgagtgcttaggaaaaaaaaagaataaaaacagcccctaaggaaaatgagaggggaaaaaaatagtaaagataaaggcagaaatcaatgaattaagaaacrgaaacacagtgaaatcagcaaacgtatccaagagctgattctgtttttaaacaaacagtaaagtagcctaacccctggcaattctatttgagaaataaaa

SEQ ID NO: 506210 - DNA, 201 bp, Homo sapiens
aaaaagaataaaaacagcccctaaggaaaatgagaggggaaaaaaatagtaaagataaaggcagaaatcaatgaattaagaaacggaaacacagtgaaatyagcaaacgtatccaagagctgattctgtttttaaacaaacagtaaagtagcctaacccctggcaattctatttgagaaataaaagggagaaatgagaaaa

SEQ ID NO: 506211 - DNA, 201 bp, Homo sapiens
tgaaccctgagctcaggctatccacttgcctcagcctcccatagcgctgggattacagtgtgagccaccgcacctggccaaaacaggatgcagatttcttyctaccatcgtatttggtgttttctatgtgttctttttctgattcttctgttcattcttttgaattgattgaaagatttttttctttccttcagtccgttt

SEQ ID NO: 506212 - DNA, 201 bp, Homo sapiens
aactcccattcttttaaacatggttgtgagtctttcagacctctgtttcctaatgtttctcacgggtcatacaggttggctgagagtaaatggcaaggaarggcctgagagactccgggcacagctgacctaggaaagggagtctgtcatcctggcccgtcgctttacaatgggagtgcgagggctgggcccagagaccct

SEQ ID NO: 506213 - DNA, 201 bp, Homo sapiens
ccatgaagatgcccacgcacagccacgctggcctagagatgaaagaggttctgggggtgggtggggacaggacgagggtccgagtttgtgaacaagctttrcaggcatgtttccagggccccagtttcccaggtggcagggcacctagcagtcgattctcccctaagaactggcatcaaggagtccagctcctcccgtaac

SEQ ID NO: 506214 - DNA, 201 bp, Homo sapiens
acagccacgctggcctagagatgaaagaggttctgggggtgggtggggacaggacgagggtccgagtttgtgaacaagctttgcaggcatgtttccagggycccagtttcccaggtggcagggcacctagcagtcgattctcccctaagaactggcatcaaggagtccagctcctcccgtaactaacgtgtggcccaggcg

SEQ ID NO: 506215 - DNA, 201 bp, Homo sapiens
atttggaggagagaacccacggggttcccaggggcaggccctgagtgcttcagagccaggacgaagccctggcatcagcacagggaggagggtgacttgcytcctggctgtgcacatgtgagtgcgtgtgggcttcacacaagaagcttctgggcgttttggtttcaggggtcggggccagcacggggcagggtgggggtc

SEQ ID NO: 506216 - DNA, 201 bp, Homo sapiens
accctgacctcagagaagcagggccaggctctctgggatgcctcctcccagggagcccccccaacacacacttcccacccgtgtgttttcctcctcccttccctaggtgaggtcaatagagaagcttccctgtggcaggcaggggtccgttctggggtttgtctcctccctcctggccactgtggggagtctgacccttag

SEQ ID NO: 506217 - DNA, 201 bp, Homo sapiens
ggattttctcacatcacaccattttttgatctggaatgctttcttcatactttgacttgtatgtgatttatttaggattggtcaggagagaagagaaggartgtaaggacccaagacctgaactgatttccatctgtgggttaaatgtactagaacgtttgtgagggtagacgtctttgctttgttcattgcggagcccct

SEQ ID NO: 506218 - DNA, 201 bp, Homo sapiens
tgggaggcagaggttgcagtgagccaatatcacgccattgcattccggcctgggcaacaagagcaaaactccatctcaaaaaaaaaaaaaaaaaaaaaaaagaaagaattagctatcagctccattttatagatgaggaaactgaggcacagaggaaggagggatgggtttcaaggccggtcttggttttgccaagaactt

SEQ ID NO: 506219 - DNA, 201 bp, Homo sapiens
tcccacctacttgggaggctgaggcaggaggattgcctgagcccaggagtttgaggctgcagtgagctatgatggcaccactgcactccagcctggacaayagaggaaggcccatctcttaaaaaaataaaaagtcaggccgggcgcagtagctcacgcctgtaatcccagcactctgggaggacgaggcaggtggatcac

SEQ ID NO: 506220 - DNA, 201 bp, Homo sapiens
gaatcacttgaacctgggaggttgcagttagccgagattgtgccactgtactctagccttggtgatggagtgagacactgtctcgaaaaaaaaaaaaaaaagatttaaatttgaagacaatatgcacagacgatataattagcaaacaaatgcccgacctaaagaaaatgccaaatggtgagctccatgaggctaggaacc

SEQ ID NO: 506221 - DNA, 201 bp, Homo sapiens
gctctggtggaggggacagatatcatagagtagagcttgaggaggtgatggaggacatagatctggccccagtttagggggtggagagaaaacaagaaatyggacattgccagggttgcagcgggctgtggtgcatgaaagctttgagctggaggccagagagggaagagacgcgaggtagcaggggccaggtctcttctg

SEQ ID NO: 506222 - DNA, 201 bp, Homo sapiens
aatgtggcacatattacatttgagtaggtgggccttttaaaatcagtttttaaatagtggaatctttattttttgcatttttgaatccgatttttaaggatttttttttttttttttttttgagacagagtgtcactttgctgcccaggctggagtgcagtggcgcgatctcggctcactgcaacctccgcctcccaggtt

SEQ ID NO: 506223 - DNA, 201 bp, Homo sapiens
ctgtttttaaacaaacagtaaagtagcctaacccctggcaattctatttgagaaataaaagggagaaatgagaaaaaaaacaaaacaacaacaacaacaamaaaaaaaaaaaagggaatgagaaaggggacattgcaatagatacagaggagattttaaaataatagaaacgtatgcacaatcataggcataatttcaaaa

SEQ ID NO: 506224 - DNA, 201 bp, Homo sapiens; identical to SEQ ID NO: 498916

SEQ ID NO: 506225 - DNA, 201 bp, Homo sapiens; identical to SEQ ID NO: 498917

SEQ ID NO: 506226 - DNA, 201 bp, Homo sapiens
tctgcatacacacacgcacgcacgcgcacacacacacagcctgcctggccgccccagtgaacaagacaacatggacacggggcctgcccccataagcctcrcaaagagagcattacagggtggtgtgtgttctactcagccaagtctccaggccagtgtaaaagaaagcgtggggccaactgcccaggtgggcagtggctc

SEQ ID NO: 506227 - DNA, 201 bp, Homo sapiens; identical to SEQ ID NO: 498919

SEQ ID NO: 506228 - DNA, 201 bp, Homo sapiens
tgacctcaggtgatctgcccatcttggcttcccaaagtgctgggattacagatgtgagccaccatgcccggtctttttaaggaattcttgaaggacctgtrgaacacaatttgagaacaattgaggaaatcccacctccctgttgtacagatgggaagactgaggccagcaagggggcagagcttaccccaggatctccca

SEQ ID NO: 506229 - DNA, 201 bp, Homo sapiens; identical to SEQ ID NO: 498922

SEQ ID NO: 506230 - DNA, 201 bp, Homo sapiens
agaccagcctaggcagcatggcaaaacccggtctctaccaaaaatacaaaaaaattagctggacatagtggcatacacctgtagtcccagctactcgggargctaagataggcagatcacttgagcctgggaggtggaggttgcagtgagccgagatcgtgccactgcactgcagtctgggtgacagagtgagaccttcaa

SEQ ID NO: 506231 - DNA, 201 bp, Homo sapiens
tgccactgcactgcagtctgggtgacagagtgagaccttcaaaaaaaaaaaagcatgcttgaaggtggcaacccagaacacccagccatggagtagggagsgggcaaggaccaggtttatagagaaaggatgtctgtggctcttttccctggccacatgatgcaaccctccttcccaccccttacctaagccatgcccagg

SEQ ID NO: 506232 - DNA, 201 bp, Homo sapiens
aacccagaacacccagccatggagtagggagggggcaaggaccaggtttatagagaaaggatgtctgtggctcttttccctggccacatgatgcaaccctycttcccaccccttacctaagccatgcccaggcggcgagcattcccagaaaacaagatgctccactggggcactgggcaccccagtatctctgcccatcac

SEQ ID NO: 506233 - DNA, 201 bp, Homo sapiens
cacagcctgtaaaatgggttcatgagcctacttttcatagctacactgtgtgtttgtatataacccatggctatcactattacctgcggaccgcggtgctrtgaagtcaggagacaggcctgcaccatcctgaatcctctgttctctgaaaaatcgccctttgttctctcttacttccttcattcaatcagcaaacattta

SEQ ID NO: 506234 - DNA, 201 bp, Homo sapiens
gggtaggaagttttcgggatctgtgggcctgagctggcatgtccaacatcctgtcactatactgcttggcatcttgcaagggatgcatcctaatgacccaycctgtccacttttgtttggttacttggtgaaggtgggagtgtcttgaacagcatggtgctgttcccctggaaagtttatactcatcagtgcccagttgtt

SEQ ID NO: 506235 - DNA, 201 bp, Homo sapiens
atcttgcaagggatgcatcctaatgacccatcctgtccacttttgtttggttacttggtgaaggtgggagtgtcttgaacagcatggtgctgttcccctgkaaagtttatactcatcagtgcccagttgtttgcagaattcgagaatggatgggaagcacccaggaaacggttcccaaatggatgcattttgatatctgaa

SEQ ID NO: 506236 - DNA, 201 bp, Homo sapiens
tccactcagcctctctgctccccggcgtttctcattatctagcgtttggatgatcagaaggaaaaaggagctgctgcgtaaaggtgaccccatttcaggtytcgtcatgactcgctaggtactgagagacagcaggagaagggaagacaaagaagggggacagggaacactcacctgtgatcgcagagggacattttggga

SEQ ID NO: 506237 - DNA, 201 bp, Homo sapiens
ttcgaagggcttttaaaaattatcaaagttgttccaggttcattccccgggtggcccacacgctgtttttaagtttagctctccaacccttcttcctggtyctccccttcccttggaagaaagtccctggtccagcctgggtgttggcactggcatttgccctcccagggccactgggactgggaatccccaggagggctt

SEQ ID NO: 506238 - DNA, 201 bp, Homo sapiens
atgtttaggggccctgggtgactcatattgtatgtgtacatatattgtggtgtaaaggcttaaactgaccatttatcagaagccagcccccagttccaggyatatcccattgcattaccttattgaatcttctctaccatcctgtggggaaggcagctgttatccccattttgcagttgagaaaacagaggccctgagaga

SEQ ID NO: 506239 - DNA, 201 bp, Homo sapiens
aggtcgggctgaagagatttggatcttctgagttgcaagctcccagaaacgatgctgttaggaccctctgttcactcagagaaagaggcttgatggccggrgccccagggcttccctgctggtagaaggggtgtctggagggcctctgccttccgtcatcagaaggaggttctagcaaggtaaagaggcccgtatagtact

SEQ ID NO: 506240 - DNA, 201 bp, Homo sapiens
tgtgtacatatattgtggtgtaaaggcttaaactgaccatttatcagaagccagcccccagttccaggcatatcccattgcattaccttattgaatcttcyctaccatcctgtggggaaggcagctgttatccccattttgcagttgagaaaacagaggccctgagagatgaagcaacttgcccaaagcagtacagcgagg

SEQ ID NO: 506241 - DNA, 201 bp, Homo sapiens
aattagctatcagctccattttatagatgaggaaactgaggcacagaggaaggagggatgggtttcaaggccggtcttggttttgccaagaacttgacttycagcaaatcgtaagccttctgggctttcatttccttgtctctgaacgaaacagctggcaggagttgaatgcttatcatgtgccaggccctggccgaacac

SEQ ID NO: 506242 - DNA, 201 bp, Homo sapiens
tttagagacaggttctcactctgttgcccaggctggagtgcagtgtctgttcacaggcatgatcatagctcactgcagccttgacctcctgggcctgagcratcctcccaactcagcctcccaagtagctgggaccataggcattcgctaccatgcccagcttgtcccatagacttggtttgactctggtcacagagcctg

SEQ ID NO: 506243 - DNA, 201 bp, Homo sapiens; identical to SEQ ID NO: 498921

SEQ ID NO: 506244 - DNA, 201 bp, Homo sapiens
agaacagcagagcacgaaaccaaatgtgagcccttccttctacacgtggggccccaggcagtggcaccattgcatgcccccaaggcagcctggagtcagcrtttcccagccttgtgaagtcctcatgcttccaagggtggcaggattgggtcctctttggtagaagagctgcttggcatcctgagacgcactcgccccatc

SEQ ID NO: 506245 - DNA, 201 bp, Homo sapiens
ctccgcctctgtttctctctccctctttcccttgcttttatctgggggaacccctttcacaggtttgctgtataacatttctcttccattcacttggcgcygttcgattttaatgttcctttgaatgacaccaggcgagtgctccttgggtttccgaagcctctctctgaagtggctggagccagcgtcttccccaccgag

SEQ ID NO: 506246 - DNA, 201 bp, Homo sapiens
gatggggttgccacggaaaccgaaggaggggaggaatggagggagaggaagatgggatggagaaggcggagggcttggtgcaggaggggtctgaggcgagkcttggtgaggaggaagggaagccatgaggggctcccaggtgtgaattaggccccggtgtgggaaaacaggttggcaggggaggaagacaagacccagaaa

SEQ ID NO: 506247 - DNA, 201 bp, Homo sapiens
gtgctgggattacaggcgtgagccactgcacccggcctaaaacaataggttttgaattggactcagaatatagggagaataataataatcatgtgtcttargccagaattatgctacgtgctttgtgtatttgtctctcttagttcttgcaggtgctggctcttgcattcttatcctcatttggcagaggagttaaataac

SEQ ID NO: 506248 - DNA, 201 bp, Homo sapiens
attctgtttttaaacaaacagtaaagtagcctaacccctggcaattctatttgagaaataaaagggagaaatgagaaaaaaaacaaaacaacaacaacaamaacaaaaaaaaaaaagggaatgagaaaggggacattgcaatagatacagaggagattttaaaataatagaaacgtatgcacaatcataggcataatttca

SEQ ID NO: 506249 - DNA, 201 bp, Homo sapiens
ggcggaggttgcggtgagccgagatcataccattgcactccagcctaggcaacaagagcgaaactccgtctcaaaaaaaaaagagctccagattagtcctsactgaggggtaggggccttggggtcttggtttccatatctgtaaaatgatggcattggacaggagggtccccaaagttcctttcagccctgccggtgaag

SEQ ID NO: 506250 - DNA, 201 bp, Homo sapiens; identical to SEQ ID NO: 498926

SEQ ID NO: 506251 - DNA, 201 bp, Homo sapiens
aaggaaaagagaaaggaaacagccagaatgtccgtcactagagaactggtaaataaattatccagccaccatacaatgcaattctttttttttttttttttgagacggggtcttgctcttgtcatccaggctggagtgcaatggcgcagtcacagcccgctgcagcctcgacctcccaggcttaagcgatcctcccacctc

SEQ ID NO: 506252 - DNA, 201 bp, Homo sapiens
ggagacagctggcactattctcatagccttaaatgcttttattattaaaaagggagagagaaaaggcaaataaactaagcattcagcctgagtgcttaggraaaaaaaagaataaaaacagcccctaaggaaaatgagaggggaaaaaaatagtaaagataaaggcagaaatcaatgaattaagaaacggaaacacagtga

SEQ ID NO: 506253 - DNA, 201 bp, Homo sapiens
ttggaggaagggagactaatgggaccaccagagattttgcacttctattttaggtttgccttgtggcccagagatatttctagcagagttgtgtttggaaagaagcacaacttctttctagaagggagtaaataaataaataaaggaggagtccagcgcatcttggaggagacaagtgaagtcagctccctggccccacca

SEQ ID NO: 506254 - DNA, 201 bp, Homo sapiens
gcagggctgtcccagctgaggcccaagcccagcccaccctttcttctcagttctgccaagaaggccatgggggctggtggaggcccgaactgcctccccgcccccggggagacacagcatgccagctgctgccgggatgggttacaaaaaacaaaaacacaaaccccagccccttgagatgagggacgtttcggtttctgt

SEQ ID NO: 506255 - DNA, 201 bp, Homo sapiens
ttgtatagcccccccagaatatttttcaatttcaaaagatgagatcatactgtttgtaccatcttattactttttctttctttttttttttttttttttttgcttttactttacaacatgtgattaaaatttccatcaggttaagcagcctccgtcaagtcactttaaagggttgtatagttcttttgaacagatggacta

SEQ ID NO: 506256 - DNA, 201 bp, Homo sapiens
taatccatcttagatttgaatgcccaaggaatgaacagtctcttggatcttgtatctcttccttttgttttttagaaaatagcttttattgatttttttttcttgctacaaagaggttgatgattattgcagaaaatttagggactataagtaggcaaaaaagataaaaaccacctataattattaatattttagtatatt

SEQ ID NO: 506257 - DNA, 201 bp, Homo sapiens
gagggagactccatctcaaaagaaaaaaaaaaagaaaaagaagttggtagcccaagtattgttcccttagataaattcttctctgtggttgttttgagtgwgcatttttttttttttttttttttttttgtagtcttgctctgtctcccaggctggagtgcagtggcacaatcttggctcactgcaagctccgccccccgg

SEQ ID NO: 506258 - DNA, 201 bp, Homo sapiens
taatttccctgtcctggaaaccaccttgaaaatattcttaaatattcttaggtggatttaagatgtctctgtctagtggttttttgtttgtttgtttgttttttaatccatcttagatttgaatgcccaaggaatgaacagtctcttggatcttgtatctcttccttttgttttttagaaaatagcttttattgatttttt

SEQ ID NO: 506259 - DNA, 201 bp, Homo sapiens
ctaatttccctgtcctggaaaccaccttgaaaatattcttaaatattcttaggtggatttaagatgtctctgtctagtggttttttgtttgtttgtttgttttttaatccatcttagatttgaatgcccaaggaatgaacagtctcttggatcttgtatctcttccttttgttttttagaaaatagcttttattgattttt

SEQ ID NO: 506260 - DNA, 201 bp, Homo sapiens
tctaatttccctgtcctggaaaccaccttgaaaatattcttaaatattcttaggtggatttaagatgtctctgtctagtggttttttgtttgtttgtttgttttttaatccatcttagatttgaatgcccaaggaatgaacagtctcttggatcttgtatctcttccttttgttttttagaaaatagcttttattgatttt

SEQ ID NO: 506261 - DNA, 201 bp, Homo sapiens
gaagcagcccgagccttcatgttgcagtttgcccaggtcgtgcctacgtgcccctgctggcctgtggtgacccaggacagctcctgagaactgaggagccrggctcgggtgtgacctccgcgggtgcatagctgcaggagcacagatgggacccagctgtggggccacacgggcctggctgcagacccaactcccccttca

SEQ ID NO: 506262 - DNA, 201 bp, Homo sapiens
atagttcccgttccaagtaggctcttgtgcccattttacagatcaggaaatggagacaggtggaggagccaggcgacttgcccagcctttacaggacccayggggcaaagccgtaggtgaagtcacagttagagattccagagctctgaggagacggcgtccctgcttgggtggggaaggtcccctgctggcccccagacg

SEQ ID NO: 506263 - DNA, 201 bp, Homo sapiens
atccaaggtgaacatcggccaccctttccattagcaagggcctgcaccgggtatttggccagagttcctctgaattcacttggtctctggcagttgacctygggttgaaaatgcagttttttgagtgggctttagagatcatgctgaggaagaaagaaaatagcgtgcacggatgtgttgctgtggttggatttcactggc

SEQ ID NO: 506264 - DNA, 201 bp, Homo sapiens
ctgaattcacttggtctctggcagttgaccttgggttgaaaatgcagttttttgagtgggctttagagatcatgctgaggaagaaagaaaatagcgtgcayggatgtgttgctgtggttggatttcactggctgtttttcatatacctgtcttttccctgtgagagaaaacagccatgacagtaagcaggggaagctcatt

SEQ ID NO: 506265 - DNA, 201 bp, Homo sapiens
ctggccaacatggtgaacaccttgtctctattaaaaatataaaaaattagccgagcatggtggtgggcgcctgtaatcccagctactttggaggctgaggyaggagaattgcttgaacccaggaggcagaggttgcagtgatccagtattgctccaccgcactccagactgagcaacagagcaagacactgtctcaaaaaa

SEQ ID NO: 506266 - DNA, 201 bp, Homo sapiens; identical to SEQ ID NO: 498914

SEQ ID NO: 506267 - DNA, 201 bp, Homo sapiens
aaaaaaaaaaaaaaaaaaaaaaaagaaagaattagctatcagctccattttatagatgaggaaactgaggcacagaggaaggagggatgggtttcaaggcyggtcttggttttgccaagaacttgactttcagcaaatcgtaagccttctgggctttcatttccttgtctctgaacgaaacagctggcaggagttgaatgc

SEQ ID NO: 506268 - DNA, 201 bp, Homo sapiens
cccacggggttcccaggggcaggccctgagtgcttcagagccaggacgaagccctggcatcagcacagggaggagggtgacttgcttcctggctgtgcacrtgtgagtgcgtgtgggcttcacacaagaagcttctgggcgttttggtttcaggggtcggggccagcacggggcagggtgggggtcccattcttggaccca

SEQ ID NO: 506269 - DNA, 201 bp, Homo sapiens; identical to SEQ ID NO: 498915

SEQ ID NO: 506270 - DNA, 201 bp, Homo sapiens
ctctgcagtcactgtcctgtgggtggcctggctgtcaggggagatgatccacagtgtgattattgtatcagtcagggttctagagtaagaaatagaaccartaggagacactatatatttatatatatatatatatacacacatatacacacacacgtacacagagaggtctcttttaaggaattggctcctgtgattgtg

SEQ ID NO: 506271 - DNA, 201 bp, Homo sapiens; identical to SEQ ID NO: 498918

SEQ ID NO: 506272 - DNA, 201 bp, Homo sapiens; identical to SEQ ID NO: 498920

SEQ ID NO: 506273 - DNA, 201 bp, Homo sapiens
tgctggcacaagccatcaggcctggaggtgtggccggcaggaccctcccaaggcagaaccctgtgtgcccttcctcctgcgtacccagctcagtgcccagyccatagtaggcgcttcatgaatgtttgctgaagtgtgaattgcatgttgttagcagatgtagagtggaaacagtacagctcacagccaagtgctgtgtaa

SEQ ID NO: 506274 - DNA, 201 bp, Homo sapiens
gcatgttgttagcagatgtagagtggaaacagtacagctcacagccaagtgctgtgtaaattgtaaagccttatgcaaaggggagtcctatccctgccccrcagagcccagggcctcagggaaggggccatatcctccccaagaagactagaggagggtggaggagggcggagggacgagtcagtgccaggtatggagggc

SEQ ID NO: 506275 - DNA, 201 bp, Homo sapiens
tccaggaaggaaaagtatgaaatttgagattgcacaggacctggggtctagacctggtcagggtggggcagggggtccgggcaagcttcctgaggaagtgwtacctgggctgaaagctgaagggagaggaatgaggaagagcattccaggtaggggaaagcatgtgtgaagaggccgtgtgcaggtgaggtctattaaaga

SEQ ID NO: 506276 - DNA, 201 bp, Homo sapiens
ttccaccttggcttcccaaggattataggcgtgggccactgtgcctggcctcttgttttttttaaccaacatttcattggtcaaggacaaatggccatacmccatagcctagacccatctctgcaaagggagtgactgtaaagaaacttccactcctgcctctgcagctggcttgtgcctacggggcaaaagctcaggcag

SEQ ID NO: 506277 - DNA, 201 bp, Homo sapiens
caaaacatttcctgcaggtgggttgaatggtggaaattccttgccccgtacaatctcctgtgcacaccttcatggtccccagacggtagaaggcaaacagyctggtgggagagcctgagctggggggtgacccccatgtttgacatggatagaaggaaacacgaggagtcaagagctccacaggcacggtggcccacgcct

SEQ ID NO: 506278 - DNA, 201 bp, Homo sapiens
cacaccttcatggtccccagacggtagaaggcaaacagcctggtgggagagcctgagctggggggtgacccccatgtttgacatggatagaaggaaacacraggagtcaagagctccacaggcacggtggcccacgcctgtaatcccagcactttgggaggccgaggcaggtggatcacctgaggtcaggagttcaagacc

SEQ ID NO: 506279 - DNA, 201 bp, Homo sapiens
cagctgtgttcttttgcttcaattacagagcttgttagaatttctcttccaaatccctgttttggggcttttcttttcttttttcttttttttttttttttgaaatggagtcttgctctgtcacccagactggaggacagtggcgtgatctcgactcactgcaacctccgcctcccggattcaagcagttcacctgcctca

SEQ ID NO: 506280 - DNA, 201 bp, Homo sapiens
ctcacgggtcatacaggttggctgagagtaaatggcaaggaagggcctgagagactccgggcacagctgacctaggaaagggagtctgtcatcctggcccrtcgctttacaatgggagtgcgagggctgggcccagagaccctgtcttgcctcccatgaccccaggaagctgcaggcctgtggctccccagggtaaccttc

SEQ ID NO: 506281 - DNA, 201 bp, Homo sapiens
ttccaagagaatgctcctaaacaaacatcctgccctaatccagagactaggttggtgcttattggggggcggtgagtgggggagccgaggatttcctgtgsaggcctcagactctagcccaggagtccaggccaaggaagtgcctctgcccagactttcagccccttgaagcccagttcttcgtcatcacttggtgtgggg

SEQ ID NO: 506282 - DNA, 201 bp, Homo sapiens
ggcagggctgtcccagctgaggcccaagcccagcccaccctttcttctcagttctgccaagaaggccatgggggctggtggaggcccgaactgcctccccgcccccggggagacacagcatgccagctgctgccgggatgggttacaaaaaacaaaaacacaaaccccagccccttgagatgagggacgtttcggtttctg

SEQ ID NO: 506283 - DNA, 201 bp, Homo sapiens
caggactcaggattagaggacctacagctttcagcctcggctcaccatctcctagccctgatgacccacagcctccccaagccttggtttcacagcctgtraaatgggttcatgagcctacttttcatagctacactgtgtgtttgtatataacccatggctatcactattacctgcggaccgcggtgctatgaagtcagg

SEQ ID NO: 506284 - DNA, 201 bp, Homo sapiens; identical to SEQ ID NO: 498923

SEQ ID NO: 506285 - DNA, 201 bp, Homo sapiens
aacatgaggcctgctgcccctccccctcggaacaggaactggccataaagctcagggaaaagaggcgggcagggtctatctggctgctgtccaaagctggkctcggcaaggggcctcttttttctttgcccttgaatatgggtattctcgaaagggcaacaatttattctatctgtgtactctgctagggatgcagtggtg

SEQ ID NO: 506286 - DNA, 201 bp, Homo sapiens; identical to SEQ ID NO: 498924

SEQ ID NO: 506287 - DNA, 201 bp, Homo sapiens
gcgggcagggtctatctggctgctgtccaaagctggtctcggcaaggggcctcttttttctttgcccttgaatatgggtattctcgaaagggcaacaattyattctatctgtgtactctgctagggatgcagtggtgagcaaacaggcaaggtctctgcccttggagaatgtaatctaactgggatgccagaatctaactg

SEQ ID NO: 506288 - DNA, 201 bp, Homo sapiens
gaattaatgtctgtcaagtagctgctataggccggacactgatctagattctttgaattcagtgacccactgagaaatagcattcctctccccattttacrgacagggaaactgaggcttatgaaggtggctgctttcccaaggcctcgcacctataaggagtggtagtgggatttgaacccagatgcgatgagtccaaag

SEQ ID NO: 506289 - DNA, 201 bp, Homo sapiens
ccagatgcgatgagtccaaagctcacactccatccattgaaccactctgccacccagctcctaagacctaccagaaaagtaaagcaggagctacagaggtrggtgagccactggacagcctggtggcttctagataaaaatcagagctaaaacaccagctcatttccattctccttgcacaagttcttctgctggctgaca

SEQ ID NO: 506290 - DNA, 201 bp, Homo sapiens
attatgagagcatcttcagcactcataagcatcgcaggctggatctctttctctgacctttggatgtggggtgccagaatctgtgcttaaagatgagggakgtcgggcttctgccctcaaagaactctggatctcgagggagcagtgggcctaagcatagagtattctaatacggtcgctaggcttccagagctgtaagag

SEQ ID NO: 506291 - DNA, 201 bp, Homo sapiens
ccaaagctcacactccatccattgaaccactctgccacccagctcctaagacctaccagaaaagtaaagcaggagctacagaggtaggtgagccactggasagcctggtggcttctagataaaaatcagagctaaaacaccagctcatttccattctccttgcacaagttcttctgctggctgacaaactggaagccagcc

SEQ ID NO: 506292 - DNA, 201 bp, Homo sapiens
agataaaaatcagagctaaaacaccagctcatttccattctccttgcacaagttcttctgctggctgacaaactggaagccagcccttctttgggtagcastcttccaaagagtgatagctgcaagttcttggctacattctgagttggaggttcagcccactgcatggagcagcaggtaggaagttggtgcctgtaggtg

SEQ ID NO: 506293 - DNA, 201 bp, Homo sapiens
tgtcctccagtgcaagaattggcaggcaaatggggatgtgtgtgaacggtgtgactatgaacatgggtgatcgattacggacatgcaagatggaaaattgsttgtggcatccagataagggaaaacaagtaggacaccagattgtatacactgtgatcaaaaccatgtgaaaaacacatgcatgaagaggactgggaagaa

SEQ ID NO: 506294 - DNA, 201 bp, Homo sapiens
tattttgtagaaatggggtttcacaatgttgcccagggtggtctcgaactcctgagctcaaatgatcctccctccttggcctcccaaagtgctgggattaygggtgtgagcccctgcgccagtcagcagtgaattcctgcctggagctggtcatgggggatttctgcactggcttaccccctgctctaggtcctgcccttg

SEQ ID NO: 506295 - DNA, 201 bp, Homo sapiens
tatttgtgggatttgcctttgtcaaatggaagcacaacagtgattttataggctgctggtggctaggttaaatatctgccccatgcctctttgtttttgatttttttttttttttttttttttgagatagagtttcgctctgttgcccaggcttgagtgcagtggcatgatctcagctcactgcaaccactgcatcccggg

SEQ ID NO: 506296 - DNA, 201 bp, Homo sapiens
atttgtgggatttgcctttgtcaaatggaagcacaacagtgattttataggctgctggtggctaggttaaatatctgccccatgcctctttgtttttgatttttttttttttttttttttttgagatagagtttcgctctgttgcccaggcttgagtgcagtggcatgatctcagctcactgcaaccactgcatcccgggt

SEQ ID NO: 506297 - DNA, 201 bp, Homo sapiens
tttgtgggatttgcctttgtcaaatggaagcacaacagtgattttataggctgctggtggctaggttaaatatctgccccatgcctctttgtttttgatttttttttttttttttttttttgagatagagtttcgctctgttgcccaggcttgagtgcagtggcatgatctcagctcactgcaaccactgcatcccgggtt

SEQ ID NO: 506298 - DNA, 201 bp, Homo sapiens
tcgacatgggggcttcacccctcatatccttgggttttagggtactgtgacctcttagaggagggagatcctcacacaggggccaccctgtggcagtcagrcccacctcagccctcagcttatagaagcagaggcgtggctcccaggtcaggtgtaggtgcacccgggcctggggaatggatcaagagagcgagggttgtc

SEQ ID NO: 506299 - DNA, 201 bp, Homo sapiens
cctgggcacgtgggcacattggcactatttagaagatcatgttagaggcaggtacagtggctcatgtctataatcctagcatttcggggggctgaggcagraggatcacttcagtgctggaggttgagacaggagtgagccatgattgtgtcacagtagcctgggcaacagagcaagaccccatctctaatcaaaaagaaa

SEQ ID NO: 506300 - DNA, 201 bp, Homo sapiens
agctgtgtgaatatagtgactaatcatagactctcgggattgaaatgtaccctggggggatccaggatgcagcatcacccgggagcttattattaatggaracgaagtatctctcacagcaccctagacctgctgaagcagaatctgcattttagcaagatccccgggtgattcctcagcacatttgagaagcagcgctct

SEQ ID NO: 506301 - DNA, 201 bp, Homo sapiens
gtctccttacgcccatgaagatgcccacgcacagccacgctggcctagagatgaaagaggttctgggggtgggtggggacaggacgagggtccgagtttgtgaacaagctttgcaggcatgtttccagggccccagtttcccaggtggcagggcacctagcagtcgattctcccctaagaactggcatcaaggagtccagc

SEQ ID NO: 506302 - DNA, 201 bp, Homo sapiens
tctccttacgcccatgaagatgcccacgcacagccacgctggcctagagatgaaagaggttctgggggtgggtggggacaggacgagggtccgagtttgtgaacaagctttgcaggcatgtttccagggccccagtttcccaggtggcagggcacctagcagtcgattctcccctaagaactggcatcaaggagtccagct

SEQ ID NO: 506303 - DNA, 201 bp, Homo sapiens
tccttacgcccatgaagatgcccacgcacagccacgctggcctagagatgaaagaggttctgggggtgggtggggacaggacgagggtccgagtttgtgaacaagctttgcaggcatgtttccagggccccagtttcccaggtggcagggcacctagcagtcgattctcccctaagaactggcatcaaggagtccagctcc

SEQ ID NO: 506304 - DNA, 201 bp, Homo sapiens
ccttacgcccatgaagatgcccacgcacagccacgctggcctagagatgaaagaggttctgggggtgggtggggacaggacgagggtccgagtttgtgaacaagctttgcaggcatgtttccagggccccagtttcccaggtggcagggcacctagcagtcgattctcccctaagaactggcatcaaggagtccagctcct

SEQ ID NO: 506305 - DNA, 201 bp, Homo sapiens
ctgtggctgctggagggcggagactgttgtcttcatctctctagctcctaggagaatggtgtgctgtccatgtttgccaggcagaaaagccttgcaaaacmtcagtcactctacagtgacctcagagcttgagcctggtcaactggaacagcagaaagaaggaagctggaaatggcggatggcttcaaggacgtgagccat

SEQ ID NO: 506306 - DNA, 201 bp, Homo sapiens
cttacgcccatgaagatgcccacgcacagccacgctggcctagagatgaaagaggttctgggggtgggtggggacaggacgagggtccgagtttgtgaacaagctttgcaggcatgtttccagggccccagtttcccaggtggcagggcacctagcagtcgattctcccctaagaactggcatcaaggagtccagctcctc

SEQ ID NO: 506307 - DNA, 201 bp, Homo sapiens
aaattctgtgttgattcttacatggaatgcagggacgaacaggaagtaaaatgtagggtgaagcatctgataggaaatcccatgataaaggtgggattggmgaagaaatacagacttagtgtataagtgaataagaaataaaataaagccaagaagaaatacagacttagtgtataagtgaataagaaataaaataaagcc

SEQ ID NO: 506308 - DNA, 201 bp, Homo sapiens
aagagttaataggaatgtaaaaaggttgctcaatagactgttaatatataaatgtattaaattttatccaacagcaacaatatattataattatcaatatraaatattcagttttaataacatcaaccagtaaaagtgcctaagaataaatccaacaaatttcaactttttgatataagaaagcattaaaatacaattcaa

SEQ ID NO: 506309 - DNA, 201 bp, Homo sapiens
cagctgtgatggcttggagaaacagtgtaaaccggcagtgtaaacaagcgcagggcatgtatgagtagttgggaatgatgaataggagtatgactagacakaagatagtagggatgacaagttttttggggcacagtccaagttgttctggtgtctggaatgagactggggcttagtaaaaaggagcgtccatacaggagc

SEQ ID NO: 506310 - DNA, 201 bp, Homo sapiens
ttggctagatcctcttgagtaatagaaaataaattttaaccaatttaatacttaggagaatatgtatttttaaaaagagttaaatttcattgccatctgtraatttaaacatgataccaggcactgtaataattaatattgtgtggaatgaaaactaggaatagttggccatttcctaagtgaaacttgtacatccaatgt

SEQ ID NO: 506311 - DNA, 201 bp, Homo sapiens
ggtattcgtctttaataaccagtagaacgactagcacatagagagtactaataaatattgttaaatgaatgaatgaggaattagtgcaaataaatggactyagtatctatatttaacccacagggcaagtgtgtttacctcctaataattcacacagatacattaaggtctaatgttaagatcttcactacgaatctcagt

SEQ ID NO: 506312 - DNA, 201 bp, Homo sapiens
tttccaagaagtacctttaaatatttatttataaaaacttgtttattggtctggcacagtggctcatgcctgtaatcgcagcactttgggaggccaaggcrgatggatcatttgaggtcaggagtttgagaccagcctgaccaacatggtgaaaccccatctctactaaaaatacaaaaattagccaggcattatggcggg

SEQ ID NO: 506313 - DNA, 201 bp, Homo sapiens
ttctctgggacctaaatgtgaagtgagctgtttatctctaaggctgatcctagcagacctttcttagctaggtaaggccaaatgggagtgggctttgatgkagttgaatgctgaaaattgaacttagttgtgggtaatttcactcacaggtctaaattcattaaattcttagtcaagcaatctaaccagaaaacccaaatt

SEQ ID NO: 506314 - DNA, 201 bp, Homo sapiens
aaatgggagtgggctttgatggagttgaatgctgaaaattgaacttagttgtgggtaatttcactcacaggtctaaattcattaaattcttagtcaagcartctaaccagaaaacccaaattaaagagaagaatagagtaagacattggttgagacaggaatatggttagaaaaaaagatgagacatttgatttgggccag

SEQ ID NO: 506315 - DNA, 201 bp, Homo sapiens
ctagcacagccggctcattttcttggccatatccatagcctgtttagattgtggctacaatctgtttgaaactctgctgggggaaaactatagggaatttytgaatcggcgatgccagggtaatctggttgtgttctgtcaatatggccaccaccctgcttcaaattctgtggcaaaactgttaaactgtggaagactcaa

SEQ ID NO: 506316 - DNA, 201 bp, Homo sapiens
ttctccttgtacaggacaaacaaaacttttttgtttgttttttctgaaactgagtctcactctgtcgcccatgctgcagtgaggtgagtggtgagatttargctcactgcaacctctgcctcctaggctcaagtgatcttcccacctcagcctctcaagtacctgggactactggcaagtgccaccatgtccagctaattt

SEQ ID NO: 506317 - DNA, 201 bp, Homo sapiens
tttaattagtataaatttcttaattagaaaagtctttcatattactttgctctgaaattgaaattctctatattgggccactaaaattaatcaagtaacawtttttttaaaaaacagtagattctcaggtcacatctatgaaacaaccatgtaataaaatagttttctaaagtataaataagcttataggcttaaaaattg

SEQ ID NO: 506318 - DNA, 201 bp, Homo sapiens; identical to SEQ ID NO: 122789

SEQ ID NO: 506319 - DNA, 201 bp, Homo sapiens; identical to SEQ ID NO: 122793

SEQ ID NO: 506320 - DNA, 201 bp, Homo sapiens; identical to SEQ ID NO: 122796

SEQ ID NO: 506321 - DNA, 201 bp, Homo sapiens; identical to SEQ ID NO: 122798

SEQ ID NO: 506322 - DNA, 201 bp, Homo sapiens
ctgagggaggagaattgctggaacctgggaggcggaggttgcagtgagccaagatcgtgctaccgcactccagcctagcaacagagtgagaccctgtttcaaaaaaaaaaaaaaaaaagagttaataggaatgtaaaaaggttgctcaatagactgttaatatataaatgtattaaattttatccaacagcaacaatatat

SEQ ID NO: 506323 - DNA, 201 bp, Homo sapiens; identical to SEQ ID NO: 122801

SEQ ID NO: 506324 - DNA, 201 bp, Homo sapiens
atggaaatgatgttaaagaaaaagaaaattcgagtgattttcttatttgaggtcaaaatgggtcataaagcagtggagacaactcgcaaaatcaacaacayatttggttcaggaactgctaacaaatgtacagtgcagtggtggttcaagaagttttgcaaaggagaggagagccttgaaaacgaggaaaacagtggctgg

SEQ ID NO: 506325 - DNA, 201 bp, Homo sapiens
tcccccaaaaaatgcattccagaaaagccaacagtatgtgaaaaggcagacatcctagagagaacagactttttaaataactggatgaaactgataatttkctggcaattgccatttaattacctaaactctttggaagaagaaaactattgtaggggaaggatgaggagaagttggctaatgggtacgaaaatacagtta

SEQ ID NO: 506326 - DNA, 201 bp, Homo sapiens
ctaaaaatacaaactctcaagcaattaatttgtgattattacagaaaatagcaggttcacaagcattagttgacagattcccacaaatgaaatttgcaatrtaaagatcttaacaacaaattgcattaaataaaaaccacaatcgccgagtctctagataacttcaaatagttcaaaaagtcagtgtctgagtgtgcaaat

SEQ ID NO: 506327 - DNA, 201 bp, Homo sapiens
atatgtcaattttaaaaataaggaaaaagtgagggaggagaaagaaagagagaaaagaaatagaaatattaaacatgagacagtataaaggggttcaggargacccaggctggagaggtggcaggttatagtaataagcagggtgttcttataagacctcattgtgaaagtgacatgatcagagatttgaagatggtgatc

SEQ ID NO: 506328 - DNA, 201 bp, Homo sapiens
ggccagatttccggcacttgtagcaagctcctgggggaggaggttctggaggaacacctggctgctgcagttcaggtgtttggaagttcttgtgtgctggwgatgtggctggggtttgtctcccagtggaggcaaggaattgcaacttttttctattattgtacaccttgaaggtgaggttaattaagtcctgttgtgggg

SEQ ID NO: 506329 - DNA, 201 bp, Homo sapiens
aggtgctcagtaggggagcttttgagccaggatgagccaggagaaggaacttcacaagataatgtcatcagttaaggcaggaacaggccattttcatttcktatgtggtggaatgtcatcagttaaggcaggaaccagccatctggatgtgtacgtgcaggtcacaagggatatgatggcttagcttgggctcagaggcct

SEQ ID NO: 506330 - DNA, 201 bp, Homo sapiens
gcacagtgcctaatagtgctaaagaaatattgctgtatgtatgaacgaataaataaaagttaaaaattcataatgctatgactaagtgcaatgaaaaataygaagaacatttccaagaagtacctttaaatatttatttataaaaacttgtttattggtctggcacagtggctcatgcctgtaatcgcagcactttgggag

SEQ ID NO: 506331 - DNA, 201 bp, Homo sapiens
ttaaaggccaagtggaagagccagagggcctcctttatagatacatagagctgagcagcagaatgaagctttgatagtttgattaacagagctccagaagyatttaaatgagctggcaaggcaggtgtgttatgataattctaggactctggcgagtaaaatctggggccctgaaatgtgaaatgggaacagaaatatgga

SEQ ID NO: 506332 - DNA, 201 bp, Homo sapiens
gcaccctcaagagctaccctcacgttctctcctggccactaggtcaatagctagagttaaatctaggttggggatgtgctgggcctgaaaagtgagaaaasagattatacaccaatagagctgcaagaatttgcatatttcagaagagaaaggtactatggactaaactgttcccttcccaccaccaaattaatatgttga

SEQ ID NO: 506333 - DNA, 201 bp, Homo sapiens
gcccagaaataaaaaaggcaggtggtggcttaaccaacagaagttaacaggtgctaccacaataattgataagtttggaaggaaagaggaaagggcttggytcacagcaaattatggagatggttcatagagcatgatcaccatactgaaaaaataaggagtcacttaatatatataactaggaaaaaagacagtgagcac

SEQ ID NO: 506334 - DNA, 201 bp, Homo sapiens
gaactatcaagcctgtcaatttgctttttcacctagaaatattttggaaagataagtgtgtatgtcagtttgcaaaacagcatgactcccttagcctttgstcactttattctgagccaaaagagctgatagcatctgtttccactacccatgccatcccatcatcaaaaaaaaaaaaaaaaggcataaagtttgggaagg

SEQ ID NO: 506335 - DNA, 201 bp, Homo sapiens
tttctagggaacacagtaggagcaagggaagggcagaggggcttatttcatataagggcttcttgtcgcctgaactatggttgaagttccctcacagaacrgagcagctggtcacagctctgcccaggcatttctgtgtctgcatcttcctgctgtacttgcatatcaagaagcatttcagaccacaggaatgcaggattc

SEQ ID NO: 506336 - DNA, 201 bp, Homo sapiens
ggattgacccacgaggtaagcctgcaagatgtcctgatatgacagatgagagtgaggacaatttcagatggacagtggaaagggaaaaaggtgaatacagktgtggccctgagactacctgcacgatggaggctactgttcattctgccaacctccatcttccattcccactcaggaagaaagacccacaggaaccgcaag

SEQ ID NO: 506337 - DNA, 201 bp, Homo sapiens; identical to SEQ ID NO: 122785

SEQ ID NO: 506338 - DNA, 201 bp, Homo sapiens; identical to SEQ ID NO: 122786

SEQ ID NO: 506339 - DNA, 201 bp, Homo sapiens
caagatgtcctgatatgacagatgagagtgaggacaatttcagatggacagtggaaagggaaaaaggtgaatacaggtgtggccctgagactacctgcacratggaggctactgttcattctgccaacctccatcttccattcccactcaggaagaaagacccacaggaaccgcaagaaagacccacaggagcagcttctt

SEQ ID NO: 506340 - DNA, 201 bp, Homo sapiens
tggaaagggaaaaaggtgaatacaggtgtggccctgagactacctgcacgatggaggctactgttcattctgccaacctccatcttccattcccactcagraagaaagacccacaggaaccgcaagaaagacccacaggagcagcttcttccccacctgtgtatctgtgagacacaggggactgactctggtggcaatgaa

SEQ ID NO: 506341 - DNA, 201 bp, Homo sapiens
  misc_feature (1)...(201): n = A,T,C or G
gtctggctttaaaatgatagacagtgctaatggcagttaaactaactttcttcttatttcatggcctactagtcaatgttatctagctggtaactattaancttttagattataatatatgaacatgttcgtttcataaatgtaagttagactgctgtatgtgatagtgtggcagatattctgaatgcttctgactaaaat

SEQ ID NO: 506342 - DNA, 201 bp, Homo sapiens
ggtgaatacaggtgtggccctgagactacctgcacgatggaggctactgttcattctgccaacctccatcttccattcccactcaggaagaaagacccacrggaaccgcaagaaagacccacaggagcagcttcttccccacctgtgtatctgtgagacacaggggactgactctggtggcaatgaaaaagcactgctcag

SEQ ID NO: 506343 - DNA, 201 bp, Homo sapiens; identical to SEQ ID NO: 122791

SEQ ID NO: 506344 - DNA, 201 bp, Homo sapiens; identical to SEQ ID NO: 122794

SEQ ID NO: 506345 - DNA, 201 bp, Homo sapiens; identical to SEQ ID NO: 122797

SEQ ID NO: 506346 - DNA, 201 bp, Homo sapiens; identical to SEQ ID NO: 122799

SEQ ID NO: 506347 - DNA, 201 bp, Homo sapiens; identical to SEQ ID NO: 122800

SEQ ID NO: 506348 - DNA, 201 bp, Homo sapiens
ctttatgtttacaacttctcaaggaccatgttatttcttttctttatccattttctagtaaagtatcctctgtaacactatttacctcttcccagtttctstcagtgattctgtcttctctttcagaatcttcatttgtgacctatgttagaaaaatacttaaatggatagcccttaacttattcaaaattttaaccaatt

SEQ ID NO: 506349 - DNA, 201 bp, Homo sapiens
tctccttacttttccttaaatttgatgaccagactatcacctcaaaagatgtgctctcattatgtttttttgcttggaatactctctttccatatatattyatgtgcgtctatgtgaagagaccaccaaacaggctttgtgtgagcaacagcgctgtttatttcacctgggtgcaggtgggctgagtcccaaaagagtcag

SEQ ID NO: 506350 - DNA, 201 bp, Homo sapiens
aattatatcagaaagatgacggaaggagaagtagggttttactcaaatgataaatccttatctgttattagttaatagataatctctaaaatttgtataayaataaagaacagtaaacacatattgaaagatacagatttgagtaatcactcgaaaaacaaatagctaaaagtagttgctcttaggagtgggtctggagat

SEQ ID NO: 506351 - DNA, 201 bp, Homo sapiens
  misc_feature (1)...(201): n = A,T,C or G
aactgataatctagttggttttctattctccattttctatgctcccctaactgaagaaatggtagcatctacagaactatcaagcctgtcaatttgctttntcacctagaaatattttggaaagataagtgtgtatgtcagtttgcaaaacagcatgactcccttagcctttgctcactttattctgagccaaaagagctg

SEQ ID NO: 506352 - DNA, 201 bp, Homo sapiens
atagataatctctaaaatttgtataataataaagaacagtaaacacatattgaaagatacagatttgagtaatcactcgaaaaacaaatagctaaaagtarttgctcttaggagtgggtctggagatggggagggagtgaaggggagaatattatattttcatatttgtgttagtattgtttaatattaagttggtatttg

SEQ ID NO: 506353 - DNA, 201 bp, Homo sapiens
aaagaggccagtttgtaaatgcaaatggcgagttgtgagcgtaagtgctccaaaagaaaaaaaatctttttttcttatattgtatggtggcgtttaagaargccacccatttcatattagatggagtcgctatgatgctgtatacatttcagttgtagtatacgtgttccattatgataaattatttttctaaaacatgga

SEQ ID NO: 506354 - DNA, 201 bp, Homo sapiens
gtgctttcctttaggtctaccaaaataattggcagcgtaaagaaaagaaatagcctcttaaccaatgcacaagatcactcaagtgcaaagttctgatgtayacactttctttagtacttgatttttcccaattccattatctgccagtgcctgccttcactcttcttcctatctaaacttttccccagcgtcactaatttc

SEQ ID NO: 506355 - DNA, 201 bp, Homo sapiens
  misc_feature (1)...(201): n = A,T,C or G
atgactaaagcactccgctgtggaaattgtactaaaaaatctgagataaagggtcaggtcacttcttaccatgatccaaaaaccaaaggctttgatgccanatgtaaccacatcacaatatttcagagctgatttctgttccagaagaaaacagtcttggtaatttttatagttatctgaacctcaaaggtcttcaaggct

SEQ ID NO: 506356 - DNA, 201 bp, Homo sapiens
  misc_feature (1)...(201): n = A,T,C or G
tcacagaaagcttccccgaagaagaagcattcagggtttgagtgggagctggcaggtgaaatggagaaaggctgttaggaagaggaactagcagggcaaangcatggcgtggaaaggagtcaggcacaaataggaataaaggagtagtgaaattagtgtgcagtgagcaggggaatgggaagctcacaatgaggctgaaga

SEQ ID NO: 506357 - DNA, 201 bp, Homo sapiens
ttaactccctttaccccaagcacattttaggcaatgtaaaaatataagaaaaaatttcagttttatcatcattgattatatatatactctgtcagatacaytactagaagatgggcatataataattaataaaacaaattacctgtgtcttagcttgaagtactctgaatgcataacctagaaaaagagcttgcatgcaga

SEQ ID NO: 506358 - DNA, 201 bp, Homo sapiens; identical to SEQ ID NO: 122788

SEQ ID NO: 506359 - DNA, 201 bp, Homo sapiens
ccttaagtgagagcggaatcagccctcagtttctccatttgtccctaattattgtagtttctcagggtaattaaatttgaaatattttagtttgttcatcraacctacagtatattaaaggtaaaatatgtaggacagcatctaaacaatacccaattgaacgggatacaattctcattcaattaataaaagattgtttga

SEQ ID NO: 506360 - DNA, 201 bp, Homo sapiens
agagactctgtctcaaaaaaaaaataaataaataaattaaataaataaataaataaatataaaaataaaaaaagtaaataaaataaaatattggtgatatwgttgcttatattacttggcttcaagtccttggagttctatgaagccacatttggaaacctctgtcacagtggcaaaatgttgtatttattcttacatcaa

SEQ ID NO: 506361 - DNA, 201 bp, Homo sapiens
gacactgcttgatcactaccactctgctgtcctacaaataaagtgttacacccaaggctgtaggttgtatcaacttttgaatgctgggggatagtatatcrtcctggggaagtcaatgataagcactgtgatctgaactaattggcctgaattaagatgtggaagccggcagtgaaaagcgaaacacactggcagaaaaaa

SEQ ID NO: 506362 - DNA, 201 bp, Homo sapiens
aatacccatcccttttataaaccacttctcaaaatcttagcaagcattctccactcaagttatatgaatcagtttgaaaaaatggaattataacacggggktgttagcactagaatgtgaacccaacaatttggatctgtctcaaggtcaaaaactacatccttgatcccaggcagctatcagtgcagattcattattttg

SEQ ID NO: 506363 - DNA, 201 bp, Homo sapiens
acaagacatcgaatacccatcccttttataaaccacttctcaaaatcttagcaagcattctccactcaagttatatgaatcagtttgaaaaaatggaattrtaacacgggggtgttagcactagaatgtgaacccaacaatttggatctgtctcaaggtcaaaaactacatccttgatcccaggcagctatcagtgcagat

SEQ ID NO: 506364 - DNA, 201 bp, Homo sapiens
ttctggctggtcatatcaaatctataaaactgatttcctaagtctcaataatatctctgtagcaattagacttttctttaaatcagtaattttacaagacwtcgaatacccatcccttttataaaccacttctcaaaatcttagcaagcattctccactcaagttatatgaatcagtttgaaaaaatggaattataacacg

SEQ ID NO: 506365 - DNA, 201 bp, Homo sapiens
caaatttcaactttttgatataagaaagcattaaaatacaattcaagaatatgtttatattggaatttacccaatgtttatggattggaagacttagtatyataaaaagatgaacgtttttaaattttcctcaaaacaacaacataaattttctacagaatttgacaggctaaatctaaaatttgcatggaaaagaaaacc

SEQ ID NO: 506366 - DNA, 201 bp, Homo sapiens
agtgtttcctaactaggaaagatcttaagggtaactgttcgcactttcagctgtgatgaagtggtgaaaactgatgtcaaaacctcagcactgaggttatrgaagacaactgacagctctggagttcaaagactagtgtgctttcttccactggctataagtatcaaaattaataaaaatcctgaaagtaaaatattctga

SEQ ID NO: 506367 - DNA, 201 bp, Homo sapiens
tgccaagtaccaagcactgtcataaatgtttagggtatctttgtgaaggaaaaatatacctgtccttgcagggtttatctagaaggatatggaaatgtctkttttttttttttttgtctctttccaattcatcatctacaaaatatccagagtgatcatttcaaggagaattctgatcttgtcacttgctacttaaaacct

SEQ ID NO: 506368 - DNA, 201 bp, Homo sapiens
ctcgcaaaatcaacaacacatttggttcaggaactgctaacaaatgtacagtgcagtggtggttcaagaagttttgcaaaggagaggagagccttgaaaaygaggaaaacagtggctggctataggaagttgacaatgaccaactgagagcaaccatggaagctgatcctcttacaactgcgtgagaagttgccaaggaac

SEQ ID NO: 506369 - DNA, 201 bp, Homo sapiens
gaagtgctatttactggaatggagaggtctggaaagtggcagattaaggaaggtcgtgagttttgttgcagacttgttaagcataagatgatgccagtgarccttccaaaagagatgttacctagaaatgtgcagatatagatcacaagctgtggtttttttttccctaagaaaaagattgatatgtcagagtagctggaa

SEQ ID NO: 506370 - DNA, 201 bp, Homo sapiens
  misc_feature (1)...(201): n = A,T,C or G
agaagtaggcgggctcaaagaattgctgtttcaatagccatattcatttatgcaataaatatttattgagaatccactatgtcgtaaactgtattctaaancactgggtgaaaggttaacgaacaacaacaaaaaatctttaagtacctttattttgtattctagttggaaatggtaatgctaattcacagtgtgattttg

SEQ ID NO: 506371 - DNA, 201 bp, Homo sapiens
tggaggaaggggccatgaaccaaggaatgcaagtgaccactgaaagctggaaaaggcaagggcacagactctatcctggagccttcagaggaatatggtcytgcccaaattttggaattctgacctccagaactgtgagataataaattgtgttagtttaagcctccaattatgagataatttgctatagcagcaacagaa

SEQ ID NO: 506372 - DNA, 201 bp, Homo sapiens
gaataaatgtgcctgggagccaggagtggaagcagtaatagccccattaatcatcactcccattgacccactggggaattttgagcttctcctcctcctcytcacaatgctgggctctgcacacttgcaaagtcgaggtcccactgaactacaagctatggctgctgccagaagactatggacttctttgtatctgggaac

SEQ ID NO: 506373 - DNA, 201 bp, Homo sapiens
gtagaagaaaatccacatataactggacccacacagttcaaacccacagcatttaaagctcaactataatttaatcatcataacaacatgataaagaggayatattattattatccttacttcataggtaaagaactaagaatcttgagagctttactaactttcccaaagtcacacagctattaaaagatgtcagcagga

SEQ ID NO: 506374 - DNA, 201 bp, Homo sapiens
aatgtctagaataaagattatgtatttttataattttctctttatacttagcacggtactggataaatggaaagaactcaaaacatatatattgaatatamgaggattaaggtagaagggaaaagagagagactaccctgactcttggtaaggcaaaaattaaactggaattaacttgaacagggatggacactaatttaa

SEQ ID NO: 506375 - DNA, 201 bp, Homo sapiens
gcctgggcaacagagcaagactatcaataaataaataaatagataagaaaatgcagtgttcacaggatatgaaacccatgtatagaaagggccaatgttttatatatatatatatatatatatatgtatatgagttatgcagggctgaccctgaaacttccacatataccaagggatgactgttgataggagaattgactc

SEQ ID NO: 506376 - DNA, 201 bp, Homo sapiens
cctgggcaacagagcaagactatcaataaataaataaatagataagaaaatgcagtgttcacaggatatgaaacccatgtatagaaagggccaatgttttatatatatatatatatatatatatgtatatgagttatgcagggctgaccctgaaacttccacatataccaagggatgactgttgataggagaattgactca

SEQ ID NO: 506377 - DNA, 201 bp, Homo sapiens
ctgggcaacagagcaagactatcaataaataaataaatagataagaaaatgcagtgttcacaggatatgaaacccatgtatagaaagggccaatgttttatatatatatatatatatatatatgtatatgagttatgcagggctgaccctgaaacttccacatataccaagggatgactgttgataggagaattgactcat

SEQ ID NO: 506378 - DNA, 201 bp, Homo sapiens
tgggcaacagagcaagactatcaataaataaataaatagataagaaaatgcagtgttcacaggatatgaaacccatgtatagaaagggccaatgttttatatatatatatatatatatatatgtatatgagttatgcagggctgaccctgaaacttccacatataccaagggatgactgttgataggagaattgactcatg

SEQ ID NO: 506379 - DNA, 201 bp, Homo sapiens
gggcaacagagcaagactatcaataaataaataaatagataagaaaatgcagtgttcacaggatatgaaacccatgtatagaaagggccaatgttttatawatatatatatatatatatatgtatatgagttatgcagggctgaccctgaaacttccacatataccaagggatgactgttgataggagaattgactcatgc

SEQ ID NO: 506380 - DNA, 201 bp, Homo sapiens
taaagatcttgataggagcaaactccaagtaaaatgttaaagtgaacaattttgtatttggcacttgatcatctacctctctcttgatgtttcatcttctcttatgtagttttacagagctaactacaggagttgggtttctcagttgtttgtttcacctttgcaaattgaggctttagctagcctaggagtaatcatgaa

SEQ ID NO: 506381 - DNA, 201 bp, Homo sapiens
ggcttgtcagatgattaacaaattttctaggtaaccatttatattatgttcaaataataatcatttaggttgtgcctttaaatcataagtattatttattyacttcttattttagtcttagtacattggctagatcctcttgagtaatagaaaataaattttaaccaatttaatacttaggagaatatgtatttttaaaaa

SEQ ID NO: 506382 - DNA, 201 bp, Homo sapiens
aaagatcttgataggagcaaactccaagtaaaatgttaaagtgaacaattttgtatttggcacttgatcatctacctctctcttgatgtttcatcttctcttatgtagttttacagagctaactacaggagttgggtttctcagttgtttgtttcacctttgcaaattgaggctttagctagcctaggagtaatcatgaat

SEQ ID NO: 506383 - DNA, 201 bp, Homo sapiens
ttggttaattggtacagatgcaaaattatgaacagaaagaaaaccttagagtgaatgcaaataaatgaatgaataaacaagattaagtactgggcaatgcwcttcactaaacaatactgaatggatggctaatgtaataaacccaaatggtaaaaggagatgccatttcttacaatagcttcttttcgatactttaggtat

SEQ ID NO: 506384 - DNA, 201 bp, Homo sapiens
tcttatatctatcctatatgagcgcaagttcttatatgttatttatatttcacctgcattttgttcaagagttgttctatgcttagtgaatcttatatatrtttatatttcacctgtgttttattcaagagttgttctgtgcttagacagttctatgcttagagcctaaccagctagattgcagaatatttcagctttcta

SEQ ID NO: 506385 - DNA, 201 bp, Homo sapiens
agaaaataaggcatttaggttttaggtcaggtgtgaattgaagaggttttaagttcttgagaacacaggctaagggagaaggaggaatggagggtggaagkttgcccatagtgaaggaggcaagcccagagaaaagagagagtagagacatggagggaagggtttgggggttcttaccctccagaaaagcgggaaaggggt

SEQ ID NO: 506386 - DNA, 201 bp, Homo sapiens
ctgaggcaggagaatggcgtgaacccaagaggcagagcttacagtgagccaagattgcaccactgcactccagcctgggccacaggagagactctgtctcaaaaaaaaaataaataaataaattaaataaataaataaataaatataaaaataaaaaaagtaaataaaataaaatattggtgatattgttgcttatattac

SEQ ID NO: 506387 - DNA, 201 bp, Homo sapiens
ttccgcatctcaattgatgaaaactccatccaattgctaagcataaaaaattattattattgtactattatatccaattattatcatgattattactaacycttgactcttacttttctctcataatttgcatacatccagcatatccttctaattggattcacccttttcttctgacattctattctcaatacagtagac

SEQ ID NO: 506388 - DNA, 201 bp, Homo sapiens; identical to SEQ ID NO: 122787

SEQ ID NO: 506389 - DNA, 201 bp, Homo sapiens
gtagtcccagctaatctggaggctgaagcaggaggatcatttgagcccaggagttcaaggctgtagtgaattatggtcatgccactgtactcctgcctggrcaacagagcaagactatcaataaataaataaatagataagaaaatgcagtgttcacaggatatgaaacccatgtatagaaagggccaatgttttatatat

SEQ ID NO: 506390 - DNA, 201 bp, Homo sapiens
accagaagaatctgcatggggctaccctgctgaatgagaaaatgtggagcagagcatttttatcaactcagccccttccagtttacccagccactagccasacacctgggagagcccagccaagatcagccaagcagtctagctcatttataaatggtaagtaaatcctgctaagccctctcttcacatcagcagaattcc

SEQ ID NO: 506391 - DNA, 201 bp, Homo sapiens; identical to SEQ ID NO: 122790

SEQ ID NO: 506392 - DNA, 201 bp, Homo sapiens; identical to SEQ ID NO: 122792

SEQ ID NO: 506393 - DNA, 201 bp, Homo sapiens
atcttgtgactttcatctgactaactccatctgaagtagttgtctatttatggaaggaggtgtcctttatttttgtttctagggaacacagtaggagcaarggaagggcagaggggcttatttcatataagggcttcttgtcgcctgaactatggttgaagttccctcacagaacagagcagctggtcacagctctgccca

SEQ ID NO: 506394 - DNA, 201 bp, Homo sapiens; identical to SEQ ID NO: 122795

SEQ ID NO: 506395 - DNA, 201 bp, Homo sapiens
agtgactgatgtgaaggagaaaaactggcagggacagaagttggaaagctggctgcttgtctagccaccttatcagcataagtgttgtctagagcaatggratctgatgccttttgatggcctttgcagtgaatgactccagcttcctttggaagtaaagcggtcttgagcagagtttttattaaagaggcattaatgatg

SEQ ID NO: 506396 - DNA, 201 bp, Homo sapiens
tgtgaaggagaaaaactggcagggacagaagttggaaagctggctgcttgtctagccaccttatcagcataagtgttgtctagagcaatgggatctgatgycttttgatggcctttgcagtgaatgactccagcttcctttggaagtaaagcggtcttgagcagagtttttattaaagaggcattaatgatggaggaccct

SEQ ID NO: 506397 - DNA, 201 bp, Homo sapiens
aattgctgggcaggtgggggagggttagttgaggaacgaaactgtaagccggaccgagtgtgaggaggggaggtgacaaaaggattatagggtggaggagyggaggctgaggaagaattgggacctagctcagcctggggaggaggggagagttcagatgggtctgtagaaaaggaatattagaaagactcagcgacactt

SEQ ID NO: 506398 - DNA, 201 bp, Homo sapiens
agacatctctctagggaagacatggtagcatatctctaattcacaggattaatttgtatgttattgctcccttttcaaagaccaaaatagaatgaggaggstgtggccagagaaatgacaactattaataatttcctatttcaattttgctatttaacaaaggaaacaactgctgagagaccaggaacttaggaaaaatgt

SEQ ID NO: 506399 - DNA, 201 bp, Homo sapiens
actggactagaacttgccagagcatgataagacctaggaataaggaattattccatgcacttgaagctttattgttttcatttaccctgaaaattactcarctaccgtttattggatgtggcttatttaggtgagtagagagaactgaattcggaggctttaaagaagatataggaaggtgaacaaaagatttatctttat

SEQ ID NO: 506400 - DNA, 201 bp, Homo sapiens
taatagcattgaagagtacctccttggaaatactgttttaaggtataacaagtctgttccactcccttgtctttttaagctatgtagatggaaaatctcawtctgcattttttcttatctcaaaaaaaaaaaaaaacctagaggccttacctttagaggtattatttttacttcccaatcaaaaattagtatgtaaaatca

SEQ ID NO: 506401 - DNA, 201 bp, Homo sapiens
tatttttacttcccaatcaaaaattagtatgtaaaatcaggagttgtagccccctctttagaatatagtattttcataattttggatacttggtgcatcartatttataaatttgtagtatcataataagtggctgcatactttctacctagaattcctttagcttaattattgtggtatagaccaggagtctccagatat

SEQ ID NO: 506402 - DNA, 201 bp, Homo sapiens
agtttgtctgcctcttagatagtgcctattagagtctcctattaggagctctaataattcttctaggaaagaaacctgtttaacaaacccccctcttcctstagaaagcctaatagcattgaagagtacctccttggaaatactgttttaaggtataacaagtctgttccactcccttgtctttttaagctatgtagatgg

SEQ ID NO: 506403 - DNA, 201 bp, Homo sapiens
aatcacacagaaaaacaaatggcttctcaataaaaaaatactccttctagttccaacaataatagagtcagaaacaggacttgactaaaactgcagttgcyattcctgctttccacctttttccaactttaaaagatttaaatacaatttgcttgtctttataaacaacagaactaatcaccatccggggtagcaaccagc

SEQ ID NO: 506404 - DNA, 201 bp, Homo sapiens
  misc_feature (1)...(201): n = A,T,C or G
atacacctgggcaagatccaaatactatgtaggtttagactgcgactgaagcaaagaaactaaactaacagtgatgaaactgagaggaaccagaagtaggngggctcaaagaattgctgtttcaatagccatattcatttatgcaataaatatttattgagaatccactatgtcgtaaactgtattctaaagcactgggtg

SEQ ID NO: 506405 - DNA, 201 bp, Homo sapiens
aactagtagaagttatgggaactctctctgaattctaaatttttttaaagaggaattgtagtatcttacaatgaatcatcatgttcattaaggatttgttmgagatagtgtgtttttattaaattacacagtttgacaagttcaaaagcagggtgagttacaggtaataatttttggttaatagttaataaactgtggcac

SEQ ID NO: 506406 - DNA, 201 bp, Homo sapiens
atttttatgtatcaacttgactgggccatgagatgcccagataattgtttttttaattatttctgagtatgtctgtgaaggtgtttctgaaagatattcaygtttgaacttgtaaatgagtaaaacagatagccctccccaatgtgggtggacatcacccaatccattgagggcctgaaggtgaaggaaagttgaattatc

SEQ ID NO: 506407 - DNA, 201 bp, Homo sapiens
tgagggcctgaaggtgaaggaaagttgaattatctctgcctgagtggttgagctaggagactgatctgccctccattgctgctggttctcagggcatcagwcacagactggaatctacatcatcagctttctgcatctcaggcaatactgactttcctgggtctccagcttatagacaggagatcatgaaacttctcggcc

SEQ ID NO: 506408 - DNA, 201 bp, Homo sapiens
ttgggacctagctcagcctggggaggaggggagagttcagatgggtctgtagaaaaggaatattagaaagactcagcgacacttggggttggaactgaggrgacaggcgggagggaaagaaggagcatttgggaggaatcacattgggaacagagactaaggagggaatgaagtgtgaaaaatgcctggatgtaaggcacc

SEQ ID NO: 506409 - DNA, 201 bp, Homo sapiens
agaaaaatttactcacacacagaaggataaagaagatggtgttagcattatccaaagacagatgagaaacagagacaaaatgaggcagaaagagttacatmcacacacacacacacacacacacacacacacataatagacccttgagcaacataggtttgaactgcactggtccatatacacaattttttttccaaccaa

SEQ ID NO: 506410 - DNA, 201 bp, Homo sapiens
tccattgctgctggttctcagggcatcagacacagactggaatctacatcatcagctttctgcatctcaggcaatactgactttcctgggtctccagcttrtagacaggagatcatgaaacttctcggcctccacagttctgtaggtcaataccttagaaaaatatctttatagacaaatgtagatacagatagatatcct

SEQ ID NO: 506411 - DNA, 201 bp, Homo sapiens
tgcgtggtcagacacctctgaaacgtgggtgataatcagagaggcatccctgcaatgattaaacatcaagggaaggctgccttcctgagttcatgaccggygccagagttatgggtccacggataaaacgtgtctccttggtctctaccagaaaatgaaaggaattgaaattaagagaagggagagattgaagggtggcgc

SEQ ID NO: 506412 - DNA, 201 bp, Homo sapiens
gctgtgggcttctgtcatgcttttcagatggtgcattagttcaaacatcccagattactgaaatgcatattattgatgtgagtaaacttccgtatagtctttttttttttttttgctgaattttgttgtatattggaaaaacatggaaaagagaaaaataagttctacacttagctatgattagctcagtgcctgtgaaca

SEQ ID NO: 506413 - DNA, 201 bp, Homo sapiens
attttacttctgaccactaataacttctgaaatctttagttgactgaaaagaaaatgtattttaaaacaaaacaaaaatatgtttactgatgcttctttcaattagtctttgctttttagaatgaagaatagagtacaatttgttttttattccaaaaatgcataaagtctattgaattccagctgacactgctaaaggca

SEQ ID NO: 506414 - DNA, 201 bp, Homo sapiens
ttttacttctgaccactaataacttctgaaatctttagttgactgaaaagaaaatgtattttaaaacaaaacaaaaatatgtttactgatgcttctttcaattagtctttgctttttagaatgaagaatagagtacaatttgttttttattccaaaaatgcataaagtctattgaattccagctgacactgctaaaggcaa

SEQ ID NO: 506415 - DNA, 201 bp, Homo sapiens
tttacttctgaccactaataacttctgaaatctttagttgactgaaaagaaaatgtattttaaaacaaaacaaaaatatgtttactgatgcttctttcaattagtctttgctttttagaatgaagaatagagtacaatttgttttttattccaaaaatgcataaagtctattgaattccagctgacactgctaaaggcaat

SEQ ID NO: 506416 - DNA, 201 bp, Homo sapiens
ttacttctgaccactaataacttctgaaatctttagttgactgaaaagaaaatgtattttaaaacaaaacaaaaatatgtttactgatgcttctttcaattagtctttgctttttagaatgaagaatagagtacaatttgttttttattccaaaaatgcataaagtctattgaattccagctgacactgctaaaggcaatt

SEQ ID NO: 506417 - DNA, 201 bp, Homo sapiens
tcctctgagagtcagtagttgattttcctattatttattttgaagcaaatggttttcggtctggagtgtgtgtgtgcacatatgtgtgtgtgtgtgtgtgwgagagagagagagagagaaagggagattccccatagtcttaactttgctttgcaaaccaactgttcaacaagacctgcaacattcagccttctgccacat

SEQ ID NO: 506418 - DNA, 201 bp, Homo sapiens
atctggaggtcaaattgccttagtgcgtcatacatcttagtatattatatatttctatgtagttggtgcaccactaaaggaaaatcccatgtttgagagattttttttttttggctgaaaagtatgtaaaaatgcatgatactttttgatcaatataaactacatgaggaagattccaggaaagtttttgacacatagtag

SEQ ID NO: 506419 - DNA, 201 bp, Homo sapiens
ttaagtgatttattaagtggcaggaactgtatgaatgaattcatttaatctttataacaaccctatgattagatgctattaatatacccattctgcaggtaaagaaactaaagcaaagagagatttactaattttgctcaaagacacagaactagtaaatagcagagtcaaaaatcaaaccaaaagaaacaaactgaaacc

SEQ ID NO: 506420 - DNA, 201 bp, Homo sapiens
ttccgccgatgtgttcctctcgccatccagcagcttctgtctctgccttgctagggtctcaggtttttataggcccaggatggggttgtggtgggccagarcggtcttggtaaatgcaacatttctgcctgtcctcacctaggtccgtgggggtagagccctagtcagggccctcctctacccaacacttcccttcccccc

SEQ ID NO: 506421 - DNA, 201 bp, Homo sapiens
ttacaatagaagggggataagaaggcaccaacatttacttagctccagttatgtgccaggtactctgcataacttaattgacatttattcattccttaacmaatatttttcaacagctggcacattacaaaaaagtgcactcttgtgataagcaaaaatagacatgctccctacattcatgaaaggtacatattccagtgt

SEQ ID NO: 506422 - DNA, 201 bp, Homo sapiens
ccatctgaagtagttgtctatttatggaaggaggtgtcctttatttttgtttctagggaacacagtaggagcaagggaagggcagaggggcttatttcatrtaagggcttcttgtcgcctgaactatggttgaagttccctcacagaacagagcagctggtcacagctctgcccaggcatttctgtgtctgcatcttcctg

SEQ ID NO: 506423 - DNA, 201 bp, Homo sapiens
aataacctggctagttgtatattcaaaataaagggcattggtaattgcaattataaacacgtggttcattttggtagagcaatgcttctcaacctgttcargtgatggaaaagcattaaggtcatcatgctgtaaaaggagacgtcaatatatctgattttattaactagatatattatcttaccatacattagttactat

SEQ ID NO: 506424 - DNA, 201 bp, Homo sapiens
gcctagttttcaagatcctaatgttttgcccgacattatatatcccaactttattcttctccgcaatgtagtcaggctaatctccttactccatctatacrtccaacagcagattgttctctttctattttagtctctaatttgggtttctgttgctatataaaaaaccaccccgaaacatggttatagctttttattgag

SEQ ID NO: 506425 - DNA, 201 bp, Homo sapiens
ctttcaatttttttataatgtatttttcccatacaaaagtgattaaaatgtttgaagtaaaatctgatatttttcttttgtgacttctgggttttattttrtactccttaatattctcaaatatttgcctttttttagtattttgctgcttcatgttttatgtaaatattcaatgtacctggaatttatctttttgaatgc

SEQ ID NO: 506426 - DNA, 201 bp, Homo sapiens
tgacagcagggaaagagatgcattctggtattactggaaaaacatagctgagatttaacatagaaaagatgagtgtaaataaataaaaaatgaataataakttttagaaaaaatatccagtaaagaaaattcaataacagtgaacagcttgtctttggcagacacaacatacatatcattacaatgtaaatactccttatt

SEQ ID NO: 506427 - DNA, 201 bp, Homo sapiens
accttgaattcctatagattttcacagatactctttccctgtgaccaggcatacccagaccagtgttggaaatggacctgagatccatttaaatatgtatmcacacacacacacacacacacacacacacacacaaacacacaaacacacatgtatatatatgaacaaattcaggaggaggattctctagactttcaatca

SEQ ID NO: 506428 - DNA, 201 bp, Homo sapiens
acacacacacaaacacacaaacacacatgtatatatatgaacaaattcaggaggaggattctctagactttcaatcaaggctctgccactaagccctgtgcctctgtaacagttagttaactccagggcctcagtgtttttctgtatgaaatggcctcatgtgactcacatcactattatcacagagtttgaatgaggatc

SEQ ID NO: 506429 - DNA, 201 bp, Homo sapiens
gcaagatccaaatactatgtaggtttagactgcgactgaagcaaagaaactaaactaacagtgatgaaactgagaggaaccagaagtaggcgggctcaaaraattgctgtttcaatagccatattcatttatgcaataaatatttattgagaatccactatgtcgtaaactgtattctaaagcactgggtgaaaggttaac

SEQ ID NO: 506430 - DNA, 201 bp, Homo sapiens
acaaactaacttcaccttatgaggtaagactccaataattttgtacttgtctccaacttagagtaatggtttcttccctagaaattgaacagaaggggccrggcgtggtggctcacgcctgtaatcccagcactttgggaggccaaggcaggtggatcacgaggtcaaaagatagaaaccatcctggccaacatggtgaaa

SEQ ID NO: 506431 - DNA, 201 bp, Homo sapiens
ggtcaaaagatagaaaccatcctggccaacatggtgaaaccccatctctacaaaaaatacaaaaattagttgggcatggtggcacatgcctgtagtcccarctatttgggaggctgaggcaggagaattgcttgaacctgggaggatgaggtttcagtgagccaagattatgccacttcactccagcctggtgagagagtg

SEQ ID NO: 506432 - DNA, 201 bp, Homo sapiens
ctgaggcaggagaattgcttgaacctgggaggatgaggtttcagtgagccaagattatgccacttcactccagcctggtgagagagtgagactccgtctcaaaaaaaaaaaaaaaaaaattgaacagaaggcattctagtttcttctaggctagtgtgttgaatgggattatataaacttaggtatctgccatgcggtctg

SEQ ID NO: 506433 - DNA, 201 bp, Homo sapiens
cccatttctactaaaagtacaaaaaattagctgggcatggtggcacactcctataatcccagctactcgagaggctgaggcaggagaattgcttggactcrggaggcagaggttgcagtgagccgagatcactccattgcaccccagcctgggcaacagagtgagactctgtctcaaataaaagaaaaaaaaaatcctgta

SEQ ID NO: 506434 - DNA, 201 bp, Homo sapiens
tcttctgttctgagacaaggcactgctggagaaaaggacacttcatttaaagtactaagaatgcaggccgaggtctaccttctgctctctggccttgggcaagtcacttagtgactctaagtcttatctttaaaacagaaatagggctaacttaattgccacaaagaataggcaagggtatcaaagtagcaaatgcaaatg

SEQ ID NO: 506435 - DNA, 201 bp, Homo sapiens
actgaactgcctggcataatcttgggtcggacaagcccctcgaagaaggctgtgggcagaatcaagcatgttgattaattctcttagaaaatgtagtcatrtattaagcaactgtcatgtgtttggacgctgatctggatattggcgtatcattgatggacaagctacagttcaaggagacaggagctatgaagactaaag

SEQ ID NO: 506436 - DNA, 201 bp, Homo sapiens
tttaaaatgatagacagtgctaatggcagttaaactaactttcttcttatttcatggcctactagtcaatgttatctagctggtaactattaaccttttakattataatatatgaacatgttcgtttcataaatgtaagttagactgctgtatgtgatagtgtggcagatattctgaatgcttctgactaaaataatcata

SEQ ID NO: 506437 - DNA, 201 bp, Homo sapiens
ctggcataatcttgggtcggacaagcccctcgaagaaggctgtgggcagaatcaagcatgttgattaattctcttagaaaatgtagtcatgtattaagcamctgtcatgtgtttggacgctgatctggatattggcgtatcattgatggacaagctacagttcaaggagacaggagctatgaagactaaagagagaatttc

SEQ ID NO: 506438 - DNA, 201 bp, Homo sapiens
gttctcccccatgcctggatatccacaagcattaccctaattagtgggcatttaagcagatttttaaaactccagttattttgccactattcaactaattsactgaaaaagaaggctaacctgaccagaagtacctgcagtgctgagcttcagcctctttgaaagagtagtccaagaagctgtgatagacgcatgcaaact

SEQ ID NO: 506439 - DNA, 201 bp, Homo sapiens
  misc_feature (1)...(201): n = A,T,C or G
gtctgtcttgttgtacaactccccagtcaccctaagtattgcattccagataacaaagtctttgtttggaatagcgcatgaatagtgtcttgtggagcaangcaagagctgggcaaggatgacgggattgtgttttcatattcaaatcccatgcaccttaccttacattttttccaacttgaaactgtagcaggaaattaa

SEQ ID NO: 506440 - DNA, 201 bp, Homo sapiens
actttctcactctcttttatacactgggattcaatttgtttaggcatattcagatctcattcccctacccttgtaaaacttttacttaaaacttttggtgycatatttttaatattggagaatagcttgatctaatatacatgattttgctttatatttattattcacagctctttctcttttcatctgaaacttagtaat

SEQ ID NO: 506441 - DNA, 201 bp, Homo sapiens; identical to SEQ ID NO: 486092

SEQ ID NO: 506442 - DNA, 201 bp, Homo sapiens; identical to SEQ ID NO: 486093

SEQ ID NO: 506443 - DNA, 201 bp, Homo sapiens; identical to SEQ ID NO: 486311

SEQ ID NO: 506444 - DNA, 201 bp, Homo sapiens; identical to SEQ ID NO: 485523

SEQ ID NO: 506445 - DNA, 201 bp, Homo sapiens; identical to SEQ ID NO: 486313

SEQ ID NO: 506446 - DNA, 201 bp, Homo sapiens; identical to SEQ ID NO: 486094

SEQ ID NO: 506447 - DNA, 201 bp, Homo sapiens; identical to SEQ ID NO: 486096

SEQ ID NO: 506448 - DNA, 201 bp, Homo sapiens; identical to SEQ ID NO: 486095

SEQ ID NO: 506449 - DNA, 201 bp, Homo sapiens; identical to SEQ ID NO: 485524

SEQ ID NO: 506450 - DNA, 201 bp, Homo sapiens; identical to SEQ ID NO: 485731

SEQ ID NO: 506451 - DNA, 201 bp, Homo sapiens; identical to SEQ ID NO: 486097

SEQ ID NO: 506452 - DNA, 201 bp, Homo sapiens; identical to SEQ ID NO: 485525

SEQ ID NO: 506453 - DNA, 201 bp, Homo sapiens; identical to SEQ ID NO: 485732

SEQ ID NO: 506454 - DNA, 201 bp, Homo sapiens; identical to SEQ ID NO: 486098

SEQ ID NO: 506455 - DNA, 201 bp, Homo sapiens; identical to SEQ ID NO: 485733

SEQ ID NO: 506456 - DNA, 201 bp, Homo sapiens; identical to SEQ ID NO: 485734

SEQ ID NO: 506457 - DNA, 201 bp, Homo sapiens; identical to SEQ ID NO: 485735

SEQ ID NO: 506458 - DNA, 201 bp, Homo sapiens; identical to SEQ ID NO: 485736

SEQ ID NO: 506459 - DNA, 201 bp, Homo sapiens; identical to SEQ ID NO: 485737

SEQ ID NO: 506460 - DNA, 201 bp, Homo sapiens; identical to SEQ ID NO: 485528

SEQ ID NO: 506461 - DNA, 201 bp, Homo sapiens; identical to SEQ ID NO: 485739

SEQ ID NO: 506462 - DNA, 201 bp, Homo sapiens; identical to SEQ ID NO: 485741

SEQ ID NO: 506463 - DNA, 201 bp, Homo sapiens; identical to SEQ ID NO: 485744

SEQ ID NO: 506464 - DNA, 201 bp, Homo sapiens; identical to SEQ ID NO: 485743

SEQ ID NO: 506465 - DNA, 201 bp, Homo sapiens; identical to SEQ ID NO: 485531

SEQ ID NO: 506466 - DNA, 201 bp, Homo sapiens; identical to SEQ ID NO: 485532

SEQ ID NO: 506467 - DNA, 201 bp, Homo sapiens; identical to SEQ ID NO: 485534

SEQ ID NO: 506468 - DNA, 201 bp, Homo sapiens; identical to SEQ ID NO: 485533

SEQ ID NO: 506469 - DNA, 201 bp, Homo sapiens; identical to SEQ ID NO: 485535

SEQ ID NO: 506470 - DNA, 201 bp, Homo sapiens; identical to SEQ ID NO: 485752

SEQ ID NO: 506471 - DNA, 201 bp, Homo sapiens; identical to SEQ ID NO: 485753

SEQ ID NO: 506472 - DNA, 201 bp, Homo sapiens; identical to SEQ ID NO: 485536

SEQ ID NO: 506473 - DNA, 201 bp, Homo sapiens; identical to SEQ ID NO: 485754

SEQ ID NO: 506474 - DNA, 201 bp, Homo sapiens; identical to SEQ ID NO: 485755

SEQ ID NO: 506475 - DNA, 201 bp, Homo sapiens; identical to SEQ ID NO: 485756

SEQ ID NO: 506476 - DNA, 201 bp, Homo sapiens; identical to SEQ ID NO: 485537

SEQ ID NO: 506477 - DNA, 201 bp, Homo sapiens; identical to SEQ ID NO: 485757

SEQ ID NO: 506478 - DNA, 201 bp, Homo sapiens; identical to SEQ ID NO: 485758

SEQ ID NO: 506479 - DNA, 201 bp, Homo sapiens; identical to SEQ ID NO: 485759

SEQ ID NO: 506480 - DNA, 201 bp, Homo sapiens; identical to SEQ ID NO: 485760

SEQ ID NO: 506481 - DNA, 201 bp, Homo sapiens; identical to SEQ ID NO: 485540

SEQ ID NO: 506482 - DNA, 201 bp, Homo sapiens; identical to SEQ ID NO: 485541

SEQ ID NO: 506483 - DNA, 201 bp, Homo sapiens; identical to SEQ ID NO: 486104

SEQ ID NO: 506484 - DNA, 201 bp, Homo sapiens; identical to SEQ ID NO: 486105

SEQ ID NO: 506485 - DNA, 201 bp, Homo sapiens; identical to SEQ ID NO: 485542

SEQ ID NO: 506486 - DNA, 201 bp, Homo sapiens; identical to SEQ ID NO: 485543

SEQ ID NO: 506487 - DNA, 201 bp, Homo sapiens; identical to SEQ ID NO: 486106

SEQ ID NO: 506488 - DNA, 201 bp, Homo sapiens; identical to SEQ ID NO: 486368

SEQ ID NO: 506489 - DNA, 201 bp, Homo sapiens; identical to SEQ ID NO: 485795

SEQ ID NO: 506490 - DNA, 201 bp, Homo sapiens; identical to SEQ ID NO: 486109

SEQ ID NO: 506491 - DNA, 201 bp, Homo sapiens; identical to SEQ ID NO: 486110

SEQ ID NO: 506492 - DNA, 201 bp, Homo sapiens; identical to SEQ ID NO: 485551

SEQ ID NO: 506493 - DNA, 201 bp, Homo sapiens; identical to SEQ ID NO: 485552

SEQ ID NO: 506494 - DNA, 201 bp, Homo sapiens; identical to SEQ ID NO: 485554

SEQ ID NO: 506495 - DNA, 201 bp, Homo sapiens; identical to SEQ ID NO: 486372

SEQ ID NO: 506496 - DNA, 201 bp, Homo sapiens; identical to SEQ ID NO: 485811

SEQ ID NO: 506497 - DNA, 201 bp, Homo sapiens; identical to SEQ ID NO: 485813

SEQ ID NO: 506498 - DNA, 201 bp, Homo sapiens; identical to SEQ ID NO: 485815

SEQ ID NO: 506499 - DNA, 201 bp, Homo sapiens; identical to SEQ ID NO: 485817

SEQ ID NO: 506500 - DNA, 201 bp, Homo sapiens; identical to SEQ ID NO: 485820

SEQ ID NO: 506501 - DNA, 201 bp, Homo sapiens; identical to SEQ ID NO: 485821

SEQ ID NO: 506502 - DNA, 201 bp, Homo sapiens; identical to SEQ ID NO: 485822

SEQ ID NO: 506503 - DNA, 201 bp, Homo sapiens; identical to SEQ ID NO: 485823

SEQ ID NO: 506504 - DNA, 201 bp, Homo sapiens; identical to SEQ ID NO: 485825

SEQ ID NO: 506505 - DNA, 201 bp, Homo sapiens; identical to SEQ ID NO: 485827

SEQ ID NO: 506506 - DNA, 201 bp, Homo sapiens; identical to SEQ ID NO: 485562

SEQ ID NO: 506507 - DNA, 201 bp, Homo sapiens; identical to SEQ ID NO: 486112

SEQ ID NO: 506508 - DNA, 201 bp, Homo sapiens; identical to SEQ ID NO: 486113

SEQ ID NO: 506509 - DNA, 201 bp, Homo sapiens; identical to SEQ ID NO: 485563

SEQ ID NO: 506510 - DNA, 201 bp, Homo sapiens; identical to SEQ ID NO: 485565

SEQ ID NO: 506511 - DNA, 201 bp, Homo sapiens; identical to SEQ ID NO: 485566

SEQ ID NO: 506512 - DNA, 201 bp, Homo sapiens; identical to SEQ ID NO: 486400

SEQ ID NO: 506513 - DNA, 201 bp, Homo sapiens; identical to SEQ ID NO: 485567

SEQ ID NO: 506514 - DNA, 201 bp, Homo sapiens; identical to SEQ ID NO: 485568

SEQ ID NO: 506515 - DNA, 201 bp, Homo sapiens; identical to SEQ ID NO: 486405

SEQ ID NO: 506516 - DNA, 201 bp, Homo sapiens; identical to SEQ ID NO: 485843

SEQ ID NO: 506517 - DNA, 201 bp, Homo sapiens; identical to SEQ ID NO: 485842

SEQ ID NO: 506518 - DNA, 201 bp, Homo sapiens; identical to SEQ ID NO: 485849

SEQ ID NO: 506519 - DNA, 201 bp, Homo sapiens; identical to SEQ ID NO: 485855

SEQ ID NO: 506520 - DNA, 201 bp, Homo sapiens; identical to SEQ ID NO: 485857

SEQ ID NO: 506521 - DNA, 201 bp, Homo sapiens; identical to SEQ ID NO: 485859

SEQ ID NO: 506522 - DNA, 201 bp, Homo sapiens; identical to SEQ ID NO: 485860

SEQ ID NO: 506523 - DNA, 201 bp, Homo sapiens; identical to SEQ ID NO: 485861

SEQ ID NO: 506524 - DNA, 201 bp, Homo sapiens; identical to SEQ ID NO: 486422

SEQ ID NO: 506525 - DNA, 201 bp, Homo sapiens; identical to SEQ ID NO: 486425

SEQ ID NO: 506526 - DNA, 201 bp, Homo sapiens; identical to SEQ ID NO: 485574

SEQ ID NO: 506527 - DNA, 201 bp, Homo sapiens; identical to SEQ ID NO: 486117

SEQ ID NO: 506528 - DNA, 201 bp, Homo sapiens; identical to SEQ ID NO: 485575

SEQ ID NO: 506529 - DNA, 201 bp, Homo sapiens; identical to SEQ ID NO: 485576

SEQ ID NO: 506530 - DNA, 201 bp, Homo sapiens; identical to SEQ ID NO: 485577

SEQ ID NO: 506531 - DNA, 201 bp, Homo sapiens; identical to SEQ ID NO: 485578

SEQ ID NO: 506532 - DNA, 201 bp, Homo sapiens; identical to SEQ ID NO: 485579

SEQ ID NO: 506533 - DNA, 201 bp, Homo sapiens; identical to SEQ ID NO: 485582

SEQ ID NO: 506534 - DNA, 201 bp, Homo sapiens; identical to SEQ ID NO: 485872

SEQ ID NO: 506535 - DNA, 201 bp, Homo sapiens; identical to SEQ ID NO: 485874

SEQ ID NO: 506536 - DNA, 201 bp, Homo sapiens; identical to SEQ ID NO: 485878

SEQ ID NO: 506537 - DNA, 201 bp, Homo sapiens; identical to SEQ ID NO: 485881

SEQ ID NO: 506538 - DNA, 201 bp, Homo sapiens; identical to SEQ ID NO: 485884

SEQ ID NO: 506539 - DNA, 201 bp, Homo sapiens; identical to SEQ ID NO: 485887

SEQ ID NO: 506540 - DNA, 201 bp, Homo sapiens; identical to SEQ ID NO: 485888

SEQ ID NO: 506541 - DNA, 201 bp, Homo sapiens; identical to SEQ ID NO: 485889
  misc_feature (1)...(201): n = A,T,C or G

SEQ ID NO: 506542 - DNA, 201 bp, Homo sapiens; identical to SEQ ID NO: 485891

SEQ ID NO: 506543 - DNA, 201 bp, Homo sapiens; identical to SEQ ID NO: 485893

SEQ ID NO: 506544 - DNA, 201 bp, Homo sapiens; identical to SEQ ID NO: 485899

SEQ ID NO: 506545 - DNA, 201 bp, Homo sapiens; identical to SEQ ID NO: 485901

SEQ ID NO: 506546 - DNA, 201 bp, Homo sapiens; identical to SEQ ID NO: 485903

SEQ ID NO: 506547 - DNA, 201 bp, Homo sapiens; identical to SEQ ID NO: 485904

SEQ ID NO: 506548 - DNA, 201 bp, Homo sapiens; identical to SEQ ID NO: 485905

SEQ ID NO: 506549 - DNA, 201 bp, Homo sapiens; identical to SEQ ID NO: 485906

SEQ ID NO: 506550 - DNA, 201 bp, Homo sapiens; identical to SEQ ID NO: 485907

SEQ ID NO: 506551 - DNA, 201 bp, Homo sapiens; identical to SEQ ID NO: 485908

SEQ ID NO: 506552 - DNA, 201 bp, Homo sapiens; identical to SEQ ID NO: 486125

SEQ ID NO: 506553 - DNA, 201 bp, Homo sapiens; identical to SEQ ID NO: 485916

SEQ ID NO: 506554 - DNA, 201 bp, Homo sapiens; identical to SEQ ID NO: 485922

SEQ ID NO: 506555 - DNA, 201 bp, Homo sapiens; identical to SEQ ID NO: 485925

SEQ ID NO: 506556 - DNA, 201 bp, Homo sapiens; identical to SEQ ID NO: 485927

SEQ ID NO: 506557 - DNA, 201 bp, Homo sapiens; identical to SEQ ID NO: 485928

SEQ ID NO: 506558 - DNA, 201 bp, Homo sapiens; identical to SEQ ID NO: 485930

SEQ ID NO: 506559 - DNA, 201 bp, Homo sapiens; identical to SEQ ID NO: 485587

SEQ ID NO: 506560 - DNA, 201 bp, Homo sapiens; identical to SEQ ID NO: 485933

SEQ ID NO: 506561 - DNA, 201 bp, Homo sapiens; identical to SEQ ID NO: 485588

SEQ ID NO: 506562 - DNA, 201 bp, Homo sapiens; identical to SEQ ID NO: 485934

SEQ ID NO: 506563 - DNA, 201 bp, Homo sapiens; identical to SEQ ID NO: 485935

SEQ ID NO: 506564 - DNA, 201 bp, Homo sapiens; identical to SEQ ID NO: 485936

SEQ ID NO: 506565 - DNA, 201 bp, Homo sapiens; identical to SEQ ID NO: 485591

SEQ ID NO: 506566 - DNA, 201 bp, Homo sapiens; identical to SEQ ID NO: 485592

SEQ ID NO: 506567 - DNA, 201 bp, Homo sapiens; identical to SEQ ID NO: 485938

SEQ ID NO: 506568 - DNA, 201 bp, Homo sapiens; identical to SEQ ID NO: 485939

SEQ ID NO: 506569 - DNA, 201 bp, Homo sapiens; identical to SEQ ID NO: 485593

SEQ ID NO: 506570 - DNA, 201 bp, Homo sapiens; identical to SEQ ID NO: 485594

SEQ ID NO: 506571 - DNA, 201 bp, Homo sapiens; identical to SEQ ID NO: 486476

SEQ ID NO: 506572 - DNA, 201 bp, Homo sapiens; identical to SEQ ID NO: 485946

SEQ ID NO: 506573 - DNA, 201 bp, Homo sapiens; identical to SEQ ID NO: 485949

SEQ ID NO: 506574 - DNA, 201 bp, Homo sapiens; identical to SEQ ID NO: 485951

SEQ ID NO: 506575 - DNA, 201 bp, Homo sapiens; identical to SEQ ID NO: 485955

SEQ ID NO: 506576 - DNA, 201 bp, Homo sapiens; identical to SEQ ID NO: 485956

SEQ ID NO: 506577 - DNA, 201 bp, Homo sapiens; identical to SEQ ID NO: 485957

SEQ ID NO: 506578 - DNA, 201 bp, Homo sapiens; identical to SEQ ID NO: 485958

SEQ ID NO: 506579 - DNA, 201 bp, Homo sapiens; identical to SEQ ID NO: 485959

SEQ ID NO: 506580 - DNA, 201 bp, Homo sapiens; identical to SEQ ID NO: 485960

SEQ ID NO: 506581 - DNA, 201 bp, Homo sapiens; identical to SEQ ID NO: 485961

SEQ ID NO: 506582 - DNA, 201 bp, Homo sapiens; identical to SEQ ID NO: 485962

SEQ ID NO: 506583 - DNA, 201 bp, Homo sapiens; identical to SEQ ID NO: 485963

SEQ ID NO: 506584 - DNA, 201 bp, Homo sapiens; identical to SEQ ID NO: 485964

SEQ ID NO: 506585 - DNA, 201 bp, Homo sapiens; identical to SEQ ID NO: 485967

SEQ ID NO: 506586 - DNA, 201 bp, Homo sapiens; identical to SEQ ID NO: 485969

SEQ ID NO: 506587 - DNA, 201 bp, Homo sapiens; identical to SEQ ID NO: 485970

SEQ ID NO: 506588 - DNA, 201 bp, Homo sapiens; identical to SEQ ID NO: 485971

SEQ ID NO: 506589 - DNA, 201 bp, Homo sapiens; identical to SEQ ID NO: 485972

SEQ ID NO: 506590 - DNA, 201 bp, Homo sapiens; identical to SEQ ID NO: 485973

SEQ ID NO: 506591 - DNA, 201 bp, Homo sapiens; identical to SEQ ID NO: 485979

SEQ ID NO: 506592 - DNA, 201 bp, Homo sapiens; identical to SEQ ID NO: 485980

SEQ ID NO: 506593 - DNA, 201 bp, Homo sapiens; identical to SEQ ID NO: 485981

SEQ ID NO: 506594 - DNA, 201 bp, Homo sapiens; identical to SEQ ID NO: 485983

SEQ ID NO: 506595 - DNA, 201 bp, Homo sapiens; identical to SEQ ID NO: 486501

SEQ ID NO: 506596 - DNA, 201 bp, Homo sapiens; identical to SEQ ID NO: 485984

SEQ ID NO: 506597 - DNA, 201 bp, Homo sapiens; identical to SEQ ID NO: 485986

SEQ ID NO: 506598 - DNA, 201 bp, Homo sapiens; identical to SEQ ID NO: 485989

SEQ ID NO: 506599 - DNA, 201 bp, Homo sapiens; identical to SEQ ID NO: 485990

SEQ ID NO: 506600 - DNA, 201 bp, Homo sapiens; identical to SEQ ID NO: 485991

SEQ ID NO: 506601 - DNA, 201 bp, Homo sapiens; identical to SEQ ID NO: 485993

SEQ ID NO: 506602 - DNA, 201 bp, Homo sapiens; identical to SEQ ID NO: 486513

SEQ ID NO: 506603 - DNA, 201 bp, Homo sapiens; identical to SEQ ID NO: 486002

SEQ ID NO: 506604 - DNA, 201 bp, Homo sapiens; identical to SEQ ID NO: 486004

SEQ ID NO: 506605 - DNA, 201 bp, Homo sapiens; identical to SEQ ID NO: 486003

SEQ ID NO: 506606 - DNA, 201 bp, Homo sapiens; identical to SEQ ID NO: 486005

SEQ ID NO: 506607 - DNA, 201 bp, Homo sapiens; identical to SEQ ID NO: 486008

SEQ ID NO: 506608 - DNA, 201 bp, Homo sapiens; identical to SEQ ID NO: 486524

SEQ ID NO: 506609 - DNA, 201 bp, Homo sapiens; identical to SEQ ID NO: 486011

SEQ ID NO: 506610 - DNA, 201 bp, Homo sapiens; identical to SEQ ID NO: 486010

SEQ ID NO: 506611 - DNA, 201 bp, Homo sapiens; identical to SEQ ID NO: 486525

SEQ ID NO: 506612 - DNA, 201 bp, Homo sapiens; identical to SEQ ID NO: 486012

SEQ ID NO: 506613 - DNA, 201 bp, Homo sapiens; identical to SEQ ID NO: 486013

SEQ ID NO: 506614 - DNA, 201 bp, Homo sapiens; identical to SEQ ID NO: 486014

SEQ ID NO: 506615 - DNA, 201 bp, Homo sapiens; identical to SEQ ID NO: 485615

SEQ ID NO: 506616 - DNA, 201 bp, Homo sapiens; identical to SEQ ID NO: 485618

SEQ ID NO: 506617 - DNA, 201 bp, Homo sapiens; identical to SEQ ID NO: 486157

SEQ ID NO: 506618 - DNA, 201 bp, Homo sapiens; identical to SEQ ID NO: 486528

SEQ ID NO: 506619 - DNA, 201 bp, Homo sapiens; identical to SEQ ID NO: 486158

SEQ ID NO: 506620 - DNA, 201 bp, Homo sapiens; identical to SEQ ID NO: 485623

SEQ ID NO: 506621 - DNA, 201 bp, Homo sapiens; identical to SEQ ID NO: 486160

SEQ ID NO: 506622 - DNA, 201 bp, Homo sapiens; identical to SEQ ID NO: 485624

SEQ ID NO: 506623 - DNA, 201 bp, Homo sapiens; identical to SEQ ID NO: 485625

SEQ ID NO: 506624 - DNA, 201 bp, Homo sapiens; identical to SEQ ID NO: 485626

SEQ ID NO: 506625 - DNA, 201 bp, Homo sapiens; identical to SEQ ID NO: 486021

SEQ ID NO: 506626 - DNA, 201 bp, Homo sapiens; identical to SEQ ID NO: 485627

SEQ ID NO: 506627 - DNA, 201 bp, Homo sapiens; identical to SEQ ID NO: 485628

SEQ ID NO: 506628 - DNA, 201 bp, Homo sapiens; identical to SEQ ID NO: 486022

SEQ ID NO: 506629 - DNA, 201 bp, Homo sapiens; identical to SEQ ID NO: 485629

SEQ ID NO: 506630 - DNA, 201 bp, Homo sapiens; identical to SEQ ID NO: 485631

SEQ ID NO: 506631 - DNA, 201 bp, Homo sapiens; identical to SEQ ID NO: 486023

SEQ ID NO: 506632 - DNA, 201 bp, Homo sapiens; identical to SEQ ID NO: 486024

SEQ ID NO: 506633 - DNA, 201 bp, Homo sapiens; identical to SEQ ID NO: 486540

SEQ ID NO: 506634 - DNA, 201 bp, Homo sapiens; identical to SEQ ID NO: 486542

SEQ ID NO: 506635 - DNA, 201 bp, Homo sapiens; identical to SEQ ID NO: 486543

SEQ ID NO: 506636 - DNA, 201 bp, Homo sapiens; identical to SEQ ID NO: 486545

SEQ ID NO: 506637 - DNA, 201 bp, Homo sapiens; identical to SEQ ID NO: 486547

SEQ ID NO: 506638 - DNA, 201 bp, Homo sapiens; identical to SEQ ID NO: 485637

SEQ ID NO: 506639 - DNA, 201 bp, Homo sapiens; identical to SEQ ID NO: 485639

SEQ ID NO: 506640 - DNA, 201 bp, Homo sapiens; identical to SEQ ID NO: 486036

SEQ ID NO: 506641 - DNA, 201 bp, Homo sapiens; identical to SEQ ID NO: 486037

SEQ ID NO: 506642 - DNA, 201 bp, Homo sapiens; identical to SEQ ID NO: 486038

SEQ ID NO: 506643 - DNA, 201 bp, Homo sapiens; identical to SEQ ID NO: 485641

SEQ ID NO: 506644 - DNA, 201 bp, Homo sapiens; identical to SEQ ID NO: 485642

SEQ ID NO: 506645 - DNA, 201 bp, Homo sapiens; identical to SEQ ID NO: 485643

SEQ ID NO: 506646 - DNA, 201 bp, Homo sapiens; identical to SEQ ID NO: 485644

SEQ ID NO: 506647 - DNA, 201 bp, Homo sapiens; identical to SEQ ID NO: 485645

SEQ ID NO: 506648 - DNA, 201 bp, Homo sapiens; identical to SEQ ID NO: 485646

SEQ ID NO: 506649 - DNA, 201 bp, Homo sapiens; identical to SEQ ID NO: 485648

SEQ ID NO: 506650 - DNA, 201 bp, Homo sapiens; identical to SEQ ID NO: 486558

SEQ ID NO: 506651 - DNA, 201 bp, Homo sapiens; identical to SEQ ID NO: 486039

SEQ ID NO: 506652 - DNA, 201 bp, Homo sapiens; identical to SEQ ID NO: 486560

SEQ ID NO: 506653 - DNA, 201 bp, Homo sapiens; identical to SEQ ID NO: 486562

SEQ ID NO: 506654 - DNA, 201 bp, Homo sapiens; identical to SEQ ID NO: 486041

SEQ ID NO: 506655 - DNA, 201 bp, Homo sapiens; identical to SEQ ID NO: 486042

SEQ ID NO: 506656 - DNA, 201 bp, Homo sapiens; identical to SEQ ID NO: 486045

SEQ ID NO: 506657 - DNA, 201 bp, Homo sapiens; identical to SEQ ID NO: 486567

SEQ ID NO: 506658 - DNA, 201 bp, Homo sapiens; identical to SEQ ID NO: 486570

SEQ ID NO: 506659 - DNA, 201 bp, Homo sapiens; identical to SEQ ID NO: 486572

SEQ ID NO: 506660 - DNA, 201 bp, Homo sapiens; identical to SEQ ID NO: 485657

SEQ ID NO: 506661 - DNA, 201 bp, Homo sapiens; identical to SEQ ID NO: 485658

SEQ ID NO: 506662 - DNA, 201 bp, Homo sapiens; identical to SEQ ID NO: 485659

SEQ ID NO: 506663 - DNA, 201 bp, Homo sapiens; identical to SEQ ID NO: 485660

SEQ ID NO: 506664 - DNA, 201 bp, Homo sapiens; identical to SEQ ID NO: 485661

SEQ ID NO: 506665 - DNA, 201 bp, Homo sapiens; identical to SEQ ID NO: 485662

SEQ ID NO: 506666 - DNA, 201 bp, Homo sapiens; identical to SEQ ID NO: 485664

SEQ ID NO: 506667 - DNA, 201 bp, Homo sapiens; identical to SEQ ID NO: 485665

SEQ ID NO: 506668 - DNA, 201 bp, Homo sapiens; identical to SEQ ID NO: 485666

SEQ ID NO: 506669 - DNA, 201 bp, Homo sapiens; identical to SEQ ID NO: 486574

SEQ ID NO: 506670 - DNA, 201 bp, Homo sapiens; identical to SEQ ID NO: 486054

SEQ ID NO: 506671 - DNA, 201 bp, Homo sapiens; identical to SEQ ID NO: 485667

SEQ ID NO: 506672 - DNA, 201 bp, Homo sapiens; identical to SEQ ID NO: 486056

SEQ ID NO: 506673 - DNA, 201 bp, Homo sapiens; identical to SEQ ID NO: 486058

SEQ ID NO: 506674 - DNA, 201 bp, Homo sapiens; identical to SEQ ID NO: 486060

SEQ ID NO: 506675 - DNA, 201 bp, Homo sapiens; identical to SEQ ID NO: 486062

SEQ ID NO: 506676 - DNA, 201 bp, Homo sapiens; identical to SEQ ID NO: 486063

SEQ ID NO: 506677 - DNA, 201 bp, Homo sapiens; identical to SEQ ID NO: 486577

SEQ ID NO: 506678 - DNA, 201 bp, Homo sapiens; identical to SEQ ID NO: 486578

SEQ ID NO: 506679 - DNA, 201 bp, Homo sapiens; identical to SEQ ID NO: 486579

SEQ ID NO: 506680 - DNA, 201 bp, Homo sapiens; identical to SEQ ID NO: 486580

SEQ ID NO: 506681 - DNA, 201 bp, Homo sapiens; identical to SEQ ID NO: 486581

SEQ ID NO: 506682 - DNA, 201 bp, Homo sapiens; identical to SEQ ID NO: 486221

SEQ ID NO: 506683 - DNA, 201 bp, Homo sapiens; identical to SEQ ID NO: 486068

SEQ ID NO: 506684 - DNA, 201 bp, Homo sapiens; identical to SEQ ID NO: 486069

SEQ ID NO: 506685 - DNA, 201 bp, Homo sapiens; identical to SEQ ID NO: 485681

SEQ ID NO: 506686 - DNA, 201 bp, Homo sapiens; identical to SEQ ID NO: 485682

SEQ ID NO: 506687 - DNA, 201 bp, Homo sapiens; identical to SEQ ID NO: 485684

SEQ ID NO: 506688 - DNA, 201 bp, Homo sapiens; identical to SEQ ID NO: 485685

SEQ ID NO: 506689 - DNA, 201 bp, Homo sapiens; identical to SEQ ID NO: 486070

SEQ ID NO: 506690 - DNA, 201 bp, Homo sapiens; identical to SEQ ID NO: 486071

SEQ ID NO: 506691 - DNA, 201 bp, Homo sapiens; identical to SEQ ID NO: 486072

SEQ ID NO: 506692 - DNA, 201 bp, Homo sapiens; identical to SEQ ID NO: 486074

SEQ ID NO: 506693 - DNA, 201 bp, Homo sapiens; identical to SEQ ID NO: 486225

SEQ ID NO: 506694 - DNA, 201 bp, Homo sapiens; identical to SEQ ID NO: 486076

SEQ ID NO: 506695 - DNA, 201 bp, Homo sapiens; identical to SEQ ID NO: 486227

SEQ ID NO: 506696 - DNA, 201 bp, Homo sapiens; identical to SEQ ID NO: 486078

SEQ ID NO: 506697 - DNA, 201 bp, Homo sapiens; identical to SEQ ID NO: 486079

SEQ ID NO: 506698 - DNA, 201 bp, Homo sapiens; identical to SEQ ID NO: 486080

SEQ ID NO: 506699 - DNA, 201 bp, Homo sapiens; identical to SEQ ID NO: 485688

SEQ ID NO: 506700 - DNA, 201 bp, Homo sapiens; identical to SEQ ID NO: 486585

SEQ ID NO: 506701 - DNA, 201 bp, Homo sapiens; identical to SEQ ID NO: 486586

SEQ ID NO: 506702 - DNA, 201 bp, Homo sapiens; identical to SEQ ID NO: 486081

SEQ ID NO: 506703 - DNA, 201 bp, Homo sapiens; identical to SEQ ID NO: 486587

SEQ ID NO: 506704 - DNA, 201 bp, Homo sapiens; identical to SEQ ID NO: 486082

SEQ ID NO: 506705 - DNA, 201 bp, Homo sapiens; identical to SEQ ID NO: 486588

SEQ ID NO: 506706 - DNA, 201 bp, Homo sapiens; identical to SEQ ID NO: 486232

SEQ ID NO: 506707 - DNA, 201 bp, Homo sapiens; identical to SEQ ID NO: 486083

SEQ ID NO: 506708 - DNA, 201 bp, Homo sapiens; identical to SEQ ID NO: 486084

SEQ ID NO: 506709 - DNA, 201 bp, Homo sapiens; identical to SEQ ID NO: 485691

SEQ ID NO: 506710 - DNA, 201 bp, Homo sapiens; identical to SEQ ID NO: 485692

SEQ ID NO: 506711 - DNA, 201 bp, Homo sapiens; identical to SEQ ID NO: 486235

SEQ ID NO: 506712 - DNA, 201 bp, Homo sapiens; identical to SEQ ID NO: 485693

SEQ ID NO: 506713 - DNA, 201 bp, Homo sapiens; identical to SEQ ID NO: 486594

SEQ ID NO: 506714 - DNA, 201 bp, Homo sapiens; identical to SEQ ID NO: 486238

SEQ ID NO: 506715 - DNA, 201 bp, Homo sapiens; identical to SEQ ID NO: 485695

SEQ ID NO: 506716 - DNA, 201 bp, Homo sapiens; identical to SEQ ID NO: 486085

SEQ ID NO: 506717 - DNA, 201 bp, Homo sapiens; identical to SEQ ID NO: 485694

SEQ ID NO: 506718 - DNA, 201 bp, Homo sapiens; identical to SEQ ID NO: 486595

SEQ ID NO: 506719 - DNA, 201 bp, Homo sapiens; identical to SEQ ID NO: 486240

SEQ ID NO: 506720 - DNA, 201 bp, Homo sapiens; identical to SEQ ID NO: 485697

SEQ ID NO: 506721 - DNA, 201 bp, Homo sapiens; identical to SEQ ID NO: 485696

SEQ ID NO: 506722 - DNA, 201 bp, Homo sapiens; identical to SEQ ID NO: 486596

SEQ ID NO: 506723 - DNA, 201 bp, Homo sapiens; identical to SEQ ID NO: 486242

SEQ ID NO: 506724 - DNA, 201 bp, Homo sapiens; identical to SEQ ID NO: 485699

SEQ ID NO: 506725 - DNA, 201 bp, Homo sapiens; identical to SEQ ID NO: 485698

SEQ ID NO: 506726 - DNA, 201 bp, Homo sapiens; identical to SEQ ID NO: 485701

SEQ ID NO: 506727 - DNA, 201 bp, Homo sapiens; identical to SEQ ID NO: 485702

SEQ ID NO: 506728 - DNA, 201 bp, Homo sapiens; identical to SEQ ID NO: 486086

SEQ ID NO: 506729 - DNA, 201 bp, Homo sapiens; identical to SEQ ID NO: 486087

SEQ ID NO: 506730 - DNA, 201 bp, Homo sapiens; identical to SEQ ID NO: 486088

SEQ ID NO: 506731 - DNA, 201 bp, Homo sapiens; identical to SEQ ID NO: 486601

SEQ ID NO: 506732 - DNA, 201 bp, Homo sapiens; identical to SEQ ID NO: 486089

SEQ ID NO: 506733 - DNA, 201 bp, Homo sapiens; identical to SEQ ID NO: 486090

SEQ ID NO: 506734 - DNA, 201 bp, Homo sapiens; identical to SEQ ID NO: 486274

SEQ ID NO: 506735 - DNA, 201 bp, Homo sapiens; identical to SEQ ID NO: 486277

SEQ ID NO: 506736 - DNA, 201 bp, Homo sapiens; identical to SEQ ID NO: 486602

SEQ ID NO: 506737 - DNA, 201 bp, Homo sapiens; identical to SEQ ID NO: 486091

SEQ ID NO: 506738 - DNA, 201 bp, Homo sapiens; identical to SEQ ID NO: 485710

SEQ ID NO: 506739 - DNA, 201 bp, Homo sapiens; identical to SEQ ID NO: 486280

SEQ ID NO: 506740 - DNA, 201 bp, Homo sapiens; identical to SEQ ID NO: 485711

SEQ ID NO: 506741 - DNA, 201 bp, Homo sapiens; identical to SEQ ID NO: 486281

SEQ ID NO: 506742 - DNA, 201 bp, Homo sapiens; identical to SEQ ID NO: 485712

SEQ ID NO: 506743 - DNA, 201 bp, Homo sapiens; identical to SEQ ID NO: 485713

SEQ ID NO: 506744 - DNA, 201 bp, Homo sapiens; identical to SEQ ID NO: 485714

SEQ ID NO: 506745 - DNA, 201 bp, Homo sapiens; identical to SEQ ID NO: 485715

SEQ ID NO: 506746 - DNA, 201 bp, Homo sapiens; identical to SEQ ID NO: 485716

SEQ ID NO: 506747 - DNA, 201 bp, Homo sapiens; identical to SEQ ID NO: 486288

SEQ ID NO: 506748 - DNA, 201 bp, Homo sapiens; identical to SEQ ID NO: 485717

SEQ ID NO: 506749 - DNA, 201 bp, Homo sapiens; identical to SEQ ID NO: 485718

SEQ ID NO: 506750 - DNA, 201 bp, Homo sapiens; identical to SEQ ID NO: 485721

SEQ ID NO: 506751 - DNA, 201 bp, Homo sapiens
ggttaactgtctcctgaacactggcatggccttctcagtcttagtctctggtcctggacaaccgtcctccagatctgtcactacccgaggggtcctaggayaggcagtcactagatacttctcccagccactaagttgtgactggggaacttcattcttttcacttgcctttctaattatgcctgaaacccccacaccctt

SEQ ID NO: 506752 - DNA, 201 bp, Homo sapiens
agcaggggccattatacacctgaacatgggagaaggaacaccgtttgctgtcccctacttgaggaaggaattaatcctgaagtctgggcaacagaaggacratatggatgagggaagaatgcccgtcccgttcaagttaaactaaaggattccgcctcctttccccaccaaaggcagtaccctcttagacccgaggcccaa

SEQ ID NO: 506753 - DNA, 201 bp, Homo sapiens
tgcccggggcaagcgccagcccatgccccaggtatgcttgaccattgggggccagaaggttaactgtctcctgaacactggcatggccttctcagtcttartctctggtcctggacaaccgtcctccagatctgtcactacccgaggggtcctaggataggcagtcactagatacttctcccagccactaagttgtgactg

SEQ ID NO: 506754 - DNA, 201 bp, Homo sapiens
agttcgttccaaagacaggtgctcctctgagttcctctggaatctggcaaggtgccgagcttggacgcaaggcttccatgaggctgtgaaggaggttgcasggaaactggtggggatctgaaaagcttttagtggcctcgccacacacagcacttcagatgctcaggtgatgagcaacattttccaaacccagctagtgag

SEQ ID NO: 506755 - DNA, 201 bp, Homo sapiens
tccaaacccagctagtgagcaccccacctcctctggcttccagaacctggtgtggagggccaggagaggcttcgggactgaagggcagagcagcagactcyggggctcatgtaggaaggaacatgccttcagccaaagattatccacgctgcatggagactcttgctaaatatcactggtaaatgcacaattatgtcccat

SEQ ID NO: 506756 - DNA, 201 bp, Homo sapiens
tccaaagacaggtgctcctctgagttcctctggaatctggcaaggtgccgagcttggacgcaaggcttccatgaggctgtgaaggaggttgcacggaaacyggtggggatctgaaaagcttttagtggcctcgccacacacagcacttcagatgctcaggtgatgagcaacattttccaaacccagctagtgagcacccca

SEQ ID NO: 506757 - DNA, 201 bp, Homo sapiens
gaaggaggttgcacggaaactggtggggatctgaaaagcttttagtggcctcgccacacacagcacttcagatgctcaggtgatgagcaacattttccaarcccagctagtgagcaccccacctcctctggcttccagaacctggtgtggagggccaggagaggcttcgggactgaagggcagagcagcagactccggggc

SEQ ID NO: 506758 - DNA, 201 bp, Homo sapiens
gaatctggcaaggtgccgagcttggacgcaaggcttccatgaggctgtgaaggaggttgcacggaaactggtggggatctgaaaagcttttagtggcctcrccacacacagcacttcagatgctcaggtgatgagcaacattttccaaacccagctagtgagcaccccacctcctctggcttccagaacctggtgtggagg

SEQ ID NO: 506759 - DNA, 201 bp, Homo sapiens
ctggtgtggagggccaggagaggcttcgggactgaagggcagagcagcagactccggggctcatgtaggaaggaacatgccttcagccaaagattatccaygctgcatggagactcttgctaaatatcactggtaaatgcacaattatgtcccatttagagatctctagcagagtgtcttgtgtttgatggatttgtcctg

SEQ ID NO: 506760 - DNA, 201 bp, Homo sapiens
ctccaccccatcctggctgggagcccacggtccagcagctcagcaaaccgcagcctttggccttccctctggttggctgtgggcggggagagcttcctctygactccagcagagcgcccaggcccctccccctgacccagaccaacggccacagtccacttagggggcccctcatgcggccctggcctggggctcacctcc

SEQ ID NO: 506761 - DNA, 201 bp, Homo sapiens
tccaccccatcctggctgggagcccacggtccagcagctcagcaaaccgcagcctttggccttccctctggttggctgtgggcggggagagcttcctctcractccagcagagcgcccaggcccctccccctgacccagaccaacggccacagtccacttagggggcccctcatgcggccctggcctggggctcacctcca

SEQ ID NO: 506762 - DNA, 201 bp, Homo sapiens
ggaagacaaaaaaaatcagtgaatatgagtgttttattctaactttgtggtagtaaaatatattcatgaaataagatagcactgttttgactacactaaartaattgagaaaggcattcggtacatttggctaatttttagatgtacttctgctagcactgtgcagacaattttctctccatgtgcagttcacttctagtt

SEQ ID NO: 506763 - DNA, 201 bp, Homo sapiens; identical to SEQ ID NO: 503317

SEQ ID NO: 506764 - DNA, 201 bp, Homo sapiens; identical to SEQ ID NO: 503318

SEQ ID NO: 506765 - DNA, 201 bp, Homo sapiens; identical to SEQ ID NO: 503319

SEQ ID NO: 506766 - DNA, 201 bp, Homo sapiens; identical to SEQ ID NO: 503320

SEQ ID NO: 506767 - DNA, 201 bp, Homo sapiens; identical to SEQ ID NO: 503321

SEQ ID NO: 506768 - DNA, 201 bp, Homo sapiens; identical to SEQ ID NO: 503322

SEQ ID NO: 506769 - DNA, 201 bp, Homo sapiens; identical to SEQ ID NO: 503323

SEQ ID NO: 506770 - DNA, 201 bp, Homo sapiens; identical to SEQ ID NO: 503324

SEQ ID NO: 506771 - DNA, 201 bp, Homo sapiens; identical to SEQ ID NO: 503325

SEQ ID NO: 506772 - DNA, 201 bp, Homo sapiens
ctgtacagtattaaaatatattaaacagtttctgctgcagtcttcaatttctagaaacaggtttataataacagttctgacttacatcaacatagtttgcrttaatgtagtcgctgtgcttagagtcttttcctggtaaaggtcttaacttcaccctactgtgatcatctatagaagataagaaaaaaaaacagaaataaa

SEQ ID NO: 506773 - DNA, 201 bp, Homo sapiens; identical to SEQ ID NO: 503326

SEQ ID NO: 506774 - DNA, 201 bp, Homo sapiens; identical to SEQ ID NO: 503327

SEQ ID NO: 506775 - DNA, 201 bp, Homo sapiens; identical to SEQ ID NO: 503328

SEQ ID NO: 506776 - DNA, 201 bp, Homo sapiens; identical to SEQ ID NO: 503329

SEQ ID NO: 506777 - DNA, 201 bp, Homo sapiens; identical to SEQ ID NO: 503330

SEQ ID NO: 506778 - DNA, 201 bp, Homo sapiens; identical to SEQ ID NO: 503331

SEQ ID NO: 506779 - DNA, 201 bp, Homo sapiens; identical to SEQ ID NO: 503332

SEQ ID NO: 506780 - DNA, 201 bp, Homo sapiens; identical to SEQ ID NO: 503333

SEQ ID NO: 506781 - DNA, 201 bp, Homo sapiens; identical to SEQ ID NO: 503334

SEQ ID NO: 506782 - DNA, 201 bp, Homo sapiens; identical to SEQ ID NO: 503335

SEQ ID NO: 506783 - DNA, 201 bp, Homo sapiens; identical to SEQ ID NO: 503336

SEQ ID NO: 506784 - DNA, 201 bp, Homo sapiens; identical to SEQ ID NO: 503337

SEQ ID NO: 506785 - DNA, 201 bp, Homo sapiens; identical to SEQ ID NO: 503338

SEQ ID NO: 506786 - DNA, 201 bp, Homo sapiens; identical to SEQ ID NO: 503339

SEQ ID NO: 506787 - DNA, 201 bp, Homo sapiens; identical to SEQ ID NO: 503340

SEQ ID NO: 506788 - DNA, 201 bp, Homo sapiens; identical to SEQ ID NO: 503341

SEQ ID NO: 506789 - DNA, 201 bp, Homo sapiens; identical to SEQ ID NO: 503342

SEQ ID NO: 506790 - DNA, 201 bp, Homo sapiens
tatacaaggatttcccagtgcttttgaaaaggtattttatatggaacatttaaactaaaaatttaaaaatgaaatattttcatatatactataaatattgktatttagaagaacctttcagaaaagccatttacaaaaacacaatctctattctagtgtggaaagttcttgtgtttaacgtcatatttttatttattagga

SEQ ID NO: 506791 - DNA, 201 bp, Homo sapiens; identical to SEQ ID NO: 503343

SEQ ID NO: 506792 - DNA, 201 bp, Homo sapiens; identical to SEQ ID NO: 503344

SEQ ID NO: 506793 - DNA, 201 bp, Homo sapiens
aataagatagcactgttttgactacactaaaataattgagaaaggcattcggtacatttggctaatttttagatgtacttctgctagcactgtgcagacarttttctctccatgtgcagttcacttctagttaaccctgctgttttcacttaagggaaatttcaacatttattcaaagactagatgtgtgaaattaacaat

SEQ ID NO: 506794 - DNA, 201 bp, Homo sapiens
ttgtgtagttatttaggaatccaaatgttaagatccatacagaaatggaaaactgtgatccgtagaataggatcattgtcagaatatcttctaatacaaayctgtaaattactgcaagccctaaaagaatgaatctgtctcttcattatcatttaacaaatttcagttacagcatttgccagaatgtcgtgaggacgctgg

SEQ ID NO: 506795 - DNA, 201 bp, Homo sapiens; identical to SEQ ID NO: 503346

SEQ ID NO: 506796 - DNA, 201 bp, Homo sapiens; identical to SEQ ID NO: 503345

SEQ ID NO: 506797 - DNA, 201 bp, Homo sapiens; identical to SEQ ID NO: 503348

SEQ ID NO: 506798 - DNA, 201 bp, Homo sapiens; identical to SEQ ID NO: 503347

SEQ ID NO: 506799 - DNA, 201 bp, Homo sapiens; identical to SEQ ID NO: 503349

SEQ ID NO: 506800 - DNA, 201 bp, Homo sapiens
tagccaaaacaatcttgaaaaaggaacaaatttagagaactcacattaagaaagtgaaaagacaatgcacagaatgagaaaatatttgcaaactgtatatkcaataaatgatctgtatccagaatatataaagaactcttacaactcaacaaaagacaaaagtaagccagttaaaaaatggtaaaggatctgattagacat

SEQ ID NO: 506801 - DNA, 201 bp, Homo sapiens
tacgtatacaccaaagagaagtgaaaatatctgtctacataaagacttgtacatgaatgctcatagcggtattcatactagctgagaagcggaaaagaaasaatgtccatcaaatgatgaatgaatagacaaaatgctgtatatccacacattagagtattattcagccataaaaaggaatgaagtattgatatatggtac

SEQ ID NO: 506802 - DNA, 201 bp, Homo sapiens; identical to SEQ ID NO: 503350

SEQ ID NO: 506803 - DNA, 201 bp, Homo sapiens
tctgctagcactgtgcagacaattttctctccatgtgcagttcacttctagttaaccctgctgttttcacttaagggaaatttcaacatttattcaaagaytagatgtgtgaaattaacaataaaattaattccttaagaagcattctgcttaatttaagcatttttgtaccagcactgattaggtatcttttgttaaaag

SEQ ID NO: 506804 - DNA, 201 bp, Homo sapiens; identical to SEQ ID NO: 503351

SEQ ID NO: 506805 - DNA, 201 bp, Homo sapiens
ataggcttcagtactacctgaggtttcaagcatccaccgggggtcttgaaacataccttccacaattaaggggagactgtgtactgctgtgatgattgatmtaggatatttgttgtgacagtggattttgaaaaagaaactgagataacctgaaaacagtatttccacaaaaatgtgattcctagggtattagtagttcta

SEQ ID NO: 506806 - DNA, 201 bp, Homo sapiens; identical to SEQ ID NO: 503352

SEQ ID NO: 506807 - DNA, 201 bp, Homo sapiens; identical to SEQ ID NO: 503353

SEQ ID NO: 506808 - DNA, 201 bp, Homo sapiens; identical to SEQ ID NO: 503354

SEQ ID NO: 506809 - DNA, 201 bp, Homo sapiens; identical to SEQ ID NO: 503355

SEQ ID NO: 506810 - DNA, 201 bp, Homo sapiens; identical to SEQ ID NO: 503356

SEQ ID NO: 506811 - DNA, 201 bp, Homo sapiens; identical to SEQ ID NO: 503357

SEQ ID NO: 506812 - DNA, 201 bp, Homo sapiens
tagtttgcattaatgtagtcgctgtgcttagagtcttttcctggtaaaggtcttaacttcaccctactgtgatcatctatagaagataagaaaaaaaaacrgaaataaaatggataattcagaaactagcaccattctaaagcacaacacaaggcaatcaggtaacatgacatctcccaaggtagtctgagaaaacttttg

SEQ ID NO: 506813 - DNA, 201 bp, Homo sapiens
actgtgtatagtgatactggatcactaccctttcattctgacgacccttgggatttcccttctgaccctgtgagaaaagtgaaaaaagatgtctttaagcsggggggtggacattctggaaaaaaataatgtaagggtgtcaggacacatgaccactgatcacattcaccctaatcactgttcccaggctaggttattccc

SEQ ID NO: 506814 - DNA, 201 bp, Homo sapiens; identical to SEQ ID NO: 503358

SEQ ID NO: 506815 - DNA, 201 bp, Homo sapiens; identical to SEQ ID NO: 503359

SEQ ID NO: 506816 - DNA, 201 bp, Homo sapiens
taatgaggttactaaaaggacattttcaaaaccttctaccatacggccacgtacagtacaattgaagggtgctatcaatagcatcagagtagtggctgccyctgtacctaacatacaatccagtataaaagatcactaacaaactgttttaaagtcttacatggcacaactgaagagtttctgttcttttctttgttacac

SEQ ID NO: 506817 - DNA, 201 bp, Homo sapiens
tctaccatacggccacgtacagtacaattgaagggtgctatcaatagcatcagagtagtggctgcctctgtacctaacatacaatccagtataaaagatcrctaacaaactgttttaaagtcttacatggcacaactgaagagtttctgttcttttctttgttacactctttctgagcactgaaacattccacatattttg

SEQ ID NO: 506818 - DNA, 201 bp, Homo sapiens
aagaaacagtattcaatgactctccaattgttggacactgtaaattgaagtttccataattatagtccttcccagctgtccatttaaaaaaaaaaaaaaaagccccacaggcattaattcaatccacctttctgggaaagtgtgtttaatgacagttcttaccctttccttactcttactaaactccaatatattctgttc

SEQ ID NO: 506819 - DNA, 201 bp, Homo sapiens
caatacttttagcaaggcagtaagtgatgtttgacattagagaagtaaaggatgctctggtggagagaatggtgtgtgtgtgtgtgtgtgtgtgtgtgtgtatataaggcacagatgtatacgtgtgtgtgtgtgtgtgtgtgtgtgtatgtatgtatgtatatataaggcacagatgtatacatatccttgcctgatttc

SEQ ID NO: 506820 - DNA, 201 bp, Homo sapiens
gtaagctacaattatttacttttcaaaagtgacatacagcagggaagaggttggtgtagtcatatattaatgaggttactaaaaacattttcaaaaccttytaccacaccgccacagacagtacaattgaagggtgatatcaatagcatcagagactcaagtaatggaactgatagggacagtattgtgagactatgaaag

SEQ ID NO: 506821 - DNA, 201 bp, Homo sapiens; identical to SEQ ID NO: 503360

SEQ ID NO: 506822 - DNA, 201 bp, Homo sapiens; identical to SEQ ID NO: 503361

SEQ ID NO: 506823 - DNA, 201 bp, Homo sapiens; identical to SEQ ID NO: 100051

SEQ ID NO: 506824 - DNA, 201 bp, Homo sapiens; identical to SEQ ID NO: 100052

SEQ ID NO: 506825 - DNA, 201 bp, Homo sapiens; identical to SEQ ID NO: 100053

SEQ ID NO: 506826 - DNA, 201 bp, Homo sapiens; identical to SEQ ID NO: 100054

SEQ ID NO: 506827 - DNA, 201 bp, Homo sapiens; identical to SEQ ID NO: 100055

SEQ ID NO: 506828 - DNA, 201 bp, Homo sapiens; identical to SEQ ID NO: 100056

SEQ ID NO: 506829 - DNA, 201 bp, Homo sapiens; identical to SEQ ID NO: 100057

SEQ ID NO: 506830 - DNA, 201 bp, Homo sapiens; identical to SEQ ID NO: 100058

SEQ ID NO: 506831 - DNA, 201 bp, Homo sapiens; identical to SEQ ID NO: 100060

SEQ ID NO: 506832 - DNA, 201 bp, Homo sapiens; identical to SEQ ID NO: 100061

SEQ ID NO: 506833 - DNA, 201 bp, Homo sapiens; identical to SEQ ID NO: 100062

SEQ ID NO: 506834 - DNA, 201 bp, Homo sapiens; identical to SEQ ID NO: 100063

SEQ ID NO: 506835 - DNA, 201 bp, Homo sapiens; identical to SEQ ID NO: 100064

SEQ ID NO: 506836 - DNA, 201 bp, Homo sapiens; identical to SEQ ID NO: 100065

SEQ ID NO: 506837 - DNA, 201 bp, Homo sapiens; identical to SEQ ID NO: 100066

SEQ ID NO: 506838 - DNA, 201 bp, Homo sapiens; identical to SEQ ID NO: 100067

SEQ ID NO: 506839 - DNA, 201 bp, Homo sapiens; identical to SEQ ID NO: 100068

SEQ ID NO: 506840 - DNA, 201 bp, Homo sapiens; identical to SEQ ID NO: 100069

SEQ ID NO: 506841 - DNA, 201 bp, Homo sapiens; identical to SEQ ID NO: 100070

SEQ ID NO: 506842 - DNA, 201 bp, Homo sapiens; identical to SEQ ID NO: 100071

SEQ ID NO: 506843 - DNA, 201 bp, Homo sapiens; identical to SEQ ID NO: 100072

SEQ ID NO: 506844 - DNA, 201 bp, Homo sapiens; identical to SEQ ID NO: 100073

SEQ ID NO: 506845 - DNA, 201 bp, Homo sapiens; identical to SEQ ID NO: 100074

SEQ ID NO: 506846 - DNA, 201 bp, Homo sapiens; identical to SEQ ID NO: 100075

SEQ ID NO: 506847 - DNA, 201 bp, Homo sapiens; identical to SEQ ID NO: 100076

SEQ ID NO: 506848 - DNA, 201 bp, Homo sapiens; identical to SEQ ID NO: 100077

SEQ ID NO: 506849 - DNA, 201 bp, Homo sapiens; identical to SEQ ID NO: 100079

SEQ ID NO: 506850 - DNA, 201 bp, Homo sapiens; identical to SEQ ID NO: 100080

SEQ ID NO: 506851 - DNA, 201 bp, Homo sapiens; identical to SEQ ID NO: 100081

SEQ ID NO: 506852 - DNA, 201 bp, Homo sapiens; identical to SEQ ID NO: 100082

SEQ ID NO: 506853 - DNA, 201 bp, Homo sapiens; identical to SEQ ID NO: 100083

SEQ ID NO: 506854 - DNA, 201 bp, Homo sapiens; identical to SEQ ID NO: 100085

SEQ ID NO: 506855 - DNA, 201 bp, Homo sapiens; identical to SEQ ID NO: 100086

SEQ ID NO: 506856 - DNA, 201 bp, Homo sapiens; identical to SEQ ID NO: 100087

SEQ ID NO: 506857 - DNA, 201 bp, Homo sapiens; identical to SEQ ID NO: 100088

SEQ ID NO: 506858 - DNA, 201 bp, Homo sapiens; identical to SEQ ID NO: 100089

SEQ ID NO: 506859 - DNA, 201 bp, Homo sapiens; identical to SEQ ID NO: 100091

SEQ ID NO: 506860 - DNA, 201 bp, Homo sapiens; identical to SEQ ID NO: 100090

SEQ ID NO: 506861 - DNA, 201 bp, Homo sapiens; identical to SEQ ID NO: 100092

SEQ ID NO: 506862 - DNA, 201 bp, Homo sapiens; identical to SEQ ID NO: 100093

SEQ ID NO: 506863 - DNA, 201 bp, Homo sapiens; identical to SEQ ID NO: 100094

SEQ ID NO: 506864 - DNA, 201 bp, Homo sapiens; identical to SEQ ID NO: 100095

SEQ ID NO: 506865 - DNA, 201 bp, Homo sapiens; identical to SEQ ID NO: 100096

SEQ ID NO: 506866 - DNA, 201 bp, Homo sapiens; identical to SEQ ID NO: 100097

SEQ ID NO: 506867 - DNA, 201 bp, Homo sapiens; identical to SEQ ID NO: 100098

SEQ ID NO: 506868 - DNA, 201 bp, Homo sapiens; identical to SEQ ID NO: 100099

SEQ ID NO: 506869 - DNA, 201 bp, Homo sapiens; identical to SEQ ID NO: 100100

SEQ ID NO: 506870 - DNA, 201 bp, Homo sapiens; identical to SEQ ID NO: 100102

SEQ ID NO: 506871 - DNA, 201 bp, Homo sapiens; identical to SEQ ID NO: 100104

SEQ ID NO: 506872 - DNA, 201 bp, Homo sapiens; identical to SEQ ID NO: 100105

SEQ ID NO: 506873 - DNA, 201 bp, Homo sapiens; identical to SEQ ID NO: 100106

SEQ ID NO: 506874 - DNA, 201 bp, Homo sapiens; identical to SEQ ID NO: 100107

SEQ ID NO: 506875 - DNA, 201 bp, Homo sapiens; identical to SEQ ID NO: 100108

SEQ ID NO: 506876 - DNA, 201 bp, Homo sapiens; identical to SEQ ID NO: 100109

SEQ ID NO: 506877 - DNA, 201 bp, Homo sapiens; identical to SEQ ID NO: 100110

SEQ ID NO: 506878 - DNA, 201 bp, Homo sapiens; identical to SEQ ID NO: 100111

SEQ ID NO: 506879 - DNA, 201 bp, Homo sapiens; identical to SEQ ID NO: 100112

SEQ ID NO: 506880 - DNA, 201 bp, Homo sapiens; identical to SEQ ID NO: 100113

SEQ ID NO: 506881 - DNA, 201 bp, Homo sapiens; identical to SEQ ID NO: 100114

SEQ ID NO: 506882 - DNA, 201 bp, Homo sapiens; identical to SEQ ID NO: 100115

SEQ ID NO: 506883 - DNA, 201 bp, Homo sapiens; identical to SEQ ID NO: 100121

SEQ ID NO: 506884 - DNA, 201 bp, Homo sapiens; identical to SEQ ID NO: 100124

SEQ ID NO: 506885 - DNA, 201 bp, Homo sapiens; identical to SEQ ID NO: 100125

SEQ ID NO: 506886 - DNA, 201 bp, Homo sapiens; identical to SEQ ID NO: 100127

SEQ ID NO: 506887 - DNA, 201 bp, Homo sapiens; identical to SEQ ID NO: 100128

SEQ ID NO: 506888 - DNA, 201 bp, Homo sapiens; identical to SEQ ID NO: 100130

SEQ ID NO: 506889 - DNA, 201 bp, Homo sapiens; identical to SEQ ID NO: 100133

SEQ ID NO: 506890 - DNA, 201 bp, Homo sapiens; identical to SEQ ID NO: 100135

SEQ ID NO: 506891 - DNA, 201 bp, Homo sapiens; identical to SEQ ID NO: 100136

SEQ ID NO: 506892 - DNA, 201 bp, Homo sapiens; identical to SEQ ID NO: 100137

SEQ ID NO: 506893 - DNA, 201 bp, Homo sapiens; identical to SEQ ID NO: 100138

SEQ ID NO: 506894 - DNA, 201 bp, Homo sapiens; identical to SEQ ID NO: 100139

SEQ ID NO: 506895 - DNA, 201 bp, Homo sapiens; identical to SEQ ID NO: 100140

SEQ ID NO: 506896 - DNA, 201 bp, Homo sapiens; identical to SEQ ID NO: 100141

SEQ ID NO: 506897 - DNA, 201 bp, Homo sapiens; identical to SEQ ID NO: 100142

SEQ ID NO: 506898 - DNA, 201 bp, Homo sapiens; identical to SEQ ID NO: 100143

SEQ ID NO: 506899 - DNA, 201 bp, Homo sapiens; identical to SEQ ID NO: 100144

SEQ ID NO: 506900 - DNA, 201 bp, Homo sapiens; identical to SEQ ID NO: 100145

SEQ ID NO: 506901 - DNA, 201 bp, Homo sapiens; identical to SEQ ID NO: 100148

SEQ ID NO: 506902 - DNA, 201 bp, Homo sapiens; identical to SEQ ID NO: 100149

SEQ ID NO: 506903 - DNA, 201 bp, Homo sapiens
tcacctggttcatatcccggagccccagcccggaccatgtggtgaaagtggccgagtacaacaaagtgaagctgagcatcttcattgcccgcctctaccaygactgtgacccgggattccagcacgggcttcgcagactgcaggacacagaggcacgcgtgcacatcatgtcttctaagggtgagaggttggggcctgagg

SEQ ID NO: 506904 - DNA, 201 bp, Homo sapiens
gtgagaggctgctttctgcctccatagcaacctctatccaccccccagtctccttcctcccatcctgggggcccctagcctggctccttccatctcctcawcatacctaaatcttgtcattgaactgatataaataggtagtagaaatatacataagtgtgaaagttaagttttgagaaacaccttttgtaaaaaaccgat

SEQ ID NO: 506905 - DNA, 201 bp, Homo sapiens
tccatctcctcatcatacctaaatcttgtcattgaactgatataaataggtagtagaaatatacataagtgtgaaagttaagttttgagaaacaccttttrtaaaaaaccgatggtaagtattgggtcattcttgtcacacccaactcaaacagaggccaggagccaggaggggaaaccgctcagtttgcaaaacgtcgct

SEQ ID NO: 506906 - DNA, 201 bp, Homo sapiens
gacatgtgcttcccgtcctgacctgcaacgcgctgcctccttacaagtgctaccagatcacctggttcatatcccggagccccagcccggaccatgtggtraaagtggccgagtacaacaaagtgaagctgagcatcttcattgcccgcctctaccacgactgtgacccgggattccagcacgggcttcgcagactgcagg

SEQ ID NO: 506907 - DNA, 201 bp, Homo sapiens
agatcacctggttcatatcccggagccccagcccggaccatgtggtgaaagtggccgagtacaacaaagtgaagctgagcatcttcattgcccgcctctaycacgactgtgacccgggattccagcacgggcttcgcagactgcaggacacagaggcacgcgtgcacatcatgtcttctaagggtgagaggttggggcctg

SEQ ID NO: 506908 - DNA, 201 bp, Homo sapiens
atgccttccctctgtcctggatcagattcacccctgcctgggccttctgagctgctcctgccctgagtaccacccctcagtgccccccacctcactgcctsttccccactttcctgaccctgcctgtgagaggctgctttctgcctccatagcaacctctatccaccccccagtctccttcctcccatcctgggggcccct

SEQ ID NO: 506909 - DNA, 201 bp, Homo sapiens
aagttttgagaaacaccttttgtaaaaaaccgatggtaagtattgggtcattcttgtcacacccaactcaaacagaggccaggagccaggaggggaaaccrctcagtttgcaaaacgtcgcttccacaagcctgatggctgaaactgctcactgtaccctgaaaccagctttacctacagcttctgagataaactgctgca

SEQ ID NO: 506910 - DNA, 201 bp, Homo sapiens
ccaggaggggaaaccgctcagtttgcaaaacgtcgcttccacaagcctgatggctgaaactgctcactgtaccctgaaaccagctttacctacagcttctragataaactgctgcaactctgggacccacgatgcctatcacagtggctcatcaatggaacctgccggctcccaacccttcctagggcccatgaactctct

SEQ ID NO: 506911 - DNA, 201 bp, Homo sapiens
tgcaactctgggacccacgatgcctatcacagtggctcatcaatggaacctgccggctcccaacccttcctagggcccatgaactctctgaaaagaggaamagaaatatttctcctttttgtaaaatctttaaccttccctttgttcttcatgtacacgctgaactgcaattcttcttcccaaataaaacattaaatttag

SEQ ID NO: 506912 - DNA, 201 bp, Homo sapiens
ctcctgaactgatcatgtttcttttttctttttttttttttctttctgttttctctctctgcctttggctctatttctgagtgatttcttccattttaacwtcttgcccttgagatattcatcttgtcatcttttttaatttctaagaacgccatttttgaggttcctttttgtcttttcataagctctgtttcctccaag

SEQ ID NO: 506913 - DNA, 201 bp, Homo sapiens
gatattcatcttgtcatcttttttaatttctaagaacgccatttttgaggttcctttttgtcttttcataagctctgtttcctccaagttgttgttttctrtttatttattttggcctctgtctttcattgtaaaggttttcctcaaatgccgcaatgagtctcagcccattgtatttgagtggtgtctccatagagtcca

SEQ ID NO: 506914 - DNA, 201 bp, Homo sapiens
tctgacaagcagaggtgtctgccaacatgtcctgagtaattagctggatttttgcacttttttctttttgctggcagcactaggcaacacttacttatttyttagctccacttgatggagctgattctaggagttaaaaaaaagactttggataataaggaccagcttctcaggctttggaacctgctgtgggagtaaagg

SEQ ID NO: 506915 - DNA, 201 bp, Homo sapiens
atggcagaaggtggaaggtcaagagaaagcaagtgaccaaacttgcagtcttaagccctttttataattggcattaatctattcatgagggtggagccctygtgacctaaacacccccccttaggtctcatcttccaacactattgcatttgggattaagttcctaacatgtgctttttgggggacacattcaaatcatag

SEQ ID NO: 506916 - DNA, 201 bp, Homo sapiens
acaacatgcacattgacaccctgcactgcttcacatatctgaattctacctgttcttctagctgtggttgaatggttaggtcctctgtaaagtttctcctytattccagccactgttctctcagtactgggaagtcatttatattctccactggctcctttgtgaagtgcaaagtttgagaaccagctcttcagtgggact

SEQ ID NO: 506917 - DNA, 201 bp, Homo sapiens
cgcgagccatcacaccagctgatatccacttttaaatgccagtgctgtacttggcataaagtagaccatgaataaatgtttgttgaataaatgaatgaatrattaaagcccaaattccactatatggctgtatgagagatttttggcttattggttcctttgggttgttttgcctctataacttcctcccttttttgtgta

SEQ ID NO: 506918 - DNA, 201 bp, Homo sapiens
atgcatttatcatttgatatattttttctggctgcatgattcagcattttgatttgcattgaccattttggaaaaatgaagcatttcttggttgtgaaataatttgtaatttgtttctttggaatattccagtttgtggcctagttgactatgtagtgttttccccagacttagtgtaagataagaaaatgagaatctcag

SEQ ID NO: 506919 - DNA, 201 bp, Homo sapiens
taaaagcgttcctatttctccacatcctctccagcatcagttgtttcctgactttgtaatgatcgccattctaactggcatgagatggtatctcattgtgkttttgatttgcatttctctaatgaccagtgatgatgagcattttttcatatgtttgttggctgcataaatgtcttcttttgagaagtgcctgtttatatc

SEQ ID NO: 506920 - DNA, 201 bp, Homo sapiens
gagaagtgcctgtttatatcctttacccactttttgatgggtttgtttgtttttttcttgtaaatttgtttaagttctttgtagattctggacattagccytttgtcagatggatagattgcaaaaattttctcccattctgtaggttgcctgttcactctgatgataatttcttttactgtgcagaagcgctttagttta

SEQ ID NO: 506921 - DNA, 201 bp, Homo sapiens
gcatttatcatttgatatattttttctggctgcatgattcagcattttgatttgcattgaccattttggaaaaatgaagcatttcttggttgtgaaataatttgtaatttgtttctttggaatattccagtttgtggcctagttgactatgtagtgttttccccagacttagtgtaagataagaaaatgagaatctcagca

SEQ ID NO: 506922 - DNA, 201 bp, Homo sapiens
catttatcatttgatatattttttctggctgcatgattcagcattttgatttgcattgaccattttggaaaaatgaagcatttcttggttgtgaaataatttgtaatttgtttctttggaatattccagtttgtggcctagttgactatgtagtgttttccccagacttagtgtaagataagaaaatgagaatctcagcaa

SEQ ID NO: 506923 - DNA, 201 bp, Homo sapiens
atttatcatttgatatattttttctggctgcatgattcagcattttgatttgcattgaccattttggaaaaatgaagcatttcttggttgtgaaataatttgtaatttgtttctttggaatattccagtttgtggcctagttgactatgtagtgttttccccagacttagtgtaagataagaaaatgagaatctcagcaat

SEQ ID NO: 506924 - DNA, 201 bp, Homo sapiens
tttatcatttgatatattttttctggctgcatgattcagcattttgatttgcattgaccattttggaaaaatgaagcatttcttggttgtgaaataatttgtaatttgtttctttggaatattccagtttgtggcctagttgactatgtagtgttttccccagacttagtgtaagataagaaaatgagaatctcagcaatg

SEQ ID NO: 506925 - DNA, 201 bp, Homo sapiens
ttgtgcttttggcccttcttccccaccgccccgcccccgcaacccacccaagagatagatcctggttatatttctggcctctgtgtccagagcctggtcasacttctggggcttcatttgtacattcctttttcctgtaagacttatagggttcttgcctcagaaacagctcccacccctaaagttacatatatagaaaca

SEQ ID NO: 506926 - DNA, 201 bp, Homo sapiens
aaagtttctcctctattccagccactgttctctcagtactgggaagtcatttatattctccactggctcctttgtgaagtgcaaagtttgagaaccagctcttcagtgggactccctgggtttgaatcctaaccccactgtttactagctgtgtgtccttggcaaagttactcaacttctctatgtacctctgggtcttac

SEQ ID NO: 506927 - DNA, 201 bp, Homo sapiens
cagttgtgcaccaccatacctgtctaattttaaaatttttgtagagtcagagtctcactatgtcacccaggctggtctcaaactcatgggctcaagtgatyctcccacctcagcctcccagggtgctgggattacaggtatgagccaccatgcccagtctgtgatcagtgatctttgatgtcactgtcataatcgttttgg

SEQ ID NO: 506928 - DNA, 201 bp, Homo sapiens
tggacctttcttttccttgaaacacaataatattcaatttaggcaaattaataaccctacaatagcccctgagtggtcaagtgaaagaagagttgcatgtyccccattttaaatcaaaagctggaaatgatttagcttagtgaggaaggcatatcgaaagtcgagatgggccaaaagctaggcctcttgtcagttagccaa

SEQ ID NO: 506929 - DNA, 201 bp, Homo sapiens
ttggccgggtgtggtggctcacacctgtaatcccagcactttgggagaccaaggcgggtggaacacctgaggtcaggaggtcgagatcagcctggccaacrtggtgaaaccccgtctctactaaaaatacaaaattagccaggcgtggtggtgcatgcctgtaatcccagctacttgggatgctgacgcaggagaatttct

SEQ ID NO: 506930 - DNA, 201 bp, Homo sapiens
attgcatttgggattaagttcctaacatgtgctttttgggggacacattcaaatcatagctaacgcctttgtgcttttggcccttcttccccaccgccccrcccccgcaacccacccaagagatagatcctggttatatttctggcctctgtgtccagagcctggtcacacttctggggcttcatttgtacattccttttt

SEQ ID NO: 506931 - DNA, 201 bp, Homo sapiens
tcatcttccaacactattgcatttgggattaagttcctaacatgtgctttttgggggacacattcaaatcatagctaacgcctttgtgcttttggcccttyttccccaccgccccgcccccgcaacccacccaagagatagatcctggttatatttctggcctctgtgtccagagcctggtcacacttctggggcttcatt

SEQ ID NO: 506932 - DNA, 201 bp, Homo sapiens
cctaaacacccccccttaggtctcatcttccaacactattgcatttgggattaagttcctaacatgtgctttttgggggacacattcaaatcatagctaaygcctttgtgcttttggcccttcttccccaccgccccgcccccgcaacccacccaagagatagatcctggttatatttctggcctctgtgtccagagcctg

SEQ ID NO: 506933 - DNA, 201 bp, Homo sapiens
agttcagctaaaaatacctctgttgacattgaatgttcttaacacaaataaatgataaatatttgagataatgtttatactaattacctgatctgatcacygtacattatatgtatcaaaacatcatatggaccccacaaataggtaaaattattgtcaattttaaaaaatttaaaaataaaaataaaacaatgtcattac

SEQ ID NO: 506934 - DNA, 201 bp, Homo sapiens
gtttatactaattacctgatctgatcactgtacattatatgtatcaaaacatcatatggaccccacaaataggtaaaattattgtcaattttaaaaaattwaaaaataaaaataaaacaatgtcattacaggacgtgagcaaatttaggaaaaaagtacttccattgaacacacactctatccagagccttgtgctgggtg

SEQ ID NO: 506935 - DNA, 201 bp, Homo sapiens
acaagcctccaccaatgtagaggtttattttgccaaggttgaagacatgcctgggaaaaggagacataagccaccgtaggatctgtagcctgtgctttttytgaagaggatttcaagggcttcaatatttaaagcggaaaagtgggcaaaaggggaaagggcaaagcgaaaaaaggaggtcgcattcttctgaatccacat

SEQ ID NO: 506936 - DNA, 201 bp, Homo sapiens
agagcccttgcacccccgcttgtctggaaggggctggagcaggtgtgggaactggagcaaatggaggtttaggatttggagtagatcttatctaagctatwagagcttcattatacacatcccctttccagaagccacgagttctgtctatagtgggtactgttctatgttattttatgtgatggttggtccagtgcagcc

SEQ ID NO: 506937 - DNA, 201 bp, Homo sapiens
ctcagcccactatgcactatgtcaggccaactggtcttactctgcaggagagtctgagattcactgttgcttcctgtggggaggcttttctgagcccccargcctggtgctgtgtgctcccgtggcagcccctgcttctcctgtacaccacatattgccaacttgcttctgactttcccctactgagctacattctccatg

SEQ ID NO: 506938 - DNA, 201 bp, Homo sapiens; identical to SEQ ID NO: 434696

SEQ ID NO: 506939 - DNA, 201 bp, Homo sapiens; identical to SEQ ID NO: 434697

SEQ ID NO: 506940 - DNA, 201 bp, Homo sapiens
cctacgcttgctgttctccagattgaggctttctcctcttgcttcatactcccctccctcagcccactatgcactatgtcaggccaactggtcttactctrcaggagagtctgagattcactgttgcttcctgtggggaggcttttctgagcccccaggcctggtgctgtgtgctcccgtggcagcccctgcttctcctgt

SEQ ID NO: 506941 - DNA, 201 bp, Homo sapiens
taaatatgtagcaaagtagaatagcctttgtactaatttcaaatcatgtctctatcacttaccaactgggcaactttgagtagtgtatatatcttcactgyttttctcaggtcatgtttgggtgcaacaattagatacttactcaagctagtacatataaaagggaactttattaaaaagatatggatcttacagcatcca

SEQ ID NO: 506942 - DNA, 201 bp, Homo sapiens
tgagaaggtctggccagctcgtttccctttctcctctcccttgtttcttgctgaatcttctggagcaccagtgaaaacacagtccttgcctggctttctgtttttttttttttattctctccccattgctttaattaacttagaaattcagtggactcttagacaaacaatagaatttgattatctctatagtatacctgg

SEQ ID NO: 506943 - DNA, 201 bp, Homo sapiens
aattgtgtggaagcagcaggacagtgctggagctttgggtcatgtgcctggttgcctatacccacgtgttctgcctgtgggattcacaatttacacaggcytgagtgagaatgcaggtgcgctgaaggagcaggcaatagtgaagagtcaaggtttgggaggggaaccagagaccccagacttcagaactgcagcttttgg

SEQ ID NO: 506944 - DNA, 201 bp, Homo sapiens
ttgatgccatcaaggtaggaagtttctgcctgcacagagataccctcttgggaaggaagcgggtgtctggccagagctcctttgggaagggaaggcacacytgatagagaatttgaccttggaaaatgagtgcatgtttacctgaaagaggtatttctaacctagaagagcctgggctactttttattgaaaaatttaaga

SEQ ID NO: 506945 - DNA, 201 bp, Homo sapiens
gtgctgggagtttacagaagcttcagaatatacatgggccatcttcctggggcattagtggactccataagtggattatggagatgcaacattcatctccrtttgtaaaaacattacattttaaagaagttattctgggtccacttgagtctgtgctcttagatatttcctcctctttcatagtatgtacttactgtcccc

SEQ ID NO: 506946 - DNA, 201 bp, Homo sapiens
ggtaggatctttgccactacttaaaaaaaaaaaacaagcatttaaactcccatagtgtaaattaattcagatgtaaataaccattcagacaaccaggaatytgacaagcagaggtgtctgccaacatgtcctgagtaattagctggatttttgcacttttttctttttgctggcagcactaggcaacacttacttatttct

SEQ ID NO: 506947 - DNA, 201 bp, Homo sapiens
cctaatgctatccctcccctatcccccatcccctgacagaccctggtgtgtgatattcccttccctgtgtctatgctcttcttcctcaactcccacttatragtgagaacatgtggtgtttggttttctgttcctgtgatagttcgctgagaatgatggtttccagcttcatccatgtccatgcaaaggacatgaactcat

SEQ ID NO: 506948 - DNA, 201 bp, Homo sapiens
gcaatctttcttactgaatgttataatcacattgcctatattatcttctaaaagttttatagtttagcctttcatgtttaggcctacagtctatgtgaaaytgatgtttgtgttcaataggatagatccaatagaaataggatcatatttctttttttttttttcctgtgtgaatactcagtactctcagcaccgtgaatt

SEQ ID NO: 506949 - DNA, 201 bp, Homo sapiens
agaaatgcatttatcatttgatatattttttctggctgcatgattcagcattttgatttgcattgaccattttggaaaaatgaagcatttcttggttgtgaaataatttgtaatttgtttctttggaatattccagtttgtggcctagttgactatgtagtgttttccccagacttagtgtaagataagaaaatgagaatc

SEQ ID NO: 506950 - DNA, 201 bp, Homo sapiens
gaaatgcatttatcatttgatatattttttctggctgcatgattcagcattttgatttgcattgaccattttggaaaaatgaagcatttcttggttgtgaaataatttgtaatttgtttctttggaatattccagtttgtggcctagttgactatgtagtgttttccccagacttagtgtaagataagaaaatgagaatct

SEQ ID NO: 506951 - DNA, 201 bp, Homo sapiens
tctatgaggataggaccaagggacatctttaggaatgggaacgacacagctacatctgctgacatcagcttctaaagaacccctcaaacgtgctgacttaytcaataatctgttagagaccaataaagcatgaattcatgtgaaaaactcttgaagagcattcagttttcagcctgcatcacctctctccatttccctcgc

SEQ ID NO: 506952 - DNA, 201 bp, Homo sapiens
gtgctccacagcctgaggacaagtgacccctagagcccaagcctggcccaggtggcctggacactgcacactgacccagtctccagagcccttgcaccccsgcttgtctggaaggggctggagcaggtgtgggaactggagcaaatggaggtttaggatttggagtagatcttatctaagctattagagcttcattataca

SEQ ID NO: 506953 - DNA, 201 bp, Homo sapiens
taaaataggaatgataatacccacgttgcagagtgtgagaattaaaaaagagtgcaaggcaagtgcttgcacaaggtctgataccaggaagcaatcaacayagattattaatagccactaattataaaccacttttgtggaacataaagagtggctgttgttgtggttgggtcataatgacatctgatgctcattcagatg

SEQ ID NO: 506954 - DNA, 201 bp, Homo sapiens
ggcttgcctaaagtcacacagcttgaaagtgggaagctcaaagcttcccaactagcttgtcatctgattcagttcagctaaaaatacctctgttgacattkaatgttcttaacacaaataaatgataaatatttgagataatgtttatactaattacctgatctgatcactgtacattatatgtatcaaaacatcatatgg

SEQ ID NO: 506955 - DNA, 201 bp, Homo sapiens
gcttcccaactagcttgtcatctgattcagttcagctaaaaatacctctgttgacattgaatgttcttaacacaaataaatgataaatatttgagataatrtttatactaattacctgatctgatcactgtacattatatgtatcaaaacatcatatggaccccacaaataggtaaaattattgtcaattttaaaaaattt

SEQ ID NO: 506956 - DNA, 201 bp, Homo sapiens
tttgctgcaacttacttttccttaccattcctgagatgtcattcttgttcatgcctccaagcctttgcacttgccctttgttcataatgccttccttgccygtttccctagatcgaatcctactcgcttatttttccaggcctgtcttaacgtctcaatgtctcctctaccgcaaagccttccagaccccgcaatcactca

SEQ ID NO: 506957 - DNA, 201 bp, Homo sapiens
atccaaagagcagatgaacaactgcatccattcttggtaacatttatgggaaactgagacttaggtaagttaagtctcttaactactaaaccttatgggaraggaaatccataaatgtactgagaactgcttaggaatgaatcaattatgtgttttgtacttacatgaatctactatttttctaatgtatgtaaatgctac

SEQ ID NO: 506958 - DNA, 201 bp, Homo sapiens
acacaggcctgagtgagaatgcaggtgcgctgaaggagcaggcaatagtgaagagtcaaggtttgggaggggaaccagagaccccagacttcagaactgcrgcttttggggtcaacacaacatcccagaacatcaagacaccaagacatatcagctaggaccctgcagtaggacatcggtgtccagatgagaccagaagca

SEQ ID NO: 506959 - DNA, 201 bp, Homo sapiens
ttatttctttgtcgatgtcttgtttttcatgtagagagtagagaacaactctattgaaattttttgttcagatgttggacctcctgaactgatcatgtttyttttttctttttttttttttctttctgttttctctctctgcctttggctctatttctgagtgatttcttccattttaacatcttgcccttgagatattca

SEQ ID NO: 506960 - DNA, 201 bp, Homo sapiens
agtttggactaataatttaagaattctggtaccaagtactaattcccaactttatggtcaaaataatttggtgtatacatgaagaagtgcacatttaacayagtaagatctgttcaaataacaggctttcagaagcactggctgcaggtaggttttatttgggtatttcaaataggcacacagaagggataagtgcaaaga

SEQ ID NO: 506961 - DNA, 201 bp, Homo sapiens
tcatccaggtatttacatagatgtttagatatattagagaaagcaaaagaatttcataagcccacccacttcaaaacacaccacagaatcacctcatcttygaagccttcttcatcttattttaattgtttatacacctgcttccttcaccaggctttgggcctctgaatggtcagaccctgccttgctccccaccccagc

SEQ ID NO: 506962 - DNA, 201 bp, Homo sapiens
tagggcctcattatttttcacatggactatggtatcagctttcaaactggtcttcccactatgagcaattcttcattcatgcctcctcccaataccaccasggttcttgcttgaaaatagagacatcaaaatgtctgtcagtctttcaattaaaactttcccaaaggttccccattgcttatggagtaaagtctagataat

SEQ ID NO: 506963 - DNA, 201 bp, Homo sapiens
ctgcctaatgtggtgaaattgtatctccaactcataaatgctgaattagctacctcatctctctttctggtatttcacagaggagaaaagtgaaaacaagktgtccttagatcagacctgggaaaaaaagaggaggacttgttcaccaacttaagaatctgaaaaaaggtatatttctttttattgaatagggagttataa

SEQ ID NO: 506964 - DNA, 201 bp, Homo sapiens
ttcagatgcactgcctaatgtggtgaaattgtatctccaactcataaatgctgaattagctacctcatctctctttctggtatttcacagaggagaaaagkgaaaacaaggtgtccttagatcagacctgggaaaaaaagaggaggacttgttcaccaacttaagaatctgaaaaaaggtatatttctttttattgaatag

SEQ ID NO: 506965 - DNA, 201 bp, Homo sapiens
aagctggaactctagcatgagtgttcccaaagcttaacaaaacacaagcaatttgaattcaggattccatgatgtcattaacaaagatgtgactttgaaayggaaacagaatagtggggaagatttctgagaggagacttcaactgtaaaagtcattttaaatgaattctatttgtttcgttaataatcatgggatttgca

SEQ ID NO: 506966 - DNA, 201 bp, Homo sapiens
gtgagaacatgcagtgtttggttttttgtccttgtgatagtttgctcagaatgatggtttccagtttcatccatgtccctacaaaggacatgaactcatcmttttttatggctgcatagtattccatggtgtatatgtgccacattttcttaatccagtctatcattgttggacatttgggttggttccaagtctttgcta

SEQ ID NO: 506967 - DNA, 201 bp, Homo sapiens
ccaaggccaagccgtatgctgaatcaattcctagttctacacaggaaagaagcatcattttagtctcagataaattaatagtacgcagctaaataactcawaacagaaaagtcatcatagtgacagagttgtaaaagccagttgcaggaaattgcacaaaataagcagaataaatattactggagtgaattggatgtttta

SEQ ID NO: 506968 - DNA, 201 bp, Homo sapiens
taggagaatttgctaaacagcaacactttcagccactcactaatatctgagcacctcctacactcattagtgattcaatccactgtgtgttcatgtgtgtktgtgtgtgtgtgtgtgtgtgtgtgtgtatgtgtttctcatcattttgctgcattggaggcagttttatgcctccaatttttaatttttaatttttttgca

SEQ ID NO: 506969 - DNA, 201 bp, Homo sapiens
ttcatactaggatattatgggtgacctccaaaatataagctttaagtgaacagtgaattttggagaagagttcaaggcttgaaggaatcggaacagatgcttttttttttttaatttctgtttatttttgtttgttctattgcctttttaagacagaaaaagatggagaatgtggttatgctgacaaaaccaccaccaggc

SEQ ID NO: 506970 - DNA, 201 bp, Homo sapiens
cttagatcacagaaaacacagtgttagaatcattgttacttctatgcagaaaaggaagaaggaaaaaaatgcgccaatttcctggtaaatttccccaacgrttttaacaatctttaccatatgcaaaatataatgttctcaaagattaaataccactcttgagacttaaagaaaagagaatagaagaccatacttgggaaa

SEQ ID NO: 506971 - DNA, 201 bp, Homo sapiens
tgagtgagaatatgcggtgtttggttttttgttcttgcgatagtttactgagaatgatgattttcaatttcatccatgtccctacaaaggacatgaactcrtcattttttatggctgcatagtattccatggtgtatatgtgccacattttcttaatccagtctatcattgttggacacttgggttggttccaagtctttg

SEQ ID NO: 506972 - DNA, 201 bp, Homo sapiens
attgtatgctaaacaaggggtggattattcatgagttttccaggaaaggggtggggaattcctggaactaagagttcctcccctttttagactacataagktaacttccaagcattgctatggcatttgtgaactgtcatggtgctggtaggagtgtcttgtagcatgttaatgcaatataattaacatataatgagcagt

SEQ ID NO: 506973 - DNA, 201 bp, Homo sapiens
attcctccaaaatcccacaattttgttaacagtctggtatacatttttctacatctctctctacatctttctcaggcccactgtaacatgtacctacattaaaaaaaaaaaaactttttacaaactttaaaaaaataggactctattactctacaatttgcttctatcatttaccaaaaaatctttgatatatttctgatt

SEQ ID NO: 506974 - DNA, 201 bp, Homo sapiens
ttaaaaagtatcagaactgtgtgtgtgtgtgtgtgtgtgtgtgtataaccatttgtgtgaaacaatgtgtaatgtgtttcaaaatggcccctcaaagtggratgtgaaatagaaaaaaatatatctgatgctgaagtcagggttttttaccatgaccttaaggcatttattagggataccacacctatacccaaccaagat

SEQ ID NO: 506975 - DNA, 201 bp, Homo sapiens
gttgctggggcttggggaggggggagttgggaagttaatgcttaatgggtatgcagtttctgtttggtatgatggaaaagatttggaaacaaatagtcacratggtttcataacattgctaatataattaatgccattggattatacacttaaaaatgattaaaatagcatttcatgttatatgtatatattttatcacaa

SEQ ID NO: 506976 - DNA, 201 bp, Homo sapiens
tgggattgtgggagaaataaggaattgtgggagagacagaagattgtggaaagaactgagaattgtgggagacagaactgtgggtaacaaaacagaattgygggagtgaaaaggaattgtgggagggacaaaagaattgtgggtaaagagagaagttgagctgtgatagttgaaatggaatccttgggctatcctgtaggc

SEQ ID NO: 506977 - DNA, 201 bp, Homo sapiens
gccaccatgcccagctaatttttctatttttagtagagatggggtttcaccatgttgatcagattggtctggatctcgtgatctcatgatccacccgcctyggcctccaaaagtgctgggattacaggcatgagccacagtgcctggccaggtataaacagttttaaggctcttgccaaactctagattcttgccaaaaaa

SEQ ID NO: 506978 - DNA, 201 bp, Homo sapiens
tctctctaggataatatttggaaaacttttgatttgagtgtcttgtgcttatttctcttggaagataggttctcaaagaagatgcctttgaccccctccayagaagggggagaatgttttagaatagttgaaattctatgaatagaggatagagaaaatagaaggaaatcagtagtaaaagatttcaatataaaatttcta

SEQ ID NO: 506979 - DNA, 201 bp, Homo sapiens
gtgctcaatgaatacttgtcaaactaatgaaataagacttgcattgtaccaaacactgatgatgactcacataacataaaacataaccatttccttcaagyacttacatttttgggtgaaggtacacaccagaaaagatagctagcactgtaaaacagtgcttaatgagtaacagatgtataattcagacaataattacta

SEQ ID NO: 506980 - DNA, 201 bp, Homo sapiens
ctagaaatttcctttctctccttattttcatcctgtcctcataagcgcaggccctgaatcaaagcagggcctggcccatagtaggaactgcatagataagdagatagatagatagatagatagatagatagatagatagatagatagatacatagataataaatatataatgcatgcatttaaacatggattaaattaaca

SEQ ID NO: 506981 - DNA, 201 bp, Homo sapiens
aaaatggggtgtactagtctttgtgtggatatatgcacttgtttatcttgggtatataactcagaataaaattctaatactaaaaatggaaaatattaatmatcaaattgaattttttatattgctataaagacttgaaggacacaataatcttctcccatttattttacacaaagggaaaatagataaaccttttaaata

SEQ ID NO: 506982 - DNA, 201 bp, Homo sapiens
tgggaatatttcagatgcactgcctaatgtggtgaaattgtatctccaactcataaatgctgaattagctacctcatctctctttctggtatttcacagakgagaaaagtgaaaacaaggtgtccttagatcagacctgggaaaaaaagaggaggacttgttcaccaacttaagaatctgaaaaaaggtatatttcttttt

SEQ ID NO: 506983 - DNA, 201 bp, Homo sapiens
tagttatggtaacagtagtaacagtcgtaatattagtacaaaagtaatttaaggacaggcctgattttttttctggtatggattagacatgaaaattaatgagagagagagagagagagagagagagagagagagagaaagtgcaccatgttctgattagctaagtaaactggaatcagaagccacctctggagcttatag

SEQ ID NO: 506984 - DNA, 201 bp, Homo sapiens
tttttgggaggccgaggtaggcagatcacttgaggccaggagttgaagaccagcctagccaacatggtgaatccactctactaaaaatacaaaaattagcyaggcacacctgtagtcccagctactcggggtatgagaattgcttgaacccaggaggcagaggttgcagtgagctgagatcccgccactgcacttcagctt

SEQ ID NO: 506985 - DNA, 201 bp, Homo sapiens
cacccatctcacacactgcagctgaaaattgtggctgggcttgcatatgtaattagagttgtgcctctttgccaggttgtttcttcctcctctactaattrgtctagttttccctttaaggcacgtaggaattatcagttaagtcaaatgaaaacaataggctgggtgatgtcagtttttgaaactgttgattactttcca

SEQ ID NO: 506986 - DNA, 201 bp, Homo sapiens
cagcttcaaacatctggtctccactttctgtcttctgcttccggtcctgcacctgcactttgggagatgtggacacttagatttttggcaccttgtcttaratatggtttgaactcactctggtacccatgaatctggctacccctccactcaaactctggtctccaggagttctctgcctgactagtgtatccatcagac

SEQ ID NO: 506987 - DNA, 201 bp, Homo sapiens
gcagtccctgcctcttctccttggtgctcctcattcccctgcaggtaccaaccagtcctttagcatccttacggggcccctctctaggatttggggagtgagtgaaagagttggcacatcccagtttacggagggcagaccatgtgcaggggcttcacaaacatcatcaactttcacccttccagcattcctgctgggaga

SEQ ID NO: 506988 - DNA, 201 bp, Homo sapiens
agtgattctagtttcgccctgaccttctgccttgtgatcttttgttgcccttgaagcatgtgatctctgtgacccacaccctattcatgcactccctcccytttgaaaattgctaacaaaaacttgctggttttatggctcagggggcatcacggaacctgccggcatgtgatatctccctcagacacccagctttaaaat

SEQ ID NO: 506989 - DNA, 201 bp, Homo sapiens
atgaagtttggttcacaagaaataaaaaatatattatatgccaaacttcacctatagatacccatgaggttaaaacaaaataaataaaacaaagagaataytgatttcctttgggacttttgagtcttccagtgtctagcccaaggaatcaagcttttgaatcagtagccattttcatggatgatgctgggacttatattt

SEQ ID NO: 506990 - DNA, 201 bp, Homo sapiens
tattaatcacagttctttttcctgaatagcaatgatatcagcagctaatgcttattgacttcttacattgtgctaagccctttgcttatttatctcatgtragctactcaaaaatcccatattggagatgttattactatccattttactgaaatggagatagctgcttaacagggtttaggaactcacatagtaagtgcg

SEQ ID NO: 506991 - DNA, 201 bp, Homo sapiens
aacagggctcttttaaaaacagacagagcaaaagtttcttccctcccctaatcagtcaatggatggtaatgatatgatggcaacataagaacataaatccrtttttccaggtggtttttatggaccttctgaatcagaatcatctggggtagctgttaaaatgctgtttcccaggtttcatcctgtactcttcttttgtag

SEQ ID NO: 506992 - DNA, 201 bp, Homo sapiens
ccttctgaatcagaatcatctggggtagctgttaaaatgctgtttcccaggtttcatcctgtactcttcttttgtagtgccctgggacatccttttaaaayaagttatccctatgattcttatgtacattaaagcttaaacgccactaaaaaataagcaagagaaaaggtcaattacatcaaaatatgataaattacattt

SEQ ID NO: 506993 - DNA, 201 bp, Homo sapiens
agttatggtaacagtagtaacagtcgtaatattagtacaaaagtaatttaaggacaggcctgattttttttctggtatggattagacatgaaaattaatgagagagagagagagagagagagagagagagagagagaaagtgcaccatgttctgattagctaagtaaactggaatcagaagccacctctggagcttatagt

SEQ ID NO: 506994 - DNA, 201 bp, Homo sapiens
ttggcagtctgttggtctctttgtaatgtcagattaaagaaatcacctggaggctgacattggccccttcccttcccaggaggcagatctggcctaaatayggagatgcgtacaaagaagacctaggatcacaatcgttcttagccatcaaactcttcttccaggtcctagagaaagtggccactctataccaaagccaaa

SEQ ID NO: 506995 - DNA, 201 bp, Homo sapiens
gttcgagaccagcctggccaacatggtgaaacccccgtctctactaaaaatacataaattagccgggtatggtggcaggcgcctgtaatcccagctactcgggaggctgaggcaggagaatcgtttgaacccaggaggcggaggttgcagtgagtcgagatcatgctgctacactctagcctgggcgacagcgagactcag

SEQ ID NO: 506996 - DNA, 201 bp, Homo sapiens
tcaccgcaacctccacctcccaggttcggccttccaaagtaactgggattataggcatgcaccaccaagcccagctaattttgtatttttaatagagatasggtttcttcatgtgggtcaggctggtctcgaactcccgatctcaggtgatccgcccacctaggcctaccaaagtgctggtattacaggcatgagccactg

SEQ ID NO: 506997 - DNA, 201 bp, Homo sapiens
aggactcctagaggtgaacacttttcacctcacccttaagtcctggcagtttctttgaatttttgtttctgctttagagtgcagtgggggagaaaataccrtcctcaagatctgagaaactggagaggaaaagtcacaggacaaccaacttctctatgacatagcccagcatctgaggaaagtcctgcaatagtggaggtg

SEQ ID NO: 506998 - DNA, 201 bp, Homo sapiens
caaggctggtggatcacctgaggtcaggagttcgagaccagcctggccaacatggcgaaacctcacctctactaaaaatacaaaaattagggccgggcgcrgtggctcatgcctataatcccagcactttgggaggccaaggcaggtggatcacctgaggtcaggagatcgagaccagcctggctaacacagtgaaaccct

SEQ ID NO: 506999 - DNA, 201 bp, Homo sapiens
aggagttcgagaccagcctggccaacatggcgaaacctcacctctactaaaaatacaaaaattagggccgggcgcagtggctcatgcctataatcccagcmctttgggaggccaaggcaggtggatcacctgaggtcaggagatcgagaccagcctggctaacacagtgaaaccctgtctctactaaaaatacaaaaacaa

SEQ ID NO: 507000 - DNA, 201 bp, Homo sapiens
atcctgtgaagacgaaagtcacgtggagaggcctagcagccatagctgagtccagatactagctgggggaagacagctgcttcagccagcctgggagagamcagcagagctttccagacaactcagaattgtgagaaaggctgttgtcttaagccattgttttggggcaatttgcaacacagcagtggataactgatataa

SEQ ID NO: 507001 - DNA, 201 bp, Homo sapiens
tactaaaaatacaaaaattagggccgggcgcagtggctcatgcctataatcccagcactttgggaggccaaggcaggtggatcacctgaggtcaggagatygagaccagcctggctaacacagtgaaaccctgtctctactaaaaatacaaaaacaaaattagctgggcgtggtggcgggtgcctatcgtcccagctactc

SEQ ID NO: 507002 - DNA, 201 bp, Homo sapiens
tacaaaaacaaaattagctgggcgtggtggcgggtgcctatcgtcccagctactcgggaggctgaggcaggagaatggtgtgaacccaggaggcagagctwgcagtgagctgagatcgcgccactgcactccagcctgggcaacagagggagacccggtctcaaaaaaaaaaaaaaaaaaaattagccaggtgtggtgggg

SEQ ID NO: 507003 - DNA, 201 bp, Homo sapiens
gggtgcctatcgtcccagctactcgggaggctgaggcaggagaatggtgtgaacccaggaggcagagcttgcagtgagctgagatcgcgccactgcactcsagcctgggcaacagagggagacccggtctcaaaaaaaaaaaaaaaaaaaattagccaggtgtggtggggtgcgcctgtaatcccagctactcgggagagg

SEQ ID NO: 507004 - DNA, 201 bp, Homo sapiens
cgtcccagctactcgggaggctgaggcaggagaatggtgtgaacccaggaggcagagcttgcagtgagctgagatcgcgccactgcactccagcctgggcracagagggagacccggtctcaaaaaaaaaaaaaaaaaaaattagccaggtgtggtggggtgcgcctgtaatcccagctactcgggagaggctgaggcagg

SEQ ID NO: 507005 - DNA, 201 bp, Homo sapiens
ggcatgcaccaccacacccagctaatttttgtatttttagtagagatagagtttcaccatgttggccaggctggtctcaaactcctgacctcaggtgattygcccgccttggcatcccaaagtgctgggattacaggcatgagccactgcacccagtgtttttttctcttttttttgagtcagagtctttcttgctctgtc

SEQ ID NO: 507006 - DNA, 201 bp, Homo sapiens
ggtcgatggatggtcgtcctaggtgtccccaggcttggcggcttcctctggctgccacgtagggagcacactgaagacagtgggggtgaagcagggctaaracaaggcacacctgtcgacaggactagcaaggggacgcaggggtggagagaggagtcggggtcttgtggggcttggggcctgagtgatgctaggatggag

SEQ ID NO: 507007 - DNA, 201 bp, Homo sapiens
ttgagccccgctctgccgatgactccttgtcgggtgtcgtgcgttgcctatactttgccgacacattccttcgagatggtaaggcaggggcaggggcaggracagggcaagggttgggggggctggcctcaattggccacctgggagatgggtggtggcaagggaggtggtgggactgcaccttccaggaggtggctgggc

SEQ ID NO: 507008 - DNA, 201 bp, Homo sapiens
gcctgcttagctcagtgctcctccctcggcagcccctgggccctccagagggatgggtgaactaagctgggtggtagaggaatggtaacagaacgtagggygcaaagcaggatgcaagccactggggtgctagggagacagtgttcaggagcccccgcccggcagttgcaggaagccaatgcacagctggctgagcaggcc

SEQ ID NO: 507009 - DNA, 201 bp, Homo sapiens
gagatctagggcggggcttgggaggcggggcctcggacacggaggtaggaataggaggggcagcttgcagagggggcggggcctgggcagagtcagcaaaraggaggtgggtttgggcccagctctgtagggaggtagtgaagccacaggggtcagggcatgtcagggtgcgaaggatcctggggaggggcctccgaagct

SEQ ID NO: 507010 - DNA, 201 bp, Homo sapiens
cggaggtaggaataggaggggcagcttgcagagggggcggggcctgggcagagtcagcaaagaggaggtgggtttgggcccagctctgtagggaggtagtraagccacaggggtcagggcatgtcagggtgcgaaggatcctggggaggggcctccgaagctgcaagcgcacctgcgcctcggtgccctcgaggctgcggc

SEQ ID NO: 507011 - DNA, 201 bp, Homo sapiens
tcataacctgcagggagagagtcgagctcagtgagggcccacctgagaccctcagggacttgggcgacaccacccactacccactgcaagctctgtcctcycttaccttccacaagtcccatgcccaggtgcccagggaggaaccgcttgtctggggtgaggcccacgtacatccgggctttgatggtctcgatgtgctcc

SEQ ID NO: 507012 - DNA, 201 bp, Homo sapiens
atcctgttcagggactggttagcctgcaggcggccagagggctggctagccctgggggggccccctgaaaatctcaggtccaggatctccctcagggtgtygtcgcatccgccgatgcagcaaacaaactccagaggcatggtcgggggaaggctaccgcgcttaaactttaactttaacctagtgaggccagaagatgag

SEQ ID NO: 507013 - DNA, 201 bp, Homo sapiens
tccagccccgtgtcctggtgcagtgcctgccgccagctgctgtaaccgctgtcacactccacaccgagtggagcctcgtggcttttggcaccagtcatggytttggcctcttcgactaccagcgcaagagccctgtgctggccaggtgtgtggggtggggccggctgggcagttggagcccccagcgagatggggtctggg

SEQ ID NO: 507014 - DNA, 201 bp, Homo sapiens
ttcccagccctggcactaggtgcttctgtctcccctacggccccaccatcctggaaagactccgtgaggctacttctcaaaagcagcctccagacctttgytcatactgttccttgtccagaaggtggcaccctctccccaccaaagtcgagatggagcccaaagccaactacatcggtgtgtagtccattcccccagtcg

SEQ ID NO: 507015 - DNA, 201 bp, Homo sapiens
gtcctctgcctaggaaaaccagagacctttgttcacttgtttatctgctgaccttccctccactattgtcctgtgaccctgccaaatccccctctgtgagraacacccaagaatgatcaattaaaaaaaataaaaataaaattaaaattaaaaaaaaaaaagagcaaaactccatctcaaaaaataaaaaataaaaaataa

SEQ ID NO: 507016 - DNA, 201 bp, Homo sapiens
aagggtggggaaaagattgagaaatcggatggttgccgtgtctgtgtagaaagaggtagacgtgggagacttttcattttgttctgtactaagaaaaattmttctgccttgggatcctgttgatctgtgaccttacccccaaccctgtgctatctgaaacatgtgctgtatccactcagggttgaatgaattaagggcagt

SEQ ID NO: 507017 - DNA, 201 bp, Homo sapiens
gtattgatccccgagtcaccgatgaggagattgaaaccggccctggggccgtggcgggtcacccggttggcctgggatcgccccagagaccgtcttatttwtagtctggggcgaatgggcgggtgtacggggctgagtcacacagcgcttcaggcttcagctactccaggcatctggtcacctggcaactgggcccctggc

SEQ ID NO: 507018 - DNA, 201 bp, Homo sapiens
ccgggagggaggtgggggggtcagccccccgcccggccagccgccccgtccgggaggtgaggggcgcctctgcccggctgcccctactgggaagtgaggakcccctctgcccggccaccaccctgtctgggaggtgtacccaacagctcattgagaacgggccatgatgacaatggaggttttgtggaatagaaagggggg

SEQ ID NO: 507019 - DNA, 201 bp, Homo sapiens
gaacccgggaggcagaagttgtggtgagctgagaccgcaccattgcactccagcctaggcaacaagagcgaaactgcgccctgtccctgtccctgtccctstccctctccccacggtctccctctccctctctccacggtctccctctgatgccgagctgaagctggacggtactgctgcctgattctcctgcctcagcct

SEQ ID NO: 507020 - DNA, 201 bp, Homo sapiens
tttaacgggctggcacctgcaggaactcctcgctctcatcgcccatctcctcccggacagtgcggcactcagcacccaggtagttgcgcaagttgacagcrtggatggcagagcaagctttcttgtcgagtgtggcctccccgccaatccagtagtagatctcccagttgagggagccgctgtcatccagaaaggtctgga

SEQ ID NO: 507021 - DNA, 201 bp, Homo sapiens
aaaaacattaacaaccagatgccagcttctccttagtccagtgagggctgctttagccctaggcctctctccaccattccttatgcatcaggaagcccacrcaagtcccctgtgaggccctctatcagcccaccacaagcccccaccagtcatcacaggagtggacagtgggaaacagtgcagatgaaatctaagatccca

SEQ ID NO: 507022 - DNA, 201 bp, Homo sapiens
tgaacccgggaggcagaagttgtggtgagctgagaccgcaccattgcactccagcctaggcaacaagagcgaaactgcgccctgtccctgtccctgtccckctccctctccccacggtctccctctccctctctccacggtctccctctgatgccgagctgaagctggacggtactgctgcctgattctcctgcctcagcc

SEQ ID NO: 507023 - DNA, 201 bp, Homo sapiens
gtctcctgcccctgagcatcctgggagcagcaagccaggaaatggcgaacaataaactcgtacagtcgctgttcatctccctaggaagaaaagaggagtaygaaactccccctagaatatcacctctcaaggacaggagcatcactggtagccttagcctaatgtcctgcacagaagaggccacactgctcctcaggccct

SEQ ID NO: 507024 - DNA, 201 bp, Homo sapiens
gcgggcggatcacaagttcaatagattgagactaccctggccaacatggtgaaaccccatctctactaaaaatacaaaaattagctgggtgtggtggcgckcacctatagtcccagctactcaggaggctgaggcaggagactcgcttgagcccgggagacggaggttgcagtgaaccaagatcacgccactgcactccag

SEQ ID NO: 507025 - DNA, 201 bp, Homo sapiens
tttgccatgttggccaggctggtctcaaattcctgacctcaggtgatctgcctgccttggcctcccaaagtgctgtgattacaggcgtgagccaccgcgtstggcccagaaatctacattttttttttttttcacatggagtcttgctctgtcatccaggctggagtgcagtggcgtgatctcggctcactgtaagctctg

SEQ ID NO: 507026 - DNA, 201 bp, Homo sapiens
tatgaaaaaatcctaacagaatagtgggaacattgctcagccagtcttggctattattactgtagttattgtccataacggctggtaagattttggatttytttacctttttcctgatggaattctctgatccacatgggttactttacacagggcactgctgtaacctctaatgagagggcccctctgtgacacctgagc

SEQ ID NO: 507027 - DNA, 201 bp, Homo sapiens
ccacccgccttggcctcccaaagtactaagattacaggcatgagccaccgtgcccagccagatctgttttgttgttgttgttgttgtttgtttgtttgttttaagacagagttttgctgttgttgcccaggctggagtacaatggcacaatctcagctacaggtgcccaccgccatgcctggctaatttttgtatttttag

SEQ ID NO: 507028 - DNA, 201 bp, Homo sapiens
agagggcccctctgtgacacctgagcctctgagcctgacacggaggtgggcagaaatgctggcccagcttggtgtctagcccaggcttcacgtccctgacyggaccttggccccaaccccaagctcggtggcctcccggccagcactcacgcgcagcgatggcaggctggacagctccccatgaagcgtggtcaggttgtt

SEQ ID NO: 507029 - DNA, 201 bp, Homo sapiens
cctccctcaggaggcctctgctgggtcccccttgctccagggcacaccccttgcttgtctctcttgagccctctcaaacccagcatgcctgacctcgatcwccgtcaggaaatggatggcttctgggagggtcaccaggtggttcttgttcaggacaagtttcctcagctttgggcacctgtgaagacagggccagccagg

SEQ ID NO: 507030 - DNA, 201 bp, Homo sapiens
ggcaggcaggtttggcggaggagggaaggccaaacggcctccagggccccgctgcgcaaacttgggttattttcagccacccgtgccctttcctgcttctyggagctggaaggctgtggactgaggcctgcgcgaccccgccagagatggggctgagtcccaatttagacaggttgggagtatttaaagcgctttacagtt

SEQ ID NO: 507031 - DNA, 201 bp, Homo sapiens
gcgatcacctctggggaaggcggggaggggacctttgggggaccaagggcagcgttcgaatcctagcccagcccccttcccctctcggtctcttggtttaycctgcgaacggggcgtcacccgcccacctagggctgctgcgcggcctgctccgcccgggcccagggcaggcaggtttggcggaggagggaaggccaaacg

SEQ ID NO: 507032 - DNA, 201 bp, Homo sapiens
caggatggtcttgatctcttgacctcgtgatctgcctgcctcagccacccaaagtgatgggattacaggtgtgagccaccgtgcccaacccataaactctrtttctcaaatatttcatcctgataaagacggttcaaattctactcccaaacccaaaatacttacccttgagtgtagagcttctcagcaatcctcatggtt

SEQ ID NO: 507033 - DNA, 201 bp, Homo sapiens
gttaagtgcaagcaatcacctggggaagcatgtgcaggacgtcagccaggcttctttgccaagatggcagggaagcctccagttaccccatgggctctcakcattggtgtggagagcagggaggggctttttacaaaactctgatggggcttggggggacatggcatcagagattaggtttcaaggccaggttagctgctt

SEQ ID NO: 507034 - DNA, 201 bp, Homo sapiens
gcttcttctgaaggatcagtgttaccacagccatttccttgcattacaccgtccttctcaggacgtctatgagaagccctgggcagcctggacagggactrccccatgagtgctggtggctcacttggggctttctgcaggtgaaggaagcagccctgggagcttcttcctttggcacacagtgggcttcagctgggactg

SEQ ID NO: 507035 - DNA, 201 bp, Homo sapiens
aaaaaaaaaaaaaaaaagaaatgaggctgatgcttatggtctgccaagggtcacgacagctgcaagggcacatggccatgggactgggaaggcctatgtaytcatcctggtgtctgttgctatgggaccctgagcaatacccacttcatgtgtctgggtctcacctttctcacttataagtaaaattgtgatcataatgct

SEQ ID NO: 507036 - DNA, 201 bp, Homo sapiens
ggggttttgccatgttggccaggctggtctcaaattcctgacctcaggtgatctgcctgccttggcctcccaaagtgctgtgattacaggcgtgagccacygcgtctggcccagaaatctacattttttttttttttcacatggagtcttgctctgtcatccaggctggagtgcagtggcgtgatctcggctcactgtaag

SEQ ID NO: 507037 - DNA, 201 bp, Homo sapiens
gtgttaccacagccatttccttgcattacaccgtccttctcaggacgtctatgagaagccctgggcagcctggacagggactgccccatgagtgctggtgsctcacttggggctttctgcaggtgaaggaagcagccctgggagcttcttcctttggcacacagtgggcttcagctgggactgcaccaatcctctgctaac

SEQ ID NO: 507038 - DNA, 201 bp, Homo sapiens
gatctcccagttgagggagccgctgtcatccagaaaggtctggaagccaaggcaccggccacatcagctttcatcctggtcttccggccaccccggagacrccactctgaacagcacaggcttcccagccccaggggctttgtactgcccctgtgcctggaccacctcctgcagcctgcccacctcccacctggcctccct

SEQ ID NO: 507039 - DNA, 201 bp, Homo sapiens
aaaaccagtgaaatagcagttcagacctactggcaaaatcaaaaagagagataatactaagtgttagtaaggatgtggataaactggaatcctagtgcctygctggtggaaatgaaaaacggtacagccacttcagaaaagtttggtggttcctaaaaatgttaaatgtagagttaccaagtaaaccagcaatcccactcc

SEQ ID NO: 507040 - DNA, 201 bp, Homo sapiens
aaccattctttaagctgtggccaaagggacctttcaaaatgtagctctgccatgaaggaaatgcaaattaaaactgcagtgaaggctgggagcagtggctyatgcctgtaatcccagcattttgggaggccaaggtgggcagatcatctgaggtcaggagttcgagaccagcctggccaacatgctgaaaccctgtctcta

SEQ ID NO: 507041 - DNA, 201 bp, Homo sapiens
gaggatgacaccaaggcagacagctggaaggaactgagcctgctcaaggccacaccacacctgcagccccggcctccacctgctgcccttagccagccagygttgcccttggccccctcgtcgtctgccccaggtgagtggcactccttcccctcttttggtgtcacattcaagagacgcagcccaggctttgccctgact

SEQ ID NO: 507042 - DNA, 201 bp, Homo sapiens
aaggtgggaatagggctctgggtggggctggctggggtgaggacagatgggaagtgggcctgtcgctgggggaaccacagtgttgaggggagggaactcaygtcagtgctgtgctccggcactcacatgacatacaggaggtgctcaatgtgtccttattgctaaatgggagatagaggctcagggtaagggtggacactt

SEQ ID NO: 507043 - DNA, 201 bp, Homo sapiens
gaagctaaattgcccactcagatctactatatttaaagcgaaaagggagttgagattttcaggccccattcagaactaaaactaggagagaacaaaagtartatctgctgagtatctacaacacatcaggcaatgtgctatatagtcctgaccattttcaccaaatcctcacccttaacacagccttgtaagtactgacat

SEQ ID NO: 507044 - DNA, 201 bp, Homo sapiens
tctttcttctcggcgtcgcgtttcaccttcccggagagacccgggctctgcagcacggcctccgcattgcgtgtgtagtccaccgtcaacacatcgtcccmattcttgaacttggccttgaacacctgccagggaggccatcaactaaccatgaggggtgcggcatgattagagttggaggaagtagcccgaggcttgagg

SEQ ID NO: 507045 - DNA, 201 bp, Homo sapiens
ccagaaggcggaggttgcagtgagtcaagactgcgccactgcacttcagcctgggcaacccagcgagactgtcttaaaaaaaatttttttttaaataaaawtttttttttttttaaagagatggggtcttgctacgtagcccaagcttggatgttgtatttaatatgtgaataatttcctaagcctggtgtagcaatcatc

SEQ ID NO: 507046 - DNA, 201 bp, Homo sapiens
gcagccaggtgtacaggcacgggaggccacgtagcatgcagctgggctttgtggtgggggctgctgggtcagcagccacgagggtgaggggccctggggaygaggacagggccaggctttgtgctcaccagccacctgctgtcaggtgttcacactgcccaaggtgagcgcgaagaccaagttcaagctgacggcccatga

SEQ ID NO: 507047 - DNA, 201 bp, Homo sapiens
tgaggcgggcggatcacaaaatcaagagattgagaccatcctgaccaacatggtgaaaccccatctctaccaaaaatacaaaaattagctgggcatggtgrcacgcgcctgtagtcccagctactcgggaggctgaggcaggagaacctcttgaacctgggagtcagaggttgcagtgagccaagattgtgccactgcact

SEQ ID NO: 507048 - DNA, 201 bp, Homo sapiens
cctgggaggtggaagttgcagtgaaccaagattgcaccattgcactccagtctgggcaacaagagcaaaactcagtctccaaaaaaaaaaaaaaaaaaaaagaaatgaggctgatgcttatggtctgccaagggtcacgacagctgcaagggcacatggccatgggactgggaaggcctatgtactcatcctggtgtctgt

SEQ ID NO: 507049 - DNA, 201 bp, Homo sapiens
accaggtgtgatggctcctgcctgttaatcctagcactttgggaggccgaggctggtagatcacctgaggtcacgagtttgagaccagcctggccaacatwgtgaaaccccgtctttactaaaaatactaaacaaattagctgggtgtggaggcagatgcctgtaattccagctacttgggaggctgaggcaggagaactg

SEQ ID NO: 507050 - DNA, 201 bp, Homo sapiens
gtttaaaggctccaggtgcatatggtgcatgtggcctggcctataacaggtgcacagtgtacctgtgctgtctacagtaggtgcctattgttttttgtaamagtaggattccggtcagtgtttggcacgtgcagtaggtgcttagtgagtggttatcagatgagtgaatggaggggcgtgcaggcctcccaggaactcggg

SEQ ID NO: 507051 - DNA, 201 bp, Homo sapiens
tgggctgcacaggagctgtgcctgtgtcctgtgccttggcctggctctggcctgggacccctggggcctgcttagctcagtgctcctccctcggcagcccytgggccctccagagggatgggtgaactaagctgggtggtagaggaatggtaacagaacgtagggcgcaaagcaggatgcaagccactggggtgctaggga

SEQ ID NO: 507052 - DNA, 201 bp, Homo sapiens
cagggcccacctagggagtgttaagggtggggcttggcagggcaggaccaaaagcacagggcccagagggtaggtgtgaggtcacatctggttgaagggayaagcccaagggtggttgcggggtgtgtaagcgggaagacaggactgagaggtggacatgatacttaggaggttgtacactgaggggtgctgcctgcacgg

SEQ ID NO: 507053 - DNA, 201 bp, Homo sapiens
ccaactaatttttctatttctagtagagatggggtttcaccatgttggccaagatggtctcaatttcctgacctcgtgatccacccgccttgtcctcccamagtgttgggattacaagcataagccaccgcgtccggccatatttttaaaatcagaaagaatgtattttattaaaagaaggaggagaagaacaaaagacta

SEQ ID NO: 507054 - DNA, 201 bp, Homo sapiens
gggctgtgccagcctgtcttaggccagggccttgcagaaggcgctccaggcgtggaagcagcgggtaaaggcgtgctgctcattgcccttgcggaccaggygcagccggcgcggccgctcatgttccttggaccgcatgtgctggatatatacctggcaaggggacagcgagccttgggtgatgaccctgccctgcccaca

SEQ ID NO: 507055 - DNA, 201 bp, Homo sapiens
caggcacatgccaccccgtccaactaatttttctatttctagtagagatggggtttcaccatgttggccaagatggtctcaatttcctgacctcgtgatcyacccgccttgtcctcccacagtgttgggattacaagcataagccaccgcgtccggccatatttttaaaatcagaaagaatgtattttattaaaagaagga

SEQ ID NO: 507056 - DNA, 201 bp, Homo sapiens
agatgcgagttacccagaggagccactgaccaatgccatgcttctccatgagggcaatgaggtcggcctcggtgagcagcttgggtgggctggtctccccrtccaccatctccacggtgctgggctgaaagtgggatccttgctcatagacagggaggatctacagggagcggcaggtgcaacagtcagatgattccatca

SEQ ID NO: 507057 - DNA, 201 bp, Homo sapiens
ttctgcttgtcaccagcccacattaaaaagtaaaactgggccaaatgtggtggctcacgcctgtaatcccaggccgaggcgggcggatcacctgaggttgkaatttcgagaccagcctgaccaacatggtgaaaccccgtctctactaaaaatacaaaattagccaggcatggtggcgcatgcctgtaatccaagctactc

SEQ ID NO: 507058 - DNA, 201 bp, Homo sapiens
tttaatatctcttaaagggcatccacatctgctttatccctagcggaagagtgagggggcttcacacgtgcactcacactgtggagagagttggatttccmagacccctgagggcacctgtcagggtcatccccattggtgctgcttgaggctactggggactgtggcactggacgtggctggagcaggtggtgtcacctg

SEQ ID NO: 507059 - DNA, 201 bp, Homo sapiens
ccgagtcaggaagccacacagctgagcgacactctgggaaacccatgcagctgaggtagaacctggggacaaagtgccatgtcagatgataggagtgcagkagatgctctccgctgttggccatcagctaaggcagcctttcctcagctgcccgaggacaacattcccttttctggatgacacttaactggatacacaagc

SEQ ID NO: 507060 - DNA, 201 bp, Homo sapiens
gcatcttcatctgaagaaatgaggctgggccaggcacggtggctcacgcctgtaatcccagcactttgagaggccaaggcaggtggatcacctgaggtggrgttcgagaccagcctaaccaacagggtgaaacccccgtctctactaaaaatacaaaattagctgtgcgtggtggtgcatgcctgtaatcccagctacctg

SEQ ID NO: 507061 - DNA, 201 bp, Homo sapiens
ccactcccctccccgcgaggcaaggacagcctctgccctgcctgcctgggagcacggtatgggcttgcctaggcctcagtgtcttaacactgtggtgactsaaattccttgttttaccttcaccaagtaacccagagccaggatccttgatgactctggtaaggcagtgactacccctgctcagaatgcaagggtcgctag

SEQ ID NO: 507062 - DNA, 201 bp, Homo sapiens
caccctggtgagcatattgagctggggccacctgtgttccagtccaagaaacctagagatccagctgaatgtgaacatcccaggtcttcggccggattctrtaagaggcaggtggtgaattcatcccaaagggcagtggggtctctgcccagtgtctcaaaagccagtgcctccaggtgcgggccccagcgctgttgggca

SEQ ID NO: 507063 - DNA, 201 bp, Homo sapiens
ttacagtttgcaaagtagattcctggtctctctgggggcgggtggcagtattgatccccgagtcaccgatgaggagattgaaaccggccctggggccgtgrcgggtcacccggttggcctgggatcgccccagagaccgtcttatttttagtctggggcgaatgggcgggtgtacggggctgagtcacacagcgcttcagg

SEQ ID NO: 507064 - DNA, 201 bp, Homo sapiens
gcaggtacagctggagcgcggcggggcggcccccagggtcaccgggctcggggcttggcgcgcgacggaacgcagatcgggggcgtggcccgcgatcacckctggggaaggcggggaggggacctttgggggaccaagggcagcgttcgaatcctagcccagcccccttcccctctcggtctcttggtttaccctgcgaac

SEQ ID NO: 507065 - DNA, 201 bp, Homo sapiens
ggtctcgatctcctgacctcatgatccacccgcctcggcctccctaagtcctgggattacaggcgtgagccaccgcacccggccaacaagaccagattaamccacttagaggtggcagtagtttggggcttgggagctggtttggccagcctgtttcatagatgagatcactgaggtgcacgaggtcaggtctcatcggtt

SEQ ID NO: 507066 - DNA, 201 bp, Homo sapiens
tttattaccttgtcactccagtgatcatatggatacacatccagatagtttcgggccagaatcatgaggccatgggccacaaagcgttcctgagcgatgtygatctccactgtggtctcctgcccctgagcatcctgggagcagcaagccaggaaatggcgaacaataaactcgtacagtcgctgttcatctccctaggaa

SEQ ID NO: 507067 - DNA, 201 bp, Homo sapiens
ttcccccagtcggtgggtgaacttgggaggccaaggtgggcctcagcagcagggctcaccttgtacagcttgggctgcggcggccagaagtcttcaggcamgtgcttcttgatctcagagggctccccacccagtgcctcccagaactctgggagctcctggccctgcaccagcagtgtgatctcagccttccctttccgc

SEQ ID NO: 507068 - DNA, 201 bp, Homo sapiens
cgcacgccaccacgtccagctaatttttgtatttttaatacagatgggatttcaccatgttggccaggatggtcttgatctcttgacctcgtgatctgccygcctcagccacccaaagtgatgggattacaggtgtgagccaccgtgcccaacccataaactctatttctcaaatatttcatcctgataaagacggttcaa

SEQ ID NO: 507069 - DNA, 201 bp, Homo sapiens
tacctcagagcttgggtgctatctagacaatcagtttttccccataaactcttatttctttatttctttctttttccttttttttttgagatggagtctcrctcactcaccaggctggagtgcagcggtgtgatctcacctcactgcaacctccgcctcctgggttcaaacggttctcctgcctcagcctccccagtagct

SEQ ID NO: 507070 - DNA, 201 bp, Homo sapiens
agtgtagaagccactggctgttccaccctcaatgtaggagatgtcgttgtcaaacacctgtgtgtgtgagggtgtggttcttcatcactgagctgcccccwcccccaccaaccactgcccctcaggtgggggtacagagttgcatacaggtgaattgagtgctacaaatctatgatgcctgtaatcccagcacttcaggag

SEQ ID NO: 507071 - DNA, 201 bp, Homo sapiens
tagagacagagtttcaccatgttggtcaggttggtggtcttaaactccctacctcaggtgatccacccagctcagcctcctgaagtgttgggattacaggmgtgagccactgcgcccagcaagatggggttttaccgtgttgcccaagctggtcttgaattcctgggctcaagtgattcacccgtcttggcctcccaaaat

SEQ ID NO: 507072 - DNA, 201 bp, Homo sapiens
gtcacagagcacggcttgactctgtgaagccactcaggccagtctttacttgctacccacacctcagggcctttgcacagctgttctttctgcccagcacyccccgtccctcttggccagggtcaaggccagggtcggccttcagcagaagctaaggctccctgccttgtcccaaccctggcctggctcacctcctgcttt

SEQ ID NO: 507073 - DNA, 201 bp, Homo sapiens
acaggcaaaagccaaggtgggaatagggctctgggtggggctggctggggtgaggacagatgggaagtgggcctgtcgctgggggaaccacagtgttgagrggagggaactcatgtcagtgctgtgctccggcactcacatgacatacaggaggtgctcaatgtgtccttattgctaaatgggagatagaggctcagggta

SEQ ID NO: 507074 - DNA, 201 bp, Homo sapiens
ccctttccgctcattcttgttaattttctctgcaaagagcctgagagcaggatgcaaagtcatcagcgaggctcacacccctttccttcacacaaaagacsccacggtgtccttgtacctggccttggtggtgctgctcagtgtggcctgggccccccgccatacgtagatgtctagccctcggtccagcaggaaaacaaa

SEQ ID NO: 507075 - DNA, 201 bp, Homo sapiens
gtttgccagtgtggcctgcgaggactatgctgagacctgcctggcctgcctcaccaacctgggtgacgtccacgtcttctcggtgcctggcctgcggcccsaggtgcactattcctgcatccggaaggaggacatcagcggcatcgcttcgtgcgtctttacgcgccatggccagggtgaggcggggcagaggccgaggag

SEQ ID NO: 507076 - DNA, 201 bp, Homo sapiens
agtccaccgtcaacacatcgtcccaattcttgaacttggccttgaacacctgccagggaggccatcaactaaccatgaggggtgcggcatgattagagttsgaggaagtagcccgaggcttgaggcgggacccaagggagatctagggcggggcttgggaggcggggcctcggacacggaggtaggaataggaggggcagc

SEQ ID NO: 507077 - DNA, 201 bp, Homo sapiens
tgcctgacctgcgaggttgctcagaccctccaggctggtgggcaggttgctctgggtgcgctgggtgctccgcaggtgcagggtctgcagggccgtcatcrctgggagctgcctgccagggtgacgtgagtggtcagggccagggcccacctagggagtgttaagggtggggcttggcagggcaggaccaaaagcacaggg

SEQ ID NO: 507078 - DNA, 201 bp, Homo sapiens
tgaggacggcaccgtgaggttctgggatgcctcgggtgtggcgctgcggccgctctataagctgagcacagctggcctcttccagacagactgtgagcackctgacagcctggcccaggctgccgaggacgactggccacccttccgcaaggtgggcccctcccctggccctgatgagctggtcctgaccccgcctggact

SEQ ID NO: 507079 - DNA, 201 bp, Homo sapiens
gcttctgctgggctgggctctgattctccactaaagcttgtcacccagaggttcagttcacacaggcagagcagggtcgatggatggtcgtcctaggtgtycccaggcttggcggcttcctctggctgccacgtagggagcacactgaagacagtgggggtgaagcagggctaagacaaggcacacctgtcgacaggacta

SEQ ID NO: 507080 - DNA, 201 bp, Homo sapiens
gggagccctgggaaggtcctggatttgttgattgagtcactgattgattttgaacttgtacaatgggagagtttcaaacatacacaaaaatagagaggtgsaaagttgtcccacatacctcacatgcctgccaccagccatgtgcccctgcggattctgcccccctcctccacattctttgctgttttttttgccggggta

SEQ ID NO: 507081 - DNA, 201 bp, Homo sapiens
aaaaacaaaaaagaaaagaaaagaaaagaaaaggtgaattaacccatcttcattttgtctgacttgcacagaccacagggtgggctctgactacgatcccrgggttctctgtgctgcaagtgcctctgctagccccagccctgcccagcacctgcagagactttcagggaccagctccaggttgttgttggcagccatgaa

SEQ ID NO: 507082 - DNA, 201 bp, Homo sapiens
taggattccggtcagtgtttggcacgtgcagtaggtgcttagtgagtggttatcagatgagtgaatggaggggcgtgcaggcctcccaggaactcgggtakccctgacatctgccctccctgcagccatgaggacggcaccgtgaggttctgggatgcctcgggtgtggcgctgcggccgctctataagctgagcacagct

SEQ ID NO: 507083 - DNA, 201 bp, Homo sapiens
tcccccagtcggtgggtgaacttgggaggccaaggtgggcctcagcagcagggctcaccttgtacagcttgggctgcggcggccagaagtcttcaggcacrtgcttcttgatctcagagggctccccacccagtgcctcccagaactctgggagctcctggccctgcaccagcagtgtgatctcagccttccctttccgct

SEQ ID NO: 507084 - DNA, 201 bp, Homo sapiens
tgcacagatctgtccctggtagggacggtcaacaggtgagtggcaacaccctggtgagcatattgagctggggccacctgtgttccagtccaagaaacctrgagatccagctgaatgtgaacatcccaggtcttcggccggattctgtaagaggcaggtggtgaattcatcccaaagggcagtggggtctctgcccagtgt

SEQ ID NO: 507085 - DNA, 201 bp, Homo sapiens
caaagacaaacaccggtgactctggtgacctgcactgggtcatctctgcattgcttgccgaattcctgagacgataagaccaatcagttcagtgggctgcrgcctctggcaggcagggaggccactggggctcgcttgcgtgggtttcagaaggaacctttcaggttcagactgcaggccagaccctgactctatattagt

SEQ ID NO: 507086 - DNA, 201 bp, Homo sapiens
gggctggagaagactcagcaaggtgctcatcccccttcttccacctgttgttctggccgtgctggcagctgattggatggtacccacccacattgagggtrggtcttcctttctcagtccaccgagtcatgtcactctcctctggcaacacccttacagacacccagaaaaaataccagccatctcggcatcccttaatct

SEQ ID NO: 507087 - DNA, 201 bp, Homo sapiens
ccagatgacacatgtgggctggggagggctctggtctgcgtgcagggctgcttccagcctagctgtgccactcgcaccctgctggtccttccccgacttaygtcctgaggggactcccctaccccttccagctgtgactgcaggacccaagggaagcaggactgtgccaagcaaatggaatagtggtgtaggcctctaggt

SEQ ID NO: 507088 - DNA, 201 bp, Homo sapiens
gaggtgcagcacgaacgcctggagctcactgtggctgtgcttgtggcagtccctggggtcgatgctgacgaccgcctcctcttggcctggcccctggaggrgctggcggggaacctctggctgcaggacctgtatccagtggaggctgctaggctgcgagccctggacgaccatgacgctgggactcgccggcggctgctg

SEQ ID NO: 507089 - DNA, 201 bp, Homo sapiens
agttctgcccccgtgggagcagcccctgggaccgcttcctggtcgggggctacctctcctcccgcgtcctgctggagctactccgcaaggcgctggctgcytctgtcaactggccggccattggcagccttctcgggtgcctgatccggcccagcatggcctcggaggagctgctgctcgaggtgcagcacgaacgcctgg

SEQ ID NO: 507090 - DNA, 201 bp, Homo sapiens
caaccccttccacccaaggaagcaagagggcccagagggggcccgagctcagaggggctcctggggctgcctgacctgcgaggttgctcagaccctccaggctggtgggcaggttgctctgggtgcgctgggtgctccgcaggtgcagggtctgcagggccgtcatcgctgggagctgcctgccagggtgacgtgagtggt

SEQ ID NO: 507091 - DNA, 201 bp, Homo sapiens
ttctaaggttgtcaccatgagcaaattaacaaagaatgcacgtgtagctcgcagcatacagcaggcgctcagtgagtggcaggttattattccgttttgttgttttgtgcgccaggttattattcccacttagtgtcagcacccctgtgctcgtacccccctacaaagggaggctccagaagagaagcatccgtcttggtc

SEQ ID NO: 507092 - DNA, 201 bp, Homo sapiens
cgggttcacgccattctcctgcctcagcctcccgggtagctgggactacaggcacccgccactacgcccggctaattttttttttttttttttttttttgkatttttagtagagacggggtttcaccgtgttagccaggatggtctcgatcttctgacctcgtgatccaaccgcctcggcctcccaaagtgctgggattac

SEQ ID NO: 507093 - DNA, 201 bp, Homo sapiens
ggggtctccattctctgcctgaaggacttctcagagccaagagaccatgttacgggcactgtgatctccagaaggggagagaagcaacactgcgttcccaygtcatgtggccttgtccctaacagtgccccccgaagggtgctctcaggggctcaagttgggaatggctggcatgggactgtggtcttcatccacaaaggt

SEQ ID NO: 507094 - DNA, 201 bp, Homo sapiens
caagctttcttgtcgagtgtggcctccccgccaatccagtagtagatctcccagttgagggagccgctgtcatccagaaaggtctggaagccaaggcaccrgccacatcagctttcatcctggtcttccggccaccccggagacgccactctgaacagcacaggcttcccagccccaggggctttgtactgcccctgtgcc

SEQ ID NO: 507095 - DNA, 201 bp, Homo sapiens
gccaacatggtgagaccccatctctactaaaaatacaaaaagagccgggcgtggtagcgcacgcctataatcccagctactcaggaggctgaggcaggagrttcgcttgaacctgggagacagaggctgcagtcagccgagattgcaccactacattccagcccaggcgacagagcgagactctgtctcaaaaacaaaaaa

SEQ ID NO: 507096 - DNA, 201 bp, Homo sapiens
aagaatgtattttattaaaagaaggaggagaagaacaaaagactaagatttccccagctttgtgagaagcctacagatgtaaacaagcatttccccaactytgtgagaagcctacagatgtaaacaagcctaatggctcctgtgcctgcagagcctgcccctggctgaggaaatgactgagacagacaagcagagctgtgt

SEQ ID NO: 507097 - DNA, 201 bp, Homo sapiens
aataacaggttttggccctgccttctcactgctcttggcaacaccccttccaccctactctcagctcccctgtgtcagcccactggtctagctcccatgcycagcctgtacccttatccttgcccggctgaattctgccccgcgttccagaactctcctttgctgacccaggctttggccaccttagacctcaccctgcgg

SEQ ID NO: 507098 - DNA, 201 bp, Homo sapiens
gaactcggagttgaggaggctggagtcggtgttgatctggatgcacctgtggaagggatggggcatcagcaaggattcaggcctggctccctgacgcttgmtcgccactgcgtcctcccccagccaggcaccgggtgcagagggcgctgccgttggtgcggatctggtagaggctgggctgttgggcgccctggaccgcct

SEQ ID NO: 507099 - DNA, 201 bp, Homo sapiens
ttggggggtccgagggagcagctgcgtgacttttcagcagtggctatggtcactcctgaggcctgggaagagggtcactgtccagcagagctggcctgctscagagtgatctggaccttgtgccccttaacacaagaaggcccgactccaaaggccaacactgtcctctaagtttccaggacactaaatggccacttggtc

SEQ ID NO: 507100 - DNA, 201 bp, Homo sapiens
atttttgcatttttagtagagacggtttcgccatgttgcctgggctggtctcgaactcctgacctcaaatgatctgcctgcctcagcctcccgaagtgttrggattacaggtgtcagccacttgtgcccggccaacatttgcgtttttaatgacacttttcttttgtaatcaggatatatatataatcttaattccttgag

SEQ ID NO: 507101 - DNA, 201 bp, Homo sapiens
cttttaaatggagttttccctgcctgccctctccaggcccttcatgccatttctaattaacgtgtccctttcctgttcacaagaatctagataattgagcmaaggttcccagccctggcactaggtgcttctgtctcccctacggccccaccatcctggaaagactccgtgaggctacttctcaaaagcagcctccagacc

SEQ ID NO: 507102 - DNA, 201 bp, Homo sapiens
cccaggtgcagagggtgctaagggtcctggtaggggctgatgacttgctccctgtagacaccccggagccacccgaggctgcactctcacccatgtccatygactcagccaccagtgctgacaccacgctggacacgacaggggacgtcacagtggaagatgtgaaggatttcctggggtgaggctggtgggcaggtccac

SEQ ID NO: 507103 - DNA, 201 bp, Homo sapiens
tgcccagggccaggtctcatcccacccccgagatctgccttccctgggctcaggagtgggagggcaaggatctagcgtgccagcctcaagtcatccacctrtggtccccatcatggccccatctctgcagttacaggatccgagagtcacccaagctgagccaggctaacgggaccccaagcatcctgctggccccacaga

SEQ ID NO: 507104 - DNA, 201 bp, Homo sapiens
ggtgagcagcttgggtgggctggtctccccatccaccatctccacggtgctgggctgaaagtgggatccttgctcatagacagggaggatctacagggagmggcaggtgcaacagtcagatgattccatcagcacactcaggcaaaaaataacctcatttcaaggaacatgatcctgctccactagagaactcagggctca

SEQ ID NO: 507105 - DNA, 201 bp, Homo sapiens
gactatgctgagacctgcctggcctgcctcaccaacctgggtgacgtccacgtcttctcggtgcctggcctgcggccccaggtgcactattcctgcatccrgaaggaggacatcagcggcatcgcttcgtgcgtctttacgcgccatggccagggtgaggcggggcagaggccgaggaggccttcctcaggcgagcgaact

SEQ ID NO: 507106 - DNA, 201 bp, Homo sapiens
ggcgggtggatcacctaaggtcaggagttcgagaccagcctggccaacatggcaaaaccccatcactactaaaaaaatacaaaaattagctaggcgtggtrgcacatgcctgtaatcccagctacttgggaggctgaggcaggagaatcgcttgaaccctgggggcggaggttgcagtgagccaagattgtgccactgcac

SEQ ID NO: 507107 - DNA, 201 bp, Homo sapiens
tgagctcaggcaatccgccccccacagcctcccaaagtgctgggattacaggcatgagccactgcacccggcctgggttctttattaaagcaatgaattckggatgtcctggcttaactagattaagagggaatgaagcttcttctgaaggatcagtgttaccacagccatttccttgcattacaccgtccttctcaggac

SEQ ID NO: 507108 - DNA, 201 bp, Homo sapiens
caggtagcccaagcccaggcccacctggcaggaaggatgagcatggcagggaagggatctggagacaggaacctcacccacacagccctctgctctggaascagccctgccctgcagcgtggctcactgactgcttctgtttccccctccccttcaaggtctttttagggatatcctttcagaagggcttttaaatggagt

SEQ ID NO: 507109 - DNA, 201 bp, Homo sapiens
ctccggcactcacatgacatacaggaggtgctcaatgtgtccttattgctaaatgggagatagaggctcagggtaagggtggacactttgccctcagaggrcagggactagtgtgtcttggtcaccactgtgttccttgtgctcagccagggccttggtatacagtaggcattcagtgagtgcttgtttagctgatgaact

SEQ ID NO: 507110 - DNA, 201 bp, Homo sapiens
attagagttggaggaagtagcccgaggcttgaggcgggacccaagggagatctagggcggggcttgggaggcggggcctcggacacggaggtaggaatagraggggcagcttgcagagggggcggggcctgggcagagtcagcaaagaggaggtgggtttgggcccagctctgtagggaggtagtgaagccacaggggtca

SEQ ID NO: 507111 - DNA, 201 bp, Homo sapiens
acctgagtacattctttgctagcagacagtggatgaggccccttcctcttcctcaccaagcctggggctgtgccagcctgtcttaggccagggccttgcaraaggcgctccaggcgtggaagcagcgggtaaaggcgtgctgctcattgcccttgcggaccaggcgcagccggcgcggccgctcatgttccttggaccgca

SEQ ID NO: 507112 - DNA, 201 bp, Homo sapiens
ctgtgttagccaggatggtctcgatctcctgacctcatgatccacccgcctcggcctccctaagtcctgggattacaggcgtgagccaccgcacccggccmacaagaccagattaaaccacttagaggtggcagtagtttggggcttgggagctggtttggccagcctgtttcatagatgagatcactgaggtgcacgagg

SEQ ID NO: 507113 - DNA, 201 bp, Homo sapiens
ggcaaagacagacacccatcagccagcaatcgctgcaaaggcacctacaacactcttacatgcacacaacaggcgtgaccttgagaaccagctggtcagtragccgcaggcctcctgcagagaacagacggcagacagaagactgagctcaccatgggccctggtgccgaaccaactcttgggaggagagtccagatacag

SEQ ID NO: 507114 - DNA, 201 bp, Homo sapiens
tggctttcagggctgctggaatgagtctcaaccacccccacagtcacacacctctcacgccctggctctgggctttcaccaccgcctggggccctgcttgractctgcagctgtgtcccaaggctgcgccctagatttgtctactccttcccctgccccctccctgctttctcccggcctctgtagtcttcctgctcctcc

SEQ ID NO: 507115 - DNA, 201 bp, Homo sapiens
agtccctgcttctctctcggttgtgggctcctcagatatttaatgggggtggtgtttctttgccctgttcctggagcaaggtggtagcgttgtgatggtgrggagctttagatggggaaactgaggtccagaggggcgtgacatacctacctactctgcatgaagctgttgtcgccagggtgttggactctggggcaatga

SEQ ID NO: 507116 - DNA, 201 bp, Homo sapiens
agaaaaggggtatgtggaaaacctccaggccaggaggccactggtgaggatgaatctggcagggttataaactctgactggcccagatgcggtggctcacrcctgtaatccccacactttgggaggctgaggtgggaagatctcttgaggccaggagttcaagaccagcctgggcaacatagtgagacccctctgtatttc

SEQ ID NO: 507117 - DNA, 201 bp, Homo sapiens
tggggacaaagtgccatgtcagatgataggagtgcagtagatgctctccgctgttggccatcagctaaggcagcctttcctcagctgcccgaggacaacaytcccttttctggatgacacttaactggatacacaagcactcatattgaattgattgggaaaaatgagccttctcacatcccaaaagcacaaagcagctat

SEQ ID NO: 507118 - DNA, 201 bp, Homo sapiens
agtggggcccagggcggcccctcccctgcgctgatgctccccctgcctggctgtgggctcaggtgctggtactggagcttagtgatgtgccggtggagcasgcggtcagcgtggccatcatagacctcctccaggaccgcgagggcttcacatggaagggccacgagcggctgagcccacgcacggggccgctgccctggc

SEQ ID NO: 507119 - DNA, 201 bp, Homo sapiens
ggcccctcccctgcgctgatgctccccctgcctggctgtgggctcaggtgctggtactggagcttagtgatgtgccggtggagcaggcggtcagcgtggcyatcatagacctcctccaggaccgcgagggcttcacatggaagggccacgagcggctgagcccacgcacggggccgctgccctggcctgctggcttccagc

SEQ ID NO: 507120 - DNA, 201 bp, Homo sapiens
ccggtggagcaggcggtcagcgtggccatcatagacctcctccaggaccgcgagggcttcacatggaagggccacgagcggctgagcccacgcacggggcygctgccctggcctgctggcttccagccccgtgtcctggtgcagtgcctgccgccagctgctgtaaccgctgtcacactccacaccgagtggagcctcgtg

SEQ ID NO: 507121 - DNA, 201 bp, Homo sapiens
aggttagggtggtggggatggggtcagggaaaagtggtgtagccacttgtacttggggtcaaaggtgtgtacacaggcaggtaaacgcaggaaaaacctgsctcctcggccccagccccagaccaacaacccaggccgaccctgccagtcacccaccctgaaggtgaggctgaccctccagccagctctccctccctctct

SEQ ID NO: 507122 - DNA, 201 bp, Homo sapiens
gcgacagagcgagactctgtctcaaaaacaaaaaagaaaagaaaagaaaagaaaaggtgaattaacccatcttcattttgtctgacttgcacagaccacarggtgggctctgactacgatcccggggttctctgtgctgcaagtgcctctgctagccccagccctgcccagcacctgcagagactttcagggaccagctcc

SEQ ID NO: 507123 - DNA, 201 bp, Homo sapiens
tgctgctgcgtcatgcgtaccacctggggatgtggaagtgttaggggcagctccctggacccccacctgcccctcgggagcctaaccttcgctgggtctgrgccccaccacacccctccgcctggcctcgggctcgcggggctgccaggcacacctccagcttcccagggaagaggctctcgaacttcttttgcaggctga

SEQ ID NO: 507124 - DNA, 201 bp, Homo sapiens
tttctggagtacagtgtgaagtctggagtttagtggggcagccaggtgtacaggcacgggaggccacgtagcatgcagctgggctttgtggtgggggctgytgggtcagcagccacgagggtgaggggccctggggatgaggacagggccaggctttgtgctcaccagccacctgctgtcaggtgttcacactgcccaagg

SEQ ID NO: 507125 - DNA, 201 bp, Homo sapiens
ctccacaggcacccagtacctgccgggttggaaggttgtgagcaggggctcgagcccccagcaccaggggagggacttggggaagggagtgctgaggtggyacctgcagaggaagacgtagcagtcctgcgtgtagaagtggccaaactcctcttccggcagccgcgcaaacttcttgccctccagcacgaaaccctccat

SEQ ID NO: 507126 - DNA, 201 bp, Homo sapiens
tggacgggcgtggccgcccactgcccgagccctacgaggcctcacgggacctggcgcaggcacctgacatgcagggtggtcacgctgtgctcatcgcatcygaggagcagttcaaggtgagccactgtgggctgtgggggactctgggggactcccctccaggccccaacctcatggacaccattggaccctcaagaaacc

SEQ ID NO: 507127 - DNA, 201 bp, Homo sapiens
aggcttcccagccccaggggctttgtactgcccctgtgcctggaccacctcctgcagcctgcccacctcccacctggcctccctgaacaaaactctggagytggggactgagccatcttagaggaaggtactgggccacatggcccctaacagcatgcccagccctcaccttgagcacaatgtagcagtcagcctcgtaga

SEQ ID NO: 507128 - DNA, 201 bp, Homo sapiens
catagacctcctccaggaccgcgagggcttcacatggaagggccacgagcggctgagcccacgcacggggccgctgccctggcctgctggcttccagcccygtgtcctggtgcagtgcctgccgccagctgctgtaaccgctgtcacactccacaccgagtggagcctcgtggcttttggcaccagtcatggctttggcct

SEQ ID NO: 507129 - DNA, 201 bp, Homo sapiens
gggtgctagggagacagtgttcaggagcccccgcccggcagttgcaggaagccaatgcacagctggctgagcaggcctgcccccacgacgtggagatgacrcccgtgcagcgccgcattgagccccgctctgccgatgactccttgtcgggtgtcgtgcgttgcctatactttgccgacacattccttcgagatggtaagg

SEQ ID NO: 507130 - DNA, 201 bp, Homo sapiens
gatgcaccgggcgcctgtggtggccattgccgtgttggacgggcgtggccgcccactgcccgagccctacgaggcctcacgggacctggcgcaggcacctsacatgcagggtggtcacgctgtgctcatcgcatctgaggagcagttcaaggtgagccactgtgggctgtgggggactctgggggactcccctccaggccc

SEQ ID NO: 507131 - DNA, 201 bp, Homo sapiens
ggaccttggccccaaccccaagctcggtggcctcccggccagcactcacgcgcagcgatggcaggctggacagctccccatgaagcgtggtcaggttgttrtggctcacagacaagtgttcctgggccggaatggggagcacaggctcagcagggtgggtggggtgtccagagtccctgcctgcctccacaactctgcacc

SEQ ID NO: 507132 - DNA, 201 bp, Homo sapiens
cccgagtcaccgatgaggagattgaaaccggccctggggccgtggcgggtcacccggttggcctgggatcgccccagagaccgtcttatttttagtctggrgcgaatgggcgggtgtacggggctgagtcacacagcgcttcaggcttcagctactccaggcatctggtcacctggcaactgggcccctggcacccacact

SEQ ID NO: 507133 - DNA, 201 bp, Homo sapiens
gtctcctggtgccactggtgctggagccgggcctgtggagcctggtgccgggcgtggacactgtggcgagggaccctcgctgctgggccgtgcgcaggackcagcttgagttctgcccccgtgggagcagcccctgggaccgcttcctggtcgggggctacctctcctcccgcgtcctgctggagctactccgcaaggcgc

SEQ ID NO: 507134 - DNA, 201 bp, Homo sapiens
tgtgggctggcaccaactcaggctctgtgttcgcctatgcactggaggtgccggcagcagcagtgggtggtgagaagcggcctgagcaagcggtggaggcygtgctgggcaaggaggtgcagctgatgcaccgggcgcctgtggtggccattgccgtgttggacgggcgtggccgcccactgcccgagccctacgaggcct

SEQ ID NO: 507135 - DNA, 201 bp, Homo sapiens
ctggtctccccatccaccatctccacggtgctgggctgaaagtgggatccttgctcatagacagggaggatctacagggagcggcaggtgcaacagtcagrtgattccatcagcacactcaggcaaaaaataacctcatttcaaggaacatgatcctgctccactagagaactcagggctcacaacacaactgtcctccct

SEQ ID NO: 507136 - DNA, 201 bp, Homo sapiens
caggttagggtggtggggatggggtcagggaaaagtggtgtagccacttgtacttggggtcaaaggtgtgtacacaggcaggtaaacgcaggaaaaacctscctcctcggccccagccccagaccaacaacccaggccgaccctgccagtcacccaccctgaaggtgaggctgaccctccagccagctctccctccctctc

SEQ ID NO: 507137 - DNA, 201 bp, Homo sapiens
gacattaactggccccgcgatgccacccaggccaggtgtgtggaggggcagctcctagcctgggggacctgtgcccagggccaggtctcatcccacccccragatctgccttccctgggctcaggagtgggagggcaaggatctagcgtgccagcctcaagtcatccacctatggtccccatcatggccccatctctgcag

SEQ ID NO: 507138 - DNA, 201 bp, Homo sapiens
ttgctagcagacagtggatgaggccccttcctcttcctcaccaagcctggggctgtgccagcctgtcttaggccagggccttgcagaaggcgctccaggcrtggaagcagcgggtaaaggcgtgctgctcattgcccttgcggaccaggcgcagccggcgcggccgctcatgttccttggaccgcatgtgctggatatata

SEQ ID NO: 507139 - DNA, 201 bp, Homo sapiens
tgggtagccactgaccaggactgagagatcatctagcttgaagatgtcatcggggactccggaattcttcagactgttggctcgggccacgatggcctggraataaaccataagagtctataattcctggcttccactctcaggaaggaacagagtctagagagggacacctcctcaggcagctcaccagaggccaggcct

SEQ ID NO: 507140 - DNA, 201 bp, Homo sapiens
gaaaacctgcttgtatttctgcacttgctgccttagaaccacaaatttgtcctttttgccatcacagatcagcttcagatcagcttccagttcagcccggmggtcaggcttagacatttcatagcccatggaatcataacctgcagggagagagtcgagctcagtgagggcccacctgagaccctcagggacttgggcgac

SEQ ID NO: 507141 - DNA, 201 bp, Homo sapiens
ctggggcccatacaccaggtgccagggcagccagccctagtgtgaaccccagctctgccacctctgagctgtgtggcttaggcaagtgacaactgctgtgygcccaagtttctccatttggacaaactccctcacatgggggttgcgggggagttttctaggcataaagtcagtgttaaggcatcatcataatcgcaaaag

SEQ ID NO: 507142 - DNA, 201 bp, Homo sapiens
tgggtccatccttctgcacagtccgtgtgacggagggctggctgcaaaggcaggatgtgccactaccactgccatcaccagggttgccaaacccacctagrtggatccctgggcctggtgggcatcccagggaggcgcccaggggtctatatgccaaggcaggaggccctcctgctcccggattggggctgtctgcccaca

SEQ ID NO: 507143 - DNA, 201 bp, Homo sapiens
acatccgggctttgatggtctcgatgtgctccgcatgagtggcatccgtacctggaagccacttgctggttactctgaggtaatacagacaacagctccayccgggtggcgcatgggcaccttgctcaccccggaatccctcctttgcctggacagcctatgcaggtaagatgccttcatttcattcccatatagctcatt

SEQ ID NO: 507144 - DNA, 201 bp, Homo sapiens
ccagcagccgtgggtggtgggagggtctgggccagagcctttgaggacccagtctgtctgctgtcagcaggctgggggtgctggctgttgtccatcctgtycagggactggttagcctgcaggcggccagagggctggctagccctgggggggccccctgaaaatctcaggtccaggatctccctcagggtgtcgtcgcat

SEQ ID NO: 507145 - DNA, 201 bp, Homo sapiens
acacagtctcactctgtcactcagtctggagtgcaatggcacgatcacagctcactctggcctagacctcctgggctcaagagatcctctcatttcagccytccaagcagctgagactacaggcatgtgccacacctggctatttttttttttttttgtagaggcaagatctatgttgcccaggctggtctcatactgtac

SEQ ID NO: 507146 - DNA, 201 bp, Homo sapiens
atttcattttgtttctttcatttccaagttttaattaaatatctctaatggttagaaaatcaatgtcaaatacgaacattggtatacagcttaaaatacawatgtcagcaattattaaagaacatgattaatcattgttccaagtaaatgctagatcattatttcccaggaggcaagttaagcatcaggtgcctgaggggt

SEQ ID NO: 507147 - DNA, 201 bp, Homo sapiens
tcccaggaggcaagttaagcatcaggtgcctgaggggtaagggacagggcttcagtcggctctgatagctgcatggctgtcccaatgagctttccactcaratagtgccaggggcagctctcatcacaggctggctcactggcctttatccccagctccaaggaaacaccagggctttttctgccatgagaatcgtgtttc

SEQ ID NO: 507148 - DNA, 201 bp, Homo sapiens
gacagcccttcagatagcagaatgaagtggtgtctacccattcttcccatcttaggcttgaatatcccctgctcttctgatggcctccagggtttctcccraccacatcacaccctcagtatccttaggagtagatacagtaggtagaagactaggcatttattcctcttgtaccaacagcggctgctggttgagagcata

SEQ ID NO: 507149 - DNA, 201 bp, Homo sapiens
cttcagatagcagaatgaagtggtgtctacccattcttcccatcttaggcttgaatatcccctgctcttctgatggcctccagggtttctcccgaccacaycacaccctcagtatccttaggagtagatacagtaggtagaagactaggcatttattcctcttgtaccaacagcggctgctggttgagagcataagctccg

SEQ ID NO: 507150 - DNA, 201 bp, Homo sapiens
cagctagcctgggtttggatcctggctctgcttcttcctagccaggaatgctgggtaagtcacctaagcttctcaatcctcagtgtcctgacctacttcayctaggtgtgaggagtgcatgagttagtacatgtagagtgctgcaaacagtgcctgggggagactgagagctcagtgtgtgttctctgctctacgatatta

SEQ ID NO: 507151 - DNA, 201 bp, Homo sapiens
tgtgccctgtctctttcagaagcttcaggcctggcttcaggcttctgtcctgcttggcattcgcctgtggtttccaactcctccgaagtccagcctttgcygctgtgcggggattgtctgccctctactgtccatcgtctgtcatggcacacatttaacagatggccaggaactcaagagggggcactaattgggagaaaa

SEQ ID NO: 507152 - DNA, 201 bp, Homo sapiens
ttacaggcgtgagccaccacgcccggccagattttataatacattttttaaagtctttcttttttttttttctgagcccaaatcctcctagcttttcaccrtttgattctagttctgctcttgaggctgcctctgacaaagacagcccttcagatagcagaatgaagtggtgtctacccattcttcccatcttaggcttga

SEQ ID NO: 507153 - DNA, 201 bp, Homo sapiens
tgtctctttcagaagcttcaggcctggcttcaggcttctgtcctgcttggcattcgcctgtggtttccaactcctccgaagtccagcctttgctgctgtgyggggattgtctgccctctactgtccatcgtctgtcatggcacacatttaacagatggccaggaactcaagagggggcactaattgggagaaaacttagag

SEQ ID NO: 507154 - DNA, 201 bp, Homo sapiens
acagagagtgctgcgatgcctaggaggaccaggtacgtgtgccctgtctctttcagaagcttcaggcctggcttcaggcttctgtcctgcttggcattcgyctgtggtttccaactcctccgaagtccagcctttgctgctgtgcggggattgtctgccctctactgtccatcgtctgtcatggcacacatttaacagatg

SEQ ID NO: 507155 - DNA, 201 bp, Homo sapiens
tattatagcggggaaaaacattaatcataacttaggatttctctccccatggaactgttatcagctataaatcggtttaggattctatcaagatcagcaayggcaaaacctctgcaggcttccagcccacacaggggcaccttcctctcctcttccatgcagggcagttggaagccccctccccagtttcctctccaggat

SEQ ID NO: 507156 - DNA, 201 bp, Homo sapiens
aacagctacagtggctcaagaacatgtcctgtctcttagctggaggagtctgctattgcccttcaacagcatccggattccaaaaaccccaaagaaaaacraaaaggcacatcaaggaaacaaatatcactaaagaaactgactaatatctccaaacgcacagcaaacacacaaaaaagcaaactgtaatgagcagtgaca

SEQ ID NO: 507157 - DNA, 201 bp, Homo sapiens
gaaaaacattaatcataacttaggatttctctccccatggaactgttatcagctataaatcggtttaggattctatcaagatcagcaacggcaaaacctcygcaggcttccagcccacacaggggcaccttcctctcctcttccatgcagggcagttggaagccccctccccagtttcctctccaggatcactgactagac

SEQ ID NO: 507158 - DNA, 201 bp, Homo sapiens
cacaggaactcaccctcagcttcacgaaactcccagcttcctaaatgagcatgaatctatttatgtccatccgtctactcacatgaagatgctctgcagcyccacagggatggatgggattagaataaagccaatatggaaattaaaatacttttaaataaataaaataatccaggcttgggatagtaacacatacaacag

SEQ ID NO: 507159 - DNA, 201 bp, Homo sapiens
aggtgagggtggcaatgtctaatatacacaagctaggtaaaccaccttggagaaatggggtggccaccgtggtctgccctaaaaggcacacacctacctayagacatacagtttcagtccaacacatcatactgatgtcaaccctgtcagtgagctgcactgggctccactcccaaaggggaagctcattattcactttta

SEQ ID NO: 507160 - DNA, 201 bp, Homo sapiens
acccaaaggtatggcagaatccagccctttcttgaggttctcaaggcttcacaccctcctctgtgggtggaagtgcacatgcatacacgctatggcctggygggggggttatagggagcgtctggtgtccagcttcaacagctacagtggctcaagaacatgtcctgtctcttagctggaggagtctgctattgcccttca

SEQ ID NO: 507161 - DNA, 201 bp, Homo sapiens
atagggagcgtctggtgtccagcttcaacagctacagtggctcaagaacatgtcctgtctcttagctggaggagtctgctattgcccttcaacagcatccrgattccaaaaaccccaaagaaaaacgaaaaggcacatcaaggaaacaaatatcactaaagaaactgactaatatctccaaacgcacagcaaacacacaaa

SEQ ID NO: 507162 - DNA, 201 bp, Homo sapiens
gtctggccttatggtggtaccacactgttttgattactatagttctgtagtaagttttgaaattgaaagtatggatcctacagctttgttcttttacaatrttgttttggaaattatgatgtatcctgatgtatttgtccttatgtttttgtgtgtgaaattctttgagcttattggatcccagcacgtggcaagtaagag

SEQ ID NO: 507163 - DNA, 201 bp, Homo sapiens
ttgcatcagaacctagaaaacaaagaggccgggcacggtggctcatgcctgtaatcccagcactttgggaggccaaagcagacacactttgggaggactcractcaacacacacacttgagtccaggagttcaggacctcatctctattaaaaatagctgggcatggtggtgggtgcctgtggtcccagctacttgggagg

SEQ ID NO: 507164 - DNA, 201 bp, Homo sapiens
ggagccagggagattgaggctgcggtgagctgtgattataccactgcactccagcctgggtgacagagcaagaccttgtctcaaaaaaaggggagaaaatrttggagctctgtaagaaatgtaattacataacatgactaggctaggaataatagttgcttcatcataatcgtgtaaacactggatattaatctattctca

SEQ ID NO: 507165 - DNA, 201 bp, Homo sapiens
agaaaatattggagctctgtaagaaatgtaattacataacatgactaggctaggaataatagttgcttcatcataatcgtgtaaacactggatattaatcyattctcaattataaaactgtcctgaaggaatccgagaatggaattatatttcctactagtggggaggagcatgggagaggaagaatcttcatttttccac

SEQ ID NO: 507166 - DNA, 201 bp, Homo sapiens
aattcagaagaggaaggaatgcaggctggaagccctgaggccagcaccctctcccttagcaccggaggcaggagacccacttccatcatgcagggcaggcyttctgcccaggaacacacgccaccaaaaggagggaatgaaaacaggagaggaaatggtgtcacaggaggtcccagggccactgtgagtccagcagcagta

SEQ ID NO: 507167 - DNA, 201 bp, Homo sapiens
tcccaaagtgctgggatgacaggtgtgagccactgcgcctcgtctaatttttaatatttttagtggagacagggtttcaccatgttggccaggctggtctygaattcctgacctcaagtgatctgcccacctcggcctcccaaagtgctggggtgacaggcgtgagccattggtcccggtctctttactttcttaatgttc

SEQ ID NO: 507168 - DNA, 201 bp, Homo sapiens
atgttggtcaggctggtctcaaactcctgaccttgtgatctgcctgcctcggcctcccaaagtgctgggattacaggtgtgagccactgcgcctcgtctamtttttaatatttttagtggagacagggtttcaccatgttggccaggctggtcttgaattcctgacctcaagtgatctgcccacctcggcctcccaaagtg

SEQ ID NO: 507169 - DNA, 201 bp, Homo sapiens
tgaggcattaggatcacttgggcccaggagttggaggctgcagtgagccatgattgcactactgcattctagcctggatgactcagtgataccctgtctcaaaaaaaaaaaaaaaaaagacaggagtgatgcttcaggggagataaggaaatcaagaggtcgccagagtgctgtgagcctatcaagagatctgcatgcctg

SEQ ID NO: 507170 - DNA, 201 bp, Homo sapiens; identical to SEQ ID NO: 395555

SEQ ID NO: 507171 - DNA, 201 bp, Homo sapiens
agtgataccctgtctcaaaaaaaaaaaaaaaaaagacaggagtgatgcttcaggggagataaggaaatcaagaggtcgccagagtgctgtgagcctatcargagatctgcatgcctggtggagagttgggagttgcatcagaacctagaaaacaaagaggccgggcacggtggctcatgcctgtaatcccagcactttggg

SEQ ID NO: 507172 - DNA, 201 bp, Homo sapiens
tctgtagtaagttttgaaattgaaagtatggatcctacagctttgttcttttacaatgttgttttggaaattatgatgtatcctgatgtatttgtccttaygtttttgtgtgtgaaattctttgagcttattggatcccagcacgtggcaagtaagagttccaaaaagaaaacaaggaaggatctcagtaatgaagtaatt

SEQ ID NO: 507173 - DNA, 201 bp, Homo sapiens; identical to SEQ ID NO: 240662

SEQ ID NO: 507174 - DNA, 201 bp, Homo sapiens; identical to SEQ ID NO: 240516

SEQ ID NO: 507175 - DNA, 201 bp, Homo sapiens; identical to SEQ ID NO: 240434

SEQ ID NO: 507176 - DNA, 201 bp, Homo sapiens; identical to SEQ ID NO: 240519

SEQ ID NO: 507177 - DNA, 201 bp, Homo sapiens; identical to SEQ ID NO: 240830

SEQ ID NO: 507178 - DNA, 201 bp, Homo sapiens; identical to SEQ ID NO: 240627

SEQ ID NO: 507179 - DNA, 201 bp, Homo sapiens; identical to SEQ ID NO: 240755

SEQ ID NO: 507180 - DNA, 201 bp, Homo sapiens; identical to SEQ ID NO: 240630

SEQ ID NO: 507181 - DNA, 201 bp, Homo sapiens; identical to SEQ ID NO: 240455

SEQ ID NO: 507182 - DNA, 201 bp, Homo sapiens; identical to SEQ ID NO: 240846

SEQ ID NO: 507183 - DNA, 201 bp, Homo sapiens; identical to SEQ ID NO: 240632

SEQ ID NO: 507184 - DNA, 201 bp, Homo sapiens; identical to SEQ ID NO: 240531

SEQ ID NO: 507185 - DNA, 201 bp, Homo sapiens; identical to SEQ ID NO: 240533

SEQ ID NO: 507186 - DNA, 201 bp, Homo sapiens; identical to SEQ ID NO: 240534

SEQ ID NO: 507187 - DNA, 201 bp, Homo sapiens; identical to SEQ ID NO: 240535

SEQ ID NO: 507188 - DNA, 201 bp, Homo sapiens; identical to SEQ ID NO: 240681

SEQ ID NO: 507189 - DNA, 201 bp, Homo sapiens; identical to SEQ ID NO: 240536

SEQ ID NO: 507190 - DNA, 201 bp, Homo sapiens; identical to SEQ ID NO: 240683

SEQ ID NO: 507191 - DNA, 201 bp, Homo sapiens; identical to SEQ ID NO: 240684

SEQ ID NO: 507192 - DNA, 201 bp, Homo sapiens; identical to SEQ ID NO: 240866

SEQ ID NO: 507193 - DNA, 201 bp, Homo sapiens; identical to SEQ ID NO: 240685

SEQ ID NO: 507194 - DNA, 201 bp, Homo sapiens; identical to SEQ ID NO: 240538

SEQ ID NO: 507195 - DNA, 201 bp, Homo sapiens; identical to SEQ ID NO: 240869

SEQ ID NO: 507196 - DNA, 201 bp, Homo sapiens; identical to SEQ ID NO: 240686

SEQ ID NO: 507197 - DNA, 201 bp, Homo sapiens; identical to SEQ ID NO: 240872

SEQ ID NO: 507198 - DNA, 201 bp, Homo sapiens; identical to SEQ ID NO: 240687

SEQ ID NO: 507199 - DNA, 201 bp, Homo sapiens; identical to SEQ ID NO: 240688

SEQ ID NO: 507200 - DNA, 201 bp, Homo sapiens; identical to SEQ ID NO: 240494

SEQ ID NO: 507201 - DNA, 201 bp, Homo sapiens; identical to SEQ ID NO: 240647

SEQ ID NO: 507202 - DNA, 201 bp, Homo sapiens; identical to SEQ ID NO: 240648

SEQ ID NO: 507203 - DNA, 201 bp, Homo sapiens; identical to SEQ ID NO: 240649

SEQ ID NO: 507204 - DNA, 201 bp, Homo sapiens; identical to SEQ ID NO: 240651

SEQ ID NO: 507205 - DNA, 201 bp, Homo sapiens; identical to SEQ ID NO: 240652

SEQ ID NO: 507206 - DNA, 201 bp, Homo sapiens; identical to SEQ ID NO: 240558

SEQ ID NO: 507207 - DNA, 201 bp, Homo sapiens; identical to SEQ ID NO: 240561

SEQ ID NO: 507208 - DNA, 201 bp, Homo sapiens; identical to SEQ ID NO: 240563

SEQ ID NO: 507209 - DNA, 201 bp, Homo sapiens; identical to SEQ ID NO: 240617

SEQ ID NO: 507210 - DNA, 201 bp, Homo sapiens
agatagaattgttttacagaagaccattgcctgattactagtttgaatctgacaatgtacttacttttaccagtaagttttttatttttgtatttttatcstatcaattagtatccttttaatccagcttgaagaattcctagaatttcttgtaaggcacatctaatggtgatatccttcctcgacttttgtttgtttgag

SEQ ID NO: 507211 - DNA, 201 bp, Homo sapiens
tctttttcattaggaccattagcatattactgagttgttttaaattccctttctgatagttccaccacctgtgtcatatccgagtctagcagtaatgattmttttatgtcttctgtttttccttgcttttttgcatactggacatcttgtgtaagacagtagatactaaggtcaaaagtgttttatgctttgagaagagca

SEQ ID NO: 507212 - DNA, 201 bp, Homo sapiens
tttcttattcagcctattaatacagaaaattacattaattttcccatttattattttttaaaatgtattgaggtgaaattcatttaacagaaaatggatcrttttaaaatgaacaactcagtggcatttcgtacatacacaatattgtgcaaccgccacctctgcttccaaaacatcctcatcattccagaataaaacctc

SEQ ID NO: 507213 - DNA, 201 bp, Homo sapiens
ttcaaatacggcaaacacagagctgtaaacaatccagctgtttctagacctcattttcattttctctacatttcttttctgttcataaatcttccaccacrtggctccactgcagtctctctgagcctattctggcctaattaaactctgttaaatttaatttgtctaataaagcttttcctttaaatataggattggaag

SEQ ID NO: 507214 - DNA, 201 bp, Homo sapiens
ttctaattgtatcttttactgttatataaacatctttttgactcccctgataactgttgctacatgtgtttgcttttcgtagtatttccctggtctatctytgctcatcataatatttaaagtatctttatgttatttttgttcttgataggtgtcctgtaaacattctatagctttgacataaacggaaagtttttcctt

SEQ ID NO: 507215 - DNA, 201 bp, Homo sapiens
gttcttctctacttctcttgcaatatacactctaccccaaatctcaggaattttagttttagaatattagttttaaatttgttcaaatatacttgttttayaaattaatttttatcgaaggcattcacattttcagccacctatcgagtgattatttgccctcaaatatatgctgtaccagtcccttcgcctgtttcttct

SEQ ID NO: 507216 - DNA, 201 bp, Homo sapiens
cctgttgttattctaccggtggttacccttgaatctgaaaacacatatagacctatagtttttttattcacttgaataatttgtcaatatcttctgatctraacaagaagggaccttagcatactgttcttctctacttctcttgcaatatacactctaccccaaatctcaggaattttagttttagaatattagttttaa

SEQ ID NO: 507217 - DNA, 201 bp, Homo sapiens
gcctctcctcccttcacactcacaagtagaaagcataaaacatctcagaagtgctctaggaggataatcagtagccataaacccttggaccacagagctaygaggcagaagaatattactcttctgggcacccaaaaggctctggataagaagggaggagagtacggatggggctgaaaacatgctcagaatggctgattt

SEQ ID NO: 507218 - DNA, 201 bp, Homo sapiens
gctggggctgcggctccctgaggccccgaggggaccccgctcacccgggccccgcccaccagagggcgccagagagaagccaccggggaggcgcctgcgcygtttccctgagcctcctggtaccccgtttgagacacaggaaaaaacgtgtgaaaggcttctgtaaattatcaagtgtggtgacgtatgaaccccaggcag

SEQ ID NO: 507219 - DNA, 201 bp, Homo sapiens
tttctctgaaatgcctactcaagtattttatgtattttgctctcctcttcccttggggttttggtctctcattgtttgcaggaatgctttattctgatccrtcctcagttctatgtgttgcaataattttttccattctttaggttacttttctatactatttatggcattctttttatcaacagatgttctcaagttatc

SEQ ID NO: 507220 - DNA, 201 bp, Homo sapiens
ttttccattctttaggttacttttctatactatttatggcattctttttatcaacagatgttctcaagttatcagtcttgcatttttggattagcactttytgagcttaaaaaaatcccttcttccagcctgggtgttggagtgagaccatgtctcaaaaagaaaaatcctttcctagccagaaagatgataaagataact

SEQ ID NO: 507221 - DNA, 201 bp, Homo sapiens
catagcattttaattattatagctttatagtagtattgatatcaaatagtgcaagtcctgtggtgattcactcaggatggtggcagaaatattaaagggamatattagggaaagttatagggaatagtcacaaacctttttggaaggctgaaaggttacatagcttgtaataattgaacaggctgaaggcagcgggttctt

SEQ ID NO: 507222 - DNA, 201 bp, Homo sapiens
attcactgagctctgtgtgctttcttaatctccatcccttgattcatgattcatgtgcaaatggggtatttttcaaaatatatagaaattattttttaatyagagaaaatttcaaatgtgaaaaaacagtgagagaaagataaagcacccccacatagctaacactcaaattcaacaatggtcaaaatgcagttaattttg

SEQ ID NO: 507223 - DNA, 201 bp, Homo sapiens
gcagaggtgagatcttggctcactgcagcctcaatctcctaggctcaagcaatcctcccacctcagcctcccaagtagctgggactacaggtgcgtgccaycaagcctggttaattttttttttttttagagacagggtctcactatgtagcccaggctggtctggaactcctggcctcaagcgatattcccaccttggtc

SEQ ID NO: 507224 - DNA, 201 bp, Homo sapiens
tttcaccaaaatcatactcttttttactgtacctcaagctgaaggactcttgctacccagtttacatctttaaattgggcagcgggaataaattaggtaaygagagtcctacaactttgttctttttcatagttgttttgaccattctagttcctttgcctttctgcatagattttagaattatttgatcaatatctgatt

SEQ ID NO: 507225 - DNA, 201 bp, Homo sapiens
atgtccaaatgtcacctgaattaaaacatccttacaatcaaagttcaggatagaaactctcgggctcaaaggtctcctgccttccctacttttatcttgtyaatttttttttaaaaaaagaaaaaccaggtgttgtgtgtgtgtgtgtttgagacacagtctccctctattgcccaggctggagtgcagaggtgagatctt

SEQ ID NO: 507226 - DNA, 201 bp, Homo sapiens
cctgacgactcatctcactcttgctgcttccaggactcccagtttccctttgattgtttgactacagtgtgtgcaggtatggctctcctttcatttattcyattttgagaataaatgaataaatgacaataaatgaatattcatttattaagcttttggatatgtagatggatctttttcatcaaatttggggaatttaca

SEQ ID NO: 507227 - DNA, 201 bp, Homo sapiens
gcatttctacctacattttaaagtcatcttgtccatttctaccaaaaactactgaaatgtctggaatcgcactcaatctatagatcaatttgtggagaackgatatgttgcaacaatgactgctctaattcataaacatggtatcagttatttctgtgcaaggaaactcccagaactctctcctaatccagactaggctgg

SEQ ID NO: 507228 - DNA, 201 bp, Homo sapiens
gagaacggatatgttgcaacaatgactgctctaattcataaacatggtatcagttatttctgtgcaaggaaactcccagaactctctcctaatccagactrggctgggatgagtggcctgttgcaggtggggtgggtggagtggtcctgccttcctgaaggtcttgtgtggctctgcttcacatctctcatgctttttgga

SEQ ID NO: 507229 - DNA, 201 bp, Homo sapiens
tacaaaacaattccctcaatgcaattatttatcagttctagtagttttgatgtagtctttatggttttctgtacgtaatatcatgtcatctgcaaacaggraccgtattatttcctcctttccaatctggatgccttttatttcttgctcttgcctaattactctagctaagactgacagtagtactacgttgaatggaag

SEQ ID NO: 507230 - DNA, 201 bp, Homo sapiens
gagtgggcatccttgtcttgttcttgatcttagatggtttgacgcttgtctatagtgatatgctttgactattttcttcttatcttttgtgtatctactamagatttttgctttgtggttacttgaggcttgcagaaaacatcttatgtttataaccagctatttttaagctgataaaagcttaattttgattgcataaat

SEQ ID NO: 507231 - DNA, 201 bp, Homo sapiens
ttatgcttttgatgtcacaatttatatcatttcatcatttgtatctctcaacagattattgtagctatggttgtttttaattgctttatcttttaaccttygtactagagatagaattgttttacagaagaccattgcctgattactagtttgaatctgacaatgtacttacttttaccagtaagttttttatttttgtat

SEQ ID NO: 507232 - DNA, 201 bp, Homo sapiens
ctcgagtcccaccaccgttttttatttcaagagtgccttgcatacaaattttaagactcagttagttaaatttcctcaaaaagtcttttgagattttgatyagaatcacataaactctgtgaattaaatatctttaaaatactgatttttcctatccatgatgtggaatctgtttccatttatttaggccattttaaaatg

SEQ ID NO: 507233 - DNA, 201 bp, Homo sapiens
tcaaattcaacaatggtcaaaatgcagttaattttgttgcatctttagagttaagaccttactctctctaatctctctcaaactacttacaatgccaataycacagctaaaaataaaataattttatgaagattgttagtttatacttttactgatgtctaatttaattccattgttgtcagagaatgtggtgtgtatata

SEQ ID NO: 507234 - DNA, 201 bp, Homo sapiens
ttttagaattatttgatcaatatctgattgctaagatattgattagaatagcattgaatttatagataaaactggggacaattgatgcactaacaagaatyttttccaacccatgaacatgacatatcctgcatatattttattaaattaatatctaagtgcttcatatgttgctattgtaaatgttttttaaacatttaa

SEQ ID NO: 507235 - DNA, 201 bp, Homo sapiens
acagctaaaaataaaataattttatgaagattgttagtttatacttttactgatgtctaatttaattccattgttgtcagagaatgtggtgtgtatataarttttgtacagtttactgaacttactgtatggcctagcacagtgctccctagagtgtggtatgcagaccatcggtgacgaggctgtacagaaattgagagc

SEQ ID NO: 507236 - DNA, 201 bp, Homo sapiens
tgtgaaactgtgagtccattaaacctctttcctttataaattagccagtgtcaggtatgtctttattagcagcgtgagagcacactaatacaagtggtgcragaggaactgttgacattttttccagtcttgggggaaagcatttacccacttatcttcaagtatgatgttagccgtaagtttttgtagttgccctttgtt

SEQ ID NO: 507237 - DNA, 201 bp, Homo sapiens
attcctagaatgctgtgaatttttagtgggaatggaggatgaattttattgtttttacagtattttttgaaaagacaatataatttttcttattcagcctrttaatacagaaaattacattaattttcccatttattattttttaaaatgtattgaggtgaaattcatttaacagaaaatggatcgttttaaaatgaacaa

SEQ ID NO: 507238 - DNA, 201 bp, Homo sapiens
caagttagtctttcctgagctgtgccagtttcctggtgagccttttgaaggcatttttcttctctagtgctgtggtttaaaatttctattgttcccatgaygttcatgtttatagtttccagctctctgctaaaatgacctacctgatcttgcgtatggtctgtctttttcattaggaccattagcatattactgagttgt

SEQ ID NO: 507239 - DNA, 201 bp, Homo sapiens
taaacttaaaactctatttacaaggacaatcttctgtgtcgtatattttgtaggttaatatatgcccagaaacaactcccacaaagcccagactcctcaartgcatgccagggaataacctttgtatgaaatcgaatgataatatgttgcaagagttagatcaatttgcaaaagagtccgttaaatgatgatgacagcaca

SEQ ID NO: 507240 - DNA, 201 bp, Homo sapiens
gccacttttagactttatgtaacattcgctgaatcacacagtatgcattctttgtgtcttaattcttttacttagcttcatgtttgtgtgattcactcatrtttgtgaacttaacttcatgtttgtgttatttgtagaagtagttcattctttttcactgctatatattattccactctgtgagtatagcatgatgcatca

SEQ ID NO: 507241 - DNA, 201 bp, Homo sapiens
tatgcatgtgtgagtctgcactttgtgtggctccattggtttatttgtccctccttgcaccaatcccacactgtcttatttagaacattttaaaaattacycttgatatctgatagtgtaactcttccaactttgttcctctcctaggggatattcttggccctttgcatttctacctacattttaaagtcatcttgtcca

SEQ ID NO: 507242 - DNA, 201 bp, Homo sapiens
tccattggtttatttgtccctccttgcaccaatcccacactgtcttatttagaacattttaaaaattactcttgatatctgatagtgtaactcttccaackttgttcctctcctaggggatattcttggccctttgcatttctacctacattttaaagtcatcttgtccatttctaccaaaaactactgaaatgtctggaa

SEQ ID NO: 507243 - DNA, 201 bp, Homo sapiens
caactttgttcctctcctaggggatattcttggccctttgcatttctacctacattttaaagtcatcttgtccatttctaccaaaaactactgaaatgtcyggaatcgcactcaatctatagatcaatttgtggagaacggatatgttgcaacaatgactgctctaattcataaacatggtatcagttatttctgtgcaag

SEQ ID NO: 507244 - DNA, 201 bp, Homo sapiens; identical to SEQ ID NO: 498987

SEQ ID NO: 507245 - DNA, 201 bp, Homo sapiens; identical to SEQ ID NO: 498988

SEQ ID NO: 507246 - DNA, 201 bp, Homo sapiens; identical to SEQ ID NO: 498989

SEQ ID NO: 507247 - DNA, 201 bp, Homo sapiens
agggttctgtgagagtcagtaaaggttaaagccatttatatgtgtatggtccaaccatatacaatcggccctccatatccgcatgtcccacctttggagaytgaacgaagagcgggttgaaaatacagtgttgaggtatggtggctcacacctgtaatctcgcacttcaggaatccaagcaggaggatcgcttcaggccag

SEQ ID NO: 507248 - DNA, 201 bp, Homo sapiens
aggtggagcttgcagtgagctgagatcacgccactgcactgagggttctgtgagagtcagtaaaggttaaagccatttatatgtgtatggtccaaccatayacaatcggccctccatatccgcatgtcccacctttggagattgaacgaagagcgggttgaaaatacagtgttgaggtatggtggctcacacctgtaatct

SEQ ID NO: 507249 - DNA, 201 bp, Homo sapiens
tactatagggagcgtgctttgatgagacacagtttgtgtccgccccagttcaccttggcagcctccttcggggatgcttgtaggatccgctttgaaggcarcgaggaagactgggaagtactgaaccaaaatcttagtgtgataacttgttttgctttcatgccacttgcttttatgttgttggaaatgcagtgctcctca

SEQ ID NO: 507250 - DNA, 201 bp, Homo sapiens
agtaatcctctgccccctatgtactccaaaaataagtcacatattttttaaaggaatctctctaaacgaagtttagttttccagcaatttgggggtgggggaggagcatccctgcatgattgtctcttggctttttggttttgcttttttatggttagggtcatagtgaaaatcaggaagaaatcaattcttgtgcaagcc

SEQ ID NO: 507251 - DNA, 201 bp, Homo sapiens
ctgctcgccctgcgcccgcttctctcgctgccgccgccgccgctgtttgtctcctccccctcctcctcctcctcctcttcctcctcctcccgctcctcgaygctccgccgctcgcggctggggggtccggggccgcgtctcctctcctccctccgcctctcctctttcctccttcctgctgcctcttcttttaaagcggat

SEQ ID NO: 507252 - DNA, 201 bp, Homo sapiens
tggtcagtaatcctctgccccctatgtactccaaaaataagtcacatattttttaaaggaatctctctaaacgaagtttagttttccagcaatttgggggkgggggaggagcatccctgcatgattgtctcttggctttttggttttgcttttttatggttagggtcatagtgaaaatcaggaagaaatcaattcttgtgc

SEQ ID NO: 507253 - DNA, 201 bp, Homo sapiens
gcagattggcaacaaaagagtgtcctaatgctgcagcatctagtaaacttctggactggtttaccatttggaaattttaagtcaaagaacatcagaagcargctaatcttttgttgaaattacctcgtttttacaggtaaagaaacgaagaccctgagaatttaaaatcatccaactatttggtgccagaagcaggacaag

SEQ ID NO: 507254 - DNA, 201 bp, Homo sapiens
atcaggaagaaatcaattcttgtgcaagccttcaaacgaggtttaccctccaatcattctgatttcacaggagctgaaaagctgtgcagggatgatggacmcttgccccctgtgacctaaggatggatccagaaatctcagcctccccataggtgattccacccaagatgtaaactcctacttggctttgtcattgccaca

SEQ ID NO: 507255 - DNA, 201 bp, Homo sapiens
tcagggtgatgctgctgaaaaacgggagatacagcaaatagagaagccaaagtttctctgcacatctgagtagtaatggaagtgagactgcagcctgctayactcatgttaatatattcagagcagattggcaacaaaagagtgtcctaatgctgcagcatctagtaaacttctggactggtttaccatttggaaatttta

SEQ ID NO: 507256 - DNA, 201 bp, Homo sapiens
tcacaagttacttattccctcttaggctaagttcatctgcaagacagacatacagcatctactcttcaagactgctttaaggataagaggaattgaatgtraagtgctgagttatccataaatgttgtatattattcaacaaaagactgctgtttaagtgtccatacatacacgctaaatatggaatggaagccacattta

SEQ ID NO: 507257 - DNA, 201 bp, Homo sapiens
cccgccttcttttttttctttctttttttttttctttttggactttgttttttcctaagaatggaatgtgacattgtttaaagagcatgaattttgccacrtattacctatgagatctttcacaagttacttattccctcttaggctaagttcatctgcaagacagacatacagcatctactcttcaagactgctttaagg

SEQ ID NO: 507258 - DNA, 201 bp, Homo sapiens; identical to SEQ ID NO: 215362

SEQ ID NO: 507259 - DNA, 201 bp, Homo sapiens; identical to SEQ ID NO: 215661

SEQ ID NO: 507260 - DNA, 201 bp, Homo sapiens
gtgaaactctgtctatactaaaaatacaaaaattagtcgggcgtggtggcacatgcctgtaatcccagctactcgggaggctgaggcttgagcccgggagrtggaggttacagtgagccgagatcgaaccactgcattccagcctgggcaacagagtgagaccttgtcacaaacaaacaaaaaaaaccatgtttttgggac

SEQ ID NO: 507261 - DNA, 201 bp, Homo sapiens
aactcttgggctcaagagatcctcccaccttagcctgcgaagtagcagggaccccaggcgagggccacgatccccgcttatcctcgtgtttatttaaaaawttaaaaaacaaacaaaccgggattaccgggagtggtggtgcgcatctgtagtcccagctgctcgggaggctgaggtgggatggttgcttgagccgaggag

SEQ ID NO: 507262 - DNA, 201 bp, Homo sapiens
tttttcagcctgcacggctcgtctcgcgagagcttgtcggccgaggagacgggacgcgtgcgcaccacgcatgcgccaggtcgaagcggcgggcggggcgyctgattatagtgtggggagcctgcgattggggtggggcgcctgcgattaggttgggaagcctgcgtttagggtggggcacctgcgattaggttgggaagc

SEQ ID NO: 507263 - DNA, 201 bp, Homo sapiens
gtcggatttggttgcgctggtcgccgacaggaccctgggctcccgggtactgggtggcgccattttttcagcctgcacggctcgtctcgcgagagcttgtyggccgaggagacgggacgcgtgcgcaccacgcatgcgccaggtcgaagcggcgggcggggcgtctgattatagtgtggggagcctgcgattggggtgggg

SEQ ID NO: 507264 - DNA, 201 bp, Homo sapiens
cggcttccggcggccgcgggcgactcctggtacccccgaggccccgcgaactcaccttcacaaagctgtcggcgtccgggaagcctggcagcaccatctcyccgtcggatttggttgcgctggtcgccgacaggaccctgggctcccgggtactgggtggcgccattttttcagcctgcacggctcgtctcgcgagagctt

SEQ ID NO: 507265 - DNA, 201 bp, Homo sapiens
cgaactcaccttcacaaagctgtcggcgtccgggaagcctggcagcaccatctctccgtcggatttggttgcgctggtcgccgacaggaccctgggctccmgggtactgggtggcgccattttttcagcctgcacggctcgtctcgcgagagcttgtcggccgaggagacgggacgcgtgcgcaccacgcatgcgccaggt

SEQ ID NO: 507266 - DNA, 201 bp, Homo sapiens
ggtcttgaactcctgacctcaagtgatccacctgctttggcctcccgaagtgctgggattacaggtgtgcgccaccagcgcctggcttattttttttagaytgcatcttaccaacctggtctcgaactcctgggctgaagccgtcctcccacctcactgggattacaggcaggaaccactgtgcccggcccagcctcatat

SEQ ID NO: 507267 - DNA, 201 bp, Homo sapiens
tgaagaaagcgtctagctccaactgtgcttcctccctccagtaccctctgaactcctccaagcagacgttgtttcctgcagacatcgctggaaccattctkgttaacacagagtgggaactcagtacacatttgtgaagtgaactcctggaagagctcttgtgagggaggcaccgaattatcaggcagctcaagagataga

SEQ ID NO: 507268 - DNA, 201 bp, Homo sapiens; identical to SEQ ID NO: 247233

SEQ ID NO: 507269 - DNA, 201 bp, Homo sapiens; identical to SEQ ID NO: 247261

SEQ ID NO: 507270 - DNA, 201 bp, Homo sapiens; identical to SEQ ID NO: 247297

SEQ ID NO: 507271 - DNA, 201 bp, Homo sapiens; identical to SEQ ID NO: 247264

SEQ ID NO: 507272 - DNA, 201 bp, Homo sapiens; identical to SEQ ID NO: 247118

SEQ ID NO: 507273 - DNA, 201 bp, Homo sapiens; identical to SEQ ID NO: 247304

SEQ ID NO: 507274 - DNA, 201 bp, Homo sapiens; identical to SEQ ID NO: 247292

SEQ ID NO: 507275 - DNA, 201 bp, Homo sapiens; identical to SEQ ID NO: 185833

SEQ ID NO: 507276 - DNA, 201 bp, Homo sapiens; identical to SEQ ID NO: 499816

SEQ ID NO: 507277 - DNA, 201 bp, Homo sapiens; identical to SEQ ID NO: 473433

SEQ ID NO: 507278 - DNA, 201 bp, Homo sapiens; identical to SEQ ID NO: 473434

SEQ ID NO: 507279 - DNA, 201 bp, Homo sapiens; identical to SEQ ID NO: 473435

SEQ ID NO: 507280 - DNA, 201 bp, Homo sapiens; identical to SEQ ID NO: 278128

SEQ ID NO: 507281 - DNA, 201 bp, Homo sapiens; identical to SEQ ID NO: 278130

SEQ ID NO: 507282 - DNA, 201 bp, Homo sapiens; identical to SEQ ID NO: 473440

SEQ ID NO: 507283 - DNA, 201 bp, Homo sapiens; identical to SEQ ID NO: 278134

SEQ ID NO: 507284 - DNA, 201 bp, Homo sapiens; identical to SEQ ID NO: 473441

SEQ ID NO: 507285 - DNA, 201 bp, Homo sapiens; identical to SEQ ID NO: 473443

SEQ ID NO: 507286 - DNA, 201 bp, Homo sapiens; identical to SEQ ID NO: 473444

SEQ ID NO: 507287 - DNA, 201 bp, Homo sapiens; identical to SEQ ID NO: 473448

SEQ ID NO: 507288 - DNA, 201 bp, Homo sapiens; identical to SEQ ID NO: 473449

SEQ ID NO: 507289 - DNA, 201 bp, Homo sapiens; identical to SEQ ID NO: 473450

SEQ ID NO: 507290 - DNA, 201 bp, Homo sapiens; identical to SEQ ID NO: 473454

SEQ ID NO: 507291 - DNA, 201 bp, Homo sapiens; identical to SEQ ID NO: 473455

SEQ ID NO: 507292 - DNA, 201 bp, Homo sapiens; identical to SEQ ID NO: 278135

SEQ ID NO: 507293 - DNA, 201 bp, Homo sapiens; identical to SEQ ID NO: 278136

SEQ ID NO: 507294 - DNA, 201 bp, Homo sapiens; identical to SEQ ID NO: 473456

SEQ ID NO: 507295 - DNA, 201 bp, Homo sapiens; identical to SEQ ID NO: 473459

SEQ ID NO: 507296 - DNA, 201 bp, Homo sapiens; identical to SEQ ID NO: 473461

SEQ ID NO: 507297 - DNA, 201 bp, Homo sapiens
tggggacaccaggaggcgtcagcgcgaggatgcgggtcccagaccagactgggcgccgacccgggagagcacgtgcagggtgggggtatgcactggcttaygaacccaccaggctctgtccgagcggcattgaaatggccagagtgggacaggctggtgccctcagagcgcttggagcggccagagactcgctggagctcc

SEQ ID NO: 507298 - DNA, 201 bp, Homo sapiens; identical to SEQ ID NO: 473463

SEQ ID NO: 507299 - DNA, 201 bp, Homo sapiens
agcaccgtggggacaccaggaggcgtcagcgcgaggatgcgggtcccagaccagactgggcgccgacccgggagagcacgtgcagggtgggggtatgcacyggcttacgaacccaccaggctctgtccgagcggcattgaaatggccagagtgggacaggctggtgccctcagagcgcttggagcggccagagactcgctg

SEQ ID NO: 507300 - DNA, 201 bp, Homo sapiens; identical to SEQ ID NO: 278147

SEQ ID NO: 507301 - DNA, 201 bp, Homo sapiens; identical to SEQ ID NO: 278146

SEQ ID NO: 507302 - DNA, 201 bp, Homo sapiens; identical to SEQ ID NO: 278149

SEQ ID NO: 507303 - DNA, 201 bp, Homo sapiens; identical to SEQ ID NO: 473433

SEQ ID NO: 507304 - DNA, 201 bp, Homo sapiens; identical to SEQ ID NO: 473467

SEQ ID NO: 507305 - DNA, 201 bp, Homo sapiens; identical to SEQ ID NO: 473466

SEQ ID NO: 507306 - DNA, 201 bp, Homo sapiens; identical to SEQ ID NO: 278157

SEQ ID NO: 507307 - DNA, 201 bp, Homo sapiens; identical to SEQ ID NO: 278158

SEQ ID NO: 507308 - DNA, 201 bp, Homo sapiens; identical to SEQ ID NO: 473472

SEQ ID NO: 507309 - DNA, 201 bp, Homo sapiens; identical to SEQ ID NO: 473473

SEQ ID NO: 507310 - DNA, 201 bp, Homo sapiens
cccaccccctggggacggccccagaacagagcctacctgtctatacaggaaagactggctctcaaactccaggttccagaaccgcagcttcctggaaaaayacgtacctgtaggtgtctgtggggcagtgtttgccatcctcagcctactatgtggccttggacgggagagtgacagggtgggcctaaagacgagcctggt

SEQ ID NO: 507311 - DNA, 201 bp, Homo sapiens; identical to SEQ ID NO: 473474

SEQ ID NO: 507312 - DNA, 201 bp, Homo sapiens
atggcaggggtttttcagagacaagcagccttccctgttctccgctccccagcctggggggagggcacagctggaggctggggggcgtccgggcgaatccyctccagctgtccaggtcctgaggactcccggctgcctgcctcccgcctcaccttgccttaaaactgggggaggtgctggagctaaaatcagcacgtgact

SEQ ID NO: 507313 - DNA, 201 bp, Homo sapiens; identical to SEQ ID NO: 278160

SEQ ID NO: 507314 - DNA, 201 bp, Homo sapiens; identical to SEQ ID NO: 473477

SEQ ID NO: 507315 - DNA, 201 bp, Homo sapiens; identical to SEQ ID NO: 278161

SEQ ID NO: 507316 - DNA, 201 bp, Homo sapiens; identical to SEQ ID NO: 278163

SEQ ID NO: 507317 - DNA, 201 bp, Homo sapiens; identical to SEQ ID NO: 473482

SEQ ID NO: 507318 - DNA, 201 bp, Homo sapiens; identical to SEQ ID NO: 278166

SEQ ID NO: 507319 - DNA, 201 bp, Homo sapiens; identical to SEQ ID NO: 473484

SEQ ID NO: 507320 - DNA, 201 bp, Homo sapiens; identical to SEQ ID NO: 56093

SEQ ID NO: 507321 - DNA, 201 bp, Homo sapiens; identical to SEQ ID NO: 56107

SEQ ID NO: 507322 - DNA, 201 bp, Homo sapiens; identical to SEQ ID NO: 278170

SEQ ID NO: 507323 - DNA, 201 bp, Homo sapiens; identical to SEQ ID NO: 278127

SEQ ID NO: 507324 - DNA, 201 bp, Homo sapiens; identical to SEQ ID NO: 473436

SEQ ID NO: 507325 - DNA, 201 bp, Homo sapiens; identical to SEQ ID NO: 278129

SEQ ID NO: 507326 - DNA, 201 bp, Homo sapiens; identical to SEQ ID NO: 278131

SEQ ID NO: 507327 - DNA, 201 bp, Homo sapiens; identical to SEQ ID NO: 278132

SEQ ID NO: 507328 - DNA, 201 bp, Homo sapiens; identical to SEQ ID NO: 278133

SEQ ID NO: 507329 - DNA, 201 bp, Homo sapiens; identical to SEQ ID NO: 473442

SEQ ID NO: 507330 - DNA, 201 bp, Homo sapiens
ccatgatccgcagcttggagaccacgtccttggagatgaatgagaagatggtgcccaggctgttcagaaacctgtggaagggagcggggctcgagtcctcrcccaggcctggggcagcccgcctggggtgcaggggacgctgcccagcctgcgggggctcacacccatctggaaacgggcagcaaagctggtggggacagg

SEQ ID NO: 507331 - DNA, 201 bp, Homo sapiens; identical to SEQ ID NO: 473446

SEQ ID NO: 507332 - DNA, 201 bp, Homo sapiens; identical to SEQ ID NO: 473447

SEQ ID NO: 507333 - DNA, 201 bp, Homo sapiens
gaggctgtcccaagggcggggacttcctgggcccttctgtgaggagccttggtctcagcttccggctgtcctgcccccagtctgcctggcacgctgagggrcaaacaaggcaggagaggcggggagagccccacagtgcccagactgctgttgagggtttctgccagccagggcatggagggcactgagtcccctgggctc

SEQ ID NO: 507334 - DNA, 201 bp, Homo sapiens; identical to SEQ ID NO: 473452

SEQ ID NO: 507335 - DNA, 201 bp, Homo sapiens; identical to SEQ ID NO: 473451

SEQ ID NO: 507336 - DNA, 201 bp, Homo sapiens; identical to SEQ ID NO: 473453

SEQ ID NO: 507337 - DNA, 201 bp, Homo sapiens; identical to SEQ ID NO: 473457

SEQ ID NO: 507338 - DNA, 201 bp, Homo sapiens; identical to SEQ ID NO: 473458

SEQ ID NO: 507339 - DNA, 201 bp, Homo sapiens; identical to SEQ ID NO: 473460

SEQ ID NO: 507340 - DNA, 201 bp, Homo sapiens; identical to SEQ ID NO: 278137

SEQ ID NO: 507341 - DNA, 201 bp, Homo sapiens; identical to SEQ ID NO: 278138

SEQ ID NO: 507342 - DNA, 201 bp, Homo sapiens; identical to SEQ ID NO: 278139

SEQ ID NO: 507343 - DNA, 201 bp, Homo sapiens
gtcaccagatattctgcgggccttgccttcctgcccagattcgagccagtggcaaacagaagctgccaggagcttctcagagctgtggctggtggctcggkaacaacaggaagggcagtggctgtgcaggaggcaggcagcttgccagcccaggaaggtgacccaggacacctccaggcctttcccagggcagcccaacgg

SEQ ID NO: 507344 - DNA, 201 bp, Homo sapiens; identical to SEQ ID NO: 473462

SEQ ID NO: 507345 - DNA, 201 bp, Homo sapiens
ctctgaggctctggggtttccttcttggtcaccagatattctgcgggccttgccttcctgcccagattcgagccagtggcaaacagaagctgccaggagcytctcagagctgtggctggtggctcgggaacaacaggaagggcagtggctgtgcaggaggcaggcagcttgccagcccaggaaggtgacccaggacacctc

SEQ ID NO: 507346 - DNA, 201 bp, Homo sapiens; identical to SEQ ID NO: 278140

SEQ ID NO: 507347 - DNA, 201 bp, Homo sapiens
ctggtgctttcttgtttttgtttctctctctagatgctgtatctgcttttaccagctggagaaatactaagcccctgccgagagccaagcaccatcctagscatctatctgggtgcatggggagtgcgagcagccatctggggtggggtcagatgacaacaaagacaggaagttctgaagtcctagacaagaaaacagaca

SEQ ID NO: 507348 - DNA, 201 bp, Homo sapiens; identical to SEQ ID NO: 473464

SEQ ID NO: 507349 - DNA, 201 bp, Homo sapiens; identical to SEQ ID NO: 278145

SEQ ID NO: 507350 - DNA, 201 bp, Homo sapiens; identical to SEQ ID NO: 56065

SEQ ID NO: 507351 - DNA, 201 bp, Homo sapiens; identical to SEQ ID NO: 278144

SEQ ID NO: 507352 - DNA, 201 bp, Homo sapiens
ggagaaaggatggagcctccacaccccgggacctgtgacttcaccctggttcgcagatgcaccccacaggctagggggtggcgacctttcgggctcttgcrggcccggcccccacccctgcctgctctgctctgcaccgcaccctggcgaggcctggctgcgcacgcgtgtaataggccgagggggagccgtggccgaggc

SEQ ID NO: 507353 - DNA, 201 bp, Homo sapiens
ttaacgttggaagacatcacatagattgcactctggaagctcgcatgtctgctgggccgtgggggccgtccctctgccaccccgaggtgctggggtccacygtgaagagccagtggccaggccccaggcactggatggtggctgggctggttgtggctgtctggtagcctttggctgggccacagggtccagaccctcctg

SEQ ID NO: 507354 - DNA, 201 bp, Homo sapiens
agggactccatcggtgggggagggggaagggcacccagccgtggtgagagctcctggccaggagcaggtgggcaggttgctcagcaccctaggactgggcmcttcatcactagggatcatgggctgcaagccctgcccagcccgtggcccaggctgctggagcactggtgcctgcagggtgctgaagcctggcgttgcagg

SEQ ID NO: 507355 - DNA, 201 bp, Homo sapiens; identical to SEQ ID NO: 278148

SEQ ID NO: 507356 - DNA, 201 bp, Homo sapiens; identical to SEQ ID NO: 278150

SEQ ID NO: 507357 - DNA, 201 bp, Homo sapiens; identical to SEQ ID NO: 278151

SEQ ID NO: 507358 - DNA, 201 bp, Homo sapiens
ttggaagacatcacatagattgcactctggaagctcgcatgtctgctgggccgtgggggccgtccctctgccaccccgaggtgctggggtccactgtgaaragccagtggccaggccccaggcactggatggtggctgggctggttgtggctgtctggtagcctttggctgggccacagggtccagaccctcctgttccgt

SEQ ID NO: 507359 - DNA, 201 bp, Homo sapiens; identical to SEQ ID NO: 278152

SEQ ID NO: 507360 - DNA, 201 bp, Homo sapiens
ctggccaggagcaggtgggcaggttgctcagcaccctaggactgggcccttcatcactagggatcatgggctgcaagccctgcccagcccgtggcccaggstgctggagcactggtgcctgcagggtgctgaagcctggcgttgcaggccccacaggttgggttgcatgcttggcaccaggcggaggccccagatgtgagc

SEQ ID NO: 507361 - DNA, 201 bp, Homo sapiens
gtgcaccccagcgtctccctcctgggaggctgtgtgatttattaacgttggaagacatcacatagattgcactctggaagctcgcatgtctgctgggccgkgggggccgtccctctgccaccccgaggtgctggggtccactgtgaagagccagtggccaggccccaggcactggatggtggctgggctggttgtggctgt

SEQ ID NO: 507362 - DNA, 201 bp, Homo sapiens; identical to SEQ ID NO: 278153

SEQ ID NO: 507363 - DNA, 201 bp, Homo sapiens; identical to SEQ ID NO: 278154

SEQ ID NO: 507364 - DNA, 201 bp, Homo sapiens; identical to SEQ ID NO: 473468

SEQ ID NO: 507365 - DNA, 201 bp, Homo sapiens; identical to SEQ ID NO: 56087

SEQ ID NO: 507366 - DNA, 201 bp, Homo sapiens
accctcctgttccgtgccccacgggtctcctgagcactgtggggagggggcatcaaggggcacgggggagaagggacacagcatttcactgggtgtagcaragtcccagctcctgggggccttgggctgggctgggctgtgcagacccacggccgctgcgggaggcggcctgctgcgtccctcggggaactggtgccgtgc

SEQ ID NO: 507367 - DNA, 201 bp, Homo sapiens; identical to SEQ ID NO: 473471

SEQ ID NO: 507368 - DNA, 201 bp, Homo sapiens; identical to SEQ ID NO: 278159

SEQ ID NO: 507369 - DNA, 201 bp, Homo sapiens
cttgcgggcccggcccccacccctgcctgctctgctctgcaccgcaccctggcgaggcctggctgcgcacgcgtgtaataggccgagggggagccgtggcygaggcgtcttgttccggaccgagagggtgggcctcttctgggctggtcgccaccttctctgtcacagtctgtggttcctaaccagctcagctcacagggg

SEQ ID NO: 507370 - DNA, 201 bp, Homo sapiens; identical to SEQ ID NO: 473475

SEQ ID NO: 507371 - DNA, 201 bp, Homo sapiens; identical to SEQ ID NO: 473476

SEQ ID NO: 507372 - DNA, 201 bp, Homo sapiens; identical to SEQ ID NO: 473478

SEQ ID NO: 507373 - DNA, 201 bp, Homo sapiens; identical to SEQ ID NO: 473479

SEQ ID NO: 507374 - DNA, 201 bp, Homo sapiens; identical to SEQ ID NO: 473480

SEQ ID NO: 507375 - DNA, 201 bp, Homo sapiens
cacccacctcagctgtgtccctggggtgagggccctccccaccctcactgggtgcccctgtgtccccctgcaggaaatcaggcacccagtgcaccccagcktctccctcctgggaggctgtgtgatttattaacgttggaagacatcacatagattgcactctggaagctcgcatgtctgctgggccgtgggggccgtccc

SEQ ID NO: 507376 - DNA, 201 bp, Homo sapiens; identical to SEQ ID NO: 473481

SEQ ID NO: 507377 - DNA, 201 bp, Homo sapiens; identical to SEQ ID NO: 56067

SEQ ID NO: 507378 - DNA, 201 bp, Homo sapiens
ccccgggacctgtgacttcaccctggttcgcagatgcaccccacaggctagggggtggcgacctttcgggctcttgcgggcccggcccccacccctgcctrctctgctctgcaccgcaccctggcgaggcctggctgcgcacgcgtgtaataggccgagggggagccgtggccgaggcgtcttgttccggaccgagagggt

SEQ ID NO: 507379 - DNA, 201 bp, Homo sapiens; identical to SEQ ID NO: 473485

SEQ ID NO: 507380 - DNA, 201 bp, Homo sapiens; identical to SEQ ID NO: 473486

SEQ ID NO: 507381 - DNA, 201 bp, Homo sapiens; identical to SEQ ID NO: 473487

SEQ ID NO: 507382 - DNA, 201 bp, Homo sapiens; identical to SEQ ID NO: 473489

SEQ ID NO: 507383 - DNA, 201 bp, Homo sapiens; identical to SEQ ID NO: 473488

SEQ ID NO: 507384 - DNA, 201 bp, Homo sapiens; identical to SEQ ID NO: 278171

SEQ ID NO: 507385 - DNA, 201 bp, Homo sapiens; identical to SEQ ID NO: 473490

SEQ ID NO: 507386 - DNA, 201 bp, Homo sapiens
caggtaaagctcaccggaggaacgaccccgcccgcccgcggtgtcacattggctctccttccccctcgagctccgaccagacaaggaagtctgtccagatytccagcctccgcccgcgacagatggagtcgggaaggcacagccccagggctgcttaggtcgcgggctcacctgatggccgggtgccgcaggtgtgtgttg

SEQ ID NO: 507387 - DNA, 201 bp, Homo sapiens; identical to SEQ ID NO: 105801

SEQ ID NO: 507388 - DNA, 201 bp, Homo sapiens; identical to SEQ ID NO: 425691

SEQ ID NO: 507389 - DNA, 201 bp, Homo sapiens; identical to SEQ ID NO: 105756

SEQ ID NO: 507390 - DNA, 201 bp, Homo sapiens; identical to SEQ ID NO: 425693

SEQ ID NO: 507391 - DNA, 201 bp, Homo sapiens; identical to SEQ ID NO: 105804

SEQ ID NO: 507392 - DNA, 201 bp, Homo sapiens; identical to SEQ ID NO: 425695

SEQ ID NO: 507393 - DNA, 201 bp, Homo sapiens; identical to SEQ ID NO: 105847

SEQ ID NO: 507394 - DNA, 201 bp, Homo sapiens; identical to SEQ ID NO: 425696

SEQ ID NO: 507395 - DNA, 201 bp, Homo sapiens
gagcaaaagtagccatgatgccactgctggcaggtgggggtcaccccagggcagaaggaggggtccagggcaagggtgctgaccaacaagtccttacaagrtgccagaaccttgggtgggatccagggtccaggcatgcggggtgtgctacagatgatgagaaaacaacagggtgggctggacacggtggctcacgcctgt

SEQ ID NO: 507396 - DNA, 201 bp, Homo sapiens; identical to SEQ ID NO: 425697

SEQ ID NO: 507397 - DNA, 201 bp, Homo sapiens; identical to SEQ ID NO: 105851

SEQ ID NO: 507398 - DNA, 201 bp, Homo sapiens; identical to SEQ ID NO: 425698

SEQ ID NO: 507399 - DNA, 201 bp, Homo sapiens; identical to SEQ ID NO: 503796

SEQ ID NO: 507400 - DNA, 201 bp, Homo sapiens; identical to SEQ ID NO: 105723

SEQ ID NO: 507401 - DNA, 201 bp, Homo sapiens; identical to SEQ ID NO: 425703

SEQ ID NO: 507402 - DNA, 201 bp, Homo sapiens; identical to SEQ ID NO: 16950

SEQ ID NO: 507403 - DNA, 201 bp, Homo sapiens; identical to SEQ ID NO: 105772

SEQ ID NO: 507404 - DNA, 201 bp, Homo sapiens; identical to SEQ ID NO: 503801

SEQ ID NO: 507405 - DNA, 201 bp, Homo sapiens; identical to SEQ ID NO: 503802

SEQ ID NO: 507406 - DNA, 201 bp, Homo sapiens
tgctttgctccctgagccctgctggactatgcatgcacctgtacctgagtgtgtgcctgtgcacacacactaccctgagcccctcagctcagagaggtccyacccagcagcagtgagagccaaaacctgtaccacaagggaacaaaaaaagtacccctggactgccaccctcagcctccttcccgcctggccttcagtgtt

SEQ ID NO: 507407 - DNA, 201 bp, Homo sapiens
ccccagttcaccgtgtcccagtccctggaaaatacagacctgttgctttgctccctgagccctgctggactatgcatgcacctgtacctgagtgtgtgccygtgcacacacactaccctgagcccctcagctcagagaggtcctacccagcagcagtgagagccaaaacctgtaccacaagggaacaaaaaaagtacccct

SEQ ID NO: 507408 - DNA, 201 bp, Homo sapiens; identical to SEQ ID NO: 503803

SEQ ID NO: 507409 - DNA, 201 bp, Homo sapiens; identical to SEQ ID NO: 425690

SEQ ID NO: 507410 - DNA, 201 bp, Homo sapiens; identical to SEQ ID NO: 503805

SEQ ID NO: 507411 - DNA, 201 bp, Homo sapiens; identical to SEQ ID NO: 503806

SEQ ID NO: 507412 - DNA, 201 bp, Homo sapiens; identical to SEQ ID NO: 503807

SEQ ID NO: 507413 - DNA, 201 bp, Homo sapiens; identical to SEQ ID NO: 503809

SEQ ID NO: 507414 - DNA, 201 bp, Homo sapiens; identical to SEQ ID NO: 425692

SEQ ID NO: 507415 - DNA, 201 bp, Homo sapiens; identical to SEQ ID NO: 503811

SEQ ID NO: 507416 - DNA, 201 bp, Homo sapiens; identical to SEQ ID NO: 503813

SEQ ID NO: 507417 - DNA, 201 bp, Homo sapiens; identical to SEQ ID NO: 425694

SEQ ID NO: 507418 - DNA, 201 bp, Homo sapiens; identical to SEQ ID NO: 503814

SEQ ID NO: 507419 - DNA, 201 bp, Homo sapiens; identical to SEQ ID NO: 105863

SEQ ID NO: 507420 - DNA, 201 bp, Homo sapiens; identical to SEQ ID NO: 105779

SEQ ID NO: 507421 - DNA, 201 bp, Homo sapiens; identical to SEQ ID NO: 503815

SEQ ID NO: 507422 - DNA, 201 bp, Homo sapiens; identical to SEQ ID NO: 105780

SEQ ID NO: 507423 - DNA, 201 bp, Homo sapiens; identical to SEQ ID NO: 503816

SEQ ID NO: 507424 - DNA, 201 bp, Homo sapiens; identical to SEQ ID NO: 105735

SEQ ID NO: 507425 - DNA, 201 bp, Homo sapiens; identical to SEQ ID NO: 105781

SEQ ID NO: 507426 - DNA, 201 bp, Homo sapiens; identical to SEQ ID NO: 425700

SEQ ID NO: 507427 - DNA, 201 bp, Homo sapiens; identical to SEQ ID NO: 105737

SEQ ID NO: 507428 - DNA, 201 bp, Homo sapiens; identical to SEQ ID NO: 105739

SEQ ID NO: 507429 - DNA, 201 bp, Homo sapiens; identical to SEQ ID NO: 425699

SEQ ID NO: 507430 - DNA, 201 bp, Homo sapiens; identical to SEQ ID NO: 105742

SEQ ID NO: 507431 - DNA, 201 bp, Homo sapiens; identical to SEQ ID NO: 425702

SEQ ID NO: 507432 - DNA, 201 bp, Homo sapiens; identical to SEQ ID NO: 425701

SEQ ID NO: 507433 - DNA, 201 bp, Homo sapiens; identical to SEQ ID NO: 105872

SEQ ID NO: 507434 - DNA, 201 bp, Homo sapiens; identical to SEQ ID NO: 105743

SEQ ID NO: 507435 - DNA, 201 bp, Homo sapiens; identical to SEQ ID NO: 425705

SEQ ID NO: 507436 - DNA, 201 bp, Homo sapiens; identical to SEQ ID NO: 425704

SEQ ID NO: 507437 - DNA, 201 bp, Homo sapiens
gtggctcacgcctgtaatcccagcacattgggaggccgaggggtggcagatcatgaggtcaggagttcgagaccagcctgaccaacatggtgaaaccccayctctactaaaaatacaaaaattagccgggcgtagcggtgcacgcctgtaatcccagatactcaggaggctgaggcaggagaatcgcttgaacctgggagg

SEQ ID NO: 507438 - DNA, 201 bp, Homo sapiens; identical to SEQ ID NO: 503824

SEQ ID NO: 507439 - DNA, 201 bp, Homo sapiens; identical to SEQ ID NO: 503825

SEQ ID NO: 507440 - DNA, 201 bp, Homo sapiens
ctcctactcttctacccagattagggagattgggctgttgaagtgggaagaggaaggagacctaacatttccctgttcttccccagggtggccttgtaaasatactcaggctgtgtatgaaccacacataggagtgcaacatgaatgggaacccctggatttgtgtagcaacgcagcagatcccagaggccctccccagtt

SEQ ID NO: 507441 - DNA, 201 bp, Homo sapiens; identical to SEQ ID NO: 503826

SEQ ID NO: 507442 - DNA, 201 bp, Homo sapiens
ctgagtgtgtgcctgtgcacacacactaccctgagcccctcagctcagagaggtcctacccagcagcagtgagagccaaaacctgtaccacaagggaacaraaaaagtacccctggactgccaccctcagcctccttcccgcctggccttcagtgtttcccccagcctggatccagctttgcttcccgcctcccttctcca

SEQ ID NO: 507443 - DNA, 201 bp, Homo sapiens; identical to SEQ ID NO: 105799

SEQ ID NO: 507444 - DNA, 201 bp, Homo sapiens; identical to SEQ ID NO: 425707

SEQ ID NO: 507445 - DNA, 201 bp, Homo sapiens; identical to SEQ ID NO: 425708

SEQ ID NO: 507446 - DNA, 201 bp, Homo sapiens; identical to SEQ ID NO: 503830

SEQ ID NO: 507447 - DNA, 201 bp, Homo sapiens; identical to SEQ ID NO: 425709

SEQ ID NO: 507448 - DNA, 201 bp, Homo sapiens; identical to SEQ ID NO: 503832

SEQ ID NO: 507449 - DNA, 201 bp, Homo sapiens; identical to SEQ ID NO: 105879

SEQ ID NO: 507450 - DNA, 201 bp, Homo sapiens
atgaaaagatctgcatgaacctaactggagaatgatgggaaggcgtctgggctgggaggaggctgggaggcctttaagactgtcgtcattggaagccagcrtgggagagaagggattacaactggcagtgctttcaggtccgacataagagagaacaccaaaaagtgttcttacctctgagctactagtagccttcagtgt

SEQ ID NO: 507451 - DNA, 201 bp, Homo sapiens; identical to SEQ ID NO: 355604

SEQ ID NO: 507452 - DNA, 201 bp, Homo sapiens
ctcttgttgcccaggttggagtccaatggcgggatctcagctcactgcaacctctgcctcctgggttcaagcaattatcctgcctcagcctcccgagtagyccgtcaccacacctggctaatttttttgtaattttagtagagacagagtttcaccatgttggccaggctggtctcgaactcctgacctcaggtgatccgc

SEQ ID NO: 507453 - DNA, 201 bp, Homo sapiens
ctaggacccttgtgaagtcaaagtcagctcttgcatggtgggccttaatgcaggcccagatgcctggagatgcagctttttctggatacactgaaggctgyagaatgttcctggaaagagactcatatagaccaggcctggcacagtctatggccactgattttcaaatcaatgatgggcatctccctgccccacccggct

SEQ ID NO: 507454 - DNA, 201 bp, Homo sapiens
tggtgtagctcttgctctcagattcctcttttccttttctctctattacctgagtctgtttgcatctgcgggtggggaggagaaaccgtatatttttagtktactaccatctttcaatgatgattcaattcctcatattagatctgttgtcttcaaaagctgttttttattaattttatttatttatttatttatttagag

SEQ ID NO: 507455 - DNA, 201 bp, Homo sapiens
cggcacaaaagcgaacgggacagggcgccctgggcggcggcagcttggccggcccgctgcctagcgcgcccccgaggggcggtaatggaacgtacctttgkctgaagaaagagtgctcccggccagcgcggggtcgcctagggggttccgcgctgcctaatgcaaaggatggaaaagttacagaagcaggtcctgacacca

SEQ ID NO: 507456 - DNA, 201 bp, Homo sapiens
ccttccgagtagctgggattacaggtgcacacaatcacactcaactaatttttctttctttcttttcttttctttttcctttggtagagatgggtttcagyagcccaggctggtctcgaactcctggactcaagtgattggccctcctcggcctcccaaagtcctgggattacaagcgtgagccaccatgctcagttggcg

SEQ ID NO: 507457 - DNA, 201 bp, Homo sapiens
agtgcagtggagcgatcaccgctcactgcagccttgacttcctgggctcaagagatcctcccacctcagccttccgagtagctgggattacaggtgcacayaatcacactcaactaatttttctttctttcttttcttttctttttcctttggtagagatgggtttcagtagcccaggctggtctcgaactcctggactca

SEQ ID NO: 507458 - DNA, 201 bp, Homo sapiens; identical to SEQ ID NO: 503196

SEQ ID NO: 507459 - DNA, 201 bp, Homo sapiens; identical to SEQ ID NO: 503197

SEQ ID NO: 507460 - DNA, 201 bp, Homo sapiens; identical to SEQ ID NO: 503198

SEQ ID NO: 507461 - DNA, 201 bp, Homo sapiens; identical to SEQ ID NO: 503199

SEQ ID NO: 507462 - DNA, 201 bp, Homo sapiens; identical to SEQ ID NO: 503200

SEQ ID NO: 507463 - DNA, 201 bp, Homo sapiens; identical to SEQ ID NO: 503201

SEQ ID NO: 507464 - DNA, 201 bp, Homo sapiens; identical to SEQ ID NO: 503202

SEQ ID NO: 507465 - DNA, 201 bp, Homo sapiens; identical to SEQ ID NO: 503203

SEQ ID NO: 507466 - DNA, 201 bp, Homo sapiens; identical to SEQ ID NO: 503204

SEQ ID NO: 507467 - DNA, 201 bp, Homo sapiens; identical to SEQ ID NO: 503205

SEQ ID NO: 507468 - DNA, 201 bp, Homo sapiens; identical to SEQ ID NO: 503206

SEQ ID NO: 507469 - DNA, 201 bp, Homo sapiens
aatggagattaaggcagaaaaatatatcaagcccatggtgttgtggagataaacagtaataaaatgtgcatgataaatgatgataaaatacacaatcagayttttgtcctgcattaagaaaaaaactcctaattcctaaggtggagtggggtcatttttctggaatatgttagttcacattttccccacaacctaggattc

SEQ ID NO: 507470 - DNA, 201 bp, Homo sapiens
ggtggatcacgaggtcaggagattgagaccatcctgaccaacatggcgaaaccccgtccctattaaaaatacaaaaattagctgagtgtggtggcacgcgytcgtaatcccagctacgtgggaggctgaggcaggagaatcgcttgaatccgggaggctgaagttgcagtgagccgatatcgcgccactgcactccagcct

SEQ ID NO: 507471 - DNA, 201 bp, Homo sapiens
aattctcctgcctcagcctcccaagtagctgggattacaggcatacaccatcacatctggttaatttttatatttttagaagagatggggttttgccatgytggccaggctggtctccaactcccgacctcaagtgatctgcctgcctcagcctcccaaagtgctaagattacaggtgtgagccaccacgccaggcctaaa

SEQ ID NO: 507472 - DNA, 201 bp, Homo sapiens
ttcagaaacccagaagttttcaaaacaactgtgggaaagagagatgagtgagttacaatcaccagttgtgtgtgtgtgtgtgtgtgtgtgtgtgtgtgcgsggggggtggggggaagggggataatgtatgtttacaggagttgtttagcaagcatctgtgctttataggttacaaagtattttctttgatatgacttcat

SEQ ID NO: 507473 - DNA, 201 bp, Homo sapiens
tttttaatattaatttgtgattatgcttgcaaggaaagtcctaggaaacttaaaatatgctatacatctgagcacatttttatcgcacatcagaattctcrcagagtttaattgggcccatggtgtaaacagttcctcattttcatccagaacgcgtggcatgctgttatgttttcaggaaagagaaaattatcttaattt

SEQ ID NO: 507474 - DNA, 201 bp, Homo sapiens
ggaacacgaatcctttgggccatttagggaaatatcatcagaataatgcttttaattgcatacaataaaatatatagcattaacaacccaattttaaaaayaggcaaaagatttgaacagatactattaaaggagataaacaactttatatacaaataagggcctgaaaagatactggacactgtgagtcactagggaaat

SEQ ID NO: 507475 - DNA, 201 bp, Homo sapiens
aaaagtgcaaatgttttctccgtctagatttgcaggccttctgaactctacccacaaactctcaagagaacccacccgctgcagcctgtggctcccaactstcctgcctacgcccaacagggaactggggatccgtattccagggaaccctctggaaacgtcacactcagttagcagattcttgagggcggtaactatagt

SEQ ID NO: 507476 - DNA, 201 bp, Homo sapiens
gagacctcagtcctacaacctcaaggaactgcattctgccaatacctgaatgagtttgggagtgaattcatcctgagcctctggaaaggcacatgaccctgcagcccgtcaacttcgtcaagtgagacgatgagcagagaaccagctgggccaggccaggcccaggcttctctgacggtgagccactgagtgagtggtact

SEQ ID NO: 507477 - DNA, 201 bp, Homo sapiens
ctcatttatttaaaagagtcccttcacacagtgcagataaaagaaggcaagagcataggattgtggcatgtgctgggtagctgtgagaggttactcatgaragtaggtagcctagtaaattagtggtaagtcaggggaagggaatcagcctccctttccatttcattcccttccccctccccttgattccagtttgcttga

SEQ ID NO: 507478 - DNA, 201 bp, Homo sapiens
accctactgcttctcgacctacatcaactttgtctactctgtgcccagtggggatacaaagaaacagaagttcctgcattaaaggagcctatggaatagcyggagacatgtaacctggacatttgaaaagaaaatgaatataaggtagagtccactgtatttcatatcgctttccaggataatagtgctaaccctgtgctg

SEQ ID NO: 507479 - DNA, 201 bp, Homo sapiens
tctctgtaaaacaggaggcaggtgagcttccagggtcctgggccctgtgattctgcttctcagctgtgaccttgggcaagtcagttcatcttcacctctcygcatcttggtttctccatctgtccaatgggtattttccccctccccattctcagagttgctgagctcaaatggggtgatgagcactaaggtgttttgaac

SEQ ID NO: 507480 - DNA, 201 bp, Homo sapiens
tgtctttccatttccacctgttttctgctgggggcacctcaatctggactgggcacctggaaggggccctctgtgagagcagctcatcatcacactgccayggatgactctaaacccaaagctgctgcattcccaaaacatcagaagcacactgctccccctggagttatgaataatgcaacaccatcagctacacagagc

SEQ ID NO: 507481 - DNA, 201 bp, Homo sapiens
gcggatgtcaccaaataaaatcaatccatgttgaaatggcactaagcttcatggccgggattaggcaagagcaattctcagagtttgagaaagctctgagwagcatgaaaagggaccttcaagggacaaataccttcctgtgattcttcggatcagcagagagtctgggatgctgaattcaatcacagaatcaagcttctc

SEQ ID NO: 507482 - DNA, 201 bp, Homo sapiens
ggctggagtgcagtgtcatggtctcggctcactgcaacctctgcctcccaggttcaagcaattctcctgcctcagcctcctgagtagctgggattacagaygcctgccaccacgcccggctaattttttgtatttttagtagagacggggtttcaccatgttggccaggctggtctcgaactcctgacctcgtgatccacc

SEQ ID NO: 507483 - DNA, 201 bp, Homo sapiens
tgttttctgctgggggcacctcaatctggactgggcacctggaaggggccctctgtgagagcagctcatcatcacactgccatggatgactctaaacccaragctgctgcattcccaaaacatcagaagcacactgctccccctggagttatgaataatgcaacaccatcagctacacagagctgcaatctgagacggctg

SEQ ID NO: 507484 - DNA, 201 bp, Homo sapiens
ggattcatattaacattagctaactttgagcatgtgcatcatgccaagcagttttccatgcattgttttacggtacttagtatgtataatacataataaayccatgaggtaggaactatttttaactgcattttacagatgaaactcaggggctaagttgcccaagatcacagagctagtaaaagaactggcaacaggcca

SEQ ID NO: 507485 - DNA, 201 bp, Homo sapiens
tgccacactcttcccactctccaattgtaggcttttaagaaagcttctcctgattagctgatcacttaggtggccatgatgccagaaaaggggctgctctygacagaagacaggtacaatctgggcactgcaaaaagctagcaccactggaagcaaccttgaggccaagcaataaaccacctgaggagacactgaatagat

SEQ ID NO: 507486 - DNA, 201 bp, Homo sapiens
attcccacccattgcctcacagggatggaaagaaattccttcttggacccaacattagataaacataaccaagtctttacatgtggctttggagaaggctrctaggatgcttgcgaacacgacatcgggggtctgggatgcatcgatggcggagtggatcccccgtttcctgtagtactctatgagtggggtggtttgagt

SEQ ID NO: 507487 - DNA, 201 bp, Homo sapiens
acaagcatgcgccaccatgcctggctaattcttttattttatttaattaatttattttattttattattattttttgagacagagtctcattctgttgccyaggctggagtgcagtgtcatggtctcggctcactgcaacctctgcctcccaggttcaagcaattctcctgcctcagcctcctgagtagctgggattacag

SEQ ID NO: 507488 - DNA, 201 bp, Homo sapiens
aactctcacctatgtataaaagaaactgccacactacaataacactgctgttgttccaagtattcctctgagcccctcaccagccctccctcaccatcctmaccctgaccacccttcccctctgcccagcacctaagagcagggatcacgccgcggggtgatgagcagtgttgcagtctcgcctggccttctgatactagg

SEQ ID NO: 507489 - DNA, 201 bp, Homo sapiens
cctacatagcagagaaacagaggccttagggataaggggcggcagcctggctggctggccaatgaatccaggtccaagcttagcgggtacttcctgccgcygggtccagcgccagccagttcacctgctgtgcaaccctagctaagacatgtctcctcccccctgcctcagtttcaccatcctgggggactcttcctgctt

SEQ ID NO: 507490 - DNA, 201 bp, Homo sapiens
  misc_feature (1)...(201): n = A,T,C or G
acctcggtactgggtgagagtgaagttgtatctggtttggccgtggcatgaccttgaacccaagatactgtggccatgccaagtattttgtaaagtttggnctgttggacagtggaaaggccaagtgctgtggaggaatgaagaaaacgcccaggacagttgagggcttcgtcacttttcactgagcagcttgaaggagac

SEQ ID NO: 507491 - DNA, 201 bp, Homo sapiens
aaaatgggattgctctcaagtaccaaccaaaatagctccatgagccactgagcgtggcttggaggtatcatcaggactgggaatctacaatcactgctacygtgagtgtgatactttatttttatttttttgagatagggttttgctttgtcacccaggctggagtccagtggcctaatcatggctcagtgcagcctcgac

SEQ ID NO: 507492 - DNA, 201 bp, Homo sapiens
tgaaaataatacatcacagtgctgttgagtgatcccagtcacaggatttgagaatggaaaggacaatctttggatgacatagcttaggacacttgctcatwtatttaaaagagtcccttcacacagtgcagataaaagaaggcaagagcataggattgtggcatgtgctgggtagctgtgagaggttactcatgagagtag

SEQ ID NO: 507493 - DNA, 201 bp, Homo sapiens
ctgcatcttggtttctccatctgtccaatgggtattttccccctccccattctcagagttgctgagctcaaatggggtgatgagcactaaggtgttttgawcaggaaaagtgaaaagggcttctgcagggcagctcctttgaagccccaatctccttgccctcacctgtcctcccaagaaggtgtaaagccttttgtggag

SEQ ID NO: 507494 - DNA, 201 bp, Homo sapiens
ggactacgaggcagaaagcaggcttccagggctaaccctgccactcatctgttgggtaaacttggaaaaacaccttcagcagtgacatgctctgtgaggamgggggtccttctctctgtgaggaagtcacactaaccacctacttccaaatggagggaatgaatcttctctctttcaccctttacagcaatcctgctgttt

SEQ ID NO: 507495 - DNA, 201 bp, Homo sapiens
tatctggttggctgccatgtcaggaccacaatgtctcctgccagcctggagtagaatcagcatccctggggaagataacactgattcccatctccactcargggcacatctggcagctcaggaaacactccagtgaaaagcaacctgttcgggtttggtactgaattccaagggggatgaggtggcactgaggaataggaa

SEQ ID NO: 507496 - DNA, 201 bp, Homo sapiens
tctactaaaaatacaaaaattagctgggagtggtggcgcatgcctgtaatcccagctactcgggaggctgaggcaggagaatcacttgaacttgggaggcrgaggatgcattgagtggaggtcgtgccactgcactctagcctgggtgacagagtgagagttcatctcaaaaaaaaaaaaaaaaaaaaggccaggcgtggt

SEQ ID NO: 507497 - DNA, 201 bp, Homo sapiens
atataacaaaacacaccagcacagaaaaacttcaagaatactatgaatgagtgccataaattcagaacaaacaaaataacttgcactctaaaaagtcttayaaggccaagtgcggtggctcacgcctgtaatcccagcactttgggaggccaaggagggtggatcacctgaggtcaggagtttgagaccagcctggccaac

SEQ ID NO: 507498 - DNA, 201 bp, Homo sapiens
tttgttgtaaagatggaaattgagggccaggtgaggtggctcacgcctgtaatcccagctctttgggaggctgaggtgagcagatcagctgaggtcaggarttcgagaccagcctggccaacatggtgaaaccccatctctactaaaaatacaaaaattagctgggagtggtggcgcatgcctgtaatcccagctactcgg

SEQ ID NO: 507499 - DNA, 201 bp, Homo sapiens
cctcatctgtaaaagggggctgataatatctgctttccaggtttgttgtaaagatggaaattgagggccaggtgaggtggctcacgcctgtaatcccagcwctttgggaggctgaggtgagcagatcagctgaggtcaggaattcgagaccagcctggccaacatggtgaaaccccatctctactaaaaatacaaaaatta

SEQ ID NO: 507500 - DNA, 201 bp, Homo sapiens
aaaattagccaggcgtggtggtgggtgcttgtaatcccagctactcaggaggctgtggcagagaactgcttgaacccgtgaggtggaggttgcagtgagckgagatcgcgccactgtactccagcctgggtgacagagcaagactcttgtctcaaaaaaaaaaaaaaaaagaaaaagaaaaaaagaaaacgaattccttca

SEQ ID NO: 507501 - DNA, 201 bp, Homo sapiens
ctgtaagagctgagaaatcagctggacacggtggctcacgcctgtaatcccagcactttgggaggccgaggtgggtggatcacaaggtcaggagtttgagmccagcctggccaacatagtgaaaccccgtctctactaaaaatacaacaaattagccgggtgtggtggcacgcgcctgtagtcccagttatccgggaggct

SEQ ID NO: 507502 - DNA, 201 bp, Homo sapiens
gaagttgcggcgagccgagatccagcccgggcgaagaagcaagactacgtctcaaacaaacaaacaaacccaaaaaaccaaaattctgtactttgcaaaaycagtgaatgtcaggagccctgacaatgaaaaaccaggctggcactgtggccgtacatctagagagtgctttctgccaatctttctcattgctgttgaaat

SEQ ID NO: 507503 - DNA, 201 bp, Homo sapiens
gtttctcaactgtaaaatggggataatgatgataccaaacttgcaggtcattgtaagggttaactgagataatgcatacagagaattttttttttttttttgagatggagttttgctttatcacccaggctgcagtgcagaggcacaatctcggctcaccgcaacctctgcctcccgggttcaggcaatgcccccacctca

SEQ ID NO: 507504 - DNA, 201 bp, Homo sapiens
cagctacacgggaggctgaggcatgagaatcgcttgaactcaggaggcgcaggttgcagtgagtggagatcacgccactgcactccagcctgggcaacagkgaggctctatctcaaaaaaataaaataaaataaatgtataaggtaatgagaatggggcctacagagagtaatcagactaagtgttaactgttgttaatac

SEQ ID NO: 507505 - DNA, 201 bp, Homo sapiens
ctctcttcctcctctttcttcttcccttcctccctccctcccttcctcctttcttcttccttctactcttcatttcttcctcctcctcctcttttttttttgagatagggtcttgctctgtcacccaggctggagtgcagtggtgcgatcttggctcactgcaacctctgcctcccaggttcaagtgattctcctgcctta

SEQ ID NO: 507506 - DNA, 201 bp, Homo sapiens
cacagggtatttaaaaagctcagggaacaaacagatcagtgcaaatcagtaaggctaacacctgaaaatgactctgcacaggtgaggaagtggagcagaaragggaggggctggttcagggaacaggatttaatatgtcagtgaagaccctgcctctctctgtaacaagatgcctaaagaagaatagtggtgcttccagcc

SEQ ID NO: 507507 - DNA, 201 bp, Homo sapiens
tgcaggttggtttgacaaacatttccccacaattagatgcatgatgaccaagggaggaaagaaaattttcacagggtatttaaaaagctcagggaacaaamagatcagtgcaaatcagtaaggctaacacctgaaaatgactctgcacaggtgaggaagtggagcagaagagggaggggctggttcagggaacaggattta

SEQ ID NO: 507508 - DNA, 201 bp, Homo sapiens
gggatacccagataactttggacttggactggaactaaaccactctcctgggtctccagcttgccgactcactctgcagatcttgggacttgctggcctarcgtgatatatatagatcctattggctctgtttccctgactggtacagaggccttgggcaatttgctgcttcttctgagtctgttttgaaatctgtaaaaa

SEQ ID NO: 507509 - DNA, 201 bp, Homo sapiens
ctctgggctcaagagaagcctgcataggagctgaaggtcaagaggttgcaggcttatctcatatgcacatacttggacctccctaccacacagctgccagygacaagaaagggcttcttttccttccagccaggtccagaattcaatgtcatttttctagcttagattatctaaaaaaaatgccacaacaggggatacaaa

SEQ ID NO: 507510 - DNA, 201 bp, Homo sapiens
tctgggctcaagagaagcctgcataggagctgaaggtcaagaggttgcaggcttatctcatatgcacatacttggacctccctaccacacagctgccagcracaagaaagggcttcttttccttccagccaggtccagaattcaatgtcatttttctagcttagattatctaaaaaaaatgccacaacaggggatacaaat

SEQ ID NO: 507511 - DNA, 201 bp, Homo sapiens
gattacaggcgtgagccactgtgcctggccttttgcaagtatttcaaggacatgctctgctctgtcctggcccaccttgccaaaactcatttcatccatcmctgactggacactctcactggacaccattccctttccagcctccatgcctttgtacaagctgttccctcccttgaaatatgcatattctctttagtctac

SEQ ID NO: 507512 - DNA, 201 bp, Homo sapiens
cttcctcctttcttcttccttctactcttcatttcttcctcctcctcctcttttttttttgagatagggtcttgctctgtcacccaggctggagtgcagtrgtgcgatcttggctcactgcaacctctgcctcccaggttcaagtgattctcctgccttagcctctcaagaagctgggattacaggcatgcacccccacac

SEQ ID NO: 507513 - DNA, 201 bp, Homo sapiens
catcaccagaacccaagtcttttccttaagggcctagaggccctcccagtaccacgaaagctcttgaatgggatcaaggccttcttagggcccaaagatamcccctcccacttcagggcttgagggcacagtgttcaagagcttggagcttcctatagcttacaagtctctgatggtggcactcacatcccttagagagat

SEQ ID NO: 507514 - DNA, 201 bp, Homo sapiens
tatggtattcctccaggaagttgtttcccaggaaagtccctgggaaacaactgggaacgtgtgtctgtcattcaggggtagcctggctcagggcaaagctrggaaagacagcaacaattttcctccatgatctcaccaggttatcctggagcccagagatgtgtgttctcatcctagttctgaccttgttgtgatcacgga

SEQ ID NO: 507515 - DNA, 201 bp, Homo sapiens
gaaaaacttcaagaatactatgaatgagtgccataaattcagaacaaacaaaataacttgcactctaaaaagtcttacaaggccaagtgcggtggctcacrcctgtaatcccagcactttgggaggccaaggagggtggatcacctgaggtcaggagtttgagaccagcctggccaacatggtgaaaccccatctctacta

SEQ ID NO: 507516 - DNA, 201 bp, Homo sapiens
aacatggagaaaccccgtctctactgaaaatacaaaattagctgggcgtggtggcataatcccagttactagggaggcagaggcagaagaatcgcttaaamctgggaggcagaggttgtggtgagctgggattgagatcgtgccgctacactccagcctgggcaacaagagtgaaactccgtctcaagaaaaaaaaaaaaa

SEQ ID NO: 507517 - DNA, 201 bp, Homo sapiens
taatcccagcactttgggaggccaaggagggtggatcacctgaggtcaggagtttgagaccagcctggccaacatggtgaaaccccatctctactaaaaayataaaaattagccaggcatggtggcaggtgcctgtaatcctagctactcgggaggctgaggtacaagaatcgcttgaacccaggaggtggaggttgcagt

SEQ ID NO: 507518 - DNA, 201 bp, Homo sapiens
ggttcaaggtgtgtgttgccattggggactacagtggccacgttggtctgggtgttaagtgctccgaggaggtagccacggccatctgaggggacatcacctggtcaggctctccattgtccctgtgcagagaagccactgggggaataagatcagttagcccccacaccatctcttgcaaggtgacaggctgctgtggct

SEQ ID NO: 507519 - DNA, 201 bp, Homo sapiens
gtggatcacctgaggtcaggagtttgagaccagcctggccaacatggtgaaaccccatctctactaaaaacataaaaattagccaggcatggtggcaggtrcctgtaatcctagctactcgggaggctgaggtacaagaatcgcttgaacccaggaggtggaggttgcagtgagccaagactgcgccactgcactccagcc

SEQ ID NO: 507520 - DNA, 201 bp, Homo sapiens
gccagacaagctgggtccaagtctcaacctcaacacttactgtgtgacccctgggtttcagtttctcaactgtaaaatggggataatgatgataccaaacktgcaggtcattgtaagggttaactgagataatgcatacagagaattttttttttttttttgagatggagttttgctttatcacccaggctgcagtgcaga

SEQ ID NO: 507521 - DNA, 201 bp, Homo sapiens
gaggctgaagtgggtggatcacctgaggtcaggtatttgagaccagcctggccaacatagcgaaaccctgtctctactaaaaatacaaaaaaaaaaaaaaattaattagctgggcatggtggtgcgtgtcagtaatcccagctactcgggaggctgaggcaggagaattgcttgaacccaggaggtggaggctgcagtgag

SEQ ID NO: 507522 - DNA, 201 bp, Homo sapiens
ggaggactgctcctgggtttagctcagttcaaaaccagtgtgggcaacacagtgagactccatctctacaacaacaacaacaacaacaacaacaacaacaaaagtagcagggcatggaggtgtgtgcctgtaaccctagctactcatcaggccgaagtgggaggatcacttgagcccaggaggtcgaggctgtagtaagcc

SEQ ID NO: 507523 - DNA, 201 bp, Homo sapiens
attacattctaacatatactgattatagggttatggtaagaattacatgaaataatatatgtaaagcacttaaaacagtacaactagcacacaggaaggartcataaatattaattatcactatttccactcaacacactagtgacacataagtttcagtttccccattataaatgggaagacttgctgggcatggtggct

SEQ ID NO: 507524 - DNA, 201 bp, Homo sapiens
aggaggactgctcctgggtttagctcagttcaaaaccagtgtgggcaacacagtgagactccatctctacaacaacaacaacaacaacaacaacaacaacaaaagtagcagggcatggaggtgtgtgcctgtaaccctagctactcatcaggccgaagtgggaggatcacttgagcccaggaggtcgaggctgtagtaagc

SEQ ID NO: 507525 - DNA, 201 bp, Homo sapiens
tgtaagctacacaaatctgttcacattgtaaaataaatcaagctgttcactttttctaggtatcttatagcttaagttgttttttttttaatcacagaaayctgtgtttgcatttcagatgtctcttaacttactgaggaaatcattaccaacctcactgggtggacaggaggatgaacaggagaacttcagcaaattgta

SEQ ID NO: 507526 - DNA, 201 bp, Homo sapiens
gatgtctggcacagcacatgggcaatgttccttcctttccacctccctaccccattgcccaaatcttttatctcttcagggtttggctccagtctctcatyctcctccatgaagcctccctgctctgactgatgcaaccttcactcattgccctctaactcctgcagcccttgtttatgccacacaattcagggtattcaa

SEQ ID NO: 507527 - DNA, 201 bp, Homo sapiens
gatgggcataaaagtcagccctgagactgcaaactttaaaaacaggtcctgtcctgctggggtcactaaactggggaaacataagcctgggtttccttaakctgaaaaagagtgctaagactagtttatctccgagagttggtagcaataaacttctctgacttcacccattattcaactagatattatcagtgcctcctc

SEQ ID NO: 507528 - DNA, 201 bp, Homo sapiens
caggaggactgctcctgggtttagctcagttcaaaaccagtgtgggcaacacagtgagactccatctctacaacaacaacaacaacaacaacaacaacaacaaaagtagcagggcatggaggtgtgtgcctgtaaccctagctactcatcaggccgaagtgggaggatcacttgagcccaggaggtcgaggctgtagtaag

SEQ ID NO: 507529 - DNA, 201 bp, Homo sapiens
ttgcatactttaaatcacctctagattatgtatacctaatacaatgtaaatgccatgtaaagaattgatatactgaattttaaaatttgtattattttttmttttcttcagctttcctgggttatatttattggtggttttgttctgaatatttttaatccacaaatgcttgaatccgtagatgagggaaccatggatatg

SEQ ID NO: 507530 - DNA, 201 bp, Homo sapiens
aaccactagagagacagcatggtgggctgagtggttctcaaatttcagtgtattatcaatcatctagggcatttcctaggcccacctttaaagtttatgaytgagtggctctcaagcagcacctcaggttctgatgggtacagtatgtgaagccctgatgtagtggcagagactgggttttgtagtggtatagatctgggt

SEQ ID NO: 507531 - DNA, 201 bp, Homo sapiens
gaggttgcagtgagccaagatcgcgccactgcactccagcctgggtgacagagtaagactctgtctcaaaaaaaaaaaagcaataagagccaggcacagtrgctcaagcgtgtaatcctagcactttgggaggccgaggcaggcggatcacttgaggtcagttcaaaaccagccgggccaacatggtgaaactccatctct

SEQ ID NO: 507532 - DNA, 201 bp, Homo sapiens
taatgggtgtaagctacacaaatctgttcacattgtaaaataaatcaagctgttcactttttctaggtatcttatagcttaagttgttttttttttaatcrcagaaacctgtgtttgcatttcagatgtctcttaacttactgaggaaatcattaccaacctcactgggtggacaggaggatgaacaggagaacttcagca

SEQ ID NO: 507533 - DNA, 201 bp, Homo sapiens
attccagcatatatgaacatctcttgtctcataattcaaatgtacatcaatgcataacaatgtaaactcatcccccccgagactaccattgctattctttyggatatagcctccagtcctttgcagttaccatcctgtattttttaacttaactctaggtctaaatttagcactgaatttggagatagacaaacctggttc

SEQ ID NO: 507534 - DNA, 201 bp, Homo sapiens
gcaacttcgccaaggccacctttggtgccatctccaagaattatagctatctgacccccaacctctggagagagaccatattcatcaagtttccctatcasgagttcactgaccatctcatcaagacccagaccagagtctctgtgcggaggacccaggctccagctatgtatacaatatagagttttgttttgtttttgt

SEQ ID NO: 507535 - DNA, 201 bp, Homo sapiens; identical to SEQ ID NO: 252813

SEQ ID NO: 507536 - DNA, 201 bp, Homo sapiens; identical to SEQ ID NO: 252807

SEQ ID NO: 507537 - DNA, 201 bp, Homo sapiens; identical to SEQ ID NO: 252788

SEQ ID NO: 507538 - DNA, 201 bp, Homo sapiens; identical to SEQ ID NO: 252803

SEQ ID NO: 507539 - DNA, 201 bp, Homo sapiens; identical to SEQ ID NO: 252793

SEQ ID NO: 507540 - DNA, 201 bp, Homo sapiens; identical to SEQ ID NO: 252805

SEQ ID NO: 507541 - DNA, 201 bp, Homo sapiens
gattataaagtgctgattttccacttgtatactcttaagactgttgtcagttagtgacaccggtgaatgaggactcctgcccttgaacaggaggaaaaaaygtatttgtaatgcctacaattcccctggcatggaaaatgttaaattgttcttataactaaagggaagtcagaaattcccctatacaaaatggtgatttat

SEQ ID NO: 507542 - DNA, 201 bp, Homo sapiens
ccagcattttgatagacattctattttatagaggagtactgctcacataatcttaatgcattgctattacatcaccacgaggcagttgccttcataagctmcttgaaggtatttcgctggccctcggggagaccacatagcagatggctaacagttcaaactgtttggtttcatacctggccccatcacttcctagctgag

SEQ ID NO: 507543 - DNA, 201 bp, Homo sapiens
ccagatatctacttaaacactataatggtaacaaatatgagaatatctggctttttattagctttttaattaaatatttaataaataatgtgtatctcacyttgtaaaatattttaacaatatctttacattttttgagaaaaagcaaatactttcacatttttactaagaataatatgttagaagcttttttattataat

SEQ ID NO: 507544 - DNA, 201 bp, Homo sapiens
aattccctgtgacatcaacccaaaacccacataagcagaagtacacaattttctagaatcttagaacaagtaagtctaaacatgaatcatatttgtttggrtgaaattgactgaaataaatagtaaagagtgattttgagatacatattgcaaaaatgtccactaataacttatccttgtatttatctgtatattttcaaa

SEQ ID NO: 507545 - DNA, 201 bp, Homo sapiens
acaggattaaatggttttatagtcagaagaagaagtttggatctttctgtaaaggaagttgtcagatgaataaaagcaaggagctaggcaacagcgtgttrtatctggggacttctacaagtctcctcatctataaaataaatagttggaccaggtaacctccaaacttcttttaattctacaatgatatattgttgtggt

SEQ ID NO: 507546 - DNA, 201 bp, Homo sapiens; identical to SEQ ID NO: 498990

SEQ ID NO: 507547 - DNA, 201 bp, Homo sapiens; identical to SEQ ID NO: 498991

SEQ ID NO: 507548 - DNA, 201 bp, Homo sapiens
gcccagcctgtttcagacatttttaagactatgtcccattcatttaaaatactatttttccccattgaattgttttgacacctttgtcaaccatcattagmctgtaaatgtgagcttagatgttttaaatggagaattataccaaaccttccaagttcaaatattcccagtgctccataacttaagaacaatgaaaatgaa

SEQ ID NO: 507549 - DNA, 201 bp, Homo sapiens
ttttttatttcaatagcctttgggaaacaggtggttttgggttacatggataagttctttagtggtgatttctgggattttggtgcacccatcatccgagmagtgtacaatgtacccaatgtgtagttttttatccacttttatccctcacccttctcccacccttcccccagagtccccaaagtgcattctttctttcta

SEQ ID NO: 507550 - DNA, 201 bp, Homo sapiens; identical to SEQ ID NO: 33514

SEQ ID NO: 507551 - DNA, 201 bp, Homo sapiens; identical to SEQ ID NO: 498993

SEQ ID NO: 507552 - DNA, 201 bp, Homo sapiens; identical to SEQ ID NO: 498994

SEQ ID NO: 507553 - DNA, 201 bp, Homo sapiens; identical to SEQ ID NO: 498995

SEQ ID NO: 507554 - DNA, 201 bp, Homo sapiens
ttcgccatgttggccaggagttcaaggctgcagtgtgctatgattgccactatgaatagccactgccctccagcctgggcaacatagtgagagtctcatcmctaaaaaaaaaaaaaaaaaaatatatatatatatatatatattctttaaaagtttattttgtataaataataatgagacataatttcaccaggctggtct

SEQ ID NO: 507555 - DNA, 201 bp, Homo sapiens
caggttcaagcaattctcctgcctcagcctcccaaatagctgggactacaggcgcgtgccaccacgaccagataattttttgtatttttagtagagaccaggttttaccatgttggccagcatgttctccatctcctgacctcatgatccgtcggcctcagcctcccagagcgctgggattacaggtgtgagccacctcgc

SEQ ID NO: 507556 - DNA, 201 bp, Homo sapiens
atgtttcttaatacagatcaaagtggaatttatgtcttccttttctacatagacatagtaacaatctgatctctctttcttttccccacaactgagtcccrggctccatctcctggtagagtccagccctacagggctttgcgggtgttctccccatgtgtggagatgagagatcataagaaataaagacacaagacaaag

SEQ ID NO: 507557 - DNA, 201 bp, Homo sapiens
agctttggaatgaggatgatgtgaagctgagagaagagctggggccacctcttcgacacgcgtacagaaaagtcccgttttctcgcatcccaggtggaccrggatccagatcaatctgtcgatattgggaacgacgccggaccaggaaacccagcgccaagggccgggttggaggcggggactggcgcagcgggcggggca

SEQ ID NO: 507558 - DNA, 201 bp, Homo sapiens
tctgagctcaagcgatccgcccgcctcggcctcacaaagtgctgggattacaggagtgagccactgcatccagctcgataatggtgatttttttttaagatttttttttttttttgagacagagtttcactcttcttgcccaggctggagagcaatggtgtgatcttggctcactgcaacctccgcctcccatgttcaagc

SEQ ID NO: 507559 - DNA, 201 bp, Homo sapiens; identical to SEQ ID NO: 499001

SEQ ID NO: 507560 - DNA, 201 bp, Homo sapiens
cacgatcatggcttaccgcaacctccgcctcccgggttcaagcgattctcctgcctcagcctcccaagtagctgggattacaggcatgcgccaccacgccyggctaattttatatttttagtagagacagggtttctccatgttggtcaggctggtctcaaactcccgacctcaggtgatctgtctgcctcagcttcccaa

SEQ ID NO: 507561 - DNA, 201 bp, Homo sapiens; identical to SEQ ID NO: 499003

SEQ ID NO: 507562 - DNA, 201 bp, Homo sapiens
ttgacctcctggtctcaagagatcctcccacctcagcctctcaagtagctaggactacaaatgcatgccaccatgcccagctaattttgtttttttttttktttttttttttgtagagatgaggtctcactatattgcccagcctggtctcaaactcctgggctcaagcaatccccctacctcagcctcttaagtgctgga

SEQ ID NO: 507563 - DNA, 201 bp, Homo sapiens; identical to SEQ ID NO: 499004

SEQ ID NO: 507564 - DNA, 201 bp, Homo sapiens
tttattagacagggtctcaatctctcacccaggctagagtgcagtggtgctgcacagctcactgcagcctcaaacttctgggctcaagcaatcctccagcytcagcctcccacgtagctggaacttcaggtgtgcaccaccacacctaatttttaattttttgttccagagatggggtcttgctaggttgcccaggcttgt

SEQ ID NO: 507565 - DNA, 201 bp, Homo sapiens
ttttaattttttgttccagagatggggtcttgctaggttgcccaggcttgtctccaactcctggtctcaggcagtcctcccgactcagcctcccaaagcamtgggattgcaggcatgagtcaccatgcccagccagctttctctatttttactttccctttccacctagatgtacatggtgtctcaacattgaaagatact

SEQ ID NO: 507566 - DNA, 201 bp, Homo sapiens
tactatcttgcccaggctgctcttgatcacttgagccaccccttggcctcccaaagtgctgaaatacagacctgagtacctggacttctccctataattcttttttttttttttttttttttttttttgagatggagtctagctttctgtcacctgggctggagtgcagtagcacgatctcagctcactgcaacctccaac

SEQ ID NO: 507567 - DNA, 201 bp, Homo sapiens; identical to SEQ ID NO: 499005

SEQ ID NO: 507568 - DNA, 201 bp, Homo sapiens; identical to SEQ ID NO: 499006

SEQ ID NO: 507569 - DNA, 201 bp, Homo sapiens; identical to SEQ ID NO: 499007

SEQ ID NO: 507570 - DNA, 201 bp, Homo sapiens
catgttctccatctcctgacctcatgatccgtcggcctcagcctcccagagcgctgggattacaggtgtgagccacctcgcctgaccatcagtttgttttytgtttgtttttttgagacagtgtctcactctgtcacccaggctggagtgcagtggtgcgatcacaactcactacagcctcaaactcctgggctcaagtta

SEQ ID NO: 507571 - DNA, 201 bp, Homo sapiens; identical to SEQ ID NO: 116949

SEQ ID NO: 507572 - DNA, 201 bp, Homo sapiens
cagggggaaaaaaagggggggaaaaaacttcctgcccccgggtgtgtatgcaccggggctgcctggggccactgtcacggtgttcggaggtgctggaggckagtgtgacccctggccggagcagcccccctgctgggcccggcggcgcgcgcccctctccaggccacgttcccctgagcggcccagggccccggccgggca

SEQ ID NO: 507573 - DNA, 201 bp, Homo sapiens
aattcagctcccaagtttggggaatgagctgcggttgcacgtaaatcaattttctgctccactaagtttattcatttaaatgcccgaacttaaattaactstttttggatggaaagctttctaaatagtgaccactgaacatcaccctctgcctttttcaggaaaggaagtagaacatattgtaagcatagtgcgatggga

SEQ ID NO: 507574 - DNA, 201 bp, Homo sapiens
ttgaggctctgaggttctgcctttaagggaatagaaagtttttctccccagctcccagtgaaagcagctgtttccttgtgagtgtcctccaggtgggagayggagggattttggacgggcacattagtccattttactcctcagggtttaagttaacaggaatagtagaagggatcaacgttgacccagaaaactggccca

SEQ ID NO: 507575 - DNA, 201 bp, Homo sapiens
tcattcaagccccaatctcctgccctcagttgatcctcccacctcagcctcttgaatagctgggaccacaagcatgtcccaccgtgcccagaaaaaaaaawttttttctttttttttttttagagatggggtctcactgtgttgtccaggctggtctccagttcctgagcccaagtcatcctccaaccgcagtctcccaaa

SEQ ID NO: 507576 - DNA, 201 bp, Homo sapiens
atggggtctcactgtgttgtccaggctggtctccagttcctgagcccaagtcatcctccaaccgcagtctcccaaagtgctaggattacaggtgtgagccrtcatgccttactgtcacagccagcagtctcatgaactgagtaagaactcactcatcaccaaggggatggtgccgagccattcacaagggatcctccaggg

SEQ ID NO: 507577 - DNA, 201 bp, Homo sapiens
aatgagcatagagtcatttggaaatatgcactgcgcttcacaaaaagaaagagtaatataatcagaaatgattatatttcagcacttcagcactattgctrctattaatgtccattatcactgtattacctgaaatgtgtttaacaatcacagtcactaatcaaggtgcctgtcctggaaaatgtgtattctctccatctg

SEQ ID NO: 507578 - DNA, 201 bp, Homo sapiens; identical to SEQ ID NO: 116964

SEQ ID NO: 507579 - DNA, 201 bp, Homo sapiens
agcaggtgtttttggcttttttttttttcatttggtttataggtaaatattcacagtctctttgcaataatttgttatgattcttgttaaagtgaccttcraaagtctgtttataataacatacagacactaaaatttatactacatcatatttgtgttaattagagtcttcttactgatacagaatctatcagtggatat

SEQ ID NO: 507580 - DNA, 201 bp, Homo sapiens; identical to SEQ ID NO: 116966

SEQ ID NO: 507581 - DNA, 201 bp, Homo sapiens; identical to SEQ ID NO: 116969

SEQ ID NO: 507582 - DNA, 201 bp, Homo sapiens
tccctttgggttccatgttttccttgttcccttccatgcctagctggattgcagagttaaatttatgattatgaaataaaaactaaatagcaaaatagtgygcatgcacttaatgccactgaactgtacatttaaaaatgattaaaatggtaaatgttatggcatgtatgtttcatcacaataaaaaaatagatttccaaa

SEQ ID NO: 507583 - DNA, 201 bp, Homo sapiens
aagaacaagaactgtgttgtctccttttataggagtgtatgtttcattaaaaaaaaaaaaagtaaaagtaaattttaaaaaacgtttcttgtctatgcctmcgatgttcttattgacttgagggtttagacagtgtctctgaaaattctctggcaaacactccctggccccaccataaacagctggttgatgtaaccacac

SEQ ID NO: 507584 - DNA, 201 bp, Homo sapiens
caaacatattccaaagtgattctcctagtaaattctttttaaaattcacctaggaaaaaaatgtgttttacaatttagcaactcttctagggcacttgccrtgttacccgctctgtgctgagcattgcattgcgtttatttattattattttatttgaggtgtgatcgttgagaagcaatacaatgaaatctacagcctca

SEQ ID NO: 507585 - DNA, 201 bp, Homo sapiens
tgtttcattaaaaaaaaaaaaagtaaaagtaaattttaaaaaacgtttcttgtctatgcctacgatgttcttattgacttgagggtttagacagtgtctcygaaaattctctggcaaacactccctggccccaccataaacagctggttgatgtaaccacaccgtagctcagtcaccacgtcacaggagctgtgtcttctt

SEQ ID NO: 507586 - DNA, 201 bp, Homo sapiens
ttgaggtgtgatcgttgagaagcaatacaatgaaatctacagcctcaagtgttcagttcactgagtttcaataattgtgaacctgtgtaactgcatgatgracctgtgtaactttcatcaccccagaaagttccctcctgccctcttctggtcaacccccatcttctttccaaccactttctgatgtcagtcatcatgggt

SEQ ID NO: 507587 - DNA, 201 bp, Homo sapiens; identical to SEQ ID NO: 116950

SEQ ID NO: 507588 - DNA, 201 bp, Homo sapiens
agtgacacccgcttctgacccaggactgatggcccctagggagagggaaactgaggttcccaggtattagtttggtgcaaaagtaattgcggtttttgccwtttttttttttttaatgacaaaaatgcaattacttttccaccaacctaatagaaggggctgcacctgtgttccttccacccatgagaagagatttttgtc

SEQ ID NO: 507589 - DNA, 201 bp, Homo sapiens
tctttaacctgagctgccagaaaagtctctcacagtgggaagtcatgctttagatggtgtgtcctgatgaaaaattgatattggcggaaataacatttttwaaaacttctaggtgttaacagtaactttgagttctctgtgaggctcagaggggtggcgtgttctgcgtggccacatccgtgtttattagtttatggcctt

SEQ ID NO: 507590 - DNA, 201 bp, Homo sapiens; identical to SEQ ID NO: 116953

SEQ ID NO: 507591 - DNA, 201 bp, Homo sapiens
tttgtaaaatgacatttaaaaattaccatctactcatcacctcatcatttgacaaaacaatgcatgttttaacaccaaaaagtaggaaagatgtaatcccwgaatagagggcagttgaatacgtttagtgttttggaaaatttgctgcattatctgaggttttctccttttccatggcctatgagaacttcatcagggact

SEQ ID NO: 507592 - DNA, 201 bp, Homo sapiens
gaagtttccctgaggacaggcagacaagtttgccattgagtgatgaagagaagcgtcagctgagggatggtctcctgattttttttttttttttttttttttgagaccgagtctccatctgtcaccaaggctggagtgcagtggcaccatctcggctcactgcaacctctgcctcccaggttcaaaagattctcctgcctc

SEQ ID NO: 507593 - DNA, 201 bp, Homo sapiens
tgcagagtttgcaatttattaataataatgatgatgaaaacaataatacatccaaaagagaaaagaaaggggaagatgaaacccaaagagagagagagagwgagtgtgtgtgtgtgtgtgtgtgtgtgtgtgtgtgtgtgtgtgcaggcgcaaaagacagggaagaattttctcagtgtttatttttgccatgcctctccc

SEQ ID NO: 507594 - DNA, 201 bp, Homo sapiens
agagtttctgaagccaggagtcaaggctttactttgagcacatggttttggaggtcaagcagaatgggctgggcaaatccaggaaggcttcatgggggaartgaattttgaacttggccttaaaggatgggtaggtgtaaggaagagggttgtaggattatagtgggtgatatacacatttttgaaagttaatgtggaaca

SEQ ID NO: 507595 - DNA, 201 bp, Homo sapiens
agcatcgaggaccggcaggaggaggggatgggagggccgtctgggtgaggggtcatctaagagcccagtgctgtttcacactgtcccgggtggaaaatgcraaccctgtggattttcaccctctcagtgttgactattgtcctatggaaataagggtgatttcctaaaatgtgtggctcaataaaggattccttcaccggg

SEQ ID NO: 507596 - DNA, 201 bp, Homo sapiens
ttaatcttagtctgttaggtaggtgagtaatggtatctcgtggtctcggttgcgtttccttgattaccagtgggttggagcatttgtttctgtgtattgaygtacctgtcctctgtttgtccttctatttatattcatcttttttcttattgatttttaagagctctttatgcataagaggatattaaccttttggtataa

SEQ ID NO: 507597 - DNA, 201 bp, Homo sapiens
agattgtctgtatacccagggatgtctgggagagcttgtattatcatttttaagaagcttttctaatttgaaggaaaacggcctctcgttgtgtcttcacwttgaagtttctttgtgactctaatcccgagtcctggtagcatcatgtatttggggcatacggtgttcgtgtgcaataatccctccttgtaggcctcccct

SEQ ID NO: 507598 - DNA, 201 bp, Homo sapiens
gggtctgggtttgcctcccctgagagaccgtaaacttctaaagaacaagaactgtgttgtctccttttataggagtgtatgtttcattaaaaaaaaaaaaagtaaaagtaaattttaaaaaacgtttcttgtctatgcctacgatgttcttattgacttgagggtttagacagtgtctctgaaaattctctggcaaacact

SEQ ID NO: 507599 - DNA, 201 bp, Homo sapiens
ttcaggaaaggaagtagaacatattgtaagcatagtgcgatgggatagttgctgtgaataattgcagctatccttattgtcagttgcctcaaggcctggtkaggtgtttggaaccctttgccccagcaatgaatggccccaggctgttgtgcttagctagttctgggttttctttctttctctctctctctcttttttttt

SEQ ID NO: 507600 - DNA, 201 bp, Homo sapiens
tctgtgatctggagggagctccctcctgagaggaaacaggctctgtctatgctacactggatggctggcctagcctgctgccggtgggttctttgaggctkgtctatcacctgtgagttcacagccccaaatgatccccaactgacagaaagagccccaggctgtggcctctgtcactagggagtctggaggggcagccag

SEQ ID NO: 507601 - DNA, 201 bp, Homo sapiens; identical to SEQ ID NO: 19938

SEQ ID NO: 507602 - DNA, 201 bp, Homo sapiens
tctgcttgtagttcctgttttttgctattcctctgttcttgcgtttttttctgcaatctctccccgccttgcccagatctcttcctcaatgatttttttttaaattttgtacaacaaatattcctcggtgcctcctgcccaccagacactatgccaggtgccaagtgtagaatgcagattaaacagccaggttgtctaccc

SEQ ID NO: 507603 - DNA, 201 bp, Homo sapiens
aaaaaacgtttcttgtctatgcctacgatgttcttattgacttgagggtttagacagtgtctctgaaaattctctggcaaacactccctggccccaccatraacagctggttgatgtaaccacaccgtagctcagtcaccacgtcacaggagctgtgtcttcttctgcccgggaactacctgtcctgtgtgacagaaaaat

SEQ ID NO: 507604 - DNA, 201 bp, Homo sapiens
tttgaaaaggtcaccttatatgaatatttagaaaaagcaagatcataaaataagagggacttggtattttgttttgtattttttttttagaagaaaattcrggctcactggtaacttacaatgggcaaactctagcactttttatttaacctgcatttaccctttaaaaatggggaggaggttttagaactgcatttgagg

SEQ ID NO: 507605 - DNA, 201 bp, Homo sapiens
gggattttacagcgtttgaaaccagggcagtgagccttacacccgggacccaaggtccgcttgctgactaaatgcccattaaaacagcaaatgaggaggcyaggtctgctttgaagagcctagcctaattgtgttgtatttgtgtcagctgatggctacttttttcattagggacttttaacctgtgggtcatcttttgaa

SEQ ID NO: 507606 - DNA, 201 bp, Homo sapiens
ctgcttgtagttcctgttttttgctattcctctgttcttgcgtttttttctgcaatctctccccgccttgcccagatctcttcctcaatgatttttttttwaattttgtacaacaaatattcctcggtgcctcctgcccaccagacactatgccaggtgccaagtgtagaatgcagattaaacagccaggttgtctacccc

SEQ ID NO: 507607 - DNA, 201 bp, Homo sapiens
aagagaagcgtcagctgagggatggtctcctgattttttttttttttttttttttttgagaccgagtctccatctgtcaccaaggctggagtgcagtggcrccatctcggctcactgcaacctctgcctcccaggttcaaaagattctcctgcctcagcctcccgagtagagtctcctgattttgtaaattctgccatgtg

SEQ ID NO: 507608 - DNA, 201 bp, Homo sapiens
ggcttgcttttggaacgttcttctttctgtcttcaggtgctagaactttaggagagtaagtgggctctgttgagggactctgaagactggtcacccccccrcccacacacacacacacatcccccagcacttgagctgcgcttccacataaccacttcctttatgctgggactgtggtttctttgtgtgtttttatgtctt

SEQ ID NO: 507609 - DNA, 201 bp, Homo sapiens
tgtgtctccccaaaattcacatgctgaagccctaattcccaatccctcagaatgtggctgtatttggacatagggcctttaaaggggtgattaaggtgaarcctgattggtgtgtttataaaaagaagacacacagagggacacaggaatgtgcatgcaaagaggaaagactgtgtgaggacttcgtgagaaagcggccac

SEQ ID NO: 507610 - DNA, 201 bp, Homo sapiens
attcacatgctgaagccctaattcccaatccctcagaatgtggctgtatttggacatagggcctttaaaggggtgattaaggtgaaacctgattggtgtgyttataaaaagaagacacacagagggacacaggaatgtgcatgcaaagaggaaagactgtgtgaggacttcgtgagaaagcggccacctgcaagccaagga

SEQ ID NO: 507611 - DNA, 201 bp, Homo sapiens
ccagaaaaaaaaatttttttctttttttttttttagagatggggtctcactgtgttgtccaggctggtctccagttcctgagcccaagtcatcctccaacygcagtctcccaaagtgctaggattacaggtgtgagccatcatgccttactgtcacagccagcagtctcatgaactgagtaagaactcactcatcaccaag

SEQ ID NO: 507612 - DNA, 201 bp, Homo sapiens
ctgagtgccttctgcgtgccaggcactgtgcttggtgttggaactcgacagggagcaaaaccatgcctggttctttccctcaaggagtttacagtctagtsggggagacagatgtttatcagatagtgcaaaaggcaataaacactatgaaggaagatggtcagtgccattacagggagctccgcctcttcttggattcag

SEQ ID NO: 507613 - DNA, 201 bp, Homo sapiens
taagattctgagagaagaatcttagtagtaagggtcaagctgttggtccgcagtcctcttcagacctcttgctgctgctgctgcttgtgacgacactctgrcttccaaagacagtacttcccaggtgtggaggagggcattgcatttcctgtgtatcctccaccatgtgctggctgagtcaagaatggaggtaataaaaga

SEQ ID NO: 507614 - DNA, 201 bp, Homo sapiens
aatgcaagcttgcactggaatcttaacaggtactgctggttctgccttctccacttcccagatgtgggcatggcagctcccagcatcagtagcattgaaarattggttctgagggtctcctcgggctcttttggcagagtggagataagtttctaatctgagtcacttagggttctttgcatgggcccagtctaataacta

SEQ ID NO: 507615 - DNA, 201 bp, Homo sapiens
ccctctagtctcttactctaaaataaccctccacttttttccctttcatagcattgactgttggaagagaccaggccagttatcttgcagaatgtcccacrtagtacatttgcccagttatttccttgcagtgctgtctaacttattcttctatcccctgtatctcctgtaaattgaaagttatattcaaaggctagacta

SEQ ID NO: 507616 - DNA, 201 bp, Homo sapiens
tcagagaactaatacaaacaagttcatgccattgctctgaattcaggccccagcagtgtttatgattgcttgaccaagccctcaccagctctttctggaawactcagtccagtgagaagtgggcactgggggacagagaaggaagaggagagaatcatgagccatgctggatatgcaggtgggctgcagggctcaaacttg

SEQ ID NO: 507617 - DNA, 201 bp, Homo sapiens
agccaaaagacacatgaaaaaatgctcatcatcactggccatcagagaaatgcaaatcaaaaccacaatgagataccatctcacaccagttggaatggcamtcattaaaaagtcaggaaacaacaggtgctggagaggatgtggagaaataggaacacttttacactgttggtgggactgtaaactagttcaacccttgtg

SEQ ID NO: 507618 - DNA, 201 bp, Homo sapiens
ccacgggatgctatgaggaccacttgtctcctccgcaagaagctcgcaaaatgggaaatggcaggtgtcggccttggagggagatggctggttcagcagcrcaggcatccttctccctctgcttctgtttgactgcttccaagtcacctttcatgttgtaaaccactgcttgtcactttgccaaattcctatgctcttact

SEQ ID NO: 507619 - DNA, 201 bp, Homo sapiens
ccttccttacaccttatacaaaaattaattcaagatggattaaagacttaaacattagacctaaaaccataaaaactctataagaaaacctaggcattacmattcaggacataggcatgggcaaggacttcatgtctaaaacaccaaaagcaatagcaacaaaagccataattgacaaatgggatctaattaaactaaaga

SEQ ID NO: 507620 - DNA, 201 bp, Homo sapiens
attcaagcactagatgtttttgacatttgaagattacttggttctttgggcaattttctcgtttgccttcaaaaaaatgcctgcagttctctatttcatcyggtggaaaggtgaggcccaggatgcatgtaatgaactgatggcactgtgaggcactgggcccggtgaactcgcagggtgtagctgagatacaaggtgttt

SEQ ID NO: 507621 - DNA, 201 bp, Homo sapiens
tatgtagaaagctgaaactggatcccttccttacaccttatacaaaaattaattcaagatggattaaagacttaaacattagacctaaaaccataaaaacyctataagaaaacctaggcattacaattcaggacataggcatgggcaaggacttcatgtctaaaacaccaaaagcaatagcaacaaaagccataattgaca

SEQ ID NO: 507622 - DNA, 201 bp, Homo sapiens
cctcttcattctctagaaggctctgccaggttcagatcctgcctgtcctttgcagctttgtagggagcagtccccacatctctgaggattgcctgatgcargttctcgaggtaactgcttcagggctgcgtgggagtccccagctgacttgaccatgtgctcctgtggaaaatgatcacctcaccttttatttatattctg

SEQ ID NO: 507623 - DNA, 201 bp, Homo sapiens
atctgatcttcgacaaacatgcaaaaaacaagcaatggggaaaggattccctgtttaataaatggtgctgggaaaactggctagccatatgtagaaagctraaactggatcccttccttacaccttatacaaaaattaattcaagatggattaaagacttaaacattagacctaaaaccataaaaactctataagaaaacc

SEQ ID NO: 507624 - DNA, 201 bp, Homo sapiens; identical to SEQ ID NO: 116960

SEQ ID NO: 507625 - DNA, 201 bp, Homo sapiens
gctctattcagaatagatttttaattgccctttccctgaaaaatgtcgagcggaatgagtcctcaggataacagtggccttaaccaggagtctggcattgrgctcagtgctgaggcccgtgtcgcagtggggctggggtctgagggctcccgtgggctgcgctttggggtgcggctggtctctcagcctggccttttcccc

SEQ ID NO: 507626 - DNA, 201 bp, Homo sapiens
tcttttaattgtgatgttagggtgtcaattttggatctttcctgctttctcttgtgggcatttagtgctataaatttccctctacacactgctttgaatgygtcccagagattctggtatgttgtgtctttgttctcgttggtttcaaagaacatctttatttctgccttcatttcgttatgtacccagtagtcattcagg

SEQ ID NO: 507627 - DNA, 201 bp, Homo sapiens
agggtaattcctgccttccagtaacatggacaaatttatccgtgtgaaagccagtttcacctgaggtcagtttcctctgctgccccgtttctgggcagtayctcatgtcatgacatagataatgcaagttgagagtgtgtgggtgacaacttcaactgttgctctacagtagagacctgtggagacaggacagactgatca

SEQ ID NO: 507628 - DNA, 201 bp, Homo sapiens
attaactgtttttggatggaaagctttctaaatagtgaccactgaacatcaccctctgcctttttcaggaaaggaagtagaacatattgtaagcatagtgygatgggatagttgctgtgaataattgcagctatccttattgtcagttgcctcaaggcctggtgaggtgtttggaaccctttgccccagcaatgaatggcc

SEQ ID NO: 507629 - DNA, 201 bp, Homo sapiens
cctcagggctggtgtgaggcctgaactgggtgtgatgggggtgaggaggatgtgaattcactggggaaagcaccttaaaagtggcaacattggagtgtggkcttcagaatggggactggtgccatggagacggggaatgtatggtgttgggtaaggtcgggcattaggagatggcactggggaggcagacagagtcagatt

SEQ ID NO: 507630 - DNA, 201 bp, Homo sapiens
tcttccttccaccagtgcagtggttatcaaatttcacctgtctgaaagtcacctggaagacttgttaaacctattcctgggcctcacttccagagtgtgcrattcagtgaagctgggtgagggaggcctgccatcctgcacttccagcaagcccccaagcaatgccagtgttgctggtatggaaaccatatgttgagaaca

SEQ ID NO: 507631 - DNA, 201 bp, Homo sapiens
ttctaatctagtttatctgggagcagcagtttatctcacagaacctcatttagttccatgaaattgagattggtttcttgatctatgagattgcaacttgstgtggtattgtggccttccatcattttaatgaggtccttaatgatataatcccactcttggatgagttgaaggtggcatccctcttgctggagagactag

SEQ ID NO: 507632 - DNA, 201 bp, Homo sapiens
tttcagcacacctgcaaaactggtgactggtctccttgcctgtgcttgccagagaacggcagaatctaccaccgtatggcctccacctcatttccttagcytctcaaagcatatgcaaacacgtctgcttggtagaatcttaaacacatctagaacctggaggtgcaaaggaataggtcgttgtcattttgccaactttgg

SEQ ID NO: 507633 - DNA, 201 bp, Homo sapiens
atagagtgatgtggatttgagccattaaacgatttgcttactgatacccaggcctcttgatctggcatttcatatcccaggtgaccgctgcatggtgcctstgaatgtccctactctttttcccaaaacagtacctaacaggagctcaggtctcctgactccacaagaaggtgctggctaattgcacagccgaaaactgtg

SEQ ID NO: 507634 - DNA, 201 bp, Homo sapiens
gagtatattgggtatgtatgttgcaaaaattgtgtgtgtgtgtgtgtgtgtgtgtgtgtgtgtgtgtgtgtgtgtgtgtggtcgaggtaggatggaagggygaggtaatgggtcatgggggtagagagagggagatgggttatgacctctaagctgccaaggtaggtaacatccaaataaggcaggacctcgagaagagag

SEQ ID NO: 507635 - DNA, 201 bp, Homo sapiens
gattacatttattgatttgcgtatattgaaccagccttgcatcccagggatgaagcccacttgatcgtggtggataagctttttgatgtgctgctggattyggtttgccagtattttattgaggatttttgcatcaatgttcatcaaggatattggtctaaaattctttttttggttgtgtctttgccaggctttggtatc

SEQ ID NO: 507636 - DNA, 201 bp, Homo sapiens
ttgagatagtcatgtggtttttgtctttggttctgtttatatgctggattacatttattgatttgcgtatattgaaccagccttgcatcccagggatgaarcccacttgatcgtggtggataagctttttgatgtgctgctggatttggtttgccagtattttattgaggatttttgcatcaatgttcatcaaggatattg

SEQ ID NO: 507637 - DNA, 201 bp, Homo sapiens
gggaggcggagcttgcagtgagccgagattgcgccaccgcactccaacctgggagacacagcgagactccgtctcaaaaaaaaaaaaaaaaaaaaaaaaaagctaggctccgtgagtcatggcccaaatccaggagccctgggctctgacaaagtgcagagccttggttcccattcccctggtggggagagaaaggccttg

SEQ ID NO: 507638 - DNA, 201 bp, Homo sapiens
gaggcggagcttgcagtagtcagccgagccgagattgcgccactgtactccagcctgggcgacagagtgagactccatctcaaaaaaaaaaaaaaaaaaaagcagtgaaaacacatgttcattatttaaaaatcagaaaatatgaaccaaaaagaaatgaatgaaaatacctcataataccacccgccccagggataacca

SEQ ID NO: 507639 - DNA, 201 bp, Homo sapiens
tactaaaagtacaaaaaaattagctgggcgttgtggcgggcgcctgtagtcccagctactcgggaggctgaggcaggagaatggcgtgaacccgggaggcrgagcttgcagtagtcagccgagccgagattgcgccactgtactccagcctgggcgacagagtgagactccatctcaaaaaaaaaaaaaaaaaaaagcagt

SEQ ID NO: 507640 - DNA, 201 bp, Homo sapiens
tgaaggatttctggtacaaagtcattctgcttgtcctgaatgtcaggaaggaaggtttagacaagattgtgtgtgtgtgtgtgtgtgtgtgtgtgtgtgtstgtgtgtctgtagctgtgtgtgtctgtgtgtctgtgtcggcatgtctgctttgtgtgtctgagtgtgtgttcatgtgcctgtgtgtcttggtgtgtgaac

SEQ ID NO: 507641 - DNA, 201 bp, Homo sapiens
aagtgaaggatttctggtacaaagtcattctgcttgtcctgaatgtcaggaaggaaggtttagacaagattgtgtgtgtgtgtgtgtgtgtgtgtgtgtgwgtgtgtgtgtctgtagctgtgtgtgtctgtgtgtctgtgtcggcatgtctgctttgtgtgtctgagtgtgtgttcatgtgcctgtgtgtcttggtgtgtg

SEQ ID NO: 507642 - DNA, 201 bp, Homo sapiens
gggagaagtgaaggatttctggtacaaagtcattctgcttgtcctgaatgtcaggaaggaaggtttagacaagattgtgtgtgtgtgtgtgtgtgtgtgtstgtgtgtgtgtgtgtctgtagctgtgtgtgtctgtgtgtctgtgtcggcatgtctgctttgtgtgtctgagtgtgtgttcatgtgcctgtgtgtcttggt

SEQ ID NO: 507643 - DNA, 201 bp, Homo sapiens
gaaacagatgtgtcagaggaagtgttgtgggaatgtgaggtggtttccatgcttggagtatgtcgggtatgtatgttgcaaaaatgtgtgtgcgtgaaggsgggggggggcggtgcggtagaggtaggatggaagggccatctctgacctgagaccactgggctggacagttccagggttggggtgctgtgggcttgtcga

SEQ ID NO: 507644 - DNA, 201 bp, Homo sapiens
tgagaacttcttaagcagtgtcacagtccgtgccttgtcctctcagattctcaaacgacttaaagcagagctctgggctggtgtttctctcaaagggaaayggcctctgtgatttctggagtgcgtcattcccctacgacttggcgggtctgttgctggccatggggtcagtcagagaggcctagcctcagcctggcgggc

SEQ ID NO: 507645 - DNA, 201 bp, Homo sapiens
ttactgaatgacttctttaacctgagctgccagaaaagtctctcacagtgggaagtcatgctttagatggtgtgtcctgatgaaaaattgatattggcggmaataacattttttaaaacttctaggtgttaacagtaactttgagttctctgtgaggctcagaggggtggcgtgttctgcgtggccacatccgtgtttatt

SEQ ID NO: 507646 - DNA, 201 bp, Homo sapiens
tctccatcctggagtgtcctagccaggtaaccccagcacaacgatgtgtccgcataggccaggctcctccaccacacatatgaaacagcagcagtgtgtcyttctccctgaagacgagcagggagctttgtcacaggttgcacggctccaatctctccccgaccccattcaccatccttagtggcttcgctggagcatccg

SEQ ID NO: 507647 - DNA, 201 bp, Homo sapiens
tcagcctggccgactgacctcccgggcctgacctccccaggccgtgcctcccaccccagggtcttctctcttcaccgaaggggtcccttccgccctgcccygagagctgccctgcgcgggctgtcccctgctttgtctgcatttgcattcaaatcctctctgagaacttcttaagcagtgtcacagtccgtgccttgtcct

SEQ ID NO: 507648 - DNA, 201 bp, Homo sapiens
gcctggggagtgcctttgaggtggggagatggcctcagggtcatgggaaaggctcttgggagggacaactgggttctggaaggctgtgggaagcggggagsaggggatgagtagggcagagggttaacttacgcaacagcagaaaccattctactgtactcaggctctgcaggtgttttgtgaccctcctgcaggaacatt

SEQ ID NO: 507649 - DNA, 201 bp, Homo sapiens
agtgtgtgtgtgtgtgtgtgtgtgtgtgtgtgtgtgtgtgtgcaggcgcaaaagacagggaagaattttctcagtgtttatttttgccatgcctctcccaraaaaagagcgtgtgtgcgtgtgtgtgcatatgtgtttgcatttgaggagggaggcctggccagaagaggtggggggtagctgtgggcagagccctcccaa

SEQ ID NO: 507650 - DNA, 201 bp, Homo sapiens
tgactgggacagcaaagggccaggttgccagctctttctgccaaggtctcagtgcacagctggacccagcctcagctgacagctcttctggaagcttctgygttctagcggggggtgatacagtctgccatgagggtgaagtacacatgacgcaccctgaaatctaacctctaacagagccacatgtgtcattcagaaaag

SEQ ID NO: 507651 - DNA, 201 bp, Homo sapiens
ggacagtcacgttaaaatggctttgagggagagatggctcatgtggtcaggcgttttggtgtcacactcaattggctaaacatagtaattttggggtctaytattgactaatttgggtaattcacctactgggaaatattttaagataaaaatgtaaaatcctgtcagtgtatgagcaaggtccttgatgtcagttttgtg

SEQ ID NO: 507652 - DNA, 201 bp, Homo sapiens
agggagtttggaactcatggccaactctttgggtgaggatcgtgagcatccacctctccccaacaccagcctgcacttgggtacatatgttcacatacacmcaggcacgcacgtgtgcatacatgctcagctgggccctgctctgtcactgatgagccagggcctctaagatctgttctctccatgtgagttgcttttgtg

SEQ ID NO: 507653 - DNA, 201 bp, Homo sapiens
tgtagctgagatacaaggtgttttctactaaaaggatcaaggcagctcctcgacctcacattggggatcatttgtactgaagataattcttcagcggagtygtgctggcactgagttagccagatgagctgatctccatgctgaagccaaccatggggccagccatttccatcctgactgcccacatgctgtgtgatccat

SEQ ID NO: 507654 - DNA, 201 bp, Homo sapiens
tcctgtaatcccagcactttgggaggccgaggtgggcggattacctgaggtccggagtttgagaccagcctggccaacatggtgaaacctcgtctctactraaaatacaaaaattagccaggcatggtggcggacgcctgtaatctcagctaccctggaagctaaggcagggagaattgcttgaacctgggaggcagaagt

SEQ ID NO: 507655 - DNA, 201 bp, Homo sapiens
gcagtatcttatctcatgacatggtgaggcctaatgcagagccatgcagctgggcaccgtggctcacacctgtaatcctagcactttgggaggccaaggtrggagcgttgcttgaaaccaggagttaataaaggtcaacttgggaaatataatagtgagaccccatctctacaaaaaaaaaaaatgttaaattagccagat

SEQ ID NO: 507656 - DNA, 201 bp, Homo sapiens; identical to SEQ ID NO: 116965

SEQ ID NO: 507657 - DNA, 201 bp, Homo sapiens; identical to SEQ ID NO: 116968

SEQ ID NO: 507658 - DNA, 201 bp, Homo sapiens
gtctcccaaagatgtccatgtcctaatcgcagaaaactgagtatgttatcttacatggcaatagaggttttgcagatgtgattaatgttaggctcttgagrtggagaagctatcttgggttatgtggtgggctcagtgtaatcaccagggtcctttatttttaatttttgagacagggtcttgtaggctagaatgcagtga

SEQ ID NO: 507659 - DNA, 201 bp, Homo sapiens
gagtttgcaatttattaataataatgatgatgaaaacaataatacatccaaaagagaaaagaaaggggaagatgaaacccaaagagagagagagagagagwgtgtgtgtgtgtgtgtgtgtgtgtgtgtgtgtgtgtgtgcaggcgcaaaagacagggaagaattttctcagtgtttatttttgccatgcctctcccagaa

SEQ ID NO: 507660 - DNA, 201 bp, Homo sapiens
tcatttcagaagaaagaggctgaggagggacttaattgtctttgaaggatcctcctgtggaggacagagatgagttgttctccatctcactgagcgagagsagacaaagtggatctcaaatgaatgtgcaaagcttcctgtgagctggggccggccccctgcagggaaggttcagggagactgggcagacagagtgggtgg

SEQ ID NO: 507661 - DNA, 201 bp, Homo sapiens
cagagtttgcaatttattaataataatgatgatgaaaacaataatacatccaaaagagaaaagaaaggggaagatgaaacccaaagagagagagagagagwgtgtgtgtgtgtgtgtgtgtgtgtgtgtgtgtgtgtgtgtgcaggcgcaaaagacagggaagaattttctcagtgtttatttttgccatgcctctcccag

SEQ ID NO: 507662 - DNA, 201 bp, Homo sapiens
gtgtgtatatatatgtacatatacatatgtatccctgatttctttaaatctatgtatgtgtatatatcttatatatcatatataatcttatatgtgtatgkatatatatcttatatgtatatatacatatagttttcactgtagacgtactatactatatatatagtgtacactataatgtcaagtatatgaaaacaaaga

SEQ ID NO: 507663 - DNA, 201 bp, Homo sapiens; identical to SEQ ID NO: 116956

SEQ ID NO: 507664 - DNA, 201 bp, Homo sapiens
gagcatctactacgtgccaggtgggtcctccctgccgacatcttcagtgctgctgtgggtgagtcaagctttggtaggtccagttggcacctttggcttcyttttcttcatcttgtggaaatgcaagggtcattccggttctgcttccagtgatgggcgaatctgtattaactggtagagtgagggtggggggatatgtgc

SEQ ID NO: 507665 - DNA, 201 bp, Homo sapiens; identical to SEQ ID NO: 116958

SEQ ID NO: 507666 - DNA, 201 bp, Homo sapiens
tccccactcattctgaaagaattccactgtgttactatttggcttcacacagatcacttacagtgactacatgagatgacgcatgttctaaaaggaatctrttgcttgtttgatgctttggaattcacaaacctgccttagctcagagcccaggaaaatcacccacagttaaatccctccctgagaaggactctctgggcc

SEQ ID NO: 507667 - DNA, 201 bp, Homo sapiens
ttacataaatctgacccattcttcaaggcactgttcagctttcacattccccaggaaactcaccctgcctacctcagcccacaggatctcttccttgctgmgcccctgatgcctgtgctactgtggtcagtggtctaggttagaacccgggaactaattttttctcttctagatagtgagcggcccttgggtagcatttgg

SEQ ID NO: 507668 - DNA, 201 bp, Homo sapiens
ctgacccattcttcaaggcactgttcagctttcacattccccaggaaactcaccctgcctacctcagcccacaggatctcttccttgctgcgcccctgatrcctgtgctactgtggtcagtggtctaggttagaacccgggaactaattttttctcttctagatagtgagcggcccttgggtagcatttggtccagccttt

SEQ ID NO: 507669 - DNA, 201 bp, Homo sapiens
ggggaaagaataattattcccagcagccccacctctgccgtctcccgttccgggactcccttgacaggctcctcgccagccctgctcctccgccggcagcygcccctcagtagctgccgtgaacatgggcagtgggagattattcttcatttcaatttcattcttttttttcttattaaaaaagcagtgaaggccgggcgc

SEQ ID NO: 507670 - DNA, 201 bp, Homo sapiens
agccccacctctgccgtctcccgttccgggactcccttgacaggctcctcgccagccctgctcctccgccggcagccgcccctcagtagctgccgtgaacrtgggcagtgggagattattcttcatttcaatttcattcttttttttcttattaaaaaagcagtgaaggccgggcgcggtggctcacgcctgtaatcccag

SEQ ID NO: 507671 - DNA, 201 bp, Homo sapiens
cattgttgtgcaagcaagctccagaacccttcgtcttgcagaactgaaagtctatacccgttaaacatcatgtccccattcctacctccctcagcccctgscatccgccattctacttcctgtttatacattcaactaccttagatccctcaggtgagtggaatcatgccacattcatccttttgtgatgggcttgttaaa

SEQ ID NO: 507672 - DNA, 201 bp, Homo sapiens
tattgttatgatttgtaggtttttgacattttaaaatcactgatcattttaaggatatatgtatgtgtatatatatatttgtaaacagataatcacacatrtatatacacatacatatatatagttatatatacacaaatatatgttctgtcactttgtttaaaccatggtttaaaaacacataaaatttaccatctttac

SEQ ID NO: 507673 - DNA, 201 bp, Homo sapiens
atgtgttgaaatccttttgcagagttaccagtgcacctgaattatggtggctacaaagctgctagggcattccccggatccgagcttggaggaggccaagmctgggcaatttttctgactttactgcaccatcatccccatgagggaatctggtgttgggggaggaggggcagggagtggccgcggaggccactggctcat

SEQ ID NO: 507674 - DNA, 201 bp, Homo sapiens
gcccagctaatttttttaaattttttgtagatatggggtctccctgtgttgccccagctggcctcaaactcctgggctcaagtgatcctcccatctctgcytcccaaagtgctggatttagaggtgtgagccactttgtccagcccaaggtccttacaagtgaaagacagagacaggagagtcagagtcagagaacaagat

SEQ ID NO: 507675 - DNA, 201 bp, Homo sapiens
ggtctcctgactccacaagaaggtgctggctaattgcacagccgaaaactgtgcaagagccagtttgaaagggggccacacgttgatcattctgggctgartatttttgcggcgttctatatttacaccaaaatggaggtgaacttaacaatacggtgttaccacaggaaatgaatgaatctgtcaaaaatcactctttta

SEQ ID NO: 507676 - DNA, 201 bp, Homo sapiens
taatttcatttcagaagaaagaggctgaggagggacttaattgtctttgaaggatcctcctgtggaggacagagatgagttgttctccatctcactgagcsagaggagacaaagtggatctcaaatgaatgtgcaaagcttcctgtgagctggggccggccccctgcagggaaggttcagggagactgggcagacagagtg

SEQ ID NO: 507677 - DNA, 201 bp, Homo sapiens
gactgctgccctctgagcagattctgccgcacctttcttagttttcttcctgatgtcaactgatagatcgtgtgtattttctggcaagaaattccaaaggmagagagtccagtgagcttagctaactgcccctgccccacctgccagagctcctggtgccagggtgtctgcagagtgcctgctggaccttgtgctggccgc

SEQ ID NO: 507678 - DNA, 201 bp, Homo sapiens
tgtgtgccgagataaattgggaataagcatttagaaactacgattgcaggccaggcatggtggctcacgcctgtgatcccagcactttgggaggccgaggygggcggatcatgaagtcaggagtttgagaccagcctcatcaacatggtgaaacccggtctctaccaaagctacaaaaattagccaggcgtggtggcatgc

SEQ ID NO: 507679 - DNA, 201 bp, Homo sapiens
aaacctcaccagctatttaagaaaagattaatagaggggattgggagtttccagaattagaagggcctagaggagcaggatggaggctcagcttccaggartgattctcaacaggacactgcatggctggaccctcaagattgctgcttccacagtcaggaaagttgagaatcaggactctattgcaggaactgtcaaccc

SEQ ID NO: 507680 - DNA, 201 bp, Homo sapiens
ccccagtccccagagtttgtcaattgcaggtgctctgacaccagcaggtttctggatttacaaatctaagaataataagatttgaaacactttccttattycaggcactgttctaagtgctcagtatgggtaatctaatcagatccttgtgacaaccctttgaggcagttgatatcaccatcccttaaaccatgaggaaac

SEQ ID NO: 507681 - DNA, 201 bp, Homo sapiens
cacttgtgttggggaaggggtttttggccactggctctgtaggcttgggctcaaaggaaaggcagaatcatgaaatagaagctgtagcagcatctgcccgraggtcttgattttggtttaccaatcgctggctgcaggcgggatgggaacaggggctctgtgaaggctgaaattcagggagagagctggagggagcggaga

SEQ ID NO: 507682 - DNA, 201 bp, Homo sapiens
gccaagagtacactctttaagggaaaaaaaaatcacagagaaacgcctccttccaaagaccaatgtgagtgctgatggattacttgcaccatttccgtccrctggggtaattgcaagatgagtgcattgtgttccaaaggagaaatattctgtagatgtggtaatctttgccatgcaggctcgtgacagagagaaccacat

SEQ ID NO: 507683 - DNA, 201 bp, Homo sapiens
atttattgtgaattaaataagatcaccctttgatgtctcttgaatgtggcctcttctcaggcctggctccttctggtagagctgttgtctttagttgctgrcattatcaataacaaaatcttggcccacccataaaattgtcccacttccataatccttgacctcttgtgactgattagtaaagctctgtaaaaaggttac

SEQ ID NO: 507684 - DNA, 201 bp, Homo sapiens
acaaatttattgtgaattaaataagatcaccctttgatgtctcttgaatgtggcctcttctcaggcctggctccttctggtagagctgttgtctttagttkctgacattatcaataacaaaatcttggcccacccataaaattgtcccacttccataatccttgacctcttgtgactgattagtaaagctctgtaaaaagg

SEQ ID NO: 507685 - DNA, 201 bp, Homo sapiens
agtttgtctttgaagccagatggctgagtttgaatcctggctccacatcctactccacttacctaaaaactggtttgtttttaggtaagtgacttaacctytctgtgtctgtctcctcatcttaatacagagagaattccagtgatcactcccatagaactccctgggtaaatccatgtaaaggctgtatttgagctgtgc

SEQ ID NO: 507686 - DNA, 201 bp, Homo sapiens
ggagtcatgtcatggcataacttaggatccagtccaactatgaacacctcattttctttatcttcccattctcctcgccccaaaccatccaaggcaactakgagatgggccctttggtgctgtgctggcccaacaggaagcctccttgggtggcacgtgtgtccttattgtgatagtctccagtattttgcctggaaagtt

SEQ ID NO: 507687 - DNA, 201 bp, Homo sapiens
cctcttctcgtgcccaaacctgagggctgaattggaacttggcataccctgaaaatttcaaaagattttacatgatgcaaggaatgatttggggccgttgsctcccccaacagaaccagcaaagcctcccggtacttctttagtattttgctttgcaatgtcccagcctttccctttaagtctccttttcggacaatatat

SEQ ID NO: 507688 - DNA, 201 bp, Homo sapiens; identical to SEQ ID NO: 116963

SEQ ID NO: 507689 - DNA, 201 bp, Homo sapiens
gccacaagcaaaggaatccatgcaggctttagagcccagaaaaggcaagaaaatgggccttccccggagcctccagaaggaacatccctgccaacacttckacttcagccaagtgagactcttgttagactgctgatttccagaaccatgaggtaataaatctgtgttgttttaagccactgagtttgtggtaatttgtta

SEQ ID NO: 507690 - DNA, 201 bp, Homo sapiens
acaaatgcacatgtacaaccccagagtctgtgtgggaggggccatacacagaggcatggatctaggagccatgtttggttgggggtgtcaccaaagtaacrgtccattattcaaactggcagacatttgacagaccagaatctcatgtcattttcttcaggaagtagttttgcccagagttaaatattttatggatgcctt

SEQ ID NO: 507691 - DNA, 201 bp, Homo sapiens
tatagccttgaaatccctccataccagcccttcaaggccatcctctttgtccattgcatgtacttctccactgtgtggctaccccggaagggattcagcarattctctgtccataggctgttgggttgtttccggtctttttcttgcacagacagtgctgcaatgagtaatctctagtgcatgtcatttcgtacatgtgaa

SEQ ID NO: 507692 - DNA, 201 bp, Homo sapiens
ttggggtcatcaactaattagagaaccttaggcacaatgtttaacctctccaatggcccatacaactgaactccttggaaagcatagcttggatgagaggygtggagaaccaagccctctggaaccctgcatgttaaatctaatatggaattcagcacccaggggctatctagcgaggctctgcctaaatgaaatcatctg

SEQ ID NO: 507693 - DNA, 201 bp, Homo sapiens
agagaaccttaggcacaatgtttaacctctccaatggcccatacaactgaactccttggaaagcatagcttggatgagaggcgtggagaaccaagccctckggaaccctgcatgttaaatctaatatggaattcagcacccaggggctatctagcgaggctctgcctaaatgaaatcatctgttcttttggctggctttat

SEQ ID NO: 507694 - DNA, 201 bp, Homo sapiens
ccagctgactcagggacacagccattaacttgtggggcctgtgcttaacagagctgcttctcaacaaagacagtcttttgacatctcaagcggcaagctcratcgccaattaaaaagctcatgtcctcaatgtgacaaataccggggaaaacaagtctgcaattcagaacacaagtggaggaacatgaagcaagttcatca

SEQ ID NO: 507695 - DNA, 201 bp, Homo sapiens
aactcagcatcagggatatctgaggcagagactagcatccagttagtgtggggaccacccaggatgctggaattcaaaagacatctttttgcaaaaaaaadaaaagaaaagaaaaaaaattagaccttttccccacccctaccccactgtttttccctctctttctagactatctggcttcctggtgatgctcacgctttg

SEQ ID NO: 507696 - DNA, 201 bp, Homo sapiens
gtcagggttgtttttctatagcttagattgcggcctgcacatcttacattttcttaattcatatttaataaccttatagggctctccggtggctgtgctgygagacagatcaggaagccaaggtcgtccatgcagccaggatcctggggttccttagggccctgatcccttctctgcagaacattaggggctgcccccaag

SEQ ID NO: 507697 - DNA, 201 bp, Homo sapiens; identical to SEQ ID NO: 116967

SEQ ID NO: 507698 - DNA, 201 bp, Homo sapiens
gattgcggcctgcacatcttacattttcttaattcatatttaataaccttatagggctctccggtggctgtgctgtgagacagatcaggaagccaaggtcrtccatgcagccaggatcctggggttccttagggccctgatcccttctctgcagaacattaggggctgcccccaagacttcagccctagagattcaattgg

SEQ ID NO: 507699 - DNA, 201 bp, Homo sapiens
tatctggagatatttttgtcatgatgtaggggggaagggatgctactggcctctagtgggtggaggctagaaatgctgctaagcatcttaaaatgcacagracaagcccattacaaagaattatcttgccccaaacaagaatggggtgaaaatggctagattaatatgtgcatgtggtaactacaggagctcagaggatga

SEQ ID NO: 507700 - DNA, 201 bp, Homo sapiens
tggtttttaatatagtcacagatatgtgcaaccatccctatggcttatattagagcattttcatcatctcaaaaagaaaccccatacacattagcagtcartccccatttttccttcccccaatcactggcaaccactaatctattgtttttttctttttcactcaaacagatttctgacagatccactttctatgtctat

SEQ ID NO: 507701 - DNA, 201 bp, Homo sapiens
tattagagcattttcatcatctcaaaaagaaaccccatacacattagcagtcaatccccatttttccttcccccaatcactggcaaccactaatctattgyttttttctttttcactcaaacagatttctgacagatccactttctatgtctatagctttccctgttctggacagtggatatcaatggaattatacaataa

SEQ ID NO: 507702 - DNA, 201 bp, Homo sapiens; identical to SEQ ID NO: 116951

SEQ ID NO: 507703 - DNA, 201 bp, Homo sapiens
atttccttttttgaacagagctttactctttactgagcatctactacgtgccaggtgggtcctccctgccgacatcttcagtgctgctgtgggtgagtcargctttggtaggtccagttggcacctttggcttctttttcttcatcttgtggaaatgcaagggtcattccggttctgcttccagtgatgggcgaatctgta

SEQ ID NO: 507704 - DNA, 201 bp, Homo sapiens
ctcttctcgtgcccaaacctgagggctgaattggaacttggcataccctgaaaatttcaaaagattttacatgatgcaaggaatgatttggggccgttggstcccccaacagaaccagcaaagcctcccggtacttctttagtattttgctttgcaatgtcccagcctttccctttaagtctccttttcggacaatatata

SEQ ID NO: 507705 - DNA, 201 bp, Homo sapiens
agctatgtcaaggaatggggcttgttttacgggaggcggaatcccacaggaacacaggcccgctggctcccgagaccgggctgtctggagtcctccatgcrtcttcatctcagggccctgctcacaaagcgactgctgccctctgagcagattctgccgcacctttcttagttttcttcctgatgtcaactgatagatcgt

SEQ ID NO: 507706 - DNA, 201 bp, Homo sapiens
agaaccaagttgtgaatgctgctgtggccgtgacccatgggtccactgggttctgcctaaccacctacattggccgctgctgctattgatttgtctctccrtcacagtagagaggggtagaaaatggtgctactccagttaaggtcacagataggtgtctgtttccacactgttcccagtgtgtgccgagataaattggga

SEQ ID NO: 507707 - DNA, 201 bp, Homo sapiens; identical to SEQ ID NO: 116961

SEQ ID NO: 507708 - DNA, 201 bp, Homo sapiens
actgaatgttctccaaggcttaggaggggtgggaggaccccaggaccactaccttgagggaaggagagagcctgggaccgctggagctggggacagagctrtgagaaccagagggagtggagattactgtggacaagaagcatcttggaaggtctttcaagcacctgggcctggacaaaaaagttccacaggggtcaaagg

SEQ ID NO: 507709 - DNA, 201 bp, Homo sapiens
ctttctggaatactcagtccagtgagaagtgggcactgggggacagagaaggaagaggagagaatcatgagccatgctggatatgcaggtgggctgcaggrctcaaacttgaaccagtgcatctaaatgggccaatggtgccttgtggactgaatgttctccaaggcttaggaggggtgggaggaccccaggaccactacc

SEQ ID NO: 507710 - DNA, 201 bp, Homo sapiens
agtagtttccatgcctggagtatattgggtatgtatgttgcaaaaattgtgtgtgtgtgtgtgtgtgtgtgtgtgtgtgtgtgtgtgtgtgtgtgtggtcraggtaggatggaagggcgaggtaatgggtcatgggggtagagagagggagatgggttatgacctctaagctgccaaggtaggtaacatccaaataaggca

SEQ ID NO: 507711 - DNA, 201 bp, Homo sapiens
aacagatttctgacagatccactttctatgtctatagctttccctgttctggacagtggatatcaatggaattatacaataatgcggtcttttgtgacttrattctttcacttagcataaactaaggaaatttttttaagtttgtctttgaagccagatggctgagtttgaatcctggctccacatcctactccacttacc

SEQ ID NO: 507712 - DNA, 201 bp, Homo sapiens
ggtcttttgtgacttaattctttcacttagcataaactaaggaaatttttttaagtttgtctttgaagccagatggctgagtttgaatcctggctccacakcctactccacttacctaaaaactggtttgtttttaggtaagtgacttaacctctctgtgtctgtctcctcatcttaatacagagagaattccagtgatca

SEQ ID NO: 507713 - DNA, 201 bp, Homo sapiens
atggggcagtgacagcaatgggactgagagggagccacctccacagaacccccagcatgctccccatagcagctgagtgcttgtagagctgtgccaggaayccaggaagatgcaggtggaaacatttgttctagaatcttcggagcagtgatttgggctatgctcaggagtgttcattctcttttccgtggatcttcacaa

SEQ ID NO: 507714 - DNA, 201 bp, Homo sapiens
gattgaagccttgaggctggttgagatgctctttagccacattaaagccattagtctgggactgaagcaccacagcttttccatctttccagtgacttggytctctctgctgtgacccattcttgggtgagtttgtagcctctgagtccaacactgaggtcagtgtctcctcatttccccaatgctgggcagtatcttatc

SEQ ID NO: 507715 - DNA, 201 bp, Homo sapiens; identical to SEQ ID NO: 116952

SEQ ID NO: 507716 - DNA, 201 bp, Homo sapiens; identical to SEQ ID NO: 116954

SEQ ID NO: 507717 - DNA, 201 bp, Homo sapiens; identical to SEQ ID NO: 116955

SEQ ID NO: 507718 - DNA, 201 bp, Homo sapiens
tatgaaattggaagaagcagtagtggctatctagggtggttgtgagggtgaaaacagataacctccataaacccacattacagtggcctggggaagtgctytgcaaagggggcttaggaaaagtagctgtggaagaagagacagcagcaacccctagagatctcagaaactgtagatgccaatcctgttcaatttcaatca

SEQ ID NO: 507719 - DNA, 201 bp, Homo sapiens
cccaccaagcccggtgctctgaaggtggcatcgatggccctgagtttgtccctagctcccgcccttcctttgtaatgtgtcccttcttcccccacgggtgyggtgggaggcccgtgcaccctgctgtggggtaaggtggcatcaggcacagagagagtgacccggggttgtctttggtcactcacaaggtaatttcacttg

SEQ ID NO: 507720 - DNA, 201 bp, Homo sapiens
ccagtgcttcctagctgtgtgaccttggaaagatccttaatctcacccagcctcagttttcttttatgaaattggaagaagcagtagtggctatctagggyggttgtgagggtgaaaacagataacctccataaacccacattacagtggcctggggaagtgctctgcaaagggggcttaggaaaagtagctgtggaagaa

SEQ ID NO: 507721 - DNA, 201 bp, Homo sapiens
ccactgagccaggactgccatcaccgggcagaggttaattgaaaattcatgtaactatccgctcatttattaagacccacctccttttcttccctctcccratgcctctctaatgccaaaatgagtctccacccctggggagagacgggagaaagaacaacctgctccccaccttgaaagaaaccattgacttcatggaaa

SEQ ID NO: 507722 - DNA, 201 bp, Homo sapiens; identical to SEQ ID NO: 116957

SEQ ID NO: 507723 - DNA, 201 bp, Homo sapiens
gtcccgtctccagtgcttcctagctgtgtgaccttggaaagatccttaatctcacccagcctcagttttcttttatgaaattggaagaagcagtagtggcyatctagggtggttgtgagggtgaaaacagataacctccataaacccacattacagtggcctggggaagtgctctgcaaagggggcttaggaaaagtagct

SEQ ID NO: 507724 - DNA, 201 bp, Homo sapiens; identical to SEQ ID NO: 116959

SEQ ID NO: 507725 - DNA, 201 bp, Homo sapiens
agggggaaaaaaagggggggaaaaaacttcctgcccccgggtgtgtatgcaccggggctgcctggggccactgtcacggtgttcggaggtgctggaggcgwgtgtgacccctggccggagcagcccccctgctgggcccggcggcgcgcgcccctctccaggccacgttcccctgagcggcccagggccccggccgggcag

SEQ ID NO: 507726 - DNA, 201 bp, Homo sapiens
gcattttcacattagttgggaccatgttgcacatgaaattttgcatcttgcttttttactttagtatacaacacacattgcctcatgtaattgaaaattabtcttaaacatcacttccggatggcttcatttatcccatcctgcctgcatgccattcccatcagatgtattttttttcctactgtaactctctggtggata

SEQ ID NO: 507727 - DNA, 201 bp, Homo sapiens
ttaaagcattattgttacttggcagaatatgaagttggaaagctattatttgttcccacaagttttggaggtttagtagtccatgaaatccaaaagactakgactttagtgccagacaggctgggcctcaatcccagagctgccccttactaatcaagtagctttgcatgaaggtttctgaggtcctgttttgttgttgtt

SEQ ID NO: 507728 - DNA, 201 bp, Homo sapiens
gagcattgcaggctatcactgctaacggattaatgacagagcacctgccgcatggcctcatccacgacagctgccatccagagagaacagagtttggaccrtgtccgcagaaggccttggagtgttgacgtgggcaggtctaggaatctgcatgggcagaaatgtaggggagctgagtcactctgcggcaagtggctgtgt

SEQ ID NO: 507729 - DNA, 201 bp, Homo sapiens
aacagagtttggaccgtgtccgcagaaggccttggagtgttgacgtgggcaggtctaggaatctgcatgggcagaaatgtaggggagctgagtcactctgyggcaagtggctgtgtcttccgctgtccccctgcatgtgaggcttgggacctgaaggcccattttcccccagtgatgttgcgaggtaggtgtttagggtct

SEQ ID NO: 507730 - DNA, 201 bp, Homo sapiens
gggcagaaatgtaggggagctgagtcactctgcggcaagtggctgtgtcttccgctgtccccctgcatgtgaggcttgggacctgaaggcccattttcccmcagtgatgttgcgaggtaggtgtttagggtctggcatgggtataggatttcactagtttccctcaacttctatccctccttcctggcactccataatcac

SEQ ID NO: 507731 - DNA, 201 bp, Homo sapiens
tcccccagtgatgttgcgaggtaggtgtttagggtctggcatgggtataggatttcactagtttccctcaacttctatccctccttcctggcactccatartcactttactatgctttgtcttttgctgtgatgggtgtcccggtctcagctcctctcgcctacctgcaccaacaatgaccacacaactgttgtgtgcagg

SEQ ID NO: 507732 - DNA, 201 bp, Homo sapiens
tagggtctggcatgggtataggatttcactagtttccctcaacttctatccctccttcctggcactccataatcactttactatgctttgtcttttgctgkgatgggtgtcccggtctcagctcctctcgcctacctgcaccaacaatgaccacacaactgttgtgtgcaggcaccattgccagagtgcatcatacaggtc

SEQ ID NO: 507733 - DNA, 201 bp, Homo sapiens
gctgctctaaaaattctatgcctctagccttaaagagtacggctttgaggtaaccacttcttgttgattaggagttctcgcgtagctgttaatttttctakgtgctctggctgaaatgccctatcgacagagaaacacttgagtgaattgtgctgatgggaagtcaaattcactttttgctgcctaagccttttaaatgga

SEQ ID NO: 507734 - DNA, 201 bp, Homo sapiens
ttgcttgacattacgtgagtagtaactgcagggccaggatgtggctcccagactgggcgtataaacaaacatgagatgccctgtggttctttctgtctccyactttgggtctgagctctgggactagatttgagcagccacaggatctcaattcataattcatgtttcaacacttttgcagctgctctaaaaattctatgc

SEQ ID NO: 507735 - DNA, 201 bp, Homo sapiens
tttaggagtgtcacaaggattgtaacagcgtcccactggtgctggatggccaacaataaattcccaggctctgaagcaccaggaacaaggtccctgcagtmagatgaaaggtcccctccttgcctggcaagacctattatctgggactctaaagaaaacgtaaggccgggcgcggtggctcacacctgtaatcccagcact

SEQ ID NO: 507736 - DNA, 201 bp, Homo sapiens
agcccttgtggggtccagtcacccagggctggcaatagatgctgtctcccttgtgcacccaggctggtttgaagtgtgctgacggggacttgcggagacarccaggcagagggagaaaaaaggtggtagggttgctccaggtcacacaggccaccgcagaagcaggcctggctacatggaagggagcagggtggcggcatc

SEQ ID NO: 507737 - DNA, 201 bp, Homo sapiens
acgtgagtatgaagaaccagtcagacatcactttccccattggtgatccctgaaggactttccattcgcagcacaaagataaccccttgaagagagcaaaraagaagagaaaggctgaccagaaatatgaccgtaatatctaggcacttcactctccgcagctgtactgagctcacattatattgtcatcttctccagatt

SEQ ID NO: 507738 - DNA, 201 bp, Homo sapiens
aggcagttactgtgtaagaggactggagaacaagaaatgtgttagtggatgggaggactgctggagcccaggaagttgaggctgcagtgaacagtgatcaygccactgtactgggcaacagagcaagacctagtctcagaaaaaaaaaaggggggggcggaatatatgtttaaacagataaatcatatgtttcccaggcct

SEQ ID NO: 507739 - DNA, 201 bp, Homo sapiens
aaaggggggggcggaatatatgtttaaacagataaatcatatgtttcccaggcctgtcttagcatctttcactgtgctagacacatatccacgcaaatgtytggaagctggtagaatatctgtagtttgtgtagaagatagtcagtttttatttcttaagtaatctggggtcatcgcctgatgtgctaaaaaattaggtag

SEQ ID NO: 507740 - DNA, 201 bp, Homo sapiens
tgacatatcttgtatagcccagaggaaatttagaagcatttcacgctaaaaaaaaaaaaaaaaaaaaaaaaaaaaaaaaaaaattgagttttttttttacrtgatagccatatgaattcgatgagatccgtaaattgatttataaagaattgacatttggactacattattgagtcttctcattcaggaatgtgctattcc

SEQ ID NO: 507741 - DNA, 201 bp, Homo sapiens
ttaagccccaataatataataataatagcttccagttatggctgctcactatatccgagtactttacatatattatctctaatcctcatatcaatgcttcraggtagggattatccacattttacaaatgaagatgaggctcagtggtaatcaactggcccaaggccacaaacctagccacgttgttcagctgggtttgaa

SEQ ID NO: 507742 - DNA, 201 bp, Homo sapiens; identical to SEQ ID NO: 503438

SEQ ID NO: 507743 - DNA, 201 bp, Homo sapiens
ggacagtgagactcacatcatggtggaaaagacaatctatgaccagtaacagaagtccatggggctgccaacctcagacgaacagaagaaacaggagattytgaagaagttcatggatcagcatccggagatggatttttccaaggctaaattcaactagcccctgtttttccctccctgaactcttggggctgagctgca

SEQ ID NO: 507744 - DNA, 201 bp, Homo sapiens
attaaatactttaggtatataaacttcattacaaagaatgcttaaaacattgaggttgtattttactagtgtaatttgctagatatgtttgaaatacattrgtagtatatccaaactttgaataaggatagatatcaaaaatcacttggctgaagtcagagacctcagggccccagatcaaggagctaactgatgaagagg

SEQ ID NO: 507745 - DNA, 201 bp, Homo sapiens; identical to SEQ ID NO: 503439

SEQ ID NO: 507746 - DNA, 201 bp, Homo sapiens; identical to SEQ ID NO: 503440

SEQ ID NO: 507747 - DNA, 201 bp, Homo sapiens
aaacttttaattgttccacaaaattactttggctctacacacatttgcttaattattagatttaaataatacagcaatctgtctgcaacaaatagagtccycttcaacagactttcaacagacagagtgaaacattctgcataagcatgttttaagaaaatagagaggagagacaaattattacatttcttttgggtgtat

SEQ ID NO: 507748 - DNA, 201 bp, Homo sapiens
gtggcacaaacacggctcactgcagcctcaatctcctgggctcaagcgatcctcccacctcagcctcccaagtgcgtgccaccatgcccagctaatttttstattttttttttttaagatggggttttgtcacgttgcccaagctggtcttgaactcctaagctcaagcgatccccctgccacggcttcccaaagtgctaa

SEQ ID NO: 507749 - DNA, 201 bp, Homo sapiens
caggaggttgaggctgcagtgagctatgtttgtgccactgcactccagcctgggtgacagagcaagaccgtttcaagaaaaaaaaaaaaaaaaaaaaaaarggatcagcctgggtaacacaagaataccctgtctctacaaaaaaaaaaaaagtgaggcaggaggatcgcttgagcctgggagatcaaggctgtaatgaac

SEQ ID NO: 507750 - DNA, 201 bp, Homo sapiens
ccaccgccactcaccttgatgggtgtgaggtgctggaagtgacggtgagggtgcgggatcaggcccagggggcagtcccactgggaagcagagtaaactcrgatctcgctcttctggtccgtggtcaggagccgggctccatcgggactgaaacaagctggcaaagtgaaaagcccctgagctgaaggaaccacaagccct

SEQ ID NO: 507751 - DNA, 201 bp, Homo sapiens
gcagtaacccacctggaccaaagtgagggcagccaaggagcagtttgagaaagagaaagaagggcggaaagtggctgacatctttcctttcttccctgggycaggttgggttaaggaaatgggatctggatgctcttgccggaactacacctaagcttagaagccctttcccctgctagttaaactactcacttgatggtg

SEQ ID NO: 507752 - DNA, 201 bp, Homo sapiens
gacagagatagtcctatttactcactgttgccgctccggtgactaacccacagcgggcattcaataaatatttgttgaatgaatgaataactgtcttgccrtggattcctagtgaggaacattcagactgctctaccgtccagacagaggggatgggataatggggctcagaaatctgtctggttacggctgggcccagga

SEQ ID NO: 507753 - DNA, 201 bp, Homo sapiens
aaagcccctgagctgaaggaaccacaagccctctgtggtcctggccttgcaggccttctcctgcaggggtactctccctcccactcctctctagacaggarcggaaaggaagaggtgaatctgggctgtgaacaacaacaaaaaaattctggaaactcagcagctgatggggacagccacagccacaaaggttcccagaca

SEQ ID NO: 507754 - DNA, 201 bp, Homo sapiens
cagggtctgcaggagagatgaggtctgggatatcacacctgcgttgacaggatgcctgtgcggcagcgagtagaggaagctggctttccctctaacctggygcaggtcccaaattttcactgtttgatctacggaggctgtggccaggaaccaatcacagcatgggttcagggccacatgcgtcactttctttttgtgcat

SEQ ID NO: 507755 - DNA, 201 bp, Homo sapiens
tcaagcgatcctcccacctcagcctcccaagtgcgtgccaccatgcccagctaatttttgtattttttttttttaagatggggttttgtcacgttgcccargctggtcttgaactcctaagctcaagcgatccccctgccacggcttcccaaagtgctaagattacaggcatgagccgctttgtctggccccttcatttct

SEQ ID NO: 507756 - DNA, 201 bp, Homo sapiens
gctagaaaagcacttctgcccccttctgaacactgggggaaaaaacacaaccaggagctcttctggtccctcaaaccactggactgggaggctgactaggrgggtgcttcagggatcctgctattcagccagaagagctcagctcacagtttttctctcaaactctcaaatccatgctacactgccttttgccatccccta

SEQ ID NO: 507757 - DNA, 201 bp, Homo sapiens
ataactgtcttgccgtggattcctagtgaggaacattcagactgctctaccgtccagacagaggggatgggataatggggctcagaaatctgtctggttayggctgggcccaggatccccagctcctaaaagtccctgaagcagacaaagcttataccataaagcaagccctgaggcacgcctgccccccacaccccgggt

SEQ ID NO: 507758 - DNA, 201 bp, Homo sapiens
gctcactgcagcctcaatctcctgggctcaagcgatcctcccacctcagcctcccaagtgcgtgccaccatgcccagctaatttttgtattttttttttttaagatggggttttgtcacgttgcccaagctggtcttgaactcctaagctcaagcgatccccctgccacggcttcccaaagtgctaagattacaggcatga

SEQ ID NO: 507759 - DNA, 201 bp, Homo sapiens
tgaaacaagctggcaaagtgaaaagcccctgagctgaaggaaccacaagccctctgtggtcctggccttgcaggccttctcctgcaggggtactctccctyccactcctctctagacaggagcggaaaggaagaggtgaatctgggctgtgaacaacaacaaaaaaattctggaaactcagcagctgatggggacagccac

SEQ ID NO: 507760 - DNA, 201 bp, Homo sapiens; identical to SEQ ID NO: 500003

SEQ ID NO: 507761 - DNA, 201 bp, Homo sapiens; identical to SEQ ID NO: 500004

SEQ ID NO: 507762 - DNA, 201 bp, Homo sapiens; identical to SEQ ID NO: 500005

SEQ ID NO: 507763 - DNA, 201 bp, Homo sapiens; identical to SEQ ID NO: 350644

SEQ ID NO: 507764 - DNA, 201 bp, Homo sapiens; identical to SEQ ID NO: 500007

SEQ ID NO: 507765 - DNA, 201 bp, Homo sapiens; identical to SEQ ID NO: 500008

SEQ ID NO: 507766 - DNA, 201 bp, Homo sapiens
attcaaatcaatagagtatctaccaaaaagcctgcaacaatcaataatgttgattattgttatccaggagtgttaggtgctccctgtctctctacagactkggagaaagaattggaagccttccaaatggcacagcaagggtgtttgcaccagaagaagggacaagcagttctgtatgaaggtggaaaaggctatggaaaa

SEQ ID NO: 507767 - DNA, 201 bp, Homo sapiens
cttacctccctgcagctacccttcacaggtgctttggaaacccactttattgtgaggtcctatgccaggaccttctctctaaggacgtgttgctctttcakgtcctacaaaaggaggaagaggaaaacagcaagtgggaaaccctctcaggtaagcttagcttcccagagttctaccctggtccagctgctgaagctcatt

SEQ ID NO: 507768 - DNA, 201 bp, Homo sapiens
tagtgaagatacaatgttatgcacatagcaagagtttaataaaaaaagagtgcaaagtagaatgactgatgccataaagaataatgaaactatcagaatcrggtaggcatagttggagaggggatgttcttcttagaaatgaatttttcttattttaatatttaattcaagtgtttggtgggcaaggtactaatactaagc

SEQ ID NO: 507769 - DNA, 201 bp, Homo sapiens
gtaatgctacttgagtaaggttttacttaagcgagcttattgttctctttggggctgactgatgacctggaaaagttttccaattatttaatacaaaatargtcgtgagtttccctttgtgcatattcttgttccagagtagacagtaagcaaagaagatgatgttgctaagatttaagaaaatccatggtgttagtgaag

SEQ ID NO: 507770 - DNA, 201 bp, Homo sapiens
agcagtagacaggggtagatgaaaagttttcatctttatttaaaaaaaaaactgtacacattttcaacatgatatattctagatttgtagaaatcttgttyactgctgattgactgattgattgattttggcagaaatagcagtaagccaactggatcaactgagcccagaggaacagttgctggtcaagtgtgctgcaat

SEQ ID NO: 507771 - DNA, 201 bp, Homo sapiens
cagcaagggtgtttgcaccagaagaagggacaagcagttctgtatgaaggtggaaaaggctatggaaaaagccagctgttggctgaaataaactttctggmacagaaagaagggcataggtaaaaactcctgctttctgacttagtcagagcctacttctcttggggcctctttctcttgttagtgagactcttgtgtcat

SEQ ID NO: 507772 - DNA, 201 bp, Homo sapiens
aaaggtaagtcccttgaagacttcaagtgaaccaattacagatatcattgcaattagtgatttggtgagtagttgagtataggtctctcattatcattctrgcttcatttcttctaaaaaagaaatccaccttctagaaataagttctggcattgcctgaagagctctttgaagacttgtaatgctacttgagtaaggttt

SEQ ID NO: 507773 - DNA, 201 bp, Homo sapiens
atcaatagagtatctaccaaaaagcctgcaacaatcaataatgttgattattgttatccaggagtgttaggtgctccctgtctctctacagactgggagaragaattggaagccttccaaatggcacagcaagggtgtttgcaccagaagaagggacaagcagttctgtatgaaggtggaaaaggctatggaaaaagccag

SEQ ID NO: 507774 - DNA, 201 bp, Homo sapiens
ggccttcccagataagcacactgtacaaatcttatacaagtagggtgaaaatactcaagatttgcttcagataacttaatccaatcaatctacaatagttscttttataagcagcccaagaggtagggctaggaaattacgatttataaacatgaaagtccagaaaaaagaattgtacactattgatgagaaggatgactt

SEQ ID NO: 507775 - DNA, 201 bp, Homo sapiens
tctctaatgtgcaatcccttacttacctccctgcagctacccttcacaggtgctttggaaacccactttattgtgaggtcctatgccaggaccttctctcwaaggacgtgttgctctttcatgtcctacaaaaggaggaagaggaaaacagcaagtgggaaaccctctcaggtaagcttagcttcccagagttctaccctg

SEQ ID NO: 507776 - DNA, 201 bp, Homo sapiens
cctcatggccatcttctttgagattgatacatgcccagcctattaccggcaagagtgcctacaaagacagctttgtgggatagtggaagaacaacttcackgcctttttagtgacctcttatttgtgaaggtaatgaaggcagtggctttctgaattgggttactgttatattttgtggatagtcagacctaggattgttt

SEQ ID NO: 507777 - DNA, 201 bp, Homo sapiens
agcaagtgggaaaccctctcaggtaagcttagcttcccagagttctaccctggtccagctgctgaagctcattctccaacatgacattacttggcctttaygaggtacataccttttccttgctaacattgtgggccacactaggccttcccagataagcacactgtacaaatcttatacaagtagggtgaaaatactcaa

SEQ ID NO: 507778 - DNA, 201 bp, Homo sapiens
ccactttattgtgaggtcctatgccaggaccttctctctaaggacgtgttgctctttcatgtcctacaaaaggaggaagaggaaaacagcaagtgggaaamcctctcaggtaagcttagcttcccagagttctaccctggtccagctgctgaagctcattctccaacatgacattacttggcctttacgaggtacatacct

SEQ ID NO: 507779 - DNA, 201 bp, Homo sapiens
ataatgttgattattgttatccaggagtgttaggtgctccctgtctctctacagactgggagaaagaattggaagccttccaaatggcacagcaagggtgyttgcaccagaagaagggacaagcagttctgtatgaaggtggaaaaggctatggaaaaagccagctgttggctgaaataaactttctggcacagaaagaag

SEQ ID NO: 507780 - DNA, 201 bp, Homo sapiens
caggtggcgccattctctcatgcaaggatggggctccagggtgagcagcgtgggctgcagtgtgtcagtcccaggagggagggagtggcgagcaccacagwttaccacatatgtgtggaagacatttgtatccttatctttactataaataaatccataaaagttaaaaaaaaattccttttaacaaatgtctaatatgaa

SEQ ID NO: 507781 - DNA, 201 bp, Homo sapiens
tcatctttgaagatcacatatatgagaagttagatgcaatcactgatgaggagaatcacatgctcgatctggcatatggactaacagatcacagttgggckgccaaatctgtttgacaaaatctatggacaatatgactgttcgagtgcctgaaacagtggctgatgccagacaatccattgatgtgggcaagacctcctg

SEQ ID NO: 507782 - DNA, 201 bp, Homo sapiens
cgtctctgcccggccgccatcccatctaggagtgaggagcgcctcttcccggccgccatcacatctaggaagtgaggagcgtctctgcccggccgcccatsgtctgggatgtggggagcgcctctgccccgccgccccgtctgggatgtgaggagcgcctctgcccagccgcgaccccgtctgggaggtgaggagcatctc

SEQ ID NO: 507783 - DNA, 201 bp, Homo sapiens
ccaggtggcgccattctctcatgcaaggatggggctccagggtgagcagcgtgggctgcagtgtgtcagtcccaggagggagggagtggcgagcaccacarattaccacatatgtgtggaagacatttgtatccttatctttactataaataaatccataaaagttaaaaaaaaattccttttaacaaatgtctaatatga

SEQ ID NO: 507784 - DNA, 201 bp, Homo sapiens
ggggaccgggccggagcgcggaggcgagccggccgctgagcgtgtcggcaggggcgcggagcagctcagaagataaagtgacagtccactttataaactgwgatggtgaaacattaacaaccaaaggaaaagttggtgattctctgctagacgttgtggttgaaaataatccagatattgatggctttggtgcatgtgagg

SEQ ID NO: 507785 - DNA, 201 bp, Homo sapiens
tccctgcctgattctcctgcctcagcctgcccagtgcctacgattgcaggcacgcgccgccacgcctgactggttttcgtatttttttggtggagacgggrtttcgatgtgttggccgggccggtctccagctcctaaccgcgagtgatccgccagccttggcctcccgaggtgccgggattgcagacggagtctcgttca

SEQ ID NO: 507786 - DNA, 201 bp, Homo sapiens
tccactttataaactgtgatggtgaaacattaacaaccaaaggaaaagttggtgattctctgctagacgttgtggttgaaaataatccagatattgatggytttggtgcatgtgagggaactctggcttgtttaacctgtcatctcatctttgaagatcacatatatgagaagttagatgcaatcactgatgaggagaatc

SEQ ID NO: 507787 - DNA, 201 bp, Homo sapiens; identical to SEQ ID NO: 430327

SEQ ID NO: 507788 - DNA, 201 bp, Homo sapiens; identical to SEQ ID NO: 430328

SEQ ID NO: 507789 - DNA, 201 bp, Homo sapiens; identical to SEQ ID NO: 430329

SEQ ID NO: 507790 - DNA, 201 bp, Homo sapiens; identical to SEQ ID NO: 430330

SEQ ID NO: 507791 - DNA, 201 bp, Homo sapiens; identical to SEQ ID NO: 459447

SEQ ID NO: 507792 - DNA, 201 bp, Homo sapiens; identical to SEQ ID NO: 459448

SEQ ID NO: 507793 - DNA, 201 bp, Homo sapiens; identical to SEQ ID NO: 152037

SEQ ID NO: 507794 - DNA, 201 bp, Homo sapiens
ggtgggaaggctctggctgccctcaccctgttcccatcactgcagagggctgtgcggtggctggagctgccaccgagcgtctcggtgagggtgacctcacrctggctgagcttacaggccccatcttaagactttgttcgtggtgttctttcacttctcagagcctttcctggctccaggattaatacctgttcacagaaa

SEQ ID NO: 507795 - DNA, 201 bp, Homo sapiens
ctctcccccacctccttcctctccctgctgcctcccctctgccctcccctttcctccttagccactgtaaatgacactgcagtgaatatcctggagcacaragggcatgtctcccagttcagaattacctcctttatttagggcaggttctcagaactagagtagccgggcaaaggtctgaggcaaatgcctttgccctgg

SEQ ID NO: 507796 - DNA, 201 bp, Homo sapiens
tagccgggcaaaggtctgaggcaaatgcctttgccctggggcgccccagccacctgcaggccccttatttcctgtggccgagctcctcctcccaccctccmgtcctttccccagcctccctcgcccactaggcctcctgaattgctggcaccggctgtggtcgacagacagagggacagacgtggctctgcaggtccactc

SEQ ID NO: 507797 - DNA, 201 bp, Homo sapiens; identical to SEQ ID NO: 270561

SEQ ID NO: 507798 - DNA, 201 bp, Homo sapiens
gccgggcaaaggtctgaggcaaatgcctttgccctggggcgccccagccacctgcaggccccttatttcctgtggccgagctcctcctcccaccctccagkcctttccccagcctccctcgcccactaggcctcctgaattgctggcaccggctgtggtcgacagacagagggacagacgtggctctgcaggtccactcgg

SEQ ID NO: 507799 - DNA, 201 bp, Homo sapiens
caatggcctctttgtctcacggccttggccatttccctcattgccttctggacattcatccttccagtgcccccttttttttttttttttttttttttttrcatctctcacattgatccctctctagccttggtcagctcttaaatccttgtctaacttgacctcttccacgtccacatctgcgtccacatcctctcacat

SEQ ID NO: 507800 - DNA, 201 bp, Homo sapiens
aagagagagatgtttctctttttcttctcttctatctattaaacctccgctcctaaagtcctcgtgtttgtccctgtcctaaattttcctggtgcatgacracaaaccccgggtatgtagaccagacaatgtagccgcttcaagggatttgagtgaggaaggaatgaatcaatggagcccaggggggttttagagcattca

SEQ ID NO: 507801 - DNA, 201 bp, Homo sapiens
cctcgcccactaggcctcctgaattgctggcaccggctgtggtcgacagacagagggacagacgtggctctgcaggtccactcggtccctggcaccggcckcaggggtggcagaacgggagtgtggttggtgtgggaagcacaggccccagtgtctcctgggggactgttgggtgggaaggctctggctgccctcaccctg

SEQ ID NO: 507802 - DNA, 201 bp, Homo sapiens
cagacagagggacagacgtggctctgcaggtccactcggtccctggcaccggccgcaggggtggcagaacgggagtgtggttggtgtgggaagcacaggcyccagtgtctcctgggggactgttgggtgggaaggctctggctgccctcaccctgttcccatcactgcagagggctgtgcggtggctggagctgccaccga

SEQ ID NO: 507803 - DNA, 201 bp, Homo sapiens
attatgacatgtcaatgtaggttcataaagtataacagctgtaccccctggtgggggatgttgataatgggggagactgggttggggcgaggacatacggraaatctctgtaaccttcttctaattttgctgtgaacctaaatctgctctaaaaatgtatatatataaaaagtggggccttcctttccctctcccctgccc

SEQ ID NO: 507804 - DNA, 201 bp, Homo sapiens
tcacgtgcttggtcccctgtgaagcccctctggggacctaggggacaggcagggcatggagacaaagtatgcccttttctctgacagtgacaccaagcccygtgaacaaaccagaaggcagggcactgtgcaccctgcccggccccaccatcccccttaccacccgccaccttgccacctgcctctgctcccaggtaagtg

SEQ ID NO: 507805 - DNA, 201 bp, Homo sapiens
ctaatttctctttctataagggctgctgccaacagatccgcctttttcttaagcctttcatctgcttccttttcccttccttagttctcctgctcctgcagtcggctggcagggctgggcaaggacaaacctgaatataaaattcagtgtgtctgctgcccaccagtcctttatgcttggagaagagagagatgtttctct

SEQ ID NO: 507806 - DNA, 201 bp, Homo sapiens
atgacatgtcaatgtaggttcataaagtataacagctgtaccccctggtgggggatgttgataatgggggagactgggttggggcgaggacatacgggaamtctctgtaaccttcttctaattttgctgtgaacctaaatctgctctaaaaatgtatatatataaaaagtggggccttcctttccctctcccctgccccag

SEQ ID NO: 507807 - DNA, 201 bp, Homo sapiens
taaaaatgtatatatataaaaagtggggccttcctttccctctcccctgccccagccctctcccccacctccttcctctccctgctgcctcccctctgccytcccctttcctccttagccactgtaaatgacactgcagtgaatatcctggagcacaaagggcatgtctcccagttcagaattacctcctttatttagggc

SEQ ID NO: 507808 - DNA, 201 bp, Homo sapiens; identical to SEQ ID NO: 270562

SEQ ID NO: 507809 - DNA, 201 bp, Homo sapiens
ttcgtggtgttctttcacttctcagagcctttcctggctccaggattaatacctgttcacagaaaatacgagtggcctcctcttcctccacaacctcacasgaccttctcccttccctcccgctggcctccttttctctcctgtcactctgcctgggcatgccccagggccttggctgtgtcctttctttcctcagggaag

SEQ ID NO: 507810 - DNA, 201 bp, Homo sapiens
ggctgccctcaccctgttcccatcactgcagagggctgtgcggtggctggagctgccaccgagcgtctcggtgagggtgacctcacactggctgagcttamaggccccatcttaagactttgttcgtggtgttctttcacttctcagagcctttcctggctccaggattaatacctgttcacagaaaatacgagtggcctc

SEQ ID NO: 507811 - DNA, 201 bp, Homo sapiens; identical to SEQ ID NO: 270543

SEQ ID NO: 507812 - DNA, 201 bp, Homo sapiens; identical to SEQ ID NO: 270563

SEQ ID NO: 507813 - DNA, 201 bp, Homo sapiens
ccgcacccccccacccacaccccctgagcctctagtcctccctcccaggatgcatcaggctggatggtgacatctccccacccttgaatgagacggctttrtgctgctctgggacccgcacccagcttggactgcttgctccatggccccaggaaaagctcgtacagataaggtcagccacttgggtggggggcccacagc

SEQ ID NO: 507814 - DNA, 201 bp, Homo sapiens; identical to SEQ ID NO: 270564

SEQ ID NO: 507815 - DNA, 201 bp, Homo sapiens
cctgttcccatcactgcagagggctgtgcggtggctggagctgccaccgagcgtctcggtgagggtgacctcacactggctgagcttacaggccccatctkaagactttgttcgtggtgttctttcacttctcagagcctttcctggctccaggattaatacctgttcacagaaaatacgagtggcctcctcttcctccac

SEQ ID NO: 507816 - DNA, 201 bp, Homo sapiens; identical to SEQ ID NO: 270566

SEQ ID NO: 507817 - DNA, 201 bp, Homo sapiens
gcttacaggccccatcttaagactttgttcgtggtgttctttcacttctcagagcctttcctggctccaggattaatacctgttcacagaaaatacgagtsgcctcctcttcctccacaacctcacacgaccttctcccttccctcccgctggcctccttttctctcctgtcactctgcctgggcatgccccagggccttg

SEQ ID NO: 507818 - DNA, 201 bp, Homo sapiens; identical to SEQ ID NO: 270533

SEQ ID NO: 507819 - DNA, 201 bp, Homo sapiens
tccccacccttgaatgagacggctttatgctgctctgggacccgcacccagcttggactgcttgctccatggccccaggaaaagctcgtacagataaggtmagccacttgggtggggggcccacagcatgtcaccctctctgtcccagaagtcacgtgcttggtcccctgtgaagcccctctggggacctaggggacaggc

SEQ ID NO: 507820 - DNA, 201 bp, Homo sapiens
ctcaaaacaaacaaaaaaacccctaaatctgtggactctgggtgattatgacatgtcaatgtaggttcataaagtataacagctgtaccccctggtggggsatgttgataatgggggagactgggttggggcgaggacatacgggaaatctctgtaaccttcttctaattttgctgtgaacctaaatctgctctaaaaatg

SEQ ID NO: 507821 - DNA, 201 bp, Homo sapiens; identical to SEQ ID NO: 270552

SEQ ID NO: 507822 - DNA, 201 bp, Homo sapiens; identical to SEQ ID NO: 270553

SEQ ID NO: 507823 - DNA, 201 bp, Homo sapiens; identical to SEQ ID NO: 270576

SEQ ID NO: 507824 - DNA, 201 bp, Homo sapiens
tattggcctgagaggagcctgatggaaagagcctgattacagttctcatgtttcaaggaatattgtatggtaggcctataatttgtcatttttacagacartgtaaagatgaaaagcaacttaattgcgttatttaggtacagtagaaatctgaatttgtattattgttaccggtggatggagtccagcttcttggtgtct

SEQ ID NO: 507825 - DNA, 201 bp, Homo sapiens
taataggtcttaagggaattactctggttgaggaggttaaaaaaactaatctgatagctattattgaattttcaatgttttactttttaaaaaatttattwaaaaaaaaataggaagaaaagaaacggggtctcaccatgttgcccaggctggtttcaaattcctgggctcaagcaatcctcctacctcagcctcccaaag

SEQ ID NO: 507826 - DNA, 201 bp, Homo sapiens
gaagtgtgatcctggggctacagaatggagcagcagaggagtctgcactgctcctgcagcctaaaaggcacagcagtgagagaatagcagtgtcacccagyggacaccactgggcctgctcgagctgaccctttctggcttggggccccaggagagaacaggactgataatgcatctctcccaagtccccatctcatccca

SEQ ID NO: 507827 - DNA, 201 bp, Homo sapiens
cgccttccttggcctcccaaagtattgggattacgggcatgagccactgcgcccggcctctatttagatttctttagtttttacttaatattcttgtattmgtctgttttcatgctgctaataaagatagacttgagaccgggcaatttataaaggaaagaggttgaattgactcacagttccatagggctggggaggcct

SEQ ID NO: 507828 - DNA, 201 bp, Homo sapiens
agcagtgtcacccagtggacaccactgggcctgctcgagctgaccctttctggcttggggccccaggagagaacaggactgataatgcatctctcccaagyccccatctcatcccaacacctggggcacgaggggctgggaaaggtgtccttaccggctgcatggtaccccccgcaatgaccactgcccggcattccttca

SEQ ID NO: 507829 - DNA, 201 bp, Homo sapiens
caaacctgcacattgtgcacatgtaccctagaacttaaagtataataataataaaaaaaaatgaaaatacaaactgtcacgttccaagtatgttgacactrtaagctgaggtgcgcaaaactgacagccgcccaacaggacagtgctattcctacaacgcctgcaactgcaaaatccaaaaagctcgaaatcaagttttat

SEQ ID NO: 507830 - DNA, 201 bp, Homo sapiens
gtcagttcacagccctggctgttcctcagagatctaagtaaccactttgatgatttcagggttctcttagatatttgtaataaaccgattcctttattacyctagttcagttctgtaggcagctttctcagccctttgttgtttttgttgaggagagagtatgaaaggtttctgtaaaccttgtttgggatattcagttct

SEQ ID NO: 507831 - DNA, 201 bp, Homo sapiens
tggaggggatgtttttatttcttaaattatattttagtttatatatagtcaaggctttgaaatgaatcattttcaaagctaccaatattttaaataagtgwcttaaaaattttggagtatataattcagacctaagagtacagtttttattcatctatccatttactcaacgaacatttttattgccaggcacaatattaa

SEQ ID NO: 507832 - DNA, 201 bp, Homo sapiens
gtagcatagcctactacaaaccttgactatatgatacagcctgttgctcttattgttataaaagatttaaacattttatttataaactggtattaccaacyttcccctatttctgaatatttaggtaagaagcaaaaataagttatcctggctttgtgtagtggctcatacctgtaatcacagcactttgtgaggctgagg

SEQ ID NO: 507833 - DNA, 201 bp, Homo sapiens
cacagctggattcaggagcaaaaacttcagggtgctctcactgaggctgcctggaaaaacagatcggtgggaggtgagtgcaagcccaacagacacttctrtcgtcccagcaaagggggtcccccaggtgagtccaggtctgaggcacaagtgctagtgctttctctttaaattaaacaccatttaatctctaggacaacc

SEQ ID NO: 507834 - DNA, 201 bp, Homo sapiens
tcaccgtgctggcctattccttaactttcttaataaacatgatttcactttactgtcagcttgttcttgaattctttcctggaggaagccgagaacccatrtggcctctctggccgaatcccaattttggggttcacccagtaataaaccaaagagttgttttgttttttagactttagacaaactggataaagaatatca

SEQ ID NO: 507835 - DNA, 201 bp, Homo sapiens
tctgcttcctcttctgtacgatgagggtaatagttcccactcgtgatgactaagcaagtttatacatgtggagcacttagaacagcatctaaaatgtaagyactcagtaaataatagctgactcaagtttataattaagaaggctaaggaagtagcaagatatatgaaaatgatattcatatatactatgtttttaattta

SEQ ID NO: 507836 - DNA, 201 bp, Homo sapiens
atctgttattcaccatattaattatttggtgatcaagaagcaatgttttaaacatttcacaactgaccagatgttttgttttataagaattatatttaggyaccttaccatgctttagttaaccttttaagaaattgattgagggtttggggttgacatagtataatttttctgtttaaaataaaataaataggctgaagg

SEQ ID NO: 507837 - DNA, 201 bp, Homo sapiens
tgacacaagacatgccattttaaatgaattaaaacagcataaagttcatcctttctttaattaatacctcacccaggatagtaaaacttaacatttgaaayagacttgacaattttttgtttgtttctgagtcaagatgtttcctgtacacctatttctcttccttctctttttccgattctcaaattcaagagacaaatc

SEQ ID NO: 507838 - DNA, 201 bp, Homo sapiens
taaaaaccctacaaaaaggcaaaaaaaaaaaaccttaaaaaaaatattattgcagccgggcggggtggctcatgcctgtaatcccagcactttgggaggcygaggcaggcggatcaccggaggtcaggagttcgagaccagcctggccaacatgatgaaaccccgtctctactaaaactacaaaaaattagccgggcatgg

SEQ ID NO: 507839 - DNA, 201 bp, Homo sapiens
aaatattcctcctgtctaactgaaatgttgtacccattgaccaacatttccccatttcctcgctcccagcccctggtaaccaccattttattctctacttmtatgagcttgattgttttagattccacatacatgtgagatcctgcagtatgtgtccttccctgcctggctttttttcatttagcatagttctccaggttc

SEQ ID NO: 507840 - DNA, 201 bp, Homo sapiens
gcatgacccactgcgcctggccaagaactgcttctaagttcagtttatttcaaatcttggtggatacatggctgtaataaccagaacagacatttcatgamacctcttcatacacaacaattagggtgaggctcatagtaacaataatataaatccgtatttcaaacagtgttggtaattttgaatgttttgaccaacttc

SEQ ID NO: 507841 - DNA, 201 bp, Homo sapiens
actgctgggattacaggcatgacccactgcgcctggccaagaactgcttctaagttcagtttatttcaaatcttggtggatacatggctgtaataaccagmacagacatttcatgaaacctcttcatacacaacaattagggtgaggctcatagtaacaataatataaatccgtatttcaaacagtgttggtaattttgaa

SEQ ID NO: 507842 - DNA, 201 bp, Homo sapiens
cacctgcctcggcctcccaaactgctgggattacaggcatgacccactgcgcctggccaagaactgcttctaagttcagtttatttcaaatcttggtggayacatggctgtaataaccagaacagacatttcatgaaacctcttcatacacaacaattagggtgaggctcatagtaacaataatataaatccgtatttcaa

SEQ ID NO: 507843 - DNA, 201 bp, Homo sapiens
atgatgacctgtggtaaaggaaggagaagcatgaggctcaacccaaagatgttgtcaaggtgaaatgtagacagggcctcttggcttgaaccgataaatayaatctatagttgtaaattttgaggccatccattaataaatcctccattcctcccacctttgtctataattttgttaataacgctcgatgacatcatcaat

SEQ ID NO: 507844 - DNA, 201 bp, Homo sapiens
cactttgtcacccagatggagtgcagtggtgcagtctcagctcactgcaacctctgcctccctgaatcagattcaagtgattctcctgccctagcctcccragtagctgggattacaggcacgcgccaccacacctggcaaattttttgtatttttagtagagatgggtttttaccatgttggccaggctggtctcaaact

SEQ ID NO: 507845 - DNA, 201 bp, Homo sapiens
aaacaaaggaaagaacttaaataatatatagatcagatggtcagctcttgaaaaggtaggtgttaatggcagtcagatattatatcagtcttgaaggagcmcataaatcgtatattgttttgcaaccaaagaacagaaaaatgactgctatcatcaatgatgaaagctcaaatgtgatgaagaaatggaaaaaatagataa

SEQ ID NO: 507846 - DNA, 201 bp, Homo sapiens
gcaggggattataatgatcagattagcatattaagaagatgattttggcaatagtatggagtctggttgatagggaggccaggtaggaggctactgaagtrgtctggacaagagatgaagtgtacctaaactaaggcatggggatggaacggaacttagcattacaggcagttacttaaatggctaggggaagcaagagga

SEQ ID NO: 507847 - DNA, 201 bp, Homo sapiens
agaattgaagagggtagccaagggccaaatataaatttgtattacaagctaaggaatttttatccagtcataaagagccactgaaagattttatgcagggrattataatgatcagattagcatattaagaagatgattttggcaatagtatggagtctggttgatagggaggccaggtaggaggctactgaagtagtctgg

SEQ ID NO: 507848 - DNA, 201 bp, Homo sapiens
tagtgatgaacaaaataagcttaatcacatcctaggagctaagtattctgacattataatctcttctctcagagtcccatcacagcagtcttaggattcargatctattcttgggaaacattatagaaccagtgtgtcatgtacatacaaatgagggaaaatataatggctttggtaatcctgtagttatctttcttgtca

SEQ ID NO: 507849 - DNA, 201 bp, Homo sapiens
aaaaaaaaagggctcagtagttttcacttaaaagacaaagaggcccactgagctattacagatgttaattaggattcatttactttaatatggtagaaagratgctatgataccactttagtgatgaacaaaataagcttaatcacatcctaggagctaagtattctgacattataatctcttctctcagagtcccatcac

SEQ ID NO: 507850 - DNA, 201 bp, Homo sapiens
tgctaatagaccgtttcccagggttgggcagagatgaaattaaataaaaccacacacactacagtgcatggaatgtactaggtgttcaataaatgtttccyttttttttttttttgagactgagtttcgctctgttgcccaggctggcgtgcaatggcgcgatcttggctcaccgcaacctccgcctcccgggttcaagcg

SEQ ID NO: 507851 - DNA, 201 bp, Homo sapiens
cacctcagcctcccaaagtgctgggattacaggtgtgagccaccgtgcccgtcccaaccaggcttcttaaatgaattctaagatagaaacaacaggagctkccaggactctcttaagggctgaacctaggactgtcacagtgacatttctgccatattctgctggtcacaaggcaagcccaaattcaaaaggagagaaata

SEQ ID NO: 507852 - DNA, 201 bp, Homo sapiens
gattcttgtggattatttgctcaagtgaatatttcttttatttatttatgcctcagcattcacatcgtgaatatttctaaaggaaggaaaggttgtaaaayttaggagcactagaatatatagctacagggcattgttgaactttagacaagatcataggatttgacatgttttctgggtcaaatgcagagtttatctagt

SEQ ID NO: 507853 - DNA, 201 bp, Homo sapiens
atgaggtcatccaggagccaggctcttcctctgttgttgtacagccttctagtctagaccatactatctcaggtggcttgccatttgatcatgttctaagyggtggcacaaaataaggagcacactgtctccctttaaggacattaaaagttacccacatcacttgttatatatcattggctggtactagtcttatgccat

SEQ ID NO: 507854 - DNA, 201 bp, Homo sapiens
tgcccaggctgctcttgaactcctgggctcaagcaatcctctggccttggcctcccaaagtgctaggattatatgtgtgagccactgcacctggccatatrttgttattgaggtaatattcttttgaaatgcaataaaaataaacctcctcaaacaatctcttggtcatgaaggcccacgggtgacagggatgtctcctct

SEQ ID NO: 507855 - DNA, 201 bp, Homo sapiens
atgtggatagacatagaaagaaaagaattagtagaatttagtgatcagattcaggtttgattctgaaccaaatcaattcagacttgatttctcataagacaaaaaaaaaaaaaaaagaaagggagaccagagtaatgcaaggttttgaacttgggtccttaggaaaatacctggaagaaaaatatttaccttggaaataat

SEQ ID NO: 507856 - DNA, 201 bp, Homo sapiens
ccgtctctaccaaaaacacaaaaaatcagctgggcgtggtggcggatgcctgtagtcccagctactcgggaggccaaggcagtagaatggtgtgaactcaygaggcggagcttgtagtgagccaagatcgcaccactgcactccagcctggtcaacagagtgagactcagtctcaaaaaaaaaaaaaaaaaaaaaaacttt

SEQ ID NO: 507857 - DNA, 201 bp, Homo sapiens
ttgtactaggaaataattatacttgtcactttaagtttcagaacccaagaactaaccaatcttgttttcattaatgtcatcctataaatattctgtgagtstttaagcagagataatatttcacttgttcgactgtctctgtgtagcaactccacttactagatttttgaccttgaactaatgacataacacagtcatgcc

SEQ ID NO: 507858 - DNA, 201 bp, Homo sapiens
caaggcagtagaatggtgtgaactcacgaggcggagcttgtagtgagccaagatcgcaccactgcactccagcctggtcaacagagtgagactcagtctcaaaaaaaaaaaaaaaaaaaaaaacttttaggataggatagtaaaaatcatgttttgaaagcttatgtaatgctggccgggcacggtggctcacgcatgttg

SEQ ID NO: 507859 - DNA, 201 bp, Homo sapiens
gccttcaagacccagtcaaagcagtcttacgcgattgctgctttcctggaatagcaagttttaaatagtaaatgactgtaaagaaactcattagggaaggcatattttacctccttttctgtcgtcattacaatagaggattcaatcaagtttaatttattcagccaggtgcccgtggaagctgcctcgtttgtttggctt

SEQ ID NO: 507860 - DNA, 201 bp, Homo sapiens
actccagcctgggcaataaagtgagacaccatcttaaaaaaaaagaaaaaagcgctgggagcagtggctcacctctgtaatcccagcactttgggaggccraggtgggcggatcatgaggtcaggagatcgggaccatcctggctaacacagtgaaatcccatctctactaaaaatacaaaaaattagccggatgtggtgg

SEQ ID NO: 507861 - DNA, 201 bp, Homo sapiens
aatacaaaaaattagccggatgtggtggcgggcacctgtagtcccagctactcgggaggctgaggcgggagaatggcgtgaacccaggcggcggagcttgyagtgagccgagattgtgccactgcactccagactgggtgacagagtgagactctgtctcaaaaaaaaaaaaagaaaagaaaaaagcttatgtaatgctat

SEQ ID NO: 507862 - DNA, 201 bp, Homo sapiens
ccattcattgcagtagcttctggtacatagtatgtgttcagtaaacactggttgaattaaaacttagagaattggaaccaaaagacaattggaactgaagmcaatggaaacagaaaaactatatattaaaggttctcaagtgttggtcagaaaaagtatgcaaaacttggaaataaggcaaaaagctaaatagcacatcct

SEQ ID NO: 507863 - DNA, 201 bp, Homo sapiens
cccctaaaggtctcacctcttaaactgttgcattggggaataacttccaacatgaattctggaagggacacagacattcaaaccatcacactatttatggkgttaccacaatgtcttgtttaccattgctgtgtagtaattttgaaatcaggaaatgtgaatcctgtaatagaacttgccacacaggctgaggtttcaggg

SEQ ID NO: 507864 - DNA, 201 bp, Homo sapiens
aaccaatgcacatcttacacatattgattaatgtctcatgtctccctaaaatgtatacaagcaagttgcacaccgaccaccttgggcacatgtcgttaggwcctcctgaagctgtgtcacaggcacatccttaaccttggcaaaataaactaagctgattaagacctgtctcagataccttttggtttacaatagcaaaac

SEQ ID NO: 507865 - DNA, 201 bp, Homo sapiens
agcagaaatgtatttctgctcagttctagaggctgggaagtacaagatcaaggtgccagcagagttggtgtctggcgagggctgctctctgcttccaaggkggtaccttccttctgtgtcttccatggtggaagagcagaagcgaaaaaaaaaaaaaaaaaaaaaaaaggcctaggctagttccccatgtcccttttataa

SEQ ID NO: 507866 - DNA, 201 bp, Homo sapiens
aaattagccggatgtggtggcgggcacctgtagtcccagctactcgggaggctgaggcgggagaatggcgtgaacccaggcggcggagcttgcagtgagcygagattgtgccactgcactccagactgggtgacagagtgagactctgtctcaaaaaaaaaaaaagaaaagaaaaaagcttatgtaatgctatggcactgc

SEQ ID NO: 507867 - DNA, 201 bp, Homo sapiens
actaaaaatacaaaattagctggacatgatggcgcatgcctgtaatcccagatattcgggaggctgaggcagaagaattgcttgaaccagggaggtggagrttgcagtaagccaagatcgtgccattgcactccagcctggacaagagtgaaactccatctaaaaaaaaaaaatggcttcacatatatttgatgccaggct

SEQ ID NO: 507868 - DNA, 201 bp, Homo sapiens
agcggtaaagtttccctgtccccctcgcagagcatgcaatgggggtgtggctcacttcttcagtgcctggctgctcagacctctaggggagcatacagacrggcaggctgtggggctccgaccccacggcagtgtctaggggtgaatgtttacggctcctgaagccccagtgggcatgttacaggatgcttttagtttacc

SEQ ID NO: 507869 - DNA, 201 bp, Homo sapiens
ttataataattattatatttagctttttaacttccattctctcatgagtgtaaagtggaattttctagaacctacataatatcacaacatattgaatacasaactgattagataatctgtcttctagtaggtcagatattaacgagatttgcaaaaatgtaaaacaagggcattctactcatatgttttatttttggaaaa

SEQ ID NO: 507870 - DNA, 201 bp, Homo sapiens
cagaggctttttcactgttgtgggtaagttgatcaaattttgtgtttcactatgatttgaaaatcttggttgaggtggtctttaaaaatccttaaaataayagaatggagagatcttcctaagctatcaattggagggaattattgttcagatcatcctctatgtttcctgatgggatctaaagggattacagtaccgttt

SEQ ID NO: 507871 - DNA, 201 bp, Homo sapiens
tccttgacagtaaagacttagtttcattcactgatacagccctagacctagaccaacacctgttgtatatactagacactcaaaaaatatgtgttgaatgyatgaatggttatagtatgtaaaaaaatcccacaaaggatttacacagaattgtaaataataactgtattaggttaagaaccttggaaaataaagaacaag

SEQ ID NO: 507872 - DNA, 201 bp, Homo sapiens
ctctcaaagtggtgccccgtggtccttggtggggagggccctatgctttcaagaggcctccaaggtcaaattagttttataataattattatatttagctytttaacttccattctctcatgagtgtaaagtggaattttctagaacctacataatatcacaacatattgaatacagaactgattagataatctgtcttct

SEQ ID NO: 507873 - DNA, 201 bp, Homo sapiens
ctttttcactgttgtgggtaagttgatcaaattttgtgtttcactatgatttgaaaatcttggttgaggtggtctttaaaaatccttaaaataacagaatrgagagatcttcctaagctatcaattggagggaattattgttcagatcatcctctatgtttcctgatgggatctaaagggattacagtaccgtttccggac

SEQ ID NO: 507874 - DNA, 201 bp, Homo sapiens
gccgagatcacaccactgcactccagtctgggcaacagagtgagactctgtctcacacacacacaaaaaactatcaatctgtttaacatttaacttcatakagtctgggtcctaattgatttgagagcaaagactctcaaagtggtgccccgtggtccttggtggggagggccctatgctttcaagaggcctccaaggtca

SEQ ID NO: 507875 - DNA, 201 bp, Homo sapiens
gggtggaggttgcagtgagccgagatcacaccactgcactccagtctgggcaacagagtgagactctgtctcacacacacacaaaaaactatcaatctgtktaacatttaacttcatagagtctgggtcctaattgatttgagagcaaagactctcaaagtggtgccccgtggtccttggtggggagggccctatgctttc

SEQ ID NO: 507876 - DNA, 201 bp, Homo sapiens
aagcatggtggtgagtgcctgtagtcccagctactcactcaggaggctgaggtgggagaactgcttgaacccaggaggtggatggaggttgcagtgaccaraaatctcaccactacactcctgcctgtttgacagagtgagaccctgccaaaaaaaaaaaaaaaagaaaggaagaaagaaagaaagaaaaagagaaaagaa

SEQ ID NO: 507877 - DNA, 201 bp, Homo sapiens
tgtagtcacaaggttgtacaaccatcaccactagtttcaaaacatttttatcatcccaaagtgaaactccgtagccattattagtcactcctcatccttcmttccccctaagctctggcagccactagtctatagtttgtctctgtggatttacctattttggacatttcctataaaaagggaagctttttgtatatagct

SEQ ID NO: 507878 - DNA, 201 bp, Homo sapiens
gtgtagtcacaaggttgtacaaccatcaccactagtttcaaaacatttttatcatcccaaagtgaaactccgtagccattattagtcactcctcatccttscttccccctaagctctggcagccactagtctatagtttgtctctgtggatttacctattttggacatttcctataaaaagggaagctttttgtatatagc

SEQ ID NO: 507879 - DNA, 201 bp, Homo sapiens
cctctaactcccaggctcaagtgatcctcccatctcagcctcctgagtagctgggatcacgggtgtgcatcacatccctggcttctattctaaatgtacawtttcagttcttctgatccaaactgatcacagactaattttctctttgtagtaagacacaatctgaagtgcaatgaagaactgggaggcaaggctcagttt

SEQ ID NO: 507880 - DNA, 201 bp, Homo sapiens
gaaagggatgatgcgtggggtaacattgagactgaactgaagtgtcttgagctagtaattcacactgcgttcaacagatgccaagtatcactgcattcccmttgaacatttaagatatcccatcgtcttctgtgagtttgctgtggttccccagggcatcttggcataccatttgagaatcacaggtctggggtaagggcc

SEQ ID NO: 507881 - DNA, 201 bp, Homo sapiens
ccattatgcctggccgaatcttctgagattatgccagaaattattattatattttttgagatggagtttcgcccttttgcccaggctggagtgaagtggcrtgatcttggcttactgcaacctctgtgcccaggttcaagcaattctcctgcctcagcttcccaagtagctgggactacaggtgcccaccaccactcctgg

SEQ ID NO: 507882 - DNA, 201 bp, Homo sapiens
caccactcctggctaatttttgtatttttagtagagttggggtttcaccatgttggccaggctggtctcgaactcctgacctcaggtgacccacccgcctyggcctcccaacgtgctaggattacaggcgtaagccaccatgcccggcctattatgccagaaattctatgatgtaaaccaagcaagaggcatgccatgaga

SEQ ID NO: 507883 - DNA, 201 bp, Homo sapiens
agaatggcgtgaacctgggtggcggagcttgtagtgagctgagatcgcaccactgcactccagcctggatgacagagccagactccatctcaaaaaaaaataataataaataaaataaaataaataaataaataaataaaatagagccaggtacagtggctcactcctataatcccagcactttgggaggctgaggcttta

SEQ ID NO: 507884 - DNA, 201 bp, Homo sapiens
aaccctactactgtgctgtacactatttagaaatccacataagaaagggttcttcaatgtttggggggtccaagataaaaactatctcactttgagaaatkagaaaatcattcctgtgattctactctgttaaaccttgtcacccaaaatccatttagaatgaaaggcagcacaaggcagcaccacgttattttcttacag

SEQ ID NO: 507885 - DNA, 201 bp, Homo sapiens
gagataggaggatcacttatacccaggagattgaggctgcagtgaggtatgttcacgccactgcattccagtctgggcgacagagcaagaccctgtctcaaatgaatagaatagaatagaatagaatagaatagaatagaatagaataggccatactgtcatttatttatttattttttttgaaaatacagatgggagccg

SEQ ID NO: 507886 - DNA, 201 bp, Homo sapiens
agataggaggatcacttatacccaggagattgaggctgcagtgaggtatgttcacgccactgcattccagtctgggcgacagagcaagaccctgtctcaaatgaatagaatagaatagaatagaatagaatagaatagaatagaataggccatactgtcatttatttatttattttttttgaaaatacagatgggagccgg

SEQ ID NO: 507887 - DNA, 201 bp, Homo sapiens
gataggaggatcacttatacccaggagattgaggctgcagtgaggtatgttcacgccactgcattccagtctgggcgacagagcaagaccctgtctcaaatgaatagaatagaatagaatagaatagaatagaatagaatagaataggccatactgtcatttatttatttattttttttgaaaatacagatgggagccggg

SEQ ID NO: 507888 - DNA, 201 bp, Homo sapiens
aaacagaaagctaaatacggcacattctcacttataagtgggagctaaatactgtgtccacatggacatagagagtgaagtgataaacaatggggactcaraagggtggcggggctgggtgcagtggctcaggcctgtaatcccaacactctgggaggccaaggcggacagatcacttgaggtcaggagtttgagaccagc

SEQ ID NO: 507889 - DNA, 201 bp, Homo sapiens
ataggaggatcacttatacccaggagattgaggctgcagtgaggtatgttcacgccactgcattccagtctgggcgacagagcaagaccctgtctcaaatgaatagaatagaatagaatagaatagaatagaatagaatagaataggccatactgtcatttatttatttattttttttgaaaatacagatgggagccgggc

SEQ ID NO: 507890 - DNA, 201 bp, Homo sapiens
tggagtaccaaaccttttagagaaaagtgcagctgaacatccagtggtgggcaagaacaagtagacagctcaaagctaggacactaggaaaaataaaattytgagagaggttggggccaggagtatgtgcatgtgaggacacagtaaatgtcgtatgagataaagcctagaaataagaccagactgatgtgttaaaagaag

SEQ ID NO: 507891 - DNA, 201 bp, Homo sapiens
gaggatcacttatacccaggagattgaggctgcagtgaggtatgttcacgccactgcattccagtctgggcgacagagcaagaccctgtctcaaatgaatagaatagaatagaatagaatagaatagaatagaatagaataggccatactgtcatttatttatttattttttttgaaaatacagatgggagccgggcatgg

SEQ ID NO: 507892 - DNA, 201 bp, Homo sapiens
catatatcatcgtttcctatattttaaaaatataattttttttggagtggagtaccaaaccttttagagaaaagtgcagctgaacatccagtggtgggcamgaacaagtagacagctcaaagctaggacactaggaaaaataaaattctgagagaggttggggccaggagtatgtgcatgtgaggacacagtaaatgtcgt

SEQ ID NO: 507893 - DNA, 201 bp, Homo sapiens
gaggcaggagaatcacttgaactcaggaggcaaaggttgcagtgagccaagatcccaccgctgcactccagcctgggtgacaaggcaagactctgtctccaaaaaaaaaaaaaacaaaacagacagggtctcactaagttagccacacaggtctctaactactggcctcaagcaatcctcctgccttagtctctcaaagtg

SEQ ID NO: 507894 - DNA, 201 bp, Homo sapiens
tcccaggaggttgaggctgcagtgagctataatcacaccactgcactccaacctgggttggagactctggaaaataaaaatataaagagagagagagagaragaaagaaagaaagatagattaaaaaagaaagaaagaaagaaagaaagaaagaaagaaagaaagaaagaaagaaagaaagaaagaaagaaaaaacttaag

SEQ ID NO: 507895 - DNA, 201 bp, Homo sapiens
tggaggaggaggctaatacctaccacattgggctgattgtgaagatcgaatgaggtaatgtctgtaacatatgtggtgtggtgcctggcacatagtaggtsctccatatatcatcgtttcctatattttaaaaatataattttttttggagtggagtaccaaaccttttagagaaaagtgcagctgaacatccagtggtgg

SEQ ID NO: 507896 - DNA, 201 bp, Homo sapiens
tcacttctttacaaatttcttattcttttgttaaacccaaattctaaccactcctttgatggcattgtttatcactgagtttccacatgtttacatgtcartctggtttttttcagtttaatttgcagcccccaccccaggagggcagaagaaaaagggttctttccctccctacaagatgagtaagattttttttctttt

SEQ ID NO: 507897 - DNA, 201 bp, Homo sapiens
tgaggttaattgactctcacttctcctttctctgaagggcctgcagaactcttttagttctgacgtggccccagtagttttttggttttatttttttgagrtagggactctctcacccaggctggggtacagtggcacgatcatagctcactgaagcctcagcctcccaggctcaagtgatccttcctcctcagcctcttg

SEQ ID NO: 507898 - DNA, 201 bp, Homo sapiens
ggcaaactgtcttaggttccaaaagatagcctgactggtaaaagaaattgaaaacaggtgttttcatttgctttgtattaaaagaattgaaaggccgggcrcgatggctcatgcctgtaatcccagcactttgggaggctgaggcgggcagatcacaaggtcaggagatggagaccatcctggctaacacgatgataccct

SEQ ID NO: 507899 - DNA, 201 bp, Homo sapiens
gccattctcctgcctcagcctcccaagtagctgggactacaggcgcctaccaccacacctggctaatttttttgtgtttttagtagagatggggtttcacygtgttagccaggatggtctcgatctcctgacctcatgatccgcccaccttggcctcccaaagtgctgggattataggcgtgagccaccgcgaccggcctt

SEQ ID NO: 507900 - DNA, 201 bp, Homo sapiens
actacaggtgcccgccaccagactcagttaatttttttgtatttttagtagagatggggtttcaccgtgttagccaggatggtatcgatctcctgacctcrtgatccacctgcctcagcctcccaaagtgctgggattacaggcatgagccaccatacccagccaaagcctgtattttctttgttcaacaagactaatcag

SEQ ID NO: 507901 - DNA, 201 bp, Homo sapiens
ctcccgagtagctgggaccacaggtgcatgccaccatgcctggctaattttttgtatttttagtagagatggggtttcaccgtgtcagccaggatggtctygatctcctgacctcgtgatctgcccgtcttggcctgccaaagtgctaggattacaggcatgagccaccacacccggcccattttgctcttttttacacaa

SEQ ID NO: 507902 - DNA, 201 bp, Homo sapiens
acagggagagtgagtaatcatctgcctaaattttttaaataattctgatttagcatttattaatttgaataaacttactccaccctctccaggctccttamtcccgaattctgttccactgtctaggctttaggtcaggctcaaggacaagttatttagattttatttctatcttctgcctttaaaaacatagataaaatt

SEQ ID NO: 507903 - DNA, 201 bp, Homo sapiens
gaccacaggtgcatgccaccatgcctggctaattttttgtatttttagtagagatggggtttcaccgtgtcagccaggatggtcttgatctcctgacctcrtgatctgcccgtcttggcctgccaaagtgctaggattacaggcatgagccaccacacccggcccattttgctcttttttacacaagcaacataagctata

SEQ ID NO: 507904 - DNA, 201 bp, Homo sapiens
cttgggaggtcgaggctgcggtgagccaagatcatgtcactgcactccagcctgggcaacagaaagagatcctgtctcaaaaaaaaaattgctctccctcracagcctgcttagacggcacctggcttcaacaaataatgccttgaacattagtagcagtgctggggaggaaatgagctgaacccaatacactggagatgg

SEQ ID NO: 507905 - DNA, 201 bp, Homo sapiens
taagatggtcccatatgggggtgatgggagacagtaacagatcatcgggcattagattctcataaggacactcaacctagattcctgaatgctctggtcaygatagggttcatgctcctatgataatctagtgccaccgctgatctgacagaaggtggagctcaggtggtaatgtgagtgatggggagcagctgtaaatac

SEQ ID NO: 507906 - DNA, 201 bp, Homo sapiens
aaagagatcctgtctcaaaaaaaaaattgctctccctcgacagcctgcttagacggcacctggcttcaacaaataatgccttgaacattagtagcagtgcyggggaggaaatgagctgaacccaatacactggagatggtggccagggggcctctcacaattcctgctcccacctcatcctgtagcaaaagaagcactttc

SEQ ID NO: 507907 - DNA, 201 bp, Homo sapiens
ttcgttttgactagttttctatcatttcccttcttcatcaaacgtacgttgaatttttatttttttctgtttgaactttcaaatcagcctgtctttttttwaaaaaaatccttagaatttgggagaggagttattataaattaatttagaaagaattgaagttttatcatgttgaagcatcctatattatcaagttatgcc

SEQ ID NO: 507908 - DNA, 201 bp, Homo sapiens
attctatgtgtcagcttgactgggttgcaatgtgttcagacagttagtcaaacattcctctgggtgttcctctgagggtatttctgaaagagatgaacatytgagcccgggcgtggtgtctcacgcctgtaatccgaacactttgggaggctgaaggaggtggatcacctggggtcaggagtttgagaacagcctggccaa

SEQ ID NO: 507909 - DNA, 201 bp, Homo sapiens
tataaaattaccacatcctttccctgtaaaaccattttttcccttttctaaaagtttaattctgttataataaacttaaaacttaaccatatttttgagayataattcaagcacaaataaatttcaccattttaaagtgtgtaggtcagtgatttttagtgtagtcacaaggttgtacaaccatcaccactagtttcaaaa

SEQ ID NO: 507910 - DNA, 201 bp, Homo sapiens
gtgtcagcttgactgggttgcaatgtgttcagacagttagtcaaacattcctctgggtgttcctctgagggtatttctgaaagagatgaacatttgagccygggcgtggtgtctcacgcctgtaatccgaacactttgggaggctgaaggaggtggatcacctggggtcaggagtttgagaacagcctggccaacatgatg

SEQ ID NO: 507911 - DNA, 201 bp, Homo sapiens
tacttctctaataaacttgctttcactttactttatgaactcgccccaaattctttcttgtgcaggatccagaaccttctcttggggtctggattgggacmcctttcctgtaacagtattagtcataactattatctgaaaaagtatatttatatggtactttacaaattcaattttgcacaatagactctgacttatgtc

SEQ ID NO: 507912 - DNA, 201 bp, Homo sapiens
tgggcaacatggtgagattccagttctacaaaaaaaaaaaatgtttttggccgggcgcggtggctcacacctgtaatcccagcactttgggaggccgaggygggtggatcacgaggtcaggagatcgagaccatcctggctaacatggtgaaaccccgtctctactaaaaatacagaaaactagccgggcatggtggcggg

SEQ ID NO: 507913 - DNA, 201 bp, Homo sapiens
gtgatgaaactgtggaattgctgacattgtcacttcctctttatctaacttttgctttggtgatttgtattacaggctcagtgctcttacttttaagacaytggagagaatgaaaaaatatgtattcattgatgaaaatgttcaaaaacagaccttaatctggctttcaagccaacagaaaacaagcggctgctttaagaa

SEQ ID NO: 507914 - DNA, 201 bp, Homo sapiens
aaaatgaaaaataaaagaaagctatggagaagttaatatgttggatgattgaagagtagcaggattatagcattcactttggatgttgttccaaatccagytgttcctaataataatattattaggtgggtaaagcacagaaagcccttttaacttatgtgtgtttttaaaaaagttaagaatagtctaaaagatgattct

SEQ ID NO: 507915 - DNA, 201 bp, Homo sapiens
aggcgggtggatcacgaggtcaggagatcgagaccatcctggctaacatggtgaaaccccgtctctactaaaaatacagaaaactagccgggcatggtggygggcacctgtagtcccagctacgcaggaggctgaggtaggagaatggcatgaacccgggacgcggagcttgcagtgagccaagattgcaccaccacactc

SEQ ID NO: 507916 - DNA, 201 bp, Homo sapiens
gtgaaaccccgtctctactaaaaatacagaaaactagccgggcatggtggcgggcacctgtagtcccagctacgcaggaggctgaggtaggagaatggcawgaacccgggacgcggagcttgcagtgagccaagattgcaccaccacactccagcctgggcaacagagcgagactccatctcaaaaaaaaaaaattgtttt

SEQ ID NO: 507917 - DNA, 201 bp, Homo sapiens
gctacgcaggaggctgaggtaggagaatggcatgaacccgggacgcggagcttgcagtgagccaagattgcaccaccacactccagcctgggcaacagagygagactccatctcaaaaaaaaaaaattgtttttaattagttgggcttggtggggcgattctagtcccaggtacaagggacactgaggcaggaggattgct

SEQ ID NO: 507918 - DNA, 201 bp, Homo sapiens
tgaggtaggagaatggcatgaacccgggacgcggagcttgcagtgagccaagattgcaccaccacactccagcctgggcaacagagcgagactccatctcaaaaaaaaaaaattgtttttaattagttgggcttggtggggcgattctagtcccaggtacaagggacactgaggcaggaggattgcttgagcccaggagtt

SEQ ID NO: 507919 - DNA, 201 bp, Homo sapiens
ggattgcttgagcccaggagtttggggctgctgcagtgagccgagatcacaccattgcactttagcctgagtgacagaatgagaccctgtctcaaaaaaaraaaaaagaaaagaagaagaagaagaagaaattgaggctcaaggaggttagggtgaattgctcaaagccattctgatgtgaccgacacctagagtgaacat

SEQ ID NO: 507920 - DNA, 201 bp, Homo sapiens
tggctcactcctgtaatcccagcactttgggaggctgaagtgggtggatcacttcacgtcaggagttcgagaccagcctggcgaaaatggtaaaacccccrtctctactaaaaatacaaaaattagccaggtgtggtggcaggcacctgtaatcccagctacttgggaggctgagacaggagaattgcttgaacctgggag

SEQ ID NO: 507921 - DNA, 201 bp, Homo sapiens
agacaggagaattgcttgaacctgggaggtggaggtttcagcgagacgagatcgtgccattgcactccagcctgggtgaggacagtgaaactccatctccmaaaaaacaaaaaaaaaaaaaaaaaaagagagagagagagaaactttatgatttactccatggaacaaatatcatatagaactgtaacatttaaaagtcag

SEQ ID NO: 507922 - DNA, 201 bp, Homo sapiens
ttggaagatactaacctgtgtgccatccacgctaagagagtcaccatcatgcccaaagacatccagttggctcgccggatacggggagagagagcttaagkgaaggcagtttttatggcattttgtagtaaattctgtaaaatactttggtttaattggtgactttttttgtaagaaattgtttatatgttgcatttgtac

SEQ ID NO: 507923 - DNA, 201 bp, Homo sapiens
tttcactcaggatgaatgcgaaaagtgactgtttacagacctcagtgatgtcagcactgttgctcaggagtgacaagttgttaatatgcaaaacggatgcrtgatatttcttgcttctcatgatgcatgtttctgtatgttaatgacttgttgggtagctattaaggtactagaattgataaatgtgtacaacagggtcct

SEQ ID NO: 507924 - DNA, 201 bp, Homo sapiens
tgacttgttgggtagctattaaggtactagaattgataaatgtgtacaacagggtccttttgcaataaaactggttatgacttgatccaagtgtttaacarttggggctgttaagtctgaccatacatcactgtgatagaatgtaggctttttcaagggtgaagatacaaaccttaaccacagtgtaacttatagtttcct

SEQ ID NO: 507925 - DNA, 201 bp, Homo sapiens
ccagtggtgggcaagaacaagtagacagctcaaagctaggacactaggaaaaataaaattctgagagaggttggggccaggagtatgtgcatgtgaggacmcagtaaatgtcgtatgagataaagcctagaaataagaccagactgatgtgttaaaagaagaaaattaactacaagttagaaaggcatgcttttctactcg

SEQ ID NO: 507926 - DNA, 201 bp, Homo sapiens
tccgctcactgcaacctccacctctcagatgcaagcaattctcatgcctcagcctcccaattagctgggattataggcacctgccaccacactcggctgattttttgtatttttactacagacgaggtttcaccatattggccaggctggtctcgaactcctgatctcaggtgatctgcctgcctcggcctcccaaggtgc

SEQ ID NO: 507927 - DNA, 201 bp, Homo sapiens
ccgagtagctgagactacaggcacctgccaccacgcccggctaattttttgtattgttagtggagacagggtttcactgtgttagccagggtggtctcgakctcctgacctcatgatctgcccgcctcggcctcccaaagtcctgggattacaggcgtgagccactgcgcccggctccacctttgctgattttaagatgag

SEQ ID NO: 507928 - DNA, 201 bp, Homo sapiens
aatgtcacttgtggctattgagcacttgaaatgaggtcagtcagaattgagatgcactgacagtgtaaagtacatactggatttcaaagatgtggtacagaaaaaaaaaaagaatgtagatatctcattaatacgtctgtatattaattgtatggtaaaatggaaatatttggggtgtataagcttgcataaaatataccg

SEQ ID NO: 507929 - DNA, 201 bp, Homo sapiens
caggctggagggcaatgatacaacctccgcctcccaggttcaagtgattctcctgcctcagcctccccaggattacaggcatgggcccatgcccagttaattttttttttttttttctggatttttagtagagacagagtttctccatgttggtcaggctggtctcgaactcccgacctcaggtgatctgccagcctcggc

SEQ ID NO: 507930 - DNA, 201 bp, Homo sapiens
ggggctgttaagtctgaccatacatcactgtgatagaatgtaggctttttcaagggtgaagatacaaaccttaaccacagtgtaacttatagtttcctttaaaaaaaaaaaattaaacctggcagctatagaatacaatatgtgcatttataatagctattttatatattgtagtgtcaacattttcaaattaaatgtttt

SEQ ID NO: 507931 - DNA, 201 bp, Homo sapiens
gaactgactagcattttaacttgcaaaaaaagacaagttagtacagaactagcacatctaatttttaaaaaagtatttgaactataacatggtgaaatccygtctctattaaaaatacaaaaattagctggatgtggtggtgggcgcctgtaatcccagctactgtcaaggctgaggcaggagaattgcctgaacccagga

SEQ ID NO: 507932 - DNA, 201 bp, Homo sapiens
gctggagtacagtggtgcagtcacagctcattgcagtctggaactccagggctcaagagatcctcctgcctcagcctcctgagtagctgggactacaggckcatgccaccatgcctggctaattttttaaaaaaaatttttttgcagagatggggtctcactgtgttggccaggctggtctcaaactcctgggctcaagtt

SEQ ID NO: 507933 - DNA, 201 bp, Homo sapiens
actgtaaacagcccatgaatgtgggtcgtgaccagcagagaatgggctttactatttctcaagatggagctgaacttaaaatggtgctactctggccctcmtaggctcctggttccctaacattacccccactaattttgagggaacccttaatctttttgttttgttttgtttttttgagacagggtctcgctctgccac

SEQ ID NO: 507934 - DNA, 201 bp, Homo sapiens
tgttctcctcctgatatatgtgatgtgtgattttcagtctgtgcagaaccttaatactattttaaaatctgggtcttctaacaccaaacatagtaggggagggccttgaaggcctttagatgaaaggccacacactaacgcagagagactcagataactgcttttgtttagcacaaatcacatcaactgaaccattttaag

SEQ ID NO: 507935 - DNA, 201 bp, Homo sapiens
gagacagggtctcgctctgccacccaggctagagtgtggtggtgcgatcttggctcactgcagcctctgcttcccgggctcaagcgattctcgtgcctcakcctcccaagtatctgggattacaagcatgcgccactatgcccagctaagagagcccttaattttaagaggagaggagggtgaaggtcattcttctgtaac

SEQ ID NO: 507936 - DNA, 201 bp, Homo sapiens
tatgaaaggtggagaacatgcattaaaaatgggcaaattctggcctgggcatggtggcttatgcctgtaatcccagcacttgggaggctgaagcgggcagrtcatctgaggtcaggagtttgagaccagcctggccaaaataatgaaatcctgtctctactaaaactacaaaaattagctgggcatggtagcacacctgta

SEQ ID NO: 507937 - DNA, 201 bp, Homo sapiens
caagcgattctcgtgcctcatcctcccaagtatctgggattacaagcatgcgccactatgcccagctaagagagcccttaattttaagaggagaggagggygaaggtcattcttctgtaacttcttcctgctgatagtggacatcgattgctgggacagggtcctttcacgaaagcatgcagtgagcctcctcagggagcc

SEQ ID NO: 507938 - DNA, 201 bp, Homo sapiens
gaaaggtggagaacatgcattaaaaatgggcaaattctggcctgggcatggtggcttatgcctgtaatcccagcacttgggaggctgaagcgggcagatcrtctgaggtcaggagtttgagaccagcctggccaaaataatgaaatcctgtctctactaaaactacaaaaattagctgggcatggtagcacacctgtagtc

SEQ ID NO: 507939 - DNA, 201 bp, Homo sapiens
cctcccaaagtgctgggattacaggtgtgagccactgcgcctggcctgaagagaagctgttgatcctttattggctcacaggagtgttccagaacagcggyccctgtgtgagatgcctgtggcatgtagctccaggagagacaggtttaattccggataagtgtacccaactgcatactgatattcacaaagtgccttttg

SEQ ID NO: 507940 - DNA, 201 bp, Homo sapiens
ctactttgcatctcattttgtggaagtgattttcagtgtcaattgtttgtttagacacagagtttggccctgttgcccaggctggaatggatcacagctcrttgcaacctccacctcctgggttcaagccatcctcccacctcagcctcctgagtagctgggactacaagcacctgccaccacgcccagctaatttttata

SEQ ID NO: 507941 - DNA, 201 bp, Homo sapiens
gatattcacaaagtgccttttgtacctgtcgaaaattaatatatttttgcaattggtggctgttttcatgtattagaaaatctgcagtcaagaaaggcctrctgccccggcacagtggctcacgcctgtaatcctagcactctgggaggctgagatgggtggatcacctgaggtcagaagttcaagaccagcctggccaac

SEQ ID NO: 507942 - DNA, 201 bp, Homo sapiens
tattgctaactaaagtctacactctatttagatttcttttttctttcttttttttttttttgagatggagttttgctcttgttgcccaggctggagtgcartggcgcgttctcagctcactgcagcctccacctcccgggttcaggcaattcttctgcctcagcctcccaagtagctgggactacaggcatgcaccaccat

SEQ ID NO: 507943 - DNA, 201 bp, Homo sapiens
aaattatagaattcagtaataatattgaataactatagatcattatataaaacatttttctcaatgcaaaacataaatacatttaagttttctattacagrgagcaaaaatacttttagttagaagctttcagaatctgaggggacatcaacaaataaaggataaatttatctataaatatggaatatggccatgtgctgt

SEQ ID NO: 507944 - DNA, 201 bp, Homo sapiens
tctggaaatggaaatccccataacatgtaaactcacatagagtatataaatccaactttttcacttgattttcagaaatactgtgcatatgtgcaaaagtmaagtcatggtctggccgggcacggtggcccatgcctgtaatcccagccctttgggaggctgaggcgggtggatcacttgaagtctggagttcaagaccag

SEQ ID NO: 507945 - DNA, 201 bp, Homo sapiens
gaatgagaattactgtcacttcctatccttgtcaatatttggtatagtcagcttttgggacttaagccattctaatcaatatgcagtggttgggatgtaatttttttttttttttttttttttttgtgacagtctcactttgtcatccaggctgaagtgcagtggcatgatctcagatcactacaacctccacctcttggg

SEQ ID NO: 507946 - DNA, 201 bp, Homo sapiens
ttacaatcatgacagaaggggaaacaaaggtgtccttcttcacatggcggcagcaagaagtgctgagcaaagcccgggaaaataatccactcactatcacragaacagcatgagggtcactgcccccatgattcaatcacctccttctgggtccttcccacgacatgtagggattatgggaaccacagttcaagatgagat

SEQ ID NO: 507947 - DNA, 201 bp, Homo sapiens
gaaatggaaatccccataacatgtaaactcacatagagtatataaatccaactttttcacttgattttcagaaatactgtgcatatgtgcaaaagtaaagkcatggtctggccgggcacggtggcccatgcctgtaatcccagccctttgggaggctgaggcgggtggatcacttgaagtctggagttcaagaccagcctg

SEQ ID NO: 507948 - DNA, 201 bp, Homo sapiens
aggacactcctccaggagacctctaaagaggcataaccaccaacacagagaccatgacagcttcgagaaaccagcactcctgcctctcagggagtgttccygcactttcacgtagggcaagggctgcatctagagctgcccttactctagaacagggaaaggcagctggagcatcctccacaaatcacctgccccctctcc

SEQ ID NO: 507949 - DNA, 201 bp, Homo sapiens
aatgagaattactgtcacttcctatccttgtcaatatttggtatagtcagcttttgggacttaagccattctaatcaatatgcagtggttgggatgtaatttttttttttttttttttttttttgtgacagtctcactttgtcatccaggctgaagtgcagtggcatgatctcagatcactacaacctccacctcttgggt

SEQ ID NO: 507950 - DNA, 201 bp, Homo sapiens
gtctagtttcaccatcaagtatgcctatcaggaggacattaatttattcattcaacaattattaaaggcctactatgtctcaggcactttggtaagtgggrgtgggcatactgcagtacacaaaagacatgtgatttgtgctcccagggaactttcagtctatggggaaaaaagatactgaacaaattaacatatcaatga

SEQ ID NO: 507951 - DNA, 201 bp, Homo sapiens
aatccaactttttcacttgattttcagaaatactgtgcatatgtgcaaaagtaaagtcatggtctggccgggcacggtggcccatgcctgtaatcccagcmctttgggaggctgaggcgggtggatcacttgaagtctggagttcaagaccagcctggccaatatggtgaaacctcgtctctaccaaaaatacaaaaatta

SEQ ID NO: 507952 - DNA, 201 bp, Homo sapiens
caactgactcttctgcctcagcctccccagtagctgggattacaggcacccgccactgtgcccagctaattttttatttttagtagagacagggatttcastatgttggccaggctggtctcgaactcctgacctcaagtgatccacctgcctcggcctcccaagtgctaggattacaggtgtgagccactaagcctggcc

SEQ ID NO: 507953 - DNA, 201 bp, Homo sapiens
aagcgatcctcccacctcagcctcccaagtagctgggactacagatgcatgctaccacacccagataatttttttgtatttttggtagagacagggtttcmccatattgcccaggctagtctcgaactcctgacgtcaagcaattaaccatcttggcctcccaaagtgctgggattacagatgtcatctaccacacccagc

SEQ ID NO: 507954 - DNA, 201 bp, Homo sapiens
ttcctcacaagtccccaaagtccactgtatcatttttatgcctttgcatgctcatagcttagctctcacttatgagcgagaacatataatgtttggttttycattcctgagtcacttcacttagaataatagtctccagtcccatccaggttgctgtgaatgccattaatacattcctttttatggctaagtagcattcta

SEQ ID NO: 507955 - DNA, 201 bp, Homo sapiens
tcacttgattttcagaaatactgtgcatatgtgcaaaagtaaagtcatggtctggccgggcacggtggcccatgcctgtaatcccagccctttgggaggcwgaggcgggtggatcacttgaagtctggagttcaagaccagcctggccaatatggtgaaacctcgtctctaccaaaaatacaaaaattagccgggcttgat

SEQ ID NO: 507956 - DNA, 201 bp, Homo sapiens
ctccaacccagagggcctcgccttgccacgcccaggctgagaggacttccaccctagagaatctctcatccttttccctgttctccctgcgccactccttytcctcctcccaactcaccttgtcattcactggaacgaagttgctatccatggtgacaatgcggaaatacactggaaaggaacaggcatcattagcaaagg

SEQ ID NO: 507957 - DNA, 201 bp, Homo sapiens
ccatgggcagtatggctgtgttgcacaggctagcctcaaactcctgaactcaagtgaccctcctgtctcagcctcgcaaatagctgggactatagaaataygccactgtgcctgtctcctattctcttttcttgtattagaattttgtggctgcatgttacaaatgtaagcaaaggagaaaaatccatcaggcatagtggc

SEQ ID NO: 507958 - DNA, 201 bp, Homo sapiens
ctgagtagctggggttacaagcatgaaccaccatgtttggctaattttttctttttctttctttctttctttctttcttttttttttgagacagattcttrctccgtagcccgagctagagtgcagtggtgcaatcttggctcattacaacctccgtctcccaggttcaagtgattctcctgcctcagcctcctgagtagc

SEQ ID NO: 507959 - DNA, 201 bp, Homo sapiens
tgtaatttttttttttttttttttttttttgtgacagtctcactttgtcatccaggctgaagtgcagtggcatgatctcagatcactacaacctccacctyttgggttccagtaattctcctgcctggccttcctgagtaactgggattatgggcacccaccaccatgcccagctaatttttgtatttttagtagagatga

SEQ ID NO: 507960 - DNA, 201 bp, Homo sapiens
tgcgcccggctccacctttgctgattttaagatgagattatgcccaatactttggcctgtccatttccccacctaccatattcctccacactgaaagtacsaaaggtcttgccctcagccactgccacagtgtaggtgcccagcattgcctctggtgccagttggaaggacaggtctacaatgccttgctcaggtaccact

SEQ ID NO: 507961 - DNA, 201 bp, Homo sapiens
tttttttttttttttttttttgtgacagtctcactttgtcatccaggctgaagtgcagtggcatgatctcagatcactacaacctccacctcttgggttcmagtaattctcctgcctggccttcctgagtaactgggattatgggcacccaccaccatgcccagctaatttttgtatttttagtagagatgaggtttcacc

SEQ ID NO: 507962 - DNA, 201 bp, Homo sapiens
ataatatttaaaaggtaaattttaagtacaggatgcttatgtaatttttcatttcctgggaatccaaattcttagacttggttattttcctgttttttttycccagcagtaaattctaagttagaggtaaaacttgtgtttaaaatgagaagtataggttgttcccccatctctcatccccaaaagtcatcaccaagattc

SEQ ID NO: 507963 - DNA, 201 bp, Homo sapiens
ttagttctgacgtggccccagtagttttttggttttatttttttgaggtagggactctctcacccaggctggggtacagtggcacgatcatagctcactgmagcctcagcctcccaggctcaagtgatccttcctcctcagcctcttgagtagctggggctaaaggcatgcgccatcacgcccagctaagctttgtttgtt

SEQ ID NO: 507964 - DNA, 201 bp, Homo sapiens
agtcctttgagaagaacattcaaatccaaagttctcgcccactatcctcagaatatagaatggaacccttttgatcaagatgcggtgaacatggtatgtgttttttttcccctcatttactctttagccttgttttcactttattaatatgaaggtagtgactgtattttgaatgtctaccttatttcatttcatttattc

SEQ ID NO: 507965 - DNA, 201 bp, Homo sapiens
taaggtgattttaagttagtttgagaagggaaggtaatatacagtactaaaagcttgattaaaagctgcttgaagatatttgcttgctaactatcttagtaaaaaaaaaaaaaggtatatttgaatagtgcctcaaagctcacagattacatgtagaaaagtctgttggcccatttttattgagtatgtgcctcatgctta

SEQ ID NO: 507966 - DNA, 201 bp, Homo sapiens
gggcaccatagcaagaccctgtctcaaaataggtaggtaggtaggtaggtaggtaggtaggtagaggtaggtaggtaggtaggtggatggatggatggatrgatagatagatagatagatagatagatagatagatagatagatagaagatagagagatagtcaaccttgagagggtcttagaaataaagtaggtcatagt

SEQ ID NO: 507967 - DNA, 201 bp, Homo sapiens
agacttcactgtaaacatttatatagagaagctgctcctgaccatcaccttccaccgtcttcccagcactcaggtcaccttaggttctcttagtaccttgtatacctttttgtagcacctatctcagttgcagttaaccaattacttagctagtagtcaactgtgtatctcgtgcttaatgtaagcaccatgagaacagga

SEQ ID NO: 507968 - DNA, 201 bp, Homo sapiens
gacttcactgtaaacatttatatagagaagctgctcctgaccatcaccttccaccgtcttcccagcactcaggtcaccttaggttctcttagtaccttgtatacctttttgtagcacctatctcagttgcagttaaccaattacttagctagtagtcaactgtgtatctcgtgcttaatgtaagcaccatgagaacaggag

SEQ ID NO: 507969 - DNA, 201 bp, Homo sapiens
tgtaacgtaaaatatccgtgctttgggatttgatgaactcttggaaagcattttctgcatcctgctggttgtggaagcgttttccctgcaaaaaattgtcsagatgcttgaagaagtggtcagttggcaagaggtcaggtgaacatggtggatgaggcatgactgcatagcccaattcgttaaacttttgaagtatttgtt

SEQ ID NO: 507970 - DNA, 201 bp, Homo sapiens
tcaggtgaacatggtggatgaggcatgactgcatagcccaattcgttaaacttttgaagtatttgttgtgtgatgtgcggtcaggcattgttgtggaaaakaattgggccctttctgttgaccagtgcccgctgcaggctttgcagtttttgatgcatctcatcgatttgctgagcatacttcttggatgtaatgatttcg

SEQ ID NO: 507971 - DNA, 201 bp, Homo sapiens
cggctcactgccaaactctgccgcccaggttcaagcaattctcatgcctcagcctcccaagtagctgggattacaggtgcctgccaccatgcctgactaatttttttgtatttttaatagagacggagtttcaccatgttggccaggctgttctcgaactcctgacctcaggtgatccacctgccttggcctcccaaagtg

SEQ ID NO: 507972 - DNA, 201 bp, Homo sapiens
acctctaccgcgcagagccaggcaatgagggaaaacagccagcgaggcccgccctccggtgcaaggctcggcatccgcggaggcccagggccggccccggygcggcgggcagaagcaagcgcggcggcccggcccagctccggtgggcggacggcgggacgcgcgagccggcggggcccgaggcccgggttccggggccgc

SEQ ID NO: 507973 - DNA, 201 bp, Homo sapiens
tacgaaaaacaaagtaaggttaagcaagtgaggaaaaaacatataaaaggccatgaactataacaaactggggctgataccactcgcaggtcagcctgatycgttgctgattgcattctgcttaacaaactgtttgctgccttgctacttgtatgtgtcatgtccaattctttgttgatggcactaagaacctgggacttg

SEQ ID NO: 507974 - DNA, 201 bp, Homo sapiens
gagccaagtctcccaattacaactgaggaggtgggagaaatacctggttacaggctgtcccaggattcctcggatggtaacggaccttgaggacagtcgtycaggacaggagattaacactgagaaggcggcgccagtgtccaggaggaagtcaatttcctggccctcaatagttgaacatacctggggatcagtgagggt

SEQ ID NO: 507975 - DNA, 201 bp, Homo sapiens
ataattgtacatattcatggagtatatagtgatgttttaatacatataaagtacaggaatcaaatcaggtcaattagtatattggtatccctcagattccscaggaaaataaatatattttaaagacaaaagaaaataaaaagtaggacaaacatcataacaattccagcttttattttttggaaaggaatgaaacagtgg

SEQ ID NO: 507976 - DNA, 201 bp, Homo sapiens
tgcagctgctgcaggcgttcttctcgctgcttcctcctggcctgctccgcctacaggaggcagacatgaaggaaaatcaccaggaagcccaaaaccaggcstctcctaaggagtctgggccactcagctcggcgcctcctcactgggggcagctctccttccccaaccagcactcaagggctgccgcatcccctcccggga

SEQ ID NO: 507977 - DNA, 201 bp, Homo sapiens
tattttattatactttaagttctagggtacatgtacacaatgtgcggatttgttacataggtatacatgtgccatgttggtttgctgcacccatcaactcktcatttacattaggtatttctcctaatgctatccctcccccagccaaccaccccacaacaggccccagtgtgtgatgttccccgccctgtatccatgtgt

SEQ ID NO: 507978 - DNA, 201 bp, Homo sapiens
tttctgatcattttaccctttggctgttcataggccatgatgaagctggggggttgggagaggaagacaaagaagggaatggcagaatgaggtttcgcagyaataaagataaacgtttattgaacactaactacattcctgacatggtgcttagtgcattacccaatattatccccattatacagattgagaaattgagat

SEQ ID NO: 507979 - DNA, 201 bp, Homo sapiens
cttggttcccatcactcttcctgctaagagcaatcgcccaggtctgtgaacacccactcctccgtagatggtgagtgcccctccagctagagctgctgackccctttaccacttccatcagtcaaatcggcccaccagtgatttttatctcttctgatccattttaaaatctatttaaatgcagctatcagtctgataacc

SEQ ID NO: 507980 - DNA, 201 bp, Homo sapiens
aagctgtagtggatcaaaccagcagcaggccaccaaacagtgaccgtgacctttttttggtgcaagtttggctttgggaagtactttagagcttcttcttrgttcagccactaagctggtcatcgccggttgtctaatgaaatccactttttgttgcacatgacaatttgattgagaaatggttcgttgttgctgtgtaga

SEQ ID NO: 507981 - DNA, 201 bp, Homo sapiens
cccattaaaatgatggtccaggctcagtggctcaagcctgtaatcccagcactttgagaggacgaagcaggcggatcatgaggtcaggagtttgagaccakcctggccaacatagtgaaacccatctctactaaaaatacagaaattagccaggtgcagtggcagacgcctgtaatcccagctacttgggaggctgaggca

SEQ ID NO: 507982 - DNA, 201 bp, Homo sapiens
ttctgtttttttttccccagccgaatttaagattcatatttctgttttaaaaagttgtgaaatgaatatagcaaagtgttaacatttgttgaattcaggagggaaggtatctacacacagtgttaattatttctgttttacttctctatatgctctaatttcttctttttaatttttttgagatagggtctcactctgttg

SEQ ID NO: 507983 - DNA, 201 bp, Homo sapiens
ttgggaggccgaggtgtgtggatcatgaggtcaggagatcgagaccatcctggctaacacagtgaaaccctgtctctattaaaaataccaaaaattagccrggcatggtggcacacacctgtagtcccagctagtcgggaggctgaggcaggagaatcgcttgaacccaggaggtggaggttgcagtgagctgagatcaca

SEQ ID NO: 507984 - DNA, 201 bp, Homo sapiens
tttttattgagacggagtcttgctctgtcacccaggctggagtgcagtggcgcaatctcagcatattgcaacctccacctcctgggttcaagcgattctcrtgcctcagcctcccaagtccctgggactacaggcgcgcaccaccatgcctggctaatttctttgtatttttagtagagatgaggttttgccatgctggct

SEQ ID NO: 507985 - DNA, 201 bp, Homo sapiens
tttgtatttttagtagagatgaggttttgccatgctggctaggctggtctcgaactcctgaccctaggtgatctgcctgccttggcctcccaaagtgctgrgattacaggtgtaagccaccgcacccggcccacacctcctcttttaagtagcaggttatgtctcaccgtttgtggtctgtcctgagctctcctatttctg

SEQ ID NO: 507986 - DNA, 201 bp, Homo sapiens
gttttgccatgctggctaggctggtctcgaactcctgaccctaggtgatctgcctgccttggcctcccaaagtgctgggattacaggtgtaagccaccgcrcccggcccacacctcctcttttaagtagcaggttatgtctcaccgtttgtggtctgtcctgagctctcctatttctgctctttttttgtttgtttgtttt

SEQ ID NO: 507987 - DNA, 201 bp, Homo sapiens
ttgaggcttgaagaccatttttgttgatggcaccgcatgtctgcacaaagctattagaagaaatcctgtaagaaatcagaaaagtcaatcacttaaggccrcatgcacagaaaaggagttgaaaggcatgaagggataaaaatgaagcaaattctgtctccctattcaggcccctaattcccccaaacagcagaagaatta

SEQ ID NO: 507988 - DNA, 201 bp, Homo sapiens
ttgtggagtctgttcaggagttttagctcattaatatctaccaatttatttcagtttcaaatgaagaagaataagcatttatggatatggttttatactcdatttttttgtaatctgtatgccgagaacaacagagtgaatcctgagattatagagctagatttttaaaaaatttaaagtgacataccccaaaaaattgcc

SEQ ID NO: 507989 - DNA, 201 bp, Homo sapiens
ccaaacagcagaagaattaaaattgttcatcagcctctctttaaaatgttatcctttttttttttttttttgcccttacccattgttcattcccttccttkttccctatttcctctccttttcattctttcctctcctctccatctgctcttctttatctattccccaagtatcataatttggctttcctttttcctctct

SEQ ID NO: 507990 - DNA, 201 bp, Homo sapiens
tcctttactcttcttaactgtgttaagggggttttaataacatgtgatacttcatttcttactcactgataaagctatgccataaatttaaaaacattgcrtgtgctgaagagttaccatgaaaacccaaagtgaatcaaagtaggtggatttcagtgatgaaaatgtccttctagactgatttgaaattctgatccacag

SEQ ID NO: 507991 - DNA, 201 bp, Homo sapiens
actttaaactgaaccaaaagtatttcctcaaattatcctcaattcttctgcaccctctgctttaaacttattctactccccattcatccatagcctactgytgctatgcatcgtcttccatgctaccttggttaactcacatttttgctgtggtccgtagtcattctgggcttgggttgccgtaggcaactctaacatgga

SEQ ID NO: 507992 - DNA, 201 bp, Homo sapiens
tgtaatagaaccctgcttttatttgaaatagccatgtgttcaatttaaaaactcactttcccatcctcatttgcacttgtgctggtcatgtgacgctgctyttagcaataagatgaaggtggtggtttctgagggtagtgtccttttcagaataaaaagacaaagcttatttgccttcttcttcctttactttatattcct

SEQ ID NO: 507993 - DNA, 201 bp, Homo sapiens
cagcacagtatgaaaatcagagtatgattcttttttcaaagaactagtggaagaataaaaggggaatttaaacaccattgtctaacttttgataccaataattgaagtctaagaaacatttttgggccttgcttacctcctttggttcttcatagtggaaataaaccactacccacaccacactgcatgcctgtgtgcctt

SEQ ID NO: 507994 - DNA, 201 bp, Homo sapiens
ggtccactaacatcaactttcaaagcagcagttgcctttgcattttctgccaattgattttgtaaactacaaacactgccttctttaataacgggatacaytgtttcaggtaacactgcaggtgttattcctttgacagacaatgttttgacctctgacagaactaacggtgacactacagctatctgaagttctgttccc

SEQ ID NO: 507995 - DNA, 201 bp, Homo sapiens
atttggttacaagaactaaaagtaaagatgagcaattttgtcagaaaagataaaataaggttaagcaaggatgcacaattagcttatgagaaataaagtgyggtttaggcacaatgagggaaaggccaggatgagcaattcacttacgaaaaacaaagtaaggttaagcaagtgaggaaaaaacatataaaaggccatgaa

SEQ ID NO: 507996 - DNA, 201 bp, Homo sapiens
ctgttctccatggctagtgttacgtcagcaacagtgttggcacgggcacaggagcaaggcactagcaggagctgggctggtgggccctctgcctgcaaacrcttcaatgacagtggcagtgtggcagggaggaggggcgtgatgtgcactcatgccagcagtagtggcatgctagggtgcgtgtgcacatgcacattggtg

SEQ ID NO: 507997 - DNA, 201 bp, Homo sapiens
cagcaacagtgttggcacgggcacaggagcaaggcactagcaggagctgggctggtgggccctctgcctgcaaacacttcaatgacagtggcagtgtggcrgggaggaggggcgtgatgtgcactcatgccagcagtagtggcatgctagggtgcgtgtgcacatgcacattggtgggggaggaatgcaaacaaggcaaag

SEQ ID NO: 507998 - DNA, 201 bp, Homo sapiens
ggaatgcaaacaaggcaaagtcaggggtgatcatgggtgagtgtatatcagcaaaatggtatgggagaggctgcacttgggagggaacgggcaggctagtrcatgtccatgagggctgctctgttggagcactgtattggtcaggtgaagtccaccagctcaggagctataatgaaggctcccaggaggtacttgggggct

SEQ ID NO: 507999 - DNA, 201 bp, Homo sapiens
caacattagggagctctctcatggtccaggaagaagtggcttgaaatctggagcattatttaagagcagtctccacacttgttaccaaatttctccttttwttctgggaagcagagaccatgttctctccatccttcgcaggtccacatgaggccataccagaatcacgcactccatctagcggcatttaacggctgtagc

SEQ ID NO: 508000 - DNA, 201 bp, Homo sapiens
ctggaatgcagtggcacactcacggctcactgcaacctctgcctcccaggctcaagcaatcctcccaccccagcctcctgagtagctgggactacaggtgktcaccaccacactcagctgatttttgtattttttgtagagacggggtctcactgtgttgcccagctggccctatctcctagactcaaacaacccccctgc

SEQ ID NO: 508001 - DNA, 201 bp, Homo sapiens
atgctggatttgttgttgttgcgtttgtttcatttcatcttactttattttgtgtctccatggattagcatcagttcagagccaaaatcaattagcccccmcctccaccaaaaaaaatatttacctgtctccagtttatagtcacactgggaaatggccctacttatttctggggaatgttttactgaagatccacaaaac

SEQ ID NO: 508002 - DNA, 201 bp, Homo sapiens
gctcctgctataggattagtgtccttagagaagagaaagagaagagctctcactctctttgccatgtgagaagacagccatctgtgaaccaggaggcaagcctttaccgcaaaccagccatgctggcaccctaatctcaggacttccagtctccagaacttgagcaataaatgttcgttgtttaagtacccatctatggta

SEQ ID NO: 508003 - DNA, 201 bp, Homo sapiens
aggtaagctaagtagcctgaaattcaaggacatgcaatcctcatgagcagagaccagatgggtggagtgtctcatcagtgccagagtatgggaggtatttrggccatcatacaagcatgcaagaagaaagcagctacatttttcataaattgctagaggcctagtgcagactagagtgactataaggagcctctgggtgtc

SEQ ID NO: 508004 - DNA, 201 bp, Homo sapiens
gctcagcaagtagcagtgaattagacagaccaagcccctgccttccttatgcacctcattttctacaagaagcagaggggcaacgactcagtgcacagtcytcaacttccgccatcaggaggccctcaccgagcacacatgcctagagcaccaaggaggaaattaggcctatttcagaaaacagggcacattttaatattt

SEQ ID NO: 508005 - DNA, 201 bp, Homo sapiens
cactgtcataagaaccaaaaatcagaagagtgatcacagtgcctggttttaactttatatcactgaaagaggcactgaagagggtagaaaagacacacttsaattgctgattcaccccctccccgccatcccccagcagtgactgtggtacagagacagaatcgatgagcttgagggcgggagagcacagtgactgtggga

SEQ ID NO: 508006 - DNA, 201 bp, Homo sapiens
tatcagccttgatagtagggataatggcaattcttcaaaaaaagcaaaaaataaggagatctaaggatcacgatgagctaggacttccacaaacctgggcyatataaacatcaggaggagaatatcactaagattgctataaatttccataaagtcaaaacaaaacaaaacaaacaaacacttctttaggccagacacggt

SEQ ID NO: 508007 - DNA, 201 bp, Homo sapiens
aatcctacctttctctagctctcttccccttccctactttactcagagtcttagagtagacccaattccacaattagcaccatactaaggacggaaacagyatctttctttctcctgatccatatttatctatgggattcaatattgtgtcttgtaaagactaaatcaataatactatctgagtgagcaatggaaaaaaac

SEQ ID NO: 508008 - DNA, 201 bp, Homo sapiens
cccctttatgggaaaccttttttttctaagtaaataataaattttcagtccccattttacttatgtatttagtagttaacctgattacataataaaattgmtcctcaaattataagcaagcaaggaaggcataatgaagtcagctatttggtataactaaaggcaaagaaaaagtcttggatttaaggtttatggtggaaa

SEQ ID NO: 508009 - DNA, 201 bp, Homo sapiens
cattcatccatagcctactgttgctatgcatcgtcttccatgctaccttggttaactcacatttttgctgtggtccgtagtcattctgggcttgggttgcygtaggcaactctaacatggaataaataacactgtcagtcatcttcagctaagatctttcacatgcagttgagagagttaaattatagaagtgtgaaggga

SEQ ID NO: 508010 - DNA, 201 bp, Homo sapiens
tagtccctgttacggctaccagtgggtgtcagaagaacacgaagaggcacatcacactgcttatcttgtgttctccccaagcaagagctttgtccaccttragcccatgtctcatgaactaccctgtggccatactcagacagtccaggcacattatattctgaatggaggcaccctgctggggctgaagaagctctcctt

SEQ ID NO: 508011 - DNA, 201 bp, Homo sapiens
ggatgacagagccagactccatctcaaaaaaaaataataataaataaaataaaataaataaataaataaataaaatagagccaggtacagtggctcactcytataatcccagcactttgggaggctgaggctttagcccagaagtttgagaccagcctgggaaatatagcgagaccctgtctgtgtaaaaaaagtttttaa

SEQ ID NO: 508012 - DNA, 201 bp, Homo sapiens
gacagtaaacttacgtagttttgtgagaacattaatctttatgacgtataatctaaaaataatataatttttctaattcattaggtcaattacaaggatcrtagtccctgttacggctaccagtgggtgtcagaagaacacgaagaggcacatcacactgcttatcttgtgttctccccaagcaagagctttgtccacctt

SEQ ID NO: 508013 - DNA, 201 bp, Homo sapiens
gccgggtgtggtggcccatgcctgtaatcccagctacccgggaagctgaggtgggaggatcatggtggaccagcccatgaggtggaggttgcagtgaactsagatggcaccactgtactcctgcctggacgacagagcgagactctgtctcaggaaaaaaaaaaaaaaaagaagaagcaaagattatgtccattgtttcaa

SEQ ID NO: 508014 - DNA, 201 bp, Homo sapiens
aaatatgttaacttacatggcaagagggattttgcaggtgtgactaaattaaggccctcaaggtaggaagagtatccttgatcctccaggcaggctcaagrtaattgtaaaggtccttacaactgaaagagggaggacgaaggggttgtcagagaaagagatatgacaacagaagtagggtcagagaaacgtttgttgctc

SEQ ID NO: 508015 - DNA, 201 bp, Homo sapiens
tccagcccccatctgtccacccagctggaggcagccaggctcacctatggactggttgacggccttcatgcacaggttctccaccagagccttccctgggkgtgcctggccgggggctctgggctgggagtgaaggggatgacccatcaggactgttccctgcctgcagctcccccggggaaaagaccctgccaggctttg

SEQ ID NO: 508016 - DNA, 201 bp, Homo sapiens
cctctttcctgttctccccttctccagcccccatctgtccacccagctggaggcagccaggctcacctatggactggttgacggccttcatgcacaggttstccaccagagccttccctgggggtgcctggccgggggctctgggctgggagtgaaggggatgacccatcaggactgttccctgcctgcagctcccccggg

SEQ ID NO: 508017 - DNA, 201 bp, Homo sapiens
ccccctacagcacattcccatggcgaccccctccccttcctcagacttatataggaaacagggcaggcaacccctctttcctgttctccccttctccagcycccatctgtccacccagctggaggcagccaggctcacctatggactggttgacggccttcatgcacaggttctccaccagagccttccctgggggtgcct

SEQ ID NO: 508018 - DNA, 201 bp, Homo sapiens
taacacagtaagaaactggctgatgaaagatacatgagtggagaagtgaagtcagcaagatgacagagtaggaaaccctggtcttcccccaggcttccccyctgtcccacacatgaacaccagtttagtaacaatcatggacaaattccctttgtgagaaattcaaaggctaattgaaagactcctgtatcctaaacaaat

SEQ ID NO: 508019 - DNA, 201 bp, Homo sapiens
tcattaacttgttatgatgaaatcagccttaatgtgaacgtagaattattaaaagattctgccatagcctttccttatacagttattcctaagactaggartaagtggcttttaccccctaccaaatccaggtattcataggttttacctaagtctatatctcattctatccaaatatacatagtaatttaatatgtaaaa

SEQ ID NO: 508020 - DNA, 201 bp, Homo sapiens
caaagtaatatggaggcttacacccacaaaaacaaagaaagtggaaggagtaatatgttttaggagagagggaaagaaggcagagacatggaagtgattcsgcagagacactcaagcccaagtgtccccagagatctcccccactcattctcagaaagactcaggaagtggtaggaacacagcaggccactgaaaacaaag

SEQ ID NO: 508021 - DNA, 201 bp, Homo sapiens
tcaggctaaacaaggtaaaaggggtcaggtacagtggctcacgcctgtcatctcagcactatgggaggccaaggagggaggattgcttgagcctaggggtytaagaccaccagcctgagcagcatagtgagatctcatttctacaaattaaaaaattagctaggtgtgatggcgcacacctgtagtcccagctgctcagga

SEQ ID NO: 508022 - DNA, 201 bp, Homo sapiens
tagaaaatgctcacaggttcacatgtaacatacaattcgagggcatcatagatccccgcaaagcatgcattccaggttggaggactcccggaactgcagtrttacacaaggcacagcacacaccaagtggtaatggtgactcaacttgatagacctgtagaaggcttaaaaggtgactatcaaggataaacagcatctcgg

SEQ ID NO: 508023 - DNA, 201 bp, Homo sapiens
ctggggtatcatcaacagttacatgatttatgccaagataagcaaattcattcactctgaacacctgctggttgcagcaagcatggggctcagagctgagracacaaaggtgcagagcccctagaaaatgctcacaggttcacatgtaacatacaattcgagggcatcatagatccccgcaaagcatgcattccaggttgg

SEQ ID NO: 508024 - DNA, 201 bp, Homo sapiens
aattcctttggagattaatgaggacagaatgcaggatgtacaagagaatattctcaaaccaaacagcttttaacctgggagaataaagagacccaaagggytagtctttgtctagagcagagaaaacacagaagaaaatttaaaaatattcctccattccaatatttgtataatcttgaggaaaaggcctttttaagcaaa

SEQ ID NO: 508025 - DNA, 201 bp, Homo sapiens
acttagatggataaatctccatggtgctggggaatttgctggaaaatagacatacttggaactataaatctttgtagctgcattggtgggcaatttggcattttttttttttatactttaagttctgggatacatgtgctgaacgtgcaggtttgttacataggtatacatgtgccatggtggtttgctgcacccaacaac

SEQ ID NO: 508026 - DNA, 201 bp, Homo sapiens
gaggatgacttgaggtcaggggtttgagaacagcctggccaacatggtgaaaccctgtctctacgaaaaaaacaaaaattagccaggcctggtggcgggcrcctgtagtcccagctacatggggggctggggcacgagaatcgcttgagccgggcagggggaggttgcagtgagccgaaatcacaccactgcgctccaacc

SEQ ID NO: 508027 - DNA, 201 bp, Homo sapiens
tccatgtggttctcttgtcaccaggatgtttctatcttttctccttttctttcctttcatccaaggctgaaggtattgagcaagaaaagactttcagttcyatgacctgtgcctcaggtaagagtccatcttcataatcatagtgagatcaaaaccacaaaggggtataaacctcaagttacaatgcacattcattttatc

SEQ ID NO: 508028 - DNA, 201 bp, Homo sapiens
agtgggagctgaatgatgcaaacacatagacacatggaggcgagcaacatatatggggcctgtctgagagtgggagtgacagaagggagagcatcaggaakaatagctagtggatgctgggcttaatccctaggtgatgggatgatctgtgcagcaaaccaccatggcacacatttacctatgtaacaaacctgcacctcc

SEQ ID NO: 508029 - DNA, 201 bp, Homo sapiens
attcatctgttgccaagatgtaacacataaaatgtaccctaaaaacataacttccttgtcatttagccttatttctacatttaagtgaactgattacctaycattcaatccttttatcatgacttctccgtttctgagttactcattttgatgtatctcttaagtgtaagggctaatcatcaaatagttttactaaatttc

SEQ ID NO: 508030 - DNA, 201 bp, Homo sapiens
ttagcgcttgcagaattctttgctgcaagttaggttatatgccaggaacattcttgaagctgacacacaactcagctttctcagttccacgagagtcattmtccaacccgtcatcttgaaatctccaaaatatataattttaatttatcttatagcacttatctctttgtaaattatgtaatagtggttgtatatagatca

SEQ ID NO: 508031 - DNA, 201 bp, Homo sapiens
cttcacttgccctcctccccagctcatcaggtgtggctgaggtaggagtaacagtccctgacaccatcaccgagtggaaggcaggggccttctgcctgtcygaagatgctggacttggtatctcttccactgcctctctccgagccttccagcccttctttgtggagctcacaatgccttactctgtgattcgtggagagg

SEQ ID NO: 508032 - DNA, 201 bp, Homo sapiens
ctgaattgtttatttcagatgtcaaaaaataagtggaataaaatctaatgctctaatcttatttcccagagaacaacagttttgcaaagttccatacagtratttaaagtaaatttaatttatgtaaaagtaatttaatgtaaatcattaaattctgttcactccactggtaatttcatttttagtatagcaaccactctc

SEQ ID NO: 508033 - DNA, 201 bp, Homo sapiens
tgtactgtaagagagggaaaatgctgacaatggaaagaaagagtaattctgattatggaaacaggaaagacattcatagggatgctgtattttaaaaaacmtaaagaaggacaaagggcttcactggtgacaagaaacaacgtgaacatcacagaaatatctcataatccatggccaaaaccactattcaaatacagcagc

SEQ ID NO: 508034 - DNA, 201 bp, Homo sapiens
tacacacaaagaaaccaagattcaaattaattgtttcttgctgaggtgacttagctggtgatagctagaactgatcagagatttttttttagatacatccratacttcagggcacaaaatcagataaaatacaagattctgatgtactgtaagagagggaaaatgctgacaatggaaagaaagagtaattctgattatgga

SEQ ID NO: 508035 - DNA, 201 bp, Homo sapiens
  misc_feature (1)...(201): n = A,T,C or G
acaagtagattgaacaattatttttttccaggggatgggattgaaggtgttcactaactcaaaaatccgaaaaccaaagtcgtgttcagtcatcccttccntgtctgcaggagcagtaggtcaaggatactatggaggtaaaacagcaatttgcttttaattttatttcatgtccaacaatattactatgcccaaaatgct

SEQ ID NO: 508036 - DNA, 201 bp, Homo sapiens
aattataaaatggctgctttaatcatatcctctttacaggtaaatttgagattctcctcagctcagagcctgccagcctcaaacacccgcctgaaggtgasagccacccccctctccctttgtgccctccgtgctgtagaccagagtgtgctgctaatgaagcctgaagctgagctgtcacctaaatctgtgagtcacgtt

SEQ ID NO: 508037 - DNA, 201 bp, Homo sapiens
attaacatgctggcttgtgagtttttgaatgttaataaaactctgtatctattcataatcttagtaattatgtagccttgcctctccatttttcagcagasaaaaatgaagccaataaaaaggttaaagtctcttgtgaggatcacacaaaagctcagtatgtgagtcagggctagatctaacctctgcctattcatctgg

SEQ ID NO: 508038 - DNA, 201 bp, Homo sapiens
aaatccttagaatttgggagaggagttattataaattaatttagaaagaattgaagttttatcatgttgaagcatcctatattatcaagttatgccttttyatttgttcaaaccttctctttttttgagacagtctggctctgttgcccagactggagtgcagtggcacaggcttggcttactgcaacatctgctttctgg

SEQ ID NO: 508039 - DNA, 201 bp, Homo sapiens
agacaaacaatacgtataatacaatcaaacgaaatgcgcaaacataataatgaacataatgggtaagcaaagtctaggaaattaagaggctataagtgctrtggaaaatataaaatgaagagaagggcaggaggatatagaacactctgggaggtgagaagactggaaagctaaacacaaggcttaggattgatatcattg

SEQ ID NO: 508040 - DNA, 201 bp, Homo sapiens
taggtgctcaacaatccaaaattcctatgtcctctccactgagctgtctccttcacagccttgccaaacttggcttatgggaagcataaagccaaagtgtktggctttttattgcaacgtggccgggccccagtgcaaattagataatgacagctaatggcccgaaaatggcacctttgatttttcaaattctcagggacc

SEQ ID NO: 508041 - DNA, 201 bp, Homo sapiens
gcatatgcccatatatatacacatatatgtgtatatatgtatgtgtgtatatataaatgtagatatatatatttaatgagtagctgaaacccttaacactracatctcctttgctatgttctagaaatctcatcctgtttcgccaccttctcattccatcaattttattgtctttctcttctttatcctcagcctctttct

SEQ ID NO: 508042 - DNA, 201 bp, Homo sapiens
cttgttttcctggaaaaggttttttcccagtcaactgaattacttttctccattctttcttgccactcttggtgcaggtattaaagaccctaaaatgactyctggtggcctgggattccttgggaaaacagaaaagttgccacaaatcccatttggggaaaaacctttgttttcgttgtggaacccctggaattagaggta

SEQ ID NO: 508043 - DNA, 201 bp, Homo sapiens
agtcattttccgtgtccagatttttatagtaaataatgaacattttaattcaggagtgttgaatggaaagtgccaagctttgatgtgattatattcatgtrattgtgtatgtgtgagtgtgtgtgtttaagaagaggtcttcagtaaactagactaccacggaatatttcatggaggctgtatagctctgatttggagaag

SEQ ID NO: 508044 - DNA, 201 bp, Homo sapiens
tttcttgccactcttggtgcaggtattaaagaccctaaaatgacttctggtggcctgggattccttgggaaaacagaaaagttgccacaaatcccatttgrggaaaaacctttgttttcgttgtggaacccctggaattagaggtaaataagtacctctcaaaatctgtctttgtctctcagctttacttgtttattaggc

SEQ ID NO: 508045 - DNA, 201 bp, Homo sapiens
tcaaaatctgcagtgatttctgcttactataaaatatggttgagaattcctagaaagtgtttgaaggtcctatttttgtttgagctgagtcagttcctggrgtgtttttggcttccacagctttgctcattgactttgcccattgtccctaccgacttgatgccatctaatcactccttggtgccttctaaatcctacgta

SEQ ID NO: 508046 - DNA, 201 bp, Homo sapiens
ctcaatcccaggaggctctgcagtgtaaagtcacaaagcatgcctacatttgaagcagagaaacaaaatcaggggtccttctcccacttttcattgtggawcaaaagatttctagctactagttaaggtaggacagtaaacttacgtagttttgtgagaacattaatctttatgacgtataatctaaaaataatataattt

SEQ ID NO: 508047 - DNA, 201 bp, Homo sapiens
aagacctaggacacatggagttaaatgctggaataagtcggaccttatctgaacttctgtctgggtcctaggctctccacctagtacataattaaaatccmaaacttaccaacaaaagtaaaggttgctaaaagttaacagtgtaacatgtatttaagactattgaaaaaacagtttacatatacttttggtaaaaagatt

SEQ ID NO: 508048 - DNA, 201 bp, Homo sapiens
ttcttttttttttttgaaacagggtctcgctctgtcacccaggctggagtacagtggtgtgatcttgggtcactgcagcctctgcctctggggtacaagcyattcttgtgcctcagcctcctgagtagctgggactacagacatgcaccaccatgcctggctaatttttgtatttttagtagagtttgggttttgccatgt

SEQ ID NO: 508049 - DNA, 201 bp, Homo sapiens
tagggaacaaaaagcttcaggattgacacaatgccaaccctccacgaagtcaagcagagtggttatacattgtacatgaggaacactctgcaaatgcgagygaatgcatgggtaaacctggaaatttgcttttctgaccttttgttccaatttcacaggtggatttgagcttcagcccatcacaaagtctcccagcctcac

SEQ ID NO: 508050 - DNA, 201 bp, Homo sapiens
agttatttccatcagtgcaataagaatctgttttattttgtaacagaacatgatttgaaaaactggttattttaccaaggctttgactggagaggtgtgcygtcctttaaggaatcaaacttgacttatggagccaataaaactctcgggaaactggcctcatattttatgtgcacagtccctgtacagggtttctgacct

SEQ ID NO: 508051 - DNA, 201 bp, Homo sapiens
ttatgtgcacagtccctgtacagggtttctgacctgtggtaagtaaagaatgtcactttctgacaggccagtacccccaagttatcttggaacctcaggargagaggaattcacccaactcataggtatttaatggtacaattccatgactgggctcagctttaaaaggccttatctcagattccttctatggaacaaaat

SEQ ID NO: 508052 - DNA, 201 bp, Homo sapiens
acagttggaagaaaaggacttatattcccatctcaatccttgattatactctccattattggtatttctattgagtgtttttaagtcatggcagtagaatmattcctagggattctctccctagaaaggatgtatttaactgcttactttctgttcttcacttacactcctctccagctcagcaggtgtggctgaggtagg

SEQ ID NO: 508053 - DNA, 201 bp, Homo sapiens
caccattttgttttccttgtaggcaaacatgctgacttcacataggtgctatttgttttcatgtctattaactgtcccctccatgtcttcttcccttctaygtccacagcatctggacagtgccatactcagagcagacactcagggatggtggtgaggttccagtgtgaatgggaacggggctgtcaccagggatcctgt

SEQ ID NO: 508054 - DNA, 201 bp, Homo sapiens
acacaaaacatgtcaaaagtaaaaatcaagaaagtttgaacagacctatcattagtatggagatttaatgaataacaaaaatccttctaacaaataaaaayccaggatcagatagcttcacaggtagattctaatacacatttttttaaaaaagtgccaatcagtctcaaatgcttccaaaaagtgagagaacacttccaa

SEQ ID NO: 508055 - DNA, 201 bp, Homo sapiens
aggcggctctatcttaaaaggcttggattcaatcttatgtcgcatgctggacaaagccagcaggagctcactgagaggctgggtgtgtgaagaaatgaagmgcaaaaattttctattcagaactcaggtcctctgaggctcacgttatctcctgaaacgtgagggcatgggaagccccggaagctgacctacaggatccac

SEQ ID NO: 508056 - DNA, 201 bp, Homo sapiens
aggccagtagcacactgctaccaaagccagacaaggacactacaagaaaaaaaaaatgacaggccaatatctctgatgaatatagatgcaaaaaatatttwaaaaatattaggaaatagaatccaacagcacattaaagggatcatacatcatgaccaagtagtatttattcccaggatgcaaggatggttcagtatgtat

SEQ ID NO: 508057 - DNA, 201 bp, Homo sapiens
tggccctgcctgcataggaacagaggctggggctccgagcaacacctgcctccccctacagcacattcccatggcgaccccctccccttcctcagacttayataggaaacagggcaggcaacccctctttcctgttctccccttctccagcccccatctgtccacccagctggaggcagccaggctcacctatggactggt

SEQ ID NO: 508058 - DNA, 201 bp, Homo sapiens
ggccatgtatcacgacccaggagatgagcagaaccactacttaccggcctaggttgtcagagaagttgatcccttcactcatctttcctccaaccacagaraggagcagggcctctgtcacctggcctctctcctggccacaggcctgtaggagaaacccagacgctgagttgctgagccaaaacttggatgacacccacg

SEQ ID NO: 508059 - DNA, 201 bp, Homo sapiens
agttgatcccttcactcatctttcctccaaccacagagaggagcagggcctctgtcacctggcctctctcctggccacaggcctgtaggagaaacccagaygctgagttgctgagccaaaacttggatgacacccacgtttccagctgccacccccacatggtctcagacccaagctcagcatgacgcccgcacctggatg

SEQ ID NO: 508060 - DNA, 201 bp, Homo sapiens
gggggcatcccccaaactacagtgtgatgaggacgcccctcatggcctagaccacagtgagagccaagagcggctttctggccctgcagggccctcacctkggctgcagggatggcaaggcggctcctgtaatagggacaggcccgggcctccttcccaagggccagcagctgctccatgtccttcacctctgccagggcc

SEQ ID NO: 508061 - DNA, 201 bp, Homo sapiens
ttcttgttgcccaggctggagtgtaatggcgccatcttggctcaccacaaccaccacctactgggttcaaacgattctcctgcctcagcctcctgagtagytgggattacaggcctgtgccaccacactcggctaattttgtattttggtttttttttttgttttttttttgtgagacggagtctcgctctgtcacccaga

SEQ ID NO: 508062 - DNA, 201 bp, Homo sapiens
ttagcccccttcctagggatatatacaaacagatttcctgcctttccagggatcccagggccggattatgtaaaactccagggtttctgtgtgcctgagcwgctgctctgccaagactccacatagctttgtgtatcagacccaagaccctggtggcatgggctcacaagggtatctcctgatccatgggttgcagagatc

SEQ ID NO: 508063 - DNA, 201 bp, Homo sapiens
tttctcccatacgtggaagtatcaccagcaaaggccatgaaacagcaaagatggcagcctgtgccttcctctagaaactccatcctgtgggggtactaacytgttgccagcccacatgcaactgttggaggtggctggagaccctcattgggaggtctcgcccagtcaggaggaatgggatcagggaccttctcaaagaag

SEQ ID NO: 508064 - DNA, 201 bp, Homo sapiens
gcccttgctggtgaggtgtcacagtcatctggaagagaagagacactctggcattttgagttttcgttgtttttgaattaattctttctcatctttgtgarcttatctacctttaatccttgaggctgctgccctttgaattagatttgtgttaggtcttttttgttgatgctgttgttttctgtttgtttgtttgttttt

SEQ ID NO: 508065 - DNA, 201 bp, Homo sapiens
ggcccccaatttcttctggcttccatggttttggcagagaggtccactgttagtatgatatgtttccttttgtaggtgacttggcctttctctctaggtgyccttaacatggtttctttcattttggcattggagaatctgatgattttgtgtctttgggttgatgttcttgtggagtatcttactggccttctctgcatt

SEQ ID NO: 508066 - DNA, 201 bp, Homo sapiens
gaagtcaggtaacatgatgcctccagctttgttcttcttgcttagaattgtcttggcaattcaggctcttttttggttccatatgaattttaaaatagatktttctaattctgtgaagaatgtcaatggtagtttaatgggaatagcactgaatctataaaatactttgggcagtatggccattgtcattacactgattct

SEQ ID NO: 508067 - DNA, 201 bp, Homo sapiens
tccacagcctgacctctgatccccagcaattcatgagctctcacatgtaaaatatactcgatcctctctctgagattctcattgtaaaataggaacagctsaaaggctaaatatcatttaaatcaggtccaagtacagataatgcctctcaggtgtgattcctcaggtacaatacctctagatacaaagacattgaactaa

SEQ ID NO: 508068 - DNA, 201 bp, Homo sapiens
gggtctagcttgtgacctgccctggttgcgattaacatggcggccaaagctgcagccacctgacagcttgacagaggttggaagatctgcttccaagacargtttcttgagagctattggcaggaggcctcagttcctcaccacacagaggtcctagggctgctggtgtcccacaatgtgacaactgattttctccagagc

SEQ ID NO: 508069 - DNA, 201 bp, Homo sapiens
ataaataatacatgttcatttatgtacctatttaattctactcaaaaacaaaggtaaataaagaagtagaaagggtgtttgcgttacctatctactgctgyataacaattttcttcaaaacctagtggcttaaaacaataaacatttattatcacatgcaatttctgtgagtcaggaattcagagcagcttagctaggtgg

SEQ ID NO: 508070 - DNA, 201 bp, Homo sapiens
aaactgtgagataactatatctgagacccctgtcctatttttaattatcaaaattaacattcttcaggttggagcatatccactagtgccccctgatctgyaggggtgtgtcccaagaccttcagtgggtgtctgaaactgtggatagcactgaacccaatgaccatcagctggaacacatttctgttcctgtcttccacc

SEQ ID NO: 508071 - DNA, 201 bp, Homo sapiens
agtaaaatataacagtaaaaatacgtaccacttgccgagtacttgatagtttctcaagctgtctcatataggttttctcacttaatctgcccaacattccrgagaataatagtcccattttaagattagaaaagtggattcagaatagttgagagatttgttcaagataagtggcacaagctgagatgtgattttgaaatt

SEQ ID NO: 508072 - DNA, 201 bp, Homo sapiens
gcctgtgggcctggtctctctggatggtgccacaggagctttgccttggttcctctgcgtcctccacggtgccatgggaggctccctggcagggtgtgggscaaggcaatgagtgaagttgggatgagtgagttaaggcccatggggtactcaggacaggacttcaggtttgattcaggagggtgagggaactgtgattgg

SEQ ID NO: 508073 - DNA, 201 bp, Homo sapiens
tggtactaggcacctgtagacagttgcatgtcccctgcccagggatgggatgaggagaaggcaggaaggcatatcctggggaagggagtgctgagttcgtygagagtgggtgcaggttctccaagtggctcgcatggcccagggaggggaggatgtctctcaggaatcctgggcctgtgtcccagctccctcacacctgag

SEQ ID NO: 508074 - DNA, 201 bp, Homo sapiens
tgaccaagtagtatttattcccaggatgcaaggatggttcagtatgtataaatttgtaccacattcacagaataaagggaaaaaaaatcacataattatayaaatacaagcagagaaagcatttgacaaaattcaacattctttcatgttaaaaactctcaagaaactataaataggagagtatctcaacataatacaggc

SEQ ID NO: 508075 - DNA, 201 bp, Homo sapiens
atcatggggggcctggctgggtcagggaaggtggatgtgaggaaatagcatttgtggtaaaacctgagggtgagtgggtaggtcagggagaacattccagyaagaaggaagcacatgacctacagccctgaggtggaggacctgaaaggaggccagtgtggctgcagcgcagagaggccgttgaggaagccgagctggagg

SEQ ID NO: 508076 - DNA, 201 bp, Homo sapiens
aaacaaataagttgaactatgtcaaactggaaagctcttgcaaagcaaaggaataatcaacaaagtgaaaagacaacatatggaatggtagaaaatatttkcaaaccatgtgtctgacaaggggttgctatccaaaacatataagcaactcctacaactcaactcaacagcaaaaaaactaataacatgactttaaaatgg

SEQ ID NO: 508077 - DNA, 201 bp, Homo sapiens
aaaatttctcatccaaaatatagaaatcaatacaactttgccacaatcaatatacacgaactgtacaaatgtatacccattcataatttaccaaataaaakatgattaacaaagttcacaaaatagatgaaaatacttttacccaggaaagttacaaaccagacctccaatttctaaaatagaagtttactcagtcttaga

SEQ ID NO: 508078 - DNA, 201 bp, Homo sapiens
ttatatactttgatctgtattcttccacaggaatgtataatccccaatggcaggaacatgtggtttttgttaaccacagaacagtatctgatacaaaataygcattaaaattcttgtgaactgactaaataatatccatctctccacttgattgctttacttgccacacatccccagtacctaattcaagagcttggctca

SEQ ID NO: 508079 - DNA, 201 bp, Homo sapiens
ttcagatgtgataatttgcagtaacacaacttctctctccaatgtgcccatatatattaaagtagttattaggtcacatcacgtacatttgaaatccatattttttctcactcttcccactgttgtaatcttactttgggccctcattttcttccaactgaacactgaattagccccctgaatggtcttcctgctgactat

SEQ ID NO: 508080 - DNA, 201 bp, Homo sapiens
ttccaagtcagttttcattaatgatccatgagtgatggccagcatgcagcacatagtttcatgtggacatttctctctctggtttatgaccactgcacggwgtggatggttattattattgggaataaccgtgtatcagagtgcagttcttagcctggagaatgggaaatggaaaggaccagagattcaaagaaggcaatt

SEQ ID NO: 508081 - DNA, 201 bp, Homo sapiens
ctctctctctttagcctaatccctaagccacagtcaagttgacctcctttctgtacttgcagatgacttaacactgtatgttgtttcacaacccatgtcgtttatcacactgacctatcttgaaaatattttgtatcagctggaatccctctggcaataaataacagaaaagcaactagcagctgcttaaacaaataggaa

SEQ ID NO: 508082 - DNA, 201 bp, Homo sapiens
tggggttctgtcttgtccattctgataatgataacaatgatgacaacagcatccaacacctgtagaatgttcactagccaccaggcactgtttcttatgtkaacttagtttttctttgcaatgatcttgaagggatacatttaacatatatgaaaaatgagttgcagatgaattgagtcgccaagggctctgtttacaagc

SEQ ID NO: 508083 - DNA, 201 bp, Homo sapiens
tctcgctctgtcacccagactggagtgcagtggcgtgatctcggcttactgcaagctccgcctcccaggttcacaccattctcctgcctcagcctcccaartagctgggactacaggcgcccgccaccacgcccggctaatttttgtgtattgtttttagtagagatggggtttcactgtgttagccaggacggtctcgat

SEQ ID NO: 508084 - DNA, 201 bp, Homo sapiens
atttatataagcatacataaaacacaaatatataaacgtatatatagtatgtaccctttcatcattaactgaatatttatcaaacacctgtacacagtgcrtgctaggtactgttctaggcactgggaatacagcaatgaacaacatcttatcctttgtggaatttacatcctagtgtttaccctttgatctaactttttc

SEQ ID NO: 508085 - DNA, 201 bp, Homo sapiens
tctccattattggtatttctattgagtgtttttaagtcatggcagtagaatcattcctagggattctctccctagaaaggatgtatttaactgcttacttwctgttcttcacttacactcctctccagctcagcaggtgtggctgaggtaggagtaacagtccctgacaccatcaccgagtggaaggcaggggccttctgc

SEQ ID NO: 508086 - DNA, 201 bp, Homo sapiens
cgtgatctcggcttactgcaagctccgcctcccaggttcacaccattctcctgcctcagcctcccaagtagctgggactacaggcgcccgccaccacgccyggctaatttttgtgtattgtttttagtagagatggggtttcactgtgttagccaggacggtctcgatctcctgatctcatgatccgcccacctcggcctc

SEQ ID NO: 508087 - DNA, 201 bp, Homo sapiens
acagttggtgggattgtaaaatggtttaactgctatggaaaacaccgtcaagtttcctcaaaaaattcaaatagaactaccatatgatccaggaattttayttatgggtgtatatccaaaagaattgaaaacatggtcttgaagagatatttatataccacagtcatagcactagtcccaataaccaagaagtaaaagcga

SEQ ID NO: 508088 - DNA, 201 bp, Homo sapiens
agatgctttacttcaaacccattctccctctgttctccttccctctctactccctttcttatgtgtggtttcaggtcagtgtgcagctggaagcctctccygccttcctagctgtcccagtggagaaggaacaagcgcctcactgcatctgtgcaaacgggcggcaaactgtgtcctgggcagtaaccccaaagtcattag

SEQ ID NO: 508089 - DNA, 201 bp, Homo sapiens
aatgaggtgctttaataaagggataggaagaaggtgagaacaaggaactgagattaggagctgagtgtgtccatgacagaccgcctagaaagaatgtagtrtctagagcttttactcatagaccgcgggacaaggtatatttaccatatagctctgtattttccctcttgtgttataatgttttctgtaattaattactct

SEQ ID NO: 508090 - DNA, 201 bp, Homo sapiens
ttgtgttataatgttttctgtaattaattactctaacccttttagcaaagtctaatacacttcagcattgtctcgtgatgatatacagactaaatggacargtgagtaaaagaaaaaattaaggcgtcctcactggtgggagcagaatcccaggcagagaactatgcacagaagtttcaggcagtgatcagctgaaagtca

SEQ ID NO: 508091 - DNA, 201 bp, Homo sapiens
tggcctctctcctggccacaggcctgtaggagaaacccagacgctgagttgctgagccaaaacttggatgacacccacgtttccagctgccacccccacayggtctcagacccaagctcagcatgacgcccgcacctggatgcacctggaatacgccagcagcacctgctccacctggtgtgcgctcttaggttcctggaa

SEQ ID NO: 508092 - DNA, 201 bp, Homo sapiens
acaggcctgtaggagaaacccagacgctgagttgctgagccaaaacttggatgacacccacgtttccagctgccacccccacatggtctcagacccaagcycagcatgacgcccgcacctggatgcacctggaatacgccagcagcacctgctccacctggtgtgcgctcttaggttcctggaatatctgagaaagacaga

SEQ ID NO: 508093 - DNA, 201 bp, Homo sapiens
ggggaaatcctctgtagtcagggactgggagcggtggggatgaggagccagaagcctgtcctgacccgatgagcacaagagctcccaggaggactcagtgrcactgtcctcacaagtggcaaggctgccgacaggccactcaccttcttcctggcagccagacggcccagcaggccacccttctcccagtgggcatggacc

SEQ ID NO: 508094 - DNA, 201 bp, Homo sapiens
tcattaagtctctcgtggttttataattaccgttattcaactaaatgtgggccatctactcaagtccccagtggaccattcagaaaatggaacttttgttsttgcccttttgtagctacctggtggcccttcaccctgctttaaaatgtaaagtattttctgaagtgttatctggtaccatttaatgcttccagtagaaat

SEQ ID NO: 508095 - DNA, 201 bp, Homo sapiens
cagcagtggcaaggcagggtgcacacacacacatgtgttggcaaattttattattaaaagctttaatttcctaccactattctttgccataaagtcaccayaattttttttctggttttatgacatttcaatctaccccactttccttgttgaactcaagacagtgataaaagggcttccttccttttagaaggggagctt

SEQ ID NO: 508096 - DNA, 201 bp, Homo sapiens
gctgaggagggcagcgaaggccccgttggtttcctgtttcctctgaagtgagctgttgggcagacggagagcccaagccaggtgccagcaatgggcggcaraggggcgagaggtgactgagctcaagggcaccgcctttgagaagccagctctgatcgtgctgtcctgaggctccactgtgctcacaggctctctcgctgg

SEQ ID NO: 508097 - DNA, 201 bp, Homo sapiens
tagtttggctagatatgaaattcttggttggaatttattttctttaagaatgttggccaggtgcagtggctcatacctgtaatcccagcactttggggggycaaggtggtcagatcatgaagtcaggagatcgagaccatcctggccaacatggtgaaaccccatctctactaaaaatacaaaaattagccaggtgtgatg

SEQ ID NO: 508098 - DNA, 201 bp, Homo sapiens
ccactctcaccctccctggctccctttccatgggctggccttgcatgggtttggctgaggagggcagcgaaggccccgttggtttcctgtttcctctgaartgagctgttgggcagacggagagcccaagccaggtgccagcaatgggcggcaaaggggcgagaggtgactgagctcaagggcaccgcctttgagaagcca

SEQ ID NO: 508099 - DNA, 201 bp, Homo sapiens
caggagaagcagccaggcctctgcccctccactctcaccctccctggctccctttccatgggctggccttgcatgggtttggctgaggagggcagcgaagkccccgttggtttcctgtttcctctgaagtgagctgttgggcagacggagagcccaagccaggtgccagcaatgggcggcaaaggggcgagaggtgactga

SEQ ID NO: 508100 - DNA, 201 bp, Homo sapiens
ttgggtcctgtgctgagttcagatcctaaatttctgccttgatgatctgtctaatactgtctgtggagtgttgaagtttctcaatattattgtgtgggagyctgagtctctttgaaggtctctaagcacttgttttatgaatctgggtgctcctgtgttgggtgcatgtagattttgtttagttaggtcttctcattgaat

SEQ ID NO: 508101 - DNA, 201 bp, Homo sapiens
ccagctctggctgacttgaggtcctcactcttcctcagggctgtactgatcccttcctcctcacatggctgagccctgagcccaggagatagagctgttgkctaagcagcttagtgtgtgcccagatcacagcaggagaagcagccaggcctctgcccctccactctcaccctccctggctccctttccatgggctggcct

SEQ ID NO: 508102 - DNA, 201 bp, Homo sapiens
cccagtctaaagactacattgaaaccaaagaaagtgaaaactctatctgggaacaggataaaaagcaaccagatcagtaaactgcagaaggaatttaaacrtcatagtaagtttgatattacaacattagtacttaataattgttttgttatttttggctgggggtggtgtatggcatgtgtggatcattttttcctttat

SEQ ID NO: 508103 - DNA, 201 bp, Homo sapiens
gaattctattttaatcacatggtagtccgagagtgtggagtgtatgatttcatttttctaaatttgctgaggatagttttatgtctgattgtgtgatcggytttagagtagtgccgtgtgcagttgagaagaatgtatgtgttgttgttttgtagtggatagttttgtagatgtctatcagatccatttgggtcctgtgct

SEQ ID NO: 508104 - DNA, 201 bp, Homo sapiens
aagggggctcagagtagttaagtaagttgctcgcgttccacagcagtttgtggggcaccagctctggctgacttgaggtcctcactcttcctcagggctgyactgatcccttcctcctcacatggctgagccctgagcccaggagatagagctgttggctaagcagcttagtgtgtgcccagatcacagcaggagaagcag

SEQ ID NO: 508105 - DNA, 201 bp, Homo sapiens
ttgttgttcctattttgcacataagggggctcagagtagttaagtaagttgctcgcgttccacagcagtttgtggggcaccagctctggctgacttgaggycctcactcttcctcagggctgtactgatcccttcctcctcacatggctgagccctgagcccaggagatagagctgttggctaagcagcttagtgtgtgcc

SEQ ID NO: 508106 - DNA, 201 bp, Homo sapiens
tacaccaaccttgtgcctaagtgccaggtttccagctaaatgctcaacacatttcttcaccaaaaagagagctgaaatgaatgactgtggggttctgtctrgtccattctgataatgataacaatgatgacaacagcatccaacacctgtagaatgttcactagccaccaggcactgtttcttatgttaacttagtttttc

SEQ ID NO: 508107 - DNA, 201 bp, Homo sapiens
gaactcctggcctcaaatgatctacccgccccggcctctgaaagtgctggaattataggtgtgagccatcaggcccaaccccatttcttccttttaagacrtgatgtcaatttccctcactcgtctccttgctctctgaccttgttccggtttgtgcacatccttctaaaaatgaggtgataagaaaggaaatcatgtgtg

SEQ ID NO: 508108 - DNA, 201 bp, Homo sapiens
tccttccctctctactccctttcttatgtgtggtttcaggtcagtgtgcagctggaagcctctcccgccttcctagctgtcccagtggagaaggaacaagygcctcactgcatctgtgcaaacgggcggcaaactgtgtcctgggcagtaaccccaaagtcattaggtgagcaaaaaactgctagagataattgtctactc

SEQ ID NO: 508109 - DNA, 201 bp, Homo sapiens
catcctcttccttgccctcacccctgctcttcccacatcttcaaagctgaaggagtctccttattctggaggtgaggagcagtgagggagaactgcctgtragtcagcagagaactggacaagggtgcctagccttgcgcctgggtcaggtctgcaggtgccttctacaccaaccttgtgcctaagtgccaggtttccagc

SEQ ID NO: 508110 - DNA, 201 bp, Homo sapiens
actgtgtcctgggcagtaaccccaaagtcattaggtgagcaaaaaactgctagagataattgtctactcaaagattgtatatggcagtgggaaccttataktgagtgctacttccttcaggaaaagaccactagatgctgcgatttttttcctttgccttttattctaagatgcctacaaggatatcctcaacatctccac

SEQ ID NO: 508111 - DNA, 201 bp, Homo sapiens
aagtgtttcccccttcttctatagccacccagctttgtcatggttgccatttaaatggtatgtctttgtccattcttttactttcaacataatttgaaccyatctttgattgagatttcctctacaataaccaataatatttttatgaccatgaataaaactgcatttatcttactagctgcttttttaaaaaattgtaaa

SEQ ID NO: 508112 - DNA, 201 bp, Homo sapiens
caccttggcctctcagagtgctgggattacaggtgtgagccactgcactcggcctatttatttagtttttgagacaggatgtcatgctgttgcctaggtgsctatcatagctcacttcagcatccaacgcctgggctcaagtgatcctcctgcctcagcctcttgagtagctgggaccacaggcacacaccaccacaccct

SEQ ID NO: 508113 - DNA, 201 bp, Homo sapiens
cccagccacatccattcattgatttttatggctactcttcccagttacattttatgcatctgtaagctttccttccttagcaaaattgcattcaaaaatgkgtaaaaatgagtaaatacagaatatcactacagagacttgtatcctcaggtttattgatttcacattgtgaaataaacagcaaaggtcttagttttcaag

SEQ ID NO: 508114 - DNA, 201 bp, Homo sapiens
ataataatctctaatatttctacatacttttgctcctaacagttgagttatatgctcaccctgtatgattgtggtatattctgttatgccagttgcattaytgtaattataaatttgaggaataaagtacacgaacttataaaatataaacatggccaggcacagtggctcacgcctgtaatcccagcactttgggaggcc

SEQ ID NO: 508115 - DNA, 201 bp, Homo sapiens
cttacttctttttctccttactacctatcaccatctgatgcctgttttcatttgttcattatgtctccctactctagaatacaaatttcataaggacaaartatttatctttttttttcattgctgtatccccatatccccagtgcctagaacagtgcctggtatataataagcactcaaatattcattgaataagtaaat

SEQ ID NO: 508116 - DNA, 201 bp, Homo sapiens
ctgcagggcttatgttcaaataatccttattttacttaataatggtcccaaagctcaagagtagtgatgttggcatattgttataattgttcttctattawcagttttgttaatctcttactaagcctaatttataaattaaacttcatcctaagtatgtatgtataggaaaaaacatagtatatatagggttaggtacta

SEQ ID NO: 508117 - DNA, 201 bp, Homo sapiens
agcaaagtgagactgtctctaaaaaaagaaaaaatatatatatagtcttcttctgttttgttttgtttgtttaattcaaagttacatcacagttgtcctcractacagaaacagatccagctacaatgtttaattcttctccattacttaaattaaatgctgccaccattgagtatggcattgtataatcatattccttca

SEQ ID NO: 508118 - DNA, 201 bp, Homo sapiens
ttgacaatagaattgttggcagaaatcttagaatgtctattacatagtaaattgttagtgacttggactagaaagctaacctgaatgagaactccactttrtaattgtttttaccattttaaagtcacaatataacacactaggttaataaagtgctagctagtaaaaatcaagctttagctgggttaatcatctactcca

SEQ ID NO: 508119 - DNA, 201 bp, Homo sapiens
gctcaagagtagtgatgttggcatattgttataattgttcttctattatcagttttgttaatctcttactaagcctaatttataaattaaacttcatcctmagtatgtatgtataggaaaaaacatagtatatatagggttaggtactatctgtggtttcaggtgtccactggggatcttggaacatatgcccctcggata

SEQ ID NO: 508120 - DNA, 201 bp, Homo sapiens
aattaaatgctgccaccattgagtatggcattgtataatcatattccttcagcggttaaaatagaaaaaaaaatgcagatagagatgtgtataattggcaygcatagaaatacagaaccagttacatgacaaaagtaaacaaaactctaaaccttcatattttaaaaacaagattttccatttaacaagaattacattcat

SEQ ID NO: 508121 - DNA, 201 bp, Homo sapiens
atattgttataattgttcttctattatcagttttgttaatctcttactaagcctaatttataaattaaacttcatcctaagtatgtatgtataggaaaaawcatagtatatatagggttaggtactatctgtggtttcaggtgtccactggggatcttggaacatatgcccctcggataaggggaactactatatacaaga

SEQ ID NO: 508122 - DNA, 201 bp, Homo sapiens
tggcatgcatagaaatacagaaccagttacatgacaaaagtaaacaaaactctaaaccttcatattttaaaaacaagattttccatttaacaagaattacrttcattaaactggagagtatctcctatagagaaaacttttagagtcagatccaaacattactatattcatacttggaagcactttgacaactcaaggctg

SEQ ID NO: 508123 - DNA, 201 bp, Homo sapiens
ctttcttagatttacttagtaatgtccagtgaagaactctagttaaaaatacaaaaacaaaacccagcagttaatgagctactgattagaaagtaagtgcmtaaacaataccagcgtagcagcaaaatacagttattgttaacattctgatgcacctcatttatcattttgtgcaagaaaaatgaccacagtctggccaat

SEQ ID NO: 508124 - DNA, 201 bp, Homo sapiens
aagttccacagcgaacatgagcactacagtgaacaaaggggctcctatggttaagggtcatgaaccaaccttgtgcaaacccacacacaaacacgcatacrcttattttctgttcatcaaaggaaaagtaatcctgtaacatttcccccaccttgcttcctattccaaaataaactgcagatgaagattaaaatctaaaca

SEQ ID NO: 508125 - DNA, 201 bp, Homo sapiens
aagaaagctttctcatcaccaagctcaaactactctgcattataattacacaatataaaaagatggaggatcatgcctgtaatctcagcacaagatccttwgggaggctaaggtgtgaggactgtttgaagccaggagtttgaaaccagcctgggcaacatagcgaggctttgtgacaaaaaatacgaaaattccagcctg

SEQ ID NO: 508126 - DNA, 201 bp, Homo sapiens
atagtcaaaccattgagctttaacattttgtgggaataatgttaaaatgatgtatttcctctaagactggctgcacaaatcatacctatgaacccaatgaktcattctgtatctccattatctatcattgaataattatttttaaataaaatgatatttccccttactttatagttctctcatctttgttttaaaatgact

SEQ ID NO: 508127 - DNA, 201 bp, Homo sapiens
cataagcattgctagtgagaaggtaagttggcattttagaaagttgatgagatagtatctataaatttgaaatgtatatacatagcaaattcacaatgggracagattcattatacaaaaatacttcggcatgccccaaagtataaatatgttaggacagccattgaattctattgtttgtagtaaattgttttagtccaa

SEQ ID NO: 508128 - DNA, 201 bp, Homo sapiens
gtttcaccatgttggccaggatggtctcaatctcttgacctcatgatccacctgcctcagtctcccaaagtgctttttgataattttgagaaatgatggargcatattagaatgaaaacaacctgaggatgtgcttttatctttgtatattcaaatattttttctcattaaaaagcagaaagtccgggtatgatggttcat

SEQ ID NO: 508129 - DNA, 201 bp, Homo sapiens
caaatattttttctcattaaaaagcagaaagtccgggtatgatggttcatgcctgtaaccctaacactttgcggggccgagataggaagatcccgtgaggycaggactttgaggctagcctgagcaacatggtaggaccctgtctccataaaaagcttaagaaaaaaattagcggggcgtggtggagtgcacctgtagtct

SEQ ID NO: 508130 - DNA, 201 bp, Homo sapiens
aggaccctgtctccataaaaagcttaagaaaaaaattagcggggcgtggtggagtgcacctgtagtcttagctatttgggaggctgagatgggaggatcasttgagcctaggagttcaaggctgcactgagctatgatctaaccactgtactccagcctgggcaacagagcaagaccctgtctctgaaaaaaaaaaataca

SEQ ID NO: 508131 - DNA, 201 bp, Homo sapiens
aaccttccagatgtgtaaactcacagtagtccttctaagcctctgcctaatctcaccaagacggaacatgattttcctatttgctggatctgtgtctcccaattgcaattcctgagacccagattaaaatgcattttcttttgtttgccactccacagtgttggttttacttcttattagttggctggctcaaaagtccaa

SEQ ID NO: 508132 - DNA, 201 bp, Homo sapiens
ggttgtgtaatgttgagacccacttccacagggtggggtctataagaccctcccaagtactgcctactgtgtctcatcggaacactgtaacgttttacttytgttctccagaaagagcccgtaaaatcatctccaagccaacgattcggaccagacgctcacccagagagtaggaacactttttcccaaggagaggggact

SEQ ID NO: 508133 - DNA, 201 bp, Homo sapiens
cctttaatcctttaaataactgtataataattaacatcacctccagttagacatgaggaaacattaaacattttttattgtcaattaatatattgtcattrttttcttttatagatcattcccgagaagtgttggagcaattagtaggcccaaacaaactaaagcaagtgacatggactgtttattgatgcttttttgaag

SEQ ID NO: 508134 - DNA, 201 bp, Homo sapiens
tgaagcttccgttgctgtaactttcaggttccgaagagcaagtagtgattagggtgtagcatggatcacctgcacagcacagctgacccactagttctttyagttgtgatgtgaggttaagttgagatctttctaacttttcgatgtggatgtttagtgctataagtttccctcttaacaccgccttagctgtgtcccaga

SEQ ID NO: 508135 - DNA, 201 bp, Homo sapiens
tcaggaatattggtttgcaaatattttgttgaggatttttgcatcaatgttcatcaaggacgtttggccagactattttttatgtgagtcccacttctcckcatgggggcaaccccacaacctgggactgcagccaccaccaccccacccccatcagggttttcaggctggtagcaactttacatttccctgggacggagc

SEQ ID NO: 508136 - DNA, 201 bp, Homo sapiens
tcatgcaggcaatcctagcactattaggagtctgaggtgagtggattgcttttagttcatgagttcgagaccagcctgggcaacatggcaaaaccccttcyttacaaaaaatattagccacgcatggtggcatgcacctcccagctactcgggaggctaaggcaggaggatcacttgcacccggaggtcaagactacagtg

SEQ ID NO: 508137 - DNA, 201 bp, Homo sapiens
cttgcatcccagggatgaagtctacttgatcgcggtagctaagctttttgatgtgctgctggattcagtttaccagtattttattgaggattttcgcatcratgttcatcaggaatattggtttgcaaatattttgttgaggatttttgcatcaatgttcatcaaggacgtttggccagactattttttatgtgagtccca

SEQ ID NO: 508138 - DNA, 201 bp, Homo sapiens
ttaagaccagcctggacaacatagcaagatcctgtctctaccaaaaaaaaaaaaaaaaaagaaagaaagaaaaaagaaaacaacaagactgagttttgccrgtttctgttttgtttttgagacaggccaggcgagagtgcagtggcaggatcacagcttacagcctcagcctcccaaagtactgagactacaggcatgagc

SEQ ID NO: 508139 - DNA, 201 bp, Homo sapiens
ccaaccttgcatcccagggatgaagtctacttgatcgcggtagctaagctttttgatgtgctgctggattcagtttaccagtattttattgaggattttcrcatcgatgttcatcaggaatattggtttgcaaatattttgttgaggatttttgcatcaatgttcatcaaggacgtttggccagactattttttatgtgag

SEQ ID NO: 508140 - DNA, 201 bp, Homo sapiens
cctttcttctttttgcttaggattgccttggctatttgggctctttttttagttccatatacatttttaaatagttttatctaggtctgtgaaggatgtcrttggtagttttataggaaaaacattaaatctataaattgctttgggcaatatgaccattttcatgatattgattcttcctatctatgagcatggaatatt

SEQ ID NO: 508141 - DNA, 201 bp, Homo sapiens
aaaagtggtcaataggctcaggaatgtcaaaataaactacttgcacacagccaccttgtgttcttgttgtgcgtccttcattccatgagttttcttgaggytgattctctccagcacagacttgacaactgaaagtgggtcatgtggggaatagaaggctgagaactgtgtccagctcaagaaatttccttcactgttttt

SEQ ID NO: 508142 - DNA, 201 bp, Homo sapiens
agcccctcccagcgtctctcctttccccagctctgcattaggaaggaccctcttacaaagcaagagaggtgttagacagccagcttcctgctgccttcagygtatggggatgctgagcttatccctggtctcctggggaggaaaagccaggatctttgggtccagttccctgccttcccacggtcagccctcagaggatga

SEQ ID NO: 508143 - DNA, 201 bp, Homo sapiens
caagacagtattctttctttgcttttctgtttactcaggttttcactgtgcatcccaacttgtgttttcactattcatgggtagcagaagaccaccagggygctcagcacactgcaaatcgtgttttctccttaagtggaagttacattcacctggagcctgtggctggtaccctgccctgtggccacacggagactatca

SEQ ID NO: 508144 - DNA, 201 bp, Homo sapiens
attttcggaggtatatacactccccactgccagccctcggaggagggaggcaagagggatctaagccacgatgctgctctctgtgtcttgggatttctctraatgactttcttctctcagtcacgtagctgcaggcagagccagccaccgctgagagcaccagcctttccctggtgcggcatgctagcccctcccagcgtc

SEQ ID NO: 508145 - DNA, 201 bp, Homo sapiens
ggaagttcaatctaaggctttctttctcttatctaatggtgagaagatttaagtaatttctgcccataatttttgaaagcaattgttactcataccaagaygtcataagctgtttttatgcagtagtctggtgaaagaaaagtgaacctgaaccgaggaactctcagtcctagcgctgttttccgtctgacttcaaaatct

SEQ ID NO: 508146 - DNA, 201 bp, Homo sapiens
aatatttgaatgttgggagactgaaaattcatttatttggctgtcgaccagtatgagggagaggcatagtgtattttagagtggaagacaccgttgtaacyattcattttggtgagaagctaaggtgaagaatttcaagacagtattctttctttgcttttctgtttactcaggttttcactgtgcatcccaacttgtgtt

SEQ ID NO: 508147 - DNA, 201 bp, Homo sapiens
atttagtgcttagctcttaggagcagggggcaccgaaggtctttcgcccatgggtgtgctggctgtgcatagtaaacatgagtagccggcgggactggccyggtgtctgtacagcaccttcatccccaagctgtttcctcacttcaggttctctctggtttcccccaaaacatgaccaccccaaaggaatgacctcccaaa

SEQ ID NO: 508148 - DNA, 201 bp, Homo sapiens
tatgcagtagtctggtgaaagaaaagtgaacctgaaccgaggaactctcagtcctagcgctgttttccgtctgacttcaaaatctgtgtggtcagctagcktcataatttacagctgcaaagttttcaagctatgcacttaatttttttttaatgtctggtattttgcaagctaccttgtttattgttgttattattgttg

SEQ ID NO: 508149 - DNA, 201 bp, Homo sapiens
accgaaccccagatggtgctcttccccagaaagcttggccaactctcccatgtctcatggggagagccctggctgggagtcgggactcctggctttagatmccaaggccaactagtctatattccctattttagggtaaaatcccttgcccttatttcctcactcaacaatggagttaaaggttacctcttcaaatcccag

SEQ ID NO: 508150 - DNA, 201 bp, Homo sapiens
atgacctcagcatataattgctgcaggtttgagtttccagtgatgatgaaaagcttggctataaagccagcaggttgggtttcaaaatctcagcctcattktggatcctttcctacctttttctcttccttccctcctcttccctccccctctaatcctcaagaggactaggatattccttcattttcctgtgctgtttat

SEQ ID NO: 508151 - DNA, 201 bp, Homo sapiens
gctgtttagggaaaaatataggtgagtgaatgaaggaatgagtggaaggaaggatggatgaatgaacgagatcacaaatgaacagcatgctgtagtggaargaaacctggagacatggggttggcatcctaacattttccttatcctttgtgtgatgttggaaaaattgcctgatgtcttctcagtttcctcatctgtaaa

SEQ ID NO: 508152 - DNA, 201 bp, Homo sapiens
ttttaacactgcaatagtcatagcaccccacgggccagtggtgcctggttatcagccaaacacacagatccctgaatgaaataattcgggcagccgctagrtggggtctgagggtgactatgactagaggctgatgtgccataagcgagatgcccacttcggacttttgtcccttcatggttgttaattgttttagaactg

SEQ ID NO: 508153 - DNA, 201 bp, Homo sapiens
tgagttgtggaccatttagttttaccaagtaattttagggagcttttccagtgcttggtttcagcagttttgtgtacagaaaactgggataaatgagtatycttacaggcaagttcctcctatatgctagctgtcaatacattcatacatccagagggtttcttgttatcccctacaaacaaatagatattctgaggatgc

SEQ ID NO: 508154 - DNA, 201 bp, Homo sapiens
caacgtctgtatttgtttgctcagctgtggtctgttgcagtgaagtgattggctttgtatacacaaagagggccaatgttgtgaactgtgaggttaaggamaagtccaggagcataaaataatcttctttggtttttcttctcagaaagataacactgaaataaaatgaccttaggggaaatatactgaatagttagtagg

SEQ ID NO: 508155 - DNA, 201 bp, Homo sapiens
tatttatatattactgttgtattaaaggcggacaacttttcaggaggagtttaggtataaggcatagtcctagcttctgggtcatagagctgtttagaaasatataatgcagaaataattttcatatgtctgatttgcttatttctctaggtggtgaggtttctgaagaattatccctgaaactgccaccaaatgtggtag

SEQ ID NO: 508156 - DNA, 201 bp, Homo sapiens
aaatatagcacgcggtatttgcaaccatacatactcctccctgctccgctaagatgtaatctagggctatcctattatctaagacaacctgacccaatacrttaattcctctctgctgggctgcgattgcaatttccttgacaagaattcataaagggagagatttctaattctgcgctcatggggcaccgttctccgcca

SEQ ID NO: 508157 - DNA, 201 bp, Homo sapiens
tgctagtcataatattttcctgacccaaaggaaagggccactaacaataaagatggtttacagtagatgagttgaatgcatcctttactcaaagggaacartggtgatgaaactgtggaattgctgacattgtcacttcctctttatctaacttttgctttggtgatttgtattacaggctcagtgctcttacttttaaga

SEQ ID NO: 508158 - DNA, 201 bp, Homo sapiens
atagggatggatatgggtaaggatgaattccatgacacagcagaatagaaagaactaatcaatagcattctcagaagttgaattattcagatctctctctygtattcacagggaggagtagaagatgaagtgaccctctccgcctatatcaccatcgcccttctggagattcctctcacagtcactgtaggtaccacccca

SEQ ID NO: 508159 - DNA, 201 bp, Homo sapiens
gtgagctgagatcacgccactgcactccagcctgggcaacagagtgagactccatctcagaaaaaaaaaaaaaaatttgtgggagaaacaaaaatgaatamgacttcggtcctaccttcatggagttttaatatgaatctgagtagtttcaaaatatgcctaatgagactcaaaataatccatatgtcacagaatgaattc

SEQ ID NO: 508160 - DNA, 201 bp, Homo sapiens
atattttcctgacccaaaggaaagggccactaacaataaagatggtttacagtagatgagttgaatgcatcctttactcaaagggaacaatggtgatgaamctgtggaattgctgacattgtcacttcctctttatctaacttttgctttggtgatttgtattacaggctcagtgctcttacttttaagacattggagaga

SEQ ID NO: 508161 - DNA, 201 bp, Homo sapiens
ctttctactgaagtgtgtgaggccacaactgtcccattatgcatatcagaaacagaaatttgttgaggataattttggatattcagcagtggctgtgaaaytggatttgaattaccgggatacatgcatgcttcttggttacttccaggatagctgaaagaactctgagatgttgtggtaatttggtttattaaagactgg

SEQ ID NO: 508162 - DNA, 201 bp, Homo sapiens
gagtcagcctggaagacagcacaagaaggggaccatggcagccatgtatataccaaagcactgctggcctatgcttttgccctggcaggtaaccaggacargaggaaggaagtactcaagtcacttaatgaggaagctgtgaagaaaggtgagagcacacctgagatccttctcctggcccatcctctgtatcaagaactg

SEQ ID NO: 508163 - DNA, 201 bp, Homo sapiens
acaaaaatgaataagacttcggtcctaccttcatggagttttaatatgaatctgagtagtttcaaaatatgcctaatgagactcaaaataatccatatgtyacagaatgaattctgttaaagggcagaacagagtggctctaaagtcaatctgttccaccacttactagctctgtgagcttgattaagtgccgtaacctct

SEQ ID NO: 508164 - DNA, 201 bp, Homo sapiens
cctgaaggtgagagccacccccctctccctttgtgccctccgtgctgtagaccagagtgtgctgctaatgaagcctgaagctgagctgtcacctaaatctrtgagtcacgttccaaccttggagatcatgaaatgctcacgtgataagatcatttttggaagttaaaagttccaaaaatgtttgcaaaaaacaagttcttc

SEQ ID NO: 508165 - DNA, 201 bp, Homo sapiens
agtcaatctgttccaccacttactagctctgtgagcttgattaagtgccgtaacctctctgtgcttcggtgaatttgtctataagatgagagaacaaggcygggcacggtggctcacacctgtaatcccagcactttgggaggccgaggtgggtgtattgcttgagctcaagagtttgagaccagcctgggcaacatggcg

SEQ ID NO: 508166 - DNA, 201 bp, Homo sapiens
cttgagagttgcatgttttcagtttaaagacaaatttaagaccattctattgtaataaccgaaaattaaatggcacactgataaaaagagaaccagcagcrttttatttaccttgaaaggtggtaatttaagaaaaacaggggagattttaacaggatgaagaggaatataaaaatttgtgacaagatgaaaagaaatatc

SEQ ID NO: 508167 - DNA, 201 bp, Homo sapiens
ctggccagcggactggagaacctcacagccagggactttggggaaatcctctgtagtcagggactgggagcggtggggatgaggagccagaagcctgtccygacccgatgagcacaagagctcccaggaggactcagtggcactgtcctcacaagtggcaaggctgccgacaggccactcaccttcttcctggcagccaga

SEQ ID NO: 508168 - DNA, 201 bp, Homo sapiens
ccagggattctatttagcccgccaggaattaaccttgactataaataggccatcaatgacctttccagagaatgttcagagacctcaactttgtttagagrtcttgtgtgggtggaacttcctgtttgcacacagagcagcataaagcccagttgctttgggaagtgtttgggaccagatggattgtagggagtagggtac

SEQ ID NO: 508169 - DNA, 201 bp, Homo sapiens
aaggtgagagccacccccctctccctttgtgccctccgtgctgtagaccagagtgtgctgctaatgaagcctgaagctgagctgtcacctaaatctgtgastcacgttccaaccttggagatcatgaaatgctcacgtgataagatcatttttggaagttaaaagttccaaaaatgtttgcaaaaaacaagttcttcagag

SEQ ID NO: 508170 - DNA, 201 bp, Homo sapiens
tggaacttcctgtttgcacacagagcagcataaagcccagttgctttgggaagtgtttgggaccagatggattgtagggagtagggtacaatacagtctgktctcctccagctccttctttctgcaacatggggaagaacaaactccttcatccaagtctggttcttctcctcttggtcctcctgcccacagacgcctcag

SEQ ID NO: 508171 - DNA, 201 bp, Homo sapiens
ccttgtgttttctggccagcggactggagaacctcacagccagggactttggggaaatcctctgtagtcagggactgggagcggtggggatgaggagccaraagcctgtcctgacccgatgagcacaagagctcccaggaggactcagtggcactgtcctcacaagtggcaaggctgccgacaggccactcaccttcttcc

SEQ ID NO: 508172 - DNA, 201 bp, Homo sapiens
gacatttcccagagacaggtttagggtgccaggtctcgggtctgctcgtggccttgtgttttctggccagcggactggagaacctcacagccagggacttkggggaaatcctctgtagtcagggactgggagcggtggggatgaggagccagaagcctgtcctgacccgatgagcacaagagctcccaggaggactcagtg

SEQ ID NO: 508173 - DNA, 201 bp, Homo sapiens
ttgattagttgctggtgagaagaaacccctacacattttggtgatcagaggtcacaggagtcttctacgttgattgttagtgagagactaggagaaactcrtttttttttttctttcctatattctcagagatcctaacctgagaggagaaatttaagtgctggaacacaaggattgctaccagctgctcctgggcaaatg

SEQ ID NO: 508174 - DNA, 201 bp, Homo sapiens
tcaacctgtggaatctgatgctatctccaggtggatagtgtcagaactgagctgatttagaagacacccaactggtcaggattgattgattagttgctggsgagaagaaacccctacacattttggtgatcagaggtcacaggagtcttctacgttgattgttagtgagagactaggagaaactcctttttttttttcttt

SEQ ID NO: 508175 - DNA, 201 bp, Homo sapiens
tgagaaatgtctttttgtatgctaataaattgacttacggctggcagcctctaggcttcaggatgggggctggtcacctgaaagactaaggtaggatttgrtggttcgaacttttagccctactcctcaacctcctgggaggggacaggggctgaaggttaagttgatcaccagtagccaatggtttaatcaatcatgctt

SEQ ID NO: 508176 - DNA, 201 bp, Homo sapiens
aagttttctcccaaatatttgggattatggagatgcctgtccttatcatctccccaaaataacctcaaaaaggctaaagatatttttgaatagagagcaastgacatcattttgtgaactattaaaaagctattacattatttctcattgacaaatataatatcactttccaaatcatggaaaaaattatttccagtcctt

SEQ ID NO: 508177 - DNA, 201 bp, Homo sapiens
ccttggggacactgtttcccctgcaactctctgaagtgctatttcactcccatgccactgggcctgagacagatgccccttttgctccacatggctggaargtgaggtgagacagacgccgcttttgctccacgtggctgctttcagagcattctccttctctcctctctaaaaattctgtgctttaaacctcatgtcatc

SEQ ID NO: 508178 - DNA, 201 bp, Homo sapiens
tttcatcatatattttgctttaacatcttaggataaatcacaaagatcatgatatttttctgtacatgcagtagtatgtacctctaaaatacagagacatygtccacttctgcgacaacacgatcacttaacaaaattggaagtaattttccaaaactaattgcaagtttacagtcaagtatcttcaattgtcctaaaaat

SEQ ID NO: 508179 - DNA, 201 bp, Homo sapiens
aattataaatttactttgcctcagcacttttgtaatattactcctttgacttctctttatttaacgacttactattaaaattttcaaatacataaaagaayagaaacacacttaattatgatttaacaataaacatctttccgtattgtttcatcatatattttgctttaacatcttaggataaatcacaaagatcatgat

SEQ ID NO: 508180 - DNA, 201 bp, Homo sapiens
agataatcagtatcatggatgaaaaagtgaacataacagtctgtggagagtgagttacattgtttttatctaaaattttatattttgcctcaattttgagkgattatgtaggtacaaaattataaatttactttgcctcagcacttttgtaatattactcctttgacttctctttatttaacgacttactattaaaatttt

SEQ ID NO: 508181 - DNA, 201 bp, Homo sapiens
cttgaggtaagtatcagaaaaagtatcttataaggaaattagtgcttttagagagtaggaggttctgataatactctagacagatgaactactttaaaaawtttcagatctgaattcctcctactcccagttgtcaggttgattgtattttctcttccttctgtatttgtctttccagaggcaatgctaattatcaccttc

SEQ ID NO: 508182 - DNA, 201 bp, Homo sapiens
tttcaacttaccttcaatattagtgcaaaggaacaaagctgcttttaataggtagaaaatagacaatgttgaaattagaagaaatattcttggtttacttkcaaccaaatgattctgggaattctatttctgttaggtctaaatcataatgacatataactctattaatatctatttcccaacttatgaaagtaagcagta

SEQ ID NO: 508183 - DNA, 201 bp, Homo sapiens
ctaagaaaggggcccctgttgcagctcagttccatccttgtcactccacaatcctgaggggtataggggaacagaccactctggctacttcctgctgaatyggggcaaagatcggggactaggatatgaagagagaaagtttctataatagcatggagttcacaatattcacgagtcccaggcatggcaccgtggtgctga

SEQ ID NO: 508184 - DNA, 201 bp, Homo sapiens
catatagtatagaaatatattatacacaaagacttttttatgctaattgaatttcccttttttcaacttaccttcaatattagtgcaaaggaacaaagctrcttttaataggtagaaaatagacaatgttgaaattagaagaaatattcttggtttactttcaaccaaatgattctgggaattctatttctgttaggtcta

SEQ ID NO: 508185 - DNA, 201 bp, Homo sapiens
aatagttacgctgagggttgtgagttttaggtgaaggagcatagtcatttggggaactgatattggaataatattgttggagattaaaaatccagcaaaartactaccaattgttaggcatttgattgaattgattaggaaggggttgtttttgttgatgacaattacagccgtgaagtgaggttgtcctaacagtgcaaa

SEQ ID NO: 508186 - DNA, 201 bp, Homo sapiens
catcctttactcaaagggaacaatggtgatgaaactgtggaattgctgacattgtcacttcctctttatctaacttttgctttggtgatttgtattacagrctcagtgctcttacttttaagacattggagagaatgaaaaaatatgtattcattgatgaaaatgttcaaaaacagaccttaatctggctttcaagccaac

SEQ ID NO: 508187 - DNA, 201 bp, Homo sapiens
  misc_feature (1)...(201): n = A,T,C or G
cataattagatctttctggttagatacaatggtggaggctatcatttgaacctgggcagtattttttggtgttgatttttctaatcaaatcagttctagtngaagagaggttaggttttgtcttgcatggaaatttgagtgtggtgttgtgtggtgtattgtgattgggtaaaatcctaatatattggagaaattaaatat

SEQ ID NO: 508188 - DNA, 201 bp, Homo sapiens
gctgacattgtcacttcctctttatctaacttttgctttggtgatttgtattacaggctcagtgctcttacttttaagacattggagagaatgaaaaaatwtgtattcattgatgaaaatgttcaaaaacagaccttaatctggctttcaagccaacagaaaacaagcggctgctttaagaatgatggccagcttttcaac

SEQ ID NO: 508189 - DNA, 201 bp, Homo sapiens
tcttgcctcagcctcctgagtaactgctactacagccatgtgccacctggctaaattttttattttaatttttgtagagatgggggacctcacaatgttgygcaggctgttctcaaactcctggcctcaagtgactctcctgcctcagcctcccaaagtgccgggaactaggtataagccacttctcccagcctgaacctg

SEQ ID NO: 508190 - DNA, 201 bp, Homo sapiens
tgagagaggagaagcaccaggctttccttgttcctgggcattgcctgccttgccctgcctctggctttcctgatctggaatatgaatattcttcctgtgcmtatgaaaccttctgaggcactgcagtcctgggcctgtggtgggttggtcagcagcaccattcctgctttgtgcatgtttaactacagcctggatgtgact

SEQ ID NO: 508191 - DNA, 201 bp, Homo sapiens
tatgaaaccttctgaggcactgcagtcctgggcctgtggtgggttggtcagcagcaccattcctgctttgtgcatgtttaactacagcctggatgtgactycttctgagtctcttgtctgccttattcagtctctagtccttcccgagtcagtcctcttcagaaattaaactagaaatagaagggaggggagagaaaggga

SEQ ID NO: 508192 - DNA, 201 bp, Homo sapiens
atatccttggcaaaatccaacccttttcctgtccatatttacgtaaatccctcccttccaacttcctttctttgcagatacctgtccatctccagcccatyttctatctcctttcccctcctttttttccctgtggttgctcaaaatctcctatcatggcattttagcatgctctgatggcccctgaaataccctgagctt

SEQ ID NO: 508193 - DNA, 201 bp, Homo sapiens
cctgtccatatttacgtaaatccctcccttccaacttcctttctttgcagatacctgtccatctccagcccattttctatctcctttcccctccttttttyccctgtggttgctcaaaatctcctatcatggcattttagcatgctctgatggcccctgaaataccctgagcttttcttcagcatccttcctcataatcat

SEQ ID NO: 508194 - DNA, 201 bp, Homo sapiens
agtgatggttaagaacgaggacagtctggtctttgtccagacagacaaatcaatctacaaaccagggcagacaggtatgaagaagcctacagacaggacamcttcaaaaaggaaagatcttcttcccctggatgttccccaggcaaagttcctataatcttggttccttaatagcttgtcttaccagcctacaggcctact

SEQ ID NO: 508195 - DNA, 201 bp, Homo sapiens
tgggattacaggtgcctgccaccatgcctgactaatttttttgtatttttaatagagacggagtttcaccatgttggccaggctgttctcgaactcctgayctcaggtgatccacctgccttggcctcccaaagtgctgggattacaggcgtgagccaccgtgcccggccaaaaataaacttttaaagttaaaattaacaa

SEQ ID NO: 508196 - DNA, 201 bp, Homo sapiens; identical to SEQ ID NO: 82387

SEQ ID NO: 508197 - DNA, 201 bp, Homo sapiens
tagtagcttcttatcaatgtttattcatttttaaaagtaatatttattaaactaaatttattaatgaaatatgtccattcctcctcattcttagaactacrtaagaattctatgacccatcttaatgattacatctgaacatatttacttatagttacataagtgtttatttctcaacctgtaaaattgcatagcaaagga

SEQ ID NO: 508198 - DNA, 201 bp, Homo sapiens
gccttggcctcccaaagtgctgggattacaggcgtgagccaccgtgcccggccaaaaataaacttttaaagttaaaattaacaaggaagaataaattctcrcatcccattgcacagtagggtggctgtagccaacaataaggtattgtatatctcaaaatagctagaggagaggattttgtatgttcccaccacaaaaaaa

SEQ ID NO: 508199 - DNA, 201 bp, Homo sapiens
gattttttaaactttttattgtttttaatttttgtggaaacatagcaggtatatatatttatgggttacatgagatattttgatacaggcatgcagtgcaygataatgattatggatgataatcattatcattatccatatcattatccaatcatggataatgattattatcatgcattgcatgcctgtatcaataaatgg

SEQ ID NO: 508200 - DNA, 201 bp, Homo sapiens
tctcagaaacttgtcattaaaggagaagccttcaaactcccatagagctagatggctataactcatctcctctactcaccctttactactaccccatttgmcctttttgtagataacttagggtttccatagatatcttttattagctccaatgctccaggtgcttttgtaagttataattaatttactcatataggatcc

SEQ ID NO: 508201 - DNA, 201 bp, Homo sapiens
ttttctgttcctgtgttagtttgctgaggataacagcttccaactccatccatgtccctgcaaaggacacaatctcgttcctttttttttttttacctctktttttagagaaagagtcttgctttgtctcccaggctggagggcagtggtgcaatcatagctcatggcagcctcgacttcctggactcaagctatcctcct

SEQ ID NO: 508202 - DNA, 201 bp, Homo sapiens
gttggctattgtaatttttcaaaaaaaatcatgaacttagcacaatgggaattatttatttctcgtaattgcccattgtgagtgtttcagaacgatagacrctgagccatctaaagcctccatgggcattcacttctacaaaggaaggaaaaaaccatacacctcttaattgccttagctggccaggccatcagttctgct

SEQ ID NO: 508203 - DNA, 201 bp, Homo sapiens
atgtactgtgtatttcaaaatagcaagtggacaggacttgaactatttccaacacatagaaatgatacatacttgagttggtaggcaccctaaatcccgcratgtgatcattacacattctctgcatgtaacaaaatatctcgtgtaccccataaatatgtataaatattatgcatcctttgtacaaaaaaaattactcct

SEQ ID NO: 508204 - DNA, 201 bp, Homo sapiens
ctcagcatgacgcccgcacctggatgcacctggaatacgccagcagcacctgctccacctggtgtgcgctcttaggttcctggaatatctgagaaagacasaggacatttcccagagacaggtttagggtgccaggtctcgggtctgctcgtggccttgtgttttctggccagcggactggagaacctcacagccagggac

SEQ ID NO: 508205 - DNA, 201 bp, Homo sapiens
tatcgcaatatatctagggaatttcagataccaaggaatacatctgtcaattatacatgagatattgttgtgaaatttaatatttagttgctagagaatattttattgtgtcctcgtcatagaaaatgcctacatgatgttgtccccccacaaaaatcacaccggttatctgaccactgatctatttagtataatatgcat

SEQ ID NO: 508206 - DNA, 201 bp, Homo sapiens
aggtactcgtaggaggggaagaaacagaccacccctccagaaaccacaccgcacaggttacagaggatgcgacccacctcgtccatctaaggaaggaaggragggagggagcccccatggagcaacccctcagccacccacaaaccgcgtcttcaccttgagactcaaaactgaggagagacccttggcaggactacagcc

SEQ ID NO: 508207 - DNA, 201 bp, Homo sapiens
agacactgcagagagggcatttacctgccccatcatccagcacaggaacagcgactgacagcgctcacccacccaccatcgccagtcacactgggcagcasgcagcagggagcaaagcaggagagcctgggcgagcgcacgaagggtgaggctcccatcccggggtctcctccgcccctgtgcctggtcacggtatgaggt

SEQ ID NO: 508208 - DNA, 201 bp, Homo sapiens
ttgccattgccatcatctctagaatttctggtcttaattcctggcattctcaatacccacacagatgatctcaattcttgaattcctatttatttatttgyttgcttatttatttatttatttatttatttatttatttatttatttgagacagggtctcattctgttgcctagactggagtgcagtggtgtgaccttggc

SEQ ID NO: 508209 - DNA, 201 bp, Homo sapiens
actaatttttctcttggttcacctaagacatctataatgtaactttattgttctacatttcagatcattttctggcaatgcttctttgacatagcatacamattttgcaacatgaagcaatatacatttcttgacttcaaaaaaatatggtttccccataatgtatatgaaaacatatcaaaggtgggttacattattaaa

SEQ ID NO: 508210 - DNA, 201 bp, Homo sapiens
tcactctgtcactctgaaagcactggtgcaatcatagctcactgtagcctcaacctcgtgggcttaagtgatccttcttgcctcagcctcctgagtaactrctactacagccatgtgccacctggctaaattttttattttaatttttgtagagatgggggacctcacaatgttgtgcaggctgttctcaaactcctggcc

SEQ ID NO: 508211 - DNA, 201 bp, Homo sapiens
ggaaagtaagggtagtaaaataatataagaaaataatagtttttacttgcaaatttactctataaatggcctaaccctgcagatattgaatcatgaatcaytgaatcattaaagctttgaagagttacattttagtcacaatttactgattttactgatttggcatgggggcagggattttatccatctgttatggattca

SEQ ID NO: 508212 - DNA, 201 bp, Homo sapiens
aatgcaaacattcatgattgagtaaacatatattaaaacattttagcagctcactaccaatgacatcttgggcaagtttgtcaacctggatttgttctgayttcaatatctgttaaaaaaatattaactgaactcatataaaatagttctttagaatatcaaatatatgtggaattaatttttaatcgtgatatcttttag

SEQ ID NO: 508213 - DNA, 201 bp, Homo sapiens
ttttggatggaaggcactgaatatagagatattcgaaatatatagtgaagtgcaacttaacatgtattgtaggccatatatatatatacagaaagtatagytcctttatttttcaatcatgtatcaagtcttcaccaacagcccccagtgggggaccaaagcagggaaaataattttaaccctatccagttgtaagttggt

SEQ ID NO: 508214 - DNA, 201 bp, Homo sapiens
ctgaaatatggagaaagagaaagaaagttgatttaaaaagtttcaagcaatacagtatgtaaacagacaccaatgtctgcagtctaaggatggcattaaayctgctggtggtttatatgtgatcatcattgtactacaagttctatgagagcatggatactgaatatcctgttcaatattgtattttcatcaccagaatag

SEQ ID NO: 508215 - DNA, 201 bp, Homo sapiens
taataggaaggaatccactttcagcagtgtggccaggaatttgctctccaaagaagggatgattaggctgaaatatggagaaagagaaagaaagttgattyaaaaagtttcaagcaatacagtatgtaaacagacaccaatgtctgcagtctaaggatggcattaaatctgctggtggtttatatgtgatcatcattgtac

SEQ ID NO: 508216 - DNA, 201 bp, Homo sapiens
ctaccattgccatctttcatttcttaagaagaaatgaccttaaacaaacttggcaagtgtttaattttattaaagttgggtgcatgtaaggtacgagtgtyttttatcttgctctctatatttgtgagtatatatatatataacatttcataatttaaaagaaattatttcattctatgataatgtgacaaaagaaacaaa

SEQ ID NO: 508217 - DNA, 201 bp, Homo sapiens
aaactggaaaagcttctagacaaattttaaaagagcgctaccattgccatctttcatttcttaagaagaaatgaccttaaacaaacttggcaagtgtttamttttattaaagttgggtgcatgtaaggtacgagtgtcttttatcttgctctctatatttgtgagtatatatatatataacatttcataatttaaaagaaa

SEQ ID NO: 508218 - DNA, 201 bp, Homo sapiens
aagatgggaaaaggtgtttgctccttcagatgcatagaaaccaatgcaaagttacacagataatgatgaaccaggcaaacataataccaccaaaggaaacyaatgaagttccagtaactaatctccaccccaaatggagatctacaaatttccccccaaaattcaaaataatcatcttaaagatgctcagtaagatgcaag

SEQ ID NO: 508219 - DNA, 201 bp, Homo sapiens
tctcataatgggcttatcatgcctgattaaatgagtattttcaaatactaacacacaaggtatactttaatataactgtatcgatgtatccaattatatayaggttaaaaggaaaacagatttttattaaataatgtaaataactacatgccatgaaaagtaaggagactcagtaaaagtattctttttttctgaattcta

SEQ ID NO: 508220 - DNA, 201 bp, Homo sapiens
ataaaggaaagggaaggggaggggagggagattgaaagaaagaacaaaaggaaggaaagaatgaaagaaaagaggaagaaataaagggagggagggaaggrgggagtaagggaggtagggagaaaaaaaactttaaacctcaccaggagcaccaacccttagatcaagtttagcatttaccacactaggttactgagttat

SEQ ID NO: 508221 - DNA, 201 bp, Homo sapiens
tccctgtggttgctcaaaatctcctatcatggcattttagcatgctctgatggcccctgaaataccctgagcttttcttcagcatccttcctcataatcakcactcctgttcttgaaacccagaatgcatatctaatccacacactctgatatttaatttgcatgcaaattgtattcaaattgctttgtggtatttttaat

SEQ ID NO: 508222 - DNA, 201 bp, Homo sapiens
tctgatatttaatttgcatgcaaattgtattcaaattgctttgtggtatttttaatgtattccaaacttattccttacaacaggaggaccctgatggagawgagctcttactccttcatagaaaaatcaaaaactttcccacgttctcttctaaaacatcttcacatctttcttcttattggattcattactggtgaatca

SEQ ID NO: 508223 - DNA, 201 bp, Homo sapiens
ctcgttcctttttttttttttacctctttttttagagaaagagtcttgctttgtctcccaggctggagggcagtggtgcaatcatagctcatggcagcctygacttcctggactcaagctatcctcctacctcagccacctgaagaaaataattagctgtctggacaattttatcctttacctccaaggcctaaacaatac

SEQ ID NO: 508224 - DNA, 201 bp, Homo sapiens
gtattttctctataattaaatatctgtgtgggtgggtgtctgtgtgtgttttgagttgagagaaataaaaatgcaagggaaaaatcaaagcttacactgcwgaggaatggtgatcccacttgctgtaatttagatgtactgacagtcctcgtacctcatgttagtgtctaccatatgctgttatttccatcttaaacactt

SEQ ID NO: 508225 - DNA, 201 bp, Homo sapiens
gtggagatgacatcctatgtgctcctcgcttatctcacggcccagccagccccaacctcggaggacctgacctctgcaaccaacatcgtgaagtggatcaygaagcagcagaatgcccagggcggtttctcctccacccaggttggtgatttgccaaaaccttttatttcaccttcaggtagcaaaagatttgaatgaaaa

SEQ ID NO: 508226 - DNA, 201 bp, Homo sapiens
catccaagaagaaaaaaatacagatgacagtaacttgaaatgaggaaaagttttcagtatccaaggataatggaaataaaagcaaatcaaagtcaaagagrgccaaaaggaaatgctcagaatcccggcaccccatcgctgtgttattatccatctcctatttcccataacaacactgccttcctcaagcagcagtggagc

SEQ ID NO: 508227 - DNA, 201 bp, Homo sapiens
gaccttgactaatttaactgagagcctctgtttcctgtcttataagacagggctaaaaataatactttcctcttatggaaattgggaaaattaaatgtgayaacaaacataaaacacataaaatagtacctagcacatgataagcatttaacttaggctctctacccatatcattgtttgtcagaggtcacattctcttgg

SEQ ID NO: 508228 - DNA, 201 bp, Homo sapiens
ttcaacggccaaatttcatgctcatcagtacatcttctcttggtgtagaactgatgatgataattatgatgatggaaaaaagtgctgttgatagcaatgcstctcttccttcactttcctctaactgaaccgtctcattcccaggcagtatatggttctggtcccctccctgctccacactgagaccactgagaagggctg

SEQ ID NO: 508229 - DNA, 201 bp, Homo sapiens
tagcacatgataagcatttaacttaggctctctacccatatcattgtttgtcagaggtcacattctcttggcaagtcccactgcactctggcaacccatcygggggctgaggaatcaaacaatatgcggtttctatggaattcctggcgctagaaggagctcagaagacgagctgatgggttgtcttccatttctggtttg

SEQ ID NO: 508230 - DNA, 201 bp, Homo sapiens
gctctctacccatatcattgtttgtcagaggtcacattctcttggcaagtcccactgcactctggcaacccatccgggggctgaggaatcaaacaatatgyggtttctatggaattcctggcgctagaaggagctcagaagacgagctgatgggttgtcttccatttctggtttgtcaaataaaaaaaattctggatgtgg

SEQ ID NO: 508231 - DNA, 201 bp, Homo sapiens
ttttctctctctctctctctctctaatggttgattttccttcctatattttcttgagatttggagcttaaagaatctaagcacaccaaccttagcagaaaraaagccagtttgtgatttaaaagacaaaaaaaaatggtcatgcgtgccaaagagataatctgcaagacaatagtatctccagctcaacaaaagaagtcat

SEQ ID NO: 508232 - DNA, 201 bp, Homo sapiens
taatggttgattttccttcctatattttcttgagatttggagcttaaagaatctaagcacaccaaccttagcagaaagaaagccagtttgtgatttaaaaracaaaaaaaaatggtcatgcgtgccaaagagataatctgcaagacaatagtatctccagctcaacaaaagaagtcatgtacaagattaaactcatgctgt

SEQ ID NO: 508233 - DNA, 201 bp, Homo sapiens
acaaacataggattttgacagccacaatgaattctttcattcttcctactctgcacctgtctgtggccttttcctctaccatgttctgtcacatccacatmattatctcgtgtcacagagccttccctgtgacttctgtgatgtatggctatgggcatggaatggatgtacttaacattatggcttttttattctttcttc

SEQ ID NO: 508234 - DNA, 201 bp, Homo sapiens
ttctaggttatcttccaggattttatagttttaggttttacatttaggtctttaatccatcttgatttgatttttgcatatggtgtaagcaagaggtccargttcaatcttctgcgtatggctagccagttattccagcaccatttattgaatagagtcctttcccccttgcttgcttttgtcaacgttgtcaaagattag

SEQ ID NO: 508235 - DNA, 201 bp, Homo sapiens
aggattttgacagccacaatgaattctttcattcttcctactctgcacctgtctgtggccttttcctctaccatgttctgtcacatccacatcattatctygtgtcacagagccttccctgtgacttctgtgatgtatggctatgggcatggaatggatgtacttaacattatggcttttttattctttcttcctatttat

SEQ ID NO: 508236 - DNA, 201 bp, Homo sapiens
tccttagtctaattaggtcccacttgtcaatttttgattttgttgcaattgcttttaacatctccatcatgaaatctttacaagggcctatgcccagaaargtattttctaggttatcttccaggattttatagttttaggttttacatttaggtctttaatccatcttgatttgatttttgcatatggtgtaagcaagag

SEQ ID NO: 508237 - DNA, 201 bp, Homo sapiens
ttgactgctatttttatctagatagatagaccaatagatagatagatagatagatagatagatagataggatagataggatagataggggtggttttgttktttttttttttttttttttttttttagacagagtctcactcttttgcccaggctggaagtgtggtgacacgatctcagctcactgcaacctctgcctccc

SEQ ID NO: 508238 - DNA, 201 bp, Homo sapiens
ttcctggcagccagacggcccagcaggccacccttctcccagtgggcatggacctggcgcaggtactcgtaggaggggaagaaacagaccacccctccagraaccacaccgcacaggttacagaggatgcgacccacctcgtccatctaaggaaggaagggagggagggagcccccatggagcaacccctcagccacccac

SEQ ID NO: 508239 - DNA, 201 bp, Homo sapiens
tgttaataaggaaaattaaaagatgatttataataaaaaagcaaatctggccgggcgtggtggctcatgcctgtaatcccagcactttgggaggccgaggygggcggatcacaaggacaggatatggagaccatcctggctaagacggtgaaaccccatctctaccaaaaatacaacaaaaaattagccgggcgtggtggc

SEQ ID NO: 508240 - DNA, 201 bp, Homo sapiens
acctcatctctatttcaaaaaaaaaaaccagataataaataataaaatctgagacgtggggttcagctttccatttctagacctctgtcatgcttagagcktatctcagaaaagacacatctctttgtgttcttaaagttctccaggaagaattttcttgtttatttctgtgttaataaggaaaattaaaagatgatttat

SEQ ID NO: 508241 - DNA, 201 bp, Homo sapiens
ggagggaggggaatgctgggactggaaggtctgtaaacatctcaaaggttgcaaagggtttctctatggtaggaggaaacaaggctaggatgaaccagatrtgggaagcagatgaaagagtaacaaatcgagcaaattggaatgtttggccctgaagccaccctgttctctgaaggggctcaggccaagggtaaacaaagt

SEQ ID NO: 508242 - DNA, 201 bp, Homo sapiens
taatcatctgtgaggcaaagaaaggaaattttgagggtctgtgtctggtcttaacataggtaaagaagaagagcatctgtgagtcttactgaagtgacatstggaagggttggggggtggtctttgcagtaagcccttttgcagaacatgaagggtgggggattttctttctttctttctttctttctttctttctttctt

SEQ ID NO: 508243 - DNA, 201 bp, Homo sapiens
ggcctgatctcggctcactgcaacctccgccttctgggttccaacgattcttctgtctcagtatcctgagtagctgggactacaggtgcctgccaccacamcggctaattttttttgtatttttagtagagacagggtttcaccatgttggtcatggctggtctcgaactcctgacctcaggtgatcctctcacctcggcc

SEQ ID NO: 508244 - DNA, 201 bp, Homo sapiens
aaggtaaaaggggtcaggtacagtggctcacgcctgtcatctcagcactatgggaggccaaggagggaggattgcttgagcctaggggtctaagaccaccrgcctgagcagcatagtgagatctcatttctacaaattaaaaaattagctaggtgtgatggcgcacacctgtagtcccagctgctcaggaggctgacgtgg

SEQ ID NO: 508245 - DNA, 201 bp, Homo sapiens
atgtcttattgtctgctgggctcagccatcatgtggtggtgaccccactgccatcacagccaccgtttgtggagcatctctcataggccaggcgtggagcrgggtgctttaccacctcactgaatttccgatacaaccccaggaggtgggagctcctgtttgttgttcctattttgcacataagggggctcagagtagtta

SEQ ID NO: 508246 - DNA, 201 bp, Homo sapiens
gacctacctcaagtaaaatgttcactgccatggcatgtgagggaaaagggaaataattcttatgcatggccttcaacggccaaatttcatgctcatcagtrcatcttctcttggtgtagaactgatgatgataattatgatgatggaaaaaagtgctgttgatagcaatgcctctcttccttcactttcctctaactgaac

SEQ ID NO: 508247 - DNA, 201 bp, Homo sapiens
ttgggcaggtgaggacaggacagatgaggacagcagctgttctctctgagaagtcctaactcagaaaacaatgggacagatcagagaaagggttagggacrtggacaggaattctgggaaagggcaaaaaactgattttgtctttgatgttctatagacatccttgaaatacaatattctcccagaaaaggaagagttccc

SEQ ID NO: 508248 - DNA, 201 bp, Homo sapiens
ttaatgatgtatgtatccccagcataagacaatactaatatcaaaatactattaaagtcaatctctatcaaagccttatcctttttccagctcagaaatayaatcacatgtgtttgtatgaatgctgaccatgtgcagagcactgcgctaggacccatgactacaagaaaaagattgtcagcaggttcctgcttttcaatt

SEQ ID NO: 508249 - DNA, 201 bp, Homo sapiens
gcaagaattatgtgcagattgcaaaacagcctcccctctgaatagatgaataatttttaaaaagaaaaaagaaaagaaagctcttttttccacaggctttytgcagctccaagcctccaggacacacaaagagggaacagtttggacttcataactgcacagccttaaacagcctgcaggaggcagcatgtggacttcagc

SEQ ID NO: 508250 - DNA, 201 bp, Homo sapiens
cttaatcatgtctgtgcagcctgttcacccaacacagtgctgggaaggttgtaggcactcattaaaacaaaggggtgattaagtgtgtcagtgcctgagtragcgtattcctgtaggtagggaattagaggagaaatggagtaacactaaggtgttagcacacaccagtaggaaacatgagctagaaaaatcattttgact

SEQ ID NO: 508251 - DNA, 201 bp, Homo sapiens
ctgaatttacctggagtcaaagtatcttgggagagatgctggatctaattggatttcactaatcagttgcctaagtggagtttggggatggggactcccargggtgttctgagcaggacattttcatatctgtagcttagggacaccttgtggagattttatccatagctaactaaaacatccaaaaagaaaacaaaacca

SEQ ID NO: 508252 - DNA, 201 bp, Homo sapiens
atttattttcctctcatccatatactcatacctctttgaaagccaaacctgtatcttaatcatgtctgtgcagcctgttcacccaacacagtgctgggaargttgtaggcactcattaaaacaaaggggtgattaagtgtgtcagtgcctgagtgagcgtattcctgtaggtagggaattagaggagaaatggagtaacac

SEQ ID NO: 508253 - DNA, 201 bp, Homo sapiens
gtgatgtgtgttccagtgctatcctcattgccatgattgttttcttagatttctgttcaagtggaggagtctcagaattatgaagcaaatattaatacctkgaaaatcaatggcagtgaggttattcaagctggagggaggaaaacaaacatctggactattatacctaagaaattgggtaagcagctatctgtctacacc

SEQ ID NO: 508254 - DNA, 201 bp, Homo sapiens
catggccagttctggaaagagcccagagtagaatctgggtgccccgatggccaggagttttctttcccctttgcctgccagcagaggatgtaacagacgaycaaggggctccagtagtcgctgggcttgacccaggcccggggcctttccttctatggcggccgcacccgtacctcacgcacattcccaattgcgcagaag

SEQ ID NO: 508255 - DNA, 201 bp, Homo sapiens
cggggtgggatgaggatgggctgctttagggccagggggcccttgccagcagcctgggaggggctctgccacttgccctgctctaggttgttttgggcatygcccaggccctggacatgccttctgtccaatgcctggagccctgggatgccacccagtctgtcccctgtcccctcctccatccaccagtgagcacggctc

SEQ ID NO: 508256 - DNA, 201 bp, Homo sapiens
ctctttcaaagtcactagccggggtgggatgaggatgggctgctttagggccagggggcccttgccagcagcctgggaggggctctgccacttgccctgcyctaggttgttttgggcatggcccaggccctggacatgccttctgtccaatgcctggagccctgggatgccacccagtctgtcccctgtcccctcctccat

SEQ ID NO: 508257 - DNA, 201 bp, Homo sapiens
gttgactcattctgcttttccttctgagttagtggaaaaatcttggttgatgttgctgtacttgctactggtccactaacatcaactttcaaagcagcagytgcctttgcattttctgccaattgattttgtaaactacaaacactgccttctttaataacgggatacactgtttcaggtaacactgcaggtgttattcct

SEQ ID NO: 508258 - DNA, 201 bp, Homo sapiens
attgaaaatacatggaatggaaaaagtttaaaattctagtaaacaaggaatgctagatacgatgtgcgtgacacttttaatcactacttttaaaaaatggycattcaaatgttctttaatgtactatattcattgtattattttaacagcaaataatatatctatgagattattttagctcagttgtgatgctgttctcag

SEQ ID NO: 508259 - DNA, 201 bp, Homo sapiens
ctcctgggttcaagggattctcttgcttcagcctcccgggtagctgggattacaggcgcctaccaccacacctggctaatttttgtatttttagtagagayagggttttgccatgttggccaggctggtttcaaactcctggcctcaagcgatctgcccacctcagcctcccaaagtgatgggattacaaatgtgagccac

SEQ ID NO: 508260 - DNA, 201 bp, Homo sapiens
ggtcttgttctgtcacccaggttggagtgcagcggcacaatctcatctcactgcagcctccgcctcctgggttcaagggattctcttgcttcagcctcccrggtagctgggattacaggcgcctaccaccacacctggctaatttttgtatttttagtagagacagggttttgccatgttggccaggctggtttcaaactc

SEQ ID NO: 508261 - DNA, 201 bp, Homo sapiens
gagggtctcctaggaggtcagcagaattgataagagcaagagaagtagaattaatatctttaattgtgtaataagaataatatatttaattgtgtaataaygaatatctttaattgtgtaataaattgtgtaatatatttaattgtgtaataaagaatatctttaattgtgtaataagggtgaaaagggattttgtcagaa

SEQ ID NO: 508262 - DNA, 201 bp, Homo sapiens
tatgggaggccaaggagggaggattgcttgagcctaggggtctaagaccaccagcctgagcagcatagtgagatctcatttctacaaattaaaaaattagytaggtgtgatggcgcacacctgtagtcccagctgctcaggaggctgacgtgggaagatcacttgatgccagaaggtcgaggctgcagtgaaccatgatct

SEQ ID NO: 508263 - DNA, 201 bp, Homo sapiens
ctaaaaaatcttgaatcatcaggtcccgctggacctgtgggcctgcagaagtgacccactcctctctggtaaaggctagagcctctggcttatttgaaggrcatatggaggatcctgtcttgcaagaaaaccctagtttgtttgggatggactgtagaattgcgtaggcgaataaagagtaccactctggtttgatgtggg

SEQ ID NO: 508264 - DNA, 201 bp, Homo sapiens
caaggtttgtgagtgcaccaattgacactctgtatctagctgctctggttgggccttggagaacctttatgtctagctcagggattgtaaatacaccaatyggcactctgtatctagctcaaggtttgtaaacacaccaatcagcaccctgtgtttagctgaaggtttgtgagtgcaccaatcgacactctgtatctagct

SEQ ID NO: 508265 - DNA, 201 bp, Homo sapiens
cagaaattgttgaattcttaattctcaactccagccagttctgctatatgtaggtcagggtgctgatttggaagcagtaagattctgagactttggatggrgacacttggtccaagcactaaaaaatcttgaatcatcaggtcccgctggacctgtgggcctgcagaagtgacccactcctctctggtaaaggctagagcc

SEQ ID NO: 508266 - DNA, 201 bp, Homo sapiens
tgatgttatatttgttttcctctttgacttaatattattttatttttttaaaaagaagctctgaccaagcaaattactagtctgtctctttattttttttygtagaacttttttttggttcttttttgtcctaaaatagtttctgaaaattaggccatagaagaattttagattcttctatgcaacaacagaatgcaacaa

SEQ ID NO: 508267 - DNA, 201 bp, Homo sapiens
ttgaactcttgtctcaggtgattcacctgcctcagcctcccaaagtaagccactgcccccagccaattttcattattttgcaaatagtttgatgttatatytgttttcctctttgacttaatattattttatttttttaaaaagaagctctgaccaagcaaattactagtctgtctctttattttttttagtagaactttt

SEQ ID NO: 508268 - DNA, 201 bp, Homo sapiens
atagatagatatgaacaaacaaacaaaagtaatttcaagggactatacggaacatcttaaaccaagttttatcatttttacaaatgagaaaaagttaataycattgacattaatgattggcttgaggtaatatagcaataatgatctcaactcagtattgtggtactagtgatagattaagaggaagaaacgagctcttcg

SEQ ID NO: 508269 - DNA, 201 bp, Homo sapiens
aaaacaaaaaatgctacatcagcttgtttttatagatagatatgaacaaacaaacaaaagtaatttcaagggactatacggaacatcttaaaccaagtttkatcatttttacaaatgagaaaaagttaataccattgacattaatgattggcttgaggtaatatagcaataatgatctcaactcagtattgtggtactagt

SEQ ID NO: 508270 - DNA, 201 bp, Homo sapiens
gaacaagcgcctcactgcatctgtgcaaacgggcggcaaactgtgtcctgggcagtaaccccaaagtcattaggtgagcaaaaaactgctagagataattstctactcaaagattgtatatggcagtgggaaccttatattgagtgctacttccttcaggaaaagaccactagatgctgcgatttttttcctttgcctttt

SEQ ID NO: 508271 - DNA, 201 bp, Homo sapiens
ttaaaggattgggtgaattagtactgaaggacataagggaagtcacaggccatttgtgtttgccgttggctttttataatttgatgtctttatggggtacrgagtgatgttgtaatatatgtaaacaatgtgaaattattaaatcaagctaattaacatacccattacctcaatactcatctttttttttttttatttttt

SEQ ID NO: 508272 - DNA, 201 bp, Homo sapiens
tagaatcttttaagttcattatccccatagtcaactaggtattgtttggaattgcattgaatatataaatgtataaaaggttttaaggttatgaatatatraaaggttttaagcacaagtgtcaattttttgcatttcatcttccctattcagactcattttatatttattcaattcacatgaagcaaattctaattctga

SEQ ID NO: 508273 - DNA, 201 bp, Homo sapiens
tccagaagcgcagggtggaatttttagtttccaaatattttttatctgtggttggttgaatccccagatgtggaacccacaaatacagagggccaactgcrtgtgtgtgtgtgtgtgtgtgtgtgtgtgtgtgtgtgtgtgtacatgttgaatgttggtgtttataccttatgttcattttttagaactgtcttttttttg

SEQ ID NO: 508274 - DNA, 201 bp, Homo sapiens
tctggaggcctccccagaagcctagcagaggccagcatcatgcttcttggacagcctgtggaactgtgagccaactaaacctcctttctttataaatcacycaatctcaggtatttctttatagcaatgcaagaatggactaatacaattactaagatcattatttgttcaagttaaaactctagaatcttttaagttcat

SEQ ID NO: 508275 - DNA, 201 bp, Homo sapiens
ctctgtttacaagcatgcctccccgccatcctgtccttaaaatagtgattccaagtcagttttcattaatgatccatgagtgatggccagcatgcagcacmtagtttcatgtggacatttctctctctggtttatgaccactgcacggggtggatggttattattattgggaataaccgtgtatcagagtgcagttcttag

SEQ ID NO: 508276 - DNA, 201 bp, Homo sapiens
ttagccttctgccatgattgtaagtttctggaggcctccccagaagcctagcagaggccagcatcatgcttcttggacagcctgtggaactgtgagccaaytaaacctcctttctttataaatcacccaatctcaggtatttctttatagcaatgcaagaatggactaatacaattactaagatcattatttgttcaagtt

SEQ ID NO: 508277 - DNA, 201 bp, Homo sapiens
agaagccttgctcccttttagccttctgccatgattgtaagtttctggaggcctccccagaagcctagcagaggccagcatcatgcttcttggacagcctrtggaactgtgagccaactaaacctcctttctttataaatcacccaatctcaggtatttctttatagcaatgcaagaatggactaatacaattactaagat

SEQ ID NO: 508278 - DNA, 201 bp, Homo sapiens
aaaggaaaaagaaaacagtttttccaaacattggaaacaacaaaaagttcatcagtagatgaatggtttggcaaccatacgacatagttctgctggacaaygaagaggaacaaacgactgacatacacaacgacttaagtggatctcagaagcattaggctgtgtggggaaaaagccaatctcaaaaggtcacaatctgaa

SEQ ID NO: 508279 - DNA, 201 bp, Homo sapiens
cagactcatcaatagagaggacagtgagagaaagaagggaagatcattggaaatacacaaaatttgtatgttgaataaatttatggcatttacaactctaycttttcttttgttctttatcaatatcatattcacttttctgaatatgaatctattctccctagcatttattaaatcacagaaaagctatacaaagaggta

SEQ ID NO: 508280 - DNA, 201 bp, Homo sapiens
ccagctacttaggaggtggaggcacgagaatcccttgagcctgggaggtagcagttgcaatgagctgagattgcaccactactccagcctgggtgacatasggagactctatcagaaagaaataaaaaatagggccaggtgcggtggctcatgcctgtaatcccagcactctgggaggccgaggcaggtggatcacctgag

SEQ ID NO: 508281 - DNA, 201 bp, Homo sapiens
atgaagaacagactcatcaatagagaggacagtgagagaaagaagggaagatcattggaaatacacaaaatttgtatgttgaataaatttatggcatttayaactctaccttttcttttgttctttatcaatatcatattcacttttctgaatatgaatctattctccctagcatttattaaatcacagaaaagctataca

SEQ ID NO: 508282 - DNA, 201 bp, Homo sapiens
catggaatggaaaaagtttaaaattctagtaaacaaggaatgctagatacgatgtgcgtgacacttttaatcactacttttaaaaaatggccattcaaatkttctttaatgtactatattcattgtattattttaacagcaaataatatatctatgagattattttagctcagttgtgatgctgttctcagactatttttc

SEQ ID NO: 508283 - DNA, 201 bp, Homo sapiens
gatgctgttctcagactatttttctattagatttgaagtttctcaatatttctactgcacaagatcttcaaaatcctaccttggcaattgagacagaataytgtaccaacttgtatagttttatgacattaagtcgaagacacagttttaagagtgaaatagcaagcttcctgagacagagaaacactaaaacacaacaac

SEQ ID NO: 508284 - DNA, 201 bp, Homo sapiens
agttttatgacattaagtcgaagacacagttttaagagtgaaatagcaagcttcctgagacagagaaacactaaaacacaacaacaacaacaacaacaaaragaacaatatattggttatgtatattggtatatagtcacgtaaataataataaccttaaaagaatgattgttttcaatcctgtaattttcacaagcaagg

SEQ ID NO: 508285 - DNA, 201 bp, Homo sapiens
caacaacaaaaagaacaatatattggttatgtatattggtatatagtcacgtaaataataataaccttaaaagaatgattgttttcaatcctgtaattttyacaagcaaggaaactggagatcagttctaattacataatgtgaaatcaggaagtttaaaaacaatggattccttgctaggacattatttcaatccagtgc

SEQ ID NO: 508286 - DNA, 201 bp, Homo sapiens
taaagtgaatatcactgtagttgctgagtccaaacaaagcagtgcttgcccaaatgaaggaatggagcagcaaaagctaaactggaaagacactgtggtcmaaagcttcttagtagaggtatggatatgcaaacagtcaagcttttcctgaaaagaaacagacatctaagaggttttgtattaaaagatcttctcattgaa

SEQ ID NO: 508287 - DNA, 201 bp, Homo sapiens
tggagatgctatacaggatcagaggagctgagagtgtcccacagtgacatcaagataatgcctgtccaagctacagaacgcagaggctaaaatgggtaccrgtgatgtcccgtgccttccagatatgaacaaaaggggaagatgagttggatcttctctcagggataaacttgcaccagccatgcttgagtgagctggtgc

SEQ ID NO: 508288 - DNA, 201 bp, Homo sapiens
aatgctacaattacagtcgtaacttacctttgtcttgtctttttcatgaaagtttttgttgttgtgatgacatctccaggtttatcgcttttgataaacayatactatttgttagggcgctatgacatttatctttgactttgacatttggctaaaatcttttagttacagtcagctttgccctcagtttatgtcagtgtc

SEQ ID NO: 508289 - DNA, 201 bp, Homo sapiens
agcccaggagtttgagaccagaatgggcaccatagcaagaccctgtctcaaaataggtaggtaggtaggtaggtaggtaggtaggtagaggtaggtaggtrggtaggtggatggatggatggatggatagatagatagatagatagatagatagatagatagatagatagaagatagagagatagtcaaccttgagagggt

SEQ ID NO: 508290 - DNA, 201 bp, Homo sapiens
attttatgtgaaacatctgtgcactgtacaggtttatctttttgaaaaccaaagtctttattttcagtggtattatctaattgtttttctggttctctgcwgccaatcccttgctgattgggtagagaaggtttctgtggctcaaccattttcaagggaagagagctgaatatctttgctatttgggaattgtaagaggta

SEQ ID NO: 508291 - DNA, 201 bp, Homo sapiens
acaaaaacaattaacttaaaaataattttaattgtcattaattatataatttatattatttatatttaatgtccttttacattaagataagcagaactggragggatctcgtagtttggcacactataaaccctaaactgggccaagagcagtggctcacacctgtaatcccagcattttgggaggccaaggcagatggat

SEQ ID NO: 508292 - DNA, 201 bp, Homo sapiens
tggtatttggatttcaaagagcagatgcttaaactgttttatttatttatttatttattttatttttttgagacggagtctcactctgtcgcccaggctgkagtgcaatggtgtgatctcggctcactgcaacctccgccttctaggttcaagtgattctcctgcctcagtctcccaagtagctgggattacaggcgtctg

SEQ ID NO: 508293 - DNA, 201 bp, Homo sapiens
tttatttatttatttattttatttttttgagacggagtctcactctgtcgcccaggctggagtgcaatggtgtgatctcggctcactgcaacctccgcctyctaggttcaagtgattctcctgcctcagtctcccaagtagctgggattacaggcgtctgccactgcgcctggctaatttttgtatttttagcagagacag

SEQ ID NO: 508294 - DNA, 201 bp, Homo sapiens
ctgggcttgtgtcagatatctaagtcttatctccatatgtctatttaaactagctgaatgaagaaactttttaaaaatataccttcaaagtatctagaatrgtttatcattactaaccagattgaactgaattgaaatagagttagtggactgcatttatgactaaataattctgaaaaaagaatagtgttgttatggttt

SEQ ID NO: 508295 - DNA, 201 bp, Homo sapiens
tatcattaatatagcaatacaaaaattaccactatattgaaagagaaggggaaaagctaacacttttttaagtttatttaaattatcattaaaaacccaamtctgtgccacctataatcatcttgacgataatgctcagtctgcagatctctcttctctatacgaggatcccttgataaaatcatctagtcaatggcttta

SEQ ID NO: 508296 - DNA, 201 bp, Homo sapiens
caatatagaatcaccgtttaactcttaagaactttattccccaggaaaggtgaatttcacagccactgcggaagccatgcattctcaggaagtgtgtgacratgagttgactgacgtcccaccacttgcgcagaaggacactgtagtcaaggccttactagttgaggtacgtaagtctactctctgtgagtctcagagccc

SEQ ID NO: 508297 - DNA, 201 bp, Homo sapiens
ctgggtgagtagtaatgctattagcaaattccacttcgtgtgcttggatgatttgttttctgcactgaccccaatacacactttttctcctcctttaataytaatcaagaggaagacaaccactggatacactggggaaactggaaaagaagaaactgttcaatatagaatcaccgtttaactcttaagaactttattccc

SEQ ID NO: 508298 - DNA, 201 bp, Homo sapiens
tgtctgtaataccagcacttggggaggttgaggaggccagatgtttaagaccagcctggacaacatagcaagatcctgtctctaccaaaaaaaaaaaaaaraaagaaagaaagaaaaaagaaaacaacaagactgagttttgccggtttctgttttgtttttgagacaggccaggcgagagtgcagtggcaggatcacagc

SEQ ID NO: 508299 - DNA, 201 bp, Homo sapiens
ggaaaaccgtgtcctgggttgtgactccgaagtcactgggtgagtagtaatgctattagcaaattccacttcgtgtgcttggatgatttgttttctgcacygaccccaatacacactttttctcctcctttaatattaatcaagaggaagacaaccactggatacactggggaaactggaaaagaagaaactgttcaatat

SEQ ID NO: 508300 - DNA, 201 bp, Homo sapiens
aattttcttgtttcaaacacctaaactacaaagtgtctgatagagctgaccatatttgcacagcttctcagcgcctctggactcatggacattgtccctcwgtccatttacctgatgcacagagcatcttttgcagtattcatgctgttctgcatcccttcataaacttgtggttgggtgtgggggacaggtcgttgtgca

SEQ ID NO: 508301 - DNA, 201 bp, Homo sapiens
ataaaacctttccatcactaaattaggttcaagtggtggtggggggaggaagtgggcctgcaaatttcttgacattagacagtttaactagagggaaaaaraacatgctttatattcatacatgtgacagcattagaaagcagtagcttgctgaacagctaggggtaagggtatattacaacaacaatttaataggcagaa

SEQ ID NO: 508302 - DNA, 201 bp, Homo sapiens
tctgctcttttctggtaaatatttaggtttatagttcatttatctcataattaaacaatgctaattttttttctaatttagtctattgataactaaaatartagaaagtaggatgctaccagccctcttaaataaaggaaagggaaggggaggggagggagattgaaagaaagaacaaaaggaaggaaagaatgaaagaaa

SEQ ID NO: 508303 - DNA, 201 bp, Homo sapiens
gaacaggaacataaaacacaactatattgggaataaaacctttccatcactaaattaggttcaagtggtggtggggggaggaagtgggcctgcaaatttcytgacattagacagtttaactagagggaaaaaaaacatgctttatattcatacatgtgacagcattagaaagcagtagcttgctgaacagctaggggtaag

SEQ ID NO: 508304 - DNA, 201 bp, Homo sapiens
tttttttttaatcaacttttattttagattcaggaggtacatgtacaggtcatttgtttttatttataaagaaaaatatatttagctctagattctatttraagaaaaaataggattagcctttttataggaaagtgaacaaaataacaagctggtaggttaaattgttccaataataaacattccctgagcgtatgacct

SEQ ID NO: 508305 - DNA, 201 bp, Homo sapiens
gcttcttcaaagcatagcatctagcttcctgaaacaaaaatggaagcttccaggcccctgaaaatttaagcctagaacaggaacataaaacacaactataytgggaataaaacctttccatcactaaattaggttcaagtggtggtggggggaggaagtgggcctgcaaatttcttgacattagacagtttaactagaggg

SEQ ID NO: 508306 - DNA, 201 bp, Homo sapiens
tgtctccatattaattcaatgtcgaaacaaacaaacaaacaaaaaatcattcccgaaatcatcttgcttagctaatatccattcctcttgtttgattctcrctgcaaacagaagacatgtgaacacaatttcagtgtaaaagcaatatttggtgtattaaattactctttatccttcccttcaccagttgagtaatcatct

SEQ ID NO: 508307 - DNA, 201 bp, Homo sapiens
cacagtgacatcaagataatgcctgtccaagctacagaacgcagaggctaaaatgggtaccggtgatgtcccgtgccttccagatatgaacaaaaggggamgatgagttggatcttctctcagggataaacttgcaccagccatgcttgagtgagctggtgcttaatcacttttccttcatggacagaggatctagactca

SEQ ID NO: 508308 - DNA, 201 bp, Homo sapiens
acagtgacatcaagataatgcctgtccaagctacagaacgcagaggctaaaatgggtaccggtgatgtcccgtgccttccagatatgaacaaaaggggaasatgagttggatcttctctcagggataaacttgcaccagccatgcttgagtgagctggtgcttaatcacttttccttcatggacagaggatctagactcat

SEQ ID NO: 508309 - DNA, 201 bp, Homo sapiens
ggtgatgggggtccaactccttatgccctcctggctcctttttagagacctctggcataatcatctccattttggatttcttttcagattttccccttttkatttaaatatttccttagaaaccactgagatcaattatttcagtaagccctttggttctggaatagatttgtcccaggaagtcatgtcccatggaggagg

SEQ ID NO: 508310 - DNA, 201 bp, Homo sapiens
gagtcaaattagtcctaaataaaattcaccaaaagaatcagttcatgtcctctccttccacatgagtccatgtgccctgtgatttcactttaaataactcrtggaggattcttgtgtttcatgctttatctttatggtataagtttatccatcaaaaagaatattcaggaggtggtttttagttcactttctgaggctggt

SEQ ID NO: 508311 - DNA, 201 bp, Homo sapiens
gccaggtgtggtgatgcacacctgtagtcccaggtactcaggaggctgagatgtaaggatcacttaaacccagcaggtctaggctgcagtgagctgtgttygtctcactgcactccagcctaggtgacagcgcaagagaccctgtctcaaaaaaaaaaaaaaaaaaaaaaaaaaaaaagccacgcatggtggctcatgcct

SEQ ID NO: 508312 - DNA, 201 bp, Homo sapiens
ggtataagtttatccatcaaaaagaatattcaggaggtggtttttagttcactttctgaggctggtctgctcctatctatttttttttccatcatgtgtaytcttagctcctcttatgatatggttgtcacacaatattggacaatgagatattaggattgaggcccaatagcacataatataatcttggcttttgtactc

SEQ ID NO: 508313 - DNA, 201 bp, Homo sapiens
ctggccaacatagtgaaaccccgtctctacaaaaatacaaaaattagccaggcatggtggtgtgcacctgtaatcccagctgctggggaggctgaggcagragaaccacttgaactcaggaggcggaggttgcagtgagccaagttcatgccactgcactccagcctgggcaacagagcgagattccatctcaaaaataaa

SEQ ID NO: 508314 - DNA, 201 bp, Homo sapiens
ctgtaacatctcttaggtctatataatctcttactgattgttttctttctgcttgaaataaagcacaaaatttgaatacgttcattcaaatatgaaacatygactctaaatttccatttaatccctgattttatgttattggacattgtattgatttttttagagcaggtaaggttgtctctaataacatatgaaaaagtc

SEQ ID NO: 508315 - DNA, 201 bp, Homo sapiens
aaaactcttagaggaaaacctagccatgaatgttcatgaccttagattagacaacagttttgtatgacaccaaaagcacaaacaacaaaagaaaaaaatamactagacacatcaagattaaaaagtttttttagctgggcatagtggcatgcgcctgtagtcccagctactcagaaggctaaggtgggaggattgcttgag

SEQ ID NO: 508316 - DNA, 201 bp, Homo sapiens
gttttcaaaactagcagttcctcagaaggtaaaacatagaattaccatatgacccagcatttccacctctagtattaactcccccgggaattaaaacataygtgcacacgaaaacttgtacacaaatgttcatagcagctttattgataatagctaaaaaaacaaacaactaaagtgtccatcaactgatgaatggttaca

SEQ ID NO: 508317 - DNA, 201 bp, Homo sapiens
gtcacacaatattggacaatgagatattaggattgaggcccaatagcacataatataatcttggcttttgtactcttaggagaaaataacccatagatacwtcactgcccctgcccctcagtctccggttttatggccatgaggggtattattttacctggttgatggtgatctgattatactccttcatctgagtcttca

SEQ ID NO: 508318 - DNA, 201 bp, Homo sapiens
caagaacatacagcaaaattaatgctatcattcatagtggaccccctctatcatcacagagaaaatcattgatgaccagcactgactccaatattacccargatctatatttagtatgtctttaggagcatcatggttccttattcagaggatgagattgtatggaaatggcctatcccatgcagttcagcacaaggagac

SEQ ID NO: 508319 - DNA, 201 bp, Homo sapiens
aacccatagatacatcactgcccctgcccctcagtctccggttttatggccatgaggggtattattttacctggttgatggtgatctgattatactccttyatctgagtcttcaagctttaccttttgtgtgtgttgttttatgtgttacagtcagtgtagtttttacattttttcatacataaatagttcaggcactaaa

SEQ ID NO: 508320 - DNA, 201 bp, Homo sapiens
ttattagcagcatgagaacgaacgaatacgatagtattacaagtaggtgctctgccttcatgaatgggattagtgcccttacaaaaaaggcttgagggagsctgtttgttccctttcaccatgtgaggatgccataagaaggcaccatctgtgaagcagacagcaagctcccaccagacactgaatctgctgatgccttga

SEQ ID NO: 508321 - DNA, 201 bp, Homo sapiens
tgaaacaaaattagttaccagtagacttaggcgaatgctacactgcacacaggcgcataaccccaacctatataaacactaagacaattgttgacactttragttggcctggtggaattatctccagccttctgcctgtatctggttacagcaataaattcccttctttcctagtctgtctgcttctcgttattgggcctc

SEQ ID NO: 508322 - DNA, 201 bp, Homo sapiens
caggaggggaaaaattctttttccttctactcattttagatttacaggctgggccctgtaaattagattgacaaaagacagattaacaagataaaaacgtytttattttattttatttattttttatttttttatttgtattattattattttttgagacggagtttcgctcttgttgtccaggctggagtgcaatggtgc

SEQ ID NO: 508323 - DNA, 201 bp, Homo sapiens
ttctaggtgccaaagcctccaagcagggagttttggacttgccaaatgatgtagtagaagggtcagccagaggctttttcactgttgtgggtaagttgatyaaattttgtgtttcactatgatttgaaaatcttggttgaggtggtctttaaaaatccttaaaataacagaatggagagatcttcctaagctatcaattgg

SEQ ID NO: 508324 - DNA, 201 bp, Homo sapiens
tgcagtgcagtggccccatctcagctcactgcaagctctgccttctgggttcacaccattctcctgcctcagcctcccaagtagctgggactacaggcgcycgccaccacgcccagctaatttttttcgtatttttagtagagacggggtttcaccttgttagccaggatggtctcgatctcctgacctcgtgatccgcac

SEQ ID NO: 508325 - DNA, 201 bp, Homo sapiens
gcatctgatacttatgttctggactatctgaaatctactgagcaactgacagaggaagttcaatctaaggctttctttctcttatctaatggtgagaagawttaagtaatttctgcccataatttttgaaagcaattgttactcataccaagatgtcataagctgtttttatgcagtagtctggtgaaagaaaagtgaacc

SEQ ID NO: 508326 - DNA, 201 bp, Homo sapiens
gcagtgcagtggccccatctcagctcactgcaagctctgccttctgggttcacaccattctcctgcctcagcctcccaagtagctgggactacaggcgccsgccaccacgcccagctaatttttttcgtatttttagtagagacggggtttcaccttgttagccaggatggtctcgatctcctgacctcgtgatccgcacg

SEQ ID NO: 508327 - DNA, 201 bp, Homo sapiens
tatctgaaatctactgagcaactgacagaggaagttcaatctaaggctttctttctcttatctaatggtgagaagatttaagtaatttctgcccataattkttgaaagcaattgttactcataccaagatgtcataagctgtttttatgcagtagtctggtgaaagaaaagtgaacctgaaccgaggaactctcagtccta

SEQ ID NO: 508328 - DNA, 201 bp, Homo sapiens
gggagggagggagggagggaggaaaggaggaagggagaaagagaagcagaaggagaagaagaaataagaaagcttccacgctggtttccatgagccactckgtaatcctcctcatcactgctctctggccacacttcgtgggctctgtcactgcgtgcccttcctctgtctgctctgaggcctggcactccctaggtctcc

SEQ ID NO: 508329 - DNA, 201 bp, Homo sapiens
gatgccaagaggagttcagctgggggcggtaggaaaggagtccagccgctgggcggcctgactccaggggaagatcaccttcccattccatccacccaccrtctggctctccatccatccctctgaaagccacctccaccactcaataaaacctcgcattcatcctttgagtccgtgtgtgacctgatttttccaggacgc

SEQ ID NO: 508330 - DNA, 201 bp, Homo sapiens
ctttgagtccgtgtgtgacctgatttttccaggacgctgaacaagagctcgggatacagcaagctatcatgttggccctctgcccttgtgaaaaggcaaarggtccattaagctggttaacattcaagctgtcttcgggcggccaagctgaaagctttgtaacgctggggctgcaggcatccactcctagacactacggcc

SEQ ID NO: 508331 - DNA, 201 bp, Homo sapiens
accactttcaaaggccaaggcaggcagatcactttgagctcaggagttccaagaccagcctgtgcaacatggtgaagccctgtctctacaaaaaatacaartattagctgagtgtcgtggcgcacacgtatagtcccagctacttgggaggctattgatataggagttaaaaagaaatgatttaggcagatagtgagggta

SEQ ID NO: 508332 - DNA, 201 bp, Homo sapiens
atacaaatattagctgagtgtcgtggcgcacacgtatagtcccagctacttgggaggctattgatataggagttaaaaagaaatgatttaggcagatagtragggtaagaaagtcctcagtaaggttttccttttaatgaaaagcagtccccaagtcatttctttttgaaaaagtcagcctgtaaaattgagctgcagaca

SEQ ID NO: 508333 - DNA, 201 bp, Homo sapiens
agagaataatcttaatgatgaaatttttttaaggcttagaaaactaatgaagccctcaaatatggtgtgagatctctttataagaatgctgcaagagtcakatgtgaagcgaaggctgttgtaatatgccttttttatagaaaaacaatcatgctataaataacaataaagcatttttaatttgaaaaattagttgactgc

SEQ ID NO: 508334 - DNA, 201 bp, Homo sapiens
cgtggaatgatatgagacccactgcaaagacctagcattggtcgggcctggtggctcacacctgtaatcccagcactttgggaggccgaggcgggaggatyacttgaggtcagaagtttgagaccagcctggccaacatggtgaaaccctgtctctactaaaaatacaaaagttatctgggtgtggtagtgcatgcctata

SEQ ID NO: 508335 - DNA, 201 bp, Homo sapiens
tatctgggtgtggtagtgcatgcctataattccagttactcgggaggctgaggcagaaccacttgatcccgggaggaggaggttgcagtgagccgagatcrcaccactgcactccagcctgggcaacacaatgagactttgtctcaaaaaaaaaaaaaaaaaaaatggccaggcgcggtggctcacgcctgtaatcccagc

SEQ ID NO: 508336 - DNA, 201 bp, Homo sapiens
gctgatctgtgacagaacctccattgacttagtccattgacttttagaataaaactgattgcaccaattaatacatattgttatgaaaacacatttatggrtgaaaacgcttactatcatcagtttttctctaatttagacttcttcctttcccaggcagtatatggtgctggtcccctccctgctccacactgaggcccc

SEQ ID NO: 508337 - DNA, 201 bp, Homo sapiens
aggcctagagaaatttttctctgcatgcttgaatgtctaccaaatttactttttaataaaaaatgaggatggcagtaaaaagtgttaaaaaaaaaaaaaaagaataaacacattttaatacagcagattcactgcctgggaaggcaaggagtaatgttctaattgaaaacaaaggagtcattaaggatatttcctcaccag

SEQ ID NO: 508338 - DNA, 201 bp, Homo sapiens
aaatttgcagactcacttaaccttttagaggctcaatttctttaaatctgaagtcagaatgacaacaccaaactcattgaggtattgtgaccataaaatgaaaaaaaaaaaatcatgattcctttaatggcatgtttgtttaaaaaaaagaaactgaaaagcatgattaattgactttcatttcaccaagtgtgtattttc

SEQ ID NO: 508339 - DNA, 201 bp, Homo sapiens
ttaaatctgaagtcagaatgacaacaccaaactcattgaggtattgtgaccataaaatgaaaaaaaaaaaatcatgattcctttaatggcatgtttgtttaaaaaaaagaaactgaaaagcatgattaattgactttcatttcaccaagtgtgtattttctttccaacctaagagaaaacagatcaatggaaacaaaggta

SEQ ID NO: 508340 - DNA, 201 bp, Homo sapiens
tgcttattgtttatgtctccatattaattcaatgtcgaaacaaacaaacaaacaaaaaatcattcccgaaatcatcttgcttagctaatatccattcctcttgtttgattctcgctgcaaacagaagacatgtgaacacaatttcagtgtaaaagcaatatttggtgtattaaattactctttatccttcccttcaccagt

SEQ ID NO: 508341 - DNA, 201 bp, Homo sapiens
gcttattgtttatgtctccatattaattcaatgtcgaaacaaacaaacaaacaaaaaatcattcccgaaatcatcttgcttagctaatatccattcctcttgtttgattctcgctgcaaacagaagacatgtgaacacaatttcagtgtaaaagcaatatttggtgtattaaattactctttatccttcccttcaccagtt

SEQ ID NO: 508342 - DNA, 201 bp, Homo sapiens
agacgcagccgtagacaccagctccgaaatcaccaccgaggacttaaaggagaagaaggaagttgtggaagaggcggaaaatggaagagacgcccctgctmacgggaatgctaatgaggaaaatggggagccggaggctgacaacgaggtagatgaagaagaggaagaaggtggggaggaagaaggtgatggtgaggaaga

SEQ ID NO: 508343 - DNA, 201 bp, Homo sapiens
cgcagccgtagacaccagctccgaaatcaccaccgaggacttaaaggagaagaaggaagttgtggaagaggcggaaaatggaagagacgcccctgctcacrggaatgctaatgaggaaaatggggagccggaggctgacaacgaggtagatgaagaagaggaagaaggtggggaggaagaaggtgatggtgaggaagagga

SEQ ID NO: 508344 - DNA, 201 bp, Homo sapiens
cgcagatgacacgcgctctccaccacccaacccaaaccatgagaatttgcaacaggggagggaaaaagaaccaaaacttccaaggccctgctttttttttttcttaaaagtactttaaaaaggaaacttgtattttttatttacattttatatttttgtacatattgttagggtcggccatttttaatgatctcggatgac

SEQ ID NO: 508345 - DNA, 201 bp, Homo sapiens
tcactgtgttgtactatagatctcttgaacttactccatcaaaggggtacttgatcagaaggaagaaaacctgaactgctgcatatcacctggttcagggmgttacagccttgcctgtgcccctctacactgtcatgagctgttagctaagcacagctgttggattagaggcacaaggcggcctctcccatgcagtgtttt

SEQ ID NO: 508346 - DNA, 201 bp, Homo sapiens
gcagatgacacgcgctctccaccacccaacccaaaccatgagaatttgcaacaggggagggaaaaagaaccaaaacttccaaggccctgctttttttttttcttaaaagtactttaaaaaggaaacttgtattttttatttacattttatatttttgtacatattgttagggtcggccatttttaatgatctcggatgacc

SEQ ID NO: 508347 - DNA, 201 bp, Homo sapiens
gaacttttcatcttttttagacttttgtattacccaattcagatcacatttagaattaaatctgagcacagctctgagctttcagccaatagatgacctgsttgaaaattgttgtgctgtttcatgcatagaagcctcttttcctattatcttctgcactgccaccaaaacaaaaggaataaacaaaaagcctgaacccac

SEQ ID NO: 508348 - DNA, 201 bp, Homo sapiens
taccatttccctcagcttttgatagaaagtaaatggcaaagagttccaggcagcatttcccagcagcacctggagggcggctcttctgtgctgcctgtgayatcggaagcagtcagcttcagctgtcactgggctgggagacacaatggttagaaagccagtgccctccatttgaaagtgagctgaggaagttcctaaggg

SEQ ID NO: 508349 - DNA, 201 bp, Homo sapiens
ggcagagataacatgaattggtattttccacagcagcttgtcaagagctttatcttttctcccatctgtttggattggatacttaacagctctacagctgytctttggaggaatcttacaaattctgaggagagagcactttgcctggaaatcatgctaaagttatctttgtagctacttcagttatctattgctagataa

SEQ ID NO: 508350 - DNA, 201 bp, Homo sapiens
gaaagtgagctgaggaagttcctaagggtatggtcaaagttatctttcaaaaacaaccgtggtatactccggcacaacagcaaaagaataactgaggcccmctgttttctacatcctgtaataagaccacaaaacttttagactggaaaatgttaaaaggatttataaccaaaggctcaccttcctggggtatcatcaaca

SEQ ID NO: 508351 - DNA, 201 bp, Homo sapiens
aagagcaaaactctgtctaagacaaacaaacaaacaaacaaaacctaaactgtagattctaagatttatgtggttttgaaagatacaaagctattggggamctttaggggtccatctgggatggtttgtcatatccagagctgcatttgagggctggttcatttgcaagttcccaggaaggcagagataacatgaattggt

SEQ ID NO: 508352 - DNA, 201 bp, Homo sapiens
tgcagtgagccgagatcgcaccactgcactccagcctgggcaacacaatgagactttgtctcaaaaaaaaaaaaaaaaaaaatggccaggcgcggtggctyacgcctgtaatcccagcactttgggaggcggaggcgggcagatcacgaggtcaggagatcgagaccttcctggccaacacagtgaaaccccgtctctact

SEQ ID NO: 508353 - DNA, 201 bp, Homo sapiens
cggggtgtggtggtgggtgcctgtagtcccagttacttgggaggctgaggcaagagaatggcgtgaacccagaaggcagagcttgcagtgagccgagatcrcgccactgccctccagcctgggcaacagagcgagactccgtctcaaaaaaataaataaataaaaataaaataggccaggcgcagtggctcacacctgtaa

SEQ ID NO: 508354 - DNA, 201 bp, Homo sapiens
ctaaaaatacaaaaaattagccaggtgtggtggcgggcacctgtagtcccagctactcaggaggctgaggcaggagaatggcaagaacccgggaggcggarcttgaagtgagctgacattgcgccactggactccagcctgggcgacagatcaagactccctctcaaaaaaaaataataaataaaataaaagacctagcat

SEQ ID NO: 508355 - DNA, 201 bp, Homo sapiens
aaagtgccctgtagtttatcaggcacttactatgaatggagcttgcagcactggaggttgcctgggtgagtcactgagtggtgattgaatgtgaaagcctrcaacattacggtgcactactgtagattataaccactggacacttaggctatgctacatttattatttatttatggatggattattttattttatttttga

SEQ ID NO: 508356 - DNA, 201 bp, Homo sapiens
ctaaggcaggaggatcacttgcacccggaggtcaagactacagtgagccatgatcacaccactgcactctagcctgggtgacaaagtaagaccctgccacaaaaaaaaaaaaaaaagaaaaaagaaggttggggatatatctatgtgttttcctttaaacacttatgtaaagttaagtgcttttacaagaatgtattcatt

SEQ ID NO: 508357 - DNA, 201 bp, Homo sapiens
acttgcacccggaggtcaagactacagtgagccatgatcacaccactgcactctagcctgggtgacaaagtaagaccctgccacaaaaaaaaaaaaaaaaraaaaaagaaggttggggatatatctatgtgttttcctttaaacacttatgtaaagttaagtgcttttacaagaatgtattcattgcaaaatttgctctaa

SEQ ID NO: 508358 - DNA, 201 bp, Homo sapiens
tacagctgtttgatcttaagttacatagcctaaggcagtttcttcagctgtgaaatggaatgatattaatactgcccgttaaaaacattttaactgggggyggagcgtggtggctcatgcctgtaatctcagcactttgagaggccaaggtgggcggatcacctgaaatcaggagtttgagaccagcctggccaacaaggc

SEQ ID NO: 508359 - DNA, 201 bp, Homo sapiens
cgtggtggctcatgcctgtaatctcagcactttgagaggccaaggtgggcggatcacctgaaatcaggagtttgagaccagcctggccaacaaggcgaaamcccatctctactaaaaatacaaaaattagccacacatggtggcatgcacctgtaatcccagctactcaggaggctgaggcaggagaattgcttgaactcg

SEQ ID NO: 508360 - DNA, 201 bp, Homo sapiens
ctttgagaggccaaggtgggcggatcacctgaaatcaggagtttgagaccagcctggccaacaaggcgaaaccccatctctactaaaaatacaaaaattarccacacatggtggcatgcacctgtaatcccagctactcaggaggctgaggcaggagaattgcttgaactcgggaggtggaggttgcagtgaaccgagatt

SEQ ID NO: 508361 - DNA, 201 bp, Homo sapiens
atagtctcagacatcttgtaaaatttaggaatgggaattaatgcaataacaaagaatattcaaggtactaaaggcaagggttctatgtggattcaaattaytgttgagcaaagttttgcctaagaaagtctgtgccaagatttaatgtgtacttaatcagacaagatgaaacttgtcatttccagtaaacgatctctgatt

SEQ ID NO: 508362 - DNA, 201 bp, Homo sapiens
ataaacgatgtttgtcaactctgaactgtctttcctaggccaggtattcctctctcactccactttctactacttcctcctatcctcactgagtgtctacraattataagtcacgttctctaccaaaatgctataatggataaaacagtggactagtagtcacaagacttagattcatgtcccatgtggccatggtaaagt

SEQ ID NO: 508363 - DNA, 201 bp, Homo sapiens
ctgtcaattaacttctaactagggactttccatgggtttatacccaaataagggcaggtctacttgtagccaatcaggagatctttcctcatttgaagatyctggcactcttcttaaaaatgttgaccataaacatgtgggtttacttctggaccctcaattccattcaattgatctacatgacaattcttagactacagc

SEQ ID NO: 508364 - DNA, 201 bp, Homo sapiens
tcctgacctcaggtgatccactcacctcggcctcctaaagtgctgggattacaggcatgagcccctgtgcctggctgggctaattcttaaattttttgtaragatggggtcttcctatgttgcctcggctggtcttgaactcctgggctcaagtgatcatcctagctcagcctctcaaagtgctgggattacagacatgca

SEQ ID NO: 508365 - DNA, 201 bp, Homo sapiens
tcggctggtataagaccttatagaagactctgaaaactgaaacacgccaacaagttttctgttaccagtattttttttttaactctgtgcccaggccaggmgcggtggctcacgccggtaatctcagcgctttgggaggccgaggcgggcggatcgcgaggtcaggggtttgagcatcctggccaacatggtgaaaccccg

SEQ ID NO: 508366 - DNA, 201 bp, Homo sapiens
cttatagaagactctgaaaactgaaacacgccaacaagttttctgttaccagtattttttttttaactctgtgcccaggccaggcgcggtggctcacgcckgtaatctcagcgctttgggaggccgaggcgggcggatcgcgaggtcaggggtttgagcatcctggccaacatggtgaaaccccgtctttactaaaaatac

SEQ ID NO: 508367 - DNA, 201 bp, Homo sapiens
ggaatgggaattaatgcaataacaaagaatattcaaggtactaaaggcaagggttctatgtggattcaaattactgttgagcaaagttttgcctaagaaartctgtgccaagatttaatgtgtacttaatcagacaagatgaaacttgtcatttccagtaaacgatctctgattactcaaagtctgttcatatattaacaa

SEQ ID NO: 508368 - DNA, 201 bp, Homo sapiens
atccgaaactatccgaaatatggcagcaaagggtaatactctcatacaaattctgattgtttatatttttttcattattttctaggatcctcaaaacaatyggatttttcaatggcaaaatgtgacttctttccgaaatattacccaactctcgttccaactgatttcagaaccaatgtttggagattactggattgttgt

SEQ ID NO: 508369 - DNA, 201 bp, Homo sapiens
tttttaagattctatttttggaaggcaaaagcaagagttgccactggttactccattaaatagcattatatgcccaagaagtaatactcagttacacttaygtaatcaaaatgacaagcaaatattttaaaattagcattagaaaaggtaacataactgtaaagtcaacacaaagcagagagaaatattctagtgagtcat

SEQ ID NO: 508370 - DNA, 201 bp, Homo sapiens
aaaattgcagcgtctagagtccaaggctcatgaaactggggcaaggagatgttcctgatagaccctttacatattgtgttgagatatcaaactgatggtakaattcaaatggtccataaacatatgaaaagatgtgtaaagtcattaataatgaaaattaaggcaagatactgcttcactcatcagattgataaaaagtaa

SEQ ID NO: 508371 - DNA, 201 bp, Homo sapiens
caaaggaaactccaaccatatttgtcttgatttatttctttttttgggttggtggatctggtaaaaactggaaaagcttctagacaaattttaaaagagcrctaccattgccatctttcatttcttaagaagaaatgaccttaaacaaacttggcaagtgtttaattttattaaagttgggtgcatgtaaggtacgagtgt

SEQ ID NO: 508372 - DNA, 201 bp, Homo sapiens
aagttgctgtttatttttattttttggcctgtttgatgtatgtgtgaaacaatgttgtccaacaataaacaggaattttattttgctgagttgttctagcaaaaaaaaaaagaaaaaaaaaagaaaaacattgttctgatgaaaatcacttggaatgagcctcttagggaaataaatagaaagtactttttaggataaatt

SEQ ID NO: 508373 - DNA, 201 bp, Homo sapiens
tgaccataaggcaataagagggtccattctatcttctatctaaatttccctataaagttgtttgtcctgggctgaattactccaaagagataagaagagtmcaataactgaaaaaacacatctcagtgctgatgtgtgacatgaaaaatttgatctgtttttgacttgtgcttcggatagtctcacacaatttgggaaact

SEQ ID NO: 508374 - DNA, 201 bp, Homo sapiens
ataatatacatctatataactctctatataattcaatttttagcagagatgaagagtctattgtcttaggatttctttcataggatccagtggtcaaaagsgggcactgtttgcccaataaatagggaatattttttgtaataacttatgagaatatttgcaatctaagaaaagattgtatcatcaccattactttgtttt

SEQ ID NO: 508375 - DNA, 201 bp, Homo sapiens
cctcccagtaggggctgactgacacctcaaacagccaggtgcccctctgagatgaagcttccagaggaaggatcagacagcaatatttgctgttctgcagsctctgctgatgatacccaggcaaacagggtctggagtggacctccagcaaactccaatagacgtgcagctcaggaaactgatggttagaaggaaaactaa

SEQ ID NO: 508376 - DNA, 201 bp, Homo sapiens
cgggcggatcacaaggacaggatatggagaccatcctggctaagacggtgaaaccccatctctaccaaaaatacaacaaaaaattagccgggcgtggtggygggcgcctgtagtcccagctactcgggaggctgaggcaggagaatggcgtgaacccgggaggcagagctttcagtgagctgagatcatgccactgcactc

SEQ ID NO: 508377 - DNA, 201 bp, Homo sapiens
ggaggctgaggcaggagaatggcgtgaacccgggaggcagagctttcagtgagctgagatcatgccactgcactccagcctgggtgacagattgagactcygtctcaaaaaaaaaaaaaaaaaaaagcaagtctatgaatgaatgtttgggtgaagtgttgatttattcattttaatctgtctggcacacccccaaggcga

SEQ ID NO: 508378 - DNA, 201 bp, Homo sapiens
tgaggcaggagaatggcgtgaacccgggaggcagagctttcagtgagctgagatcatgccactgcactccagcctgggtgacagattgagactctgtctcaaaaaaaaaaaaaaaaaaaagcaagtctatgaatgaatgtttgggtgaagtgttgatttattcattttaatctgtctggcacacccccaaggcgaggtttg

SEQ ID NO: 508379 - DNA, 201 bp, Homo sapiens
ctctgggactgtgagaaaacacatttctgtgtctaagccacccagtttatggtattttgtcatggcagccggggctgaccaagacaactatgtggcaggtrctacctaccgtatggccctaaaatgttttaacttcacacacctggaaagcaccacagccccaagagaaaagcttttccgcactgctgttaagccagggcc

SEQ ID NO: 508380 - DNA, 201 bp, Homo sapiens
gaggcaggagaatggcgtgaacccgggaggcagagctttcagtgagctgagatcatgccactgcactccagcctgggtgacagattgagactctgtctcaaaaaaaaaaaaaaaaaaaagcaagtctatgaatgaatgtttgggtgaagtgttgatttattcattttaatctgtctggcacacccccaaggcgaggtttga

SEQ ID NO: 508381 - DNA, 201 bp, Homo sapiens
aggcaggagaatggcgtgaacccgggaggcagagctttcagtgagctgagatcatgccactgcactccagcctgggtgacagattgagactctgtctcaaaaaaaaaaaaaaaaaaaagcaagtctatgaatgaatgtttgggtgaagtgttgatttattcattttaatctgtctggcacacccccaaggcgaggtttgat

SEQ ID NO: 508382 - DNA, 201 bp, Homo sapiens
tgaggacagctgcctggaagactcagacccaagtactcttggctgtgagcttcctagagcctttgttccaagcaggtttttaaaaacaaaagactgggacsgagagagtgggctggtacaaagttgttgatcaggaactctctttggattacagaaacaaaattgatgagcaattggttattgttaagttataggatgtgg

SEQ ID NO: 508383 - DNA, 201 bp, Homo sapiens
ggtgtgtgaaatgcattatgaggactgggcacggtggctcaggcctgtaatctcagcacctgtaatctcaggcctgtaatctcggtgaattgcttgagcayaggagtttgagaccagcctgggcaacataatgaaaccctctctctacaaaaaataagaaaattagccaggtgtggtggcgtgcacctatagtcccagcta

SEQ ID NO: 508384 - DNA, 201 bp, Homo sapiens
atacagtatttggttttctgtccctgtgttagtttgcttaggatgatggtctccagctccatcaattttgctgcaaaggacgtgatctcattctttcttayggctgtgtagtattccatagtgtatatgtggcatgttttctttatccagtctaccattggtgggcatttagattgattccatggcttagctattgtgaat

SEQ ID NO: 508385 - DNA, 201 bp, Homo sapiens
cacctgtaatctcaggcctgtaatctcggtgaattgcttgagcacaggagtttgagaccagcctgggcaacataatgaaaccctctctctacaaaaaatargaaaattagccaggtgtggtggcgtgcacctatagtcccagctattcgggaggatgaggtgggaggatcactcgggcccagggaggtcaaggctgcagtg

SEQ ID NO: 508386 - DNA, 201 bp, Homo sapiens
tcaaaagttcgggctgggctcagtggctcacgcctgtaatcccagcactttgggaggctgaggtgggcggatcacgaggtcaggagatcaagaccatcctrgctaacacagtgaaaccccgtctctactaaaaatacaaaaaattagtggggcgtggtggcaggtgcatgtagtcccagctactcagaaggctgaggcagg

SEQ ID NO: 508387 - DNA, 201 bp, Homo sapiens
atgttagccaggatggtctcgatctcctgacctcgtgttccgcctgcctcagcctcccaaagtgctgggattacaggcatgagccactgcgcccggccaattttttttttttttttttttttttaagacagagtcttgccctgtcacccagcctggagtgcagtggcgcgatctcggctcactgcaacctctgcctccagg

SEQ ID NO: 508388 - DNA, 201 bp, Homo sapiens
tgttagccaggatggtctcgatctcctgacctcgtgttccgcctgcctcagcctcccaaagtgctgggattacaggcatgagccactgcgcccggccaattttttttttttttttttttttttaagacagagtcttgccctgtcacccagcctggagtgcagtggcgcgatctcggctcactgcaacctctgcctccaggg

SEQ ID NO: 508389 - DNA, 201 bp, Homo sapiens
gttagccaggatggtctcgatctcctgacctcgtgttccgcctgcctcagcctcccaaagtgctgggattacaggcatgagccactgcgcccggccaattttttttttttttttttttttttaagacagagtcttgccctgtcacccagcctggagtgcagtggcgcgatctcggctcactgcaacctctgcctccagggt

SEQ ID NO: 508390 - DNA, 201 bp, Homo sapiens
tattttactctattgttttttagacaaggtctggctctgtcacccaggctggaatgcagtggcactatcacagctcactacaacctctgcattgtgggctyaagcggggaggtcctccccgctcagcctcctgagtatctgggactaaaagcccatgccatcatgccctgacaattttttaaagtttttgtagagacacag

SEQ ID NO: 508391 - DNA, 201 bp, Homo sapiens
ttagccaggatggtctcgatctcctgacctcgtgttccgcctgcctcagcctcccaaagtgctgggattacaggcatgagccactgcgcccggccaattttttttttttttttttttttttaagacagagtcttgccctgtcacccagcctggagtgcagtggcgcgatctcggctcactgcaacctctgcctccagggtt

SEQ ID NO: 508392 - DNA, 201 bp, Homo sapiens
aggctggtctcgaactcctgacctcaggtgatccgcccgccttggcctcccaaagtgctgggattagaggcgtgagccaccatgccggcctcccttagtaycttatgcatacttttttttttttaattgagatggactctcgctctgctggccaggctagagtgcaatggcgcgatctcagctcactgcaactctgcctcc

SEQ ID NO: 508393 - DNA, 201 bp, Homo sapiens
acaggatctcactctcttgcccaggctggggtagagtggcatgatcatggctcactgcatccttgaccttctgggctcaagggatcctctcacctcagccycctgagtagctgggactaggggcatgcatcaccacacacccagctaattttttattttttgtagagaccaggtctcggcatggttcccaggcaggtcttg

SEQ ID NO: 508394 - DNA, 201 bp, Homo sapiens
agctccagctgagggaattttcatttatctaaagtttttatttctgtttttttttccccagccgaatttaagattcatatttctgttttaaaaagttgtgmaatgaatatagcaaagtgttaacatttgttgaattcaggagggaaggtatctacacacagtgttaattatttctgttttacttctctatatgctctaatt

SEQ ID NO: 508395 - DNA, 201 bp, Homo sapiens
accgtgttagccaggatggtctcgaactcctgacctcatgatccgtccgcctcggcctcccaaagtgctgagattacaggcatgaaccacagtgcccggcygcataaatcttataatcagctgaaagatatcattttatcttttcttatccaatatatataccagttgtttaacttttttgtattatgtattctatgtatt

SEQ ID NO: 508396 - DNA, 201 bp, Homo sapiens
ggagcccaggaggtggaggttgcagtgagccgagatcacccctgcactccagcctgggcaatgcatcgagattctgtctcaaaaaaaaaaaagaaaaaaawaaagaaataccaaacaacccgtgagaaaaatggaagaaaaacacatacatacatttcatgagtatacaacccacagaaacacgaacagaagcacagtctc

SEQ ID NO: 508397 - DNA, 201 bp, Homo sapiens
tgactgacattaccaacatagtcatatgaactgaatataagggtggcttaggaaatgcaggtgactgcaagatcacagaagtagggaaaacactggttgaygtttccttcatttcccacaggtggatttgagcttcagcccagcacaaagtcccccagcctcacatgcccacctgcaagtagcagctgctccgcagtccct

SEQ ID NO: 508398 - DNA, 201 bp, Homo sapiens
gtggctcacgcctataatcccagcactttgggaagctgaggtgactggatcatgaggtcaggagttgaagaccagcctggccaatatggtgaaaccccggytctactaaaaatacaaaaaattagccaggcgtggtggcgtgtgcctgtagtcccagctattcgggaggctgaggcaggagaatcgcttgaacccagaagg

SEQ ID NO: 508399 - DNA, 201 bp, Homo sapiens
aggagaatcgcttgaacccagaaggcggaggttgcagtgagccgagattgtgccattgcactccagcctgggcaccagggtaagactctgtctaaataaayaaataaataaaaacagacgttatattacttcttaaagtgtatctaccaaatctaattagcatagggttttggtatattccatcattcatcatacaagaga

SEQ ID NO: 508400 - DNA, 201 bp, Homo sapiens
cttaggagcactagaatatatagctacagggcattgttgaactttagacaagatcataggatttgacatgttttctgggtcaaatgcagagtttatctagygtcttctcttctgccatcagagcttcccaatcctttcatgttgtcatttgaagaggtgaatcctagcctaaccattaactgtttgtgacattttaatggg

SEQ ID NO: 508401 - DNA, 201 bp, Homo sapiens
ttcttttgctgtgcagatgctccttagtctaattaggtcccacttgtcaatttttgattttgttgcaattgcttttaacatctccatcatgaaatctttayaagggcctatgcccagaaaggtattttctaggttatcttccaggattttatagttttaggttttacatttaggtctttaatccatcttgatttgattttt

SEQ ID NO: 508402 - DNA, 201 bp, Homo sapiens
ggacgtagtggcatgcgcctgtaatcccagctacttgggaggctgaggcaggagaatggcttgaacccaggaggcggagattgcagtgagccgagactgcrccattgcactccagcctgggtgacagagcgagactccgtctcaaagtaaaaaggaaaaaaaaaaaaagttagttctaagaacagttattaactcgtagta

SEQ ID NO: 508403 - DNA, 201 bp, Homo sapiens
gcagatgctccttagtctaattaggtcccacttgtcaatttttgattttgttgcaattgcttttaacatctccatcatgaaatctttacaagggcctatgsccagaaaggtattttctaggttatcttccaggattttatagttttaggttttacatttaggtctttaatccatcttgatttgatttttgcatatggtgta

SEQ ID NO: 508404 - DNA, 201 bp, Homo sapiens
tggctgggcacggtggctcacgcctgtaatcccagcactttgggaggctgaggcagatcccttgaggtcaggagttcgagaccagcctggccaacatggcraaacactgtctctactgaaagtacgaaacttagcgggacgtagtggcatgcgcctgtaatcccagctacttgggaggctgaggcaggagaatggcttgaa

SEQ ID NO: 508405 - DNA, 201 bp, Homo sapiens
tgggaggatcactcgggcccagggaggtcaaggctgcagtgagccctgatggtgtcactgcactccaatctgggtggcagagtgaggccctgtcttgaggraaaaaaaaaaaaaaagaaatacattatgtacaaaagatgcctctaaggcaaaaaaaaaaaaaaaaaaaatggtcattggaatttcaacatgtccctgata

SEQ ID NO: 508406 - DNA, 201 bp, Homo sapiens
caaacagggagagcttaacttcctctcttcctatttggatgccttttatttctttctcttgcctgattgtgctggctaagaattccagtactatgttgaattaggagtggtaagagaaggcatctttgtctcatcccagttttcaagaggaatgcttccagcttttgcccattcagtatgatgttggctgtgtgtttttaa

SEQ ID NO: 508407 - DNA, 201 bp, Homo sapiens
ttggtgaacaggtggtgttcagttacatgagtaagttatttagtggtgatttgtgagattttggtgcacccatcacacaaatgttagcggtagagagtatycaaggttcttggtgtcttgaacaaagaattggacaaaactcactaacaaagcaaggaaggaatgaagggttttattgaaaatgaaagtacattccacggt

SEQ ID NO: 508408 - DNA, 201 bp, Homo sapiens
aaaggtgatctgagctaaagacgaacaaacaaaaatgtgatggagttaataatgttagggttgtagttttttttttttttttttttttttgagacagcgtmccactttgtcccccaggctggagtgcagtggcatgatcttggctcacttcagtctccactttctgggcttacgcagtactcctgcctcagtcccccaaat

SEQ ID NO: 508409 - DNA, 201 bp, Homo sapiens
tgagacactataataatcctaaattaaaattaattcatagctacttgtggcaatagcaagcagttttaagagatgaatacatagctcaaagcggggagtarggtgtgattgctctcattttaacgtctctccaggcctcatagtttaaaaaggactcaccttcctcagatgaaagctctttaggttttgcatcaggaacct

SEQ ID NO: 508410 - DNA, 201 bp, Homo sapiens
agcaagcagttttaagagatgaatacatagctcaaagcggggagtaaggtgtgattgctctcattttaacgtctctccaggcctcatagtttaaaaaggaytcaccttcctcagatgaaagctctttaggttttgcatcaggaacctccttttctgctttcttggagggtcaggatgggtccaatgaagagctgctggtgg

SEQ ID NO: 508411 - DNA, 201 bp, Homo sapiens
ctcatagtttaaaaaggactcaccttcctcagatgaaagctctttaggttttgcatcaggaacctccttttctgctttcttggagggtcaggatgggtccmatgaagagctgctggtggggacagacagaagccaaggagaggccaggcaaggaagctgaagtgcttggcagggggcaacagtcccctgcctgcaaccaac

SEQ ID NO: 508412 - DNA, 201 bp, Homo sapiens
aggttttgcatcaggaacctccttttctgctttcttggagggtcaggatgggtccaatgaagagctgctggtggggacagacagaagccaaggagaggccrggcaaggaagctgaagtgcttggcagggggcaacagtcccctgcctgcaaccaacgttaaaaaacactgtcacttgaggccgaaagtggtagaaaccagt

SEQ ID NO: 508413 - DNA, 201 bp, Homo sapiens
acagacagaagccaaggagaggccaggcaaggaagctgaagtgcttggcagggggcaacagtcccctgcctgcaaccaacgttaaaaaacactgtcacttsaggccgaaagtggtagaaaccagtttgttaaatcacacgaatgtatatattaggcatgcctggctagtcctttgccaagagatcttgtagcataactgca

SEQ ID NO: 508414 - DNA, 201 bp, Homo sapiens
tgttaaatcacacgaatgtatatattaggcatgcctggctagtcctttgccaagagatcttgtagcataactgcaggcaaatagaaaagacatgaaaatcrttaatcactgcacaagcttagggatcagttctttttggagggtggtgagtggtggaggtactggaaaatgtgtacagaaagagtgaaataagcggaagaa

SEQ ID NO: 508415 - DNA, 201 bp, Homo sapiens
cttaaagatggtgtgtcaggagtttgttccttcagatatgtccagagtttctaccttccagtgagttcatggtcttgctgacttcaagaatgaagctgccraccttcatggcgttacagctcttaaaggtggtgcagacccaaagagtcagcagcagcaagatttattgtaaagagcaaaagaaaaaagcttccacagcat

SEQ ID NO: 508416 - DNA, 201 bp, Homo sapiens
tgaggcaggagaattgcttgaactcgggaggtggagcttgcagtgagccaagatcgggccattgcactccatcctgggcaacagagtgagactctgtctcaaaaaaaaaaaaagttatttattaagttatacacaccctgaggaatgatatgactaataagttataaaaagtcaaagagcagatagtagaagagcttcgca

SEQ ID NO: 508417 - DNA, 201 bp, Homo sapiens
aggctggtggatcacctgaggtcaggagatcgagaccagcctgggcaacatggcaaaaccctgtctctactaaaaatacaagccaggcatggtggcgggcrcctgtaatcctagctacttgggagactgaggcaggaaaattgcttgaacccgggaggtggaggttgcagtgagccgagtttgtaccattgcgctccagcc

SEQ ID NO: 508418 - DNA, 201 bp, Homo sapiens
actcccttttcaacacataaggtaacattcaatacaaatacctaatgtaacaggtcatctttaaaataaattgtttcctgccagcagaggtgtgctaaatmatcatcatcatcatcatcatcatcataatttatgagagatttggggctttcccaccttcttctttaattcaagattgctgtcccatacatcatcgataat

SEQ ID NO: 508419 - DNA, 201 bp, Homo sapiens
ctgtaatcccagctacttgggaggctgaggcagaggttggcatgagccaattgcacgccactgcactccagcctaggtgacaaagcgagactccgtctccaaaaaaaatacaactattggtcgggcgtggtggctcatgcctgtaatcccagcactttgggaggctgaggcaggcggatcacaaggtcaggagttcaggac

SEQ ID NO: 508420 - DNA, 201 bp, Homo sapiens
aacctgggaggtggaggatacagtaagccaagatcacaccactgcactctagtctgggtgacagagtgaagactctgtttcaaaaaaaaaaaaaaaaaaaaggaaaagaaaatttctggcataagcaaacactaattcataaatatcttttgttattcataatgaactctgtatgcacatacctgagtctatgctactaag

SEQ ID NO: 508421 - DNA, 201 bp, Homo sapiens
ttacaggcatgcgccaccacatctggctatttttgtagtttgattcaggcagatgagcaaattctcgtagccaagaattaaatccatgaatctttattttraaggagaaagtggcctattgtttgagtattttcaattaagaaatagtaatggaagtatacatttacatagtttataaaattctcttctagctggagtagg

SEQ ID NO: 508422 - DNA, 201 bp, Homo sapiens
tggtggctcatgtctgtaattccagcactttggaaggccgaggtggctggatcacctgaggtcaagagttcgagaccagcctggccagcatggtgaaaccycatctctactaaaaatacagaaaattagtcgggcatggtggcagacgcctgtaatcccagcttctctggaggctgaggcaggagaattccttgaacccag

SEQ ID NO: 508423 - DNA, 201 bp, Homo sapiens
acctccagggaggtatgactccagtgccagattggtgctgggggaagaaaacaacaagaggaagcagctggcaccaaaaataaaccagtacacactaaaakgaataatttccttttcattggaaaaatggcccattccaggtctggggcacagaaatgtccaataaaaataaatctggacttaaggagatcattttttaaa

SEQ ID NO: 508424 - DNA, 201 bp, Homo sapiens
aggtatgactccagtgccagattggtgctgggggaagaaaacaacaagaggaagcagctggcaccaaaaataaaccagtacacactaaaaggaataatttscttttcattggaaaaatggcccattccaggtctggggcacagaaatgtccaataaaaataaatctggacttaaggagatcattttttaaaattattttat

SEQ ID NO: 508425 - DNA, 201 bp, Homo sapiens
ttcattggaaaaatggcccattccaggtctggggcacagaaatgtccaataaaaataaatctggacttaaggagatcattttttaaaattattttattttwttattattattattattattattattattattattattattatttgagatagagtcttgctctgtcacccaggctggagtgtagtggcatgatctcagct

SEQ ID NO: 508426 - DNA, 201 bp, Homo sapiens
gaaaaatggcccattccaggtctggggcacagaaatgtccaataaaaataaatctggacttaaggagatcattttttaaaattattttattttattattawtattattattattattattattattattattattatttgagatagagtcttgctctgtcacccaggctggagtgtagtggcatgatctcagctcactata

SEQ ID NO: 508427 - DNA, 201 bp, Homo sapiens
aaaatggcccattccaggtctggggcacagaaatgtccaataaaaataaatctggacttaaggagatcattttttaaaattattttattttattattattattattattattattattattattattattattatttgagatagagtcttgctctgtcacccaggctggagtgtagtggcatgatctcagctcactataac

SEQ ID NO: 508428 - DNA, 201 bp, Homo sapiens
gagggaaatatttactgaagcagaacattagaagttagctgattagagttaaaactacagaaagtaagctaagaaatctaggaaaggaaataaattcataragcccacagtgtaaaagcaaatgacttagttaaccaaccaagaaaactggaaggaacctgaacctctgaagtggcatagaaatgctttaggaagcaagga

SEQ ID NO: 508429 - DNA, 201 bp, Homo sapiens
ttagagttaaaactacagaaagtaagctaagaaatctaggaaaggaaataaattcatagagcccacagtgtaaaagcaaatgacttagttaaccaaccaaraaaactggaaggaacctgaacctctgaagtggcatagaaatgctttaggaagcaaggacaagctggtaatgaattgaacaacatgtggcagcaaaaaaaa

SEQ ID NO: 508430 - DNA, 201 bp, Homo sapiens
aggaaaggaaataaattcatagagcccacagtgtaaaagcaaatgacttagttaaccaaccaagaaaactggaaggaacctgaacctctgaagtggcataraaatgctttaggaagcaaggacaagctggtaatgaattgaacaacatgtggcagcaaaaaaaaaaaaaaaaagaaaagaaaagaaaaaagaaaaagagat

SEQ ID NO: 508431 - DNA, 201 bp, Homo sapiens
tttgttaaaaaaaaaaaaaaaggaaaaaggaaagcagtttatagatgaatacttaaatagtttcattttgtacaagtcacctggttttgttcccatgtgtkaggaagaaatgagttggacagaattagaagtcttgtcactgaagtaattaaagttattacagagcagcttttttagattagaaaggaagaagctagaaat

SEQ ID NO: 508432 - DNA, 201 bp, Homo sapiens
accaatgcaaagttacacagataatgatgaaccaggcaaacataataccaccaaaggaaactaatgaagttccagtaactaatctccaccccaaatggagatctacaaatttccccccaaaattcaaaataatcatcttaaagatgctcagtaagatgcaagaaaacacagatagacaactaaataaaattagaaaaacaa

SEQ ID NO: 508433 - DNA, 201 bp, Homo sapiens
tgaggcaggagaatggcgtgaacccgggaggcgaagtttgcagtgagccgagatcgccccactgcactccagcctgggcgacagagcgagactccgtctcaaaaaaaaaaaaaaaaaaaaaaggaatgtagttaggacttcagaaaggactaaaaatagtgagttttcaactattaaggaacaaagcattttttaccagag

SEQ ID NO: 508434 - DNA, 201 bp, Homo sapiens
gaggcaggagaatggcgtgaacccgggaggcgaagtttgcagtgagccgagatcgccccactgcactccagcctgggcgacagagcgagactccgtctcaaaaaaaaaaaaaaaaaaaaaaggaatgtagttaggacttcagaaaggactaaaaatagtgagttttcaactattaaggaacaaagcattttttaccagagt

SEQ ID NO: 508435 - DNA, 201 bp, Homo sapiens
aggcaggagaatggcgtgaacccgggaggcgaagtttgcagtgagccgagatcgccccactgcactccagcctgggcgacagagcgagactccgtctcaaaaaaaaaaaaaaaaaaaaaaggaatgtagttaggacttcagaaaggactaaaaatagtgagttttcaactattaaggaacaaagcattttttaccagagta

SEQ ID NO: 508436 - DNA, 201 bp, Homo sapiens
ggcaggagaatggcgtgaacccgggaggcgaagtttgcagtgagccgagatcgccccactgcactccagcctgggcgacagagcgagactccgtctcaaaaaaaaaaaaaaaaaaaaaaggaatgtagttaggacttcagaaaggactaaaaatagtgagttttcaactattaaggaacaaagcattttttaccagagtaa

SEQ ID NO: 508437 - DNA, 201 bp, Homo sapiens
gcaggagaatggcgtgaacccgggaggcgaagtttgcagtgagccgagatcgccccactgcactccagcctgggcgacagagcgagactccgtctcaaaaaaaaaaaaaaaaaaaaaaggaatgtagttaggacttcagaaaggactaaaaatagtgagttttcaactattaaggaacaaagcattttttaccagagtaag

SEQ ID NO: 508438 - DNA, 201 bp, Homo sapiens
ggcacggtggctcacgcctgtaatcccagcactttcggaggccgaggcgggcagatcacgaggtcaggcgatcgagaccatcctggctaacatggtgaaaycccgtctctactaaaaatacaaaaaattagctgggcggggtggcgggcgcctgtagtcccagctactcgggaggctgaggcaggagaatggcgtgagtcc

SEQ ID NO: 508439 - DNA, 201 bp, Homo sapiens
gcacggtggctcacgcctgtaatcccagcactttcggaggccgaggcgggcagatcacgaggtcaggcgatcgagaccatcctggctaacatggtgaaaccccgtctctactaaaaatacaaaaaattagctgggcggggtggcgggcgcctgtagtcccagctactcgggaggctgaggcaggagaatggcgtgagtcca

SEQ ID NO: 508440 - DNA, 201 bp, Homo sapiens
aggcaggagaactgtttgaacctgggaggtgggggttgcagtgagccgagatcatgccactgcactccagcctggtgacagagtgagactctgtcaagaagaaaaaaaaaaagaaaagaaaagaaaagaaaagaaatgttgaacataggccccaaatctcttatggcttgtagggtgtctgctaagaggcccaccattagt

SEQ ID NO: 508441 - DNA, 201 bp, Homo sapiens
ggcaggagaactgtttgaacctgggaggtgggggttgcagtgagccgagatcatgccactgcactccagcctggtgacagagtgagactctgtcaagaagaaaaaaaaaaagaaaagaaaagaaaagaaaagaaatgttgaacataggccccaaatctcttatggcttgtagggtgtctgctaagaggcccaccattagtc

SEQ ID NO: 508442 - DNA, 201 bp, Homo sapiens
ctgaggcgggggaattgcttgaacctgggaggcggaggttgcagggaggcggaggttgcagggaggcggaggttgcagtgagccgagattgcgccactgcmctccagcctgggcgacactgcgagactctgtctcaaaaaaaaaaaaaaaaaaaaaaaaatttagtattagctatagggtttttttaaaaagtaggtctat

SEQ ID NO: 508443 - DNA, 201 bp, Homo sapiens
tgaggcaggagaatggtgagaacccggtaggcggagcttgcagtgagcccagatggcgccactgcactccagcctgggtgacagagctagactccgtttcaaaaaaaaaaaaaaaaatcatgagatcatttcaaaaatctaagataagaatttctgacaaaatcaaatactgccgggcacagtgcctcacacctgtaatcc

SEQ ID NO: 508444 - DNA, 201 bp, Homo sapiens
tagtccaacagtgggtgaaagcccgaagcctcttgactgggaagtgcagaaactcatcgccttccactcggtgatggcgtcaggaactgtgacgtggaccrcctccttccccgagttactgtgaaaacacaaggaccaacatgaggcagaggtagcgtggggcaaggagaacatttgtgaattaagccacaaattcggtgg

SEQ ID NO: 508445 - DNA, 201 bp, Homo sapiens
tgtggttaagaacttccccttatgccaggatgttgctcagaagggactgtcctaacttaggcacaggcggaataaatcaacctaagtgtccttggcccagmtcatcatagtgtcattaacatgacatttttgtggttttagccccttggtgggtttcacttaggcactcgtgggtaacaaccaagatggagtcactctggc

SEQ ID NO: 508446 - DNA, 201 bp, Homo sapiens
tggctctgggctgggcatggtggtgcacgcctataatctcagcagtttgggaagccgaggcgggaggattgcttgagcccaggagtttgaggctagcctgrgcaacatagcgaaaccccaactctacaaaaaaatacaaaaattagccgggtgtggtggagtgcacctgtaatcccacctacttgggggctgaggtgtgag

SEQ ID NO: 508447 - DNA, 201 bp, Homo sapiens
cgcagcactttgggaggctgaggcaggggtatcacgaggtcaggagatggagaccatcctggccaacacggtgaaaccccggcctctactaaatatacaaaaaaaaaaaaaaaaaaaaattagctgggtgtggtggcgggcacctgtagtcccagctactcaggaggctgaggcaggagaatcacttgaacccaggaggtg

SEQ ID NO: 508448 - DNA, 201 bp, Homo sapiens
tgggaagccgaggcgggaggattgcttgagcccaggagtttgaggctagcctgggcaacatagcgaaaccccaactctacaaaaaaatacaaaaattagcygggtgtggtggagtgcacctgtaatcccacctacttgggggctgaggtgtgaggctcacttgggcttgggcagatgaatgtgcagtgagctgtgatcatg

SEQ ID NO: 508449 - DNA, 201 bp, Homo sapiens
cttagctcccatttgtaagtgagaacacacaatatttggttttccattcctaagttacttcacttagggcctcccactccatccagttgctgcaaatgccrttatttcattcctttttatggttgagtagtattccaaggtgcatatataccacattttctttatccagtcgttggttgatgggcacttaggttggttcca

SEQ ID NO: 508450 - DNA, 201 bp, Homo sapiens
tgcctggcctcttctagcatttttgtgctttcaggtcttagatttaagtggtttttttttgtttgtttttgtttttgtttttgacagtctcactctgtccscaggctggagtgcagtggcgtgatcttggctcactgcaacctctgcctcccgggttcaagcgattctcctgcctcagcttccccagtagctgggattaca

SEQ ID NO: 508451 - DNA, 201 bp, Homo sapiens
gcctggcctcttctagcatttttgtgctttcaggtcttagatttaagtggtttttttttgtttgtttttgtttttgtttttgacagtctcactctgtcccmaggctggagtgcagtggcgtgatcttggctcactgcaacctctgcctcccgggttcaagcgattctcctgcctcagcttccccagtagctgggattacag

SEQ ID NO: 508452 - DNA, 201 bp, Homo sapiens
aaaaattataaagatggaaacttcttttgataaatggtagctaaaacaattaaatagtaacatggaagatgccactatccctccattaatcattttactggagatcctagctggtataaagaaaaaaatattaggagtataagcagagaggaaaacacaaaactgagtatcagatgttatacagaaaatccaaaactatgt

SEQ ID NO: 508453 - DNA, 201 bp, Homo sapiens
aaaattataaagatggaaacttcttttgataaatggtagctaaaacaattaaatagtaacatggaagatgccactatccctccattaatcattttactggagatcctagctggtataaagaaaaaaatattaggagtataagcagagaggaaaacacaaaactgagtatcagatgttatacagaaaatccaaaactatgta

SEQ ID NO: 508454 - DNA, 201 bp, Homo sapiens
ggagtgaaagtttaataaatgaaagaagaaagctatctatagtggagaggggagcccaagtgggctgccgtttttacagtttaatttaaaaggtttttggkttgtttgtttgtttgtttgtttgtttgttttttgagatgaagtcttgctctcgtcccccaggctagagtgcaatggtgcgatcttggctcactgcaacct

SEQ ID NO: 508455 - DNA, 201 bp, Homo sapiens
ttacacaaattgctaggagtccctattgggactacaagctctttgagccagtgactgtatcttttgtctctaaaaagtacatgatctcatagagagatacmcctgaaataccggttaaatgaaataaaacaactgaatacatttcctaggtcttttatgatattaccttatgatattctttttttttttttttttttgaga

SEQ ID NO: 508456 - DNA, 201 bp, Homo sapiens
ttgctatgtcacccaggcaggagtccagtggcacaatcatggctcattggagcctcaacctcctggactcaagtcatcctctcgcctcattttttaaattktttttttgtagagacgaggtctcactatgttgcccaagctggtttcaaactcaagtgatcctcgtgacttggcctcctaaagtgttgggattacaggtgt

SEQ ID NO: 508457 - DNA, 201 bp, Homo sapiens
ttttgggggcatgtgttcagggtgtaatttgaacgtggctccagcttcatttcactgcagctgtttaggcgcaacctttatgcactgttgacttctcttcwggtggcttccctcagagttattaagtggcagcagaagttaagagtttgtattcgcacatcacaccttccttagaagagatttaactttcctcctctagcc

SEQ ID NO: 508458 - DNA, 201 bp, Homo sapiens
gcaggagaactgtttgaacctgggaggtgggggttgcagtgagccgagatcatgccactgcactccagcctggtgacagagtgagactctgtcaagaagaaaaaaaaaaagaaaagaaaagaaaagaaaagaaatgttgaacataggccccaaatctcttatggcttgtagggtgtctgctaagaggcccaccattagtct

SEQ ID NO: 508459 - DNA, 201 bp, Homo sapiens
aggagaactgtttgaacctgggaggtgggggttgcagtgagccgagatcatgccactgcactccagcctggtgacagagtgagactctgtcaagaagaaaraaaaaaagaaaagaaaagaaaagaaaagaaatgttgaacataggccccaaatctcttatggcttgtagggtgtctgctaagaggcccaccattagtctga

SEQ ID NO: 508460 - DNA, 201 bp, Homo sapiens
gcttccttagattaggtttcaacattctcctgaatctcaatgaccttcattcctatccatagtctgaattctatttctgtcatttcagccatctcagcccwattaagaacccttgctggagaactggtgtgattgtttggaggaaagaagatgctctggctctttgagttgtcagagttcttgtgctggttctttctcatc

SEQ ID NO: 508461 - DNA, 201 bp, Homo sapiens
ttcttcccaaacttaagagctttgcagtataaacacatagtgatataaaataagtaatgttaagctaaagtcaaatttgcatgaagttggaaaaattccayattctacgtagagttataacaatttttaattgagtgccaccaatctcaggctttaatataatcattttaaaaaagtaaattttggccgggcacattggct

SEQ ID NO: 508462 - DNA, 201 bp, Homo sapiens
ccattccagaggctcagatcaagaagcctctattagccctttgtcagatgagtaggttgcgaaaattttctcccattttgtaggttgcctgttcactctgwtggtagtttcttttgctgtgcagaagctctttagtttaattagatcccatttgtcaattttgtcttttgttgccattgcttttggtgttttggacatgaa

SEQ ID NO: 508463 - DNA, 201 bp, Homo sapiens
ctctattagccctttgtcagatgagtaggttgcgaaaattttctcccattttgtaggttgcctgttcactctgatggtagtttcttttgctgtgcagaagytctttagtttaattagatcccatttgtcaattttgtcttttgttgccattgcttttggtgttttggacatgaagtccttacccatgcctatgtcctgaat

SEQ ID NO: 508464 - DNA, 201 bp, Homo sapiens
tgtagatatgcagagttatttctgagggctctgttctgttccattgatctatatctctgttttggtaccagtaccatgctcttttggttactgtagccttrtagtatagtttgaagtcaggtagtgtgatgcctccagctttgttcttttggcttaggattgccttggcgatgcgggctcttttttggttccatatgaact

SEQ ID NO: 508465 - DNA, 201 bp, Homo sapiens
attgatgtaatcaatattatttttatgtgatgggctacacttttggcactccaccccccaatctagaagcacaaccttctttttaactaacaaccttgtcstgattaagagagtatggacagtagaggttaaatactgtttgaagtctactacagatacctgagggataatcagaactttatacatatgcttggcctcttg

SEQ ID NO: 508466 - DNA, 201 bp, Homo sapiens
tgctcttttggttactgtagccttatagtatagtttgaagtcaggtagtgtgatgcctccagctttgttcttttggcttaggattgccttggcgatgcggrctcttttttggttccatatgaactttaaagtagttttttccaattctgtgaagaaagtcattggtagcttgatggggatggcattgaatctgtaaattac

SEQ ID NO: 508467 - DNA, 201 bp, Homo sapiens
accgtagatcttggcaacctcagcatacattattttttctttccttatcaagtggggaactttcaccttttcacctaaaggaagcactttacggcttctcyttcacctcccaattgccagcatcaatactctggtgcattggggccatgatgaagtaaaataagggtgacttgaacacaagcactgagatactgtgacaat

SEQ ID NO: 508468 - DNA, 201 bp, Homo sapiens
gggaagtccaggctgtggtgagctgtgattgtgccactacactgcagtctgggtgacagaataatatcctgtctcaaataaataaataaataaataaatamataaataaatacatacatacatacatacataaatattaaaataagaaatgtaagcttgttttaaataaaaaagtagagggaactggcttccagtaagtat

SEQ ID NO: 508469 - DNA, 201 bp, Homo sapiens
tcatctcctctgaaaggccatgcctggccctcatttctcaaatagccaccccagccagcacccccgccagtcttgttattcctccaccttgctttatttastttttagcacatatcaccctgtaaaattatgcatttacttgcttaagcttttgttgcctttctcccccacaagtgtgtcaacccgctgagggcaggaact

SEQ ID NO: 508470 - DNA, 201 bp, Homo sapiens
agcctcctaagtgctgggattacaggcatgaaccaccacacctggccaattgaccgaatattttaatcccactgttgagacctactgctccaaaaaaaaascttcctttcaaaatattactactcatggacaatgttcctggtcacccaagagctctgatggagatgtacaagaaggttaatgttgttttcatgcatccta

SEQ ID NO: 508471 - DNA, 201 bp, Homo sapiens
aaagatatggaaccaacctaagtgcccatcaatcaatgactggataaagaaaatgtggtatatatgcaccatggaatactactcaaccataaaagggaacraaataatggcatttgcagcaacttggatggagtgggaggccattattctaagtgaagtaatttaggaatggaaaacgaaatattgtatgttctcacttat

SEQ ID NO: 508472 - DNA, 201 bp, Homo sapiens
tcaattaaggctcagatgattgttagcattttttcagcaataaagtattttataattagtgtatttatgttgcacatttatgacataatgttattgcatayctagtaggttacagtatagtgtaagcataacttttacatgcactgggaaaccaaaaaatttgtgtgacttgctttatcacaatattcactttatggcagt

SEQ ID NO: 508473 - DNA, 201 bp, Homo sapiens
gacccagctcccaccaggcaggacagcccttcccacccagcttctagcctctggtcacaccggctcctcaatttgtccctctagcccttggtggttttatsttgttgctgatctttttttttttttttttgagtgggggacactgtttcattcttgttgcccaggctggagtgtaatggcgccatcttggctcaccacaac

SEQ ID NO: 508474 - DNA, 201 bp, Homo sapiens
gaggtgggaggattacttgagcctgggaggtggaggttgcagtgagctgagattgcaccatttgcactccagcctgggcagcagaatgagctcttgtctcaaaaaaaaaaaaaaaaaaaaagaaagaaagaaaaagtaattaagagtcaatacaatcccagtggattttttgattttttggggtaacaagcttgattataa

SEQ ID NO: 508475 - DNA, 201 bp, Homo sapiens
gggaagccgaggcgggaggattgcttgagcccaggagtttgaggctagcctgggcaacatagcgaaaccccaactctacaaaaaaatacaaaaattagccrggtgtggtggagtgcacctgtaatcccacctacttgggggctgaggtgtgaggctcacttgggcttgggcagatgaatgtgcagtgagctgtgatcatgc

SEQ ID NO: 508476 - DNA, 201 bp, Homo sapiens
gatatatgggcttatctctgaagtatacctgtatctcagtgaagatgttattatttatttatttatttgagacagagtctcactgtgtcacccaggttggratgcagtggcacgatctccacttactgcaacctccacctcccgggttcaagagattctcctgcctcagcatccgaagtagctgggactacaggcatgtgc

SEQ ID NO: 508477 - DNA, 201 bp, Homo sapiens
acttgagcctgggaggtggaggttgcagtgagctgagattgcaccatttgcactccagcctgggcagcagaatgagctcttgtctcaaaaaaaaaaaaaaraaaaaagaaagaaagaaaaagtaattaagagtcaatacaatcccagtggattttttgattttttggggtaacaagcttgattataaactttccatggaaa

SEQ ID NO: 508478 - DNA, 201 bp, Homo sapiens
ggctgggtgacagagggagaccctgtctcaaaaaaaaaaaaaaaaaatgtatggctctggcatttttcacgtttgctgaagcatgttccttgggggcatawtgagaacacaggaaccttgtctataatgcataatgaccatcggaggaaagaatccccagctagctccattgtcagcaactatcaagaacctgctaggggg

SEQ ID NO: 508479 - DNA, 201 bp, Homo sapiens
tgagcctgggaggtggaggttgcagtgagctgagattgcaccatttgcactccagcctgggcagcagaatgagctcttgtctcaaaaaaaaaaaaaaaaaraaagaaagaaagaaaaagtaattaagagtcaatacaatcccagtggattttttgattttttggggtaacaagcttgattataaactttccatggaaatgc

SEQ ID NO: 508480 - DNA, 201 bp, Homo sapiens
gaggcacaagaatcgcttgaactcaggaagtggaggttgcagcgaacaaccactgcactccatcctgggtgacagagcaagatctgtctcaaaaaaaaaataaataaataaaataaaataaaatataaaaaaaagagatgagaaacaaatgatcagatttgcagagcaatctttcaagaatttatcctatttacacatgca

SEQ ID NO: 508481 - DNA, 201 bp, Homo sapiens
gcaccagaccctgccaaaatgaaacaaaacaagaactggcaaaatgattgtttctaatataagccaggaaattgtttcacaggtcaagaatgaggaaaactttttttttttttcctaagatcttacctcttattgtctttaggagttcctgtttattattgaggtcatgtgttttgttaccaggtcaactagcttactcct

SEQ ID NO: 508482 - DNA, 201 bp, Homo sapiens
caccagaccctgccaaaatgaaacaaaacaagaactggcaaaatgattgtttctaatataagccaggaaattgtttcacaggtcaagaatgaggaaaactttttttttttttcctaagatcttacctcttattgtctttaggagttcctgtttattattgaggtcatgtgttttgttaccaggtcaactagcttactcctg

SEQ ID NO: 508483 - DNA, 201 bp, Homo sapiens
tcctatttccacactaagactaaaggtcttcatatttgtgggagggagaatattgtatctcaacaccgtctggtaggaagaaataggtagccaaatcagasttggaaagaactttaaagattgtacagttcaaactacttttcttacaagtgagaaagaaagagagagagaaggcctaaggggaagatgctctccgactct

SEQ ID NO: 508484 - DNA, 201 bp, Homo sapiens
ttatataaaactaggtagcatagcctactacaaaccttgactatatgatacagcctgttgctcttattgttataaaagatttaaacattttatttataaamtggtattaccaaccttcccctatttctgaatatttaggtaagaagcaaaaataagttatcctggctttgtgtagtggctcatacctgtaatcacagcact

SEQ ID NO: 508485 - DNA, 201 bp, Homo sapiens
tgttggattccagaaggcttataagtacctttcactaggaaaatctgcaggacatactagtcgtacaagccaaatcgttgttgacctaaaattttatagtytatgagggtctgaatatcaaaagccagatctttggcccactttttttaaaaaaaggctatttgatgtatgaaaagtaagatgtttattggtgaaggtgaa

SEQ ID NO: 508486 - DNA, 201 bp, Homo sapiens
agtccaggctgtggtgagctgtgattgtgccactacactgcagtctgggtgacagaataatatcctgtctcaaataaataaataaataaataaatacatamataaatacatacatacatacatacataaatattaaaataagaaatgtaagcttgttttaaataaaaaagtagagggaactggcttccagtaagtatgaaa

SEQ ID NO: 508487 - DNA, 201 bp, Homo sapiens
tctcacaggtgtttatgttatcacgtacctgttgagaatgcctatggcaagggctattaccttacactaaggggagtatggaaccaagcctggttaagtcrtctgggcacagagaagttaggggaatgagagagcggtgtagtcattacagaggctggtgtccttgtctactgaaatgtaggtgtgagagactaggagggc

SEQ ID NO: 508488 - DNA, 201 bp, Homo sapiens
taatgagatcaacactgcttaataaatacgtatactcatctgttcatagagtagaataatatgaaataacctgaattagctgtgaaaatagcagtgcttcrgctgggcgtggtggctcacgcctgtaatcccagcactttgggaggctgaggcgggcggatcacgaggtgaggagatcgagaccatcctggataacacggt

SEQ ID NO: 508489 - DNA, 201 bp, Homo sapiens
caggctgtggtgagctgtgattgtgccactacactgcagtctgggtgacagaataatatcctgtctcaaataaataaataaataaataaatacataaatamatacatacatacatacatacataaatattaaaataagaaatgtaagcttgttttaaataaaaaagtagagggaactggcttccagtaagtatgaaattat

SEQ ID NO: 508490 - DNA, 201 bp, Homo sapiens
accatgttggccaggctggtctatgaactcctgacctcaggtgatccacctgccttggcctcccaaagtgctgggattataggcgtgagccaccgcgctcsgcctcctgctcagaatctttcctctatccctcctccttcctcacacatgcgctgagtcagcaaaaccccaacaggttttacttttttacaaaacctgctc

SEQ ID NO: 508491 - DNA, 201 bp, Homo sapiens
tacattcatcaaaactaagaaattaacattggaataatactattaactaaactccaggcttcatttggatttcgtgaatttttccactaataccctttttstgttccactgtccaatccaggataccacattgcatttagttatgtctctttagtctcccctaatctctgcagagactacttcttaaaggattcttgtgga

SEQ ID NO: 508492 - DNA, 201 bp, Homo sapiens
gtgaaaggaaggggtccagtttcaattttctgcataaggctagccagcattcccagcaccatttactaaatagggaggcctttcctccattgcttgttttygtcaagtttgtcaaagatcagatggttgtaggtttgcggttttatctctgagttctctattctgtaccattggtctatgtgtctgttctttatcagtacc

SEQ ID NO: 508493 - DNA, 201 bp, Homo sapiens
caccatggctcctgtgccgccagccacaggtccagacctagacccctctgttgcccttgaggggctgaccttattctccacagtgatgctggtggacagcrtggcaggggctgaggcagcagaggccattgccaccttgggatctgtgccagagccatcactaggcacatttttgacagtatgtttttattgtataatata

SEQ ID NO: 508494 - DNA, 201 bp, Homo sapiens
tgtgattcaggatcttgagatgcggagattatcctggttggctctaaatgctatcacatgcacccttctagagagaggcaaagggaagtttgacacacgcwggaggaagtgatgtgaagacaggcagagtttggagtgatgcagctgtaagccaaagaatgcgcatagcaaccagaacttggaagaaacaagaaatgaatt

SEQ ID NO: 508495 - DNA, 201 bp, Homo sapiens
cttgcctgttgttggtgtatagaaatgcctgtgatttttgcacattgattttgtatcctgagattttgctgaagttgcttatcagcttaagaatcttttgractgagataatggggttttctagatataaaatcaaataaagataatttgactttctctcttcctattcgaatacactttatttatttctcttgcctgatt

SEQ ID NO: 508496 - DNA, 201 bp, Homo sapiens
ggtaacatggtgaaaccccgtctctacaaaaaaattaaaaataaggccgggcacagtgtatcacgcctgtaatcccagcactttgggaggccgaggtgggyggatcacctgaggttgtgagttcgagaccagcctgaccaacatggagaaacctcatctctactaaaaatacagagttacccaggcgtggtggtgcatgcc

SEQ ID NO: 508497 - DNA, 201 bp, Homo sapiens
attcctttgattaatgtcagtcttctccccaaactggaaattccatgagagcaggcatttgttattttttgtcccctggtgtatttttttattttctattwtatttccagtacacagcacagtgaaatggctccataaacgttacctgagtaagtgaagtaattctctgtaaggtctggctgaagaccttcatgtctccaa

SEQ ID NO: 508498 - DNA, 201 bp, Homo sapiens
ttggtgtatagaaatgcctgtgatttttgcacattgattttgtatcctgagattttgctgaagttgcttatcagcttaagaatcttttggactgagataayggggttttctagatataaaatcaaataaagataatttgactttctctcttcctattcgaatacactttatttatttctcttgcctgattgccctggccag

SEQ ID NO: 508499 - DNA, 201 bp, Homo sapiens
gcatttccttatatatccagtgaatcccactccctgggaggtggattcatctctaaattccattagttacttttaccttcagtaaatggtctcagcacagstactgctccatcccatgagtggccacccaggaattaaaggttcctaattccccaccctctcattgtccctcttcccaaaccacaggtttccatgagcctg

SEQ ID NO: 508500 - DNA, 201 bp, Homo sapiens
tctcttctacaccacttaaagccacctcagtgatttttccattgctgttatattgaggtctatgagcctaaatatgttagcaagccctgcccaccctcttktcttaaacctcccctctcttcctgtatctttgccctccagacacattgggcttattttgattttggaatgcttcttacctactccccctatcccccagtc

SEQ ID NO: 508501 - DNA, 201 bp, Homo sapiens
gtctcaaactcgtgaaggcaatccttctgcctcagcccccaaagtgctgggattacaggtgtgagccactgtgcccagacttctacaaatttaatatatattttttttttggtagaagcagggtcttgctctgttgcccaggtgccttaatcacagcttattgtagccttgacctcccaggcttaagtgatcctcccacct

SEQ ID NO: 508502 - DNA, 201 bp, Homo sapiens
gtgagaatagagaattctcatacactgctggaaggtaaataaattggtatgatcgctttggaaaatacaggcaggttgaagattggcaattctacaccacygtgatcacgctcatagaaattcgcaaacatgttcaccaggctatatgtacaacaggtgcagagcagcactattcataatagcccaaacaatgaaagcaag

SEQ ID NO: 508503 - DNA, 201 bp, Homo sapiens
tgggctccaaaggattcggccaccaaggtggagaaggtatgtgtgcagaatgggaagtagtcaggtttggctgacacatttagcaggcatttggggagacrtggaaactgaggctggaatgatccactagggccacgtgtgtagaaggtcaggttcaggcatctgaatctcagtcggtatcaacagagttgcttcttggtg

SEQ ID NO: 508504 - DNA, 201 bp, Homo sapiens
ctagctaggacttctagtaccgtgttgaataacagtggtgaaagtggatatccttgttgtattccagatctcagaggaaaggtttttttttttcctcatcrgtatgatactagctgagagtctgtcatatatggtgtaattatattaagatatgtttcttctataccaagtttttttaaggtttttattatgaagggatgt

SEQ ID NO: 508505 - DNA, 201 bp, Homo sapiens
tggaaaatacaggcaggttgaagattggcaattctacaccactgtgatcacgctcatagaaattcgcaaacatgttcaccaggctatatgtacaacaggtrcagagcagcactattcataatagcccaaacaatgaaagcaagtcaaaacccatcaactaaaaaatggataaactgtggtacaatcatacaatgggatact

SEQ ID NO: 508506 - DNA, 201 bp, Homo sapiens
  misc_feature (1)...(201): n = A,T,C or G
tcagttgcatatttcaactccagaatttctgcgtagttcttttttaattatttaaatctctttgttaaatttttctgatagaattctgaactccttctccntgttatcttgaattttgttgagttttctcaaaacagctatttgaattctctgtctgaaaggtcactgtattagtccattctcgcattgctataaatatct

SEQ ID NO: 508507 - DNA, 201 bp, Homo sapiens
ttgcagtctagactttttttttacccactcttcttaggaaggctttccaggtatttgaacttgggtattgagatctaagccgtgtctgccttagggggcaycccaagcccagtaacctgtggttcttgcggatttgtagagttaccaccttggtagtttcggataagacctggatgaattctctggattaccaggcagaga

SEQ ID NO: 508508 - DNA, 201 bp, Homo sapiens
ggataaactgtggtacaatcatacaatgggatactataccataacaaaatgaaataactagcactgtgtacaacaacctggagaatctcacacacacacamaaaaaaatgttaaatgaaagaaaaagcattaaataatatatgcaatattattccattcatgtaaagttcaaaaagcagacaaaaactaaattatgtgtga

SEQ ID NO: 508509 - DNA, 201 bp, Homo sapiens
agaaggctagacagcagtttcaccgtggagcggggcaaatctgatcagatcaccaggaaaagtcgcacagcacctcattcccagaacagagcacacctgaagcggaggggcctcaaggaaatatcagcctccatggggcctcaaggaaatatcagcctccattcagcccgagctgccttccagctgtgggccacccggcac

SEQ ID NO: 508510 - DNA, 201 bp, Homo sapiens
ataaactgtggtacaatcatacaatgggatactataccataacaaaatgaaataactagcactgtgtacaacaacctggagaatctcacacacacacaaamaaaaatgttaaatgaaagaaaaagcattaaataatatatgcaatattattccattcatgtaaagttcaaaaagcagacaaaaactaaattatgtgtgata

SEQ ID NO: 508511 - DNA, 201 bp, Homo sapiens
aaggctagacagcagtttcaccgtggagcggggcaaatctgatcagatcaccaggaaaagtcgcacagcacctcattcccagaacagagcacacctgaagcggaggggcctcaaggaaatatcagcctccatggggcctcaaggaaatatcagcctccattcagcccgagctgccttccagctgtgggccacccggcacct

SEQ ID NO: 508512 - DNA, 201 bp, Homo sapiens
catttatttcaagaaaattttcaataattccacttattattgatctctagttttattctattgtggtcagagaagatgctttatattatttcagttttttwaaatgttttaagacttgttttgtgacataacatatggtccatccttgagaatgatccatgtgctgaggaaaaagaatgtgtactctgcagctttgggatg

SEQ ID NO: 508513 - DNA, 201 bp, Homo sapiens
cagcagtttcaccgtggagcggggcaaatctgatcagatcaccaggaaaagtcgcacagcacctcattcccagaacagagcacacctgaagcggaggggcctcaaggaaatatcagcctccatggggcctcaaggaaatatcagcctccattcagcccgagctgccttccagctgtgggccacccggcacctcagacagag

SEQ ID NO: 508514 - DNA, 201 bp, Homo sapiens
atgtgcccagaaacctggactgatctttctttaatagtgaacccctgggccactgaagagtaacatggctccactggacacaaaagagggatggaatcaayaggcagggggccttttataagccttaggaaaagaaaatgaaactatttcatctttggacttttcaatactattggagtgattttttttctttctaaacag

SEQ ID NO: 508515 - DNA, 201 bp, Homo sapiens
tggctgcatagtatttcaaaatgtaaaacacaatattctttacatcagtcatttcctgtttgctttccaacccattccctacccttctgctctgctctgtyccacagaggctgagccctgcaaactacagttcctaagcccctttgctaactggcttttatttagaatcagccaatggaaagtgctggcaggagactgaag

SEQ ID NO: 508516 - DNA, 201 bp, Homo sapiens
actgcgcctggcctgatttttattatttcttctactaatttggggtttggtttgctcttgcttttctagttctttaatatacatcattaaatagttgtttrtttgaggtttttttcttttttgatgtaggcacttatagctataaacttgcctctcagtactgcttttgttgtatcccatagcttttcgtatgttgtgttt

SEQ ID NO: 508517 - DNA, 201 bp, Homo sapiens
ctatgttggccagactgatctcgaactcctgacctcgcaatccgcccacctcggcctcccaaagtgctgggattccaggcatcagccattgcacccagggkgatattcttatatattattacctgacattggaggaaatgtttcatattagaagtgtgactgaattgttgcttttttttttcccattttttttttttttga

SEQ ID NO: 508518 - DNA, 201 bp, Homo sapiens
gagtccatcagtctccacatgcggtcagggaaggctctccagggaggctgctgatcgtgctctcaccatgctctagagagcagtgaggagtgtaggaatcrggaaggaagggccactttaaatagttgcacttcaagtaaatttgtttcaaatcctctatgtgtttcatcaataaccaaaaaaaggaccacaagaaaatac

SEQ ID NO: 508519 - DNA, 201 bp, Homo sapiens
cattgcagtacagcaggagaaaatgatgtcagcttgccccattattggtggtattaactttgattaactgttttcactgtcacattactatttttcttttktaattaattagtggtaattaattgtgttatgataagatgctccttatcaaactttcactgactagttgtagtatcaattaattacatttaaaaatttaaa

SEQ ID NO: 508520 - DNA, 201 bp, Homo sapiens
caggagaaaatgatgtcagcttgccccattattggtggtattaactttgattaactgttttcactgtcacattactatttttcttttgtaattaattagtrgtaattaattgtgttatgataagatgctccttatcaaactttcactgactagttgtagtatcaattaattacatttaaaaatttaaagaagggccgggtg

SEQ ID NO: 508521 - DNA, 201 bp, Homo sapiens
cccatgtctactaaaaatacaaacattagctgggcgtggtggtgcatatctgtaatctcagctattcaggaggctgaggcatgagaatcacttgaacccaggaggcggaggttgcagtgagctgagactgcaccactgcactccagcctgggcaaaaagagcgaaattccatctcaaaaaaaaaaaaaaagcagacggtaa

SEQ ID NO: 508522 - DNA, 201 bp, Homo sapiens
tgcagctttttcttttttctcttaatgggaattttcaattctttcttaacttcttcagtttttctagcttttaacataactccacccaattataaagtccrtccatttgagaaacacagaatatctaattaccaatttttgattctcattttgtattctgaaaaccatttttcaataatcataaaaacaaaagacatgcat

SEQ ID NO: 508523 - DNA, 201 bp, Homo sapiens
tttcctatttccacactaagactaaaggtcttcatatttgtgggagggagaatattgtatctcaacaccgtctggtaggaagaaataggtagccaaatcaracttggaaagaactttaaagattgtacagttcaaactacttttcttacaagtgagaaagaaagagagagagaaggcctaaggggaagatgctctccgact

SEQ ID NO: 508524 - DNA, 201 bp, Homo sapiens
agaagatacaaatcattctgacttaaagaatcttcaaatcagtaaatattttttgaggatcattgccataccatgtaccatgcaaaatgccaggaatacarcagttaaacacaaacacacatggttcctgaatttgtggaccatgtttttatgaacctcatagtaccggctagaattgtgaaatcattgtaggcaccatct

SEQ ID NO: 508525 - DNA, 201 bp, Homo sapiens
agcaggtagtcattaactaaatatgtggtggcagggagcttatcaggcagagcaaatagcatattctaaggaaatgagggagaaagttacataactttttytttcttttttttttttgagacagggtctcattctgttgtccaggctggagggcagtggtgcaatcatggtcagctggagccttaaactcctgggctcaag

SEQ ID NO: 508526 - DNA, 201 bp, Homo sapiens
acttgtggatataatgtattcttagaactttcaagaatatattctaacacagattaccatagacaagtttccatggtccatcactaccatttctctgagaraataaattctcgccccaagatctctgccagcctccatcactgatactttaatataaaaaatacttttaaaaagaatttgtgcttccatgaagttacaaaa

SEQ ID NO: 508527 - DNA, 201 bp, Homo sapiens
acacagattaccatagacaagtttccatggtccatcactaccatttctctgagaaaataaattctcgccccaagatctctgccagcctccatcactgatastttaatataaaaaatacttttaaaaagaatttgtgcttccatgaagttacaaaaaatacagtgaaaatatcgttaaagaaattaaaaacagaaaaaacaa

SEQ ID NO: 508528 - DNA, 201 bp, Homo sapiens
gagggagaccctgtctcaaaaaaaaaaaaaaaaaatgtatggctctggcatttttcacgtttgctgaagcatgttccttgggggcataatgagaacacagraaccttgtctataatgcataatgaccatcggaggaaagaatccccagctagctccattgtcagcaactatcaagaacctgctagggggccaggtgcggtg

SEQ ID NO: 508529 - DNA, 201 bp, Homo sapiens
actgcaattcagagtacccccactatattactttagacttgcagttcatatgtgaagtcatcatttgctctatctgcagcatcctaaccttaagtgaacarctcttcctatctctttgaaattgtcttttgactccccaaagtgaagcttgtgtacgccacatagttcatattttaagtccaattgtcctaaagttactca

SEQ ID NO: 508530 - DNA, 201 bp, Homo sapiens
gaggctgaggcaggagaatggcatgaacccaagaggcggagcttgcagtgagccgggatagcgccactgcagtccagcttgggcgaaagagtgagactccrtctcaaaaaaaaaaaaaaaagagaagtcctaatgtaaacttatagatgggaaaaagtcctgaccacttctgtttccttttctatctatgccaaccacaga

SEQ ID NO: 508531 - DNA, 201 bp, Homo sapiens
agtcatcatttgctctatctgcagcatcctaaccttaagtgaacaactcttcctatctctttgaaattgtcttttgactccccaaagtgaagcttgtgtaygccacatagttcatattttaagtccaattgtcctaaagttactcatcaaatttagtgaacatcctctaggtaaatatcaataattgacaaagacaagcag

SEQ ID NO: 508532 - DNA, 201 bp, Homo sapiens
tgaggcaggagaatggcatgaacccaagaggcggagcttgcagtgagccgggatagcgccactgcagtccagcttgggcgaaagagtgagactccgtctcaaaaaaaaaaaaaaaagagaagtcctaatgtaaacttatagatgggaaaaagtcctgaccacttctgtttccttttctatctatgccaaccacagacatag

SEQ ID NO: 508533 - DNA, 201 bp, Homo sapiens
gaggcaggagaatggcatgaacccaagaggcggagcttgcagtgagccgggatagcgccactgcagtccagcttgggcgaaagagtgagactccgtctcaaaaaaaaaaaaaaaagagaagtcctaatgtaaacttatagatgggaaaaagtcctgaccacttctgtttccttttctatctatgccaaccacagacatagc

SEQ ID NO: 508534 - DNA, 201 bp, Homo sapiens
cccccaagtatacatgacacatcagtgtgtggcaggcgggtacaaaccatattaagacaacactgtgttgaggtaaaaactgtattcgaagtatcacttctttttttttttttttttttgagacgaagtctcgctctgtcaccaggctagagtgcagtggcgtgatcttggctcactgcaacctccacctcctgagtttaa

SEQ ID NO: 508535 - DNA, 201 bp, Homo sapiens
agcagtttcaccgtggagcggggcaaatctgatcagatcaccaggaaaagtcgcacagcacctcattcccagaacagagcacacctgaagcggaggggcctcaaggaaatatcagcctccatggggcctcaaggaaatatcagcctccattcagcccgagctgccttccagctgtgggccacccggcacctcagacagagg

SEQ ID NO: 508536 - DNA, 201 bp, Homo sapiens
gcagtttcaccgtggagcggggcaaatctgatcagatcaccaggaaaagtcgcacagcacctcattcccagaacagagcacacctgaagcggaggggcctcaaggaaatatcagcctccatggggcctcaaggaaatatcagcctccattcagcccgagctgccttccagctgtgggccacccggcacctcagacagaggg

SEQ ID NO: 508537 - DNA, 201 bp, Homo sapiens
aagtgctttttaagcatccattgaaatgatcatatggtttttgttcttcattttgttgatatgatgatatatcagattgattgatttgcatatgttgaacyatccttgcatccctgggataaatcctatttagtcatgatgaatgatctttttaatgtgttgttgaatttggtttgctagtattttgttgaggatttttgc

SEQ ID NO: 508538 - DNA, 201 bp, Homo sapiens
gaatgttatcaagtgctttttaagcatccattgaaatgatcatatggtttttgttcttcattttgttgatatgatgatatatcagattgattgatttgcayatgttgaactatccttgcatccctgggataaatcctatttagtcatgatgaatgatctttttaatgtgttgttgaatttggtttgctagtattttgttga

SEQ ID NO: 508539 - DNA, 201 bp, Homo sapiens
cttgagaatgatccatgtgctgaggaaaaagaatgtgtactctgcagctttgggatgaaatgttatgtatgtatctattaggtccatttggtctgattagktccatttggtacagattaagtctgatgttcattgattttctctctggaagatctgtccaacgctgaaaatgggatgttgaagttaccagctattattata

SEQ ID NO: 508540 - DNA, 201 bp, Homo sapiens
cagtttcaccgtggagcggggcaaatctgatcagatcaccaggaaaagtcgcacagcacctcattcccagaacagagcacacctgaagcggaggggcctcaaggaaatatcagcctccatggggcctcaaggaaatatcagcctccattcagcccgagctgccttccagctgtgggccacccggcacctcagacagaggga

SEQ ID NO: 508541 - DNA, 201 bp, Homo sapiens
acctttgatttctgtaaaataacacttttctgtttttcttctgaggcccctcctccacagaccagtttctggatatcttcttctttatcagatctctaaamgttgagattcttctagatttagatctatgctgcttgttctttgcactctacattttcttcattcatttctacaacttttaatagtgtgtataggtagctc

SEQ ID NO: 508542 - DNA, 201 bp, Homo sapiens
agtttcaccgtggagcggggcaaatctgatcagatcaccaggaaaagtcgcacagcacctcattcccagaacagagcacacctgaagcggaggggcctcaaggaaatatcagcctccatggggcctcaaggaaatatcagcctccattcagcccgagctgccttccagctgtgggccacccggcacctcagacagagggag

SEQ ID NO: 508543 - DNA, 201 bp, Homo sapiens
tttttctacttttgtgaagaacattattggtatttttatagggattgcatgaaatctgtagattgctttggggagaatgggcattttaacaatattgagtyttccaacccatgaatatggaatgtctttccagttttttgtgtccttttcaatttcttgctccagtgttttagttttcattgtagggacttttcacttatt

SEQ ID NO: 508544 - DNA, 201 bp, Homo sapiens
actgagctctgctaaaaattcccatcaagaataaccacagtaagaaaaataatgcatgagagaaagggaagaaaatggcacaacaggggaatgctttagcytttcacctccagggagctgagtctcagctcctcaggggagaggggattagcctgagatggcagggatagagtcacctcattatttgcattgcacctgagc

SEQ ID NO: 508545 - DNA, 201 bp, Homo sapiens
gcaccattgactgaagagactgtcctttctccattgtatgttctcggcacctttgtctaaagtgagttcactgtaaatgtgtggatttatttctgcattcyttattagactgtttcactggtctaatgtgtctgtttttatgccagtatcatcctgttttggttactctaactgtagtataatttgaagtcaggtaataaa

SEQ ID NO: 508546 - DNA, 201 bp, Homo sapiens
aatcctaatacttaagattacatgataattatgaggatttaatgatataacatggtaaaatgagcaaggatgctagacatacagataatttatggtaacamaagcagaagttcacacgcaaaagcctaagcaattgattacccctgggtgagccagggaacactttataaaggaagttatcattgggtagaaccttgaagg

SEQ ID NO: 508547 - DNA, 201 bp, Homo sapiens
aggaacctgaacctctgaagtggcatagaaatgctttaggaagcaaggacaagctggtaatgaattgaacaacatgtggcagcaaaaaaaaaaaaaaaaaraaaagaaaagaaaaaagaaaaagagatgtctaagctaaaaagaaaaagtctccaaactctcagtaacagctaattgactttcttgggtgcacactgtgat

SEQ ID NO: 508548 - DNA, 201 bp, Homo sapiens
catgcttatagcagtgccaacatttgaagtggtgccttatacatttcatcacctacaatggaagtagttaactctggaagaggttacaaaacaacaaaaasggactgattcagttggagagaaaaaaaaagaaagaaaagaggtacaacaaacagaaaatgcaataacattttcaaactatttttatctctatttgccaga

SEQ ID NO: 508549 - DNA, 201 bp, Homo sapiens
ggaatatttgaggaccatgagaatttaaaggaaagacttaagacatcccccataacacttttcactaagccctatgttaatatattagcaacatggagacktacaacgagcatctttaccctctaaagccacgctatggtcattggacacattctagaccagagtttttcagcatcaacactattgacatttcgagccaca

SEQ ID NO: 508550 - DNA, 201 bp, Homo sapiens
cattgtggcctggggaaggcgggaaaggagcttttgggggatcattaagagagcacagcacaaaggtatacagcaaatataagcaaatgtatacttcaggmcctaaccatgccacgttataacagaaacacttttctccaggactcttgttggcatcaccccttaggatccagatatgctggagaagatacaaatcattct

SEQ ID NO: 508551 - DNA, 201 bp, Homo sapiens
ttttttctgcaacattgtggcctggggaaggcgggaaaggagcttttgggggatcattaagagagcacagcacaaaggtatacagcaaatataagcaaatrtatacttcaggccctaaccatgccacgttataacagaaacacttttctccaggactcttgttggcatcaccccttaggatccagatatgctggagaagat

SEQ ID NO: 508552 - DNA, 201 bp, Homo sapiens
gcagggataacacacaatgagagggtgtatctgtggggcactggggtgctctgctgtgaatggccggtgggaaatcttcccttcaagagcacttcacatastgagacctccagatgcactttcaagggagatgtgtggcttccacaccagtgccttctggggccaggacttcatctccaagctgcttggataccagctctc

SEQ ID NO: 508553 - DNA, 201 bp, Homo sapiens
ggtcctcttagcaagtgtataggtcaaatgatatatatttttggcctcattcctggctctgttttatgtctgtctttgccattgtttttctctctcctacrgaatacttgagattatcttgtattttatacagctccgcctgctgccttaagcctcttctgaaactaggcagttaagcatactggttcagagcctgcctct

SEQ ID NO: 508554 - DNA, 201 bp, Homo sapiens
tcataagagtggaggaccattttaagaagcccaaaaaactaacgaggaagtggtaaataaaataggtaggcttggaagcacctctcaaccaccagattaawaaaaaaaaaaaagagtggggataggggaagcagattaacaagcaagaacactcagctacaaagcaggatattcacacaggcctgtcaaactgtacaatgg

SEQ ID NO: 508555 - DNA, 201 bp, Homo sapiens
ctaactcactccaagtagagttagtactaggtccaagagtgtgaatgttttgaaggctgtgaactagtttatgtatcagttggagtggaaaagagctccasctttcccatgcctttatcaatgctgaatgctattacttttaaaactctttgccaatttgggccgggtgcggtggctcacgcctgtagtaacagcattttg

SEQ ID NO: 508556 - DNA, 201 bp, Homo sapiens
aatcaagaaagtagagatttagattcctttactattcaattatcacatcattagactttaagcaccggctagcacaaataggaagaaaaacaatttaactyaaagtatttttgtctattttaagaagggatcaatattttgatgtcaggttcaactttagttaatatggattaatacataataataccaagtttctctttg

SEQ ID NO: 508557 - DNA, 201 bp, Homo sapiens
cactctcaggtaccctacgatcccccaagcagtagggacctgggtgcctgagccacatccttgttgcttgttaccatgttttgatgttgggccataagccmtaagagaaaagctagaagactcaacccagtggaagtgattgtattcgtctgtgctcacactgctaataaagacatacctgagattgggtaatttatcaag

SEQ ID NO: 508558 - DNA, 201 bp, Homo sapiens
ataagtgggagctaaatgatgagaacacatggacatgtagaggggctcaacacactggggcctataggcaggcaaagcgtgggaggagggagaggatttgaaaaaaaaacaactaattgggtactaggcttaatacctgggtgattaaataatctgttccacaaacccccatgacacaactttacctatacacgtaccccc

SEQ ID NO: 508559 - DNA, 201 bp, Homo sapiens
aatgaatacactccctgtctgttttacataatagagtgtgcctctaatgggggagggagggaggcctgattagattcttgaaattcaccttcacaaatgctttttttttttttttttttaaaaagacagaatcttgctctgttacccaggctgcagtacgatggggtgacttcaggtcactgcaacctccacctcctgggt

SEQ ID NO: 508560 - DNA, 201 bp, Homo sapiens
ctgttttacataatagagtgtgcctctaatgggggagggagggaggcctgattagattcttgaaattcaccttcacaaatgcttttttttttttttttttwaaaaagacagaatcttgctctgttacccaggctgcagtacgatggggtgacttcaggtcactgcaacctccacctcctgggttcagccacttgagtagct

SEQ ID NO: 508561 - DNA, 201 bp, Homo sapiens
tcaggtcactgcaacctccacctcctgggttcagccacttgagtagctaggattacaggcatgtgccaccacgcccgactaatttttgttattattagtaragatggggttttgccatgttggccaacttgaggccagggctggtctcgaactcctggcctcaagtgatctgcctgccccagcctcttaaagtgctggcat

SEQ ID NO: 508562 - DNA, 201 bp, Homo sapiens
ggaccatggtcttaatcattaggtgagacttcctaacacactttgtggttacagatgaaagccctggacatgatcactttggctgcacgggaagcatcctyccagagtggtgctctgcgccacattcccctatgtgccaccaacagtaataaaatataataaaaacaatcaaataaacacagcacagacagaagcagacct

SEQ ID NO: 508563 - DNA, 201 bp, Homo sapiens
attaggtgagacttcctaacacactttgtggttacagatgaaagccctggacatgatcactttggctgcacgggaagcatcctcccagagtggtgctctgygccacattcccctatgtgccaccaacagtaataaaatataataaaaacaatcaaataaacacagcacagacagaagcagacctctgcccaggtaacttcc

SEQ ID NO: 508564 - DNA, 201 bp, Homo sapiens
ctgttttgactaaaaatacaaaaattagctgggcagaggttgcagtgagccgatatcacacgactgcactccagcctgggtgacagagcgagactgtctcaaaaaacaaacaaacaaacaaacaaacagaattgctgtatgggtatgcgaaatacactttctactgaatgtgtatcactttcataccatcatagtcaagaa

SEQ ID NO: 508565 - DNA, 201 bp, Homo sapiens
ttagtgaacatcctctaggtaaatatcaataattgacaaagacaagcagaatcctacctttacataggaaatgcaggcaaagaaaactagggtggaatttytccatgtcagcagtacattctgatagagttcagtcaactgttttacacaatgatgggtgttccctcagcaaatggtttatttttttcccccatgtgaaaa

SEQ ID NO: 508566 - DNA, 201 bp, Homo sapiens
cctgagaccgactgttgctgctggcctcaggaccaattttttctataaagcgcatggaagtcagagtgcacccaagagattgttaacccttaaaaaacagaaaaaaaaaaaagaaatcaacaagttagaggcaaataagtgtgaaagaaagtggatagtctatttggggattctgaaagtccctgaggaaagttgactttg

SEQ ID NO: 508567 - DNA, 201 bp, Homo sapiens
ctgagaccgactgttgctgctggcctcaggaccaattttttctataaagcgcatggaagtcagagtgcacccaagagattgttaacccttaaaaaacagaaaaaaaaaaaagaaatcaacaagttagaggcaaataagtgtgaaagaaagtggatagtctatttggggattctgaaagtccctgaggaaagttgactttgg

SEQ ID NO: 508568 - DNA, 201 bp, Homo sapiens
aaattcttgtcatttcctcttcatctctttaccctaacttaggacttcaagtttgctgcaacctttgctactgaatttagacatctgtttctcctgtgggttttttttttttttgagacagggtcttggctctgttgcccaggctggagtgcagtgctgcatcagggcttattgcagcctcaactcctgggctcaggtgat

SEQ ID NO: 508569 - DNA, 201 bp, Homo sapiens
catttagattttgctttgagagaggagtatttggactccaaggtctttcatttgtggcagccagattaaaatcggagaacaatttctgccaggcttctagkaactagtcagacaggtatgtgagggaagaaaccggagggcagccaaaggactggaaaagcgaagacacggggtatgaggaggtgaaagggtgtgttacca

SEQ ID NO: 508570 - DNA, 201 bp, Homo sapiens
cttgcacttagcatctaaagtgaaatatttttattttaaaaggctagaaaaaggctttacagccacaaggttttctgacagaaatgctctaagaaggggakgagggaaagatttccttccttcttggcaaatgggaaactcatttttgaaatctacccttacaatagataaacggatggtggaggtgggggcgtggaatta

SEQ ID NO: 508571 - DNA, 201 bp, Homo sapiens
gtgtttctttcctctttctttaactcttacatttggtgccaaaacccaggacgggtgttgtgggtagaggctctcttgcaacccaggaagcagtgggcagyggcagctcatcccactggatcctgagagtctctggccaaccaccccatcttgcctcttacttcacttttcaagtgatttacatgagcaggacaactaacc

SEQ ID NO: 508572 - DNA, 201 bp, Homo sapiens
gaagcaaaaaataaaaaaaagaaaagctataaagcaaattgttggaactaatgaggaaattagaatgcagacaatgtattagaaaatagaataccttgtayagttataaattctctgtgtgagatcagtttatttggctatgtaggataatgcccttgcacttagcatctaaagtgaaatatttttattttaaaaggctag

SEQ ID NO: 508573 - DNA, 201 bp, Homo sapiens
ttaaacagcaccttggatctttctctgaaaatccctctcattatcacagggaattcctgcacataacccaatcctttaatttaacttggtatattatttayataattctaacctcaaccctcacccctgatgaaaaagagcactcagcttaattaaaatcgatgtccaagctatgagtatattcaaaggcctttatgtttt

SEQ ID NO: 508574 - DNA, 201 bp, Homo sapiens
cccaatggctgtcattaacagtcaggcaacatgtccaatccacacggagaatattaagagacggagcaagtggcattatctcaaaacacctagtattaagraaaaaatgcaccaacaaataccttatgcggtgttccatcatcagatcactgtccttccatgtccttagaccacaatcaagcaaaaggcaagaattagctg

SEQ ID NO: 508575 - DNA, 201 bp, Homo sapiens
atcctaatacttaagattacatgataattatgaggatttaatgatataacatggtaaaatgagcaaggatgctagacatacagataatttatggtaacacragcagaagttcacacgcaaaagcctaagcaattgattacccctgggtgagccagggaacactttataaaggaagttatcattgggtagaaccttgaagga

SEQ ID NO: 508576 - DNA, 201 bp, Homo sapiens
acttgaactcaactctgcaccaagtggatctaatagacatctacagaactctccaccccaaatcaacagaatatatattcttctcagcaccacatcacatwtattataaaattgaccacataattggaagtaaagcactcctcagcaaatgtaaaagaacagaaatcacaacaaactgtctttcataccacagtgcaatca

SEQ ID NO: 508577 - DNA, 201 bp, Homo sapiens
tttataacctgactctgacacttgtcatccatgtgtctttgggcaaattattttatgtattatttttatctcttttttgatttttgattttttttggttgsagggtggggtggagtggccagagtcttgctctgttgcccaggctggagtacagtgatgtgatctctgctcgctgcaacctccacctcccaggttcaagcg

SEQ ID NO: 508578 - DNA, 201 bp, Homo sapiens
ataattatgaggatttaatgatataacatggtaaaatgagcaaggatgctagacatacagataatttatggtaacacaagcagaagttcacacgcaaaagsctaagcaattgattacccctgggtgagccagggaacactttataaaggaagttatcattgggtagaaccttgaaggaaaagtaaaggttaactaaatgga

SEQ ID NO: 508579 - DNA, 201 bp, Homo sapiens
aaagttaaaatatgttagcagtctataccacttctttaattacatggaaaaaattacattatgatgtctaattaataaatagttatttataattactgccaaagtcaaaaaccagtttgatacttacatcttaaataccatgcctttttatacccttttctttataaataacttgtaatttaaccttcaaattatactgca

SEQ ID NO: 508580 - DNA, 201 bp, Homo sapiens
ggaacggtgcggtttagtgtggttggagcaaagtaacttgagaaagattccgcaggaaattctacttttaaagtagaaattcctttgtttaacaaagcaayctggggaaccatcaaagacttttaagcaaaacagccacacgatcagacctacgttttgccaagtgactctgttgagagttgcgagggtggactttagcaa

SEQ ID NO: 508581 - DNA, 201 bp, Homo sapiens
gtaagtcccatcttaaaacaaacaaaccttaacctttatattcatatttccacttctacggtcatgaacatctattcttaaatcacattcctcctcaatcytcccaaagaacactgaacctggtctcgtcaaagtcatcaacaacttgcacgttgtcattggatcggtggccacctctgtatcttcctctttctgggcttc

SEQ ID NO: 508582 - DNA, 201 bp, Homo sapiens
cacttgagcctaggagttcaaggctgcactgagctatgatctaaccactgtactccagcctgggcaacagagcaagaccctgtctctgaaaaaaaaaaatacacacacacacacacacacacacacacacacacgttagtgggatagcacaaatgagaaaaactctgctctttgatcactgagtacatctctgtagatata

SEQ ID NO: 508583 - DNA, 201 bp, Homo sapiens
acttgagcctaggagttcaaggctgcactgagctatgatctaaccactgtactccagcctgggcaacagagcaagaccctgtctctgaaaaaaaaaaatacacacacacacacacacacacacacacacacacgttagtgggatagcacaaatgagaaaaactctgctctttgatcactgagtacatctctgtagatatat

SEQ ID NO: 508584 - DNA, 201 bp, Homo sapiens
ctatgatctaaccactgtactccagcctgggcaacagagcaagaccctgtctctgaaaaaaaaaaatacacacacacacacacacacacacacacacacaygttagtgggatagcacaaatgagaaaaactctgctctttgatcactgagtacatctctgtagatatatatttccttcactgcagattttgcccaagatac

SEQ ID NO: 508585 - DNA, 201 bp, Homo sapiens
tgaaaagcacaatctcagtctctcatttctcacagcatctatcaaaggctatcagtccactcactctcaggtaccctacgatcccccaagcagtagggacstgggtgcctgagccacatccttgttgcttgttaccatgttttgatgttgggccataagccctaagagaaaagctagaagactcaacccagtggaagtgat

SEQ ID NO: 508586 - DNA, 201 bp, Homo sapiens
atagctcagtcagaaggaaatgtttaatatttataaatttatggttacattctatttaaaagaggagttaaagttaaatttacctacccacatatgttacatatatatgtatttatgtatatgtattcatatatgtatatatgtgaacataagtatacatacgtatatgtatagatgcttgacaataaagaagtaagaata

SEQ ID NO: 508587 - DNA, 201 bp, Homo sapiens
gcagtcctgccacgccctggaacactggcagagggaaaagggcatgggacaccaggcatgtgttactaagtctcccacctgatcgtgacgtgtgtcgcctstgttcacatttcataggcccaaacaagtcaagtaaccatgtctgctttcaacaggcgggaatgtagaatttctctattgagaggcatccccaggaggagc

SEQ ID NO: 508588 - DNA, 201 bp, Homo sapiens
tagctcagtcagaaggaaatgtttaatatttataaatttatggttacattctatttaaaagaggagttaaagttaaatttacctacccacatatgttacatatatatgtatttatgtatatgtattcatatatgtatatatgtgaacataagtatacatacgtatatgtatagatgcttgacaataaagaagtaagaataa

SEQ ID NO: 508589 - DNA, 201 bp, Homo sapiens
agtacagtgtttgtacgatagtggttcatttaaaaattaagctatggaatttttaaaatattggaccataaaaatctgttctaatttgtagattttgtagygttatggaagaaactcctctcttctggacaggtcaagaaaggtttccccaggaggtctcttctgaatagaatctttgtttttttttgagacagggtctcc

SEQ ID NO: 508590 - DNA, 201 bp, Homo sapiens
atgagaagttgtcaggttaaatttgttacgatacatttgacttatgaaataaatgaacacagagctaaaataaaaactaaaattctttttcttattcaatraaactttagtgtacactatactacttacaggtgtattttttccttctatattttagctgaaataggagggttgggacattgcagtacataaatgttatag

SEQ ID NO: 508591 - DNA, 201 bp, Homo sapiens
aaatattaaatcttatatttgaaggtcaggtcacaaactccctggagtctgaaaaatgacaggattggctagatcagggcttctcgtcctcggcagtagtsacatgctggtgtgggggctgtcctgtacactgtcgggttcttggcagctttcctgacctccatccctagaagccagtagcacccacctcagttgtgacca

SEQ ID NO: 508592 - DNA, 201 bp, Homo sapiens
agtcagaaggaaatgtttaatatttataaatttatggttacattctatttaaaagaggagttaaagttaaatttacctacccacatatgttacatatatatgtatttatgtatatgtattcatatatgtatatatgtgaacataagtatacatacgtatatgtatagatgcttgacaataaagaagtaagaataattcaca

SEQ ID NO: 508593 - DNA, 201 bp, Homo sapiens
ctcaaggcatctgagttcctcctcatcaaggtagggtgactttaaatgtctacaaaggtgggatgtggattgtcctcagattctgtgtttgtttatagggktgtgtgaaaaatttcccctatcattcagccttcatgatggaagatctttttctcctttcttcttcctttaagtctctatttcctttcactttcccctgca

SEQ ID NO: 508594 - DNA, 201 bp, Homo sapiens
cctgtagtctcagctatccaggaggctgaggtaggaggaccacctaagcctggcaagatggaggctacagtgagccaagataacatcaccacactccagcmtgagagcaacatcctgtctcaaaaaaaaaaggtgggggggcttacaaaatagaaaagatgaattctacatatttgttgaaaagcacaatctcagtctctc

SEQ ID NO: 508595 - DNA, 201 bp, Homo sapiens
ctgaggattttcagaggctttcacttgaatgttcttaatataatagccctccctcgcttcatcaatcaaagaacagttgctaaatataccttttcccaccrttcattctgagactagagaagtaaccactgaatggctccatcacgccattggacacactgggaaactgactctggtcaaggttccatctatcacctgggt

SEQ ID NO: 508596 - DNA, 201 bp, Homo sapiens
atggcaaaaccccatctccacaaaaaatacaaaattagccaggtgtgatggaacatgcctgtagtctcagctatccaggaggctgaggtaggaggaccacmtaagcctggcaagatggaggctacagtgagccaagataacatcaccacactccagcctgagagcaacatcctgtctcaaaaaaaaaaggtgggggggctt

SEQ ID NO: 508597 - DNA, 201 bp, Homo sapiens
gttgagattacatattacatacagttttgtatcctgctttatttaatactatagtttgagaacattttcatattaccaaaagacatcctaaacatcatgtktaacacctatataattgatcatttcatattacaatatttttcacctttcctgtctctagtataatggtctttaatgcataaaagactgacaaaataggct

SEQ ID NO: 508598 - DNA, 201 bp, Homo sapiens
ctggccaaggcttgttaactcttaaacttataaaatatgttttagaaaatgttttaatgacatcattaacatatctatagtaaaagttattttggtttgcaaaaaaaaatgcctattcatttaagttgtaaatgaggtcattagttctttttcttttcttgattgctccctataatctgtttcccgttcttcctttttttt

SEQ ID NO: 508599 - DNA, 201 bp, Homo sapiens
cctttgccaaattttggtcacataaaattatgccagcccaagaactctacaatccgtacagtggcattgtgtaaaaaagacttcacctgctgaggacatakaatctagatccatgagccttctaatacgctaactacaattctataacctttaaagagttgagtacaatgcagagaaatgactaaataatattgttgtaga

SEQ ID NO: 508600 - DNA, 201 bp, Homo sapiens
tgggcagcaggcagcagggagcaaagcaggagagcctgggcgagcgcacgaagggtgaggctcccatcccggggtctcctccgcccctgtgcctggtcacrgtatgaggtattacccacagaaaacgggggccagaacctgacctctagcctgccccaccctgggcacagcttctcaccacaggaaaactccaccacgcgc

SEQ ID NO: 508601 - DNA, 201 bp, Homo sapiens
aacctccgcctccctgctttaagcgattgtcctgcctcagcctcccaagtagcagggattacaggaccgcaccactacacctggccaattttgtatttttwgtagagatggggtttcaccatgttgtccaggctggtctagaattcctgacctcaagtgatctgcttgcctcagcctcccaaagttctgggattacaggca

SEQ ID NO: 508602 - DNA, 201 bp, Homo sapiens
caaattttggtcacataaaattatgccagcccaagaactctacaatccgtacagtggcattgtgtaaaaaagacttcacctgctgaggacatagaatctakatccatgagccttctaatacgctaactacaattctataacctttaaagagttgagtacaatgcagagaaatgactaaataatattgttgtagaaggtgag

SEQ ID NO: 508603 - DNA, 201 bp, Homo sapiens
gaaataactcctgagggcaggaactcttctctgtttttttgaccataaacctctttggtagtttggtagagcccatggacaccttcttagaatcttttttyttttttttttttttttttttaagacggattcttgctctgtcgcccaggctggaatgcagtggcacgatctcagcgacaacccctgccttccaggttcaag

SEQ ID NO: 508604 - DNA, 201 bp, Homo sapiens
ccataaacctctttggtagtttggtagagcccatggacaccttcttagaatcttttttcttttttttttttttttttttaagacggattcttgctctgtcrcccaggctggaatgcagtggcacgatctcagcgacaacccctgccttccaggttcaagagattctcatgcctcagcctccctgagtagttgggattatag

SEQ ID NO: 508605 - DNA, 201 bp, Homo sapiens
gcccagattgttcttgaacttctgggcttaagtgatccacccacctcagcctctaaaagtgccatgattacaggtgtgagctactgtgcctacttaagcctttttttttttttttgagactgagtctgactctgttgcccaggctggagtgcactggcacagtctcagctcactgcagcctccacctcccgggttcaagcc

SEQ ID NO: 508606 - DNA, 201 bp, Homo sapiens
cccagattgttcttgaacttctgggcttaagtgatccacccacctcagcctctaaaagtgccatgattacaggtgtgagctactgtgcctacttaagcctttttttttttttttgagactgagtctgactctgttgcccaggctggagtgcactggcacagtctcagctcactgcagcctccacctcccgggttcaagcca

SEQ ID NO: 508607 - DNA, 201 bp, Homo sapiens
tctaaaagtgccatgattacaggtgtgagctactgtgcctacttaagcctttttttttttttttgagactgagtctgactctgttgcccaggctggagtgmactggcacagtctcagctcactgcagcctccacctcccgggttcaagccattctcctgcctcagcctcctgagtagctgggactacaggtccgggcaacc

SEQ ID NO: 508608 - DNA, 201 bp, Homo sapiens
gcaggagaatcgcttgaacccaggaaccagaggttgcagtgagcctaggtcgcaccactgcactccagcctgggcgacacagcgagactgtctaaaaaataaaataaataaataaataaaaataagtaaataaaaatgcccatgtagccatcacctgagatttttttctcctcccttaggtctcacctatttgcgtcttgt

SEQ ID NO: 508609 - DNA, 201 bp, Homo sapiens
caggagaatcgcttgaacccaggaaccagaggttgcagtgagcctaggtcgcaccactgcactccagcctgggcgacacagcgagactgtctaaaaaataaaataaataaataaataaaaataagtaaataaaaatgcccatgtagccatcacctgagatttttttctcctcccttaggtctcacctatttgcgtcttgtt

SEQ ID NO: 508610 - DNA, 201 bp, Homo sapiens
aggagaatcgcttgaacccaggaaccagaggttgcagtgagcctaggtcgcaccactgcactccagcctgggcgacacagcgagactgtctaaaaaataaaataaataaataaataaaaataagtaaataaaaatgcccatgtagccatcacctgagatttttttctcctcccttaggtctcacctatttgcgtcttgttg

SEQ ID NO: 508611 - DNA, 201 bp, Homo sapiens
ttatcaaaccatcatctacattaggtatttctcctaaagctatccctcccctagcccccaccctgttggtaattatttttaatcaaattggctataatttwaaaaaaatttttttttggagacagagtcttactctgtcacccaggctggagtgcagtggcgcaattatggctccactgcagccttgatttcccaaactca

SEQ ID NO: 508612 - DNA, 201 bp, Homo sapiens
aaagctttcaagacgcaccccaaggcgccctcctccgtcgtccccctctctccctgcctctcccaagtctggcctgggccacctaacactctcaccagatraccttactatcctcacaggacagtccgctaaatattgctcgccctcacccagcgtatcacaagagcgctatccactcagaaaaaaaatatctccacaata

SEQ ID NO: 508613 - DNA, 201 bp, Homo sapiens
tggaatcatgggaaaaaatttaaattagatttctacctcacaccaaacacaaaaatcaattccagggagaattaaagatttaaatataaaagtcaaaccakaagatattcagaagacaatataggtgcatgtttttatgacttcatggaaaggatttcttaagaatagaaaaatacaacctagaaacacaaaagagtgata

SEQ ID NO: 508614 - DNA, 201 bp, Homo sapiens
gtcagaaggaaatgtttaatatttataaatttatggttacattctatttaaaagaggagttaaagttaaatttacctacccacatatgttacatatatatgtatttatgtatatgtattcatatatgtatatatgtgaacataagtatacatacgtatatgtatagatgcttgacaataaagaagtaagaataattcacaa

SEQ ID NO: 508615 - DNA, 201 bp, Homo sapiens
aaggagcaatgcatgactctccagccatgggagacaaatatttacaggcaaactaaaagtcagcttaataatcacatagaaaccctattagccagaaaggaaaaaaaaaaaaagaaaatgtgacttcttaaaattaagatggaaaaaatattaataaagcaaactagaccaaggctcaacatgagccacccgtggtggact

SEQ ID NO: 508616 - DNA, 201 bp, Homo sapiens
aaaatgctgtctactttcctatagtgctatttcctataagtaaacttcattttgttcagcaagtaacctttttttccccccaggatcttaattaattaaaygggtttttgatttacatgtctagaaaactgtttgagaccttagtattaaatgcattttttaaaaatttagagacttaaggccgggcgcagtggctcacgc

SEQ ID NO: 508617 - DNA, 201 bp, Homo sapiens
gccaggcatggtggccagcgcctgtagtcccagctacttgggaagctgaggcaggagaatggcatgaacccaggaggtggaggttgcagtgagccaagatygcaccactgcactccagcctgggcgacagagcgagactccatctcaaaaataaaataaaataaaataaaataaaataaacaagtgaaactcgatatagag

SEQ ID NO: 508618 - DNA, 201 bp, Homo sapiens
ataaaactgttgggaatactacaatgattccttaaatatttacctatctttttgattttagcatttcttactaaaatcatttctctaattctcttcctttyggataaaagcaaatttgcaagttgttaagtacagactagtaaaaatgcttttttgcatatggagaattactgttaaagttctcacttaatagttcctata

SEQ ID NO: 508619 - DNA, 201 bp, Homo sapiens
aaaatgactggataagtaggataagatcaattaaaattatatttatctaggaattaattgctttgagctctcttgtgggctttcattggtaaggaattttatatatatatatatataactactcacttctgcagttaaaaaaataaacaaaatacaatatattgaatcaaataaaagaatttttaaaaggacaaaatgtga

SEQ ID NO: 508620 - DNA, 201 bp, Homo sapiens
ggctaaatgaaatatcagatttccgtttttataagaattatggctgggcctggtggctcacgcctgtaatcccaacactgggaggccaaggcaggcagatmacttgagatcaggagtttgagaccagtctggccaatataatgaaaccccgtatctactaaaaatacaaaaattagtcagacgtggtggcgggcgcctgtc

SEQ ID NO: 508621 - DNA, 201 bp, Homo sapiens
cttgattttggacctctgacttccagaactgtaagataatacattttctgtttttttaacccacccagtttgtggtgctttgttatggcagctctagaaarctaatatagagtccctatgaacgttttggaaaattgtggagcgatcaacaaaaggggctgggcacagtggctcacgcctataatcccagcattttgggag

SEQ ID NO: 508622 - DNA, 201 bp, Homo sapiens
gaaatatcagatttccgtttttataagaattatggctgggcctggtggctcacgcctgtaatcccaacactgggaggccaaggcaggcagataacttgagrtcaggagtttgagaccagtctggccaatataatgaaaccccgtatctactaaaaatacaaaaattagtcagacgtggtggcgggcgcctgtcatcccagc

SEQ ID NO: 508623 - DNA, 201 bp, Homo sapiens
ttaattgcctcacagttctgcagactgtacaagaagtgtcagagatgataaattcctcttcaaaaagctttagttccctgttctttgtttcttaaaaccarcttccttgtacttccttgtctcctagctacctgttctgtaaacaaccttcctgcctttgccatgcccagacaagtccagatatgccttcccgcctagtaa

SEQ ID NO: 508624 - DNA, 201 bp, Homo sapiens
gtagtcccagctactcgggaggctgaggcaggagaatggcgtgaacccgggaagcggagcttgcagtgagccgagattgcgccactgcagtccgcggtccrgcctgggcgacagagcgagactccgtctcaaaaaaaaaaaaaaaaaaaaaaaaaaaagtcacaaataagtttgcctttttgtctttcgtatttgtacagg

SEQ ID NO: 508625 - DNA, 201 bp, Homo sapiens
atatataaattttttttgagacagtcttgctgtcgcccaggctggagtgcagtggcacgatctcagctcactgcagctccatatatatgttaaacattgtkgagattacatattacatacagttttgtatcctgctttatttaatactatagtttgagaacattttcatattaccaaaagacatcctaaacatcatgttta

SEQ ID NO: 508626 - DNA, 201 bp, Homo sapiens
ggtattcattctttttaaatgataagtagaacctagcagtgaagccaacagttattaggcttttctttaatggaaaactttttattactgattcaatctcyttactcattatttgtcagttcagattttctatttcttcatgattcagtcttggtagtatgtatatgtctaggaatgcattcatttcttctagatcatcca

SEQ ID NO: 508627 - DNA, 201 bp, Homo sapiens
cttgctccatatatataaattttttttgagacagtcttgctgtcgcccaggctggagtgcagtggcacgatctcagctcactgcagctccatatatatgtkaaacattgttgagattacatattacatacagttttgtatcctgctttatttaatactatagtttgagaacattttcatattaccaaaagacatcctaaac

SEQ ID NO: 508628 - DNA, 201 bp, Homo sapiens
ggcaacagagcaagactccatctcaaaaacagaaaaaaagaatgaggagaaactttattgtactaaaatggaaatgtagtcacaatatattattaaatgtraaaagcaagtcatagattagtatgcatattaggatcccaggtatgttagaaatacagggaacacacacatacacagatacatgcacacttccatgtcaga

SEQ ID NO: 508629 - DNA, 201 bp, Homo sapiens
ctacagtgtcacagctaagcctgttcttatatgaactttaaatacaatttaaaagcataactttgaaacacagtttggtgaaagtgtatcttgggggccasgcgcagtggctcatgcctgtaatcccagcactttgggaggctgaggccaagtcaggaggatcacttgagcccaggagttcaagaccagcctgggcaacac

SEQ ID NO: 508630 - DNA, 201 bp, Homo sapiens
tcaaaatccaacaacctctcctcgcaaatctctccattcttaggtcccctttaataggcttttctcaaaactacacattttgtgcttcccctattcaccttttttttttttttttttttaagacagagtcttgctctgtcacctaggctggaatgcagtggtgcaatctcggctcactgcaacctccatctcccaggttca

SEQ ID NO: 508631 - DNA, 201 bp, Homo sapiens
gagagccagctctagaagtatacctgactttccgacatatgctttcaaatgtctctcatcttgcttcatagtccacagattttttttttttaaagacatgktctcactctgtcacccatgctacagtgcagtggcatgatcacggcttactgcagtcttgacctcccaggctcaagtgattctcccacctcagcctcctaa

SEQ ID NO: 508632 - DNA, 201 bp, Homo sapiens
acagtgagactctgtctcaaaaaaaggaagtgtatctttggaagctaaagccacatgggtagaactttttaacaaaagctgtccagcgacctaggttatcraaggataatatatcattttcctacagaaataatttttcaaagtgtggttagcagagaaaacttttcttcaaagagaaccttctagaaaagtctagtatat

SEQ ID NO: 508633 - DNA, 201 bp, Homo sapiens
cttaagtgatcctcccacctcagcctcctgagtagctgggcctacagatgcacaccatcacgcccagctaatttttaaattttttatagaggtggggtctygccatgttgcctaagctggtctcgaatgcctgggctcaagcaatcctcctgctttggcctcccaaagtgctgggattataagcgtgagccactacacccg

SEQ ID NO: 508634 - DNA, 201 bp, Homo sapiens
tccaactttcaatcatagtaacaagcacttatatagggcctactatgagccaggctttgtttagggatgagatacacaagtatacacacacacacacacayacacacacacacgccatctccttttaaccttcatgttacctgttgaggacattattcctttttcaaagatgaggaaaataatcacaaggaagttaagaaa

SEQ ID NO: 508635 - DNA, 201 bp, Homo sapiens
aacacggagaaaagtaatctcagttccagagaaggcataggctatctccccttacaagaacaatcctcccacaccgcacccctcacctgtctcattcctgyttattcttcatcttgcaacttgagtgtcacttctgggaattcttaattcagcccaaagattaggttaggttcccacaacctgactgtgctttgtcacatt

SEQ ID NO: 508636 - DNA, 201 bp, Homo sapiens
gtgctgttgaaaggggtttctgaatccagactgtaatgtgcccctttgaccctcacaactaaggaaaagatagggagggacaggttatatttggctttctmtaagtaccctacttgcctccataacaaataccataaagtttcatttacctgcaggaaataatcccaatccatttactttcctccatgcagtggaaatttt

SEQ ID NO: 508637 - DNA, 201 bp, Homo sapiens
agtgtcacttctgggaattcttaattcagcccaaagattaggttaggttcccacaacctgactgtgctttgtcacattcatccccctaatgaagggcaggyagtgttgctctccctcactaagctgcaagcctgggaagggcagggagtgtggttgtcacattcatcctgttcactactcagtgggtgcccaacagattcg

SEQ ID NO: 508638 - DNA, 201 bp, Homo sapiens
cctaattgtattgtttgtaacacaaaggataaatgcttgaggtcatagatatcccatttacccggatgtgattattacacatcacacgcctgtatcaaaayatctcatgtatcccatatacctactctgcactcacaaaatgaaatttttaaaaactttttatttccataggttattggggcacaggtggtatttggttac

SEQ ID NO: 508639 - DNA, 201 bp, Homo sapiens
gctgttgaaaggggtttctgaatccagactgtaatgtgcccctttgaccctcacaactaaggaaaagatagggagggacaggttatatttggctttctctragtaccctacttgcctccataacaaataccataaagtttcatttacctgcaggaaataatcccaatccatttactttcctccatgcagtggaaattttgc

SEQ ID NO: 508640 - DNA, 201 bp, Homo sapiens
tatttccataggttattggggcacaggtggtatttggttacatgagtaagttctttagtggtgatttgtgagattttggtgcacccatcacccgagcagtrtacactgaacccaatttgtagttttttattcctctctcccttcccaccctttccgcccaagtccccaaagtcctttgtatcatacttatgcctttaattt

SEQ ID NO: 508641 - DNA, 201 bp, Homo sapiens
actttgttcctctaatattcaccaccttcatctccactcaagttctctgccttgtccccatgggctctaagggagaagagagggagcagaaacacgacctyggaggtgggcaggaacggttcatggagcacaaactgtttatgaccccctctcaccagcgaggcataaagcaacacggtggtctctgccctgggcaggggc

SEQ ID NO: 508642 - DNA, 201 bp, Homo sapiens
actgattagggtccaacaacgatcacagggcaaagggcaaaagtagaaccactgataagagcctatgttcagcggtgcacatattgtcttgataaacatcttttttttttttttctagttgtcaaatgattctttattgaaatattttcctttgtgcttaactggctgggcattccacagcaccactgttgatgtcatcta

SEQ ID NO: 508643 - DNA, 201 bp, Homo sapiens
gctccaaaacttttttaagccctcaccttgctaaatcatgatccgtacccaaacttaatcagagcccttcactgaaagacccaccttaatccaacctagarcctcataaatatcctccctttgccctcccctcccagatgctgctcaagtttccgcaaggcggtgtgctcccttgctaagacatgaataaactccagcttt

SEQ ID NO: 508644 - DNA, 201 bp, Homo sapiens
gagaatcgcttgaacccaggaaccagaggttgcagtgagcctaggtcgcaccactgcactccagcctgggcgacacagcgagactgtctaaaaaataaaataaataaataaataaaaataagtaaataaaaatgcccatgtagccatcacctgagatttttttctcctcccttaggtctcacctatttgcgtcttgttgtg

SEQ ID NO: 508645 - DNA, 201 bp, Homo sapiens
taggacctttgaatttttacgtgggcgtgtattgtctattcgaaaataaatgctaaaacaaaacaaaaagtttaaaagcaggacaccattgtgtaatctcmtttctgaccagaaggtggcgcctccacctttcctggggctggggaaggggaaagctgtagagaggggagaaaggtcccagtgaaacaacaggggcctaca

SEQ ID NO: 508646 - DNA, 201 bp, Homo sapiens
aatttctgtctcttggtgcttccttgagggctttgatgatcagggcagaggcagaagccaccacctcaatctgggtctgtctgttctgaatggtcaggttsactgtaatcctcaggcccttctagtcacctgtttccttggcaatgtcatcaccaaccttttttggagacagaccagggggccgatcttgggggccagtgc

SEQ ID NO: 508647 - DNA, 201 bp, Homo sapiens
tcattttctggcaatgcttctttgacatagcatacaaattttgcaacatgaagcaatatacatttcttgacttcaaaaaaatatggtttccccataatgtrtatgaaaacatatcaaaggtgggttacattattaaattctgtaacttgtatattaataacttatgaagtctatgaattattatgtaccaatgatgcaaga

SEQ ID NO: 508648 - DNA, 201 bp, Homo sapiens
aatgaattctggtattttaagcccatttcataagaccaataatgttgaccaatctactcatattcacacagtacttctacatataccatggtctatatgarcggttgaagaaatagaaaataaaatgcaaatcacaagatgtccattaaaacagtctacctttttcctttgacagccattaattcttcttaaaatgtattg

SEQ ID NO: 508649 - DNA, 201 bp, Homo sapiens
acctttgaatttttacgtgggcgtgtattgtctattcgaaaataaatgctaaaacaaaacaaaaagtttaaaagcaggacaccattgtgtaatctcctttmtgaccagaaggtggcgcctccacctttcctggggctggggaaggggaaagctgtagagaggggagaaaggtcccagtgaaacaacaggggcctacattga

SEQ ID NO: 508650 - DNA, 201 bp, Homo sapiens
tgtctcctggactgtctcacccagctttgccttagtgtacctggtttgtgtttttctttcatcatgattctgagtatttcagcctcacattcaccgtgcaktgctcatcctgctgtgctgtctgcacatgtcattcaactcatgcctatctctgaagcctctggtcaatctgtgtatctgtcttttgagtgttttcagctt

SEQ ID NO: 508651 - DNA, 201 bp, Homo sapiens
tgaattctggtattttaagcccatttcataagaccaataatgttgaccaatctactcatattcacacagtacttctacatataccatggtctatatgagcrgttgaagaaatagaaaataaaatgcaaatcacaagatgtccattaaaacagtctacctttttcctttgacagccattaattcttcttaaaatgtattgag

SEQ ID NO: 508652 - DNA, 201 bp, Homo sapiens
tacaacccctcctttttctgcatggcagttgaaaaatgaaggtacagccaggtgcggtggctcacacctgtaatcccaacactttgggaggctgaagctgrcggatcacctgaggttgggagtttgagaccagcctgaccaacatggagaaaccccgtctctactaaaaaggcaaaattagccgggcatggtggtgcatgc

SEQ ID NO: 508653 - DNA, 201 bp, Homo sapiens
ggcttgagaccaagtcctttactttttcggtctttcagcggccattttctagtagactgttggtaattgaaggcaactggctggggccagtctctggtgtwacctgaaggccaaggagtgaatggggatggctgccttgcctggaacggggaaggactcttttctatcttttctggttatagtccctgatccctatgtgtg

SEQ ID NO: 508654 - DNA, 201 bp, Homo sapiens
gaacggggaaggactcttttctatcttttctggttatagtccctgatccctatgtgtgacgtaattggcagtggaagctcacccggggctaactcatacakgtttcaggtgacttaaaccttctttccttatgctgaattctttccttccctactcgactggctaaggacaagtcagagggcttgggcatgttgtagatgg

SEQ ID NO: 508655 - DNA, 201 bp, Homo sapiens
gctgcatcctctgggattgaaatcaatttgaccctgacaatctaaagagaaaacgtatgatttttgtttctccaatactgtttgtccccattataagctgyccagcctggaacaatgggtggtcaatagtagccttaattatgacaccatcctgcaattagacctattttttaaaaggcagggcaaatggtcagaaatccc

SEQ ID NO: 508656 - DNA, 201 bp, Homo sapiens
gtttctccaatactgtttgtccccattataagctgtccagcctggaacaatgggtggtcaatagtagccttaattatgacaccatcctgcaattagacctrttttttaaaaggcagggcaaatggtcagaaatcccatatgtataggccttcatggccctataccaaaacctaataattcccccacagggaagtccaaagg

SEQ ID NO: 508657 - DNA, 201 bp, Homo sapiens
cctttgatctctcatggagggacgctcaattcattctagcaatctgttacacctcctttgaaaaggaacacatccttgaggctgcccgccaggaagcagayaatttatttgcccgaaaccctcagggcaatcacccaggaccagacacagtccctactactgatcctaactgggactataacacacccatgggaatgaaca

SEQ ID NO: 508658 - DNA, 201 bp, Homo sapiens
ttttcctttgacagccattaattcttcttaaaatgtattgagaaatattttataatagatatacaaaagggcataagctataactagaaaacactgtacarctctctcatagattaagaaatagaaaattaccgacgtgggaaaaataaatcccttgtgtatcactaccacctccagaggcaatcattatcctgaatttgt

SEQ ID NO: 508659 - DNA, 201 bp, Homo sapiens
ctctctcatagattaagaaatagaaaattaccgacgtgggaaaaataaatcccttgtgtatcactaccacctccagaggcaatcattatcctgaatttgtygttacaattccatggatttccttatatttttgctgcatatgtatccctaactaatatttagaatcttcacatgtgtttcatcttgagagaaacaagattt

SEQ ID NO: 508660 - DNA, 201 bp, Homo sapiens
aaacaagagaaacatttttgaatatttcagcagcttagttttttgtttgtctgctttttattttctaagttcaacactatgttgatgaagacccctatacmagtatgtgcagagtcagctcattaattttcactgctgcataatatattacagtctataaattagtcataatttacacatcgagtttctcctcatggattt

SEQ ID NO: 508661 - DNA, 201 bp, Homo sapiens
caaaatccaacaacctctcctcgcaaatctctccattcttaggtcccctttaataggcttttctcaaaactacacattttgtgcttcccctattcaccttttttttttttttttttttaagacagagtcttgctctgtcacctaggctggaatgcagtggtgcaatctcggctcactgcaacctccatctcccaggttcaa

SEQ ID NO: 508662 - DNA, 201 bp, Homo sapiens
ttagatgtgcatctgcaattcagatagcctaggtgcaccctctggctgactcttctcattctctttccttcccagcatactctcacccgtccccgtttccyggtctcacatagtaggagaagctgatctcttggtcagggcttgcatcggccgggtcgatgtaataatccaccagcacttcctggggctggccacatttca

SEQ ID NO: 508663 - DNA, 201 bp, Homo sapiens
tatgtcatttgtaacaagatggatgaatctggacagcattatgttataagccagacacaaaatgacaaatactgcatgatctcaactatatgtggaatctrtaaaagttaaactcatagaagttgagagtagaatagtagttaccaggcactgggagttgggggtgcagttttggggaaatgtttggtcaaaggatacaaa

SEQ ID NO: 508664 - DNA, 201 bp, Homo sapiens
aaaatccaacaacctctcctcgcaaatctctccattcttaggtcccctttaataggcttttctcaaaactacacattttgtgcttcccctattcaccttttttttttttttttttttaagacagagtcttgctctgtcacctaggctggaatgcagtggtgcaatctcggctcactgcaacctccatctcccaggttcaag

SEQ ID NO: 508665 - DNA, 201 bp, Homo sapiens
gcattttggtagtaacgtggcacttgttccggattatatactaagtcttccatttgaaactttccctgagaataaaagagagagagagaattttagcatgygctccaaccatggaaaccccacggacttgttacggttttcaaatagagctctttctctcaaatcttcactgcctgagaatggcatgtgggtatttcatta

SEQ ID NO: 508666 - DNA, 201 bp, Homo sapiens
ataaagtaatctgtacaccaaacccccatgacacgagtttacctatataacaaacctgcatgtgtacgcctgaacctaaaagttaagtatatatatatatwtttttttcatttaatttggtgtatatatatgccaaaaaataaattaagcagtccaaatttcggatgcaaactctcggggacaagacgctaggtgtttcta

SEQ ID NO: 508667 - DNA, 201 bp, Homo sapiens
gcctgagaatggcatgtgggtatttcattagcggtccagccaaggatggataaagaatccataaacgtagctgtgtacagcaatattttggtatgtaggasagcgacagaagggctgaattatagttactaaatgagaggaaattgtgggtgatgtatcttcacagatattcctgggatagatgaacgtgacttagattat

SEQ ID NO: 508668 - DNA, 201 bp, Homo sapiens
ctaaaagttaagtatatatatatatatttttttcatttaatttggtgtatatatatgccaaaaaataaattaagcagtccaaatttcggatgcaaactctrggggacaagacgctaggtgtttctaagtgttttgttgaaagccagtgtttaagtaaacattataaattattgttgtttttgtaaataatgtagactgaaa

SEQ ID NO: 508669 - DNA, 201 bp, Homo sapiens
taaaagttaagtatatatatatatatttttttcatttaatttggtgtatatatatgccaaaaaataaattaagcagtccaaatttcggatgcaaactctcrgggacaagacgctaggtgtttctaagtgttttgttgaaagccagtgtttaagtaaacattataaattattgttgtttttgtaaataatgtagactgaaat

SEQ ID NO: 508670 - DNA, 201 bp, Homo sapiens
taaataaaataactggcatagattagaggtcacaaacagcctgtgcatcacttgtagagctttcttaaaatgcagatcctcagccgggcgtggtggctcaygcctgtaatctcagcactttgggaggccaaggcgggcagattaccttaggtcgggagttcaagaccagcctgaccaacatggagaaaccccgtctgtact

SEQ ID NO: 508671 - DNA, 201 bp, Homo sapiens
ttcttaaaatgcagatcctcagccgggcgtggtggctcacgcctgtaatctcagcactttgggaggccaaggcgggcagattaccttaggtcgggagttcragaccagcctgaccaacatggagaaaccccgtctgtactaaaaatacaaaattagtcggacgtggtggtgcatgcctgtaatcccagctactcgggaggc

SEQ ID NO: 508672 - DNA, 201 bp, Homo sapiens
tagatatgtgtggtaggagagtttgttcatgcataagttgatgggaattatagtttacaaattttatgaaacttaagcctgggaagatcaaccttttagahcctctttgagtctacgcaagtattcctgcaagacagagaagtcaaactataccaaatctctggatattaaaaaatgaacacagttagtcatccaataaaa

SEQ ID NO: 508673 - DNA, 201 bp, Homo sapiens
agggctggggccgggtgcgatggctcacgcctgtaatcccagcactttgggaggccaaggtgggcagatcatgaggtcaggagatcgagaccatcctggctaacacaatgaagccccgtctctacaaacaaacaaacaaacaaacaaaatacaaaaaattagccggatgtggtggcaggcacctgtagtcccaactactcg

SEQ ID NO: 508674 - DNA, 201 bp, Homo sapiens
tttcaagacacctgtgaaaactgagatataatttaaaaaaactatactttctactggtaacaaagtaacaagtgctactagtactactgagatttgttgtytacattcaaatagaagaaaatgctaaatttcagtctgagttgagtgaaaatacagatgtaattatttttctgatccaagtctatagacctcctgaaatct

SEQ ID NO: 508675 - DNA, 201 bp, Homo sapiens
tcaggagatcgagaccatcctggctaacacaatgaagccccgtctctacaaacaaacaaacaaacaaacaaaatacaaaaaattagccggatgtggtggcrggcacctgtagtcccaactactcgggaggctgaggcagcagaatggcttgaacccaggaggcggagcttgcagtgagccgagatcacgccactgcactcc

SEQ ID NO: 508676 - DNA, 201 bp, Homo sapiens
ctttatagattagtatttagcatggagtacatacttagaaaataagtgttgacagaatgacactgattattatttgaaactggctacttactttttatacrttttatatttattacatttccttttgcatctgaatataatgatcctttgctgccttgttatcctgtgtccctaatacctggtacattttaggccctaatg

SEQ ID NO: 508677 - DNA, 201 bp, Homo sapiens
tcactcccattttaccaaggaggaaactgaggtatagttaggctaaataaattgcccaaagtcattcagctagcaagatgtagagctgttatttgaacacmggctgattgacactagatacacactacatcagcaattttcaaactggagtacatgtatctctggggtgtacaaagcctttccaacatggacagggctgaa

SEQ ID NO: 508678 - DNA, 201 bp, Homo sapiens
tgtgtagataaagtactttcatgaaaaatctttttggaagtcaagatttataattctttcaaccaaattaaaggagcatctaatcaagttgagtgctgatraatcagtttttgatgaaagattattataaggttttggtatataacttgaaagagttcacaaaattcactggcattgctaaagctaaatgccttctactct

SEQ ID NO: 508679 - DNA, 201 bp, Homo sapiens
aaagagagaaggaaggaaggaaggaaggaacgaaggaagggagggagggagggagggaaaagaaggaaagaagaaagaggaaagaaagaaagaaagaaaaraaagagaaaggaagaaaggaagaaaagagaaagaaagaaaaagaaagaaaagaaagaaagaaagaaggaaaagaaagaaagacagacagacaagcaggca

SEQ ID NO: 508680 - DNA, 201 bp, Homo sapiens
ctaaaaatacaaaaattaactgggtgtggtggcacgcacctgtaatcccaactactagagaggctgaggcaggataattgcttgaaccccggaggcggagrttgcagtgagccgagattacaccactgcactccaacctgggcaacagagcaagactccgtctcaaaacaaaagaagtgatattttttaacttcttatttt

SEQ ID NO: 508681 - DNA, 201 bp, Homo sapiens
aaattaactgggtgtggtggcacgcacctgtaatcccaactactagagaggctgaggcaggataattgcttgaaccccggaggcggagattgcagtgagcygagattacaccactgcactccaacctgggcaacagagcaagactccgtctcaaaacaaaagaagtgatattttttaacttcttattttaaaaatgtgtgc

SEQ ID NO: 508682 - DNA, 201 bp, Homo sapiens
tcctcacctggatcacctgtattctccaaagccagcaggttggagtggcagagtcaaccaaactgcagagatggcagacacccctgccccccaggagctcrgtcccagggagagatcaaagctctgtctttagaaccctggctggagtacctgaagcccccacagaaaggtcccactcgatgaggaggaatggatcagggt

SEQ ID NO: 508683 - DNA, 201 bp, Homo sapiens
acatgaagtagccttggaaacaaggttgcaacctaagggtgagaaaatttccaaactgtgtctagttctatggagagaaaaaaactagcaattagaaaccrattgaaggttaacttttttaaagtttatgaaaagaaggcagtatattgtgattaaaagtgcgggttagactttagcagtgttgctgggaacgtaaaatgg

SEQ ID NO: 508684 - DNA, 201 bp, Homo sapiens
ctaggcatggtggctcacaccagtaattccagcactttgggaggctgacatgggatgattgcttgagcccaggagtttgagaccagcctgggcaacatggygaaaccttgtctctacaaaaaatgcaaaaattagcctggtgtggtggcaaacacctgtagtttcaagtactcgggagtctgaggcaggaggatagcttga

SEQ ID NO: 508685 - DNA, 201 bp, Homo sapiens
agcctgagtagacatagatgtttaacaggtggcaataataatatgtagctaaattcctcagggcattatgtattaattaaacacagatgcaagttacgtcktctttctatatttggtctatttttacctctagactctacaatgaagttttaattaatccttcataacttaagattttgttaatctttggaagcattttcc

SEQ ID NO: 508686 - DNA, 201 bp, Homo sapiens
ctattcacaatagctgagagatcgaggctacccaaatgtccatcaagggatgaacaggtaaacaaaatgtggtatataaatacaacagaatattatgcagyctgagaagggaagaaaatcctgtcacatgctacagcatgaatgatccttgaggacgttatggtaagtgaaataagctagtcacaaaaagaccaatactat

SEQ ID NO: 508687 - DNA, 201 bp, Homo sapiens
acaaagtcctctgatctagacatataaagaatttcacaagccagcaatcccattactggatatatacccagaggaatataaatcattctaccataaagacrcatgcatgcaaatgttcattgcagcactattcacaatagcaaagatatggaatcaacctaaatgtccatcaatgagagattggataaagaaaatgtggta

SEQ ID NO: 508688 - DNA, 201 bp, Homo sapiens
tgatgagttacaattatctcctttttctcacccttaagacaacctcgtccattgggagcgccctcagagacccaaggcaccagtggggcatctttaccaamcccaggctccctctgctgaggtggagatgacatcctatgtgctcctcgcttatctcacggcccagccagcccccacctcaggggacctgacctctgcaac

SEQ ID NO: 508689 - DNA, 201 bp, Homo sapiens
actccctctaccccaaaacagtttttaaaaattgctgttggaagccaagaatgataagcaaacaaaacaatagaatagaaaataacaaggctgggcgcagyggctcatgcctgaaaccccaacactttgggggccaaggtgggaggattgtttgagcccagggggttgaaaccggcctgggcaacatactgagatgctgtc

SEQ ID NO: 508690 - DNA, 201 bp, Homo sapiens
attatgctttgagaagcataatgactgattagtgggctaagcacatcttccccattgctgaatattgccaaagagcagttggcttcccacagcagtgtatwttggttcccattgtttcacatccatgtcagcctttggtatttcaaggattactgtattttttttttcaatttaatgagtacaaactctactatttcatgt

SEQ ID NO: 508691 - DNA, 201 bp, Homo sapiens
ctgaggtcaggagtttgagaccagcctggccaacatggtgaaactccgtctctactaaaaatacaaaaattaaccaggtgtggtggcaggcgcctgtaatyccagctactctggaggctgaggcaggagaatcgctcgaacctgggaggtggaggttgtagtgaaccgaaatcacgccactgcactccagcctgggcaaca

SEQ ID NO: 508692 - DNA, 201 bp, Homo sapiens
acagccttgccaaacttggcttatgggaagcataaagccaaagtgtgtggctttttattgcaacgtggccgggccccagtgcaaattagataatgacagcyaatggcccgaaaatggcacctttgatttttcaaattctcagggaccttgacaactttataaccaggaacagcaaatggcaggaggttcttgcctgaatat

SEQ ID NO: 508693 - DNA, 201 bp, Homo sapiens
caaggtgggaggatcacttgagtccaggaattcaagaccagcctgggtaacatggtgaaaccccgtctctacaaaaaataagttagcagggcatggtgccrcacacctgtagtcatggctattcaggaggctgaggcaggagaatcacttgaacttgggaggtggaggttgcagtgagctgagatcatgtcactgcgctcc

SEQ ID NO: 508694 - DNA, 201 bp, Homo sapiens
atcctttctttatccttgacctttggaagttcaattattaaatgtagtcttatttgagttaagtctacttggtgttctataaccttcttgtgcttgaataktgatattcttctctaggtttggagagttccctgttgttatccctttgaataaactttctaccccagtctctgtctctacctcctctttaaggtcaaaaca

SEQ ID NO: 508695 - DNA, 201 bp, Homo sapiens
aaagaaatagtcaaattagccacaaggcaagtagtatgtgtttgcttaagtcctgaggttgaacgatctcattaatggctccaattcctcacacgcacccygccccctccaagatcagcatccttgagcatgtggtcttccagtaccctcctagtctgtgcccactgttcgatttgttgggaatggggtgttaacatatgc

SEQ ID NO: 508696 - DNA, 201 bp, Homo sapiens
caaaatggttcttctgaatggaggctacagaatgtctttactctgcataacactgaaggccattagcctaaacaggtgagaaggaaaagcatttaatccgrtgtatggaaatggaagccctcctgcaaacttctctaaataaggaaggatcctggtttgaaaggctgtcgatgtttggcagcaactgaagcaaatagacta

SEQ ID NO: 508697 - DNA, 201 bp, Homo sapiens
tcaaattagccacaaggcaagtagtatgtgtttgcttaagtcctgaggttgaacgatctcattaatggctccaattcctcacacgcaccctgccccctccragatcagcatccttgagcatgtggtcttccagtaccctcctagtctgtgcccactgttcgatttgttgggaatggggtgttaacatatgcaacaggggcc

SEQ ID NO: 508698 - DNA, 201 bp, Homo sapiens
gttgggagaaaatgaagattgagtggatttataggctcttagatatttaaaggaaaaaaaaagaactttaaaactaagcccctcagttttcagtgaagacrattgaagtctaaatgataaatgtagaagagggatatttcgtaatccctggaaaatagaaaatgtccaataaatattagttaactgaattaatttcctaga

SEQ ID NO: 508699 - DNA, 201 bp, Homo sapiens
atggggtgttaacatatgcaacaggggccgggcgcggtggctcacgcctgtaatcccagcactttgggaggccaaggcgggcggatcacgaggtcaggagrtcgagaccatcctggctaacacagtgaaaccccatctctactaaaaaatacaaaaaattagccgggcgtggtggcaggcgcctgtagtcccagctactcg

SEQ ID NO: 508700 - DNA, 201 bp, Homo sapiens
gcaacaggggccgggcgcggtggctcacgcctgtaatcccagcactttgggaggccaaggcgggcggatcacgaggtcaggagatcgagaccatcctggcyaacacagtgaaaccccatctctactaaaaaatacaaaaaattagccgggcgtggtggcaggcgcctgtagtcccagctactcggggaggctgaggcagga

SEQ ID NO: 508701 - DNA, 201 bp, Homo sapiens
acagactgatcacaaccagttaccgatttgtttcttctccactcccactgctttcaataactagccttaaaaaaaaaaaaaaaaaaaaacctgggcacggkggctaatgactgtaatcccaatgctttaggaggctcaggtgggaggatttcttgagtccaggagttcgagactatcccgggcaagaacatgaatcctcct

SEQ ID NO: 508702 - DNA, 201 bp, Homo sapiens
gagccgagatcacgccactgcactccagcctgggtgacagagtgagactctgtctcaaaaaaaaaaaaaagaaaaaaacatatgcaatatacagaggtttrgaaaagccctgaacatcagcttttgcacttgcacctcatcactgccataagaatatacctgggctagctggctcctgcatgagaggcatgcggagcagca

SEQ ID NO: 508703 - DNA, 201 bp, Homo sapiens
actcccactgctttcaataactagccttaaaaaaaaaaaaaaaaaaaaacctgggcacggtggctaatgactgtaatcccaatgctttaggaggctcaggkgggaggatttcttgagtccaggagttcgagactatcccgggcaagaacatgaatcctcctctctacaggggaaaaaaagaaagaaagaaagattttaacg

SEQ ID NO: 508704 - DNA, 201 bp, Homo sapiens
agaaaaaaacatatgcaatatacagaggtttggaaaagccctgaacatcagcttttgcacttgcacctcatcactgccataagaatatacctgggctagcyggctcctgcatgagaggcatgcggagcagcagcttatggccagccgatctgcagacagttctggaaatcgaaatcagcagagctgcctgactgaatgccc

SEQ ID NO: 508705 - DNA, 201 bp, Homo sapiens
gcaagaacatgaatcctcctctctacaggggaaaaaaagaaagaaagaaagattttaacggcatcattatatatattttttctttttttgtcctgggtgaragggaggaagtggctcatcattatttacaacagtaaaaatcttgaagcaacttaaatagccaatataggaaagtattttgttttttaaaaagtataattt

SEQ ID NO: 508706 - DNA, 201 bp, Homo sapiens
aagtcagaatttaaaaatgaacttggccaggcatggtggctcatgcctgtaatcccagcacttcgggaggtccactcggaaggatcacctgaagccaggarttcagaaacagcgtgtacaacaaagcgagacttcgtgtctctaaaaaaatttttaaagaattagccaggtatagtggcaggtgcctgtaccccgagctac

SEQ ID NO: 508707 - DNA, 201 bp, Homo sapiens
ttactaaagtcagaatttaaaaatgaacttggccaggcatggtggctcatgcctgtaatcccagcacttcgggaggtccactcggaaggatcacctgaagycaggaattcagaaacagcgtgtacaacaaagcgagacttcgtgtctctaaaaaaatttttaaagaattagccaggtatagtggcaggtgcctgtaccccg

SEQ ID NO: 508708 - DNA, 201 bp, Homo sapiens
tcttactaaagtcagaatttaaaaatgaacttggccaggcatggtggctcatgcctgtaatcccagcacttcgggaggtccactcggaaggatcacctgargccaggaattcagaaacagcgtgtacaacaaagcgagacttcgtgtctctaaaaaaatttttaaagaattagccaggtatagtggcaggtgcctgtaccc

SEQ ID NO: 508709 - DNA, 201 bp, Homo sapiens
gtcaatgatgtatcctataaataattataagtagtgttacttttgatagtcaaaccaggaattctggatcctagaggggagtaagggagaacaactgatcyggtccaggtggagaaagctggagagaggggtgtgggaacaggccttctctcccagggagtgccactggcagggagttctggcagtccaagaccctaatat

SEQ ID NO: 508710 - DNA, 201 bp, Homo sapiens
aggcaccgggcatagagtggtgagcaaaatagacaccgtatatttaaaaaaaaaaaaaaaaaagacacagtataagccctctgtgctgcctacattcaacygcgattaaatcataatgaatgtcctttcttttctaataattcataaattcactagcaatttatttgcagcctatatcactcgagtctggatctacatata

SEQ ID NO: 508711 - DNA, 201 bp, Homo sapiens
gcagacaggagtggacaacagttctccttgccccccaccccacagggatttctgtgttggggccaagaaggcctgatcttcagtagttaaggaaagtttcrgggtagagggagggcagggaaggaaaggggagacccactttagcccaagtgagcccagtgacattattggctgcacggccgctattctccataccttggg

SEQ ID NO: 508712 - DNA, 201 bp, Homo sapiens
gctacattttatctctcatttctaaactttcttactaaagtcagaatttaaaaatgaacttggccaggcatggtggctcatgcctgtaatcccagcacttygggaggtccactcggaaggatcacctgaagccaggaattcagaaacagcgtgtacaacaaagcgagacttcgtgtctctaaaaaaatttttaaagaatta

SEQ ID NO: 508713 - DNA, 201 bp, Homo sapiens
ttgcttttttggacatctttgaggtagctatttcagtcgactcttgaacaacatgagtttgaactgtgtgggtctacttttacacggagtttttctctttrctttttttgagacaggatctccctttgtcaccttcgctggtgtgcagtggcgtgatcatggcttactgaagccttgaccttccgggttgaagtgatcctc

SEQ ID NO: 508714 - DNA, 201 bp, Homo sapiens
tggctgcacggccgctattctccataccttgggacaagcacatgctttatttgaaaattccaggggcacaggctctgagtttctcttttgtagaaaacaaraaggctgggacccctggatgtcagatccatgggacaggcccagacttctcaatcctcaaccttctcaacacaggtgatctgctcctgtacccacatgagc

SEQ ID NO: 508715 - DNA, 201 bp, Homo sapiens
tgaatgaaggaatgagtggaaggaaggatggatgaatgaacgagatcacaaatgaacagcatgctgtagtggaaagaaacctggagacatggggttggcaycctaacattttccttatcctttgtgtgatgttggaaaaattgcctgatgtcttctcagtttcctcatctgtaaagtggggcaaaagtacatactcctcag

SEQ ID NO: 508716 - DNA, 201 bp, Homo sapiens
gagaagagagggagcagaaacacgaccttggaggtgggcaggaacggttcatggagcacaaactgtttatgaccccctctcaccagcgaggcataaagcarcacggtggtctctgccctgggcaggggcagaagtcgaagtccacatgggcagcctggaattacactaccagactgcaacgaggcagcatctgctcattca

SEQ ID NO: 508717 - DNA, 201 bp, Homo sapiens
cttgccacactctcccaggcccacccacacctctgttgcaatggagggccccactacccaggagagcaggtctagggcaccgtgccaagcctgatgaatgyccttcatacccttttcaaacaacaggctacgattaggcctaattataggggcctggtcccttaatattcttcctggcatgtctcttgccaatcaaatcag

SEQ ID NO: 508718 - DNA, 201 bp, Homo sapiens
aagagagggagcagaaacacgaccttggaggtgggcaggaacggttcatggagcacaaactgtttatgaccccctctcaccagcgaggcataaagcaacayggtggtctctgccctgggcaggggcagaagtcgaagtccacatgggcagcctggaattacactaccagactgcaacgaggcagcatctgctcattcatgt

SEQ ID NO: 508719 - DNA, 201 bp, Homo sapiens
tggctgctccaaataaaattgtactttttgtcagtgataaagagaatagataatggggtgtggtggtggggagttggaagcacccagcacagggtccagcyttccagagatcttacactctgatgggggagatgggagggtcaacagaaaacaggaacccagcttggtaaatcctccgctggaatcacaggtgctgtagga

SEQ ID NO: 508720 - DNA, 201 bp, Homo sapiens
tagagatggggggtctccctatattgctagggctggcctcaaacacctaggctcaagcagtcctcccacttcagcctcccaaagtgctacaattttaggcrtgtgccacagcacttggcctactgcagtagagatatagatacgaatacttttcttaagggtactgtacagttaggctgccctggaaccattatgtctctt

SEQ ID NO: 508721 - DNA, 201 bp, Homo sapiens
atggttattattattgggaataaccgtgtatcagagtgcagttcttagcctggagaatgggaaatggaaaggaccagagattcaaagaaggcaatttaccyaaggtcacacagccctttaaggccaagtagagcctcctaagcatttcttgccacactctcccaggcccacccacacctctgttgcaatggagggccccac

SEQ ID NO: 508722 - DNA, 201 bp, Homo sapiens
caccacacccagctaattttttgtatttttagtacagacggggtttcaccgtgttagccaggatggtctcgatctcctgacctcgtgatccacccgcctcrgcctcccaaagtgctgtgattacaggtgtgagccaccacacccagccactcaaacttaatgtagtaaactgaacacactattttctctctttctatatct

SEQ ID NO: 508723 - DNA, 201 bp, Homo sapiens
ttttaggcatgtgccacagcacttggcctactgcagtagagatatagatacgaatacttttcttaagggtactgtacagttaggctgccctggaaccattmtgtctctttgagtttccttctctactctgaactttaagtgtctattttcttattttctagttcatagaagacatttcactatcacaactgtgtatttact

SEQ ID NO: 508724 - DNA, 201 bp, Homo sapiens
ccacctcggcctcccaaagtgctgggtttacaggtatgagccaccgcactgggccgattgcattcttttttatggctacatagcattccatggtatacatrgaccacattttctttatccactctaccattgatgaacatctaggctgattccatgtctttgctattgtgaatagtgctgcgaaaaacatacaggtgcatg

SEQ ID NO: 508725 - DNA, 201 bp, Homo sapiens
tgagaaaactccaaactgctttccacagtggctgaactaatttaccttcccaccaacagtgtgttagcattcccttttctctgctacctcgccaacatctmttattttctgactttaataatagccattctaactagtgtggatggtatctcattgtggttttgattttgcatttctctgatgattagtgatggttagcat

SEQ ID NO: 508726 - DNA, 201 bp, Homo sapiens
atgagccactcacacccatatcatttgtcatgttatcaccaataactgcacctctgattcttccaaatcaggctctgcacttcttccaatcaaaccactcrctcttccacctcatcaacgtttcctatcctttgatccccaatttgctcattatctacaacggtggttcttcacttctttgatttcaccatcatagcatac

SEQ ID NO: 508727 - DNA, 201 bp, Homo sapiens
aaattaaaacattagctgggcatggtggctcacacctatggtcttagctcctcgggaggctaaggtgagaggatcacctaagcctggggaggtcgaggctrcagtgagctatgatcataccactacattccagcctgggtgacagagcaagactgtctcaaaaaagaaaaaggaagaagaaggaggaggaaggaggaagaa

SEQ ID NO: 508728 - DNA, 201 bp, Homo sapiens
ccactcactcttccacctcatcaacgtttcctatcctttgatccccaatttgctcattatctacaacggtggttcttcacttctttgatttcaccatcatmgcatacttactgacttgcaaacacatttaattctgtctcatctctctcttttggtcataaaacctaactctgtgccttctctatgcacgctcatagctga

SEQ ID NO: 508729 - DNA, 201 bp, Homo sapiens
ttcttcacttctttgatttcaccatcatagcatacttactgacttgcaaacacatttaattctgtctcatctctctcttttggtcataaaacctaactctstgccttctctatgcacgctcatagctgaggagaactggagaaatgacagatctgtgctgactggggactagtttcagctgtaactcgtggagaggcagtg

SEQ ID NO: 508730 - DNA, 201 bp, Homo sapiens
gagaatatacggtgtttggttttctgttcctgtgttagtttgctgaggataacagcttccaactccatccatgtccctgcaaaggacacaatctcgttcctttttttttttttacctctttttttagagaaagagtcttgctttgtctcccaggctggagggcagtggtgcaatcatagctcatggcagcctcgacttcct

SEQ ID NO: 508731 - DNA, 201 bp, Homo sapiens
agaggtcttttcagtatggtaaaacattagcccaaaggagataatgccttctctgtagaatgggagttgcagtggaggagttgggagagtaaagaagaaaraaggctgggtgtggtggctcacacctataatctcagcagtttgggaggccgaggcaggtggatcacctgaggtcaggagtttgagaccagcctgaccaac

SEQ ID NO: 508732 - DNA, 201 bp, Homo sapiens
ggaggccgaggcaggtggatcacctgaggtcaggagtttgagaccagcctgaccaacatggtgaaaccccatgtctactaaatacaaaaaactagccgggygtggtggcacatgcctgtagtcccagctactcgggaggctgaggtaggagaatcttgaacccgggaggcagaggttgcagtgagctgagatggcgccact

SEQ ID NO: 508733 - DNA, 201 bp, Homo sapiens
tagccgggcgtggtggcacatgcctgtagtcccagctactcgggaggctgaggtaggagaatcttgaacccgggaggcagaggttgcagtgagctgagatsgcgccactgcactccagcgtgggcgacagagtgaggctccgtctcaaaaaaaaaaaaaaaaagaagaagaagaaatgctgggcagaaaagaggaagcaat

SEQ ID NO: 508734 - DNA, 201 bp, Homo sapiens
ttgcagtatttctggaagccagcctggatctggagtagatcctgagagaccaccgcagagtcctcaagcctgcccccaccctgggatgaccatgaccatctttttttttttttttttttttttttttgagacagtctccctcttgtcacccaggctggagtgcagtggcatgatctgggctcactgcaacctccacctccc

SEQ ID NO: 508735 - DNA, 201 bp, Homo sapiens
gtgcccgccaccatgcccggctaatttttgtagttttagtagagatggggtttcaccatgttggtcaggctggtctgaaactcctgacctcaagtgatccrcccgcctcggcctcccaaagtgctgggattacaggcatgagccactgcgccaagctgaacatctttattaaatgctcctgccaggttctgggcagacaag

SEQ ID NO: 508736 - DNA, 201 bp, Homo sapiens
acagactctttaagggcactgcaaattgtataaacaggatcaatctattagaaactcttgccagtgtgtgggaaaagaaaatttatcttttgacctgtgtytcaagtacctttatattaggtaactactgacagacttgacggcttaatacaagttgagtatccttaatgcaaaatgtttgggaccagaactgtttcagat

SEQ ID NO: 508737 - DNA, 201 bp, Homo sapiens
cagtcacagggcccaggttcaaaggagagtgacaagatcacattgcagaagagcactaggatcaggaggatattgtggctgcttttggaacatacaatctrccacaagctataatttatttatttttttgagacagggtctcgctctgttgcccaggctggagtgcagtggtgcgatctcagctcactgcaacctctgcct

SEQ ID NO: 508738 - DNA, 201 bp, Homo sapiens
ttgtgaagatcgaatgaggtaatgtctgtaacatatgtggtgtggtgcctggcacatagtaggtcctccatatatcatcgtttcctatattttaaaaatayaattttttttggagtggagtaccaaaccttttagagaaaagtgcagctgaacatccagtggtgggcaagaacaagtagacagctcaaagctaggacacta

SEQ ID NO: 508739 - DNA, 201 bp, Homo sapiens
atacatttgtgttgttttaagccactaaatttgtggcttattgttgtgtcccaaatcattaccagtggcaacagaaaactaacatacaacctagtgtaggmgaggaaaacttccttctactctcttaggttctgcagctggtttaagaattaaactgacaaattagctaatcccagctactagggaggctgagaacccaag

SEQ ID NO: 508740 - DNA, 201 bp, Homo sapiens
tgggcaagaacaagtagacagctcaaagctaggacactaggaaaaataaaattctgagagaggttggggccaggagtatgtgcatgtgaggacacagtaartgtcgtatgagataaagcctagaaataagaccagactgatgtgttaaaagaagaaaattaactacaagttagaaaggcatgcttttctactcgggaggct

SEQ ID NO: 508741 - DNA, 201 bp, Homo sapiens
aaaaaaaacaactcttaccctcctccaaatctaaggacatttgatgaaaaacattgtcctgccccactggctgctctgaaaagccgtctttgcattgtgcstcgtcagcctccttgctcgccgcagccgcctccgccgccgcggactccggcagctttatcgccagagtccctgaactgtcgctttcttttttatcccctg

SEQ ID NO: 508742 - DNA, 201 bp, Homo sapiens
ctacaagttagaaaggcatgcttttctactcgggaggctgagggaggtgaatcgcttgaacccaagaggcagaggttgcagtgagccgagatcgcgccatygcactccagcctgggtgatagagtgagtctccgtctcaaaaaaaaaaaaaaaagaaaagaaaaagaaatgcatgcttttgcaaataaaagaaaacacaac

SEQ ID NO: 508743 - DNA, 201 bp, Homo sapiens
ctgcacttcggcctgggtgacacacaacacaaagacatggagaggctgaatggataaaaatgcaaggcccaatgagctgttgcctaaaagaaacacacttyatttataaagatacaaatagactgaaaataaatgaatggaaaaagatatttcatgccaatgaaaacaaaaaaagagcaggagtagctatacttatatcag

SEQ ID NO: 508744 - DNA, 201 bp, Homo sapiens
acctcagcctcccaagcagctgggactacaggcatgcaccaccatgcctggctaattttttttgtatttttgggctgtctttacaattttttttttttgaratgtagtctcactctgctgcccaggctggagtgcaatggcgtgatctcagctcactgcaacctccgcctcccaggttcaagtgattttcctgcctcagcc

SEQ ID NO: 508745 - DNA, 201 bp, Homo sapiens
aaatgaatatgaatataactatatttttaaattctgatatgcattttatagaaaatttaagcaatacaggaaaatgtaaagaaagtaaaaatgaacagcamctcaactgtttagagataactactaatacatttagtagccattatgtctctctactctctatgcctgtataattaactttaatatatattgtttgatttt

SEQ ID NO: 508746 - DNA, 201 bp, Homo sapiens
atggaaaaaaaatccacctttgccagagcaaaggaagccagtgaaagaagtaattcattgggagtataattataagcatttagcattgttttgaacatgasaaaaaggcaagctttcatctaacagattttcataatctcaagaaataattcatctgccatttattttcagggaaatgtggtgcttcttggaagaagccca

SEQ ID NO: 508747 - DNA, 201 bp, Homo sapiens
aaagtggtgagcatttctgtgtctttttttttttttttttttttttgccaccacagctccccagtttctctggttttaataggttgtatattgttcccacstttcagccctttctttttctctcttctccttttccctactctctaaaatacctaaagggtagtagtcagataggttattttttttcaattgctaaacttc

SEQ ID NO: 508748 - DNA, 201 bp, Homo sapiens
actctgaaaactgaaacacgccaacaagttttctgttaccagtattttttttttaactctgtgcccaggccaggcgcggtggctcacgccggtaatctcakcgctttgggaggccgaggcgggcggatcgcgaggtcaggggtttgagcatcctggccaacatggtgaaaccccgtctttactaaaaatacaaaaatcagc

SEQ ID NO: 508749 - DNA, 201 bp, Homo sapiens
gagtatctcttttttcttcccttttttccttccgttgtaaaattcctaaaaaatttccatgtggtaatagactcaaggtcagagtgaacacacagctaacscttttcttggtggattaatgccttgattctatttctttcactgttgtttttcttttttcttttatttcttctttcactattttattgaaattcttaaatc

SEQ ID NO: 508750 - DNA, 201 bp, Homo sapiens
tttcaccatcatagcatacttactgacttgcaaacacatttaattctgtctcatctctctcttttggtcataaaacctaactctgtgccttctctatgcaygctcatagctgaggagaactggagaaatgacagatctgtgctgactggggactagtttcagctgtaactcgtggagaggcagtggagtggagtggagtgg

SEQ ID NO: 508751 - DNA, 201 bp, Homo sapiens
agcacagtatgaaaatcagagtatgattcttttttcaaagaactagtggaagaataaaaggggaatttaaacaccattgtctaacttttgataccaataattgaagtctaagaaacatttttgggccttgcttacctcctttggttcttcatagtggaaataaaccactacccacaccacactgcatgcctgtgtgccttt

SEQ ID NO: 508752 - DNA, 201 bp, Homo sapiens
cacgtgcctgtcatcccagctactcaggaggctgaggcacaagaatcgcttgaacttgggaggcagaggctgcagtgagctgagatcacgccactgcactrcagcctgggcaacagagccagatcctgtttaaaaaaaaaaaaaaagtttaagacaaaaaaggaaagctcactttctatcaacaatagcttccaaaagaca

SEQ ID NO: 508753 - DNA, 201 bp, Homo sapiens
aggggcggggctcctgcttgtccctggctcacctgctcctgagtgtgcaggtccggtggcgcctccttgcaggctgggctgatgggcgggggcgggggggsgggggaggaagggaatgttccaggtcctccctgggcccgggactgtgtccggggcagggatgacgtcgctgcaagttcttcccgtggccccggggctcag

SEQ ID NO: 508754 - DNA, 201 bp, Homo sapiens
gtgcctatagttccagctactcgggaggctgaagtgggaggatcacttgagtccaggaggtggaggctatagtgggccgagaccatgtcactgcactccarcctgggcaacagagtgagaccctgtgtcaaaaaaaaaaaaaaaaaaaagaagaagaagacctgaagctgggtcttgctttagagtttttgcagcagctgt

SEQ ID NO: 508755 - DNA, 201 bp, Homo sapiens
gcacagtatgaaaatcagagtatgattcttttttcaaagaactagtggaagaataaaaggggaatttaaacaccattgtctaacttttgataccaataattgaagtctaagaaacatttttgggccttgcttacctcctttggttcttcatagtggaaataaaccactacccacaccacactgcatgcctgtgtgcctttg

SEQ ID NO: 508756 - DNA, 201 bp, Homo sapiens
cctcctatattcagagggaaaatgcttcagaaaagctactgcttgagccccttccagagaatctctacaggttatgagcatattcagaattacaagaaagyttcaatcactaatatttgtacattgtgacaaactattaatcataccaaaaataatagaaatagccctttgagaacaatggttcacattgttctccgatca

SEQ ID NO: 508757 - DNA, 201 bp, Homo sapiens
ttttttgagacagagtctcactttgttgcccaggctggagtgcagcccacgatctctgctcactgcagcctccacctcctgggtggagaatcaagcgattytcctgtctcagcctcccgagtagctgggattacaggtgcctgccaccacgcccggctaatttttgttttcctctacatacagctctcacaaaccagcagt

SEQ ID NO: 508758 - DNA, 201 bp, Homo sapiens
ccagaagagcaccccatgcacgctccttgtattccacagctcagtctcatcacttccagcctggattggattggtggtgacctgaagaaagctgggaagcsttgttgggatgagcttagctgggcagccaaaagaaggagggtacagacatatttcatatatttgagttcatagattgaaaaaaaaaaggatatctacaaa

SEQ ID NO: 508759 - DNA, 201 bp, Homo sapiens
gcgtgatcacagctcactgcaacctcaccatccctagactcaggtgatccagttcaacctcccaagtagctgtctgggactataggtgtgcaccaccacasctgtctaatttttatattttttgtggagacaaggttttgccatgttgcccaggctggtctcaaactcgtgggctcaagtgatctgcccaccttagcctcc

SEQ ID NO: 508760 - DNA, 201 bp, Homo sapiens
agctgtctgggactataggtgtgcaccaccacacctgtctaatttttatattttttgtggagacaaggttttgccatgttgcccaggctggtctcaaactygtgggctcaagtgatctgcccaccttagcctcccaaagagctaacagacgcgagccaccgtgcccacccatgcttaatttgtttaggtgcgagatatact

SEQ ID NO: 508761 - DNA, 201 bp, Homo sapiens
aacaaaattagacatcaggaacaaaaggatggctttaaaaattccatgtgtttcccaacaaattaagaaatagttagaactgaatgacagtaaaaacattkcttgtctgagattgtgggagagggatggcatgtacctagagggacgcttatagtgtaagttcatcaaaaaataaggaagactatatatgtgaataaggtc

SEQ ID NO: 508762 - DNA, 201 bp, Homo sapiens
tgctagtcattgcatttttttcaaggcctcttttgaagagttattaaggaaggtaaaagtgcataaaggtcaaagtcttaagaaagtctgattaaataatygcaaaaacaattttttttttttgaggcaaagtcttgctttgttgcccaggctggagtgaagtggcatgatctcggctcactacaacctccgcctcccagg

SEQ ID NO: 508763 - DNA, 201 bp, Homo sapiens
ggcaggagaatcgcttgaaccctggaggcagagactgcagtgagccgagatcgcaccattgcactccagcctgggtaacaagggaaactccatctccaaaraaaaaaaaaaaaaaaaagccagacatggtagtgtatgcctgtagtcccagctacttgggaggctgaggtcgaggatcacctgagcccaggagttagaggc

SEQ ID NO: 508764 - DNA, 201 bp, Homo sapiens
aggtaggaaaagggaaccaagactattacaagttgcatgtcatatatctgctacaaccttgcagcccatttaaataatccaatcatgagtttgtgtgtatkaatatatacatatatgcacacatatatgtacatacatgcacatatatacatgtatatatacctacatatgtatacacacacatatatataatcacatact

SEQ ID NO: 508765 - DNA, 201 bp, Homo sapiens
ctaaaccaaaacagtgttttagctccaggtattaatggccacttctggagccataagcaaagctgataatatagctcctaaataaagaactggaatatggytggcaaagaatcaccttcttaatttcttaagaatgttcaactctggcacaaagtggacaaggtgagtatgggtgaatatccttctagagagatgagacta

SEQ ID NO: 508766 - DNA, 201 bp, Homo sapiens
aggtgattctcctgcctcagcctcccgagtagctgggattacaggcacatgccaccacagctagctaatttttgtatttttagtagagacaagttacaccrcgttggccaggctggtcttgaactcctgacctccagtgatccacctgcctcggcctcccaagtgctgggattacagacctgaggcaatgcacctggccac

SEQ ID NO: 508767 - DNA, 201 bp, Homo sapiens
tatatatgtatgtatatacatgccttgtgtgtgtgtgtgtatacacgccatgatgcccattttaccagttttttaaattataacgttaggtcccctcacarctagataaatgaagaaaacagaagtaacttactaactgattggtgccctccatgggactgaacccagatagcatcttcacttccacaatagccatattgg

SEQ ID NO: 508768 - DNA, 201 bp, Homo sapiens
atatggttggcaaagaatcaccttcttaatttcttaagaatgttcaactctggcacaaagtggacaaggtgagtatgggtgaatatccttctagagagatragactagaagactgaggatctacagaaggggatgcccagttattctctctccccctactctcgaaactcactcattaattcatgtatttatcaaaatggc

SEQ ID NO: 508769 - DNA, 201 bp, Homo sapiens
ttcctcgtcttaagatcatgacatctttaggcattattatttcaagtgttacagtcctgaactaagttaatggacaaaaacaagccaaggcacacttatgytaaactataaaatgtctcacatatgtatctctgatttctagttaaaaaaaaaattataaacaatgttaaaatggaatacttaaaacttcactgtttttct

SEQ ID NO: 508770 - DNA, 201 bp, Homo sapiens
  misc_feature (1)...(201): n = A,T,C or G
tcactctgttgcctaggctggagtgcagtgatgcgactgaactcctgggctcaagcaatcctactgcctcagcctcctgatagctgggactacaggcacangccaccatgctgggctaatttttttcttactttttttttttctttttgtagagatgggggtctcactgtcttgtccaggctggtcgtgaagtcctgggct

SEQ ID NO: 508771 - DNA, 201 bp, Homo sapiens
tcacagctagataaatgaagaaaacagaagtaacttactaactgattggtgccctccatgggactgaacccagatagcatcttcacttccacaatagccayattggaagagctacggctccccacataactgagagcaggaagaagaaaacacatgtgagcctattacttcagtgcactctgcatccccaacacacacaca

SEQ ID NO: 508772 - DNA, 201 bp, Homo sapiens
cgtaagtggtggccactgtcctataagaatctatgatgaaatagtaaaatagctaacatttatagagtgctttccacatgccagacactgtgctaaattcktgttgttgttgttgtttgtttttgtttttgtttttgttttttcccagacacagtcttgctctgttgcccgggctggagtgcagtagcgtgatctcggctc

SEQ ID NO: 508773 - DNA, 201 bp, Homo sapiens
aacttttttttgttgttgttgttgttttgtttttgagacagagtctcactttattgcccaggatggagtacagtggtgcaaactctgctcactgtaacctycgcctcctgggttcaagcaattctcctgtctcagcctcctgagtagctgggactacaggcgcatgccaccatgcccagctaatttttgtatttttagtag

SEQ ID NO: 508774 - DNA, 201 bp, Homo sapiens
agctaatttttgtatttttagtagagacggggtttcaccatgttggtcaggctggtctcgaactcctaacctcaagtgatccacgcgccgtggcctcccaragtgctgggattacaggcatgagccactgtgtccagccttaaacatgttaatctgtcttgctcaatcttccattatctctcaacccttttttttttggag

SEQ ID NO: 508775 - DNA, 201 bp, Homo sapiens
cttcttctttttttttttttttttggagacagagccttgctctgtcacacgggctggagtgcagtggcacagtcatagctcactgtaacctcaacctcccwggctcaagcagtccttccacttcagcctcttgagtagctgggactacaggcatgtgccaccatgcctggttaacttttttctttctttctttctgttttt

SEQ ID NO: 508776 - DNA, 201 bp, Homo sapiens
gtaatcccagctactcaggaggctgagtgaggcaggagaatcgcttgaacccaggaagtggaggttgcagtgatccaagattgagccattgcgctccagcytgggcagcaagagtgaaaactcgatctcaaaaaaaaaattaataatgtgtgtggtacttcaaccagtcttgaagagaatacagaactggaaagaagaata

SEQ ID NO: 508777 - DNA, 201 bp, Homo sapiens
tgaaactccatctctaccaaaaatacagaaaattagctgggtgttggcagtatgcgcctgtggtcccagctactcggtaggctgaggtgggaggaccacckgagcctggaaggtggagatttcattgagcctagatttcaccactgtactccagcctgggtgacacagtaagaccctcgtctcaaaaaaaaaaaaaaaaaa

SEQ ID NO: 508778 - DNA, 201 bp, Homo sapiens
tagagtgagggccaacgaactttatttgtaaaagttggtcacaaccctcaggctccactgtgccacggaccctggtggactgaacaaaggaggacgaatgmgggaataaagacaaagacaaacaagtatatttggaagaaggggtcaggggtctccttgcttctagtgaacaagggccctgagcttctatagccctttgta

SEQ ID NO: 508779 - DNA, 201 bp, Homo sapiens
aaaggaaataatgaggagggggtggttgtcagtcagctgtttcacttagtgcaggcctgcataactgctttctttgaacagtaggctccagatgttccagyagataacctcaaggagcacggcgccagggagtgattgccctcagcataccttctggtggcaggtgcagatgtgagtttccccacatcctgcattcgtgat

SEQ ID NO: 508780 - DNA, 201 bp, Homo sapiens
ggagcacggcgccagggagtgattgccctcagcataccttctggtggcaggtgcagatgtgagtttccccacatcctgcattcgtgataaacagtttgctyttttatcatatagcctccagtggagtgctgagttggtcatgaccctcaggctttccccagcatgtaaaggttcacatagtaaatttctcaggctctaagt

SEQ ID NO: 508781 - DNA, 201 bp, Homo sapiens
ccctcagcataccttctggtggcaggtgcagatgtgagtttccccacatcctgcattcgtgataaacagtttgctcttttatcatatagcctccagtggartgctgagttggtcatgaccctcaggctttccccagcatgtaaaggttcacatagtaaatttctcaggctctaagtcatagtaaatttctcaggctctgag

SEQ ID NO: 508782 - DNA, 201 bp, Homo sapiens
acactcttaatgccatactagctcctgtcacaggcctgacaaatagtaggcgctcaatgtatgtttgaataaattattgattttttgttcttcctggaaawggcaatgttttctatttgtcactttatgttatgctaaacaggtttgagttttaggagtcctctttactataaattgaggtggttagatgttggctaatca

SEQ ID NO: 508783 - DNA, 201 bp, Homo sapiens
ggattacaagcgtgcgccaccacgcccagctaattgtttgtatttttagtagagacggggtttcaccgtgttaaccaggctggtctctaactcctgacttygggtgatccacccaccttggcctctcagagtgctgggattacaggtgtgagccactgcactcggcctatttatttagtttttgagacaggatgtcatgct

SEQ ID NO: 508784 - DNA, 201 bp, Homo sapiens
ttaaatttatcctttagaaagcaattctgtagtatgaaatgtgtgtactctttacctgtgggtacataaattgccatttttatttattggacttttgggtrgtaatgaggtagggctggccagatagtattaatatgatttctaagcatgtctttctgacttctagacttgaagctacttgagggaaacagtttagcataa

SEQ ID NO: 508785 - DNA, 201 bp, Homo sapiens
cctgacttcaagtgatccactcacctcagcctcccaaagtgctgggattacaaggatgagccaccacaaccggcccactttcattaaagaagttttttttwaatttagagagcatatgattaaaagttgacttaaatttttttatttgcaaaaggcatttgcatgtttcttattggtttccaagagatctcttgaaatcat

SEQ ID NO: 508786 - DNA, 201 bp, Homo sapiens
ctttttcattattcttctgaaatattcatggactcttaacagttcctaccttgtttgcactagatcctcacatactcttaccttctggcagccagtctatrgttgcagtgggttgctcttgttttgtttcttgttgctgaggatgtaatcaataaagagtagatactcaaggtaaagtttatggatactcaaattcactta

SEQ ID NO: 508787 - DNA, 201 bp, Homo sapiens
ggtttctccatgttggtcaggctagtcttgaactcccaacctcaggtggtccggctgccttggcctcccaaaatgctgggatgacaggcatgagccaccayacccagccagtagcatgcttttatagaaaatcaccatcaacaaggtactactgaacatccacagattacttggttaacctaatcaattcatgttcagaaa

SEQ ID NO: 508788 - DNA, 201 bp, Homo sapiens
tagttctacggagtgtttctgtgagtcactaaaaaaaagtttgggaaatattaggttaaataaagttacatacttgttttttcttctggatttctcagaamctttaatatgttagtgtgcactgagactctgtaagagcaagatatggtatgcaccattcgctaaactgatttgaccacaagacctttgtccttttaaaaa

SEQ ID NO: 508789 - DNA, 201 bp, Homo sapiens
gcacactttttcattattcttctgaaatattcatggactcttaacagttcctaccttgtttgcactagatcctcacatactcttaccttctggcagccagwctatggttgcagtgggttgctcttgttttgtttcttgttgctgaggatgtaatcaataaagagtagatactcaaggtaaagtttatggatactcaaattc

SEQ ID NO: 508790 - DNA, 201 bp, Homo sapiens
gtgcactgagactctgtaagagcaagatatggtatgcaccattcgctaaactgatttgaccacaagacctttgtccttttaaaaaagcattttgaacaatmcaaaggtagcccaagctagacccttccaactgtagagaactgaatggaacatcagatttaaataatggcataaaataaaaagcatagggctggacggctg

SEQ ID NO: 508791 - DNA, 201 bp, Homo sapiens
aaatagcttgctcacggttacatggctcatctgcagcaggactggaatttgaacccaggacatttaactctggagctcatgtgccacaccactaaccttgkctacacagaggatggatttctcaatggactggcctgctctcaaaagaaagtaggaagaggctgggcacgcataggtcacgcttgtaatcccagcactttg

SEQ ID NO: 508792 - DNA, 201 bp, Homo sapiens
ggggcttacgatcctcattttctgggtttgggtgatgttagaggaaagtgccccagcccagcaccattcctttttgcttctggtttggagctctagaccasagccttagttctggtcagttgttaagtaattatttaacagtgtgacgttcagacctgcatgacatctatacagtgtccagtaaagaaagagaaagccatg

SEQ ID NO: 508793 - DNA, 201 bp, Homo sapiens
tcatccgaaaggaaaggtacagaaaggggggaattaatatagtttacagcttgatttgcaaatcaagggactaaaagttaatccctcaagggactgagagwtattagcaatagcatttttgtttattctttgggtatgtgtgtatagcagagatcattctgatccagagtctttgaagctttaacagggtacctggacgga

SEQ ID NO: 508794 - DNA, 201 bp, Homo sapiens
aaatgatggccacagagcagaatctaaggagatttctctggatttggtcttcatagtctataactgtaaattactgtctctgcctactcctggtgagtttttgttgttgttgttgggttttttgtttgtttgttttttgtttttttgagacagaatctcactctgtcacccaggcctggagtgcagtggtacgatcgcagc

SEQ ID NO: 508795 - DNA, 201 bp, Homo sapiens
catctgtaaaatgggattaataatggcataccaatacctagctcattgatttgttgtaaacatgaaataatatcaaataaaccacgtgcctagaatagtgmccaatagagtaaacttcttacaaaagacgttgggctgcctactagtcctcaccacaggaaatggctttcccagatggatttggtgacacagtaagaggcc

SEQ ID NO: 508796 - DNA, 201 bp, Homo sapiens
tatatatgatctaatacaaaaataaacatcagtcctatactgttagatgaagaaataggttccaagatttaagaggcagaactgagaatgcaagtcctgcrctatcatcctccacacgcctctcctttgtccctctccaccttccttccccctttattttcctttcctagaagggaaggagggtgtcagcatctcaatcaa

SEQ ID NO: 508797 - DNA, 201 bp, Homo sapiens
aatgatggccacagagcagaatctaaggagatttctctggatttggtcttcatagtctataactgtaaattactgtctctgcctactcctggtgagtttttgttgttgttgttgggttttttgtttgtttgttttttgtttttttgagacagaatctcactctgtcacccaggcctggagtgcagtggtacgatcgcagct

SEQ ID NO: 508798 - DNA, 201 bp, Homo sapiens
gctgggactacaggcatgcactaacaagcctgattaatttttcatattttttttgtagagatggggtttcaccatgttgcccagggtggtctcaaactccygggcccaaacgatctgcccgcctcggcctcccaaagtgctgggattacaggcatgagccactgcacccaggcttcatctgtattctcattctacagacat

SEQ ID NO: 508799 - DNA, 201 bp, Homo sapiens
gaattcaatggaaaaaggatacttatttaaataaatggttctaaaataattgggcatttataagaaaaaaaaaacctcaacctatatctcacaccatgtayaaaagttatataaaaacaggctggatactgtggctcatgcctgtaatcccagcagcccaggaggccaagactagaggatcacttaaggccaggagatcaa

SEQ ID NO: 508800 - DNA, 201 bp, Homo sapiens
attttcctttcctagaagggaaggagggtgtcagcatctcaatcaaaagtcaaaactcacatgtcaacaggtaagtgacagatgatgtaaatgagggaagmacagagatagtgagataactcagatgagatggaatggtggggactctggtgaattagagattcacgctctttctaaaagaaaggtgaaggttcatgcctg

SEQ ID NO: 508801 - DNA, 201 bp, Homo sapiens
atgatggccacagagcagaatctaaggagatttctctggatttggtcttcatagtctataactgtaaattactgtctctgcctactcctggtgagtttttgttgttgttgttgggttttttgtttgtttgttttttgtttttttgagacagaatctcactctgtcacccaggcctggagtgcagtggtacgatcgcagctc

SEQ ID NO: 508802 - DNA, 201 bp, Homo sapiens
tgcttctactcggtcagaggtgtggggtccttcgagacagtggttggctgcaggctcctggacagatccgcaccttcatagctgtgtgaaggagatttccyacgttggcatagcagccactggggagctggtttcctgccatccacttgagagcatcctggatgttcttgggatcaatgaagatgaatttctgagcttggc

SEQ ID NO: 508803 - DNA, 201 bp, Homo sapiens
tttctggataaacaaaacttgagggagtttatcaccactagacctgacttacaagagatgctcaaggaagtccttcaagttgaaacatgctaaacagcaaygtgaagtatgctaactagcaatgtgaaagcctaaatctcctggtgaaggtatatagacaaacacagaatcatatgacactgtaatagtggtacatatagt

SEQ ID NO: 508804 - DNA, 201 bp, Homo sapiens
aggctctccatctgtctcaccaagctaggtgcagttattgtgcagaaagtttgcttaggggcagaggaagccttatctacgtaagtatttagaatttgttaaaaaaaaaaaaaaaggaaaaaggaaagcagtttatagatgaatacttaaatagtttcattttgtacaagtcacctggttttgttcccatgtgttaggaag

SEQ ID NO: 508805 - DNA, 201 bp, Homo sapiens
tctttttgtaactcattcatcagcaaaaccagacctgaaccaaagtgaccctattcatattctttgattatctgtcctactgggacatatatggtttgctrcagaaatattaatgtatttaattataggatactgccctagatagttcatatatgtggtatatgcaccatactgcttttctaaattaaaaaatctgaattc

SEQ ID NO: 508806 - DNA, 201 bp, Homo sapiens
aatcagccccatgaggaatggcacttcagactctcctattccttctggtactatgcattcctccttttgcctatgaaaatctcctgctgccgggtgcagtrgctcacgcctgtaatcccagcactttgggaggccaaggcaggaggatcacaaggtcaggagttcgagaccagcctggccaatatggtgaaaccccatctc

SEQ ID NO: 508807 - DNA, 201 bp, Homo sapiens
tacctattgcttactatgctcactacctggatccaatatacccatgtaacaatcctacatatgtacccccatatctaaaataaaagctgaaatatttttaraaaagaggcagttttttaaaaaatcacttaaaatcttctgtaggaaataactgcattggagaatgctccttcagaactttctttagcatcaatagccatt

SEQ ID NO: 508808 - DNA, 201 bp, Homo sapiens
taaaaaaatgatcaaaaatgttacactggcctggtgcggtggttcacgcctgtaatcccagcactttgggaggccgaggtaggcggattgcttgaggtcargagttcaagatcaccctggccaacatggagaatccccatctctacgaaaaatacaaaaattagcctggtgtggtggtgggcgcctgtaatctcagctact

SEQ ID NO: 508809 - DNA, 201 bp, Homo sapiens
attctaacacctagtttttatgccaccttaaagttatactttctgtgtgttgtactttcaaatgtttaaaaaaataggccaggcgtggtgggattacaagygcttgtaatcccagcactttgggaggccaaggtgggcggatcacaaggtcaagagatccagaccatcctggctaacatgatgaaacccatctctactaaa

SEQ ID NO: 508810 - DNA, 201 bp, Homo sapiens
ggaggtagtgcatagaggcctggggaaacctgggggctgagacgccgacatctcctctctttcccagggaaaattgggatgcttccaatttagagacaaasttatgggggaggtgtgattccagggctgacacctgattcctgtatccccagctctcaccctgatgcaatcctttaggtaattgaagatggtggcagtaag

SEQ ID NO: 508811 - DNA, 201 bp, Homo sapiens
actgcagccttgaacttctgtgctcaagtaatcctttcacttcagtcccttgagtagctaggactgcaggtgtgcaccaccatgcctaattaaaaaaaaatttttttttttgtagagaaaaaggtcttgatatgttgcccaggctggtccaaagtgattctcctgcttcagcctcccaaagtgttgggattacaggcgtga

SEQ ID NO: 508812 - DNA, 201 bp, Homo sapiens
tcagatcacttcttaccctcaagtagattctctctcagtctaagccaccatcatctcttacctgaactactgcaatagcctcctaacttggctcactcttycactgtctgcaaggaataaccagagtgatcttttaaaaacatgtatgaaatcacatcactcaggcggcttaaaataaaatccagacttctcaccagggct

SEQ ID NO: 508813 - DNA, 201 bp, Homo sapiens
actgacagaggaagttcaatctaaggctttctttctcttatctaatggtgagaagatttaagtaatttctgcccataatttttgaaagcaattgttactcrtaccaagatgtcataagctgtttttatgcagtagtctggtgaaagaaaagtgaacctgaaccgaggaactctcagtcctagcgctgttttccgtctgact

SEQ ID NO: 508814 - DNA, 201 bp, Homo sapiens
caatgtccttgaatgagtcctcaaagagtattgagcagtgcctttatctggaatgtattaaaatccagttgagcctcatggactttttgttagttttaatrtgatttagccagcaattatttaactgattaaatagtatttcaaagtttttacagatctaagatcctatactttctcaatatgtgtttatttggtataggt

SEQ ID NO: 508815 - DNA, 201 bp, Homo sapiens
ttgcccactccagtgttctggagaggttccccaatgttttcttttagtagtttcatagtttgaggtcttaaatttaagtttttaacccattttcatttgatttttttttttatatggtaagagatacggggtcaaccttcattcttctgcgtaaagatatccagttttcccagcaccattgactgaagagactgtcctttc

SEQ ID NO: 508816 - DNA, 201 bp, Homo sapiens
ttttcttttgagatggagtttcgctcttgttgcccaggctggagtgcaatggcgggatcttggctcaccgcctcctgggtttaagtgattctcctgcctcrtcctcccgagtagctgggattacaggcatgcaccaccacgcccagctaattttgtatttttagtagagacgggttttcttcatgttggtcaggctggtgt

SEQ ID NO: 508817 - DNA, 201 bp, Homo sapiens
gtactaaaaatacaaaaaattagctgggcgtggtagcaggcgcctgtagtctcagctactcggaaggctgaggcagcagaatggcgtgaacctgggtggcrgagcttgtagtgagctgagatcgcaccactgcactccagcctggatgacagagccagactccatctcaaaaaaaaataataataaataaaataaaataaa

SEQ ID NO: 508818 - DNA, 201 bp, Homo sapiens
aagaaatagactagccaaatgcattttgttttgaagacttaatgatattttagtttcttgttgagtgactgatctattttgtatgttaatccatgtaataktttataagataatttatatgtatgttgtctttccatttttcataacaattgttgagagatttttaaatggcagcttgatatatctgtagttgggaaacct

SEQ ID NO: 508819 - DNA, 201 bp, Homo sapiens
gaggccgaggcaggaggatcacgaggtcaggagatcaagaccagccagaccaacatggtgaaaccccgtctgtactaaaaatacaaaaaattagctgggcrtggtagcaggcgcctgtagtctcagctactcggaaggctgaggcagcagaatggcgtgaacctgggtggcggagcttgtagtgagctgagatcgcaccac

SEQ ID NO: 508820 - DNA, 201 bp, Homo sapiens
ggagtgcagtggcgccgtctcagctgactgcaacctccacctgccaggttcaagtgattcttttgcctcaacttcccaaatagctgggattacaggtgcaygccaccacacttcgctaatttttgtatttgcactagagatggggtttcaccatgttggccaggctggtcttgaacttctgacctcaagtgatccacccac

SEQ ID NO: 508821 - DNA, 201 bp, Homo sapiens
atggcatgatctcagctcactgcaacctccgcctcgcgggttcaagcaattctcctgcctcagcctcccaagtagctgggattacaggcatgcaccaccaygcccggccaatttttataattttagtagagatggggtatcgccatgttggccaggctggtctcaaactcctgacctcaggtgatctgcctgcctcggcct

SEQ ID NO: 508822 - DNA, 201 bp, Homo sapiens
aactccacttcccaggtttaagtgactcttgtgttacagcctccagagtagctgggattacaggcatgtgctgccatgcctggctaatttttgtatgtttrgtggagatggggtttcaccatggccaggctggtctcgaactcctggcctcaaatgatctacccgccccggcctctgaaagtgctggaattataggtgtga

SEQ ID NO: 508823 - DNA, 201 bp, Homo sapiens
agaaaacagacctgcggacaccttgattttgaacttcgggcctccagaactgtgagaaaattaacttctgttgtttaaggcatccagtctgtggtcattcrtgatggaagccccagcagactaacacagcctttgatacttgctccaaagtagaagcagttagtgctccttcttactctgccgagagtacttcttcagtct

SEQ ID NO: 508824 - DNA, 201 bp, Homo sapiens
ccaaagtagaagcagttagtgctccttcttactctgccgagagtacttcttcagtctaaataaaccaagaacagcccaaattctctcaaattattcaaaaytaagcaatccaagagttgaattaaaaagttttaattcaaggaaactcaaaatgaaaaagatatatacgaaaggcaagaagcacaaattaagaaggataat

SEQ ID NO: 508825 - DNA, 201 bp, Homo sapiens
aactaaactgacgggagtggaatgtcagttgtgttagtagaaaatataaatgtccatatactgtgcactgacgtggagatagaaaagttgcacagttataraagtttcccacacccaggaattctgataatagcacaaaggtgctctccataatcagttactaacacacttagatgcactggagtcttaagtgagggtaca

SEQ ID NO: 508826 - DNA, 201 bp, Homo sapiens
aaatgacagtcctgctctagatcattctgcaaaataaattatgtattttcatataagtcttaaatgcaaatttttcttttctttttctcctttcttttttwtttttttttttttttttgagacagagtcttgctctgttgcccaggctgaagtgcagtgggtaccatcttggctcactgcagcctccacctcccaggttca

SEQ ID NO: 508827 - DNA, 201 bp, Homo sapiens
tggtcacttcagtgagcctgaggcaggatctgtgatctagaaacgaaccccagtaatgtctctttcagcttgagtatctgcctgctgatatatatatatayatttttgtgtgagctagaaagcatcatttcgggtttgggcagagtcaggagaggcagacagttattgcctggaatgtcctgggcctcatgtatatctcag

SEQ ID NO: 508828 - DNA, 201 bp, Homo sapiens
aattacatggattccctttacgtattctgacaggctgattgcaattattgattaaatggtaagatgatgaggaggaggaggaagaggggacggaggaggargaggaagaggggacggaggaggaggagaaggatataggcctaggtagttaaggagtcaagataaaatgctggctaaaaaataggcaacaattttgtgaag

SEQ ID NO: 508829 - DNA, 201 bp, Homo sapiens
gagaatgacatgaacctgggaggcagagcttgcagtgagccaaggttgcgccgctccactccagcctgggtgacagaggaaaactccgtctcaaaaaaaaragaaaaaaaaacaaacccccaaaactatacatatatatatatatatatatatatatatacacacacacacatatatatatacacacatatatatatacat

SEQ ID NO: 508830 - DNA, 201 bp, Homo sapiens
tgtgagatgatctcagctcactgcaacctctgcctcctgggctcaagcgatctttctatcctagtctcccaagtagttgggactacaggtgtgtgccggcrcacctagctggtttttttatttttttgtggagacagagttttgccatgttgcccaggctggtctcaagtgagccacctgccttggcctctgaaagtgctg

SEQ ID NO: 508831 - DNA, 201 bp, Homo sapiens
gcagtgagccaaggttgcgccgctccactccagcctgggtgacagaggaaaactccgtctcaaaaaaaaaagaaaaaaaaacaaacccccaaaactatacatatatatatatatatatatatatatatacacacacacacatatatatatacacacatatatatatacatatatatacacacatatatatacacacatata

SEQ ID NO: 508832 - DNA, 201 bp, Homo sapiens
gtcactcacgagggtttgatccaagtaggccatcttctcctgcagctctgcagacctgatgttggggaagggcatgcccaccatcaccacacacgtggggrggagacaagagcccagtgggtggacgtcaggaactcccgggtcatcacccatgtcaccagctgctccgttctaccccttccgtcagccctctccgactgt

SEQ ID NO: 508833 - DNA, 201 bp, Homo sapiens
ctttccaaatagctgggactacacccacgtgccaccacacccagctaatgaatttggcaactttattgtatgttgggtttgtcaacctaaataacaaatarggataggctctctaaaagaaaattatttttattttgaaataaggtgttgcaataggaatatacatgcgatagtaaactgtgtgttctttaacattgtgga

SEQ ID NO: 508834 - DNA, 201 bp, Homo sapiens
ggatcttagtcatggactgcatctggggctccatttgaagaaccatttgtagttttacagtttcaattctggaagagacaaacgcttcggaggtcccttcrtggtcgccaaaatgttaccggggatccttgctcacagagctcccaaaatggtggcaagcggcttccaagatggtggtgggcggcttccaagatggtggca

SEQ ID NO: 508835 - DNA, 201 bp, Homo sapiens
acttcttaccctcaagtagattctctctcagtctaagccaccatcatctcttacctgaactactgcaatagcctcctaacttggctcactcttccactgtstgcaaggaataaccagagtgatcttttaaaaacatgtatgaaatcacatcactcaggcggcttaaaataaaatccagacttctcaccagggctcagagaa

SEQ ID NO: 508836 - DNA, 201 bp, Homo sapiens
gcctcctgggttcaagtgattctcctgcctcaacctctcaactagctgggattacaggcgcctgccactacgcccagcttattttttgtgtttagtagagrcgggctttcaccatgttggtcaggctgatctcaaactcctgaccttgtgatttgcccaccttggcctcccaaagtgctgggattacaggcatgagccacc

SEQ ID NO: 508837 - DNA, 201 bp, Homo sapiens
cctcaagtagattctctctcagtctaagccaccatcatctcttacctgaactactgcaatagcctcctaacttggctcactcttccactgtctgcaaggartaaccagagtgatcttttaaaaacatgtatgaaatcacatcactcaggcggcttaaaataaaatccagacttctcaccagggctcagagaacctgcttgc

SEQ ID NO: 508838 - DNA, 201 bp, Homo sapiens
aaaaaaaaaaaaaaaaaaaaaagatactgaatcatccattcaaattatgtgaccttcatttaagcctttcagtgtaaagaatggtgtaggccggccaggcrcagtggctcacacctataatcccagcactgtgagaggctgaggcaggtggattacgaggtcaggagttcaagaccagcctggccaagatggtgaaacccc

SEQ ID NO: 508839 - DNA, 201 bp, Homo sapiens
tagattctctctcagtctaagccaccatcatctcttacctgaactactgcaatagcctcctaacttggctcactcttccactgtctgcaaggaataaccasagtgatcttttaaaaacatgtatgaaatcacatcactcaggcggcttaaaataaaatccagacttctcaccagggctcagagaacctgcttgctgactcc

SEQ ID NO: 508840 - DNA, 201 bp, Homo sapiens
taagaatataaaaaaattacccaggcatggtggtggacacctgtaatcccagctacgcgggaggctgaggcagacaattgctcgaacccaggaggcagagkttgcagtgagctgagatcgcaccactacactccagcctgggtgacagagcaagactacatctcaaaaaaagaaaagaaaagaatggtgtaggcagtgcta

SEQ ID NO: 508841 - DNA, 201 bp, Homo sapiens
ctcttgaattttctatatctacttgaaaaatatttaaaatatttattcaaaataaattccaaatgtagagtgtaaacaaactcaaacatttcttctgatttctgtcacctcttctactcaactcaaaaatatcttgtgtgaactcttaattattcaaaggttaatcaagtgcatagttacatatgcacttgcctctaccac

SEQ ID NO: 508842 - DNA, 201 bp, Homo sapiens
tcttgaattttctatatctacttgaaaaatatttaaaatatttattcaaaataaattccaaatgtagagtgtaaacaaactcaaacatttcttctgatttctgtcacctcttctactcaactcaaaaatatcttgtgtgaactcttaattattcaaaggttaatcaagtgcatagttacatatgcacttgcctctaccacc

SEQ ID NO: 508843 - DNA, 201 bp, Homo sapiens
ctgagctaataagtgtctggctgggcgcaggtgtggctgtccgtgtcaggttcatgcccacattctgctggccactcccatctgcttctgccttcttggcwgctgcactttctgcctctgtctggctgccctggctcacagtcactgtttgggctgcaggcaagggctgcaccactcctgtacccttcctgggacagctcc

SEQ ID NO: 508844 - DNA, 201 bp, Homo sapiens
ggaggcagaggttgcagtgagccaagatagcgccactgtactccggcctgggcaacagagagagactccatctcaaaaaaaataaataaataaataaaaawttatagaaactcttacattttgcaggttttccaaatctgttaatactgtttaaccttataacagttttatttactcttactttatgatcaagtatggtta

SEQ ID NO: 508845 - DNA, 201 bp, Homo sapiens
gtgtaaccagatgggaccttcaagtccaacactatcaaattataaagaagaatttcagtagcagctcggattacaacctcactcactccactgagccactstgagtattgcaaaacacttataggatgcaggtattggtaaggcgattctaatcaatgtcctaatgtgttttttcaaaagtgtattcttgcaaacctagtt

SEQ ID NO: 508846 - DNA, 201 bp, Homo sapiens
tgagctaataagtgtctggctgggcgcaggtgtggctgtccgtgtcaggttcatgcccacattctgctggccactcccatctgcttctgccttcttggctkctgcactttctgcctctgtctggctgccctggctcacagtcactgtttgggctgcaggcaagggctgcaccactcctgtacccttcctgggacagctccc

SEQ ID NO: 508847 - DNA, 201 bp, Homo sapiens
caccatcatctcttacctgaactactgcaatagcctcctaacttggctcactcttccactgtctgcaaggaataaccagagtgatcttttaaaaacatgtrtgaaatcacatcactcaggcggcttaaaataaaatccagacttctcaccagggctcagagaacctgcttgctgactccctctccactgcccctctcacat

SEQ ID NO: 508848 - DNA, 201 bp, Homo sapiens
tggcatgaacccgggaggtggagcttggcagtgagctgagatcacgccactggacgccagcctgggcgacagcgagactctgtctcaaaaaaaaaaaaaamaaaaaaaaaactaatctgtgtatatccatggtttatccttgggacaattcaaattcttacctaaatcaagccctgatacttccttccttcttaatcttta

SEQ ID NO: 508849 - DNA, 201 bp, Homo sapiens
catgaacccgggaggtggagcttggcagtgagctgagatcacgccactggacgccagcctgggcgacagcgagactctgtctcaaaaaaaaaaaaaaaaamaaaaaaactaatctgtgtatatccatggtttatccttgggacaattcaaattcttacctaaatcaagccctgatacttccttccttcttaatctttatgt

SEQ ID NO: 508850 - DNA, 201 bp, Homo sapiens
atatttccagtacacagcacagtgaaatggctccataaacgttacctgagtaagtgaagtaattctctgtaaggtctggctgaagaccttcatgtctccarataagtagcctacaagtatctctctattctgattttacttttaggccagttccagcttttctgttgtagtgagtagaatggagatataagctcagtttct

SEQ ID NO: 508851 - DNA, 201 bp, Homo sapiens
atgcatcagacaggctagtaacaggaaaggtgtacagcttattgtactcgttctccaaaggcttgcttctgatggtttttcaggcaatgatttgttttttktttgtttgtttttttggaaatgcggtttcactatgtttctttaggctggcctcaaactcctgggctcacaggatcctccggcttcagcctccctagtggc

SEQ ID NO: 508852 - DNA, 201 bp, Homo sapiens
ttacctgagtaagtgaagtaattctctgtaaggtctggctgaagaccttcatgtctccaaataagtagcctacaagtatctctctattctgattttacttytaggccagttccagcttttctgttgtagtgagtagaatggagatataagctcagtttctgctgggcggatcaaggaagttgcagggtccgtcagtattta

SEQ ID NO: 508853 - DNA, 201 bp, Homo sapiens
gatgtgtttattgtatcagttaatcatctcactaccttgtggcttgaaagtatatttcataggctaggaatagagaacagaaggaattacaacttgtagcygggcgcggtggctcacgcctgtaatcccagcactttgggaggccgaggcgggcggagcatgaggtcaggagatcgagaccatcttggctaacatggtgaa

SEQ ID NO: 508854 - DNA, 201 bp, Homo sapiens
tgaatgagtcctcaaagagtattgagcagtgcctttatctggaatgtattaaaatccagttgagcctcatggactttttgttagttttaatgtgatttagycagcaattatttaactgattaaatagtatttcaaagtttttacagatctaagatcctatactttctcaatatgtgtttatttggtataggtatgatgaca

SEQ ID NO: 508855 - DNA, 201 bp, Homo sapiens
tatagtaaaatgttttgaaccttctttctagaaaaatgtttgcatattcaaaatattgtatacagtgtttcacttttcacaaataatcctgaaactgattmatatattgtttttatttttatttttttcgagatggagtcttgctctgtcacccaggctggagtgcaatggcacgatcttggctcactgcaacctccacct

SEQ ID NO: 508856 - DNA, 201 bp, Homo sapiens
cagtgagccaaggttgcgccgctccactccagcctgggtgacagaggaaaactccgtctcaaaaaaaaaagaaaaaaaaacaaacccccaaaactatacatatatatatatatatatatatatatatacacacacacacatatatatatacacacatatatatatacatatatatacacacatatatatacacacatatat

SEQ ID NO: 508857 - DNA, 201 bp, Homo sapiens
agtgagccaaggttgcgccgctccactccagcctgggtgacagaggaaaactccgtctcaaaaaaaaaagaaaaaaaaacaaacccccaaaactatacatatatatatatatatatatatatatatacacacacacacatatatatatacacacatatatatatacatatatatacacacatatatatacacacatatata

SEQ ID NO: 508858 - DNA, 201 bp, Homo sapiens
gtgagccaaggttgcgccgctccactccagcctgggtgacagaggaaaactccgtctcaaaaaaaaaagaaaaaaaaacaaacccccaaaactatacatatatatatatatatatatatatatatacacacacacacatatatatatacacacatatatatatacatatatatacacacatatatatacacacatatatat

SEQ ID NO: 508859 - DNA, 201 bp, Homo sapiens
ctccagcctgggtgacagaggaaaactccgtctcaaaaaaaaaagaaaaaaaaacaaacccccaaaactatacatatatatatatatatatatatatatayacacacacacacatatatatatacacacatatatatatacatatatatacacacatatatatacacacatatatatatacatatatatgtaaaacaatgc

SEQ ID NO: 508860 - DNA, 201 bp, Homo sapiens
gccagcagattggattaaataggtatgagtacagcacagaagatacggatggctctcttcctctggactacaacaaatggccctagctgcccaccagaacwcttctttgcttgcagagctttgggatatgaaggcaagggaatgttacaggtagattgttcagcacccaactccctggcacaaaggataccaaagaaactg

SEQ ID NO: 508861 - DNA, 201 bp, Homo sapiens
aaaaagaaaaaaaaacaaacccccaaaactatacatatatatatatatatatatatatatatacacacacacacatatatatatacacacatatatatatmcatatatatacacacatatatatacacacatatatatatacatatatatgtaaaacaatgcttatcaaaaacattctgatacattaatagagaattttcc

SEQ ID NO: 508862 - DNA, 201 bp, Homo sapiens
atacatatatatatatatatatatatatatatacacacacacacatatatatatacacacatatatatatacatatatatacacacatatatatacacacatatatatatacatatatatgtaaaacaatgcttatcaaaaacattctgatacattaatagagaattttccttttaaaatgattaatagatattgttacta

SEQ ID NO: 508863 - DNA, 201 bp, Homo sapiens
cagctcactgcagcccccacctcctgggctcaagcaattctcccacctcagcctcccctgaaactacaggcacacaccatcatgcctggctaatttttgtwttttttgtagagacagggtttcaccatgttgcccaggctggtcttgaactcctgggctcaagtgatccacccacctcggcctcccaaagtgcggggatta

SEQ ID NO: 508864 - DNA, 201 bp, Homo sapiens
tacatatatatatatatatatatatatatatacacacacacacatatatatatacacacatatatatatacatatatatacacacatatatatacacacatatatatatacatatatatgtaaaacaatgcttatcaaaaacattctgatacattaatagagaattttccttttaaaatgattaatagatattgttactag

SEQ ID NO: 508865 - DNA, 201 bp, Homo sapiens
gggagtcttggaaccaatcccacacagatactgagggataactataccacatgaggagcgattaagtaattagaaaatcagccaccaggaaagggagaaamtcaattagtttatacagttccctttccagaaaagctactttttttttttttttttttgagacagagtttccctgttgttgcccaggctggagggcaatgg

SEQ ID NO: 508866 - DNA, 201 bp, Homo sapiens
atattttctctttcttggcttattgaaaagattttatatagtaaaagcatcataaaaaatgtttgatatgtcttaccctatatagttcagctgagggaaartaacatatattggtaataatgcagatatttgtagaagctacaatttatttggtgtggatggtccgtcactttctgtagtaattcatttaactaggacctt

SEQ ID NO: 508867 - DNA, 201 bp, Homo sapiens
aactagctattatattttggattatttaatgttaaatgcttacagtgtgtcagattctggagtacatacgtaagtggtggccactgtcctataagaatctrtgatgaaatagtaaaatagctaacatttatagagtgctttccacatgccagacactgtgctaaattcttgttgttgttgttgtttgtttttgtttttgtt

SEQ ID NO: 508868 - DNA, 201 bp, Homo sapiens
gatatgtcttaccctatatagttcagctgagggaaaataacatatattggtaataatgcagatatttgtagaagctacaatttatttggtgtggatggtcmgtcactttctgtagtaattcatttaactaggaccttttagaaaatgttgctaagattgatttgataataatttactaagcgttaatctggttgattccac

SEQ ID NO: 508869 - DNA, 201 bp, Homo sapiens
ctaaattttgtttttggtaaaaccataactagctattatattttggattatttaatgttaaatgcttacagtgtgtcagattctggagtacatacgtaagyggtggccactgtcctataagaatctatgatgaaatagtaaaatagctaacatttatagagtgctttccacatgccagacactgtgctaaattcttgttgt

SEQ ID NO: 508870 - DNA, 201 bp, Homo sapiens
ctgcctcggcctcccaaagtgctgggattacagacataagccaccacacctggccaaaaataactttagttaaaatgacagtcctgctctagatcattctrcaaaataaattatgtattttcatataagtcttaaatgcaaatttttcttttctttttctcctttcttttttttttttttttttttttttgagacagagtc

SEQ ID NO: 508871 - DNA, 201 bp, Homo sapiens
gaaaagcttgtgatataatgttcatggcttaaacaatgtaatgataacaatataaagtatatattcatgtaaacaaaaaccagtcatacaaaaatgaaaacagttattgttgttaacattgattattaatttttaaccttattgagatgttatctttttaattaaacagcaataggagttatttattaatcataccaattt

SEQ ID NO: 508872 - DNA, 201 bp, Homo sapiens
tgagggaggagagaaagggaaagaaaaggggacagggagagagaaaggaggctggaggagtacaagttctgtttgctgctaaggtgttaagacagactgtyctaaaattcctgtgcacatccttttgcttgtatttccactgttggtcacagatactctcagagtaataaaagtaaatatctagaatacaatgcattgtta

SEQ ID NO: 508873 - DNA, 201 bp, Homo sapiens
tctatcagactatgcaaagtcaaatttcagtcattatttctggccatcccaaaaggaggtgtctgcttcctgcaaactcctttagcacttctctcatctcyttcggcatttcttttttttttttgagacagagtcttgctccgtcacccaggctggagtgcagtggcgtgatctccatctcggctcactgcaatcttcacc

SEQ ID NO: 508874 - DNA, 201 bp, Homo sapiens
ccacaggcatgtgccaccatgcctggctaatttttgtattttttgtagagatggggttttgccatctctacaaagatgttgcctaagctgatctcaaactmctgagctcaagcagtccacccatccttggcctcccaaagtgctgggattacaggcagtgagccaccatgcctggctgcgccatttctttatagactaccc

SEQ ID NO: 508875 - DNA, 201 bp, Homo sapiens
atgttggaggtggggcttattgggagatatttgggttatgggggcagatccctcgttaatggcttggtgccctcctagaggtaatgggtgagttctccctytatgagttcccacaagagctagttgttaaaaagagtctggcaccactcccctaccctcttcgttcctctctcttgctatgtgatctctaattggctagcc

SEQ ID NO: 508876 - DNA, 201 bp, Homo sapiens
atgcccggctgatttccatgacaaggtttgctctggcagcctgaactgtaacactcccccagcagttcataaccagctccctcactcatcctgtgggtaastctgggtcatgctctctacactgagtcccagggttctgcagcaagatgcagctacagttgctcacagtggcagctggattgatagctcacccttttctta

SEQ ID NO: 508877 - DNA, 201 bp, Homo sapiens
gtggttttcaaaagagcgtagagacggtggagaccatgatctgaattcaaataagcagaacatttagtcaagactgacagaatatcatgtcacgttagttmttgaagggaccttagacatatttatggtaaagagactgaggctcagagattaagggccctctcagattacatttgatcagcagtagacacctgactagtg

SEQ ID NO: 508878 - DNA, 201 bp, Homo sapiens
caggaggctgaggtaggagaatcgcttgaacccaggaggcagaggttgcagtgagctgagcactgcactccaacctaggcaatagagcgagactccgtcamaaaaaaaaaaaaaaaaaaaaaagggcagtggaggggatgtttttatttcttaaattatattttagtttatatatagtcaaggctttgaaatgaatcattt

SEQ ID NO: 508879 - DNA, 201 bp, Homo sapiens
ctctgtctcaaaaaaaagaagaaagcaagctctgacaatcctacctttctctagctctcttccccttccctactttactcagagtcttagagtagacccamttccacaattagcaccatactaaggacggaaacagtatctttctttctcctgatccatatttatctatgggattcaatattgtgtcttgtaaagactaaa

SEQ ID NO: 508880 - DNA, 201 bp, Homo sapiens
ttcaatcactaatatttgtacattgtgacaaactattaatcataccaaaaataatagaaatagccctttgagaacaatggttcacattgttctccgatcayataaaatgtctctagtgtacgcaacttaaaaatggcacacaactgaattaaaatattttaggagattagataatttaattatgtgctacttggcttggga

SEQ ID NO: 508881 - DNA, 201 bp, Homo sapiens
acaaaaaagttttactttaattaccttttaacgcctcaccagtgacaacattatttatactggcatttaattttttaaatatgtaaatcaatctttttgctttttttttttttagtttccacatcaggatacaaccctatttggaaactgttctggatactggaaaaaagatttattacagttagtcagcttgaaccgcaa

SEQ ID NO: 508882 - DNA, 201 bp, Homo sapiens
tgcgtcgggactgctcatggtcaaactctaagtcctccagcctctgggtcagggcgagtttttgctggatagccattcgtaacaaagtgttcagagtcttyttctcatcctctgcagctgctaactgtctctgcatctcatccaactgggtgacatattcatcacatctggaaccaaaacagagaagtggtcagaggaaaa

SEQ ID NO: 508883 - DNA, 201 bp, Homo sapiens
ctgtctctgcatctcatccaactgggtgacatattcatcacatctggaaccaaaacagagaagtggtcagaggaaaatcttggtgaaactgaatttgggasttaagctgaaaagtaataaatttgaccgaaatttagaaatttagaagactggtttaaaggtctagcaatagaatgtagataacccacaatagcagaaaac

SEQ ID NO: 508884 - DNA, 201 bp, Homo sapiens
gtaatcaatgaatgcttgttcacaaattagtctctgttggttggccaagtgtccttatctatacctctgtttcagttaagcatcttgattttttttttttwaagacagattttcgctcttgttgcccaggctggagtgcaatcatgcaatctaggctcaccgcaacctccgccccccggggttcaagtgattctcctgcct

SEQ ID NO: 508885 - DNA, 201 bp, Homo sapiens
ccttttaatcttgctatacttggctgggcgcggtggttcatgcctgtaatcccagcactttgggaggccgaggtgggcggatcacttgaggtcaggagttygagaccagcctagacaatatggtgaaattctgtctccacaaaaagttagccaggcatggtggcacatgcctgtaatctcagctgcttcggaggctgaggc

SEQ ID NO: 508886 - DNA, 201 bp, Homo sapiens
tcttgctatacttggctgggcgcggtggttcatgcctgtaatcccagcactttgggaggccgaggtgggcggatcacttgaggtcaggagtttgagaccascctagacaatatggtgaaattctgtctccacaaaaagttagccaggcatggtggcacatgcctgtaatctcagctgcttcggaggctgaggcatgagaat

SEQ ID NO: 508887 - DNA, 201 bp, Homo sapiens
atggtggcacatgcctgtaatctcagctgcttcggaggctgaggcatgagaatcgcttgaacccaggaggcggaggttgcagtgagcagagatggcgccastgcactccagcctggacaacagagcgagactctgtctcaaaacaaaaataaaaaaaaataataataataattttgctatactcctagaaattgagtcttg

SEQ ID NO: 508888 - DNA, 201 bp, Homo sapiens
ttgaacccaggaggcggaggttgcagtgagcagagatggcgccactgcactccagcctggacaacagagcgagactctgtctcaaaacaaaaataaaaaawaataataataataattttgctatactcctagaaattgagtcttgaatctgaacctccagctccaaagctggggtccagttattggccatcagaccttctt

SEQ ID NO: 508889 - DNA, 201 bp, Homo sapiens
aacccaggaggcggaggttgcagtgagcagagatggcgccactgcactccagcctggacaacagagcgagactctgtctcaaaacaaaaataaaaaaaaawaataataataattttgctatactcctagaaattgagtcttgaatctgaacctccagctccaaagctggggtccagttattggccatcagaccttcttcac

SEQ ID NO: 508890 - DNA, 201 bp, Homo sapiens
cttctttttaaaaaataaaccatcatgagatctgctttaagagcaatgaattgatgctgaatgtcttcatatctaaaggaaagtatctattcaaactttcttttttttttttttttttttttgagatggagtctcactctgtctcccaggctggagtgcagtggcgcaatctcggctcactgcaagctctgcctcccaggt

SEQ ID NO: 508891 - DNA, 201 bp, Homo sapiens
tttttccactatcaagttttcgcagtcctctgcttgactttgactttttaccaaatgcacatgatggtggctctctctcttgctatatagcaagctctgawtagatagcctttatttgttctcctgtaggtggtctttatttccatacaatcaagtctaagctgctacctggactatctcaagcctcctaaatggtctcac

SEQ ID NO: 508892 - DNA, 201 bp, Homo sapiens
atttaggacccacaggagaaagccaaatatgcacccctaaccaatcccataggatgcgcctcttctagttagctgcctacagcttctccaggtcgacagcstccaatcagggtagacctgaaactttttgctttttccactatcaagttttcgcagtcctctgcttgactttgactttttaccaaatgcacatgatggtgg

SEQ ID NO: 508893 - DNA, 201 bp, Homo sapiens
ccccctccccgccatcccccagcagtgactgtggtacagagacagaatcgatgagcttgagggcgggagagcacagtgactgtgggacttggctttagaaygcagtgctgcccaatcacaggggaaagcacacagggcagaactcagccagtgcccatggagggagcatttagaccagcgttagccaggggtgaactgccc

SEQ ID NO: 508894 - DNA, 201 bp, Homo sapiens
aggcaggcagatcatgaggtcaggagatggagaccatcctggctaacatggtgaaaccccgtctctaccaaaaacacaaaaaatcagctgggcgtggtggyggatgcctgtagtcccagctactcgggaggccaaggcagtagaatggtgtgaactcacgaggcggagcttgtagtgagccaagatcgcaccactgcactc

SEQ ID NO: 508895 - DNA, 201 bp, Homo sapiens
ctccccgccatcccccagcagtgactgtggtacagagacagaatcgatgagcttgagggcgggagagcacagtgactgtgggacttggctttagaacgcartgctgcccaatcacaggggaaagcacacagggcagaactcagccagtgcccatggagggagcatttagaccagcgttagccaggggtgaactgcccatcc

SEQ ID NO: 508896 - DNA, 201 bp, Homo sapiens
cgggtgggatgatcgcttgaacctgggaggcggaggctgcagtgagccgagatcacgccactgcactccagcctgggcgacagaatgaggctttttctttaaaaaaaaaaaaaaaggaaaaaaaaaggcacatttatctcaccttccctcctattctgggaatgctaacatcctcagggaatctcccatattggtccccta

SEQ ID NO: 508897 - DNA, 201 bp, Homo sapiens
aaatttttgaaaaaaaaaaaagacctaaatggaaatgaaaacaaagttttcacctctacaactttaggcaaccaccacaagtactgagcattgtttcttakgaaattggaaaagagagttagtgtctatcagaaactgtacatattaaatatttttgtaggttttttcagttttgcttttttagagacagggtctctctct

SEQ ID NO: 508898 - DNA, 201 bp, Homo sapiens
ctaggcaacatagtgagactgtctctatttaaaaaaatttttgaaaaaaaaaaaagacctaaatggaaatgaaaacaaagttttcacctctacaactttakgcaaccaccacaagtactgagcattgtttcttaggaaattggaaaagagagttagtgtctatcagaaactgtacatattaaatatttttgtaggtttttt

SEQ ID NO: 508899 - DNA, 201 bp, Homo sapiens
cagtagggacctgggtgcctgagccacatccttgttgcttgttaccatgttttgatgttgggccataagccctaagagaaaagctagaagactcaacccastggaagtgattgtattcgtctgtgctcacactgctaataaagacatacctgagattgggtaatttatcaaggaaaggggtttaactgactcacagttcag

SEQ ID NO: 508900 - DNA, 201 bp, Homo sapiens
ctgcaagctccacctcccaggttcacgccattctcctgcctcagcctcccgagtagctgagactacaggcacctgccaccacgcccggctaattttttgtwttgttagtggagacagggtttcactgtgttagccagggtggtctcgagctcctgacctcatgatctgcccgcctcggcctcccaaagtcctgggattaca

SEQ ID NO: 508901 - DNA, 201 bp, Homo sapiens
ccaaatcaattcagacttgatttctcataagacaaaaaaaaaaaaaaaagaaagggagaccagagtaatgcaaggttttgaacttgggtccttaggaaaayacctggaagaaaaatatttaccttggaaataatttcagattaaaaaataatcttttgaccgggtgtggtggctcacgcctgtaatcccggcactttggga

SEQ ID NO: 508902 - DNA, 201 bp, Homo sapiens
tgtttatctttgttggcaaaatgcctgtccagatcctttgtctattgtttgagttagttatcattttattactgaatgtatgggttctctgtatactctakatacaagccccttatcagatatttgatttggaatgattttctctcatccaggggattgtccttttacatttttaaatggtcctttagccgggcgcagtgg

SEQ ID NO: 508903 - DNA, 201 bp, Homo sapiens
tccttacatcttggaaggttctaattatgtattttcctagaagtggaagaaaagaagtcacttctcatctgttggtctccttccttttcctggagcctgcrtctccaagcagagaagggtattttgtggcacctcaaaagagaagcaataaaacattacacatatccatgcacccagtaccctgaagggttccaaagccat

SEQ ID NO: 508904 - DNA, 201 bp, Homo sapiens
taattgcttcacctttctgtttcacttaaatggggagcttcacattcaggaatacacaaaggatgcagttggtacactttattatttttgccaaaaagcayagaactctaaaaacagcagggtttataaccacagaacatgacataacaatgctaaatggaattttctgccaagttcttgagttttcagtttttgttcctt

SEQ ID NO: 508905 - DNA, 201 bp, Homo sapiens
tagatataaccacatgtaacacaactctaaaaaaaggactggaaaaatgatttctatttgaaatgcttacctcaattaaaaaatgagtttatctttactaygtaattatgttcccctcacatgaactgaagaggttaatacatctccagatattaaaggacacatgagatagaaaactacattgcccccacccacttccaa

SEQ ID NO: 508906 - DNA, 201 bp, Homo sapiens
tcagagaaatgtaaatcaaaactacaatgagatattatctcaccccagttaaaatggcttttttccaaaagacaaacaataataaatgctggtgaggatgyggagaaaagagaaccctcatacactgttggtgggaatgtaaattagtacaaccactatggagaacagtttggaggtttctgaaaaaaactaaaaatagag

SEQ ID NO: 508907 - DNA, 201 bp, Homo sapiens
aataaattttagtaattgcaagtgtatttaggcaggtccgagtgcagtggtgttgataactaattcattacaatcagttacagatttctttgttccttctccactcccactgcttcacttgactggcctttaaaaaaataaataaataataaattaaaaagagaaactatatttagtgttaggtaaatataacatggctct

SEQ ID NO: 508908 - DNA, 201 bp, Homo sapiens; identical to SEQ ID NO: 82384

SEQ ID NO: 508909 - DNA, 201 bp, Homo sapiens
cagtccagtgaaatcacaagaaccataaccaaactctcatttgtgaaagtggactcacactttcgacagggaattcccttctttgggcaggtggagtattytccagttcactcatcaacccatgtactgttacctaattagcacaatagttatggtttgtgctaaaaccatgcctggttaatgttatcatttaatataacc

SEQ ID NO: 508910 - DNA, 201 bp, Homo sapiens
gtgagagccacccccctctccctttgtgccctccgtgctgtagaccagagtgtgctgctaatgaagcctgaagctgagctgtcacctaaatctgtgagtcmcgttccaaccttggagatcatgaaatgctcacgtgataagatcatttttggaagttaaaagttccaaaaatgtttgcaaaaaacaagttcttcagagtaa

SEQ ID NO: 508911 - DNA, 201 bp, Homo sapiens
gtctgagaagggaagaaaatcctgtcacatgctacagcatgaatgatccttgaggacgttatggtaagtgaaataagctagtcacaaaaagaccaatactrtatgattcacgtacatggggtttctaaagtagtcaaagtcatagaaacagaaaacaggatggtggttgccaagggctagggaaagagagaaatggggaat

SEQ ID NO: 508912 - DNA, 201 bp, Homo sapiens
aaggaattaactaaaacctctgtgcttcatttccttatctgtaaaatgattgcaatactaacacctgactcttggggtggttgtgaagattaagtgaaatmatacatgttgaatcacttagtaagccccctttaactgttagatacttttactataaaagccaattctaacataattagcatttagttttaaatatatata

SEQ ID NO: 508913 - DNA, 201 bp, Homo sapiens
tcaaaaagtgtcttgaatgctttccacgtgccagcactgtgctagtcttgacaatgaaattattatttctacctgttccctgtttggggtgatcatatatrtgttgtcaccaaaatatacattaagatatgaacaaaatgttttgctcaaggattcactagtgctattgggagctggggatgaaggtagaggaagcctgaa

SEQ ID NO: 508914 - DNA, 201 bp, Homo sapiens
tggactacgaaattgtcgctgaaacctgggtttgagataacagcggttttgagaagtttgatttatacattccaacccacttgaatgtcgtcttagagtgmtgagacttgatgactcttactaatctccctcccccgcaggccaaacagccattgcctcccaaattccagcttatatattcatttcttaggcaatttttct

SEQ ID NO: 508915 - DNA, 201 bp, Homo sapiens
gagcattaaaaatagtcagcctaggccaggcacggtagctcacgcctgtaatcccagcactttgggaggctgaggtgggtggattgcgtgaggccaggagwtcgagacgagcctaggcaacgtggtgaaaccctgtctctacaaaatatacaaaaaattagctgggtggggtggcatgcacctgtagtcctagcaactcag

SEQ ID NO: 508916 - DNA, 201 bp, Homo sapiens
ctttctggtttgcacttccctatcttggcaaagcagtgttgataggtatagacaatatcaaaacatctctgagaatgacagtcatcatcctgcttcctcayttcacaaggtttagcatcactgcatttaaacatgtcagcctaatctaagttggaaaatataaacaagtccagctgttgttaagaccagacaggtacatgg

SEQ ID NO: 508917 - DNA, 201 bp, Homo sapiens
gccaagattgtgccactgtactccagcatgggcgccagagcaaaaccctgtctcaaaaaaataataataatagcaatcagcctaagatagcccagaagagstagacttcagctaattcatcagctcagctcttaaaccaatgctttctaccaatgtcttctcagacccctaaggttacaatattttatttattcataatac

SEQ ID NO: 508918 - DNA, 201 bp, Homo sapiens
gcttaccactttctggtttgcacttccctatcttggcaaagcagtgttgataggtatagacaatatcaaaacatctctgagaatgacagtcatcatcctgyttcctcacttcacaaggtttagcatcactgcatttaaacatgtcagcctaatctaagttggaaaatataaacaagtccagctgttgttaagaccagacag

SEQ ID NO: 508919 - DNA, 201 bp, Homo sapiens
aaggatgcctccttttatgctcttaagaaatataaatctcaatcccaggaggctctgcagtgtaaagtcacaaagcatgcctacatttgaagcagagaaasaaaatcaggggtccttctcccacttttcattgtggaacaaaagatttctagctactagttaaggtaggacagtaaacttacgtagttttgtgagaacatt

SEQ ID NO: 508920 - DNA, 201 bp, Homo sapiens
atggcttaccactttctggtttgcacttccctatcttggcaaagcagtgttgataggtatagacaatatcaaaacatctctgagaatgacagtcatcatcstgcttcctcacttcacaaggtttagcatcactgcatttaaacatgtcagcctaatctaagttggaaaatataaacaagtccagctgttgttaagaccaga

SEQ ID NO: 508921 - DNA, 201 bp, Homo sapiens
gaaacgttgggaaatatgtaagcaagtttttaagactactaaggagccaaaagaaaaatgcaagagcacctagacccatgcatgtcccaccacaattaatragcaccttgccgtgtatcaaagataaaaatggcatttcatgactagtaatttataagaataattagaaataattctactggctcaagtgattcttgagaa

SEQ ID NO: 508922 - DNA, 201 bp, Homo sapiens
tggtgtagcaaaggcaaaacacaattgcattaaggtttgctatgcaaggtaagtgcaatgacagaaatatccctagaaggattgtttaaatcaagcagcaragtcagtaagaggtacatttcattaaattaagtccatctcctttatcaagaaggtgatggcttaccactttctggtttgcacttccctatcttggcaaag

SEQ ID NO: 508923 - DNA, 201 bp, Homo sapiens
atctcctcttcccctctgaaataagattatgtaagtatttgggccccattgggatactgggcaatcattctgtgattctcacgtgtgcacgttaataaatstgtatgctttttctctatgtgcctttttttttcttttgagatggagtctcgctctgtcgcccagtctggagttcagtggcgcaatctcggttcactgcaa

SEQ ID NO: 508924 - DNA, 201 bp, Homo sapiens
ataagattatgtaagtatttgggccccattgggatactgggcaatcattctgtgattctcacgtgtgcacgttaataaatctgtatgctttttctctatgygcctttttttttcttttgagatggagtctcgctctgtcgcccagtctggagttcagtggcgcaatctcggttcactgcaacctccacctcctgggttcaa

SEQ ID NO: 508925 - DNA, 201 bp, Homo sapiens
ggagcccctttctgggctggccaaggccggagcccactcccttagcttgcagggaggtgtggagggagaggcacgagcgggaaccggggctgcctgcggcrcttgcgggccagctggagttccgggtgggcgtgggcttggtgggccccgcactcgggcagccagtcagccctgctggccccaggtaatgggggacttagc

SEQ ID NO: 508926 - DNA, 201 bp, Homo sapiens
cctgggctcccagtttggtggcatttgaggatcccttcagcccccccactgcactgtgggagcccctttctgggctggccaaggccggagcccactccctyagcttgcagggaggtgtggagggagaggcacgagcgggaaccggggctgcctgcggcgcttgcgggccagctggagttccgggtgggcgtgggcttggtg

SEQ ID NO: 508927 - DNA, 201 bp, Homo sapiens
agagaataggctgtaaaatgtttcttatcagactgaattctgtgttgatattaatgccggagaggtataacaaggcatgtctgaccacccccttccatcayggcccgaaccagtctttcaggttaaattttaaaagtgccctggccaggagaaagtccattcagatggttggggggccttagaattttatttttggtttag

SEQ ID NO: 508928 - DNA, 201 bp, Homo sapiens
gaggcaggagaatcgcttgaacccgggaggtggaggttgcagtgagccgagatcatgccactttactccagcgtgggtgacacaacgagactctgtctcaaaaaaaaaaaaaaaattaatactactcagtattgttgtgactgtatggaaatagggacacacacagtcctagagaaaatagaatgtggataactttctcat

SEQ ID NO: 508929 - DNA, 201 bp, Homo sapiens
agtttaagaccagcctgaccaacatagtgaaaccccgtctctactaaaaatacaaaaattggccaggtgtggtggcacatgcctgtaatcccagctactcrggaggctgaggcaggagaatcacttgaacccaggaggcggaggttgtggtgagccgtgatcacgccactgcactccagcctgggcaacagagcgagactc

SEQ ID NO: 508930 - DNA, 201 bp, Homo sapiens
gggaggttcagactcttggagccagaggctgcatgacctctaaactgtaatttctttttttttttttttgagacagagtctggctctaccgcccaggctgragtgcaatggcgcgatctcggctcactgcaagctccgcctcccgggttcacgccattctcctgcctcagcctcccgagtagctgggactacaggcgcccg

SEQ ID NO: 508931 - DNA, 201 bp, Homo sapiens
caaagcattttttttccccaagcaagagttatattcacctcaaacctattattggtactttgacctgtggacaaacccaggagattcaagcacactacatyctgaataaacagattctcagggatgaaaaagaattaaccttctactatttggtaagaataagacccactgtagctccttctgattgtgtagactccaaaa

SEQ ID NO: 508932 - DNA, 201 bp, Homo sapiens
taaacagtgatattactttattggcctgagaggagcctgatggaaagagcctgattacagttctcatgtttcaaggaatattgtatggtaggcctataatytgtcatttttacagacaatgtaaagatgaaaagcaacttaattgcgttatttaggtacagtagaaatctgaatttgtattattgttaccggtggatggag

SEQ ID NO: 508933 - DNA, 201 bp, Homo sapiens
gaggcaggaaaatcacttgaactggggaggtggaggctgcagtgagctgagagcataacattgcactccagcctgggcaacaagagcgaaattccgtctcaaaaaaaaaaaaaaaaaagaaaagaaaggggttggggaaagtgatacaaaacgacatgtggcaagttccactttaacttggaatttgaaaggctagaaaga

SEQ ID NO: 508934 - DNA, 201 bp, Homo sapiens
tgatggtctctggaggctctgtttgatttggacacagggaaaaccagtatattcaattgagttttgggtcactctaccactctacataaactccataaactttttttttttgagacaggatctcgctctgtcacccaccctggagtacggtggcgtgatctcagctcactgcaacttccacctcccaggttcaagagattc

SEQ ID NO: 508935 - DNA, 201 bp, Homo sapiens
gtggcgtgatctcagctcactgcaacttccacctcccaggttcaagagattctcctgcctcagcctcctgagtagcagggattacaggtgcgcgccaccaygctggggtaatttttgtatttttagtagagacagggtttcaccatggcctcccaaagtgttgggatgaccggcatgagccactgcggtcttgttttcctt

SEQ ID NO: 508936 - DNA, 201 bp, Homo sapiens
gaaaaatgactggataagtaggataagatcaattaaaattatatttatctaggaattaattgctttgagctctcttgtgggctttcattggtaaggaattwtatatatatatatatataactactcacttctgcagttaaaaaaataaacaaaatacaatatattgaatcaaataaaagaatttttaaaaggacaaaatgt

SEQ ID NO: 508937 - DNA, 201 bp, Homo sapiens
atttgaaatggataatcccaaattacattcataggtttgacattagaatgaagataagccctcattttgagccaagtttaggttcaagctcacaataaaattttttttttttcttgagacaggttctgactctgtcatccagactggagtgcactggtgcaatcttggctcactgcagccttgacctcccatgctctagcg

SEQ ID NO: 508938 - DNA, 201 bp, Homo sapiens
catcctctcccccgtttccttaacattgcagctagaatatttcactggcatctcaaatgcaacatatccaaaactgaattcattattcgtcccaccagtcttttgtcagtgaatggtacaaccatccacctacttgccaagtccaacaatgtacacatcaccctgaaagttctcacttactcaccctctcccatatataat

SEQ ID NO: 508939 - DNA, 201 bp, Homo sapiens
ctgaggcaggagaatcacttgaacccaggaggcagaggttgagtgagccgagatcgtgccactgcactccagcctgggcaatagagcaagacttggtgtcaaaaaaaaaaaaaaaaaaagaattacatcagttgaaataattgctgtcccaagctacacataatttctgagggaacatatgtattatctctgaggaacaaa

SEQ ID NO: 508940 - DNA, 201 bp, Homo sapiens
caattgtaataacctcttactgaagctttttctactaccataatttaacaaagagaaatttatatttttattttcctgaaatagaaacttataaaaaaatrtttcttacttgtttgtccttctaatgggattttaactgaaaatattagaatacttctaaaggaagcatcaagtacatttcaacagtaggatctcaagagg

SEQ ID NO: 508941 - DNA, 201 bp, Homo sapiens
taatgggattttaactgaaaatattagaatacttctaaaggaagcatcaagtacatttcaacagtaggatctcaagaggatatgtgggaaaataatatacrtgttttatacttttataatataattttataattctcaaagaatttttcaaattataacaaccctgatgggtagataaggcagacagtcctatttattaat

SEQ ID NO: 508942 - DNA, 201 bp, Homo sapiens
agtcccagctacttgggaggctaaggcacgaggaatcgctcgaacccaggaagaggaggttgcagtgagccgagattgcaccactgcgctccagcctggcracagagcgagactccgtctcaaacaaacaaataaacaaaaaaaccctttgtgcccaccgtatgctagcgtaaaagtaatctgaatttgaaagtcaatcag

SEQ ID NO: 508943 - DNA, 201 bp, Homo sapiens
ccattagctcacattgttacctatttttgtgtgcatagcaagcacacctaaaatctatcctcttagccaagtttcagtatccaatacagtattatcaactrcagtcctcatgctgtactttagatttctaaatttattcatcctacgtaacttcaactttgtaccctttgacctgcttcttcccatccctgcaaccccaac

SEQ ID NO: 508944 - DNA, 201 bp, Homo sapiens
tctccatactgttttccataatggctgtggcaatgtacatttgcaccaaggggagtgaacaaattccttccagagagacactggaaacagagttttatccstgaaacaagccagtggggcaggtggagagaaagagccggaatggccatatactccctttcaggctcctggagtcttgtttacttctccctttcactccca

SEQ ID NO: 508945 - DNA, 201 bp, Homo sapiens
  misc_feature (1)...(201): n = A,T,C or G
tttatgcaaacctacaccttttcctctttcacttaccatccatgctaccctcagggtaccatttacaccaccttcccacatccccagggtcacccaaactntgagcttctcgggttttcttccctaatcggtctcattttcttcacacttcaccagtgctttaaaaatgcagctttgtctcgtaaatacctgccttttgaa

SEQ ID NO: 508946 - DNA, 201 bp, Homo sapiens
gtagccatcaagtaaattaaaagttgcattcctaggaatactgcaaactcttgtatgcaaaatatgcttactagatattcatgattgtaaaagttacaggttttgagatctccaaataccaaattgcaccataaagcaagtttctagcccttataacccttcaaagttagtatttgtgtggtatgaagaattctgacaggg

SEQ ID NO: 508947 - DNA, 201 bp, Homo sapiens
ggaatcaaaatcactgctaatttacccacaaaactgtccatcttttcccctggtatcattcccctgggtctgctatggggcatccaaattccatcagtttyttttatgcaaacctacaccttttcctctttcacttaccatccatgctaccctcagggtaccatttacaccaccttcccacatccccagggtcacccaaac

SEQ ID NO: 508948 - DNA, 201 bp, Homo sapiens
aataaaacaaaagtttacagagcattgaacatttctaaatcttgagtttggaggcatggaggaaggggaagatgctattcatttctactggcctttttttwcaggaaatgtgaatttcactgtgagcgcagaggcactagagtctcaagagctgtgtgggactgaggtgccttcagttcctgaacacggaaggaaagacac

SEQ ID NO: 508949 - DNA, 201 bp, Homo sapiens
ggaggagtaataaagactttctcagacaaacgaaagctgagggagttcatcacctctagatttgtcttaccagaaatgctaaagagagtttttcaactgaragaaaaggacactaaacagcaacacaatatcaagagaaggtatgaaactgattggcaaaggcaaatataaagaaaaacacatgatactgtattactgtaa

SEQ ID NO: 508950 - DNA, 201 bp, Homo sapiens
agatttgtcttaccagaaatgctaaagagagtttttcaactgaaagaaaaggacactaaacagcaacacaatatcaagagaaggtatgaaactgattggckaaggcaaatataaagaaaaacacatgatactgtattactgtaatgctagtaagtcacttttacttccagttaaaagttaaaagagaaaagtattaaaaat

SEQ ID NO: 508951 - DNA, 201 bp, Homo sapiens
aaataaagtgtgtagggacagatgataaagggcaaagtttttgtatgtgattaaactgaagttgttatcagcttaaaacagactgctataactacaagatsttttgtgtagactccaaggtaaccccaaaaagtctataaaagttacacaaaagacagagatttaaaaatcaaagtatattggtacacaaaaaaacaataa

SEQ ID NO: 508952 - DNA, 201 bp, Homo sapiens
accctaacccataactccacccatttctccgctggacttacctcattcacagggatcagaatactgaattgttgcctgttcatctgtgaaatgaaataagwcatattattactttgagggcctcctatattcagagggaaaatgcttcagaaaagctactgcttgagccccttccagagaatctctacaggttatgagcat

SEQ ID NO: 508953 - DNA, 201 bp, Homo sapiens
gctattctgtaaaggggttagcgtgcttggatttgctctgggtatcagaatcctgacttgagacttttagcttagatagacaccataatatgttacttcgmaggcttcttacacttggacctttattgtaaataatagaagtatttctggagtaagaattacatcaattatatattatcatgttatgctacatattaggca

SEQ ID NO: 508954 - DNA, 201 bp, Homo sapiens
ttagcttagatagacaccataatatgttacttcgaaggcttcttacacttggacctttattgtaaataatagaagtatttctggagtaagaattacatcamttatatattatcatgttatgctacatattaggcataacatatatatatatatatatatatatatatatatatatatagtttttgtttgtttgttttttga

SEQ ID NO: 508955 - DNA, 201 bp, Homo sapiens
cttcttacacttggacctttattgtaaataatagaagtatttctggagtaagaattacatcaattatatattatcatgttatgctacatattaggcataayatatatatatatatatatatatatatatatatatatatagtttttgtttgtttgttttttgagacagagtttcactcttgttgctcaggctggagttcaa

SEQ ID NO: 508956 - DNA, 201 bp, Homo sapiens
tttattgtaaataatagaagtatttctggagtaagaattacatcaattatatattatcatgttatgctacatattaggcataacatatatatatatatatatatatatatatatatatatatagtttttgtttgtttgttttttgagacagagtttcactcttgttgctcaggctggagttcaatggcacgatctcagctc

SEQ ID NO: 508957 - DNA, 201 bp, Homo sapiens
tattgtaaataatagaagtatttctggagtaagaattacatcaattatatattatcatgttatgctacatattaggcataacatatatatatatatatatatatatatatatatatatatagtttttgtttgtttgttttttgagacagagtttcactcttgttgctcaggctggagttcaatggcacgatctcagctcac

SEQ ID NO: 508958 - DNA, 201 bp, Homo sapiens
ttgtaaataatagaagtatttctggagtaagaattacatcaattatatattatcatgttatgctacatattaggcataacatatatatatatatatatatatatatatatatatatatagtttttgtttgtttgttttttgagacagagtttcactcttgttgctcaggctggagttcaatggcacgatctcagctcacga

SEQ ID NO: 508959 - DNA, 201 bp, Homo sapiens
gtaaataatagaagtatttctggagtaagaattacatcaattatatattatcatgttatgctacatattaggcataacatatatatatatatatatatatatatatatatatatatagtttttgtttgtttgttttttgagacagagtttcactcttgttgctcaggctggagttcaatggcacgatctcagctcacgaca

SEQ ID NO: 508960 - DNA, 201 bp, Homo sapiens
ttctggagtaagaattacatcaattatatattatcatgttatgctacatattaggcataacatatatatatatatatatatatatatatatatatatataktttttgtttgtttgttttttgagacagagtttcactcttgttgctcaggctggagttcaatggcacgatctcagctcacgacaacctccgcctcctgggt

SEQ ID NO: 508961 - DNA, 201 bp, Homo sapiens
gtaagaattacatcaattatatattatcatgttatgctacatattaggcataacatatatatatatatatatatatatatatatatatatatagtttttgtttgtttgttttttgagacagagtttcactcttgttgctcaggctggagttcaatggcacgatctcagctcacgacaacctccgcctcctgggttcaagtg

SEQ ID NO: 508962 - DNA, 201 bp, Homo sapiens
tgggaggcagaggttgcagtgagccgagatcgtgccactactccagcctgggcaacaagagcaaaactccatctcaaaaaaaaataaacaagcaaagtatrtacatatatacaaactatatacatacacatatatagtttgtttcatgtgcgtccgtgtgaagagaccaccaaacgggatttgtgtaagcaataaagcttt

SEQ ID NO: 508963 - DNA, 201 bp, Homo sapiens
atccttgtcttgttccagatcttaaaggaaagtctttcaattttccactgttaaatatgtaagctataggtttatcatacatgccctttattgtgttgagraacattgcttgtatatctaatttggtgagagttttatcataaaagagcattgaattctgtcaaatactttttctccatctaacaagatgatggtatggtt

SEQ ID NO: 508964 - DNA, 201 bp, Homo sapiens
ttctgtaaatgtaatgtatcacatttattgatatgcatatgttgaacaatttttgcatctcagggataaatcccacttgactaggtagatgatccttttamtgtattgttggatttagtctgctagtttatttcgtgtggttggttggttggtttagttttttaagtgatgagcttttgctgtgttccccaggctggactt

SEQ ID NO: 508965 - DNA, 201 bp, Homo sapiens
cagacaagaaaagagggtgacttagattagagtggtaagcgtaaagatcaaaacaattactttctgactcaggaggctgaggcgggaggattgcttttacycaggagtttgaggctgcagtaaactgtgattgtaccactgcacttcatcctgagtgatagagcaagacctcacctctaaaaaagaaaaaaaaaaagaagc

SEQ ID NO: 508966 - DNA, 201 bp, Homo sapiens
tgctagtttatttcgtgtggttggttggttggtttagttttttaagtgatgagcttttgctgtgttccccaggctggacttgaactcctgagttcaagcartcctaccacctcagccacccacaggtgtatgccaccatgcttagctgctatgctagtattttattgaggatttttgcatctatattcatcaagaatattg

SEQ ID NO: 508967 - DNA, 201 bp, Homo sapiens
aatttctctttcatttctgattttatatatttaaggcctccctcttttttcttagctaacctagctaaaagtttttgtctgtctttttaaaaaaacaattyagtttcattgatcttttgtattctttttctagtctctatttgatttatttctgctctaatctttattattttcctttcttctgccaattttgagcttact

SEQ ID NO: 508968 - DNA, 201 bp, Homo sapiens
atttctctttcatttctgattttatatatttaaggcctccctcttttttcttagctaacctagctaaaagtttttgtctgtctttttaaaaaaacaattcrgtttcattgatcttttgtattctttttctagtctctatttgatttatttctgctctaatctttattattttcctttcttctgccaattttgagcttactt

SEQ ID NO: 508969 - DNA, 201 bp, Homo sapiens
agtggtagataacgtaaatacagtcatccctcagtctgggtgagggtgtgggggttccaggaccccctgcagataccaaaatccacagatgctcaagtctytgagataaaatagtgtagtatttgcatgtaacctacacacatcctccagtatacattaaatcatctctagattacttataatacctaatacgatgtaaat

SEQ ID NO: 508970 - DNA, 201 bp, Homo sapiens
tcagtttcattgatcttttgtattctttttctagtctctatttgatttatttctgctctaatctttattattttcctttcttctgccaattttgagcttastttgttcttcttttcctacttctctgaggaatatcattagtatctttattggaaatttttcttcttttttggtgtttattgttataagctttcctcttag

SEQ ID NO: 508971 - DNA, 201 bp, Homo sapiens
atttggagtctttccatttcccatgggtgacattgggcttggagtagaattaattacacctaagtccaatgaggacatcagtgatctgtgaataggacttmacatagcttcgttattttctgtagcaatatttaataccaacccccaaaattaaaacattcttgttttaatggagttttccataattaattaagcacacag

SEQ ID NO: 508972 - DNA, 201 bp, Homo sapiens
acgctgtatctccagcaagtggcaccatgcccgacacagtagccactcaatacaaatttttgaatgaataaatgaaacagatgaagaggtaatgggcaatytaaagcaaaaagaaaacatcagagtggtagataacgtaaatacagtcatccctcagtctgggtgagggtgtgggggttccaggaccccctgcagatacca

SEQ ID NO: 508973 - DNA, 201 bp, Homo sapiens
tcttcctttgtggtctgatgttctgtagtggtatgatttgaatcttttaaaatttttgttctgtgcttctattaaagatttttgccttgctgttactatgrggtttacagtcaatttcaagctgataacaacttaactttgcattctttcactcccccacacacattttatgtcgttgatgtcagaatttacatattttgt

SEQ ID NO: 508974 - DNA, 201 bp, Homo sapiens
agtttgtgatttaaaagacaaaaaaaaatggtcatgcgtgccaaagagataatctgcaagacaatagtatctccagctcaacaaaagaagtcatgtacaarattaaactcatgctgtttccatccagtaacctcacacaaggtcaacttcaagatatctcctaaaaccatctagcaagtagcaatcagtgaggcttatcaa

SEQ ID NO: 508975 - DNA, 201 bp, Homo sapiens
ctttgctggatgaagaattcttgattccatgttgtttttatttttgttttccttcagtactttgaatatattattccactctccctcagcctgccgggttmctgctaaaaatccatggatagttgtattggaattcctttgtatgtgatatgtttctttatcaccttctgcttttcagaatttttttttgtctttgatttt

SEQ ID NO: 508976 - DNA, 201 bp, Homo sapiens
ttgagatttggagcttaaagaatctaagcacaccaaccttagcagaaagaaagccagtttgtgatttaaaagacaaaaaaaaatggtcatgcgtgccaaaragataatctgcaagacaatagtatctccagctcaacaaaagaagtcatgtacaagattaaactcatgctgtttccatccagtaacctcacacaaggtcaa

SEQ ID NO: 508977 - DNA, 201 bp, Homo sapiens
tatttagtctagcctataattctggaaagatcagttggtgacaaccttgagcaggcagagttttcatgggttccctagttggctgggccactgcctttgcycttatgtttggtagggccactggttgggccttgctctctggcaagatcactgttttgtctctgctatctggtggagctgctggctgggtactacaatggc

SEQ ID NO: 508978 - DNA, 201 bp, Homo sapiens
tgaataatgagattaaaacaagttcttattcaccatttaattaatcaaagtatgtgtgagatatctttaattcttcagtggtacctcacttaatcagttcyacccataacaaactttttcttcttttacttgtttttattaggacctggtgtctacaacaacgaaacttttatactttcagtaaagctaacattctccaga

SEQ ID NO: 508979 - DNA, 201 bp, Homo sapiens
aaccaattttaagcaaacataaaattaagccatattttaaaaactgaaagcaacaattttagcatatattcctaatgggtgatcgaccagtgtctcagccrtcaggtttataatggcatcagaaagcaagttataacccagagaacttaaaatttcatctataaaactgttgggaatactacaatgattccttaaatattt

SEQ ID NO: 508980 - DNA, 201 bp, Homo sapiens
aaagaagaaaaatccacttgcaacggttgaagctcatccagaaaacagatgctcataagtaggttggcttatgagctattcaatgtccagaaattagatayaataataattattaactttttgtcaatgggtgaaaattccaccttattttattttcatttcatttatttatttttattgtcacccaggctggagtgcagt

SEQ ID NO: 508981 - DNA, 201 bp, Homo sapiens
tataagctgggttacagttgtcagaaaaagtttaatggcatgtaaatcagcaagcaactgagaagtttcagggaccctctttcatccagatgtttcttatkctttatccttcttactcttctaactttaaatccttcttactcttgtaactttaaatctttcaaagaaacagaaatctctctttcttctttgaaggacagg

SEQ ID NO: 508982 - DNA, 201 bp, Homo sapiens
ctttaaatccttcttactcttgtaactttaaatctttcaaagaaacagaaatctctctttcttctttgaaggacagggtccttctcccttagtcctagccrtatcatttcctctctgagacactgccttgtctatactaagccatttttctgatttttctgaattagatggtattattttgggggatgggagagaggagga

SEQ ID NO: 508983 - DNA, 201 bp, Homo sapiens
ttgaggtaagtggtatgttgtacattacaactggaatgaggactctctacaagttacattaaattgcctctctcccttccctcaccatttcaccaaagctraacaaatactgtttttctgtccactttaaattctaagtggataacatgtaaatgcaggaacatttcttgagatgatgcaatttagtgactcatccaatat

SEQ ID NO: 508984 - DNA, 201 bp, Homo sapiens
gtgtttttaatagaccattagtctgtcactggatactaagagcctgaaaaaaggcttggctgatttgactaataaaggctcgtctgttatcagactgtatwgaggtgggaaggctaaactgaagaattatgtctgacagaagggaagaaatgactgtggtggccttctcagaccctgtaggaaaggactctgcttatccag

SEQ ID NO: 508985 - DNA, 201 bp, Homo sapiens
tttgtgcttaactggctgggcattccacagcaccactgttgatgtcatctatgatgtcatgagggtagtggccatcaacattacagcccacagactgggcrgtccccaggatctctttaatggttccagagagttctctggctaaggatcagtgccgcatctgtcaagcaatgttgacgatctcatcaaaagttatattcc

SEQ ID NO: 508986 - DNA, 201 bp, Homo sapiens
ggtagagacacggagagaaatggttggggtacttgccccttccccagaaaagcgggacttgccgctaagggtgaaggaccaatgcaggcgtccctcctgcrttgacacctctgaaacgtgtgtaaataatcagagaggtgtccctgcaatgactaaacaccaagggaaggctgccttccctagtccgtgaccggcgccgga

SEQ ID NO: 508987 - DNA, 201 bp, Homo sapiens
tcttactcttctaactttaaatcctctgactcttctaactttaaatctttcaaagaaacagaaatctctctttcttctttgaaggacagggtccttctccyttagtcctagccatatcatttcttctatgagacactgccttgtctatactaagccatttttctgatttttctgaattagatggtattattttgggggatg

SEQ ID NO: 508988 - DNA, 201 bp, Homo sapiens
ctgcctttctattgggggagcccacccccaatatttcaatgtaggttctttctattttgcataagtgttggctggctgagaaataaagagagacagtacaragagaggaattttatagctgggctgccaggggtgacatcacatatcagtaggactgtgatgcctgcctgagtctcagaccagcaagtttttattaagggt

SEQ ID NO: 508989 - DNA, 201 bp, Homo sapiens
ctctgactcttctaactttaaatctttcaaagaaacagaaatctctctttcttctttgaaggacagggtccttctcctttagtcctagccatatcatttcytctatgagacactgccttgtctatactaagccatttttctgatttttctgaattagatggtattattttgggggatgggagagaggaggagaagtagtag

SEQ ID NO: 508990 - DNA, 201 bp, Homo sapiens
ctatgttgcctaggccggtcttgaactcttgtctcaggtgattcacctgcctcagcctcccaaagtaagccactgcccccagccaattttcattattttgraaatagtttgatgttatatttgttttcctctttgacttaatattattttatttttttaaaaagaagctctgaccaagcaaattactagtctgtctcttta

SEQ ID NO: 508991 - DNA, 201 bp, Homo sapiens
gactcttctaactttaaatctttcaaagaaacagaaatctctctttcttctttgaaggacagggtccttctcctttagtcctagccatatcatttcttctmtgagacactgccttgtctatactaagccatttttctgatttttctgaattagatggtattattttgggggatgggagagaggaggagaagtagtagaaca

SEQ ID NO: 508992 - DNA, 201 bp, Homo sapiens
agagggaagtacagacagggaatatactgtagctaaaggggagatataaatagctagaaaatggggaggttcggtgtctgctctgattcctttgggaatgbtctcatgacagatacacatatgggaagcctgtccctggacatgtgactgtgagcatttgcagaaagtatagtgacgcttccgactgccacggtgaagatt

SEQ ID NO: 508993 - DNA, 201 bp, Homo sapiens
ataacctatttataagttaggaccctattatatataaggttatgccttctttttgactttattttcctgcaagacatagacagaaatgtattcattttcaygactttcatcaatctccttgcttagttctttgtcaagtaaatataaatatctgccaaatagctatcaaaaacaacatttggccaggtgcagtggctcaca

SEQ ID NO: 508994 - DNA, 201 bp, Homo sapiens
cagagaaggaaggaaagaaggaaggaaggaaggcaggcaggcaggcaggcctctatgagaaacatagttccctggccagcctctagctgctgttttttttrtgggggagtggggatggagtctcactctgttgcccaggttgaagtgcagtggtacaatctcagctcactgcaacctctgcctgccaggttcaagcgattc

SEQ ID NO: 508995 - DNA, 201 bp, Homo sapiens
gttctgtttgatctggaggcaaaaatctaacaaagctaaaatatttcttaatatttccatattctctttatcctcaagtgcaaaatgctactataaaggtrtaagacttaggtccatattcctcaaacaaatacaattgctttcattcacagtgacagtttaaacagtgtattgagcatggtgtttcatagtgatgtgtgt

SEQ ID NO: 508996 - DNA, 201 bp, Homo sapiens
agcaagtaaaaaccaaggtcttccagctgaagaggaaggagtatgaaatgaaacttcacactgaggcccagatccaagaagaaggaacaggtttgtgtacwacatgggtataagagaaaacacaacaggcattgattttcttagccaaataatgaattgtaagttggggggaggtgatagaattttagagacatcattctt

SEQ ID NO: 508997 - DNA, 201 bp, Homo sapiens
acgcctgtaatcccagcactttgggaggccaaggcgggcggatcacgaggtcaggagatcgagaccatcctggctaacacagtgaaaccccatctctactaaaaaatacaaaaaattagccgggcgtggtggcaggcgcctgtagtcccagctactcggggaggctgaggcaggagaatggcgtgaaccggggaggcggag

SEQ ID NO: 508998 - DNA, 201 bp, Homo sapiens
agtgaagaaggcaaataatgtcttactatcggtatcaaaatagaatcatttaaaattccagtctgacaactattctcatttgattaatctgtttacattgygtgtaaacagacatatttgggtttgtctgccatcttactatttgtttctattttatcccatctgttttgtatgctcacttttcctcacttttcttgcctt

SEQ ID NO: 508999 - DNA, 201 bp, Homo sapiens
gttctccaaagccccaccagattcaggagcccagctggcttcacccggtgaatcccgcaccggggctgcaggtggagctgcctgccagtcccctgcgtgcrcccgcactcctcagcccttgggtggtcgatgggactgggtgccgtggagcagggggtggcgctcgtcgaggaggctcgggccgcacaggagcccatggag

SEQ ID NO: 509000 - DNA, 201 bp, Homo sapiens
gttttaacattaattttatgagaaagggaagataactgctacatttttcatttgtatataattcaccaatactaaaattgtagtaaatgtatgttcatcartagcagttattttattttcagtgagtcaagcattttattttgcttagccatttgtcctttaactatgcttatggcttttttttaagaaacattttaatat

SEQ ID NO: 509001 - DNA, 201 bp, Homo sapiens
cagcagtttatcccaccattactttccccaccatgagtgcacttgtcaagagtgaagaaggcaaataatgtcttactatcggtatcaaaatagaatcattyaaaattccagtctgacaactattctcatttgattaatctgtttacattgagtgtaaacagacatatttgggtttgtctgccatcttactatttgtttcta

SEQ ID NO: 509002 - DNA, 201 bp, Homo sapiens
ttgcttagccatttgtcctttaactatgcttatggcttttttttaagaaacattttaatatgaattttatgaggaagggattcagtatgaaaataaatacyatacttctctcattttcatttcatataatttaccaagattaaaatggaagtaaatgtatgttcatgagtagtaattattttattttcaatgcatcaaata

SEQ ID NO: 509003 - DNA, 201 bp, Homo sapiens
caatataaacaatgcaaactgcttgtttgatatcaatgtatgcatttgaatccgtctctttttgatggtggaacacactttgtttgcataagatctaccakagaagctggtcagcaggtttttaccctgaacatccctggtaatggtaactagttggaatttaagaaatgcaacttcgtcagaaattattctcttcaaaaa

SEQ ID NO: 509004 - DNA, 201 bp, Homo sapiens
tttgttgttggtgttttctccatacaactgttgagtaaggaagttggtggtgggaactaaatagatcatcttgtgataaccgtcttgtgtcagccatcagwtgacagcaactgaatcacaacatcaccaggctcttacaatttgttgtcttatttggcatgcgattctacataaattactgaaaagatcattgaagaagaa

SEQ ID NO: 509005 - DNA, 201 bp, Homo sapiens
gctggcaccatggaaccatgagcgtaatggggactgtcagtacataacagaagtcaaacctcagagccagggttctgggggcagggctctaattcccacarggaggaatggtttcttactagaatgtgactgaggtattattcattaacttcgtgctcattctaaatttttttttttttttttgagacagagtctcattct

SEQ ID NO: 509006 - DNA, 201 bp, Homo sapiens
ttgttgttggtgttttctccatacaactgttgagtaaggaagttggtggtgggaactaaatagatcatcttgtgataaccgtcttgtgtcagccatcagawgacagcaactgaatcacaacatcaccaggctcttacaatttgttgtcttatttggcatgcgattctacataaattactgaaaagatcattgaagaagaaa

SEQ ID NO: 509007 - DNA, 201 bp, Homo sapiens
aaagtctcaggatacaaaatcaatgtacaaaaatcacaagcattcttatacaccaataacagacaaacagagagccaaatcatgagtgaactcccattcasaattgcttcaaagagaataaaatacctaggatggtttttgaagagtaaaatttggctgtgctgtaacagctctgtggaaccaattcataaaacatgctga

SEQ ID NO: 509008 - DNA, 201 bp, Homo sapiens
agaccgatggtttgttatactagataaatccaccaagattagcaaggtaatcagaagaaaacctgatatccaaatacatgttatgttaggcttgtttccaraatggatcctattaataatgtaccaaggttttctttctgaaatggctattctttctaaagtagctaccataaccatgagttttaaaatgatattgccagt

SEQ ID NO: 509009 - DNA, 201 bp, Homo sapiens
ttaacaaaagaaccaactgaattgatgtgaaagtcttagtttatagttaccttatacatttttctcctttaaccaagacattcgcatgggaactgcttctrgccatgatgaagtaagaaaggacttagctttttattgtgagcaattagagaactgaacgaagtacaggaagcagctgttttcagactgaacacgaggcct

SEQ ID NO: 509010 - DNA, 201 bp, Homo sapiens
aaccagaaataccatttgacctagtaatcccattactgggtatatacccaaaggaatataaatcattctactataatgacacatgcacatgtatgtttatygcggcactatttacaataacaaagtcatggaactaacccaaatgctcatcaatgacagactggataaagaaaatgtggtacatatacatcatggaatact

SEQ ID NO: 509011 - DNA, 201 bp, Homo sapiens
ctacctgcttctgtacaccagagtgtctgaggctggatcttcagatgtattctcgtcattccttaggttatctcctccaagcccatggcttaaaatgtcayctattcactgatgactcccaaatttctttctctagcccagcctctaccctgagcccagacttgtgtatccaattacctacttgtcttcaccacttgaagg

SEQ ID NO: 509012 - DNA, 201 bp, Homo sapiens
attcttaggttattggaccaatgtttcatgcttgtttcaaacagaagaacttatctgcacaaggatattttccaaagcacgaaaaaagcaaatgttgtagwctgaagatccttttaaataaagacgaaatctgaaatgtgtttgccccccactaagggattgcataccttctatttctgaagtattcctgaggacattgtt

SEQ ID NO: 509013 - DNA, 201 bp, Homo sapiens
gggacaggaacaacacacaccagggcctgttgggaggtgtggggtgacgggagggaactaagcggatgggtcaataggtgcaagaaaccaccatggcacaygtatacttatgtaacaaacctgcacgttctgcacatgtatctcggaactaaaataaaattaaatatactaagactccctgtggcaaagagagagttagca

SEQ ID NO: 509014 - DNA, 201 bp, Homo sapiens
taaaataaatgcatgtgtctttgagaacatttcttttgaaattcatatttttaaaaataacaagtttcttaaatcagtcttttagtcgtgttttcatatgstatttatcagtaggtggaaacacttcacatcatttaaccccaaaaggcataataattaaactgcaattaaatgtaggaacagttgaatcattacaacaat

SEQ ID NO: 509015 - DNA, 201 bp, Homo sapiens
ctgttgggaggtgtggggtgacgggagggaactaagcggatgggtcaataggtgcaagaaaccaccatggcacacgtatacttatgtaacaaacctgcacrttctgcacatgtatctcggaactaaaataaaattaaatatactaagactccctgtggcaaagagagagttagcaaggaaatactacatctagcagattaa

SEQ ID NO: 509016 - DNA, 201 bp, Homo sapiens
acatggtgaaactccgtctctactaaaaatacaaaaattaaccaggtgtggtggcaggcgcctgtaatcccagctactctggaggctgaggcaggagaatmgctcgaacctgggaggtggaggttgtagtgaaccgaaatcacgccactgcactccagcctgggcaacaaagcgagactccgtctcaaaaaacaaaacaac

SEQ ID NO: 509017 - DNA, 201 bp, Homo sapiens
agggtatcaagagcaggagccaggagaacttacatctacatcctttcccatctccagcaatgcagctgtgacatacgcagtcaaggagacctcatcatcarcaccaccctagaggcaaacagggaggcagtgagtcagggcagcaggcagcagctgcaagaattatgtgcagattgcaaaacagcctcccctctgaataga

SEQ ID NO: 509018 - DNA, 201 bp, Homo sapiens
tcaataggtgcaagaaaccaccatggcacacgtatacttatgtaacaaacctgcacgttctgcacatgtatctcggaactaaaataaaattaaatatactwagactccctgtggcaaagagagagttagcaaggaaatactacatctagcagattaatcaggcagactaaagattaatcaaggagataagctctctaagta

SEQ ID NO: 509019 - DNA, 201 bp, Homo sapiens
taaatggcactgggacatttagccatttaggggaagatttttaatttaaactctcttgctgttccacacatcaaactaaatctcatgtagatgaacacatygaaagtataaaagccacaaaaacaggtagaaatgagtattatatttttatagttttgagaagagtgaagggaagaggaaggagagggaaagatattctct

SEQ ID NO: 509020 - DNA, 201 bp, Homo sapiens
ttagccatttaggggaagatttttaatttaaactctcttgctgttccacacatcaaactaaatctcatgtagatgaacacatcgaaagtataaaagccacraaaacaggtagaaatgagtattatatttttatagttttgagaagagtgaagggaagaggaaggagagggaaagatattctctgcttaaagggcactctaa

SEQ ID NO: 509021 - DNA, 201 bp, Homo sapiens
tttttatagttttgagaagagtgaagggaagaggaaggagagggaaagatattctctgcttaaagggcactctaaggaatctcctaagaaacaatcagtasatttaaaaacaggaacactaaaccttcagggtgtcaaaagtaaaataaaatcaaaaggaaaataacaaaccagtggaaaggatttctactcatagaaaac

SEQ ID NO: 509022 - DNA, 201 bp, Homo sapiens
gtggcgtgatgtcagctcactgcaagctccacctcccaggttcacgccattctcctgcctcagcctcccgagtagctgagactacaggcacctgccaccaygcccggctaattttttgtattgttagtggagacagggtttcactgtgttagccagggtggtctcgagctcctgacctcatgatctgcccgcctcggcctc

SEQ ID NO: 509023 - DNA, 201 bp, Homo sapiens
tccaggggatgggattgaaggtgttcactaactcaaaaatccgaaaaccaaagtcgtgttcagtcatcccttccgtgtctgcaggagcagtaggtcaaggrtactatggaggtaaaacagcaatttgcttttaattttatttcatgtccaacaatattactatgcccaaaatgctaaaatgaggtaatgtagccctatttc

SEQ ID NO: 509024 - DNA, 201 bp, Homo sapiens
cctgaggggtataggggaacagaccactctggctacttcctgctgaattggggcaaagatcggggactaggatatgaagagagaaagtttctataatagcytggagttcacaatattcacgagtcccaggcatggcaccgtggtgctgaactatcattgtattagttgctttagtcacagcttcactacaacattttaatg

SEQ ID NO: 509025 - DNA, 201 bp, Homo sapiens
tcaccttatttacaaatgaaaccttgtaatttgatacatcaagagaatcttaagttactgtcattaaatctttgcgatcatgaaaaccaggagcataaaaygtatagttccaatctcacttgagattatttacctcaacagcctccaactttgctcttcacttacaagtacacttaaggtattaggaatagtgtaagtatt

SEQ ID NO: 509026 - DNA, 201 bp, Homo sapiens
taaatatactaagactccctgtggcaaagagagagttagcaaggaaatactacatctagcagattaatcaggcagactaaagattaatcaaggagataagmtctctaagtacacaagaattttgttagctaactcacatcatatgaagcctgttgctgtgaagtggttataaaaccattttgacaacataaacatcatgat

SEQ ID NO: 509027 - DNA, 201 bp, Homo sapiens
tgataatgtgaaaaattctaagggaaagcctcagaggaaaataaaacctggatggcaccaaaaaagaggggatagaacaaaagttgattgtgatactttgycctatagggatggatatgggtaaggatgaattccatgacacagcagaatagaaagaactaatcaatagcattctcagaagttgaattattcagatctctc

SEQ ID NO: 509028 - DNA, 201 bp, Homo sapiens
ctgtgatccctgtctcctctcttcttttctatatatcatatatattttgtccatattgcatcttataaaatctaggatttcttaatcaaatcagaaatcaraagacaagaggccgtgcagatgcttctcaattacgatggggttatatcctgacaaactcattgtaaagtctaaaaaatcttaagtgggaccattgtaagt

SEQ ID NO: 509029 - DNA, 201 bp, Homo sapiens
ctcctctcttcttttctatatatcatatatattttgtccatattgcatcttataaaatctaggatttcttaatcaaatcagaaatcagaagacaagaggcygtgcagatgcttctcaattacgatggggttatatcctgacaaactcattgtaaagtctaaaaaatcttaagtgggaccattgtaagtcagggaccatctc

SEQ ID NO: 509030 - DNA, 201 bp, Homo sapiens
tacctcacagagctgttgtaataaatgaattggtacacgtaaaacacttagtagagtacatgtcacatagcaaatcctataaaagtactagttattacaaytaacatatcagttctcaatatatgcccaacccttacctggtacattatataaccttaaacataagaaaataatcatggaagtaactccttgaatgaattc

SEQ ID NO: 509031 - DNA, 201 bp, Homo sapiens
aataaggcagcaataagaaattgatgataaaaatgaggttcacactgaggcctgtgtgttgtcttccaggaccaggtctgcgaggtgtacccccaggagcygtagaaataatgtacccaatgatcgaagaagaacctcagatattgcaagtgaaagagatagtccggaagtacttccctgagacctggatctgggatttgg

SEQ ID NO: 509032 - DNA, 201 bp, Homo sapiens
attgagaaatattttataatagatatacaaaagggcataagctataactagaaaacactgtacaactctctcatagattaagaaatagaaaattaccgacrtgggaaaaataaatcccttgtgtatcactaccacctccagaggcaatcattatcctgaatttgtcgttacaattccatggatttccttatatttttgctg

SEQ ID NO: 509033 - DNA, 201 bp, Homo sapiens
gcccagatgttcaggcacttggtggtggaggcataggcctgggccccagtcacgttgccaaccatcttcctgtccctagacttcacggagtaggcaaatgytatgaagcccaggcagcaggggttcatgaagagggtgttgaacagggaccagacgacatggtggggcacggaggtcttgctgcggatgtggatcacggtg

SEQ ID NO: 509034 - DNA, 201 bp, Homo sapiens
tccagaggcaatcattatcctgaatttgtcgttacaattccatggatttccttatatttttgctgcatatgtatccctaactaatatttagaatcttcacrtgtgtttcatcttgagagaaacaagatttttatttctctcttattcaagaaacaagagaaacatttttgaatatttcagcagcttagttttttgtttgtc

SEQ ID NO: 509035 - DNA, 201 bp, Homo sapiens
taaacccagactccagccatggcccggacgtggacacagccagaatgggatcctcagccctgctgccctggaggaaggggcggggatggaactgtcccagktctgtgtggagaccaccttcggggagcgggaggctggcttcaggccacgcagctggggtgggggcttccatctgcctgtgctccatcggaggatggctcc

SEQ ID NO: 509036 - DNA, 201 bp, Homo sapiens
aattttttgaatttaaaataaatgcatgtgtctttgagaacatttcttttgaaattcatatttttaaaaataacaagtttcttaaatcagtcttttagtcrtgttttcatatggtatttatcagtaggtggaaacacttcacatcatttaaccccaaaaggcataataattaaactgcaattaaatgtaggaacagttgaa

SEQ ID NO: 509037 - DNA, 201 bp, Homo sapiens
tcgaatgatggaaaccacaaaaaaaaggccaattccaacttagtcatttaaaacacacacacacacacacacacacacacacttttttaattgtagctagmatttattgagtactgaatatgtaaatatatcattttatgagcattactctatttaatccttcataacttctgaaatgagacctttgattatcctgatttt

SEQ ID NO: 509038 - DNA, 201 bp, Homo sapiens
gctcattaattttcactgctgcataatatattacagtctataaattagtcataatttacacatcgagtttctcctcatggattttttttatgttttgctaytaaaaaaaatgctgcaatgaatactcatgtgcctgttttcttgtgcatctgtgtttctccaaattatgctttgagaagcataatgactgattagtgggct

SEQ ID NO: 509039 - DNA, 201 bp, Homo sapiens
agtctctggggcctggggaaaccagtgctccccacagacctccctcactcagcctttgccctccagccttttcacctctggggctggtgaggggccgggargagagagcccgtatgtcagacaacaaaccgtgtctgctaacccccagcagccacaggcagaggaagaagaggacaactggaaatcctagcgggcgccgcc

SEQ ID NO: 509040 - DNA, 201 bp, Homo sapiens
acaatttggggcaaatgatacatagctcatacagatggagggtacaaggaatcatagtaagctatatgactgcaataaggtttgcttgcctgtgattgtgsaggctaacgtatatttctcttcgtttccagtgctgcccaagtttgaagttacggtcaatgcaccacaaacagtaactatttcagatgatgaattccaagt

SEQ ID NO: 509041 - DNA, 201 bp, Homo sapiens
tgtgtaatcactaacaaaaagtgtcataatgcaccaaaaaaatcaacaaaattatattcgctaatgagtatcaataaaataagttcgaatgatggaaaccmcaaaaaaaaggccaattccaacttagtcatttaaaacacacacacacacacacacacacacacacttttttaattgtagctagcatttattgagtactga

SEQ ID NO: 509042 - DNA, 201 bp, Homo sapiens
aattttcactgctgcataatatattacagtctataaattagtcataatttacacatcgagtttctcctcatggattttttttatgttttgctattaaaaamaatgctgcaatgaatactcatgtgcctgttttcttgtgcatctgtgtttctccaaattatgctttgagaagcataatgactgattagtgggctaagcaca

SEQ ID NO: 509043 - DNA, 201 bp, Homo sapiens
ccacaccccactccgtggctttcctattgcagtgagagccgtaagccaaggcagggaactgatgtgggatctcttcaacaagctggtcctgagacgcaagsgtaggaggcagggccgctgtctgccatgggctgtggcatcgttaattctctcttgcctttttcttcctgtgtttaagtctctggggcctggggaaaccag

SEQ ID NO: 509044 - DNA, 201 bp, Homo sapiens
tggacaagggtggccctggggcccccattcctaaaccaaggaggaaaaagggtctaataacaaaaacactacaggggacaggaacacggagccgggggtcmaatgtgactgaaccccacaccccactccgtggctttcctattgcagtgagagccgtaagccaaggcagggaactgatgtgggatctcttcaacaagctgg

SEQ ID NO: 509045 - DNA, 201 bp, Homo sapiens
agtcttgaagcagcagcagcagatctgacacttgtccttcacagctcctttcctgtctcccatagtaagggctatgtaaacatttcatgatcagtgctggyacttgcagccgagaatgcggagaatgcttgcagtttcccttttcatgcagcagaatgataacagggacaatcttttgattgtcttattatgttttggctt

SEQ ID NO: 509046 - DNA, 201 bp, Homo sapiens
atgacatctctccaaatgaggtaaaaggtttgccctagaccctgtaggaaatctatgtacctatcaggatcatctgaaaacttccccaggtctgccttgayctgctttaaatcagagagggagaaggggacatgtagctgggttgggccaaattcccctccccctacagcttaaggggacataaccgatagcctgggggtt

SEQ ID NO: 509047 - DNA, 201 bp, Homo sapiens
gatgctcaatgagaagaaaacatatcactccttctctgtggaagaatatggtaaataatagcaatgaaaatattacctatcaataaaaaaattataaaatmtttccaattttgcaagggcaagattattaaataatgaattttcaagtgagtatctcttcctttcctctttccttgtcctctgttactattttagggttct

SEQ ID NO: 509048 - DNA, 201 bp, Homo sapiens
  misc_feature (1)...(201): n = A,T,C or G
ccagaaaatatcttagttgtggactctgaattcaaagtgaatgtctgtgccttgtaagttgaaattgtacacaatagaataatgtattcatagaaagatantagaatgggatagatggctaaaaagaagtaaaatataaatgtgtagaaggtaagggaaaaagaaggtgttaaattattttgctgattttatgaattcttc

SEQ ID NO: 509049 - DNA, 201 bp, Homo sapiens
acaatagaataatgtattcatagaaagatattagaatgggatagatggctaaaaagaagtaaaatataaatgtgtagaaggtaagggaaaaagaaggtgtkaaattattttgctgattttatgaattcttccatgcatctataattcttttaatgcatgttatgacacgtggttttatgtaacagtttaagacaactgact

SEQ ID NO: 509050 - DNA, 201 bp, Homo sapiens
attgtctatactacatactttactgaatcctgttgcttattgtttatgtctccatattaattcaatgtcgaaacaaacaaacaaacaaaaaatcattcccraaatcatcttgcttagctaatatccattcctcttgtttgattctcgctgcaaacagaagacatgtgaacacaatttcagtgtaaaagcaatatttggtgt

SEQ ID NO: 509051 - DNA, 201 bp, Homo sapiens
ctcctccacctcccatccatgaatgatcatcttaggttccgctttggtaaagtcttttccggcctaactaaagttgattgtcttttcattcctgactcccyattgtctatactacatactttactgaatcctgttgcttattgtttatgtctccatattaattcaatgtcgaaacaaacaaacaaacaaaaaatcattccc

SEQ ID NO: 509052 - DNA, 201 bp, Homo sapiens
taactccccattctcctccacctcccatccatgaatgatcatcttaggttccgctttggtaaagtcttttccggcctaactaaagttgattgtcttttcaytcctgactccccattgtctatactacatactttactgaatcctgttgcttattgtttatgtctccatattaattcaatgtcgaaacaaacaaacaaacaa

SEQ ID NO: 509053 - DNA, 201 bp, Homo sapiens
  misc_feature (1)...(201): n = A,T,C or G
gaataatgtattcatagaaagatattagaatgggatagatggctaaaaagaagtaaaatataaatgtgtagaaggtaagggaaaaagaaggtgttaaattnttttgctgattttatgaattcttccatgcatctataattcttttaatgcatgttatgacacgtggttttatgtaacagtttaagacaactgactactgtc

SEQ ID NO: 509054 - DNA, 201 bp, Homo sapiens
caagctaactaactcccacttaacagaccttattcatttgtcctagccttatgttttattatatattataccttctgtttacctaattatgggaaacacamcctgaaaatagccattctactctagagggtaaatttttactatccctgtgaagcacccttccacctttgtatatatatttgcacagtcctttcctgggaa

SEQ ID NO: 509055 - DNA, 201 bp, Homo sapiens
ttatgacacgtggttttatgtaacagtttaagacaactgactactgtctttcttacatcataagataacatattgttttgcaccagccaatacagtagccrtgaccacatgtggttatttaagttttaattaaaactaaatattcagttgcgttagccacatttcaagctgtcacatgtgactagtggccactgaattgga

SEQ ID NO: 509056 - DNA, 201 bp, Homo sapiens
ctcatgtggatattaactgtctctgtcatatcttcttatggaaagagaagggatttatgtaatattgagcaaaagagagtaacgcaacttttggcagataygctacctctgcatagtctctttgtgtgtttcaagtatacctggaaatcaggaaatgttgcaaaaggcctaactcaaaattcttttctactgccatcaggc

SEQ ID NO: 509057 - DNA, 201 bp, Homo sapiens
ggctgagaaatgggaaggctcatgtggatattaactgtctctgtcatatcttcttatggaaagagaagggatttatgtaatattgagcaaaagagagtaaygcaacttttggcagatacgctacctctgcatagtctctttgtgtgtttcaagtatacctggaaatcaggaaatgttgcaaaaggcctaactcaaaattct

SEQ ID NO: 509058 - DNA, 201 bp, Homo sapiens
atgagcgtatgaactatatgtaacataatagtgaaagtacaatacaaattcaagaaactacttacagtctcaagattggattgccgctatgctttaacaayttttttcagtccataggattagatatttttaccaactcaaaaatccataagccaactttgtgtctaccacgaggattgcgtatcagcataataggaggta

SEQ ID NO: 509059 - DNA, 201 bp, Homo sapiens
atgacagtaacttgaaatgaggaaaagttttcagtatccaaggataatggaaataaaagcaaatcaaagtcaaagagggccaaaaggaaatgctcagaatyccggcaccccatcgctgtgttattatccatctcctatttcccataacaacactgccttcctcaagcagcagtggagcaccagcagaatgaaggagatgtc

SEQ ID NO: 509060 - DNA, 201 bp, Homo sapiens
taaaaagggaaagccaaataaaaatgtcattaaatccagaagataattataatactcatcttttatttcttttggagaaactgaagcatgactctgctcatggctgcaaagaaccttgggttctctccaggacactgacctcagcaactgagcaaagtttaatatgggagagagccagactgaactttgcttgagtggtgg

SEQ ID NO: 509061 - DNA, 201 bp, Homo sapiens
acagagatagagagcagatgaggaatctaatctctacatccattttataatgttctgtagaaggaaataatttctcatctccacacttcagtttctaatayagaaaaactctcctacaacatgaagtatacacttgcacatagataatcatgaaatgactttgaagctccaagatttgggaaagggaaaaagaaatgcctt

SEQ ID NO: 509062 - DNA, 201 bp, Homo sapiens
ggaggccaaggcgggcagattaccttaggtcgggagttcaagaccagcctgaccaacatggagaaaccccgtctgtactaaaaatacaaaattagtcggamgtggtggtgcatgcctgtaatcccagctactcgggaggctgaggcaggagaatcacttgaacccaggaggcggaggttgcggtgagccgaaatcatgcca

SEQ ID NO: 509063 - DNA, 201 bp, Homo sapiens
ataaatgatcaacattgtgtaatcactaacaaaaagtgtcataatgcaccaaaaaaatcaacaaaattatattcgctaatgagtatcaataaaataagttygaatgatggaaaccacaaaaaaaaggccaattccaacttagtcatttaaaacacacacacacacacacacacacacacacttttttaattgtagctagca

SEQ ID NO: 509064 - DNA, 201 bp, Homo sapiens
atactattaaagtcaatctctatcaaagccttatcctttttccagctcagaaatataatcacatgtgtttgtatgaatgctgaccatgtgcagagcactgygctaggacccatgactacaagaaaaagattgtcagcaggttcctgcttttcaatttcttcttagcttagaattttgctaagaagataaaagatatgaaca

SEQ ID NO: 509065 - DNA, 201 bp, Homo sapiens
aaccatggactagatggaccattttatgtaatcagaaagcggggccacccatcactgccagaaataccatgtaaaaattggcaattcagaggttgcagtayttagtacaataaataaataaatgatcaacattgtgtaatcactaacaaaaagtgtcataatgcaccaaaaaaatcaacaaaattatattcgctaatgagt

SEQ ID NO: 509066 - DNA, 201 bp, Homo sapiens
ccggacagaagtcagcagcaaccatgtcttgatttaccttgataaggtaagagaacttccagtctatttgcaaaaaaacgtagataataatcctctaaggraacatctgggaaggtaaatgcattttagaaacatcacttccatgctagaaatttgagaattctaatgttaactctaaaagaatgttcttctctcctttat

SEQ ID NO: 509067 - DNA, 201 bp, Homo sapiens
gtaacaccaaactggttcaagggagaaacaaggctttggcattctgctggctccagtgcttcctctgaaacctgaggcttgccaatgtgtggacactgtgyagtcttttattgcagccattcaatgcccacatgttttgccttcttgtttcagaaaagcacaaagtcacaacaaagtattttctttccttccaaagccttt

SEQ ID NO: 509068 - DNA, 201 bp, Homo sapiens
tctctcctttatttatatttcaccagggattacaggtagaaatggcttattatgatcttgggatatgaatattcctaaaatcccataagcaagaaatcttsacaaaatgtgtttattatgttgacaagttttttggatacccagtaatataaggaagtagcccttgtgattagtcaattattagttaattatcaacatact

SEQ ID NO: 509069 - DNA, 201 bp, Homo sapiens
gtgagattaaccatgaaactttaattatttatatgcttacattaatgttattagagaagcaatgaatcctcactgtagaaaatttgaaaaatatagagaaraacacaagacattacctattattaatttgaccaactgccattaacattgtaatgtcactaacattgtaagtttcctctaattttaatgaatattttccat

SEQ ID NO: 509070 - DNA, 201 bp, Homo sapiens
taaggagcattagattataccagacaatatttagaaataagaatcagaaacgggtttgaattcccactcctattcactcaatagcttaatgaacttgaccktctatgactctgttttcatatttataaatagctctcctcattttgtgtaattttcatgatgagcgtatgaactatatgtaacataatagtgaaagtacaa

SEQ ID NO: 509071 - DNA, 201 bp, Homo sapiens
gccttcgctgtgagtgtggctgtttgacttaatatacttggttcttttagtcagggtcatagggatctagtattctgtcagatgaggctttgggaggttgstaagaactgcaggaaggaatccaaatgtagcaaactaagtatagaaattaaggagcaatgcatgactctccagccatgggagacaaatatttacaggcaa

SEQ ID NO: 509072 - DNA, 201 bp, Homo sapiens
tttaaatctctctcttctggaccttctggaatcacaaatcagatggtagaaggatgaaaagaatacttcttggtttattaaccagctgtttaatctctaartatttatttctggtttatttctttctgttgcgtacacaaccctcactgacaactgtgttcaagagtcccacagtttcccaaatactctgagataaaatag

SEQ ID NO: 509073 - DNA, 201 bp, Homo sapiens
ctctgtggacacacagatgttcacacatgaacttctctaccaccttaaatagaaagtggtttacttttaggctgcaaaccttaaccaaatggatcccaaarctgcttaccaccatcgtattcccctctcagtgactcttggggattccaatatgtaagaaaaccaaaacaaaatattttccataatgtgtctgacactctt

SEQ ID NO: 509074 - DNA, 201 bp, Homo sapiens
tttactcaaccaaaatgaattttgagattttgatcaattcatttcatctctctatatattactttcttttgcacaacaaaagaattaggatccatgacctytgatattactccatgattctctgtgttgcttttcataatgtaagcatgcacatgttaaataaacaccataatcttttaaatttcctaagggacattatca

SEQ ID NO: 509075 - DNA, 201 bp, Homo sapiens
aaggtgctgataaatttttgaaataattgagcaattttgaaatgtttacattggagaatagtggagaggccagagcaagcttacaaaaaatggaagcagcrtgccaaaggttttgagtcagaatgaatttggagtgtactgaaaaggaaaaggtcatcacctaatatgtagcagtgagaggggaggatgatagaggctgca

SEQ ID NO: 509076 - DNA, 201 bp, Homo sapiens
acagaatctttttttttttttaacttttattttaagttctggggtacatgtgccagatgtacaggtttgttacataggtaaacatttgccatggtggtttrctgcacagatcaacccatcacctaggtattaagcccagcatcctttagctattcttcctgatgctctctctccccctgcccccaccccaacaggccccag

SEQ ID NO: 509077 - DNA, 201 bp, Homo sapiens
aagttccaaaaatgtttgcaaaaaacaagttcttcagagtaacaggcatagtgtaattccacaacaagcagaaactgcataaagtactttacatattttawctcattgtattctctgttatattctccttaagggagcaatcttgcttaccaagacaatctgtgccatgcctggcacagaatctttttttttttttaactt

SEQ ID NO: 509078 - DNA, 201 bp, Homo sapiens
ttggagatcatgaaatgctcacgtgataagatcatttttggaagttaaaagttccaaaaatgtttgcaaaaaacaagttcttcagagtaacaggcatagtrtaattccacaacaagcagaaactgcataaagtactttacatattttaactcattgtattctctgttatattctccttaagggagcaatcttgcttaccaa

SEQ ID NO: 509079 - DNA, 201 bp, Homo sapiens
agttgggaaacatgtgaatttttatatatcacccactaaatggtctgtgcttctggttatgtgtttgcttctgtgtatcctgcacataccaggcctgtatrctcttctttctttctttttttttttttctgagatggagtcaaacttgctctgtcaaccaggctggagtgcagtgcagtggcacggatctcagctcactgc

SEQ ID NO: 509080 - DNA, 201 bp, Homo sapiens
tcctgatcacagaaattcaggtttaggagatgtgttggggttatttattacattaagtaattacattatcacttcattttgtctccatcaagtctgatgcycctctttttgtctcttatacatacattatagaaacaacctacattataaatttatcaactactaatacaaaacacctgtgggatatttagttcccttttc

SEQ ID NO: 509081 - DNA, 201 bp, Homo sapiens
aaacccaaagggtgaatttttatgagaaaataaaagactgacttcaccagaaaagactttttacattaaaatgaagtagaatgaaatacaacattgaacakgtcatattgagaggcaagataattgggacttgacctgaattgggagtgatgtgtcctatgttacaccaaaatctgccactgatgagagtgatcagtcagt

SEQ ID NO: 509082 - DNA, 201 bp, Homo sapiens
attactgagcaatggaacagaaggataaggaagatgaagaggaaggagacctgcagttagtagctcatttccacagtaaggatgtcctttccacagcaagkgtgtcccaacgagtgttcagcttctagcagaaaggagaccctggagtggctggctcctctctgcaaacaggtcttcccattgagtgttcagctttcagca

SEQ ID NO: 509083 - DNA, 201 bp, Homo sapiens
ggcacgaagccaaggatacaaatccaggcagggctgtggggcaggatagagagcagggccttctactgaaggagtgactcaggaaggaggaggggaaggtracaagcccctgggcaggagccctgtggccacgggatcattttaaattgagaccagagagtgagcagtccagggcagctataaccttggctagaaagggca

SEQ ID NO: 509084 - DNA, 201 bp, Homo sapiens
atgaagaggaaggagacctgcagttagtagctcatttccacagtaaggatgtcctttccacagcaagtgtgtcccaacgagtgttcagcttctagcagaamggagaccctggagtggctggctcctctctgcaaacaggtcttcccattgagtgttcagctttcagcagagaggaggttctggaatgggtagtttctctcc

SEQ ID NO: 509085 - DNA, 201 bp, Homo sapiens
tcaccagcttcagggtgggacttcactggggacccatccccttccacccaggaacctgtctgcctcctgctcccaggctgttcatgccaaggagcgcctgmaagtcagtgtccagctgtcttcagacccctctcagcctccctcccacgcttgttggtgcccaagttccaaagggggccgagacggcagggggctggcgta

SEQ ID NO: 509086 - DNA, 201 bp, Homo sapiens
aaccactcacagcccagcttctgtacgggagcacatagccagtgagggtcatggaggggagaccaagaccctggccacgcacccatgagcctccaagcagrgcgaccctgcctggacataatcctgccccccaagaaatgaggctcaccaggcgcttggctgcatacttgagctgcaccctgtgctgcagctgctgcaggc

SEQ ID NO: 509087 - DNA, 201 bp, Homo sapiens
ttttagtctttacaatgtttttttctattatgcaatattctctcaaatactttatgtccatccacgttgtctgagacatgccactttaacattctagttaygctgtagctgtcattttaccctaagccgttagtagtactgatccacataaaattgggctgtttaggtgtttaactgtttaaatgtataatatatctgata

SEQ ID NO: 509088 - DNA, 201 bp, Homo sapiens
tccttctggctccctaagctctagcctgggtgagcagggcctggatactctatacctagagtcactagccactgcccagtctgtgtcagaagcaggcctckaattcctcagggttagagtgggaagaacccatgtgtgcacatttgcttttccaacctgggcaccatttggcagctgattcaggcaattctctcaccacca

SEQ ID NO: 509089 - DNA, 201 bp, Homo sapiens
cctcaaacacccgcctgaaggtgagagccacccccctctccctttgtgccctccgtgctgtagaccagagtgtgctgctaatgaagcctgaagctgagctstcacctaaatctgtgagtcacgttccaaccttggagatcatgaaatgctcacgtgataagatcatttttggaagttaaaagttccaaaaatgtttgcaaa

SEQ ID NO: 509090 - DNA, 201 bp, Homo sapiens
gctactactatataactcagatactactcaagaaatgtcggtatcaacagaaggaactaatagattatcttgccaattaatttttttggccaaagtagaakcaaatctttgggaagattctgcacaatttcctgttgttctttattcaccattttttaaattgtctgaaccaatgaactcttaggctgtatattagatatt

SEQ ID NO: 509091 - DNA, 201 bp, Homo sapiens
actaacatattttaatgaacttaaattttctaaaaataaaagcaaatatattttaaagagattctccataagcaatgttttcatagtatattgagttagaragatgaatactattgcatcttgaagataaataattattgatttttttcatatatgtcttatgataagtgattccaaactgctatattaaattcagtagac

SEQ ID NO: 509092 - DNA, 201 bp, Homo sapiens
aatgttttgttactaatattttgattaaaaatgatgcctcacaaggctgtgccaattttaccccatcatacactggcacacttccatgtaccactacagayagcagtaggttgtcatgagtttaaactcagcttaataatacagaacagatgagaaacagcctggacactttaaaaataatgatagcacaaaaatttaaca

SEQ ID NO: 509093 - DNA, 201 bp, Homo sapiens
aaggaaattaggaaattaggcatacagtgctcctaaaacattcctcccagctacttctaaaggcagggggtgatgtcatactgagaggtctagtgctgacwtccaaaacaggcaaccacaaacacagttttttaaaagtctcttgttttgttataaaattcatatgaatttcaaaatcaagtcacctataagcctttaata

SEQ ID NO: 509094 - DNA, 201 bp, Homo sapiens
ttgtttaagactagtccttttattcttctcccattgtgatgtgtggaaaagaaggaaattaggaaattaggcatacagtgctcctaaaacattcctcccarctacttctaaaggcagggggtgatgtcatactgagaggtctagtgctgacatccaaaacaggcaaccacaaacacagttttttaaaagtctcttgttttg

SEQ ID NO: 509095 - DNA, 201 bp, Homo sapiens
ttttatttaatgacagctatgtaaatgattgttttgactttgtctttgacatttcggaaactcagtgaaaaacttaagtactctagtgtaataaccatttyattgcagcttcctaataaaattaactcctatgtttaaccctgcttcagaattccacattcatttggctttcgtcttactgtttcaaattattttgactct

SEQ ID NO: 509096 - DNA, 201 bp, Homo sapiens
tgttgccacttgctagtgttgaaaaagcctcctgcttcaggttcactatcagcatgaatgaagaaaaggtggccagatttcaggctcagatccagaatggwgataagggtaccttcccttacagaaagaagataacatatagaatagcaacagctgatgtcaaaaagcctcttttcttttttaaaatagcggtgagtaact

SEQ ID NO: 509097 - DNA, 201 bp, Homo sapiens
ctcgggaggctgaggcgggagaatggcgtcaacccaggaggcggagcttgcagtgagccgagatcgcgccactgcactccagcctgggcgacagatggagaaaaaaaaaaaagactctttgccaatttgacaggtaaaaaaggagtatcatcttattgtccttccaatgtacattttattggtaactaatgagatcgaacc

SEQ ID NO: 509098 - DNA, 201 bp, Homo sapiens
tggaggtgggggcgtggaattaaagtaaacatggcaaaaattcagtgattgaatctaggaaaaatggcataaaggtgttcactgcagtattctttcaattmttctaaaggcttgaattttttttcaagataaaaaattgagaaacaaaatacagcattcaaatacttcaaaacatgagtcttacataaatatcagataaag

SEQ ID NO: 509099 - DNA, 201 bp, Homo sapiens
gtgggaggatcacttgagcccagaaggtcaaggctgcagtgagctgtgaccacaccattgcactcgagtctgggtggcacagcaagaccgtgtctccaaamaataaaaacaacaacgaaagaatcactagacatttatattttattttaaaaaaggtagaatattcgaaggcagatatctaagcttaaagtagctacagcc

SEQ ID NO: 509100 - DNA, 201 bp, Homo sapiens
ggcaggagccctgtggccacgggatcattttaaattgagaccagagagtgagcagtccagggcagctataaccttggctagaaagggcagaggcagatggrcctgctccatctcacctcttaaggtgggcaggacggagatgccacagtggatgccactgctgccacagcctcctgcggactccaagcaggaagcctggct

SEQ ID NO: 509101 - DNA, 201 bp, Homo sapiens
atgaactctgtaggtggttctatcatgcagttagttttcagaaccattcacactgacagtaaaggctatttattcccagcagttgaaagaccactaaggacacaggaatggttagcaaagctacttaaagatgccagggctggggccgggtgcgatggctcacgcctgtaatcccagcactttgggaggccaaggtgggca

SEQ ID NO: 509102 - DNA, 201 bp, Homo sapiens
cacggcgccgggcggtggtgtggttgcccatcaggaagaggccgacttctcccggtgaaactgggcagacagaaggcagtgagaaatgtgatctcggggtkgggaggctctcagaaagaaaaaggtaggactgaccttctgcacagcagcaatggcggggccaaaggtagctttgacctccacgcgggctcggatccaggc

SEQ ID NO: 509103 - DNA, 201 bp, Homo sapiens
gccaggacagggggccgggcgtatcgctggtccaggagcactatgctggcaaaatccttctggtgcctgatggccctgcctgcataggaacagaggctggsgctccgagcaacacctgcctccccctacagcacattcccatggcgaccccctccccttcctcagacttatataggaaacagggcaggcaacccctctttc

SEQ ID NO: 509104 - DNA, 201 bp, Homo sapiens
atgtcagggcttatgttgaaccttaactgagagcaagattcaaaagacactgaggcttatttttctttcttatatctatagttacacagggagctgtctartcttggatgtatccaagttgatatctggttttatccattgaaacccacagtgaaaatggtaaataggtgctaggtgtttggatttttttaatccaatgta

SEQ ID NO: 509105 - DNA, 201 bp, Homo sapiens
ccttttctttcactcttctgcaagacaaccccataagaaagctgaaacctgcttttgtgaaagcctatgattactataagacaggtgagcaaaacagaatmctagataaactcagttctttccagtgtggtgtctttgatggaaaaataaaataaaagccaatgtgtttggggtttttttcttttttactttatatagatt

SEQ ID NO: 509106 - DNA, 201 bp, Homo sapiens
atgtccatgtgtacaaattatttagctcccacttataagtgagaatgtgaagtatttgacctcctgtttctgagttatttcacttgagatagtagcaacawgggtggaagtggaggccaaacctcaattcttaaaggaataaaagtgtggtaaacccttgtacatcttgttttcagtttaatctgtctccataacttattt

SEQ ID NO: 509107 - DNA, 201 bp, Homo sapiens
aagtgagaatgtgaagtatttgacctcctgtttctgagttatttcacttgagatagtagcaacaagggtggaagtggaggccaaacctcaattcttaaagsaataaaagtgtggtaaacccttgtacatcttgttttcagtttaatctgtctccataacttattttttcttccttggcctacaaaactactgccaaaacta

SEQ ID NO: 509108 - DNA, 201 bp, Homo sapiens
aagaggcaaagagatggtgccagctaaatgacatcctaccaacacacgtggacctgcccccgccacctctcctttgccttccagtgatgggccggccaggycagggagggggctgctcctcacacggttcagcctgtcacagacccagcgtctcccaggcctggacgagcaggacaaagttgtggggaaaggagcaggatg

SEQ ID NO: 509109 - DNA, 201 bp, Homo sapiens
ccctggccattgtctcatcaacattataacaaaacgaggttgaacaggaacaatcttattggaggacctgctgtacaggaacaagttttctaaggagattwaaaaaatgtagaagcacaaaagagatagaagggttaattttttaaaaggcaatactgagtatctaccatctgcctggcactgctttaagcatttttctgg

SEQ ID NO: 509110 - DNA, 201 bp, Homo sapiens
tcatggaaaattttcctgaaaaatgggctataaggatattccacttcttaaaactgtatttcttaccgcttagggagagccaaaatgctttgcaccaatgygacacgttttagaccaactgaaagtctacaaagagctctattttaataattaagtctactgtagatttcaggttcagcttcctacgaagattttttttct

SEQ ID NO: 509111 - DNA, 201 bp, Homo sapiens
actttcttgatttcttttttagattgtttgctattggcctatagaaatgctagatttttgtaggttgattttgtatcctgcagctttactgattttgtataagttctaatagttttttggtggagtctttaggtttttccaaatacgagatcatatcatctgcaaacaaggataacttgactccttcctttccaatttgga

SEQ ID NO: 509112 - DNA, 201 bp, Homo sapiens
tacaggcatgagccaccgtgccctacccatttttaaaaaattttaatttttgtggatacatagcagatgtatatatttatgggttacatgagatatttttytacatgcattcaatgcataataatcccatcatggaagatgaggtatccatcccctcaagcatttatcatttgtgttacaaacaatccagttatactctta

SEQ ID NO: 509113 - DNA, 201 bp, Homo sapiens
tataactcactaattttctcacaggtctatcctgaccattctcccatctgtgttctccatagtgaagccagaatgatctttttagaatgagaatttttccycctccctgcctggtctcttctacaccacttaaagccacctcagtgatttttccattgctgttatattgaggtctatgagcctaaatatgttagcaagccc

SEQ ID NO: 509114 - DNA, 201 bp, Homo sapiens
tagttctttaatatacatcattaaatagttgtttatttgaggtttttttcttttttgatgtaggcacttatagctataaacttgcctctcagtactgcttytgttgtatcccatagcttttcgtatgttgtgtttcctttatcatttatttcaagaaaattttcaataattccacttattattgatctctagttttattct

SEQ ID NO: 509115 - DNA, 201 bp, Homo sapiens
cttctttatctctggttttacttagttgtgtcttctctttttcttagtctgtctagcagtttgtcaattttttttttcaaaaaaaaaaaaaccttttgttycattgaagttttgtattttttttgtttcagtttcacttatttctgctctgatctttattttttgttttgttttgtattttgagatgaaatctcactctgt

SEQ ID NO: 509116 - DNA, 201 bp, Homo sapiens
ttaaatattttgttgaatttaccagtgatctggacatagaattttctttgtgagaagattttaaatacaaatttattttctttaatgaagtgcaaggtaartttgctactactttagttaattttttggttgtgtatgtcatttaaaatcttgtctatttttctaaactgtctaatttattgacataaaatagtccataat

SEQ ID NO: 509117 - DNA, 201 bp, Homo sapiens
taaacaaaaagccttttcattgacatttgatggataattctatctccaattttggcttttgttgtgatgggtaagggtatctaagagtcatgcacttaatmttttcgaagagccctttttttgtggctaaattactctgacattttaatttttctgcaaatcaagtctttagcaaaaagttgtccagtcacatcatagctt

SEQ ID NO: 509118 - DNA, 201 bp, Homo sapiens
actctatccatcataacattaacataagattaaaagctcacagtctcattagctcaaaagttccaaatctcatcatctcagtcatctaaattaggtgttawtgaggtcctggacataatccatcctagggcaaaaagagtctttagtcccaagaagtgctgatatctggctaggaaaacagcatagttttaacacctggga

SEQ ID NO: 509119 - DNA, 201 bp, Homo sapiens
cagaaaaattttactttgtgtgcttgtgtatgcattgcctattactactgtaacagattatcacaaatttatgggcttaaaacaatacttctagttcttcrttttagtgccttaaaacaccacttgtatcttctagttctggaggtcagaagtctcactaggctaaactcaaggtgtcaggactgcattcctgctggagct

SEQ ID NO: 509120 - DNA, 201 bp, Homo sapiens
ttacctcattcacagggatcagaatactgaattgttgcctgttcatctgtgaaatgaaataagtcatattattactttgagggcctcctatattcagaggraaaatgcttcagaaaagctactgcttgagccccttccagagaatctctacaggttatgagcatattcagaattacaagaaagtttcaatcactaatattt

SEQ ID NO: 509121 - DNA, 201 bp, Homo sapiens
tatggaaaataaccacagaaaaattttactttgtgtgcttgtgtatgcattgcctattactactgtaacagattatcacaaatttatgggcttaaaacaayacttctagttcttcgttttagtgccttaaaacaccacttgtatcttctagttctggaggtcagaagtctcactaggctaaactcaaggtgtcaggactgc

SEQ ID NO: 509122 - DNA, 201 bp, Homo sapiens
gtaataggatgacatactgggtttgctttagcccagttaaaattttttcttcttttatagcattcctacattttaaattttattcctaaactaatacataytcattttatgtctttaatgtcttcaaaaggcagaaaataactgaaaaaatatggaaaataaccacagaaaaattttactttgtgtgcttgtgtatgcatt

SEQ ID NO: 509123 - DNA, 201 bp, Homo sapiens
aatttagcaatttggagctattctcacattagaagaaacagtcaccaacctcttcatccaaagatgaagaagctgatgtaataggatgacatactgggttygctttagcccagttaaaattttttcttcttttatagcattcctacattttaaattttattcctaaactaatacatattcattttatgtctttaatgtctt

SEQ ID NO: 509124 - DNA, 201 bp, Homo sapiens
ggaatccatgtgttatccattgaacaaggaaacagtaaatgttttcaagatttcctttttctttcctctttcatcttgtcaaattctgaacaatttagcartttggagctattctcacattagaagaaacagtcaccaacctcttcatccaaagatgaagaagctgatgtaataggatgacatactgggtttgctttagcc

SEQ ID NO: 509125 - DNA, 201 bp, Homo sapiens
aaatgtattcttttaaacaataatgaatatatttccttctgccttcagatcaaagcaagaggaaaaatctcccaatcaggaatccatgtgttatccattgracaaggaaacagtaaatgttttcaagatttcctttttctttcctctttcatcttgtcaaattctgaacaatttagcaatttggagctattctcacattag

SEQ ID NO: 509126 - DNA, 201 bp, Homo sapiens
aaaaggacaaaaaatgaggctgaaaactgagtcatggaagaagttgtttttcttttgttcctaagcagatagctactttttcttccttgttagattagttrgtggtttacctattttgccgagttttccaaaaacatataattttaatttattaatgtgatgtaatatgatgtgaggttttttgctactccatcacattaa

SEQ ID NO: 509127 - DNA, 201 bp, Homo sapiens
tatgatgtatgtgttaggcctcagctctatcatactatttttcttatgattctgtattgtatttaaagctactttatttctttagcttttatgtttgtttkttgttatcttgcttaaagcttctttgagtattcaggctagcttgaatttttattttagtggttatttttatatttacatattttataatatcctaatatc

SEQ ID NO: 509128 - DNA, 201 bp, Homo sapiens
gtttcatttcttccttaccagtctgtatacctttcattttattttcttctcttatttcattagctaggaattccaggacaatgatgactaggagtagtaasagtagacatccccgtcttgttcaggatttgaggggaaagtatctagtctctcaccattaattataacgttagctgtagattttttgtagatgttctatat

SEQ ID NO: 509129 - DNA, 201 bp, Homo sapiens
gacttctaatttatttccattgttttctgagcacatactttgtttgatttctattcttttaagtttattaagttgtgttttggaactaggatatgacccayctttaagaatgttccatgtgagcttgagaaaaatgtgtattctactgttgttggatgaaatatcctgtgaatatcaattagcaccaactgattgattgtg

SEQ ID NO: 509130 - DNA, 201 bp, Homo sapiens
ttctcatggtcttgccaagagtctctcatgaaattgcagccagatggcagctgggattggagtcacgtggagactccactgggattctgagagactgcttsttctctctctccctgcatgtagtctcaggacttcattttatggtctctccaacagagtagcttggcttgttacatggcatttcagagctcccaagaacaa

SEQ ID NO: 509131 - DNA, 201 bp, Homo sapiens
agcactgtgtgattctgtaatgagtctgtgccatatactgaaattatatattcatgattatggaccatttcaaaatggtagcaaatttaccactatcctamttctctcctacttttcagaaagtttactttcctataattgagtgccttctttttattaagaatctgaagtttttctcagtcttatcttctcttgactttt

SEQ ID NO: 509132 - DNA, 201 bp, Homo sapiens
cagtataaaacattaaaaatggtacacctcgatagggctcttaccacgaatggggtttgcaggactggaagttgctctgggtgagtcagtgagtggtgagygaatgtgaaagcctaggacattattgtacattactgtagactttatacacactgtatactcaagctatagtaaattcattttaaaaaatttttttcataa

SEQ ID NO: 509133 - DNA, 201 bp, Homo sapiens
caaaaatattttctttctttatatccttattatataagtttttttctatttaattttttttttactttttaaatagctttgttaaaaactaagacacaaamacatacattagccaaggcctacacagggtcaggatcatcaatatcactgttctacttccttatcttgtcccactgggagttcttcaggggcagtaacacg

SEQ ID NO: 509134 - DNA, 201 bp, Homo sapiens
acccgtctctactaaaaatacaaaaaattagccgggcatggtggcgcatgcctgtaaatcccagctactcgggaggctgtggcggaagaatcgctggaacyggggaggcggaggttgcagcgagccgagatcacaccattgcactccagcctgggtgacaagagtgaaactccatctcaaaagaaaaaaaaaaagtatggt

SEQ ID NO: 509135 - DNA, 201 bp, Homo sapiens
aaaataagtaaataaaaatgcccatgtagccatcacctgagatttttttctcctcccttaggtctcacctatttgcgtcttgttgtgccatgacaaagctrtatgacttgtctcctggactgtctcacccagctttgccttagtgtacctggtttgtgtttttctttcatcatgattctgagtatttcagcctcacattca

SEQ ID NO: 509136 - DNA, 201 bp, Homo sapiens
gactctctccaaccttttccaccgagcaaacaacctttcccacactaaagcatccagtcacctttcctttatacttgctgactgactgcatttcaactagrttgttacttcaagcaaaaacatgcattttttactttatctctggtagtgaaatgaaaggttcattctctgattataggaatctcaatttgttagccagga

SEQ ID NO: 509137 - DNA, 201 bp, Homo sapiens
ttaaagttaggttaaaatgtattcttttaaacaataatgaatatatttccttctgccttcagatcaaagcaagaggaaaaatctcccaatcaggaatccaygtgttatccattgaacaaggaaacagtaaatgttttcaagatttcctttttctttcctctttcatcttgtcaaattctgaacaatttagcaatttggagc

SEQ ID NO: 509138 - DNA, 201 bp, Homo sapiens
tttatttaaagtatgtaaagacacatatatgaagatattgaaaaggaagtttagtgatcaaaataacttctaggttggggtaataagattatggttcacamatatatcatgaatgttttaaagttaggttaaaatgtattcttttaaacaataatgaatatatttccttctgccttcagatcaaagcaagaggaaaaatct

SEQ ID NO: 509139 - DNA, 201 bp, Homo sapiens
tgccccaggatagcatgtccttgtgtaagccttatctaatatggtattggttatttatgaccactctgaatcattgggtctttaaattatagcagagttayaataataaattcctttattccgacctaaaattagagtcagatctctcacaaattcttcattcactctaatcttttctttttttattttatttattttata

SEQ ID NO: 509140 - DNA, 201 bp, Homo sapiens
atagatggaagacccatatactgaaagagagaacagtggaagtggagaaagtttgggaaggtagtgtgatgatcccacttttggatgttctcaatttgagkccccatgagatatccaaatagaactattcaagattttgagatgtattgcataacaggataattatagtcagtaataatatattgtacatttcaaaataat

SEQ ID NO: 509141 - DNA, 201 bp, Homo sapiens
cccagcactttgggaggtcaaggtaggtggatcacctgaggtcaggagtttgagaccaacctggccaacatggtgaaaccccgtctctactaaaaataccaaaaaaaaaaaaaattagccaggcgtggtggtgggcgcctgtaatcctagctacttgggaggctgaggcaggagagtcacttgaacctgggatgcggaggt

SEQ ID NO: 509142 - DNA, 201 bp, Homo sapiens
ggggagaggagatagcacttgacaatgagtttgagataagcagtgaaagaaaatgactcattaaaaaaaacccaattcctcagtattcctgcgtcagttayctgatagatggaagacccatatactgaaagagagaacagtggaagtggagaaagtttgggaaggtagtgtgatgatcccacttttggatgttctcaattt

SEQ ID NO: 509143 - DNA, 201 bp, Homo sapiens
gtgtcgccacggcaatggtaaactgacatggcacactggtaggcacgtctaatggaaagcagccaccctgcatccctgttttagtaagttctcaatttggyccggtgtctgagacctgcttccaaagttgagtcccacctcttacctcaagggtatggaaaagaaagttatcaaagctgcagagagcaaatgaatgagagg

SEQ ID NO: 509144 - DNA, 201 bp, Homo sapiens
aggtgttagagacagcaacgtttattgaagcagcagcgtacagcagcagcagaggtactgttccttgcagagcagggctaccccataagcagtgtgcccayagtagcagctcaaagggagtactgcagtcatatttacacccattttagttacatggaaattaagaggcagattatgcagaaatttccaggaaaaagtggt

SEQ ID NO: 509145 - DNA, 201 bp, Homo sapiens
aaggcaaaaattactgattccagaggcagagtatgtaaaaagtccagggtgtggcagtatgagcagaccctgtaagggtgacgcagggcaggtaagctccsaaatggggttttagcccaagagggttcttttcttcacccaggaaagaattcaagggcaagccagaggtgttagagacagcaacgtttattgaagcagcag

SEQ ID NO: 509146 - DNA, 201 bp, Homo sapiens
atcccagatcgtttcaatgctggtggtccacaaaacacgttttgagagacaacaaattagttatggctttgtgtcatttccttctatcatattaggcagartcaaactgagtcatgatacaacatttttgttttatagctactacttttccatctaacttcacatttattttcttaaagtacctataaatcaaggagaact

SEQ ID NO: 509147 - DNA, 201 bp, Homo sapiens
tatgtgcaggaatagcaaaggaaatccagcaaatctggcacagtcattatcaaccctggccatgcagcaaaatcaccagcgaaaattttcaaaaatacacrtggccaggccccagcccaaactactgaataacaatctccaggctttcacctgctagactggcaaaaatccaaaagtaaccactctggagaaacaggcatt

SEQ ID NO: 509148 - DNA, 201 bp, Homo sapiens
cctgcccaccccatccactacccgttctcatcactttcatcttcaaaccttttccttccctctcaatgatccaagactttgcccagaactcagtctgtctyctctcttccaagttagttatcacaactgcaaaaattaattaaagatcaaaatgtgaaaccaaataataattaaagccagcttaagagagggccgggcaca

SEQ ID NO: 509149 - DNA, 201 bp, Homo sapiens
gggagtgacaactttggtagtggagaaaacttcatggtcatggtggctttggtggcagctgtggttgtggtggatatggtggcaatggggatggctataayggatttggtaatgatggaagcaattttggaggtggtggaagctacaatgaattttggcaattacaacaatcagttttcaaattttggacccatgaaggga

SEQ ID NO: 509150 - DNA, 201 bp, Homo sapiens
ggatttggtaatgatggaagcaattttggaggtggtggaagctacaatgaattttggcaattacaacaatcagttttcaaattttggacccatgaagggargaatctttggagtcagaagctctggcccctgtggtggtggaggccaatgctttgccaaaccacgaaaccaaggtgcctatggtggttctagtagcagcag

SEQ ID NO: 509151 - DNA, 201 bp, Homo sapiens
atctggcacagtcattatcaaccctggccatgcagcaaaatcaccagcgaaaattttcaaaaatacacgtggccaggccccagcccaaactactgaataasaatctccaggctttcacctgctagactggcaaaaatccaaaagtaaccactctggagaaacaggcattcctagacagtactggtgggatacagaatggta

SEQ ID NO: 509152 - DNA, 201 bp, Homo sapiens
ccttcttcccccacaaaaatagtaataataataattagccagaatttaaaacattgagaacacatggagctgagaaggacctaggactagtaccctcatcygttgccagtggcagtaaaactgcttcagtctttttggaaagtaatccagtggtatctattaacatttttgttttggcatacgtttttggctcatgctttc

SEQ ID NO: 509153 - DNA, 201 bp, Homo sapiens
ccctggccatgcagcaaaatcaccagcgaaaattttcaaaaatacacgtggccaggccccagcccaaactactgaataacaatctccaggctttcacctgytagactggcaaaaatccaaaagtaaccactctggagaaacaggcattcctagacagtactggtgggatacagaatggtacaattctcatgaaatttcaca

SEQ ID NO: 509154 - DNA, 201 bp, Homo sapiens
gtttttggctcatgctttcaaaacatgagaaaacagaatacatgtacaaaaatgttcactgtggtgttttatttcatctcctacactattattcccaaatmttttcctatacatgtccctcacttcagggaccctattatttgggtttcttgcctacttctggctacttctcttttctgacaccttttctcttcccctgaa

SEQ ID NO: 509155 - DNA, 201 bp, Homo sapiens
ttctgacaccttttctcttcccctgaaaccattctgtaacatcctctccctccatccttcttgctatttgatttctctgttattatgacaaatcccatgtrggctgctgccaaaaaccgtgcaatagtacagattgaaatcactgaaaatgttcggccccctgcctcacccaagctcgcagggctgcccagcaatgtcgtg

SEQ ID NO: 509156 - DNA, 201 bp, Homo sapiens
gtacagattgaaatcactgaaaatgttcggccccctgcctcacccaagctcgcagggctgcccagcaatgtcgtgtctctaggcagatgcctctctttccyctttgtgattattcaaaaattctgctgtccatagacccccaaacctattatttcctctctccttcttagtatatgaccttgtctttgatttcactgagaa

SEQ ID NO: 509157 - DNA, 201 bp, Homo sapiens
ttctgctgtccatagacccccaaacctattatttcctctctccttcttagtatatgaccttgtctttgatttcactgagaaaatgaagttcaccaggtaayaacagtttacttccctatcacttgtaataaacccatcagaatcctcacccatctttccttcttccatggggaaggggcactctttctacccaaggttact

SEQ ID NO: 509158 - DNA, 201 bp, Homo sapiens
gaatggcttctccttctcagtattgtccctgggctccctgttgtagctgaagtcatttcatgtgaccacatgttaaaggttctgtcatagcatctactacyaatacttgtaagatctctggcccactctcacctttttttttcttttttatcaaaacagttttgcctaaatttgaggtccaagtaaaaatgcccaaggtta

SEQ ID NO: 509159 - DNA, 201 bp, Homo sapiens
ctgcactctgcatagctaccactttagtaggcttatagccaggtgtcagatgatgggcctcagacctctgttagtcagcagggctggcatttgggaagaaragctgggcctagggagggaaagaataagaatacattgaaacctattggtccctctttaccacatctaactgtgatgatcttcagggactaatcatgctgc

SEQ ID NO: 509160 - DNA, 201 bp, Homo sapiens
aatgagcatatcagtactggaaaagttagtaacttaaaaaaatcacagagtcattaaggggtaggaaagatttgaattgatactcaaacataaattgttawccaatacattgtgtcagctacatacactatgtatgttttttatattttataactgaaagtatttccagggattattttatggttgtctataacctacacc

SEQ ID NO: 509161 - DNA, 201 bp, Homo sapiens
atataaaataggctctttttccttcatcacttgttattagttacactctccggataggtccgtatgtcccgccccactccacacctttgcagcctccattmgccttttcctttctgagtcaagaatctctaactgcttacccagaaccgtaacataagccttggtcgagtcaggaacaatgtccactgggagctccaggga

SEQ ID NO: 509162 - DNA, 201 bp, Homo sapiens
tagctagtaaacttattgcccttatctcaggttggaattcctataaaactttgctaatacctttgggccaatttaccaaccatctgtgatacagctgcctrtgtcgttcttacccgcaaagctgcccttctactcaaaggtatatatttcaattgtttctatgaactcataatatttttacctataggaccccaggaagaa

SEQ ID NO: 509163 - DNA, 201 bp, Homo sapiens
tttcatagtgatgtgtgttccagtgctatcctcattgccatgattgttttcttagatttctgttcaagtggaggagtctcagaattatgaagcaaatattmatacctggaaaatcaatggcagtgaggttattcaagctggagggaggaaaacaaacatctggactattatacctaagaaattgggtaagcagctatctgt

SEQ ID NO: 509164 - DNA, 201 bp, Homo sapiens
agcaatttattgcacaggtacagaccatgatctttactccaaaaaaagttctcactcatttttcattcttattctttctttgatttcatttataaggggarcttaacaatactattttcattttattgataatggagtttgcagctaaataaagtgaagaaagagaagaaaatacagtgcttaaagcagttttttattcca

SEQ ID NO: 509165 - DNA, 201 bp, Homo sapiens
cctgatttttctttggagaatcgttaatcatcctttaaatgagtctgtgatattactctccatgccacctggatttttttttagtggaaacagcttacttkcaatcaactgcaattcagagtacccccactatattactttagacttgcagttcatatgtgaagtcatcatttgctctatctgcagcatcctaaccttaag

SEQ ID NO: 509166 - DNA, 201 bp, Homo sapiens
gacacaatggttagaaagccagtgccctccatttgaaagtgagctgaggaagttcctaagggtatggtcaaagttatctttcaaaaacaaccgtggtataytccggcacaacagcaaaagaataactgaggcccactgttttctacatcctgtaataagaccacaaaacttttagactggaaaatgttaaaaggatttata

SEQ ID NO: 509167 - DNA, 201 bp, Homo sapiens
attctcctgcctcagcctcccaagtagctgaaattacaggcatctatcaccatgcccagctaaattttttatatatatatatatttagtagagatggggtktcaccatgttggccaggctgttctcaaattcctgacctcaagtgatccacccacctcgacctcccaaagtgctaggattacaggtgtgaggctgtgcaca

SEQ ID NO: 509168 - DNA, 201 bp, Homo sapiens
accctctaccagtaacacttgttgctcctattcctcctggtgctatttattgctactgcacatgtaccctgtgcccaagggtagaacgactttccagcttytgaagcacagaggcttggggaggacagattgtcatgtgactcaggacttcactgaaccttgttcatacagttgaccacattcctttgtttggatcactaa

SEQ ID NO: 509169 - DNA, 201 bp, Homo sapiens
catctttgtaatttatcatgaggcatcaaatgaatgctattaacattaatccctcctattttaagtcattaatccaagtaaatgctcacttatttctagcrtcttagaaaccatttaaattatgttacattatgaatcaatacattataaaattataccatcatttgtaataattttttaaaatgttgtgtgctattaaca

SEQ ID NO: 509170 - DNA, 201 bp, Homo sapiens
cactttgggaggcccaggcgggcagatcacgaggtcagaagatcgagaccatcctggctaacacggtgaaaccccgtctctactaaaaaaaaaaaaaaaamaaaaacaaaaacaaaaaattagccgggtgtggtggcgggtgcctgtagtcccagctactcgggaggctgagtgaggcaggagaatggcgtgaacccgaga

SEQ ID NO: 509171 - DNA, 201 bp, Homo sapiens
caaggtaaagggagctaggccattgttatcagtaaccagggtctggttgaaggttccatttgtgccataaatcaccagaaacactagatggttcttgaggraggagtcatcatggcccctaactcttatctgaaggacaaagatcattacggattagaattaggtttggagtaagcttgagtatgaggtaaagtgaaatat

SEQ ID NO: 509172 - DNA, 201 bp, Homo sapiens
atagtgctatttcctataagtaaacttcattttgttcagcaagtaacctttttttccccccaggatcttaattaattaaacgggtttttgatttacatgtmtagaaaactgtttgagaccttagtattaaatgcattttttaaaaatttagagacttaaggccgggcgcagtggctcacgcctgtaatcccagcactttgg

SEQ ID NO: 509173 - DNA, 201 bp, Homo sapiens
ctctcagcataaacttctgtctcttaattggctttcttccttctcaaattctgtttttctcttgtttgttcttttaaaatcaaaagccaggtaaccctgcyccaaaggttcaactccttcaagattttttacctagccaatcatgtaatctgtgaacaaaaacagtttcatttcttccttaccagtctgtatacctttcat

SEQ ID NO: 509174 - DNA, 201 bp, Homo sapiens
ctgggcaacagagcgagactccgtctcaaaaaaaaaaaaaaaagtttagagacttaagagggagagttttatatgtaaaacgttacaatggaattcacagmgaatttttttcttgttaaaatatgcttaaaaatatgagatttaatttgtaaaatataatacctgtttttcctgctaaattttaacttatctaaaaccagg

SEQ ID NO: 509175 - DNA, 201 bp, Homo sapiens
tgctcaaatctcttatataagatggtgtagtatttgcatataacctatgcacatcctcctatatactttaaatcctctctggattacttataatacctaayacagttgactttttttttttttttttgagacgttgtctcactctggaccacgctgaattgcagtggcataatcctggctcaccgcaacctccgcttttca

SEQ ID NO: 509176 - DNA, 201 bp, Homo sapiens
caatctcctgacctcatgatccacctgcttcggcctcccaaagtgctgggattataggcgtgagccaccgcaccaggtccatactggcaaatttcttgacttttttttttttttttttgagagacaagacaaggtttcactacgttacccaggctgattttgaactcctaaactcaagcaatcctcccaatgtggccaccc

SEQ ID NO: 509177 - DNA, 201 bp, Homo sapiens
accagacgctcacccagagagtaggaacactttttcccaaggagaggggactcagggaggaactggggtctcctctgccattctttctatgaaagacactkaatggtcttcagtcactgccacccctgcctcactctctccagaccacctgcggctacaccatggtcctggtggctaccgtgcctgcttctctgcatgtcc

SEQ ID NO: 509178 - DNA, 201 bp, Homo sapiens
gcactgatatttagaaatgtatctttcctggagccctggaggttcctcctcccataagcaatgcaccatagtgggtgtatatcagtagcaggagcttggayataaatggggagctggaagagtaggactgggtaacatctgagagctagcatgatagaagatctcttttaagaaaaagcatagacagaagttgagaatcta

SEQ ID NO: 509179 - DNA, 201 bp, Homo sapiens
ctcttgtgaggatcacacaaaagctcagtatgtgagtcagggctagatctaacctctgcctattcatctggatactttttagttatatttaggtttttttwtttgcaaaccaaaaaataatgaataaagaataaaatcttaataatccataagtttagtaatttcactactctatatttactgtcaagtgtttcgccatag

SEQ ID NO: 509180 - DNA, 201 bp, Homo sapiens
agctatcctcctacctcagccacctgaagaaaataattagctgtctggacaattttatcctttacctccaaggcctaaacaatacagaagtaaactttggsaagaagagctttggtggagatgcttctgtagttccttttcccattcagaacctaatggtaggatcagggtctctgctgacccgtccctgccactttcagg

SEQ ID NO: 509181 - DNA, 201 bp, Homo sapiens
agggagctaggccattgttatcagtaaccagggtctggttgaaggttccatttgtgccataaatcaccagaaacactagatggttcttgaggaaggagtcrtcatggcccctaactcttatctgaaggacaaagatcattacggattagaattaggtttggagtaagcttgagtatgaggtaaagtgaaatattaggttgg

SEQ ID NO: 509182 - DNA, 201 bp, Homo sapiens
tttaaatgagtctgtgatattactctccatgccacctggatttttttttagtggaaacagcttacttgcaatcaactgcaattcagagtacccccactatrttactttagacttgcagttcatatgtgaagtcatcatttgctctatctgcagcatcctaaccttaagtgaacaactcttcctatctctttgaaattgtct

SEQ ID NO: 509183 - DNA, 201 bp, Homo sapiens
tgcacatctgtggttccagctacagggaggctgaggcaagagaatcactggagcccaggaggtcaaggctgcagtgaattgtgttcgcaccactgtactcraggctgggcaacagagcaagacctgcctcagaaaaagaaaaaaaaaaaaaatctgtccggtggaactatctttatatatgagaggctttatttacttgaa

SEQ ID NO: 509184 - DNA, 201 bp, Homo sapiens
tactattctaacccatattttcttctctcttctctgaccttttataacaaatattgttacataaatttataaattattgaaatagcctgggcttgtgtcaratatctaagtcttatctccatatgtctatttaaactagctgaatgaagaaactttttaaaaatataccttcaaagtatctagaatagtttatcattacta

SEQ ID NO: 509185 - DNA, 201 bp, Homo sapiens
tgatagtgccaagagttaaaagcatttgacattatctagtaaaatttaagattcaactatttgtgacccagtcatctcactcttatgaatgtgtgcttgtktccacttggagtcatgtacaaggatgttcccagcagcaactgtttatcagcaataaaatggctacattgtcatctgttcatacaatgctaaaaattcgac

SEQ ID NO: 509186 - DNA, 201 bp, Homo sapiens
tactattctagtcctttctcttgcaggctctcaatagctttctaactggtctcctgatcatctcttcttgttccccttcagcgagagggatcctttaaaasatgtgtcagatcgtgtccctcctcttctctaaccctttcaggaatctcccatatcccccctaagttaaagcgtaagtttttaatgccacttagaaaccct

SEQ ID NO: 509187 - DNA, 201 bp, Homo sapiens
ccttgtttccccggtgaataccatccatttcttacacatggctacccaaagttctcaagccattttaattaagcactttcaatgaaatacaatgaaagtgrgaaccaaactctgagaaatctttatcatggcatttctcattagtttcagcgaaatattttgaacagaaaaggaaagaaatttcccagtggcaattacaaa

SEQ ID NO: 509188 - DNA, 201 bp, Homo sapiens
acatctgtggttccagctacagggaggctgaggcaagagaatcactggagcccaggaggtcaaggctgcagtgaattgtgttcgcaccactgtactcaagsctgggcaacagagcaagacctgcctcagaaaaagaaaaaaaaaaaaaatctgtccggtggaactatctttatatatgagaggctttatttacttgaaata

SEQ ID NO: 509189 - DNA, 201 bp, Homo sapiens
gcaagacagataaactatgtcagcaacagctcagcttggacccaggtgttcaggaaacaaaaccacagactttttcacagacagccttgcctagcctatcracacagtcagtgactcaactttgcaacttttgaccaattctttcctgccctaactctacccttccttcctgcccctcccccaactcttgttatccccgcc

SEQ ID NO: 509190 - DNA, 201 bp, Homo sapiens
tttgagaactcttaattacccatgtttttctgttcatgtgaaatggaaactttcagtgtaagtactgccttccatcctacaagcattttttttcaagcctrttatttaaataggcaactcatttactttgtcatatttttgacatacccaccttccttatgttcctgggtttccagccttagaaaaaaaatctcactggcc

SEQ ID NO: 509191 - DNA, 201 bp, Homo sapiens
aggtagaagtgcaaataaaaacataatgaaatataataccattacacatgttccaaattagctgaaattttaaaatgtgatagtgccaagagttaaaagcrtttgacattatctagtaaaatttaagattcaactatttgtgacccagtcatctcactcttatgaatgtgtgcttgtgtccacttggagtcatgtacaagg

SEQ ID NO: 509192 - DNA, 201 bp, Homo sapiens
atgagggagctgagtcagctacgggcaagcgggcagctgaagatgatgaggataacgatgtcgatacccagaagcagaagaccgacgaggatgaccagacrgcaaaaaaggaaaagttaaactaaaaaaaaaaggccgccgtgacctattcgccctccacttcccgtctcagaatctaaacgtggtcaccttcgagtagag

SEQ ID NO: 509193 - DNA, 201 bp, Homo sapiens
caggtgatccacccgcctcggcctcccaaagtgctgggattacgggcatgaaccaccacgcccggcctctttttcttataattttgctcttcttgatttawacttcataatccattcccctctacgatttgaaagcaatttacagaaaaaattttaagggagtgagagaccagtgattgtagggagaccctaagctcatag

SEQ ID NO: 509194 - DNA, 201 bp, Homo sapiens
cccacttgcaggcaccttaccatcctctgaatttctcaagtacactttatatctgtgttgtctaagcagatggttcctgtctttttccctcaaccagaccrtcagccctttgacggctttctttctattctttttgactccctttgtgccctcccctattccctgacccactccatcccgtaccaggcacagtaatagata

SEQ ID NO: 509195 - DNA, 201 bp, Homo sapiens
aggtggggaggaagaaggtgatggtgaggaagaggatggagatgaagatgagggagctgagtcagctacgggcaagcgggcagctgaagatgatgaggatracgatgtcgatacccagaagcagaagaccgacgaggatgaccagacagcaaaaaaggaaaagttaaactaaaaaaaaaaggccgccgtgacctattcgcc

SEQ ID NO: 509196 - DNA, 201 bp, Homo sapiens
ctttgtggcaagccacaaagtagaaaaaaaaaaatttgtgtaagtcatgtaacccaaagaagctcatatctagaatatataagaactcctaggccaggtgcaatggctcacgcctgtaaacccagcattttgggatgccaaggtgggcagatcacctgaggttgggagtttgggaccagcctggccaacacagggaaaccc

SEQ ID NO: 509197 - DNA, 201 bp, Homo sapiens
ttcccattctttatcacatgccccctccaaaaacaacattctaagtgctgtatttctgggaggctcagagaccatttatttatttttttaaaggtttttasctgcattgtgcagtggaggggcaaattctaggccagacctgtggtcagagcagaaacgtagagtggtctgtgctgctctcaacactcattccaggatcag

SEQ ID NO: 509198 - DNA, 201 bp, Homo sapiens
actcttaagaactttattccccaggaaaggtgaatttcacagccactgcggaagccatgcattctcaggaagtgtgtgacaatgagttgactgacgtcccrccacttgcgcagaaggacactgtagtcaaggccttactagttgaggtacgtaagtctactctctgtgagtctcagagcccttattatttcatacagtatt

SEQ ID NO: 509199 - DNA, 201 bp, Homo sapiens
cattcttcatcagacctaagcacagagacacagtgttctctgggtcttttggtcttcatttctgaagacactggtgtcacctaaaactttgatgaagtacrtttgttatgcttttctcttattaacctgtcttttattataggagtgccagccacaacccttatgatgggtgaggaaatatatcacacttttttaccctta

SEQ ID NO: 509200 - DNA, 201 bp, Homo sapiens
acaggaaaaaaaatgtgatcacagtctcccaggttttctcaggcagcagcagaaggtagtagcaaacaacccagacagtggtgacctgtagctgtttaggraaaaatataggtgagtgaatgaaggaatgagtggaaggaaggatggatgaatgaacgagatcacaaatgaacagcatgctgtagtggaaagaaacctgga

SEQ ID NO: 509201 - DNA, 201 bp, Homo sapiens
cactggggaaactggaaaagaagaaactgttcaatatagaatcaccgtttaactcttaagaactttattccccaggaaaggtgaatttcacagccactgcrgaagccatgcattctcaggaagtgtgtgacaatgagttgactgacgtcccaccacttgcgcagaaggacactgtagtcaaggccttactagttgaggtac

SEQ ID NO: 509202 - DNA, 201 bp, Homo sapiens
acttccctgatttggaaagtggcaatcccaattgcccaagcaaaaaacgttgaagtcattcttgactcttctctttagatcaccccctacatctgagtcayccatttattcaatattcaacaaaaatacattgagggcctcccctaagacagtcacttttttttctgtcatgggtggccatcagtagacaaaacagacaaa

SEQ ID NO: 509203 - DNA, 201 bp, Homo sapiens
acagaacagatgagaaacagcctggacactttaaaaataatgatagcacaaaaatttaacataggttcagatggcatattttttatttaaggaatacaaarctgccatgtgaagctcactgagatataagtatgctttattccaacagaacttggtgctgtttatctgattttcactactctagcagcataatcataacat

SEQ ID NO: 509204 - DNA, 201 bp, Homo sapiens
tagatacatgaccttggataacttacctaatttcatctggaaagagaaatgtcaatcatctcactttagtcctggagataatattaatacctacttcatgraattatagtgtaaattaacagtaaattacttagttcagttcctggcatatagagaatgctcaatacatttagtttttttaaaatagaggcaatattagag

SEQ ID NO: 509205 - DNA, 201 bp, Homo sapiens
ttacaaaaaatacagtgaaaatatcgttaaagaaattaaaaacagaaaaaacaaagagaaattaaaatgctacattagaaaatactcatttatgcaaaatmaaccccactaaggaataagaaaggaataaaaagacgagacataaaaacaaaaagtaaaacattagaggtaaatgtaattatataaaaaataacattttta

SEQ ID NO: 509206 - DNA, 201 bp, Homo sapiens
cttcagggacattttccagcaaattccaagtggacaacaacaaccgcctgttactgcagcaggtctcattgccagagctgcctggggaatacagcatgaargtgacaggagaaggatgtgtctacctccaggtgagactcttgggcaggtgaggacaggacagatgaggacagcagctgttctctctgagaagtcctaact

SEQ ID NO: 509207 - DNA, 201 bp, Homo sapiens
tgtctcaagaaaaaaaagaaaagacccaaagaggcaattgcttgaacctgggaggcagaggttgcggtgagtgagatcgtgccattgcactgcagcctggrcaacaagagtgaaactccgtctcaaaaaaaaaaaaaagaaaaaagaaagaaagaaaaaaatacaaatttataaaaaaccaattcactataacaacaactt

SEQ ID NO: 509208 - DNA, 201 bp, Homo sapiens
gaagagaggggagaagccaaaggttgataatgaataaatcaatgatgaacgaagaaactttatgtcattcttgggcttgggaaaagataagcaccaaaagratggtcagaacatttgttacatttatttttatggccagtaaaaaaattctcataaattgacagctgactttttaagtagcaaattggaagacctgagaat

SEQ ID NO: 509209 - DNA, 201 bp, Homo sapiens
gtgaatacttaaactaattcaaagagagaagaaagcttcctgaaaggtcatttaattgacttttgctttccaggtgtcaaatcagacactgagcttgttcytcacggttctgcaagatgtcccagtaagagatctgaaaccagccatagtgaaagtctatgattactacgagacgggtgagtgagagtgattttcacgtag

SEQ ID NO: 509210 - DNA, 201 bp, Homo sapiens
gagacccaaatctgtcttaattttttttctttccaatgtcacagatcttggaaatgcttgaagaccacaaggctgaaaagtgctttgctggagtcctgttytcagagctccacagaagacacgtgtttttgtatctttaaagacttgatgaataaacactttttctggtcaatgtctttccctgtttcctgttcattcaat

SEQ ID NO: 509211 - DNA, 201 bp, Homo sapiens
caaacagtgttggtaattttgaatgttttgaccaacttctaataaactatgttagatttttattatattttcttgtcaaatagtagacaaagggcttctaygcctgtaggaatagatgtcagtgttgtcaaacagctccttgtttgccgccacatgcattattagagttatcttgaaaaccagcagtttctctgtaggagt

SEQ ID NO: 509212 - DNA, 201 bp, Homo sapiens
aatataaatccgtatttcaaacagtgttggtaattttgaatgttttgaccaacttctaataaactatgttagatttttattatattttcttgtcaaatagyagacaaagggcttctacgcctgtaggaatagatgtcagtgttgtcaaacagctccttgtttgccgccacatgcattattagagttatcttgaaaaccagc

SEQ ID NO: 509213 - DNA, 201 bp, Homo sapiens
aactcctgacctcaggtgatccacctgcctcggcctcccaaactgctgggattacaggcatgacccactgcgcctggccaagaactgcttctaagttcagyttatttcaaatcttggtggatacatggctgtaataaccagaacagacatttcatgaaacctcttcatacacaacaattagggtgaggctcatagtaacaa

SEQ ID NO: 509214 - DNA, 201 bp, Homo sapiens
cctcccaaattgctggtattacagacgcgtgccaccatgctcagctaatttttgtatttttagtagagatggggtttcaccatgttggccaggctggtctygaactcctgacctcaggtgatccacctgcctcggcctcccaaactgctgggattacaggcatgacccactgcgcctggccaagaactgcttctaagttca

SEQ ID NO: 509215 - DNA, 201 bp, Homo sapiens
agggaaactgatggtataacttcaatctgaggccaaaggcctgagaactccaggggccgctgatgtaagtcctagagtccaaaggcccgggagcctggaaytgttgtccgaggacagaagaagaaaagtgcatcccagctctggcagacagatggacacattctccctttctgttcttgttctctctgggcccccagcaag

SEQ ID NO: 509216 - DNA, 201 bp, Homo sapiens
gtcagtagtgtggttcagcccaagtgtgaaagcctcggaaccagggaaactgatggtataacttcaatctgaggccaaaggcctgagaactccaggggccrctgatgtaagtcctagagtccaaaggcccgggagcctggaactgttgtccgaggacagaagaagaaaagtgcatcccagctctggcagacagatggacac

SEQ ID NO: 509217 - DNA, 201 bp, Homo sapiens
cattgatcaaaatgttgttattcagtgcatgactgtaactcccgatttgtggcttgttggacattaacatttaattcactatcttagggttctccagagasacagaatcaatgggacatgatagatatagatcagatagatgatatagatataaatatagatataggaaaaaggatttattagagggattggctctcacaa

SEQ ID NO: 509218 - DNA, 201 bp, Homo sapiens
tgagccaccacgcccagcctgaactatttcattgttgatttcttcccctctgttttactcttcctggaaattctattatttggctgctgaacttcatagakttcataaattttcttaccttttttctctcatttcctatctccttgtctttttgccacgctttctgtgtaatttcctcaattttatctttcaattcttcat

SEQ ID NO: 509219 - DNA, 201 bp, Homo sapiens
tgtttcttttcttattcctgtgttgctgctgagaaacccaatccaattccgactcccccaccacccttttgtgccacccttctaccccttctggaagcctkagaatctcctgtttgtcctagatattttacatttcacaatcatatgctttagtgcaggacaattttcatctattatgatggacactttcaatttggttct

SEQ ID NO: 509220 - DNA, 201 bp, Homo sapiens
gaaatgagtcaaaccttcaatcctctcagtctggtatttactagtgtaagaaaaaaattaaaatgtataacttgaattacagttgactcttgaacataggygttaggggcaccgacacttcctcaagtagaaaatttgcatttaacttttgactcccccagaatttaactactaataacctactgtacagcacaagcctta

SEQ ID NO: 509221 - DNA, 201 bp, Homo sapiens
tagtggaaagaaacctggagacatggggttggcatcctaacattttccttatcctttgtgtgatgttggaaaaattgcctgatgtcttctcagtttcctcrtctgtaaagtggggcaaaagtacatactcctcagggtggttgagaagatcaaaggagatgatgtttgtgaaagtacctacttcctttgaggccatgtcta

SEQ ID NO: 509222 - DNA, 201 bp, Homo sapiens
tactaataacctactgtacagcacaagccttatggataatataaacagttgattaacacatattttgtatgttatatgtgttatgtattgtattcttaaastaagctaagtaaaagaaaatgtgaagaaaatcataaggaagagaaagtatgtttactgtttattaagtggaagtagctcttcataaaagtctccatcctc

SEQ ID NO: 509223 - DNA, 201 bp, Homo sapiens
cttagtggccctggagaaatggcgtgcaaaattttaaacaaacattttcctcctgggcctcagtttgttttccatgagataccatgagtgccctcagtccygctgtagtcagggtggtaggtgtgggctccaggccacgataggccctgactgtgggcagaggccccagccttaccagtgtgcccagtggggctggagagg

SEQ ID NO: 509224 - DNA, 201 bp, Homo sapiens
ggtgttaagaatttggctagtgggagaatcaaatggaatgtcgtggaaagtaaactgcgctggaggaatgttaaaccagtataaggctgaaggaaggaagrcttccaaggacaatggattagatgcccaaaacacgtcaaggaagaagtggaataagaataattaaggggaacagctgaaagtagaatgtgatgtattaaa

SEQ ID NO: 509225 - DNA, 201 bp, Homo sapiens
ggagaaatggcgtgcaaaattttaaacaaacattttcctcctgggcctcagtttgttttccatgagataccatgagtgccctcagtcccgctgtagtcagkgtggtaggtgtgggctccaggccacgataggccctgactgtgggcagaggccccagccttaccagtgtgcccagtggggctggagaggcggtggggcatg

SEQ ID NO: 509226 - DNA, 201 bp, Homo sapiens
aaaacagaaaaatgtgtgtggcaggtgttaagaatttggctagtgggagaatcaaatggaatgtcgtggaaagtaaactgcgctggaggaatgttaaaccrgtataaggctgaaggaaggaaggcttccaaggacaatggattagatgcccaaaacacgtcaaggaagaagtggaataagaataattaaggggaacagctg

SEQ ID NO: 509227 - DNA, 201 bp, Homo sapiens
aagatctgagaaaaactaaattggtaattttccatttggagctgtttcaaaaagattcttccagtactttttctgagagttatggacaattaagacacggyctttcagaagaagggtttataaaatggaaataatatggaaggtaatacaacagcttaaggtggatgtatgaaaggatcaagtcagttgaagaaacatcag

SEQ ID NO: 509228 - DNA, 201 bp, Homo sapiens
gggcataagccttgctagacacagctcctggtctgcaccaccatggctcctgtgccgccagccacaggtccagacctagacccctctgttgcccttgaggrgctgaccttattctccacagtgatgctggtggacagcatggcaggggctgaggcagcagaggccattgccaccttgggatctgtgccagagccatcacta

SEQ ID NO: 509229 - DNA, 201 bp, Homo sapiens
gccagccaggagggagaagtaagcccaaagtttgggattcattttccctttccttcctgctccatccatggagcagaccttgggactttccaacttgggaygcttggtggaccgtgcctaaacatggaagcaactgcaggtttctggccgtggccagtgaaactaaggggtttccatgtggagaagcctaaccgccactgc

SEQ ID NO: 509230 - DNA, 201 bp, Homo sapiens
ggaaccaaccagttgccaactcctgacccttggagttgaccccacaccgcttaaacctctgcgctggttccccgggggcccacagtgaggtctgtaactcrgggagaggcgctggagcggggtgtgggagaatggtgtgcaggacgggctccatgcactttgaaactataaactgccttatgagacaggggtacggtgtgt

SEQ ID NO: 509231 - DNA, 201 bp, Homo sapiens
acccaaatctgtcttaattttttttctttccaatgtcacagatcttggaaatgcttgaagaccacaaggctgaaaagtgctttgctggagtcctgttctcwgagctccacagaagacacgtgtttttgtatctttaaagacttgatgaataaacactttttctggtcaatgtctttccctgtttcctgttcattcaataaa

SEQ ID NO: 509232 - DNA, 201 bp, Homo sapiens
actttcattttcaataaaatctttcattccttccttgctttgtttgtgcattttgtccaattctttgttcaagatgccaagaacttagatatcctccaccrttaacatattttggcaagccagccaggagggagaagtaagcccaaagtttgggattcattttccctttccttcctgctccatccatggagcagaccttgg

SEQ ID NO: 509233 - DNA, 201 bp, Homo sapiens
ttgccaactcctgacccttggagttgaccccacaccgcttaaacctctgcgctggttccccgggggcccacagtgaggtctgtaactcagggagaggcgcyggagcggggtgtgggagaatggtgtgcaggacgggctccatgcactttgaaactataaactgccttatgagacaggggtacggtgtgtgtgcattttcct

SEQ ID NO: 509234 - DNA, 201 bp, Homo sapiens
ataaaatcaagttaatcactgagtagccaaattggtttttttgatgattgaaaattatgcaaactttgtttcatttctctttttttacttttttttttaaraaacaaagtctctgttctgtcactcaggctggagtgcagtggtgcgatcatagctcacttccacctgcaactctgggctgaagcaatcctcccacctcag

SEQ ID NO: 509235 - DNA, 201 bp, Homo sapiens
aaaagaaaaatggggcaaagaaaacaggaaaggcatctgtgagacccttgggtgagttcatgtctgagacctgttggcatcagcatggcgtgattgtccgyttcttgtgtgaggcatgtggcactggtagactgtgaccagtgctgctcacgatttgaatttgcccttcccaaagtcagactatgctgagggaggagaaaa

SEQ ID NO: 509236 - DNA, 201 bp, Homo sapiens
tactttcattttcaataaaatctttcattccttccttgctttgtttgtgcattttgtccaattctttgttcaagatgccaagaacttagatatcctccacyattaacatattttggcaagccagccaggagggagaagtaagcccaaagtttgggattcattttccctttccttcctgctccatccatggagcagaccttg

SEQ ID NO: 509237 - DNA, 201 bp, Homo sapiens
agtctctgttctgtcactcaggctggagtgcagtggtgcgatcatagctcacttccacctgcaactctgggctgaagcaatcctcccacctcagtctcccyggtagctggggttataggcacatgccatcacacctggctaatcctttcaatttcatagttatttatactcttcagactattttgaatgtatatatgtaca

SEQ ID NO: 509238 - DNA, 201 bp, Homo sapiens
ttccatgagataccatgagtgccctcagtcccgctgtagtcagggtggtaggtgtgggctccaggccacgataggccctgactgtgggcagaggccccagmcttaccagtgtgcccagtggggctggagaggcggtggggcatggccagcctggggctctggtgtgtgtctcttggctcagtatagaatgaaaggctgcca

SEQ ID NO: 509239 - DNA, 201 bp, Homo sapiens
agaaattaaagttgcaattggaattaaggttgttaatcagttgaccttaaaatagggagattatcatggattaccttggcaacccagtgtaatcacaagcrtccttaaaagtggacgagggaggcaggaaagacaggttcagtgatgtgacatgagaagtatttaacctgtcatttctgtctttgacactggaagggggcc

SEQ ID NO: 509240 - DNA, 201 bp, Homo sapiens
cctatggtctccacctccctcccacttcagcctccaaagtaactggcattataggcgcacatcagcatgcctagctaatttttgtattttttgtagagatrgggttttgccatgttgcccaggctggtctggaactcctgagctcaagcaatctgctggtcttggcctcctaaagtgctgaagtgctgggattacaggtgt

SEQ ID NO: 509241 - DNA, 201 bp, Homo sapiens
tacaaatttgagtgatttatataagaatagccatgattcacaatgctgatcatcttttctcacagaaacacacacggacttaagaaagaaaggctttgaaktacaaaaagcaatagatgcctgttgtcaatttttaacaatatagaaatatgaaaaataacaaatggaagctgttcagatgttttcatgcacaaacatgta

SEQ ID NO: 509242 - DNA, 201 bp, Homo sapiens
acccaggaggacggggctcctgcctgcttcatagagcaggaagcctgggtctgcagctgaggtttggaggactgaggtttgcagggctgcagcagcacctkggggagcccccaccccaactcagaagaggcgaagctcccactggctgcatggggcatgatagcaagcagccactgccattaataggaagctaatgaaatc

SEQ ID NO: 509243 - DNA, 201 bp, Homo sapiens
aagagaggagtaaaataaccatagaaacctgaaatgagaagataaaataaggtactagcacaaatcatccttatctatgggcagaattgcattcacaaccmtggaaatagctgatttttgctttaagttttattttcttagaaacaatgtattctacaagaaataccacatccctttattttttgtaaataaaatatgact

SEQ ID NO: 509244 - DNA, 201 bp, Homo sapiens
aatccaatatgaagaatagagggaaaaaatgggagaaaaaaatgaacagaacctcagtgacctatgaacaatgccaaatagtataacaaaagtgaaactgwagtcccccaaaataaaggggacatataatgaaatcggaaaggaatttgaaaaagtaatgatcaaatattccccaaatttgggatacaacctacaggtata

SEQ ID NO: 509245 - DNA, 201 bp, Homo sapiens
tagggaagcgcccggaggagacctagcgtgagaactacaactcccgcggagcccgagggcgagctgcctgcgtaacttccgcttccgccacctgcccctckcaccctcttcactcgaaccctacccgggagcggtcaggcgcgtgaccccgcgtgaccggggtgcgcgagccgagaggccctggaagcgggactctgggac

SEQ ID NO: 509246 - DNA, 201 bp, Homo sapiens
tgaggcagcagaatggcttgaacccaggaggcggagcttgcagtgagccgagatcacgccactgcactccagcctgggcgacagagcgaaactccatctcaaaaaaaaaaaaaaaaaaaaaaaaaaagatgccagggctggctgggcacagtggctcacacctgtaaccccaacactttggtttgggaggccaaggcggat

SEQ ID NO: 509247 - DNA, 201 bp, Homo sapiens
gctgaggcaggacgatcattggaacccaggagtttgaggctgcagtgagtgaaagagtgagaccccatccctaaaatacacacacacacacacacacacaccccccaagtaaaatttcagctggaatataaatcgtgggtattatactgatttatggagagaattatgctaagtctttcagatgaggaaaacatataagaa

SEQ ID NO: 509248 - DNA, 201 bp, Homo sapiens
taggaatgttttagctccattataagcttacagaactgctgtcatatatacagtctgccattgatcaaaatgttgttattcagtgcatgactgtaactccygatttgtggcttgttggacattaacatttaattcactatcttagggttctccagagagacagaatcaatgggacatgatagatatagatcagatagatga

SEQ ID NO: 509249 - DNA, 201 bp, Homo sapiens
ctgaggcaggacgatcattggaacccaggagtttgaggctgcagtgagtgaaagagtgagaccccatccctaaaatacacacacacacacacacacacaccccccaagtaaaatttcagctggaatataaatcgtgggtattatactgatttatggagagaattatgctaagtctttcagatgaggaaaacatataagaaa

SEQ ID NO: 509250 - DNA, 201 bp, Homo sapiens
agtccaggaaattgaggctgcaatgacctgtgattgtaccactgcactccaacctgggtgacaaggtaagactccgtctcataaaaaaataaaaataattwaaaaatgaagaacaagaatgaggaaaatgaaagactttaaatgctctccctttctttacatagatccaagtttctgacctatatcatcttccttttctat

SEQ ID NO: 509251 - DNA, 201 bp, Homo sapiens
taggagtatactctaaaataacaacaaagaatagagtaagtacataaaccagtaacatagtcttttattatcattataaagtattatggactgtacataaktgtgcctgctatacttttatatgactggcagcacagcaggtttgtttacaccagcatcaccacaaacacaccagtaatccagtatgctatgacgtcagaa

SEQ ID NO: 509252 - DNA, 201 bp, Homo sapiens
tagtttgctgaggataatggctttcagctccatccatgtccctgcaaagatctcatccctttttatggctgcatagtattccatggtgtatatgtaccacrttttctttatctggtctatcactgatggacatttgggttgattccatgtctttgctattgtgaatagtgctgtaatgaacatatgtgtgcatgtatcttt

SEQ ID NO: 509253 - DNA, 201 bp, Homo sapiens
gttgcccaggctggagtgcagcccacgatctctgctcactgcagcctccacctcctgggtggagaatcaagcgattttcctgtctcagcctcccgagtagstgggattacaggtgcctgccaccacgcccggctaatttttgttttcctctacatacagctctcacaaaccagcagtgggggagtgatgcagccctccagc

SEQ ID NO: 509254 - DNA, 201 bp, Homo sapiens
tacttatactcaggatcatcaatatcactgtcttccacctctacgtcttgtcccactagaaggttcagggacaataacatgcatggagctgtcatctactrtgataacaatgccttctggaacacctcctaaaggacctgccggaggctattttgcagttaactttttttttttaaataagtaggagtatactctaaaata

SEQ ID NO: 509255 - DNA, 201 bp, Homo sapiens
tcataaagtttatttcatgattggtgggtagtgcatttaacagttaaatatacttaaataatgtgtaggtgactgcacggttgcagcatattggtaactaratacataaccaattcaactagaaaccagctaacgagtagctgtttaaatatttaaaatatagctcttgtttagagcctttgttttgatcaccttctttgt

SEQ ID NO: 509256 - DNA, 201 bp, Homo sapiens
ctttctttatatccttaatctataagctttttttattttttaaactttttttgttcgaaactaagatgcaaacacacacattagtctaggcctacttatastcaggatcatcaatatcactgtcttccacctctacgtcttgtcccactagaaggttcagggacaataacatgcatggagctgtcatctactatgataaca

SEQ ID NO: 509257 - DNA, 201 bp, Homo sapiens
caagcagtgcccaatttccccaaagtgccctcttgtttcccctctcacttggaatcagggtgggaggggaaataccccagtaatccccttttttttttttwaagagtctcattctgtcaccctagctggagtgcagtggtatgattgtagcccattgtagcctctatcacccaggctcaagtgatcctctcacctcagcct

SEQ ID NO: 509258 - DNA, 201 bp, Homo sapiens
gtcctcttcagtgtcaggaggttgtgcattaatcagtacttgacaatttgaggaactcacaataagattcgttactcagggacaagatgtttgcatgaatyacaagccctccctcaggctgttaatttagaagcctatttactttaaagtcaactgcccaaaagtgccctgtagtttatcaggcacttactatgaatggag

SEQ ID NO: 509259 - DNA, 201 bp, Homo sapiens
cacccaggctcaagtgatcctctcacctcagcctccctagtagctgggactacagatataaaccaccttgcccagctaattcttttatttttttatttttrttagagatgatgactttctacgttccccaggccagtcttgaactcctaagctcaagcgatcttccctccttggcctcccaaagtgctgtggttacaaatg

SEQ ID NO: 509260 - DNA, 201 bp, Homo sapiens
actgcaatataaaggctaaaatatcgacatttgattcaaaagtgagtcagagtcctcttcagtgtcaggaggttgtgcattaatcagtacttgacaatttraggaactcacaataagattcgttactcagggacaagatgtttgcatgaatcacaagccctccctcaggctgttaatttagaagcctatttactttaaagt

SEQ ID NO: 509261 - DNA, 201 bp, Homo sapiens
tggggaacgctcacggactgtgccgtaatgagagacccaaacaccaaggttgcaggggctttgggtttgtcacatatgccactatggaggaggtggatgcrgccacgaatgcaaggccacacaagtggatggaagatttgtggaaccaaagagagctttctcaagagaagattctcaaagaccaggtgcccacttaactgt

SEQ ID NO: 509262 - DNA, 201 bp, Homo sapiens
atatgtttcatttctagctttgctgtctgggtgccgattttgctaggtttaactatttgctcaatgttaaggcagctctgtggaaatctgtgtaactggastgctatgcaggcctgtctgtgtgattgtcagggagaattggcctgccacacttacacaaatctaggtggtctagcctaccatacacctaggctatatgta

SEQ ID NO: 509263 - DNA, 201 bp, Homo sapiens
ttatatgtagacatacagcttggaaggtttataagctctggaaaactttgtaattttgagttggtgtggtgacaatttctaggccttctccctgtaaccaratgcaaaaataaaacctctcttccccagtttgtctgcatctcattattgggccaggagaagtagcagcctgaccctcagttttgtccaggagcaacatgt

SEQ ID NO: 509264 - DNA, 201 bp, Homo sapiens
gcctgtgctccatcggaggatggctccacccagcccctgcaccagtgcgctcctcgattccctaaagaggcttccagagaaaacagcagcacatatcaatraaaaactcagcagaaaccaacagtacacttttaattaaggacctgtagctgtgcaggatgcaaacagctgggcatcagtgactttcctcctgcccccggt

SEQ ID NO: 509265 - DNA, 201 bp, Homo sapiens
gtctgagaggggagaaggcccagccttgcattcttgggaacaggtgctgattgccttcagggctccagcctcttttcttggccttttcaatgctcagacaycctcttccttgccctcacccctgctcttcccacatcttcaaagctgaaggagtctccttattctggaggtgaggagcagtgagggagaactgcctgtaag

SEQ ID NO: 509266 - DNA, 201 bp, Homo sapiens
tgttctttttgcttaggattgctttgggtatcagttgtttatcagatcaaggagcttttcggcagagatgatgaggttttctagatatagaatcatatcaytcgcaaacagggagagcttaacttcctctcttcctatttggatgccttttatttctttctcttgcctgattgtgctggctaagaattccagtactatgtt

SEQ ID NO: 509267 - DNA, 201 bp, Homo sapiens
tccacccagcccctgcaccagtgcgctcctcgattccctaaagaggcttccagagaaaacagcagcacatatcaataaaaaactcagcagaaaccaacagyacacttttaattaaggacctgtagctgtgcaggatgcaaacagctgggcatcagtgactttcctcctgcccccggtttgtccctgatggtggcagaagat

SEQ ID NO: 509268 - DNA, 201 bp, Homo sapiens
ccaaataatactcttataatttcttatgcctgtcttactttaatctcttaatcgtgttatcttcataagctgaaggatgtacgtcacctcaggaccactakgacaattgtattaactgtacaaattgattgtaaaacatgtgtgtttgaacaatatgaaatcagtgcaccttgaaaaagaacagaataacagcaattttag

SEQ ID NO: 509269 - DNA, 201 bp, Homo sapiens
tgtttgtttgtttttcttttagcagtcaagccactctatcatagggctgctgaggtttgctgggggtccactccagaccccagttgctttggtttctcccrtacgtggaagtatcaccagcaaaggccatgaaacagcaaagatggcagcctgtgccttcctctagaaactccatcctgtgggggtactaacctgttgcca

SEQ ID NO: 509270 - DNA, 201 bp, Homo sapiens
ggggcatggccagcctggggctctggtgtgtgtctcttggctcagtatagaatgaaaggctgccagccggggccgtgtcctggctggagagcagtggaggrcaaagtcctctccctgcaccctcctcactgtctctgccaggcagctgcttcagagttggggcccaggaggtagagggctcctagagaagaagtctgccag

SEQ ID NO: 509271 - DNA, 201 bp, Homo sapiens
ggccacgggatcattttaaattgagaccagagagtgagcagtccagggcagctataaccttggctagaaagggcagaggcagatggacctgctccatctcrcctcttaaggtgggcaggacggagatgccacagtggatgccactgctgccacagcctcctgcggactccaagcaggaagcctggctctcagccatgcagg

SEQ ID NO: 509272 - DNA, 201 bp, Homo sapiens
gcgtgatctctgctccctatggtctccacctccctcccacttcagcctccaaagtaactggcattataggcgcacatcagcatgcctagctaatttttgtwttttttgtagagatggggttttgccatgttgcccaggctggtctggaactcctgagctcaagcaatctgctggtcttggcctcctaaagtgctgaagtgc

SEQ ID NO: 509273 - DNA, 201 bp, Homo sapiens
ggaagacatgccctccagtcacctcctgcccaccagaccctgtgctcacagacagcgagcgccagtggcagcaggtcctgccagatggcaaggccccagcygcccctgtaaccgggaccatgtggtggctggtctctttagtcacagtgtgagagccggctaatgtgggaagagggttcacagcggccagttcctgctgga

SEQ ID NO: 509274 - DNA, 201 bp, Homo sapiens
gaatagtttcactgaattggaagctgagagtattatctggccatttggagattcccacatccagtcctctgggataacacagccaaactgtcaagaaacartacatttactgatatactttggggacaggaggatgaatgcaactaaatggatctcatggagcccctccatgtcccacaatgcagtctttacatttcatgg

SEQ ID NO: 509275 - DNA, 201 bp, Homo sapiens
cccaaagtgctgggattataggcatgagccactgtgcccggcctccccaggcaattttaaagactgaggagagtaaactaatttagtagatgggggacttcaattatcatctatatgcctactactctcaaatgtttatctccaacccagacctctcctctgagctcaagaaccacataataaaactgcagtctcagtatc

SEQ ID NO: 509276 - DNA, 201 bp, Homo sapiens
attttcacatccctaaaacacagcccagggcctgacactgcagaagcacttaatattcactgaaagaagagatacccacagagttaaagatgccaacgtcwtcccacaaatgacttggattttacaaatcatcagcttagaccaccatctgagtcttgagagtcagcacctgtcagctctgacctaactcagtttcctcca

SEQ ID NO: 509277 - DNA, 201 bp, Homo sapiens
tgtactagaatgtaaaatcttgtatattcttcatagtgaaggactgacaggacccgtttacagtgaaccacttgtaaatcatcttgtttctggtggatggrgccaatggggaaataattaaagtattgagtgtatggagaggatagaagttggtagaaaacaaaaacttaagaaccatactggtgattccaaaattccccc

SEQ ID NO: 509278 - DNA, 201 bp, Homo sapiens
ctagtcagtatgaaacttggacatcacttcgtccatactcttcccactcaatcagacattaccaactactactagtcttaaagatctcagagaaagaactyccttgctcagtcatttcagatcctgagtaatttcttgtgtctcttatctttgccatacttaaatattgtattcttttactctgtactcagcaaagaagaa

SEQ ID NO: 509279 - DNA, 201 bp, Homo sapiens
gaacaatatattctatgtaagtaacatggatttagatataaaaattctgcttggctcttctaagattatttctccgagcttctcacatacctaatctccarataagaaggatctaataaaaatgaatgtcaaaaatatgagggcccttcattgcatcacttttgtaacactcaataattcatccaatcaattttgattagg

SEQ ID NO: 509280 - DNA, 201 bp, Homo sapiens
ctgatttcactctgataagaatggatttgcaattcacaattccagcagaaagaacaacctggagctaattatctctaagaatgacagtattacacaccaarccctgtgagtcttcaaggcctagctagttcacaaaacatctttaatttgtttactatacaagtactttattgatgtaccagcactcttcactatcaaaat

SEQ ID NO: 509281 - DNA, 201 bp, Homo sapiens
cagcctcttcctcagtcccccaaaccaaagctacacagccagatttctcaagcagtctcaactccagtccctcatctcacccttactattgctcttgcttyccagtttgcttttgatttgcatcttctcactagtaaaactgccttccctttgttccttattttctgttttttctctagagaggtacagttgtaagtcaga

SEQ ID NO: 509282 - DNA, 201 bp, Homo sapiens
ccttctaccacaaagatttccaaaagcagtgggaaaatcagtaagagtccttaagatagattataaaatctagaataaggagaactggaaattaaagatayaaatgtcctattttagatcatcttttggaaaaaaaaatttttttgagacagtctcactctgtcacccgggctggagtgccgtggtgctatcttggatcgc

SEQ ID NO: 509283 - DNA, 201 bp, Homo sapiens
aaagctacacagccagatttctcaagcagtctcaactccagtccctcatctcacccttactattgctcttgctttccagtttgcttttgatttgcatcttytcactagtaaaactgccttccctttgttccttattttctgttttttctctagagaggtacagttgtaagtcagagttaatataatagggcctgtgaaaac

SEQ ID NO: 509284 - DNA, 201 bp, Homo sapiens
ctaaaattattctcagggttcacccccaaaaacctacacaacctagttgagaatccctaaaacgcaaagttcaaaacctaaaatcacgaagacttgtcccktgagaactttatgacgtcttcctaaccttaagccgaactctctccattttagatgtcttactaattttatcctaattcatactcttagatttcagatatg

SEQ ID NO: 509285 - DNA, 201 bp, Homo sapiens
gtccactcggaaggatcacctgaagccaggaattcagaaacagcgtgtacaacaaagcgagacttcgtgtctctaaaaaaatttttaaagaattagccagrtatagtggcaggtgcctgtaccccgagctacccaggaggctaaggcaggaggatcacttgagctcaggggttcaaggctgctgtgagctatgatcgtacc

SEQ ID NO: 509286 - DNA, 201 bp, Homo sapiens
attaaaaaaaaaatgccaagaaacattatttatacagggttgattgctttcatgttgttattctgtaccctatagtagcctccatgagaatctggtatttyttgctgcttggaactactttgcagtgattacttggttgcagtccaagtactctcgtttagtctgagcctggagatgttctagacttgcttctcccacctc

SEQ ID NO: 509287 - DNA, 201 bp, Homo sapiens
ttatttatacagggttgattgctttcatgttgttattctgtaccctatagtagcctccatgagaatctggtatttcttgctgcttggaactactttgcagkgattacttggttgcagtccaagtactctcgtttagtctgagcctggagatgttctagacttgcttctcccacctctgagattaggacaggaaaaatgtga

SEQ ID NO: 509288 - DNA, 201 bp, Homo sapiens
cagagcgagacaccatctcaaacaaacaaacaaacaaaaaaacaaagttcctgtcctcatagatttaaatttaaattctagtaggagagaacaataaacarataaacttattaatcctccactgaggattgtgttagacactgtgagaaaaaataaatcagcccaaggatgcgggtgtaacctgtatcaggtggccagaga

SEQ ID NO: 509289 - DNA, 201 bp, Homo sapiens
gtgggcgacaccgcgagggcttcccgtttatgggcggccgtccgcgctgtaagatggccagggaagccaacttggctggagatggaggcggcggcgttgtstacgccgcgggagtcagtgaactccgcagggcactgctttttgtgctctacgtgacagaccacgtgcttcgggctgcgaccctggtccttgtccgaatgt

SEQ ID NO: 509290 - DNA, 201 bp, Homo sapiens
tatggaggaggtggatgcggccacgaatgcaaggccacacaagtggatggaagatttgtggaaccaaagagagctttctcaagagaagattctcaaagacsaggtgcccacttaactgtgaaaaatatgtttgttgatggcattaaagaagacactgaggccgggtgcggtggctcaggcctgtaatcccagcactttggg

SEQ ID NO: 509291 - DNA, 201 bp, Homo sapiens
attcagaaataccatactgtgaatgaccacaactgtgaagttaggaaagcactgtcaaagcaagagagagctagcgcttcatctagccaaagaggtcgaartggttctggaaactttggtagtggtcatggaggtggttttggtgggagtgacaactttggtagtggagaaaacttcatggtcatggtggctttggtggca

SEQ ID NO: 509292 - DNA, 201 bp, Homo sapiens
ttgacccgagatgggtcctgcactaggaatgaaagactgtattattttggtttgctccaggttagggagaagcccacgcaaggctcctactgaccatatgyttcatttctagctttgctgtctgggtgccgattttgctaggtttaactatttgctcaatgttaaggcagctctgtggaaatctgtgtaactggagtgcta

SEQ ID NO: 509293 - DNA, 201 bp, Homo sapiens
aaggttacttcttccagttgtccagtcagcttcatattcatccactgactcaagaatcttggtctataaagcatcctctctcacatgcatattttttgggktttttttgagatgaagtctcactctgtcatccaggctggagtgcaatcgcacgatctcggctcactgcaaactccacctcctgggttcaagtgattctcg

SEQ ID NO: 509294 - DNA, 201 bp, Homo sapiens
gtaccttcaaggcctgtgtactgtggtaccagagtgattatttctatcttatctcctttacagcttggtctggagtgctgccttagactctccaatgaatytactcaaacagctctgttaccttgactgtctcagatttcgttgacccgagatgggtcctgcactaggaatgaaagactgtattattttggtttgctccag

SEQ ID NO: 509295 - DNA, 201 bp, Homo sapiens
tgtcatataccggtgtaccgttttttatcttttatactgtaatctgcaagctccattcatggtaagtgtcatatgcaggtgtaccattttttatcttttayactgtattttactgtattttttctatgcttggatgtgtttaaatacataaatacttgccattgtgttacaattgtccacagtatttagtacagtaacttg

SEQ ID NO: 509296 - DNA, 201 bp, Homo sapiens
tagttctttaagacgcattgttaagttgtatatttgaggcatttttacttttttatgtaggtggttttaggtataaactttgctgttagtactgctttcaytgtatcccatagattttggtattatgtttccattatcatttattttcagaagttttttaacttccttcttaatttcttcattggctcacctgtcattcag

SEQ ID NO: 509297 - DNA, 201 bp, Homo sapiens
tgggctgtggcatcgttaattctctcttgcctttttcttcctgtgtttaagtctctggggcctggggaaaccagtgctccccacagacctccctcactcascctttgccctccagccttttcacctctggggctggtgaggggccgggaggagagagcccgtatgtcagacaacaaaccgtgtctgctaacccccagcagc

SEQ ID NO: 509298 - DNA, 201 bp, Homo sapiens
ttcagtaacatactgtttaatttccatgtgtttatatagttttcaaagttcctcttgttactgacttctagtttttttccattatagtcagagaagataaytgacatgatttcaatttttttgaacttttaaagacttgttttgtgaccaaacatatgatctatccttgagaatgatccatatgctgaggagaagaacgca

SEQ ID NO: 509299 - DNA, 201 bp, Homo sapiens
caccacaggagatgcccccaagccccacatccctgcccccagcaggggcagatataaccaaagggcaagagagccaaagggaactagcagctttctcctgmgtgaggcgtcctcagaagatgcctggaggttttatgaatacatatttcgcagcctaaggtgtgagaggcggggaagctcagaccttcctccataagcatc

SEQ ID NO: 509300 - DNA, 201 bp, Homo sapiens
cagagggtactggttggataagctccctacatctgtccaacagagaaccacgcagcccactagaggagcgatggtcagacaactgactaagatgccttctrtgtaaataaaacaggaaagggaaaaatgaagacacgtttttgcttatttaggggaaaaagaaagactgaaaggataagctagtaaaacggattccctatg

SEQ ID NO: 509301 - DNA, 201 bp, Homo sapiens
aaagtaagtctcaatatacaggattaaataaaacccatctgatgagaactgatgatttgtggggcatgactccccagactccttacataagaatttggggraaaaaaaaaaatcagagcttcgtcctcaacatagaggcccaagcatctcactattcattatgccttctgatgttatcatatccaagtaatgcgactgtta

SEQ ID NO: 509302 - DNA, 201 bp, Homo sapiens
ggctgtgagcttcctagagcctttgttccaagcaggtttttaaagacaaaagggggacagagagagtgggctggtacaaagttgttgatcaggaactctctttggtttacagaaataaaattgatgagcaattggctatccattgttaagctaaagaatatgggctatagttctgataagacactatgctaattatcccaa

SEQ ID NO: 509303 - DNA, 201 bp, Homo sapiens
ttttattttcttccttgccatggccagagtcagattggaaagtaagtctcaatatacaggattaaataaaacccatctgatgagaactgatgatttgtggrgcatgactccccagactccttacataagaatttggggaaaaaaaaaaaatcagagcttcgtcctcaacatagaggcccaagcatctcactattcattatg

SEQ ID NO: 509304 - DNA, 201 bp, Homo sapiens
gctgtgagcttcctagagcctttgttccaagcaggtttttaaagacaaaagggggacagagagagtgggctggtacaaagttgttgatcaggaactctctttggtttacagaaataaaattgatgagcaattggctatccattgttaagctaaagaatatgggctatagttctgataagacactatgctaattatcccaaa

SEQ ID NO: 509305 - DNA, 201 bp, Homo sapiens
acgatctcggctcactgcaaactccgcctcccgggttcacgccattctcctgactcagcctcccgagtagctgggactacaggcgcccaccaccgcacccsgctaattttttgtatttttagtagagacagggttttaccatgttagccaggatggtcgcgatctcctgacctcgtgatccacccgcctcagcctcccaaa

SEQ ID NO: 509306 - DNA, 201 bp, Homo sapiens
tctacttgtgtttttataagtgaaatgtgtttcttgtaggtgacagattgttgggtcttgtgtttttatccattcagccactctgtcttttgattggagartttagttcacttacattcaatattgttattgataaaacatactcctgccattttgttatatgtcttcttgctgttttgcggtcttctcttccttctttcc

SEQ ID NO: 509307 - DNA, 201 bp, Homo sapiens
taaaaactctacactttaacttcatgccaccactttttaactttttgttgtttctatttatgttattgtactgtccatgtcttaaaaagttgtggtagttwtttttttttggttaatcttttagtctttctactcaagatatgagtagtttatgcaccacaattacagtgttataatattctgtttgtctgtgtacttact

SEQ ID NO: 509308 - DNA, 201 bp, Homo sapiens
cacaggtgtgatcatggtgcactacagccttgaattcctaggctcaagcgatcctcctgcctcagctaccgagtagctgggaatacaagcgtgcaccaccrtacttgacttattatttattttatcaccaaatagcaagccaatttctacaatgctatttatgcaataaatagaacaatttccttctttcctgttgattgg

SEQ ID NO: 509309 - DNA, 201 bp, Homo sapiens
tgtggcagggaggaggggcgtgatgtgcactcatgccagcagtagtggcatgctagggtgcgtgtgcacatgcacattggtgggggaggaatgcaaacaargcaaagtcaggggtgatcatgggtgagtgtatatcagcaaaatggtatgggagaggctgcacttgggagggaacgggcaggctagtacatgtccatgagg

SEQ ID NO: 509310 - DNA, 201 bp, Homo sapiens
aattgagagaaattgagtacaattgagtacaattaacaattgtactcaagtacagtgtaaggattaatggaaacatgaaccagtagttgggtaagaggtcyggagacaaagggggtcaggatctcttggaatttgtagtaatgcaatcaatgtgaaaccagagttctcatctcacaccctcttacctgggcaaatgaattg

SEQ ID NO: 509311 - DNA, 201 bp, Homo sapiens
tttcaataactagccttaaaaaaaaaaaaaaaaaaaaacctgggcacggtggctaatgactgtaatcccaatgctttaggaggctcaggtgggaggatttyttgagtccaggagttcgagactatcccgggcaagaacatgaatcctcctctctacaggggaaaaaaagaaagaaagaaagattttaacggcatcattata

SEQ ID NO: 509312 - DNA, 201 bp, Homo sapiens
cagaatgcccagggcggtttctcctccacccaggttggtgatttgccaaaaccttttatttcaccttcaggtagcaaaagatttgaatgaaaaagaaacaracacatccaagaagaaaaaaatacagatgacagtaacttgaaatgaggaaaagttttcagtatccaaggataatggaaataaaagcaaatcaaagtcaaa

SEQ ID NO: 509313 - DNA, 201 bp, Homo sapiens
tctgccaggacacagggctcacgcctgtaatcccagcactttgggaagccaaggcagatggatcacctaaggtcaggagtttgagaccaacctgaccaacrtgatgaaactccgtctctactaaaaatacaaaattagccagcacagtggcacatgcctgtaatcccagctacttgggaggctgaggcagtagaatcactt

SEQ ID NO: 509314 - DNA, 201 bp, Homo sapiens
ctgtctttattcatccaacctcctaaatctagctatataaccatgtatctgaacaattcattgatatgtacacagcagaaagttttatcttcagagaattyggatgtttgcttatataccctaaaacggaaaaaatgtgacaaaatggcattccatcctatttccattgtattaatcttttatcatatgaatgaaaaaaac

SEQ ID NO: 509315 - DNA, 201 bp, Homo sapiens
caggagtttgagaccagaatgggcaccatagcaagaccctgtctcaaaataggtaggtaggtaggtaggtaggtaggtaggtagaggtaggtaggtaggtrggtggatggatggatggatggatagatagatagatagatagatagatagatagatagatagatagaagatagagagatagtcaaccttgagagggtctta

SEQ ID NO: 509316 - DNA, 201 bp, Homo sapiens
  misc_feature (1)...(201): n = A,T,C or G
ctacattcactagactgttgcttaattttaatttccagagcaggaatctaatttttagtgctccaaagaccttgtagtaatctaaatccgaaatcacttcngtaagatagcatgtggttcctgttctccttggttcatggttgaagcttctatttctaagaatgcaactcctctatttaaccaaagcagtgagaatttcta

SEQ ID NO: 509317 - DNA, 201 bp, Homo sapiens
aggaggtctaggcctcggtagttttggagagtcactgctgccaaagagtctatttgggattgtaaagtaaggatagatttcgttatttcttgcaaactgtytgagaggcagatatgggttgaagatccacataagtagaatatgccttggctgggtagatagacgtttaccccggcttttaaaggaatagggtacactgtt

SEQ ID NO: 509318 - DNA, 201 bp, Homo sapiens
taggcctcggtagttttggagagtcactgctgccaaagagtctatttgggattgtaaagtaaggatagatttcgttatttcttgcaaactgtctgagaggyagatatgggttgaagatccacataagtagaatatgccttggctgggtagatagacgtttaccccggcttttaaaggaatagggtacactgttttttcttt

SEQ ID NO: 509319 - DNA, 201 bp, Homo sapiens
gtttatgggcggccgtccgcgctgtaagatggccagggaagccaacttggctggagatggaggcggcggcgttgtgtacgccgcgggagtcagtgaactcygcagggcactgctttttgtgctctacgtgacagaccacgtgcttcgggctgcgaccctggtccttgtccgaatgtccagccccgcgtgagccgtgggatg

SEQ ID NO: 509320 - DNA, 201 bp, Homo sapiens
ggagccagtatactgtgcagaccaattcataaaccaggacttgtcttggtttattcccattggtttatatccattcgtgtcttctctcatgaagccttatrtgtggactgagggaaagccagagaaacagaaggaagaggtgttatggaaccccgagcaagctacttgattttttttttttttttttttttgagatggagt

SEQ ID NO: 509321 - DNA, 201 bp, Homo sapiens
ttgagattttcttaaaagatttcttattttgcctctgatgtagtgaaaaacggggtaagtatgctaactttcttgtatatgttggggggtacttattcaaytccatttcttgtccttacaagatttataaatgtggtatgtttatagtgtggatatatatgttgccactgcaaaggtggtgcatatgtatatatgtgcaaa

SEQ ID NO: 509322 - DNA, 201 bp, Homo sapiens
aaaaatgagtaaatacagaatatcactacagagacttgtatcctcaggtttattgatttcacattgtgaaataaacagcaaaggtcttagttttcaagtgraaactttttggtaatcacaaaattacctgacacataccacgcttaaaccaacccccaaatttagcatattcattttgccatgagccagtcttgagatttt

SEQ ID NO: 509323 - DNA, 201 bp, Homo sapiens
ctccgtctcaaaaaaaaaaaaaaaaaattctatggagccaacaattcaaaagctatttataatcagtttggagcacattatattttttccttttttttttytctctctctctctctctctaatggttgattttccttcctatattttcttgagatttggagcttaaagaatctaagcacaccaaccttagcagaaagaaag

SEQ ID NO: 509324 - DNA, 201 bp, Homo sapiens
agggatctaggttgcctgctccttaagaaaatctaactaatgcctgatgatctgaggtggaacagtttcatcctgaaaccagcccccagcaacggtccatrgaaaaattgtcttccacgaaactggtgcctggtgctaaacatcttggagaccattgctatagaacattagaacttattctgcctatctagctgtaatttt

SEQ ID NO: 509325 - DNA, 201 bp, Homo sapiens
cagcacgccagcatggcacatgtatacatatgtaactaacctgcacattgtgaacatgtaccctaaaacttaaagtataataataataaaaaagaaaaagaaaaaaaaaaccctctgaacacaaactctgtattttttactttctctctgtggagcacttaactgtgcatgctgggggtaagaaggtagaccggagagtga

SEQ ID NO: 509326 - DNA, 201 bp, Homo sapiens
aatcccagcactttgggaggccaagaagggcaaatggcttgagcccaggagtttgagatcagcctgggcaacatggtgaaatgtctttacaaaaaaaaaawaataataataataatacaaaaattagccaggcatggtggtatgtgcctgtggtcccagctactcgagaggctgaggtggatcacttgagcctaaggaggt

SEQ ID NO: 509327 - DNA, 201 bp, Homo sapiens
ttcaaatcctcagtcacagagactattatctgtagtttcttgatactttttcttccctgtcaccattctagtgcaacactgtgaagttaaaaaaaaaaaacaaaactagatatgtaaatcagtttctttcctgacaaaaatcttactcgtatccaccagcaaaactattggtgtcctcctcattccatagtcagaaaaaca

SEQ ID NO: 509328 - DNA, 201 bp, Homo sapiens
cacaggctgggagaaatcatcataatacatatatctgacagaggactggtagtcagaatacatacaaaattctcacaactggccgggcacagtggcttacrcctgtaatcccagcactttgggagactgaggcaggaggatcacttgagttcaggagttcaagaccagcctggccaacatgatgaaaccccatctctacca

SEQ ID NO: 509329 - DNA, 201 bp, Homo sapiens
tcatttcaacctcatgttcacctcactgcccttcccactgctcctgccttagttcagacaactgccctcgctccctccacctagttcaagcccagctgacygggccagcggccttcaggcctgcccttctccatcctgccacgtctgtcctccacaggcagaacagggagctgtcattttaaagtgcaggtctgctctggt

SEQ ID NO: 509330 - DNA, 201 bp, Homo sapiens
actcctgacgtcaagcaattaaccatcttggcctcccaaagtgctgggattacagatgtcatctaccacacccagcctaaattctgcatatctatattggraaaaaaaaaaacctcaatccctacctcacaccacacacaaaaattaactccatgtggatcatagacctaaagataattgctaaaaccatgcaacacaggg

SEQ ID NO: 509331 - DNA, 201 bp, Homo sapiens
caggctagtctcgaactcctgacgtcaagcaattaaccatcttggcctcccaaagtgctgggattacagatgtcatctaccacacccagcctaaattctgmatatctatattggaaaaaaaaaaaacctcaatccctacctcacaccacacacaaaaattaactccatgtggatcatagacctaaagataattgctaaaac

SEQ ID NO: 509332 - DNA, 201 bp, Homo sapiens
atgttcacctcactgcccttcccactgctcctgccttagttcagacaactgccctcgctccctccacctagttcaagcccagctgactgggccagcggccytcaggcctgcccttctccatcctgccacgtctgtcctccacaggcagaacagggagctgtcattttaaagtgcaggtctgctctggttgttctcctaatg

SEQ ID NO: 509333 - DNA, 201 bp, Homo sapiens
ggagaatttacatgcattattaaaatcaacattccagtcttttcaacaaatggtgcaggaacaactgcatatcttcttttcccttttcttctctctctctytttttttttttttaatgagatagggtttggctctgtcacccagactggagtgcagtggcaccatcttggctcactgcaacttctgcctcctgggctcaag

SEQ ID NO: 509334 - DNA, 201 bp, Homo sapiens
gcctgggtgacagagtgagactccaaaaaaaaagaaagaaagaaagaagagagagagagaaaagaaagaaaaagaaagaaagaaagaaagaaagaaagaargaaagaaagaaaagaaagaaaaagaaaaagaaagactgtcacatgtaagactatcagtaggtttctcagcctaaacctcacagaccaagagaaagggata

SEQ ID NO: 509335 - DNA, 201 bp, Homo sapiens
tgaatgtctttcttccagtagtcacactgcttcctagagtgttagtggattcacttttgtccttagaggcccttgaagaacaatctttctctttaactatmtacgtgctgttgaaaggggtttctgaatccagactgtaatgtgcccctttgaccctcacaactaaggaaaagatagggagggacaggttatatttggctt

SEQ ID NO: 509336 - DNA, 201 bp, Homo sapiens
cctgggtgacagagtgagactccaaaaaaaaagaaagaaagaaagaagagagagagagaaaagaaagaaaaagaaagaaagaaagaaagaaagaaagaagraaagaaagaaaagaaagaaaaagaaaaagaaagactgtcacatgtaagactatcagtaggtttctcagcctaaacctcacagaccaagagaaagggataa

SEQ ID NO: 509337 - DNA, 201 bp, Homo sapiens
atgagtcagtcccaaacaatacatgaaaaggataggtttcatattttggtcttgccatgtattggatattctaaaacatgtctatagtttcctgtttcttkagaccatttcagtgttacattagcttcagtgtccttttttcataatgacccatcacctattgaaaatatgttgaggctgggtatggtggttcacgcctgt

SEQ ID NO: 509338 - DNA, 201 bp, Homo sapiens
acctttgataatttagcttcacccaatcaagaaatgaggcccaatggctgtcattaacagtcaggcaacatgtccaatccacacggagaatattaagagayggagcaagtggcattatctcaaaacacctagtattaaggaaaaaatgcaccaacaaataccttatgcggtgttccatcatcagatcactgtccttccatg

SEQ ID NO: 509339 - DNA, 201 bp, Homo sapiens
cacagagaccatgacagcttcgagaaaccagcactcctgcctctcagggagtgttcccgcactttcacgtagggcaagggctgcatctagagctgcccttmctctagaacagggaaaggcagctggagcatcctccacaaatcacctgccccctctcctttgcttcttaccgttatgtttccagagtctgatattcctctg

SEQ ID NO: 509340 - DNA, 201 bp, Homo sapiens
tgtaatcccagcactttgggaggccaaggcgggcagatcacaaggtcaggagatcgagaccatcctggctaacatggtgaaaccctgtctctactacaaawaaaaaaaaaaaaaaaaaaattagccaggcatggtggtgggcacctgtagtcccagctaatcaggaggctgaggcaggaatatggccagaacccaggaggc

SEQ ID NO: 509341 - DNA, 201 bp, Homo sapiens
ctgtgtatctgtcttttgagtgttttcagcttcagattccaaacatgcctctcgctttctctttgagataatcatgtctctcctgtttccaaggagctttyttcttactccaatcttcgtacccatttgtatctttcgcatttttggctttctgccttccaacccgagaggcattgttttcccactgtcaggcctctcact

SEQ ID NO: 509342 - DNA, 201 bp, Homo sapiens
gagaattgcttgaatctgggaggcagaggttgcagtgagcctagatcacaccactgcaccccagcctggctgacagagcaagactctgtctcaaaaaaaaraagaagaagaagaagaagaggtaatgcctcctcataattattatgaggcaagcaatatcaaagataccacaagaaaaggaaactacagacaaatgtccct

SEQ ID NO: 509343 - DNA, 201 bp, Homo sapiens
tttgtctcaaaaaaaaaaataaaataaaataaaaaataagccttgttgtaaatataggcagagatatggaaagaaagcaagtgaattaaggctgaagtgtyttttctttcctgtggttcattactccagatggacaaggaggaggccagagagacatccactatagtagagatataggaagagttattctttatacattta

SEQ ID NO: 509344 - DNA, 201 bp, Homo sapiens
acacacacacacacacgccatctccttttaaccttcatgttacctgttgaggacattattcctttttcaaagatgaggaaaataatcacaaggaagttaaraaacttcactgaagtcaaaaagctagttagcggtagggctgagatttggtacaaggaagcctggctccagaatctgtgctgttaaccacaacacaaagct

SEQ ID NO: 509345 - DNA, 201 bp, Homo sapiens
caactttcaatcatagtaacaagcacttatatagggcctactatgagccaggctttgtttagggatgagatacacaagtatacacacacacacacacacayacacacacacgccatctccttttaaccttcatgttacctgttgaggacattattcctttttcaaagatgaggaaaataatcacaaggaagttaagaaact

SEQ ID NO: 509346 - DNA, 201 bp, Homo sapiens
ttttttgaatttttaatagagacggggtttccccatattggtcaggctggtctcaaactcctgacctcgtgatccgcccatctcggcctcccaaagtgctrggatgacaggcgtgagccaccgtgcctggccgataggttcctttttaacctgtcatttactcacctgtccagagaggttcctgcatttgtcaggaagctg

SEQ ID NO: 509347 - DNA, 201 bp, Homo sapiens
  misc_feature (1)...(201): n = A,T,C or G
aatccgaaatcacttctgtaagatagcatgtggttcctgttctccttggttcatggttgaagcttctatttctaagaatgcaactcctctatttaaccaangcagtgagaatttctactgcaatcctttgacaatcatccttgattggaagcaccatggggaagtaaagggcttcttgaaaatcaaagcagctgcagcatt

SEQ ID NO: 509348 - DNA, 201 bp, Homo sapiens
  misc_feature (1)...(201): n = A,T,C or G
tctaagaatgcaactcctctatttaaccaaagcagtgagaatttctactgcaatcctttgacaatcatccttgattggaagcaccatggggaagtaaaggncttcttgaaaatcaaagcagctgcagcattatcataactcccttattagttctcaccccccgaatgttgacttattattgtcaattaggccaaatatgat

SEQ ID NO: 509349 - DNA, 201 bp, Homo sapiens
tacatatttaaggtatatatttatacacacataccttctcacttggaagttatgaaagtattttctaaaattttttttctgttagctttatatctttattkggcttaaaatttttaaatcccccctgccctgccaccaaaagtatttattatttgatatgatgtaaggatttttatttttcttgaaaacaaacaaaacagc

SEQ ID NO: 509350 - DNA, 201 bp, Homo sapiens
gaaatataacagtctagcagctctcactgatgcttgaaataattcaattcgcttaataaggaaaaataaaattttaaaatatcttgtgaaaaaaagatgtratgcattaaagaaaacttgaaaaacattgttacttgctttatgttctcctttttttttttttttttttttttttgagacggagtctcgctctgtcgccca

SEQ ID NO: 509351 - DNA, 201 bp, Homo sapiens
atctagctatataaccatgtatctgaacaattcattgatatgtacacagcagaaagttttatcttcagagaattcggatgtttgcttatataccctaaaayggaaaaaatgtgacaaaatggcattccatcctatttccattgtattaatcttttatcatatgaatgaaaaaaactaagtaattttgttaaaggttatcat

SEQ ID NO: 509352 - DNA, 201 bp, Homo sapiens
aaaaagggaaagccaaataaaaatgtcattaaatccagaagataattataatactcatcttttatttcttttggagaaactgaagcatgactctgctcatkgctgcaaagaaccttgggttctctccaggacactgacctcagcaactgagcaaagtttaatatgggagagagccagactgaactttgcttgagtggtggc

SEQ ID NO: 509353 - DNA, 201 bp, Homo sapiens
tgttcttctctcctttatttatatttcaccagggattacaggtagaaatggcttattatgatcttgggatatgaatattcctaaaatcccataagcaagaratcttgacaaaatgtgtttattatgttgacaagttttttggatacccagtaatataaggaagtagcccttgtgattagtcaattattagttaattatcaa

SEQ ID NO: 509354 - DNA, 201 bp, Homo sapiens
  misc_feature (1)...(201): n = A,T,C or G
tcttgaaaatcaaagcagctgcagcattatcataactcccttattagttctcaccccccgaatgttgacttattattgtcaattaggccaaatatgattanccaactccctgctttagtaataactacatttgcataagaacaggattaatggactgttccctcaaatatgggtcatagataagaagatcatttgtaccaa

SEQ ID NO: 509355 - DNA, 201 bp, Homo sapiens
tcccctttggaaagcaaataggatgatgcatcactgttgataaaatattttctatcactcaggataaaattaaataagaatgttcatcagagagagatcaytttcttagagaataaaataaattaactgaatttatattctagatgttgaatgaattaagaaacagtaattatatattacatatgttgttatacccaatga

SEQ ID NO: 509356 - DNA, 201 bp, Homo sapiens
agtttcttctgcccaaatcttacatcggtcttttctttcattttctgcaatttcattgctgatggtgcctttcttttcctttaagtcagtgttttgtagartattcaaacatactttttccagaaagtttcatttgcatcaagaagtttcagatctttctttaaacttatcttaagacctggaactactagtcctctaaaa

SEQ ID NO: 509357 - DNA, 201 bp, Homo sapiens
gtgaatctagagtactgaaaaatagttaaatattaagaatataggccctatgaaaagtaggttaaaaattattttaagagtcccgggaaaagacagaaggwtagcatacatactaaattgtataaaggagaattagctgaaaataagcaacgcttcacttttattaaggaaatagaaagagaattgtgtttttatagaagg

SEQ ID NO: 509358 - DNA, 201 bp, Homo sapiens
ggtgggaaatcttcccttcaagagcacttcacatactgagacctccagatgcactttcaagggagatgtgtggcttccacaccagtgccttctggggccasgacttcatctccaagctgcttggataccagctctctcagtggctgcccttgtccactttaatcacctgtaccctgtaggggtgggttgcccctacacacc

SEQ ID NO: 509359 - DNA, 201 bp, Homo sapiens
ctttagaaataatgtgtgtagatgtatatgtttgtggatgtgtgatttacatataataaactgtataagtttcattctataaatcactgtttgtttttcamtcagcatcctgtcttggagatttacctatgttaaattgtagatctaggtctttccttggaattgcttttaagcctataatataaatacatcacaattctg

SEQ ID NO: 509360 - DNA, 201 bp, Homo sapiens
tcaaagcctgtgcaaaattctgtgatttttttgaaaaaacaggacacagaataagttgagttaggaggatcctgtggaatgacagttatagtaactaactrtagccaactgtgacctacttctaactaaaggcaatatgcattatcgatcaaaaaaataacctgactgggctcagtggctcacgcctataatcccaacact

SEQ ID NO: 509361 - DNA, 201 bp, Homo sapiens
aaagagtaaaaaaaaaaaattagctgggtatggtggcgtgcgcctgtaggcccagctactcgggaggctgaggcgtgagaatcgcttgaacccaggaggcrgaggtcacagtgagctgagatcatgccactgcactccagtctaggtgacaaagcaaaactgtgtctcaaaaaaaaaaaaaaagagtaaaaaagtttttaa

SEQ ID NO: 509362 - DNA, 201 bp, Homo sapiens
atgccgaggcaggggcggatcacgaggttaggagatcgagaccatcctggctaacacggtgcaaccccgtctctactaaaaatacaaaaaattagccaggmgtggtggcgggtgcctgtggtcccagctactcgggaggctgaggcaggagaatggtgtgaacccaggaggtggagcttgcagtgagctgagattgcgcca

SEQ ID NO: 509363 - DNA, 201 bp, Homo sapiens
tctactaaaaatacaaaaaattagccaggagtggtggcgggtgcctgtggtcccagctactcgggaggctgaggcaggagaatggtgtgaacccaggaggyggagcttgcagtgagctgagattgcgccactgcactctagcctgggcgacagagcgagactccgtctcaaaaaagaaaaaatggattaaagacttaaaca

SEQ ID NO: 509364 - DNA, 201 bp, Homo sapiens
aggagaatggtgtgaacccaggaggtggagcttgcagtgagctgagattgcgccactgcactctagcctgggcgacagagcgagactccgtctcaaaaaaraaaaaatggattaaagacttaaacataaggcctgaaactgtaaaactactctaggaaaacagaggggaaatcttcttgacattggcctgggcaatgagtt

SEQ ID NO: 509365 - DNA, 201 bp, Homo sapiens
agccttgaactcctaggctcaagaaatctcccatttcagccttcaagtagctgagactgcaagcatgcaccaccacgcctggctaattttttaattttttrtagagacggagtctcgctatgttgccacagctggtctcaaactcctgggctcaaaggatcctcctgcctcagcttcccaaagtgctgggattacaggtgt

SEQ ID NO: 509366 - DNA, 201 bp, Homo sapiens
agataaacaaaattgatagaccactagcaagactaataaagaagaaatgagagaagaatcaaatagacacaataaaaaatgataaaggggatatcaccacygaccccacagaaatacaaactaccatcagagaatactataaacacctctatgcaaataaactagaaaatctagaagaaatggataaattccttaacacat

SEQ ID NO: 509367 - DNA, 201 bp, Homo sapiens
caggctagctgggaggatcatttgagcctgggaggtcgaagctgcagtgagccatgtttgcaccatcgcactccagcctgagtgatagagactctatctcaaaaaaaaaaaaaaaaaaaaaaaaaaaaaaaaaatcagagcaatagttgcctctaggactaggagaagatgactggataggagcatgaggaaattttcttg

SEQ ID NO: 509368 - DNA, 201 bp, Homo sapiens
gaggcaggcagattatttgagtttaggagttcaagacaagcctgggcaaaaatgtgagaccctgtctctacaaaaaatacaaagattagctgggcatggtrgcttgcgcctgtggtcccagctacttgggaagctgaggttctaggactgttaattaccttcctctcttatgattatacagaacaggaggcatccttccca

SEQ ID NO: 509369 - DNA, 201 bp, Homo sapiens
gtgtgaggggcgtggaggaggaggcgggctgggttgcgctcacacttaagcgtctgtgacaggagccggaatcgcattctcccttgaccatggttctagcyaaagatctggctgaggagccctaagggtagaatggaggcggaggcatgagagcggagagtcacggagttccgaaaggtgtgagggagaaaggacttccaa

SEQ ID NO: 509370 - DNA, 201 bp, Homo sapiens
agggagccagtacactccatcctgggcaacaaacagagtgagaccctgtctgaaaataaataaataaataaataaataaataaataaataaataaataaawtaaataataaataaataaataaaataaaaactcttagagattatcaggccttggaagagatttttccccaatctacataaagacccagagcccccaagag

SEQ ID NO: 509371 - DNA, 201 bp, Homo sapiens
ttctttctaaacagggaaaataatgttacaaaagcatcttttttgttatttgtttgcatccctcccccacaccctggtgttttaaaatgaagaaaaaaaaccatcactttttgtacaaaaactcttaatgattaaaaaacaaacaaaacatattggccttgtcatttgtgtgaaagtgggcaaagactggaatagagtaag

SEQ ID NO: 509372 - DNA, 201 bp, Homo sapiens
ttaagggtcccagaattcgtgaaattacttgttaacttgaagatttttgtcaggaagaaatgcaaataacttctgttggtgggacagatacaggtcacacrttgcttaacagcagggagaaatgcgtgaggtgattttgtcctcgtgcaaaccttatagagtgtgcttacacaaacctagatgatacagcctactatatat

SEQ ID NO: 509373 - DNA, 201 bp, Homo sapiens
ggctggattaggcgttttttaatcaagggcaacttaaaatggcagtgtttgtccaagatggtgatgctcttgctctgtcaatccagatcctatagttataraaggacaaggggcggtgtgttctttctggctacttcctgctaaggggaggagtgcggagagttctttgatctcagattgactgtaggactaatgctgtct

SEQ ID NO: 509374 - DNA, 201 bp, Homo sapiens
ttggaacatttccggttggaggtgtcatttaatggtcatgctgacattggccattagggtgatgtttctggggctggattaggcgttttttaatcaagggsaacttaaaatggcagtgtttgtccaagatggtgatgctcttgctctgtcaatccagatcctatagttatagaaggacaaggggcggtgtgttctttctgg

SEQ ID NO: 509375 - DNA, 201 bp, Homo sapiens
gggatttatcttggggttggaacatttccggttggaggtgtcatttaatggtcatgctgacattggccattagggtgatgtttctggggctggattaggcrttttttaatcaagggcaacttaaaatggcagtgtttgtccaagatggtgatgctcttgctctgtcaatccagatcctatagttatagaaggacaaggggc

SEQ ID NO: 509376 - DNA, 201 bp, Homo sapiens
tatttttcctagtttcctggaacaaagagatctgtagtatcatccatgcaaaacccaagaccgcatgcagagaggttcttaatgctttcaatgatgatttkttgattgatttgcatattgaaattatgaaatttttatccaaaatatataataactcatggattgcttacccatggctattgacagctttgctaatattat

SEQ ID NO: 509377 - DNA, 201 bp, Homo sapiens
aattcgcttaataaggaaaaataaaattttaaaatatcttgtgaaaaaaagatgtaatgcattaaagaaaacttgaaaaacattgttacttgctttatgtkctcctttttttttttttttttttttttttgagacggagtctcgctctgtcgcccaggctggagggcagtggtgcaatctcggatcactgcaagctccgcc

SEQ ID NO: 509378 - DNA, 201 bp, Homo sapiens
cacaaaagatacctactgtaggattcttttacctgaaattctagaaaaggcaaaatgacaatgcgagaaagcaggtctgtggatactgaaggccaggaggsaggctgctggggaggagccctaaagggcacacgggaactctgaaggatgctggaaatggtccatgtcttcactgtgatgaccacgtggctgcatgcattt

SEQ ID NO: 509379 - DNA, 201 bp, Homo sapiens
ggattcttttacctgaaattctagaaaaggcaaaatgacaatgcgagaaagcaggtctgtggatactgaaggccaggagggaggctgctggggaggagccytaaagggcacacgggaactctgaaggatgctggaaatggtccatgtcttcactgtgatgaccacgtggctgcatgcatttatcagaactcactgagctgc

SEQ ID NO: 509380 - DNA, 201 bp, Homo sapiens
aaaacctgggcacggtggctaatgactgtaatcccaatgctttaggaggctcaggtgggaggatttcttgagtccaggagttcgagactatcccgggcaaraacatgaatcctcctctctacaggggaaaaaaagaaagaaagaaagattttaacggcatcattatatatattttttctttttttgtcctgggtgagaggg

SEQ ID NO: 509381 - DNA, 201 bp, Homo sapiens
tgccagacagcaacacttcttttaaagctacaataactaagatgctgaagtgctggcacaaaaatatattctaggaccaatggcgcaaacaagagtgcacrgaagtgaaaaatgcggtaacacctgatagatgacacgggagacagcacagttaagtggggagagggtggtctttcaataaatggccctgggttagccaca

SEQ ID NO: 509382 - DNA, 201 bp, Homo sapiens
gagaattgtgtttttatagaaggaaatatttgagaaaccctgtaatctattaccttggaataatgtaaagaatttctctggatatattcaagagagaagtraactactatctgtaataattaaatatcaatccttcctagatatttttaaaggactcctcagactttttgtgttgataatggtaaattactatggtcagag

SEQ ID NO: 509383 - DNA, 201 bp, Homo sapiens
gcaaaatgaaaaataaaagaaagctatggagaagttaatatgttggatgattgaagagtagcaggattatagcattcactttggatgttgttccaaatccrgttgttcctaataataatattattaggtgggtaaagcacagaaagcccttttaacttatgtgtgtttttaaaaaagttaagaatagtctaaaagatgatt

SEQ ID NO: 509384 - DNA, 201 bp, Homo sapiens
actaatacaagtgtttattgttacacattttcctgttaataatgctttagttgcatcgtttaatatttacatgtgaaactttcattttgaatcagttcaaratattttctactttcttttttgatttcttctttgaaccatgagttattcagaagtgtgttatttagtttctaaatgggagatattttagagatctttctg

SEQ ID NO: 509385 - DNA, 201 bp, Homo sapiens
attattaggtgggtaaagcacagaaagcccttttaacttatgtgtgtttttaaaaaagttaagaatagtctaaaagatgattcttctcatatggcttgccrtccttttgcccttttattttcattttcaggtcaacttaaatttttctaaagaaaaaagtttaccaggatccaatgtcgatcttcaagtctcggctgcttc

SEQ ID NO: 509386 - DNA, 201 bp, Homo sapiens
attcagaagtgtgttatttagtttctaaatgggagatattttagagatctttctgttactgatttctaatttaatgacattatgattgtatgactttaatycttttaaatttatggagacattttatagctcagaaaatatggtctatcttgataaatgttagaatgtgtattctgctgctattaagtggagtgttctctg

SEQ ID NO: 509387 - DNA, 201 bp, Homo sapiens
tatttagtttctaaatgggagatattttagagatctttctgttactgatttctaatttaatgacattatgattgtatgactttaattcttttaaatttatrgagacattttatagctcagaaaatatggtctatcttgataaatgttagaatgtgtattctgctgctattaagtggagtgttctctgaacgtcattgaggt

SEQ ID NO: 509388 - DNA, 201 bp, Homo sapiens
accttgcaattcgagtatttttccctcctgtcctgcaccccaacatgcacctccttccttctggctccctaagctctagcctgggtgagcagggcctggayactctatacctagagtcactagccactgcccagtctgtgtcagaagcaggcctctaattcctcagggttagagtgggaagaacccatgtgtgcacatttg

SEQ ID NO: 509389 - DNA, 201 bp, Homo sapiens
tttggtggttcctcaaaatgttaaacgtagattgaacctgcaattccacttctagctgtatacccaagagaactgaagacatatgcccacatcaaaactcrtccaaaaatgttcacagcatcactattcacaacagccaaaaggtagaaacaacccaatgtccatcaactgatgaatagataaacaaaatgtggtagtaca

SEQ ID NO: 509390 - DNA, 201 bp, Homo sapiens
catcgccagtcacactgggcagcaggcagcagggagcaaagcaggagagcctgggcgagcgcacgaagggtgaggctcccatcccggggtctcctccgccyctgtgcctggtcacggtatgaggtattacccacagaaaacgggggccagaacctgacctctagcctgccccaccctgggcacagcttctcaccacaggaa

SEQ ID NO: 509391 - DNA, 201 bp, Homo sapiens
ctgatagtgtctttgctgtttcacagacatccatgaaatacaatattcttccagagaaagaggactccccatttgctttaaaagtgcagactgtgccccaracttgcgatggacacaaagcccacaccagctttcagatctcactgaccatcaggtaagacgttctaacctaatcacctatctttggcccaaaagcaactt

SEQ ID NO: 509392 - DNA, 201 bp, Homo sapiens
gccacaggggttccagaaaagggaagtcactttaccttgcggtggtgggatcctgatgtctttcatccatttgtagtaaaagctggtaaagcttttcttaytcctggttccctaccagtatttctaaacatgtcgcactttctccacaggcatgtggttttgacctttttttcaatcttctagaaagggaacggaagcaga

SEQ ID NO: 509393 - DNA, 201 bp, Homo sapiens
atcctctgatgcttccatcttcctgtttaggccatgtgcccagaaacctggactgatctttctttaatagtgaacccctgggccactgaagagtaacatgrctccactggacacaaaagagggatggaatcaacaggcagggggccttttataagccttaggaaaagaaaatgaaactatttcatctttggacttttcaat

SEQ ID NO: 509394 - DNA, 201 bp, Homo sapiens
aaacctggactgatctttctttaatagtgaacccctgggccactgaagagtaacatggctccactggacacaaaagagggatggaatcaacaggcaggggsccttttataagccttaggaaaagaaaatgaaactatttcatctttggacttttcaatactattggagtgattttttttctttctaaacagggaaaataat

SEQ ID NO: 509395 - DNA, 201 bp, Homo sapiens
caagatgggtagaatttcaaattgatttgtataagcattccttttaaaataatggtaaatctggttcaataaagtagaaattcaaataccttgtttcccckgtgaataccatccatttcttacacatggctacccaaagttctcaagccattttaattaagcactttcaatgaaatacaatgaaagtgggaaccaaactct

SEQ ID NO: 509396 - DNA, 201 bp, Homo sapiens
ctttctaaacagggaaaataatgttacaaaagcatcttttttgttatttgtttgcatccctcccccacaccctggtgttttaaaatgaagaaaaaaaaccatcactttttgtacaaaaactcttaatgattaaaaaacaaacaaaacatattggccttgtcatttgtgtgaaagtgggcaaagactggaatagagtaagac

SEQ ID NO: 509397 - DNA, 201 bp, Homo sapiens
cataaaatcttcaacatgtaaaactagaagttactattgttatcatttgttttacacatgtgaacattagggccaaaagggttaaacaaattccccagagwcattcagcaaggtagtggcagagtcacactaagaagcagaatcacttgattccttatacaaaactctcaaacttctcctagcagtgcctcttaccaatta

SEQ ID NO: 509398 - DNA, 201 bp, Homo sapiens
cctcccctatcagaacttactgttttcactaggcattctgctgcttctctgtgcctccatctcttaagcagtagacagagggcatgaaccttacctatgaygttcctttccactgttgccctctgtgattacagatacctcttacagttccttttaacctgaagaagcaaaactgatagcctacaaacaaacagtcccaga

SEQ ID NO: 509399 - DNA, 201 bp, Homo sapiens
tttctaaacagggaaaataatgttacaaaagcatcttttttgttatttgtttgcatccctcccccacaccctggtgttttaaaatgaagaaaaaaaaccatcactttttgtacaaaaactcttaatgattaaaaaacaaacaaaacatattggccttgtcatttgtgtgaaagtgggcaaagactggaatagagtaagaca

SEQ ID NO: 509400 - DNA, 201 bp, Homo sapiens
gaagaggtctggattatagcctccatcttgagaccggagtcaagcacttgaggtggggaatgatggagagattggaagtggcattcttctccacaacaccrtgggttctgtagtcccttgtgcaattctgcaattctgccatgatagttattgagaccaagacaggcaaagtctaaccagggaaagaagagttctgtagac

SEQ ID NO: 509401 - DNA, 201 bp, Homo sapiens
gaaaaaaatatttaatatttttgttatataaggaatagtgcctaaggcaggtacttatactcctgacctcagccccacacactctggttttataaagctayaggacagagcagagatggaactgaaaaacagggtagaaaataacataaattggaggggaacagtgggatgcagaaagaatgacaacagccacatgtgccc

SEQ ID NO: 509402 - DNA, 201 bp, Homo sapiens
attcctctgcaatctcttggcagcctagaagaaatggtgagaacatgtaggtaatgccagatgataggagaagggaagctaaatgaaactgaggtctagcaatgattaattccaaagtacctgtcctaaattcagtaatatgaagtcagatggcaagctttaaaagcaaaatgaaattagaaagcaactggtatttaaaaa

SEQ ID NO: 509403 - DNA, 201 bp, Homo sapiens
atactggcaaaaagattctttgtgatatttttgtttaagggcccagaattcagacaaatagcaagaagggtagggtgattttcatttccgaaaaaaactctgtcaaaattgcatataggctgagtgcagtggctcacacctataatcccagcactttgggaagccaaggcagaaggatatcttgagcccaggactccaaga

SEQ ID NO: 509404 - DNA, 201 bp, Homo sapiens
cagttttagtccagcctggacaacataggaagatccagtccttaccaaaaaaaaaaaaaaaaaaaaaaaaatatatatatatatatatatatatatatataaattagcaaagcatagttgtatgtatctgtagtcttagctaatcagtaggctgaggtgggaggatcatttgaacccaggagttggaggctgcagtgagct

SEQ ID NO: 509405 - DNA, 201 bp, Homo sapiens
ctgacctcaggtgatatgcctgccttggcctcccaaagtgctgggattacaggcatgagccactgtgccaggcctcatttctactttaaataaataggtaactactattttacaccgagtcctcaaacacatctccacgagtctccttcccccaaatgagtctctaaataaatgctcaccagcagatgggctgtccactcc

SEQ ID NO: 509406 - DNA, 201 bp, Homo sapiens
tgacctcaggtgatatgcctgccttggcctcccaaagtgctgggattacaggcatgagccactgtgccaggcctcatttctactttaaataaataggtaactactattttacaccgagtcctcaaacacatctccacgagtctccttcccccaaatgagtctctaaataaatgctcaccagcagatgggctgtccactccc

SEQ ID NO: 509407 - DNA, 201 bp, Homo sapiens
gacctcaggtgatatgcctgccttggcctcccaaagtgctgggattacaggcatgagccactgtgccaggcctcatttctactttaaataaataggtaactactattttacaccgagtcctcaaacacatctccacgagtctccttcccccaaatgagtctctaaataaatgctcaccagcagatgggctgtccactccca

SEQ ID NO: 509408 - DNA, 201 bp, Homo sapiens
gctgaggtacaagaatcgcttgaacccagaaggcagaagttgcagtgagccgagatcacaccacagcactccagcctgagcaacagagactctgtctcaaaaaaaaaaaaaaagaaagaaagaaagaaagaaagaaagaaagaaagaaagaaagaaagaaagaaagaaagaaaactagtacagtacaggttaaaataataa

SEQ ID NO: 509409 - DNA, 201 bp, Homo sapiens
attaagggtcccagaattcgtgaaattacttgttaacttgaagatttttgtcaggaagaaatgcaaataacttctgttggtgggacagatacaggtcacayattgcttaacagcagggagaaatgcgtgaggtgattttgtcctcgtgcaaaccttatagagtgtgcttacacaaacctagatgatacagcctactatata

SEQ ID NO: 509410 - DNA, 201 bp, Homo sapiens
gaaagagagaaggaaggaaggaaggaaggaacgaaggaagggagggagggagggagggaaaagaaggaaagaagaaagaggaaagaaagaaagaaagaaargaaagagaaaggaagaaaggaagaaaagagaaagaaagaaaaagaaagaaaagaaagaaagaaagaaggaaaagaaagaaagacagacagacaagcaggc

SEQ ID NO: 509411 - DNA, 201 bp, Homo sapiens
aggatctccatagttaagcctcatggagtgccactgtgaacacagcaaaggcaatgcaaattgaatgcacaatgaagtttcaaattgtgctgcatgcaagrtttcataaagtccacaagagatggctccaacaacatcaaaagtccctgacagataaagatctggcagcattagactgtcaacaattgaagaaaagaaaat

SEQ ID NO: 509412 - DNA, 201 bp, Homo sapiens
gggataacagctttaactgtttgctatttgtaattcctattttatgtaatgcctgcttaagactttagcatgcttgggaagaggatgtacatcttttcctkgttttcattatggatttacaactttgcaaaatgtttacatctttgagccacctagaattaactgtaatggaaggtaagctgtaggagttcaactctcgtt

SEQ ID NO: 509413 - DNA, 201 bp, Homo sapiens
aatgcaaattgaatgcacaatgaagtttcaaattgtgctgcatgcaaggtttcataaagtccacaagagatggctccaacaacatcaaaagtccctgacarataaagatctggcagcattagactgtcaacaattgaagaaaagaaaataagaaaagctgtctatattttgggtgcttcatgagagaataatcttaatgat

SEQ ID NO: 509414 - DNA, 201 bp, Homo sapiens
gttttattgtggggttggcatgtttctggtcggagggggatttatcttggggttggaacatttccggttggaggtgtcatttaatggtcatgctgacattrgccattagggtgatgtttctggggctggattaggcgttttttaatcaagggcaacttaaaatggcagtgtttgtccaagatggtgatgctcttgctctgt

SEQ ID NO: 509415 - DNA, 201 bp, Homo sapiens
aaaccaacactgcagacaagcatatgagagaaggtattttaattgagatcttttataaattgcaatttgagagacacaaatcgagcaagcagctaaatcayattccatacagacaagctgggcaggggcttataaaggttcctggcaagtttatacaagtggaaaattttagcacagtctatgattgacaatggctgattg

SEQ ID NO: 509416 - DNA, 201 bp, Homo sapiens
agagcttatcgcagatttggaatatttctgggtggaggagagttttattgtggggttggcatgtttctggtcggagggggatttatcttggggttggaacrtttccggttggaggtgtcatttaatggtcatgctgacattggccattagggtgatgtttctggggctggattaggcgttttttaatcaagggcaacttaa

SEQ ID NO: 509417 - DNA, 201 bp, Homo sapiens
gagagcttatcgcagatttggaatatttctgggtggaggagagttttattgtggggttggcatgtttctggtcggagggggatttatcttggggttggaayatttccggttggaggtgtcatttaatggtcatgctgacattggccattagggtgatgtttctggggctggattaggcgttttttaatcaagggcaactta

SEQ ID NO: 509418 - DNA, 201 bp, Homo sapiens
aaaggagttacagttatcaataaggcagttgagttaaattatttgatacaaatatttaaaggagaaacctaagtggacaaataccaaagcttcaagaaggmatgatatctacttgtaaaataaatattgggattttaaagaaacactgtcatgaaataaaatatatgcatattagctgggcacgacggtgcacacctgcag

SEQ ID NO: 509419 - DNA, 201 bp, Homo sapiens
ttcactacagcagagagggaaaaacaccagatttaacatttcattcttggtgctgctgagctgtgtgctctaggacaagacatttaactttttcagctgcrtcctagaaggattcacacctatctcccaagactttggcaatgattaggagggagaataactaggaaaaagataagtgaactgtgaagagctgtgacctta

SEQ ID NO: 509420 - DNA, 201 bp, Homo sapiens
tgaccttaactctgaccatggaggactttcaggttcttcattatttttgccaatatttttggaatatatatatatatatatatatatatatatatatatakatatatgcatattattcccataatcatcccctcataagatttactaaaaagtctgtgccgtaaaaactttaagggtatttggtgctctcccccaaatcat

SEQ ID NO: 509421 - DNA, 201 bp, Homo sapiens
ttttttttttttcggtgggggagggggactgagtgttgctctgtcacccacgctggagtgcagtggcaccatctcggctcattgcaacctccgcctcccgrgttcaagtgattctcctgtctcagcctccaagtagctgggatttcaggtgcacaccaccatgcccagccaattttttgaatttttaatagagacggggtt

SEQ ID NO: 509422 - DNA, 201 bp, Homo sapiens
caatctcccagaaacaaagatagtgatctttcagatcgagaattcaaaatagctgttttgaggaaactcaacaaaattttagataacacagagaaagaatkcagaatcttatcagataaatttaacaaagagaaaaaaaaagaggtattgactttaaagaggaggttgagagagaaaatgagatggaaagtttattcaaag

SEQ ID NO: 509423 - DNA, 201 bp, Homo sapiens
catctttggacttttcaatactattggagtgattttttttctttctaaacagggaaaataatgttacaaaagcatcttttttgttatttgtttgcatcccycccccacaccctggtgttttaaaatgaagaaaaaaaaccatcactttttgtacaaaaactcttaatgattaaaaaacaaacaaaacatattggccttgtc

SEQ ID NO: 509424 - DNA, 201 bp, Homo sapiens
aacatttcaaatatccatcaattggtgaataaaaaaccaagttgtggcatatccatacaatggaatactaatcggcaataaaaaggagtaaactactgacrtatccaacaacatggctgaattgcaaaacattatgctaagtaaaagaagccagacaaaagcaagagtacattcagtaacattccatttacatgaaatgct

SEQ ID NO: 509425 - DNA, 201 bp, Homo sapiens
taaacagggaaaataatgttacaaaagcatcttttttgttatttgtttgcatccctcccccacaccctggtgttttaaaatgaagaaaaaaaaccatcacyttttgtacaaaaactcttaatgattaaaaaacaaacaaaacatattggccttgtcatttgtgtgaaagtgggcaaagactggaatagagtaagacaactg

SEQ ID NO: 509426 - DNA, 201 bp, Homo sapiens
tgccattctcatgatagtgagtaagtctcatgagatctgatggttttataaaggggagttctcctgcacacaccctcttgcctgctgccatgtaagatgtrcctttggtcttccttcaccttctgccatgactgtgaggcctccgcagccacctggaactgcaagtccattaaataaattacccagtcgtgggtatgtctt

SEQ ID NO: 509427 - DNA, 201 bp, Homo sapiens
ctggccccaaagtgcagctgcaacttcaggaagagactcaggccagccagagccaaagctctatggcagccaccttcctccacctccttctattacacttycctccacctccctccatctcctcagtcttctcagccagcttcccctgacccttgagcaccaggcaagcatgcacacacacaggcacatgcaggcatgcac

SEQ ID NO: 509428 - DNA, 201 bp, Homo sapiens
gtgctgggcgcagtggctcatgcctgcaattccagaactttgggaggccaaggcaggcagatcatctgaggtcaagagtttgagatgagcttggccaacayggcgaaaccctgtctctactaaaaatacaaaaattagccaggtgtgatgacgcacacctgtagtcccagctactcgggaggctgaggcaggagaattgct

SEQ ID NO: 509429 - DNA, 201 bp, Homo sapiens
tggcttttctttgtttacttatttatttacttagtgactttagtggagaagtttcattagctgaagtgttttggtttgcatttcctattttctcttacagmagctttgtatggagttgattttttctagttcttgatattttgtgcagggtgttcataggtgaagagcgccctttctatttttttttttttagtaaaatgc

SEQ ID NO: 509430 - DNA, 201 bp, Homo sapiens
tgcagcagaagatgccaaccaagtctctatactggctggggatcctgccatggatgcaggagaaaaaattcaatcacaagggagtaagtgacaacaaaaaraaaaaactctgagccacagctacactgggaggggggaggaccagattttgctacttctgtcacacaagctagaaaaaccctacctctcccattgggcagg

SEQ ID NO: 509431 - DNA, 201 bp, Homo sapiens
ctgaggtacaagaatcgcttgaacccagaaggcagaagttgcagtgagccgagatcacaccacagcactccagcctgagcaacagagactctgtctcaaaaaaaaaaaaaaagaaagaaagaaagaaagaaagaaagaaagaaagaaagaaagaaagaaagaaagaaagaaaactagtacagtacaggttaaaataataaa

SEQ ID NO: 509432 - DNA, 201 bp, Homo sapiens
ttttagtaaaatgcattatttttaaaatgttggtgatggaaatgagggtggagggagttattttatcctatgacatcctttccttttttaaattccctgtmtccaaggatctgcatacctcttcttgtgatctgattatttccccttagccatgttttttggaagcttccacttccaggcccattcagtccaagccctttc

SEQ ID NO: 509433 - DNA, 201 bp, Homo sapiens
tgaggtacaagaatcgcttgaacccagaaggcagaagttgcagtgagccgagatcacaccacagcactccagcctgagcaacagagactctgtctcaaaaaaaaaaaaaaagaaagaaagaaagaaagaaagaaagaaagaaagaaagaaagaaagaaagaaagaaagaaaactagtacagtacaggttaaaataataaaa

SEQ ID NO: 509434 - DNA, 201 bp, Homo sapiens
ggaggcaaccgaggagattaaggagtgtggatagtgacatggcaggaaaacaggagaatgtcatatcatgttctcaactaagaattttcttgactatttcygtagagcaacatttggggatcatgaaactgtgttaggcaaattagccagaaggtagtttctgttttgctgcattaatttcaaagttaatgatagtcaagt

SEQ ID NO: 509435 - DNA, 201 bp, Homo sapiens
ataccactgctatggtttgaatatcccctccaaaattcatgttgatacttaatctccaatgtggcagtattgaaaggtggaactttttaagaggtgattgsatcataaaggtctgctctcatgaatggataaatccattcatggattaatggattcatgggttaatggattcatgggttatgatgggagtgaaattggtgg

SEQ ID NO: 509436 - DNA, 201 bp, Homo sapiens
ccgaaaactatgatttgtatttttaacaatgctagactttctcttacctggagttgacttggtgtgtgtttcttctcatttctccatgccattctgctctstttttctctgcagtctcttaagccttccctctgcaatagcagtagaagctctcttggcatttggtgtttgtttctctactaagaaataatttgaagatca

SEQ ID NO: 509437 - DNA, 201 bp, Homo sapiens
aaggttttgagcagagtaatgacaagatctgatgtgccttctaaaatgactgttgtggctgccatgttgggtagactatatcagggcaggggtagaggcargagaccagttagggagctctttcagtatttgaggtgagaggctggatgctgtggctcacgcctataatcctagcactttggaaggccgaggcaggtggat

SEQ ID NO: 509438 - DNA, 201 bp, Homo sapiens
attccagcacaatatttcatatccatttaaactttatgtttaaaatacatgtgaaatatttcgcctcttcctatctgatgaatattttggatcctattccrtcatttagcatttatttctctcttaaatcagaaaatatgagaatcatgacctcgatagctttatgtaagattagcaattaataataaggtcaggctaagt

SEQ ID NO: 509439 - DNA, 201 bp, Homo sapiens
gtctcttaagccttccctctgcaatagcagtagaagctctcttggcatttggtgtttgtttctctactaagaaataatttgaagatcatggtattctctgwattgtagtaatgttaaagatattagtcatgagtatccttacttgttctctttgttgattttatgttttcttcagaagattatgtaagaagatttaaaatc

SEQ ID NO: 509440 - DNA, 201 bp, Homo sapiens
gaggtacaagaatcgcttgaacccagaaggcagaagttgcagtgagccgagatcacaccacagcactccagcctgagcaacagagactctgtctcaaaaaaaaaaaaaaagaaagaaagaaagaaagaaagaaagaaagaaagaaagaaagaaagaaagaaagaaagaaaactagtacagtacaggttaaaataataaaaa

SEQ ID NO: 509441 - DNA, 201 bp, Homo sapiens
aggcactggggacagctgtgaagaaagcagtcagaaatccctgccatcatggagcatacgttctagtgtaaagagataatgaaaatacaatcatctctccrtaaccatgggggatggattctagagtgtcccccacaccaaaatcctcggatgctgaagtctcttataataaaatgttgtagcatttgtatataacctatg

SEQ ID NO: 509442 - DNA, 201 bp, Homo sapiens
cagccacatcacactgctatttccattgagctttgtttacaggtagtgctataaagtcatttttcctccatcttacagtgcttggaattccagcacaatawttcatatccatttaaactttatgtttaaaatacatgtgaaatatttcgcctcttcctatctgatgaatattttggatcctattccatcatttagcattta

SEQ ID NO: 509443 - DNA, 201 bp, Homo sapiens
aatcgcttgaacccagaaggcagaagttgcagtgagccgagatcacaccacagcactccagcctgagcaacagagactctgtctcaaaaaaaaaaaaaaagaaagaaagaaagaaagaaagaaagaaagaaagaaagaaagaaagaaagaaagaaagaaaactagtacagtacaggttaaaataataaaaacctgaattca

SEQ ID NO: 509444 - DNA, 201 bp, Homo sapiens
  misc_feature (1)...(201): n = A,T,C or G
aacagttttgaaagcatctatctgtagtcggttttttaggcactggggacagctgtgaagaaagcagtcagaaatccctgccatcatggagcatacgttcnagtgtaaagagataatgaaaatacaatcatctctccgtaaccatgggggatggattctagagtgtcccccacaccaaaatcctcggatgctgaagtctct

SEQ ID NO: 509445 - DNA, 201 bp, Homo sapiens
gcttgaacccagaaggcagaagttgcagtgagccgagatcacaccacagcactccagcctgagcaacagagactctgtctcaaaaaaaaaaaaaaagaaagaaagaaagaaagaaagaaagaaagaaagaaagaaagaaagaaagaaagaaagaaaactagtacagtacaggttaaaataataaaaacctgaattcaggca

SEQ ID NO: 509446 - DNA, 201 bp, Homo sapiens
atgtgctagtgcctaactctaagcataataagaagaggagccaaacacattatgttgagatttttagaaatttaactcaaggttgggcgtggtggctcacrcctgtaatcccagcactttgggaggccgaggagggtagatcacttgaggtcaggagttggacaccagccttgggcaacatggtgaaaccccatctctact

SEQ ID NO: 509447 - DNA, 201 bp, Homo sapiens
gtaaatttttcgcttttcctttggtgggggtggggagactgggaagaatatattaaataataaacaatagtaaacaaaactgttcagccttaaaatacagyccccatcaacccacgtcttggctatcttcttcttaactcagcttcagagcaaaacattttctttttttcatattcttcggaggtagaaacacaaaacatt

SEQ ID NO: 509448 - DNA, 201 bp, Homo sapiens
tgcaacctccacctcccaggttcaagtgattctccttcctcagcctcccaagttaactggggctatgggcatgcaccaccacacccggctaattttttttstatgtttagtagagacagagtttgactacgctgcccaggttggtctcaaactcctgatctcaggtgatccgcccgcctcggcctcccaaagtgctgggat

SEQ ID NO: 509449 - DNA, 201 bp, Homo sapiens
cgataacctcttcttccagttcctcaggctctgccaatctttcgttcctcattcctgatacgataacccaatgggaggcaagtggcttttgtgtgaatggygacgttggatttggcatttcctctacaaccactctagaagtctcccaacctttctttattgaaattgcctcacccttttcggttgttcaaaatgaacaat

SEQ ID NO: 509450 - DNA, 201 bp, Homo sapiens
caggcgcgggggtggccccaagggcacggaccccgcctggcgcgccggccccttcgcttgcagccgcactcggaggcggccggtgagtcaccgggcgcgcrggctgccccccgaccgccgtgcctgcctcccacccgccagccacccggccccggccgcgaagtttcggccccgcacgtgacgcggctttcgggcctcttc

SEQ ID NO: 509451 - DNA, 201 bp, Homo sapiens
atagtctcacatatttttttctttaacttctttttaaaatctctcctgctagaaacaaacacagaatttgccatcacagtaggtgtcctacaagcctccaytgattaatccaagctcagcatgtgtattaacttgcccaaggtcacacagttaggaagtggcggaacaaggatttaaatttagtctttttaatgctaaggc

SEQ ID NO: 509452 - DNA, 201 bp, Homo sapiens
agaacatcacttccaggttaagtaaagtatgggaagtaggtcccagcttctctcaaaacatcagggttaccatggtttaaaaaaatggcttttggccgggygcggtggttcacgcctgtaatcctagcactttgggaggccgaggcgggtggatcacctgaggtcaggagttccagaccagcctggccaacatggtgaaac

SEQ ID NO: 509453 - DNA, 201 bp, Homo sapiens
gtcacatgccgcggggtctggtgggaggagcggttgcccagcggcctcttggcgcttcctgtttccggttcccagagtggggcacagcgaggcgctagggrgaacgctggcctctgaaactagctctgggaccggggtctgcggccggcccctagctggccccgtctcccatccccagaagggtattcactggggattctg

SEQ ID NO: 509454 - DNA, 201 bp, Homo sapiens
cgcccaccggggctttcgcctccaggcgctgggttattaataacaggcgcgggggtggccccaagggcacggaccccgcctggcgcgccggccccttcgcytgcagccgcactcggaggcggccggtgagtcaccgggcgcgcgggctgccccccgaccgccgtgcctgcctcccacccgccagccacccggccccggccg

SEQ ID NO: 509455 - DNA, 201 bp, Homo sapiens
aactcctattttgtgtcagaaactgtgttaggcagcagggggaaaaaggtgaacagagaaaatgtggtctctgttttatcaaggaagataagcatatttartaagcaactacattgaagtgtgatggtgatggtgatgatggtggtgatggtgatggtgatgatgacagcatctagtacttatttattgtttacgatgtct

SEQ ID NO: 509456 - DNA, 201 bp, Homo sapiens
tcttgaccaacatttgatattatctatacctttctaaagtctttgaagtctccaaagagatatggaggcttgataaaatgctacataagttcttacaatcmctagatctatagtgagcaatacaaataacatattttatattccagaacaaatataattttatatgtatatgcttttacttccctaacaaaatgtccaacc

SEQ ID NO: 509457 - DNA, 201 bp, Homo sapiens
gatacgtgatgtcacccccagcagcccagctgtaaaattcctctctttttactctttctctctctctttatttctcagccagctgacacttatgaaaatakaaagaacttacattgaaatactgtggggggggtcccccgttaaggaccctagcccagatgctcagctgaaatcagacctcagtccctgaagaaagaggtg

SEQ ID NO: 509458 - DNA, 201 bp, Homo sapiens
gagatttggagcttaaagaatctaagcacaccaaccttagcagaaagaaagccagtttgtgatttaaaagacaaaaaaaaatggtcatgcgtgccaaagarataatctgcaagacaatagtatctccagctcaacaaaagaagtcatgtacaagattaaactcatgctgtttccatccagtaacctcacacaaggtcaact

SEQ ID NO: 509459 - DNA, 201 bp, Homo sapiens
ccagctgtaaaattcctctctttttactctttctctctctctttatttctcagccagctgacacttatgaaaatagaaagaacttacattgaaatactgtggggggggtcccccgttaaggaccctagcccagatgctcagctgaaatcagacctcagtccctgaagaaagaggtggcctctgggagcaggaggagctgct

SEQ ID NO: 509460 - DNA, 201 bp, Homo sapiens
ttaaagaatctaagcacaccaaccttagcagaaagaaagccagtttgtgatttaaaagacaaaaaaaaatggtcatgcgtgccaaagagataatctgcaaracaatagtatctccagctcaacaaaagaagtcatgtacaagattaaactcatgctgtttccatccagtaacctcacacaaggtcaacttcaagatatctc

SEQ ID NO: 509461 - DNA, 201 bp, Homo sapiens
ctgagaggggattctggctggtttaggtcggggccttctctcttatagactaagaatatttaagggtttagggagggagagcttatcgcagatttggaatrtttctgggtggaggagagttttattgtggggttggcatgtttctggtcggagggggatttatcttggggttggaacatttccggttggaggtgtcattta

SEQ ID NO: 509462 - DNA, 201 bp, Homo sapiens
caaattaaaagacaaatagagaacaaaaatttaaacaagatgacaaatggttaatatccttaagatagagagctgaatattaaaaagtctttatgttattmggaaaagttctacagccatagtaacaagtaagtagcagaactggcttaacccactgaaatcaatggcagcttgctttggtgaaaatgtcttcaaaaacca

SEQ ID NO: 509463 - DNA, 201 bp, Homo sapiens
gcggtgagccaaaattgtgccattgcactgcagcctgggcaacaagagtgaaaatgacccaaaaaaaaaaaaaaaaagatggtaaggagattttacaaacyatagatttttacatttaaagaatcctcaaattaaaagacaaatagagaacaaaaatttaaacaagatgacaaatggttaatatccttaagatagagagct

SEQ ID NO: 509464 - DNA, 201 bp, Homo sapiens
accatgttggccaggctgctctcaaactcctgagctcaagtaatctgcccgcctcggcctcccaaagtgctgagattacaggtgtgaaccaccacacccgkcccaagagtttttatagagcttaatccccatcccctattccctgccgtccctgacccccacctcgccaaaggtctgtggactgagctgaatgttctaacc

SEQ ID NO: 509465 - DNA, 201 bp, Homo sapiens
ttctttgcaatgatcttgaagggatacatttaacatatatgaaaaatgagttgcagatgaattgagtcgccaagggctctgtttacaagcatgcctccccrccatcctgtccttaaaatagtgattccaagtcagttttcattaatgatccatgagtgatggccagcatgcagcacatagtttcatgtggacatttctctc

SEQ ID NO: 509466 - DNA, 201 bp, Homo sapiens
ttctttatgttttattcagtttacatcacaaccttattaactcacaatttagttgagtttatgcattaattagtttagtgaacttactattattttatatracaaagagtattcccttccttgtatactaaatttacctctttcgggcttcaggtgtgtcgtcttgtctactatttcagtatttagggagcaaaaccatgt

SEQ ID NO: 509467 - DNA, 201 bp, Homo sapiens
agcagctgctccatgtccttcacctctgccagggcctcatcccggagaaggcccatctgctcgtggttgtagaaggggcaggctgcctgcttctcctgcckcctcctctttggcttctcctcctcagctcctttcttcttctctgagggtggcacaggcacaaagagagaaaacagagaggacagcaactgtccacgggcc

SEQ ID NO: 509468 - DNA, 201 bp, Homo sapiens
aaattagctaggtgtgatggcgcacacctgtagtcccagctgctcaggaggctgacgtgggaagatcacttgatgccagaaggtcgaggctgcagtgaacyatgatcttaacactgcactcggccctgggcaacagagcgacaccctgtctctaaaattaaacaaggcagaatgaacatgcactcatctgtgttccaaagc

SEQ ID NO: 509469 - DNA, 201 bp, Homo sapiens
tgctgttcaatgtgcatttgctgaataaagaactatggagaatgaaaaaataaagtagaaaaagtaaaataaagtcatcatgatattagatgctaatacamactatgtgcttagtttcatatttattttagcatatatattagtttgaacttgaattttaaaaaatattttaaaaactgaagaatagggaacattgaccag

SEQ ID NO: 509470 - DNA, 201 bp, Homo sapiens
catttgctgaataaagaactatggagaatgaaaaaataaagtagaaaaagtaaaataaagtcatcatgatattagatgctaatacaaactatgtgcttagwttcatatttattttagcatatatattagtttgaacttgaattttaaaaaatattttaaaaactgaagaatagggaacattgaccagtatcatcatcatat

SEQ ID NO: 509471 - DNA, 201 bp, Homo sapiens
aaagtagaaaaagtaaaataaagtcatcatgatattagatgctaatacaaactatgtgcttagtttcatatttattttagcatatatattagtttgaactygaattttaaaaaatattttaaaaactgaagaatagggaacattgaccagtatcatcatcatatatttctctttctcccccaacttccctttatataatct

SEQ ID NO: 509472 - DNA, 201 bp, Homo sapiens
cgcccaccttggcctcctaaagtgctgggattacaggcctgagccatcacgccaggctgtcaataaacttttatgttgacatacttcaatagagtttcagwcaatccctcttttccctccctaatttttcctatttgaaaagaatccgctctctcctgttttgttcagcaaaatgtaaaacattgataagatttatacctt

SEQ ID NO: 509473 - DNA, 201 bp, Homo sapiens
agagcaatgaattgatgctgaatgtcttcatatctaaaggaaagtatctattcaaactttcttttttttttttttttttttttgagatggagtctcactctgtctcccaggctggagtgcagtggcgcaatctcggctcactgcaagctctgcctcccaggttcacgccattctcccacctcagcctccccagtagctggg

SEQ ID NO: 509474 - DNA, 201 bp, Homo sapiens
catatctaaaggaaagtatctattcaaactttcttttttttttttttttttttttgagatggagtctcactctgtctcccaggctggagtgcagtggcgcratctcggctcactgcaagctctgcctcccaggttcacgccattctcccacctcagcctccccagtagctgggactacaggcgcccacgaccacgcccagc

SEQ ID NO: 509475 - DNA, 201 bp, Homo sapiens
tcaaattgatttgtataagcattccttttaaaataatggtaaatctggttcaataaagtagaaattcaaataccttgtttccccggtgaataccatccatytcttacacatggctacccaaagttctcaagccattttaattaagcactttcaatgaaatacaatgaaagtgggaaccaaactctgagaaatctttatcat

SEQ ID NO: 509476 - DNA, 201 bp, Homo sapiens
ccccagtagctgggactacaggcgcccacgaccacgcccagctaatttttttgtatttttagtagagctggggtttcaccgtgttagccaggatagtctcratctcctgacctcgtgatctgcccacctcggcctcccaaagattacactcccaaagattataggcgtgagccaccgcgcctggcccaattcaaactttca

SEQ ID NO: 509477 - DNA, 201 bp, Homo sapiens
ctatttatttagtttttgagacaggatgtcatgctgttgcctaggtggctatcatagctcacttcagcatccaacgcctgggctcaagtgatcctcctgcytcagcctcttgagtagctgggaccacaggcacacaccaccacaccctgctaattttttaaatttttgtagagacaggttctagctattttgcctaggctg

SEQ ID NO: 509478 - DNA, 201 bp, Homo sapiens
ggcgcccacgaccacgcccagctaatttttttgtatttttagtagagctggggtttcaccgtgttagccaggatagtctcaatctcctgacctcgtgatcygcccacctcggcctcccaaagattacactcccaaagattataggcgtgagccaccgcgcctggcccaattcaaactttcaaacttcctggatcatacatt

SEQ ID NO: 509479 - DNA, 201 bp, Homo sapiens
gcaattctcctgcctcagcctcccgagtagttgggattacaagcgtgcgccaccacgcccagctaattgtttgtatttttagtagagacggggtttcaccrtgttaaccaggctggtctctaactcctgacttcgggtgatccacccaccttggcctctcagagtgctgggattacaggtgtgagccactgcactcggcct

SEQ ID NO: 509480 - DNA, 201 bp, Homo sapiens
ctctgcaatagcagtagaagctctcttggcatttggtgtttgtttctctactaagaaataatttgaagatcatggtattctctgtattgtagtaatgttaragatattagtcatgagtatccttacttgttctctttgttgattttatgttttcttcagaagattatgtaagaagatttaaaatcaggcagctaagattat

SEQ ID NO: 509481 - DNA, 201 bp, Homo sapiens
atctttgcttataaattatatccatttagattttgctttgagagaggagtatttggactccaaggtctttcatttgtggcagccagattaaaatcggagascaatttctgccaggcttctaggaactagtcagacaggtatgtgagggaagaaaccggagggcagccaaaggactggaaaagcgaagacacggggtatgag

SEQ ID NO: 509482 - DNA, 201 bp, Homo sapiens
atgtgcacccaaagaaatttagtggaggcaaatttttcaatctattaaatgaaaaagtacagtatggccgggtgtggtggctcatgcctgtaatcccagcrctttgggaggccgaggtgggtggatcacgaggtcaggagttcaagaccagcctggccaagatggtgaaaccccgtctctactaaaaatattttaaaaaat

SEQ ID NO: 509483 - DNA, 201 bp, Homo sapiens
taaagaacatgggtctaaaagtctttaccaatctccattaccgaaaaccagaagtatgtgtgatggagagaaggctgccactccctaagccgctttatctrgaaacagaaaattatggtccaatgcatagtgttccgtctagaattgcatgtaggtaatcttacatttttttgttgggggatgaccaaaccgctttgtgga

SEQ ID NO: 509484 - DNA, 201 bp, Homo sapiens
gagacacaagaattgcttaaacccaggaggtggagtctgcagtgagccaagactgtgccactctgctccagcctgggcaacagagtgaggctctacatttaaaaaaaaaaaaaaatatatatatatatatatatatataatatatatataaaatatatatataatatagatatatatacacacacacgttttataaatctt

SEQ ID NO: 509485 - DNA, 201 bp, Homo sapiens
accaatctccattaccgaaaaccagaagtatgtgtgatggagagaaggctgccactccctaagccgctttatctggaaacagaaaattatggtccaatgcrtagtgttccgtctagaattgcatgtaggtaatcttacatttttttgttgggggatgaccaaaccgctttgtggaatttagtgtatttgggataaatgatg

SEQ ID NO: 509486 - DNA, 201 bp, Homo sapiens
ctcgggaggctgaggcaggagaatcacctgaacctgggagatggttacagtgagctgagattgtgctgaggcaggaaaatagggtctggaggcagggagcrtaaggccaattcacacttaagctaaaacaggaaatagcctctccatctggcgtttgccataaatgactttgtaactttatcctcttcatttacataggac

SEQ ID NO: 509487 - DNA, 201 bp, Homo sapiens
aaatctcccttttcttataaggacaccagtcattgggtttagggcccactcagctataattgcactgcattaaggatctcaagatgagatcctcaattacrtctgcaaatattttatttctgaataagatcacattcacaggtatagggattaggacttggacacacctttttggggacacaattcaacccactatatcct

SEQ ID NO: 509488 - DNA, 201 bp, Homo sapiens
agacacaagaattgcttaaacccaggaggtggagtctgcagtgagccaagactgtgccactctgctccagcctgggcaacagagtgaggctctacatttaaaaaaaaaaaaaaatatatatatatatatatatatataatatatatataaaatatatatataatatagatatatatacacacacacgttttataaatcttt

SEQ ID NO: 509489 - DNA, 201 bp, Homo sapiens
aaaccacaaccagactactgaggtctggcaccatcagaggccaggtggctggagatgaagcattccaggatggaggtgaggtcctgatggaacgctgagaygctgtgtggaggttcaccaggatggagggcaattcatgactgatttggaaagctttcctttggaatcggaattgtcagcaaactctccagttcagtgttc

SEQ ID NO: 509490 - DNA, 201 bp, Homo sapiens
ccaccgttaacagcgccactgcattccagcctggatgacggagagagactctgtctcaagaaaaaaaagaaaagacccaaagaggcaattgcttgaacctsggaggcagaggttgcggtgagtgagatcgtgccattgcactgcagcctggacaacaagagtgaaactccgtctcaaaaaaaaaaaaaagaaaaaagaaag

SEQ ID NO: 509491 - DNA, 201 bp, Homo sapiens
cttaaacccaggaggtggagtctgcagtgagccaagactgtgccactctgctccagcctgggcaacagagtgaggctctacatttaaaaaaaaaaaaaaatatatatatatatatatatatataatatatatataaaatatatatataatatagatatatatacacacacacgttttataaatctttattacataaaacta

SEQ ID NO: 509492 - DNA, 201 bp, Homo sapiens
gtgtttgggcctgcccctgctcaaaagaagccttcccctggtagaagggcaacagctgtgataaggagagaacactgagcagatgatgaaaaccacaaccrgactactgaggtctggcaccatcagaggccaggtggctggagatgaagcattccaggatggaggtgaggtcctgatggaacgctgagacgctgtgtggag

SEQ ID NO: 509493 - DNA, 201 bp, Homo sapiens
tgcttgaacctgggaggcagaggttgcggtgagtgagatcgtgccattgcactgcagcctggacaacaagagtgaaactccgtctcaaaaaaaaaaaaaagaaaaaagaaagaaagaaaaaaatacaaatttataaaaaaccaattcactataacaacaacttacacagcatttacattatattaggtataagtgatctag

SEQ ID NO: 509494 - DNA, 201 bp, Homo sapiens
aacccaggaggtggagtctgcagtgagccaagactgtgccactctgctccagcctgggcaacagagtgaggctctacatttaaaaaaaaaaaaaaatatayatatatatatatatatataatatatatataaaatatatatataatatagatatatatacacacacacgttttataaatctttattacataaaactatttg

SEQ ID NO: 509495 - DNA, 201 bp, Homo sapiens
taccactgcactccagcctgggtgacagagtcagactctctctcaaaaaaaaaaaaaaaaaaaaaaaaaaagaaaagaaagaaagaaaagaaaaaaaatcrgagaacccaaaagaaaaatgggcaaaggactcaagcaaaatatgatatccaaatagtcaaaaatgtagaaaaatccctcaacctcattagtaatcaaatt

SEQ ID NO: 509496 - DNA, 201 bp, Homo sapiens
agcaacacagcaaaactcagtctctacaaacaaacaaacaaacaaacaaacaaagaaacattagccaagtgtgctggtatatgcctgtgatccagctactygggaggctgagtgggaggatcacttgaacctgggaggtggaggcttcagtgagccatgattgtgcctgtactctagcctagatgacggagtgagacctaa

SEQ ID NO: 509497 - DNA, 201 bp, Homo sapiens
caggaggtggagtctgcagtgagccaagactgtgccactctgctccagcctgggcaacagagtgaggctctacatttaaaaaaaaaaaaaaatatatatatatatatatatatataatatatatataaaatatatatataatatagatatatatacacacacacgttttataaatctttattacataaaactatttggatg

SEQ ID NO: 509498 - DNA, 201 bp, Homo sapiens
tttataatgtatttttctttttatttatttatttgttttttgagacagggtctcactctgttacccaggctggagtgcagtgatgcaatcacagcttgctrcagtcttgacctcccgagctcaagtgaccctccaacctcagcttcccaaatagctgggactacagccatgtgccattatacctggctaatttaaaaaaaa

SEQ ID NO: 509499 - DNA, 201 bp, Homo sapiens
tccagcctgggtgacagagtcagactctctctcaaaaaaaaaaaaaaaaaaaaaaaaaaagaaaagaaagaaagaaaagaaaaaaaatcagagaacccaaragaaaaatgggcaaaggactcaagcaaaatatgatatccaaatagtcaaaaatgtagaaaaatccctcaacctcattagtaatcaaattaggtagaagtg

SEQ ID NO: 509500 - DNA, 201 bp, Homo sapiens
gagacgagtttgaatatttatattgttacttatataattgagataaatctataattacattatttcttttttttttttcttttttgctctgtcgccaggckgtaatgcagtggcgtgatctcagctcactgcaacctccgcctcccaggttcaagtgattctcctgcctcagcctcccgagaacctgagattacaggcgca

SEQ ID NO: 509501 - DNA, 201 bp, Homo sapiens
tttatttccataggttattggggcacaggtggtatttggttacatgagtaagttctttagtggtgatttgtgagattttggtgcacccatcacccgagcastatacactgaacccaatttgtagttttttattcctctctcccttcccaccctttccgcccaagtccccaaagtcctttgtatcatacttatgcctttaat

SEQ ID NO: 509502 - DNA, 201 bp, Homo sapiens
gactacaggtgcctgcaaaatttcacttttgaaaaatatggggcaagttcaatggctcatgtctgccgtctgttattccaggactttggtaggcagaggcyggaagattgtctgagcccaggagctggagaccagcctggacaatatggtgaggtcctgtctctacttaataatacattttttaaaattgaaaatagaaaa

SEQ ID NO: 509503 - DNA, 201 bp, Homo sapiens
agtttgagaaaagcctgggcaacacggtgaaaccctgtccctattttttaaaaataaaaaatgaaagattttaaaacagcattcttctttttttcttttcttttttttttttttttgagacggagtcttgcttttttacctaggctggagtgcagtggcgtgatctcagctcactgcaacccccgcctcccaggttcaagc

SEQ ID NO: 509504 - DNA, 201 bp, Homo sapiens
agagaagttatatatataatatatacaagatatataatatatataaaatatatagtatatattatataatatttattataaatatataatatgtaatatakaatatataatatttattataaatatataatatataatatttattataaatataatatttataaatatatattataaatatataatatataatatttatta

SEQ ID NO: 509505 - DNA, 201 bp, Homo sapiens
gtttgagaaaagcctgggcaacacggtgaaaccctgtccctattttttaaaaataaaaaatgaaagattttaaaacagcattcttctttttttcttttcttttttttttttttttgagacggagtcttgcttttttacctaggctggagtgcagtggcgtgatctcagctcactgcaacccccgcctcccaggttcaagca

SEQ ID NO: 509506 - DNA, 201 bp, Homo sapiens
caaaggagaacaaagaaaaagaggaagttgcttatgaaaggaaacaaatatcttggttaaagtacaaagacatagaatgtactcattcccttatatctagmagctacataggatagggcttaaccaagagttattagcataaagcaaggaggcttgagggaagttactctttaaaagaaactattacttctaacacttatg

SEQ ID NO: 509507 - DNA, 201 bp, Homo sapiens
caattattatttttgattggtcaaaccaaaatctcttcagggatgtgttattgtagtgggaaatcagagactggagagactaagcggagttcaggagggartattttaagtgtacactagctcagcggacatgcatcttgaaagtctgagcagcaaacaaagaaaatgaatgtcttttatgcactttgaggtgggaattat

SEQ ID NO: 509508 - DNA, 201 bp, Homo sapiens
gaactgagatcgcgccactgcactgcagcctggatgacagagcaagagtctgtctcaaaaaaaaaaaaaagaattagatcacagccccaataagatttctrgtaacatctaattagacaattgagttcccttgctggagcttgtctgctttgcttataaaaacatgtgcaaagtctaagacaaccacaactagaccctcaa

SEQ ID NO: 509509 - DNA, 201 bp, Homo sapiens
taatatatataaaatatatagtatatattatataatatttattataaatatataatatgtaatatataatatataatatttattataaatatataatatakaatatttattataaatataatatttataaatatatattataaatatataatatataatatttattataaatatatattataaatatatgatatttaaata

SEQ ID NO: 509510 - DNA, 201 bp, Homo sapiens
atatttattataaatatataatatgtaatatataatatataatatttattataaatatataatatataatatttattataaatataatatttataaatatwtattataaatatataatatataatatttattataaatatatattataaatatatgatatttaaatatatatattataaatattattataaatatattata

SEQ ID NO: 509511 - DNA, 201 bp, Homo sapiens
ttggggaagcaagatacatagacataaaactattatgaatcaatatagtctatggttgctttgaaaatgagaatgatatagagtgtaaagtctctcatcayatgctatgaataatgaaagattttaaaccaaaaaaatagaaagtataaagatggtggccgggcgtggtggctcacacctgtaatcccagcactttgggag

SEQ ID NO: 509512 - DNA, 201 bp, Homo sapiens
tataatatttataaatatatattataaatatataatatataatatttattataaatatatattataaatatatgatatttaaatatatatattataaatartattataaatatattatatatatagtggtaaagttttaaaagttttgtaaaaaaaacaaactcccgagcgccccaaaaccgtgtggaaatatgaactctt

SEQ ID NO: 509513 - DNA, 201 bp, Homo sapiens
tttttcccagtcttacttattaccattccagttcaggccttacactgcagcctcacatacctcacatacaccataatatatgatgtaggcagtaaaaattstttaaaccctggcttcatggagtttggaatctttggggaagcaagatacatagacataaaactattatgaatcaatatagtctatggttgctttgaaaat

SEQ ID NO: 509514 - DNA, 201 bp, Homo sapiens
ctatcttagggttctccagagagacagaatcaatgggacatgatagatatagatcagatagatgatatagatataaatatagatataggaaaaaggatttmttagagggattggctctcacaattatggaggctgagaagttccatcacaggccatctgcgagctggagaccttgggatgtcagtagtgtggttcagccca

SEQ ID NO: 509515 - DNA, 201 bp, Homo sapiens
ttatgatcttgggatatgaatattcctaaaatcccataagcaagaaatcttgacaaaatgtgtttattatgttgacaagttttttggatacccagtaatayaaggaagtagcccttgtgattagtcaattattagttaattatcaacatactcaacaacaatatgaaagggaaaaaaaactgtcagtctccacaaggactt

SEQ ID NO: 509516 - DNA, 201 bp, Homo sapiens
accttttagagcctctttgagtctacgcaagtattcctgcaagacagagaagtcaaactataccaaatctctggatattaaaaaatgaacacagttagtcrtccaataaaaagtatatatcatttacccccatgaacagagctatgtattggcattgacagaggtatatgcgttatgttagttatttaagaaataatctgg

SEQ ID NO: 509517 - DNA, 201 bp, Homo sapiens
tggatattaaaaaatgaacacagttagtcatccaataaaaagtatatatcatttacccccatgaacagagctatgtattggcattgacagaggtatatgcrttatgttagttatttaagaaataatctggagaatttatcatcccctctgagagatttctgcacaatttaattaaggaccctatagtgtgctgtaggataa

SEQ ID NO: 509518 - DNA, 201 bp, Homo sapiens
gggagccagtacactccatcctgggcaacaaacagagtgagaccctgtctgaaaataaataaataaataaataaataaataaataaataaataaataaaawaaataataaataaataaataaaataaaaactcttagagattatcaggccttggaagagatttttccccaatctacataaagacccagagcccccaagaga

SEQ ID NO: 509519 - DNA, 201 bp, Homo sapiens
tttcaaagagcagatgcttaaactgttttatttatttatttatttattttatttttttgagacggagtctcactctgtcgcccaggctggagtgcaatggygtgatctcggctcactgcaacctccgccttctaggttcaagtgattctcctgcctcagtctcccaagtagctgggattacaggcgtctgccactgcgcct

SEQ ID NO: 509520 - DNA, 201 bp, Homo sapiens
tctgcagtgagccaagactgtgccactctgctccagcctgggcaacagagtgaggctctacatttaaaaaaaaaaaaaaatatatatatatatatatatatataatatatatataaaatatatatataatatagatatatatacacacacacgttttataaatctttattacataaaactatttggatgtgttaataatta

SEQ ID NO: 509521 - DNA, 201 bp, Homo sapiens
tgcagtgagccaagactgtgccactctgctccagcctgggcaacagagtgaggctctacatttaaaaaaaaaaaaaaatatatatatatatatatatatataatatatatataaaatatatatataatatagatatatatacacacacacgttttataaatctttattacataaaactatttggatgtgttaataattatc

SEQ ID NO: 509522 - DNA, 201 bp, Homo sapiens
ttattgataaaatacaatgtcagaaatacaatcatgcttcacttagtgatggagaatttgttctgaaaaatgcattgttaggtgatattgttgtgcgaacrtcatagagtgtacttacgcaaacctagatgctgtagcctgcaacacacctatgctatgtggtacagcccatttttcctaggctacaaacctccgcagcat

SEQ ID NO: 509523 - DNA, 201 bp, Homo sapiens
ttcaacccaagcaatctgattccagagctcattcactctctcaggtataatcaatatttagtgcacagctgtcatgtgcccagcactgacccaggccttgsggtaagggctgggggtgcttggtggagaatggactgtaggtgaagagccctgttcttaaccgctacaaattcagaatcccactgagacgagtttgaatat

SEQ ID NO: 509524 - DNA, 201 bp, Homo sapiens
tgtagaacaggctataattcaaacagtaagaacaaacttcccagagacatggatgtgggacctcgtcagtgtcgagtgagttttaaccattttctctcctrtgtgtctttatttctattttctttttctttcttcaggtttattcctgggtatataaaacagtaccatatttgtaaaatatgtatcattgatttgcatgta

SEQ ID NO: 509525 - DNA, 201 bp, Homo sapiens
gtgagccaagactgtgccactctgctccagcctgggcaacagagtgaggctctacatttaaaaaaaaaaaaaaatatatatatatatatatatatataatatatatataaaatatatatataatatagatatatatacacacacacgttttataaatctttattacataaaactatttggatgtgttaataattatcaaag

SEQ ID NO: 509526 - DNA, 201 bp, Homo sapiens
ctccaagccaggagcgtgcctcgctgaattccctcagtatctattgtcatctgaactttacaagtgaagaaatggaatcttagccagcaaaagaaattttycaaagttaaacaaccagtgggtattagaagtgggaattcaacccaagcaatctgattccagagctcattcactctctcaggtataatcaatatttagtgc

SEQ ID NO: 509527 - DNA, 201 bp, Homo sapiens
gaggcaaaaatctaacaaagctaaaatatttcttaatatttccatattctctttatcctcaagtgcaaaatgctactataaaggtataagacttaggtccrtattcctcaaacaaatacaattgctttcattcacagtgacagtttaaacagtgtattgagcatggtgtttcatagtgatgtgtgttccagtgctatcctc

SEQ ID NO: 509528 - DNA, 201 bp, Homo sapiens
ccaagactgtgccactctgctccagcctgggcaacagagtgaggctctacatttaaaaaaaaaaaaaaatatatatatatatatatatatataatatatawataaaatatatatataatatagatatatatacacacacacgttttataaatctttattacataaaactatttggatgtgttaataattatcaaagctgga

SEQ ID NO: 509529 - DNA, 201 bp, Homo sapiens
tattctagcataactttaaactgtaaatttaatttcttttaatttttccactttattatgaactgaaatgtgttccccaaaatttatatgggtttttttgttttttttgtttcgttttgttttgtttgagacagggtcttgctctgttgcccaggcttgagtgctgcagtggcgtgatcttggctcgacctcctgggctta

SEQ ID NO: 509530 - DNA, 201 bp, Homo sapiens
taggaaaacaaagtctcttgacctagctcataccatgcgcaaaaagcaatttcagataaaattaaaacaaaaacagcttttagctgggtgcagtggctcaygcctgtaatgtcaaccctttgggaggccgaggcaggcagattgcttgagctcaggagttcgagaccagtctgggcaacatgctgaaaccccaactctatc

SEQ ID NO: 509531 - DNA, 201 bp, Homo sapiens
agtctcgaactcctgaccttgtgatccacccgcctcagcctcccaaagtgttgggattacaggcgtgagccgctgcacctggccccaatactctttttgawaaaggaagacaaatatttcttcctgaccagctgaagtgtgtagctatagcttaaatatgggttacaactcactttgcctaacaccttgacattacatcat

SEQ ID NO: 509532 - DNA, 201 bp, Homo sapiens
gagtgcagtggtgtgatcttggatcactgcaacctctgcctccggggttcaagcgattctcctgcctcagcctcccgagtagttgggcttacagggacgtkccaccacgcccggctaatttttgtatttttcacagagacggggtttcaccatgttgaccaggctcatctcaaacccctgacctcaggtgatctgcccacc

SEQ ID NO: 509533 - DNA, 201 bp, Homo sapiens
accaacccccgcgacacgtgtttacctatgtaacaaacctgcacaggtagccccaaacctcaaataaaagttaaaaaaaaggaaaatagttaaaaaaaaamaaaacaaaaaaaaacaaaaaataaaaaaaagaatttcaaaagaaagtcaatccagaatcataaacaaaagccttgaacagatcctttttcatcagaggat

SEQ ID NO: 509534 - DNA, 201 bp, Homo sapiens
ctggctaattttttgtatttttttttttttagtagagacggggtttcactgtgttagccatgacagtctcgaactcctgaccttgtgatccacccgcctcrgcctcccaaagtgttgggattacaggcgtgagccgctgcacctggccccaatactctttttgataaaggaagacaaatatttcttcctgaccagctgaag

SEQ ID NO: 509535 - DNA, 201 bp, Homo sapiens
attacataaaactatttggatgtgttaataattatcaaagctggatgatgggtaaatgggggtcatactagtctttactttgcataagtttgaaattttcyataatagaaagttcaataaaattgtgtatctagtgcattctcattttttgagacagaatctcactctgttgcccaggctggagtgcagtggcacaatcac

SEQ ID NO: 509536 - DNA, 201 bp, Homo sapiens
cacgtgtttacctatgtaacaaacctgcacaggtagccccaaacctcaaataaaagttaaaaaaaaggaaaatagttaaaaaaaaaaaaaacaaaaaaaawcaaaaaataaaaaaaagaatttcaaaagaaagtcaatccagaatcataaacaaaagccttgaacagatcctttttcatcagaggatatccaaccacaatg

SEQ ID NO: 509537 - DNA, 201 bp, Homo sapiens
cccaagaaagatatgtttttgaagaccttgtgtaatccaatacttttttttttttttgagacagtctcaaactgtcgcccagcctggagtgcactggcgcratcttggctcactgccacctccaccttccgggttcaagtgattctcctgtctcagcctcccgagtagctgggactacaggcacatgccacaacacctggc

SEQ ID NO: 509538 - DNA, 201 bp, Homo sapiens
caattgcttttatagcactatcaaaaaataatatacttcagaataaaatttttttttcagatggagtttcactcttgttgcccaggctggagtgcgatggyacgatctcagctcactgcaacctccgcctcccaggatcaagcgattctcctgccttagcctcccaagtagctgggattacaggcatgcgccactacgcct

SEQ ID NO: 509539 - DNA, 201 bp, Homo sapiens
acgtgtttacctatgtaacaaacctgcacaggtagccccaaacctcaaataaaagttaaaaaaaaggaaaatagttaaaaaaaaaaaaaacaaaaaaaaamaaaaaataaaaaaaagaatttcaaaagaaagtcaatccagaatcataaacaaaagccttgaacagatcctttttcatcagaggatatccaaccacaatga

SEQ ID NO: 509540 - DNA, 201 bp, Homo sapiens
gtgatcagcctgcctctgcttcccaaagcgcaaggattacaggcatgagccactgtgtccacccaagaaagatatgtttttgaagaccttgtgtaatccartacttttttttttttttgagacagtctcaaactgtcgcccagcctggagtgcactggcgcgatcttggctcactgccacctccaccttccgggttcaagt

SEQ ID NO: 509541 - DNA, 201 bp, Homo sapiens
cacagcaaaagaaactactatcagagtgaacaggcaacctacagaatgagagaaaatttttgcaacctactcatctgacaaatctggatctaatatccagratctacaatgaactcatacaaatttacaagaaaaaaacaaacaaccccatcaaaaagtgggtgcaggatatgaacagacacttctcaaaagaagacattt

SEQ ID NO: 509542 - DNA, 201 bp, Homo sapiens
ccacagggaaagacaggttgctagcacttccatggaacagctactgtcacttttagcaggcattccttttgttgaggattcttgtccactgcaaaaggagytgtccaaaaccctgccacttacattagaagtacttggagtttccatgttcttcaaattcagttggttaccagtcatttgggtatttggattcatttcaca

SEQ ID NO: 509543 - DNA, 201 bp, Homo sapiens
acaccgtctctagtaaaaatacaaaaattagccaggcgtggtggtgggcacctgtaatcccagctacttgggaggctgaggcaggagaatctcttgaaccygggaggtggaggttgcagtgagccaagatcgtgccattgcactccagcctgggcaacaagagtgaaactccatctcaaaaaaaaagagagagagagaaga

SEQ ID NO: 509544 - DNA, 201 bp, Homo sapiens
tctccaagctttatgacttcccatctctcccattctctaggagacatattaggctctgccatgcaaaacacacaaaatcttctccagatgccctatggctrtggagagcagaatatggtcctctttgctcctaacatctatgtactggattatctaaatgaaacacagcagcttactccagagatcaagtccaaggccatt

SEQ ID NO: 509545 - DNA, 201 bp, Homo sapiens
tggcaagtaatgcagaatcgtcacattacacaagaaagatatggcttttttttcttttcttttcttttctttttttttttgagcagaatctcactttgtcrcccaggctggagtgcagtggcacgatcccagctcactgcaacctctgcctcccaggttcaagcaattctagtgcctcagcctcctgagtagctgggatta

SEQ ID NO: 509546 - DNA, 201 bp, Homo sapiens
gagaaaatttttgcaacctactcatctgacaaatctggatctaatatccaggatctacaatgaactcatacaaatttacaagaaaaaaacaaacaaccccrtcaaaaagtgggtgcaggatatgaacagacacttctcaaaagaagacatttatgcagccaaaaaacacatgaaaaaatgctcatcatcactggccgtcag

SEQ ID NO: 509547 - DNA, 201 bp, Homo sapiens
tttccacagggaaagacaggttgctagcacttccatggaacagctactgtcacttttagcaggcattccttttgttgaggattcttgtccactgcaaaagkagttgtccaaaaccctgccacttacattagaagtacttggagtttccatgttcttcaaattcagttggttaccagtcatttgggtatttggattcatttc

SEQ ID NO: 509548 - DNA, 201 bp, Homo sapiens
cacctcccaggttcacgccattctcctgcctcagcctcccgagtagctgggactacaggcacccaccaccacacccagctaattttttgtatttttagtasagacggggtttcaccgtgttagccaggatggtctcgatctcctgacctcgtgatccacccgcctcggcctcccaaagtgctgtgattacaggtgtgagcc

SEQ ID NO: 509549 - DNA, 201 bp, Homo sapiens
ttactacagacgaggtttcaccatattggccaggctggtctcgaactcctgatctcaggtgatctgcctgcctcggcctcccaaggtgctgggattacagrcatgagccaccacacctggccttccgtagctttttgtgctttcttctatcatttttttggtcacactgtattataactgttaatttgtttgtttccttcc

SEQ ID NO: 509550 - DNA, 201 bp, Homo sapiens
ttcttttctatcatttggtcaccataatgaattaaagcaaatgactaatatgaaccaaaagaaagctggggtagcagtttttttttttttttcttttttcygagatggagtcttgcaccgttgcccaggctggagtgcagtggcgcaatctcggctcactgcaagctctgcctcccaggttcacgccattcttgtgcctca

SEQ ID NO: 509551 - DNA, 201 bp, Homo sapiens
actgaggaggaaaccaacgttcacatcatttcaaatattggcctaaggtcacatagctgctaaagggatttcaaacacagtctgttcttaactcaaaaacycatattgtttccagtaaaatatcacaattcatttatctctgttgcctccaacaacaaataagtaacttaaaaataaagatcacgtcttcctaatttttgt

SEQ ID NO: 509552 - DNA, 201 bp, Homo sapiens
gaatggcatgaacccgggaggcagagcttacagtgagctgagattgtgccactgcactccagcctgggtgacagagcgagactgcgtctcaaaaaaaaaaraaaaaagaaactatacacggctcacacaacataaaaaaccctggctccctggaagacaggaaacacagttagatgatggggttggtgggtgggcaggggg

SEQ ID NO: 509553 - DNA, 201 bp, Homo sapiens
aggtcacatagctgctaaagggatttcaaacacagtctgttcttaactcaaaaactcatattgtttccagtaaaatatcacaattcatttatctctgttgyctccaacaacaaataagtaacttaaaaataaagatcacgtcttcctaatttttgtatagcctgcataatacctggcatatagatgatgctctctaaagat

SEQ ID NO: 509554 - DNA, 201 bp, Homo sapiens
tcacatagctgctaaagggatttcaaacacagtctgttcttaactcaaaaactcatattgtttccagtaaaatatcacaattcatttatctctgttgcctycaacaacaaataagtaacttaaaaataaagatcacgtcttcctaatttttgtatagcctgcataatacctggcatatagatgatgctctctaaagattta

SEQ ID NO: 509555 - DNA, 201 bp, Homo sapiens
catttatctctgttgcctccaacaacaaataagtaacttaaaaataaagatcacgtcttcctaatttttgtatagcctgcataatacctggcatatagatratgctctctaaagatttaataaataaatgaataacagacattcattccattttctcaggaacttgaatgacaactgtagcacagaaccagtaatacaatg

SEQ ID NO: 509556 - DNA, 201 bp, Homo sapiens
tggcatcacaaatttaaatacatcttaagattttttcgcttggcattgattaatgatgactaaaatctcattggtctagagctttcttcgttgcttttttytgaaaagacttactgtgaccattatctaaaaatgtaattgttgttttgagaccctggtctaaattttagcaaataattgcttgtattgtctcaagcactt

SEQ ID NO: 509557 - DNA, 201 bp, Homo sapiens
gggaatcttccccacttagtccactcagactcatatggtagtctcctctggaaacatcctcacagacacacccagaaacaatgctttactaagtttctagrtattccttaatccagtcaaactgacacctaaaattaaccatcacactcatgtcttgtcctagaaatcttcttgtttctcaaatgctctttgaactggtca

SEQ ID NO: 509558 - DNA, 201 bp, Homo sapiens
aacatcctcacagacacacccagaaacaatgctttactaagtttctaggtattccttaatccagtcaaactgacacctaaaattaaccatcacactcatgkcttgtcctagaaatcttcttgtttctcaaatgctctttgaactggtcactgcatctttactggttccctcattaatcggtgagctaagtaaaatctttga

SEQ ID NO: 509559 - DNA, 201 bp, Homo sapiens
gtagtagtatttatttatttatttattcttagtggagatgaggttttcctatgtcgaccagactggtctccaatccctgggctcaagcattcctcccaccytggcctcccaaagagctgggattacagccgtgagccacagtgcctgaccaaaaaaatacattttaaattgacttgcttatctgcatttgaaaattcacta

SEQ ID NO: 509560 - DNA, 201 bp, Homo sapiens
gaaatcttcttgtttctcaaatgctctttgaactggtcactgcatctttactggttccctcattaatcggtgagctaagtaaaatctttgacacatttcaytgcatatttgccagacagccacattgttaccttcttgaaaactatactttaacatgtctcataagtacaaaaatatagactctagacccaggtctttccc

SEQ ID NO: 509561 - DNA, 201 bp, Homo sapiens
acaaagtgatgttatgatttatgaataaaatgtgaaataattaaatcaagctaacctgaaatacttatgttttgtggtgggaacatttgaaattctctaascaagtttgaaacataaaatacactattattaactatattcaccatgctgtgcaatagatcccaaaaagaaaaaaatgtattccttctgtctgagactttg

SEQ ID NO: 509562 - DNA, 201 bp, Homo sapiens
tttgtgctttactcttaaacatctttaaagtgctattattctatatctgttggatgagtcattatttttgaaatgataatcctagcatgaactctgatctrtggtgttggattctgtttcttaaataactttaaaattaactgttttcccttgagatttccttctcctatgtaggtatttgagctattgttctaagtttac

SEQ ID NO: 509563 - DNA, 201 bp, Homo sapiens
agagtccataggattgcttatgggtaatgatttggaatagatttggtttcccactgtactgattaggtttccttgggcactatgctacccagaactaaggsaaagaatactctctgctcatggagacccaaatctgtcttaattttttttctttccaatgtcacagatcttggaaatgcttgaagaccacaaggctgaaaa

SEQ ID NO: 509564 - DNA, 201 bp, Homo sapiens
taaaatgaagtagaatgaaatacaacattgaacaggtcatattgagaggcaagataattgggacttgacctgaattgggagtgatgtgtcctatgttacamcaaaatctgccactgatgagagtgatcagtcagttaacctggggtttcagattcaataatagatgagctgaaaataatgaagggaggattcatgcagaag

SEQ ID NO: 509565 - DNA, 201 bp, Homo sapiens
cccatccctaaaatacacacacacacacacacacacaccccccaagtaaaatttcagctggaatataaatcgtgggtattatactgatttatggagagaaktatgctaagtctttcagatgaggaaaacatataagaaatatcatgcaagaaaaaagaagcaaatatggaacaagaactgaaagaacacatacccgcgtga

SEQ ID NO: 509566 - DNA, 201 bp, Homo sapiens
caacctactcatctgacaaatctggatctaatatccaggatctacaatgaactcatacaaatttacaagaaaaaaacaaacaaccccatcaaaaagtgggygcaggatatgaacagacacttctcaaaagaagacatttatgcagccaaaaaacacatgaaaaaatgctcatcatcactggccgtcagagaaatgcaaatc

SEQ ID NO: 509567 - DNA, 201 bp, Homo sapiens
ttctgttcaagtggaggagtctcagaattatgaagcaaatattaatacctggaaaatcaatggcagtgaggttattcaagctggagggaggaaaacaaacrtctggactattatacctaagaaattgggtaagcagctatctgtctacaccagtcactcatggaaaaaccagcccatatttattgtctccatttactttcc

SEQ ID NO: 509568 - DNA, 201 bp, Homo sapiens
catcatcactggccgtcagagaaatgcaaatcaaaaccgcaatgagataccatctcacaccagttagaatggcgatcattaaaaagtcaggaaacaacagrtgctggagaggatgtggagaaataggaacacttttacactgttggtaggactgtaaactagttcgaccattgtggaagtcagtgtgacgattcctcaggg

SEQ ID NO: 509569 - DNA, 201 bp, Homo sapiens
ggactattatacctaagaaattgggtaagcagctatctgtctacaccagtcactcatggaaaaaccagcccatatttattgtctccatttactttccttawattgtctatacaaacgtgattttctccctcacatttttaaaattcttattgtaaattctccattagaaattctaatctatagtaatctaatttctggttg

SEQ ID NO: 509570 - DNA, 201 bp, Homo sapiens
attgagacagaatactgtaccaacttgtatagttttatgacattaagtcgaagacacagttttaagagtgaaatagcaagcttcctgagacagagaaacamtaaaacacaacaacaacaacaacaacaaaaagaacaatatattggttatgtatattggtatatagtcacgtaaataataataaccttaaaagaatgattg

SEQ ID NO: 509571 - DNA, 201 bp, Homo sapiens
acagtaaatggtttccatctaaagcatgccaagataatggtagcttttcaaaacaaggcataaaaaagaaaaatgaaatgtattaaggaaatgatatatgmactcttccctcaaagtcactcttctcttttcttgttttccctattttcttgcccccagcattttacagaagttcttctcaatttttgcacggtcttgttc

SEQ ID NO: 509572 - DNA, 201 bp, Homo sapiens
ctgggcgtggtggcacgtgcctgtattcccagctactcaggaggctgaggcacaagaatcgcttgaacccaggaggtggaggttgcagggagccaagatcrtgccactgtactccagcctgagcaacagagtgagactccatctcaaacaaaaaagaaaaaaaaaagaaaatatcatgtccaaaatgcatttaatacacat

SEQ ID NO: 509573 - DNA, 201 bp, Homo sapiens
tattcatttaaaacagaaaagtatgtttaagttgtgaaatgtagatgtaacaaatttgtaagcacatagaatcccatggtcagtatctaaggggaataaartgggggataacagaagagctagatctgaaacagaaatacaaaatcatttattgtttgtgacaaataccccaaagcctcagttttgtttgtagatttgttt

SEQ ID NO: 509574 - DNA, 201 bp, Homo sapiens
gctgtgtcaggactggaaaggagaaacaagcacgtcagcaagaaacacatttcaaagggccaggcacaatggtaggggttagacgagatatttttgcatasattttgagaacaagaacagaaatctgcacagtaaatggtttccatctaaagcatgccaagataatggtagcttttcaaaacaaggcataaaaaagaaaaa

SEQ ID NO: 509575 - DNA, 201 bp, Homo sapiens
gcctaccttaaaagtgtccagaacacttacgttagcctacagttgggcaaaaatcatctaactcaaagccttttttttttttttttttgagacagggtctyactctgttgcccaggctggagtgcagtggcacaatctcagatcactgcaacctctggctcctgggttcaagcaattctcctgcctcagcctcccaagtag

SEQ ID NO: 509576 - DNA, 201 bp, Homo sapiens
aggcgtggtggcgcgtgcctctaatcccagctacttgggaggctgaggcaggagaatcatttgaacccgggaggtggaggttgcggtgaactgagatcacrccaatgcactccaacctgggcaacaaaacaagagcgaaacccagtctcaaaaaaaaaaaaagatttaacattttaagtagaataaaaatggcagagtata

SEQ ID NO: 509577 - DNA, 201 bp, Homo sapiens
gacattaatccaattgtacatctaacaaccgagaagaaaacacccgctggatcttgggcagtatcctgtgtgtggctacaaaacttccaccccagatgttygtccacaggagatgaagactaggggtgaggaggcttggagagacagtggagaggggcgcactgggagctggaatgtggctgctcctcagggagagctgtg

SEQ ID NO: 509578 - DNA, 201 bp, Homo sapiens
gtcccacctttctgaaccaaaccaatgtatttctttcttttttcttttttttgagacagagtcttgatctgtcgcaggctggagtgcagtggcgcgatctyggctcactgcaacctccgcctcctgggttcaagtgattctcctgcctcagcctcccaagtagctgggactacaggcatgcatcaccatgcccagctaatt

SEQ ID NO: 509579 - DNA, 201 bp, Homo sapiens
ccagtctcaaaaaaaaaaaaagatttaacattttaagtagaataaaaatggcagagtatatgaaagaattctgagaaaccatgaagaaatgctaatgaggytaactatatgaaacatgcttagaaggcagtccaatagaatgagaccaaaagaaacctctgtgacagccaagatgacagataatggataacttgaagaaaa

SEQ ID NO: 509580 - DNA, 201 bp, Homo sapiens
taccttttatcaggaaagactcagtaggaccctgattttgggagaagtaaaaaaaattctggtcattaaataaacacaccatttttttcccttcaagttaytgagccttctttaacgttatcacacacatacacacatacaaaggagcagcaccagtacatctactcaactgcaatgaaaaaataaaagtaaagatgccat

SEQ ID NO: 509581 - DNA, 201 bp, Homo sapiens
ttctttttcttttttttttgagatgacgtttcactcttgttgcccaggctggagtgcaatggcgatctcggctcactgcaatctccacctcctgggttcawgttattctcctgactcagcctcctgagtaggtgggattacaggcacccaccaccacgtccagctaattttttgtatttttagtagcgatggggttttacc

SEQ ID NO: 509582 - DNA, 201 bp, Homo sapiens
agtcggtggggaggatcgcttgagctcaggagtttgaggccagcctgggcaacacggtaaaaccccaactctacaaaacctgcaaaaattagccaggtgtrgtggcacgtggatccgtggtcccagctattcaggaagctaaagtaggaggatcatctgagcccggggaggtcaaggctgcagtgagccatgatcgtgcca

SEQ ID NO: 509583 - DNA, 201 bp, Homo sapiens
tacaacattgccgactggcaatactgccccgtcatcacacacagacaatacttcctgctgaactcccagtcccaccaaacaaaaccgatgagacgatctasgaacatgttctgaggtactttttaaaaaggcatatatttccctcaggcacaaacagttttttattaaaagtcaacttagcagctatgccacttctcaggt

SEQ ID NO: 509584 - DNA, 201 bp, Homo sapiens
gaagttcatttcttgaagtgatgcaaatgagagactgcatttctctttaacgctccttctgtcatgtctttctaaaatactgcactttcgaagtttctagytgaagaagcaatatttagaaaagaaagctggggctgggcgcggtggctcacgcctgtaatcccagcactttggaggccaaggcgggcggatcacgaagtc

SEQ ID NO: 509585 - DNA, 201 bp, Homo sapiens
agatgaacatcaggagggatggcactaaaggaaagggaagggaggcccctcgctgtgcccccagggcttccctcagaactgcagacaagagcttctcactsaagctcagaagaactctgcgtcaacccaaggatgggccctttctgtaaagttctttctgggcaagtgctagagccaaagacacatttaggcaacttctaa

SEQ ID NO: 509586 - DNA, 201 bp, Homo sapiens
tgaagccttttttattctagacttagtaacaatatctatagctgatatctatcatttgttaaatattcttttcttgaagactactattgtacctcctcttygttagactaaagtataatttctaaataggtcttttcttatttaacagttttcctttttctcaaagttctccaaattattttattagaatccagagttgga

SEQ ID NO: 509587 - DNA, 201 bp, Homo sapiens
agctggggctgggcgcggtggctcacgcctgtaatcccagcactttggaggccaaggcgggcggatcacgaagtcaggagatcgagaccatcctggctaayacggtgaaaccccgtctctactaaaaatacaaaaaaattagccgggcatggtggcgggcacctgtagtcccagctactcgggaggctgaggcaggagaat

SEQ ID NO: 509588 - DNA, 201 bp, Homo sapiens
gatgaacatcaggagggatggcactaaaggaaagggaagggaggcccctcgctgtgcccccagggcttccctcagaactgcagacaagagcttctcactgwagctcagaagaactctgcgtcaacccaaggatgggccctttctgtaaagttctttctgggcaagtgctagagccaaagacacatttaggcaacttctaag

SEQ ID NO: 509589 - DNA, 201 bp, Homo sapiens
ttttagactctgacaattgaatttttttagtaaaagtcctatattctgaacaattttaaagataccatggaatatagctgaaagaaaaaataataccaacratcatttttttccaacaaatatcttggaaaaataaagattgccatcctattttcaaatataaaatattttatgattaaccagtaaaattttaatgtattt

SEQ ID NO: 509590 - DNA, 201 bp, Homo sapiens
gtgcatttgctgaataaagaactatggagaatgaaaaaataaagtagaaaaagtaaaataaagtcatcatgatattagatgctaatacaaactatgtgctyagtttcatatttattttagcatatatattagtttgaacttgaattttaaaaaatattttaaaaactgaagaatagggaacattgaccagtatcatcatca

SEQ ID NO: 509591 - DNA, 201 bp, Homo sapiens
atgaacatcaggagggatggcactaaaggaaagggaagggaggcccctcgctgtgcccccagggcttccctcagaactgcagacaagagcttctcactgargctcagaagaactctgcgtcaacccaaggatgggccctttctgtaaagttctttctgggcaagtgctagagccaaagacacatttaggcaacttctaaga

SEQ ID NO: 509592 - DNA, 201 bp, Homo sapiens
gggcaacataatgaaaccctctctctacaaaaaataagaaaattagccaggtgtggtggcgtgcacctatagtcccagctattcgggaggatgaggtgggmggatcactcgggcccagggaggtcaaggctgcagtgagccctgatggtgtcactgcactccaatctgggtggcagagtgaggccctgtcttgagggaaaa

SEQ ID NO: 509593 - DNA, 201 bp, Homo sapiens
tgaacatcaggagggatggcactaaaggaaagggaagggaggcccctcgctgtgcccccagggcttccctcagaactgcagacaagagcttctcactgaasctcagaagaactctgcgtcaacccaaggatgggccctttctgtaaagttctttctgggcaagtgctagagccaaagacacatttaggcaacttctaagag

SEQ ID NO: 509594 - DNA, 201 bp, Homo sapiens
tctaaagcatttaagtgtacttgattcataaattaagaaactcaactgggcatggtggctcatgcctgtgtaatcccagcactttgggagtctgtggcagsaggattgcttgagtctagggctttcagaccagactgggcaacatagggagacctcatctttacaaaaaataaaaaattagctgggcatgatggtgtgcac

SEQ ID NO: 509595 - DNA, 201 bp, Homo sapiens
gaacatcaggagggatggcactaaaggaaagggaagggaggcccctcgctgtgcccccagggcttccctcagaactgcagacaagagcttctcactgaagstcagaagaactctgcgtcaacccaaggatgggccctttctgtaaagttctttctgggcaagtgctagagccaaagacacatttaggcaacttctaagagg

SEQ ID NO: 509596 - DNA, 201 bp, Homo sapiens
atcaggagggatggcactaaaggaaagggaagggaggcccctcgctgtgcccccagggcttccctcagaactgcagacaagagcttctcactgaagctcaraagaactctgcgtcaacccaaggatgggccctttctgtaaagttctttctgggcaagtgctagagccaaagacacatttaggcaacttctaagaggcaag

SEQ ID NO: 509597 - DNA, 201 bp, Homo sapiens
tcaggagggatggcactaaaggaaagggaagggaggcccctcgctgtgcccccagggcttccctcagaactgcagacaagagcttctcactgaagctcagmagaactctgcgtcaacccaaggatgggccctttctgtaaagttctttctgggcaagtgctagagccaaagacacatttaggcaacttctaagaggcaaga

SEQ ID NO: 509598 - DNA, 201 bp, Homo sapiens
cactccggcctgggcaaagagtgagaccctgtctcaaaaaaaaaaagaaaatcctaaatacattttaaaaatatatgcaaacagcaatgaaataataatayaatagctaacactcacccagccctaactctgcaccaggtactatttcaagtatgtcacatgtaaggactcatttaatcctcacaacagacccttgagtta

SEQ ID NO: 509599 - DNA, 201 bp, Homo sapiens
taaaattaatacttgcaaacataagggaagtcatgtaccttttaacagatctaactatttatgtctctagagttgttgggatctgtgaaagtggtaataartgatttacaaattattttctatttttaaagtgaaggaaagttgtaaaaataggtttctgactgacattaccaacatagtcatatgaactgaatataaggg

SEQ ID NO: 509600 - DNA, 201 bp, Homo sapiens
aaaagatatcccatgcaaatggtaatcacaagagagtaggtgacagggcaggagtatcatcatcttggacaagcactggcattttaaagttccccttaatsaaaaactgccccaaagggcattggcctaatggctaacgtcagcatgaccataaaccacaaatgacatctctgaccagaaacattccaacacgaaaataaa

SEQ ID NO: 509601 - DNA, 201 bp, Homo sapiens
tgtttcagatgaagcaaatttgctgaatacagtgtcccctgcagccgataggcagtttgctctacatatcccaagccttcattttgctctcaaaagcagtyctcctaaatacaaaatcatctacatcttttattagttgatatcagatttatcatactgcaaggtaacgcagaactatacagctttggagaggaacactaa

SEQ ID NO: 509602 - DNA, 201 bp, Homo sapiens
actgaatgaggttggcaaataaatatgtatttctagagactctataattgattccttcttcatttaatgcaaatttactccatgcgcacttactgcttttyattgtaccctgtatttgcaataaacaaataatggcatccaaattgaggtaagagcacctagcataaatttaggaacaattcacaacagcctcactactgc

SEQ ID NO: 509603 - DNA, 201 bp, Homo sapiens
tactggagatgctatacaggatcagaggagctgagagtgtcccacagtgacatcaagataatgcctgtccaagctacagaacgcagaggctaaaatgggtrccggtgatgtcccgtgccttccagatatgaacaaaaggggaagatgagttggatcttctctcagggataaacttgcaccagccatgcttgagtgagctgg

SEQ ID NO: 509604 - DNA, 201 bp, Homo sapiens
ggtgtcactgcactccaatctgggtggcagagtgaggccctgtcttgagggaaaaaaaaaaaaaaagaaatacattatgtacaaaagatgcctctaaggcaaaaaaaaaaaaaaaaaaaatggtcattggaatttcaacatgtccctgatagaattactcaaaagagtcaatattggagaccattatttataatatccatt

SEQ ID NO: 509605 - DNA, 201 bp, Homo sapiens
gtgtcactgcactccaatctgggtggcagagtgaggccctgtcttgagggaaaaaaaaaaaaaaagaaatacattatgtacaaaagatgcctctaaggcaaaaaaaaaaaaaaaaaaaatggtcattggaatttcaacatgtccctgatagaattactcaaaagagtcaatattggagaccattatttataatatccatta

SEQ ID NO: 509606 - DNA, 201 bp, Homo sapiens
tgtcactgcactccaatctgggtggcagagtgaggccctgtcttgagggaaaaaaaaaaaaaaagaaatacattatgtacaaaagatgcctctaaggcaaaaaaaaaaaaaaaaaaaatggtcattggaatttcaacatgtccctgatagaattactcaaaagagtcaatattggagaccattatttataatatccattat

SEQ ID NO: 509607 - DNA, 201 bp, Homo sapiens
gagttattacctggcctgggacacctaataacttgacaggccctggctatctactacctgctcaaaggcatgtgtccctgtagtttgcattctgtactctrgtgggctccccaggctggtgtgtgctcccgtgtcccttccaccaattcagacatcaaatgatttaaagcagagatcacaaggggtgcccatagaccatcg

SEQ ID NO: 509608 - DNA, 201 bp, Homo sapiens
ccacaagtacactgtaatctccttagagaaagtaagtacttttttatccacctcattgctcctcatagtgcttcagtgttccttcatggtgtttaaaacasaattctgctgttcaatgtgcatttgctgaataaagaactatggagaatgaaaaaataaagtagaaaaagtaaaataaagtcatcatgatattagatgcta

SEQ ID NO: 509609 - DNA, 201 bp, Homo sapiens
caggagggatggcactaaaggaaagggaagggaggcccctcgctgtgcccccagggcttccctcagaactgcagacaagagcttctcactgaagctcagamgaactctgcgtcaacccaaggatgggccctttctgtaaagttctttctgggcaagtgctagagccaaagacacatttaggcaacttctaagaggcaagat

SEQ ID NO: 509610 - DNA, 201 bp, Homo sapiens
atcccagctcaagccaagttccccagccatcacttccatcttggaagccaccccgcctttcttcacatggtcattcacccaggtaccatctccagcccccygaagtgtaatggtaattcgatctttctcagcctttgtgaagggcagttcaactgtttcagtctccctggctgctacccaaataaacgtactcccaaagag

SEQ ID NO: 509611 - DNA, 201 bp, Homo sapiens
ggagaatggcgtgaacccaggaagcagaggttgcagtgagccgagatcgcgccactgcactccagcctgggcgacagagcaagactccgtctaaaaataartaaataaaaataaataaataattcaggcaacactgggcccaccttcacagagcacaaaaatcacctgtaagtgagcactggctgttccttttccatctac

SEQ ID NO: 509612 - DNA, 201 bp, Homo sapiens
gcagacaagagcttctcactgaagctcagaagaactctgcgtcaacccaaggatgggccctttctgtaaagttctttctgggcaagtgctagagccaaagmcacatttaggcaacttctaagaggcaagattgacaatgggcttcatgatgggacgaaaaaggcagctattgatgaagacagacattttaattaggtaaac

SEQ ID NO: 509613 - DNA, 201 bp, Homo sapiens
ccaccactagctggaactacaggcccatgccaccacactcagctaattagtagtagtatttatttatttatttattcttagtggagatgaggttttcctakgtcgaccagactggtctccaatccctgggctcaagcattcctcccaccttggcctcccaaagagctgggattacagccgtgagccacagtgcctgaccaa

SEQ ID NO: 509614 - DNA, 201 bp, Homo sapiens
tgtgtcatggtttctttcaggcctgcttaaatactgtaaagttgggccgggcgcagtgactcgcgcctgtaatcccagcactttgggaggctggggtgggyggatcatgaggtcaggagatcaagaccatactggctaacacagtgaaaccctgtctctactaaaaatacaaaaaaaaaaaatttagctgggcatggtggc

SEQ ID NO: 509615 - DNA, 201 bp, Homo sapiens
gagctggattgagtgactcgcttctgttaaagagaacagggtgaaagtaatgactcttctgggattaggttacaaaaaagactgcagcttccatcttgggygcaccccttttctcaaactgcttgctctggggaagacagctgttgtgtgatgaggcagcccagcagagagattcatgtgatgagatactgagtgaggccc

SEQ ID NO: 509616 - DNA, 201 bp, Homo sapiens
cctcctgggctcaagggatcttactgcctcagccccaccactagctggaactacaggcccatgccaccacactcagctaattagtagtagtatttatttakttatttattcttagtggagatgaggttttcctatgtcgaccagactggtctccaatccctgggctcaagcattcctcccaccttggcctcccaaagagct

SEQ ID NO: 509617 - DNA, 201 bp, Homo sapiens
tggatcatgaggtcaggagatcaagaccatactggctaacacagtgaaaccctgtctctactaaaaatacaaaaaaaaaaaatttagctgggcatggtggygggtgcctgtagtcccagctactcaggaggctgaggcaggagaatggcgtgaacccgggaggcagagcttgcagtgagccaggattgcttccactgcact

SEQ ID NO: 509618 - DNA, 201 bp, Homo sapiens
cacataggatggaggaggcacctgcctggtgagatgagacaatggtcggattcactgaggctcctgcgtgtcccggatttcccgctgggggagggtgttcygctcagcggttcccacacctgcttccatgggagaagcaagaagaagtcagaagggtgggcgaaggagtcagaagcttctattattggttcggggagatgc

SEQ ID NO: 509619 - DNA, 201 bp, Homo sapiens
gcagcctcgacctcctgggctcaagggatcttactgcctcagccccaccactagctggaactacaggcccatgccaccacactcagctaattagtagtagtatttatttatttatttattcttagtggagatgaggttttcctatgtcgaccagactggtctccaatccctgggctcaagcattcctcccaccttggcctc

SEQ ID NO: 509620 - DNA, 201 bp, Homo sapiens
aaattagccaggcatggtggcgggtgcctgtagtcccagctacttgggaggctgaggcaggagaatggcgtgaacccgggaggcagagcttgcagtgagcygagatcgcaccattgcactccagcctgggcgacagagcgagcctctgtctcaaaaaaaaaaaaatagtatgtcctccggagcaaatccagcccaccacct

SEQ ID NO: 509621 - DNA, 201 bp, Homo sapiens
tgacctgcctggcagacctcaagtatggtgccagcctgggccccagcatcacccactctgccctggcaccaggctcaagtctctcaagcccagtgagctgkgtgttaggatggcagccaggctccctactcagtcacctccttccctaggcaccccacactttctcccatttccacttccgacctatacgatggcatgtta

SEQ ID NO: 509622 - DNA, 201 bp, Homo sapiens
tgcagcctcgacctcctgggctcaagggatcttactgcctcagccccaccactagctggaactacaggcccatgccaccacactcagctaattagtagtaktatttatttatttatttattcttagtggagatgaggttttcctatgtcgaccagactggtctccaatccctgggctcaagcattcctcccaccttggcct

SEQ ID NO: 509623 - DNA, 201 bp, Homo sapiens
ccaggctggagtgcaatggcatgatctcggctcactgcaatctctgcctcccaggttcaagcgattctcctgcctcagcctccctagtagctgggattacmggcatgtgccaccacgcccggctaattttgtatttttagtagagatggggtttctctatgttggtcaggctggtctcgaactccagacctcaggtgatct

SEQ ID NO: 509624 - DNA, 201 bp, Homo sapiens
cccagtgagctgggtgttaggatggcagccaggctccctactcagtcacctccttccctaggcaccccacactttctcccatttccacttccgacctatamgatggcatgttaacagcaccccaacctccccaagctgctgcggtgctggtcagtgcaccctcatccccaccccaggccctgcccactgcagtccaaggtg

SEQ ID NO: 509625 - DNA, 201 bp, Homo sapiens
gtctcctcagcgagtgcctcctctccctctccttcccggtacgctccctcccggcgtcgcggcgagtttggctgcggcgactcctgcggcagtcgcagcgyctcggtatctgcagctcccgcactcactcaaagccgctaccgcagctgccaggccggggctgcctccaccccttcctctctggagccaatcgccagcagg

SEQ ID NO: 509626 - DNA, 201 bp, Homo sapiens
cctcccaggttcaagcgattctcctgcctcagcctccctagtagctgggattacaggcatgtgccaccacgcccggctaattttgtatttttagtagagayggggtttctctatgttggtcaggctggtctcgaactccagacctcaggtgatctgcccgcctcggcctccccaagtgctgggattacaggcatgagccac

SEQ ID NO: 509627 - DNA, 201 bp, Homo sapiens
tgctggtcagtgcaccctcatccccaccccaggccctgcccactgcagtccaaggtgccgggcaggatgacagcagcagcatccccttcaggagggagccrctctctgaggccacctcagtctcatttctggatccctggcagattttctgtggggttgttagctggtcagaaatcccttattttttttaatagttgtcat

SEQ ID NO: 509628 - DNA, 201 bp, Homo sapiens
ccaaagcaggaatttagcgaagccgcttaagcttcagtagctagaaaactggtcttttcaaatcctaacaaaagttagagagaaaaagagaattctacctktactttctgaattttctgagaagtgacctccaggacaagctcggcggtaggcgggttcctgcccaaggtcctctgggggaagggacagcatagctaaggg

SEQ ID NO: 509629 - DNA, 201 bp, Homo sapiens
ccgtgtctgctaacccccagcagccacaggcagaggaagaagaggacaactggaaatcctagcgggcgccgccatgccttcctcccctaaacccagactcyagccatggcccggacgtggacacagccagaatgggatcctcagccctgctgccctggaggaaggggcggggatggaactgtcccagttctgtgtggagac

SEQ ID NO: 509630 - DNA, 201 bp, Homo sapiens
ccagctactcgggaggctgagacaggagaatcttgaagccaggaggcagaggttgcagtgagccgagattgcgccactgcactccagcctgcgggacaagmgcaaaactgcgtctcaaaaaaaaaaaaaaaaaaagaatggaaaagagaaaaagcagagctaccttacagaaatgatttgtagactgccacaactcccttt

SEQ ID NO: 509631 - DNA, 201 bp, Homo sapiens
gccttcctcccctaaacccagactccagccatggcccggacgtggacacagccagaatgggatcctcagccctgctgccctggaggaaggggcggggatgraactgtcccagttctgtgtggagaccaccttcggggagcgggaggctggcttcaggccacgcagctggggtgggggcttccatctgcctgtgctccatcg

SEQ ID NO: 509632 - DNA, 201 bp, Homo sapiens
atcctcagccctgctgccctggaggaaggggcggggatggaactgtcccagttctgtgtggagaccaccttcggggagcgggaggctggcttcaggccacrcagctggggtgggggcttccatctgcctgtgctccatcggaggatggctccacccagcccctgcaccagtgcgctcctcgattccctaaagaggcttcca

SEQ ID NO: 509633 - DNA, 201 bp, Homo sapiens
aataggggcaacaggaacttttacacattgctagtgggaaagcaaaatggtacagctgctctggaaaacttaaccatacacttaccatatgacctagtatycccactctcttaagtatttactctagaaaaatgaaaacttcacgaaaacgtaagtgtacatgaatgcttatagaagctctagttataatcaccaaaatct

SEQ ID NO: 509634 - DNA, 201 bp, Homo sapiens
aacatggcaaaaataaatcttcccctatcaacaattactttaaatgcaaattgagtaaacctcccaatgaaaacacatatagtgactgaaaagttaaaaasacagacccaaatatattctatatacaaggtacttactttagatttaagaacacacataggctgaaagtgaagggatgaaaaagatatcccatgcaaatgg

SEQ ID NO: 509635 - DNA, 201 bp, Homo sapiens
aggaagacaggaagagaggaaaagacagacaaaataattacaaggctaacataaaacaactaacatggcaaaaataaatcttcccctatcaacaattactktaaatgcaaattgagtaaacctcccaatgaaaacacatatagtgactgaaaagttaaaaaaacagacccaaatatattctatatacaaggtacttacttt

SEQ ID NO: 509636 - DNA, 201 bp, Homo sapiens
gtttattttagcaccaggtaaaatgactggcctgtctagatagaagctccgtattgcagaaaggtgaaaatttatcaatcaatcaattaattaataagttwtgtttaggtgggagtcataatattacgacaatttcatggaattagaaatgcttaacttctggtccaaaatctgccactgaccatttgtatgactttgggt

SEQ ID NO: 509637 - DNA, 201 bp, Homo sapiens
ttgatcgcggtctaatcagcaccaggcacctcagggcagcagtattgtcagacgcattggaaccagagggactccatcttgaataaggtctgggtaaaatraggctaacacctactgggctgcattcccaggaggttaagcattcttagtcacaggacaagataggtcagcaggacaagatagaggtcataaagaccctgc

SEQ ID NO: 509638 - DNA, 201 bp, Homo sapiens
gttggtcaggctggtctcgaactccagacctcaggtgatctgcccgcctcggcctccccaagtgctgggattacaggcatgagccaccatgcccagcctctttttttttttttttttttttgaggtggatcggagtctcactgtgtcacccaggctgcagtgcagtggcgtgatctcggctcactgcaacctccgcctcct

SEQ ID NO: 509639 - DNA, 201 bp, Homo sapiens
agcctctttttttttttttttttttttgaggtggatcggagtctcactgtgtcacccaggctgcagtgcagtggcgtgatctcggctcactgcaacctccrcctcctgggttcaagcgattctcctgcctcagcctcctgagtagctaggactacaggcacctgtcaccacgcccggctaatttcttttttatatttttag

SEQ ID NO: 509640 - DNA, 201 bp, Homo sapiens
aggcacctgtcaccacgcccggctaatttcttttttatatttttagtagagacagggtttcactatgttggccagactgatctcgaactcctgacctcgcratccgcccacctcggcctcccaaagtgctgggattccaggcatcagccattgcacccagggtgatattcttatatattattacctgacattggaggaaat

SEQ ID NO: 509641 - DNA, 201 bp, Homo sapiens
gtttcatcaataaccaaaaaaaggaccacaagaaaatacccttcttaggtcaggcgtggtggctcacacctataatctcagcactttgggaggctgaggcsggcagatcatgaggtcaggagatcgagaccatcctggctaacacgttgaaaccccatctctactaaaaatataaaaaattagccaggcgtggtgatacat

SEQ ID NO: 509642 - DNA, 201 bp, Homo sapiens
gttgaaaccccatctctactaaaaatataaaaaattagccaggcgtggtgatacatgcatgtagtcccagctactcgggaggctgaggcaggagaatcgcytgaacccaggaggcagaggttgcagtgagccaagatcgcgccactgccctccagcctggtgacagagcgagactccgtctctcaaaaaaaaaaaaaaaaa

SEQ ID NO: 509643 - DNA, 201 bp, Homo sapiens
tgatacatgcatgtagtcccagctactcgggaggctgaggcaggagaatcgcctgaacccaggaggcagaggttgcagtgagccaagatcgcgccactgcmctccagcctggtgacagagcgagactccgtctctcaaaaaaaaaaaaaaaaaaaaaaccccttcttattttaaaaagtattcgagaagcatctttacaaa

SEQ ID NO: 509644 - DNA, 201 bp, Homo sapiens
tacaacaaatgcatggctgagctcataacaaaataaaggaggtgcccaaaggcaagcaaaaaaaaaaaagaacccaaaacttaaacacaagtaactaactygtaagaccatgctgcccaagaggcaaagtcattgccaggaacccgaaagcctaggggactaagagcctttcaggggacggaagttttggccttgggtttt

SEQ ID NO: 509645 - DNA, 201 bp, Homo sapiens
tcccagctactcgggaggctgaggcaggagaatcgcctgaacccaggaggcagaggttgcagtgagccaagatcgcgccactgccctccagcctggtgacrgagcgagactccgtctctcaaaaaaaaaaaaaaaaaaaaaaccccttcttattttaaaaagtattcgagaagcatctttacaaatgtatttttctaagtc

SEQ ID NO: 509646 - DNA, 201 bp, Homo sapiens
tcgcctgaacccaggaggcagaggttgcagtgagccaagatcgcgccactgccctccagcctggtgacagagcgagactccgtctctcaaaaaaaaaaaamaaaaaaaaaccccttcttattttaaaaagtattcgagaagcatctttacaaatgtatttttctaagtctacatttctccactgtgagctcacttatccca

SEQ ID NO: 509647 - DNA, 201 bp, Homo sapiens
gcttagtttttagttttaaataatttttaaaagtgcaagaattacacagagaactcccgtagacccttggcctgattcaccagtttgtgaacatttcaccrtacttgttttctctttctcactctctccacccctacacacacacacatacatacacacacacacacacacacacacacagagtttatgccatttcagttt

SEQ ID NO: 509648 - DNA, 201 bp, Homo sapiens
agttcaagaccagcttggccaacatggtacaaccctgtctttactgaaaatacaaaaattagctgggtgtggtggctcatgcctgtaatcccagctactcsggaggctgaggcaggagaattgcttgaaccaggaggtggaggttgcagtgagctgagatcatgccactgcactccagcctgggcaacacagcaagactct

SEQ ID NO: 509649 - DNA, 201 bp, Homo sapiens
agacaggacaatcgcttgattgggggaggtggaggctacagtgagccgagacatgagtcactgcactccagcctggacgacagagctgagactccatctcaaaaaaaaaaaaaagcccagagttcaaggctgcagtgcccaatgattaagcctctgaatagccactgcattccagcctgggagcaaagtgagactgtctct

SEQ ID NO: 509650 - DNA, 201 bp, Homo sapiens
ctgaggcaggagaattgcttgaaccaggaggtggaggttgcagtgagctgagatcatgccactgcactccagcctgggcaacacagcaagactctgtcgcmaaaaaaaaaaaaaagaaatcaaattttaattgtgccactacatggatttttctcttctggattttttttcttttccctcttaacccttatatctatcaat

SEQ ID NO: 509651 - DNA, 201 bp, Homo sapiens
aaggttttcagccaggcgcggtggctcatgcctgtaatcctagcactttgggaggccaagacgggcagatcacgaggtcaggagattgagaccatcctgamtaacacggtgaaaccccatctctactaaaaatgcaaaaaaaaaaaaattagccaggcatggtggcaggcacctatagtcccagctactcaggaggctgag

SEQ ID NO: 509652 - DNA, 201 bp, Homo sapiens
ggctcagaggctcatgtctgtaataccagcacttggggaggttgaggaggccagatgtttaagaccagcctggacaacatagcaagatcctgtctctaccaaaaaaaaaaaaaaaaaagaaagaaagaaaaaagaaaacaacaagactgagttttgccggtttctgttttgtttttgagacaggccaggcgagagtgcagt

SEQ ID NO: 509653 - DNA, 201 bp, Homo sapiens
gcattgctctggttttttgtagaggttggagggaactgaaaacagcaaagatctgtagcgccttaaaggtttcattagggtagtacctagacagggcttggcctcctggccagtagattgcccagtaaggatcactgtggggccacaggtcagctctctcccaccagaatttgcatctgggggtcaaaagccgcaactgga

SEQ ID NO: 509654 - DNA, 201 bp, Homo sapiens
catcatatttgtatataaactaggcatatgctgtggtatactttactttaaatcatctctggatgactcataatacttaatacaacgtaaatgctatataagtagttgttacactatttttgtgttatttttattgttgtaattttatattgctatattgttatattgtgggccaactgtacctttaaagttctttcataa

SEQ ID NO: 509655 - DNA, 201 bp, Homo sapiens
ttagccggtggatgccaaggaagctgcgggttgtgctgtagaagggtcgcaggtgcaggtaggcattttggtagtaacgtggcacttgttccggattatayactaagtcttccatttgaaactttccctgagaataaaagagagagagagaattttagcatgtgctccaaccatggaaaccccacggacttgttacggttt

SEQ ID NO: 509656 - DNA, 201 bp, Homo sapiens
atcatatttgtatataaactaggcatatgctgtggtatactttactttaaatcatctctggatgactcataatacttaatacaacgtaaatgctatataagtagttgttacactatttttgtgttatttttattgttgtaattttatattgctatattgttatattgtgggccaactgtacctttaaagttctttcataaa

SEQ ID NO: 509657 - DNA, 201 bp, Homo sapiens
tcatatttgtatataaactaggcatatgctgtggtatactttactttaaatcatctctggatgactcataatacttaatacaacgtaaatgctatataagtagttgttacactatttttgtgttatttttattgttgtaattttatattgctatattgttatattgtgggccaactgtacctttaaagttctttcataaat

SEQ ID NO: 509658 - DNA, 201 bp, Homo sapiens
ctaaaaagttcattctgaaactatgcaacacctactatgtgccagtcgcacttccaggcaccgggcatagagtggtgagcaaaatagacaccgtatatttaaaaaaaaaaaaaaaaaagacacagtataagccctctgtgctgcctacattcaactgcgattaaatcataatgaatgtcctttcttttctaataattcata

SEQ ID NO: 509659 - DNA, 201 bp, Homo sapiens
  misc_feature (1)...(201): n = A,T,C or G
ctgccttcttagaccttactgtccccagtcagcttttttgcccatcgtttatttgttttcatttttcctaatttagaaagcaatcaaactaactggtgaanacattattaaattgtttatatcccatattctagaaattaggcttctataaaataacaaccaattgcacaaattaattttttttattaaattgaaagttag

SEQ ID NO: 509660 - DNA, 201 bp, Homo sapiens
gggctggtgcagcggctcacacctgtaatcccagcactttgggaggccgatccgtaggagctcgagaccagcctagtcaacatggcgaaaccctgtctctmccaaaaatacaaaaattagccaggcatggtggtgggcgcctataatctcagctactcgggaggctgaggcaggaaaatcacttgaactggggaggtggag

SEQ ID NO: 509661 - DNA, 201 bp, Homo sapiens
ctactcgggaggctgaggcaggaaaatcacttgaactggggaggtggaggctgcagtgagctgagagcataacattgcactccagcctgggcaacaagagygaaattccgtctcaaaaaaaaaaaaaaaaaagaaaagaaaggggttggggaaagtgatacaaaacgacatgtggcaagttccactttaacttggaatttg

SEQ ID NO: 509662 - DNA, 201 bp, Homo sapiens
gtggtcccggtactcagggagctgagaggtgggaggatcatttgcacccaggaggtggaggctgcagtgagccttgatcatgccactgcactccagcctgrgtggcacagtgagaccttgactcaaaaaataaaataaaataaataaagaattagctgggcatggtggcatgtgcctgtagctgcagctcctagggaggct

SEQ ID NO: 509663 - DNA, 201 bp, Homo sapiens
agcttttttgcccatcgtttatttgttttcatttttcctaatttagaaagcaatcaaactaactggtgaaaacattattaaattgtttatatcccatattmtagaaattaggcttctataaaataacaaccaattgcacaaattaattttttttattaaattgaaagttagcctgtaatcctagcactttgggaggccaaa

SEQ ID NO: 509664 - DNA, 201 bp, Homo sapiens
cccttaactacttctcagtgctactcagctgtgaggaaggagacggctgtctcttcttttgagatatcagatgatggtgggaggctgaatgcagaaggacrgatgtgttcaaaagaagagaaagtatgtaaaagcaaagcagaaaaaagaaaaatggggcaaagaaaacaggaaaggcatctgtgagacccttgggtgagt

SEQ ID NO: 509665 - DNA, 201 bp, Homo sapiens
actggtagactgtgaccagtgctgctcacgatttgaatttgcccttcccaaagtcagactatgctgagggaggagaaaaggtaacacctacaaaacttctkgcttagagtctctttatttaaagattatgtggccctaccttctttcttcccagagtagagaaagaaaagagcctctcagtgtcctcgaaagagccaatag

SEQ ID NO: 509666 - DNA, 201 bp, Homo sapiens
ctgtagaaaatttgaaaaatatagagaaaaacacaagacattacctattattaatttgaccaactgccattaacattgtaatgtcactaacattgtaagtktcctctaattttaatgaatattttccatgactgcaatcatacttttctatttataataattaagaaaacatgcctacgtattatgccaatcttttcatga

SEQ ID NO: 509667 - DNA, 201 bp, Homo sapiens
atgccaccttcgtgcatagtgctgtatttggtgggaaacgaaggaacagagaacatcctgttgattggtctctgactcttaatactctgatatttttgtckaattgcaatgaaaagatctaagtaaggcttaggacagaaaacagagcagttctcaattggggcctatgctaaaagagttagacatggtttaatgttgaaa

SEQ ID NO: 509668 - DNA, 201 bp, Homo sapiens
catagtaagctatatgactgcaataaggtttgcttgcctgtgattgtgcaggctaacgtatatttctcttcgtttccagtgctgcccaagtttgaagttayggtcaatgcaccacaaacagtaactatttcagatgatgaattccaagtggatgtatgtgctaagtgagtatttattcagagatttaccttcacaagaaaa

SEQ ID NO: 509669 - DNA, 201 bp, Homo sapiens
ctattttgccgagttttccaaaaacatataattttaatttattaatgtgatgtaatatgatgtgaggttttttgctactccatcacattaatttctatttytatctttattatttccttactggtgctgtattttgttgttatttttagctttttcacttagaaatttacttcattttcattaatttattttattgggcta

SEQ ID NO: 509670 - DNA, 201 bp, Homo sapiens
gccgagttttccaaaaacatataattttaatttattaatgtgatgtaatatgatgtgaggttttttgctactccatcacattaatttctatttttatcttyattatttccttactggtgctgtattttgttgttatttttagctttttcacttagaaatttacttcattttcattaatttattttattgggctaggtgttt

SEQ ID NO: 509671 - DNA, 201 bp, Homo sapiens
caatcagtgtatcatgtagataccaactcaggaagggagtgaggtaaaagcatacatctgggctggcttctaagtttacagaggacaagaatcatgccctrtggattcttgtgtctgtccaacctagcacagcacctggcacataggctgttgatctgaactgagaggtggcaacagcgtttagaccagaatagaggtgtc

SEQ ID NO: 509672 - DNA, 201 bp, Homo sapiens
agtagagacggggtttcatcatgttggccagactggtctcaaactcctgacctcaggtgatccacccgcctcggcctcccaaagtgctgggattacgggcrtgaaccaccacgcccggcctctttttcttataattttgctcttcttgatttatacttcataatccattcccctctacgatttgaaagcaatttacagaaa

SEQ ID NO: 509673 - DNA, 201 bp, Homo sapiens
caaacagaaatgagcaaaaagtatgccagaaagtgcagagggcccagattatgtattgagggacaatctatagcattccttgtcttattcctgcaaatctyggcaacctgtcctcaggaccaaagtggggtttacccatgtttggaaatgcacagaagcttataaacctggttgtacatcaggatcgtctgggcacttgtt

SEQ ID NO: 509674 - DNA, 201 bp, Homo sapiens
aactcctgacctcaggtgatccacccgcctcggcctcccaaagtgctgggattacgggcatgaaccaccacgcccggcctctttttcttataattttgctyttcttgatttatacttcataatccattcccctctacgatttgaaagcaatttacagaaaaaattttaagggagtgagagaccagtgattgtagggagacc

SEQ ID NO: 509675 - DNA, 201 bp, Homo sapiens
aactgctaatccaatgttgtaaacacaagccagtccaaaagaagacaaggaagtggtgaggacggggtgagaagatgaagaagtgagggcagcaaggcagrtccacacagtaagttaaagtcactgggaggcagctctagaaaatttcaaggtttaaagtctaggatggtgaggtcgaggcaggtggatcacttgaagcta

SEQ ID NO: 509676 - DNA, 201 bp, Homo sapiens
ctaaacgtttgctatttggggaacacattatcatgcatccattgaacggaacattataaaattattttaagaaacgagaaaggccgggcgctgtggctcaygcctgtaatcccagcactttgggaggtcaaggtaggtggatcacctgaggtcaggagtttgagaccaacctggccaacatggtgaaaccccgtctctact

SEQ ID NO: 509677 - DNA, 201 bp, Homo sapiens
gctgaaccttcccagagggcagatgggacccccaatgaagacgaggagaaaggagaaaatggcaaagccagaggaagaaagttgaagaaccaatgaggtargaaaatcaagatatctcaggtcatcagaaccaagaaaagagctttaaaaaggtacaaatgtcacagaaaaattaagaagggctgaaaataggtgctgaat

SEQ ID NO: 509678 - DNA, 201 bp, Homo sapiens
taaacgtttgctatttggggaacacattatcatgcatccattgaacggaacattataaaattattttaagaaacgagaaaggccgggcgctgtggctcatrcctgtaatcccagcactttgggaggtcaaggtaggtggatcacctgaggtcaggagtttgagaccaacctggccaacatggtgaaaccccgtctctacta

SEQ ID NO: 509679 - DNA, 201 bp, Homo sapiens
aaaataccaaaaaaaaaaaaaattagccaggcgtggtggtgggcgcctgtaatcctagctacttgggaggctgaggcaggagagtcacttgaacctgggakgcggaggttgcagtgagccgagatcaggccacttcactccagcctgggcaacagagcaagactccatctcaaaaacagaaaaaaagaatgaggagaaact

SEQ ID NO: 509680 - DNA, 201 bp, Homo sapiens
ggaggctgaggcaggagagtcacttgaacctgggatgcggaggttgcagtgagccgagatcaggccacttcactccagcctgggcaacagagcaagactcyatctcaaaaacagaaaaaaagaatgaggagaaactttattgtactaaaatggaaatgtagtcacaatatattattaaatgtaaaaagcaagtcatagatt

SEQ ID NO: 509681 - DNA, 201 bp, Homo sapiens
gttgttatttttagctttttcacttagaaatttacttcattttcattaatttattttattgggctaggtgtttttaagcctataagtttttccatgatttstacttttgaagtatctcatagatcctgatacatagcaattgcaccatttttatttttcagaaattccgtaatttctgtttgtattaaccctttcactgaa

SEQ ID NO: 509682 - DNA, 201 bp, Homo sapiens
caaaaaaatgggcttctgtttcttgcctctctacaggagattattttaagcaaatatgcctgaatttatgaaatagtaaatattggtatataatactgttkaaaggtggttttcccagctctagaaagctacgcccaatcatcctctataaacaacagactctggggctgggtgcggtggcttacgcctgtaatcccagca

SEQ ID NO: 509683 - DNA, 201 bp, Homo sapiens
gtgtttttaagcctataagtttttccatgatttctacttttgaagtatctcatagatcctgatacatagcaattgcaccatttttatttttcagaaattcygtaatttctgtttgtattaaccctttcactgaaaatttacttactggagtactttataattttcatataaaaaggaatttattttagagttttcttttaa

SEQ ID NO: 509684 - DNA, 201 bp, Homo sapiens
tgggaggccaaggtgggcggatcacaagttcgagagatcaaaccatcctggccaacatggtgaaaccctgtctctactaagaatacaaaaattagctgggygtggtggcacgcgcctgtagtcctagctacttgggaggctgaagcaggagaatcacttgaacctgggaagcagaagttgcagtgagctgagatcgcacca

SEQ ID NO: 509685 - DNA, 201 bp, Homo sapiens
caagagggtaggtcttgtatacttggagtaaatctgtccctgggaccagccctttttctttctcttttcttaatgagccaaggagcaccctacttacctgwcccttcctccacaacagtagccacaatattgatttgatggctgtacgcatatccaatgaggtcaaaggtggccatgtccacaggtgctgagaaacatcct

SEQ ID NO: 509686 - DNA, 201 bp, Homo sapiens
acaaaattacagaaaacaccgaacatgttaaaattactataattttttttttttttgaaagagtcttgctctgtcacccaggctggagtacagtggcatgrtcttggctcactgcaacctccgcctcccaggttcaagtgattcttgtgcctcagtctcccaagtagctgggattacaggtgcctgctaccacacctggct

SEQ ID NO: 509687 - DNA, 201 bp, Homo sapiens
aggaacactcttgatttgcctcttggcaatccctgctccacaaagcacttttagttgtttactggagatgctatacaggatcagaggagctgagagtgtcmcacagtgacatcaagataatgcctgtccaagctacagaacgcagaggctaaaatgggtaccggtgatgtcccgtgccttccagatatgaacaaaagggga

SEQ ID NO: 509688 - DNA, 201 bp, Homo sapiens
ttgaaagttagcctgtaatcctagcactttgggaggccaaaacaggcggactgtccttagctcaagagttctagaccaacctggcttacatggcaaaaccstgtgtctacaaaaaaaatacaaaaattagtcaggcatggcggtgtgcacctgtagtcccagctacttgggggctgaggcatgaggattgcttgagcccag

SEQ ID NO: 509689 - DNA, 201 bp, Homo sapiens
aaagtaaggatagatttcgttatttcttgcaaactgtctgagaggcagatatgggttgaagatccacataagtagaatatgccttggctgggtagatagamgtttaccccggcttttaaaggaatagggtacactgttttttctttactacttccatctctttttctctccttgactttgtctttctgtctctctttcact

SEQ ID NO: 509690 - DNA, 201 bp, Homo sapiens
aagtaaggatagatttcgttatttcttgcaaactgtctgagaggcagatatgggttgaagatccacataagtagaatatgccttggctgggtagatagacrtttaccccggcttttaaaggaatagggtacactgttttttctttactacttccatctctttttctctccttgactttgtctttctgtctctctttcactc

SEQ ID NO: 509691 - DNA, 201 bp, Homo sapiens
agttcagatagatcaattaagtattaactgtctctttatgtttattcatagattggaaaagaaatctggggtttttcttgccatatgattttgtgatttasaacttaaagatataaaagaaactaacaatctttctaagcatctgaagggaaaacaattctgcttaaagatgaatctaggtaatttaagtggcattcatca

SEQ ID NO: 509692 - DNA, 201 bp, Homo sapiens
atagatttcgttatttcttgcaaactgtctgagaggcagatatgggttgaagatccacataagtagaatatgccttggctgggtagatagacgtttacccyggcttttaaaggaatagggtacactgttttttctttactacttccatctctttttctctccttgactttgtctttctgtctctctttcactctgactgct

SEQ ID NO: 509693 - DNA, 201 bp, Homo sapiens
tgactgcttctctttgtttcttactctctgtctctttctttgacttcctgtctcttccttcctttctgctgcctctgccagctgcttatgttgctgttctyccctctccttcccattttgatggctttgtcagtgtaagattcccacctctttgtgtttttgcattgtgtgcaataactctataatttccttgtggtattt

SEQ ID NO: 509694 - DNA, 201 bp, Homo sapiens
gcagtccaatagaatgagaccaaaagaaacctctgtgacagccaagatgacagataatggataacttgaagaaaaataaataagaaatgagaagactgtamgttagaagactaattaaacagaattttagagataataagtaaccacagaagggcaatctaattggaagaacgtaacaggaaacatgtgagcttgcaatac

SEQ ID NO: 509695 - DNA, 201 bp, Homo sapiens
tggctaatgaagcttcagggctcttcatatgcacaggctccttcaaaggttctgcacgttgttttgctttcttttttctttccttccttccttccgttccktccttccttccttccttccttccttccttccttccttctttccttccttctttccttccttccttccttctttccttcctttcttccttcctttctttct

SEQ ID NO: 509696 - DNA, 201 bp, Homo sapiens
agtaaccacagaagggcaatctaattggaagaacgtaacaggaaacatgtgagcttgcaatacaagataatggaaaagagatcatcacaataaaccaatayacggtggaacaggtgtatttaacccattgtctcggacaacatttcatgactggagttgcttagacacaagagaaaaaactacctgaccccctgtgagagg

SEQ ID NO: 509697 - DNA, 201 bp, Homo sapiens
attatcactgttttacagaagaggaaagaaggcccagaactgttcactaacttgttcagggtcacatggctattaaatgacaggttagatatgatttctamgttcatgcttttcaacccacttcctcccttgccccaaacagtaagtgtgctgcctattgtaaatatggttgtatcttccctaaactatacccaaattcct

SEQ ID NO: 509698 - DNA, 201 bp, Homo sapiens
caggctccaagtacgtatacatagactcatcagtggtgaagattagttttgagaatatggatatgtcctacaaacagggactcccttattttggccaggtwagaaagcaatcattttttacataccttattcattcattcatttgttctttcatttatctactaatcttccaacagctattccctaagaaattactatgta

SEQ ID NO: 509699 - DNA, 201 bp, Homo sapiens
agtgaattggatattttataaaaagcagcaacaccagttggcacaagcattttgtgccatcttgattaactttctttataaaagacatctgaagtacctayatattaaaactgcttaggaaagggaagggaaactattagaaggaatggtgagcttttgtggtttttttcagaagctctgtttgtctgtttttggaagtga

SEQ ID NO: 509700 - DNA, 201 bp, Homo sapiens
atgagaaatcaacgtttactaatccatcatgaagaaatggtaagtgaattggatattttataaaaagcagcaacaccagttggcacaagcattttgtgccrtcttgattaactttctttataaaagacatctgaagtacctacatattaaaactgcttaggaaagggaagggaaactattagaaggaatggtgagcttttg

SEQ ID NO: 509701 - DNA, 201 bp, Homo sapiens
gctgggattacagacatgagccactgcatatggccttttttttttttttttttttttttgagacagggtctcactctgtatcctaggctggagcgcagtgrtggaatcatggctcattgcagccttgacctccctgggctcaggtgatcatcccacttcagcctcccgagtagctgagactaaaggtgcacaccatcatgc

SEQ ID NO: 509702 - DNA, 201 bp, Homo sapiens
agcgtttgcacagagtaggtgcttaatggaatggtaatttctgaaggaaacattttgcagccaattaaaatacagcacagagtttccatttctctttgccrctgtctggaaaattgtagatacatatgactttctgcacgtacacatcgaaagcatttgccaactcaatggtgtttctctcaatctgaagcttaatggtgg

SEQ ID NO: 509703 - DNA, 201 bp, Homo sapiens
gtgcactgcatcattccagagaggtatgaggtccattcccaacaagtatggagaggagaagagagacaggaacaggccaggaaacagaaaacttcccagcwagagccaagccatgccttcacagaagtgtccgcttcactcagctatgtgtaaccacagctcccaatgaccaattactcagaaggaaacatcagagactgt

SEQ ID NO: 509704 - DNA, 201 bp, Homo sapiens
ttcactgaaaatttacttactggagtactttataattttcatataaaaaggaatttattttagagttttcttttaaatttcaagttctatatcttcatggycagcaatatttccaccagtatatttttgtgcccaaatatataatgagtttttgcgaatatatctcatgtgttgagaagatatagtctctattatcagttt

SEQ ID NO: 509705 - DNA, 201 bp, Homo sapiens
cagatctagctaagatcattgataaaggtaaactaaactaaaacatagattttcaacatagacaaaataaccttatagaagaaaccttgcattagaatttwtaaaaacacacaaatttattgatcacagttctggaggctgaagatctaagattaaggtgctggcaggttcagtgtctggtgagagctgctctctgcgtcc

SEQ ID NO: 509706 - DNA, 201 bp, Homo sapiens
aggatattggcgtgaacccgggaggtggaggttgcagttgagatcgcgccactgcactccagcctgggtgacagagcgagactccatctcaaaaaaaaaamcacacacaaacaaacaaacaaaaaacatgttttaggtgactagtatataaaatttgacaattaaaaaaacaactaaaagcatcctcctgtgtccacttac

SEQ ID NO: 509707 - DNA, 201 bp, Homo sapiens
ctggtgagagctgctctctgcgtccaagatggcaccttgttgctgtgtcctccggagaggatgaatgccttgtcctcatacgctggaaaggacaaaagggycaaaaggcctagctagctccctccagccctcatataaactcgctaatctcattcacctcctaagggcccgacttcttaatattatcacattgatgattaa

SEQ ID NO: 509708 - DNA, 201 bp, Homo sapiens
ctgtgtcctccggagaggatgaatgccttgtcctcatacgctggaaaggacaaaagggtcaaaaggcctagctagctccctccagccctcatataaactcrctaatctcattcacctcctaagggcccgacttcttaatattatcacattgatgattaagtttcagtgcatgaatttaaaaggggcacattcagaccatag

SEQ ID NO: 509709 - DNA, 201 bp, Homo sapiens
ctgggcacagtggttcatgcctgtaaaccccacaccttgggaggctgagatgggaggatcacttgagtccaggagtttgagaccagcctgggcaacatggkgagccccatccagaagattattttgtacaaaaaaagaacatgccaaaattagccaggtatggtggtgcacacttttagtcccagctagtcagggggctga

SEQ ID NO: 509710 - DNA, 201 bp, Homo sapiens
aaataaaactgagcctaaaaggaaatcaaatctgagatttcaacttaataccaaccattaaaagtgtgtatcaatacaccaaaaaatagaatttattcctrttctccttttatgttagctctaaatgttaataataattctcttaggtacagcaaaataaaatgtatctgctggattaaaaacaaaaacaaaaactcaggg

SEQ ID NO: 509711 - DNA, 201 bp, Homo sapiens
catcttggactatttggcccagtggggctgtcagatgactgcaaccacatgagcaatcctggcaagtccttaagaaccacccagccgaggccgggcacagkggctcatgcctgcaatcccagcactttgggaggccgaggcgggcggatcacaaggtcaagagatcgagatcatcctggctaacacggtgaaacctcgttt

SEQ ID NO: 509712 - DNA, 201 bp, Homo sapiens
gtatcctcaaggtctctctgaccttcgctcccctatctctcagttatctttctgtccaaaagtacaagatgaggctgttctctgtagttccttcatctacstagaaactggacccccaaagaatacaattgccttcaatcctgttgacaaaaaaaagcaaattctgtaaaatatttaaggtttattctgagccaaacataa

SEQ ID NO: 509713 - DNA, 201 bp, Homo sapiens
gcgtttcctcccgagtctctccatcttcagcaaccttccggtggatggagaaggactgcccaaatgcctgcagagtatatgggaagaaaaagagtacacamtgaaatgcatcataaccctcttttaagacttgggaaaatgttttcttctgcttatatgtgtaagaaaagctaccccgcaagacccccgaaatataacagt

SEQ ID NO: 509714 - DNA, 201 bp, Homo sapiens
acaaaatattacaaagaagaaaagaaatttcacactggagaagccaggcagacaccaccttaatcaagtgatcaaagtaacagcatcaataatgggacaarcagaaatcataagtcacctgataagatgcaattagaacacagcatcagttctatgacagtcccatcaaagatgtctaacctgaattcaatcacaaggaaa

SEQ ID NO: 509715 - DNA, 201 bp, Homo sapiens
ggatggagaaggactgcccaaatgcctgcagagtatatgggaagaaaaagagtacacaatgaaatgcatcataaccctcttttaagacttgggaaaatgtkttcttctgcttatatgtgtaagaaaagctaccccgcaagacccccgaaatataacagtctagcagctctcactgatgcttgaaataattcaattcgctta

SEQ ID NO: 509716 - DNA, 201 bp, Homo sapiens
acttaaaaaaaacaaatagtcctgaatctctcaaattctaataggctgtaaatactgtccagtggtcatactacatgttcacagtatagcaagttatttayttctctctcttcctacagtcagtccatcttccctccctgaaaaccttgcctcatatttccttaagggggaaaaaaaccccaaggagatatggcttctatc

SEQ ID NO: 509717 - DNA, 201 bp, Homo sapiens
gaaaatcattaatcactgcacaagcttagggatcagttctttttggagggtggtgagtggtggaggtactggaaaatgtgtacagaaagagtgaaataagyggaagaaaggccctaggactcagggtttgcttacagtgggatcagagacacctggaaggatgaagacaaaaatccagattataattggtcctgggagtga

SEQ ID NO: 509718 - DNA, 201 bp, Homo sapiens
ctctactaaaaatataaaaattagctgggtgtgctggtgggcgcctgtaatcccagctactcaggaggctgaggcaggagaatcccttgaacccaggaagyggaggttgcggtgagccaagatcatgccattgcactccagcctggtgacagaacaagactccgtctcaaaaaaaaaaaaaaaaaagtatcctcaaggtct

SEQ ID NO: 509719 - DNA, 201 bp, Homo sapiens
aaaaaacaaatagtcctgaatctctcaaattctaataggctgtaaatactgtccagtggtcatactacatgttcacagtatagcaagttatttacttctctctcttcctacagtcagtccatcttccctccctgaaaaccttgcctcatatttccttaagggggaaaaaaaccccaaggagatatggcttctatccccacc

SEQ ID NO: 509720 - DNA, 201 bp, Homo sapiens
agtgaaataagcggaagaaaggccctaggactcagggtttgcttacagtgggatcagagacacctggaaggatgaagacaaaaatccagattataattggycctgggagtgagacttcatgacaattgtgttaccttgagaatttctttttagttcctggcttcagatttaaggttatggttgatggatgaatatactttt

SEQ ID NO: 509721 - DNA, 201 bp, Homo sapiens
ttatgaaggaaattgaaaaatttattgaaacaataataatggaaacacaactaccaaaatctatgagatacagtgaaagcagtactaagaaggaaatttayacctatgagggcctacatcaaaaagaagaaaaacttcaaataaataacctaacattcatcttaaagaactagaagagcaagagcaaaccgaacccaaaat

SEQ ID NO: 509722 - DNA, 201 bp, Homo sapiens
aaaaacaaatagtcctgaatctctcaaattctaataggctgtaaatactgtccagtggtcatactacatgttcacagtatagcaagttatttacttctctctcttcctacagtcagtccatcttccctccctgaaaaccttgcctcatatttccttaagggggaaaaaaaccccaaggagatatggcttctatccccacct

SEQ ID NO: 509723 - DNA, 201 bp, Homo sapiens
  misc_feature (1)...(201): n = A,T,C or G
gacaattgtgttaccttgagaatttctttttagttcctggcttcagatttaaggttatggttgatggatgaatatacttttggaatctacttttggaagancttctctgggctgaagttgatagctaggttaaaatatcaaggacttcggtaaatctctagcagagcttcactacagcagagagggaaaaacaccagattt

SEQ ID NO: 509724 - DNA, 201 bp, Homo sapiens
caccagtatatttttgtgcccaaatatataatgagtttttgcgaatatatctcatgtgttgagaagatatagtctctattatcagtttgttttctatccaygaggttggattattttgatcctttgtattcttacttattttgtaaaatttatttaaccttcttctgctgagtgatgtgttaaaataccctacaaatagtg

SEQ ID NO: 509725 - DNA, 201 bp, Homo sapiens
gtccaacgtacaatggacacccaaaaaataaaaagaaattaaagcgtaacattggagaaaatcatcttcactaaaaggaagacaggaaagaaggaaagaargaagagaagaccaaaaaacaaccagaagacaaataaaatggtaggagtagtgcttacctaccaataataacactgattgtaaatcaactaaactctctaa

SEQ ID NO: 509726 - DNA, 201 bp, Homo sapiens
tagccagagattgtaagaaggtagaggagaaatttttcctcctctatacaagagtagtaaaactacagtgaaacccatactgcataattttcactttatttttatttatttatttatttatttagagatgcagtttcactcttgttgcccaggctggcgtgcaatggcatgatcttggctcactgcaacctccgcctccca

SEQ ID NO: 509727 - DNA, 201 bp, Homo sapiens
ttggcaatgattaggagggagaataactaggaaaaagataagtgaactgtgaagagctgtgaccttacaatggtgacggtgacggtgatgatctttatackcttgggagggttggtgcacattcttgcctacagcaatcataagcagaggctaatgcttccatctttaagattctcatagtaaggttaaaagatactgata

SEQ ID NO: 509728 - DNA, 201 bp, Homo sapiens
caaatatataatgagtttttgcgaatatatctcatgtgttgagaagatatagtctctattatcagtttgttttctatccacgaggttggattattttgatyctttgtattcttacttattttgtaaaatttatttaaccttcttctgctgagtgatgtgttaaaataccctacaaatagtgctctgtttcttcttgcatct

SEQ ID NO: 509729 - DNA, 201 bp, Homo sapiens
taaagtatatagttttattcattttcttttttgcttgtttatttctgcaatcagtgttgtcatccatttaaaataatgggttacgagatagtatttgcaarccgaatactaattgttgtgttttatgtgtgtccattgtgtgcatgtccaacgtacaatggacacccaaaaaataaaaagaaattaaagcgtaacattgga

SEQ ID NO: 509730 - DNA, 201 bp, Homo sapiens
agccagagattgtaagaaggtagaggagaaatttttcctcctctatacaagagtagtaaaactacagtgaaacccatactgcataattttcactttatttttatttatttatttatttatttagagatgcagtttcactcttgttgcccaggctggcgtgcaatggcatgatcttggctcactgcaacctccgcctcccag

SEQ ID NO: 509731 - DNA, 201 bp, Homo sapiens
atgtatgtgttaggcctcagctctatcatactatttttcttatgattctgtattgtatttaaagctactttatttctttagcttttatgtttgtttgttgytatcttgcttaaagcttctttgagtattcaggctagcttgaatttttattttagtggttatttttatatttacatattttataatatcctaatatcctaa

SEQ ID NO: 509732 - DNA, 201 bp, Homo sapiens
tacaaaactcactggtaatggcacacagaaaaacaggaatataacatggcaatttttggtgtgtgaaatactcttaagtagaaagactaaaccatgaaccmatcagaaataataactacaacttttcaagatatagacagtgcaataagacataaaaagaaacaaaagttaaaaggggaggagaaagttaaagtatatagt

SEQ ID NO: 509733 - DNA, 201 bp, Homo sapiens
gccagagattgtaagaaggtagaggagaaatttttcctcctctatacaagagtagtaaaactacagtgaaacccatactgcataattttcactttatttttatttatttatttatttatttagagatgcagtttcactcttgttgcccaggctggcgtgcaatggcatgatcttggctcactgcaacctccgcctcccagg

SEQ ID NO: 509734 - DNA, 201 bp, Homo sapiens
ccagagattgtaagaaggtagaggagaaatttttcctcctctatacaagagtagtaaaactacagtgaaacccatactgcataattttcactttatttttatttatttatttatttatttagagatgcagtttcactcttgttgcccaggctggcgtgcaatggcatgatcttggctcactgcaacctccgcctcccaggt

SEQ ID NO: 509735 - DNA, 201 bp, Homo sapiens
gcttttgttgcttttaaaattcccagtttgtgttgctgtaagggaggtaacatttctcaccctttctgtaaatgagtttcctgccaaaacctacctgtgartttcaaatgtttagaccaatcaaccaaccaaagaccttgagataacctaagaaggtataacctaagaagggacagttacacagtaattgggaaaacttct

SEQ ID NO: 509736 - DNA, 201 bp, Homo sapiens
gcttgtccaatccgcggcccatgggcagcatgcagcccaagacggctttgaatgaggcccaacactaattcataagcatgattaaaacattatgagatttwttttttgcaattttttttaaagctcattagctattgttagtgttagtgtattttatgtgtggcccaagacaattcttcttccaaagtggcctagggaagc

SEQ ID NO: 509737 - DNA, 201 bp, Homo sapiens
aatcaagcttgtccaatccgcggcccatgggcagcatgcagcccaagacggctttgaatgaggcccaacactaattcataagcatgattaaaacattatgrgattttttttttgcaattttttttaaagctcattagctattgttagtgttagtgtattttatgtgtggcccaagacaattcttcttccaaagtggcctag

SEQ ID NO: 509738 - DNA, 201 bp, Homo sapiens
tatttgctgaataaacaaacattatctgaacaccccattaaagagaagtcctaggccgggcgcggtggctcacgcctgtaatcccagcactttgggaggcmgaggcgggcggatcacgaggtcaggagatcgagaccatcctggctaacacggtgaaaccccgtctctactaaaaatacaaaaaattagccgggcatggtg

SEQ ID NO: 509739 - DNA, 201 bp, Homo sapiens
tgtgattattacccgttgcatgcctgtatcaaagtacctcatataccccataaatatatacaccaactctatacccacaaaaataaataaataattttttwaaaaaaaaagaagtaggctgggtgcggtggcacacgcctataatcccaacactttgggaggtcgaggcaggtggatcacctgaggtcaggaatttgagac

SEQ ID NO: 509740 - DNA, 201 bp, Homo sapiens
aaagtcttaagagcaagtgaatttattgttccacccttgatttaaagttttcaaaaattgtactctggatctagcaccaaaggagataaacatttcagatrtagacccagaatagattttcaaaaaagaatcaagaattgaaattgcaaatatccaaatgttgataaatcctccattcatatttattccagtttcagaaac

SEQ ID NO: 509741 - DNA, 201 bp, Homo sapiens
cactcctattttaatctaattcctaattgtcagcaactagaattgggcatgacacccaactgacatctatcatctggctgcttgttaaagctgatttaccmgactcgtctggctccaccaggtacctcctttcaccatcacctcctgagtatctcctgacaaagccaggcccaatagaaaggaaacaatgtttttcaaggt

SEQ ID NO: 509742 - DNA, 201 bp, Homo sapiens
agaataactaggaaaaagataagtgaactgtgaagagctgtgaccttacaatggtgacggtgacggtgatgatctttatacgcttgggagggttggtgcasattcttgcctacagcaatcataagcagaggctaatgcttccatctttaagattctcatagtaaggttaaaagatactgatattacctaatgtttaacata

SEQ ID NO: 509743 - DNA, 201 bp, Homo sapiens
gataataatagcttctttctcatactgccacgaggcttaaaagagaaaatctatgtatcacttggaacagaccttggtataaatatagtaagtactcaatractgttggctattattagcagaaagacgacgtgctttggaatcaaatccattggggtttaatgcaaatgcatctgggtttaaatctgcctcctctgaaat

SEQ ID NO: 509744 - DNA, 201 bp, Homo sapiens
gaaaaagataagtgaactgtgaagagctgtgaccttacaatggtgacggtgacggtgatgatctttatacgcttgggagggttggtgcacattcttgcctrcagcaatcataagcagaggctaatgcttccatctttaagattctcatagtaaggttaaaagatactgatattacctaatgtttaacataactggacccac

SEQ ID NO: 509745 - DNA, 201 bp, Homo sapiens
tgttgcttcctctggtgtaaaggttttccttggacttatccaagaatcaggtggccgtttacctcattatgagagcagctccctactcatttgtgaaacaytaaacctcctgctaggaaaggagtcctgatgaatcttttttctcattaagtcattaaaaatgtacaaagacaaacacagagaaatttcaagaggcatagg

SEQ ID NO: 509746 - DNA, 201 bp, Homo sapiens
acctaatgtttaacataactggacccactacctactgcttcatgcacagaagttacagggctgagggaccctccattagccacactgaggatctgggttayaaatgagtggaatgtgtaaggggagaagagatctttagcgatctttgagagcaatattagcagtgaaatgaatgcaaaccacatcttgcctctttgaagt

SEQ ID NO: 509747 - DNA, 201 bp, Homo sapiens
aaaaaaaatctatcacatattcttaactgatttaatcatcacattacatgcctaccgagtatcattcaaataaatagcatatcatattttccatacttctyaactaaatattctgtgataacctggtgtaataccccaagtttttctaagataatagtcaatagcctattacttagatttatatttacttaaagcctggat

SEQ ID NO: 509748 - DNA, 201 bp, Homo sapiens
cagagattgtaagaaggtagaggagaaatttttcctcctctatacaagagtagtaaaactacagtgaaacccatactgcataattttcactttatttttawttatttatttatttatttagagatgcagtttcactcttgttgcccaggctggcgtgcaatggcatgatcttggctcactgcaacctccgcctcccaggtt

SEQ ID NO: 509749 - DNA, 201 bp, Homo sapiens
cattaaaatgaattcctatagtttaagaacgggaccaagacccactagcctcaaaggcctctgtctgtcctccttggtcctatctctctcattgtaccttyggccactccccaagtaaacactatcctgcattttgtatcaccattttctttatagtttaccatatatgtatgtttctgtaaataaaatgctatttaatat

SEQ ID NO: 509750 - DNA, 201 bp, Homo sapiens
cattgtgctggcatttgtccagcacacaacagatctagtaatgtgatattctatttcacaaagtagcatgatcatttaaagttcactcaatgggctgcaawttatttatttatttatttatttattttatttctttgagacagggtctcgctctgtcgcccaggctggcgtgcagtggcgcaatctcggctcactgcaagc

SEQ ID NO: 509751 - DNA, 201 bp, Homo sapiens
tcctgcattttgtatcaccattttctttatagtttaccatatatgtatgtttctgtaaataaaatgctatttaatattgtagtaaaatactgtttgtaaamttcatatgatgaaatccttccatatgcactcttttgcaatttgcttttggaactcaactttaaattccgtttattcattctgattaatgtagctgcagct

SEQ ID NO: 509752 - DNA, 201 bp, Homo sapiens
ggctggcgtgcagtggcgcaatctcggctcactgcaagctccgccctccgggttcatgccattctcctgcctcagcctcctgagtagctgggactacaggygcccgccaacacgcccggctaatttttctttgtatttttagtagagacagggtttcactgtgttagccaggatggtctcgatctcctgacctcgtgatcc

SEQ ID NO: 509753 - DNA, 201 bp, Homo sapiens
taggtatttatttatccaagacaaatgaaagcacgtgatcacataaagatttacacacaaatgttcatagcagccaaaatgcaaacatttcaaatatccawcaattggtgaataaaaaaccaagttgtggcatatccatacaatggaatactaatcggcaataaaaaggagtaaactactgacatatccaacaacatggct

SEQ ID NO: 509754 - DNA, 201 bp, Homo sapiens
tcactgcaagctccgccctccgggttcatgccattctcctgcctcagcctcctgagtagctgggactacaggtgcccgccaacacgcccggctaatttttytttgtatttttagtagagacagggtttcactgtgttagccaggatggtctcgatctcctgacctcgtgatccgccggccgcggcctccgaaagtgctggg

SEQ ID NO: 509755 - DNA, 201 bp, Homo sapiens
gggtttcactgtgttagccaggatggtctcgatctcctgacctcgtgatccgccggccgcggcctccgaaagtgctgggattacaggcatgagccacctcrcccgggctgctagttattttttattagtaaaaatgtgactgtctgacctgggtattttaacctggatttactgatttgttttggaataagttttgcagat

SEQ ID NO: 509756 - DNA, 201 bp, Homo sapiens
tctggacatggacctgggttcatatattgacttacaccaaaacatttttgggactgttagttttcttctaaaagtagggggggacgtccagagttgtcagaaaaaaatgagaaagaatgtttgaaagcactttgtaaatagtaatgaggtaccctcttgaataagaggtcatttttttacctattgcttactatgctcact

SEQ ID NO: 509757 - DNA, 201 bp, Homo sapiens
ctaaggcaccagggccaggcgcggtggctcacgcctgtaatcccagcactttgggaggcagaggcgggcggatcacgaggtcaggagatcaagaccatccyggctaacacagcgaaaccccgtctctactaaaaatacaaaaaattagctgggcgtggtggcgggcgcctgtagtcccagctactcgggaggctgaggcag

SEQ ID NO: 509758 - DNA, 201 bp, Homo sapiens
cttcctgctgaattggggcatagtaggtgttgtgtagttgagatttcctccggaagggtgccttccatgtcattaacattggagcatgggctagcaggccrgtccaggggtctgcggtggatcttagtcatggactgcatctggggctccatttgaagaaccatttgtagttttacagtttcaattctggaagagacaaac

SEQ ID NO: 509759 - DNA, 201 bp, Homo sapiens
ggtgggcggcttccaagatggtggcaagcctcgtgttctctgacctggggttcttggcctcacggattccaaggaatggaatcttgggccatgcgatgagytattagaagctgtgggtcatggaagagaaccgtggaacccagtgactagtgttcagctcgattaggacgaacccaggcacttagccgtgcaggaacaatg

SEQ ID NO: 509760 - DNA, 201 bp, Homo sapiens
cctgagccaaaaggtgagtcccagagctggcagcattggtcacaagctgacggaagagcccttaggctttaagtatcagtgatggcctggcagaacccccmcataagccagtggtgatggcagccacagggagaggatcttctgcccgtggaaaggggagggaagagtgggaagcaacttgtcttgtgggtcacgtgccac

SEQ ID NO: 509761 - DNA, 201 bp, Homo sapiens
acccaggcacttagccgtgcaggaacaatggcaagcttttagcacaatcgggagtggcaatgggagtctcgctggatcaggagcacagcggacaccctgcyggatctggagggatgggagtcagcggcgatgggaatcagcggcgggtctgcgacagtggcaaacagcagtggtggacggcaagcgaaagctcagctccag

SEQ ID NO: 509762 - DNA, 201 bp, Homo sapiens
aggtcactgagtccaggcctaggctcttggtcagcatttctggacctgccctgagccaaaaggtgagtcccagagctggcagcattggtcacaagctgackgaagagcccttaggctttaagtatcagtgatggcctggcagaacccccccataagccagtggtgatggcagccacagggagaggatcttctgcccgtgga

SEQ ID NO: 509763 - DNA, 201 bp, Homo sapiens
gggtttcgccatgttggctaagctggtcttgaattcctgacctcaagtgatccacctgccttggcctcccaaagcgctaagattacaggcatgagcgaccrtgcccagctcaaaattccatcttatttttacaagcttctaatttcttgcttgctgtggcactgacttttgaatgaagttgcttatccaatgatgtatttc

SEQ ID NO: 509764 - DNA, 201 bp, Homo sapiens
taagctgggcccagagccagtggactagagtaggaggcacacagcctactaagacaccagccagggtgactaagggagtgcttctgccatgcctcccccayccccagcagtggctgcgtggtggggagaaatctgtgcatttagtagagggagaatgcagtgactggggcactttaacttaactcagtgctgccctgtcac

SEQ ID NO: 509765 - DNA, 201 bp, Homo sapiens
ggtcttgaggggcaggttaggccacaaggactgcaattcctaggcaagccctagtgctaagctgggcccagagccagtggactagagtaggaggcacacarcctactaagacaccagccagggtgactaagggagtgcttctgccatgcctcccccacccccagcagtggctgcgtggtggggagaaatctgtgcatttag

SEQ ID NO: 509766 - DNA, 201 bp, Homo sapiens
aagaactagggtctttggagaagttactgattctagggctggagcaaaataagccagacacatcttgtgatgccagagttacaacatgcatttaaaagatratgaggatatgtcaaaaggagacaggagcctgtctgaaggggcttccaatggccaaatctgagatattttgagaaaaaaattatagtaactaattatata

SEQ ID NO: 509767 - DNA, 201 bp, Homo sapiens
aaatctattccattggtctatatgtccatcgatcttagtccattcagacgtctataagaaaatgcatgagactgggtaattaaagagcagaaatgtatttytgctcagttctagaggctgggaagtacaagatcaaggtgccagcagagttggtgtctggcgagggctgctctctgcttccaaggtggtaccttccttctg

SEQ ID NO: 509768 - DNA, 201 bp, Homo sapiens
ccttatgattttcttaataaaatttccttttctcaagcttattctaagaatacagcatataatacatgtaacatacaaaatatgtgtttatcaactgtttwatgttactgttaaggcttccactgaacagcatgctattgttgatcaagttttggcggagtcaaaagttaaatgtggattttttttactgcacaagagtca

SEQ ID NO: 509769 - DNA, 201 bp, Homo sapiens
agaaaatgcatgagactgggtaattaaagagcagaaatgtatttctgctcagttctagaggctgggaagtacaagatcaaggtgccagcagagttggtgtytggcgagggctgctctctgcttccaaggtggtaccttccttctgtgtcttccatggtggaagagcagaagcgaaaaaaaaaaaaaaaaaaaaaaaaggcc

SEQ ID NO: 509770 - DNA, 201 bp, Homo sapiens
ggtcccaccaccatgccaggctaattttgtatttttagtagagacagggtttcaccatgttggccaggctggtctcgaactcctgaccttgtgatccgccrcacccaatcccttatgattttcttaataaaatttccttttctcaagcttattctaagaatacagcatataatacatgtaacatacaaaatatgtgtttat

SEQ ID NO: 509771 - DNA, 201 bp, Homo sapiens
ctcctgggttcaagtgattctcctgtctcagcctcccgagcagcagggattacagggtcccaccaccatgccaggctaattttgtatttttagtagagacrgggtttcaccatgttggccaggctggtctcgaactcctgaccttgtgatccgccgcacccaatcccttatgattttcttaataaaatttccttttctcaa

SEQ ID NO: 509772 - DNA, 201 bp, Homo sapiens
gtcccaaagaactatgcttcttatacacatctttatttggcaaaaaagctgtttttgtttttagtggacgtgagttctgtgttacatgtttcttctgtcgsgtttcctgagaagcttgttcataagatgctgtcattttattactggagtgaaaggttacctcgtgaaacctcaatttttttcttttgtgattttgcaagg

SEQ ID NO: 509773 - DNA, 201 bp, Homo sapiens
tctaagtcctccccaggttcctagtttttctttttgttggcacagtgataaatgtcaggaaatcttgggttcaaaaatggtgggcaaccactgttccatamgtattatatatgatcagtgttatttctgctggttcacatcagcttcttctggctgtgttaaaagctagtctcttattactaaagccaccaaccaaataca

SEQ ID NO: 509774 - DNA, 201 bp, Homo sapiens
ctttttgttggcacagtgataaatgtcaggaaatcttgggttcaaaaatggtgggcaaccactgttccataagtattatatatgatcagtgttatttctgstggttcacatcagcttcttctggctgtgttaaaagctagtctcttattactaaagccaccaaccaaatacagacactttaaaaatcagcatacggaaagt

SEQ ID NO: 509775 - DNA, 201 bp, Homo sapiens
aaactgcctcagtctgaaaatcattatttataataacattattccctatgttgcatataaggttcagtacaatcattatttataataacattattcactaytgcatataaggttcagtacaatcattatttatagtaacaacactattccctatggttgcatataaggttcataacctctcagcttctaagtagcaccact

SEQ ID NO: 509776 - DNA, 201 bp, Homo sapiens
tccactgcctctctccgagccttccagcccttctttgtggagctcacaatgccttactctgtgattcgtggagaggccttcacactcaaggccacggtccwaaactaccttcccaaatgcatccgggtaaggatctctttcctaaattaaatacaaggtagccatcaagtaaattaaaagttgcattcctaggaatactgc

SEQ ID NO: 509777 - DNA, 201 bp, Homo sapiens
ggagttgccatacaagccctgagctacttacctctgaacttctttcatgcttaagcaactcttatttgaattttctataaaatgtgattgaatcccaatcstaagtgatgtcctatataatttttcaactctaattatcttcaatatctttttttgccagaagtttacaaaagctattaataagttgtattctcactcata

SEQ ID NO: 509778 - DNA, 201 bp, Homo sapiens
caagccctgagctacttacctctgaacttctttcatgcttaagcaactcttatttgaattttctataaaatgtgattgaatcccaatcctaagtgatgtcytatataatttttcaactctaattatcttcaatatctttttttgccagaagtttacaaaagctattaataagttgtattctcactcataacttattttctg

SEQ ID NO: 509779 - DNA, 201 bp, Homo sapiens
cttggctcactgcaacctccatctcctgggttcaagtgattcttctgcctcagcctcccgagtagctgggattataggcatgcaccaccacgcctggctawttttttatatttttggtagagacagggtttcaccatgttggccaggctggtctcgaactcctgacctcaagtgatccacccgccttggcctcccaaagtg

SEQ ID NO: 509780 - DNA, 201 bp, Homo sapiens
ggctagatcagggcttctcgtcctcggcagtagtgacatgctggtgtgggggctgtcctgtacactgtcgggttcttggcagctttcctgacctccatccmtagaagccagtagcacccacctcagttgtgaccaaaaatatctccggaaataaccaaatgtctccctggttgagaatcactggaccagataatctctaat

SEQ ID NO: 509781 - DNA, 201 bp, Homo sapiens
gtctgttcttgagttaaactgccgaccaagactgaaaatttgtccagcagaagctcttcaacacagaaaaattatactgtaattttcttttctttttgtctttttttttttttttttaaataggatctcgctgtgtcacctaggctgaatgcagtggcacaattatagctcactgtaaccgcgaactcttgggctcaaggg

SEQ ID NO: 509782 - DNA, 201 bp, Homo sapiens
agaaagtccagtccatgaatactcaaagagaacaaaaagtatactattctctaatacaccccagcacaaaattgctacacattgctgatgcgagtatatgratggtgtagacacacaaggaaagctgagtaccactgatgttatttagtttgcaagctgggattacaggtcagaaagagttacatctggcattccatctcc

SEQ ID NO: 509783 - DNA, 201 bp, Homo sapiens
cacccacctcagttgtgaccaaaaatatctccggaaataaccaaatgtctccctggttgagaatcactggaccagataatctctaatgtcatttcaaactstgaaattcaatgctccactaatctctcctcaaactgataagaccctttgccaaattttggtcacataaaattatgccagcccaagaactctacaatccgt

SEQ ID NO: 509784 - DNA, 201 bp, Homo sapiens
tctgttcttgagttaaactgccgaccaagactgaaaatttgtccagcagaagctcttcaacacagaaaaattatactgtaattttcttttctttttgtctttttttttttttttttaaataggatctcgctgtgtcacctaggctgaatgcagtggcacaattatagctcactgtaaccgcgaactcttgggctcaaggga

SEQ ID NO: 509785 - DNA, 201 bp, Homo sapiens
aaataaccaaatgtctccctggttgagaatcactggaccagataatctctaatgtcatttcaaactctgaaattcaatgctccactaatctctcctcaaamtgataagaccctttgccaaattttggtcacataaaattatgccagcccaagaactctacaatccgtacagtggcattgtgtaaaaaagacttcacctgct

SEQ ID NO: 509786 - DNA, 201 bp, Homo sapiens
tgcagtggcacaattatagctcactgtaaccgcgaactcttgggctcaagggattgatcatcctgcctcagcttcccaagtagctgagactagaggcatgygacactgtgcctaatttttacttttttttttttttttctgtagaaacggggtctcactatgtttcccaggctgatcttaaaatcttggcctcaagggatc

SEQ ID NO: 509787 - DNA, 201 bp, Homo sapiens
tagagtttatttatgatataattttgtctagttttcctgagttcaataaagcctcattttatttcttcttgggttttgtccatttctgtattttcttaatwgaatttctgactcatggtgccttttaaatacctcaaatacatgcttgagaatatttcactcatgttaaattattttggcatggcttttctttgtttactt

SEQ ID NO: 509788 - DNA, 201 bp, Homo sapiens
caaactaacacaggaacggaaaaccaaacaccgcatgttctcactcatatatgggagttgtacaatgagaacacatggacacagggaggggaacatcacayaccggggcctgttagggggttgggggctaggggagggatagcattagaagaaatacctaatgtagatgacgggttgatggatgcagcaaaccaccatggc

SEQ ID NO: 509789 - DNA, 201 bp, Homo sapiens
actgtaaccgcgaactcttgggctcaagggattgatcatcctgcctcagcttcccaagtagctgagactagaggcatgcgacactgtgcctaatttttacttttttttttttttttctgtagaaacggggtctcactatgtttcccaggctgatcttaaaatcttggcctcaagggatcctcccgcctcagcctcccaaag

SEQ ID NO: 509790 - DNA, 201 bp, Homo sapiens
tgtttttgttaggagttgttgtcagtggttcatctatcaacgtctgtatttgtttgctcagctgtggtctgttgcagtgaagtgattggctttgtatacasaaagagggccaatgttgtgaactgtgaggttaaggaaaagtccaggagcataaaataatcttctttggtttttcttctcagaaagataacactgaaataa

SEQ ID NO: 509791 - DNA, 201 bp, Homo sapiens
tttactgtggatagtaatttccgttgtttttagttttctctgttacaaacagtgctgctgtgagttttgttgtctacatcttctgactcaaaagtgcaagsctttctagggttcatacctccaactggaattgctagatcttaggatctatacatctttagctttactagataaggccaaacagtttttcaagatggttgt

SEQ ID NO: 509792 - DNA, 201 bp, Homo sapiens
cagtggttcatctatcaacgtctgtatttgtttgctcagctgtggtctgttgcagtgaagtgattggctttgtatacacaaagagggccaatgttgtgaamtgtgaggttaaggaaaagtccaggagcataaaataatcttctttggtttttcttctcagaaagataacactgaaataaaatgaccttaggggaaatatac

SEQ ID NO: 509793 - DNA, 201 bp, Homo sapiens
atatgcttttacttccctaacaaaatgtccaaccttttctccacatttttgaaatttctgaaaaatttgcatttctgatcctagtgatgctttaaaaagattttttttttttttttttttttttgagacggagtctccctctgtcaccaggctggagtgcagtggtgccatctctgctcactgcaacctccgcctccccgg

SEQ ID NO: 509794 - DNA, 201 bp, Homo sapiens
tatgcttttacttccctaacaaaatgtccaaccttttctccacatttttgaaatttctgaaaaatttgcatttctgatcctagtgatgctttaaaaagattttttttttttttttttttttttgagacggagtctccctctgtcaccaggctggagtgcagtggtgccatctctgctcactgcaacctccgcctccccggt

SEQ ID NO: 509795 - DNA, 201 bp, Homo sapiens
caaccttttctccacatttttgaaatttctgaaaaatttgcatttctgatcctagtgatgctttaaaaagattttttttttttttttttttttttgagacrgagtctccctctgtcaccaggctggagtgcagtggtgccatctctgctcactgcaacctccgcctccccggttcaggcaattcttctgcctcagcctccc

SEQ ID NO: 509796 - DNA, 201 bp, Homo sapiens
cctcactgctaattatagctaattataattatgtatgctaattagcatgctaaaagacactcccagcagccagactgcctctctagatttctcctatctgkacaaagcatctctgaaagaaaggcagcagccccagtcaggggtttaaactcccatctccctgggacagagcacctgggggaaagggcagctgtgggcaaa

SEQ ID NO: 509797 - DNA, 201 bp, Homo sapiens
ctgccaccatgcccagctaatttttgtatttttagcagagacggggtttcaccatgttagccaggatggtcttgatctcttgaacttgtgatccgcccgcsttggcctctcaaagtgctggtattacaggcgtgagccactacacccagccagaaaagattttatatcattaaaaagaaattaagtgcttatttgtgtctg

SEQ ID NO: 509798 - DNA, 201 bp, Homo sapiens
agaatcttttctaataatgtttctgtttctccttgaaaatgtccttttttttttttggcctcattaactacagtaaacctgataggaatttggcaggactygtttcaacaagatgcaggtcacaaagaccttgctgataaaacatggtaagaagcaggccaaaacccaccaaaaccaagatggcaacaaaagagacctctg

SEQ ID NO: 509799 - DNA, 201 bp, Homo sapiens
taaagattgtacagttcaaactacttttcttacaagtgagaaagaaagagagagagaaggcctaaggggaagatgctctccgactctccttcccaatgtcygctcattctcatggatctctacttacctgcacatagacacagccctggcctgaggcctccaacgtgtacattccagggacattgggcagggtatcctgct

SEQ ID NO: 509800 - DNA, 201 bp, Homo sapiens
ttttgattttttggggtaacaagcttgattataaactttccatggaaatgcaaaacaagcatgaatagcgaagacatacacacacttttatatatagacayttgttttatgacaaagttaggaaaaaagttcttttcaatacatgaagctaggtcaattggttatctatatgccacgaatgaaaataagccttatccaatt

SEQ ID NO: 509801 - DNA, 201 bp, Homo sapiens
aagctaactgatttgagtttcaattttatcttttctggtgataatgactgtcccaaagaactatgcttcttatacacatctttatttggcaaaaaagctgyttttgtttttagtggacgtgagttctgtgttacatgtttcttctgtcgggtttcctgagaagcttgttcataagatgctgtcattttattactggagtga

SEQ ID NO: 509802 - DNA, 201 bp, Homo sapiens
agtgcaagactccgtctcaaaaattaaaaaaaaaagaatgattctcagccacttcccagttattgctatgtgctcatagaaaaagaaacaattttaaagtytaagcaaaacacaaatatgtatgaataagttcagcaaaaacaaatcctatcatccagtctatcataaatgcatcattgctttgctatctcagaatattga

SEQ ID NO: 509803 - DNA, 201 bp, Homo sapiens
tgagttaggtaatagctgaaaatatctgattatttcatgatctagataatctaaacttgactctggaaaatagaagggaacatttagaatttataatatakaatcagaagcttcctgaatcgacttaaaacaagtgaattatgttattataaaggcaatacgtgttatggtggaaaaatttaaaatctaggaaacaaagtt

SEQ ID NO: 509804 - DNA, 201 bp, Homo sapiens
tttcatgatctagataatctaaacttgactctggaaaatagaagggaacatttagaatttataatatagaatcagaagcttcctgaatcgacttaaaacamgtgaattatgttattataaaggcaatacgtgttatggtggaaaaatttaaaatctaggaaacaaagttaaaacccattacccaaggataaccaatgcaaa

SEQ ID NO: 509805 - DNA, 201 bp, Homo sapiens
ccacttcacccgtgctgtcaggatgcgcagttgtcagggagctcattaaaaataattttgatgaagagtacaaacactgacaattggctcctgtgaccttmtaaaatccattttacctcttgaatgtctttcttccagtagtcacactgcttcctagagtgttagtggattcacttttgtccttagaggcccttgaagaac

SEQ ID NO: 509806 - DNA, 201 bp, Homo sapiens
gctgtcaggatgcgcagttgtcagggagctcattaaaaataattttgatgaagagtacaaacactgacaattggctcctgtgaccttctaaaatccatttyacctcttgaatgtctttcttccagtagtcacactgcttcctagagtgttagtggattcacttttgtccttagaggcccttgaagaacaatctttctcttt

SEQ ID NO: 509807 - DNA, 201 bp, Homo sapiens
atatttggctttctctaagtaccctacttgcctccataacaaataccataaagtttcatttacctgcaggaaataatcccaatccatttactttcctccaygcagtggaaattttgcagtctaaaatactgagtagtttgacgccaataaaaaagagaaagagacaaagataggattgcgtggtagtaaactttctttagt

SEQ ID NO: 509808 - DNA, 201 bp, Homo sapiens
atacggcagtgattatggcaggtgggatctgccagtgaatatggcaggtgggaatatgggcagtgattatggcaggtgggatacggcagtgaatatggcargtgggatatggcagtgaatatgacatgtggaatatggcagtgattatggcaggtgggattcggcagtgaatacggcaggtgggatatgggcagtgattat

SEQ ID NO: 509809 - DNA, 201 bp, Homo sapiens
gtgggatacggcagtgattatgacaggtgggatacggcagtgattatgacaggtgggatacagcagtgattatgacaggtgggatacggcagtgattatgrcaggtgggatacggcagtgattatggcaggtgggatacggcagtgattatgacaggtgggatacggcagtgattatggcaggtgggatttggcagtgaat

SEQ ID NO: 509810 - DNA, 201 bp, Homo sapiens
gacaggtgggatacagcagtgattatgacaggtgggatacggcagtgattatggcaggtgggatacggcagtgattatggcaggtgggatacggcagtgawtatgacaggtgggatacggcagtgattatggcaggtgggatttggcagtgaatatgacaggtgagatacagcatgaatatgacaggtgtggttccagtcc

SEQ ID NO: 509811 - DNA, 201 bp, Homo sapiens
tttctaatcatataaatctcagtattcttggacatcaaggaagtcttatatttttaagcaaccctgtctgctaccatcttcccaacaaccccaccaccatstgttttgatgcctacacagaagatataagccagtggatcctacatttttttcaagtatttgctgaaatacaaagatttatcaaaattgctaagaagcagg

SEQ ID NO: 509812 - DNA, 201 bp, Homo sapiens
acagcagtgattatgacaggtgggatacggcagtgattatggcaggtgggatacggcagtgattatggcaggtgggatacggcagtgattatgacaggtgrgatacggcagtgattatggcaggtgggatttggcagtgaatatgacaggtgagatacagcatgaatatgacaggtgtggttccagtccacaagagcttgt

SEQ ID NO: 509813 - DNA, 201 bp, Homo sapiens
tgtggttccagtccacaagagcttgtattgcagttagagggaaacagaaaataaaacaaatctaggaaatctcacatagtgaaaaatgttaaaaataaaamagaagtgtgctagagagtgactaaggaattatttctgtcattatttacttactatttgtgatgaataagcattaattggaagcttaatattgacctctgc

SEQ ID NO: 509814 - DNA, 201 bp, Homo sapiens
agagaagtccagtggggcattaaagtcaaacgatgagtcagatttggaaagtaagcattttgaaagctgggaccaggttttcctcaagtctgcatcttgcrtagcaactagcataattcctggcattattaataatgtaacagaaaaaagggccaatatattaacaagcagcaattcaaagaaaaaggaatccaaatggct

SEQ ID NO: 509815 - DNA, 201 bp, Homo sapiens
gatgactcacacctgtaatcccaacactttgggaggccaaggcgggccgactgcttgagcccaggagttcaagaccagcctgggcaacatggcaaaacccrgtctctacaaaaaatgcaaaaattacctgggtgcggtggtgtgcacctgtagtcccagctactcaggaggctgaggtgggagaatcctctgccttccata

SEQ ID NO: 509816 - DNA, 201 bp, Homo sapiens
acacagttctgcatttcttccttttggaaagacatttttctctaggattctaggtgactgctctaggagacagaggtcttcttgggtttttgttttttttktttgtttgtttgtttgatggagtctcgctctgtcactcaggctggagtgcagtggtgcgatctcggctcactgcaacctccacctcccaggttcaagcaa

SEQ ID NO: 509817 - DNA, 201 bp, Homo sapiens
gagtctgttaccatgactcaagtgatcctcccacctcagcctccctagtagctgggactacaggcacacaccaccataccgggctaatttttgtatttttkgtagaaacaaggttttgctgtgttgcccaggctggtctcaaactcctgaactcaagggatccacccacctcagtctcccaaagttctagattacaggtgt

SEQ ID NO: 509818 - DNA, 201 bp, Homo sapiens
ggcctcaagcgatcctcccaccttggccacccaaaatgctgggattacaagtgtgagccaccgtgcctggcctcttttgtttttctttttttaatcaacttttttttttttttttttttcctgatgggttctcactatgttccccaggctgttctcaaactcccagtcacaagtgatcctcccgcctcagcctcccaagca

SEQ ID NO: 509819 - DNA, 201 bp, Homo sapiens
agctccttgcccacccaattcctcaaggacttaacttgtgcaagctgactcccagcacatcagagtgcaattaactgataaggtcctgtggcaagttatgyccgcagttcccaggaattcgctcgggtgatagtatcctaagcccctgcatttgtatccagtagatagcacccaaagcccttgcacccatcaccttgtgat

SEQ ID NO: 509820 - DNA, 201 bp, Homo sapiens
accgtttatacacagggatagtggggaccttcttggcatctcgaaacctgatggcagtttccaggacaataataatttataaaatgttatgacttatacayagtttcatatttaccatcccatttggtcctcacaattctacagaggaggcatggcattatcaccagggcttcaatgcagaagtctgcaggttgtatgcaa

SEQ ID NO: 509821 - DNA, 201 bp, Homo sapiens
ttgaaaattaagcaaatttgcactggaaagtgtaaacgttattcaattagtacacatgattacagataaggctgtttccaaaacgcccttcaaaaggaaargcctctggatcaaataaatattggatcaaaacaaaatgtactgaatgtgtctgaagcttgttttagcagcaaaagtgttatgatgaataaggtcatgcct

SEQ ID NO: 509822 - DNA, 201 bp, Homo sapiens
cgggtggacacggtggctcatgcttgtaatcccagcattttgggaggccgaggcaggtggatcacctgagttcaggagtttgagaccagcctggccaacayagtgagagaaatccagtctctactaaaaatacaaaaataagccaggcgtggtagtgtgcttgtagtcccagctactcaggaggctgaggcagaagaattg

SEQ ID NO: 509823 - DNA, 201 bp, Homo sapiens
aagcagtgcatttgtaaagctaaaaagaaacattttacctggtgtcctttcagatcatcagtctctctgctcagtcaagcacaattcttttaatccctatyttcatccacttgtctctctaaaattgattgggcttctcctaggatcttcatgtttgtacaaagaaagcccaagctaaattttcaaggtcaaggaaaaaac

SEQ ID NO: 509824 - DNA, 201 bp, Homo sapiens
ggggtttcaccgtgttagccaagatggtctcgatctcctgaccttgtgatctgcctgccttggccttccaaagtgctgggattacaggtgtgagccaccgygcccggcctagcatatatattaaaattggatgttacgaagaagattagcatgcctcctgtgaaaggatgacatgctgacgtggaaattcgtgctccatat

SEQ ID NO: 509825 - DNA, 201 bp, Homo sapiens
tgatgttcagtgaactcggaagggaggagaaagccaaattagatcaaagatagataatttcacaggctcatgttctcaaagaaagggatctgcgggttctytctaacaatttctcaagctgtggagtttggttactcattgtagtcatgagaatgctttaggtatcaaataccttacaccctggttagaaactgcttgtta

SEQ ID NO: 509826 - DNA, 201 bp, Homo sapiens
atttccacttccgacctatacgatggcatgttaacagcaccccaacctccccaagctgctgcggtgctggtcagtgcaccctcatccccaccccaggcccygcccactgcagtccaaggtgccgggcaggatgacagcagcagcatccccttcaggagggagccgctctctgaggccacctcagtctcatttctggatccc

SEQ ID NO: 509827 - DNA, 201 bp, Homo sapiens
tcattgttctgaaacaacagagtaaacagtcaatgtataactctcttattgtagattttacaaggtgtaaagtcctggtagttaaaaataataataaaaayacctcatggggtgtaaattgttactgcattttttcgaatggcaatttagtggtatctgtcaaaaacttaaaagcacatatatattacccagcaattcaac

SEQ ID NO: 509828 - DNA, 201 bp, Homo sapiens
cgtgcctcccggaacttatattctcggatttcatccttcatccgtattctctgtagctccaccatctcattgttctgaaacaacagagtaaacagtcaatrtataactctcttattgtagattttacaaggtgtaaagtcctggtagttaaaaataataataaaaatacctcatggggtgtaaattgttactgcatttttt

SEQ ID NO: 509829 - DNA, 201 bp, Homo sapiens
ttctgaataatggggtcttgttttgtctttttctacctgaatgggtggagtattctgtcctgttagttctttagatctgctgcagtcttccactttttcgyttgctttctttcagaattagtaacactgaagccccagatgggtctctaagttgctttccaagaaattcttgtcatttcctcttcatctctttaccctaac

SEQ ID NO: 509830 - DNA, 201 bp, Homo sapiens
ataagccctgggtttgaggggtaatggtgcggggatccaccatcttgtctcactgcttcctgagatacagacatggcttctgttctaagtccctagtaaaygtttcttcctaagaaactggatgtgtcagcctctttcttccacctctcagcttccttggccgcaggtttgcatagaccctgtccactgtgaaacagtgag

SEQ ID NO: 509831 - DNA, 201 bp, Homo sapiens
aatttcacaataaatttaaaagattgcaactgttgtgttttgcaccattcatcatacatttatctcctacaatttttttttcttcctgggataagatggcrctgagctctgctaaaaattcccatcaagaataaccacagtaagaaaaataatgcatgagagaaagggaagaaaatggcacaacaggggaatgctttagct

SEQ ID NO: 509832 - DNA, 201 bp, Homo sapiens
actggtcttatttattttgctaaaaatccttgctttttgaattgccagcgattatattctaggggcatgttctttaatttcacaataaatttaaaagattkcaactgttgtgttttgcaccattcatcatacatttatctcctacaatttttttttcttcctgggataagatggcactgagctctgctaaaaattcccatc

SEQ ID NO: 509833 - DNA, 201 bp, Homo sapiens
tgagataactcagatgagatggaatggtggggactctggtgaattagagattcacgctctttctaaaagaaaggtgaaggttcatgcctgtaattccagcmctttgggatgtaaaggcagaagatcgcttgaggcaaggaatttgagaccaggccagccaatatagtgaagtgttgtctctacaataaatttaaaaattag

SEQ ID NO: 509834 - DNA, 201 bp, Homo sapiens
tcacgctctttctaaaagaaaggtgaaggttcatgcctgtaattccagcactttgggatgtaaaggcagaagatcgcttgaggcaaggaatttgagaccasgccagccaatatagtgaagtgttgtctctacaataaatttaaaaattagccaggtgtggtgatgcacacctgtagtcccaggtactcaggaggctgagat

SEQ ID NO: 509835 - DNA, 201 bp, Homo sapiens
catattttgatttttagtatcagttgagtagccaggattttaaaattcagattctgaagttttaaatgctgctctgttgttaacagttttttagttgtccrtcgggattttacaatacagatggttagaggcagaaattgaatcagatctcaacattatcagtcagtagtaggactataaaataaatagaaaactatgaca

SEQ ID NO: 509836 - DNA, 201 bp, Homo sapiens
tgagctcatgatatcaccatccacctgcttccccaagcccaagctttggaagccacagtgaatgtgaggcactattggctaacatgtaacagtgaccatgygacagtaattgttaacagtgtgcaagagaaaactgtaaggctggctgctaaatatgcctgataaataactgtcaacttaacgctggtagtatgattagga

SEQ ID NO: 509837 - DNA, 201 bp, Homo sapiens
agtgggagcaagacgtctcacatgattagaagcaggaggaagaggggcggagagctgctacacacttctaaacaaccagatcttgcgataactcactatcrggaggaacagtaccgaggggatggctctaaaccattcatcaaggaccaccctcatgatccagtcgcctcccaccaggccccacctccaacattggagatt

SEQ ID NO: 509838 - DNA, 201 bp, Homo sapiens
ccgccatgccttcctcccctaaacccagactccagccatggcccggacgtggacacagccagaatgggatcctcagccctgctgccctggaggaaggggcrgggatggaactgtcccagttctgtgtggagaccaccttcggggagcgggaggctggcttcaggccacgcagctggggtgggggcttccatctgcctgtgc

SEQ ID NO: 509839 - DNA, 201 bp, Homo sapiens
tctctgtcatgttatgctgcggtaagaaggccctcaccagatgcagcccaacagctgtggactttcaaacctccagaactgtaagaaatacgtttattttwaaaataaatttaaaaggctgggcatggtggctcatgcctgtaatcccagcactttgggaggccgaggtgggtggatcacctgaggttaggagtttgagac

SEQ ID NO: 509840 - DNA, 201 bp, Homo sapiens
acctccagaactgtaagaaatacgtttatttttaaaataaatttaaaaggctgggcatggtggctcatgcctgtaatcccagcactttgggaggccgaggygggtggatcacctgaggttaggagtttgagaccagcctggccaacatggtgaagccccatctctactaaaaatacaaaaatcagccaggcggggtggcac

SEQ ID NO: 509841 - DNA, 201 bp, Homo sapiens
tccctgtaatcatgcgcctgcctatccagagggtactggttggataagctccctacatctgtccaacagagaaccacgcagcccactagaggagcgatggycagacaactgactaagatgccttctgtgtaaataaaacaggaaagggaaaaatgaagacacgtttttgcttatttaggggaaaaagaaagactgaaagga

SEQ ID NO: 509842 - DNA, 201 bp, Homo sapiens
ccagagggtactggttggataagctccctacatctgtccaacagagaaccacgcagcccactagaggagcgatggtcagacaactgactaagatgccttcygtgtaaataaaacaggaaagggaaaaatgaagacacgtttttgcttatttaggggaaaaagaaagactgaaaggataagctagtaaaacggattccctat

SEQ ID NO: 509843 - DNA, 201 bp, Homo sapiens
ctgtccaacagagaaccacgcagcccactagaggagcgatggtcagacaactgactaagatgccttctgtgtaaataaaacaggaaagggaaaaatgaagrcacgtttttgcttatttaggggaaaaagaaagactgaaaggataagctagtaaaacggattccctatgggggtggggaatgggctggaaagggatgagag

SEQ ID NO: 509844 - DNA, 201 bp, Homo sapiens
agaaaaacacatttattggagagggccgctgactctgtcaaacctcagagagtccataggattgcttatgggtaatgatttggaatagatttggtttcccwctgtactgattaggtttccttgggcactatgctacccagaactaagggaaagaatactctctgctcatggagacccaaatctgtcttaattttttttctt

SEQ ID NO: 509845 - DNA, 201 bp, Homo sapiens
gagagaacaggactgataatgcatctctcccaagtccccatctcatcccaacacctggggcacgaggggctgggaaaggtgtccttaccggctgcatggtmccccccgcaatgaccactgcccggcattccttcaccacttgggcaaagtgcacagctggattcaggagcaaaaacttcagggtgctctcactgaggctgc

SEQ ID NO: 509846 - DNA, 201 bp, Homo sapiens
ggcctcccaaagtgctgagattacaggcatgaaccactgtacccagccacacccacatgcatttttaatctctccctttcaacataattttgttacctcargttacaaaatgtgttactgtcttctatctgtattttaagatctattgacccgacatatgactctacttagatattatctctttccttcctgtcttaacca

SEQ ID NO: 509847 - DNA, 201 bp, Homo sapiens
attttaagatctattgacccgacatatgactctacttagatattatctctttccttcctgtcttaaccagacttcaaaccatctaaactcattgtttccayttccttaccttgtatgatcagcctgctgaaatttcacctgtcaccaccacaccagtgaagaatgataaacatgaccttcatattgccatttccattgaat

SEQ ID NO: 509848 - DNA, 201 bp, Homo sapiens
acccgacatatgactctacttagatattatctctttccttcctgtcttaaccagacttcaaaccatctaaactcattgtttccatttccttaccttgtatkatcagcctgctgaaatttcacctgtcaccaccacaccagtgaagaatgataaacatgaccttcatattgccatttccattgaatactctcctctcattat

SEQ ID NO: 509849 - DNA, 201 bp, Homo sapiens
actagcaagggaaagatgtgtattgtagatgttccagtgtgaagaatatgaaagacctccttctaggtaaaaacccctcattatccttcaaaaatggaacyaggggtgaagtcatcataatcatgaagagcctggggttcaccttatctctgccttgtgagggtataaagaaataggcacccaaatttatacatcgctgga

SEQ ID NO: 509850 - DNA, 201 bp, Homo sapiens
gtttccttaaatgccaaaactacacacacgaagtatgtaatacgaacactgtgacaatgaggagatgcaagtaacattttattcacctgaagaaactaaamcccaacattttgctttttgtctacagacacagttcctgtaaacacagaatcaaatacggtgcgcgtagaaaataaaaagatcctcccacactatggcact

SEQ ID NO: 509851 - DNA, 201 bp, Homo sapiens
tgaggcgtgagaatcgcttgaacccaggaggcggaggtcacagtgagctgagatcatgccactgcactccagtctaggtgacaaagcaaaactgtgtctcaaaaaaaaaaaaaaagagtaaaaaagtttttaaaaatgtaaatgtaaaagtttataaagtaaacaagttacagtaagctaaggttatttcattatttcatt

SEQ ID NO: 509852 - DNA, 201 bp, Homo sapiens
gagttcagtcctctctgggtgttgttcacatcaactatcaagtacttttcttctttaggtgcttctggtggatggaaaaggtgtgcccatccccaataaastcttcttcatctctgtgaatgacgccaattattactccaatgcaaccaccaatgagcagggtcttgcacagttttcaatcaatactaccagtatctcggt

SEQ ID NO: 509853 - DNA, 201 bp, Homo sapiens
cttcacctcttttcaggaggggatacaaataatctgtagctttatttatttacttatgcgacagagtcttactctgttgcccaggctggagtgcagtggcrtgatctcagctcactgcaacctccacctcctgggttcaagcgattctcccacctcagcctcccaagctgggattagcccgccaccatgcctagctaactt

SEQ ID NO: 509854 - DNA, 201 bp, Homo sapiens
gtttttctttgtctttcatgatgttgacagtttaaaattttgtcttttggattatgtgatgttttgaattttgtaacatgtccctcaatttggctttgttrgatatttccttgtgattagattcagattttgcatttttggcaaaaaactatataagagctattatgaccatctcattgcagtacagcaggagaaaatgat

SEQ ID NO: 509855 - DNA, 201 bp, Homo sapiens
gctgtggtgcagcgagctggctgggactgaccatctgaggcaggtctcttttctggaacgtgaattccagcggctggttggagatcccgctgcagatgacraggggcagatgttgtctggagggatcacgtgacctggtaagatcagggaggggccgaaaactggagatgcaggtgtgctgtaagacactgcagagagggc

SEQ ID NO: 509856 - DNA, 201 bp, Homo sapiens
ggctgcatggtaccccccgcaatgaccactgcccggcattccttcaccacttgggcaaagtgcacagctggattcaggagcaaaaacttcagggtgctctsactgaggctgcctggaaaaacagatcggtgggaggtgagtgcaagcccaacagacacttctatcgtcccagcaaagggggtcccccaggtgagtccaggt

SEQ ID NO: 509857 - DNA, 201 bp, Homo sapiens
gacctccatcccagcccctcgatctcctcccgtccacctccactgcttgcccaggtcacagcaggccagtgcccactgcactgcttcctcctaacccaggragttcccaggatggaaggaaagaatcctttcatgctgcggctcccgggctcagcttggctccttcctgggaactgaacctggccaagaaccacctgatta

SEQ ID NO: 509858 - DNA, 201 bp, Homo sapiens
gaacctggccaagaaccacctgattaccttggcggctcaggatgaccctgccgtcctggttggccgtagtgagagctgccaggaagccttcgatgtgcatyagtggggaagctggttgcgggacgctggcctgactctcgtctgcaggggctgcaagagctgcacagagcagaatggggaggaggcctccctcttgtcagg

SEQ ID NO: 509859 - DNA, 201 bp, Homo sapiens
ctctttccagagcccaagtgccccctccagacacagacccactccaactccagccagagacccaggcctcattcgtcagagactgggaatgctccttcagraggacacccctccaggcctgaggatctgtccactgtgggaggcctggagctactcgttctccacccaacttggtgcaagctgaccccgtcaggccctgcc

SEQ ID NO: 509860 - DNA, 201 bp, Homo sapiens
agactggtttaaaggtctagcaatagaatgtagataacccacaatagcagaaaactggaatatatgttcatccatacaatgagatatatgggacatttttwaaaaatttattattattttgttgttgttgttttgtttatttgttttttgagactgagtctcgctgtatcgcccaggctggagtgcagtggcgtgatcttg

SEQ ID NO: 509861 - DNA, 201 bp, Homo sapiens
ggcctgaggatctgtccactgtgggaggcctggagctactcgttctccacccaacttggtgcaagctgaccccgtcaggccctgccaccgttagttatccktgctgaccaccctcggcatcctctcaagcagaggctgcccacttctcacgttctatgccacagggtcgggcactgcactggctccttccagccccagaga

SEQ ID NO: 509862 - DNA, 201 bp, Homo sapiens
caccttctccccctgtaccaggccatgagctgtatgggagaaggaactcatcacagtgcctggcccgggaaggctattcataaacatgcagtgaaagaatwcacaggctcttccaacaagaagagagactggaccttacaagacccaacaggaaggcactgtctcaaaaccagtgaaaaataccaaggatctagataagag

SEQ ID NO: 509863 - DNA, 201 bp, Homo sapiens
ccatgagctgtatgggagaaggaactcatcacagtgcctggcccgggaaggctattcataaacatgcagtgaaagaatacacaggctcttccaacaagaaragagactggaccttacaagacccaacaggaaggcactgtctcaaaaccagtgaaaaataccaaggatctagataagagggtgcagtgggaaatgaaatag

SEQ ID NO: 509864 - DNA, 201 bp, Homo sapiens
taagaagagcatctgtatttgaacggctttgttttgcttttcactgtttatagcatgcaacggacccacttagagggcaggtgggtccaggagcctcccaygtctgactcacgtgcttgcacgtggaacccaaagccctgtaagttcatgtttttcaccccttctccaggaggccgggacacagcagccagaccaaggtat

SEQ ID NO: 509865 - DNA, 201 bp, Homo sapiens
cccagacagaggtgcacttggcttctgatgcacaaggccccgttcaacaaaatccatgccttttcagggtgcaggataatagagtgaagtgcgtgtggacyggagagaagtgctgcccaggttaatggcaccagctcagagcatcctcagggaagccagcaccagtttggagaagattgagggacgaggccatctaatgag

SEQ ID NO: 509866 - DNA, 201 bp, Homo sapiens
agttaagaccgggtttttgcattacgtgtgaagagctcagaaggaggaagtaccaccttgccctcactcatttcccacaatttatattctcacattagcatttttttttttttttagagatggagtcttgctctatctcccaggctggagtacagtggcacaatcatagctcactgcagcctcaaactcctgggctcaagc

SEQ ID NO: 509867 - DNA, 201 bp, Homo sapiens
atgcagcaggaaccccatgaccatctcctggatgaagctacaactgaccaatcgagtgaacagaggatgctgtcacttatgaccagctacaactcttcttktgtcagcgcctcagtctgccctttccagcaatgcgggaagaatccatcagcgccaggcgttggcagggaagccagccctgcatcccatggcctgaagctg

SEQ ID NO: 509868 - DNA, 201 bp, Homo sapiens
gcttccaaagcttagtggatccacccaatggacctcacctcccgcagtcccagcacacgctgcttaatctgagaggagcctgctccctgcgcggcagcgtkcatgttgacctgggggctttctcgcactgttcccaccacctgagatacctgctcccttctaccccgaacaatggtaggaaaaaatcaacatggacttaga

SEQ ID NO: 509869 - DNA, 201 bp, Homo sapiens
gctgaggcaggagaagcgcttgaacctgggaggcggaggttggagtgagccaagatcacaccactgtgctccagcctggatgacagagggagactctgtcaaaaaaaaaaaaaaagaatctgctgccttgttgttggacctgtaggtttccggacctaagacttcttttaactagacctgtatttcaggtctcattcctct

SEQ ID NO: 509870 - DNA, 201 bp, Homo sapiens
aggagaatctccccatctcaacatccttagttgaatcacatctgcaaagtcccttttgccaggtaaggtaagaaactcacagtttttacagattaggttgygaacatctttgggaggccatcattcagcctagcacagtgagatatatatgtatctttactttctgtttatttttagtgacagggtctcaccatgtcgccc

SEQ ID NO: 509871 - DNA, 201 bp, Homo sapiens
ctcctggatgaagctacaactgaccaatcgagtgaacagaggatgctgtcacttatgaccagctacaactcttcttttgtcagcgcctcagtctgcccttyccagcaatgcgggaagaatccatcagcgccaggcgttggcagggaagccagccctgcatcccatggcctgaagctgagctagctctactagtctatgctc

SEQ ID NO: 509872 - DNA, 201 bp, Homo sapiens
ggagaatctccccatctcaacatccttagttgaatcacatctgcaaagtcccttttgccaggtaaggtaagaaactcacagtttttacagattaggttgcraacatctttgggaggccatcattcagcctagcacagtgagatatatatgtatctttactttctgtttatttttagtgacagggtctcaccatgtcgccca

SEQ ID NO: 509873 - DNA, 201 bp, Homo sapiens
gctgctaatgaagcctgaagctgagctgtcacctaaatctgtgagtcacgttccaaccttggagatcatgaaatgctcacgtgataagatcatttttggargttaaaagttccaaaaatgtttgcaaaaaacaagttcttcagagtaacaggcatagtgtaattccacaacaagcagaaactgcataaagtactttacata

SEQ ID NO: 509874 - DNA, 201 bp, Homo sapiens
cagtttttacagattaggttgcgaacatctttgggaggccatcattcagcctagcacagtgagatatatatgtatctttactttctgtttatttttagtgrcagggtctcaccatgtcgcccaggctgacctcagacacgtgggctcaagtgatcatcctgctttgggcttccaagtagttaagactacaggcagatgcaa

SEQ ID NO: 509875 - DNA, 201 bp, Homo sapiens
tgtcgcccaggctgacctcagacacgtgggctcaagtgatcatcctgctttgggcttccaagtagttaagactacaggcagatgcaactatgcctagcttmtatcttataaatcaataagaaaacagtttgattttttaaatgggtaaaaggcttgaccaggcacttcaccagagaagtatacaaaatggcaaaaaaaaaa

SEQ ID NO: 509876 - DNA, 201 bp, Homo sapiens
ttcaagattgttaaaagatgactctaagggtggctctgactttgactgatcacatattttatgtgaaacatctgtgcactgtacaggtttatctttttgaraaccaaagtctttattttcagtggtattatctaattgtttttctggttctctgctgccaatcccttgctgattgggtagagaaggtttctgtggctcaac

SEQ ID NO: 509877 - DNA, 201 bp, Homo sapiens
agccaagtcaaacatattcaaggtctctctcctgtctttccattagtagtacatttgccagagcaagtcacagggccaggcccaagaagtataatcttccyacagtagaagggagaggggagtggatattcattgaacaataagccaaactactgatcaacctatcaatcatgctcatgttattaggttggtgtacagatc

SEQ ID NO: 509878 - DNA, 201 bp, Homo sapiens
ctagggactgtagtggtactttttacaaagtgtgatggaatagcaattggtagttaagtagcatgaagactgcttttgaccagggtgatacttacacacawgtgtgttccctacataatccactgcattatacacttaccatttgtaccctttcttaggtatgttttgatttcataaagttattttttaaagctctcttat

SEQ ID NO: 509879 - DNA, 201 bp, Homo sapiens
cctgcctccttgccccatcctcattgccctgggctgttctgttctaccttactcttggctcaataaaatgtatcattgcatatcattagtatgaatgtgaycttttaaacagctatgtaaattagcaatacaaagagtacaaatatgagtcagtcccaaacaatacatgaaaaggataggtttcatattttggtcttgcca

SEQ ID NO: 509880 - DNA, 201 bp, Homo sapiens
ataattcactatttcccagagatcccttctccagaaccagcttcactcgcccctaataggcatttaaaaaatgcccatgtggccgggcgcagtggctcacrcctgtaatcccagcactttggcaggctgaggtgggtggatcactgaggttggagttcaagatcagcctggacaacatggtgaaactctgtctctgctaaa

SEQ ID NO: 509881 - DNA, 201 bp, Homo sapiens
gatctgtccaatggagtttgctgggtgggggaaggtgtgagggaacctccatcttggaacggcatctccagaatgcaggagtgaggctggcacacagcackgcctctgtggacagggggtccagggaggttggggaggggcctcagggatggagggacagaactggggcctcccattctatccacatcagcctggtgagtt

SEQ ID NO: 509882 - DNA, 201 bp, Homo sapiens
tgattgtaagtttcctgaggcctccccagccatgtggaactatgagtcaattcaatctctttgtaaattacccagtctcaggcagttctttatagcagtgkgaaaacggactaatacagtatttatacatttctttaaaggggagaaggcatgtgggaaggagggggtagggtggtgaggcaaatggttatacttttgtgg

SEQ ID NO: 509883 - DNA, 201 bp, Homo sapiens
ctttgagatgccaaggcgagcagatcacttgaagtcaggagttcgagaccagcctagttaatatggcgaaaccccgtgtctactaaaaatacaaaaattakccaggtgtggtggtgcacatctgtaatcccagctacttgggaggctgagacagaagattcgcttgaacctgggaggcagaagttgcagtgacccaagatt

SEQ ID NO: 509884 - DNA, 201 bp, Homo sapiens
tttttaaatgggtaaaaggcttgaccaggcacttcaccagagaagtatacaaaatggcaaaaaaaaaaaaaaaaaaaaaaagtgcctgaaaagattcagarcatcattattcattagggaaatgcaacttgtatccacactagaacaggtgaaatcaaaagacacatctgcgttggcaagcctgcagagcaggggaactct

SEQ ID NO: 509885 - DNA, 201 bp, Homo sapiens
gcacagcggcagcaccatcgacccaaggagctgagggaagagctgagaggcacagcaacggcaggggagcatgcactgcctgagtctcggaatcgccccasaacaatcgctgaagccctgtttcctccagcactcccacttccggataccccaggtctcaccttcagtcggttcaccaggtccctctcttctttcttctgc

SEQ ID NO: 509886 - DNA, 201 bp, Homo sapiens
tgcaacttgtatccacactagaacaggtgaaatcaaaagacacatctgcgttggcaagcctgcagagcaggggaactctcacacggtgctgacggacatayaagatggcacagctgctgtggaaaacagttcagcagttccttataaagtcaaacataagacccagcgatccttcccctaagtgtttatccaggacaaata

SEQ ID NO: 509887 - DNA, 201 bp, Homo sapiens
aaatcccacagatgtgctggcaactggaggcccccaacaaaggagcccagcctggcagccacagccagcctgccctgcagactcagcctttctgtgccctsttcttcagcatacacaggcagtccagggctgccagacgtttgaggaaagcctccaaacggacatataccctgacgtggtgtgggtgcggccgtctgtccc

SEQ ID NO: 509888 - DNA, 201 bp, Homo sapiens
ggccttcagctgataaatggataaacaaactgtggtacatccatagagcggaatatattcagtaataaaacagggcaacttaccgatacacatctaacacrgatacctctcaagagctttacactaagtgaaagcagccagacacaaaagatacctactgtaggattcttttacctgaaattctagaaaaggcaaaatgac

SEQ ID NO: 509889 - DNA, 201 bp, Homo sapiens
gccagcctgccctgcagactcagcctttctgtgccctcttcttcagcatacacaggcagtccagggctgccagacgtttgaggaaagcctccaaacggacrtataccctgacgtggtgtgggtgcggccgtctgtccccactaacactcatgctgaaatctgtcaagtcagtctgaggagcaactaattcaaatgacacgg

SEQ ID NO: 509890 - DNA, 201 bp, Homo sapiens
gacagagtgagaccctatctctaaacaaagaaaagaaaagaaaacagccaggcgcggtgactcacgcctgtaatcccagcactttgggaggcttaggtggscagatcacctgaggtcgggagttcgagaccagcatggagaaaccctgtctctactaaaaatacaaaattagctgggcgtggtggcacatgcctataatcc

SEQ ID NO: 509891 - DNA, 201 bp, Homo sapiens
ggaggttgcagtgagctatgattttaccactacactccagcctgggtgacagagtgagaccctatctctaaacaaagaaaagaaaagaaaacagccaggckcggtgactcacgcctgtaatcccagcactttgggaggcttaggtgggcagatcacctgaggtcgggagttcgagaccagcatggagaaaccctgtctcta

SEQ ID NO: 509892 - DNA, 201 bp, Homo sapiens
aaatacaaaaaattagccaggcgtggtggcgggtgcctgtagtcccagctactcgggaggcttaggcaggagaatggcgcgaacccgggaggcggagcttrcagcgagccaagattgagccactgcactccagcctgggctacagagtgagattccgtctcaaaaaaaaaaaaaaaagaaaaagaaaaagaaaccccacag

SEQ ID NO: 509893 - DNA, 201 bp, Homo sapiens
cttcagcatacacaggcagtccagggctgccagacgtttgaggaaagcctccaaacggacatataccctgacgtggtgtgggtgcggccgtctgtccccaytaacactcatgctgaaatctgtcaagtcagtctgaggagcaactaattcaaatgacacggaaaggatggaggattccaggagggctccaaggtaaaaatg

SEQ ID NO: 509894 - DNA, 201 bp, Homo sapiens
atggtggtgtgcaccagtaatcttggatcttgccagccaccaggtacttgggaggctgagaggggaggatcgcttgagtttgagaccagcctgggccacayagtgagactgcccatcttaacaaacaaacatatgttgaaatcctaaccctgccatgtgactgtactacagatctggccttcaagggtaaaggaggtcata

SEQ ID NO: 509895 - DNA, 201 bp, Homo sapiens
atatctttatgtgactacacgaaatttatttagttatgcttttattatataacatatagattatttcattttgttttcctagtaattaataattttgtagyatatgtctttgtgtataactatatagtaagtagcttttgaattaggaattgttcacttaagaaagatttccagaagaggaattaccaagacaaaatatgc

SEQ ID NO: 509896 - DNA, 201 bp, Homo sapiens
caagccatttaatgactctttagaggtctgcacgccgctgctgtgtttctcatttgatttcccacaactttcaacctgcacggcaagtttacttggtctcrtatgttcagaatcacatggcacgtttttcacacagattttcttcgatgctttattactcagagcttctttatgcttctgcctttgtaaatactccttagg

SEQ ID NO: 509897 - DNA, 201 bp, Homo sapiens
agtctagagtagaggtgagcaaactttttctgtaaagagcagatggtggctgggcaccgtggctcacgcctgtaatcccagcactttgggaggctgaggcmggcagatcacctgaggtcagcagttcaagaccaacctggccaacatagcaaagccccatgtctactaaaaatacaaacattagctgggcgtggtggtgca

SEQ ID NO: 509898 - DNA, 201 bp, Homo sapiens
gcatttttttcaaggcctcttttgaagagttattaaggaaggtaaaagtgcataaaggtcaaagtcttaagaaagtctgattaaataattgcaaaaacaattttttttttttgaggcaaagtcttgctttgttgcccaggctggagtgaagtggcatgatctcggctcactacaacctccgcctcccaggttcaagcgatt

SEQ ID NO: 509899 - DNA, 201 bp, Homo sapiens
gccaaggtgggaggattgtttgagcccagggggttgaaaccggcctgggcaacatactgagatgctgtctgtataaaaatttgtgaaaatagcttggtgtrgtggtgtgcacctgtggtcctagctacttggaaggctgaggagagagggtttcttgagctcaggagttggaggttgcagtgagctatgattttaccacta

SEQ ID NO: 509900 - DNA, 201 bp, Homo sapiens
gctttagttaaccttttaagaaattgattgagggtttggggttgacatagtataatttttctgtttaaaataaaataaataggctgaaggttagcattttyatgcagaacaaccaattttcagtaatagattactgatgttaagcaggagaggactacatttctaaattgtttaatttttttaaatgacagacccaaactt

SEQ ID NO: 509901 - DNA, 201 bp, Homo sapiens
tatttaggtaccttaccatgctttagttaaccttttaagaaattgattgagggtttggggttgacatagtataatttttctgtttaaaataaaataaatargctgaaggttagcattttcatgcagaacaaccaattttcagtaatagattactgatgttaagcaggagaggactacatttctaaattgtttaattttttt

SEQ ID NO: 509902 - DNA, 201 bp, Homo sapiens
atcttctactgcacaaaagcccctatctgttattcaccatattaattatttggtgatcaagaagcaatgttttaaacatttcacaactgaccagatgtttygttttataagaattatatttaggtaccttaccatgctttagttaaccttttaagaaattgattgagggtttggggttgacatagtataatttttctgttt

SEQ ID NO: 509903 - DNA, 201 bp, Homo sapiens
attgctcaccaaatatgttgtgtcaacgtagaattccagcagctagtatggaagtgcctgtctcactgaatcttcaccatcattacatattttcattaaartaagaaaacaagctattggaatgtcattgtgaagataaggcatcatccatttaatttgaattaattggaatcttcttaatgttacaaaataagtcctata

SEQ ID NO: 509904 - DNA, 201 bp, Homo sapiens
ttgccatatttgttaaacattttgtttagttgattacatgaaaattacttgcctttgagtattttcagcagactattagagatacattgggtaaagggccrtctaatgaacatgcaaggggagttcttaaggatgccccagagattcttggaaaccagttttcagccttttttttttggtagtatttaacatcttctttgg

SEQ ID NO: 509905 - DNA, 201 bp, Homo sapiens
cagagccgccacctactaacttttctggcctcaagacctatgagctttctgtttggctccagacaggagagctctcttcacagccacggggctctggctgraacagcttcccagcactgagaccaggcatttctctttccttgctaggctaaggtctaagaaaaactctgctccatgttgacgtcatcttttttttcctcc

SEQ ID NO: 509906 - DNA, 201 bp, Homo sapiens
gtatggtccctgacccaacaaatctagctcaggttcagagatgcacaacctcattccagcaaagctttctgtagattatcgggggcagctcttactacccwtgatctttcccacttctcagctattcctgtaccaacagaaagctctcccatggaggaatggcaaagagatggaaaaatgcggctgtgaattgggctgaag

SEQ ID NO: 509907 - DNA, 201 bp, Homo sapiens
aaaaattggcatctcgaagtatcagagagaaaatttacaagttttctaaagcaaatgctctaagaagagggaggtcaggggcctccctcaggaggaagccygcctaaagggaaacatgagcttgtcttggtcttgaatcttctactgcacaaaagcccctatctgttattcaccatattaattatttggtgatcaagaagc

SEQ ID NO: 509908 - DNA, 201 bp, Homo sapiens
ataagagcatcacaggacccctcttttcacaatcaagccaaaccagcgcctgctgttgctcccaggacaaactgctgctgggcccctcccaccaccagccwgccacagtctgacagagactcccagtttagggcttggaaaccaatcaatcagagctcatctgctcggttaatcagggctcagctgcatcagaggaaagca

SEQ ID NO: 509909 - DNA, 201 bp, Homo sapiens
gctcccaggacaaactgctgctgggcccctcccaccaccagccagccacagtctgacagagactcccagtttagggcttggaaaccaatcaatcagagctyatctgctcggttaatcagggctcagctgcatcagaggaaagcaaatgcaaatgaatctgggttcatatgcaaatgaacctgatggggaacctgggcagca

SEQ ID NO: 509910 - DNA, 201 bp, Homo sapiens
ggttatgagcatattcagaattacaagaaagtttcaatcactaatatttgtacattgtgacaaactattaatcataccaaaaataatagaaatagcccttygagaacaatggttcacattgttctccgatcacataaaatgtctctagtgtacgcaacttaaaaatggcacacaactgaattaaaatattttaggagatta

SEQ ID NO: 509911 - DNA, 201 bp, Homo sapiens
cctctaaaattagtagcctataatggcatctgtttattgttcatatttctgtgggttgaaatttggactggaatcagctgagtggtgcttctgctgatctyccctggaaccacttgacttgtcatctctctaagatggtcttttgtttacatacgtagcacttggtgctatcaacttgtatacttcaggccgtggcctcat

SEQ ID NO: 509912 - DNA, 201 bp, Homo sapiens
ctgctgatctcccctggaaccacttgacttgtcatctctctaagatggtcttttgtttacatacgtagcacttggtgctatcaacttgtatacttcaggcygtggcctcatctttaatacgctatactgagcttctttatacaatagtctcagggcagaattctaagagcaagagcagaagccagaagaccttttcaaaat

SEQ ID NO: 509913 - DNA, 201 bp, Homo sapiens
atggtgctgagtccaggtggagggaaggggtcggatggggggctgggtgggggacatggtgggggctctgttggaacctgccacccttctggctctctacygtgtttttcttagttagtgggaggtctgtgagctccatacctccagggcctagctgtgaagctgttgctggtgtggatctgtccaatggagtttgctggg

SEQ ID NO: 509914 - DNA, 201 bp, Homo sapiens
cagtaagccatgatcacgccactgccctcaagcctgggtgacatagtaagaccctgtcttaaaaaacaaaacacgaaacaggcttggtgcggtggctcacrcctgtaatcccagcgctttgggaggccgaggcagttggatggcttcagctcaagagttcaagaccaacctaggaaacaaggtgaaactctgtctctacaa

SEQ ID NO: 509915 - DNA, 201 bp, Homo sapiens
tcctggctaacacagtgaaaccccgtctctactaaaaatacaaagaaattagctgggcttggtggcgggcccctgtagtcccagctactcgggaggctgtsgcaggagaatgacatgaacccgggaggtggagcttgcagtgaggcaagatcgcgccactgcactccagcctgggtgacagagcgagactctgtctcagaa

SEQ ID NO: 509916 - DNA, 201 bp, Homo sapiens
gtgaaaccccgtctctactaaaaatacaaagaaattagctgggcttggtggcgggcccctgtagtcccagctactcgggaggctgtggcaggagaatgacrtgaacccgggaggtggagcttgcagtgaggcaagatcgcgccactgcactccagcctgggtgacagagcgagactctgtctcagaaaaaaaaaaaaaaaa

SEQ ID NO: 509917 - DNA, 201 bp, Homo sapiens
ggaggctgtggcaggagaatgacatgaacccgggaggtggagcttgcagtgaggcaagatcgcgccactgcactccagcctgggtgacagagcgagactcygtctcagaaaaaaaaaaaaaaaaaagtcaggaaacaacagatgctggagaggatgtggagaaataggaacgcctttacactgttggtgggagtgtaaatt

SEQ ID NO: 509918 - DNA, 201 bp, Homo sapiens
caggttgttctaagtgaccccattttaaagttctttcagcgaagtgggaaatgtagatttgtaagcagatttttcccattttaacatgtcaacctaaaaakgaaaagcattccaaggccaccgtcactccaccagcttgttggtttgcagtcacagtctaagcccccagctgtctcaggaaagctgcatgaatgaacccac

SEQ ID NO: 509919 - DNA, 201 bp, Homo sapiens
gagactggtgaaggtctgttatagccattgggggagtaggacataaagctggccagagaccacaggacttacgggcagcaccaaggatgaagcagaggccrggagctcatgcccgtctagatccatgaggccgtgtggtctcaacagcgctcagctgcttcaggcaggacagagaaggcggcagctggactgagtcaaatg

SEQ ID NO: 509920 - DNA, 201 bp, Homo sapiens
agagtacaaacactgacaattggctcctgtgaccttctaaaatccattttacctcttgaatgtctttcttccagtagtcacactgcttcctagagtgttartggattcacttttgtccttagaggcccttgaagaacaatctttctctttaactatctacgtgctgttgaaaggggtttctgaatccagactgtaatgtgc

SEQ ID NO: 509921 - DNA, 201 bp, Homo sapiens
cccagcatcctcagctcaaataactgccgcttgccaagcgcctgccccaacggaattaacggaagctgctgatagccctgctgacctcattggatggaacygtgtcctcagcagacaggagctcctccttctgagcaagactcccttatgtcttggagtaggaagtcctctcatgaatagtccaagcttcagacagagaaa

SEQ ID NO: 509922 - DNA, 201 bp, Homo sapiens
attcattgatgaaaatgttcaaaaacagaccttaatctggctttcaagccaacagaaaacaagcggctgctttaagaatgatggccagcttttcaaccacscctgggaggtgagagaggagaagcaccaggctttccttgttcctgggcattgcctgccttgccctgcctctggctttcctgatctggaatatgaatattc

SEQ ID NO: 509923 - DNA, 201 bp, Homo sapiens
ctgggaggctgaggcaggagaatggcgtgaacccgggaggcgaagtttgcagtgagccgagatcgccccactgcactccagcctgggcgacagagcgagaytccgtctcaaaaaaaaaaaaaaaaaaaaaaggaatgtagttaggacttcagaaaggactaaaaatagtgagttttcaactattaaggaacaaagcatttt

SEQ ID NO: 509924 - DNA, 201 bp, Homo sapiens
gtcttccagagtttgtatactttttggttttacatttaagtctttaaccaatcttgagttgatttttgtgcattgtgtaaggcggggatccagtttcaatmttctgcctatggctagccagttatctcagcaccatttattgaatagggagtcctttccttgtgtttgttagctttgttgaagatcagatggttgtgggtg

SEQ ID NO: 509925 - DNA, 201 bp, Homo sapiens
tagccagttatctcagcaccatttattgaatagggagtcctttccttgtgtttgttagctttgttgaagatcagatggttgtgggtgtgcagcattatttmtggtctctgcattctgtcccattgatttgtgtgtctgtttttgtacaagtactatgctgttttggtaactgtagccctgtagtatagtttgaagttgggt

SEQ ID NO: 509926 - DNA, 201 bp, Homo sapiens
ggacgacagagctgagactccatctcaaaaaaaaaaaaaagcccagagttcaaggctgcagtgcccaatgattaagcctctgaatagccactgcattccakcctgggagcaaagtgagactgtctctaaaaaaagaaaaaatatatatatagtcttcttctgttttgttttgtttgtttaattcaaagttacatcacagtt

SEQ ID NO: 509927 - DNA, 201 bp, Homo sapiens
caatgcaaacattgtgtgtgtatcttttcaattttatttctatgttgatactagctaccacttattgggcatctaaagattgtcaggcaccatgccacatmcttactgatgttttcttattcaattttcaccaaaacctataaggcaagagacactattatgccctcttttttgtaactgagtcttagagaggttgagaac

SEQ ID NO: 509928 - DNA, 201 bp, Homo sapiens
gtggaaaaatttaaaatctaggaaacaaagttaaaacccattacccaaggataaccaatgcaaacattgtgtgtgtatcttttcaattttatttctatgtkgatactagctaccacttattgggcatctaaagattgtcaggcaccatgccacatccttactgatgttttcttattcaattttcaccaaaacctataaggc

SEQ ID NO: 509929 - DNA, 201 bp, Homo sapiens
tacaggagtgagccactgcgcctggccttgtatatttagtttagaacaatgcctggcacacagtaagaaaacaaaaaatgttacctacaaaaaagaaaaargaatcctacctctgagtgcagtctcacctgaattctttccctcccacccccacctctgggtttgttaagtcattctcccctcccacaggatctgcaccac

SEQ ID NO: 509930 - DNA, 201 bp, Homo sapiens
attcctttgacaatctaaggaaagctacaccatccccaggaaaacacacatatgcacgcacacacacactcttaggtacaattctggggtgcctatagaaytctaacactaacctgcctttttagatccctgagttaaatggacattaatgtcaaagactccttattcctttggagcagcaaacctcaacaggtcacagga

SEQ ID NO: 509931 - DNA, 201 bp, Homo sapiens
ccagcctttaaaacatttttaagtaatggaggccaggtgtggtggctcacacctgtaatctcagcactctgggaggctggggtgggaggattgcttgagamtcaggaggtggaggctgtagtgagccatgattgtaccactgcacttcggcctgagcaacagagcaaaaaatataaaataaaataaatataatataaaata

SEQ ID NO: 509932 - DNA, 201 bp, Homo sapiens
ctaaatcaaactctcagacaagaaaatggcctcttgccctgtcatgctctctgtcatgttatgctgcggtaagaaggccctcaccagatgcagcccaacarctgtggactttcaaacctccagaactgtaagaaatacgtttatttttaaaataaatttaaaaggctgggcatggtggctcatgcctgtaatcccagcact

SEQ ID NO: 509933 - DNA, 201 bp, Homo sapiens
tgaggcagtacaatcacttgagcccagaaattcgaggctgcagtgagctatgattgcaccactgcatttcagcctgggcaacagagcaagaccctgtctcaaaaaaaaattacatttatttaaggtgtacaacataacgttatgggacacatatagataataaaatgactactatagtgatggaaagtaacatggccatca

SEQ ID NO: 509934 - DNA, 201 bp, Homo sapiens
ttagtagagacggggtttctccatgttggtcaggctggtcttgaactcctgacctcaggtgatccgcctgcctcagcctcccaaagtgctgggattacagscatgagccaccgcgcctggcctagaaggcttttattaatcagtggaagtagccatctccacctttgtccacactccagaaccttccttaggcagtcagtt

SEQ ID NO: 509935 - DNA, 201 bp, Homo sapiens
tgtaatgctgtgtgcgttcagttttacaaagtgaaaagtattttttcctttgtacttttgtatttgggtatctcatgctgactgctgatgacaattcatgrcaaactaaagacccatagataatgttaaattcaatgacagcagtttctatttttttccttagagacagggttcttgctctgtcacccaggatggagtgca

SEQ ID NO: 509936 - DNA, 201 bp, Homo sapiens
gggtgaaataaacagtattaaagaggtagaagactgagtgcaagaaggaaaggggttaaggggagaggtagtggaatagttccagagggctcaggaattaygctctggagtacagaactcattgggaattgggtgatattaccatgtgtttccatttccatctcgctccccaaaggcactgtatgagccattgctgtgttt

SEQ ID NO: 509937 - DNA, 201 bp, Homo sapiens
tttgcctctgggtctttgaggaatcaccacactttcttccacagtggttgaactaatttacactccccacaacagtaaaaaaagcattcctttttctctgyaacctcatcagcatctgttgttttttgactttttaacagcagccattctgactggtgtgagatggtatctcattgtggttttgatttgcatttctctaat

SEQ ID NO: 509938 - DNA, 201 bp, Homo sapiens
agccattctgactggtgtgagatggtatctcattgtggttttgatttgcatttctctaatgattagtgatgttgagcttttcttcatatgtttgttggctrtatgtatgttttcttttgagaattgtctgttcatgtcctttgcccactttttaatgggtttttatttcttgtaaatttgtttaagttcctcgtagactct

SEQ ID NO: 509939 - DNA, 201 bp, Homo sapiens
acacaccaagccctgtgagtcttcaaggcctagctagttcacaaaacatctttaatttgtttactatacaagtactttattgatgtaccagcactcttcamtatcaaaatattgacgcaaaaggtagccctgtcttcatataaaatataattcattatggatcttccagaataaaaatctatcctaaaacagttgctaaat

SEQ ID NO: 509940 - DNA, 201 bp, Homo sapiens
gatgtaccagcactcttcactatcaaaatattgacgcaaaaggtagccctgtcttcatataaaatataattcattatggatcttccagaataaaaatctaycctaaaacagttgctaaatgaacttattatgacagcttgtgtgtgtttatttgtgtaaactcaatataacattttggcaaaatatatattgaactatcca

SEQ ID NO: 509941 - DNA, 201 bp, Homo sapiens
gatttgtgtatgttgagccaagcttgcatcccagggatgaagcctacttggttgtggtggataagctttttgacgtgctgctggatttggtttgcaagtaytttgttgaggatttttgcatcgatgttcatcagggatattcgcctgaagctttctttttttgttgtgactctgccaggttttggtatcaagatgatggtg

SEQ ID NO: 509942 - DNA, 201 bp, Homo sapiens
tattatgacagcttgtgtgtgtttatttgtgtaaactcaatataacattttggcaaaatatatattgaactatccatcctaaacataatctaatagggctrttttcttcttgagattacttctgcaacaagttagcaaaactatagcagagatggccagttttattagtacatcaaaaaatagacctatcagaataaactt

SEQ ID NO: 509943 - DNA, 201 bp, Homo sapiens
ttatgtcttcgtggtgacaagtccaaggacaatccctgcaaaacttggcatgatttctcaagtgcaattgcaatgtctgttcaaaatgaagtgacctgctrggactgtttgccgtcaattgagaactggtcctatgctagatattgtgtagatcaggtaaatgataagtctttagaagtggcctccctcattatttaaatg

SEQ ID NO: 509944 - DNA, 201 bp, Homo sapiens
acctactgggctgcattcccaggaggttaagcattcttagtcacaggacaagataggtcagcaggacaagatagaggtcataaagaccctgctgataaaayaatgccataaagaaggcagccaaaacctgccaaaaccaaggtggtgatgaaagtgacctctagttgtcctcactgctcactatacgctaattataatgca

SEQ ID NO: 509945 - DNA, 201 bp, Homo sapiens
tcagggtaaaaccccaggaggctgagccatgagaatcgcttgaacccaggatgggcgacagagaaagactctgtctcaaaacaaaacaaaacaaagcaaarcaaaacaaaacaaagcaaaacaaacaaacaaacaaaaaaaacaagaagggtgggaggatgtagagggatgagaaattacttaatgggtacaatgtagtat

SEQ ID NO: 509946 - DNA, 201 bp, Homo sapiens
aaaatagacctatcagaataaacttttggcctgaattcctcatgttatgtatttaaatatttagactaggactggtcacttctagatgtaattgttccaarggttcatattttttttgacttggcctgggaagagatagaattaaatatacaaggaaaatttaagtaagttttgttaacgtgtaattcaatttgattagaa

SEQ ID NO: 509947 - DNA, 201 bp, Homo sapiens
tccccagtgtagagaaaggtaggggtcatttatataggaaaaaacaagaatgctgaacagaattacattttccacacaagactaacaaacagttacaagayctgattggttatgatcgattacgctctaagtggttgcttaacatttcatataaagaggtagataaagagtctctatctccaacaagatttaatctaggtt

SEQ ID NO: 509948 - DNA, 201 bp, Homo sapiens
tggcttaaaattttaagctaatatgggctgtgaacatgtcatatacatttttgtgccttgagcatttggatcagtccttggaacacatctgacactctacragtgttttaaaattttatttaatctgaaaagaatgaagaaggaatgagttctggtgttctattgcacagtaggctgacaatagtttacagtaagatttag

SEQ ID NO: 509949 - DNA, 201 bp, Homo sapiens
agcctcccaagtagctgggattacagaggcacacgccaccatacccaactaatttttgtatttttagtagagatggggtttcacaatattacccaagctgrtcttgaactccttggctctagtgatctgcccaccttggcatcccaaagtgctaggattacaggtgtgagccactgtgccccgccaattgtatcctttaag

SEQ ID NO: 509950 - DNA, 201 bp, Homo sapiens
aggtggccagatttcaggctcagatccagaatggtgataagggtaccttcccttacagaaagaagataacatatagaatagcaacagctgatgtcaaaaarcctcttttcttttttaaaatagcggtgagtaactattactggaatggaatagataaacctaaatagaggtaaaggggtaatcccaggactcaggcttgcc

SEQ ID NO: 509951 - DNA, 201 bp, Homo sapiens
gactcacatcttcaacggaagtaagaaaactccccttcctaccatcgattgactaactgatcccaagtcaatccctctgacaatcctgtatgtcttggccktttctagtgtcttcagcatatcatacgtgtggttcggcacacctgagactgtaatataccacaggatgcctaattccacagctcctctgtaagccacagc

SEQ ID NO: 509952 - DNA, 201 bp, Homo sapiens
gctgggattacagaggcacacgccaccatacccaactaatttttgtatttttagtagagatggggtttcacaatattacccaagctggtcttgaactcctkggctctagtgatctgcccaccttggcatcccaaagtgctaggattacaggtgtgagccactgtgccccgccaattgtatcctttaagtatgtacaattac

SEQ ID NO: 509953 - DNA, 201 bp, Homo sapiens
ccgaaatatggcagcaaagggtaatactctcatacaaattctgattgtttatatttttttcattattttctaggatcctcaaaacaatcggatttttcaawggcaaaatgtgacttctttccgaaatattacccaactctcgttccaactgatttcagaaccaatgtttggagattactggattgttgtgaaaagaaactc

SEQ ID NO: 509954 - DNA, 201 bp, Homo sapiens
gggtatgaagatggataagagaaaagaaaatgttaggttttggtggggtttttttgccaaaaccacaatgacctttgcaccagtctagtaagtttgggaargagagctgtctgtgtgttttcattcctagagcagtacaagcagcaggtgcattgaatttactcaattgtaaagtggcttggtgatccccaatttgttgtc

SEQ ID NO: 509955 - DNA, 201 bp, Homo sapiens
gtgacacaccaatttgctgttaaaagatatggtaaccagttgctatttgtagctgtcctgtgtagatgaagagtttaaaggatggaccaacacaacatttrtgttagacttaggcaggagtaggtgaagctagaactggttttctttgtctcccttccttgacctggttggcttcgtcatcagcactttgctgctcctctc

SEQ ID NO: 509956 - DNA, 201 bp, Homo sapiens
gtaaagtgttttgcaagggtaagtcagtctgtcctgggtatgaagatggataagagaaaagaaaatgttaggttttggtggggtttttttgccaaaaccayaatgacctttgcaccagtctagtaagtttgggaaagagagctgtctgtgtgttttcattcctagagcagtacaagcagcaggtgcattgaatttactcaa

SEQ ID NO: 509957 - DNA, 201 bp, Homo sapiens
taaggaacctacaaaagatcttagcaaaggcgcaaagattaccatcgtattgctcgtttcttcctactttgcagaagtaacctctggcgaacagaggtggktgcagagcatgcttatcaagcaaaataccacgaagcagtaaggaacgacagagataacagtaacaataataattcaccccaaggtactcaactggaaaaa

SEQ ID NO: 509958 - DNA, 201 bp, Homo sapiens
aacaacatatattcatgaaggaaatacacaccctcctggtgagtttatgtatgatttttgttttgttgttttctgtgttatctgatcacaaattactttcmttttcaggaagaaaaaaatttaattttttttttattggggcaacatccaacccagatatgattactacctagcctgaactgaatgtattactaataaaca

SEQ ID NO: 509959 - DNA, 201 bp, Homo sapiens
ggaggcaggccagaaatgcaaacaaacaaacaaaaaaaaattctgctcatttcaatttttgccccagcaagaaccttgagctcagttctcagaggtgagarttctaacacagaaagcacccagaaagggcactgaggtctgagaagcaaggaagtgacccaggttgtttgcctctggtcggaaagggaaactacccctgct

SEQ ID NO: 509960 - DNA, 201 bp, Homo sapiens
cctggaaaaagcaccatttgattggctaaaaggcattgcgggagttctcacttgggtcttagattctacccagaactggcaggtgagttttcaggcttccrgcggtctttgactcgaaggttggttttcaccagggacccgcccgtatctacctaggaatttgtctgcttcccaccactatcagtatctgtccatttatac

SEQ ID NO: 509961 - DNA, 201 bp, Homo sapiens
ttttattttcattttcaggtcaacttaaatttttctaaagaaaaaagtttaccaggatccaatgtcgatcttcaagtctcggctgcttcaaactctctttrtgctctttgggcggtagaccagagggtattgctactaaggaattatggtcagctgccagcacaaactgtgagtgattaaaaccatctttgtttaccaccc

SEQ ID NO: 509962 - DNA, 201 bp, Homo sapiens
ttttttttttttttggtctcactctgtcacacaggctgcagtgcagtggcacaatcatgacttactgcagcctcaaactcctggaatcacgcaatccttcygccccagccttcaatttctttcattaatattttacagttttcaatgtacagatctttcaccttcttggtattcctaggtattttattttatttcatttta

SEQ ID NO: 509963 - DNA, 201 bp, Homo sapiens
aagaatcatgcagaagttctggagctaaaaaatgtaattggcatcagggtcttttattagcaaaatagattaagcagaagaattagtgagcctgaagatargctatttgaaaacacacacaagagactaaagaaaaaaaaaatgaagcacacctacaggatctagaaactagcctcaaaagggcaaatctaaaagttattg

SEQ ID NO: 509964 - DNA, 201 bp, Homo sapiens
gaatctggacagcattatgttataagccagacacaaaatgacaaatactgcatgatctcaactatatgtggaatctgtaaaagttaaactcatagaagttsagagtagaatagtagttaccaggcactgggagttgggggtgcagttttggggaaatgtttggtcaaaggatacaaaatttcagttggataggaagaataa

SEQ ID NO: 509965 - DNA, 201 bp, Homo sapiens
tcagtggtatatacaatgtatcagtggtattgtgtggtatgcagggtaagatgaaatagtattcaacatcaatagcaggattatgtctagaaaaaattttrcttttactaaaaatgaaaagacactggtcaaatgcaaaccatccaaagagtaacagggaattcatattacatgttaatataacattactttctaagactt

SEQ ID NO: 509966 - DNA, 201 bp, Homo sapiens
gcagtgagccaagattgcaccactgcactccagcctgggcaacagagtgaaactccgtctcaaacaaacaaacaaaaagaaacaaaatgtgaaattctgargatagggaaaagaaaagaaagaggaagaattaatcattagtgagacaccaccatgtagaatggtgccacacaatttggggcaaatgatacatagctcata

SEQ ID NO: 509967 - DNA, 201 bp, Homo sapiens
aattccaagtggatgtatgtgctaagtgagtatttattcagagatttaccttcacaagaaaacacaaagctcagagagaatgagaagtgagattaaccatraaactttaattatttatatgcttacattaatgttattagagaagcaatgaatcctcactgtagaaaatttgaaaaatatagagaaaaacacaagacatta

SEQ ID NO: 509968 - DNA, 201 bp, Homo sapiens
aagagtctcagctcgtttgtgttacagttcattcattcctgctgtccacaagctttgccgaacgggtgcatgtcccaacttgttcagtcccaccagcccayggctcctgggctggcctggcgccaccaccacttcccataacgtggggtggccgcctggtgccaggagagggcaggagggctacagcctttcacctgctgt

SEQ ID NO: 509969 - DNA, 201 bp, Homo sapiens
agaaggactaatttaaggtatattcatgttatctatttataaacatgggaatccattcaaatatagtgtaagggaggcagtaaaataacttgtattatcayggttataagtcttaatattgctacaaaagtggagagcgatagttcccccactaagtcttaggcttcttttagaaagctactgagcacagccatgcaaaaa

SEQ ID NO: 509970 - DNA, 201 bp, Homo sapiens
ctctggcttggggaatcccgaggtctgcaccccgaagagtctcagctcgtttgtgttacagttcattcattcctgctgtccacaagctttgccgaacgggkgcatgtcccaacttgttcagtcccaccagcccacggctcctgggctggcctggcgccaccaccacttcccataacgtggggtggccgcctggtgccagga

SEQ ID NO: 509971 - DNA, 201 bp, Homo sapiens
tgggtgatagagtgagactctgtctcaaaagaaaaagaaaaaaaaatgcggtggggggtgttacagcatgttacagctctggcttggggaatcccgaggtytgcaccccgaagagtctcagctcgtttgtgttacagttcattcattcctgctgtccacaagctttgccgaacgggtgcatgtcccaacttgttcagtccc

SEQ ID NO: 509972 - DNA, 201 bp, Homo sapiens
tatttattcagagatttaccttcacaagaaaacacaaagctcagagagaatgagaagtgagattaaccatgaaactttaattatttatatgcttacattartgttattagagaagcaatgaatcctcactgtagaaaatttgaaaaatatagagaaaaacacaagacattacctattattaatttgaccaactgccattaa

SEQ ID NO: 509973 - DNA, 201 bp, Homo sapiens
taatgtcactaacattgtaagtttcctctaattttaatgaatattttccatgactgcaatcatacttttctatttataataattaagaaaacatgcctacrtattatgccaatcttttcatgaattccaattttctgctgcacatatttttatgtgactatacccaatttaattattttattatataatatgttggctgtt

SEQ ID NO: 509974 - DNA, 201 bp, Homo sapiens
aatattacctacaggagaagttggagaagctctaaatcttgccaccccagatacaagactctggggcagtaagcaacttatataacaaaaacaagctaagyaatggcgggtcattgttcaactatgtctattcttcagcaaagttcaagcccctaccataattttaactttgttttatgaatgtggttttaactgtaaact

SEQ ID NO: 509975 - DNA, 201 bp, Homo sapiens
ctgaaatgctaaatctgaaaaatgtctcaaagaccagttcttcaggttttacaatagtaatattacctacaggagaagttggagaagctctaaatcttgcsaccccagatacaagactctggggcagtaagcaacttatataacaaaaacaagctaagcaatggcgggtcattgttcaactatgtctattcttcagcaaag

SEQ ID NO: 509976 - DNA, 201 bp, Homo sapiens
gaggctagagttttttaactactactttggcaggcagggggctggagaactgaaacaacggattggctggggatgaaattgcaggggtgtctaaaaccatwttcacacagccaagtcatttcctgggaagcggtctcaggacgaagtggcatctcttggtctcctgaaatgctaaatctgaaaaatgtctcaaagaccagt

SEQ ID NO: 509977 - DNA, 201 bp, Homo sapiens
agcaactgccaaaataagtggcaaactaacagaatacagttacaaatacaaaaaccaattgtgtttctacatactaccagtaaacattcacaaaataaatytttcacaataacttcagttataaaagcatcaaaaaataaagcacttcaggacaaatgtaacgaaagacacgtaagtcctctacactgaaaactgtaaaac

SEQ ID NO: 509978 - DNA, 201 bp, Homo sapiens
cagatattgttgtgttcttttaaaaatcgctgccatgggcagtagctcacacctgtaatcccagtttgggaggccgaggcagacagatcacctgaggtcargagttcaagaccaggctggccaacatggtgaaactctgtctctactaaaaaaaaaaaatacaaaaattagctgagcatggtggtgggtgcctgtaacccc

SEQ ID NO: 509979 - DNA, 201 bp, Homo sapiens
actggggtgcagtggtgcaatctcggctcactgcaaacttcacctcccaggttcaagcaattctcctgccttagcctcccacatagctgggactacaggcrcccgccaccatgcctggctaattttagtagagacagggtttcaccatgttggccaggctggtctcgaactcctgatctcaagctatccacctgccttggc

SEQ ID NO: 509980 - DNA, 201 bp, Homo sapiens
gccagacctggagtccctgctccttcactggtgcagcctcctcttctgtcaccaactacagtcaggaggtgacagggatgaggctgcagtcaggggatttkcaggcacagagggttgggtgagacaaagaaaacgacaggacatggtgacagattaggaacaagaacgaaggaaagggaggagtcagccatgactgggagt

SEQ ID NO: 509981 - DNA, 201 bp, Homo sapiens
cctcccaaattgctgggattacaggcatgagccaccatgcctggcccccattttttgttttttatatgcagggaagtaatggtactggtagtgtaggttcwctgtgtggttcaaacatgaatttccaacacaccaagctgctaatgagatagcagctttttttctgggacctagtgtcataaccaaattgatttaagacca

SEQ ID NO: 509982 - DNA, 201 bp, Homo sapiens
ctgaggcagcaaaattgcttgagcctaggagcttgaggctgtcatgtgtgatagtgctactgcactccagcctgagctacagagcaagaccctgtcgagaragagagagagaaggaaatggtatactttgaatggaaacagatactgaggagcgtttccatcaaacaacagaagagaatatactaacacttggcactggaa

SEQ ID NO: 509983 - DNA, 201 bp, Homo sapiens
ccatcctgcagcaatggacaagcatgtgggcttttcattttctgtgggctttttcagtggggatgtgacgtgctcctcctgcttggacacctcctgcacaraagagacaggtggacagaccttcctccttgccccttgtcctcacttcctccatccttccttctctcccattctactgattggcatctggtggcccccaag

SEQ ID NO: 509984 - DNA, 201 bp, Homo sapiens
atttctcagactgataagctctttggttgatgcattaagagagatttacacttgcccagtaatgcccatagactatgtatcaaaaccaatcctaaaaacasgttctctagtcttattctttaagactgaactataaagggaagagatcgaaatatttttctatttaaatatgatgaatatctagctgtctgcctatctgtc

SEQ ID NO: 509985 - DNA, 201 bp, Homo sapiens
ctcacctatggactggttgacggccttcatgcacaggttctccaccagagccttccctgggggtgcctggccgggggctctgggctgggagtgaaggggawgacccatcaggactgttccctgcctgcagctcccccggggaaaagaccctgccaggctttggagccagaccaggaggctttgtggccaatgccagcagca

SEQ ID NO: 509986 - DNA, 201 bp, Homo sapiens
aagcagacaagaaccacagcttcctgcttctccctgagaagagaaaggattgttagaatctcccacaacctccaacaaggctgattgataggaaccttctcctatacaagactagtctgtgaagaatgggagaggtgccttcctttgtctaatgcagaggcaacaacacagagagtcaaagaaaatgaagaattaggcaaa

SEQ ID NO: 509987 - DNA, 201 bp, Homo sapiens
acatctctgaccagaaacattccaacacgaaaataaacccctccccagccagagacatgcccatcccaagataacctcctctccggccagagagatgcagycccaagataacctcccctctgaccagagacattccaaccccacaataaacttctcctccacacagaaacattccaagcctgtgataagctctcttaccct

SEQ ID NO: 509988 - DNA, 201 bp, Homo sapiens
ataactagaataaccaatgcagagaagtccttaaaggacctgatggagctgaaaaccaaggcacgagagctacgtgacgaatgcagaagcctcagtagccratgtgatcaactggcagaaagggtatcagtgatggaagacgaaatgaatgaagtgaagcgagaagagaagtttagagcaaaaagaataaaaagaagtgaa

SEQ ID NO: 509989 - DNA, 201 bp, Homo sapiens
gtagaaataagaagaaatgttcaggtataatatgtgtggccagatctaagtctggcctttatataatcatgaaacctgacacatgattttattggtatgawttgactcagaatctcaaaagtgttaggaatttttaaatagaaagagaaaaaggtgagtggaaagaaaagggcacaggctatggagtgaggcagatctgag

SEQ ID NO: 509990 - DNA, 201 bp, Homo sapiens
cttcccccattaggtacacctttggccaacctgtgcaaggggaaacccaaatccgggtgtgcagagagtatttttcttcaagcaattgtgagaaaaatgamaatgaaatatgtgagcaatttattgcacaggtacagaccatgatctttactccaaaaaaagttctcactcatttttcattcttattctttctttgatttc

SEQ ID NO: 509991 - DNA, 201 bp, Homo sapiens
atacatggaaccattgtttcatatattgagccttgaactcctaggctcaagaaatctcccatttcagccttcaagtagctgagactgcaagcatgcaccaccacgcctggctaattttttaattttttgtagagacggagtctcgctatgttgccacagctggtctcaaactcctgggctcaaaggatcctcctgcctcag

SEQ ID NO: 509992 - DNA, 201 bp, Homo sapiens
catataaagccctttgcccaacttctggcacacaaaagatattaagtattagtttgattttaatatattgctattatggattattttacactgtctaaatrggtgcatgatacttcattgagatttaggaagatgatataaaattaatgaaacatgaattaattcaatcagccaacacttattgaatgtttttcatattcc

SEQ ID NO: 509993 - DNA, 201 bp, Homo sapiens
ccaaggagaagcctgcaacctcagagctggaatgccctcaaatccatgacactgggctcttcccccagaactcccaagaacggctgactgcactgagcaayagcctgggagcccacagagccacccaatggcaacttccagaaagaggtgtgagtaccacgctgtactggccactgcatgtaaacaactcaccattttcac

SEQ ID NO: 509994 - DNA, 201 bp, Homo sapiens
ggagaggctatattgctaaagattttaaagacattaaaagtataataaggtaatgttatatctttatgtcaataaatttaacaagttagattaagtagacraattatttatggaaaaaaaacagaatttaacaaactgacacaaaaagaaataaatttttgaatagctctttaccactaaaaaaaaaagaattggttaata

SEQ ID NO: 509995 - DNA, 201 bp, Homo sapiens
cagatcccaaaaggtcagggctcagcctgacaagactgtctcccacttccaatgccagtcacaagcacaggatgtggcctgagtttctgactgactggctytaaatctaggtatccctgacaccctcctcaggtccaatttgctggatggctcacagaactcaggaaaacacttaacatttactcatttgttttaaagaat

SEQ ID NO: 509996 - DNA, 201 bp, Homo sapiens
atatatacagtcatgcacacataacaatgaaccatatatacataacaatgtttctgtcaacaaagaaccatgtatacactgtgttcccataagactgtaayggagttgaaaaatttctattgcctcgtgattccatgaagtcgtagctcaagacactgcacaaacactcaggtatttgtggtgaggcaggtgcaaacaaac

SEQ ID NO: 509997 - DNA, 201 bp, Homo sapiens
atagaataaggatataaagaaaaatattttgtacaactgcacaatgtgtttgtattttaagctaagtgtatcacaaaaagagtaaaaaaaaaaaattagcygggtatggtggcgtgcgcctgtaggcccagctactcgggaggctgaggcgtgagaatcgcttgaacccaggaggcggaggtcacagtgagctgagatcat

SEQ ID NO: 509998 - DNA, 201 bp, Homo sapiens
gtaatgccctaggcctttacattaacttaccgattggtcattcagggcaacttccagtctgcaagttccattcatggtaagtgtcatataccggtgtaccrttttttatcttttatactgtaatctgcaagctccattcatggtaagtgtcatatgcaggtgtaccattttttatcttttatactgtattttactgtattt

SEQ ID NO: 509999 - DNA, 201 bp, Homo sapiens
aaacatactcctgccattttgttatatgtcttcttgctgttttgcggtcttctcttccttctttccttccttcctgttttcctcttagtgaaggtgatttyctctggcggtatgttttaatttcttgctttttattttttgtgtatctgttgtatgtttttttatttgaggttaccataaggcttgcaaataatatcttat

SEQ ID NO: 510000 - DNA, 201 bp, Homo sapiens
tcagatccagaatggtgataagggtaccttcccttacagaaagaagataacatatagaatagcaacagctgatgtcaaaaagcctcttttcttttttaaartagcggtgagtaactattactggaatggaatagataaacctaaatagaggtaaaggggtaatcccaggactcaggcttgcctctcttatagcattataat

SEQ ID NO: 510001 - DNA, 201 bp, Homo sapiens
aaacttctcctccacacagaaacattccaagcctgtgataagctctcttaccctaaaacccttaaatactcttagtctgtaagagagagtggtcctgaccaaaaaattggtcagaatcccctctcaggtttattctccaaaataaacctgtctttcactgttgagccatttttcatgtttctttcctctttctttaactct

SEQ ID NO: 510002 - DNA, 201 bp, Homo sapiens
taaatttttgttctctttgttaagtttttctgataggattctgaattccttctctatgttattgatgtggtttggctatgccccacccaaatctcatcttraattatagctcccacaattcccacatgttgtgggagggacctggtgggaggtacctggtgggaggtaattgaatcatgggggtgggtctttcccatgcta

SEQ ID NO: 510003 - DNA, 201 bp, Homo sapiens
acagagctactggaagcacaaaagtcataatttacatgaaggaaataaccttcctgaggaatacagtgtaattaaggctttcctctttgaaaaggcctaayatttctaaggagctaagaaatgaatttagcctacaaattcaaacttatttttcgtgtgtacaaaatttatccaacttgaagggagaaagaaactattttc

SEQ ID NO: 510004 - DNA, 201 bp, Homo sapiens
ggccacccttctcccagtgggcatggacctggcgcaggtactcgtaggaggggaagaaacagaccacccctccagaaaccacaccgcacaggttacagagratgcgacccacctcgtccatctaaggaaggaagggagggagggagcccccatggagcaacccctcagccacccacaaaccgcgtcttcaccttgagactc

SEQ ID NO: 510005 - DNA, 201 bp, Homo sapiens
gtgggaaccacggggtggtaggtgccacctcccaccaaacacacccagccgctgctgctgactgcgcctttctgacacatgtcacagcactagcgtccctrgggggcctccctattgccctggcactgagtcctcccttcttctgtccagggtcctgatgggcaccacaatgacaatcaggggctgcacaccccaggcaca

SEQ ID NO: 510006 - DNA, 201 bp, Homo sapiens
tataaagccctttgcccaacttctggcacacaaaagatattaagtattagtttgattttaatatattgctattatggattattttacactgtctaaatggrtgcatgatacttcattgagatttaggaagatgatataaaattaatgaaacatgaattaattcaatcagccaacacttattgaatgtttttcatattccag

SEQ ID NO: 510007 - DNA, 201 bp, Homo sapiens
gcacacaaaagatattaagtattagtttgattttaatatattgctattatggattattttacactgtctaaatgggtgcatgatacttcattgagatttakgaagatgatataaaattaatgaaacatgaattaattcaatcagccaacacttattgaatgtttttcatattccaggtgctgtattagcaattgtaacaat

SEQ ID NO: 510008 - DNA, 201 bp, Homo sapiens
atttaggaagatgatataaaattaatgaaacatgaattaattcaatcagccaacacttattgaatgtttttcatattccaggtgctgtattagcaattgtmacaatagaagaaatagaaaaagtataactggggacaaaacatatattagaattacataagtgttacaaacgaaacatgtatggccactgaggtgttacag

SEQ ID NO: 510009 - DNA, 201 bp, Homo sapiens
aaaattagcctggtgcagtggcacatacctgtagccccaggtactcaggaggctgaggtgggaggatcatttgagcccaggaggcagaggttgcagtgagscaggaatgtgccactgcactccagcctgggtgacagagtgagactccaaaaaaaaagaaagaaagaaagaagagagagagagaaaagaaagaaaaagaaa

SEQ ID NO: 510010 - DNA, 201 bp, Homo sapiens
acctccaggatttgggagacatgaatgtgcaagccaatatacacattatagaagtcccacaaggagaatagagaaagaagcagaaaacatatgtaacaaartaataattgaaaactatccaaattgagggaagaacatagacatccagattcaggaatcctaaaagattccaagtaggttaaacataaagaagtctacacc

SEQ ID NO: 510011 - DNA, 201 bp, Homo sapiens
aaattttttccccatgggaggtatcatagttaattacacaaaaacattttatccaaaaatttagtgaaaaatgcagctacatcataagatgagaatcaaayactgtaaaattgctgacattacagaagataatgtcaacccagaaaaaaattaggaagtcaacttgaatattaggagtagagcctctatattagcattcaa

SEQ ID NO: 510012 - DNA, 201 bp, Homo sapiens
ctcctctacactccaacggctgggattactggacaggaacacagggttgatgccatgtaattccggtgtaggtggagctgtattgggattccccaggtcaygttctccatgcccagctcttactgataaaggcccaggagatgttggagagagtgcttcatcataactggaattatctgaaccccggctagagtcttcttg

SEQ ID NO: 510013 - DNA, 201 bp, Homo sapiens
tagccgcagtggtgggactagcagaaactcaggttccgaccactgggatgggccattcccctgtggctagggctggtctaaatgctccctctgtgggcackggctgatttctgtcccatgtcgctatctgctttgacagagctgcaccgagttccactgcaaagtcccataatcacagcactcttcctccccaaagcacag

SEQ ID NO: 510014 - DNA, 201 bp, Homo sapiens
agtggtgggactagcagaaactcaggttccgaccactgggatgggccattcccctgtggctagggctggtctaaatgctccctctgtgggcactggctgawttctgtcccatgtcgctatctgctttgacagagctgcaccgagttccactgcaaagtcccataatcacagcactcttcctccccaaagcacagactctct

SEQ ID NO: 510015 - DNA, 201 bp, Homo sapiens
gcaccgagttccactgcaaagtcccataatcacagcactcttcctccccaaagcacagactctctctccacaccacactgtgctgctgggagatggggaargggtggcattggcaaatcaagactgtctctcctgtcctcgtcagtgcctcttttgttgatatgatgttaaaaccaggtactgtgactgctcatctgattt

SEQ ID NO: 510016 - DNA, 201 bp, Homo sapiens
ggatgagagtgaggctttcctgaatagatctttttatattgctttgacttttgagccatacaaatatttacatatttaaaaactacaagtcagaaaagaaraaagcaaattctaaaattgaaaagaaaatgaaacaaaaacagcctagctatctatgaaactgacaacagaagcacacggagagaagcctggttccacgtg

SEQ ID NO: 510017 - DNA, 201 bp, Homo sapiens
tcaataagtaaatgaaattgtgcaccctgtagtagccaagccatggcccacatggaatcgctatcattacatccttaattgagagtcactaccaaaatatycataactaagggatacttcctgcaccagaaccaaagggaagagatcactaggggatgggagcttgtttccacgacttccttctatgagcattgtatccag

SEQ ID NO: 510018 - DNA, 201 bp, Homo sapiens
tcaattcctctaatttatgggctaacagaaataactagaatgaacagttttcattcttactttttaattcatccatttatttatttaatagtcactgaacrtaagcactatcttaggtatttgggatatagtggtagataagatacagtccatgtttttaaaaaaactatgaaagataaagagaaaaagattataatccag

SEQ ID NO: 510019 - DNA, 201 bp, Homo sapiens
tatagtggtagataagatacagtccatgtttttaaaaaaactatgaaagataaagagaaaaagattataatccaggatcatcaacactacagaattatggyctccttcatcactgtaccttctctccttatgtatgtccaaactctactgaggagaaataataaagtttttcttatttttgaggccttagtacctaagata

SEQ ID NO: 510020 - DNA, 201 bp, Homo sapiens
cttctctccttatgtatgtccaaactctactgaggagaaataataaagtttttcttatttttgaggccttagtacctaagataatttggtgatccaaccayataaactgtttctgtaaactttcctctatgaaaatgccttatcgaattgactgctatcttgaaattaatatgcaggtcaaacagtcacataatggaaaag

SEQ ID NO: 510021 - DNA, 201 bp, Homo sapiens
aattaatatgcaggtcaaacagtcacataatggaaaagatacaatcacacattggttcattcaaccacatatatgcatactcagaaaaaaaacaaaatcarttaagaccgggtttttgcattacgtgtgaagagctcagaaggaggaagtaccaccttgccctcactcatttcccacaatttatattctcacattagcatt

SEQ ID NO: 510022 - DNA, 201 bp, Homo sapiens
cacattagcatttttttttttttttagagatggagtcttgctctatctcccaggctggagtacagtggcacaatcatagctcactgcagcctcaaactccygggctcaagcgaccctcccacctcagcttcccaaatagctaggactacaggtacacaccagcatgccagctaggtttattcttcagaataaagcttgatc

SEQ ID NO: 510023 - DNA, 201 bp, Homo sapiens
gagcagcccaagctaagacaattattcactctaaataactaatttctcatttaacatctaattctaaagatgtgttagctgtagagaggagcagcatcctrgaattgacctttctgtcaataactggattcttataatgtagcaaataagataatattacatctctaccttccattgcaattttctccttaattaaaggga

SEQ ID NO: 510024 - DNA, 201 bp, Homo sapiens
gaagatgctggacttggtatctcttccactgcctctctccgagccttccagcccttctttgtggagctcacaatgccttactctgtgattcgtggagaggycttcacactcaaggccacggtcctaaactaccttcccaaatgcatccgggtaaggaaaatgagggtgaacaggaaaggtgggtagaacaaaagattcctt

SEQ ID NO: 510025 - DNA, 201 bp, Homo sapiens
aaaaattgtccagagttccaggcataaaaaatattttaggttagaaatcatgtacaatgactctactccaattatactgattctcttatggaaaaaatgascaacacttttaaaaataaataacaattgctaaaggtctactatttgacacttgctctactgagtattcccatatctattatttaattttattctcatatt

SEQ ID NO: 510026 - DNA, 201 bp, Homo sapiens
tctacataggatattcataggattatataggttatttatatactgcttgtggggaaaaatgaattgttttctatgaaaaaatacagttgactctcttctamcatctaggtgtatagtcagctacattccagcgaactacatggctattatttcagaggacttaacttagaagatggccttaaagtgccgtgtcttgaagat

SEQ ID NO: 510027 - DNA, 201 bp, Homo sapiens
tctaatataaatccccattttgctcctacgtctaccctcgaatttgatttctactattttaaagtattctactatatttaaagtgtttataagtgagatamtatccctagttcaacaaaaatgccaaattcaaagtagtgaaagtacagtggggtatgatatgagatgtctttttttgtcctctcttatttaaaggttttc

SEQ ID NO: 510028 - DNA, 201 bp, Homo sapiens
atccaaacaatataactcacttttgagcttcagtcaatacttttctgcttgctctgcacttaattttaagttcttggttcagacaaagaatgtgttttacygataacctcttcttccagttcctcaggctctgccaatctttcgttcctcattcctgatacgataacccaatgggaggcaagtggcttttgtgtgaatggc

SEQ ID NO: 510029 - DNA, 201 bp, Homo sapiens
tgtgggggttttgagtcacccatttgtctagacaccatggctagtgtaggaggcggtactgaaggggcgggggtcaaggctactagttcactgcttggagyattagcattcacattagccactgattcagctttttctggaaaacaaacacagattaagcaacagacatgagatgacatattgatccatctattagttgag

SEQ ID NO: 510030 - DNA, 201 bp, Homo sapiens
ttgctgaatcagtgaatggggctggatctgtgtgtaggtggctataggaacaatcccagaatacaacagagagaaaaaagagcagagaataataatcattytaaattaaaagtaaattcatttttccaaggtataacctagttttggaattatgcggtgaaaagaaatctagtcagtatgaaacttggacatcacttcgtc

SEQ ID NO: 510031 - DNA, 201 bp, Homo sapiens
gaaaatcatttgaattcttttcaaataatttgaatttttatagcacttgaattatcttcaagtgctataaaacaatatcaaatggcttagcatacatattrtcagaatcttagaaggagaaacgagaaagaacaagcagaagacatgtttgaagagacaagaaatgagaattttccaaaaataatgaaacacatcaaagaa

SEQ ID NO: 510032 - DNA, 201 bp, Homo sapiens
ttttattcattttcacatccctaaaacacagcccagggcctgacactgcagaagcacttaatattcactgaaagaagagatacccacagagttaaagatgycaacgtcatcccacaaatgacttggattttacaaatcatcagcttagaccaccatctgagtcttgagagtcagcacctgtcagctctgacctaactcagt

SEQ ID NO: 510033 - DNA, 201 bp, Homo sapiens
caaagtgctgggattacaggtgtgagacaccacgcccggcctataatatatattttttaattattatccaagggtgctgacataaatttccaatttattcrtgccaaaaaattagtgatgataactgccaatcagtacagctaaagaaaatgttttcattctggtgtatttggaagtcttctgtctttatattatcccagc

SEQ ID NO: 510034 - DNA, 201 bp, Homo sapiens
gcattcctcaagcttctcctgtaaacctagcattctgcaataaattgtgaaggaagagatgtcctttaccctaaaggtgttagtatctttggaatgtgtcyttctacaagtaatcaagtaagaatgtgtgaccatgtttttatgcaaatatggataggaagaagtagagaaaaaaggaaatcataacctttactctcccca

SEQ ID NO: 510035 - DNA, 201 bp, Homo sapiens
taagataatattacatctctaccttccattgcaattttctccttaattaaagggagcacctgataggtattcagattatttcaaaagaaagaagctaaacrtttgctgcagaagtggtcatctttcccatcatccttaaatatataaattacgattaagcctatagcaatattcttgtttttttccccactgaggtctcat

SEQ ID NO: 510036 - DNA, 201 bp, Homo sapiens
gggagcacctgataggtattcagattatttcaaaagaaagaagctaaacatttgctgcagaagtggtcatctttcccatcatccttaaatatataaattaygattaagcctatagcaatattcttgtttttttccccactgaggtctcattttccgcatcctcatcaatcttgtatgtggcaagaaaaaaacagttcttaa

SEQ ID NO: 510037 - DNA, 201 bp, Homo sapiens
gtgattatgataccaccagatgtcccattttgatgttgtttttattccactcctgaaagatggttgctgaagagtaaacatttatgggctctgctcttaaytgtctctttgcctacttggaccctgcatcagcacaaataaagagttgctcttctaaagttaagggagggccaggcacagtggctcacacctgtgatccca

SEQ ID NO: 510038 - DNA, 201 bp, Homo sapiens
cacttgaggtcagaagtttgagaccagcctggtgaatgtggtacaaaaagcctgtctctactaaaaacaaaaataaaaataaaaaattaggcatggtggckggcacctgtaatcccagctacttgggagactgaggcatgagaatcgcttgaacccaggaggcagagattgcagtgagccgagatggcatcactgcactcc

SEQ ID NO: 510039 - DNA, 201 bp, Homo sapiens
gttatgcctgagtcagattggaaagtaaaacacgatatataaggttaaataaaacccatctgatgagaatttatagtttgtagggcatgactccccagatytcttagacaggaatttgggcaaaaaaaaaaaaatcagagctgggtcctcacttcaaatgtctcctttttaaaataggactttgccttcactttttcacaa

SEQ ID NO: 510040 - DNA, 201 bp, Homo sapiens
attctaaaggcttgaattttttttcaagataaaaaattgagaaacaaaatacagcattcaaatacttcaaaacatgagtcttacataaatatcagataaastgtcaaacgtgaatgtagcttaaaggtttatttaactcatcaatgagggggaccagctggatggaaaaattggttctaaggagaatttgaggaaccacat

SEQ ID NO: 510041 - DNA, 201 bp, Homo sapiens
aaaaacctgtagctgggcgggtcacagagcggtcaaggccctctgcgattttcagccaatacacagaaagaaagccaggcactggggaaccctacagtctyatattttaaaataatatcattaatatgtttttcttcagacactttttcaggtgaagtatttaaagcaaaggatgtaattactaatttgaaaaaaatttac

SEQ ID NO: 510042 - DNA, 201 bp, Homo sapiens
tatcctataatatgaacacattaattaccatcatctaaaaacatgcaaataacgttaagaaatttcaaaggaaaatctgacaggttacaaattactagagsttaatatcaataagaattttccctataattttgtgtaagtacacaatgctaaaagtcagtaagccctgctccgtaaaccatcatttgctccactttttaa

SEQ ID NO: 510043 - DNA, 201 bp, Homo sapiens
cacaatgctaaaagtcagtaagccctgctccgtaaaccatcatttgctccactttttaaaagcttgtggaaacagtgtctgtcaatagatggatatccaarttcacagcagccttactctcaacagtcaaaaggttgaagcatcccaggtatccactgatgaataaatggacaaacaaaatgtagtatatccatataatag

SEQ ID NO: 510044 - DNA, 201 bp, Homo sapiens
gaataaatggacaaacaaaatgtagtatatccatataatagaatgttattcagccataactttgatacatgctacaacacggaagaaccttgaaaacagtrttctaagtgaataagtgagacactaaaggacagaataggcaaatacatagatatggtaagtagaatagtgattaccaggggctagagggaggggagttat

SEQ ID NO: 510045 - DNA, 201 bp, Homo sapiens
aaaggacagaataggcaaatacatagatatggtaagtagaatagtgattaccaggggctagagggaggggagttattgtttaagaggtacagagcttcaaytgggaatgatgaaaaagttctggagatgatggtagtgatggttgtacaacaatgtgaatgtacttaatgccactcaattgtacacttgaaaatggttaaa

SEQ ID NO: 510046 - DNA, 201 bp, Homo sapiens
acctcctgggctcaagggatcttactgcctcagccccaccactagctggaactacaggcccatgccaccacactcagctaattagtagtagtatttatttrtttatttattcttagtggagatgaggttttcctatgtcgaccagactggtctccaatccctgggctcaagcattcctcccaccttggcctcccaaagagc

SEQ ID NO: 510047 - DNA, 201 bp, Homo sapiens
tttgtcctctcttatttaaaggttttcatcaacagctcttaattaggaaaatagagcaaaagccattagaattagagaaactaaggaactcaaagacatgraatttaggaaatgtcagtgaagtatctctaaatatatgacaattagagatggagaaataaataagtggaaattgaaaatatacatagaacaaaaaaccag

SEQ ID NO: 510048 - DNA, 201 bp, Homo sapiens
atctaaaattgattttatcttgaaaggcaacaggattaaagatttttaccaactctcacctccggaaaccagtattgtgcaaggattctaaccatcttgamtctactgattacatacccttaggtaagtcacagtataatgcgaagggcaggtgacaggttataatctcttaatgcttttaaactgattgggaaaagaggg

SEQ ID NO: 510049 - DNA, 201 bp, Homo sapiens
actgattacatacccttaggtaagtcacagtataatgcgaagggcaggtgacaggttataatctcttaatgcttttaaactgattgggaaaagaggggagrtgattattttcttttgctttgtcttttaattcatttaatgtgcctgtcatgtcagatgttagaaatacagtgagaataatgcaggtaaatctttatattc

SEQ ID NO: 510050 - DNA, 201 bp, Homo sapiens
aggtgtttttcatgtttgtgttcaggtctctgtgcctttgctttggcctcaccacgatggaagggaagtgcccacatcgcagggagcacacagaatatgayggctaacatgctacatccagcctgccattatccgcaggggtatggcgtcattggattcacatttatcattcaacttccagatcaacaaagcttgtcttca

SEQ ID NO: 510051 - DNA, 201 bp, Homo sapiens
taaatttttctaaagaaaaaagtttaccaggatccaatgtcgatcttcaagtctcggctgcttcaaactctctttatgctctttgggcggtagaccagagkgtattgctactaaggaattatggtcagctgccagcacaaactgtgagtgattaaaaccatctttgtttaccacccacagtatagttttatgtctttacct

SEQ ID NO: 510052 - DNA, 201 bp, Homo sapiens
tcagtgcggttcccagaactgtggtagctccctggtttccacagacactgcagttgatgaaggctgacagtttaattccaatgaacggatgtgcatgtgcracgggcacagcaactgggtttgttttcactctattctcgcttaagtgaggcaataatacaaagttgactgtgggctcccagaacacttgctggtgctaat

SEQ ID NO: 510053 - DNA, 201 bp, Homo sapiens
tctattctcgcttaagtgaggcaataatacaaagttgactgtgggctcccagaacacttgctggtgctaatgcctacactgtcaactgcaattcaagaacmgatgacaaattcaagacaatgccctgcaaatgatgccaatttctttttttttttctttttgagacacagtctcattccattgcccaggctggaatacagt

SEQ ID NO: 510054 - DNA, 201 bp, Homo sapiens
cctgagtagctaagactacgggccatactggcaatttttttttttttgagacggaatctcgctgtgtcgcccaggctggagtgcagtggcacaatctcggstcactgcaagctccacctcccaggttcacgccattctcctgcctcagcctcccgagtagctgggactgcaggcgcccgccaccacacccggctaattttt

SEQ ID NO: 510055 - DNA, 201 bp, Homo sapiens
ccagctcagctcctatgaccaggtgctctgccggccaccagcaccccagctttaatcacctggtgtgaatagtgagagtcaaggatcgaggtgaagtcggytgctcacatctagcttttcctatttccacactaagactaaaggtcttcatatttgtgggagggagaatattgtatctcaacaccgtctggtaggaagaaa

SEQ ID NO: 510056 - DNA, 201 bp, Homo sapiens
taaactcttgatctctatcttactggtccgatttgtgtgttgtcacgtagaatgaaaatatgtttagacggtataagaaacctctgatggaaaaatctggktgtctccctgcaggttgctaagaaagagtgatgtttcagggaggctgagtcttgaagcagcagcagcagatctgacacttgtccttcacagctcctttcc

SEQ ID NO: 510057 - DNA, 201 bp, Homo sapiens
acagaataggcaaatacatagatatggtaagtagaatagtgattaccaggggctagagggaggggagttattgtttaagaggtacagagcttcaattgggratgatgaaaaagttctggagatgatggtagtgatggttgtacaacaatgtgaatgtacttaatgccactcaattgtacacttgaaaatggttaaaatagt

SEQ ID NO: 510058 - DNA, 201 bp, Homo sapiens
gcaagctcttttccaagagattgctgggtggataggaaggatctgaggggcctgaaggaagtggaggccaccacacacacacacacatgcacgtgcacgcrtgttttcttccttatatcccaactttctcaacattgcagtctggaacttattggattccagtgaattaagggaaaactttttaaaagaaggcatttaagc

SEQ ID NO: 510059 - DNA, 201 bp, Homo sapiens
tcttggaaatgaaatgggagataaaatggaatatggcagccctgggtcttccctgctccaccacttttcagattaagggttagagaaatgtgtaacaatgygtggtgtcaatttgaatacctcataatgtcctcataatgtccaactccatcatctactaagtatatattccactacacaagaatatgactataactgaag

SEQ ID NO: 510060 - DNA, 201 bp, Homo sapiens
agcagcacacaaatctatcacctacagcctggctgattgagggagaccctgtctcaaaaaacaaaaagaaaaaagaaaatacaagcttacacaagtgcacrtggtcaaaggctatacccaggaaatagctgtatacagatggagagttattttgtttgaattattttttgatttttcaaagcttctgctatgttatattgc

SEQ ID NO: 510061 - DNA, 201 bp, Homo sapiens
gagatcagtttatttggctatgtaggataatgcccttgcacttagcatctaaagtgaaatatttttattttaaaaggctagaaaaaggctttacagccacraggttttctgacagaaatgctctaagaaggggaggagggaaagatttccttccttcttggcaaatgggaaactcatttttgaaatctacccttacaatag

SEQ ID NO: 510062 - DNA, 201 bp, Homo sapiens
gttcagtgccagaattcaatcaatagtacttttttgtattgctttcaccaaaatttctatccctcttccccagagatgaaattagtactctagaagttctyaggatactggggtatatgttgaaaatgtgagcattccagccatggtgagtaccagaaaaaaaaaaactgtacttacatagaaagtttaccaagtaaataa

SEQ ID NO: 510063 - DNA, 201 bp, Homo sapiens
gctctaggggtatggtactaaaccattcatgaaaaaccatccgcgtgatccaatcacctcccaccaggccccatctccaacactggagattacaattcaaygtcagatttgggtggggatgcagatccaaaccacatcagaaggcaacataggaatcaggggctctttgaagaaatggctaattctagggccaggacaggg

SEQ ID NO: 510064 - DNA, 201 bp, Homo sapiens
attagaaaatagaataccttgtacagttataaattctctgtgtgagatcagtttatttggctatgtaggataatgcccttgcacttagcatctaaagtgamatatttttattttaaaaggctagaaaaaggctttacagccacaaggttttctgacagaaatgctctaagaaggggaggagggaaagatttccttccttct

SEQ ID NO: 510065 - DNA, 201 bp, Homo sapiens
accaggccccatctccaacactggagattacaattcaacgtcagatttgggtggggatgcagatccaaaccacatcagaaggcaacataggaatcaggggytctttgaagaaatggctaattctagggccaggacagggaaagtacaaaataagcttggaggatcttccagtcttttaatgttaaaaaataagcaagttaa

SEQ ID NO: 510066 - DNA, 201 bp, Homo sapiens
ttcttccttctccttcttcttctccttctccttctactctttctcctttgtcttcttcctttttttgtttgtagagacagggtttcactatgttgcccagrctagtcttgaattgctgggctcaagtgattctctcaccttggtctcccaagtgctgggattacaggtgtgagccactgtgcccagccttttatgtgagat

SEQ ID NO: 510067 - DNA, 201 bp, Homo sapiens
ccaaataatatatgtagatactccccattcaggatgtggaatttaactctcctccctttgagggtagtcagggataagagactcacttccaaagagtacaytatggataaaaggaaatagtaactattcattaaagaatcttggcaaataccacctcaaccacatgaacagggttcactgcgtgaaccaccagtgatgagt

SEQ ID NO: 510068 - DNA, 201 bp, Homo sapiens
tttcttataatgttgagtgtgtcaggccccaaggggaaggcctctggccttcttctgccctcctttcatctgcctcaaggcaggactctaattttcccctrcctttctgattgtgggtcttaaaaccttccccagagagggtcctgccctttactggggtgacaaggggagggggtcagcagcaagaatgctgatgtcctg

SEQ ID NO: 510069 - DNA, 201 bp, Homo sapiens
gctgatgtcctgaagcttccataaaaacccaagagaactgtgtcagaatgcttccagatgactgaacctgtggagattcctggagagcagccttcccagaragggcatggaagctccacacccctttccccataccctgccctacagttctcttcatctgtatcttttgtaatatactttataataaactgataaacataa

SEQ ID NO: 510070 - DNA, 201 bp, Homo sapiens
tgattattttcttttgctttgtcttttaattcatttaatgtgcctgtcatgtcagatgttagaaatacagtgagaataatgcaggtaaatctttatattcrtgaagtttacattgaatttgggatgcagacaatatacaaatggctgcatattgtcatttgtatatttcttgtgttgctgtaaagaaatacttgaggctgg

SEQ ID NO: 510071 - DNA, 201 bp, Homo sapiens
ctgaattttcatgccttgatatttatataattttcactggagtccacttcagttaggcagacacccatccctaaggtctcacttctatctttctcaaagayattctgcctcattaccaaagcacatgagctcctggaaagataaatatctaaatattctataaaatactgaatattacctcactaataacatctgagatga

SEQ ID NO: 510072 - DNA, 201 bp, Homo sapiens
atactgaatattacctcactaataacatctgagatgagaggcaaagattatgactatcaggaataaccagaatttggggccaaattgtcttcattgtaggwctaacagagaccagatccatcttctggttatttattcattttccaaatgtgtaggtataattgacaagtctagcaatgatcagaattcccactgtggctc

SEQ ID NO: 510073 - DNA, 201 bp, Homo sapiens
cactgcccgagacctgatctcctccgtcagcagccctgccttctccaggtactgcaagacatagatgatgggagcaaacaagaccatgttctgctcgccayagccactgggcatctgcaccagaccatccaggttctgcagggctgtgcccataatgtctcctgggatccaaaaggagagagagaaggtaggggtacagag

SEQ ID NO: 510074 - DNA, 201 bp, Homo sapiens
accttcttcctaccctgactctcttccatttttaactagagtacaagtctaatcccatctgtactgttgcctacactgtatttccctcctatataaaatasgctctttttccttcatcacttgttattagttacactctccggataggtccgtatgtcccgccccactccacacctttgcagcctccattcgccttttcct

SEQ ID NO: 510075 - DNA, 201 bp, Homo sapiens
agctgtaaatacagatgaagctctgcttgcttgctcactgctcaccacctgctgtggggtccacttcctgacaagccacagaccagtaggattggggaccmctggtctaggactctcctccctccctccctcccttcccttctctctttctctctctctctctcatctaggactctttctttctctcttcctttctttctt

SEQ ID NO: 510076 - DNA, 201 bp, Homo sapiens
tcatacatatgaaaatcaaactttgagttgcaaggatttaatctatgagtgactgacatcccatagggttgggggtgaggattaaacaagttaaaggtgcrgtgactcattcttgtaatcccagtactttggaagggtgaggcgggagaatcacttgaacccaggagtttgagaacagcctgggcaacagagcaagaccgc

SEQ ID NO: 510077 - DNA, 201 bp, Homo sapiens
tgtatcttttgtaatatactttataataaactgataaacataagggtttccctgagttctgtgagctgctccagcaaattaactgaactcaaaggggaagytgtggaaatcccaacttgaagcttattggtcagatgttccagaggcccagacttgtgactggtgtctgtgggtgtagggggtgatcttgcatattgaatc

SEQ ID NO: 510078 - DNA, 201 bp, Homo sapiens
tatgggccatggatcaaagaaaagtcagtaagtagaaaagaaacttatgtaacatagatgctggaactagcaaacaaggactttaatatctgcataaataygttcaaagacttagaagaaaatatagtcataatgaataaaaatttgaagaatctcagagaagtagaaactaccaaaaagaatcaagtgactattccagaa

SEQ ID NO: 510079 - DNA, 201 bp, Homo sapiens
attccagaacagaacagcattcataatttttaaaaataactgaatgagggccaggcacggtggctcacagctgtaatccagcattttgggaggcgggggcmggtggataatttgaggtcaggagttcaagaccagcctggccaacatggtgaaaccctgtctctactaaaaacataaaatattagcctggccaacatggtg

SEQ ID NO: 510080 - DNA, 201 bp, Homo sapiens
ttttagtagagatggggtttcaccgtgttggccaggatggtctcgatctcctgacctcatgatccgcccgcctcggcctcccaaagtgagccaccgtgccyggcagaatatgtatttttaaaaaccacccaggtgattcctaaattgctgctacaaagaccagtttggggaacttgtgatctaaatgcttatctatatttt

SEQ ID NO: 510081 - DNA, 201 bp, Homo sapiens
cctcactaataacatctgagatgagaggcaaagattatgactatcaggaataaccagaatttggggccaaattgtcttcattgtaggtctaacagagaccrgatccatcttctggttatttattcattttccaaatgtgtaggtataattgacaagtctagcaatgatcagaattcccactgtggctcctcgtgtgtggaa

SEQ ID NO: 510082 - DNA, 201 bp, Homo sapiens
gtttgccgccacatgcattattagagttatcttgaaaaccagcagtttctctgtaggagtcttttaaagccacttatctgttgtgtaaagataggtttagytgaaactagatcattccatctgcctttaaccaggcactcctaacctgtaatatgctgcactctgaaggggttcagggaggaaagtcaccacaatgtgacg

SEQ ID NO: 510083 - DNA, 201 bp, Homo sapiens
aacagagaccagatccatcttctggttatttattcattttccaaatgtgtaggtataattgacaagtctagcaatgatcagaattcccactgtggctcctygtgtgtggaataaacacattggagtggatgtgaaaaggttctgcctatcttatcctaaatgaactagaagttgccattatactcacagttccctgaaaat

SEQ ID NO: 510084 - DNA, 201 bp, Homo sapiens
tcagggaggaaagtcaccacaatgtgacgcttctgttcttccccgaggaggtgacacataacggtgacatagattcagagtgacaaatccagtgcatactstataatcaatgtcagtaaagtttaaattcttgcttttttaaataaaaataaaatggactaggaattctggtcttcctgcatctcagaggcctcacttgca

SEQ ID NO: 510085 - DNA, 201 bp, Homo sapiens
attgacaagtctagcaatgatcagaattcccactgtggctcctcgtgtgtggaataaacacattggagtggatgtgaaaaggttctgcctatcttatcctmaatgaactagaagttgccattatactcacagttccctgaaaataaactcttccatggcctccccatttcactcccttctgattcccagtctcagaacaga

SEQ ID NO: 510086 - DNA, 201 bp, Homo sapiens
taccctttcaagtctgaagtttggcagtcactaagtgggccccgccactgtggcagcggcaccccatgactgtgagatccattttgcaaagataaataaamcacttctaagagtaactgggaataactgaaggcaggaagttacagtctctgctcagtgacacataggtctttcttcctcctgaccactgaacactgttga

SEQ ID NO: 510087 - DNA, 201 bp, Homo sapiens
taaaatgggtaccggtgatgtcccgtgccttccagatatgaacaaaaggggaagatgagttggatcttctctcagggataaacttgcaccagccatgcttragtgagctggtgcttaatcacttttccttcatggacagaggatctagactcattcttctgtgcttgtttgtgttattctttgacagcctgaaggtattga

SEQ ID NO: 510088 - DNA, 201 bp, Homo sapiens
agaagttgccattatactcacagttccctgaaaataaactcttccatggcctccccatttcactcccttctgattcccagtctcagaacagagcatctcaytggtcgagcctgtcatttacctgccccctggattcaaggtaatctgggaatggagtcttctaacttctttactggaagtgaaacgcatatgttgggaaat

SEQ ID NO: 510089 - DNA, 201 bp, Homo sapiens
tttctccaagtcaggccagtgttctaaggtcataggtctaaacagttcccaccaaaaaagatttagtataaaaaagaaatatatcaacagcaaagtaaagktataggaaagcctccatccataagaaaatcattttcatagactaaatcagcttgagagcaggcattgaagaacttatctcggtctaaacagcaaaacaat

SEQ ID NO: 510090 - DNA, 201 bp, Homo sapiens
accgctactgcatatagttacattccacccctaaagatttttttttattatttactaggtcaccggctcctatagctactagataatgttaggggataagmgatgaatacttttgttgagtgcctgttataaatttagcctgagaataatctatcatgaggcgagctatactgattatgggccagtagtttaatttttata

SEQ ID NO: 510091 - DNA, 201 bp, Homo sapiens
aggacctgtagctgtgcaggatgcaaacagctgggcatcagtgactttcctcctgcccccggtttgtccctgatggtggcagaagatcccagctgaccacrgcccctttctctggggtcagagggagaagacaggcgcagtcagcaggggcagctgttgcaggtgggagggttattttcccacaggaacaaaggtctccat

SEQ ID NO: 510092 - DNA, 201 bp, Homo sapiens
aagagggtacatgaccatatcgcatttcaccctccttacaaatggagcagaattaccgctactgcatatagttacattccacccctaaagatttttttttwttatttactaggtcaccggctcctatagctactagataatgttaggggataagcgatgaatacttttgttgagtgcctgttataaatttagcctgagaat

SEQ ID NO: 510093 - DNA, 201 bp, Homo sapiens
ccccggtttgtccctgatggtggcagaagatcccagctgaccacggcccctttctctggggtcagagggagaagacaggcgcagtcagcaggggcagctgytgcaggtgggagggttattttcccacaggaacaaaggtctccatgatgatacggggtctctatagtcatgttgagagcctaatggcccttggcataattg

SEQ ID NO: 510094 - DNA, 201 bp, Homo sapiens
ttttaattactctctcatcgttcaacattcaataaatatttatagagcgtctactatgtgctaaaccgtggaagcttggattgcatcagtgcacgaaacaragataactgccttactgccttcattaacctttacagaagggtctgggggatgcctcgtggattaacaactgggattgatgccttttctcttgctctcagt

SEQ ID NO: 510095 - DNA, 201 bp, Homo sapiens
gatggtggcagaagatcccagctgaccacggcccctttctctggggtcagagggagaagacaggcgcagtcagcaggggcagctgttgcaggtgggagggwtattttcccacaggaacaaaggtctccatgatgatacggggtctctatagtcatgttgagagcctaatggcccttggcataattgctggtgtcggggtag

SEQ ID NO: 510096 - DNA, 201 bp, Homo sapiens
gctagaaagggcagaggcagatggacctgctccatctcacctcttaaggtgggcaggacggagatgccacagtggatgccactgctgccacagcctcctgyggactccaagcaggaagcctggctctcagccatgcaggatggaaagaaagattctattccaggaggggagctgccctggaacgccccaaggacagccagg

SEQ ID NO: 510097 - DNA, 201 bp, Homo sapiens
aaagggcagaggcagatggacctgctccatctcacctcttaaggtgggcaggacggagatgccacagtggatgccactgctgccacagcctcctgcggacwccaagcaggaagcctggctctcagccatgcaggatggaaagaaagattctattccaggaggggagctgccctggaacgccccaaggacagccaggaccca

SEQ ID NO: 510098 - DNA, 201 bp, Homo sapiens
cagaggcagatggacctgctccatctcacctcttaaggtgggcaggacggagatgccacagtggatgccactgctgccacagcctcctgcggactccaagmaggaagcctggctctcagccatgcaggatggaaagaaagattctattccaggaggggagctgccctggaacgccccaaggacagccaggacccactgttc

SEQ ID NO: 510099 - DNA, 201 bp, Homo sapiens
gcagatggacctgctccatctcacctcttaaggtgggcaggacggagatgccacagtggatgccactgctgccacagcctcctgcggactccaagcaggargcctggctctcagccatgcaggatggaaagaaagattctattccaggaggggagctgccctggaacgccccaaggacagccaggacccactgttcattca

SEQ ID NO: 510100 - DNA, 201 bp, Homo sapiens
cgtcctcccgagtagctgggattacaggcatgcaccaccacgcccagctaattttgtatttttagtagagacgggttttcttcatgttggtcaggctggtstcaaactcccatcttcaggtgatctgcccgccccggcctcccaaaatgctgggattacaggcatgagccaccgtgcctggcctaattgttacttattgtt

SEQ ID NO: 510101 - DNA, 201 bp, Homo sapiens
ctcagccatgcaggatggaaagaaagattctattccaggaggggagctgccctggaacgccccaaggacagccaggacccactgttcattcaggattcccscattttctcctacgggagctaacgcctgtgcctgggtcctggcagcgctctggactccacactctcctcctgggtttcacctttgtaacaggatccctgc

SEQ ID NO: 510102 - DNA, 201 bp, Homo sapiens
ggttgacggccttcatgcacaggttctccaccagagccttccctgggggtgcctggccgggggctctgggctgggagtgaaggggatgacccatcaggacygttccctgcctgcagctcccccggggaaaagaccctgccaggctttggagccagaccaggaggctttgtggccaatgccagcagcaggggtccaggtgac

SEQ ID NO: 510103 - DNA, 201 bp, Homo sapiens
ccgggggctctgggctgggagtgaaggggatgacccatcaggactgttccctgcctgcagctcccccggggaaaagaccctgccaggctttggagccagamcaggaggctttgtggccaatgccagcagcaggggtccaggtgacatcacagggaagatcaagagggtgtggaggggcatccaagcttccggagggggcag

SEQ ID NO: 510104 - DNA, 201 bp, Homo sapiens
ctgctctgctcttttctggtaaatatttaggtttatagttcatttatctcataattaaacaatgctaattttttttctaatttagtctattgataactaaratagtagaaagtaggatgctaccagccctcttaaataaaggaaagggaaggggaggggagggagattgaaagaaagaacaaaaggaaggaaagaatgaaa

SEQ ID NO: 510105 - DNA, 201 bp, Homo sapiens
ggttgcagtgagctgagatcgcgccactacactccagcctaggtaacagagcaagattctgtctcaaaacaaaacaaaacaaaaaatgggtcaggcacaawggctcatgcctgtaatcccaacactttgtgaggctgaggtgggaggatcacttgagtcccagtatttaagaccagcctgggcaacatagtgagacgcatc

SEQ ID NO: 510106 - DNA, 201 bp, Homo sapiens
caggatgtttttcagaaaggttatatagacatatgagactagatggtctggtaaaagaatgacaggtgatagacaaaaggcaaacaaaaaatataatcagraggtaataagtgctatgaagaaaagaaaagcaggataggggaataggttgagaagagagaactatttaacggcttgtagcaccaggatctccatagttaa

SEQ ID NO: 510107 - DNA, 201 bp, Homo sapiens
aattatattaaagggcttgtttctgtctcttctagagatatgtctgggaaccaaggtacggattggtagtggcttttgcagaatacttgttttccatcctyaggaataggagttgttttcatttagaccttttaggatccaggaaagaagtatattttcattaacatgcttaagaatagtttcactgaattggaagctgag

SEQ ID NO: 510108 - DNA, 201 bp, Homo sapiens
tactaataagtaggtggagctgtacctgtatattaattcagtagcatcacctatgagcaaagtgtccatttggggtaatcaatatcatcactaattctaayacaaaatgttttggcatagtcatcaatgacacgtaattcctcaaaataagtggctgtcattgcttcagtctcttcattctgcctctggtagctccttgcg

SEQ ID NO: 510109 - DNA, 201 bp, Homo sapiens
ttatattaaagggcttgtttctgtctcttctagagatatgtctgggaaccaaggtacggattggtagtggcttttgcagaatacttgttttccatcctcargaataggagttgttttcatttagaccttttaggatccaggaaagaagtatattttcattaacatgcttaagaatagtttcactgaattggaagctgagag

SEQ ID NO: 510110 - DNA, 201 bp, Homo sapiens
gttgactagctaagattagaacaatttgtttccctgagaataatatttctggttcagctaagtgacagacagttctgcatacaaaacaaccccaactgcakatcaccccacttcagcttgtttactcctctctatataagtctagggcaaaagcaccctgctgagatcctctgatctttgcctctcaagtgttctttaatc

SEQ ID NO: 510111 - DNA, 201 bp, Homo sapiens
cttcatagaacatatgtatctctcaatataacatttctggctaacaattctatagaaaagtcacaaaatttttacatcctaaacatgatacaatatttttyaaaaaatgaaatgcaagaaaggccttttattccaaatattattgcaatttcttcagagtctgttgaggcaatcctcaacattgtatctgccccaaaggat

SEQ ID NO: 510112 - DNA, 201 bp, Homo sapiens
tccaggaaagaagtatattttcattaacatgcttaagaatagtttcactgaattggaagctgagagtattatctggccatttggagattcccacatccagkcctctgggataacacagccaaactgtcaagaaacagtacatttactgatatactttggggacaggaggatgaatgcaactaaatggatctcatggagccc

SEQ ID NO: 510113 - DNA, 201 bp, Homo sapiens
ccatcaccacacacgtggggaggagacaagagcccagtgggtggacgtcaggaactcccgggtcatcacccatgtcaccagctgctccgttctaccccttycgtcagccctctccgactgtgatcaaaactcagcctctctccactctgtacctaccacctggagagggcttgtaaggctgagagatcccgtctaggccaa

SEQ ID NO: 510114 - DNA, 201 bp, Homo sapiens
gctctaatggcagcagacagcaggcaggggcccagctgctgggagtgagggccggccatgtatcacgacccaggagatgagcagaaccactacttaccggcctaggttgtcagagaagttgatcccttcactcatctttcctccaaccacagagaggagcagggcctctgtcacctggcctctctcctggccacaggcctg

SEQ ID NO: 510115 - DNA, 201 bp, Homo sapiens
accaaaatcaagatagtgaatatattcagtgctcctgtgtaattcctccctccagttcttcccctacttttttttttttatctttttgttctgtttttttktttgtttgtttgtttcatgagacagagtctcactctgtcgcccaggctggagtgcagtggcgcgatcttggctcactgcaaccttctcctcccgggttca

SEQ ID NO: 510116 - DNA, 201 bp, Homo sapiens
ccaggcgtggtggctcatgcctgtaatcccagctctttgggatgccaaggctggcggatcaactgaattcaagaccagcctggccaacatggtaaaacccyatctctactaaaatacaaaaattagctgggtgtggtggcacatgcctgtaatcacagctactcaggaggttgaggcatgagaatcgcttgaaccccggag

SEQ ID NO: 510117 - DNA, 201 bp, Homo sapiens
tcgcttgaaccccggaggcagaggttgcagagagccgtgatcgggtcactgcgctccagcctgggagacagagcgagactgtgtctcaaaaaaaaaaaaaraaagaaagaaagaaagaaataccagtatggattcactctgaaaacatttcctagatctgtctaccaaaatgccccaggagcacgacaaacaccctagcac

SEQ ID NO: 510118 - DNA, 201 bp, Homo sapiens
gaataagtacagtcagacctctgtatctgtaggtttcacatccgtagattcaaccaaccgcagattgaaaaaattggggaaaaaaatttgtatctgtactraacagcatgtatagacttttttttcttgtcattatttcctaaaaatataacaactatctccagcctgggcaacacggtgaaaccccgtctctactaaaat

SEQ ID NO: 510119 - DNA, 201 bp, Homo sapiens
ctgaggcacaagtgctagtgctttctctttaaattaaacaccatttaatctctaggacaaccagcccacagaggtggaccatactgtcctctccatctctytttttttttttttttgagatggagtctcgatctgttgcccaggctggagtgcagtggctcaatctcggctccctgcaacctccgcctcctgggttcaagc

SEQ ID NO: 510120 - DNA, 201 bp, Homo sapiens
gcttgaacccaggaggcagagtttacagtgagctgagatcgcaccactgcactccagcctgggtgacagaacaagagtccgtctcaaacaaacaaaaacgaaaaacaaaaattagccctgtgtggtggtgtgtgcctgtagtcccagctactcaggaggctgaggcaggagaattgcttgaacccgggaggcagaggttgc

SEQ ID NO: 510121 - DNA, 201 bp, Homo sapiens
gagcttgattaagtgccgtaacctctctgtgcttcggtgaatttgtctataagatgagagaacaaggccgggcacggtggctcacacctgtaatcccagcmctttgggaggccgaggtgggtgtattgcttgagctcaagagtttgagaccagcctgggcaacatggcgacaccccatctctactaaaagtacaaaacaaa

SEQ ID NO: 510122 - DNA, 201 bp, Homo sapiens
tttgtgacaagatgaaaagaaatatcggggtacttgaaaggttttagaggttgagactcaagtattttttttagaaagtcttatttcaccctgggacttamatgactttttttccccagccattactagaaggggttttgcacctccacacggtattaaaagcgacagaagaggacaaaaggaagatatgtatacaggagg

SEQ ID NO: 510123 - DNA, 201 bp, Homo sapiens
agagtcacatctcacccgtatcgctccatgtactgcagcagctgggaatgggcctggcagagctggggaaagaacacaaaccaggctctgagcaagcagcygagggctaaggtactgacatcttagattcacctagaagacgctagccctggacacacaggaagccaccaaagggaggagagggggctgggtgcagacaaa

SEQ ID NO: 510124 - DNA, 201 bp, Homo sapiens
aagaagcccactttttctgtctatgacgggctgtcactgtttcccaattggtggggagggaatctagatgtgtaaggacacctgggagataaggacagtcycaagtgtattgtccagtccaactgtaaggtggatatggtcaactgtgagactcacatgctcataaccatccccaaggagaggaatgggcacccaatctta

SEQ ID NO: 510125 - DNA, 201 bp, Homo sapiens
gactgaacaaaggaggacgaatgcgggaataaagacaaagacaaacaagtatatttggaagaaggggtcaggggtctccttgcttctagtgaacaagggcyctgagcttctatagccctttgtatttattgagtaaaggaaataatgaggagggggtggttgtcagtcagctgtttcacttagtgcaggcctgcataactg

SEQ ID NO: 510126 - DNA, 201 bp, Homo sapiens
ggtactggtttccacagcccttaggctggtgggagctaagagaaaagggaaggaagggaaggtttcctccagtgtccactgtgggtcagagaaaaagcaaraggctgaattcctcaagtatggaatctccctgctagtttccaccgggttgggaaaagacctagagtctacaaagagtgatggttcaaggtcaccatcaca

SEQ ID NO: 510127 - DNA, 201 bp, Homo sapiens
agcctggaggctgctgttttcatgcctctcaaggcataaaggtactttgcttactacttgaatttgggtagccattaaccaactaaactcattatatatgrtgtagcctaaagtagggatgttattgggaggccaaggcaggtggatcacctgaggtcgggagtttgagacaagccggaccaacatggagaaaccccgtct

SEQ ID NO: 510128 - DNA, 201 bp, Homo sapiens
gtgggagctaagagaaaagggaaggaagggaaggtttcctccagtgtccactgtgggtcagagaaaaagcaagaggctgaattcctcaagtatggaatctscctgctagtttccaccgggttgggaaaagacctagagtctacaaagagtgatggttcaaggtcaccatcacatcccagcctcaattcagcccaggcacag

SEQ ID NO: 510129 - DNA, 201 bp, Homo sapiens
acatggagaaaccccgtctctactaaaaatacaaaattacccaggcgtggtggcacatgcctgtaatcccagctactcaggaggctgaggcaggagaatcrcttgaaccggggaggcagaggttgcagtgagccgagatcacgccactgtactccagcctgggcaacaagagcgaaactccatctcaaaaaaaaaaaaaaa

SEQ ID NO: 510130 - DNA, 201 bp, Homo sapiens
gaaaaagcaagaggctgaattcctcaagtatggaatctccctgctagtttccaccgggttgggaaaagacctagagtctacaaagagtgatggttcaaggycaccatcacatcccagcctcaattcagcccaggcacaggtcagtagagctggtgggatgtcgtgggggtttcacagtcagaaaccagtgggcacacccca

SEQ ID NO: 510131 - DNA, 201 bp, Homo sapiens
gagtctgtctctgtcccccagactggggtgcagtggcgcgtaatctcggctcacttcaaattccacctcccgggttcaagggattctcctgcctcagcatyccgagtagctgggattacaggcacgtgccatcacgcccggctaatttttgtatttttagtagagacggggtttcctcatgttggtaaggctggtctcaaa

SEQ ID NO: 510132 - DNA, 201 bp, Homo sapiens
gggtgcagtggcgcgtaatctcggctcacttcaaattccacctcccgggttcaagggattctcctgcctcagcattccgagtagctgggattacaggcacrtgccatcacgcccggctaatttttgtatttttagtagagacggggtttcctcatgttggtaaggctggtctcaaacgcctggcctcatgatccgcctgcc

SEQ ID NO: 510133 - DNA, 201 bp, Homo sapiens
tggaagtcagagtgcacccaagagattgttaacccttaaaaaacagaaaaaaaaaaaagaaatcaacaagttagaggcaaataagtgtgaaagaaagtggrtagtctatttggggattctgaaagtccctgaggaaagttgactttggagaccagatcacgaagcacgacctcttaattgccgaccttttgttatagatta

SEQ ID NO: 510134 - DNA, 201 bp, Homo sapiens
attctatagaaaagtcacaaaatttttacatcctaaacatgatacaatattttttaaaaaatgaaatgcaagaaaggccttttattccaaatattattgcwatttcttcagagtctgttgaggcaatcctcaacattgtatctgccccaaaggatgtgttgaagtcctaacccctggtacctgtgagtgtgaccttacttg

SEQ ID NO: 510135 - DNA, 201 bp, Homo sapiens
ccaaatattattgcaatttcttcagagtctgttgaggcaatcctcaacattgtatctgccccaaaggatgtgttgaagtcctaacccctggtacctgtgartgtgaccttacttggaaatagtctttgcagatgtaattaagatttaagttagaatgaggttatacttgagtactatatttggtccattttgcattgtata

SEQ ID NO: 510136 - DNA, 201 bp, Homo sapiens
aggctgggtaatttacaaagaaaagaagtttaattgcctcacagttctgcagactgtacaagaagtgtcagagatgataaattcctcttcaaaaagctttmgttccctgttctttgtttcttaaaaccaacttccttgtacttccttgtctcctagctacctgttctgtaaacaaccttcctgcctttgccatgcccagac

SEQ ID NO: 510137 - DNA, 201 bp, Homo sapiens
gttgaaaagtcaggacagtgttgatggcagtgataaaaagtgaggctagagaaatcagttgagactcatttatcaagcgtgttaacagaagttttcatgtkattttataagtaatggtcttaggggatttttgggggtgttgattttcccgtatgcagacaagtgaagggtgaacaagacaaagatgagctatactaagcg

SEQ ID NO: 510138 - DNA, 201 bp, Homo sapiens
aaatcaataattgacactaggtggcaagtcaggatcaacaattactgtgttcccagcgtagttatgcatcttgatttgaagtgaggaatgggggagtactrtgataaggttagacacagactaatagcattctgaaagacatatactgatacataagacacgtatagcatatatcagattcatgccccagataccgagcag

SEQ ID NO: 510139 - DNA, 201 bp, Homo sapiens
gatagcacccaattccaattgagaaatgcttcgaaaatcaggtaggtgccaaaaatgattcttttttaatttgggggaaaactaaggagaacttaagagastgttgggtttaaactcccaatttttcatagaattgcaaaatgaaaaataaaagaaagctatggagaagttaatatgttggatgattgaagagtagcagga

SEQ ID NO: 510140 - DNA, 201 bp, Homo sapiens
gtgaccaaatacaggatcaagatatggcacccactccgccaccggcatctgtctgtagtccacatgaccattctagatccaccactctgtggccacattgygggcccagaggataggaatctttgaccaagaacaagcagctgggcctggaacccaaccttccaagtgctccatgcagaccttccttctgaagccctgata

SEQ ID NO: 510141 - DNA, 201 bp, Homo sapiens
ttatactgattctcttatggaaaaaatgagcaacacttttaaaaataaataacaattgctaaaggtctactatttgacacttgctctactgagtattcccrtatctattatttaattttattctcatattaatcaaccctatagaactaatgcagtattcccattttgattaatgtctaatcttaggctcagggagattta

SEQ ID NO: 510142 - DNA, 201 bp, Homo sapiens
agtcctcaaagagtattgagcagtgcctttatctggaatgtattaaaatccagttgagcctcatggactttttgttagttttaatgtgatttagccagcarttatttaactgattaaatagtatttcaaagtttttacagatctaagatcctatactttctcaatatgtgtttatttggtataggtatgatgacagttcta

SEQ ID NO: 510143 - DNA, 201 bp, Homo sapiens
cttctaagattatttctccgagcttctcacatacctaatctccagataagaaggatctaataaaaatgaatgtcaaaaatatgagggcccttcattgcatmacttttgtaacactcaataattcatccaatcaattttgattagggttgaagttctgatttcactctgataagaatggatttgcaattcacaattccagca

SEQ ID NO: 510144 - DNA, 201 bp, Homo sapiens
ttacaggtgtgagccactgtgccccgccaattgtatcctttaagtatgtacaattacaatactttaaaaaaagaaaaaagaataaaggcagtacaagtttktatgaccaaagcatagtgtataatcctctaagatttatagacattagggttcttaagccctcacaggctctaccaaaagctacttgtttgtttcataaga

SEQ ID NO: 510145 - DNA, 201 bp, Homo sapiens
aaatgtgacttctttccgaaatattacccaactctcgttccaactgatttcagaaccaatgtttggagattactggattgttgtgaaaagaaactcaaggragacagtgacacaccaatttgctgttaaaagatatggtaaccagttgctatttgtagctgtcctgtgtagatgaagagtttaaaggatggaccaacacaa

SEQ ID NO: 510146 - DNA, 201 bp, Homo sapiens
ttaaaggatggaccaacacaacatttgtgttagacttaggcaggagtaggtgaagctagaactggttttctttgtctcccttccttgacctggttggcttygtcatcagcactttgctgctcctctctccttccccagtatccttattctgattcctgccttctttttcccctagaaaatatacattttttctagaatccc

SEQ ID NO: 510147 - DNA, 201 bp, Homo sapiens
cctcacttcaaatgtctcctttttaaaataggactttgccttcactttttcacaatcaaaaggcctattgaagtgattttcttttctttctttctttcttytttttttttttttttttgagaaggagtctccctctgtcacccagactggagtgcaatggcaccatctcggcccactacaacctctgcctcccaggttcaa

SEQ ID NO: 510148 - DNA, 201 bp, Homo sapiens
ccaccgggttgggaaaagacctagagtctacaaagagtgatggttcaaggtcaccatcacatcccagcctcaattcagcccaggcacaggtcagtagagcyggtgggatgtcgtgggggtttcacagtcagaaaccagtgggcacaccccagctccacactcatgagctgcatgacctcaggacagagcttgaccatctct

SEQ ID NO: 510149 - DNA, 201 bp, Homo sapiens
ctggtgggatgtcgtgggggtttcacagtcagaaaccagtgggcacaccccagctccacactcatgagctgcatgacctcaggacagagcttgaccatctytgaatctccacgtttccaatgtaaaacaggaacaccacccccatggcagagtcagcgtgaagaccagagacacctggtgccatgcatggcgcatgatagg

SEQ ID NO: 510150 - DNA, 201 bp, Homo sapiens
atgtaaaacaggaacaccacccccatggcagagtcagcgtgaagaccagagacacctggtgccatgcatggcgcatgatagggcagcaggaggagcctgcrctgatcttgagcattcctcaattcagtcccctccagacaacttcagtaatgacaaaatccaatcctgaggggacttctgcctcacacatgccatctccct

SEQ ID NO: 510151 - DNA, 201 bp, Homo sapiens
ccgcctcccaggttcaagtgattctcctgcctcagcttcctgagtagctgggattacaggcgcccgccaccacacctggctaatttttgtatttttagtakagacagggtttcaccatgttggccaggttggtctctaattcctaacctcaggtgatccgcccccttcggcctcccaaagtgctgggattacaggtgtgag

SEQ ID NO: 510152 - DNA, 201 bp, Homo sapiens
ggcaggtgaggtgcagggaaatgaggcactctgtcatagcggggtccccagagttctgggatgcactggaaagccatggtcagcctccgatgaggtcaccrccttgactcgtgcaccctgtagcaagccccacctccggaggaattcttggcccaggtgtctggaggaaccatccaagtccctttacctcacggcaggccc

SEQ ID NO: 510153 - DNA, 201 bp, Homo sapiens
cgcctcccaggttcaagtgattctcctgcctcagcttcctgagtagctgggattacaggcgcccgccaccacacctggctaatttttgtatttttagtagwgacagggtttcaccatgttggccaggttggtctctaattcctaacctcaggtgatccgcccccttcggcctcccaaagtgctgggattacaggtgtgagc

SEQ ID NO: 510154 - DNA, 201 bp, Homo sapiens
accctgtctctactaaaaatacaaaaattagctgggcatggtggcacaggcctgtagtcccagctattcaggaggctgaggcaggagaatcacttgaaccygagaggcagaggttgcagtgagccgagattgcaccactgagctccagctggggcgacagagtgagactctgtctaagaaaaaaaaaaaaggaagagaaga

SEQ ID NO: 510155 - DNA, 201 bp, Homo sapiens
tctgggatgcactggaaagccatggtcagcctccgatgaggtcaccaccttgactcgtgcaccctgtagcaagccccacctccggaggaattcttggcccrggtgtctggaggaaccatccaagtccctttacctcacggcaggccctggcccggggaggggaggcccacgcacctgggagccgctgacctccacgctgtg

SEQ ID NO: 510156 - DNA, 201 bp, Homo sapiens
tgaacctgagaggcagaggttgcagtgagccgagattgcaccactgagctccagctggggcgacagagtgagactctgtctaagaaaaaaaaaaaaggaagagaagaaagaaagaaagaaagagaaagaaaaaagaaagagaggaaggagggagggaaggaaagaaatatttgaaaattgtgaaatgaaattaaacatttg

SEQ ID NO: 510157 - DNA, 201 bp, Homo sapiens
actcgtgcaccctgtagcaagccccacctccggaggaattcttggcccaggtgtctggaggaaccatccaagtccctttacctcacggcaggccctggccyggggaggggaggcccacgcacctgggagccgctgacctccacgctgtgcatgcccgtgatggtgtcgatcaggttgtgcgcctcgtcgatgatcaccacc

SEQ ID NO: 510158 - DNA, 201 bp, Homo sapiens
aacctgagaggcagaggttgcagtgagccgagattgcaccactgagctccagctggggcgacagagtgagactctgtctaagaaaaaaaaaaaaggaagagaagaaagaaagaaagaaagagaaagaaaaaagaaagagaggaaggagggagggaaggaaagaaatatttgaaaattgtgaaatgaaattaaacatttgat

SEQ ID NO: 510159 - DNA, 201 bp, Homo sapiens
ccacctgagcagggcggggctcccctgcaggaggcttgcctgcctgacactgagctcctgatgtgagtgcttctatttcctgcctggactgtgtagagacrttcaaaaaacagcttgtagcaacggacaagctctcctcgagtttcacatgaaaagccaatacatgaaacacaggaaactagggctggtctgactcctgag

SEQ ID NO: 510160 - DNA, 201 bp, Homo sapiens
ctgagaggcagaggttgcagtgagccgagattgcaccactgagctccagctggggcgacagagtgagactctgtctaagaaaaaaaaaaaaggaagagaagaaagaaagaaagaaagagaaagaaaaaagaaagagaggaaggagggagggaaggaaagaaatatttgaaaattgtgaaatgaaattaaacatttgattat

SEQ ID NO: 510161 - DNA, 201 bp, Homo sapiens
gttaaggcgtggagctggggtaacaaaaataaaagcaactctgcaggtctttaggtgtttgttgttaggaaagtttccagttaaaggaatactcatataaraaataaaatatcggaaaactgaatggctccatcacccacgcttggtgagaaaatatgagtcacttaacttttctgggctccagcgtccccatgcacggaa

SEQ ID NO: 510162 - DNA, 201 bp, Homo sapiens
gaggcagaggttgcagtgagccgagattgcaccactgagctccagctggggcgacagagtgagactctgtctaagaaaaaaaaaaaaggaagagaagaaagaaagaaagaaagagaaagaaaaaagaaagagaggaaggagggagggaaggaaagaaatatttgaaaattgtgaaatgaaattaaacatttgattatccat

SEQ ID NO: 510163 - DNA, 201 bp, Homo sapiens
ttgtatgttaattttgtatcctgcaactttactgaattcatttattagttctaactgtggaatctttagggttaatatataagatcatgacatctgcaaamagagactatttagctttccctaatttggatgtcttttgtttctttttcttgcctaattgctctagctaggacttctagtactatgtataacagaagtggt

SEQ ID NO: 510164 - DNA, 201 bp, Homo sapiens
ggagctggggtaacaaaaataaaagcaactctgcaggtctttaggtgtttgttgttaggaaagtttccagttaaaggaatactcatataaaaaataaaatrtcggaaaactgaatggctccatcacccacgcttggtgagaaaatatgagtcacttaacttttctgggctccagcgtccccatgcacggaatttcactgga

SEQ ID NO: 510165 - DNA, 201 bp, Homo sapiens
agaggttgcagtgagccgagattgcaccactgagctccagctggggcgacagagtgagactctgtctaagaaaaaaaaaaaaggaagagaagaaagaaagaaagaaagagaaagaaaaaagaaagagaggaaggagggagggaaggaaagaaatatttgaaaattgtgaaatgaaattaaacatttgattatccattttaa

SEQ ID NO: 510166 - DNA, 201 bp, Homo sapiens
gccaactggccctgctgcctggagaccccaagggatcccacgcgcctcctccaactcacgcctcaggagagaatgggttaaggtgccatcaacctgaccayggtggggggcatcccccaaactacagtgtgatgaggacgcccctcatggcctagaccacagtgagagccaagagcggctttctggccctgcagggccctc

SEQ ID NO: 510167 - DNA, 201 bp, Homo sapiens
gaggttgcagtgagccgagattgcaccactgagctccagctggggcgacagagtgagactctgtctaagaaaaaaaaaaaaggaagagaagaaagaaagaaagaaagagaaagaaaaaagaaagagaggaaggagggagggaaggaaagaaatatttgaaaattgtgaaatgaaattaaacatttgattatccattttaat

SEQ ID NO: 510168 - DNA, 201 bp, Homo sapiens
aggttgcagtgagccgagattgcaccactgagctccagctggggcgacagagtgagactctgtctaagaaaaaaaaaaaaggaagagaagaaagaaagaaagaaagagaaagaaaaaagaaagagaggaaggagggagggaaggaaagaaatatttgaaaattgtgaaatgaaattaaacatttgattatccattttaatt

SEQ ID NO: 510169 - DNA, 201 bp, Homo sapiens
tacaagaagtgtcagagatgataaattcctcttcaaaaagctttagttccctgttctttgtttcttaaaaccaacttccttgtacttccttgtctcctagytacctgttctgtaaacaaccttcctgcctttgccatgcccagacaagtccagatatgccttcccgcctagtaacagactcttttcccacctagtaacgga

SEQ ID NO: 510170 - DNA, 201 bp, Homo sapiens
tgttctgtaaacaaccttcctgcctttgccatgcccagacaagtccagatatgccttcccgcctagtaacagactcttttcccacctagtaacggactctycacctaatagaccctattcaattttaaaccttagccaatcgagttagcttagattgtgaggtccaaccccagccaatggggaaaggacacagaagtgcta

SEQ ID NO: 510171 - DNA, 201 bp, Homo sapiens
ccccagccaatggggaaaggacacagaagtgctaggaactgcattagagataaaaacccctttcctaccctgctcggtgtgctcttgcgataatgactggygcaagctgcacccttctgcagaagaaaatttgccttgctgagaaatcttgtgtttgagtgctcattttctttacgactctgagcttttatttctaacaga

SEQ ID NO: 510172 - DNA, 201 bp, Homo sapiens
catgcagaccttccttctgaagccctgatacttactcagagagtaccagaaactagagtaggtccctgctctgaagggactcactgacctttctctgtccrgactaaaagaatcattttagcctggggaaagtccctctcagcataaacttctgtctcttaattggctttcttccttctcaaattctgtttttctcttgtt

SEQ ID NO: 510173 - DNA, 201 bp, Homo sapiens
ttcagtacaaggcagcagaattcttttaaaagctgtatggacttcttttctatcaatctataaccattccagtaaacaaaagccacactgataaatcatargacaggtccctctctacctttgactgagaagaaaagtgctgggtaacaatgctcttaagtttctaagaagcctttaacagaaaaggtctaagaaacacgt

SEQ ID NO: 510174 - DNA, 201 bp, Homo sapiens
ctcttgaccttgtgatcgcctgcctcggcctcccaaagtggtgggattacaggcgtgagccaccacgcccggcctaaacagaacgttgtttttgttttgtkttgttttgtttttgagatggagtctcgcactgtcgccgaggctggagtgcagtggtgtgatcttggctcactgcaagctctgcctcctgggttcacgccc

SEQ ID NO: 510175 - DNA, 201 bp, Homo sapiens
atgctcttaagtttctaagaagcctttaacagaaaaggtctaagaaacacgtccttgggatttttagtagactttttgcctagctgagagggttcaggagrcattattttaaatctttctgaggtctacacaaaggtctacagctgtaatcttgaaatcttgaccctgaggccatacttttagtggcagtgccctgaattt

SEQ ID NO: 510176 - DNA, 201 bp, Homo sapiens
aaaacacaaagctcagagagaatgagaagtgagattaaccatgaaactttaattatttatatgcttacattaatgttattagagaagcaatgaatcctcaytgtagaaaatttgaaaaatatagagaaaaacacaagacattacctattattaatttgaccaactgccattaacattgtaatgtcactaacattgtaagtt

SEQ ID NO: 510177 - DNA, 201 bp, Homo sapiens
tgtattagaaaatagaataccttgtacagttataaattctctgtgtgagatcagtttatttggctatgtaggataatgcccttgcacttagcatctaaagwgaaatatttttattttaaaaggctagaaaaaggctttacagccacaaggttttctgacagaaatgctctaagaaggggaggagggaaagatttccttcct

SEQ ID NO: 510178 - DNA, 201 bp, Homo sapiens
aaagacccgtttcttgttacatcttctcatttggccccgtagcagttgcctaccctctttgggtacttacagctgcaaagttaactaaagccactgaagayttaatcttagtagcttcacttaacctcattgtcatgccattcagaccttattgttcttttactttttagagatggagccttgctatgttgcccaggctgg

SEQ ID NO: 510179 - DNA, 201 bp, Homo sapiens
tgtaatgtcactaacattgtaagtttcctctaattttaatgaatattttccatgactgcaatcatacttttctatttataataattaagaaaacatgcctwcgtattatgccaatcttttcatgaattccaattttctgctgcacatatttttatgtgactatacccaatttaattattttattatataatatgttggctg

SEQ ID NO: 510180 - DNA, 201 bp, Homo sapiens
ggaggaggaggttgcagtgagccgagatcgcaccactgcactccagcctgggcaacacaatgagactttgtctcaaaaaaaaaaaaaaaaaaaatggccargcgcggtggctcacgcctgtaatcccagcactttgggaggcggaggcgggcagatcacgaggtcaggagatcgagaccttcctggccaacacagtgaaac

SEQ ID NO: 510181 - DNA, 201 bp, Homo sapiens
atgcagttttcgatggaagcacaaatttctccctaaaatgtaaaagtctggaagaatacataacaaagtctttgccctgtacaaaggtggggggtgcggcygggagcagtggctcatgcaggcaatcctagcactattaggagtctgaggtgagtggattgcttttagttcatgagttcgagaccagcctgggcaacatgg

SEQ ID NO: 510182 - DNA, 201 bp, Homo sapiens
tgaggacgcccctcatggcctagaccacagtgagagccaagagcggctttctggccctgcagggccctcacctgggctgcagggatggcaaggcggctccygtaatagggacaggcccgggcctccttcccaagggccagcagctgctccatgtccttcacctctgccagggcctcatcccggagaaggcccatctgctcg

SEQ ID NO: 510183 - DNA, 201 bp, Homo sapiens
ctcctctttggcttctcctcctcagctcctttcttcttctctgagggtggcacaggcacaaagagagaaaacagagaggacagcaactgtccacgggcccragagggggttgtgtaatgttgagacccacttccacagggtggggtctataagaccctcccaagtactgcctactgtgtctcatcggaacactgtaacgtt

SEQ ID NO: 510184 - DNA, 201 bp, Homo sapiens
tcttctctgagggtggcacaggcacaaagagagaaaacagagaggacagcaactgtccacgggcccgagagggggttgtgtaatgttgagacccacttccrcagggtggggtctataagaccctcccaagtactgcctactgtgtctcatcggaacactgtaacgttttacttttgttctccagaaagagcccgtaaaatc

SEQ ID NO: 510185 - DNA, 201 bp, Homo sapiens
gttgcagtgagccgagattgcaccactgagctccagctggggcgacagagtgagactctgtctaagaaaaaaaaaaaaggaagagaagaaagaaagaaagaaagagaaagaaaaaagaaagagaggaaggagggagggaaggaaagaaatatttgaaaattgtgaaatgaaattaaacatttgattatccattttaattct

SEQ ID NO: 510186 - DNA, 201 bp, Homo sapiens
ttgcagtgagccgagattgcaccactgagctccagctggggcgacagagtgagactctgtctaagaaaaaaaaaaaaggaagagaagaaagaaagaaagaaagagaaagaaaaaagaaagagaggaaggagggagggaaggaaagaaatatttgaaaattgtgaaatgaaattaaacatttgattatccattttaattctc

SEQ ID NO: 510187 - DNA, 201 bp, Homo sapiens
cttctctgagggtggcacaggcacaaagagagaaaacagagaggacagcaactgtccacgggcccgagagggggttgtgtaatgttgagacccacttccayagggtggggtctataagaccctcccaagtactgcctactgtgtctcatcggaacactgtaacgttttacttttgttctccagaaagagcccgtaaaatca

SEQ ID NO: 510188 - DNA, 201 bp, Homo sapiens
gcagtgagccgagattgcaccactgagctccagctggggcgacagagtgagactctgtctaagaaaaaaaaaaaaggaagagaagaaagaaagaaagaaagagaaagaaaaaagaaagagaggaaggagggagggaaggaaagaaatatttgaaaattgtgaaatgaaattaaacatttgattatccattttaattctctg

SEQ ID NO: 510189 - DNA, 201 bp, Homo sapiens
tgagggtggcacaggcacaaagagagaaaacagagaggacagcaactgtccacgggcccgagagggggttgtgtaatgttgagacccacttccacagggtrgggtctataagaccctcccaagtactgcctactgtgtctcatcggaacactgtaacgttttacttttgttctccagaaagagcccgtaaaatcatctcca

SEQ ID NO: 510190 - DNA, 201 bp, Homo sapiens
gtgagccgagattgcaccactgagctccagctggggcgacagagtgagactctgtctaagaaaaaaaaaaaaggaagagaagaaagaaagaaagaaagagaaagaaaaaagaaagagaggaaggagggagggaaggaaagaaatatttgaaaattgtgaaatgaaattaaacatttgattatccattttaattctctggaa

SEQ ID NO: 510191 - DNA, 201 bp, Homo sapiens
ctccagaaagagcccgtaaaatcatctccaagccaacgattcggaccagacgctcacccagagagtaggaacactttttcccaaggagaggggactcaggraggaactggggtctcctctgccattctttctatgaaagacactgaatggtcttcagtcactgccacccctgcctcactctctccagaccacctgcggcta

SEQ ID NO: 510192 - DNA, 201 bp, Homo sapiens
tgagccgagattgcaccactgagctccagctggggcgacagagtgagactctgtctaagaaaaaaaaaaaaggaagagaagaaagaaagaaagaaagagaaagaaaaaagaaagagaggaaggagggagggaaggaaagaaatatttgaaaattgtgaaatgaaattaaacatttgattatccattttaattctctggaaa

SEQ ID NO: 510193 - DNA, 201 bp, Homo sapiens
ctggggtctcctctgccattctttctatgaaagacactgaatggtcttcagtcactgccacccctgcctcactctctccagaccacctgcggctacaccayggtcctggtggctaccgtgcctgcttctctgcatgtccacgcagcggtcgttgataagctgcacagaacctaggcttctcacgtcttcatttacacaaag

SEQ ID NO: 510194 - DNA, 201 bp, Homo sapiens
gcaccactgagctccagctggggcgacagagtgagactctgtctaagaaaaaaaaaaaaggaagagaagaaagaaagaaagaaagagaaagaaaaaagaaagagaggaaggagggagggaaggaaagaaatatttgaaaattgtgaaatgaaattaaacatttgattatccattttaattctctggaaatggaaatcccca

SEQ ID NO: 510195 - DNA, 201 bp, Homo sapiens
tctcctctgccattctttctatgaaagacactgaatggtcttcagtcactgccacccctgcctcactctctccagaccacctgcggctacaccatggtccyggtggctaccgtgcctgcttctctgcatgtccacgcagcggtcgttgataagctgcacagaacctaggcttctcacgtcttcatttacacaaaggttctg

SEQ ID NO: 510196 - DNA, 201 bp, Homo sapiens
caccactgagctccagctggggcgacagagtgagactctgtctaagaaaaaaaaaaaaggaagagaagaaagaaagaaagaaagagaaagaaaaaagaaagagaggaaggagggagggaaggaaagaaatatttgaaaattgtgaaatgaaattaaacatttgattatccattttaattctctggaaatggaaatccccat

SEQ ID NO: 510197 - DNA, 201 bp, Homo sapiens
tctctgcatgtccacgcagcggtcgttgataagctgcacagaacctaggcttctcacgtcttcatttacacaaaggttctgcaacaaaggagaaagaaagrggcaaagagatggtgccagctaaatgacatcctaccaacacacgtggacctgcccccgccacctctcctttgccttccagtgatgggccggccaggccag

SEQ ID NO: 510198 - DNA, 201 bp, Homo sapiens
tgacgtggccccagtagttttttggttttatttttttgaggtagggactctctcacccaggctggggtacagtggcacgatcatagctcactgaagcctcwgcctcccaggctcaagtgatccttcctcctcagcctcttgagtagctggggctaaaggcatgcgccatcacgcccagctaagctttgtttgtttgttttt

SEQ ID NO: 510199 - DNA, 201 bp, Homo sapiens
gttttatttttttgaggtagggactctctcacccaggctggggtacagtggcacgatcatagctcactgaagcctcagcctcccaggctcaagtgatcctycctcctcagcctcttgagtagctggggctaaaggcatgcgccatcacgcccagctaagctttgtttgtttgttttttgtttgtttgtttgtttgtttgtt

SEQ ID NO: 510200 - DNA, 201 bp, Homo sapiens
gaggcaggagaatcacttgaacccaggaggcggaggttgcggtgagccaagattgtgccattgcactccagcctgggcaagaaaagtgaaactctgtctcaaaaaaaaaaaaaaaagaaaagaaaagaaaaatggcaagccaaaattatggaagccatcattggcgatgctgtgaatgcccaaagagtgtccaaaggaaac

SEQ ID NO: 510201 - DNA, 201 bp, Homo sapiens
taagctttgtttgtttgttttttgtttgtttgtttgtttgtttgtttgtttgttttagagacagggtttcactatgtagcccaggctgatcttgaacttcygagctcaagcaatcggtccaccttggcctcccgaagtgctgggattacaggcgtgagccacctggtcgttttttttttttttttttttttttttgagata

SEQ ID NO: 510202 - DNA, 201 bp, Homo sapiens
ttgctaatagtcaaaaatacaatgtcccagaccacattaataaacaggctaacctgctagcatggtatactgggaaaccggggaaggctaaaacaaaagtkccagtcaaaacacagcttaaagaccccagctattttcccaattgaaaataataccaagccagggctgggcgcagtggcttatggctgtaatctcagcact

SEQ ID NO: 510203 - DNA, 201 bp, Homo sapiens
aaaagtgccagtcaaaacacagcttaaagaccccagctattttcccaattgaaaataataccaagccagggctgggcgcagtggcttatggctgtaatctmagcactttgggaggcggaggtgggtggatcaagaggtcaagagatcgagaccatcctggccaacatggtgaaaccccatctgtactaaaaacaaaaaact

SEQ ID NO: 510204 - DNA, 201 bp, Homo sapiens
taatctcagcactttgggaggcggaggtgggtggatcaagaggtcaagagatcgagaccatcctggccaacatggtgaaaccccatctgtactaaaaacamaaaacttagctgggtgtggtggtgcacacctgtagtcccagctactcaagaggctgaggcaggagaatcacttgagccgaggaggcggaggttgcagtga

SEQ ID NO: 510205 - DNA, 201 bp, Homo sapiens
gagccgaggaggcggaggttgcagtgagccgagattacgccactgcattccagcctggtgacagagtgagactctgtctcaaaacaacaacaacaactacaaaaaaatacccagccaggcatggagtctcatgcctgtaatcccagcactttgggaggccgaggtaagtggatcacctgaggtcaggagtttgagaccagc

SEQ ID NO: 510206 - DNA, 201 bp, Homo sapiens
agccaggcatggagtctcatgcctgtaatcccagcactttgggaggccgaggtaagtggatcacctgaggtcaggagtttgagaccagcctggccaacatrgtaaaaccccatctgtactaaaaatacaaaaattagctgggcatggtggcacatgcctgtaatcccggctactcaggaggctgaggcacaagaattgctt

SEQ ID NO: 510207 - DNA, 201 bp, Homo sapiens
gaggtgaaggttgcagtaagccgagattgtgccactgcactccagcttgggcaacagagtgagactctgtctcaaaaacaaaaacaaaaataagaaaccarttaagctggaagcaagaaaaggcttcatagttaaaatagttgagctatccagagctgagatattacttacccatgggctctgaaaacccttcaattctcc

SEQ ID NO: 510208 - DNA, 201 bp, Homo sapiens
gagctaactaagcccttctccttgtatgtagcagagaagagggccatagctatgggagtactagcccagaaattaggatcagaacccagaccaaccacctrcttcttttcttttctttttctttttctttttctttttctgagacggagtctcacactgttgcaggggccggtgtgcagtggcacaatctcagctcactgc

SEQ ID NO: 510209 - DNA, 201 bp, Homo sapiens
tctcacactgttgcaggggccggtgtgcagtggcacaatctcagctcactgcaacctccacctcccagattcaagcaattctcctgcctcagcctcctgartagctaggattacaggcgcccaccacctcgcctggctattttttttgtatttttagtagagacagaatttcactatgttggccaggctggtcttgaactc

SEQ ID NO: 510210 - DNA, 201 bp, Homo sapiens
catggtggtgggtgcctgtaatcccagctactcgggaggctgaggcaggagaatcgcttgaaccagggagttggaggttgcagtgagccaagatcatgccmctgcactcaagcctggcaacagagcgagactccgtcttaaaaaaaaaaaaatcagcctcttccagattctgagggtgactggttcatagatggcagtagt

SEQ ID NO: 510211 - DNA, 201 bp, Homo sapiens
ctgctggggaggctgaggcaggagaaccacttgaactcaggaggcggaggttgcagtgagccaagttcatgccactgcactccagcctgggcaacagagcragattccatctcaaaaataaaaaataatcagtcacagcatccaggatcataggtgtataatcctccagctacatcaggaagtccaccagaggcatgctgg

SEQ ID NO: 510212 - DNA, 201 bp, Homo sapiens
caccttatcacaagctgaagcattgctaaactttttgccactacattacacaagcgaccttttttctagctcccaataaaaaatgtgttccttgtccttcyagcctttacaaagaatttcttagagtcccttccagattcttctcatcacctggtccccaaaccaatgccacatattttagatttttgtaaaatcatcagc

SEQ ID NO: 510213 - DNA, 201 bp, Homo sapiens
tgatccaccacgcctggcaataaagttgtttttaaagggcatgtctgttggaagatacgcagtgatgtgcatctttggaaacagtctgtcacagcattttrcacagctgctgtcaggtgggcagtggtcgtgattcacttgcctttccctcttcatgcataaacttagttgtcttcccattgacattcccattgaacaact

SEQ ID NO: 510214 - DNA, 201 bp, Homo sapiens
atgttgcctcggctggtcttgaactcctgggctcaagtgatcatcctagctcagcctctcaaagtgctgggattacagacatgcaccactgtgcctggccragtattgctatcttaacaatattatctcccaatccatgaacatagaatgtttttccatttatttggatgttttttagtttctttcaagaatggtttgcag

SEQ ID NO: 510215 - DNA, 201 bp, Homo sapiens
tgtcacagaccacacaaccacatataaaaacagaaagtctgaaagtgattcagaagaattacattctaaataaaagtaagttttagtaaaatttaatatcygagatgaagatgggagggaggcactggacagaaaagctagctgacattccaaatatatcattgctatttcatgacaggacaataaatatttgggttgaac

SEQ ID NO: 510216 - DNA, 201 bp, Homo sapiens
ttgctaaaattatttattagttctaatctcccctcttaaggcttaaactctagttggaaatcaaggttaggggaggggtacagccaaggacttacatttcttttttttttttttgaggcagagtcttgctctgtcgcacaggctggagtgcagtggcgcgatctcagctcactgcaacctctgcctcccgagttcaagcaa

SEQ ID NO: 510217 - DNA, 201 bp, Homo sapiens
ggaattaatatacatgcaaattttctgcatgcaaactctaccttcctggtcactttgaaggatataaattaatcaaaatcacaaaattcttcaatcttatrtaagaatgtacaataatgccactgaagcaatttagaacttacaatgcccatagcatagaatctattatatatagatatctaattatatctatctaaacac

SEQ ID NO: 510218 - DNA, 201 bp, Homo sapiens
agttttaatgaagagtagttgaaaataccagaatttaatatacgtaatagatgagagactgtgtagatcactgatgttaaaaatgatgaggtgataaattyaagttggaagaaatccagaatactaaacaggtttcactagaaaagccaaacgcaaagccagagctttcagtggcattaacatctcatttatttatctgca

SEQ ID NO: 510219 - DNA, 201 bp, Homo sapiens
ttaatgaagagtagttgaaaataccagaatttaatatacgtaatagatgagagactgtgtagatcactgatgttaaaaatgatgaggtgataaattcaagytggaagaaatccagaatactaaacaggtttcactagaaaagccaaacgcaaagccagagctttcagtggcattaacatctcatttatttatctgcacgat

SEQ ID NO: 510220 - DNA, 201 bp, Homo sapiens
aaataccagaatttaatatacgtaatagatgagagactgtgtagatcactgatgttaaaaatgatgaggtgataaattcaagttggaagaaatccagaatmctaaacaggtttcactagaaaagccaaacgcaaagccagagctttcagtggcattaacatctcatttatttatctgcacgatagtatgctaaaaacaaaa

SEQ ID NO: 510221 - DNA, 201 bp, Homo sapiens
cacacttcactttttgttttttcatttttacatttattttattttatttcttttttttttttttttttttgaaatgagggtcttgctatgttgctgaggcygttctcaacctcctgggctcaagcaatcctcccacctcagcctcccgagtagctgggattacaggcacatgccaccatgcccagtcactttttgacatat

SEQ ID NO: 510222 - DNA, 201 bp, Homo sapiens
ctctaaaagtgttgggattataggcatgagctactgcatctggcctgtatttttatcttgaatacaactaccatatcactacttttattgattcaagtagtttttttttttcttcaaaccggagtccttgggatatacaggcataaatctttttttttttttttttttttttttttgagacggagtctcactctgtcaccc

SEQ ID NO: 510223 - DNA, 201 bp, Homo sapiens
cccagcacagcaccagctgaggacactcgtgttaccttagttatgtgttcttcctccaggtcatcctcatcctcatccactctgtgtgtgtgagagagaayagaaaacagtcttccctcagcaaactcagcaaaacgcactgagcatctgctgagcgctggtgctgagccctggccattcccagcaatgggttccaccaag

SEQ ID NO: 510224 - DNA, 201 bp, Homo sapiens
gaacatggtagtgggcacctgtagtcccagctactcgggaggcacaagaggatcatttgagccaggaaggcagaggttgcagtgagctaagattgcaccaytgcactccagcctgggcaacagagtgagacccaccctgtctccaaaaaaagaaaggaaaagaaaggaaaggaaaaggaaaaagaaaaaaaaaggaaagca

SEQ ID NO: 510225 - DNA, 201 bp, Homo sapiens
tctcatgtcaaataatcatagtagaagttaaagtacataacaatggcatctattttcattgccatgttactgcagagagtagtttttggtggtcattgcattttttttttttttgagacatggtctcactctgtcacccaagctggagtgtagtggcgtgatctctgctccctatggtctccacctccctcccacttcagc

SEQ ID NO: 510226 - DNA, 201 bp, Homo sapiens
ggcaaatgccaaccccaacctcccgtggccgctcaggtctgtgggtagggaaatgtaaaaaggagacatgagctcagcaccccaaacccaagtcttgagtyggaagcctcgggactcatggcaggctgctctcctctctgccctccctccagcaagctggacccctctgaggccccaggggggatatttgctcttcatcat

SEQ ID NO: 510227 - DNA, 201 bp, Homo sapiens
cccaggttcaagcaattctcatgcctcagcctcccaagtagctgggattacaggtgcctgccaccatgcctgactaatttttttgtatttttaatagagayggagtttcaccatgttggccaggctgttctcgaactcctgacctcaggtgatccacctgccttggcctcccaaagtgctgggattacaggcgtgagccac

SEQ ID NO: 510228 - DNA, 201 bp, Homo sapiens
cccaaacccaagtcttgagttggaagcctcgggactcatggcaggctgctctcctctctgccctccctccagcaagctggacccctctgaggccccagggsggatatttgctcttcatcatctcgggccttcggatgttctgtgcctggaatgttgtctcccctcaccagctcccagtcaactctgagatagcagcagaaa

SEQ ID NO: 510229 - DNA, 201 bp, Homo sapiens
gtttggttttctgttcctgtgttagtttgctgaggataacagcttccaactccatccatgtccctgcaaaggacacaatctcgttcctttttttttttttwcctctttttttagagaaagagtcttgctttgtctcccaggctggagggcagtggtgcaatcatagctcatggcagcctcgacttcctggactcaagctat

SEQ ID NO: 510230 - DNA, 201 bp, Homo sapiens
agcctcgggactcatggcaggctgctctcctctctgccctccctccagcaagctggacccctctgaggccccaggggggatatttgctcttcatcatctcrggccttcggatgttctgtgcctggaatgttgtctcccctcaccagctcccagtcaactctgagatagcagcagaaacatcacctcctccaggaagccttc

SEQ ID NO: 510231 - DNA, 201 bp, Homo sapiens
gtctcccaggctggagggcagtggtgcaatcatagctcatggcagcctcgacttcctggactcaagctatcctcctacctcagccacctgaagaaaataattagctgtctggacaattttatcctttacctccaaggcctaaacaatacagaagtaaactttggcaagaagagctttggtggagatgcttctgtagttcct

SEQ ID NO: 510232 - DNA, 201 bp, Homo sapiens
cctggaatgttgtctcccctcaccagctcccagtcaactctgagatagcagcagaaacatcacctcctccaggaagccttctttgaccttccctggtaggyctggctgctctgacacagattcatggccccttcacacccatctcattcaaaattgcttcctctcggtctatctccccagactgtcatgtccacaagggag

SEQ ID NO: 510233 - DNA, 201 bp, Homo sapiens
tcccaggctggagggcagtggtgcaatcatagctcatggcagcctcgacttcctggactcaagctatcctcctacctcagccacctgaagaaaataattarctgtctggacaattttatcctttacctccaaggcctaaacaatacagaagtaaactttggcaagaagagctttggtggagatgcttctgtagttcctttt

SEQ ID NO: 510234 - DNA, 201 bp, Homo sapiens
aaacatcacctcctccaggaagccttctttgaccttccctggtaggtctggctgctctgacacagattcatggccccttcacacccatctcattcaaaatygcttcctctcggtctatctccccagactgtcatgtccacaagggaggacccaggtcggccttgtttctgctgagtccccgtggcctcacctagagcttgg

SEQ ID NO: 510235 - DNA, 201 bp, Homo sapiens
atcttgaacccgggaggcagaggttgcagtgagctgagatggcgccactgcactccagcgtgggcgacagagtgaggctccgtctcaaaaaaaaaaaaaaraagaagaagaagaaatgctgggcagaaaagaggaagcaatcccaggagtggcctttcccgaaccagctgaagtcagagcaccctccattacgggatgtat

SEQ ID NO: 510236 - DNA, 201 bp, Homo sapiens
acacccatctcattcaaaattgcttcctctcggtctatctccccagactgtcatgtccacaagggaggacccaggtcggccttgtttctgctgagtccccrtggcctcacctagagcttggtatgcagcaggaaccccatgaccatctcctggatgaagctacaactgaccaatcgagtgaacagaggatgctgtcactta

SEQ ID NO: 510237 - DNA, 201 bp, Homo sapiens
tgggtttacacaccctagggaagtgtggtctaggtaagaggccattaggaggggcttatagtaggatttgagtttatgttagatgacttggggaagggctsagccgagcgaggcctgctctggactgggtgcagtcagatagtgtgggcaatttggtgattgagtatcttaatgatttttatttagaaagtggcaggaacc

SEQ ID NO: 510238 - DNA, 201 bp, Homo sapiens
tcagttctagaggctgggaagtacaagatcaaggtgccagcagagttggtgtctggcgagggctgctctctgcttccaaggtggtaccttccttctgtgtyttccatggtggaagagcagaagcgaaaaaaaaaaaaaaaaaaaaaaaaggcctaggctagttccccatgtcccttttataaagcgctaatcccatccgtg

SEQ ID NO: 510239 - DNA, 201 bp, Homo sapiens
ctagagcttggtatgcagcaggaaccccatgaccatctcctggatgaagctacaactgaccaatcgagtgaacagaggatgctgtcacttatgaccagctrcaactcttcttttgtcagcgcctcagtctgccctttccagcaatgcgggaagaatccatcagcgccaggcgttggcagggaagccagccctgcatcccat

SEQ ID NO: 510240 - DNA, 201 bp, Homo sapiens
ttgagatactctcctgaaaacaaaagttagattaacaaaaaaaaaaaaaaagcagaaatttattaatgcatgcagtacccatcacacgggagaggcctcagttcaaaagtatttctctctcaaggcagtggcttaggggctttgcttaaatcatagtttaacaaagagccataaatcctacatagtgacaagatgaaagag

SEQ ID NO: 510241 - DNA, 201 bp, Homo sapiens
gtgtctggcgagggctgctctctgcttccaaggtggtaccttccttctgtgtcttccatggtggaagagcagaagcgaaaaaaaaaaaaaaaaaaaaaaarggcctaggctagttccccatgtcccttttataaagcgctaatcccatccgtgagggcagaacccgcatgcctgaatcaccccctaaaggtctcacctctt

SEQ ID NO: 510242 - DNA, 201 bp, Homo sapiens
ctgaagccctcagggtgcaatcccaacagatcctagcactacttcctttctatgatttcccaatagaacctgaatacacactgtagagttaataacggagsgggggacaaaaacaaggatcctggtggtatatgggatcaaaagcatatctccctcaaacagcccaatggagaattgtaaaaaccctgcttgactccttcc

SEQ ID NO: 510243 - DNA, 201 bp, Homo sapiens
acgagctgatgggttgtcttccatttctggtttgtcaaataaaaaaaattctggatgtggtaaaagagagaccttcattcgaaggaattattgccagggcrttgcgggggtactcctgcaatggagggaggggaatgctgggactggaaggtctgtaaacatctcaaaggttgcaaagggtttctctatggtaggaggaaa

SEQ ID NO: 510244 - DNA, 201 bp, Homo sapiens
aaccgttgtcaattccttttataaaatgtgcttcttattgtttctcttggtgagtttctgctgctctccatttttgaggctctgaacccctctttgcctattttttttttttttttttttgagacaagactctctctctgtcacccaggctggagtgcagtggcgacatattggctcatggcaagctccgcctcctgggtt

SEQ ID NO: 510245 - DNA, 201 bp, Homo sapiens
accgttgtcaattccttttataaaatgtgcttcttattgtttctcttggtgagtttctgctgctctccatttttgaggctctgaacccctctttgcctattttttttttttttttttttgagacaagactctctctctgtcacccaggctggagtgcagtggcgacatattggctcatggcaagctccgcctcctgggttc

SEQ ID NO: 510246 - DNA, 201 bp, Homo sapiens
ccgttgtcaattccttttataaaatgtgcttcttattgtttctcttggtgagtttctgctgctctccatttttgaggctctgaacccctctttgcctattttttttttttttttttttgagacaagactctctctctgtcacccaggctggagtgcagtggcgacatattggctcatggcaagctccgcctcctgggttca

SEQ ID NO: 510247 - DNA, 201 bp, Homo sapiens
cactccagcctgggtgacagagcaagacttcatctcaaaaaaaaaaaaaagaaaaagaaaaaaagaaaaagaaaagaaagcaagcaaaaaaaaagaaaagraaaaaaaaggctattgtgacttagaaaacaattcatgtatctcataacatgccctgaaggaagaattggctatttcctggttagcacagtattccacagc

SEQ ID NO: 510248 - DNA, 201 bp, Homo sapiens
aagccaccatgcctggctaattttatattttttagtagagacagggtttctccatgttggtcaggctgctctcaactccttacctcaggtgatctgccccmctcagcctcccaaagtgctaggattataggcgtgagccacctcgcccagcctaaagtttctcttaaaaagaaataatccctaagtttaggttacctcaga

SEQ ID NO: 510249 - DNA, 201 bp, Homo sapiens
gaagatatgcctgtaaaatacctagcacaagtgctcatgtctttctttttcccaggaccttccttctgatgatggaataatatttgtcaagaagttccggwataaaaaacaaacacaaagacaaagataaaaagcttgtggatgagaaactagatgtgcctttggtgtggaaactctgttctggatgtccttagactgtaa

SEQ ID NO: 510250 - DNA, 201 bp, Homo sapiens
cttcaatcaagttgacactcaatattagccatcatagaatcaaatactatttacattcagcatgaaggcctcaatcctccaggaaagtagaaagggctaaycaaactctaaaatgagtgttatctaagctatgtcaggaaacattagaaactttggtcagcctactgcccatagccttcttaaggacctgtaataccccta

SEQ ID NO: 510251 - DNA, 201 bp, Homo sapiens
gctagtgcctaactctaagcataataagaagaggagccaaacacattatgttgagatttttagaaatttaactcaaggttgggcgtggtggctcacgcctrtaatcccagcactttgggaggccgaggagggtagatcacttgaggtcaggagttggacaccagccttgggcaacatggtgaaaccccatctctactaaaa

SEQ ID NO: 510252 - DNA, 201 bp, Homo sapiens
tgatctccactcattgcaacctccgcctcccgggttcaagtgattcttctgcctcagcctctgagtacctgggactacaggcacgcaccaccacgtccagmtaatttttgtatttttagtagagacagggtttcaccatgttggccaggatggtcttgatctcttgaccttgtgatcgcctgcctcggcctcccaaagtgg

SEQ ID NO: 510253 - DNA, 201 bp, Homo sapiens
ctgctgtcctccatgggagatagcaccagaagtgggcatctgccactggaagagggtcctcaccagaacttggctgtgctgggaccctgctctcagacacrcagccttcagaactgtgagaaataaattctaattgttcaaaaatcaacaaaaaggagaaataaacgtatcctagctttgtgacaagagttagttttgtaa

SEQ ID NO: 510254 - DNA, 201 bp, Homo sapiens
actgtcgccgaggctggagtgcagtggtgtgatcttggctcactgcaagctctgcctcctgggttcacgcccagcctcctgagtagctgggactacaggcrcccaccaccaaccctggctaattttttgtatttttagtagagacagggtttcaccgggttagccaggatggtctagatctcctgacctcatgatccaccc

SEQ ID NO: 510255 - DNA, 201 bp, Homo sapiens
aacacattatgttgagatttttagaaatttaactcaaggttgggcgtggtggctcacgcctgtaatcccagcactttgggaggccgaggagggtagatcayttgaggtcaggagttggacaccagccttgggcaacatggtgaaaccccatctctactaaaaactacaaaaattagtgtggtggcgggtgcctgtaattcc

SEQ ID NO: 510256 - DNA, 201 bp, Homo sapiens
accccggagacgaaggctgcagcaagccgagatcatgccactgcactccagcctgggcgacagagtgagactccatctcaacaaaacaaaacaaaacaaaygaacaaaaaatccaagaggactggattcagggagcttctgtatagcaaacacgcggacattcctggaggatggtgcacctagggagggtgtggaagctct

SEQ ID NO: 510257 - DNA, 201 bp, Homo sapiens
agacctggctgtgtgggaaatcagagttttattattactcaaatcagtctccccaagcattcgagtatttggtgatcagagttttgttttttattttttattttttttttgagatggagtctcactttgttgcccaggctgaagtgcagtggcacgatctcggctcactgcaatctctgcctcccaggttcaagcaattct

SEQ ID NO: 510258 - DNA, 201 bp, Homo sapiens
tctcaaatgtgttatgaaatttttaatagaaagagaaaaagatgagtgggaaggaaaaagcacagactgtggagtgaggcagatctgagtctgaattttartttcatcaattacaatgtggaaaagtgagttgcttgaccttgaacattttacagattgagaaattgaggtttagagattaatttgcccaaagtctcatag

SEQ ID NO: 510259 - DNA, 201 bp, Homo sapiens
tctaaggcacgagaatcactggagcccaggaggtggaggttgcagtgagccgagatcacccctgcactccagcctgggcaatgcatcgagattctgtctcaaaaaaaaaaaagaaaaaaataaagaaataccaaacaacccgtgagaaaaatggaagaaaaacacatacatacatttcatgagtatacaacccacagaaac

SEQ ID NO: 510260 - DNA, 201 bp, Homo sapiens
gcaataacctgaatgcattgcgcaggcatttttgctaatcaaataatctatcttggaaatgtacagtaacaaagggaataattgaatggccactaaagaaytatttgtgtctgagtattatcaaaagaatgcacaaatttttctagaatcaaggtagtgagaaaatggtttttcctctagtgattgaatagaagagacttt

SEQ ID NO: 510261 - DNA, 201 bp, Homo sapiens
tggtggctcacgcctataatcccagcactttgggaagctgaggtgactggatcatgaggtcaggagttgaagaccagcctggccaatatggtgaaaccccrgctctactaaaaatacaaaaaattagccaggcgtggtggcgtgtgcctgtagtcccagctattcgggaggctgaggcaggagaatcgcttgaacccagaa

SEQ ID NO: 510262 - DNA, 201 bp, Homo sapiens
gaaaaaaaagttttttaaaaaagcataaaattatacatatgtcaagaacaaataagatcgttttgtcaatcctaagtttctgtgtacacaaattattagaraaaaatactttttaatcattctatttgtaaagtcatcagagaaggaaaatacaatctcactttctagtatttcacatacgcaatctaagctggttttctc

SEQ ID NO: 510263 - DNA, 201 bp, Homo sapiens
tgtcagtctggattttaaaaactatccaactatatgttattgtttccaagagatataccttagatccaaaaacacagactgaaagtaaaatgatgaaaaartatcacacaaatagctacaagaaagctggaatgcaggccaggcacagtggctcacacctataatcccagaactttgggaggccgaggtgggtggattacc

SEQ ID NO: 510264 - DNA, 201 bp, Homo sapiens
aattagctgggcatggtggcatgaacttgtaatcccagctactcaggaggctgaggcaggagaattgcttgaactcgggaggtggagcttgcagtgagccragatcgggccattgcactccatcctgggcaacagagtgagactctgtctcaaaaaaaaaaaaagttatttattaagttatacacaccctgaggaatgata

SEQ ID NO: 510265 - DNA, 201 bp, Homo sapiens
aaactatttcttgtttctacctccagaatctcttctttccttttttttttcttttttgagacagagtctcactttatcaccaaggctggagcacagtggcrcaatctcagctcactgcaacctgcccctcccaggttcaagcaattctcctgcctcagtctcccaagtagctggaattacagatgcctgctaccacacccg

SEQ ID NO: 510266 - DNA, 201 bp, Homo sapiens
aggagcactttgttcctctaatattcaccaccttcatctccactcaagttctctgccttgtccccatgggctctaagggagaagagagggagcagaaacaygaccttggaggtgggcaggaacggttcatggagcacaaactgtttatgaccccctctcaccagcgaggcataaagcaacacggtggtctctgccctgggc

SEQ ID NO: 510267 - DNA, 201 bp, Homo sapiens
acatataccagtaagatcatgatattgatatattaatattacttttacacacacgcaattatatatatccatccattacagtttttttaaatagagtaaargaggaatgaagttttacctgtttttgcagaacatataaaattcataagattcttgaaaataaagattattcatataacttcaaaatttagtaggtaactg

SEQ ID NO: 510268 - DNA, 201 bp, Homo sapiens
attcaccaccttcatctccactcaagttctctgccttgtccccatgggctctaagggagaagagagggagcagaaacacgaccttggaggtgggcaggaasggttcatggagcacaaactgtttatgaccccctctcaccagcgaggcataaagcaacacggtggtctctgccctgggcaggggcagaagtcgaagtccac

SEQ ID NO: 510269 - DNA, 201 bp, Homo sapiens
tgcagtatttctggaagccagcctggatctggagtagatcctgagagaccaccgcagagtcctcaagcctgcccccaccctgggatgaccatgaccatctttttttttttttttttttttttttttgagacagtctccctcttgtcacccaggctggagtgcagtggcatgatctgggctcactgcaacctccacctccca

SEQ ID NO: 510270 - DNA, 201 bp, Homo sapiens
ttaatgtatttgttggggacaggttgaggggagattagataaagaaaaacatgcagacataaactattaaacttttccaaaagtccacacaaagcctatcktctaaatatgccactacagcatttgcacgaactgagtgtaagcaactagctttgagactcaaaacaaggagtgagaataaaaaacccttttccaaacgaa

SEQ ID NO: 510271 - DNA, 201 bp, Homo sapiens
ttggaggtgggcaggaacggttcatggagcacaaactgtttatgaccccctctcaccagcgaggcataaagcaacacggtggtctctgccctgggcagggscagaagtcgaagtccacatgggcagcctggaattacactaccagactgcaacgaggcagcatctgctcattcatgtcaactcgattttattgagcacacc

SEQ ID NO: 510272 - DNA, 201 bp, Homo sapiens
ctggagtagatcctgagagaccaccgcagagtcctcaagcctgcccccaccctgggatgaccatgaccatctttttttttttttttttttttttttttgaracagtctccctcttgtcacccaggctggagtgcagtggcatgatctgggctcactgcaacctccacctcccaggttcatgcaattctcttgcctcagcct

SEQ ID NO: 510273 - DNA, 201 bp, Homo sapiens
tatcaggtagtcaatccctttgctttacagaaggatgtttcattgcatcccatgatacaaaattttaaagatgtaactttgtctcaaagcaacaattaacrgtgatatggctaacttcaatagctagaattagaggatgcttcgttacataaaacatgtacttttgaaagctacattaaaaaaatgcacttttaggccagg

SEQ ID NO: 510274 - DNA, 201 bp, Homo sapiens
tcatggagcacaaactgtttatgaccccctctcaccagcgaggcataaagcaacacggtggtctctgccctgggcaggggcagaagtcgaagtccacatgsgcagcctggaattacactaccagactgcaacgaggcagcatctgctcattcatgtcaactcgattttattgagcacacccctatgccaaacactgggtca

SEQ ID NO: 510275 - DNA, 201 bp, Homo sapiens
ccacctcccaggttcatgcaattctcttgcctcagcctcctgagtagctgggattacacgtgcccgccaccatgcccggctaatttttgtagttttagtaragatggggtttcaccatgttggtcaggctggtctgaaactcctgacctcaagtgatccgcccgcctcggcctcccaaagtgctgggattacaggcatgag

SEQ ID NO: 510276 - DNA, 201 bp, Homo sapiens
gccctgggcaggggcagaagtcgaagtccacatgggcagcctggaattacactaccagactgcaacgaggcagcatctgctcattcatgtcaactcgattktattgagcacacccctatgccaaacactgggtcagctctgggaacatcaaactgtaaagacgtggttcctgccctgaagcagctcgagcccagccaggga

SEQ ID NO: 510277 - DNA, 201 bp, Homo sapiens
gcaattctcttgcctcagcctccagagtagctgggattacaagtccatgccacattgcccggctaatttttgtatttttagtagagacagggtttcaccayattggtcaggctggtcttgaactcctgacctcaggtgatccacctgcctcggcctcccaaagtgctgggattacaggcgtgagccactgcacccggccga

SEQ ID NO: 510278 - DNA, 201 bp, Homo sapiens
ggagaaggaaagctcaggctaaggacgccttgacggttggcacctcaaaggttacccagtgcagtcagctgcctcagagcctgagatctagagccaggccrgctgagttctagcccagctctccactgccgaggcttgtggcctcagccaaggagtctctccttgtggggctgcagcctccttgtgtataaggtgcagaca

SEQ ID NO: 510279 - DNA, 201 bp, Homo sapiens
gcaatcatagctcactcgaactcttgggcccaagcgatccccctgcctctgcctcccaaaaagctggattacaggcatgaataaccattcccaccagtagstattattttatttatttattttgagatggagtctcgctctgttacccaggctggagtgcagtggtgcgaccttggctcactgcaacctccgcctcccagg

SEQ ID NO: 510280 - DNA, 201 bp, Homo sapiens
tgtttcagttacctcatgtgtaaaatgagaataataacatctaccttaaaggtaaaaacagcctagtcctaaaaggcaaggatatcagataagagatatamaattcgtaccaaaatgccttggacacagtaaatgcttattaaatatcaataccaatcctcctctcttctgaccttggaaagtctcagattgaacactggc

SEQ ID NO: 510281 - DNA, 201 bp, Homo sapiens
cggaggagattctctgtttcttcttcttcctgcctctggacaggggcagtggaggtggggagggaggaagaagtctcagcaccagtacccacctccccacrtgccagagacaaagcacaccacgcccattcacataggcctggctgcctggctggagagaggtcgactcctaggatccacgcctcaaccactcacagccca

SEQ ID NO: 510282 - DNA, 201 bp, Homo sapiens
gaccgaaggtggttttatataatattttatttttaatcatttatttatttattttgagacaggttcttgctctgtcactccagttggagtataagggtgtratctcagctcactgcaacctcaacttcccaggtttgagtgatcctcccacctcggcctcccaagtagccgggactaaagacccatgccatcctgcccagc

SEQ ID NO: 510283 - DNA, 201 bp, Homo sapiens
ttgaaacctaaaagcaagcttattgaagaatctgctaagagaaggctaacattttgaataaagtacagtaagtacagagttttcaactttatcttaacggyagatatttttacctttgtcatcttcagctgatgtcttaggagttaactgttatcccaagtccgctctatggaagtgcagtattgttagatgctatacctc

SEQ ID NO: 510284 - DNA, 201 bp, Homo sapiens
gcttcctcctggcctgctccgcctacaggaggcagacatgaaggaaaatcaccaggaagcccaaaaccaggcctctcctaaggagtctgggccactcagcycggcgcctcctcactgggggcagctctccttccccaaccagcactcaagggctgccgcatcccctcccgggacctcatccctgcaggtcccagcctcgct

SEQ ID NO: 510285 - DNA, 201 bp, Homo sapiens
gctgaggcaggagaacggcgtgaacccggaaggcggagcttgcagtgagcggagatcgcgccacagcactcccgcctgggcgacagaacgagactccgtcycaaaaaaaaaaaaaaaaaaaaaaagctcccacgacacataaacataaggtgatattttaatctttatcataatgaatttatccaatccagggtttctaaa

SEQ ID NO: 510286 - DNA, 201 bp, Homo sapiens
tccgcctacaggaggcagacatgaaggaaaatcaccaggaagcccaaaaccaggcctctcctaaggagtctgggccactcagctcggcgcctcctcactgsgggcagctctccttccccaaccagcactcaagggctgccgcatcccctcccgggacctcatccctgcaggtcccagcctcgctgctcactgtggaaggcg

SEQ ID NO: 510287 - DNA, 201 bp, Homo sapiens
gttattaaggaaggtaaaagtgcataaaggtcaaagtcttaagaaagtctgattaaataattgcaaaaacaattttttttttttgaggcaaagtcttgctytgttgcccaggctggagtgaagtggcatgatctcggctcactacaacctccgcctcccaggttcaagcgattctcctgcctcagactcctgagtagctgg

SEQ ID NO: 510288 - DNA, 201 bp, Homo sapiens
agacatgaaggaaaatcaccaggaagcccaaaaccaggcctctcctaaggagtctgggccactcagctcggcgcctcctcactgggggcagctctccttcyccaaccagcactcaagggctgccgcatcccctcccgggacctcatccctgcaggtcccagcctcgctgctcactgtggaaggcggcacgctcctcccaaa

SEQ ID NO: 510289 - DNA, 201 bp, Homo sapiens
tcactacaacctccgcctcccaggttcaagcgattctcctgcctcagactcctgagtagctgggattacaggcatctgccaccatgcctggctacagaaaygtttttttaaaaaaagaacatatcatgagttggcatagccactaattatgttaacatagttaataactggggaaaacctgaatgagggaagtgtttagat

SEQ ID NO: 510290 - DNA, 201 bp, Homo sapiens
tttgattaacagcacagcacggaaatgttagctctccttagccaaaccttgaaagatactcttatttaatcacagttttaaatgttagcttgcttaccttaaaaaaaaaaaaaaaaaaagccagaagtcagatattcatgatgtgagataaaattcttaagtgtggagggaacaaaaactacaaccttttgtaaaagtcac

SEQ ID NO: 510291 - DNA, 201 bp, Homo sapiens
gctgaggcgggtaaatcacttgaggttaggagttcaataccagcctggccaacatggtgaaatcctgtctctactaaaaatacaaaaattagccgggcatrgtggtgtgcacctgtagttctagctacttggcaggctgaggtggaagaatcccttgaacccaggagttggaggttgcagtgagctgagatctcaccacta

SEQ ID NO: 510292 - DNA, 201 bp, Homo sapiens
ttgattaacagcacagcacggaaatgttagctctccttagccaaaccttgaaagatactcttatttaatcacagttttaaatgttagcttgcttaccttaaaaaaaaaaaaaaaaaaagccagaagtcagatattcatgatgtgagataaaattcttaagtgtggagggaacaaaaactacaaccttttgtaaaagtcaca

SEQ ID NO: 510293 - DNA, 201 bp, Homo sapiens
tgattaacagcacagcacggaaatgttagctctccttagccaaaccttgaaagatactcttatttaatcacagttttaaatgttagcttgcttaccttaaaaaaaaaaaaaaaaaaagccagaagtcagatattcatgatgtgagataaaattcttaagtgtggagggaacaaaaactacaaccttttgtaaaagtcacaa

SEQ ID NO: 510294 - DNA, 201 bp, Homo sapiens
gtttgccactccacagtgttggttttacttcttattagttggctggctcaaaagtccaaaaaggcttcactcaatgcgtggagccccagtggtcctccacrtggcctttctctctccatgtagtctcttctcttccagttgtcttggctgagcttcttcaaagcatagcatctagcttcctgaaacaaaaatggaagcttc

SEQ ID NO: 510295 - DNA, 201 bp, Homo sapiens
gattaacagcacagcacggaaatgttagctctccttagccaaaccttgaaagatactcttatttaatcacagttttaaatgttagcttgcttaccttaaaaaaaaaaaaaaaaaaagccagaagtcagatattcatgatgtgagataaaattcttaagtgtggagggaacaaaaactacaaccttttgtaaaagtcacaaa

SEQ ID NO: 510296 - DNA, 201 bp, Homo sapiens
gctgattgcatttcaaagaaatagttcccaggtcttggagaaagactttcctgggttgtaaaactgacaaagcttttttaaagattatgcatcgactaaargtaaaatgaccaaaaaaaaaaaaaaaattggcatctcgaagtatcagagagaaaatttacaagttttctaaagcaaatgctctaagaagagggaggtcag

SEQ ID NO: 510297 - DNA, 201 bp, Homo sapiens
attaacagcacagcacggaaatgttagctctccttagccaaaccttgaaagatactcttatttaatcacagttttaaatgttagcttgcttaccttaaaaaaaaaaaaaaaaaaagccagaagtcagatattcatgatgtgagataaaattcttaagtgtggagggaacaaaaactacaaccttttgtaaaagtcacaaaa

SEQ ID NO: 510298 - DNA, 201 bp, Homo sapiens
atttcaaagaaatagttcccaggtcttggagaaagactttcctgggttgtaaaactgacaaagcttttttaaagattatgcatcgactaaaagtaaaatgmccaaaaaaaaaaaaaaaattggcatctcgaagtatcagagagaaaatttacaagttttctaaagcaaatgctctaagaagagggaggtcaggggcctccc

SEQ ID NO: 510299 - DNA, 201 bp, Homo sapiens
accagcctgagtacatggggagactccatgtctacagaaaataaaaaaattaggcactgtggtgtgtgcctgtgggacacagctacttgggaggttgtggygggagggtcacttgagcctgagcagttaaggctgcagtgagccgggatcatgccactgcaaaactgcactccagcctgggtgacagagcaagaccctgtc

SEQ ID NO: 510300 - DNA, 201 bp, Homo sapiens
gtacatggggagactccatgtctacagaaaataaaaaaattaggcactgtggtgtgtgcctgtgggacacagctacttgggaggttgtggcgggagggtcrcttgagcctgagcagttaaggctgcagtgagccgggatcatgccactgcaaaactgcactccagcctgggtgacagagcaagaccctgtctcaaaaaaac

SEQ ID NO: 510301 - DNA, 201 bp, Homo sapiens
ctgtctcttaaaaaaaaaaaaaagattgcttctgtactgaacatgtacagactattttttcttgtcactagtccctaaacaatacagaattacaactattwacatagcatttacattgtattatgtattataagtaatctagagatgatttaaagtgtgtaggaggatgtgagtaggtcatatgcaaatactatgtaattt

SEQ ID NO: 510302 - DNA, 201 bp, Homo sapiens
ttactgtagactttatacacactgtatactcaagctatagtaaattcattttaaaaaatttttttcataaagtttatttcatgattggtgggtagtgcatktaacagttaaatatacttaaataatgtgtaggtgactgcacggttgcagcatattggtaactagatacataaccaattcaactagaaaccagctaacgag

SEQ ID NO: 510303 - DNA, 201 bp, Homo sapiens
cccacatggatacttatcatttcttacgagtgtgacattcgggcaagtggacttggaaaatgatctggcatggtatcaaaaatcaagcaattggctgggcrcggtggctcacgcctgtaatcccagcactttgggaggccgaggcaggtggatctcgaggtcaggagatcgagatcatcctggctaacaccatgaaaccct

SEQ ID NO: 510304 - DNA, 201 bp, Homo sapiens
ggacttggaaaatgatctggcatggtatcaaaaatcaagcaattggctgggcacggtggctcacgcctgtaatcccagcactttgggaggccgaggcaggyggatctcgaggtcaggagatcgagatcatcctggctaacaccatgaaaccctgtctctactaaaaatacaaaaaattagctgggcgcagtggcaggcacc

SEQ ID NO: 510305 - DNA, 201 bp, Homo sapiens
ccgcctcagcctcccaaagtgctgagattacaggcatgagccattgtgcccagcctattttgctttctttttcttaaagcgaatcccctaccctcccaaaytgtgtaatccttaggctctaaaaataatttgcacccacccttggtctagagaaatgataactgaggaataaatgcatctctatgtgtgcaatattattgt

SEQ ID NO: 510306 - DNA, 201 bp, Homo sapiens
ggacactattggtggacgttcacagtggcaagagagtgcaatgacaggttgagaggaatttctatttagacaaatgtgactccattaaactcacactatgyagacattcacctttccaaagggcactcttttttttgttgttgaggtgatgtctcgctctgttgcccatgctggagtgcagtggtgcgatttcggctcaca

SEQ ID NO: 510307 - DNA, 201 bp, Homo sapiens
gttgtcccaaaattgtgttcagtttcacaagtataaaataagacttctgaaaaaaagtttacaattagttataaaacacttaagaatatattttgacattsacatcacagtgggcatttttgaaaaataaattttgctaatatagcttagaaaccaaaacatatttacagtcccatttaaataaacaagtccttaactgag

SEQ ID NO: 510308 - DNA, 201 bp, Homo sapiens
aattttagtttcatcaattacaatgtggagaagttacttgacctcattttacaaatcagggtcactgggaaaaataaatgatatatatcagtgtccaacarttagaaaaaagtaatataatctgtgaaaataatattcacttttattatatgctagttttacatttggttgtctattaacaaaacaaaaaactccaattga

SEQ ID NO: 510309 - DNA, 201 bp, Homo sapiens
acattttctgtttttttaacccacccagtttgtggtgctttgttatggcagctctagaaaactaatatagagtccctatgaacgttttggaaaattgtggmgcgatcaacaaaaggggctgggcacagtggctcacgcctataatcccagcattttgggaggctgaggccagaggatcacttgaacccaggtgtttgaaat

SEQ ID NO: 510310 - DNA, 201 bp, Homo sapiens
ttaaagcagttttttattccatagaccatgtaaattgttctccacctatagattcatgggatttttagaatatgaaaggtatcgtgggctttgttgttttrtatatcgcctaggtggccttcctgatttttctttggagaatcgttaatcatcctttaaatgagtctgtgatattactctccatgccacctggattttttt

SEQ ID NO: 510311 - DNA, 201 bp, Homo sapiens
aaagaagacagaaagaaaatgtatttatttaaaaagaaaagaaagcagggatgataaagcaccctgcacccccagtacccccacccccaacctgaaccccrtgcaacccccatcctccaccaccttttgtttttcaaaatcccccattcttttgtgttcttggagaagacttgctcagagaaccatccttctgcataggac

SEQ ID NO: 510312 - DNA, 201 bp, Homo sapiens
attccatagaccatgtaaattgttctccacctatagattcatgggatttttagaatatgaaaggtatcgtgggctttgttgttttgtatatcgcctaggtrgccttcctgatttttctttggagaatcgttaatcatcctttaaatgagtctgtgatattactctccatgccacctggatttttttttagtggaaacagct

SEQ ID NO: 510313 - DNA, 201 bp, Homo sapiens
gcctcaagcgatcctcccaccttggccacccaaaatgctgggattacaagtgtgagccaccgtgcctggcctcttttgtttttctttttttaatcaacttttttttttttttttttttcctgatgggttctcactatgttccccaggctgttctcaaactcccagtcacaagtgatcctcccgcctcagcctcccaagcag

SEQ ID NO: 510314 - DNA, 201 bp, Homo sapiens
tgagccaccgtgcctggcctcttttgtttttctttttttaatcaacttttttttttttttttttttcctgatgggttctcactatgttccccaggctgttytcaaactcccagtcacaagtgatcctcccgcctcagcctcccaagcagctgggacttcaggcacacaccactggacctggctataattcatatttcttga

SEQ ID NO: 510315 - DNA, 201 bp, Homo sapiens
tttttttttttttttttcctgatgggttctcactatgttccccaggctgttctcaaactcccagtcacaagtgatcctcccgcctcagcctcccaagcagstgggacttcaggcacacaccactggacctggctataattcatatttcttgataagaaaagttgatggatgctttttctttccagatgttaaaacttgttt

SEQ ID NO: 510316 - DNA, 201 bp, Homo sapiens
cacgatctcggctcactgcaacctctgcctcctgggttcaagcgattctcccatctcagcctcccaagtagctgggactacaggtgtgcgccaccacaccyggctaatttttgtatttttagtagagaaggggtttcactatgttggccagactggtctcgaactcctgacctcagacaatccgcccacctcagcctccca

SEQ ID NO: 510317 - DNA, 201 bp, Homo sapiens
gatactgaagaacatctacgagcatcagcggcatccagggaaacatgacctcaccaaatgaactaaataaagctccagggaccaatcctggaaaaacagaratatgtgacctttcagacagtgaattcacaatagccgtgttgaggaaactcaaagaaattcaaaataacatagagaaggaattgataattctatctgata

SEQ ID NO: 510318 - DNA, 201 bp, Homo sapiens
cctgaccaggcctcaaatagtcacttgaattgagcttaaactaagctctttgagaatggcgtgaacctgggagggggagcttgcagtgagctgagatcgcrccactgcactccagcctgggggacagagcgagactccgtctcaaaaaaaaaaaaaacaaaaaacaaaactaagctctttgattcccagcaaacaagtaaa

SEQ ID NO: 510319 - DNA, 201 bp, Homo sapiens
caggtggatcacctgggctcaggagttcgagaccagcatgggcaacatggtgaaactctgtccctacaaaaaatacaaaaaattagctgggtgtggtggtrtgcctgtaatcccagctactcgggaggctgagacaggagaattgcttgaacccgggaggcagaggttgcagtgagatcgcaccactgcgccccagccttg

SEQ ID NO: 510320 - DNA, 201 bp, Homo sapiens
tcggaactctgttttctaaatccccttgcccagtggaactgtgggattgggggtcactgcaaagatacccaaatagggcattgcttagtaaagtcgtgggwcagggccactcctaagacatcagaactgtagagccattagcatgcaacactagcctgggagagccacagacacaagactccaacccatgacagctgcacc

SEQ ID NO: 510321 - DNA, 201 bp, Homo sapiens
agctctttgagaatggcgtgaacctgggagggggagcttgcagtgagctgagatcgcgccactgcactccagcctgggggacagagcgagactccgtctcaaaaaaaaaaaaaacaaaaaacaaaactaagctctttgattcccagcaaacaagtaaaaaataaagcacatagagttatataattctagttatctgatttt

SEQ ID NO: 510322 - DNA, 201 bp, Homo sapiens
actcctgggctgaagtaatcttctcaagtagctggaactacaggcctagccaatttttctattcttgatgtcagattgtcagacataactcctgttactgkgcctatgtctaaaagcaccctactatggacttatatcaaactaaaaagcttctgcacagccaaggaaacaataagagcaaagagacaacctatggaatgg

SEQ ID NO: 510323 - DNA, 201 bp, Homo sapiens
ggctggtatggaactcctcctgggctcacacaattctctggcctcagcctcccaagtggctgggaccataggtgtgcgcctccacatacagactggagaasactactcttgacttaagaccagaattgtccataagcctgattgaattgtattcctccaaattcctgtgttgaaatcctaacccccagcatctcagaatgt

SEQ ID NO: 510324 - DNA, 201 bp, Homo sapiens
ttggcaggctgaggtggaagaatcccttgaacccaggagttggaggttgcagtgagctgagatctcaccactacactatagcctgggcaacagagtgtgamtctgccaaaaaaaaaaaaaaaaaaaaatctcaattggctttatttgcaattctagaaacaggtaacactttgttccacaaaacagaatcatgagctgagc

SEQ ID NO: 510325 - DNA, 201 bp, Homo sapiens
tgctctccagccagggtgtcccactgtcttagcaaaaaactggaaggaagggaacagataaatggatggggactgtaaacaaccaaatatttttcattttytagaagtgggaaatcatccaaaaggtgcaaatatttggttaggtgtttacattttcatgctccattgttgatgttgtggaactaggagcaagctaatact

SEQ ID NO: 510326 - DNA, 201 bp, Homo sapiens
ttaatgtaagcttgtatactgtgctacctaaaagaaatgttaaggacaacagcttaactatggcaaggagtcaccatttccatcattcattcatcatggtyctcatttccaaaattccacctcaaagccattctagcactacgagttttttggagatgctgctgaattgcaatctaaactctctgccttacagtagtaact

SEQ ID NO: 510327 - DNA, 201 bp, Homo sapiens
cccggctgacaatttcttaaaataagaaaattaattttgctgcaccaattgttccttttgtgaagaaagatttctctgaagcatgcaatgctgtttgatcrcattttactcacggtacaacttctttcaaaattgcagtcgatcctctcaaagcctgcccctgctttatcagctaagtttatgggatattctaaatcctat

SEQ ID NO: 510328 - DNA, 201 bp, Homo sapiens
aagttcctaagggtatggtcaaagttatctttcaaaaacaaccgtggtatactccggcacaacagcaaaagaataactgaggcccactgttttctacatcstgtaataagaccacaaaacttttagactggaaaatgttaaaaggatttataaccaaaggctcaccttcctggggtatcatcaacagttacatgatttatg

SEQ ID NO: 510329 - DNA, 201 bp, Homo sapiens; identical to SEQ ID NO: 379918

SEQ ID NO: 510330 - DNA, 201 bp, Homo sapiens
tctgcctttaaaaacatagataaaattgtccttggtctcaggggtaaacaaaatcaagctataaactgaatattgctctccagccagggtgtcccactgtyttagcaaaaaactggaaggaagggaacagataaatggatggggactgtaaacaaccaaatatttttcattttctagaagtgggaaatcatccaaaaggtg

SEQ ID NO: 510331 - DNA, 201 bp, Homo sapiens
gaactcctgaccttgtgatccgcctgcctcggcctcccaaagtgctgggattacaggtgtgagccaccgcacctggccgtgaatattttaatgtaagcttrtatactgtgctacctaaaagaaatgttaaggacaacagcttaactatggcaaggagtcaccatttccatcattcattcatcatggttctcatttccaaaa

SEQ ID NO: 510332 - DNA, 201 bp, Homo sapiens
tttcttaaaataagaaaattaattttgctgcaccaattgttccttttgtgaagaaagatttctctgaagcatgcaatgctgtttgatcgcattttactcayggtacaacttctttcaaaattgcagtcgatcctctcaaagcctgcccctgctttatcagctaagtttatgggatattctaaatcctatggtgtcatttcg

SEQ ID NO: 510333 - DNA, 201 bp, Homo sapiens
gataagcaaattcattcactctgaacacctgctggttgcagcaagcatggggctcagagctgagaacacaaaggtgcagagcccctagaaaatgctcacargttcacatgtaacatacaattcgagggcatcatagatccccgcaaagcatgcattccaggttggaggactcccggaactgcagtgttacacaaggcacag

SEQ ID NO: 510334 - DNA, 201 bp, Homo sapiens; identical to SEQ ID NO: 379919

SEQ ID NO: 510335 - DNA, 201 bp, Homo sapiens
gaataacaaaatttaagggaccaaagatttaaatttgtccaatcctaagccaatatcctttttaaggtaaggggtacaagcaagggttttattttcagccyaatgactccccagataaaatgggtgactacctataaaatagtggcagctccactacacagaaaaattttctcaaaggagtcatcggtctggatgagctag

SEQ ID NO: 510336 - DNA, 201 bp, Homo sapiens
acttcctctactgaagtcttaaaaaaaaatcctttttaggagatgggggtctcactgtgttgcccaggctggtcttgaactctatgcttgtgatccaccckcttcagccttccaaagggctggaattataggccaccatgcccagcctgctctactgaagtcttaaagccctcaaagtcaccatgaggtttggaatcaact

SEQ ID NO: 510337 - DNA, 201 bp, Homo sapiens
ccatctagcggcatttaacggctgtagcagaatgcagaccaggaaagcccctaaacccaatctcccctgcatttcaccgtggcgccgatacctttctaatrcctctacaaaaggcttagagctctcttctcaaagaccagcacccctaagatcaagggtgttgctcataatgacttttgcagctttcttctcccacgtctc

SEQ ID NO: 510338 - DNA, 201 bp, Homo sapiens
gaagggtggatcacttgaggtcacgagttcaagatcagcctgggcaacatgctgaaactccatctctactaaaaaatacaaaaattagccgggtgtggtgrcccatgcctgtaatcccagctacccgggaagctgaggtgggaggatcatggtggaccagcccatgaggtggaggttgcagtgaactgagatggcaccact

SEQ ID NO: 510339 - DNA, 201 bp, Homo sapiens
tttgagtcaaccaaccacaccccataaactactcactgagaaatgtaaaaatggttctaaaacatgaaagtccagtgaaggaataacaaaatttaagggaycaaagatttaaatttgtccaatcctaagccaatatcctttttaaggtaaggggtacaagcaagggttttattttcagcccaatgactccccagataaaat

SEQ ID NO: 510340 - DNA, 201 bp, Homo sapiens
agtcttaaagccctcaaagtcaccatgaggtttggaatcaacttcttcgaaactcctgttcatgttgataatttgacctcctcccaacagtatctagaatkgtgaatcctttccagaaggttttcaatagactttgcccagatccatcagaggaatcactatctacagcagctatatctttataaaatgtatttcttatat

SEQ ID NO: 510341 - DNA, 201 bp, Homo sapiens
gagtctcactctgtcacccaggctggagtgcagtggcgcgatctcggctcactgcaagctcgcctcccgggttcacaccattctcctgcctcagcctcccragtagctgggactacaggcgcccgccaccacggccggctaatttttttttttttttttttttggtagagacggggtttcaccgtgttagccaggatggtc

SEQ ID NO: 510342 - DNA, 201 bp, Homo sapiens
gaagctgaggtgggaggatcatggtggaccagcccatgaggtggaggttgcagtgaactgagatggcaccactgtactcctgcctggacgacagagcgagmctctgtctcaggaaaaaaaaaaaaaaaagaagaagcaaagattatgtccattgtttcaaagtgacttttcttgtaagatgagacaaggagatagaacaac

SEQ ID NO: 510343 - DNA, 201 bp, Homo sapiens
catgtgccaccgcacctggctaattttgtatttttagtagacacagggtttcaccatgttggtcaggctgctctcgaactcctgacctcaggtgatccacycgcctcagcctcccaaagtgctaggattacaggggtgagctacccgcgcccagccaagcacccctttttctatgagtccatatgactctgctccatttgc

SEQ ID NO: 510344 - DNA, 201 bp, Homo sapiens
ccattttactaatattagtagatcgagagcccatctttataactttggcctcaataagactagtgatagtgtcactctacgaggggaaaggtagttgccaygatgctcttcggtttaggagcaattaaaatgactacagattggtggcagtttatggatttgcacaagaagagaactcacagaactagcattattttaccc

SEQ ID NO: 510345 - DNA, 201 bp, Homo sapiens
ttcttggggctactttttctgtgtgtgaaaggattaaagcagagggaaactcattatcgtgactcttgaagattaagtgacctgtttgggaatttggctatctctctctcctgctttctcttgagacaggaataatacagggtggttgcaagagaacagaaaattccaggcagcagtttcacatgcctagcaaaatgaaac

SEQ ID NO: 510346 - DNA, 201 bp, Homo sapiens
gctatattacagctatgtaggtgcatgtccttgtttgttaagacaaaaaaacaaaggcactaaatatacagaaatgatggggcagtgggtaacttactatyaaatcaattaggaaaaaaaaatttctgtatatttgagatagtttttgaaattaaaaaataatatataggaaccacatctcgtgtaattacctgactttga

SEQ ID NO: 510347 - DNA, 201 bp, Homo sapiens
agatcgagagcccatctttataactttggcctcaataagactagtgatagtgtcactctacgaggggaaaggtagttgccatgatgctcttcggtttaggrgcaattaaaatgactacagattggtggcagtttatggatttgcacaagaagagaactcacagaactagcattattttaccctctgtctttacagaggtat

SEQ ID NO: 510348 - DNA, 201 bp, Homo sapiens
tcttggggctactttttctgtgtgtgaaaggattaaagcagagggaaactcattatcgtgactcttgaagattaagtgacctgtttgggaatttggctatctctctctcctgctttctcttgagacaggaataatacagggtggttgcaagagaacagaaaattccaggcagcagtttcacatgcctagcaaaatgaaact

SEQ ID NO: 510349 - DNA, 201 bp, Homo sapiens
tcggtttaggagcaattaaaatgactacagattggtggcagtttatggatttgcacaagaagagaactcacagaactagcattattttaccctctgtcttyacagaggtatatttggctgttttgttagacattctggggacaagacaaaatgaaaaaagaaaaacatgactacagaggtagaggaattattacaagaagg

SEQ ID NO: 510350 - DNA, 201 bp, Homo sapiens
cttggggctactttttctgtgtgtgaaaggattaaagcagagggaaactcattatcgtgactcttgaagattaagtgacctgtttgggaatttggctatctctctctcctgctttctcttgagacaggaataatacagggtggttgcaagagaacagaaaattccaggcagcagtttcacatgcctagcaaaatgaaactg

SEQ ID NO: 510351 - DNA, 201 bp, Homo sapiens
gacaaggctgcagagttctccaaagtggctgtactaattcaactgccaccagcagtgtctaaggattcctgtttgtgactctacattgttagggttgtttkttaagacttaaaaattttggccgccccggagagtgtgaaacagtatcacctggtgcttctcatttgcatttccctgattactaatgaagttaagtagttt

SEQ ID NO: 510352 - DNA, 201 bp, Homo sapiens
actcacagctaaaaagtggaaaaccagggattcgaatccaggtccaaatgactgtgctttagtgaagctcatccagtcgcaagagatatccagcataagtraagggaggttcactgaagggaggttcacaaactgagagtaagaattgaaactatctgggaaagccaaaaacagaagcagactagagctgcaaggcagctc

SEQ ID NO: 510353 - DNA, 201 bp, Homo sapiens
ttggggctactttttctgtgtgtgaaaggattaaagcagagggaaactcattatcgtgactcttgaagattaagtgacctgtttgggaatttggctatctctctctcctgctttctcttgagacaggaataatacagggtggttgcaagagaacagaaaattccaggcagcagtttcacatgcctagcaaaatgaaactgt

SEQ ID NO: 510354 - DNA, 201 bp, Homo sapiens
gacttggaaaatgatctggcatggtatcaaaaatcaagcaattggctgggcacggtggctcacgcctgtaatcccagcactttgggaggccgaggcaggtrgatctcgaggtcaggagatcgagatcatcctggctaacaccatgaaaccctgtctctactaaaaatacaaaaaattagctgggcgcagtggcaggcacct

SEQ ID NO: 510355 - DNA, 201 bp, Homo sapiens
tcaagcaatccacctgtctaggcctcccaaaatgttgggattacaggtgtgagccaccacgcccaacctcacatttccacttctgtgtagtttctattcarggcttttgttcatttttctccagagtacctttttcctttattaatttgtcagttacatgtatggcaagtatcttcctcaagtatttatgggttgtttctt

SEQ ID NO: 510356 - DNA, 201 bp, Homo sapiens
gaccatgaaaaacaggatgtgggccaagctggctaaaaccaactggacccaacagagagcaggatttgacctaggtttctcctaggacctcattattcacycattaataaacaaatcgcacacccacctacactgtgacaagaacactgtatttggtgttaaaatgggcagcatcacagttctgagaaatcttcacctttt

SEQ ID NO: 510357 - DNA, 201 bp, Homo sapiens
agaagagggaggtcaggggcctccctcaggaggaagcccgcctaaagggaaacatgagcttgtcttggtcttgaatcttctactgcacaaaagcccctatstgttattcaccatattaattatttggtgatcaagaagcaatgttttaaacatttcacaactgaccagatgttttgttttataagaattatatttaggtac

SEQ ID NO: 510358 - DNA, 201 bp, Homo sapiens
aggccgaggcaggtggatctcgaggtcaggagatcgagatcatcctggctaacaccatgaaaccctgtctctactaaaaatacaaaaaattagctgggcgyagtggcaggcacctgtagtcccagctactcgggaagctgaggcaggagaatggcatgaacccgggaggcggagtttgcagtgagctgagatcgcgccact

SEQ ID NO: 510359 - DNA, 201 bp, Homo sapiens
cccacttctattcccacccactaagacccagggctgactggccatcaactcaaagactaacagcgggacgatctcactggcgggacgatctcactggcggrttgcctaggaggcttgggagtgaataacaggcatctggttctaagatccacagcgcagatttaaggaaaaaacagctgttagccatactccctctacccc

SEQ ID NO: 510360 - DNA, 201 bp, Homo sapiens
ggccgaggcaggtggatctcgaggtcaggagatcgagatcatcctggctaacaccatgaaaccctgtctctactaaaaatacaaaaaattagctgggcgcrgtggcaggcacctgtagtcccagctactcgggaagctgaggcaggagaatggcatgaacccgggaggcggagtttgcagtgagctgagatcgcgccactg

SEQ ID NO: 510361 - DNA, 201 bp, Homo sapiens
attgcaacttctgcctcccaggttcaagcgattctcctgcctcagcctcccgagtagctgggactacaggtgcatgccaccatacccagctaatttttgtrttttgcagaggttgcagtgagctgagatcatgccattgtactccagcccaggcaacaagagcaaaactctgtctcaaaaaaaaaaaaaaaaaaacttagc

SEQ ID NO: 510362 - DNA, 201 bp, Homo sapiens
taaattgcaatttgagagacacaaatcgagcaagcagctaaatcatattccatacagacaagctgggcaggggcttataaaggttcctggcaagtttatayaagtggaaaattttagcacagtctatgattgacaatggctgattgacagcttagatgtctcttggtgatgaacgacctaatttggcacagctgtcttctc

SEQ ID NO: 510363 - DNA, 201 bp, Homo sapiens
agcagctaaatcatattccatacagacaagctgggcaggggcttataaaggttcctggcaagtttatacaagtggaaaattttagcacagtctatgattgrcaatggctgattgacagcttagatgtctcttggtgatgaacgacctaatttggcacagctgtcttctcaggagatttgtgatcaggcccagtgtaaacag

SEQ ID NO: 510364 - DNA, 201 bp, Homo sapiens
tatttccttagaaaccactgagatcaattatttcagtaagccctttggttctggaatagatttgtcccaggaagtcatgtcccatggaggagggagtcatrgtaatgatagtggatgatctgtgtcaaatggaatagtccaaatttgagcaacaaggaggagttgaggatgtgggccccaattgtggtgcacatatgtggt

SEQ ID NO: 510365 - DNA, 201 bp, Homo sapiens
gggtctgaactcacctctattgaaggaaaacaaagctcactaagattgcaccctacggtgtgtgcttctgttctctccacctaccgtcagcactctcagcrgttttcctcttggctctgcctcctgcaattactttctgctcagctgcttgctgttgctaagaagggttatgcccatcaactgtgctgtagacatgcagta

SEQ ID NO: 510366 - DNA, 201 bp, Homo sapiens
cctttggcttccgggagccccccatgcacttccctggaaacaggtggagctctgtcctgtggctctgattcactctcctgtccctcggtacaccattgcascgtgtcctcctgctggcccttctgttaccctgtacttgctgtacactaccacggtggccgggggcctcagcaccaggaaagcaacttcccccgtgtcctc

SEQ ID NO: 510367 - DNA, 201 bp, Homo sapiens
aaaaaaaaagactctttgccaatttgacaggtaaaaaaggagtatcatcttattgtccttccaatgtacattttattggtaactaatgagatcgaaccttstgactcaaaccactacatttatttatttattatttctatttcttctctttccatcttttgcaatttttccattgcggtctttgtgtttcctttaatctat

SEQ ID NO: 510368 - DNA, 201 bp, Homo sapiens
atggaatagtccaaatttgagcaacaaggaggagttgaggatgtgggccccaattgtggtgcacatatgtggttagggtaggattcatgattgtaggcctratctgtcagttcaatgtgttgagccaccataattttagtttcgttgacagcaacagtgtggcatcaagctgagagaggagaaaagaaagaaccagctagg

SEQ ID NO: 510369 - DNA, 201 bp, Homo sapiens
accgtttatatttggtctccaagacttcaaaagcttttccagtgtctgcattaaatgaaccagatgttgaaaatcccacagcactgcgtgactttgttctyacatccagttttaccaaccccaaaccaaatcctttgttaaaaatatctctggcagctttgccaaggttaacatatgatgaagaaatccacactggccaca

SEQ ID NO: 510370 - DNA, 201 bp, Homo sapiens
ggtgcacatatgtggttagggtaggattcatgattgtaggcctaatctgtcagttcaatgtgttgagccaccataattttagtttcgttgacagcaacagygtggcatcaagctgagagaggagaaaagaaagaaccagctaggaaggcggttagggcaggtgctcagtagaattctttcaaacaaaggaacaacctgaaa

SEQ ID NO: 510371 - DNA, 201 bp, Homo sapiens
ttcagtaagggacataggtcaggttcttccaaacacttttttattctccatgctgtctcaaatttacaagctcccatagctgagcaagcatagagccaagragtaagactctgtctgccttcagcaagcagtgcccaatttccccaaagtgccctcttgtttcccctctcacttggaatcagggtgggaggggaaataccc

SEQ ID NO: 510372 - DNA, 201 bp, Homo sapiens
gccaccataattttagtttcgttgacagcaacagtgtggcatcaagctgagagaggagaaaagaaagaaccagctaggaaggcggttagggcaggtgctcwgtagaattctttcaaacaaaggaacaacctgaaaactcaggctacagatacagataagggaactagcacaggcagcttgcctaggatatacccatagctg

SEQ ID NO: 510373 - DNA, 201 bp, Homo sapiens
ggagtaagactctgtctgccttcagcaagcagtgcccaatttccccaaagtgccctcttgtttcccctctcacttggaatcagggtgggaggggaaatacyccagtaatccccttttttttttttaaagagtctcattctgtcaccctagctggagtgcagtggtatgattgtagcccattgtagcctctatcacccaggc

SEQ ID NO: 510374 - DNA, 201 bp, Homo sapiens
gcctttggcttccgggagccccccatgcacttccctggaaacaggtggagctctgtcctgtggctctgattcactctcctgtccctcggtacaccattgcrccgtgtcctcctgctggcccttctgttaccctgtacttgctgtacactaccacggtggccgggggcctcagcaccaggaaagcaacttcccccgtgtcct

SEQ ID NO: 510375 - DNA, 201 bp, Homo sapiens
ctgtcacttctttctaagggctctttctcacttggatggtccccagaaagtcagctgccatgtcacgaagtgccctgtgagaaggacctgtaaggagggayggagggaggcctctaaatgacagccttcgaggaactgaatcctgctggtgaccatgtgagggagcttggactccggtccccctgtgttgagccttcagat

SEQ ID NO: 510376 - DNA, 201 bp, Homo sapiens
accaagatccctcacatgcacagttcacaatagggtgcacgcccctatgagaatctaatgccactgctgatctgacaggaggcggagctcaggcagtaatrctccctcgcccaccactcacctcctgctgtgtggccccattcctaacagggtttggggacccttgatgtaaataactgttgttgttgttgttgttgttgt

SEQ ID NO: 510377 - DNA, 201 bp, Homo sapiens
agatgcaaatccttctctactcacaaggtaggttttccttggattttacattttccaaaaacaagtacttttgctcccaactactgtgtttccatggggtrtattattagaaccgaataatgatcacagtcttttctgttttgtgtaaagggagcaggtatggtgggaccagcggctgagatgagactgctgtttctcttt

SEQ ID NO: 510378 - DNA, 201 bp, Homo sapiens
tcatttgcacttgtgctggtcatgtgacgctgcttttagcaataagatgaaggtggtggtttctgagggtagtgtccttttcagaataaaaagacaaagcytatttgccttcttcttcctttactttatattcctctttctgccaggaatataaatgtgactctgtggtgtcacgcgcatccgtgtgaagagaccaccaaa

SEQ ID NO: 510379 - DNA, 201 bp, Homo sapiens
tggtccccaacctatttggcaccagggaccaatttcgtggaagacagcttttccatggactggtggtggggtggggatggtttcaggatgaaactgttccrcctcagatcatcaggcattagattctcataaggagtgtgcaaccaagatccctcacatgcacagttcacaatagggtgcacgcccctatgagaatctaat

SEQ ID NO: 510380 - DNA, 201 bp, Homo sapiens
ggaggatcatttgactccaggagatcgaaaccagcctgggcaacatagtgagccccttctctacaaaaattagccaggcacagtggtgcacatctgtggtyccagctacagggaggctgaggcaagagaatcactggagcccaggaggtcaaggctgcagtgaattgtgttcgcaccactgtactcaaggctgggcaacag

SEQ ID NO: 510381 - DNA, 201 bp, Homo sapiens
ctgccacagtggatatgttgatgaaaagagtcaaactctgttaaatatttgaagagatttattctgagccaaatatgagtgaccatggcccatgacacagscctcaggagattctgagaatatgcgcccaaggtggtcggggcacagcttgggtttttttttttttttttttttgagacggagtctcgctctgtcacccag

SEQ ID NO: 510382 - DNA, 201 bp, Homo sapiens
ctcataagtacaaaaatatagactctagacccaggtctttcccactatcatgggaaggggaccagtggttgtacgttctgcatttcactaattttgaaagyctggttcaacactatgaaatagtgatgtgaagcagtggtccccaacctatttggcaccagggaccaatttcgtggaagacagcttttccatggactggtg

SEQ ID NO: 510383 - DNA, 201 bp, Homo sapiens
aaaaattagccaggcacagtggtgcacatctgtggttccagctacagggaggctgaggcaagagaatcactggagcccaggaggtcaaggctgcagtgaaktgtgttcgcaccactgtactcaaggctgggcaacagagcaagacctgcctcagaaaaagaaaaaaaaaaaaaatctgtccggtggaactatctttatata

SEQ ID NO: 510384 - DNA, 201 bp, Homo sapiens
acaacagtcatctccttatactttcagagctcttgggtgaccaggtacactgtcaatgagcagtaatattttgaaaggaacctttttttctgagtggtagrtctcaacagcaggctttaaacgtttgataaaccactctataaacagacgtgctgtcattcagactttgttgtttcattaatagagtacaagtagagtaca

SEQ ID NO: 510385 - DNA, 201 bp, Homo sapiens
catggactgtgtttctttttccctttgcttaggtatctgacagtggtgtgattgcacttgttagtggaccttgtgcgaagaaattagaggtaattttaaarcaattataaagatggtggtgattaaatttttatattcttagaaattatgtttaaaacctagcagataaccaatgctttatcaattacgtattttagggac

SEQ ID NO: 510386 - DNA, 201 bp, Homo sapiens
agtcccagctacatgggaggctgaggcaggagaatggcgtgaacccaggaggcagagcttgcagtgagccgagattgtgccaatgcactccagcctgggcracagagcaagactctgaaaaaaaaaaaaaaaaaaaaaaaagaattagactttggcttaaaggaatgttatggctggtttgatcttctatctagaaccact

SEQ ID NO: 510387 - DNA, 201 bp, Homo sapiens
ctcttagtgactttaacttttggtgaaaaccttggtaagttcagggttttaattaggtatggagccgaggacagcagacagaagtgcagataaggtctgatttttttttagcatttacgtgtcccaggccttacctagctgtaaagcaggaaagttttacagttacaagttatagtggcattttatgacacatttaggaag

SEQ ID NO: 510388 - DNA, 201 bp, Homo sapiens
ctctgtcatccaggctggagtgcaatggcacaatctcagcttactgcaacctcctcctcctgggttcaagcgattctcttgtctcagcctccagagtagcyggggttacatgtgcccgccaccatgccaacataacttttgtatttttagtagcgatggggtttcaccatattggccaggctggtctcgaattcttgacct

SEQ ID NO: 510389 - DNA, 201 bp, Homo sapiens
taaattctcccaaagctggcaattccaacaaccaaggggtagtatccttttactacagtagtctcatgtgagccactaaatagaaattactcaggtgctawgaaaacagaaagaagtaaagaaaaatagattgactaaagggtaactgttcatccactgtccccttacaaatacatgcctagtctctgttcccctgcagcc

SEQ ID NO: 510390 - DNA, 201 bp, Homo sapiens
aatggcaacaaaagacaaaattgacaaatgggatctaattaaactaaagagcttctgcacagcaaaagaaactaccatcagagtgaacaggcaacctacaraatgggagaaaattttcgcaacctactcatctgacaaagggctgatatccagaatctgcaatgaactcaaacaaatttacaagaaaaaaacaaacaaccc

SEQ ID NO: 510391 - DNA, 201 bp, Homo sapiens
atatttgtcgttacaaaagaaagatattttcatattccaaaattgtaaaagtaaacaaaacacagtaacaacaacgaaaactataatcagaaggaagggcmccaggttcagacagtggtggctttgaaagaagaagtaagtgagattgaaattgagagaattaaaaaaaagattttaagtttttttttttttttgagacag

SEQ ID NO: 510392 - DNA, 201 bp, Homo sapiens
ggcacaaataaccatgtaatatttttaatagtacctgataaactgatcattttagtaagagtccagtaaacatttatttacacatttacacacacccacaraaagcaatccttgtattctgagtccactgaagacatctcagaagctcaataaacactgttaacagtacatgttattccatactaatttaataaaccaagg

SEQ ID NO: 510393 - DNA, 201 bp, Homo sapiens
aaattgacaaatgggatctaattaaactaaagagcttctgcacagcaaaagaaactaccatcagagtgaacaggcaacctacaaaatgggagaaaattttygcaacctactcatctgacaaagggctgatatccagaatctgcaatgaactcaaacaaatttacaagaaaaaaacaaacaaccccatcaaaaagtaggtga

SEQ ID NO: 510394 - DNA, 201 bp, Homo sapiens
ctagattttttttttttaaataagtttatctttataacaaagggataggcaaatattttttatacaagacacacataaaaaaccactaactataaaaataagataaacaaaaataataaataatatattgacaaggttgttaaaaataaaatatagtaaaagtagattaattgaactttattaaaataaaaaatatatggt

SEQ ID NO: 510395 - DNA, 201 bp, Homo sapiens
atttcctttttaatccaggatgggcaaaaaaagaagttgtaatgtttgtattccatatttgtcgttacaaaagaaagatattttcatattccaaaattgtraaagtaaacaaaacacagtaacaacaacgaaaactataatcagaaggaagggcaccaggttcagacagtggtggctttgaaagaagaagtaagtgagatt

SEQ ID NO: 510396 - DNA, 201 bp, Homo sapiens
acagcaaaagaaactaccatcagagtgaacaggcaacctacaaaatgggagaaaattttcgcaacctactcatctgacaaagggctgatatccagaatctrcaatgaactcaaacaaatttacaagaaaaaaacaaacaaccccatcaaaaagtaggtgaaggacatgaacagacacttctcagaagaagacatttatgca

SEQ ID NO: 510397 - DNA, 201 bp, Homo sapiens
tagattttttttttttaaataagtttatctttataacaaagggataggcaaatattttttatacaagacacacataaaaaaccactaactataaaaataagataaacaaaaataataaataatatattgacaaggttgttaaaaataaaatatagtaaaagtagattaattgaactttattaaaataaaaaatatatggtt

SEQ ID NO: 510398 - DNA, 201 bp, Homo sapiens
gaggcagaggttgcagtgagccaagattgtgccattgcactccagcctggatgacagagtgaggctctgtataaaataaaataaagtaaagtaaaaaggcygggcacggtggctcacgtctgtaaacccagaactttgagaggccaaggtgggcggatcatgaggtcaagagatcaagaccatcctggccaacatggtgaa

SEQ ID NO: 510399 - DNA, 201 bp, Homo sapiens
agccaaaaaacacatgaaaaaatgctcaccatcactggccatcagagaaatgcaaatcaaaaccacagtgagataccatctcacaccagttagaatggcartcattaaaaagtcaggaaacaacaggtgctggagaggatgtggagaaataggaacacttttacactgttggtgggactgtaaactagttcaacccttgtg

SEQ ID NO: 510400 - DNA, 201 bp, Homo sapiens
gcatctttctctaagttgtttcaagttttcatcatgcaatccattgactttttgactctccactccaggatatgtccacttataaattctatacatgtacyactctactattatattataaaatactcaaaaatagctttttcttcttctttttttttttttgagaccgggtctcactgtcgcccaggctggagtgcagtg

SEQ ID NO: 510401 - DNA, 201 bp, Homo sapiens
aagcagactagagctgcaaggcagctcggacttcaagacagctccaggaacgtcaccagcaaacacacacccacggggttcactctcctgctcagccaggygccggatacagccacaatctcactccctcagcgcactcggtttctgcttatcccaaactttcgcttacacgtggcctcatcagcccctggacctttcagc

SEQ ID NO: 510402 - DNA, 201 bp, Homo sapiens
tgggcatggtggcacgtgcctgtagtcccagttactcaggaggctgaggcaggagaaccgtttgaaccagggagctggaggttgcagtgagccaagatcgygccactgcgctccagcttggtgatagagcaagactccgtctcaaaaatatatatatattgtaaaggatacttgaaaggatgcatagggcaaggtatggga

SEQ ID NO: 510403 - DNA, 201 bp, Homo sapiens
tgcttcacagatgaggtgatacttgagctggcctttggagtaaagcgagtaggattttttccgtcagctggagaagcagtaaaagggttttctagatacasgacacatacaacatgagcaacatgagcagcttgcacattctagggactggcaagctgatttgaaggaaagtgagaagtttcatacggctggcacaaaaca

SEQ ID NO: 510404 - DNA, 201 bp, Homo sapiens
gagttagtgggtgcagcgcaccagcatggcacatgtatacgtatgtaactaatctgcacaatgtgcacatgtaccctaaaacttaaagtataataataaawaaataaataaataaataaataaataaataaataaagcagtcacaaattaaaagaattggtaccattttgaagctgtgtccaaatgatgttcaacatttgg

SEQ ID NO: 510405 - DNA, 201 bp, Homo sapiens
cggtggctcatgcctgtaatcctggcactttgggaggctgaggcgggtggatcacgaggtcagaagttcaagaccagcatggccaagatggtgaaagcccrtctctactaaaaacataaaaattagcctggcgtggtggcgggcacccgtaatcccagctactcgggaggctgaggcaggagaattgcttgaacccaggag

SEQ ID NO: 510406 - DNA, 201 bp, Homo sapiens
agattttttttttttaaataagtttatctttataacaaagggataggcaaatattttttatacaagacacacataaaaaaccactaactataaaaataagwtaaacaaaaataataaataatatattgacaaggttgttaaaaataaaatatagtaaaagtagattaattgaactttattaaaataaaaaatatatggttc

SEQ ID NO: 510407 - DNA, 201 bp, Homo sapiens; identical to SEQ ID NO: 82405

SEQ ID NO: 510408 - DNA, 201 bp, Homo sapiens
aggaaatgcttcacagatgaggtgatacttgagctggcctttggagtaaagcgagtaggattttttccgtcagctggagaagcagtaaaagggttttctakatacaggacacatacaacatgagcaacatgagcagcttgcacattctagggactggcaagctgatttgaaggaaagtgagaagtttcatacggctggcac

SEQ ID NO: 510409 - DNA, 201 bp, Homo sapiens
aaataaataaataaataaataaataaataaagcagtcacaaattaaaagaattggtaccattttgaagctgtgtccaaatgatgttcaacatttggattcygggaatatttaaatatgctttttttggaggagggggtagggggcagggtcttgttctgtcacccaggctggagtgcagtggtatgatcacagctcactgc

SEQ ID NO: 510410 - DNA, 201 bp, Homo sapiens
gtggggtgagctgatgaaaatttcactgccctgaaagcactattttaagcatcaaggtctaatcatccaaccttacatatttcaagaggtatataaccttytcactttgaatctggcccttggatattgccagcctggaaggtcttcagttaagacagaaaaataaacctaaaaagaaaatgtcttcttatctttttctct

SEQ ID NO: 510411 - DNA, 201 bp, Homo sapiens
gctcacctcctcagagaagcctctccggctgtctggccgctggacagtggtcaaacaccacccccactcctcaccccctagcttgctctaagtcacttttwaaaaatcacattactctgtatttaatttattcatagctcttagcaccatctgaacctatttattcttcctcactggaatatacattccataaatagagga

SEQ ID NO: 510412 - DNA, 201 bp, Homo sapiens; identical to SEQ ID NO: 82408

SEQ ID NO: 510413 - DNA, 201 bp, Homo sapiens
tgcactccagcctgggtgacagagcaagactccctctcaaaacaaaaacaaaaaaaaaccttattcttgctggaagagtctataggaaaaaaattaatgtragtataataaataaatggttatagatgtatactatatatatatatttatacaatatataatgataaaaccactaagcaaaagtgttgcaggagttaagga

SEQ ID NO: 510414 - DNA, 201 bp, Homo sapiens
aatttttgaagttttctcccaaatatttgggattatggagatgcctgtccttatcatctccccaaaataacctcaaaaaggctaaagatatttttgaataragagcaagtgacatcattttgtgaactattaaaaagctattacattatttctcattgacaaatataatatcactttccaaatcatggaaaaaattatttc

SEQ ID NO: 510415 - DNA, 201 bp, Homo sapiens
actgaattctttcttcatgggatcactttatacaacactgacaaagtcttcacaaggctacattctaaatccaagtagcaaataaatagcaaataaatctycttctgccattttttatctcttgtctttaaccacaacatttcattttctgcccacatggactaatgcttcttcaaagaagtgggcagtggtcagaaagcc

SEQ ID NO: 510416 - DNA, 201 bp, Homo sapiens
acatttaagtccacttttatgacacttccgtcaacaatctggtcaactgcactcatccctggcctccgtactgtaccctgctccgcctcgattcccgcccygggggaagctagactcacgcagctaactttatcggctctgggctctgatcgccaagtttaggatcccagctgtatccttgctaaagttagtatcgctggg

SEQ ID NO: 510417 - DNA, 201 bp, Homo sapiens; identical to SEQ ID NO: 82390

SEQ ID NO: 510418 - DNA, 201 bp, Homo sapiens
gctgagatcatgctgctgcactccagcctgggtgacagagcaagactccctctcaaaacaaaaacaaaaaaaaaccttattcttgctggaagagtctatakgaaaaaaattaatgtaagtataataaataaatggttatagatgtatactatatatatatatttatacaatatataatgataaaaccactaagcaaaagtg

SEQ ID NO: 510419 - DNA, 201 bp, Homo sapiens
gctaatttttttttttttttttttttttttgagacagactctcgctgtgttgcccaggctggagtgcagtgacgccatcttggctcactgcaacctcccaytcccatcttcaagtgattttcctgtttcagcctcccgagtatctgggattacaagcatgcgccaccacgcctggctgatttttgtatctttagtagagac

SEQ ID NO: 510420 - DNA, 201 bp, Homo sapiens; identical to SEQ ID NO: 82391

SEQ ID NO: 510421 - DNA, 201 bp, Homo sapiens; identical to SEQ ID NO: 82394

SEQ ID NO: 510422 - DNA, 201 bp, Homo sapiens
aacagaaaaagggtgaccaagaacacgtaaacgatcagaccagcatgtgagtcctgcagagtgagctgtcatctgattagctgagaatggatgcacagttmtaaaatctaaacacagtttatagaagaacatacccataatctgtctcctcttgttcttttaaaacatgaccaattccagaaaaaaatcatcattgttttg

SEQ ID NO: 510423 - DNA, 201 bp, Homo sapiens; identical to SEQ ID NO: 82396

SEQ ID NO: 510424 - DNA, 201 bp, Homo sapiens
  misc_feature (1)...(201): n = A,T,C or G
tcctatgatttttcattacctctgctagtgagtgttgtcagtgaggtttcacagaacaggtgatattggaaccaagttgtgaagtggggatgtgtgttctnagataatcacagatcacttactgaacaactctggtgttccaggctctgtgctaagaactatatacacattgtctcatttagtgccatcaacagctctatc

SEQ ID NO: 510425 - DNA, 201 bp, Homo sapiens
ttactccatatgtattataattccatggaataagaaaataaatcataattctaaacatgagtcccagatagaaggttagggcatttactccaaattttagstgctaactggcaatctagaaaattctcatatgtgcaagtcagtgtagtatgctcatatatttatttatcagaggggtattattcaaatatttaatagtta

SEQ ID NO: 510426 - DNA, 201 bp, Homo sapiens
ggaaaaatcagcatttagacaaaaagttttctcagcaaggcaattttaccttctgcagaaagggtgctcctcacagatggaacaatggtgagaccacaccygaacaaaggagggaagcaattttattccttacacagcttgtccctgctaatgtgtcctgtctccattggctggagctggacctcacaatctaaattaaac

SEQ ID NO: 510427 - DNA, 201 bp, Homo sapiens
actatgggaggatatcgtgaagctgaacatgcagggccccaagggaagaaatctggttgagcaatgtggacagggtgggctgggggataactcatatcacracataaccaactaatttttaaaaatcactttttcacctcaggaccagagattctattactcacccccaagacaaaactgaagaaatcctggcccctctta

SEQ ID NO: 510428 - DNA, 201 bp, Homo sapiens
agaaagaaccagctaggaaggcggttagggcaggtgctcagtagaattctttcaaacaaaggaacaacctgaaaactcaggctacagatacagataagggmactagcacaggcagcttgcctaggatatacccatagctgcacagataaggaagcaaggcccaacatagaagcacctttgttctttgtgtaagcagcagcc

SEQ ID NO: 510429 - DNA, 201 bp, Homo sapiens
agtggcttttgtgtgaatggcgacgttggatttggcatttcctctacaaccactctagaagtctcccaacctttctttattgaaattgcctcacccttttyggttgttcaaaatgaacaatttgatttgattgtcaatgccttcagctacctgaatacatgtgtagaggtgagttgttctgtttgatctggaggcaaaaat

SEQ ID NO: 510430 - DNA, 201 bp, Homo sapiens
agcctcaagtgatcctctcacatcagcctcccaaagtgctgggattataggcatgagcccctgcacccaatctctactaatttttaaaggctaaaatatgytattatttttgtgattttttagtagtcatttaaaaatttttcttattgaattaattaaataatttttagaaatggagtttgctatgttgccaggctgctc

SEQ ID NO: 510431 - DNA, 201 bp, Homo sapiens
tatacccatagctgcacagataaggaagcaaggcccaacatagaagcacctttgttctttgtgtaagcagcagccttccaggaaatagtttcttttccttytgtgggcatgtagatggtgggctgtggtgagtacattcctttccttttttgggcatactttggactgtgagccaaacctctatgaatcatcactccaaca

SEQ ID NO: 510432 - DNA, 201 bp, Homo sapiens
ccaacactaggctggttgtgagccaaggctccagttggtcctttacaccatcatgccattttctaagtggtgccttttctaaagacaaccaccagtcagcsagcacactaggggtacagggtggagctaccagaaattcacaacttatgcaatttcagttatgcaaatgaaatgcccagacccatctggttcctctgggtt

SEQ ID NO: 510433 - DNA, 201 bp, Homo sapiens
cagcaaatttggggctgcatgtcgtgttttatgcctgtaatcctagtactttgcaaggtcaaagcgggcagatcacttgagcccaggagttccagagcagsctgaacaacatagtgagacctcatttctacaaaaaaataaaaataaattagccagccatggtggcatgcgcctgtggtcctagttacttgggaggctgag

SEQ ID NO: 510434 - DNA, 201 bp, Homo sapiens
aataatagaaccttgtagaagggatgagttgtcacttctgagattaggttatataaagactgtcacttctttctaagggctctttctcacttggatggtcyccagaaagtcagctgccatgtcacgaagtgccctgtgagaaggacctgtaaggagggacggagggaggcctctaaatgacagccttcgaggaactgaatc

SEQ ID NO: 510435 - DNA, 201 bp, Homo sapiens
gcaagtcttcagtctatttagcaaaagctctaaactttttcaaaactcagcatttacctctagagataaagttttttaggaagcacacacaaaaaatcatmcagctcaggctttggaggaatataaaaggaaattgtattttaagtgaatttctttctcaaaaaaggaagcagatttaaagcgttattttttgcactgttg

SEQ ID NO: 510436 - DNA, 201 bp, Homo sapiens
ctacaaaaaaataaaaataaattagccagccatggtggcatgcgcctgtggtcctagttacttgggaggctgaggtgggaggatcacctgagcccaggagktcaaggctgcagtgagctatgatcacaccactgcattccagcctgagtggtgacagagtgagaccctgtctccaaagaaaaaaaaaaaaagcaaatttta

SEQ ID NO: 510437 - DNA, 201 bp, Homo sapiens
actcaggtgtccatataaaatactgtctcattaaacataggtatataagaaattgcaatgtggaaaaattttaaaccattttctctccttccatatgggtraatattatgaattatgagtttttacatttataatgtaaatgtttctcaataaccaaataatattgtttacattatcgttctataagaagtatcatggtgt

SEQ ID NO: 510438 - DNA, 201 bp, Homo sapiens
catgcgcctgtggtcctagttacttgggaggctgaggtgggaggatcacctgagcccaggagttcaaggctgcagtgagctatgatcacaccactgcattycagcctgagtggtgacagagtgagaccctgtctccaaagaaaaaaaaaaaaagcaaattttagactgtagctgattataaaccaccttttgaagagaatc

SEQ ID NO: 510439 - DNA, 201 bp, Homo sapiens
gaggatcacctgagcccaggagttcaaggctgcagtgagctatgatcacaccactgcattccagcctgagtggtgacagagtgagaccctgtctccaaagaaaaaaaaaaaaagcaaattttagactgtagctgattataaaccaccttttgaagagaatcaagatcaaggtaggccaggtgcagtggctcacgcctgtag

SEQ ID NO: 510440 - DNA, 201 bp, Homo sapiens
ttgcagtgagctgagatcacgccactgtagtccagccttggtgataggagtgaaacactgtctccaaaaaaaaaaaaaaaaggaatgcttgatgaatttgygtgtcatctttgtgcaggagccatgctaatcttctctgttaccgttccagtgttccaattttagtacatgtacggccgaatcaggcactttgttttttaa

SEQ ID NO: 510441 - DNA, 201 bp, Homo sapiens
gccacctttgctaccacatgagggcaactaacaactatgttttattatttttgtttaatattattgaatttttgttaattgtttgtagaaagagggtctcrctgtgttgcctaggctggtcttgaactcctggcctcaagcaatactctcacctcagcctcccaaagtgctgggattataggcatgagccactgagcccag

SEQ ID NO: 510442 - DNA, 201 bp, Homo sapiens
gggttcttttacaaaccgtacccaggaggatgactgatttacaaatgtttatagacaattttatttactaatctagctctcactctcaactaaatttatartcctaattatagtcatcagcattttcttgataacaaacctacaggattttttttttttttttttgagacagaatttcgctcttgttgcccaggctggaat

SEQ ID NO: 510443 - DNA, 201 bp, Homo sapiens
ttcttataaatgtttctcccctgagctaaagacatcccctgaggaaaggaattttttggttggtccggagaactttagctctgtttcaaatccaatctcgmtggaatgctgcttagctaattccctaaatgctaacatttcaaaaacatggtaaggtttacatctccaaaggactgagaaaggcctggaaaatgctggagt

SEQ ID NO: 510444 - DNA, 201 bp, Homo sapiens
gcactaataattgttagctgctgcttcttaatattacatagcacctggaaggatgacgggcctgcttgctaaagctggctgtgagtttggggtcggcttgrggagaagagcagagtgcagggagcttcctggaacagggcctgtctgtcttatactttcactctagacagccctttcccgttttggtgttcaggaaatatg

SEQ ID NO: 510445 - DNA, 201 bp, Homo sapiens
ggtgggaggatcacttgagcctgggaggtggaggttgcaatgagccaagattgtgtcactgtgctccaggctaggtgacagagcaagagaccctgtctcaraaaaaaaaaaaaaaaaaaaaggtattttaattggggtctttcatgacttgcaatttaggagacacaaatctgttccattcagacaagactgggcaggggc

SEQ ID NO: 510446 - DNA, 201 bp, Homo sapiens
ctcatatttagctcagaataaatcttcaaatattttatagagtttgactctttttgttgacaatattttggtgcccaaatacatgaggcctcagagaagaytcaggaccctgaaagagttgcccgaaaccagagctaaggtaccagcagcggcccgttgaagtcccactgagttcaagcttctcccccggtggaacgggta

SEQ ID NO: 510447 - DNA, 201 bp, Homo sapiens
tttttgttgacaatattttggtgcccaaatacatgaggcctcagagaagactcaggaccctgaaagagttgcccgaaaccagagctaaggtaccagcagcrgcccgttgaagtcccactgagttcaagcttctcccccggtggaacgggtaagtcctcctgagccccagacctccctttgtttgacagtccttgatttatt

SEQ ID NO: 510448 - DNA, 201 bp, Homo sapiens
tctgaatgaataatcatttgttaaaagattccccacatcatttttcttacttttcttgctgtgtgctaggcattattctagctaaaaggaatacactggtraacaagactaataaggtccctgcctctatggagttgacatttgggatagaggtgggtgttggagatggacaataaacacgtgaatacataattacatatt

SEQ ID NO: 510449 - DNA, 201 bp, Homo sapiens
actcctgacagcacaaccatccttttcactggaggtacaacacagaggttacaatcattggctacagactgcaatataaaggctaaaatatcgacatttgwttcaaaagtgagtcagagtcctcttcagtgtcaggaggttgtgcattaatcagtacttgacaatttgaggaactcacaataagattcgttactcagggac

SEQ ID NO: 510450 - DNA, 201 bp, Homo sapiens
tttccaaattactttcagcaatatatttagaagttttaaaagtttttgtcattttgatagacacaaatttagcttgttttaacttgtgctatctaatttckatttagtttgagcaacttttcatatttttgttatcaatttggatttgagaactcttaattacccatgtttttctgttcatgtgaaatggaaactttcagt

SEQ ID NO: 510451 - DNA, 201 bp, Homo sapiens
agagctaaggtaccagcagcggcccgttgaagtcccactgagttcaagcttctcccccggtggaacgggtaagtcctcctgagccccagacctccctttgkttgacagtccttgatttattctgagctggttttctcctaggaaattgttgtttaaggatcctaattctaattcagagatgcattctaaagggaattctct

SEQ ID NO: 510452 - DNA, 201 bp, Homo sapiens
gggcgacagagccagactaagtctcaaaaaaaaagaaaaaagaattcaaagccaatgtaactagagggcaaaaaagaaagaaaaatgatgtggggaatctmtgaatgaataatcatttgttaaaagattccccacatcatttttcttacttttcttgctgtgtgctaggcattattctagctaaaaggaatacactggtga

SEQ ID NO: 510453 - DNA, 201 bp, Homo sapiens
atatttttgttatcaatttggatttgagaactcttaattacccatgtttttctgttcatgtgaaatggaaactttcagtgtaagtactgccttccatcctmcaagcattttttttcaagcctgttatttaaataggcaactcatttactttgtcatatttttgacatacccaccttccttatgttcctgggtttccagcct

SEQ ID NO: 510454 - DNA, 201 bp, Homo sapiens
ttgaaatatttctggttttcgtggcttatcttagagtgcaaagcttttaggaatgtcagccttttccagactatggtacaggatgggcttgattagtcgayatagtgggcatgatattcgttttacagactagagttcacactaaatggccataggctcccatagggccaccaggtagagttgtgcagattgtataggctg

SEQ ID NO: 510455 - DNA, 201 bp, Homo sapiens
atttgagaactcttaattacccatgtttttctgttcatgtgaaatggaaactttcagtgtaagtactgccttccatcctacaagcattttttttcaagccygttatttaaataggcaactcatttactttgtcatatttttgacatacccaccttccttatgttcctgggtttccagccttagaaaaaaaatctcactggc

SEQ ID NO: 510456 - DNA, 201 bp, Homo sapiens
cagcctagttaatatggcgaaaccccgtgtctactaaaaatacaaaaattagccaggtgtggtggtgcacatctgtaatcccagctacttgggaggctgasacagaagattcgcttgaacctgggaggcagaagttgcagtgacccaagattgcaccactcactgcattccagcctgggtgacagattgagactctgcctc

SEQ ID NO: 510457 - DNA, 201 bp, Homo sapiens
cgcccaggctgaagtgcagtggcgcgatctccgctcactgcaagctccgcctcccgggttcacgtcattctcctgcctcagcctcccgagtagctgggacyacaggcgcctgctaccatgcccacctatttttttttgtatttttagtagagacggcgtttcaccgtgttagccaggatggtctccatctcctgacctcgt

SEQ ID NO: 510458 - DNA, 201 bp, Homo sapiens
tgctttcagagcattctccttctctcctctctaaaaattctgtgctttaaacctcatgtcatcagattctatcatccgctatccagcactgttactgttaygtagcaaacaccaactcattccccttcatttctcattgccattgccatcatctctagaatttctggtcttaattcctggcattctcaatacccacacaga

SEQ ID NO: 510459 - DNA, 201 bp, Homo sapiens
tattcaccatattaattatttggtgatcaagaagcaatgttttaaacatttcacaactgaccagatgttttgttttataagaattatatttaggtaccttmccatgctttagttaaccttttaagaaattgattgagggtttggggttgacatagtataatttttctgtttaaaataaaataaataggctgaaggttagca

SEQ ID NO: 510460 - DNA, 201 bp, Homo sapiens
acagggtctcattctgttgcctagactggagtgcagtggtgtgaccttggctcactgcagtcctgacctcctgggctcaagcaatccttccatctcagccycctaaggtgctaggattacaggcaggagccactgcatccagccctgaattcctctttttgagggatcttctctcctatggcaggcactcactcccatgac

SEQ ID NO: 510461 - DNA, 201 bp, Homo sapiens
ccatattcctccagaaggaaacttagaataggtaaaaaaaaaaaaaaaaaaattaacaaagtacttgaaatagatcaccatcttatgtttttaatgtttgkgattttttttttttttgagatggagtctcactctgtcacccaggctggagtccagtggcgcaatctcggctcactgcaacctctgcctcccagattcaag

SEQ ID NO: 510462 - DNA, 201 bp, Homo sapiens
gcgtgagcctgggaggtcgagactgcagtgagccatgatggcaccactgtactccagcttgggcaacagagtgagaccctgtctcaaaaaaaaaaaaaaaraaaagaaaacaaagtcagcctgtccactttacatgggtgaattgtataatatgtgaactacatctccatagaattgtttttcaaaataagtaaatctgtc

SEQ ID NO: 510463 - DNA, 201 bp, Homo sapiens
taataaaatatatttctacctaataaaatatatgtgcaataaaaatgtagctaaaaatgctgggcttggagagaagctctgggagtagggtggtgaaggcygatgccctctaaaaaggccttgcctgtaccacattccgtaggaggtgtaattgctaatttttttttttttttttttttttttgagacagactctcgctgt

SEQ ID NO: 510464 - DNA, 201 bp, Homo sapiens
ttatcttactggcagatctgcaggtcagctgataattgtgcctcagactgacactcagatgcctaggctctggggttcaggttgtgctcatatctgtttcstgagtcttattctgggacccaggctgaagaagcagtgctggtgggacatgttgttcttatgaacaatggcaggactaggagagctatgtcaaaccaagag

SEQ ID NO: 510465 - DNA, 201 bp, Homo sapiens
atccacatccacatattctgcttttccaagtgttaccatatattaaattttctagctccttctaagggcaatccctccatttttgtactagattccatccytttctcctttactcaaggaaatcaattgctctaggctttcttctctttccttcttacatcattaaaatttcccactttatggggtcatggccattagcat

SEQ ID NO: 510466 - DNA, 201 bp, Homo sapiens
aaagcttttttaaagattatgcatcgactaaaagtaaaatgaccaaaaaaaaaaaaaaaattggcatctcgaagtatcagagagaaaatttacaagttttytaaagcaaatgctctaagaagagggaggtcaggggcctccctcaggaggaagcccgcctaaagggaaacatgagcttgtcttggtcttgaatcttctact

SEQ ID NO: 510467 - DNA, 201 bp, Homo sapiens
agattaggcctagatatttgacctgctgtagggaaagctgggccttcgacctagacaccttgtacctttgattagctagaaagttcaagaggtctagagtygcctgctggcatgaggcttctgaactggtagcgaaaagtaaatcatctgcatattgaaggaccagagtgcctcgacttgagaagtggcctagatcttggg

SEQ ID NO: 510468 - DNA, 201 bp, Homo sapiens
cactgaacttgaaggctgcaccattcactttcattctggctttttttttttaaagagaaagacaacctgggcaacatagtgatatcccatctctataaaayatacaaaaaaattagggcttctccatgtttcgccaccactaggtgtggcgctgcattcctgtagtcccagatactccagaggatcacctgagcctgggag

SEQ ID NO: 510469 - DNA, 201 bp, Homo sapiens
ttatagcctctgctgtcctccatgggagatagcaccagaagtgggcatctgccactggaagagggtcctcaccagaacttggctgtgctgggaccctgctytcagacacacagccttcagaactgtgagaaataaattctaattgttcaaaaatcaacaaaaaggagaaataaacgtatcctagctttgtgacaagagtta

SEQ ID NO: 510470 - DNA, 201 bp, Homo sapiens
ggccttcgacctagacaccttgtacctttgattagctagaaagttcaagaggtctagagtagcctgctggcatgaggcttctgaactggtagcgaaaagtraatcatctgcatattgaaggaccagagtgcctcgacttgagaagtggcctagatcttgggccagtgcctgaccaaacagataagggctatccctaaaccc

SEQ ID NO: 510471 - DNA, 201 bp, Homo sapiens
attctctatttgacaaaaatccagttaatatattaatataaaatttaaaaataggtcaggtgtgatggctaacgcctgtaatccaagcactttgggaggcygagacaggtggatcacctgaggtcaggagtttgagaccagctgaccaacatggtgaaaccctgtctctactaaaaatacaaaaattagccaggcatggtg

SEQ ID NO: 510472 - DNA, 201 bp, Homo sapiens
actctagaagtctcccaacctttctttattgaaattgcctcacccttttcggttgttcaaaatgaacaatttgatttgattgtcaatgccttcagctacckgaatacatgtgtagaggtgagttgttctgtttgatctggaggcaaaaatctaacaaagctaaaatatttcttaatatttccatattctctttatcctcaa

SEQ ID NO: 510473 - DNA, 201 bp, Homo sapiens
tttttcttattgaattaattaaataatttttagaaatggagtttgctatgttgccaggctgctctgaaactcctggccccaagtgatgctctggcctcagmctcctgagttgctgggattacatgcatgagccaccatgcccaactcagaagtctatttcatatcacacgtatgataataatttaatcacaaaggaccgta

SEQ ID NO: 510474 - DNA, 201 bp, Homo sapiens
ccctgcctggctttttttcatttagcatagttctccaggttcatctatgttgtcgcaaatggcagaaattcctttttttgaaaggctaaataaaattccaktgtgtatttgctagtaggctttctccaaaggaattatagcctctgctgtcctccatgggagatagcaccagaagtgggcatctgccactggaagagggtc

SEQ ID NO: 510475 - DNA, 201 bp, Homo sapiens
ctgggagtcagagtgcaggggaatacagaagaaggcatccttgaggtccagaaccatgaaccattctgcttcctctggtgtttgagagagcagggtatagrggttgggtacaactggatatagtggaactactgcctcattaatgagtctaagatcttgcactagtctccactgaccgttcggtttttgtactcctagaat

SEQ ID NO: 510476 - DNA, 201 bp, Homo sapiens
atggcgaaacctcgtctctactaaaaatacaaaaaattagccgggtgtggttgtaggtgcctgtaatcccagctactcgggaggctaaggcaggaaaatcmcttgaacccggaaggtggaggttgcagtgagctgagatcatgccattgaactccagcctggacaagagcaaaactccgtctaaaaaaaaaaaaaaaaaaa

SEQ ID NO: 510477 - DNA, 201 bp, Homo sapiens
gtgagctagttgtgtgcttagtatcaaatagtattcatggtaaatgctcaaaacttccccagaggggaatcacgttaatgcaaatgtgcaaaataaaaagrtgtgtcttaaatttaaggatgcatccttaattgtgtacagcttcattattttacaggattgtttgtggcatttcttacttcaaaacctgattttaaaaaa

SEQ ID NO: 510478 - DNA, 201 bp, Homo sapiens
aaacagttgattaacacatattttgtatgttatatgtgttatgtattgtattcttaaagtaagctaagtaaaagaaaatgtgaagaaaatcataaggaagwgaaagtatgtttactgtttattaagtggaagtagctcttcataaaagtctccatcctcatcatcttcatattgagtaggctgaggaggaggaggaagaac

SEQ ID NO: 510479 - DNA, 201 bp, Homo sapiens
gaggctaaggcaggaaaatcccttgaacccggaaggtggaggttgcagtgagctgagatcatgccattgaactccagcctggacaagagcaaaactccgtytaaaaaaaaaaaaaaaaaaaacagaaaaaaagaactgtcaaataccaagggctggaaagaataggggcaacaggaacttttacacattgctagtgggaaa

SEQ ID NO: 510480 - DNA, 201 bp, Homo sapiens
cctgggaggtggaggcttcagtgagccatgattgtgcctgtactctagcctagatgacggagtgagacctaatctcaaaaaaaaaaaaaaaaaaaaaagamcaagagaaattgtatgtagcagggggcatggtggcaggcacccataatcctagctacatgggaggttgaggcaggagaatcacttgagctcgggaagtgg

SEQ ID NO: 510481 - DNA, 201 bp, Homo sapiens
ggctaaggcaggaaaatcccttgaacccggaaggtggaggttgcagtgagctgagatcatgccattgaactccagcctggacaagagcaaaactccgtctwaaaaaaaaaaaaaaaaaaacagaaaaaaagaactgtcaaataccaagggctggaaagaataggggcaacaggaacttttacacattgctagtgggaaagc

SEQ ID NO: 510482 - DNA, 201 bp, Homo sapiens
tgtagcagggggcatggtggcaggcacccataatcctagctacatgggaggttgaggcaggagaatcacttgagctcgggaagtggaggttgcagtgagcygagatcgcaccactacactccagcctgggtgacagagtgagactccatctcaaaaaaaaaaaaaaaaagaaaagaaaaaagaaaaagagagcgagagaga

SEQ ID NO: 510483 - DNA, 201 bp, Homo sapiens
ggttgccaggtttaataatgactctaggttttgttcagggcccagggcttgcttttggagctttctcctgatatctgaggctgattgggtaataaacttasctttcagaatcaattgaccctcgagtgattcgggtgacaggggagtatattttcttaaggcctctcgtagccactcaaggaaggcaggaggattttcttc

SEQ ID NO: 510484 - DNA, 201 bp, Homo sapiens
tctcatttctgacatgaagaaaggtctggatagaagatcaaaccagccaaagcctaatccagagcaagggctctctttgattctttttttttttttttttwttgagacaaagtctctttctgttactcaggctccagtgcagtggcgcgatcttggctcactgcaacacctgcctctcacgttcaagcgattctccgcctc

SEQ ID NO: 510485 - DNA, 201 bp, Homo sapiens
ggtggcaggcacccataatcctagctacatgggaggttgaggcaggagaatcacttgagctcgggaagtggaggttgcagtgagctgagatcgcaccactrcactccagcctgggtgacagagtgagactccatctcaaaaaaaaaaaaaaaaagaaaagaaaaaagaaaaagagagcgagagagagaaatcacatgtgaa

SEQ ID NO: 510486 - DNA, 201 bp, Homo sapiens
ttatcattcataggaaggggagctatagggaggctaggatatgggggtaagctgaaaggtcctcctgtgggatgtaaattgcaagctttgcatagttgtgrattcaccttcaatgaaaagaaagcttggacataaggtatttcactccatttgccttccctcttacagaaaaggtcaagctgcaggatagtattgtaattt

SEQ ID NO: 510487 - DNA, 201 bp, Homo sapiens
agaatcgcttgaacccgggaggcagaggttgcagtgagccgagattgcgccactgcactccagcctgggtgacacagcgagactctccttctcaaaaaaamaaaaaaaagatttctttctcatcttatgggctgatttccaggaaagcctaccttagctgcctgaagctctagtgcagatcactgtcacatccttaagaag

SEQ ID NO: 510488 - DNA, 201 bp, Homo sapiens
atagtattgtaatttgtacttccctcaggtggccatttttcctcatcagagagagaatattgggcccaagccatagtgcagaaaaaaatgagccgcctctytttcaaggtttgtggatcaaattggtcccaatggcttaggatgcatttcaagggtgagcctgttgatgcctgagtgtttcccatctgaaagacaaaaccg

SEQ ID NO: 510489 - DNA, 201 bp, Homo sapiens
cgtggtggcacatgcctgtaatatcccagttactctggaggctgaggcaggagaatcgcttgaacccaggaggtggaggttgcagtgagctgagatcgtgycactgcactccagcctgggcaacagagggagactctgtctcaaaaaaaaaaaaaaaaaaaaaaaaaaaaaggtatttgtggtgagagaagttgttggctt

SEQ ID NO: 510490 - DNA, 201 bp, Homo sapiens
actccagcctgggcaacagagggagactctgtctcaaaaaaaaaaaaaaaaaaaaaaaaaaaaaggtatttgtggtgagagaagttgttggcttggtgaascagcaggaaggactcagattctagatagatgttgaaggtaggcccaacgagatttgctgatgatttatatgaatatgtatgaattctatgaatatggtag

SEQ ID NO: 510491 - DNA, 201 bp, Homo sapiens
gaagaaaaaataatttcccccctaattttccctgctccccctttctttctttccaccatcctccttccctccaatatttactgagtgcctatgcatttagrtgccaaatcgctggaataccaagacttcattacattgtatgaagaagtctagtggtttcatttaaatgcaagttttgtataaaagcacgtctatcctttt

SEQ ID NO: 510492 - DNA, 201 bp, Homo sapiens
ccactgtcctataagaatctatgatgaaatagtaaaatagctaacatttatagagtgctttccacatgccagacactgtgctaaattcttgttgttgttgttgtttgtttttgtttttgtttttgttttttcccagacacagtcttgctctgttgcccgggctggagtgcagtagcgtgatctcggctcactgcaacctct

SEQ ID NO: 510493 - DNA, 201 bp, Homo sapiens
atagattaattggaagagattttcctgtttttaatttttaattttatgttgagtcctctgatccagagactgtctctccatttatccaggtgttcttttayatccttttttttttttttttttttgagacagggtcttgctctgtcacccagtctggagtgcagtggcataatcttggcttactgcaacctctgcctcctg

SEQ ID NO: 510494 - DNA, 201 bp, Homo sapiens
ctgtcctataagaatctatgatgaaatagtaaaatagctaacatttatagagtgctttccacatgccagacactgtgctaaattcttgttgttgttgttgtttgtttttgtttttgtttttgttttttcccagacacagtcttgctctgttgcccgggctggagtgcagtagcgtgatctcggctcactgcaacctctgcc

SEQ ID NO: 510495 - DNA, 201 bp, Homo sapiens
ttaattggaagagattttcctgtttttaatttttaattttatgttgagtcctctgatccagagactgtctctccatttatccaggtgttcttttatatccttttttttttttttttttttgagacagggtcttgctctgtcacccagtctggagtgcagtggcataatcttggcttactgcaacctctgcctcctgggctc

SEQ ID NO: 510496 - DNA, 201 bp, Homo sapiens
gcctcagcctcctgagtagctgagattacaggcgtgtaccaccatgcccagctaatttttttttttttttttttttgagacagactctcgctctgttgccrggctggggtgcagtggtgcaatttcagctcactgtaacctctgcctcctggattcaagcgattctcctgcctcagcctcctgagtagctgggattacagg

SEQ ID NO: 510497 - DNA, 201 bp, Homo sapiens
tttgggaggctgaggcaggtggatcacaaggtcaggagttcaagatcagcctgaccaatatggtgaaacccgtctctactaaaaaaatacaaaaattagcygggcatggtggcgtgtgcctgtaatcccagctactcaggaggttgaggcaggagaattgcttgaacccaggaggcagaggttgcagtgagctaagatcgt

SEQ ID NO: 510498 - DNA, 201 bp, Homo sapiens
ctatgcattgcttcctcggtatcctttgtaatatccttcataataaattggtaaatgtgttttcctgagttctgtgagctgctttagcaaattaatccaamccaaagacaggcaacatagtgagactcctgtctctacaaaaaattttttcaaaaaattagctgggcatggtcgtgcacagctgcagtcccagctactttg

SEQ ID NO: 510499 - DNA, 201 bp, Homo sapiens
ttgtaatatccttcataataaattggtaaatgtgttttcctgagttctgtgagctgctttagcaaattaatccaacccaaagacaggcaacatagtgagaytcctgtctctacaaaaaattttttcaaaaaattagctgggcatggtcgtgcacagctgcagtcccagctactttgggaggctgaggtgggaggactgact

SEQ ID NO: 510500 - DNA, 201 bp, Homo sapiens
atccttcataataaattggtaaatgtgttttcctgagttctgtgagctgctttagcaaattaatccaacccaaagacaggcaacatagtgagactcctgtmtctacaaaaaattttttcaaaaaattagctgggcatggtcgtgcacagctgcagtcccagctactttgggaggctgaggtgggaggactgactgaggcca

SEQ ID NO: 510501 - DNA, 201 bp, Homo sapiens
ctttgggaggctgaggtgggaggactgactgaggccaggagttcgagactgcagtgagctgtgatcacaccactgcactccagcctgggcaacagagtagkaatctctttttttttttttttttttttttttttttttgagaaggagtctcgctctgtcacccgggtgggagtgcagtggtgctatctcggctcactgcaa

SEQ ID NO: 510502 - DNA, 201 bp, Homo sapiens
ctttttttttttttttttttttttttttttttgagaaggagtctcgctctgtcacccgggtgggagtgcagtggtgctatctcggctcactgcaagctccrcctcctgggttcatgccattctcctgcctcagcttccccagtagctgggactacaggcgcccgccaccacgcccggctaattttttgtgtttttagtaga

SEQ ID NO: 510503 - DNA, 201 bp, Homo sapiens
gaaaatgttccatgtggaaaatgctaggacttcagggtctcttaggttagttaactcttctgagcctcattttcctcatctgtaaaatgaggatgttaacwgtttaaggttgattctgaggatggaatgtactcagtacataagtgttcagcaaacagtagtagctcttattgtttgagtctcttccccgccttgtgcccc

SEQ ID NO: 510504 - DNA, 201 bp, Homo sapiens
ctcttcttttttttttttgaggtggagtctcgctctgttgcccaggctggagtgcagtggtgccatctcggctcactgcaagctctgcctcctgggttcaygccattctcctgcctcagcctcctgagtagctgggactacaggcacctgccaccacgcccggctaatttttttttgtatttttttagtagagacggggtt

SEQ ID NO: 510505 - DNA, 201 bp, Homo sapiens
accctgtctcaaaaaaaaaaaaaagaaaagaagaagaagaagaagaaattgaggctcaaggaggttagggtgaattgctcaaagccattctgatgtgacckacacctagagtgaacatatgtcctgatgtgtccaggacagcctcagtttatgcctgcctattgtcctggtgtaattattaatagcaccttttcactcccc

SEQ ID NO: 510506 - DNA, 201 bp, Homo sapiens
ctggttatagaagaatggaccagaagcaaacacctggtccctggtgggccaatcaatttctctctccctgacagctagaattgaaatttgaaaataccagyctcagccaggtgcattggctcacgcctgtaatcccaacactttgggaagctgaggcaggaggatcacttgaggccaggagttcaagactagcctcagcat

SEQ ID NO: 510507 - DNA, 201 bp, Homo sapiens
ttgtttgacagtccttgatttattctgagctggttttctcctaggaaattgttgtttaaggatcctaattctaattcagagatgcattctaaagggaattytctattgctttttctcctaaaatttatcttgattctgaggaactgaactgttgttttcaaagctaaatgagagactgagtttttcagctctgaagacaaa

SEQ ID NO: 510508 - DNA, 201 bp, Homo sapiens
aaaataccagcctcagccaggtgcattggctcacgcctgtaatcccaacactttgggaagctgaggcaggaggatcacttgaggccaggagttcaagactrgcctcagcatcatggcaagaaaattagctgagcatggtggcatgcacctgtagccctaggtacttgggaggctaagacgggaggatcacttgagcccagg

SEQ ID NO: 510509 - DNA, 201 bp, Homo sapiens
ttacatagaacatccccactcctctttgccttaactacaagccaactgtttcttaaaattatgtcctctcaaaatgaggctactaagttgcaaggagagtrgaagtagtggaagagaggaaagtcagcatttgtgttattgtggttttccttgctgactccataccattgttttttatcatgtaaaaatagttcctttagg

SEQ ID NO: 510510 - DNA, 201 bp, Homo sapiens
agctgcctgtatattgcttaatatctttggatcactccaccccagagtccaattccagagagaggggatggtggggagacactgtctggcttagctagagkcatattcttagttggggagctgcctccaagactggaatacagcatggtgcagattaagatggttttgccaaagaaaggaggctggataatggtgagcaaa

SEQ ID NO: 510511 - DNA, 201 bp, Homo sapiens
tcgcccactttttgacggggttgttggtttttttcttgtaaatttgtttgagttcattgcagattctggatatcagccctttgtcagatgagtaggttgcraaaattttctcccattttgtagattgcctgttcactctgatggtagtttcttttgctgtgcagaagctctttagtttaattagatcccatttgtcaattt

SEQ ID NO: 510512 - DNA, 201 bp, Homo sapiens
cgaaaattttctcccattttgtagattgcctgttcactctgatggtagtttcttttgctgtgcagaagctctttagtttaattagatcccatttgtcaatkttgtcttttgttgccattgcttttggtgttttatacatgaagtccttgcccatgcctatgtcctgaatggtaatggctaggttttcttctagggttttta

SEQ ID NO: 510513 - DNA, 201 bp, Homo sapiens
aactctgacactaatttttctcttggttcacctaagacatctataatgtaactttattgttctacatttcagatcattttctggcaatgcttctttgacawagcatacaaattttgcaacatgaagcaatatacatttcttgacttcaaaaaaatatggtttccccataatgtatatgaaaacatatcaaaggtgggttac

SEQ ID NO: 510514 - DNA, 201 bp, Homo sapiens
tcgcttgagcccaggaggcagaggttgcagtgagctgagattgcaccactgcactccagcctgggtgacagggcgagactctgtctcaaaaaaaaaagaamaaaaattagctgggtgtggtggagcacgtgtgtagtccagctactcagaaggctgaggtgggaggatcactggagcctgggaggtcaaagctgcagtaag

SEQ ID NO: 510515 - DNA, 201 bp, Homo sapiens
ctttttttttttttttttttttttttgagacggagtctcgctctgtcgcccaggctggagggcagtggtgcaatctcggatcactgcaagctccgcctccygggttcacgccattctcctgcctcagcctcccgagtagctgggactacaggtgcccaccaacacgcccggctaattttttttttgtatttttagtagaga

SEQ ID NO: 510516 - DNA, 201 bp, Homo sapiens
agtagagacggggtttcaccttgttagccaggatggtttcgatcccctgaccttgtgatccgcccgtctcagcctcccaaagttctgggattacaggcatragccaccgcgcctggcatatgttctcatttttttagacaactcttatcaagaaatagttcagtgttaataagcccatcaaaattcatgtcaccttcattt

SEQ ID NO: 510517 - DNA, 201 bp, Homo sapiens
cttacggggtagatgggaagaatgggagactgaaacgtgacagaagggatgaggtggaatgacacttttctgaaatgccttttcacatggttcttttttcyttttgagatggagtctagcttgccacccaggatagaatgcagtggtatgatctcggctcactgcaacctctgcctcctgggttcaagcaattctcctact

SEQ ID NO: 510518 - DNA, 201 bp, Homo sapiens
ttatgtgttaatcattgtaagaaacaacttataaaaaacaagctggtactcctccctaaattacactcacagaaacagaaattaaaacaaaaacaaaaacaaaaaaacactgaaaacccatgtcttagttaaactgccttagaatcttgacacggatcaaaatcaaaagatggtccctaagcatcagtgagacagaaatat

SEQ ID NO: 510519 - DNA, 201 bp, Homo sapiens
ttttgtatttttagtagagacggagtttcaccatgttggtcaggctggtctcgggctcccgacctcaggtgatctgcccgcctcggcctcccaaagtgctrggattacaggccactgtgcctggccgaaagctacaatttttaagaagcattttgaaatcttaatgtcaattaatggactcccaattattatctacatgga

SEQ ID NO: 510520 - DNA, 201 bp, Homo sapiens
ttcaacagatcatcatcctgcaaaggatccctcactatatagtcaagtattagtacaatttaaaattagcatgaactgtgtgtcaagaaccccagctggcttttttttttttttcacaactgtttccccatttctatgtacaggaaactggaaatgtctgtcacagggccattttcttcactctgcctgagtaaaagcaat

SEQ ID NO: 510521 - DNA, 201 bp, Homo sapiens
cttagccctataatcccagcactttgggtggccgagacgggtggatcacttgaagtcaggagtttgtgagcatgctcaccaacatggcggaactctgtctstactagaaatacaaaaattagctgggcgtggtggtgtttgcctgtaatcccagctactcgggaggctgaggcacgagaatcgcttgaacccaggatgtca

SEQ ID NO: 510522 - DNA, 201 bp, Homo sapiens
gctacttgggaggctgaggcaggagaatcacttgaacccaggaggcggaggttgcagtgagccgagattgcaccactgcactccagcctgggtgacacagygagactccgtctccaaaaaaaaaaccaaaaaaaaaaaaaacacaacaacactcctgaattgccagcaccacccttcccccaccctgagagcagcagcatg

SEQ ID NO: 510523 - DNA, 201 bp, Homo sapiens
agagtatttataaattacaataaaaaatgatccaaaaggtgatctgagctaaagacgaacaaacaaaaatgtgatggagttaataatgttagggttgtagttttttttttttttttttttttttgagacagcgtcccactttgtcccccaggctggagtgcagtggcatgatcttggctcacttcagtctccactttctgg

SEQ ID NO: 510524 - DNA, 201 bp, Homo sapiens
cattcatttgttgttcattcactcggcaagtatttacaaagcactgtactatgtcaggcactgctttaggcactgaggattcagctatgttctgggaaaamaaaaaaaaaaaactctgtgatccagagcatgtattctagtggaacataaacaaatcaataggtgcatggcatggcatagtgttgaaaaagttaaggcaag

SEQ ID NO: 510525 - DNA, 201 bp, Homo sapiens
accacgcctggctaatttttgtattttttgtagagatggggtttcactatgttgccgaagctggtctcgaactccagagctcaagctatcagtctgcctcrgcctcctaaagtgcttaggtttacaggcgtgagccactgcactggaccctgtagaattttttcattcagttctgctgtgaagactgaagtgctgaatcct

SEQ ID NO: 510526 - DNA, 201 bp, Homo sapiens
tggcgtgatctcggctcactgcaacctccatctcccaggttcaagtgattctcctacctcagcctcctgagtagctgggattacaggcatgcaccaccacrcccagctaatttttgtatttttagtggatatgaggtttcaccttgttggccaggctggccttgaactcctgacatcaggtgatcagcccaccttagcctc

SEQ ID NO: 510527 - DNA, 201 bp, Homo sapiens
attcctgcacataacccaatcctttaatttaacttggtatattatttatataattctaacctcaaccctcacccctgatgaaaaagagcactcagcttaaytaaaatcgatgtccaagctatgagtatattcaaaggcctttatgtttttctcttcataaatcttgttttcctggaaaaggttttttcccagtcaactgaa

SEQ ID NO: 510528 - DNA, 201 bp, Homo sapiens
tgaatccttaaatatagtttgtggacctctagattttaaactgtgaaacccagtttaaagattttttttttttttttttttttttttgagacagagtctckttctgtcgcccaggctggagtacagtggcgcaatctcagctcactgcaagctctgcctcccaggttcacgccgttctcctgtctcagcctcctgagtagc

SEQ ID NO: 510529 - DNA, 201 bp, Homo sapiens
ctatatcctcttgacttcttattacaactggagagaacctgtgattccatgatagacttcctgaagctgcttgcctggaattttatattatattattttaytttttggagacaaagtctcactctgtctcccaggctggagcacagtggtgcaatctcggctcactgcaaccttcacctgcctgggttccggcgattctcc

SEQ ID NO: 510530 - DNA, 201 bp, Homo sapiens
actctggtttgaagatgcctagagagagggatgttgtgggtagtttagccaatgagcagtgtctgccacagtctgcttggaaaatatcttctcattttttrtgagattcaactcaagagttatatcttagaaatttagaaatgtgtatatatatgtatataaactatatatgtatataaattatattgatatttatataag

SEQ ID NO: 510531 - DNA, 201 bp, Homo sapiens
tgatagacttcctgaagctgcttgcctggaattttatattatattattttactttttggagacaaagtctcactctgtctcccaggctggagcacagtggygcaatctcggctcactgcaaccttcacctgcctgggttccggcgattctcctacctcagccttccaagtagctgggattataggtgtgcgccaccacgcc

SEQ ID NO: 510532 - DNA, 201 bp, Homo sapiens
aatgacatactacttcacatctgtgaggatggctgctataaaaaaaaaacagaaagtaacaagtgttggcaaggatggggacaaattgaaacccttgtgcrcagttggtgggattgtaaaatggtttaactgctatggaaaacaccgtcaagtttcctcaaaaaattcaaatagaactaccatatgatccaggaattttac

SEQ ID NO: 510533 - DNA, 201 bp, Homo sapiens
tcttggaaatgtctgtctgaatcttccatttaccttcatttctagcagaaactgggaaatttctttttttcttttttcttttctttctctcttttctctgkctctttcttatctttcattattattacttttttttgagatggtgtgttgctctgtctcccaggctggagtgcagtggcatgatcacggctcactgcaaca

SEQ ID NO: 510534 - DNA, 201 bp, Homo sapiens
cacagaatttaaagcacagtccatattcctcagaaagctaaccaagcccaccactgggtgtcctaccaaaggccgttccctggcattattctagacagaamaacccagacggcaaaaatgtactgctgtggagagatgaatcaattcctaggaggactggacagacattctcaaaagtttgttggaaagatagcagagaag

SEQ ID NO: 510535 - DNA, 201 bp, Homo sapiens
tggtctggaactcctgacctcaaatgatccactcaccttggcctcttaaaatgctgggattacaggtgtgagcccctgtgcgcgcggcctcattcttcttytttttttttttttttttggagacagagccttgctctgtcacacgggctggagtgcagtggcacagtcatagctcactgtaacctcaacctcccaggctca

SEQ ID NO: 510536 - DNA, 201 bp, Homo sapiens
caggctggagtgcagtggtgccatctcggctcactgcaagctctgcctcctgggttcatgccattctcctgcctcagcctcctgagtagctgggactacargcacctgccaccacgcccggctaatttttttttgtatttttttagtagagacggggtttcaccgtgttagccaggatggtctcgatggggttgaactagg

SEQ ID NO: 510537 - DNA, 201 bp, Homo sapiens
cttgtcctgcatccaggaagaatgacaggaagaatgaggtacacgaacaagtgaagggtgcacaataagaatgaggtacccagacaagtgaaggacaagaygaagatgagctttactaaattttagaacagctcagaggagacccacagtgggtagctcctctccgtaggcaggtcttcccaacatctactgctctcagca

SEQ ID NO: 510538 - DNA, 201 bp, Homo sapiens
ttgaagaatcatggagtcattataagagtctcttgcacaagtgttgagcctacttaatgaatattgaacgaaattacattcacttttccctggaatgaaayctctaagcaagagtaaaaatttagctttttctgaatgtgaacataaggccatgaagtagacataccttgttgaatcattatggggcagaggcccagatat

SEQ ID NO: 510539 - DNA, 201 bp, Homo sapiens
ggagtgcagtggtgccatctcggctcactgcaagctctgcctcctgggttcatgccattctcctgcctcagcctcctgagtagctgggactacaggcaccygccaccacgcccggctaatttttttttgtatttttttagtagagacggggtttcaccgtgttagccaggatggtctcgatggggttgaactaggtggcct

SEQ ID NO: 510540 - DNA, 201 bp, Homo sapiens
aggccaggcaatgggagcagacacccctgagcctgcagggtcgagagaaggggagggtcttcccggctctcgagggtgcaggctgcagagatgcctggacstgcacctgtgagggtgccgcagctgcaccagggaatctcccgcgcagccaactgggaatgggcaggtctcccgcttgtcccgggctctctctggctcagt

SEQ ID NO: 510541 - DNA, 201 bp, Homo sapiens
atgagaagtctgggtgaaaacaatgctgccttttaatgggtttggtgcaaaagtaactgtggtttttgacattaaaagtaacggcaatggccgggcgcagyggctcacacctataatcccagcactttgggaagccaaggcggtggatcacctgaggtcaggagttcgagaccagcctggccaacatggcaaaaccccgtc

SEQ ID NO: 510542 - DNA, 201 bp, Homo sapiens
ggccgggcgcagtggctcacacctataatcccagcactttgggaagccaaggcggtggatcacctgaggtcaggagttcgagaccagcctggccaacatgrcaaaaccccgtctctactaaaaaatacaaaaattagccgggtgtgatggtgggcgcctgtaatcccagctactcaggaggctgaggcaggagaatcattt

SEQ ID NO: 510543 - DNA, 201 bp, Homo sapiens
accaacaatctatttggttgttttggtattcccttagtcttttagccctttctgtaagtttttcagcagcatctcttactaggcttgattggttgaggtakaggcaacattcctcatccaacgagaggcagaggccatttaagatctcctttttcagccattataagatctagtccccctctattttggaggattactcca

SEQ ID NO: 510544 - DNA, 201 bp, Homo sapiens
aggccagagagacatccactatagtagagatataggaagagttattctttatacatttaatacaatcagatgttgcaccattgatattgagccatgaatamagcgggcactagggacagcacaaattaggtcagaggcatcggttgagggagaggctgtaaaacgagccagttgtggaaatgccccatttgcatcaggtga

SEQ ID NO: 510545 - DNA, 201 bp, Homo sapiens
atactatctttcacttcctattctttttcttttgagagagagtctcgctctgtcacctaggctggagggcaatggtgtgatctcggctcactgcaacctcygccttccgggctcaagtgatccttttgcctcagtctcctgagtagctgggattacaggcgtgtaccaccatccccagctaatttttatatttttagtaga

SEQ ID NO: 510546 - DNA, 201 bp, Homo sapiens
taaagcaaaaacatcacaagaagaaacaagctgggtatggtggctcatgcctgtaatcccaacaatttgggaggccgaggtgggcagatcacctgagatcrggagtttgagaccagcctgaccaacatggagaaaccccatctctactaaaaatacaaaattagccgggcatggtgacggatgcctgtaatcccagctact

SEQ ID NO: 510547 - DNA, 201 bp, Homo sapiens
gcacggtggctcacgcctgtaatcccagcactttgcgaggccgaggcgggcggatcacgaggtcaggagatcgagaccatactggctaacaaggagaaacyccgtctctactaaaaatacaaaaaattagctaggcgtgggggcgggcgcctgtagtcccagctactcgggaggctgaggcaggagaatggcgtgaacccg

SEQ ID NO: 510548 - DNA, 201 bp, Homo sapiens
ctgtaatcccagcactttgcgaggccgaggcgggcggatcacgaggtcaggagatcgagaccatactggctaacaaggagaaaccccgtctctactaaaartacaaaaaattagctaggcgtgggggcgggcgcctgtagtcccagctactcgggaggctgaggcaggagaatggcgtgaacccgggaggcggagcttgca

SEQ ID NO: 510549 - DNA, 201 bp, Homo sapiens
ctcatcactttcatcttcaaaccttttccttccctctcaatgatccaagactttgcccagaactcagtctgtcttctctcttccaagttagttatcacaaytgcaaaaattaattaaagatcaaaatgtgaaaccaaataataattaaagccagcttaagagagggccgggcacagtggctcacacctgtaatctcagcac

SEQ ID NO: 510550 - DNA, 201 bp, Homo sapiens
ccgagatcatgccattgcgctccagcctgggcaacagagtgagactgtctcaaataaataaattaattaattaaaaatacagacttattagaaaaaaattktgggaaaatacaagtaaaatcccaagcaggcaattctaggtggaataccaaaatccacaataagggggaaaaaatgacagttttgactttattaaactta

SEQ ID NO: 510551 - DNA, 201 bp, Homo sapiens
gaccctgtctcaaagaaaaaaaaggaatatgtatatatatatgtgtgtgtgtgtgtgtgtgtgtacatatatatgtttatatatgtacacacacacacacwccttttttttcccttgagagtttcatggattcagagtaaatagcttctgctcattctttctacagttggaggtggcaatatcttaggaaaactgcctcaa

SEQ ID NO: 510552 - DNA, 201 bp, Homo sapiens
attttaaaaaacacacacaatgtattgtattcttgaaaattgctaagaaaatagattttgcctttctgcccttggacaccaccgaggaagcatcattaaartctctcttctttctgccgtcatgtctaagtctgagtctcctaaagagcctgaccagcggaggaagctcttcattggatggttgagctttgaaacaaccaa

SEQ ID NO: 510553 - DNA, 201 bp, Homo sapiens
gtagaattggaagaactgccacagcaaatggtgaaggaaggaatcaggatgtccagagcagtgggcatgccaaactggttagactatagaggccagaaaayccaccccccacagtgttccctaggagggcccagagcatactccgtttaccggcgtgctaagtcatggcctggtgaggagggcaccagcatcacagagaag

SEQ ID NO: 510554 - DNA, 201 bp, Homo sapiens
caggaactcccttgaattgtcttctgtttatgaaaccttcttttttagtttttttcgagtctcggatatgtattaattagtgtaatctccaaaataatacrtcaagatgatttcatgtattttagaggagaaatgtttcctggttaagtgggaaattgtgcggatggctcctggaagagcttcattctaagcagctttaga

SEQ ID NO: 510555 - DNA, 201 bp, Homo sapiens
ctgtaatccacattcaccgagttgaacttgtactgatcattggcacccagtttgtctcagggtttttgggttattctttctgcccctactaacatctgatygaacagtgccagatgcaagacatacagtgctgctccaggacctccagctccaataaatattaagaggaggatcaagcttggaagcttcttggcctggccg

SEQ ID NO: 510556 - DNA, 201 bp, Homo sapiens
gcaggcctccataacaactgtttcagtactgactgagtggttaagttaaatattaaaagttaaaaaagccagtgcccttatacaaaggctggaatgtaacraaagcccaccaagagttttgcctaggcttttcctgggccttaaagcataacaaaataacaaaggaattcttaacaggacccatttaggattaaacgagtt

SEQ ID NO: 510557 - DNA, 201 bp, Homo sapiens
ctccgtgatttaagcaggagacataataagggtaatcaccccagcagctggacccatttagattaagtaaatttactgaggctccagaggaaggtcttcargactcagaccttagctatagattagaagaagttaatcacttatgtctttagatgaatgcacacttacacgtagacatatagcttagaaggtatataagct

SEQ ID NO: 510558 - DNA, 201 bp, Homo sapiens
gattcagagtaaatagcttctgctcattctttctacagttggaggtggcaatatcttaggaaaactgcctcaagaaaagaccatcaagggacctcaaaaaraaaattctagaggcattattcaggggtctcagaatatatcagagccaaaagaggttgcccttgtttattattgatagctatattaatagtataaatcaag

SEQ ID NO: 510559 - DNA, 201 bp, Homo sapiens
ataagagtggaggaccattttaagaagcccaaaaaactaacgaggaagtggtaaataaaataggtaggcttggaagcacctctcaaccaccagattaaaawaaaaaaaaaagagtggggataggggaagcagattaacaagcaagaacactcagctacaaagcaggatattcacacaggcctgtcaaactgtacaatggct

SEQ ID NO: 510560 - DNA, 201 bp, Homo sapiens
tatgcatgcttgatactcaaagctttgtgctggagagtcactcacagcttgttgataaaggtgaaggttagcaaagttcacaatatgtaaaactcgggcayactgggactataaatcctaactcttgctgggtgaagccccctttctgtcttacgtattgctgatctgtatcatatcatcataaaaatctcctagctagtt

SEQ ID NO: 510561 - DNA, 201 bp, Homo sapiens
tgtttttgcaaatggcaggatttccttcttcatggctaaataatattccattgtgtatacacaccacattttctttattcattcattggctgacagatacktaggttgtttccatatcttggctattgtgaatagtgctgctatgaacatggggtgcagatgtctcttcaagacacagattttatttcatcccagaagtgg

SEQ ID NO: 510562 - DNA, 201 bp, Homo sapiens
atcttggttgaggtggtctttaaaaatccttaaaataacagaatggagagatcttcctaagctatcaattggagggaattattgttcagatcatcctctakgtttcctgatgggatctaaagggattacagtaccgtttccggacctgtattcccaggaaaccttagcttgggtagatggtaactagtgttcagaaagcaa

SEQ ID NO: 510563 - DNA, 201 bp, Homo sapiens
tctcgtgatccgcccgcctcggcctcttaaaatgctgggattacaggcgtgagccaccgcgcccggccagggacactttcatcacatatccatatggcttrctctctcatttctattcagataccaccttgacagcggagctgtcccagactacccttgtgtaaagcagtatttccacacccctcccctggactacctgtc

SEQ ID NO: 510564 - DNA, 201 bp, Homo sapiens
ttgaatctgtatgttgctttcagtagtatggacattttaacaatattaactattccactctttgaacagaggatacctttccatttatttctgtcttcaattttttttttttttttttttggtctcactctgtcacacaggctgcagtgcagtggcacaatcatgacttactgcagcctcaaactcctggaatcacgcaat

SEQ ID NO: 510565 - DNA, 201 bp, Homo sapiens
atagagaacataattcctacattcacatgtgaaaatacaaaccgtatgacccctcgtcttcccaaaactgaattctgattaataattttttttggattgtsaactagaaataaaaatgtaaagggaccaacttaaaagtctcaataaaatcaagggaaactgccaccaaaaccaggattcctggatcccgggcacataaat

SEQ ID NO: 510566 - DNA, 201 bp, Homo sapiens
ctatccctcctccttcctcacacatgcgctgagtcagcaaaaccccaacaggttttacttttttacaaaacctgctctgagagtaaggtaaagtccaaacrcaggcctggagctcaggaggcagagcaagaggcagaatagaagcctccattgaccaccctcctcatcccccacagtaacaccaaactgaacaactgccca

SEQ ID NO: 510567 - DNA, 201 bp, Homo sapiens
ttataattgttagctagtaaaaagtggttaacaacaacaaggggtaaaagagggttctaaggtggctcaaacctgtaatcccagcactttgggagactgargcaggtggatcgtttgagcccaggggtttgagacccgcctgggcaacagggtgaaaccctgtctctaccaaaaatacaaaaaactagctgggtgtgattg

SEQ ID NO: 510568 - DNA, 201 bp, Homo sapiens
acatatattgcatataacatataatatataacatatattatatattatatacgtattatatatattacatattatatatacataatattatatatataatmcaataatgaaaaactttgatatattgtgtgaattaccaaaatgggacacagagacacagagtgagcacatgcgggaaaaacgttgccaacagacttgctc

SEQ ID NO: 510569 - DNA, 201 bp, Homo sapiens
gtacaattggtacaattaaataagttatattcagttcctgggaagcactatagcaatacaaggagaaaatttgattctatttatttttgttaaggcccacstacctcctaatcctaatttctctcatttcccaaatattccttgtttgttcttactgttatgtgttttcctgtattttgctcttctactttcttttccatg

SEQ ID NO: 510570 - DNA, 201 bp, Homo sapiens
gttcttggtctcactgacttcaagaatgaaactgcggacccttgcggtgagtgttacagctcttaaggtggtgcgtctggagtttgttccttctgatgttyggatgtgttcggagtttcttccttctggtgggttcgtggtctcgctggctcaggagtgaagctgcagacctttgcggtgagtgttacagctcttaaggcg

SEQ ID NO: 510571 - DNA, 201 bp, Homo sapiens
tgatccgcccgccttggcctcccaaagtgctgggattacagacatgagccactgcacccggccaattcttcttatattttactaattattattttattgattttttttttttttttttttttttttagtagagacggagtttcaccatgttggccaggcttgtctcaaactcctgacctcaagtgagcctctcgccttggc

SEQ ID NO: 510572 - DNA, 201 bp, Homo sapiens
tcaaagaaattcaaaataacatagagaaggaattgataattctatctgataaatttaacggagattgaaataattaaaaagaatcatgcagaagttctggrgctaaaaaatgtaattggcatcagggtcttttattagcaaaatagattaagcagaagaattagtgagcctgaagataggctatttgaaaacacacacaag

SEQ ID NO: 510573 - DNA, 201 bp, Homo sapiens
gatccgcccgccttggcctcccaaagtgctgggattacagacatgagccactgcacccggccaattcttcttatattttactaattattattttattgattttttttttttttttttttttttttagtagagacggagtttcaccatgttggccaggcttgtctcaaactcctgacctcaagtgagcctctcgccttggcc

SEQ ID NO: 510574 - DNA, 201 bp, Homo sapiens
taatctaagcccataaactcaccatagaagaaaccgagatccagagagttcaaataacctgcccaaattcactgagccagttagtgagagagcaggcaacrtaacccagatattctggctcctaatccagtgttctttccattatatcactcagcccctattttgaagtcttttggacctcaagaaataaagtattttata

SEQ ID NO: 510575 - DNA, 201 bp, Homo sapiens
tcttagcacttatagctacacaaaacaaaaatagtaacagaattaatgttgtttaattcttgcaatccatggatgcataaattcactgggggaaaaaacarctcatcattctcattaaagatgtgcttcaaaagtattttaattttatatctaatatgtatgaatcatactttgtatttattttgttttgatcagttatat

SEQ ID NO: 510576 - DNA, 201 bp, Homo sapiens
tcgtgggggtttcacagtcagaaaccagtgggcacaccccagctccacactcatgagctgcatgacctcaggacagagcttgaccatctctgaatctccamgtttccaatgtaaaacaggaacaccacccccatggcagagtcagcgtgaagaccagagacacctggtgccatgcatggcgcatgatagggcagcaggagg

SEQ ID NO: 510577 - DNA, 201 bp, Homo sapiens
tttttttagtagagacggagtttcaccatgttggccaggcttgtctcaaactcctgacctcaagtgagcctctcgccttggcctccgaaaggactgggatkacaggcttgagccactgcacccggcctcattttatttttatagagacagggtctctcactattttgcccaggttggtcttgaattcctggactcaaatgc

SEQ ID NO: 510578 - DNA, 201 bp, Homo sapiens
acaattattttggccgggcgcggtggctcacacctgtaatcccagcactttgggaggccgaggtgggtggatcacgaggtcaggagttcaagagcagcctrgccaacatggtgaaactccatctctaataaagatacaaaaattagctgggcgtggtggcatgcgtctgtaatcccagctactcgggaggctgaggcagga

SEQ ID NO: 510579 - DNA, 201 bp, Homo sapiens
cctacaagttttaatctgtttaagacctacctcaagtaaaatgttcactgccatggcatgtgagggaaaagggaaataattcttatgcatggccttcaacrgccaaatttcatgctcatcagtacatcttctcttggtgtagaactgatgatgataattatgatgatggaaaaaagtgctgttgatagcaatgcctctctt

SEQ ID NO: 510580 - DNA, 201 bp, Homo sapiens
atagggcagcaggaggagcctgcactgatcttgagcattcctcaattcagtcccctccagacaacttcagtaatgacaaaatccaatcctgaggggacttytgcctcacacatgccatctccctggcttgcagaactggctgctggcatccagggctggagggactcaggagcatgggggcaggtgaggtgcagggaaatg

SEQ ID NO: 510581 - DNA, 201 bp, Homo sapiens
attgcattcagttttctatcttttaagttttatttttacttacatggccgggcacagtggcttattatgcctgtaatcctagcacatttgggggccaaggygggaggatcacttgaacccaggagtttgagagcagcctggtcaatacagtgagaccctgtctcttaaaaaattattttttaaataaataaatgttatttt

SEQ ID NO: 510582 - DNA, 201 bp, Homo sapiens
gtcactcacagcttgttgataaaggtgaaggttagcaaagttcacaatatgtaaaactcgggcatactgggactataaatcctaactcttgctgggtgaarccccctttctgtcttacgtattgctgatctgtatcatatcatcataaaaatctcctagctagtttataatatcttcagatgtgcagacctcagaaatgta

SEQ ID NO: 510583 - DNA, 201 bp, Homo sapiens
gtaatgacaaaatccaatcctgaggggacttctgcctcacacatgccatctccctggcttgcagaactggctgctggcatccagggctggagggactcagkagcatgggggcaggtgaggtgcagggaaatgaggcactctgtcatagcggggtccccagagttctgggatgcactggaaagccatggtcagcctccgatg

SEQ ID NO: 510584 - DNA, 201 bp, Homo sapiens
tttcttaatattgttctgcaaagcctctgaaattcccagatgtcataaagttctcttttgaaaattaagaatggccttttagctgggcatggtggctcacrcctgtaatcccagcactttgggaggccgaggcaagtgaatcagctgaggtcgggagttcaagaccagcctgaccaacaatgtgaaaccctatctctacta

SEQ ID NO: 510585 - DNA, 201 bp, Homo sapiens
ctattgaatgtacaccactctagtaaatgtgcatcattaaataaaccacaaagcaaggtcaggatagggtaacacagtaacgaagagccacagaatctcawgtgttttaatacaaaaaagtttcatttgttctaaccatgttcaaggcagatgtttctggccaggtgaggttctcctggaaacattgcctctatgcagcaa

SEQ ID NO: 510586 - DNA, 201 bp, Homo sapiens
acagtctgttccaaccttgaaaagtcttgtttcctggatcttatgttcccatccatggtggcacacagtagcagtagcaggaagagcaggtatagtcctgyccaaagatcacacatgtaatacacctactattcagctaggcccctgctccagttctgtctcacagtgatggccaagttcctggttcctcataactggtgt

SEQ ID NO: 510587 - DNA, 201 bp, Homo sapiens
aggtgcctggagtcccagctacttgggaggctgagacagaactgtttgaacccaggaggcggaggttgcagtgagccgaggtcatgctgctccactccagyctgggtgacagagtgagactgcatcttaaaaaaagaaaaaaaaggggggaggagccaagatggccaaataggaacagctccggtctacagctcccattgt

SEQ ID NO: 510588 - DNA, 201 bp, Homo sapiens
ttctgcttgctctgcacttaattttaagttcttggttcagacaaagaatgtgttttaccgataacctcttcttccagttcctcaggctctgccaatctttygttcctcattcctgatacgataacccaatgggaggcaagtggcttttgtgtgaatggcgacgttggatttggcatttcctctacaaccactctagaagtc

SEQ ID NO: 510589 - DNA, 201 bp, Homo sapiens
catgctgctccactccagcctgggtgacagagtgagactgcatcttaaaaaaagaaaaaaaaggggggaggagccaagatggccaaataggaacagctccrgtctacagctcccattgtgagcaacgcagaagacgggtgatttctgtatttccaactgaggtaccgggttcatctcactggggagtgccagacagtaggt

SEQ ID NO: 510590 - DNA, 201 bp, Homo sapiens
acattaatctttatgacgtataatctaaaaataatataatttttctaattcattaggtcaattacaaggatcgtagtccctgttacggctaccagtgggtrtcagaagaacacgaagaggcacatcacactgcttatcttgtgttctccccaagcaagagctttgtccaccttgagcccatgtctcatgaactaccctgtg

SEQ ID NO: 510591 - DNA, 201 bp, Homo sapiens
cagaagacgggtgatttctgtatttccaactgaggtaccgggttcatctcactggggagtgccagacagtaggtgcaggacagtgggtgcagcgcaccacrcgcaagccgaagcagggcgaggcatcacctcacccgggaagcgcaaggggtcagggaattccctttcctagtcaaagaaagcagtgacagagggcacctg

SEQ ID NO: 510592 - DNA, 201 bp, Homo sapiens
tttgcgaggccgaggcgggcggatcacgaggtcaggagatcgagaccatactggctaacaaggagaaaccccgtctctactaaaaatacaaaaaattagcyaggcgtgggggcgggcgcctgtagtcccagctactcgggaggctgaggcaggagaatggcgtgaacccgggaggcggagcttgcagtgagccgagatggc

SEQ ID NO: 510593 - DNA, 201 bp, Homo sapiens
tgtggagcaagtaatcatgaagctctttagatgtcattacttcaacttcttatccatgttccttttgaaagtttgatttctcttgaggtgaattattgccrgcagggactcaataaaacaagtatattgaagtgagactgaagcgtgttctctctggcacatttaatttctttttatttccttttttgcagataatggcaa

SEQ ID NO: 510594 - DNA, 201 bp, Homo sapiens
cgaactgggtggagcccaccacagctcaaggaggcctgcctgcatctgtaggcgccacctctgggggcagggcacagacaaaaagacagcagtaacctctrcagacttaaatgtccctctctgacagctttgaagagagtagtggttctcccagcatgcagcttgagatctgagaacgggcagactgcctcctcaagtggg

SEQ ID NO: 510595 - DNA, 201 bp, Homo sapiens
ttgcgaggccgaggcgggcggatcacgaggtcaggagatcgagaccatactggctaacaaggagaaaccccgtctctactaaaaatacaaaaaattagctrggcgtgggggcgggcgcctgtagtcccagctactcgggaggctgaggcaggagaatggcgtgaacccgggaggcggagcttgcagtgagccgagatggca

SEQ ID NO: 510596 - DNA, 201 bp, Homo sapiens
ctgccacttcctaatagcttagctcctacttctgagtgagaagatatgatgtttggttttccattcctgagctgggaatatcaggaatactttcaagtaaygagagaccatttccatctaatattaattaaaagaaagttgagggagggaaaacaataatggtttttttctcaccctttatcaaatatgtgttgtcttttt

SEQ ID NO: 510597 - DNA, 201 bp, Homo sapiens
tctcaaaaaaaaaaaaaaagtattacagatgacaactgtgggatgcagctacgtagtgtgtagaaagaaatgtataaacttggccgggcgcagtggctcaygcccgtaatcccaacattctgggaggctgaggagggcggatcacctgaggtcaggagtttcagaccagcctaggcaacatggcgaaaccctgtctctact

SEQ ID NO: 510598 - DNA, 201 bp, Homo sapiens
ctcctcctcccaggttcacgccattctcctgcctcagcttcccgagtagctgggactacaggcacctgctaccacacccagctaattttttgtatttttartagagacggcggtttcactgtgttagccaggatggtctcaatctcctgacctcgtgatccgcccacctcggcctcccaaagtgttgggattacaggcgtg

SEQ ID NO: 510599 - DNA, 201 bp, Homo sapiens
tcttgcttccttccttcctttgttctttccttacttcttacttcttttttttttttttttttttgagacggagtcttgctgtcacccaggctggaatgcartggtaccatccaggctcactgcaacctctgactcccgggttcaagtgtttttcctgcctcagcctcccgagtagttgggactacaggggtgcactaccat

SEQ ID NO: 510600 - DNA, 201 bp, Homo sapiens
attttcatctattatgatggacactttcaatttggttcttctattctgagtgtgtttcttcaactatttcttttttttttttttttggagatggagtctcrccctgttgcccaggctggagtgcagcggcccagtctcagctcactgcaacctccgcctcctgggttcaagcgattcttctgcctcagcctcccaagtagc

SEQ ID NO: 510601 - DNA, 201 bp, Homo sapiens
tagtagagacatggtttcactgtgttgcccaggctggtcttgaactcctgagctcaggcaatccgcccgcctcagcctcccaaagtgctaggatttcaggygtgagccaccacgcccagcctgaactatttcattgttgatttcttcccctctgttttactcttcctggaaattctattatttggctgctgaacttcatag

SEQ ID NO: 510602 - DNA, 201 bp, Homo sapiens
ggggtttcaccatgttggccaggctgatctcaaactcctgacctcaagtgatccgcccgcctcagcctcctaaagtgctaggattacaggtgtaagccacygggcctggtcttttatttatttatttttttgagatggagtctcgctctgtcacccaggctggaatgcagtggcgctctcggctcactgtaacctgcaccc

SEQ ID NO: 510603 - DNA, 201 bp, Homo sapiens
aacctgcaccccctgagttcaagtgattctcctgcctcagcctcctgagtagctgggactacaggcgaccgccaccatgcccagctaatttttgtattttyagtagagatggggttttaccatgttagccaggatggtctcgatctcttgaccttgtgatacacctccctcggcctcccaaagtgagtgagggagccaccg

SEQ ID NO: 510604 - DNA, 201 bp, Homo sapiens
tgccacataattcagctttctcagttcttctgagttagtctgcaatcatctctttgctttttagctttcaaaggtttatcatcggccaggtgcagtgtggytcatgcctgtaatcccagcattcgggaggctgaggcaggcagatcacctgaggtcaggagttcgagaccatcctggccaacatggtgaaaccccgtctct

SEQ ID NO: 510605 - DNA, 201 bp, Homo sapiens
tctgctcattctttctacagttggaggtggcaatatcttaggaaaactgcctcaagaaaagaccatcaagggacctcaaaaagaaaattctagaggcattwttcaggggtctcagaatatatcagagccaaaagaggttgcccttgtttattattgatagctatattaatagtataaatcaagtgaagttctataaatgag

SEQ ID NO: 510606 - DNA, 201 bp, Homo sapiens
cttaggaaaactgcctcaagaaaagaccatcaagggacctcaaaaagaaaattctagaggcattattcaggggtctcagaatatatcagagccaaaagagrttgcccttgtttattattgatagctatattaatagtataaatcaagtgaagttctataaatgagtgaattccaatttatattctataagtttatgttatt

SEQ ID NO: 510607 - DNA, 201 bp, Homo sapiens
tgcattccagcctaggtgacaagagccagactctgtctcagaaaaaaaaaaaaaaaaagaagaagacgacgacactgaagaacagataattttgaacagtktggaaaaattgaagtgattgaaatcatgactgaccaaggcagtggcaagaaaagggactttgcctttgtaacctttgacaaccatgactccgtggataag

SEQ ID NO: 510608 - DNA, 201 bp, Homo sapiens
tgaggcaggagaatcgcttgaaccagcggttgcaatgagccaagatcgcaccactgcactccagcctggtgacagagcaagactctgtctcaaaaaaactaaaaaaaaaaaaaaaaaagtaattattagtaaaatggcctaaaagcctgtagaaacacagagaaataaaattaagaaacctaagaccaggtgtggtggctc

SEQ ID NO: 510609 - DNA, 201 bp, Homo sapiens
gagaaaaaaaatcaagtttaaaaataaattgtttcattttgtagccagaactataatgcaccatggcattaaatatgacaaatttataataaaaagtaaatttttttttttttgagacagagtctcgctctgttgcccaggctggagtgccgtggggtgatctctgctcaccgcaacctctgcctcccaggtccaagcgat

SEQ ID NO: 510610 - DNA, 201 bp, Homo sapiens
aaaaagtaatatttcaatttctgggtaaagatggattgaaaaatatatttatttttactctcccctaaaactcctctaaagatacaataaaattaaaaaaraaaatttggtgcccacaagagaatatgataggaaagagcagtaacaaactgttaaaagctgggatacagatgggcgaggagtgactgatgttgcagacct

SEQ ID NO: 510611 - DNA, 201 bp, Homo sapiens
gtacttttagtaagatgaggcttcaccatgctggccaggttggtctcaaactcctgacctcaagtgatctgcctgtctcggcctcccaaagtgctaagatwacaggcatgagccattgcacccggtccctgtgacaaaggtattaattacttcagtctaatacacaattgtcacataatttttaaaaatccttattactgc

SEQ ID NO: 510612 - DNA, 201 bp, Homo sapiens
atatgttaattagctcgatcaaaaaatgaagacactggtcaaatcgatcgaatcattccacaacgtattcatattttaaaacatgttgtagggccgggcgyagtggctcacgcctgtaatcccagcactttgggaggccaaggcaggcggatcacgaggtcaggagatcgagaccatcctggctaacatggtgaaaccccg

SEQ ID NO: 510613 - DNA, 201 bp, Homo sapiens
taactttggtaagctcatctttatgctggttccaatatttttatcattaaaaagtttttgcaataaatattttatattttatataaatatttatatttttataaatatttatatattaaatatatattaaaatatttatatatattttatataaatatataaatatatttatatatttttataaatatataaatatattta

SEQ ID NO: 510614 - DNA, 201 bp, Homo sapiens
aactttggtaagctcatctttatgctggttccaatatttttatcattaaaaagtttttgcaataaatattttatattttatataaatatttatatttttataaatatttatatattaaatatatattaaaatatttatatatattttatataaatatataaatatatttatatatttttataaatatataaatatatttat

SEQ ID NO: 510615 - DNA, 201 bp, Homo sapiens
actttggtaagctcatctttatgctggttccaatatttttatcattaaaaagtttttgcaataaatattttatattttatataaatatttatatttttataaatatttatatattaaatatatattaaaatatttatatatattttatataaatatataaatatatttatatatttttataaatatataaatatatttata

SEQ ID NO: 510616 - DNA, 201 bp, Homo sapiens
ctttggtaagctcatctttatgctggttccaatatttttatcattaaaaagtttttgcaataaatattttatattttatataaatatttatatttttataaatatttatatattaaatatatattaaaatatttatatatattttatataaatatataaatatatttatatatttttataaatatataaatatatttatat

SEQ ID NO: 510617 - DNA, 201 bp, Homo sapiens
aaataagtttgcctttttgtctttcgtatttgtacaggtttacaacctgctaccagaaaaggacctcactggcttccctgggcctttgaatgaccaggacratgaagactgcatcaatcgtcataatgtctatattaatggaatcacatatactccagtatcaagtacaaatgaaaaggatatgtacagcttcctagaggt

SEQ ID NO: 510618 - DNA, 201 bp, Homo sapiens
gtgttgcccagactggagtgccatggtgtgatctcagctcactgcaatctccacctcccgggttcaagagattcttatgcctcagcctcccaagtagctcrgattacaggtgcgcaccaccacgcctggctaatttttgtatttctagtagagatggggtttcaccatgttggccaggctggtcttgaactcttggcctca

SEQ ID NO: 510619 - DNA, 201 bp, Homo sapiens
aggctggagtgcagtggcgccgtctcggcctcggcctctcaaagtgctgggattacaggcatgagccaccgcgcccggcctctcctggcttgttaagtcawccaacatatttcctcctcaaagaagctttccttgatgacccaagcgccctctcctccttcctctctatttcatcagacgatttgttttttgttttttttt

SEQ ID NO: 510620 - DNA, 201 bp, Homo sapiens
ccataaaacacattttatgagttgaagagagaatttaggtatcataaactttgaaggaagatcaagaaagcaaagctaaaagatgacttagttgtaattcrtccacctttttccaaagtttcaggcgaaaggattcctaccatcctcactttgtttttctgaacactttaagttcctttgctgttattctaaggaaattct

SEQ ID NO: 510621 - DNA, 201 bp, Homo sapiens
tcccagatgcaggctgtttagaagcccaacccttaggagacagccagaaatgggagattttgcctgttctctctgtattgagccaaggggtggtgggggcrggtagccactggcattgctcaaaggcctatttaaaaccacctctgtgttcactgtggtctagggagactcctgattgcagagctccatctactcctggag

SEQ ID NO: 510622 - DNA, 201 bp, Homo sapiens
ctcgctctgtcgccaggctggagtacagtggcgcaatcttggctcactgcaacctctgcctcccgggttcaagcaattctctgcctcaaactcccaagcakctagggacaggcacccaccaccacacccagctaaattttttgtatttttagtagagacgggatttcaccatcttggccaggctgatcttgaactcacgac

SEQ ID NO: 510623 - DNA, 201 bp, Homo sapiens
aaatcaatattcctttttaaaagctattagcaggctgggaacagtggctcacgcctataatgccagcactttgggaggccgaggtgggcagatcacaaggwcaggagttcaagaccagcctggccaacatggtgaaaccctgtctctactaaaaatacaaaaattagctgggcgtgatggcgcgcgtgcctgtaatctcag

SEQ ID NO: 510624 - DNA, 201 bp, Homo sapiens
cctgtaagtctgtcgtttccctgctccttctgcttcccagtgcaggctagttagaagcccaacactcagtcagcaactgataaagtgggtagacgaagccsttccagggagaaactgggagctgttagctaatttttcagtactgaagtacttctttcaaacgcattgctaatttcaggagatgtttaacataaatacatc

SEQ ID NO: 510625 - DNA, 201 bp, Homo sapiens
cctgggagccgctgacctccacgctgtgcatgcccgtgatggtgtcgatcaggttgtgcgcctcgtcgatgatcaccacctggtcctgcagccggatgccbgcagcctgccgagtggccgcatgcagcagcatctgatagggcagcaccaccagctgggaggggagatgaggccacctgagcagggcggggctcccctgca

SEQ ID NO: 510626 - DNA, 201 bp, Homo sapiens
gatttcttcactctgcctattattggccctgtaggattaactcctaattaggttaagattaactattaatttggttctccaatttgggtgatcagtttttstttatactccctgtattttataaaattattattattatcattattattttttgagacagagtctcgctctgtcgccaggctggagtacagtggcgcaatc

SEQ ID NO: 510627 - DNA, 201 bp, Homo sapiens
aggttttgcttttgctgaattgatgaggtacacacaggcataaggagaaaaatttaattgcactaaaattacataggtcagtgtttttctctgttaaaatkataataagcaaattccaattataagcaacagttgctcagaaaatctaattatgtttcaaaagccagtgagtgaaaaatgatattttctgatagaatcact

SEQ ID NO: 510628 - DNA, 201 bp, Homo sapiens
gcccactatacacaatagtagtagaatttaaaattataaagcagccctcagtgaaatagcattttagagaagagaacttaagaacaatctcaaactgcatrttaaatttataactatattgtctgtaaaagattatgctacaattctgatatactacaattaaaaacagttggaagaaaaggacttatattcccatctcaa

SEQ ID NO: 510629 - DNA, 201 bp, Homo sapiens
gggagccgctgacctccacgctgtgcatgcccgtgatggtgtcgatcaggttgtgcgcctcgtcgatgatcaccacctggtcctgcagccggatgcccgcrgcctgccgagtggccgcatgcagcagcatctgatagggcagcaccaccagctgggaggggagatgaggccacctgagcagggcggggctcccctgcagga

SEQ ID NO: 510630 - DNA, 201 bp, Homo sapiens
tctctttgctttttagctttcaaaggtttatcatcggccaggtgcagtgtggctcatgcctgtaatcccagcattcgggaggctgaggcaggcagatcacytgaggtcaggagttcgagaccatcctggccaacatggtgaaaccccgtctctactaaaaatacaataattagccatgtgtggtggcatgcgcctgtagtc

SEQ ID NO: 510631 - DNA, 201 bp, Homo sapiens
acatcacattaaaggttaatgtcacccccctgaacatttttcagtactttgccatccatttatctttagaaataatgtgtgtagatgtatatgtttgtggwtgtgtgatttacatataataaactgtataagtttcattctataaatcactgtttgtttttcactcagcatcctgtcttggagatttacctatgttaaatt

SEQ ID NO: 510632 - DNA, 201 bp, Homo sapiens
tttgtagcaattgggtctcactatattgcccaggctggtcttgaactcctggcctcaagtgatcctcccacctcaggctcccaaagtgctgagattgcaakcatgagccaccacacccagcctgatgtttggtgttttcattgtattagtccattcttgcactactataaagaaatacctgaaactgggtaatttttcttt

SEQ ID NO: 510633 - DNA, 201 bp, Homo sapiens
attttctgccattttgtgcacgaggaaatggagggaatgagaaattgagtaactttccccaaggcacacagcttaaggtgataacaccaagagaagtgccyagtgtttgtctgaccacagagcccacgctatgtgagcactcacatgagatgtgctgaacaaatcttattttgtcatttgctgaaataagatttgttcagc

SEQ ID NO: 510634 - DNA, 201 bp, Homo sapiens
tctgttcagtagttcacggccaaaatggaattcgttgccactgggttatgcatccacataatcctctgttatcactttatatagtacactcaacacttggkgaaaatcctcaggaatttggaattatcttccttttggactattttcaaactatctctgaaacaagaatgtgaagaaatacaaggctggtaaattattaaa

SEQ ID NO: 510635 - DNA, 201 bp, Homo sapiens
atagtaaactaaacaaaggggaggcatatgattccttcttcggcaaacttgatcaaggtagctcctagaagcaagggacatgtaatggtatttctctctctttttttttttgagatggagtttcactcttgttgcccaggctggagtgcaatggcgcgatctcggctcacagcaacctccgcctcccgggttcaagccatt

SEQ ID NO: 510636 - DNA, 201 bp, Homo sapiens
ctggactcagagacacgagacccctttgctaggtatagagaacataattcctacattcacatgtgaaaatacaaaccgtatgacccctcgtcttcccaaamctgaattctgattaataattttttttggattgtgaactagaaataaaaatgtaaagggaccaacttaaaagtctcaataaaatcaagggaaactgccacc

SEQ ID NO: 510637 - DNA, 201 bp, Homo sapiens
tctctatcaaccctagtcgaaggccaaattatgggccatagttaaggaatttcctgacccttatgaagatcggatttgctttaccaaagaatttgaactcmcaattaaaatctatgacccaggtcattctgacatttatcggcttgtctacatgctggtttcagctgcttaagctaaggaatagctagaaaaagcacagtg

SEQ ID NO: 510638 - DNA, 201 bp, Homo sapiens
actaaaaaaaacacagaaaattagctgggcgtggtggcgggctcctatagtcccagctcctcaggaggctgaggcaggatattggcgtgaacccgggaggyggaggttgcagttgagatcgcgccactgcactccagcctgggtgacagagcgagactccatctcaaaaaaaaaaacacacacaaacaaacaaacaaaaaa

SEQ ID NO: 510639 - DNA, 201 bp, Homo sapiens
ctgaggctggagcattgcttgagcccaggagtttgagaccagcctaggcagcatagtgagacttcattcctattaaaaaaaaaattagccagacatggtgygtgcctgtagccccagctacttgggaggttgaggtgggaggatcctgtgagcccagaaggtcgaggctgctgtgagctgtgattataccactgcactcca

SEQ ID NO: 510640 - DNA, 201 bp, Homo sapiens
tctaaggaaggaagggagggagggagcccccatggagcaacccctcagccacccacaaaccgcgtcttcaccttgagactcaaaactgaggagagaccctyggcaggactacagccaaggaagaggacttggctcccctgggtgggaaccacggggtggtaggtgccacctcccaccaaacacacccagccgctgctgctg

SEQ ID NO: 510641 - DNA, 201 bp, Homo sapiens
ccaaaaatatctccggaaataaccaaatgtctccctggttgagaatcactggaccagataatctctaatgtcatttcaaactctgaaattcaatgctccamtaatctctcctcaaactgataagaccctttgccaaattttggtcacataaaattatgccagcccaagaactctacaatccgtacagtggcattgtgtaaa

SEQ ID NO: 510642 - DNA, 201 bp, Homo sapiens
gggcttctgcttcctcttctgtacgatgagggtaatagttcccactcgtgatgactaagcaagtttatacatgtggagcacttagaacagcatctaaaatrtaagtactcagtaaataatagctgactcaagtttataattaagaaggctaaggaagtagcaagatatatgaaaatgatattcatatatactatgttttta

SEQ ID NO: 510643 - DNA, 201 bp, Homo sapiens
tctgacacatgtcacagcactagcgtccctggggggcctccctattgccctggcactgagtcctcccttcttctgtccagggtcctgatgggcaccacaaygacaatcaggggctgcacaccccaggcacaccacaggagatgcccccaagccccacatccctgcccccagcaggggcagatataaccaaagggcaagaga

SEQ ID NO: 510644 - DNA, 201 bp, Homo sapiens
ctcatccctgcaggtcccagcctcgctgctcactgtggaaggcggcacgctcctcccaaagccacacgctctccatcagatccatttgcagccattgaacyatgctgccaatggcaacgatcaggtcctttcccaggtgagtaataaatgggcaccaacagttccttgtgtggagaaggccctgctgacctccagctcaaa

SEQ ID NO: 510645 - DNA, 201 bp, Homo sapiens
aaggtgaggaatcaggtctttttatataagtaatgtttaggctctggcccaagaaggttttgttcataagtggctcagacatattttatttattgaatgtrtatcctgcctcattccaaaaagcatttaaggcagcttacaaagaggcatacaaaataaaatggaaaggaagtaagaaaaatagggggaaacaggtaagga

SEQ ID NO: 510646 - DNA, 201 bp, Homo sapiens
atcgcttgaacccaggaaacagaggctgcagtgagccgagattgcgccactgcactccagcctgggtgacagaacgaaacgctggctccaaaaaataaataaaaaataaataaataaataaataaataaataaataaataaatgtctccagacattgccaaatgtcccagggagaaggagtaaaacagctctgaactgaga

SEQ ID NO: 510647 - DNA, 201 bp, Homo sapiens
taaataatagctgactcaagtttataattaagaaggctaaggaagtagcaagatatatgaaaatgatattcatatatactatgtttttaatttagaaaagkgggaggggaatttgttagtgtattttctcagttatatagtctgggagagtatttaataaactattatctagaggcagtaaatactgtgcaactacatttt

SEQ ID NO: 510648 - DNA, 201 bp, Homo sapiens
gtttgaggcaaggtttcgttgcctaaaaccaaatcctcttgataaatgagttttgacagagcatcaactcaaatacttttttttttttttttttgagacasagtctggctctgtcaccagactgtagtacagtggcgcatctcagctcactgcaatctccgactccctggttcaagcaattatcttgcctcagcctcccga

SEQ ID NO: 510649 - DNA, 201 bp, Homo sapiens
acgcaccaccacgcccagctaatttttgttttgttttgttttgtgacggagtctcgctctgtcgcccaggctggagtgcagtggctcgatctcggctcacygcaagctccgcctcccgggttcgcgccattctcctgcctcaacatcccgagtagctgggactacaagcgcccgccaccacgcccgtctaatttttttgta

SEQ ID NO: 510650 - DNA, 201 bp, Homo sapiens
cccagatgagccacttcacccgtgctgtcaggatgcgcagttgtcagggagctcattaaaaataattttgatgaagagtacaaacactgacaattggctcstgtgaccttctaaaatccattttacctcttgaatgtctttcttccagtagtcacactgcttcctagagtgttagtggattcacttttgtccttagaggcc

SEQ ID NO: 510651 - DNA, 201 bp, Homo sapiens
tttgttttcctatacctggcttatttcacataacataatctcctccagatttaatcatgctgccataaatagcagaatgttcttgttttttaaaatggaayggaattctatgtgtatataccaaattttctttatctgttcatctgttgatgacacttatgattccataactagacagacatcagtaatttgttagggatt

SEQ ID NO: 510652 - DNA, 201 bp, Homo sapiens
cgtctggccaaacgtctgacccgaaagagaatgtatttacattcctgctgcattgttcagcagccccttcatgttctgtgtgatttgttttctttttccctttttttttttttttgacatggagtcccactctgtcacccagactggggtgcagtggtgcaatctcggctcactgcaaacttcacctcccaggttcaagca

SEQ ID NO: 510653 - DNA, 201 bp, Homo sapiens
gagggctaataaacatcatatatacatgatgtttattacatatatattatatatattaggtatgtaatatatatgtattacatatatacacacacacacayatatatatatatatgtacacacacatatatatacaaagtctggctctatcacccaggctggagtgcagaggcacaatcttggctcactgcaacctctgcc

SEQ ID NO: 510654 - DNA, 201 bp, Homo sapiens
ccaataatgttctttatagaaaaagaagattctctggtctgggatccaatctaggttcacacagtacatttagttgtcatgtctctttggtctcaatctgyaacaattccttagtttttctttgtctttcatgatgttgacagtttaaaattttgtcttttggattatgtgatgttttgaattttgtaacatgtccctcaa

SEQ ID NO: 510655 - DNA, 201 bp, Homo sapiens
acccgggaggcagaggttgcagtgagctgagaacgcgccactacactccagcctgggagacacagcgagactctgtctcaaaaaacaaaaacaaaaaacamcaacaacaaaaaaacaagtctctgctgactgcttgaactgaagacatctagtctcaggaactgtgaagcctccatcttccactatggccacagggaagga

SEQ ID NO: 510656 - DNA, 201 bp, Homo sapiens
catctggaaactggtgtaaatgggtttctccacagaactgcttcatcacttgcggcggggcctgctgtttcttcagatgcacaggcagattacttcacacrgataaatgcaaagcagcattccttccaccatgtgccataacccctcttaaacgatatcttcttacacattgatttacatatcaatggtctttaaagaact

SEQ ID NO: 510657 - DNA, 201 bp, Homo sapiens
actgagtgacgtcctccaccatgaaatgatgcccggcctgcagtgtgccaggacagcctgcagcagtgcagagtaactcccaatgtcagcatgcaggacarctgccatttttaccaacccagccagccaccaggcttttgtacaaatttagaggctgctcagaccaacaagccacctgcctgaggttttaatattgctaag

SEQ ID NO: 510658 - DNA, 201 bp, Homo sapiens
aatattcaaactatattaagtagtatggactcaatccaatatgactgctgtccttatgagaagcagagaagagacacggagacagacccaggaagaatgcyatgaggcaatggagacagtgattaaagtgctgtatcaacaagcatttactggcaacaccagaagctaaaagtaaggcatggaacagattcttccctggag

SEQ ID NO: 510659 - DNA, 201 bp, Homo sapiens
caaaatccatttagaatgaaaggcagcacaaggcagcaccacgttattttcttacagtcgcaatttagatttaaaattttggattccaagaattataggasttttatgccaggaatcaagatgaagaccagatatatatttcataatatcacagtttcttgaggttctttaaatcccaaacacacacttctccattgcctc

SEQ ID NO: 510660 - DNA, 201 bp, Homo sapiens
ttataaccaactgaatgtaatggtcaatattctttaacttcccctcaattaaggagtgtgagagtcttttttttctttaaactttgagtttccaatttagrtatgtggtctttatacagtactatttcacagtgtgaagtttaggttcaagtaataccacagtggagcttaattctagccgcaggatgtggttggtaactt

SEQ ID NO: 510661 - DNA, 201 bp, Homo sapiens
ttctactgaagtttattaagtgcctctattcacttggagagtgccaggcacttcgggggatctatggatgagtctgactcagccctgcttcaagagcttayaaactagtggagaggatggcagtgtgcattttgctctaacacgagatcaaaagtgataaggaccataagaagtgactcaaacaatgggttcttaaggcag

SEQ ID NO: 510662 - DNA, 201 bp, Homo sapiens
cttatgtgaataatgagaaaattgacccagcagtgcctaaacactggaagcattgcacaagggaactctcataaagggtttttattttaaacatgatcacrcctttggtcaaatccatgccacgtcatgagtgaagaacgtatggtgatgacatcatttgcaaggctgtaaggtcagcagtgtcagcccagtgtgagccat

SEQ ID NO: 510663 - DNA, 201 bp, Homo sapiens
ccacccagtctttggtatgctgctttagtagcccagactagctaagacatctgacatatcaagtggcatacataatttctggaaactctgatgctaaattmttgatgccaaaaggtggtaagatctgactcagaaatgaatccatatgagccttccttccacaataaatctaagagtcaaaaaatgccaaatataggtcaa

SEQ ID NO: 510664 - DNA, 201 bp, Homo sapiens
ctggagctgtggcagaggaacataaattgtgaagatttcatggacatttatcagttcccaaataatactcttataatttcttatgcctgtcttactttaawctcttaatcgtgttatcttcataagctgaaggatgtacgtcacctcaggaccactatgacaattgtattaactgtacaaattgattgtaaaacatgtgtg

SEQ ID NO: 510665 - DNA, 201 bp, Homo sapiens
acagcggtgtccctgggggctgggcttgcactgcagctggagttttagagattctgctttcctggtgagctcaactgtgtgaaggctgatggcggggttcrgccagtggcaccatccgtgtttgcctgtgtgggaagagcaggtgccaatctgatgagctctagggtccagggcaggcggtttggcccagctgcctgcaac

SEQ ID NO: 510666 - DNA, 201 bp, Homo sapiens
tatcaaatcaacataatgtacacttataagctagggatgcctgagaacataaccttcgatgtatctatttagtgcttgcaataaacagtgtgccatttatygtacttgggttggcacgtgcatgtctccaaattaataagaatgaaaaatgtaagtgatttagccaaagctgtaccataatccagtgatcatattgcatgc

SEQ ID NO: 510667 - DNA, 201 bp, Homo sapiens
cacttttaaaaataaataacaattgctaaaggtctactatttgacacttgctctactgagtattcccatatctattatttaattttattctcatattaatmaaccctatagaactaatgcagtattcccattttgattaatgtctaatcttaggctcagggagatttagtaaattaaccgagaacattctctaacaatgtc

SEQ ID NO: 510668 - DNA, 201 bp, Homo sapiens
acagtgtgccatttattgtacttgggttggcacgtgcatgtctccaaattaataagaatgaaaaatgtaagtgatttagccaaagctgtaccataatccartgatcatattgcatgcaagtaattaacaagttgcacctggtgagtaggaaggcaggcagccagaggctccagagccatcagaagggctgtcagggcacaa

SEQ ID NO: 510669 - DNA, 201 bp, Homo sapiens
cctgtgcttctatgtgggaacatgctccactgtttccagctttgtatagaaatttctaatcatataaatctcagtattcttggacatcaaggaagtcttayatttttaagcaaccctgtctgctaccatcttcccaacaaccccaccaccatctgttttgatgcctacacagaagatataagccagtggatcctacatttt

SEQ ID NO: 510670 - DNA, 201 bp, Homo sapiens
atggactgacccaaggcccctgtgtcaggttgtgcaggtctgcactgcataactttaagggtaccatttccatccctactccccaaacttgtgccacacarcagccctggaagttacccgtctatagcatggaaaagcaagtacatgaattcatagatgttaacaagcagtgcatttgtaaagctaaaaagaaacatttta

SEQ ID NO: 510671 - DNA, 201 bp, Homo sapiens
tctgcactgcataactttaagggtaccatttccatccctactccccaaacttgtgccacacagcagccctggaagttacccgtctatagcatggaaaagcragtacatgaattcatagatgttaacaagcagtgcatttgtaaagctaaaaagaaacattttacctggtgtcctttcagatcatcagtctctctgctcagt

SEQ ID NO: 510672 - DNA, 201 bp, Homo sapiens
gctaaaaagaaacattttacctggtgtcctttcagatcatcagtctctctgctcagtcaagcacaattcttttaatccctatcttcatccacttgtctctmtaaaattgattgggcttctcctaggatcttcatgtttgtacaaagaaagcccaagctaaattttcaaggtcaaggaaaaaacatacgcttttccctgcct

SEQ ID NO: 510673 - DNA, 201 bp, Homo sapiens
atttaactgattaaatagtatttcaaagtttttacagatctaagatcctatactttctcaatatgtgtttatttggtataggtatgatgacagttctacayaggatattcataggattatataggttatttatatactgcttgtggggaaaaatgaattgttttctatgaaaaaatacagttgactctcttctaccatcta

SEQ ID NO: 510674 - DNA, 201 bp, Homo sapiens
agaggtatgatagttgatacagtttggctgtgtccccacccaaatctcatcttgaattgtagctcccataattcccatgtgttgtaggagggacccggtgraaggtaattgaatcatggggacaggtctttcccatgccattctcatgatagtgagtaagtctcatgagatctgatggttttataaaggggagttctcctg

SEQ ID NO: 510675 - DNA, 201 bp, Homo sapiens
tgatgacagttctacataggatattcataggattatataggttatttatatactgcttgtggggaaaaatgaattgttttctatgaaaaaatacagttgaytctcttctaccatctaggtgtatagtcagctacattccagcgaactacatggctattatttcagaggacttaacttagaagatggccttaaagtgccgtg

SEQ ID NO: 510676 - DNA, 201 bp, Homo sapiens
ctcagtgggaagagaaagatcctttgcttcgggtctttgacactcggattgataagataaggctgtataatgtaagggcacccaccttgcggacatctatrtatcagaaatgcagcactttaaaagaagcaggtacatttgccatgccttttaaattaaattaaaatccattatcgcttttttcccacaaattgctggcct

SEQ ID NO: 510677 - DNA, 201 bp, Homo sapiens
ctatcattcatagtggaccccctctatcatcacagagaaaatcattgatgaccagcactgactccaatattacccaagatctatatttagtatgtctttakgagcatcatggttccttattcagaggatgagattgtatggaaatggcctatcccatgcagttcagcacaaggagacccagtgcagtacaggaacaatgta

SEQ ID NO: 510678 - DNA, 201 bp, Homo sapiens
tattaggaaaagaactaatatgtgagggaattatcagctttcctgacataatattatgtacattatatactggtgtctaatataaatccccattttgctcytacgtctaccctcgaatttgatttctactattttaaagtattctactatatttaaagtgtttataagtgagataatatccctagttcaacaaaaatgcca

SEQ ID NO: 510679 - DNA, 201 bp, Homo sapiens
tatgtctttaggagcatcatggttccttattcagaggatgagattgtatggaaatggcctatcccatgcagttcagcacaaggagacccagtgcagtacasgaacaatgtatgaaatgcttaaaaatgactattcattgcacattagagaatgcctatgtcacatttttacaattacagaactcttttttttttttttgga

SEQ ID NO: 510680 - DNA, 201 bp, Homo sapiens
tatttttagtagagacagggtttcaccatgttgcctaggctggtctgaaactcctgacctcaagtgtttctcccacctcagcctcctaaactgctgggatwacaggcatgagccactgtccccggcaacattacagtctatcatttttataaaaatagcagcaacctgtaaaagttcccagtggaaagctgcatggtcata

SEQ ID NO: 510681 - DNA, 201 bp, Homo sapiens
tatgtaaaagctgtctcagaactctgtgggaagaagcagagtggtgtgttgttttgtttttgtttcaatatgaaaatagtttctggaaatcttggtaagaratcatttgtggaataagcaattcctaaagtgttcacattcatttatccaaaaaatgttgactgaattccaaaaatatacaaatttcttagagaagtgttt

SEQ ID NO: 510682 - DNA, 201 bp, Homo sapiens
acggctgtactttaatctgtgagaaacctaaaagatgagtgcctgaactagatatcatgattttaaaaatttagctgaaatcctcagcctattaaaggttsaatttgaatctccatagctggacagctgaaattctcctttttgcatatcaattagatttagtctctctaccttatggcattaccattcacagatggttac

SEQ ID NO: 510683 - DNA, 201 bp, Homo sapiens
agttggttagccttgattccaacccctgatttcaagcattggagggctaataaacatcatatatacatgatgtttattacatatatattatatatattagrtatgtaatatatatgtattacatatatacacacacacacacatatatatatatatgtacacacacatatatatacaaagtctggctctatcacccaggct

SEQ ID NO: 510684 - DNA, 201 bp, Homo sapiens
tgtcaccttcaccaaacccaagtgtgtcctccagatagattactgctcaccctgcataatgcctcccaggtaaaccttctcccctaaaagagaaatacctctttttttttttttttaagacagtcttgctctattgcccaggctggagtgcagagtgcagtggctcaatcatggctcactgcagcctcatcctcccaagct

SEQ ID NO: 510685 - DNA, 201 bp, Homo sapiens
tgctcagctgaaatcagacctcagtccctgaagaaagaggtggcctctgggagcaggaggagctgctggagtcccaccctgcctgctccttcacctcctgycaggaagcctgccatgaacaaggcaaagcctgcaccaagtatgagaaaaaggggcagttcccagacacacggggtcaagcctgtcccctgggaagccttt

SEQ ID NO: 510686 - DNA, 201 bp, Homo sapiens
caaagcctgcaccaagtatgagaaaaaggggcagttcccagacacacggggtcaagcctgtcccctgggaagcctttcagagaggcccaggagctggggtygcatgctctgctctccatctccgtgacaactcctatgttcaggatctggaggagcatggggcttggggacaggggcctcaccaattgctgcttctcttca

SEQ ID NO: 510687 - DNA, 201 bp, Homo sapiens
gggaaggaggaggacaagcagagctgggaagtgactgtgctgggcatgggtcttttgggggccggctctgactccaactcccctctcctttgacaaggacrtgaggccccatcttcagctcaccttgacttctttcctcttgcagaagccccagacctcagccatcttggaggaattatgaggtgtatgagatccagagtt

SEQ ID NO: 510688 - DNA, 201 bp, Homo sapiens
gaggaaaaggacctggggaggccttgtttcctcctctgttttagagacagtgacacagcaaaaaactagaagaaccctttggacttaaagccaataactgyttctttgtttaacataaaggcagtcttgagaaacagctaccgcaattgcagacccggcaaagggcccaatgccaggagactcattgggtgggagaaagag

SEQ ID NO: 510689 - DNA, 201 bp, Homo sapiens
agttatgaagacatatgaggacacagctcctctccgatggtgctatgggggtgaggtctctgaggtgacatattgcagacagatgcatagagcagctgaasgctctttttgtgtgacacccccaccctttgtaaaaaagaacctccccagtaagactgacagcttgtaaggtttggaggcagtctggcaggacagtggagc

SEQ ID NO: 510690 - DNA, 201 bp, Homo sapiens
cacagctcctctccgatggtgctatgggggtgaggtctctgaggtgacatattgcagacagatgcatagagcagctgaacgctctttttgtgtgacacccycaccctttgtaaaaaagaacctccccagtaagactgacagcttgtaaggtttggaggcagtctggcaggacagtggagctgtctgctacaggagacacct

SEQ ID NO: 510691 - DNA, 201 bp, Homo sapiens
ctgaagttttaaatgctgctctgttgttaacagttttttagttgtccatcgggattttacaatacagatggttagaggcagaaattgaatcagatctcaayattatcagtcagtagtaggactataaaataaatagaaaactatgacatgcttttggaaaagttctagatattaactatgtattatttgttgtaggcgaaa

SEQ ID NO: 510692 - DNA, 201 bp, Homo sapiens
aggtataccttttaaggatctgactaatcttggaatcttcgaggtttccagtactacctgaatttttttattattattattttttgagacaggctatcacrtcgtcaccaggctggagtgcagtggtgggatctcagttcaccgcagcctcaacgtcccaggctcaagtgatcctccaacctcagcaccccctagtaggtg

SEQ ID NO: 510693 - DNA, 201 bp, Homo sapiens
gtttcaccatgttgcctaggctggtctgaaactcctgacctcaagtgtttctcccacctcagcctcctaaactgctgggattacaggcatgagccactgtscccggcaacattacagtctatcatttttataaaaatagcagcaacctgtaaaagttcccagtggaaagctgcatggtcatacagggagggttcaccagga

SEQ ID NO: 510694 - DNA, 201 bp, Homo sapiens
ctgccccctgctgagtcccctcgggtgtgtggccgtgtgtacctgcctcccctgtgtcatcctcacctgattctcatggggccctggaaggaagtgatgaytgtttcattttatagctccacagcagatgacacccaaggtaagagcggttaagttactttgccaaggtcacatggctggtccatgagggaggagacattt

SEQ ID NO: 510695 - DNA, 201 bp, Homo sapiens
atttctactattttaaagtattctactatatttaaagtgtttataagtgagataatatccctagttcaacaaaaatgccaaattcaaagtagtgaaagtayagtggggtatgatatgagatgtctttttttgtcctctcttatttaaaggttttcatcaacagctcttaattaggaaaatagagcaaaagccattagaatt

SEQ ID NO: 510696 - DNA, 201 bp, Homo sapiens
ggagccttgaagatgtttttaaaaaattaagtgagcagttgaggtaaataatgaatgattttacaatcacagatcatttaactttaaaatagcataaaaattcttcttagtaaatcgtaactaacaagaagaaggaaatataatggtcgataattaatcaaatatccaaaatgacggctaagggaaaaaaatccaccaccg

SEQ ID NO: 510697 - DNA, 201 bp, Homo sapiens
ttttgagacggagtctcgctgtgtcacccaggctggagtgcagtggcatgatctcagctcactgcaacctctgcctcccgggttcaagcaattctactgcygagtagctgggattacaggtgcccacgacaatgcccagctaatttttgtatttttagtagagatggggtttcaccatgttagccaggctggtctcaaact

SEQ ID NO: 510698 - DNA, 201 bp, Homo sapiens
gagccttgaagatgtttttaaaaaattaagtgagcagttgaggtaaataatgaatgattttacaatcacagatcatttaactttaaaatagcataaaaattcttcttagtaaatcgtaactaacaagaagaaggaaatataatggtcgataattaatcaaatatccaaaatgacggctaagggaaaaaaatccaccaccgc

SEQ ID NO: 510699 - DNA, 201 bp, Homo sapiens
tatttaaaggttttcatcaacagctcttaattaggaaaatagagcaaaagccattagaattagagaaactaaggaactcaaagacatggaatttaggaaaygtcagtgaagtatctctaaatatatgacaattagagatggagaaataaataagtggaaattgaaaatatacatagaacaaaaaaccagtccagactgcta

SEQ ID NO: 510700 - DNA, 201 bp, Homo sapiens
agccttgaagatgtttttaaaaaattaagtgagcagttgaggtaaataatgaatgattttacaatcacagatcatttaactttaaaatagcataaaaattcttcttagtaaatcgtaactaacaagaagaaggaaatataatggtcgataattaatcaaatatccaaaatgacggctaagggaaaaaaatccaccaccgcc

SEQ ID NO: 510701 - DNA, 201 bp, Homo sapiens
aatctcttaatgcttttaaactgattgggaaaagaggggaggtgattattttcttttgctttgtcttttaattcatttaatgtgcctgtcatgtcagatgytagaaatacagtgagaataatgcaggtaaatctttatattcgtgaagtttacattgaatttgggatgcagacaatatacaaatggctgcatattgtcatt

SEQ ID NO: 510702 - DNA, 201 bp, Homo sapiens
aacaataaagcatttttaatttgaaaaattagttgactgctatttttatctagatagatagaccaatagatagatagatagatagatagatagatagataggatagataggatagataggggtggttttgttttttttttttttttttttttttttttagacagagtctcactcttttgcccaggctggaagtgtggtgac

SEQ ID NO: 510703 - DNA, 201 bp, Homo sapiens
cacgatctcagctcactgcaacctctgcctcccaggttcaagcgattctcctgtctcagcctccccagtagctcagagtacaggcgcctgccaccacaccyggctaatttttgtatttttaatagagacggggtttcaccatgttggccaggctggtctcgaactcctgacctctagtgacccgcccaccttggcctccta

SEQ ID NO: 510704 - DNA, 201 bp, Homo sapiens
tgagctagatctctcaactagtttcatttcactttaaagaaatgaagtggccaggcacggtggctcacacctgtaatcaatcccagcactttgggaggccraggtgggcggatcacctgaagtcgggagttcgagaccagcctgacaaacatggagaaactccatctctattaaaaatacaaaattagccaggcgtggtgg

SEQ ID NO: 510705 - DNA, 201 bp, Homo sapiens
atctgtggtaagtgctattcaaaatgggtgtccaggccaggcgcggtggctcacgcctgtaatcccagcactttgggaggctgaggcggatggatcatttraggttaggggtttgagaccagcctggccaacatggtgaaaccccacctctactaaaaatagaaaaattagctgggcgtagtggcgggcgcctgtactccg

SEQ ID NO: 510706 - DNA, 201 bp, Homo sapiens
agtcgccgcatttcctctggtgtataacatgttgttgatgcagttattgtcctttgttttttttttagctctgtttccttaaatgccaaaactacacacacgaagtatgtaatacgaacactgtgacaatgaggagatgcaagtaacattttattcacctgaagaaactaaaccccaacattttgctttttgtctacagac

SEQ ID NO: 510707 - DNA, 201 bp, Homo sapiens
gtcgccgcatttcctctggtgtataacatgttgttgatgcagttattgtcctttgttttttttttagctctgtttccttaaatgccaaaactacacacacgaagtatgtaatacgaacactgtgacaatgaggagatgcaagtaacattttattcacctgaagaaactaaaccccaacattttgctttttgtctacagaca

SEQ ID NO: 510708 - DNA, 201 bp, Homo sapiens
tatatacatgtgtatgaggaatttataatatatttctaatttaaggctattgcgaatattaaatctggataaaacctgtctttttgaatcctgttatgttaaaaaaacaacatttatttctggcttgaagttatttgtgtactgcattctgatttttttttttctttctttcacagttgtgcatgcctaaagggctatctt

SEQ ID NO: 510709 - DNA, 201 bp, Homo sapiens
atgctatgtcttaatggatagtgaattgaaggaaattataaaatagtacctgtacactgatagattcttcaaaaaaggttacacaaatatttggattcacttttttttttagacaagttctcactccgtcacccaggctggagtgcagtagtgcaatcatgggtcactgcaaccttgacatcccgtgctcaagctgtcttc

SEQ ID NO: 510710 - DNA, 201 bp, Homo sapiens
cccgagagggggttgtgtaatgttgagacccacttccacagggtggggtctataagaccctcccaagtactgcctactgtgtctcatcggaacactgtaasgttttacttttgttctccagaaagagcccgtaaaatcatctccaagccaacgattcggaccagacgctcacccagagagtaggaacactttttcccaagg

SEQ ID NO: 510711 - DNA, 201 bp, Homo sapiens
tgccatttttctgctgttcactctcttctgtttttcctcccccaatctctcagtctcttgtttctctctctctctctctctctctctctctgtctctctcrgtctccattgcattccttaaactggggaagcgagttctgctgttatgaggtgctctatgtacaggcttacatggcagaggccaagggagtgcccaggcca

SEQ ID NO: 510712 - DNA, 201 bp, Homo sapiens
tatactctaaaataacaacaaagaatagagtaagtacataaaccagtaacatagtcttttattatcattataaagtattatggactgtacataagtgtgcmtgctatacttttatatgactggcagcacagcaggtttgtttacaccagcatcaccacaaacacaccagtaatccagtatgctatgacgtcagaatagcca

SEQ ID NO: 510713 - DNA, 201 bp, Homo sapiens
ccccagcctccctgcagccacactgtcccctttctaacctcctctgccaaactcaggtccacctgtgaggctgtgccccagggtggcttctttctgacacygctgtccctgacttgggcagcgttggtcccccattgtcattctggccatggcataaatgtcacctcagtgaggcatttggattctccccacacagtgact

SEQ ID NO: 510714 - DNA, 201 bp, Homo sapiens
gctggagtgcagtggcgcgatcttggctcactgcaagctccgcctcctgggttcacgccattctcctgcctcagcctcccgagtagctgggactacaggcrcccaccactgtgcccggctaattttttgtatttttagtagagatggggtttcaccgtggtctcgatctcctgacctcgtgatccacctgcctcggcctcc

SEQ ID NO: 510715 - DNA, 201 bp, Homo sapiens
ctgtcccctttctaacctcctctgccaaactcaggtccacctgtgaggctgtgccccagggtggcttctttctgacaccgctgtccctgacttgggcagcrttggtcccccattgtcattctggccatggcataaatgtcacctcagtgaggcatttggattctccccacacagtgactccccggccctccctcccgtcat

SEQ ID NO: 510716 - DNA, 201 bp, Homo sapiens
agcccaccaggccacctggcacaaggtgagtgctcagggcagagtcgctgagtgaataagtcagcacggggagaaagtgattaaaccccttcctgcttccrttgtcctcataatgtggggatcattgatactaacaggaggtgcctttctcaggaggctatcccggagctccacctgctccagcaaagctccgtgggcacc

SEQ ID NO: 510717 - DNA, 201 bp, Homo sapiens
ctgtgtcatcctcacctgattctcatggggccctggaaggaagtgatgactgtttcattttatagctccacagcagatgacacccaaggtaagagcggttmagttactttgccaaggtcacatggctggtccatgagggaggagacatttaaacccagggctgtctggcttggaacctctgcttctcacgctatgccagcc

SEQ ID NO: 510718 - DNA, 201 bp, Homo sapiens
ctgtggtattaaccacgagcacaatattaactgctgtggtttaatgtgtgttttatatattacagcaatggcactaagatggcaaggatgtttgagagttrtggcttgctggttgttgctgtaactaggtttgtacatgaaatattagcaatcaataaacatgagaaggaatgcagaacatcactagtaatcaaagaaatc

SEQ ID NO: 510719 - DNA, 201 bp, Homo sapiens
agtttctccttagactatttttctcttttctacaatacatcattatttagcacttttccaaactggaaacaactcgcatgtacatcaataataaaaagaakacatgaaatatatatatacaaaagtcctaaaatatgatattgcatatatagacgcatataataaaagctatacagaactgaaagtgaactatagctgcct

SEQ ID NO: 510720 - DNA, 201 bp, Homo sapiens
tatatacaaaagtcctaaaatatgatattgcatatatagacgcatataataaaagctatacagaactgaaagtgaactatagctgcctttagaaatacacrtgagactttcaaatataataaattatcctgacagagtttattctgtaccatttcatttaataaaattttaaactaatattaaaattaaaatattaaaatt

SEQ ID NO: 510721 - DNA, 201 bp, Homo sapiens
cgagcacaatattaactgctgtggtttaatgtgtgttttatatattacagcaatggcactaagatggcaaggatgtttgagagttatggcttgctggttgktgctgtaactaggtttgtacatgaaatattagcaatcaataaacatgagaaggaatgcagaacatcactagtaatcaaagaaatccaaattatggcaaca

SEQ ID NO: 510722 - DNA, 201 bp, Homo sapiens
taaaaatacaaaattagccaggcgtggtggcgcatgcctgtaatcccagctactcgggaggctgagacaggagaatcacttgaacccgggaggcagaggtwgcggtgagccaagactgtgccactgcactccagcctgggcaaaaaaaagaaagaaaagaaaagaaaaaaaaaagaaaagaaggaaagaaaagaaatgaag

SEQ ID NO: 510723 - DNA, 201 bp, Homo sapiens
agccctctactccagcactggtggagtatagcgtgtcaaaacctttgagaaaagcctctttgcaaagggtactacaagccttaagaactaaggctaagggyactaaaggcatatctttggaccagtaactgcacttctaaaactccatattaagaaaataataagaaaagctatcaaatatcttatgtgttagagtgctca

SEQ ID NO: 510724 - DNA, 201 bp, Homo sapiens
tatcttcttggctagctcttcttgtttctcttgccctaccctcccatcttcatttcatcagccccagagactaaaagaattggaaatagacccagccaagkgggcgctgggggtgaaagggtgctcagtaaagtttttggtctctggcaacaagtgcgcctcagtgtacgtggaatgatatgagacccactgcaaagacct

SEQ ID NO: 510725 - DNA, 201 bp, Homo sapiens
cggtggctcacgccggtaatctcagcgctttgggaggccgaggcgggcggatcgcgaggtcaggggtttgagcatcctggccaacatggtgaaaccccgtytttactaaaaatacaaaaatcagctgggcgtggtggcgcttgtctgtagtcccagctacttgggaggctaaggcacgaggaatcgctcgaacccaggaag

SEQ ID NO: 510726 - DNA, 201 bp, Homo sapiens
caatgaaccttgggtattttcccaggcaaatgacaccacttcactgtggtgggaggatcgcgggaacccgggaagtggaggtggcagtgagctgaaaatcrttattttctatcttcttggctagctcttcttgtttctcttgccctaccctcccatcttcatttcatcagccccagagactaaaagaattggaaatagacc

SEQ ID NO: 510727 - DNA, 201 bp, Homo sapiens
cacgaggaatcgctcgaacccaggaagaggaggttgcagtgagccgagattgcaccactgcgctccagcctggcgacagagcgagactccgtctcaaacamacaaataaacaaaaaaaccctttgtgcccaccgtatgctagcgtaaaagtaatctgaatttgaaagtcaatcagcaagtatttactgagcgacgtgtaag

SEQ ID NO: 510728 - DNA, 201 bp, Homo sapiens
acacctggtctaaccaatctttgggccctatgtaaatcagacactgcctcctcaagccagtctataaaacccgtgcacctcaccatggaactggaagaccyactcgggcacccctctctctgcaggagagggagctattctcttttctctttcttttgcctattaagcctctgctcttactcatctcttgtgtgtccgtgt

SEQ ID NO: 510729 - DNA, 201 bp, Homo sapiens
agacaggagaatcacttgaacccgggaggcagaggtagcggtgagccaagactgtgccactgcactccagcctgggcaaaaaaaagaaagaaaagaaaagaaaaaaaaaagaaaagaaggaaagaaaagaaatgaagcgaagctgctcctctcagaaaagaaatttgtatcattcaccactatatttgatttttttcatct

SEQ ID NO: 510730 - DNA, 201 bp, Homo sapiens
tgagctgcagacatagataagcaagctggaaccttgcatgggtgaatgccggcagctgtgacaataggaaaaggttacctgggggctaggcatgttcaacrtggcagctccatcttcccttttctttgtcaaccacatgtccagtaaggaacaggcaacatggctctggccaggtagaaaacccatttgcataataaaaga

SEQ ID NO: 510731 - DNA, 201 bp, Homo sapiens
atgggtgaatatccttctagagagatgagactagaagactgaggatctacagaaggggatgcccagttattctctctccccctactctcgaaactcactcattaattcatgtatttatcaaaatggcatgtcaataccctgagcagccactcaggacaggactcctgcattgctacaataccgatcccccagcctctcctc

SEQ ID NO: 510732 - DNA, 201 bp, Homo sapiens
ctatcatcctccacacgcctctcctttgtccctctccaccttccttccccctttattttcctttcctagaagggaaggagggtgtcagcatctcaatcaaragtcaaaactcacatgtcaacaggtaagtgacagatgatgtaaatgagggaagaacagagatagtgagataactcagatgagatggaatggtggggactc

SEQ ID NO: 510733 - DNA, 201 bp, Homo sapiens
cagaagatcgcttgaggcaaggaatttgagaccaggccagccaatatagtgaagtgttgtctctacaataaatttaaaaattagccaggtgtggtgatgcmcacctgtagtcccaggtactcaggaggctgagatgtaaggatcacttaaacccagcaggtctaggctgcagtgagctgtgtttgtctcactgcactccag

SEQ ID NO: 510734 - DNA, 201 bp, Homo sapiens
atttgagaccaggccagccaatatagtgaagtgttgtctctacaataaatttaaaaattagccaggtgtggtgatgcacacctgtagtcccaggtactcasgaggctgagatgtaaggatcacttaaacccagcaggtctaggctgcagtgagctgtgtttgtctcactgcactccagcctaggtgacagcgcaagagacc

SEQ ID NO: 510735 - DNA, 201 bp, Homo sapiens
tatagtgaagtgttgtctctacaataaatttaaaaattagccaggtgtggtgatgcacacctgtagtcccaggtactcaggaggctgagatgtaaggatcmcttaaacccagcaggtctaggctgcagtgagctgtgtttgtctcactgcactccagcctaggtgacagcgcaagagaccctgtctcaaaaaaaaaaaaaa

SEQ ID NO: 510736 - DNA, 201 bp, Homo sapiens
gttgtctctacaataaatttaaaaattagccaggtgtggtgatgcacacctgtagtcccaggtactcaggaggctgagatgtaaggatcacttaaacccascaggtctaggctgcagtgagctgtgtttgtctcactgcactccagcctaggtgacagcgcaagagaccctgtctcaaaaaaaaaaaaaaaaaaaaaaaaa

SEQ ID NO: 510737 - DNA, 201 bp, Homo sapiens
gtgggtgcagaactgctatgctttccttggacttacccagcaccttaatgtatttgccagtccagaagctcctctatatttcttcttcttcttcttcttcttttttttttttttttgagatggagtctgtctctgtcacccaggctggagtgcagtggcgtgatcttggctcactgcaacctttgcctccaggttcaggtg

SEQ ID NO: 510738 - DNA, 201 bp, Homo sapiens
  misc_feature (1)...(201): n = A,T,C or G
ctttcctgagatagctttctctattagatcttattttgtccttgtttttgaaaaatagttcattggatgttaaattctatgttaaaagttttttttttttncttagtactctgaggataatattctatcatcttaaatagttcattggatgttaaattatatgttaaaagtttttttctcttagaactctgaggataatat

SEQ ID NO: 510739 - DNA, 201 bp, Homo sapiens
ccagcgcagtggcctgagatgacaacatgagggaactcctagagggctgacgatgttctgtttcttatgggtactggttactgggtgcacttgctttggayaattcattgagccacgcacttattatttccatatttttaggcatacgaaatgctatgctatgctatgcttcaacacacaaattcacagaatcaacctaaa

SEQ ID NO: 510740 - DNA, 201 bp, Homo sapiens
ctgacgatgttctgtttcttatgggtactggttactgggtgcacttgctttggataattcattgagccacgcacttattatttccatatttttaggcataygaaatgctatgctatgctatgcttcaacacacaaattcacagaatcaacctaaatgcccataaatggaagactggataaagaaaatgtggtgcaaataca

SEQ ID NO: 510741 - DNA, 201 bp, Homo sapiens
caaggccagcaggcataggggttggttcaagactctggcatcgtagcatctagattcctgtcctgggtatcaccacttcctatctcagagatcttggccayggtactaactctccaagctccaggttcattatctgtaaaaggagttaattatgcttcccatttcatagttattcagaggattaaatcctcacaagaaata

SEQ ID NO: 510742 - DNA, 201 bp, Homo sapiens
gttcaagactctggcatcgtagcatctagattcctgtcctgggtatcaccacttcctatctcagagatcttggccatggtactaactctccaagctccagkttcattatctgtaaaaggagttaattatgcttcccatttcatagttattcagaggattaaatcctcacaagaaatactagctcttgtgggacttcatgtt

SEQ ID NO: 510743 - DNA, 201 bp, Homo sapiens
ctccaagctccaggttcattatctgtaaaaggagttaattatgcttcccatttcatagttattcagaggattaaatcctcacaagaaatactagctcttgygggacttcatgttgttttttgttctatgaactatggagaagacagatgatgacctgtggtaaaggaaggagaagcatgaggctcaacccaaagatgttgt

SEQ ID NO: 510744 - DNA, 201 bp, Homo sapiens
ataacgatgtcgatacccagaagcagaagaccgacgaggatgaccagacagcaaaaaaggaaaagttaaactaaaaaaaaaaggccgccgtgacctattcrccctccacttcccgtctcagaatctaaacgtggtcaccttcgagtagagaggcccgcccgcccaccgtgggcagtgccacccgcagatgacacgcgctct

SEQ ID NO: 510745 - DNA, 201 bp, Homo sapiens
aagaaatactagctcttgtgggacttcatgttgttttttgttctatgaactatggagaagacagatgatgacctgtggtaaaggaaggagaagcatgaggytcaacccaaagatgttgtcaaggtgaaatgtagacagggcctcttggcttgaaccgataaatacaatctatagttgtaaattttgaggccatccattaat

SEQ ID NO: 510746 - DNA, 201 bp, Homo sapiens
cattcatttgaaaaaacatattgaagtcttctacaggctagatgtgctatgtccttataataaaggtcaataggacacaatgcctgccctcaaggagcttkcctgtctaatagagagtaatatcacagccagaaggactctatgaaagaatccagccaggtcatgccactcttctgctcaatactctgcgatggctcccat

SEQ ID NO: 510747 - DNA, 201 bp, Homo sapiens
aggtccttcccacagccccataggacctggccaccccatagttcttgtccaccccccgtcctctcccctgcagccgcaccgccctcattttcaaacacagyagccaagtgcgcgcctgcctccagaaccttgcactgtacttgtctttttttgtctagatgctcttcccccaaacacctaccctcccttccttgcaagcct

SEQ ID NO: 510748 - DNA, 201 bp, Homo sapiens
agttcacttgaagaattcatttgtgggacttaacctttaagttgcttttttgtttcctttttttccttcattaaatgtctcaggaacagtataaaatatgrttttccttctctcaacctcccagccccataacctcccatagtctagcctttacattcaccaccctactgagattcatcagttgagcctcacagtggcatt

SEQ ID NO: 510749 - DNA, 201 bp, Homo sapiens
agggaggggaagggaaggggaggggaggggagggcatgttctccttacaactcgatccgactcccctagaagagggggcagggaaggagggcaaagctagkagagttgaagaatattaagaagagaataaggtagccagagttagcaaataaaaatataaaatgcctagttaattctgaattccagataaagaacaaataa

SEQ ID NO: 510750 - DNA, 201 bp, Homo sapiens
caggttggtgatttgccaaaaccttttatttcaccttcaggtagcaaaagatttgaatgaaaaagaaacaaacacatccaagaagaaaaaaatacagatgwcagtaacttgaaatgaggaaaagttttcagtatccaaggataatggaaataaaagcaaatcaaagtcaaagagggccaaaaggaaatgctcagaatcccg

SEQ ID NO: 510751 - DNA, 201 bp, Homo sapiens
aaaaggtccattaagctggttaacattcaagctgtcttcgggcggccaagctgaaagctttgtaacgctggggctgcaggcatccactcctagacactacrgccgggccagaccccagagcgctcaccccagcctctgcacctgcctgtctgcatgctctctgtctcacaaggggattaagcagtgaggcaactgaacagg

SEQ ID NO: 510752 - DNA, 201 bp, Homo sapiens
ttgagtccgtgtgtgacctgatttttccaggacgctgaacaagagctcgggatacagcaagctatcatgttggccctctgcccttgtgaaaaggcaaaagktccattaagctggttaacattcaagctgtcttcgggcggccaagctgaaagctttgtaacgctggggctgcaggcatccactcctagacactacggccgg

SEQ ID NO: 510753 - DNA, 201 bp, Homo sapiens
caaagaggttgccttttgtccctccacaccctctatcctgcccccacgtaaaccgcaaaccccaagctccacagcagagcagcaggtgagtagaggaggakaccagcagatggacggtggaacagcacagcagggaaagagagaagaggagagacgtctggatgccaagaggagttcagctgggggcggtaggaaaggagt

SEQ ID NO: 510754 - DNA, 201 bp, Homo sapiens
caagcctgaagacctgcggccctaaatgaggacaggcattcctgttttcaagacaaagaggttgccttttgtccctccacaccctctatcctgcccccacrtaaaccgcaaaccccaagctccacagcagagcagcaggtgagtagaggaggataccagcagatggacggtggaacagcacagcagggaaagagagaagag

SEQ ID NO: 510755 - DNA, 201 bp, Homo sapiens
tcaagcctgaagacctgcggccctaaatgaggacaggcattcctgttttcaagacaaagaggttgccttttgtccctccacaccctctatcctgcccccaygtaaaccgcaaaccccaagctccacagcagagcagcaggtgagtagaggaggataccagcagatggacggtggaacagcacagcagggaaagagagaaga

SEQ ID NO: 510756 - DNA, 201 bp, Homo sapiens
gtcacaagcagaaggggtgttttctccctttataaggagaaaacttaacttcatccctccagaattaacccttgatgtgataaatgtgagagactacaaargagaaccaatagccattctcccctgccttggggcagtaagcttcagaaagatgaaggtttcaggggaataaaatgaaaaagagaaaattaaaagttatca

SEQ ID NO: 510757 - DNA, 201 bp, Homo sapiens
tttgatgagatacagttgcccctatatgagaatgcacaggattcctcattggtgagttcaaccatacattttgggtaactcctgaagacatctgcaaattktgagttagttgtttgggtccattaacatttgcatatgttattctttctactgaagtgtgtgaggccacaactgtcccattatgcatatcagaaacagaaa

SEQ ID NO: 510758 - DNA, 201 bp, Homo sapiens
accttatagagtgtgcttacacaaacctagatgatacagcctactatatatggaatagcaaattgctcctaggttacaaacctgtacagtgtgttagtatrctaaatactgtaggcaattgtagcacaatggtaagtaattgtgtatctaaacataagtaggtacggtaaaaatatggtataaaagataaaaaatggtaca

SEQ ID NO: 510759 - DNA, 201 bp, Homo sapiens
ccggcatattgggtacgttagctccaaaatcagtttgatgagatacagttgcccctatatgagaatgcacaggattcctcattggtgagttcaaccatacrttttgggtaactcctgaagacatctgcaaattgtgagttagttgtttgggtccattaacatttgcatatgttattctttctactgaagtgtgtgaggcca

SEQ ID NO: 510760 - DNA, 201 bp, Homo sapiens
ctagttaattctgaattccagataaagaacaaataattttttagcataagtatgtcccaaactaagaatggcacaagacatatttatgctaaagaaattaygtattctctaataataaattattttctccaatgcacattgattttgcatactgtattttatctggcaaccctaaaatagaaggactacccccgtactgct

SEQ ID NO: 510761 - DNA, 201 bp, Homo sapiens
gatatttaggttataagtcaaaggggagagggaagtcacataggtcccacgggcctcagacctgccacgtgtcctctccctaagtctcaaagcttaagaakacaaaccttatgcggcaggaagtgttggttatagctgttttgccactccttctggttatgttatttctgttcttctgatactacagcccccctaggtcat

SEQ ID NO: 510762 - DNA, 201 bp, Homo sapiens
cctcctgtattgcctccttgtgaggaagaggaaagtttccttcacccagttccaccgccttataaccctcctgctccctcagaatgttctcttgtctcctscactacctcccctgtgggctctccacctattgcctcctgatcgcggccacggcaggaggaggtagccccactcctcccgctgaggaggcacaagtccctc

SEQ ID NO: 510763 - DNA, 201 bp, Homo sapiens
ctgctccctcagaatgttctcttgtctcctccactacctcccctgtgggctctccacctattgcctcctgatcgcggccacggcaggaggaggtagccccmctcctcccgctgaggaggcacaagtccctccgggcgataagcactcaggcccattcttagtttatgtcggcttctctacttctgacctgtacaactggaa

SEQ ID NO: 510764 - DNA, 201 bp, Homo sapiens
gatcgcggccacggcaggaggaggtagccccactcctcccgctgaggaggcacaagtccctccgggcgataagcactcaggcccattcttagtttatgtcsgcttctctacttctgacctgtacaactggaagactcataacccccccttttctgaaaagccccaggtcttgacctcactgatggagtccatgctccggac

SEQ ID NO: 510765 - DNA, 201 bp, Homo sapiens
cagcgaaggccccgttggtttcctgtttcctctgaagtgagctgttgggcagacggagagcccaagccaggtgccagcaatgggcggcaaaggggcgagargtgactgagctcaagggcaccgcctttgagaagccagctctgatcgtgctgtcctgaggctccactgtgctcacaggctctctcgctgggaaccaagggc

SEQ ID NO: 510766 - DNA, 201 bp, Homo sapiens
cataacccccccttttctgaaaagccccaggtcttgacctcactgatggagtccatgctccggactcaccggcccacctgggaggactgtcaacagctccytttaaccctttccacctctgaagagaaggaacgtacccgaagagaggccagaaaatatttccttacatcagacggtagaccagaggaggaagctcataac

SEQ ID NO: 510767 - DNA, 201 bp, Homo sapiens
acccggcctaattaggatccaaactcctcaggcaggaagagagctttagatgattttcaccagtatctccttgcgggtatcaaaggagctgctcgaaaacmcataaatttgtctaagacatttgaagttgtccaggggcctgatgagccacccggggcgtttttggaacgcctccaggaggcctaccagagttacacccct

SEQ ID NO: 510768 - DNA, 201 bp, Homo sapiens
attttcaccagtatctccttgcgggtatcaaaggagctgctcgaaaacacataaatttgtctaagacatttgaagttgtccaggggcctgatgagccaccsggggcgtttttggaacgcctccaggaggcctaccagagttacaccccttttgacccggcggctcctgagaatagctgtgctattaatttggcatttgtgg

SEQ ID NO: 510769 - DNA, 201 bp, Homo sapiens
gctgctcgaaaacacataaatttgtctaagacatttgaagttgtccaggggcctgatgagccacccggggcgtttttggaacgcctccaggaggcctaccrgagttacaccccttttgacccggcggctcctgagaatagctgtgctattaatttggcatttgtggctcaggcaggccctgatattaaaagaaaattacaa

SEQ ID NO: 510770 - DNA, 201 bp, Homo sapiens
catttgaagttgtccaggggcctgatgagccacccggggcgtttttggaacgcctccaggaggcctaccagagttacaccccttttgacccggcggctccygagaatagctgtgctattaatttggcatttgtggctcaggcaggccctgatattaaaagaaaattacaaaaactggaaggatttgctggaatgaacatta

SEQ ID NO: 510771 - DNA, 201 bp, Homo sapiens
acacctagaaaggaaggtcgtgttttcagcttctttgactgctgctccaggtgtcaaaccctgaagggtgagctgacgctaaagactgagtggttattttytccagaagaggagaaagattgaaaatgtggccggccgattctccctgatgatcacacagacagacctgcatgacagtcaaacagacaggcctgcatagca

SEQ ID NO: 510772 - DNA, 201 bp, Homo sapiens
tgcaacagtatgcacattcagggaggaaaggaattagcagtggtcatctttctggaccatctaccacagtggctaaagttaacacctagaaaggaaggtcstgttttcagcttctttgactgctgctccaggtgtcaaaccctgaagggtgagctgacgctaaagactgagtggttattttttccagaagaggagaaagat

SEQ ID NO: 510773 - DNA, 201 bp, Homo sapiens
ggtgatctgcccgccccggcctcccaaaatgctgggattacaggcatgagccaccgtgcctggcctaattgttacttattgttaatggtactgaggattamcatgtaaggtctttgaaatgaaatatggataagagtgtgccacagccttttacaaaacataagatgattaattacattatatcactagctatttaattca

SEQ ID NO: 510774 - DNA, 201 bp, Homo sapiens
tgacagaggaaaactccgtctcaaaaaaaaaagaaaaaaaaacaaacccccaaaactatacatatatatatatatatatatatatatatacacacacacayatatatatatacacacatatatatatacatatatatacacacatatatatacacacatatatatatacatatatatgtaaaacaatgcttatcaaaaaca

SEQ ID NO: 510775 - DNA, 201 bp, Homo sapiens
aagtcctcaccctccccgcagcggaggagtctgatgactgacgagaccggggctccttctctcttggcccccagtagcccacggtgaccgccacagtggasggccatggtgacgtccggtagcctacttgtcttaagaggctagaccctgtggcctccaccaagtagccaagttgtctgtgagcagtagcagcaacagcga

SEQ ID NO: 510776 - DNA, 201 bp, Homo sapiens
agcagtagcagcaacagcgagcctggtccaggaagctgataaactgactctgggccaaaatttaacccttacaggtcctcatgctgtagacactttactaygaagtgcctctggcaaatggatgtcaaatgcccgcatcctgcagtatcacagtttactgttagatcagcctcatttaactttctctcccacaagatgctt

SEQ ID NO: 510777 - DNA, 201 bp, Homo sapiens
gacgaatatactgtgggcccaagcactgccagcaggtacctcggcacagagggctgagttgattgccctctctcaggccctccgatagggtaacgacgaaygtattaaaattcacactgacagcaggtatgcttttgctactgtgcatgtacatggagccatctaccaagagcatgggctactcatctcagcaggaaaggc

SEQ ID NO: 510778 - DNA, 201 bp, Homo sapiens
tctgggcaggtagaacgcatgaaccacaccctaaaaaatactcttacaaaattgatcttagagaccggtgaaaattaggtgagactccttcctttagcccytcttagagtgagatgcactccttaccgggctaggttttcaccttttgaaatcatgtataggagggctccgcctatcttgcctaagctaagggatacccat

SEQ ID NO: 510779 - DNA, 201 bp, Homo sapiens
aactaagggactaccagctcaatgtacagctccgagaggtctttgctaaccgttttacacagatgtttgcagattacgaagcatttgtcattcagactgcscaggacatggaatcctggctgaccaaccgggaacagatgcagaactttgacaaagtaaaaagaaccatagttttccttttgtggttattagtggctttat

SEQ ID NO: 510780 - DNA, 201 bp, Homo sapiens
agaaagcagtagcttgctgaacagctaggggtaagggtatattacaacaacaatttaataggcagaaggagcgggaaagctagagcttctgtgggaagtamaaatgggcttttagggaaaccaatggcaggtattacagtttatgataatgtttgtttatgcaatttctcacccaggtgctaacagtcaggctccttcctg

SEQ ID NO: 510781 - DNA, 201 bp, Homo sapiens
cttttagactgttccctgggccatggtcactcatatgggctcagaataaagctctttaaatattttgcagagattggcttttttttttttttttttttacygacaagagacagctatgctgaactagattgatcatcaaagacgtactaaattgttaaccagccatcatccattatgaactatgctaaaaccttccagatg

SEQ ID NO: 510782 - DNA, 201 bp, Homo sapiens
cgcccagcctgactttaagtcttcagcttaactcttttgaccaattccaaatcagaaaatctttgaatccacctatgacctgtattgctccttccttaagmtgtcccgcctttcctggccaaaccaatgtataccttagatgtattgatttgtctttgcctataacttctgtctccctacaatgtataaaaccaagctgta

SEQ ID NO: 510783 - DNA, 201 bp, Homo sapiens
atgcagctaggcttttcccagatctagcagagattaactaagagtctgacacctgtgaaattccaaaagagacgtttaccatctattctctctgaagcctkctatctgaggcttcatctatataacaagaatcacagcccacccccccttatctcaacccaagcatttctttctactgactttgtcttttttttttttttt

SEQ ID NO: 510784 - DNA, 201 bp, Homo sapiens
atgtattaattaaacacagatgcaagttacgtcttctttctatatttggtctatttttacctctagactctacaatgaagttttaattaatccttcataayttaagattttgttaatctttggaagcattttcccaagtaggtttcatttctttataacaaaacaacactgttaaatataaggaaaatcttcaactatctc

SEQ ID NO: 510785 - DNA, 201 bp, Homo sapiens
ccagctgcatttgatttgaactgtttatgctttgcctgatcatcaacctgaagagtgtaaaccaaaaattatatcctaagcccccaaccaactgaacagasagctgtctaggccgaggggaccccagagcaagctgaaaaactaaattccaggccatgatgggaaggaagggttggacgtacctcattatactctctccct

SEQ ID NO: 510786 - DNA, 201 bp, Homo sapiens
catgcttcttaaagcatggatgaatctatgtgacatacatttttcttacaaatcccaatttactgcagcatctcacacttggccccaattctatgtgttcrtgtcgttccatattctgatcatttctgtctctgcctcacatggggtgataggtcagtgtgcagctgaaagcctctccagccttcctagcttcccaaaata

SEQ ID NO: 510787 - DNA, 201 bp, Homo sapiens
agtattctgtcagatgaggctttgggaggttggtaagaactgcaggaaggaatccaaatgtagcaaactaagtatagaaattaaggagcaatgcatgactmtccagccatgggagacaaatatttacaggcaaactaaaagtcagcttaataatcacatagaaaccctattagccagaaaggaaaaaaaaaaaaagaaaat

SEQ ID NO: 510788 - DNA, 201 bp, Homo sapiens
aaactccgtctcaaaaaaaaaagaaaaaaaaacaaacccccaaaactatacatatatatatatatatatatatatatatacacacacacacatatatatayacacacatatatatatacatatatatacacacatatatatacacacatatatatatacatatatatgtaaaacaatgcttatcaaaaacattctgataca

SEQ ID NO: 510789 - DNA, 201 bp, Homo sapiens
caggacatgggcttaaaggcattcaccaactcaaagattcgtaaacccaaaatgtgtccacagcttcaacagtatgaaatgcatggacctgaaggtctacrtgtaggtttttatggtaaacaaaaaattaataaatatatattgcctaatatattcaccaaattttaaattttttaaaagatacaatgtgacaaaaattaa

SEQ ID NO: 510790 - DNA, 201 bp, Homo sapiens
aaaaaagaaaaaaaaacaaacccccaaaactatacatatatatatatatatatatatatatatacacacacacacatatatatatacacacatatatatayacatatatatacacacatatatatacacacatatatatatacatatatatgtaaaacaatgcttatcaaaaacattctgatacattaatagagaattttc

SEQ ID NO: 510791 - DNA, 201 bp, Homo sapiens
tttaactactactttggcaggcagggggctggagaactgaaacaacggattggctggggatgaaattgcaggggtgtctaaaaccatattcacacagccargtcatttcctgggaagcggtctcaggacgaagtggcatctcttggtctcctgaaatgctaaatctgaaaaatgtctcaaagaccagttcttcaggtttta

SEQ ID NO: 510792 - DNA, 201 bp, Homo sapiens
gatttttcaagatcataaaatcctgctccttatttccaaagtatatagacaaactcttgtaccttgagaatctaattgtagcatattaaaagggggctacygggcccttccatttcattctcttcctgattgttgcacccctatgtttataagttttccagcagttatctttatgccacgaatcgtctaaattgccccagt

SEQ ID NO: 510793 - DNA, 201 bp, Homo sapiens
taaaatcatgctgttcaaatgtcataagatactattataaaacaagatttctataagttcaggatactctaagaataagtttttgataattctttaagctkttatgtccagaaatttgaaaagttaattttgattaagtaataaataactttttctggcagctgtcgacacttgttggaggattggggtaacttagatggc

SEQ ID NO: 510794 - DNA, 201 bp, Homo sapiens
tgaatattaaaaaacgctttacttctgaatatataaaaaagccagaagaaggaatctagaaagtggaattggggaagttagagtaaataatgatgtccttyaaagcatgcatgccaactaaggtgaacttaacatatgttaaattcatcgtaataagaaccctctccatatccttaaatgtgagttaacacccttataaag

SEQ ID NO: 510795 - DNA, 201 bp, Homo sapiens
caccaggtactctgttaaagcatatgttatcagggcacatgtaattttcagccaacaccatttcccaaggtggtggagaatttacatgcattattaaaatcaacattccagtcttttcaacaaatggtgcaggaacaactgcatatcttcttttcccttttcttctctctctctttttttttttttttaatgagatagggt

SEQ ID NO: 510796 - DNA, 201 bp, Homo sapiens
ggtcacacagccctttaaggccaagtagagcctcctaagcatttcttgccacactctcccaggcccacccacacctctgttgcaatggagggccccactamccaggagagcaggtctagggcaccgtgccaagcctgatgaatgtccttcatacccttttcaaacaacaggctacgattaggcctaattataggggcctgg

SEQ ID NO: 510797 - DNA, 201 bp, Homo sapiens
ccaacctgggcaccatttggcagctgattcgggcaattctctcaccaccaccaccctgcccatgtacccctgtttccagcctctatttccctcttcagccrgggatcctttcttgtgtacccaaggtgaggagctgaactgagatcgtgtatggacagggttcctggcaggtacccagcaccttataaggattgaagaaat

SEQ ID NO: 510798 - DNA, 201 bp, Homo sapiens
ctcttcagccagggatcctttcttgtgtacccaaggtgaggagctgaactgagatcgtgtatggacagggttcctggcaggtacccagcaccttataaggrttgaagaaatgttgcctcttctccgagctcctccattgtccctaccaaatccccagtcccttgtcctgccccctccctccctcattcactcagcaggcat

SEQ ID NO: 510799 - DNA, 201 bp, Homo sapiens
agacagagacttagctgagtggcagagccagggttcaaagccagggatcgtggccctgggttctgtgggttatgatcacctctgtggaggggagatgaggwtctgcgaggctcatcatggggggcctggctgggtcagggaaggtggatgtgaggaaatagcatttgtggtaaaacctgagggtgagtgggtaggtcaggg

SEQ ID NO: 510800 - DNA, 201 bp, Homo sapiens
ggaaccatccaagtccctttacctcacggcaggccctggcccggggaggggaggcccacgcacctgggagccgctgacctccacgctgtgcatgcccgtgrtggtgtcgatcaggttgtgcgcctcgtcgatgatcaccacctggtcctgcagccggatgcccgcagcctgccgagtggccgcatgcagcagcatctgata

SEQ ID NO: 510801 - DNA, 201 bp, Homo sapiens
acgcctcaggagagaatgggttaaggtgccatcaacctgaccacggtggggggcatcccccaaactacagtgtgatgaggacgcccctcatggcctagacyacagtgagagccaagagcggctttctggccctgcagggccctcacctgggctgcagggatggcaaggcggctcctgtaatagggacaggcccgggcctcc

SEQ ID NO: 510802 - DNA, 201 bp, Homo sapiens
attggtagtagtgtagtagtaaacactttagaacagtgcctagtgcatagtgtaagtactttaaagtactttaaaccactttgtttgcatttatttaatctttttttttttttttttgagacagagtttcactctgtagcccagactggagtgcagtggtgttatcttggctcactgcaatgtccgcctcctgggctcagg

SEQ ID NO: 510803 - DNA, 201 bp, Homo sapiens
tgtgtttaattgaataaactgggtactatgacttcgccaatctgacatataaaactaaccatcacaaagcatattcagtttcttctcgttgtcagggaatataacagccatttgcactttccatttgttcattcatttattcaagaactattttttgagcaccagctatgtgccagatactgttatagatgtgtggataca

SEQ ID NO: 510804 - DNA, 201 bp, Homo sapiens
ctgcatctcatccaactgggtgacatattcatcacatctggaaccaaaacagagaagtggtcagaggaaaatcttggtgaaactgaatttgggagttaagytgaaaagtaataaatttgaccgaaatttagaaatttagaagactggtttaaaggtctagcaatagaatgtagataacccacaatagcagaaaactggaat

SEQ ID NO: 510805 - DNA, 201 bp, Homo sapiens
gacatattcatcacatctggaaccaaaacagagaagtggtcagaggaaaatcttggtgaaactgaatttgggagttaagctgaaaagtaataaatttgacygaaatttagaaatttagaagactggtttaaaggtctagcaatagaatgtagataacccacaatagcagaaaactggaatatatgttcatccatacaatga

SEQ ID NO: 510806 - DNA, 201 bp, Homo sapiens
gttaagctgaaaagtaataaatttgaccgaaatttagaaatttagaagactggtttaaaggtctagcaatagaatgtagataacccacaatagcagaaaaytggaatatatgttcatccatacaatgagatatatgggacatttttaaaaaatttattattattttgttgttgttgttttgtttatttgttttttgagact

SEQ ID NO: 510807 - DNA, 201 bp, Homo sapiens
tatgtgactagtatattttcatttagttaacatgtccagttgtattcagtttcattaaaattgatttatagtgctatggtgtttaatttgtataacacaaagtttctagatccttcttctggaagcagtaataaaataaaaaagtgcagttgtgctaagtgcatttttgggagaatgcagcattttaagccatggctattc

SEQ ID NO: 510808 - DNA, 201 bp, Homo sapiens
attgtattaaagtttattagagaacctgcttaaaaatacaaaataaaaatatagattacatagcctaaatgttagagatttcatttccatgagtctggggkggggagcctcagaaagtgtatttttaaagagcaccttattctattctaataatatccatattattctaataatattctaataatatccgtattattctaa

SEQ ID NO: 510809 - DNA, 201 bp, Homo sapiens
tgaaaacaaattatgaaaaaaaagtctttaagatatcattaacaattttatattggctaaatgttgaaatgatcatattttggatatattggattaaatamaatacactattaaaattaatttaatgtttctctttatgtggttactagaaaatttaaaatttaaaattacacagggcgatcacattctatttctagtaga

SEQ ID NO: 510810 - DNA, 201 bp, Homo sapiens
tctgtcattcgttatgcttagaaagctcttttcatctctttgttcttcgagacaaccactactcatacttcagagcttaatttacattttgctttccctcaaaatttttttaaaaggttccaggtctgggttatgtgctctcttatgtgctcccagagcatcctgaacttctgcaataatatgtttggctactgtatttta

SEQ ID NO: 510811 - DNA, 201 bp, Homo sapiens
ctacaaaaattcagtggtaaggtagttactattatgttctttaaagtgaaatgcctgacctgatatcagaatgtatttgaaagatgtttggatatatcttraattatttttgtggagctcgtgatttttatcagagataattttaacttgcctagacctaaaaacttgacatgactttgggaggccgaggcaggcagatca

SEQ ID NO: 510812 - DNA, 201 bp, Homo sapiens
ttaggattgattactactaaattagtgtatgttatgtatatatttatttagcatctatctctttcactagacagtaagctctgtgatggaagaaacttcgtttttttttcactgctgtgtcctcagtgcctggaaccatgttcaacatagaggaggcactaaaaaatgtgataaatgaatatgtttggtgcctattagtta

SEQ ID NO: 510813 - DNA, 201 bp, Homo sapiens
tgtatagtatggaaagaaatctttaacaaaataaaccaaattgatgaacaaacagccaaaacaaaacaaacaaacaaacaaaaactccttttcagcaaacrgctaaaggcaaatagacctgagatttttaaagggttgcctactaactaggcctctgatattcaaataacattattttagtccaaagcaaaagctgaattt

SEQ ID NO: 510814 - DNA, 201 bp, Homo sapiens
ggccaggcgcagtggctcacgcctgtaatcccagcactggaaggctgaggtgggcagatcatttgaggtcaggagttcgagaccagcctggccaacatggkgaaaccctatctctactaaaaatacaaaaattagccgggtgtggtggtgggcacctgtaatcccagctacttggggaggctgaggcagaagaatctctca

SEQ ID NO: 510815 - DNA, 201 bp, Homo sapiens
cttctgaataataagaaacagtgaaaaacaagacatctctgccttatattccagagaggagagacaggcaataaacaagaaatataagtaagttcattttrtaacatgtcataaaatgacaaatgttatttttaaaaaggcacagcaagggagatcaagagtatcataagattggggttagactttgcagttttaaatgct

SEQ ID NO: 510816 - DNA, 201 bp, Homo sapiens
tggtccagccctttctttattctgattagaaacagtcccagaggtgacgtgatttgcccaaagtagcgcaacttcctggaacgagaaaccaatcctaagayttccatgtcggcgttctttccgcggtgatcgggttacctcccagacataggatttacttttgaaagaaaaggagcggtcacacgggagaggcattgaagg

SEQ ID NO: 510817 - DNA, 201 bp, Homo sapiens
aggcaataaacaagaaatataagtaagttcattttataacatgtcataaaatgacaaatgttatttttaaaaaggcacagcaagggagatcaagagtatcrtaagattggggttagactttgcagttttaaatgctgtgatcagggtagacctcattgagaagctgatagatgagcaaaggtttaaggcagtaaggaagtt

SEQ ID NO: 510818 - DNA, 201 bp, Homo sapiens
aaataatgcaaccgcaaatgttcttatacgtgactttttgcacatttgctgtcactctcctgggtatttatgtagcggtaaaaattgctgggacagaggcyctgtggatgatgaattctagtagataatgatgattcattttcacaattggatgagagattcggttgctccacatcctcactaaaacttggcattatgaat

SEQ ID NO: 510819 - DNA, 201 bp, Homo sapiens
accgcaaatgttcttatacgtgactttttgcacatttgctgtcactctcctgggtatttatgtagcggtaaaaattgctgggacagaggctctgtggatgrtgaattctagtagataatgatgattcattttcacaattggatgagagattcggttgctccacatcctcactaaaacttggcattatgaatcttaacttta

SEQ ID NO: 510820 - DNA, 201 bp, Homo sapiens
tttcactctcctaataatgtttttaatgaataaaaattttaattctaatataaaaagcaagactgggctggtagaagattattttccactagggcagtttytaataatatgtatagaaggaagcgccattgcagtattgactaaagcaggctggtggaattacagctcagttgacaagcccactggcctgatctctgaata

SEQ ID NO: 510821 - DNA, 201 bp, Homo sapiens
gccagcccaagtattcacaaggatagaaaacgtacaggattattcagcatattaacatggtagataaattttacaaccaataatcctgctttttttgtttrtgaaaagtattgctattcacatcccttatgtgctaatacatgcattaatttcattccacatatgccaatgattccagctctgcctcccccaatgtatact

SEQ ID NO: 510822 - DNA, 201 bp, Homo sapiens
ttttacaaccaataatcctgctttttttgtttatgaaaagtattgctattcacatcccttatgtgctaatacatgcattaatttcattccacatatgccartgattccagctctgcctcccccaatgtatactcaagtggcaaggatactttcggtctcaacccacccaaagttgctcaatgcttcgtaaacacatttctc

SEQ ID NO: 510823 - DNA, 201 bp, Homo sapiens
tgacatttatctttgactttgacatttggctaaaatcttttagttacagtcagctttgccctcagtttatgtcagtgtcatttctgggatccttgaaattrtgaatgatcaataatcttacgattgttgtaagcaatgttataaaaccactgtcatcttgctgtaatataatcaaggcataacttatgagttgattttaat

SEQ ID NO: 510824 - DNA, 201 bp, Homo sapiens
gccctcagtttatgtcagtgtcatttctgggatccttgaaattgtgaatgatcaataatcttacgattgttgtaagcaatgttataaaaccactgtcatcwtgctgtaatataatcaaggcataacttatgagttgattttaatatacattttctctttcagttataatatgtattttagatgtatcttggagtgaaaaac

SEQ ID NO: 510825 - DNA, 201 bp, Homo sapiens
aattagataacattgttataatagaacgtcccctatttctatttctctctttatgtgaacaggtttccttagtgcttacatctatacaatagaaaacagartagcaatattctagaattgaaatagagcagggtagaacaaatagagaatagatgaaacttgttttaatccagcaataagcaatattcatccaagaataca

SEQ ID NO: 510826 - DNA, 201 bp, Homo sapiens
taaatgacatcctaccaacacacgtggacctgcccccgccacctctcctttgccttccagtgatgggccggccaggccagggagggggctgctcctcacayggttcagcctgtcacagacccagcgtctcccaggcctggacgagcaggacaaagttgtggggaaaggagcaggatggcccctggtggaaatactggctac

SEQ ID NO: 510827 - DNA, 201 bp, Homo sapiens
ttttgagccatacaaatatttacatatttaaaaactacaagtcagaaaagaagaaagcaaattctaaaattgaaaagaaaatgaaacaaaaacagcctagytatctatgaaactgacaacagaagcacacggagagaagcctggttccacgtgactttagagcctagtgaccaggcatccttagtgggttacactctaagg

SEQ ID NO: 510828 - DNA, 201 bp, Homo sapiens
acacagaggtcctcaagacccacggcctcctgatctgagcccaataaagactgttaattcctcaaaaaataaaaaataaataaaaataaaaaattaaaaawaaagaagaaaaatattaaaaaagtatttatttgtaactagctccatctagtgagaattgcttaaaattacatgattcatttatgaatctcctttgaacta

SEQ ID NO: 510829 - DNA, 201 bp, Homo sapiens
gctatctatgaaactgacaacagaagcacacggagagaagcctggttccacgtgactttagagcctagtgaccaggcatccttagtgggttacactctaarggcaaagaggaaaggcaatttcaatcagatctattgttagaagtaatattggtactatgatttcaaaacttttaagtatattataggatagagcagataa

SEQ ID NO: 510830 - DNA, 201 bp, Homo sapiens
ctaatgaattagtcacttctcaacatcatcactgcaactttttggagaagcagtaaagtggacagtaaagctaaatcctggtagaaaagtaaaatactgayttcttgagacgagaagtgggtgtggggcataatagaaagatggtgatgagattgctccagactttaggatgagaagaataaccttgttaacagttcacaa

SEQ ID NO: 510831 - DNA, 201 bp, Homo sapiens; identical to SEQ ID NO: 82382

SEQ ID NO: 510832 - DNA, 201 bp, Homo sapiens
acctctccagtagctgggactacaggtgcacaccaccacacccagctaatttttctatcgtttatagagaggttttgcattgttgcctaggctgtgcggaytttttccaacaaatgttaccccgagtgtgcctgcctcgcctgcctccccttccacctcctccacctcttccacctctactacctcgagacagcaagacca

SEQ ID NO: 510833 - DNA, 201 bp, Homo sapiens; identical to SEQ ID NO: 82383

SEQ ID NO: 510834 - DNA, 201 bp, Homo sapiens
gaccaactcctcgtcttcctcttcctcctcctcagcctactcaatgtgaagatgatgaagatgaagacctttatgatgatctacttccatgtaatgaatartaaatatatattttctatttttttcttttttcttttttttttttttttgagacagagtctctgttgcccaggctggagtgcagtgccgtgatctcaactc

SEQ ID NO: 510835 - DNA, 201 bp, Homo sapiens; identical to SEQ ID NO: 82386

SEQ ID NO: 510836 - DNA, 201 bp, Homo sapiens
aggaaaaatgactggataagtaggataagatcaattaaaattatatttatctaggaattaattgctttgagctctcttgtgggctttcattggtaaggaattttatatatatatatatataactactcacttctgcagttaaaaaaataaacaaaatacaatatattgaatcaaataaaagaatttttaaaaggacaaaat

SEQ ID NO: 510837 - DNA, 201 bp, Homo sapiens
aaagcatgcattccaggttggaggactcccggaactgcagtgttacacaaggcacagcacacaccaagtggtaatggtgactcaacttgatagacctgtakaaggcttaaaaggtgactatcaaggataaacagcatctcgggcagctaaggtggggcacctgtgcatccaaggcggggaagggcatggtaggcacaacag

SEQ ID NO: 510838 - DNA, 201 bp, Homo sapiens; identical to SEQ ID NO: 82393

SEQ ID NO: 510839 - DNA, 201 bp, Homo sapiens
acttttaagttcaggggtacagctgcaggatgtgcaggtttgttacataggtaaatgtgtgtcatgggggtttgttgtaccaattatttcttcaccaggtmtgtaagcctagtatccatttgttatttttcctgatcatctccttcctctcatccttcagcctccaacaggaaccagtgtgtgttgttcccctctatgtgt

SEQ ID NO: 510840 - DNA, 201 bp, Homo sapiens
gtagaatgaaaatataagaccaaaaagaaacaagagtgatataaaatttcctgctggtgaaaaaagtgttcatgtgtgttttacaggaacggtggtggccaaaaaaaatcactgcagtgtctacatttcatcggatacatttaaaaagtggtattacattttattttttaaacatcagtattatactacacttattttagt

SEQ ID NO: 510841 - DNA, 201 bp, Homo sapiens
agtgtaagggctaatcatcaaatagttttactaaatttcattttaattaccaacataatcaaatgtgcctacctaattttacaaaaatatattcttctttaaaaaaaaaaacagaacatcacattaaaggttaatgtcacccccctgaacatttttcagtactttgccatccatttatctttagaaataatgtgtgtagat

SEQ ID NO: 510842 - DNA, 201 bp, Homo sapiens
tattttaattaaaaattaaaatgataaaattctgataattcttgagatttattcttctattccagaagttcaaactgtgatgacaatttttgcttcatacrtacaaaaaaggattttatgtttagtcattcagcatttggtcaaatacaggtttggtacgtatctaaaaagtatgatcatgcctggaaaaagtgatataga

SEQ ID NO: 510843 - DNA, 201 bp, Homo sapiens
gtattcatggtaaatgctcaaaacttccccagaggggaatcacgttaatgcaaatgtgcaaaataaaaaggtgtgtcttaaatttaaggatgcatccttarttgtgtacagcttcattattttacaggattgtttgtggcatttcttacttcaaaacctgattttaaaaaatgcttctcttccccatttttagattgcatg

SEQ ID NO: 510844 - DNA, 201 bp, Homo sapiens
caccaatggttgatagtggatgtattgtccttttaatcttttactacttaaggtattaattgtttaatcatatgtagttaccacaaataataacataaaawtttttttgagacagggtctctttctggcacccaggctggagtgcagtggtgccatcacggctcactgcagccttgacctcccaggctcaggtgatcctcc

SEQ ID NO: 510845 - DNA, 201 bp, Homo sapiens
agtgcaggatagtcataaatgcctgtaaatactgaagaggcacgacctcataagcagccacaaaaatgcaaactagagccacaaggtatgaagtgatgacraggatgtggagccaaaggtgcctggtgcctgttccttgtatatttatatttttacaattttaatttctgcagggtctttttctttttttttaaacagagt

SEQ ID NO: 510846 - DNA, 201 bp, Homo sapiens
ggggtctcactatggttcccaggctggtcttgaactcctgggctcaagcaatctgcccaccttggcctcccgaagtgctgggactataggcatgagccacygtgcctggccagataatatataatgttgttgacctttgaaaaataaaatttaataattattttaatatcaccattttgctgtgaaaatgcaagcatccca

SEQ ID NO: 510847 - DNA, 201 bp, Homo sapiens
gagctgcaggcatgaccaacctgcgttcactctcattctaatcttaagatttcatcctttctacacacactcggtgtgaacagtctgcaaaccgtggtgasagcccattggtggggtatgaagtctgagaagaggtatacaatttttcccaccacatccagttccccccacaatagttgtagggtcctctggagcccaaat

SEQ ID NO: 510848 - DNA, 201 bp, Homo sapiens
gtctcactatggttcccaggctggtcttgaactcctgggctcaagcaatctgcccaccttggcctcccgaagtgctgggactataggcatgagccaccgtscctggccagataatatataatgttgttgacctttgaaaaataaaatttaataattattttaatatcaccattttgctgtgaaaatgcaagcatcccattt

SEQ ID NO: 510849 - DNA, 201 bp, Homo sapiens
gtctgtaagagatcagggacattgggagcagcatctatccaaccacgcagaaggacagtgggtgcccaaaccaaagggccaattaggcaacctggtcacartaggagttagactgaggagctgccactccctaattcacaggagcccagaaggctcaaacagatttaaaacacacaaaggagggcatgggagcagcagatc

SEQ ID NO: 510850 - DNA, 201 bp, Homo sapiens
gagcagcatctatccaaccacgcagaaggacagtgggtgcccaaaccaaagggccaattaggcaacctggtcacaataggagttagactgaggagctgccwctccctaattcacaggagcccagaaggctcaaacagatttaaaacacacaaaggagggcatgggagcagcagatcctcccagaccccttgttagtcacag

SEQ ID NO: 510851 - DNA, 201 bp, Homo sapiens
caggaggccgggacacagcagccagaccaaggtatgcagggcaccggagcacagaggagctacccaggccactggtgagcctgaggcaaagcagagctggyggctcagagcagcaacacgagaccagctcccgccaggagctcccacaggctttctgcagcttccacttccacagacaccttccagcaagggggtgcccca

SEQ ID NO: 510852 - DNA, 201 bp, Homo sapiens
ccgccaggagctcccacaggctttctgcagcttccacttccacagacaccttccagcaagggggtgccccatcataaaagaaggggacgtgacagggtcaygcaaagaggcgtgggagctggagtcagaagatcccaggctcccgtgctgggagcagcccttgctccgagctctagtttatgcgtctatcaacaaggattc

SEQ ID NO: 510853 - DNA, 201 bp, Homo sapiens
tattggagtttaaccttgtataactaactcactccaagtagagttagtactaggtccaagagtgtgaatgttttgaaggctgtgaactagtttatgtatcmgttggagtggaaaagagctccacctttcccatgcctttatcaatgctgaatgctattacttttaaaactctttgccaatttgggccgggtgcggtggctc

SEQ ID NO: 510854 - DNA, 201 bp, Homo sapiens
atccctagaaggattgtttaaatcaagcagcaaagtcagtaagaggtacatttcattaaattaagtccatctcctttatcaagaaggtgatggcttaccastttctggtttgcacttccctatcttggcaaagcagtgttgataggtatagacaatatcaaaacatctctgagaatgacagtcatcatcctgcttcctcac

SEQ ID NO: 510855 - DNA, 201 bp, Homo sapiens
tgaaactaatacaggtagttttattaacatctgtcacttcctatacatcctaattttcttagtatttatctaacactaatcaatattgactagtgaacccytgataaaagtgtgccttcttctagtacaaactgattctttcataaaatatttcatgcccactgtgtgctagcttttgtgttaaagacttgggatgcaaag

SEQ ID NO: 510856 - DNA, 201 bp, Homo sapiens
taaattcttgctaagttatatctgagaaataacttcgccagagacgaaatcttgatttcaaataaaaagaaggggctgggcgtgggggctcacgcctgtartcccagcactttgggaggctgaggcaggcggatcacctgaggtcgggagttcaagaccaacctcaccaacatgaagaaacgctatctctactaaaaatac

SEQ ID NO: 510857 - DNA, 201 bp, Homo sapiens
ccaaagggccaattaggcaacctggtcacaataggagttagactgaggagctgccactccctaattcacaggagcccagaaggctcaaacagatttaaaayacacaaaggagggcatgggagcagcagatcctcccagaccccttgttagtcacaggtactcctggtctggctctcaaaagcaaggccttcccaactttgt

SEQ ID NO: 510858 - DNA, 201 bp, Homo sapiens
aaagggccaattaggcaacctggtcacaataggagttagactgaggagctgccactccctaattcacaggagcccagaaggctcaaacagatttaaaacayacaaaggagggcatgggagcagcagatcctcccagaccccttgttagtcacaggtactcctggtctggctctcaaaagcaaggccttcccaactttgtta

SEQ ID NO: 510859 - DNA, 201 bp, Homo sapiens
gtcacaggtactcctggtctggctctcaaaagcaaggccttcccaactttgttacagtcagctatgctgaagccttggctggcagaaactgacaagccccrtaacacagctttccccatctggccccaaaccatctctccaggctcacctcccctctcaccccattccatctacctccctactgcaacaacacagacactg

SEQ ID NO: 510860 - DNA, 201 bp, Homo sapiens
gcatcaattaatgggcaaaataaccagctaacattgtaatgacgggatcaaattcacacacaagtatattaatgttaaacgtaaatgggctaaatgccccwaataaaagacacagactggcaaattggataaggagtcaagacccattagtgtgctatattcaggagacccatctcaagtgcaggacacacataggctcaa

SEQ ID NO: 510861 - DNA, 201 bp, Homo sapiens
caaataccagcactgcgttctcacagggcacacaaaaccgcatatgcaagtgcttcgaacaacccacagaactatgcccatcacggaaacaccgtgtgtcyatgtgatgctgtatccttaatatccccccagagcagcgcctgaaataaaaagtcctcagaacatgggcaaagaacccatgggtctaaaaaaagctcaagt

SEQ ID NO: 510862 - DNA, 201 bp, Homo sapiens
tcagagccagcggtcagtccccagccttccaggtctgtgtgcagcacacaccatgatgtgcctaggacatgaatggcatgcagctccaccccgccacagcmcgggccagaggtgggaaccaaagtgctgcctctcagaggcccatgcagggggccaccaagggactgtcccactacctcagagagtcacatctcacccgta

SEQ ID NO: 510863 - DNA, 201 bp, Homo sapiens
tgggcacaccccagctccacactcatgagctgcatgacctcaggacagagcttgaccatctctgaatctccacgtttccaatgtaaaacaggaacaccacmcccatggcagagtcagcgtgaagaccagagacacctggtgccatgcatggcgcatgatagggcagcaggaggagcctgcactgatcttgagcattcctca

SEQ ID NO: 510864 - DNA, 201 bp, Homo sapiens
tttttagtagagatgggtttcaccatgttggccggactggtctggaactcctgagctccagtgatctgccagcctcctggaagattttaaagcagatttasggagatacgcaggtggggtatctccctgcatctttccccgcctgcttgtgtctggctgggtggattcacctgttcctgggcctgagttgatgggggtggt

SEQ ID NO: 510865 - DNA, 201 bp, Homo sapiens
ccatctctccaggctcacctcccctctcaccccattccatctacctccctactgcaacaacacagacactgacaagcagcactctctccagccttccctcytctacaggctgtttcatcctcctgaatgactttgcccctcttctctccccggaaaatccctacttattcttcaaagccccctcaaatgttgcctgatcag

SEQ ID NO: 510866 - DNA, 201 bp, Homo sapiens
tcccctctcaccccattccatctacctccctactgcaacaacacagacactgacaagcagcactctctccagccttccctcttctacaggctgtttcatcytcctgaatgactttgcccctcttctctccccggaaaatccctacttattcttcaaagccccctcaaatgttgcctgatcaggagattactctgattcaag

SEQ ID NO: 510867 - DNA, 201 bp, Homo sapiens
tacttattcttcaaagccccctcaaatgttgcctgatcaggagattactctgattcaagctgagtttgctaccctccactcctatcgagcacagccaacayattattattttattattattactattattgtcaccatcacatccatcatttatcaagtgcttgtcatgtgtcaggtactgtattaaatccttcacatgca

SEQ ID NO: 510868 - DNA, 201 bp, Homo sapiens
accacgaaagcagggagataactagacagcatgctcggctggaaggaccaaagtcagagaaggaaaaatgaataagaaaatgagcagtcagaggcagctarggtgacggacagacagcatgaagcgcagcagaatgaatagccagaagactcggacaggcagagccgaaggaccgcagagctcagcgccggaggtaggcag

SEQ ID NO: 510869 - DNA, 201 bp, Homo sapiens
agaataatcttttgatacttttctggtagatcttataaattctgatccaaaaatttgatgtagcaaagatatgaggcacattaaacactttagggtttgctttttttttttttttttttttttttttacaatttggtgtgagaattatcatggcatctgtaacacacatgcctgtgctatattctcacaattttgttcagg

SEQ ID NO: 510870 - DNA, 201 bp, Homo sapiens
ttgcccccattgcacgaatgttcatctttgccattttaccagatggagaagttgttggagactctgaaaaatttgagattgaaaactgtctagccaacaargtgagcgatttaacataaaattaaaagaacacaaataaatgatactgtaggtgccatctattttaccccagagaaaactaagtccagaaaagtaaaatga

SEQ ID NO: 510871 - DNA, 201 bp, Homo sapiens
tatccttccctgtggagtcagacgttgcccccattgcacgaatgttcatctttgccattttaccagatggagaagttgttggagactctgaaaaatttgarattgaaaactgtctagccaacaaggtgagcgatttaacataaaattaaaagaacacaaataaatgatactgtaggtgccatctattttaccccagagaaa

SEQ ID NO: 510872 - DNA, 201 bp, Homo sapiens
agtgtcagatgccataggttgaggactcagtcccacttccaatgcaattgcaagccccaggttgttttgtctgtgcttctgacctaccaactataaatcasggttccatgacccccttcttgggggatttatttgctagagctgctcacagagctcagggaaatacatatctacatttatcagttcattataaagaatatt

SEQ ID NO: 510873 - DNA, 201 bp, Homo sapiens
agggggtggggggggcaggtcctctaattcaatccgattctcatactatctacttgggtagtgtcagatgccataggttgaggactcagtcccacttccartgcaattgcaagccccaggttgttttgtctgtgcttctgacctaccaactataaatcacggttccatgacccccttcttgggggatttatttgctagagc

SEQ ID NO: 510874 - DNA, 201 bp, Homo sapiens
cctcaaggtcgccccggaggcccccgagtttccacaaaacacctgaagaccatcggtgcaccaggaagcggccccagcttctgctcctggagctgctactycccagctgtgtgactctggaagagttgtctaacctctctgacccttgctttcctcatctgcaaaatagggttgacacatcctatttcaaagtgagggtta

SEQ ID NO: 510875 - DNA, 201 bp, Homo sapiens
agctgggtggtggtggtggcagcagggggtggggggggcaggtcctctaattcaatccgattctcatactatctacttgggtagtgtcagatgccataggytgaggactcagtcccacttccaatgcaattgcaagccccaggttgttttgtctgtgcttctgacctaccaactataaatcacggttccatgacccccttc

SEQ ID NO: 510876 - DNA, 201 bp, Homo sapiens
tggagtgcaatggcatgatctcggctcatcgcaacctctgcctcccaggttcaagcgattctcctgtctcagcccccctagtagctgggattatggcatgygccaccacgcccggctaattttgtatttttagtagagacggggtttctccatgttggtcaggctggtctcaaactcccgacctcaggtgatccgcccacc

SEQ ID NO: 510877 - DNA, 201 bp, Homo sapiens
aggaaatagtgaaactgcacccaccaagtaacagtgagatactacttttcatctgctacattagcagttcttccttctgtttaaaaatcaagagaagttgwggcagagaagacagtattctcacgtgctgcaggtaggtgtaagttagggaaagctttccagttaagagtactgatattacaaaaaggaaaaactggaaaa

SEQ ID NO: 510878 - DNA, 201 bp, Homo sapiens
tattgaagtttggtgacagaactttagcatgggtgactccattttgatttttggttttgtctgttggagcatagtacagaaacttaatccaaaaaaacaayctcctatactttttattcaacagaatcaacatttcaggtttcttttttaacctgaaattggtgtttcatttaataaatgcttacctagtagttactcggt

SEQ ID NO: 510879 - DNA, 201 bp, Homo sapiens
cttatgtcgcatgctggacaaagccagcaggagctcactgagaggctgggtgtgtgaagaaatgaagagcaaaaattttctattcagaactcaggtcctcygaggctcacgttatctcctgaaacgtgagggcatgggaagccccggaagctgacctacaggatccacggctcttgcccagacctgaaggagcactttgtt

SEQ ID NO: 510880 - DNA, 201 bp, Homo sapiens
aagatcagataacaacttattgaagtttggtgacagaactttagcatgggtgactccattttgatttttggttttgtctgttggagcatagtacagaaacytaatccaaaaaaacaacctcctatactttttattcaacagaatcaacatttcaggtttcttttttaacctgaaattggtgtttcatttaataaatgctta

SEQ ID NO: 510881 - DNA, 201 bp, Homo sapiens
tggtctcactctgaagatcagataacaacttattgaagtttggtgacagaactttagcatgggtgactccattttgatttttggttttgtctgttggagcmtagtacagaaacttaatccaaaaaaacaacctcctatactttttattcaacagaatcaacatttcaggtttcttttttaacctgaaattggtgtttcatt

SEQ ID NO: 510882 - DNA, 201 bp, Homo sapiens
ggatttccttatatttttgctgcatatgtatccctaactaatatttagaatcttcacatgtgtttcatcttgagagaaacaagatttttatttctctcttrttcaagaaacaagagaaacatttttgaatatttcagcagcttagttttttgtttgtctgctttttattttctaagttcaacactatgttgatgaagaccc

SEQ ID NO: 510883 - DNA, 201 bp, Homo sapiens
ttagccttccagagtgctgggattacaggtgtgagccaccgcacctggccaaaataaaaactttattcccactaaatatgtattactcagggaggagttgraaagaaatataatggagaaagaatttaagagagctttgttttggtaaagatttggggaaatgttcagaaaatggttatagaacgacaccgtgcttaataa

SEQ ID NO: 510884 - DNA, 201 bp, Homo sapiens
ataaaattttaggatcataagacatatgattagcttaatgtaagacttttcttttctgaagtaaatgttttcatatagtttattattaccacacactgaawtgtggaccataattaggttacagcaatgattatattaccatattttgatttttagtatcagttgagtagccaggattttaaaattcagattctgaagttt

SEQ ID NO: 510885 - DNA, 201 bp, Homo sapiens
ccactcctatcgagcacagccaacacattattattttattattattactattattgtcaccatcacatccatcatttatcaagtgcttgtcatgtgtcagrtactgtattaaatccttcacatgcatttttccttaccacttatagttattatcattctccattttactgaggaggaaaccaacgttcacatcatttcaaa

SEQ ID NO: 510886 - DNA, 201 bp, Homo sapiens
tcccacctcagcctcctgagtcactgagactacaggcacttgggcaccactgggtctggcttttttggttttgttgttttgtttggtcttaaacttctggrctcaagcaatcttcccacctcagcctccaaaagtgctgggattacaggtgtgagccaccaagcccagccataaaacctttttttttttttttttgagacg

SEQ ID NO: 510887 - DNA, 201 bp, Homo sapiens; identical to SEQ ID NO: 82389

SEQ ID NO: 510888 - DNA, 201 bp, Homo sapiens
ctgagggaagagctgagaggcacagcaacggcaggggagcatgcactgcctgagtctcggaatcgccccacaacaatcgctgaagccctgtttcctccagyactcccacttccggataccccaggtctcaccttcagtcggttcaccaggtccctctcttctttcttctgcacaaactgagtaacccaggccggttctcca

SEQ ID NO: 510889 - DNA, 201 bp, Homo sapiens
gggagcatgcactgcctgagtctcggaatcgccccacaacaatcgctgaagccctgtttcctccagcactcccacttccggataccccaggtctcaccttyagtcggttcaccaggtccctctcttctttcttctgcacaaactgagtaacccaggccggttctccagcaggcctcggggtgcctgcagccccttcgcagg

SEQ ID NO: 510890 - DNA, 201 bp, Homo sapiens
taaaaagaaacattttacctggtgtcctttcagatcatcagtctctctgctcagtcaagcacaattcttttaatccctatcttcatccacttgtctctctmaaattgattgggcttctcctaggatcttcatgtttgtacaaagaaagcccaagctaaattttcaaggtcaaggaaaaaacatacgcttttccctgcctag

SEQ ID NO: 510891 - DNA, 201 bp, Homo sapiens
ctgggtgtgatgggtacgtgtgtgtctgtcccccacacgtggggttttaattgagtgggtttcaatgtggaaggtgcccactgcatcctgtctcccacccygtgatgatcgccagctatttcagatgtggacagcggtgtccctgggggctgggcttgcactgcagctggagttttagagattctgctttcctggtgagct

SEQ ID NO: 510892 - DNA, 201 bp, Homo sapiens
tctgcttcccctcccttctcagctccctttcttcctcattgttctcctcttccttccctgctgtgctttgggagttatctcagtcgcaggcatgccctccygccaccccatctccaggggagagctcggaagaaattcctcattgttggcttcatactgccatgggttacttagaggctggggcatttttgagatcaaagg

SEQ ID NO: 510893 - DNA, 201 bp, Homo sapiens
gatcttgacagatgatggatgtgtctgagaggggagaaggcccagccttgcattcttgggaacaggtgctgattgccttcagggctccagcctcttttctyggccttttcaatgctcagacatcctcttccttgccctcacccctgctcttcccacatcttcaaagctgaaggagtctccttattctggaggtgaggagca

SEQ ID NO: 510894 - DNA, 201 bp, Homo sapiens
agggcttggcctcctggccagtagattgcccagtaaggatcactgtggggccacaggtcagctctctcccaccagaatttgcatctgggggtcaaaagcckcaactggatttcaggggtgaggctaccactgctggtgacttcagtgttctcctccaggaaagcctttatctcagggtccaaaaagcttccagctcctctc

SEQ ID NO: 510895 - DNA, 201 bp, Homo sapiens
tatgtaatccacagtctagaattctggcagtcttcccagcctcttcccttactctcctttcttgcattcacttagtctctgacactggtgaaccacctgarccctgtgcttctgtaaaacaggtcagttaagaaatttacccatcgtgttgttttccaaaaccctccaaccttttgtgttccaacaaaaaagctaactgca

SEQ ID NO: 510896 - DNA, 201 bp, Homo sapiens
ggggagcgggaggctggcttcaggccacgcagctggggtgggggcttccatctgcctgtgctccatcggaggatggctccacccagcccctgcaccagtgygctcctcgattccctaaagaggcttccagagaaaacagcagcacatatcaataaaaaactcagcagaaaccaacagtacacttttaattaaggacctgta

SEQ ID NO: 510897 - DNA, 201 bp, Homo sapiens
ccccatttgtgcgtctgagtcatgggccaccctggacttcttgagtctctgtctgtggagacccctctgtgcctgctctcaccctagcccagcactggccrtggttgatggcatgttgcacctgcccttcgttcaaggagatggtgttgttgaacccatctcctgcatggagctctgcaaagagagtgcctggcatcaatg

SEQ ID NO: 510898 - DNA, 201 bp, Homo sapiens
tgtgcgtctgagtcatgggccaccctggacttcttgagtctctgtctgtggagacccctctgtgcctgctctcaccctagcccagcactggccgtggttgrtggcatgttgcacctgcccttcgttcaaggagatggtgttgttgaacccatctcctgcatggagctctgcaaagagagtgcctggcatcaatggcctgcc

SEQ ID NO: 510899 - DNA, 201 bp, Homo sapiens
caaatgacctttccccattttaataaaagcttgaaagaaggtctggctgtacataggagaggatgctctaaggccagcctaggaaaggaaaggaaggaaaytagcactagaatagccaggaaaaacagaaaaaaggaagaaatggaaactgggcccaagaagcaggaaaaagcttctttaattatccagctcactgttctg

SEQ ID NO: 510900 - DNA, 201 bp, Homo sapiens
cactgtatttggtgttaaaatgggcagcatcacagttctgagaaatcttcacctttttccaggaatcttcatgaatagtccaccccttgggtaaagaaacycatataagaaaccccaagcccctttgtgcagctctctcatgagtatgcccatgctcccctttcttgagtgtgtatttttactttgcaataaatctccgta

SEQ ID NO: 510901 - DNA, 201 bp, Homo sapiens
gaaatttagaaatgtgtatatatatgtatataaactatatatgtatataaattatattgatatttatataagcatacataaaacacaaatatataaacgtmtatatagtatgtaccctttcatcattaactgaatatttatcaaacacctgtacacagtgcgtgctaggtactgttctaggcactgggaatacagcaatga

SEQ ID NO: 510902 - DNA, 201 bp, Homo sapiens
atacaaaaactgggcagttacctgggagcgtctagtttcttcctttgccttccattcagttgggtaactacaattctcagcctcaaattattttttcttaktcatgttgaaaatccatggaaaatagtaagaatgaccaaactggtctcttcattaaggatgggtctccacattcgccggttttactattgagggcattga

SEQ ID NO: 510903 - DNA, 201 bp, Homo sapiens
atgaaaagaacatttatctaaaatctgtagtaaaaccctcaggaccaagaacagataaaacaatttttaaaaagaaaaacaaagttggagaactatactaygctatattcttacttatagacttactataaaattacagtggggtagaagtgacaggatagatatattttaaaaaggaacagaagagaatgcagaaataaa

SEQ ID NO: 510904 - DNA, 201 bp, Homo sapiens
aatgagaaagagatttctagcaaataaccatggcctatcagagcagtcactacaatgttttagggaggataatgctaaattttgcattttagaaaatttgstttgatgccagtatagagaaagaacaagcaaaagcaatacaggagagagagactggatagaaaaaaatagaagatgtatgagggaaaaaagataagctat

SEQ ID NO: 510905 - DNA, 201 bp, Homo sapiens
aaggctgaggtgggcggatcacctgaggtcaggagtttgagactagcccggccaacatagtgacccctgtctctattaaaaatacaaaaattagccaggcrtggtggtgcacacctgtgatcccagctactcaggaggataaggcaggagaatcacttgaacctgggaggaggaggttgcagtaagctgagatcacccact

SEQ ID NO: 510906 - DNA, 201 bp, Homo sapiens
taaattttgcattttagaaaatttgctttgatgccagtatagagaaagaacaagcaaaagcaatacaggagagagagactggatagaaaaaaatagaagaygtatgagggaaaaaagataagctattgatacaaggaatagcaacaggaacaaatgtgataagctggaaacagaaaatgttaaaaagatacaattgaaaat

SEQ ID NO: 510907 - DNA, 201 bp, Homo sapiens
actgagcattgtttcttaggaaattggaaaagagagttagtgtctatcagaaactgtacatattaaatatttttgtaggttttttcagttttgcttttttwgagacagggtctctctctgtcacccaggttagaacatagtggtgcaatcatagctcattgcagcctcaaactcctgggctcaaccaatcctccttcctca

SEQ ID NO: 510908 - DNA, 201 bp, Homo sapiens
gattcccaaatttactacatgcttccgaaatgtattttcttcctcttgtacagattaaattgcttaatccagacaactctccaatcccaaatgaagttgtycagttgcatctgaaggacaaaatcgtgggaaactacaccacagatgtaaatggcatcgctcagtttttcttggacacatatacgtttacatacccaaata

SEQ ID NO: 510909 - DNA, 201 bp, Homo sapiens
ttgtttcttaggaaattggaaaagagagttagtgtctatcagaaactgtacatattaaatatttttgtaggttttttcagttttgcttttttagagacagrgtctctctctgtcacccaggttagaacatagtggtgcaatcatagctcattgcagcctcaaactcctgggctcaaccaatcctccttcctcagcctcctg

SEQ ID NO: 510910 - DNA, 201 bp, Homo sapiens
cttaggaaattggaaaagagagttagtgtctatcagaaactgtacatattaaatatttttgtaggttttttcagttttgcttttttagagacagggtctckctctgtcacccaggttagaacatagtggtgcaatcatagctcattgcagcctcaaactcctgggctcaaccaatcctccttcctcagcctcctgagtcac

SEQ ID NO: 510911 - DNA, 201 bp, Homo sapiens
agaaggtctggctgtacataggagaggatgctctaaggccagcctaggaaaggaaaggaaggaaattagcactagaatagccaggaaaaacagaaaaaagraagaaatggaaactgggcccaagaagcaggaaaaagcttctttaattatccagctcactgttctgaaaacaaatttgaagcagtttatcagattctatgt

SEQ ID NO: 510912 - DNA, 201 bp, Homo sapiens
aatttgaagcagtttatcagattctatgtaaatatcgcacataattagaagaaggggagacattagacaaaaagtcccctaaaagaattaaggccccaaamtgctgagcaagaaatcccaggtactcgccaacggggagccacagtgaccgcgcggccttcgtgcagctcgtgcgtggatacaggatgatcagtcacgagt

SEQ ID NO: 510913 - DNA, 201 bp, Homo sapiens
atcgcacataattagaagaaggggagacattagacaaaaagtcccctaaaagaattaaggccccaaactgctgagcaagaaatcccaggtactcgccaacrgggagccacagtgaccgcgcggccttcgtgcagctcgtgcgtggatacaggatgatcagtcacgagtgccagtgtttacggtttgtgttttttttttttt

SEQ ID NO: 510914 - DNA, 201 bp, Homo sapiens
tggaacaacctccttaatgacccttccagaattggctgactgcaaagaaaaattgtccaatgtgccactctctgattccatttcccccatactctgttccmtctaaccttgtttgctccagtggagtattctttcacaatagctttccccctgccacccccattacataagtctttttgaaaaaggcctttctttatctaa

SEQ ID NO: 510915 - DNA, 201 bp, Homo sapiens
gtggaacaacctccttaatgacccttccagaattggctgactgcaaagaaaaattgtccaatgtgccactctctgattccatttcccccatactctgttcsttctaaccttgtttgctccagtggagtattctttcacaatagctttccccctgccacccccattacataagtctttttgaaaaaggcctttctttatcta

SEQ ID NO: 510916 - DNA, 201 bp, Homo sapiens
ctgagcatcatactcctggaaaatagcaatagtttaaaaatccctccactcttttgcggtcctgaaaatggcttactgcaaaaatccacccttccctatargatttagataagaccaatggatgacgacccccttgtttacctaagacaaagacaacacaggctctccaaattcccattattttatctcataaatgattag

SEQ ID NO: 510917 - DNA, 201 bp, Homo sapiens
ggcttcgcgtttcctttattattttttggattttaagcttgcatacacttactaaataattgcatgtcaatcttatcccgtgtcctaactcttcttactascactgcagaattctgtcttttcagcaaggttgaaattgtgaatgccctttttgtccctaacaactatgtcaagatataattcacatgcaatacaattcac

SEQ ID NO: 510918 - DNA, 201 bp, Homo sapiens
aaagattcgtatccaaatgttcataacagctttatttttaatagccaaaagctggaaacaacttaaacgtccatcaaagagtaaatggataaattaattgyggtaaatccacacagtagaatattagcaataaaaaagagtaaaatattgatgcaaacaacaacatggatgaatctcagaataattatgctgagtgaaaga

SEQ ID NO: 510919 - DNA, 201 bp, Homo sapiens
ctacttgtgtttttataagtgaaatgtgtttcttgtaggtgacagattgttgggtcttgtgtttttatccattcagccactctgtcttttgattggagaatttagttcacttacattcaatattgttattgataaaacatactcctgccattttgttatatgtcttcttgctgttttgcggtcttctcttccttctttcct

SEQ ID NO: 510920 - DNA, 201 bp, Homo sapiens
aaaccaagtccctcattttaaccagaggtcatctctgagctcagactggggcttctcaacatatgcatagaggccaggcgcaatggctcatgcctgtaatyataccactttgggaagctgaagcaggtggatctcttgagcccaggagttcaaggccagcctgggcaacatggcaaaacttcatctctactgaaaaagata

SEQ ID NO: 510921 - DNA, 201 bp, Homo sapiens
cagagtgagactctgtctcaaaaaataaaaataaaaataaaaataattagttgggtgtggtggcctgagcttgtagtcccagctactctggaggctgaggyaagagaatcgcttgagcccaggaggcagaggttgcagtgagctgagattgcaccactgcactccagcctgggtgacagggcgagactctgtctcaaaaaa

SEQ ID NO: 510922 - DNA, 201 bp, Homo sapiens
atatgattagcttaatgtaagacttttcttttctgaagtaaatgttttcatatagtttattattaccacacactgaaatgtggaccataattaggttacarcaatgattatattaccatattttgatttttagtatcagttgagtagccaggattttaaaattcagattctgaagttttaaatgctgctctgttgttaaca

SEQ ID NO: 510923 - DNA, 201 bp, Homo sapiens
agcgttcctcttctctggaggatgcagcaacaaggcatcatcatggaaccagagactcaaccattggtgcctttatcttgaatgtcctaggctccagaacygtgagagaatagatttctgttcctcataagttacccagtctgtggtattctgttatagcagcacagaatggactaagacaaatccctttctgcttaaatt

SEQ ID NO: 510924 - DNA, 201 bp, Homo sapiens
tggagagaggtcgactcctaggatccacgcctcaaccactcacagcccagcttctgtacgggagcacatagccagtgagggtcatggaggggagaccaagrccctggccacgcacccatgagcctccaagcagggcgaccctgcctggacataatcctgccccccaagaaatgaggctcaccaggcgcttggctgcatact

SEQ ID NO: 510925 - DNA, 201 bp, Homo sapiens
accaggtgatgggctgatacatgcagcaaaccaccatggcacacctatgtaacaaacctgcacatcctgcacatgtaccccagaacttaaaataaaataamatttaaaaaataaataaataaatagataaataataaaagtttttttaaaaactgtgcaaaaaaaggtgagagcaaacagcaaatggtaccaaatttccat

SEQ ID NO: 510926 - DNA, 201 bp, Homo sapiens
agcctcccaagtggctgggaccataggtgtgcgcctccacatacagactggagaacactactcttgacttaagaccagaattgtccataagcctgattgarttgtattcctccaaattcctgtgttgaaatcctaacccccagcatctcagaatgtggccttatctggaaataggactgtcacaaatgtaattagttaaga

SEQ ID NO: 510927 - DNA, 201 bp, Homo sapiens
tcttgacttaagaccagaattgtccataagcctgattgaattgtattcctccaaattcctgtgttgaaatcctaacccccagcatctcagaatgtggcctkatctggaaataggactgtcacaaatgtaattagttaagatgagactactaggacgggacccagcctaaagggctaatatccttattggaaaggggacacg

SEQ ID NO: 510928 - DNA, 201 bp, Homo sapiens
tgtccataagcctgattgaattgtattcctccaaattcctgtgttgaaatcctaacccccagcatctcagaatgtggccttatctggaaataggactgtcrcaaatgtaattagttaagatgagactactaggacgggacccagcctaaagggctaatatccttattggaaaggggacacgtggatgcagacatgcacaga

SEQ ID NO: 510929 - DNA, 201 bp, Homo sapiens
ctgctttaaacttattctactccccattcatccatagcctactgttgctatgcatcgtcttccatgctaccttggttaactcacatttttgctgtggtccrtagtcattctgggcttgggttgccgtaggcaactctaacatggaataaataacactgtcagtcatcttcagctaagatctttcacatgcagttgagagag

SEQ ID NO: 510930 - DNA, 201 bp, Homo sapiens
attctagagttcttgcaacagttggcaaaatctggaactggctcagaacacctctctctgtcctgttttctcattattttagggctcaaaatatctttttytcaacatggctgctctccaggatcaagcactgtctccacaagacagagaaggcagccccttggcagctctggggcttgtttttttcaaataaataaaagt

SEQ ID NO: 510931 - DNA, 201 bp, Homo sapiens
taaagaacactaagtatttcacattttcttctgtacttttcttctatgcatgttctcttattaagatacactatatgtgcgattcaatatcatcctttttwttagcttaacagtgtaccataaacatttcaccgtatcagaagagtttaaaatctgaagtctgaatgcttgtgttcaaatattgccttctctagttagtgt

SEQ ID NO: 510932 - DNA, 201 bp, Homo sapiens
tttgtttctgagtcaagatgtttcctgtacacctatttctcttccttctctttttccgattctcaaattcaagagacaaatctacttgtcctacactcccrtgcagttcccgtcatcctcaacaagaatcagcacttgtcagaggaacactcttgatttgcctcttggcaatccctgctccacaaagcacttttagttgtt

SEQ ID NO: 510933 - DNA, 201 bp, Homo sapiens
ttaagatgagactactaggacgggacccagcctaaagggctaatatccttattggaaaggggacacgtggatgcagacatgcacagaaggcaggcgatgtsatgatacccaaggagaacacgcccctataagccaaggaaaggggcctgaagagatctttccctcgcgaccctcagaagggaccaagcatgctgacacctt

SEQ ID NO: 510934 - DNA, 201 bp, Homo sapiens
cgtggatgcagacatgcacagaaggcaggcgatgtcatgatacccaaggagaacacgcccctataagccaaggaaaggggcctgaagagatctttccctcrcgaccctcagaagggaccaagcatgctgacaccttgatctcggactccagcctccagcgctgtgggatgtcagtttctgttgtttaagccccagtttgtg

SEQ ID NO: 510935 - DNA, 201 bp, Homo sapiens
tgaggcaggaatatggccagaacccaggaggcggagcttgcagtgagccgagatcacgccactgcactccagcctgggcggcagagccagactccgtctcaaaaaaaaaaaaatcagtagctagtgatgcaatgtctacaagaaactcactttagacttaagaacagacatagactgaagtgaagggatagaaaaagatat

SEQ ID NO: 510936 - DNA, 201 bp, Homo sapiens
aaattgacagcaatacaataaattagtagacctcactacccccactttcagtaatgaatagaacatatggacaaaaaatcaattaaaaaagcagctgattkgaacaacatgatagaccaaatagacccaacagatatatacagaaattttcacccaacaacagaaaaatattcttttcaagagcacagagaacattctcca

SEQ ID NO: 510937 - DNA, 201 bp, Homo sapiens
tttctttattgaaattgcctcacccttttcggttgttcaaaatgaacaatttgatttgattgtcaatgccttcagctacctgaatacatgtgtagaggtgmgttgttctgtttgatctggaggcaaaaatctaacaaagctaaaatatttcttaatatttccatattctctttatcctcaagtgcaaaatgctactataaa

SEQ ID NO: 510938 - DNA, 201 bp, Homo sapiens
tcactatgatttgaaaatcttggttgaggtggtctttaaaaatccttaaaataacagaatggagagatcttcctaagctatcaattggagggaattattgwtcagatcatcctctatgtttcctgatgggatctaaagggattacagtaccgtttccggacctgtattcccaggaaaccttagcttgggtagatggtaact

SEQ ID NO: 510939 - DNA, 201 bp, Homo sapiens
ggccaacatggtgaaactccatctctactaaaaatacaaaaaaaaattagccaggcgtggtgacaggtgcctgtaatcgcagctactctggaggctgaggyaggagaattgcttgaatctgggaggcagaggttgcagtgagcctagatcacaccactgcaccccagcctggctgacagagcaagactctgtctcaaaaaa

SEQ ID NO: 510940 - DNA, 201 bp, Homo sapiens
gggagaggccccctcaaaacaggaactcctgccggctgacttaattacagcacagcaagggaatccactacaaaggcaggagccactgaacagagagctgytgagatccgtcctcggtacacggacagatggttctgctgcttctcggctggtataagaccttatagaagactctgaaaactgaaacacgccaacaagttt

SEQ ID NO: 510941 - DNA, 201 bp, Homo sapiens
tcttattatctcattcccagtatcatccaatcacactattatccccccccaatctttagtttcatttaggactagcaaatgtcactgcaaacatgtatatyacccaaaaagtacataggaaaaatcatatcagcttcaactagtctaccttctccccacatcttttgccaaaatatcaaagcactaaacagatacagaccc

SEQ ID NO: 510942 - DNA, 201 bp, Homo sapiens
aagagaacagggagtagacgcccaagggtcctcgttctatatagaaccttgatgaaaatgatgtttcaaagagaaatcaaatacactgggggaagggggtrgatccagtggtgcgccgggaatgaactgacccaagtgagctgggacatgtgcatacagagagcagaggcagaagtcaaggaactggaggctgaggaaccc

SEQ ID NO: 510943 - DNA, 201 bp, Homo sapiens
agcccacagagccacccaatggcaacttccagaaagaggtgtgagtaccacgctgtactggccactgcatgtaaacaactcaccattttcacactccactktggaactagccaggagccactgcaccctcctctttcccaaggcctgggcagggaggcacagcagactcagcctggctggaggagccagacacggttttgc

SEQ ID NO: 510944 - DNA, 201 bp, Homo sapiens
aggtgccaccacacttggctaatttttgtagagacagggtttcaccatgttggccaggctggtctatgaactcctgacctcaggtgatccacctgccttgscctcccaaagtgctgggattataggcgtgagccaccgcgctcggcctcctgctcagaatctttcctctatccctcctccttcctcacacatgcgctgagt

SEQ ID NO: 510945 - DNA, 201 bp, Homo sapiens
tggggatcctgccatggatgcaggagaaaaaattcaatcacaagggagtaagtgacaacaaaaagaaaaaactctgagccacagctacactgggagggggraggaccagattttgctacttctgtcacacaagctagaaaaaccctacctctcccattgggcaggcaacctgacattccacccagttccttgccttaccat

SEQ ID NO: 510946 - DNA, 201 bp, Homo sapiens
tgcagccatagcgtgttaagagaaagtaattgaccttgtttgtgaatgaataacatctactaaatcagtacagcataagcttaaatgatctcgaggggaakcagtttacagattctgctatatttaagaaagcagccttcttatatggctttattatattgctttatgtatatatatacaaacatatataatatgcatatt

SEQ ID NO: 510947 - DNA, 201 bp, Homo sapiens
accccatgccttctgctccaggcagtcagctctctgagcctgctgaacccagaggggatctcagagtatccagggcggggtgaaacacctcgtatgactasggttggggcagcagcgcggcgcaggagtcagagcctcaaactccacagccaggcgccagggttccagctgcctcccctacctgcagctctgtggctcagg

SEQ ID NO: 510948 - DNA, 201 bp, Homo sapiens
tgagcctgctgaacccagaggggatctcagagtatccagggcggggtgaaacacctcgtatgactagggttggggcagcagcgcggcgcaggagtcagagyctcaaactccacagccaggcgccagggttccagctgcctcccctacctgcagctctgtggctcaggctggcctcactacgcttgtttccacgagtgcaga

SEQ ID NO: 510949 - DNA, 201 bp, Homo sapiens
gggatctcagagtatccagggcggggtgaaacacctcgtatgactagggttggggcagcagcgcggcgcaggagtcagagcctcaaactccacagccaggygccagggttccagctgcctcccctacctgcagctctgtggctcaggctggcctcactacgcttgtttccacgagtgcagaaatggaaatgacaacagcag

SEQ ID NO: 510950 - DNA, 201 bp, Homo sapiens
acatctgaggttggggggagggggaggctccttgttactactggatgtcaggagagagttcaggctaccacctggtgagggtggccttgtacttagtgggycataatgaaaatcctgacttcgctaggcttcctctgacaccaccctggtataggtgttggggtgcttcctaagtcttgtgagggtggaaatgtaggctct

SEQ ID NO: 510951 - DNA, 201 bp, Homo sapiens
tgttttgttgttgttgttttgattgtctgtacacattggcatttctgggtggctgctgtttcacttccaaagctggggattatgaggcaaaaggaaaatcyagaaaaactaaggaacctaccaccatggcttgccttgggtcttgagctccctagatgatcatcaccttttggagtctcaggtttgttttatatataatat

SEQ ID NO: 510952 - DNA, 201 bp, Homo sapiens
actaaaggtaaggcacttttatatactttcatgtacttccttcacagaactctatttcagaggtgataatatttagctattctaggaagtggggttttttyccttattgaaagctttttatttggagggagactctctttggggtgcataaattctagaaacaacctattaatattagcttacttaaaaaatatttttatg

SEQ ID NO: 510953 - DNA, 201 bp, Homo sapiens
ttagcttacttaaaaaatatttttatgtaatagaatttctggatccagagtgttcagtagggggctctggaaaacagcacagaaggcttgcttttagataygtcagagtggacttccacagattttcttcacacttagccatcctagactactcaccgaatacactcaacatgcacaaaggcagggctgtgaattttaaag

SEQ ID NO: 510954 - DNA, 201 bp, Homo sapiens
agtggacttccacagattttcttcacacttagccatcctagactactcaccgaatacactcaacatgcacaaaggcagggctgtgaattttaaagcctttwccccacctaccacacccagtcataggaagaaaatactgttaccttgttgcaaacattgctctcagggatgagaaggttgcagcatcttctttcaaagcct

SEQ ID NO: 510955 - DNA, 201 bp, Homo sapiens; identical to SEQ ID NO: 82397

SEQ ID NO: 510956 - DNA, 201 bp, Homo sapiens
accgaagtgacccatctacacgccaaggaacatcaaggattgccagcaaacaccagaagccaggaaggggcaaggaaaggcctttccctagagctgccagrgggagcatggccctgccgacaccatgatttctgacttttggcctccagaactgtgagacgataaatttctgttgttttaaagccacccagactttgttac

SEQ ID NO: 510957 - DNA, 201 bp, Homo sapiens
atgtgatcttgcttcactgcagcctccacctcccagactcaagtgatccttccacctcagccttccaagtaggacacaactaccatctggctatttttttwatttcttttgtagagacagaagctcattatgttgcccaggctggtcttgaactcctggtctcaagtgatcctccctcctaagcctcccaaagtgttggga

SEQ ID NO: 510958 - DNA, 201 bp, Homo sapiens
aaggtctcactctgttgtccaggctgaagtgcactggtacaatcatagctcactgcagcctcaaactcttgggttcaagcgatcctcctgcctcagccatytgagtagctgggaccgcaggcatgcgccacaacaaccagctattttttaaattttttgtagagacaagatctcactatgttgcccaggctggtttccaac

SEQ ID NO: 510959 - DNA, 201 bp, Homo sapiens
acagagtgagactccgtctcaaaaaaaaaaaaaaaaagaaatctgaatatgggtccaggcgcggtggctcatgcctgtaatcccagcactttgggaggccraggcgggcggatctcctgaggtcaggagttcaagaccaacctgcccaagacggtgaaaaccgtctctactaaaaatacaaaaaattagctgggcgtggtg

SEQ ID NO: 510960 - DNA, 201 bp, Homo sapiens
ctcctgggctcaaggtatccacccacttcagcatcccaaaagttctgggattacaggcaagagccacttccttcctcctccttctcttcctccttcttccytctccttcttcttctccttctccttctactctttctcctttgtcttcttcctttttttgtttgtagagacagggtttcactatgttgcccagactagtct

SEQ ID NO: 510961 - DNA, 201 bp, Homo sapiens
tctgggattacaggcaagagccacttccttcctcctccttctcttcctccttcttccttctccttcttcttctccttctccttctactctttctcctttgkcttcttcctttttttgtttgtagagacagggtttcactatgttgcccagactagtcttgaattgctgggctcaagtgattctctcaccttggtctcccaa

SEQ ID NO: 510962 - DNA, 201 bp, Homo sapiens
ttctgacagaaatgctctaagaaggggaggagggaaagatttccttccttcttggcaaatgggaaactcatttttgaaatctacccttacaatagataaayggatggtggaggtgggggcgtggaattaaagtaaacatggcaaaaattcagtgattgaatctaggaaaaatggcataaaggtgttcactgcagtattctt

SEQ ID NO: 510963 - DNA, 201 bp, Homo sapiens
acaaaggagaaagaaagaggcaaagagatggtgccagctaaatgacatcctaccaacacacgtggacctgcccccgccacctctcctttgccttccagtgmtgggccggccaggccagggagggggctgctcctcacacggttcagcctgtcacagacccagcgtctcccaggcctggacgagcaggacaaagttgtgggg

SEQ ID NO: 510964 - DNA, 201 bp, Homo sapiens
aggtgggagaactgcttgaacccaggaggtggatggaggttgcagtgaccagaaatctcaccactacactcctgcctgtttgacagagtgagaccctgccaaaaaaaaaaaaaaaagaaaggaagaaagaaagaaagaaaaagagaaaagaagaaggaaggaaaggaaaggagaaaactgttacctttggagttccaattg

SEQ ID NO: 510965 - DNA, 201 bp, Homo sapiens
gttggccaggttggtctcgaacttctgacctcaagtgatctgcccgcctcggcctcccaaagtgctgagccactgcgccagggctgagccactgcgccagrcctgaaatatccttctatcgctcaagaccaagaccaagtcatccacctttgctcctaattctactggctttggtttgaatgttcatgtcctccccaaatt

SEQ ID NO: 510966 - DNA, 201 bp, Homo sapiens
tcccagacataggatttacttttgaaagaaaaggagcggtcacacgggagaggcattgaaggaaaaattatttgaatttggcaactgcttgtggtgggggratgagaggtggagggtgataaagcgccccctcacactcacacacaaataatgtgaacaattttaaattgctttactttaggagatcatggattttccagg

SEQ ID NO: 510967 - DNA, 201 bp, Homo sapiens
ttgttgactgtggtgtaaagacagatgttaaaaaaattattctgacacttgttaaaatggtaaggaagacttcattcaaaaccattgcaattggagggggsaaaagaaggggctcaactctgaaacagcaagagcaagtgaagatttatagccaagaacagcatgaggatgtcaaaggatgggaaattgctaaaagaacac

SEQ ID NO: 510968 - DNA, 201 bp, Homo sapiens
ttttgcaccattcatcatacatttatctcctacaatttttttttcttcctgggataagatggcactgagctctgctaaaaattcccatcaagaataaccasagtaagaaaaataatgcatgagagaaagggaagaaaatggcacaacaggggaatgctttagcttttcacctccagggagctgagtctcagctcctcaggg

SEQ ID NO: 510969 - DNA, 201 bp, Homo sapiens
cggggaaggggaggggaggggaatggaggggaggagggggagaggagaggagaggaggactcattcacctctagccctctgatgccacacagaaatgtggrcccaaggctctgtgaaatcttccagttttttgagactggcctgaaatcctgtttatgtgattctgtttcttgaaaaaagcagctccctaaatcaaaatgt

SEQ ID NO: 510970 - DNA, 201 bp, Homo sapiens
caagatgtacagctatggcaagccacgggtctggagaagggaagaatagggggaagattttactggtaaaggagggaagttcacataaactcttggaaacwaagttgattggttcccaaggctcaaatcaagaattggagtccgttcattggtggaggtcctgctgctgggccaaacgtcctttcgacagtatcttatctg

SEQ ID NO: 510971 - DNA, 201 bp, Homo sapiens
ttactgcctataatccaaactgctttgtcttatcacttcttcacaaatttatcatttcttcatctaaaagatatataagtttactacttctggtcacttcyttgggtcttcattgtcttgtgaggactttcatgtgcaagtaaaattataataaaatttgtatgcttctcttctattaatctgtattatataagtttaatt

SEQ ID NO: 510972 - DNA, 201 bp, Homo sapiens
gagggtgtatctgtggggcactggggtgctctgctgtgaatggccggtgggaaatcttcccttcaagagcacttcacatactgagacctccagatgcactytcaagggagatgtgtggcttccacaccagtgccttctggggccaggacttcatctccaagctgcttggataccagctctctcagtggctgcccttgtcca

SEQ ID NO: 510973 - DNA, 201 bp, Homo sapiens
attcaagaccagcctggccaacatgctgaaaccctgtctctactaaaaatacaaaaattagccagatgtggtggcaggcgcctgtaatcccagctacacasgaggctgaggcaagagaatcgcttgaacctgggaggaggaggttgcagtgagccaagacggcaccactgcactccagcctgggcgacaagagcaagactc

SEQ ID NO: 510974 - DNA, 201 bp, Homo sapiens
gtggggcactggggtgctctgctgtgaatggccggtgggaaatcttcccttcaagagcacttcacatactgagacctccagatgcactttcaagggagatrtgtggcttccacaccagtgccttctggggccaggacttcatctccaagctgcttggataccagctctctcagtggctgcccttgtccactttaatcacct

SEQ ID NO: 510975 - DNA, 201 bp, Homo sapiens
caaagatttccttaacaacatacaaaaagaataagctataatgcaaaagattgaataggaaaaaaaacaccaaaatctgtttctcccatactatactctcmcaacaaaatgcttttgtgaccaaatgtgtagggatttttccccacatgccaagcaagcaatcgattctgcagtgaattctccagaggtcagcagctaagt

SEQ ID NO: 510976 - DNA, 201 bp, Homo sapiens
ctgggaggaggaggttgcagtgagccaagacggcaccactgcactccagcctgggcgacaagagcaagactccatctcaataaataaatatatgtatatgwatatatatatatatgtatgtgtatatatatatatatatatatagttgaagattaaccggaagcagtggctcacacctgtaatctcagtattttgggaggc

SEQ ID NO: 510977 - DNA, 201 bp, Homo sapiens
tggggtgctctgctgtgaatggccggtgggaaatcttcccttcaagagcacttcacatactgagacctccagatgcactttcaagggagatgtgtggcttycacaccagtgccttctggggccaggacttcatctccaagctgcttggataccagctctctcagtggctgcccttgtccactttaatcacctgtaccctgt

SEQ ID NO: 510978 - DNA, 201 bp, Homo sapiens
agggctcagcctgacaagactgtctcccacttccaatgccagtcacaagcacaggatgtggcctgagtttctgactgactggctttaaatctaggtatccytgacaccctcctcaggtccaatttgctggatggctcacagaactcaggaaaacacttaacatttactcatttgttttaaagaatattacaaaagatacag

SEQ ID NO: 510979 - DNA, 201 bp, Homo sapiens
gccaagacggcaccactgcactccagcctgggcgacaagagcaagactccatctcaataaataaatatatgtatatgtatatatatatatatgtatgtgtrtatatatatatatatatatagttgaagattaaccggaagcagtggctcacacctgtaatctcagtattttgggaggccaaggcaggcagatcacttgagg

SEQ ID NO: 510980 - DNA, 201 bp, Homo sapiens
gtgaaaccttgtctctacaaaaaatacaaaaattagcccagtgtgtaatcccagctacttgggaggctgaggcaagagaattgcttgaacttgggaggcaraggttgcagcgagccgagatcacgcaactgcactccagcctaggtgacatatttttctgtctcaaaaataataataaataataaataaaaaatctactct

SEQ ID NO: 510981 - DNA, 201 bp, Homo sapiens
ggcttttcctcagtgtgtgcacaagggaagaaagagagagggctctggtctctcttcttacaagaacattaatcctatcagatcagggccccacccttgtracctgatttaaccttaattacttccttaaacactccatctccaaatacagtcacactgaggattagggcttcaatatgtgaatctgggggagacaaacat

SEQ ID NO: 510982 - DNA, 201 bp, Homo sapiens
cccccactttttctacagtacaaaccatgacatcataattgtgtaggaatacataaaatatacagccatgtatatacatatatatacacacatactgatakatatagacatagatagatgatagatgatagatagatagatagatagatagatagatagatagatagatagatagaaatattgcattatttttgtagggaa

SEQ ID NO: 510983 - DNA, 201 bp, Homo sapiens
aatcccagctactcaggaggcggaggcaggagaatcgcttgaacctgggaggtggaggttgcagtgagctgagatcacgccattgcactccagcctggggsataagagtgagattttgtgtcaaaaaacaaaacaaaacaaaaacattagcctggagtgacagagcaagatgctgtctaaagacaaacaaataaaaaactc

SEQ ID NO: 510984 - DNA, 201 bp, Homo sapiens
ggatcaaagaaaagtcagtaagtagaaaagaaacttatgtaacatagatgctggaactagcaaacaaggactttaatatctgcataaatacgttcaaagamttagaagaaaatatagtcataatgaataaaaatttgaagaatctcagagaagtagaaactaccaaaaagaatcaagtgactattccagaacagaacagca

SEQ ID NO: 510985 - DNA, 201 bp, Homo sapiens
accatgacatcataattgtgtaggaatacataaaatatacagccatgtatatacatatatatacacacatactgatatatatagacatagatagatgatadatgatagatagatagatagatagatagatagatagatagatagatagatagaaatattgcattatttttgtagggaagagtttttgactccagttttcta

SEQ ID NO: 510986 - DNA, 201 bp, Homo sapiens
caattggttgagtttatctgaaggcctgggatcaatagaaaggaaatgttcaggttaagataaaggattgtgggtaccaagttttattgtgcagaggaagmtctcagatagcagacttcagggagagcaggttgcaaaatgtttcttatcggaactaaaagggtgcttggctcttagttgattatctcctggatctggaaa

SEQ ID NO: 510987 - DNA, 201 bp, Homo sapiens
aggcctgggatcaatagaaaggaaatgttcaggttaagataaaggattgtgggtaccaagttttattgtgcagaggaagctctcagatagcagacttcagrgagagcaggttgcaaaatgtttcttatcggaactaaaagggtgcttggctcttagttgattatctcctggatctggaaaggaaggaaggacaaaaaaggg

SEQ ID NO: 510988 - DNA, 201 bp, Homo sapiens
tcttatctacgtaacataatccatgaaaagctcaacacagctaggccaaatctaagacccagacacgcggctgctgttaatgcccactcctgcgcaccgcsccgttccaccgcaggcacaaccttcctaggcctgccccgtccccacacaggggttcccgcttgtcaatcacgctggcccggccctccacttccggaatgt

SEQ ID NO: 510989 - DNA, 201 bp, Homo sapiens
accaaaaacttgtaaatgctcaagttccttatataaaatggtacagtatttgtatatgacttacacacatcttcctctgtcctttaaatcaagcttctccrgccgggcacggtggctcacgcctgtaatcccagcactttgggaggccgaggcggtcgtatcacaaggtcaggagatcgagaccacggtgaaactccgtct

SEQ ID NO: 510990 - DNA, 201 bp, Homo sapiens
aacacagctaggccaaatctaagacccagacacgcggctgctgttaatgcccactcctgcgcaccgcgccgttccaccgcaggcacaaccttcctaggcckgccccgtccccacacaggggttcccgcttgtcaatcacgctggcccggccctccacttccggaatgtttttccgctccggacgggccacccacctttgca

SEQ ID NO: 510991 - DNA, 201 bp, Homo sapiens
taatcccaacactttgggaggccaaggtgggcagattgcctgaggtcaggaatttgagaccagcctggccaacatggtgaaaccccgtctctactaaaaayacaaaaattagctgggtgtggtggtgcacacctgtaatcccagctactcagtaggctgaagcaggagaatcacttgaaaccgggaggcggagattgcagt

SEQ ID NO: 510992 - DNA, 201 bp, Homo sapiens
tacaggcatgtgccaccatgcctggctaattttgtatttttagtagagttggggtttcaccatgttagtcaggctggtctcgaactcccgaccccggtgawccacccgcctcagcctcccaaagtgctgggattacaggcgtaagccactgaccctggcaattttcactttaattcatatgaagaaagtggcaccacgaag

SEQ ID NO: 510993 - DNA, 201 bp, Homo sapiens
ccaggatggtctcgatctcctgacctcgtgatccgccggccgcggcctccgaaagtgctgggattacaggcatgagccacctcacccgggctgctagttawtttttattagtaaaaatgtgactgtctgacctgggtattttaacctggatttactgatttgttttggaataagttttgcagatataaaatactataatct

SEQ ID NO: 510994 - DNA, 201 bp, Homo sapiens
atgagaacatgctttctttccttggagactaagttccacataggggctccaagtctggctcccttcccccagccctgggaaagaattttggaaagtgtgarcatcttcttttggtgcctaattgcctgggggtcatacagcctggagctgctctgttgaggacagcgcatggtggcttccggctggccagcggctgctctc

SEQ ID NO: 510995 - DNA, 201 bp, Homo sapiens
gaaacagacaagtaacatgatagacaaccatgttttcaacctatgggctatgacccagaagtggtttgtgaaatcaatttagggagttgattccagcattaaaaaaaaaaaaaagtactagaatacaataggatagaatagaacagacaatttcaatgagtaatggtaagcactgtttccttgatgtattttactttggaa

SEQ ID NO: 510996 - DNA, 201 bp, Homo sapiens
ttggacatctgatctcctttggccaatgaaatgtgagtgtaagtgaagtgtgtgccacttctgagccaaagttctaagaacttgtgtgtggcccattgtgttgccatctctcctttctctctgcctggagaccagcaatgccccatattgaggctgtcccttcacagaagctgccagaatgatgctgatgtggagcagacc

SEQ ID NO: 510997 - DNA, 201 bp, Homo sapiens
catgcaagcacagaggaaaagtcacgtgaggatgcagcaagaaggtggctgtcacaagcaggaagagggccctcagcaggaaccaaatcagcagagacctygatcttagacctctcagactccagaactgtgagaaatcaatttctgttgtttgggccacctggtctgtgatattttgttatggcagcccaagcagactaa

SEQ ID NO: 510998 - DNA, 201 bp, Homo sapiens
cagtgagccgagatcatgcctctgtactccagcttgggcgatagagcaagactctgtctcaaaaaaaaaaaaaaaaaaaacccacaaacacattgtacagkgatacaaaaatatttcctttctttatatccttaatctataagctttttttattttttaaactttttttgttcgaaactaagatgcaaacacacacattag

SEQ ID NO: 510999 - DNA, 201 bp, Homo sapiens
tatgcctgagtcagattggaaagtaaaacacgatatataaggttaaataaaacccatctgatgagaatttatagtttgtagggcatgactccccagatctyttagacaggaatttgggcaaaaaaaaaaaaatcagagctgggtcctcacttcaaatgtctcctttttaaaataggactttgccttcactttttcacaatc

SEQ ID NO: 511000 - DNA, 201 bp, Homo sapiens
attctttacacatgcaaaatttcccccacaaaggatggcttgcagggccatttcaaaatatggcaaagaaacatgttttgggataaaatattttgattttyttctttgtcacgtaatgttatgcctgagtcagattggaaagtaaaacacgatatataaggttaaataaaacccatctgatgagaatttatagtttgtagg

SEQ ID NO: 511001 - DNA, 201 bp, Homo sapiens
catttcaaaatatggcaaagaaacatgttttgggataaaatattttgattttcttctttgtcacgtaatgttatgcctgagtcagattggaaagtaaaacmcgatatataaggttaaataaaacccatctgatgagaatttatagtttgtagggcatgactccccagatctcttagacaggaatttgggcaaaaaaaaaaa

SEQ ID NO: 511002 - DNA, 201 bp, Homo sapiens
tttcctacaatgttctattttaggttatcaaaggcaattatctttcaaaaactctgatggttcctatagtgtgttttggcagcagagtcagaaaggaagcmtatggtgagacataaaaattttattttatataatataggaattacctgaggagggcttgcaaggaggtgaaggaggatagagttcagtggggatttagaa

SEQ ID NO: 511003 - DNA, 201 bp, Homo sapiens
tgaacggaacagccccgagggctgctggttgcccatttttatagttatttattgatgatatgctaaacaaggggtggattattcatgtttcccctttttakaccacatagggtaacttcctgacgttgccatggcatttgtaaactgtcatggcactggacggagtgtagcagagaggacaatcagaggacactcttgttg

SEQ ID NO: 511004 - DNA, 201 bp, Homo sapiens
ccctcaggctttccccagcatgtaaaggttcacatagtaaatttctcaggctctaagtcatagtaaatttctcaggctctgagtcaggtagaaaccctgtytctactgtgagctttaggatttctgtgttgagaactcaagtctaaatctgtggactttagaatctctgctgtgtgtactcaggactgccattgtggcaca

SEQ ID NO: 511005 - DNA, 201 bp, Homo sapiens
tggtgggacagatacaggtcacacattgcttaacagcagggagaaatgcgtgaggtgattttgtcctcgtgcaaaccttatagagtgtgcttacacaaacytagatgatacagcctactatatatggaatagcaaattgctcctaggttacaaacctgtacagtgtgttagtatactaaatactgtaggcaattgtagcac

SEQ ID NO: 511006 - DNA, 201 bp, Homo sapiens
tataaaagataaaaaatggtacacctgtataggacatgtttaccaaaattaaggctgttggggcacaaataatttgataaaggtttattggggccaagtayggtggctcacacctgtaatctcagcattttgagaggcagaggtgggcagatcacttgaggtcaggagttcaagaccagcctagccaaatggcaaaacctg

SEQ ID NO: 511007 - DNA, 201 bp, Homo sapiens
agatctgagaacgggcagactgcctcctcaagtgggtccctgacccccgagtagcctaactgggaggcaccccccagtaggggtggactgacacctcacayggccaggtactcctctgagacaaaacttccagaagaacgatcaggcagcagcatctgcggttcaccaatatccgctgttctgcagccactgctgctgata

SEQ ID NO: 511008 - DNA, 201 bp, Homo sapiens
tcttttaaaaatacaaaaattggccaggcgcggtggctcacacctgtaaccccagcactttgggaggccggggcaggcagatcacaaggtcaggagtttgrgaccagcctgggcaagatggcgaaacctgtctctactaaaaatacaaaaattagctgggcatggtggcacagcgtataatcacaactactcgggaggcta

SEQ ID NO: 511009 - DNA, 201 bp, Homo sapiens
actgggaggcaccccccagtaggggtggactgacacctcacacggccaggtactcctctgagacaaaacttccagaagaacgatcaggcagcagcatctgyggttcaccaatatccgctgttctgcagccactgctgctgatacccaggcaaacagggtctggagtggacctccagcaaactccaacagacctgcagctga

SEQ ID NO: 511010 - DNA, 201 bp, Homo sapiens
aaaaaaaaaaaattggctgggcgtggtggtgcgtgtctataatcccagctactcaggaggctgaggctcgagaaatcacttgagcctgggaggcagaggtkgctgtgagctgaaatcgtgccactgcactccagactgggaacagagcaagaatctgtctccaaacaacaacaacaacaacaaaaaacggtttattggaag

SEQ ID NO: 511011 - DNA, 201 bp, Homo sapiens
ccgctgttctgcagccactgctgctgatacccaggcaaacagggtctggagtggacctccagcaaactccaacagacctgcagctgagggtcctgtctgtwagaaggaaaactagcaaacagaaaggacatccacaccaaaaacccatctgtacgtcaccatcatcaaagtccaaaggtagataaaaccacaaagatggga

SEQ ID NO: 511012 - DNA, 201 bp, Homo sapiens
gctcgagaaatcacttgagcctgggaggcagaggtggctgtgagctgaaatcgtgccactgcactccagactgggaacagagcaagaatctgtctccaaamaacaacaacaacaacaaaaaacggtttattggaagccaaatggtgtgaacatcatagagtgtacttatgttcacggaaccaagccgggtccggctacgtt

SEQ ID NO: 511013 - DNA, 201 bp, Homo sapiens
tagcaaacagaaaggacatccacaccaaaaacccatctgtacgtcaccatcatcaaagtccaaaggtagataaaaccacaaagatgggaaaaaaacagcasaaaaactggaaactctaaaaatcagagtgcctctcctcctccaaaggaacgcagctcctcaccagcaacggaacaaagctggacaaagaatgactgacga

SEQ ID NO: 511014 - DNA, 201 bp, Homo sapiens
ccactgcactccagactgggaacagagcaagaatctgtctccaaacaacaacaacaacaacaaaaaacggtttattggaagccaaatggtgtgaacatcayagagtgtacttatgttcacggaaccaagccgggtccggctacgttttctcaaggcccaataacaagaagcagaaaaactaggaaagaagagaatttattg

SEQ ID NO: 511015 - DNA, 201 bp, Homo sapiens
gatcaactggcagaaagggtatcagtgatggaagacgaaatgaatgaagtgaagcgagaagagaagtttagagcaaaaagaataaaaagaagtgaacaaarcctccaagaaatatgggactatgtgaaaagaccaaatctacatctgattggtgtacctgaaagtgacggggagaatggaaccaagttggaaaacactctg

SEQ ID NO: 511016 - DNA, 201 bp, Homo sapiens
gaagagaagtttagagcaaaaagaataaaaagaagtgaacaaagcctccaagaaatatgggactatgtgaaaagaccaaatctacatctgattggtgtacstgaaagtgacggggagaatggaaccaagttggaaaacactctgcaggatataggaaaacttccccaatctagcaaggcaggccaacattcaaattcagga

SEQ ID NO: 511017 - DNA, 201 bp, Homo sapiens
gttgggtagtagagccagggttcctaaggtcccacaagccactctcccttagaatggagacagaattttcctgtagatctaataaggcccttattgcaccrtgtatagtaacatacattccaggctcaaaatgaaaaaagggtttatttttcttttaccaaactgtaatcctcatgacaggtgacaatccacacaattata

SEQ ID NO: 511018 - DNA, 201 bp, Homo sapiens
ttgtcagattcaccaaagttgaaatgaaggaaaaaatgttaagggcagccagagagaaaggtcgggttacccacaaagggaagcccatcagactaacagcrgatctcttggcagaaattctacaagccagaagagagtgggggccaatattcaacattcttaaagaaaagaattttcaacccagaatatcatatccagcca

SEQ ID NO: 511019 - DNA, 201 bp, Homo sapiens
tctgcattctctggcattactggagttatctggggtccagactggattttggcagtttgttttagagacaatttagaattctgagctggttcactataagwagtattagtcattttaatacaacctgctgccatcaaaagatctttattgattttaattttccttgcaagttctgaaaacttctgttttatctctactaat

SEQ ID NO: 511020 - DNA, 201 bp, Homo sapiens
tgcacccaatacaggagcacccagattcataaagcaagtccttagtgacctacaaagtgacttagactcccacacaataataatgggagactttaacaccycactgtcaacattagacagatcaatgacacagaaagttaacaaggatacccaggaattgaactcagctctgcaccaagtggacctaatagacatctacag

SEQ ID NO: 511021 - DNA, 201 bp, Homo sapiens
agaatctctgggacacattcaaagcagtgtgtacagggaaatttatagcactaaatgtccacaagagaaagcaggaaagatctaaaattgacaccctaacrtcacaattaaaagaactagaaaagcaagagcaaacacattcaaaagctagcagaaggcaagaaataactaagatcagagcagaactggaggaaatagaga

SEQ ID NO: 511022 - DNA, 201 bp, Homo sapiens
caggcaggagaaggaaataaagggtattcaattaggaaaagaggaagtcaaattgtccctgtttgcagacaacatgattgtctatctagaaaaccccatcrtctcagcccaaaatctccttaagctgataagcaacttcagcaaagtctcaggatacaaaatcgatgtgcaaaaatcacaagcattcttttacaccaataa

SEQ ID NO: 511023 - DNA, 201 bp, Homo sapiens
aatgctgtggaaaacagctgctcaaatgccagaggaatggatgtgcctgaacctgcccctgactcccaggtggtaaggtgtttttcatgtttgtgttcagstctctgtgcctttgctttggcctcaccacgatggaagggaagtgcccacatcgcagggagcacacagaatatgacggctaacatgctacatccagcctgc

SEQ ID NO: 511024 - DNA, 201 bp, Homo sapiens
ccacagatcagtgggtctttccagttccctctcttcttctgcatggcacctattccagagctgtttctcagtgaccaggtgatgaacacacatgcgttttytaagttagaaagcaggactcaactctcccatcattgtgtacctggtaaaaaaaaaaaaaaaaaaaaaaaaaagatgattgttgaccgggcacagtggctc

SEQ ID NO: 511025 - DNA, 201 bp, Homo sapiens
gaagcaatttctgtgtaacgggaggctgtgagacccacagatcagtgggtctttccagttccctctcttcttctgcatggcacctattccagagctgtttytcagtgaccaggtgatgaacacacatgcgttttctaagttagaaagcaggactcaactctcccatcattgtgtacctggtaaaaaaaaaaaaaaaaaaaa

SEQ ID NO: 511026 - DNA, 201 bp, Homo sapiens
aaaaggaggtgaaagcaaagtaagagtggagtaaatgaaagagtggagaagggtcgagaatcaagaggaagaacgcaacatgagagaaaagaagcaatttytgtgtaacgggaggctgtgagacccacagatcagtgggtctttccagttccctctcttcttctgcatggcacctattccagagctgtttctcagtgacca

SEQ ID NO: 511027 - DNA, 201 bp, Homo sapiens
gtgaggatgcagcaagaaggtggctgtcacaagcaggaagagggccctcagcaggaaccaaatcagcagagacctcgatcttagacctctcagactccagractgtgagaaatcaatttctgttgtttgggccacctggtctgtgatattttgttatggcagcccaagcagactaatacagtggccaagatcttgtccaag

SEQ ID NO: 511028 - DNA, 201 bp, Homo sapiens
cctcccaaagtgctaggattacaggcatgagccactgcgcctggcttcatccttacacttccatatggtggcctcaatttactgagaatatgtctgtatgyaataaagattaaaataacacaattttgaaaagtaggtggatacctaatgagaggcaaaaataaaacaaaacaagataaaacctgtctcatttttcatccc

SEQ ID NO: 511029 - DNA, 201 bp, Homo sapiens
aactctgtaaaatattctaagagatttattttgagccaaatatgagtgaccatggtctgtgacacagccttcaggaggtcctgagaacatgtgcccaaggmggttggttggggtgcagcttgggtttatacattttagggagggcatgagacatcaatcacatacatttgagaaacagattggtttcgtccagaaaggtgg

SEQ ID NO: 511030 - DNA, 201 bp, Homo sapiens
atgttgaccaggctggtctcgaactcctgacctcaagcgatccacctgccttggcctcccaaagtgctgggattacagacatgagccactgcatatggccttttttttttttttttttttttttgagacagggtctcactctgtatcctaggctggagcgcagtggtggaatcatggctcattgcagccttgacctccctg

SEQ ID NO: 511031 - DNA, 201 bp, Homo sapiens
tagggtgggagaaaaagtttgaaaccaaattgagctatttttagtccaagaatcaatatgtacaaaatggattgtgcacagatctttattcttatggtccragaagtagagaactggtgtttgaccctactcagaagataggaaaggggagggagggagggaaggaaggaaggaaggaggaggaagggggaagaacgggag

SEQ ID NO: 511032 - DNA, 201 bp, Homo sapiens
ttccaacaaagggttttaatgtagactttttttttttttgcacccatgctgttgattgctaaatggaatagtctgatcgtgaggctgaataaacgtctctyttaaaaaagaaaaagaaaatagattttaagtgttctcacctcacacacacaaatatgtgaagtaatgcatatgttaattagcttatttacccattccaca

SEQ ID NO: 511033 - DNA, 201 bp, Homo sapiens
ctaagagcatgcttataacaatacagaatttgatagataattataacagtttaggaattttacaactgtgatttttaaaaatcataggtgtaatcacagawgtggaaacttggaataaaatgaaatctctatgttcaaggatatgcttggattcagtgtaaagttattatctataaatggatattgtattttcttaaacat

SEQ ID NO: 511034 - DNA, 201 bp, Homo sapiens
tctccaaacaacaacaacaacaacaaaaaacggtttattggaagccaaatggtgtgaacatcatagagtgtacttatgttcacggaaccaagccgggtccrgctacgttttctcaaggcccaataacaagaagcagaaaaactaggaaagaagagaatttattgctgtaaccagttacagggagcaggctggagataattc

SEQ ID NO: 511035 - DNA, 201 bp, Homo sapiens
aacaacaacaaaaaacggtttattggaagccaaatggtgtgaacatcatagagtgtacttatgttcacggaaccaagccgggtccggctacgttttctcarggcccaataacaagaagcagaaaaactaggaaagaagagaatttattgctgtaaccagttacagggagcaggctggagataattccacaagaccaactca

SEQ ID NO: 511036 - DNA, 201 bp, Homo sapiens
cgttgacccgagatgggtcctgcactaggaatgaaagactgtattattttggtttgctccaggttagggagaagcccacgcaaggctcctactgaccataygtttcatttctagctttgctgtctgggtgccgattttgctaggtttaactatttgctcaatgttaaggcagctctgtggaaatctgtgtaactggagtgc

SEQ ID NO: 511037 - DNA, 201 bp, Homo sapiens
gaggcaggagaattgcttgaacccaggaggtggaggttgcagtgagccgagatcatgcctctgtactccagcttgggcgatagagcaagactctgtctcaaaaaaaaaaaaaaaaaaaacccacaaacacattgtacagtgatacaaaaatatttcctttctttatatccttaatctataagctttttttattttttaaac

SEQ ID NO: 511038 - DNA, 201 bp, Homo sapiens
gtgagccgagatcatgcctctgtactccagcttgggcgatagagcaagactctgtctcaaaaaaaaaaaaaaaaaaaacccacaaacacattgtacagtgwtacaaaaatatttcctttctttatatccttaatctataagctttttttattttttaaactttttttgttcgaaactaagatgcaaacacacacattagtc

SEQ ID NO: 511039 - DNA, 201 bp, Homo sapiens
aaaaaaacccacaaacacattgtacagtgatacaaaaatatttcctttctttatatccttaatctataagctttttttattttttaaactttttttgttcraaactaagatgcaaacacacacattagtctaggcctacttatactcaggatcatcaatatcactgtcttccacctctacgtcttgtcccactagaaggtt

SEQ ID NO: 511040 - DNA, 201 bp, Homo sapiens
ccacaaacacattgtacagtgatacaaaaatatttcctttctttatatccttaatctataagctttttttattttttaaactttttttgttcgaaactaaratgcaaacacacacattagtctaggcctacttatactcaggatcatcaatatcactgtcttccacctctacgtcttgtcccactagaaggttcagggaca

SEQ ID NO: 511041 - DNA, 201 bp, Homo sapiens
atgaacagacacttctcaaaagaagacatttatgcagccaaaaaaacacatgaaaaaatgctcatcatcactggccatcagagaaatgcaaatcaaaaccrcaatgagataccatctcacaccagttggaatggcaatcattaaaaagtcaggaaacaacaggtgctggagaggatgtggagaaataggaacacttttaca

SEQ ID NO: 511042 - DNA, 201 bp, Homo sapiens
ttcagggacaataacatgcatggagctgtcatctactatgataacaatgccttctggaacacctcctaaaggacctgccggaggctattttgcagttaactttttttttttaaataagtaggagtatactctaaaataacaacaaagaatagagtaagtacataaaccagtaacatagtcttttattatcattataaagta

SEQ ID NO: 511043 - DNA, 201 bp, Homo sapiens
agccaaaaaaacacatgaaaaaatgctcatcatcactggccatcagagaaatgcaaatcaaaaccgcaatgagataccatctcacaccagttggaatggcratcattaaaaagtcaggaaacaacaggtgctggagaggatgtggagaaataggaacacttttacactgttcttgggactgtaaactagttcaaccattgt

SEQ ID NO: 511044 - DNA, 201 bp, Homo sapiens
accagcatcaccacaaacacaccagtaatccagtatgctatgacgtcagaatagccacagtgtcactaggcaataggaatgttttagctccattataagcytacagaactgctgtcatatatacagtctgccattgatcaaaatgttgttattcagtgcatgactgtaactcccgatttgtggcttgttggacattaacat

SEQ ID NO: 511045 - DNA, 201 bp, Homo sapiens
cttttacactgttcttgggactgtaaactagttcaaccattgtggaagtcagtgtggcaattcctcagggatctagaactagaaataccatttgacccagmcatcccattactggctatatacccaaaggattataaatcatgctgctataaagacacatgcacacgtatgtttatagtggcactattcacaatagcaaag

SEQ ID NO: 511046 - DNA, 201 bp, Homo sapiens
gagagacagaatcaatgggacatgatagatatagatcagatagatgatatagatataaatatagatataggaaaaaggatttattagagggattggctctcacaattatggaggctgagaagttccatcacaggccatctgcgagctggagaccttgggatgtcagtagtgtggttcagcccaagtgtgaaagcctcggaa

SEQ ID NO: 511047 - DNA, 201 bp, Homo sapiens
tgggactgtaaactagttcaaccattgtggaagtcagtgtggcaattcctcagggatctagaactagaaataccatttgacccagacatcccattactggstatatacccaaaggattataaatcatgctgctataaagacacatgcacacgtatgtttatagtggcactattcacaatagcaaagacttggaaccaacct

SEQ ID NO: 511048 - DNA, 201 bp, Homo sapiens
ggactgtaaactagttcaaccattgtggaagtcagtgtggcaattcctcagggatctagaactagaaataccatttgacccagacatcccattactggctrtatacccaaaggattataaatcatgctgctataaagacacatgcacacgtatgtttatagtggcactattcacaatagcaaagacttggaaccaacctaa

SEQ ID NO: 511049 - DNA, 201 bp, Homo sapiens
agggacatggatgaaactggaaaccatcattctcagcaaactattgcaaggaccaaaaaccaaacaccacatgttctcactcataggtgggaattgaacartgagaacacatggacacaggaaggggaacatcacacactggggactgttgtggggtggggggaggggggagggatagcattaggagatatacctaatgct

SEQ ID NO: 511050 - DNA, 201 bp, Homo sapiens
attgagatgaattttagttgttcctaagtactgtgtactgtgactggcagtggctcttaactgttattttttgagacagagtctcactctgttgcccaggytggaatgcagtgacacaatcatggctcactgcaacctctgcctcctgggctcaagctatcctactgcctcagcttcttgagtagctggaatcacaggcat

SEQ ID NO: 511051 - DNA, 201 bp, Homo sapiens
tgctccagtgttttagttttcattgtagggacttttcacttatttggttagttcctaggtatttaattttatttgtagttattgtaaatgggattactttmttgatttcttttttagattgtttgctattggcctatagaaatgctagatttttgtaggttgattttgtatcctgcagctttactgattttgtatgagttc

SEQ ID NO: 511052 - DNA, 201 bp, Homo sapiens
caatggcagtgaggttattcaagctggagggaggaaaacaaacatctggactattatacctaagaaattgggtaagcagctatctgtctacaccagtcacycatggaaaaaccagcccatatttattgtctccatttactttccttaaattgtctatacaaacgtgattttctccctcacatttttaaaattcttattgta

SEQ ID NO: 511053 - DNA, 201 bp, Homo sapiens
ttaagcatccattgaaatgatcatatggtttttgttcttcattttgttgatatgatgatatatcagattgattgatttgcatatgttgaactatccttgcrtccctgggataaatcctatttagtcatgatgaatgatctttttaatgtgttgttgaatttggtttgctagtattttgttgaggatttttgcatcaatttt

SEQ ID NO: 511054 - DNA, 201 bp, Homo sapiens
gaatttatccattttctctagattttctcatttattggcatatagttgatcatagcagccactaatgatcctttgaatttctgtggtatcagttgaatgtktccttctttatctctggttttacttagttgtgtcttctctttttcttagtctgtctagcagtttgtcaattttttttttcaaaaaaaaaaaaaccttttg

SEQ ID NO: 511055 - DNA, 201 bp, Homo sapiens
tgggcgcccgggctcttttgctacgtcgagggccgaagctcaggaaactgcctggaacgctttctcccgagaaaagcaaacaaaactatcgcggtcgcggyccgcgcatcctcctcgtcccctgggcgcgcagaaggctttttgggccacctgcccccaaaagaccgctgggtttcccaaagctttcaagacgcaccccaa

SEQ ID NO: 511056 - DNA, 201 bp, Homo sapiens
ggaccagacggaaacatcccgaggcgcctcccgcagggcgcgcggggccgccgcccgctgcaccgtgaggcgcgccaggaggaggcgcaggcgacgggtcygggactgggaagcggtggggcgcgcgcggcgggggagcctccgccctgtccggctcgcgggggcgggagctcctcccagggctttgtcccggtggcagta

SEQ ID NO: 511057 - DNA, 201 bp, Homo sapiens
ccgcgtggcggcggctccgagcagggggcggggagcggatggagtcagcgcggggggcggagggaaggaccagacggaaacatcccgaggcgcctcccgcmgggcgcgcggggccgccgcccgctgcaccgtgaggcgcgccaggaggaggcgcaggcgacgggtccgggactgggaagcggtggggcgcgcgcggcgggg

SEQ ID NO: 511058 - DNA, 201 bp, Homo sapiens
gttacattaataagatggggagtagttaaaggaaagaaaagatagataaagttttcttagctttaacttggtagggcttgaccctggaacaatgacctatractttgatggtgatgacgcttttttgacttgggtatgatgtgtctatccttttctgctgtgcgaacggcagtctcggtggttagcagcacaaggtagggt

SEQ ID NO: 511059 - DNA, 201 bp, Homo sapiens
taaaaaccctagaagaaaacctagccattaccattcaggacataggcatgggcaaggacttcatgtataaaacaccaaaagcaatggcaacaaaagacaamattgacaaatgggatctaattaaactaaagagcttctgcacagcaaaagaaactaccatcagagtgaacaggcaacctacaaaatgggagaaaattttcg

SEQ ID NO: 511060 - DNA, 201 bp, Homo sapiens
ccataatgttttaagaaaacaaataatataaaatatttgcaacacatatgactgacaaataagcaggtggcatgtgcctcaaagagtgcctacatattgawaagaaaaaagacaaaaaaagaaaaaaagaaaaaaaccctgatagagtgaatagccaaaggatataaacatgtaactcagaggaaatacaaataactaact

SEQ ID NO: 511061 - DNA, 201 bp, Homo sapiens
agggggcagggtcttgttctgtcacccaggctggagtgcagtggtatgatcacagctcactgcagcctcaacctcccgagtatctgggactacaggcacaygccaccatgccctgctaatttttgtattttttgtagagacagagtttcgccatgttgcccaggatggtctcaaactcttgggtttaagtgatccactcac

SEQ ID NO: 511062 - DNA, 201 bp, Homo sapiens
ctcaccaaaaaatagttttgtattttgctttcaacattctgtagtaagtccagttttaagtataaaattatagaattcagtaataatattgaataactatrgatcattatataaaacatttttctcaatgcaaaacataaatacatttaagttttctattacagggagcaaaaatacttttagttagaagctttcagaatc

SEQ ID NO: 511063 - DNA, 201 bp, Homo sapiens
aaaagaggttgcccttgtttattattgatagctatattaatagtataaatcaagtgaagttctataaatgagtgaattccaatttatattctataagtttrtgttattttttgtattatctatgtaagcttagtttttagttttaaataatttttaaaagtgcaagaattacacagagaactcccgtagacccttggcctg

SEQ ID NO: 511064 - DNA, 201 bp, Homo sapiens
taagcttagtttttagttttaaataatttttaaaagtgcaagaattacacagagaactcccgtagacccttggcctgattcaccagtttgtgaacatttcrccgtacttgttttctctttctcactctctccacccctacacacacacacatacatacacacacacacacacacacacacacagagtttatgccatttcag

SEQ ID NO: 511065 - DNA, 201 bp, Homo sapiens
agagacagaatcaatgggacatgatagatatagatcagatagatgatatagatataaatatagatataggaaaaaggatttattagagggattggctctcacaattatggaggctgagaagttccatcacaggccatctgcgagctggagaccttgggatgtcagtagtgtggttcagcccaagtgtgaaagcctcggaac

SEQ ID NO: 511066 - DNA, 201 bp, Homo sapiens
cgaggacagaagaagaaaagtgcatcccagctctggcagacagatggacacattctccctttctgttcttgttctctctgggcccccagcaagttggaccrtgcccacacacattgaggggaatcttccccacttagtccactcagactcatatggtagtctcctctggaaacatcctcacagacacacccagaaacaatg

SEQ ID NO: 511067 - DNA, 201 bp, Homo sapiens
cccaccactcacctcctgctgtgtggccccattcctaacagggtttggggacccttgatgtaaataactgttgttgttgttgttgttgttgttgttgttgytgttgttgttgagacagagtcttactctgctgcccaggctggagttcagtggcatgatctcggctcactgcaaccccaagttcagtggcatgatctcggc

SEQ ID NO: 511068 - DNA, 201 bp, Homo sapiens
ataaataaaccacttctaagagtaactgggaataactgaaggcaggaagttacagtctctgctcagtgacacataggtctttcttcctcctgaccactgarcactgttgacctttatctgagaccctgcacctctggaaagcagtgataatcaggcaggcatggtggctcatgcctgtaatccctgcactttgggaggcca

SEQ ID NO: 511069 - DNA, 201 bp, Homo sapiens
aaaccacttctaagagtaactgggaataactgaaggcaggaagttacagtctctgctcagtgacacataggtctttcttcctcctgaccactgaacactgwtgacctttatctgagaccctgcacctctggaaagcagtgataatcaggcaggcatggtggctcatgcctgtaatccctgcactttgggaggccaaggcag

SEQ ID NO: 511070 - DNA, 201 bp, Homo sapiens
agaataggtaaaaaaaaaaaaaaaaaaattaacaaagtacttgaaatagatcaccatcttatgtttttaatgtttgtgattttttttttttttgagatggrgtctcactctgtcacccaggctggagtccagtggcgcaatctcggctcactgcaacctctgcctcccagattcaagcaattctcctgcctcagcctcccg

SEQ ID NO: 511071 - DNA, 201 bp, Homo sapiens
ggctggagtccagtggcgcaatctcggctcactgcaacctctgcctcccagattcaagcaattctcctgcctcagcctcccgagtaactaggattacaggkgcctgccaccactccctgctaatttttgtatttttagtagagagggggtttcaccatgttggccaggctggtctcgaactcctgaccttgtgatccgcct

SEQ ID NO: 511072 - DNA, 201 bp, Homo sapiens
ttggtacagattaagtctgatgttcattgattttctctctggaagatctgtccaacgctgaaaatgggatgttgaagttaccagctattattatattgggrtctgtctctctttttagctgtaacaatatttgctttatgtatctgggtgctccaacactggtatatggatccagtgttgggtccatatacaattacaatt

SEQ ID NO: 511073 - DNA, 201 bp, Homo sapiens
gtcaccttcaccaaacccaagtgtgtcctccagatagattactgctcaccctgcataatgcctcccaggtaaaccttctcccctaaaagagaaatacctctttttttttttttttaagacagtcttgctctattgcccaggctggagtgcagagtgcagtggctcaatcatggctcactgcagcctcatcctcccaagctc

SEQ ID NO: 511074 - DNA, 201 bp, Homo sapiens
tactcctagtcttttttgatttccattgtcatggaatgtgtttttccatccttttattttcagtctatgtgtgtctttgtaggtgaaatgtgcttcttgtrggcaacagatcactgagtcttgtttttttgttttttgtttttttaatcccttcagccactctgtctttttattggagaatgtagtccatttacattcagt

SEQ ID NO: 511075 - DNA, 201 bp, Homo sapiens
ttattattattattattgagactgagtctcactctgtctcccaggctggaatgcagtgacccaatctcggctcattgcagcctctgcctcccgggctcaartgattctcctacctcagcctcccaagtagctgggattacaggtgcacgccaccatacacagttaatttttatatttttagtagagacagggttttgccat

SEQ ID NO: 511076 - DNA, 201 bp, Homo sapiens
tcagcgtatctgttgtatgttttttgattagaggttaccatgatgcttgcaaatactatcttataacctattattttacactgatagcctaacactgtttkcataaacacacaagcaaaaagaaaactaataaaaactctacaccttaacttcatccccctgctttctaactttttgttgtttttatttatatcttattgt

SEQ ID NO: 511077 - DNA, 201 bp, Homo sapiens
gactgagtctcactctgtctcccaggctggaatgcagtgacccaatctcggctcattgcagcctctgcctcccgggctcaagtgattctcctacctcagcytcccaagtagctgggattacaggtgcacgccaccatacacagttaatttttatatttttagtagagacagggttttgccatgttggccaggctggtctca

SEQ ID NO: 511078 - DNA, 201 bp, Homo sapiens
ctgatagcctaacactgtttgcataaacacacaagcaaaaagaaaactaataaaaactctacaccttaacttcatccccctgctttctaactttttgttgkttttatttatatcttattgtactgtctgtgtcttgaaaagttgttgtagttatttttgatttatcttttagtctacttaaaataagagtaatttacacac

SEQ ID NO: 511079 - DNA, 201 bp, Homo sapiens
ggagcaagacgtctcacatgattagaagcaggaggaagaggggcggagagctgctacacacttctaaacaaccagatcttgcgataactcactatcaggaggaacagtaccgaggggatggctctaaaccattcatcaaggaccaccctcatgatccagtcgcctcccaccaggccccacctccaacattggagattataa

SEQ ID NO: 511080 - DNA, 201 bp, Homo sapiens
gaagaggggcggagagctgctacacacttctaaacaaccagatcttgcgataactcactatcaggaggaacagtaccgaggggatggctctaaaccattcrtcaaggaccaccctcatgatccagtcgcctcccaccaggccccacctccaacattggagattataatttgacatgatatttggtggggatacagattcaa

SEQ ID NO: 511081 - DNA, 201 bp, Homo sapiens
gtggcttctttcttacctcagtgtgatgcagatatcaatgcccaaacaaaagcctttttttttttttttttttttttttgagacagagtcttgctctgtcrcccaggcttgggtgcagtggtgcaatctgcgctcactgcaacctccacctcccaggttcaagctatcttcctgcctcagcctcccaagtagctgggacta

SEQ ID NO: 511082 - DNA, 201 bp, Homo sapiens
caattatagcagtttttatcactctgtgttttaaaaatgtaagagattcttaataaaaactgatgtgattttgtgttgggcattttttaaaggatgttttyttttttaaaaaaaattatttttaaatttttatttatttatttattttgagactgggttatgagactggccaatttttgtatttttggtagagatggggtt

SEQ ID NO: 511083 - DNA, 201 bp, Homo sapiens
ctagagtgtagtggcatgatctcagctcactgcaacctccacctcccgggttcaagcagttctcctgcctcagcctcccgagtagctgggattacaggtgygggccaccatgcctagctaatttttgtatttttagtagagacagggtttcaccatgttggccaggctggtctcgaactcctgacctcatgatccgcccgc

SEQ ID NO: 511084 - DNA, 201 bp, Homo sapiens
atcacttgaggccaggagtttgagaccagcctggccaacatggcaaacccccatctctactaaaaatacaaaaattagccaggcaggtgtggtggtgcatkccggtaatctcagtttcttgggaggttcgggtgggatgatcgcttgaacctgggaggcggaggctgcagtgagccgagatcacgccactgcactccagcc

SEQ ID NO: 511085 - DNA, 201 bp, Homo sapiens
cagcgaggcgctagggggaacgctggcctctgaaactagctctgggaccggggtctgcggccggcccctagctggccccgtctcccatccccagaagggtrttcactggggattctgagctttggctactccagtttcccacgacacgtgagtgtgaggggcgtggaggaggaggcgggctgggttgcgctcacacttaag

SEQ ID NO: 511086 - DNA, 201 bp, Homo sapiens
taattttgtgactgctctgttattatctttaataaatgtcctattccaaacactgaatgtcccagatatgtttaatgtataatgttcatcaaagaagtccrctgtgcaatgtaagtgctaatcaaaaaatgttagtttctagttttaccaaactttatttcactaggtaaggtgcaagaattgagttactaactgacccca

SEQ ID NO: 511087 - DNA, 201 bp, Homo sapiens
atgtaagtgctaatcaaaaaatgttagtttctagttttaccaaactttatttcactaggtaaggtgcaagaattgagttactaactgaccccagcccttcmtaaataagtctaaggaataaataagcaaccaggaagtaaactgttacttctcttgtaacaaccttaagggagacaaagcagtgaagaactacacccaatt

SEQ ID NO: 511088 - DNA, 201 bp, Homo sapiens
gaatctcttaaaaactcaaagcttactggattgatgttgatgtactcttactaaaatcttaactaagtctaggcaaggtggctcatgcctgtaattccagyactttgggaggctgaggcgggcagatcacttgagcccaggggttcaagaccatgggcagtgtggcgaaaccctgcctctacaaaaatgttttaaaaatta

SEQ ID NO: 511089 - DNA, 201 bp, Homo sapiens
agaatttaagacccgactgtagttctccttttcttatctttcaataagtaaatgaaattgtgcaccctgtagtagccaagccatggcccacatggaatcgytatcattacatccttaattgagagtcactaccaaaatattcataactaagggatacttcctgcaccagaaccaaagggaagagatcactaggggatggga

SEQ ID NO: 511090 - DNA, 201 bp, Homo sapiens
cttcacttgactggcctttaaaaaaataaataaataataaattaaaaagagaaactatatttagtgttaggtaaatataacatggctctttaattttgatrtaatcaagaggaaagatattgtgaatctcttaaaaactcaaagcttactggattgatgttgatgtactcttactaaaatcttaactaagtctaggcaagg

SEQ ID NO: 511091 - DNA, 201 bp, Homo sapiens
acccccgtgtagcctgacttggagaccctcccagtaggggctgactgacacctcaaacagccaggtgcccctctgagatgaagcttccagaggaaggatcrgacagcaatatttgctgttctgcagcctctgctgatgatacccaggcaaacagggtctggagtggacctccagcaaactccaatagacgtgcagctcagg

SEQ ID NO: 511092 - DNA, 201 bp, Homo sapiens
atatgggaagaaaaagagtacacaatgaaatgcatcataaccctcttttaagacttgggaaaatgttttcttctgcttatatgtgtaagaaaagctacccygcaagacccccgaaatataacagtctagcagctctcactgatgcttgaaataattcaattcgcttaataaggaaaaataaaattttaaaatatcttgtga

SEQ ID NO: 511093 - DNA, 201 bp, Homo sapiens
attgcagtacactcagttgagattgaaacagaataactgtgttgtgaaattttggttttcagtgaataaattttagtaattgcaagtgtatttaggcaggwccgagtgcagtggtgttgataactaattcattacaatcagttacagatttctttgttccttctccactcccactgcttcacttgactggcctttaaaaaa

SEQ ID NO: 511094 - DNA, 201 bp, Homo sapiens
aacatttcaccgtacttgttttctctttctcactctctccacccctacacacacacacatacatacacacacacacacacacacacacacagagtttatgscatttcagttttttctgaatcatttgagactaggttacatacatcagtctattgtgaaagaaaaatacaaacaactccggaccccaattcacgatgctaa

SEQ ID NO: 511095 - DNA, 201 bp, Homo sapiens
tactggagtactttataattttcatataaaaaggaatttattttagagttttcttttaaatttcaagttctatatcttcatggccagcaatatttccaccrgtatatttttgtgcccaaatatataatgagtttttgcgaatatatctcatgtgttgagaagatatagtctctattatcagtttgttttctatccacgagg

SEQ ID NO: 511096 - DNA, 201 bp, Homo sapiens
tcttttggccttacttctacgatttccgataacaggaggattgcagcctttgcattcttattattttcctttacttttcctttggatttcaccttttgaartatgcacttcacttgttttttgtatgaagtacagcattatgttttgttttaaatatgcatatctttgtcttctaaaggagaataaagtctattcactcta

SEQ ID NO: 511097 - DNA, 201 bp, Homo sapiens
caatcacacattggttcattcaaccacatatatgcatactcagaaaaaaaacaaaatcagttaagaccgggtttttgcattacgtgtgaagagctcagaargaggaagtaccaccttgccctcactcatttcccacaatttatattctcacattagcatttttttttttttttagagatggagtcttgctctatctcccag

SEQ ID NO: 511098 - DNA, 201 bp, Homo sapiens
atatttaagaaagcagccttcttatatggctttattatattgctttatgtatatatatacaaacatatataatatgcatatttttatatatttttgcaatyatatatatattatatataaaacagcttatttattcttccattaggtcaaatacaaagagagtaacaattgttctgataactggtggcttgatgaatttca

SEQ ID NO: 511099 - DNA, 201 bp, Homo sapiens
ctcccaagtagctgggattacaggtgcacgccaccatacacagttaatttttatatttttagtagagacagggttttgccatgttggccaggctggtctcraactcctgacctcaggtgatctgcctgcattggcctcccaaagtgctgggattacaggcatgagccaccgtgcccggccccagctaaatgtttatttttt

SEQ ID NO: 511100 - DNA, 201 bp, Homo sapiens
agggttttgccatgttggccaggctggtctcaaactcctgacctcaggtgatctgcctgcattggcctcccaaagtgctgggattacaggcatgagccacygtgcccggccccagctaaatgtttattttttgtagagataggattttgctatgttgcccaggctggtcttgaactcctgggctcaagcaaactgtctgcc

SEQ ID NO: 511101 - DNA, 201 bp, Homo sapiens
gctaatttttgtatttttagtagagagggggtttcaccatgttggccaggctggtctcgaactcctgaccttgtgatccgcctgcctcggcctcccaaagkgctgggattacaggtgtgagccaccgcacctggccgtgaatattttaatgtaagcttgtatactgtgctacctaaaagaaatgttaaggacaacagctta

SEQ ID NO: 511102 - DNA, 201 bp, Homo sapiens
ttgtacttccttgtctcctagctacctgttctgtaaacaaccttcctgcctttgccatgcccagacaagtccagatatgccttcccgcctagtaacagacwcttttcccacctagtaacggactctccacctaatagaccctattcaattttaaaccttagccaatcgagttagcttagattgtgaggtccaaccccagcc

SEQ ID NO: 511103 - DNA, 201 bp, Homo sapiens
tactcaggaggctgaggcaggagaattgcttgaacccaggaggaggaggttgccactgcactccagcctgggtgacagagtgagactctgtctcaaaaaayaaaaataaaaataaaaataattagttgggtgtggtggcctgagcttgtagtcccagctactctggaggctgaggtaagagaatcgcttgagcccaggagg

SEQ ID NO: 511104 - DNA, 201 bp, Homo sapiens
gcttgtagtcccagctactctggaggctgaggtaagagaatcgcttgagcccaggaggcagaggttgcagtgagctgagattgcaccactgcactccagcstgggtgacagggcgagactctgtctcaaaaaaaaaagaacaaaaattagctgggtgtggtggagcacgtgtgtagtccagctactcagaaggctgaggtg

SEQ ID NO: 511105 - DNA, 201 bp, Homo sapiens
tggaggctgaggtaagagaatcgcttgagcccaggaggcagaggttgcagtgagctgagattgcaccactgcactccagcctgggtgacagggcgagactstgtctcaaaaaaaaaagaacaaaaattagctgggtgtggtggagcacgtgtgtagtccagctactcagaaggctgaggtgggaggatcactggagcctgg

SEQ ID NO: 511106 - DNA, 201 bp, Homo sapiens
ccagggcaggtgtgtcgcttgagctcacaagtaacgagaccagccggggtaacgtggtgaaacctcatctcgacaaaaaatacaaaattagccgggcatgrtggtgtgtgcctgtagtcccaactacttgggagcctgaactggggaggatggcttgagcccaggaggcagaggttgcagtgagctagatcgtgccactgc

SEQ ID NO: 511107 - DNA, 201 bp, Homo sapiens
tgaggtaagagaatcgcttgagcccaggaggcagaggttgcagtgagctgagattgcaccactgcactccagcctgggtgacagggcgagactctgtctcaaaaaaaaaagaacaaaaattagctgggtgtggtggagcacgtgtgtagtccagctactcagaaggctgaggtgggaggatcactggagcctgggaggtca

SEQ ID NO: 511108 - DNA, 201 bp, Homo sapiens
gttcaagcgatccttccaccctagtctcccaagtagttgggactacaggtgcatgccaccatgcccagctaatttttatatttttttttctagagatgggrctttaccatgttgcccaggctggtctcaaactcctgggttcaagcaatccacctgccctagcctcccaaagtgctgggattacaggtgtgaacctctgtg

SEQ ID NO: 511109 - DNA, 201 bp, Homo sapiens
gagaatcgcttgagcccaggaggcagaggttgcagtgagctgagattgcaccactgcactccagcctgggtgacagggcgagactctgtctcaaaaaaaaragaacaaaaattagctgggtgtggtggagcacgtgtgtagtccagctactcagaaggctgaggtgggaggatcactggagcctgggaggtcaaagctgca

SEQ ID NO: 511110 - DNA, 201 bp, Homo sapiens
catctgtctcaccaagctaggtgcagttattgtgcagaaagtttgcttaggggcagaggaagccttatctacgtaagtatttagaatttgttaaaaaaaawaaaaaaggaaaaaggaaagcagtttatagatgaatacttaaatagtttcattttgtacaagtcacctggttttgttcccatgtgttaggaagaaatgagt

SEQ ID NO: 511111 - DNA, 201 bp, Homo sapiens
caggaggcagaggttgcagtgagctgagattgcaccactgcactccagcctgggtgacagggcgagactctgtctcaaaaaaaaaagaacaaaaattagcygggtgtggtggagcacgtgtgtagtccagctactcagaaggctgaggtgggaggatcactggagcctgggaggtcaaagctgcagtaagccatgatcacg

SEQ ID NO: 511112 - DNA, 201 bp, Homo sapiens
ctgggattacaggtgtgagccacagcgcctggcctttttttttttttttcagagacagtctcattctgttgcccaggctggagtgcagtggtgggctcagrtgatcctcccaacctcagcctcccaagcaactggtgctacaggtgaacaccaccatgctcagctgatttaaaaaaaaaaaaaaaagctaattaaaaaaaa

SEQ ID NO: 511113 - DNA, 201 bp, Homo sapiens
taatcccagctactcgggagactgaggcgggagaatggcttggacctgggaggtggaggttgcggtgagctgagatcgtgccattgcactccagcctagasaacaagagcgaaactccatctcaaaaaaaaaagaaaagaaaatagctgatttactgtgttaataatatagcccagcctgggcaacatagggagaccccgt

SEQ ID NO: 511114 - DNA, 201 bp, Homo sapiens
gtggtacaatcatcactccctgcagcctcaacttcccaggctcaagcaatccttctgcctcagcctcccaagtcgctagaattacaggcacctgccaccayacccagctaatttttttgatttttagtagagacaggggcttttttttttttttttgagatggcgtctcattctgttgcccaggctggagtgcagtgtcgt

SEQ ID NO: 511115 - DNA, 201 bp, Homo sapiens
ctcaagcaatccttctgcctcagcctcccaagtcgctagaattacaggcacctgccaccacacccagctaatttttttgatttttagtagagacaggggcttttttttttttttttgagatggcgtctcattctgttgcccaggctggagtgcagtgtcgtgatctcagctcactgcaacctctgtctcccgggttcaagc

SEQ ID NO: 511116 - DNA, 201 bp, Homo sapiens
tacttggaggctgaggcaggagaatcgcttgagcctgggagacgagaggttgcggtgagccaagatcgtgccattgcactctagcctgggcaataagagcraaactgtctcaaaaaaaaaaaaaaagtgatttatgctcatagtggccaaagtacaaagaggaaaatgataatcacttacaatcctgctatataaagaaca

SEQ ID NO: 511117 - DNA, 201 bp, Homo sapiens
accattgcactccagcctgggcaacaagagagaaactctgtttaaaaaaaaaaaaaaaaaaaaaagacataatgaaaagtacatgatactactgtcttggttttttttttttttctttgatactactgtcttgtgcttgtcttaccctttcctaggaagctttataagcgatatgcttttctacgttgcgaagaagaaaga

SEQ ID NO: 511118 - DNA, 201 bp, Homo sapiens
atcttaacgaaaacacataaaatcaaagtatctgtgtgttaataataaacttatgcaattggacatcattcaactttggaaggaaatgctgattggagaattttttttttttttttttttttttttgatagagtctcactccatcacccaggctggagtgcagtggcacgatctcagctcaccgcagcctccacctcctgg

SEQ ID NO: 511119 - DNA, 201 bp, Homo sapiens
aaggtgtaccaccaaattctcattcttcctcttccacaactgacagagaagagaaagaaacttccgcttacctgtagttccaccatggagtactgaaaagsaaaaccagataatgcgggttaaagaaggttgacagcaataagaataagtttgctgaaagcaaaagttcacaaagaattcttcctttccctcttgcccatt

SEQ ID NO: 511120 - DNA, 201 bp, Homo sapiens
atatgttgcccaggctggtccaaagtgattctcctgcttcagcctcccaaagtgttgggattacaggcgtgagccactgcacccagtgtcacaaatcttawtttttttttttttttgagacggagtctcactttgtcacccagatggagtgcagtggtgcagtctcagctcactgcaacctctgcctccctgaatcagatt

SEQ ID NO: 511121 - DNA, 201 bp, Homo sapiens
gttgtgtcctccccacattgatcctggacatcccaagcctctgggactgtgagaaaacacatttctgtgtctaagccacccagtttatggtattttgtcayggcagccggggctgaccaagacaactatgtggcaggtgctacctaccgtatggccctaaaatgttttaacttcacacacctggaaagcaccacagcccca

SEQ ID NO: 511122 - DNA, 201 bp, Homo sapiens
gttctgttttctttttagagacagggtctcactctgttgcccaggctgcagtacagtggcactatcagagctgactgcagccttgaacttctgtgctcaartaatcctttcacttcagtcccttgagtagctaggactgcaggtgtgcaccaccatgcctaattaaaaaaaaatttttttttttgtagagaaaaaggtctt

SEQ ID NO: 511123 - DNA, 201 bp, Homo sapiens
ctgtgaaagaatccaatactgttacaataataataataatgataatttaaacataatttcagtataattataatcgcaattttaaaaaatgtatgtgtatrtatttagagatggggtctcactctgtcacccaagctgaagtgcagtggcacaatcatagctccctgcagccttgaacttatgggctcatgtgatccttcc

SEQ ID NO: 511124 - DNA, 201 bp, Homo sapiens
catctcctgccacttgactttacgtgcattctcctttagcgtaatgaattatttaatactaagactatgcagcccttcatgccctcctctcctcaaagccrtaattacaggtggaatcttatgtgtgggcaagtcctttatgtatatttcaacatgcaagtaattaattaccgtattttcaaatttggaaagcaatatcca

SEQ ID NO: 511125 - DNA, 201 bp, Homo sapiens
atatttttgacagagatggttgggacggggatgagagtggcagcattagtttccatactgagaaatacaaaaaacaaacatctatttcaaaatttgcttaratctggtctttaaattgctcacataatatctaaatagtctcaaagagaatccatcagttaggcatcaatccctaggaggttgtcttgcatctaatgccat

SEQ ID NO: 511126 - DNA, 201 bp, Homo sapiens
agagagaaaccctgtgtcaaaaacaacagaaactcatgtaacttgagcatcaatttcaccctctaaaactgctctgccccataataccttcctttgtaaayagaaccacctcctatccagcctgagaagattctcagctccactgtcttcctcactttccacatatagtaacatccaatgcctgttccaccctacctccca

SEQ ID NO: 511127 - DNA, 201 bp, Homo sapiens
gttatggagagattgtttcttttatcagttcatatttctatgcacttctcattcagtactgtgctatacttttcactgcccttcacctcagctaagatggytttcaccttaagtctcaagacaaaggcagcaaacagccaatacagaattagggcatagagctgggtgtgatacagggtgctaactactcatagtccgctt

SEQ ID NO: 511128 - DNA, 201 bp, Homo sapiens
atctattccccaagtatcataatttggctttcctttttcctctctctctttttttgcattcctttgaagccccttaccttgagaagtttagaggtgatccrtcttcccacctccagccagaattgttcctcagaccaatccagcaaaaggcctcactgaggaaaacttggagcaggctctaagggagaggttgaaaaccaa

SEQ ID NO: 511129 - DNA, 201 bp, Homo sapiens
gagactcttaattcaagcctcagctctgtctttaattctcaccttaggcaaaccatgttagctgagcatctgtgttctcctaatgtaaacaatgagagagrgagagggactgctcaggctcttaaagataattcaagtctaacattttttgaattatttgtttgtgtagtgttatttcctaaaatatttgaatcaagtttt

SEQ ID NO: 511130 - DNA, 201 bp, Homo sapiens
catcagaagcacaatgaaccaaaaaatgttttaaattgtattttattaaaactaaaaacttctatgtgtctcaggacgctatcatgcatgaagagacaacycacagaacaggagtaaatatttgcaaattatatatctgataaagatcaaagatccaaaatatgtaaagaactcttacaattcaacaataaaaagataaac

SEQ ID NO: 511131 - DNA, 201 bp, Homo sapiens
gttaaaggttaaaaaaggccgtgtgcagtcgctcacctgtagtcccagggtgaggccagggcaggtgtgtcgcttgagctcacaagtaacgagaccagccrgggtaacgtggtgaaacctcatctcgacaaaaaatacaaaattagccgggcatgatggtgtgtgcctgtagtcccaactacttgggagcctgaactgggg

SEQ ID NO: 511132 - DNA, 201 bp, Homo sapiens
attgcagcctttgcattcttattattttcctttacttttcctttggatttcaccttttgaagtatgcacttcacttgttttttgtatgaagtacagcattrtgttttgttttaaatatgcatatctttgtcttctaaaggagaataaagtctattcactctattgatatgatgtatgtgttaggcctcagctctatcatac

SEQ ID NO: 511133 - DNA, 201 bp, Homo sapiens
attcttattattttcctttacttttcctttggatttcaccttttgaagtatgcacttcacttgttttttgtatgaagtacagcattatgttttgttttaamtatgcatatctttgtcttctaaaggagaataaagtctattcactctattgatatgatgtatgtgttaggcctcagctctatcatactatttttcttatga

SEQ ID NO: 511134 - DNA, 201 bp, Homo sapiens
atagctcatggtggttttgacttgcatttctctcatgattagtaatcttgggcaacttttcacatgtctgtcagccatttgtatgtcttctttggaaaaaygtccattcaagtcctttgtccgtttttaaattgggctttatgttttcttgctaatgagttatgtgaaatcctttatgtgaattccttatatattttggat

SEQ ID NO: 511135 - DNA, 201 bp, Homo sapiens
catgtctgtcagccatttgtatgtcttctttggaaaaatgtccattcaagtcctttgtccgtttttaaattgggctttatgttttcttgctaatgagttaygtgaaatcctttatgtgaattccttatatattttggatattaactccttatcaaacatatggcttgcaaatattttgtcccattctttaggctgtctttt

SEQ ID NO: 511136 - DNA, 201 bp, Homo sapiens
ccaggaggctgggacgggaagattgcttgagcctgggagatcgaggctgctgtgagccattatcataccactgagcttcagcctgggcaagagaatgagamcctgtctcaggaataaataaataaaaatttttaaaaagtgcattctctgctagagtcctcaggatatcacataagtatagaattctctgacattttcata

SEQ ID NO: 511137 - DNA, 201 bp, Homo sapiens
caattcacttgaattgttgtatatgttgtaaatcaagggtccaatttcaatcttttgcatatagatatccagtttttccaacactatttattgaagagatkatcttttccccattgtgtattcttggcacccttgtcaaagattagatgaccatatatgtttgggtttatttctagtctttctattctgtcccagtgaccc

SEQ ID NO: 511138 - DNA, 201 bp, Homo sapiens
ggatgcgacttcatcaccagattgacctatcaagtgcaaggaaacttggcttcaggagaggctaacttacttctgtgtagtgtagggggaaaagagaaaamacacacacacacacacacacacacacatgtgcgcgcacgcacagcggtaaagcagaagtttccagctgggttttctgtccctttggccacataatcaagt

SEQ ID NO: 511139 - DNA, 201 bp, Homo sapiens
agagctttgtaatgtagtttgaaaccaggaagtagtttgaaaccaggaagtggttcctccagctttgtccttctttctcaagattgctttggttacttggrgtcttttgcgattccatacaaatattaggattgtttttctgatatctgtgaaaaatgccattaaaattttgataggcatcgcattgaatctgtatgttgc

SEQ ID NO: 511140 - DNA, 201 bp, Homo sapiens
ctgagattgcaccactgcactccagcctgggtgacagggcgagactctgtctcaaaaaaaaaagaacaaaaattagctgggtgtggtggagcacgtgtgtmgtccagctactcagaaggctgaggtgggaggatcactggagcctgggaggtcaaagctgcagtaagccatgatcacgccactgccctcaagcctgggtga

SEQ ID NO: 511141 - DNA, 201 bp, Homo sapiens
ttatggggtacggagtgatgttgtaatatatgtaaacaatgtgaaattattaaatcaagctaattaacatacccattacctcaatactcatcttttttttwttttatttttttagagagacaagttttcactctgttgcccagattggagtgcagtggcaccattatagcttactgtaactttgaactcctgggctcaagc

SEQ ID NO: 511142 - DNA, 201 bp, Homo sapiens
gtggcaccattatagcttactgtaactttgaactcctgggctcaagccatcctcccacctcagcctcctgagtagctaagactacaggcacacaccatcaygtctgtctaatttttttaattttctatagagacagggtttcactatgttgcctaggctggccttgaactcctggcctcaagtgatctgcctgccttggca

SEQ ID NO: 511143 - DNA, 201 bp, Homo sapiens
gcaccattatagcttactgtaactttgaactcctgggctcaagccatcctcccacctcagcctcctgagtagctaagactacaggcacacaccatcatgtstgtctaatttttttaattttctatagagacagggtttcactatgttgcctaggctggccttgaactcctggcctcaagtgatctgcctgccttggcatcc

SEQ ID NO: 511144 - DNA, 201 bp, Homo sapiens
ttggctcactgcaacctctgcctcccaggattaagcgattctcgtgcctcagcctcccaactagctgggattacaggcatgcgccaccataccctgctaatttttttttttttttttagtagagacgggtttccccatgttggctgggctggtctcagactcttggccttaagtgatctgcctgccttggcctcccaaagt

SEQ ID NO: 511145 - DNA, 201 bp, Homo sapiens
cattatagcttactgtaactttgaactcctgggctcaagccatcctcccacctcagcctcctgagtagctaagactacaggcacacaccatcatgtctgtstaatttttttaattttctatagagacagggtttcactatgttgcctaggctggccttgaactcctggcctcaagtgatctgcctgccttggcatcccaaa

SEQ ID NO: 511146 - DNA, 201 bp, Homo sapiens
ctctgggataacaggtgtgagccaccatgcccagccaatactcatcatttttttggtaggaagagcatttgaaatgtattcacttagcatttttggaatayacagtacattattattaactatagttctcatactgtgcaatagatctcaaaaaaatattcctcctgtctaactgaaatgttgtacccattgaccaacatt

SEQ ID NO: 511147 - DNA, 201 bp, Homo sapiens
tcaaagaaatagttcccaggtcttggagaaagactttcctgggttgtaaaactgacaaagcttttttaaagattatgcatcgactaaaagtaaaatgaccaaaaaaaaaaaaaaaattggcatctcgaagtatcagagagaaaatttacaagttttctaaagcaaatgctctaagaagagggaggtcaggggcctccctca

SEQ ID NO: 511148 - DNA, 201 bp, Homo sapiens
tacaggcacgccccaccacacccggctaatttttgtatttttagtagagatggggtttcaccatgttggccaggctggtctcgaactcctgacctcaagtracccacctgcctcagcctcccaaagtgctgggattacaggcatgagccaccacgctggacctggagattttgttgtttttgttgttgttattgtttttgg

SEQ ID NO: 511149 - DNA, 201 bp, Homo sapiens
tctaagaagagggaggtcaggggcctccctcaggaggaagcccgcctaaagggaaacatgagcttgtcttggtcttgaatcttctactgcacaaaagcccmtatctgttattcaccatattaattatttggtgatcaagaagcaatgttttaaacatttcacaactgaccagatgttttgttttataagaattatatttag

SEQ ID NO: 511150 - DNA, 201 bp, Homo sapiens
ttgaacccgggaggcggaggttgcagtcagccgagattgcgccactgcactccagcctgggcgacagagcgagactccgtctcaaaataaataaataaatwaattaattaattaatttaattaaatcgaagaggccaggcacagtggctcacacctgtaatgccagcaccttgggaggccaaggcgggtggatcacatgag

SEQ ID NO: 511151 - DNA, 201 bp, Homo sapiens
atccagaatggtgataagggtaccttcccttacagaaagaagataacatatagaatagcaacagctgatgtcaaaaagcctcttttcttttttaaaatagyggtgagtaactattactggaatggaatagataaacctaaatagaggtaaaggggtaatcccaggactcaggcttgcctctcttatagcattataattact

SEQ ID NO: 511152 - DNA, 201 bp, Homo sapiens
gaaacatgagcttgtcttggtcttgaatcttctactgcacaaaagcccctatctgttattcaccatattaattatttggtgatcaagaagcaatgttttamacatttcacaactgaccagatgttttgttttataagaattatatttaggtaccttaccatgctttagttaaccttttaagaaattgattgagggtttggg

SEQ ID NO: 511153 - DNA, 201 bp, Homo sapiens
acccgggaggcggaggttgcagtcagccgagattgcgccactgcactccagcctgggcgacagagcgagactccgtctcaaaataaataaataaataaatwaattaattaatttaattaaatcgaagaggccaggcacagtggctcacacctgtaatgccagcaccttgggaggccaaggcgggtggatcacatgaggtca

SEQ ID NO: 511154 - DNA, 201 bp, Homo sapiens
tctctaaacaaagaaaagaaaagaaaacagccaggcgcggtgactcacgcctgtaatcccagcactttgggaggcttaggtgggcagatcacctgaggtcrggagttcgagaccagcatggagaaaccctgtctctactaaaaatacaaaattagctgggcgtggtggcacatgcctataatcccagctactcagaaggct

SEQ ID NO: 511155 - DNA, 201 bp, Homo sapiens
ggtcaggagttcgagactgacgtggccaacatggtgaaacctcatctctaccaaaaaatacaaaaattagccggacgtggtggcgcttgctttagtcccasctactcaggaggctgatgtgggagaatcacttgaacccgggaggcagaggttgcagtgagccaagatcacaccactgccctccagcctgggtgacaggtt

SEQ ID NO: 511156 - DNA, 201 bp, Homo sapiens
ctttgggaggccttggtgggtgaatcacgtggtcaggagttcaagaccagcctggccaagatgataaaaccccgtctctgctaaaagtacaaaaattagcygggcacggtggcaagcccccgtaatcccaactacttgggaggctaaggcaggagaatcacttgaacccgggcggcagaggttgcagtgagctgagattgc

SEQ ID NO: 511157 - DNA, 201 bp, Homo sapiens
gcaggagaatcacttgaacccgggcggcagaggttgcagtgagctgagattgcaccactgcactccagcctgggagatagagtgaaactctgcctcaaaaatacatacatacatacatacatacatacatacatacatacatacatacatggcaggtggctcatgccggtagtcttaacactttgggaggccaaggcaggc

SEQ ID NO: 511158 - DNA, 201 bp, Homo sapiens
caggagaatcacttgaacccgggcggcagaggttgcagtgagctgagattgcaccactgcactccagcctgggagatagagtgaaactctgcctcaaaaatacatacatacatacatacatacatacatacatacatacatacatacatggcaggtggctcatgccggtagtcttaacactttgggaggccaaggcaggca

SEQ ID NO: 511159 - DNA, 201 bp, Homo sapiens
aggagaatcacttgaacccgggcggcagaggttgcagtgagctgagattgcaccactgcactccagcctgggagatagagtgaaactctgcctcaaaaatacatacatacatacatacatacatacatacatacatacatacatacatggcaggtggctcatgccggtagtcttaacactttgggaggccaaggcaggcag

SEQ ID NO: 511160 - DNA, 201 bp, Homo sapiens
ggagaatcacttgaacccgggcggcagaggttgcagtgagctgagattgcaccactgcactccagcctgggagatagagtgaaactctgcctcaaaaatacatacatacatacatacatacatacatacatacatacatacatacatggcaggtggctcatgccggtagtcttaacactttgggaggccaaggcaggcaga

SEQ ID NO: 511161 - DNA, 201 bp, Homo sapiens
gagaatcacttgaacccgggcggcagaggttgcagtgagctgagattgcaccactgcactccagcctgggagatagagtgaaactctgcctcaaaaatachtacatacatacatacatacatacatacatacatacatacatacatggcaggtggctcatgccggtagtcttaacactttgggaggccaaggcaggcagat

SEQ ID NO: 511162 - DNA, 201 bp, Homo sapiens
tgtgaagggggatgtaaagaaatttgagtaagttttttactagcctgggttctaatataggtaatatataactaacagactgtaataacaactggtttgayagcacagaggaaattattaatgttaactgggtgaggtgagaaatagggagaagatcacatttaaacttgcccttaaagtattaatagaattttttaaaaa

SEQ ID NO: 511163 - DNA, 201 bp, Homo sapiens
gaattcctgtttacccttcacccagtttctccaaatgttaacgtttcacataaccatggtacattcatcaaaactaagaaattaacattggaataatactrttaactaaactccaggcttcatttggatttcgtgaatttttccactaataccctttttctgttccactgtccaatccaggataccacattgcatttagtt

SEQ ID NO: 511164 - DNA, 201 bp, Homo sapiens
tccctcatatgatctggccgcccgtaacctctggagctttctctcctcttcactcattatattgcttttgtcttgctcttttccagacaatctgagcatgytcctgtcttatgatctttgctttagctgttctggttgcctggaaagctcttccccccaaggatcttttggctcactgtctcacctccttcatgtctgcct

SEQ ID NO: 511165 - DNA, 201 bp, Homo sapiens
agggtttcaccatgttggccaggctggtctcgaactcctgacctcatgatccgcccgcctcggcctcccaaagtgctgggattataggcatgagccaccaygcccagcctggagtgattctttcaaagcgcagcattcctctgtttgaaagtctccagtgacttcccatttgttcagaggaaaagccagatccctcatatg

SEQ ID NO: 511166 - DNA, 201 bp, Homo sapiens
agtctggttcttctcctcttggtcctcctgcccacagacgcctcagtctctggaaaaccgtgagttccacacagagagcgtgaagcatgaacctagagtcyttcatttattgcagatttttctttatatcattcctttttctttcctatgatactgtcatcttcttatctctaagattccttccagattttacaaatctag

SEQ ID NO: 511167 - DNA, 201 bp, Homo sapiens
cgagtctaggtcaaggctgcagtgatctgtgatcacaccactgcattccagccttgtcaacagagcaagacactatctctttaaaaaaaaaaaaaaaaaaraaagaaagaaaagaaaagaaaaagaaaaaaacacaaattttctaacccagtgtacaaagctctgtaatactcactaaatttcatgataaattgtaacaat

SEQ ID NO: 511168 - DNA, 201 bp, Homo sapiens
aaatagattaaaataaaaggttagaaagataatccaaggtaattttgttgtaggatttagtgttggtgtaattaacaattacactttcaatattttctaawgacagcttaattggttaaatacctttggaataaaatattcttttttatctagaaactactaagaaagcaatacaatttcaactgcctatggtgattatga

SEQ ID NO: 511169 - DNA, 201 bp, Homo sapiens
gtcacgcaggctagagtgtagtggcatgatctcagctcactgcaacctccacctcccgggttcaagcagttctcctgcctcagcctcccgagtagctgggrttacaggtgtgggccaccatgcctagctaatttttgtatttttagtagagacagggtttcaccatgttggccaggctggtctcgaactcctgacctcatg

SEQ ID NO: 511170 - DNA, 201 bp, Homo sapiens
cacatttaaaattcccctcttcccttttccaactcttgtcaatgttgtattccccctgagagttccataagaataaagcagaaagcatggaaagaaatacmaaagtagggttgtcttacttcatctaggtaacaaatattcagcacaactcttcatcttagaattgcaaagtgggagagtcatcccgggaatatatattag

SEQ ID NO: 511171 - DNA, 201 bp, Homo sapiens
tttttaatttcttttgtagagacagaagctcattatgttgcccaggctggtcttgaactcctggtctcaagtgatcctccctcctaagcctcccaaagtgytgggattacaggcgtgagccatgcacctggccctttactgtacttttgagtcatcacttacccaataggaaacagatcccagagccaggtctctgggaag

SEQ ID NO: 511172 - DNA, 201 bp, Homo sapiens
atagtaaaagcacactcatgactgtctgaaagaaaccaagctgttttcattacctgattaaaaatatacagaaaagtgaccatgttaccatagtgtttgcwttgctgcacccaaagaaggaaactttggatattattagatgtaaatcctaaatatgtgagaagccgacatcaaaagctcggggaatcccaaggtcaggaa

SEQ ID NO: 511173 - DNA, 201 bp, Homo sapiens
aatttcccttctttgtttagtataattatttttaaagagcgtgaaaatgtgtattctatttttaaaatttaatattttttcagtgctgacatattcaactrtgatttattttgattttcaggtctttagcaatgttaattcaaacctgagagttttaaactatgttggaataatggataccattgagaatatagtaaaatg

SEQ ID NO: 511174 - DNA, 201 bp, Homo sapiens
ggacgggaagattgcttgagcctgggagatcgaggctgctgtgagccattatcataccactgagcttcagcctgggcaagagaatgagaacctgtctcagraataaataaataaaaatttttaaaaagtgcattctctgctagagtcctcaggatatcacataagtatagaattctctgacattttcatattcagaattat

SEQ ID NO: 511175 - DNA, 201 bp, Homo sapiens
tgtcaatgttgtattccccctgagagttccataagaataaagcagaaagcatggaaagaaataccaaagtagggttgtcttacttcatctaggtaacaaayattcagcacaactcttcatcttagaattgcaaagtgggagagtcatcccgggaatatatattagtgagtttattgaaattaaaaataatgcaacattttt

SEQ ID NO: 511176 - DNA, 201 bp, Homo sapiens
aggcgagaggatcacttgagcccaggagttcaagaccagcctgggcaacatagtgagacctcatcacaataaataaatttaaatatccacggtcatacaaygtacattctgtatgtcaattcaaaaaaatttttaaatatgtatagaaaagaaaccagaagacaattagtagaaaaagttgtcttgttgaacatatgcaaa

SEQ ID NO: 511177 - DNA, 201 bp, Homo sapiens
cttgagcctgggagatcgaggctgctgtgagccattatcataccactgagcttcagcctgggcaagagaatgagaacctgtctcaggaataaataaataamaatttttaaaaagtgcattctctgctagagtcctcaggatatcacataagtatagaattctctgacattttcatattcagaattattttttctaaagcct

SEQ ID NO: 511178 - DNA, 201 bp, Homo sapiens
catggaaagaaataccaaagtagggttgtcttacttcatctaggtaacaaatattcagcacaactcttcatcttagaattgcaaagtgggagagtcatccygggaatatatattagtgagtttattgaaattaaaaataatgcaacatttttttctgttagaaataagtccagtttgactggttattttgacaataaggac

SEQ ID NO: 511179 - DNA, 201 bp, Homo sapiens
ctgtgagccattatcataccactgagcttcagcctgggcaagagaatgagaacctgtctcaggaataaataaataaaaatttttaaaaagtgcattctctrctagagtcctcaggatatcacataagtatagaattctctgacattttcatattcagaattattttttctaaagccttaataaatgaaagacaggtatttg

SEQ ID NO: 511180 - DNA, 201 bp, Homo sapiens
tattctgaacttgttcttctttttaaattctccagtgaaaggggtgttttccttctcctttcgagtggaatcagactctgctcctagtgctcatctgcttrtttacactgttttacctaatggagaaattgttgcagacactgacaagcttgagattgaaaactgttttgccaacaaggtgggttgttttgtttaagacta

SEQ ID NO: 511181 - DNA, 201 bp, Homo sapiens
ccagatcaacagataaagatctaactcaaaattatacctatcagcaaattgtataataatttagaaaatcaaagacacgatattttagaaactgtcattcttttttttttttgagactgagtctagctgtgttgcccagactggagtgccatggtgtgatctcagctcactgcaatctccacctcccgggttcaagagatt

SEQ ID NO: 511182 - DNA, 201 bp, Homo sapiens
cttgtatctcctggacctaataccccttcttcctaaagcacaaaatggtaagtcttaatccttgaaatgcttttttctgtgctgaccactttgtgttactrtagtacttttaaacttacgcatatgtaactgatatttcagcaaaatttctgttcctgaaatattaaattactaatgtacttatatcagtcttcaaagttt

SEQ ID NO: 511183 - DNA, 201 bp, Homo sapiens
ggtgaaagcccatctctactaaaaatataaaattagccaggcatggtggcatgcacctgtaatcccagctactcaggaggctgaggcaggagaatggcttraacctgggagatggaggttgcaatgaactgagaccacaccactgcactccagcctgggtgacacagtgagactccgtctcataaaaaaaaaaaataaagg

SEQ ID NO: 511184 - DNA, 201 bp, Homo sapiens
gtggtttttttcagaagctctgtttgtctgtttttggaagtgacattttctcaataatacttaattgactgcaggtgtgcagcttacaggctccaagtacrtatacatagactcatcagtggtgaagattagttttgagaatatggatatgtcctacaaacagggactcccttattttggccaggtaagaaagcaatcatt

SEQ ID NO: 511185 - DNA, 201 bp, Homo sapiens
cccacagtgcacagcacagttccgagccgcaaaggcttgcagtacccaaaatgccatttgccattttcacaaaaacccagttcattctcatctcaagatctttttttttttttttttgagacagagtctcgctctgtcgcctaggctgcagtgcagtggcacgatctcggttcactgcaacctccgcctcccgggttcaag

SEQ ID NO: 511186 - DNA, 201 bp, Homo sapiens
tttcttctacctcttttggttttttttttctagcatcttgttataaatacttatgttaaacttccatgttttcagatttatacaatttttcctgaatactwctttcctcctcacaggtgtttttctatactatttttattttttaaattatgaaaaaatgcacatatcaaatttaccatcttaacaatttttaagttcaat

SEQ ID NO: 511187 - DNA, 201 bp, Homo sapiens
taccactgagcttcagcctgggcaagagaatgagaacctgtctcaggaataaataaataaaaatttttaaaaagtgcattctctgctagagtcctcaggayatcacataagtatagaattctctgacattttcatattcagaattattttttctaaagccttaataaatgaaagacaggtatttgtatattaaatctttgg

SEQ ID NO: 511188 - DNA, 201 bp, Homo sapiens
taggcagcctacaaggccaatgaaaattgccaggctcatggctgggtgttgcctcaataccctcagcccgagtactttgcatatcgattttactccaagaygaatagcttcctaaagattgtccaagagatggaagaactgagatgcaaccagcagaagagggtgctagtgcactgcattctcaatatggaagactttgaa

SEQ ID NO: 511189 - DNA, 201 bp, Homo sapiens
attttcacaaaaacccagttcattctcatctcaagatctttttttttttttttttgagacagagtctcgctctgtcgcctaggctgcagtgcagtggcacratctcggttcactgcaacctccgcctcccgggttcaagcaattctcctgcctcagcctcctgagtagctgggattacaagcgcctgccaccacacccagc

SEQ ID NO: 511190 - DNA, 201 bp, Homo sapiens
ggtgctagtgcactgcattctcaatatggaagactttgaagacaaaacctacacagcagacttcaattatttggtatgagctgaaaatattcttccacaaycaaaattgcttcttttctttaaaacttctttgaacctaatgaaatccctgtacctatatgccacgaggaagctcaaagttaacataaatgataaaactta

SEQ ID NO: 511191 - DNA, 201 bp, Homo sapiens
tataggcttacaactggactttaaaatatgattttatttaaatgtcacggagcagcctggcgtggtgactcacacctgtaatcccagcactttgggaggcygaggcgggcagatcacctgaggtcaggagttcgagaccagcctggccaacatgacgaaaccccgtctctactaaaaatacaaaaattagccgggaatggt

SEQ ID NO: 511192 - DNA, 201 bp, Homo sapiens
tcataacaaaagtctgctgatgcaaatttgcacacagttgctgataaaggtgaagtgagagaagcttttttctggagcacccccagcttgctactttattytcttttctttaaattttgggtggagatggatgaacaggccttgcttataccttgcatatcaaacacacctttcagaaaaccagacaagcactgggagact

SEQ ID NO: 511193 - DNA, 201 bp, Homo sapiens
ttatcaggccgggcacagtggttcatgcctgtaatcccagcactttgggaggctgaggcgggcggatcacgaggtcaggagatcaagaccatcctggctawcatggtgaaaccccatctctactaaaaatacaaaaattagctgggcgtggtggtgcatgcctgtagtcctagctactcgggaggctgaggcagaagaatc

SEQ ID NO: 511194 - DNA, 201 bp, Homo sapiens
atgtaaagacatgtgaataggcacaatgccaaatgaaaaaataattacttaattaatagtgcattaattatattccaaacactactataatgggaaagggycattgtccttccctttcttttccaagaaagacaggtaagtacttttacattcaaacaagaagggatttttaaaaagaaacaaaagtagactgaagtttga

SEQ ID NO: 511195 - DNA, 201 bp, Homo sapiens
agatcaagaccatcctggctaacatggtgaaaccccatctctactaaaaatacaaaaattagctgggcgtggtggtgcatgcctgtagtcctagctactcsggaggctgaggcagaagaatcgcttgaacccagaaggcggaggtcgcagtgagccaagatcacgccactgcactccagcctggcgacagagcaagactcc

SEQ ID NO: 511196 - DNA, 201 bp, Homo sapiens
agaaacaaaagtagactgaagtttgacgtaataagaaatgttcaactatttctttcttttataatttatggaataggttatgaactcctcctagaaatgcyttataaattaaatttggtgggtcggggcagtctctttggcagtgggtaggatggctagaaactcagtggagggtttctgcaagatgacagtcagctatct

SEQ ID NO: 511197 - DNA, 201 bp, Homo sapiens
ggtgcagtggctcatgcctggagttccagcactttgagaggccaaggcaaaaagatcgcttgagtccagttcaagactagcctgggcaaaatagtgacatsctgtctcaacaaaagaacaattaaaaagttagctaggggccgggcacggtggctcatgcctgtaatcccagcactttgggaggccgaggtgagcagatca

SEQ ID NO: 511198 - DNA, 201 bp, Homo sapiens
ctataatcccaggactgtgggaggctgaggtgggaagatcggttgagcccagagtttgagaccagcctgggaaacatagtgacaccttgtgtttacagaatttttttttttttttttttttttgagatggaatctcgctctgtcgcccaggctggagtatagttgcgccatctcagctcactgcaacctccacctcctggg

SEQ ID NO: 511199 - DNA, 201 bp, Homo sapiens
acatcaaaaaatagacctatcagaataaacttttggcctgaattcctcatgttatgtatttaaatatttagactaggactggtcacttctagatgtaattsttccaaaggttcatattttttttgacttggcctgggaagagatagaattaaatatacaaggaaaatttaagtaagttttgttaacgtgtaattcaatttg

SEQ ID NO: 511200 - DNA, 201 bp, Homo sapiens
tgggcaaaatagtgacatcctgtctcaacaaaagaacaattaaaaagttagctaggggccgggcacggtggctcatgcctgtaatcccagcactttgggakgccgaggtgagcagatcacctgaggtcaggagttcgagaccatcctggtcaacatggtgaaaccccatctctactaaaaatacaaaaaatagctggccgt

SEQ ID NO: 511201 - DNA, 201 bp, Homo sapiens
gggaagatcggttgagcccagagtttgagaccagcctgggaaacatagtgacaccttgtgtttacagaatttttttttttttttttttttttgagatggartctcgctctgtcgcccaggctggagtatagttgcgccatctcagctcactgcaacctccacctcctgggttcaagcaattgtcctgccacagcctccaca

SEQ ID NO: 511202 - DNA, 201 bp, Homo sapiens
aagaaaattatatgactataataacaaggagcacagtggcttaaaattttaagctaatatgggctgtgaacatgtcatatacatttttgtgccttgagcayttggatcagtccttggaacacatctgacactctacgagtgttttaaaattttatttaatctgaaaagaatgaagaaggaatgagttctggtgttctattg

SEQ ID NO: 511203 - DNA, 201 bp, Homo sapiens
cggtggctcatgcctgtaatcccagcactttgggaggccgaggtgagcagatcacctgaggtcaggagttcgagaccatcctggtcaacatggtgaaaccscatctctactaaaaatacaaaaaatagctggccgtggtggtgtgcagttgtaatcccagctactcaggaggctgaggcaggagaatcgcttgagcccggg

SEQ ID NO: 511204 - DNA, 201 bp, Homo sapiens
cagaagaatcgcttgaacccagaaggcggaggtcgcagtgagccaagatcacgccactgcactccagcctggcgacagagcaagactccgtctcaaaaaawaataataataaataaataaataaataagtaaatatattatcaggtagtcaatccctttgctttacagaaggatgtttcattgcatcccatgatacaaaat

SEQ ID NO: 511205 - DNA, 201 bp, Homo sapiens
gtggttgggccacagtttgaatctacatgttttagggagacatacgacattaatcgatacatttgtggtacacgttggttaggtctagaaaggcaggacasctcaaagggggcagggaactgtgcttccaggtcctaggtggattcaaagattttctgattggcacttgattaacatagtttatctaaagagctggaatcg

SEQ ID NO: 511206 - DNA, 201 bp, Homo sapiens
tgtgcagttgtaatcccagctactcaggaggctgaggcaggagaatcgcttgagcccgggaggcagaggttgcagtgagccgagatcatgccattgcactycagcctgggccacaagagcaaaactctgtctcaaaaaaaaaaaaaaaaaagctagaggtcggacgcggtggcttatgcctggaatcccaacactttggga

SEQ ID NO: 511207 - DNA, 201 bp, Homo sapiens
gaaactatttcttgtttctacctccagaatctcttctttccttttttttttcttttttgagacagagtctcactttatcaccaaggctggagcacagtggygcaatctcagctcactgcaacctgcccctcccaggttcaagcaattctcctgcctcagtctcccaagtagctggaattacagatgcctgctaccacaccc

SEQ ID NO: 511208 - DNA, 201 bp, Homo sapiens
cacaccctgattatgttcagtagtggtaactcagaggagagcactgtgagcctgccctcatgacacagccccaccacagatacttatgcttgtgggtcttyacacaaagagaggccttaagggagagaacagatgagcattgcttaccattggttggtatgaaccagctgcctactgaggctctggacaaagggcttctca

SEQ ID NO: 511209 - DNA, 201 bp, Homo sapiens
agcctggtctcaagctcctgaccttgtgatccacccacctcggcctcccaaagtgctaggattacaggccaccacatccagccgttttcttttttcttttyttttttttttctgaggcagagtctcactctgttgcccaggctggaatgcagtggtgcaatctcagctcactgcaacctctgcctcccgggttcaagtgat

SEQ ID NO: 511210 - DNA, 201 bp, Homo sapiens
gccatcatccctaagttagagcatggtgatgccttctcactgagatacaaagaataaagtgctttaagaactcgtagctctggccgggccagtggctcacrcctgtaatcccagcactttgggaggccgaggcaggcggatcacctgaggtcgggagtctgaggccagcctgaccaaaatgaagaaaccccgtctctacta

SEQ ID NO: 511211 - DNA, 201 bp, Homo sapiens
gtggctcacgcctgtaatcccagcactttgggaggccgaggcaggcggatcacctgaggtcgggagtctgaggccagcctgaccaaaatgaagaaaccccstctctactaaaaacacaaaaattagccgggcatggtggcacatgcctgtaatcccagcttctcgggaggctgaggcaggagaatcgcttgaatccgggag

SEQ ID NO: 511212 - DNA, 201 bp, Homo sapiens
ataattgtgcattaccatcgacaaagctgtctgctgtgagggattacttattttattctgagaatttgaatttcccacaactgaacaaggactcttaacgyggatgttagcaggctttgaaattccaactgctgttgtgtttgttctgagtttatcacactccttttcttttgcagtatctgaaggttgctttttccacag

SEQ ID NO: 511213 - DNA, 201 bp, Homo sapiens
tttgttttaagactcttcaggtaagaaaaggtttaagaattgtaggccaggcacagtggctcacacctataatcccagcactttgagaggccaaggcgggkggatcacctgaggtcaggagtttgagaccagcctgaccaacatggtgaaaccccatctctactaaataaaaaaaaattagcagggcatggtggtgtacgc

SEQ ID NO: 511214 - DNA, 201 bp, Homo sapiens
ggaggtcaaggctgcagtaagccacgatcacaccactgtactccagcctaggtgacaaaatgagaccccatctcaaaaaaagaaaaaaaagaaagttgagkatctgaatccatcatgcaatgtacgcttccccagcaaagaaaacatgaattaaaaggacttatgtggctgggcacaatggctcatgcctgtaatctccac

SEQ ID NO: 511215 - DNA, 201 bp, Homo sapiens
aagactcttcaggtaagaaaaggtttaagaattgtaggccaggcacagtggctcacacctataatcccagcactttgagaggccaaggcgggtggatcacytgaggtcaggagtttgagaccagcctgaccaacatggtgaaaccccatctctactaaataaaaaaaaattagcagggcatggtggtgtacgcttgtaatc

SEQ ID NO: 511216 - DNA, 201 bp, Homo sapiens
ttacaggcgtgtgccaccagacctggccttgcctgaaacttaaaagagaaataataatagttatatattacagtactcccagatagccatatctagcctttttttttttttttttttttttttttgtgagatggaatctcactctgtcacccaggctggagtgcagtggtgcgatctcagctcactgcaacccccgcctcc

SEQ ID NO: 511217 - DNA, 201 bp, Homo sapiens
aacttgacacaagttgaacagaaactgattatttttggtgctgatccaagagaaatgtatttttaaatactgtacatcctggatctttgttgagtatttartatattgatatatatttttataaggtgaggtaactcaaaatttaagtcttaaatattgatgcagtcatctgtcttctctacattaccatagccagttact

SEQ ID NO: 511218 - DNA, 201 bp, Homo sapiens
actccatacttgacatattatctcttcctggtttttctgatattcaaagccctggttctcacctatctgacccttctgcttctccttctgggatatatgtwtatatatttttagattaactttttgaaggccaggcatggtgtctcatgcctgtaatcccaccactttcaaaggccaaggcaggcagatcactttgagctc

SEQ ID NO: 511219 - DNA, 201 bp, Homo sapiens
tctcttttctctgtctctttcttatctttcattattattacttttttttgagatggtgtgttgctctgtctcccaggctggagtgcagtggcatgatcacrgctcactgcaacacactctgtctcccgggttcaagcgattctgatgcctcagcctcccgattagctgggattacaggcgtctgccactacgcttggctaa

SEQ ID NO: 511220 - DNA, 201 bp, Homo sapiens
attttttttttgtagagatgggttcttgctttattgctcaagctggtctcgaactcctgacttcaagtaatcctccctcctcatcctacaaaagtgctggrattataggtgtgagccaccacgcctgacctgaaaaaactcttggaaatgtctgtctgaatcttccatttaccttcatttctagcagaaactgggaaattt

SEQ ID NO: 511221 - DNA, 201 bp, Homo sapiens
cggcctcctaaagtgcttaggtttacaggcgtgagccactgcactggaccctgtagaattttttcattcagttctgctgtgaagactgaagtgctgaatcyttaaatatagtttgtggacctctagattttaaactgtgaaacccagtttaaagattttttttttttttttttttttttttgagacagagtctcgttctgt

SEQ ID NO: 511222 - DNA, 201 bp, Homo sapiens
aataaaattaaccatttttaccaggtatatgcaagcaagcatgcaggtaccaacaaggctttgatttttttttaagcaaacatgtcttatttatttataarctagtgccaagtgatgagcatgtaaatgatgggcagtatttatgaaatttcagaaagtggttgtactaaagagcacttgtagcttcagttgtggttttaa

SEQ ID NO: 511223 - DNA, 201 bp, Homo sapiens
ttcttccaccttggcctcccactgttgggatttcaggcatgagccactgtgcctttttttttttttttaagagataaagagtctccctttgttgcccagartggagcacagtggctattaacaggccatcatagctcactacagcctcaacctcctgggctcaagggatcttcctgcctcagcctcctgggatagctggga

SEQ ID NO: 511224 - DNA, 201 bp, Homo sapiens
tctaaaaaaatctctgtacatttgttggatcttccttgcctgctttccaattcaatcactttgtgacctgttttaattcattctttttcagttttgttctkttgtttttcctctgtgctgcttttaaagttttctctgaacaattttctcttgatgtccttgtactttagagtttatttatgatataattttgtctagttt

SEQ ID NO: 511225 - DNA, 201 bp, Homo sapiens
cttcatcctttccctcctcacctctcatgatcacactgtgaaatttatagcagctgctacaccacaattttctgtggcagtgtcttgtgctatgactcacractcctgtttatcagttttgccctcaatgtttcaagttcatggctcacttctgctactgactttagtcagctcaaatcctgagagtcactatatcagaat

SEQ ID NO: 511226 - DNA, 201 bp, Homo sapiens
tggaagaggaagctgcaacaacagagtcaaagcacaatcctgagtcagatgacaggttgaaagaaaagagaaagtcagggaaggatatcgcatcttaaagyaatttggcctagtgggaactgagatccaggccataaagattccttttctagatgtgtcaggaacttgctctaaagtctaaggtaaccaccaacacctgta

SEQ ID NO: 511227 - DNA, 201 bp, Homo sapiens
tgagatgggaaagtattggaaggttttgagcagagtaatgacaagatctgatgtgccttctaaaatgactgttgtggctgccatgttgggtagactatatyagggcaggggtagaggcaagagaccagttagggagctctttcagtatttgaggtgagaggctggatgctgtggctcacgcctataatcctagcactttgg

SEQ ID NO: 511228 - DNA, 201 bp, Homo sapiens
tgtacatttgttggatcttccttgcctgctttccaattcaatcactttgtgacctgttttaattcattctttttcagttttgttctgttgtttttcctctrtgctgcttttaaagttttctctgaacaattttctcttgatgtccttgtactttagagtttatttatgatataattttgtctagttttcctgagttcaata

SEQ ID NO: 511229 - DNA, 201 bp, Homo sapiens
tgcctctggaatggaaaaaacagtcactggagacaaaataggaaaaagactttttaccctattttcttttgtaccttttgaattttgaaccatgtaaacayattatctactcgaaattgaaatacataaaatttaaataaaaataatctacatttcagaagtgctttgtaaactgtcgttattaaaagagcagtaagttta

SEQ ID NO: 511230 - DNA, 201 bp, Homo sapiens
gttgtgggtagaggctctcttgcaacccaggaagcagtgggcagcggcagctcatcccactggatcctgagagtctctggccaaccaccccatcttgcctsttacttcacttttcaagtgatttacatgagcaggacaactaacctgaagggaactgtgaggctcaggctggggctactctccagtgggctctcagagtcc

SEQ ID NO: 511231 - DNA, 201 bp, Homo sapiens
gggctgtgaacatgtcatatacatttttgtgccttgagcatttggatcagtccttggaacacatctgacactctacgagtgttttaaaattttatttaatytgaaaagaatgaagaaggaatgagttctggtgttctattgcacagtaggctgacaatagtttacagtaagatttagcaaattacaaaatagctagatgag

SEQ ID NO: 511232 - DNA, 201 bp, Homo sapiens
tagaaacgggatttcaccatgttggccaggctagtcccaaactcctgacctcaggtgatctgcctgcctcagcctcccaaagtgctgggattacaggcatragccagcgcgcccagcccagaatcttttctaataatgtttctgtttctccttgaaaatgtccttttttttttttggcctcattaactacagtaaacctga

SEQ ID NO: 511233 - DNA, 201 bp, Homo sapiens
tccttggaacacatctgacactctacgagtgttttaaaattttatttaatctgaaaagaatgaagaaggaatgagttctggtgttctattgcacagtaggmtgacaatagtttacagtaagatttagcaaattacaaaatagctagatgagaggtttttgaatgtcttcaccataaaaaaaaaagataaatggatgaagta

SEQ ID NO: 511234 - DNA, 201 bp, Homo sapiens
ttaaattccctgtctccaaggatctgcatacctcttcttgtgatctgattatttccccttagccatgttttttggaagcttccacttccaggcccattcastccaagccctttccctgtgtgctgtactgggaactgttgagtccgaaaactatgatttgtatttttaacaatgctagactttctcttacctggagttgac

SEQ ID NO: 511235 - DNA, 201 bp, Homo sapiens
tttttccctgagggcttttcattgggttcatctgattcaaattctgaatgtttcatatatcaaccaaaattttcacacacatgttgatggatggtcaagtrttacattcaaataaggctacaatagaagtaagaatgccaatttattgatttataatgggagtatctggttttagatataagcatattccttttccttaat

SEQ ID NO: 511236 - DNA, 201 bp, Homo sapiens
ccccttagccatgttttttggaagcttccacttccaggcccattcagtccaagccctttccctgtgtgctgtactgggaactgttgagtccgaaaactatratttgtatttttaacaatgctagactttctcttacctggagttgacttggtgtgtgtttcttctcatttctccatgccattctgctctctttttctctgc

SEQ ID NO: 511237 - DNA, 201 bp, Homo sapiens
cagacaccttgtacaggagagctctgtctggcatgtggagggtgcccctctgggacgaagcttccagaggaaggaagagggagcaatctttgctgttctgmagcctccactggtgatacccaggcaaacagggtctggaatggacctccagcaaactccagcagacctgcagcagaggaccctgactgttagaaggaaaac

SEQ ID NO: 511238 - DNA, 201 bp, Homo sapiens
agtggtaaacatggagagaactgagaggagatacagagaggtggaaggagaaggaagaaggagaggaaactctgcaagggaaacttgggcaaatgtctacrtttatttacttgtctgataaggaaatggtggagtataggaatggccaataatctaagacaaaaacaattagtgctagatacagaaatcaaaattgaagca

SEQ ID NO: 511239 - DNA, 201 bp, Homo sapiens
aatgcaaggaagctaagaaccttgaaaaaaggttagaggaattgctaactagaataactagtttagagaagaacataaatgacctgatggaggtgaaaaayacagcatgagaactttgtgaagcataacaagtatccatagctgaatcaatcacacggaagaaaggacatcagagattgaagacaacttaatgaaataaag

SEQ ID NO: 511240 - DNA, 201 bp, Homo sapiens
tggaaaccgaacaacctactcctgaatgactactgggtaaataacgaaattaaggcagaaataaataagttctttgaaacccatgagaacaaagaaacaaygtaccagaatctctgcgatgcagctaaagcagtgtttagagggaaattcatagcattaaatgcctacaggagaaagtgggaaagatctaaaatcgacacc

SEQ ID NO: 511241 - DNA, 201 bp, Homo sapiens
gataaaggggatatcaccactgatcccacagaaatacaaactaccatcagagaatactataaacacctctatgcaaataaactataaaatctagaagaaaytgataaattcctggacacatacaccctcccaagactacaccaggaataagtcgaattcctgaatagaccaataataagttctgaaattgaggcagtaatt

SEQ ID NO: 511242 - DNA, 201 bp, Homo sapiens
gttgtacaatgagaacacatggacacagggaggggaacatcacacaccggggcctgttagggggttgggggctaggggagggatagcattagaagaaatayctaatgtagatgacgggttgatggatgcagcaaaccaccatggcacgtgtatacctatggaacaaacctgcatgttctgcacatgtatcccagaacttaa

SEQ ID NO: 511243 - DNA, 201 bp, Homo sapiens
caggaaagaagtatattttcattaacatgcttaagaatagtttcactgaattggaagctgagagtattatctggccatttggagattcccacatccagtcstctgggataacacagccaaactgtcaagaaacagtacatttactgatatactttggggacaggaggatgaatgcaactaaatggatctcatggagcccct

SEQ ID NO: 511244 - DNA, 201 bp, Homo sapiens
cctcgtgcaggggccatgctaataatcttctctgtattgttccagttttttagtatatgtgctgccaaaacaagcatgactctgtctttaaaaaaaaaaamaacaacaacaacaacaacaacaaatgctggccaggcattatgctgaggtgggtggatcacctgaggtcaggagttcaagaccagcctgaccaacatggcg

SEQ ID NO: 511245 - DNA, 201 bp, Homo sapiens
tggcatgatttcggctcactgcaagctcagcctcccgggttcacgccattctcctgcctcagcctcccgagtagctgggactacaggtgcccgccaccacrcccggctaatattttgtatttttttttagtagagacagggtttcaccgcgttggccaggatggtctcgatctcctgacctcatgatccgcctgcctcagc

SEQ ID NO: 511246 - DNA, 201 bp, Homo sapiens
tgcaggggccatgctaataatcttctctgtattgttccagttttttagtatatgtgctgccaaaacaagcatgactctgtctttaaaaaaaaaaaaaacarcaacaacaacaacaacaaatgctggccaggcattatgctgaggtgggtggatcacctgaggtcaggagttcaagaccagcctgaccaacatggcgaaacc

SEQ ID NO: 511247 - DNA, 201 bp, Homo sapiens
cctgctgactgcagagtcctagggcctggagtaaacttaggtggtagccaggtagtggttacaccgggccttgggcaagatcgagtgctatcctggcttcrggtctgaaccggtacagtcccagttgtggtggccacggtgtgctggtgacaccccaccccccaaggtccaggtggtttagcacagagagagactccattt

SEQ ID NO: 511248 - DNA, 201 bp, Homo sapiens
agcctgaccaacatggcgaaaccccgtctctactaaaaatacaaaaattagctgggcatggtagtgtgcacctgtaatcctagctacttgggaggctgagrcaggagaattgcttgaacctgagaggtggaggttgcagtaagccaatatcgtgccactgcactacatgcactacagcctgggcaacagagtgagactccg

SEQ ID NO: 511249 - DNA, 201 bp, Homo sapiens
cctaactcttcaatgcccagacatagacaaatatctacaaggatgaagaccatccaggaaaacatgacctcgcccaaagaactaaggcaccagggccaggygcggtggctcacgcctgtaatcccagcactttgggaggcagaggcgggcggatcacgaggtcaggagatcaagaccatcctggctaacacagcgaaaccc

SEQ ID NO: 511250 - DNA, 201 bp, Homo sapiens
gagattactggattgttgtgaaaagaaactcaaggaagacagtgacacaccaatttgctgttaaaagatatggtaaccagttgctatttgtagctgtcctrtgtagatgaagagtttaaaggatggaccaacacaacatttgtgttagacttaggcaggagtaggtgaagctagaactggttttctttgtctcccttcctt

SEQ ID NO: 511251 - DNA, 201 bp, Homo sapiens
tacttgggaggctgagacaggagaattgcttgaacctgagaggtggaggttgcagtaagccaatatcgtgccactgcactacatgcactacagcctgggcracagagtgagactccgtctcaaaaaaaaaaaaaaaaaaaaaaaacaggaatgccaacagccaccagaagctaaaagaggcaaggaagggattttccccta

SEQ ID NO: 511252 - DNA, 201 bp, Homo sapiens
tttgggaggcagaggcgggcggatcacgaggtcaggagatcaagaccatcctggctaacacagcgaaaccccgtctctactaaaaatacaaaaaattagcygggcgtggtggcgggcgcctgtagtcccagctactcgggaggctgaggcaggagaatggcgtgaacccaggaggtggagcttgcaatgagccgagattgt

SEQ ID NO: 511253 - DNA, 201 bp, Homo sapiens
aggttgcagtaagccaatatcgtgccactgcactacatgcactacagcctgggcaacagagtgagactccgtctcaaaaaaaaaaaaaaaaaaaaaaaacrggaatgccaacagccaccagaagctaaaagaggcaaggaagggattttcccctagaatttcaagggaatacagccctgctgacaccttgctttttttttt

SEQ ID NO: 511254 - DNA, 201 bp, Homo sapiens
tagtcccagctactcgggaggctgaggcaggagaatggcgtgaacccgggaggcggaacttgcagtgacctgagatcgctccactgcactccagcctgggygacagagcgagactccgtctcaaaaaaaaaaaaaaaaagatcacagggtaacttttggggatgatggaaatgttctgtatcatgattgtggtggtggtta

SEQ ID NO: 511255 - DNA, 201 bp, Homo sapiens
gaggatcacttgcacccggaggtcaagactacagtgagccatgatcacaccactgcactctagcctgggtgacaaagtaagaccctgccacaaaaaaaaaraaaaaagaaaaaagaaggttggggatatatctatgtgttttcctttaaacacttatgtaaagttaagtgcttttacaagaatgtattcattgcaaaattt

SEQ ID NO: 511256 - DNA, 201 bp, Homo sapiens
gaacccgggaggcggaacttgcagtgacctgagatcgctccactgcactccagcctgggtgacagagcgagactccgtctcaaaaaaaaaaaaaaaaagakcacagggtaacttttggggatgatggaaatgttctgtatcatgattgtggtggtggttacatgactatccatttgtcaaagctcatcaaaattggtgact

SEQ ID NO: 511257 - DNA, 201 bp, Homo sapiens
aattataagaggttttcattttaacaatttttatgcattagtgtagaaaaaacctacttgaattttactgaaagaaacgttagccgggcatggtggcttaygcctgtaatcccagcactttgggaggctgaggtgggcggatcacctgaggtcaggagttcgagaccagcgtgaccaatatggtaaaaccctatttctact

SEQ ID NO: 511258 - DNA, 201 bp, Homo sapiens
ctagaaattaggcttctataaaataacaaccaattgcacaaattaattttttttattaaattgaaagttagcctgtaatcctagcactttgggaggccaamacaggcggactgtccttagctcaagagttctagaccaacctggcttacatggcaaaaccctgtgtctacaaaaaaaatacaaaaattagtcaggcatggc

SEQ ID NO: 511259 - DNA, 201 bp, Homo sapiens
agcactttgggaggctgaggtgggcggatcacctgaggtcaggagttcgagaccagcgtgaccaatatggtaaaaccctatttctactaaaaatacaaaaraattagccatgcatggtggccggcacctgtagtcccagctacacgggaggctgaggcaggagaattgcttgaacctgggaggcggagggtgcagtgagcc

SEQ ID NO: 511260 - DNA, 201 bp, Homo sapiens
cattattaaattgtttatatcccatattctagaaattaggcttctataaaataacaaccaattgcacaaattaattttttttattaaattgaaagttagcstgtaatcctagcactttgggaggccaaaacaggcggactgtccttagctcaagagttctagaccaacctggcttacatggcaaaaccctgtgtctacaaa

SEQ ID NO: 511261 - DNA, 201 bp, Homo sapiens
agatagacaaaaatttaaaaatacagactgacagtatattctgttggagagactgtaagggaaatacacagtctcattcattactggtgggaatgaaaatkggttcaacgcttctggagagaaatttggtaatatctgaataaacgacatatgcacttatattttgacccagcaatctcatttctagaaatttaccctgaa

SEQ ID NO: 511262 - DNA, 201 bp, Homo sapiens
aaattagccatgcatggtggccggcacctgtagtcccagctacacgggaggctgaggcaggagaattgcttgaacctgggaggcggagggtgcagtgagcygacattgcaccactgcactccagcctaggagacagagcgagactccatctcaaaaaagaaaaaagaaatgttcatgcaagaaatccttgagcagtatgaa

SEQ ID NO: 511263 - DNA, 201 bp, Homo sapiens
gagaaatttggtaatatctgaataaacgacatatgcacttatattttgacccagcaatctcatttctagaaatttaccctgaagataaacttccaacaatrtaaacatatatatgcataagtttattgcaggtttgattttttgtttttgagacggagtctcgctctgtcgcccacgctggagtgcagtggcgtgatctcg

SEQ ID NO: 511264 - DNA, 201 bp, Homo sapiens
gccttgaaggacatgaggaagcaggccagatggatcacctgggggcacagcattgcacgcagaagaaacagcaagtgcgaagaccctgagtgggacagtcmctagtttgtgctggtaacagcaaggagtccagtatggctggagctgagggagagggagagtagtaggtaagatcaaagagaaagggcaggggagattgta

SEQ ID NO: 511265 - DNA, 201 bp, Homo sapiens
tgactgttgagccactaatcgtgtttctttcctctttctttaactcttacatttggtgccaaaacccaggacgggtgttgtgggtagaggctctcttgcaycccaggaagcagtgggcagcggcagctcatcccactggatcctgagagtctctggccaaccaccccatcttgcctcttacttcacttttcaagtgattta

SEQ ID NO: 511266 - DNA, 201 bp, Homo sapiens
cccccgaccgccgtgcctgcctcccacccgccagccacccggccccggccgcgaagtttcggccccgcacgtgacgcggctttcgggcctcttcgggagasggggagtcggactcagctcggctcccgccggggtagcgtccgcggaggagccggtggccgtgcggagcgagcgcggggcggggaccggtcggactctgcc

SEQ ID NO: 511267 - DNA, 201 bp, Homo sapiens
aaattggccagaagcccctctcaggtttattctccaaaataaacctgtctttgactgttgagccactaatcgtgtttctttcctctttctttaactcttamatttggtgccaaaacccaggacgggtgttgtgggtagaggctctcttgcaacccaggaagcagtgggcagcggcagctcatcccactggatcctgagagt

SEQ ID NO: 511268 - DNA, 201 bp, Homo sapiens
tcctttggagacagcagatcattgctcagatttttgttcactgagctaatttacttctctgtcattatttcagaggacaatctgcatataatgatacatasctaattcttgagtatcctttcaacttcgtttcattgtagcttaatgcagaatatacttacacagtgtcatcctgaagtgataattaaaaaagtatacgga

SEQ ID NO: 511269 - DNA, 201 bp, Homo sapiens
accagtaatttgaacacgaaaatttattataattgttagctagtaaaaagtggttaacaacaacaaggggtaaaagagggttctaaggtggctcaaacctktaatcccagcactttgggagactgaagcaggtggatcgtttgagcccaggggtttgagacccgcctgggcaacagggtgaaaccctgtctctaccaaaaa

SEQ ID NO: 511270 - DNA, 201 bp, Homo sapiens
tgagatgagaggatcacttgagcctggaagatggaggctgcagtgagctataatcacaccactgcacttcgcccacaatccctcgcactcttcctttccarcttgggcccctcagaatgcctcccgcaaagaagggtggtgagaagaattacagttctgccatcagtgagctggtgaccagagaatataccatcaacattc

SEQ ID NO: 511271 - DNA, 201 bp, Homo sapiens
gtttcgttgacagcaacagtgtggcatcaagctgagagaggagaaaagaaagaaccagctaggaaggcggttagggcaggtgctcagtagaattctttcaracaaaggaacaacctgaaaactcaggctacagatacagataagggaactagcacaggcagcttgcctaggatatacccatagctgcacagataaggaagc

SEQ ID NO: 511272 - DNA, 201 bp, Homo sapiens
aggtaatgcatatgttagctagatttagtcattataccatgtatatatacttcaaaatattgttatacacagtaaatacatataattttatctgtcaattyaaaaaaaaattaaaactgagattaccctttttgtgttgggccatttatttactagtcaacctgtttgaggagcttgatgtttttttcagcttatatagac

SEQ ID NO: 511273 - DNA, 201 bp, Homo sapiens
ttgttgattttatgttttcttcagaagattatgtaagaagatttaaaatcaggcagctaagattattctccagacttagaaattctagcattataattgaytgtgtgtacaatgggccttggattaatcaatagtcaggcattgctttcttacattctctcttaaatcctgcgcccaagctgagaaattctgtgaacatga

SEQ ID NO: 511274 - DNA, 201 bp, Homo sapiens
taattctgttgagcaaggaaaaattgctctcaagtccagcaatttcagttatggaaactaaaataaaagtgagagtggttactagctatgaatttctctcrgaattttttctctgctttgtttccttctgaaaaagtagatgtatgccaaatgagactgacttcatcatttcttggaacttttgggcagtgataagcaata

SEQ ID NO: 511275 - DNA, 201 bp, Homo sapiens
tcttccccaaaaccttgtccaaattgtgtgatggtctttacccttcacagtatcagaaattccattatattttttctctttgttgtcttattttttttatkattatacttcatgcaaagataactaaaaagaagagcaaagtaaacaaatacattctaacatcttagtaatttgtttttagtaggtgaaaagttaataaaa

SEQ ID NO: 511276 - DNA, 201 bp, Homo sapiens
acaaggcagctattttcaggaacacacaggcagcattgtgatccttgagagaatacaaaggtgagtgcaatgatcaccctagctttctatctaggaccackttctagtacagagcacaaaaatgaatcctaaacagaacagcagtcttactaaaatgaggaggcagatattggagttttgagctgcttaaatggctggaat

SEQ ID NO: 511277 - DNA, 201 bp, Homo sapiens
tgattttatgttttcttcagaagattatgtaagaagatttaaaatcaggcagctaagattattctccagacttagaaattctagcattataattgactgtstgtacaatgggccttggattaatcaatagtcaggcattgctttcttacattctctcttaaatcctgcgcccaagctgagaaattctgtgaacatgacatc

SEQ ID NO: 511278 - DNA, 201 bp, Homo sapiens
aggcattgctttcttacattctctcttaaatcctgcgcccaagctgagaaattctgtgaacatgacatcagttgcctaaaacaaaactggtttgctctttygaaaggaagagcttatgtgaaaatactggattaaatatgatggccgtgctcttaaagaaaagaacaagaataaatggtacagtagacaatttgccaattt

SEQ ID NO: 511279 - DNA, 201 bp, Homo sapiens
gctactcgggaggctgaggcaggagaatggcgtgaacccaggaggtggagcttgcaatgagccgagattgtgccactgcactccagcctgggcgacagagygagactctgtctcaaaaaaaaaaaaaaaaaagaactaagacaccagggaccattcctggaaaaaacagagatatgtgacctttcagacaaagaattcaaa

SEQ ID NO: 511280 - DNA, 201 bp, Homo sapiens
aaattctgtgaacatgacatcagttgcctaaaacaaaactggtttgctcttttgaaaggaagagcttatgtgaaaatactggattaaatatgatggccgtsctcttaaagaaaagaacaagaataaatggtacagtagacaatttgccaattttgtaattttaaaagaagtgcttaaaattattgggaaatgttttttctc

SEQ ID NO: 511281 - DNA, 201 bp, Homo sapiens
tgaggcaggagaatggcgtgaacccaggaggtggagcttgcaatgagccgagattgtgccactgcactccagcctgggcgacagagtgagactctgtctcaaaaaaaaaaaaaaaaaagaactaagacaccagggaccattcctggaaaaaacagagatatgtgacctttcagacaaagaattcaaaagagctgtggtaag

SEQ ID NO: 511282 - DNA, 201 bp, Homo sapiens
aactaaaaagaattatgcagaaactaaaaatggaattggcatactgaagaatgcatcagagtctcttattagcagaacagatcaagcagaagaaagaattrgtaagcctggcgttggagaccagcctggtcaacatgaggaaatcctatctctactaaaaatacaaaaattagccagacatggtgacatgtacctgtaatc

SEQ ID NO: 511283 - DNA, 201 bp, Homo sapiens
aaaaaaaatttaccctagaatagtgtatccagcaaaaatatcctttaagcttgaaggagaaataaagactttcccagacaaacaaaagctgagagattttrtcaacaccagacctgtcctacaaaaaatgctaaatggtacttcaatcagaaagaaaaggacgttaggccaggcgcggtggctcatgcccgtaattccaac

SEQ ID NO: 511284 - DNA, 201 bp, Homo sapiens
ttgggaaggtgaggcacaagaatcgcttgaactcaggaagtggaggttgcagcgaacaaccactgcactccatcctgggtgacagagcaagatctgtctcaaaaaaaaaataaataaataaaataaaataaaatataaaaaaaagagatgagaaacaaatgatcagatttgcagagcaatctttcaagaatttatcctatt

SEQ ID NO: 511285 - DNA, 201 bp, Homo sapiens
agcagacgtggtggcatgcgcctgtagtcccagctactcaggaggctgacgcaggagaattgcttgaacccaggaggcggaggttgcagtgagccgagatygtgccattgcactccaacctgggtgacagagcaagactccatctcaaaaaaaaaaaaagaaaaagaaaaagaaaaggacgttaatgagcaataagaaatc

SEQ ID NO: 511286 - DNA, 201 bp, Homo sapiens
aatttacacctatgagggcctacatcaaaaagaagaaaaacttcaaataaataacctaacattcatcttaaagaactagaagagcaagagcaaaccgaacscaaaattagaacaaacaataaagatcagagcagaaataaatacatttgaaatgaataaaatacaaaatatcaataaatatcatttgcaacagcatggatg

SEQ ID NO: 511287 - DNA, 201 bp, Homo sapiens
taggtaaataaagtagatgtgtattacattaaggtcactgaagcctttcttaggaactcaaagacccaggaatctgagtgaataagggttagtgataaggrtatatatattttttttctttttttttttttgagacggaatcttactctgttgcccaagctggagtgcagtggtgcggtcttggctcactgtaacctccgc

SEQ ID NO: 511288 - DNA, 201 bp, Homo sapiens
tcattttgttaaaagtttttttttctataaataggtttttggtaattttttttatatatactttaagttctgggatacacgtgcagaacgtgcaggtttgytacaaaggtatacatgtgctatggtggtttgctgcacttatcaaaccatcatctacattaggtatttctcctaaagctatccctcccctagcccccaccc

SEQ ID NO: 511289 - DNA, 201 bp, Homo sapiens
agaaggggtttcaccatattggccaggctggtcttgaactcctgaccttgtgatccacccgcctcagcctcccaaagtgctgggattacaggagtgagccrtcgtgcccggcaaggatatatatattttaaaataaatattaaattagctgggtgtggtagcacatacctgtggtcccagctacctgggaggctgaggcaa

SEQ ID NO: 511290 - DNA, 201 bp, Homo sapiens
gctccactgcagccttgatttcccaaactcaagcaatcctcccacttcagtcccctgagtagttgggaccacaggcatgcaccaccatggctggctaattaaaaaaaaaaaaaaaaaaaaaaaaatttctagaaaaggggtctctggacaggcgcggtggctcatgcctgtaatcccagaactttaggaggctgaggcagg

SEQ ID NO: 511291 - DNA, 201 bp, Homo sapiens
gtaaccattagccacatatagccatttaaaatttaaatctatttaattttttttgtttgttttagatggagtctcgctctgttgcccaggctggagtacartggtgtgatcttgggtcaccgcagcctctgcctcctgggttcaagcaattctcctgcctcagcctgagtagctgggattacaggtgcctgccaccacgcc

SEQ ID NO: 511292 - DNA, 201 bp, Homo sapiens
gtggcacaatctcgggtcactgcaagctccacctcccaggttcacgccattctcctgcctcagcctcccgagtagctgggactgcaggcgcccgccaccasacccggctaattttttgtatttttagtagagatggggtttcaccctgttaaccaggatggtctcaatctcctgacctcatgatccacctgcttcggcctc

SEQ ID NO: 511293 - DNA, 201 bp, Homo sapiens
tgatttattagaccattgcaaactctcatctggtttataaaatctacttaatgtttttctgctttgattttgttcctcaccctgttatgttatataagttaaaaaaaaaaaaaaaaaaaaaagcaagtccctacagtttagtgtagtctttcttccaaaaggtcagtatactgtggcatgccttgccacagagtaacactc

SEQ ID NO: 511294 - DNA, 201 bp, Homo sapiens
taatcccagcactttggaaagccgaggcaggcggatcacctgaggtcaggagtttgagaccagcctggccaacagtgaaaccccgtctctactaaaaatakaaaaattaaccaggtgtggtggcaggcgcctgtagtcctacctacttgggaggctgaggcaggagaatcacttgaacctgggaggcggaggttgcaggga

SEQ ID NO: 511295 - DNA, 201 bp, Homo sapiens
gatttattagaccattgcaaactctcatctggtttataaaatctacttaatgtttttctgctttgattttgttcctcaccctgttatgttatataagttaaaaaaaaaaaaaaaaaaaaaagcaagtccctacagtttagtgtagtctttcttccaaaaggtcagtatactgtggcatgccttgccacagagtaacactcc

SEQ ID NO: 511296 - DNA, 201 bp, Homo sapiens
tctactaaaaaaaaaaaatagacaaaaattagcgggggggtggtggcagggcctgtaattccagctactcaggaggctgaagcaggagaatcgtttaaacrcaggaggtggaggttgcagtgagccgagattgtgccactgcactccaacctgggtgacaagagcgagactccgtctcaaaaaaaaaaaaagaaaaaaact

SEQ ID NO: 511297 - DNA, 201 bp, Homo sapiens
caagttgtggtggcaggatggggttccatattctgacagtacattttctttttttattgtttcttgttttttgagacagagtctcgctctatcacgcagcrggctggagtgcagtggcatgtgatctcagctcactgcaacctctacctcctgggttcaagcaattcttctgcctcagcctcccaaataactgggattaca

SEQ ID NO: 511298 - DNA, 201 bp, Homo sapiens
tccatcttctctgccagtttttctgttaaaaaaatagtaatgaggccaggcatgttgactcaacgcctgtaatcccaacactttgggagggcaaggcaggyggatcacctgagatcaggagttcaagaccagcctggtcaatatggtgaaaccctgtttctactaaaaattaaaaaaaattagccgggcatggtggtgggc

SEQ ID NO: 511299 - DNA, 201 bp, Homo sapiens
gggcatggtggtgggcatctgtaatcccagctactcaggagactgagtcaggagaatcgcttgaacctgggaggcagaggttgcagtgagccaagattgcrccactgcatgccagcctgggcaacagagcaagactccttctcagaaaagatgtatatttataggaatatgaaatatgtattaaaacatcagtttaaattg

SEQ ID NO: 511300 - DNA, 201 bp, Homo sapiens
gagaatcgcttgaacctgggaggcagaggttgcagtgagccaagattgcgccactgcatgccagcctgggcaacagagcaagactccttctcagaaaagatgtatatttataggaatatgaaatatgtattaaaacatcagtttaaattgaaatctctcattcttaagtaataagttgtaattatgcaaaaattaagtttt

SEQ ID NO: 511301 - DNA, 201 bp, Homo sapiens
cttttgcacatgtcctctctgcctggaatcttctttatccactaagacctatactcgtcctgaggtttcagttgggcttcattttttcctggtagctcctycttttctaatgtgtgtcttcctactattatatgtttttcccatagcaacccttatttaccctatcatagcacttcccttactttatagtttatgattttt

SEQ ID NO: 511302 - DNA, 201 bp, Homo sapiens
taaacttcaagtgtataattgctaaacagatattaataagtgctgtcagattcttacatttccattacactttaattaagctaaacagtataggcaaaacwttcctaatgttaataaaaattaaagatgtaaattctgaaaatcatcagcggttgaacataataggattttaacatttttcttgtgtttttactctttgtc

SEQ ID NO: 511303 - DNA, 201 bp, Homo sapiens
actttggtttttactctaagagaatggggggagccattgcctgatttgaacagggtagagagacctctgacttagttttaaaaggatcatcctggcagctrgctgtattaagactaaattgtgtgtgtgtatgcagggaggttcaagggtagaagcaggaagatctgttgggaagcctgcagtaatttaagtaagggatga

SEQ ID NO: 511304 - DNA, 201 bp, Homo sapiens
tatttactaatagactgcattgactaatgtgatattttacattagtagaacaaatgtacccccttctctaccttgtaatttatatctttcttttagagaastttgttgatttctaatgtaggaggaagaaagtggtatttttgtgtaagcttaactgagttccttgtgtttttgacttcttataaaaatttttttggtgat

SEQ ID NO: 511305 - DNA, 201 bp, Homo sapiens
tctggtgagagcctattcctcacagacggtgccttacagctgtgcactcacatggtggaaggggtaaacaatctcctttggccctcttataagggcgtgargcccattcatcacctctcaaatgaccccaactcttaatactatcacattggagattaggtttcaatgtacgaattttgaggggatacaaaagttgtgacc

SEQ ID NO: 511306 - DNA, 201 bp, Homo sapiens
ctaaacaaggtgaacaatttaccttgtgtgagagaaggcagtgtgggtgtaggtttattgtggggagtgtgcttgttaataatgaggctaagaaaggaggmaggccagaaatgcaaacaaacaaacaaaaaaaaattctgctcatttcaatttttgccccagcaagaaccttgagctcagttctcagaggtgagagttcta

SEQ ID NO: 511307 - DNA, 201 bp, Homo sapiens
aaatccacaatggagatggttgatggttttgttggaggtatctaacagttgagttgagaaggcatgaagagttggaccctcagatgaaatctgactgtaaytgggccaaattgtaaaaccagctgcatttgatttgaactgtttatgctttgcctgatcatcaacctgaagagtgtaaaccaaaaattatatcctaagccc

SEQ ID NO: 511308 - DNA, 201 bp, Homo sapiens
tttaccttgtgtgagagaaggcagtgtgggtgtaggtttattgtggggagtgtgcttgttaataatgaggctaagaaaggaggcaggccagaaatgcaaamaaacaaacaaaaaaaaattctgctcatttcaatttttgccccagcaagaaccttgagctcagttctcagaggtgagagttctaacacagaaagcacccag

SEQ ID NO: 511309 - DNA, 201 bp, Homo sapiens
acttacaaaagtgccgggcaccaccgagatatgcatccgttagcttttattattattagactcaaaacactgtagtagttctaatgagaggggtaagaatmaaaaatccaggcacctgcatagagccagagaggcacacatagaagcaacgtaagagtggaagcggaatgaaaacatgctaaagccaggtacaagccacaa

SEQ ID NO: 511310 - DNA, 201 bp, Homo sapiens
ctaaaaatagaaaaattaaccaggtgtggtggcaggcgcctgtagtcctacctacttgggaggctgaggcaggagaatcacttgaacctgggaggcggagkttgcagggagcggagatcgcaccattgcactccagcttgggggacaagagtgagacttcaactcaaaaaaaaaaaaaagaaaaaaaagaaaaattactgg

SEQ ID NO: 511311 - DNA, 201 bp, Homo sapiens
ggacccataaagcacaagcatttttccaaaggtaattttcaaggccagggcaagtaagtttctaagtcttagttttataaaactcttttttcaaagaaaawgacttacaataagaaaccgaagattcacaccactctccatattgcacaaaagagaaaaaagattgatatttttgtcaatatcgaccatttgacactttac

SEQ ID NO: 511312 - DNA, 201 bp, Homo sapiens
tagaaaaattaaccaggtgtggtggcaggcgcctgtagtcctacctacttgggaggctgaggcaggagaatcacttgaacctgggaggcggaggttgcagsgagcggagatcgcaccattgcactccagcttgggggacaagagtgagacttcaactcaaaaaaaaaaaaaagaaaaaaaagaaaaattactggggggagg

SEQ ID NO: 511313 - DNA, 201 bp, Homo sapiens
tacttgggaggctgaggcaggagaatcacttgaacctgggaggcggaggttgcagggagcggagatcgcaccattgcactccagcttgggggacaagagtragacttcaactcaaaaaaaaaaaaaagaaaaaaaagaaaaattactggggggaggaaagagttatatagaatgaatagcaacactattgttgagaaatag

SEQ ID NO: 511314 - DNA, 201 bp, Homo sapiens
tggctcacacctgtcaacccagcactatgtgaggccgtggtgggcggatcacctgaggttgagagttaagacaagcctgaccaacatggggaaaccccgtstctactaaaaatacagaattagccaggtatggtggcacatgcctgtaatcccagctactcgggaggctgaggcaggagaattgcttgaacccgggaggca

SEQ ID NO: 511315 - DNA, 201 bp, Homo sapiens
cgggaggctgaggcaggagaattgcttgaacccgggaggcagagattgcagtgagccgagattgcaccattgcactacagcttgggcaacgagagcgaaaytctgtctcaaaaaaaaaaaaaaaaaaaattggctggacatgatggtgtggcctgtaatcccagctattgaggaggctgaggcaggggaatcgtttgaacc

SEQ ID NO: 511316 - DNA, 201 bp, Homo sapiens
acatggaaaatttctgcaaggattcctgcttgggagtctgggacaccattctttgacaccatttgactttttctttttgtcttatacctttttatgtttgrttctccataaattatttctttagttaaaaaaccaattagcaggccgggcacggtggtgcatgcctgtaatcccagaactttgggaggccgaggtgggtgg

SEQ ID NO: 511317 - DNA, 201 bp, Homo sapiens
atcgtgccattgcactccagcctggggaacaagagtgagactctgtctcaaaaaaaaaaaaaaaaaaaaatacagcttcttggccgggcgtggtggctcaygcctgtaatcccagcactttgggaggcggaggcgggtggatcacgaggtcaggagttcaagaccagcctggccaagatggtgaaaccccatctctactaa

SEQ ID NO: 511318 - DNA, 201 bp, Homo sapiens
agaatcgcttgaacctgggaggcagaggttgcagtgagccaagattgcgccactgcatgccagcctgggcaacagagcaagactccttctcagaaaagatgtatatttataggaatatgaaatatgtattaaaacatcagtttaaattgaaatctctcattcttaagtaataagttgtaattatgcaaaaattaagttttt

SEQ ID NO: 511319 - DNA, 201 bp, Homo sapiens
gctgaggcaagagaattgcttgaacccgggaggcggaggttgtggtgagccgagttcactccattgcactccagcctggacaagagtgaaactccttctaaaaaaaaaaaaaaaaaaaaaccactgactgctctttaaactgttcttggagccaggcacggtggctcacgcctgtaatcccagcacttcgggaggctgagg

SEQ ID NO: 511320 - DNA, 201 bp, Homo sapiens
cgcttgaacctgggaggcagaggttgcagtgagccaagattgcgccactgcatgccagcctgggcaacagagcaagactccttctcagaaaagatgtatatttataggaatatgaaatatgtattaaaacatcagtttaaattgaaatctctcattcttaagtaataagttgtaattatgcaaaaattaagtttttaaaat

SEQ ID NO: 511321 - DNA, 201 bp, Homo sapiens
actccattgcactccagcctggacaagagtgaaactccttctaaaaaaaaaaaaaaaaaaaaaccactgactgctctttaaactgttcttggagccaggcrcggtggctcacgcctgtaatcccagcacttcgggaggctgaggcgggtggatcacaaggtcaggagatcgagaccatcctggctaacacggtgaaacccc

SEQ ID NO: 511322 - DNA, 201 bp, Homo sapiens
gcttgaacctgggaggcagaggttgcagtgagccaagattgcgccactgcatgccagcctgggcaacagagcaagactccttctcagaaaagatgtatatttataggaatatgaaatatgtattaaaacatcagtttaaattgaaatctctcattcttaagtaataagttgtaattatgcaaaaattaagtttttaaaatc

SEQ ID NO: 511323 - DNA, 201 bp, Homo sapiens
ggaggctgaggcgggtggatcacaaggtcaggagatcgagaccatcctggctaacacggtgaaaccccgtctctactaaaaatacaaaaaattagccgggygtggtggcaggcgattgtagtcccagctactctggaggctgaggcaggagaatggcgtgaacccgggaggtggagcttgaagtgagccgagattgcgcca

SEQ ID NO: 511324 - DNA, 201 bp, Homo sapiens
actttttttgccaattattaagcttcctaatgaatggcaataaacagtctgcattgtcatatttaggaaagatccttaaagatttatgatgggctgggcayggtggctcatgcctgtaatcctagcactttgggaggcctaggtggatgggtcacttgagatcaagagttggagaccagcctggccaacatgatgaaaccc

SEQ ID NO: 511325 - DNA, 201 bp, Homo sapiens
gaggctgaggcgggtggatcacaaggtcaggagatcgagaccatcctggctaacacggtgaaaccccgtctctactaaaaatacaaaaaattagccgggtrtggtggcaggcgattgtagtcccagctactctggaggctgaggcaggagaatggcgtgaacccgggaggtggagcttgaagtgagccgagattgcgccac

SEQ ID NO: 511326 - DNA, 201 bp, Homo sapiens
tggagattaggtttcaatgtacgaattttgaggggatacaaaagttgtgaccataacaatgatcaagctcatatgcttcttattctgaccaaagatctggyggaacatgtttgcagcagaggccttgggtcctgaaagaaataaatctgccaggcccaggactaagtactcttctaccagaatgtatgctctctgaaagaa

SEQ ID NO: 511327 - DNA, 201 bp, Homo sapiens
atgctccttatcaaactttcactgactagttgtagtatcaattaattacatttaaaaatttaaagaagggccgggtgtggtggctcacgcctgcactccaycctgggcgacaagagcaagactctgtctcaaaaaaaaaaaaaaaatttaaagaagaaacattgttttaaacttagattcaaacatcagtttgctacttat

SEQ ID NO: 511328 - DNA, 201 bp, Homo sapiens
taaattttaagtacaggatgcttatgtaatttttcatttcctgggaatccaaattcttagacttggttattttcctgtttttttttcccagcagtaaattytaagttagaggtaaaacttgtgtttaaaatgagaagtataggttgttcccccatctctcatccccaaaagtcatcaccaagattctcttcttttggccag

SEQ ID NO: 511329 - DNA, 201 bp, Homo sapiens
tgtggtggctcacgcctgcactccatcctgggcgacaagagcaagactctgtctcaaaaaaaaaaaaaaaatttaaagaagaaacattgttttaaacttarattcaaacatcagtttgctacttatcagctgtgtgaccttagggcaactcaccagatggctctgagcctcagtttcctcatgtgtagattgtagataata

SEQ ID NO: 511330 - DNA, 201 bp, Homo sapiens
ggttgttcccccatctctcatccccaaaagtcatcaccaagattctcttcttttggccagtgctagtaggaatagctgcatccagtcatttctaaattctyttttttttttttttttttgagacggagccttactctgtcacccaggctagagtgcggtggtgtgatcttggctcactgcaacccccacctcccgggttca

SEQ ID NO: 511331 - DNA, 201 bp, Homo sapiens
gataaactctccttaaggatgtctgacaatttctcttctagaaatgaatgctctcaactcttagaagatggaagtatggagtagaaaaatacagagatgamatgtttgcctaaataagtcagaggaatctaaagaaaataatgatcattagccaaggacttcagttagaaatagtagtttagttgcctaagcaaatatatt

SEQ ID NO: 511332 - DNA, 201 bp, Homo sapiens
atgaaatgtttgcctaaataagtcagaggaatctaaagaaaataatgatcattagccaaggacttcagttagaaatagtagtttagttgcctaagcaaatrtatttaaattatgtgtccttgttcaaaaaaattcctatgtattttatattgttgtctccagcaagatttttgagtgtgactttttcgtccttctgcgatc

SEQ ID NO: 511333 - DNA, 201 bp, Homo sapiens
tataaaataaatagaaaactatgacatgcttttggaaaagttctagatattaactatgtattatttgttgtaggcgaaaattttgaccagagtcctttgaraagaacattcaaatccaaagttctcgcccactatcctcagaatatagaatggaacccttttgatcaagatgcggtgaacatggtatgtgttttttttccc

SEQ ID NO: 511334 - DNA, 201 bp, Homo sapiens
cccaggctggagtgcagtggcacaatcttggctcactgcaacctccacctcctgggttcaggcaatcctcctgcctcagcctcccgagtagctgagattayaggcgcacaccactatgcccagctaatcttttgtatttttagtagagacagggtttcaccatattggccaggctggtgttgaactcctgacctcaagtga

SEQ ID NO: 511335 - DNA, 201 bp, Homo sapiens
gaggtaatctgcttattggcatccatgactatgtaatattctagttgatagatcttatctttaagcctgtgttgtacctaagaattcataggaagaaaacrtggtcaataacttttaagcaaactgtatgaaaatataaggattctattttttatgtctgtcctaatgaaacatcataaatatattttaggtaacaaaaga

SEQ ID NO: 511336 - DNA, 201 bp, Homo sapiens
tgcctagccatatctcacagtaaaattataggaatggggctttcattgctggaggaccattgctggaagacccttttgcccccgccacccccatcctctcscccgtttccttaacattgcagctagaatatttcactggcatctcaaatgcaacatatccaaaactgaattcattattcgtcccaccagtcttttgtcagt

SEQ ID NO: 511337 - DNA, 201 bp, Homo sapiens
tgagtggcagagccagggttcaaagccagggatcgtggccctgggttctgtgggttatgatcacctctgtggaggggagatgaggttctgcgaggctcatsatggggggcctggctgggtcagggaaggtggatgtgaggaaatagcatttgtggtaaaacctgagggtgagtgggtaggtcagggagaacattccagaaa

SEQ ID NO: 511338 - DNA, 201 bp, Homo sapiens
ccccgccacccccatcctctcccccgtttccttaacattgcagctagaatatttcactggcatctcaaatgcaacatatccaaaactgaattcattattcrtcccaccagtcttttgtcagtgaatggtacaaccatccacctacttgccaagtccaacaatgtacacatcaccctgaaagttctcacttactcaccctct

SEQ ID NO: 511339 - DNA, 201 bp, Homo sapiens
gagccagggttcaaagccagggatcgtggccctgggttctgtgggttatgatcacctctgtggaggggagatgaggttctgcgaggctcatcatggggggyctggctgggtcagggaaggtggatgtgaggaaatagcatttgtggtaaaacctgagggtgagtgggtaggtcagggagaacattccagaaagaaggaagc

SEQ ID NO: 511340 - DNA, 201 bp, Homo sapiens
aatgcatataaagtgtttaggagagtacttgacacatagtaaatgttcaatgtttatggtggttattgtataaacatggaaaatttctgcaaggattcctrcttgggagtctgggacaccattctttgacaccatttgactttttctttttgtcttatacctttttatgtttggttctccataaattatttctttagttaa

SEQ ID NO: 511341 - DNA, 201 bp, Homo sapiens
gctctacaaagcctaaaatatttgctatgtaactttaacataaaaaatttgctttctgctgaattaatgcatataaagtgtttaggagagtacttgacacrtagtaaatgttcaatgtttatggtggttattgtataaacatggaaaatttctgcaaggattcctgcttgggagtctgggacaccattctttgacaccatt

SEQ ID NO: 511342 - DNA, 201 bp, Homo sapiens
gcgcgagccgagaggccctggaagcgggactctgggaccccattgaaagaaaggcaaccagaaaaggcgaaacgacaacctcgatagtgattggagctgayggaacgagggcggagctaaagtcccagaatactggccaatcagagtttaagattatcagggagcccgggaaggggaaaggggcgaaatggttctatggtc

SEQ ID NO: 511343 - DNA, 201 bp, Homo sapiens
tgaacctgggaggaggaggttgcagtgagccaagacggcaccactgcactccagcctgggcgacaagagcaagactccatctcaataaataaatatatgtrtatgtatatatatatatatgtatgtgtatatatatatatatatatatagttgaagattaaccggaagcagtggctcacacctgtaatctcagtattttgg

SEQ ID NO: 511344 - DNA, 201 bp, Homo sapiens
tctagcccttggtggttttatgttgttgctgatctttttttttttttttttgagtgggggacactgtttcattcttgttgcccaggctggagtgtaatggmgccatcttggctcaccacaaccaccacctactgggttcaaacgattctcctgcctcagcctcctgagtagttgggattacaggcctgtgccaccacactc

SEQ ID NO: 511345 - DNA, 201 bp, Homo sapiens
tgggaggaggaggttgcagtgagccaagacggcaccactgcactccagcctgggcgacaagagcaagactccatctcaataaataaatatatgtatatgtrtatatatatatatgtatgtgtatatatatatatatatatatagttgaagattaaccggaagcagtggctcacacctgtaatctcagtattttgggaggcc

SEQ ID NO: 511346 - DNA, 201 bp, Homo sapiens
tctactaaaaatacaaaaaattagccgggtgtggtggcaggcgattgtagtcccagctactctggaggctgaggcaggagaatggcgtgaacccgggaggyggagcttgaagtgagccgagattgcgccactgctctccagcctgggcaacagagccagactccgtctcaaaaaataaaaataaaaaataaaaataaataa

SEQ ID NO: 511347 - DNA, 201 bp, Homo sapiens
tgggggtcttcccagcagcggctgcatctgtctcatatatgacccagctcccaccaggcaggacagcccttcccacccagcttctagcctctggtcacacyggctcctcaatttgtccctctagcccttggtggttttatgttgttgctgatctttttttttttttttttgagtgggggacactgtttcattcttgttgcc

SEQ ID NO: 511348 - DNA, 201 bp, Homo sapiens
cagtgagccaagacggcaccactgcactccagcctgggcgacaagagcaagactccatctcaataaataaatatatgtatatgtatatatatatatatgtrtgtgtatatatatatatatatatatagttgaagattaaccggaagcagtggctcacacctgtaatctcagtattttgggaggccaaggcaggcagatcac

SEQ ID NO: 511349 - DNA, 201 bp, Homo sapiens
gaggctgaggcaggagaatggcgtgaacccgggaggtggagcttgaagtgagccgagattgcgccactgctctccagcctgggcaacagagccagactccrtctcaaaaaataaaaataaaaaataaaaataaataagctgttcttggaaggaaattcttataagaaacttttcctggttccaatttcagagcccatcttt

SEQ ID NO: 511350 - DNA, 201 bp, Homo sapiens
atggtttccagcttcatccatgtccctgcaaaggacattgaactcattcttttttatggctgcatagtatttcaaaatgtaaaacacaatattctttacaycagtcatttcctgtttgctttccaacccattccctacccttctgctctgctctgtcccacagaggctgagccctgcaaactacagttcctaagccccttt

SEQ ID NO: 511351 - DNA, 201 bp, Homo sapiens
caagacggcaccactgcactccagcctgggcgacaagagcaagactccatctcaataaataaatatatgtatatgtatatatatatatatgtatgtgtatrtatatatatatatatatagttgaagattaaccggaagcagtggctcacacctgtaatctcagtattttgggaggccaaggcaggcagatcacttgaggcc

SEQ ID NO: 511352 - DNA, 201 bp, Homo sapiens
aacccaaaacttaaacacaagtaactaacttgtaagaccatgctgcccaagaggcaaagtcattgccaggaacccgaaagcctaggggactaagagccttkcaggggacggaagttttggccttgggttttcacaataggaaaaagctgaacctgaggcctggaactaaggttccataaaagggagcattgggccgggcac

SEQ ID NO: 511353 - DNA, 201 bp, Homo sapiens
aggtgcccaccaccacgcccagctaattttttgtatttttagtagagacggggtttcactgtgttagccaggttgacgtcgatctcctgacctcgtgatcygcctgcctctgcctcccaaagtgctgggattgcaggcatgagccaccgcacccggcccagaagggataggttttaaaggattgggtgaattagtactgaa

SEQ ID NO: 511354 - DNA, 201 bp, Homo sapiens
catggtggtttgctgcacccaacaacccgtcatctaggttttaagccccgcatgcattaggtatttgtcctaatgctctccttccccttgccccccacccyctgacaggctccagggtgtgatgttcccctccctgtgttcttgtgttctcattgttcaactcccacttatgagtgagaatatgcggtgtttagttttccg

SEQ ID NO: 511355 - DNA, 201 bp, Homo sapiens
aggggacggaagttttggccttgggttttcacaataggaaaaagctgaacctgaggcctggaactaaggttccataaaagggagcattgggccgggcacgrtggctcacacctgtaatcccagcactttgggaggccgaggcgggcggatcacgaggtcatgatattgagaccatcctagccaacaaggtgaaaccccgtc

SEQ ID NO: 511356 - DNA, 201 bp, Homo sapiens
ctccaacccatgacagctgcacccagcaaagccatgggggtagggccaccaggagctttgagagtccaaccctcacccattgtgtccagatggtctgtcayggagtcaaagaagatggctctcaggccttaaaatctaatgttgttggtcccgttgggttttgggcttttacttgggacttgttatccctttcttctttcc

SEQ ID NO: 511357 - DNA, 201 bp, Homo sapiens
acccaaaatcaagaactataataaaactatagtgtgtgtgtgtgtgtgtgtgtgtgtgtgtgtgtgagatattgttgaaggataggcgaagtaaacaatgrgacaaaacagaatccaggaataaactctcccatgtatggctaccttatttatgataaaagcaacatgctgtaatgtagtgggaaaaggatggtctttcaa

SEQ ID NO: 511358 - DNA, 201 bp, Homo sapiens
aatttgctggaaaatagacatacttggaactataaatctttgtagctgcattggtgggcaatttggcattttttttttttatactttaagttctgggatayatgtgctgaacgtgcaggtttgttacataggtatacatgtgccatggtggtttgctgcacccaacaacccgtcatctaggttttaagccccgcatgcatt

SEQ ID NO: 511359 - DNA, 201 bp, Homo sapiens
ctcctgagcgcaagcgatcctcccacttcagtccacaaggggtcattttttgcagagacggggttttgaaatgttcccaggccggtctcaaactcctgggstcaagcgatcctccccctcggtctcccaaagtgctgggattacaggcgtgagcccccgtgccaagcaatcccgtctctttaaaaaaaaaaaaaaaaaaaa

SEQ ID NO: 511360 - DNA, 201 bp, Homo sapiens
aacttagatggataaatctccatggtgctggggaatttgctggaaaatagacatacttggaactataaatctttgtagctgcattggtgggcaatttggcwttttttttttttatactttaagttctgggatacatgtgctgaacgtgcaggtttgttacataggtatacatgtgccatggtggtttgctgcacccaacaa

SEQ ID NO: 511361 - DNA, 201 bp, Homo sapiens
ttttgcagagacggggttttgaaatgttcccaggccggtctcaaactcctgggctcaagcgatcctccccctcggtctcccaaagtgctgggattacaggsgtgagcccccgtgccaagcaatcccgtctctttaaaaaaaaaaaaaaaaaaaaatgcctggccaacatggtgaaactccgtctctactaaaagtacaaaa

SEQ ID NO: 511362 - DNA, 201 bp, Homo sapiens
aaatgatagaataaagaatttgaggccggatgtggtggctcacatctgtaatcccagcactttgggaggctgaggcgggcggatcacttgagatcaggagytcgagaccagcctgggcaacatggtgaaacccccgtatctactaaaaacagaaaaattagttgggcgtggtggcgcatgcttgcaatcccagctacttgg

SEQ ID NO: 511363 - DNA, 201 bp, Homo sapiens
ttagtttatttgcctcaataaaaagatggtgttgaaatcaacaatactatagtagcacgttggcttagagcaacctttttcttttttttttgagacagagwtttgctcgttgcccaggctggagtgcaatggcgcgatctcggctcactgcaacctcctcctcccggattcaagggattctcctgcctcagcctcccgagt

SEQ ID NO: 511364 - DNA, 201 bp, Homo sapiens
ttttgactctccactccaggatatgtccacttataaattctatacatgtactactctactattatattataaaatactcaaaaatagctttttcttcttctttttttttttttgagaccgggtctcactgtcgcccaggctggagtgcagtggtacgatcacagctcactgcagccttgtatcctccaacctcaagcatca

SEQ ID NO: 511365 - DNA, 201 bp, Homo sapiens
cacaacaaataattgaatagacttttaataggtaagattttcaccaattaggttttattctcatctttgattttgtttttattttattttatttattattwttttttgagacggagtcttgctctgtcgcccaggctggagtgcagtggtgcgatctcagctcactgcaagctccacctcccgggttcatgccattctcct

SEQ ID NO: 511366 - DNA, 201 bp, Homo sapiens
tctagagaaatataagaacatttgctgactcaaactgggaaagttacacacttgtcattataagcctgctttggctaaagtaatctggttactagtagtartctgatcatcagtgacacctctaatttttagttgttttattgtgggatggtgagggggtattgttagtagatagcaaagttaagggttaattagaaatgt

SEQ ID NO: 511367 - DNA, 201 bp, Homo sapiens
ttcaggttttctgagatttcttgtagttcctgacagtttaacaattctgatgaaactcaggttttctgagaaagtatcttgtagttcctgatataaaacartactgtatatcttttaaaaatggaaaaataatagcattttgcagttcatgtttcccgattagatatatagttcttactttttttgatttgttggaagagc

SEQ ID NO: 511368 - DNA, 201 bp, Homo sapiens
tggcaatttttttcatgaagaaccaaataataagtagttgaggtattgtgggcatacagtttctgccacagtcacccagctctgctgttgtagtgtgaagrcatccatagacagtgcataagtggatggttgtgactgaatcccagtgaaactatttacagatcaggtggcagattgtatttgacctaagggtttttctta

SEQ ID NO: 511369 - DNA, 201 bp, Homo sapiens
gttgcattttacttgactaggccaggggtgggcatacatggcccccaggccaaatctgtccagctgactgtttttataaataaaattgtgttggaacaaarccatacttacgtgtttaaaggttggtacaaaagtaattgtggttttggacagaattttaaatcataactaggctcaagcacatccttattaatcaaaata

SEQ ID NO: 511370 - DNA, 201 bp, Homo sapiens
aagcgcttggaaagtcgggacactagacagagcgagaatttctggcaccctgggagagctttgagggggatgcgactgtggtgtggataagaatggctgayggacggattatcttgtgttcctcgttgtggggagcttccgctcttgggacatagccgctacttgtctgaggctccttctctcttgagttctttcagcatt

SEQ ID NO: 511371 - DNA, 201 bp, Homo sapiens
ccatacttacgtgtttaaaggttggtacaaaagtaattgtggttttggacagaattttaaatcataactaggctcaagcacatccttattaatcaaaatargaaccattacaatcaacacatttttgccaatgagaaataagtttgtttattcctgtaacgtaaaatatccgtgctttgggatttgatgaactcttggaaa

SEQ ID NO: 511372 - DNA, 201 bp, Homo sapiens
acagaagtgtagctatttccaagactggatccaagagaccagcttgtagaaatttaaggattatttgacacctacatataataggactttagaaatatcarataaacatatttaggccgacacatgtcattataagtgtcaggaaccttcagatatataaatctgaagttggtccctaagaaacgagactatccgatgaac

SEQ ID NO: 511373 - DNA, 201 bp, Homo sapiens
ttgtggaagcgttttccctgcaaaaaattgtcgagatgcttgaagaagtggtcagttggcaagaggtcaggtgaacatggtggatgaggcatgactgcatrgcccaattcgttaaacttttgaagtatttgttgtgtgatgtgcggtcaggcattgttgtggaaaagaattgggccctttctgttgaccagtgcccgctgc

SEQ ID NO: 511374 - DNA, 201 bp, Homo sapiens
cttcagccttccaaagtgctaggataacaggcatgagccaccgcacctggctccaagatgacgattttttaaaatttccactcagctcatgaggcacccasttaccgagtttttccacctttccaatttgcttcacatgtcaaacggccatagaatggtcgacgttgagttcttcagcaacttttcatgttgctgaagagg

SEQ ID NO: 511375 - DNA, 201 bp, Homo sapiens
gttgagttcttcagcaacttttcatgttgctgaagagggtcagcttcagtgattactctcaattgatcattgtcaacttctgatggccagccactatgctyctcatctccaaggctgccatctccttttcaaaacttcttgaaccaccactgcactgtgcgttagttagcagtccctgggccaaatgcattgtcgatgttg

SEQ ID NO: 511376 - DNA, 201 bp, Homo sapiens
tttgccagttgtttaagatagaagaataaatccagtcccagttataccatcatgaacagaatccagaagtctgaaaatagatattaaactagcagacaaaytcattgtctaaatataaaatcctaacaaatctaaaaagcaactgccaaaataagtggcaaactaacagaatacagttacaaatacaaaaaccaattgtgt

SEQ ID NO: 511377 - DNA, 201 bp, Homo sapiens
tcaagtcacagtcaagttagcaattcttgaactttttttctgcaacattgtggcctggggaaggcgggaaaggagcttttgggggatcattaagagagcamagcacaaaggtatacagcaaatataagcaaatgtatacttcaggccctaaccatgccacgttataacagaaacacttttctccaggactcttgttggcat

SEQ ID NO: 511378 - DNA, 201 bp, Homo sapiens
cttgagcccaggagtttaagacaagcctgggttacatagtgagaccccatctctacaaaaaataaaaaattagctgggcatagtctcagctactcaggagrctgaggtgggaggattgcttgagccctgaaggtggaggcagcagtgagctgtgattgtaccactgcgctcgaggcttgaggacagagcaaaacactgact

SEQ ID NO: 511379 - DNA, 201 bp, Homo sapiens
ccctgcaatcaagctgcttgttcttctatctccttcctattcccagctgtgattttatctagtctttgtgaattaagaaactggtttaagaaactggtttstaagcatgcattttaatcatttcaagtcacagtcaagttagcaattcttgaactttttttctgcaacattgtggcctggggaaggcgggaaaggagcttt

SEQ ID NO: 511380 - DNA, 201 bp, Homo sapiens
aattagctgggcatagtctcagctactcaggagactgaggtgggaggattgcttgagccctgaaggtggaggcagcagtgagctgtgattgtaccactgcrctcgaggcttgaggacagagcaaaacactgactcaaaaaaaaaaaaaaaaaaaaaagaaagaaagtctacatccaatagccagaagtatgtctctaaggt

SEQ ID NO: 511381 - DNA, 201 bp, Homo sapiens
aacagaaaagaaatgtaaccatttttgggaaaacaagaattagggaggggtaaaggggaggagttggtcaacaagaagcaggtggttgcttaggcaatcaygatgggtgaggggtctggctcctcattgtccagatgcagtgatctggtaagtttcagttccttgataatatctgggaggcctgatggttggcttcatgag

SEQ ID NO: 511382 - DNA, 201 bp, Homo sapiens
gaaacaacccaacatgtgttcattggcaccatcctaaggcttagtgttcatctgccctttatttaagatgaagaggttttccttgcacatccatttattcrccctgttaccgaaatgccaggggttctgtctaggtactgctgcttgatcactgagacaatgggtattgccagggaagaaggctttagttgggtgctgcag

SEQ ID NO: 511383 - DNA, 201 bp, Homo sapiens
actcaatatattgattgggttctaatcctaaaatactgatttttatactgtccaaagaaagtttgcaatcaaaacaaaggtcagaagagataagtaaaggmcagccagagagcaagattttgcactgattagctctcactattcagagtccagagaaatttactatagtggacacaaatactctagttgttccatagttat

SEQ ID NO: 511384 - DNA, 201 bp, Homo sapiens
accatgcctggctaatttttgtatttttaatagaggcggggtttcacaatattggccaggctggtcttgaactcttgacctcaagtgatccgccagcctcrgcctcccaaagtgctgggattacaggtgtgagccaccacacccagctgtttgatatttgttaagtactcctagtacttacctaggtatagaatgtgatga

SEQ ID NO: 511385 - DNA, 201 bp, Homo sapiens
atgactgtctttcagagtggcagggcaggctgttcataacagattcatgcatcattcttgtttccctgggcctttagactccttcctctacttgtatacartgttcataacagcattattcataatagtcaaaaagtggaaacaacccaacatgtgttcattggcaccatcctaaggcttagtgttcatctgccctttatt

SEQ ID NO: 511386 - DNA, 201 bp, Homo sapiens
ttggttatcctggtattcatggaatctcatcaattctggattcattcacaattttgaattttcacgcctgagaactggggaccagactataagttgataaytcttaacattttcacctctgagcccttgcccaagtagccaaatgatctcaagatatgtctgtttcagttagcctttgttgtataacaaatcacctctagc

SEQ ID NO: 511387 - DNA, 201 bp, Homo sapiens
actttgaagtttgaatctatataaacctaagaaaaatggtaacattgacaaaaaaaaaaccaaaaaactaatgcaaagcttagcaatgtaataatactccttttttttttttttttttttgagacggagtctcagtcttgttgcccaggctggctggagtgcaatagtgtgatctcagctcactgaaacctccacttcccg

SEQ ID NO: 511388 - DNA, 201 bp, Homo sapiens
aagtctccttactgttgcatctgtaatgcctgggtataggggacgtcctccaggctcttccagggatgactgtctttcagagtggcagggcaggctgttcrtaacagattcatgcatcattcttgtttccctgggcctttagactccttcctctacttgtatacaatgttcataacagcattattcataatagtcaaaaag

SEQ ID NO: 511389 - DNA, 201 bp, Homo sapiens
ttccccaggacgtaaacacattagtatttttccttccaagcacagaaacttagaagtatattttgttaaaaacaaagcccagtttctttttttttataacttttttttttttttttggagacagtgtctcactctgtcacccaggctggagcacagtggcacaatctcagctctctgcaacttctgcttcctggtttcaag

SEQ ID NO: 511390 - DNA, 201 bp, Homo sapiens
gtgagaagacagccatctgtgaaccaggaggcaagcctttaccgcaaaccagccatgctggcaccctaatctcaggacttccagtctccagaacttgagcrataaatgttcgttgtttaagtacccatctatggtattctgactgactaaacccaaactgactaagacaccttgtcactgcaagctaaggattgcaactgg

SEQ ID NO: 511391 - DNA, 201 bp, Homo sapiens
ccacctccccctccccagcccctgcgacagccatgggaacattatcttccatgaaacaggtccctggcgccaaaaaggttgggaaccactggtttagagcygggaaaccagtcaagtacatgtcaattaattgttaacttttaatttcttctgtttactctatcaagaaaccctcttcgaggtcaggtgcagtggctcaca

SEQ ID NO: 511392 - DNA, 201 bp, Homo sapiens
aaaaaaatccggctgggtgcggtggctcacgcctgtaatcccagcactttgggaggccgaggcgggtggatcatgaggtcaggagatgaagaccatcctgkccaacatggtgaaaccccgtctctactaaaaatacaaaaattagctgggcatggtggtacgtgcctgtaatcccagctactcaggaggctgaggcacgaa

SEQ ID NO: 511393 - DNA, 201 bp, Homo sapiens
tgaggcaggagaatcgcttgagcctgggagacgagaggttgcggtgagccaagatcgtgccattgcactctagcctgggcaataagagcgaaactgtctcaaaaaaaaaaaaaaagtgatttatgctcatagtggccaaagtacaaagaggaaaatgataatcacttacaatcctgctatataaagaacactaagtatttc

SEQ ID NO: 511394 - DNA, 201 bp, Homo sapiens
tgcactccagcctgggagacagagcaagactccctctttaaaaaagaagaagaagaagaaagaaggaagaaggaagaagaggaagaggaagaagaggagaagagaaggagaaggagaagaagaaagaagaagaaaagaagaagaagaagaagaagaagaagaagaagaagaagaagaagaagaagaagaagaagaagaaga

SEQ ID NO: 511395 - DNA, 201 bp, Homo sapiens
gcactccagcctgggagacagagcaagactccctctttaaaaaagaagaagaagaagaaagaaggaagaaggaagaagaggaagaggaagaagaggagaagagaaggagaaggagaagaagaaagaagaagaaaagaagaagaagaagaagaagaagaagaagaagaagaagaagaagaagaagaagaagaagaagaagac

SEQ ID NO: 511396 - DNA, 201 bp, Homo sapiens
ccagcctgggagacagagcaagactccctctttaaaaaagaagaagaagaagaaagaaggaagaaggaagaagaggaagaggaagaagaggagaagagaaggagaaggagaagaagaaagaagaagaaaagaagaagaagaagaagaagaagaagaagaagaagaagaagaagaagaagaagaagaagaagaagacggaaa

SEQ ID NO: 511397 - DNA, 201 bp, Homo sapiens
ggagacagagcaagactccctctttaaaaaagaagaagaagaagaaagaaggaagaaggaagaagaggaagaggaagaagaggagaagagaaggagaaggagaagaagaaagaagaagaaaagaagaagaagaagaagaagaagaagaagaagaagaagaagaagaagaagaagaagaagaagaagacggaaatcccttcc

SEQ ID NO: 511398 - DNA, 201 bp, Homo sapiens
cagagcaagactccctctttaaaaaagaagaagaagaagaaagaaggaagaaggaagaagaggaagaggaagaagaggagaagagaaggagaaggagaagaagaaagaagaagaaaagaagaagaagaagaagaagaagaagaagaagaagaagaagaagaagaagaagaagaagaagaagacggaaatcccttccacaag

SEQ ID NO: 511399 - DNA, 201 bp, Homo sapiens
agagcaagactccctctttaaaaaagaagaagaagaagaaagaaggaagaaggaagaagaggaagaggaagaagaggagaagagaaggagaaggagaagaagaaagaagaagaaaagaagaagaagaagaagaagaagaagaagaagaagaagaagaagaagaagaagaagaagaagaagacggaaatcccttccacaagt

SEQ ID NO: 511400 - DNA, 201 bp, Homo sapiens
cagcacatagtttcatgtggacatttctctctctggtttatgaccactgcacggggtggatggttattattattgggaataaccgtgtatcagagtgcagytcttagcctggagaatgggaaatggaaaggaccagagattcaaagaaggcaatttacccaaggtcacacagccctttaaggccaagtagagcctcctaag

SEQ ID NO: 511401 - DNA, 201 bp, Homo sapiens
acagccccaggagatcctgagaacatgcgctcaaggtggttgggccacagtttgaatctacatgttttagggagacatacgacattaatcgatacatttgwggtacacgttggttaggtctagaaaggcaggacagctcaaagggggcagggaactgtgcttccaggtcctaggtggattcaaagattttctgattggcac

SEQ ID NO: 511402 - DNA, 201 bp, Homo sapiens
acactgacagattgggaaggagaatgaaggaaagggaggagtcggtgataattgggagtggtgtggggagcacccaccgctcctcctccacctgccccctkcctgtggcaatggaatgggcgagtgtgtgggcttttcatttcccatgggctttttcaatgggactgtgaccagtttagaacctccccctttaaatgtgct

SEQ ID NO: 511403 - DNA, 201 bp, Homo sapiens
actatgctggatttgttgttgttgcgtttgtttcatttcatcttactttattttgtgtctccatggattagcatcagttcagagccaaaatcaattagccsccccctccaccaaaaaaaatatttacctgtctccagtttatagtcacactgggaaatggccctacttatttctggggaatgttttactgaagatccacaa

SEQ ID NO: 511404 - DNA, 201 bp, Homo sapiens
aggcaggggaggagaagcagcgaatctgggtcaggagtgggcgctttctgctcccttctcaccatcagcctctagggactggcatgatgatgggccagggycagtggcagccctgcagaggtcaagggccagcctggcttcataggaaacattctcatggggaatggggatgtcgtctttggaggcggtggaacagggagc

SEQ ID NO: 511405 - DNA, 201 bp, Homo sapiens
acacactgggaaactgactctggtcaaggttccatctatcacctgggttctgtaaacttctactctgagtggtggactatgctggatttgttgttgttgcrtttgtttcatttcatcttactttattttgtgtctccatggattagcatcagttcagagccaaaatcaattagcccccccctccaccaaaaaaaatattta

SEQ ID NO: 511406 - DNA, 201 bp, Homo sapiens
tttcgtcctccgtggcgttctcttgcagagtgtctgtctcctaagcctggagcttccctctccaggtgatctgctctagaccgcctcctccctgaaatttygcctactttgccctgcccacttgtgggagttctgggtttcctgagtgcctgaagcccctcactactccccgtcttgcaggcaataatagccaatgctgag

SEQ ID NO: 511407 - DNA, 201 bp, Homo sapiens
ggtgatctgctctagaccgcctcctccctgaaatttcgcctactttgccctgcccacttgtgggagttctgggtttcctgagtgcctgaagcccctcactrctccccgtcttgcaggcaataatagccaatgctgaggacctagctgtgtcagccaggacaggagcaccagacatcaccagctccttttcaccttcgaggt

SEQ ID NO: 511408 - DNA, 201 bp, Homo sapiens
tgaatttcccccagattgcagagttactttgggaacactattttggtgatctgaggattttcagaggctttcacttgaatgttcttaatataatagccctycctcgcttcatcaatcaaagaacagttgctaaatataccttttcccaccattcattctgagactagagaagtaaccactgaatggctccatcacgccatt

SEQ ID NO: 511409 - DNA, 201 bp, Homo sapiens
gcaagactccctctttaaaaaagaagaagaagaagaaagaaggaagaaggaagaagaggaagaggaagaagaggagaagagaaggagaaggagaagaagaaagaagaagaaaagaagaagaagaagaagaagaagaagaagaagaagaagaagaagaagaagaagaagaagaagaagacggaaatcccttccacaagttcc

SEQ ID NO: 511410 - DNA, 201 bp, Homo sapiens
atccgcccgcctcagcctcccaaagtgctgggattacaggcgtgagccaccgtgcccggccttttttaaccgtttttaagtgtaacattcggtggcattaygtacactcaccgttgcacaactgtcgccactgaatttcccccagattgcagagttactttgggaacactattttggtgatctgaggattttcagaggctt

SEQ ID NO: 511411 - DNA, 201 bp, Homo sapiens
caagactccctctttaaaaaagaagaagaagaagaaagaaggaagaaggaagaagaggaagaggaagaagaggagaagagaaggagaaggagaagaagaaagaagaagaaaagaagaagaagaagaagaagaagaagaagaagaagaagaagaagaagaagaagaagaagaagaagacggaaatcccttccacaagttccc

SEQ ID NO: 511412 - DNA, 201 bp, Homo sapiens
cttggcctcccaaagtgctgggattacaggcgtgagccaccgcgcccagccaattttttgtatttttaatagagacggggtttcactgtgttagccaggawggtctcgatctcctgacctcgtgatccgcccgcctcagcctcccaaagtgctgggattacaggcgtgagccaccgtgcccggccttttttaaccgttttt

SEQ ID NO: 511413 - DNA, 201 bp, Homo sapiens
cctctttaaaaaagaagaagaagaagaaagaaggaagaaggaagaagaggaagaggaagaagaggagaagagaaggagaaggagaagaagaaagaagaagaaaagaagaagaagaagaagaagaagaagaagaagaagaagaagaagaagaagaagaagaagaagaagacggaaatcccttccacaagttcccatcgattc

SEQ ID NO: 511414 - DNA, 201 bp, Homo sapiens
ttagtagagacggggtttcaccgtgttagccaggatggtctcgaactcttgacctcgtgatccacccgtcttggcctcccaaagtgctgggattacaggcrtgagccaccgcgcccagccaattttttgtatttttaatagagacggggtttcactgtgttagccaggatggtctcgatctcctgacctcgtgatccgccc

SEQ ID NO: 511415 - DNA, 201 bp, Homo sapiens
gaagaagaagaagaaagaaggaagaaggaagaagaggaagaggaagaagaggagaagagaaggagaaggagaagaagaaagaagaagaaaagaagaagaagaagaagaagaagaagaagaagaagaagaagaagaagaagaagaagaagaagaagacggaaatcccttccacaagttcccatcgattctgctctctttctc

SEQ ID NO: 511416 - DNA, 201 bp, Homo sapiens
gctgggcttggagagaagctctgggagtagggtggtgaaggctgatgccctctaaaaaggccttgcctgtaccacattccgtaggaggtgtaattgctaatttttttttttttttttttttttttgagacagactctcgctgtgttgcccaggctggagtgcagtgacgccatcttggctcactgcaacctcccattccca

SEQ ID NO: 511417 - DNA, 201 bp, Homo sapiens
taaagaatttgcctgtggaagtctaatttgctctaagaattccccctacctgcttgggcttggaggtataaggaagagttttatatttcaccccccccccttttttttttagatggagtctcgttgttttgcccaggctggtgtgcagtggctccatctcagctcactgcagcctccgcctcccgagttcaagcgattctc

SEQ ID NO: 511418 - DNA, 201 bp, Homo sapiens
caccaccgcgtccggctaattttttgtatttttagtagagacggactttcaccattttggccaggctggtctcgaactcctgacttcaagtgatctgcccrcctcggcctctcaaagtgctgagattacacacacgagccaccgtgcccggcctcatttataaattggaaaataagcctgggcgcggtggcgcacgcctgt

SEQ ID NO: 511419 - DNA, 201 bp, Homo sapiens
tgccacctccaccttccgggttcaagtgattctcctgtctcagcctcccgagtagctgggactacaggcacatgccacaacacctggctaattttttgtatttttttttttttagtagagacggggtttcactgtgttagccatgacagtctcgaactcctgaccttgtgatccacccgcctcagcctcccaaagtgttgg

SEQ ID NO: 511420 - DNA, 201 bp, Homo sapiens
tagctgggactacaggcacatgccacaacacctggctaattttttgtatttttttttttttagtagagacggggtttcactgtgttagccatgacagtctygaactcctgaccttgtgatccacccgcctcagcctcccaaagtgttgggattacaggcgtgagccgctgcacctggccccaatactctttttgataaagg

SEQ ID NO: 511421 - DNA, 201 bp, Homo sapiens
ctgggactacaggcacatgccacaacacctggctaattttttgtatttttttttttttagtagagacggggtttcactgtgttagccatgacagtctcgawctcctgaccttgtgatccacccgcctcagcctcccaaagtgttgggattacaggcgtgagccgctgcacctggccccaatactctttttgataaaggaag

SEQ ID NO: 511422 - DNA, 201 bp, Homo sapiens
aagaaaagctaagatcagggaaggagagaccaaggcaggctttttcattagcaatggtgttgagcaggcagtttgggtaatttcttttctttttttgagakagagtttcactcttgttacccaggctggagtgcagtggtgcgtgctcggctcactgcaacctctgcctcctgggttcaagtgattctcctgcctcagcct

SEQ ID NO: 511423 - DNA, 201 bp, Homo sapiens
gcagcggatgcactatttagtgcttagctcttaggagcagggggcaccgaaggtctttcgcccatgggtgtgctggctgtgcatagtaaacatgagtagcyggcgggactggcccggtgtctgtacagcaccttcatccccaagctgtttcctcacttcaggttctctctggtttcccccaaaacatgaccaccccaaagg

SEQ ID NO: 511424 - DNA, 201 bp, Homo sapiens
ttcccaagtagctgggatttcaggcgcctgccaccacacccggctaatttttgtactgttagtagagacggggttttgccatgttggcaaaaaaaaaaaaraaaaaaaaagaagggaggacatgcataacatctaacctctcgtgcttccacatttgagcaaaggacagtgatagggcagtgacatctagtggtctgtctg

SEQ ID NO: 511425 - DNA, 201 bp, Homo sapiens
gcaccttcatccccaagctgtttcctcacttcaggttctctctggtttcccccaaaacatgaccaccccaaaggaatgacctcccaaaggaggtcaggtgkccatcttctcagcctggagaggggtatgtgggttccgcaggcacccagtatggcaggacatggctggcattagacctgagggcaccctgatttgtccctt

SEQ ID NO: 511426 - DNA, 201 bp, Homo sapiens
tctagatttgaggcaggaaaatagggtctagaggcagggaacctaaggccgattgctgactggatatcagagactactccctttacaacccctcctttttytgcatggcagttgaaaaatgaaggtacagccaggtgcggtggctcacacctgtaatcccaacactttgggaggctgaagctgacggatcacctgaggttg

SEQ ID NO: 511427 - DNA, 201 bp, Homo sapiens
aacgtccgcctcccaggttcaagcaattctcctgcctcagcctcccgagtagctgggattacaggcacccgccacatttttgtatttttagtagagatggmgtttcaccatgttggccaggctggtctcgaatgcctggcctctgcttcaaacatttttaagagggtcaaagaaataagagaaaattgagaattagagaca

SEQ ID NO: 511428 - DNA, 201 bp, Homo sapiens
tttttttaatagaaattcactaaccaaagctcaagagcatttggttaagtttctgtgataccttagagttaccacaaaccccaaaagtaacactgtaattmactttctcttgattatagaacaaggcaaggtagggctttagcaaaaacatcacagaaagaggccaccttcacttggagcacatcgtgcttttcagagtga

SEQ ID NO: 511429 - DNA, 201 bp, Homo sapiens
tcccagtcaaccttcttcagggcctaacatctttcagaagccccaaatagacgaactgtgcattttctttcacaaaatcaaagagataagcgcctcatttygggggcctccaaactggggagagggctggaagcactgtggaaacagaactaaggggccatagcctccagctctgagcgaagtctcatctggttcaaagaa

SEQ ID NO: 511430 - DNA, 201 bp, Homo sapiens
taaacaatgagatagacagaatgatgtgcatgacatgtcagcctctgtcatcagccactcctgtgctggcaccatggaaccatgagcgtaatggggactgycagtacataacagaagtcaaacctcagagccagggttctgggggcagggctctaattcccacagggaggaatggtttcttactagaatgtgactgaggta

SEQ ID NO: 511431 - DNA, 201 bp, Homo sapiens
ccttcacttggagcacatcgtgcttttcagagtgatcctatagccttttggggaggtaggggggcatgttttatgcccatttaacaagctgagatgcacamacattagttgataacacctgagtcataaaattagttacaaccagattcgaaagctcctgattttactgttgtgacttgattatagagcaaagggttagat

SEQ ID NO: 511432 - DNA, 201 bp, Homo sapiens
ggaacgggcaggctagtacatgtccatgagggctgctctgttggagcactgtattggtcaggtgaagtccaccagctcaggagctataatgaaggctcccrggaggtacttgggggctgcactgcaagcaagtgcaaccagtctgggccccagaagaggccagcagacaaagggatgctcaggttggactgacctcatctc

SEQ ID NO: 511433 - DNA, 201 bp, Homo sapiens
tttctgccattttgtgcacgaggaaatggagggaatgagaaattgagtaactttccccaaggcacacagcttaaggtgataacaccaagagaagtgcccastgtttgtctgaccacagagcccacgctatgtgagcactcacatgagatgtgctgaacaaatcttattttgtcatttgctgaaataagatttgttcagcaa

SEQ ID NO: 511434 - DNA, 201 bp, Homo sapiens
tcctgaccttgtgatccacccacctcggcctcacaaagtgctgggattacaggcgtgagccaccacacccagccaattttaagtaatctttaactttaaawttttaattgccagaaggtcagagactgtggccagtagaatattctgattagtagatattttttccctccattttaactctaatgccctttccttgagcta

SEQ ID NO: 511435 - DNA, 201 bp, Homo sapiens
caggcagatcactggaggtcaggagttcaagggcagcctggccaacatggtgaaaccctgtctctactaaaaatacaaaaattagctgggtgtggtggcasacacctgtaatcccagctactcgggtggctgaggcagaagaattgcttgaacccaggaggtggaggtgccagtgagccaagatcacgccactgcactcca

SEQ ID NO: 511436 - DNA, 201 bp, Homo sapiens
gagattacaggcgcacatcaccatgcccagctaatttttgtatttttagtagagacggggtttcaccatgttggccaaggtggtctcgatctcttgacctygtgatccaccggccttggcctcccaaagtgctgggattacaggcctgcgccaccacgcctgacctatcattattatttctaaccgaaattagtgctgttg

SEQ ID NO: 511437 - DNA, 201 bp, Homo sapiens
gaggtttccctcttaatctgtattcatttgtacctgttatttcactttgaattcaggctcgtactcccaagcagagaaatggtagaaaataatgaaaattaaaaaaaaaaagtgaaaaatcataaatgaggaaattatgttacctaattaaaagaaaacaatcctgtcattaattattaattatttaattatttaatttca

SEQ ID NO: 511438 - DNA, 201 bp, Homo sapiens
ggggtttttccatgttggtcaggctggccttgaactcctgacctcaggtgatccacccacctcagcttcccaaagttctgggattacaggtgtgtgccacyggaaactgggtaatttttaaataaaagaggcttaattggctcacggttccacaggctgtacaggaagcatgctggggaggcctcaggaaactttcaatca

SEQ ID NO: 511439 - DNA, 201 bp, Homo sapiens
gcttgctgcagtcttgacctcccgagctcaagtgaccctccaacctcagcttcccaaatagctgggactacagccatgtgccattatacctggctaatttaaaaaaaaaaaaatttggtagaggtcgggggtggaggtctccctgtgttccccaggctggtcttgaagttctgggttcaagccatcctcccgcctcagcct

SEQ ID NO: 511440 - DNA, 201 bp, Homo sapiens
tcagcatcccaagtagctgggattacaggcatgcgccactatgcctggctaattttgtatttttagtagagacggggtttttccatgttggtcaggctggycttgaactcctgacctcaggtgatccacccacctcagcttcccaaagttctgggattacaggtgtgtgccaccggaaactgggtaatttttaaataaaag

SEQ ID NO: 511441 - DNA, 201 bp, Homo sapiens
atcaaggactttttttttttttttttgagacacagtctttctcggtcgcccaggctggagtgcagtgattcgatctcagctcactgcaaccttcgcctccygggttcaaacaattctcctgcctcagtctccctagtagctgggatcacaggagtgtgccactatacccggctaatttttgtatctttagtagaggtgggg

SEQ ID NO: 511442 - DNA, 201 bp, Homo sapiens
tacaaaatgttttggcatagtcatcaatgacacgtaattcctcaaaataagtggctgtcattgcttcagtctcttcattctgcctctggtagctccttgcrctcccttcagccatgtggcccctagagcagccctggggctggtgctgaggtccagaagcgcagggtggaatttttagtttccaaatattttttatctgtg

SEQ ID NO: 511443 - DNA, 201 bp, Homo sapiens
acattttcatgctccattgttgatgttgtggaactaggagcaagctaatactaggaacaagataatactgtggactgcaacagccaaaactcttggctttytgtggcccgggttatttgctctttctttcttccttcctcctgctcctctgctgtaagcacccccatcttccagctttcccagtgaagtgccttctcctta

SEQ ID NO: 511444 - DNA, 201 bp, Homo sapiens
ctgtgtcacccaggctggtgtgcaatggtgcgattctggcttgtttcacccttaaactccaaggctcaaatgatcctcctgcctcagcctctcaagtagcygggaccacaggcacatgctaccacacctggctgatattttaattttttatagagacagggtctcattatgttgcctgggctggtcttgaacacccggaca

SEQ ID NO: 511445 - DNA, 201 bp, Homo sapiens
tgggctgggcgcagtggctcatgcctataaatccagcactttgggaggccaaggtgggcggattacctgacgtcaggagttcaagaccagcctggccaacrtggtgaaaccccgtctctactaaaaatacaaaaattagcggggcgtggtggcagctgcctgtaatcccaggtactgaggtcggcgaatcgcttgaaccca

SEQ ID NO: 511446 - DNA, 201 bp, Homo sapiens
gtgggcggattacctgacgtcaggagttcaagaccagcctggccaacatggtgaaaccccgtctctactaaaaatacaaaaattagcggggcgtggtggcrgctgcctgtaatcccaggtactgaggtcggcgaatcgcttgaacccaggaagctgaggttgcagtgagcccagatcgtgccattgcactccagcctgggc

SEQ ID NO: 511447 - DNA, 201 bp, Homo sapiens
gaggtcggcgaatcgcttgaacccaggaagctgaggttgcagtgagcccagatcgtgccattgcactccagcctgggcaacaagagcaaaactctgtctcaaaacaaacaaacaaacaaacaaacaaacaaagattgctttgtcatttagattcagaacaatgcattctattctcccggtaatggctttttatgttttctt

SEQ ID NO: 511448 - DNA, 201 bp, Homo sapiens
atataatagacactactgcttcctccccctggaagaattacttagttttagtaacacaacatgtcatgctttaaaaatctggcaagaaatgatgaaaatayacccttcaacaaagttccgctgacgtgaactgagttgctaagatacttagctaagcaaattcaattataagctttctgactcaactgcgcactgattttc

SEQ ID NO: 511449 - DNA, 201 bp, Homo sapiens
ggaggctgaggcgggtggataacctgaggtcgggagttcgagaccagcctgaccaacatggagaaaccccatatctactaaaaatacaaaattagccgggyatcctgtaatcccagctacttgggaggctgaggcaggataatcgcttgaacctgggaggcggaggttgtggtgagccgagattgtgccactgcactccag

SEQ ID NO: 511450 - DNA, 201 bp, Homo sapiens
cagcctgggcaatgtaatgagacctctctataaaaaacacaaaaattagccaggtgtggtggtgcacacctgtagtctcaactactcagggggctgagcgrgaaccctgtctcaaaaaaataaaaaataaaaaacttgttttctgtcctaccagattcccatgtgggcggtggctggggaaaggcattgatgatgggagcc

SEQ ID NO: 511451 - DNA, 201 bp, Homo sapiens
gaaaaaaataactgaatacagaggcgtccctgcaagcctgtcataaggatgtttgtttctcatgagcttttccaccttcttccttgttgcgagtggctgcrcagtggttgatttccatgtcttattgtctgctgggctcagccatcatgtggtggtgaccccactgccatcacagccaccgtttgtggagcatctctcata

SEQ ID NO: 511452 - DNA, 201 bp, Homo sapiens
ggacctaggaaaaataaatacaacattagggagctctctcatggtccaggaagaagtggcttgaaatctggagcattatttaagagcagtctccacacttrttaccaaatttctcctttttttctgggaagcagagaccatgttctctccatccttcgcaggtccacatgaggccataccagaatcacgcactccatctag

SEQ ID NO: 511453 - DNA, 201 bp, Homo sapiens
gccattactggtctctgcgtcttggtggtagtggtcccccgggcccagctgtcttctctttatctctttgtcttgtgtctttatttcttagatctctcgtytccacacacggagagaacacccgctaagccccataggtctggaccctatatttattactttaaaataatagcatatcaaatgaccaacacacatattaaa

SEQ ID NO: 511454 - DNA, 201 bp, Homo sapiens
tacactgtttgctttaggaaaatcacttgatcttagtcctgggcaaacagcttgtgttccaaataacagcagatatcctgaccaggcctcaaatagtcacytgaattgagcttaaactaagctctttgagaatggcgtgaacctgggagggggagcttgcagtgagctgagatcgcgccactgcactccagcctgggggac

SEQ ID NO: 511455 - DNA, 201 bp, Homo sapiens
gctgcatagtattccacggtgtccaaaaatgatagactggattaagaaaatgtgacacatatacaccatggaagaacttgtatttttaagaggatcccaaktgatactggcactactagccccaagaccacaatttaaatcccttgatctaagggcatagcttggacatcagggttattccaagcttccccagccataggt

SEQ ID NO: 511456 - DNA, 201 bp, Homo sapiens
gaaataataatataatagctaacactcacccagccctaactctgcaccaggtactatttcaagtatgtcacatgtaaggactcatttaatcctcacaacasacccttgagttaggaattgtcattattcccacttaatagctaacaagatcgaggcccagagaggataatttacttgcctaaggttattcagctaacatgt

SEQ ID NO: 511457 - DNA, 201 bp, Homo sapiens
ttaggaaactgtttgatggcatgcatgagctgctgaaccaatgccagtcctccattctcaggatttgtgccaaatgagattataaatgtttgattttttaraagtctgtttaggtattctgttacttgcacctgacaaagatgttcttacttttctttttcaattcctttcctcctttattctatagcatcattatataga

SEQ ID NO: 511458 - DNA, 201 bp, Homo sapiens
ggaagcacagggaattcaaataactcatccaaggttgatcatctgagaagtggtagaaccaagatccaaacactcaccatgaggctccaaggcctttgtcyttctctgtaactaccttacaaggaaaggaatgaatgttttacacacaaaccaaattcttaatatgttaatattttaaagtcaggttgagtaattgtagtt

SEQ ID NO: 511459 - DNA, 201 bp, Homo sapiens
ttttgacgttagtccttgattttgattcaacagaagcagccacttttggcatcttgttatagatgcacaggtggtaattgaagccatgagagttaaccaawatataaagaactgcagacagctgagaaggagtgctatcttcgtcctttattaagagtcagctattggccaggcgcagtggctcacgcctgtaatcccagc

SEQ ID NO: 511460 - DNA, 201 bp, Homo sapiens
aaagaaaagaaaaaaataccatatgcgggatgacttataaagaataaacaacaggtcgggtgtggtggctcatgcctgtaatcccagcactttgggaggcwgaggtgggcggatcacatgaagtcaggagtttgagaccagcctgaccaatatgatgaaaccccatctctactaaaaatacaaaaattagttgggcttggt

SEQ ID NO: 511461 - DNA, 201 bp, Homo sapiens
ccaggatacttttatataaaaatatgtcgtatggaaaatacaacatcaacaattagtaataaaaaagacatggtaatatttaattttttttcaattagagyttccttaagcctttgttatttttacattgcttccattgtaataactatacagagcattgccaaccagaaattggtactgagttctcaaaatagatttagc

SEQ ID NO: 511462 - DNA, 201 bp, Homo sapiens
agtacaaaaaattagctgggcgtgctggcgggcgcctgtagtcccagctactcgggaggctgaggcaggagaatcatttgaacctgggaggcagaggttgyagtgagccaagattgcaccactgcactggtgacagagtgagattccatctcaaaaaataaataaaaagtcagctattagcaccttcggaggctgaggtgg

SEQ ID NO: 511463 - DNA, 201 bp, Homo sapiens
ccattcagttacaattcacaaaaggcatttttcaaacatcttgagtgacataaatagctggcaagagtgttaattgcagaagtactctgatttatcaagcraataactatgtgaatgtgctttgtaaactacaagatactctgaaaatatctgttgtcattctgttttttttttttctgagacagagtcttgttctgtcgc

SEQ ID NO: 511464 - DNA, 201 bp, Homo sapiens
gacagagtgagattccatctcaaaaaataaataaaaagtcagctattagcaccttcggaggctgaggtgggcagatcacctgaggtcaggagttggagacyagcctggccaacatggtgaaaccctctctctactaaaaatacaaaaattagctggatatggtggtgcatgcctgtaatcccagctactcaggaggctgag

SEQ ID NO: 511465 - DNA, 201 bp, Homo sapiens
gcagaagtactctgatttatcaagcgaataactatgtgaatgtgctttgtaaactacaagatactctgaaaatatctgttgtcattctgttttttttttttctgagacagagtcttgttctgtcgcccaggcagcagtgcagtgggtcaatctcggctcactgcaacctctgcctcttgggttcaagtgattctcacgctc

SEQ ID NO: 511466 - DNA, 201 bp, Homo sapiens
tccagaattgccatgtgaaatgtgtgaaggacaagatgttctgtgtttggtaaatgtgtatgaggaagagagaaacaattagaagttctctgtcacacaayctacacactaccaggaagttattctagaaaaaataacgttctctaaaacgaaccatgcaatctgacacccgtcttccacctctcagggaagagaaacttc

SEQ ID NO: 511467 - DNA, 201 bp, Homo sapiens
accacctgagcccacccctattcccacttcccactgaacggagcttttttgtaataccagtatgatattgcaaaaatgatgaagtgtgatttctgcggccrgccattgtggctttctccttgatctctctgtgctggttcacttgttctggcagaagacttcagcattcctctggagaggtccatgtggtgaggacctgag

SEQ ID NO: 511468 - DNA, 201 bp, Homo sapiens
tctgtgtttggtaaatgtgtatgaggaagagagaaacaattagaagttctctgtcacacaatctacacactaccaggaagttattctagaaaaaataacgytctctaaaacgaaccatgcaatctgacacccgtcttccacctctcagggaagagaaacttcaaaggcaggaggcagggccaatgcatgatgtgttctatt

SEQ ID NO: 511469 - DNA, 201 bp, Homo sapiens
gtgattgtgcctgggtgacacagcaagaccctgtctcaaaaaaagaaagaaagaaagaaaaaaaagtagtatgtgagaatgtttatagtattgtaccttcrttaccattgagtatttatatttgtaacctttataatttcatagaaaaagtagggcattttgccatttaaaagttttgcttttatttgtttcctattgagg

SEQ ID NO: 511470 - DNA, 201 bp, Homo sapiens
attagaagttctctgtcacacaatctacacactaccaggaagttattctagaaaaaataacgttctctaaaacgaaccatgcaatctgacacccgtcttcyacctctcagggaagagaaacttcaaaggcaggaggcagggccaatgcatgatgtgttctattgtcccaaggagacctgcctgagccttgaccctagtttc

SEQ ID NO: 511471 - DNA, 201 bp, Homo sapiens
accattgagtatttatatttgtaacctttataatttcatagaaaaagtagggcattttgccatttaaaagttttgcttttatttgtttcctattgaggttwatttttttttcatgtttctttttatatttcctcttctgggaaacctctttacatataatttgctcaactttctattggggtcttagtgtttttcttagtg

SEQ ID NO: 511472 - DNA, 201 bp, Homo sapiens
ggtgtgatcatggtgcactacagccttgaattcctaggctcaagcgatcctcctgcctcagctaccgagtagctgggaatacaagcgtgcaccaccgtacytgacttattatttattttatcaccaaatagcaagccaatttctacaatgctatttatgcaataaatagaacaatttccttctttcctgttgattggtaat

SEQ ID NO: 511473 - DNA, 201 bp, Homo sapiens
gtgtgatcatggtgcactacagccttgaattcctaggctcaagcgatcctcctgcctcagctaccgagtagctgggaatacaagcgtgcaccaccgtactygacttattatttattttatcaccaaatagcaagccaatttctacaatgctatttatgcaataaatagaacaatttccttctttcctgttgattggtaatt

SEQ ID NO: 511474 - DNA, 201 bp, Homo sapiens
tgagactgcagtgagctgtgattgggccactgcactccagcctgggcaataggatgagactctgtcaggaaagaaaaagaaagaaagaaagaaagaaagaragagagagagagagaaagaaagaaagaaagaaagaaagaaagaaagaagcaaggaaggaaggaaggaaagaaagaaagaaggaaagaaagagaagaaaga

SEQ ID NO: 511475 - DNA, 201 bp, Homo sapiens
ctggagcattatttaagagcagtctccacacttgttaccaaatttctcctttttttctgggaagcagagaccatgttctctccatccttcgcaggtccacrtgaggccataccagaatcacgcactccatctagcggcatttaacggctgtagcagaatgcagaccaggaaagcccctaaacccaatctcccctgcatttc

SEQ ID NO: 511476 - DNA, 201 bp, Homo sapiens
tgtgattgggccactgcactccagcctgggcaataggatgagactctgtcaggaaagaaaaagaaagaaagaaagaaagaaagagagagagagagagagaragaaagaaagaaagaaagaaagaaagaaagaagcaaggaaggaaggaaggaaagaaagaaagaaggaaagaaagagaagaaagaaaggagagagagagaa

SEQ ID NO: 511477 - DNA, 201 bp, Homo sapiens
ctgttgtgggtaagttgatcaaattttgtgtttcactatgatttgaaaatcttggttgaggtggtctttaaaaatccttaaaataacagaatggagagatyttcctaagctatcaattggagggaattattgttcagatcatcctctatgtttcctgatgggatctaaagggattacagtaccgtttccggacctgtattc

SEQ ID NO: 511478 - DNA, 201 bp, Homo sapiens
ctaattctgttgagcaaggaaaaattgctctcaagtccagcaatttcagttatggaaactaaaataaaagtgagagtggttactagctatgaatttctctyggaattttttctctgctttgtttccttctgaaaaagtagatgtatgccaaatgagactgacttcatcatttcttggaacttttgggcagtgataagcaat

SEQ ID NO: 511479 - DNA, 201 bp, Homo sapiens
atcctattttatgatttcattaatgtggattttagtttagtttagtataaataagtataaaagtaaatattacccaaattttaggctatcttctagtataktatacctacaggttgaagatagaaaaaatgaaattcaaacttgtttactaaatatctatttaaatcctatagcaatctgctttctttatgctcttaccaa

SEQ ID NO: 511480 - DNA, 201 bp, Homo sapiens
caagcaaagtatcaaactgcttggccttggcaataaagctgaggatatttcttattatctcattcccagtatcatccaatcacactattatccccccccartctttagtttcatttaggactagcaaatgtcactgcaaacatgtatattacccaaaaagtacataggaaaaatcatatcagcttcaactagtctaccttc

SEQ ID NO: 511481 - DNA, 201 bp, Homo sapiens
ttctccaatttgggtgatcagtttttctttatactccctgtattttataaaattattattattatcattattattttttgagacagagtctcgctctgtcrccaggctggagtacagtggcgcaatcttggctcactgcaacctctgcctcccgggttcaagcaattctctgcctcaaactcccaagcagctagggacagg

SEQ ID NO: 511482 - DNA, 201 bp, Homo sapiens
actggatatatacttcatattaataatccattctcttgacaatggatgattggattgtttccagtcttttgctattataaacaatgtagctgtgaacactsttgggcatttaacttaggctagtacttttcaaaatacatttgctgaaggaagagttttctttccttctttcttttttttgagaaggagtcttgctctgtc

SEQ ID NO: 511483 - DNA, 201 bp, Homo sapiens
ctcctgtctgccacaagagggatgaatttcacagacataatgtggaaacaaggaagccagtcacaaaacagtccatactgtatgattcctctcattcccaytgatttcagaaacagtgtttggaggttactcaattgtcgtgaaaagaaaatcaggaaagacactgacacaccaatttactatcaagggtagggtaaccaa

SEQ ID NO: 511484 - DNA, 201 bp, Homo sapiens
agctgggattacaggcatgcaccaccacacccagctaatttttgtatttttagtggatatgaggtttcaccttgttggccaggctggccttgaactcctgwcatcaggtgatcagcccaccttagcctcccaaagtgctgggattacaggcatgagcccctgctcccggcctgggagagttttatttctaatccttgtggg

SEQ ID NO: 511485 - DNA, 201 bp, Homo sapiens
taggcttttaagagaggaaaaacacttacaggtgaaggtattttaacaaatcgctttagcatccatggaaagctttcaaatcacaaacaaagggagaatayttatcctatcccatagagatttaagctacatgtctcatgggcatatattagcctgccaataatactagggtgcgagtttgattgtatacatgagaaacat

SEQ ID NO: 511486 - DNA, 201 bp, Homo sapiens
atttatgggttgtttcttaactcattttacagtgcttttgatgaagagaagtcccacattctaaaagacaggtttctgtttcctaattgttagttacatgytattgtgccagacccctattgagttggatagggatagcacaggttcgagaggccaaagaagagaggccaaagaagagaccgagagctggcaaatgagata

SEQ ID NO: 511487 - DNA, 201 bp, Homo sapiens
ggctatcctataatgtcccactaatggtcataagatatctaagtaggagccagttcccctgagaaaaaaggggtacctgacatcatccaaaccttattcaktaagttattttaactttgggcctggtgcggtggctcacgcctataatcccagcatttggggaggctgaggcgggcagatctcttgagcccaggtgttcaa

SEQ ID NO: 511488 - DNA, 201 bp, Homo sapiens
ccaaggtgggcagatcacctgaggtcaggagttcaagaccagcctggccaacatggtgaaaccccgcctctaccaaaaatacaaaaatcagttgggcatgrtgaagtatgcctgtaatcccagctactccggaggctgaggcataagaatctcttgaacctgggaggcagaggttgtagtgagctgagatcgtgccactgc

SEQ ID NO: 511489 - DNA, 201 bp, Homo sapiens
tctgtctcaaataaataaataaataaataaaaataaaaaaaataaattagccaataacatagtagcttaaaacaacaataaacacaaattccccagggtcrttatggtgggatgcgacttcatcaccagattgacctatcaagtgcaaggaaacttggcttcaggagaggctaacttacttctgtgtagtgtagggggaaa

SEQ ID NO: 511490 - DNA, 201 bp, Homo sapiens
attttaaacagcacatgacaaatcttgctgcccttctatccgctaaaggtaaaaaaccaaacgtccataattctccaaaggcaaagatagagtttttccartacagatgtaagtcagcctattatccacacattcccaacaaatggcctttaagagcctttggtgccaaattcaacaaatggaagggttttacacaggtta

SEQ ID NO: 511491 - DNA, 201 bp, Homo sapiens
agacttcctgctgagagagaaggcagttagaggctggttaggcagatagagagggagggtctctggagaagggcagtgttcacaagaacgctagcaggacmgtacctacaccgcctctgcagctaatgggaagaaatgtggttaagaacttccccttatgccaggatgttgctcagaagggactgtcctaacttaggcaca

SEQ ID NO: 511492 - DNA, 201 bp, Homo sapiens
attgggccactgcactccagcctgggcaataggatgagactctgtcaggaaagaaaaagaaagaaagaaagaaagaaagagagagagagagagagaaagaragaaagaaagaaagaaagaaagaaagaagcaaggaaggaaggaaggaaagaaagaaagaaggaaagaaagagaagaaagaaaggagagagagagaaagaa

SEQ ID NO: 511493 - DNA, 201 bp, Homo sapiens
ttgcccacttggaggtaattcattaaaatttgaggtttaggatgaggaagtgccagccttcagagtcccaggcctattgtgcaacagcagagccaacagcrccaaatgcctccctagcatgtctggtgaataggatcactttcctctcgccttgtagacatacttgagatcattcactacttttcattcatttcttatgtg

SEQ ID NO: 511494 - DNA, 201 bp, Homo sapiens
agtttggtcgacatggtgaaaccctatctctattaaaaatacaaaaagaattagccgagcgtggtggcacacgcctgtaatcccagctacttgggaagctraggcataagaattgtttgatcctaggaggccagatcatgtcactgcactgcagccttggcaacagaatgagactctgtcaccaaagaataaattaataca

SEQ ID NO: 511495 - DNA, 201 bp, Homo sapiens
tcccattgacagagtggaatatttcagttaacaagacaatataattaatagagctatcattgaacccaaaaagggattaccaattttaacataattattayaaaacgtatgctaacccccaaataatactatgcatgatgtgacctctctttgatttggaagagcctgtagaacctcagagggtgtcaaggcatcactttg

SEQ ID NO: 511496 - DNA, 201 bp, Homo sapiens
ctttcatatttatgtgatacctttcacgattgatgccattcacttcttttttttttgagacagaatctcactctgttgcccaggtaagagtgcagcagcamgttattggctcactgcaacctctgcctcccaggattaagcgattctcgtgcctcagcctcccaactagctgggattacaggcatgcgccaccataccctg

SEQ ID NO: 511497 - DNA, 201 bp, Homo sapiens
caggtcctggtgcttgatggtcgaggccatctcctgggccgcctggcggccatcgtggtaaacaggtactgctgggccggaaggtggtggtcgtacgctgygaaggcatcaacatttctggcaatttctacagaaacaagttgaagtacctcgctttcctccgcaagcggatgaacaccaactcttaccgaggctcctacc

SEQ ID NO: 511498 - DNA, 201 bp, Homo sapiens
acgattgatgccattcacttcttttttttttgagacagaatctcactctgttgcccaggtaagagtgcagcagcaagttattggctcactgcaacctctgsctcccaggattaagcgattctcgtgcctcagcctcccaactagctgggattacaggcatgcgccaccataccctgctaatttttttttttttttttagta

SEQ ID NO: 511499 - DNA, 201 bp, Homo sapiens
tccgggcccccagccgcatcttctggcggaccgtgcgaggtatgctgccccacaagaccaagcgaggccaggccgctctggaccgcctcaaggtgtttgayggcatcccaccgccctacgacaagaaaaagcggatggtggttcctgttgccctcaaggttgtgcgtctgaagcctacaagaaagtttgcctatctggggc

SEQ ID NO: 511500 - DNA, 201 bp, Homo sapiens
ccccacaagaccaagcgaggccaggccgctctggaccgcctcaaggtgtttgatggcatcccaccgccctacgacaagaaaaagcggatggtggttcctgytgccctcaaggttgtgcgtctgaagcctacaagaaagtttgcctatctggggcgcctggctcacgagtttggctggaagtaccaggcagggacagccacc

SEQ ID NO: 511501 - DNA, 201 bp, Homo sapiens
tcatcttacttcccttatccctttgcctccaaacctgtttccaaaacaaaagcattcctctgaggaagtgcttgcacggtgataggtgatagatagcccaygtggggagaggttgggagaatcatgcagaagagaaaccgagagagatggaaacggcattctggccagccacttttcttgtaatccatcactgtttgccct

SEQ ID NO: 511502 - DNA, 201 bp, Homo sapiens
caaatacacagaggtcctcaagacccacggcctcctgatctgagcccaataaagactgttaattcctcaaaaaataaaaaataaataaaaataaaaaattaaaaataaagaagaaaaatattaaaaaagtatttatttgtaactagctccatctagtgagaattgcttaaaattacatgattcatttatgaatctcctttg

SEQ ID NO: 511503 - DNA, 201 bp, Homo sapiens
tctggccagccacttttcttgtaatccatcactgtttgccctgcagtagcgggctggttgagcagagccccataattaaaattctctattctaacctgtcstcacatctttaagatgattctttgagaagtctgggttaaaaggtttaaggaagaaaccaaattgtgagttttgggggaaaggatgatcatcatctttaaa

SEQ ID NO: 511504 - DNA, 201 bp, Homo sapiens
atgtaatgaatagtaaatatatattttctatttttttcttttttcttttttttttttttttgagacagagtctctgttgcccaggctggagtgcagtgccrtgatctcaactcattgcaacttctgcttcccgggttcaagcgattctcctgcctcagcctcacgagtagctgggattacaggcgcttaccacacctggct

SEQ ID NO: 511505 - DNA, 201 bp, Homo sapiens
atgtttctgatgtccatttccccagccagggagaaaatgtaagccaacagggcctgtgtgtagaggttggtcgtggaggtggccgaattcttgagacaccrtagaccctgactcaccattgggtcctaaaaagtgaagatgaagactataacttataaggcattcctttaaaaatggcaagtaatcaggaaatcatcttat

SEQ ID NO: 511506 - DNA, 201 bp, Homo sapiens
tcttgctctgttgcccaggctggagtgcagtggcacgatctcagctcactgcaacctccaccctctgggttcaagcaattttcctgcctcagtctcccgartaactgggattacaggcacgtgccatcatgcctggctaatttttgtatttttagtagagacagggtttcaccatgttggtcaggctggtctcgaactcct

SEQ ID NO: 511507 - DNA, 201 bp, Homo sapiens
atgcttgtgggtcttcacacaaagagaggccttaagggagagaacagatgagcattgcttaccattggttggtatgaaccagctgcctactgaggctctgracaaagggcttctcaagaacaggttttgcagagggaatgacgggttcccatttgtcccatgactcatggtaagttcctggcaaatttccctaaacccttc

SEQ ID NO: 511508 - DNA, 201 bp, Homo sapiens
agtttgagaccagcctgaccaatatgatgaaaccccatctctactaaaaatacaaaaattagttgggcttggtgacgggtggctgtaatcccagctactcsggaggctgagactggagaattgcttgaacctgggaggaagaggttgctgtgagctgagattgtgccactgcactctagcctgggcaacaagagcaaactc

SEQ ID NO: 511509 - DNA, 201 bp, Homo sapiens
gtcataatagaaagcataagcacaattaacaagactgacatgcctagttttagccacccagaaaacatagactgttttccacgaggaatccaagaaaacaraaaagaaaaccagtcctcagagacagtctgggaggctgttgtacccaagtggcttgctctctaacttttcctagatgagtttctacctccacggattcgt

SEQ ID NO: 511510 - DNA, 201 bp, Homo sapiens
ctaactgcttacccagaaccgtaacataagccttggtcgagtcaggaacaatgtccactgggagctccagggagacagattcagatgccacctttcctgtsagatgcagaaaaaaaggtgacacaatagaagatggggaatggcaggggttctcaagacaaaattttagaagaactttctataatccagggatttctgtac

SEQ ID NO: 511511 - DNA, 201 bp, Homo sapiens
ctctactaaaaatacaaaaaaaaaaaaaaaaaaaaaagccaggcatgggggggcatacttgtaatcccagctactaaaagactgcagcttccatcttgggygcaccccttttctcaaactgcttgctctgggaaaaacagctgttgtgtgatgaggcaccccaccagagagattcatgtgatgagatactgagtgaggccc

SEQ ID NO: 511512 - DNA, 201 bp, Homo sapiens
cgagtagctgggactacaggcgcccgccaccacgcccggctaatttttttgtatttttagtagagacggggtttcaccgtgttcaccaggatggtctcgayatcctgacctcatgatccgcccgcctcggcctcccaaagtgctgggattacaggcgatagctgctattcttattaggattctggaagtcacactctgtgt

SEQ ID NO: 511513 - DNA, 201 bp, Homo sapiens
gtacagtgacgtgatctcggctcactgcaagctccgcctcccgggttcacgccattctcctgcctcagcctcccgagtagctgggactacaggcgcccgcyaccacgcccggctaatttttttgtatttttagtagagacggggtttcaccgtgttcaccaggatggtctcgatatcctgacctcatgatccgcccgcctc

SEQ ID NO: 511514 - DNA, 201 bp, Homo sapiens
aaatttagacatgttggttttatgtttagattgctgagacagtggaaagatttataatacatcacgtagcaaaaagcttcctactgcttaaggttctgtgrtccaatacggtggccactacccacatgtgaccacttaaatttaaattaattaaagcaaaattcaaaaatcagttcttcactcatatacttatatttttat

SEQ ID NO: 511515 - DNA, 201 bp, Homo sapiens
attaacaaaatgtttacaaagtgtgatgttctggaaggcagaataacatttttgaattagtgagtgaggattaggaaagaagaaggttaggagaaaaatgsaacctgacaagaccagagctgggagtcactaaaggaaaaggcttattttagactctttaagggagccatgctcttccagttaagactagggtaactttgc

SEQ ID NO: 511516 - DNA, 201 bp, Homo sapiens
tcaatattgtgtgagcccagcagagagcagagggaagtacagacagggaatatactgtagctaaaggggagatataaatagctagaaaatggggaggttcrgtgtctgctctgattcctttgggaatgttctcatgacagatacacatatgggaagcctgtccctggacatgtgactgtgagcatttgcagaaagtatagt

SEQ ID NO: 511517 - DNA, 201 bp, Homo sapiens
agctgggaaatatgtagcggggaggtgacttcaaggtccaggcaggaaatcctctggattctttaagaggagtcgcagagctgattattgaacccagaagytcagggacatagacggccacatctatacttaactgactttgccacttcataaagggagaaaatgaaagtctaaaaaagaaattcaagtctgagctcaggc

SEQ ID NO: 511518 - DNA, 201 bp, Homo sapiens
atggatcagtagaatcaatattgcgaaaatgaacatactgccaaaagcaatctgcagattcaatgcaatttccatcaaaataccatcatcattcttcacakaactagaaaaaaagctgggcgcggtggctcacgcctgtaatcccagcactttgggaggcagaggtgggcagatcatgaggtcaggagatcgagaccatcc

SEQ ID NO: 511519 - DNA, 201 bp, Homo sapiens
gattgacccttggcaaaccctcggaaatgttcttaggatgttctttatgtcactaattgatgattttgttgtgtacacttggagcaatgtaccatgccatrctggcttgctaatttgctttgcacaaacattgagattgatgatgtacccctggtctcattgttgtgatcctgagttttggttgctatggctaatcgcata

SEQ ID NO: 511520 - DNA, 201 bp, Homo sapiens
ctcagtcactggtcttctgctgctggctttcctcgcccgtctaccacttccctctcttacccaatttgacagctgtgatgttccagtggtgggtttttgcktcatcagcacagagacaactggaggtctgagaatctgcccatgattctagctggtactcatgcgatttagccaggtcagtctgaacctacggaggatgtt

SEQ ID NO: 511521 - DNA, 201 bp, Homo sapiens
acaattatctttgcaatctgagtttactccttattaaatttgttctcaattctttaggaagattgaattttagtgtataaatcctgttgacaaatgaggtwctagaatgatgagaattctctttaagaggccatttctgagataaatctacatagcaagtaggtctagttgctcagtccttacacctccaagggagcctgg

SEQ ID NO: 511522 - DNA, 201 bp, Homo sapiens
agcttcccagcactgagaccaggcatttctctttccttgctaggctaaggtctaagaaaaactctgctccatgttgacgtcatcttttttttcctcctctyctgaacctaattatctctgagacagtgattcaaggaagaaaggagaagtaaacgctatctggaggcctgactcttccatcctggttcccacacctctctc

SEQ ID NO: 511523 - DNA, 201 bp, Homo sapiens
tcaccctgatgcaatcctttaggtaattgaagatggtggcagtaagacgaaaggattccccacggactactgagtaagggagagtcaggtcaacaaagaayggcttgaaagcagttagtccaacagtgggtgaaagcccgaagcctcttgactgggaagtgcagaaactcatcgccttccactcggtgatggcgtcaggaa

SEQ ID NO: 511524 - DNA, 201 bp, Homo sapiens
ttaccagtgtgagccatggcgcccggcctgatccagtgagacttcttatgataatatgcaatataaaacattgagaaaagtgaagcatcagctaatcttasacacacacacgggtttttgttcttatcagagtatttggctactaggcagatatatcaccaaaaatgattccttgaataggcaattcctcagactaggaat

SEQ ID NO: 511525 - DNA, 201 bp, Homo sapiens
aacatatacatacatgttattgtttgtcttacaaaatttggattatactatatacatttctgggcaacttgtgtgcttctttaaaaaaaaaaaaagtcccrgaaactcctccagatcaacagataaagatctaactcaaaattatacctatcagcaaattgtataataatttagaaaatcaaagacacgatattttagaaa

SEQ ID NO: 511526 - DNA, 201 bp, Homo sapiens
gcttacctcagctactcagcaatgaatactgagttatccaatcaggtcagcaaggcatcactttaaggaatccaggtgaaagtttctaggagtcggacaarggatggtggtcaattaaaactctgcctgggccgggcacggtggctcaggcctgtaatcccggcactttgggaggccgaggcgggcggattgcctgagctc

SEQ ID NO: 511527 - DNA, 201 bp, Homo sapiens
cctcctgtatttcatatacagatgtaccaactgatcaggagcatccaatacttctcctgccatcgcctgagatctgcatgaattcattgtcccaagccacmagcactggagcacacttcatgtaacagcaagcactctgcctctgcctgcagtccttgaaaaggaagctattagttaaatgaggtctggcaaggattggga

SEQ ID NO: 511528 - DNA, 201 bp, Homo sapiens
gttaatctgccttatgtcaatttaattcctaggcccaactaaagatgccacttaagaactgagatggttagaggtgatctttaaattcccctgctgtgtcraccactttctctgtacagcgggcaggactgcccggcctgtttcctcctgtatttcatatacagatgtaccaactgatcaggagcatccaatacttctcct

SEQ ID NO: 511529 - DNA, 201 bp, Homo sapiens
atggaaaagcaagtacatgaattcatagatgttaacaagcagtgcatttgtaaagctaaaaagaaacattttacctggtgtcctttcagatcatcagtctytctgctcagtcaagcacaattcttttaatccctatcttcatccacttgtctctctaaaattgattgggcttctcctaggatcttcatgtttgtacaaaga

SEQ ID NO: 511530 - DNA, 201 bp, Homo sapiens
catatttccagcactattactgatagtcgctatattgaaaaggaaagcccctgttacataattgacaatgaccacattttagtaaaatttgaaatttccaraaaatataatttctagtgtttctaagacaagaaaattctccagtagatacaatgcatctttctgatgaaatgactcccgttcccctccttccaccattgc

SEQ ID NO: 511531 - DNA, 201 bp, Homo sapiens
gttggtgtcctcaaccagtaaccattttatgagtctcaactcagtggggagtatatatgaaaaaattatttttcctcaaatcagtgctttcaaccatattmtactaaatccccttttcctatactttaacaacatgctggacagatatcatgattttccatttagattcctcactttcagtgtgaaaactgagttcagtcc

SEQ ID NO: 511532 - DNA, 201 bp, Homo sapiens
tcctaaactcagacttcgcctcctgtattgcacctgaaagcacctgtaagtaccatctggccctccctatgttgccttatgggaattggggctcagggaayccaagctctgaagtcaccttggctgctgcttttactgtgaatacacgtctttgtctctgactcagagatctcctgttttctaacacgatgtatataaaaa

SEQ ID NO: 511533 - DNA, 201 bp, Homo sapiens
gacgactgtctgtgaatcttcagcactcctacatgtttcgctcctgtgtgccaggattatctttctaggaatgcctagtgcaagcaggcagccctggagarataaagacaaggacttcccctgaagcaaatgtatttacattcctagataaataaagatcaaaacggtaactttcaccgagagatttacagacatctttcc

SEQ ID NO: 511534 - DNA, 201 bp, Homo sapiens
gctgtcccatacatcatcgataattatgctttctgctgacatagtcagattcaacactttaagtttgtcacacacattgttttgatattgagtgcttgatwtggaaattcttacaactgaaagtgttggaaaggatgagatttttaaaaggaaaatgaaggggaatgtccaaaaggagaagtttaagggaaaaaaaacttc

SEQ ID NO: 511535 - DNA, 201 bp, Homo sapiens
tgtagtgtgatcaaaagaatctaaggagaacctcctctccaaaatctgattggagctgttcaccctctcaaggacaagataaagattgacttcagagatayatcacatcaagctagaggaaaaaaaaaaaacctcaaataaaatttttcctcattcgaagggatccagggtatccttgggttatgtaggagggaatcatat

SEQ ID NO: 511536 - DNA, 201 bp, Homo sapiens
atccaatgtcgatcttcaagtctcggctgcttcaaactctctttatgctctttgggcggtagaccagagggtattgctactaaggaattatggtcagctgycagcacaaactgtgagtgattaaaaccatctttgtttaccacccacagtatagttttatgtctttacctttggataaaaacaggataccttaaataaact

SEQ ID NO: 511537 - DNA, 201 bp, Homo sapiens
aggtggaggttgcagtgagccgagattgtgccactgcactccaacctgggtgacaagagcgagactccgtctcaaaaaaaaaaaaagaaaaaaactgcagscaaagttggatttgcggcctatgaataaaaccattactttaaaaagtaatacccccaaaaaagttacacctgaagtttcatcttcatgcctttgtgtaat

SEQ ID NO: 511538 - DNA, 201 bp, Homo sapiens
ccacttccaccttaaacttcggcagcactgaagagagtaaaaggagaaatggagaaagcactggaggaggaatcagtcagacaggcagtgagcagaggggyataaacagtgagaattaaattaatggatctaatgaaggaggcattatttaggtagcatgttcctgaagtaattagctggttcagcatcgattcaaaaatg

SEQ ID NO: 511539 - DNA, 201 bp, Homo sapiens
caaatttacagaaacagagtgagtccatgtaagaaacctgaccttatacacagggacgatgcactgaaacctgtttcacagcaaagggaactgaaagtttytaaagcagtcaccacagcagccacgtggcttagaacacaaaacagacagccccctaaattatgaagtcatacacacagctgctaaataacagcactgagt

SEQ ID NO: 511540 - DNA, 201 bp, Homo sapiens
gcatcaccatgccaaactaatttttgtatttttagtagaaacaaggtttcactatgttggccaggctgatctcgaactcctggtatcaagtgatccacccrcctcggcctcccaaaatgctaagattacaggtgtgagccaccatacccggccagcaacttttttttttttaagaatactatctatggtgactatttctag

SEQ ID NO: 511541 - DNA, 201 bp, Homo sapiens
cctgggcaacatggggtgatcctgtctctacaaaaaatataaaaattattcaggtgtgatggcacatggctgtagtcccagctactcaggaagctgaggcwggaggattgcctgagtaacctccactcaggaggtggaggttgcagcaagccaaaattgtgccactgcactccagcctgggcaacagagtgagagactcta

SEQ ID NO: 511542 - DNA, 201 bp, Homo sapiens
agcttcatgcctggttggtgatatgctccctggatgcacagaaatttgctctcattttttcccagactaagtgtgaagtgaggagatggttatttaaagakaattctctatttgacaaaaatccagttaatatattaatataaaatttaaaaataggtcaggtgtgatggctaacgcctgtaatccaagcactttgggagg

SEQ ID NO: 511543 - DNA, 201 bp, Homo sapiens
tggtctggtgacacttagtgtatgcagaagatattcactatgccgttccgactgccacaacacacattcacaaagtatctgtgaagaattcaatcaacagktatgtggaaaccactctcctcaggacactaataccaaggttttctcttctcatggattacaatagtgaatacaatacaacagagaatagtgtttgaaata

SEQ ID NO: 511544 - DNA, 201 bp, Homo sapiens
gttgggaggctagaggcacattccgacccagggttcggtttacctgcaataggtttcccagctgtggctggcaaggagaggaagaggaagagcaaagaggmcaagagggaaagaagagacagaagagatggaaaggaaggaccacaagacaaaataaacagaagatattaaacagctgagccctgcctcttccacaccaac

SEQ ID NO: 511545 - DNA, 201 bp, Homo sapiens
taaggtactgacatcttagattcacctagaagacgctagccctggacacacaggaagccaccaaagggaggagagggggctgggtgcagacaaaaggtackggtttccacagcccttaggctggtgggagctaagagaaaagggaaggaagggaaggtttcctccagtgtccactgtgggtcagagaaaaagcaagaggct

SEQ ID NO: 511546 - DNA, 201 bp, Homo sapiens
ggaatgggcctggcagagctggggaaagaacacaaaccaggctctgagcaagcagccgagggctaaggtactgacatcttagattcacctagaagacgctrgccctggacacacaggaagccaccaaagggaggagagggggctgggtgcagacaaaaggtactggtttccacagcccttaggctggtgggagctaagaga

SEQ ID NO: 511547 - DNA, 201 bp, Homo sapiens
aatcccatcctttacttgggtaccccaattacccaaagttggccaattagtgctgcagtctgtttcctttgggttgagaagtattttcagtattgtcccayttgtggttcatgagaaagatgttatcagaccccaacacttaaccaaagttagcctttgagttgggagtttccacactatagtcccctctgggtcgtcaga

SEQ ID NO: 511548 - DNA, 201 bp, Homo sapiens
ttgtaaaagtcaaagaagcagtttatgacctgccactctgcttagcacccaatatcaaactggcaaggctcaaacttgccccctgttgggccccatcatcrttaatccaacctctgaccagagagttttgacttgtgatctctgggaaagatggttaccctgagtaatagaaaaaataagaaagggaaaggagagagagaa

SEQ ID NO: 511549 - DNA, 201 bp, Homo sapiens
aaaaaaaaccttattcttgctggaagagtctataggaaaaaaattaatgtaagtataataaataaatggttatagatgtatactatatatatatatttatrcaatatataatgataaaaccactaagcaaaagtgttgcaggagttaaggatgagccaccccaaaattggctgatgtgatgtactgattatttcaagctga

SEQ ID NO: 511550 - DNA, 201 bp, Homo sapiens
aattgaacaatttgtaaaagtcaaagaagcagtttatgacctgccactctgcttagcacccaatatcaaactggcaaggctcaaacttgccccctgttggrccccatcatcattaatccaacctctgaccagagagttttgacttgtgatctctgggaaagatggttaccctgagtaatagaaaaaataagaaagggaaag

SEQ ID NO: 511551 - DNA, 201 bp, Homo sapiens
taggaagcctaattacctttaaattgtacaacattttttgcataaattattttcatatttttatgacttacacagaccatttatgacatgcttggactttyggacttgtcctaaacatacctcttgtcaaacaaccattttactttagaacaagaatttaccatacaagatcctttgttatataaaatctttttctttata

SEQ ID NO: 511552 - DNA, 201 bp, Homo sapiens
gagcaggccaggtacggtggctaacgcctgtaatcctgacactttgggagtctgaggcgggtggttcatctgaggtcagtcaggagttcaagaccagactrgccaacatggtgaaaccccgtctctactaaaaaaaaaaaatagacaaaaattagcgggggggtggtggcagggcctgtaattccagctactcaggaggct

SEQ ID NO: 511553 - DNA, 201 bp, Homo sapiens
ttcttgaaacattaagttttctgtctccagtttcccatttttattaaagacaaattatggtaacaccaacttgctttattatacttggcctgattgtttgyataaagtgtagcaagaataattatttttcacataagctttttgtaaattggaactctgttccatagaaggaatcttagataagatttttttagatccgag

SEQ ID NO: 511554 - DNA, 201 bp, Homo sapiens
cttctttatgctgaataggggcaatgatattcctgcctaactattagggtcttttgtgtttacggtagagaggagcttagttagaaagcattggcctgggygcagtgactcacgcctgtaatcccagcactttgggaggccgaggtgggcagatcacctgaggtcaggagtttgagaccaacctggccaacgtggtgaaac

SEQ ID NO: 511555 - DNA, 201 bp, Homo sapiens
gctgctggttgcccatttttatggctatttcttaatatgctaaacaaggggtgggttattcatgcctctcatttttagaccatatataataactttctgaygttgtcatggcatttgtaagttgtcatggcactggtgggagtgtagcagtgaggatgaccagaggtcactcttggtaccatcttggttttggtgggtttt

SEQ ID NO: 511556 - DNA, 201 bp, Homo sapiens
aacatcttgtaaaaactgggagcaggccaggtacggtggctaacgcctgtaatcctgacactttgggagtctgaggcgggtggttcatctgaggtcagtcrggagttcaagaccagactggccaacatggtgaaaccccgtctctactaaaaaaaaaaaatagacaaaaattagcgggggggtggtggcagggcctgtaat

SEQ ID NO: 511557 - DNA, 201 bp, Homo sapiens
attaaagtgagaacaatgtattaagaaagtaaaggagtgaaagaatgggtactctatagacagcagccccaagggctgctggttgcccatttttatggctrtttcttaatatgctaaacaaggggtgggttattcatgcctctcatttttagaccatatataataactttctgacgttgtcatggcatttgtaagttgtca

SEQ ID NO: 511558 - DNA, 201 bp, Homo sapiens
actaatagtctttctattatactattggatctttattcatccacctatacaagtaggaaataaggatgaatattcatttagaagaattaatattcatattmacacattgctctcagattattgggaattaacatcttgtaaaaactgggagcaggccaggtacggtggctaacgcctgtaatcctgacactttgggagtct

SEQ ID NO: 511559 - DNA, 201 bp, Homo sapiens
tcagaaactatagaggggtccaacccaggatttcatgtttgtatcttcataaggccatgctcctgacaggtctaggcaacctgggggatgacttaggttartgtgctaggattgacacacctcatccagccttcttactttgtggatgggaacacttaaggaatagagagattaaatcttacacttaccccacagctggtt

SEQ ID NO: 511560 - DNA, 201 bp, Homo sapiens
agaatagagaatgtctttaatgtgcatagactttctaatgtactttaaactcttaaagtacattaaattgggtttaaaataatgggttttccctttagctwtctttacactgtctcatcactgtctttttaccagaaaatattcaacttcttggctttgatttcctctctcctgacctcttagcttggatacattttgtac

SEQ ID NO: 511561 - DNA, 201 bp, Homo sapiens
gaaattaagaccacacaactggtaaagaatcttaaggatctacaggcttcactgcaagaaaaaaaaagaaaaggaataaaaacatcctagtaactttttartaaattcctttactcctcaagttagcaggagagacgtaatacatttcatctctcaacgtagatggctttgataatttacttcaagcaggatcagacattt

SEQ ID NO: 511562 - DNA, 201 bp, Homo sapiens
catccaccgcccggagcgcacacagggatccgggagctgcctgcagctgcagctccacttctgctcctggaagctgctgggagggggagaagccaagggamacctggggaagggaaaggtataacttggggatcaggtcagcctggaaaggaagggaaacaacataatttgggtcatcagcaaatatgccccagctatgac

SEQ ID NO: 511563 - DNA, 201 bp, Homo sapiens
atgatatagtttttggttttattttatatttggatctctaattcatctgggatttatttatttatctttagagacagagtcttactatattgtctaggctrgactgcagcgactattcacaggtgtgatcatggtgcactacagccttgaattcctaggctcaagcgatcctcctgcctcagctaccgagtagctgggaat

SEQ ID NO: 511564 - DNA, 201 bp, Homo sapiens
ggcaatatggggtgcttgaattttcatttgtaagctttctggtagctgtaaaaacatgcttcatatagctaccttcagcacttgcttctctagtgtttttyttagacatagatgcaggagatttttctttggcactgtgtgttatgccccacagagaggaagcctcaccgtgttgctgtgtggagaaaatggcctggttgc

SEQ ID NO: 511565 - DNA, 201 bp, Homo sapiens
ttgagtatttgaaacttgactagttcaaaatgaaatgagctgtagatgtaaaatactcactggatttcaaagatttaatatctcactaacatttttgtatrtttattacatgttggagcaatattttggatacaagaagtaaaatttattgtcatgatgaatttttcctgtttttgttgttgttgttgttgttgttgttaa

SEQ ID NO: 511566 - DNA, 201 bp, Homo sapiens
gagagtcgcttaaattcttttttttttcttcttcttttttttttgttttttgagacagatgttgcctaagctgctgtgcagtagagcgatcacagctcackgcagccttgacctcctgggctcaggtgatcctatacctcagctttccgaatagctggggctataggtatatgccaccatgtctggctaatttttaaaact

SEQ ID NO: 511567 - DNA, 201 bp, Homo sapiens
gaggtttgggttcctgctgaattccttacccaaataataaacatagtacccaataggtagttcttacatctttgtccttcttttggagtccccagtgtctrctgtttccatagaatcattttcttttttctttttccttttttttgatatggagtctcgctctgttgcccaggctggagtgcgggggcacaatcttggctc

SEQ ID NO: 511568 - DNA, 201 bp, Homo sapiens
cttctttgacccatgggttatagaaaaactgttaattttcaaatatttggggattttccaggtattgttttattaatgatgtctagtttaattctgttttsgtcaaatatactttgcatgatttcagtccttgtaaatgtattaaaacttgttttatggccagaatatgtgctatcttggtaaaagtctgtgtgcactgga

SEQ ID NO: 511569 - DNA, 201 bp, Homo sapiens
taattttcaaatatttggggattttccaggtattgttttattaatgatgtctagtttaattctgttttggtcaaatatactttgcatgatttcagtccttktaaatgtattaaaacttgttttatggccagaatatgtgctatcttggtaaaagtctgtgtgcactggaaaagaatgtacattattcatttgttggactaa

SEQ ID NO: 511570 - DNA, 201 bp, Homo sapiens
ctttactgaaaatcccatatattaagaacatctttccactctggcaggtgaaaacactattcctagcactgtgtgagatctaagagttgttctgcctactmctttgaagtggttcagctcagaactcaaccaaaggcttgagaggattcctctgtagttatctagagctcactctttgcgcatctctcttttctctggtac

SEQ ID NO: 511571 - DNA, 201 bp, Homo sapiens
actccacactctctccctctgaagctcagtgaaactggcaggctctgtctgggttcccccttcctgcactgcaccttggatagtctctccatgcattaagyagggggaattgtggggctcgcctaacttattcccctcctctcaggaatcactgtcttgtgttacctgttgtccaatatcaggaagccattgttccatata

SEQ ID NO: 511572 - DNA, 201 bp, Homo sapiens
cagaagtcgaagtccacatgggcagcctggaattacactaccagactgcaacgaggcagcatctgctcattcatgtcaactcgattttattgagcacaccyctatgccaaacactgggtcagctctgggaacatcaaactgtaaagacgtggttcctgccctgaagcagctcgagcccagccagggagaggaggcaacaac

SEQ ID NO: 511573 - DNA, 201 bp, Homo sapiens
ggtttcatattcatgaattataagactcaacattaagatgtcaattttccccaaatttatctacagattcatatcaaccccaattgtaaccccagcaggattttttttttttttgatacagggtatcactctgttgtccaggctggagtgcagtggtgcaaccacggctctctgaagccttgacctcctgggctcaagcga

SEQ ID NO: 511574 - DNA, 201 bp, Homo sapiens
gaatcacacgctgtcacattttgtctgggcctttgcttctcttggactgacagcactctaactggttttctaagagttaccagccccctttttcatttagwatcactactcatttttccttttcagggaatgtatcttaggaaacagctgacaataaatgcagaggttatcctatctgagtttttactatttcccagttct

SEQ ID NO: 511575 - DNA, 201 bp, Homo sapiens
agtgtgttattagcttaataataaaggtatcaactaaacagaattaagtccagaaacagaactacatttatacaatcaactgattctcaacaaagctctgrcgcaattaagagaggaaaaatagtcaaacaatgttataggaagtcattatatatccatatggggaaaaaaaggaacctcagtcctacctcaactatacac

SEQ ID NO: 511576 - DNA, 201 bp, Homo sapiens
tggactgacagcactctaactggttttctaagagttaccagccccctttttcatttagtatcactactcatttttccttttcagggaatgtatcttaggaracagctgacaataaatgcagaggttatcctatctgagtttttactatttcccagttcttaagtatagatgtctttctctctctacaggtttgcatcactg

SEQ ID NO: 511577 - DNA, 201 bp, Homo sapiens
ggctgagttctagcccagctctccactgccgaggcttgtggcctcagccaaggagtctctccttgtggggctgcagcctccttgtgtataaggtgcagacrcaaatgttcctgccctgcctgagctgctgtgaggacagctgagaggacacaggccaggccggtgactgtcctcactgccactggcactcatggaccctag

SEQ ID NO: 511578 - DNA, 201 bp, Homo sapiens
ctgctgatataaagaagccatcacattttttaaatcagtattttcattctaggtgccaaagcctccaagcagggagttttggacttgccaaatgatgtaghagaagggtcagccagaggctttttcactgttgtgggtaagttgatcaaattttgtgtttcactatgatttgaaaatcttggttgaggtggtctttaaaaa

SEQ ID NO: 511579 - DNA, 201 bp, Homo sapiens
atacatgcacacttaccgtacgcttggcccagcaatcttactcctagatatgtacacaaaagaaatgaatacatatatctacacagacttgtacccagatrttttgagagatttattcataatagccaaaaatggaaacaaccccaatatacatcaactggtgaaaggataaacagatagtgatatatatctgtttatata

SEQ ID NO: 511580 - DNA, 201 bp, Homo sapiens
tatttctgtcactcaagccaccaagttttgtgagtctattacagcagccacagaaggcagccacagaacatgaatatagaggcggtatttagggaaaaatyacagaagtttatcagtgaaggggctttttatctatagattataaccacaagtagaataacaaaggtacctaataggtccttagtttattaacaaagcagt

SEQ ID NO: 511581 - DNA, 201 bp, Homo sapiens
cgtgcaggggccatgctaataatcttctctgtattgttccagttttttagtatatgtgctgccaaaacaagcatgactctgtctttaaaaaaaaaaaaaamaacaacaacaacaacaacaaatgctggccaggcattatgctgaggtgggtggatcacctgaggtcaggagttcaagaccagcctgaccaacatggcgaaa

SEQ ID NO: 511582 - DNA, 201 bp, Homo sapiens
cacctttgctgattttttttttttttttttttttgagacggagtcttgctctgtcacccaggctggagtgcagtggcgtgatgtcagctcactgcaagctscacctcccaggttcacgccattctcctgcctcagcctcccgagtagctgagactacaggcacctgccaccacgcccggctaattttttgtattgttagtg

SEQ ID NO: 511583 - DNA, 201 bp, Homo sapiens
ttagctgccttcccacggggcagggctcgggacctgcagcccgccatgcctgagcctcccaccccctctgtgggctcctgtgcggcccgagcctccccgaygagcaccaccccctgctccaaggcgcccagtcccatcgaccacccaagggctgaggaatgcgagcaaacggcgcaggactggcaggcagctccacctgca

SEQ ID NO: 511584 - DNA, 201 bp, Homo sapiens
aatccataaatatacacatctactaggtacccataaaaattaaaaattaaaattaaccaaaaaaaagaacttacaattctgatgttgtcatccagcacatwgttggggtcagtgatcttttcattatcagattttagaagtcagaatttaattagtattcatttttgctattcctattatcattgctttattttgtacttg

SEQ ID NO: 511585 - DNA, 201 bp, Homo sapiens
gatagaatgacattgctgacaaatggatggatcccatatttttaggaaagccccatatgtaccatttccctcagcttttgatagaaagtaaatggcaaagrgttccaggcagcatttcccagcagcacctggagggcggctcttctgtgctgcctgtgatatcggaagcagtcagcttcagctgtcactgggctgggagac

SEQ ID NO: 511586 - DNA, 201 bp, Homo sapiens
ccatatgtaccatttccctcagcttttgatagaaagtaaatggcaaagagttccaggcagcatttcccagcagcacctggagggcggctcttctgtgctgyctgtgatatcggaagcagtcagcttcagctgtcactgggctgggagacacaatggttagaaagccagtgccctccatttgaaagtgagctgaggaagttc

SEQ ID NO: 511587 - DNA, 201 bp, Homo sapiens
  misc_feature (1)...(201): n = A,T,C or G
cacaaaggtgcagagcccctagaaaatgctcacaggttcacatgtaacatacaattcgagggcatcatagatccccgcaaagcatgcattccaggttggangactcccggaactgcagtgttacacaaggcacagcacacaccaagtggtaatggtgactcaacttgatagacctgtagaaggcttaaaaggtgactatca

SEQ ID NO: 511588 - DNA, 201 bp, Homo sapiens
agatggttagaggcagaaattgaatcagatctcaacattatcagtcagtagtaggactataaaataaatagaaaactatgacatgcttttggaaaagttcwagatattaactatgtattatttgttgtaggcgaaaattttgaccagagtcctttgagaagaacattcaaatccaaagttctcgcccactatcctcagaat

SEQ ID NO: 511589 - DNA, 201 bp, Homo sapiens
attctaggtgccaaagcctccaagcagggagttttggacttgccaaatgatgtagtagaagggtcagccagaggctttttcactgttgtgggtaagttgawcaaattttgtgtttcactatgatttgaaaatcttggttgaggtggtctttaaaaatccttaaaataacagaatggagagatcttcctaagctatcaattg

SEQ ID NO: 511590 - DNA, 201 bp, Homo sapiens
cttttttctctgctgtatccccaagatctatattatatattctgtggttttggcacatagtaattgctcagtaaagctgtgttgagttacttgataaaaartaagtcagtagaaataacttaaatgctcaacattaatgtcattggttaagtagcaatgcatagaactaaatattatgctattaaaaagtttatttgtaaa

SEQ ID NO: 511591 - DNA, 201 bp, Homo sapiens
tgtatgcagaagatattcactatgccgttccgactgccacaacacacattcacaaagtatctgtgaagaattcaatcaacaggtatgtggaaaccactctsctcaggacactaataccaaggttttctcttctcatggattacaatagtgaatacaatacaacagagaatagtgtttgaaatacccatcaagcaaaatggt

SEQ ID NO: 511592 - DNA, 201 bp, Homo sapiens
tctgatttttttttttctttctttcacagttgtgcatgcctaaagggctatctttcaggacacaaacggacaataaagacccccagtttcactcatttatmattaccagggaagatggttctcgcacctatggttttgttctcactttttatgaagaagttacaagtaagcaaatctgcacagcaatgcagacactttacc

SEQ ID NO: 511593 - DNA, 201 bp, Homo sapiens
atagctcactgcagcctccaactcccaggctcaagcaatcttccagcctcaggctcccaagcagctgggactacaggtgtgcaccaccaagcccagctgattttttttttttgaaagaaggggtctcactatgttgcccaggctagtcttgaattcctgacctcaagtgatcctcctgccccggaatcccaaagtgctggg

SEQ ID NO: 511594 - DNA, 201 bp, Homo sapiens
aggagaaatgtttgttgttgatacgaaaggcaaacttctttgtctgttattaacatgaacatctcttggaagggatggattacactttgtaattcataggrttgattgattaaaaaaaaaactagcaaacaagcaaacaaatgcattctcctaacttcctcctctctctagtaatgagattttcagaaatatttttcatag

SEQ ID NO: 511595 - DNA, 201 bp, Homo sapiens
ctcaagcaatcttccagcctcaggctcccaagcagctgggactacaggtgtgcaccaccaagcccagctgattttttttttttgaaagaaggggtctcacyatgttgcccaggctagtcttgaattcctgacctcaagtgatcctcctgccccggaatcccaaagtgctgggattacgggcatgagccacagtgtgggact

SEQ ID NO: 511596 - DNA, 201 bp, Homo sapiens
gtgagactgcccatcttaacaaacaaacatatgttgaaatcctaaccctgccatgtgactgtactacagatctggccttcaagggtaaaggaggtcataamggagcagccataagggagcagcccttgtcctcataaaagagaaagagacaccaaagatttgtttttctcctcctcctcttttcttgctccacagtaagaa

SEQ ID NO: 511597 - DNA, 201 bp, Homo sapiens
aaactcagcctctctccactctgtacctaccacctggagagggcttgtaaggctgagagatcccgtctaggccaattgattgggtcctgatacagcaatgrccagcctaaaatccaactactctctcagggccaaacccagagctgctgagcccctccctccagctggctggtctgagcagtcgcagcccagctgtgggct

SEQ ID NO: 511598 - DNA, 201 bp, Homo sapiens
aggtgtgcaccaccaagcccagctgattttttttttttgaaagaaggggtctcactatgttgcccaggctagtcttgaattcctgacctcaagtgatcctyctgccccggaatcccaaagtgctgggattacgggcatgagccacagtgtgggactgatacatttttgaaaaaaggaaacaacatatattcatgaaggaaa

SEQ ID NO: 511599 - DNA, 201 bp, Homo sapiens
caggaacggttcatggagcacaaactgtttatgaccccctctcaccagcgaggcataaagcaacacggtggtctctgccctgggcaggggcagaagtcgargtccacatgggcagcctggaattacactaccagactgcaacgaggcagcatctgctcattcatgtcaactcgattttattgagcacacccctatgccaaa

SEQ ID NO: 511600 - DNA, 201 bp, Homo sapiens
ttccacagggaaagacaggttgctagcacttccatggaacagctactgtcacttttagcaggcattccttttgttgaggattcttgtccactgcaaaaggwgttgtccaaaaccctgccacttacattagaagtacttggagtttccatgttcttcaaattcagttggttaccagtcatttgggtatttggattcatttca

SEQ ID NO: 511601 - DNA, 201 bp, Homo sapiens
cttcaagggtaaaggaggtcataaaggagcagccataagggagcagcccttgtcctcataaaagagaaagagacaccaaagatttgtttttctcctcctcstcttttcttgctccacagtaagaacgcagccatctgcaagccaggaagagaccccctccccagaaccagaaccctgccagaatctggatcttcaactttc

SEQ ID NO: 511602 - DNA, 201 bp, Homo sapiens
tacggaaaatcatattgagaggccactggatgatgtgggaggaactggcataggtatattaaaaactaaactaactttaaaagggcaattattaactagaraaaacagaatattaagacatattgttcaagacaaaattatgttcaaaacataatcataacgcactggttcactcagcagagactaaaacttagaattata

SEQ ID NO: 511603 - DNA, 201 bp, Homo sapiens
tgcatatgccagagaatcttgtactttctggataattaaaataccatcgatttattacacattcatacgctttatctctttcctctctctcctgatcctayctgccctccccaacacacactctctcccaaaggatgttccctttctacagctgctggaggactggactgctactactactcctggctgtggcagtgagag

SEQ ID NO: 511604 - DNA, 201 bp, Homo sapiens
tgccatcatgcccagctaatttttgtatttttagcagagacagggtttcacaatgttggccatgatggtcttgatctttgacctcgtgatctgcccacctyggcctcccaaggtgctgggattacaggcatgaaccaccgcgcccagccaactctagccagaattctgtagcctagagtccttttattcacccaaatactt

SEQ ID NO: 511605 - DNA, 201 bp, Homo sapiens
aggcatgaaccaccgcgcccagccaactctagccagaattctgtagcctagagtccttttattcacccaaatacttttaatgagtttcacactagacttamaaataccaaccaccaccaccacttttcatcaaattaatcaaagtttaccagttaaattttaagagctcaaacttttttttgcaaactactcagtctgcaa

SEQ ID NO: 511606 - DNA, 201 bp, Homo sapiens
aaaagagggatggaatcaacaggcagggggccttttataagccttaggaaaagaaaatgaaactatttcatctttggacttttcaatactattggagtgattttttttctttctaaacagggaaaataatgttacaaaagcatcttttttgttatttgtttgcatccctcccccacaccctggtgttttaaaatgaagaaa

SEQ ID NO: 511607 - DNA, 201 bp, Homo sapiens
gaggcctttccggtaccagggcaagaaaataacccttatctccagggactgggaactgccactgagctggacctgtacagataaacttacttaataaatcmttatcttccactaggtttacatccccccataaatctcctagtgactcccctagaatttactgtccccaacctggatccctttgtccagtcctttcttcac

SEQ ID NO: 511608 - DNA, 201 bp, Homo sapiens
taccagaatcacgcactccatctagcggcatttaacggctgtagcagaatgcagaccaggaaagcccctaaacccaatctcccctgcatttcaccgtggckccgatacctttctaatacctctacaaaaggcttagagctctcttctcaaagaccagcacccctaagatcaagggtgttgctcataatgacttttgcagct

SEQ ID NO: 511609 - DNA, 201 bp, Homo sapiens
atgtgtgaggctaagatgaactgagttaacccccatttaagcatgtaattttgctagaagaaaacttttactgtggcattgacctcatgtgctctttactsgggtattgaacctccatgggttcttcattccccacagaatcaatgacatgagagccttctaccatttttctcaccttttcagacattgctctcctcctca

SEQ ID NO: 511610 - DNA, 201 bp, Homo sapiens
tgcagaccaggaaagcccctaaacccaatctcccctgcatttcaccgtggcgccgatacctttctaatacctctacaaaaggcttagagctctcttctcamagaccagcacccctaagatcaagggtgttgctcataatgacttttgcagctttcttctcccacgtctctgcaatgcacattcacaagccgaagctacttc

SEQ ID NO: 511611 - DNA, 201 bp, Homo sapiens
agggttagattggagagcactgcccaggaggctagaggtatgttaagtcttactgtatggggaaaggagtggaggaaatcagtgatctgagaacagctggrctcctgcagaaccttggatttgtgatctaaacacctaaatttttttgtcccaaccacagtcctgacttcacaaccttttgtattcccaataaaaagacta

SEQ ID NO: 511612 - DNA, 201 bp, Homo sapiens
cctgcatttcaccgtggcgccgatacctttctaatacctctacaaaaggcttagagctctcttctcaaagaccagcacccctaagatcaagggtgttgctyataatgacttttgcagctttcttctcccacgtctctgcaatgcacattcacaagccgaagctacttcactttatcccgttgtgaagtcctggaaaatcat

SEQ ID NO: 511613 - DNA, 201 bp, Homo sapiens
gctgaaaatgggatgttgaagttaccagctattattatattggggtctgtctctctttttagctgtaacaatatttgctttatgtatctgggtgctccaayactggtatatggatccagtgttgggtccatatacaattacaattgttacatcttcttgctgaattgccccctttatcattatatagtgaccttctttgtc

SEQ ID NO: 511614 - DNA, 201 bp, Homo sapiens
tcttttttgttatttgtttgcatccctcccccacaccctggtgttttaaaatgaagaaaaaaaaccatcactttttgtacaaaaactcttaatgattaaamaacaaacaaaacatattggccttgtcatttgtgtgaaagtgggcaaagactggaatagagtaagacaactgaaaccaattttcatccttttactgaggaa

SEQ ID NO: 511615 - DNA, 201 bp, Homo sapiens
cattgggcaggcaacctgacattccacccagttccttgccttaccatactatgtattcctcctcttggagaattaagacctgggctaaatgctccactccrggataaggctgagcagtcctagttctctagactgcctcttttataaagattggattaaggtacgtgaaatggtgagaactgtaaagattttaaaaaataa

SEQ ID NO: 511616 - DNA, 201 bp, Homo sapiens
caggacatactagtcgtacaagccaaatcgttgttgacctaaaattttatagtctatgagggtctgaatatcaaaagccagatctttggcccacttttttwaaaaaaaggctatttgatgtatgaaaagtaagatgtttattggtgaaggtgaactgatttctagactactgtgaatctttctgtggttatttggatttat

SEQ ID NO: 511617 - DNA, 201 bp, Homo sapiens
ccattttgcctttagagtgggaataataaaacagacctcatacttttgtgtgaaagcgagggaactgcaaatctcctgcccctagtagcactaataattgytagctgctgcttcttaatattacatagcacctggaaggatgacgggcctgcttgctaaagctggctgtgagtttggggtcggcttggggagaagagcaga

SEQ ID NO: 511618 - DNA, 201 bp, Homo sapiens
ggtttggattggatgggaattggtggcttaggggctgcatcaggtggaagagacaagggtgaagactgaagcatgggctgaacgaccagggtttgggcttkctgctgggactgggaaggtgggacctgctgagtaggtgggacctgtggtggctgaggggcagtgagggtggtggcttgcggctgctgctgttgctgctgt

SEQ ID NO: 511619 - DNA, 201 bp, Homo sapiens
tctttgcttataaattatatccatttagattttgctttgagagaggagtatttggactccaaggtctttcatttgtggcagccagattaaaatcggagaasaatttctgccaggcttctaggaactagtcagacaggtatgtgagggaagaaaccggagggcagccaaaggactggaaaagcgaagacacggggtatgagg

SEQ ID NO: 511620 - DNA, 201 bp, Homo sapiens
tccttcctgactgcatttttagagctgacccttcaccctcatgggggaagggcgctacagggatgagggcagggaggaggccggttaccaaatgaaagaayggggctgctggagattctaagatcatttatttataaacttctgcagccctgctaacatccatgcttgtgatttacctcacctctgtctcccagttggtaa

SEQ ID NO: 511621 - DNA, 201 bp, Homo sapiens
aaacatgactaaattgctagcaatgtccttcataatcaagcaagatttgtcctcttctacaatcctttatatataatttatcctccattccaagaatattraattctaaagtggctgacaataaatctcaaaagaaggcaacacattctacggaagaaaaaggagcaaataaaatagaattatatagaaatgaattagaga

SEQ ID NO: 511622 - DNA, 201 bp, Homo sapiens
tggacagattatgaggtcaagagatcaagaccgttctggccaacatggtgaaaccccgtctctactaaaaatacaaaaattccctaggcatggtggtgcgygcctgtagtcccaccttctctggaggctgaggcaggagaatcacttgaacccgggaggcggaggttgcagtgagctgagatcatgccactgcactccagc

SEQ ID NO: 511623 - DNA, 201 bp, Homo sapiens
ggagaattatcactgttaagtgtctaaagaagatttgtaagctataacaagaataaggaatgcagatatcagagggtatggacttgtttttctatagcctrtggaacttgtgtaccaagagggtacatgaccatatcgcatttcaccctccttacaaatggagcagaattaccgctactgcatatagttacattccacccc

SEQ ID NO: 511624 - DNA, 201 bp, Homo sapiens
tgttcatgtgtcatttttagtaatatagtaaacttctaatttatactaatgtaggctttaatagactaaattactaatgtaggctttaatagactaaatartgtctcccaaaaatataaaattctaacctctagaatctgtaaatattgccttatttggaaaaaggatttttgcagatgtgatagggatcttgaaatagga

SEQ ID NO: 511625 - DNA, 201 bp, Homo sapiens
aaaatatggaatgcttcaccaatttgcttgccatcctcgtgcaggggccatgctaataatcttctctgtattgttccagttttttagtatatgtgctgccraaacaagcatgactctgtctttaaaaaaaaaaaaaacaacaacaacaacaacaacaaatgctggccaggcattatgctgaggtgggtggatcacctgagg

SEQ ID NO: 511626 - DNA, 201 bp, Homo sapiens
gactccgtcacacacacagaaaagaaaaaaacaggccgggcacggtggctcacgcctgtagtcacaacactttgggaggctgaggtgggtggatcacgagrtcaggagttcgagaccagcctggccaacatggtgaaaccccatctctagtaaaaatacaaaaattagccgggcatggttgcaggcacctctaatcccagc

SEQ ID NO: 511627 - DNA, 201 bp, Homo sapiens
tttttgttgttgttattgtttttggtttttttgagatggtgtctggctctgtcacctaggctggagtgcagtggtggaatctcagctcactgcaacctccrtcccctgggaatcaagcgattctcctgccttagcctcccaaatcacacatctgtatataggcatatgtcaccatgcccggctaatttttgtgtttttagt

SEQ ID NO: 511628 - DNA, 201 bp, Homo sapiens
acatgtacgtgggagacttcagaaggaaaatgtaagacccaaagaggccagagcagtggctcacacctataatcctggcattttgggaggccaaggtgggyggatcacctgaggtcaagagttcgagaccaacctggccaacatggtgaaaccccatctctactaaaaatacaaaaattagctgggcgtggttgttcatgc

SEQ ID NO: 511629 - DNA, 201 bp, Homo sapiens
tgaaaaggaaaggacccagagtttccttatctgtacagaaggtaagaggatcttttagggagtcaaattagtcctaaataaaattcaccaaaagaatcagktcatgtcctctccttccacatgagtccatgtgccctgtgatttcactttaaataactcatggaggattcttgtgtttcatgctttatctttatggtataa

SEQ ID NO: 511630 - DNA, 201 bp, Homo sapiens
aaaaatacaaaaattagctgggcgtggttgttcatgcctgtgatcccagttactcgggaggctgaggcaggagaatcacctgaacctgggagatggttacrgtgagctgagattgtgctgaggcaggaaaatagggtctggaggcagggagcataaggccaattcacacttaagctaaaacaggaaatagcctctccatct

SEQ ID NO: 511631 - DNA, 201 bp, Homo sapiens
tcgaactcctgacctcaggcgatccacccgccttggcctcccaaagtgctgggattacagacgtgagccaccgtgcccagcgtaaatgtatattttcttcyttataatttccttttctctagcttactttattgtaaagatacaggatataatacccaccacatacaaaatatgtgttaatcgactgtttctgtgggaagg

SEQ ID NO: 511632 - DNA, 201 bp, Homo sapiens
gggaggatttcttgaggccaggagtttgagaccagcctggacaacatagcaagaccctgtctctacaaaaaataaaaaaacgtagttgaacatagtggcaygcacctgtagttctagctacttgggaggttgaggtgggaggattgcttgagttcaggatttctaggctgcagtgaactatgatcgtgccactgcactcca

SEQ ID NO: 511633 - DNA, 201 bp, Homo sapiens
aaggatcaaagggaccaacagacagagagggagaaagagcaaagcaacgacccctagagaaacgatagactgggaaaagaaatgaagcaaaggaaaggaargaaaaggcgagaaaaactttgagaatgagagaaaggagagagaaggttgattgtttaatccctcacctcaactccaagaaggcgggaaagaatgctgcag

SEQ ID NO: 511634 - DNA, 201 bp, Homo sapiens
tgaggcaggagaatcacttaaacccaggaggtggagcttgcagtgagccgagatcgcgccactgcactccagcctggcaacagagtgagactccatctctwaaaaaaaaaaaattaggctgggcacggtggctcactcctgtcatcccagaaatttgggaggccaaggcaggtggatcacctgaggtcaggagttcaagac

SEQ ID NO: 511635 - DNA, 201 bp, Homo sapiens
gggcgtggtggcgccagccagtagtcccagctacttgggaggctgaggcaggagaatcacttaaacccaggaggtggagcttgcagtgagccgagatcgcrccactgcactccagcctggcaacagagtgagactccatctcttaaaaaaaaaaaattaggctgggcacggtggctcactcctgtcatcccagaaatttgg

SEQ ID NO: 511636 - DNA, 201 bp, Homo sapiens
aacccaggaggcggagtttgtggtgagccaagaccgagccactgcactccagcctgggtgacagaacgagacttcgtctcaagaaaaaaaataataataakaaataaataaaaactaaccttcagaccatttatatagaccttgttacatttgacttctctgctggtaatggttgatagattttaaaaatcaaataaactc

SEQ ID NO: 511637 - DNA, 201 bp, Homo sapiens
gtcagggaatataacagccatttgcactttccatttgttcattcatttattcaagaactattttttgagcaccagctatgtgccagatactgttatagatrtgtggatacatgttctaagatccagacaactgacttacagataactgttacaatataacctatttataagttaggaccctattatatataaggttatgcc

SEQ ID NO: 511638 - DNA, 201 bp, Homo sapiens
tcttctcgttgtcagggaatataacagccatttgcactttccatttgttcattcatttattcaagaactattttttgagcaccagctatgtgccagatacygttatagatgtgtggatacatgttctaagatccagacaactgacttacagataactgttacaatataacctatttataagttaggaccctattatatata

SEQ ID NO: 511639 - DNA, 201 bp, Homo sapiens
tcttttatttaaagtcaattaagtgtagctgttaaccatatctatggaataccttcacctagctttgtgtttaattgaataaactgggtactatgacttcrccaatctgacatataaaactaaccatcacaaagcatattcagtttcttctcgttgtcagggaatataacagccatttgcactttccatttgttcattcat

SEQ ID NO: 511640 - DNA, 201 bp, Homo sapiens
tggttggatgaagcccacctaagttatgaaagattatctcttttatttaaagtcaattaagtgtagctgttaaccatatctatggaataccttcacctagmtttgtgtttaattgaataaactgggtactatgacttcgccaatctgacatataaaactaaccatcacaaagcatattcagtttcttctcgttgtcaggga

SEQ ID NO: 511641 - DNA, 201 bp, Homo sapiens
gagaaaaaatttaaacctggttggatgaagcccacctaagttatgaaagattatctcttttatttaaagtcaattaagtgtagctgttaaccatatctatrgaataccttcacctagctttgtgtttaattgaataaactgggtactatgacttcgccaatctgacatataaaactaaccatcacaaagcatattcagttt

SEQ ID NO: 511642 - DNA, 201 bp, Homo sapiens
gcatacctagtaggttacagtatagtgtaagcataacttttacatgcactgggaaaccaaaaaatttgtgtgacttgctttatcacaatattcactttatdgcagtggtctagaacaaaacctgatatcacaaaacctgatattcctgatatatgggcttatctctgaagtatacctgtatctcagtgaagatgttattat

SEQ ID NO: 511643 - DNA, 201 bp, Homo sapiens
tccaacaaatgtttttcactcctccctgggtcttttagatgtggggttataatgttgcttttaaatgcagaataattttatactcttggaaataaaaattktttgagatggagtctcgctctgtctcccaggctggagtgcagtggcgtgatctcggctcactacaacatctgcctcctggttcaagcgattctcctgcct

SEQ ID NO: 511644 - DNA, 201 bp, Homo sapiens
acaggtgcataccaccatgcctggctaatttttttatatttttggtagagtcagggttttgccatgttgcccaggctggtcttgaactcctgagctcaacmaatccacctgcctcagcctcctaagtgctgggattacaggcatgaaccaccacacctggccaattgaccgaatattttaatcccactgttgagacctact

SEQ ID NO: 511645 - DNA, 201 bp, Homo sapiens
taatcccaggtactagggaggctgaagcaggtcaacggcttgaacccgggaagtgggggttgcagtgagctgagatctcgccattgcactccagcctgagygacagagcgagactctatctcaaaaaaaaaaaaaggagttacagttatcaataaggcagttgagttaaattatttgatacaaatatttaaaggagaaacc

SEQ ID NO: 511646 - DNA, 201 bp, Homo sapiens
cggggtttcactgtgttagccaggatggtgtcgatctcccgacctcgtgatcgcccacctcggcctcccaaagtgctgggattacaggcgtgagccactgygcccggccttatgtttcatttttacttctcacctcttctctatatccaagaaaggatatttatttaaaacagtaaatcttagattctgcttaatttacat

SEQ ID NO: 511647 - DNA, 201 bp, Homo sapiens
tgagaaaaaatttaaacctggttggatgaagcccacctaagttatgaaagattatctcttttatttaaagtcaattaagtgtagctgttaaccatatctayggaataccttcacctagctttgtgtttaattgaataaactgggtactatgacttcgccaatctgacatataaaactaaccatcacaaagcatattcagtt

SEQ ID NO: 511648 - DNA, 201 bp, Homo sapiens
aatattttttactttgagaaaaaatttaaacctggttggatgaagcccacctaagttatgaaagattatctcttttatttaaagtcaattaagtgtagctsttaaccatatctatggaataccttcacctagctttgtgtttaattgaataaactgggtactatgacttcgccaatctgacatataaaactaaccatcaca

SEQ ID NO: 511649 - DNA, 201 bp, Homo sapiens
ccatgtccctgccagtagcttgttattcattgttttactactcttttaatggttaccccagagattataatacaaatccttgcttaattacaattgtaatrtaagtattgtcaccagtttctggacaatgtgagggctttaaacactttcactccatttaccctccttcttttaaaaaacctttttagagacaagatcttg

SEQ ID NO: 511650 - DNA, 201 bp, Homo sapiens
tttttaaatgatacagtcaagagtttattccagagttgagaacctaataaatgttcttttatattgtataccatgctttttttagaaggcaaaaaaaaacyccaaaagcttccattatcacacttcctcttttattttttatttttatttttttttattgagacggagtcttgctctgtcacccaggctggagtgcagtgg

SEQ ID NO: 511651 - DNA, 201 bp, Homo sapiens
tttcttgcctttatttggagtagtttttaaaattattctatcccccatgtccctgccagtagcttgttattcattgttttactactcttttaatggttacmccagagattataatacaaatccttgcttaattacaattgtaatgtaagtattgtcaccagtttctggacaatgtgagggctttaaacactttcactccat

SEQ ID NO: 511652 - DNA, 201 bp, Homo sapiens
cttactatcggtatcaaaatagaatcatttaaaattccagtctgacaactattctcatttgattaatctgtttacattgagtgtaaacagacatatttggrtttgtctgccatcttactatttgtttctattttatcccatctgttttgtatgctcacttttcctcacttttcttgcctttatttggagtagtttttaaaa

SEQ ID NO: 511653 - DNA, 201 bp, Homo sapiens
tatagcttactgtaaccctgaatgcctgggctcaagcaattctcttgcctcagcctcctgagtatctgggactacaggcctgtgccaccatgcctggctawcttcttttttggtagggatggggtctcactatgttgtccaggtttggttgttttcttagtagatgtggattttacttttggcaaggatatagcatagatt

SEQ ID NO: 511654 - DNA, 201 bp, Homo sapiens
gggtcaatgttttgccttaattcctgacttgcatctttttaactctgacactaatttttctcttggttcacctaagacatctataatgtaactttattgtkctacatttcagatcattttctggcaatgcttctttgacatagcatacaaattttgcaacatgaagcaatatacatttcttgacttcaaaaaaatatggtt

SEQ ID NO: 511655 - DNA, 201 bp, Homo sapiens
cattcttctttttttcttttcttttttttttttttttgagacggagtcttgcttttttacctaggctggagtgcagtggcgtgatctcagctcactgcaacccccgcctcccaggttcaagcaaatctcctgcctcccaagtagctgagattacaggtgtgcaccaccactccaggctaatttttatatttttagtagaga

SEQ ID NO: 511656 - DNA, 201 bp, Homo sapiens
cattgacagtttcttttttttttttttttttgagacggagttttgctcttgttgccaagctatagtgcaatggctcgatctctgctcactgcagcctctgyctcccgggttcagtgattctcctgccttagcctcccgagtagctgggattacaggtgcatggccaccacacctggctaaatttttgtatttttagtagaa

SEQ ID NO: 511657 - DNA, 201 bp, Homo sapiens
aatcttcaaagtgatgtgtctttttgtatgctaacgagttgacttaaatttggcagcctctaggtagcttcagtggggtctggttacctcaaaaaccaacrtcagaataagaattgggactttcagccccacccctcaacctccagggagcaaagaagggctgaaggttaagttgatcaccaaaggcaaatgatttaatca

SEQ ID NO: 511658 - DNA, 201 bp, Homo sapiens
cttcagctctggctgagtatagacaggtagaggtgcactcaaagccacttccttccataagaccaggcgtatgagctcagaaggactcctcacagaaaacraggtgggcagaagaaactcgggtcaccaggaaggtgtcggtgtcaagctacacttactttgaccttttgccctaaagagaatgctctcttagcaaccttt

SEQ ID NO: 511659 - DNA, 201 bp, Homo sapiens
aaaatgaaaaacagaacagttgtataggtactcaaagtatggtttctactaaatggtattgctttaacaccattgttaaataaaaaagtctagacgaaccwtcacaagtcaaggaccatctgtactctgaaaattataaagcattgttgaaagaaatgaaagaagacctaaataaagggataaacagcccctgtttctggg

SEQ ID NO: 511660 - DNA, 201 bp, Homo sapiens
gtatcctgctgaaataccaatctgttaactgactgtatgttgaatgtgcgctggaaattctcagtggattttacaaccaggttgatctcctcagatggcaygtaggcggtagtggcatatttggcaagagcttggagagcaactacagtatcctgagggaaacaaccaaacgtatacttaccattttgtgagccattggaa

SEQ ID NO: 511661 - DNA, 201 bp, Homo sapiens
ctcccaagtgctgggatgacacacatgggccccacaccaggccagatgtatgtttctttatagcagattgggagttcatggcatttttctctcacttcatrgttggttcactgttctccagcctctttgtctaaggtatataattcactatttcccagagatcccttctccagaaccagcttcactcgcccctaataggca

SEQ ID NO: 511662 - DNA, 201 bp, Homo sapiens
tagtcctaattatagtcatcagcattttcttgataacaaacctacaggattttttttttttttttttgagacagaatttcgctcttgttgcccaggctggaatgcagtggtacaatctcagctcaccgcaacctccatctcctgggttcaagtgattctcctgcctcagcttcccgagtagctgggattacaggcatgcgc

SEQ ID NO: 511663 - DNA, 201 bp, Homo sapiens
gaaattcaaaatgccaagaatagctagggctatcttgaagaagaatcacaaaatctagaggattatactacccaaaatcaagaactataataaaactataktgtgtgtgtgtgtgtgtgtgtgtgtgtgtgtgtgagatattgttgaaggataggcgaagtaaacaatgagacaaaacagaatccaggaataaactctccc

SEQ ID NO: 511664 - DNA, 201 bp, Homo sapiens
gttcttagtcaacaagattctcatttggacgactaactttggaggttacaaagcagatatgagtattaagttctcgaaggtcaattaacttacttaatgcaaaaaaaaaagttttcttgtcattagagacagaatagtagattcagtgactattgatctcaatcagtttgacatttattggttttggtatttttctcagct

SEQ ID NO: 511665 - DNA, 201 bp, Homo sapiens
ctctgacactaatttttctcttggttcacctaagacatctataatgtaactttattgttctacatttcagatcattttctggcaatgcttctttgacatakcatacaaattttgcaacatgaagcaatatacatttcttgacttcaaaaaaatatggtttccccataatgtatatgaaaacatatcaaaggtgggttacat

SEQ ID NO: 511666 - DNA, 201 bp, Homo sapiens
gtaaatgcaggaacatttcttgagatgatgcaatttagtgactcatccaatatttctgaccaaaataaatatacataataccaaaaagaggcatcagtacraaatgttatctgtaatatctcatagctagtaaacttattgcccttatctcaggttggaattcctataaaactttgctaatacctttgggccaatttacca

SEQ ID NO: 511667 - DNA, 201 bp, Homo sapiens
ctgctgattatataattaaatcagacaaaccacatcatttaagcattaaaaaacctcctttgaagcctgaattcttggttttcccattatatcagccagayaccttgtcaaacggtgccttttgttttataggcattatatatgcaacttagattactgcctttttcctttattcctgtgctcataagcataccccgaatc

SEQ ID NO: 511668 - DNA, 201 bp, Homo sapiens
gcaagtaagggattcgagtgagggctgagtctgtgcttacaagaaaggagatacaatgtaagtgcctcttcttcagtccagagtattctagcaacttctgrgtcttgtccttggtctccagagtaaccgtgaatttaacatcactgtacccagggctcaggtccaaacaaaccttctgaacggaggggaaatttagccggg

SEQ ID NO: 511669 - DNA, 201 bp, Homo sapiens
taacaatatggtccccttttctgttattactgctgttgtgtaagtaccaccacctgagcccacccctattcccacttcccactgaacggagcttttttgtrataccagtatgatattgcaaaaatgatgaagtgtgatttctgcggccagccattgtggctttctccttgatctctctgtgctggttcacttgttctggca

SEQ ID NO: 511670 - DNA, 201 bp, Homo sapiens
tgaaaggagaaacaacctttgatcatacttagcagacagatcttggtttgtatacacccttttccactaagaaaccagggctcttggagaaatcgctgatkctagtaacagggtagggaagaacaagatgagcctagaacatcttgtgtcagctagacatgctcaaagaattataagaacttgtcaaaagagaacagaagc

SEQ ID NO: 511671 - DNA, 201 bp, Homo sapiens
agaaacaacctttgatcatacttagcagacagatcttggtttgtatacacccttttccactaagaaaccagggctcttggagaaatcgctgattctagtamcagggtagggaagaacaagatgagcctagaacatcttgtgtcagctagacatgctcaaagaattataagaacttgtcaaaagagaacagaagccagcttg

SEQ ID NO: 511672 - DNA, 201 bp, Homo sapiens
aaataacctaacattcatcttaaagaactagaagagcaagagcaaaccgaacccaaaattagaacaaacaataaagatcagagcagaaataaatacatttraaatgaataaaatacaaaatatcaataaatatcatttgcaacagcatggatggaaccagaagtcattatgctaagtgaaataggtcagtcacagaaagac

SEQ ID NO: 511673 - DNA, 201 bp, Homo sapiens
cctcacatggggtgataggtcagtgtgcagctgaaagcctctccagccttcctagcttcccaaaatacaaagggagaagaatcctattgtatctgtggaartgagagacaaaccttgtcttggacagtgactcctaaaactctgggtgagtgacagtacccaaaagggcctatcaatcaacaaggacggtggctgtctgag

SEQ ID NO: 511674 - DNA, 201 bp, Homo sapiens
cagaggctttatgggagaaggaaagctcaggctaaggacgccttgacggttggcacctcaaaggttacccagtgcagtcagctgcctcagagcctgagatstagagccaggccggctgagttctagcccagctctccactgccgaggcttgtggcctcagccaaggagtctctccttgtggggctgcagcctccttgtgta

SEQ ID NO: 511675 - DNA, 201 bp, Homo sapiens
tgcttataatcccagaactttgggaggccaaggggggaggatcgcctgaggccaggagttctagatcggccctagtaacatagtaagactctacctctgcaaaaaaaaaaaaaaaaaaaaaaattagcagtgggctggtggcgtgcacctgtagtcccagctgcttgggaagctgaggtgggaggatccctcgagcccaga

SEQ ID NO: 511676 - DNA, 201 bp, Homo sapiens
tccccctctcccatatcaggagaaggagaataacttatatgacaagagacagaaagtcagcaccaacttgaatctgcgtaaacaaatcttactaaaatggycattatcttccattagtgcctccgatatatttaccttcccataacttactgccccaaatgcccagatctcacttccttggtcttgttaatgtttccacaa

SEQ ID NO: 511677 - DNA, 201 bp, Homo sapiens
ccccctctcccatatcaggagaaggagaataacttatatgacaagagacagaaagtcagcaccaacttgaatctgcgtaaacaaatcttactaaaatggtyattatcttccattagtgcctccgatatatttaccttcccataacttactgccccaaatgcccagatctcacttccttggtcttgttaatgtttccacaac

SEQ ID NO: 511678 - DNA, 201 bp, Homo sapiens
ttctttttttttttggacaccaagtctcactctgtcccccaggctggagtgcagtggtgcaatcccagctcactgcaacctccgcctcccgggttcaagcrattctcctgcctcagcctcccgagtagctgggattacaggcgcatgccaccacgcccagctaattttgtatatttagtagggacagggtttcaccatgtt

SEQ ID NO: 511679 - DNA, 201 bp, Homo sapiens
aaaaaaataagtgcactttgaagaaaagctaaggagcagttaccacaagggaaatagaattgtgcgcaaaacattatctgcaaggcttaaagtttcagaartcacataggtcttaaaggttggaagtcacaataatgataagaggcataaatgctaatttactaaggattactaaaaacaattttgaagctcataaggtaa

SEQ ID NO: 511680 - DNA, 201 bp, Homo sapiens
tgctggttcacttgttctggcagaagacttcagcattcctctggagaggtccatgtggtgaggacctgaggcctccgccaactactatgtgaatgagctgmcttgggagtagatcttccagccctggctaagccttcagaccgccgaagccctggccaccaggtggaatgaaacctcatgaaaaaccctgagccagaactg

SEQ ID NO: 511681 - DNA, 201 bp, Homo sapiens
gacttgggagtagatcttccagccctggctaagccttcagaccgccgaagccctggccaccaggtggaatgaaacctcatgaaaaaccctgagccagaacygtctaggccaagatgctcccagattcctgtctagtagaaactatgtgagataataaatgttatggttctttaaaatatttaaattgctaaatattagggt

SEQ ID NO: 511682 - DNA, 201 bp, Homo sapiens
cgctttcctccgcaagcggatgaacaccaactcttaccgaggctcctaccacttccgggcccccagccgcatcttctggcggaccgtgcgaggtatgctgmcccacaagaccaagcgaggccaggccgctctggaccgcctcaaggtgtttgatggcatcccaccgccctacgacaagaaaaagcggatggtggttcctgt

SEQ ID NO: 511683 - DNA, 201 bp, Homo sapiens
ctcaaaaaataaaaaataaataaaaataaaaaattaaaaataaagaagaaaaatattaaaaaagtatttatttgtaactagctccatctagtgagaattgyttaaaattacatgattcatttatgaatctcctttgaactagtaacattttttgagagcacttttccattttaaagaactataaatcctgtaattttatgt

SEQ ID NO: 511684 - DNA, 201 bp, Homo sapiens
gcacatgcctataatcccagctactcagaaggctgaagcaggagaattgcttgaacccgggaggcggaggttgcagtgagccgagatggcaccattgcacwccagcctgggtaacaagagcgaaactccatctcaaaaaaaaaaaaaaaaaaaaaagaggccgggtgcggtggctcacacctgtaatcccagcactttggg

SEQ ID NO: 511685 - DNA, 201 bp, Homo sapiens
ctggtagagcgctagcccccatcataggtgaagcgctagttgccccaggcatccatgccagtgccagtgttcacatgtttacaggtggcaaactgggacaygaaactggtagaaggggataggctggcaagtgacacatataggaggttgagagtttcaggggaaattaagtaaatacaagaattttggaattagatgact

SEQ ID NO: 511686 - DNA, 201 bp, Homo sapiens
gtgaacccgggaggcagagtttgcagtgagccaagattgcgccactgcactccagcctgggctgggcacagagcaagactccgtctcaaaaaaaaaaaaaaaggaaaaggaaagaaaataaaacagtgcaatggtgtaaggctaagtattaattcagtcacgtatgtgtgtctgtgtgcctgtgtcctgggtcataagata

SEQ ID NO: 511687 - DNA, 201 bp, Homo sapiens
tgtaattgttgcttcactgtactgcaggtatccccctgtttaaaaaaatgtatgaataccgtgcctcgtgtaatctgctttgaaacacaggttataacctrttggaacctgtgcttcctgggcgcacatcctcaagctcggcctgataaactttgtttgattgagattcccatcttggtctctcaatttgggttgacacag

SEQ ID NO: 511688 - DNA, 201 bp, Homo sapiens
tgaacccgggaggcagagtttgcagtgagccaagattgcgccactgcactccagcctgggctgggcacagagcaagactccgtctcaaaaaaaaaaaaaaaggaaaaggaaagaaaataaaacagtgcaatggtgtaaggctaagtattaattcagtcacgtatgtgtgtctgtgtgcctgtgtcctgggtcataagataa

SEQ ID NO: 511689 - DNA, 201 bp, Homo sapiens
acgcctataatcagcactttgggaggacaagccaatcacttgagctcaggggtttgagaccagcctgggcaacatggcgaaaccctatctctacaaaaaamtatgaaaaattaggccgggtgcagtggctcacgcctgtaatcccagcactttgggaggccgaggtgggcggatcatgaggtcaggagatcgagaccatcc

SEQ ID NO: 511690 - DNA, 201 bp, Homo sapiens
gccgaggtgggcggatcatgaggtcaggagatcgagaccatcctggctaacaaggtgaaaccccgtctctactaaaaatacaaaaaaattagccggacgtrgtggcgggcatctgtagtcccagctacttgggaggctgagccaggagaatggcgtgaacccgggaggtggaggttgcaatgagctgagatcacgccactg

SEQ ID NO: 511691 - DNA, 201 bp, Homo sapiens
gaacccgggaggtggaggttgcaatgagctgagatcacgccactgcacaccagcctgggcgacagagtgagactccgtctcaaaaaacaaaaaacaaaaarccaaaacaacgaaaattagctgggcatgatggcatacgcctgtagccccagagattcaggaagctgagatgggaggattgcttgagcccaggaagtcgaa

SEQ ID NO: 511692 - DNA, 201 bp, Homo sapiens
cctggcctattccacgccccggacacagagtgtgtgagtggcacttacgtgtggatatgttttcattcagtctcactctggagtccctgcgctgtgcttcyggggctttgggactgtctggaacacagcaggaggcagcaccttgtggtggtgagtgaagctgccattcctctccattcatcctgaatttacctggagtca

SEQ ID NO: 511693 - DNA, 201 bp, Homo sapiens
agtcgcttgaacccgctaggcggaggttgcagtgagctgagatcatgctgctgcactccagcctgggtgacagagcaagactccctctcaaaacaaaaacaaaaaaaaaccttattcttgctggaagagtctataggaaaaaaattaatgtaagtataataaataaatggttatagatgtatactatatatatatatttat

SEQ ID NO: 511694 - DNA, 201 bp, Homo sapiens
tgtgtcagaagcaggcctctaattcctcagggttagagtgggaagaacccatgtgtgcacatttgcttttccaacctgggcaccatttggcagctgattcrggcaattctctcaccaccaccaccctgcccatgtacccctgtttccagcctctgtttttctctgcagccacggctcctttcttgtgtttccaaggtggag

SEQ ID NO: 511695 - DNA, 201 bp, Homo sapiens
ctctcaaaacaaaaacaaaaaaaaaccttattcttgctggaagagtctataggaaaaaaattaatgtaagtataataaataaatggttatagatgtatacwatatatatatatttatacaatatataatgataaaaccactaagcaaaagtgttgcaggagttaaggatgagccaccccaaaattggctgatgtgatgtac

SEQ ID NO: 511696 - DNA, 201 bp, Homo sapiens
tttatcagtgctgacctcttaaagcaattctgtaggtcacaagtgtcaacatagaagtcttctgaaaatagagtttgccaacttaaaagaaccttaccaawggcttctatgaatttcctaaaaacaaaaaaatgggcttctgtttcttgcctctctacaggagattattttaagcaaatatgcctgaatttatgaaatagt

SEQ ID NO: 511697 - DNA, 201 bp, Homo sapiens
gggcgaggcggcaaaggccgccgcatgtgtcctcggggccggcccctgcgtgcggtcagcagccgtgcggcatggcccgggctgcggcggccgcgggtagsgaggggctccggattctgcttattcagagacgcccgtccgccatgtctcccgggccgcgtcactgcagtctcgccctgggtctggcgcgctccggctcgc

SEQ ID NO: 511698 - DNA, 201 bp, Homo sapiens
atgagaccatgatagaagctagaagtgcaaagtgcaagtctaccaaacccatcccagctaattttgataacactattaacaataccctgtttatggtttttgttttttttttttttttgagacagagtctgtctctgtcaccgaggctggagtgcagtggcgcatctctgcttactgcaaggtccgtcccctgggttcatg

SEQ ID NO: 511699 - DNA, 201 bp, Homo sapiens
ttaaccagaggtcatctctgagctcagactggggcttctcaacatatgcatagaggccaggcgcaatggctcatgcctgtaatcataccactttgggaagstgaagcaggtggatctcttgagcccaggagttcaaggccagcctgggcaacatggcaaaacttcatctctactgaaaaagatacacaaaaatagccaggc

SEQ ID NO: 511700 - DNA, 201 bp, Homo sapiens
tacatctgggctggcttctaagtttacagaggacaagaatcatgccctatggattcttgtgtctgtccaacctagcacagcacctggcacataggctgttsatctgaactgagaggtggcaacagcgtttagaccagaatagaggtgtcgctgaggaagcaccttgaaaagaactcgaacatccaattcacctttgcttaa

SEQ ID NO: 511701 - DNA, 201 bp, Homo sapiens
aatcacatctcttctttccttttatcatatagattccactgatataccttgaggtaagtatcagaaaaagtatcttataaggaaattagtgcttttagagrgtaggaggttctgataatactctagacagatgaactactttaaaaattttcagatctgaattcctcctactcccagttgtcaggttgattgtattttctc

SEQ ID NO: 511702 - DNA, 201 bp, Homo sapiens
gatgaatccttgcacatcttcaaacccgctgagttggaaatgagtttgaggcaaggtttcgttgcctaaaaccaaatcctcttgataaatgagttttgacrgagcatcaactcaaatacttttttttttttttttttgagacagagtctggctctgtcaccagactgtagtacagtggcgcatctcagctcactgcaatct

SEQ ID NO: 511703 - DNA, 201 bp, Homo sapiens
tcaaacccgctgagttggaaatgagtttgaggcaaggtttcgttgcctaaaaccaaatcctcttgataaatgagttttgacagagcatcaactcaaatacttttttttttttttttttgagacagagtctggctctgtcaccagactgtagtacagtggcgcatctcagctcactgcaatctccgactccctggttcaagc

SEQ ID NO: 511704 - DNA, 201 bp, Homo sapiens
agctcactgcagcctccacctcccaaactcaagcaatcctcctgcctcagcctcctgagtagctgggaccacaggcacatatcactacgcctggctaattyttttgtttgtttttagcagagcaaggtcttgctatgttgcccaggctggtctcaaactcctgaattcaagcgatcctcctgcctcggtctgccaaaatgc

SEQ ID NO: 511705 - DNA, 201 bp, Homo sapiens
acgcctggctaatttttttgtttgtttttagcagagcaaggtcttgctatgttgcccaggctggtctcaaactcctgaattcaagcgatcctcctgcctcsgtctgccaaaatgctgggtttacaggcatgagccaccatacccaacctcaaattttaatttttaattaaagaatctccgtttcctgccaggaaaacaaaa

SEQ ID NO: 511706 - DNA, 201 bp, Homo sapiens
tgagaccatgatagaagctagaagtgcaaagtgcaagtctaccaaacccatcccagctaattttgataacactattaacaataccctgtttatggtttttgttttttttttttttttgagacagagtctgtctctgtcaccgaggctggagtgcagtggcgcatctctgcttactgcaaggtccgtcccctgggttcatgc

SEQ ID NO: 511707 - DNA, 201 bp, Homo sapiens
taatgagaggtggttaaatcatgagggctctgccctggtgaatggattaactttgccataaaacaagcttgcaggagtgtgttctctctctcctgcacttstgccacatgaggactcagcgttcctcttctctggaggatgcagcaacaaggcatcatcatggaaccagagactcaaccattggtgcctttatcttgaatg

SEQ ID NO: 511708 - DNA, 201 bp, Homo sapiens
aagcttgcaggagtgtgttctctctctcctgcacttctgccacatgaggactcagcgttcctcttctctggaggatgcagcaacaaggcatcatcatggamccagagactcaaccattggtgcctttatcttgaatgtcctaggctccagaactgtgagagaatagatttctgttcctcataagttacccagtctgtggta

SEQ ID NO: 511709 - DNA, 201 bp, Homo sapiens
aaaaaattagccggacatggtgacaggtgcctgtagtcccagctactcgggaggctgaggcagaatggcgtgaacgcaggaggccgagcttccagtgagcygagatgacgccactgcactccagcctgggtgacacagcgagactccatctcaaaaaaataaaaataaaaaataaaataataataataaaaaaacctaaca

SEQ ID NO: 511710 - DNA, 201 bp, Homo sapiens
agtaaaatagtaatattaaaaacaaaaaagcaaatgtttgtttgtttttgagacagagctttgctctggttgcccaggctggagcacaatggcacaatctyggctcactgcaacctccgcctccggggttcaagcgattctcctgcctcagcctcccaagtcgctgggattacagacgtgtgccaccacgcccatctaatt

SEQ ID NO: 511711 - DNA, 201 bp, Homo sapiens
gaggatgcagcaacaaggcatcatcatggaaccagagactcaaccattggtgcctttatcttgaatgtcctaggctccagaactgtgagagaatagatttstgttcctcataagttacccagtctgtggtattctgttatagcagcacagaatggactaagacaaatccctttctgcttaaattggctagattgcattact

SEQ ID NO: 511712 - DNA, 201 bp, Homo sapiens
gattgcagtgagccaagatcacgccactgcactccagcctgggtgacagatcgagactctgtctcaaaaaaaataaaaataggtgccgggcgcggtggctyacacctgtaatcccagcactttgggaggccgaggtgggcagatcacgaggtcaggagatcgagaccatcctggctaacacggtgaaactccgtctctact

SEQ ID NO: 511713 - DNA, 201 bp, Homo sapiens
atcatggaaccagagactcaaccattggtgcctttatcttgaatgtcctaggctccagaactgtgagagaatagatttctgttcctcataagttacccagwctgtggtattctgttatagcagcacagaatggactaagacaaatccctttctgcttaaattggctagattgcattactttgcttggaattaagaacctga

SEQ ID NO: 511714 - DNA, 201 bp, Homo sapiens
tttctccttcctcagcttcccaagtagctgggattacaggcatgcaccaccacacctggctaattttgtatctttagtagagatggggtttcaccatgttsgtcaggctgatctcgaactcctgacctcagatgatccgcccaccttggcctcccaaagtgctgggattacaggtgtgagccacagcgcccggccaggtgc

SEQ ID NO: 511715 - DNA, 201 bp, Homo sapiens
gattacgactcactgcaacttccacctcctaggcacaagggatcctcccacctcagcctcttgagcagttaggactacaagctcatgacaccacacccggmtaattattttatctttagtagagatgagggctcacgatgttgcccaggctggtcttgaactcctggcctcaagaaatctacccaccttggcctcccaaag

SEQ ID NO: 511716 - DNA, 201 bp, Homo sapiens
tcccacctggggcttacatgggacagcaatactgaactaaatgtagatgctctacagattcaaatatccccttcggtggcctgagccagggtttggtcagygggaagaaaagattgaagggatggaaagtaatgtagcaaatctctgccacagacctgctctttcttcagatcagctttaccttttttttttttttttttt

SEQ ID NO: 511717 - DNA, 201 bp, Homo sapiens
acattgtagatgcaaacaatctctctctctcttttttttttttttttagggggagtctcactcttcttgcccaggctggagtgcaatggcatggtctcggygcactacaacctccacctcctggattcaagcatttctccttcctcagcttcccaagtagctgggattacaggcatgcaccaccacacctggctaattttg

SEQ ID NO: 511718 - DNA, 201 bp, Homo sapiens
ctttccctccctccctccttccttccttccctccttccctccttccctccttcttttctttcctacagggtctctcactctctcacccagactggagtgcwgtggtgctatcacagctcaccacgacctctgcctctcaggctcaagcaattctcttgcctaagcctcccaagtagctgggattacaggtgctcgccacca

SEQ ID NO: 511719 - DNA, 201 bp, Homo sapiens
tattaatccaccaaaccatgtttaaagctatttacttcataatattaggtccaaaccatacttggctcttctggatggaggctgaaaatgaacattgtagrtgcaaacaatctctctctctcttttttttttttttttagggggagtctcactcttcttgcccaggctggagtgcaatggcatggtctcggtgcactacaa

SEQ ID NO: 511720 - DNA, 201 bp, Homo sapiens
tttccctccctccctccttccttccttccctccttccctccttccctccttcttttctttcctacagggtctctcactctctcacccagactggagtgcartggtgctatcacagctcaccacgacctctgcctctcaggctcaagcaattctcttgcctaagcctcccaagtagctgggattacaggtgctcgccaccat

SEQ ID NO: 511721 - DNA, 201 bp, Homo sapiens
ttggctcaagagattctcccacctcagccccatgagtagctgggattacaggcccacaccactgcacccagctaatttacaaataacacatttttatctgtttttttttttttttagacgaagtctcactctgtcacccaggctggagtgcagtggcacaatcttggcttactgcaacctccggcctcccgggttcaaatg

SEQ ID NO: 511722 - DNA, 201 bp, Homo sapiens
catgaaggaaaatcaccaggaagcccaaaaccaggcctctcctaaggagtctgggccactcagctcggcgcctcctcactgggggcagctctccttccccvaccagcactcaagggctgccgcatcccctcccgggacctcatccctgcaggtcccagcctcgctgctcactgtggaaggcggcacgctcctcccaaagcc

SEQ ID NO: 511723 - DNA, 201 bp, Homo sapiens
actgtggatttcatttcttgcaggatcttggggagtatagttgctggatgcatctatttcctgagggtaaatatcctcctgaatagcagctgacgagcacktatcgttagctgtgcttttttcagtggcatgctccaaactacttttctctagaataactctgtttgtttcaagattgttaaaagatgactctaagggtgg

SEQ ID NO: 511724 - DNA, 201 bp, Homo sapiens
tggcttggggacacaaacacccagtaatgacggacacaccaaataccgggtctctggcagccaaacaattccagaatcgcacctgctggcgaactgattcwctctgcacatttctcgccagaacgttcctttgggaccaagtggttggtgctgtattaatagacaaaggatagtagtggctgaagctgaacaggactgaga

SEQ ID NO: 511725 - DNA, 201 bp, Homo sapiens
agaatgggatcctcagccctgctgccctggaggaaggggcggggatggaactgtcccagttctgtgtggagaccaccttcggggagcgggaggctggcttsaggccacgcagctggggtgggggcttccatctgcctgtgctccatcggaggatggctccacccagcccctgcaccagtgcgctcctcgattccctaaaga

SEQ ID NO: 511726 - DNA, 201 bp, Homo sapiens
gaggcaggagaatcgcttgaacccgggaggcggaggttgcagcgagctgagattgcaccactgcactccagcctgggcaacaagagtgaaactccatctcaaaaaaaaaaaaaaaagaaaaaaaaaacccctaggctcaaattatcgtcctgtgtaagcctcccaaagtgctgggattacaggtgtgagccactgagccca

SEQ ID NO: 511727 - DNA, 201 bp, Homo sapiens
gaggaaggggcggggatggaactgtcccagttctgtgtggagaccaccttcggggagcgggaggctggcttcaggccacgcagctggggtgggggcttccrtctgcctgtgctccatcggaggatggctccacccagcccctgcaccagtgcgctcctcgattccctaaagaggcttccagagaaaacagcagcacatatc

SEQ ID NO: 511728 - DNA, 201 bp, Homo sapiens
actataatcagaaggaagggcaccaggttcagacagtggtggctttgaaagaagaagtaagtgagattgaaattgagagaattaaaaaaaagattttaagtttttttttttttttgagacagggtctcactctgtcacacaggctggagtgcagtgatgcaatctcagctcattgcaacctctgcctccctggctcaactg

SEQ ID NO: 511729 - DNA, 201 bp, Homo sapiens
ttgagaagggttttgctctgtcacccaagcaggagtgaagcaatgtgatcttgcttcactgcagcctccacctcccagactcaagtgatccttccacctcrgccttccaagtaggacacaactaccatctggctatttttttaatttcttttgtagagacagaagctcattatgttgcccaggctggtcttgaactcctgg

SEQ ID NO: 511730 - DNA, 201 bp, Homo sapiens
aaaaaagataaaaagctacacaccgctgggcgtggtggctcaagccagtaattccagcactttggaaagccaaggcgagtagatcatgaggtcaagagatygagaccatcctggccaacatggtgaaaccctgtctccactaaaaatataaaaattagctgggcgtggtggtgcgtgactgtaatcccagttattcaggag

SEQ ID NO: 511731 - DNA, 201 bp, Homo sapiens
ccagcactttggaaagccaaggcgagtagatcatgaggtcaagagatcgagaccatcctggccaacatggtgaaaccctgtctccactaaaaatataaaarttagctgggcgtggtggtgcgtgactgtaatcccagttattcaggaggctgaggcaggagaatcgcttgaacctggtatgcggagattgcagtgagccga

SEQ ID NO: 511732 - DNA, 201 bp, Homo sapiens
attgtaaattctctctgcccctgtgagatgtatataaatctttcttttcttttcttttcttttttttgagatggagtcttgctctgttgcccaggctggartacagtggtgctatctcagctcactgcaacttccgcctccggggttcaagtgattcacttgcctcagcctcccaggtagctgggattacaggcacgcgcc

SEQ ID NO: 511733 - DNA, 201 bp, Homo sapiens
tgggaggcccaggcgggcagatcacgaggtcagaagatcgagaccatcctggctaacacggtgaaaccccgtctctactaaaaaaaaaaaaaaaaaaaaamcaaaaacaaaaaattagccgggtgtggtggcgggtgcctgtagtcccagctactcgggaggctgagtgaggcaggagaatggcgtgaacccgagaggcag

SEQ ID NO: 511734 - DNA, 201 bp, Homo sapiens
aattcaatatgagatttgggtggggacacagccaaaccatatcagtggtcaccttgtctaaacaaggatgctgttgagctcattatccattagctcacacrgtgtctctttttacaagaacattttgtgttctgcagaataaatctatgtctggtcttactacctagaatcgttggcttcttctgagtaattggcctgctt

SEQ ID NO: 511735 - DNA, 201 bp, Homo sapiens
tatgtaacactgtcagaggcgtatgaaccagagtgactccatcttgaataggggctaagtaaaatgaggctgagacctgctgggatgcattcccaggaggwtaaggcattctaaatcacaggatgagataggaggtcagcacaagatacagaccatagaacaggttgttgataaaacagtttgcagtaaagaagccggcta

SEQ ID NO: 511736 - DNA, 201 bp, Homo sapiens
tacctcccaccgggtccctcccatgacacgtggggattatggaaactacaattcaatatgagatttgggtggggacacagccaaaccatatcagtggtcaycttgtctaaacaaggatgctgttgagctcattatccattagctcacacggtgtctctttttacaagaacattttgtgttctgcagaataaatctatgtct

SEQ ID NO: 511737 - DNA, 201 bp, Homo sapiens
gggtttttgatttacatgtctagaaaactgtttgagaccttagtattaaatgcattttttaaaaatttagagacttaaggccgggcgcagtggctcacgcstgtaatcccagcactttgggaggccgaggcgggtggatcacgaggtcaggagttcaagatgagcctggccaagatggtgaaaccccgtctctattaaaaa

SEQ ID NO: 511738 - DNA, 201 bp, Homo sapiens
acaaaaaaaattagctgggcgtggtggcacacgcctgtaatcccagctactctagatgctgaggaggagaattgcttaaacctggaggggcggaggttgcrgtgagctgagatcgcaccactgcactccagcctgggcaacagagcgagactccgtctcaaaaaaaaaaaaaaaagtttagagacttaagagggagagttt

SEQ ID NO: 511739 - DNA, 201 bp, Homo sapiens
ctcaagggagccagtacactccatcctgggcaacaaacagagtgagaccctgtctgaaaataaataaataaataaataaataaataaataaataaataaawaaaataaataataaataaataaataaaataaaaactcttagagattatcaggccttggaagagatttttccccaatctacataaagacccagagccccca

SEQ ID NO: 511740 - DNA, 201 bp, Homo sapiens
ttaatgcccctctactgaactacctatattccccatctcccccacccctctgaaaagaggttatataagtgtttggggccaggtgctgaggctagtgcctrtaattccaacactttgggaggtccaggtgggcagatcacttgaggtcaggcattggagaccagcctggccaacatggtgaaaccctatctctgctaaaaa

SEQ ID NO: 511741 - DNA, 201 bp, Homo sapiens
ttcttggccatttgtttatctttgttggcaaaatgcctgtccagatcctttgtctattgtttgagttagttatcattttattactgaatgtatgggttctytgtatactctagatacaagccccttatcagatatttgatttggaatgattttctctcatccaggggattgtccttttacatttttaaatggtcctttagc

SEQ ID NO: 511742 - DNA, 201 bp, Homo sapiens
ttgcagtccagaaggcagtgaaattattcacagtggtaaaataatacaaacctgctaaccaagaatactatacctgggaaacctgtccatcaaaaatggawgagtaataaagactttctcagacaaacgaaagctgagggagttcatcacctctagatttgtcttaccagaaatgctaaagagagtttttcaactgaaaga

SEQ ID NO: 511743 - DNA, 201 bp, Homo sapiens
caaaaatggaggagtaataaagactttctcagacaaacgaaagctgagggagttcatcacctctagatttgtcttaccagaaatgctaaagagagtttttmaactgaaagaaaaggacactaaacagcaacacaatatcaagagaaggtatgaaactgattggcaaaggcaaatataaagaaaaacacatgatactgtatt

SEQ ID NO: 511744 - DNA, 201 bp, Homo sapiens
tgtccagtacttgatttgaagttggattgcaagaatccattattttctcttcattagtttgagcaagagtctgaacaccatccacagaagatctaatgggwccgttaaaaggctgtttgctgttggtatttactttcaagttagtgaaatttccaattgtgctgacattttcattagggttttgccactgctgttgaaagc

SEQ ID NO: 511745 - DNA, 201 bp, Homo sapiens
tttatgaatctgggtgctcctgtgttgggtgcatgtagattttgtttagttaggtcttctcattgaattaaaccctttaccattatgcaattctcttgtcttttttttttttttttgacctttcttggtttaaagtctgttttgtctgaaattagtattgcaacccctgcttttctctttttctttttttttaaattatac

SEQ ID NO: 511746 - DNA, 201 bp, Homo sapiens
ggatcttcatgtttgtacaaagaaagcccaagctaaattttcaaggtcaaggaaaaaacatacgcttttccctgcctagataaaaccttcagacagaccaraataatggactagcattgctactgtccagatgttcatgtcctcccaaaatttgtatgttggaacctaaaatccaatgtgatagtattaagaggtatgata

SEQ ID NO: 511747 - DNA, 201 bp, Homo sapiens
aaggtcaaggaaaaaacatacgcttttccctgcctagataaaaccttcagacagaccagaataatggactagcattgctactgtccagatgttcatgtccycccaaaatttgtatgttggaacctaaaatccaatgtgatagtattaagaggtatgatagttgatacagtttggctgtgtccccacccaaatctcatcttg

SEQ ID NO: 511748 - DNA, 201 bp, Homo sapiens
cagttgcctaaaacaaaactggtttgctcttttgaaaggaagagcttatgtgaaaatactggattaaatatgatggccgtgctcttaaagaaaagaacaaraataaatggtacagtagacaatttgccaattttgtaattttaaaagaagtgcttaaaattattgggaaatgttttttctcataggtgtataacatggttc

SEQ ID NO: 511749 - DNA, 201 bp, Homo sapiens
acaatggtttatattacacacctgtaagcaactatggggatggagatatctataatattgtcagggtaagatcactaaggattttggaaaatatttcatcrcaatttttagtattcataatgcatattaatgttttcttaattatgtagttttcttcctatactttgagattcgtgtctgtaatctgccaatagagtacat

SEQ ID NO: 511750 - DNA, 201 bp, Homo sapiens
ccatttatctttgcaatataaataataggccttttatagttcttgcatgaaaagaatgaacaatatttttgttgtttgtttctttaaagaacatgggtctmaaagtctttaccaatctccattaccgaaaaccagaagtatgtgtgatggagagaaggctgccactccctaagccgctttatctggaaacagaaaattatg

SEQ ID NO: 511751 - DNA, 201 bp, Homo sapiens
tggaggctgagacaggagaattgcttaaacctgggaggcggaggttgtggtgagctgggattgtgccactgcactccaacctggccaagagagtgagactstgtctcaaaaaattaaaaataataataattattattattatttgtgtcctattgggatattgagcaatcacactggttttctccatgtgcatggtcaagt

SEQ ID NO: 511752 - DNA, 201 bp, Homo sapiens
acacaaaaaagttggaagatatcaaaagatagaagtagggtccctagttaggaagctgttgcagttgtccaggaaaaagaaaatcatggcctagactgagrtgatagcagctgggaaaagaagtacatggatttatattgaggaaggagtggaatgggagagtagaattcttaagacctttttgaagactgaatgtgggat

SEQ ID NO: 511753 - DNA, 201 bp, Homo sapiens
ggggtttcaccgtgttagccaggatggtctcgaactcctgacctcatgatccacctgcctcagcctcctaaagtgctgggattacaggtgtgagccaccaygcctggcctagtcacagttttttagcctatgtgtaagtgtgtgtgtgcagacacagttccctcttctgagacacaactaagattctgttaaggtggtatt

SEQ ID NO: 511754 - DNA, 201 bp, Homo sapiens
gtccctacaaaaaaaatttttttaattaaaatttttctactgcacacacaaaaaagttggaagatatcaaaagatagaagtagggtccctagttaggaagytgttgcagttgtccaggaaaaagaaaatcatggcctagactgaggtgatagcagctgggaaaagaagtacatggatttatattgaggaaggagtggaatg

SEQ ID NO: 511755 - DNA, 201 bp, Homo sapiens
caggcacttgggcaccactgggtctggcttttttggttttgttgttttgtttggtcttaaacttctgggctcaagcaatcttcccacctcagcctccaaargtgctgggattacaggtgtgagccaccaagcccagccataaaacctttttttttttttttttgagacggagtcttgctctgtcgcccaggctggagtgca

SEQ ID NO: 511756 - DNA, 201 bp, Homo sapiens
gaatatgccacccctaaataaggactgttttgagctgaagatgattcaggaacagcagatgcaaagaaagagagaaagagagaaggaaggaaggaaggaakgaacgaaggaagggagggagggagggagggaaaagaaggaaagaagaaagaggaaagaaagaaagaaagaaaagaaagagaaaggaagaaaggaagaaaa

SEQ ID NO: 511757 - DNA, 201 bp, Homo sapiens
aaaagttaatgaaggccgggcgcggtggctcacgcccgtaatcccagcactttgcgaggctgaggcaggcagatcacgaggtcaggagatcaagaccatcytggctaatagggtgaaaccctatctctaccaaaaatacaaaaaattagctggccgtggtggcaggcgcctgtagtcccagctactcaggaagctgaggca

SEQ ID NO: 511758 - DNA, 201 bp, Homo sapiens
agaaaaaaaggccaggctcggtggcttacacctgtagtcccagtactttgggaggccgaggtgggcggatcatctgaggtcaggagttcgagaccagcccraccaacatggtgaaaccccatctctactaaaaatacaaaaattagctgggtgtggtggtgggcgcctgtaatcccagctactcgggaggctgaggcagga

SEQ ID NO: 511759 - DNA, 201 bp, Homo sapiens
tagggtgaaaccctatctctaccaaaaatacaaaaaattagctggccgtggtggcaggcgcctgtagtcccagctactcaggaagctgaggcaggggaatmgcttgaacccgggagccagaggttacagtgagccgagatcgcatcactgtattccagcctgggtgacagagcgagactccgtctcaaaaaaaaaaaaaaa

SEQ ID NO: 511760 - DNA, 201 bp, Homo sapiens
taccaaaaatacaaaaaattagctggccgtggtggcaggcgcctgtagtcccagctactcaggaagctgaggcaggggaatcgcttgaacccgggagccaraggttacagtgagccgagatcgcatcactgtattccagcctgggtgacagagcgagactccgtctcaaaaaaaaaaaaaaaaaagttaatgaagtatagg

SEQ ID NO: 511761 - DNA, 201 bp, Homo sapiens
ttttatctcttttttgatttttgattttttttggttggagggtggggtggagtggccagagtcttgctctgttgcccaggctggagtacagtgatgtgatstctgctcgctgcaacctccacctcccaggttcaagcgattctcctgcctcagcctcctgagtaactggggctacaggtgcgggccatcacgcccagctaa

SEQ ID NO: 511762 - DNA, 201 bp, Homo sapiens
gttgtccctttttgagaaaaacctgtagaagaagaaatattcttttgacaaaaaagttcttgtatcattatgtaaaacctcatagtgaaaaagctcgctctttttttttttagaaataaggtctcactctgctgcccaggctggagtgcagtggtgtgatcatagctcactgcaggcttgatctcccaaactcctgggctc

SEQ ID NO: 511763 - DNA, 201 bp, Homo sapiens
cgttcattgttttctcccatacatccgacaggctttaaaagaggccaaataccaaaaaactaaagagacattatacatcacccatttgtgatattctggtyttataaatatatcatttcaaccagaagagcctcatttgaaatgcaacactacccacgtatttgatatacaccactctttcagactatttgtaggtgagtt

SEQ ID NO: 511764 - DNA, 201 bp, Homo sapiens
ggagtgcaacagcacgatcttggctcaccgcaacctccacctcccgggttcaagtgattctcctgcctcagcctccctagtagctgggattacaggcatgygccaccacacccggctaattttgtatttttaatagagacggggtttctccatgttggtcaggttggtctcgaactcccgacctccggtgatccgcccacc

SEQ ID NO: 511765 - DNA, 201 bp, Homo sapiens
ccaaacaataattaacatttaaatgtcaatatgcacctaaaaataaggacttgacacacagaaaaggagtgtatattacatttaaatttgtaagtggttayttgctacccatagtgcctcaagaatcagataaaaaagaccgagttacttaaacaatatgtatgttcttaagagtgactgataggaaatcaaagcacgttc

SEQ ID NO: 511766 - DNA, 201 bp, Homo sapiens
tgctctccaggatcaagcactgtctccacaagacagagaaggcagccccttggcagctctggggcttgtttttttcaaataaataaaagtagccacttggaaaaaaaaaaacaaagttccggccgggtgcggtggctcagcctgtaatcccagcactttgggaggccaaggcggggggatcacaaggtcaggagatcgaga

SEQ ID NO: 511767 - DNA, 201 bp, Homo sapiens
agacagggtctcactctgttgcccaggctggaatacagtgaaacgatcatggctcactacagcctccacctcctgagcgcaagcgatcctcccacttcagyccacaaggggtcattttttgcagagacggggttttgaaatgttcccaggccggtctcaaactcctgggctcaagcgatcctccccctcggtctcccaaag

SEQ ID NO: 511768 - DNA, 201 bp, Homo sapiens
tccagtacttgatttgaagttggattgcaagaatccattattttctcttcattagtttgagcaagagtctgaacaccatccacagaagatctaatgggacygttaaaaggctgtttgctgttggtatttactttcaagttagtgaaatttccaattgtgctgacattttcattagggttttgccactgctgttgaaagctg

SEQ ID NO: 511769 - DNA, 201 bp, Homo sapiens
aaagtgcgagactccatctcaaaataaaataaaataaaataaaaaaataaaaacaatgagagaagttaaaaatcatagttcagatagatcaattaagtatwaactgtctctttatgtttattcatagattggaaaagaaatctggggtttttcttgccatatgattttgtgatttagaacttaaagatataaaagaaacta

SEQ ID NO: 511770 - DNA, 201 bp, Homo sapiens
agttggattgcaagaatccattattttctcttcattagtttgagcaagagtctgaacaccatccacagaagatctaatgggaccgttaaaaggctgtttgytgttggtatttactttcaagttagtgaaatttccaattgtgctgacattttcattagggttttgccactgctgttgaaagctggtccttatttcagatga

SEQ ID NO: 511771 - DNA, 201 bp, Homo sapiens
aaatcaaagtatattggtacacaaaaaaacaataaaacacaaggaagacaggaagagaggaaaagacagacaaaataattacaaggctaacataaaacaastaacatggcaaaaataaatcttcccctatcaacaattactttaaatgcaaattgagtaaacctcccaatgaaaacacatatagtgactgaaaagttaaaa

SEQ ID NO: 511772 - DNA, 201 bp, Homo sapiens
agatctatatttagtatgtctttaggagcatcatggttccttattcagaggatgagattgtatggaaatggcctatcccatgcagttcagcacaaggagayccagtgcagtacaggaacaatgtatgaaatgcttaaaaatgactattcattgcacattagagaatgcctatgtcacatttttacaattacagaactcttt

SEQ ID NO: 511773 - DNA, 201 bp, Homo sapiens
aaatgatgcaattttggaattttatgtgtgaattatgccatgtttttggctacaattagacatcctatagttggataaagcagaataagacagactagacrtgcttttggctataacaagaaattagcttcagatgtgagatgtagtttatttttattgataaaatacaatgtcagaaatacaatcatgcttcacttagtg

SEQ ID NO: 511774 - DNA, 201 bp, Homo sapiens
aataagacagactagacatgcttttggctataacaagaaattagcttcagatgtgagatgtagtttatttttattgataaaatacaatgtcagaaatacartcatgcttcacttagtgatggagaatttgttctgaaaaatgcattgttaggtgatattgttgtgcgaacatcatagagtgtacttacgcaaacctagatg

SEQ ID NO: 511775 - DNA, 201 bp, Homo sapiens
agaatttgttctgaaaaatgcattgttaggtgatattgttgtgcgaacatcatagagtgtacttacgcaaacctagatgctgtagcctgcaacacacctakgctatgtggtacagcccatttttcctaggctacaaacctccgcagcatgtgactatactgaatactgtaggcagttgtaccacgatgataactatttgtg

SEQ ID NO: 511776 - DNA, 201 bp, Homo sapiens
aattcgtgaaattacttgttaacttgaagatttttgtcaggaagaaatgcaaataacttctgttggtgggacagatacaggtcacacattgcttaacagcrgggagaaatgcgtgaggtgattttgtcctcgtgcaaaccttatagagtgtgcttacacaaacctagatgatacagcctactatatatggaatagcaaatt

SEQ ID NO: 511777 - DNA, 201 bp, Homo sapiens
acctcagcctcctaaactgctgggattacaggcatgagccactgtccccggcaacattacagtctatcatttttataaaaatagcagcaacctgtaaaagytcccagtggaaagctgcatggtcatacagggagggttcaccaggaaagttcctacctgcctgtctgccaagtgaccttaaaagggagcataacttggtga

SEQ ID NO: 511778 - DNA, 201 bp, Homo sapiens
ggtaggaatttttcagctccattctaactttatgggaccactgtagtctaagtggtctgtcattgatcacagtgtcattatgtggtacctgactgtgtagrggaacaggcaatgtatggtgatacaggaaaacagtcatagtaagtgactgtgatacaggaaagtgaggtgttttatggagaccttacaccctgataatat

SEQ ID NO: 511779 - DNA, 201 bp, Homo sapiens
ctactggggaggctgaggcaggagaatggcttgaacccgggaggtggagcttgcagtgagaggagatcgcaccactgcactccagcctgggcgacagagcragacaccatctcaaacaaacaaacaaacaaaaaaacaaagttcctgtcctcatagatttaaatttaaattctagtaggagagaacaataaacaaataaac

SEQ ID NO: 511780 - DNA, 201 bp, Homo sapiens
cttcccagagacatggatgtgggacctcgtcagtgtcgagtgagttttaaccattttctctcctatgtgtctttatttctattttctttttctttcttcakgtttattcctgggtatataaaacagtaccatatttgtaaaatatgtatcattgatttgcatgtacttatcatacattttattttatttttttctctagca

SEQ ID NO: 511781 - DNA, 201 bp, Homo sapiens
ctgtgcaaaggcctcgaggtagagtctgcttagaacatttgagggccagatacagtggccgacacctgtaatcccagcactttgggaggcgaggtgggcgratcacctgaggtcgggagttcgagaccagcctgaccaacatggtgaaaccccgtctctactaaaaatacaaaattagctaagcatgatgaatgcgtgcct

SEQ ID NO: 511782 - DNA, 201 bp, Homo sapiens
gaactgctaatggatatggagtttcttttggagatgatgaaaatctgctgaaattagatagtgttgatggttgtacaactttataaatatactaaaaaaatatcactgaattgtatgctttatatgtatgtctgaattatgtttcttttctttaaaaagggaaaatgttggctgggtgcagtggcacacacctgtaatccg

SEQ ID NO: 511783 - DNA, 201 bp, Homo sapiens
gacgttgcagtgaactgagattccgccactgcattccagcatgcatgacagagcaagactctgtctcaaaaataaataaataaataataagttcttatcaytgggtatggtgtctcatgcctataatcccagcacattgggaggccagggcaggaagatcacttgagatcaagagttctagactagcccaggcaacataga

SEQ ID NO: 511784 - DNA, 201 bp, Homo sapiens
tatcactgaattgtatgctttatatgtatgtctgaattatgtttcttttctttaaaaagggaaaatgttggctgggtgcagtggcacacacctgtaatccragcactttgggaggccaaggcaggttgattgcttgaacccaggagtaggagaccagcctgggcaacatagtgagaccccttctctactaaaaccacaaaa

SEQ ID NO: 511785 - DNA, 201 bp, Homo sapiens
tgtaatcccagctactcgtgcagctgaagcaggagaatcacttgaacccaggaggcggacgttgcagtgaactgagattccgccactgcattccagcatgsatgacagagcaagactctgtctcaaaaataaataaataaataataagttcttatcattgggtatggtgtctcatgcctataatcccagcacattgggagg

SEQ ID NO: 511786 - DNA, 201 bp, Homo sapiens
ttgcttctccttctgtgtagaaagggtccaatgtatcaatctaccaccaagaggctcattggttccctggagaatggtgtgatcagtcaggggcccagcayagccttgactcttggtgcatgggcagagaagcctcagtgagaagtccatgcagacctcctttcttgttgccatggcactttataaatgggcctattaagc

SEQ ID NO: 511787 - DNA, 201 bp, Homo sapiens
tgaggccaggagttcatgaccagcctagccaacatggcaaaaccccatttctactaaaaaaaaaaaaaatacaaaaaaattagccagatgtggtggcacayacctgtaatcccagctactcgtgcagctgaagcaggagaatcacttgaacccaggaggcggacgttgcagtgaactgagattccgccactgcattccagc

SEQ ID NO: 511788 - DNA, 201 bp, Homo sapiens
ttttttttttttttttttgagatggagtcttgctgtgtcgcccacgctggagtgcagtggcacgatctcggctcactgccacctccgcctcccaggttcaygccattctcctgcctcagcctcccgagtagctgggactacaggcgcccgccaccatgcccggctaatttttttgtagttttagtagagacagggtttcac

SEQ ID NO: 511789 - DNA, 201 bp, Homo sapiens
aaagtgctgggattacaggcatgaggcactgtgtccagtcatctcctgaccttggtgagccactgtgcccatcttttagttttcaatttgaaaaaaagttaaaaaaaaatttaataaaaaagagcttatacaaaaagtataaagaaaattttgaaaaggctgggtgtggtggctcacacctgtaatcccagcactaggagg

SEQ ID NO: 511790 - DNA, 201 bp, Homo sapiens
tggctaacacctgtaatcccagcactttattatgggaggcccaggcgggaggattgcttcagcccatgagtttgagactgttttgggaaacatggcaaaaycctgtctctaccagaaatacaaaattagcagtttcttaaccctgtcttgaaatgaataaaaaaaattacaattaatggcctgatgcagtggcccatgcct

SEQ ID NO: 511791 - DNA, 201 bp, Homo sapiens
tggagaatttacatgcattattaaaatcaacattccagtcttttcaacaaatggtgcaggaacaactgcatatcttcttttcccttttcttctctctctctttttttttttttttaatgagatagggtttggctctgtcacccagactggagtgcagtggcaccatcttggctcactgcaacttctgcctcctgggctcaa

SEQ ID NO: 511792 - DNA, 201 bp, Homo sapiens
tattctaaagaaccaccagattgcttgaaaaaacaaatctccagtttaaaatcaagttatgccacgcccacccagtactttgttaaatatataaagtaacytggtttcagagaccattttatgtccttggttttgctctagggattaagtagtgttttttttttgttgtttttttaaacatttcatgggtttgtagatttt

SEQ ID NO: 511793 - DNA, 201 bp, Homo sapiens
tttttttgtatttttggtagagacagggtttcaccatattgcccaggctagtctcgaactcctgacgtcaagcaattaaccatcttggcctcccaaagtgstgggattacagatgtcatctaccacacccagcctaaattctgcatatctatattggaaaaaaaaaaaacctcaatccctacctcacaccacacacaaaaa

SEQ ID NO: 511794 - DNA, 201 bp, Homo sapiens
ctaaggaacctaccaccatggcttgccttgggtcttgagctccctagatgatcatcaccttttggagtctcaggtttgttttatatataatatccagggartttagttgtataagcaggaggaataggaagtatgtctattccatcttcttcacttctttaaaaaacacgttagtctgaatatcttcaaatatcagtagtg

SEQ ID NO: 511795 - DNA, 201 bp, Homo sapiens
gaggcagaggcaagaaaattgcttgaacctgggaggcagaggttgtggtgagccgagattgtgctattgcactccagcctgggcaacaagagcaaaactckgtctccgaaaacaaaaacaaaacaaaacaaaaatggtcagataattgaaatttcaaatagtttaaagatattaagcacttcctaggagagtgagttttcc

SEQ ID NO: 511796 - DNA, 201 bp, Homo sapiens
ctcccaaagtgctacaattttaggcatgtgccacagcacttggcctactgcagtagagatatagatacgaatacttttcttaagggtactgtacagttagsctgccctggaaccattatgtctctttgagtttccttctctactctgaactttaagtgtctattttcttattttctagttcatagaagacatttcactatc

SEQ ID NO: 511797 - DNA, 201 bp, Homo sapiens
gacattgttatgcaagtagatagaatattaacctgcctggattaatgaaagcaattactaagtgctgttactataagtggaatagtttcactgtatcacaygtcctggtgattcttcatttagcccagatgatgccaggggctatttgacaaaatgtttcgtatatctaagaagacatattttgctggtttaaaccataat

SEQ ID NO: 511798 - DNA, 201 bp, Homo sapiens
cccacagacgcctcagtctctggaaaaccgtgagttccacacagagagcgtgaagcatgaacctagagtccttcatttattgcagatttttctttatatcmttcctttttctttcctatgatactgtcatcttcttatctctaagattccttccagattttacaaatctagtttactcattacttgcttacttttaatcat

SEQ ID NO: 511799 - DNA, 201 bp, Homo sapiens
ccctcacccctgatgaaaaagagcactcagcttaattaaaatcgatgtccaagctatgagtatattcaaaggcctttatgtttttctcttcataaatcttyttttcctggaaaaggttttttcccagtcaactgaattacttttctccattctttcttgccactcttggtgcaggtattaaagaccctaaaatgacttctg

SEQ ID NO: 511800 - DNA, 201 bp, Homo sapiens
ctagggataatgcaaattataagtaccataggataccattatacacccatcagttgagccaaatgttaaaatctgacaatatccaatgatggtgagaatasagaattctcatacactgctggaaggtaaataaattggtatgatcgctttggaaaatacaggcaggttgaagattggcaattctacaccactgtgatcacg

SEQ ID NO: 511801 - DNA, 201 bp, Homo sapiens
aaattataagtaccataggataccattatacacccatcagttgagccaaatgttaaaatctgacaatatccaatgatggtgagaatagagaattctcatamactgctggaaggtaaataaattggtatgatcgctttggaaaatacaggcaggttgaagattggcaattctacaccactgtgatcacgctcatagaaattc

SEQ ID NO: 511802 - DNA, 201 bp, Homo sapiens
tttaaccattttctctcctatgtgtctttatttctattttctttttctttcttcaggtttattcctgggtatataaaacagtaccatatttgtaaaatatrtatcattgatttgcatgtacttatcatacattttattttatttttttctctagcattgttttcccttcaccaagagtttctcttctattcattttatgca

SEQ ID NO: 511803 - DNA, 201 bp, Homo sapiens
tctggttgttaatgctgtgtagatcaaaaccaccattcatttttacaagagcataatgtaattaaaatacaatataaatgctaactggcatgacctatcayggactatatgtttggcatatgccatatcccaaatgaaggccatgctatcattaatgccaccttaattatttgacttctcgctgggtccttcacctaccat

SEQ ID NO: 511804 - DNA, 201 bp, Homo sapiens
attcatttttacaagagcataatgtaattaaaatacaatataaatgctaactggcatgacctatcatggactatatgtttggcatatgccatatcccaaaygaaggccatgctatcattaatgccaccttaattatttgacttctcgctgggtccttcacctaccatcatgaacccaggccaccttcaagaaaattgctgc

SEQ ID NO: 511805 - DNA, 201 bp, Homo sapiens
tgagaatattgtcttagtgcctatgctatctgcaagatggaaaaataaacttgtctcctattgaaatattgaaaatacatggaatggaaaaagtttaaaaytctagtaaacaaggaatgctagatacgatgtgcgtgacacttttaatcactacttttaaaaaatggccattcaaatgttctttaatgtactatattcatt

SEQ ID NO: 511806 - DNA, 201 bp, Homo sapiens
tacatatatctgacagaggactggtagtcagaatacatacaaaattctcacaactggccgggcacagtggcttacacctgtaatcccagcactttgggagrctgaggcaggaggatcacttgagttcaggagttcaagaccagcctggccaacatgatgaaaccccatctctaccaaaaatacaaaaaaattagccagcca

SEQ ID NO: 511807 - DNA, 201 bp, Homo sapiens
actggtagtcagaatacatacaaaattctcacaactggccgggcacagtggcttacacctgtaatcccagcactttgggagactgaggcaggaggatcacytgagttcaggagttcaagaccagcctggccaacatgatgaaaccccatctctaccaaaaatacaaaaaaattagccagccaaggtggcacgtgcctgtcg

SEQ ID NO: 511808 - DNA, 201 bp, Homo sapiens
ctggtagtcagaatacatacaaaattctcacaactggccgggcacagtggcttacacctgtaatcccagcactttgggagactgaggcaggaggatcactkgagttcaggagttcaagaccagcctggccaacatgatgaaaccccatctctaccaaaaatacaaaaaaattagccagccaaggtggcacgtgcctgtcgt

SEQ ID NO: 511809 - DNA, 201 bp, Homo sapiens
tgcctgtcgtcccagctactctggaggctgaggtgggaggatggcttgagcccaggaggcaaaggatgcagagagccaagattgcaccactgcactccagyctgggtgacagagcaagactccatctcaaaaaaaaaaaaaaaaaaaaaaaaaaaaaaaaaaaaaaaaaaactcttacaacttagtaataaaaagacaacc

SEQ ID NO: 511810 - DNA, 201 bp, Homo sapiens
tcgtcccagctactctggaggctgaggtgggaggatggcttgagcccaggaggcaaaggatgcagagagccaagattgcaccactgcactccagcctgggygacagagcaagactccatctcaaaaaaaaaaaaaaaaaaaaaaaaaaaaaaaaaaaaaaaaaaactcttacaacttagtaataaaaagacaacctgactg

SEQ ID NO: 511811 - DNA, 201 bp, Homo sapiens
tgtgatcttgggtcactgcagcctctgcctctggggtacaagcaattcttgtgcctcagcctcctgagtagctgggactacagacatgcaccaccatgccrggctaatttttgtatttttagtagagtttgggttttgccatgttgcccacgctggtctcaaactgagctcaagcaatccacccacctcggcttcccaaaa

SEQ ID NO: 511812 - DNA, 201 bp, Homo sapiens
tggaggctgaggtgggaggatggcttgagcccaggaggcaaaggatgcagagagccaagattgcaccactgcactccagcctgggtgacagagcaagactycatctcaaaaaaaaaaaaaaaaaaaaaaaaaaaaaaaaaaaaaaaaaaactcttacaacttagtaataaaaagacaacctgactggctgcccaaaccaaa

SEQ ID NO: 511813 - DNA, 201 bp, Homo sapiens
ggaggctgaggtgggaggatggcttgagcccaggaggcaaaggatgcagagagccaagattgcaccactgcactccagcctgggtgacagagcaagactcyatctcaaaaaaaaaaaaaaaaaaaaaaaaaaaaaaaaaaaaaaaaaaactcttacaacttagtaataaaaagacaacctgactggctgcccaaaccaaac

SEQ ID NO: 511814 - DNA, 201 bp, Homo sapiens
tatgtatatatacacatgcgtgcatgtatgtatatatgcacatgtgcgtgcacgtatgtatatatgtacatgtgcgtgcacgtatgtgtgtatgcacataktgtgtgtgtgtgtgtgtgtgtgtgtgtgtatttttttgagacagagtctcgttctgttgcccaggctgcagtgcagtggcgtgatctcggcccactgcaa

SEQ ID NO: 511815 - DNA, 201 bp, Homo sapiens
taagggtctggagagtcatggcctacaaactataaattctcatcagatgggtttgatttaaccctatatatcgtgacttactttccaatctgactctggcrtaacattatgtgacaaagaagaaagtcaaaatattttaccccaaaacatgtttctttgccatattttgaaatggccctgcacagctgtcctttggagggg

SEQ ID NO: 511816 - DNA, 201 bp, Homo sapiens
cctaggatttagatccctctcagatgttcaggcagaataattttgtcaggacaaaagtaaggtcacggaactatatgaaaatggattatgaatcctaagayatcagcctattctcccctatgtctaagaagaatattcctcagcttatgactggaatgtcttgctaggggtgctgggtaagttttgtggaggtccccacca

SEQ ID NO: 511817 - DNA, 201 bp, Homo sapiens
cccaggtagttgggactacaggcatgggctaccatgcctggctagtttttgtattttttgtagagatttaagtgttgtctaccaaaaaaaccttttttgtktcactacaacatttttttcagtaccatttacttatttgagacagggtctggctctgtcgcccaggctggagtaatggtggcacagtcttggctccctgca

SEQ ID NO: 511818 - DNA, 201 bp, Homo sapiens
gtttcaccatgctggccaggctggtctcgaactcccgacctcaggctatccgcctgcctcggcctcccaaagtgctgggattatagatgtgagccaatgcractggcctaagtgctgggattacgggagtgagccgctgcgcctggcctaagtgctggggtacaggcgtgagccaccaggccagcgaagtctccacaatct

SEQ ID NO: 511819 - DNA, 201 bp, Homo sapiens
gatctggcagcattagactgtcaacaattgaagaaaagaaaataagaaaagctgtctatattttgggtgcttcatgagagaataatcttaatgatgaaatwtttttaaggcttagaaaactaatgaagccctcaaatatggtgtgagatctctttataagaatgctgcaagagtcagatgtgaagcgaaggctgttgtaat

SEQ ID NO: 511820 - DNA, 201 bp, Homo sapiens
ttcaagtacaacaaaaaaatccgggtttcccatcacagaacctaagtcgccgcatttcctctggtgtataacatgttgttgatgcagttattgtcctttgttttttttttagctctgtttccttaaatgccaaaactacacacacgaagtatgtaatacgaacactgtgacaatgaggagatgcaagtaacattttattca

SEQ ID NO: 511821 - DNA, 201 bp, Homo sapiens
ccccttcctaccatcgattgactaactgatcccaagtcaatccctctgacaatcctgtatgtcttggccgtttctagtgtcttcagcatatcatacgtgtsgttcggcacacctgagactgtaatataccacaggatgcctaattccacagctcctctgtaagccacagctcaggacagttgtgcattaaaatcagtgaaa

SEQ ID NO: 511822 - DNA, 201 bp, Homo sapiens
aaccgcaagcaaaattcctagagtggccctgaattcaacccatcttcctgggactatgacactcatggctatgggtgaaaccaacctttgaacagtcattkcattccagtactcccataacttgctagtcattgcatttttttcaaggcctcttttgaagagttattaaggaaggtaaaagtgcataaaggtcaaagtctt

SEQ ID NO: 511823 - DNA, 201 bp, Homo sapiens
tcccatcacagaacctaagtcgccgcatttcctctggtgtataacatgttgttgatgcagttattgtcctttgttttttttttagctctgtttccttaaatgccaaaactacacacacgaagtatgtaatacgaacactgtgacaatgaggagatgcaagtaacattttattcacctgaagaaactaaaccccaacatttt

SEQ ID NO: 511824 - DNA, 201 bp, Homo sapiens
aggtgtgagtaatgaacgaatatgggaaataaaacaatagtttactttccataacaaaataaaggtcatttgtaagaaagaaattttatgactaaagtaayttctaaaagtactgactctttatatttttcagacctggaagtcactgcaaacaggatcagtgaaatcacaaacattgtatccaaactcaaattcgtgaaa

SEQ ID NO: 511825 - DNA, 201 bp, Homo sapiens
cacacctgagactgtaatataccacaggatgcctaattccacagctcctctgtaagccacagctcaggacagttgtgcattaaaatcagtgaaaaacttaygcaaaatgaagactctagccagaattgttttgttttgttttgagacggagtctctctctgtcacccagcctggagtgcagtggcacaatctcggctcact

SEQ ID NO: 511826 - DNA, 201 bp, Homo sapiens
atctgcaagatggaaaaataaacttgtctcctattgaaatattgaaaatacatggaatggaaaaagtttaaaattctagtaaacaaggaatgctagatacratgtgcgtgacacttttaatcactacttttaaaaaatggccattcaaatgttctttaatgtactatattcattgtattattttaacagcaaataatatat

SEQ ID NO: 511827 - DNA, 201 bp, Homo sapiens
tctctgggtgttgttcacatcaactatcaagtacttttcttctttaggtgcttctggtggatggaaaaggtgtgcccatccccaataaactcttcttcatytctgtgaatgacgccaattattactccaatgcaaccaccaatgagcagggtcttgcacagttttcaatcaatactaccagtatctcggttaataaacttt

SEQ ID NO: 511828 - DNA, 201 bp, Homo sapiens
agctcaaacttttttttgcaaactactcagtctgcaaaactttacccactgatttttgtgctatggtggtgatatttcttaaaagtcatattgctggagakgaccatgtaagcacctatggtccaattccctcccatacagataaataagttatacaaggtagctatttactcctggtaaataatacaataaaaaagtaac

SEQ ID NO: 511829 - DNA, 201 bp, Homo sapiens
cgatcttggctcactgcaacctctacctcccaggttcaagtgattcttgtgcctcaacctcccgagtagctaggattacaggtgtgcaccaccatacccgkctaatttttgcatttttagtagagatggggtttcaccatgttggtcaggctggtctcaaactcctgacctcaggtgatccacctgactcagcctcccaaa

SEQ ID NO: 511830 - DNA, 201 bp, Homo sapiens
ttttactatgcttgcttgattttgggaagttaggagccctagttcgctgacattattagcctatattgtcataagtaacctttataaacaatcaatatcargaaattgactcagacaactttgtaaaatgttacttttcctaaaatttcttaagttttaattaagtaaatttatcatttaatgtaaggaatcatgaaaatc

SEQ ID NO: 511831 - DNA, 201 bp, Homo sapiens
tcatttatttggctgtcgaccagtatgagggagaggcatagtgtattttagagtggaagacaccgttgtaactattcattttggtgagaagctaaggtgamgaatttcaagacagtattctttctttgcttttctgtttactcaggttttcactgtgcatcccaacttgtgttttcactattcatgggtagcagaagacca

SEQ ID NO: 511832 - DNA, 201 bp, Homo sapiens
gtttcagaagccaaatttctctatctcattttaagataaaaggagaaaaagagtgactaaattaagttttatggctgtaagtgtaaaacaattccaaagaytttggaaagagaagtcagaaaatataccagctttccttgtcctgtgatttctaaggggtactggattcttctgccagttttttttcacctatctcccaga

SEQ ID NO: 511833 - DNA, 201 bp, Homo sapiens
actggaaagacactgtggtcaaaagcttcttagtagaggtatggatatgcaaacagtcaagcttttcctgaaaagaaacagacatctaagaggttttgtaytaaaagatcttctcattgaagagacttaattagttgacaacatttacttttgacacaagacatgccattttaaatgaattaaaacagcataaagttcatc

SEQ ID NO: 511834 - DNA, 201 bp, Homo sapiens
ccacacagtcccacagtgcacagcacagttccgagccgcaaaggcttgcagtacccaaaatgccatttgccattttcacaaaaacccagttcattctcatytcaagatctttttttttttttttttgagacagagtctcgctctgtcgcctaggctgcagtgcagtggcacgatctcggttcactgcaacctccgcctccc

SEQ ID NO: 511835 - DNA, 201 bp, Homo sapiens
cgaaatgtattttcttcctcttgtacagattaaattgcttaatccagacaactctccaatcccaaatgaagttgtccagttgcatctgaaggacaaaatcrtgggaaactacaccacagatgtaaatggcatcgctcagtttttcttggacacatatacgtttacatacccaaatatcactttgaaagtaagttaaacgaa

SEQ ID NO: 511836 - DNA, 201 bp, Homo sapiens
tcatgtcctctccttccacatgagtccatgtgccctgtgatttcactttaaataactcatggaggattcttgtgtttcatgctttatctttatggtataaktttatccatcaaaaagaatattcaggaggtggtttttagttcactttctgaggctggtctgctcctatctatttttttttccatcatgtgtattcttagc

SEQ ID NO: 511837 - DNA, 201 bp, Homo sapiens
tcctctccttccacatgagtccatgtgccctgtgatttcactttaaataactcatggaggattcttgtgtttcatgctttatctttatggtataagtttakccatcaaaaagaatattcaggaggtggtttttagttcactttctgaggctggtctgctcctatctatttttttttccatcatgtgtattcttagctcctc

SEQ ID NO: 511838 - DNA, 201 bp, Homo sapiens
gctcctgaaaggagaaattggatgaatgttggtgccattcaatgggatattcaagtggaaatgttaaatgtgcagttgaatataggcgctcaggccgggcrcggtggctcacgcctgtaatcccagcactttgggaggccgaggtgggtggatcatatgaggtcaggagtttgagactagtctggctaacatggtgaaccc

SEQ ID NO: 511839 - DNA, 201 bp, Homo sapiens
tgaggctagagaatgacttgaacccaggaggcttgaacccaggagccgagatcgtgccactgcactatagcctgggtgacagagtgagactccgtctcaaaataataataataataataataataataataataataataataataataaaaggaaaataggagctcagaggctgggcacggtggcttgtgcctgtaatcc

SEQ ID NO: 511840 - DNA, 201 bp, Homo sapiens
gaggctagagaatgacttgaacccaggaggcttgaacccaggagccgagatcgtgccactgcactatagcctgggtgacagagtgagactccgtctcaaaataataataataataataataataataataataataataataataataaaaggaaaataggagctcagaggctgggcacggtggcttgtgcctgtaatccc

SEQ ID NO: 511841 - DNA, 201 bp, Homo sapiens
aggctagagaatgacttgaacccaggaggcttgaacccaggagccgagatcgtgccactgcactatagcctgggtgacagagtgagactccgtctcaaaataataataataataataataataataataataataataataataataaaaggaaaataggagctcagaggctgggcacggtggcttgtgcctgtaatccca

SEQ ID NO: 511842 - DNA, 201 bp, Homo sapiens
ataataataataataataaaaggaaaataggagctcagaggctgggcacggtggcttgtgcctgtaatcccagctgtctgggaggccgaggccagtagatygcttgagctcgggagtttgagaccagtctgggcaacatggcaaaaccccttctctacaaaaaaatacaaaaattagctggtgcttggtggctcatgcctg

SEQ ID NO: 511843 - DNA, 201 bp, Homo sapiens
tttgagaccagtctgggcaacatggcaaaaccccttctctacaaaaaaatacaaaaattagctggtgcttggtggctcatgcctgtagtcccagacacttsggaggctgaggtgggaggatggcttgagcactggaagtcaaggctgcaatgagccatgatcgcaccattgcactccagcttgggtgacagagtgagaccc

SEQ ID NO: 511844 - DNA, 201 bp, Homo sapiens
tgcaatgagccatgatcgcaccattgcactccagcttgggtgacagagtgagaccctctaaaaaaaaaggaaaataggagctcagaggagaactggggacrtatttatccacaggtggtaatcagagccatggatgtggttaataacctggccaacgtggtgaaaccccgttgctaattaaaaaatacaaaaattggccgg

SEQ ID NO: 511845 - DNA, 201 bp, Homo sapiens
tcacagaatgctgctgagagttaaggaatacgaggattgaaaaacagccactggatggaaagacaaaggggtcattgatagcgttgggaagagtcattttrggggagtggatgaagctagattgcagtgtcaagggaataagtacaagtgacagggagtgtagatgactgtgagaaacgtagacataaaagggaagagaga

SEQ ID NO: 511846 - DNA, 201 bp, Homo sapiens
agacaaaggggtcattgatagcgttgggaagagtcattttgggggagtggatgaagctagattgcagtgtcaagggaataagtacaagtgacagggagtgkagatgactgtgagaaacgtagacataaaagggaagagagataggccacagactcatccctccataaataacagttttgttattactatttactagtcatt

SEQ ID NO: 511847 - DNA, 201 bp, Homo sapiens
cagtggcacgatctcggctcactgcaagctctgcctcccaggttcacactattctcctgcctcagcctccggagtagctgggactacaggcgcccgccacygcgcccggttaattttttatatttttagtagagacgggttttcaccatgttagccaggatggtctcgatctcttgaccttgtgatccacccgcctcggcc

SEQ ID NO: 511848 - DNA, 201 bp, Homo sapiens
agtgatggactttaataataacatatcagtatgactaatccaagttgctaatagtggaaccttagagttttggagatgggaggttcctataaagctcttayatgggaatgctctgtactataagctcagttttctttttctttttttttcagatggagtctcgctctgtcgcccaggctggagtgcagtggcacgatctgc

SEQ ID NO: 511849 - DNA, 201 bp, Homo sapiens
taacagtttggtttcagaagccaaatttctctatctcattttaagataaaaggagaaaaagagtgactaaattaagttttatggctgtaagtgtaaaacarttccaaagattttggaaagagaagtcagaaaatataccagctttccttgtcctgtgatttctaaggggtactggattcttctgccagttttttttcacct

SEQ ID NO: 511850 - DNA, 201 bp, Homo sapiens
atcttcacagtaactggtagacaaaaagttaagagaaaaactgaaacagagctgcttttgcaactttgttcttgtcatatcttgccctgagattctgaggraataatttattttattttttagacagggtctcactctgtcacccaggcaggaatgtggtggcacagctcactgcagccttgacctcctgagctcaggaga

SEQ ID NO: 511851 - DNA, 201 bp, Homo sapiens
tccatcttcagcaaccttccggtggatggagaaggactgcccaaatgcctgcagagtatatgggaagaaaaagagtacacaatgaaatgcatcataacccwcttttaagacttgggaaaatgttttcttctgcttatatgtgtaagaaaagctaccccgcaagacccccgaaatataacagtctagcagctctcactgatg

SEQ ID NO: 511852 - DNA, 201 bp, Homo sapiens
ttcgtctacccatgattttaagaagcaaagagtgtgatgtttcccacctacccacacccccttaaaactattcaaatgaaaccatttaattctttaattayagtggaatagaactgacctattttctgtatgatcataaagaaatatttacttttaacgcagaaatttttttcttaagatccacattttccagcttaatga

SEQ ID NO: 511853 - DNA, 201 bp, Homo sapiens
caaaaattagcctggtgtggtggtgggcgcctgtaatctcagctacttgggaggctgaggcaggagaatcgcttgaatccgagatgtggaggttgcagtgygccaagatcgcaccattgcactccagcttgggcaacaaagcgagactccatctcaaaaataataacaatgttacactgtatcttgtacatttttagtggg

SEQ ID NO: 511854 - DNA, 201 bp, Homo sapiens
agatcaccctggccaacatggagaatccccatctctacgaaaaatacaaaaattagcctggtgtggtggtgggcgcctgtaatctcagctacttgggaggytgaggcaggagaatcgcttgaatccgagatgtggaggttgcagtgcgccaagatcgcaccattgcactccagcttgggcaacaaagcgagactccatctc

SEQ ID NO: 511855 - DNA, 201 bp, Homo sapiens
ctgaggcaggagaagggcatgaacccgagaggcggagcttgcagtgagccgagattgcccagtgcactccagcctgggcgacagagcgagactccatctcaaaaaaaaaaaaaaattttgtcactgtatattatcatatttaaaatttttgtaaattaatgggaaaaaaagtaaacttccttaatttacattcactgacta

SEQ ID NO: 511856 - DNA, 201 bp, Homo sapiens
gctcaaccattttcaagggaagagagctgaatatctttgctatttgggaattgtaagaggtatcaccttcaaccagagaacaaatattgtcaatctgtaaygtatcactactcacaacagtactattccttgactcctgtgagatttgctgatcgttcataggagaatggatagctgactctaatttgttatgctttcctt

SEQ ID NO: 511857 - DNA, 201 bp, Homo sapiens
tgctcctgagagcctgagagctcactgccttccaccccactttgccccctggtttcctgtggtggctctgctctcccaactcaccctcttcctcccacggagagggggctagtccttcactctttcctgcagccagaaaatatttacccaacagtgactgtgagcgaggcactgagcaaatctctatagatccagtgatga

SEQ ID NO: 511858 - DNA, 201 bp, Homo sapiens
gctttatgaattctctctttacctgtgtttaatctacaattagccctttctttgacattttttggtcacagtgaagcttgttacagacaaacatgtttagrttgggtggcttaggtggtgtggtggctccacattgatgtcatactgaggacaggggtcaagtactccatgattagtctttgctcttacttcaggagctgc

SEQ ID NO: 511859 - DNA, 201 bp, Homo sapiens
gtatcttttctactgtcgtcttgtagttcaggaaaatgacttttcccatctggaggagtctttggattatttacaaggctcttaaattgaacaacagtgayatctctatcagaagttctctctccttgtttacaactgttggtatccaaaggacaacactgctctttttgtttctcttcctctgaagatgagttcttgatg

SEQ ID NO: 511860 - DNA, 201 bp, Homo sapiens
ctcactgccttccaccccactttgccccctggtttcctgtggtggctctgctctcccaactcaccctcttcctcccacggcgagggggctagtccttcacactttcctgcagccagaaaatatttacccaacagtgactgtgagcgaggcactgagcaaatctctatagatccagtgatgaataaggcagcgtccctgtcc

SEQ ID NO: 511861 - DNA, 201 bp, Homo sapiens
cccaaagtgcttacaggcgtgagccaccacacccagcctcattccaattttctgtgtgtctctgtgctgcattctgggtaatttctccacatctgtctccwgctttatgaattctctctttacctgtgtttaatctacaattagccctttctttgacattttttggtcacagtgaagcttgttacagacaaacatgtttag

SEQ ID NO: 511862 - DNA, 201 bp, Homo sapiens
atttactcctggtaaataatacaataaaaaagtaacaaaagggtttggggctggggatcatgtgaccaggttctcctcctgtttcctaatcctgtgactgraaagtcgtatcaccttttgaccttgttttctcatatgcaaaactaggagcagaatctttaccttattcacctcacaattactgaatcaaatgatattttg

SEQ ID NO: 511863 - DNA, 201 bp, Homo sapiens
tcactgccttccaccccactttgccccctggtttcctgtggtggctctgctctcccaactcaccctcttcctcccacggcgagggggctagtccttcactgtttcctgcagccagaaaatatttacccaacagtgactgtgagcgaggcactgagcaaatctctatagatccagtgatgaataaggcagcgtccctgtcca

SEQ ID NO: 511864 - DNA, 201 bp, Homo sapiens
tactgcctcagcctcctgatagctgggactacaggcacacgccaccatgctgggctaatttttttcttactttttttttttctttttgtagagatgggggwctcactgtcttgtccaggctggtcgtgaagtcctgggctcaagcagtcctctgcctcagcctcccaaagtgctgggattataggtgtgagccactgcacc

SEQ ID NO: 511865 - DNA, 201 bp, Homo sapiens
aataaaaaagtaacaaaagggtttggggctggggatcatgtgaccaggttctcctcctgtttcctaatcctgtgactggaaagtcgtatcaccttttgacsttgttttctcatatgcaaaactaggagcagaatctttaccttattcacctcacaattactgaatcaaatgatattttgcaaaagaactgaacacagtaaa

SEQ ID NO: 511866 - DNA, 201 bp, Homo sapiens
agttccaggtcaccacatccatctcccaccgtgtgctccccattgtgctggaccctgagagacaccaaagatgtggccaacacggtgtccttaggagcttrgaggccggaatgggagagcacagggcgaggctgattcttcattgcatagcatgaatcgcacaggcttccaggggtctagaggggagagaaatcactaaaa

SEQ ID NO: 511867 - DNA, 201 bp, Homo sapiens
ggctggagtgcagtgatgcgactgaactcctgggctcaagcaatcctactgcctcagcctcctgatagctgggactacaggcacacgccaccatgctgggmtaatttttttcttactttttttttttctttttgtagagatgggggtctcactgtcttgtccaggctggtcgtgaagtcctgggctcaagcagtcctctgc

SEQ ID NO: 511868 - DNA, 201 bp, Homo sapiens
catagatacatcactgcccctgcccctcagtctccggttttatggccatgaggggtattattttacctggttgatggtgatctgattatactccttcatcwgagtcttcaagctttaccttttgtgtgtgttgttttatgtgttacagtcagtgtagtttttacattttttcatacataaatagttcaggcactaaaccag

SEQ ID NO: 511869 - DNA, 201 bp, Homo sapiens
ggtatagatttgcatttggaggtgcttttttcccctactgcaggactaggcaatttttatattatttcattagattatgagaacttctagagaaatggaakcatatacttaatggtgattattcttggccatagaatcacacgctgtcacattttgtctgggcctttgcttctcttggactgacagcactctaactggttt

SEQ ID NO: 511870 - DNA, 201 bp, Homo sapiens
tcaggttatctgttgaacagtgaggggtggggaggaaaggaagaaagtgaaggacgcattgtacagattattttgaccttggagagtcgacgaccatgtgrcttagggatgatcttcttgtgaagtatttttcaggggtctgtgcatttcctgattttgaaagttggcctctctagctagcttgtggaagttctcatgaat

SEQ ID NO: 511871 - DNA, 201 bp, Homo sapiens
gcctaggctggagtgcagtgatgcgactgaactcctgggctcaagcaatcctactgcctcagcctcctgatagctgggactacaggcacacgccaccatgmtgggctaatttttttcttactttttttttttctttttgtagagatgggggtctcactgtcttgtccaggctggtcgtgaagtcctgggctcaagcagtcc

SEQ ID NO: 511872 - DNA, 201 bp, Homo sapiens
tatgtgttacagtcagtgtagtttttacattttttcatacataaatagttcaggcactaaaccagtgaagaacgggggccacaatctaacacacagatttrtatgccattttctgaatgtactattatcctaaactgggtcaaaactccaaattcatctcctctaataaacaacttgtaaaataaaaataagtaatggaat

SEQ ID NO: 511873 - DNA, 201 bp, Homo sapiens
atgttgcccagtctggttctcgaactcctgggcataagtgatccacctgcttcggcctcctaaagtgctaggattacaggtgtgagccactgtgcccagcsttaattaattattttaacattaattttatttttttaaaaaataagcaggccaggcatggtggcccatgcctgtaatcccagcactttgggaggccgaggc

SEQ ID NO: 511874 - DNA, 201 bp, Homo sapiens
cagccttaattaattattttaacattaattttatttttttaaaaaataagcaggccaggcatggtggcccatgcctgtaatcccagcactttgggaggccraggcaggcagatcatctgaagtcaggagttcgagaccagcctggccaacatggtgaaaccccatctctactaaaaatataaaaatcagccgggcgtggtg

SEQ ID NO: 511875 - DNA, 201 bp, Homo sapiens
ctgaggcaggagaatcgtttgaacccgggaagtggaagttgcagtgagccgagatctcgccactgtactccagcttggtgacagagcgagactccgtctcaaaaaaaaaaaaagcaatacatccaaatgcttcaaaattcagaaagaggccaggcacggtggctcacacctgtaatctcagcactgtgggaggccaaggca

SEQ ID NO: 511876 - DNA, 201 bp, Homo sapiens
gcgagactccgtctcaaaaaaaaaaaaagcaatacatccaaatgcttcaaaattcagaaagaggccaggcacggtggctcacacctgtaatctcagcactktgggaggccaaggcaggcggatcacctgaagtcaggagttcgagaccagcctggccaacatggtgaaactccatctatactaaaaatacaaaaattagcc

SEQ ID NO: 511877 - DNA, 201 bp, Homo sapiens
tgcttcaaaattcagaaagaggccaggcacggtggctcacacctgtaatctcagcactgtgggaggccaaggcaggcggatcacctgaagtcaggagttcragaccagcctggccaacatggtgaaactccatctatactaaaaatacaaaaattagccgggtgtggcgatgcacacctgtaatcccagctactcgggaag

SEQ ID NO: 511878 - DNA, 201 bp, Homo sapiens
cactgtgggaggccaaggcaggcggatcacctgaagtcaggagttcgagaccagcctggccaacatggtgaaactccatctatactaaaaatacaaaaatkagccgggtgtggcgatgcacacctgtaatcccagctactcgggaagctgaggcaggagaatcacttgaacctaggaggcggaggttgcggtgagccgaga

SEQ ID NO: 511879 - DNA, 201 bp, Homo sapiens
aatacaaaaattagccgggtgtggcgatgcacacctgtaatcccagctactcgggaagctgaggcaggagaatcacttgaacctaggaggcggaggttgcrgtgagccgagatcgtgccactgcactccatcctgggcaagggggagactctgtctcaaaaaaaaaaaaattcagaaagaactaaaagttcagtgaaagtt

SEQ ID NO: 511880 - DNA, 201 bp, Homo sapiens
gcgatgcacacctgtaatcccagctactcgggaagctgaggcaggagaatcacttgaacctaggaggcggaggttgcggtgagccgagatcgtgccactgyactccatcctgggcaagggggagactctgtctcaaaaaaaaaaaaattcagaaagaactaaaagttcagtgaaagtttacttttcaccgtattcctgaac

SEQ ID NO: 511881 - DNA, 201 bp, Homo sapiens
gctgaggcaggagaatcacttgaacctaggaggcggaggttgcggtgagccgagatcgtgccactgcactccatcctgggcaagggggagactctgtctcaaaaaaaaaaaaattcagaaagaactaaaagttcagtgaaagtttacttttcaccgtattcctgaacccctagtttccttcctggggcagctgtactttat

SEQ ID NO: 511882 - DNA, 201 bp, Homo sapiens
ccaccagctgggaggggagatgaggccacctgagcagggcggggctcccctgcaggaggcttgcctgcctgacactgagctcctgatgtgagtgcttctayttcctgcctggactgtgtagagacattcaaaaaacagcttgtagcaacggacaagctctcctcgagtttcacatgaaaagccaatacatgaaacacagga

SEQ ID NO: 511883 - DNA, 201 bp, Homo sapiens
tcctgaacccctagtttccttcctggggcagctgtactttatttaaccaggagcctagtgatgaacatttgcttgttaacagtcttctattatgaatgaarcaatggataatcttgtatatgtcattttgtgcatacgtgagtgtcttcagtctatttccctagaagctgagactggtggagcttcgtaggcaagtgattt

SEQ ID NO: 511884 - DNA, 201 bp, Homo sapiens
aatccctcaaattagacatttttattctatacacttggttttgtttaaatttactcatagtgaccttattttgtttttctttgaaataaggtctcactctrttgcctaggctggagtgcagtgatgcgactgaactcctgggctcaagcaatcctactgcctcagcctcctgatagctgggactacaggcacacgccacca

SEQ ID NO: 511885 - DNA, 201 bp, Homo sapiens
ttgcgtgcaagaagcaacagagtccaagtgctggaagctcctcctttgtggagaggagggtgagaagtagccgagtgactccagcctcttccccaagggtrcacagcccagcccatagcccccagcacagcaccagctgaggacactcgtgttaccttagttatgtgttcttcctccaggtcatcctcatcctcatccact

SEQ ID NO: 511886 - DNA, 201 bp, Homo sapiens
tcttgcttttctctctctctctgtttttgatgttttgaattgatttaaatttttttctcattgcagttttttctgtttagatgttatatgctctttttctkaatgataaattttgagatttcaacatgaacagttactcttatgttatagaatcttcacagataactataaaatgctttaactccatgcccattgtggctt

SEQ ID NO: 511887 - DNA, 201 bp, Homo sapiens
gccatttgtcttgcttttctctctctctctgtttttgatgttttgaattgatttaaatttttttctcattgcagttttttctgtttagatgttatatgctmtttttcttaatgataaattttgagatttcaacatgaacagttactcttatgttatagaatcttcacagataactataaaatgctttaactccatgcccat

SEQ ID NO: 511888 - DNA, 201 bp, Homo sapiens
taaccattcactaaaatcactctatgttaggaattgtgctacaaaaaggcattgtatattttggatcttttccctacatttaatcctctcaacagcagtgrgttagtgctgttgtgcattttttgttgaggaggagattgaggcttggggaaactaagtaatctgcccaagatgatacagctagtaagtaatgtagtacta

SEQ ID NO: 511889 - DNA, 201 bp, Homo sapiens
aggatctgagtagattatttttcaaaaaccagccacatgttccagtctgtgtttattgaataaacattccctttctgttttctaattttccttttattacrtgctaagtaattacatatactagtgtctgtgggctttctctttttttcctagcaacttgtttgtatgctgctatacttttgatgattgtcataacgttat

SEQ ID NO: 511890 - DNA, 201 bp, Homo sapiens
tgtactacttgctatggactgaattgtgttccttcaaaatttctctgttgaagccctaatctccggtgtgatggtatgtgtttttgattttgttttgagayggaattttgctctgttgcccaggctggagtgcagtggcacgatcttggctcactgcagcctccacctcccaggttcaagcaattctcctacctcagcctc

SEQ ID NO: 511891 - DNA, 201 bp, Homo sapiens
acattccctttctgttttctaattttccttttattacatgctaagtaattacatatactagtgtctgtgggctttctctttttttcctagcaacttgtttrtatgctgctatacttttgatgattgtcataacgttataagagaatttctaataggactaacctttttctaatttctcaccttttttcaaaatggtagcac

SEQ ID NO: 511892 - DNA, 201 bp, Homo sapiens
gactgcagggcatcaggggctctcaaagccaagagtgaagaatcagaggggtctgtaagagatcagggacattgggagcagcatctatccaaccacgcagaaggacagtgggtgcccaaaccaaagggccaattaggcaacctggtcacaataggagttagactgaggagctgccactccctaattcacaggagcccagaa

SEQ ID NO: 511893 - DNA, 201 bp, Homo sapiens
ttcttttcttttttttttggtgggggggttggggggcgggacagagtctgactgtgtcgcccaggctggagtgcagtggcacagtcttggctcactacaayctctgcctcccaggttcaagcgattcttgtgcctcagcctcctgagtagctaggattacaggtagtcgccacctcacctggctaatttttgtatttttag

SEQ ID NO: 511894 - DNA, 201 bp, Homo sapiens
ttttctcattatccctatagaaaaccaattcttgccacattcctagaccataagtacactttctcatatcctaaagttagatgctgcgaattatttccttyttttttctccccctacaggatggctgtgactttgtctgccgttctaaacctcgaaatgtgcctgcagcatatcgtggtgtgggggatgaccagctggggg

SEQ ID NO: 511895 - DNA, 201 bp, Homo sapiens
attatccctatagaaaaccaattcttgccacattcctagaccataagtacactttctcatatcctaaagttagatgctgcgaattatttccttcttttttytccccctacaggatggctgtgactttgtctgccgttctaaacctcgaaatgtgcctgcagcatatcgtggtgtgggggatgaccagctgggggaggagtc

SEQ ID NO: 511896 - DNA, 201 bp, Homo sapiens
gaggggaacagtgggatgcagaaagaatgacaacagccacatgtgccccagtcaaatacttttagtccctgcagcagaagatgccaaccaagtctctataytggctggggatcctgccatggatgcaggagaaaaaattcaatcacaagggagtaagtgacaacaaaaagaaaaaactctgagccacagctacactgggag

SEQ ID NO: 511897 - DNA, 201 bp, Homo sapiens
ccccaaatctgctgatataaagaagccatcacattttttaaatcagtattttcattctaggtgccaaagcctccaagcagggagttttggacttgccaaaygatgtagtagaagggtcagccagaggctttttcactgttgtgggtaagttgatcaaattttgtgtttcactatgatttgaaaatcttggttgaggtggtc

SEQ ID NO: 511898 - DNA, 201 bp, Homo sapiens
cacctcccaggttcaagccattctcctgcgtcggtctcctgagtagctgggattacaggcgtgtgccaccatgcccagctaatttttgtatttgacggggmtgcaccatgttggtcagggtggtctcgaactcctgaccttgtgatccacctgcctcggcctcccaaagtgctgggattacaggtgtgagccactgcaccc

SEQ ID NO: 511899 - DNA, 201 bp, Homo sapiens
ttaatttttttttaatgtctggtattttgcaagctaccttgtttattgttgttattattgttgtttttgttaggagttgttgtcagtggttcatctatcarcgtctgtatttgtttgctcagctgtggtctgttgcagtgaagtgattggctttgtatacacaaagagggccaatgttgtgaactgtgaggttaaggaaaa

SEQ ID NO: 511900 - DNA, 201 bp, Homo sapiens
aggttaaaaaataatttcctacaatgttctattttaggttatcaaaggcaattatctttcaaaaactctgatggttcctatagtgtgttttggcagcagartcagaaaggaagcatatggtgagacataaaaattttattttatataatataggaattacctgaggagggcttgcaaggaggtgaaggaggatagagttca

SEQ ID NO: 511901 - DNA, 201 bp, Homo sapiens
gcaggagaatcgcttgaacccagcagggtgacaagagcgaaactccatctttaaaaaaaaaaaagctgtctgtgggtgggcactatgtgagaatcaaacarggaaactatcaagccacacacgctgtcacaacccactgagatttgctcagatcccgccatccctcaggccaaatctgcacaagagtttgatagtttttat

SEQ ID NO: 511902 - DNA, 201 bp, Homo sapiens
gagatttattctgagccaaatatgagtgaccatggcccatgacacagccctcaggagattctgagaatatgcgcccaaggtggtcggggcacagcttgggtttttttttttttttttttttgagacggagtctcgctctgtcacccaggctggagtgcagtggcgtgatctctgctcactgcaagctccacctcccaggtt

SEQ ID NO: 511903 - DNA, 201 bp, Homo sapiens
atataatataggaattacctgaggagggcttgcaaggaggtgaaggaggatagagttcagtggggatttagaagcaaagtgggtttcaaagtcaatttacrgaagagaaatagataaaactaaagatttagtgattccaattctaatgcaacaatgttccttcagtctcatgacgatttgcttagcagtctgatcccttca

SEQ ID NO: 511904 - DNA, 201 bp, Homo sapiens
agatttattctgagccaaatatgagtgaccatggcccatgacacagccctcaggagattctgagaatatgcgcccaaggtggtcggggcacagcttgggtttttttttttttttttttttgagacggagtctcgctctgtcacccaggctggagtgcagtggcgtgatctctgctcactgcaagctccacctcccaggttc

SEQ ID NO: 511905 - DNA, 201 bp, Homo sapiens
gatttattctgagccaaatatgagtgaccatggcccatgacacagccctcaggagattctgagaatatgcgcccaaggtggtcggggcacagcttgggtttttttttttttttttttttgagacggagtctcgctctgtcacccaggctggagtgcagtggcgtgatctctgctcactgcaagctccacctcccaggttca

SEQ ID NO: 511906 - DNA, 201 bp, Homo sapiens
taacacacctctatactaaagaggaaaatgcttttaaatgtaatcttgaggttaattgactctcacttctcctttctctgaagggcctgcagaactctttyagttctgacgtggccccagtagttttttggttttatttttttgaggtagggactctctcacccaggctggggtacagtggcacgatcatagctcactgaa

SEQ ID NO: 511907 - DNA, 201 bp, Homo sapiens
tttttttttgagacggagtctcgctctgtcacccaggctggagtgcagtggcgtgatctctgctcactgcaagctccacctcccaggttcacgccattctyctgcctcaagcctcccgagtagctgggactacaggtgcctgccactgcgcctggctaattttttgttttagtagagacggggtttcaccgtgttagccag

SEQ ID NO: 511908 - DNA, 201 bp, Homo sapiens
acattcctggaggtaaaattgctggatgaagtcaacactattagttgcctatttaaaaaatatccccctctacacatacacacacacacacacacacacayacaccccattttttgtaatagaaccctgcttttatttgaaatagccatgtgttcaatttaaaaactcactttcccatcctcatttgcacttgtgctggtc

SEQ ID NO: 511909 - DNA, 201 bp, Homo sapiens
agccagtcagccctgctggccccaggtaatgggggacttagcacgcgggccagtggctgcggagggtgtactgggtcccccagcagtgctggcccaccggygctgcgctcgatttctcgccgggccttagctgccttcccacggggcagggctcgggacctgcagcccgccatgcctgagcctcccaccccctctgtgggc

SEQ ID NO: 511910 - DNA, 201 bp, Homo sapiens
ccctgctggccccaggtaatgggggacttagcacgcgggccagtggctgcggagggtgtactgggtcccccagcagtgctggcccaccggcgctgcgctcratttctcgccgggccttagctgccttcccacggggcagggctcgggacctgcagcccgccatgcctgagcctcccaccccctctgtgggctcctgtgcgg

SEQ ID NO: 511911 - DNA, 201 bp, Homo sapiens
cacgcgggccagtggctgcggagggtgtactgggtcccccagcagtgctggcccaccggcgctgcgctcgatttctcgccgggccttagctgccttcccayggggcagggctcgggacctgcagcccgccatgcctgagcctcccaccccctctgtgggctcctgtgcggcccgagcctccccgacgagcaccaccccctg

SEQ ID NO: 511912 - DNA, 201 bp, Homo sapiens
catctctaatcccagcactttgggaggccaaggtgagcagatgacttgatgccagcatgtccagaattggttccttctggtgggttcttggtctcactgasttcaagaatgaagctgcagaccttcgtggtgagtgttacagctcttaaagatggtgtgtcaggagtttgttccttcagatatgtccagagtttctacctt

SEQ ID NO: 511913 - DNA, 201 bp, Homo sapiens
gctctggtgaggacgtggagagtctttatatctagctcagggattgtaaatgcaccaatcagcaccctgtgtttagctcaaggtttgtgagtgcaccagtstacagtctgtatctagctgctctggtgaggacgtggagagtctttatatctagctcagggattgtaaatacaccaatcagcaccctgtgtttagctcaag

SEQ ID NO: 511914 - DNA, 201 bp, Homo sapiens
ctctggtgaggacgtggagagtctttatatctagctcagggattgtaaatgcaccaatcagcaccctgtgtttagctcaaggtttgtgagtgcaccagtckacagtctgtatctagctgctctggtgaggacgtggagagtctttatatctagctcagggattgtaaatacaccaatcagcaccctgtgtttagctcaagg

SEQ ID NO: 511915 - DNA, 201 bp, Homo sapiens
taagaagattagaagaatagctaatgtttacgcattaaaaatactccttgattttttagaaatatatgcaagaggcacgaagtttaggaaaaaacctgagrcaacccaaactgtcagacctctctcctgcagttattgcacagaccaactgtaaattcgtagaaggcttattaaaagaatgtagaatgaaggtatgtatta

SEQ ID NO: 511916 - DNA, 201 bp, Homo sapiens
ttttttttttcttttcagacggagtcttgctctgtcgcccaggatggagtgcagtggcgcaatctcggctcactgcaacctccatctcccaggttcaagckattctcctggctcagcccccgggtagctgggattacaggcacctgccaccacgcctggcttattttttgtatttttaatagagatggggtttcaccatgt

SEQ ID NO: 511917 - DNA, 201 bp, Homo sapiens
ctcaggtgatccgcccgcctcagcctcccaaactgctgggattaccggcgtgcgccactgtgcccgaccacaactggctgtcttaataacttcatctttawttttttcccagcctaaatcagtgcaataccataaccatctattaaacacctgctatggtgggaaggaagagaatgccatatacctcatgggatactgagt

SEQ ID NO: 511918 - DNA, 201 bp, Homo sapiens
ataaaactaaagatttagtgattccaattctaatgcaacaatgttccttcagtctcatgacgatttgcttagcagtctgatcccttcatgacagcccctakacatgcaccgctggttaactccaccgaagagggcacggcacgtcttactctgtgcttctcagagtcccatatagattcgggaaagtgaaattagaaggac

SEQ ID NO: 511919 - DNA, 201 bp, Homo sapiens
ggattaccggcgtgcgccactgtgcccgaccacaactggctgtcttaataacttcatctttatttttttcccagcctaaatcagtgcaataccataaccayctattaaacacctgctatggtgggaaggaagagaatgccatatacctcatgggatactgagttaatgaaaacttcttttccctgaagggggtcttagtcg

SEQ ID NO: 511920 - DNA, 201 bp, Homo sapiens
ttagtttctaataccctgctccactgaaaaaaaaaattttttccccatgggaggtatcatagttaattacacaaaaacattttatccaaaaatttagtgaraaatgcagctacatcataagatgagaatcaaatactgtaaaattgctgacattacagaagataatgtcaacccagaaaaaaattaggaagtcaacttgaa

SEQ ID NO: 511921 - DNA, 201 bp, Homo sapiens
tagcattcaagctcctactgcttaaaagtcaattactttccctcttatcaaggcccctgtgggatgatgttaaggaaaacaacctgggttctgttgaagaragggtcagtaccttggagagaagcaataaactcgtacacctcctctacactccaacggctgggattactggacaggaacacagggttgatgccatgtaat

SEQ ID NO: 511922 - DNA, 201 bp, Homo sapiens
tccttagcgtgtcttctcaatgaggctttctctgatcactctattgaaaatcataaccttcttccacttcacatgccatctccctattcccagggtttttyccccccatagcattttggatgatctaacgtgctatctacttaactcattcattttgtttatcatctctcttcccccacaaaatgtaggctccgcaaatat

SEQ ID NO: 511923 - DNA, 201 bp, Homo sapiens
aagatctgcagcttcactcctgagccagcgagaccacgaacccaccagaaggaagaaactccaaacacatctgaacatcagaagggacagactccagacgygccaccttaagagctgtaacaccgcgagggtccgcagcttcattgttgaagtgagaccaagaacccaccaattccggacacattggtactcttgaaaaaa

SEQ ID NO: 511924 - DNA, 201 bp, Homo sapiens
ttagatttggccaaaatttcataggtaaagaagtgcatgataacaggctttttagaaagggttatgtgaaaatagagtaacaataaaataaaagctaatgyctcattaagttgaccataccctaaatacagatactggctttaatcttttctagttctctgtaatatatagcagtgggaaaccagcagaagacattattag

SEQ ID NO: 511925 - DNA, 201 bp, Homo sapiens
acatgcaggtttgttacaaatgtatacatgtgccacgttgctgtgctgcacccattaacttgtcatttacattaggtatatctcctaatgctatccctccycactgcccccaccccacgacaggccccagtgtgggatgttccccacccggtgtccaagtgttctcattgttcagttcccacctatgagtgagaacatgcg

SEQ ID NO: 511926 - DNA, 201 bp, Homo sapiens
tgattgcaataaattttgctcaccagtgattgtgggggctgaagtatatttctctttgtttccagtgttgcccaagtttgaagttaaagtcaatgcaccaygaacagtaactatttcagatgatggattccaagtggatgcgcgtgctaagtaagcatttattcaggagatttgccttcacaaggagacacaaagcttaga

SEQ ID NO: 511927 - DNA, 201 bp, Homo sapiens
agaacagttattaaggtcttttaagatatggtaagaattttggattgagaagtgactaatggttttaagaaagagagtaacatgatcaggttagctcaggmtgtatagaatggtttagacaagaatgaagcagcaaggaaatgcagaagattaaatagctactggaaaccagatgggaaaaaatgtgattttaactagaat

SEQ ID NO: 511928 - DNA, 201 bp, Homo sapiens
gattgctacagtgctattaggtaggagcaatcatcacctctataaggaaagatactaagacaccgataattcaaataacttatcaacagtaatggagcttrttgatgaaagaaccgggatttagacctaggctgttcggcttcagagctactctcctaatcaataactctcttgcactttacataaacagttaaaaatatt

SEQ ID NO: 511929 - DNA, 201 bp, Homo sapiens
ctgctgttccatttccttgggcacttaggctggtctcatgatctaagggccaactgctcatgtgaaaatccatcccagcatcctcagctcaaataactgcygcttgccacacgcctaccccaacggaattaacggaagctgctgatagccctgctgacctcattggatggaaccgtgtcctcagcagacaggagctccttc

SEQ ID NO: 511930 - DNA, 201 bp, Homo sapiens
tcaatctgtacaacaaaaccccagcacttattagtccctgaagtatggaaacaaatgaggaagggactgtgtctcctgcattaaacacatcgatgtctctktcccacaagagaagctcttcacggggctccttccatgtttgctgtacagaacctctcaaacgaacaacctcattcatgtgaaaattccccagagcggcca

SEQ ID NO: 511931 - DNA, 201 bp, Homo sapiens
gtgctccttgctcctctctgcactgtagtcccgaagtctctgcaggtctctgaagctctcagcagagagggtagttcctctgtgcagctggttgtcccatygtctcctgctattagcagagagggcagcttctctctgcaactggtcttcctgtccctccatcctctctcttgctctgcctgagcccgaggcttttatggg

SEQ ID NO: 511932 - DNA, 201 bp, Homo sapiens
ggtggcaggcacctgtagtcccacctattcaggaggctgaggcaggagaatcgcttgaacctgggaggtggaggttgcagtgagctgagatcagaccactrcactccagcctgggtgatagagtgagattccagctcaaaaaaaaaaaaaaaaattacccaagcatggtggtatgctcctgtagtcccagttacttgggag

SEQ ID NO: 511933 - DNA, 201 bp, Homo sapiens
aggtcagtgtcaaaggtttattcctctctctttcttcccaaaccaccctgggttgggcgtagaagaaaaactcatcttatcatatgtgaaataagcagcaytttatttgcaaattcccaaaatctactctcaaagtctttcaaatagaaactgtatcacttccttgattctccccatgacctaacaattgatctagatttt

SEQ ID NO: 511934 - DNA, 201 bp, Homo sapiens
aaactctttcatttttttcctcttcagccggaactgatggctacagctcacattgtacctacaggacagggcatatataggatgtcaatagtgccacagargaccaccctgctctaaatgtgaatttctgcttatgagctgatttggggaagggaataaaagcaaggagggagacataaaatatcagctatgagacgatcc

SEQ ID NO: 511935 - DNA, 201 bp, Homo sapiens
tgagaacaacccacctgtcccagaaaacattgagagttaagttagcctgatccccttctgcttctctatagctttccccaacatttccccatcaattatgyctctgcttggatctctgagttaatgaccaagtctggttcagagagaatcactttcaatacggtaatcaagagtagtaactggtctctatacaatgtttgg

SEQ ID NO: 511936 - DNA, 201 bp, Homo sapiens
gcacaatgtgatagatgctgtaaatcagcgtttagaggtgtttatctaactctccctagtgggagatggggaaattttcactgagaatgtaactctgcacyatgagcagatgtttgctaagtgggcaaggattgagtgggggatgtcttaaactgagggaaaacatttgtaaaagcagaaaggggtgaggatatgacagca

SEQ ID NO: 511937 - DNA, 201 bp, Homo sapiens
gacaagaggaagacaaaaattggaaaaaaaactatgcaaaaacattaacaaaatgttatcctcagcaatgtgattgtaagttataaaaattttcttccttrtacttgtactatgtttccaaactttctacaatgaatgttatatttaaaaatagaaaaaaatacttttaaagatcctagaggcttcccttttacagaaacc

SEQ ID NO: 511938 - DNA, 201 bp, Homo sapiens
aagttgcttgggggtggggtggagcagagagaactctttaatggttccttgttacagccctcaacaaagatatgtcaattcccttggctttacagactatygcccagaagaaaagatgtttggttttcacaagccaaagatgtaccgaagtatagagggctgctgtatttgcagagctaagtcctccagttctcgattcac

SEQ ID NO: 511939 - DNA, 201 bp, Homo sapiens
agttgcctgaagaatttccacagttccccaataaagtggattttatccaagaactctctgaggttcttgttcaatttgggatccctcctgagggcagcctrcattgcagtgagagtaccagcaaactgaagaatatggttctgaaagacttggtcaatgacaaaaagaacggcaatgtctgtactaataacatcagcatgt

SEQ ID NO: 511940 - DNA, 201 bp, Homo sapiens
tcatgaggtcaggagatcgagaccatcctggctaacaaggtgaaaccccgtctctactaaaaatacaaaaaaattagccggacgtggtggcgggcatctgyagtcccagctacttgggaggctgagccaggagaatggcgtgaacccgggaggtggaggttgcaatgagctgagatcacgccactgcacaccagcctgggc

SEQ ID NO: 511941 - DNA, 201 bp, Homo sapiens
ctcatcttctggtaggtcctgtaactctaattaggcatttgtacatttttagcagcaaaattgcctcagcagagctcccagttttattcccagttgtggcygaaaagcaaagccatggcatcagtatccttgtgcaatcggaggttgctgggctttcaccacctgtgttgttaaccttatttcctggaggaagaaacagat

SEQ ID NO: 511942 - DNA, 201 bp, Homo sapiens
ttctttcattaaatagttctgtgccttttacttttactggagtttgaaaagacaacaatcagaccaagtccccacttcaaagtcccaccttatggccctgycctcaccgggaaaggttctgctccttcctggataacaaagccttcaatgatgtgggtgagaatctggggcttcacgatggcctgtgggggttttgagtca

SEQ ID NO: 511943 - DNA, 201 bp, Homo sapiens
tcaaaaaaaaaaaaagttatttattaagttatacacaccctgaggaatgatatgactaataagttataaaaagtcaaagagcagatagtagaagagcttcscagtgccaaggtggtccatcttgctttaccttcatcccttgtaactgagcatgacccatgaaatgataagcttggaagctgtgcctgggatattgcaagg

SEQ ID NO: 511944 - DNA, 201 bp, Homo sapiens
tatataggttatttatatactgcttgtggggaaaaatgaattgttttctatgaaaaaatacagttgactctcttctaccatctaggtgtatagtcagctayattccagcgaactacatggctattatttcagaggacttaacttagaagatggccttaaagtgccgtgtcttgaagatggacatatcctttacaatggaat

SEQ ID NO: 511945 - DNA, 201 bp, Homo sapiens
cgccactgcacaccagcctgggcgacagagtgagactccgtctcaaaaaacaaaaaacaaaaaaccaaaacaacgaaaattagctgggcatgatggcatamgcctgtagccccagagattcaggaagctgagatgggaggattgcttgagcccaggaagtcgaagctgtagtgagctgagatcgtgtcactgcactccagc

SEQ ID NO: 511946 - DNA, 201 bp, Homo sapiens
cataataatctatgtccacccttgacaattcacctggattccctgtttttggatctattcatttgtccaccaacttctggcccattttctactcaaccagwtttatcttttagctcactcagaacattcctctactctgtgtgctctccaacagcattagaagtcagttactcacctccaagactgctcttctcgtccatg

SEQ ID NO: 511947 - DNA, 201 bp, Homo sapiens
tctccaggtactgcaagacatagatgatgggagcaaacaagaccatgttctgctcgccacagccactgggcatctgcaccagaccatccaggttctgcagrgctgtgcccataatgtctcctgggatccaaaaggagagagagaaggtaggggtacagagaagaagggaccctctaagagttatcatcattcactgaacaa

SEQ ID NO: 511948 - DNA, 201 bp, Homo sapiens
tctactctgtgtgctctccaacagcattagaagtcagttactcacctccaagactgctcttctcgtccatgacttttgggctttctgctactggagatgcyttggcaggaagcattgaacccaatgtggagacatcatctctctcctcctcagagtcagccttgcgtttgacagccaatgtctggggtttaccctataccg

SEQ ID NO: 511949 - DNA, 201 bp, Homo sapiens
taaatttatttaaatttttcttatgtgctcctatgatgtaggcttcatgtgaccatttgatagaaaacagttgtgttaatgaatgtagtgaggagattttaaaaagaagaaagttgaggaaaattcataaatattcaaaagccggaagagtttagatgttaaaatctaattttttaaaaaacttgcatgctctgtttttat

SEQ ID NO: 511950 - DNA, 201 bp, Homo sapiens
ttttctcttttttcagtggtggaattgactggaaggcagtccagtgaaatcacaagaaccataaccaaactctcatttgtgaaagtggactcacactttcracagggaattcccttctttgggcaggtggagtattttccagttcactcatcaacccatgtactgttacctaattagcacaatagttatggtttgtgctaa

SEQ ID NO: 511951 - DNA, 201 bp, Homo sapiens
ttttatagactgcctttcgccatgttgcccaggctggtcttgaacttctgagctcaagcgatctgcctgcctcagcctcccaaagtgctggcattacaggygtgtgccaccagacctggccttgcctgaaacttaaaagagaaataataatagttatatattacagtactcccagatagccatatctagcctttttttttt

SEQ ID NO: 511952 - DNA, 201 bp, Homo sapiens
gggctaataaacatcatatatacatgatgtttattacatatatattatatatattaggtatgtaatatatatgtattacatatatacacacacacacacayatatatatatatgtacacacacatatatatacaaagtctggctctatcacccaggctggagtgcagaggcacaatcttggctcactgcaacctctgcctc

SEQ ID NO: 511953 - DNA, 201 bp, Homo sapiens
atgttggccaggctggtcttgaaaacctgacctcaaatgatctacctgcatcggcttcgcaatcttttcattttttcaaaaaatatttactgagttcctaycatgcagaatagaatacaaccctacgtccaagcctatgaacatgttcaagttattcacacaataaaacgtaacaaacacactaacaaaaaactttccttg

SEQ ID NO: 511954 - DNA, 201 bp, Homo sapiens
agaactgttgttttttcaaagactgatttggttaaggctatcttgatctaacttattacatacccaaaaacccagaatagtatcagcaacaaatttaggartataaagttcagatattatataatgtgtcactctcttacagaagaagcagataaataccaatattaaccctcttaactctttattcccctattcaattaa

SEQ ID NO: 511955 - DNA, 201 bp, Homo sapiens
ccaaccccaaagcctgtgcctgggctgtacctggctgtcgagtgcctacaacttgcacagggatatggggtggtggttgctgggcagctgacatcttagcrgcccctaactgaggcggcttgataggtgctacaggtggtttggattggatgggaattggtggcttaggggctgcatcaggtggaagagacaagggtgaag

SEQ ID NO: 511956 - DNA, 201 bp, Homo sapiens
ttatttatatactgcttgtggggaaaaatgaattgttttctatgaaaaaatacagttgactctcttctaccatctaggtgtatagtcagctacattccagsgaactacatggctattatttcagaggacttaacttagaagatggccttaaagtgccgtgtcttgaagatggacatatcctttacaatggaatttattaca

SEQ ID NO: 511957 - DNA, 201 bp, Homo sapiens
ggaagagtaggactgggtaacatctgagagctagcatgatagaagatctcttttaagaaaaagcatagacagaagttgagaatctagaaactcattttctwaaaactaactgccaatggtccattctctgtcttcatcagagctgccattttgctgttgccacttgctagtgttgaaaaagcctcctgcttcaggttcact

SEQ ID NO: 511958 - DNA, 201 bp, Homo sapiens
tcttttcccctgaggcccctgaactttggcctactgttgagtttaaacaagcattggaatgtggaacaacctccttaatgacccttccagaattggctgaytgcaaagaaaaattgtccaatgtgccactctctgattccatttcccccatactctgttccttctaaccttgtttgctccagtggagtattctttcacaat

SEQ ID NO: 511959 - DNA, 201 bp, Homo sapiens
agatcgagaccatcctggctaacatggtgaaaccccgtctctactaaaaatacaaaaaattagccgggcatggtggcaggtgtcaatagtcccagctactygggaggctgaggcaggagaatggcgtgaacccgggaggcggaacttgcagtgacctgagatcgctccactgcactccagcctgggtgacagagcgagact

SEQ ID NO: 511960 - DNA, 201 bp, Homo sapiens
gctgggcgtggtggcagacacctgtaatcctatctgctcgggagcctgaggcaggagaatcacttgaacctgggaggcggaggttgctgtgagctgagatygcaccattgcactccagcctgggcgacagagcgaaactccatctcaaaaacaaacaaacaaacaaacaaacaaaaaggttggcaatgttgaactttacct

SEQ ID NO: 511961 - DNA, 201 bp, Homo sapiens
taattttgttgaaaaataacagcaactgcttaagaaatccttgtgatcttggatccttagataaaatgatcaggatgccaaaaatgtaattgtggattctkcataatgaagcagtttgcatggaataagcatctatattatggaaacaaattgtatctaatgagtccttctgtcattcctgaacttaacactaatagctga

SEQ ID NO: 511962 - DNA, 201 bp, Homo sapiens
tctgagaggcttttatcccccatttttttttaatcgtactttcttttctcatgctataagcagaaaagtctaaatgacccaagactcagaaatggataacrgtattttctcacagtatgttatatgtaaaatggtattcagagaactgaaaatttttaaaatcagttttataataatactgatcaaagctcttttggaatg

SEQ ID NO: 511963 - DNA, 201 bp, Homo sapiens
ctcagagaattgaaactcttggtccaggtccagggacacctgggaagctgaccctgaatttactttcttgcaaaattagttctcaaaatgtactaagttayggtaagtgtagaatgttgtgtggaccatgctttttccacctgaagtgtatctggttgttggggctatttgttgtataacctttcattgaggtgctacagc

SEQ ID NO: 511964 - DNA, 201 bp, Homo sapiens
gaaagtgactgtctactggaagaatctgtgcaggctccatcacaggcagctgcagctctgtatgagggcctctgggggagctgggaacctgtgcttctatrtgggaacatgctccactgtttccagctttgtatagaaatttctaatcatataaatctcagtattcttggacatcaaggaagtcttatatttttaagcaac

SEQ ID NO: 511965 - DNA, 201 bp, Homo sapiens
tctgtcctggtgtatatgttttatcaagttgtaactgttaatagttacaaccacttcactctaaaagtgtccaagtttggacaataaattatatagtctayatcagtattaggaataaaatggtgatgtagagaggcacttttatcactgcttttatggagtttatagtgtaatagagataataaacattaaacagataat

SEQ ID NO: 511966 - DNA, 201 bp, Homo sapiens
gtgatgtagagaggcacttttatcactgcttttatggagtttatagtgtaatagagataataaacattaaacagataattttacaaagaattattgtagtygtgataggtgctatgtcagtgaaatactgaccatttaactactctacatcaggagctgacaaaccacagcccataggcaaatcagacagaggcctgcctt

SEQ ID NO: 511967 - DNA, 201 bp, Homo sapiens
caaaccacagcccataggcaaatcagacagaggcctgccttgatacagccagtgaactatgagtggttttaacatttttaaaagattatttaaaaaataamaaaatatatgagagagagaccatggtgttttacaaaagaagtttgctaaaatctggactaaatgatcatggaaagtttccctgaggaagtaatatttagg

SEQ ID NO: 511968 - DNA, 201 bp, Homo sapiens
gggatcttcctgcctcagcctcctgggatagctgggactaatggcgtgcaccacggtgcctggccagaattctctttatctctttgatacctctatcaccytctctgccacttagaacacaaaatttgtggttagagtagaagtggtagagggatagccagcaaatgccctagaccccagagcttctgtagatttaattgt

SEQ ID NO: 511969 - DNA, 201 bp, Homo sapiens
actaatggcgtgcaccacggtgcctggccagaattctctttatctctttgatacctctatcaccctctctgccacttagaacacaaaatttgtggttagartagaagtggtagagggatagccagcaaatgccctagaccccagagcttctgtagatttaattgtccattgaagaatcatggagtcattataagagtctct

SEQ ID NO: 511970 - DNA, 201 bp, Homo sapiens
acaggtgtttttctatactatttttattttttaaattatgaaaaaatgcacatatcaaatttaccatcttaacaatttttaagttcaattaaaatcatttytgatgatttcattatttttatttttatttttacctaagaattacttagagttttaagttttcttctctagtatgtgtgattatggttgtatattttttta

SEQ ID NO: 511971 - DNA, 201 bp, Homo sapiens
tatttatatactgcttgtggggaaaaatgaattgttttctatgaaaaaatacagttgactctcttctaccatctaggtgtatagtcagctacattccagckaactacatggctattatttcagaggacttaacttagaagatggccttaaagtgccgtgtcttgaagatggacatatcctttacaatggaatttattacac

SEQ ID NO: 511972 - DNA, 201 bp, Homo sapiens
atttatatactgcttgtggggaaaaatgaattgttttctatgaaaaaatacagttgactctcttctaccatctaggtgtatagtcagctacattccagcgwactacatggctattatttcagaggacttaacttagaagatggccttaaagtgccgtgtcttgaagatggacatatcctttacaatggaatttattacaca

SEQ ID NO: 511973 - DNA, 201 bp, Homo sapiens
ccaatatcaaactggcaaggctcaaacttgccccctgttgggccccatcatcattaatccaacctctgaccagagagttttgacttgtgatctctgggaargatggttaccctgagtaatagaaaaaataagaaagggaaaggagagagagaaaagccttgcctgtggcaggatggggaaggtgaagatctcagggagttg

SEQ ID NO: 511974 - DNA, 201 bp, Homo sapiens
ttagaccaccatctgagtcttgagagtcagcacctgtcagctctgacctaactcagtttcctccactgtaaactgggagtgacaaactctacttctccatrttgtaccagattgtccagagatcaaagcatgtgatgataaagcaatttagaaatagaactgctagagtatataaataccaagtatagtaataactaactc

SEQ ID NO: 511975 - DNA, 201 bp, Homo sapiens
ctgctagagtatataaataccaagtatagtaataactaactcttaatttttttgtgagtaaattatctaaatacatcaacaactaaggtactagaaacaaraaaaggcaaaaatcaacatgaccaaataagatacacacatctaactacatcttacccgcagtctgaaagcaagtataaactatcagagtcttgccctgtc

SEQ ID NO: 511976 - DNA, 201 bp, Homo sapiens
caaagtcctgggattacaggcgtgagccactgcgcccggctccacctttgctgattttaagatgagattatgcccaatactttggcctgtccatttccccmcctaccatattcctccacactgaaagtaccaaaggtcttgccctcagccactgccacagtgtaggtgcccagcattgcctctggtgccagttggaaggac

SEQ ID NO: 511977 - DNA, 201 bp, Homo sapiens
ctgccttcttggctgctgcactttctgcctctgtctggctgccctggctcacagtcactgtttgggctgcaggcaagggctgcaccactcctgtacccttyctgggacagctcccaccacccattcctgaggaaggcaactgacccaaaccaccatgtgcctgcccacctccacctggacccatggaccctgggatgctat

SEQ ID NO: 511978 - DNA, 201 bp, Homo sapiens
ctaactgaccttgtgttttttcaaaagtgacaagttgtgaatagtgttgcaacgaaaagataaataaaatcaagtgacatgatctttgacatacagtagtmgcccctaaagtaattggagaaaaacatgtgtttcttacggtgaggatagatctaagggctatggctagattaagagagtactaaaagaaccctcggatag

SEQ ID NO: 511979 - DNA, 201 bp, Homo sapiens
tcacctaggaaattgggatcagcccagctttcaaagggaggtacatgaatttaggactgcagagtacagcaaattttagttcctgatatggccatgctttyctaagaagtttccaaaggttattgactctcagcttagccttttctactgcacaatgtgatagatgctgtaaatcagcgtttagaggtgtttatctaactc

SEQ ID NO: 511980 - DNA, 201 bp, Homo sapiens
aaatttggatacagagtatgaaaaactaagaatagtcatgtgatctacctaactgaccttgtgttttttcaaaagtgacaagttgtgaatagtgttgcaaygaaaagataaataaaatcaagtgacatgatctttgacatacagtagtcgcccctaaagtaattggagaaaaacatgtgtttcttacggtgaggatagatc

SEQ ID NO: 511981 - DNA, 201 bp, Homo sapiens
gcaaagtcacatggcaaagagtataaaggtaaaatttggatacagagtatgaaaaactaagaatagtcatgtgatctacctaactgaccttgtgttttttmaaaagtgacaagttgtgaatagtgttgcaacgaaaagataaataaaatcaagtgacatgatctttgacatacagtagtcgcccctaaagtaattggagaa

SEQ ID NO: 511982 - DNA, 201 bp, Homo sapiens
ggcgtgagccaccatgcccggcctcaactcatatttcattagtcaaagtaactcacaggaaatacatcccttccctagtggggagaactgcaaagtcacayggcaaagagtataaaggtaaaatttggatacagagtatgaaaaactaagaatagtcatgtgatctacctaactgaccttgtgttttttcaaaagtgacaa

SEQ ID NO: 511983 - DNA, 201 bp, Homo sapiens
tagagatggggtttcaccatgttggccaaattggtctcaatcttctgacatctggtgacctgcctgcctcggcctcccaaagtgatgggattacaggcacragccaccatgcctggctaattttatattttttagtagagacagggtttctccatgttggtcaggctgctctcaactccttacctcaggtgatctgccccc

SEQ ID NO: 511984 - DNA, 201 bp, Homo sapiens
cgggttcaagccattctcctgcctcagctgcccgagtagctgggattataggtgtgtgtcaccacacccagctaatttttgtatttttttagtagagatgsggtttcaccatgttggccaaattggtctcaatcttctgacatctggtgacctgcctgcctcggcctcccaaagtgatgggattacaggcacaagccacca

SEQ ID NO: 511985 - DNA, 201 bp, Homo sapiens
gagcaatgaattgatgctgaatgtcttcatatctaaaggaaagtatctattcaaactttcttttttttttttttttttttttgagatggagtctcactctgtctcccaggctggagtgcagtggcgcaatctcggctcactgcaagctctgcctcccaggttcacgccattctcccacctcagcctccccagtagctggga

SEQ ID NO: 511986 - DNA, 201 bp, Homo sapiens
ccgggttcaagccattctcctgcctcagctgcccgagtagctgggattataggtgtgtgtcaccacacccagctaatttttgtatttttttagtagagatkgggtttcaccatgttggccaaattggtctcaatcttctgacatctggtgacctgcctgcctcggcctcccaaagtgatgggattacaggcacaagccacc

SEQ ID NO: 511987 - DNA, 201 bp, Homo sapiens
atcttagctgactgcaatctccacctcccgggttcaagccattctcctgcctcagctgcccgagtagctgggattataggtgtgtgtcaccacacccagckaatttttgtatttttttagtagagatggggtttcaccatgttggccaaattggtctcaatcttctgacatctggtgacctgcctgcctcggcctcccaaa

SEQ ID NO: 511988 - DNA, 201 bp, Homo sapiens
ggattaccaattttaacataattattacaaaacgtatgctaacccccaaataatactatgcatgatgtgacctctctttgatttggaagagcctgtagaayctcagagggtgtcaaggcatcactttgagtatcagttaggattatttggaagtatagatgtatcagatgatagaaatgacaagcagtactgcccagaagg

SEQ ID NO: 511989 - DNA, 201 bp, Homo sapiens
gccccctagccgccacactgctcaagaaccaactgtgttcccttattttgcaggtcaagaaacagtctcagaaaggtgagggctgctcccagtgctgcagygcattgtggatgctgtgggtgctgcccggattcccctccaggactgaggcactgctcattctccagccgctgggggagccgctgcctggcacctctcacc

SEQ ID NO: 511990 - DNA, 201 bp, Homo sapiens
ctcctagggcagttgacctggcctcatctctcagcatccagcagcctgccttgggagcttaggggcctcttctgctgagcctctctccctctttgtgcctyccttcttgaccctaagaagaagggcactgggtctttccaaggactccggtagctcagctcacctaggtgctcagtgatcctgggaagaatagcaaacacc

SEQ ID NO: 511991 - DNA, 201 bp, Homo sapiens
ggcccatctgctcgtggttgtagaaggggcaggctgcctgcttctcctgcctcctcctctttggcttctcctcctcagctcctttcttcttctctgagggkggcacaggcacaaagagagaaaacagagaggacagcaactgtccacgggcccgagagggggttgtgtaatgttgagacccacttccacagggtggggtct

SEQ ID NO: 511992 - DNA, 201 bp, Homo sapiens
tccacgctgtgcatgcccgtgatggtgtcgatcaggttgtgcgcctcgtcgatgatcaccacctggtcctgcagccggatgcccgcagcctgccgagtggycgcatgcagcagcatctgatagggcagcaccaccagctgggaggggagatgaggccacctgagcagggcggggctcccctgcaggaggcttgcctgcctg

SEQ ID NO: 511993 - DNA, 201 bp, Homo sapiens
actgctattgtgtcgtattccacagaatacctcagctcgtatctctgcctttaccatatactttaaggccttcctacctcctaaggaggaactctggctcygtatctgattcttcagccatcttcactcactagcaagtttatcatcaagtgtggtcttttattccttcaaaatatctcttcaattatccctttcctcgcc

SEQ ID NO: 511994 - DNA, 201 bp, Homo sapiens
gttaatctgctgttcaatagctagcaatgatccctgtgacctatgaagttaactacaacctcctttatatgctctaccccagcaatgacctcttctatcaycatgcctgttgattctattttatttatcccctcatctccaacgcctaccacacatactcgtatttaaatatatgactatactcttacgcttgctgttctc

SEQ ID NO: 511995 - DNA, 201 bp, Homo sapiens
ctataggattagtgtccttagagaagagaaagagaagagctctcactctctttgccatgtgagaagacagccatctgtgaaccaggaggcaagcctttacygcaaaccagccatgctggcaccctaatctcaggacttccagtctccagaacttgagcaataaatgttcgttgtttaagtacccatctatggtattctgac

SEQ ID NO: 511996 - DNA, 201 bp, Homo sapiens
ggctgcatcctctgggattgaaatcaatttgaccctgacaatctaaagagaaaacgtatgatttttgtttctccaatactgtttgtccccattataagctstccagcctggaacaatgggtggtcaatagtagccttaattatgacaccatcctgcaattagacctattttttaaaaggcagggcaaatggtcagaaatcc

SEQ ID NO: 511997 - DNA, 201 bp, Homo sapiens
atgttgcccagattgttcttgaacttctgggcttaagtgatccacccacctcagcctctaaaagtgccatgattacaggtgtgagctactgtgcctacttragcctttttttttttttttgagactgagtctgactctgttgcccaggctggagtgcactggcacagtctcagctcactgcagcctccacctcccgggttc

SEQ ID NO: 511998 - DNA, 201 bp, Homo sapiens
ccatatcctgtataggaatttatatagtttatatatctattcctttacagtatataccaccttcttcctgtataaaagcctatatatataatcctataccrtatatgctcctacatatagtccactctgctgccttcataagggcttgctcctctagcaatggtcccttataccccagcacctccagtgtgtctagcacat

SEQ ID NO: 511999 - DNA, 201 bp, Homo sapiens
ctggaaaattgctaagctgcattaaggagactttttttttttttcatgctattgtagtaaggacaacatccattaatgcagaggaatcttttcaaagaaartgaaatagacttagggtttttataggaggaagtaaacaaggaaatcttgtctgaatgattaagggatgagaaagggcagaggtggttagttagtgcttgt

SEQ ID NO: 512000 - DNA, 201 bp, Homo sapiens
tccctatgataaatcctcataatctctatcgtaaaccatactctgttactcatagtgtttatgtttctctggtcaaactgactgatagtaggagtccatayacttatgaaataaacatctgaagaggaatacaaaattttgtgccatgtgccaggcattttgctaagtgtgccttatctcacttgatcttcaccagaacac

SEQ ID NO: 512001 - DNA, 201 bp, Homo sapiens
ttaccatttcccagcagatggcagtatgatggcttcaagaaggagacctgatttttgttttgttttgttttgttttttccatagttccaacaaaggcatgrcagagacaaatggtggggctaatttattaccttccccttttgaatgagcctcagagaagcaaaacaattcactcaacattcctgataattaaggcagagg

SEQ ID NO: 512002 - DNA, 201 bp, Homo sapiens
atacaaaattttgtgccatgtgccaggcattttgctaagtgtgccttatctcacttgatcttcaccagaacaccattgtacaggtgaagacattgagctcraagagatgaatacattttcccaagggcacattgctagactatggaaagctgtgcagtcaagagaatttctacttataaactctgtgccatcttgtaacca

SEQ ID NO: 512003 - DNA, 201 bp, Homo sapiens
taccatttcccagcagatggcagtatgatggcttcaagaaggagacctgatttttgttttgttttgttttgttttttccatagttccaacaaaggcatggmagagacaaatggtggggctaatttattaccttccccttttgaatgagcctcagagaagcaaaacaattcactcaacattcctgataattaaggcagaggt

SEQ ID NO: 512004 - DNA, 201 bp, Homo sapiens
tcatgtgaatactagatactatttcagtgcaactactgatgagcatggtttggtgaacatttccatggacaccaccaactacatatcaccttttctcacartttcagtaagtggaaaggggcatctgggaccaaaaatagagaaattactgtggccagagataatttaaagatatttgagaggcatgtgaactctaggaat

SEQ ID NO: 512005 - DNA, 201 bp, Homo sapiens
cagtgctgcagggcattgtggatgctgtgggtgctgcccggattcccctccaggactgaggcactgctcattctccagccgctgggggagccgctgcctgwcacctctcacctgtgctgctttcccagtgttgcttttagccaaagaaagacactgcccaagattaagctccctccctagggaccgtgcacatccaatgac

SEQ ID NO: 512006 - DNA, 201 bp, Homo sapiens
ttacctttggataaaaacaggataccttaaataaactagaggagaaaaaaattgtccagagttccaggcataaaaaatattttaggttagaaatcatgtamaatgactctactccaattatactgattctcttatggaaaaaatgagcaacacttttaaaaataaataacaattgctaaaggtctactatttgacacttgc

SEQ ID NO: 512007 - DNA, 201 bp, Homo sapiens
ttgtatacttcaggccgtggcctcatctttaatacgctatactgagcttctttatacaatagtctcagggcagaattctaagagcaagagcagaagccagragaccttttcaaaatgaaattcagaagtcatcacttctccattttattggtcaaagtcacaagaccagcccaagattcaagaggtgggtaaatagacttc

SEQ ID NO: 512008 - DNA, 201 bp, Homo sapiens
ttgggtcagagatgaaatcacagggagtcaaagctgtccttttgcttgagtcaggtcctgggcgggggctacaagattagatgagccagtttaccaagctrggtagtgccagctgatccatcaagtgtacggtctgcaaaatgtctcaagcactaatcttatgttttacaatagtaatgttatccccaggagaaatttgag

SEQ ID NO: 512009 - DNA, 201 bp, Homo sapiens; identical to SEQ ID NO: 82395

SEQ ID NO: 512010 - DNA, 201 bp, Homo sapiens
gaagtaattgctctggtgccaggatcctccttaagtaaatttaggagacatttcttaatcaccctggtacgaggaccctcacggattaggtagatttagarggcatttttggcctctgaccttctagttgaagcaaaattaattactgataaacttaggcaaatgtgatactgcacgtaggcatgtagtccaaacatgtat

SEQ ID NO: 512011 - DNA, 201 bp, Homo sapiens
tctttccagacctttgtctttgaacatacattcatattgaaaggcaaaatccttacacaaatttgctaaattagttataagattgcttaactttctcaggrcaataaagacctggaacatttggaattaatgtctctatcaggtggcaaaagcatcctaacaatgtatcaatgtttacagattaatttctaatcttataga

SEQ ID NO: 512012 - DNA, 201 bp, Homo sapiens
taacaatgtatcaatgtttacagattaatttctaatcttatagagcagtagtgcagtagtttttctgtaccttcgtcagatgttggttcttgtcggctctycatatttgtgggttttacatttgaggattcaaccaactgcagatcaaaatatttttaaaaaagcagttgggggcggtggctcacgcctgtgatcccagaa

SEQ ID NO: 512013 - DNA, 201 bp, Homo sapiens
ctgtaccttcgtcagatgttggttcttgtcggctctccatatttgtgggttttacatttgaggattcaaccaactgcagatcaaaatatttttaaaaaagyagttgggggcggtggctcacgcctgtgatcccagaactttgggagaacaagatgggggaggatcatttgagcccaggagattgagaccagcctgagtaca

SEQ ID NO: 512014 - DNA, 201 bp, Homo sapiens
ggaaggccgaggtggctggatcacctgaggtcaagagttcgagaccagcctggccagcatggtgaaacctcatctctactaaaaatacagaaaattagtcrggcatggtggcagacgcctgtaatcccagcttctctggaggctgaggcaggagaattccttgaacccaggaggtggaggttgcagtgagccgagatcact

SEQ ID NO: 512015 - DNA, 201 bp, Homo sapiens
tgtgatttagcactttctcccagaggctatgcagcaagcatggactacacataggtagagaatggaaagggtggctgcccagaggtcaagtcttctgcacrcgcttcagcctcacctcttgcagctgagcatgctgtgtggtggaggggcatggaagctgcacccagcattgccagacatcagaaggtctctgctgtttag

SEQ ID NO: 512016 - DNA, 201 bp, Homo sapiens; identical to SEQ ID NO: 82392

SEQ ID NO: 512017 - DNA, 201 bp, Homo sapiens
tggctaccgtgcctgcttctctgcatgtccacgcagcggtcgttgataagctgcacagaacctaggcttctcacgtcttcatttacacaaaggttctgcarcaaaggagaaagaaagaggcaaagagatggtgccagctaaatgacatcctaccaacacacgtggacctgcccccgccacctctcctttgccttccagtga

SEQ ID NO: 512018 - DNA, 201 bp, Homo sapiens
gcttctctggaggctgaggcaggagaattccttgaacccaggaggtggaggttgcagtgagccgagatcactgcattgcactccagcctgggcgacagagygagactctgtctaaaaaaaaaaaaaaaaaattgtggcacggtaacttgttagcttgcaagtagcagaaaatctcagacttttcagtttctgacttcacaa

SEQ ID NO: 512019 - DNA, 201 bp, Homo sapiens
aacactcttgtttgtaagatttagtaggccgggtgctggtggctcacgcctgtaatcccagcactttgggaggccgaggtgggcggatcacgaggtcaagwgatggagaccatcctagccaacactgtgaaaccctgtctctactaaaaatacaaaaattagctgggcgtagtggcatgcacctgtagtcccagctactcg

SEQ ID NO: 512020 - DNA, 201 bp, Homo sapiens
gtctgtactaataacatcagcatgtatgagttactgaagggcaatgaaaccatagcccgcttgcaggctctggccaagcgtactggtgtggctgtggaaaraatggacctctctgcttctctgggtgaaaaagacaaggatttaaaactgcattgtgaagaggcagaactaagggactaccagctcaatgtacagctccga

SEQ ID NO: 512021 - DNA, 201 bp, Homo sapiens
gagagagagagaaagaaagaaagatagattaaaaaagaaagaaagaaagaaagaaagaaagaaagaaagaaagaaagaaagaaagaaagaaagaaagaaaraacttaagcaagagggagacaggtcattaccatagcctttttttttttttttttttaaatctgggacagagtctccctccgactcccaggctggagtgca

SEQ ID NO: 512022 - DNA, 201 bp, Homo sapiens
taggttctaatacagtcagaattacattaattatttggtttactgaaaactcaggccaggtgcagtggtttacatctgtaatcccaacgctttgggaagckgaggctggaggattgcttgagcccaggagttgaagactagcctgggcaacatagggagacccccgtctctataaaaaataaaaaattagctgggcatggt

SEQ ID NO: 512023 - DNA, 201 bp, Homo sapiens; identical to SEQ ID NO: 82379

SEQ ID NO: 512024 - DNA, 201 bp, Homo sapiens
agttgatatttaggctatgtatttatacatatataatacatataaatcttttttttttttttttttttgagagagagagggtctcactctatcacccaggytggagtgcagtggtgtaatcatagttcactacagcctcgaactctggggctcgagggatcctcttgcctcagcctccagatagctgggattataaatgca

SEQ ID NO: 512025 - DNA, 201 bp, Homo sapiens
ctttatgctctttgggcggtagaccagagggtattgctactaaggaattatggtcagctgccagcacaaactgtgagtgattaaaaccatctttgtttacyacccacagtatagttttatgtctttacctttggataaaaacaggataccttaaataaactagaggagaaaaaaattgtccagagttccaggcataaaaaa

SEQ ID NO: 512026 - DNA, 201 bp, Homo sapiens
caaacaatttcaaacagtgtctctggtaccaggacaaaccaggaacattctgatcctagagttgtttaaacaaagactggagagtactgccttctttggcrtaccagaacccacagtaaagtggtaaattactgtgtaaccagatgggaccttcaagtccaacactatcaaattataaagaagaatttcagtagcagctcg

SEQ ID NO: 512027 - DNA, 201 bp, Homo sapiens
atgctctttgggcggtagaccagagggtattgctactaaggaattatggtcagctgccagcacaaactgtgagtgattaaaaccatctttgtttaccaccmacagtatagttttatgtctttacctttggataaaaacaggataccttaaataaactagaggagaaaaaaattgtccagagttccaggcataaaaaatatt

SEQ ID NO: 512028 - DNA, 201 bp, Homo sapiens
cctcccctcccctccgctgccctaccctgcccttctttttttctttctttcaactatagaggtgaggtctcactgtattgcccaggttggtatcaagctcytgggctcaagcgatccaccagcctcacccagtcaaagtgctgggactacagatgtgtgccaccacgctctgctagaaacgtgggtttctaaacgttaaaa

SEQ ID NO: 512029 - DNA, 201 bp, Homo sapiens
tagagcctcaatggtcaggctgatgaaatcatttctgtacttcaaacccatctaagtggaagaggctgcctagaagccagttagtagtgccacagttctaragtttaaaactggtcggggaccacaagaagaaacacatttcatccaaggaaacatccctcccctcccctgccttcccctcccctcccctccgctgcccta

SEQ ID NO: 512030 - DNA, 201 bp, Homo sapiens
ggagtcagagttgggaaattccacttgagatccaactcttccctcaaacaccacttcttccctctcacactccagcctctgaaagaaagctctgacaatcygggccagtgcagtggctcacgcctgtaatcccagcactttgggaggccgagacaggtgtattacttgaggccaggggttcaagaccagcctaggcaacat

SEQ ID NO: 512031 - DNA, 201 bp, Homo sapiens
gatcctcttgcctcagcctccagatagctgggattataaatgcatgctgccatgctggctaatcaaaaaaatatatatttgtagagacttcgtctcactaygttgcccatgctggtcttgaactcctggcctcaagcaatcctcctaccttgttctcccaaagtgtgggccatctcacccagcctgaattcctctcctctt

SEQ ID NO: 512032 - DNA, 201 bp, Homo sapiens
gcctaggctggtcttgaactcctggcctcaagcaatactctcacctcagcctcccaaagtgctgggattataggcatgagccactgagcccagctggtaaygaagacttataacagtcctgggtctccttgaggaccccttgaaggccacatattccttttctgggggtgggaggatcactgttttcctcgtagagcccca

SEQ ID NO: 512033 - DNA, 201 bp, Homo sapiens
tcccaaagtgctgggattataggcatgagccactgagcccagctggtaacgaagacttataacagtcctgggtctccttgaggaccccttgaaggccacakattccttttctgggggtgggaggatcactgttttcctcgtagagccccaagagctgtgggtggataggttcctctcaggtctaactctctactctttttc

SEQ ID NO: 512034 - DNA, 201 bp, Homo sapiens
aggtcgctgaggcagaaagatcatttgaactcaggagtttgaggccatcctggacagcatagcgagaccatgtcccaaacaaagaaacaaagccaaatagrcacatacatgtgtatgatatatgttgtatctacatgtatttatatgtctatacatatgtttgtgtattgtctacatggtaccaaattaacttaaaaataa

SEQ ID NO: 512035 - DNA, 201 bp, Homo sapiens
gatataatgctaagacattaattactaaattcgagtttaagcttatatacttttggctctgtttgtttggttatttgagacagagtctcactctgtcaccsaggctggagtgcaggggcacgatctcggttcatggcaacctctgcctcccaagttcaagggattctcatgctctaaaaagtcaaaagtcaaaagtcgatt

SEQ ID NO: 512036 - DNA, 201 bp, Homo sapiens
tttgggaggccaaggctggaggatctctgagtccaggagtctgaaaccagtatggggaatatagtgagaaagccatctctacaaaaattttttttaaaaawttagccaggcatggtggcacatgcatgtataagtctctgctacttgggaggctgaggtgggagaatcacttgagcctggaatgtcgagactacagtgagc

SEQ ID NO: 512037 - DNA, 201 bp, Homo sapiens
cactccccaaaacaatgaagccatccttgtaattaaaagtggcaacagaaaacacctgaaaaaaggcctcaatctgaaccatgtcaggaggtttagaacayaagaggactcacccagtgaattccagggctatcaagatcaatggagtgcaaaagcgtcctgcaggtacctttgcttgggtccatggtggcatcagagatc

SEQ ID NO: 512038 - DNA, 201 bp, Homo sapiens
tgtaattaaaagtggcaacagaaaacacctgaaaaaaggcctcaatctgaaccatgtcaggaggtttagaacacaagaggactcacccagtgaattccagrgctatcaagatcaatggagtgcaaaagcgtcctgcaggtacctttgcttgggtccatggtggcatcagagatcaagagggaactgctctgtatcccactt

SEQ ID NO: 512039 - DNA, 201 bp, Homo sapiens
gacagcttgtatgtctctaggcagtaatgagcttaattcagcacagttgtctcctcaggaggttggtgattagacctggtgtaaatagttcaaatcaaatrcagctgcttcttaaagaagttttaaatttggctcagttcaaagaggtcaaattccttctgggtgtgtacgtgactggggttcaactcccaactccttatg

SEQ ID NO: 512040 - DNA, 201 bp, Homo sapiens
cactccagtatcaaaatgtatccttaatcaggaacaaaacctgatgtcaggtggatagatgtttcctcttattcaagctatgaaccttattttcaccagtraaatgattggcattgagattgagcactcagaacttctccacatgcttgaatctctagagcctcaatggtcaggctgatgaaatcatttctgtacttcaaa

SEQ ID NO: 512041 - DNA, 201 bp, Homo sapiens
ccatgccattctcatgatagtgagtaagtctcatgagatctgatggttttataaaggggagttctcctgcacacaccctcttgcctgctgccatgtaagaygtacctttggtcttccttcaccttctgccatgactgtgaggcctccgcagccacctggaactgcaagtccattaaataaattacccagtcgtgggtatgt

SEQ ID NO: 512042 - DNA, 201 bp, Homo sapiens
tgtatgtctctaggcagtaatgagcttaattcagcacagttgtctcctcaggaggttggtgattagacctggtgtaaatagttcaaatcaaatacagctgyttcttaaagaagttttaaatttggctcagttcaaagaggtcaaattccttctgggtgtgtacgtgactggggttcaactcccaactccttatgccctctt

SEQ ID NO: 512043 - DNA, 201 bp, Homo sapiens
agttcactgcaacctctgcctccccagttccggttcaagcagttttcctgcctcagcctcctgagtagctgagattacaggcgtgtaccaccatgcccagytaatttttttttttttttttttttgagacagactctcgctctgttgccgggctggggtgcagtggtgcaatttcagctcactgtaacctctgcctcctgg

SEQ ID NO: 512044 - DNA, 201 bp, Homo sapiens
ctcagcctcctgagtagctgagattacaggcgtgtaccaccatgcccagctaatttttttttttttttttttttgagacagactctcgctctgttgccggrctggggtgcagtggtgcaatttcagctcactgtaacctctgcctcctggattcaagcgattctcctgcctcagcctcctgagtagctgggattacaggcg

SEQ ID NO: 512045 - DNA, 201 bp, Homo sapiens
tacaggcgcacaccacgcccagttaatttttgtatttttagtagagacagggtttcaccacattggccaggatggtcttgaactcctgacctcgtgattcrcccgcctaagcctcccaaagtgctggcattacaggtgtgagccaccatgcctggcctagtttttgtatttttagtagagatgggatttcatcgtgttgtc

SEQ ID NO: 512046 - DNA, 201 bp, Homo sapiens
caggatggtcttgaactcctgacctcgtgattcacccgcctaagcctcccaaagtgctggcattacaggtgtgagccaccatgcctggcctagtttttgtrtttttagtagagatgggatttcatcgtgttgtccaggctggtctcaaactcctgtgctcaagtgatcctcgcgcctcaacctccctaagtgctgggctta

SEQ ID NO: 512047 - DNA, 201 bp, Homo sapiens
tattgtgatttctctgaaatgtatatttggtcttcatcttgtttctgggcacacaacttctaaaatccttagaatcttcatttaaaaaaactatttatttrttaaaaaaaataaagacagtgtctccctatgttgcccaggctggtctcgaactcctgggctcaagggaacctcctgccttggcctcccaaagtgctaaga

SEQ ID NO: 512048 - DNA, 201 bp, Homo sapiens
tcttcatttaaaaaaactatttatttattaaaaaaaataaagacagtgtctccctatgttgcccaggctggtctcgaactcctgggctcaagggaacctcytgccttggcctcccaaagtgctaagaatacaggcgtgagccaccatgcccggcctccttagaatcttcaaagtgatgtgtctttttgtatgctaacgagt

SEQ ID NO: 512049 - DNA, 201 bp, Homo sapiens
tattacccatacttctttgctcagtaaacccttcttactagataacttggatatactagcaaatagctcatttatcaccctactaatcactttaaaagcarcattgctttctataaagttaatactaatgtcacatacaataaatatttatcaaatgaatgattaaatggatatcagctaagaaaataggtattatagcca

SEQ ID NO: 512050 - DNA, 201 bp, Homo sapiens
caatagaaacagtatgtagaaagagtttaggtagaagactgaggctgaaatacagaatctgcaatacagtgattgtgcgcatgggcaggttattacacttytctgagcctcagtcttgctgactataaaatggcaatatttatttcagaagattattgttaacatcatgtcacataacatatgcaaaggaaatcatataat

SEQ ID NO: 512051 - DNA, 201 bp, Homo sapiens
gggtggcaccaggctctcttccatgcaccgcctcatctcctgtctgcttcccctcccttctcagctccctttcttcctcattgttctcctcttccttcccygctgtgctttgggagttatctcagtcgcaggcatgccctcccgccaccccatctccaggggagagctcggaagaaattcctcattgttggcttcatactg

SEQ ID NO: 512052 - DNA, 201 bp, Homo sapiens
tcagctccctttcttcctcattgttctcctcttccttccctgctgtgctttgggagttatctcagtcgcaggcatgccctcccgccaccccatctccaggrgagagctcggaagaaattcctcattgttggcttcatactgccatgggttacttagaggctggggcatttttgagatcaaaggctgccgttagagatggtc

SEQ ID NO: 512053 - DNA, 201 bp, Homo sapiens
ttgagatcaaaggctgccgttagagatggtcagagagcattggtggcatgcagagccacagcagagaccacctccaggactaaggaagggagatgacagtmagtgtgcacctgctgtgtgacacatgctgtccacagggcctggaatctggcagcagagggagctgggtgctgtggccttcccagcaatgagctgccctgg

SEQ ID NO: 512054 - DNA, 201 bp, Homo sapiens
agtgccaggtttccagctaaatgctcaacacatttcttcaccaaaaagagagctgaaatgaatgactgtggggttctgtcttgtccattctgataatgatracaatgatgacaacagcatccaacacctgtagaatgttcactagccaccaggcactgtttcttatgttaacttagtttttctttgcaatgatcttgaagg

SEQ ID NO: 512055 - DNA, 201 bp, Homo sapiens
cccaacaaatctagctcaggttcagagatgcacaacctcattccagcaaagttttctgtagattatctggggcagcttttactacacttgatctttcccayttctcagctattcctgtgccaacagaaagctctcccatggaggaagggagaagagatggaaaaatgaggctgagttgggctgaggttttggggaaggata

SEQ ID NO: 512056 - DNA, 201 bp, Homo sapiens
ctggctgcttttaacatgttctctttatcattgactttcagcagcttaataatgtagctcagtatatataatttttcatgtttcttctgcctaaaatctaytgagcatctttgatctatgagtttttagtttttatctcatttggaaaaatttgggccaaatttgtcctctttctgaaaccctaattatacatgttagatt

SEQ ID NO: 512057 - DNA, 201 bp, Homo sapiens
tgtcgtcttgtctactatttcagtatttagggagcaaaaccatgttgggaccaagcactagatttataccctctgggattatgtgtcctaggcccagagarccaggtacctgggaaaacatctaaagggaaaaacaattcaaaatatacttagagcctctgctcatggcctcacatgcattattgcattcaactcaataac

SEQ ID NO: 512058 - DNA, 201 bp, Homo sapiens
atcttctctagttcaccctctaccaccgtctcctctctggagagccccctgaatggctaaataaaacagctaaaccacctttcttccccctatgaccctgyccatgcaacgcctcctctgagtgattgttcctatcccatctccttgcaaaggtagtagaaagtattatagctgaggttcagacatattcatttgttaccc

SEQ ID NO: 512059 - DNA, 201 bp, Homo sapiens
agcattgtactcatggctggattagagtttaactgtttttgaggctgtttccctggctattgcatagtgtcttattcacctttgttgtgataatggtctgyactgaatagatgatcagtagatgcttgtagacagaatgaataaaccactaatcagcctcttaatgcttgaatggacttgctacttccttgtttagattcg

SEQ ID NO: 512060 - DNA, 201 bp, Homo sapiens
ttgttggttttttgttttttgcttttaaagcaaagcccactagagacagcaccacatatgtgactggtaaggcaacagcagaagaaaggagtccttttatyaggagtcttgacctaaaaagccaagtcctaataatgaaaaaacaatgagcaaagaaagaggaagaaaatggctgtgaaagaagagaggacagtggaaatg

SEQ ID NO: 512061 - DNA, 201 bp, Homo sapiens
aaagataaactagagtacatgttctggtacagttggtggggagacaaagatatgtactggttccatataaaaataataagacttggctgggtgcggtggckcacacctgtaatcccagtacgttgggaggctgaggcaggcagatcatgaagtcaagagatcaagaccgtcctggccaacacggtgaaaccccgtctctac

SEQ ID NO: 512062 - DNA, 201 bp, Homo sapiens
ccagagagacatccactatagtagagatataggaagagttattctttatacatttaatacaatcagatgttgcaccattgatattgagccatgaataaagygggcactagggacagcacaaattaggtcagaggcatcggttgagggagaggctgtaaaacgagccagttgtggaaatgccccatttgcatcaggtgatat

SEQ ID NO: 512063 - DNA, 201 bp, Homo sapiens
ggagggccttggggcttgaggcattgtagggagttgtaataggtttgaaatgatttgttggcttgattggccctggaaggggcataatcacctaccagggygtcagctctttcaaaaaaggaagctcctttttggagtttatagattatggttatgtttcctgttaaaaggtcatgaaagggtgtaggaagggctgtatag

SEQ ID NO: 512064 - DNA, 201 bp, Homo sapiens
gttgtattggtaaggttgatgtgattacagaatttatattgaaagaaacaagcaaaaggagaaaaaggttatttgagtaggagtaaagtcctggaaaattscttgaagccgtaagtcccatagaatagtaaggagctgatcaggatggataatgggagtttcataatggtaccaataaaggtctgtaacaagattggttgg

SEQ ID NO: 512065 - DNA, 201 bp, Homo sapiens
aggtgtgtaccagcccagaggattaacatccaaaggctgagccccgaacaaagacagggcttgacttttatacatgcatccaaaagggggttggctatacrtgcatccaaaaaggggctcaccagtttgatggtgcaaaacctgtagggcgggcaagcaggcttacagaagcagaacaaaggcagtttgtgaaacagtgac

SEQ ID NO: 512066 - DNA, 201 bp, Homo sapiens
gacccattccatttaagtgtgaggggaggattgaggagaggactgggatcttttaccagaacccagtctcctggctgtaggaagtgattagagaagtcggygatgggtcgtgtcaggtattcgtcagcatattcccaaatgaaatggcagatggtatgtagaagtggggaaatgaggccaggcacggtggctcacacctgt

SEQ ID NO: 512067 - DNA, 201 bp, Homo sapiens
taagaggaaacagtactgaagttctttttcttgtggcatttgtattataaaaacttggtgtaggggaggagcacaaagctctagcccactgaacctctgcyggttaagatggtgttaggttaggttacatctggttactgtcctgggaaaatcatttttatagagatggccttccaagtggttttaaaatttatcttattg

SEQ ID NO: 512068 - DNA, 201 bp, Homo sapiens
ctgagtaaaccaagggcagggctgggtgaagggaacccctgcttagccttgtccatgtcctcaaggtcgccccggaggcccccgagtttccacaaaacacytgaagaccatcggtgcaccaggaagcggccccagcttctgctcctggagctgctacttcccagctgtgtgactctggaagagttgtctaacctctctgac

SEQ ID NO: 512069 - DNA, 201 bp, Homo sapiens
atacatgtagaatttgcatagtgtcaagtaaatgataagggtagaaagagtgcagagaaaaaaaggatgaaaacgaaggtggctgaagaatgctttgtgamggaggtgggattgaaatgagctttgaaaggccgggtgcagtggctcacacctgtaatcccagtaatttgggaggctgcggcgggcggatcacctgaggtc

SEQ ID NO: 512070 - DNA, 201 bp, Homo sapiens
cagagcgagattccatctcaaaaataaaaaataatcagtcacagcatccaggatcataggtgtataatcctccagctacatcaggaagtccaccagaggcrtgctggataccaccagcagcttcacatctccattggcagtgcttggcagggcataagccttgctagacacagctcctggtctgcaccaccatggctcctg

SEQ ID NO: 512071 - DNA, 201 bp, Homo sapiens
attaagaggtatgatagttgatacagtttggctgtgtccccacccaaatctcatcttgaattgtagctcccataattcccatgtgttgtaggagggacccrgtggaaggtaattgaatcatggggacaggtctttcccatgccattctcatgatagtgagtaagtctcatgagatctgatggttttataaaggggagttct

SEQ ID NO: 512072 - DNA, 201 bp, Homo sapiens
acatatatgaaaaatgagttgcagatgaattgagtcgccaagggctctgtttacaagcatgcctccccgccatcctgtccttaaaatagtgattccaagtyagttttcattaatgatccatgagtgatggccagcatgcagcacatagtttcatgtggacatttctctctctggtttatgaccactgcacggggtggatgg

SEQ ID NO: 512073 - DNA, 201 bp, Homo sapiens
caccacccattcctgaggaaggcaactgacccaaaccaccatgtgcctgcccacctccacctggacccatggaccctgggatgctattcccactgcctccrccagcttgactaaggttgagggactggtttgtggccccagaggaagcctgtgccaccgctagggcctggctagaggcctgggagaggctagagacagggg

SEQ ID NO: 512074 - DNA, 201 bp, Homo sapiens
ggccaaagattaaaaacctggcaatccagtatgagaaagggttagttagaatctagctagatggactgaatgtgttttttaaatccttatttgaaagaccrgatttcactgtttgcttgcctaaacatttgtaaactcctaagattctcagagctggaagacagcttagtcatcatctaacccaactctccccagtttgtt

SEQ ID NO: 512075 - DNA, 201 bp, Homo sapiens
tccccacagacctccctcactcagcctttgccctccagccttttcacctctggggctggtgaggggccgggaggagagagcccgtatgtcagacaacaaaycgtgtctgctaacccccagcagccacaggcagaggaagaagaggacaactggaaatcctagcgggcgccgccatgccttcctcccctaaacccagactcc

SEQ ID NO: 512076 - DNA, 201 bp, Homo sapiens
gccgagattgtgccactgcactccagcctgggcgacagagtgagactctgtctcaaaaaaaaaaaaaaaaaagaactaagacaccagggaccattcctggaaaaaacagagatatgtgacctttcagacaaagaattcaaaagagctgtggtaaggaaactcaaagaaattgaagataacacagagaaggaattgataatt

SEQ ID NO: 512077 - DNA, 201 bp, Homo sapiens
tgctgtagcaaatccatcaaacccaaggaggggtttttgggaaacccgatgtatagcttggtcagtcagaagcacaggtaaaacaacctggagcttgcaaytggcatctgaatggaaaacagggcagtctcgggaattgagtcctcaacctgtggaatctgatgctatctccaggtggatagtgtcagaactgagctgatt

SEQ ID NO: 512078 - DNA, 201 bp, Homo sapiens
aaaatcctacctatttatattggcttctgcaagttctcccaggattccacttataggtcttggagtgagtggagtgtctctattggtcccaactgagttgycaaattgtagaggagaaaatataatttttttctttccctcataggttcttatttgagacactccccaaaacaatgaagccatccttgtaattaaaagtgg

SEQ ID NO: 512079 - DNA, 201 bp, Homo sapiens
ttccatttaagtgtgaggggaggattgaggagaggactgggatcttttaccagaacccagtctcctggctgtaggaagtgattagagaagtcggtgatggktcgtgtcaggtattcgtcagcatattcccaaatgaaatggcagatggtatgtagaagtggggaaatgaggccaggcacggtggctcacacctgtaatccc

SEQ ID NO: 512080 - DNA, 201 bp, Homo sapiens
ttgtgattacttaaattacaaagttaatctatttctttatctcctccagaacacagacctgtcatatgttttaatattatcttttttctttcaaatttaamtattactaaacattatcattgttttatagttaatattttatacttacccaaagtcttttttacatgttgtttcttcttgtagcttcatttaggatcaatt

SEQ ID NO: 512081 - DNA, 201 bp, Homo sapiens
gattgcgtcactgcactccagcctggcaacagagtgagactctatctccaaaaaaaaaaaaaagaagaaacagacaaatttatattcaatcatattggagratttgaaaattaataattgacagaaaatgttcatcgagtagatttgataaacatgattacatatttactatggtagaagcatagaacgctatactaacaa

SEQ ID NO: 512082 - DNA, 201 bp, Homo sapiens
ggcttcttgaaactctttcatttttttcctcttcagccggaactgatggctacagctcacattgtacctacaggacagggcatatataggatgtcaatagygccacagaagaccaccctgctctaaatgtgaatttctgcttatgagctgatttggggaagggaataaaagcaaggagggagacataaaatatcagctatg

SEQ ID NO: 512083 - DNA, 201 bp, Homo sapiens
caaacaaacaaacaaacagaattgctgtatgggtatgcgaaatacactttctactgaatgtgtatcactttcataccatcatagtcaagaaatcctaagtyaaaccactgccaagtcagggactatctgtacatttcattcctgctgcagctattttcttctgaataatggggtcttgttttgtctttttctacctgaatg

SEQ ID NO: 512084 - DNA, 201 bp, Homo sapiens
ttggagggataaaaaattaaggcaaggagttaagcaaaagtttcagaaccatagctcttcacttatagaattgtaagttatatacacgtgacatcttgccyttcttttgggggctgttttctactcctgcctccttgccccatcctcattgccctgggctgttctgttctaccttactcttggctcaataaaatgtatcat

SEQ ID NO: 512085 - DNA, 201 bp, Homo sapiens
cacctagaagacgctagccctggacacacaggaagccaccaaagggaggagagggggctgggtgcagacaaaaggtactggtttccacagcccttaggctrgtgggagctaagagaaaagggaaggaagggaaggtttcctccagtgtccactgtgggtcagagaaaaagcaagaggctgaattcctcaagtatggaatct

SEQ ID NO: 512086 - DNA, 201 bp, Homo sapiens
gtaataatgtaaaacaactgacccagagaagctaaaagccactggcagcacaggctgacaaaatggaagcaaagcaagaggtggcaacaattttgaaagamcaaaagttgtgagtaactttccagtttgatagtttataaagaagttaagtaaatgtagtattggctagttactgtaagtcctcatcttctggtaggtcct

SEQ ID NO: 512087 - DNA, 201 bp, Homo sapiens
gaggagagagcccgtatgtcagacaacaaaccgtgtctgctaacccccagcagccacaggcagaggaagaagaggacaactggaaatcctagcgggcgccrccatgccttcctcccctaaacccagactccagccatggcccggacgtggacacagccagaatgggatcctcagccctgctgccctggaggaaggggcggg

SEQ ID NO: 512088 - DNA, 201 bp, Homo sapiens
ggaggaaggggcggggatggaactgtcccagttctgtgtggagaccaccttcggggagcgggaggctggcttcaggccacgcagctggggtgggggcttcyatctgcctgtgctccatcggaggatggctccacccagcccctgcaccagtgcgctcctcgattccctaaagaggcttccagagaaaacagcagcacatat

SEQ ID NO: 512089 - DNA, 201 bp, Homo sapiens
aaagaggaaaggcaatttcaatcagatctattgttagaagtaatattggtactatgatttcaaaacttttaagtatattataggatagagcagataagtawgttaatgtagcacacatgttcaggcttaagagaaaaagaggtacaataaaaggtcaagtaaacaaatcctttgatttttacttagaaacaccaatatggg

SEQ ID NO: 512090 - DNA, 201 bp, Homo sapiens
ataggactgtcacaaatgtaattagttaagatgagactactaggacgggacccagcctaaagggctaatatccttattggaaaggggacacgtggatgcaracatgcacagaaggcaggcgatgtcatgatacccaaggagaacacgcccctataagccaaggaaaggggcctgaagagatctttccctcgcgaccctcag

SEQ ID NO: 512091 - DNA, 201 bp, Homo sapiens
ctgaggcaggagaatcccttgaacccaggaagcggaggttgcggtgagccaagatcatgccattgcactccagcctggtgacagaacaagactccgtctcaaaaaaaaaaaaaaaaaagtatcctcaaggtctctctgaccttcgctcccctatctctcagttatctttctgtccaaaagtacaagatgaggctgttctct

SEQ ID NO: 512092 - DNA, 201 bp, Homo sapiens
aatggactagatgaccagcatcagagcagcaaaaaagtccttaagatgaggaaatgtgtctccttaaactaaaacacaaaacaaaccaagaaaacaccaatttttttttttttttgagacggcatcttactctgtcgccaggccagagtgcagtggcgcaatctcatctcactgcagcctccgcttcctagattcaagtga

SEQ ID NO: 512093 - DNA, 201 bp, Homo sapiens
aattgctaataattaaattagtagctttcttcttccttccacctcctttttctctctacaacttctcaatttttgttaattatattatgtttcttaatgtktatatttgttctgtttaataacaacaatcccacatttattttagttttaagccaatttaccagcagcgcttatgctatctacccagtgctttctagtcat

SEQ ID NO: 512094 - DNA, 201 bp, Homo sapiens
catgtatttaactttaagtttcttacttttatgatatttacctaacatacagtaataaaaaatggttacctttagaattttgctaagctaaattaaattayggatagtcattgaatatctaggtcatttccaaataagatataatgctaagacattaattactaaattcgagtttaagcttatatacttttggctctgttt

SEQ ID NO: 512095 - DNA, 201 bp, Homo sapiens
ctcctgacctcaagcgatccgcccacctcggcttcccaaagtgctgggattacaggcgtgagccaccacacctggccacaaaattttcaagttatggaagttttttttttttttttaagtaattattttaagagtaacaatctaatctagtcctgagaaccatcactgactaattcaatcacacaagagggccggctccag

SEQ ID NO: 512096 - DNA, 201 bp, Homo sapiens
aaatcatcaaaaaagtttgttttatatattagataatgggaattttcctttttttaggggggaagaaacattcccttttcttgggaactatactatatggwatagtatgctgttataagcatacatgttataagtatggtatagtatgctgagatatcataacatttatttagaagcgtagattttacacagtgacctcca

SEQ ID NO: 512097 - DNA, 201 bp, Homo sapiens
ctgtcttaattttttttctttccaatgtcacagatcttggaaatgcttgaagaccacaaggctgaaaagtgctttgctggagtcctgttctcagagctccmcagaagacacgtgtttttgtatctttaaagacttgatgaataaacactttttctggtcaatgtctttccctgtttcctgttcattcaataaatatcattg

SEQ ID NO: 512098 - DNA, 201 bp, Homo sapiens
aatctcctccagatgccatatggctgtggagaacagaacatggtcctatttgctcctaacatctatgtcttgaactatctgaatgaaacccagcagctgaygcaggagatcaaggccaaggccgttggctatctcatcactggtaagtgagacagagaaaaatttactttgttactctaatgaaacttttcccaattaagc

SEQ ID NO: 512099 - DNA, 201 bp, Homo sapiens
ttccagctcctatcctgaaaagcgaacaatcaaacaaaaaatagaagacactgtgatactcagaagctcattacatacatagaggatacttgacctctctmtatatatacaaaaaaatctcacaaatgcacagttggattattaatagtgttatctcacaggtgtagaatcaggtaacctttacttttgtcttagtatttt

SEQ ID NO: 512100 - DNA, 201 bp, Homo sapiens
tcccagcactttgggaggctgaagtaggcggatcacctgaggccaggagtttgagaccagcctgaccaacatggcgaaaccccatctctattaaaaatacaaaaaaaattagctgggcgtgatggcacgtgcctgtcatcccagctactcaggaggctgaggcacaagaatcgcttgaacttgggaggcagaggctgcagt

SEQ ID NO: 512101 - DNA, 201 bp, Homo sapiens
ctgaggcacaagaatcgcttgaacttgggaggcagaggctgcagtgagctgagatcacgccactgcactgcagcctgggcaacagagccagatcctgtttaaaaaaaaaaaaaaagtttaagacaaaaaaggaaagctcactttctatcaacaatagcttccaaaagacaataacagggctgagtgtggtggctcatgctt

SEQ ID NO: 512102 - DNA, 201 bp, Homo sapiens
caagattaacccaattaaaaagactaccagaaggtataccttttaaggatctgactaatcttggaatcttcgaggtttccagtactacctgaatttttttwttattattattttttgagacaggctatcacgtcgtcaccaggctggagtgcagtggtgggatctcagttcaccgcagcctcaacgtcccaggctcaagtg

SEQ ID NO: 512103 - DNA, 201 bp, Homo sapiens
taatgtaatccttataaacataattttaatgattgaatatgtttccaaggaaaagaaatatagtttactaaaccatttctctagtcgtggacaaagagttsatggagacatttattgtgtgtgtgcttttacattgacattttaaaaacaagaacttctgaaaaatacaaaagtacaaaaagttgcaaaaattcaatttcc

SEQ ID NO: 512104 - DNA, 201 bp, Homo sapiens
actctaatccctatgataaatcctcataatctctatcgtaaaccatactctgttactcatagtgtttatgtttctctggtcaaactgactgatagtaggaktccatatacttatgaaataaacatctgaagaggaatacaaaattttgtgccatgtgccaggcattttgctaagtgtgccttatctcacttgatcttcacc

SEQ ID NO: 512105 - DNA, 201 bp, Homo sapiens
tatgctgtgtgttttttgcctccaagtttttagtttcagactaaagtagccagggttataagtaatacaaaagtgtgatggctttgtactctgtcgacttrgataaattcaaactaagtgtcccagcttccttccctgaatgattctgagttgcagttgaccacagaagaaacatgaacaagttttagaagccacaagtga

SEQ ID NO: 512106 - DNA, 201 bp, Homo sapiens
ctttcccatctccagcaatgcagctgtgacatacgcagtcaaggagacctcatcatcaacaccaccctagaggcaaacagggaggcagtgagtcagggcarcaggcagcagctgcaagaattatgtgcagattgcaaaacagcctcccctctgaatagatgaataatttttaaaaagaaaaaagaaaagaaagctcttttt

SEQ ID NO: 512107 - DNA, 201 bp, Homo sapiens
ttgacaatgggcttcatgatgggacgaaaaaggcagctattgatgaagacagacattttaattaggtaaactaacatttgttgagtgcctatgaggtgccsggttttaggtgctttcataggccgtgggtgtggattaggcaaatgttcaaggggccagggaaggagaaagttgaagctgcctggttggactggagtatgg

SEQ ID NO: 512108 - DNA, 201 bp, Homo sapiens
tgtaaaactacatacacatttgcacatattgagtgtatgtgtgcatgtacacatatacacacacaatctcaaacatattaatataaatgataaatataaaragaaatagaacttgtgggaaaaagcctaaaatgctaattttgattctcttggagatatctgatatttggtaatttgtattttcttttttaagcatttcca

SEQ ID NO: 512109 - DNA, 201 bp, Homo sapiens
catgtacacatatacacacacaatctcaaacatattaatataaatgataaatataaaaagaaatagaacttgtgggaaaaagcctaaaatgctaattttgrttctcttggagatatctgatatttggtaatttgtattttcttttttaagcatttccatttttaataatacacatatattacaattcttactattaataaa

SEQ ID NO: 512110 - DNA, 201 bp, Homo sapiens
cacacctgtaatcccagtttgggaggccgaggcagacagatcacctgaggtcaggagttcaagaccaggctggccaacatggtgaaactctgtctctactaaaaaaaaaaaatacaaaaattagctgagcatggtggtgggtgcctgtaaccccagctactcaggaggctgaggcaggagaatcacttgaacctgggagat

SEQ ID NO: 512111 - DNA, 201 bp, Homo sapiens
ttttgctgtaatttttcaagtctcttttctgaaggcatatatattttacaaacttgagatctcaccaaaaaatagttttgtattttgctttcaacattctrtagtaagtccagttttaagtataaaattatagaattcagtaataatattgaataactatagatcattatataaaacatttttctcaatgcaaaacataaa

SEQ ID NO: 512112 - DNA, 201 bp, Homo sapiens
ccaaaggccgtagctataatccattgtggggggcatcaaaggaacttaactcctatggcacaaaggaacagaaaggctgatagagaagcaaaagctgaagscctcagggtgcaatcccaacagatcctagcactacttcctttctatgatttcccaatagaacctgaatacacactgtagagttaataacggaggggggga

SEQ ID NO: 512113 - DNA, 201 bp, Homo sapiens
aggctgaggcaggagaatcgcctgaacccaggaggtggaggttgcagtgagccgagatcgtgccattgcactccagcctgggcaacgagagcaaaactgcstctcaaaaaaaaagaaaagagtgatcttttcattaaatggtgctgggtgatctacatatccatggggaagagggccagggaagaatctttgacccttacc

SEQ ID NO: 512114 - DNA, 201 bp, Homo sapiens
tgaggccaggagttcgattccagcttggccaacatggggaaacccaatctctactaaaaatacaaaaattagcgaggtgtggtggtgcacacctgtagtcycagctttttcggaggctgaggcatgagaattgcttgaaccagggaggtggaggttgcagtgaggtaagattgtgccactgtactccagcctgggcgacag

SEQ ID NO: 512115 - DNA, 201 bp, Homo sapiens
gccctgggaagagacctaaacctctctaagacccagtttcctcttctgtataatgcaagaaacacctaccttgagtaaggattgctgcatgaattagaggygaggcttgtaaagaacctagttctaaatggagccttgtacctaagtcaatgctttattatttttattatcttcttatcagtaaaaatgagcagtaagccc

SEQ ID NO: 512116 - DNA, 201 bp, Homo sapiens
agaagaatactcagcaaagtgttaacaacagagacagaactgtgggagaagaagggaaaactattaatttatatatgcttttctctagcttggagtactgyaataaaaactgtcataattacacaattttaattcttaaaaagcaaactcttgaaatgaaaaatagaaaaggctgggtgcaatggctcatgcctgtaatcc

SEQ ID NO: 512117 - DNA, 201 bp, Homo sapiens
tcagcttaaaacagactgctataactacaagatattttgtgtagactccaaggtaaccccaaaaagtctataaaagttacacaaaagacagagatttaaawatcaaagtatattggtacacaaaaaaacaataaaacacaaggaagacaggaagagaggaaaagacagacaaaataattacaaggctaacataaaacaact

SEQ ID NO: 512118 - DNA, 201 bp, Homo sapiens
ccaaaaagtctataaaagttacacaaaagacagagatttaaaaatcaaagtatattggtacacaaaaaaacaataaaacacaaggaagacaggaagagagraaaagacagacaaaataattacaaggctaacataaaacaactaacatggcaaaaataaatcttcccctatcaacaattactttaaatgcaaattgagtaa

SEQ ID NO: 512119 - DNA, 201 bp, Homo sapiens
agactgcctgatcacgctttccccagccagtctgtctcttccctcatggcacctctcacaactgaaatatgtgtggatgttcgttgactctcttcccagtmtgaaacataagctccacccaggcagccccattgggtctgtcttgttcaacgctgtatctccagcaagtggcaccatgcccgacacagtagccactcaata

SEQ ID NO: 512120 - DNA, 201 bp, Homo sapiens
tctgactggttttaggcagtgattccttgggggaagggagtatttaacattccacattaaggatgtaataatcaagggatcttttatctcaagtgctatcwggtctgggccaggaacaataaaataggaaggaagttaatctataacaaaaggtcagtaattaaggtcatggtctgtcactccccactcagtctcccagtc

SEQ ID NO: 512121 - DNA, 201 bp, Homo sapiens
tctctcattaacagatagagaagataaaactaaataataataattttttttttttttttagagggagtctggctttgtcgctcaggctggagagcagtggygccatcttggctcactgcaacatccgcctcctgggttcagcaattctcctgcctcggcctcccgagtagctgggactataggtacgtgccaccacgcctg

SEQ ID NO: 512122 - DNA, 201 bp, Homo sapiens
ttatgtgctacttggcttgggaaggagtatttgtaaaattaagagagaagccatgaagaatgaggcagaagtaagttgggagatgcaggtaagatctcagmtctcatttcagctcagccctctcacctggtaggtagtagtcatagaccttgatggttgctggtttcaagttggtgaccagcacactttggctgatggtga

SEQ ID NO: 512123 - DNA, 201 bp, Homo sapiens
tactttcaagttagtgaaatttccaattgtgctgacattttcattagggttttgccactgctgttgaaagctggtccttatttcagatgacagcatttctygactctgaggaacttccatagacaagtgtttagtaatatgctgagtactttgcaaaggctggcttccatatctacagttgtaaggaggaggaggaggtct

SEQ ID NO: 512124 - DNA, 201 bp, Homo sapiens
tttctcgactctgaggaacttccatagacaagtgtttagtaatatgctgagtactttgcaaaggctggcttccatatctacagttgtaaggaggaggaggwggtcttttgtcagtttgcgtggcatactgctgtgatggtacagctgaggtctgccttgatggtaaagttaatacagaatttggaagctgactatttttaa

SEQ ID NO: 512125 - DNA, 201 bp, Homo sapiens
ttttgtttttgaatggtagaatctggtaaaaagctttgtggtgagtaacggtatagctttggaggtggtctgtaatctgggtaagtcagtcccttagatayacactgttgtgtccaatcaacctgttgctctgaaaaagactggttaagtccctgatttccttggtaagctacaggaagtcgtgtagaattagaagggatc

SEQ ID NO: 512126 - DNA, 201 bp, Homo sapiens
gaggttgagactgcagtgagctgtggtcatgccactgcacttcagcctgggtgacagagtgagatccggtctcaaggaaaaccaaaagataaaaataattaaaaaaaaaaaaaaacccaaattttctttagtctgtttctttccatgcagcatgtaacataggatttgatgccttataaatatttaataagtacttgattg

SEQ ID NO: 512127 - DNA, 201 bp, Homo sapiens
ccttatgctgaattctttccttccctactcgactggctaaggacaagtcagagggcttgggcatgttgtagatggtctgtgtgagtcatgggggtggattmataagagggaatttatatacaatttaatcttgcctaaatgtagagagttaaataattgttttaagtgggataggaaaaaaaatccaaaggtttgactaca

SEQ ID NO: 512128 - DNA, 201 bp, Homo sapiens
aagctaagtgtaaggaagtttttacttgacttataggaatttacacatcatcaaaggtatactctgcagctgggtgagcctgagtgaccggaaggaagggragagtctattcaactaatcatttgcatcacatgcacccaaggaaaaaatgtttacctggtggagccacggttaaccttttttccttgctgagccggtgcc

SEQ ID NO: 512129 - DNA, 201 bp, Homo sapiens
tataggtacgtgccaccacgcctggctaatttttttattgttagtagagatggggttttgctacgttggccaggctgggcccaaactcatgtgatctgtcyacctcggccttccaaagtgctgggattacaagcgtgagccaccctgctcagcccgatatgataattgtgaatgatcatatgtgtgggacccgagatatta

SEQ ID NO: 512130 - DNA, 201 bp, Homo sapiens
aaattaagccatattttaaaaactgaaagcaacaattttagcatatattcctaatgggtgatcgaccagtgtctcagccgtcaggtttataatggcatcasaaagcaagttataacccagagaacttaaaatttcatctataaaactgttgggaatactacaatgattccttaaatatttacctatctttttgattttagc

SEQ ID NO: 512131 - DNA, 201 bp, Homo sapiens
atcttttgggggccactatgcaatctactatactcaccttatttattcttattttttgtcattttgctaatgtgaagggtggcaggtgtctgaaaggaacrgatggtgaagacatcagggagggacttgctagtaccagggatggggctggagaaggaaatgggagactgaatagggaaagcaggaagtagaagactcaga

SEQ ID NO: 512132 - DNA, 201 bp, Homo sapiens
agagatgatcgtggacattattaatcattaacttttaatattactctttgttgtgttactaatataaccaaggaataacggcgggtatagggtcaggtgcygaagggacattgtgagaagtgaccaagaaggcaagaggtgagccctctcttacgcccacataagggccacttgagggctccctggtcaagcggtaatgcc

SEQ ID NO: 512133 - DNA, 201 bp, Homo sapiens
aaccccactgaggtaggtattatcgtcatctccatttctttgaggcacaaaggagttacctgcccaaggtccacacagctaatacatgaggagacccagaytggaacggaaacagtgtaactgcagaatggcccatctcaaccacttaatcctgtactgaatacagttgagaaagtttaactcaacgtctaaacagaattt

SEQ ID NO: 512134 - DNA, 201 bp, Homo sapiens
aggagtctttggattatttacaaggctcttaaattgaacaacagtgacatctctatcagaagttctctctccttgtttacaactgttggtatccaaaggasaacactgctctttttgtttctcttcctctgaagatgagttcttgatggaattacactgacactgaggtactccttcgtaaaccatggagagccagcccaa

SEQ ID NO: 512135 - DNA, 201 bp, Homo sapiens
agattaattctggtctcccacttcacagtgttctgtttgccttgggactcattgtaggtaaaaaggatgtggagtctggaatagtctatgcttatgaaacygcaagcaaaattcctagagtggccctgaattcaacccatcttcctgggactatgacactcatggctatgggtgaaaccaacctttgaacagtcattgcat

SEQ ID NO: 512136 - DNA, 201 bp, Homo sapiens
catgcaaaagggaaaatctcttttccttcagagaaaggaagctctttatgattttacctggccaattaccagaacataatttagagaatttcttggactcrtgatattgtagacactggattctgaatttgtctatactggctccccctttctataatcaaaactagttgacacacctgagttcttgtcccaaataaactc

SEQ ID NO: 512137 - DNA, 201 bp, Homo sapiens
ccttcgttacctttattgtctttggtataagcctctggatatgatttgtttttactactcaaggttctcacagatgacctgggctcatagttccaagagawttttggggcctgtgtatttatttcttctttgttctttttatttgaatatgagctcaatgttgtgcggtaaatagaattaaatattggatcctatggcaga

SEQ ID NO: 512138 - DNA, 201 bp, Homo sapiens
agatgagattatgcccaatactttggcctgtccatttccccacctaccatattcctccacactgaaagtaccaaaggtcttgccctcagccactgccacartgtaggtgcccagcattgcctctggtgccagttggaaggacaggtctacaatgccttgctcaggtaccacttccagccactgtgcaatcctgttgctatt

SEQ ID NO: 512139 - DNA, 201 bp, Homo sapiens
cttttccctccttaaaaatctgccttggtttcctagatctgtcctctttatccttatctagttatggccctcaatagtattttgacaaaactataggaatrcaattttaaggaatctgcttgcctgcagtcttatttttttatccgtcctctgtactacatctagaattacttacacacatgaaacaaatcatgtcactcc

SEQ ID NO: 512140 - DNA, 201 bp, Homo sapiens
ccaggagcttgaaaccagcctgggcaacatggggaaacccatctctacaaaaaatacaaacaaaaaactcaccagacgtggcggtacatgcctgtagtccwagctacgtcggaggctgaagtgagaggatcacctgagcctgggaggttgaggaaatgaagatactaaaataaaaataaaatttaaaaaggcatgcatggt

SEQ ID NO: 512141 - DNA, 201 bp, Homo sapiens
ggtgggcggcacaaggtcaggagttcgagaccagcctggccaacatggtgaaaccccatctctactaaaaatataaaaattagccagacatgatggcaggmgcctgtagttccagctactcgggaggctgaggcagaagaatagcttgaacccagaaggcagaggttgcagtgagccaagatcgcaccattgcactccagc

SEQ ID NO: 512142 - DNA, 201 bp, Homo sapiens
atcacattggaagacacttgtacaaaagaatgaacaaaatataataatggaacaactttggcatactgctgctaattaacgaaatacattttaaaatactaaaaaaaaaaaagagagagagagaaaagaaaactccatctcaaggagtcctgaagcccttagtgatctccaggaagacactcccgaacccagagcatttta

SEQ ID NO: 512143 - DNA, 201 bp, Homo sapiens
aaacacaagaatcctccccttacagccataatgatctgtatcaccttcctccatgaaaatcagatctggagttctcttctctcttgtttacattctaggtragggggaaaagagacaaggaaagacatattcacagacaaactaataaattactttgaagtacatttatccattattaatgacagtatagtggtataatta

SEQ ID NO: 512144 - DNA, 201 bp, Homo sapiens
atttaaggcccagcctcacttttccatcccacatctgctccctagggcaccacagagtttgtttcttcaaatcttttttttcttgccagctattgctatastctaccctacccacctgaagttcctttccctaaagactggtgctgtataatacacaggtgtaagaagttagccagcttgctttaggcagacagtaaggga

SEQ ID NO: 512145 - DNA, 201 bp, Homo sapiens
catctcaacataaactaccactgcagcagaaaccaacaacaaaacaaaatgaaaataatggtaccccatccctctgctgcctttcacagcaaaatcctgayatgaactgttgattcttgccatctctgtttctccacatttgctcttcagcctactctcatcagaccttggttcctatcacctcagggaaactctcctgcc

SEQ ID NO: 512146 - DNA, 201 bp, Homo sapiens
tctccacatttgctcttcagcctactctcatcagaccttggttcctatcacctcagggaaactctcctgccaagtcatcagcaacctccatcttgccaaayccagtaattaattcttagcttcattttactcacacagttctgcatttcttccttttggaaagacatttttctctaggattctaggtgactgctctaggag

SEQ ID NO: 512147 - DNA, 201 bp, Homo sapiens
atccacccacctcagtctcccaaagttctagattacaggtgtgagccacggtgcctgaccataacaggcatcttgaactaaacatgatcaaaacagaactmttgatgtcatactccccacccccaaaccaacccagcttctcaatgagaggtcccattttacaacatgacagcacagtactatgtttatgtccatctcaca

SEQ ID NO: 512148 - DNA, 201 bp, Homo sapiens
agtctctggcaaaaagacagtgttcaatgaatatttgatgaatgcagaatagtggggcaaggaaagtaaaaacaataaacactgaaaatctgcaaataatmaaataactgtaaagatgattttttttgagacaaggtctcactctgtactgcaggatagagttcatcgacaccatcacagctcactgcagcctcaaccccc

SEQ ID NO: 512149 - DNA, 201 bp, Homo sapiens
taaaaacaataaacactgaaaatctgcaaataataaaataactgtaaagatgattttttttgagacaaggtctcactctgtactgcaggatagagttcatygacaccatcacagctcactgcagcctcaaccccccaggctcaagcattcctcctgccttagcctccaaagtagttgagactataggcacacggcaccatg

SEQ ID NO: 512150 - DNA, 201 bp, Homo sapiens
tggcctcaagcgatcctcccaccttggccacccaaaatgctgggattacaagtgtgagccaccgtgcctggcctcttttgtttttctttttttaatcaacytttttttttttttttttttcctgatgggttctcactatgttccccaggctgttctcaaactcccagtcacaagtgatcctcccgcctcagcctcccaagc

SEQ ID NO: 512151 - DNA, 201 bp, Homo sapiens
ccttatagttttctatcttatttttactgaggcttcctatttctttgccaagcctatgttttcatttatttcaaacatgttcataattgctcactgaagcatttttgtcgtggctgctttaaaatcttggtcagataattctaatgtctttgtcatcttagtgttggccttttcatttagtttgagatcttcctgattctt

SEQ ID NO: 512152 - DNA, 201 bp, Homo sapiens
aaaaccagaattataggtcaggtgcagtggctcacactcaatcctagcacttgggaggccaaggtgggaagactgcttgaggctaggagtttgagaccagygtgggcaatgcagtgaaaccctatcttgataaaaaaaaaaaattaacaccctccccgcccattatggtagcacaatgtagatagaattatcctgtaagcg

SEQ ID NO: 512153 - DNA, 201 bp, Homo sapiens
aaactctgtatctattcataatcttagtaattatgtagccttgcctctccatttttcagcagagaaaaatgaagccaataaaaaggttaaagtctcttgtraggatcacacaaaagctcagtatgtgagtcagggctagatctaacctctgcctattcatctggatactttttagttatatttaggtttttttatttgcaa

SEQ ID NO: 512154 - DNA, 201 bp, Homo sapiens
acctcaagtgatctgcttgcctcagcctcccaaagttctgggattacaggcatgagccaccacgccaggcctccccttcttttttgtttctttccccttcwtgttagtaatggttagctgggtacaaagtcagtttgtatgtagtcacttggaatgtaagtagagattatattcccccaagtctctcttgcagctagatgt

SEQ ID NO: 512155 - DNA, 201 bp, Homo sapiens
acaattcctgctcagtttctctaagaatgaagcaatactgtctcaatttcaaaattggtccttcgccacaaaacccataaaactgtctccaagtgatctcrtttttccagcttccattcacatcaaattatgctatgtctaggatacatagaatttccacctttgacaaagactcctctcttttcagggaatgagggatca

SEQ ID NO: 512156 - DNA, 201 bp, Homo sapiens
gtacaagtgatattcatcaatagagtagtcttaaatggtcaccagtaagaaacttgcaaagggagaatgcaatctcatggacctgaaagtttgtttactcragagccaagctttacactgtcttctctctaagagatttacaacctagtgtgccagaaagccttgtcaactggtcaggcttgggaaagattcccctcatag

SEQ ID NO: 512157 - DNA, 201 bp, Homo sapiens
gcacacaccactggacctggctataattcatatttcttgataagaaaagttgatggatgctttttctttccagatgttaaaacttgttttaacccaatacrcaaatctttaaatatgcctttgggtttttttgctccaagttgtgatttcatcctttttccttttttttttttttttttttttttttgagacagagtatca

SEQ ID NO: 512158 - DNA, 201 bp, Homo sapiens
atattattataatgaatatcttaatgcataaagttttatctgcatttcagattatttggttaaattagattcctacaaagagattctgttgaccagcctcyaacaatatggtccccttttctgttattactgctgttgtgtaagtaccaccacctgagcccacccctattcccacttcccactgaacggagcttttttgta

SEQ ID NO: 512159 - DNA, 201 bp, Homo sapiens
actccagcctggcgacagagtgagactccatctcaaaaaaaaaaaaaaaaaatcctatatcaagagaaaactaagacttaagaaaaaatggagagatttayggattacatgtaatttgggctatgccccttgtgtacctgtcagctgggtttttgataggaatagaataagaagtaggcaattggaggtaactccaattaa

SEQ ID NO: 512160 - DNA, 201 bp, Homo sapiens
tatggagaatgaaaaaataaagtagaaaaagtaaaataaagtcatcatgatattagatgctaatacaaactatgtgcttagtttcatatttattttagcayatatattagtttgaacttgaattttaaaaaatattttaaaaactgaagaatagggaacattgaccagtatcatcatcatatatttctctttctcccccaa

SEQ ID NO: 512161 - DNA, 201 bp, Homo sapiens
tcacacagaaaagcatctgtggattccctgccccatcctcaaccttggctgttcttggctcagctgcagctgctacacacaatggggattgcagctttcaraggatccatccaactggccatcaagaatactcgactcattggtcacattcttctccataaaccacctgcatgcgtgtgcacacggtcctcacgttgccca

SEQ ID NO: 512162 - DNA, 201 bp, Homo sapiens
tacacaccctcctggtgagtttatgtatgatttttgttttgttgttttctgtgttatctgatcacaaattactttccttttcaggaagaaaaaaatttaattttttttttattggggcaacatccaacccagatatgattactacctagcctgaactgaatgtattactaataaacaaagaaatgcagaatggcatacagt

SEQ ID NO: 512163 - DNA, 201 bp, Homo sapiens
accctgtctcagaaagaaggaaccagagagtagctctgtttttaacagttgttcacgttggagggaaatgaggaggtcctggtatcctgaaaactgtctcrtcttcttcttagtactcaacactaacttccacttcattagatcctttctctgtcttcacaagtcatattgctatatttgggcatatccaaagataacgag

SEQ ID NO: 512164 - DNA, 201 bp, Homo sapiens
ttgtggacctgtcaatgatcactgcattggtgtaggagttagaggacgtctgcgtctcttctatagctttcatatcaaaatacggagtgaatgattgaatrtagcttccaaaaatgttcttacaggggtttgatggatgaagctacttttggctatctctgtttccaacatcacccctccactaaaggatgactctgccag

SEQ ID NO: 512165 - DNA, 201 bp, Homo sapiens
gggtctttggagaagttactgattctagggctggagcaaaataagccagacacatcttgtgatgccagagttacaacatgcatttaaaagatgatgaggayatgtcaaaaggagacaggagcctgtctgaaggggcttccaatggccaaatctgagatattttgagaaaaaaattatagtaactaattatatatccacatt

SEQ ID NO: 512166 - DNA, 201 bp, Homo sapiens
atctttaaaatgttctctttgatcacagaattttcgttctttcatctcaaaaactgtggcagaacgtgtactaggtcacccagggacattagacaaaatasttttgatttgaaactgcaaaataatactaaaattcattcattcatttgttgttcattcactcggcaagtatttacaaagcactgtactatgtcaggcact

SEQ ID NO: 512167 - DNA, 201 bp, Homo sapiens
tcctgagacttggatctgggagttggtggcagtgaagtaagtaactttactttcctccatttgctggaggggagggaatgtggttcctccaacattttcawttctaagacaatcttcctgaaaagttctgaataattatcttaacctcttcctctttaggatagacctaagtaaaatgcgcaattgcataggctcattaat

SEQ ID NO: 512168 - DNA, 201 bp, Homo sapiens
cttaagtggattcagttcttgacgttagctttatgcatattaattctcacttgagaaaaggtggcttacattcattatttctgttcttcacttgccctccyccccagctcatcaggtgtggctgaggtaggagtaacagtccctgacaccatcaccgagtggaaggcaggggccttctgcctgtctgaagatgctggactt

SEQ ID NO: 512169 - DNA, 201 bp, Homo sapiens
gaggttgcagtgagccgagattgcgccactgcactccagcctgcgggacaagcgcaaaactgcgtctcaaaaaaaaaaaaaaaaaaagaatggaaaagagraaaagcagagctaccttacagaaatgatttgtagactgccacaactcccttttacccttactgctaaaagggcacttcctcttttcccctactcaatggg

SEQ ID NO: 512170 - DNA, 201 bp, Homo sapiens
agccgagattgcgccactgcactccagcctgcgggacaagcgcaaaactgcgtctcaaaaaaaaaaaaaaaaaaagaatggaaaagagaaaaagcagagcyaccttacagaaatgatttgtagactgccacaactcccttttacccttactgctaaaagggcacttcctcttttcccctactcaatgggtttgtaatttag

SEQ ID NO: 512171 - DNA, 201 bp, Homo sapiens
caactggctttgaaaatccgagttttatgccatttaactctgaatgaagagtgcaaagtgaaagacttgggaaaagggacgaacttacccctagaagccckgggctccttgcctggcagatggtcagaaagaactgcactaccttccattttcaagtccctaacagagaggctcagtggcagaatgggaattcttccatga

SEQ ID NO: 512172 - DNA, 201 bp, Homo sapiens
catggttaaggatgagattgtatggggtctgttctcagctgtaactattaatcaattagaaagcagatagtattacctttcttcctttaaaacatagtgcygagtgatatgatgcctatgagaatagaggcaaaattcacagatagtttcatagctgatggtgtcatttgaacaaataagatagattgtactggaggaatc

SEQ ID NO: 512173 - DNA, 201 bp, Homo sapiens
ccagagcatgtattctagtggaacataaacaaatcaataggtgcatggcatggcatagtgttgaaaaagttaaggcaagagcataggctagcagtgcccartggaactttctgcgatgacgtatctgtgttgccaatatgcccagttgccacacatggctactgagcttttgaaatgtggctggtatgaccaaagtactga

SEQ ID NO: 512174 - DNA, 201 bp, Homo sapiens
tgaaaaagttaaggcaagagcataggctagcagtgcccagtggaactttctgcgatgacgtatctgtgttgccaatatgcccagttgccacacatggctaytgagcttttgaaatgtggctggtatgaccaaagtactgaattttttattttgtcatttaattaattttaattgtcatatatggctagtgactactatgtt

SEQ ID NO: 512175 - DNA, 201 bp, Homo sapiens
gagatactgtctcaaaaaaaaagaaaaaaataaaaagaaagaaaacactgagcccaaatgatctgatgaagcacaaaaaataggaagaacctagctaaacrtgttagaactgactgagaagtgtctctcaaactactgctgcatattccagcagcaaagagtcttagagagtagattcaattagaaaagaagagctcacag

SEQ ID NO: 512176 - DNA, 201 bp, Homo sapiens
tctctcaagcagtggttctcaaccttacgaacccattagaatcacttggggagctttttaaaaacaaagacatagagattccatctccattctgagttaaytaatttgggaaagagattcccaaatattctcagttgaagggacactactaagtggctcaattttttcagggttctaggcacccctagaacaaattcctaa

SEQ ID NO: 512177 - DNA, 201 bp, Homo sapiens
tttctgctggttcacatcagcttcttctggctgtgttaaaagctagtctcttattactaaagccaccaaccaaatacagacactttaaaaatcagcatacrgaaagtatatgtgctcagcaagcagtctaagaggagattgcttgcttagcagaatatgtctattcagaagcaaaacttaaaggcacacattttctgacta

SEQ ID NO: 512178 - DNA, 201 bp, Homo sapiens
agttatttcatactatttcagaagaaaaaattacagtaggctcttttgaaagccaagatggaagtaatgagggacgattcctgatcttgcagttagtacamaaagcagtattgacatggagttaccaacatgacctcgactttcttaaaattcagttgtgactaggatataggaaacagatcaagaggcttttagtattaa

SEQ ID NO: 512179 - DNA, 201 bp, Homo sapiens
aaaactgcctcagtctgaaaatcattatttataataacattattccctatgttgcatataaggttcagtacaatcattatttataataacattattcactrttgcatataaggttcagtacaatcattatttatagtaacaacactattccctatggttgcatataaggttcataacctctcagcttctaagtagcaccac

SEQ ID NO: 512180 - DNA, 201 bp, Homo sapiens
gttttgtggcccaacatataatctagcccttgtgaatgttccaagcgtccttgagaaaaacgtgtattctgctgctattggatgagatggtctgtgtatgyctgttaggtccacttggtctataatgttattcaggccactgtttcctcattgattttctgtctggataatctacccactgttgaaaggggtactgaggca

SEQ ID NO: 512181 - DNA, 201 bp, Homo sapiens
aagagtataaattgcttatgatttgtgattaataataaaacattcctgtgagtggtagagaatatgacaaaagcaataatttaaattaggtacaacctttyctttagacttctttgcttgtgaaattacctcccaggtcatgtgaaaggggctctaccagtggcttgaagatggcagagtctctgcttcccctgccaaata

SEQ ID NO: 512182 - DNA, 201 bp, Homo sapiens
ggctaaggtaagagaattgcttgaacccaggaggtggaagttgcggtgagccaaaattgtgccattgcactgcagcctgggcaacaagagtgaaaatgacycaaaaaaaaaaaaaaaaagatggtaaggagattttacaaactatagatttttacatttaaagaatcctcaaattaaaagacaaatagagaacaaaaattt

SEQ ID NO: 512183 - DNA, 201 bp, Homo sapiens
aaggctgcagtgagccgggatcatgccactgcaaaactgcactccagcctgggtgacagagcaagaccctgtctcaaaaaaacaaaaaacaggctaggcgmggtggctcatgcctgtgatcccagcacttcgggaggctgaggcgggcagatcacctgaggtcgggagttcgagaccagcctgaccaacatggggaaaccc

SEQ ID NO: 512184 - DNA, 201 bp, Homo sapiens
atcagtctctgttccctcatccattcattctccacagtaatcaattattactcagcagaataccaatattccctatctcctcttcccctctgaaataagawtatgtaagtatttgggccccattgggatactgggcaatcattctgtgattctcacgtgtgcacgttaataaatctgtatgctttttctctatgtgccttt

SEQ ID NO: 512185 - DNA, 201 bp, Homo sapiens
tttaagatggagtctcgctctgtcgccaggctggagtgcagtggtgtgatcttggctcattgcaacttctgcctcccaggttcaagcgattctcctgcctyagcctcccgagtagctgggactacaggtgcatgccaccatacccagctaatttttgtgttttgcagaggttgcagtgagctgagatcatgccattgtact

SEQ ID NO: 512186 - DNA, 201 bp, Homo sapiens
ctgaaataagattatgtaagtatttgggccccattgggatactgggcaatcattctgtgattctcacgtgtgcacgttaataaatctgtatgctttttctmtatgtgcctttttttttcttttgagatggagtctcgctctgtcgcccagtctggagttcagtggcgcaatctcggttcactgcaacctccacctcctggg

SEQ ID NO: 512187 - DNA, 201 bp, Homo sapiens
aatcttgatttgtatcattgccattgccatgcttcttaaagcatggatgaatctatgtgacatacatttttcttacaaatcccaatttactgcagcatctyacacttggccccaattctatgtgttcatgtcgttccatattctgatcatttctgtctctgcctcacatggggtgataggtcagtgtgcagctgaaagcct

SEQ ID NO: 512188 - DNA, 201 bp, Homo sapiens
atgccaaatcctcctaatacacaaccaatcttgatttgtatcattgccattgccatgcttcttaaagcatggatgaatctatgtgacatacatttttcttmcaaatcccaatttactgcagcatctcacacttggccccaattctatgtgttcatgtcgttccatattctgatcatttctgtctctgcctcacatggggtg

SEQ ID NO: 512189 - DNA, 201 bp, Homo sapiens
ctgtggaaatgaggttgttgaggtccctgagattaaaagaaaagacacagtcatcaaaaccctgttggtggaggtaacatatttttgggagtccctaacamctgtaagaatgcaacaccgggcggtcactcttgagacaacaaagaaccattaatatcatgctcacacaatacatcctgtaagactaatggaatttcctgc

SEQ ID NO: 512190 - DNA, 201 bp, Homo sapiens
attcctcacacgcaccctgccccctccaagatcagcatccttgagcatgtggtcttccagtaccctcctagtctgtgcccactgttcgatttgttgggaawggggtgttaacatatgcaacaggggccgggcgcggtggctcacgcctgtaatcccagcactttgggaggccaaggcgggcggatcacgaggtcaggagat

SEQ ID NO: 512191 - DNA, 201 bp, Homo sapiens
ctgctcagaattcaggactcacaccaagtaatggtgagtgctacatgccagactaaggagcttgactgtcaagaggaggttgctgacaaaagtgggagttkaagtggtgtttaaagaactgatctaacagtggtgggtaagaggcactgggaagaaaaccagagcagtgattcttaaccaagagcacgtatcagaatcatc

SEQ ID NO: 512192 - DNA, 201 bp, Homo sapiens
ttgattgatattaaaaacagaaagcatctaaggaaaactttttgtcaacgggagagcaggacttgtgagtgagaaagatgtaattccaagcagaggggagrataggaaacaggaaaattctgaagttttccttcagggaagccttcctttctaggaagctggtcctccgtccatgcttacctccagagaaacgtctgtccc

SEQ ID NO: 512193 - DNA, 201 bp, Homo sapiens
tgttttctttatccagtctaccattggtgggcatttagattgattccatggcttagctattgtgaataatgctgcaatgaactgcatgtatgtgcctttayggtagaatgatttatattcctttgggtatatacccaataatgggatttctgggtcagatggtaattccattttaagatctttgagaaatcaccaaattgc

SEQ ID NO: 512194 - DNA, 201 bp, Homo sapiens
cagcggctgagatgagactgctgtttctctttgaggtggcagtcagtgactgcagagagaaataggaaggaacacaagtgttaacttggctgatttgggtrtatttatttattaatggaaatagcccttttttcctgataatatataatcgtcattaagaaaacattttttcttcatcataatgagagtgagagaactctg

SEQ ID NO: 512195 - DNA, 201 bp, Homo sapiens
taggtctatttccgagtgttgctttgtagtaaggagttgctgaatttaactcgatccaagatacagcttggaggcattcctgaacaggctgttagggaatsacagtaataagagtaagggcatctagaattcccatcaatctgatagtaaactaaacaaaggggaggcatatgattccttcttcggcaaacttgatcaagg

SEQ ID NO: 512196 - DNA, 201 bp, Homo sapiens
tttttttttgagactgagtctagctgtgttgcccagactggagtgccatggtgtgatctcagctcactgcaatctccacctcccgggttcaagagattctyatgcctcagcctcccaagtagctcggattacaggtgcgcaccaccacgcctggctaatttttgtatttctagtagagatggggtttcaccatgttggcca

SEQ ID NO: 512197 - DNA, 201 bp, Homo sapiens
actgctagaaatataaaatggtgtggccactttggaaaatagtttgacaatttctcaaaaaacataaaatgaaccaccaattccgctcctaggtacctacygaaaagaaatgaaaacatatgtccacacagagacttacatgtgaagttcactggagcattactcataataaccaaaaagtagaaacaacctacatgtcca

SEQ ID NO: 512198 - DNA, 201 bp, Homo sapiens
ctctagtctttcccctcctaatattccattttcctaatccatctttattgtaattcctctgagctctcatgtgaacctcaggctctcaaggaatattttgyccgatttatcatggtcccttctggatctttctcgagagacctccctgtgcttcagcaaagcagagcagtgtcagctaattagggcagtgtcaggcacggg

SEQ ID NO: 512199 - DNA, 201 bp, Homo sapiens
ttgaagaataaggattggaagtataatagctaacctctattgatgaattaccattagccaggcactctgctaggcatatcgtactgtttttcttatttatycctcaaagccatattttgaagaaagatgatacccattttatagatatggaaatggattcccatagaggtggaagaggatttgacttcagacagcatcact

SEQ ID NO: 512200 - DNA, 201 bp, Homo sapiens
taattcttaagaaaacttaaaggtgttgcttttttaaaaatttcattttacatctggaacctgagccacagaaaagttaagtaatttgcccagggtctcamagctaatagtggggagccaggacctaaacaggcagtcaaattccaaagaccacaccttaaccaagaaactgtattaccacctccaaccatcagcacactg

SEQ ID NO: 512201 - DNA, 201 bp, Homo sapiens
gagtacagtgacgtgatctcggctcactgcaagctccgcctcccgggttcacgccattctcctgcctcagcctcccgagtagctgggactacaggcgcccrccaccacgcccggctaatttttttgtatttttagtagagacggggtttcaccgtgttcaccaggatggtctcgatatcctgacctcatgatccgcccgcc

SEQ ID NO: 512202 - DNA, 201 bp, Homo sapiens
ggctggagtacagtgacgtgatctcggctcactgcaagctccgcctcccgggttcacgccattctcctgcctcagcctcccgagtagctgggactacaggygcccgccaccacgcccggctaatttttttgtatttttagtagagacggggtttcaccgtgttcaccaggatggtctcgatatcctgacctcatgatccgc

SEQ ID NO: 512203 - DNA, 201 bp, Homo sapiens
tagctgctattcttttttttttttttgagatggagtctcgctctgtcgcccaggctggagtacagtgacgtgatctcggctcactgcaagctccgcctccygggttcacgccattctcctgcctcagcctcccgagtagctgggactacaggcgcccgccaccacgcccggctaatttttttgtatttttagtagagacgg

SEQ ID NO: 512204 - DNA, 201 bp, Homo sapiens
ctcctggcctcaggccttcctcctgtcttggcctcccaaagtgcggagattacagatgtgagctatcacccctggtccaggcagattttctttataacttmtttttttttgttcttttccaagtaagccagtgatgagagatgcagtaagcattatctttatgactgtatctagagcatccttgggatgccagtttcaatt

SEQ ID NO: 512205 - DNA, 201 bp, Homo sapiens
gctctaccaacatttcatcccttcaatagagggtaaactccttggcatttgtacaaatgggactggattcttcattaacgtctgcatctataataaagggyagtattaaaagacatgcattaaaaaattaaattcaaattgacacacaaaagtagggatcaagtacttatctctgaaaataagactctggacttaattata

SEQ ID NO: 512206 - DNA, 201 bp, Homo sapiens
gcccctgtctgagccaggcctgcctgtgcatgctgcctccctgacttcagcctctattgtctgtgaaaggcacacacttgtacacatgtgcagaggggacrtcccctgttggtcctaatttttaccctcattaatatgatcatcatggcatctatattcccatttccccagccctccgtggtgccctgccaggcagcctgg

SEQ ID NO: 512207 - DNA, 201 bp, Homo sapiens
acttcatttccagctgttggggaatacctcaggagaatacttatctctcaatgggcagcaacagcagggctatttcaagacctcactccattgtaaaggtkttatgtgtccacacagatctataaatcaccatgcaacatctttccagaagtatgtgctggtctgcagaattgctagatatgtccaggtgggctgggatca

SEQ ID NO: 512208 - DNA, 201 bp, Homo sapiens
agctcctttatgccatctcttcatgtggaatctttagcaggagatgaaacctggctaaagtgatctgacagttaaggtccaaaatgaatcctcgcagtgaaagttctgcaaagcaccagacaaaagtaattaagacagtaggagcagcagttggaaaaagtgatggcaaatgagtgaggcagttatccagtaatttcttgt

SEQ ID NO: 512209 - DNA, 201 bp, Homo sapiens
tcattcaaataactggatttttttaaaaccacaacttactgaaaaaaaaagcagcacttcagagtaaaaaaagcaaaaaggttgacttcacagatgcttayttttctgtctaattgcagaaacaatgtggggtaaaatgtttgaatcagaggaaaaactgacgagggatcattttaattggatacaggataaagcaggagg

SEQ ID NO: 512210 - DNA, 201 bp, Homo sapiens
aggaattgggaacgactgctaataggtatggagtttctttatggggagatggcaacgttctggaattagtggtgatgtttgtacaaccttatgagtatacrcaaaacactgaactgtacacttgaacgtggttaaaatgttaaattttgggttttatgcattttatctcagaatattgcaaacaaagatttagctacaagg

SEQ ID NO: 512211 - DNA, 201 bp, Homo sapiens
gagaagagaaagtgtatgtgaagatagtacattctgtgaggacaattttatttagtatttaaacagtgttatatgtcgtatcctcttaaccactcattcamacacacacacccctccataagaattcttctttgtcagtatttatttttttgagacaaggtctggctctgtcaccctggctggagtgcagtggcacaatca

SEQ ID NO: 512212 - DNA, 201 bp, Homo sapiens
gtcctaatttttaccctcattaatatgatcatcatggcatctatattcccatttccccagccctccgtggtgccctgccaggcagcctggtccatgtcccygttctgctgcctgaggtggatcccagcaaacaggttctgagggatgggggctctcctttgtttgccttgtagaagtagcagcagcagtgacttctgaaca

SEQ ID NO: 512213 - DNA, 201 bp, Homo sapiens
ggaattctatgcagccataaaaaatcaaaatcatgtcctttgcagcaacatagatgcagctggaggccattattctaagcaaagaaatgcaggaaaagaawaacaaataccgtatgttctcacttacaaatgagagctacacatcaggtacttatggacataaagatggcaatactaggcactagggatgcctagaggtga

SEQ ID NO: 512214 - DNA, 201 bp, Homo sapiens
tttgataaagattttaatttatgtaaaacttctaaagcagaatcaaagctcctcttggggaaatggcaagtctttaggataggcaagaccctgtatgaatygtaccaaagcattaccgcatggtagagaacacactcgattaaaaatgttaagctatctgaaaaataaaatgtgcaagtcttcaggatggcacaaaacaaa

SEQ ID NO: 512215 - DNA, 201 bp, Homo sapiens
gacctattgtattctgaagtgctacgcaagaagtgctagacctcttggactgattttcatgactgggcgtggtggctcatgcccactttgggaggccaagrcaggaggatcatttgagtttaggagttcgagacttacattgcacacctgggcaatgtaaggataccctatctctattaaaaataaaaataaaaagttggc

SEQ ID NO: 512216 - DNA, 201 bp, Homo sapiens
gaattctatgcagccataaaaaatcaaaatcatgtcctttgcagcaacatagatgcagctggaggccattattctaagcaaagaaatgcaggaaaagaaaracaaataccgtatgttctcacttacaaatgagagctacacatcaggtacttatggacataaagatggcaatactaggcactagggatgcctagaggtgag

SEQ ID NO: 512217 - DNA, 201 bp, Homo sapiens
ttatctgatttataacttttatgaaatatcccgctttgttagccaaatattttctaagatattagaatgttgttgaaaaattgcctttaacaactaacatygtcaaaggtgacaccattttccttgcatggaagtaagcatctgttctctgggggtaccgagaggctgatcagggtactaagaggacagtaggggtaggtg

SEQ ID NO: 512218 - DNA, 201 bp, Homo sapiens
catgtaccctctgaatataaagtaaaagttgggggaaaaaagagcagttttgctactgaagcttctggaatgtaactgaacaaccttttctcagatccagstattggataagaaatcaaatccagccatacgtggctgtgtacttctttgactatattattatcatattaagtagacttgatttcttaaaaagaaaataaa

SEQ ID NO: 512219 - DNA, 201 bp, Homo sapiens
tgtgagccactgtgcccagccatttaccctcctttaaaaatattttttactttgagaaaaaatttaaacctggttggatgaagcccacctaagttatgaamgattatctcttttatttaaagtcaattaagtgtagctgttaaccatatctatggaataccttcacctagctttgtgtttaattgaataaactgggtacta

SEQ ID NO: 512220 - DNA, 201 bp, Homo sapiens
gccctgcaaccacagattccactcaggtattgctcatatgcctcagtgtactctgactcagtggctttcagtccctgctcctcttccttctgctgtccctrttatcaccactggcatttctgttcctttccttctatgtctctccaactcccagagggaggatttgaccaactgtgtttggtcatcacccaatatcaaatc

SEQ ID NO: 512221 - DNA, 201 bp, Homo sapiens
caacaatattgggtttcttgtgtcaaattgcctgtccagaaaacaatttaaaaagtaagagtttatgttggcaatggaaagtaagggtagtaaaataatayaagaaaataatagtttttacttgcaaatttactctataaatggcctaaccctgcagatattgaatcatgaatcactgaatcattaaagctttgaagagtt

SEQ ID NO: 512222 - DNA, 201 bp, Homo sapiens
tgggaacatgctccactgtttccagctttgtatagaaatttctaatcatataaatctcagtattcttggacatcaaggaagtcttatatttttaagcaacyctgtctgctaccatcttcccaacaaccccaccaccatctgttttgatgcctacacagaagatataagccagtggatcctacatttttttcaagtatttgc

SEQ ID NO: 512223 - DNA, 201 bp, Homo sapiens
aattctatgacccatcttaatgattacatctgaacatatttacttatagttacataagtgtttatttctcaacctgtaaaattgcatagcaaaggattgawcttcactaggatgctataagcacttaagacatgttaatccatttttagtaaatggcactttacatgtatatttgttgctgaaggcctagtaagttcttaa

SEQ ID NO: 512224 - DNA, 201 bp, Homo sapiens
aatcccagctactcagaggctgaggcaggagaatcgcttgaacccagcagggtgacaagagcgaaactccatctttaaaaaaaaaaaagctgtctgtgggkgggcactatgtgagaatcaaacaaggaaactatcaagccacacacgctgtcacaacccactgagatttgctcagatcccgccatccctcaggccaaatct

SEQ ID NO: 512225 - DNA, 201 bp, Homo sapiens
atcgacacaccctagcggtgaggcaccctgtgttgtataagccgagggaggagactgaaaggactgacctgaggttggggagaatatccagaggggacacratacgttgggatggacattagaaaactaggagctcagtttctctctgtgtcagacacgcatcttccatggaaaataggctgctgaaccaggaaggagcag

SEQ ID NO: 512226 - DNA, 201 bp, Homo sapiens
atttctagctgggacattctcttctctgaaaatagtctgtggatagaatgaacggacaaaggaatttgtttctgttaaggtgttgcttatggtagggcaayggttctgactcttattgttcagtcagattccttcatttcccaaactgctctggatttcgccttatcttggaaatcagaacctagtttgactaaaaagaaa

SEQ ID NO: 512227 - DNA, 201 bp, Homo sapiens
tgcccactcctgcgcaccgcgccgttccaccgcaggcacaaccttcctaggcctgccccgtccccacacaggggttcccgcttgtcaatcacgctggcccrgccctccacttccggaatgtttttccgctccggacgggccacccacctttgcaaacaggggtccggcgccggaacagacgcccagtttgcgatttcacca

SEQ ID NO: 512228 - DNA, 201 bp, Homo sapiens
gaagcccctgaagtcctgggacggctctgatcacaaagggaaggtgaaaattgtcttgcaggagatccaagaaaaatacatataggaaacaaaaaagtttyactttaattaccttttaacgcctcaccagtgacaacattatttatactggcatttaattttttaaatatgtaaatcaatctttttgcttttttttttttt

SEQ ID NO: 512229 - DNA, 201 bp, Homo sapiens
tgaatgaaacccagcagctgacgcaggagatcaaggccaaggccgttggctatctcatcactggtaagtgagacagagaaaaatttactttgttactctartgaaacttttcccaattaagcttcagttatatcatcaaatattaacccatgatgataatttttatgaaaacaacaatcttcccacactctaataggatgt

SEQ ID NO: 512230 - DNA, 201 bp, Homo sapiens
catgtggcagcaaaaaaaaaaaaaaaaagaaaagaaaagaaaaaagaaaaagagatgtctaagctaaaaagaaaaagtctccaaactctcagtaacagctrattgactttcttgggtgcacactgtgatgggggagcctgtgtgtacaaaacagagcagtaaagtgctcaatgaaaagagcctcagcactgcatttttcct

SEQ ID NO: 512231 - DNA, 201 bp, Homo sapiens
tcttcattgatgaagcacacattacccaatctctcacgtggctctcccagatgcagaaggacaatggctgtttcaggagctctgggtcactgctcaacaaygccataaaggtgaactgttccacaaacttctgagcctgacacacatcaacataacatcccccaggggtgaagggaggaaggaggcacaaggaaattgcaa

SEQ ID NO: 512232 - DNA, 201 bp, Homo sapiens
tctcccaagtagctgggactacaggcacgtgccaccacgcctggctaatttttgcatttttagtagagatggggtttcgccatgttggccaggctgatctrgaactcctgacctcaagttatctgcccacctcagcctcccaaactgctgggattacaggtgtaagccaccacacccggcccacacatgtatttttatcta

SEQ ID NO: 512233 - DNA, 201 bp, Homo sapiens
ctaacaaacagaatggaatagcatcaacatcaacaaaaaggacatccacacaaaaactccatctgtaggtcaccatcatcaaagaccaaaggtagataaamccacaaagatggggagaaaccagagcagaaaagctgaaaattctaaaaaccagagcgccccttctcctccaaaagatcacagctcctcaccagcaacaga

SEQ ID NO: 512234 - DNA, 201 bp, Homo sapiens
gccagttcagtcttttcaaaatgagggagaaacatttgcctgccttgtaataacaagactcagtgcttattttttaaactgcattttaaaaattggatagyataataacaataaggagtaagccaccttttataggcaccctgtagttttatagttcttaatctaaacattttatatttccttcttttggaaaaaacctac

SEQ ID NO: 512235 - DNA, 201 bp, Homo sapiens
cctgcactcaagtgatcttcccaccttggtcttccgatgtgctgggattacaggtgtgagccaccacaccagcctatttaattatttaatttttttttttagagatggagtctcgctcttgttgcccaggctggagtgcagtggtacaatcttggctcactgcaacctctgcttcctgggctcaagcgattctcctgctta

SEQ ID NO: 512236 - DNA, 201 bp, Homo sapiens
atttaactttaaaatagcataaaaattcttcttagtaaatcgtaactaacaagaagaaggaaatataatggtcgataattaatcaaatatccaaaatgacrgctaagggaaaaaaatccaccaccgccacctgaacgacctttcagtgaaatgagcgttgtggattttagaattcagaattctctgttcttgttcctgtga

SEQ ID NO: 512237 - DNA, 201 bp, Homo sapiens
ctgcactcaagtgatcttcccaccttggtcttccgatgtgctgggattacaggtgtgagccaccacaccagcctatttaattatttaattttttttttttaagatggagtctcgctcttgttgcccaggctggagtgcagtggtacaatcttggctcactgcaacctctgcttcctgggctcaagcgattctcctgcttaa

SEQ ID NO: 512238 - DNA, 201 bp, Homo sapiens
tattattcaaccatcagaaaagaaccaactccttcctagataagagacaacagcacttgcccctacccatactaatgccacggctatttgtccatcaaagkaaatgaatggctttgtatttgaatagaaaagaggggcactctgagctctgaggtgacagataatgcactgatcagtcactctccagtgggggtatcagaa

SEQ ID NO: 512239 - DNA, 201 bp, Homo sapiens
cccgaagctaagggcaagttagaacataacccagccacagaagtgctgggcccgctaagaaaacaaacctgctaagaaaaaaaagtagttgtaggcctggrcaatgtgaaccatcaggaactgggggaatatgtacgggactggatcttgagggtgctgaaccaaaggaaacaaaatacaaattggaaaagggagaacttt

SEQ ID NO: 512240 - DNA, 201 bp, Homo sapiens
ggtcttttcaggtcctgcccatatccaaggggagaggctcatacgaaggattggataccaagaggtgcgggtggggctaatgggaaggcacctagagtttwtcacagctttttttttttttaactgaatctctttaaattggtcgtctcgccctacaatgcaaatgctttgtgtagcaagtaaaaagaaaaatggctctca

SEQ ID NO: 512241 - DNA, 201 bp, Homo sapiens
aaactataaaagaaaattaagtaaattattacaacaagttgtggacaatggttgtctgggacagagaaagctacgatggagaagggcacaaatggagattstgcggtgcttatgatattctatttccttcatctgggtggtggctacatgaatagcaggtttatattatttgttaaactgtatattcatgtttgtgcactt

SEQ ID NO: 512242 - DNA, 201 bp, Homo sapiens
ttcccaaagcacacctccttcttgcctggggactagattccctttgtaggactaacattagctacaagattagaaattatggtttaagagtcatgcaactrgaggcttcaagattttcttcaaatatctcagtgcttgagatattttccagaccctgcaattgccggatcagctggcaccacccagatggataaactggct

SEQ ID NO: 512243 - DNA, 201 bp, Homo sapiens
tctgggacagagaaagctacgatggagaagggcacaaatggagattgtgcggtgcttatgatattctatttccttcatctgggtggtggctacatgaatarcaggtttatattatttgttaaactgtatattcatgtttgtgcactttttctgtatatatggtatatttcccacaggatgtttttcagaaaggttatatag

SEQ ID NO: 512244 - DNA, 201 bp, Homo sapiens
gtatttgcaaccatacatactcctccctgctccgctaagatgtaatctagggctatcctattatctaagacaacctgacccaatacattaattcctctcttctgggctgcgattgcaatttccttgacaagaattcataaagggagagatttctaattctgcgctcatggggcaccgttctccgccaaggtaacaaagttt

SEQ ID NO: 512245 - DNA, 201 bp, Homo sapiens
tattcctataaacagattttcacctaaaatttgaatctttatgaatcaaataaggaaaattttaagtaaacttgggctgtggataactgatgattcattamcaaaaaggtagtcatttaaaattataaaatgacacaaaaaatttaaatggaaaacatcctgtttatgcttggtcaggtctttgagttgatgtgactcaag

SEQ ID NO: 512246 - DNA, 201 bp, Homo sapiens
tatattatttgttaaactgtatattcatgtttgtgcactttttctgtatatatggtatatttcccacaggatgtttttcagaaaggttatatagacatatragactagatggtctggtaaaagaatgacaggtgatagacaaaaggcaaacaaaaaatataatcaggaggtaataagtgctatgaagaaaagaaaagcagg

SEQ ID NO: 512247 - DNA, 201 bp, Homo sapiens
aagtggcaataaagtggcaataaaggcactctcgttatcactgtgtatggggaatggaaccccaaatctgaggaaaatttctttcagtaaggcttttgaayccctctcagtgtggcagggaaaggcttgcacctgtccaataaatgtgtccaccatgactaacaactaactaaaattttctttagctcttggctttacgtt

SEQ ID NO: 512248 - DNA, 201 bp, Homo sapiens
attcctataaacagattttcacctaaaatttgaatctttatgaatcaaataaggaaaattttaagtaaacttgggctgtggataactgatgattcattacyaaaaaggtagtcatttaaaattataaaatgacacaaaaaatttaaatggaaaacatcctgtttatgcttggtcaggtctttgagttgatgtgactcaagt

SEQ ID NO: 512249 - DNA, 201 bp, Homo sapiens
taaaagaatgacaggtgatagacaaaaggcaaacaaaaaatataatcaggaggtaataagtgctatgaagaaaagaaaagcaggataggggaataggttgrgaagagagaactatttaacggcttgtagcaccaggatctccatagttaagcctcatggagtgccactgtgaacacagcaaaggcaatgcaaattgaatgc

SEQ ID NO: 512250 - DNA, 201 bp, Homo sapiens
gatagaaagaaaagctaagatcagggaaggagagaccaaggcaggctttttcattagcaatggtgttgagcaggcagtttgggtaatttcttttctttttgtgagatagagtttcactcttgttacccaggctggagtgcagtggtgcgtgctcggctcactgcaacctctgcctcctgggttcaagtgattctcctgcct

SEQ ID NO: 512251 - DNA, 201 bp, Homo sapiens
ctgatcattttcttaacctttttaaaaagactcccctaaattcttcctcccaaagattttactgtgtttgttcacagtgggttctgtgaaaggattattayaagcccacaatccattatcctcaattctacaaatccaaaaaattctgaaaaccaaacattctttttgtaactcattcatcagcaaaaccagacctgaacc

SEQ ID NO: 512252 - DNA, 201 bp, Homo sapiens
gagctcagtaaatctacattttatacagataaggtgattatattataaagaattcagagaaaaagggagtagaggaagaatcaattatgcaaacatctcasggtaggtggaggaatgatttgttctgctcctgggaagatcagcttgtaattgacattatcagtgtgactctagcaaactttagttttaggagctagactt

SEQ ID NO: 512253 - DNA, 201 bp, Homo sapiens
gaaatgaatcaagtatttatggggattattttaggtgagggggctgtgagaggcttttattctttcattatgtgcctctgctgtccacatttcctactttyttttaaaagtaggcatttttttttgtgggaaatagagacggttttatttttactcaaccaaaatgaattttgagattttgatcaattcatttcatctctc

SEQ ID NO: 512254 - DNA, 201 bp, Homo sapiens
ccctagtttgacacaaccacattttgcctttacagaaccctattgttcgcaatgccctgttctgcctggagtcagcctggaatgtagcaaaggaggggacycatgggagccatgtctacaccaaggcattgctggcctatgctttttccctactgggaaagcaaaatcagaatagagaaatactgaactcacttgataagg

SEQ ID NO: 512255 - DNA, 201 bp, Homo sapiens
ttaatcattagtgagacaccaccatgtagaatggtgccacacaatttggggcaaatgatacatagctcatacagatggagggtacaaggaatcatagtaarctatatgactgcaataaggtttgcttgcctgtgattgtgcaggctaacgtatatttctcttcgtttccagtgctgcccaagtttgaagttacggtcaatg

SEQ ID NO: 512256 - DNA, 201 bp, Homo sapiens
gtgtctcttcaagccttccagcctttcttcctagaactcacccttccttattctgtggtgcgaggagaagccttcacactcaaagccactgtgtttaactrcttgtccacctgcattcgggtaaggacacttctctggaagtgaatgagaatagaagatagtcaccattcattaccaggtctcctaggtaacccaggaaat

SEQ ID NO: 512257 - DNA, 201 bp, Homo sapiens
gggctgggagtgaaggggatgacccatcaggactgttccctgcctgcagctcccccggggaaaagaccctgccaggctttggagccagaccaggaggcttygtggccaatgccagcagcaggggtccaggtgacatcacagggaagatcaagagggtgtggaggggcatccaagcttccggagggggcaggagacaccagc

SEQ ID NO: 512258 - DNA, 201 bp, Homo sapiens
atagaaagaaaagctaagatcagggaaggagagaccaaggcaggctttttcattagcaatggtgttgagcaggcagtttgggtaatttcttttctttttttgagatagagtttcactcttgttacccaggctggagtgcagtggtgcgtgctcggctcactgcaacctctgcctcctgggttcaagtgattctcctgcctc

SEQ ID NO: 512259 - DNA, 201 bp, Homo sapiens
acgcgcctcctccaactcacgcctcaggagagaatgggttaaggtgccatcaacctgaccacggtggggggcatcccccaaactacagtgtgatgaggacscccctcatggcctagaccacagtgagagccaagagcggctttctggccctgcagggccctcacctgggctgcagggatggcaaggcggctcctgtaatag

SEQ ID NO: 512260 - DNA, 201 bp, Homo sapiens
tagaaagaaaagctaagatcagggaaggagagaccaaggcaggctttttcattagcaatggtgttgagcaggcagtttgggtaatttcttttcttttttttagatagagtttcactcttgttacccaggctggagtgcagtggtgcgtgctcggctcactgcaacctctgcctcctgggttcaagtgattctcctgcctca

SEQ ID NO: 512261 - DNA, 201 bp, Homo sapiens
tgaggcaggagaatcgcttgaacccgggaggtggaggttgcagtgagccgagatcatgccactttactccagcgtgggtgacacaacgagactctgtctcaaaaaaaaaaaaaaaattaatactactcagtattgttgtgactgtatggaaatagggacacacacagtcctagagaaaatagaatgtggataactttctca

SEQ ID NO: 512262 - DNA, 201 bp, Homo sapiens
agaaagaaaagctaagatcagggaaggagagaccaaggcaggctttttcattagcaatggtgttgagcaggcagtttgggtaatttcttttctttttttgtgatagagtttcactcttgttacccaggctggagtgcagtggtgcgtgctcggctcactgcaacctctgcctcctgggttcaagtgattctcctgcctcag

SEQ ID NO: 512263 - DNA, 201 bp, Homo sapiens
aagaatgtacaataatgccactgaagcaatttagaacttacaatgcccatagcatagaatctattatatatagatatctaattatatctatctaaacacayacatatacagatgctcctcaactgatgatgagattatgtcctagtaaacccatcatagtttgaaaaatatcataagtcaaaaatacatttaatacgccta

SEQ ID NO: 512264 - DNA, 201 bp, Homo sapiens
caccttcttccttgttgcgagtggctgcgcagtggttgatttccatgtcttattgtctgctgggctcagccatcatgtggtggtgaccccactgccatcamagccaccgtttgtggagcatctctcataggccaggcgtggagcggggtgctttaccacctcactgaatttccgatacaaccccaggaggtgggagctcct

SEQ ID NO: 512265 - DNA, 201 bp, Homo sapiens
tgcagtgagccgaaatcacaccactgcaatccagtctgggcaacagagcgagacactgtctcaaacaaaacaaaaacaaaaacaacaacaacaaaaaaacytaacttaaaaatactaaatattcagtgaaaactagagtcatgctaaaccaaaacagtgttttagctccaggtattaatggccacttctggagccataagc

SEQ ID NO: 512266 - DNA, 201 bp, Homo sapiens
gctgagccctgagcccaggagatagagctgttggctaagcagcttagtgtgtgcccagatcacagcaggagaagcagccaggcctctgcccctccactctraccctccctggctccctttccatgggctggccttgcatgggtttggctgaggagggcagcgaaggccccgttggtttcctgtttcctctgaagtgagctg

SEQ ID NO: 512267 - DNA, 201 bp, Homo sapiens
  misc_feature (1)...(201): n = A,T,C or G
ctggttaccttactctgacagtgatgcagccagaggcactaaagggttagcccaagggccccagccctgcatttggcccatgaaggggcttacgatcctcnttttctgggtttgggtgatgttagaggaaagtgccccagcccagcaccattcctttttgcttctggtttggagctctagaccagagccttagttctggtc

SEQ ID NO: 512268 - DNA, 201 bp, Homo sapiens
tggtctcgatctcctgacctcgtgatctgcctgccttggcctcccaaagtgctaggattactggcgtgagccactgcgcctggcgctatagcttgtttttwtaaataaagttttattggaacatagctgcatccgttagtttacatactccctatagctgctttcttactacaacaaagtgttgattagttgcaacggaga

SEQ ID NO: 512269 - DNA, 201 bp, Homo sapiens
ggaaaaaaagtaaacttccttaatttacattcactgactactcagattgaacatctcttcccatttactgatttacttgcaaatcctctctgactagttgstctttgtccttttttcctattgcattatgttgttttcaataaactcatcgtacctatattttaggaataataattgtttgtaagtcatccacatcgcact

SEQ ID NO: 512270 - DNA, 201 bp, Homo sapiens
aacatctcttcccatttactgatttacttgcaaatcctctctgactagttggtctttgtccttttttcctattgcattatgttgttttcaataaactcatygtacctatattttaggaataataattgtttgtaagtcatccacatcgcactatttcttccaaactgttctttttcatttctaaaaccaaataagtcagtc

SEQ ID NO: 512271 - DNA, 201 bp, Homo sapiens
ttcacaactgtctggtttagaatcctgaatagtttgattagcatcttttaatactgtcttctgagtcttacgtgcctgtgaaagcaaagcgagaagtagcrtattttcattttgaatttttgatttatattcctcagtggacatggacttgggaacagaaattgtttcacaaactgctggtgaattttgctcaactttggt

SEQ ID NO: 512272 - DNA, 201 bp, Homo sapiens
agattgttatgggtattggacatctggactcttggctgtagtaggagtgtgtccttgtaggtatctttaggctgtttcttccactgtaaacagcccatgamtgtgggtcgtgaccagcagagaatgggctttactatttctcaagatggagctgaacttaaaatggtgctactctggccctcctaggctcctggttcccta

SEQ ID NO: 512273 - DNA, 201 bp, Homo sapiens
ccacaggagctttgccttggttcctctgcgtcctccacggtgccatgggaggctccctggcagggtgtggggcaaggcaatgagtgaagttgggatgagtragttaaggcccatggggtactcaggacaggacttcaggtttgattcaggagggtgagggaactgtgattgggtcctgagcagggcagggatgggtcagaa

SEQ ID NO: 512274 - DNA, 201 bp, Homo sapiens
caggccagatctgacccactggcatttattacattttctgctaaaggagccactctcaacctggaagagaggagatctgtggcaatcagatccagagagartgtggtctttgtacagactgataaacccacctacaagcctggacagaaaggtgagtgtacctaaatcaggttaccctcaactaatgtcacttatatgata

SEQ ID NO: 512275 - DNA, 201 bp, Homo sapiens
tcaggatagatagctaatgcatgggggacctaataaccaggtgatgggctgatacatgcagcaaaccaccatggcacacctatgtaacaaacctgcacatyctgcacatgtaccccagaacttaaaataaaataaaatttaaaaaataaataaataaatagataaataataaaagtttttttaaaaactgtgcaaaaaaag

SEQ ID NO: 512276 - DNA, 201 bp, Homo sapiens
tatttaaaattttttaaattatactttaagttctagggtacatgtgcacaacatgcaggtttgttacaaatgtatacatgtgccacgttgctgtgctgcayccattaacttgtcatttacattaggtatatctcctaatgctatccctccccactgcccccaccccacgacaggccccagtgtgggatgttccccacccgg

SEQ ID NO: 512277 - DNA, 201 bp, Homo sapiens
atttttgtgctgatctgtgacagaacctccattgacttagtccattgacttttagaataaaactgattgcaccaattaatacatattgttatgaaaacacmtttatggatgaaaacgcttactatcatcagtttttctctaatttagacttcttcctttcccaggcagtatatggtgctggtcccctccctgctccacact

SEQ ID NO: 512278 - DNA, 201 bp, Homo sapiens
ttctcccattctgtcagttgcctgttcactctgatggtagtttcttttgctgtgcagaagctctttagtttaattagatcccatttgtcaattttggcttktgttgccattgcttttggtgttttagacatgaagtccttgcctatgcctatgtcctgaatggtattgcctaggttttcttctagggtttttatggcttta

SEQ ID NO: 512279 - DNA, 201 bp, Homo sapiens
gcttgtgttgccattgcttttggtgttttagacatgaagtccttgcctatgcctatgtcctgaatggtattgcctaggttttcttctagggtttttatggytttaggtctaacatttaagtctttaataatctgtcttgaattaatttttgtataaggtgtaaggaagggatccagtttcagctttctacatatggctagc

SEQ ID NO: 512280 - DNA, 201 bp, Homo sapiens
gggtatatacccaaaggattataaatcattctactataaagacacctgcacacgtacgtttattgcagcactattcacaataacaaagacttggaaccaayccaaatgcccatcaatgttagactgggtaaagaaaatggggcacatacacaccatggaatactatgcagccataaaaaagaatgagttcatgtcctttgc

SEQ ID NO: 512281 - DNA, 201 bp, Homo sapiens
ggctttcattttcttggacaagccatgtgcttttctggctccgaagcctcccacaggttttcccttctgcccataacaatcttcgttcccatttgctaccrcagttcccaacctgcctgcacctcattttccgagctgattcctcctcagcattcatctcttggcttaaatgaaactttctaatctcctagacaattccag

SEQ ID NO: 512282 - DNA, 201 bp, Homo sapiens
aggccttgcttataccttgcatatcaaacacacctttcagaaaaccagacaagcactgggagactcttaatgcctttgtgtaactttgtttcactgaactwaataaatttagatgtaattcagcatttgcaaatatgaataaaaagttgtttattggtcttagaaaactgttttggaatgtggaacattaaattgctttat

SEQ ID NO: 512283 - DNA, 201 bp, Homo sapiens
cccatctttggtctgacccaccaccccacttaaaagttccacagtctttgggttaggctggctttctccagaaatgttcaagtatggagtgataaagtcaytgggagacatgaaaaattcaccatttttctcaatgcttgcatacttcaaaaatattgttataagctcagttggatctgctctctcagttaaagccacctt

SEQ ID NO: 512284 - DNA, 201 bp, Homo sapiens
ctacatcaggaagtccaccagaggcatgctggataccaccagcagcttcacatctccattggcagtgcttggcagggcataagccttgctagacacagctyctggtctgcaccaccatggctcctgtgccgccagccacaggtccagacctagacccctctgttgcccttgaggggctgaccttattctccacagtgatgc

SEQ ID NO: 512285 - DNA, 201 bp, Homo sapiens
tttcttaggcaatttttctcttgggggaggaaacaatggactctttcaatcttctcttaccaacaaagggccctagaagaaaaaacagtcctttcaatcamctcctttatgacttcttgatcatgatgagtgggccttgcgggtggggggagtgagggccaggaaagggagaggtgacaggcaactcacctctttgagctg

SEQ ID NO: 512286 - DNA, 201 bp, Homo sapiens
taggattgatatcattgaggcaacgacatttgggcaaagtcttgacggaggttatggagttggccacatagacatctaaggaaaatctaggcctggcagtyagatcagctagaaaaaaacaaggcccataaagttaaagtgtgtcttgtgtgttcaagaaacaacaattaagttagcatggcactagagcagacggagcaa

SEQ ID NO: 512287 - DNA, 201 bp, Homo sapiens
tttttgaggttcatctatgttttagcatctttcatacttcattcctttttatgactaaataatactcgattttatggatataccacattttgtttatccaytcatcagttgattaacatttcagttgtttcctttttttgctatcttatatgaacatatgttttcaattccctaaggtacgtaccaaggagtgaaattgct

SEQ ID NO: 512288 - DNA, 201 bp, Homo sapiens
tattatgacaggaaaaaaactcaagtattttggcttgaaaatataaactataaacatataggaaaaattttggtttaaaactaagcacaaattacgctggttttttttaagaaaaggaacaattatatttttcataatactaaaaatgaaataatgtaaagtgataaaaagcaattaattcctacttaggtaatatttcat

SEQ ID NO: 512289 - DNA, 201 bp, Homo sapiens
ccttccaattctaccaaggttgatattgagagcaggcttcttgccagcagcattaaacccaacaatctatacttcctaggacaatctctacctttgatttrtgtaaaataacacttttctgtttttcttctgaggcccctcctccacagaccagtttctggatatcttcttctttatcagatctctaaatgttgagattct

SEQ ID NO: 512290 - DNA, 201 bp, Homo sapiens
cccgctacctaggaggctgaggcaggagaatcactggagcctcggaggcagaggctgcagtgaactgagatcgcgccactgcactgcagcctggatgacasagcaagagtctgtctcaaaaaaaaaaaaaagaattagatcacagccccaataagatttctggtaacatctaattagacaattgagttcccttgctggagc

SEQ ID NO: 512291 - DNA, 201 bp, Homo sapiens
cagtgtggcatttgcacaagaatagaccaacaaaccaatgtaacagaatagtccaaaaatagacccatgcatatataaaaacttgatttatcacaaaacasacattggaaattagtgcaggaaagatcaactgttcagtaacctgtggtattgagatcactggctaattttattggggggtggggtggaatcatgggaaaa

SEQ ID NO: 512292 - DNA, 201 bp, Homo sapiens
gtccaaaaatagacccatgcatatataaaaacttgatttatcacaaaacacacattggaaattagtgcaggaaagatcaactgttcagtaacctgtggtaytgagatcactggctaattttattggggggtggggtggaatcatgggaaaaaatttaaattagatttctacctcacaccaaacacaaaaatcaattccagg

SEQ ID NO: 512293 - DNA, 201 bp, Homo sapiens
aacctgtggtattgagatcactggctaattttattggggggtggggtggaatcatgggaaaaaatttaaattagatttctacctcacaccaaacacaaaamtcaattccagggagaattaaagatttaaatataaaagtcaaaccagaagatattcagaagacaatataggtgcatgtttttatgacttcatggaaaggat

SEQ ID NO: 512294 - DNA, 201 bp, Homo sapiens
caaaccagaagatattcagaagacaatataggtgcatgtttttatgacttcatggaaaggatttcttaagaatagaaaaatacaacctagaaacacaaaasagtgataaatcaactaaattaaaattataaacttctcttcttcaaaggataccacagaaagagtaaaaagacaacccatggactaggaaaagatatttcc

SEQ ID NO: 512295 - DNA, 201 bp, Homo sapiens
ctagcccgccatgatagcgagtgtcttcaaagagagctgcaggcatgaccaacctgcgttcactctcattctaatcttaagatttcatcctttctacacamactcggtgtgaacagtctgcaaaccgtggtgacagcccattggtggggtatgaagtctgagaagaggtatacaatttttcccaccacatccagttccccc

SEQ ID NO: 512296 - DNA, 201 bp, Homo sapiens
ataacagtctagcagctctcactgatgcttgaaataattcaattcgcttaataaggaaaaataaaattttaaaatatcttgtgaaaaaaagatgtaatgcrttaaagaaaacttgaaaaacattgttacttgctttatgttctcctttttttttttttttttttttttttgagacggagtctcgctctgtcgcccaggctg

SEQ ID NO: 512297 - DNA, 201 bp, Homo sapiens
aatacctggcatatagatgatgctctctaaagatttaataaataaatgaataacagacattcattccattttctcaggaacttgaatgacaactgtagcamagaaccagtaatacaatgttgagactgtctttatgtcccctttggctagggtctactggatagctcgcattatggagaataaaggacagagagcacaaga

SEQ ID NO: 512298 - DNA, 201 bp, Homo sapiens
aaggggcacaaggcctgtgaaaacatggactgcaagcaagtggtcttactgcatatggagtgatgataaggaatgaggcagacaagggccaaatcatgaaragcctcatgtgccttgctgaggcctgtcttaaatattaaaataacttcttttatacattcatcactttgagtatcaattataaaaagactttcctaaaat

SEQ ID NO: 512299 - DNA, 201 bp, Homo sapiens
ttggccagagattccaaaaatttttgatatgggactgtctttccccattactcttctctcttctctcttctctcctccctccctccctccctccttccttmcttcctcccttcctccctctctcccttccctcccctcccctccccttccctctttctctcactctttctctctttctccttttctttctcagaatctcgc

SEQ ID NO: 512300 - DNA, 201 bp, Homo sapiens
ctttttaaatgatacagtcaagagtttattccagagttgagaacctaataaatgttcttttatattgtataccatgctttttttagaaggcaaaaaaaaamtccaaaagcttccattatcacacttcctcttttattttttatttttatttttttttattgagacggagtcttgctctgtcacccaggctggagtgcagtg

SEQ ID NO: 512301 - DNA, 201 bp, Homo sapiens
ggttatctatttaaaatcatgctttatagtagtattatacagacatggaaaaatgttcagctacaggtcaacttgtcacgttcggtgactactacctcctytaaccctttgggtgtgttgcagcttcccaaggtggtttaccgtacctattggctttctttaatcctacttttttggtaaatattcccttcattaaatgct

SEQ ID NO: 512302 - DNA, 201 bp, Homo sapiens
atgaatttaggactgcagagtacagcaaattttagttcctgatatggccatgctttcctaagaagtttccaaaggttattgactctcagcttagccttttytactgcacaatgtgatagatgctgtaaatcagcgtttagaggtgtttatctaactctccctagtgggagatggggaaattttcactgagaatgtaactct

SEQ ID NO: 512303 - DNA, 201 bp, Homo sapiens
ttttttttttctttcttttttttccctttcctttctttcagatacagtctcactctgtcacccaggctggagtgcagcggtgccatcttggctcactgcarcctcctccacctcccgggttcaggcgattctcctgcctcagcctcccgcatagctgggattacaagcacccaccaccatgcccagctaatttttttgtat

SEQ ID NO: 512304 - DNA, 201 bp, Homo sapiens
tgtaaatattgccttatttggaaaaaggatttttgcagatgtgatagggatcttgaaataggagattgtcctggatcacatctacgtggaccctaaatgcmatcatatgtattctttcccaacactttgggaggccgaagtgggcagatcacttgagatcaggagtttgaggccaacctggccaacatagcaaaaccccgt

SEQ ID NO: 512305 - DNA, 201 bp, Homo sapiens
attagctggatgtggaggcacatgccagcaattccatctgcttggaaggctgaggcaggaggattgcttgagccctggaggttgaggctacagtgagctgygcttgtgccactgcactgcagcatgggtgacagagtgaaaccctgtctcaaaaataaaaattaaaattaaaaatgtgacattgataatatcttctaaaat

SEQ ID NO: 512306 - DNA, 201 bp, Homo sapiens
cagagaaaaaggaaaggtaattagtgaagatctaccttaggggtaaaaagccagcttccctcatggtaggctaacacagactttgggggaaaatcccagaygccaaaaatttactctttggggcggttgtccactcgtctcttccaggacacagtggtggctctccatgccctgtccaggtatggagcagccactttcacc

SEQ ID NO: 512307 - DNA, 201 bp, Homo sapiens
cagatctcattgccagagctccctggagaatatgtcataacagtaactggggaaagatgtgtgtatcttcaggtagggctccaagcttatatgggtgagartcaactttaaacttgccaattgaaatggaaactctgttccttccttcctgggaaagtaaaaggcacctctggagacgttaagtaatgaggaagtgagggg

SEQ ID NO: 512308 - DNA, 201 bp, Homo sapiens
tagtatcacacacataagcattttatatgtgctttttaaaagttttaaaagaaaaacaaggataaaatttaggtagaaagaagaaaaaaagataatcagtrgagatctctctgaagaagtgatattcattttattatctatgaggaacaaaaaggagtcggatatacaaaatgtgggggagaagcttttcagggaaaggaa

SEQ ID NO: 512309 - DNA, 201 bp, Homo sapiens
gtaagattatgtaagccttagattttcttctttattgttatagcatcacaaaaaataaaaatgagaagaaaagaagagaattacaattttaatggtcagtrctcaatacttggtaggtacatgtactaagtgcagggaaggcaaaggggacactcattacactctaattcactcagattcagagaaacttccaggccagag

SEQ ID NO: 512310 - DNA, 201 bp, Homo sapiens
cattactgagctgctgctggagcatgaactggtggaaatactgagctgcattgggctgccgctgcagtgcttgcagagcctaggaaaagagaggataaaayatttagaatggaccactcctagctcctattctatgtaaatcactgtatttgtgtgaaagggggccatgggaaggacagaaaccagaggagatgggagttt

SEQ ID NO: 512311 - DNA, 201 bp, Homo sapiens
ccagagattccaaaaatttttgatatgggactgtctttccccattactcttctctcttctctcttctctcctccctccctccctccctccttccttccttmctcccttcctccctctctcccttccctcccctcccctccccttccctctttctctcactctttctctctttctccttttctttctcagaatctcgctgtg

SEQ ID NO: 512312 - DNA, 201 bp, Homo sapiens
ttggattcatttcacaactgtctggtttagaatcctgaatagtttgattagcatcttttaatactgtcttctgagtcttacgtgcctgtgaaagcaaagcragaagtagcatattttcattttgaatttttgatttatattcctcagtggacatggacttgggaacagaaattgtttcacaaactgctggtgaattttgct

SEQ ID NO: 512313 - DNA, 201 bp, Homo sapiens
aatgctagctcttgcctgttgataatctctactcgttgactgcccattgaatggtggccattcatcaacttgctaccaacagttacagaaagtgttggacrctcctttgtgcttattgttatgctaaatgtgcccaagggatgcctcggcaagaggacggaagtctttaagagccatcagcccctgattatggccgcctca

SEQ ID NO: 512314 - DNA, 201 bp, Homo sapiens
cggcaagaggacggaagtctttaagagccatcagcccctgattatggccgcctcatgtccaacgcttggaatggaggggaaaactattccctcagaaactstttcctcatcaagatgaggactgcatgcttgcccttctctgagggcagccttagattttggtggctttcctttcccatcctggtactaggcacctgtaga

SEQ ID NO: 512315 - DNA, 201 bp, Homo sapiens
ctgcccagggatgggatgaggagaaggcaggaaggcatatcctggggaagggagtgctgagttcgttgagagtgggtgcaggttctccaagtggctcgcayggcccagggaggggaggatgtctctcaggaatcctgggcctgtgtcccagctccctcacacctgagttccaggtcaccacatccatctcccaccgtgtgc

SEQ ID NO: 512316 - DNA, 201 bp, Homo sapiens
tccaagtggctcgcatggcccagggaggggaggatgtctctcaggaatcctgggcctgtgtcccagctccctcacacctgagttccaggtcaccacatccrtctcccaccgtgtgctccccattgtgctggaccctgagagacaccaaagatgtggccaacacggtgtccttaggagcttagaggccggaatgggagagca

SEQ ID NO: 512317 - DNA, 201 bp, Homo sapiens
aggtcaccacatccatctcccaccgtgtgctccccattgtgctggaccctgagagacaccaaagatgtggccaacacggtgtccttaggagcttagaggcyggaatgggagagcacagggcgaggctgattcttcattgcatagcatgaatcgcacaggcttccaggggtctagaggggagagaaatcactaaaaattggt

SEQ ID NO: 512318 - DNA, 201 bp, Homo sapiens
catctgttctctaactttaactgaagttttctaattctctccagcttgaaagatctagctctgtgagccggacagaagtgagcaacaaccatgtcctcatytatgtggaacaggtgagggctctgacatcctggctgagactacatatgggtcgtctttctaagtgagtctctttactagaatagtcggtaacatgaggaa

SEQ ID NO: 512319 - DNA, 201 bp, Homo sapiens
tctcatccaggggattgtccttttacatttttaaatggtcctttagccgggcgcagtggctcatgcctgtaatcccagaactttgggaggctgaggtgggyggatcacttgaggccaggagttggagatgagcctggccaacatgatgaaaccctgtctctacaaaaataaaaaaataagccggatgtgatggtgcatgcc

SEQ ID NO: 512320 - DNA, 201 bp, Homo sapiens
cattcacatgggcccagagagttaatctcataacaagggactacaaaagaatagggttggctcagttgtttagaagaaaatctgtgaaaatttgttgactktaaatagagttcccaaggatgcattctaaaacccatcttgacatccacaaatgtctggtcacctaaagacactggtgaaaaagagtcaaagaacaataag

SEQ ID NO: 512321 - DNA, 201 bp, Homo sapiens
cgtttcttccttcacccaacgttatctttcagatgagtctgtggttgctgagtatatcgccccctgcagcacaggtaagagttcaccacttatgaccagtrctagatggcattaacccactctccaagggcccctgcaatttaaattctctacaaggcttttcctacatctgagacaatccacatggcatgtcctcacacc

SEQ ID NO: 512322 - DNA, 201 bp, Homo sapiens
tcagaggtggcattccttagcatccagataaaggggcctacgcaagatttcaggaagaggaacacagttctggtactgaacacccaaagtctggtctttgkccagacagacaaacccatgtataaaccaggacagacaggtaagtagggaaattccactgtttggggcaacactgagaagggccacctgaacagccaaagt

SEQ ID NO: 512323 - DNA, 201 bp, Homo sapiens
caaaccatatcagtggtcaccttgtctaaacaaggatgctgttgagctcattatccattagctcacacggtgtctctttttacaagaacattttgtgttcygcagaataaatctatgtctggtcttactacctagaatcgttggcttcttctgagtaattggcctgcttttatcttatggatactgtaaattgtatgactg

SEQ ID NO: 512324 - DNA, 201 bp, Homo sapiens
ctctctatatattactttcttttgcacaacaaaagaattaggatccatgacctctgatattactccatgattctctgtgttgcttttcataatgtaagcawgcacatgttaaataaacaccataatcttttaaatttcctaagggacattatcacattttaaaatctgttaaaaagaaagagatttcctttgttctctcca

SEQ ID NO: 512325 - DNA, 201 bp, Homo sapiens
ttgtggcacggtaacttgttagcttgcaagtagcagaaaatctcagacttttcagtttctgacttcacaagaaggaattaagaaaagtcaggaaaaatgtraataaactgaggtatctgtcccatccgaaagtgaccgggtgactctcttagtttaagaggatttatggaactgaaggcagaaatctgagaggccaggtag

SEQ ID NO: 512326 - DNA, 201 bp, Homo sapiens
acagcttttatctgaacatcagtctttgagggacagttgaagcactggtatatgtgtgagcgagagattggtgtttttttcaaatgtagaagaggtaactkcttacattttttgctcttaaaagtatattatttcataatattcaaatttgccttgggatttaaagtataaattgtcattttagtaacacaattgaatatt

SEQ ID NO: 512327 - DNA, 201 bp, Homo sapiens
tgcgccaccacccccagctaatttttgtatttttagtagagacaaggttttgctatgttggccaggctggtctcgaactcctgacctcaggtgatccaccygcctcggcctcccaaagtgctgaaattacaggtgtgagccaccgtgcctggccacaacctataatcatatccttataaatgtattacgtagaaataatcc

SEQ ID NO: 512328 - DNA, 201 bp, Homo sapiens
catggttggttggtgtgtggtcaagggaacaataaaacaaaaacagcagctcagtggctgtcgacatgttaatggcctttgaaaataaagtatacaaacartgagtggcaggaaggcgaaaagaaagctttctcatcaccaagctcaaactactctgcattataattacacaatataaaaagatggaggatcatgcctgta

SEQ ID NO: 512329 - DNA, 201 bp, Homo sapiens
gagacaccaaagatgtggccaacacggtgtccttaggagcttagaggccggaatgggagagcacagggcgaggctgattcttcattgcatagcatgaatcrcacaggcttccaggggtctagaggggagagaaatcactaaaaattggtggcaccctgtcagtcggaactctccagaccaggttgagcaaaaagtaactaa

SEQ ID NO: 512330 - DNA, 201 bp, Homo sapiens
gtctataagatgagagaacaaggccgggcacggtggctcacacctgtaatcccagcactttgggaggccgaggtgggtgtattgcttgagctcaagagttygagaccagcctgggcaacatggcgacaccccatctctactaaaagtacaaaacaaaataaaattgaaaaatgagagaacaagaagtacctacttcatagg

SEQ ID NO: 512331 - DNA, 201 bp, Homo sapiens
gcctctaaaaaaatccccaaaactacctaaatggagttatagaagaaataactgaatatggaaatgttgacactaatgctgtttgagggactttagatgtkcacccaaagaaatttagtggaggcaaatttttcaatctattaaatgaaaaagtacagtatggccgggtgtggtggctcatgcctgtaatcccagcgcttt

SEQ ID NO: 512332 - DNA, 201 bp, Homo sapiens
aaggttctctaagccgtgttatcacttgagagttgcatgttttcagtttaaagacaaatttaagaccattctattgtaataaccgaaaattaaatggcacmctgataaaaagagaaccagcagcgttttatttaccttgaaaggtggtaatttaagaaaaacaggggagattttaacaggatgaagaggaatataaaaatt

SEQ ID NO: 512333 - DNA, 201 bp, Homo sapiens
gcttacacgacgtcatccaggcctggtttgctttccttccatgtcagcttgcttcttttgggctggctacattcccagacaggccttgctctcgtggtggygaggtgacaaccagtggggctggactcatgacccagggttaggtctggcaggaaagaatgctctcctttgtccccacttcctccagaagccacactcact

SEQ ID NO: 512334 - DNA, 201 bp, Homo sapiens
gtgttaccggaaaagggatctctatccagaccccaagagaacgttcttggatctcgagcaggagggacttcaaaacgagtcacagagtgcagtgaaagaarcaacgttattagaaactacactgttagagtagggcatcctcagaaagcaagaggaggaacgcctcgactttgttttttgtttttcttctctagagatctt

SEQ ID NO: 512335 - DNA, 201 bp, Homo sapiens
cgtgtctgtcccagaatccatcactgaggctggggactatgacacactgattggcttagactgaggagctctgggggcagtctgatctgatgctcatgaaytgagatggattccccagaggaaacagggccattgcttgagtaaggaggaaatgggtgctggagaggaaaaccatgtgcctactccacacagggcaggctc

SEQ ID NO: 512336 - DNA, 201 bp, Homo sapiens
attggcttagactgaggagctctgggggcagtctgatctgatgctcatgaattgagatggattccccagaggaaacagggccattgcttgagtaaggaggmaatgggtgctggagaggaaaaccatgtgcctactccacacagggcaggctcctggaggagggggctaaggtagcgaggctggtgtgcaggtcccggggtg

SEQ ID NO: 512337 - DNA, 201 bp, Homo sapiens
gccccctgcctgtggcaatggaatgggcgagtgtgtgggcttttcatttcccatgggctttttcaatgggactgtgaccagtttagaacctccccctttamatgtgcttcacctgctcggaaaccacctgcacagaagagacaggtgggtagaggagagactgtctctctcctccccaccaccccatctcatgccccagac

SEQ ID NO: 512338 - DNA, 201 bp, Homo sapiens
atcttattgtccttccaatgtacattttattggtaactaatgagatcgaaccttctgactcaaaccactacatttatttatttattatttctatttcttcyctttccatcttttgcaatttttccattgcggtctttgtgtttcctttaatctatttaaataagatgatggactcttattttctgtctccagtcatctgct

SEQ ID NO: 512339 - DNA, 201 bp, Homo sapiens
gaacaatggcctaataacaataaaagtacctagagttgttatagaaaaagaaattttataataaagtgaatgtgagagtcaatgatgtatcctataaatamttataagtagtgttacttttgatagtcaaaccaggaattctggatcctagaggggagtaagggagaacaactgatccggtccaggtggagaaagctggag

SEQ ID NO: 512340 - DNA, 201 bp, Homo sapiens
tagaatgaacaggatttggtcgctgactgatgtgataatacaagaaaacaaagagtaaggaacaatggcctaataacaataaaagtacctagagttgttakagaaaaagaaattttataataaagtgaatgtgagagtcaatgatgtatcctataaataattataagtagtgttacttttgatagtcaaaccaggaattct

SEQ ID NO: 512341 - DNA, 201 bp, Homo sapiens
cctttatatgctctaccccagcaatgacctcttctatcatcatgcctgttgattctattttatttatcccctcatctccaacgcctaccacacatactcgyatttaaatatatgactatactcttacgcttgctgttctctctctagttttcttctcactccaaatcaaatccactcgtccaagactctgctcaagtatcc

SEQ ID NO: 512342 - DNA, 201 bp, Homo sapiens
aattatctcgtgttcttaattgtgacaagcaggaggtctgtgaggaattcagtcaacaggttagtaggcggtattctccctcagtgctatcactgtttacraccagtgagactccattttactaactagaaagagggcatcaggacaagcttgtcgcaaaatatcccccaccaaaaaacgaatttctgttcttagtcaaca

SEQ ID NO: 512343 - DNA, 201 bp, Homo sapiens
aaacagaagatattaaacagctgagccctgcctcttccacaccaacccaggagcctcatattctccacatgtaatgaaccatccagaagaaaacctagaawgcatagaaaactacagattgatgtcaaagagtcacacgtcaaagaaatagagaaaattaggattttagaacaagtacttatatatagaaagtaggtaggc

SEQ ID NO: 512344 - DNA, 201 bp, Homo sapiens
cccaggacttgcaactgtgagcctgtgtagaaaattatctcgtgttcttaattgtgacaagcaggaggtctgtgaggaattcagtcaacaggttagtaggyggtattctccctcagtgctatcactgtttacaaccagtgagactccattttactaactagaaagagggcatcaggacaagcttgtcgcaaaatatccccc

SEQ ID NO: 512345 - DNA, 201 bp, Homo sapiens
ctgttacaaagactgtttgcagatgagtaattatttttgttgccatggaaccccagctgatgctatgggcatggaaccagcttgcacagatcatttttatyaaaccaagtcaaaccaatcagtatagctactaaatcatttcagtttaaaacgctttctctcattgctggtggagggaagttagatggtttggcactgttt

SEQ ID NO: 512346 - DNA, 201 bp, Homo sapiens
cctgcctcttccacaccaacccaggagcctcatattctccacatgtaatgaaccatccagaagaaaacctagaatgcatagaaaactacagattgatgtcmaagagtcacacgtcaaagaaatagagaaaattaggattttagaacaagtacttatatatagaaagtaggtaggctgagcgataacacagaatttgtatac

SEQ ID NO: 512347 - DNA, 201 bp, Homo sapiens
gtaggcaactctaaagagggacagttctgtggaggagtggtagtggaaaatgcaaacagccattctcaattcctgatttatttctcatgtaccagatacayttatgggaagcctgtcccaggacttgcaactgtgagcctgtgtagaaaattatctcgtgttcttaattgtgacaagcaggaggtctgtgaggaattcagt

SEQ ID NO: 512348 - DNA, 201 bp, Homo sapiens
atctgatactggcaaagaaagaaaaccaaaatatatttccttgccataccttgaaattgccctgcaaagtctcttgtgggaaaaatccacattctgtagaraatcccctttccccgctttgttttccttccttcctttccagatccaggagataatcagctaagagccaggcacccttctaagtgcaataagaaacatttt

SEQ ID NO: 512349 - DNA, 201 bp, Homo sapiens
agataggtcagtgatagcaaggtatgcatctttcttgtacgtgtgttttcaattctatgcagcattttatttctatatgattaagtcaatttatatttcaycatttatataaggaatggaaaacctgagttaactggaatcaaatttccaggttgttccagagacactgaattggtagttcctaggctgttcatctcttaa

SEQ ID NO: 512350 - DNA, 201 bp, Homo sapiens
ctctacttacctgcacatagacacagccctggcctgaggcctccaacgtgtacattccagggacattgggcagggtatcctgctgaaataccaatctgttractgactgtatgttgaatgtgcgctggaaattctcagtggattttacaaccaggttgatctcctcagatggcacgtaggcggtagtggcatatttggcaa

SEQ ID NO: 512351 - DNA, 201 bp, Homo sapiens
aggataaaatgttggaaggtgatccaaacttagaaatgaggatgacaatttgccaaagcatagaaaagattcttgctcagtgtcctaagtttttttttttkttttttttttgagatggagtctagctctgtcaccaggctgaagtgcagtggtgtgatttacgctcactgcaacctccgcctcccgggttcaagcgattct

SEQ ID NO: 512352 - DNA, 201 bp, Homo sapiens
ctattttataataaaatgtttactatctcatgtaatttattgactactgtactgaaaatgaaaaacagaacagttgtataggtactcaaagtatggtttcyactaaatggtattgctttaacaccattgttaaataaaaaagtctagacgaaccatcacaagtcaaggaccatctgtactctgaaaattataaagcattgt

SEQ ID NO: 512353 - DNA, 201 bp, Homo sapiens
cttctgccatgattgtgaggcctccctagtcatgtagaactgtgagtcaattaaacttcttttataaattacccggtctcgggtatgtctttattagcagygtgagaacagactaatacaccatgtgaaccatgaggataaagattcttagaggggacacactggttaaataggggagtgggtgtggatagagtattagtc

SEQ ID NO: 512354 - DNA, 201 bp, Homo sapiens
gattaatcaggactgttatatactgctggtaggaatttaaaatggaagaatggctgtggaaaacattttgagttttgctttgtggcaagccacaaagtagraaaaaaaaaatttgtgtaagtcatgtaacccaaagaagctcatatctagaatatataagaactcctaggccaggtgcaatggctcacgcctgtaaaccca

SEQ ID NO: 512355 - DNA, 201 bp, Homo sapiens
catgatctgggctcactgcaacctctgcctcccggtttcaagcaattctcttgcctcagcctccagagtagctgggattacaagtccatgccacattgccyggctaatttttgtatttttagtagagacagggtttcaccatattggtcaggctggtcttgaactcctgacctcaggtgatccacctgcctcggcctccca

SEQ ID NO: 512356 - DNA, 201 bp, Homo sapiens
atggctgtggaaaacattttgagttttgctttgtggcaagccacaaagtagaaaaaaaaaaatttgtgtaagtcatgtaacccaaagaagctcatatctasaatatataagaactcctaggccaggtgcaatggctcacgcctgtaaacccagcattttgggatgccaaggtgggcagatcacctgaggttgggagtttgg

SEQ ID NO: 512357 - DNA, 201 bp, Homo sapiens
tgatccacctgcctcggcctcccaaagtgctgggattacaggcgtgagccactgcacccggccgatctactactcttaacacatttatgtctgctgagaaygcataaatagtagtcaaacagagataggtggggtgtgctgatttgcaaccacatcttagagtactcctattttgctctggggagacttctgttccccact

SEQ ID NO: 512358 - DNA, 201 bp, Homo sapiens
aagaagcaaagattatgtccattgtttcaaagtgacttttcttgtaagatgagacaaggagatagaacaacagaaaaataactgattagttaacatcaggyttcttggggctactttttctgtgtgtgaaaggattaaagcagagggaaactcattatcgtgactcttgaagattaagtgacctgtttgggaatttggcta

SEQ ID NO: 512359 - DNA, 201 bp, Homo sapiens
aaggactcttaacgtggatgttagcaggctttgaaattccaactgctgttgtgtttgttctgagtttatcacactccttttcttttgcagtatctgaaggytgctttttccacagggaaagacaggttgctagcacttccatggaacagctactgtcacttttagcaggcattccttttgttgaggattcttgtccactgc

SEQ ID NO: 512360 - DNA, 201 bp, Homo sapiens
accaactataaatcacggttccatgacccccttcttgggggatttatttgctagagctgctcacagagctcagggaaatacatatctacatttatcagttyattataaagaatattattggcaggtgcctgtgatcccagttactcaggaggctgagacaggagaaacgcttgaacagggaggcagaggttgcagtgagcc

SEQ ID NO: 512361 - DNA, 201 bp, Homo sapiens
ataaaataaagtaaagtaaaaaggctgggcacggtggctcacgtctgtaaacccagaactttgagaggccaaggtgggcggatcatgaggtcaagagatcragaccatcctggccaacatggtgaaaccccatctctacaaaaaatacaaaaattagctgggcatggtggcacgtgcctgtagtcccagttactcaggagg

SEQ ID NO: 512362 - DNA, 201 bp, Homo sapiens
cctgtgcatgctgcctccctgacttcagcctctattgtctgtgaaaggcacacacttgtacacatgtgcagaggggacatcccctgttggtcctaattttyaccctcattaatatgatcatcatggcatctatattcccatttccccagccctccgtggtgccctgccaggcagcctggtccatgtccccgttctgctgcc

SEQ ID NO: 512363 - DNA, 201 bp, Homo sapiens
tgggcacgcatatgagtgattgggagcagcagccaaggcagtgagcagtacggggtgaggatctgcaggacaggaggttgctgcaggtgactcatcagggrgggcttcctggagtaagtggggctgtggctgaagcatgggtagaagtgaccaggagagggatggcagctgaggtagtgagatacatcaaaagagagggcc

SEQ ID NO: 512364 - DNA, 201 bp, Homo sapiens
tggggaaaaatgaattgttttctatgaaaaaatacagttgactctcttctaccatctaggtgtatagtcagctacattccagcgaactacatggctattayttcagaggacttaacttagaagatggccttaaagtgccgtgtcttgaagatggacatatcctttacaatggaatttattacacacctgcatgggctgact

SEQ ID NO: 512365 - DNA, 201 bp, Homo sapiens
ggtgactgcatctgtggcttacccgtagatacatctgggcctgagactggttgaggggtggggaggtggtgttccccagtagcacagattgggtcaaggtrgtagcactaggagagctcacactctgggatcggctgatgagctgggcggccgatgtggtggccagattgatctgtgtggtacagaaaggaaccaggacta

SEQ ID NO: 512366 - DNA, 201 bp, Homo sapiens
gccctctcacctggtaggtagtagtcatagaccttgatggttgctggtttcaagttggtgaccagcacactttggctgatggtgaaggtgtaagtctgagygttcttaatgagctgtggggaagacagatgaaacagtaccttagaagtaaaatgaaaattacactgtatgcaatgtggaataaaagacccttgctgtctt

SEQ ID NO: 512367 - DNA, 201 bp, Homo sapiens
taatctgaaactcttctattatctaatctttcacatgctagggattctaaggagttttgttgggtctaatgtctcttcctacaaagacagcaaattgttaytgaacttatgcaaatgactatattgccataaaagaagattaatcacaaatggtttccaaattctgaagggaccaggtagacagaaatgcaaatgtttcaa

SEQ ID NO: 512368 - DNA, 201 bp, Homo sapiens
atctgtggcttacccgtagatacatctgggcctgagactggttgaggggtggggaggtggtgttccccagtagcacagattgggtcaaggtggtagcactrggagagctcacactctgggatcggctgatgagctgggcggccgatgtggtggccagattgatctgtgtggtacagaaaggaaccaggactaaggatttgg

SEQ ID NO: 512369 - DNA, 201 bp, Homo sapiens
taaaaaatttcaattcttcatcagttgagtcccatgtaattaattcttgtttttcttgatgtcggattaggaatcttcatgaacactttagtttactcatyagagttctggaagtttttacctagtccaatggtatgatctcaaaaattataaaaaatctgtattcaagaatgcttgttatggttttttttcatgaatttc

SEQ ID NO: 512370 - DNA, 201 bp, Homo sapiens
cccatgcatggtttgtttatagagaaaaaaacagaagtgttatctttgcttataaattatatccatttagattttgctttgagagaggagtatttggactycaaggtctttcatttgtggcagccagattaaaatcggagaacaatttctgccaggcttctaggaactagtcagacaggtatgtgagggaagaaaccggag

SEQ ID NO: 512371 - DNA, 201 bp, Homo sapiens
gaatgcttgttatggttttttttcatgaatttccttgaagaagcagcaaatttggggctgcatgtcgtgttttatgcctgtaatcctagtactttgcaagrtcaaagcgggcagatcacttgagcccaggagttccagagcagcctgaacaacatagtgagacctcatttctacaaaaaaataaaaataaattagccagcc

SEQ ID NO: 512372 - DNA, 201 bp, Homo sapiens
gaatatataagaactcctaggccaggtgcaatggctcacgcctgtaaacccagcattttgggatgccaaggtgggcagatcacctgaggttgggagtttgrgaccagcctggccaacacagggaaaccccatctctactaaaaacacaaaaattagccgggtgtggtggcgcatgcctgtaatcccagctacaggctgagg

SEQ ID NO: 512373 - DNA, 201 bp, Homo sapiens
cctctttgagctgctccagctcctgtttgaggctgtcgtactcagcctccagttcatcatactgctgtttgagggtcagcttctcctccagcaccaccagyccgtactcggcagcctggatcttctcgtgggtggtctccgtgagctccttggttagcctctctatctcagtcttataatggtccaccgtctgcaatacct

SEQ ID NO: 512374 - DNA, 201 bp, Homo sapiens
tgctaaggagtagagtttaaccatatgacaactatatgaagtaatgtacatgttaattagcttgacttaaccattctacaatgaatatatatttcaaaacrttgtacatggtaaatatacacaattttttctgcttaaaataatttctaaagtaatttttaaacatcatttaaaaataaacaaaggtatagcagatggtaa

SEQ ID NO: 512375 - DNA, 201 bp, Homo sapiens
tgccatctgaacaggcttcagtccccatctccagtctcagggaaagagaatataaatatgttaatgatcctgtttaattcttgtctatttacatgaagttytgacaattctgatagggcgtgcttttctccagtagtaaagtgactagacagatttagcatggtccctagttcatagatctttcgtttcttccttcaccca

SEQ ID NO: 512376 - DNA, 201 bp, Homo sapiens
tgtaaccaccaggttaggtggtggaccagggtagggccactattcacttctttaaagttgtttctgcctggaacatccatactggttcagccagttttggrggaaaaccagagctgagtattcataatggtaaagctctcagaacatattttgaactcctccctttttttctggtctcattccaattcctgttctcattta

SEQ ID NO: 512377 - DNA, 201 bp, Homo sapiens
gtattttaagacccaagtggtttgcttcagggtttccctttaattaaagctggttccttgcttaaaggagaactcatttttttatttcatatttgtcttartcctgtattattctgtttcctcattattcattcattcattactaatcctacatgacatgtttatttttgccagatcactgtaatgaaacattaggacttt

SEQ ID NO: 512378 - DNA, 201 bp, Homo sapiens
tgggtgtggtggtgtgtgcctgtaatcccagctactatggaggctgaggcaggagaatcgtgtaagcctgggaggcagaggttgcagtgagctgagatcaygccattgcactccagcccaggtgacggtgcgagactccgtctcaaaaaaaagaaaaaacaacacaaaacaaaacaaaaacttactgaacaaatttatcaa

SEQ ID NO: 512379 - DNA, 201 bp, Homo sapiens
agggcagctataaccttggctagaaagggcagaggcagatggacctgctccatctcacctcttaaggtgggcaggacggagatgccacagtggatgccacwgctgccacagcctcctgcggactccaagcaggaagcctggctctcagccatgcaggatggaaagaaagattctattccaggaggggagctgccctggaac

SEQ ID NO: 512380 - DNA, 201 bp, Homo sapiens
tgcccctgactcccaggtggtaaggtgtttttcatgtttgtgttcaggtctctgtgcctttgctttggcctcaccacgatggaagggaagtgcccacatcrcagggagcacacagaatatgacggctaacatgctacatccagcctgccattatccgcaggggtatggcgtcattggattcacatttatcattcaacttcc

SEQ ID NO: 512381 - DNA, 201 bp, Homo sapiens
gggagaaagaaggaggttttctaggttcttgattactcccacttttcctttcaggtgacaaatcagacgctaagtttttccttcatggttctgcaagacawcccagtaggagacttgaagccagcaattgttaaagtctatgattactatgagacaggtgagtgaaagaaaaatgaaacaatcttaaccagagccaagaaa

SEQ ID NO: 512382 - DNA, 201 bp, Homo sapiens
agcttctgctcctggagctgctacttcccagctgtgtgactctggaagagttgtctaacctctctgacccttgctttcctcatctgcaaaatagggttgayacatcctatttcaaagtgagggttaaggcgtggagctggggtaacaaaaataaaagcaactctgcaggtctttaggtgtttgttgttaggaaagtttcca

SEQ ID NO: 512383 - DNA, 201 bp, Homo sapiens
ctgcaagaggagaccacagtggttcctgtgtgctttccaacctagactcaaagccatcagtcctttccccaaacacaggttctgtcaatgttctgttgatwatagctgcttctcaaggagaatgaacaagggtgtgtctcccaacttgatctcaaccggaacctctgactctgaaaaaaaaaagaaaagtaatactgagaa

SEQ ID NO: 512384 - DNA, 201 bp, Homo sapiens
taaagacactggtgaaaaagagtcaaagaacaataagaatatgttttgctcatgggagaaagaaggaggttttctaggttcttgattactcccacttttcstttcaggtgacaaatcagacgctaagtttttccttcatggttctgcaagacatcccagtaggagacttgaagccagcaattgttaaagtctatgattact

SEQ ID NO: 512385 - DNA, 201 bp, Homo sapiens
catgtgaaccatgaggataaagattcttagaggggacacactggttaaataggggagtgggtgtggatagagtattagtcaaagaaggttgtgatctaccttttttttttttgagacggagggttgctctgtcgtctgggctggagtgcaatggcatgatctgggctcactgcaacctctgcctcccggtttcaagcaatt

SEQ ID NO: 512386 - DNA, 201 bp, Homo sapiens
aaacgttatttcttatttgacaatgaaatacctcctgtataatttaagtaaaagttgatatttaggctatgtatttatacatatataatacatataaatcttttttttttttttttttttgagagagagagggtctcactctatcacccaggctggagtgcagtggtgtaatcatagttcactacagcctcgaactctggg

SEQ ID NO: 512387 - DNA, 201 bp, Homo sapiens
agtgtctaaagaagatttgtaagctataacaagaataaggaatgcagatatcagagggtatggacttgtttttctatagcctatggaacttgtgtaccaaragggtacatgaccatatcgcatttcaccctccttacaaatggagcagaattaccgctactgcatatagttacattccacccctaaagatttttttttatt

SEQ ID NO: 512388 - DNA, 201 bp, Homo sapiens
gcaagactgtcttaaacaaacaaacacacaaacaaacaacagactctgatatcacaatagatatatggaatagcaaaaaagaattttcttatttctgccargataactgaaaaaagttaacaatgaccccaaaaaatcataaaatacaatttacatacaatacctactttcacactctgtgggtatggtgcagtggggaag

SEQ ID NO: 512389 - DNA, 201 bp, Homo sapiens
acttgtttttctatagcctatggaacttgtgtaccaagagggtacatgaccatatcgcatttcaccctccttacaaatggagcagaattaccgctactgcwtatagttacattccacccctaaagatttttttttattatttactaggtcaccggctcctatagctactagataatgttaggggataagcgatgaatactt

SEQ ID NO: 512390 - DNA, 201 bp, Homo sapiens
gctgcttgtggtcatttgagttcactgctcctgccctgtgactgactctctccaaccttttccaccgagcaaacaacctttcccacactaaagcatccagycacctttcctttatacttgctgactgactgcatttcaactaggttgttacttcaagcaaaaacatgcattttttactttatctctggtagtgaaatgaaa

SEQ ID NO: 512391 - DNA, 201 bp, Homo sapiens
ccgccctcaatgtggcgatctgctcccgtttggtgctcagcagggactttagcttgaggatctcttccattaaggcttccttgtctttatcaatcatgggrgctagctcccgagccgctgctctttgacgagacagttgcaaggaccggtccacagctttctgcagatgcttgatttggtcccggattatggcattaaggt

SEQ ID NO: 512392 - DNA, 201 bp, Homo sapiens
ttagaaaggactacataaacacaattatcaaaaaggttttgatctggaaagacccacattagcaagaccatttatatgccagctcccattttttcttttgbttcccctcctccatcctccacaacaagagcacatttatttttgcagttaactaaaatctggccactgcaccgtactatgaagatcgctgcatgcatacct

SEQ ID NO: 512393 - DNA, 201 bp, Homo sapiens
gttagaaaggactacataaacacaattatcaaaaaggttttgatctggaaagacccacattagcaagaccatttatatgccagctcccattttttcttttscttcccctcctccatcctccacaacaagagcacatttatttttgcagttaactaaaatctggccactgcaccgtactatgaagatcgctgcatgcatacc

SEQ ID NO: 512394 - DNA, 201 bp, Homo sapiens
caggtatttcatcatttaaaaacaataattattatgacattctgatctggcactgggacagttttatttatccacttaccaagaatctgaactctcatctygacgatactcgatactcaataaaattagggaataaattagttaagaaagctttgactggcatgctttcaccagtagaatgagattacctgcttgttggct

SEQ ID NO: 512395 - DNA, 201 bp, Homo sapiens
ggaggaggagaaggatataggcctaggtagttaaggagtcaagataaaatgctggctaaaaaataggcaacaattttgtgaagacatacaatctgctgtcyaattacaaactccttgatgacaacagggtcccttttgagtcaaggtcatcaaggctgataggcacttctcagatcagctggtaactgaaactgtgaaaac

SEQ ID NO: 512396 - DNA, 201 bp, Homo sapiens
gaggaggaggagaaggatataggcctaggtagttaaggagtcaagataaaatgctggctaaaaaataggcaacaattttgtgaagacatacaatctgctgyccaattacaaactccttgatgacaacagggtcccttttgagtcaaggtcatcaaggctgataggcacttctcagatcagctggtaactgaaactgtgaaa

SEQ ID NO: 512397 - DNA, 201 bp, Homo sapiens
aagaaaatctgtgaaaatttgttgactgtaaatagagttcccaaggatgcattctaaaacccatcttgacatccacaaatgtctggtcacctaaagacacyggtgaaaaagagtcaaagaacaataagaatatgttttgctcatgggagaaagaaggaggttttctaggttcttgattactcccacttttcctttcaggtg

SEQ ID NO: 512398 - DNA, 201 bp, Homo sapiens
tttctatttaaatatgatgaatatctagctgtctgcctatctgtctgaaatctattaataacatctgactgtcaatatccagctctcggcttgctctgccytctattcaccctagtttgacacaaccacattttgcctttacagaaccctattgttcgcaatgccctgttctgcctggagtcagcctggaatgtagcaaag

SEQ ID NO: 512399 - DNA, 201 bp, Homo sapiens
taaacaagaactagtcacagtttttccttttttttgagacaagagtctcgctctgttgcccaggctggagtgcagtggcacaatctcggctcactgaaacytccgcctcccaggttcaagtgattctcctgcctcagcctcccaagtagctgggcccacagatgcccaccaccacgcccggctaagttttcgtatttttag

SEQ ID NO: 512400 - DNA, 201 bp, Homo sapiens
gctgtttcaggagctctgggtcactgctcaacaatgccataaaggtgaactgttccacaaacttctgagcctgacacacatcaacataacatcccccaggrgtgaagggaggaaggaggcacaaggaaattgcaaagatgaagtcctggatgatgtgggatggcatcagggaaagagtattacactttctacagagaagga

SEQ ID NO: 512401 - DNA, 201 bp, Homo sapiens
taaggccgggcgcagtggctcacgcctgtaatcccagcactttgggaggccgaggcgggtggatcacgaggtcaggagttcaagatgagcctggccaagayggtgaaaccccgtctctattaaaaatacaaaaaaaattagctgggcgtggtggcacacgcctgtaatcccagctactctagatgctgaggaggagaattg

SEQ ID NO: 512402 - DNA, 201 bp, Homo sapiens
aaagaaaagaaaaaagaaaaagagatgtctaagctaaaaagaaaaagtctccaaactctcagtaacagctaattgactttcttgggtgcacactgtgatgsgggagcctgtgtgtacaaaacagagcagtaaagtgctcaatgaaaagagcctcagcactgcatttttcctccccctaggctcacagcttttgtactgaag

SEQ ID NO: 512403 - DNA, 201 bp, Homo sapiens
cacagtggctcatgcctgtaatctcagcactttgggaggcggaggcaggcaggcagatcacttgaggtcaggagttcaagaccagcctggccaacatggcraaacccctttctacaaaaaacacaaaaaattagccaggcgtggtggtgcacagctgtaatccaagctactcgggaggctgaggcatgagaatcacttgaa

SEQ ID NO: 512404 - DNA, 201 bp, Homo sapiens
aaaaaaaaaaaagaaaagaaaagaaaaaagaaaaagagatgtctaagctaaaaagaaaaagtctccaaactctcagtaacagctaattgactttcttgggkgcacactgtgatgggggagcctgtgtgtacaaaacagagcagtaaagtgctcaatgaaaagagcctcagcactgcatttttcctccccctaggctcacag

SEQ ID NO: 512405 - DNA, 201 bp, Homo sapiens
gagagcagaaccctcatgagccaatcacctcttaaaggctccacctctcaatactaccacattggggattaagttttaacatgagttttggtggagaaacmatttctaaaccataatgttaccttatttaattcttatagctaccctgggaagtgagagttattagcttcattttacagaggagaaaacatattcagtgtg

SEQ ID NO: 512406 - DNA, 201 bp, Homo sapiens
cccagtagctgggactagaggagcacaccaccatccccagctaaatgtttacattttaagtagtgatgggccagtctcattatattgcccaggctggtctygaactcctggcctcaaatgatcctcctgcttcgacctcccaaagtgttgtgattacagctgtgaaccaccacacctggccagcagtgtttctctgtgcca

SEQ ID NO: 512407 - DNA, 201 bp, Homo sapiens
ttccatttagtaaacctgggccaaaagagttgccactgtacatcttatctacgtatttgtatttgaattatcaagttcttgatagctgctattcttttttwtttttttgagatggagtctcgctctgtcgcccaggctggagtacagtgacgtgatctcggctcactgcaagctccgcctcccgggttcacgccattctcc

SEQ ID NO: 512408 - DNA, 201 bp, Homo sapiens
ttgcatttttagtagagagacggggtttcatcatgttgtccaggctagtctcaaactcctaacctcaggtgatcctcccgcctcggcctcccaaagtgcgkggattacagtcgtgagccacctcgcccggccaataatatttctaatgactaatttcttgtatctcctggacctaataccccttcttcctaaagcacaaaa

SEQ ID NO: 512409 - DNA, 201 bp, Homo sapiens
ttgagcctaggagtttgagaccatcctcggtggcaacatagtgagaccccgtctctacaaacaatacaaaattagctgggtgttgtgtcatgcagctgtartcccagctactcaggaggctaaggtgggaggatcacttgagcccaggaggttggggctgcagtgagccatgatcgcaccactgcactccagcctgggcaa

SEQ ID NO: 512410 - DNA, 201 bp, Homo sapiens
acaggactgataatgcatctctcccaagtccccatctcatcccaacacctggggcacgaggggctgggaaaggtgtccttaccggctgcatggtacccccsgcaatgaccactgcccggcattccttcaccacttgggcaaagtgcacagctggattcaggagcaaaaacttcagggtgctctcactgaggctgcctggaa

SEQ ID NO: 512411 - DNA, 201 bp, Homo sapiens
atcccaacacctggggcacgaggggctgggaaaggtgtccttaccggctgcatggtaccccccgcaatgaccactgcccggcattccttcaccacttgggsaaagtgcacagctggattcaggagcaaaaacttcagggtgctctcactgaggctgcctggaaaaacagatcggtgggaggtgagtgcaagcccaacagac

SEQ ID NO: 512412 - DNA, 201 bp, Homo sapiens
ctgcactgctcctgcagcctaaaaggcacagcagtgagagaatagcagtgtcacccagtggacaccactgggcctgctcgagctgaccctttctggcttgsggccccaggagagaacaggactgataatgcatctctcccaagtccccatctcatcccaacacctggggcacgaggggctgggaaaggtgtccttaccggc

SEQ ID NO: 512413 - DNA, 201 bp, Homo sapiens
acatgcttaagaacataggctttgcaatacgtgaaacaaacaaatatctacttgcttgaatgcagtgaaacataaaggcagtttttactatgaacatgtcrgtgtgtactgttgactatatatctcaaggggtgattacgtatctaaggctaatacacttctgtgagttgctttaaagatcagtaaaaagcaaaatatcac

SEQ ID NO: 512414 - DNA, 201 bp, Homo sapiens
ttacccacatctaatccactctccaccttgtcatcagggtgattttatcaaatgaaaatctgatcctattcttaaaactgctaagctatgcccgtggtaagtctgctctcactaacctggccctctgtcttcaggtccctgtccacctttgcagcctcgctttctattacttcgaagtcctgcaccaggttgtagtgctga

SEQ ID NO: 512415 - DNA, 201 bp, Homo sapiens
aatagcttatggtaggaaagacatggaggataaatggggagagggtaattaaatacagtggcaccaagaggtaaaagtacattctgctgccagattcttayaccagttaaaaatctttcaaaaaataaccttctgtttagaaatgaccttctcaagagcaaggccagctggcacagagttaactcaaggtggtacgatgat

SEQ ID NO: 512416 - DNA, 201 bp, Homo sapiens
taactgtttaaggagaatgtttctgatgtccatttccccagccagggagaaaatgtaagccaacagggcctgtgtgtagaggttggtcgtggaggtggccraattcttgagacaccatagaccctgactcaccattgggtcctaaaaagtgaagatgaagactataacttataaggcattcctttaaaaatggcaagtaat

SEQ ID NO: 512417 - DNA, 201 bp, Homo sapiens
ttcttaataacactggccacatttcaagtgctcaggagccacttgtggctaccaaattggaccttgtagatagagaacattttcatcatcacaggaagctmttttggagtgtttctgttctagcttgctaagctttgtgatctttcttttggtatgcagctcttctagaattcctagtttctttaaatgggcaattaatca

SEQ ID NO: 512418 - DNA, 201 bp, Homo sapiens
cttcccctgccctattgtttatgtaaaaatgcagattcactgagccagcctaaattgtgtattcagtggaaagatgatcaaggatttaaaagaatgcaacyttttgtctcttacctatgtgggacctggaagcccttgcctcaagttatcccgcgttaccagaacgaaccaatgcacatcttacacatattgattaatgtc

SEQ ID NO: 512419 - DNA, 201 bp, Homo sapiens
ctccactaaaaatataaaaattagctgggcgtggtggtgcgtgactgtaatcccagttattcaggaggctgaggcaggagaatcgcttgaacctggtatgyggagattgcagtgagccgagatggcgccactgcacttcagcctggcgaataagcaagactccgtctcaaaaaaaagctacatacctccctcacaatttgc

SEQ ID NO: 512420 - DNA, 201 bp, Homo sapiens
tgagtagctgggactacaggcgggtaccactacgcccagctaatttttatatttttttgtggagatggggtttagacatgttgcccaggctggtcttgaastcttgaactcaagcgatctgttcatcttgcccccgccccaaagtgctgagatcgcatactgcactccagcctgggcaacagagcaaggctccatctcaaa

SEQ ID NO: 512421 - DNA, 201 bp, Homo sapiens
actccagattgctggccagtttcttctgccttgttgagagtccgggtctattcatcacaccagatgggtctcaatttcttactacccctgaggccaccacratgaggcagtgggagaccccctcatgagaggactagagaccaccccagaggaaaatgtatccctgtacggaccaccatttcttatatgtaaaaatgttta

SEQ ID NO: 512422 - DNA, 201 bp, Homo sapiens
ttacagtattactatgcatccgcttggggatgaataagggtggactgatgggttagcttttggaagtgcctgacctcgctgtatcatgttaagtcttcaargtacgctaaattttccttttatcgttggagacacgaggtaaaattggtcttggaagatggaggctgaatggccctcggggggctgaccctcagggtactg

SEQ ID NO: 512423 - DNA, 201 bp, Homo sapiens
catatttatatgagaaataatgtagcaattaaaaataagtttttataaggttttacaaaaactttataaaataatgataaaaaacatgtaaaactacatayacatttgcacatattgagtgtatgtgtgcatgtacacatatacacacacaatctcaaacatattaatataaatgataaatataaaaagaaatagaacttg

SEQ ID NO: 512424 - DNA, 201 bp, Homo sapiens
cctactctctgaattgtgcaggctgcactgaaacgccctggtgatctgacgtttaggaagaaagttaaagagttggtcagatggatagttcataatgggtrattccagtccaagagcccattgcccagctttggttttggttgtatcataatctccaaccattaatcccattgacagagtggaatatttcagttaacaaga

SEQ ID NO: 512425 - DNA, 201 bp, Homo sapiens
gttacagagaacggaacaggtaatgctctctaagaagccagaccccaatggatatcactgtctcattcgaattgttacctgattgccaactatacaatgtyaatacaatcattttttccctgagggcttttcattgggttcatctgattcaaattctgaatgtttcatatatcaaccaaaattttcacacacatgttgatg

SEQ ID NO: 512426 - DNA, 201 bp, Homo sapiens
tctgaattgtgcaggctgcactgaaacgccctggtgatctgacgtttaggaagaaagttaaagagttggtcagatggatagttcataatgggtgattccaktccaagagcccattgcccagctttggttttggttgtatcataatctccaaccattaatcccattgacagagtggaatatttcagttaacaagacaatata

SEQ ID NO: 512427 - DNA, 201 bp, Homo sapiens
acccaaaaagggattaccaattttaacataattattacaaaacgtatgctaacccccaaataatactatgcatgatgtgacctctctttgatttggaagakcctgtagaacctcagagggtgtcaaggcatcactttgagtatcagttaggattatttggaagtatagatgtatcagatgatagaaatgacaagcagtact

SEQ ID NO: 512428 - DNA, 201 bp, Homo sapiens
acagctggtactggatgtggtcctaggaactgactctaaaataggatgttgttgctgcacctggctggctgtaataaggcccccatcactggtagagcgcyagcccccatcataggtgaagcgctagttgccccaggcatccatgccagtgccagtgttcacatgtttacaggtggcaaactgggacacgaaactggtaga

SEQ ID NO: 512429 - DNA, 201 bp, Homo sapiens
agtgtttgctgtttcctgcaaaggtcccaggggttgttgggtacacaggtcctgtctttggccgcaagcaacctgaaatgaggcttggtcttcttcccggkacctcaggctgtgcctcttgagggaccccagcacgaagtatgtgactgcctgactcagatccctctcctgatgcaagccaccctcaccctggcccacacc

SEQ ID NO: 512430 - DNA, 201 bp, Homo sapiens
ttagcatgtagcataattataattcagcaataatttacatctcagcagaagtgagtgactgaagagaaggcggtcagagtatctgacatgtagtgtatagytaagaaaaccctgtgatgatttgaaggaccaggcagatacctagaagcaagctgagattttaccatgccgagatgtttgattgtgcaggtggctcaataa

SEQ ID NO: 512431 - DNA, 201 bp, Homo sapiens
cagtgatcttcattcctatccatatttctgaattctatttctgtcatttcagccatatcagcctgattaagaactcttgctggaaagctaatgcagtcatytggaggaaagaagacattctggctttttgagttgtcatagttctcatgctggttctttctcatttttataggctgatattccttcagtctttgaagttgt

SEQ ID NO: 512432 - DNA, 201 bp, Homo sapiens
gtgaaacccaggcttgcggggcgttgtgcttactgatgttcctttcttccctcctgggatccctgaatctctttgagagtggttgtgtgttgtctgattcrtctctggctttcacggccccagcactgtgctttacaaactgaatgcactcaggttatctgttgaacagtgaggggtggggaggaaaggaagaaagtgaag

SEQ ID NO: 512433 - DNA, 201 bp, Homo sapiens
ttccagaaccaaagcagcttgaatgtaatcaccagaaggttgttactgtgcattactccctaaacagtgaagcatatgaggatgattccaatgtaaagttmttctatttggtaagtctcagtcagtgggttcctggaatcctgttcaattgcacgtctgcttagcccagcacagcttagaaatcatgcatcagtcatgcca

SEQ ID NO: 512434 - DNA, 201 bp, Homo sapiens
attcctgtttttcagtggaagaagctgaggcgttgacctgttagtgacctccttaaggtcatgctgctgctaaacagatgtgaaacccaggcttgcggggygttgtgcttactgatgttcctttcttccctcctgggatccctgaatctctttgagagtggttgtgtgttgtctgattcgtctctggctttcacggcccca

SEQ ID NO: 512435 - DNA, 201 bp, Homo sapiens
gcttcagtggggtctggttacctcaaaaaccaacgtcagaataagaattgggactttcagccccacccctcaacctccagggagcaaagaagggctgaagkttaagttgatcaccaaaggcaaatgatttaatcaatcatgcctacgtactgaacgtactgaaacttacataacaagagaacagggttctgcgagccttgg

SEQ ID NO: 512436 - DNA, 201 bp, Homo sapiens
tgaggcaggagaatcacttgaacccaggaggtggaggttgcagtgagccaaaattgtgccactgcactccagcctgggcaacagagtgagactttgtctcaaaaaaaaaaataaaataaaataaaaaataagccttgttgtaaatataggcagagatatggaaagaaagcaagtgaattaaggctgaagtgtcttttcttt

SEQ ID NO: 512437 - DNA, 201 bp, Homo sapiens
cagcagtgagagaatagcagtgtcacccagtggacaccactgggcctgctcgagctgaccctttctggcttggggccccaggagagaacaggactgataaygcatctctcccaagtccccatctcatcccaacacctggggcacgaggggctgggaaaggtgtccttaccggctgcatggtaccccccgcaatgaccactg

SEQ ID NO: 512438 - DNA, 201 bp, Homo sapiens
actgaacctggccaagaaccacctgattaccttggcggctcaggatgaccctgccgtcctggttggccgtagtgagagctgccaggaagccttcgatgtgmatcagtggggaagctggttgcgggacgctggcctgactctcgtctgcaggggctgcaagagctgcacagagcagaatggggaggaggcctccctcttgtc

SEQ ID NO: 512439 - DNA, 201 bp, Homo sapiens
cctgggaactgaacctggccaagaaccacctgattaccttggcggctcaggatgaccctgccgtcctggttggccgtagtgagagctgccaggaagccttsgatgtgcatcagtggggaagctggttgcgggacgctggcctgactctcgtctgcaggggctgcaagagctgcacagagcagaatggggaggaggcctccc

SEQ ID NO: 512440 - DNA, 201 bp, Homo sapiens
agtatataaaacatagagttgatgatgaaaattttgcactgtgtttgtgcctgccatcttcagtgcctccatccctacttctgactctgtagtgtatgccyggctgatttccatgacaaggtttgctctggcagcctgaactgtaacactcccccagcagttcataaccagctccctcactcatcctgtgggtaactctgg

SEQ ID NO: 512441 - DNA, 201 bp, Homo sapiens
tctcaatctcctgacctcgtgatctgcccgcctcggtttatgtttttttaaaatgggacaagggaaaggtttgccggtccaaggaaaacttctaccaatcytcccatttacctttggttgtatagaatatagcaaaaatgagttttgagagtaaggattttattcaacttcatttcacaaacatttactgagcatcttcta

SEQ ID NO: 512442 - DNA, 201 bp, Homo sapiens
tatggtttttgttttttttttttttttgagacagagtctgtctctgtcaccgaggctggagtgcagtggcgcatctctgcttactgcaaggtccgtccccygggttcatgccattctcctgcctcagcctcccgagtagctgagactgcaggcacccgccaccatgcccggccaatttttttgtatttttagtagagaagg

SEQ ID NO: 512443 - DNA, 201 bp, Homo sapiens
tcctcctgtatttcatatacagatgtaccaactgatcaggagcatccaatacttctcctgccatcgcctgagatctgcatgaattcattgtcccaagccascagcactggagcacacttcatgtaacagcaagcactctgcctctgcctgcagtccttgaaaaggaagctattagttaaatgaggtctggcaaggattggg

SEQ ID NO: 512444 - DNA, 201 bp, Homo sapiens
tcactctcttgtaagtgtccctttgtacaggtaaaaattaataaaacttgtgtgcttttcttctgttaatctgccttatgtcaatttaattcctaggcccmactaaagatgccacttaagaactgagatggttagaggtgatctttaaattcccctgctgtgtcgaccactttctctgtacagcgggcaggactgcccggc

SEQ ID NO: 512445 - DNA, 201 bp, Homo sapiens
ttcaggtcaacttaaatttttctaaagaaaaaagtttaccaggatccaatgtcgatcttcaagtctcggctgcttcaaactctctttatgctctttgggckgtagaccagagggtattgctactaaggaattatggtcagctgccagcacaaactgtgagtgattaaaaccatctttgtttaccacccacagtatagtttt

SEQ ID NO: 512446 - DNA, 201 bp, Homo sapiens
gctttggccatttcctcaggtgttcactctcttgtaagtgtccctttgtacaggtaaaaattaataaaacttgtgtgcttttcttctgttaatctgccttatgtcaatttaattcctaggcccaactaaagatgccacttaagaactgagatggttagaggtgatctttaaattcccctgctgtgtcgaccactttctctg

SEQ ID NO: 512447 - DNA, 201 bp, Homo sapiens
ggttatagatgtatactatatatatatatttatacaatatataatgataaaaccactaagcaaaagtgttgcaggagttaaggatgagccaccccaaaatyggctgatgtgatgtactgattatttcaagctgaaagtacttgagagactgtaattgcagaaagggctctctgacctgtcctttcctacatgtagcaagtc

SEQ ID NO: 512448 - DNA, 201 bp, Homo sapiens
ggggcttccttgccagggctctcccctccccttcccctcctagggcagttgacctggcctcatctctcagcatccagcagcctgccttgggagcttagggrcctcttctgctgagcctctctccctctttgtgccttccttcttgaccctaagaagaagggcactgggtctttccaaggactccggtagctcagctcacct

SEQ ID NO: 512449 - DNA, 201 bp, Homo sapiens; identical to SEQ ID NO: 379937

SEQ ID NO: 512450 - DNA, 201 bp, Homo sapiens
gtaaccgggaccatgtggtggctggtctctttagtcacagtgtgagagccggctaatgtgggaagagggttcacagcggccagttcctgctggagtagcaragaaaggagcgcgtgtggttcactaggctcacaccaccccagccaggctcaggagatgattcctgtggagtcagtagccttgggggcttccttgccaggg

SEQ ID NO: 512451 - DNA, 201 bp, Homo sapiens
tctgctcgccacagccactgggcatctgcaccagaccatccaggttctgcagggctgtgcccataatgtctcctgggatccaaaaggagagagagaaggtrggggtacagagaagaagggaccctctaagagttatcatcattcactgaacaaacacgtattagctatcatttaataagtacctactatgggccgggcgtg

SEQ ID NO: 512452 - DNA, 201 bp, Homo sapiens
ctccagtcacctcctgcccaccagaccctgtgctcacagacagcgagcgccagtggcagcaggtcctgccagatggcaaggccccagccgcccctgtaacygggaccatgtggtggctggtctctttagtcacagtgtgagagccggctaatgtgggaagagggttcacagcggccagttcctgctggagtagcagagaaa

SEQ ID NO: 512453 - DNA, 201 bp, Homo sapiens
ccagatgccctatggctgtggagagcagaatatggtcctctttgctcctaacatctatgtactggattatctaaatgaaacacagcagcttactccagagrtcaagtccaaggccattggctatctcaacactggtgagtgattacttgagtaagggaaaacttgaatgttatttcaactggatttcccagtaggtttcag

SEQ ID NO: 512454 - DNA, 201 bp, Homo sapiens; identical to SEQ ID NO: 53161

SEQ ID NO: 512455 - DNA, 201 bp, Homo sapiens
tataggaaaaaaattaatgtaagtataataaataaatggttatagatgtatactatatatatatatttatacaatatataatgataaaaccactaagcaamagtgttgcaggagttaaggatgagccaccccaaaattggctgatgtgatgtactgattatttcaagctgaaagtacttgagagactgtaattgcagaaag

SEQ ID NO: 512456 - DNA, 201 bp, Homo sapiens
atgagttttcttgaggttgattctctccagcacagacttgacaactgaaagtgggtcatgtggggaatagaaggctgagaactgtgtccagctcaagaaayttccttcactgttttttcatttcagatcatggctaagggagtcatcgtcagatctggaacccacactctgcctgtggagtcaggagacagtgagtatcct

SEQ ID NO: 512457 - DNA, 201 bp, Homo sapiens
tagcgccctcagtacatatgcttgtctatagcttgcatcctggaggagaaatggtcactgatagcacccaattccaattgagaaatgcttcgaaaatcagktaggtgccaaaaatgattcttttttaatttgggggaaaactaaggagaacttaagagagtgttgggtttaaactcccaatttttcatagaattgcaaaat

SEQ ID NO: 512458 - DNA, 201 bp, Homo sapiens
taaaaaccaaagataaaaagaaaatactgaaaacagccagaggaaaataaataacacattaataatgggaaacaacacatgaatgatagctaaattctcawcagaaacaaaaaaggagaaaagcaatgagatgtcatctttaaaatggtaaaatgggccaggcacggcggttcacggctgtaatcccatcactttaggaga

SEQ ID NO: 512459 - DNA, 201 bp, Homo sapiens
tggtggttgagataaaaattctaacacctagtttttatgccaccttaaagttatactttctgtgtgttgtactttcaaatgtttaaaaaaataggccaggmgtggtgggattacaagcgcttgtaatcccagcactttgggaggccaaggtgggcggatcacaaggtcaagagatccagaccatcctggctaacatgatga

SEQ ID NO: 512460 - DNA, 201 bp, Homo sapiens
aaagttaataccattgacattaatgattggcttgaggtaatatagcaataatgatctcaactcagtattgtggtactagtgatagattaagaggaagaaaygagctcttcgtattttcagaccaaggttctcctggcctattccacgccccggacacagagtgtgtgagtggcacttacgtgtggatatgttttcattcag

SEQ ID NO: 512461 - DNA, 201 bp, Homo sapiens
ccctgttgggagtttcattattacatagacacacatggtggtaaagctgagctaactcctcactgaatgtcactaactcatcctgggccgtattaagggtrctgtgattttcgttggctatgctggtcatcttttgcaactccttctccatgtgggccatcttctcaccactctccttggtggtcttctcaaggcttgtca

SEQ ID NO: 512462 - DNA, 201 bp, Homo sapiens
acaaaacaaaacaaaaaatgctacatcagcttgtttttatagatagatatgaacaaacaaacaaaagtaatttcaagggactatacggaacatcttaaacsaagttttatcatttttacaaatgagaaaaagttaataccattgacattaatgattggcttgaggtaatatagcaataatgatctcaactcagtattgtgg

SEQ ID NO: 512463 - DNA, 201 bp, Homo sapiens
acaagaaattcactctagcggccctaaacaaagttcttacctgcataagctgctgcttcaacttctgtatttctgaaatgttcagctcactgaataagtcrgagacagggttcagagactctcctttccttaaggtgggagtccgatagtctccattcagtttcacaagaggcccatggatatgaccgttcattttgtcat

SEQ ID NO: 512464 - DNA, 201 bp, Homo sapiens
gaaaagaaaaaagaaaagaaatctagaagtgaaatgcgagaatcagaagtcccacaacatgctacctgcaatctacaagaaattcactctagcggccctamacaaagttcttacctgcataagctgctgcttcaacttctgtatttctgaaatgttcagctcactgaataagtcagagacagggttcagagactctccttt

SEQ ID NO: 512465 - DNA, 201 bp, Homo sapiens
agcctgttgatctaactgtttaaggagaatgtttctgatgtccatttccccagccagggagaaaatgtaagccaacagggcctgtgtgtagaggttggtcrtggaggtggccgaattcttgagacaccatagaccctgactcaccattgggtcctaaaaagtgaagatgaagactataacttataaggcattcctttaaaa

SEQ ID NO: 512466 - DNA, 201 bp, Homo sapiens
aaaaacatggccgggtgcagtggctcacgcctataatcagcactttgggaggacaagccaatcacttgagctcaggggtttgagaccagcctgggcaacayggcgaaaccctatctctacaaaaaactatgaaaaattaggccgggtgcagtggctcacgcctgtaatcccagcactttgggaggccgaggtgggcggatc

SEQ ID NO: 512467 - DNA, 201 bp, Homo sapiens
cccaagattgcaccactcactgcattccagcctgggtgacagattgagactctgcctcaaaaaaaaaaaaaaaaaagaaatccaaaactcattgcattacyactctcctccagtttctctcacctcctggcaagcagcctcttcacatattttaggtaagccagtaagaaataaagagggtaagtatgcataaagaaaaaa

SEQ ID NO: 512468 - DNA, 201 bp, Homo sapiens
gctgagacagaagattcgcttgaacctgggaggcagaagttgcagtgacccaagattgcaccactcactgcattccagcctgggtgacagattgagactckgcctcaaaaaaaaaaaaaaaaaagaaatccaaaactcattgcattactactctcctccagtttctctcacctcctggcaagcagcctcttcacatatttt

SEQ ID NO: 512469 - DNA, 201 bp, Homo sapiens
tcggcctcccaaagtgctgggattacaggcgtgagccaccgcccggctgggtacggattttctttacgctgtatataaaagtctgagaaactatcaattgyttataataaagaatgaaaactccaaaggcatctggggtgaggttgagggtctgcacagagattatgggggaaggggacgtccaaagctgtcattggattc

SEQ ID NO: 512470 - DNA, 201 bp, Homo sapiens
agagtccggtgagagcaccaaagatcaaaaaaaagatgcagtaaatgggagggaaggagggcagaagggatacccatgtgttactgaagtcaacttttatytattctgaagttttgcactatagtctgtgggaaatacattttctctgtattactgagtgttcctgcaaactcaggctcttgaaccacagatattaatcta

SEQ ID NO: 512471 - DNA, 201 bp, Homo sapiens
ccacctgcggctacaccatggtcctggtggctaccgtgcctgcttctctgcatgtccacgcagcggtcgttgataagctgcacagaacctaggcttctcaygtcttcatttacacaaaggttctgcaacaaaggagaaagaaagaggcaaagagatggtgccagctaaatgacatcctaccaacacacgtggacctgcccc

SEQ ID NO: 512472 - DNA, 201 bp, Homo sapiens
gcccttctccatcctgccacgtctgtcctccacaggcagaacagggagctgtcattttaaagtgcaggtctgctctggttgttctcctaatgaaacccttygggggcttatcggatccttccaggccctggtccagactccttagcatgggcatgcaggacagccctccatgatcgtcccctccctgagacccctcctgcc

SEQ ID NO: 512473 - DNA, 201 bp, Homo sapiens
taggggaaggagcttgggactgtagatggatatttgtgagggaccgtagatggatatttgtgagtgatgtgcatagagacagccccctgcagagaaagatmatctgttgttcacctttgaatcctcaatctctgttgcacagggcattcagtaaacatcagatgtctgtggaacaaatgcatggattgtacataaaagaag

SEQ ID NO: 512474 - DNA, 201 bp, Homo sapiens
gactctcttctaccatctaggtgtatagtcagctacattccagcgaactacatggctattatttcagaggacttaacttagaagatggccttaaagtgccrtgtcttgaagatggacatatcctttacaatggaatttattacacacctgcatgggctgactttggaaaagatggctatgaccttgtgaaggtaaggcaac

SEQ ID NO: 512475 - DNA, 201 bp, Homo sapiens
gccactgcactccagggtgacagagcgagattccgtctcaaaaataaataaataaacaagaattattgaaagcatatttctgatctataaagtaagaatartaacacctcctaggtgttgtttttacttttttttttcttttcttttgagatggagtttcgctcttgttgcccaggctggagtgcaatggcgggatcttgg

SEQ ID NO: 512476 - DNA, 201 bp, Homo sapiens
ttccaggcatgggattatatcctttgggaggccaaggtgggaggatcacttgaggccaggagtttgagatcagcctgagcaacacggcaaaactctgtctstctctctctctctacaaaaagaaaagaaaaaaaaaaaagatgggccaggcgcagtggctcacacctgtaatcccagcactttgagaggccaaggcaggtg

SEQ ID NO: 512477 - DNA, 201 bp, Homo sapiens
ccaggaggcagagtttgcagtgagctgagattgcaccattgcactccagcctgggcaacaagagagaaactctgtttaaaaaaaaaaaaaaaaaaaaaagmcataatgaaaagtacatgatactactgtcttggttttttttttttttctttgatactactgtcttgtgcttgtcttaccctttcctaggaagctttataa

SEQ ID NO: 512478 - DNA, 201 bp, Homo sapiens
caatgacacctttaatgttttttccattcagctcactgatgatcttgctgcactggttgccattggccttattgcttatattgtacaggatcttcttgacrtccttggtgctgggcaaggggttgcccccgagggcagccagtaggtaggaaggacgaccttctgtgtcccggaggaaaagaaagccacaccttcctcttt

SEQ ID NO: 512479 - DNA, 201 bp, Homo sapiens
catctactgagatgctgatatggttatcattgaggctgatatactgggagagctccttccgcaggttgttcttttgctctctttcattttttaaagtctcragggcttcttccagttggtgctcagcaatctctttcaatcggatggcatcttccagctggctgttcagcagtaccgtctcctcctcaaatcgcttaatct

SEQ ID NO: 512480 - DNA, 201 bp, Homo sapiens
gtatatgggaagaaaaagagtacacaatgaaatgcatcataaccctcttttaagacttgggaaaatgttttcttctgcttatatgtgtaagaaaagctacyccgcaagacccccgaaatataacagtctagcagctctcactgatgcttgaaataattcaattcgcttaataaggaaaaataaaattttaaaatatcttgt

SEQ ID NO: 512481 - DNA, 201 bp, Homo sapiens
tacagctctgccagattacttttttgtgaagcaatttgcaatcacattcttgttatatggagaaaaatccttgttcttgaagggaattcttaaagggaagkgatggttgctgtcttgctcttcttcatttttcctgcagatatctaatgtatattcacttgaagtaagtcttatttggggagtgtagcaatatgtcaaggc

SEQ ID NO: 512482 - DNA, 201 bp, Homo sapiens
gtcccacctcttaatagagtcgccatggtaattaaattccaacatcagttttggagggacacaaaccacagtggtatgaatactttgaaaagagtttggtrgtttctgattatgtgaaagacagagttaccacatgacccagcaatccaactgttacgtacttccccaaaagaaatgaaaacatgtccacacaaagacttg

SEQ ID NO: 512483 - DNA, 201 bp, Homo sapiens
agagtgagactcagtctcaaaaaaaaaaaaaaaaaaaaaaacttttaggataggatagtaaaaatcatgttttgaaagcttatgtaatgctggccgggcayggtggctcacgcatgttgggaggctgaggcaggcggatcacttgaggtcaggagttcgagaccaacctggccaacatggcgaaaccttatctctactaaa

SEQ ID NO: 512484 - DNA, 201 bp, Homo sapiens
cctggccaacatggcaaaaccctgtctgtactaaaaatacaaaaattagccaggcgtggtggtgtgtgcctgtggtcccagctacacgggaggctgaggcmggagaatcacttgaacccgagagacggaggttgcagtgagctgagattgtgccactgcactccaggcagggcaacagatggagaccccttctccaaaaca

SEQ ID NO: 512485 - DNA, 201 bp, Homo sapiens
agagctgtaacaccgcgagggtccgcagcttcattgttgaagtgagaccaagaacccaccaattccggacacattggtactcttgaaaaaaaaaatctccygcagtactaaaagctaataattcattgatgactaattttgacttagtttactttccttataacaactagctgagatgagctactctaaaagtataggatg

SEQ ID NO: 512486 - DNA, 201 bp, Homo sapiens
gttcatgcctaatcctgtcacccatagctgtcagcaaagagtgcaaggcagattatttgaaagagaatagcagttaatagtgtcaaacccattcttagccragaaggactttactgagagaggcctctaactccctaaatcttagaagggataactcttctaatttgggcctctaacccaaggttggttaagcgttcttgc

SEQ ID NO: 512487 - DNA, 201 bp, Homo sapiens
gagggacgaggccatctaatgagccagaaggtccctgagagatgaggcggccttggcctctgggattccctacccctcattcacagaagcagcttggtccstggagttaagcagcactgttctgaaataataatgaacagcacgcctggcatgcctcctgtcagagcccagtgaggtgggcaggccagtgctgtctcccca

SEQ ID NO: 512488 - DNA, 201 bp, Homo sapiens
cctggcatgcctcctgtcagagcccagtgaggtgggcaggccagtgctgtctccccagcacctgctcctaccccagccagcagccctgacccttctgacaraccctaaaatgctccaaccactatgtggtttctcaccatctccagcccaaactctctgcttccaaagcttagtggatccacccaatggacctcacctccc

SEQ ID NO: 512489 - DNA, 201 bp, Homo sapiens
catgcctcctgtcagagcccagtgaggtgggcaggccagtgctgtctccccagcacctgctcctaccccagccagcagccctgacccttctgacagacccyaaaatgctccaaccactatgtggtttctcaccatctccagcccaaactctctgcttccaaagcttagtggatccacccaatggacctcacctcccgcagt

SEQ ID NO: 512490 - DNA, 201 bp, Homo sapiens
catatgattccttcttcggcaaacttgatcaaggtagctcctagaagcaagggacatgtaatggtatttctctctctttttttttttgagatggagtttcrctcttgttgcccaggctggagtgcaatggcgcgatctcggctcacagcaacctccgcctcccgggttcaagccattctgctgcctcaggctcccgagtag

SEQ ID NO: 512491 - DNA, 201 bp, Homo sapiens
agcaaaaaataatctaaaattatacctataggaaataaccatattactatccatgttaaacacacatgcacaagcacacatacacatgaatagaaagaagyataagaaaatagacctaggctgggcacagtggctcacacctgtaatcccagaactttgggaggccaaggcaggcagatcacttgagctcagaagttcgag

SEQ ID NO: 512492 - DNA, 201 bp, Homo sapiens
aggtagctcctagaagcaagggacatgtaatggtatttctctctctttttttttttgagatggagtttcactcttgttgcccaggctggagtgcaatggcrcgatctcggctcacagcaacctccgcctcccgggttcaagccattctgctgcctcaggctcccgagtagctgggattacaggcatgcgccaccacgctcg

SEQ ID NO: 512493 - DNA, 201 bp, Homo sapiens
tgagccactgtccaccttcagcatccagtctcagcctgtggaagtccttaagttctttttctttccaggccctgggctgaggtggttagtgaaggagaaaytggagagacagcaactgctttgctctcgcctccccttcccttgccaggtcacactgtgctttcactcacccagtacctggtattctagtgcctgcctttc

SEQ ID NO: 512494 - DNA, 201 bp, Homo sapiens
aggctggagtgcaatggcgcgatctcggctcacagcaacctccgcctcccgggttcaagccattctgctgcctcaggctcccgagtagctgggattacagrcatgcgccaccacgctcggctaattttgtatttttagtagagatggggtttctccatgttggtcagtctggtctcgaactccggacctcaggtgatctgc

SEQ ID NO: 512495 - DNA, 201 bp, Homo sapiens
tatgtaatgctggccgggcacggtggctcacgcatgttgggaggctgaggcaggcggatcacttgaggtcaggagttcgagaccaacctggccaacatggygaaaccttatctctactaaaaatacaaaaattagccaggcttggtagtgggcgcctgtaatcctagctactggggaggctgaggcaggagaatcacttga

SEQ ID NO: 512496 - DNA, 201 bp, Homo sapiens
ttcgccatgttgtccagacttgtctcagactcctgggcttaagcgactcacccacctcagcctcccaaagtgctgggattataggcgtgagccacaactcycagctttaagtttgctctttttggtgtacagttcttggagttttaaaaaacacatacagttgcaggtgtgtccatgtaatttcaagtgaggaaaaataga

SEQ ID NO: 512497 - DNA, 201 bp, Homo sapiens
accttatctctactaaaaatacaaaaattagccaggcttggtagtgggcgcctgtaatcctagctactggggaggctgaggcaggagaatcacttgaaccygggaggcagaggctgcagtgagcagagatcgagccactacactccagcctgggcaataaagtgagacaccatcttaaaaaaaaagaaaaaagcgctggga

SEQ ID NO: 512498 - DNA, 201 bp, Homo sapiens
gaaatggcgtgcaaaattttaaacaaacattttcctcctgggcctcagtttgttttccatgagataccatgagtgccctcagtcccgctgtagtcagggtrgtaggtgtgggctccaggccacgataggccctgactgtgggcagaggccccagccttaccagtgtgcccagtggggctggagaggcggtggggcatggcc

SEQ ID NO: 512499 - DNA, 201 bp, Homo sapiens
taccagtgtgcccagtggggctggagaggcggtggggcatggccagcctggggctctggtgtgtgtctcttggctcagtatagaatgaaaggctgccagcyggggccgtgtcctggctggagagcagtggagggcaaagtcctctccctgcaccctcctcactgtctctgccaggcagctgcttcagagttggggcccagg

SEQ ID NO: 512500 - DNA, 201 bp, Homo sapiens
cagtgaaatcccatctctactaaaaatacaaaaaattagccggatgtggtggcgggcacctgtagtcccagctactcgggaggctgaggcgggagaatggygtgaacccaggcggcggagcttgcagtgagccgagattgtgccactgcactccagactgggtgacagagtgagactctgtctcaaaaaaaaaaaaagaaa

SEQ ID NO: 512501 - DNA, 201 bp, Homo sapiens
ctttgggaggctgaggcgggtggataacctgaggtcgggagttcgagaccagcctgaccaacatggagaaaccccatatctactaaaaatacaaaattagccgggcatcctgtaatcccagctacttgggaggctgaggcaggataatcgcttgaacctgggaggcggaggttgtggtgagccgagattgtgccactgcac

SEQ ID NO: 512502 - DNA, 201 bp, Homo sapiens
ttgggaggctgaggcgggtggataacctgaggtcgggagttcgagaccagcctgaccaacatggagaaaccccatatctactaaaaatacaaaattagccdggcatcctgtaatcccagctacttgggaggctgaggcaggataatcgcttgaacctgggaggcggaggttgtggtgagccgagattgtgccactgcactc

SEQ ID NO: 512503 - DNA, 201 bp, Homo sapiens
ctcttaaaattaaaggattttattttaaagaaattaaaatttcttccatttctctgaaggaatgaggcctacccatgctaggtaggcagctccatcaggcytggtggtaggggccgtctgtggaggtcaggagtgtacccgcatgcctgctcccctccacagcacattgtggttctcccacgagtttatctgagttctcct

SEQ ID NO: 512504 - DNA, 201 bp, Homo sapiens
ttatagcagtgtaaagttttaaaagatggcttcacataggcctggcacagtggctcatgcctataatcccagcactttgggaggctgaggcgagtggatcwcctgaggtcaggagttcgagaccaggctgaccaacatggtgaaaccctgcatctactaaaaatacaaaattagctggacatgatggcgcatgcctgtaat

SEQ ID NO: 512505 - DNA, 201 bp, Homo sapiens
gtagagcctcctaagcatttcttgccacactctcccaggcccacccacacctctgttgcaatggagggccccactacccaggagagcaggtctagggcacmgtgccaagcctgatgaatgtccttcatacccttttcaaacaacaggctacgattaggcctaattataggggcctggtcccttaatattcttcctggcatg

SEQ ID NO: 512506 - DNA, 201 bp, Homo sapiens
atatgaagcaacaagggggcctgaaaatgagctaatggaatgggccccagaaatgagagaagcctttgccaagctaaaacaggcccttacccaggctctcrctcttggcatcccagagctaactaagcccttctccttgtatgtagcagagaagagggccatagctatgggagtactagcccagaaattaggatcagaacc

SEQ ID NO: 512507 - DNA, 201 bp, Homo sapiens
tagtggaccttgtgcgaagaaattagaggtaattttaaaacaattataaagatggtggtgattaaatttttatattcttagaaattatgtttaaaacctascagataaccaatgctttatcaattacgtattttagggactttgttggtgggtgttctatctctttattgccagagtaaataaaaattgttaggatataaa

SEQ ID NO: 512508 - DNA, 201 bp, Homo sapiens
atacgggatacaaagatggctcagattaccctccaatggttccaatattttggatatgtcttaacacccggagcctggcaaatatccccagaatgagcacrgaccatatgtggtttgagccctgcctccaacaccaagcagcagcttcattctttttggggaatggctgggttttgcagaatatgggtaccaaattttggg

SEQ ID NO: 512509 - DNA, 201 bp, Homo sapiens
gggcctaaagatgtgactgaattgcttcaatcacatgctaaaaaaagctttaatggatgaagagttgctttttatggatgagcaaagaaagtggtttcttragagggaatatattcctggtgaagatgctgtggatattgttgaaatgataatgaaggatttagaatattccataaatttagttgataaagcacctttaaa

SEQ ID NO: 512510 - DNA, 201 bp, Homo sapiens
aatgtagtttgaaaccaggaagtagtttgaaaccaggaagtggttcctccagctttgtccttctttctcaagattgctttggttacttggggtcttttgcrattccatacaaatattaggattgtttttctgatatctgtgaaaaatgccattaaaattttgataggcatcgcattgaatctgtatgttgctttcagtagt

SEQ ID NO: 512511 - DNA, 201 bp, Homo sapiens
tacaggagtatacttaattgttaaaagctgtaaatagcttctattagtttagtccatgcagttaattcctgtttgatatttatgaacatttcagctttccrtgagtccgaaagttttttcctgtattttaatattacagtgttcaaaggtattagaaacctgaatttaagagcacctgttagagtcctatagctgattata

SEQ ID NO: 512512 - DNA, 201 bp, Homo sapiens
aaacaaacaaacaaacaaacaaaaaggttggcaatgttgaactttacctgagcatcatactcctggaaaatagcaatagtttaaaaatccctccactcttytgcggtcctgaaaatggcttactgcaaaaatccacccttccctatatgatttagataagaccaatggatgacgacccccttgtttacctaagacaaagac

SEQ ID NO: 512513 - DNA, 201 bp, Homo sapiens
gtgagccactgtccaccttcagcatccagtctcagcctgtggaagtccttaagttctttttctttccaggccctgggctgaggtggttagtgaaggagaawctggagagacagcaactgctttgctctcgcctccccttcccttgccaggtcacactgtgctttcactcacccagtacctggtattctagtgcctgccttt

SEQ ID NO: 512514 - DNA, 201 bp, Homo sapiens
tgcgcccggccagcttggttttattcattttagggagacatgagtcatcaatcaaatacatttaagaaatacattggtttggttcagaaaggcaggacaaygcaaagccggggcttccacgctataggtaaatttaaatactttctggttgacagttggttgagtttatctgaaggccggggatcaatggaaagaaaatgt

SEQ ID NO: 512515 - DNA, 201 bp, Homo sapiens
gctgtcaccacaggtctgggtccaacagaccctcttggcatctggtgggcaggggaggagccacttgacttcaagaaggtgtgtgagccactgtccacctycagcatccagtctcagcctgtggaagtccttaagttctttttctttccaggccctgggctgaggtggttagtgaaggagaaactggagagacagcaactg

SEQ ID NO: 512516 - DNA, 201 bp, Homo sapiens
gtaaatgaatgtgtttacaaattacaagtaccaagaataagatgcattttgttctttgaaacagggtcttgctctgtcacccaggctgaagtgcagtggtrcaatcctagctcactgcagcctcaacctctcaggcaatcctcccacctcagcctcctgagtagctgagactacaggtgcacgctactacatccagctaat

SEQ ID NO: 512517 - DNA, 201 bp, Homo sapiens
cactgcagcccagcctgcaatgtcacttataaagcaaactcaactttggtgtctcctccttctcttgtagctgtcaccacaggtctgggtccaacagaccstcttggcatctggtgggcaggggaggagccacttgacttcaagaaggtgtgtgagccactgtccaccttcagcatccagtctcagcctgtggaagtcctt

SEQ ID NO: 512518 - DNA, 201 bp, Homo sapiens
ttccctttcctccttgcctttcctcacctcttccttcctctctttcccaccacctcccttccctctccccacgttctcaccccctccctacctcatctccyattgtctttcagtattgatggagctgacatctgacggtgtgggaggcctatgtggatcccaagcccttggtcccttgaaaagtacagcctgaatcttcat

SEQ ID NO: 512519 - DNA, 201 bp, Homo sapiens
ggccgagcatctcttattttctccacccacaggtaaagaatactttcaccaatattctgaattgtattttctcaagcccatttgataaatctgcacattcttgtcctttaagccaagagtcttacctactaataagtaggtggagctgtacctgtatattaattcagtagcatcacctatgagcaaagtgtccatttgggg

SEQ ID NO: 512520 - DNA, 201 bp, Homo sapiens
ggctgggcacagtggctcacgcctgtaatcccagcactttgggaggctgaggcgggcggatcacgaggtcaggagatcaagaccatcctggctaacatggwgaaaccctgtctctactaaaaatacaaaaaaaaaaaaaaaaattagccaggcgtggtgacgggcgcctgtagtcccagctacttgggaggctgaggcagg

SEQ ID NO: 512521 - DNA, 201 bp, Homo sapiens
cgggttcaagcgattctcctgcctcagcctcctgagtagctgggattacaagtgcgtgccaccacgcctggctaattttttgtatttttagtagagatggrgtttcaccatcttatccaggatggtctctatctcctgacctcgtgatccgtccacctcggcctcccaaagtgctgggattacaggcatgagccactgcgc

SEQ ID NO: 512522 - DNA, 201 bp, Homo sapiens
tgggagagcacagggcgaggctgattcttcattgcatagcatgaatcgcacaggcttccaggggtctagaggggagagaaatcactaaaaattggtggcaycctgtcagtcggaactctccagaccaggttgagcaaaaagtaactaatcagtagagcaggcttcggagttccagggcttacacgacgtcatccaggcctg

SEQ ID NO: 512523 - DNA, 201 bp, Homo sapiens
catcaacttgctaccaacagttacagaaagtgttggacgctcctttgtgcttattgttatgctaaatgtgcccaagggatgcctcggcaagaggacggaartctttaagagccatcagcccctgattatggccgcctcatgtccaacgcttggaatggaggggaaaactattccctcagaaactgtttcctcatcaagatg

SEQ ID NO: 512524 - DNA, 201 bp, Homo sapiens
tacaaaaaaaaaaaaaaaaattagccaggcgtggtgacgggcgcctgtagtcccagctacttgggaggctgaggcaggagaatggtgtgaacttgggaagyggagcttgctgtgagccaagatggtgccactgcactccagcctgggggacagagcgagtctccgtctcaaaaataaataaataaataaataaataaataa

SEQ ID NO: 512525 - DNA, 201 bp, Homo sapiens
acctttccttagaaaaagggggaattttctctgcaaggctcttggtcctttcctccctctctttctccttctttccccactccccttcctttcttctccctttctcccttcccctttccccttgtccttacttcctccatctgtccttctctctccttctactcattggcatctggtggcccccaagtggcctgcataatg

SEQ ID NO: 512526 - DNA, 201 bp, Homo sapiens
cctttccttagaaaaagggggaattttctctgcaaggctcttggtcctttcctccctctctttctccttctttccccactccccttcctttcttctccctttctcccttcccctttccccttgtccttacttcctccatctgtccttctctctccttctactcattggcatctggtggcccccaagtggcctgcataatga

SEQ ID NO: 512527 - DNA, 201 bp, Homo sapiens
ttggcatggatgtggtgaaaagggaacacttctacactgctgatgggagtgtaaagtaaatgcaaacgcatttaccactacagaaaacagtgtagagattmcttaaagaactaaaaatagaactaccattccatctagcaatcccactactgggtatctacccaaaggaaaagaagtcattatatgaaaaagacacctgca

SEQ ID NO: 512528 - DNA, 201 bp, Homo sapiens
cggggtttcaccacattagccaggatggtctcgatctcctgaccttgtgatccgcccgcctcggcctcccaaagtgctgggattacaggcgtgagtcaccrtgcccggcccttgcccttttcaataaaacctttccccagtttctttttgaacagagtactgaagtcattttccgtgtccagatttttatagtaaataatg

SEQ ID NO: 512529 - DNA, 201 bp, Homo sapiens
caatgactggataaagaaaatgtggtatatatgcaccatggaatactactcaaccataaaagggaacgaaataatggcatttgcagcaacttggatggagygggaggccattattctaagtgaagtaatttaggaatggaaaacgaaatattgtatgttctcacttataaatgggagctaagctatgaggatgcaaaagca

SEQ ID NO: 512530 - DNA, 201 bp, Homo sapiens
atatcccactgcctaaggtgcttctttaactgaatgtcccacaggcacttcaataggatccataatctactccaaaccagtttctccaacttagatcccckcttcggtgtgtgacaatatcatcacccatcacctaagggtcaaatttacctccttctctctctcatctcattttctctcagtgttgataattgacaattg

SEQ ID NO: 512531 - DNA, 201 bp, Homo sapiens
cacttataaatgggagctaagctatgaggatgcaaaagcataagaatgatacaatagactttggactttggagactcaggaaaaggtgggaggggagtgarggataaaagactatagatcgggcaccgtgtacaatgctcaagtgacagttgcaccaaaatctcagaaatcaccactaaagaaagtatccatgtaagcaaa

SEQ ID NO: 512532 - DNA, 201 bp, Homo sapiens
ccactgcctaaggtgcttctttaactgaatgtcccacaggcacttcaataggatccataatctactccaaaccagtttctccaacttagatccccgcttcrgtgtgtgacaatatcatcacccatcacctaagggtcaaatttacctccttctctctctcatctcattttctctcagtgttgataattgacaattgttgat

SEQ ID NO: 512533 - DNA, 201 bp, Homo sapiens
gaaatcaccactaaagaaagtatccatgtaagcaaaaccacctgttccccaagaactattgaaataaaataaaatattttaaaaatgagtccatcaatgcrgcaaacttttttgttgtctgatttgaagaagttgccacatccactccagccttcagcaaccaccactcagatcagtcagaagtcatccatgttgaggcaa

SEQ ID NO: 512534 - DNA, 201 bp, Homo sapiens
ggctgggcatggtggctcacccctgtaatcccagcactttgggtggccgaggcgggcagatcacaaggtcaggagttcaagaccagcctgaccaatatggkgaaaccccatctctactaaaaatacaaaaattagctgggcgtggtggcgggcacctgtagtcccagctgttcaggaggctgaggcaggagaatcgcttgt

SEQ ID NO: 512535 - DNA, 201 bp, Homo sapiens
caggttggaatgcagtggcacgatctccacttactgcaacctccacctcccgggttcaagagattctcctgcctcagcatccgaagtagctgggactacargcatgtgccaccacaccaggctaattttttttgtatttttagtagagacagggtttcaccatgttggtcaggctggtctcgaacttctgacctcaaatga

SEQ ID NO: 512536 - DNA, 201 bp, Homo sapiens
cgaagtagctgggactacaggcatgtgccaccacaccaggctaattttttttgtatttttagtagagacagggtttcaccatgttggtcaggctggtctcraacttctgacctcaaatgatctgcccacctcggcctcccaaagtgctggggttacaggcgtgagccaccgcgcctggacaaagatgttacttgctttttt

SEQ ID NO: 512537 - DNA, 201 bp, Homo sapiens
cgcttaaacctgggaggcggaggttgcagtgaggcaagatcgtgccactgggcactccagcctgggcgacagagggagactctgtctagaaaaaaaaaaataaataataataataataataattaaacattacatttttattgcagtgatttgattttaaataattttatcattttacaatataacccaaaatatgctcat

SEQ ID NO: 512538 - DNA, 201 bp, Homo sapiens
acctcaaatgatctgcccacctcggcctcccaaagtgctggggttacaggcgtgagccaccgcgcctggacaaagatgttacttgctttttttttgagacrgagttttgctcttgttgcccaggctagagtgcaatggtgtgatctcggctcactgcaacctccgcttcccgggttcaagcgattctcctgcctcagcttc

SEQ ID NO: 512539 - DNA, 201 bp, Homo sapiens
caggcgtgagccaccgcgcctggacaaagatgttacttgctttttttttgagacggagttttgctcttgttgcccaggctagagtgcaatggtgtgatctyggctcactgcaacctccgcttcccgggttcaagcgattctcctgcctcagcttccccagtagctgggattacaggcacctgccaccacgcccaactaatt

SEQ ID NO: 512540 - DNA, 201 bp, Homo sapiens
ctcttggcgaggttctaatatgggtaagtttcagttactatgctttagttaaaacaccagctactcctcaaaccatggtccaaatttcaatgaccaaatayattgattgtgagcaatgcataacgcacaatctttgctgccagcacttcagtctataaaagcactacataacatcatgaccaacggccaatgacaccactt

SEQ ID NO: 512541 - DNA, 201 bp, Homo sapiens
caacctgtgccttgtgagttgcatttttttcatctcatttctatttctgtactctatctgaggggaggtattgtaaataacagttactgaagttggaagtrttttaattaggagaggaatacctctctttgtagcttgcctaagctcacagtagggagcaggtacagtagcagatgacacacatctgctaatcataaaatc

SEQ ID NO: 512542 - DNA, 201 bp, Homo sapiens
cgactctccttcccaatgtccgctcattctcatggatctctacttacctgcacatagacacagccctggcctgaggcctccaacgtgtacattccagggayattgggcagggtatcctgctgaaataccaatctgttaactgactgtatgttgaatgtgcgctggaaattctcagtggattttacaaccaggttgatctcc

SEQ ID NO: 512543 - DNA, 201 bp, Homo sapiens
atttattttgattttcaggtctttagcaatgttaattcaaacctgagagttttaaactatgttggaataatggataccattgagaatatagtaaaatgttrtgaaccttctttctagaaaaatgtttgcatattcaaaatattgtatacagtgtttcacttttcacaaataatcctgaaactgattcatatattgttttta

SEQ ID NO: 512544 - DNA, 201 bp, Homo sapiens
gagcagatagtagaagagcttcgcagtgccaaggtggtccatcttgctttaccttcatcccttgtaactgagcatgacccatgaaatgataagcttggaarctgtgcctgggatattgcaaggccttttgctcaaagcagtgcttgcttggatgctgaactacctgtcctgcatcctttgaataaaataagtaaactggta

SEQ ID NO: 512545 - DNA, 201 bp, Homo sapiens
tggcctcccaaagcactgggattgcaggcatgaggcatcacgcctggcctagaattgttttttctacttttgtgaagaacattattggtatttttataggyattgcatgaaatctgtagattgctttggggagaatgggcattttaacaatattgagtcttccaacccatgaatatggaatgtctttccagttttttgtgt

SEQ ID NO: 512546 - DNA, 201 bp, Homo sapiens
agatcgtgccattgcactccagcctgggcaacaagagcgaaactccgtctcagaaaaaacaaacaaacaaacaaaaaaacatttaattacacatatacacmcagatattacacatattcagtgcattcagaatcccagcaggatgtttgtggaaattaacaacttattctgaaattgttttgataatgaatagggccaaga

SEQ ID NO: 512547 - DNA, 201 bp, Homo sapiens
ctggtttcctgtggtggctctgctctcccaactcaccctcttcctcccacggcgagggggctagtccttcactctttcctgcagccagaaaatatttaccwaacagtgactgtgagcgaggcactgagcaaatctctatagatccagtgatgaataaggcagcgtccctgtccaactggagtgcatattctggcaggagag

SEQ ID NO: 512548 - DNA, 201 bp, Homo sapiens
ctacttttccctgactcatgtgtactacttttccttttaattttgcataattaaaaataaaaaagtgacctggaaatttctagttattaggagagcttcaytacagtaatctaaaattccatgccaaactttaaggtgaaagctttgcctgtcctccttcctgtgtctactttaggctggaagtctttaagagtcaagaag

SEQ ID NO: 512549 - DNA, 201 bp, Homo sapiens
tttaaaagaataatatagtcctcagtatgagatgatgttaagtacagtcataaatggtaacaagggcaagagccaaaacatttgattttatgatagaaaaytgttgaagggaataagacatatagaaagaatgactcttgtgcagaaaagggaagttttaagaaaggcaaaagaatccatttaaatggtgagataaggaag

SEQ ID NO: 512550 - DNA, 201 bp, Homo sapiens
gagaacctgcttaaaaatacaaaataaaaatatagattacatagcctaaatgttagagatttcatttccatgagtctggggtggggagcctcagaaagtgyatttttaaagagcaccttattctattctaataatatccatattattctaataatattctaataatatccgtattattctaataacattctaatcacatat

SEQ ID NO: 512551 - DNA, 201 bp, Homo sapiens
aacatcacacaacaaggcctgtcgtgcagtggggagagggggagggatagcactaggagaaatacctaatgtaaatgacgagttaatgggtgcagcacagmaacatggcacatgtatacatatgtaacaaacctgcacgttgtgcacaagtaccctagaacttaaagtataataattaaaaataaaataaaatgtgatata

SEQ ID NO: 512552 - DNA, 201 bp, Homo sapiens
cctttggggattcctggtcctggaagacccagctgtcttccctgggtgggaggggccaaggtgagagcccagcttggaagcttttgctcctgagagcctgkgagctcactgccttccaccccactttgccccctggtttcctgtggtggctctgctctcccaactcaccctcttcctcccacggcgagggggctagtcctt

SEQ ID NO: 512553 - DNA, 201 bp, Homo sapiens
tcaccatgttggccaggctggtctcaaactcctgactttaggctatccgcctgcctcggcctcccaaagtgctgggattacaggcgtgagccaccgcgccyggccaaagatgttattttctataaaggcaaccgttagaaccttcaactcattatttttaggctgacaaaaacatctgttattattatactacactatgta

SEQ ID NO: 512554 - DNA, 201 bp, Homo sapiens
aaattgagccaggagtcttacacaattgagagatattcagttttcaaaaaattgatcattacaatctgagattataatgctacaaatattcataatctacycagcatcatgcttctttttgaataaaaatatggtgtgatattaactatgattgctaaaacctcattgcacagtttattgttgcttcatatttataatgca

SEQ ID NO: 512555 - DNA, 201 bp, Homo sapiens
ccaccgcgcccggccaaagatgttattttctataaaggcaaccgttagaaccttcaactcattatttttaggctgacaaaaacatctgttattattatacyacactatgtattgtgaatagtttattttacaagcataatagagtattttgaaattacactctgctagaaccccttgctagttgttaattttacctagaaa

SEQ ID NO: 512556 - DNA, 201 bp, Homo sapiens
cagcatcatgcttctttttgaataaaaatatggtgtgatattaactatgattgctaaaacctcattgcacagtttattgttgcttcatatttataatgcartatattaactactatatagtggcatgaacaaaatatgaaaaagcatagtaaacagataaaatagaaagtgagaccagactaatatggtgatggtagtcta

SEQ ID NO: 512557 - DNA, 201 bp, Homo sapiens
ttcatatttataatgcaatatattaactactatatagtggcatgaacaaaatatgaaaaagcatagtaaacagataaaatagaaagtgagaccagactaayatggtgatggtagtctaagacagtatttcagcagaagactacaatctagctagcgacaatctgagaaccaaggcgatcaacagtgaaaactgtcaaaaga

SEQ ID NO: 512558 - DNA, 201 bp, Homo sapiens
gttctgtaatcttcttatatttggatattgataacctttcctaggtttctgctattatttctttgaataaacttttttttttaaatacatcttctattccyatctctttttctgcctcctcctgaagaccagtaactcttaggtttgcccttttgaggctattttctagatcttgtaggtgtacttcattcttactctttt

SEQ ID NO: 512559 - DNA, 201 bp, Homo sapiens
ggtagtctaagacagtatttcagcagaagactacaatctagctagcgacaatctgagaaccaaggcgatcaacagtgaaaactgtcaaaagacaacgaatyatgacctggacttcagtctttacaacaggatacctgacaaatttcatttcatgtagtttagaaacctgttagaactaagcattcttttgtggtctctcag

SEQ ID NO: 512560 - DNA, 201 bp, Homo sapiens
tcttatatttggatattgataacctttcctaggtttctgctattatttctttgaataaacttttttttttaaatacatcttctattcctatctctttttcygcctcctcctgaagaccagtaactcttaggtttgcccttttgaggctattttctagatcttgtaggtgtacttcattcttactcttttttcttgtgtctc

SEQ ID NO: 512561 - DNA, 201 bp, Homo sapiens
gggtgacagagcaagatctgtctcaaaaaaaaaataaataaataaaataaaataaaatataaaaaaaagagatgagaaacaaatgatcagatttgcagagyaatctttcaagaatttatcctatttacacatgcagaaatgtcaattacaacattactatcagggcaacaaattatcaagtaaagctaccaatcagaatta

SEQ ID NO: 512562 - DNA, 201 bp, Homo sapiens
aatatgattacccaactccctgctttagtaataactacatttgcataagaacaggattaatggactgttccctcaaatatgggtcatagataagaagatcrtttgtaccaaatgtttatggcaaggagtttccatggcacaacaaactgcatgtgcttatgtatagagatggaaattgatgtagcatttccaaaaatgatg

SEQ ID NO: 512563 - DNA, 201 bp, Homo sapiens
tgtgccatgagcacctgcctcctgggtaaagatctgcaccatagattgtcacgtgggaggaatgtgccttgtgcaaccagactcctgtaagaactccgggwcctcagacctaagtggacttacgtgggcagagacatctcatatatgttcgtataatttgtagtcgtgccaaaagcaccttactgtgaccagcatggaggg

SEQ ID NO: 512564 - DNA, 201 bp, Homo sapiens; identical to SEQ ID NO: 82398

SEQ ID NO: 512565 - DNA, 201 bp, Homo sapiens
tatctttgcaagccagtgtttctaattgctggacattatctggttcagtattccatttagataaatagattcaatgcatggctggcctatgagatttgggyattcataataaatttgactacataataaaaatatagtaatgatgcaactgggctcattatcaaatgagccaagatatagagcatatacctagtttcttct

SEQ ID NO: 512566 - DNA, 201 bp, Homo sapiens
taaagcacaagcatttttccaaaggtaattttcaaggccagggcaagtaagtttctaagtcttagttttataaaactcttttttcaaagaaaatgacttayaataagaaaccgaagattcacaccactctccatattgcacaaaagagaaaaaagattgatatttttgtcaatatcgaccatttgacactttacaaaatca

SEQ ID NO: 512567 - DNA, 201 bp, Homo sapiens
tggctggcctatgagatttgggcattcataataaatttgactacataataaaaatatagtaatgatgcaactgggctcattatcaaatgagccaagatatrgagcatatacctagtttcttctgcccaaatcttacatcggtcttttctttcattttctgcaatttcattgctgatggtgcctttcttttcctttaagtca

SEQ ID NO: 512568 - DNA, 201 bp, Homo sapiens
tcttttttcaaagaaaatgacttacaataagaaaccgaagattcacaccactctccatattgcacaaaagagaaaaaagattgatatttttgtcaatatcraccatttgacactttacaaaatcagatattttgaatatgtgttatatctcagaaagacatcctcctctctgtgctataggggagaggagcatatccttta

SEQ ID NO: 512569 - DNA, 201 bp, Homo sapiens
taataataactgaaatacagagcctatagcattatttttccacaatatgtaatcacatatttataaatctgaaaataaaagaaatatcattagaatgtcastctgtacaaatttatggcaatatgcacaaaatacactaaaagctgccttatttttatgcagttgcatgctcacatatatatttctgtaacagacaatttt

SEQ ID NO: 512570 - DNA, 201 bp, Homo sapiens
tgggtcttttgtggttccatgtaaattttaggtttgtttttttctcttcttttcttttttttttggtgggggggttggggggcgggacagagtctgactgygtcgcccaggctggagtgcagtggcacagtcttggctcactacaacctctgcctcccaggttcaagcgattcttgtgcctcagcctcctgagtagctagg

SEQ ID NO: 512571 - DNA, 201 bp, Homo sapiens
gaagtttgtctttctgtgtctggcttatttcacttaacataatgacttccagttcaatccacggtgttgcagacaacaggatctcattctttttatggctkaatagtgctccattatgtataagtaccacattttctttatccattcatctgttgatggacacttaggttgcttccaaatcttagctattgtgaatagtgc

SEQ ID NO: 512572 - DNA, 201 bp, Homo sapiens
aagtatgttcacagcccacagaccaaatggactccctatgactcactgaggtactcatatttaaaacagaaacccagtggctacagccgggtgtgggagcratcacatactctgtgttctcagaaagatataagagcatcacaggacccctcttttcacaatcaagccaaaccagcgcctgctgttgctcccaggacaaac

SEQ ID NO: 512573 - DNA, 201 bp, Homo sapiens
tgttttttttttttttttctccctctgttgcccaggctggagtgcagcggctcgatctctgctcactgcaacttctgcctcccgggttcaagcgattctcytgcctcagcctcctgagtagctgggattacaagtgcgtgccaccacgcctggctaattttttgtatttttagtagagatggggtttcaccatcttatcca

SEQ ID NO: 512574 - DNA, 201 bp, Homo sapiens
tccttgcccacccaattcctcaaggacttaacttgtgcaagctgactcccagcacatcagagtgcaattaactgataaggtcctgtggcaagttatgtccrcagttcccaggaattcgctcgggtgatagtatcctaagcccctgcatttgtatccagtagatagcacccaaagcccttgcacccatcaccttgtgatgga

SEQ ID NO: 512575 - DNA, 201 bp, Homo sapiens
gtggcgtaatcttagctcactgcgacctccgcccgccaggttcaagcgattcttccgcctcagcctcccgagtagctgggattacaggcgcccgccatcasgcccgactaggtttttgcatttttagtagagagacggggtttcatcatgttgtccaggctagtctcaaactcctaacctcaggtgatcctcccgcctcgg

SEQ ID NO: 512576 - DNA, 201 bp, Homo sapiens
ctgggattacaggcgcccgccatcaggcccgactaggtttttgcatttttagtagagagacggggtttcatcatgttgtccaggctagtctcaaactcctracctcaggtgatcctcccgcctcggcctcccaaagtgcggggattacagtcgtgagccacctcgcccggccaataatatttctaatgactaatttcttgt

SEQ ID NO: 512577 - DNA, 201 bp, Homo sapiens
ctgctgcctattttggtagataaagtttaattagaggccaggcacggtgtctcatgtctgtaatcccagcactttgggaggccgaggcaggtggattaccygatgtcaggagtttgggaccggcctggccaacacggtgaaaccctgcctctactaaaaatacaaaaattagctgggcgtggtggtatgcacctgcagtcc

SEQ ID NO: 512578 - DNA, 201 bp, Homo sapiens
atctcctggacctaataccccttcttcctaaagcacaaaatggtaagtcttaatccttgaaatgcttttttctgtgctgaccactttgtgttactgtagtrcttttaaacttacgcatatgtaactgatatttcagcaaaatttctgttcctgaaatattaaattactaatgtacttatatcagtcttcaaagttttagag

SEQ ID NO: 512579 - DNA, 201 bp, Homo sapiens
aaatttgactacataataaaaatatagtaatgatgcaactgggctcattatcaaatgagccaagatatagagcatatacctagtttcttctgcccaaatcytacatcggtcttttctttcattttctgcaatttcattgctgatggtgcctttcttttcctttaagtcagtgttttgtagaatattcaaacatactttttc

SEQ ID NO: 512580 - DNA, 201 bp, Homo sapiens
ttcttttgtactttttattcctgaaactatttaaatattcattttcagaactctagatattgctaatcatctcctttagtactataacaaaggaaaatcaygtaagctgaaaatagattttgaaaggccctagatataaccacatgtaacacaactctaaaaaaaggactggaaaaatgatttctatttgaaatgcttacc

SEQ ID NO: 512581 - DNA, 201 bp, Homo sapiens
aataccccttcttcctaaagcacaaaatggtaagtcttaatccttgaaatgcttttttctgtgctgaccactttgtgttactgtagtacttttaaacttaygcatatgtaactgatatttcagcaaaatttctgttcctgaaatattaaattactaatgtacttatatcagtcttcaaagttttagaggtatctgtcacat

SEQ ID NO: 512582 - DNA, 201 bp, Homo sapiens
agggagagatagtatgaaccagaaggggacatgaaggagttgttgtattggttcttggctggtttatacaagatttagtgcagacagtcattagtgactasagcagaatcagcctcattttaataattgtttttagagaaaaatcaagcagcttagaacaatgaaaatgtgattttactaggttcttgttcactagttttt

SEQ ID NO: 512583 - DNA, 201 bp, Homo sapiens
tatctggcaagttttacatatagctcgtcatgacgaccaattttctacaatttacaataaggtggcaatgaacacaaaacaaatattgcccaatgaaacaytggtttaccaggcaaaacaaatactaggtagtggcataacacattaaagtctttcccagcagcccagacagcatgagaggtgctagcccaaatattgacc

SEQ ID NO: 512584 - DNA, 201 bp, Homo sapiens
caagcagcttagaacaatgaaaatgtgattttactaggttcttgttcactagttttttgaaatagaccaagctgagtttaaaaaaaaatctaaaaaaaaargacaaattaagtaataaaaactaaatttgttgaacacagttgaagccatctgcattggaagtattacaaatagcaaacaaaaagggatagtactctaggt

SEQ ID NO: 512585 - DNA, 201 bp, Homo sapiens
tatttataaatctgaaaataaaagaaatatcattagaatgtcactctgtacaaatttatggcaatatgcacaaaatacactaaaagctgccttatttttaygcagttgcatgctcacatatatatttctgtaacagacaattttactttgatgtgacaggagataatcgatcttgaagttaaagataataaatttgggtgt

SEQ ID NO: 512586 - DNA, 201 bp, Homo sapiens
aaatagcaaacaaaaagggatagtactctaggttcatttctcattattagaatctcatccaaatggttaacgtcttcccatggcacctttgggtaatatawtcattttcttcctatgaggaaatctcatgagaagctctacctctcttaatgcttgagttaatgttgcagcagtagctttcttcaataccatctcaatatt

SEQ ID NO: 512587 - DNA, 201 bp, Homo sapiens
gacaattttactttgatgtgacaggagataatcgatcttgaagttaaagataataaatttgggtgtgactaaggtgtataaatttcagttgatctatatakatttatagcaagatggttaaaatgtgaggttgctcatcagaggcatagggttatcttaattatctctgatatgtaaatcatttacttttcacaaaaggcc

SEQ ID NO: 512588 - DNA, 201 bp, Homo sapiens
agattcaattccatgaatttagaataacaagtaggcccttaattcaactgttatatttctcagttccaagaattctggacaaggtttatgaatcctgttcytatctccagacacattacgttttattagtgaatgaatgctgcaattagtgggaaggagcacttagcaacttggggagtgggcaaaggaccctatgtactc

SEQ ID NO: 512589 - DNA, 201 bp, Homo sapiens
taaagataataaatttgggtgtgactaaggtgtataaatttcagttgatctatatagatttatagcaagatggttaaaatgtgaggttgctcatcagaggyatagggttatcttaattatctctgatatgtaaatcatttacttttcacaaaaggccctctttcttgtgtaaacacaaacaaccataaattaaaataagta

SEQ ID NO: 512590 - DNA, 201 bp, Homo sapiens
gaaactctgcaagggaaacttgggcaaatgtctacatttatttacttgtctgataaggaaatggtggagtataggaatggccaataatctaagacaaaaamaattagtgctagatacagaaatcaaaattgaagcatttcaaaaagaggcaaccagcagtgtaaaacattgcaactgtcagagtgaagactgaccacgaat

SEQ ID NO: 512591 - DNA, 201 bp, Homo sapiens
aatcaaaattgaagcatttcaaaaagaggcaaccagcagtgtaaaacattgcaactgtcagagtgaagactgaccacgaatttgttgataaggaagttatkattcatctaagagggcatttttattatgttggagagacccaagggcaggattgcttactgagactgcagggtgtatgttgtgaaagagagagaagtaaat

SEQ ID NO: 512592 - DNA, 201 bp, Homo sapiens
gagttcctgtttattattgaggtcatgtgttttgttaccaggtcaactagcttactcctgcactgatgatcctggaatgaaagttttttttattgaaagtytatttgcagccaggtgtggtggctcacacctgtaatcccagcactttgggaggttgaggcaaaaggatcccttgagcccaggagtttaagacaagcctgg

SEQ ID NO: 512593 - DNA, 201 bp, Homo sapiens
ctctgtcacccaggctggagtgcagtggcgcaattatggctccactgcagccttgatttcccaaactcaagcaatcctcccacttcagtcccctgagtagytgggaccacaggcatgcaccaccatggctggctaattaaaaaaaaaaaaaaaaaaaaaaaaatttctagaaaaggggtctctggacaggcgcggtggctc

SEQ ID NO: 512594 - DNA, 201 bp, Homo sapiens
tgattgtaccactgcgctcgaggcttgaggacagagcaaaacactgactcaaaaaaaaaaaaaaaaaaaaaagaaagaaagtctacatccaatagccagargtatgtctctaaggtccttgaccttccaagtataatgcaaaacacagaagagattgttttagaatgataaatttgactactaagcaaaaaattatgcatg

SEQ ID NO: 512595 - DNA, 201 bp, Homo sapiens; identical to SEQ ID NO: 82381

SEQ ID NO: 512596 - DNA, 201 bp, Homo sapiens
gcaactgtcagagtgaagactgaccacgaatttgttgataaggaagttattattcatctaagagggcatttttattatgttggagagacccaagggcaggrttgcttactgagactgcagggtgtatgttgtgaaagagagagaagtaaatgaaaattcttgaaaactaggcagatgagtttcaatataatcaatagatat

SEQ ID NO: 512597 - DNA, 201 bp, Homo sapiens
taggcagatgagtttcaatataatcaatagatattcaaactttcagtcagaaatcagtatttgtttgggttgtcctaaatgtgtttatgtttctttgcttmataatagatttataattaacctcttcactcatctagaaaaaaaaccttgagttcatatattaacattatttttatttttatttcagtatccagtgatcac

SEQ ID NO: 512598 - DNA, 201 bp, Homo sapiens
ttaacattatttttatttttatttcagtatccagtgatcacccttcaggtaagataactaatagttgaagaattgttttctcattttttgaacatctctcyaaacctcaaaatcaaaaggcagctcacagggaagattgtctatttaaattgtcgcagaattattaatttcatgtagacagcctcaagaggacagaaatag

SEQ ID NO: 512599 - DNA, 201 bp, Homo sapiens
ttataaaaaggagatattaattttgttgattttaaaattttctgctgaaaataaatcatgtagctataattacaaaacctcacttaaaaaaataagacagyctccaattaatacaataaatcttatgcaaagattgtcaaatcaagaggctaagagagtgtggactccagatatccctaggccattaatgagacatgctga

SEQ ID NO: 512600 - DNA, 201 bp, Homo sapiens
accttagggcaactcaccagatggctctgagcctcagtttcctcatgtgtagattgtagataataatatttttatcataaaattgatgtgggtaatacatrtaaagtacttagcagagcgattaccatttattttatttcactagtttttacggaaattctttaaattttagtagtgtgtaggaagagatcatctttgtcc

SEQ ID NO: 512601 - DNA, 201 bp, Homo sapiens
tcttatgcaaagattgtcaaatcaagaggctaagagagtgtggactccagatatccctaggccattaatgagacatgctgagccttccatgaaataatctytataattaacatcacaagtgtgtaagaaaaggggtattgaatcagacagactttatcaggttccagttctttaatttactgagtgtgccgggtgtgtgtg

SEQ ID NO: 512602 - DNA, 201 bp, Homo sapiens
aatagtgttgcaacgaaaagataaataaaatcaagtgacatgatctttgacatacagtagtcgcccctaaagtaattggagaaaaacatgtgtttcttackgtgaggatagatctaagggctatggctagattaagagagtactaaaagaaccctcggatagtcacatagtttaacataatttagtcatcccttctctctg

SEQ ID NO: 512603 - DNA, 201 bp, Homo sapiens
agactccatctcaaaaaagaataaataaatacatacataaataaataatcgcaggaacatatcggaaattattgtctcttgaagcaagaactgtcacaccrttccttcaactcatagttcttttcttttttttattatttgtttgtttgtttgtttgtttgttttttgagacggagttttgctctttattgcccaggctgg

SEQ ID NO: 512604 - DNA, 201 bp, Homo sapiens
gattcttctcatatggcttgccatccttttgcccttttattttcattttcaggtcaacttaaatttttctaaagaaaaaagtttaccaggatccaatgtcsatcttcaagtctcggctgcttcaaactctctttatgctctttgggcggtagaccagagggtattgctactaaggaattatggtcagctgccagcacaaac

SEQ ID NO: 512605 - DNA, 201 bp, Homo sapiens
acacacctcctatgtctcagacttacaacaacaagttcatggatctttgcatgggctggagcaaccttgctttaggctatagggtgcctgagtgtggctcyaggcttctacttgggttcaggactgctcaacatgtttcctcagttctttggaccagcagctaactggggcatgtcctgtaaactttttgtcttgaaataa

SEQ ID NO: 512606 - DNA, 201 bp, Homo sapiens
cttttgctgtgcagaagctctttagtttaattagatcccatttgtcaattttggcttgtgttgccattgcttttggtgttttagacatgaagtccttgccyatgcctatgtcctgaatggtattgcctaggttttcttctagggtttttatggctttaggtctaacatttaagtctttaataatctgtcttgaattaattt

SEQ ID NO: 512607 - DNA, 201 bp, Homo sapiens
aatgaacacaaaacaaatattgcccaatgaaacactggtttaccaggcaaaacaaatactaggtagtggcataacacattaaagtctttcccagcagcccagacagcatgagaggtgctagcccaaatattgacctacgactctttacaatgttgtagacaccaccaagaaaatcatactggaccttgcagaggggcttgc

SEQ ID NO: 512608 - DNA, 201 bp, Homo sapiens
acaaatactaggtagtggcataacacattaaagtctttcccagcagcccagacagcatgagaggtgctagcccaaatattgacctacgactctttacaatrttgtagacaccaccaagaaaatcatactggaccttgcagaggggcttgctccttcctaggatgaggctttacatccttccgttcttccacagagtttgta

SEQ ID NO: 512609 - DNA, 201 bp, Homo sapiens
caactttttctttaacattccttagaatgttgtatgttttagactcctgagaatggtggattttgaggtttttaccatggcttgtcaagccatttaatgaytctttagaggtctgcacgccgctgctgtgtttctcatttgatttcccacaactttcaacctgcacggcaagtttacttggtctcatatgttcagaatcac

SEQ ID NO: 512610 - DNA, 201 bp, Homo sapiens
taatccttgaaatgcttttttctgtgctgaccactttgtgttactgtagtacttttaaacttacgcatatgtaactgatatttcagcaaaatttctgttcstgaaatattaaattactaatgtacttatatcagtcttcaaagttttagaggtatctgtcacatccagaggaaattcaagtattaaacaaacatttaattg

SEQ ID NO: 512611 - DNA, 201 bp, Homo sapiens
tctctccttgtttacaactgttggtatccaaaggacaacactgctctttttgtttctcttcctctgaagatgagttcttgatggaattacactgacactgrggtactccttcgtaaaccatggagagccagcccaatgcacagcagtggatatcatctttctcagagtccagtatcacagaatcacgactttgtccagctg

SEQ ID NO: 512612 - DNA, 201 bp, Homo sapiens
ctgccttgatacagccagtgaactatgagtggttttaacatttttaaaagattatttaaaaaataaaaaaatatatgagagagagaccatggtgttttacraaagaagtttgctaaaatctggactaaatgatcatggaaagtttccctgaggaagtaatatttaggttgacacaagaacactaaaaaagaaatacaaaag

SEQ ID NO: 512613 - DNA, 201 bp, Homo sapiens
aaatgatcatggaaagtttccctgaggaagtaatatttaggttgacacaagaacactaaaaaagaaatacaaaagtgggtagcctggcttacatcttacaragcagtttctcaaactggcatcagcatcacctaaaggacttactgaaacaaatttcagtaaaagtcatttaatgaacaaatttagattgaaatacagctt

SEQ ID NO: 512614 - DNA, 201 bp, Homo sapiens
ataactaatagttgaagaattgttttctcattttttgaacatctctctaaacctcaaaatcaaaaggcagctcacagggaagattgtctatttaaattgtygcagaattattaatttcatgtagacagcctcaagaggacagaaataggtttccacccccaccaccatgtgattcatattagcatgcacccattaatacag

SEQ ID NO: 512615 - DNA, 201 bp, Homo sapiens
cttgcctgtaatcccagcactttgggaggctgagctgggcgactgcttgaggtcagaagttcaagaccagcctgaacaacatggtgaaatcctgtctctaycaaaaatacaaaaaaaaaattagccaggtgtgcacacctgttgtcccagctacttggaaggctgaggtgggaggattacttgagcctgggaggtggaggt

SEQ ID NO: 512616 - DNA, 201 bp, Homo sapiens
tttgcctggaccagcaggaaaatgataagtggcagaaataagatgaaaggctcaaagcagaagttgttttgcagaaactgactgagctaaaaaaaggatgkctcagacagtcttcttctggttgttgtggccttagatgttgttaagaaggtgcctttaaaggcttcaaactggcatagatactgatgcaggcattgtatc

SEQ ID NO: 512617 - DNA, 201 bp, Homo sapiens
gttttctcattttttgaacatctctctaaacctcaaaatcaaaaggcagctcacagggaagattgtctatttaaattgtcgcagaattattaatttcatgyagacagcctcaagaggacagaaataggtttccacccccaccaccatgtgattcatattagcatgcacccattaatacagacaataataatatagacaacg

SEQ ID NO: 512618 - DNA, 201 bp, Homo sapiens
gacagtcttcttctggttgttgtggccttagatgttgttaagaaggtgcctttaaaggcttcaaactggcatagatactgatgcaggcattgtatctactrcaaatcatacaatttcagaagggactttttaaagcaatcattgcctgtactagtaagagaatgagaaagagatttctagcaaataaccatggcctatcag

SEQ ID NO: 512619 - DNA, 201 bp, Homo sapiens
ttttttgaacatctctctaaacctcaaaatcaaaaggcagctcacagggaagattgtctatttaaattgtcgcagaattattaatttcatgtagacagccycaagaggacagaaataggtttccacccccaccaccatgtgattcatattagcatgcacccattaatacagacaataataatatagacaacgggcaagtat

SEQ ID NO: 512620 - DNA, 201 bp, Homo sapiens
atcagtttgctacttatcagctgtgtgaccttagggcaactcaccagatggctctgagcctcagtttcctcatgtgtagattgtagataataatatttttmtcataaaattgatgtgggtaatacatgtaaagtacttagcagagcgattaccatttattttatttcactagtttttacggaaattctttaaattttagta

SEQ ID NO: 512621 - DNA, 201 bp, Homo sapiens
tatgcactggggataaaatatggctcgcctttaagaaatcagagattgacacagaaaataaatgtaaaaaaatcacagctagctctaaaatatactaagtrctgtaatatgcatctatgtgacctcagataggagagtaaccaattctccttgggtgatgtgaggacgcactcatgttttgaatcctaagtaagttggaaa

SEQ ID NO: 512622 - DNA, 201 bp, Homo sapiens
aaacattgttttaaacttagattcaaacatcagtttgctacttatcagctgtgtgaccttagggcaactcaccagatggctctgagcctcagtttcctcaygtgtagattgtagataataatatttttatcataaaattgatgtgggtaatacatgtaaagtacttagcagagcgattaccatttattttatttcactagt

SEQ ID NO: 512623 - DNA, 201 bp, Homo sapiens
ttggaaacctaagtaggaaacaccttgctgaaactttataatgaataaaaacatccagcatgcaaaaatacgctttcttattctcaggatccagaaggcartcgaatacaacagtgggtgaatgaggagtctgtgggagggattctacaactctccttccagttaatctcagagcccatcctcggatggtatgaaatcacc

SEQ ID NO: 512624 - DNA, 201 bp, Homo sapiens
gatatccctaggccattaatgagacatgctgagccttccatgaaataatctctataattaacatcacaagtgtgtaagaaaaggggtattgaatcagacaractttatcaggttccagttctttaatttactgagtgtgccgggtgtgtgtgtgtgtgtgtgtgtgtgtgtgtgtgtttgatgttaattagggtaatgata

SEQ ID NO: 512625 - DNA, 201 bp, Homo sapiens
tcgaatacaacagtgggtgaatgaggagtctgtgggagggattctacaactctccttccagttaatctcagagcccatcctcggatggtatgaaatcaccrtggagatgctcaatgagaagaaaacatatcactccttctctgtggaagaatatggtaaataatagcaatgaaaatattacctatcaataaaaaaattata

SEQ ID NO: 512626 - DNA, 201 bp, Homo sapiens
ggatagtaaaacttaacatttgaaatagacttgacaattttttgtttgtttctgagtcaagatgtttcctgtacacctatttctcttccttctctttttcygattctcaaattcaagagacaaatctacttgtcctacactcccgtgcagttcccgtcatcctcaacaagaatcagcacttgtcagaggaacactcttgat

SEQ ID NO: 512627 - DNA, 201 bp, Homo sapiens
acttgacaattttttgtttgtttctgagtcaagatgtttcctgtacacctatttctcttccttctctttttccgattctcaaattcaagagacaaatctayttgtcctacactcccgtgcagttcccgtcatcctcaacaagaatcagcacttgtcagaggaacactcttgatttgcctcttggcaatccctgctccacaa

SEQ ID NO: 512628 - DNA, 201 bp, Homo sapiens
tggtatgaaatcaccatggagatgctcaatgagaagaaaacatatcactccttctctgtggaagaatatggtaaataatagcaatgaaaatattacctatyaataaaaaaattataaaatctttccaattttgcaagggcaagattattaaataatgaattttcaagtgagtatctcttcctttcctctttccttgtcctc

SEQ ID NO: 512629 - DNA, 201 bp, Homo sapiens
atatcactccttctctgtggaagaatatggtaaataatagcaatgaaaatattacctatcaataaaaaaattataaaatctttccaattttgcaagggcargattattaaataatgaattttcaagtgagtatctcttcctttcctctttccttgtcctctgttactattttagggttctccatctactgtgatttttatc

SEQ ID NO: 512630 - DNA, 201 bp, Homo sapiens
attttctcctaaaatcttcataaaatttctattgtagtatctttattactattttaaagatgaagatattgagaaacactttcccaagttcaacacctgaraagtgatgaatttggaattcaaaatatgcatttttctatccaattccaaaatccagtcttaggcacttcaacgtcctcctcacactgtttattaatggca

SEQ ID NO: 512631 - DNA, 201 bp, Homo sapiens
agaaacactttcccaagttcaacacctgagaagtgatgaatttggaattcaaaatatgcatttttctatccaattccaaaatccagtcttaggcacttcarcgtcctcctcacactgtttattaatggcaaacataagcaaaggttgatggtttgtaaaggagaaacaattgttttgtatgaatgtatttatgttaatatg

SEQ ID NO: 512632 - DNA, 201 bp, Homo sapiens
ggagaaaaccggcggcctcccgggccccagagtttaagtcaagtggggtccgcctccaggggcgggtcgaggagccaggcccaggatccaggaacagctasgctccgcctcacgcccgaggcggtggctgcgagggccgcgccgccgcggtcctagtgccaccagagaagccgcggacccggcccgcagataacacccggg

SEQ ID NO: 512633 - DNA, 201 bp, Homo sapiens
gaccaattttttctataaagcgcatggaagtcagagtgcacccaagagattgttaacccttaaaaaacagaaaaaaaaaaaagaaatcaacaagttagagrcaaataagtgtgaaagaaagtggatagtctatttggggattctgaaagtccctgaggaaagttgactttggagaccagatcacgaagcacgacctcttaa

SEQ ID NO: 512634 - DNA, 201 bp, Homo sapiens
acttctcctcgctgctgccatgtgaagaacgaaggttttgcttccccttccaccatgattataagtttcctgaggtttccccagccctgcggaactgtgartcaattaaacccctttcctttaaactaccaagtctcaggcagttctttacagcagtgtgagaatggactaaaacagtcagttattaccacaataatgctt

SEQ ID NO: 512635 - DNA, 201 bp, Homo sapiens
attttgtgtgaaaatgttatattttagcttcctttctgaacttaatcttctgaggtttttgttattagtttgttttattcgattggcaaagatctccaatwtgaatattagagatgatagtggacttcctggttgtattttgcatattttggggaatgcttttaaaaatgtaatgcgtaaacctactaagtaactgtagca

SEQ ID NO: 512636 - DNA, 201 bp, Homo sapiens
tacagaatgaggaaaactatggttggagaaatttgcaggcaggatcagggaagagtctacagcgtatttcttaaaactagatatttcttgccttgacatcycagcaaacaaacaaaactgggtatttcttaaactaggtggtgggtacactggtgttcatttgatggttattgtctatactacttgttattaaacttggct

SEQ ID NO: 512637 - DNA, 201 bp, Homo sapiens
gttaatcagggctcagctgcatcagaggaaagcaaatgcaaatgaatctgggttcatatgcaaatgaacctgatggggaacctgggcagcaaattttgctrtaaagcccgactcctctctgttctctgaacgcacattcattttacactgaactctggtctctcagtgttagtccaaactgcaccatgtcataagctctcc

SEQ ID NO: 512638 - DNA, 201 bp, Homo sapiens
ccactgaactccagcctgggcaacagagtgagaccctggttctaaaaataaataaataaataaataaataaataaataaataaataaggacttttaacaayccttgtacttttttattggaaatacgcatagaaagcaaagaagattttgaggtctagctgataaagggccacattcagtcttttattggttttttggtga

SEQ ID NO: 512639 - DNA, 201 bp, Homo sapiens
caggctttttttttttttttttttttttttaagacggagtctcactctgtcaccaaggctggagtgcagtggcacaatctgggctcactgctaccttgacstcttgggttcaagtgattctcctgcctcagcctcccaagtagctgggattacaggaacacaccaccatgcccggctaagactcaggcttttaatgagaag

SEQ ID NO: 512640 - DNA, 201 bp, Homo sapiens
ttatgacaaagttaggaaaaaagttcttttcaatacatgaagctaggtcaattggttatctatatgccacgaatgaaaataagccttatccaattacacascaagagacatatacaaacaaatcaatcccaggtagattatcgttttaaagtttccagaaacaggccaggcatggtggcccacgcctgtaaatcccagcac

SEQ ID NO: 512641 - DNA, 201 bp, Homo sapiens
tgaaacacaggaaactagggctggtctgactcctgagtaaaccaagggcagggctgggtgaagggaacccctgcttagccttgtccatgtcctcaaggtcrccccggaggcccccgagtttccacaaaacacctgaagaccatcggtgcaccaggaagcggccccagcttctgctcctggagctgctacttcccagctgtg

SEQ ID NO: 512642 - DNA, 201 bp, Homo sapiens
catttcaagctgtcacatgtgactagtggccactgaattggagagcatagacataaaacatagaacattccatctcccagaaatttccattggacaatatyttctgtttatgatgatttctcaattcaatctttatgtattacatgattataaaagaaagctgaagctcaagatgtatcacagagaaaactgctgtaagag

SEQ ID NO: 512643 - DNA, 201 bp, Homo sapiens
cacatgtgactagtggccactgaattggagagcatagacataaaacatagaacattccatctcccagaaatttccattggacaatatcttctgtttatgaygatttctcaattcaatctttatgtattacatgattataaaagaaagctgaagctcaagatgtatcacagagaaaactgctgtaagagttacaagtggctc

SEQ ID NO: 512644 - DNA, 201 bp, Homo sapiens
atagaacattccatctcccagaaatttccattggacaatatcttctgtttatgatgatttctcaattcaatctttatgtattacatgattataaaagaaarctgaagctcaagatgtatcacagagaaaactgctgtaagagttacaagtggctctagggtaatggcggggcacagtgtggaggatactaagggcagacag

SEQ ID NO: 512645 - DNA, 201 bp, Homo sapiens
accaattttttctataaagcgcatggaagtcagagtgcacccaagagattgttaacccttaaaaaacagaaaaaaaaaaaagaaatcaacaagttagaggsaaataagtgtgaaagaaagtggatagtctatttggggattctgaaagtccctgaggaaagttgactttggagaccagatcacgaagcacgacctcttaat

SEQ ID NO: 512646 - DNA, 201 bp, Homo sapiens
actaagggcagacagggacttaggggcaaatagtgaggattaacgtgtggcaggagtagcagtgaagcaggtcaggttgttttcccctcttgtcactaagktaagcaacattcacagagtttatataaccagcaaagagagccagggtgcaaacattaaaactttgtctcctcagacctgatgtgtactacttttccctga

SEQ ID NO: 512647 - DNA, 201 bp, Homo sapiens
ccgtgatggtgtcgatcaggttgtgcgcctcgtcgatgatcaccacctggtcctgcagccggatgcccgcagcctgccgagtggccgcatgcagcagcatytgatagggcagcaccaccagctgggaggggagatgaggccacctgagcagggcggggctcccctgcaggaggcttgcctgcctgacactgagctcctgat

SEQ ID NO: 512648 - DNA, 201 bp, Homo sapiens
ggacttaggggcaaatagtgaggattaacgtgtggcaggagtagcagtgaagcaggtcaggttgttttcccctcttgtcactaagttaagcaacattcacrgagtttatataaccagcaaagagagccagggtgcaaacattaaaactttgtctcctcagacctgatgtgtactacttttccctgactcatgtgtactact

SEQ ID NO: 512649 - DNA, 201 bp, Homo sapiens
ccataatgtcaatcctcccatttcacaataaagaaattgaggctcaggctggagacggtggcccacacttataatcccagcactttgggaggctgaggcartgggatcatttgaggatcggagtttgaaaccagcatgggcaacatggtgagattccagttctacaaaaaaaaaaaatgtttttggccgggcgcggtggct

SEQ ID NO: 512650 - DNA, 201 bp, Homo sapiens
cagcctcccaaagtactgagactacaggcatgagccaccacgcctagcattgctctggttttttgtagaggttggagggaactgaaaacagcaaagatctrtagcgccttaaaggtttcattagggtagtacctagacagggcttggcctcctggccagtagattgcccagtaaggatcactgtggggccacaggtcagct

SEQ ID NO: 512651 - DNA, 201 bp, Homo sapiens
caccccataatgtcaatcctcccatttcacaataaagaaattgaggctcaggctggagacggtggcccacacttataatcccagcactttgggaggctgargcaatgggatcatttgaggatcggagtttgaaaccagcatgggcaacatggtgagattccagttctacaaaaaaaaaaaatgtttttggccgggcgcggt

SEQ ID NO: 512652 - DNA, 201 bp, Homo sapiens
ggcaggagtagcagtgaagcaggtcaggttgttttcccctcttgtcactaagttaagcaacattcacagagtttatataaccagcaaagagagccagggtrcaaacattaaaactttgtctcctcagacctgatgtgtactacttttccctgactcatgtgtactacttttccttttaattttgcataattaaaaataaaa

SEQ ID NO: 512653 - DNA, 201 bp, Homo sapiens
actttgtctcctcagacctgatgtgtactacttttccctgactcatgtgtactacttttccttttaattttgcataattaaaaataaaaaagtgacctggwaatttctagttattaggagagcttcactacagtaatctaaaattccatgccaaactttaaggtgaaagctttgcctgtcctccttcctgtgtctacttta

SEQ ID NO: 512654 - DNA, 201 bp, Homo sapiens
taaaaataaaaaagtgacctggaaatttctagttattaggagagcttcactacagtaatctaaaattccatgccaaactttaaggtgaaagctttgcctgycctccttcctgtgtctactttaggctggaagtctttaagagtcaagaagaagcatggctaactttttgatgtcactaccttgtgcttcacctccagagtt

SEQ ID NO: 512655 - DNA, 201 bp, Homo sapiens
gtcctccttcctgtgtctactttaggctggaagtctttaagagtcaagaagaagcatggctaactttttgatgtcactaccttgtgcttcacctccagagktggaagaatacagaaaaggcagagactgaaaagtctcattgtagttgggtcataaaggcagggaattgccagcattgctggaaaatcccctgagtaacag

SEQ ID NO: 512656 - DNA, 201 bp, Homo sapiens
atggctaactttttgatgtcactaccttgtgcttcacctccagagttggaagaatacagaaaaggcagagactgaaaagtctcattgtagttgggtcataraggcagggaattgccagcattgctggaaaatcccctgagtaacagaaatccccaaagcccaaatgtctaggtacttccctatcacagtggctgtgtgttg

SEQ ID NO: 512657 - DNA, 201 bp, Homo sapiens
gcacaaatttctccctaaaatgtaaaagtctggaagaatacataacaaagtctttgccctgtacaaaggtggggggtgcggccgggagcagtggctcatgyaggcaatcctagcactattaggagtctgaggtgagtggattgcttttagttcatgagttcgagaccagcctgggcaacatggcaaaaccccttctttaca

SEQ ID NO: 512658 - DNA, 201 bp, Homo sapiens
agagcaggaagaagaaaacacatgtgagcctattacttcagtgcactctgcatccccaacacacacacacacacacacacgtacacacacacatacacagmcacacacacacacaagtgtcccagctcagctcctatgaccaggtgctctgccggccaccagcaccccagctttaatcacctggtgtgaatagtgagagtc

SEQ ID NO: 512659 - DNA, 201 bp, Homo sapiens
cagaagattattttgtacaaaaaaagaacatgccaaaattagccaggtatggtggtgcacacttttagtcccagctagtcagggggctgaagtgggaggaytgcttgagccccaaaggtcaagcctgcagtgagccatgatcatgccactacactccagcctgggctacagagtgagaccctgtctcagaaaaaaaaaaaa

SEQ ID NO: 512660 - DNA, 201 bp, Homo sapiens
tatagcacttgttatgtgatacatgatgtgggggtgattggtgggcgaaaatggtctgttcaataagtgttgctaggatattaagaacaacatggttattcatgtggaaaaattgggcttgggttccctacctcacaccatagacaaacaccaattacagatgcattaaagtagaaaatagattatgacttttgagtggga

SEQ ID NO: 512661 - DNA, 201 bp, Homo sapiens
tttttttttttgagacagagtctcactgtgtagcccaggctagagagcagtggctcaatctcagctcactgcaacctctgcctcctgggttcaagggattktcccacctcagcctcccgagtagctgggattacaggcatgtgccaccatgcctggctaatttttgtattttttggtagagacagggtttcgccatgtttg

SEQ ID NO: 512662 - DNA, 201 bp, Homo sapiens
tgcactccagcctggacgagagagtgagaccctgtctccaaaaataaataaataaaaagaaaaatacatatattgctctctaggagatgatggggtattgrggaagagagaccatgaagagagaattatgatagaattgtaatgtttcagtgagatgaataattcctgggatggaaataaagatagggtactgttgaagca

SEQ ID NO: 512663 - DNA, 201 bp, Homo sapiens
ctgtgtcagacacgcatcttccatggaaaataggctgctgaaccaggaaggagcagatgttttttgggttttttattttgttggacaggagtcaaaacacytaaccacctgaatgtgttatgccatctcatcatcaggacaattttaaccctgtgtctgaggagcgtggcaaagtccaagattgtttctacctctttgaga

SEQ ID NO: 512664 - DNA, 201 bp, Homo sapiens
tttaaaaaaaatgcttaaagaagaaaactctgccttttatttcttgattcagttaaaaagaattgtcttatttctgctgagtaattgcattattaaaaagygtgtgggctgggcacagtggctcacgcctgtaatcttagcactttgggaggcaaaggcgtgtggatcacctgaggtcaggagttcgagaccagcccggcc

SEQ ID NO: 512665 - DNA, 201 bp, Homo sapiens
gtaaaatgatgaaaaaatatcacacaaatagctacaagaaagctggaatgcaggccaggcacagtggctcacacctataatcccagaactttgggaggccraggtgggtggattacctgagatcaggaattcgataccagcctgaccaacctggtgaaaccccgtctccaccaaatacaaaaaattagccaggtatagtgg

SEQ ID NO: 512666 - DNA, 201 bp, Homo sapiens
actccagcctggatgacacagcaagatctgtctcaaaaaagggaaagaaaagtgggttgacaatttattaaaggtaagtggaacatcatcagagtgaatcwaagtactattaacagccaatacgacaggcataaaagtctttcaggccaacccaaaagacacatgcatgtagataatgtctagcaggtttcagtatttgct

SEQ ID NO: 512667 - DNA, 201 bp, Homo sapiens
tcattgtagttgggtcataaaggcagggaattgccagcattgctggaaaatcccctgagtaacagaaatccccaaagcccaaatgtctaggtacttccctrtcacagtggctgtgtgttggctcctgtgtcatttttactggagaagtattgcataagcaaaataaagcactctaggacaagccagctgggaatcccaaaa

SEQ ID NO: 512668 - DNA, 201 bp, Homo sapiens
agtttcaattgctaaaaggaaaaaagtctgtcataatgcagttaattttttttttgagacagagtctctcacccaggctggagtgcaatggcacgatctcrgctcactgcaacctccacctcccaggttcaagccattctcctgcgtcggtctcctgagtagctgggattacaggcgtgtgccaccatgcccagctaattt

SEQ ID NO: 512669 - DNA, 201 bp, Homo sapiens
agcaaaataaagcactctaggacaagccagctgggaatcccaaaacataagcatgaatcactaaatggttgaagattctaatgacttgaaatcaaggtatwatataaacaaaaaaaagagcaatatatacctgagaaaactgttgaacatcaatcagaaaaaaatttagaaataagtaaaatgtgtatactcagatatgag

SEQ ID NO: 512670 - DNA, 201 bp, Homo sapiens
ttttttttttgagacagagtctctcacccaggctggagtgcaatggcacgatctcggctcactgcaacctccacctcccaggttcaagccattctcctgcstcggtctcctgagtagctgggattacaggcgtgtgccaccatgcccagctaatttttgtatttgacggggttgcaccatgttggtcagggtggtctcgaa

SEQ ID NO: 512671 - DNA, 201 bp, Homo sapiens
aaatggttgaagattctaatgacttgaaatcaaggtattatataaacaaaaaaaagagcaatatatacctgagaaaactgttgaacatcaatcagaaaaaratttagaaataagtaaaatgtgtatactcagatatgagtcaatagtgtaactttaaaaataattaaagaccttggaagtaggcatattattaatttaaaa

SEQ ID NO: 512672 - DNA, 201 bp, Homo sapiens
gtgagccactgcacccgggcaatgcagttaattataaatttcattttcttctgaagagctaaaactatttgatatatgattcccagtaaactatgaattaytgaggaggctgccaggaagaactagctaagccctttgctgctactgtgaccagcaacttttccatcctggccatgcagcttcctttatcgcgtattgcca

SEQ ID NO: 512673 - DNA, 201 bp, Homo sapiens
tgttgaacatcaatcagaaaaaaatttagaaataagtaaaatgtgtatactcagatatgagtcaatagtgtaactttaaaaataattaaagaccttggaaktaggcatattattaatttaaaaatatatgtgtagaaaggctgactagaaggatcgatgatgcttaagagagaattagtaatttggaagatgaaattgaga

SEQ ID NO: 512674 - DNA, 201 bp, Homo sapiens
tcaatagtgtaactttaaaaataattaaagaccttggaagtaggcatattattaatttaaaaatatatgtgtagaaaggctgactagaaggatcgatgatrcttaagagagaattagtaatttggaagatgaaattgagaaattgtcataaaacgtagcccagaggaatctactgttattccttacaagcaattttgttct

SEQ ID NO: 512675 - DNA, 201 bp, Homo sapiens
attattaatttaaaaatatatgtgtagaaaggctgactagaaggatcgatgatgcttaagagagaattagtaatttggaagatgaaattgagaaattgtcmtaaaacgtagcccagaggaatctactgttattccttacaagcaattttgttctttgctctttctacctatttaaaattttttaaattatactttaagttc

SEQ ID NO: 512676 - DNA, 201 bp, Homo sapiens
cggggcctgtcgggggttgggggcaaggggagggatagcattaagagaaatacttaatgtagatgatgggttgatgggtgcagcaaaccaccataacacaygtatacctatgtaacaaacctgcaccttctgcacatatatcccagaacttaaaatataataataaaaaataatgaacagttttacttctttccaaaacaa

SEQ ID NO: 512677 - DNA, 201 bp, Homo sapiens
gggcctgtcgggggttgggggcaaggggagggatagcattaagagaaatacttaatgtagatgatgggttgatgggtgcagcaaaccaccataacacatgyatacctatgtaacaaacctgcaccttctgcacatatatcccagaacttaaaatataataataaaaaataatgaacagttttacttctttccaaaacaaac

SEQ ID NO: 512678 - DNA, 201 bp, Homo sapiens
tgcacatatatcccagaacttaaaatataataataaaaaataatgaacagttttacttctttccaaaacaaacaaaaagaaattaccccaaaatctgatgrcttaaaatgacatttataaaaaataaataaataaatataatttacattttaaaagtaaaaaccataaaatatgctcataatagcagtttaaaaacaaaaa

SEQ ID NO: 512679 - DNA, 201 bp, Homo sapiens
ataaatataatttacattttaaaagtaaaaaccataaaatatgctcataatagcagtttaaaaacaaaaaaactaaaagaagcaaaatgttattttatttyattttttgtttttcaatactccattgctatcagtatgcaaaaaatattatttttaatgaaataatgactgatgtatttttttgtttttttgtttacattg

SEQ ID NO: 512680 - DNA, 201 bp, Homo sapiens
tctcttgaccttgagatccacccgccttagcttctgaaagtgctgggattagaggcatgagccaccacgcccgccccagtgtctcttattctaagagattmaaatttccttctaccccttctgtcccaactttcttcctatagtaaggatgaaacaaaatactataaaggagtgaattttatgaatattatactatgttca

SEQ ID NO: 512681 - DNA, 201 bp, Homo sapiens
gaaccagaaataccatttgacccaacaatcccattactgggtatatacccaaaggaatataaatcatcctgttacaaagatgcatgcatgcgtatgttcaytgaagcactatctgcagtagcaaagacgtggaatcaacccaaatgcccatcaatgatagactgggacctgggagccattatcctcagcaaactaacacag

SEQ ID NO: 512682 - DNA, 201 bp, Homo sapiens
gctaaagattttacttaacgtattaattaaatgagaaaagtaggcagatgttataacctgttcaaaggcgtcaaagaagaagaaatttatgtggagtaaasaaatgtagaaatgattgtgcaaactggcttggggtggggcaggtgggttggcctccccctaacagaccattgtcatatatatagataagaattattttac

SEQ ID NO: 512683 - DNA, 201 bp, Homo sapiens
tggccaaattaacgtgccagggatctgactgtgaccttgcctgtgtgtgtgtgtgtgtgtgtgtgtgtgtgtgtccaaactactggggttcctaagagatmgccacctagaaaacaaaagcaaagcaagcaaaaccataaataatcagtctggtctggtggctggaggggactaatgggcagtgatgtaagaaacccataa

SEQ ID NO: 512684 - DNA, 201 bp, Homo sapiens
catctggtgttcatcattattcttcgtaatatcctttataataaaccagtaaaggttagttaagtgtttttctgagttctgtgagctgctgtagcaaatcmatcaaacccaaggaggggtttttgggaaacccgatgtatagcttggtcagtcagaagcacaggtaaaacaacctggagcttgcaattggcatctgaatgg

SEQ ID NO: 512685 - DNA, 201 bp, Homo sapiens
gcactccagcctgggcgacagagcgagactccgtatcaaaaaacaaacaaaacaacaacaacaacaacaaacaagatgttgtattcttgacatttaggcawtttctaaaatattacattttttataaaatttctctgccatggaaaaaaaatccacctttgccagagcaaaggaagccagtgaaagaagtaattcattggg

SEQ ID NO: 512686 - DNA, 201 bp, Homo sapiens
actcgtggagaggcagtggagtggagtggagtggagtggagtggagtggtcaaatgcccagactctgagcaagacgtccccgggttcagatcctgacttcrgtattaactaaatttggtcaaaatcactgataagagtgatggacttaaaaaaaacaaatagtcctgaatctctcaaattctaataggctgtaaatactgt

SEQ ID NO: 512687 - DNA, 201 bp, Homo sapiens
acgttgtcattggatcggtggccacctctgtatcttcctctttctgggcttcttcaacagcatgtgttgcttttggaaacactttctcgtgtggcttcccrgacatctgaactcttacctgcctggctgcttctttgcagtcccctcgtctctgctcaacctctaaaggttgagccatccaggtctgtaccaagcccctcc

SEQ ID NO: 512688 - DNA, 201 bp, Homo sapiens
tgggctgggcacagtggctcacgcctgtaatcttagcactttgggaggcaaaggcgtgtggatcacctgaggtcaggagttcgagaccagcccggccaacrtggtgaaaccccatctctactaaaaatccaaaaaaattagccaggtgtggtggcgtgtgcctgtaatcccagctactcaggaggctgagtgaggcaggag

SEQ ID NO: 512689 - DNA, 201 bp, Homo sapiens
ttgagccattgcgctccagcctgggcagcaagagtgaaaactcgatctcaaaaaaaaaattaataatgtgtgtggtacttcaaccagtcttgaagagaatrcagaactggaaagaagaatagacatagaacactcacaacacatggatggaataaaatctaagcatgtctttttaagttatagatatctagcaaaattata

SEQ ID NO: 512690 - DNA, 201 bp, Homo sapiens
tagcctcccaagtaactgggattacaggtgcctgccaccatgccctgctaatttttgtatttttagtagaaatggggtttcaccatgttggccagactggyctctaacttctgacctcaggtaatccacccacctcggtctcccaaagtactgggatcacaggcataagccactgtgcctgcccggcctttttttgtattt

SEQ ID NO: 512691 - DNA, 201 bp, Homo sapiens
agaaagtggatgccactctgtccttaggaaacccacagagaggagagacagtacgggggccaagtgccataatggagtcctgtgatagtgcagaacttcarttagttctgattagggcacagtttctacttctaggggccatccagccgacctcaggggtttcaggtcagcttttcatcctcaccccgcccccgcccctgg

SEQ ID NO: 512692 - DNA, 201 bp, Homo sapiens
gtatggctaggggagagcctgagctatagaatgcagactcttgatgatgactactacatagtcattaaacctggtttaaaacaagacagtggctgattttyacaactataaatttctgaagatggagcagtggtagcatgatctcattgctttattctagtaacatattttttttctttattcacgttataaattttgttt

SEQ ID NO: 512693 - DNA, 201 bp, Homo sapiens
ctaatgtaaacttatagatgggaaaaagtcctgaccacttctgtttccttttctatctatgccaaccacagacatagcatgatttcatctgtaagcatttmagtacctaaaagacgtaggacttaagaaataaataatatacattaaaatactattcttatacctaaaatatataaattcgctctggtattttaaattgaa

SEQ ID NO: 512694 - DNA, 201 bp, Homo sapiens
aaaagtaacatgttgcagcaaactagggataatggaaatatcaaacacttcagtattctctgttttcagatacaaggccagttatttgttctaaatgtcarcttggcttggtggttgagataaaaattctaacacctagtttttatgccaccttaaagttatactttctgtgtgttgtactttcaaatgtttaaaaaaata

SEQ ID NO: 512695 - DNA, 201 bp, Homo sapiens
acaggcattcagcagaaattgtactttgaattttgatcttttcccgggcctgtgataggcagtatgatattcttccacgctgggtggtggcagcaagccakagcacccagtcagccacgtgatcatgagcattaacaatcaatgaaaaacacacacacacacaaaaaaaacaaaaatcccccctgcggaggcaggctggtg

SEQ ID NO: 512696 - DNA, 201 bp, Homo sapiens
atgagagccttctaccatttttctcaccttttcagacattgctctcctcctcaccaacatgaacggatgtcttaagccactcataatttgcgtcaggaatrttgtcatcttatgtgaaaggcaacacttttgtgtctgtgtatgcacctgtgtacaaccttatttgtgcctgtacatggtttttgtccccataaggaaaaa

SEQ ID NO: 512697 - DNA, 201 bp, Homo sapiens
ggtgtactgtgttagctaagttttttggatgttgtgttttcccatcccatcatgtctataaaaccccatttttgacttacattttctacttaatacaggtwatcgaaatgtaactccatcgtaagctgaggtacatctgtactactataaacaactaacatttgaaaatctgtatgtaaagaactatgtggaatgcttcat

SEQ ID NO: 512698 - DNA, 201 bp, Homo sapiens
gatttgtgatctaaacacctaaatttttttgtcccaaccacagtcctgacttcacaaccttttgtattcccaataaaaagactaaatgaaatgaaatgtcmtctcactttgaatgagttttaacgtgatggggtttctgtcactttacttctcacaggagttaacagttgttatggggtggcatatgagtgtcctctgtct

SEQ ID NO: 512699 - DNA, 201 bp, Homo sapiens
tataaacaactaacatttgaaaatctgtatgtaaagaactatgtggaatgcttcatatacttttatctcatttaagtatcacaacaaattaacaaagactmgcaatcctccctcttgcagcacagtggttagaaggggcagaacagttctctatgcttctgtaactgcagtcagcaaaaggccaaatggattcatatatta

SEQ ID NO: 512700 - DNA, 201 bp, Homo sapiens
agtcactgccacccctgcctcactctctccagaccacctgcggctacaccatggtcctggtggctaccgtgcctgcttctctgcatgtccacgcagcggtygttgataagctgcacagaacctaggcttctcacgtcttcatttacacaaaggttctgcaacaaaggagaaagaaagaggcaaagagatggtgccagctaa

SEQ ID NO: 512701 - DNA, 201 bp, Homo sapiens
gaagacagggcagtaggagaagactgctgaaattctttatgtactaaaaataactgtacttgagattgataaaattaatgtttaatgcttcatcaaggactttttttttttttttttgagacacagtctttctcggtcgcccaggctggagtgcagtgattcgatctcagctcactgcaaccttcgcctcctgggttcaaa

SEQ ID NO: 512702 - DNA, 201 bp, Homo sapiens
aacagagtccaagtgctggaagctcctcctttgtggagaggagggtgagaagtagccgagtgactccagcctcttccccaagggtgcacagcccagcccayagcccccagcacagcaccagctgaggacactcgtgttaccttagttatgtgttcttcctccaggtcatcctcatcctcatccactctgtgtgtgtgagag

SEQ ID NO: 512703 - DNA, 201 bp, Homo sapiens
ttttgcctaaagcattcaactcaattttagtccataccattgttttagatttcctccagaaaataaaatttatggtaactagctatttaaatgttgttacrgtgctggtttcagctactaaataaaggtttcaaaaccctatacagattaaaaacgaccttgacctctgtaattgtgttattgttatattcttctattaga

SEQ ID NO: 512704 - DNA, 201 bp, Homo sapiens
tcgctcctattatgagtgagtcaattttctgccactggagatagacaaaatgccttcagtggaacagaagagttcctctaaaccatgcagttgagggtagytgtccaggttcttggcgtcttgaacaaagaactgaacaaaccacacaagcaaggcagccaaagcagagacttattttaaaggacagcacactccacaggg

SEQ ID NO: 512705 - DNA, 201 bp, Homo sapiens
ggcgaggaccagctcctcctccccagactccagctgctccagccgctcagcctccgggcctgtctctagcatctccctgctgaggcggaggagattctctstttcttcttcttcctgcctctggacaggggcagtggaggtggggagggaggaagaagtctcagcaccagtacccacctccccacgtgccagagacaaagc

SEQ ID NO: 512706 - DNA, 201 bp, Homo sapiens
tagctatttaaatgttgttacagtgctggtttcagctactaaataaaggtttcaaaaccctatacagattaaaaacgaccttgacctctgtaattgtgttrttgttatattcttctattagatatacctatggtgaacctgtggacgggaaggtccaacttagtgtgtgcagagaatctacggcttatcattcatgtgctc

SEQ ID NO: 512707 - DNA, 201 bp, Homo sapiens
agattcagtcttaaaaacaaaaaacaaaaaaacaaaacgacaaaactacaataaacaagaccatatagtactgacacaggacaggcattgatcaatggaayagaacctagaacccaggagtaaaccctcacatttatggtccctagtaaggaaggatcagaatccaggatatcttaaaaacttacaacctgacaatccaaa

SEQ ID NO: 512708 - DNA, 201 bp, Homo sapiens
agaaatgaggctcaccaggcgcttggctgcatacttgagctgcaccctgtgctgcagctgctgcaggcgttcttctcgctgcttcctcctggcctgctccrcctacaggaggcagacatgaaggaaaatcaccaggaagcccaaaaccaggcctctcctaaggagtctgggccactcagctcggcgcctcctcactggggg

SEQ ID NO: 512709 - DNA, 201 bp, Homo sapiens
aatctacggcttatcattcatgtgctcatcttatcagttcactctgtaaaaattttaccattcaggtaagaggtatatcagcaaaattataaataggtttscgttaactttttatcctcaccttccatttaccttcctttcttcttgttttcctctttacagttaaaatatatacttttattctatatttctattcctatt

SEQ ID NO: 512710 - DNA, 201 bp, Homo sapiens
cgggacctcatccctgcaggtcccagcctcgctgctcactgtggaaggcggcacgctcctcccaaagccacacgctctccatcagatccatttgcagccaytgaaccatgctgccaatggcaacgatcaggtcctttcccaggtgagtaataaatgggcaccaacagttccttgtgtggagaaggccctgctgacctccag

SEQ ID NO: 512711 - DNA, 201 bp, Homo sapiens
ggcgccagggttccagctgcctcccctacctgcagctctgtggctcaggctggcctcactacgcttgtttccacgagtgcagaaatggaaatgacaacagyagcaccttcctcatagagctggtgcaagcaggacattaacacacacaaaaggccaaatcctctggattagaggattacctggcaaataacaagtgagcgg

SEQ ID NO: 512712 - DNA, 201 bp, Homo sapiens
tctacggcttatcattcatgtgctcatcttatcagttcactctgtaaaaattttaccattcaggtaagaggtatatcagcaaaattataaataggtttgcrttaactttttatcctcaccttccatttaccttcctttcttcttgttttcctctttacagttaaaatatatacttttattctatatttctattcctatttg

SEQ ID NO: 512713 - DNA, 201 bp, Homo sapiens
gaagctatagaaccagaaacatcgacaattaaaggctgagcataggaggaagatgcagaagcctggagtgcagaagactgagatggaaagacctgagaggsagaagatgggttgtcaggctaaacaaggtaaaaggggtcaggtacagtggctcacgcctgtcatctcagcactatgggaggccaaggagggaggattgct

SEQ ID NO: 512714 - DNA, 201 bp, Homo sapiens
tgtaaaaattttaccattcaggtaagaggtatatcagcaaaattataaataggtttgcgttaactttttatcctcaccttccatttaccttcctttcttcytgttttcctctttacagttaaaatatatacttttattctatatttctattcctatttgtaaattttatattcctcttttgtcatgctaagtttcattttc

SEQ ID NO: 512715 - DNA, 201 bp, Homo sapiens
tttttagtagagatggggttttcaccatgttggccaggctgatctcgaactcctgacctcaggtgacccgcccgcctcggcctcccaaagtgctgggattmcaggtgtgagccatcacgcccggccatattatacttttgtacataccatggtaagatcaacagaaggtgacacactgaggctataagactattgtgccaa

SEQ ID NO: 512716 - DNA, 201 bp, Homo sapiens
ggaacacagcaggccactgaaaacaaagggacgggttgaaattctgtttaagaacaattagattcccaggttgcaatccctgctcctgctccttgcagaasacaggaagtgggctctaagtggaagctgagctaggagagccctggaggcaactggcagattgaggaggcaagagggagggagaggagggtcaggctgaaa

SEQ ID NO: 512717 - DNA, 201 bp, Homo sapiens
acatttggtttcatatcaaaatctacaccctatcaatttactgggaacatatgtcctgttctttattttatactttgtgaatttagtcagggagatgtgaygtttctgcatattcaagagtattagatgtataattattttcctctcaacctattctcactggaaataagtgtatataggagctccagatgggaaccctat

SEQ ID NO: 512718 - DNA, 201 bp, Homo sapiens
tcagggagatgtgatgtttctgcatattcaagagtattagatgtataattattttcctctcaacctattctcactggaaataagtgtatataggagctccrgatgggaaccctatcagtcaggttcttaaccactaaagagaagaatcaacttttccaaactgacaaaggaggaatttcctaaaagatctacttggaaggt

SEQ ID NO: 512719 - DNA, 201 bp, Homo sapiens
gtgcacacctgcagtcttagctacttgggaggctgaggcaggaggactccttgagcccaggcgttcaagtccagcttgggcaacacagcaagaccctgtcttttttttttttttttttttgtgacagaggagtcttgctctggcgcccaggctggagtgcagtgacgtgatccccgctcaatgcaacttccacctcccgaa

SEQ ID NO: 512720 - DNA, 201 bp, Homo sapiens
gacacaaacaggctggtctaggatgtagcaaggctttcagctataatcatgccagatctgactgtctaatatacaactgccagctgcaatccccatactayagtgtgataccatttatccacacacatgtgtgcacacacacacacaggtgcacacacacagtgtcacatattcctgtcctgtttagagaatactttaggt

SEQ ID NO: 512721 - DNA, 201 bp, Homo sapiens
cagctgcaatccccatactacagtgtgataccatttatccacacacatgtgtgcacacacacacacaggtgcacacacacagtgtcacatattcctgtccygtttagagaatactttaggttggaaataattaagaaccttctaattcttaaatttaaaaaatgtggacaataaacgctaacaatagtaacaattataata

SEQ ID NO: 512722 - DNA, 201 bp, Homo sapiens
catttatccacacacatgtgtgcacacacacacacaggtgcacacacacagtgtcacatattcctgtcctgtttagagaatactttaggttggaaataatkaagaaccttctaattcttaaatttaaaaaatgtggacaataaacgctaacaatagtaacaattataataataataattgctaacatttaatggatgctta

SEQ ID NO: 512723 - DNA, 201 bp, Homo sapiens
tttttgaagaaggatctccacgggaacatagctcgggcaggtaggaaactctgttattgttatctttagaatatcagcatgatcttaagtagtaacttacytttttttttttttttttttttttttttttgagatggagtttcgcttttgttgcccaggctggagtgcaatggagtgatctcagcactgccactatacccg

SEQ ID NO: 512724 - DNA, 201 bp, Homo sapiens
attttgcaattgcgaattgtgttgttatcaaaatatcatcatcattcttcacagaactagaaaaaaatcctaaaattcatatggaacataaaaggatcccrcatagccaaagaaagacttaaaaaaacaaacaaataaaaacaaacaaacaaacaaacaaaaaactatggaggcatcacattacttgatttcaaactaaac

SEQ ID NO: 512725 - DNA, 201 bp, Homo sapiens
aggtaggatttgctggttcgaacttttagccctactcctcaacctcctgggaggggacaggggctgaaggttaagttgatcaccagtagccaatggtttartcaatcatgcttatgtaacaaagactccataaaaaccccaaaaatcagtgttcagaggtttttcggatgactgaacacatggagattcttggagggtggt

SEQ ID NO: 512726 - DNA, 201 bp, Homo sapiens
atccaggtctgtaccaagcccctccttttgctgtttcctcacttcccaaaggcaacctcatccaggcctccagctttagatacctccttgcgtgctgatgwttctcaaatccacgtcagggttaacaaaaccctatgcgacttgccctgacctccttgaaagagctcaggaagtatccttctcccactcatccactttgct

SEQ ID NO: 512727 - DNA, 201 bp, Homo sapiens
agtccaggaggtggaggctatagtgggccgagaccatgtcactgcactccaacctgggcaacagagtgagaccctgtgtcaaaaaaaaaaaaaaaaaaaaraagaagaagacctgaagctgggtcttgctttagagtttttgcagcagctgtctcctctgcctggatttctttctccttgttcacactcttttcactagga

SEQ ID NO: 512728 - DNA, 201 bp, Homo sapiens
agaaaacacatgtgagcctattacttcagtgcactctgcatccccaacacacacacacacacacacacgtacacacacacatacacagacacacacacacrcaagtgtcccagctcagctcctatgaccaggtgctctgccggccaccagcaccccagctttaatcacctggtgtgaatagtgagagtcaaggatcgaggt

SEQ ID NO: 512729 - DNA, 201 bp, Homo sapiens
acagaccagtttctggatatcttcttctttatcagatctctaaatgttgagattcttctagatttagatctatgctgcttgttctttgcactctacatttrcttcattcatttctacaacttttaatagtgtgtataggtagctcccagattgctattttcaccgtgattctcttgcctcatacttttcccctctttggtg

SEQ ID NO: 512730 - DNA, 201 bp, Homo sapiens
cacagaccagtttctggatatcttcttctttatcagatctctaaatgttgagattcttctagatttagatctatgctgcttgttctttgcactctacattrtcttcattcatttctacaacttttaatagtgtgtataggtagctcccagattgctattttcaccgtgattctcttgcctcatacttttcccctctttggt

SEQ ID NO: 512731 - DNA, 201 bp, Homo sapiens
catccccctggatccacttcttgcctgtccgaaccctcagccccaaactccactcttcctccttctccacctgttactcattcaaaaactgcttcaaccattcaaaccacctctgcctttctcctactctgggaagtggctagggtcgaaggtattgcttgtgttcatgtccctttctccatgtctgatttgtcacagatt

SEQ ID NO: 512732 - DNA, 201 bp, Homo sapiens
tacctaagatcctgaccctccctgtgtcaagcttgcacccctcatgaaatccttcttaataaaaccctccccaggtttctccttcctctgaaattccttcyttctaaaccccttcctctgaaaccccttttgaccctacagatgaatgccctctctatcctcatccccctggatccacttcttgcctgtccgaaccctcag

SEQ ID NO: 512733 - DNA, 201 bp, Homo sapiens
attttggatattaatcccttgccagatgggtagtttcaaaatattttctcccattctttgggttgtctcttgttgatagtttcctttgctgtgcagaaggrttttaacttgatgtgatcccatttgtccatttttgctttggttgcctgtgcttgtggggtattactcaagaaatccttgcccactccagtgttctggaga

SEQ ID NO: 512734 - DNA, 201 bp, Homo sapiens
tggccgggccccagtgcaaattagataatgacagctaatggcccgaaaatggcacctttgatttttcaaattctcagggaccttgacaactttataaccaygaacagcaaatggcaggaggttcttgcctgaatattcaggctttcttctacctaagatcctgaccctccctgtgtcaagcttgcacccctcatgaaatcc

SEQ ID NO: 512735 - DNA, 201 bp, Homo sapiens
ttggggggcgggacagagtctgactgtgtcgcccaggctggagtgcagtggcacagtcttggctcactacaacctctgcctcccaggttcaagcgattctsgtgcctcagcctcctgagtagctaggattacaggtagtcgccacctcacctggctaatttttgtatttttagtagagacgatgtcttaccatgttggcca

SEQ ID NO: 512736 - DNA, 201 bp, Homo sapiens
tactttgccctatagggatggatatgggtaaggatgaattccatgacacagcagaatagaaagaactaatcaatagcattctcagaagttgaattattcaratctctctctcgtattcacagggaggagtagaagatgaagtgaccctctccgcctatatcaccatcgcccttctggagattcctctcacagtcactgtag

SEQ ID NO: 512737 - DNA, 201 bp, Homo sapiens
atgggaagcataaagccaaagtgtgtggctttttattgcaacgtggccgggccccagtgcaaattagataatgacagctaatggcccgaaaatggcacctytgatttttcaaattctcagggaccttgacaactttataaccaggaacagcaaatggcaggaggttcttgcctgaatattcaggctttcttctacctaaga

SEQ ID NO: 512738 - DNA, 201 bp, Homo sapiens
cttccaacccatgaatatggaatgtctttccagttttttgtgtccttttcaatttcttgctccagtgttttagttttcattgtagggacttttcacttatytggttagttcctaggtatttaattttatttgtagttattgtaaatgggattactttcttgatttcttttttagattgtttgctattggcctatagaaatg

SEQ ID NO: 512739 - DNA, 201 bp, Homo sapiens
tatgggaagcataaagccaaagtgtgtggctttttattgcaacgtggccgggccccagtgcaaattagataatgacagctaatggcccgaaaatggcaccmttgatttttcaaattctcagggaccttgacaactttataaccaggaacagcaaatggcaggaggttcttgcctgaatattcaggctttcttctacctaag

SEQ ID NO: 512740 - DNA, 201 bp, Homo sapiens
ccgtgttgaataacagtggtgaaagtggatatccttgttgtattccagatctcagaggaaaggtttttttttttcctcatcagtatgatactagctgagartctgtcatatatggtgtaattatattaagatatgtttcttctataccaagtttttttaaggtttttattatgaagggatgttgaatgttatcaagtgctt

SEQ ID NO: 512741 - DNA, 201 bp, Homo sapiens
tcacagccttgccaaacttggcttatgggaagcataaagccaaagtgtgtggctttttattgcaacgtggccgggccccagtgcaaattagataatgacayctaatggcccgaaaatggcacctttgatttttcaaattctcagggaccttgacaactttataaccaggaacagcaaatggcaggaggttcttgcctgaat

SEQ ID NO: 512742 - DNA, 201 bp, Homo sapiens
agtggtgaaagtggatatccttgttgtattccagatctcagaggaaaggtttttttttttcctcatcagtatgatactagctgagagtctgtcatatatgstgtaattatattaagatatgtttcttctataccaagtttttttaaggtttttattatgaagggatgttgaatgttatcaagtgctttttaagcatccatt

SEQ ID NO: 512743 - DNA, 201 bp, Homo sapiens
tcaacctaaatgcccatcaacggtaaaccgcataaagaaaacagtacacatacactagggaatactatgcagccataaaaaaagaatgagatcatgtcctwtgcaggagcttggagctagaggacattatccttagcaaactaacacaggaaaccaaatattgcatgctttcacacataagtgggagctaaatgatgagaa

SEQ ID NO: 512744 - DNA, 201 bp, Homo sapiens
tgtatttttagtagagatggggtttcaccaagttgtccaggcttgtcttgaactcctgacatcaagtgatccacctgtctcagcctcccaaagtactgggrttacaggcgtgagccactgcgcctggcctgatttttattatttcttctactaatttggggtttggtttgctcttgcttttctagttctttaatatacatc

SEQ ID NO: 512745 - DNA, 201 bp, Homo sapiens
cccaaagtactgggattacaggcgtgagccactgcgcctggcctgatttttattatttcttctactaatttggggtttggtttgctcttgcttttctagtsctttaatatacatcattaaatagttgtttatttgaggtttttttcttttttgatgtaggcacttatagctataaacttgcctctcagtactgcttttgtt

SEQ ID NO: 512746 - DNA, 201 bp, Homo sapiens
agcgtgggaggagggagaggatttgaaaaaaaaacaactaattgggtactaggcttaatacctgggtgattaaataatctgttccacaaacccccatgacrcaactttacctatacacgtacccccaaacctacacacgtacccccaaacataaaacaaaagttaaataaaaaataaagtggtaaatctactttggataat

SEQ ID NO: 512747 - DNA, 201 bp, Homo sapiens
gaatatagtaaaatgttttgaaccttctttctagaaaaatgtttgcatattcaaaatattgtatacagtgtttcacttttcacaaataatcctgaaactgkttcatatattgtttttatttttatttttttcgagatggagtcttgctctgtcacccaggctggagtgcaatggcacgatcttggctcactgcaacctcca

SEQ ID NO: 512748 - DNA, 201 bp, Homo sapiens
agcagaggacagcagagctcaaagatacagtgtcccaaatctttaaaactctcttttggatttagatcctggatccatcaaaacccaaaggttgcgctccrtgaacttttttttttttttttgagacagtctcgctctgtcgtccaggctggagtgcagtggtgtgatctcagctcactgcaacctcccctcctgggttca

SEQ ID NO: 512749 - DNA, 201 bp, Homo sapiens
gatttcaccatgttggccaggctggtcttgaactgctgacctcaggtgatctgccctcctcagcctcccaaagtgctgggattacaggtgtgagccaccaygtccagcctgacttttgttttattctctttattgcctaaatggaaaaaatgttaatttctgtcttgctacttatgtttctttttctttttctttttcttt

SEQ ID NO: 512750 - DNA, 201 bp, Homo sapiens
aattctgtttaagaacaattagattcccaggttgcaatccctgctcctgctccttgcagaacacaggaagtgggctctaagtggaagctgagctaggagarccctggaggcaactggcagattgaggaggcaagagggagggagaggagggtcaggctgaaagcaggcactgagggggactctccacctggatccccttcc

SEQ ID NO: 512751 - DNA, 201 bp, Homo sapiens
cctatctcagcctcctgagttagctgggactacaggcgcatgccaccacacctggctaattttggggtttcacctgttagccagggtggtctcgatttcckgacctcatgatccacctgccttggcctcccaaagtgctgggattacaggcgtgagccactgcgaccagcccatggactttattttctaagacagagtctc

SEQ ID NO: 512752 - DNA, 201 bp, Homo sapiens
aggagggctccaaggtaaaaatggaattggtcactgctgtggactgaattgtatccccaccaaaatgcatgttaaaaaaaagtttttaaagaacaaaaacmaaacaaaagaagctgtgtatggtggtgtgcaccagtaatcttggatcttgccagccaccaggtacttgggaggctgagaggggaggatcgcttgagtttg

SEQ ID NO: 512753 - DNA, 201 bp, Homo sapiens
ttaaagaacaaaaacaaaacaaaagaagctgtgtatggtggtgtgcaccagtaatcttggatcttgccagccaccaggtacttgggaggctgagaggggargatcgcttgagtttgagaccagcctgggccacatagtgagactgcccatcttaacaaacaaacatatgttgaaatcctaaccctgccatgtgactgtact

SEQ ID NO: 512754 - DNA, 201 bp, Homo sapiens
cacacacacacaggtgcacacacacagtgtcacatattcctgtcctgtttagagaatactttaggttggaaataattaagaaccttctaattcttaaattwaaaaaatgtggacaataaacgctaacaatagtaacaattataataataataattgctaacatttaatggatgcttattttgtgtcagtcactgagctaag

SEQ ID NO: 512755 - DNA, 201 bp, Homo sapiens
ctattactcagaaagataaactgagagcaactattctgcccaacttcatactatgaaaatctctggatgggcaaacaggaaaagctagcacagctgccgtwaagttgtccttttcagtatctctcactgttcatactcacagtgccagttggactctcaaatatcccaatcttgccagcctccaaaacccggtacagctct

SEQ ID NO: 512756 - DNA, 201 bp, Homo sapiens
gaaccttctaattcttaaatttaaaaaatgtggacaataaacgctaacaatagtaacaattataataataataattgctaacatttaatggatgcttattktgtgtcagtcactgagctaagtagtttatgtgcatttgattctcaaaacaaatagtaccctatgagggggtactattatcgcccccttaccgatgagtgg

SEQ ID NO: 512757 - DNA, 201 bp, Homo sapiens
gatggtctcgatctcctgacctcgtgatccgcccgccttggcctcccgaagtgctgggattacaggcgtgagccaccgcacccagcctacacgtccttatmttacaagtatctttagtttgcttcttagttcatcctggcctccatttccagcaccgaccagagccgccacctactaacttttctggcctcaagacctatg

SEQ ID NO: 512758 - DNA, 201 bp, Homo sapiens
gaagcagtcataatctttaaagatgcacactctagaagagactaaaccaatataagccgagtgcacagggtaggtagatcccagaatgcattatcgaaggyggctatattataggatgcccttcaggagatttgagagctctggaaatttaaaatgtacatgtagggtgggaaggggtgaggatcaaaaaaactacctatt

SEQ ID NO: 512759 - DNA, 201 bp, Homo sapiens
accaggcatttctctttccttgctaggctaaggtctaagaaaaactctgctccatgttgacgtcatcttttttttcctcctcttctgaacctaattatctstgagacagtgattcaaggaagaaaggagaagtaaacgctatctggaggcctgactcttccatcctggttcccacacctctctctttggaactcacttctc

SEQ ID NO: 512760 - DNA, 201 bp, Homo sapiens
ctttaaagatgcacactctagaagagactaaaccaatataagccgagtgcacagggtaggtagatcccagaatgcattatcgaaggtggctatattatagratgcccttcaggagatttgagagctctggaaatttaaaatgtacatgtagggtgggaaggggtgaggatcaaaaaaactacctattggatactatgctta

SEQ ID NO: 512761 - DNA, 201 bp, Homo sapiens
ttgccaggtctgtctcttctaagcacaaatgttagtaagtcccaaacccattttactaatattagtagatcgagagcccatctttataactttggcctcartaagactagtgatagtgtcactctacgaggggaaaggtagttgccatgatgctcttcggtttaggagcaattaaaatgactacagattggtggcagttta

SEQ ID NO: 512762 - DNA, 201 bp, Homo sapiens
agactaaaccaatataagccgagtgcacagggtaggtagatcccagaatgcattatcgaaggtggctatattataggatgcccttcaggagatttgagagmtctggaaatttaaaatgtacatgtagggtgggaaggggtgaggatcaaaaaaactacctattggatactatgcttattacctggatagtgaaataatctg

SEQ ID NO: 512763 - DNA, 201 bp, Homo sapiens
caatataagccgagtgcacagggtaggtagatcccagaatgcattatcgaaggtggctatattataggatgcccttcaggagatttgagagctctggaaayttaaaatgtacatgtagggtgggaaggggtgaggatcaaaaaaactacctattggatactatgcttattacctggatagtgaaataatctgtacaccaaa

SEQ ID NO: 512764 - DNA, 201 bp, Homo sapiens
acactataaggatacagctactggatactgatgcttacagaaattaaataattgctcaaactcacagctaaaaagtggaaaaccagggattcgaatccagrtccaaatgactgtgctttagtgaagctcatccagtcgcaagagatatccagcataagtaaagggaggttcactgaagggaggttcacaaactgagagtaa

SEQ ID NO: 512765 - DNA, 201 bp, Homo sapiens
actacctattggatactatgcttattacctggatagtgaaataatctgtacaccaaacccccatgacacacaatttacctatataacaaacctgcacaggyacccttgaacctaaaataaaagttaaaataatcaaatgcacatgtaaagcaggagtgtggactaaataatttatctcattattcacctttagtatagtgg

SEQ ID NO: 512766 - DNA, 201 bp, Homo sapiens
cctatataacaaacctgcacaggcacccttgaacctaaaataaaagttaaaataatcaaatgcacatgtaaagcaggagtgtggactaaataatttatctmattattcacctttagtatagtggaaatttttctagatctttaagcttctggaaatggttctagaccttcttatagtttcaaggaccccctgaagtagcac

SEQ ID NO: 512767 - DNA, 201 bp, Homo sapiens
ctgtttaattttggttactaattgtgacactttaaaaatttcacttagtgagacattgtcacttgactagacactgagagaaatgtaaaggaatctaattwaaaaatctactacctactgaatgtttactaagtgccaggccctgtgctaaataaacactttccagttattgtctaatgtaatacagttctacaagctctt

SEQ ID NO: 512768 - DNA, 201 bp, Homo sapiens
cactgagagaaatgtaaaggaatctaatttaaaaatctactacctactgaatgtttactaagtgccaggccctgtgctaaataaacactttccagttattrtctaatgtaatacagttctacaagctctttattaagatttcattttgtatgaagtaataagtggtaaagccagggttcaaattctggtgtttgactgtaa

SEQ ID NO: 512769 - DNA, 201 bp, Homo sapiens
ctacaggcgcccgccaacacgcccggctaattttttgtatttttagtagagacggggtttcaccgtgttagccaggatggtctcgtgatccgcccgcctckgcctcttaaaatgctgggattacaggcgtgagccaccgcgcccggccagggacactttcatcacatatccatatggcttactctctcatttctattcaga

SEQ ID NO: 512770 - DNA, 201 bp, Homo sapiens
gctcccaactactgtgtttccatggggtatattattagaaccgaataatgatcacagtcttttctgttttgtgtaaagggagcaggtatggtgggaccagyggctgagatgagactgctgtttctctttgaggtggcagtcagtgactgcagagagaaataggaaggaacacaagtgttaacttggctgatttgggtatat

SEQ ID NO: 512771 - DNA, 201 bp, Homo sapiens
caaacagtgagtcagagagaaccagtctgctttcctctggtgactctgccatcgccaacgtggctttcaaggtcatacccatggggaaggaggttgcactwgactcttaaagccaggagtgggaatggtatacatcacttccgcccatgttcctgccctgaatgcaaaggaggctgagaaatgggaaggctcatgtggata

SEQ ID NO: 512772 - DNA, 201 bp, Homo sapiens
gccttggcctcccaaagtgctgggattataggcgtgagccaccgcgctcggcctcctgctcagaatctttcctctatccctcctccttcctcacacatgckctgagtcagcaaaaccccaacaggttttacttttttacaaaacctgctctgagagtaaggtaaagtccaaacgcaggcctggagctcaggaggcagagca

SEQ ID NO: 512773 - DNA, 201 bp, Homo sapiens
atcttccttgtccatgatggagtcaatacctgaattagtcagaattagattcaatggcagtaacaaacaaactcccacatctcagcgggtaagcacctaayggtttggtttttgctcacacaaaatctacttgtgagttcagacactctccagaacagccccgtgccaaacagtgagtcagagagaaccagtctgctttcc

SEQ ID NO: 512774 - DNA, 201 bp, Homo sapiens
acagtgcagcggtgggctgaagcgctcctcaagtgccaccaaagtgggagcccgggcagaggaggtgccaagagtgagtgagggctgaggactgccagcaygctgtcacctctcaatcccccctctaaacaggacaccccaactgctgttgggaatttggccgatgaccgctctagctacttcctgctggatggggtgaag

SEQ ID NO: 512775 - DNA, 201 bp, Homo sapiens
tgagctgtctccttcacagccttgccaaacttggcttatgggaagcataaagccaaagtgtgtggctttttattgcaacgtggccgggccccagtgcaaaatagataatgacagctaatggcccgaaaatggcacctttgatttttcaaattctcagggaccttgacaactttataaccaggaacagcaaatggcaggagg

SEQ ID NO: 512776 - DNA, 201 bp, Homo sapiens
atcatccagcacaggaacagcgactgacagcgctcacccacccaccatcgccagtcacactgggcagcaggcagcagggagcaaagcaggagagcctgggygagcgcacgaagggtgaggctcccatcccggggtctcctccgcccctgtgcctggtcacggtatgaggtattacccacagaaaacgggggccagaacctg

SEQ ID NO: 512777 - DNA, 201 bp, Homo sapiens
ctgagctgtctccttcacagccttgccaaacttggcttatgggaagcataaagccaaagtgtgtggctttttattgcaacgtggccgggccccagtgcaatttagataatgacagctaatggcccgaaaatggcacctttgatttttcaaattctcagggaccttgacaactttataaccaggaacagcaaatggcaggag

SEQ ID NO: 512778 - DNA, 201 bp, Homo sapiens
ttgtctcgtaaatacctgccttttgaaaggacatactactaaatttaaaacaccaggctgcaagatcctgtttttataaaaacaaaggaagaaaaacagcaaaaaaaaaaaaaccaaaaacaccacacacacaaaaaccctgcctatatgtttaaagacatttaaaacaagtacagaagaatactcagcaaagtgttaaca

SEQ ID NO: 512779 - DNA, 201 bp, Homo sapiens
acctgccttttgaaaggacatactactaaatttaaaacaccaggctgcaagatcctgtttttataaaaacaaaggaagaaaaacagcaaaaaaaaaaaaamcaaaaacaccacacacacaaaaaccctgcctatatgtttaaagacatttaaaacaagtacagaagaatactcagcaaagtgttaacaacagagacagaac

SEQ ID NO: 512780 - DNA, 201 bp, Homo sapiens
ccattttttcttttgcttcccctcctccatcctccacaacaagagcacatttatttttgcagttaactaaaatctggccactgcaccgtactatgaagatygctgcatgcataccttttcctctgagtgccactgctgacccgaatgttgggtgtctgtgggccctgactatgcaggaggtaagtgtctatggtgggcacg

SEQ ID NO: 512781 - DNA, 201 bp, Homo sapiens
ggtggctcacgcctgtgatcccaacactttgggaggcggaggcgggcagatcacctgaggtcaggagtttgagaccagcctggccaacacggtgaaacccygtctctactaaaaatacaaaaattagccgggtgtggtggcatgcacctgtaatccccgctacctaggaggctgaggcaggagaatcactggagcctcgga

SEQ ID NO: 512782 - DNA, 201 bp, Homo sapiens
tcagaaatgcagcactttaaaagaagcaggtacatttgccatgccttttaaattaaattaaaatccattatcgcttttttcccacaaattgctggccttaygtacaacaaaattaattttcagttttagacttcatggctaatcctggtactatatcacgaaatgctttgtaaatttttctttctgagtcctactcctact

SEQ ID NO: 512783 - DNA, 201 bp, Homo sapiens
acaattttaattcttaaaaagcaaactcttgaaatgaaaaatagaaaaggctgggtgcaatggctcatgcctgtaatcccagcactttgggaggctgaggmgggagaatcgcttgaggccaggagttcaagaccagcctggtcaacatattgaaactcccccgccgcccacaccccccaccaaaagaaaagaggaaaaaaa

SEQ ID NO: 512784 - DNA, 201 bp, Homo sapiens
gtcaagtattgggttataagcagtagagataagagaacaggaatttggaaggaaagaacaccacgagctacattcattgggaatgcttggtggaaaaggtrgttctcaaggcaagttaaggaagaattttcagcaagacctgcaaagtcataaaaatgagtacgaatgtgacagataaggagacactggctgctcagaatt

SEQ ID NO: 512785 - DNA, 201 bp, Homo sapiens
caattgcacaaattaattttttttattaaattgaaagttagcctgtaatcctagcactttgggaggccaaaacaggcggactgtccttagctcaagagttmtagaccaacctggcttacatggcaaaaccctgtgtctacaaaaaaaatacaaaaattagtcaggcatggcggtgtgcacctgtagtcccagctacttggg

SEQ ID NO: 512786 - DNA, 201 bp, Homo sapiens
taaacaaactcaaacatttcttctgatttctgtcacctcttctactcaactcaaaaatatcttgtgtgaactcttaattattcaaaggttaatcaagtgcrtagttacatatgcacttgcctctaccacctctctctgcctcctgcattaggtataatgacttctgaaatggttttgctctaggaggtttagtgaattttg

SEQ ID NO: 512787 - DNA, 201 bp, Homo sapiens
cagcaaagaaaacatgaattaaaaggacttatgtggctgggcacaatggctcatgcctgtaatctccacactttacgagggcaaggcaggcagatcgctckagctcaggaatttcagaccagcctgggcaacatgtttgaaatcttctctctactaaaagtacaaaaattaggctgggcgcggtggctcatgcctataatc

SEQ ID NO: 512788 - DNA, 201 bp, Homo sapiens
ctactaaaaatacaaaaattagccgggtgtggtggcatgcacctgtaatccccgctacctaggaggctgaggcaggagaatcactggagcctcggaggcaraggctgcagtgaactgagatcgcgccactgcactgcagcctggatgacagagcaagagtctgtctcaaaaaaaaaaaaaagaattagatcacagccccaa

SEQ ID NO: 512789 - DNA, 201 bp, Homo sapiens
ttccccttactttgccgtctaggatcagagagcagtgtgaattttccccttggtgcctgggggtgggggagccagggagaaacacatagtgaagcttcctrttttgtttattaacttccaccccatgtcttatgttcaaccattgatgtaatcaatattatttttatgtgatgggctacacttttggcactccacccccca

SEQ ID NO: 512790 - DNA, 201 bp, Homo sapiens
aaggaaaatatcctaggtaaatgaaatcgtcattctgtgtcctcccccgacagcagatatgtccttccgttgagtgaggataaccttatgtccaccaaggrtactttgagaaagtccctaaggagcaagcttctgtcccactgtttcagagtatttattctttgaacacgaaagtattggttagttatgttctcagctctc

SEQ ID NO: 512791 - DNA, 201 bp, Homo sapiens
tggccaacatggtgaaaccctgtctctactaaaaaaaatacaaaaactagccaggcgtggtggcgcgcgcctataatcccatctacaggtggctgacgcasgagaatcacttgaacccgggaggcagaggttgcagtaagccgagattgcgccactgcactccagcctaggcgacagagcgagattctgtcttggaaaaaa

SEQ ID NO: 512792 - DNA, 201 bp, Homo sapiens
ttcttgattccgaacccctccagcagtataaaaatgagtccgcttcccagcaagctggcccaaacaggctattatcaggcttaatttttattttttatttktgtgccctcctaatagaacaaaaatcgcatctcgtttggtttgcatctctttggggactaattagatcgagattgaactagttttgaagaaacactctaa

SEQ ID NO: 512793 - DNA, 201 bp, Homo sapiens
ttttctttttttttttttctcatcccgactttaaaaataatttctataggctgggcatggtggctcacccctgtaatcccagcactttgggtggccgaggygggcagatcacaaggtcaggagttcaagaccagcctgaccaatatggtgaaaccccatctctactaaaaatacaaaaattagctgggcgtggtggcgggc

SEQ ID NO: 512794 - DNA, 201 bp, Homo sapiens
tgcggtgctccaccagctggaggatggcctggcccataatacccgcattcccaccttgctctggccctgtgtcccctccaacgtgcatcctgagctcgcamcctgtgtggaacccaaccagctgcttatcaacatttaagtccacttttatgacacttccgtcaacaatctggtcaactgcactcatccctggcctccgta

SEQ ID NO: 512795 - DNA, 201 bp, Homo sapiens
actcactgttgcagtgtcttatctacgtaacataatccatgaaaagctcaacacagctaggccaaatctaagacccagacacgcggctgctgttaatgccsactcctgcgcaccgcgccgttccaccgcaggcacaaccttcctaggcctgccccgtccccacacaggggttcccgcttgtcaatcacgctggcccggccc

SEQ ID NO: 512796 - DNA, 201 bp, Homo sapiens
aaaggaatctaatttaaaaatctactacctactgaatgtttactaagtgccaggccctgtgctaaataaacactttccagttattgtctaatgtaatacarttctacaagctctttattaagatttcattttgtatgaagtaataagtggtaaagccagggttcaaattctggtgtttgactgtaaagcctgtgttcctaa

SEQ ID NO: 512797 - DNA, 201 bp, Homo sapiens
gccaggccctgtgctaaataaacactttccagttattgtctaatgtaatacagttctacaagctctttattaagatttcattttgtatgaagtaataagtrgtaaagccagggttcaaattctggtgtttgactgtaaagcctgtgttcctaactgctgtgtaaatagtcccataaatgtccaaggcatggtaactaaata

SEQ ID NO: 512798 - DNA, 201 bp, Homo sapiens
gtaaagccagggttcaaattctggtgtttgactgtaaagcctgtgttcctaactgctgtgtaaatagtcccataaatgtccaaggcatggtaactaaatartataaaactcagtttcaaaactgtaaaagaatatggctgaaattaccaaaattgcaaatatcatgtgtgaatacgtgactagtgatggatgtgtttatta

SEQ ID NO: 512799 - DNA, 201 bp, Homo sapiens
ctcagtttcaaaactgtaaaagaatatggctgaaattaccaaaattgcaaatatcatgtgtgaatacgtgactagtgatggatgtgtttattatcttgtayaataacaaaataatgtcaccatgaagagttttttaaaacacaatattgtaagagttaatatttattaaaaaataaatagttataggtaaatacatgaact

SEQ ID NO: 512800 - DNA, 201 bp, Homo sapiens
cctattatattatataggtatttcttacagtcttcctttaaaatataacttttttttattgttcttttcagttggggaaagatggctgtgtctccaagttyattaacacaggtgcttttgagttaaatcggtaaggatactggagtttcctcaaagtgcatgctcttgttacagagaacggaacaggtaatgctctctaag

SEQ ID NO: 512801 - DNA, 201 bp, Homo sapiens
atataggtatttcttacagtcttcctttaaaatataacttttttttattgttcttttcagttggggaaagatggctgtgtctccaagttcattaacacagrtgcttttgagttaaatcggtaaggatactggagtttcctcaaagtgcatgctcttgttacagagaacggaacaggtaatgctctctaagaagccagaccc

SEQ ID NO: 512802 - DNA, 201 bp, Homo sapiens
gtatttaagttttggatcaatgattaatgattagctgagtagaaagctcttttctaccctataataagctagacattagagaccgacattccaattaatakaattaaccctgaatttatagaactgttttctcataataatgcacatctactgctaaatgactactctcaaagttgctttctttttcatgtccaaagaaaa

SEQ ID NO: 512803 - DNA, 201 bp, Homo sapiens
tgaagttttaattccaaaacgctgttggtctccaagatttacatgttgccagccatcatcatcattcatattctccacatcctgtgtgtctaagagagcarcatcaggtttagctgaagcagtcttaataagaggctcgataaccagggaaagctactgttgaaaatcttttccaagaattttacactttctagcccatgc

SEQ ID NO: 512804 - DNA, 201 bp, Homo sapiens
gttttaattccaaaacgctgttggtctccaagatttacatgttgccagccatcatcatcattcatattctccacatcctgtgtgtctaagagagcaacatsaggtttagctgaagcagtcttaataagaggctcgataaccagggaaagctactgttgaaaatcttttccaagaattttacactttctagcccatgctgaa

SEQ ID NO: 512805 - DNA, 201 bp, Homo sapiens
tgcaggcattgtatctactgcaaatcatacaatttcagaagggactttttaaagcaatcattgcctgtactagtaagagaatgagaaagagatttctagcraataaccatggcctatcagagcagtcactacaatgttttagggaggataatgctaaattttgcattttagaaaatttgctttgatgccagtatagagaaa

SEQ ID NO: 512806 - DNA, 201 bp, Homo sapiens
gagccaagactgtgccactgcactccagcctgggcaaaaaaaagaaagaaaagaaaagaaaaaaaaaagaaaagaaggaaagaaaagaaatgaagcgaagstgctcctctcagaaaagaaatttgtatcattcaccactatatttgatttttttcatcttattcaatcctctgactcatatatagcacactgacaaaatct

SEQ ID NO: 512807 - DNA, 201 bp, Homo sapiens
ccatcgaaaacctccaaacatggcaaatttataactcaagtgaaacgaagtaaaaagagaagttatatatataatatatacaagatatataatatatatawaatatatagtatatattatataatatttattataaatatataatatgtaatatataatatataatatttattataaatatataatatataatatttatta

SEQ ID NO: 512808 - DNA, 201 bp, Homo sapiens
aagtaaaaagagaagttatatatataatatatacaagatatataatatatataaaatatatagtatatattatataatatttattataaatatataatatrtaatatataatatataatatttattataaatatataatatataatatttattataaatataatatttataaatatatattataaatatataatatataat

SEQ ID NO: 512809 - DNA, 201 bp, Homo sapiens
tctacaaaagtttaaagcacattcccatttttctagcataaagcaatgagaaggcaattaagttaatgacattcatgaagaaatcacagagctactggaakcacaaaagtcataatttacatgaaggaaataaccttcctgaggaatacagtgtaattaaggctttcctctttgaaaaggcctaacatttctaaggagcta

SEQ ID NO: 512810 - DNA, 201 bp, Homo sapiens
aggacggggtgagaagatgaagaagtgagggcagcaaggcaggtccacacagtaagttaaagtcactgggaggcagctctagaaaatttcaaggtttaaartctaggatggtgaggtcgaggcaggtggatcacttgaagctaggaattcaaaactagtctggccaacaaggcgaaaccccatctctattaaaaatacaaa

SEQ ID NO: 512811 - DNA, 201 bp, Homo sapiens
cattgcactacagcttgggcaacgagagcgaaattctgtctcaaaaaaaaaaaaaaaaaaaattggctggacatgatggtgtggcctgtaatcccagctaytgaggaggctgaggcaggggaatcgtttgaacctgggaggtgaaatttgcagtgagccaagatggcaccatcgcactccagcctgggcgacaaagcaagg

SEQ ID NO: 512812 - DNA, 201 bp, Homo sapiens
tcaaaaaagaatcttaaagatgtatcttttgaatgtgagaataacagataaaaataatattatatctattgataagaatgaggaatcgttggaaaaatgcrtttgaaaaacttctgtgctgtgatccgtgtatttgcctgggaatgctaatatgcctgtttacatagcttagttcccttcttgttctgccttcacagcacc

SEQ ID NO: 512813 - DNA, 201 bp, Homo sapiens
agaccctgtctcaaaaaatggtggcgggggaggggggagtgagaatttattggaagaatactgagttatttcatttaactaagccaaggaaataaattatygtagaaacaaataataaaattttatgttgctgtttaaaaaattgagacagcagtatacctgcttgtatggcaagacagtcaagatgtaatgttaagttag

SEQ ID NO: 512814 - DNA, 201 bp, Homo sapiens
ggaatgctaatgaggaaaatggggagccggaggctgacaacgaggtagatgaagaagaggaagaaggtggggaggaagaaggtgatggtgaggaagaggayggagatgaagatgagggagctgagtcagctacgggcaagcgggcagctgaagatgatgaggataacgatgtcgatacccagaagcagaagaccgacgagg

SEQ ID NO: 512815 - DNA, 201 bp, Homo sapiens
ggaaatatcaatgcatgaaaatagtaaaaacagctgcccttgtggtgcttgcattctaatgggggagacaaacaatacgtataatacaatcaaacgaaatrcgcaaacataataatgaacataatgggtaagcaaagtctaggaaattaagaggctataagtgctatggaaaatataaaatgaagagaagggcaggaggat

SEQ ID NO: 512816 - DNA, 201 bp, Homo sapiens
aaacacatctctgctttacaggatgaggaagtgaacattggaatgtatgtgaataaagagggatttttttcatatgctggaaacggcattcccagtttgcytaacagacaacccacaccatcatttttcccactctctccacacccttaactttatgaatgagatccttcttgtctagtaaatgatgaaatcttttcccac

SEQ ID NO: 512817 - DNA, 201 bp, Homo sapiens
tatgtgaataaagagggatttttttcatatgctggaaacggcattcccagtttgcctaacagacaacccacaccatcatttttcccactctctccacaccyttaactttatgaatgagatccttcttgtctagtaaatgatgaaatcttttcccacagtagaaggggatttcccatgcgtagactgagaattagaaacaac

SEQ ID NO: 512818 - DNA, 201 bp, Homo sapiens
gaggtctatatttatatctatctctcaatttggataatgtttatgtacaaagttcacttttgagatctgggggaaaatctaaaaaaatgaacaatcatacyttaagtcagatgtaacttagagagttggaggcaagtataaataatattaatagaattactccatatgtattataattccatggaataagaaaataaatca

SEQ ID NO: 512819 - DNA, 201 bp, Homo sapiens
aggccagtgctcttttgcttctactcggtcagaggtgtggggtccttcgagacagtggttggctgcaggctcctggacagatccgcaccttcatagctgtrtgaaggagatttcccacgttggcatagcagccactggggagctggtttcctgccatccacttgagagcatcctggatgttcttgggatcaatgaagatga

SEQ ID NO: 512820 - DNA, 201 bp, Homo sapiens
agattatgtattgagggacaatctatagcattccttgtcttattcctgcaaatctcggcaacctgtcctcaggaccaaagtggggtttacccatgtttggraatgcacagaagcttataaacctggttgtacatcaggatcgtctgggcacttgttaaaaatacagcttcttggccaggcgtagtggctcacgcctgtaat

SEQ ID NO: 512821 - DNA, 201 bp, Homo sapiens
cctgggtgacagagcaagactctgtctcaaaaaaacaaaaagcaaacaaacaaaaaaaaacagcttctctaaccctacccctcagattctgagtcactatrtcaagggtgtggctagagatttttaattagcaatcccaagtaattctgaaacagctggtagaatggcatttggaagccaagcagatcatcagaattatct

SEQ ID NO: 512822 - DNA, 201 bp, Homo sapiens
ccttgaaggcagcggtccctacacgtcccaggtgcgacgcgggcctgctccagggccggggcaccccgggcggcaggtaggaggggttggacttccgccgsatcgccacccgcctgaagttggagccgccctcgtcgctcatcctgccgggctcgaccgccgctccccgactcctcccgctcccgtccagccgcgagcggc

SEQ ID NO: 512823 - DNA, 201 bp, Homo sapiens
gatgggccggccaggccagggagggggctgctcctcacacggttcagcctgtcacagacccagcgtctcccaggcctggacgagcaggacaaagttgtggsgaaaggagcaggatggcccctggtggaaatactggctactgtttacctgctgggagccgagggagaccagccgaacatccttgccaaaggggctcttctt

SEQ ID NO: 512824 - DNA, 201 bp, Homo sapiens
cagactgctcgtaaatccaccggtgggaaagccccccgcaaacagctggccacgaaagctgccaggaaaagcaccccctctacctgcggggtgaagcctcmtcgctacaggcctgggaccgtggcgcttcgagagattcgtcgttatcagaagtcgaccgagctgctcatccggaagctgcccttccagaggttggtgagg

SEQ ID NO: 512825 - DNA, 201 bp, Homo sapiens
gggcagcggaagcagcgcggaggtcggagaagtggcctaaaacttcggcgttgggtgaaagaaaatggcccgaaccaagcagactgctcgtaaatccaccrgtgggaaagccccccgcaaacagctggccacgaaagctgccaggaaaagcaccccctctacctgcggggtgaagcctcatcgctacaggcctgggaccgt

SEQ ID NO: 512826 - DNA, 201 bp, Homo sapiens
tagttacagtgggggcaaacagttgaatataatagactggtgccagcagattggattaaataggtatgagtacagcacagaagatacggatggctctcttyctctggactacaacaaatggccctagctgcccaccagaactcttctttgcttgcagagctttgggatatgaaggcaagggaatgttacaggtagattgtt

SEQ ID NO: 512827 - DNA, 201 bp, Homo sapiens
tggctcacacctgtaatcccagtgctttgggacactgaggtgggaggaaggccaggagtttgaggccagtctgggctacacagtaagacaccatttcttcaaaaaaaaacactttttaaattagccagaagtgatggcccatgcctgtagtcccagtgactcaggaggctgcggcggatcacttgagcccaggagttagag

SEQ ID NO: 512828 - DNA, 201 bp, Homo sapiens
cagtctcaaaaaaaaaaaaagatttaacattttaagtagaataaaaatggcagagtatatgaaagaattctgagaaaccatgaagaaatgctaatgaggtyaactatatgaaacatgcttagaaggcagtccaatagaatgagaccaaaagaaacctctgtgacagccaagatgacagataatggataacttgaagaaaaa

SEQ ID NO: 512829 - DNA, 201 bp, Homo sapiens
agctggctaatttttaaatttttgtggagatgggggtctcactattttgcccaggctggtctcaaactcctgagctcaagcaatcctcctacctcagcctyagtaactgggactacatccatgttccaccacaccaggctccaattacattttgacttctccacttggatgtttaaaatgcttctcaaatttaacatatcc

SEQ ID NO: 512830 - DNA, 201 bp, Homo sapiens
ggtgagggctgctcccagtgctgcagggcattgtggatgctgtgggtgctgcccggattcccctccaggactgaggcactgctcattctccagccgctggkggagccgctgcctggcacctctcacctgtgctgctttcccagtgttgcttttagccaaagaaagacactgcccaagattaagctccctccctagggaccg

SEQ ID NO: 512831 - DNA, 201 bp, Homo sapiens
tcgacttttctatctgccaaattctttgtctttcaacacttacaggtgctatttctgcgattactctccaataacttctgtatagaaatctcggtgtctcmgagtgtgtttcccagtgaactccacctgtgacagctggtactggatgtggtcctaggaactgactctaaaataggatgttgttgctgcacctggctggct

SEQ ID NO: 512832 - DNA, 201 bp, Homo sapiens
aacaggcagatgcagactatcgaagcctcattagcatgtagcataattataattcagcaataatttacatctcagcagaagtgagtgactgaagagaaggyggtcagagtatctgacatgtagtgtatagctaagaaaaccctgtgatgatttgaaggaccaggcagatacctagaagcaagctgagattttaccatgccg

SEQ ID NO: 512833 - DNA, 201 bp, Homo sapiens
attaagtattattcttattataggctttatgggattttcttcaaagccttctcctatttatggaggcttgggattaattactagtggaggtgtgggttgcmgtactatgttaaattgtggtggggcttttgtaggtttaatagtttttttgttttgttttgtttgtgatggagtcttgctctgttgcccaggctggagtgc

SEQ ID NO: 512834 - DNA, 201 bp, Homo sapiens
gtcttgctctgttgcccaggctggagtgcagtggcacgatctcagctcactgcaacctccaccctctgggttcaagcaattttcctgcctcagtctcccgmgtaactgggattacaggcacgtgccatcatgcctggctaatttttgtatttttagtagagacagggtttcaccatgttggtcaggctggtctcgaactcc

SEQ ID NO: 512835 - DNA, 201 bp, Homo sapiens
cctccaccctctgggttcaagcaattttcctgcctcagtctcccgagtaactgggattacaggcacgtgccatcatgcctggctaatttttgtatttttartagagacagggtttcaccatgttggtcaggctggtctcgaactcctgacctcatgatccgcccgcctcagcctccctaagtgctgggattacaggcatgg

SEQ ID NO: 512836 - DNA, 201 bp, Homo sapiens
gacagggtttcaccatgttggtcaggctggtctcgaactcctgacctcatgatccgcccgcctcagcctccctaagtgctgggattacaggcatgggccaygtgcctggcctggtttaatagttttaaaattttatttagggggaatgatggtggtttttggttatacaatggcaatggctactgaggagtatcctgagac

SEQ ID NO: 512837 - DNA, 201 bp, Homo sapiens
cgcactgctgttaagccagggccacacactgcagtgctgcggtgctccaccagctggaggatggcctggcccataatacccgcattcccaccttgctctgrccctgtgtcccctccaacgtgcatcctgagctcgcaccctgtgtggaacccaaccagctgcttatcaacatttaagtccacttttatgacacttccgtca

SEQ ID NO: 512838 - DNA, 201 bp, Homo sapiens
tttcaattctggaagagacaaacgcttcggaggtcccttcgtggtcgccaaaatgttaccggggatccttgctcacagagctcccaaaatggtggcaagcsgcttccaagatggtggtgggcggcttccaagatggtggcaagcctcgtgttctctgacctggggttcttggcctcacggattccaaggaatggaatcttg

SEQ ID NO: 512839 - DNA, 201 bp, Homo sapiens
caactaatttttctatttttagtagacatggggtttcaacagattggccaggctggtcttgaactcctggcctcaagtgatccacctccctcggcctcccraagtgctgggattacaggagtgagccaccgtgcctggccacagttaccgttttataaagaggtgagtggtaaacagttctggacatggacctgggttcat

SEQ ID NO: 512840 - DNA, 201 bp, Homo sapiens
ttctttagttaaaaaaccaattagcaggccgggcacggtggtgcatgcctgtaatcccagaactttgggaggccgaggtgggtggatcacctaaggtcagrggttcaagaccagcctggccaacacggtgaaacccggcctctactaaaaatataaaaattagccaggcatggtggcactcgcttgtaatcccagctactc

SEQ ID NO: 512841 - DNA, 201 bp, Homo sapiens
acgttagctccaaaatcagtttgatgagatacagttgcccctatatgagaatgcacaggattcctcattggtgagttcaaccatacattttgggtaactcytgaagacatctgcaaattgtgagttagttgtttgggtccattaacatttgcatatgttattctttctactgaagtgtgtgaggccacaactgtcccatta

SEQ ID NO: 512842 - DNA, 201 bp, Homo sapiens
atatttacacccattttagttacatggaaattaagaggcagattatgcagaaatttccaggaaaaagtggtaacttctgggttgtcaggccattgccatgraaagaggcattaacttcgggtgtcgccacggcaatggtaaactgacatggcacactggtaggcacgtctaatggaaagcagccaccctgcatccctgttt

SEQ ID NO: 512843 - DNA, 201 bp, Homo sapiens
atgtacaatgaagtctgagatgagaattcgatatggagggcaagtagggaatcttttaagaatttgatagcactgtgtttttgataagaacaagatacagrgtacacatcattgaatggaaaagcaccaggtgttcactatcctttggatagctcacgcagggaaacgacaggtctttctggaaataaagtttgtattaga

SEQ ID NO: 512844 - DNA, 201 bp, Homo sapiens
agcactaaaaactttcatcataccttcaggaaaatatgtcgttcatctgctagaggtctacagcttagctgaaagcaatttaaatctctctcttctggacsttctggaatcacaaatcagatggtagaaggatgaaaagaatacttcttggtttattaaccagctgtttaatctctaaatatttatttctggtttatttct

SEQ ID NO: 512845 - DNA, 201 bp, Homo sapiens
attaatttgcccaaagtctcatagctagcgagtaagaagctagaggtttcaaactggggactttctgatgtcagagctcaagcttgtcaccaccgtgctcmtggggaaacggtcaggagaaagccaagtttccaggaaactggaatggccgcagtgaagaatgaccctcttatatcctgctgattagatgaccagacttgg

SEQ ID NO: 512846 - DNA, 201 bp, Homo sapiens
atagactggattaagaaaatgtggcacatatacaccatggaatactattcagccataaaaaatgatgagttcatgtcctttgtagcaacatggatgaagckggaaaccatcattctgagcaaaactatcacaaggacagaaaaccaaacaccgcatgttctcactcataggtgggaattgaacaatgagaacacttggatg

SEQ ID NO: 512847 - DNA, 201 bp, Homo sapiens
ttgggcacttaggctggtctcatgatctaagggccaactgctcatgtgaaaatccatcccagcatcctcagctcaaataactgccgcttgccacacgcctrccccaacggaattaacggaagctgctgatagccctgctgacctcattggatggaaccgtgtcctcagcagacaggagctccttcctcttctgagtgagac

SEQ ID NO: 512848 - DNA, 201 bp, Homo sapiens
tttacactgaactctggtctctcagtgttagtccaaactgcaccatgtcataagctctccctgctattttgcagaccttagtcaaagtgaaacaggggttygggtgtgagaaacgtcctgcctaaccacctgaccacaaggcagacaaaggcctaaccaaagacacatctctatcatatcatgctggacaaagatccgagg

SEQ ID NO: 512849 - DNA, 201 bp, Homo sapiens
cctacattattttgctaagaatgatagcttctagctccatgtatgctcctgcaaaggacatgatggcgttcttttttatggctgcatagttccatggtgtrtatgtaccacattttctttattcagtcttccactgatgggcatttaggttgattccatgtctttgctactgttcattgcaacagggttgcaatgaacata

SEQ ID NO: 512850 - DNA, 201 bp, Homo sapiens
acacaaatatgaatggcataacactgccttaaggatattttaagcttcctttcttcccaaacttaagagctttgcagtataaacacatagtgatataaaayaagtaatgttaagctaaagtcaaatttgcatgaagttggaaaaattccatattctacgtagagttataacaatttttaattgagtgccaccaatctcagg

SEQ ID NO: 512851 - DNA, 201 bp, Homo sapiens
aaaagaccatacagtacccaaagtccttaaaatcccagagctccatgcaaccagtaataggagttgtcaaactagtttcaacatttcaaaaagcctaacaraagtgatacatatacctgcactgaggctatacaggctaaatgaaatatcagatttccgtttttataagaattatggctgggcctggtggctcacgcctgt

SEQ ID NO: 512852 - DNA, 201 bp, Homo sapiens
ccgtttgttttttaaacacattttcacaagtttttgagacactggatttctttaattaaaaaaaaaatgccaagaaacattatttatacagggttgattgytttcatgttgttattctgtaccctatagtagcctccatgagaatctggtatttcttgctgcttggaactactttgcagtgattacttggttgcagtccaa

SEQ ID NO: 512853 - DNA, 201 bp, Homo sapiens
aaagagttgagtacaatgcagagaaatgactaaataatattgttgtagaaggtgaggaatcaggtctttttatataagtaatgtttaggctctggcccaaraaggttttgttcataagtggctcagacatattttatttattgaatgtatatcctgcctcattccaaaaagcatttaaggcagcttacaaagaggcataca

SEQ ID NO: 512854 - DNA, 201 bp, Homo sapiens
atgactaaataatattgttgtagaaggtgaggaatcaggtctttttatataagtaatgtttaggctctggcccaagaaggttttgttcataagtggctcaracatattttatttattgaatgtatatcctgcctcattccaaaaagcatttaaggcagcttacaaagaggcatacaaaataaaatggaaaggaagtaagaa

SEQ ID NO: 512855 - DNA, 201 bp, Homo sapiens
agatagctagatagataatagataaataaggtagatgacagattagatacagatgataaacagatatgctatcagtctagatctattactcacagtcagtygtatcacagtgtaattccatcaacttcatttgcagcaaaagaacagcccctgatgtacgcctgtttcctgaatatttggaaatattaatattaatataga

SEQ ID NO: 512856 - DNA, 201 bp, Homo sapiens
taaggaacagagaaaacaaatattccaatccaaaaagtcaataccatttctgtgactctagcagttattttttctttttcagagcatgaaactgagctcaraatttcaggatgcctaagagaaagttggaaataaaataattaatttgccttctcagagaagggaattatttgctagtgaaacaaggtttttcttaggatt

SEQ ID NO: 512857 - DNA, 201 bp, Homo sapiens
gaaaaatctcatctcaacgagaggaggcacagacaccaggctgccagggccgtgcaccacaggtcagatcatccaggatctcctgcgagctgttctcaagyctctgtgacacacaaccagaacagcagccactccctcaagagagtttacaattaagccaatcagacctttaaacaaaatgtcctcttttccacagtgtgt

SEQ ID NO: 512858 - DNA, 201 bp, Homo sapiens
tattgtagatgaaacttttattaattttatttttgaactgttcattgcaagtgtgtagaaacacgattgatttttgtgtattgatctcatatcttgcagcyttgctaaaattatttattagttctaatctcccctcttaaggcttaaactctagttggaaatcaaggttaggggaggggtacagccaaggacttacatttc

SEQ ID NO: 512859 - DNA, 201 bp, Homo sapiens
tagtttctttcaagaatggtttgcagtttggggagtataatttttgcatttcttttgttaaagttattcctaaataatgtattcttattgatactattgttgatgaaacttttattaattttatttttgaactgttcattgcaagtgtgtagaaacacgattgatttttgtgtattgatctcatatcttgcagccttgcta

SEQ ID NO: 512860 - DNA, 201 bp, Homo sapiens
cagtctcgggaattgagtcctcaacctgtggaatctgatgctatctccaggtggatagtgtcagaactgagctgatttagaagacacccaactggtcaggrttgattgattagttgctggtgagaagaaacccctacacattttggtgatcagaggtcacaggagtcttctacgttgattgttagtgagagactaggagaa

SEQ ID NO: 512861 - DNA, 201 bp, Homo sapiens
gcgtgagccaccgcgcctggcaattcaccaactattgagaacttattttgtgccagattctactctaggcgtttaagatgcattagggaagaaaacgaagkttcataccttttggaagttactatcatatatgtaccatggatggaaagagacacaaaaaacagtagtatcggctgggcaccggtggctcacacctgtaat

SEQ ID NO: 512862 - DNA, 201 bp, Homo sapiens
gcctcccaggttcaaacgattctcatgcctcagcctcctagctggggtcacaggcatgtgccaccacacccagctaattttttgtatttttagtagagacrggtttttgccatgttgcccaggctggtctcgaactcctgagctcaggcaacccacccacctcagcctcccaaagtgctaagactacaggcctgagccact

SEQ ID NO: 512863 - DNA, 201 bp, Homo sapiens
cctagaccacagtgagagccaagagcggctttctggccctgcagggccctcacctgggctgcagggatggcaaggcggctcctgtaatagggacaggccckggcctccttcccaagggccagcagctgctccatgtccttcacctctgccagggcctcatcccggagaaggcccatctgctcgtggttgtagaaggggcag

SEQ ID NO: 512864 - DNA, 201 bp, Homo sapiens
aagggaaaaagtgaaaggggccattccaaacctccaccccttggttattcggttcatgcggtatttggctatgcgggagacgtcaccaaatattagctacwggcttaagtcatatattcattctgtaagacagccttctaatcctccagctaattttctccagctaatgtagtaactaagctgttagcaggcattctgcca

SEQ ID NO: 512865 - DNA, 201 bp, Homo sapiens
tttaggagcatcatggttccttattcagaggatgagattgtatggaaatggcctatcccatgcagttcagcacaaggagacccagtgcagtacaggaacamtgtatgaaatgcttaaaaatgactattcattgcacattagagaatgcctatgtcacatttttacaattacagaactcttttttttttttttggagacaga

SEQ ID NO: 512866 - DNA, 201 bp, Homo sapiens
aaagagtgactacagtcaacaataatttattgcacatttaaaaattactaagagagtataattggattgtttgtaatacaaggaaatgataaatgcttgargtgatggatacacatgtaccctgatgtaatgattacacattgtgtgtgtgtataaaaatatctcatctaccccataaatatatatacaccagctatgtac

SEQ ID NO: 512867 - DNA, 201 bp, Homo sapiens
cacccaatggattcaccttgcttgctgcctagacagagccgatttatcaagacaggggaactgcaatggcaaaagagtaattcacgcagagccggctgtgygggagactggagttttattattacttaaatccttgagccttcgtggatcagagtttttaaagataatttggcaggtaggggcttgggaagtggggagtgc

SEQ ID NO: 512868 - DNA, 201 bp, Homo sapiens
tgtagaggaggaagacaagtgatactgatgatcctgactacgtggaagccaaggttaatgttttcctggttctgttttttttttttttggttgggggggcggggtggagacagggctgaagtaatcctcccacctcagcctcccaagtagctggcattacaggtgcacaccaccaaacctggctaatttttgtacttttgg

SEQ ID NO: 512869 - DNA, 201 bp, Homo sapiens
ggtgtgagccactgtgcccggcatcatttttttttatactgcatttttacagtagcttttctatgcttgaagacccaaatacttaactattgttataattycctacagcattcagtacagtaacatgatgtccacatttgtagcctataagcaataagatacaccatagtgattaggtatgcagtaggacatctaggttga

SEQ ID NO: 512870 - DNA, 201 bp, Homo sapiens
agccgagattgcaccactgcgctccagcctggcgacagagcgagactccgtctcaaacaaacaaataaacaaaaaaaccctttgtgcccaccgtatgctakcgtaaaagtaatctgaatttgaaagtcaatcagcaagtatttactgagcgacgtgtaagggataaggaaaaggtctaaagcagcttatctagtttaggga

SEQ ID NO: 512871 - DNA, 201 bp, Homo sapiens
gaaaatgaaaaacagaacagttgtataggtactcaaagtatggtttctactaaatggtattgctttaacaccattgttaaataaaaaagtctagacgaacmatcacaagtcaaggaccatctgtactctgaaaattataaagcattgttgaaagaaatgaaagaagacctaaataaagggataaacagcccctgtttctgg

SEQ ID NO: 512872 - DNA, 201 bp, Homo sapiens
actctggtcttgacttgaagacattaatttagtttgcactgcagagtttaaaattcagtagtatttattcaattgatggcctagacttcctgtaagacccratctcttgctatgtcacccaggcaggagtccagtggcacaatcatggctcattggagcctcaacctcctggactcaagtcatcctctcgcctcatttttt

SEQ ID NO: 512873 - DNA, 201 bp, Homo sapiens
gacacagtcataaaaggagcatatgctgttgaaaagaaaatggtcccagtagacttgctcaatgtaggggtgccacaaaccttcaatttgtaaaaaaaaamcccacaatatcttccaagagcaagaaagcaaagcacagtaagacacagtatgcctgtgtttaattttgtggcaactaggaaaaaaaaatagccataaagg

SEQ ID NO: 512874 - DNA, 201 bp, Homo sapiens
tttttattgcactcagcatttttaattgttgctagcaggaaggttagtcagatgtcttagaccacaggaccactgtattgccagaatctaaagtcaaaaakccgctttaaaacataaagctaattatgtcactctcctgctttgaaactttcaatgcttttctcatgatatacagtgtaaatctgagctcctaagtgctct

SEQ ID NO: 512875 - DNA, 201 bp, Homo sapiens
ggctgtggggcaggatagagagcagggccttctactgaaggagtgactcaggaaggaggaggggaaggtgacaagcccctgggcaggagccctgtggccaygggatcattttaaattgagaccagagagtgagcagtccagggcagctataaccttggctagaaagggcagaggcagatggacctgctccatctcacctct

SEQ ID NO: 512876 - DNA, 201 bp, Homo sapiens
gattttcctgctgcttgaaatgtagtataatgacctctctggtaaaactcaaagtccaattcaaccaaggaatttggactggagctaaatagttaccaaamaagcgaagagggatggagaaacgctgaaataacaaatttcagctgactcttgatcttcggattggagtaataaggaacagtgggtactactgaggcagga

SEQ ID NO: 512877 - DNA, 201 bp, Homo sapiens
taaaaaacaaggtattgctggacagtcaccatgggtttctgctgcccctcaggcaatcattaggctcagagctggattctaaaattattctcagggttcacccccaaaaacctacacaacctagttgagaatccctaaaacgcaaagttcaaaacctaaaatcacgaagacttgtcccttgagaactttatgacgtcttcc

SEQ ID NO: 512878 - DNA, 201 bp, Homo sapiens
ccattgccatcatctctagaatttctggtcttaattcctggcattctcaatacccacacagatgatctcaattcttgaattcctatttatttatttgcttrcttatttatttatttatttatttatttatttatttatttatttgagacagggtctcattctgttgcctagactggagtgcagtggtgtgaccttggctca

SEQ ID NO: 512879 - DNA, 201 bp, Homo sapiens
ttattggtgacatccattccatgtgtatttatactttattctatctctttaaaaaatatgcactaaggaaagtatctgacaaacttatccactgtaaggtrtacacatgcctgatacaacttaactctcttagggttggttacaattaatgagggccagagaaacacatctctgtggtgccagccaataacaagctgatgg

SEQ ID NO: 512880 - DNA, 201 bp, Homo sapiens
atcttgatttttaaaaatgttttaatatgtttccttaaccacattgtggcaggccaggtctcactagtagctgagattacaggtgcacgtcaccacgcccrgctaactttttggtatttttagtagagacagggtttcaccatgttggccagactggaataaacaagttttattgtcagtctgaagaaattccccaggcct

SEQ ID NO: 512881 - DNA, 201 bp, Homo sapiens
gagagattgtgggggtcttagttggacttggttctttgctggcctctgtgctttcttttgcaactggttcagatgaggtccttgtttctaccggggatgasacaccccgcctggctaatcgtggggacaaaagtcctctgggatcatcgggccctttcaggctgccactgcgggtgactctgctctgcctatagtaatcca

SEQ ID NO: 512882 - DNA, 201 bp, Homo sapiens
ttcctctttctttaactcttacatttggtgccaaaacccaggacgggtgttgtgggtagaggctctcttgcaacccaggaagcagtgggcagcggcagctmatcccactggatcctgagagtctctggccaaccaccccatcttgcctcttacttcacttttcaagtgatttacatgagcaggacaactaacctgaaggga

SEQ ID NO: 512883 - DNA, 201 bp, Homo sapiens
gctgggaatgggcctggcagagctggggaaagaacacaaaccaggctctgagcaagcagccgagggctaaggtactgacatcttagattcacctagaagaygctagccctggacacacaggaagccaccaaagggaggagagggggctgggtgcagacaaaaggtactggtttccacagcccttaggctggtgggagctaa

SEQ ID NO: 512884 - DNA, 201 bp, Homo sapiens
atggtggctgttatgaactgaatgtttgagttcccccaaactcctatgttgaagccccagttcccaatgtgatggtaattggagatagggcctttgggaaktaaatgggattggatgaggctatgaggctgggggatgatgggatcagtggcctgatggaatcagtgcctttatatgaagagacatcagcgaatctgtctt

SEQ ID NO: 512885 - DNA, 201 bp, Homo sapiens
gaccactgctaaaataaatagcttgaacatcagatggtattgaagtcacatctttgatgtgaatcggactgaagggaagttgcttctagggaaactggttygctaggaccatcgaaaacctccaaacatggcaaatttataactcaagtgaaacgaagtaaaaagagaagttatatatataatatatacaagatatataat

SEQ ID NO: 512886 - DNA, 201 bp, Homo sapiens
attcagagatttaccttcacaagaaaacacaaagctcagagagaatgagaagtgagattaaccatgaaactttaattatttatatgcttacattaatgttrttagagaagcaatgaatcctcactgtagaaaatttgaaaaatatagagaaaaacacaagacattacctattattaatttgaccaactgccattaacattg

SEQ ID NO: 512887 - DNA, 201 bp, Homo sapiens
aggagaaatgtctctgaggactgggtttatctgccagattagtaaaaaggagagggctgcaataaaggagtctataaaccaagtctgaagtgacaggtcgkttgagctcacctcagataccccagtctgataaaaattgtgtatcggcacaaattcaggtctacttcaagagggagagggtggagttgagacaaaagaaca

SEQ ID NO: 512888 - DNA, 201 bp, Homo sapiens
acagcttcttggccaggcgtagtggctcacgcctgtaatcccagcactttgggaggctaaggcaggtggatcacctgaggtcaggagttcaagaccagccyagccaacatggtgaaaccccgtctctactaaaagtacaaaaattagctgggcatagtggtaggtgcctgtaatcccagctactcggaaggctgaggcagg

SEQ ID NO: 512889 - DNA, 201 bp, Homo sapiens
gagagcagggatgtgagagagggaaaaacaaagatggagcaagatcacagaggagttgagaaaataaagaacataggtggaaaaccagaggaatgagggaygatggataccaataatgtttcatgtgaaggtgaagctaatgtccagttgctggtcaaatagcttgtaaatgtgggaaactggcaagaataaagaaaagag

SEQ ID NO: 512890 - DNA, 201 bp, Homo sapiens
cactgcgcccagccccacatccatatatttaaatgcatcatgtaggctgggcacagtggctcacgcctgtaatcccaacactttgggaggctgaggcgggmggatcacctgaggtcgggagttcgagaccagcctaccaacaaggagataacctgtctttactaaaaatacaaaattagccaggcgtggtggcacatgcca

SEQ ID NO: 512891 - DNA, 201 bp, Homo sapiens
caactctcttacctgtctgtgacagactctgtgtattgggattttgcttaatgttccctaaaaaagagaatggaaataggtcacaatggtggttctcaggmcccccaacccttccctatcttctctccctccacactgcacatcaagtaagaagagcatctgtatttgaacggctttgttttgcttttcactgtttatagc

SEQ ID NO: 512892 - DNA, 201 bp, Homo sapiens
ggtggttgcagtgagccaagatcgtggcactgcactccagcctgggcaacagagcgagactccatctcaaaaaatttaagatgtggagacagcctaatcakacaactccatgtccccagaaatgatggcagggataacacacaatgagagggtgtatctgtggggcactggggtgctctgctgtgaatggccggtgggaaa

SEQ ID NO: 512893 - DNA, 201 bp, Homo sapiens
gggcaacagagcgagactccatctcaaaaaatttaagatgtggagacagcctaatcagacaactccatgtccccagaaatgatggcagggataacacacamtgagagggtgtatctgtggggcactggggtgctctgctgtgaatggccggtgggaaatcttcccttcaagagcacttcacatactgagacctccagatgc

SEQ ID NO: 512894 - DNA, 201 bp, Homo sapiens
tttgagtaggagtaaagtcctggaaaattccttgaagccgtaagtcccatagaatagtaaggagctgatcaggatggataatgggagtttcataatggtaycaataaaggtctgtaacaagattggttgggaagcaatgaaagtttgagagagaaagagacatagcagcttatgtaaatttctcttccttttcctccagga

SEQ ID NO: 512895 - DNA, 201 bp, Homo sapiens
atcccttgagggccctggctctgcagacagggctatcaaagccctgccagagccctgcctatcgctgagcctcaaagtgagttagcctagtacaagaaactttttttttcctgcttaagtgggtgtagtaaagatgatctggtaagacccattccatttaagtgtgaggggaggattgaggagaggactgggatcttttac

SEQ ID NO: 512896 - DNA, 201 bp, Homo sapiens
cattgttgagtcttaaaaaccaaagcagaggccgggcatggtggctcacacctgtaatcccagcactttgggaggctgaggcgggtggataacctgaggtygggagttcgagaccagcctgaccaacatggagaaaccccatatctactaaaaatacaaaattagccgggcatcctgtaatcccagctacttgggaggctg

SEQ ID NO: 512897 - DNA, 201 bp, Homo sapiens
atcttgacagatgatggatgtgtctgagaggggagaaggcccagccttgcattcttgggaacaggtgctgattgccttcagggctccagcctcttttcttrgccttttcaatgctcagacatcctcttccttgccctcacccctgctcttcccacatcttcaaagctgaaggagtctccttattctggaggtgaggagcag

SEQ ID NO: 512898 - DNA, 201 bp, Homo sapiens
tgatggatgtgtctgagaggggagaaggcccagccttgcattcttgggaacaggtgctgattgccttcagggctccagcctcttttcttggccttttcaaygctcagacatcctcttccttgccctcacccctgctcttcccacatcttcaaagctgaaggagtctccttattctggaggtgaggagcagtgagggagaac

SEQ ID NO: 512899 - DNA, 201 bp, Homo sapiens
tgcccggccgccaccccgtctgggaagtgaagagctcctctgcctggctcccccgccgtctgggaagtgaggagtgcctctgcggtcgctgccccatctgkgaagtgaggtgcccctctgcccagggactacactgtctgggaagtgaggagcgcctctacctggctgccgcactgtctgggaagtgagaagcgtctctcc

SEQ ID NO: 512900 - DNA, 201 bp, Homo sapiens
tgaggtgcccctctgcccagggactacactgtctgggaagtgaggagcgcctctacctggctgccgcactgtctgggaagtgagaagcgtctctccctggmcgccccacagtctagggagtgaggagcgcctctacctggccgccccaccgtctgggaagtgagaagcgtctctccctggccgccgcaccatccgggaagt

SEQ ID NO: 512901 - DNA, 201 bp, Homo sapiens
tctgctatgactatgtgactttggaaatttgcagactcacttaaccttttagaggctcaatttctttaaatctgaagtcagaatgacaacaccaaactcaytgaggtattgtgaccataaaatgaaaaaaaaaaaatcatgattcctttaatggcatgtttgtttaaaaaaaagaaactgaaaagcatgattaattgactt

SEQ ID NO: 512902 - DNA, 201 bp, Homo sapiens
accacatttttctttatccattcttctattcattgacacttagattgctgacaaatcttggctattgtgaatagtgctgcaataaacatgggagtgcagakatctctttaatatactgatttcatttcttttgtgtatatacttagcagtggtattgctggatcatatgatagttctattttcagttttttgaggaaacta

SEQ ID NO: 512903 - DNA, 201 bp, Homo sapiens
gtgactaacattgaagaagggggaagctggaaacaggtggactgtagacaaccgtgggcatctgaatgtgggttttagatgcagacatttgagacgactaraagaaactgagaaaaaagaggaaaggaccacaggaacgagttaagcatagatattcaggaaaagccatatcttctggtaaaacataaacaaaacagagtt

SEQ ID NO: 512904 - DNA, 201 bp, Homo sapiens
gaaggagaaagtgaattttaatcaacttccattaaattaaatctgattctactgaagtttattaagtgcctctattcacttggagagtgccaggcacttcrggggatctatggatgagtctgactcagccctgcttcaagagcttacaaactagtggagaggatggcagtgtgcattttgctctaacacgagatcaaaagt

SEQ ID NO: 512905 - DNA, 201 bp, Homo sapiens
aagacacagtctctgctcttaatgattactttctactacagaagacaagaaaattatcacttatgacataataagatgtatagatatgcacccagtaccayaggagtacagagaaggaatatcaactaagactagggagatcaaggaagggcttcctaaaacaagtgatactgatgtgacactcagtaggtaatggtgaag

SEQ ID NO: 512906 - DNA, 201 bp, Homo sapiens
gaactcctgacctcaagtgatccacctgcctcagcctcccaaagtgctggcattacaggcgtaagccaccacgcccagctagaaaaagatcttttggtcargtcatatcatgagtcagtaaaagtctagtccagaggtatccaatataaatataatatgaaccacatttataattttctactatgcaaagttttaaaaagt

SEQ ID NO: 512907 - DNA, 201 bp, Homo sapiens
gcccacatagcccaaatagctgcctggttccagctcaggctactaataacacctcaggcatgttgctttccttccttatacctgtttcctcactgcaaagraggcttcatactgaatgtaatatatcattttaagaaatgactccggggtatgaaacatagaaatacacacaatgaaaatcttcaagaaagtaagatgcaa

SEQ ID NO: 512908 - DNA, 201 bp, Homo sapiens
aactactctctcagggccaaacccagagctgctgagcccctccctccagctggctggtctgagcagtcgcagcccagctgtgggctctaatggcagcagasagcaggcaggggcccagctgctgggagtgagggccggccatgtatcacgacccaggagatgagcagaaccactacttaccggcctaggttgtcagagaag

SEQ ID NO: 512909 - DNA, 201 bp, Homo sapiens
gcaagatggaggctacagtgagccaagataacatcaccacactccagcctgagagcaacatcctgtctcaaaaaaaaaaggtgggggggcttacaaaatakaaaagatgaattctacatatttgttgaaaagcacaatctcagtctctcatttctcacagcatctatcaaaggctatcagtccactcactctcaggtaccc

SEQ ID NO: 512910 - DNA, 201 bp, Homo sapiens
ttatttgctctttctttcttccttcctcctgctcctctgctgtaagcacccccatcttccagctttcccagtgaagtgccttctccttagggccttccttyttaaagagtgaatgtgcttccctctcgaccattatagggtgcactccaggcaaaacctgtcttttttttttttttttttttttttttgagactgagtctc

SEQ ID NO: 512911 - DNA, 201 bp, Homo sapiens
taggtgtttacattttcatgctccattgttgatgttgtggaactaggagcaagctaatactaggaacaagataatactgtggactgcaacagccaaaactyttggctttctgtggcccgggttatttgctctttctttcttccttcctcctgctcctctgctgtaagcacccccatcttccagctttcccagtgaagtgcc

SEQ ID NO: 512912 - DNA, 201 bp, Homo sapiens
ctgaaacccagccagtttgggctgctcccgggatgagaacactgctccgtaccgttcagtgaagccaaagagctgggtgggatgagagagagcagtggagrggaacgaggaacagccatgagagagaggctgggtggatcggaggctctgccaggctcaagacacctgaagcgcacatcccaccaccccagcaaggcccac

SEQ ID NO: 512913 - DNA, 201 bp, Homo sapiens
gtgcatcagtggggaagctggttgcgggacgctggcctgactctcgtctgcaggggctgcaagagctgcacagagcagaatggggaggaggcctccctctkgtcaggtccacacatgaggaacagaagtccttgcccatgcgtgcagccggctctgcctgctcaccctcctgcctcaccttcagtcgtcctgggctgcagg

SEQ ID NO: 512914 - DNA, 201 bp, Homo sapiens
gctgccaggaagccttcgatgtgcatcagtggggaagctggttgcgggacgctggcctgactctcgtctgcaggggctgcaagagctgcacagagcagaayggggaggaggcctccctcttgtcaggtccacacatgaggaacagaagtccttgcccatgcgtgcagccggctctgcctgctcaccctcctgcctcacctt

SEQ ID NO: 512915 - DNA, 201 bp, Homo sapiens
acatggtgaaaccccgtctctataaaaaatacaaaaattacctgggcatcatggcacatgcctgtaatcccagctactcgggaggctgaggcaagagaatyacttgaacctgggaggcagaggtggcagtgagctgagattgagctcaaaaaaaaaaaaatttaattgggtttagaattccaaattttcagttgcttttcc

SEQ ID NO: 512916 - DNA, 201 bp, Homo sapiens
ggtagttcctaggctgttcatctcttaatcctgctgtaagatgaataaagagaaaggaagtatagaaaaggctactcttagcctggagtagaagaagggcyggttactgtaataattataaaatggctgctttaatcatatcctctttacaggtaaatttgagattctcctcagctcagagcctgccagcctcaaacaccc

SEQ ID NO: 512917 - DNA, 201 bp, Homo sapiens
tggtgggtgcctgtaatcccagctacttgggaggctgaggcagggagaatcgctggaacccggtaggcggaggttgcagtgagccgagatcgagccattgyattccagcctgggtgaaagaacaagactctgtctcaaaaagaaaaaagaagataatctcctttctctcctgctgttttataatcattctttgtcattgtt

SEQ ID NO: 512918 - DNA, 201 bp, Homo sapiens
ggtgaggacgtggagagtctttatatctagctcagggattgtaaatgcaccaatcagcaccctgtgtttagctcaaggtttgtgagtgcaccagtctacastctgtatctagctgctctggtgaggacgtggagagtctttatatctagctcagggattgtaaatacaccaatcagcaccctgtgtttagctcaaggtttg

SEQ ID NO: 512919 - DNA, 201 bp, Homo sapiens
ccaatcaggaatccatgtgttatccattgaacaaggaaacagtaaatgttttcaagatttcctttttctttcctctttcatcttgtcaaattctgaacaatttagcaatttggagctattctcacattagaagaaacagtcaccaacctcttcatccaaagatgaagaagctgatgtaataggatgacatactgggtttgc

SEQ ID NO: 512920 - DNA, 201 bp, Homo sapiens
cctggccaagaaccacctgattaccttggcggctcaggatgaccctgccgtcctggttggccgtagtgagagctgccaggaagccttcgatgtgcatcagyggggaagctggttgcgggacgctggcctgactctcgtctgcaggggctgcaagagctgcacagagcagaatggggaggaggcctccctcttgtcaggtcc

SEQ ID NO: 512921 - DNA, 201 bp, Homo sapiens
ggttggccgtagtgagagctgccaggaagccttcgatgtgcatcagtggggaagctggttgcgggacgctggcctgactctcgtctgcaggggctgcaagwgctgcacagagcagaatggggaggaggcctccctcttgtcaggtccacacatgaggaacagaagtccttgcccatgcgtgcagccggctctgcctgctca

SEQ ID NO: 512922 - DNA, 201 bp, Homo sapiens
ttgttcaggaccacaagatgggagcagttacctttctgctgatcatgctcttctcacagtatcgctgcacctgcaaaaaccaagcccagctgtaggcatgwgtgcaaactgagcaagctgtaatcttaaacacaaaacaaaaaacaccacttctaccacccaggcagcacaacgcagtgctaccttctgaggcacctggag

SEQ ID NO: 512923 - DNA, 201 bp, Homo sapiens
ggctagaacccaggaggtggaggttgcagtgagccaagcttgtgccactgcaatccagcctggtgacagagtgatactctatctcaaaaaaaaaaaaaaaraaaaaaaaaaagaaaaaagaaatgtgaagacaggagatttgagaggggccaggggcagaattatagggtttggctgtggctgcacccaaatctcatcttg

SEQ ID NO: 512924 - DNA, 201 bp, Homo sapiens
agctactcgggaggctgaggcaggagaatggcgtgaacccgggaggcagagtttgcagtgagccaagattgcgccactgcactccagcctgggctgggcasagagcaagactccgtctcaaaaaaaaaaaaaaaggaaaaggaaagaaaataaaacagtgcaatggtgtaaggctaagtattaattcagtcacgtatgtgt

SEQ ID NO: 512925 - DNA, 201 bp, Homo sapiens
cctttttttgaaaggctaaataaaattccattgtgtatttgctagtaggctttctccaaaggaattatagcctctgctgtcctccatgggagatagcaccrgaagtgggcatctgccactggaagagggtcctcaccagaacttggctgtgctgggaccctgctctcagacacacagccttcagaactgtgagaaataaat

SEQ ID NO: 512926 - DNA, 201 bp, Homo sapiens
caaatggcagaaattcctttttttgaaaggctaaataaaattccattgtgtatttgctagtaggctttctccaaaggaattatagcctctgctgtcctccwtgggagatagcaccagaagtgggcatctgccactggaagagggtcctcaccagaacttggctgtgctgggaccctgctctcagacacacagccttcagaa

SEQ ID NO: 512927 - DNA, 201 bp, Homo sapiens
ttggcatcccaaaactctgggataacaggtgtgagccaccatgcccagccaatactcatcatttttttggtaggaagagcatttgaaatgtattcacttarcatttttggaatatacagtacattattattaactatagttctcatactgtgcaatagatctcaaaaaaatattcctcctgtctaactgaaatgttgtacc

SEQ ID NO: 512928 - DNA, 201 bp, Homo sapiens
catgagccaccgcacccggcccagaagggataggttttaaaggattgggtgaattagtactgaaggacataagggaagtcacaggccatttgtgtttgccrttggctttttataatttgatgtctttatggggtacggagtgatgttgtaatatatgtaaacaatgtgaaattattaaatcaagctaattaacatacccat

SEQ ID NO: 512929 - DNA, 201 bp, Homo sapiens
cacttaataagtggtagagatgtaaaatatttaggaaatataaatttgtatatgtattttaattatacacttacctttcctaaccagctctcaaccccccrtctccctaaagatttaactctaccttccattctcactagatattttcttttatttcttttttttttttgaaacagggtctcgctctgtcacccaggctgg

SEQ ID NO: 512930 - DNA, 201 bp, Homo sapiens
ccctgagagcaaacacatgaagggccttgggagcttcaccctaagcctcaggtttcagtcccagggttaagctcggaagtggctcagatcagctctgggcsctctgagggcaactctcttacctgtctgtgacagactctgtgtattgggattttgcttaatgttccctaaaaaagagaatggaaataggtcacaatggtg

SEQ ID NO: 512931 - DNA, 201 bp, Homo sapiens
agcctggcaaacatggcgaaatcctgtctactaaaaatataaaaaaattagttgggtgtggtagtgcacacctgtagttgtagctactcgagaggctgagkcatgaaaatccaagaggttggaggctgcagtgagctgagatccagccactgcactccagcctgggcgacagagtgagactctgttttaaacaaacaaaca

SEQ ID NO: 512932 - DNA, 201 bp, Homo sapiens
tcttccacagagtttgtattctttagtaagatatctggacataatttaaactccagcatgtttgatttttctgtgttacctttcaccggtaaaaaggtctkatgtttattttcctgtctcttatctttatgaagcttcctgggtgaactttctaatttggtgagagaaatgctttcacgttcagtgcatttaaacccaact

SEQ ID NO: 512933 - DNA, 201 bp, Homo sapiens
ggtgtgaccatgcctgtaattgcagcactttgggaggccgaggtgggaggatcgcttgaggctaggagctccagaccagtctgggcaaataacgagacctagtctctgctaaaaattaaaaaaataaccagccgagtgtggtggtgtgtgcctgtggtcccagctactcaggagactgagacgggaggattgcttgagctc

SEQ ID NO: 512934 - DNA, 201 bp, Homo sapiens
tttcttttttttttttttttttttgagacagagtctcactgtgtagcccaggctagagagcagtggctcaatctcagctcactgcaacctctgcctcctgkgttcaagggattgtcccacctcagcctcccgagtagctgggattacaggcatgtgccaccatgcctggctaatttttgtattttttggtagagacagggt

SEQ ID NO: 512935 - DNA, 201 bp, Homo sapiens
ttggggattacaatttgtcatgagatttgggcagggacacagacccaaccatatcattcattatcactcaatttaagtatgtcttaaaatttaaaaaaaawttttttttgtcttataactgatgaagtggcaaatatttcttaatttttctcatgacatctgcttggtcccaggagttacttaatggtgcacttttaagtt

SEQ ID NO: 512936 - DNA, 201 bp, Homo sapiens
cttgagtaccttctctgcatattcaataaatgtactactattttcagcatcagtatatagtggtgaattaaagttcttgcctaaaagagctagattctctytcattttacattttataaaagctactaagactgatgcaaattaacttacatgaaactgatttccattttctttccattttttggtgcatgcttgatgaac

SEQ ID NO: 512937 - DNA, 201 bp, Homo sapiens
tgggttatgcatccacataatcctctgttatcactttatatagtacactcaacacttggtgaaaatcctcaggaatttggaattatcttccttttggactrttttcaaactatctctgaaacaagaatgtgaagaaatacaaggctggtaaattattaaagctgttacctgtctcttaatgtcagtggttttcatgttaca

SEQ ID NO: 512938 - DNA, 201 bp, Homo sapiens
atcctcaggaatttggaattatcttccttttggactattttcaaactatctctgaaacaagaatgtgaagaaatacaaggctggtaaattattaaagctgytacctgtctcttaatgtcagtggttttcatgttacatgtctttctgacaaaccaatagacacctaaccacatccttgttcttaatgcttcctgttaatgc

SEQ ID NO: 512939 - DNA, 201 bp, Homo sapiens
cttcatcttgttgcataactttgctttatcctcacgatagatcccattttccacaattaattacttatatattttaaatttgtgttgtatatgttcatacaaataaaaataaaataaaacagattgaatacatatggagtacactttattatttatttattttacttatttatttatttttttcgagagggagtcttgctc

SEQ ID NO: 512940 - DNA, 201 bp, Homo sapiens
taaacacaaaacaaaaaacaccacttctaccacccaggcagcacaacgcagtgctaccttctgaggcacctggagcctccttgccaccaaccttgtcatcycctctccgaggccacccccgcctctactgcccctgcccacaacgcagtgtcctcctcaggggggagaccctctttccaaatgtctctcccaagtctaaga

SEQ ID NO: 512941 - DNA, 201 bp, Homo sapiens
gagagaggctgggtggatcggaggctctgccaggctcaagacacctgaagcgcacatcccaccaccccagcaaggcccactgcaccaaggagggtggagaygaaggggactctggagttccctgagggcaggggaggaaagcatggcaacggcagggggttggggcacagctgggtcttgttcaggaccacaagatgggag

SEQ ID NO: 512942 - DNA, 201 bp, Homo sapiens
agagtgtatacccgggaggcaggcttcctggatttggtcatagttcccatctatttgtgatcaccttggaaaaatcacttagcctctgttgcctgtctcaktatccataaaatggggccaatacagtgtctgcctcattgcattattctaaagattaaaatgaatacacataaagtacttggaacagcactaagttagcta

SEQ ID NO: 512943 - DNA, 201 bp, Homo sapiens
ggaggctctgccaggctcaagacacctgaagcgcacatcccaccaccccagcaaggcccactgcaccaaggagggtggagacgaaggggactctggagttycctgagggcaggggaggaaagcatggcaacggcagggggttggggcacagctgggtcttgttcaggaccacaagatgggagcagttacctttctgctgat

SEQ ID NO: 512944 - DNA, 201 bp, Homo sapiens
ggggttgcacagaacaaatcaacatcctattcctgtccataagcctgagggagactgtgccagaagatggggtgagacagcaaggacctggagtctctatmtgttctatggggcaccaagaaaggtccctttctcacccatccctcatccctgtggccttcactctaaaagatgatgacttttgtctcacaggcgtgttgc

SEQ ID NO: 512945 - DNA, 201 bp, Homo sapiens
catcttgttgcataactttgctttatcctcacgatagatcccattttccacaattaattacttatatattttaaatttgtgttgtatatgttcatacaaayaaaaataaaataaaacagattgaatacatatggagtacactttattatttatttattttacttatttatttatttttttcgagagggagtcttgctctgt

SEQ ID NO: 512946 - DNA, 201 bp, Homo sapiens
gccaaggcaggttgattgcttgaacccaggagtaggagaccagcctgggcaacatagtgagaccccttctctactaaaaccacaaaaataagctgggggtrgtggcgcatgtttgtagtcccagctacttgggaggctgaggtgggaggattacttgagcctgggaggttgaggttgcagtgagctgtgctcacaccactg

SEQ ID NO: 512947 - DNA, 201 bp, Homo sapiens
gattcaggccaggtgtgatggctcacacctgtaatcctagcattttgagaggccaaggtgaggggattgtttgagcctaggaggttaggtttgcagtaagwtatttttgcaccattgcactccagcctggtgataaagcaagactctatttaaaaaaacaaacaaacaaacaaacaaaccacaataggcaagttgtactaa

SEQ ID NO: 512948 - DNA, 201 bp, Homo sapiens
ctccagctaatgtagtaactaagctgttagcaggcattctgccattttgtcaagtcagatgcttctgggtccttggggcttgtggtagtgctagtaaattktatcagtgtaattctctctcatcgtgtccttcactgtagacaggttgcttagtgatttgtatggaatatcacagcaatgaataggccttctgcttagtgc

SEQ ID NO: 512949 - DNA, 201 bp, Homo sapiens
tctgtgatggtgctaccagaagttgcagtgtccattcccttacttcatgggtgctgacgggtatggtaaggggcattcctttgctggttctggaacctgcraaagtatctgcagtttcctgatcttgacagcttttttttattatggcagtgttggtataactctaaaactggcagcttcccaatatgagaaaattgaaca

SEQ ID NO: 512950 - DNA, 201 bp, Homo sapiens
gcccaaccccatttcttccttttaagacgtgatgtcaatttccctcactcgtctccttgctctctgaccttgttccggtttgtgcacatccttctaaaaaygaggtgataagaaaggaaatcatgtgtggtaagatatgcccagtgaagagtacagtggcactgtcttgtcttatctgagacatcccagtcctattaaaac

SEQ ID NO: 512951 - DNA, 201 bp, Homo sapiens
tcaatgacaacaagcaatgtttgaaattatcttttgattttaaatagctactgtttctactttaaaatgaaagaaacacgatatgtacaagttaaaacaayagagctgtttatgatcatttacttttttattgtgacaaagtatatattacataaaatttatcattttaactttttttttttttttttgagacagagtctt

SEQ ID NO: 512952 - DNA, 201 bp, Homo sapiens
ggaaatcaaagcacgttcattgttttctcccatacatccgacaggctttaaaagaggccaaataccaaaaaactaaagagacattatacatcacccatttktgatattctggtcttataaatatatcatttcaaccagaagagcctcatttgaaatgcaacactacccacgtatttgatatacaccactctttcagactat

SEQ ID NO: 512953 - DNA, 201 bp, Homo sapiens
tgtcacagcagtacctagcctgggaaggaaggtagcaacattggtgggtactgactctggaaaacaaaatgatctgcaaagactgagccatgttgctataytgcaaattactaatgtccaatttggacttaatacagtagttttctgttgacattcccataaactggttcaattatttttaaataaatcatatttgttcaa

SEQ ID NO: 512954 - DNA, 201 bp, Homo sapiens
agaaacacagaaacacttttatacagctgttctatctgtctgtctatctatctatttatctagagacagggtcttgctctgttacccaggctggagtgcaktgatgtgattttactcactgtaaccacaaattcatggactcaagcaatcctcctgcctcagcctcccaaagtgctgagattaccagcatgagccactgca

SEQ ID NO: 512955 - DNA, 201 bp, Homo sapiens
attaccgtattttcaaatttggaaagcaatatccatgagtacaactatatttaaggggatgatagggcaaaatatttgcaagcagaaagttctgaagaaaycttcaaaccatcgctgtcatacatgttcacataaacatggggaatgtgataaaagatgataaattcttgctaagttatatctgagaaataacttcgccag

SEQ ID NO: 512956 - DNA, 201 bp, Homo sapiens
acctcaaatacatgcttgagaatatttcactcatgttaaattattttggcatggcttttctttgtttacttatttatttacttagtgactttagtggagargtttcattagctgaagtgttttggtttgcatttcctattttctcttacagaagctttgtatggagttgattttttctagttcttgatattttgtgcaggg

SEQ ID NO: 512957 - DNA, 201 bp, Homo sapiens
ctaaaatacaaaacattagcccggcatggtggtgggcgcctgtaatcccagctacttgggaggctgaggcagaggttggcatgagccaattgcacgccactgcactccagcctaggtgacaaagcgagactccgtctccaaaaaaaatacaactattggtcgggcgtggtggctcatgcctgtaatcccagcactttggga

SEQ ID NO: 512958 - DNA, 201 bp, Homo sapiens
gagtacaattattttccagcatcactgcctaccacaagccaagactcacagaccatggcccctcagagctgagtctcacctgcactgcttgtcgttcatawagtgacatttgagctatctggggccgagagctgccccctgagctagaactcccattggtggaattggagttctgctcgctctcagtctccatgatagtgg

SEQ ID NO: 512959 - DNA, 201 bp, Homo sapiens
cacaggcgtgttgcgttaagggttaagtaattacacgtctgttttgctttttcttccttctatagtcttaacatagtactctacccacaggtggtgacagraaggaaattggatgtggaacatggcaaggtggaaacctctaccttgaacaggttgatgttgtcgatctggctctggaagagaaagtcgttgatggtcttc

SEQ ID NO: 512960 - DNA, 201 bp, Homo sapiens
tgacaggaaggaaattggatgtggaacatggcaaggtggaaacctctaccttgaacaggttgatgttgtcgatctggctctggaagagaaagtcgttgatrgtcttcagctccgtccctgagagcaaacacatgaagggccttgggagcttcaccctaagcctcaggtttcagtcccagggttaagctcggaagtggctca

SEQ ID NO: 512961 - DNA, 201 bp, Homo sapiens
ccccccaacccttccctatcttctctccctccacactgcacatcaagtaagaagagcatctgtatttgaacggctttgttttgcttttcactgtttatagyatgcaacggacccacttagagggcaggtgggtccaggagcctcccacgtctgactcacgtgcttgcacgtggaacccaaagccctgtaagttcatgtttt

SEQ ID NO: 512962 - DNA, 201 bp, Homo sapiens
agacatctgcaaattgtgagttagttgtttgggtccattaacatttgcatatgttattctttctactgaagtgtgtgaggccacaactgtcccattatgcrtatcagaaacagaaatttgttgaggataattttggatattcagcagtggctgtgaaattggatttgaattaccgggatacatgcatgcttcttggttact

SEQ ID NO: 512963 - DNA, 201 bp, Homo sapiens
agactaggagaaactcctttttttttttctttcctatattctcagagatcctaacctgagaggagaaatttaagtgctggaacacaaggattgctaccagttgctcctgggcaaatggccaaattaacgtgccagggatctgactgtgaccttgcctgtgtgtgtgtgtgtgtgtgtgtgtgtgtgtgtccaaactactgg

SEQ ID NO: 512964 - DNA, 201 bp, Homo sapiens
gaaagaaaaggacactaaacagcaacacaatatcaagagaaggtatgaaactgattggcaaaggcaaatataaagaaaaacacatgatactgtattactgraatgctagtaagtcacttttacttccagttaaaagttaaaagagaaaagtattaaaaataacaaactaaaatatgttttaaaacataaaatagatatcaa

SEQ ID NO: 512965 - DNA, 201 bp, Homo sapiens
ggcatctaaagattgtcaggcaccatgccacatccttactgatgttttcttattcaattttcaccaaaacctataaggcaagagacactattatgccctcktttttgtaactgagtcttagagaggttgagaacttgccttcggtcaaggattccaatctgggactacatacggtacagggattactgatgctatgatctc

SEQ ID NO: 512966 - DNA, 201 bp, Homo sapiens
acgaatttctccagcaaatacaggatctgcttcaggtacatcaggttcttggccttcaaacgcttcctgagaagaagccaacggacattaagtggtggtgycctgatggcgactcgccccgcccaccccagtggaagccttgctgcccggtgcctctcaaactgggtcacaagctacaaatcctttcccagagagcaggct

SEQ ID NO: 512967 - DNA, 201 bp, Homo sapiens
tgcaggccgggggttagccggggggcgaggctctcaccccctagcacagccacgaatttctccagcaaatacaggatctgcttcaggtacatcaggttctyggccttcaaacgcttcctgagaagaagccaacggacattaagtggtggtgccctgatggcgactcgccccgcccaccccagtggaagccttgctgcccgg

SEQ ID NO: 512968 - DNA, 201 bp, Homo sapiens
cggcctcccaaaatgctaagattacaggtgtgagccaccatacccggccagcaacttttttttttttaagaatactatctatggtgactatttctagcccrccatgatagcgagtgtcttcaaagagagctgcaggcatgaccaacctgcgttcactctcattctaatcttaagatttcatcctttctacacacactcggt

SEQ ID NO: 512969 - DNA, 201 bp, Homo sapiens
ggcgactcgccccgcccaccccagtggaagccttgctgcccggtgcctctcaaactgggtcacaagctacaaatcctttcccagagagcaggctggccacrgccccaggcctcagagccagcggtcagtccccagccttccaggtctgtgtgcagcacacaccatgatgtgcctaggacatgaatggcatgcagctccacc

SEQ ID NO: 512970 - DNA, 201 bp, Homo sapiens
ttctagccagggaacttaggtgagaaaatcaaataaaaggtattgagattggaaagaaaaaagtaaaatgatctttatttgcagatgacgtgctcttgtawatattaatagaaattcttaaggaattcactaagaaacaactattaggactaataagcaagtatagcaaggtggcaggatacaaaatcaatatacgaacat

SEQ ID NO: 512971 - DNA, 201 bp, Homo sapiens
ttaaacaacatttccattacatgtggcaggaaggcaagactctaaactagaaagcgattttttcaaggctgggatcttcacaagacatttgttttgaagaygctaaaaatttaaggtttaactcatgttgcaataagaatcctttggtcttagattatacctgttctgtatttttaatcatacggtatcctggataatttg

SEQ ID NO: 512972 - DNA, 201 bp, Homo sapiens
ctctccatgcaagcacagaggaaaagtcacgtgaggatgcagcaagaaggtggctgtcacaagcaggaagagggccctcagcaggaaccaaatcagcagasacctcgatcttagacctctcagactccagaactgtgagaaatcaatttctgttgtttgggccacctggtctgtgatattttgttatggcagcccaagcag

SEQ ID NO: 512973 - DNA, 201 bp, Homo sapiens
aaaagccgtctttgcattgtgcgtcgtcagcctccttgctcgccgcagccgcctccgccgccgcggactccggcagctttatcgccagagtccctgaactstcgctttcttttttatcccctgcatcgcgtcaccggcgtgccccaccatgtcagacgcagccgtagacaccagctccgaaatcaccaccgaggacttaaa

SEQ ID NO: 512974 - DNA, 201 bp, Homo sapiens
aaacaagaaaaacatatgagacaccactcaatgaaatgtgtttgatcttcttgtttaatattttcttcattttttttaatcattaaaaaaaatcacactakaaaatattctgagaggttcagggcatcttcttctgtaaatcaatggatctgaaaattacagactttcaccaatgtcagttgtttcttggctttttttttc

SEQ ID NO: 512975 - DNA, 201 bp, Homo sapiens
gcgctctccaccacccaacccaaaccatgagaatttgcaacaggggagggaaaaagaaccaaaacttccaaggccctgctttttttttttcttaaaagtastttaaaaaggaaacttgtattttttatttacattttatatttttgtacatattgttagggtcggccatttttaatgatctcggatgaccaaaccagcctt

SEQ ID NO: 512976 - DNA, 201 bp, Homo sapiens
acactaagtgaaagcagccagacacaaaagatacctactgtaggattcttttacctgaaattctagaaaaggcaaaatgacaatgcgagaaagcaggtctrtggatactgaaggccaggagggaggctgctggggaggagccctaaagggcacacgggaactctgaaggatgctggaaatggtccatgtcttcactgtgat

SEQ ID NO: 512977 - DNA, 201 bp, Homo sapiens
agaggttggagggaactgaaaacagcaaagatctgtagcgccttaaaggtttcattagggtagtacctagacagggcttggcctcctggccagtagattgmccagtaaggatcactgtggggccacaggtcagctctctcccaccagaatttgcatctgggggtcaaaagccgcaactggatttcaggggtgaggctacca

SEQ ID NO: 512978 - DNA, 201 bp, Homo sapiens
gaaccacagggagttggggaggggaaattgttcaaagaaatcactacagtaggaaaagtgttggtgtaaagagctgcaaacataaaacattaagtctattrcaatgccccataaagagttcggttgaataaactgtcatgttaatataaagcaatactctgctgccattaaaaataatgttttcatgataaggggaattat

SEQ ID NO: 512979 - DNA, 201 bp, Homo sapiens
tcttttaatactgtcttctgagtcttacgtgcctgtgaaagcaaagcgagaagtagcatattttcattttgaatttttgatttatattcctcagtggacawggacttgggaacagaaattgtttcacaaactgctggtgaattttgctcaactttggtaacattttctgatgaaagctgagtattcaatactgcctgggtc

SEQ ID NO: 512980 - DNA, 201 bp, Homo sapiens
tattctttagtaagatatctggacataatttaaactccagcatgtttgatttttctgtgttacctttcaccggtaaaaaggtcttatgtttattttcctgyctcttatctttatgaagcttcctgggtgaactttctaatttggtgagagaaatgctttcacgttcagtgcatttaaacccaactctattcagatataatt

SEQ ID NO: 512981 - DNA, 201 bp, Homo sapiens
tattcagtattttcttccaggtggtagatgcaagggctggacccagtctaaagactacattgaaaccaaagaaagtgaaaactctatctgggaacaggatraaaagcaaccagatcagtaaactgcagaaggaatttaaacgtcatagtaagtttgatattacaacattagtacttaataattgttttgttatttttggct

SEQ ID NO: 512982 - DNA, 201 bp, Homo sapiens
ctggaggaaccatccaagtccctttacctcacggcaggccctggcccggggaggggaggcccacgcacctgggagccgctgacctccacgctgtgcatgcycgtgatggtgtcgatcaggttgtgcgcctcgtcgatgatcaccacctggtcctgcagccggatgcccgcagcctgccgagtggccgcatgcagcagcatc

SEQ ID NO: 512983 - DNA, 201 bp, Homo sapiens
gacctcttgggttcaagtgattctcctgcctcagcctcccaagtagctgggattacaggaacacaccaccatgcccggctaagactcaggcttttaatgaraagttgtcaggttaaatttgttacgatacatttgacttatgaaataaatgaacacagagctaaaataaaaactaaaattctttttcttattcaatgaaac

SEQ ID NO: 512984 - DNA, 201 bp, Homo sapiens
acaaacacacaaacaaacaacagactctgatatcacaatagatatatggaatagcaaaaaagaattttcttatttctgccaggataactgaaaaaagttarcaatgaccccaaaaaatcataaaatacaatttacatacaatacctactttcacactctgtgggtatggtgcagtggggaagtggaggtccctttgcaagt

SEQ ID NO: 512985 - DNA, 201 bp, Homo sapiens
ttgagttggtgtggtgacaatttctaggccttctccctgtaaccagatgcaaaaataaaacctctcttccccagtttgtctgcatctcattattgggccasgagaagtagcagcctgaccctcagttttgtccaggagcaacatgtatatgatttatacattgaaaagaaatttctcagtcataaaagaaatagtgaaaga

SEQ ID NO: 512986 - DNA, 201 bp, Homo sapiens
gcaatcctgggaattcaggcatgctattactaccccaggctccacggggtgatttcacaggaaaatacctctgtttcagtgaaattccgtgttgtctctayggatgtcaatttccaccctttggatgaaatggtgagtctcgtaatgatgggtgatggctgagggaaaaaggaaggcctattcttttgggaaacttgagac

SEQ ID NO: 512987 - DNA, 201 bp, Homo sapiens
accccgtctactaaaaatacaaaaaattagccaggcgtggtggcgggtgcctgtagtcccagctactcgggaggcttaggcaggagaatggcgcgaacccrggaggcggagcttgcagcgagccaagattgagccactgcactccagcctgggctacagagtgagattccgtctcaaaaaaaaaaaaaaaagaaaaagaaa

SEQ ID NO: 512988 - DNA, 201 bp, Homo sapiens
ttagaaacaggaaaacaacaaagcctcccaaatgacctttccccattttaataaaagcttgaaagaaggtctggctgtacataggagaggatgctctaagrccagcctaggaaaggaaaggaaggaaattagcactagaatagccaggaaaaacagaaaaaaggaagaaatggaaactgggcccaagaagcaggaaaaagc

SEQ ID NO: 512989 - DNA, 201 bp, Homo sapiens
acacatatacgtttacatacccaaatatcactttgaaagtaagttaaacgaaaggcaagtaaaataaaaacaaacaagcaaacaaaaaactgcactggctmgctaaggtttaggtctgtgcgaaattatatttatggaacagaaatgaaaagatacaccttggtgtgaatctagagtactgaaaaatagttaaatattaag

SEQ ID NO: 512990 - DNA, 201 bp, Homo sapiens
ggcccaggtgtctggaggaaccatccaagtccctttacctcacggcaggccctggcccggggaggggaggcccacgcacctgggagccgctgacctccackctgtgcatgcccgtgatggtgtcgatcaggttgtgcgcctcgtcgatgatcaccacctggtcctgcagccggatgcccgcagcctgccgagtggccgcat

SEQ ID NO: 512991 - DNA, 201 bp, Homo sapiens
tacccaaatatcactttgaaagtaagttaaacgaaaggcaagtaaaataaaaacaaacaagcaaacaaaaaactgcactggctcgctaaggtttaggtctrtgcgaaattatatttatggaacagaaatgaaaagatacaccttggtgtgaatctagagtactgaaaaatagttaaatattaagaatataggccctatgaa

SEQ ID NO: 512992 - DNA, 201 bp, Homo sapiens
gcagccggatgcccgcagcctgccgagtggccgcatgcagcagcatctgatagggcagcaccaccagctgggaggggagatgaggccacctgagcagggcrgggctcccctgcaggaggcttgcctgcctgacactgagctcctgatgtgagtgcttctatttcctgcctggactgtgtagagacattcaaaaaacagctt

SEQ ID NO: 512993 - DNA, 201 bp, Homo sapiens
aggcaagtaaaataaaaacaaacaagcaaacaaaaaactgcactggctcgctaaggtttaggtctgtgcgaaattatatttatggaacagaaatgaaaagwtacaccttggtgtgaatctagagtactgaaaaatagttaaatattaagaatataggccctatgaaaagtaggttaaaaattattttaagagtcccgggaa

SEQ ID NO: 512994 - DNA, 201 bp, Homo sapiens
caagggccagcagctgctccatgtccttcacctctgccagggcctcatcccggagaaggcccatctgctcgtggttgtagaaggggcaggctgcctgcttytcctgcctcctcctctttggcttctcctcctcagctcctttcttcttctctgagggtggcacaggcacaaagagagaaaacagagaggacagcaactgtc

SEQ ID NO: 512995 - DNA, 201 bp, Homo sapiens
ccatctttcagcaaaacttcatattatgttatcagtagcaaggtaaacgtttgcactcatgggttcttcgtattatagtgagggagatatagcaatctacwtgctagcaaaagtaataattatagtaaagaatacagtaaaatattgaatgtaatattattgaagtaggacttgaatagactaaattgtaaaaaccatagt

SEQ ID NO: 512996 - DNA, 201 bp, Homo sapiens
tggtgctgagccctggccattcccagcaatgggttccaccaaggtagcaggtgctgcttgctcagaaactcccccaggcaaatgccaaccccaacctcccrtggccgctcaggtctgtgggtagggaaatgtaaaaaggagacatgagctcagcaccccaaacccaagtcttgagttggaagcctcgggactcatggcagg

SEQ ID NO: 512997 - DNA, 201 bp, Homo sapiens
acgtttgcactcatgggttcttcgtattatagtgagggagatatagcaatctacttgctagcaaaagtaataattatagtaaagaatacagtaaaatattkaatgtaatattattgaagtaggacttgaatagactaaattgtaaaaaccatagtggtcgctctagagtataactagaaaatggggaattgggttagattt

SEQ ID NO: 512998 - DNA, 201 bp, Homo sapiens
gacttgaatagactaaattgtaaaaaccatagtggtcgctctagagtataactagaaaatggggaattgggttagatttaatgtagaatggctataaaatyttcttgcagagataaagcagcatgatgataaaccatcttatcaaatattctttcactcatcctttctctttatcctaaaatacccgtaattttgattttt

SEQ ID NO: 512999 - DNA, 201 bp, Homo sapiens
accagcagaagagggtgctagtgcactgcattctcaatatggaagactttgaagacaaaacctacacagcagacttcaattatttggtatgagctgaaaayattcttccacaatcaaaattgcttcttttctttaaaacttctttgaacctaatgaaatccctgtacctatatgccacgaggaagctcaaagttaacataa

SEQ ID NO: 513000 - DNA, 201 bp, Homo sapiens
agccaaaaaggaatgaagcactgatatatgctacaacatggatgcatcttggaaatactatatactaagtgaaacaagccagacacaaaagaacaaatgtratatgatcccatttatatgaaatgtccggaataggcaaatccatagagacggaaactagattagtggttgccaggcaatgggggtagggaggaattggga

SEQ ID NO: 513001 - DNA, 201 bp, Homo sapiens
ttattaatttttgtgtgctcattgtgtggttaaataaaatgtatacaaccataaaatgtggatttgattatcttaaacatggagagctcctgactctttgkttttttttttttttttttttttttgagatggagttttgctcttgttgcccaggctgtagtgcaatggtgtgatctcaactcactgcaacctccgcctccc

SEQ ID NO: 513002 - DNA, 201 bp, Homo sapiens
gcactgcattctcaatatggaagactttgaagacaaaacctacacagcagacttcaattatttggtatgagctgaaaatattcttccacaatcaaaattgyttcttttctttaaaacttctttgaacctaatgaaatccctgtacctatatgccacgaggaagctcaaagttaacataaatgataaaacttatataactgg

SEQ ID NO: 513003 - DNA, 201 bp, Homo sapiens
atccctgtacctatatgccacgaggaagctcaaagttaacataaatgataaaacttatataactggtatctatttttaagaaaggagggaaaaggccatgmcaccacaacccatatgcactctgtcattctcagaccctttcttcagagttacccatttctatttggacattgctgggatcaaaccagagttctgatatgt

SEQ ID NO: 513004 - DNA, 201 bp, Homo sapiens
aacctctagagaatcttagttttttgtaatatattgtctaatcatcaagataattatttaataatacatataaagccctttgcccaacttctggcacacaraagatattaagtattagtttgattttaatatattgctattatggattattttacactgtctaaatgggtgcatgatacttcattgagatttaggaagatg

SEQ ID NO: 513005 - DNA, 201 bp, Homo sapiens
ctcagcaaactcagcaaaacgcactgagcatctgctgagcgctggtgctgagccctggccattcccagcaatgggttccaccaaggtagcaggtgctgctygctcagaaactcccccaggcaaatgccaaccccaacctcccgtggccgctcaggtctgtgggtagggaaatgtaaaaaggagacatgagctcagcacccc

SEQ ID NO: 513006 - DNA, 201 bp, Homo sapiens
ctcaggctcattaaactttgagctttatgcctttttgcaaatgttctagttcccaaaacaatattttccagctagttgaggctcagttctttttttatgarctaataacccaaacttggcacttcagagatttaaagcaattttaatattcagtgaaatattaaacggactaggagtaccagctcctgcaatttcaagctg

SEQ ID NO: 513007 - DNA, 201 bp, Homo sapiens
tgaccttctgcacagcagcaatggcggggccaaaggtagctttgacctccacgcgggctcggatccaggccggcagcttggccaggacagggggccgggcrtatcgctggtccaggagcactatgctggcaaaatccttctggtgcctgatggccctgcctgcataggaacagaggctggggctccgagcaacacctgcct

SEQ ID NO: 513008 - DNA, 201 bp, Homo sapiens
atgtgatctcggggttgggaggctctcagaaagaaaaaggtaggactgaccttctgcacagcagcaatggcggggccaaaggtagctttgacctccacgckggctcggatccaggccggcagcttggccaggacagggggccgggcgtatcgctggtccaggagcactatgctggcaaaatccttctggtgcctgatggcc

SEQ ID NO: 513009 - DNA, 201 bp, Homo sapiens
ggacttggctccgggagcagggcgaggaatggaaggtggagtacaaaggatacaggtcatgggtagatctcctggcctcagtgatgtctcctgatctatckatgggcttggaagattaatactgggatgatgatgagcagaatggtcatgaggatgcccaaaatcagggcccagatgttcaggcacttggtggtggaggca

SEQ ID NO: 513010 - DNA, 201 bp, Homo sapiens
aaacttggcacttcagagatttaaagcaattttaatattcagtgaaatattaaacggactaggagtaccagctcctgcaatttcaagctgcaagatcttayggaagctttaaattttctgcaagtctcagcatcttttaaaataatattctaaaactgtaatttaaaaattcaaggagtttgtactagatttcaagtctcc

SEQ ID NO: 513011 - DNA, 201 bp, Homo sapiens
atatcaaacacacctttcagaaaaccagacaagcactgggagactcttaatgcctttgtgtaactttgtttcactgaactaaataaatttagatgtaattyagcatttgcaaatatgaataaaaagttgtttattggtcttagaaaactgttttggaatgtggaacattaaattgctttatagcaagtttatctgtgactc

SEQ ID NO: 513012 - DNA, 201 bp, Homo sapiens
gcagtgagccaggattgcaccactgaactgggtgacagagcaagactctgtttcttaaaaaaaaaaaaaaaaaaaaaaaaaaaaaagaagcttaaattaamccaatagttttacctggaaggttgaagtcaagggttattgaagtggaagaaaaatctctgccccacgtggcagctgatttccaaaaggggcaagagagga

SEQ ID NO: 513013 - DNA, 201 bp, Homo sapiens
aagttgtttattggtcttagaaaactgttttggaatgtggaacattaaattgctttatagcaagtttatctgtgactcctaaattctcttgaatatagctrttagagtcatatgcttgtttactggtaacctgagtttactagtaaacatgtcaatagtattgctcagacaagaaaaggaggtaaatcacattcgtttata

SEQ ID NO: 513014 - DNA, 201 bp, Homo sapiens
aaaaaaaaaaaaaaaaaaaaagaagcttaaattaaaccaatagttttacctggaaggttgaagtcaagggttattgaagtggaagaaaaatctctgccccrcgtggcagctgatttccaaaaggggcaagagaggacaagccccattgcataaatgtttttcaggcctctgcttgcatctcgtttgctaatgtcccattat

SEQ ID NO: 513015 - DNA, 201 bp, Homo sapiens
tactagtaaacatgtcaatagtattgctcagacaagaaaaggaggtaaatcacattcgtttataattaaatgaaatttagtttctatcctctaaactttaygattatattttcattttcctaggtgatttcaaaaggtgtaatcattcttcatgggcaacagaaaattgagatcaacgaaaatggtgaggcctctaatttt

SEQ ID NO: 513016 - DNA, 201 bp, Homo sapiens
aattacttaattaatagtgcattaattatattccaaacactactataatgggaaagggtcattgtccttccctttcttttccaagaaagacaggtaagtayttttacattcaaacaagaagggatttttaaaaagaaacaaaagtagactgaagtttgacgtaataagaaatgttcaactatttctttcttttataattta

SEQ ID NO: 513017 - DNA, 201 bp, Homo sapiens
tgacgtaataagaaatgttcaactatttctttcttttataatttatggaataggttatgaactcctcctagaaatgctttataaattaaatttggtgggtyggggcagtctctttggcagtgggtaggatggctagaaactcagtggagggtttctgcaagatgacagtcagctatctcaccaaagcactttttcggtttg

SEQ ID NO: 513018 - DNA, 201 bp, Homo sapiens
tatggaataggttatgaactcctcctagaaatgctttataaattaaatttggtgggtcggggcagtctctttggcagtgggtaggatggctagaaactcartggagggtttctgcaagatgacagtcagctatctcaccaaagcactttttcggtttgaaattttcttttcacagggaggaagggcatattttccatttct

SEQ ID NO: 513019 - DNA, 201 bp, Homo sapiens
tcaccaaagcactttttcggtttgaaattttcttttcacagggaggaagggcatattttccatttctatagacattaaccctgaattagcgccctcagtasatatgcttgtctatagcttgcatcctggaggagaaatggtcactgatagcacccaattccaattgagaaatgcttcgaaaatcaggtaggtgccaaaaat

SEQ ID NO: 513020 - DNA, 201 bp, Homo sapiens
ggttactgtaataattataaaatggctgctttaatcatatcctctttacaggtaaatttgagattctcctcagctcagagcctgccagcctcaaacacccrcctgaaggtgagagccacccccctctccctttgtgccctccgtgctgtagaccagagtgtgctgctaatgaagcctgaagctgagctgtcacctaaatct

SEQ ID NO: 513021 - DNA, 201 bp, Homo sapiens
accttccttctgtgtcttccatggtggaagagcagaagcgaaaaaaaaaaaaaaaaaaaaaaaaggcctaggctagttccccatgtcccttttataaagcrctaatcccatccgtgagggcagaacccgcatgcctgaatcaccccctaaaggtctcacctcttaaactgttgcattggggaataacttccaacatgaatt

SEQ ID NO: 513022 - DNA, 201 bp, Homo sapiens
cgtagttttgtgagaacattaatctttatgacgtataatctaaaaataatataatttttctaattcattaggtcaattacaaggatcgtagtccctgttayggctaccagtgggtgtcagaagaacacgaagaggcacatcacactgcttatcttgtgttctccccaagcaagagctttgtccaccttgagcccatgtctc

SEQ ID NO: 513023 - DNA, 201 bp, Homo sapiens
agggtcggccatttttaatgatctcggatgaccaaaccagccttcggagcgttctctgtcctacttctcactttacttgtggtgtggccatgttcattatratctcaaaggagaaaaaaaaaacttgtaaaaaatgcaaaaatgacaacagaaaaaccatcttattccgagcattccagtaacttttttgtgtatgtactt

SEQ ID NO: 513024 - DNA, 201 bp, Homo sapiens
caaaacaaacaaacaaacaaacaaacaaacaaagattgctttgtcatttagattcagaacaatgcattctattctcccggtaatggctttttatgttttcytaaataagtaaagtggaaggtatataatagacactactgcttcctccccctggaagaattacttagttttagtaacacaacatgtcatgctttaaaaatc

SEQ ID NO: 513025 - DNA, 201 bp, Homo sapiens
agcgctgggattacaggcatgagccaccgcgcccaactgtcattctgttttttaactcgtgtacataatacatacagattaataggttacaccttcttcamaatgactttgcaatttgttggactgaaaaatgaaataattttggtaacactctcccaagatcagtgagtttttctgttgttttctttcttcttaccatta

SEQ ID NO: 513026 - DNA, 201 bp, Homo sapiens
accagcctctaacaatatggtccccttttctgttattactgctgttgtgtaagtaccaccacctgagcccacccctattcccacttcccactgaacggagsttttttgtaataccagtatgatattgcaaaaatgatgaagtgtgatttctgcggccagccattgtggctttctccttgatctctctgtgctggttcactt

SEQ ID NO: 513027 - DNA, 201 bp, Homo sapiens
ggtaggagacccatcaggttggggttgtggtaactggggatcccagtgtttgcatgtacaagtatgggacatttcattctcctgagcaaaacttccattgrtgattcactaagagcaagaaagaagactagtctggatgacttagaatgaacacaccagtgtttctgtaaatagaattatatgatttgtaatgtgtttgtg

SEQ ID NO: 513028 - DNA, 201 bp, Homo sapiens
cactataaagttttaattgtatgaatatgccacaatttacatatcctgttgtgggacatttgagttgttttcaatttagagctattacaaataatgcaacygcaaatgttcttatacgtgactttttgcacatttgctgtcactctcctgggtatttatgtagcggtaaaaattgctgggacagaggctctgtggatgatg

SEQ ID NO: 513029 - DNA, 201 bp, Homo sapiens
ttgcacatttgctgtcactctcctgggtatttatgtagcggtaaaaattgctgggacagaggctctgtggatgatgaattctagtagataatgatgattcmttttcacaattggatgagagattcggttgctccacatcctcactaaaacttggcattatgaatcttaactttaaccattttggaggatatgtagagattt

SEQ ID NO: 513030 - DNA, 201 bp, Homo sapiens
ggcaagatgtagaggaggaagacaagtgatactgatgatcctgactacgtggaagccaaggttaatgttttcctggttctgttttttttttttttggttgkgggggcggggtggagacagggctgaagtaatcctcccacctcagcctcccaagtagctggcattacaggtgcacaccaccaaacctggctaatttttgta

SEQ ID NO: 513031 - DNA, 201 bp, Homo sapiens
caataatcctgctttttttgtttatgaaaagtattgctattcacatcccttatgtgctaatacatgcattaatttcattccacatatgccaatgattccarctctgcctcccccaatgtatactcaagtggcaaggatactttcggtctcaacccacccaaagttgctcaatgcttcgtaaacacatttctctttgaaaat

SEQ ID NO: 513032 - DNA, 201 bp, Homo sapiens
cactgcagtccaaggtgccgggcaggatgacagcagcagcatccccttcaggagggagccgctctctgaggccacctcagtctcatttctggatccctggyagattttctgtggggttgttagctggtcagaaatcccttattttttttaatagttgtcatttcttgttctacttggctcataaaatagtggttttcaaac

SEQ ID NO: 513033 - DNA, 201 bp, Homo sapiens
actgcagtccaaggtgccgggcaggatgacagcagcagcatccccttcaggagggagccgctctctgaggccacctcagtctcatttctggatccctggcrgattttctgtggggttgttagctggtcagaaatcccttattttttttaatagttgtcatttcttgttctacttggctcataaaatagtggttttcaaact

SEQ ID NO: 513034 - DNA, 201 bp, Homo sapiens
cagattttctgtggggttgttagctggtcagaaatcccttattttttttaatagttgtcatttcttgttctacttggctcataaaatagtggttttcaaaytgtagcgccctggaattctcacctctacggtagagggagcctggacaagggtggccctggggcccccattcctaaaccaaggaggaaaaagggtctaata

SEQ ID NO: 513035 - DNA, 201 bp, Homo sapiens
atacaagcgtgcaccaccgtacttgacttattatttattttatcaccaaatagcaagccaatttctacaatgctatttatgcaataaatagaacaatttcmttctttcctgttgattggtaattattatatgttgagttgttttaaaatcttgtgactttctgtgctctctattctatttcactgaaagctattcttgtca

SEQ ID NO: 513036 - DNA, 201 bp, Homo sapiens
tttctgctcagttctagaggctgggaagtacaagatcaaggtgccagcagagttggtgtctggcgagggctgctctctgcttccaaggtggtaccttcctkctgtgtcttccatggtggaagagcagaagcgaaaaaaaaaaaaaaaaaaaaaaaaggcctaggctagttccccatgtcccttttataaagcgctaatccc

SEQ ID NO: 513037 - DNA, 201 bp, Homo sapiens
atcagccccagagactaaaagaattggaaatagacccagccaagtgggcgctgggggtgaaagggtgctcagtaaagtttttggtctctggcaacaagtgygcctcagtgtacgtggaatgatatgagacccactgcaaagacctagcattggtcgggcctggtggctcacacctgtaatcccagcactttgggaggccga

SEQ ID NO: 513038 - DNA, 201 bp, Homo sapiens
accaccaggctgggccaatctttgttattttaatagagacagggtttcaccatgttggccaggctagcctcgaactcctgacctcgtatccgctggcctcrgcctcccaaagttgtgaggttacaggcgtaagccactgtgcctggcctactttcttaataaacttgctttcactttaccctatggactcatcccgaattc

SEQ ID NO: 513039 - DNA, 201 bp, Homo sapiens
gccaattttgtatttttagtagagatggggtttcaccatgttgtccaggctggtctagaattcctgacctcaagtgatctgcttgcctcagcctcccaaagttctgggattacaggcatgagccaccacgccaggcctccccttcttttttgtttctttccccttcttgttagtaatggttagctgggtacaaagtcagtt

SEQ ID NO: 513040 - DNA, 201 bp, Homo sapiens
tgggattataggcatgggccaccaagcccggctaattacagacagggtttcaccatgttggccaggctggtcagaaactcctgacctcaagtgatccaccygtctcggtctcctaaagtgctgggattacaggcatgagccaccatgcctggccagaataatcttttgaatgcataaaataaaatatgtgagattacaaag

SEQ ID NO: 513041 - DNA, 201 bp, Homo sapiens
tccccatgtgtcaagagagagaccaggtggaggtaattggattatgggggtggtttcccccatgctgttctcgtgatattgagtgagttatcttgagatgygatggttttataagggactcttccccctttgctcagcacttcttcctgccaccttttgaagaaggtagcttgcttccccttcttctgtcgtgattgtaag

SEQ ID NO: 513042 - DNA, 201 bp, Homo sapiens
atggaggctgatgttctgagctccagctgagggaattttcatttatctaaagtttttatttctgtttttttttccccagccgaatttaagattcatatttytgttttaaaaagttgtgaaatgaatatagcaaagtgttaacatttgttgaattcaggagggaaggtatctacacacagtgttaattatttctgttttact

SEQ ID NO: 513043 - DNA, 201 bp, Homo sapiens
aaagtttttatttctgtttttttttccccagccgaatttaagattcatatttctgttttaaaaagttgtgaaatgaatatagcaaagtgttaacatttgtkgaattcaggagggaaggtatctacacacagtgttaattatttctgttttacttctctatatgctctaatttcttctttttaatttttttgagatagggtc

SEQ ID NO: 513044 - DNA, 201 bp, Homo sapiens
caacctagttttcatacccatacatctacgtgcaagataagtgtaatcacttttttcggaaagagtagcttttaatgcatatatttaaattattttaagayatgctctaaagcctctccattgtgctataattgtctctaacagttgaatttttgccttttcaagaatttcttctataaatgctgagggaagaaccattac

SEQ ID NO: 513045 - DNA, 201 bp, Homo sapiens
atagtggttttcaaactgtagcgccctggaattctcacctctacggtagagggagcctggacaagggtggccctggggcccccattcctaaaccaaggagraaaaagggtctaataacaaaaacactacaggggacaggaacacggagccgggggtccaatgtgactgaaccccacaccccactccgtggctttcctattg

SEQ ID NO: 513046 - DNA, 201 bp, Homo sapiens
ctgaggtggagcattgcgtgagcctgggaggtcgagactgcagtgagccatgatggcaccactgtactccagcttgggcaacagagtgagaccctgtctcaaaaaaaaaaaaaaagaaaagaaaacaaagtcagcctgtccactttacatgggtgaattgtataatatgtgaactacatctccatagaattgtttttcaaa

SEQ ID NO: 513047 - DNA, 201 bp, Homo sapiens
ataaacttgctttcactttaccctatggactcatcccgaattctttcttgtgcgagagctaagaaccctttcttggggtctgaatcaggacccctttcagstaactttaccaattaccacagatggtcacccttaattaccaggtgaatttagaatgaactatttgttacaaatagtgctgtcaggtcagcttacttagga

SEQ ID NO: 513048 - DNA, 201 bp, Homo sapiens
tagaacacaatatcccaggagcaagaaaccaacgttatcatcacattacaaacagtgtttctgttcatacaaagatcatatcagctttttacttggactarcacacttgcctccctggccctcggggaccatagcatgatctagcagtgccagtgagttaacaaaggcttaccaagttccatggtagggcacagggagagc

SEQ ID NO: 513049 - DNA, 201 bp, Homo sapiens
gcctctgcacctgcctgtctgcatgctctctgtctcacaaggggattaagcagtgaggcaactgaacaggtgagctacacttctgttgcacgtcctgcaargggaatcagggaagtatcccatttcccttcctttcactgtctttatctcaaaataatcaatatgccaaagtggcatgtttggagtggcatgttttgctac

SEQ ID NO: 513050 - DNA, 201 bp, Homo sapiens
gctcaccccagcctctgcacctgcctgtctgcatgctctctgtctcacaaggggattaagcagtgaggcaactgaacaggtgagctacacttctgttgcaygtcctgcaaggggaatcagggaagtatcccatttcccttcctttcactgtctttatctcaaaataatcaatatgccaaagtggcatgtttggagtggcat

SEQ ID NO: 513051 - DNA, 201 bp, Homo sapiens
atttgataataaatgtaaatattttttctttaaaaacatcgagaccatcctggctaacaaggtgaaagcccatctctactaaaaatacgaaaaattagccrggtgtggtggtgaatgcgtgtagtctcagctactccggaggctgaggcaggagaatggcgtgaacccgggaggtggagcttgcagtgagccgagatcaca

SEQ ID NO: 513052 - DNA, 201 bp, Homo sapiens
tttcaactttacaacattttaaatttcaaccatttttaagttaaaaaaaaactctttttttttattattatactttaagttttagggtacatgtgcacaaygtgcagattagttacatatgtatacatgtgccatgctggtgtgctgcacccattaactcgtcatttagcattaggtatatctcctaatgctatccatccc

SEQ ID NO: 513053 - DNA, 201 bp, Homo sapiens
aaagtatattctatgtttaaagaataaaaataataggcctcactatcaaataatcaactataataattttattacctaaaatacatttttatataactgtrtaaaccagttttttaggaatctcgaatttcacttatgctaaatgcaactgaaaataaatatatgaacaagaatcgtttagtaaaaataatgctggtaaat

SEQ ID NO: 513054 - DNA, 201 bp, Homo sapiens
gaatttcacttatgctaaatgcaactgaaaataaatatatgaacaagaatcgtttagtaaaaataatgctggtaaatttttattaacctcctgctatatakaacaaaatatatattaaaatatttatagaaaaaattttagttggtatttgcattattctgtattaagaaaccacagttacattattcctacaaaacgttt

SEQ ID NO: 513055 - DNA, 201 bp, Homo sapiens
cgggtgcctgtaattccagctacttgggaggctgaggcaggagaattgcttgaatccaggaggtggaggttgcagtgagccgagatcactccagcctgggygacaaagcaagaatctgtctcaaaaaaaaaaaaaatttaaatcaattgtaggagtttctatacacacagaaaatccattattaaaatagttcaacttttt

SEQ ID NO: 513056 - DNA, 201 bp, Homo sapiens
aaataaatatatgaacaagaatcgtttagtaaaaataatgctggtaaatttttattaacctcctgctatatagaacaaaatatatattaaaatatttatakaaaaaattttagttggtatttgcattattctgtattaagaaaccacagttacattattcctacaaaacgtttttttcacatttttctcattactgctggt

SEQ ID NO: 513057 - DNA, 201 bp, Homo sapiens
aacactaatcaatattgactagtgaacccttgataaaagtgtgccttcttctagtacaaactgattctttcataaaatatttcatgcccactgtgtgctakcttttgtgttaaagacttgggatgcaaagctcatggtgtagcaaaggcaaaacacaattgcattaaggtttgctatgcaaggtaagtgcaatgacagaaa

SEQ ID NO: 513058 - DNA, 201 bp, Homo sapiens
caaaacacaattgcattaaggtttgctatgcaaggtaagtgcaatgacagaaatatccctagaaggattgtttaaatcaagcagcaaagtcagtaagaggyacatttcattaaattaagtccatctcctttatcaagaaggtgatggcttaccactttctggtttgcacttccctatcttggcaaagcagtgttgataggt

SEQ ID NO: 513059 - DNA, 201 bp, Homo sapiens
gccaagggaagaggattgctagagcccaggagttcaagaccagcctgggcaacatagtgaggccacatctatacaaaaaataaaaaaattagccaggcgtrgtggcacacatctacagtcctagctacttgggaggctgaggtgggaggtcaaggctgcagttagctgtgattgtgcctgggtgacacagcaagaccctgt

SEQ ID NO: 513060 - DNA, 201 bp, Homo sapiens
ttaactcgggagcactaaacgggatcattatgttggcttcaggttcactcattactcatacaaacccagcaactacatattacatgcttttaagataatcmcattaatccatatgaagagtgatgatgaacggttacaaaaggaggtgaaagcaaagtaagagtggagtaaatgaaagagtggagaagggtcgagaatcaa

SEQ ID NO: 513061 - DNA, 201 bp, Homo sapiens
ctgattcactctcctgtccctcggtacaccattgcaccgtgtcctcctgctggcccttctgttaccctgtacttgctgtacactaccacggtggccggggkcctcagcaccaggaaagcaacttcccccgtgtcctccccaactcctgagtccaatccttcaagtctatggtgccgaagcaggggaaatgaatgttggaga

SEQ ID NO: 513062 - DNA, 201 bp, Homo sapiens
atgtaggtgttttaaatttttatgcagttcagtggattatggtatcttcttttgtgtttaagcttggaacgtgctttcatttgaagagaagataaatgctyatgatatagtttttggttttattttatatttggatctctaattcatctgggatttatttatttatctttagagacagagtcttactatattgtctaggct

SEQ ID NO: 513063 - DNA, 201 bp, Homo sapiens
tctcaaaaaaaaaaaaaaaaaaaggacacttgttgatggcgtgggagaaaaagcatatgacagtgcccttccaaagtttccactagcaggctgtctggatrtgttttccattgcttcacaaaccagacaagtttccttctaaacgccagcgatcacaacagaatattctcatgtgattgtctgatctaaaaataaaacaaa

SEQ ID NO: 513064 - DNA, 201 bp, Homo sapiens
cttcttttgtgtttaagcttggaacgtgctttcatttgaagagaagataaatgctcatgatatagtttttggttttattttatatttggatctctaattcrtctgggatttatttatttatctttagagacagagtcttactatattgtctaggctggactgcagcgactattcacaggtgtgatcatggtgcactacagc

SEQ ID NO: 513065 - DNA, 201 bp, Homo sapiens
cctggtgcctgttccttgtatatttatatttttacaattttaatttctgcagggtctttttctttttttttaaacagagtctcactctgtcgcccaggctrgagtgcagtggcgtgatctgatctcggctcactgcaaccttcacctcccgggttcaagcaattctcctgcctcagcctcccaagtagctgggattacagg

SEQ ID NO: 513066 - DNA, 201 bp, Homo sapiens
ggtgaaactatctttagttaaaatacaaaaattagctgggcgtggtggcacatacctgttaatcgcagctacttgggaggctgaggcaggagaatagcttragcctgggaggcagaggttgcagtgagctaagattgtgccacggcactccagcctgtatgggaggcagagcaaaactccgtctaaaaaaaacaaaaaaac

SEQ ID NO: 513067 - DNA, 201 bp, Homo sapiens
cactatccctgccgaaaccctgaggtctgaggaaggcctcttcacactgcctctgggcgctgcctttggcttccgggagccccccatgcacttccctggaracaggtggagctctgtcctgtggctctgattcactctcctgtccctcggtacaccattgcaccgtgtcctcctgctggcccttctgttaccctgtacttg

SEQ ID NO: 513068 - DNA, 201 bp, Homo sapiens
tcccagggccatgttaactactcccatcacgggcgtctaggtgcttggattttcaagtctccatctctcaccatttctttaagaggctttccagatccccrcatgtcaactgcctacgaggcatttattctcagatggcctacaaagcacctcaaactcagtatttctcaaatattaagtttctgtccatgtttgccctct

SEQ ID NO: 513069 - DNA, 201 bp, Homo sapiens
gaggcctcgggagcgcgcgcggtcgccgggacttctccccctcccagcccgcaacgtgcgcgcgcccgtatgcaaataagttcgattcaagagaattttgygccgggagccgcgcgtgcgcagagggaaagcggaatctacaccttcccggccagcggtagcaactgcagaactgcaggagactatctttctagacaaggc

SEQ ID NO: 513070 - DNA, 201 bp, Homo sapiens
ttattattattattattattttgagacagagtttagctcttgttgcccaggctggagtgcaatggcttgatctctcggctcaccacaacctctgtctcctrgattcaagggattctcctgcctcagcctcccaagtagctaggattataggcatgtgccaccacgcccggctaattttgcatttttggtagagacggggtt

SEQ ID NO: 513071 - DNA, 201 bp, Homo sapiens
gatctcggctcactgcaacctctgcctcccggattcaagcaattctcctgcctcagcctcccaagtagctgggattacaggcacgtgccaccatgcccggstaatttttttgtatttttagtagagacgaggtttcaccatattggccaggctggtctcaaactcctgaccttgtgatccacccacctcgacctcccaaaa

SEQ ID NO: 513072 - DNA, 201 bp, Homo sapiens
aatcagccaacacttattgaatgtttttcatattccaggtgctgtattagcaattgtaacaatagaagaaatagaaaaagtataactggggacaaaacatrtattagaattacataagtgttacaaacgaaacatgtatggccactgaggtgttacagaaaaatgaatgattaactctagctggagtttaggacagtgatt

SEQ ID NO: 513073 - DNA, 201 bp, Homo sapiens
tcatattccaggtgctgtattagcaattgtaacaatagaagaaatagaaaaagtataactggggacaaaacatatattagaattacataagtgttacaaaygaaacatgtatggccactgaggtgttacagaaaaatgaatgattaactctagctggagtttaggacagtgattatcagagtatatttcctagagtagcag

SEQ ID NO: 513074 - DNA, 201 bp, Homo sapiens
gtgtgaacccagcaggcggagcttgcagtgagccgtgatggtgccactgcactccaacctgggtgacagagcaagactctgtctcaaaaaaaaaaaaaaamaaaaaaaaaaaaaacataggaataagttagaaatcttgtcctccgaagcacattaaaatttgacaaccactagtttaggaaaaagatatatgcctatata

SEQ ID NO: 513075 - DNA, 201 bp, Homo sapiens
ccagcaggcggagcttgcagtgagccgtgatggtgccactgcactccaacctgggtgacagagcaagactctgtctcaaaaaaaaaaaaaaaaaaaaaaamaaaaaacataggaataagttagaaatcttgtcctccgaagcacattaaaatttgacaaccactagtttaggaaaaagatatatgcctatatatttacatt

SEQ ID NO: 513076 - DNA, 201 bp, Homo sapiens
tagggaagcagggaggggactctggggagctcagggaagtggctctttaccaaccggtacagaaatccttcaacatgtcaacaataatattgccatactgsggtgtgagaaataccaagcatccttgaatgagaagctgaacctcttttttttttttttttttttgagacagagcctcgctcagtcgcccaggctggagtg

SEQ ID NO: 513077 - DNA, 201 bp, Homo sapiens
tttaccaaccggtacagaaatccttcaacatgtcaacaataatattgccatactggggtgtgagaaataccaagcatccttgaatgagaagctgaacctcttttttttttttttttttttgagacagagcctcgctcagtcgcccaggctggagtgcagtggctcgatctccgctcactgaaagctccgcgtcctgggttc

SEQ ID NO: 513078 - DNA, 201 bp, Homo sapiens
ctttatattcgtgaagtttacattgaatttgggatgcagacaatatacaaatggctgcatattgtcatttgtatatttcttgtgttgctgtaaagaaatayttgaggctgggtaatttacaaagaaaataggggccaagtgcggtggctcacacctataatcccagcactttgggaggctgaggcaggcagatcacctgag

SEQ ID NO: 513079 - DNA, 201 bp, Homo sapiens
tgtttctactaaaaatacaaaaaattagccaggcgtggtggtgcatgcctctaatcccagctactcgggaggctgaggcagaagaatcacttgaacccagraggcagaggttgcagtgagccaagattgtgccattgcactccagcttgggcaacaagagtgaaactccttttcaaaaaaaaaaaaaaggaagaaaatagg

SEQ ID NO: 513080 - DNA, 201 bp, Homo sapiens
catttactgatatactttggggacaggaggatgaatgcaactaaatggatctcatggagcccctccatgtcccacaatgcagtctttacatttcatggaargagaatgttaccctcccaccacgttcaagtggaaccatctatggatcagattcctcaatttgtgaaattaagaccacacaactggtaaagaatcttaagg

SEQ ID NO: 513081 - DNA, 201 bp, Homo sapiens
acacctcttaggatagagggacagggtccgtaggcaggaaagagtgttatcacctgaatccattttattttattttattttattttttgagacagagtctygctctgttgccaggctggagtgcagtggcaggatctcggcttaccgaaacctctgtctcccaggttcaagcaattctcctgcctcagcctgccgagtagc

SEQ ID NO: 513082 - DNA, 201 bp, Homo sapiens
gcgcatgccactatgcccgaataatctttttattttttgtagagacatggtttcgccatgttgcccaggctggtcttgaactcctgggctcaagtgatccttcattttggcctcccaaagtgctgggattataggcgtgagccatggtgcctgacttctttttactttttctaacatgactactagactactagagaattt

SEQ ID NO: 513083 - DNA, 201 bp, Homo sapiens
cgggtagcgaggggctccggattctgcttattcagagacgcccgtccgccatgtctcccgggccgcgtcactgcagtctcgccctgggtctggcgcgctcyggctcgcggctcgctctctcgctccacctgctccctctggccctgcagcagccggtgcggaatgatgcagtctcggggccggctccctcccttcccgcgt

SEQ ID NO: 513084 - DNA, 201 bp, Homo sapiens
ctaaagcagaatcaaagctcctcttggggaaatggcaagtctttaggataggcaagaccctgtatgaatagtaccaaagcattaccgcatggtagagaacrcactcgattaaaaatgttaagctatctgaaaaataaaatgtgcaagtcttcaggatggcacaaaacaaaggttaatgcttcttggggcacatttcttaga

SEQ ID NO: 513085 - DNA, 201 bp, Homo sapiens
gagtttgagatgagcttggccaacatggcgaaaccctgtctctactaaaaatacaaaaattagccaggtgtgatgacgcacacctgtagtcccagctactygggaggctgaggcaggagaattgcttgaacctgggaggtggtggttgcagtgagccaagatcgtggcactgcactccagcctgggcaacagagcgagact

SEQ ID NO: 513086 - DNA, 201 bp, Homo sapiens
agccaagatcgtggcactgcactccagcctgggcaacagagcgagactccatctcaaaaaatttaagatgtggagacagcctaatcagacaactccatgtscccagaaatgatggcagggataacacacaatgagagggtgtatctgtggggcactggggtgctctgctgtgaatggccggtgggaaatcttcccttcaag

SEQ ID NO: 513087 - DNA, 201 bp, Homo sapiens
tgtccccagaaatgatggcagggataacacacaatgagagggtgtatctgtggggcactggggtgctctgctgtgaatggccggtgggaaatcttcccttyaagagcacttcacatactgagacctccagatgcactttcaagggagatgtgtggcttccacaccagtgccttctggggccaggacttcatctccaagctg

SEQ ID NO: 513088 - DNA, 201 bp, Homo sapiens
ggaaaagaaaaagacacagagacaaagtatagagaaagaaataaggggacccggggaaccagcgttcagcatatggaggatcccgccagcctctgagttcycttagtatttattgatcatctgtgggtgtttctcaaagagggggatgtgtcagggtcacaagacaattgtggggagagggtcagcagacaaacacgtgaa

SEQ ID NO: 513089 - DNA, 201 bp, Homo sapiens
caaaaataaaaaaataagccggatgtgatggtgcatgcctgtaatcccagctacttgggaggctgaggcaggagaatcgcttgaacctggagcggaggtcwcaccactgcactccagcctgggtgacagggtgagattctgtctcaaaataataagtaaataaataaagtggtcctttaaaaaatgaaagtttttaatttt

SEQ ID NO: 513090 - DNA, 201 bp, Homo sapiens
tagatgatacaacaaactttaaaaatcgtagagtgaaactctgttttttttataggtgaagaaactgaagaagagaacttatgcttctagatgttgcagargcttaaattccggttgcctgaggcctagtccagggggtcgtggcagcagcaggctgagaccgataagcctcaccagcctcctgaaggtgcttactgatca

SEQ ID NO: 513091 - DNA, 201 bp, Homo sapiens
ctcatggacaacttcagagattagctttttaggtttctaaaggcccctctggaaatccttcacattgctacgtttctccccagttttttcccccacatggkctttatgcctcatcatatacatgcctgcttcctaatcaaatcaaatcaaaactgttttcttcttctttccccttggtttgatggtcggtcatacctagaa

SEQ ID NO: 513092 - DNA, 201 bp, Homo sapiens
ttcttttgtgtttaagcttggaacgtgctttcatttgaagagaagataaatgctcatgatatagtttttggttttattttatatttggatctctaattcakctgggatttatttatttatctttagagacagagtcttactatattgtctaggctggactgcagcgactattcacaggtgtgatcatggtgcactacagcc

SEQ ID NO: 513093 - DNA, 201 bp, Homo sapiens
ccttcacattgctacgtttctccccagttttttcccccacatggtctttatgcctcatcatatacatgcctgcttcctaatcaaatcaaatcaaaactgtkttcttcttctttccccttggtttgatggtcggtcatacctagaacccaagcaattagtacctgaaaactgatgcctctttctaagatattccaacccatc

SEQ ID NO: 513094 - DNA, 201 bp, Homo sapiens
ttttcccccacatggtctttatgcctcatcatatacatgcctgcttcctaatcaaatcaaatcaaaactgttttcttcttctttccccttggtttgatggkcggtcatacctagaacccaagcaattagtacctgaaaactgatgcctctttctaagatattccaacccatccagaaattgtctttcatctttctattcag

SEQ ID NO: 513095 - DNA, 201 bp, Homo sapiens
cctttaaaaaagagaattaatggaagaaggacaaaagagaagagagaccagttaggaggttataggcgataggttagggcagagaagatgctagtttggamcaggtgatggcagagaagtatggatttgagacatgttggagatagaaccgatgacactagacatggtgtagatgcagtaggtgacggagagagagctatc

SEQ ID NO: 513096 - DNA, 201 bp, Homo sapiens
cccccacatggtctttatgcctcatcatatacatgcctgcttcctaatcaaatcaaatcaaaactgttttcttcttctttccccttggtttgatggtcggkcatacctagaacccaagcaattagtacctgaaaactgatgcctctttctaagatattccaacccatccagaaattgtctttcatctttctattcagtaaa

SEQ ID NO: 513097 - DNA, 201 bp, Homo sapiens
tttccccttggtttgatggtcggtcatacctagaacccaagcaattagtacctgaaaactgatgcctctttctaagatattccaacccatccagaaattgkctttcatctttctattcagtaaataaaagaaaaaaaatttctatagcaagaaaaactaaagattcagaccttgctccatatatataaattttttttgaga

SEQ ID NO: 513098 - DNA, 201 bp, Homo sapiens
aggcagaatcctgttatgttgcccggccgtagtgaaggctactcacaatcgcagtcactgttcactgctgcccagaactcctgggttcctgcgatcctccsacctcagcctttcaagcagatgggactacagacacgtgccactgtgcccagctttggcagtacacattttaaagtgcattccaggtcttgtatgctcatg

SEQ ID NO: 513099 - DNA, 201 bp, Homo sapiens
tccttaacttgtttcccttcacagttatggcttgccctgaaagacagtgggtaggaagttaattttatgtttattattctttagaggcagaatcctgttaygttgcccggccgtagtgaaggctactcacaatcgcagtcactgttcactgctgcccagaactcctgggttcctgcgatcctccgacctcagcctttcaag

SEQ ID NO: 513100 - DNA, 201 bp, Homo sapiens
cgggaaaccagtcaagtacatgtcaattaattgttaacttttaatttcttctgtttactctatcaagaaaccctcttcgaggtcaggtgcagtggctcacrcctgtaatcccaacactttgggaggccaaggtgggcagatcacttgaggtcaggagttcgagaccagcctggccaacatggcacaaccctgtctctacaa

SEQ ID NO: 513101 - DNA, 201 bp, Homo sapiens
gtgtatttttgtctagctatggaaagtttaaaataattaaacagtaaaactatctgagcctgggaaatgtctaacaaatatttctttgataacttaaataytttcttctttcaccataagttttaggttttcaacttgttgagtcaattttggccattatatctttatgttaatcatctagtttactgagatttctgtttt

SEQ ID NO: 513102 - DNA, 201 bp, Homo sapiens
ctgccttctttttcccctagaaaatatacattttttctagaatccccacagtcttctaggagagatctaagagattgcaatagaaagaaaatgtgaggccrggtgtggtggctcacgcctgtaatcccagcactttgagagactgaggcgagtggatcatgaggtcaggagttcgagaccagcctcaccaacatggtgaaa

SEQ ID NO: 513103 - DNA, 201 bp, Homo sapiens
cagtcttctaggagagatctaagagattgcaatagaaagaaaatgtgaggccaggtgtggtggctcacgcctgtaatcccagcactttgagagactgaggygagtggatcatgaggtcaggagttcgagaccagcctcaccaacatggtgaaacccagtctctactaaaaatacaaaaattagcccagcgtggtcgtgcat

SEQ ID NO: 513104 - DNA, 201 bp, Homo sapiens
attgcaatagaaagaaaatgtgaggccaggtgtggtggctcacgcctgtaatcccagcactttgagagactgaggcgagtggatcatgaggtcaggagttsgagaccagcctcaccaacatggtgaaacccagtctctactaaaaatacaaaaattagcccagcgtggtcgtgcatgcctgtaatcccagctactcgggag

SEQ ID NO: 513105 - DNA, 201 bp, Homo sapiens
cccagtctctactaaaaatacaaaaattagcccagcgtggtcgtgcatgcctgtaatcccagctactcgggaggctgaggcaggagaatggcttgaacccygtaggcagaggttgcagtgagccaagattgcaccactgcactccagcctgggcaacagagtgaaactccgtctcaaacaaacaaacaaaaagaaacaaaa

SEQ ID NO: 513106 - DNA, 201 bp, Homo sapiens
actttgtttaatttatgacatgaaaattacttgcctttgagtatttccagcagtctattaaagatacattgattaaagggctgtctaatgaacgtgcaagsgtggttcttaagatgcctttgatgccccagagaatcttgcaaaccagttttcagccttcttttttttttttcagtagcatttcaaatcttcttttgactt

SEQ ID NO: 513107 - DNA, 201 bp, Homo sapiens
tggcctgaaatcctgtttatgtgattctgtttcttgaaaaaagcagctccctaaatcaaaatgtttatcaatcaccaagcctgactgtggccacgggataycagcttgcaatatctgctgtagaccaaaggtggccaggcttgtcggcattgctcccgacactatggtgtttcacttagaaagtttaacaaccacacagtc

SEQ ID NO: 513108 - DNA, 201 bp, Homo sapiens
gtgaagtagtataaagtggagtcctacgtgggaaaaagcaggctactgaggacaaaaacctcccaaccctccccaccttgttttccactgggaatgagaakttgatatgagaaacttcaaccttgcagaagtgtggatttccctctgaaatttaaatgtttcacacatttttgtaccttttgtaaccttgtggtatttact

SEQ ID NO: 513109 - DNA, 201 bp, Homo sapiens
ttcaaatcacgaagggattattctgtcctgtttttaaaatttaagctacatgtcttataggcatatgttagcttacagataatacaataagacttttattktataaataaaaaacattaagtagaaataagaagaaatgttcaggtataatatgtgtggccagatctaagtctggcctttatataatcatgaaacctgaca

SEQ ID NO: 513110 - DNA, 201 bp, Homo sapiens
agggattattctgtcctgtttttaaaatttaagctacatgtcttataggcatatgttagcttacagataatacaataagacttttattttataaataaaaracattaagtagaaataagaagaaatgttcaggtataatatgtgtggccagatctaagtctggcctttatataatcatgaaacctgacacatgattttatt

SEQ ID NO: 513111 - DNA, 201 bp, Homo sapiens
gtgccacagaagaccaccctgctctaaatgtgaatttctgcttatgagctgatttggggaagggaataaaagcaaggagggagacataaaatatcagctakgagacgatcctggggaaggggtgtaacattagatggagataccagtgctgagggcaaggaggagggtgcccagagtacctcttagcgcaagtcatggagc

SEQ ID NO: 513112 - DNA, 201 bp, Homo sapiens
ctttgcaaattcagaatcttaaactaattagcagcaaagttaacatatgttttattttattattattatttttttgagacagagtctcactctattacccmggctacagtgtagtggtaaaatcatggctcactgcagtctcgaccttctgaatgcgtgatcctccctccttagcctcctgagtagctgggaccatgggct

SEQ ID NO: 513113 - DNA, 201 bp, Homo sapiens
cgaaaccagcctgggcaacatagtgagccccttctctacaaaaattagccaggcacagtggtgcacatctgtggttccagctacagggaggctgaggcaaragaatcactggagcccaggaggtcaaggctgcagtgaattgtgttcgcaccactgtactcaaggctgggcaacagagcaagacctgcctcagaaaaagaa

SEQ ID NO: 513114 - DNA, 201 bp, Homo sapiens
ttcgtctattttattggttcttatttttactattttctttcttttattattttgtgttcctaaataatttattttctctttcatcttattaattctttttyctaatatttgtagttgattttgttggggtttaaaaaatatattagctgtttcttttagtaataagcacattcactgttttacatttcttctgaactgcag

SEQ ID NO: 513115 - DNA, 201 bp, Homo sapiens
gcaacatggcaaaaccccatctccacaaaaaatacaaaattagccaggtgtgatggaacatgcctgtagtctcagctatccaggaggctgaggtaggaggmccacctaagcctggcaagatggaggctacagtgagccaagataacatcaccacactccagcctgagagcaacatcctgtctcaaaaaaaaaaggtggggg

SEQ ID NO: 513116 - DNA, 201 bp, Homo sapiens
aaaggggtttaactgactcacagttcagcatggctggggaggcctcaggaaacttacaatatatgtccttcttcacatggtggcagcaaggataagtgcasagcaaaagggagaaagccgaaagcctcttataaaactatcaaatctcatgagaactcactatcgcgagaacagcatggaggtaactgcccccttgattca

SEQ ID NO: 513117 - DNA, 201 bp, Homo sapiens
cacatggtggcagcaaggataagtgcagagcaaaagggagaaagccgaaagcctcttataaaactatcaaatctcatgagaactcactatcgcgagaacascatggaggtaactgcccccttgattcagttacctcccaccgggtccctcccatgacacgtggggattatggaaactacaattcaatatgagatttgggtg

SEQ ID NO: 513118 - DNA, 201 bp, Homo sapiens
gtctcaaactcctgagctcaagtgatccacctgccttggcttcccaaagtgttgggattacaggctgagccactgcgcctagccaacacactgcttacttytaagagttcctgctttgattcagttttagcctctgagcatccttaccaagtagtcaactcattcattccatttaagggctagttttttattgcactcagc

SEQ ID NO: 513119 - DNA, 201 bp, Homo sapiens
tccctttggaattagatgatacaacaaactttaaaaatcgtagagtgaaactctgttttttttataggtgaagaaactgaagaagagaacttatgcttctmgatgttgcagaagcttaaattccggttgcctgaggcctagtccagggggtcgtggcagcagcaggctgagaccgataagcctcaccagcctcctgaaggt

SEQ ID NO: 513120 - DNA, 201 bp, Homo sapiens
tgacagttaaggccaggccaaggtcccactgtgacctttttccctccctaaagctgctttgggactctttaccttaaaggggttaaaaagagggagaaatrtttataaattctaaaagtaacttaagataatattttaaagtacttagccattaaaagtaacttttatttatcaagatacaattaggtatctggcaaagat

SEQ ID NO: 513121 - DNA, 201 bp, Homo sapiens
attacaggctgagccactgcgcctagccaacacactgcttacttctaagagttcctgctttgattcagttttagcctctgagcatccttaccaagtagtcractcattcattccatttaagggctagttttttattgcactcagcatttttaattgttgctagcaggaaggttagtcagatgtcttagaccacaggaccac

SEQ ID NO: 513122 - DNA, 201 bp, Homo sapiens
gacaggtttttgggggcacagtctaagttggtctggtgtctggaaggagactggggcctaataaaaaggagcgtctatacaggagcttaaatgggctgtaycttgtagcattctgaggacaggcctgaattctgagaagcgaaagtggtaaaagtattgtccagtcctttttgagttggtggctgagcttcgtgaggtgtg

SEQ ID NO: 513123 - DNA, 201 bp, Homo sapiens
ttggttttggttgtatcataatctccaaccattaatcccattgacagagtggaatatttcagttaacaagacaatataattaatagagctatcattgaacycaaaaagggattaccaattttaacataattattacaaaacgtatgctaacccccaaataatactatgcatgatgtgacctctctttgatttggaagagcc

SEQ ID NO: 513124 - DNA, 201 bp, Homo sapiens
attcagttttagcctctgagcatccttaccaagtagtcaactcattcattccatttaagggctagttttttattgcactcagcatttttaattgttgctakcaggaaggttagtcagatgtcttagaccacaggaccactgtattgccagaatctaaagtcaaaaatccgctttaaaacataaagctaattatgtcactct

SEQ ID NO: 513125 - DNA, 201 bp, Homo sapiens
tgagttcaggagttcgagaccagcctggccaatatgtcaaaaccccttctctactaaaagtacaaaaattagctgggcgaggtggcagacgcctgtaatcycagctacttgggaggccgaggctggagaatcacttgaatccaggaggcagaggttgcagtgagccaagaatgtgccactacactccagcctgagcgacaa

SEQ ID NO: 513126 - DNA, 201 bp, Homo sapiens
cagtgagctgagattgtgtgactgcactccagcctggatgacagagcaagaccctgtctcaaaaaaaaacacacacacacacacaaacatgatttggatadatagatagatagatagatagatagatagatagatagatagataaacttaccccttacaacaccccaggccccaggatactaagggtaataataaaatatt

SEQ ID NO: 513127 - DNA, 201 bp, Homo sapiens
ttttaagaaaatttaagcaatgaaaacacaatatacacagtcagtgttcacatctttaggtattctcgtgctaatgcttgagattgttcatacgtttaatrttgatatatgcatcatacatacatgatgatatacatgctgtgaaaaccactgctacgagtattgagacttctggtttgcaaactagatctcatctttcta

SEQ ID NO: 513128 - DNA, 201 bp, Homo sapiens
agacttagattcatgtcccatgtggccatggtaaagtcacttaaccccactgggcttcggtttcaccatctgtcacatgagaataataataatactaactkcacagggcagtcacagaaatcaagtgagatgacggaggtgaaagatctttgtaaggtgaaaagttgaagcaactcctatgatttttcattacctctgcta

SEQ ID NO: 513129 - DNA, 201 bp, Homo sapiens
tctctgctgcacaactaattcaagatgccatcatccctaagttagagcatggtgatgccttctcactgagatacaaagaataaagtgctttaagaactcgyagctctggccgggccagtggctcacgcctgtaatcccagcactttgggaggccgaggcaggcggatcacctgaggtcgggagtctgaggccagcctgacc

SEQ ID NO: 513130 - DNA, 201 bp, Homo sapiens
caaaatggacctccaacttataaagcaacaagctaatgaatgcattttaaggcatacgcgatgcaaatgagccacgtgaaaaaaaaaacagagttggtgatttttttttcatgtttctaaacatcactcctgaagcatttagtacaactgaaaaattggaatggacaactgaagcaattgctacacaaaacatgaaatacc

SEQ ID NO: 513131 - DNA, 201 bp, Homo sapiens
taaagctatttacttcataatattaggtccaaaccatacttggctcttctggatggaggctgaaaatgaacattgtagatgcaaacaatctctctctctcttttttttttttttttagggggagtctcactcttcttgcccaggctggagtgcaatggcatggtctcggtgcactacaacctccacctcctggattcaagc

SEQ ID NO: 513132 - DNA, 201 bp, Homo sapiens
tgatttttaaaatctataattgttttcttgacctctttgtaacaaaatctaaatagcatctttttcctgtttttagaaattattcttacccttcaaggcayaagtcactgtctgtgttgtttgtgggttccccaagtagaagtaactgttccttccccagcgttcttctagcactttttacatctctaatctagcactgtg

SEQ ID NO: 513133 - DNA, 201 bp, Homo sapiens
tggacaggttacatgatggacctagtttagtttcttcatctatatagtaagataataacagtacctagctcatgtaatagttttgagtatcaaataaactratatatccttataacattttaaatctggaataaacactgtgttataaaatataactaaatttatatttctctaattattattactgatgatagattaact

SEQ ID NO: 513134 - DNA, 201 bp, Homo sapiens
tagtaagataataacagtacctagctcatgtaatagttttgagtatcaaataaactaatatatccttataacattttaaatctggaataaacactgtgttrtaaaatataactaaatttatatttctctaattattattactgatgatagattaactatagattttttgttattttaaataagcaatataccttaaaaagt

SEQ ID NO: 513135 - DNA, 201 bp, Homo sapiens
acgggggtataatggcttttctgtacacttgtatcttggcttccctgaaaacagatatcatgcatgcatcttggtggttcacacccaaacacagagcacayccagtgagcctgaggaaaggcgctgcttgcaggagtctcagccccctctgtgtctgctggtacttgctttctcccgctgtaccttatcctccagtttata

SEQ ID NO: 513136 - DNA, 201 bp, Homo sapiens
gtaatagttttgagtatcaaataaactaatatatccttataacattttaaatctggaataaacactgtgttataaaatataactaaatttatatttctctrattattattactgatgatagattaactatagattttttgttattttaaataagcaatataccttaaaaagtgtttgttttgttgttacacatgtgctgag

SEQ ID NO: 513137 - DNA, 201 bp, Homo sapiens
tcaatgctaggaaagcttatcaaaactactttcccaggaaaccatctatagagatttgcattctacttaatgttaacactatttttaattattttattgtsttaagttataactctcagagaattagctaagtcttggtatatacatggtttgtgctttactcttaaacatctttaaagtgctattattctatatctgttg

SEQ ID NO: 513138 - DNA, 201 bp, Homo sapiens
tcaaagaacagaagaagaccattagacatcccacagaggatttggatatcagaaatgttaaacattaggaatatctcaaaagatagcttgtatacagaatmtattttaaagaaaatttaaaatgtaacttattttataaatttgcttgttcactaaataatacatgagaatacttgttcaagaggatgggaagctaaaagt

SEQ ID NO: 513139 - DNA, 201 bp, Homo sapiens
taaaaagtaggctgctttccactgcttatttttaaatggtgaacaataacagataaaaatgtaatgaccttgaaaaacagtaaagggaatatgtgtaagcytactttttttttttttttttttaaagacagactcttgctctgtcatccaggctggagtgcaatggcacaatctcagcttactgcaacctcctcctcctgg

SEQ ID NO: 513140 - DNA, 201 bp, Homo sapiens
cttgttcactaaataatacatgagaatacttgttcaagaggatgggaagctaaaagtctatcacgattgttataaatttgctaacaactaatattttcctytaggaaacaagaagtagctcatgaggatgatttgactttcttcctcagatcatttcatgcatagataggggagatcctatactttctgtttattttctgc

SEQ ID NO: 513141 - DNA, 201 bp, Homo sapiens
ctttaggaaacaagaagtagctcatgaggatgatttgactttcttcctcagatcatttcatgcatagataggggagatcctatactttctgtttattttcygctgcttaaacagaattttgcagttaaataatttgtcagtgttcacatgtagctgaaagaaacagaactgaaacccaattctgtggcttcaattaaagtg

SEQ ID NO: 513142 - DNA, 201 bp, Homo sapiens
aaacataagtaaatttcatgtttggacctggatcccatccccaagataactcattatgtatatatgcaaatgtccaaaatccaaaatctgaaacatttctygtcccccaaaacatttcggaaaagggatactcaacctgtaccacaaagcacagtgaaaataaaacttcagctaggaatgctttgttctgttctgatttcc

SEQ ID NO: 513143 - DNA, 201 bp, Homo sapiens
atgtagctgaaagaaacagaactgaaacccaattctgtggcttcaattaaagtgtaaaaaacataacaattcaccatcagtctaatgaaatatttacacartctttcatggtcacgttttgtatacaaagagcaggtgctattattattttgattccaataacttaacattaaaacgtcagccacaagctgagattcctcc

SEQ ID NO: 513144 - DNA, 201 bp, Homo sapiens
tagaaatgtgttttcatttaatttactgagcccatatagactgtaactctaatgtaatgcaaatggtacaggttgagcatccttaatccaaaatccaaaaygcttcaaaatctgaaaccttttgagtgctgacatgagccacaaaattctacacctgacctcatgtcatgagtggcagtcaaaactttgtttcagccacgg

SEQ ID NO: 513145 - DNA, 201 bp, Homo sapiens
agttgagaagcctccattctcagtaacaactgtcttcggatgtcatgatactaagacccttcactttcttttgtcatctcaggccacatatgttcgacctragagctgctatcttcccagctggttgacgcctcagtacttggatgctcacttcttagtctcacgcttttactcccgaaccaacagcttcctgaagattgt

SEQ ID NO: 513146 - DNA, 201 bp, Homo sapiens
aggccacatatgttcgacctgagagctgctatcttcccagctggttgacgcctcagtacttggatgctcacttcttagtctcacgcttttactcccgaacsaacagcttcctgaagattgttccagaaccaaagcagcttgaatgtaatcaccagaaggttgttactgtgcattactccctaaacagtgaagcatatgagg

SEQ ID NO: 513147 - DNA, 201 bp, Homo sapiens
tgattccaatgtaaagttcttctatttggtaagtctcagtcagtgggttcctggaatcctgttcaattgcacgtctgcttagcccagcacagcttagaaakcatgcatcagtcatgccacggtgaccagagtaagggcagccttctcactttgctggtgaatactgttcgatccattaacaacaaacaaacacatagaacg

SEQ ID NO: 513148 - DNA, 201 bp, Homo sapiens
gaattttcccttaaaaggttgtactaatgcagcaaaccgatcagtataatgcattaatcaattactatacaatattctactaatgttgaaaatcagtgccycaccctatagttgattctccagaatggagaaattgtgcatttaaggagatgaggctttctgtttaccatctcatagaaataaaatctatttgaaagtaac

SEQ ID NO: 513149 - DNA, 201 bp, Homo sapiens
tacaataactttaacaaataaaaacaagactagatagcaacatggaaaagcttgtgatataatgttcatggcttaaacaatgtaatgataacaatataaartatatattcatgtaaacaaaaaccagtcatacaaaaatgaaaacagttattgttgttaacattgattattaatttttaaccttattgagatgttatcttt

SEQ ID NO: 513150 - DNA, 201 bp, Homo sapiens
ttcggacttttgtcccttcatggttgttaattgttttagaactgaactaggacccttaccaggcacaataaaaccagatttctatacggaggctttgcagmgatagaaagaaaagctaagatcagggaaggagagaccaaggcaggctttttcattagcaatggtgttgagcaggcagtttgggtaatttcttttcttttt

SEQ ID NO: 513151 - DNA, 201 bp, Homo sapiens
ccatagttccctttaactctttaacttcatctgctcaaaacacttttttaaaacatctcaaatctcttctcccatgatctctatctgagctcatgatatcrccatccacctgcttccccaagcccaagctttggaagccacagtgaatgtgaggcactattggctaacatgtaacagtgaccatgtgacagtaattgttaa

SEQ ID NO: 513152 - DNA, 201 bp, Homo sapiens
tggcaaagacctcaccttcaagcctgaagacctgcggccctaaatgaggacaggcattcctgttttcaagacaaagaggttgccttttgtccctccacacyctctatcctgcccccacgtaaaccgcaaaccccaagctccacagcagagcagcaggtgagtagaggaggataccagcagatggacggtggaacagcacag

SEQ ID NO: 513153 - DNA, 201 bp, Homo sapiens
aaatgatgaagggaaacagtgacgggttagtcaaagcacataaaatggagtcgggaggccatttcggtttggacctcaggcctgtctttttaaaaaaaaawttaaattaattatttatttatagagacaaggtcctactacgttgcccaggctggtttagaactcctgggctcaagcaatccccctacctctgcctcccaa

SEQ ID NO: 513154 - DNA, 201 bp, Homo sapiens
tggccgaaaaagttttttaacatgtgctgcctgtatacacatgggagcattcagtgatgagtaactaaaaagggtggctagaactggggcttgtccagcawcttaacaaaatgatgaagggaaacagtgacgggttagtcaaagcacataaaatggagtcgggaggccatttcggtttggacctcaggcctgtctttttaa

SEQ ID NO: 513155 - DNA, 201 bp, Homo sapiens
aaagctatttacttcataatattaggtccaaaccatacttggctcttctggatggaggctgaaaatgaacattgtagatgcaaacaatctctctctctctyttttttttttttttagggggagtctcactcttcttgcccaggctggagtgcaatggcatggtctcggtgcactacaacctccacctcctggattcaagca

SEQ ID NO: 513156 - DNA, 201 bp, Homo sapiens
aagctatttacttcataatattaggtccaaaccatacttggctcttctggatggaggctgaaaatgaacattgtagatgcaaacaatctctctctctcttytttttttttttttagggggagtctcactcttcttgcccaggctggagtgcaatggcatggtctcggtgcactacaacctccacctcctggattcaagcat

SEQ ID NO: 513157 - DNA, 201 bp, Homo sapiens
tcttgaccctgttcaagaggcataagggaaacttcccagaggagaaagaaaatggaggttaaacttgaaccagcaggaacagagagaaaagaggagagcasagaaacagccaatgaatcctaattaacaaatcaaatgggcaggagaatattcaagtctagtatggaaagagctcaacattcaagggtctgatcaaccatt

SEQ ID NO: 513158 - DNA, 201 bp, Homo sapiens
gcgcggtggcttacacctgtaatcccagcactttgggaggccgaggtgggcagatcacgaggtcaggagatcgagaccatcctggctaacacggtgaaacyccgtctctactaaaaatacaaaaaattagccggacatggtgacaggtgcctgtagtcccagctactcgggaggctgaggcagaatggcgtgaacgcagga

SEQ ID NO: 513159 - DNA, 201 bp, Homo sapiens
tgccacactggctgctcagatatgtggttaagaagccaaggctcacgtgcccaagagtgttctgcccaggaggggaaaaattctttttccttctactcatyttagatttacaggctgggccctgtaaattagattgacaaaagacagattaacaagataaaaacgtttttattttattttatttattttttatttttttat

SEQ ID NO: 513160 - DNA, 201 bp, Homo sapiens
agcttccagtgagctgagatgacgccactgcactccagcctgggtgacacagcgagactccatctcaaaaaaataaaaataaaaaataaaataataataayaaaaaaacctaacatttaggtaagttcaaatgatgttatgtcagttaacaactatgttcaatattcatttcactcttcctcctttgtgtaaaggttgtgg

SEQ ID NO: 513161 - DNA, 201 bp, Homo sapiens
cccgacctgccacagataccagctagatatatgtacacagaggctggaggaggcggtgtctgaattgcatagggctcaggggattggtttgactaggcatrtcattcacatatctgcgaaaaagctggccctcccaccatagccttttaatatgcaaaagcggggcaccatgatgttctaacacacgtgggaatacatggg

SEQ ID NO: 513162 - DNA, 201 bp, Homo sapiens
atgataagggtagaaagagtgcagagaaaaaaaggatgaaaacgaaggtggctgaagaatgctttgtgacggaggtgggattgaaatgagctttgaaaggmcgggtgcagtggctcacacctgtaatcccagtaatttgggaggctgcggcgggcggatcacctgaggtcaggagtttgagaccagcctggccaacatggt

SEQ ID NO: 513163 - DNA, 201 bp, Homo sapiens
tattataacatctgagtcagtccaatttcatgggggtattatctgagaggcttttatcccccatttttttttaatcgtactttcttttctcatgctataarcagaaaagtctaaatgacccaagactcagaaatggataacggtattttctcacagtatgttatatgtaaaatggtattcagagaactgaaaatttttaaa

SEQ ID NO: 513164 - DNA, 201 bp, Homo sapiens
tgttagaattttgatgaatttctcttttttttgagacagagtcttgctctgtcacccaggctggagtgcaatggcgcgatcttggctcactgcaagctccrcctcccgggttcaggccattctcctgcctgagcctcctgagtaggtgggattacaggcgcatgccgccaccacgcccggctaatttttttggtattttta

SEQ ID NO: 513165 - DNA, 201 bp, Homo sapiens
ggtgaaactccgtctctactaaaaatacaaaaattaaccaggtgtggtggcaggcgcctgtaatcccagctactctggaggctgaggcaggagaatcgctsgaacctgggaggtggaggttgtagtgaaccgaaatcacgccactgcactccagcctgggcaacaaagcgagactccgtctcaaaaaacaaaacaacaaca

SEQ ID NO: 513166 - DNA, 201 bp, Homo sapiens
tctcaaccttgcttctcatatttgggggcttgctagcattttgtgacaggcgccatgctagttatttactcctataacttaccagttttcccagtgaggcrtgtatttttcctattttcagttgaggaaactgaaagctcagaggaagttagacactaggctagggttatagattgcagatggtaatgctgggatttgaat

SEQ ID NO: 513167 - DNA, 201 bp, Homo sapiens
caggctggagtgcaatggcgcgatcttggctcactgcaagctccacctcccgggttcaggccattctcctgcctgagcctcctgagtaggtgggattacargcgcatgccgccaccacgcccggctaatttttttggtatttttagtagagatggggtttcaccgtgttagccagaatcgtctccatctcctgacctcgtg

SEQ ID NO: 513168 - DNA, 201 bp, Homo sapiens
atggcccgaaccaagcagactgctcgtaaatccaccggtgggaaagccccccgcaaacagctggccacgaaagctgccaggaaaagcaccccctctacctrcggggtgaagcctcatcgctacaggcctgggaccgtggcgcttcgagagattcgtcgttatcagaagtcgaccgagctgctcatccggaagctgcccttc

SEQ ID NO: 513169 - DNA, 201 bp, Homo sapiens
aaacaggccagaggcaagttctatggagcccctggcaaagccagcctgctctgatgacgtatttcctgcctaggtggacacagttgatgtcccatagtacyttggtttatttctctcccatgagaatgcagccactgtttattattttacagaacccaatgctgggcagatacaagaaggaattggagaagctgtgaacaa

SEQ ID NO: 513170 - DNA, 201 bp, Homo sapiens
  misc_feature (1)...(201): n = A,T,C or G
gtcctgataatctagaagctgctacatcatgtggccccctctggtctcacctactattcaccccctaactcagtcccctccagccacatggcctccttagngtgtcttctcaatgaggctttctctgatcactctattgaaaatcataaccttcttccacttcacatgccatctccctattcccagggttttttcccccca

SEQ ID NO: 513171 - DNA, 201 bp, Homo sapiens
tcacagacccagcgtctcccaggcctggacgagcaggacaaagttgtggggaaaggagcaggatggcccctggtggaaatactggctactgtttacctgcygggagccgagggagaccagccgaacatccttgccaaaggggctcttcttcacctcatgcacaaactgggccagctgggagtgtgtccgactacagtaata

SEQ ID NO: 513172 - DNA, 201 bp, Homo sapiens
acaatgacctatctgctcacagcattactttgaaatccatttttcaaatttctgaatcacactggcatcacaaatttaaatacatcttaagattttttcgyttggcattgattaatgatgactaaaatctcattggtctagagctttcttcgttgcttttttctgaaaagacttactgtgaccattatctaaaaatgtaat

SEQ ID NO: 513173 - DNA, 201 bp, Homo sapiens
taccccttccagagctctcctttgggtttctttccttttactttttcttttgaaacagagtctcactccatcgcctaggctggagtaccgtggcataatcktggctcactgcaacctctgcctcctcccttgggtttctttaattcaccaccaccactacatgaggtagcaaccgattttttcattttaaagatgagaaag

SEQ ID NO: 513174 - DNA, 201 bp, Homo sapiens
ttttttgtatttttcatagagacgggggtttcaccatgttagtcaggatggtctcgatctgtgttaggatggtctcgatctgtgttaggatggtctcgatytcctgacctcgtgatccacccacctcggcctcccaaagtgctgggattacaggtgtgagccagcgcgcccagccttaagaaagggttctacttctaaatt

SEQ ID NO: 513175 - DNA, 201 bp, Homo sapiens
tccagagctctcctttgggtttctttccttttactttttcttttgaaacagagtctcactccatcgcctaggctggagtaccgtggcataatcttggctcwctgcaacctctgcctcctcccttgggtttctttaattcaccaccaccactacatgaggtagcaaccgattttttcattttaaagatgagaaagtagaaaa

SEQ ID NO: 513176 - DNA, 201 bp, Homo sapiens
aaatatcatcttctctttaagactatttcctacccctttattttttgaaagtggcacataggagcgatacaatccattacttttaaaacagatctcagaaytgtaagaaatgaaacatacagacctttagatttctttttttaagttacccatgtagtatttgttttttcctgaaccttaagagccccaacttgagactga

SEQ ID NO: 513177 - DNA, 201 bp, Homo sapiens
gtttggtgatcagaaactatagaggggtccaacccaggatttcatgtttgtatcttcataaggccatgctcctgacaggtctaggcaacctgggggatgamttaggttagtgtgctaggattgacacacctcatccagccttcttactttgtggatgggaacacttaaggaatagagagattaaatcttacacttacccca

SEQ ID NO: 513178 - DNA, 201 bp, Homo sapiens
ggaccataatgattatttttgcatagtaatagctggtgaagaagttgttttaaaattaaattgccaaaagtattacctcttgaaaaatttattttcccaawgtttttcatatgtcatgaaacccctaatcttgacctttatgacacagtggcattacactgatgttggaagcatgtgtgagatctgtgccctggtcgggag

SEQ ID NO: 513179 - DNA, 201 bp, Homo sapiens
acttgtttaagcattcaaatgtaactcatatcaagtatttatgacactttgtaatagtaaaatattgggcagatgccagaaagtaaggtggaaagcttatkttgataagcagtaaaaggactttattctcttggttctgtccattttgtctttctaaggaggagcccccaacctttgtggcaccagggactggcttcatgg

SEQ ID NO: 513180 - DNA, 201 bp, Homo sapiens
aaagcttatgttgataagcagtaaaaggactttattctcttggttctgtccattttgtctttctaaggaggagcccccaacctttgtggcaccagggactkgcttcatggaagacaatttttccacagatggggtggggatggtgggatggcttcaggatgattcaagcatattacatttattgttcactttatttctatt

SEQ ID NO: 513181 - DNA, 201 bp, Homo sapiens
gcatgatccttggcagcagtgccaatcctgagacggcagcacgtggtgaagggggtctcctgcaaagaaagctgagggtgagagtgggcaaaggaaatacmgtatagaaatctataaggatttattcaggagagattaaatgtattcagatcatctttacataaaatggtctctactctcatctcttttttttctctactt

SEQ ID NO: 513182 - DNA, 201 bp, Homo sapiens
atataaaacatttttctcaatgcaaaacataaatacatttaagttttctattacagggagcaaaaatacttttagttagaagctttcagaatctgaggggrcatcaacaaataaaggataaatttatctataaatatggaatatggccatgtgctgtgctcacgcctgtaatcccagcactttgggaggccaaggcgggca

SEQ ID NO: 513183 - DNA, 201 bp, Homo sapiens
gcctgtaatcccagcactttgggaggccaaggcgggcagatcgtttgtgctcacgaggtcgagaccagcctgcacaacatgatgagactctgtctcccccraaaatataaaaaatgagcagggcacagtggtgtgcacctgtgatctcagaaacttgggagattgacatgggaggatcacttgagccctggcgggggcaga

SEQ ID NO: 513184 - DNA, 201 bp, Homo sapiens
aagtgcaagaattacacagagaactcccgtagacccttggcctgattcaccagtttgtgaacatttcaccgtacttgttttctctttctcactctctccamccctacacacacacacatacatacacacacacacacacacacacacacagagtttatgccatttcagttttttctgaatcatttgagactaggttacata

SEQ ID NO: 513185 - DNA, 201 bp, Homo sapiens
ttgggaggccaaggcgggtggatcatgaggtcaggagatcgagaccatcctcgctaacacggtgaaaccgcgtctctactaaaaatattaaaaaattagcygggcgtggtggcgggtgcctgtagtcccagctactcaggagactgaggcaggagaatggcatgaacctgggaggcagagcttgcagtgagccgagatcgc

SEQ ID NO: 513186 - DNA, 201 bp, Homo sapiens
caccttttaagaaacattttatctccacaagtacactgtaatctccttagagaaagtaagtacttttttatccacctcattgctcctcatagtgcttcagwgttccttcatggtgtttaaaacagaattctgctgttcaatgtgcatttgctgaataaagaactatggagaatgaaaaaataaagtagaaaaagtaaaata

SEQ ID NO: 513187 - DNA, 201 bp, Homo sapiens
ggcgggtggatcatgaggtcaggagatcgagaccatcctcgctaacacggtgaaaccgcgtctctactaaaaatattaaaaaattagctgggcgtggtggygggtgcctgtagtcccagctactcaggagactgaggcaggagaatggcatgaacctgggaggcagagcttgcagtgagccgagatcgcgccactgcactc

SEQ ID NO: 513188 - DNA, 201 bp, Homo sapiens
acattttatctccacaagtacactgtaatctccttagagaaagtaagtacttttttatccacctcattgctcctcatagtgcttcagtgttccttcatggkgtttaaaacagaattctgctgttcaatgtgcatttgctgaataaagaactatggagaatgaaaaaataaagtagaaaaagtaaaataaagtcatcatgat

SEQ ID NO: 513189 - DNA, 201 bp, Homo sapiens
catggaaaagcttgtgatataatgttcatggcttaaacaatgtaatgataacaatataaagtatatattcatgtaaacaaaaaccagtcatacaaaaatgaaaacagttattgttgttaacattgattattaatttttaaccttattgagatgttatctttttaattaaacagcaataggagttatttattaatcatacca

SEQ ID NO: 513190 - DNA, 201 bp, Homo sapiens
gcgggtggatcatgaggtcaggagatcgagaccatcctcgctaacacggtgaaaccgcgtctctactaaaaatattaaaaaattagctgggcgtggtggcrggtgcctgtagtcccagctactcaggagactgaggcaggagaatggcatgaacctgggaggcagagcttgcagtgagccgagatcgcgccactgcactcc

SEQ ID NO: 513191 - DNA, 201 bp, Homo sapiens
ttttatctccacaagtacactgtaatctccttagagaaagtaagtacttttttatccacctcattgctcctcatagtgcttcagtgttccttcatggtgtktaaaacagaattctgctgttcaatgtgcatttgctgaataaagaactatggagaatgaaaaaataaagtagaaaaagtaaaataaagtcatcatgatatt

SEQ ID NO: 513192 - DNA, 201 bp, Homo sapiens
ggatcatgaggtcaggagatcgagaccatcctcgctaacacggtgaaaccgcgtctctactaaaaatattaaaaaattagctgggcgtggtggcgggtgcytgtagtcccagctactcaggagactgaggcaggagaatggcatgaacctgggaggcagagcttgcagtgagccgagatcgcgccactgcactccagcctg

SEQ ID NO: 513193 - DNA, 201 bp, Homo sapiens
cctagtctgtctgcttctcgttattgggcctcaagaaaatgcagccggacccggcttggttccgggaacaaaaatgcatattttaggtaggatgtaattayagggattgacaatcaaacacatacaacatactgaaaccatggactatgtgtagcattagacagaaacaggaagcacccaggatagggaaatggctgcttc

SEQ ID NO: 513194 - DNA, 201 bp, Homo sapiens
ctgcctgtatctggttacagcaataaattcccttctttcctagtctgtctgcttctcgttattgggcctcaagaaaatgcagccggacccggcttggttcygggaacaaaaatgcatattttaggtaggatgtaattacagggattgacaatcaaacacatacaacatactgaaaccatggactatgtgtagcattagaca

SEQ ID NO: 513195 - DNA, 201 bp, Homo sapiens
tcccagcactttgggaggcccaggcgggcagatcacgaggtcagaagatcgagaccatcctggctaacacggtgaaaccccgtctctactaaaaaaaaaamaaaaaaaaaaacaaaaacaaaaaattagccgggtgtggtggcgggtgcctgtagtcccagctactcgggaggctgagtgaggcaggagaatggcgtgaac

SEQ ID NO: 513196 - DNA, 201 bp, Homo sapiens
tgatatattatgacaggaaaaaaactcaagtattttggcttgaaaatataaactataaacatataggaaaaattttggtttaaaactaagcacaaattacrctggttttttttaagaaaaggaacaattatatttttcataatactaaaaatgaaataatgtaaagtgataaaaagcaattaattcctacttaggtaatat

SEQ ID NO: 513197 - DNA, 201 bp, Homo sapiens
tactgcagaggctgaggcaggagaatggctagaacccaggaggtggaggttgcagtgagccaagcttgtgccactgcaatccagcctggtgacagagtgakactctatctcaaaaaaaaaaaaaaagaaaaaaaaaaagaaaaaagaaatgtgaagacaggagatttgagaggggccaggggcagaattatagggtttggc

SEQ ID NO: 513198 - DNA, 201 bp, Homo sapiens
gaaaaaagaaatgtgaagacaggagatttgagaggggccaggggcagaattatagggtttggctgtggctgcacccaaatctcatcttgaattttagttcycatagtccccacatgttgtgtaagggacccggtgggatgtaattgaatcatggtggcagtttctcccatgctattgttgtgatagtaagttctcacgaga

SEQ ID NO: 513199 - DNA, 201 bp, Homo sapiens
tagttttataaggagcttgctgcttcacttgaccctcattctccttcctgctgccctgtgaagaagaacatgtttgcttccctttccaccatgatcatcartttcctaaggcctcctcagccatgctgaactgtgagtcagttaaacttctttcctttctaaattacccagtcttggatgtgttcttatagtagtatgaga

SEQ ID NO: 513200 - DNA, 201 bp, Homo sapiens
ctattaaaataaatttataaatcccttgaatcaactgaattctaagctttttgaagaggttgctgatgtagtgtgatcaaaagaatctaaggagaacctcmtctccaaaatctgattggagctgttcaccctctcaaggacaagataaagattgacttcagagatatatcacatcaagctagaggaaaaaaaaaaaacctc

SEQ ID NO: 513201 - DNA, 201 bp, Homo sapiens
tttcaataagccataaaaagcagtaaaaaggccagacagggccaggcacggtggctcatgcctgtaatctcagtgctttgggaggctggaggcaggtggaycacctgaggtcaggagttcaagaccagcctgggcaaaatggtgaaatgccatctctactaaaaatacaaaaaattaaccagatgtggtggcaggcatctg

SEQ ID NO: 513202 - DNA, 201 bp, Homo sapiens
attgacaaatacacagaggtcctcaagacccacggcctcctgatctgagcccaataaagactgttaattcctcaaaaaataaaaaataaataaaaataaawaattaaaaataaagaagaaaaatattaaaaaagtatttatttgtaactagctccatctagtgagaattgcttaaaattacatgattcatttatgaatctc

SEQ ID NO: 513203 - DNA, 201 bp, Homo sapiens
gagtttgagaccagcctgaacaacatggtgaaaccctatctctactaaaaatacaaaaagtagccaggcgtggtggcgcgtgcctgtaaccccagctactytggaggctgagggaggagaattgcttgaagccgggaggcggaggttgcagtgagccgagatcgcaccactgcactccagcctgggcaacagagagggact

SEQ ID NO: 513204 - DNA, 201 bp, Homo sapiens
agggccaggcacggtggctcatgcctgtaatctcagtgctttgggaggctggaggcaggtggaccacctgaggtcaggagttcaagaccagcctgggcaamatggtgaaatgccatctctactaaaaatacaaaaaattaaccagatgtggtggcaggcatctgtagtcccagctacctgggaggctgaggcaggagaatt

SEQ ID NO: 513205 - DNA, 201 bp, Homo sapiens
atacacagaggtcctcaagacccacggcctcctgatctgagcccaataaagactgttaattcctcaaaaaataaaaaataaataaaaataaaaaattaaarataaagaagaaaaatattaaaaaagtatttatttgtaactagctccatctagtgagaattgcttaaaattacatgattcatttatgaatctcctttgaac

SEQ ID NO: 513206 - DNA, 201 bp, Homo sapiens
tctcaaaaaaaaaaaaaaaagtataatgtattagggttctccagagaaacagaactaataggatatgttatagatagagaaacattttaaggaattggctyacacaattgtggaggcctggggagtctaaatctttattgtgggccatcaggttggagactcagggaagagacagttcaagccaaaaggcagtctgctggc

SEQ ID NO: 513207 - DNA, 201 bp, Homo sapiens
gtcaggcacaaaggctcatgcctgtaatcccaacactttgtgaggctgaggtgggaggatcacttgagtcccagtatttaagaccagcctgggcaacatartgagacgcatctctatttatataatcaaaaaagaaaaaagaaaaaaaaggcaatattcctttaacagtgtgagtgtctcaatgaaatggaatggaaatca

SEQ ID NO: 513208 - DNA, 201 bp, Homo sapiens
ccagaagcgcagggtggaatttttagtttccaaatattttttatctgtggttggttgaatccccagatgtggaacccacaaatacagagggccaactgcakgtgtgtgtgtgtgtgtgtgtgtgtgtgtgtgtgtgtgtgtacatgttgaatgttggtgtttataccttatgttcattttttagaactgtcttttttttga

SEQ ID NO: 513209 - DNA, 201 bp, Homo sapiens
tgccttggcctcccaaagtgctgggattacaggcgtgaaccaccatgcctgacctcaattttctttaaacctaaaactcttctagaaaataaagtctatcygttaaaaaaaaaaaaaaaaggcagccaccacatgctgacactcattttacaactctcaggcgttaggactctgttcctctcactactttgactagtccac

SEQ ID NO: 513210 - DNA, 201 bp, Homo sapiens
agcgcagggtggaatttttagtttccaaatattttttatctgtggttggttgaatccccagatgtggaacccacaaatacagagggccaactgcatgtgtrtgtgtgtgtgtgtgtgtgtgtgtgtgtgtgtgtgtacatgttgaatgttggtgtttataccttatgttcattttttagaactgtcttttttttgagacag

SEQ ID NO: 513211 - DNA, 201 bp, Homo sapiens
gttgtaaggaggaggaggaggtcttttgtcagtttgcgtggcatactgctgtgatggtacagctgaggtctgccttgatggtaaagttaatacagaatttrgaagctgactatttttaacttgcaatgatgtatgtggtataaagttttgtttttgaatggtagaatctggtaaaaagctttgtggtgagtaacggtatag

SEQ ID NO: 513212 - DNA, 201 bp, Homo sapiens
gcaatctcaaattcatgggctcaagtgctcctcctgcctgcctcaacctcccaagtagctgagaatacaagtgcttgccaccacacccagctaattttaawtttttttgtagcaattgggtctcactatattgcccaggctggtcttgaactcctggcctcaagtgatcctcccacctcaggctcccaaagtgctgagatt

SEQ ID NO: 513213 - DNA, 201 bp, Homo sapiens
cagcttttgatagaaagtaaatggcaaagagttccaggcagcatttcccagcagcacctggagggcggctcttctgtgctgcctgtgatatcggaagcagwcagcttcagctgtcactgggctgggagacacaatggttagaaagccagtgccctccatttgaaagtgagctgaggaagttcctaagggtatggtcaaagt

SEQ ID NO: 513214 - DNA, 201 bp, Homo sapiens
acccacggcctcctgatctgagcccaataaagactgttaattcctcaaaaaataaaaaataaataaaaataaaaaattaaaaataaagaagaaaaatattwaaaaagtatttatttgtaactagctccatctagtgagaattgcttaaaattacatgattcatttatgaatctcctttgaactagtaacattttttgagag

SEQ ID NO: 513215 - DNA, 201 bp, Homo sapiens
gtgaaaccgcgtctctactaaaaatattaaaaaattagctgggcgtggtggcgggtgcctgtagtcccagctactcaggagactgaggcaggagaatggcrtgaacctgggaggcagagcttgcagtgagccgagatcgcgccactgcactccagcctgggcgacagagcgagactccatttaaaaaaaaaaaatctagtc

SEQ ID NO: 513216 - DNA, 201 bp, Homo sapiens
ggcaatgtatggtgatacaggaaaacagtcatagtaagtgactgtgatacaggaaagtgaggtgttttatggagaccttacaccctgataatatatagacyataatttgcagagtccaaggtctgaataaggtacttcttcctttttttttttagctagtggaatcagaggggagaatgctgactatgtagaacaggctat

SEQ ID NO: 513217 - DNA, 201 bp, Homo sapiens
aatttgatttgattgtcaatgccttcagctacctgaatacatgtgtagaggtgagttgttctgtttgatctggaggcaaaaatctaacaaagctaaaatatttcttaatatttccatattctctttatcctcaagtgcaaaatgctactataaaggtataagacttaggtccatattcctcaaacaaatacaattgctttc

SEQ ID NO: 513218 - DNA, 201 bp, Homo sapiens
cagtgaggttattcaagctggagggaggaaaacaaacatctggactattatacctaagaaattgggtaagcagctatctgtctacaccagtcactcatggaaaaaccagcccatatttattgtctccatttactttccttaaattgtctatacaaacgtgattttctccctcacatttttaaaattcttattgtaaattct

SEQ ID NO: 513219 - DNA, 201 bp, Homo sapiens
caagagcataatgtaattaaaatacaatataaatgctaactggcatgacctatcatggactatatgtttggcatatgccatatcccaaatgaaggccatgytatcattaatgccaccttaattatttgacttctcgctgggtccttcacctaccatcatgaacccaggccaccttcaagaaaattgctgctccatcacaat

SEQ ID NO: 513220 - DNA, 201 bp, Homo sapiens
actttggtaacattttctgatgaaagctgagtattcaatactgcctgggtcatctcaacagctgatgtctttgaagtgagaactttcacatcatgagatgrgtctggcattggccgcttttcagaatagacaggatttggtaaaacagaatcaacttggttaaaccttctgcaattgacttcctgaatgtcagaattcaac

SEQ ID NO: 513221 - DNA, 201 bp, Homo sapiens
ccatatcccaaatgaaggccatgctatcattaatgccaccttaattatttgacttctcgctgggtccttcacctaccatcatgaacccaggccaccttcamgaaaattgctgctccatcacaatgaccaatgagggaattgtcaggtttgtaaatttactagatgtgccatggggataccaaaatcactaaatgattggat

SEQ ID NO: 513222 - DNA, 201 bp, Homo sapiens
tgctgctccatcacaatgaccaatgagggaattgtcaggtttgtaaatttactagatgtgccatggggataccaaaatcactaaatgattggattgagatmaaaaactgagaatattgtcttagtgcctatgctatctgcaagatggaaaaataaacttgtctcctattgaaatattgaaaatacatggaatggaaaaagt

SEQ ID NO: 513223 - DNA, 201 bp, Homo sapiens
ctttaatgtactatattcattgtattattttaacagcaaataatatatctatgagattattttagctcagttgtgatgctgttctcagactatttttctaytagatttgaagtttctcaatatttctactgcacaagatcttcaaaatcctaccttggcaattgagacagaatactgtaccaacttgtatagttttatgac

SEQ ID NO: 513224 - DNA, 201 bp, Homo sapiens
tcaggagctaagagaatgacagtagtttaataaatatttaatgcagattgctgaaagtatgcgattttaggacaaggagggagccaaaatgaaactttatdcaaaaaaaatttttttaccaattatttagtaaagaagcacagcttcaataggaataatcaaattggaatatgttagaactcaaattttgtcacctgtgct

SEQ ID NO: 513225 - DNA, 201 bp, Homo sapiens
cagaatactgtaccaacttgtatagttttatgacattaagtcgaagacacagttttaagagtgaaatagcaagcttcctgagacagagaaacactaaaacmcaacaacaacaacaacaacaaaaagaacaatatattggttatgtatattggtatatagtcacgtaaataataataaccttaaaagaatgattgttttcaa

SEQ ID NO: 513226 - DNA, 201 bp, Homo sapiens
ctgaaagtatgcgattttaggacaaggagggagccaaaatgaaactttatacaaaaaaaatttttttaccaattatttagtaaagaagcacagcttcaatwggaataatcaaattggaatatgttagaactcaaattttgtcacctgtgctctgtgggcccaaaacatagaataaaagacatacaccattgtaatttataa

SEQ ID NO: 513227 - DNA, 201 bp, Homo sapiens
cttcctgagacagagaaacactaaaacacaacaacaacaacaacaacaaaaagaacaatatattggttatgtatattggtatatagtcacgtaaataatamtaaccttaaaagaatgattgttttcaatcctgtaattttcacaagcaaggaaactggagatcagttctaattacataatgtgaaatcaggaagtttaaaa

SEQ ID NO: 513228 - DNA, 201 bp, Homo sapiens
taaaagaggcttaattggctcacggttccacaggctgtacaggaagcatgctggggaggcctcaggaaactttcaatcatggtgaaagacaaaagagaagmaggcacgtcttacagggccagagcacgaggaatagagagagtggggaggtgctacacacttttaaacaaccagatctcctgataatccactcactatcac

SEQ ID NO: 513229 - DNA, 201 bp, Homo sapiens
ggcttaattggctcacggttccacaggctgtacaggaagcatgctggggaggcctcaggaaactttcaatcatggtgaaagacaaaagagaagaaggcacrtcttacagggccagagcacgaggaatagagagagtggggaggtgctacacacttttaaacaaccagatctcctgataatccactcactatcacgagaaca

SEQ ID NO: 513230 - DNA, 201 bp, Homo sapiens
tggggattacaatttgtcatgagatttgggcagggacacagacccaaccatatcattcattatcactcaatttaagtatgtcttaaaatttaaaaaaaatwtttttttgtcttataactgatgaagtggcaaatatttcttaatttttctcatgacatctgcttggtcccaggagttacttaatggtgcacttttaagttt

SEQ ID NO: 513231 - DNA, 201 bp, Homo sapiens
gaagtggcaaatatttcttaatttttctcatgacatctgcttggtcccaggagttacttaatggtgcacttttaagtttccaagtaaattttaagtaatcyttttttttttttttttttttgagacagagttttgctcttgttgcccaggctggagtgtagtggcatgatctcggctcactgcaacctccgccttctgatt

SEQ ID NO: 513232 - DNA, 201 bp, Homo sapiens
tggtcaggctggtctcgaactcctgaccttgtgatccacccacctcggcctcacaaagtgctgggattacaggcgtgagccaccacacccagccaattttragtaatctttaactttaaatttttaattgccagaaggtcagagactgtggccagtagaatattctgattagtagatattttttccctccattttaactct

SEQ ID NO: 513233 - DNA, 201 bp, Homo sapiens
ttcatcttgttgcataactttgctttatcctcacgatagatcccattttccacaattaattacttatatattttaaatttgtgttgtatatgttcatacaaataaaaataaaataaaacagattgaatacatatggagtacactttattatttatttattttacttatttatttatttttttcgagagggagtcttgctct

SEQ ID NO: 513234 - DNA, 201 bp, Homo sapiens
tcatcttgttgcataactttgctttatcctcacgatagatcccattttccacaattaattacttatatattttaaatttgtgttgtatatgttcatacaaataaaaataaaataaaacagattgaatacatatggagtacactttattatttatttattttacttatttatttatttttttcgagagggagtcttgctctg

SEQ ID NO: 513235 - DNA, 201 bp, Homo sapiens
ttgttgcataactttgctttatcctcacgatagatcccattttccacaattaattacttatatattttaaatttgtgttgtatatgttcatacaaataaamataaaataaaacagattgaatacatatggagtacactttattatttatttattttacttatttatttatttttttcgagagggagtcttgctctgtcacc

SEQ ID NO: 513236 - DNA, 201 bp, Homo sapiens
gttgcataactttgctttatcctcacgatagatcccattttccacaattaattacttatatattttaaatttgtgttgtatatgttcatacaaataaaaataaaataaaacagattgaatacatatggagtacactttattatttatttattttacttatttatttatttttttcgagagggagtcttgctctgtcaccca

SEQ ID NO: 513237 - DNA, 201 bp, Homo sapiens
tgctttatcctcacgatagatcccattttccacaattaattacttatatattttaaatttgtgttgtatatgttcatacaaataaaaataaaataaaacarattgaatacatatggagtacactttattatttatttattttacttatttatttatttttttcgagagggagtcttgctctgtcacccaggctggagttca

SEQ ID NO: 513238 - DNA, 201 bp, Homo sapiens
agagaaacactaaaacacaacaacaacaacaacaacaaaaagaacaatatattggttatgtatattggtatatagtcacgtaaataataataaccttaaargaatgattgttttcaatcctgtaattttcacaagcaaggaaactggagatcagttctaattacataatgtgaaatcaggaagtttaaaaacaatggattc

SEQ ID NO: 513239 - DNA, 201 bp, Homo sapiens
gctttatctttatggtataagtttatccatcaaaaagaatattcaggaggtggtttttagttcactttctgaggctggtctgctcctatctattttttttyccatcatgtgtattcttagctcctcttatgatatggttgtcacacaatattggacaatgagatattaggattgaggcccaatagcacataatataatctt

SEQ ID NO: 513240 - DNA, 201 bp, Homo sapiens
gacaatgagatattaggattgaggcccaatagcacataatataatcttggcttttgtactcttaggagaaaataacccatagatacatcactgcccctgcmcctcagtctccggttttatggccatgaggggtattattttacctggttgatggtgatctgattatactccttcatctgagtcttcaagctttaccttttg

SEQ ID NO: 513241 - DNA, 201 bp, Homo sapiens
gaaaccctgtgactactaaaaaaaaaaatacaaaaaattagctgggtgtggtggtgcacgcctgtaatcctagctacttgggaggctgaggcaggagaatyacttgaacccaggaggcggagattgcagtgagccgagatcgtgccatttcactctagcctgggcaacaagagcaaaactccgtctcaaaaaaaaaaaaaa

SEQ ID NO: 513242 - DNA, 201 bp, Homo sapiens
tctttttttttttttgatacggagtttcactcttgttgcccaggctagagtgtaatggcgtgatctcggctcactgcaacctctgcctcctgggttcaagygattctcgagcttcatcctcctgagtagcttggattacaggcatgcgccaccacgctcggctaattttgtatttttagtagagacagggttttgccatgt

SEQ ID NO: 513243 - DNA, 201 bp, Homo sapiens
gatcgcttgagcccaggagttcgagaccagtctgggcaatatagcaagaccccgtctgtacaaaaaaaatttaaaaattagctgaacatggtggtgcatgrtgcttatagtcccagctacttgggaggctaaggtcagaggatctcatgagcctgggaggtggaggttgcagtgagccgtgattgtgccactgcactccag

SEQ ID NO: 513244 - DNA, 201 bp, Homo sapiens
ctggaaactataacttttcaaagtgtatacaaataccccatactaatgaacaaccccattactagcagagaaatccattactaacgggatttcccaggaasactaccttggtttttaacatttctttttgttgcttgaaatgggcagcttcaaaccttcatatgcaaagtgccaacatctatagaaataaattctttctta

SEQ ID NO: 513245 - DNA, 201 bp, Homo sapiens
tatttttgtatttttagtagaggcagggtttcaccacattggccaggctggtctcgaactcctgacctcaggtgatccacccgccttaccctcccaaagtkctgggattacaggcgtgagccacagtgcccagccggcacctttaatcctcatagttcacccactagccacccccacattgcttaaactacctgatcctca

SEQ ID NO: 513246 - DNA, 201 bp, Homo sapiens
tgtgttagtttgctaaggataatggtctccagctccaaccatgtccctgtaaatgacatgatctcattcttttctttcttatggctgtatagtagaatgcstattttaaaacagggagatttccttttttcccctgtaccccagaattctcaccttaaccttaaaaacaaacatttcacaatgtctaaataaatatagtga

SEQ ID NO: 513247 - DNA, 201 bp, Homo sapiens
gtggcacgatctcggctcactgcaacctccgcctcccgggttcaagcaattctcctgcctcagcctctcgagtacctgggactacaggtgcacgccaccaygcccagctaatttttttttgtattttgttgtagagacgggggtttcactgtgttagccaggatggtcttgatctcctgacctcgtgatccgcccgcctcg

SEQ ID NO: 513248 - DNA, 201 bp, Homo sapiens
atgcttcaaaatctgaaaccttttgagtgctgacatgagccacaaaattctacacctgacctcatgtcatgagtggcagtcaaaactttgtttcagccacrgaatcattaaaaaaattgtataaaattaccttcaggctatgtatataggaatacatgaaacataagtaaatttcatgtttggacctggatcccatcccca

SEQ ID NO: 513249 - DNA, 201 bp, Homo sapiens
tccgcctcagccccccaagtagctgggaccacaggtgtgcaccaccatgcccagctaatttttgtactttttgtagagacgaggtttcaccattttgcccrggctggtttggaactcctgagctcaagggatccacctgccttggcctcctaaagtgttgggattacagacgtgagccaccatgccccacctggcatttgc

SEQ ID NO: 513250 - DNA, 201 bp, Homo sapiens
accagcctggccaacacggtgaaaccctgtctctattaaaaacacaaaaattagcagggcgcaaaaattaggggtgcgcgcctgtagtcccagctactcgrgaggctgaggcaggagaatcgcttggacctgggaggcagagcttacagtgagccaagatcatgccattgcactccagcctgggcaacaagagcaaaactc

SEQ ID NO: 513251 - DNA, 201 bp, Homo sapiens
gctgttcgaatagattcattggagagtctaaggcagccctccagaccaagctgtaaagcagataagatagaaataatcactctggtaccacagtagacagrccttgtaggtactgggccgctcacagcttaatccgacttagaaagcatttttgcctctgaccttctagttgaaacaaaattagttaccagtagacttagg

SEQ ID NO: 513252 - DNA, 201 bp, Homo sapiens
acagaattctagacccctgcttcccttgcagtatatctattctctctagccacactatgcagctccttgagagcaggcaggaccctgccttataattcttyaattccccacaacactttgctagggaatttatgtggtgcaaaccacctcccttaaaaaaaatccttggatttatttattagtatcatcaatgtcactgtt

SEQ ID NO: 513253 - DNA, 201 bp, Homo sapiens
agaggcagctgttcgaatagattcattggagagtctaaggcagccctccagaccaagctgtaaagcagataagatagaaataatcactctggtaccacagyagacaggccttgtaggtactgggccgctcacagcttaatccgacttagaaagcatttttgcctctgaccttctagttgaaacaaaattagttaccagtag

SEQ ID NO: 513254 - DNA, 201 bp, Homo sapiens
tggttaaactcctgaatttaaaaatactcataaaatctactatttcccatgggcttatgatatttcttatatagaacataagactggtattatatgtcatmttttctctttcttggcttattgaaaagattttatatagtaaaagcatcataaaaaatgtttgatatgtcttaccctatatagttcagctgagggaaaata

SEQ ID NO: 513255 - DNA, 201 bp, Homo sapiens
aatttgtgttgtatatgttcatacaaataaaaataaaataaaacagattgaatacatatggagtacactttattatttatttattttacttatttatttatttttttcgagagggagtcttgctctgtcacccaggctggagttcagtgtcacaatctctgctcactgcaaactccgcctcccggtttcaagtaattttcc

SEQ ID NO: 513256 - DNA, 201 bp, Homo sapiens
ttgtatatgttcatacaaataaaaataaaataaaacagattgaatacatatggagtacactttattatttatttattttacttatttatttatttttttcragagggagtcttgctctgtcacccaggctggagttcagtgtcacaatctctgctcactgcaaactccgcctcccggtttcaagtaattttcccacctcag

SEQ ID NO: 513257 - DNA, 201 bp, Homo sapiens
gagagggagtcttgctctgtcacccaggctggagttcagtgtcacaatctctgctcactgcaaactccgcctcccggtttcaagtaattttcccacctcakcctcctgagtagctgggattacaggtgtgcaccaccatgcccggctaatttttgtatttttactagagaccaggttttgctgtgttggccgggttggtct

SEQ ID NO: 513258 - DNA, 201 bp, Homo sapiens
ttggtcttgaactcctgacctcaggtgatccacctgccttggccttccaaagtgctaggattacaggtgtgaaccaccaacgcctggccttattatttttagagttttgtgtggtttttcttttttaaagttttcttcttgaattcaatgacaacaagcaatgtttgaaattatcttttgattttaaatagctactgtttc

SEQ ID NO: 513259 - DNA, 201 bp, Homo sapiens
tggtcttgaactcctgacctcaggtgatccacctgccttggccttccaaagtgctaggattacaggtgtgaaccaccaacgcctggccttattatttttagagttttgtgtggtttttcttttttaaagttttcttcttgaattcaatgacaacaagcaatgtttgaaattatcttttgattttaaatagctactgtttct

SEQ ID NO: 513260 - DNA, 201 bp, Homo sapiens
ttaaaatgaaagaaacacgatatgtacaagttaaaacaatagagctgtttatgatcatttacttttttattgtgacaaagtatatattacataaaatttawcattttaactttttttttttttttttgagacagagtcttgctttgttgcccacgctggagtgcagtggcacgatctcagctctctgcaagccctgcctcc

SEQ ID NO: 513261 - DNA, 201 bp, Homo sapiens
acgatctcagctctctgcaagccctgcctccccggttctcaccattctcctgcctcagcctcccgagtagctgggactacaggcgcccgccaccacgcccrgctaatttttttttttttgagacagagtctccctctgtcgcccaggctggagtgcagtggcgcgatctcagtcactgcaagctccgcctcctgggttcac

SEQ ID NO: 513262 - DNA, 201 bp, Homo sapiens
tcagctctctgcaagccctgcctccccggttctcaccattctcctgcctcagcctcccgagtagctgggactacaggcgcccgccaccacgcccggctaatttttttttttttgagacagagtctccctctgtcgcccaggctggagtgcagtggcgcgatctcagtcactgcaagctccgcctcctgggttcacgccatt

SEQ ID NO: 513263 - DNA, 201 bp, Homo sapiens
gctaatttttttttttttgagacagagtctccctctgtcgcccaggctggagtgcagtggcgcgatctcagtcactgcaagctccgcctcctgggttcacrccattatcctgcctcagcctcctgagtagctgggactacaggcgcccaccaccatgcccggctacttttgtttttgtatttttagtagagacggggtttc

SEQ ID NO: 513264 - DNA, 201 bp, Homo sapiens
atcacgccattggacacactgggaaactgactctggtcaaggttccatctatcacctgggttctgtaaacttctactctgagtggtggactatgctggatktgttgttgttgcgtttgtttcatttcatcttactttattttgtgtctccatggattagcatcagttcagagccaaaatcaattagcccccccctccacca

SEQ ID NO: 513265 - DNA, 201 bp, Homo sapiens
atactaaatatctctttcaattacactttgaataataaggacgaaagacatgtctagatgaaatctttcagctgtaaacataatacgatcaggttacaaaygcaatacattagggactatggcagttaagttcgcatataaataaagatgaacttaattttagacacaactcatccgagggcattattacagacaatggaa

SEQ ID NO: 513266 - DNA, 201 bp, Homo sapiens
aaagatgatactgcaatatacgtattttacatgtcttaggtctctcttatgctatcgaggtaaagccagccatctgagacacgttttctgtttcttttttyttttttttaaatttaaatgaactgtagccatttgatggcagaagtttatctgtgactcagagaaaccacaaaatgttttatcacatcagggtctgtgctt

SEQ ID NO: 513267 - DNA, 201 bp, Homo sapiens
aggccctgcctatagtcagataagggaagctcagaagaggcttctttctgcatctataacttgaatgtcttaaaagaatcattgtaccatagggtgggttrtgattccctttaacttccacctcattctgtttattagtcaagggaagtcgcaaaaccagacggaattcaagggaaggaaaccgactccgcctctgatggc

SEQ ID NO: 513268 - DNA, 201 bp, Homo sapiens
tcaacttcaaaatgtttgaaaactacttatgagttcaacatagcattgtagtcattaaaaaatactcagggcagggtgtggtggctcacgcctgtaatccyagcactttgggaggccaaggtgggtgaattacctgaggtcgggagtttgagaccagcctaaccaactatggagaaaccccatctctactaaaaatacaaa

SEQ ID NO: 513269 - DNA, 201 bp, Homo sapiens
acatagcattgtagtcattaaaaaatactcagggcagggtgtggtggctcacgcctgtaatcctagcactttgggaggccaaggtgggtgaattacctgargtcgggagtttgagaccagcctaaccaactatggagaaaccccatctctactaaaaatacaaaattagccgggcatgcaggctcatgcctgtaatcccag

SEQ ID NO: 513270 - DNA, 201 bp, Homo sapiens
aatactcagggcagggtgtggtggctcacgcctgtaatcctagcactttgggaggccaaggtgggtgaattacctgaggtcgggagtttgagaccagcctraccaactatggagaaaccccatctctactaaaaatacaaaattagccgggcatgcaggctcatgcctgtaatcccagctactcggaaggctgaggcagga

SEQ ID NO: 513271 - DNA, 201 bp, Homo sapiens
tgggaggccaaggtgggtgaattacctgaggtcgggagtttgagaccagcctaaccaactatggagaaaccccatctctactaaaaatacaaaattagccrggcatgcaggctcatgcctgtaatcccagctactcggaaggctgaggcaggagaatcgcttgaacccgggaggtggaggttgtggtgagccaagatcgtg

SEQ ID NO: 513272 - DNA, 201 bp, Homo sapiens
gaagtgattcttgtgccttagcctcccaagtagctggaattacaggtctgtgcgaaaatgcccagctaatttatatatttattatatatatatatatatattttttttttttttttgagacagagtcttgctctattgtccaggctggagtgcagtggcgtgatcttggctcactgcaacctccgcctctcgggttcaggc

SEQ ID NO: 513273 - DNA, 201 bp, Homo sapiens
aagtgattcttgtgccttagcctcccaagtagctggaattacaggtctgtgcgaaaatgcccagctaatttatatatttattatatatatatatatatatwttttttttttttttgagacagagtcttgctctattgtccaggctggagtgcagtggcgtgatcttggctcactgcaacctccgcctctcgggttcaggca

SEQ ID NO: 513274 - DNA, 201 bp, Homo sapiens
agtgattcttgtgccttagcctcccaagtagctggaattacaggtctgtgcgaaaatgcccagctaatttatatatttattatatatatatatatatattwtttttttttttttgagacagagtcttgctctattgtccaggctggagtgcagtggcgtgatcttggctcactgcaacctccgcctctcgggttcaggcaa

SEQ ID NO: 513275 - DNA, 201 bp, Homo sapiens
ttcgggggcggaaaacacgccaagcagcgcagccctcccctcagttgctaacctttccctttcccacctcgcctctccctctccgccgcggcctgcagccgggggggggggcgtttgtttatgtgacgtccgccgtagtaagcagtccccgcccccgtttccctctggccgccgcgtttcccgcgccgcggagcttctccc

SEQ ID NO: 513276 - DNA, 201 bp, Homo sapiens
tattaataaacctatttttcccaagttttggttgaccaaattacaataccaaaaggcaacctatattagtacatttctgtagtaaatagaaagagcatgtyaggaaaatgaaaaactttggacctatttttcccaagttttggttgaccaaattacaataccaaaaggcaacctatattagtacatttctgtattaaatag

SEQ ID NO: 513277 - DNA, 201 bp, Homo sapiens
attaaaagcaaataaatattctttctgacactttcagttttttttttcatgtactggaattcctcttaatctagaattgggagacctagttttgtttctctttttttttttttcgctctaccaaaattggaggggcctggtgttttacactatctaaagcccagagacttgaatttgtaattttatttttaacctatgcca

SEQ ID NO: 513278 - DNA, 201 bp, Homo sapiens
ctttaacaaataaaaacaagactagatagcaacatggaaaagcttgtgatataatgttcatggcttaaacaatgtaatgataacaatataaagtatatatycatgtaaacaaaaaccagtcatacaaaaatgaaaacagttattgttgttaacattgattattaatttttaaccttattgagatgttatctttttaattaa

SEQ ID NO: 513279 - DNA, 201 bp, Homo sapiens
aaattgtcttgcaggagatccaagaaaaatacatataggaaacaaaaaagttttactttaattaccttttaacgcctcaccagtgacaacattatttataytggcatttaattttttaaatatgtaaatcaatctttttgctttttttttttttagtttccacatcaggatacaaccctatttggaaactgttctggatac

SEQ ID NO: 513280 - DNA, 201 bp, Homo sapiens
cagcagttctggtaagtcaatctaaaagtacataattctaaaagaattatactgcaagtagttacccatcaatttcgcttgtatcatacacatatactgamgaaacttcaatgttattagaacaatcttattttgatttttaacaccttgcagaaaacaacatgactttaagagataagcataggaccggtgttattttta

SEQ ID NO: 513281 - DNA, 201 bp, Homo sapiens
ctggatttgttgttgttgcgtttgtttcatttcatcttactttattttgtgtctccatggattagcatcagttcagagccaaaatcaattagcccccccctccaccaaaaaaaatatttacctgtctccagtttatagtcacactgggaaatggccctacttatttctggggaatgttttactgaagatccacaaaacaca

SEQ ID NO: 513282 - DNA, 201 bp, Homo sapiens
accaccacctactgggttcaaacgattctcctgcctcagcctcctgagtagttgggattacaggcctgtgccaccacactcggctaattttgtattttggkttttttttttgttttttttttgtgagacggagtctcgctctgtcacccagactggagtgcagtggcgtgatctcggcttactgcaagctccgcctcccag

SEQ ID NO: 513283 - DNA, 201 bp, Homo sapiens
attttggtttttttttttgttttttttttgtgagacggagtctcgctctgtcacccagactggagtgcagtggcgtgatctcggcttactgcaagctccgmctcccaggttcacaccattctcctgcctcagcctcccaagtagctgggactacaggcgcccgccaccacgcccggctaatttttgtgtattgtttttagt

SEQ ID NO: 513284 - DNA, 201 bp, Homo sapiens
cgggaggccgaggcaggagaatcgcttcaacccaggaggcagaggttgcagggagctgagattgcgccactgtactacggcctgggtgacagagcgagackccatctcaaattaaaaaacaacaacaaacaaaacaaaacagcacagccgggcgcagtggctcacatctctaatcccagcactttgggaggccaaggtgag

SEQ ID NO: 513285 - DNA, 201 bp, Homo sapiens
agggagctgagattgcgccactgtactacggcctgggtgacagagcgagactccatctcaaattaaaaaacaacaacaaacaaaacaaaacagcacagccrggcgcagtggctcacatctctaatcccagcactttgggaggccaaggtgagcagatgacttgatgccagcatgtccagaattggttccttctggtgggtt

SEQ ID NO: 513286 - DNA, 201 bp, Homo sapiens
tgtgtcaggagtttgttccttcagatatgtccagagtttctaccttccagtgagttcatggtcttgctgacttcaagaatgaagctgccgaccttcatggygttacagctcttaaaggtggtgcagacccaaagagtcagcagcagcaagatttattgtaaagagcaaaagaaaaaagcttccacagcatggaaggtgacc

SEQ ID NO: 513287 - DNA, 201 bp, Homo sapiens
ttttaccgagtgctgattggtgcgtttacaatcctttagctagacacagagcgctgattggtacatttttacagagtgctgattggtgcatttacaatcckttagctagacacagagtactgattggtatgtttttacagagtgctgattggtgcatttacaatcctttagctagacacagagcgctgattggtgcgttta

SEQ ID NO: 513288 - DNA, 201 bp, Homo sapiens
ttatcctgatttttcactaaacatttgaaatatgtacttttcattattatatatccttttcattactacatacattttagaggctgtataatattacattytgggtatgccttaatttgcttaacattcttttgtcatttataatttttcactgttaaaaccatgctgtcaaataccacatgttcacatttgtaagtggaa

SEQ ID NO: 513289 - DNA, 201 bp, Homo sapiens
ttacagagtgctgattggtgcatttacaatcctttagctagacacagagcgctgattggtgcgtttacaatcccctagctagacagaaaagttctccaagkccccacccaacccaggaagtccagctggcttcagctctcaccaggagttcaagaccagcctgggcaacatggcaagacctggctctacaaaatttaaaaa

SEQ ID NO: 513290 - DNA, 201 bp, Homo sapiens
tcccctagctagacagaaaagttctccaagtccccacccaacccaggaagtccagctggcttcagctctcaccaggagttcaagaccagcctgggcaacakggcaagacctggctctacaaaatttaaaaaattagcaaggcatagtggtgcatgtttgtggtcttagctacttaggaggctgagagaggaggatcgcttg

SEQ ID NO: 513291 - DNA, 201 bp, Homo sapiens
ccctagctagacagaaaagttctccaagtccccacccaacccaggaagtccagctggcttcagctctcaccaggagttcaagaccagcctgggcaacatgkcaagacctggctctacaaaatttaaaaaattagcaaggcatagtggtgcatgtttgtggtcttagctacttaggaggctgagagaggaggatcgcttgag

SEQ ID NO: 513292 - DNA, 201 bp, Homo sapiens
aaatcagccagtcgtggtggcacacacctgtaatcttagttcctcaggaggctgaggcaggagaattgcttgaacctcagaggcggaggttgcaatgagckgagattgtaccactgcactccagcctggcgacagagtgagactctctcaggaaaaaaaaaaaaaaaaagatcgtagattagattaaaatccagcgatgct

SEQ ID NO: 513293 - DNA, 201 bp, Homo sapiens
gaatgcagtggtacaatctcagctcaccgcaacctccatctcctgggttcaagtgattctcctgcctcagcttcccgagtagctgggattacaggcatgcrccaccacacctggctaattttgtatttttagtagagaagggatttctccatattggtcaagctggtctcgaactcctgacctcaggtgatccgcctgcct

SEQ ID NO: 513294 - DNA, 201 bp, Homo sapiens
aattttcctgcctcagcctcccaagtagctgggattacaggcatgtgccaccatgaccggctaattttgtatttttagtagagatggggtttcaccgtgtkggtcaggctggtctcgaactcctgacctcaggtgatccgcccgcctcggtctcccaaagtgctgggattacaggcgtgagccaccgcacccggccaagga

SEQ ID NO: 513295 - DNA, 201 bp, Homo sapiens
ttacaggcatgtgccaccatgcctggctaattttgtatttttagtagagatggggtttctccatgttggtcaggctggtttcgaactcctgacctcaggtsatccacccgcctcggcctcccaaagtgctggggttacaggcgtgagctactgcgcccagctgaaaagtatttcttagaggtttaaatgagtgatgtcaaa

SEQ ID NO: 513296 - DNA, 201 bp, Homo sapiens
caaccaggctggagtgcagtgcagtggcacggatctcagctcactgcaacctccccctactgggttcaagcgattctcctgcctcagcctcccgagtagcygggattacaggtgcatgccaccacacccagctaatttttgtatttttagtagagacagagtttcgccatgttggccaggctggtcttgaactcctgacct

SEQ ID NO: 513297 - DNA, 201 bp, Homo sapiens
tactttaaagtactttaaaccactttgtttgcatttatttaatctttttttttttttttttgagacagagtttcactctgtagcccagactggagtgcagkggtgttatcttggctcactgcaatgtccgcctcctgggctcaggcaattctcccacctcagccgcccaaatagctgggtctacaggcacgcaccaccatg

SEQ ID NO: 513298 - DNA, 201 bp, Homo sapiens
ctaatcttctctgttaccgttccagtgttccaattttagtacatgtacggccgaatcaggcactttgttttttaatggtgtttggaagtgacagttttaattttttttttttttgaggcggagtttcactctgttgcccaggctggagtgcaatggcatgatctccactcattgcaacctctgcctcccaggttcaaacaa

SEQ ID NO: 513299 - DNA, 201 bp, Homo sapiens
gccagtgtctagcttactaaaaaaagagttgtatataatatttaagatgctgagtatttcataggaaagctgaatgctgctgtaaagtgctctttaagtcttttttttttttaatccccttctaatgaatgaaactaggggaatttcaggggacagagatgggatttgttgtatgataaactgtatgtagtttttagtctt

SEQ ID NO: 513300 - DNA, 201 bp, Homo sapiens
acacatatactgaagaaacttcaatgttattagaacaatcttattttgatttttaacaccttgcagaaaacaacatgactttaagagataagcataggacyggtgttatttttattttgagtgccttagagtacatctgcttttcagattataagtgactgtatcagggtgcctatgaatcaatcatcttttccttcccag

SEQ ID NO: 513301 - DNA, 201 bp, Homo sapiens
actgctacgagtattgagacttctggtttgcaaactagatctcatctttctagactgaaaggttatgatctcaacttttcgtataagtacatcttgatagmtcataaaaagcaaattatcaatgaaaaccaacaagagttcttaatatatgttttgttataaggagaattttattcccgctttttaattaatttctgcatt

SEQ ID NO: 513302 - DNA, 201 bp, Homo sapiens
atactttttttttttttcctttccttttcttttttttttttttttttttgagacagagtctcactgtgtagcccaggctagagagcagtggctcaatctcrgctcactgcaacctctgcctcctgggttcaagggattgtcccacctcagcctcccgagtagctgggattacaggcatgtgccaccatgcctggctaattt

SEQ ID NO: 513303 - DNA, 201 bp, Homo sapiens
tttttaacaccttgcagaaaacaacatgactttaagagataagcataggaccggtgttatttttattttgagtgccttagagtacatctgcttttcagatyataagtgactgtatcagggtgcctatgaatcaatcatcttttccttcccagagctcaaccccaaatcaggtttaaaacctaaggctttaactccctaaat

SEQ ID NO: 513304 - DNA, 201 bp, Homo sapiens
tctgtggaagagcctccctgggctcctcttgcgtgtgagtcaccttaatagctttcaaagttgtggtttatagacttcacgatatgtccagagtggaggtkccattgtttattatttgtggtttttgcatattgttctgtaaacttgggacaggaaagttctgaaatgcagtgctttaaagcattgcccaagaaactcaat

SEQ ID NO: 513305 - DNA, 201 bp, Homo sapiens
tcaggtttaaaacctaaggctttaactccctaaataatgctgagtactttaaccatccccttaaaaataagcatttagtccccaaaataaacacgcactayatttgatagcttttatctttttttaagacagggtctcactctgtcacccacactggagtgcagtggcacaatcagggcttactgcaggctctgcctctca

SEQ ID NO: 513306 - DNA, 201 bp, Homo sapiens
aatgtttgtttatgcaatttctcacccaggtgctaacagtcaggctccttcctggctggaagctcccccagagaggggatttatggcagcttcattctccmaaggccctgcctatagtcagataagggaagctcagaagaggcttctttctgcatctataacttgaatgtcttaaaagaatcattgtaccatagggtgggt

SEQ ID NO: 513307 - DNA, 201 bp, Homo sapiens
atactataaacacctctatgcaaataaactataaaatctagaagaaattgataaattcctggacacatacaccctcccaagactacaccaggaataagtcraattcctgaatagaccaataataagttctgaaattgaggcagtaattaatagactaccaaccaaaaaaagcccaggaccagacagagtcacagctgaact

SEQ ID NO: 513308 - DNA, 201 bp, Homo sapiens
aggaagtccagctggcttcagctctcaccaggagttcaagaccagcctgggcaacatggcaagacctggctctacaaaatttaaaaaattagcaaggcatrgtggtgcatgtttgtggtcttagctacttaggaggctgagagaggaggatcgcttgagtctgggaggtcgaggttgcagtgtgctgtgttcatgccactg

SEQ ID NO: 513309 - DNA, 201 bp, Homo sapiens
accaggagttcaagaccagcctgggcaacatggcaagacctggctctacaaaatttaaaaaattagcaaggcatagtggtgcatgtttgtggtcttagctrcttaggaggctgagagaggaggatcgcttgagtctgggaggtcgaggttgcagtgtgctgtgttcatgccactgtactccagctggggcaacagagtgag

SEQ ID NO: 513310 - DNA, 201 bp, Homo sapiens
gggtctcgctctgtcaccaggctggagtgcagtggcccaatgtcagctcactgtaacctccgcctcctgggttcaagtgattttcctgtctcagcctcccragtagctgggacttcaggcacgcaccaccatgcccagttaatttttgtatttttagtagagatgggatttcaccatgttggccaggatggtctcgatctc

SEQ ID NO: 513311 - DNA, 201 bp, Homo sapiens
accatgttggccaggatggtctcgatctcctgacctcgtgatctgcctgccttggcctcccaaagtgctaggattactggcgtgagccactgcgcctggcrctatagcttgtttttataaataaagttttattggaacatagctgcatccgttagtttacatactccctatagctgctttcttactacaacaaagtgttga

SEQ ID NO: 513312 - DNA, 201 bp, Homo sapiens
aggccgggcacggtggtgcatgcctgtaatcccagaactttgggaggccgaggtgggtggatcacctaaggtcaggggttcaagaccagcctggccaacayggtgaaacccggcctctactaaaaatataaaaattagccaggcatggtggcactcgcttgtaatcccagctactcgggaggctgaggcaggagaattgct

SEQ ID NO: 513313 - DNA, 201 bp, Homo sapiens
agcagaactgggagggatctcgtagtttggcacactataaaccctaaactgggccaagagcagtggctcacacctgtaatcccagcattttgggaggccarggcagatggatcacctgaggtcaggagtttgagaccagcctggcaaacatggtgaaaccctgtctctactaaaaatacaaaaaattagctgggcctggtg

SEQ ID NO: 513314 - DNA, 201 bp, Homo sapiens
actgggagggatctcgtagtttggcacactataaaccctaaactgggccaagagcagtggctcacacctgtaatcccagcattttgggaggccaaggcagrtggatcacctgaggtcaggagtttgagaccagcctggcaaacatggtgaaaccctgtctctactaaaaatacaaaaaattagctgggcctggtggcacgt

SEQ ID NO: 513315 - DNA, 201 bp, Homo sapiens
aaactgggccaagagcagtggctcacacctgtaatcccagcattttgggaggccaaggcagatggatcacctgaggtcaggagtttgagaccagcctggcmaacatggtgaaaccctgtctctactaaaaatacaaaaaattagctgggcctggtggcacgtgcctgtaatcccagctacttggaacgttgaggcaggaga

SEQ ID NO: 513316 - DNA, 201 bp, Homo sapiens
cggagaatgcttgcagtttcccttttcatgcagcagaatgataacagggacaatcttttgattgtcttattatgttttggcttttgttgcttttaaaattyccagtttgtgttgctgtaagggaggtaacatttctcaccctttctgtaaatgagtttcctgccaaaacctacctgtgagtttcaaatgtttagaccaatc

SEQ ID NO: 513317 - DNA, 201 bp, Homo sapiens
gcaacaagagcaaaactctgtctaagacaaacaaacaaacaaacaaaacctaaactgtagattctaagatttatgtggttttgaaagatacaaagctattsgggacctttaggggtccatctgggatggtttgtcatatccagagctgcatttgagggctggttcatttgcaagttcccaggaaggcagagataacatgaa

SEQ ID NO: 513318 - DNA, 201 bp, Homo sapiens
ttttctcccatacatccgacaggctttaaaagaggccaaataccaaaaaactaaagagacattatacatcacccatttgtgatattctggtcttataaatrtatcatttcaaccagaagagcctcatttgaaatgcaacactacccacgtatttgatatacaccactctttcagactatttgtaggtgagttcaatttttt

SEQ ID NO: 513319 - DNA, 201 bp, Homo sapiens
ttaccatctattctctctgaagcctgctatctgaggcttcatctatataacaagaatcacagcccacccccccttatctcaacccaagcatttctttctaytgactttgtcttttttttttttttttttttttttgagatggagtgtcgctctgtcacccaggctggagtgcagtggtgcaatcttggttcactgcaagct

SEQ ID NO: 513320 - DNA, 201 bp, Homo sapiens
atttaaatgtcaatatgcacctaaaaataaggacttgacacacagaaaaggagtgtatattacatttaaatttgtaagtggttacttgctacccatagtgyctcaagaatcagataaaaaagaccgagttacttaaacaatatgtatgttcttaagagtgactgataggaaatcaaagcacgttcattgttttctcccata

SEQ ID NO: 513321 - DNA, 201 bp, Homo sapiens
aaagaaaacaagtttggctgggcgcagtggctcatgcctgtaatcccagcactctgggaggccaaggcaggcggatcacctgaagtcaggagttcaggacyagcctggccaacatggtgaaaccccgtctctactaaaaatacaaaaaactagctgggcgtggtggtacacacttgtaatcccagctactcgagaggctga

SEQ ID NO: 513322 - DNA, 201 bp, Homo sapiens
ttttttttttcctttccttttcttttttttttttttttttttgagacagagtctcactgtgtagcccaggctagagagcagtggctcaatctcagctcacygcaacctctgcctcctgggttcaagggattgtcccacctcagcctcccgagtagctgggattacaggcatgtgccaccatgcctggctaatttttgtatt

SEQ ID NO: 513323 - DNA, 201 bp, Homo sapiens
ttttttgagacagagtctcactgtgtagcccaggctagagagcagtggctcaatctcagctcactgcaacctctgcctcctgggttcaagggattgtcccmcctcagcctcccgagtagctgggattacaggcatgtgccaccatgcctggctaatttttgtattttttggtagagacagggtttcgccatgtttgccagg

SEQ ID NO: 513324 - DNA, 201 bp, Homo sapiens
cgcgaacccgggaggcggagcttgcagcgagccaagattgagccactgcactccagcctgggctacagagtgagattccgtctcaaaaaaaaaaaaaaaagaaaaagaaaaagaaaccccacagattaataacaaatgacaataaaaatctttataaatgggtcaaataagtatttcacaaaagaggccattcacacagcc

SEQ ID NO: 513325 - DNA, 201 bp, Homo sapiens
ttaagaggcagattatgcagaaatttccaggaaaaagtggtaacttctgggttgtcaggccattgccatggaaagaggcattaacttcgggtgtcgccacrgcaatggtaaactgacatggcacactggtaggcacgtctaatggaaagcagccaccctgcatccctgttttagtaagttctcaatttggtccggtgtctg

SEQ ID NO: 513326 - DNA, 201 bp, Homo sapiens
cctgagtagctgggactacaagtgtgtaccaccagacctggctaattatgttttttattttgtatagagacaaggtctcactttgttgcccaggctggtcrtgaactcctgagcgcaagtgatctgcccacctcagccttccaaggtgctaggtaggattacagacatgagcccccgtgcctggccctgtctgcacttttt

SEQ ID NO: 513327 - DNA, 201 bp, Homo sapiens
aatttatgtcttcttttgatcagtttggctagaagtttctcaattgtactgatcatttcaaacaactggtttttggtttaattgatttttcttgttttttwttttatttttatgtcattggtatccactgatctttatcaattaaagattgattttaatttagtcttctttttatactttcttcatgaggatgttggggtc

SEQ ID NO: 513328 - DNA, 201 bp, Homo sapiens
tgggagaatcacttgaacccgggaggcagaggttgcagtgagccaagatcacaccactgccctccagcctgggtgacaggttgagactgtctctaaataartaagaagtagtagcagtagaggattcctaaaatcctccttatatctgtagatttctcttcatctgagtaactctttcaatttgaggaattcttcatgaaa

SEQ ID NO: 513329 - DNA, 201 bp, Homo sapiens
atgattgtatgactttaattcttttaaatttatggagacattttatagctcagaaaatatggtctatcttgataaatgttagaatgtgtattctgctgctrttaagtggagtgttctctgaacgtcattgaggtcaactgggttaatagagtttctctatcttagatcacacttttcttctttatttctttgaatcataaa

SEQ ID NO: 513330 - DNA, 201 bp, Homo sapiens
ctacaggcgcccgccaacacgccggattaattttttttgtatttttagtagagacagcgtttcaccgtgttagccaagatggtctcgatctcctgacctcrtgatccacccgcctcggcctcccaaagtgctgggattacaggcgtgagccaccgcgcccagcctaagatacctttttaattaatcacgaatttaagtttg

SEQ ID NO: 513331 - DNA, 201 bp, Homo sapiens
tgagtcaaggggtatgattggtttaaagtaattgttacctgaattgctttcctgaaattttcagtctcaccaactgtgagaatggcattcatttcttcctygtcaacactggtcatcacttttaagtctttattagtttgatagataaaatagatgcattttttccttaattattaggttaaaagtgttttattaactgtt

SEQ ID NO: 513332 - DNA, 201 bp, Homo sapiens
aacctaaggctttaactccctaaataatgctgagtactttaaccatccccttaaaaataagcatttagtccccaaaataaacacgcactatatttgatagyttttatctttttttaagacagggtctcactctgtcacccacactggagtgcagtggcacaatcagggcttactgcaggctctgcctctcaggctcaagtg

SEQ ID NO: 513333 - DNA, 201 bp, Homo sapiens
tgggttatagaacgagacctcatctcaagaaaaataaataaataaataaataataaaaaggcactaatagacttacctcatagagtgagaattaaatgtaytaatacctataaaacacttgggaaagtgcttaaatgtaagtgtttaatgaaatctttgccccatttcatctgtttctttaggactgaatcctaaaagtaa

SEQ ID NO: 513334 - DNA, 201 bp, Homo sapiens
gtactttacatattttaactcattgtattctctgttatattctccttaagggagcaatcttgcttaccaagacaatctgtgccatgcctggcacagaatctttttttttttttaacttttattttaagttctggggtacatgtgccagatgtacaggtttgttacataggtaaacatttgccatggtggtttgctgcacag

SEQ ID NO: 513335 - DNA, 201 bp, Homo sapiens
gctgagtactttaaccatccccttaaaaataagcatttagtccccaaaataaacacgcactatatttgatagcttttatctttttttaagacagggtctcrctctgtcacccacactggagtgcagtggcacaatcagggcttactgcaggctctgcctctcaggctcaagtgatccttccacctcagtgtcctgagtagc

SEQ ID NO: 513336 - DNA, 201 bp, Homo sapiens
ccaccacacctggctaattttgtgtgtgtgtagagacagagtcttgctatgttgtccaggctggtgttgaatgcctaggcgcatgtcagccccctgcctcygcctcccaaagtactaggattataggcaggagccaccacgcccagctttgatggtttctaatataaaagtcaaagaatacatacagaattttagggctaa

SEQ ID NO: 513337 - DNA, 201 bp, Homo sapiens
ttgaaaagtaattcagtggattaaagttgtgactgatatttaattatgctatagaacagttattttgaaaagaaacttgagtattcaccctgtttcattamtttttttggagcatcaggaataaccaaattcttatttacagatatctatgagtctgccacaaggacataataaagcctgaaagagtgaataagtgttaaa

SEQ ID NO: 513338 - DNA, 201 bp, Homo sapiens
attctctctgaagcctgctatctgaggcttcatctatataacaagaatcacagcccacccccccttatctcaacccaagcatttctttctactgactttgkcttttttttttttttttttttttttgagatggagtgtcgctctgtcacccaggctggagtgcagtggtgcaatcttggttcactgcaagctctgcctcct

SEQ ID NO: 513339 - DNA, 201 bp, Homo sapiens
ctggagtgcagtggtgcaatcttggttcactgcaagctctgcctcctgggttcacgccattctcctgcctcagcctcccgagtagctgggactacaggtgyccaccaccacgcctggctaattttttttttttgtatttttagtagagacgggtttcaccatgttagccaggatggtctcgatctcctgaccttgtgatcc

SEQ ID NO: 513340 - DNA, 201 bp, Homo sapiens
ttggttcactgcaagctctgcctcctgggttcacgccattctcctgcctcagcctcccgagtagctgggactacaggtgcccaccaccacgcctggctaattttttttttttgtatttttagtagagacgggtttcaccatgttagccaggatggtctcgatctcctgaccttgtgatccgcccgcctcggcctcccaaag

SEQ ID NO: 513341 - DNA, 201 bp, Homo sapiens
ttcaccatgttagccaggatggtctcgatctcctgaccttgtgatccgcccgcctcggcctcccaaagtgctgggattataggcgtgagccaccacgcccrgcctgactttaagtcttcagcttaactcttttgaccaattccaaatcagaaaatctttgaatccacctatgacctgtattgctccttccttaagctgtcc

SEQ ID NO: 513342 - DNA, 201 bp, Homo sapiens
gagaggtggcaacagcgtttagaccagaatagaggtgtcgctgaggaagcaccttgaaaagaactcgaacatccaattcacctttgcttaattaactactygattcaactgtattcataaataaattcttctaaaattacagattcaataattattaatagttctgaaaatccacaatgcaaaccaatcaggaaaattaag

SEQ ID NO: 513343 - DNA, 201 bp, Homo sapiens
actgctgctccaggtgtcaaaccctgaagggtgagctgacgctaaagactgagtggttattttttccagaagaggagaaagattgaaaatgtggccggccrattctccctgatgatcacacagacagacctgcatgacagtcaaacagacaggcctgcatagcaccccagttacacagacgaatttccccagagctgcctt

SEQ ID NO: 513344 - DNA, 201 bp, Homo sapiens
ccccagagctgccttaacattgagcaaatagttaaacctagggaaattggtgcccagacagcaaagctagaaatgaaacatatggtcagtaggagccttgygtgggcttctccctaacctggagcaaaccaaaataatagagacagtctttcattcctagtgccaggacccgtctcgggtcaacgaaatctgagacagtca

SEQ ID NO: 513345 - DNA, 201 bp, Homo sapiens
ccgtctcgggtcaacgaaatctgagacagtcaaggtaacagaggcagctgttcgaatagattcattggagagtctaaggcagccctccagaccaagctgtraagcagataagatagaaataatcactctggtaccacagtagacaggccttgtaggtactgggccgctcacagcttaatccgacttagaaagcatttttgc

SEQ ID NO: 513346 - DNA, 201 bp, Homo sapiens
cttgtaggtactgggccgctcacagcttaatccgacttagaaagcatttttgcctctgaccttctagttgaaacaaaattagttaccagtagacttaggcraatgctacactgcacacaggcgcataaccccaacctatataaacactaagacaattgttgacactttgagttggcctggtggaattatctccagccttct

SEQ ID NO: 513347 - DNA, 201 bp, Homo sapiens
aaacaatcttgaaaagagaagaaagacttataatacctttcttcaagacttaatataaaactagaagaatcaggagtgtgttattagcttaataataaagrtatcaactaaacagaattaagtccagaaacagaactacatttatacaatcaactgattctcaacaaagctctggcgcaattaagagaggaaaaatagtca

SEQ ID NO: 513348 - DNA, 201 bp, Homo sapiens
aatccgacttagaaagcatttttgcctctgaccttctagttgaaacaaaattagttaccagtagacttaggcgaatgctacactgcacacaggcgcataaycccaacctatataaacactaagacaattgttgacactttgagttggcctggtggaattatctccagccttctgcctgtatctggttacagcaataaattc

SEQ ID NO: 513349 - DNA, 201 bp, Homo sapiens
cttctagttgaaacaaaattagttaccagtagacttaggcgaatgctacactgcacacaggcgcataaccccaacctatataaacactaagacaattgttracactttgagttggcctggtggaattatctccagccttctgcctgtatctggttacagcaataaattcccttctttcctagtctgtctgcttctcgttat

SEQ ID NO: 513350 - DNA, 201 bp, Homo sapiens
tactttacatattttaactcattgtattctctgttatattctccttaagggagcaatcttgcttaccaagacaatctgtgccatgcctggcacagaatctttttttttttttaacttttattttaagttctggggtacatgtgccagatgtacaggtttgttacataggtaaacatttgccatggtggtttgctgcacaga

SEQ ID NO: 513351 - DNA, 201 bp, Homo sapiens
cagcatcctttagctattcttcctgatgctctctctccccctgcccccaccccaacaggccccagtgtgtgttgttccccaccatgtgttcatgtgttttyagcattcagctcccacttataagtgagaacattcagtgtttgattttccgttccagcgttagtttgctgaggataatggctgccagctccatccatgtcc

SEQ ID NO: 513352 - DNA, 201 bp, Homo sapiens
ttttagtagcgacagggttttaccatgttagccaggatggtctcgatctgacctcatgatccacctgcctcagccgtccaaagtgctgggattacaggcgygagccactgtgcccggccgagatggggtcttaaattgcccaggctggcctcaaactcctgggctcaagtgattctcccgcctcggcctcccaaagggctg

SEQ ID NO: 513353 - DNA, 201 bp, Homo sapiens
ggaatgctagtgatttttgcaccttgaatttgtatcctgagactttgctaaagttgcttatcaacttaagaagcttttgggctgagatgatggggttttcyagatataggatcatgtcatctgtcaacaaagataatatgacttcctctcttcctatttgaataccctttatttattttgtttgcctgattgccctactca

SEQ ID NO: 513354 - DNA, 201 bp, Homo sapiens
atgttgaattttattctaggctttttctgagtctattgagataatcatgtgggtttgtctttagctctgtttatgtgatgaattgcatttcttgatttgcrtacattgaaccaaccttgcatctcagggatgaagccaacataattgtggtggataagttttttgatgtgctgctggatttggtttgccagcattttatgg

SEQ ID NO: 513355 - DNA, 201 bp, Homo sapiens
tgagaagagttttaaagcatctctaaatttttttattttattttacttttgcgacagggtcttgctttgtcacccaggctggaattcggtggtacaatcaycactccctgcagcctcaacttcccaggctcaagcaatccttctgcctcagcctcccaagtcgctagaattacaggcacctgccaccacacccagctaatt

SEQ ID NO: 513356 - DNA, 201 bp, Homo sapiens
acattgaaccaaccttgcatctcagggatgaagccaacataattgtggtggataagttttttgatgtgctgctggatttggtttgccagcattttatggargatttttgcttcgatgttcatcacggatgttggcctgaagttttctttttttgttgtatctttgccaggttttggtatcaggatgatgctggccttataa

SEQ ID NO: 513357 - DNA, 201 bp, Homo sapiens
atgcagctgagaagagttttaaagcatctctaaatttttttattttattttacttttgcgacagggtcttgctttgtcacccaggctggaattcggtggtrcaatcatcactccctgcagcctcaacttcccaggctcaagcaatccttctgcctcagcctcccaagtcgctagaattacaggcacctgccaccacaccca

SEQ ID NO: 513358 - DNA, 201 bp, Homo sapiens
cttgcatctcagggatgaagccaacataattgtggtggataagttttttgatgtgctgctggatttggtttgccagcattttatggaggatttttgcttcratgttcatcacggatgttggcctgaagttttctttttttgttgtatctttgccaggttttggtatcaggatgatgctggccttataaaacgagttaggga

SEQ ID NO: 513359 - DNA, 201 bp, Homo sapiens
ctctcttattcaggacatgaggtatttgttattaatacatgtgttagcatgtggtgataactttgaagtattttgtggcttttaactaaattgctcaaatrattatggctgtgtttatttttggcttatgtattctgaagaaagcattttttatgatttcatttatcttatttttataccattgtagtgtttcctgacatt

SEQ ID NO: 513360 - DNA, 201 bp, Homo sapiens
tttttgcttcgatgttcatcacggatgttggcctgaagttttctttttttgttgtatctttgccaggttttggtatcaggatgatgctggccttataaaaygagttagggaggagcccctccttttcaatcttttagaatagtttcattagaagtggtatcagctcttctttgtacctctggtaacattcatctgtaaatt

SEQ ID NO: 513361 - DNA, 201 bp, Homo sapiens
agctcttctttgtacctctggtaacattcatctgtaaatttgtctagtcctggaattttggttggtaggctatttattaatgcctcagtttctgaaatcaktattggtctattcagagactcaacttcttcctggttcagtcttgggagggtgtatgagtccaggaacttatccatttcttcttgattttctagtttatgt

SEQ ID NO: 513362 - DNA, 201 bp, Homo sapiens
cattttctctccttccatatgggtaaatattatgaattatgagtttttacatttataatgtaaatgtttctcaataaccaaataatattgtttacattatygttctataagaagtatcatggtgttcatatccttctgcacttgtgttttcttttctttcttcttctttttaaaaaataaaccatcatgagatctgcttta

SEQ ID NO: 513363 - DNA, 201 bp, Homo sapiens
tctttgttaattttctgtcttgatgatctgtttaatattgtcagtggagtgttaaagtctcccactattattgtgtgggcgcctaagtctctttgtaattmtctaagaacttgctttatgaagctgggtgctcctgtattggttgtatatatatttaggtagttagctcttcttgttgagttgaaccctttaccattatgt

SEQ ID NO: 513364 - DNA, 201 bp, Homo sapiens
aaggaatttttccttggcttaacactcatctattgatttctcacagagttaaagagtctagaaaagcattcacttaaagaagaacaaaagaacttcacccmtaagcataaattccatgtcttttttaagattaatgctgatgtgtttattgtatcagttaatcatctcactaccttgtggcttgaaagtatatttcatagg

SEQ ID NO: 513365 - DNA, 201 bp, Homo sapiens
tagcctctctatctcagtcttataatggtccaccgtctgcaatacctcttctgcggccatagccccggtggatggaggcaggagggggttacggggtgggrgagatggatgcgaagctggcggggaaagggagaaggaaatgggaagggatgggtggaaacggaaaagaaagtgcggccggatgaatgagcagcgcgatgc

SEQ ID NO: 513366 - DNA, 201 bp, Homo sapiens
tgggtggatcacgagatcaggagatcgagaccattctggctaacaaggtgaaaccccgtctctactaaaaatataaaaaaaattagccgggtgtggtggcrggcgcctgtagtcccagctactcgggaggctgaggcaggagaatggcgtgaaccccggaggcggagcttgcagtgagccgagattgcgccactgctctcc

SEQ ID NO: 513367 - DNA, 201 bp, Homo sapiens
tccaaatctgttaatactgtttaaccttataacagttttatttactcttactttatgatcaagtatggttaaataagcctactcctttttgaagaaatctmtttatttagtctagaaatcatttatttagtctttatcctatcaggaagtcacaacttgtccatgtaaagttaacagtttggtttcagaagccaaatttct

SEQ ID NO: 513368 - DNA, 201 bp, Homo sapiens
ttctgttttacagattccagaattaccatcttcctgggtggtcattgctgtggaggtagagggggcaactctgcatttcacaaagagcaaatcaatatatrtaactacagcagagaacctagtctttgtccagacagacaaacccatatacaaaccaggacaaacaggtatgaggaatcaaatgagcaaggggaactttgg

SEQ ID NO: 513369 - DNA, 201 bp, Homo sapiens
catagcccgcttgcaggctctggccaagcgtactggtgtggctgtggaaaaaatggacctctctgcttctctgggtgaaaaagacaaggatttaaaactgmattgtgaagaggcagaactaagggactaccagctcaatgtacagctccgagaggtctttgctaaccgttttacacagatgtttgcagattacgaagcatt

SEQ ID NO: 513370 - DNA, 201 bp, Homo sapiens
attaacttccaccccatgtcttatgttcaaccattgatgtaatcaatattatttttatgtgatgggctacacttttggcactccaccccccaatctagaarcacaaccttctttttaactaacaaccttgtcctgattaagagagtatggacagtagaggttaaatactgtttgaagtctactacagatacctgagggata

SEQ ID NO: 513371 - DNA, 201 bp, Homo sapiens
ttgggtggcttaggtggtgtggtggctccacattgatgtcatactgaggacaggggtcaagtactccatgattagtctttgctcttacttcaggagctgcsagaggctgtgcctttcattttctagtgccgtaggtcattgttggcaatacctgagatgaatttctgtgaaactagggagataagccaaattatgcatgtg

SEQ ID NO: 513372 - DNA, 201 bp, Homo sapiens
cacctttttgtacttttttattctggtaacaatatgcagtttctgaggattctgtggatctccgtcatatttttcatgatctgcaagtgaaggctgaaacsctttatatggaattcttgacctggtaaatttgtgatgaatccaatctatgtaaacgagagacttcacaccttttgtcccagtctgtagttcattttgcct

SEQ ID NO: 513373 - DNA, 201 bp, Homo sapiens
tttgttctgcttgtggttcattatgtttcctgaaatttaagaattaatgtcctttacccattttggaaaattctcaactatctttgtaaatattgcattcrtgtatctttttttaatcctcctgaaattctagtgaaacttttttttgttgttgttgttgttttgtttttgagacagagtctcactttattgcccaggatg

SEQ ID NO: 513374 - DNA, 201 bp, Homo sapiens
tgtaaatgtataatagagtagagtagtatttttatgatcctttatggaacctaatgcccctcatttaactttcatggtagtcctctcttggcgaggttctratatgggtaagtttcagttactatgctttagttaaaacaccagctactcctcaaaccatggtccaaatttcaatgaccaaatatattgattgtgagcaat

SEQ ID NO: 513375 - DNA, 201 bp, Homo sapiens
ctactcctcaaaccatggtccaaatttcaatgaccaaatatattgattgtgagcaatgcataacgcacaatctttgctgccagcacttcagtctataaaakcactacataacatcatgaccaacggccaatgacaccacttcattcaaagtcggccagtgattggttactaggtatctgttattcagttcactcatagaca

SEQ ID NO: 513376 - DNA, 201 bp, Homo sapiens
atatctgtagttttgtcctccttttcattcctaatactgtttgtgcattctctttttcccccaattatttttacctgaagtttgtcaattatattacttcyttttgtttgtttggttttttgagacagggcctcaccctgtcgctcatcctggagtgcagtagcacgatctaggctcactgcagtcttgacctccctgggc

SEQ ID NO: 513377 - DNA, 201 bp, Homo sapiens
ctttgctgccagcacttcagtctataaaagcactacataacatcatgaccaacggccaatgacaccacttcattcaaagtcggccagtgattggttactasgtatctgttattcagttcactcatagacagctaaggatgtagttgccttgtcttgtctcctagtgataaatccatgtgatgttttacaaaaatgaattac

SEQ ID NO: 513378 - DNA, 201 bp, Homo sapiens
cacctctatttttttcttgaataaatttttgttccttgctattttctctaagaaaatttttattaagctttcaatatattagcaaaaagtcttaatatttycttgttttcttgacccctgttatatctgtagttttgtcctccttttcattcctaatactgtttgtgcattctctttttcccccaattatttttacctgaa

SEQ ID NO: 513379 - DNA, 201 bp, Homo sapiens
gttttctgccattgagctatgtgagtttcttacataatatttgagatatttgagcttggaagtggacataaaagaaaaataaagaaaaaagaaaaaaaatkttgagatattaaccccttatcagatatacagattgtaaatatttctcctattccataggttgccttttcattttgtcgattgtttcctttgttgtgcaga

SEQ ID NO: 513380 - DNA, 201 bp, Homo sapiens
actgatcatgtgccaggacactcttatcatcaacaggcatgcggcaactggagggcagtggttaagacagcaggtcagcaacagagataagccaagacagmaaaaagctggggaagaatccttctgcccacaggagcttttggaattttttttgttttttagacggcgtcttgttttgttgcccaggctggagtgcaatgg

SEQ ID NO: 513381 - DNA, 201 bp, Homo sapiens
tcatcaacaggcatgcggcaactggagggcagtggttaagacagcaggtcagcaacagagataagccaagacagcaaaaagctggggaagaatccttctgyccacaggagcttttggaattttttttgttttttagacggcgtcttgttttgttgcccaggctggagtgcaatggagcaatctcggctcactgcaacctct

SEQ ID NO: 513382 - DNA, 201 bp, Homo sapiens
tttcaggtacttgatcttcatttatatcatctttaatgtgaggcaacctgaaatctaaccaattcctcaagatgctttacttcaaacccattctccctctsttctccttccctctctactccctttcttatgtgtggtttcaggtcagtgtgcagctggaagcctctcccgccttcctagctgtcccagtggagaaggaac

SEQ ID NO: 513383 - DNA, 201 bp, Homo sapiens
aggctgcctgcttctcctgcctcctcctctttggcttctcctcctcagctcctttcttcttctctgagggtggcacaggcacaaagagagaaaacagagargacagcaactgtccacgggcccgagagggggttgtgtaatgttgagacccacttccacagggtggggtctataagaccctcccaagtactgcctactgtg

SEQ ID NO: 513384 - DNA, 201 bp, Homo sapiens
agctctccttccccaaccagcactcaagggctgccgcatcccctcccgggacctcatccctgcaggtcccagcctcgctgctcactgtggaaggcggcacrctcctcccaaagccacacgctctccatcagatccatttgcagccattgaaccatgctgccaatggcaacgatcaggtcctttcccaggtgagtaataaat

SEQ ID NO: 513385 - DNA, 201 bp, Homo sapiens
ttttgtagagatggcattttgtcatgttgcccaggctggtcttgaacacctgaactctagtgatctgcctgccttggcctcccaaagtgctgggattacargtgtgagccaccatgcctggctgaaagtttttaaattaactgtcagcaatatattaagttctcctggccaggcatggtggctcacacttgtaatccgaag

SEQ ID NO: 513386 - DNA, 201 bp, Homo sapiens
cctaccgtatggccctaaaatgttttaacttcacacacctggaaagcaccacagccccaagagaaaagcttttccgcactgctgttaagccagggccacayactgcagtgctgcggtgctccaccagctggaggatggcctggcccataatacccgcattcccaccttgctctggccctgtgtcccctccaacgtgcatcc

SEQ ID NO: 513387 - DNA, 201 bp, Homo sapiens
ccattgcttcacaaaccagacaagtttccttctaaacgccagcgatcacaacagaatattctcatgtgattgtctgatctaaaaataaaacaaaagaataktctcttgtgattgtctgatctaaaaataaataaataaaaggagaaaacattccaaatgtgcagccaccataaattccagccttgtagagaagcggatgat

SEQ ID NO: 513388 - DNA, 201 bp, Homo sapiens
  misc_feature (1)...(201): n = A,T,C or G
tttcatggaaagtaagagtgaaaaactactcactcacaaccatgagaatggcacaaagccattcatgagagatccacccccaggacccaaacacctcaccnccaacattggggccaacaaaccatgtccaaaccgtagcaccaggccacatacattttttcttggatgactacaaaatcaggggttccccaacaccatccc

SEQ ID NO: 513389 - DNA, 201 bp, Homo sapiens
cagactccacaggtttaagagttcattctcacaagactgtcctcacttctgatgccagccacaaatgaggtatcaggtgtcttggtttatttgtgttactrtaaaatacctgaggctggttaatttataaagaaaagaagtttggcctggtgcagtggcttacacctgtaatcccagcactctgggaagctgagacaggca

SEQ ID NO: 513390 - DNA, 201 bp, Homo sapiens
acaggtttccatgagcctgggctgttataacaaatctcagtttttctgacaccaagtgagagagtctttcctccccaacacctgtcaatttgtgataccarctggatgcccaacagttcaattcattcctaactgaatgtcagactccacaggtttaagagttcattctcacaagactgtcctcacttctgatgccagcca

SEQ ID NO: 513391 - DNA, 201 bp, Homo sapiens
aacacctcaggcatgttgctttccttccttatacctgtttcctcactgcaaagaaggcttcatactgaatgtaatatatcattttaagaaatgactccggrgtatgaaacatagaaatacacacaatgaaaatcttcaagaaagtaagatgcaactttataatctactaacatgtcagaatttacccactggggactacac

SEQ ID NO: 513392 - DNA, 201 bp, Homo sapiens
tggggtgttccacttggaatttatagggggaattgggcagtctcccttctcaaggtaaacagacttcgagtagcttttatccagtccttgagactggctgktccctcaaggattggataaaacagttcaattcatttctgactgaatcatcacctttgtgtctggatcacatatagccatctgtgattgttccatagtgag

SEQ ID NO: 513393 - DNA, 201 bp, Homo sapiens
tttatttcttaaattatattttagtttatatatagtcaaggctttgaaatgaatcattttcaaagctaccaatattttaaataagtgtcttaaaaattttrgagtatataattcagacctaagagtacagtttttattcatctatccatttactcaacgaacatttttattgccaggcacaatattaagtaggtgttgagg

SEQ ID NO: 513394 - DNA, 201 bp, Homo sapiens
cataacttactgccccaaatgcccagatctcacttccttggtcttgttaatgtttccacaacttgtcctttgttaaaatggcatataagcccccattcctmattgcttctcttattttcacttcttccctgtgaagttgtcacatgcttgtgaaataagcctttccctttcatctgtcttttctcggtttcatttgcaggc

SEQ ID NO: 513395 - DNA, 201 bp, Homo sapiens
gaaatggggtttcagcctggcggctggtctcgaactcctgacctcgtgatctgcccacctcggcctcccaaagtgctgggattacaggcgtgagccaccgygcccggccctaagctttatgggaaggcaagatcaaaatactcttgataagctgtttacaaagaaataaaaggttaactctcaatgttcctaatgttttaa

SEQ ID NO: 513396 - DNA, 201 bp, Homo sapiens
tcagtccaagggaaaaagaggctccctatatgtgagaatctcttccttgcattcctctggtaacaagatccagtataaaccatttctttttcaatagggawctcttttgggcactgtcctctcccattagagtgtttttccaaaatcgccttagataccgtggatatttcaagtttcagcattgttttatgtccttcagtc

SEQ ID NO: 513397 - DNA, 201 bp, Homo sapiens
tctcagctcactgcaacctctgcctccctgaatcagattcaagtgattctcctgccctagcctcccgagtagctgggattacaggcacgcgccaccacacytggcaaattttttgtatttttagtagagatgggtttttaccatgttggccaggctggtctcaaactcctaatgtcaagtgatccacccaccttggcctcc

SEQ ID NO: 513398 - DNA, 201 bp, Homo sapiens
agagagctttagatgattttcaccagtatctccttgcgggtatcaaaggagctgctcgaaaacacataaatttgtctaagacatttgaagttgtccagggrcctgatgagccacccggggcgtttttggaacgcctccaggaggcctaccagagttacaccccttttgacccggcggctcctgagaatagctgtgctatta

SEQ ID NO: 513399 - DNA, 201 bp, Homo sapiens
aggcgtgagccaccgtgcccggccctaagctttatgggaaggcaagatcaaaatactcttgataagctgtttacaaagaaataaaaggttaactctcaatrttcctaatgttttaaattatgaagtactaagtagttttactatattttcatttctatatatatttataaccaacagtaagagactttttaatgtttcaca

SEQ ID NO: 513400 - DNA, 201 bp, Homo sapiens
taattatttctgttttacttctctatatgctctaatttcttctttttaatttttttgagatagggtctcactctgttgcccaggctggagtgcagtggcaygatcagggctcactgcagcctcaacatcctggactcaagcagccctcccacttcagtctcccaaagtgctgggattagaaggtgtgagccacagggccca

SEQ ID NO: 513401 - DNA, 201 bp, Homo sapiens
atgggctgcctgctgccatagggtctgataatggaccggccttcacctcgtccatagctcagtcagtcagtaaggcactaaacattcaatggaagctccaytgtgcctctcgatcccagagctctgggcaggtagaacgcatgaaccacaccctaaaaaatactcttacaaaattgatcttagagaccggtgaaaattagg

SEQ ID NO: 513402 - DNA, 201 bp, Homo sapiens
agagactttttaatgtttcacaaaaatatttaaagatcacaaaacaattgtaaatttccccattaattattaagtttgttttgcatggtttcagtttgcaygaccattttttactgtcccagactactatgcaaaccaaggactgcctgtatagtatgatcacatatattagaacctaagatacagttttgttatctcaag

SEQ ID NO: 513403 - DNA, 201 bp, Homo sapiens
ttaactgtttttgaggctgtttccctggctattgcatagtgtcttattcacctttgttgtgataatggtctgtactgaatagatgatcagtagatgcttgyagacagaatgaataaaccactaatcagcctcttaatgcttgaatggacttgctacttccttgtttagattcgtgtctgtacaatcctctcacgtggatag

SEQ ID NO: 513404 - DNA, 201 bp, Homo sapiens
gtggcatcgttaattctctcttgcctttttcttcctgtgtttaagtctctggggcctggggaaaccagtgctccccacagacctccctcactcagcctttsccctccagccttttcacctctggggctggtgaggggccgggaggagagagcccgtatgtcagacaacaaaccgtgtctgctaacccccagcagccacagg

SEQ ID NO: 513405 - DNA, 201 bp, Homo sapiens
gaaggtgtcttggagtttgctcaagtggttgagagggagggaggtgccatagacttggaggaactggcacgaagccaaggatacaaatccaggcagggctrtggggcaggatagagagcagggccttctactgaaggagtgactcaggaaggaggaggggaaggtgacaagcccctgggcaggagccctgtggccacggga

SEQ ID NO: 513406 - DNA, 201 bp, Homo sapiens
agattctattccaggaggggagctgccctggaacgccccaaggacagccaggacccactgttcattcaggattcccgcattttctcctacgggagctaacrcctgtgcctgggtcctggcagcgctctggactccacactctcctcctgggtttcacctttgtaacaggatccctgcagaccacgcccacgacaaacactg

SEQ ID NO: 513407 - DNA, 201 bp, Homo sapiens
ggggagctgccctggaacgccccaaggacagccaggacccactgttcattcaggattcccgcattttctcctacgggagctaacgcctgtgcctgggtccyggcagcgctctggactccacactctcctcctgggtttcacctttgtaacaggatccctgcagaccacgcccacgacaaacactgtctccagagggcagga

SEQ ID NO: 513408 - DNA, 201 bp, Homo sapiens
gactggtctcaaactcctgacctcaggtgatccacccgcctcggcctcccaaagtgctgggattacgggcatgaaccaccacgcccggcctctttttcttrtaattttgctcttcttgatttatacttcataatccattcccctctacgatttgaaagcaatttacagaaaaaattttaagggagtgagagaccagtgatt

SEQ ID NO: 513409 - DNA, 201 bp, Homo sapiens
gagcgtccctgccccagaaaaccctttgctgcctgaggccaggctgtggtgcagcgagctggctgggactgaccatctgaggcaggtctcttttctggaasgtgaattccagcggctggttggagatcccgctgcagatgacaaggggcagatgttgtctggagggatcacgtgacctggtaagatcagggaggggccgaa

SEQ ID NO: 513410 - DNA, 201 bp, Homo sapiens
aatagccatgtcatttgaatttttcataaaggagatggaaaatctctattctatacaatctcagtgaaaactgattatgtcagaagtgtttttgttttccytttttcctttgaaaattaagcaaatttgcactggaaagtgtaaacgttattcaattagtacacatgattacagataaggctgtttccaaaacgcccttca

SEQ ID NO: 513411 - DNA, 201 bp, Homo sapiens
ttacatcatttatttttattatattttttcttctacctcttttggttttttttttctagcatcttgttataaatacttatgttaaacttccatgttttcaratttatacaatttttcctgaatacttctttcctcctcacaggtgtttttctatactatttttattttttaaattatgaaaaaatgcacatatcaaattta

SEQ ID NO: 513412 - DNA, 201 bp, Homo sapiens
acagtaggctgacaatagtttacagtaagatttagcaaattacaaaatagctagatgagaggtttttgaatgtcttcaccataaaaaaaaaagataaatgratgaagtactggtaacactgccccaatatgatcattatactacatatatagatatgtgtgtgtgtctgtgtgtgtgtgtgtgtattgaaacatcaaattg

SEQ ID NO: 513413 - DNA, 201 bp, Homo sapiens
tggttgtctgatagccataaacttcctttggcacctagtatgccatttacatcatgagtagtccagacagtgagatgctttccttgtattattttgatagyctctgacgctaagacggccactgctgcaactacccttaaacagtgaggccagccttttgctactacatcaatttccttacttaggtatgccactggttgt

SEQ ID NO: 513414 - DNA, 201 bp, Homo sapiens
aaaatagctagatgagaggtttttgaatgtcttcaccataaaaaaaaaagataaatggatgaagtactggtaacactgccccaatatgatcattatactamatatatagatatgtgtgtgtgtctgtgtgtgtgtgtgtgtattgaaacatcaaattgtacccccccacttttttttttatttttgagacaaagtctcact

SEQ ID NO: 513415 - DNA, 201 bp, Homo sapiens
cttacagtcttcctttaaaatataacttttttttattgttcttttcagttggggaaagatggctgtgtctccaagttcattaacacaggtgcttttgagtkaaatcggtaaggatactggagtttcctcaaagtgcatgctcttgttacagagaacggaacaggtaatgctctctaagaagccagaccccaatggatatca

SEQ ID NO: 513416 - DNA, 201 bp, Homo sapiens
cccagttttaaggcttgggtaagtgccactagttctgctaactgggtactgatccctggggcaagaggcttactttcaagtatggttacatcactaactarggcgtaacctgcccttcgtgtcccattctccacaactgaacttccattggtatataggttaaggtcaggattagttaaggggacttctaagagatcatct

SEQ ID NO: 513417 - DNA, 201 bp, Homo sapiens
aaactaaaacttgggtaatacaatattcttaaagttgcttcagtgaggtcacacattttccctattatattatataggtatttcttacagtcttcctttamaatataacttttttttattgttcttttcagttggggaaagatggctgtgtctccaagttcattaacacaggtgcttttgagttaaatcggtaaggatact

SEQ ID NO: 513418 - DNA, 201 bp, Homo sapiens
gagatggaggttgcaatgaactgagaccacaccactgcactccagcctgggtgacacagtgagactccgtctcataaaaaaaaaaaataaaggaggggagmggggaaggggaggggaggggaatggaggggaggagggggagaggagaggagaggaggactcattcacctctagccctctgatgccacacagaaatgtggg

SEQ ID NO: 513419 - DNA, 201 bp, Homo sapiens
attttgcctcttgagctactgacagcaaagtccctgccataagtgtggtggctgttctctttagagagagcgcctgctaaatattcagcatgaaccttccsaccagcagaagctgaggactcactgcttccattattacttacagatcacctttttgtatctgaaaaattttaccttaagtaattctctcttcctttcttc

SEQ ID NO: 513420 - DNA, 201 bp, Homo sapiens
ttaatctcagaaggaagttatctttgtggtatctttcattcaaagttcttccaacacatattaagaaaataacaaactatggattttattttaccagtacrtttgtgaagactaatgctgagcctagactaggatactagttgtcatctgaatatgaatgtgtagagaaaatagagatgctatgtcttaatggatagtgaa

SEQ ID NO: 513421 - DNA, 201 bp, Homo sapiens
ctgagacattcctgctgcctctttggaacccctttgaaaaccactccccttagtgttccaagatggatgtgctaagaggcacgtctaattctgtccctctyctaaaaacccttcagaggtttcccattgtcctccccacagttctaacatggcctaccaaggcccttcatgggctagcccctgattatttctcttgctttc

SEQ ID NO: 513422 - DNA, 201 bp, Homo sapiens
tcactcccttccaaggccctgagacattcctgctgcctctttggaacccctttgaaaaccactccccttagtgttccaagatggatgtgctaagaggcacrtctaattctgtccctctcctaaaaacccttcagaggtttcccattgtcctccccacagttctaacatggcctaccaaggcccttcatgggctagcccctg

SEQ ID NO: 513423 - DNA, 201 bp, Homo sapiens
gtgtcgatcaggttgtgcgcctcgtcgatgatcaccacctggtcctgcagccggatgcccgcagcctgccgagtggccgcatgcagcagcatctgataggrcagcaccaccagctgggaggggagatgaggccacctgagcagggcggggctcccctgcaggaggcttgcctgcctgacactgagctcctgatgtgagtgc

SEQ ID NO: 513424 - DNA, 201 bp, Homo sapiens
tgagggcagagaggttgttgggggctgagtcatgcagggcttccctgcaggccattataaggacatcagcttttagtgagataagagtccattggagaatkttggcaagagtgacaagatctaacatattttttaaggattgctttggctcttataagggaaatagattatgggggacaagggcagaaacaggctgttaca

SEQ ID NO: 513425 - DNA, 201 bp, Homo sapiens
cattgttgaaagaaatgaaagaagacctaaataaagggataaacagcccctgtttctgggtcaaaaaactgaatgttaagatggcaatactacccaaattkatttacatattcaatgcaaactccaacagaatttcagctggattctttgcagaaattgacaagatggtcataaaatttatatggaaaggcaaaggaccta

SEQ ID NO: 513426 - DNA, 201 bp, Homo sapiens
tgctctaatttgcttttttgtctaacattttcagtctaaaatctaaaataaacagcaagtaataagtcattagcaaaaaaacataaagcgagaaatgcccmttaaaatgatggtccaggctcagtggctcaagcctgtaatcccagcactttgagaggacgaagcaggcggatcatgaggtcaggagtttgagaccagcct

SEQ ID NO: 513427 - DNA, 201 bp, Homo sapiens
gtgagaagatacagcccacaaataccaaacagcatgtgcccccggacctttccctgtaatcatgcgcctgcctatccagagggtactggttggataagctycctacatctgtccaacagagaaccacgcagcccactagaggagcgatggtcagacaactgactaagatgccttctgtgtaaataaaacaggaaagggaaa

SEQ ID NO: 513428 - DNA, 201 bp, Homo sapiens
tggtggtcactatgtttctgtattgcctacttgatggaaaaagaattacaagctgaagtccaggcactgtggctcacactgtaatcccagcactttgggargctgaggcgagtggatcacttgagaccagaagttcaagaccagcctggccaacatggtgaaacctcgtctctactaaaagtacaaaaaaaaaaaaaaaat

SEQ ID NO: 513429 - DNA, 201 bp, Homo sapiens
cttatattttcaaaggttaagtaatttgcccaaagttaggcagtaagactcagaaattaaatccagatcatttttactctctagctcactttttttctcawctgccttgctgccttcccaaaagaaaaactgtgtaactgagttttgatctacactggaaatgttatgggtcacactggaccctttgtgatatttttgtat

SEQ ID NO: 513430 - DNA, 201 bp, Homo sapiens
tacatctgtccaacagagaaccacgcagcccactagaggagcgatggtcagacaactgactaagatgccttctgtgtaaataaaacaggaaagggaaaaawgaagacacgtttttgcttatttaggggaaaaagaaagactgaaaggataagctagtaaaacggattccctatgggggtggggaatgggctggaaagggat

SEQ ID NO: 513431 - DNA, 201 bp, Homo sapiens
aaactggatggaaaataagtgtgatgaattgacagaagtaggcttcagaaggtgggtgataaaaaactcctctgagctaaaggaacatgttctaacccaawgcaaggaagctaagaaccttgaaaaaaggttagaggaattgctaactagaataactagtttagagaagaacataaatgacctgatggaggtgaaaaatac

SEQ ID NO: 513432 - DNA, 201 bp, Homo sapiens
gaaccttgaaaaaaggttagaggaattgctaactagaataactagtttagagaagaacataaatgacctgatggaggtgaaaaatacagcatgagaacttygtgaagcataacaagtatccatagctgaatcaatcacacggaagaaaggacatcagagattgaagacaacttaatgaaataaagcacaagacaagattaa

SEQ ID NO: 513433 - DNA, 201 bp, Homo sapiens
atgcaggcaacaaacatatgaaaaaaagctcatcatcactggtcattagagaaatggaaatcaaaaccacagtgagataccatctcacaccagttagaatrgcattcattaaaaagtcaggaaacaacagatgctggagaggatgtggagaaataggaatgcttttacactgttggtgggagtgtaaattagttcaaccat

SEQ ID NO: 513434 - DNA, 201 bp, Homo sapiens
atgtgatcaaagataaccataaaaatagtcaaccagcagcccatggggctgctctgcctatggagtagccagccttttatttattccttcactttctttctttttttttttttttttttgagatgaagtctcactctgttgcccaggctggaatgcagtggcgtgatctcggctcactgcaagcttcgcctcccgggttca

SEQ ID NO: 513435 - DNA, 201 bp, Homo sapiens; identical to SEQ ID NO: 499810

SEQ ID NO: 513436 - DNA, 201 bp, Homo sapiens; identical to SEQ ID NO: 499811

SEQ ID NO: 513437 - DNA, 201 bp, Homo sapiens; identical to SEQ ID NO: 372927

SEQ ID NO: 513438 - DNA, 201 bp, Homo sapiens; identical to SEQ ID NO: 499813

SEQ ID NO: 513439 - DNA, 201 bp, Homo sapiens; identical to SEQ ID NO: 499814

SEQ ID NO: 513440 - DNA, 201 bp, Homo sapiens; identical to SEQ ID NO: 372901

SEQ ID NO: 513441 - DNA, 201 bp, Homo sapiens
catggtgaaatcccgtctctactaaaaatacaaaaattagccaggcgtggtggtgtgcacctgtaattgcagctacttgggaggctgaggcaggagaatcrcttgaacccaggaggcagaggttgcagtgagccgagatcgagccactgcactccagcctgggtgacagagtaagactctgtaccaaaaaaaaaaaaaaga

SEQ ID NO: 513442 - DNA, 201 bp, Homo sapiens
tctactaaaaatacaaaaattagccaggcgtggtggtgtgcacctgtaattgcagctacttgggaggctgaggcaggagaatcgcttgaacccaggaggcrgaggttgcagtgagccgagatcgagccactgcactccagcctgggtgacagagtaagactctgtaccaaaaaaaaaaaaaagaaaaaagaaaagaaaaga

SEQ ID NO: 513443 - DNA, 201 bp, Homo sapiens
aaatacaaaaattagccaggcgtggtggtgtgcacctgtaattgcagctacttgggaggctgaggcaggagaatcgcttgaacccaggaggcagaggttgyagtgagccgagatcgagccactgcactccagcctgggtgacagagtaagactctgtaccaaaaaaaaaaaaaagaaaaaagaaaagaaaagaaacagcac

SEQ ID NO: 513444 - DNA, 201 bp, Homo sapiens
tagctacccagctacacctgcactggggtcaggatgatccccagggggctcagaacaccagatcaacagtgaagccacagttgccgagctccacatcataygttatggctgtgattcctgtgatagcttgagtgaggccgctcagaggcctcagggcctgactgtcctgggcatcctaattgaggtgagtgagactaagaa

SEQ ID NO: 513445 - DNA, 201 bp, Homo sapiens
taaagagagactgggcgctgtggctctcaccaaggctggaggatcgcttgagcccaggagtttgcgggcaacagagagagatcccgtgtctataaaaaaataaaataaaaataataaaaattgggccgggcgcggtggctcacgcctgtaatcctagcactttgggaggccaaggcgggcagatcacctgaggtcaggagt

SEQ ID NO: 513446 - DNA, 201 bp, Homo sapiens
ggcctcagggcctgactgtcctgggcatcctaattgaggtgagtgagactaagaatatagcttatgccagcctggccaacatggtgaaaccccgtctctaytaaaaatacaaaaattagctgggtgtggtagtgggcacctgtaatcccagcttacccgggagactgaggtaggagaagaatcacttgaacctgggaggtg

SEQ ID NO: 513447 - DNA, 201 bp, Homo sapiens
tgtaggaatcttggttggctctctctgacttctgctggccattttcttcatggctagaaggcttcagaacaagaggctggaaaatcagaagagcgtggtcrtcacctcagcatgagccaccactgaggcataaactccctcttagataccttggatatggatgccttcccctcgtgcctccagaggtgctttcccctcatg

SEQ ID NO: 513448 - DNA, 201 bp, Homo sapiens
tttgcgggcaacagagagagatcccgtgtctataaaaaaataaaataaaaataataaaaattgggccgggcgcggtggctcacgcctgtaatcctagcackttgggaggccaaggcgggcagatcacctgaggtcaggagttcgagaccagcctgaccaaaatggtaaaaccccgtctctactaaaaatacaaaaattagc

SEQ ID NO: 513449 - DNA, 201 bp, Homo sapiens
ctctaaaatggggtgcagggactggccggaattactgtaggagtagtaggcgcttctcctctggacatcccctgcagagaggtatggacccaggctctcaytcaaggaagaacagcagagccttcagcccctcaaaacatgtaggaggagatcagggcatccctgtgttgttagtgcagaggacaaactgtgtttagtttt

SEQ ID NO: 513450 - DNA, 201 bp, Homo sapiens
aacagcagtgcccaaactcagaatacctgaggccacactcacatattattttattattgtccattgcaaacagaattgaaacatatcaggagttggtgacragcagcactatagatttccaagatcactgaatggtcatttaggtacagaaactatacgtctcaaattttatgggacaatttctatttaaaagattctgtc

SEQ ID NO: 513451 - DNA, 201 bp, Homo sapiens
ggacaacatggtgagacccctgtctctactaaaaatacaaaaaaaaaaaaaaaaaaaagccaagtgtggtggcgcacacctctagtcccagctgctggggsgttgaagcgcgaggatcgcttgaacctggaggcagaggctgcagtgagccaagattgcaacattgcactccagcctgggcgacagagcaagactcgctct

SEQ ID NO: 513452 - DNA, 201 bp, Homo sapiens
ccctgtctctactaaaaatacaaaaaaaaaaaaaaaaaaaagccaagtgtggtggcgcacacctctagtcccagctgctggggggttgaagcgcgaggatygcttgaacctggaggcagaggctgcagtgagccaagattgcaacattgcactccagcctgggcgacagagcaagactcgctctccaaaaacaaaaaaaaa

SEQ ID NO: 513453 - DNA, 201 bp, Homo sapiens
ttagggaccaagggaccctctgtgttcttgttctgacatcctcacgttaacttctccatgttccttgaaaggctattctctttcagcttctggtagaagakcttctgacataacaagacgtggcgatgattttttgtatcaataatcagcatccacagtgattctgatgcaagcgtccttggaccacattcaaaacaatta

SEQ ID NO: 513454 - DNA, 201 bp, Homo sapiens
tgttccttgaaaggctattctctttcagcttctggtagaagagcttctgacataacaagacgtggcgatgattttttgtatcaataatcagcatccacagygattctgatgcaagcgtccttggaccacattcaaaacaattaagcattgtttcccatgttatgactctcagaacactaattttgcaagatgctccatata

SEQ ID NO: 513455 - DNA, 201 bp, Homo sapiens
ctgggcatcctaattgaggtgagtgagactaagaatatagcttatgccagcctggccaacatggtgaaaccccgtctctattaaaaatacaaaaattagcygggtgtggtagtgggcacctgtaatcccagcttacccgggagactgaggtaggagaagaatcacttgaacctgggaggtggaggttgcagtgagctgaga

SEQ ID NO: 513456 - DNA, 201 bp, Homo sapiens
cagtgaagccacagttgccgagctccacatcatacgttatggctgtgattcctgtgatagcttgagtgaggccgctcagaggcctcagggcctgactgtcmtgggcatcctaattgaggtgagtgagactaagaatatagcttatgccagcctggccaacatggtgaaaccccgtctctattaaaaatacaaaaattagct

SEQ ID NO: 513457 - DNA, 201 bp, Homo sapiens
agcccctcaaaacatgtaggaggagatcagggcatccctgtgttgttagtgcagaggacaaactgtgtttagttttaggggaagtttgggatgtaccccaragtcctccaccatctcacctttatgtccctttccctagatatattgcaggatctccccttaggagaaagagttgctgttggggttatatatttttgctca

SEQ ID NO: 513458 - DNA, 201 bp, Homo sapiens
tttgggaggccaaggcgggcagatcacctgaggtcaggagttcgagaccagcctgaccaaaatggtaaaaccccgtctctactaaaaatacaaaaattagstgggtgtggtggcgggcgcctgtaatcccagctacttgggaggctgaggtgggaaaatcgcttgaacccgggagacgggttgcagtgagccgagactatg

SEQ ID NO: 513459 - DNA, 201 bp, Homo sapiens
gcttaaagccaaacttgggtgccactaaagccccctccttttccacatttccttccccagacaaccagaggaggaaaagaaaagcaactggatccccttcygccacctccaggtctcctaaaggaagaagtccttgggaacccatactgtgtgatccagggtccttcactggcctctccctcaggtcatccagttgtcaat

SEQ ID NO: 513460 - DNA, 201 bp, Homo sapiens
aaggcgggcagatcacctgaggtcaggagttcgagaccagcctgaccaaaatggtaaaaccccgtctctactaaaaatacaaaaattagctgggtgtggtsgcgggcgcctgtaatcccagctacttgggaggctgaggtgggaaaatcgcttgaacccgggagacgggttgcagtgagccgagactatgccattgcactc

SEQ ID NO: 513461 - DNA, 201 bp, Homo sapiens
gcgggcagatcacctgaggtcaggagttcgagaccagcctgaccaaaatggtaaaaccccgtctctactaaaaatacaaaaattagctgggtgtggtggcrggcgcctgtaatcccagctacttgggaggctgaggtgggaaaatcgcttgaacccgggagacgggttgcagtgagccgagactatgccattgcactccag

SEQ ID NO: 513462 - DNA, 201 bp, Homo sapiens
aattttgcaagatgctccatataaaaaggattctgttgataaataagtttggaaaactgtacttaacacattcccattttggaaatcacaatgattattascatattttgaacttaaataagtgctgcagtaaagaaatctgctcaatgttatacaatctgatgtttctcaatcttatttgagctcagcattgttttttca

SEQ ID NO: 513463 - DNA, 201 bp, Homo sapiens
atcacctgaggtcaggagttcgagaccagcctgaccaaaatggtaaaaccccgtctctactaaaaatacaaaaattagctgggtgtggtggcgggcgcctrtaatcccagctacttgggaggctgaggtgggaaaatcgcttgaacccgggagacgggttgcagtgagccgagactatgccattgcactccagtctgggtg

SEQ ID NO: 513464 - DNA, 201 bp, Homo sapiens
atgccagcctggccaacatggtgaaaccccgtctctattaaaaatacaaaaattagctgggtgtggtagtgggcacctgtaatcccagcttacccgggagrctgaggtaggagaagaatcacttgaacctgggaggtggaggttgcagtgagctgagattgcaccactgtactccagcctgggcaacagagcgagacttaa

SEQ ID NO: 513465 - DNA, 201 bp, Homo sapiens
gcctgaccaaaatggtaaaaccccgtctctactaaaaatacaaaaattagctgggtgtggtggcgggcgcctgtaatcccagctacttgggaggctgaggkgggaaaatcgcttgaacccgggagacgggttgcagtgagccgagactatgccattgcactccagtctgggtgacaagagtgaaactcagaaaaaaaaaaa

SEQ ID NO: 513466 - DNA, 201 bp, Homo sapiens
catagaaaaacacaatagagaaatcagaagtttaatgaaagtgctttggacaatttctaacataaattacaattcagaacgtttaaaaaatcccaacctakccaatctctaaatgccacatatccaatccattatcaagtgttaacatttttgcctttaaaatatatcttgattcagctaagctatgaggatgcaaagaca

SEQ ID NO: 513467 - DNA, 201 bp, Homo sapiens
atatttatcagaaacccagaaatctggttctagggagatttaaaggacatgtaaacttcttaggatatttgtcagcactacccagtaagcagcccagaagkcacagaggatgctggccagtttacaagttcagggtgaaattcaaagggacaaagatgccacaaggagcagaaggaatgccaaaagagaaacacctcttag

SEQ ID NO: 513468 - DNA, 201 bp, Homo sapiens
aggggtacatgtaaagatttgttacataggtaaacttgtgtcatgggggtgtgttgtatagattatttcattacccaggtattaagcctagtacccatgarttatttttcctgatcctctccctccttccacccttattattagattattaatgtattatttttcattagcaaaatccaacatgtagaaagagctttatag

SEQ ID NO: 513469 - DNA, 201 bp, Homo sapiens
gtggcactgtcatggctcactgcagcctcaaccttctggactcaagcgatcctcccacctcagcctcccaagtagctgggactacaggcatgtgccatcamacccagctaatttttgtattttttgtagagacaggatcttgccatgttgcctaggctggtcttgaacacctgggctcaaatcatctgcccacatcggcct

SEQ ID NO: 513470 - DNA, 201 bp, Homo sapiens
tcatgcctgtaatcccagaactttgggaggcccaggctggtggatcacctgaggtcaggtgttcaagaccagcctggtcaacatggtgaaatcccgtctcyactaaaaatacaaaaattagccaggcgtggtggtgtgcacctgtaattgcagctacttgggaggctgaggcaggagaatcgcttgaacccaggaggcaga

SEQ ID NO: 513471 - DNA, 201 bp, Homo sapiens
gaggctggaaaatcagaagagcgtggtcatcacctcagcatgagccaccactgaggcataaactccctcttagataccttggatatggatgccttcccctmgtgcctccagaggtgctttcccctcatgtctcaccacccctcagggaacctctaaaatggggtgcagggactggccggaattactgtaggagtagtaggc

SEQ ID NO: 513472 - DNA, 201 bp, Homo sapiens
tgtataatgctttttaaagggtgacagtaaaaagcaaggggactgtgaacgagatagatgatattgtgatctgaaactgctttttaaattcttaaagagakactgggcgctgtggctctcaccaaggctggaggatcgcttgagcccaggagtttgcgggcaacagagagagatcccgtgtctataaaaaaataaaataaa

SEQ ID NO: 513473 - DNA, 201 bp, Homo sapiens
ccgtctctattaaaaatacaaaaattagctgggtgtggtagtgggcacctgtaatcccagcttacccgggagactgaggtaggagaagaatcacttgaacstgggaggtggaggttgcagtgagctgagattgcaccactgtactccagcctgggcaacagagcgagacttaaaaaaaaaaaaaaaaaaaaaaaaagaatg

SEQ ID NO: 513474 - DNA, 201 bp, Homo sapiens
cgtctctattaaaaatacaaaaattagctgggtgtggtagtgggcacctgtaatcccagcttacccgggagactgaggtaggagaagaatcacttgaaccygggaggtggaggttgcagtgagctgagattgcaccactgtactccagcctgggcaacagagcgagacttaaaaaaaaaaaaaaaaaaaaaaaaagaatgt

SEQ ID NO: 513475 - DNA, 201 bp, Homo sapiens
cgctcagaggcctcagggcctgactgtcctgggcatcctaattgaggtgagtgagactaagaatatagcttatgccagcctggccaacatggtgaaacccygtctctattaaaaatacaaaaattagctgggtgtggtagtgggcacctgtaatcccagcttacccgggagactgaggtaggagaagaatcacttgaacct

SEQ ID NO: 513476 - DNA, 201 bp, Homo sapiens
cagtgcccaaactcagaatacctgaggccacactcacatattattttattattgtccattgcaaacagaattgaaacatatcaggagttggtgacgagcarcactatagatttccaagatcactgaatggtcatttaggtacagaaactatacgtctcaaattttatgggacaatttctatttaaaagattctgtccccaa

SEQ ID NO: 513477 - DNA, 201 bp, Homo sapiens
gctcagaggcctcagggcctgactgtcctgggcatcctaattgaggtgagtgagactaagaatatagcttatgccagcctggccaacatggtgaaaccccrtctctattaaaaatacaaaaattagctgggtgtggtagtgggcacctgtaatcccagcttacccgggagactgaggtaggagaagaatcacttgaacctg

SEQ ID NO: 513478 - DNA, 201 bp, Homo sapiens; identical to SEQ ID NO: 251422

SEQ ID NO: 513479 - DNA, 201 bp, Homo sapiens; identical to SEQ ID NO: 251647

SEQ ID NO: 513480 - DNA, 201 bp, Homo sapiens; identical to SEQ ID NO: 251426

SEQ ID NO: 513481 - DNA, 201 bp, Homo sapiens; identical to SEQ ID NO: 362674

SEQ ID NO: 513482 - DNA, 201 bp, Homo sapiens
aagatctccagcttctgtcttcaagtggctttacaggttttacaccgcaaacttccccagttttgcgctcacctctgcaatgctgtgattggctacctgartactcgcggttcctcagtagatggcaggtatggtcagggcctcaggatcgacccaagttggcggggctgtgtgaaatgaatgaggtgatgtagtgcaact

SEQ ID NO: 513483 - DNA, 201 bp, Homo sapiens
aggatggtctcgtatctacttgtctggaggtcatcttaccaccaagcaaggcccttacctcaggttattcctcttcttttcaaacctggtctggtttgacrttcagagcactttgtatagtccctttgtgtccatagtgccctgtatcttgttgcctaaagtttgaggttacgcaggttgtctggattttgagaaagccgc

SEQ ID NO: 513484 - DNA, 201 bp, Homo sapiens
agagctaacattcttgtggagttgggccttctttcctttcctgaaggtgttcccttaaagttgaggtaagggacggagaagttctcaggttcatcatattytgtcttctcctttaggcattccactgtgcagagccctcatcccggcaagtggcctgtgtgcctctctttgccactttgatggcttatgaggtgtactatg

SEQ ID NO: 513485 - DNA, 201 bp, Homo sapiens
tggtttgacgttcagagcactttgtatagtccctttgtgtccatagtgccctgtatcttgttgcctaaagtttgaggttacgcaggttgtctggattttgrgaaagccgctttatttctgccctctctccacagtgtttatcactgataagatctccagcttctgtcttcaagtggctttacaggttttacaccgcaaact

SEQ ID NO: 513486 - DNA, 201 bp, Homo sapiens
gaaaagctattctttgaggttttccagagcttaggataaaggtgcccaccttctagtgaggatttgttttgacttctctcaggtatgaggaccagcaagaractggctttattcaggtttacagcttgaggttccatggcccacccagactctggtacttggctataagcccacatgagtgctagagctgttgccatagct

SEQ ID NO: 513487 - DNA, 201 bp, Homo sapiens
tacctcaggttattcctcttcttttcaaacctggtctggtttgacgttcagagcactttgtatagtccctttgtgtccatagtgccctgtatcttgttgcytaaagtttgaggttacgcaggttgtctggattttgagaaagccgctttatttctgccctctctccacagtgtttatcactgataagatctccagcttctg

SEQ ID NO: 513488 - DNA, 201 bp, Homo sapiens
tccttgggtctctactgctccagcatctgctgcacttctccactcctggtcttgtacttcgaagtctgggtgccttgacgggaccacagcttctgtccctygcccaaagtcccgctggctctcatgtgctcgatgccatcctgaccagcccctctgtgacgcgcaagctgcgccgccgtgtgctgcagaacctaaaggtta

SEQ ID NO: 513489 - DNA, 201 bp, Homo sapiens
gaggaggaggaggatggaaaggatggtcccacggagaccctggaggagctggtcctgggactagccgctgaggtgtgtgatgattttcttgtctactgtgragacacacatggcagcttcgtggtcagaactctgcttcaggtgttaggagggactattctggagtctgagagagccaggccccgtggttcccaatcatct

SEQ ID NO: 513490 - DNA, 201 bp, Homo sapiens
cttaccaccaagcaaggcccttacctcaggttattcctcttcttttcaaacctggtctggtttgacgttcagagcactttgtatagtccctttgtgtccayagtgccctgtatcttgttgcctaaagtttgaggttacgcaggttgtctggattttgagaaagccgctttatttctgccctctctccacagtgtttatcac

SEQ ID NO: 513491 - DNA, 201 bp, Homo sapiens
actgtattctctactaagtctcttcaaagtgtgtctttcttcccttttcagatctgatggtgcacaatataatgaaggaagtagagactcaggccctagckttgtccacgaacaggactggcagtgagatgctgcaggaactgttgggattcagtcccttgaaaccgctttgtcgcgtgtgggctgctctgcgctctaact

SEQ ID NO: 513492 - DNA, 201 bp, Homo sapiens
gccctctctccacagtgtttatcactgataagatctccagcttctgtcttcaagtggctttacaggttttacaccgcaaacttccccagttttgcgctcayctctgcaatgctgtgattggctacctgagtactcgcggttcctcagtagatggcaggtatggtcagggcctcaggatcgacccaagttggcggggctgtg

SEQ ID NO: 513493 - DNA, 201 bp, Homo sapiens
tggtggcaaacgggggcgcggggccaaggggtcggggcgccccttaccaggccgtaagcggcaaccctggccgcctccggatgggcgctcggagccggctycagattcgcacccgcacctgagcccggaagctctgggatatttccgccgggcgctgtcagcattgaaagaggctcccgagactggggaagaacgaggtag

SEQ ID NO: 513494 - DNA, 201 bp, Homo sapiens
ctaagagagaagtttatttaagggataaacatttattaacccctgtatgtgatagaggctggggatacagcaaggcatgacatctgctttcatagagctawcattcttgtggagttgggccttctttcctttcctgaaggtgttcccttaaagttgaggtaagggacggagaagttctcaggttcatcatattttgtcttc

SEQ ID NO: 513495 - DNA, 201 bp, Homo sapiens
cagttttgcgctcacctctgcaatgctgtgattggctacctgagtactcgcggttcctcagtagatggcaggtatggtcagggcctcaggatcgacccaasttggcggggctgtgtgaaatgaatgaggtgatgtagtgcaactgtattttgcatgaaatggagttaagactgcctgatgcccttcttgtccctagtcccc

SEQ ID NO: 513496 - DNA, 201 bp, Homo sapiens
tggactcaggaagtctaatgcccaaggagttcacaggaatgggggaaaatgaggcctataggtgcccgccaccatacccagctaattttttttttttttttgagacggagttttgctcttgttgcccaggctggagtgcagtggcgcaatctcagctcaccgtgcccggctgaggccaaatgttatttcacagtcctggaa

SEQ ID NO: 513497 - DNA, 201 bp, Homo sapiens
cagcttctgtcttcaagtggctttacaggttttacaccgcaaacttccccagttttgcgctcacctctgcaatgctgtgattggctacctgagtactcgcrgttcctcagtagatggcaggtatggtcagggcctcaggatcgacccaagttggcggggctgtgtgaaatgaatgaggtgatgtagtgcaactgtattttg

SEQ ID NO: 513498 - DNA, 201 bp, Homo sapiens
tgatgattttcttgtctactgtggagacacacatggcagcttcgtggtcagaactctgcttcaggtgttaggagggactattctggagtctgagagagccwggccccgtggttcccaatcatctggtaagtattacaagaggaaagtggacctagggggaagaagaatttagaaagttcagaatgagacagtaaacagaag

SEQ ID NO: 513499 - DNA, 201 bp, Homo sapiens
cccagaactaagagagaagtttatttaagggataaacatttattaacccctgtatgtgatagaggctggggatacagcaaggcatgacatctgctttcatrgagctaacattcttgtggagttgggccttctttcctttcctgaaggtgttcccttaaagttgaggtaagggacggagaagttctcaggttcatcatattt

SEQ ID NO: 513500 - DNA, 201 bp, Homo sapiens
gatggtctcgtatctacttgtctggaggtcatcttaccaccaagcaaggcccttacctcaggttattcctcttcttttcaaacctggtctggtttgacgtycagagcactttgtatagtccctttgtgtccatagtgccctgtatcttgttgcctaaagtttgaggttacgcaggttgtctggattttgagaaagccgctt

SEQ ID NO: 513501 - DNA, 201 bp, Homo sapiens
ctaccaagccaaggtcctacagctcttgttggaggtgagtggatattacccacaatctgtttatgccctcagttcaacttctaccttttaggacttatctratcttaagtttttgtacctctggactcaggaagtctaatgcccaaggagttcacaggaatgggggaaaatgaggcctataggtgcccgccaccataccca

SEQ ID NO: 513502 - DNA, 201 bp, Homo sapiens
cagtctcactcattttacttgtttattgtcagcctcccctcactggaatgtaaactccaaaagggagagccctgtttgcttactcttctatctccagcacrtgggacatagtagtctctcatagtgctacctccagtgtctggcacatagtaggtgctcaaaaaatttcttgttttgaaatggatgaatcaaataagattg

SEQ ID NO: 513503 - DNA, 201 bp, Homo sapiens
ccactcctggtggccctgacctctctggaatgtcaggattcctgccctgcccatgttcaagactggagtcttgaacatgctcctagtcttcaaactctggsattctctgactggcccaacaggttcccagggaaagaaagctccggagaggaaggtgacccttcagccacctccaggactgccctctgtgggtccttgggg

SEQ ID NO: 513504 - DNA, 201 bp, Homo sapiens
atttttcctttaatccttacagttacctaagtaactgtatattaaccctaagcatatttaaccctaaatatatttaagtatataactaagtatatttaacsctactttctagatggaaaactaagtttcagagaggatagtgagttgcccaagggcatcaagtcagtagcaagtggcaaggctatgattcaaacccaagat

SEQ ID NO: 513505 - DNA, 201 bp, Homo sapiens
tctgtaatattgatcctttccaaagatggactgccagcctctcctaccagatggggcgctgtctgaggacagggccattatttcatctacagcaactatcrtcacccagtctcactcattttacttgtttattgtcagcctcccctcactggaatgtaaactccaaaagggagagccctgtttgcttactcttctatctcc

SEQ ID NO: 513506 - DNA, 201 bp, Homo sapiens
caggataccgtaacgacatcagcattgttggaccccagccactcctcagtctccacccaggacaattcctccactggaggacacacttcaagcacaagccyacagctctcaaagccttcaatcacaccagtccctgcaaagtccaggaacccacatcccagggccaatatccgtcggatgcgccggatcattgctgaggat

SEQ ID NO: 513507 - DNA, 201 bp, Homo sapiens
tgtggtgaagacttttggaaaaagaatggtcggaaagtaggaggagagccaagagagtggcacgccaaagggtgtcccccaagggcaggggtcagaaggcracctgccaagggaggagccatactccacatcctcataacagtgacagcggggcagcaaggagttagttttgctcgttatccttttaaatatactttgttt

SEQ ID NO: 513508 - DNA, 201 bp, Homo sapiens
tccactcctccaaataatcctactggaactgcgaccttcatttctcagaggcaacatctgaaattcagagaggttcagtaacttgcccaaggccacacagrtaacttggatctgcttcactccagggactgatcgttaagcactattctgtaccacctctcttagtaaatgcccaccaagacccaccaaagtaacacctct

SEQ ID NO: 513509 - DNA, 201 bp, Homo sapiens
ggtgctgttgactgcaagtaataaaaagcttaatcagaaatggcttaagcaggaggaatattcagtgtctcccacaaccagaattagagggttgtagggtyggtaaacccctgggttcagtgccaccctctgctctgcccaccccagtctcatggccaatgcctcgctagtgcttctctcagtcccaagatggctgccaca

SEQ ID NO: 513510 - DNA, 201 bp, Homo sapiens
atccactcctccaaataatcctactggaactgcgaccttcatttctcagaggcaacatctgaaattcagagaggttcagtaacttgcccaaggccacacakataacttggatctgcttcactccagggactgatcgttaagcactattctgtaccacctctcttagtaaatgcccaccaagacccaccaaagtaacacctc

SEQ ID NO: 513511 - DNA, 201 bp, Homo sapiens
ctcccttttcttctctttttggaatgaggagaagcttcccagaagccaccctctctcagcttccccctcacatctcattagatttgtcccacatgcccatrgctgaaccaaaggaatggaattatcttcattgccagagattcatgtttttcaaactagtagggttgagatgtcaatttagtgggtattggctaccatttt

SEQ ID NO: 513512 - DNA, 201 bp, Homo sapiens
gaatggctctttattatatctgtgtcttttggcaatatacacccctcaccctcagagggccggtccaatgtagggttcagagcatgaatttgacagactgmatttaaacccacccgtgatacttctaagctgcatgacattgggcaagtcaattagcctctctgcttcagtttcccagcagaaaaatgggaataatacaag

SEQ ID NO: 513513 - DNA, 201 bp, Homo sapiens
aggagaagcttcccagaagccaccctctctcagcttccccctcacatctcattagatttgtcccacatgcccatggctgaaccaaaggaatggaattatcwtcattgccagagattcatgtttttcaaactagtagggttgagatgtcaatttagtgggtattggctaccatttttcaaatggaaaagaacagaatatgtc

SEQ ID NO: 513514 - DNA, 201 bp, Homo sapiens
cacacaccctgtatgctttacaatgatcaatattaaccgaccattatctcagggggatctccactacagcccatgtaggaagatattattatccagtttcwcagataaggaaactgaagctcagataggttaagtaacttggccaaggtcacaaagcacataactgacaaagccagaaatgcaaagtcagccggtaccact

SEQ ID NO: 513515 - DNA, 201 bp, Homo sapiens
cattgccagagattcatgtttttcaaactagtagggttgagatgtcaatttagtgggtattggctaccatttttcaaatggaaaagaacagaatatgtcawcatgcgtcacaaataggttaagtattgttttgtgaaacttttgttttagtcacatctacctgaaaatgtgtagtatgtgtgtcagatcctgggtagtgat

SEQ ID NO: 513516 - DNA, 201 bp, Homo sapiens
cattcctttatctcatccttttcctgcttctccacctccccactgtctccctggttcttgccctggcaacctccttcaaagaggtcctctccttgccctgktggatcttggctgggagaggaggatgcagtgaggggctgaggcctcaggcaggcttggattccaaacctgtctcaactgcttcaatcactgcattactct

SEQ ID NO: 513517 - DNA, 201 bp, Homo sapiens
cctacgtctcaactgcatcgaggatgagggtggccaggctcttgcccatgccttgcagaccaacaagtgcctcaccacgctgcacctcggtggcaatgagytgtctgagcccaccgccacactcctgtcacaggtgctcgccatcaacaccacactcaccagcatcaacctgtcctgcaaccacatcgggctggtgagcca

SEQ ID NO: 513518 - DNA, 201 bp, Homo sapiens
actggaggacacacttcaagcacaagcccacagctctcaaagccttcaatcacaccagtccctgcaaagtccaggaacccacatcccagggccaatatccrtcggatgcgccggatcattgctgaggatcctgagtggtcactggccatcgtgcccctcctcacagagctctgcattcagcacattatcaggaacttccag

SEQ ID NO: 513519 - DNA, 201 bp, Homo sapiens
ccagaattagagggttgtagggttggtaaacccctgggttcagtgccaccctctgctctgcccaccccagtctcatggccaatgcctcgctagtgcttctstcagtcccaagatggctgccacagttctgacatctcatacagggacatgcccagaggcagaaaccgggagaacacctgctcccttttcttctctttttgg

SEQ ID NO: 513520 - DNA, 201 bp, Homo sapiens
aaaagcttaatcagaaatggcttaagcaggaggaatattcagtgtctcccacaaccagaattagagggttgtagggttggtaaacccctgggttcagtgcyaccctctgctctgcccaccccagtctcatggccaatgcctcgctagtgcttctctcagtcccaagatggctgccacagttctgacatctcatacagggac

SEQ ID NO: 513521 - DNA, 201 bp, Homo sapiens
atgacaaggcacgcatcataattcgaagccttctggaccacccagtcctcgaggagctggacttgtcacaaaacctcattggagaccgtggtgcacgaggygctgccaagctgctgagccacagccgcctgcgtgtgctcaacctggctaacaaccaggtgcgtgcacccggtgcccagtccctggctcacgctctggcac

SEQ ID NO: 513522 - DNA, 201 bp, Homo sapiens
actaagtatatttaaccctactttctagatggaaaactaagtttcagagaggatagtgagttgcccaagggcatcaagtcagtagcaagtggcaaggctaygattcaaacccaagattgattgaaagcctgagtcctttctaatagactgtgtctctaaaactttcttaaccaagtctgagagtaagaaatgcaatttacg

SEQ ID NO: 513523 - DNA, 201 bp, Homo sapiens
ctgaaccctctactaaacctccccatgagaacagccttgctcacctacacaggcacatacacgcacacacacgtgcatgcgcgcacacacacacacacacagtttctagagggggtgctgttgactgcaagtaataaaaagcttaatcagaaatggcttaagcaggaggaatattcagtgtctcccacaaccagaattaga

SEQ ID NO: 513524 - DNA, 201 bp, Homo sapiens
actgaaccctctactaaacctccccatgagaacagccttgctcacctacacaggcacatacacgcacacacacgtgcatgcgcgcacacacacacacacacagtttctagagggggtgctgttgactgcaagtaataaaaagcttaatcagaaatggcttaagcaggaggaatattcagtgtctcccacaaccagaattag

SEQ ID NO: 513525 - DNA, 201 bp, Homo sapiens
gcccagtccctggctcacgctctggcacacaacaccaacctcatttccctcaacctacgtctcaactgcatcgaggatgagggtggccaggctcttgcccwtgccttgcagaccaacaagtgcctcaccacgctgcacctcggtggcaatgagctgtctgagcccaccgccacactcctgtcacaggtgctcgccatcaac

SEQ ID NO: 513526 - DNA, 201 bp, Homo sapiens
ataatgtaagcctccattttctgtctgtaaaatggagagaactttctcttcttcatcgagatgctgaaggttagagataatggttgtgaaagacccaagcrgccgggcgcggtggctcacgcctgtattcccagcactttgggaggctgaggcgggtggatcacgaggtcaggagatcaagaccatcctggctaacacggt

SEQ ID NO: 513527 - DNA, 201 bp, Homo sapiens
cattactctggggaaataatgtaagcctccattttctgtctgtaaaatggagagaactttctcttcttcatcgagatgctgaaggttagagataatggttrtgaaagacccaagcggccgggcgcggtggctcacgcctgtattcccagcactttgggaggctgaggcgggtggatcacgaggtcaggagatcaagaccat

SEQ ID NO: 513528 - DNA, 201 bp, Homo sapiens
caggcttgattccctcccaccgcaaacagaccttgtacgtgtggagagaaatgacttccagcagcaggagatccagatccttcaaggacatatgtccttctgtctccctccacttggacaaatctcaagaaggactccgattggcttatatcagatagccaccccccaacaagttgccctgaccaatagacactccttttg

SEQ ID NO: 513529 - DNA, 201 bp, Homo sapiens
ttatcatttgtgccctctgtagctaacagtctgatgggataaaggcactaatcagcaatcatataaacataaaattgatactagaatagggttgccagatktagcaaatagaaatacaggacatccagttaaatgtgaatttcaggtccaggcacgcttgtagtcttccagagactgaggaggctgaggtaggagaatccc

SEQ ID NO: 513530 - DNA, 201 bp, Homo sapiens
ccaggcttgattccctcccaccgcaaacagaccttgtacgtgtggagagaaatgacttccagcagcaggagatccagatccttcaaggacatatgtccttctgtctccctccacttggacaaatctcaagaaggactccgattggcttatatcagatagccaccccccaacaagttgccctgaccaatagacactcctttt

SEQ ID NO: 513531 - DNA, 201 bp, Homo sapiens
attgaacaaacagctgcgctccaggccctgtcctaggtgctgaagattcaaggatgagcaagattatcatttgtgccctctgtagctaacagtctgatggrataaaggcactaatcagcaatcatataaacataaaattgatactagaatagggttgccagatgtagcaaatagaaatacaggacatccagttaaatgtga

SEQ ID NO: 513532 - DNA, 201 bp, Homo sapiens
cccaggcttgattccctcccaccgcaaacagaccttgtacgtgtggagagaaatgacttccagcagcaggagatccagatccttcaaggacatatgtccttctgtctccctccacttggacaaatctcaagaaggactccgattggcttatatcagatagccaccccccaacaagttgccctgaccaatagacactccttt

SEQ ID NO: 513533 - DNA, 201 bp, Homo sapiens
actccgattggcttatatcagatagccaccccccaacaagttgccctgaccaatagacactccttttggccagaatctattatcagaagccagtggagccrccccaaacaccagctacctcgcctaaagcagacctaccactgggctagaaattggagacaaaaatgaggaggagacagcccctacacctcaagaagctca

SEQ ID NO: 513534 - DNA, 201 bp, Homo sapiens
catgccacaccctcaaggtactgtctgctcccagccttccccccaccccttctcagcatctctcagattccctctcccctcctcttcctcctctattattrccttcttcctatttccttctctttcattggccaagtgttttttaatgcaccctgcaccaagatacacggttctgggggtgtagagatgaacaaggcgctg

SEQ ID NO: 513535 - DNA, 201 bp, Homo sapiens
gcgactgcctctccttggcagccgccatcaaggcatgccacaccctcaaggtactgtctgctcccagccttccccccaccccttctcagcatctctcagaytccctctcccctcctcttcctcctctattattgccttcttcctatttccttctctttcattggccaagtgttttttaatgcaccctgcaccaagatacac

SEQ ID NO: 513536 - DNA, 201 bp, Homo sapiens
tgggagcctccagaactaggcatggggattgaagataccaggatgctgtctctgtctatctatcgtttctgctggtctcccccaggcttgattccctcccrccgcaaacagaccttgtacgtgtggagagaaatgacttccagcagcaggagatccagatccttcaaggacatatgtccttctgtctccctccacttggac

SEQ ID NO: 513537 - DNA, 201 bp, Homo sapiens
tgctagtttcatgtgtcagatactatattatgccctttggatgcattattttatccactcctccaaataatcctactggaactgcgaccttcatttctcaraggcaacatctgaaattcagagaggttcagtaacttgcccaaggccacacagataacttggatctgcttcactccagggactgatcgttaagcactattc

SEQ ID NO: 513538 - DNA, 201 bp, Homo sapiens
ccagagattcatgtttttcaaactagtagggttgagatgtcaatttagtgggtattggctaccatttttcaaatggaaaagaacagaatatgtcatcatgygtcacaaataggttaagtattgttttgtgaaacttttgttttagtcacatctacctgaaaatgtgtagtatgtgtgtcagatcctgggtagtgatgtaaa

SEQ ID NO: 513539 - DNA, 201 bp, Homo sapiens
gcctctctgcttcagtttcccagcagaaaaatgggaataatacaagcacctatctgaaaaagccttttctgaaaaaggcttttctgaggacacatgaattrataggcataaagaactaaaaagattgtctggcacagagcaattactgtaattgctgtagagctattatctaaaatttggggctgctccttgctagtttca

SEQ ID NO: 513540 - DNA, 201 bp, Homo sapiens
tggcccaggaaagcgagtacctcattggccaggccctctacgcaaaccgagaagcagcccgccagcgggccctgaatcccagccacttcatgtcaaccatmactgccaatggccctgagaactctgtgggataaaatgacctgacttggatcatggccccagccccatccctcatttcatacccctgccatgcctgctgca

SEQ ID NO: 513541 - DNA, 201 bp, Homo sapiens
ttttacccagtgagcagtggtgagctgctagagggcttacatggagcctgccacagcggctgtgtgaaggctagatgtgagagaaccagactggatgccasagaccacatgcctaacagctgaagctgtgatccagacagacactggggccctgagctaaggcagcagcaggaaaggagaggctgcctgggtgggagacaa

SEQ ID NO: 513542 - DNA, 201 bp, Homo sapiens
gaggctatctttatccttaggagctctgggacaccatccaagggttttaggcaaaaaagtaggtaccattactggatttcacatgtgaaaatgtcactccrtctgtgagggaggatggcctgggcagggcagcagtggacatgcagattacctaggagatcactgccaaatccaggtgagggtgagggtcatttcagcgag

SEQ ID NO: 513543 - DNA, 201 bp, Homo sapiens
tttcagtttgaggcatctcaaagaaggggtcatttcgttagttgggtagagggtccgaagctcagatgagaggtctgaattgaatgtgggaatgtgtgccrtcttcatgaaggtggcagttgcagccctgggtttggatggagtctcacaggggagagccaaaagcaagacaacaagaggcctggcatgtggtctcagtgg

SEQ ID NO: 513544 - DNA, 201 bp, Homo sapiens
gtgcagagacagggaatgtgggaagaggatcagttttgagggggaagagtgtaagtttcagtttgaggcatctcaaagaaggggtcatttcgttagttggrtagagggtccgaagctcagatgagaggtctgaattgaatgtgggaatgtgtgccgtcttcatgaaggtggcagttgcagccctgggtttggatggagtct

SEQ ID NO: 513545 - DNA, 201 bp, Homo sapiens
caggagttgggctggcctgttgcctctgaccttcctcctttgcctctgtcgtactgtctatgagcccccaacaccaccctgcctccttgcccttcacatcrctcctggaaatagggaagggcctcagaaactttgcactcacccaaagataccatctcaggtcagcactcaagaagcaggtctcctggatgtggtctctgc

SEQ ID NO: 513546 - DNA, 201 bp, Homo sapiens
gacatatctgggaccaagggaaattatagaatgttttaggccaaaaccaagcaggagttgggctggcctgttgcctctgaccttcctcctttgcctctgtygtactgtctatgagcccccaacaccaccctgcctccttgcccttcacatcgctcctggaaatagggaagggcctcagaaactttgcactcacccaaagat

SEQ ID NO: 513547 - DNA, 201 bp, Homo sapiens
tggaatccaactgccaggggtacttgtgggataattgtgaagatcacagagtttacatactacatactgcatcaagtatgcacacatactgtgtatcccartgattatttttcctttaatccttacagttacctaagtaactgtatattaaccctaagcatatttaaccctaaatatatttaagtatataactaagtatat

SEQ ID NO: 513548 - DNA, 201 bp, Homo sapiens
ccctctgctctgcccaccccagtctcatggccaatgcctcgctagtgcttctctcagtcccaagatggctgccacagttctgacatctcatacagggacawgcccagaggcagaaaccgggagaacacctgctcccttttcttctctttttggaatgaggagaagcttcccagaagccaccctctctcagcttccccctca

SEQ ID NO: 513549 - DNA, 201 bp, Homo sapiens
ctacctgtttcaaggacctgccagtctgagaagcttcttgtcataaggccatccaggggccacgcacccctaccttgccagcctccagcatgcaggatacygtaacgacatcagcattgttggaccccagccactcctcagtctccacccaggacaattcctccactggaggacacacttcaagcacaagcccacagctct

SEQ ID NO: 513550 - DNA, 201 bp, Homo sapiens
tggtagctggcctgagccacctggaggagctggacctggtgtacgatgtcaaggactgcggcatgaatttcgagtggaatctcttcctcttcacctaccgygactgcctctccttggcagccgccatcaaggcatgccacaccctcaaggtactgtctgctcccagccttccccccaccccttctcagcatctctcagatt

SEQ ID NO: 513551 - DNA, 201 bp, Homo sapiens
taccaactgggcgatctggtagctggcctgagccacctggaggagctggacctggtgtacgatgtcaaggactgcggcatgaatttcgagtggaatctctycctcttcacctaccgcgactgcctctccttggcagccgccatcaaggcatgccacaccctcaaggtactgtctgctcccagccttccccccaccccttct

SEQ ID NO: 513552 - DNA, 201 bp, Homo sapiens
accaggtggtggcacaagacgtacccactcctggtggccctgacctctctggaatgtcaggattcctgccctgcccatgttcaagactggagtcttgaacrtgctcctagtcttcaaactctggcattctctgactggcccaacaggttcccagggaaagaaagctccggagaggaaggtgacccttcagccacctccagg

SEQ ID NO: 513553 - DNA, 201 bp, Homo sapiens; identical to SEQ ID NO: 318802

SEQ ID NO: 513554 - DNA, 201 bp, Homo sapiens
ggtgaaccttttaaaaagtcaccctgacctgtatgtaggcagtggctttttcaggggaaatggtagaatctggcacatgagttgggcatctgtttggttaycctgtggtagtggcctgagggatcagcaatagagctgaaatcaattcaggatgttttgggggaagactcggtggaactcacccatggatagaatgtgaga

SEQ ID NO: 513555 - DNA, 201 bp, Homo sapiens
atggctggcagctgggtgagcccaacctcttggaaatcacctcaaaaacagagcactagccatgtgctagggagtgggcatcctggtgaagggtccagacyataaacagagcaaggagatggccaagaagtgtcgacacgttccacagaactagggagtggcggtgggcagggaggcagcggccacgtgctgctatttatt

SEQ ID NO: 513556 - DNA, 201 bp, Homo sapiens; identical to SEQ ID NO: 406192

SEQ ID NO: 513557 - DNA, 201 bp, Homo sapiens
tatgttatgcttgaagtgtctgtagggtggctgtgtctataagtctggattgaagtcagagctgaagatgcaaattcggaggtcattggaatataggtgctttttttttttctttttctttttgaaacagtctgactctgtcacccaggctggaatgcagtggcacgatcttggctcactgcaacctctgcctcccaggtt

SEQ ID NO: 513558 - DNA, 201 bp, Homo sapiens
tgctgcacgtcccattgctgtctgtgctcatgaatgtcaagtgagactcctcagccctgtacccttctccagctgcttgagtgtcttgcagaaaaggtggrtggttggggattgactcagttgagattttgcccccaaacatccctttcccccaggcccctaaaggggaagtcagggaaataactttctaacaaaagcagg

SEQ ID NO: 513559 - DNA, 201 bp, Homo sapiens
accggctggcctataggtgctatttaaatccatgagatctcctagggagctcaagttgctggaatctgatgggagtgggggcaggagggctgagccagagsgggtaggggatgtcattggcaggaagcctgtccatctcggctgagtcttttttctgtgaggttgagtcaaggccatcagcggggagggagctgagctgag

SEQ ID NO: 513560 - DNA, 201 bp, Homo sapiens
ggggaagagagatcaatcacccaggtgtttgtttagctaaagctgcagtgacagggaagactgggagaggtcagggctggagcgtgcatgaacaggtcctrtttagccatgtgtgtttggctatgttatgcttgaagtgtctgtagggtggctgtgtctataagtctggattgaagtcagagctgaagatgcaaattcgga

SEQ ID NO: 513561 - DNA, 201 bp, Homo sapiens
aagaattctacaaaaggccaaccaacaatgaaaggtttagaaaactgctctggaacatccaggtgaacttcagaaaagaacagtgaaaacagaaaaacacrggagcttcttttgagattgtcttcattaagtatgtgtctaagggatacagccttttctttatcttacagcagaaaaaaaaaaaattgtgacagacattcc

SEQ ID NO: 513562 - DNA, 201 bp, Homo sapiens
atagtacaaacagtctgtacagtttttcatatagtctaattagtaactacaaagtgtccttcgaattataattgacatttacaaaaataaataataaaacygcaaaaggggaaaaaataattttttttttgctattataagcaatagaacatggaacgtttgaaacatttcctaagcatagagtttttaccctagaaatga

SEQ ID NO: 513563 - DNA, 201 bp, Homo sapiens
ctgctggtcacacaacccctggggtcacacttaagattgggggtataaaatgtattctttcactaatctgtgccttccttggctcttgcttacttagatgygagagcagagagaatccttcataaagaacaacaacaacaaaaaaaggggggggaagtttttacattaactgatgtaaaggatttctccttacccctgtgg

SEQ ID NO: 513564 - DNA, 201 bp, Homo sapiens
ggggggaagtttttacattaactgatgtaaaggatttctccttacccctgtggctcatatttatcatctgtgtctgctattgtgttgccatgttccctttyattggacttgggaaagttttctttacagacaaatttggattttctttccaggcagcaagtgcaatgaacagtgttgtatatgtcgttatcagctcccaca

SEQ ID NO: 513565 - DNA, 201 bp, Homo sapiens
gggggtataaaatgtattctttcactaatctgtgccttccttggctcttgcttacttagatgtgagagcagagagaatccttcataaagaacaacaacaamaaaaaaaggggggggaagtttttacattaactgatgtaaaggatttctccttacccctgtggctcatatttatcatctgtgtctgctattgtgttgccat

SEQ ID NO: 513566 - DNA, 201 bp, Homo sapiens
gcatttattcatttcttcaacagatacatacagaatatctaatgtgtgccaggaaatatacctgaagatatgcagtgaactaaatatataccatgcccacycttttctgaatatcatactaaagtaaattattagtatgatcgacctatcagaaatatcataattttgagtcggcattatatatgacagccttggaatata

SEQ ID NO: 513567 - DNA, 201 bp, Homo sapiens
cttttcttcattctacttgaactatctgatcatttactttaataatttttcttctgtgatctgtatcctcatgatgttttatatctaatctagtgttttcrttttctgtttgcctcattccttaacataagcactgtaatggaatattcttcttcactggtagtctagtttttgatatattcattggatcttctttctctc

SEQ ID NO: 513568 - DNA, 201 bp, Homo sapiens
caatctgatattctaccacatttgtctttactcactaaacttcagccttactgcaccttttttctttctcaaatatgctaagccagtttcctttgagaggyctttgcagtgcatgttcacttttcctggaatactttttcttcagtttttcatgtggatgccctttcttctccttcaggcctctgtctaaatgccttttgt

SEQ ID NO: 513569 - DNA, 201 bp, Homo sapiens
catagatttttttttaatccatattcaaaaaatgtttccatattaagcccagagctacatttatatgaggattaaaaaaataggatttaactgataggtarcacaagatgaagtgggagaatttagattggttccatgcctctacaatgagaagtcatttagatgtcaactctaagagaacatttgttacatcccctattg

SEQ ID NO: 513570 - DNA, 201 bp, Homo sapiens
tttgattattatatgtacattaacatcccagatttatatctctacctctcatctatctctcgagttcccaacttaactacttgtcatctcttttttaagtstaataaggatttcaaatttaaaataccataacagaatccataatttcccccaagatttttccacgttgtaaatgataccaatatttttccagttacttaa

SEQ ID NO: 513571 - DNA, 201 bp, Homo sapiens
tttccaaaaagacttaatagtttacaatatcactagtacttgtttttctaccatgcatcattattacgaagtaaacttgttttttcttgttttgcttgttkgctaagtgaagtctgtatctcattttgatttgaattttcatttctttaatagaaaaagatatctgtctgtactttctgttgctatttaaaatttgtcttc

SEQ ID NO: 513572 - DNA, 201 bp, Homo sapiens
tcgatccttcgtagataaacttatttctgaatctttgtcaagtagttgcctttcttgttgcccttataaattaaagcataaattcactgattttatatgayatatataacctatgtgctaaaatatatgggatatgaattagagttcaacaaggatgttatttttaaaaaccaaaccagaaacacatacaaacatgttatt

SEQ ID NO: 513573 - DNA, 201 bp, Homo sapiens
gttgatttgttaaaagtatagataattttgctcctgcaaacctagcaaagatcagacttcattgtttgtgatgttattttgcttaaaacacatataaaatmagcctaggttaacaaaatttgctgctagtaattataaggacatgtctattcagtcatttaaaaatataaataatgatagattatcataaatggaaaatat

SEQ ID NO: 513574 - DNA, 201 bp, Homo sapiens
attaaaccccagtctctctttgaatccaaacattctttgatttttatatgatcatctatatgctttatttactctttggaacaaagttctaccaaggagtwgggggaaagtgtcacaattatatttctaagactctgtttacaaattacaagtgaaattggaattttgttaattatccagttaatttaattagtgtttaaa

SEQ ID NO: 513575 - DNA, 201 bp, Homo sapiens
actgtcaaattttgtcttcagacatatatatactagcagaaattggggcaaattatttgatatcattaagcctgaaacttattttcagaatgaatatattrgattaaaccccagtctctctttgaatccaaacattctttgatttttatatgatcatctatatgctttatttactctttggaacaaagttctaccaaggag

SEQ ID NO: 513576 - DNA, 201 bp, Homo sapiens
tcatgcatttattcatttcttcaacagatacatacagaatatctaatgtgtgccaggaaatatacctgaagatatgcagtgaactaaatatataccatgcycacccttttctgaatatcatactaaagtaaattattagtatgatcgacctatcagaaatatcataattttgagtcggcattatatatgacagccttggaa

SEQ ID NO: 513577 - DNA, 201 bp, Homo sapiens
ccttttctgaatatcatactaaagtaaattattagtatgatcgacctatcagaaatatcataattttgagtcggcattatatatgacagccttggaatatrtgatttcttttctttttcttggaaggattgagttggtgatttagtatatgaatttaaattttccatcctggtcatagtcaatgtattctccaaaacatag

SEQ ID NO: 513578 - DNA, 201 bp, Homo sapiens
ctggataaccacctgtgttctccactcctgtacctggactcatcagaaattttaccgaaatcaaatagccacgtggattggtgctactaaaattgaaatcycacaggtcaaggtcctcatcttagttgaactgtcaatgatacctgcacaccattttatatgttccattttggctccccctcttattgtccgtagctattt

SEQ ID NO: 513579 - DNA, 201 bp, Homo sapiens
tagtatatccatgcaaacaattgtaggtctacattatcactttataatcatctcaccaagtaatctggaacagaatgtttaattccatgctctttttgtcrtaaacacaattaaaaacctacctattttcacatgttaatgtttcattttcttctctcttcttgcttagtgcttgtctgtgtatgttatttagacttctca

SEQ ID NO: 513580 - DNA, 201 bp, Homo sapiens
ctacttcccccagcccccaccccgacgctggaagacaagtccagaggaaacttgggcacagcaagagcaaacagaagaaaacttcgctgggttaagtctastgtctccccaatgctacatagggccagacagctgggctcacaggcagatattgaaagtggccccttagaggggaaacaaccaaatatgaggggggggtgg

SEQ ID NO: 513581 - DNA, 201 bp, Homo sapiens
gcagtccttaattagtcaccaactgtgactgtgcgttgcgcacttggcggcgccccgggtcaggtccagcgtgagacgcgagggagttctgactgctggaytctgttagcaccggacaaaaagagggtttgtattctatttccgggcctgggactgacttgttcacttcgacttggcttccagggagcaaccaggcagagc

SEQ ID NO: 513582 - DNA, 201 bp, Homo sapiens
gcttccccgggctgcctccgtctgccactctcgcctgcagcgcgcggagtggtgactcctctgagcgtgtcagcggcgagaggaggggcgggaaagtggcycccggcttgcacgctgcggtcctcctcctctcctccgcctgcctcctccccctggtgctgcagtgccgggcggcggcgtggcgagagtaccagcggtgcg

SEQ ID NO: 513583 - DNA, 201 bp, Homo sapiens
ggccaccagtcgggaagagaaatccagcagcgggggaaagtctccccgcggatgcccgcttcacctcccccactcaccgctccagccgtcggagacccttkccctgagtggtgtcagcactgcagccgcctcagtgcgggcgccgctccggctcgcttccccgggctgcctccgtctgccactctcgcctgcagcgcgcgg

SEQ ID NO: 513584 - DNA, 201 bp, Homo sapiens
agcgcccggccaccagtcgggaagagaaatccagcagcgggggaaagtctccccgcggatgcccgcttcacctcccccactcaccgctccagccgtcggasacccttgccctgagtggtgtcagcactgcagccgcctcagtgcgggcgccgctccggctcgcttccccgggctgcctccgtctgccactctcgcctgcag

SEQ ID NO: 513585 - DNA, 201 bp, Homo sapiens
gtgtcttgtctccccagtcttcccacacctggtgaaggagctcaacgcaggccttcatgtgatgattctgctgctcctcttcctggccttggccctggctstggtcagcatgggctttgccattcttaacatgatccaggtcccgtaccgggcagtcagcggtcctgggggcatctgcctatggaatgtcctggcaggtaa

SEQ ID NO: 513586 - DNA, 201 bp, Homo sapiens
ttagtaaatgttgattatcctcaattcatatgcagggattactatccccattgtactgatgaagaaattgaggcttgagaagtcacatgactttcccaagwctgtcaaaatataacagcaataaccacagctgccatttttgagaactgactttcccaggcactatttgagctactctattatgttatgtcatttcatctt

SEQ ID NO: 513587 - DNA, 201 bp, Homo sapiens
gagataaaaataaatggaaattcagaactggaaagaaacatcagaacgcacaatgtaaacgtggagtgcctgaaaatgtgtcacctaacgggacacctaaygggaaaaacaaaaactctagttctcaggactgggagacgccaaccttcagtgactaagagaggcaggtgaaccagcaaaggaactagttccatcagggtg

SEQ ID NO: 513588 - DNA, 201 bp, Homo sapiens
aatcagagagaaggaggttgcaccaagccgagatggtgccactgcactccagcctgggtgacagaacaagattctgtctttaaaaataaaaataaataaawatcagcacaagctactgtgtctgaaacaaaaaggggctgagagtttgaaaagagaaaaaaaaaatctaagggacattaagatgggatagaagcacaggga

SEQ ID NO: 513589 - DNA, 201 bp, Homo sapiens
gggcagatcacttgaggccaggagtttgagaccagcctggtcaacatggtgaaacccccgtccctgctaaaaatgcaaaaattagccaggcatggaggcgrgtgcctgtaatcccagctattggaaaggctgaggcatgagaattgcttgaatcagagagaaggaggttgcaccaagccgagatggtgccactgcactcca

SEQ ID NO: 513590 - DNA, 201 bp, Homo sapiens
ccctgtgttatggcccaagaatgtgggggttgagtgagatttgccctttgccaataagtattttttaattatagttaatgcacttcctactatgaaggccraggactgggcactctttaccaccctctccacatcactccacattccccaaattccctctcccccgtcatcctaatatgattatttctcaatttttaaaaa

SEQ ID NO: 513591 - DNA, 201 bp, Homo sapiens
tattccactagtggccaggacctgggtttgacttcagatgtcctgcttttcttatttgccctgctggggcgaaaaggactgccagacctctctgggattcrgagcaaacaaattatcttagatgctgatagatgctgatagatgcatcatatgctgatagatgctgatagatgcatcatatgctgatagaatgatgctgat

SEQ ID NO: 513592 - DNA, 201 bp, Homo sapiens
attgaacaaatagctccatcaaaattataacataaaacttgaaaacacacacacataaacaaataaaaaaaagaaatgctaaaagctaaccatgacaactacatggactactcgattctgaactagatgctttgctataaaggatgtcttcgggactttaggggtcaagaaaacttcccctttgcactctgaaggttctct

SEQ ID NO: 513593 - DNA, 201 bp, Homo sapiens
agaaagaaaaagacaaacattactttagcattgtccacacattcaattgtactatggagtatttacagaccaggctcttaagaaaacagggatgaacaaaycagacaagtacttgccctagaaaagcttaccatctggccgggtacagtggctcacgcctgtaatcccagcactttgggaggccaaggcaggtggatcacc

SEQ ID NO: 513594 - DNA, 201 bp, Homo sapiens
tattgaacaaatagctccatcaaaattataacataaaacttgaaaacacacacacataaacaaataaaaaaaagaaatgctaaaagctaaccatgacaactacatggactactcgattctgaactagatgctttgctataaaggatgtcttcgggactttaggggtcaagaaaacttcccctttgcactctgaaggttctc

SEQ ID NO: 513595 - DNA, 201 bp, Homo sapiens
tagtctcctttagatttacagcttttaattctagcacagtgtaacctcgaggcagctacggggtatatcagagcctcccacaaccaggagtctgtttctcytggggtctctttctgccattcactatccatctgtagaaaaaaaaaaaataatccccacagtcgcagatcagtgtagatggggacgtaagtgaaaatgctt

SEQ ID NO: 513596 - DNA, 201 bp, Homo sapiens
aaatctggatatggtttcaatcattatgtggatataattctttctttttaaaagatgaattatatacattatggacattatggatactttattaaatcagyctattcacatactgttttttctccaatcttttgctattgtaatgaatatccaatatttgatccacgctttgagcacatgtgggagtgcttctggaaaata

SEQ ID NO: 513597 - DNA, 201 bp, Homo sapiens
attactatgttagtcgtgtgtcctaaggattgcctggttaagaaaggggataatgaaacaatttaaaaatcaggcacaagcggcagggtctggtggctcaygcctgtaatcccagcacgggcagatcacttgaggccaggagtttgagaccagcctggtcaacatggtgaaacccccgtccctgctaaaaatgcaaaaatt

SEQ ID NO: 513598 - DNA, 201 bp, Homo sapiens
aatcacttgaacttgggaggtggaggttgcagtgagccaagattgtgccattgcactccagcctgggtgaaaagagtgaaaatccatctaaaaaaaaaaaagagaaaggaaaaagaaagaaaaatttaccatctgataaaggagaggcagataaatatatactaggcacagaacacagtatctgaagccattgccttgtag

SEQ ID NO: 513599 - DNA, 201 bp, Homo sapiens
ctctaacaaggttacatgaattaatatttctatgagacttgagagtgcctcttccttacaccattgtcaacacggtgttttagcaaacattttgatctttrccattcacataggtgactgttttctattgtaagagttttggtaagcattactatgttagtcgtgtgtcctaaggattgcctggttaagaaaggggataat

SEQ ID NO: 513600 - DNA, 201 bp, Homo sapiens
ttgtccacacattcaattgtactatggagtatttacagaccaggctcttaagaaaacagggatgaacaaaccagacaagtacttgccctagaaaagcttamcatctggccgggtacagtggctcacgcctgtaatcccagcactttgggaggccaaggcaggtggatcacctgagatcaggagtttgagaccagcctggcc

SEQ ID NO: 513601 - DNA, 201 bp, Homo sapiens
ttgaacaaatagctccatcaaaattataacataaaacttgaaaacacacacacataaacaaataaaaaaaagaaatgctaaaagctaaccatgacaactacatggactactcgattctgaactagatgctttgctataaaggatgtcttcgggactttaggggtcaagaaaacttcccctttgcactctgaaggttctcta

SEQ ID NO: 513602 - DNA, 201 bp, Homo sapiens
aaatcctttgtcagactggagtggatctggtcaacgccacagacagagagctggtcaagttcattggggacatttactacgggctcttccgagggtgtaargtgcggcagtgtgggcttgggggccgccaatcccaattcacgagtgagtatattgggagcatgaaagctgattctaggcactcatttttgttaatgtgta

SEQ ID NO: 513603 - DNA, 201 bp, Homo sapiens
ctggctgaaacccctactggaaagtttactggtggggagacctcaagcaaggcacttgcctgttctctgtgaacgtgagcgggcaccgactttggctggcrttcagtgtagcatcagagctgcccaggatgtaagcagagcagtctgcacaaacaggaatccaagctggacttaggaacgggcttctggaaaggaaaaaac

SEQ ID NO: 513604 - DNA, 201 bp, Homo sapiens
cacttgtctccttaaagccttacaacaaagttatacagaaggaattgttaatgttcccattttccagaggagtacactgaggcttggagaggttacataayttacctgaggtcacccagccaggaaacagtagagccggactccagacccatgccacatgaccacaacaagtgggtggaggctgcctgcagaactgaacct

SEQ ID NO: 513605 - DNA, 201 bp, Homo sapiens
gagccaagggttctggatccacatcaaaaagatctttccttccttccttgcttccttttctttttctgtagagatgtatagaaacattagaaataaggatytgtgcatttttgcagtttacctctattaattatgactattaaaatattgagagtttacacgtgtcagacattgtaagcacctcacgccacttgtctcctt

SEQ ID NO: 513606 - DNA, 201 bp, Homo sapiens
ggtgagagggaaccccggagccctgtggaggaagggagctgcagagagcgcactcttgagtggggtttgagtaagcgctgagcagcgtcaggagcctttakaatgagtggtctcaggggagggtcgttactgaggtatggaggagtggccgggaggaatgcatcatcctatcagggcagcagttcaggagcagtcctcttc

SEQ ID NO: 513607 - DNA, 201 bp, Homo sapiens
tcgaggaccctgacgtggtggcactggtggtgcgcgacggcgagctggcagacctgggccagtacagcatcaacgtcaccaaccccttcggccagtgctcmgactcggcgcgcatcctcgtggaaggtacgcgcgccccgggcgcagcgccagggcgcagaccagcaccactcagccagagcccgcagcccggtccagctg

SEQ ID NO: 513608 - DNA, 201 bp, Homo sapiens
ttcaggagcagtcctcttccctaccaagccacacgtttaggggtctggcgggtccagggggcaggtaggagatggtgcgctcgcggtaagggctgtggccrggcctgtcttaggaactctgggccctgactcggcccgcgggtaggtcccggaaggagctgcgcgagaaggggccgccgcgggtgctggagccgctgaagg

SEQ ID NO: 513609 - DNA, 201 bp, Homo sapiens
actggtggtgcgcgacggcgagctggcagacctgggccagtacagcatcaacgtcaccaaccccttcggccagtgctccgactcggcgcgcatcctcgtgraaggtacgcgcgccccgggcgcagcgccagggcgcagaccagcaccactcagccagagcccgcagcccggtccagctgcgcgtgtttacctctgggccta

SEQ ID NO: 513610 - DNA, 201 bp, Homo sapiens
tggccgggaggaatgcatcatcctatcagggcagcagttcaggagcagtcctcttccctaccaagccacacgtttaggggtctggcgggtccagggggcasgtaggagatggtgcgctcgcggtaagggctgtggccgggcctgtcttaggaactctgggccctgactcggcccgcgggtaggtcccggaaggagctgcgc

SEQ ID NO: 513611 - DNA, 201 bp, Homo sapiens
gcagagagcgcactcttgagtggggtttgagtaagcgctgagcagcgtcaggagcctttagaatgagtggtctcaggggagggtcgttactgaggtatggrggagtggccgggaggaatgcatcatcctatcagggcagcagttcaggagcagtcctcttccctaccaagccacacgtttaggggtctggcgggtccaggg

SEQ ID NO: 513612 - DNA, 201 bp, Homo sapiens
cctcttccctaccaagccacacgtttaggggtctggcgggtccagggggcaggtaggagatggtgcgctcgcggtaagggctgtggccgggcctgtcttakgaactctgggccctgactcggcccgcgggtaggtcccggaaggagctgcgcgagaaggggccgccgcgggtgctggagccgctgaaggacgtggtgctga

SEQ ID NO: 513613 - DNA, 201 bp, Homo sapiens
gaggtatggaggagtggccgggaggaatgcatcatcctatcagggcagcagttcaggagcagtcctcttccctaccaagccacacgtttaggggtctggcsggtccagggggcaggtaggagatggtgcgctcgcggtaagggctgtggccgggcctgtcttaggaactctgggccctgactcggcccgcgggtaggtccc

SEQ ID NO: 513614 - DNA, 201 bp, Homo sapiens
atgacccacaggtccagagtgcggccattcgtatccaggcctcttaccggggccacaggtgagagggaaccccggagccctgtggaggaagggagctgcasagagcgcactcttgagtggggtttgagtaagcgctgagcagcgtcaggagcctttagaatgagtggtctcaggggagggtcgttactgaggtatggagga

SEQ ID NO: 513615 - DNA, 201 bp, Homo sapiens; identical to SEQ ID NO: 106078

SEQ ID NO: 513616 - DNA, 201 bp, Homo sapiens
ctggcgggtccagggggcaggtaggagatggtgcgctcgcggtaagggctgtggccgggcctgtcttaggaactctgggccctgactcggcccgcgggtakgtcccggaaggagctgcgcgagaaggggccgccgcgggtgctggagccgctgaaggacgtggtgctgatcgaaggcagcgcggccaagctcacttgccgc

SEQ ID NO: 513617 - DNA, 201 bp, Homo sapiens
agatggtgcgctcgcggtaagggctgtggccgggcctgtcttaggaactctgggccctgactcggcccgcgggtaggtcccggaaggagctgcgcgagaargggccgccgcgggtgctggagccgctgaaggacgtggtgctgatcgaaggcagcgcggccaagctcacttgccgcatttcggctttcccggacccattca

SEQ ID NO: 513618 - DNA, 201 bp, Homo sapiens
gtgcggccattcgtatccaggcctcttaccggggccacaggtgagagggaaccccggagccctgtggaggaagggagctgcagagagcgcactcttgagtrgggtttgagtaagcgctgagcagcgtcaggagcctttagaatgagtggtctcaggggagggtcgttactgaggtatggaggagtggccgggaggaatgca

SEQ ID NO: 513619 - DNA, 201 bp, Homo sapiens
aagaagaggaaatgggaaaagatggtaatctgggttccctggtggaggtctccagagcaggaagacatcttgctgtcctagtttttataaacagaagagcrgtgatgatggagcagtgcttggggatccattttgagcaaagcattgagtggatatgaggagggggctaagctgagaaatgaagaacaggtaacatgatgg

SEQ ID NO: 513620 - DNA, 201 bp, Homo sapiens
ctgtggcagcgtttctcagcctcaccactattgatattttgggctgagagattctcctttgtgaggatgtgtcttgttaattgcaggatgtttagcagcayccctggcctctactcaccagatgctagtaggatctttccaattgagccaatcaaaatttttgttagaaaattgctgcaagtcccctatgtggcaaatcac

SEQ ID NO: 513621 - DNA, 201 bp, Homo sapiens
atgtgtcaaatgtcttttactacagagtattatgataggtaatgtatacaatcgaacacactaaaatgggacccattctagaggttttagtctgtggcagygtttctcagcctcaccactattgatattttgggctgagagattctcctttgtgaggatgtgtcttgttaattgcaggatgtttagcagcatccctggcct

SEQ ID NO: 513622 - DNA, 201 bp, Homo sapiens
tttaaagtcttagcattttattttaaaatatctgcccattgtagtcttttgctttcttgataccattttgataggtctgactcttttttaatgttctgagwtatgtaagattttgtatatattggatgtcttcccaactctgttgagctgtttcctttatagacaaagaccatgggatcttatttctcagcttctcaaaat

SEQ ID NO: 513623 - DNA, 201 bp, Homo sapiens
aaataataatcataggcttgaaagaaaaattatagatcatctaattttgtggttgaatctattttaaagtattaattaattcatttaggatttttaaaccwgctgttatttgtaagccactttgtgaaagttagaggagcacacagttatcatagtgattgaaaacttgaagactttgcctctgggtctaaatcctggctc

SEQ ID NO: 513624 - DNA, 201 bp, Homo sapiens
ggattaatttttaggaaattaaagtctggaagaaacacgtaaataaacctagaattccttttgcttgccctaattaagttgaatatgaaatgtttttttttcctcttaaaactccaaacatttcaacttcccaatgttatttttattggttagtaagaattaggttgagaatagtatttttgttttttggtttcctatttt

SEQ ID NO: 513625 - DNA, 201 bp, Homo sapiens
atagaattttttgaaatttgaaaacttacagtctatagactatttgagaggatgaaaatgctcattttagtgggctgttctgcagatttttttttttttttaataagacagagttttgctcttgttgcccaggctggagtgcaatgacgcgatctcggctcactgcaacttctgcctcccggattcaagcaattctcctgc

SEQ ID NO: 513626 - DNA, 201 bp, Homo sapiens
tttgcttaaagtcttgtttatatggcagagtcaggatttgaacccagcaatccaactctagggcctgtgcccagtgtctgtattaaaaattgatttttacrccctggtgacatccgatataatgctgactttttagaggatgtttattttatttataatttattcatagcctatttctaaaatatgaggaagctacaggca

SEQ ID NO: 513627 - DNA, 201 bp, Homo sapiens
ttgggatcatctattctcctaaaaatgtgttctttgtctttgacatcctaatatgtgttatacacatgaaaaagcatagtcttatgatatccacagcatartaaagaatacaagtatggaaacacatgtagtataagtcagtgcaacaggcgaagcaatggaagtatgtccaaacttattgtagttgcacagaagagggaa

SEQ ID NO: 513628 - DNA, 201 bp, Homo sapiens
attttgggctgagagattctcctttgtgaggatgtgtcttgttaattgcaggatgtttagcagcatccctggcctctactcaccagatgctagtaggatcyttccaattgagccaatcaaaatttttgttagaaaattgctgcaagtcccctatgtggcaaatcacaactagtggtaaatgcagatatatttagttagata

SEQ ID NO: 513629 - DNA, 201 bp, Homo sapiens; identical to SEQ ID NO: 120654

SEQ ID NO: 513630 - DNA, 201 bp, Homo sapiens
tatgtgttatacacatgaaaaagcatagtcttatgatatccacagcataataaagaatacaagtatggaaacacatgtagtataagtcagtgcaacaggcraagcaatggaagtatgtccaaacttattgtagttgcacagaagagggaaagattagccctacaaacgcaatagagaaagctctttggggctggtaatgtc

SEQ ID NO: 513631 - DNA, 201 bp, Homo sapiens
ctttaaaatacactgcaataaagaaagctgcttaacttaaaaagaacttatttgacaaagtggtttgattacagaacatctattaagctctaatgatatarggttctgaggattaatttttaggaaattaaagtctggaagaaacacgtaaataaacctagaattccttttgcttgccctaattaagttgaatatgaaatg

SEQ ID NO: 513632 - DNA, 201 bp, Homo sapiens
ggctgtcagctgacagttgtttccagattttagaggatggctcattcctcgacttgtgatcctcttcctacacccaataaaggagggttgagtgccactcrggcttcaaagctcccctttccccccatcatatatgactcttctgacttcctcttttacttttatgggctgttatgattagatcgggactaccaggataat

SEQ ID NO: 513633 - DNA, 201 bp, Homo sapiens
tgccatcccagtaactagtgcttcacttctcacatcttcctttttcttccaaagtcttattccatatcttcattagtttcttgtctaagacttcatagatwctagttactctctggggtccctgaagcaatagtattaaccctcacacaaatcagtaaatgtgagtagtagttggttagacggatcagtcatggtagattt

SEQ ID NO: 513634 - DNA, 201 bp, Homo sapiens
tctcctaacactttgcacatttttgttctatttctacagataatctatgacttacaatgccacaatttttctactttacaatgatgcagaagcaatatgcrttcggtacactcctcaacttacattggggttacatctgataaacccagcataggtggaaaatgtcacatcaattatgatgggttatcaggatataacccc

SEQ ID NO: 513635 - DNA, 201 bp, Homo sapiens
gtctcaaactcctgacctcaggtgatccacccaccttggcctcccaaagtgctgggattacaggcatgaaccactgcgcgtggcctgttctgcagattttygacataacatgtgaaatataaattgaataaaacattatttgacacacagtgatcaataaatgaggttaatattatattcagtttcacaccgaattagaga

SEQ ID NO: 513636 - DNA, 201 bp, Homo sapiens
tgtcctgatggaagaggttggagctgagagattgagcctcctatgagagacatgggttgttaaaagagttgaattagctttgatgattttttttgaaacaaaaagtatttagttacttttttttttttttttgagatggagttttgctcgtcacccaggcgagtgcagtggcgcactctcggctcaatgcaacctccacct

SEQ ID NO: 513637 - DNA, 201 bp, Homo sapiens
ggttggagctgagagattgagcctcctatgagagacatgggttgttaaaagagttgaattagctttgatgattttttttgaaacaaaaagtatttagttacttttttttttttttttgagatggagttttgctcgtcacccaggcgagtgcagtggcgcactctcggctcaatgcaacctccacctcccaggttcaagcga

SEQ ID NO: 513638 - DNA, 201 bp, Homo sapiens
gttggagctgagagattgagcctcctatgagagacatgggttgttaaaagagttgaattagctttgatgattttttttgaaacaaaaagtatttagttacttttttttttttttttgagatggagttttgctcgtcacccaggcgagtgcagtggcgcactctcggctcaatgcaacctccacctcccaggttcaagcgat

SEQ ID NO: 513639 - DNA, 201 bp, Homo sapiens
agggaagctgttgggccccatcccaaagggtaggtctttcccaccacccggagccacacctccctccacgccttgcttagaaatgggcttgcagcccagcrcagtggctcatgcctgtaatcccagcactttgggaggggctgaggtgggcagatcacttgagatcaggagttcaagaccagcctggccagacatggtgaa

SEQ ID NO: 513640 - DNA, 201 bp, Homo sapiens
atctttcaacatctctccaccctaatacaagcacagctagttggctttgtaacgcctcaaagaactccatcacagatgccctgattatccctgcacagctrggctttgcccagttctggctctcccaaaccgtgctgcggcgagtaatcccgaatgtacggtggagtgagcagactgacccccaggaggcacaggaggcgt

SEQ ID NO: 513641 - DNA, 201 bp, Homo sapiens
atccatccgtctgtctatccatcagacctggattaggaatccactgaggtttgttgcagtggctcgggcctcagaggtgacaaggcccagccctggccttygagtaggtagcagaggcctcatatgggcctaatttaccattccctccctcccctcctcctcttcgaccccttttgtagctcagctgtgaccaggacagag

SEQ ID NO: 513642 - DNA, 201 bp, Homo sapiens
gaggggctgaggtgggcagatcacttgagatcaggagttcaagaccagcctggccagacatggtgaaaccctgtctctactaaaaatacaaaaattagccrgacgtggtggcgcatgcctgtaatctcagctacgcaggaggctgaggcaggagaatcgcttgaacccaggaggcggaggttgcagtgagctgagatgatg

SEQ ID NO: 513643 - DNA, 201 bp, Homo sapiens
tagctcacgcctgtaatcctagcaccttgagaagccaaggcgggaggactgcttgagcccagggatttgagaccagcctgggcaacaaagggagagcccayttctacaaaaaataaaaaaattagccaggtgtggtgacacatgtctgttatcctagctactcaggaggctgaggcaggaggattgcttgagcccagggaa

SEQ ID NO: 513644 - DNA, 201 bp, Homo sapiens
acagatacaacttgcccacctattaagaatgcatggcctggcgcagtagctcacgcctgtaatcctagcaccttgagaagccaaggcgggaggactgcttkagcccagggatttgagaccagcctgggcaacaaagggagagcccatttctacaaaaaataaaaaaattagccaggtgtggtgacacatgtctgttatcct

SEQ ID NO: 513645 - DNA, 201 bp, Homo sapiens
cctgccttttgcctgctccgtggccctggacaagttcctgatgatcctgccagttttcccagctatgaagcgaggagctggacacgaggtcctctggagtsaccctcagggaggatgggttgtgtcctctgaagagggctggtaggagggcagtgctgagttcatttcactgtcctgatggaagaggttggagctgagaga

SEQ ID NO: 513646 - DNA, 201 bp, Homo sapiens
ctagatgttcaagagtgtgaatactttaacttttcacagatacaacttgcccacctattaagaatgcatggcctggcgcagtagctcacgcctgtaatccyagcaccttgagaagccaaggcgggaggactgcttgagcccagggatttgagaccagcctgggcaacaaagggagagcccatttctacaaaaaataaaaaa

SEQ ID NO: 513647 - DNA, 201 bp, Homo sapiens
ccctcagggaggatgggttgtgtcctctgaagagggctggtaggagggcagtgctgagttcatttcactgtcctgatggaagaggttggagctgagagatygagcctcctatgagagacatgggttgttaaaagagttgaattagctttgatgattttttttgaaacaaaaagtatttagttacttttttttttttttttg

SEQ ID NO: 513648 - DNA, 201 bp, Homo sapiens
acttccttcctgcgtgcttctatgtgcccaggatgagcagaagtgcgctccatcatctgtgtgctccaagacagagacttgggttctattaaggaaaagtygcttggtctcagtggcctcatctgtaaagtggggatggtaacagcccctccctctcatcctgaacctgtggatctgaggaggggatgcacacacagcagc

SEQ ID NO: 513649 - DNA, 201 bp, Homo sapiens
gagttttgctcgtcacccaggcgagtgcagtggcgcactctcggctcaatgcaacctccacctcccaggttcaagcgattctcctgcctcagcctcctgartagctgggactacaggcacccaccaccacgcctggctaatttttgtatttttagtagagacgggtttcaccatgttagtcaggctggtcttgaactcctg

SEQ ID NO: 513650 - DNA, 201 bp, Homo sapiens
tttaaatttttcattctaacttactttaaaatcagaagacaaaagtaaatacataacactggccggggcggtggctcatgcctataatcccagcactttgsggggctgaggcgggtagatcacttgagctcaggagttctagtctagcctgggtaacatggcgaaacccctgtctctacgaaaaatacaaaaaattagctg

SEQ ID NO: 513651 - DNA, 201 bp, Homo sapiens
gcccacaacagtttctggcacagtggcagggtggatggagcccacccacccatgtccaccctcagggcagttgcagccaagggctctggaatagactggcyaggttcaaactgctgaagagcaggtgctttcatcctgctgaccccaggttcctcatctgcatatggagggcagccttgggaggggccacttcacagggct

SEQ ID NO: 513652 - DNA, 201 bp, Homo sapiens
aaaaaaaaaattcctaaagacaatggtcacctttaaatttttcattctaacttactttaaaatcagaagacaaaagtaaatacataacactggccggggcrgtggctcatgcctataatcccagcactttggggggctgaggcgggtagatcacttgagctcaggagttctagtctagcctgggtaacatggcgaaacccc

SEQ ID NO: 513653 - DNA, 201 bp, Homo sapiens
gctgtgggcagcacagagcaggacacccgtggcagacatggcatgcactccatggacctagcgctaatcctcattgtccttcccccttctattcacccacmtagggccctgcaggctcctaccagcctctgggggccctggtcgggtctatatgcccccgatctggcccaaaatgagtctcccctgtgccgcccgccctgc

SEQ ID NO: 513654 - DNA, 201 bp, Homo sapiens
taggccaaggtggatgccagggccaggccaggagacactcctggtggcctagctctgcccccaccacctggttggcatctaaccactggagagtccatgcyatcctgtgcccatcagaccccatcctggatggcagagagggcacaggccaggagcttggagacgcggatcccacccaggcctgccttttgcctgctccgt

SEQ ID NO: 513655 - DNA, 201 bp, Homo sapiens
attatgaatgatactagaacggacaccctggtgtgtatgtatctgtgcacttgtttccgtagcacagattcctagatgttcaagagtgtgaatactttaamttttcacagatacaacttgcccacctattaagaatgcatggcctggcgcagtagctcacgcctgtaatcctagcaccttgagaagccaaggcgggaggac

SEQ ID NO: 513656 - DNA, 201 bp, Homo sapiens
acggtggagtgagcagactgacccccaggaggcacaggaggcgtagcccccaggacccacgacacttttagggttccagaaaaaagttttcattctacataaaaaaaaaaattcctaaagacaatggtcacctttaaatttttcattctaacttactttaaaatcagaagacaaaagtaaatacataacactggccggggc

SEQ ID NO: 513657 - DNA, 201 bp, Homo sapiens
attataggcatgagccaccgcgcgcggccacctttctagtttcactgttggaagtttggagttccatgcaatgttgaaattgtgttcagtgctgcctgacyggctcccagggaccaggatgcgtggcctggccgggcagggctcccttccggtccttcactccattaggccacagggattcatggaggcctgctctgggtc

SEQ ID NO: 513658 - DNA, 201 bp, Homo sapiens
ctgtcctgatggaagaggttggagctgagagattgagcctcctatgagagacatgggttgttaaaagagttgaattagctttgatgattttttttgaaacaaaaagtatttagttacttttttttttttttttgagatggagttttgctcgtcacccaggcgagtgcagtggcgcactctcggctcaatgcaacctccacc

SEQ ID NO: 513659 - DNA, 201 bp, Homo sapiens
taggccacagggattcatggaggcctgctctgggtcagaacaaggcagacctcggtttccttcatgcaaagtggagatgctatcccccagcctgtgagccttgtgtgtctggccccatgcctgagctgtggggctaaccccaggcgtcttcctctggcttgagcagcgctggtgcaccacccggaagccaaggctccctgc

SEQ ID NO: 513660 - DNA, 201 bp, Homo sapiens; identical to SEQ ID NO: 505997

SEQ ID NO: 513661 - DNA, 201 bp, Homo sapiens; identical to SEQ ID NO: 505998

SEQ ID NO: 513662 - DNA, 201 bp, Homo sapiens; identical to SEQ ID NO: 506000

SEQ ID NO: 513663 - DNA, 201 bp, Homo sapiens; identical to SEQ ID NO: 506001

SEQ ID NO: 513664 - DNA, 201 bp, Homo sapiens; identical to SEQ ID NO: 506003

SEQ ID NO: 513665 - DNA, 201 bp, Homo sapiens; identical to SEQ ID NO: 506006

SEQ ID NO: 513666 - DNA, 201 bp, Homo sapiens; identical to SEQ ID NO: 506008

SEQ ID NO: 513667 - DNA, 201 bp, Homo sapiens; identical to SEQ ID NO: 506009

SEQ ID NO: 513668 - DNA, 201 bp, Homo sapiens; identical to SEQ ID NO: 506010

SEQ ID NO: 513669 - DNA, 201 bp, Homo sapiens; identical to SEQ ID NO: 506012

SEQ ID NO: 513670 - DNA, 201 bp, Homo sapiens; identical to SEQ ID NO: 506013

SEQ ID NO: 513671 - DNA, 201 bp, Homo sapiens; identical to SEQ ID NO: 506014

SEQ ID NO: 513672 - DNA, 201 bp, Homo sapiens; identical to SEQ ID NO: 506015

SEQ ID NO: 513673 - DNA, 201 bp, Homo sapiens; identical to SEQ ID NO: 506016

SEQ ID NO: 513674 - DNA, 201 bp, Homo sapiens; identical to SEQ ID NO: 506017

SEQ ID NO: 513675 - DNA, 201 bp, Homo sapiens; identical to SEQ ID NO: 506018

SEQ ID NO: 513676 - DNA, 201 bp, Homo sapiens; identical to SEQ ID NO: 506020

SEQ ID NO: 513677 - DNA, 201 bp, Homo sapiens; identical to SEQ ID NO: 506021

SEQ ID NO: 513678 - DNA, 201 bp, Homo sapiens; identical to SEQ ID NO: 506023

SEQ ID NO: 513679 - DNA, 201 bp, Homo sapiens
tgtatggtgagagacaggggcccagtttcattctttagcatgtggggatttatttctgggttccctattctgttccattggtttatgtgtctgtttttagyccatattatgttttggttactacagccttgttatatatatatgtatcaaggtgactgtgaaggtactatatggaaacattttttattgttgtaaaatata

SEQ ID NO: 513680 - DNA, 201 bp, Homo sapiens
cataaaatctttgcctagaccaatgtcctaaaacattttccctatgttttcttctagtataaagttttattagttttttttttttttttttttttgagagragggtttcactctgtcactcaggctagggtgtagtaggacaatcatagctcattgcagcattgaactcttgggctcaaggaatcttcctacctcagcatc

SEQ ID NO: 513681 - DNA, 201 bp, Homo sapiens
aaagctgtaccattggagaattttaactttttgtttgttggttggttttctttctcttattattgttattatttttttgcatctcagatgacacaaaccaytgtttgtttcctgagacatggtttcactctgccaccgaggctgcagtgcagtggcatgatcctagctcactacactctcaaatctgagggctccagcaat

SEQ ID NO: 513682 - DNA, 201 bp, Homo sapiens
ctccctacttttatttttttttaatttcttaaagctgtaccattggagaattttaactttttgtttgttggttggttttctttctcttattattgttattwtttttttgcatctcagatgacacaaaccattgtttgtttcctgagacatggtttcactctgccaccgaggctgcagtgcagtggcatgatcctagctcac

SEQ ID NO: 513683 - DNA, 201 bp, Homo sapiens
ttgttgttgcctgtgcttttgaggtcttagccataaaatctttgcctagaccaatgtcctaaaacattttccctatgttttcttctagtataaagttttaytagttttttttttttttttttttttgagaggagggtttcactctgtcactcaggctagggtgtagtaggacaatcatagctcattgcagcattgaactct

SEQ ID NO: 513684 - DNA, 201 bp, Homo sapiens
ttttggaagtggcccaccaccatcttgggagctctcggagcaaggacccctggtaacactggcagtacttatactttcattggttatacttatacttcccyggttatatttatactttcctggcagtacgtatactttcatggtttatactattttaaaattattttttattaaatggagccaaattttttaaaagtcatc

SEQ ID NO: 513685 - DNA, 201 bp, Homo sapiens
gcagtggcatgatcctagctcactacactctcaaatctgagggctccagcaatcctcctaccctgctccccagcctccctagtaactaggactagaagcaygagccaccatgcctggctttttttttctttcttttctttcttttttttttaaaagagataggctctccctatgttcctcaggctggtctcaaactccggg

SEQ ID NO: 513686 - DNA, 201 bp, Homo sapiens
ctatgttttcttctagtataaagttttattagttttttttttttttttttttttgagaggagggtttcactctgtcactcaggctagggtgtagtaggacratcatagctcattgcagcattgaactcttgggctcaaggaatcttcctacctcagcatcccaagtaactgggactaccagtgcatgccaccatgcctatt

SEQ ID NO: 513687 - DNA, 201 bp, Homo sapiens
ttcctggcagtacgtatactttcatggtttatactattttaaaattattttttattaaatggagccaaattttttaaaagtcatcttttccactaaattgrcatcaccatgttaaatctaaatttccctactaagtctttattttattttactttaagttctaggatacatgtgcagaacatgcaggtttgttacataggt

SEQ ID NO: 513688 - DNA, 201 bp, Homo sapiens
ttgaactcttgggctcaaggaatcttcctacctcagcatcccaagtaactgggactaccagtgcatgccaccatgcctattttttttttttttttgtagcratgggatctcactgcattgtccagactggtcttgaattcctgggtcaagtgatcctccaggcttgggctcccaaagtgctaggattataggtgtggtccc

SEQ ID NO: 513689 - DNA, 201 bp, Homo sapiens
aggaatggatttgacaacccacatgtccgtgactcaaagcaagcaaggccttgcacaaccaactcgccacccacacaatctgcacagtctcagtgagaaascaggagcagggagctctccgctgagagtgaagaaatgtcctcaactcaacttctctgcagtgtgcatgtgtgtgaaacgcagacacacacgggaggaatt

SEQ ID NO: 513690 - DNA, 201 bp, Homo sapiens
ctgcacagtctcagtgagaaagcaggagcagggagctctccgctgagagtgaagaaatgtcctcaactcaacttctctgcagtgtgcatgtgtgtgaaacrcagacacacacgggaggaatttggctctgtcattttagtgtaccaaagaaaaaaaaacagggagaaatcacttgtttgaagccctaaatgacataaggaa

SEQ ID NO: 513691 - DNA, 201 bp, Homo sapiens
ccgccattttggaagtggcccaccaccatcttgggagctctcggagcaaggacccctggtaacactggcagtacttatactttcattggttatacttatamttccccggttatatttatactttcctggcagtacgtatactttcatggtttatactattttaaaattattttttattaaatggagccaaattttttaaaa

SEQ ID NO: 513692 - DNA, 201 bp, Homo sapiens
ccttgcacaaccaactcgccacccacacaatctgcacagtctcagtgagaaagcaggagcagggagctctccgctgagagtgaagaaatgtcctcaactcracttctctgcagtgtgcatgtgtgtgaaacgcagacacacacgggaggaatttggctctgtcattttagtgtaccaaagaaaaaaaaacagggagaaatc

SEQ ID NO: 513693 - DNA, 201 bp, Homo sapiens
cagtggcatgatcctagctcactacactctcaaatctgagggctccagcaatcctcctaccctgctccccagcctccctagtaactaggactagaagcacragccaccatgcctggctttttttttctttcttttctttcttttttttttaaaagagataggctctccctatgttcctcaggctggtctcaaactccgggc

SEQ ID NO: 513694 - DNA, 201 bp, Homo sapiens
tcagggagggactgttcaaagactgatgcccccagcacaaccctgggaaggaacaggaagcgtcatcaagccagggtactccgcagaagaggtcagagaaygtgccctcgggtggagacagggtcctgccagggagatgaaagggtccccgcgggaagaaaggggagcaaaggatggagttgcagggcccagatgccctca

SEQ ID NO: 513695 - DNA, 201 bp, Homo sapiens
aggagtggaggctatgctcatagcgggggccccaaacgtcagcagccctttcttcacaggcttaaaaatggacgctcccagggggcgctgcccccagagcyggagccttaagggaacccacctcctgaggccgtggctcacggatgaccaccgttccatggctagaagggtcattccttccttccagcaagttcccacgca

SEQ ID NO: 513696 - DNA, 201 bp, Homo sapiens
gaaaagggtttgcaaatgccacagaggtatgtagaggcacggacagggattggggaggagtggaggctatgctcatagcgggggccccaaacgtcagcagycctttcttcacaggcttaaaaatggacgctcccagggggcgctgcccccagagccggagccttaagggaacccacctcctgaggccgtggctcacggatg

SEQ ID NO: 513697 - DNA, 201 bp, Homo sapiens
tatgtagaggcacggacagggattggggaggagtggaggctatgctcatagcgggggccccaaacgtcagcagccctttcttcacaggcttaaaaatggasgctcccagggggcgctgcccccagagccggagccttaagggaacccacctcctgaggccgtggctcacggatgaccaccgttccatggctagaagggtca

SEQ ID NO: 513698 - DNA, 201 bp, Homo sapiens
tgagagcagagggaagaaggcctcgatggcagacccagagaaatcgctgtatttgcttcacagttagaggaaggaatcatgcagctctgaggcgtagtctraatgtttgacccctttgcatcaccccttccggaagcttctaccttatggtggacttcaggtggaggggtccctgtgaatgtctgggtttgtagcagtgct

SEQ ID NO: 513699 - DNA, 201 bp, Homo sapiens
cggacagggattggggaggagtggaggctatgctcatagcgggggccccaaacgtcagcagccctttcttcacaggcttaaaaatggacgctcccaggggrcgctgcccccagagccggagccttaagggaacccacctcctgaggccgtggctcacggatgaccaccgttccatggctagaagggtcattccttccttcc

SEQ ID NO: 513700 - DNA, 201 bp, Homo sapiens
cccctcagtggatataagcccaacagctctgctgggttcacgaatcctgacagaaccacaccatgtgactcctggcccagccagcctggggctgctccacmcacctggtgcatgtccaccgacagggctgcgatggcgaggacagggcacttgaagtcagtttgatgtatgatatagcaaaaagcctcagcagctgggctc

SEQ ID NO: 513701 - DNA, 201 bp, Homo sapiens
ttatttaccagctgaacatgccactcaaatgttaacaggagggtatcattcctattagaatgagaggcctggtggatgtggatctctgtggagtatgagtracctataaatgttaaacccttctatttaaagctcacagttttaaacacatagaaaaatggaagagactcacccacaagcttacataacagaatcatagtt

SEQ ID NO: 513702 - DNA, 201 bp, Homo sapiens
cactaatttttgtggccttggtcaaggtactcaccctgtctgagccttgttttccccacttcttcagtgaaagggatgagtaggtgacctctcatgaacaytgcagttctaatctctgagcaaagaggcttcttgcagagtaatgcgaggtaggcttagggctgggctgtgggcagctttgaaaacctctgagaagatgaa

SEQ ID NO: 513703 - DNA, 201 bp, Homo sapiens
ctttcaattattttctgcaattattgagccagcagtctattgttattaattcacagtcaacctatttaagcggtaccagcaatgcaggcaaatgcctcagyaatttcctaagttttgggtgttattttcttgtcagttaaatttaaagcaacccatttgtgaccactttataccaagttaatctcatctaaagtgcttcac

SEQ ID NO: 513704 - DNA, 201 bp, Homo sapiens
gacaaagactgttgaggaaattatacttcttggctgcttgactttaacaaaatactcaggctaagttctgtaaacagaagatttactacatgactaagagmaaattatgcagttaaaagtccatttttattaaagggtggtgtaaggaccatggtgttttcacactgcagtgtggtgtcatatttgcattgttgacacctg

SEQ ID NO: 513705 - DNA, 201 bp, Homo sapiens
acagccatacgagttttcactttacctggtgccagacacacaaacactagcttatactttcaaatcaaaacgacattttttaatttttattttattttatyttttgagatggagtactctgtcgcccaggctggagtgcagtgccgtgatctctgctcactgcaacctccgcctcccgggttcaagccattctcctgcctc

SEQ ID NO: 513706 - DNA, 201 bp, Homo sapiens
acaaaatttatcattcacccaagcgcccagccactgccgcttacctgttcctgatcctgagcttatttccatgctgaacaagggtagccccaggtattcaraagtgaaagaacagggacagccttctggggggcagaaaggggtgttgccgcctggcccggctgggctcctgccctggagggctccacctgctggcacctg

SEQ ID NO: 513707 - DNA, 201 bp, Homo sapiens
aattcctcaataaaacatttttataaagtaaggcagcaaaagtaactttgaactgctctacacaggagtctctgtggacacaggaaaagaaacattttacraaccccaaagtcacatatggtgctactgctgctaggatgtgcagagcaccaccaacccagcctgggcacccagagaactcctcctccctcccgctgcagc

SEQ ID NO: 513708 - DNA, 201 bp, Homo sapiens
ggcaggatagtgtgagatggggcatggaaaggagaagaacagtttgaataaaggaagaaaagaactgaactgaggagctgggtgtggtggctcacacctgyaatcccagctacacaagagactgaggcaggaggatcgcttgagcccaggagttccaggctgcaacctgggtgaccgaacaagaccccatctctaaaaaca

SEQ ID NO: 513709 - DNA, 201 bp, Homo sapiens; identical to SEQ ID NO: 129135

SEQ ID NO: 513710 - DNA, 201 bp, Homo sapiens; identical to SEQ ID NO: 129138

SEQ ID NO: 513711 - DNA, 201 bp, Homo sapiens
cagatcctaagcggaggagcgacatcagctttgtttttaacaaggtcactctgccctttggagagtggatggtggtgggtaagaatggagataggaagttactgcaataataaagattgggaaaatgggcttactctagtttcggggtggccaagcttttttgtaaagggccaaatggtaagtatcttagactttcaggcc

SEQ ID NO: 513712 - DNA, 201 bp, Homo sapiens
acacttttgcacatccttttaaaatatgaggtttaagaggtgacggctggattctcagacctgcttctgcattccgtgtgttccagttgctttattgaaaygtgtaaggaaaatgtggcgtcacacttccatgtgggcagaagaggggtcatcctggaggctcttagcgatgcaccataactcgccaggtggcagcgtgtt

SEQ ID NO: 513713 - DNA, 201 bp, Homo sapiens
tctcctttataataaaccgctaaactaaagtgtttccctgagatctgcgtgctcagtgagggttgtggacactctgattgatagccagtcagtcagaagcrcaagtaacacaacctgaggcttgccgttggctctcgaagtggggggcagtcttgtgggacagagcactcaacctatgggatttgatgctttctcccagca

SEQ ID NO: 513714 - DNA, 201 bp, Homo sapiens
ttcaaccccaacaactgtaccgtgtgctttttcttgagacagttgtacttggggatgcagcaaaagttcttttgtggcacattttatcacagggttggaaytgaataaagtggtgaattattttaactgttcatcagggaataagctaagcaaaactggcctttttcctttttctttcccttttccctgcctgtgcagggc

SEQ ID NO: 513715 - DNA, 201 bp, Homo sapiens
caccaagatgtggaatggcgggcactgctatccattcacccagtctggcttcttggggagcattcctggggatagcttgccactgctcagcctagctgctytctgcctacactgcctgctcccaggaggggacttttggaaagctgtccatccccggcattggcctcttatatgtgtgtgtgatatatcacccaccatctt

SEQ ID NO: 513716 - DNA, 201 bp, Homo sapiens
attcagacctttgcttgtctcctggctgctgctctcctctgccgcactatctgtctgcccatccttgtcacaggctgccgggtggggtgtcagactacccyggctcgaggggccatgccgctcagggccatcacgtcccgtctctcgctgatgggcaagcttccgccgcagtgccgtcatctctttcttgatcatctttgc

SEQ ID NO: 513717 - DNA, 201 bp, Homo sapiens
acctgggcaacgtggtgaaacctgtctgtacaaaaaaatacaaaaattagctgggggtggtggcacatgcctgtagtcccggcaactccggaggctgaggygggaggatggcttgagcctgggaggtggaggtgggagtgagtcttgatggcaccactgcattccaacctgggcaacagagagataccctgtcaaaaaaaa

SEQ ID NO: 513718 - DNA, 201 bp, Homo sapiens
tggattgcttgagcccaggaatttgagaccaacctgggcaacgtggtgaaacctgtctgtacaaaaaaatacaaaaattagctgggggtggtggcacatgsctgtagtcccggcaactccggaggctgaggcgggaggatggcttgagcctgggaggtggaggtgggagtgagtcttgatggcaccactgcattccaacct

SEQ ID NO: 513719 - DNA, 201 bp, Homo sapiens
gtagaagccggttgacaggagccagggccctggggtcatgacctctgttccctttgttggtagccgtgattaagatggaaggaggcacggagaatgatctycgcatcctggagcaggaggaggaggaggagcaggcaggaaagcctggggagcccagcaagaaagaagaaggacgggctggagcaggcctaggggacgggg

SEQ ID NO: 513720 - DNA, 201 bp, Homo sapiens
agtgggaccgtggccgtgagcgccgtagtcggggtgaatatcgggactatgaccggaatcggcgagagcgcttctcgccacctcgccacgaactcagcccrccacagaagcgcatgaggagagactggtgagatggagcggtttccctctcctcccctttgcctcagttccacctgggcctcccctttctcccctcacctg

SEQ ID NO: 513721 - DNA, 201 bp, Homo sapiens
tgtgtggggatggcagagagtgggacagctttgataggctttgaggcagaggattagcaggagcagtaattagcggtgagggtagtgaatgacagctggcragagatgctgttccgttgatacagcagagtggggagcgggaggaggaaaagacatttgggcccatagtggtgggatgaataggcttgattcttttttctt

SEQ ID NO: 513722 - DNA, 201 bp, Homo sapiens
cttgagcccaggaggcggaggctgtagtgagccgagagtgattgtgctgctgcactccagcctgagcgacagagtgagactgtctccaaaaaaaaaaaaaraagaagaagaagaagatgaggatgggggaggctggtgattggttgggaggttggtgactggtggagaggctggtgactggtcgagaggctggagtgacag

SEQ ID NO: 513723 - DNA, 201 bp, Homo sapiens
cgttcctcagtcctgtatcatccatacttgtactaccttgtcctatgaagctctgagaattttttgtacgatcagccttactgctaataaaagcacttccmcagggctcctgactctcgtgtgttacataactcctccatccttccagagtaactcctgaggtgttgctcagccctgccacttttattattgatgtcaaaa

SEQ ID NO: 513724 - DNA, 201 bp, Homo sapiens
gcagagatcaacgtggagcgggatgagaagttgattaaggtgccagtggcagcgcggggcacgtgggggctcgggcggtgagggcaggagctgaacgctcscattcacttcccttaggtcttggacaagctcctcctttacctgcgcatcgtgcattccttggattattacaacacctgtgagtaccccaacgaggacgag

SEQ ID NO: 513725 - DNA, 201 bp, Homo sapiens
cagcagaactggggggatgctagtgatcatttgtggctggggtggaacaaaagctaaaataaagacaaatctcaagggggcaaaaggtgccatttatgtcyggtgaactcctgtcccctcgctgctctttcacttgtggaaagtctcaggttacctcctctgaaggtcttctctgccttacttgcttctcttcctcccatc

SEQ ID NO: 513726 - DNA, 201 bp, Homo sapiens
tgcctcagttccacctgggcctcccctttctcccctcacctgtgcctaaatctttgtcatttccttttctcaacttcccatcacccatcgttactttgtcmcttgaaacccttgtctgggagaccatgctgtgtgtacccccgtctgtccatcctccatgctctggggaggtgactcccttctctgctttacttttgtgtc

SEQ ID NO: 513727 - DNA, 201 bp, Homo sapiens
gggtcttgttctgctgccctggctggagtgcattgatgcagtcgtagcagcctccacctcccgggctcaaccgagcctcccgcctcagcctcttgagaagytgggactccagggggaggccatcacgcccgcctaacttttaaaaattattattgttatttcgagacagagtcttgccctgtcgcccaggctggagtgcaa

SEQ ID NO: 513728 - DNA, 201 bp, Homo sapiens
tggaccgttttctgtggttcagcctatttgctgttggccaaataactagctgtggcttggtttttgaaattctctgcagatcagagctatagagctaagartttgagtatgaagaagcactgtttatacatgcacgaaaagcgtgcttttttgcttttttttgttttgttattgagatggggtcttgttctgctgccctgg

SEQ ID NO: 513729 - DNA, 201 bp, Homo sapiens
gatgctagtgatcatttgtggctggggtggaacaaaagctaaaataaagacaaatctcaagggggcaaaaggtgccatttatgtccggtgaactcctgtcycctcgctgctctttcacttgtggaaagtctcaggttacctcctctgaaggtcttctctgccttacttgcttctcttcctcccatcagagcctgccctcgc

SEQ ID NO: 513730 - DNA, 201 bp, Homo sapiens
ccatacccccatgccccgtatggtgctggtcgagggaactatgatgccttccgaggccagggaggttatcctgggaaacctcgcaacaggtgaggagggcrgacgcccaagctttgttgccgcctgcagactcccttttgggagccctcagctctcatcctgtacctctcacttcacaggatggttcgtggagacccaagg

SEQ ID NO: 513731 - DNA, 201 bp, Homo sapiens
ttactgccagagagtgggaccgtggccgtgagcgccgtagtcggggtgaatatcgggactatgaccggaatcggcgagagcgcttctcgccacctcgccamgaactcagcccgccacagaagcgcatgaggagagactggtgagatggagcggtttccctctcctcccctttgcctcagttccacctgggcctcccctttc

SEQ ID NO: 513732 - DNA, 201 bp, Homo sapiens
gagggcagacgcccaagctttgttgccgcctgcagactcccttttgggagccctcagctctcatcctgtacctctcacttcacaggatggttcgtggagayccaagggccattgtggaatatcgggacctggatgccccagacgatgttgatttcttttgagccgtcccccgttcctcagtcctgtatcatccatacttgt

SEQ ID NO: 513733 - DNA, 201 bp, Homo sapiens
tttttctcaccaaaatttttctggaaaacgatttttcataaaaacatgtaatgtgtttcatcttactgtgtaatttaaaaatgaaggttttggaacatttygttttaattttgaatatagtaagtatcgatagatgtaacccacataagcagaaactctttggtgtcctcagtcatttttaagagtattaaggggctgagg

SEQ ID NO: 513734 - DNA, 201 bp, Homo sapiens
aggtaaagatcctggaggtgatgcctgcggctttcctttcctcttctgccccactcgtggttctgttctgtcttcgctgtcccctctctcgaattgctctrtgtctttgtcctaatctctcagcaccttcattcttctctgtttctgttcttgctccctgcctaacaccaccttcttccctgttggtttttttagtttctc

SEQ ID NO: 513735 - DNA, 201 bp, Homo sapiens
agcgcccagctctgcctgagatcaagccagcccagccacctggccccgcccagagtaagatacgatccatgaaggtcgcatgtgccctcttccttgactayccagggactcctgtttctctttaacgtgtcaccccgagaagtttctgccccatcctcaggccatagccctagaagtcaattgtacccgtatccccctccc

SEQ ID NO: 513736 - DNA, 201 bp, Homo sapiens
actccgagaaggaagccaaaaaggtgaggtgtctgtggcctggggtcagagtgttggggctggggttctggcacgctgacttgtcccctctgctgtggctyacacagagtagcaagaagcggaaccggaagcacagtggtgacgacagctttgacgagggcagcgtgtcagagtctgagtcggagtcagagagcggccagg

SEQ ID NO: 513737 - DNA, 201 bp, Homo sapiens
tgatggggacaaggaagagaagaaagaagactccgagaaggaagccaaaaaggtgaggtgtctgtggcctggggtcagagtgttggggctggggttctggyacgctgacttgtcccctctgctgtggctcacacagagtagcaagaagcggaaccggaagcacagtggtgacgacagctttgacgagggcagcgtgtcaga

SEQ ID NO: 513738 - DNA, 201 bp, Homo sapiens
agattatttccctgacaatatatgattaggtttcttgtcactgttttgcctaaaatctcagagttcatagggcggtgctgattggattgattataagatgyggttattgaccttagggtgttacagtgagcttggcatgggggatcagaatggcagtggatgtattctgtaaatgagtatatatagtggaagttataaaga

SEQ ID NO: 513739 - DNA, 201 bp, Homo sapiens
cagcgtgtcagagtctgagtcggagtcagagagcggccaggctgaggaggagaaggaggaggccggtagggtttcttttctgctttaaagtgcgttctccyaatgcgggtggggaggtgagaggttggcgacattgacgggagggtgggtggcttttaggggaaagcttctgtatcctccccaccacaatcagtaataaaa

SEQ ID NO: 513740 - DNA, 201 bp, Homo sapiens
gcccagctctgcctgagatcaagccagcccagccacctggccccgcccagagtaagatacgatccatgaaggtcgcatgtgccctcttccttgactacccrgggactcctgtttctctttaacgtgtcaccccgagaagtttctgccccatcctcaggccatagccctagaagtcaattgtacccgtatccccctccccgc

SEQ ID NO: 513741 - DNA, 201 bp, Homo sapiens
agtcagagagcggccaggctgaggaggagaaggaggaggccggtagggtttcttttctgctttaaagtgcgttctcctaatgcgggtggggaggtgagagrttggcgacattgacgggagggtgggtggcttttaggggaaagcttctgtatcctccccaccacaatcagtaataaaaatgcaccaactccttcctacccc

SEQ ID NO: 513742 - DNA, 201 bp, Homo sapiens
atctcaagggggcaaaaggtgccatttatgtccggtgaactcctgtcccctcgctgctctttcacttgtggaaagtctcaggttacctcctctgaaggtcktctctgccttacttgcttctcttcctcccatcagagcctgccctcgcaaaacccgatcttgaagaatatcaccgactacctgatcgaggaagtaagcgcc

SEQ ID NO: 513743 - DNA, 201 bp, Homo sapiens
agccctcagctctcatcctgtacctctcacttcacaggatggttcgtggagacccaagggccattgtggaatatcgggacctggatgccccagacgatgtwgatttcttttgagccgtcccccgttcctcagtcctgtatcatccatacttgtactaccttgtcctatgaagctctgagaattttttgtacgatcagcctt

SEQ ID NO: 513744 - DNA, 201 bp, Homo sapiens
ggaaggtgagctccaggttcccctttgttcccggctgcccctggccttggtcctccagccccttgccaccatccttccttctggctcccttgccaaccttycttcctctgttcccaaaccacagtgctggagtggcagaagacttttgaggagaagctcacgccgttgctgagtgtgcgggagtcactctcagaggaagag

SEQ ID NO: 513745 - DNA, 201 bp, Homo sapiens
ctaagcgcccagctctgcctgagatcaagccagcccagccacctggccccgcccagagtaagatacgatccatgaaggtcgcatgtgccctcttccttgastacccagggactcctgtttctctttaacgtgtcaccccgagaagtttctgccccatcctcaggccatagccctagaagtcaattgtacccgtatccccct

SEQ ID NO: 513746 - DNA, 201 bp, Homo sapiens
atggtgctggtcgagggaactatgatgccttccgaggccagggaggttatcctgggaaacctcgcaacaggtgaggagggcagacgcccaagctttgttgmcgcctgcagactcccttttgggagccctcagctctcatcctgtacctctcacttcacaggatggttcgtggagacccaagggccattgtggaatatcggg

SEQ ID NO: 513747 - DNA, 201 bp, Homo sapiens
ccacctggccccgcccagagtaagatacgatccatgaaggtcgcatgtgccctcttccttgactacccagggactcctgtttctctttaacgtgtcacccsgagaagtttctgccccatcctcaggccatagccctagaagtcaattgtacccgtatccccctccccgcccccgcagtaattcatgtccctgtccgtgttg

SEQ ID NO: 513748 - DNA, 201 bp, Homo sapiens
gggaaacctcgcaacaggtgaggagggcagacgcccaagctttgttgccgcctgcagactcccttttgggagccctcagctctcatcctgtacctctcacytcacaggatggttcgtggagacccaagggccattgtggaatatcgggacctggatgccccagacgatgttgatttcttttgagccgtcccccgttcctca

SEQ ID NO: 513749 - DNA, 201 bp, Homo sapiens
ggcgccgctagttaaatcttgagctctgtttgaccaagcggccaaggtaaagatcctggaggtgatgcctgcggctttcctttcctcttctgccccactcrtggttctgttctgtcttcgctgtcccctctctcgaattgctctgtgtctttgtcctaatctctcagcaccttcattcttctctgtttctgttcttgctcc

SEQ ID NO: 513750 - DNA, 201 bp, Homo sapiens; identical to SEQ ID NO: 278228

SEQ ID NO: 513751 - DNA, 201 bp, Homo sapiens
gaattcgagagggattgtagggggaggagggggcagtgagtggagacttgggagtcagaatctgaagtagtttggaacaggggcagggctaaggtgtggarctcgcggagcctggcctccaggttcaatcagagggccatcgccactgcagctccctccatctctccaccccctcccccctaccgcctcgtggctgtgtcc

SEQ ID NO: 513752 - DNA, 201 bp, Homo sapiens; identical to SEQ ID NO: 278229

SEQ ID NO: 513753 - DNA, 201 bp, Homo sapiens
cgtccttcctccagagagctttgtggttctccaccggcccaaccaggaccagatcctcaccaacctaagcaagaggaagtgcccctctcaacctgtgcggsctgctgcgtcccaggactgagacgcaggccagccccggcccctagccctcaggccttctttcttatccaaataaatgtttcttaatgaggaatgggtcag

SEQ ID NO: 513754 - DNA, 201 bp, Homo sapiens
agagaacagaggccccgtccttcctccagagagctttgtggttctccaccggcccaaccaggaccagatcctcaccaacctaagcaagaggaagtgccccyctcaacctgtgcgggctgctgcgtcccaggactgagacgcaggccagccccggcccctagccctcaggccttctttcttatccaaataaatgtttcttaa

SEQ ID NO: 513755 - DNA, 201 bp, Homo sapiens
tacacacctgtaatcccagctactcgggaggctgaggcaggagagtcgcttgaacctgggaggtggagattgtagtgagccgagattgtgccactgcactycaacttgggttacagagtgagattctgtctcaaaaaaaaaaaaaaaacttagccaggcgtgtggtcatagctactccggaggctgaggtgggaggattgc

SEQ ID NO: 513756 - DNA, 201 bp, Homo sapiens
acacccctgcagggtcccatgggtgtgtgtggtcctccgtgctgtggtgtgaacgccttcaggaggggggcccagaggacgcgggaggtgggagtgggagytgctgcaggcacccagtaggagatgaggtgcaggcgcccaggggtgtcccgccgcgcagtccccgcctccgcccgccgccaggtcatcgcgctgaccttc

SEQ ID NO: 513757 - DNA, 201 bp, Homo sapiens
acaaacaaaaaagttcttccttggctacattcactcattgattcatctggtactcactggtgcctccttcctgccgatgacccctactgggtgctaggacyggaagcctgacagagctctgaacagttcaagtcaatgaggctgttatggggacagtgctccctcctacctgctgagcaggtcaccctccaccctcctccc

SEQ ID NO: 513758 - DNA, 201 bp, Homo sapiens; identical to SEQ ID NO: 278235

SEQ ID NO: 513759 - DNA, 201 bp, Homo sapiens
agtaagcctagatggagccactgcactcaagcctgggagacaaagtgagaccctgtctcaaacaaacaaaaaaggtcatggggctgagaagagtgtggtgsacgcccgccctgacacttcccccaatgctcggtggccacctgcagctccatctcctccgaagggaatgaactcctcgtccagttcgtctcagatctcagt

SEQ ID NO: 513760 - DNA, 201 bp, Homo sapiens
acctgtgcgggctgctgcgtcccaggactgagacgcaggccagccccggcccctagccctcaggccttctttcttatccaaataaatgtttcttaatgagraatgggtcagatctccatgcttatggtattggggtccatcttgaggatttcttttcattaattaattaactcaacacatatttactatacagaataatcg

SEQ ID NO: 513761 - DNA, 201 bp, Homo sapiens
acctaagcaagaggaagtgcccctctcaacctgtgcgggctgctgcgtcccaggactgagacgcaggccagccccggcccctagccctcaggccttctttyttatccaaataaatgtttcttaatgaggaatgggtcagatctccatgcttatggtattggggtccatcttgaggatttcttttcattaattaattaactc

SEQ ID NO: 513762 - DNA, 201 bp, Homo sapiens
gagacctgctgacaggtctcaagaataagagatctcaacccctccctccttcttccaggagtcagttatctgctgatgggccaggtagaagagaacagagrccccgtccttcctccagagagctttgtggttctccaccggcccaaccaggaccagatcctcaccaacctaagcaagaggaagtgcccctctcaacctgtg

SEQ ID NO: 513763 - DNA, 201 bp, Homo sapiens; identical to SEQ ID NO: 278276

SEQ ID NO: 513764 - DNA, 201 bp, Homo sapiens
cttcttgctttgtaagggtagctgaggcctgtgtcctcaaggatcaagaggacccttgagctcaaggtctagccaggatagatggagataggagaagacgrggaggttgtaggcttggagcttctggttgtccttctttccccagagtggagcctctaaggatctgctgttacttctgaaaacttggagtcccccagctga

SEQ ID NO: 513765 - DNA, 201 bp, Homo sapiens
gaccggctcgttcgacaggccaaggtaacacggttgctggcaccctcggtttgcagcctcaagatccctgaaagcgggtttgcagtggatttaccccaacmgatggggagggactgagcttgaccaaagagccagaaatgactggagaatgcatcccttgccactgctgcaaggggagaaaaaaggattgatcctcagtga

SEQ ID NO: 513766 - DNA, 201 bp, Homo sapiens
aggaggacctgggggtgtggcagcgaggaagggccgagccacggactgtggggccgaaactcgctcccgcccaccctttctcgaggctgtggcctccgcgrgagccgagcgggccgcaccgccggccgtgcgactgccccagtcagacacgaccccggcttctagcccgcctaagcctgtttggggttgctgactcgtttc

SEQ ID NO: 513767 - DNA, 201 bp, Homo sapiens
ccgctggggttgggagcttgggcaggccagcttcacccttcctaagtccgcttctggtctccgggcccagcctcggccaccatgtcccgccagaccacctytgtgggctccagctgcctggacctgtggagggaaaagaatgaccggctcgttcgacaggccaaggtaacacggttgctggcaccctcggtttgcagcctc

SEQ ID NO: 513768 - DNA, 201 bp, Homo sapiens; identical to SEQ ID NO: 278279

SEQ ID NO: 513769 - DNA, 201 bp, Homo sapiens
tccaagatggtctgatctggataacttttttgccctttccagactctctgtccaaaggttgggttctttttttaaatccttagctaattggctggagggtrggttctttattgtagctgttttggttggagtggggtgatctctgagttgggattttatttggaggatcttccatgggggagcagtctgtaagaccaacat

SEQ ID NO: 513770 - DNA, 201 bp, Homo sapiens
gggcgtaagtgtaagagtggtgttctcagacaggaggggtgattggggttgtgctatatatacctagggatatatccaggtgttcaaatatacacagtgtrtatgcagggctcccaagagttccctggtttccccgatatcctcagacacaaagaccatgactctgctgttgtgggttgcacaggagtagggggcagatga

SEQ ID NO: 513771 - DNA, 201 bp, Homo sapiens; identical to SEQ ID NO: 278250

SEQ ID NO: 513772 - DNA, 201 bp, Homo sapiens
tggttgagtgctgaccgtcttggggacctggccttgttactagagaccctgaatggcagccaggtaatagggaaagtgacctgaagctgagggtctcctcyttccttcctcctcctttctctccagctgcagtagcatcatcatgtactggacaggcggctgggttggtggtcggaaaacctggattctctctgggactct

SEQ ID NO: 513773 - DNA, 201 bp, Homo sapiens
cccagctgaggaattagatgctccattgaccctgcaggatgcccagggattgaaggatgtcctcctgacagcatttgcctaccgccaaggtcagctagcarcctgactcatctcttctacctttaagtggtcctccagactcatgccctctctcttgtcccattcagttccatgggcttcttagacccttgttccccatca

SEQ ID NO: 513774 - DNA, 201 bp, Homo sapiens; identical to SEQ ID NO: 278263

SEQ ID NO: 513775 - DNA, 201 bp, Homo sapiens
ggattgaaggatgtcctcctgacagcatttgcctaccgccaaggtcagctagcaacctgactcatctcttctacctttaagtggtcctccagactcatgcyctctctcttgtcccattcagttccatgggcttcttagacccttgttccccatcatgacccctgctctatagccctctccaagctcacaccctgactgtcc

SEQ ID NO: 513776 - DNA, 201 bp, Homo sapiens; identical to SEQ ID NO: 278283

SEQ ID NO: 513777 - DNA, 201 bp, Homo sapiens; identical to SEQ ID NO: 278285

SEQ ID NO: 513778 - DNA, 201 bp, Homo sapiens; identical to SEQ ID NO: 278284

SEQ ID NO: 513779 - DNA, 201 bp, Homo sapiens
gtactctgggctggggctacaggtaatcgagacacttactttcacctgcttcagactctgaagaggctagatcggagggatgaggccactgcactctggtrgaggctggaggcccaaactaaggggtcacatgaagatgctctgtggtgaggctcaggcctgctggcttggggctgaggggcagttggtgtcctagagtcc

SEQ ID NO: 513780 - DNA, 201 bp, Homo sapiens; identical to SEQ ID NO: 278288

SEQ ID NO: 513781 - DNA, 201 bp, Homo sapiens; identical to SEQ ID NO: 278290

SEQ ID NO: 513782 - DNA, 201 bp, Homo sapiens; identical to SEQ ID NO: 278293

SEQ ID NO: 513783 - DNA, 201 bp, Homo sapiens; identical to SEQ ID NO: 278270

SEQ ID NO: 513784 - DNA, 201 bp, Homo sapiens
tccaggtgttcaaatatacacagtgtgtatgcagggctcccaagagttccctggtttccccgatatcctcagacacaaagaccatgactctgctgttgtgsgttgcacaggagtagggggcagatgatggacactgggatgggaatggttgtgaatgatctgcccccgcttccatatgtgagtgtaggcaagatacttcct

SEQ ID NO: 513785 - DNA, 201 bp, Homo sapiens; identical to SEQ ID NO: 278273

SEQ ID NO: 513786 - DNA, 201 bp, Homo sapiens
ccaccctgaaatggccaagaaacttagccagatggaccaggtgatccagtgagtgtggggtattggctgggggagtgggtttgtgtctgagaatctcgaaraagctcttatcttagagcttctttcctggctgaattctgtcttctctaggccttctgctgaagctagaggctccatccatcttgattaactcaatgtgta

SEQ ID NO: 513787 - DNA, 201 bp, Homo sapiens
tacccgtcaccacccctggtaaatatctcagctctgattcacttaaagacaatagtgatgtgagttcggcccctcttgttttcaaggaggtgttgctcctyatgttcctgagcttgacagagggtcccatgccccacacaactaggaaggtcttcttggtgtcctctctcttacctgccatagccaagcaaattgatccct

SEQ ID NO: 513788 - DNA, 201 bp, Homo sapiens; identical to SEQ ID NO: 513766

SEQ ID NO: 513789 - DNA, 201 bp, Homo sapiens
tggttctacagacaatgtaactctgcaaatcgatggagtcctttacctgcgcatcatggacccttacaaggtacctgtcccctactttatccagccttttsagttgccctcttcactaaaatcttgtgcccaagcttcttacactatccgtgtccatctcaggcaagctacggtgtggaggaccctgagtatgccgtcacc

SEQ ID NO: 513790 - DNA, 201 bp, Homo sapiens
ggaggtgactacggaggtctcttgactaccagagcattagggatgtgggcaaggtgacatgctccagacaaggttgaacgttgaggctgtttgctggactstatttaagaccgggcataacaaaccttgcttgggaagacagggaaggagctgcagtgtctttgaggaaagaggggaggggaaaatctcggcccaatcgcc

SEQ ID NO: 513791 - DNA, 201 bp, Homo sapiens; identical to SEQ ID NO: 278263

SEQ ID NO: 513792 - DNA, 201 bp, Homo sapiens
ttcagcatgttggccaggctggtctccaattcctgacttcaactgattctccagcctcagcctcccaaagtgctgggcttacaggtgtgagtcatcgtgcytggcattttttttttttttttttgagagggagtcttgctctgttgcccaggctggagtgcagtggtgcaatctcggctcactgcaacctccgcctcctgg

SEQ ID NO: 513793 - DNA, 201 bp, Homo sapiens
gttctacagacaatgtaactctgcaaatcgatggagtcctttacctgcgcatcatggacccttacaaggtacctgtcccctactttatccagccttttcasttgccctcttcactaaaatcttgtgcccaagcttcttacactatccgtgtccatctcaggcaagctacggtgtggaggaccctgagtatgccgtcaccca

SEQ ID NO: 513794 - DNA, 201 bp, Homo sapiens
tagcactaatctgctgtttctctatatatttgcccattttggatatttcacagaaatgggatcataataatatgtggtcttttgtgactggcatcttccasttagtataatgttttccggtttcatctatatagcagcacacagcagtacttcattctttttcttttttaaaattgaagtaaaattcatataaaattcacc

SEQ ID NO: 513795 - DNA, 201 bp, Homo sapiens; identical to SEQ ID NO: 278264

SEQ ID NO: 513796 - DNA, 201 bp, Homo sapiens
tttcttttagaagttttatatttttggctcttatatttagtttgtgatccattgagttgattttatgtacgtatgtatggtcgcgttcttttctttcctgkcttttttttttttttttttttgcatatggatattcaattctcctagctccatttaatttgaaatgattgggcaggtacttttgagcagtgcaagtacaga

SEQ ID NO: 513797 - DNA, 201 bp, Homo sapiens
ccagccttctgaggacccatgactcctctttccagggtttgaacatcctcatccctgtgttagaccggatccgatatgtgcagagtctcaaggaaattgtyatcaacgtgcctgagcagtcggctgtgactctcggtgaggggttcagggtgacatgggtgctctgaggctattaggatgtggttgctgtagatccagagc

SEQ ID NO: 513798 - DNA, 201 bp, Homo sapiens
gcccttctcagtgtaggcccttgataggtaggttgaggctgtggggcttacacctctttttccaggaacgggagtccctgaatgccagcattgtggatgcyatcaaccaagctgctgactgctggggtatccgctgcctccgttatgagatcaaggatatccatgtgccaccccgggtgaaagagtctatgcagatgcagg

SEQ ID NO: 513799 - DNA, 201 bp, Homo sapiens
ctccaattcctgacttcaactgattctccagcctcagcctcccaaagtgctgggcttacaggtgtgagtcatcgtgcctggcattttttttttttttttttgagagggagtcttgctctgttgcccaggctggagtgcagtggtgcaatctcggctcactgcaacctccgcctcctgggttcgagtgattctcctgcctca

SEQ ID NO: 513800 - DNA, 201 bp, Homo sapiens
aaaaaaaaaagtttgttggtgcactcttttgccccttttcattgctaaatcattggctttgaccaactgatggacattttgattgttttcagtttttagcyattatgaacatttttagctactatgagtatttgcaacaaatctcagtgtggacgtatgttttcatttctcttgggagtattctttggagtggaattgctg

SEQ ID NO: 513801 - DNA, 201 bp, Homo sapiens
gggggagggagctgccggaagtacatccgggggagcggaactgcaagaggaaaggctcgggtaggcttctgggagcgaccgctccgctcgtctcgttggtkccggaggtcgctgcggcggtgggaaatgctggcgcgcgcggcgcggggcactggggcccttttgctgagggtgagagcgaggcaacctttccagagggtc

SEQ ID NO: 513802 - DNA, 201 bp, Homo sapiens
accagtgcaggtcagtgtgggccactttgaaggccagaagtaccttggcaaatttcttcaaaatttgaagtcagggagtcagacctttgggtgcccagatrcacacttgattatggtgtagggggacagaggagaagaaagaggccagggccctgctggtagggagctcagtttgggggacagaggagaagaaagaggcca

SEQ ID NO: 513803 - DNA, 201 bp, Homo sapiens; identical to SEQ ID NO: 278273

SEQ ID NO: 513804 - DNA, 201 bp, Homo sapiens
ctgggctttttcatcgttgccctgaagagacacctgtttgccactcctctccctggctgagtcctctggcatccatggtgggtggtcgagccaagaatttrtggtatggagcttgtgtggcggcgctggtggccctgttagctgccgtgcgcttgtggcttcgccgctatggtaatctcaagagccccgagccacccatgc

SEQ ID NO: 513805 - DNA, 201 bp, Homo sapiens
atcccccccttcttctccgtatcggtgatctctgatttttatccccctgtgatcacagaatggagatgcagcagcttcactgactgtggccgagcagtatrtcagcgcgttctccaaactggccaaggactccaacactatcctactgccctccaaccctggcgatgtcaccagcatggtggctcaggttagagctctctg

SEQ ID NO: 513806 - DNA, 201 bp, Homo sapiens; identical to SEQ ID NO: 513767

SEQ ID NO: 513807 - DNA, 201 bp, Homo sapiens; identical to SEQ ID NO: 278279

SEQ ID NO: 513808 - DNA, 201 bp, Homo sapiens
gctcaccctcttctttccttcagggctctctactggcttctggccgcgctccgcgccgcgcctcctctggattgccccgaaacaccgtggtactgttcgtrccgcagcaggaggcctgggtggtggagcgaatgggccgattccaccggatcctggagcctgtgagaaacctcttctgcccaccctgggccagccagatga

SEQ ID NO: 513809 - DNA, 201 bp, Homo sapiens
gcaaaatgccacaacttaattttagaacatttctatcatccccccaaaattccctacattgactccctaatcctaccccaggccaatgatctgttttcggkcttttatttatttatttatttatttatttatttagagatggagtttcactctgttgcccaggccggagtgcagtggcgtgatctctgctcactgcagcct

SEQ ID NO: 513810 - DNA, 201 bp, Homo sapiens
ctcaccaccctgaaatggccaagaaacttagccagatggaccaggtgatccagtgagtgtggggtattggctgggggagtgggtttgtgtctgagaatctygaagaagctcttatcttagagcttctttcctggctgaattctgtcttctctaggccttctgctgaagctagaggctccatccatcttgattaactcaatg

SEQ ID NO: 513811 - DNA, 201 bp, Homo sapiens
tcctcaagtgttgggattgcaggtgtgagccattgcacccagccctgattcttttttaaaaaagctttattgaaatgcaatttaccataaaatttacccaygtaaggtgtaagatttaatggtttttgtgtatttacagaattgtacaaccatcaccagaatcaattttagaacattttcaccaaccccaaaagaaaatct

SEQ ID NO: 513812 - DNA, 201 bp, Homo sapiens
acatggcaaaaccccatctctactaaaaatacaaaaattagccaggtgtggtggtgtgcacctgtaattccggctactcaggaggctgaggcaggagaatygcttgaacctgggaggcagaggttacagtgagccaagatcacgctactgcactccagcctgggagacagagccagactctctctcaaaaaaaaaaaaaaa

SEQ ID NO: 513813 - DNA, 201 bp, Homo sapiens
tgtcccttcagattcttcgactatttttaattggattattgttattattattatttttggaccagggtcttgctctgtcacccaggctataatgcagtggygtgatcatggctcactgaagccacagcttcctgggttcaagcagtcctcctgtctcagcttcctgagtaactgggactacaggtgtgcaccaccatggcc

SEQ ID NO: 513814 - DNA, 201 bp, Homo sapiens
agtgatggctgagctattctcagggggtgaggactcccagccccactcctctgctttagcccaagcctcagctctccatctcaatgctcagcaggtaggtragcgggctgggtttccaggtgacagagctagggtgggcatgaaagaagcataatgaaccactcttttgtcctttgactagtcttagtcccaccttccata

SEQ ID NO: 513815 - DNA, 201 bp, Homo sapiens; identical to SEQ ID NO: 278283

SEQ ID NO: 513816 - DNA, 201 bp, Homo sapiens; identical to SEQ ID NO: 278284

SEQ ID NO: 513817 - DNA, 201 bp, Homo sapiens
cttatctacgcttgaggagagttccgcctctgtgggctctgttgagccagattacatggtcctttttattgtgaactgctttcttcattccccatcccccscttcttctccgtatcggtgatctctgatttttatccccctgtgatcacagaatggagatgcagcagcttcactgactgtggccgagcagtatgtcagcgc

SEQ ID NO: 513818 - DNA, 201 bp, Homo sapiens
tgtttctttttgagacagagtctcgctctgtcgcctaggctggagtgcagtagcacgatctcagctcactgtagcctctgcctcctggcttcaagcaattstccagtctcagcctcctcagtagctgggactacaggtacacatcgccacgcctggctaaattttgtaatttttagtagagttggggtttcagcatgttgg

SEQ ID NO: 513819 - DNA, 201 bp, Homo sapiens; identical to SEQ ID NO: 513779

SEQ ID NO: 513820 - DNA, 201 bp, Homo sapiens
gtgtgcagggccatgtagagccaatgcaagaacttttactctgagatgagaaaccagtggacgggttttgtttctttttgagacagagtctcgctctgtcrcctaggctggagtgcagtagcacgatctcagctcactgtagcctctgcctcctggcttcaagcaattctccagtctcagcctcctcagtagctgggacta

SEQ ID NO: 513821 - DNA, 201 bp, Homo sapiens
ggtgctttctccaaagctttcttcttcccatccttcaatgtcagagacctagacacagtggacaatggcatcctggaacacctctaccccaccagtgagcmtggggccagagcacttagttctaagactgggagctggggagaactgctttagtccacaaattctgagccacctatgggtgtaacagcctgggcttgtatc

SEQ ID NO: 513822 - DNA, 201 bp, Homo sapiens; identical to SEQ ID NO: 278243

SEQ ID NO: 513823 - DNA, 201 bp, Homo sapiens; identical to SEQ ID NO: 513764

SEQ ID NO: 513824 - DNA, 201 bp, Homo sapiens; identical to SEQ ID NO: 513765

SEQ ID NO: 513825 - DNA, 201 bp, Homo sapiens
cagaatgttgactgtaaggaggttgggctgataggcatgtgagtgtgtatgagaattgatactgaagtagtaggagtatatgattgtggagcagtagcctrtggattagggaataagaagtgactgtaacgtggcatatcttttcttccaggtccttttactgtgccatggcaggcagtctcggcttgggccctcatggcc

SEQ ID NO: 513826 - DNA, 201 bp, Homo sapiens
tgctccgcttcctcctctccttcacaagtaacgtggcccctcctctcctcctctagattctggcctgtgccttggcagcctccatccttcgcaggcatctyatggtctggaaagtgtttgcccctaagtgagtagatttgcttgagaagtagaggtggtggggagggagaaacttggaacaaagtatgaagatcctaaaca

SEQ ID NO: 513827 - DNA, 201 bp, Homo sapiens
ctcgggccatgtgcatcgagtcttgggctcgtttctctctggtccgcatggcggggggtactgctctcttggctgcttcctgctttatctgcctgctggcmtctcagtgggcaatatccccaggctttccattctgccctctactcctgacacctgtggcctggggcctggttggggccatagcgtatgctggactcctgg

SEQ ID NO: 513828 - DNA, 201 bp, Homo sapiens; identical to SEQ ID NO: 513769

SEQ ID NO: 513829 - DNA, 201 bp, Homo sapiens; identical to SEQ ID NO: 513770

SEQ ID NO: 513830 - DNA, 201 bp, Homo sapiens; identical to SEQ ID NO: 278250

SEQ ID NO: 513831 - DNA, 201 bp, Homo sapiens
gtctttgaggaaagaggggaggggaaaatctcggcccaatcgccaggcaatattaggcccagtttccatggcaacgggattggggtcagtccccagtgggwgtcctgggcacaacacagcgggactaccagagaatatcactatggcaaccatggcaacgagtcagctccaatccactagtcgctatggtgacagatgggg

SEQ ID NO: 513832 - DNA, 201 bp, Homo sapiens
ctggcattgccctcttcaccagtggcttcctgctcacccgtttggagctcaccaaccatagcagctgccaagagcccccaggccctgggtccctgccatgkgggagccaagggaaacctggggcctgctggatggcttcccgattttcgcgggttgtgttggtgctgatagatgctctgcgatttgacttcgcccagcccc

SEQ ID NO: 513833 - DNA, 201 bp, Homo sapiens
agtgtgcagggccatgtagagccaatgcaagaacttttactctgagatgagaaaccagtggacgggttttgtttctttttgagacagagtctcgctctgtygcctaggctggagtgcagtagcacgatctcagctcactgtagcctctgcctcctggcttcaagcaattctccagtctcagcctcctcagtagctgggact

SEQ ID NO: 513834 - DNA, 201 bp, Homo sapiens
aggcagatagtgtgcagggccatgtagagccaatgcaagaacttttactctgagatgagaaaccagtggacgggttttgtttctttttgagacagagtctygctctgtcgcctaggctggagtgcagtagcacgatctcagctcactgtagcctctgcctcctggcttcaagcaattctccagtctcagcctcctcagtag

SEQ ID NO: 513835 - DNA, 201 bp, Homo sapiens; identical to SEQ ID NO: 56163

SEQ ID NO: 513836 - DNA, 201 bp, Homo sapiens
gctgatgagttgtgctatggaagaaattaaggaagtgaggggaaatttttccagggggtgtggtggtgggaggtgctgaactagtaaagtaggggattgcmggaagccttgctgatgttacagttgagcttcaatatgaaggtgatggagatccatttcggcatcgggaactgaagctgacagaggagatggcaaatgcaa

SEQ ID NO: 513837 - DNA, 201 bp, Homo sapiens
gctgataggcatgtgagtgtgtatgagaattgatactgaagtagtaggagtatatgattgtggagcagtagcctatggattagggaataagaagtgactgkaacgtggcatatcttttcttccaggtccttttactgtgccatggcaggcagtctcggcttgggccctcatggccacacagaccttctactccacaggcca

SEQ ID NO: 513838 - DNA, 201 bp, Homo sapiens
gagtcaagggctgcggaagagacagcagcccccagggaatgaagctgatgccagagtcagacccgaggaggaagaggagccactgatggagatgcggctcygggatgcgcctcagcacttctatgcagcactgctgcagctgggcctcaagtacctctttatccttggtattcaggtgggtgtaggagagagatcagggag

SEQ ID NO: 513839 - DNA, 201 bp, Homo sapiens
gggagtctggggacaaggaagcagattttcctgattctggctctagcttccctgccaagattttggtttttatttttttatttgaactttagtcgtgtaayaaactcaccagtggcaaaccagaaactgtcctctttgattggggaatgaagttgggaaagtcactagcattttccttggatccagtcctgtcagcatgat

SEQ ID NO: 513840 - DNA, 201 bp, Homo sapiens
gtcagtatgtgaacctcaaatatatgctaggtgctgaggatatcataatgaagaaaacagaattccctgacctcaatgagctcacattctactcggagggkataaaccataaatacgtgtagaatttcagatgctgatgagttgtgctatggaagaaattaaggaagtgaggggaaatttttccagggggtgtggtggtgg

SEQ ID NO: 513841 - DNA, 201 bp, Homo sapiens
ctaactcctagcccaggacatgcaatattttttccactgacatgcactattctcctgcttccattttttacaggggcctatagaaactctccttttgctcygcttcctcctctccttcacaagtaacgtggcccctcctctcctcctctagattctggcctgtgccttggcagcctccatccttcgcaggcatctcatggt

SEQ ID NO: 513842 - DNA, 201 bp, Homo sapiens
cacagtggagtatgatccctaactcctgatttggatgcatctgagggacaaggggggcggtctccgaagtggaataaaataggccgggcgtggtgacttgsacctataatcccagcactttgggaggcagaggtgggaggattgcttggtcccaggagttcaagaccagcctgtggaacataacaagaccccgtctctact

SEQ ID NO: 513843 - DNA, 201 bp, Homo sapiens; identical to SEQ ID NO: 278270

SEQ ID NO: 513844 - DNA, 201 bp, Homo sapiens; identical to SEQ ID NO: 513784

SEQ ID NO: 513845 - DNA, 201 bp, Homo sapiens; identical to SEQ ID NO: 278276

SEQ ID NO: 513846 - DNA, 201 bp, Homo sapiens
ctgtactttaggttgcatggttgggacttctgatgggtctttaaagggcctcttttcctcttttctcctaaccctgacgtttgctcaggctctgacttctytttcatgtccctgcaggaaggcgtgtagtcttcatgggagatgatacctggaaagaccttttccctggtgctttctccaaagctttcttcttcccatcct

SEQ ID NO: 513847 - DNA, 201 bp, Homo sapiens
tggccagggagtctggggacaaggaagcagattttcctgattctggctctagcttccctgccaagattttggtttttatttttttatttgaactttagtcrtgtaataaactcaccagtggcaaaccagaaactgtcctctttgattggggaatgaagttgggaaagtcactagcattttccttggatccagtcctgtcag

SEQ ID NO: 513848 - DNA, 201 bp, Homo sapiens
ttatgtagcattccaccttgtcccattcattattcctgacttgaagccaaaattgtgtgaatccactggttcttttctcatgtgtatgttttgtgccctcygttcaccccagcactcctgtcatgtttgaaatgctggcatgaaatcctcctagagatgtccatcaaaagagttgggaagaggccctggagagaagcatca

SEQ ID NO: 513849 - DNA, 201 bp, Homo sapiens
ggtgatccagtgagtgtggggtattggctgggggagtgggtttgtgtctgagaatctcgaagaagctcttatcttagagcttctttcctggctgaattctstcttctctaggccttctgctgaagctagaggctccatccatcttgattaactcaatgtgtagctttgggcatcaggatcatggccgaagacatgtctctt

SEQ ID NO: 513850 - DNA, 201 bp, Homo sapiens
agagtggatggtgctgtgagctcctggttcaggcagctatttctggcccagcagaggtagcctagtctgtgattactggcacttggctacagagagtgctkgagaacagtgtagcctggcctgtacaggtactggatgatctgcaagacaggctcagccatactcttactatcatgcagccaggggccgctgacatctagg

SEQ ID NO: 513851 - DNA, 201 bp, Homo sapiens
ggccatagcaggattcagataagcctgatggcgcttttgtaccacagagagaattagaataacagaatgttgactgtaaggaggttgggctgataggcatktgagtgtgtatgagaattgatactgaagtagtaggagtatatgattgtggagcagtagcctatggattagggaataagaagtgactgtaacgtggcatat

SEQ ID NO: 513852 - DNA, 201 bp, Homo sapiens
gtatttttagtagagacggggtttcaccgtgttagccatgatggtctcgatctcctgacctcgtgatccgcccgcctcggtctcccaaagtgctgggatcrcaggcgtgagccacggcgcccggccccagcgtatgacttcttaatgatgtctttgtagtacaagagtttttaattttaataaagttaacttttttttaaa

SEQ ID NO: 513853 - DNA, 201 bp, Homo sapiens
agacacaggaggctgggaggacagtgagaaggctgcctcagtgatcctggagaagggatgaggtctgaactgagataaggggctatggggatgaaggtggragaataactcaactttttttaaaaattaacatattcctttattcgtttggtcagtatgtgaacctcaaatatatgctaggtgctgaggatatcataatga

SEQ ID NO: 513854 - DNA, 201 bp, Homo sapiens
gcttcagggaatcctccagcctcagcctcccaaagtgctgggattacagcatgagccacatccagcctatgatttttcttcttttcttttcttttcttttyttttttttttgagatggagtctcgctgttgcgcaggctggagtgcagtggggcgatctcggctcactgcaggctctggcccgcggggttcacgcctttct

SEQ ID NO: 513855 - DNA, 201 bp, Homo sapiens
ttgataatatcctttaatgcacaaacattctttttttttttttttttttttgagacggagtcttgctctgtcgccaggctggagtacagtggcactatctsggctcactgcaacctccgcctcctgggttcaagtgattctcctgcctcagcctcctgagtagctgggactacaggcgtgcatcaccacgcccagctaatt

SEQ ID NO: 513856 - DNA, 201 bp, Homo sapiens; identical to SEQ ID NO: 513772

SEQ ID NO: 513857 - DNA, 201 bp, Homo sapiens
tatctcattgtggttttggtgtgcatttccttaatgattaatgatgctgagctgagcatcttttcttgtgcttactggagaaatgtcccttcagattcttygactatttttaattggattattgttattattattatttttggaccagggtcttgctctgtcacccaggctataatgcagtggcgtgatcatggctcactg

SEQ ID NO: 513858 - DNA, 201 bp, Homo sapiens
ggagcagcagagatgtccagggtacagatgcaagtcttgatgaggaacttgatcgagtcaagatgagttagtggagctgggcttggccagggagtctgggracaaggaagcagattttcctgattctggctctagcttccctgccaagattttggtttttatttttttatttgaactttagtcgtgtaataaactcaccag

SEQ ID NO: 513859 - DNA, 201 bp, Homo sapiens
tttgccactcctctccctggctgagtcctctggcatccatggtgggtggtcgagccaagaatttgtggtatggagcttgtgtggcggcgctggtggccctsttagctgccgtgcgcttgtggcttcgccgctatggtaatctcaagagccccgagccacccatgctctttgtgcgctggggactgcccctaatggcattgg

SEQ ID NO: 513860 - DNA, 201 bp, Homo sapiens
agagcactggtgccagggaccaaactgagaccccaccaccgtcatcaacacttacataccataaaggtcttcagagtgccttggccctagacctcccttcrttctttgtagagatggaatctaagaatgaaacatctccactcagtcctgcaaatatggaagttcttgagatacctttttttggtagatacttgtgctggt

SEQ ID NO: 513861 - DNA, 201 bp, Homo sapiens
agaggtgaggcctgggatgttcctcatctgttctcccagtaatcagcccatgttaccattacagcatcctcatgaatacctctattttaggcccccaaatycatgatcctgggtatcctccactctcatttcttacctaggcccctatgtctgccatcccaaacattgacttcagctttgtgatgaatctgttgaccactg

SEQ ID NO: 513862 - DNA, 201 bp, Homo sapiens
tccaaactggccaaggactccaacactatcctactgccctccaaccctggcgatgtcaccagcatggtggctcaggttagagctctctgaggacccagcayagagcactggtgccagggaccaaactgagaccccaccaccgtcatcaacacttacataccataaaggtcttcagagtgccttggccctagacctcccttc

SEQ ID NO: 513863 - DNA, 201 bp, Homo sapiens; identical to SEQ ID NO: 513773

SEQ ID NO: 513864 - DNA, 201 bp, Homo sapiens; identical to SEQ ID NO: 513775

SEQ ID NO: 513865 - DNA, 201 bp, Homo sapiens; identical to SEQ ID NO: 278285

SEQ ID NO: 513866 - DNA, 201 bp, Homo sapiens
tctctaggccttctgctgaagctagaggctccatccatcttgattaactcaatgtgtagctttgggcatcaggatcatggccgaagacatgtctctttgcyaaaggtctaggccttactaatggagttatagctggggatgaataggcccctggagaaaaatcttttttctttttgagaaaaatatttatccgtttctact

SEQ ID NO: 513867 - DNA, 201 bp, Homo sapiens; identical to SEQ ID NO: 278288

SEQ ID NO: 513868 - DNA, 201 bp, Homo sapiens; identical to SEQ ID NO: 278290

SEQ ID NO: 513869 - DNA, 201 bp, Homo sapiens; identical to SEQ ID NO: 278293

SEQ ID NO: 513870 - DNA, 201 bp, Homo sapiens
aagtcttgatgaggaacttgatcgagtcaagatgagttagtggagctgggcttggccagggagtctggggacaaggaagcagattttcctgattctggctytagcttccctgccaagattttggtttttatttttttatttgaactttagtcgtgtaataaactcaccagtggcaaaccagaaactgtcctctttgattgg

SEQ ID NO: 513871 - DNA, 201 bp, Homo sapiens; identical to SEQ ID NO: 56170

SEQ ID NO: 513872 - DNA, 201 bp, Homo sapiens
tcatcgtgcctggcattttttttttttttttttgagagggagtcttgctctgttgcccaggctggagtgcagtggtgcaatctcggctcactgcaacctcygcctcctgggttcgagtgattctcctgcctcagcctcccaggtatctgggatcacaggcgcccgccaccactcccgggtaacttttgtattttcagtaga

SEQ ID NO: 513873 - DNA, 201 bp, Homo sapiens
cggtagtacacgggcctggtgaggcaacagctgtggagtgggggccaaacacatggatggtggagtacggccggggcgtcatcccatccaccctggccttygcgctggccgacactgtcttcagcacccaggacttcctcaccctcttctatactcttcgctcctatgctcggggcctccggcttgagctcaccacctacc

SEQ ID NO: 513874 - DNA, 201 bp, Homo sapiens
cgcttcgtgggcagccggcgggctccgaggccgtgagcgcaaagcctcaggccccggctccctcctgagctgcgccgtgccaggccgcccgccgggatgcmgtgggccgtgggccggcggtgggcgtgggccgcgctgctcctggctgtcgcagcggtgctgacccaggtcgtctggctctggctgggtacgcagagcttc

SEQ ID NO: 513875 - DNA, 201 bp, Homo sapiens
gcccaggacccaccactgaggagaggatctagacaggtgggcctaattccaaggggcccttcctggcctggagaaggccttttacacacacacaacacatacacacacacacacacacacacatatcacagttttcacacagcccctgctgcattctctgtccatctgtctgtttctattaataaagatttgttgatctgt

SEQ ID NO: 513876 - DNA, 201 bp, Homo sapiens
cccaggacccaccactgaggagaggatctagacaggtgggcctaattccaaggggcccttcctggcctggagaaggccttttacacacacacaacacatacacacacacacacacacacacatatcacagttttcacacagcccctgctgcattctctgtccatctgtctgtttctattaataaagatttgttgatctgtt

SEQ ID NO: 513877 - DNA, 201 bp, Homo sapiens
ccaggacccaccactgaggagaggatctagacaggtgggcctaattccaaggggcccttcctggcctggagaaggccttttacacacacacaacacatacmcacacacacacacacacacatatcacagttttcacacagcccctgctgcattctctgtccatctgtctgtttctattaataaagatttgttgatctgttc

SEQ ID NO: 513878 - DNA, 201 bp, Homo sapiens
ccggggcgtcatcccatccaccctggccttcgcgctggccgacactgtcttcagcacccaggacttcctcaccctcttctatactcttcgctcctatgctyggggcctccggcttgagctcaccacctacctctttggccaggacccttgaccagccaggcctgaaggaagacctgcggatggacaggagcgggcaggccc

SEQ ID NO: 513879 - DNA, 201 bp, Homo sapiens
tactcttcgctcctatgctcggggcctccggcttgagctcaccacctacctctttggccaggacccttgaccagccaggcctgaaggaagacctgcggatrgacaggagcgggcaggcccgcacatatccacttgctggagcccatgtttacagacagggacatacaccatgcagatcctgagttcctgctgtatgagcag

SEQ ID NO: 513880 - DNA, 201 bp, Homo sapiens
tcctatgctcggggcctccggcttgagctcaccacctacctctttggccaggacccttgaccagccaggcctgaaggaagacctgcggatggacaggagcrggcaggcccgcacatatccacttgctggagcccatgtttacagacagggacatacaccatgcagatcctgagttcctgctgtatgagcagggatatccat

SEQ ID NO: 513881 - DNA, 201 bp, Homo sapiens
tctatactcttcgctcctatgctcggggcctccggcttgagctcaccacctacctctttggccaggacccttgaccagccaggcctgaaggaagacctgcrgatggacaggagcgggcaggcccgcacatatccacttgctggagcccatgtttacagacagggacatacaccatgcagatcctgagttcctgctgtatga

SEQ ID NO: 513882 - DNA, 201 bp, Homo sapiens
gggggtatagaaagctgggggtctgggtgaatgggatgaagttgaaaagacccaggaaatccaacctaacctccagctgtctggcagagaggttcttggtyaggatccctctgaacacatggccctgttgcccctagcattcctactgccacccagcactgcctgctgtactcagctctaccgaaagccactctcagacaa

SEQ ID NO: 513883 - DNA, 201 bp, Homo sapiens
ggacctttctctacccaggcttcacctggctcaacgcagcatctgcatccacccccagaaccccagcctgtcacagtggtttgagcaccaagagagaaagytccatgggactctgcccaagctgaattttgggatgctaaggaaaatgggctgaagcccccaatagccaaataataaagcagcattggataataatttctg

SEQ ID NO: 513884 - DNA, 201 bp, Homo sapiens
ccaggcttcacctggctcaacgcagcatctgcatccacccccagaaccccagcctgtcacagtggtttgagcaccaagagagaaagctccatgggactctrcccaagctgaattttgggatgctaaggaaaatgggctgaagcccccaatagccaaataataaagcagcattggataataatttctgagtataatctccaa

SEQ ID NO: 513885 - DNA, 201 bp, Homo sapiens
ttagggtcattggggatgaccctaatctcatccccaagctatggtcatagctttggacctttctctacccaggcttcacctggctcaacgcagcatctgcrtccacccccagaaccccagcctgtcacagtggtttgagcaccaagagagaaagctccatgggactctgcccaagctgaattttgggatgctaaggaaaat

SEQ ID NO: 513886 - DNA, 201 bp, Homo sapiens
ggtctgggtgaatgggatgaagttgaaaagacccaggaaatccaacctaacctccagctgtctggcagagaggttcttggtcaggatccctctgaacacayggccctgttgcccctagcattcctactgccacccagcactgcctgctgtactcagctctaccgaaagccactctcagacaagctactgaggaaggtcatc

SEQ ID NO: 513887 - DNA, 201 bp, Homo sapiens
gcatgagtgagagagcttctattctctgcctaaccttctcaaactccagtctagggtccatgcatttcctccttacaggaagctggtaaaataggttatasactgttacagtagtcccagcgcttgctctagtcacatcagcttcacaagctttcagggcttttccactctgaaacagtttcacaaaagttttcattgtcc

SEQ ID NO: 513888 - DNA, 201 bp, Homo sapiens
agttttagattggctttccctaatccatccaaatcattgaaactatattatataccaaaaataatcattaaaaaaaggttacaagaagaccagctggttartcattcaggctaaactccattcttacctgcctcgccattctcttcagtcttagtgctcatcaaacaggcaataaacttgttatctacttgctggagaacc

SEQ ID NO: 513889 - DNA, 201 bp, Homo sapiens
ggtcccatctaaccatgtctcagatattgcaatattcttttaacagtcaatctacagttaactgggactccacccctactcctactccattctccacactrcaaccagagcaatctttttaaaatgcaaatgtgatgtgacatgtaccaccccaaaaacaacatcaaaatacaaatgataaaaaatgaaaaaaaaaagctt

SEQ ID NO: 513890 - DNA, 201 bp, Homo sapiens
catacctctactagccaaagttcactgactataattctttaaatgcccttcttccttattttgagctaactcatctctgaatttctagctcctggcacacmgcaggtaaataccatgaatacttgttgaagaaaagatgaattcagagaatctacagacaaaatatgaggttaccatcactcagcaatttccttaacatct

SEQ ID NO: 513891 - DNA, 201 bp, Homo sapiens
ctctaattttagattttactattttagatattactaaagcacttcagacttctagatgaggtgggtgtggatttgcctgtgctccaaatcaagaaagctastgataaaggagaaggaacaatcatgaaaaaagcaggacaccataaaaaaggaagagtgagatttggggaaaaaaacacaacttctggaaataaaaaatat

SEQ ID NO: 513892 - DNA, 201 bp, Homo sapiens
tggtgcttctgtgtgaaaccccaaaataaaggaaaagcttacctccagttgttctcggataaattcctgcaaagcaaaaggaaaatcggctttaatctacrgttatgttttacttgccctttgatagtttacaaaatatctcaattttcttctttaaatcatgcctcctgaaagaaagagttccagcaatacagcacttgg

SEQ ID NO: 513893 - DNA, 201 bp, Homo sapiens
tcctctacttctgtatccagaggattttcaaccttcccatattgcctcttaaacttctctaaagatcctagctgtgaactcaagcttagcttcttacggamgattggtttggagaaaccaattaatttatctgttttcctactatcattggaaacgtgtctataccaggggaaagagggggatgtatcagataatatgcaa

SEQ ID NO: 513894 - DNA, 201 bp, Homo sapiens
agctttgtccttaaaactagtcttttgttcacaaacaaaaactgcatattcttgttgtaatgtgcttcagagctgatatagccactaagctcaaactcttkatatttaaaacttatttctcttagcttttgggactttcccaatccataaatttgacaaaatcgggaacatacgtctttggttttagggagctgaagaacc

SEQ ID NO: 513895 - DNA, 201 bp, Homo sapiens
ttattcctttcacgtttgattgctcaccaagtcctcttgcttctgcctcccaaattctgtctcaaatatgtcactcctctctactccctctgctactgacycagtccaatcctcatcttctcttaccttaaccactgcaataacccgtcagctgctctccctgactcaaatcttcccacataaatccatcccccaatttat

SEQ ID NO: 513896 - DNA, 201 bp, Homo sapiens
cttatattcgttctgcaattttttttgttgggcaattgaccagattctttacttaaagtgctggctaaatctttgatgtctggagtttcaactgaatgacrtgttctatttccaaatgtttcttgggcacgtgtgggaccaggtctaacataatttttaaatgaatgttctgtttcagttgatttagttttttcattttgt

SEQ ID NO: 513897 - DNA, 201 bp, Homo sapiens
tagtgaactaccacattctttcaattataacacaggccaaactgcaggactttagtttaatttttgaacatacagtacaaagtgtgctttctcacaacagytgcagttagaaaagctctttgaggtgtactgattctgctgggagtctcaaattttttctggctgcaaacagatccttaccaatgataagctgctccagac

SEQ ID NO: 513898 - DNA, 201 bp, Homo sapiens
tcagccatccttagaatttcctcttttcagcagagctttccagaccttttccaaagcatatgcaccctggatgctgatgttccacaggctccactcttttstctcttccttttcactctccatattctccctggacaacctcacttcctcaaggcccttctccagcttctgatactatcaatatatatatactgttaactc

SEQ ID NO: 513899 - DNA, 201 bp, Homo sapiens
tttttcctggttttcctcctccctctctaaccaagtattttcagccatccttagaatttcctcttttcagcagagctttccagaccttttccaaagcataygcaccctggatgctgatgttccacaggctccactcttttctctcttccttttcactctccatattctccctggacaacctcacttcctcaaggcccttct

SEQ ID NO: 513900 - DNA, 201 bp, Homo sapiens
tcaagacttcctatctgttgttctgaggctctgataagaacatctgaatctttaccggtaactttagaattattatagggcaataccaaaggagtttctgrtatcacacagttctctgttgtattgctgttagaatgtgttttactatttttattaaaggaattatcctgtgtggcagaatctgatgttgggatgacacca

SEQ ID NO: 513901 - DNA, 201 bp, Homo sapiens
ctccttcatctatactctagtctgccatgcctataaatgagcacagttatcaagagctaggtagtagatactatattacatataatttaaaaatcacatgytttcccaaacaaacctaaacagaaagatggtctcataagactcaatccactgacaaagcttagtgtggatggagagcaaacattcttgtgtttgtacatc

SEQ ID NO: 513902 - DNA, 201 bp, Homo sapiens
gctcctaagattacaacatggtaccttttcttttaaaaccagactcaggaaattctcttccctccttcatctatactctagtctgccatgcctataaatgrgcacagttatcaagagctaggtagtagatactatattacatataatttaaaaatcacatgctttcccaaacaaacctaaacagaaagatggtctcataag

SEQ ID NO: 513903 - DNA, 201 bp, Homo sapiens
agcatcaatactgttgagggcaagttcctcaacacattggcccaaggagcttatggccaaaccagaacgcaatttggcttgtacttcaactgacaagcacytgatcatggtaggtagaaagatggtgagaatgccaggcactggtttccttctctgactggaaataattgcctattggagaaaaaaaccacacacgcacat

SEQ ID NO: 513904 - DNA, 201 bp, Homo sapiens
atgtatttagaagaataaaagccattttttagacagtagggcctgttcttcaggattccaattacgtaaatctacaaggatccccttgaaaacaagtgaaggttttctctgaaccttctctggggcagacgctaatgaatgcaatactttcattgctcctgtaagattcacttcaaggctgctggcaaaggaacttttctt

SEQ ID NO: 513905 - DNA, 201 bp, Homo sapiens
acaggctgggcgaggtgactcacacctgtaatcccagcactctgggaggccaaggcaggcggatcacaaggtcaggagtttgagaccagcctggccaatayggtgaaaccctgtctctactaaaaatacaaaaaaaaattagccgggtgtggtggcgcatgcctataatcccagctactcaggaggctgaggcaggagaat

SEQ ID NO: 513906 - DNA, 201 bp, Homo sapiens
tcaggaggctgaggcaggagaattgattgaacctgggaggcggaggttgtggtgagccaagatcatgccactgcactccagcctgggcgacagagtgagamtccgtctcaaaaaaaaaaaattgaaaatgtaggtagcatacaaatatttccaaagtctggctgttataatctgtttagatttctaacttctggattcaat

SEQ ID NO: 513907 - DNA, 201 bp, Homo sapiens
ggctcatgcctataatcccagcactttgggaggccaaggtggacagttcacctgaggtcgggagttcgagaccagcctgaccaacatggagaaacgctgaytactaaaaatacagaattagccgggcgtggtggcgcatgcctgtaatcccagctactcgggaggctgaggcaggagaattgcttgaacctgggaggcaga

SEQ ID NO: 513908 - DNA, 201 bp, Homo sapiens
gagaattgcttgaacctgggaggcagaggttgcggtgagccaagatcgcaccattgcactccagcctgcgcaacaacagcaaaactccgtctcaaaaaacaaaaaaaaaaggaaagattttggaaagcagcaacagggacattcctgttatgttctccatgttctccttcactgaagattataacaaggacagaagttctt

SEQ ID NO: 513909 - DNA, 201 bp, Homo sapiens
agacggaccgaagatacattttgaaggtggcaatgatgacatttggtgatagaggagtatgagtctgttctcacactgccatgaagaaatgaccaagactsggtcatttataaaggaaagaccatttaaatgactcacagttctgcatggctggggaggcctcagaaaacttacaattatggcggaaggtgaaggagaagc

SEQ ID NO: 513910 - DNA, 201 bp, Homo sapiens
cagatgatccgcctgcctcggcctcccaaagtgctgggattacagttgtgagccactgcacctggccgtatttatttattatttttaattttttgagacgkagtctcgttgttgcccaggctggagtgccatggcgcgatctcagctcactgcagcctccacctcctcaccaggctagaagatagagctttatagaaggat

SEQ ID NO: 513911 - DNA, 201 bp, Homo sapiens
acagcttatcattcacggacttttttttttttgagacagagtttcactcttgtcacccaggctggggtgcaatggcgtgatctcagctcattgcaacttcygcctcccgggttcaagtgattctcctgcctcagcctcccgagtagctggaattacaagtacctgccaccatgcccagctaatttttgtatttttggtaga

SEQ ID NO: 513912 - DNA, 201 bp, Homo sapiens
ccagcaggcaatagatattcagggtacataagtctgtacatgtgttaagttttaaaatacaaagccattatgtaggtgacctgacagttcagtctaagttycattttggatttgagctggaaaatgaaatgggtgaggctttatgtgaaacttccaatgcagattttgcaaaactctcctattttggaaaggttaagacag

SEQ ID NO: 513913 - DNA, 201 bp, Homo sapiens
agagaaggcctgagatgttcccaacagagtgactcttgagaataggtaatgtgaccagagattgctaacatacaggctgaaataaatttttaaaatttatrtgaaagcaaggaaaacgattatggagaaactagtctatttttatttttatttatttttaatttttttttttttgagacggagtctcactttgtcacccag

SEQ ID NO: 513914 - DNA, 201 bp, Homo sapiens
ttctctaaagatcctagctgtgaactcaagcttagcttcttacggacgattggtttggagaaaccaattaatttatctgttttcctactatcattggaaaygtgtctataccaggggaaagagggggatgtatcagataatatgcaatctgtttgtgattttttgctaccttcctgaaaagcagaaaacattgtataagtt

SEQ ID NO: 513915 - DNA, 201 bp, Homo sapiens
atttaaaagaataaaagatgggctgggcgtggtggcttacacctgtaatcccagctgttagggaggcagaggtggaaggatagcttaagcccaggagttcragacctacctgggcaatatagcgagaccccgttctccacaaaaaggaaaaaaaaaagacaaaaagagtaaaagttgaaatatctcctttgcacaccctca

SEQ ID NO: 513916 - DNA, 201 bp, Homo sapiens
aggtctaacataatttttaaatgaatgttctgtttcagttgatttagttttttcattttgtactacatgagttataaagccagtggaacataatttaactygcccataactaaaaacatttcttcttccacaattgctagattctttttttttctctttctctgtctgagcactatgtactccccataatgttgttgcaaa

SEQ ID NO: 513917 - DNA, 201 bp, Homo sapiens
caaccctcagaatcactgttgcttttgttttctcctttattcctttcacgtttgattgctcaccaagtcctcttgcttctgcctcccaaattctgtctcaratatgtcactcctctctactccctctgctactgacccagtccaatcctcatcttctcttaccttaaccactgcaataacccgtcagctgctctccctgac

SEQ ID NO: 513918 - DNA, 201 bp, Homo sapiens
atgccaacaccttctggacagtcagtggcaatgtcccttggatgcctccggtggtctggagtagctaatgcataaacacgttattaacaggaaaagaaaayggaacaacgaagccttttatgtgtggtgcttctgtgtgaaaccccaaaataaaggaaaagcttacctccagttgttctcggataaattcctgcaaagcaa

SEQ ID NO: 513919 - DNA, 201 bp, Homo sapiens
agatcctagctgtgaactcaagcttagcttcttacggacgattggtttggagaaaccaattaatttatctgttttcctactatcattggaaacgtgtctayaccaggggaaagagggggatgtatcagataatatgcaatctgtttgtgattttttgctaccttcctgaaaagcagaaaacattgtataagttgctgtagg

SEQ ID NO: 513920 - DNA, 201 bp, Homo sapiens
tttgtttttgtaaaagtgatttttaaaagggtatattcagtttcttgatctaaattgtattctccaagagtcaagtagtaaatgtaccctctgcctctttygtaatcccggcagccctgccagggctctgcatgcagaggtgtttgatcactgctatgttgaagggcttaccatggcaggcttgggatgccaacaccttct

SEQ ID NO: 513921 - DNA, 201 bp, Homo sapiens
acagacacctgggcctacttgagggtggagggtgggaggtgggtgaggatcagaactacctattgggtactatgctcattacctgggtgacaaaataatckgtacaccaaacccctgcgacatgcaactcacccatgttacaaagtgcacatgtaccccctgaacctaaaatgaaagttggaaagataaaaaaagaacgct

SEQ ID NO: 513922 - DNA, 201 bp, Homo sapiens
tttatgtgaaacttccaatgcagattttgcaaaactctcctattttggaaaggttaagacagattacagttgcatagtaaaagccagaaaagaaagagaarataaactttgctccctcctgctcctgttagtcattaatgtacctgtttttcctgttccaagtggtctatgtcagctaacggcagcatagaaggtctcccg

SEQ ID NO: 513923 - DNA, 201 bp, Homo sapiens
atacaaagccattatgtaggtgacctgacagttcagtctaagttccattttggatttgagctggaaaatgaaatgggtgaggctttatgtgaaacttccartgcagattttgcaaaactctcctattttggaaaggttaagacagattacagttgcatagtaaaagccagaaaagaaagagaagataaactttgctccctc

SEQ ID NO: 513924 - DNA, 201 bp, Homo sapiens
tactatgcaattttagtctgttgagtcctattaaccacaaatcatgtgaaaaggtgcgggaaaaatagattgagaatggcataacaagcatttgcagaackatcagtcctggtcccaagtgatattataagggcaatagataggcataatgtaataacaccaagataccgtttgaaagggacccaaagaacccttgtctcc

SEQ ID NO: 513925 - DNA, 201 bp, Homo sapiens
ctactatgcaattttagtctgttgagtcctattaaccacaaatcatgtgaaaaggtgcgggaaaaatagattgagaatggcataacaagcatttgcagaamgatcagtcctggtcccaagtgatattataagggcaatagataggcataatgtaataacaccaagataccgtttgaaagggacccaaagaacccttgtctc

SEQ ID NO: 513926 - DNA, 201 bp, Homo sapiens
ttgtctatcacttgaacttggaaggtttccatattcaccctgacagccacacattttgcttcagcatcaatactgttgagggcaagttcctcaacacattsgcccaaggagcttatggccaaaccagaacgcaatttggcttgtacttcaactgacaagcacttgatcatggtaggtagaaagatggtgagaatgccaggc

SEQ ID NO: 513927 - DNA, 201 bp, Homo sapiens
acttctatttatttttatatttttgtattttttgtctcaagatctgtttgtggataaaagatcttgtaagagatttacttcagtaaaaaaaaaaaaaaaamaaaaaaaaaaaaaacccaaaagaacacagaataagtaggatgcaagaggcaatggtgaacaaagactctggtgaacactttttttaatctaaataaagat

SEQ ID NO: 513928 - DNA, 201 bp, Homo sapiens
agtactttctttccatatttctagatcctgcccactctcctcaaagtgacatggtgtctgaaaagggcttaaaaacatttctaaactggttccacacggaytttctaaagagctatgttccaggaaagattttttatgtttctcattttctccagcttctgatgctacaattgtctcttgttctaacatctttgattctga

SEQ ID NO: 513929 - DNA, 201 bp, Homo sapiens
aaacttctctgagtcaaggatgtggcttgctggttgacaactactatctgaatcactatgctccatagtagtgattttacaaacatcagagttctctaagyggttcttgtccttcagcagaatgtcaggttcaacttgaagactgagattggtagtgactccattactttcctctacttctgtatccagaggattttcaac

SEQ ID NO: 513930 - DNA, 201 bp, Homo sapiens
gtagaatatgctaaattattttatgatttgaccttgacaacccatctagccaactcccatccagtcaaagatccaagtataacttctgatttccccccaatttttttttttttttttttgagacggagtcttactgtgtcactcaggctggagtgcagtgcagtgatcttggatcactgcaacctccaccttccgggttca

SEQ ID NO: 513931 - DNA, 201 bp, Homo sapiens
ggactttctctcaaactaagcatctgttgttctaaacaatcttcatccttggagaatggaaacttctctgagtcaaggatgtggcttgctggttgacaacyactatctgaatcactatgctccatagtagtgattttacaaacatcagagttctctaagcggttcttgtccttcagcagaatgtcaggttcaacttgaaga

SEQ ID NO: 513932 - DNA, 201 bp, Homo sapiens
tgttgagggcaagttcctcaacacattggcccaaggagcttatggccaaaccagaacgcaatttggcttgtacttcaactgacaagcacttgatcatggtmggtagaaagatggtgagaatgccaggcactggtttccttctctgactggaaataattgcctattggagaaaaaaaccacacacgcacataatcaaagctt

SEQ ID NO: 513933 - DNA, 201 bp, Homo sapiens
aattagccggggcatggtggtgtgcgcctgtaatcccagctacttgggaggctgaggtaggagaatcgctttaacccgggaggtggaggttgcagtgagcygagattgtgccattgcactccagcctgggcatcgcaaaaaaaaaaaaaaaaagaaagaaagaaagaaagaaaaagaaaatgttaagaaaatcataagaaa

SEQ ID NO: 513934 - DNA, 201 bp, Homo sapiens
cctgtggcatcttctaccggattcattaacattccactgggagagtcaagacttcctatctgttgttctgaggctctgataagaacatctgaatctttacyggtaactttagaattattatagggcaataccaaaggagtttctgatatcacacagttctctgttgtattgctgttagaatgtgttttactatttttatta

SEQ ID NO: 513935 - DNA, 201 bp, Homo sapiens
tcacattgaataggctaaggaggaggaagaagaggaaaggttggtcttgctgtctcaggaatggcagaggtgaaagaaaatctgcatttaagtgtacctgygcagttcagacccaagttatccaaggatcaactgtagatcttaatttgagccatatctattgatagttccctaaacataggatgtatctcaagtctctga

SEQ ID NO: 513936 - DNA, 201 bp, Homo sapiens
acacgtgtttgactcttcagtttcagaacaagctcttgctttagattcctcactctgaaaacaaattccattttggtcacctgtggcatcttctaccggaytcattaacattccactgggagagtcaagacttcctatctgttgttctgaggctctgataagaacatctgaatctttaccggtaactttagaattattata

SEQ ID NO: 513937 - DNA, 201 bp, Homo sapiens
cgggggtttgggaagccaatgcaaggggattgcttgaggccagaagttcaggaccagcctgggcaacatagtgaggcccccatctctacaaaaaaaaaaarggaaaaaattagccaggcatggtggtgcgtgtctgtagtccgagttacttgggaggctgaggcaggaagattgcttgtgcccaggagatcaaggctacag

SEQ ID NO: 513938 - DNA, 201 bp, Homo sapiens
cttctaaaaggttgacacctgtactgagaccctaaatataagaaagaaaaacctagaaatgtgaacttaaaatacaagtaaactctttaaaaatttaatcmcataaaacctctttctgcacaaactgagtcaagacataaagcagactactaaacactagattgagaatcagaaatcctttaatgaaattatgctgtccat

SEQ ID NO: 513939 - DNA, 201 bp, Homo sapiens
tgctgctgctgctctctgctcagaggcatacagtgaacatccctttgttccttttagaccagtgattctgttctcatggtggctcacagggaggcatggaytgctgcaggctctgccttgtatcacactctgcttttccaaagagacgccaggcctgggccattttgcgaagtttagtgaggttgggtttaatctatggga

SEQ ID NO: 513940 - DNA, 201 bp, Homo sapiens
ggcaacatagtgaggcccccatctctacaaaaaaaaaaaaggaaaaaattagccaggcatggtggtgcgtgtctgtagtccgagttacttgggaggctgargcaggaagattgcttgtgcccaggagatcaaggctacagtgagctatgattgcaccactgcactccagcttgggcaacagagtgagacctggtctctcaa

SEQ ID NO: 513941 - DNA, 201 bp, Homo sapiens
gaggcagaagaattccttgaactcgggaaggggagactgcagtgagccgagattgcaccactgcaatcccacctgggcgacagagcaagactccatctcaraaaaaaaaaaaaaaaaaaaaaagtaaagaaaaaaagagaaatttcaacagatccattttgcttctttcaacatctgcagattttgtagttacacccatct

SEQ ID NO: 513942 - DNA, 201 bp, Homo sapiens
ttttctgcatctgatggctcaaatttgtatctccatgtcagaacacttgtctaggccagacttgtaatatccaaccacattcttgacatctttttattttwtttttttgacagagtttcgctctgtcacccaggctggagtgcagtggtgcgatcttggcgcactgcaacctccgcctcccgggttaaagcaattctctgc

SEQ ID NO: 513943 - DNA, 201 bp, Homo sapiens
cccagcagtagctttccaaacctttaccaaaacatatatgtaaagtaatcatatttggaatgcaatctaaaatggaccttactctcctgcttaaaagtttycactggctgcctataggataaaatgcaaactacttagtagaatatgctaaattattttatgatttgaccttgacaacccatctagccaactcccatccag

SEQ ID NO: 513944 - DNA, 201 bp, Homo sapiens
cattccctccaaacctacttacactactaaagatatttctttctttgtaattataattaatcccttgctttttcttctgatgataaaagttctagtaagaacacacacacacacacacacacacacgtgccttgaccaaggtggtctatatcattaaataaatcaaattttagaagagttaggccatatatatatatatat

SEQ ID NO: 513945 - DNA, 201 bp, Homo sapiens
tgtattgggagctttgtcaggcagttagtgagacagataatttccatcctcatggcgcttatggtctaataggggagacaaacatgaagcagataattatmcaataatttaaatgataaatataggtgctataaaatacaggatatgaatatataataggaagaccaaacccagtttaggagcttaaggaaggctttcctg

SEQ ID NO: 513946 - DNA, 201 bp, Homo sapiens
attccctccaaacctacttacactactaaagatatttctttctttgtaattataattaatcccttgctttttcttctgatgataaaagttctagtaagaacacacacacacacacacacacacacgtgccttgaccaaggtggtctatatcattaaataaatcaaattttagaagagttaggccatatatatatatatata

SEQ ID NO: 513947 - DNA, 201 bp, Homo sapiens
gaaacgctgactactaaaaatacagaattagccgggcgtggtggcgcatgcctgtaatcccagctactcgggaggctgaggcaggagaattgcttgaaccygggaggcagaggttgcggtgagccaagatcgcaccattgcactccagcctgcgcaacaacagcaaaactccgtctcaaaaaacaaaaaaaaaaggaaaga

SEQ ID NO: 513948 - DNA, 201 bp, Homo sapiens
tggctcatgcctataatcccagcactttgggaggccaaggtggacagttcacctgaggtcgggagttcgagaccagcctgaccaacatggagaaacgctgwctactaaaaatacagaattagccgggcgtggtggcgcatgcctgtaatcccagctactcgggaggctgaggcaggagaattgcttgaacctgggaggcag

SEQ ID NO: 513949 - DNA, 201 bp, Homo sapiens
ggtggggccggttttccaaactcgggacaaatcagggctcttaactgcagaatttctgctgctttctaagctaatgcactaagcagccggcagcaactgasgggtaaacgtttaacaagtattccgattaatgtaaacccaatgatttcctgatgacgcctcccagcgcctgggactgacgggacgcacgggcctggatcc

SEQ ID NO: 513950 - DNA, 201 bp, Homo sapiens
aagagagataactccttcagggtcataggactttctctcaaactaagcatctgttgttctaaacaatcttcatccttggagaatggaaacttctctgagtyaaggatgtggcttgctggttgacaactactatctgaatcactatgctccatagtagtgattttacaaacatcagagttctctaagcggttcttgtccttc

SEQ ID NO: 513951 - DNA, 201 bp, Homo sapiens
taatttagaggctagtgattcagatgacttctcaaggtccaaaggttttctattaaagagagataactccttcagggtcataggactttctctcaaactargcatctgttgttctaaacaatcttcatccttggagaatggaaacttctctgagtcaaggatgtggcttgctggttgacaactactatctgaatcactatg

SEQ ID NO: 513952 - DNA, 201 bp, Homo sapiens
atgatcctcatcttacttaatgtcttggcagcgtttggcatgacatcctggttttccaacataacattcttctgttttcttcctatttctctagctgttcyttcacagtctcttttgctggttcatcctcttctaccgagctcttaagtgctagaattattctagattcaagacctctcctcactcttcttttttctaggt

SEQ ID NO: 513953 - DNA, 201 bp, Homo sapiens
actttgctccctcctgctcctgttagtcattaatgtacctgtttttcctgttccaagtggtctatgtcagctaacggcagcatagaaggtctcccgtgagyacactggaatggcagctggcatgaggacagagcttcaataaggcggcaactttcctgtaagctcaggccatcattaaacttaatggcccctaaatgaaag

SEQ ID NO: 513954 - DNA, 201 bp, Homo sapiens
gggccgtgctggtacctgctgctgctgctctctgctcagaggcatacagtgaacatccctttgttccttttagaccagtgattctgttctcatggtggctyacagggaggcatggactgctgcaggctctgccttgtatcacactctgcttttccaaagagacgccaggcctgggccattttgcgaagtttagtgaggttg

SEQ ID NO: 513955 - DNA, 201 bp, Homo sapiens
atgggaccaattactgcagaaactttgctttcacaaagcatggcataaacacagactgttccaagaaatgagaagagtgttctaagccaactgctggaaaraattatcagggaaactctatcctatactcttcagctgggatacagtggaaagaataggctgggtccagtggctcacgcctgtaatcccagcactttggga

SEQ ID NO: 513956 - DNA, 201 bp, Homo sapiens
taccaaagatatcagagtgctttaaaagcattcatttttatttagcctactagaggtgggtttaattcagggaatttatagaaattcaaaagaatcggccrggcgtggtggctcacacctgtaatctcagcactttgggaggctgaggcgggcagatcacgaggtcaggagatcgagaccatcctggctaacatggtgaaa

SEQ ID NO: 513957 - DNA, 201 bp, Homo sapiens
cctccttctgtacattaaaatgtatcttttaggctggtggctcacgcctgtaatcccagcactttgggaggccgaggcgggcagatcacctgaggttgggrgtttgagaccagcctgaccaacatggagaaatcccgtctctactaaaaatacaaaattagccaggcatggtggcgcatgcctgtaattccagctactcag

SEQ ID NO: 513958 - DNA, 201 bp, Homo sapiens
tactcaggaggctgaggcaggagaatcgcttgaactcagaaggcggaggttgcagtgagccgagatcgcaccatttcactttagcctgggcaacaagagcraaactccgtctcaaaaaaaaaaaattgtcttttaacaatttatttcatgtaacacttttatgtaaagtttgacaatgtcctgatgtcatgatgtatatca

SEQ ID NO: 513959 - DNA, 201 bp, Homo sapiens
caaacctgaaacatattgggagaaatttctttttcattttcaataatttgtgctgcctagaagaggaaaaatatcctatcttgtgactcactatatgattygccccttccttacatcccaatgttttactttcttcccattatgattacgataatgaaaactaagagtctagaatgcaccaaagcaaagcagaatgggacc

SEQ ID NO: 513960 - DNA, 201 bp, Homo sapiens
aaacacaaaaaattagccgggtgtggtagcgggtgcctgtaatcccagctacttgggaggctgaggcaggaggatcccttgaacctgggaggcggaggttrtagtgagccgagatcacgccactacactccagcctgggcaacaagagtgaaactctgtctcaaataaataaatgccatattattgtcttcctgaataaca

SEQ ID NO: 513961 - DNA, 201 bp, Homo sapiens
tccataattcattccctccaaacctacttacactactaaagatatttctttctttgtaattataattaatcccttgctttttcttctgatgataaaagttytagtaagaacacacacacacacacacacacacacgtgccttgaccaaggtggtctatatcattaaataaatcaaattttagaagagttaggccatatata

SEQ ID NO: 513962 - DNA, 201 bp, Homo sapiens
atattcttagttttagattggctttccctaatccatccaaatcattgaaactatattatataccaaaaataatcattaaaaaaaggttacaagaagaccasctggttagtcattcaggctaaactccattcttacctgcctcgccattctcttcagtcttagtgctcatcaaacaggcaataaacttgttatctacttgct

SEQ ID NO: 513963 - DNA, 201 bp, Homo sapiens
gcaggtaaataccatgaatacttgttgaagaaaagatgaattcagagaatctacagacaaaatatgaggttaccatcactcagcaatttccttaacatctrcagctgtgtcttacctccacaatactcttggtcacagtagatcttcctctccgaagttcattggcttctctttccacaaaacatagtggtacttttccca

SEQ ID NO: 513964 - DNA, 201 bp, Homo sapiens
aaactcgggacaaatcagggctcttaactgcagaatttctgctgctttctaagctaatgcactaagcagccggcagcaactgaggggtaaacgtttaacamgtattccgattaatgtaaacccaatgatttcctgatgacgcctcccagcgcctgggactgacgggacgcacgggcctggatccagggcacgggggcctgg

SEQ ID NO: 513965 - DNA, 201 bp, Homo sapiens
tctttgatgtctggagtttcaactgaatgacgtgttctatttccaaatgtttcttgggcacgtgtgggaccaggtctaacataatttttaaatgaatgttstgtttcagttgatttagttttttcattttgtactacatgagttataaagccagtggaacataatttaactcgcccataactaaaaacatttcttcttcca

SEQ ID NO: 513966 - DNA, 201 bp, Homo sapiens
aatccatttaaccctgagttgacacaccacatgtctcagggaacacagggtaaggttacagattaacagcaactcaaggcagaagaatttttcttagtacrgaacaaaatggagtcttctatgtctacttctttctacacagacacagtaacaatctgatctctctttcttttccccacatttcccccttttcttttcgac

SEQ ID NO: 513967 - DNA, 201 bp, Homo sapiens
gggcggcctggcagaggcgctcctcacttcccagacggggcggccgggcagaggcgctcctcacctcccagacgaagggcggccgtttcctgcctattttyaaaaatcctcttttagcgcttttccttagtcccattaccctactgctgagagtcttgtaatacatttcatgtgtatttcctcctaccactttgtgttttt

SEQ ID NO: 513968 - DNA, 201 bp, Homo sapiens
gaggggttgcagcccaaggtgtactaacccagcacctagagaaacgccggagtctaatgggtgtgtcatagatatctgtcgactcttggagaataatatcrcttcttcctcacttcacagaccatggaaggacccccaaccttcaacccggtatggcttggggaaacagagatggatggtggggagggggcacggatctcc

SEQ ID NO: 513969 - DNA, 201 bp, Homo sapiens
ttccttccttttctttctttctttcttttttttttttttttttttgagatggagtttcactctgttgcccaggctggagtgcagtggcatgatctcagctyactgcaacctctgcctgctgggttcaagagcttctcctgcctcagcctcccgagtagctgggattataggcgcgtgccaccacgctcagctaatttctgt

SEQ ID NO: 513970 - DNA, 201 bp, Homo sapiens
tgcatgctttctctcttgcttcccaagctggagtgcagtggcgccatcttggctgcttccttccttcccgccttccttccttttctttctttctttctttyttttttttttttttttgagatggagtttcactctgttgcccaggctggagtgcagtggcatgatctcagcttactgcaacctctgcctgctgggttcaag

SEQ ID NO: 513971 - DNA, 201 bp, Homo sapiens
cactccccagctctgtgttggtgaaagagtgaaagtgactatacctctctgtgcttcattttcttttcttttctgtttttgttttttttgtttttttttttgttttgagatggagttttgctcttgtcgcccaggctggagtgcaatggcatgatcttggctcactgcaacctctgtctcccaggttcaagcgattctcct

SEQ ID NO: 513972 - DNA, 201 bp, Homo sapiens
cagtgagctgagattatgccactacactccagcctgggcgtcagagggagactctgcctaaaaaaaaaaacaaaatttgttcctttgttcctgcaaggctkggcgtggtggctcacgcctgtaatcccagcacttcgggaggctgagatgggaggattgcttgagcccagcagtttgaggctgcagtgaggcttgatcatg

SEQ ID NO: 513973 - DNA, 201 bp, Homo sapiens
ggcaaggtgggctgggtacagcaactcacacctgtaatcccagcactctgagaggccgaggtggtaggattgcttgagcccgggagtttgagaccagcctsggcaacatagtgagaccccatctctacaaaaaaaaaaaaaaaaaaaaaaaagccaggcatagtggcatgcacctgtagtcccagctactagggaggctga

SEQ ID NO: 513974 - DNA, 201 bp, Homo sapiens; identical to SEQ ID NO: 278334

SEQ ID NO: 513975 - DNA, 201 bp, Homo sapiens
tcacccacaacccatttggtcccggacagttctttgatgtgagtctgagctctcttttcccacttccttccagggcctcagtcctggccctggcctcatgyccacccttctccctgcagctgtccattcgctgtggcttggatcgcttcaaggtttacgccaatggccagcacctctttgactttgcccatcgcctctcgg

SEQ ID NO: 513976 - DNA, 201 bp, Homo sapiens
aaggaggagaaaagagaaggtaacagagagaaagagagagagtaaaagttaaaggtgttagacttgggagggtgaggcgagcggatcacctgaggtcgggwgtttgagaccagcctgaccaacatggagaaaccccatctctattaaaaatacaaaattagctgggcgtggtggcgcatgcttgtaatcccagctacaccg

SEQ ID NO: 513977 - DNA, 201 bp, Homo sapiens
gaggagaaaagagaaggtaacagagagaaagagagagagtaaaagttaaaggtgttagacttgggagggtgaggcgagcggatcacctgaggtcgggagtwtgagaccagcctgaccaacatggagaaaccccatctctattaaaaatacaaaattagctgggcgtggtggcgcatgcttgtaatcccagctacaccggag

SEQ ID NO: 513978 - DNA, 201 bp, Homo sapiens
ccccatccctctctgtccccagctttgctatcaacttcaaggtgggctcctcaggggacatagctctgcacattaatccccgcatgggcaacggtaccgtsgtccggaacagccttctgaatggctcgtggggatccgaggagaagaagatcacccacaacccatttggtcccggacagttctttgatgtgagtctgagct

SEQ ID NO: 513979 - DNA, 201 bp, Homo sapiens
ctacaggcacgcaccaccagccccagctagtttttaaattttttgtaaagacagaggggaggaattttcctatgttgtccaggctggtcttgaactcctgwcctcaggtgatccacccacctcagcctcccaaagtcctgagattacaggcgtgagccacagcccccggcttataaagctacgtttatttgtttgtttgtt

SEQ ID NO: 513980 - DNA, 201 bp, Homo sapiens
ttccagagggtggacacattggaaatccagggtgatgtcaccttgtcctatgtccagatctaatctattcctggggccataactcatgggaaaacagaatyatcccctaggactcctttctaagcccctaataaaatgtctgagggtgtctcatgagtgtgtgtctccatctgctccccggctactcttcccttccttggt

SEQ ID NO: 513981 - DNA, 201 bp, Homo sapiens
caatagccagagatgaatctggggcagatcaggagtggggacgtgggggccagaaggttcagggagggctcaccgtgagaggcagtccctgagttggacaytagactgaagctgatgggtgcaatggcaggaattcagatcacaggctcagagccgggtccccgagttaaaatcccagctctgccactccccagctctgtg

SEQ ID NO: 513982 - DNA, 201 bp, Homo sapiens
gtgagatgccagctcaggccccactccgcccgcagctccgtccataagccctcacaccaattttccccactctgatcctggggggccccatctgactctgwggtctgatttacccaaagctgaccccgaccctcgatttactcctaccctgacctcaggctgtctgtgtccacgtctaactgttggccctcgtcatcttca

SEQ ID NO: 513983 - DNA, 201 bp, Homo sapiens; identical to SEQ ID NO: 278338

SEQ ID NO: 513984 - DNA, 201 bp, Homo sapiens; identical to SEQ ID NO: 278325

SEQ ID NO: 513985 - DNA, 201 bp, Homo sapiens
tcagacccaacaatctagaccctctgtcccctcctcctttagggattcagaggtccagcccactggcctcttcccactggactccatctgactcccccatycctctctgtccccagctttgctatcaacttcaaggtgggctcctcaggggacatagctctgcacattaatccccgcatgggcaacggtaccgtggtccgg

SEQ ID NO: 513986 - DNA, 201 bp, Homo sapiens
ggagaggaagaggagcatgcccttcaaaaagggtgccgcctttgagctggtcttcatagtcctggctgagcactacaaggtctgcatgctttctctcttgyttcccaagctggagtgcagtggcgccatcttggctgcttccttccttcccgccttccttccttttctttctttctttcttttttttttttttttttttga

SEQ ID NO: 513987 - DNA, 201 bp, Homo sapiens
ccaggaggcggaggttgcagtgagctgagatcgcggcactccaactccagcctgggcaacagagcaagactccatctcaaaaaaaaaaaaaaaaaaaaaaagaaggaaaggctgtgagcgaaggtgtggtggtgggaatctgcccccctcagaactcaggtcctctccacgctgtggcccacagtgccaaggttgcccctc

SEQ ID NO: 513988 - DNA, 201 bp, Homo sapiens
tcataaccgctttctctttctgtgcccacagggacccccgatgatgccaccttaccctgtaagtacttgctgataggtgagggtcttcctccctagtgggktccctcagcccctctcacccttcctgccttctgtccatcgttcagggtcccggacattgccatcaacagctgaacagcctgcccgtgagtgggagggctg

SEQ ID NO: 513989 - DNA, 201 bp, Homo sapiens
tccaggaggcggaggttgcagtgagctgagatcgcggcactccaactccagcctgggcaacagagcaagactccatctcaaaaaaaaaaaaaaaaaaaaaaagaaggaaaggctgtgagcgaaggtgtggtggtgggaatctgcccccctcagaactcaggtcctctccacgctgtggcccacagtgccaaggttgcccct

SEQ ID NO: 513990 - DNA, 201 bp, Homo sapiens
ggaatctgcccccctcagaactcaggtcctctccacgctgtggcccacagtgccaaggttgcccctcagagctggtgctgaggtccgggccagggaggccsaggacagggcggcagggagagggcttcctggaggaggcccccaggccccgggaggtggcaccaggggaatgagccctttgtgtcccgccaggttcttcgt

SEQ ID NO: 513991 - DNA, 201 bp, Homo sapiens
atccaggaggcggaggttgcagtgagctgagatcgcggcactccaactccagcctgggcaacagagcaagactccatctcaaaaaaaaaaaaaaaaaaaaaaagaaggaaaggctgtgagcgaaggtgtggtggtgggaatctgcccccctcagaactcaggtcctctccacgctgtggcccacagtgccaaggttgcccc

SEQ ID NO: 513992 - DNA, 201 bp, Homo sapiens
gtttcaccatgttgcccaggctggcctcgaactcccgacctcaggtgttctgccctccttggcctcccaaagtgctggaattacaggcgtgagccaccacrcccagccccttccttctttttcctctttttccttcctctttctctgttctctcctctttcctcccctccttccttcccccttccctcctctcttcttcct

SEQ ID NO: 513993 - DNA, 201 bp, Homo sapiens
tcccttccgggctctggtctatcttgtctccttagctgggggcctacagtcatctagagtaaaagggatggttaaaaaaaaaaaaaaaaggcaatcggagrcaagaatgccagaggagagacattaaccatgtaatttgaatttaaaatgctcatggaatatgggaaattcagtgctgagccatgtgagcagggttacttg

SEQ ID NO: 513994 - DNA, 201 bp, Homo sapiens
cgacatcctacagaacctcaagcgcagcaaacagaccaaggagctgtggcagcgggtctcactcgagatggccaccttctccccctgagtctttcaccctwagggtcctatacagggacccaggcctgtggctatgggggcccctcacacagggggagtgaaacttggctggacagatcatcctcactcagttccctggta

SEQ ID NO: 513995 - DNA, 201 bp, Homo sapiens
aagagaagcagagggcataaagtcattcattcacttatttcagtatttattgactatcagtatattctgccctgtggtgttaatggaggataccaagataygttggggttaaataagttacaaaaagacatgtaaaccaggaggtcatcctgtggttgtaagtggggaaggctccctgaggatgtagcaattggctgtttc

SEQ ID NO: 513996 - DNA, 201 bp, Homo sapiens
gagggggcccagggactgagccggttacagtggcagcggcagcagtgacagcagcagccacagtggtgcccgtcatatcggtggggtctagtttatacccrggtccaggactggggcatggccactcccctggcctgcacccctacactgctctacagccccacctgccctgtagccctcagtatctcactcacccagctc

SEQ ID NO: 513997 - DNA, 201 bp, Homo sapiens
tcaccagtggttctggctgtatgagcaaactgcaggtggctcatccacagcccgtgaaggggctacaagctgtagtgccagtgggatcagggcaggtgggraagctgggcggggtatgcctgagggtagagggggcccagggactgagccggttacagtggcagcggcagcagtgacagcagcagccacagtggtgcccgt

SEQ ID NO: 513998 - DNA, 201 bp, Homo sapiens
cccattaatgtgctttcacacccatctttcctttaccttacaactcaaaggttaggtttatttctattttacagataaggaaatggaggcctacggtttakggaccaagatgatcactcaggatagaaaacttagggaaggcctcatacatctaagacttgaatgggagggggctgttaaattagtttggaactgggacta

SEQ ID NO: 513999 - DNA, 201 bp, Homo sapiens
acgactttgtgaatgcgatccggagtgcccgcagcgccttctgcctgacgcccatgggcatgatgcagttcaacgacatcctacagaacctcaagcgcagmaaacagaccaaggagctgtggcagcgggtctcactcgagatggccaccttctccccctgagtctttcacccttagggtcctatacagggacccaggcctg

SEQ ID NO: 514000 - DNA, 201 bp, Homo sapiens
accttacaactcaaaggttaggtttatttctattttacagataaggaaatggaggcctacggtttagggaccaagatgatcactcaggatagaaaacttakggaaggcctcatacatctaagacttgaatgggagggggctgttaaattagtttggaactgggactataacctgggtcttgactcattttggtcagtattt

SEQ ID NO: 514001 - DNA, 201 bp, Homo sapiens
tgatgttggagaaggcctgcatggcagtggaagaggcagctaagggtgggggcgtgtaccctgaagtgttgtttgaggttgctcaccagtggttctggctrtatgagcaaactgcaggtggctcatccacagcccgtgaaggggctacaagctgtagtgccagtgggatcagggcaggtggggaagctgggcggggtatgc

SEQ ID NO: 514002 - DNA, 201 bp, Homo sapiens
gctgagcccgtttgtgctgcaggagatcgtcatggagacgctgcagcggctgagtcccgctcatgcccacaaccacctgcgtgccccggccttccaccaamtggtgcagcgctgccagcaggcatacatgcaggtgacaacctagaattatggagcagggtggagcacttcctgggtggtcttggaccagagggaggcagg

SEQ ID NO: 514003 - DNA, 201 bp, Homo sapiens
agcacagactgacagctgctcttgggctatagcttggggccaagatgtctcacaccctagaagcctagggctgggggagacagccctgtctgggagggggygttgggtggcctctggtatttatttggcatttataaatatataaactccttttttactctagtcgacctgggcctttcccttctttccaaattccatgtg

SEQ ID NO: 514004 - DNA, 201 bp, Homo sapiens
tgtgattctactcaggcctttccaagagtcctgttttccaaactggcttgtggagatttctggtgctcctttgggacagagagaaatttacatatatcactttttttttttttttttgagacggagttttgctcttgttgcccaggctggagtgcaatggcacgatctcggctcaccgcaacctccgcctccccagttcaa

SEQ ID NO: 514005 - DNA, 201 bp, Homo sapiens
tggcagtaggaagaaagccagcttgtagtacagagcgccatttactcaaggcttgctgttgtcaggcaaatccaggcccctatctctagatgactgactgmctgtcatcctcagaccccacagcagggccctcagcatcggaccagagtacttggtatctggatgaatcgacactcactgacaacatcaaaaagacactgc

SEQ ID NO: 514006 - DNA, 201 bp, Homo sapiens
tggtctggcctctcgtgcttcttgagatcccttccgggctctggtctatcttgtctccttagctgggggcctacagtcatctagagtaaaagggatggttaaaaaaaaaaaaaaaaggcaatcggaggcaagaatgccagaggagagacattaaccatgtaatttgaatttaaaatgctcatggaatatgggaaattcagt

SEQ ID NO: 514007 - DNA, 201 bp, Homo sapiens; identical to SEQ ID NO: 259749

SEQ ID NO: 514008 - DNA, 201 bp, Homo sapiens
ttttatgccacattcttttgagaaaagagcttcaatatcatggtgggaaccagaggccaatgatcacccaaaattaaaaggccaaccgcgtattcgcagcmgttgtgatgggaggggttaatatttttattgaaagagtttctgtgacaaataatccctcttaaaacccagtagaagctgggcgtggtggctcacgcctgt

SEQ ID NO: 514009 - DNA, 201 bp, Homo sapiens
tgcttcttgagaacactcaggagatgtcttgcatccttgcagtttggccatccagagaacttccatggcacctagggatggagccctcactctttcacccyggcactctgcttccaggcctgggtggaagctgtcaaaggcagagtccccagtgccccaggcggctccagtactgagcatggtttctcctctaagtgtcgt

SEQ ID NO: 514010 - DNA, 201 bp, Homo sapiens
tcactgttttggttcaagacccccccttctccttcccataataagactccctcccttgcttcccctctgcaccaccatggaaagggggttgtgtgggagcmtaagccaccactcagtgggagccacttctgaatacccgtcctgctgggctcgcctgcgctggctccaggtaacgccagggccttggctgtgaggatgctg

SEQ ID NO: 514011 - DNA, 201 bp, Homo sapiens
ttcgggagacccttggcccccttgtcagacacagcactctcttgtggatctggctgccggacttcaggttggggagagggtacaatgcaggagacttgatwttcctctttgttttcacagctgccaaaagcctattgaacaagaagtcggatggcggtgtcaaggtaagtgtctccagcctctgaacagactggcctcttt

SEQ ID NO: 514012 - DNA, 201 bp, Homo sapiens
cctgcccaacttgctatgtaccttgtttctctggattcttatttaactctctgaagactctcagcactttacagattttagccattctaggatcttggagratgtgctgggggaagaaaagagagatgaggtacagtgagtcttctcaattgccaaattgccaccattcatttgcctgctgggacgatctcttacttcatt

SEQ ID NO: 514013 - DNA, 201 bp, Homo sapiens
attcagggggctggactcacatttgtgaattgtttcctagaacttcccaaggagtagcctgcccaacttgctatgtaccttgtttctctggattcttattwaactctctgaagactctcagcactttacagattttagccattctaggatcttggaggatgtgctgggggaagaaaagagagatgaggtacagtgagtctt

SEQ ID NO: 514014 - DNA, 201 bp, Homo sapiens
gccgtggggctcctccaacttgaggaccgttccccggccacatgcctcagcctctgccctccctggaatccctggtgcctccctcacccacgctctcaggygcctgttcagcctgcctttcccgccttggctcttcccccagccttgcttttctcgagggtgatgtccctacaacctggttttgatcatcctgcctgcagc

SEQ ID NO: 514015 - DNA, 201 bp, Homo sapiens; identical to SEQ ID NO: 259752

SEQ ID NO: 514016 - DNA, 201 bp, Homo sapiens; identical to SEQ ID NO: 259755

SEQ ID NO: 514017 - DNA, 201 bp, Homo sapiens
tgggcaacaagagcgaaacttcttctcaaaaaaaaaaaaaaaaaaaaaaaaaattagccgggtgtggtggcggggtcctgtaatcccagctactcgggagrctgaggcatgaaaatggcttgaacccgggaggtggaggttgcagtgagctgagattgcaccactgcactccagcctgggtgacagagcgagactctgtct

SEQ ID NO: 514018 - DNA, 201 bp, Homo sapiens
gtcctgggtggagggtgatgcctcatggtctagaaatcccaaaggcccggtttgggcaggaactgcactgcctccgaactgcactgcctccgagtgaggagcataaaggccaaggccttggggcctcacttgcgagatcctcccaagtacctgaggcttggagggtcagggcctgtctttcacaccttgaacctacactct

SEQ ID NO: 514019 - DNA, 201 bp, Homo sapiens
aggcggaggtgggagaatcgcttgaacctgggaggtggaggttgcagtgagccgagatcaccccattgcactccagcctgggcaacaagagcgaaacttcwtctcaaaaaaaaaaaaaaaaaaaaaaaaaattagccgggtgtggtggcggggtcctgtaatcccagctactcgggaggctgaggcatgaaaatggcttga

SEQ ID NO: 514020 - DNA, 201 bp, Homo sapiens
cctttcttccatcttccccttgcccctcccttgctgtgcccctccgtgtaatgtttttgtttgttcgtttgcttttggttttttgagatggagtcttgctstgttgcccaggctggagtgcagtggtgcaatcttggctcactgcaatctctgcctcccaggttcaagcaattctcttgtctcagcctcccgagtagctgg

SEQ ID NO: 514021 - DNA, 201 bp, Homo sapiens
gtgagccgagatggtgccactgcactccagcctgggcaacagagtgagactccctaaaaataaataaataaataaataaataaataaataaataaataaawaaaaggccaatgtaaaagaggcctaactatatttaggtttttcttttcctttaaatctaattctaaattatggaccattgtcaatatttgtagcctcttt

SEQ ID NO: 514022 - DNA, 201 bp, Homo sapiens
ccttcaagagtgtgaagtttaacctcccagagctgcaggttccttatctgtaatgtggaaataaaatggcacgcacctcagagccttgttagataaaagamaaggcagtaggaagtcttgatacggtgcctcgatgggttatcagtagctcatcctcatatttctagttacgtctgtgctggaggatgcctttgtctgctg

SEQ ID NO: 514023 - DNA, 201 bp, Homo sapiens
ttcctgaaagcagtaacactttagttgggtaaagggataaggagatatacacacacacacacacacacacacacacacacacccccactacttatatatawgaatataagggaactccttctttttgagggatgattttcgaagtaaaatatcatatttgagcatatttaaaaggccactgtaaggctgtgtgcggtggct

SEQ ID NO: 514024 - DNA, 201 bp, Homo sapiens
tgttctcactggagagagatggaacacagcttggggaggaatggctacccaaagggcaggagggtggcagcaatagtgacaacgatggtggacacttactsagtacttgctatatgccaggcactctaagtgcttttcatgcataatcccactggattcccaccactgttttgtgatgtcagccctactttatcccatttt

SEQ ID NO: 514025 - DNA, 201 bp, Homo sapiens
cataagataggaaccttcctgaaagcagtaacactttagttgggtaaagggataaggagatatacacacacacacacacacacacacacacacacacccccactacttatatatatgaatataagggaactccttctttttgagggatgattttcgaagtaaaatatcatatttgagcatatttaaaaggccactgtaagg

SEQ ID NO: 514026 - DNA, 201 bp, Homo sapiens
ggaggccgaggcgggtggatcacgaggtcaggagatcgagaccatcctggctaacacggtgaaaccccatctctactgaaaatacaaaaaattagccgggygtggtggcaggcgcctgtagtcccagctacttgggaggttgaggcaggagaatggcgtgaacccgggaggcggagcttgcagtgagctgagattgtgcca

SEQ ID NO: 514027 - DNA, 201 bp, Homo sapiens
ctgagaggctataggaagtgcctcttttgggggtttcgggagacccttggcccccttgtcagacacagcactctcttgtggatctggctgccggacttcargttggggagagggtacaatgcaggagacttgatattcctctttgttttcacagctgccaaaagcctattgaacaagaagtcggatggcggtgtcaaggta

SEQ ID NO: 514028 - DNA, 201 bp, Homo sapiens
ctcgggaggccaagacaggagaacctgagaggcggaggctacggtgagccgagattgcaccactgcactccagcctgactgacaaagcgagactccattgyaaaaaaaaaaaaaaattacatccagaatgatgaaaagaattgatgcttcaaggtgacgatccttagcttctgggatcatggcttcattcaggaccttgct

SEQ ID NO: 514029 - DNA, 201 bp, Homo sapiens
acctgagcctagagaggtggaggttgcagtaagccattattgtgctactgcactccagcctgggcaacagagtgagatgctgtttcaaaaaaaaaaaaaawtttttttgtttaaggagaggcttaactataatctatagagaagaatctagtccagaggaaagagttgaagatccttgctaattgaggaagcaaaggtttg

SEQ ID NO: 514030 - DNA, 201 bp, Homo sapiens
tgaagctaaatgtaagcaaaagctttcctctttgtgaggacctgagaggtgagggaagggtccttatgtgtttctatacttctgcatgggcaggccctagygaagtgcctgacgtatgccagccacatacacattaaatgaatgggtcaagaggactatgtaaccaatcatggttgccttttggctttggctcctaggaaa

SEQ ID NO: 514031 - DNA, 201 bp, Homo sapiens; identical to SEQ ID NO: 259766

SEQ ID NO: 514032 - DNA, 201 bp, Homo sapiens
tactactggtgtcaaagatgaaggtcatgtgcagccatgtaagattagcccaaggagccagctcaaaccatgcacatccagggcccagcttggaattcatrttctggaggccttggctgggaggcagaatctgtgaattttaaaaacactttcatgaatccaaagcacatgaaggtttaagagtctggtaaaggcaaaatt

SEQ ID NO: 514033 - DNA, 201 bp, Homo sapiens
aaatcatcacaaatgcatagttagtacctgaactgaaggaatatgaataacaaggtgaccacaaggagaatggatggttgatggcttttgttttttctctyctgcttttagatcaccagaaactagaacgtgaggctcggatatgtcgacttctgaaacatccaaacatcggtgagtgcctgggcatggagcattttgtgg

SEQ ID NO: 514034 - DNA, 201 bp, Homo sapiens
ccgggcccactcaccagggaggcgagtcccatgcttgcgggctgagatgggcatgccagacagactacctaacttggcatctgcaagcgcatcgttgttayggagccccctaaccagccatgcatgctgggcgcttgccaactttcagggggcagtagcctgggggcatggagctgggcagcgggagccttgccaagagcc

SEQ ID NO: 514035 - DNA, 201 bp, Homo sapiens
gggaggtggtcctgggagaggaggtgtgggccgtcccagaggactggcaaagcctggcagaatggttgcaataagttatgcttggaaatcagacagactasggtctggctccgtgactccaaattggatgacctcagacaggttacttcccctccctaaactgtttccttagctgtcaaagaaaggcagagagtggtgcct

SEQ ID NO: 514036 - DNA, 201 bp, Homo sapiens
caggttacttcccctccctaaactgtttccttagctgtcaaagaaaggcagagagtggtgcctacctcatttaatcattgtgaggattaagtaagatactrtaagtaaagcacttagttagtgcttagcaaatgggaggcagttttgtatttaagcattagcttcacccactttccccaccttctcaggccgacttggcca

SEQ ID NO: 514037 - DNA, 201 bp, Homo sapiens
ggtcagatctcggagggctgcagggtgcagctgggggacaaaggttgtgaaactcagagaaaggaattagggctgggcagtaggatgccataaatatattwggagccaggacacatgccctggggaagacatgggctttggccaataatgacacgggtttctctgggataagagacataatagatgtcccaaatgcttaga

SEQ ID NO: 514038 - DNA, 201 bp, Homo sapiens; identical to SEQ ID NO: 259768

SEQ ID NO: 514039 - DNA, 201 bp, Homo sapiens
ctggcctgttcctttcttggtccccatagaactgactgctttgtgtgccgccctgtatgccccttccccttcattgtcccgcctggccgcgctccatcccrcatggcagaagtgctgctcctgctcctgctcctttcgctggtggggggaagagtgatcagggctctcagctgaacctcccaggcccagcccaggacccct

SEQ ID NO: 514040 - DNA, 201 bp, Homo sapiens
gccctcactctttcaccctggcactctgcttccaggcctgggtggaagctgtcaaaggcagagtccccagtgccccaggcggctccagtactgagcatggyttctcctctaagtgtcgtgcatccatgccctcctccacgcagaggagatcctgaggtgccaccctgagggctctgacgccactcaagatccccttcttgc

SEQ ID NO: 514041 - DNA, 201 bp, Homo sapiens
gcagtcttattcagatacagcttcctccatccctccttgtcttggcaggtgccttgctctggggcacacatcaaagctgttctctctgctgggtggcctaraaggattagtcttcctttgctgctcctttcttctaattcccttccccggcttcctcccacctgggctctgtgtgtggccttcctggagaagggcagacgc

SEQ ID NO: 514042 - DNA, 201 bp, Homo sapiens
tttttaatagttggaatagtctaagcaagaccaggtgaggtctcagcagagggtaaggatgggggaatgtgcagtgtgttgaaattcaagagatatttgaragaacctaaaggatttaattctctccagttggatttggggggagcaaagaagagagaggccaggtttcaagttgagcggagagttgtaccctcactgacc

SEQ ID NO: 514043 - DNA, 201 bp, Homo sapiens
tgtcctgggtggagggtgatgcctcatggtctagaaatcccaaaggcccggtttgggcaggaactgcactgcctccgaactgcactgcctccgagtgaggagcataaaggccaaggccttggggcctcacttgcgagatcctcccaagtacctgaggcttggagggtcagggcctgtctttcacaccttgaacctacactc

SEQ ID NO: 514044 - DNA, 201 bp, Homo sapiens
gaggctgaggctggcggatcacgaggtcaggagatcgaggccatcctggctaacacggtgaaaccccatctctactaaaaatacaaaaaattagccgggcktggtggcagtgcctgtagtcccagctactcgggtggctgaggcaggagaatgatgtgaacctgggaggcagagcttgcagtgagccaagatcaggccact

SEQ ID NO: 514045 - DNA, 201 bp, Homo sapiens
ctgtcctgggtggagggtgatgcctcatggtctagaaatcccaaaggcccggtttgggcaggaactgcactgcctccgaactgcactgcctccgagtgaggagcataaaggccaaggccttggggcctcacttgcgagatcctcccaagtacctgaggcttggagggtcagggcctgtctttcacaccttgaacctacact

SEQ ID NO: 514046 - DNA, 201 bp, Homo sapiens
tttaaatctaattctaaattatggaccattgtcaatatttgtagcctctttcgttgattataataataatccctgaaaatgccttctaaagaatgctggcygcttgagggcaggagcagtttatcagctgtgtttacctgaaacagccctcagtgtttgctgggcattgttaaatgaatgtgcaaaagttgaacgacagac

SEQ ID NO: 514047 - DNA, 201 bp, Homo sapiens
tagtctgtcctgggtggagggtgatgcctcatggtctagaaatcccaaaggcccggtttgggcaggaactgcactgcctccgaactgcactgcctccgagtgaggagcataaaggccaaggccttggggcctcacttgcgagatcctcccaagtacctgaggcttggagggtcagggcctgtctttcacaccttgaaccta

SEQ ID NO: 514048 - DNA, 201 bp, Homo sapiens
gatgtagtctgtcctgggtggagggtgatgcctcatggtctagaaatcccaaaggcccggtttgggcaggaactgcactgcctccgaactgcactgcctccgagtgaggagcataaaggccaaggccttggggcctcacttgcgagatcctcccaagtacctgaggcttggagggtcagggcctgtctttcacaccttgaa

SEQ ID NO: 514049 - DNA, 201 bp, Homo sapiens
aaccttcctgaaagcagtaacactttagttgggtaaagggataaggagatatacacacacacacacacacacacacacacacacacccccactacttatatatatgaatataagggaactccttctttttgagggatgattttcgaagtaaaatatcatatttgagcatatttaaaaggccactgtaaggctgtgtgcggt

SEQ ID NO: 514050 - DNA, 201 bp, Homo sapiens
ctggtaaaggcaaaattttggggttatgtgttaagaaagggctggaacaagagtcggcaaaggaaacagaggaaggacagagaggtagggggaaaagagamatgtgcagcagctgcagctcttccaggaaccctgaggatgagggctgggcagacacatcattaggtaaaggctttaaatgaggacgtgcgtggggaacct

SEQ ID NO: 514051 - DNA, 201 bp, Homo sapiens
agatgtagtctgtcctgggtggagggtgatgcctcatggtctagaaatcccaaaggcccggtttgggcaggaactgcactgcctccgaactgcactgcctccgagtgaggagcataaaggccaaggccttggggcctcacttgcgagatcctcccaagtacctgaggcttggagggtcagggcctgtctttcacaccttga

SEQ ID NO: 514052 - DNA, 201 bp, Homo sapiens; identical to SEQ ID NO: 259773

SEQ ID NO: 514053 - DNA, 201 bp, Homo sapiens
gcagatgtagtctgtcctgggtggagggtgatgcctcatggtctagaaatcccaaaggcccggtttgggcaggaactgcactgcctccgaactgcactgcctccgagtgaggagcataaaggccaaggccttggggcctcacttgcgagatcctcccaagtacctgaggcttggagggtcagggcctgtctttcacacctt

SEQ ID NO: 514054 - DNA, 201 bp, Homo sapiens
tacccacgacgggcatactgtggtgtggctccacctctcgcagatgggaacagggaagcgtggctggctgcctccggtggagttgcaactgtagtcccacrcttgcttcttgtgctttaatgacgcagcttctactttttgggtctacgagcctttccagaggacattgaagggcgtttcggtgttgcccctagagcgaag

SEQ ID NO: 514055 - DNA, 201 bp, Homo sapiens
cagcagatgtagtctgtcctgggtggagggtgatgcctcatggtctagaaatcccaaaggcccggtttgggcaggaactgcactgcctccgaactgcactgcctccgagtgaggagcataaaggccaaggccttggggcctcacttgcgagatcctcccaagtacctgaggcttggagggtcagggcctgtctttcacacc

SEQ ID NO: 514056 - DNA, 201 bp, Homo sapiens
agcagcagatgtagtctgtcctgggtggagggtgatgcctcatggtctagaaatcccaaaggcccggtttgggcaggaactgcactgcctccgaactgcactgcctccgagtgaggagcataaaggccaaggccttggggcctcacttgcgagatcctcccaagtacctgaggcttggagggtcagggcctgtctttcaca

SEQ ID NO: 514057 - DNA, 201 bp, Homo sapiens
cagcagcagatgtagtctgtcctgggtggagggtgatgcctcatggtctagaaatcccaaaggcccggtttgggcaggaactgcactgcctccgaactgcactgcctccgagtgaggagcataaaggccaaggccttggggcctcacttgcgagatcctcccaagtacctgaggcttggagggtcagggcctgtctttcac

SEQ ID NO: 514058 - DNA, 201 bp, Homo sapiens
gcagcagcagatgtagtctgtcctgggtggagggtgatgcctcatggtctagaaatcccaaaggcccggtttgggcaggaactgcactgcctccgaactgcactgcctccgagtgaggagcataaaggccaaggccttggggcctcacttgcgagatcctcccaagtacctgaggcttggagggtcagggcctgtctttca

SEQ ID NO: 514059 - DNA, 201 bp, Homo sapiens
ctgcaggtgccaggatttgtttttctgacaggctggtgaagacagcaacagcaaggggagagggcaagcaacctgaaacaggcacccaagaatgggggaartattctgttctggggtcatttttgcaggccctaccctctgcagtcccgtgtgtctcgagcccctgaggacatcactatattctgaaattacataatgatg

SEQ ID NO: 514060 - DNA, 201 bp, Homo sapiens
acacaggttctggaatagccgcagggcttctccaactctgccagtcacagctttaggtaccacagagtatcccaattacaggagttgagttgaagacagarccagtgttgcagggtatgaagctcaccaataccacattcttctccctattcctgctccttagttcccatcaccagaatgggacacggtaactcctgaagc

SEQ ID NO: 514061 - DNA, 201 bp, Homo sapiens
gtgcccccagagctaggtctctgggccccacaaatacttcctctgatcatctctctagccatcgctcccatctacacagcgttatggaggccacctcaggsctacctcctccaggccagaccagggggcaagggaggtctgggagttgaacctgagtggccttggggactctggaggaactaaaccatctgttttcttgtc

SEQ ID NO: 514062 - DNA, 201 bp, Homo sapiens
ctgatcatctctctagccatcgctcccatctacacagcgttatggaggccacctcaggcctacctcctccaggccagaccagggggcaagggaggtctggragttgaacctgagtggccttggggactctggaggaactaaaccatctgttttcttgtctcagccacagagcaacaacaaaaacagtctcgtaagcccagc

SEQ ID NO: 514063 - DNA, 201 bp, Homo sapiens
ccgcgcccttgcagacggccatggtacctcctgactacagcttctccgcctctgaccctggctgcctcctgccccttccctcttcctcctcttgtgccccmtccctggcctcctggcctgttcctttcttggtccccatagaactgactgctttgtgtgccgccctgtatgccccttccccttcattgtcccgcctggccg

SEQ ID NO: 514064 - DNA, 201 bp, Homo sapiens
aggggctgctgctgctgctgagtcctgctcctgagattcagggggctggactcacatttgtgaattgtttcctagaacttcccaaggagtagcctgcccarcttgctatgtaccttgtttctctggattcttatttaactctctgaagactctcagcactttacagattttagccattctaggatcttggaggatgtgctg

SEQ ID NO: 514065 - DNA, 201 bp, Homo sapiens
ctgtgaatagtcattgtactccagcctgggaaagatggtcagaccccacctctttaaaaaaaaaaaaaaaaaaagaagggaattgaaaatttttaaaagamaagggctggagacagagagctcaggaagcttttttaatagttggaatagtctaagcaagaccaggtgaggtctcagcagagggtaaggatgggggaatgt

SEQ ID NO: 514066 - DNA, 201 bp, Homo sapiens
tcccagctactcgggaggccaagacaggagaacctgagaggcggaggctacggtgagccgagattgcaccactgcactccagcctgactgacaaagcgagwctccattgcaaaaaaaaaaaaaaattacatccagaatgatgaaaagaattgatgcttcaaggtgacgatccttagcttctgggatcatggcttcattcag

SEQ ID NO: 514067 - DNA, 201 bp, Homo sapiens
agagtaggaatgtgcatcctttcccacgtacagaggattgtatgtttacgtggcagcaggatcttatttgaagctagtgctggcatttgtgttttttttttaggaaaatgtcactaagtcaagcaggcccatccctgagagggccatggagaatctgtggccagccctccctggccccctgacctggcagaggaaggaaag

SEQ ID NO: 514068 - DNA, 201 bp, Homo sapiens
gtgcagcagcagatgtagtctgtcctgggtggagggtgatgcctcatggtctagaaatcccaaaggcccggtttgggcaggaactgcactgcctccgaactgcactgcctccgagtgaggagcataaaggccaaggccttggggcctcacttgcgagatcctcccaagtacctgaggcttggagggtcagggcctgtcttt

SEQ ID NO: 514069 - DNA, 201 bp, Homo sapiens
ggtgcagcagcagatgtagtctgtcctgggtggagggtgatgcctcatggtctagaaatcccaaaggcccggtttgggcaggaactgcactgcctccgaactgcactgcctccgagtgaggagcataaaggccaaggccttggggcctcacttgcgagatcctcccaagtacctgaggcttggagggtcagggcctgtctt

SEQ ID NO: 514070 - DNA, 201 bp, Homo sapiens
tggtgcagcagcagatgtagtctgtcctgggtggagggtgatgcctcatggtctagaaatcccaaaggcccggtttgggcaggaactgcactgcctccgaactgcactgcctccgagtgaggagcataaaggccaaggccttggggcctcacttgcgagatcctcccaagtacctgaggcttggagggtcagggcctgtct

SEQ ID NO: 514071 - DNA, 201 bp, Homo sapiens
tttccccttctccctccaggggtgctttctctgtggtccgcaggtgtgtgaagaaaacctccacgcaggagtacgcagcaaaaatcatcaataccaagaarttgtctgcccggggtgagtgttccctgtcttgacctcttcctgagggtgcctccaggggccatggtttcttttgaggaagccccaggaattgggggttgt

SEQ ID NO: 514072 - DNA, 201 bp, Homo sapiens
gctgtgggggggtttgagcctcactttgccccatggttgagggagatttctctttcaggggatgataccctctttttaatctttccttccccgaccttcarctgttcctgctgagagaagggcagggtctctctgctcccttctgccctggttctcttggccgggaccgcagggctgtctgagatgcagcaggtgtgtgtt

SEQ ID NO: 514073 - DNA, 201 bp, Homo sapiens
aatagactctgtcttccttcgtgctgagctgccccagcagtttcgatcatagtctagcattgtggtttagagcagcacttctcaaacttttatgtgcttawgactcacgcagggatcatgttaaaattcagattctgattcagggggtctggggtaggacctgagtctccagctgatgctcatgctactggtccgcatgcc

SEQ ID NO: 514074 - DNA, 201 bp, Homo sapiens
gcgcagtggggactgacatgttgcctttggtaggagagggcccacagagggaaacacctagaacagcagtcacagattaggcatgttttgcttggctgacycagtggtctaaaaatatttttattatttgccaatatttaaaaatgagatttcacattttgaaaaaagaaaaaatctattcccccgcctttccagtcagaa

SEQ ID NO: 514075 - DNA, 201 bp, Homo sapiens
gcggtaagcccattccacgctctcagcttttcgctgttaagggccctcaacttccgatgatggcaagaaagaggcatcgctattccttgcaggtcacacaygtgcctggtgtatgtgaaattatggtgtttgcccctgggatggctgttcccatcacaccctcctccctgcgtacttctgggatgacattgtatccttctt

SEQ ID NO: 514076 - DNA, 201 bp, Homo sapiens
ttttagccactgtatacatcagattctggagagtgttaaccacatccaccagcatgacatcgtccacagggacctgaaggtactacccaggctcccctccktgcctctgctcatgaagtgttggcgccacctggtgccagatagtggtactgcgtaggcccaaactaggcttcctctgggctgcagggtgggtgctcacaa

SEQ ID NO: 514077 - DNA, 201 bp, Homo sapiens
cccggctgggccgtggtggtgctgttctaacgcttgcagttgtcttgcagccttttgctcctgtgaggaaagggttgtggcctggccccgcccagggctcrggttaggatgagcccaagctcaacccaagctctcccttaccctggtggcagcccctgctggtagtggcattccctataagagaagcccatgccggcagga

SEQ ID NO: 514078 - DNA, 201 bp, Homo sapiens
gaagaagggtttcactacctcgtgtttgacctgtaagtgccactttctgagggtgtgggggcctttccctctagctgactcaaaatgaaggctcaggaagrggcctaaacaggctctccagcctccgcccagggccccctcctttgtccgagggaaaggatttgactggggcagattgctgcccccaccaagggggtctcc

SEQ ID NO: 514079 - DNA, 201 bp, Homo sapiens
gggagtagaaagcccccaggatgtgcagtgggccttgcctcagcgctgagccaggaagaagggcagagtcggaagtcaggtctgtgggggtgggagtgggrtgatggggaaatcgtgacagcgaggaactgtgttggggatgtagtgcttcctgagtctcagcataacagtattaagagcatggggtcagaggcaagatag

SEQ ID NO: 514080 - DNA, 201 bp, Homo sapiens; identical to SEQ ID NO: 259769

SEQ ID NO: 514081 - DNA, 201 bp, Homo sapiens; identical to SEQ ID NO: 259770

SEQ ID NO: 514082 - DNA, 201 bp, Homo sapiens
tcaggtgtggattttgcaatgacctggcacctggcataagcagagatttctggagggatgctttaaaacaaggctttgggctggtcccaccttgagggtgyccccagagctaggtctctgggccccacaaatacttcctctgatcatctctctagccatcgctcccatctacacagcgttatggaggccacctcaggccta

SEQ ID NO: 514083 - DNA, 201 bp, Homo sapiens
gtgccctcagctgggaggcctctctggcagaggcggcggcgtgggatgtcgtccagtgtccacagcagcctgaggcgaggcgtccccttgccccggctctrcagcgccatgggctcggggcctgtctggcttgctcgctcacctgccttgttctgtttgttttggctgctctgccttgccctgccctgccctgccctggct

SEQ ID NO: 514084 - DNA, 201 bp, Homo sapiens
tgctagtggtggctaactagagagtcagcaggggggtgactgggaaagagggagaggtgatgttgcctgctactcccctccttgcggaccctcataccacrtgacgtggcggcgtggggccaggaactagggaaggcagaaggcgggcgcagtgggcagctctctgggctcagcttgctgagggggcctcctgtcctggct

SEQ ID NO: 514085 - DNA, 201 bp, Homo sapiens
tgacagagtgaggctctgtttaaaaaaaaaaaaaaaagagagagaagaaaaaaaagattggagacaatttgaaaagccagtaaggagccagacacagtggygcgtacctatagtcccagctactcaggaggctgtcgcaggacagaattgcttgagcccaggaattcgaggccagctgggcaacatagtgagacccccaac

SEQ ID NO: 514086 - DNA, 201 bp, Homo sapiens
tggtgatttgcgagatcggaagttgtggctagaatcttcctgactatggaggaaggcagacgtcttgtatagggggtggggtgtacattctggacagttcrtggaaaataaggggataagaagctgaatcatcaccccctcccatctttctctctgctctatgagaccctccccttccttatttttatctcttcccacttt

SEQ ID NO: 514087 - DNA, 201 bp, Homo sapiens
atgccactgcactcctgcctgagggacaaagtgagaccctaaaatgaaaggaaaacaagttgtctccaggattgccatgacttgctgcattacttcagcaratcatcacaaatgcatagttagtacctgaactgaaggaatatgaataacaaggtgaccacaaggagaatggatggttgatggcttttgttttttctcttc

SEQ ID NO: 514088 - DNA, 201 bp, Homo sapiens
gtgaggccgcctcccatggagccctgaaatcagtggggttgcaggaagtttctcacatccatgtttagggtcataggcacagacctgcaaaataccctttrcaaagttaagaatgtctttgagattggaacttgggagagtcctcagtcagagtaggaatgtgcatcctttcccacgtacagaggattgtatgtttacgtg

SEQ ID NO: 514089 - DNA, 201 bp, Homo sapiens
atgtgaatttcttctagtccataatccctacattatctcacactgacagtcctgagtttgaatcccccttttatccctttcctgctgtgggatcttgggcragttacttaacttccctgggcctccgtttcttccatcatctggaaatgtggacaatcatagcatttacctaatgggatcattgtgagggctgtgggaaga

SEQ ID NO: 514090 - DNA, 201 bp, Homo sapiens
gctgtgctggcccggctgggccgtggtggtgctgttctaacgcttgcagttgtcttgcagccttttgctcctgtgaggaaagggttgtggcctggccccgsccagggctcgggttaggatgagcccaagctcaacccaagctctcccttaccctggtggcagcccctgctggtagtggcattccctataagagaagcccat

SEQ ID NO: 514091 - DNA, 201 bp, Homo sapiens
acatttggtcatgtcctggtgggcccgtaaggaccactagcctaagcttgggcctggctagagtgccagggcggtgggagggcatggcaggctggaccccygggaatctctgtcctgctctttgattgggcctcctggaattgctccctttgcctgaattcagtaagtgaccttgggccaggacatcagaaaagacagagg

SEQ ID NO: 514092 - DNA, 201 bp, Homo sapiens
ttggaactaatctgacaaccgtgaggccacatttggtcatgtcctggtgggcccgtaaggaccactagcctaagcttgggcctggctagagtgccagggcrgtgggagggcatggcaggctggacccccgggaatctctgtcctgctctttgattgggcctcctggaattgctccctttgcctgaattcagtaagtgacct

SEQ ID NO: 514093 - DNA, 201 bp, Homo sapiens
ggaggtggaggttgcagtgagctgagattgcaccactgcactccagcctgggtgacagagcgagactctgtctcaagaaaaaaaaaaaaaaaaaaatatawataatatatatatatatatatatataaatataaaacccagatagtcctgggaacactgggatgagttggtcactctagtcctaagattttggcctgaatg

SEQ ID NO: 514094 - DNA, 201 bp, Homo sapiens
cgggaggtggaggttgcagtgagctgagattgcaccactgcactccagcctgggtgacagagcgagactctgtctcaagaaaaaaaaaaaaaaaaaaatawatataatatatatatatatatatatataaatataaaacccagatagtcctgggaacactgggatgagttggtcactctagtcctaagattttggcctgaa

SEQ ID NO: 514095 - DNA, 201 bp, Homo sapiens
ctgactattagtgaatctgtgcattttggaaaaagaaatgtccggaaggaagggacggcccatgatacctcaaggagaatccgggtgtcactgaaggatcragtgtgttctgagctctcagatgaaatgcatggggagttgggatttctctgaaagccattctacagggtgaccctgtttcttcttggacattggggttgg

SEQ ID NO: 514096 - DNA, 201 bp, Homo sapiens
tctagctgactcaaaatgaaggctcaggaaggggcctaaacaggctctccagcctccgcccagggccccctcctttgtccgagggaaaggatttgactggrgcagattgctgcccccaccaagggggtctccatgttcccccagcgtccccccagggctctgaaccccaggacagcattcctctcgcacttctgttcagca

SEQ ID NO: 514097 - DNA, 201 bp, Homo sapiens
acttccccccactgctccttctggagagccctgtgagcccgacaggatggggcaggggtggggctgctgaggagaagcctaggatttccaagttttctctstgttaatctctgtccccatctcctctcttgcagtgcgcctccatgacagtatttctgaagaagggtttcactacctcgtgtttgacctgtaagtgccact

SEQ ID NO: 514098 - DNA, 201 bp, Homo sapiens
ctacaattccacgggcttctgtcgtgttggcagttgttctgggacctgtttagcagggccgtgtccactccctgactggggactctctctccatccctctrgtagggcactaattgctgactcccatccagctccatctcttgctgttcgtgtacattgcctataaagttggacttgtttgttttctttctctctgggtac

SEQ ID NO: 514099 - DNA, 201 bp, Homo sapiens
cttccatggcacctagggatggagccctcactctttcaccctggcactctgcttccaggcctgggtggaagctgtcaaaggcagagtccccagtgccccasgcggctccagtactgagcatggtttctcctctaagtgtcgtgcatccatgccctcctccacgcagaggagatcctgaggtgccaccctgagggctctgac

SEQ ID NO: 514100 - DNA, 201 bp, Homo sapiens
cctactttatcccattttatagataaagaaattgaggctcagagaggttaagtaactcaccaaaggtcacacagctggcaagtggtggaaccaagatacaracccagggcaggcagtccaggtgtatcagacagttgggctgattccatctccctgtgcctcccagactctcctccccactgtctgctaccttcctgtggc

SEQ ID NO: 514101 - DNA, 201 bp, Homo sapiens
tgcacccaaagtgggtgctgacggctgcccactgcctggcccagcggtgagtaccctgccctgcccaccccaggggtccggggaatccatccgacggcgcycattctctgcagggggtgggctctgggagatttaggcccattgtgggacccccgtcccctcccggtgacgacttaggcaggtttaagtgacctgcggctg

SEQ ID NO: 514102 - DNA, 201 bp, Homo sapiens
ggtgacgacttaggcaggtttaagtgacctgcggctgtgggactcctggagaaggtttactccttgcaagaggcactggcagggccagctccttccacacygcagcctgggtcagagcctggctcctttcacggctgagccacagtcctggtgtggacagagtgcattgtgtctgtccattcacctgctgatggacccaac

SEQ ID NO: 514103 - DNA, 201 bp, Homo sapiens; identical to SEQ ID NO: 278952

SEQ ID NO: 514104 - DNA, 201 bp, Homo sapiens
aatgctcaaggatggagggtggagggtgtgcagcggtgggcggggctgtgaccgtcacctcacctcccccacaggaagcgcgtgtggggaggctcggggcyggggccagcacccacactgggtctccacagcggcatggaggcctgcgtgtcttcactgctggtgctggccctgggggccctgtcagtaggtgagtgggag

SEQ ID NO: 514105 - DNA, 201 bp, Homo sapiens
caggaagcgcgtgtggggaggctcggggccggggccagcacccacactgggtctccacagcggcatggaggcctgcgtgtcttcactgctggtgctggccytgggggccctgtcagtaggtgagtgggagccgggatgcaggggggacactgaggcccagcgctctcggtgggtccctggatgggaggggtgggcgcgggc

SEQ ID NO: 514106 - DNA, 201 bp, Homo sapiens
gctcgggaatcgacctggttcccggggatcaggaagccgctaaatgacccatcatggagttgccctacctcaggactggtccgtcatacagagcccagatyaagatggtcaaagtaacaaaaagggacctgccggcttgtgtaactgcaaagtctaggaggaggcctggcttcaggtgcggcttgatccaggtgctcacag

SEQ ID NO: 514107 - DNA, 201 bp, Homo sapiens
tggtcaaagtaacaaaaagggacctgccggcttgtgtaactgcaaagtctaggaggaggcctggcttcaggtgcggcttgatccaggtgctcacaggaggygctgtggagcccatctgtctcccagctctgctgcactaccaggaagcctgtctcacaaggtggaaagattgaccctcctcagtcccatggaaagagggct

SEQ ID NO: 514108 - DNA, 201 bp, Homo sapiens
atcaggaagccgctaaatgacccatcatggagttgccctacctcaggactggtccgtcatacagagcccagatcaagatggtcaaagtaacaaaaagggayctgccggcttgtgtaactgcaaagtctaggaggaggcctggcttcaggtgcggcttgatccaggtgctcacaggaggtgctgtggagcccatctgtctcc

SEQ ID NO: 514109 - DNA, 201 bp, Homo sapiens
agccaggatggtctcgatctcctgacctcgtgatccacctgcctcggcctcccaaagtgctgggattacaggcgtgagccaccgcacccggccttaatttytgtatttttagtacagacggggtttcaccacattggccaggctgatctccaactcctgacctcaggctatctgcccaccttgacctcccaaagtgctggg

SEQ ID NO: 514110 - DNA, 201 bp, Homo sapiens
gggatcaggaagccgctaaatgacccatcatggagttgccctacctcaggactggtccgtcatacagagcccagatcaagatggtcaaagtaacaaaaagsgacctgccggcttgtgtaactgcaaagtctaggaggaggcctggcttcaggtgcggcttgatccaggtgctcacaggaggtgctgtggagcccatctgtc

SEQ ID NO: 514111 - DNA, 201 bp, Homo sapiens
gaggtgggttgcaaagacacagggaaggactggccaagccaaggcctgtgaggggcagcggctgtgagtgatggccatggacaacgggcacagtgggggcygggactgcatgtggcgggtcgtccacgccgggccaggccgcagcaccctgattccctctgtccccaggatggcccagctgaggctggtgctggggctcca

SEQ ID NO: 514112 - DNA, 201 bp, Homo sapiens
gcctgccaccatgccgggctaattttgtatttttagtagagacagggtttccccgtgttggtcaggctggtctcaaactcccaacctcaggtgatccgccygcctcggcctcccaaagcgctgggattacaggcgtgagccaccgcgcccggcctattttttttttttaagatggagttctgctattcttgcccaggctgg

SEQ ID NO: 514113 - DNA, 201 bp, Homo sapiens
ccgggaagcggcagagctgtgacttctgctccagccaagacggtccggcgggggaagaaggagcagggttcacagggccagcgggagatggggaggggacrcgcgtgggccgggagcagcccctgtgtctccttgagcctggggataacaggcctggccctgctcccctcggcgggccctgctcccctcgtcccctcagca

SEQ ID NO: 514114 - DNA, 201 bp, Homo sapiens
cgtgggccgggagcagcccctgtgtctccttgagcctggggataacaggcctggccctgctcccctcggcgggccctgctcccctcgtcccctcagcaggygcagaggctgagctgcggtgtgtcgtccctgcagggtgactcgggcgggcccctggtgtgtggcaaaggccgggtgttggccggagtcctgtccttcagc

SEQ ID NO: 514115 - DNA, 201 bp, Homo sapiens
ctcgtcccctcagcaggcgcagaggctgagctgcggtgtgtcgtccctgcagggtgactcgggcgggcccctggtgtgtggcaaaggccgggtgttggccrgagtcctgtccttcagctccagggtctgcactgacatcttcaagcctcccgtggccaccgctgtggcgccttacgtgtcctggatcaggaaggtcaccgg

SEQ ID NO: 514116 - DNA, 201 bp, Homo sapiens
tctgctataaggaaggagggtcaggtgggggtgtttgccacctgtggccaggaggtcgaagccggccttcgagagtggctcgggaatcgacctggttcccsgggatcaggaagccgctaaatgacccatcatggagttgccctacctcaggactggtccgtcatacagagcccagatcaagatggtcaaagtaacaaaaag

SEQ ID NO: 514117 - DNA, 201 bp, Homo sapiens
tgtgacttctgctccagccaagacggtccggcgggggaagaaggagcagggttcacagggccagcgggagatggggaggggacgcgcgtgggccgggagcrgcccctgtgtctccttgagcctggggataacaggcctggccctgctcccctcggcgggccctgctcccctcgtcccctcagcaggcgcagaggctgagct

SEQ ID NO: 514118 - DNA, 201 bp, Homo sapiens
atcctgggtgtaagagcggagattcatccttgtttggagggggactgaggcctggggcatcccgagctcctcacgcttcaccccgagtggacatcccgggrccgtgggagagtgtggtgtccaccggctcacctcgcccatcctcccggcagcagccagaaggcaggggtcacgctcacacccgaggtgcagagtaggaga

SEQ ID NO: 514119 - DNA, 201 bp, Homo sapiens
caggggtccggggaatccatccgacggcgctcattctctgcagggggtgggctctgggagatttaggcccattgtgggacccccgtcccctcccggtgacracttaggcaggtttaagtgacctgcggctgtgggactcctggagaaggtttactccttgcaagaggcactggcagggccagctccttccacaccgcagcc

SEQ ID NO: 514120 - DNA, 201 bp, Homo sapiens
ccaccccaggggtccggggaatccatccgacggcgctcattctctgcagggggtgggctctgggagatttaggcccattgtgggacccccgtcccctcccrgtgacgacttaggcaggtttaagtgacctgcggctgtgggactcctggagaaggtttactccttgcaagaggcactggcagggccagctccttccacacc

SEQ ID NO: 514121 - DNA, 201 bp, Homo sapiens
tgggtccctggatgggaggggtgggcgcgggcgccgacatcctgggtgtaagagcggagattcatccttgtttggagggggactgaggcctggggcatccsgagctcctcacgcttcaccccgagtggacatcccgggaccgtgggagagtgtggtgtccaccggctcacctcgcccatcctcccggcagcagccagaagg

SEQ ID NO: 514122 - DNA, 201 bp, Homo sapiens
cacacgtatcagcctaaaagtttcggggaacactggggacttcattaggatggcacatctgcttggggtcctgggcctctgagctgggcaaggacagtcgyggcaggcagcaggggcatgtagccccaacctggctctttgtcccccatcctggcaggcagctcctttgggacccagatcatcgggggccgggaggtgatc

SEQ ID NO: 514123 - DNA, 201 bp, Homo sapiens
ggccagcacccacactgggtctccacagcggcatggaggcctgcgtgtcttcactgctggtgctggccctgggggccctgtcagtaggtgagtgggagccrggatgcaggggggacactgaggcccagcgctctcggtgggtccctggatgggaggggtgggcgcgggcgccgacatcctgggtgtaagagcggagattca

SEQ ID NO: 514124 - DNA, 201 bp, Homo sapiens
tgtcctggtgcacccaaagtgggtgctgacggctgcccactgcctggcccagcggtgagtaccctgccctgcccaccccaggggtccggggaatccatccracggcgctcattctctgcagggggtgggctctgggagatttaggcccattgtgggacccccgtcccctcccggtgacgacttaggcaggtttaagtgacc

SEQ ID NO: 514125 - DNA, 201 bp, Homo sapiens
cgctgggggctacacctgcatcgccaccaaccctgctggtgaggccacagcccgagtagaactgcgggtgctggccttgccccatggtgggaacagcagtsccgaggggggccgccccgggccctcggacatcgccgcctccgctcgcactgctgccgagggtgaggggacgctggagtctgagccagccgtgcaggtgac

SEQ ID NO: 514126 - DNA, 201 bp, Homo sapiens
aactcctcccgagcccgggctttccccaacgggaccttagagattggggtgaccggcgctggggacgctgggggctacacctgcatcgccaccaaccctgytggtgaggccacagcccgagtagaactgcgggtgctggccttgccccatggtgggaacagcagtgccgaggggggccgccccgggccctcggacatcgcc

SEQ ID NO: 514127 - DNA, 201 bp, Homo sapiens
gaccccgcgcctaccatgcactgggtcggtcctgacgaccggttggttggcaactcctcccgagcccgggctttccccaacgggaccttagagattggggygaccggcgctggggacgctgggggctacacctgcatcgccaccaaccctgctggtgaggccacagcccgagtagaactgcgggtgctggccttgccccat

SEQ ID NO: 514128 - DNA, 201 bp, Homo sapiens
agagattggggtgaccggcgctggggacgctgggggctacacctgcatcgccaccaaccctgctggtgaggccacagcccgagtagaactgcgggtgctgsccttgccccatggtgggaacagcagtgccgaggggggccgccccgggccctcggacatcgccgcctccgctcgcactgctgccgagggtgaggggacgct

SEQ ID NO: 514129 - DNA, 201 bp, Homo sapiens
ggggggccggaaatggccgcctccccctcaagctcagccacgtccagtcccagaccaatggaggccccagccccacacccaaggcccacccgccgcggagycccccgccccggccgcagcgcagctgctctctggacctgggagatgccgggtgctacggttatgccaggcgcctgggaggagcttgggcccgacggagcc

SEQ ID NO: 514130 - DNA, 201 bp, Homo sapiens
aagtctatccttggacaaaactacttatgctctgaagcctgaggtatatctgtgctgtttcctctttaccatgtggccccaccaacagctgacctctccarccatgaattgacccattcctggtgggaaggtgaatgaggcaatgacaaaggtaacaattccaggatacagcaggcggctgaaaaagaaacagagttaacc

SEQ ID NO: 514131 - DNA, 201 bp, Homo sapiens
tgacaacgttgacccgggggtgaatccacacagctgactggcccaggctctcaggatcacccgcgtgtttcacccatgtattgttgtcaaacaaagtactsatggcttcgcggggcatcaactgggagaggaagaagcagaaagggtgggttctccagggaactcctgtgcttccttttttagagaacttattccccagcc

SEQ ID NO: 514132 - DNA, 201 bp, Homo sapiens
agcatcccgggcctttccttatgtttcctgtatcctagattgcaactctcagtcagaccccaggcttcccatcagaacttacctagcacaaacacaggcaygaagcctccgcagggtatgggcatagtggtggccacgatggacatccagaactggagtagaaagaagcgttggaataccctttcaactctgcccaataga

SEQ ID NO: 514133 - DNA, 201 bp, Homo sapiens
tctcaccaattactgcatagcccccaggtaggatcttgtagatgatgtcatcaaacaaaataccatcaggaaagagcatggccatgatttctcctaccagmcttccaaatgcagctcctagagggaagataaaaggaaggaaggtgttacgagatccaagttccttgctctcagttttcagaaccaatctctccttgggca

SEQ ID NO: 514134 - DNA, 201 bp, Homo sapiens
gataacagccaccatcatgggcaggatgtgagcaatctgacccgttaattcgaagcaaatcacagctgtggagactgtgtgggaaacggcaccagtcagcrctgctgctcctagaatgacacaggaatacgcctgtaggttagggctaccgttcttagcatgaaggacatatggggatgggatgggaataacacggaatga

SEQ ID NO: 514135 - DNA, 201 bp, Homo sapiens
aaaagactcaccttgtgcagggttgtctgctccaccagctggaagggagactggtcaatacagcaggaatcaaaacagacaggctggctcagctgctcctrctcccaggcctcaatctgtcagccagaggaggaaagtcacgaaaatcacagagcctcctttcaccccagatacctgattttgaccccaaacggccctcct

SEQ ID NO: 514136 - DNA, 201 bp, Homo sapiens
ttctatttcacatggcctccacccaaggcctccttggttaccagcatccttgttccacactgccagcactcgaaacacaaaggcgctgaacgtggctgcaragaatcctctccagtagttccgaacagcaaagtaggtggaggtgacctcgatgctaaatagcactcctgcaggggcacagaagtgtggttgggggcagcc

SEQ ID NO: 514137 - DNA, 201 bp, Homo sapiens
tattccttctgtccccactgcatccccttatcctatgcccagcctccctcctgctgctcaaatgggacacatcgtgattacctcctccagggccaggacgyccctgagcttccccatgctggtcacgtaagcgaggtggaggccaaggagtgaaaacagggtatgagtctgaggatgaagagcacaggtcagtgcatgttc

SEQ ID NO: 514138 - DNA, 201 bp, Homo sapiens
attcctcagtccccatcaccttgacatttagaatagtgatcctcatccttgctgtccacggtagaactggagcctgtcttcttgggcatccctatgtcctrctccctgtctgagaattgttctttgtgatggccataaatctggacagagagagaatgatcagtgtctgccttgtggaagactaaaaaaataatagacaga

SEQ ID NO: 514139 - DNA, 201 bp, Homo sapiens
attagccaggcatagtggcgtgcgcatgtagtcccagctgctgggaggctgaggtgggagaattgcttgaacccaggagacagaggttgcagtgagccaarattgcgccactgcactccagcctgggccacagagcaaggccctctctcaaaaagaaaaaaataaaattaatcaccaggttgtatcaattttactttctac

SEQ ID NO: 514140 - DNA, 201 bp, Homo sapiens
cagaggtgggcagatcacgaggtcaggagatcaagaccattctggctaacatggtgaaaccctgtctccactaaaaaataaaaaaataaaaaataaaaaawaaattagccaggcatggtggtgggcacctgtagtcccagctacttgggaggctgaggcaggagaatggcgtgaacccgggagttggagcttgcagtgagc

SEQ ID NO: 514141 - DNA, 201 bp, Homo sapiens
ccgggatgctaggcaggtggcccatgcctgtaaccccagcactttgggaggccgaggtgggtagatcacttgaggccgggagtttgagaccagcctggccracaaggaaaaacctcacttctactaaaaaatacaaaaattagccaggcatagtggcgtgcgcatgtagtcccagctgctgggaggctgaggtgggagaat

SEQ ID NO: 514142 - DNA, 201 bp, Homo sapiens
gttctttcccttttcttcccatggtagctatggctcccaatgaaacaatagccatccctccctggccaggaccaccgatgcctccttttcattcatcatcycttccatatgattaaactcctcctccttggtggggtctctgccttcctgatttaagaaccgtgggtttctcactcttcaagggcaggctccctttcccct

SEQ ID NO: 514143 - DNA, 201 bp, Homo sapiens
aagtattcacaattttagagctgtgcgcaattgcactgtaagctaacgagaaatatatttcttaattttcagaaccgtagaaagaaagaactcccctcatccagggctgacctcaggagacagtgacaaagactctaagaaagtctcatcccagaagatctgagatgaggcaaaacacacactccttcatgtcagaatatg

SEQ ID NO: 514144 - DNA, 201 bp, Homo sapiens
ctcctcttccagccctggactctccaccagctccagctcctccaactcgccctctaccttgcctggggccagggagagagggggctctggggaaggagatrgcacaggggtctctggggaggcagcaatcacatcccctgttccagtggccccaggcctgtcctcaggcaggttccagttctctgcagaagatggaggtgc

SEQ ID NO: 514145 - DNA, 201 bp, Homo sapiens
cacatctgacaaagggattgggtggacactcaaagctggccatatcacttccttgtgcacaagtatttcatgactttaattcaccccgacagtatttcccraagtcaggtctgtgagatactacaaatcccatgcccacgagacagggttctgtgggaaatgctgcattagagacacattttggatattcccaatgtgtgt

SEQ ID NO: 514146 - DNA, 201 bp, Homo sapiens
agagcatgggagcagacgacagaccagacctccatgtggggccacaggtgaaagaggggtggacatttggaggacaggcacaggctaaacagaggcatcaygtggccagggtaggcagacagggagacgaggaagggagcgtggattagtgcgatgctgcttcagcaccacagccagcccagagcagaggcagccctccca

SEQ ID NO: 514147 - DNA, 201 bp, Homo sapiens
ttcaggtgacatgttatccactaaatctgtggaatcctagagaagaaagacataggtccaagttctttcccttttcttcccatggtagctatggctcccartgaaacaatagccatccctccctggccaggaccaccgatgcctccttttcattcatcatcccttccatatgattaaactcctcctccttggtggggtctc

SEQ ID NO: 514148 - DNA, 201 bp, Homo sapiens
gtttagggtgttgctagtgtcaggagcagtaccttcatgacgaagaagagaaagatgatgatgacaacgttgacccgggggtgaatccacacagctgactrgcccaggctctcaggatcacccgcgtgtttcacccatgtattgttgtcaaacaaagtactgatggcttcgcggggcatcaactgggagaggaagaagcag

SEQ ID NO: 514149 - DNA, 201 bp, Homo sapiens
ttccagccaaggtcaggcaagtagggtagcttcttgacctggatgatgctgtcatagagagagggctgcaggctctgggccaccatgttggccaagataayagccaccatcatgggcaggatgtgagcaatctgacccgttaattcgaagcaaatcacagctgtggagactgtgtgggaaacggcaccagtcagcgctgct

SEQ ID NO: 514150 - DNA, 201 bp, Homo sapiens
gccacccagctcaggccgagtctggtggcaagttctcaccaacagcctggggagagatgaggtggcagaagagggcgctgaagaggatgaggactagtggsaaggtgacccagaccaggaactgcagaggaaggctgggctgcatctgcgcgtaggaccacttgtaggctgcggagacacatgcctggggttaggcagaac

SEQ ID NO: 514151 - DNA, 201 bp, Homo sapiens
ggggaggcagcaatcacatcccctgttccagtggccccaggcctgtcctcaggcaggttccagttctctgcagaagatggaggtgccccggtactctttcragttgaagtcgtgttccggaagctggcaaggggagggcggagctgcaccccagacttggtgtgcccctcaatggccttctgtagctgaagagcagtggga

SEQ ID NO: 514152 - DNA, 201 bp, Homo sapiens
caagaactccagaaagcagtactaataaatcctgcaccaaacagcaagcagtctcaaaataatacacagccctttgctgaaaaaatataggtatctggacygcaggggctgtgatccacagtcattccctggatgcccactccaaagcttgtggcagccacccaaaacccccttctaagtcttgcttaggcaaccgggata

SEQ ID NO: 514153 - DNA, 201 bp, Homo sapiens
aatacaaaaaattagccaggcgtgatggcgcaggcctgtaatcccagctacttgggagactgaggcatgagaattgcttgaacccaggagacagaggttgyagtgagccaagatggtgccactgcactccagcctgggtgacagagcaagactccatctaaacaaacaaacaaacaaacaaacaaaaaaaacaagtaatgc

SEQ ID NO: 514154 - DNA, 201 bp, Homo sapiens
aaattttcatttataatatgaagatagtgatgtcctatccattccttgcttttaaaagtttggatgattattcactgagcattttattttattattttttwaaattattattattattattattaattattattatttgaggcagagtctcactctgtcacctaggctggagtgcagtggtacaatctcggttcatgggaa

SEQ ID NO: 514155 - DNA, 201 bp, Homo sapiens
tcacagtaaataccatactgaacgatggcaagctgaagtttcctttagtccaccgtagtctcatttctttaaatgaaaaagattctcttcacacaaaaaamcaatatttgaggccgagtgcggtggctcatgcctctaatcccatggggcactttgggaggccaaggtgggcagatcaccttaggtcacaagttcaagacc

SEQ ID NO: 514156 - DNA, 201 bp, Homo sapiens
ccaccctggctcctgagggcccctcccagctctggcttcagtcatgccaggcctacctctttccccacggggatgccactgcccaggcccgcagtcagggygacaaccttggccacaaaggctttcattgtgaggtattccttcaggacaaccccacgaagtattgtcttcatttcggggattccagagcctaaaagcgtt

SEQ ID NO: 514157 - DNA, 201 bp, Homo sapiens
ggaggcgcgccggggagcccctccccagccagccgcgccttcccgtcgtaaggcagctccgacaacttccgcgccatctcttgggctgcgcgcagcctgcrctcaggacacaggtggcgctgcaggagggcctgcagttccgaccgctccaccgagcccagcaggatcattgaatctgagggaaacccacgccctgcctga

SEQ ID NO: 514158 - DNA, 201 bp, Homo sapiens
gtccccactgcactttaccccagctgccattgggccactttttcgagtgagctatgacaataggtttgcctgcctgtccagcctctcaactaggagcaccytgagtgtgcaagatccaacacagggcctggtacagaatgggagcaagatgcttgtcatttcagtagaatgctgaattccatttatttcattagtgtaaga

SEQ ID NO: 514159 - DNA, 201 bp, Homo sapiens
gtggttctgggacactttccctagcagtctgtcactgtatgctccggaatgagagctaattttaatattagcctgagccagacataaaatgtgcagctaaraggaaacaaagcattaaaaacaaaaacagctttcggaagctctctgctcaggttctggaacattgctctcttctcccaccctggattccctctctacctt

SEQ ID NO: 514160 - DNA, 201 bp, Homo sapiens; identical to SEQ ID NO: 111428

SEQ ID NO: 514161 - DNA, 201 bp, Homo sapiens
ctcttctcccaccctggattccctctctaccttctctgctgctcctgtccctctgcccaaccccagcctttgtccttggtctcctgctcctcctactcatrgacacactttctctctcaatttcatgtatgctcatgccatcaactacacctatatgctgctgattagcaaagccatgttcctgagcttcagactcgtcaa

SEQ ID NO: 514162 - DNA, 201 bp, Homo sapiens
cgtaagcgaggtggaggccaaggagtgaaaacagggtatgagtctgaggatgaagagcacaggtcagtgcatgttccttgccccacagctctcctgccttccccacagccctgagcagtcagcaaaagactcaccttgtgcagggttgtctgctccaccagctggaagggagactggtcaatacagcaggaatcaaaacag

SEQ ID NO: 514163 - DNA, 201 bp, Homo sapiens
cagccgcgccttcccgtcgtaaggcagctccgacaacttccgcgccatctcttgggctgcgcgcagcctgcgctcaggacacaggtggcgctgcaggaggrcctgcagttccgaccgctccaccgagcccagcaggatcattgaatctgagggaaacccacgccctgcctgagcgccccctccaagccctctcgcaccacc

SEQ ID NO: 514164 - DNA, 201 bp, Homo sapiens
cccaggagacagaggttgcagtgagccaagatggtgccactgcactccagcctgggtgacagagcaagactccatctaaacaaacaaacaaacaaacaaamaaaaaaaacaagtaatgccacctgcaaatacctttgtcatttaccacataatacaaacagcgtaaacatggcaccttaatttttaagtacttaacaattt

SEQ ID NO: 514165 - DNA, 201 bp, Homo sapiens
cattattttcttcctttttcagttcttcccagtagcaatgcctagcattttccagttgttcactgtctcagggccctgatcaatccagcacagtaatctccaccaggagcagatttctccattttagtttttttttttttttttttttttgaggcaaagtctggatctgttacccaggctggagtgcagtggtgcagtctc

SEQ ID NO: 514166 - DNA, 201 bp, Homo sapiens
agaagtaatgtgaaacacaaataactcccaagactttcttctttctttttctttctttctttctttcccttccttccttcctttttttttcttcttcttcyttttttttttttttttttttgacagagtcttgttctgtcacccaggctggagtgcaatggtgtgtcagctcactgccacctctggctcccgcgttcaagc

SEQ ID NO: 514167 - DNA, 201 bp, Homo sapiens
cgcgccttcccgtcgtaaggcagctccgacaacttccgcgccatctcttgggctgcgcgcagcctgcgctcaggacacaggtggcgctgcaggagggcctrcagttccgaccgctccaccgagcccagcaggatcattgaatctgagggaaacccacgccctgcctgagcgccccctccaagccctctcgcaccaccgcgc

SEQ ID NO: 514168 - DNA, 201 bp, Homo sapiens
attattttcttcctttttcagttcttcccagtagcaatgcctagcattttccagttgttcactgtctcagggccctgatcaatccagcacagtaatctccaccaggagcagatttctccattttagtttttttttttttttttttttttgaggcaaagtctggatctgttacccaggctggagtgcagtggtgcagtctct

SEQ ID NO: 514169 - DNA, 201 bp, Homo sapiens
gggccctgatcaatccagcacagtaatctccaccaggagcagatttctccattttagtttttttttttttttttttttttgaggcaaagtctggatctgtyacccaggctggagtgcagtggtgcagtctctgctcactgcaacccccacctcccgggttcaagtgattttcgtgcctcagcctcccaaatatctgggatt

SEQ ID NO: 514170 - DNA, 201 bp, Homo sapiens
atgagagtcagagccatgggtatgttatctgagtaaaagttgagttaagtagcactaaattaaaaccgtattgtgtagcctagaatgaagatccaatgggrgagtttaagtgtggggatctgaagtactcaatgtttgattacagggaagtgggaatgtttctcaccaattactgcatagcccccaggtaggatcttgtag

SEQ ID NO: 514171 - DNA, 201 bp, Homo sapiens
caggcttcccatcagaacttacctagcacaaacacaggcatgaagcctccgcagggtatgggcatagtggtggccacgatggacatccagaactggagtaraaagaagcgttggaataccctttcaactctgcccaatagacatgcacacacaattcccttcccactatcctcctttctgcagaaatcctgggatagctga

SEQ ID NO: 514172 - DNA, 201 bp, Homo sapiens
ctggatgatgctgtcatagagagagggctgcaggctctgggccaccatgttggccaagataacagccaccatcatgggcaggatgtgagcaatctgacccrttaattcgaagcaaatcacagctgtggagactgtgtgggaaacggcaccagtcagcgctgctgctcctagaatgacacaggaatacgcctgtaggttagg

SEQ ID NO: 514173 - DNA, 201 bp, Homo sapiens
agtttttttttttttttttttttttgaggcaaagtctggatctgttacccaggctggagtgcagtggtgcagtctctgctcactgcaacccccacctcccrggttcaagtgattttcgtgcctcagcctcccaaatatctgggattacaggtgcgtgccaccatgcccggcttatttttgtatttttagtagaaatggagt

SEQ ID NO: 514174 - DNA, 201 bp, Homo sapiens
tacctagcacaaacacaggcatgaagcctccgcagggtatgggcatagtggtggccacgatggacatccagaactggagtagaaagaagcgttggaatacyctttcaactctgcccaatagacatgcacacacaattcccttcccactatcctcctttctgcagaaatcctgggatagctgatccttctgaaagtcacttt

SEQ ID NO: 514175 - DNA, 201 bp, Homo sapiens
atgaaagtgcatgcatatctctctaagtgcatacttaagtgagcccagactttcaaagattttcatattttgaacacatcaccacgtacttgttttttaarttaaaaaaatgtaacactgctccctcttttcacccaattcctcattttcaccagtctctggcaccactgtctcccctcatccatggctcccctctcccct

SEQ ID NO: 514176 - DNA, 201 bp, Homo sapiens
tctggtggcaagttctcaccaacagcctggggagagatgaggtggcagaagagggcgctgaagaggatgaggactagtgggaaggtgacccagaccaggamctgcagaggaaggctgggctgcatctgcgcgtaggaccacttgtaggctgcggagacacatgcctggggttaggcagaacatggctgagcagccgtgtcc

SEQ ID NO: 514177 - DNA, 201 bp, Homo sapiens
caccccattcccagcttttctatttcacatggcctccacccaaggcctccttggttaccagcatccttgttccacactgccagcactcgaaacacaaaggygctgaacgtggctgcaaagaatcctctccagtagttccgaacagcaaagtaggtggaggtgacctcgatgctaaatagcactcctgcaggggcacagaag

SEQ ID NO: 514178 - DNA, 201 bp, Homo sapiens
cctggccaggaccaccgatgcctccttttcattcatcatcccttccatatgattaaactcctcctccttggtggggtctctgccttcctgatttaagaacygtgggtttctcactcttcaagggcaggctccctttcccctgtatccccaaacacatctcctctcacctgggttgttttcttctttgtggggcgagctctg

SEQ ID NO: 514179 - DNA, 201 bp, Homo sapiens
catgatttctcctaccagccttccaaatgcagctcctagagggaagataaaaggaaggaaggtgttacgagatccaagttccttgctctcagttttcagarccaatctctccttgggcattaagaacaaatataaactcccagcatcccgggcctttccttatgtttcctgtatcctagattgcaactctcagtcagaccc

SEQ ID NO: 514180 - DNA, 201 bp, Homo sapiens
tagagaagaaagacataggtccaagttctttcccttttcttcccatggtagctatggctcccaatgaaacaatagccatccctccctggccaggaccaccratgcctccttttcattcatcatcccttccatatgattaaactcctcctccttggtggggtctctgccttcctgatttaagaaccgtgggtttctcactct

SEQ ID NO: 514181 - DNA, 201 bp, Homo sapiens
acataggtccaagttctttcccttttcttcccatggtagctatggctcccaatgaaacaatagccatccctccctggccaggaccaccgatgcctcctttycattcatcatcccttccatatgattaaactcctcctccttggtggggtctctgccttcctgatttaagaaccgtgggtttctcactcttcaagggcaggc

SEQ ID NO: 514182 - DNA, 201 bp, Homo sapiens
attcctcccataagatttgccatactttcagtcactcacaatatctactaggtgcatgagaatataataataatttaaaacagtgtttccaaactttaacyctaagctcagtctcagcctcagaacctcccactctccccatcagatctgaactaattccgtctagtgcccctgacctgagctggttccagccaaggtcag

SEQ ID NO: 514183 - DNA, 201 bp, Homo sapiens
ctcttactatttctcaatggaatgagtagagcttaattcctctggaatcccatgctctcaattataaagcgaaaggggtcatttagatgatttctaaggcscttgtagatctgaaactttataattctataagctccctgaagatagaatctatcttgttaatttttggttgtttctccactaaccaaaatagtcctttgt

SEQ ID NO: 514184 - DNA, 201 bp, Homo sapiens; identical to SEQ ID NO: 111432

SEQ ID NO: 514185 - DNA, 201 bp, Homo sapiens
ccaggaagtatatgtttcttttcctgatacagtatgatgtaacattatcaaggatataatctagtgagaaattaataattgtggcatacaggtgagtcctstatatcatctaagtaggtttctcaaaataagcttgaatttgcgaagtggaatccagacatatacttgggaatctggagagctgggatgaggtttggcaga

SEQ ID NO: 514186 - DNA, 201 bp, Homo sapiens
cagacctccatgtggggccacaggtgaaagaggggtggacatttggaggacaggcacaggctaaacagaggcatcacgtggccagggtaggcagacagggrgacgaggaagggagcgtggattagtgcgatgctgcttcagcaccacagccagcccagagcagaggcagccctcccaacaccctggacacacagccggact

SEQ ID NO: 514187 - DNA, 201 bp, Homo sapiens
aagttttttgaatttttggtagagatggggtttcgctatgttggctatgttggtctccaactcctggcatcaagtgatccacctgcctcagcctgccaaaktggtgggattacaggtgtgagccaccatgcctggccaactctatggttttcaaatgacttatttttaggttggatgaagaccaaatgaagttctacccct

SEQ ID NO: 514188 - DNA, 201 bp, Homo sapiens
aactagctggttttctctctttggtgcattaaattaaaaaaaagaaaaaaagcaaaacttattgttattggttttagcaacctaacaaagtactccttaaytgcaattatggcctttctgattcctgcttgtgggcagaaggaatagttcttcctttccctctgtgatcatcgatttgactttttcacaagtcatttatca

SEQ ID NO: 514189 - DNA, 201 bp, Homo sapiens
acaaccccacgaagtattgtcttcatttcggggattccagagcctaaaagcgttgaaagattatgtgcagggtcaaggtgaaggtgaaaagggagatgaaygtccagaatatgggaatgggaattggagagggctgaagaggcagtggtggggaggatggggcaaggcagcacagggctgtgggtggggctggatgatggg

SEQ ID NO: 514190 - DNA, 201 bp, Homo sapiens
ttggcctcccaaagtgctggaattacaggcatgagccaccatgcccggcctcccattttagttttgatgttcttcttctatgttgctgttttagtgccagyctcctggtgccattttacctccattaaagctttgcctgatccagaaagcccataatctctaaaagatctggggctcatcttagcaccatggccccattta

SEQ ID NO: 514191 - DNA, 201 bp, Homo sapiens
gcccagcccagcccagcccagacgacgcttttccctttgctcctgatctatcccactccctagcccttcccggcgcggtcacctcgctcttgccagagagrtcttcgtcctcatcctcatccacaaaggcgaaggactcgggccggcctggaggcgcgccggggagcccctccccagccagccgcgccttcccgtcgtaag

SEQ ID NO: 514192 - DNA, 201 bp, Homo sapiens
gttccgaccgctccaccgagcccagcaggatcattgaatctgagggaaacccacgccctgcctgagcgccccctccaagccctctcgcaccaccgcgctcygcactcctgagaaggaacaggagaggcgccaccctgcccggcgtccccacatctttctcagcttcctggaaactcattttaagaatcctccaagattaac

SEQ ID NO: 514193 - DNA, 201 bp, Homo sapiens
aagtatatgtttcttttcctgatacagtatgatgtaacattatcaaggatataatctagtgagaaattaataattgtggcatacaggtgagtcctctataycatctaagtaggtttctcaaaataagcttgaatttgcgaagtggaatccagacatatacttgggaatctggagagctgggatgaggtttggcagaaatgt

SEQ ID NO: 514194 - DNA, 201 bp, Homo sapiens
ccatcctttttgcatttttgtgctttgtgttggtgattttgctgctaaaaatgaccaccaaatataatgtcaaagtgctgtttacttttcctagtgcaagmaggctgtgatgagccttattgagaaaatatgtgtgttaagtaagcttaattcaggcaagggttatagtgctgttggcacaagttcaatattaattaatcc

SEQ ID NO: 514195 - DNA, 201 bp, Homo sapiens
tagtctatttagtgccatcctttttgcatttttgtgctttgtgttggtgattttgctgctaaaaatgaccaccaaatataatgtcaaagtgctgtttactkttcctagtgcaagaaggctgtgatgagccttattgagaaaatatgtgtgttaagtaagcttaattcaggcaagggttatagtgctgttggcacaagttca

SEQ ID NO: 514196 - DNA, 201 bp, Homo sapiens
ccagaaacacacatacaacaaggtcatatattgattggttgatggaaatgtgaccagagactcacaggaacacagccctgtatttttcctaggagcaattrttcagtatagtatttgaacttcatacttaattgaacataactaccatgaattatgagaattgactgtatttagtgggaaatttttttttttttaacagag

SEQ ID NO: 514197 - DNA, 201 bp, Homo sapiens
agagcatggccatgatttctcctaccagccttccaaatgcagctcctagagggaagataaaaggaaggaaggtgttacgagatccaagttccttgctctcwgttttcagaaccaatctctccttgggcattaagaacaaatataaactcccagcatcccgggcctttccttatgtttcctgtatcctagattgcaactctc

SEQ ID NO: 514198 - DNA, 201 bp, Homo sapiens
agtgaagcagggactggaagatggagggtctttgacctgagaggacaggtgagtggatggaaatggacacaaagcaacaggaaacggccaggggccccacscagtgcctaacatttgcctccaaagagctgcacttcccaggtacctcaccctctcttctaccctcctaaatcaccctctgctcccactccctgggacagt

SEQ ID NO: 514199 - DNA, 201 bp, Homo sapiens
agctcaggccgagtctggtggcaagttctcaccaacagcctggggagagatgaggtggcagaagagggcgctgaagaggatgaggactagtgggaaggtgmcccagaccaggaactgcagaggaaggctgggctgcatctgcgcgtaggaccacttgtaggctgcggagacacatgcctggggttaggcagaacatggctg

SEQ ID NO: 514200 - DNA, 201 bp, Homo sapiens
atacgcctgtaggttagggctaccgttcttagcatgaaggacatatggggatgggatgggaataacacggaatgagagacatgaccctggtcagtgccaayactcataatgacttgtcaagagtagggaatagaatactgaactcttagaaaaatcatcattttgatctcattctataaacttcaccaagttacaaaatct

SEQ ID NO: 514201 - DNA, 201 bp, Homo sapiens
cttgacctggatgatgctgtcatagagagagggctgcaggctctgggccaccatgttggccaagataacagccaccatcatgggcaggatgtgagcaatcygacccgttaattcgaagcaaatcacagctgtggagactgtgtgggaaacggcaccagtcagcgctgctgctcctagaatgacacaggaatacgcctgtag

SEQ ID NO: 514202 - DNA, 201 bp, Homo sapiens
tgtaatttatagagttggaatcttacagacatgaaatcctcatctcttggacataactactgcagggaaacaaataccaggcttctgcctttcctatctgyccacatccccccagcaatgtactctatctgtgccaaccgcaccttctttctagcttgggtcccttccaatctacagcctcactccacaccctgctcacca

SEQ ID NO: 514203 - DNA, 201 bp, Homo sapiens
gatgctaggcaggtggcccatgcctgtaaccccagcactttgggaggccgaggtgggtagatcacttgaggccgggagtttgagaccagcctggccgacawggaaaaacctcacttctactaaaaaatacaaaaattagccaggcatagtggcgtgcgcatgtagtcccagctgctgggaggctgaggtgggagaattgct

SEQ ID NO: 514204 - DNA, 201 bp, Homo sapiens
cccaaggcctccttggttaccagcatccttgttccacactgccagcactcgaaacacaaaggcgctgaacgtggctgcaaagaatcctctccagtagttcygaacagcaaagtaggtggaggtgacctcgatgctaaatagcactcctgcaggggcacagaagtgtggttgggggcagccagcagtgaaagtgctccccca

SEQ ID NO: 514205 - DNA, 201 bp, Homo sapiens
agaggttgcagtgagccaagattgcgccactgcactccagcctgggccacagagcaaggccctctctcaaaaagaaaaaaataaaattaatcaccaggttrtatcaattttactttctaccattcttctctttctcttctgcctctgtccagtgcagtctcttactacctagcatcaggactatgacaatcgtcttcttgt

SEQ ID NO: 514206 - DNA, 201 bp, Homo sapiens
tttgcaaggccaaggcaggtgatcacccgaggtcaggagtttgagaccagcctgaccaatatggtgaaaccctatctccactaaaaatacaaaaattaccrgatgtggtggcgtgtgcctgcagtcccagctactcgggaagctgaggtgggagaatcgcttgaacctgggaggtggaggttgcagtgagccaagatcgca

SEQ ID NO: 514207 - DNA, 201 bp, Homo sapiens
acgtagtccatgctccagctgaccagagccatcagcagtcccagaagcaccagaaagatccagtcttcccctaattttcttctcaccacctgtcccaggcrgtggatacaatctaggaagagatgagggaaaaaacaaacaaacaaacaacaaacaaacaaacaaacaaaaatatatatatgtagagacagagagagagag

SEQ ID NO: 514208 - DNA, 201 bp, Homo sapiens
agagatgaggtggcagaagagggcgctgaagaggatgaggactagtgggaaggtgacccagaccaggaactgcagaggaaggctgggctgcatctgcgcgyaggaccacttgtaggctgcggagacacatgcctggggttaggcagaacatggctgagcagccgtgtccacggcaccaggacgtgtacccggcatgttctc

SEQ ID NO: 514209 - DNA, 201 bp, Homo sapiens
tccacttccactcccagagctccctctagagttggtgccaccctggctcctgagggcccctcccagctctggcttcagtcatgccaggcctacctctttcyccacggggatgccactgcccaggcccgcagtcagggcgacaaccttggccacaaaggctttcattgtgaggtattccttcaggacaaccccacgaagtat

SEQ ID NO: 514210 - DNA, 201 bp, Homo sapiens
ggccccagctcatttcactgtctcaaccttacctcatataccccgcagaacacagacatgaatttgctgaggacagcagcacagatgctggcaatgtggasgaaggggccctgggagagggggagcgagggggcgggggtcagaggccagatggaggctctgcagcactcactggactaataatattccttactccaggca

SEQ ID NO: 514211 - DNA, 201 bp, Homo sapiens
gggtgaggcaaaaggaaagctaagtagtagttctaagtagtactgtttctgagcgtaggtgctggagcagaaattgagggggtagatctacagaaaaagarcaagggttggtagggacaaagtaaggaatgcgagtgagggcgtaaaaagcaacactcaagagaggcaaagaaaaaaatatttcaacatattaagaataag

SEQ ID NO: 514212 - DNA, 201 bp, Homo sapiens
attgatgggggagggggtcaatcacttgcctccaagtggtgtcccaaaacaacagccgactcccacagcacagcccaccgtcaggatatcagagtagtagyatggctgctactaggggagagacagacagagaaacaggtggaagagagggaggtgggcaggcagaggacagaacaagcagggatggggaataaggcagaa

SEQ ID NO: 514213 - DNA, 201 bp, Homo sapiens
tctgtcttgaaaaaaaaaaaaaaaaagaaagaaaattccttgaaaaccagcacctagtacagtgcctggtgaataatcagggctgaatgtctattctctgratgagcaggggaggagaggaaaggacaggatgaggaaagaagagaacagaagagaacagaatttcaggaaacagagaaaggcaatgggcaatgtggggca

SEQ ID NO: 514214 - DNA, 201 bp, Homo sapiens
tgctgggattatgggcatgagccactgtgcctggccactgataacttttttagtttaaaaaaaactctctttaaccaagcattttccaactggtttatagmaccatttttacacattagatctagtaaaccatgaaacacattcgtgcaaatcctagtctagagaataaattccatattcttatacatagccatgagagtc

SEQ ID NO: 514215 - DNA, 201 bp, Homo sapiens
cagagcaggtaaccccactgacccgatggcagcaaaagctggtagttccttcaggtcaaaggggaaatccattcggaaattggttctgaacagagcagtgrtggtgactgtaggatggaaaggccagtattacgatgggagcttcgtagaaacccaacagggaaacagaggtgggcagttttcaggattaattccttcctt

SEQ ID NO: 514216 - DNA, 201 bp, Homo sapiens
acacacagagcaggtaaccccactgacccgatggcagcaaaagctggtagttccttcaggtcaaaggggaaatccattcggaaattggttctgaacagagyagtgatggtgactgtaggatggaaaggccagtattacgatgggagcttcgtagaaacccaacagggaaacagaggtgggcagttttcaggattaattcct

SEQ ID NO: 514217 - DNA, 201 bp, Homo sapiens
agcaggtacggggccaattggtagagcactaattgggctaatttgtacttattttgatgaggccttatatagacttcagataggtgagctgataattaagkaggctaatcaatgctgtccaaataaaaagaaacatgagaagccattcaaataagctgagacgtgaacacgctttgaaagaagtctataagcaatacaaac

SEQ ID NO: 514218 - DNA, 201 bp, Homo sapiens
caaccaggggtagaaataaaaatatcttattacaaggcagtaattgagaagtctataaatacataatccttgatgggcagatatgaaaaagaagtgatgtraaagagatcatcttttattgcctagttgaagctagaagaatatggtttgggaatggcaaaatcctcacagcttcatcacctaaatagagaataataacat

SEQ ID NO: 514219 - DNA, 201 bp, Homo sapiens
tttcatttataatatgaagatagtgatgtcctatccattccttgcttttaaaagtttggatgattattcactgagcattttattttattatttttttaaawtattattattattattattaattattattatttgaggcagagtctcactctgtcacctaggctggagtgcagtggtacaatctcggttcatgggaacctc

SEQ ID NO: 514220 - DNA, 201 bp, Homo sapiens
gtagggtagcttcttgacctggatgatgctgtcatagagagagggctgcaggctctgggccaccatgttggccaagataacagccaccatcatgggcaggwtgtgagcaatctgacccgttaattcgaagcaaatcacagctgtggagactgtgtgggaaacggcaccagtcagcgctgctgctcctagaatgacacagga

SEQ ID NO: 514221 - DNA, 201 bp, Homo sapiens; identical to SEQ ID NO: 111431

SEQ ID NO: 514222 - DNA, 201 bp, Homo sapiens
ctgaggcaggagaatggcgtgaacctgggagccggagcttgcagtgagccgagattgtgccactgcactccagcctgggctacagagtgagattccgaatmaaaaaaaaaaaaaaaaacaaaacagctgaattgagaatcttacctgcctgtacagatgctgctagaagaccacatagactacatttcaaattaggcactg

SEQ ID NO: 514223 - DNA, 201 bp, Homo sapiens
tgagaatcttacctgcctgtacagatgctgctagaagaccacatagactacatttcaaattaggcactggaaaaattgtttcagtcatgtttatattttartttagctatgtatcctacctagctaaaaaataagagtatggttattgtgtccaatgattagacagtgaaaatgctgggaagtggtgataaccagggaata

SEQ ID NO: 514224 - DNA, 201 bp, Homo sapiens
tgagaaaatatgtgtgttaagtaagcttaattcaggcaagggttatagtgctgttggcacaagttcaatattaattaatccacaatatctgtgaaataagrtgtctttaccagaaacacacatacaacaaggtcatatattgattggttgatggaaatgtgaccagagactcacaggaacacagccctgtatttttcctag

SEQ ID NO: 514225 - DNA, 201 bp, Homo sapiens
ttaggcttgaaatatagcccaggaagtatatgtttcttttcctgatacagtatgatgtaacattatcaaggatataatctagtgagaaattaataattgtggcatacaggtgagtcctctatatcatctaagtaggtttctcaaaataagcttgaatttgcgaagtggaatccagacatatacttgggaatctggagagct

SEQ ID NO: 514226 - DNA, 201 bp, Homo sapiens
ttcatggattccctatttgtgaattcagctagtcactaaaatatatttgtaacacaaaaccaatactagaggtgctttcactgtaattcacaaacatgcawagagcaacaaagatttttagttgtcccatgtccctgttcccagctgaagttgaacaaagcagtgctgtaccttcttgtttcagctttcacattgtaaaca

SEQ ID NO: 514227 - DNA, 201 bp, Homo sapiens
ttccctttgctcctgatctatcccactccctagcccttcccggcgcggtcacctcgctcttgccagagaggtcttcgtcctcatcctcatccacaaaggcsaaggactcgggccggcctggaggcgcgccggggagcccctccccagccagccgcgccttcccgtcgtaaggcagctccgacaacttccgcgccatctctt

SEQ ID NO: 514228 - DNA, 201 bp, Homo sapiens
aaataagcttgaatttgcgaagtggaatccagacatatacttgggaatctggagagctgggatgaggtttggcagaaatgttgaaaaatatacagtatttygtttctacaggacttttcaaaatcttgatattttaaaggtacatacgatgccaatgttgccgtatagctcagtctagaggaatctcagaaaaatacagtt

SEQ ID NO: 514229 - DNA, 201 bp, Homo sapiens
atctggagagctgggatgaggtttggcagaaatgttgaaaaatatacagtatttcgtttctacaggacttttcaaaatcttgatattttaaaggtacataygatgccaatgttgccgtatagctcagtctagaggaatctcagaaaaatacagttatcatcattggactaccgtccaattctgagatccaccaaaatttgt

SEQ ID NO: 514230 - DNA, 201 bp, Homo sapiens
ttttaccccacacaaaattaatcaccgggatgctaggcaggtggcccatgcctgtaaccccagcactttgggaggccgaggtgggtagatcacttgaggcygggagtttgagaccagcctggccgacaaggaaaaacctcacttctactaaaaaatacaaaaattagccaggcatagtggcgtgcgcatgtagtcccagct

SEQ ID NO: 514231 - DNA, 201 bp, Homo sapiens
cgggacaagggggtggaggggtggggcaggcgggacgtatgtaagaggtagggtgagggattgggagctacaaagggatgggggagcacacgagggaaacrtggagggaaactaacacagagggggtggtatggactagcagggagagcatgggagcagacgacagaccagacctccatgtggggccacaggtgaaagagg

SEQ ID NO: 514232 - DNA, 201 bp, Homo sapiens
ttttaggttggatgaagaccaaatgaagttctaccccttcctaccctatgcaaaccctgggttcatagattgaaaacagatggaggtttagggtgttgctrgtgtcaggagcagtaccttcatgacgaagaagagaaagatgatgatgacaacgttgacccgggggtgaatccacacagctgactggcccaggctctcagg

SEQ ID NO: 514233 - DNA, 201 bp, Homo sapiens
gggatgggatgggaataacacggaatgagagacatgaccctggtcagtgccaatactcataatgacttgtcaagagtagggaatagaatactgaactcttmgaaaaatcatcattttgatctcattctataaacttcaccaagttacaaaatctttgtgtgtgccaaaattttcatttataatatgaagatagtgatgtcc

SEQ ID NO: 514234 - DNA, 201 bp, Homo sapiens
tggaggggtggggcaggcgggacgtatgtaagaggtagggtgagggattgggagctacaaagggatgggggagcacacgagggaaacgtggagggaaactracacagagggggtggtatggactagcagggagagcatgggagcagacgacagaccagacctccatgtggggccacaggtgaaagaggggtggacatttgg

SEQ ID NO: 514235 - DNA, 201 bp, Homo sapiens
ctgtgccaaccgcaccttctttctagcttgggtcccttccaatctacagcctcactccacaccctgctcaccacacacagagcaggtaaccccactgaccsgatggcagcaaaagctggtagttccttcaggtcaaaggggaaatccattcggaaattggttctgaacagagcagtgatggtgactgtaggatggaaaggc

SEQ ID NO: 514236 - DNA, 201 bp, Homo sapiens
atccttggacaaaactacttatgctctgaagcctgaggtatatctgtgctgtttcctctttaccatgtggccccaccaacagctgacctctccagccatgmattgacccattcctggtgggaaggtgaatgaggcaatgacaaaggtaacaattccaggatacagcaggcggctgaaaaagaaacagagttaaccgccaca

SEQ ID NO: 514237 - DNA, 201 bp, Homo sapiens; identical to SEQ ID NO: 111433

SEQ ID NO: 514238 - DNA, 201 bp, Homo sapiens
gcacgcccctcacgcccagtgcctcccctccctgttccccaccaggcactgcaacatggtgctggagaacgtgaaggagatgtggactgaggtacccaagrgtggcaagggcaagaagaagtccaagccagtcaacaaagaccgctacatctccaagatgttcctgcgcggggactcagtcatcgtggtcctgcggaaccc

SEQ ID NO: 514239 - DNA, 201 bp, Homo sapiens
agcctctctcacttattggttccatgtttgtccatgcaggagcctcctcaacaagcccaagagtgagatgaccccagaggagctgcagaagcgagaggagkaggaatttaacaccggtccactctctgtgctcacacagtcagtcaagaacaatacccaagtgctcatcaactgccgcaacaataagaaactcctgggccg

SEQ ID NO: 514240 - DNA, 201 bp, Homo sapiens
aagccagtcaacaaagaccgctacatctccaagatgttcctgcgcggggactcagtcatcgtggtcctgcggaacccgctcatcgccggcaagtaggggcmgcctgtctgttgacagaactcactcctctgtcctatgaagaccgctgccattggtgttgagaataataaagctctgtgtttttttctagtggtatctgtt

SEQ ID NO: 514241 - DNA, 201 bp, Homo sapiens
agcttggtcatcccggcctagcacctgcacccttccccaagccatgctgctggagggggcgagcagcaggcagtagggggcactgtcagaggcacgccccycacgcccagtgcctcccctccctgttccccaccaggcactgcaacatggtgctggagaacgtgaaggagatgtggactgaggtacccaagagtggcaagg

SEQ ID NO: 514242 - DNA, 201 bp, Homo sapiens
agctgcagaagcgagaggaggaggaatttaacaccggtccactctctgtgctcacacagtcagtcaagaacaatacccaagtgctcatcaactgccgcaayaataagaaactcctgggccgcgtgaaggccttcgataggtgagtgctgggtcctgggaggtgttctccgcaggcctggagaggccactccagctccagtc

SEQ ID NO: 514243 - DNA, 201 bp, Homo sapiens
ctgaaatcgcaccactgcattgcagcctgggcaacagagtgagattctgtctcaaaaaagaaaatgataattttcaatggccctgtgaggaaggtaacgtsattatcttccctcttaaaaaggagcaaactggcacagagaggtgcagtcctttgcctcagcctcaacctaaggactggcagagttgctttggcagcttgg

SEQ ID NO: 514244 - DNA, 201 bp, Homo sapiens
ggttggggagacactgaagccaaggccctgatcacccatcctcacagctccagcctctcaactccagcctctctcacttattggttccatgtttgtccatrcaggagcctcctcaacaagcccaagagtgagatgaccccagaggagctgcagaagcgagaggaggaggaatttaacaccggtccactctctgtgctcaca

SEQ ID NO: 514245 - DNA, 201 bp, Homo sapiens
gtggaggtggtgcatgcctgtagtcccagctcctcaggaggctgaggcaggagaatcgcttgaacccaggaggcagaggttgcagtgagccgagatcacaycactgcgctccagcctgggcaacagatcaagactccgtctcaaaaaaaaaaaaaatgtctgttaggcatctagctgatgatactcagaaggctgaacagg

SEQ ID NO: 514246 - DNA, 201 bp, Homo sapiens
cgtgttagccaggatggtctcgatctcctgacctcgtgatccgcccgcctcggcctccgaaagtgctgggattacaggcgtgagccactgcgcccggccttttttttttttttttttttttttttttaatatggagtctcactctgtctctcaggctggagtgcagtggtgtgatctcagttcactgcaacctccgcctcc

SEQ ID NO: 514247 - DNA, 201 bp, Homo sapiens
gtgttagccaggatggtctcgatctcctgacctcgtgatccgcccgcctcggcctccgaaagtgctgggattacaggcgtgagccactgcgcccggccttttttttttttttttttttttttttttaatatggagtctcactctgtctctcaggctggagtgcagtggtgtgatctcagttcactgcaacctccgcctcct

SEQ ID NO: 514248 - DNA, 201 bp, Homo sapiens
ggctcggtggaaggcggatggcggatgtccgagttagtgctgcctcactcactgcaaccgtaaaagggcaggagcggtgtctgggccggccccctgtcctmcccaccaccaccaccaccaccagcaccagccctggaagccctggccctcccacaaggcccacctcttgctgtggtggtggccaagcatcccgtcttgtgg

SEQ ID NO: 514249 - DNA, 201 bp, Homo sapiens
ctgtcccaccaaaaggccactcccacctttccagggggtctcccctgcaggtggtcacacccgacttcctgggctgtgcctcttctccaaggacagccagrattcaaaacccatgcccctattacccagctggggaaactgaggctcaaagagaaaaagacatggccaagatccctcagaaattcctaggcaacgttggag

SEQ ID NO: 514250 - DNA, 201 bp, Homo sapiens
aaatgggatgtgggagtttttaaatgctatagccctgggcttgccccatttggggcagctatttaaggggaggggatgtctcaccgggctgggggtgagayatccccccaccccagggactccccttccctctggctccttccccttttctatgaggaaataagatgctgtaactttttggaacctcagttttttgatttt

SEQ ID NO: 514251 - DNA, 201 bp, Homo sapiens
gctatttttatttttaaaaaataagagaccatttgatcaagcatctattttatgtggggcatttttgtgcctgacagcaattctggctggtttttttgttkgtttgtttgtttgttttgagacggaaattttgctcttgttgcccaggctgttgtgaaatggcatgatctcggctcactgcaacctccgtctcctgggttc

SEQ ID NO: 514252 - DNA, 201 bp, Homo sapiens
agattcactttaacgcttaatgccttcaaagttttggtttttttaagaaaaaaaaatatatatatatttgggttttgggggaaaagggaaatttttttttytctttggttttgataaaatgggatgtgggagtttttaaatgctatagccctgggcttgccccatttggggcagctatttaaggggaggggatgtctcacc

SEQ ID NO: 514253 - DNA, 201 bp, Homo sapiens
agctgtgatcatgccattgcaccctagcctgggcaacagagcaaggttccttctcaaaaaataaaagaagggggattcattcctgcaagtcccggtacccsctcctgattagttttaccccattaattttaggagcttctggaagaggtgaagaaggaattgcagaaagtgaaagaggaaatcattgaaggtgaggtggtt

SEQ ID NO: 514254 - DNA, 201 bp, Homo sapiens
cccccaaaattgagcggagtacgagatggagaagtcgatggggaaagaaatcgcgccccttccgagaccctcctcagaattcccacagtgggagcgaactrggaagcaagggaggtccccttccccttcaccaacttgcccctcaggtgggggtgattcccagggtgcacccctgggctacaacattggggagaggagcga

SEQ ID NO: 514255 - DNA, 201 bp, Homo sapiens
atttcaatttagctctgcttcttcatctttaaatgaagttaagaacttgtgggaacttcgtttcaactatgagcccctctgcttacttgctgtgtgatctsgggcaagtgccttcactcctctgtgcctgcaattcccccttgtcaaaagggtgagcgtcagagcctatcccatgaggttgtagagtcatgcagcagggaa

SEQ ID NO: 514256 - DNA, 201 bp, Homo sapiens
ttcacctcagcttcccaacatgctgtaattacaggcgtgagccaccacacccggctgtaccaagccctttaggtgcccagattcatgtgcccctcccccaytgccctggaggtggggactgtcattttcccagttcacaggcaagaagaggtcttgagtgggaaggtcatgtgcctgagtcacatgaagtaggtggctcag

SEQ ID NO: 514257 - DNA, 201 bp, Homo sapiens
aaactggggccccaaaaatacttggacttgcccaatttataaggcagagctcaatgtgatccctggaataggaggcggggaagcaggtcctctctctaatmtcattgctgtcccaaaccacaccaactcccccaggatgaagtcgtcttcttcggtgaccacttccgagacccaaccctgcacgcccagctccagtgatta

SEQ ID NO: 514258 - DNA, 201 bp, Homo sapiens
cctccccggaggaggtggagcagcagaaaaggtggggctgggccctgggtggggaaccttagccgctgccagagttccatatgttctggaacccttgactsctagagttcagaacccagccaacttgcagttttcagaatgttcaagaaacttctgacactcagagttgcagaacctcctggtccctgcagattcctggaa

SEQ ID NO: 514259 - DNA, 201 bp, Homo sapiens
ggccaggctggtctcgaactcttaacctcaggtgatccacccgcctcgacctcctaaagtgttattattacagacgtcagccaccacacctggcccctcawggcagttcgaacaatgatactattacaaccttgtggcctccccaccccggtactcagtttatagatggggaaactgaggcacaggaaagttaggcaaggt

SEQ ID NO: 514260 - DNA, 201 bp, Homo sapiens
cttaacctcaggtgatccacccgcctcgacctcctaaagtgttattattacagacgtcagccaccacacctggcccctcatggcagttcgaacaatgataytattacaaccttgtggcctccccaccccggtactcagtttatagatggggaaactgaggcacaggaaagttaggcaaggtgcctattaaactcaaacagg

SEQ ID NO: 514261 - DNA, 201 bp, Homo sapiens
ttcctgagttcccctcaatggaggcagccacagttagtgtcttgggaaacagtctctgcatatatcaccactctgagtgcagatatatttatatatgctcctcactgtttttttttttgagatggagtcttgctctgtcgcccaggctggagtgcagtggcgcgatctcagctcactgcaacctccacctcccaggttcaa

SEQ ID NO: 514262 - DNA, 201 bp, Homo sapiens
tcctgagttcccctcaatggaggcagccacagttagtgtcttgggaaacagtctctgcatatatcaccactctgagtgcagatatatttatatatgctcctcactgtttttttttttgagatggagtcttgctctgtcgcccaggctggagtgcagtggcgcgatctcagctcactgcaacctccacctcccaggttcaag

SEQ ID NO: 514263 - DNA, 201 bp, Homo sapiens
gcaggattcctgggaggcctgggagagcaagggaagcgccaagagctgagcagagttctgggactgatccatggccctttctctctcacctttcaggaggkgggccccctccacccccagcacttcccacctggtcggtcccgaacggcccctccccggaggaggtggagcagcagaaaaggtggggctgggccctgggtg

SEQ ID NO: 514264 - DNA, 201 bp, Homo sapiens
cctgagttcccctcaatggaggcagccacagttagtgtcttgggaaacagtctctgcatatatcaccactctgagtgcagatatatttatatatgctcctcactgtttttttttttgagatggagtcttgctctgtcgcccaggctggagtgcagtggcgcgatctcagctcactgcaacctccacctcccaggttcaagc

SEQ ID NO: 514265 - DNA, 201 bp, Homo sapiens
ctgagttcccctcaatggaggcagccacagttagtgtcttgggaaacagtctctgcatatatcaccactctgagtgcagatatatttatatatgctcctcactgtttttttttttgagatggagtcttgctctgtcgcccaggctggagtgcagtggcgcgatctcagctcactgcaacctccacctcccaggttcaagca

SEQ ID NO: 514266 - DNA, 201 bp, Homo sapiens
taggggaggaaggcttgggtgagtattaggagccagccaccctggagacctctgagagagaggacggaggtcgctggccccttcgctggccatccttaggrccctgattgacggcagctctctcgcctccccccacaggcagcagcccggcccgtcggagcacatagagcgccgggtctccaatgcaggtgatgctcagat

SEQ ID NO: 514267 - DNA, 201 bp, Homo sapiens
gcttgggtgagtattaggagccagccaccctggagacctctgagagagaggacggaggtcgctggccccttcgctggccatccttaggaccctgattgacsgcagctctctcgcctccccccacaggcagcagcccggcccgtcggagcacatagagcgccgggtctccaatgcaggtgatgctcagatagcttcgggagt

SEQ ID NO: 514268 - DNA, 201 bp, Homo sapiens
tagagacggggtttcgctatgttgcccagactggtctcaaactcctgaccttgtgatccgcctgccttggcctcccaaagtgctgggattacaggcatgakccaccgcacccgaccttttttttggttttgtaaagcctctgatcaacactaccttgtactttggcttttaaaaatttcaatttagctctgcttcttcatc

SEQ ID NO: 514269 - DNA, 201 bp, Homo sapiens
tgccaaggtaggccatcggtcctggggcccttggggaggtaaaggcgggcagatcgcttgagcccaggaggtcaagaccagcctgggcaacatggcgacaycccatctctacaaaaattagccaggcgtggtagcacttacctgtggtcccagctactcaggaggctgaggtgggaggattacttgagcccaggaagttga

SEQ ID NO: 514270 - DNA, 201 bp, Homo sapiens
gtgcccatgagagggatgttgacagttactgagctctcggcgtgtgctggacgctgtaccaagcacttagctttttttcttttttttgaaacagagtttcrctctgtcgcccaggctggagtgcaatggcgtgatctcagctcactgcggcctccacctcctgggttcaagcgattctcctgcgtcagcctcctgagtagc

SEQ ID NO: 514271 - DNA, 201 bp, Homo sapiens
tgagtcacatgaagtaggtggctcagtggggatttgaacccaggtctggggatatcagctcctgaactctgcaccagtttactgacacctcccacccaggytaagtcagacgttgccttttccaggaagtcctgcctgactctccaggctggggcaggcgttccttcagggcacccccagaccctgggctccttggtccta

SEQ ID NO: 514272 - DNA, 201 bp, Homo sapiens
tcctgaactctgcaccagtttactgacacctcccacccaggctaagtcagacgttgccttttccaggaagtcctgcctgactctccaggctggggcaggcrttccttcagggcacccccagaccctgggctccttggtcctaaacctgggttggtaccgtctggggacagctgtgtctcccacactggactgtgagcccca

SEQ ID NO: 514273 - DNA, 201 bp, Homo sapiens
taagtcagacgttgccttttccaggaagtcctgcctgactctccaggctggggcaggcgttccttcagggcacccccagaccctgggctccttggtcctawacctgggttggtaccgtctggggacagctgtgtctcccacactggactgtgagccccaggagggtggtgccggagctgtctgggtcactgctgtgtcttc

SEQ ID NO: 514274 - DNA, 201 bp, Homo sapiens
tcactgctgtgtcttcatccccagccccacccaatataggccagacacagagcagggagtatctggggaatggccgctagtgccctggggagccaggcgakgggtgggcagcgggaagtccctttggaggaagagctcagaggtctgggatgggtccccaacctgctgcaggcctcacacttcccctcccaagcctcagct

SEQ ID NO: 514275 - DNA, 201 bp, Homo sapiens
aagtcagacgttgccttttccaggaagtcctgcctgactctccaggctggggcaggcgttccttcagggcacccccagaccctgggctccttggtcctaamcctgggttggtaccgtctggggacagctgtgtctcccacactggactgtgagccccaggagggtggtgccggagctgtctgggtcactgctgtgtcttca

SEQ ID NO: 514276 - DNA, 201 bp, Homo sapiens
ctttaccctgctgggacttggtttactcgtcggtaaaatagagcgaattcattgttatcatggaaaattatcactagcattttgtgcattccagtgtgacygtgtgcacctatgtgtaaaatgcaccattggcccggcgccgtggctcatgcctgtaatctcagcactttgggaggccgaggcacacggattacctgaggt

SEQ ID NO: 514277 - DNA, 201 bp, Homo sapiens
gaagcacgtgtttttgcttttctctcctgcagaaggaaagccacgcaagttggggagaaaacccccaaggatgaatctgccaatgtaagtcagggactctwcttgccctacatctcttaggccgtaccatgagggtagggatagtgggatgtgtggggtttgaacctgaaagaggaaatgggcagaggtgtggcaggggct

SEQ ID NO: 514278 - DNA, 201 bp, Homo sapiens
gcaggaggagccagaggccagagtcccggcccagagtggtgagtagagtgcccagtccagccacaggaactacaaatcccagaatactctgttctcacatrttaagcacccttataggagagtcagggcgaatggtgctggggattgtagtctcctgagatggggctttgatcaggggctgatgaggttgggggagtaaga

SEQ ID NO: 514279 - DNA, 201 bp, Homo sapiens
ttttatttgggtaggttttggggtccaggccattttttttaccccttggaggaaataagatgagggagaaaggaaaaggggaggaaacttctcccctcccmccttcacctttagcttcttgaaaatgggcccctgcagaataaatctgccagtttttataaatgctaagatctctggagtgatttgaaggcctgttctgat

SEQ ID NO: 514280 - DNA, 201 bp, Homo sapiens
ggccctttctctctcacctttcaggaggtgggccccctccacccccagcacttcccacctggtcggtcccgaacggcccctccccggaggaggtggagcakcagaaaaggtggggctgggccctgggtggggaaccttagccgctgccagagttccatatgttctggaacccttgactcctagagttcagaacccagccaa

SEQ ID NO: 514281 - DNA, 201 bp, Homo sapiens
caccagtttactgacacctcccacccaggctaagtcagacgttgccttttccaggaagtcctgcctgactctccaggctggggcaggcgttccttcagggyacccccagaccctgggctccttggtcctaaacctgggttggtaccgtctggggacagctgtgtctcccacactggactgtgagccccaggagggtggtgc

SEQ ID NO: 514282 - DNA, 201 bp, Homo sapiens
ctttttggaacctcagttttttgattttttatttgggtaggttttggggtccaggccattttttttaccccttggaggaaataagatgagggagaaaggaraaggggaggaaacttctcccctcccaccttcacctttagcttcttgaaaatgggcccctgcagaataaatctgccagtttttataaatgctaagatctct

SEQ ID NO: 514283 - DNA, 201 bp, Homo sapiens
gtgggaccccccccttccccgtcgctccgcacacaatctgcttaactggccgtgcctaggaccgagcgggcgctcggagcagagggcggctccccgcctcsggccataagggcggcccggctcccccacctgcgcggccctggggagggagggggcgcggcagctggggaaagggggcctttgtcttcctgactcacctgt

SEQ ID NO: 514284 - DNA, 201 bp, Homo sapiens
ccgtgttagccaggatggtctcgatctcctgacctcgtgatccgcccgcctcggcctccgaaagtgctgggattacaggcgtgagccactgcgcccggccttttttttttttttttttttttttttttaatatggagtctcactctgtctctcaggctggagtgcagtggtgtgatctcagttcactgcaacctccgcctc

SEQ ID NO: 514285 - DNA, 201 bp, Homo sapiens
gggtctggtctcctcagcctcctcatctgggggagtggaatagtatcctccaggtttttcaattaaacggattattttttcagaccgaaaagagatggtcygagtttgtcttagagtgatgcttgattccttcctttccttactgatgttccctgtcctctgggaccttaatgcatgtgtacttcgaggtctattttgggg

SEQ ID NO: 514286 - DNA, 201 bp, Homo sapiens
gggcttgcacagagttggagccagaggagagagctggctcatcccctacggtaggatggggaaacctcacagaccacattgtcacccggcctcagctctcygccccggcgctcagagggtaactctcacccacctcgtccgcttctctgaaccagagtgacccaggctgcgctccgccccgctctcctaccccgagttggc

SEQ ID NO: 514287 - DNA, 201 bp, Homo sapiens
cttttctcagactaggatccctggaaaatggagaagctgtgctaatagaggggggccagaaatccccactctagaatgctgtagaatgttgggagacaccyaggatgtgagccagggactttctggaagtgtttgttctggccccacccgaccccaggcagtccccagctgtctgcacagtcggatggggagggggcttgc

SEQ ID NO: 514288 - DNA, 201 bp, Homo sapiens
aggcaaggatgggtcatccccctaccccacagccaaagaaattccctagaggtgtgagaatctctcttccggatggggtcaagtctgtgtcctaggtgtaycccctgccctccaccatggagggccactgtgttgtggatatggcctaatcctcacctgattttctcttaggcctgtgcagtgggactgattgccgtgggt

SEQ ID NO: 514289 - DNA, 201 bp, Homo sapiens
atctccaaggctgggtgtggtgactcacgcctgtaatctcagcacttttgaaggccgaggtgggcagatcacctgaggtcagaagttcaagactagcctgsccaacgtggtgaaaccctgtctctactaaaaatacaaaaattagccaggtgtggtggtgagtgcctgtaatcccacctactcaggagggtgaggcaggag

SEQ ID NO: 514290 - DNA, 201 bp, Homo sapiens
gagagctggctcatcccctacggtaggatggggaaacctcacagaccacattgtcacccggcctcagctctccgccccggcgctcagagggtaactctcayccacctcgtccgcttctctgaaccagagtgacccaggctgcgctccgccccgctctcctaccccgagttggcacggaggtatagcgccagaggggggccc

SEQ ID NO: 514291 - DNA, 201 bp, Homo sapiens
aaattagccaggtgtggtggtgagtgcctgtaatcccacctactcaggagggtgaggcaggagaatcgcttgaacccgggaggcggaggttgcagtgagcygagattgagccaccgctgggcacttgtctgggcaacagagcaagtctctgtctcaaaaaaaaaaaaaaaaaaaaaaaaagaattctcatctccatattga

SEQ ID NO: 514292 - DNA, 201 bp, Homo sapiens
tgcttcgatcctggacaggatgcaggcagatgtgagtggggttgctgggagcaggggtggtgggaatagagaattctcatctccaaggctgggtgtggtgrctcacgcctgtaatctcagcacttttgaaggccgaggtgggcagatcacctgaggtcagaagttcaagactagcctggccaacgtggtgaaaccctgtct

SEQ ID NO: 514293 - DNA, 201 bp, Homo sapiens
tgtcagagtttaataacaacttccggcagcagatggagaattacccgaaaaacaaccacactgcttcgatcctggacaggatgcaggcagatgtgagtggsgttgctgggagcaggggtggtgggaatagagaattctcatctccaaggctgggtgtggtgactcacgcctgtaatctcagcacttttgaaggccgaggtg

SEQ ID NO: 514294 - DNA, 201 bp, Homo sapiens
aaggtgggtgaggtgggtgggtgaggaagacctttgtgagtgtccagggaccggctgtgccaaaacgggcccctgtaatgcatagactccaaacttgactyctgtcctttgctcctgcagtttgccatctttctgtctcttatcatgttggtggaggtggccgcagccattgctggctatgtgtttagagataaggtaagc

SEQ ID NO: 514295 - DNA, 201 bp, Homo sapiens
tgtgtttagagataaggtaagcagggaataatgggaagggcctgcctcagccgggtctgggaccctggtgcttgaattctgactgcaacagtgctcctccrtactctcaggtgatgtcagagtttaataacaacttccggcagcagatggagaattacccgaaaaacaaccacactgcttcgatcctggacaggatgcagg

SEQ ID NO: 514296 - DNA, 201 bp, Homo sapiens
gctttctgccccctagtcttatgctgccaggctcactatgaacattcatgaagccatctgctgcataagtcaaagcagctccccagaaaggtcccacctgmgagagcccagcccccatctgccttggacatcttcctggccttctgtgcaccgctaagggcccagcacctcccttcctggccaatcctcaagggatccagc

SEQ ID NO: 514297 - DNA, 201 bp, Homo sapiens
ctgaggtagctagcccttctgactcctctccacccctgtccccatctttccttctaggttttgggaattgtctttgcctgctgcctcgtgaagagtatcaraagtggctacgaggtgatgtaggggtctggtctcctcagcctcctcatctgggggagtggaatagtatcctccaggtttttcaattaaacggattatttt

SEQ ID NO: 514298 - DNA, 201 bp, Homo sapiens
gtcccccttcggccagttttaatccccccgccctcccctctgccccaggcccggcagccatggcggtggaaggaggaatgaaatgtgtgaagttcttgctstacgtcctcctgctggccttttgcgtgagtggcgaggggtcctggggggcgcgccggcagggtgcggggagacctggctccacagtggtgagggctgagg

SEQ ID NO: 514299 - DNA, 201 bp, Homo sapiens
ggtgcttgaattctgactgcaacagtgctcctccgtactctcaggtgatgtcagagtttaataacaacttccggcagcagatggagaattacccgaaaaayaaccacactgcttcgatcctggacaggatgcaggcagatgtgagtggggttgctgggagcaggggtggtgggaatagagaattctcatctccaaggctgg

SEQ ID NO: 514300 - DNA, 201 bp, Homo sapiens
cttttcctcttcccttctcctggcctaactggccagaggaaccttagtcacagctgatgcgcgcgtgggatgtgcactggaggatagtgagggggcagttstgggagagaattgagctgggagccctggaggcctgtagaaagcattattctaggtcagaaatacgtgtcttgaggtcaaggctttctgggaggtttttga

SEQ ID NO: 514301 - DNA, 201 bp, Homo sapiens
ttcctggccttctgtgcaccgctaagggcccagcacctcccttcctggccaatcctcaagggatccagctcctttcgaagtatgataagttgccttgacayctgtgtggtcagtgtccttagcaggagaatttatgtgaatattgccttttcttccatggaagccacccagcctggcccagaaccctcatcacctgctctt

SEQ ID NO: 514302 - DNA, 201 bp, Homo sapiens
agattgagccaccgctgggcacttgtctgggcaacagagcaagtctctgtctcaaaaaaaaaaaaaaaaaaaaaaaaagaattctcatctccatattgaargtgaaggttcacttaacaaccttcttctccatatttcttccctcccccagtttaagtgctgtggggctgctaactacacagattgggagaaaatcccttc

SEQ ID NO: 514303 - DNA, 201 bp, Homo sapiens
tgctcccttttcctcttcccttctcctggcctaactggccagaggaaccttagtcacagctgatgcgcgcgtgggatgtgcactggaggatagtgagggggcagttctgggagagaattgagctgggagccctggaggcctgtagaaagcattattctaggtcagaaatacgtgtcttgaggtcaaggctttctgggaggt

SEQ ID NO: 514304 - DNA, 201 bp, Homo sapiens
ggctgcccaatttgccaagcagacaggccagtggatcggaatggtggagaacttcaaccaggcactcaaggtgggccatactccctacctcaccaccccartcctgggcccccattggctgcctccagtcaggttacctcaggtttaggttaaggaggaagtagggtggtcccagaaaccccatctatagccccagtgtca

SEQ ID NO: 514305 - DNA, 201 bp, Homo sapiens
agttgtggctggggcctctgatctcccttctctccaggcagctctctttactcagtgtgaatatagaagcaggtggtcaatggggaaaaccagaagttcargaattctcaggggagtctgtttcagttcctacccgacccttgacagtgacccagctgtctcccaaaaagaaggaacagggtctgccctcccatttcctcc

SEQ ID NO: 514306 - DNA, 201 bp, Homo sapiens; identical to SEQ ID NO: 279435

SEQ ID NO: 514307 - DNA, 201 bp, Homo sapiens
acagaagctttggtggatcacctcaatgtggggtatggacctcttatcaacatcagtttcctccttccccaccccgcccaagtttaggcactggccagtckggccctcaaatagctgttgaaggggtgggatgttccactaattcccctatcctaccccgcccctcccagctctttgtagagcaacttgagtcaactctga

SEQ ID NO: 514308 - DNA, 201 bp, Homo sapiens
tggtagtaatggtaaccacagcccataccttgattgaaaagaaaaactagtgcctaaggcagaagggagggagagcatgtgtgtgtgtgtgtgtgtgtgtktgtgtgtgttccttgatctgtgtgggcaaaagcgaaggcttgggagagcaactgagagccgagaagaaacccctgggataccctcttttgacccagggtt

SEQ ID NO: 514309 - DNA, 201 bp, Homo sapiens; identical to SEQ ID NO: 279424

SEQ ID NO: 514310 - DNA, 201 bp, Homo sapiens
gtagaacctgttccgggagctatggcagagccaggctgtctcttaccttcctattgggtctctagggaccacaccctgccccagccctaaatgagaatgcmagtaacagccaaagacttgggaaaaagcaaagaacattgtctcttgaccctaagtgacccagaagcgtgcagagatgatgatttgctagtctgcctattg

SEQ ID NO: 514311 - DNA, 201 bp, Homo sapiens
gtgtcctgcccactccctcagcccccaccaaccccttccccgctccagcccccacacattccagtgggtgggggcaccggatgtggaatctcctggctgastagagctctggggtgggaagtgaaaaattcaacagccaataaaggagaacaattattgcaggggttggggagggcaaaaaacactggcagaaggttgggg

SEQ ID NO: 514312 - DNA, 201 bp, Homo sapiens; identical to SEQ ID NO: 279454

SEQ ID NO: 514313 - DNA, 201 bp, Homo sapiens
aacctagatccctcacatacatagttcacaacagggtttgtactcctatgagaatctaattccaccactgatctgacaggaggcggagctcggactataayggagcaatggggaacaactgtaaatacagctgaagctttgctgacttgcttaccattcacttcctgctgtgtggcccagttcctaacaagccatggacca

SEQ ID NO: 514314 - DNA, 201 bp, Homo sapiens
acttccctaaaatatacctcctccttaagagttcatgtcatagcgtaacctgtttgtgaattcattcaggacaactttagccacattcaaacttgtactayaatttcctgaactcttttttggaagtaatagaatagaagttaaaaatacgcagatttagatagaaaaaaaaatcctaaaatttatatggacccacaaaag

SEQ ID NO: 514315 - DNA, 201 bp, Homo sapiens
tcagtggttacatttcattagtcatttctaattgtgtttatttggatcttctttcttcttagtctagctagtggcctatcttgttaattttttcaaaaaaycaactcctgaatttattgctcttttgaatagtttttcatgccttgatttccttcacttcaccctgatttttgtaattatttctcagttctattagctttg

SEQ ID NO: 514316 - DNA, 201 bp, Homo sapiens
aatccacaaagaattatggtatttttctaatggatatttgatatctgatctcatttcagttcaattgcaggcatgcgagtttgagaaaataagagactgcygtttgtgtttttcacaatcaaaattgctcacaaaaagcttcaccatgggcaagtccattgtaaattagtaaaaagtttaaatgtttaattgtgtaagcag

SEQ ID NO: 514317 - DNA, 201 bp, Homo sapiens
aaatgagatcaaagggaactagaagagaaaggaaaggaaaagaccattttgacatgttagaagaaaaaaaattatatatatgtgtgtgtgtgtgtgtgtgkataattgaactttcaacaaaccaaactatgaagttgcattgactcacactcatgctaagatgttatgcaccataggaaaaatatttatttgtcttgacat

SEQ ID NO: 514318 - DNA, 201 bp, Homo sapiens
tgttttgttctcacttctctaattctttccattgtgaagttaggttgttaatttaacatctttctaactttttgatgtggacatttggtgatattgtattkccctcttaacactgccttagctgtgtcccagagattctggtatgttgtatctttgttctctttactttaaaagaacttcttgatttctgccttttatttt

SEQ ID NO: 514319 - DNA, 201 bp, Homo sapiens
aaaaaattcaaaaaattaggcacttaagaagttggtctgttttgaaattcatattatagcttctccttttccttatttaatgaacaaggattaagggtttrttgctgattacacaattactgtttcaccttattattttgctattttaacagattgaagtggatattcctcgctgtcatcagtacgatgaactgttatcat

SEQ ID NO: 514320 - DNA, 201 bp, Homo sapiens
aaaatgagatcaaagggaactagaagagaaaggaaaggaaaagaccattttgacatgttagaagaaaaaaaattatatatatgtgtgtgtgtgtgtgtgtgtataattgaactttcaacaaaccaaactatgaagttgcattgactcacactcatgctaagatgttatgcaccataggaaaaatatttatttgtcttgaca

SEQ ID NO: 514321 - DNA, 201 bp, Homo sapiens
tagctgtgtcccagagattctggtatgttgtatctttgttctctttactttaaaagaacttcttgatttctgccttttattttttacccaaaagtcaatcrggagcatgttgtttaatttctatgtaattgtatgattttgagtgatttttattgtgttgacttctatttttattttgctgtggtctgagagagtgtttgg

SEQ ID NO: 514322 - DNA, 201 bp, Homo sapiens
aatcatgttaaaaaaggaataatgtctttattttttaaaagaagacttaaaagtcaacaggaaaaacatcaatattgaaacagagaaatggatagagtacrtaatataaatacagctagtaaatctatgcaaattgttcatcttcactgggaatgaaaaaaatacaaattaaaataggagtgattttccatactgcattag

SEQ ID NO: 514323 - DNA, 201 bp, Homo sapiens
gaaagactttatatgattacatgtatctatttcttgaatgtttcatgggagttagctttaaaaccatattgtaagggctccttatccctatttgggtgtartcattacttcagtctgcttaatggttataagtttactcaggttgtttattttgtttttaaatcattttctaaagttatatgttttaaggcctttaaactt

SEQ ID NO: 514324 - DNA, 201 bp, Homo sapiens
atttttctccatccctttattttgagcttataagtgtgtcattatgtgtgagatagtctcttgaagagagcatattattgggtcttacttttttatcctgyttgccactctaccttttaagtggggtattttcaccctttacattcaaggttcatattgatatgtgtggattgggttttgtcattgtgctgttagctggtg

SEQ ID NO: 514325 - DNA, 201 bp, Homo sapiens
gtcctggggacagaagtttgtcctatgtcctcacctctcttacagatccaagaattgttgatttttcagtctgttcaactttttatttgttgttaggatgragtagcaaatttcaggctccctacaatcagaactaggaactggaagtctgttcttcagagtttattttttttagaatggcagctattactgcctgttgac

SEQ ID NO: 514326 - DNA, 201 bp, Homo sapiens
cgcacactagctgcttcttgaatagattgaagtaaattgacttctaataatagcagtctttaagttcttacactgtaccaagcatggtgctagtcctatgytgtatatactgttgttatctctgttttactgataaactgaagtttaaagaggttaagcaactttcccaaggccatataactagtaattgcagagccagtc

SEQ ID NO: 514327 - DNA, 201 bp, Homo sapiens
gactggttccctctggagtttttaactctcagacttgtccacactgagcctccagtaatttatcaattacagtttaggttttccaaacttggcactggttyctgaggcactgctcatgaatgtctgttccagaatgccatagctccctttattctcctctctgtctccagtcctggggacagaagtttgtcctatgtcctc

SEQ ID NO: 514328 - DNA, 201 bp, Homo sapiens
cagtcatttagcttgtgttatgaatagtctcagttaaaatacaaaaagcctgcaggtggtaatattttaatctatgttcagtttttgtgattgtaggagasaagcagcacattaaggtgccagcaatcttagggaactacccaaaccccaatgtgggccaagggaatggagaatacagaagaagaaagctgaaggacatga

SEQ ID NO: 514329 - DNA, 201 bp, Homo sapiens
tgaagattacgactcttggaatgtaaggtttagtgacaccagttacctttattctgaaaagttgttatgacttaagtcatagcagaaaatggttactaaayattcattcaattaaacatttattgagttcctggtatgtgtcacatactgtatctttaagtaacattcatgccaaatgggaaggcagacagacatttaatt

SEQ ID NO: 514330 - DNA, 201 bp, Homo sapiens
ccgcagggcagggctcgggacctgcagcccaccatgcctgagcctccccccaacccaccgtgggctcctgcccggcccaagactccccaacgagtgctgcyccctgcttcacagcacctggtcccatcgactgcccaagggctgaggagtgtgggtgcacggtgtgggactggcaggcagctccacctgcggccccagtgt

SEQ ID NO: 514331 - DNA, 201 bp, Homo sapiens
tataagcttaatttgtttatgataagagaaatataatgatagccaacattaatgaagcatattctgcattacataaccctcaccataacctgtggtatatstacagttaatattttaattttacagatgagaaaagtgaaacttcaggtggtattaagtagtttgccaaatttatataactatttgatggtggaagagtcc

SEQ ID NO: 514332 - DNA, 201 bp, Homo sapiens
aactgttatgatttcagttcttttgcatttgctgaggagtgttttacttccaattatgtggttgaattttagaataagtgccatgtggcactgagaagaawgtatattctgttggagtagagagttctgtagatgtttactaggtttacttgatccagagctgagttcaagtcctgaatatccttaattttatgtctcatt

SEQ ID NO: 514333 - DNA, 201 bp, Homo sapiens
taatgtgtatatttttacaaagttaagatgtttatattaagttatataagatatatggagtaccattaaaagtttaacaagatattgaaatgaaaactacrtttttagaagattgatatgacagtaatgtaagattgagaagaatagcagctttttttcaatgaactctacctgtagttctgatttggtaagtgtttaaga

SEQ ID NO: 514334 - DNA, 201 bp, Homo sapiens
aacagtgtagagaagaccttaagtgacctgatggagctgaaaaccatggcacgagagctatgtgacacatgcacaagcttcagtagctgattcgatcaagyggaaagaagcgtatcagtgattgaagatcaaattaatgaaatgaagagagaagagaagtttagagaaaaaagaataaaaagaaacgaacaaagcctccaa

SEQ ID NO: 514335 - DNA, 201 bp, Homo sapiens
ctgaggcctcaccagaagatgttggtaccacacttcctgtaaagcctacagaaccatgagccaattaaacctctttaatttcttctattaaaaaaaaaaaaggatacatgtacagaacatgcaggtttgttacatagttatatgtgtgccatggtggtttgctggacctactgacctgtcctctaagatcccttccctcgc

SEQ ID NO: 514336 - DNA, 201 bp, Homo sapiens
ttttggcaccagggactagttttgtggaagacaggttttccatggatggagggtggagggatgattttgggatgatacaagcgcattacatttactgtgtrctttatttctatttttattatattgtaatatataatgaagtaattatataactcaccataatgtagagtcagtgggatccctgagcttgctttcctgcaa

SEQ ID NO: 514337 - DNA, 201 bp, Homo sapiens
gtccctcccacaacacgtgagaattcaagatgagatttgggtgggaacacagccaagccctgtcaaacctaaaacacacagttcaggctagagacgctacatcatacttttgcttcctcaaatctttgttagaagtaagactatttcacaattattgtatattctactctttaaagttcatcttagcatcacattattttt

SEQ ID NO: 514338 - DNA, 201 bp, Homo sapiens
tgtgcccactttgtgtctttgtgtcatactttggtaattcttgcaatatttcaaactttttcattattattatatctgttacggtgatctgtgatcagtgstctttgatgttgctattgtacttgttttggtgcaccacaaacggagcccatttaaaatggcaaacttaagtgataaatatgtgcgttctcattgctcccc

SEQ ID NO: 514339 - DNA, 201 bp, Homo sapiens
ggtccctcccacaacacgtgagaattcaagatgagatttgggtgggaacacagccaagccctgtcaaacctaaaacacacagttcaggctagagacgctacatcatacttttgcttcctcaaatctttgttagaagtaagactatttcacaattattgtatattctactctttaaagttcatcttagcatcacattatttt

SEQ ID NO: 514340 - DNA, 201 bp, Homo sapiens
tttcaccatgttggccaggatggtctcaatctcttgatttcctgatctgcccccctaggcctcccaaagtgctgggattacaggcataagccaccgcaccyggcctttttttttttttttttgacacggagtttcactcttgttgcccaggctggagtgcagtagcgatctcagctccctgcaacctccgcctcccagttc

SEQ ID NO: 514341 - DNA, 201 bp, Homo sapiens
tgtgttttatagactgagtagaaattttttttgtaatgataattattaatcgttaaaatttattgagcgtttatataaggcaatattcttagtgttttacrtattttaattacatattttaattaacttaatccttgtaacattactgtgtgaaaggaactagtcctgtcattttacagataagaaaattaaaccacagag

SEQ ID NO: 514342 - DNA, 201 bp, Homo sapiens
gggcattgcctcacctgggaaacgcagggggttgggggatttccctttcctagccaagggaagccatgacagaccgtaccaggaaaattgggacattccascttaatactgcacttttccaatggtcttagcaaacggcactccaggagattatatcctgtgcctggctcagtgggtcccatgcccatggaaccttgctca

SEQ ID NO: 514343 - DNA, 201 bp, Homo sapiens
gacagtgggtgcagcccatgggcaagctgaagcagggcagggcattgcctcacctgggaaacgcagggggttgggggatttccctttcctagccaagggamgccatgacagaccgtaccaggaaaattgggacattccagcttaatactgcacttttccaatggtcttagcaaacggcactccaggagattatatcctgtg

SEQ ID NO: 514344 - DNA, 201 bp, Homo sapiens
attttaggattttgattatacttatatacattaccctaaggaaaaataaagtttttataatattgaatctttctagaaagcatctaatatcccctctcctyattttttcaaatgtcttgcctgaaactatttcattttctttaaatataaggttaattctaggtagtttattttggatgaatattgtgatatcatgaatgt

SEQ ID NO: 514345 - DNA, 201 bp, Homo sapiens
tcctgcctcagcctcctgagtagctggtattacaggcacccaccaccatgcccggctaatttttgtagttttggtagagatggggtttcatgttggccagscttgtctcgaactcctgacttcaagtggccaaggcccacatcggcctcccaaagtgctgggattacaggcgtgagccatcacgaccagcctaaatattct

SEQ ID NO: 514346 - DNA, 201 bp, Homo sapiens
cctcctgagtagctggtattacaggcacccaccaccatgcccggctaatttttgtagttttggtagagatggggtttcatgttggccagccttgtctcgawctcctgacttcaagtggccaaggcccacatcggcctcccaaagtgctgggattacaggcgtgagccatcacgaccagcctaaatattcttacatgtagcc

SEQ ID NO: 514347 - DNA, 201 bp, Homo sapiens
gaagcattttacccattacttgaagatgagtgagtatatgtagtctcattttagatttatttttctttctatttatattagatttataagaattttatacmttttctttgaaaaatgtttcctaaatagaaaataataacctgaggttttggtttattaaaattttgtgctttttctgaaatcactgttggtagagttagg

SEQ ID NO: 514348 - DNA, 201 bp, Homo sapiens
gttaaacattaaaaagtctgtcaaatatcaagtgttggtgaagaagtaaaacaataggaacagtcattcactgctggcaagtgtatagattggtataactygttttgaaaaacatttggcattgtgtaatgaagtagaaagtgcacatatcctatggcttagaaatttgggtctaggttgttaaccttgggaaccttttgc

SEQ ID NO: 514349 - DNA, 201 bp, Homo sapiens
tcatttggaggagaggaggcactctggcttttggggttttcagcatttttttgttgattctttcccatcttcatgagtttgtctagttttggtctttgagrctgctgacccttgcatggggtttttatgggggtctttttgttgtttttggtgctgttgtcactttgtacttgtttttgtttcaatagtcaagtccctctt

SEQ ID NO: 514350 - DNA, 201 bp, Homo sapiens
tatgtgaaagagaagatacttggcaagatagttttaaaatgtatgtagagaagaacaaacacctacaaagagcctgcattttcccaaagagaaactaaaakgtatgtatgttttgagagctcttaacaattttcagtaattatttaataaaatatattttatataaaaatattttatttaaaatagtgtaatagtatactc

SEQ ID NO: 514351 - DNA, 201 bp, Homo sapiens
cggctgcagtgtggaggaggtgctgctggggctgtcacttcacggagcctatgggggccaggagcaggcaggagccccacgttcccgggcacagttgcagytgcctaagttggtgctgcagacccaggcctccctgtgctcttgggggccggaagcaggcaggagccctgctctcccaggtgcagctgtaggctcggaaat

SEQ ID NO: 514352 - DNA, 201 bp, Homo sapiens
ctcttctaaaacggttcttattccttttatttctaggcactgggattcaaatttagcaattgctcctatgtctaattcttatttactacctgcttcttaarttgttgtttgtaaggccatcctaatgggtattttttataggaattttttttttaaagcaaaactatactgagtatatcctctatttaagtctcattggta

SEQ ID NO: 514353 - DNA, 201 bp, Homo sapiens
tccctgacttaattgacttgtattttgaatgtaaataagaagtactagcaatgatagtgtgaggaggtagctgtagaaaaggtaggaagaaaaatagaaawaatatttgaatgcctacttaatatatattacatagatgatacatatatttaaatacattttgattatacttatcattgtaagaggacataatttaatcta

SEQ ID NO: 514354 - DNA, 201 bp, Homo sapiens
ttgttgaaaagacccttaaaagatatattaataacttgtatttgtttcaagaaaccataaaaattgactgtctccattataaattagcttaaaaataagaraaaaattgcataagtgcaagtgattagtagaagaaatttacaaagaaaatgagatcaaagggaactagaagagaaaggaaaggaaaagaccattttgaca

SEQ ID NO: 514355 - DNA, 201 bp, Homo sapiens
aacatgttaactactactagacatatgatagttttactttgctgttgcattagctacttaaaaaatttcatgacccaagttattggtagtattaaagaatrtaacttaaaaagctagtaagtacataaaattctgcaaatactgatttgttcttctcatggtataaaatagcattttttgttcctctttataccttacatt

SEQ ID NO: 514356 - DNA, 201 bp, Homo sapiens
ctgcaaaagatatgacttcattctttctgtggctgcatggtattccatggtatatatgtactattcagtccactgttgatgggcatctttgttgactccaygtctttgctattgtgaatagtgctacaatatatatccacatgcatatgtatttttggcagaagaatttattatcctttgggtatatatcatatagtagga

SEQ ID NO: 514357 - DNA, 201 bp, Homo sapiens
aatatacttgggattataccaacctaatagatttgaaaatttattgagccatgttgaaaatccaaatacaaccaagttgactcatacctagaaactatcarcatcttttttggtgatggtggtggtggtgatagtgtttttctcttttagattttaagcttactttcccaagatttatgacttttgtaggtctcttttggt

SEQ ID NO: 514358 - DNA, 201 bp, Homo sapiens
acatttaagtctttaatccatctggagtcagtttttgtatatggtaaaaggaggggatccagtttcaatcttctgcatttggctagaatgtcccagcactrtttattgaatagagagtcctttccccattatgtattatagttgactttgtcaaagatcaactggttgtcagtatctggctttctttctggtttctctatc

SEQ ID NO: 514359 - DNA, 201 bp, Homo sapiens
gaaagggagttcaattctaccacaagggagagccattgaatgagaacccattaaggatctttgcaaaaaattattgaaatggcaaaccatatctgtcagartaaagaatgatgtcaaaaaggggccacttggctggggtaacagaggaggcttagagaacagggaccccaaggtcttgatgagcttaaagagtgggtcctc

SEQ ID NO: 514360 - DNA, 201 bp, Homo sapiens
ttattcttgtgatagtgagttcttagaagatctggttgttttaaaagtgtgtagcacctctctctttgttgtcttcctcctgctgcagccatgtacgatgygcctgcttcctcctcaccttccatcatgattgtacatttcctgaagcttcctcagccatgcttcctgtatagcctgcagaactgtgagccaatgaaactt

SEQ ID NO: 514361 - DNA, 201 bp, Homo sapiens
taaaagttatatactagctgagctcttttgtgttcaagttataaaggaaagtttctttgaagatagcacagaattattcacttgtaatattatctgaacawtaatcattagtaagcattttatttttcctctccatttcttaaattacacagtagctaaccattaatatatttcatctgtatttcctctctcttaacattt

SEQ ID NO: 514362 - DNA, 201 bp, Homo sapiens
tcatatcatctgtgaagaaagattatttgacttcctcttttcctattcgatctcttttctttctttctcttgcctgattgccctggctaagacttccagtrctatgttgaataccaatgttgagaacaggcatccttgtcttgttccagttttcaaggagaatgtgtccagcttttgcctgtttattatgatattggctgt

SEQ ID NO: 514363 - DNA, 201 bp, Homo sapiens
ttcctttactttaagcctattgctgttacttctgagatggatctcttgaagacagcaaacatttgggtcttgcttctttatccgccttgacactctatacyatttaatcgaggcatttagcctgtttacattcatggtcgatattgctatgtgaggatttggtcttatcatcacgcttttagctggttgttatgtagactt

SEQ ID NO: 514364 - DNA, 201 bp, Homo sapiens
tgtatcatgtttatcttctgttttgcttttatacatcatttaaatgggaagtctttgcctaacacagttcttacatcttcattataggtgaagttttttttcctaaattgtgcttccaggagatttaatgtctaaaaatatatttcatctcgtctttttttttaacctatgtaaaatgatttaagtggttgcttatgacag

SEQ ID NO: 514365 - DNA, 201 bp, Homo sapiens
attatataatacgagtttttcaaggtgttagggattcattcattctactgcttatttatgtgtattaataacaccagacacaataattgcacatactttgraatttattgcaagtcacttaagttttatcatgggtatattcagaactgtctagactaaaagatggcactaggtaatttgagacgttttcatttctttttt

SEQ ID NO: 514366 - DNA, 201 bp, Homo sapiens
acaaaaagttaactgggtgtggtcgtgggtgcctctactcgggaggctgaggaaggagaattgcttgaacccgggaggcagaggttgcagtgcgcggagawcacaccactgcactccagcctgggtgacagtgcgagactgtctcaaaaaaaaaaaaaaaaaaaaaaaaaaaagagaagagccttattaataatatgaaga

SEQ ID NO: 514367 - DNA, 201 bp, Homo sapiens
gatgagttctaccctgagtttgaatgtgcttatctgtagttgggtaggtttccaaagatagatatttgtaaaaaatagatttctctatattactatttgtrttaaggatatgataaattaatatatcttcttttattttttgcagggagctattcatgccaagtacgatgcaattgataaagacactccaattcctacaga

SEQ ID NO: 514368 - DNA, 201 bp, Homo sapiens
atagatataacataacaaggttgtgttatgttgtagggtctgggaggttggccaaacatacttactagctaagtaattaatccatgacatttatgttctgrtatgtataattcaagagtttgcctcagcaaaatggcaaattgtcacttatcagagaccttcatcacagattgtcaaagacacagagaatttctcttaaga

SEQ ID NO: 514369 - DNA, 201 bp, Homo sapiens
tatgtaagttgctagtatttaatttaaccttttgaggtcttactgactgggaaattagtatgtacccaagatatttccaaggagaaagacatctgtacttytccaggttctatgattaaacctcttaactgtgtattctttacgacagaggcatgtgacttgaaaagtactagctctgttggggctgctagtaaaatatca

SEQ ID NO: 514370 - DNA, 201 bp, Homo sapiens
ttgatttacatgatactgacacatggtaggactgttcagcattccttgaggaagcactttccaatgaaatcagtgagctggcctttcattattgatagctrgtattgtaaatgcaaatttttctctgtcccgttctgcaaggggaatagtataagagcagccttttaagtcaataatgattataggccagtctcgaggaat

SEQ ID NO: 514371 - DNA, 201 bp, Homo sapiens
gggtatatttaaagtctctgatcaccactgggtggagatattacagaaattcatagaatgagcaatcctgtgatttgagagggaattagaaaaaaaaaaaatttaactagacttgaaaaacaatgaaaccttactgaaaatttttcagccaaagttaaataataaatttcagttaaatttaaaactaagacattatttgta

SEQ ID NO: 514372 - DNA, 201 bp, Homo sapiens
tattggtgggatcatgggaattaagagacaattctggaagtgattaaaatataactgactggctgggtgcagtggctcatgcctgtaatcccagcactttsggaggtcaaagagggaggatcacttgaggccagccatttgagaccagcctggtcaacgtagagatatcctgtctctacaaaaaacaacaacaacaacaaa

SEQ ID NO: 514373 - DNA, 201 bp, Homo sapiens
ttatgtgactttaacaatctgtttaagaagtgattacatatttaatactaggatatttttgaaatagttttatttctctcttgccgcaaaatgtgaccctktacaatatggaaaaaaaagaaactttctctaacaccttttccttccctagaggaagcaaattatttttgaaatgttgttcaaattatttataatgtccct

SEQ ID NO: 514374 - DNA, 201 bp, Homo sapiens
aaaataataacctgaggttttggtttattaaaattttgtgctttttctgaaatcactgttggtagagttaggaaaaaaaaagaaaattttgtaccttttgyccattttttttttttattgcttttgttctcttttacagccagtctaatttacctcattcaaacagcaataatgagttgtctgcagctgccacgctccctt

SEQ ID NO: 514375 - DNA, 201 bp, Homo sapiens
accttttgtccattttttttttttattgcttttgttctcttttacagccagtctaatttacctcattcaaacagcaataatgagttgtctgcagctgccaygctccctttaatcatcagagagaaggatacagagtaccaactaaatagaattattctcttcgacaggctgctaaaggtatggattctaaagtataaagtg

SEQ ID NO: 514376 - DNA, 201 bp, Homo sapiens
taatttgagacgttttcatttcttttttgatatcataggcttatccatataaaaaaaaccaaatctggaaagaagcaagagttgacattcctcctcttatragaggtttaacctgggctgctcttctgggagttgaggtaaggaaaaaagaaaaggttagaagctgattaattatgcaaagaaaggatggagaaggacagt

SEQ ID NO: 514377 - DNA, 201 bp, Homo sapiens
aacctgaacagacctataaccagtaatgagatggaagctgtaataaaaagtctcccagcaaagaaatgccctgggctagaggactttatagctgaattcckccaaacttttccagaaaagttagtgccaattgtactcaaactgttctgaaaaataaaggaggaaggaattcttctaagctcattctacgaggccaatatt

SEQ ID NO: 514378 - DNA, 201 bp, Homo sapiens
tatgaaagccctagatggcatcttcttccaatcaaaggctgcttcatttgcattgaaaatctgtttagtgtcatcagcaatcttagctagatattctggadaactgcagtttctccattagtacctgttgcttcaccttacacttttagttatggagacagcttcttttcttaaagctcatgaaccaatgtctgctagctt

SEQ ID NO: 514379 - DNA, 201 bp, Homo sapiens
tatttgaaattaaagtagagaataatagaattatatggaactacaagataatttattctgtatctctagcatataaattttaatctgtattagtttcatamgagaaacagaacaaattatatatataattatataagttatttatgtaagttatatgaatatataaaaaagaattgctgggaattggtttgcatgattgtg

SEQ ID NO: 514380 - DNA, 201 bp, Homo sapiens
ttttgctgagaactatttgacttttccacatatttggattacattagtctccagtaacagagcaggtatatgtgtagagttgatgtactgcaattttaatyaattttataacctgtttatagaaagtgagaagatgttcttaaggtttataaattagttctttcctttactaccaaaagtaagcacctgcacctgcaagaa

SEQ ID NO: 514381 - DNA, 201 bp, Homo sapiens
ttctttatccgccttgacactctataccatttaatcgaggcatttagcctgtttacattcatggtcgatattgctatgtgaggatttggtcttatcatcaygcttttagctggttgttatgtagacttaattgtatagttgcattatagtgtcaatggggtatgttcttaagtgtgtttttatggtgacaaatattgctct

SEQ ID NO: 514382 - DNA, 201 bp, Homo sapiens
catgattctctttggggagtattcttccttattttccctgtgaaccttctttttgattatcaaagtcgggtgggaactgatccgcttagaaactgtaatcrttctactgattgttgttctctgaggccagttcaacagcatggttagtcccgttagccctgtccactatattgctgtttactctgcttccctgacctgccc

SEQ ID NO: 514383 - DNA, 201 bp, Homo sapiens
aacaggagtgacatgctaaatcaatattaatgctaactgaaaaatatctggaattcttaaaattattcatatttgtttaaagtatttggggtagaaaaaasaaaggattatacactaagaatagggggtagagtattaagggaatatccagaagtcccacaggtgaaatagggtctttatggacatagctatgatcagaat

SEQ ID NO: 514384 - DNA, 201 bp, Homo sapiens
attaaatacgtcatctatgatgtacaaggcattgtatagaacactatattgccaatcaaagtgctagtaaaaataaaagtttaaaatgtgaaggcaatctygaagcatgactattcagattatttattgctactagtatcatatatttttattaaagagccatcacattccaaataagtcagtcaatatcatacttatcag

SEQ ID NO: 514385 - DNA, 201 bp, Homo sapiens
taaggcttcctgggagctttgcatatatggacaggcttattgacggatatattttgttttaggatggctgggtgaacagccaaatcttagctggggtcctrcaaattccggaattgtgaggagtttgctcttctcaccagtgtccatagcaactagtgtagttctcagtttgttcagcttctttagggaagaaccttatct

SEQ ID NO: 514386 - DNA, 201 bp, Homo sapiens
ttccccagagttttaacttcatgatccctgtgccatactaaggagattatttatgatatcaaggtcaaatgggtttttatttctttcctgccaagggcaaratatgctgtagttgagcatgctttatattttggagtatgtaatacatagtttttaaccgtccccactttcttaattgcctttctgctttctcctggggaa

SEQ ID NO: 514387 - DNA, 201 bp, Homo sapiens
ttagtcagtcgtcaaagtgtaacacccccttgagcagtaggagaaagtgaagcagaggaaggaagttacttgaggattgtcagtggctgcttttcaaggayccctgtcctggtttctatctatttgagacaaaaataacctcttgagagaatgtatatataaaataaatgaattagtatcattttcctgttgaagaaatgt

SEQ ID NO: 514388 - DNA, 201 bp, Homo sapiens
ttttatccattctcttgaatgtatgccattattctaggaaattttttatgactttcattcatgctctgtattttaaatgttctcaaggccaaccccagatsaattaatgaaggacaaagtattcagtgaggtatcacctttatataccccctttaccaaacctgccagtctgttttcatcttctctgagatgtgctgattt

SEQ ID NO: 514389 - DNA, 201 bp, Homo sapiens
gtggttttataaatataaaatcatgttatctgcaaacagagacaacttgacttcctctcttcctatttgaataccctttatttctttctcttgcctgattkccctggccagaacttcctatactgtgttgaataggagtggtgagagagggcatccttgtattgtaccagtttttaaagggaatgcttccagcttttgccc

SEQ ID NO: 514390 - DNA, 201 bp, Homo sapiens
aatctgggtgctcctgtattgggttcatatatatttagaatagttaggtcttattaaattgaaccctttaccattatataatgcccttgtctttttttttwaatcgttgttggtttgaaatctgttttatctgaaattaggattgcaatccctgcttttttctgttttttatttttttggtagatttttctccatcccttt

SEQ ID NO: 514391 - DNA, 201 bp, Homo sapiens
aagaacaaaaataaaattaattccactactcagaaataaccacttttgcagtttctgtgtggtgtgtgtgtgtgtgtgtgtgtgtgtgtgtgtgtgtgtgkatttagcgcaaaagtggtccataattaatttatagtattacagggtcttttttcccttgataatatataatatccccttaataatatatcctgaacattt

SEQ ID NO: 514392 - DNA, 201 bp, Homo sapiens
aatatgtgctaagtgaatgcattactgatggtcatctaccctgttaactaattttttacatgcctttgccttattctcttttagccttggcttatgcatgyatgtctgcttttattcccaaatacctgtataacttcttcttaaaagacaactcacatgtaatacaaggtaagcaaatgtcttccatgtctttctacagag

SEQ ID NO: 514393 - DNA, 201 bp, Homo sapiens
ccctatctttgacatgtggggattactacagttcaaggtgagatttgggggggacccagctagtccatatcaatctgaatttaaagataatatttattatytttttaacatctctgcatgtttttcagtgccagatctattacctattataagtatagtcatgacttctcatttggaaagtctttttacattgctgtaaac

SEQ ID NO: 514394 - DNA, 201 bp, Homo sapiens
aacttaacactacattctcttttattttaaccaataaagtagaccaaaacatagaacttacatttaccatttagtttattggtaatcattctaattatctyttttatttcctttttatccattccctgtacccctttttccactcatagctctatgccatcccttggtttcttaccatgtttactcgtaagtatgacttcc

SEQ ID NO: 514395 - DNA, 201 bp, Homo sapiens
agcagatttagtaagtatttttatgtgtttctaacataatagagttaggtagaaaagaatttcagttgttctgatccctgaatatcaaagtgagaattctrtaaaataaaaacctattggacatttcatgatatttgtacaaactctgcccccctttgaaaaaaaattaactataatatttacataaagcttataagggca

SEQ ID NO: 514396 - DNA, 201 bp, Homo sapiens
tcctgcctcagcctcccgagtagctggcactacaggcacccaccaccacgcccagctaattttttcgtatttttagtagagacggggtttcaccatgttaracagggtggtctcaatctcctgacctagtgatctgcccgcctcggcctcccaaagtgctgggattacaggcgtgagcctccgcacctggccaggattaac

SEQ ID NO: 514397 - DNA, 201 bp, Homo sapiens
agagactgattaaatagttataaccaaaatgctgatagctgtatggacaataaagtccaggctgattaagtcttaggtggaaatgagagagttattgggamctggagttaagattacccatgttacaccctggcaaagaacttgacaacagtgtgttcatgtcatagggatctgagtttaaacttaattatgatgacaaga

SEQ ID NO: 514398 - DNA, 201 bp, Homo sapiens
ctggcagaaaaaaaaaatctaagcagcaaagcattcaagaagtggtatggcttcttctaacaccctaagtcatatatggaagcaaataaaagacttaaagytatatttaaaagggaagcagagcataaaaatttggaaaacttgtagcccagccctatggtagaaaaaatccaagcaggctacagagcaaccatttgctag

SEQ ID NO: 514399 - DNA, 201 bp, Homo sapiens
tttatgtgtttctaacataatagagttaggtagaaaagaatttcagttgttctgatccctgaatatcaaagtgagaattctataaaataaaaacctattgkacatttcatgatatttgtacaaactctgcccccctttgaaaaaaaattaactataatatttacataaagcttataagggcaactattacaatcaaatcag

SEQ ID NO: 514400 - DNA, 201 bp, Homo sapiens
gaatctgggtgctcctgtattgggttcatatatatttagaatagttaggtcttattaaattgaaccctttaccattatataatgcccttgtctttttttttaaatcgttgttggtttgaaatctgttttatctgaaattaggattgcaatccctgcttttttctgttttttatttttttggtagatttttctccatccctt

SEQ ID NO: 514401 - DNA, 201 bp, Homo sapiens
aaattaccttatagttaatccaccagtcactaaccccagcccacataaaaaaaaaaaaaaaaaaattcaatctgatttttggtgctgttcttgtaaatatrtagaatcaaagatcacaaaatctctgaggaaagcttccaattaagatacagaatagtataaactgaaaaaataatttattcagaaagataactatgagaa

SEQ ID NO: 514402 - DNA, 201 bp, Homo sapiens
tcctgggttttttttggttggtaggctatttattactgattgaacttcagagatcattattggtctgttcagggaatcagtttctttctggctcagtcttyggagggtgtatatgtccaggaatttttccatctcttctaggttttctatttgtgtacatagagcatatggttattttcatttctgtggggtcagtggtta

SEQ ID NO: 514403 - DNA, 201 bp, Homo sapiens
taaaatatttgaaacaaagtttatctctgtcctgtcagaagtttttgatataacaatttacctgtagttttgcttgatttttcattattattatttttggrttagatgtgctggaaatcaggaaaaaagatgaaaactgacttctggatgtattgtggtgatgataaaagtataccattgcatttgtattaaattttttat

SEQ ID NO: 514404 - DNA, 201 bp, Homo sapiens
tttttactgtgtctctgccaggctttggtatgaagatgatgctggcctcatagaatgagttaggtataagtcccttcttctcaatttttttggaatagtcwcagtaggaatggtaccagctcttccttgtacatctggtagaatttggttatgaatccatcaggtcctgggttttttttggttggtaggctatttattact

SEQ ID NO: 514405 - DNA, 201 bp, Homo sapiens
agctttttgatgtgctgctggattcagtttacaagtatttcattgaggatttttgcatcgacattcatcaaggatattggcctgaagttttccttttttaytgtgtctctgccaggctttggtatgaagatgatgctggcctcatagaatgagttaggtataagtcccttcttctcaatttttttggaatagtcacagtag

SEQ ID NO: 514406 - DNA, 201 bp, Homo sapiens
ttgcatgttgagccaatcttgcatcccggggatgaagcctacttgatcatggtgaagcagctttttgatgtgctgctggattcagtttacaagtatttcaytgaggatttttgcatcgacattcatcaaggatattggcctgaagttttccttttttactgtgtctctgccaggctttggtatgaagatgatgctggcctc

SEQ ID NO: 514407 - DNA, 201 bp, Homo sapiens
tgctgaaagaattttcttaacagtgaaatctgatcatatatttttaccacactgccacataaagcccaagaaattcagctgacaagacagatttagcattwtcaagaaatcccatttgccctgaaaaagctgtcctccattgtactgaacagacagtcctgtcgattgtgttatttagaaacatacactgaatgtgggctg

SEQ ID NO: 514408 - DNA, 201 bp, Homo sapiens
tttagctctttgaggaatcaccctactgctttccacaatggttggactcatttttactcccacaaacagtgtgtaagtgttcccttttctctacaaccttrccagcatctgtttttttgactttttagtaatcgccattctgactggtgtgagatggtatctcattgtggttttgatttgcatttctctaatgatcagtga

SEQ ID NO: 514409 - DNA, 201 bp, Homo sapiens
tatttgtaaaaaatagatttctctatattactatttgtattaaggatatgataaattaatatatcttcttttattttttgcagggagctattcatgccaastacgatgcaattgataaagacactccaattcctacagatagacaagtatgatttaggttttcttaagcaacctaagataattctgccaaatatttaaatt

SEQ ID NO: 514410 - DNA, 201 bp, Homo sapiens
ctgttgtcttattttaagaagctgccgtagccacagccacctcagccttcagcaaccattactttgattagttaaaagtcctcaacattgaggcaagaccstccaccagcaaaaagattatgacttgctgggggcttagatgaccgttagcatattttagcaataaagtattttttaactattattttaggtttggggata

SEQ ID NO: 514411 - DNA, 201 bp, Homo sapiens
ccattaggcagtgccctacagaggtcctccatgagagctctgccccagcagcaaacttttgcatggacgtccaggtgtctcaaacatcctctgaaatctargcagatatttctaaacctcaattcttgacttctgtgcacttctgtgcagcacaggcccaacactacatgtaagccaccaaggcttggggcttgcaccccc

SEQ ID NO: 514412 - DNA, 201 bp, Homo sapiens
tgcccagatttcatattgtttaaacacacatgctctacaatttatgcagttaacgcaattatcacagggtcctgaggggacatacatcctcctcggcttaygagatgacaggattaagagattaaagtaaagacaggcataggaaatcacaagggtactgattggggaagtgataagtgtccatgaaatcttcacaattta

SEQ ID NO: 514413 - DNA, 201 bp, Homo sapiens
ctctcttgtttcctaaacattgctgttatcctgttcttttttcaaggtgcccagatttcatattgtttaaacacacatgctctacaatttatgcagttaaygcaattatcacagggtcctgaggggacatacatcctcctcggcttatgagatgacaggattaagagattaaagtaaagacaggcataggaaatcacaagg

SEQ ID NO: 514414 - DNA, 201 bp, Homo sapiens
tcccttgtgctgttctccatattttcaggcaggcccaagttactgctgataataaacacacttaaaattatcccagaatcaaatttgcctgaaaaccaaawaaaaaacaaaaggaaggtcccttaagattatgtctttattaattactctcaagaaaaataagaaacctactgccagccctcatttttatgtttaatggat

SEQ ID NO: 514415 - DNA, 201 bp, Homo sapiens
ttcacaaatgggttgcggatctattccttcccattcaggggtcctttgtggttgggaagtaatgcttaaactcttttgaaagctgagataggtgatctgcrccagttgggagaaagaaggccctggctcagcctctttcaaaatctctgctaatgtttgaaacatgtcagaaatcccagtgttcacttgccacccccataa

SEQ ID NO: 514416 - DNA, 201 bp, Homo sapiens
ctggtattacttacatgcagtatgtaaatgagcaataattattgttaagttctttgaatacctcattatgaatacatatactaacccaagattttattaawttaatttttttatttacataatgctaactgcttgtatatactattaccataaaaatgatagcatttattgcattaccttcagtttataaggtatgctttc

SEQ ID NO: 514417 - DNA, 201 bp, Homo sapiens
ctgctgacccagcattgtaaatacaaatctgggtcatacccgctcactgtgatttacttccatcttggtaatgctactaaatgggtaaaatgccaggaagktgggggcaatatcatatttgctcttttgcttaggacaggggctgtttctcttcagtgatggaaagtatagaaaggccacttgggaaggtgtttaagaatc

SEQ ID NO: 514418 - DNA, 201 bp, Homo sapiens
gaatcttataatgacatacttctatttactcctctcatcttttgggtagttttgttatacattttatatttacttttacatatattatacatttcaccatrtatctgtactatttttggcattaaagtttctttaaagactttgagaaatgaagaaaaaattcttttccatttaattatgtatttgccatttcatgaactc

SEQ ID NO: 514419 - DNA, 201 bp, Homo sapiens
tatgagaggtttaacctgggctgctcttctgggagttgaggtaaggaaaaaagaaaaggttagaagctgattaattatgcaaagaaaggatggagaaggasagtgctttccaaatatatatttttctagttattagaaaattatatagtaaaatataagcattagaatatttggcaattttaagtggaaagaatataggaa

SEQ ID NO: 514420 - DNA, 201 bp, Homo sapiens
tctatttagttaacatgtttattttctcaaaattttttctaaaagtacctattttgtttaattttttatgtttatagaattctgtacataaaatatttttratttttgttcttttttatctgaaatgtctacatttttaatattgtttatttgaaggttcaaatatattagtataatagaaagcagatacaaaaataatgt

SEQ ID NO: 514421 - DNA, 201 bp, Homo sapiens
gctttcaaatccttaaaaccatcacccatcccagactctgccagtatgtggatatttctaggggaaagcatggtaagttattttcttttttttcctatttrtgttctctactttgttaccctaagttataaatactatatccactaaatatataaagctatcatcagtaccagtgcacacatgtccttctttctctcatcc

SEQ ID NO: 514422 - DNA, 201 bp, Homo sapiens
gtaggtagaaataccaggttattcaatgggacctactagactattcagttaagtgaacccataattgggatttaaattttaaacttttaccctgtacttayccacgcgattggtttgctttgcttatattctattacatctttgctatatgcaaaatacccttaactgtagttaaaagttaaagaggccaggcgaggtgac

SEQ ID NO: 514423 - DNA, 201 bp, Homo sapiens
ttttaaataaggagatgtgttctattctgtggcatttaaataatgatactctgaaatatatacatatgtatatgtagataattccaagtaaaagacacacrtgaaaacataagtagatacatttacaaatatatataagcaaattataccaaatatttccatcaatccagtcataaatatgctgattaatatatacattgt

SEQ ID NO: 514424 - DNA, 201 bp, Homo sapiens
tagatgccaaatatacaaaaatgagtaactcattaccccaggtcccaagtcagcttcagaaacagtagagaaaaatacaaccatgataatattaaataatmcagtaatagttgttataataggtgatgtacaatgtgctatgctatgctatggaagtacaaagaagagaatgttaattttgcgttgaagaatatcaaggcc

SEQ ID NO: 514425 - DNA, 201 bp, Homo sapiens
ggattgcacacaaataaatgttttccttaaactttccttctcagctttattcgtggtcacatttcaggaagcatcaacattccattcagtgctgccttcaytgcagaaggggagcttacccagggcccttacactgctatgctccagaacttcaaagggaaggtcattgtcatcgtggggcatgtggcaaaacacacagct

SEQ ID NO: 514426 - DNA, 201 bp, Homo sapiens
tagccctcagagtgaacaaagctcacaaggctgtgaggaagagacaatagaagggtttgcctgagactcatagccaaagctctgtgactttcaaaatgagactggggaaataatcccctgctgttactatgtgattcaaggcacctggtcactttctttccttactttctttgtaacactaaaggacagtcttctcttctt

SEQ ID NO: 514427 - DNA, 201 bp, Homo sapiens
ttttggtgctgttcttgtaaatatgtagaatcaaagatcacaaaatctctgaggaaagcttccaattaagatacagaatagtataaactgaaaaaataatwtattcagaaagataactatgagaaaattaactatgaaaaaacagaacttttaaacataacaatgaaaattgttgaaaatctggaaattgatttttttttc

SEQ ID NO: 514428 - DNA, 201 bp, Homo sapiens
aaactttttttctttatgaatacccagtctcaggcaattatttataacaatgcaagaacagactaatacacttccttttcatgagcatggaacatttttcyatttgtttatattgtctataatttctttcaccagtgtctcataactctcctggtagagatctttcaccttcttagttagatatattcctagatatttttg

SEQ ID NO: 514429 - DNA, 201 bp, Homo sapiens
tctaggttgttaaccttgggaaccttttgcagatgtataccatacatggcattctgtgcaacgttgttcataatgttaataataaaaagcaggaaacagcytaaatgccattgccatttgaatgtataaataatgttatgttcatataatagaaataagaatttaatggatatagcttcatccaacaatatagataatctt

SEQ ID NO: 514430 - DNA, 201 bp, Homo sapiens
attttggatgaatattgtgatatcatgaatgtaagcttttgtctattatattttctgcctactgctgctgtatagaaaagctaatcattttgttgtgtgtmtgttgtaactaaaccctaatgaaattctttgcagttttattggattttcctcggattattctgggttttctaggactatatgcatcttgatttcagtaac

SEQ ID NO: 514431 - DNA, 201 bp, Homo sapiens
gatagctcttattattttgaaatacgtcccatcaatacctcatttattgagagtttttagcatgaagggttgttgaattttgtcaaaggctttttctgcakctattgagataatcatgtggtttttgtctttggctctgtttatatgctggattacatttattgatttgtgtatattgaaccagccttgcatcccagggat

SEQ ID NO: 514432 - DNA, 201 bp, Homo sapiens
ctgtgacattgtcgttatgccagctaagaaatgtaagaaagatattttgacagttctgctttaggtttttttctttaattaaaaccttacagatacacaaraaatcttgtatgcctctttgatttcacaaaatatgggagagcttctgtaaaatatgtgccccagagtagaattgcatctgtacaacttcagctttattac

SEQ ID NO: 514433 - DNA, 201 bp, Homo sapiens
tgattgtctcaaactttgtaatttcagagtatctgactgtcttctctcagatgattgcatttcatgatccagagctgagtaatcatctcaatgagattggyttcattccagatgtaagtacttggtgcattaatagaacatgtggttaaaaaaaaaaagcagaaattattagcacagaagagtgtattttcttaatttttg

SEQ ID NO: 514434 - DNA, 201 bp, Homo sapiens
cataagtagatacatttacaaatatatataagcaaattataccaaatatttccatcaatccagtcataaatatgctgattaatatatacattgttttttttactgacattttttctaataacttatcatcttagccatatttagatatattcacttaggagagatggtgtttattacattaaaagagcaatctaaattcta

SEQ ID NO: 514435 - DNA, 201 bp, Homo sapiens
acctcatagagttggaatcatatagttttggtcagattttttttttcttcttaaggctaaataatacctattttgtatatataccacattttgtttatccrttcattcatcagtagacacttgggttactcccacattttagcgattgtaaacaatgctgctatgaacatgggtgtataaatatctcttcaagattctggt

SEQ ID NO: 514436 - DNA, 201 bp, Homo sapiens
tacttaggagtcttctaacaaaataaccatgtccccaaattaccttatagttaatccaccagtcactaaccccagcccacataaaaaaaaaaaaaaaaaaattcaatctgatttttggtgctgttcttgtaaatatgtagaatcaaagatcacaaaatctctgaggaaagcttccaattaagatacagaatagtataaact

SEQ ID NO: 514437 - DNA, 201 bp, Homo sapiens
tagccagttattccatcaccatttattgaatagggagtctttttcccatttcttgttttctgtcagctttgtcagagatcagatggtcatagatgtgtggycttatttctaggctctctattctgttccattagtctatgtgcctgtttctgtactactgccatgctgttttggttactgtggccttatagtgtagtttga

SEQ ID NO: 514438 - DNA, 201 bp, Homo sapiens
gcttgttctccgtgaattctaatactggttgctctaatatagtttatataggtttctgaatatgtacaaacccttttaagttaaatatatatgcatttatktgtatttgtagggatcttttctaatttttttattgtgataaaaatacacacaacgtaaaatttaccaccttaaccattttaagtgtacagttagtggtat

SEQ ID NO: 514439 - DNA, 201 bp, Homo sapiens
aagggtgtaaaccctaagccttgcagtttcccacatggtgtttggcctgttggtgcatagaagtcaaaaatcgaggtttgagaacctccacctagatttcrgaggatgtatggaaatgcctggatatccaggcagaattttgctggagaggcagagccctaacagagaacctctgctaaggcagtgcagaagggaaatgtt

SEQ ID NO: 514440 - DNA, 201 bp, Homo sapiens
tggaggttttagcagtggtccttctctcccccacccatctgtaaaaattacatataaacattaaaatctggatggcatattaaagtcttgtgagtttaaarttagttaaggataagtgagaaagtagttaatttgtttatattggcatggtgtatagtcactgaaataaaactttatgaaaaattacttttaaaacctcag

SEQ ID NO: 514441 - DNA, 201 bp, Homo sapiens
agaggccaaggcacagctcagacccttgcttctaagggtgtaaaccctaagccttgcagtttcccacatggtgtttggcctgttggtgcatagaagtcaaraatcgaggtttgagaacctccacctagatttcggaggatgtatggaaatgcctggatatccaggcagaattttgctggagaggcagagccctaacagaga

SEQ ID NO: 514442 - DNA, 201 bp, Homo sapiens
caaacaaatagccactcaattgatatgttttaatataagtaaaaatgtcctcaaatgtaatcttgctttattgggagttatcaattatattattttgaaarctaccttttggtcttatctgtatttataatcactagggattcttatgttcagttgttcaggacaatgatgacaaagtaaacgctagccacccaggccctg

SEQ ID NO: 514443 - DNA, 201 bp, Homo sapiens
aggacagtttactgagtccactgattcaaatgctgatcttatctggaaacaccatcacacacaaacacacacacacacacacacacacacacacacacacatttaaccagatacctaggtatcacctgatgcagtcaattaactaacacaaggatctttaaaatctcagaaatattctgtacaaacctgtaaagtaaaata

SEQ ID NO: 514444 - DNA, 201 bp, Homo sapiens
aaacaaatagccactcaattgatatgttttaatataagtaaaaatgtcctcaaatgtaatcttgctttattgggagttatcaattatattattttgaaagytaccttttggtcttatctgtatttataatcactagggattcttatgttcagttgttcaggacaatgatgacaaagtaaacgctagccacccaggccctga

SEQ ID NO: 514445 - DNA, 201 bp, Homo sapiens
gaggacagtttactgagtccactgattcaaatgctgatcttatctggaaacaccatcacacacaaacacacacacacacacacacacacacacacacacacatttaaccagatacctaggtatcacctgatgcagtcaattaactaacacaaggatctttaaaatctcagaaatattctgtacaaacctgtaaagtaaaat

SEQ ID NO: 514446 - DNA, 201 bp, Homo sapiens
tattatatatatatatatatatatatacacacacacacacacacacacacactcagatatgttttctgtgtacacacacacacacacacacacacacacactcttcagtaattagcaaagatttgaggggaatcttcagcagacttctggagctttctctatgcatctctctctctggcagaatcttccaggacactctcc

SEQ ID NO: 514447 - DNA, 201 bp, Homo sapiens
gtattatatatatatatatatatatatacacacacacacacacacacacacactcagatatgttttctgtgtacacacacacacacacacacacacacacactcttcagtaattagcaaagatttgaggggaatcttcagcagacttctggagctttctctatgcatctctctctctggcagaatcttccaggacactctc

SEQ ID NO: 514448 - DNA, 201 bp, Homo sapiens
tgtattatatatatatatatatatatatacacacacacacacacacacacacactcagatatgttttctgtgtacacacacacacacacacacacacacacactcttcagtaattagcaaagatttgaggggaatcttcagcagacttctggagctttctctatgcatctctctctctggcagaatcttccaggacactct

SEQ ID NO: 514449 - DNA, 201 bp, Homo sapiens
aaaggtcttaaagtggcctaaagggccttacgtcttctgactcatagctatctctctgagcttatctcctgtcactttaatctttgctcattctactgcaygcactgaatacctgctgactttataccagttcaggacttgcttgctgtggcctctgcccgaatcatacattttccagagacctacctgtcttttttactt

SEQ ID NO: 514450 - DNA, 201 bp, Homo sapiens
aaaactatttcagacttgtgtatatttactcttgattccttgacattaaagttctgtattatgatggttagtttagaatgctttctagcaacagttgttartttaattgcatgagacttttacatagatcttaccacattgattgtaaaaatgtactatcgcttctttccctgttgtaatttttcattattttaatgtatc

SEQ ID NO: 514451 - DNA, 201 bp, Homo sapiens
aacacttggaagcctagaggactgtgttaaaaacacagagagaagcaaataaaggagctaatgctggagggagacatgaaggttttaaaactatttcagayttgtgtatatttactcttgattccttgacattaaagttctgtattatgatggttagtttagaatgctttctagcaacagttgttaatttaattgcatgag

SEQ ID NO: 514452 - DNA, 201 bp, Homo sapiens
gggatatgtaatagtcataatatattcatctcattattggtaatagcaaaagaatggaagttccaaaatgtttttgtttcatcaaattaagtacatcaatkaaattattgggagttttcaaaaagaatgaggaaactctatacttgtgtttttaaagaacaatctctaaaatacactttaagtggaaaaaaggtatatagc

SEQ ID NO: 514453 - DNA, 201 bp, Homo sapiens
taagactccatatggcctggaatacatctagatatccaggtatgtgtggatctcaaaagtgaacaatgcttacatcaaactagaatgtaatgacccttagrtgtataaaatgtttaaatgataactattatgcaacactttctaaaatgttatttcaccagtaatttttctttagtggagctgactttaaaaatccattaa

SEQ ID NO: 514454 - DNA, 201 bp, Homo sapiens
ctgtcattatgttgaaacaaactatttagtacctagtcagctatttgaaagatgttacctgccttaccaatatgcctactttggctttttgttttgttttatttttttgtttttgtttttgtttgagacggaatctcactcttgttgcccaggctggagtgcagtggcatgatctgcattcactgcagcctccacctccca

SEQ ID NO: 514455 - DNA, 201 bp, Homo sapiens
ccattaaaacttttggagataaataaagatgcctgataaaatcagtttcagctataaggggagaaaaatgccttcctagaaaaaacatgtaaatattaatrgaaatttcttttctcattttatttagggaagaaaattatttcagagcttggatatttctgaaagactaaaatttttgcttactttgggtaagtgtcgtac

SEQ ID NO: 514456 - DNA, 201 bp, Homo sapiens
ataagtgtctggccagagagtattttgatcatttagttgacatcctttggttatctagtgaggagagtgatgtgggggcaaggagaatattccaagtgacmaggaggaccagagcaaaaatgctagcactaatcactttagtatacaaggaagaggataagggtgagagtgaagggtaatatagtcagcagcccaattcaa

SEQ ID NO: 514457 - DNA, 201 bp, Homo sapiens
tatagaatgggagaaaatttttgcaatctactcatctgacaaagggctaatatccggaatctataaagaacttaaacaaatttacaagaaaaaatcaaacaaccccatcaaaaagtgggcgaaggacatgaacagacacttctcaaaagaagacatttatgcagccaacagacacgtgaaaaaatgctcatgatcactggt

SEQ ID NO: 514458 - DNA, 201 bp, Homo sapiens
ctatagaatgggagaaaatttttgcaatctactcatctgacaaagggctaatatccggaatctataaagaacttaaacaaatttacaagaaaaaatcaaacaaccccatcaaaaagtgggcgaaggacatgaacagacacttctcaaaagaagacatttatgcagccaacagacacgtgaaaaaatgctcatgatcactgg

SEQ ID NO: 514459 - DNA, 201 bp, Homo sapiens
cccattgcttgtttttctcaggtttgtcaaagatcaggtagttgtagatatgcgacgttatttctgagggctctgttctgttccattgatctatatctctsttttggttactgtagccttgtagtatagtttgaagtcaggtagtgtgatgcctccagctttgttcttttggcttaggattgccttggcgatgtgggctct

SEQ ID NO: 514460 - DNA, 201 bp, Homo sapiens
agtaatacatcttactgtttcccttcgtactcttcttctcaaccaaagcaaaaattatattttcctcctccaaatgcctatattatactgtaaccctctartagtaagatatctttcccccttcaggcttataattgttagtctacagttatagaattaaggaaggaattgtttatcttctctagttaacgtttttgacat

SEQ ID NO: 514461 - DNA, 201 bp, Homo sapiens
taacagtggccattgttagaaagaggtctgcagagtggcctcagttaaccctcttgtaaatgggctagtggctccgttttctttaatgcttttttttttttagctctttataagcattaaaagaaatgattgccttgttgatcttgcattaccaggcaggctaagagctccccatctaatgctgcttgcgtaagacagcat

SEQ ID NO: 514462 - DNA, 201 bp, Homo sapiens
ttgctgctattttgattgggattacattgaatctacatatcaatttgggaagaactgttgacaatacaggttgattgtctcttttcaaagatgcttgggamcaaaagtgcttcagatattttatttgttctgattttggaatatttgcattatacttactgattgagcattcctaatccaaaaatacaaaatccagattgc

SEQ ID NO: 514463 - DNA, 201 bp, Homo sapiens
tttatagcagaaaaacatttgttaaaaagactgacttttccattttattgcctttgttcctttcacagattagttggttgtatttatgtgggttgatttcygaactctctattctttttcattgatgtttgtctgttcttttgccaatactatgctgttttgatttataatttgtcttgaagctcagaagtgtcagtcctc

SEQ ID NO: 514464 - DNA, 201 bp, Homo sapiens
ttgtattatatatatatatatatatatatacacacacacacacacacacacacactcagatatgttttctgtgtacacacacacacacacacacacacacacactcttcagtaattagcaaagatttgaggggaatcttcagcagacttctggagctttctctatgcatctctctctctggcagaatcttccaggacactc

SEQ ID NO: 514465 - DNA, 201 bp, Homo sapiens
ctgagcgctgcttcctgtcagattagcagcagcattacagtctcataggagcacaaatcctcttgtgaactgcgcatgtgagggatctaggttgcatattmcttatgagaatctaatgcctgatgatctgtcactatctcccattatccccagatgggaccattaagtagcaggaaaacaagctcagggctcccactgatt

SEQ ID NO: 514466 - DNA, 201 bp, Homo sapiens
gaactattcttggcattttatgatcttggcattttttcactctgatcatttgaagtggtttctgccctactttgtattatatatatatatatatatatatwcacacacacacacacacacacacactcagatatgttttctgtgtacacacacacacacacacacacacacacactcttcagtaattagcaaagatttgag

SEQ ID NO: 514467 - DNA, 201 bp, Homo sapiens
cggagcttgcagtgagccgagattgcgccactgcagtccgcagtccggcctgggcgacagagcgagactccgtctcaaaaaaaaaaaaaaaaaaaaaaaaatcattgtttgtctgtcattctttcaaataaacatagtatttcttgcagaaaccatcaatattagctcacagatgattacccaagtgctttacctctttgt

SEQ ID NO: 514468 - DNA, 201 bp, Homo sapiens
gtaaaactgtcagttcactttactagaattcattctgaatcagcaatcaacatcttctaaatcttttgtctacctattcccaaattgtattctccccctayaacttttgtttcacattggaaaagtggaaacatcagcataaatttggcagatttttaaataaggagatgtgttctattctgtggcatttaaataatgata

SEQ ID NO: 514469 - DNA, 201 bp, Homo sapiens
aataaattaataacaaaagttagctgcttggtgatggggatgcaagtggtagcgtgggtgcaaaggaaattgttttcttgttacatttgacattaaaaaawtttttttaacactgtgaatgtattattcattcaaaagttaagctgaaggcacctgacctcaagcaattataattttttaggaagatactttattaaaaat

SEQ ID NO: 514470 - DNA, 201 bp, Homo sapiens
gacattggagctctacctttaataactcagaagaaaaaaattcaaccctagaatgctgtatctggtcaaactatcagtcaagggcagattaatgatattcrttgaaggtttttgaatagtttacctcctgtgtactctttctttgtagctgctggataatgtgtttcatcaaaatgagaagtaaatatgaaagagtggtaa

SEQ ID NO: 514471 - DNA, 201 bp, Homo sapiens
tgctggtttaaagtctgttttatcagagactaggatcgcaacccctgcctttttttgttttccctttgcttggtagatcttcctccatccttttatttttrgcctatgtgtgtctctgcacgtgagattggtatcctgaatacagcacactgatgggtcttgactctttatccaatttgccagtctgtgtcttttaactgg

SEQ ID NO: 514472 - DNA, 201 bp, Homo sapiens
aaaacatacacatagatcaatggaatgggttagagaacgcagaattaaagccacacacctacagccatctaatcttcaacaaagttgacaaaaataagcartgaggaaaggattccctattcagtaaatggtgctgggatagctagctagctgtatgcagaagattgaaactggagcgcttcctttcatcatatatgaaga

SEQ ID NO: 514473 - DNA, 201 bp, Homo sapiens
ttctctggagtagtagagtcactgagtcttgagactcagagccaataggcatagcagagagcaggagtgagtgaatgtatatagttatacaggcccctccyatggtcatatctgggaaggctggcaaggatgagcttagaagatcagagaattatctggaaaaactcaatgttcccagaaggagaaatatcttacttagga

SEQ ID NO: 514474 - DNA, 201 bp, Homo sapiens
ctcttcttgttgaattgatccctttaccattatgttatggccttctttgtctcttttgatctttgctggtttaaagtctgttttatcagagactaggatcrcaacccctgcctttttttgttttccctttgcttggtagatcttcctccatccttttatttttggcctatgtgtgtctctgcacgtgagattggtatcctg

SEQ ID NO: 514475 - DNA, 201 bp, Homo sapiens
tttattaaagacttaaatgtaagacatgaaactactagaccacgttgtggaaatgtctcacaacattgatctactaggcaaggatttttgaggtcagaccrcaaaaacacaggcaaccaaagccaaagtagacaaatagaattacatcaagctaaaattcttcacagcaaaggaaacaatcaacagagtgaagaaacaacc

SEQ ID NO: 514476 - DNA, 201 bp, Homo sapiens
tataaattaccttgggcagtatggccattttcacaatattgattcttcctacccatgagcatggaatgctcttccatttgtttgtatcctcttttatttcmttgagcagtggtttgtagttctccttgaagaggtccttcacatccccttgtaagttggattcctaggtattttattctctttgaagcaattgtgaatggg

SEQ ID NO: 514477 - DNA, 201 bp, Homo sapiens
aaaataaaatatgtaggaacaaatttaacaaaagaagtgagagatctccacaatgagaacaaacactaatgaaataaattatagagggcaataaaaaatgraaagatatcatgtgcttatagattagaagaattaataatgttaacatgttcatgctacccaaagtgatctacaggttcaatgtaatttctatcaaaatac

SEQ ID NO: 514478 - DNA, 201 bp, Homo sapiens
acagttatttgattataatataaaagtatgcatctagactctgcaaaagagagctgtattattttctgtgctaatgaggtatttaagacttttatccattmtcttgaatgtatgccattattctaggaaattttttatgactttcattcatgctctgtattttaaatgttctcaaggccaaccccagatgaattaatgaag

SEQ ID NO: 514479 - DNA, 201 bp, Homo sapiens
tacatgtgccatgctggtgtgctgcacccactaactcgtcatctagcattaggtatatctcccagtgctatccctcccccctccccccaccccacaacagkccccagagtgtgatgttccccttcctgtgtccatgtgatctcattgttcaattcccacctatgagtgagaatatgcggtgtttggttttttgttcttgtg

SEQ ID NO: 514480 - DNA, 201 bp, Homo sapiens
tcaccatggtcaagggggattcatcccaggaattcagtgatgattcaacatatgcaaatcaataaacatgctacatcacttaacaggatcaagaacaaaayccatatgattctttcaatagatactagaaaagtatttgataaaattcaacattccttcatgataaaaattctcaaagaactgggtataagaggaccacac

SEQ ID NO: 514481 - DNA, 201 bp, Homo sapiens
cttaatttgtttcttcaatttaaatataatccaagttaaatgaatgtaggcttcaaatctaaatgtctcaattcctttacagttctacttgtgaaatttamaatactcttcttctgtagttattaagaaatattaatttgctgaatcttaaaatgatatggaaaccatataataatttttatctttagtgttttcattcac

SEQ ID NO: 514482 - DNA, 201 bp, Homo sapiens
tgcgggttagttacatacgtatacatgtgccatgctggtgtgctgcacccactaactcgtcatctagcattaggtatatctcccagtgctatccctccccmctccccccaccccacaacaggccccagagtgtgatgttccccttcctgtgtccatgtgatctcattgttcaattcccacctatgagtgagaatatgcggt

SEQ ID NO: 514483 - DNA, 201 bp, Homo sapiens
cattctaggaataaatcccaattgatcatgctgtataattttaatatgcttttgaattcagtttgctactattttgttgaagattgttgtttcaatattcwtaagggacatttgtctttagtattccgtttttgcagtgtctttgtatggctttggaatcagggtaatgctgggcttacacaatgagttaggaagtattcc

SEQ ID NO: 514484 - DNA, 201 bp, Homo sapiens
ggttttttaattagtaaaaatataatagttacttgcccttgagtagattgttagcactatcttgtttagattagtgcatagtgagtaaactggcaagaatrgtaactttggaagaatgaaaaaaatgaacatattcctcatatttcaactgaactctatgaattctaatagaattagaatcaacaaaatatatttttaatt

SEQ ID NO: 514485 - DNA, 201 bp, Homo sapiens
gtttacatatagagagcaactttatttatgcattagataaatcccatgcttccttcagggaaatacagcaccatgtgagggcacaaagcttagaaaggaarggatgggcaacttttcatgctccacttactccctttttcaggctttctcgtacaaggcacaatttgaacaaccataaatgatggctctaggtagcattta

SEQ ID NO: 514486 - DNA, 201 bp, Homo sapiens
gagataaataaagatgcctgataaaatcagtttcagctataaggggagaaaaatgccttcctagaaaaaacatgtaaatattaatagaaatttcttttctyattttatttagggaagaaaattatttcagagcttggatatttctgaaagactaaaatttttgcttactttgggtaagtgtcgtacaattgcttatctttc

SEQ ID NO: 514487 - DNA, 201 bp, Homo sapiens
cctatagaatgggagaaaatttttgcaatctactcatctgacaaagggctaatatccggaatctataaagaacttaaacaaatttacaagaaaaaatcaaacaaccccatcaaaaagtgggcgaaggacatgaacagacacttctcaaaagaagacatttatgcagccaacagacacgtgaaaaaatgctcatgatcactg

SEQ ID NO: 514488 - DNA, 201 bp, Homo sapiens
ctaacagaacagaacagaggcctcagaaataacaccacacatctacaaccctctgatctttgatagacctgacaaaaacaagaaatggggaaaggattccytatttaataaatgatgctgggaaaactggctagccatatgtagaaagcttaaactggatcccttccttacaccttatacaaaaattaattccagatggat

SEQ ID NO: 514489 - DNA, 201 bp, Homo sapiens
gaatatttctgtgttaatggaacatgtgagtcttcagattgaaagtacatgcttaatgatgactggcacaaatatgcccacattagacatattgggctgawatattataactctagggataaagtaaaaataatcctcaaaacttcccagggaagagtgacaggatgtctgcaacaaagttggaaacagactgatactagc

SEQ ID NO: 514490 - DNA, 201 bp, Homo sapiens
gacacaaacaaatgaaagaacattccatgctcatggataggaagaatccatatcgtgaaaatggccatactgcccagggtaatttatagattcaatgccayccccatcaaactaccaatgactttcttcacagaatggaaaaaactactttaaagttcatatggaaccaaaaaacagttggcattgtcaagacaattctaa

SEQ ID NO: 514491 - DNA, 201 bp, Homo sapiens
tcccccaggggctctggcccagggagatctgaattctgtccctgagcctctggctggagttattggagattgttcagggaagccccgcccactgaggaaggtgggtcagggttagacctgaaaaggcactttggccgcagactgccacagccggtgttttgggctgtggggacaagtcttgggaccaagtggtccagcctc

SEQ ID NO: 514492 - DNA, 201 bp, Homo sapiens
ctgctacaaagagaatgaaatacctaggaatccaacttacaagagatgtgaaggacctcttcaaggagaactacaaaccactgctcaacaaaataaaagasgacacaaacaaatgaaagaacattccatgctcatggataggaagaatccatatcgtgaaaatggccatactgcccagggtaatttatagattcaatgcca

SEQ ID NO: 514493 - DNA, 201 bp, Homo sapiens
catcagtctgaattgtgtaccatggtgactcattgattctagcaattgtgcctcaatatcctctgttatttcatcagtttgtctagttatggtgctagtcraaagaggaacacgtgctaccttttgatcggcatcctctcctaaaatttcatgacagatgtctttagcagcaggcaggatcaaatcttcaccgatagtaaa

SEQ ID NO: 514494 - DNA, 201 bp, Homo sapiens
taaaaaaacattgttttattaaacatccagtctaaagtttaattcttttttgatgaagggattgatgacttagaataaactttactttctagaagaaacartaaactggattttgtgtacatattatttttaaaaatttcttttcagttttctctttgaggatggtgaaagctttggacaaggtcgagatagaagctcgct

SEQ ID NO: 514495 - DNA, 201 bp, Homo sapiens
aaaaccccatcgtctcagcccaaaatctccttaagctgataagcaacttcagcaaagtctcaggatacaaaatcaatgtgcaaaaatcacaagcattcctwcacaccagtaacagacaaacaaccaaatcatgagtgaactcccattcacaactgctacaaagagaatgaaatacctaggaatccaacttacaagagatgt

SEQ ID NO: 514496 - DNA, 201 bp, Homo sapiens
aagttctggccagggcaatcaggcaggagaaagaaataaagggtattcaattaggaaaagaggaagtcaaattgtccctgtttgcagatgacatgaatgtrtatttagaaaaccccatcgtctcagcccaaaatctccttaagctgataagcaacttcagcaaagtctcaggatacaaaatcaatgtgcaaaaatcacaag

SEQ ID NO: 514497 - DNA, 201 bp, Homo sapiens
agtaatacaaattgttggggaggaccacagtcaggagggagtatttcaagcaaaggaaacagcacagtagcattggaaagcacagggcttctttgaagagyagtttggctgctgataaagctggaaaggtacggagaatctgattatgatagaggaccttgagtgctatgttaaagagttttcattttagcagtcgggagc

SEQ ID NO: 514498 - DNA, 201 bp, Homo sapiens
ttggaagttctggccagggcaatcaggcaggagaaagaaataaagggtattcaattaggaaaagaggaagtcaaattgtccctgtttgcagatgacatgawtgtatatttagaaaaccccatcgtctcagcccaaaatctccttaagctgataagcaacttcagcaaagtctcaggatacaaaatcaatgtgcaaaaatca

SEQ ID NO: 514499 - DNA, 201 bp, Homo sapiens
tcaatgctagattcttacctttacattgaccctctctcttaagctttcagtctctcactatctaaatagttggtagccctcagagtgaacaaagctcacamggctgtgaggaagagacaatagaagggtttgcctgagactcatagccaaagctctgtgactttcaaaatgagactggggaaataatcccctgctgttact

SEQ ID NO: 514500 - DNA, 201 bp, Homo sapiens
caatggaaggctggctcaacatacacaaatcaataaacgtaatccatcacataaatagaaccaaagacaaaaaccacatgattatctcaatagatgcagaraacacctttgacaaaattcaacagcccttcatgctaaaagctctcagtaaactaggtattgatggaacgtatctcaaaataataagagctatttatgaca

SEQ ID NO: 514501 - DNA, 201 bp, Homo sapiens
ctattccaatcaatagaaaaagggggaatcctccctaactcattttacgaggccagcatcatcctgataccaaagcctggcagagacacacacacaaaaargagaattttagaccaatatccatgatgaacacccatgcgaaaatcctcaataaaatactggcaaactgaatccagcagcatatcaaaaagcttatccacc

SEQ ID NO: 514502 - DNA, 201 bp, Homo sapiens
aaaccataaaaattgactgtctccattataaattagcttaaaaataagaaaaaaattgcataagtgcaagtgattagtagaagaaatttacaaagaaaatragatcaaagggaactagaagagaaaggaaaggaaaagaccattttgacatgttagaagaaaaaaaattatatatatgtgtgtgtgtgtgtgtgtgtataa

SEQ ID NO: 514503 - DNA, 201 bp, Homo sapiens
agagcaaacaaattcaaaagctagcagaaggcaagaaataattaagattagagcagaactgaaggagatagagaaacaaaaaacctttcaaaaaatcactkaatccaagagctggtttgttgaaaagatcaacaaaatagatagaccactagcaagactaataaaagggatatcaccaccgatcccacagaaatacaaact

SEQ ID NO: 514504 - DNA, 201 bp, Homo sapiens
atatagtttagatatatatataaagtggttataaatgatcaaataaggttaacacgaggaaaaagagtgctgatggcttcttttctttgtagagtgattaktggagctcttattctgagatggaaagccaatagaagatgtggaacaaagggtgttatatcatccgactcatattttaagagaatcattcttttgatgatt

SEQ ID NO: 514505 - DNA, 201 bp, Homo sapiens
gagaccagttgataggttgttaacaataatctaggtaagaaataaccatcacttgagctaatacaatattagtacaggcagtgagaagtgatcagattctraatatgttttgaaagttacaggatacattggtaaagaaaaaaagaaacatatccaggtttattagttagataactagaagactgaaattgccatttcctg

SEQ ID NO: 514506 - DNA, 201 bp, Homo sapiens
cttgtctagccaagctcttagaaatatgcacctaatttgtgtgaagcatcagcctagccatggtcacacagtgccagaaatattgaatatgtgtcatattmagcattccagagggtcaagaggaggcataagactaatagcatctgcctcacgtccataagatgaagaaaaacaaattactacagctgcttattataggat

SEQ ID NO: 514507 - DNA, 201 bp, Homo sapiens
actttcagtgagttaatttttgttcaaaaaataattttttgccaaagatttttatttgttacctggctttagtgacattaattagatgttgaaaaattacrgggatcatttggagctttttacatcaccaagcaattaatagatattttcaatccctgtatacttcaacagcccttacccttaatccagctacagattcta

SEQ ID NO: 514508 - DNA, 201 bp, Homo sapiens
acagacagtcctgtcgattgtgttatttagaaacatacactgaatgtgggctgaaatcatcatctttccataatgaaaactgagaaactattcacaatgcrttccttataaataaatgctacatttagtaactcatttcacccaaacaagggggatgtgtgtgtgtgtgtgtgtataggaagtggagtttatcccattgca

SEQ ID NO: 514509 - DNA, 201 bp, Homo sapiens
agagatttttctagtcacccttttgttactgatttccagcataatatttactgtcatcaaagaacataatctgaataatttcaatcctttaaaaatctgaragttgagttgcttttttgaattggtcaattttggaaatgtttcacatgtactcaaaaagaattttattctgaaggcattgggtattagtgttctgtatct

SEQ ID NO: 514510 - DNA, 201 bp, Homo sapiens
gacaaagtcctgagagatttctaatattttagaattctctcttaagtaataacattctatgctgtattccttgaagtgtagttgatacttactactaacartccttaaacgtggatcagtgagttactcaaggttattaattctttgttggaagactaattctatgccatttctatccactataattttattttatgtcag

SEQ ID NO: 514511 - DNA, 201 bp, Homo sapiens
gaggcaagagaatagcttgaacctgggaagcagaggtttcagtgagccaagatagtgccactgcactccagcctgggcaacagagcaagactccatctcaraaaagaaaaaaaggaaaaaaaaaaatcatagatgacacaaacaaatggaaaaacattccatgctcatggatcagaagaatcaatgttgttaaaatggcca

SEQ ID NO: 514512 - DNA, 201 bp, Homo sapiens
aaagataatcatttttttaaaaagaacagacttacttttccttttgtccctctcataattttaaaagaattttgacttaagttttattcattcagcatttmttgtacacctaccatgtgccaggcacttttcaacacttcagcttgtgaagggctttgcaattacagagaggtcttcagagaccccatttcatagtagcat

SEQ ID NO: 514513 - DNA, 201 bp, Homo sapiens
agttctaaaaatatatatattaggaatgctgattgtacattttcaaatcaagcaaatgtattgcctttccaattcaatacataaatgctcctgttaaacaytggtgaagcatctgtttttatactttatagggagattagtggcaactctgcttgtctgttaaaaaattcatgcaactgtgtattttatggtcgactgaca

SEQ ID NO: 514514 - DNA, 201 bp, Homo sapiens
actcatccttgacctttaactcctgtatattttctctttctgtattttcctatacaggctctcatacatctatctttctttctttatcatttcattaatcyaaccaattttactgaatagctactgagttccaggctctctgctgggcaatggaggtatgaaaacaggagctcatggtatattgaaagagaccagtggcag

SEQ ID NO: 514515 - DNA, 201 bp, Homo sapiens
taaatgtcagcctataaaaaatgatgatatggtggagatgagtgggttttatttcacatgtagtacttagattttaatatacttataaagttcttgactgkcatcttgatagtataaatactcaattgagtgaaatgcaaagacaatatgcaccttttactcataaattcataattgctaggtgctgaaataatatttatt

SEQ ID NO: 514516 - DNA, 201 bp, Homo sapiens
tgagacctggggcacacagaattcgagtggtgttgtgtatgtgtgtatacaactaaaataagttttacaaaacaatgttttctgcctcctacatgtgatgyattgtgttatttttgaaaagtctacatttaataagatgattttataaacctaaatttgaaaaatacttatataaggaatttaaaaaatcaataaaaactg

SEQ ID NO: 514517 - DNA, 201 bp, Homo sapiens
agttttaagctttacacttcaaagtagtaattgatttttggttggcataaatatcacatgtacactttcttctccacaaattttgggaaaaatcctaagtygtaagaaactaatccatttaaaagccaattgtagaaatgcatatttactgaatctttgaattgcctttccggaagttaaaagtttctatgttcaatagca

SEQ ID NO: 514518 - DNA, 201 bp, Homo sapiens
aaactcctcccatatgatacatttgattggaactaatgcttaggtcaaatctttatttaaaccactcagttcttcataaagaatactttggacaaatcctyttcttagtcagggcactcttttcactcaggtgaaacttcagtttgaaatgccgcattcatcacaaaatgactaaaagtggaactgggctaatcaaaaagt

SEQ ID NO: 514519 - DNA, 201 bp, Homo sapiens
tgaggtgtgaatttctgttttaaaatgaagcatgctttttagaagttaataactgtatgctttcattgatatatagttgaatgcttgtaattgttgatgtyacatatctctggcttctgagtaaattggaattacaaacacaccaccactaattggaaggagaaattaaaaagttaaagaaaagttaaacccagaagttcc

SEQ ID NO: 514520 - DNA, 201 bp, Homo sapiens
ggtttatttttcttcaaagtgtttattttaggcttagaattagaaatagctcttattagtttacttctttgttactgtgtttctctttattttgtagagtkttaagctttacacttcaaagtagtaattgatttttggttggcataaatatcacatgtacactttcttctccacaaattttgggaaaaatcctaagtcgta

SEQ ID NO: 514521 - DNA, 201 bp, Homo sapiens
ccaatgaaatcagtgagctggcctttcattattgatagctggtattgtaaatgcaaatttttctctgtcccgttctgcaaggggaatagtataagagcagycttttaagtcaataatgattataggccagtctcgaggaattgccacgtgggaggggagcccctgctgaaggggccccataggttgcaaattagcatcaat

SEQ ID NO: 514522 - DNA, 201 bp, Homo sapiens
gaagaggactgaagtaaaagagtgtaaaatgggatgataaaatatccactaatcaaatctgatctgtcgggtaggaaagagagatggaaagctaaagaagragctgaaacagtacactgtatattggttactaaagtttgatagaacagtggtttatttttcttcaaagtgtttattttaggcttagaattagaaatagct

SEQ ID NO: 514523 - DNA, 201 bp, Homo sapiens
gaggtcgaggcgggtggatcacctgaggtcaggagttcaagaccagcctggccaggatggtgaaaccccgtctctactaaaaatacaaaaattagccgggygtggtggcgggcgcctgtaatcccagccactctggaggctgaggcacagaatcgcttgaacccgggaggtggaaggatgcagtgagccgagatcatgcca

SEQ ID NO: 514524 - DNA, 201 bp, Homo sapiens
cttgttcccagatctccaagtttagtgcaccttctttcagaaaccatgggttatgggaaacagtagtttgcattaggtctcttaattgagcctgcgaaacsaaggctctgctacctttaagcagctgtttcaatgcttttatatactgttgctgttgagctgataactgttgtcctatgatgaaaccctagcctgaacagt

SEQ ID NO: 514525 - DNA, 201 bp, Homo sapiens
atggagatagagagtagaatgatggttaccacaggctgggaagggtagtggagggtaggagttggaggatacacattgtgaatgggtaaaaaaaaaaaaaataaccgaaagaataaataagaccttgtatttgctagcacaacagggtgactatagttaataataatttaattgtacattttaaaataagtaagtatataa

SEQ ID NO: 514526 - DNA, 201 bp, Homo sapiens
gctatctttctatttgatgaatcatgtacaaataacaactcaagaagaatattgatttttccttataaaaggctcatatgaattttcatgtatgtggatcyaaacatgtataattcaaattaataaaaatttatgtaatctactttggagtggaattaattaagcatgtttggtaattaaggagagaaaaacagtgataga

SEQ ID NO: 514527 - DNA, 201 bp, Homo sapiens
gggtattttttataggaattttttttttaaagcaaaactatactgagtatatcctctatttaagtctcattggtagttgtagagggtttataaaaagataygcaagtgccctcaggtatgtagttcttttttttctaattgagatgggaggttaaatttttgtatgtgaaatatatagtatataaaacaaacatgtatagc

SEQ ID NO: 514528 - DNA, 201 bp, Homo sapiens
ttctttgtcttttatgatctttgttggtttaaagtctgttttgtcagcgactaagattgcaacccgttttgttttgttttgttttgttttgttttgtttttctttccatttgcttggtaaattttcctccatccctttattttgagcctgtgtatgtctgcacataaaatgagtctcctgaatacagcacaccaatgggtc

SEQ ID NO: 514529 - DNA, 201 bp, Homo sapiens
ggccaggcgaggtgactcttgcttgtaatcccagcactgtgggaggccgacgtgggcagatcacgaggtcaggagattgagaccatcctggctaacacggygaaaccccatctctactaaaaatacaaaaaaaaaattagctgggtgtggtggcatgcgcctgtagtcccagccactcgagaggctgaggcaggagaatgg

SEQ ID NO: 514530 - DNA, 201 bp, Homo sapiens
tgcccttctttgtcttttatgatctttgttggtttaaagtctgttttgtcagcgactaagattgcaacccgttttgttttgttttgttttgttttgttttgtttttctttccatttgcttggtaaattttcctccatccctttattttgagcctgtgtatgtctgcacataaaatgagtctcctgaatacagcacaccaat

SEQ ID NO: 514531 - DNA, 201 bp, Homo sapiens
aaaaagaaatcaagaaaataattccatttataatagctacaaataaaataaaatacctaggaattaatcatgaagtgaaagatctctacaatgaaaactayaaaacactgatgaaataaagaggatacaaaaatggaaatatatttcatgtttatggatgggactaatcaatattgttaaaatgttcatactacccaaagc

SEQ ID NO: 514532 - DNA, 201 bp, Homo sapiens
cattcaggagacccatgtcacgtgcagagacacacataggctcaaaataaagggaaggaggaagatctaccaagcaaatggaaagcaaaaaaaggaagggkttgcaatcctagtctctgataaaacagactttaaaccaacaaagatcaaaagagacaattaaggccattacataatagtaaagggatcaattcagcaaga

SEQ ID NO: 514533 - DNA, 201 bp, Homo sapiens
aagggcatgcaaattggaaaggaaaaagttgaattatccttgttaacagataatatgatcttatatttggagaaaactaaagactacaccaaaaaaaaaaatgattagaagtgataaatgaattcagtaaagttgcatgatacaaaatcaaaagataaaaatcagtaacatttctatatgccaacagcaaacaagctgaaa

SEQ ID NO: 514534 - DNA, 201 bp, Homo sapiens
gagacttattgaatggctttgaccaaaatgctgatagtgatatggatgatgaagtccaggctgagatggtctcagatggagatgaggaactttttgggaaytggagtaaaggtcacgcttgctatgctttagcaaagaaactggcagcattttgcccctgccctggaaatatgtggaactttgaacttgagagagatgatt

SEQ ID NO: 514535 - DNA, 201 bp, Homo sapiens
cacatcaaagaaagaaaactacaggccaatatccctgaaaatcattgatgcaaaactcccccacagaatactagcaaacaatacattagaaagatcattcrtcatgatcaagtgagctttatcccagggatgcaaggatggttcaacatacgcaaatcaattaacatgatgcataatatcaacagaatgaaggacaaaaac

SEQ ID NO: 514536 - DNA, 201 bp, Homo sapiens
aggttaaaatgaaggaaaaaatgttaacaggcaccagagagaaagattgggttacccacaaagggaagcccatcaaactaacagcagatctctcggcagayactctaccagccagaagagagtaggggccaatattcaacattctcaaagaaaagaattttcaacccagaatttcatatccagccaaactaagtttcataa

SEQ ID NO: 514537 - DNA, 201 bp, Homo sapiens
atttaaaagaatatattattccggccgggtgtggtggctcatgcctgtaatcccagcactttgggaggccaaggtgggcggatcacgaggtcaggagatcragaccatctggctaacatggtgaaaccctgtctctactaaaaatacaaaaaattaaccaggcgtggtggcaggcgcctgtagtcccagctacccaggagg

SEQ ID NO: 514538 - DNA, 201 bp, Homo sapiens
gcgcccaccaccatgccttgctaatttttttatttttaatagagacagggtttcaccgtgttagccaggatgatctcgatctcctgacctcatgatccacscacctcagcctcccaaagtgctgggattacaagtgtcagccaccgcgcccagccaagggcatatactttaatgaggttgataattttaatcatatcctgc

SEQ ID NO: 514539 - DNA, 201 bp, Homo sapiens
gagggatgattttgggatgatacaagcgcattacatttactgtgtactttatttctatttttattatattgtaatatataatgaagtaattatataactcmccataatgtagagtcagtgggatccctgagcttgctttcctgcaactagaaggttctatgtggggatgatgggagacagtgacacccaaagtctgttgct

SEQ ID NO: 514540 - DNA, 201 bp, Homo sapiens
aaattattttgcctattttcctaaagatggtttaggattttttgtttatttttggtctcctttatattcacctaacttcttttttttttttttttttttttgagacggagtcttgctctgtcaccaggctggagtgcagtggcacgatctcagctcactgcaatatccgcctcctgggttcaagcgattctcctgcctcag

SEQ ID NO: 514541 - DNA, 201 bp, Homo sapiens
cagaagatcaatgaaacaaagagttggtttttttgaaaagttaaacaaaattaacaaatgtttagccagactaaccaaaaaacgagaagatccaaataaayagagatttaaaaggagacattactactgttattgcagaaattcaaaggattagcagctgctgcgagcaactatatgccaataaattggaaaatctagaag

SEQ ID NO: 514542 - DNA, 201 bp, Homo sapiens
tccaattcaatacataaatgctcctgttaaacactggtgaagcatctgtttttatactttatagggagattagtggcaactctgcttgtctgttaaaaaaytcatgcaactgtgtattttatggtcgactgacatatttctgtcttaattccataggaaaaattattctatgtctttaaaattgcctgctttgggtttact

SEQ ID NO: 514543 - DNA, 201 bp, Homo sapiens
agagaagagccttattaataatatgaagatgcagtaacaaacttcctctactctttaaactgtcaaatgtcattgagaatggaataatcttttcttttttrtgccattgaaaatcttagagtttgatttagagctgcaatataaatttatgctgagttgttttgtcctctgatattttagaattttcttatactttgatat

SEQ ID NO: 514544 - DNA, 201 bp, Homo sapiens
acggttttggcgggcaggatggtggtgagctgcggccgctgcagagtgaaggcgctgcagcgctggtcaccaaggggtgccagcgattggcagcccagggygcacggcctgaggcccccaaacggaaatgggccgaggatggtggggatgccccttcacccagcaaacggccctgggccaggcaagagaaccaggaggcag

SEQ ID NO: 514545 - DNA, 201 bp, Homo sapiens
gccactctttgaccggttgctcattttctggtctgaccggcggaacccccacgaggtgaagccagcctatgccaccaggtatgacctgtacttctggagamgcacccaggtgctccccctgtgacaatgtcctgtcagagcctcagagtgactagggagcgacgaagtattgagagggggcctaggtgggagcagaaccgg

SEQ ID NO: 514546 - DNA, 201 bp, Homo sapiens
gtccatccctgtttgctggcccatgtttctagtccatccatcctgtctccaaggcaggagaagcagaagggggagggtggctgtgatgagtgagccctggsctgagggaaggaaaggggtgctgcccgctgggccgagtgcttggccctggactgcattgtgccctgggtccccactgtggcatctgcatcgaggacagtc

SEQ ID NO: 514547 - DNA, 201 bp, Homo sapiens
tccatccctgtttgctggcccatgtttctagtccatccatcctgtctccaaggcaggagaagcagaagggggagggtggctgtgatgagtgagccctgggstgagggaaggaaaggggtgctgcccgctgggccgagtgcttggccctggactgcattgtgccctgggtccccactgtggcatctgcatcgaggacagtct

SEQ ID NO: 514548 - DNA, 201 bp, Homo sapiens
tgggggcctggccttgagtccaaggcttggtgtcctttggacaaggccctgtggggagtgcccactgctcaacacagtgatgcctggctggctgatggcaygggcagtgttgtgccctgcaggcgtgaggctgagctcctgatgtcctctgcctcctcctgcagatcccatcttgggttctgcttctgtgtggctttcctc

SEQ ID NO: 514549 - DNA, 201 bp, Homo sapiens
tgggggcagcactgggcggtcgcgtgctggccgaggtggaggccctcaaacggggtgggcgcctgcgagacgggcagctagtgagccagagggcgatcccrccgcgcagcatccgtggggaccagattgcctgggtggaaggccatgaaccaggctgtcgaagcattggtgccctcatggcccatgtggacgccgtcatcc

SEQ ID NO: 514550 - DNA, 201 bp, Homo sapiens
tgagtcccatgtgcttggtgggaggcgctgtgtgagaatgtacagggcaggaggaaacatagcagggctggggtgcagaggaggcccagagcagtgcactccagtctgcaggtactgcactgggcactggggagaccaacctggccccaggggcttccctgtggctgccttccagggcagtactaggtaaacaggtgcctg

SEQ ID NO: 514551 - DNA, 201 bp, Homo sapiens
ttcatggctgcttctctaagatgtgcctgcctagccccagtaaacctacctccctccatccctgccaggccatggtggcgtgttacccaggcaacgggctygggtacgtaaggcacgttgacaatccccacggcgatgggcgctgcatcacctgtatctattacctgaatcagaactgggacgttaaggtaggggtgaggg

SEQ ID NO: 514552 - DNA, 201 bp, Homo sapiens
ggacttggggaccagcaagcaacccccagggcacgagaagagctcttgctgtctgccctgcctcaccctgccccacgccaggcccggtggcccccagctgyatcaagtggaggcggaggaggaggcggaggagggtggcaccatgggcccgggcggtgccctccatgcccgggggatgaagacactgctgccatggacagc

SEQ ID NO: 514553 - DNA, 201 bp, Homo sapiens
ccaaggaggagaagagacctttgctgccccatcatgggggctggggttgtcacctggacagggggcagccgtggaggccaccgttaccaactgaagctggrggcctgggtcctaccctgtctggtcatgaccccattaggtatggagagctgggaggaggcattgtcacttcccaccaggatgcaggacttggggttgagg

SEQ ID NO: 514554 - DNA, 201 bp, Homo sapiens
tcaagtctgtcctggtcgtcttccccactcctgcccataccatcccggctttcccctgcctgcctgtctctagtttctctcacatccctttttttttttcytttctctagccaccctgaagggtcccttcccaagcccttagggaccgcagaggacttggggaccagcaagcaacccccagggcacgagaagagctcttgc

SEQ ID NO: 514555 - DNA, 201 bp, Homo sapiens
tcccaagcccttagggaccgcagaggacttggggaccagcaagcaacccccagggcacgagaagagctcttgctgtctgccctgcctcaccctgccccacrccaggcccggtggcccccagctgcatcaagtggaggcggaggaggaggcggaggagggtggcaccatgggcccgggcggtgccctccatgcccgggggat

SEQ ID NO: 514556 - DNA, 201 bp, Homo sapiens
tgaacagaggtctctggttttcctaggcagaggaccctgcggccttctgcgtgtttgtgtccctgggtacttgagattagggagtggtgatgactcttaaygagcatgctgccttcaagcatcgccacagtggttcttgactttgccaggaaccctcttaaactcatgagagctgctgacattcacagcgtggaccttggt

SEQ ID NO: 514557 - DNA, 201 bp, Homo sapiens
acggaatacgaaaaccaggttacatccccagtgagtctggcagtttggggaggggagagtaggagaagatctcttgtgttttggtgcctctggtgcccacyttctatgtggttggggacagggccccagcgaggattggggaaggggcgtgtttggacttttttagccctaggtgaccttgattgtcctagggaagtaagg

SEQ ID NO: 514558 - DNA, 201 bp, Homo sapiens
cccgctccgccccgggtcctccctcccagcttccctccggtctatttttctgtctctgggcccctcgttctctttgtttttggactccccagtttcctctgtcttttgacccccccgcccccaccctgactctccctggaacccccacgtttctcgttgtctttctggaacgccgaggcaggtccctcctattttccaaac

SEQ ID NO: 514559 - DNA, 201 bp, Homo sapiens
agcagaaccgggtggctcaaaaggatggccgcctagtgtgtgtggatatggtagctggaattgcagaaaactaatgtccaaccaccctggtctccaggtaygccatcactgtctggtattttgatgccaaggagcgggcagcagccaaagacaagtatcagctaggtacctgcttccctcccttcagtccttcctattctg

SEQ ID NO: 514560 - DNA, 201 bp, Homo sapiens
gtgggaagagggtgcagcactggaccccttccctgccacccatccacgtgcatcatcagtgtaatctctgattggattcctaattggggaggtcttgcccrtctctagtcagtaactcactgtttctaagcctcctggaccatggcccaattcttctcccagtgaggtggttgctcagagtgccgacccttccatagggag

SEQ ID NO: 514561 - DNA, 201 bp, Homo sapiens
cccatccacgtgcatcatcagtgtaatctctgattggattcctaattggggaggtcttgcccatctctagtcagtaactcactgtttctaagcctcctggrccatggcccaattcttctcccagtgaggtggttgctcagagtgccgacccttccatagggagtgagcagtgcaaagaaggtgccccctcctgaaccttga

SEQ ID NO: 514562 - DNA, 201 bp, Homo sapiens
gggcctctatagtcaagtctgtcctggtcgtcttccccactcctgcccataccatcccggctttcccctgcctgcctgtctctagtttctctcacatccctttttttttttcctttctctagccaccctgaagggtcccttcccaagcccttagggaccgcagaggacttggggaccagcaagcaacccccagggcacgag

SEQ ID NO: 514563 - DNA, 201 bp, Homo sapiens
atatggtagctggaattgcagaaaactaatgtccaaccaccctggtctccaggtacgccatcactgtctggtattttgatgccaaggagcgggcagcagcyaaagacaagtatcagctaggtacctgcttccctcccttcagtccttcctattctgtgggccctcttgggcctgatgccaccccatccccctcatcagcct

SEQ ID NO: 514564 - DNA, 201 bp, Homo sapiens
tatcttgaaacaaatcaaactctgttactaattgagccctagctgggtgccaggccccaggtatgtgtgttgggagggagtgggctcttgaggcccaggarctgaggtttctgatagacttggggatgggattttggctgaaaaagaaagtcttttggggcaggagcttggaacccttgacccaaggagtcatggggaaga

SEQ ID NO: 514565 - DNA, 201 bp, Homo sapiens
acttcccaccaggatgcaggacttggggttgaggtgagtcatggcctcttgctggcaatggggtgggaggagtacccccaagtcctctcactcctccagcmtggaatgtgaagtgactccccaacccctttggccatggcaggcaccttttggactgggctgccactgcttgggcagagtaaaaggtgccaggaggagcat

SEQ ID NO: 514566 - DNA, 201 bp, Homo sapiens
aaggccatgaaccaggctgtcgaagcattggtgccctcatggcccatgtggacgccgtcatccgccactgcgcagggcggctgggcagctatgtcatcaaygggcgcaccaaggtaaggctaggtgggggcctctttggaggggctttgcagcaccctggtttgcagcattcagtgctctgagcacagtgggtttggagac

SEQ ID NO: 514567 - DNA, 201 bp, Homo sapiens
ccgtgcacggcagagagtctggtggggtggaggggctggcctggcccctctgtcctgtggaaatgctggggcaagtggtcaccctcatactcctcctgctyctcaaggtgtatcagggcaaaggtaaggaggtcctacctggcgtggggcgagggagggactaggagctgtgcccctcagggagatcagagccagagcctc

SEQ ID NO: 514568 - DNA, 201 bp, Homo sapiens
gtcacatagtaagtactcaagattttagctattggtctatgggatccctcagactagggacacagagcttggggacaaggggaggcagatggaggggataygctttaaggtgctcctaggttctgggctcctcatactcatccccacccaattggcttaagggaagtcacatccagctgcccacattgctcaggcctgaca

SEQ ID NO: 514569 - DNA, 201 bp, Homo sapiens
ttctgtgtgtggaggagaaagaggaaggagaagcagtcaggtgagtggaaggtccttagggtggtgctcctgcctgaggccttggatcctgtgactttgtyctgcgtccagtgggatgtgtctgggagcacagcatctccttttcctcaacgagctttggtatgtttgtgtgcgtggtggcggggggcaagcaggttgcta

SEQ ID NO: 514570 - DNA, 201 bp, Homo sapiens
ctgtgtagacccaggtagcttgtgaggtcatgaaaaagcatatgtggttaagagagtactggaattggagccagaagaactagattcaagtccctcctgcrcttcacactagtcgtggatcctgagtaatttgttttgtcactctgagcttcattttttaaatctgtaaaatggggatggcaagtcatacctcacaggatt

SEQ ID NO: 514571 - DNA, 201 bp, Homo sapiens
ttatttgaattactatttctttttctttggtttcttgagattgaatcttgcattattgacttgcaaactttctttcttttccaatatacaaatttaaagcyataaatttccctctaaacactgccttagctatattgcacatttgatactcattatcactttgctctaaatatttcccaaatttcatttgatttattcttt

SEQ ID NO: 514572 - DNA, 201 bp, Homo sapiens
tcccacttgaggtaagcttcaccagtttggcttgtgggaactgtcagaccagctccaggcgctggggctttctcagtggccttgtcagctcacagcaggcrttaacagcctctaattgaggaaactgtggctggacaggttgcaaggcagttctgctccccatcgtcctcttgctgactggggactgctgagcccgtgcac

SEQ ID NO: 514573 - DNA, 201 bp, Homo sapiens
aggggccggtcaccagaaagaccaaggcagggttggaatattggactctgagcccgtccccaaccttcaggaaaaggagagggattgaaggttaagttgaycaccgatggccagtggtcaatcattcccatttattgaggcctccataaaaacccaaagaacaaggttcagagagctaaacatgcggaggttcctggaggg

SEQ ID NO: 514574 - DNA, 201 bp, Homo sapiens
gagctaaacatgcggaggttcctggagggtggcacgccctgggaaggcatggaaactctgtatcccttcccctacaccttgtcctatgcatctcttcatakgtaccctttgtaataacctttataataatccagtgaatgtgtttccctgagttctgtgagccatctagcaaattaattgaacccaaggagggaataacgg

SEQ ID NO: 514575 - DNA, 201 bp, Homo sapiens
attcatgagtcccttaatggtgacacaggctgggaagtgtgaccagccaaagcataatagttttgtagctggctcaataggctgcattcacagccttttgsaagaagaggcctgagtgtggctgaggtactagagagagtaaccagcctggcacaaagcccaccagcctgagtgggctcctccaggagcctctcgcctgct

SEQ ID NO: 514576 - DNA, 201 bp, Homo sapiens
ctatagttgtggatttacttctccttttagttctatcaaattttattttatatattttaaacttgttatatgcatagaaactgaagatgattgtttattcytacttaattggttcttttataatgatgacatttccttctatttctgtatattttttatacatcttatgtctttttttgttcattttctccgttattgcct

SEQ ID NO: 514577 - DNA, 201 bp, Homo sapiens
ggaaggaagaagagagcgagctgacagctcagttctcacgccttctgtattcctcagaattcagattttggccgtttttggtgatcatcgtgattctaagygcactgttccttggcacccttgcctgcttctgtgtgtggaggagaaagaggaaggagaagcagtcaggtgagtggaaggtccttagggtggtgctcctgc

SEQ ID NO: 514578 - DNA, 201 bp, Homo sapiens
tcttgctcacagcatttcagccatgttgcctgctggtcctggacctcgctctctgttgtatccacagttttctctgcctgggatgctgctcctttgctggmtacatggcctcttccctcaacccctcagagttttgctcaaatacctccttttcagtgatgccttccccactgaaaatgtcagcctgccattctgcaaact

SEQ ID NO: 514579 - DNA, 201 bp, Homo sapiens
atctcttttgcttagttcctctttcctctctcgtctccttgctttccaattacacttagtttaggggttttgttttgtttttgctatatctcaaatatctyttacactccttcttgtgtatttttatccttttgtttttctttacttcactctggatattttataacagttttctaattctcttttcaatggcatctaaat

SEQ ID NO: 514580 - DNA, 201 bp, Homo sapiens
cagcatttcagccatgttgcctgctggtcctggacctcgctctctgttgtatccacagttttctctgcctgggatgctgctcctttgctggctacatggcytcttccctcaacccctcagagttttgctcaaatacctccttttcagtgatgccttccccactgaaaatgtcagcctgccattctgcaaactcttagctct

SEQ ID NO: 514581 - DNA, 201 bp, Homo sapiens
agtgctggaattacgggcatgagccaccgcaccaggccagggctagctgatttagaatggccttagctgtgttggcttatctctgtatcatgtgatatctkattctccagcaggctattttaggcttgttcacaggtcagccagatgaggttccaagagaacaagtagaaatgtgcaatgccttttcagatctaggcttag

SEQ ID NO: 514582 - DNA, 201 bp, Homo sapiens
agaggaaggagaagcagtcaggtgagtggaaggtccttagggtggtgctcctgcctgaggccttggatcctgtgactttgtcctgcgtccagtgggatgtktctgggagcacagcatctccttttcctcaacgagctttggtatgtttgtgtgcgtggtggcggggggcaagcaggttgctaggctctctctcccagttca

SEQ ID NO: 514583 - DNA, 201 bp, Homo sapiens
gcaggcgttaacagcctctaattgaggaaactgtggctggacaggttgcaaggcagttctgctccccatcgtcctcttgctgactggggactgctgagccygtgcacggcagagagtctggtggggtggaggggctggcctggcccctctgtcctgtggaaatgctggggcaagtggtcaccctcatactcctcctgctcc

SEQ ID NO: 514584 - DNA, 201 bp, Homo sapiens
tccagcaggctattttaggcttgttcacaggtcagccagatgaggttccaagagaacaagtagaaatgtgcaatgccttttcagatctaggcttagaactrgcagaacatcatttttgctgcgtttcatcatgaagaccagcccagttccaagagacagggaaatgaaccccatttcttgataacagaaggagctgtaaag

SEQ ID NO: 514585 - DNA, 201 bp, Homo sapiens
tggctgtaggaacttccagttttgtacactgactgcacagaattgctctaggttgtcacacccccatattcattaggtttcatcttgattctttgagaggsaagtgctgggatctgcctgggaagtgtagttttatttttaaaattgttttctagggagaaatttttgtggagactttctgatcactgaaaaactggcaaa

SEQ ID NO: 514586 - DNA, 201 bp, Homo sapiens
ggtttgccatgttggccagcctggtctccaactcccgacctcaactgattcacctgcttcagcctcccaaagtgcggggattacaggcatgagccactgcrtctgctttcatctttgaagtaccgaaattctagataggcagttattttctttcagcactttaaatatatcattccttggaaaaccaaacaacgtatgttc

SEQ ID NO: 514587 - DNA, 201 bp, Homo sapiens
atggctcctgaacattattttcttcctgggagaggctgatggagaactgtcctctcctcttgagtgataactttctccaagccacatagttcaagaggtarctacactgtgcagcagtagcctggagcaggagcatcaggatgaccccagggatacctagatgagttcttgggctgttgcttatgctcatcctaagagtta

SEQ ID NO: 514588 - DNA, 201 bp, Homo sapiens
aggctggtcttaaactcctgacctcaagtgatccacccacctccgcctctcaaaagtgctgggataccaggtgtgagccactgtgcccggcctattattayttttcaagagaggatctggttctttcacccagactggagtgcagtggcatgctcacggctcactgtagcctcgacctcgcaggctcaagccatcctccca

SEQ ID NO: 514589 - DNA, 201 bp, Homo sapiens
caagtgatccacccacctccgcctctcaaaagtgctgggataccaggtgtgagccactgtgcccggcctattattatttttcaagagaggatctggttctktcacccagactggagtgcagtggcatgctcacggctcactgtagcctcgacctcgcaggctcaagccatcctcccacctcagcctccctggtagctggaa

SEQ ID NO: 514590 - DNA, 201 bp, Homo sapiens
ttcttgcttccaggaattttgcttgcaccttgcctaatgaaccctgctgcctccactggctcccagtagaacccaaactggcaatatgctttcagtggccrgcagcatgaaatacctccaccaccgatttcctaaggggtaggaacaagaaaagggaagcaggaagctctgcttcctgctttggcccttgggttcagggct

SEQ ID NO: 514591 - DNA, 201 bp, Homo sapiens
acatggtgaaaccctgtctctaaaaatacaaaaattagctgggcatgatggcaggcacctgtaatcccagctactcaggaggctggggcaggagaattgcytgaacccaggaggcagaggttgcggtgagccaagatcgagacattgcactccagcccaggcaatagagcgaaactcttgtctcaaaaacaaataaacaaa

SEQ ID NO: 514592 - DNA, 201 bp, Homo sapiens
tacaatgtaaatgctatttaaatagttgttatactgtattgtttagggaataatgacaaggaaaaaggcctctacatattcaatacacatgcatttttttyccctgaatattctggatccacaattcattgaatccacattgtggaactcaaaactttggagggcaactgtattagatcatgtaattaacccctataggta

SEQ ID NO: 514593 - DNA, 201 bp, Homo sapiens
accgatggccagtggtcaatcattcccatttattgaggcctccataaaaacccaaagaacaaggttcagagagctaaacatgcggaggttcctggagggtggcacgccctgggaaggcatggaaactctgtatcccttcccctacaccttgtcctatgcatctcttcataggtaccctttgtaataacctttataataatc

SEQ ID NO: 514594 - DNA, 201 bp, Homo sapiens
gtttttccccactcaatctaaatctggacagaccgaactgtcgctcatgttaccccatctccatttcttgtgcaggagcaggagcagacttttcctggagsggggagcaccatctactctatgatccagtcccaggtacctctccagtttctctagtccattccatacctatctctggggtttcctaatgcccccctgaaa

SEQ ID NO: 514595 - DNA, 201 bp, Homo sapiens
gatgtagatgtgtattttgcatgtgtttgcagtgagagtgtgtgtgcacatcctggcaagttgttctttattgtgtgtatctgagtagcttctgttaaatkactgtatttaaatgtcaatgggccaatgagaaatgccttactggttctgtctggagaaaaataacagcttctagactaagagaacagtagactagatgag

SEQ ID NO: 514596 - DNA, 201 bp, Homo sapiens
ggtggggtgttgttgatgtagatgtgtattttgcatgtgtttgcagtgagagtgtgtgtgcacatcctggcaagttgttctttattgtgtgtatctgagtrgcttctgttaaatgactgtatttaaatgtcaatgggccaatgagaaatgccttactggttctgtctggagaaaaataacagcttctagactaagagaaca

SEQ ID NO: 514597 - DNA, 201 bp, Homo sapiens
cctcttcccgtggtggtggtggggtgttgttgatgtagatgtgtattttgcatgtgtttgcagtgagagtgtgtgtgcacatcctggcaagttgttctttrttgtgtgtatctgagtagcttctgttaaatgactgtatttaaatgtcaatgggccaatgagaaatgccttactggttctgtctggagaaaaataacagct

SEQ ID NO: 514598 - DNA, 201 bp, Homo sapiens
ttggccaggctggtctcaaactcctgacgtcaggtgatccatccacctgggcctcccaaagtgctgggattacaggcgtgagccaccgtgcccagcttgtyggtttgttttgatcttgcttggggtttgtaacacattttacaaatctatcttgatggcttttgtcagttttgggaaattcttatcttttatctcttttgc

SEQ ID NO: 514599 - DNA, 201 bp, Homo sapiens
ttattcctagttgctgcagcaattctcacctttcttgcacatcagcatctgctttgggaattggcacagtggatgacggcacaggagtctctatagaacasttcctagtctggagaggatatggaaatttgttcttgttctatattttgttttgaaaatgatgtctaacaaccatgataagagcaaggctgttaaataata

SEQ ID NO: 514600 - DNA, 201 bp, Homo sapiens
gctttactcaattgcagagaaaaaactttctccctgcatctcatacctttacctctggccagttggccaccagggggagtgggctgaagggagagtagatggtgcaaagcaagcccatctctgagtagaaaaatcacccagagcacatgctgacctgataactggggtgttgagaccagctttgtccatggtatgatgttt

SEQ ID NO: 514601 - DNA, 201 bp, Homo sapiens
acagtcatctggaacttgactccgagcagctcctgacagctctgacagtctaaatcagacaggacaggctggcagtgcactgggaggtctgtgagaggggyatctggccctgccaccagcaatccaggaagtcttgggtgaggagattccttcccactggcttcaatttacccttccgtgtagtggagagagaagcctcct

SEQ ID NO: 514602 - DNA, 201 bp, Homo sapiens
ttactgtctgttgcatagccctgaaatctagccatgaaagggtacacttaggaaaagatcattcacacagtctcagagttgtagggaatttagagatcttytaatgcaagtctttgttttagagatgaagacactgaagcccaaggagagtgagggtctgacccaagatcatattgcgtgtttagatatgatacttactgg

SEQ ID NO: 514603 - DNA, 201 bp, Homo sapiens
catgtaatcctagcactttgggaggctgaggcaggtggatcacttgagtccaggtgtttgagaccagcctggacaatatggtgtaatcccatctctatttaaaaaaaaaaaaaaaagaagctctgtgatctctggcagattcattaacctctctgagcctcaattttcttcccccttgagtaaaatgggggtgataataag

SEQ ID NO: 514604 - DNA, 201 bp, Homo sapiens
ggacaatatggtgtaatcccatctctatttaaaaaaaaaaaaaaaagaagctctgtgatctctggcagattcattaacctctctgagcctcaattttcttcccccttgagtaaaatgggggtgataataagtacctcacaggattgctgttaagagtaaatgagataatgtttgcaaagagccttgtcagcccttggaaca

SEQ ID NO: 514605 - DNA, 201 bp, Homo sapiens
gttgctgccctcacaaaatggatttcatcacatattgaagtgggagaatggctctttgccttccaatacttccaatgatagattcagttttatagtcaagracttgagtcttctcatcaaggcagctcagcagcaggacagtggcctctactgcctggaggtcaccagtatatctggaaaagttcagacagccacgttcca

SEQ ID NO: 514606 - DNA, 201 bp, Homo sapiens
agtacctcacaggattgctgttaagagtaaatgagataatgtttgcaaagagccttgtcagcccttggaacacttaattccttttccttcctcttgttggmtggattatatatcaggctacatgtgtgacacaaatcttttaagtagaagttcaaatgaggaagagccatgaaggaaggaatagtggaaaagtgagacgga

SEQ ID NO: 514607 - DNA, 201 bp, Homo sapiens
aacattaaagccaactggacaacccagggtcatagagggcactgtgtagacccaggtagcttgtgaggtcatgaaaaagcatatgtggttaagagagtacyggaattggagccagaagaactagattcaagtccctcctgcacttcacactagtcgtggatcctgagtaatttgttttgtcactctgagcttcatttttta

SEQ ID NO: 514608 - DNA, 201 bp, Homo sapiens
cccacctgtggtccaataaagatgctgccattggtcagaagggagggatgggtggctgcctgctggaattcctggcacttcagctatcacccaacattaargccaactggacaacccagggtcatagagggcactgtgtagacccaggtagcttgtgaggtcatgaaaaagcatatgtggttaagagagtactggaattgg

SEQ ID NO: 514609 - DNA, 201 bp, Homo sapiens
tttggtttcctcttgcatcagtcatgcatgtgtggtcagctgccagactggccacgggtggctgattcatttatttattttttattgttttttgagattargtcttgctctgtcatgcaggctagagtgcagtggcatgatatctcggctcactgcaagctccatctcccgggttcaagcagttctcgtgcctcagactcc

SEQ ID NO: 514610 - DNA, 201 bp, Homo sapiens
cccagggaataggcctgggccctaaaattcattttagacccaaaattcaggtttcagttgtccgttctgaggaaaccccaaaggacacacaggctggaggytatgaatccccagatgctttacagcctgagttgagatctgctggacaataaaagggcacaggtgacaccttatagattagctccaagggttgccagctgt

SEQ ID NO: 514611 - DNA, 201 bp, Homo sapiens
tcaataggctgcattcacagccttttggaagaagaggcctgagtgtggctgaggtactagagagagtaaccagcctggcacaaagcccaccagcctgagtrggctcctccaggagcctctcgcctgctcttcgcagcaggcaggggccaactctgcctgtcatccaagaattagaagaggaggaaattgcagagggcctgc

SEQ ID NO: 514612 - DNA, 201 bp, Homo sapiens
agaagttctaagttttagtgaagtccaatttatcaatattcttttatggttagtgatttatttttgtgtgtgtgtgtcctgttaaagaaacatttgttgtytgggtgcagtggctcatgcctgtaatctcagcgctttgggaggccaaggcgggtggatcacttgagcccaggagttcaagacaagccttggcaacatggt

SEQ ID NO: 514613 - DNA, 201 bp, Homo sapiens
agtcactgtgaacttcaagcaccctcccacttgaggtaagcttcaccagtttggcttgtgggaactgtcagaccagctccaggcgctggggctttctcagyggccttgtcagctcacagcaggcgttaacagcctctaattgaggaaactgtggctggacaggttgcaaggcagttctgctccccatcgtcctcttgctga

SEQ ID NO: 514614 - DNA, 201 bp, Homo sapiens
agtgcagtggcatgatatctcggctcactgcaagctccatctcccgggttcaagcagttctcgtgcctcagactcccaagtagctggggttacaagtgtgygccaccatgtctggctaatttttgtatcgttagtagagacgaggttttaccatgttggccagggtggtctcgaactcccgaccttgagtgatctgccggc

SEQ ID NO: 514615 - DNA, 201 bp, Homo sapiens
catgatatctcggctcactgcaagctccatctcccgggttcaagcagttctcgtgcctcagactcccaagtagctggggttacaagtgtgtgccaccatgyctggctaatttttgtatcgttagtagagacgaggttttaccatgttggccagggtggtctcgaactcccgaccttgagtgatctgccggccttggcctcc

SEQ ID NO: 514616 - DNA, 201 bp, Homo sapiens
aaactcatgttccatcaccccattctccaaacctgctccatctttaccagacccataagccacacgtgtgttttgtgttcccttaaccatgctactgctgkgtccataatacccaccttccctgttcctttctgcatacaccaggcaggccttggctttttctttcaatggcagctcccacccaccgcctctgggcagcca

SEQ ID NO: 514617 - DNA, 201 bp, Homo sapiens
ctgcccacattgctcaggcctgacactcttcccgctactttcagcttgggttctctttcctaggatgccagggatcagctgaccatgtggttagcatctcrggagtgcctcttcagttacaaccaaacagcatacagacgaaggttgacagcattgcatggaagaagttgctgccctcacaaaatggatttcatcacatat

SEQ ID NO: 514618 - DNA, 201 bp, Homo sapiens
cttctcttagcttcttcttgcttccaggaattttgcttgcaccttgcctaatgaaccctgctgcctccactggctcccagtagaacccaaactggcaataygctttcagtggccggcagcatgaaatacctccaccaccgatttcctaaggggtaggaacaagaaaagggaagcaggaagctctgcttcctgctttggccc

SEQ ID NO: 514619 - DNA, 201 bp, Homo sapiens
cctgagcattcttgtgtccttcaggaagacacagtcaaggctcaggtggactcaacatttgtaaggatgcaggcagcctagggcagagcatgatgaggaayagggagcagggagggaggagtggagcctgcagctcttgtgggtgggttggggggcctagtggcccaggattctaggcaggagagctaggttggaacctgg

SEQ ID NO: 514620 - DNA, 201 bp, Homo sapiens
cgccagaactttgggaggctgagacgggtggattacttgaggtcaggagttcaagaccagcctggccaatatggcgaaaccctgtctctactaaaaatacaaaaaaaaaaaaaagaatagctgggggtggtggcaggcacctgtagtcccagttactcatgaggctgagacaggagaatcacttgaacctgggaggcagag

SEQ ID NO: 514621 - DNA, 201 bp, Homo sapiens
acggctcactgtagcctcgacctcgcaggctcaagccatcctcccacctcagcctccctggtagctggaactagaggtctgtgccaccatgcctggctaatttttttttttttttttgtagatacagggtttccccatgttgcccagggtggtcttgaactcccgggctcaggcgatccacctgcctcagtctcccaaagt

SEQ ID NO: 514622 - DNA, 201 bp, Homo sapiens
agctcctgacagctctgacagtctaaatcagacaggacaggctggcagtgcactgggaggtctgtgagaggggtatctggccctgccaccagcaatccagraagtcttgggtgaggagattccttcccactggcttcaatttacccttccgtgtagtggagagagaagcctccttccagccgcctgtaaagatgatgaaaa

SEQ ID NO: 514623 - DNA, 201 bp, Homo sapiens
tatgactgacaactctattatgtagatgccctgtttgttggtttctgttgtctctattcttctgttggtttttggagatgtttccttttcttatacttcaytttggatattgtgtatgaaacattctaggaataatttaatgctctggttgatgttattttcctctagtcataacttatatttgcctctagttggcagcca

SEQ ID NO: 514624 - DNA, 201 bp, Homo sapiens
  misc_feature (1)...(201): n = A,T,C or G
aattgagcttcagttcctgtgagggctgttcatttctcgttcactcttactctttgggtatagccctctgtggtaccaacctcaacactgatggattttangtatacccgctttctaataggagggacgtgaacttcatgttctcttagttccttgagttttattgtgagctctgctcagcttctcagccttttagctgcc

SEQ ID NO: 514625 - DNA, 201 bp, Homo sapiens
attcattttttttttgagatggagttttgctcttgttgcccaggctggagtgcaatggtgccatcttggctcactgcagcctccgcttcccgggttcaagygattctcctgcctcagcctcccgagtagctgggatttcaggtgactgccacccgcctggctaatttttgtatttttagtagagatggagtttcactgtgt

SEQ ID NO: 514626 - DNA, 201 bp, Homo sapiens
aggttgctaggctctctctcccagttcatgccttctgatcccaatgcgcagatttccctgtagacagctggtttgggaggaggtgtgggaggggcagttcsgttgctgcctctgtgctctttggggttcctgggaagagcattaacttgcctcctttctagaaccttttttaaggtttggccatttggggtagaggtggga

SEQ ID NO: 514627 - DNA, 201 bp, Homo sapiens
tatgggaatgtgaaaaataaagcagtggctattggaatgtgaataataaaaggggactttgtttctctcactgctaccagactctggtacaaattcctgaragcatgtgaatctacccacagccagtgatgcccgggtgcttgctaaaaataatctatttttccaaaaagaagatgacttgagattaggagaccacaggag

SEQ ID NO: 514628 - DNA, 201 bp, Homo sapiens
tgctttttcactctctcaatgttgtctttcaccaaacagaagttctaagttttagtgaagtccaatttatcaatattcttttatggttagtgatttatttktgtgtgtgtgtgtcctgttaaagaaacatttgttgtctgggtgcagtggctcatgcctgtaatctcagcgctttgggaggccaaggcgggtggatcactt

SEQ ID NO: 514629 - DNA, 201 bp, Homo sapiens
gtctcgctctgtggcctgggctggagtacagtggtccaatctcggctcactgcaacttctgctcccccgggttcaagtgattgtcctgcctcagcctcccragtagctgggactacagatgcatgccaccaagcctggctaatttttgtatttttggtggagacagggtttcaccatgttggccaggctggtcttaaactc

SEQ ID NO: 514630 - DNA, 201 bp, Homo sapiens
ctgctcccacgtcacaagaacctgcatatacattatattcattaattcagccttccaggaaggtgagcctcttcccgtggtggtggtggggtgttgttgaygtagatgtgtattttgcatgtgtttgcagtgagagtgtgtgtgcacatcctggcaagttgttctttattgtgtgtatctgagtagcttctgttaaatgac

SEQ ID NO: 514631 - DNA, 201 bp, Homo sapiens
aaattattttttctttaaaaaaatttttttctgtgcccattgacagcagatattatatgcatttttgacaggaataccacaaaagtgatactgtgtctttytcagcgcatcccatcaggagtcatatgatgacagtgaaatttaaaaaaccactttgtttactgaataatttaacaggagtactatttatgtaagatgtgc

SEQ ID NO: 514632 - DNA, 201 bp, Homo sapiens
catgcagagtaaaagccatgcattttacaatggtgcgtgacctggcgtccaagacccactcctctttgtctctcctcttgctcacagcatttcagccatgytgcctgctggtcctggacctcgctctctgttgtatccacagttttctctgcctgggatgctgctcctttgctggctacatggcctcttccctcaacccct

SEQ ID NO: 514633 - DNA, 201 bp, Homo sapiens
ctctcctcttgctcacagcatttcagccatgttgcctgctggtcctggacctcgctctctgttgtatccacagttttctctgcctgggatgctgctccttygctggctacatggcctcttccctcaacccctcagagttttgctcaaatacctccttttcagtgatgccttccccactgaaaatgtcagcctgccattctg

SEQ ID NO: 514634 - DNA, 201 bp, Homo sapiens
gggtgaagtggggcggaagtgccttctttccactgccccctggcgctttgctgtggagacccagcagcacgcaggaagcacatgtggtggggctcttccgygctggccacatacgtgaggccctgtgcagcctcgcagagcaggcaagcatcctctcccagatgcctctgggttcagaggctgttagagcagctccccatg

SEQ ID NO: 514635 - DNA, 201 bp, Homo sapiens
tataggaaaaaaaaaccatacagctctcattcataaggaacttatagccaaatggggcaacaaaaataactacttgtggacaaaaaagaaacaagactgargcaggccgggcgcagtggctccctgtaatcccagcactttgggaggctgaggtgggtggatcacaaggtcaggagtttgagaccagcctggccaacatgg

SEQ ID NO: 514636 - DNA, 201 bp, Homo sapiens
cagagaggttaaataaatagtgcagagctcacagggttagaatttgagccaggcctgtctgatatatctatgctcttggcatcactcagaggaggttaacyaaatgagcaaagagaaaaccttgaccgtgagttctcagagcacgaggcaatcagccacaacacagagaaaagtgggttttgaggcagcccctgcagcagg

SEQ ID NO: 514637 - DNA, 201 bp, Homo sapiens
ctgtccggctgtgaactggctggcaggttctgcacgtgggtgggggccagggcctgggctttactcaattgcagagaaaaaactttctccctgcatctcayacctttacctctggccagttggccaccagggggagtgggctgaagggagagtagatggtgcaaagcaagcccatctctgagtagaaaaatcacccagagc

SEQ ID NO: 514638 - DNA, 201 bp, Homo sapiens
ctagctatttttagtgggaggattggttagcatgtcttaacctggattttcattacataattagaattccttcgatgattttttatctcaacaattaaggrgatgctgtagaatgaaagtgttctgtttccagatcacaaactctctggagtcaggaatcatgccttatacatgaagaggccctgcctcttcaggggctgg

SEQ ID NO: 514639 - DNA, 201 bp, Homo sapiens
aaactttctccctgcatctcatacctttacctctggccagttggccaccagggggagtgggctgaagggagagtagatggtgcaaagcaagcccatctctragtagaaaaatcacccagagcacatgctgacctgataactggggtgttgagaccagctttgtccatggtatgatgtttgatttatgaagacgcattgtta

SEQ ID NO: 514640 - DNA, 201 bp, Homo sapiens
tcaccccattctccaaacctgctccatctttaccagacccataagccacacgtgtgttttgtgttcccttaaccatgctactgctgggtccataatacccrccttccctgttcctttctgcatacaccaggcaggccttggctttttctttcaatggcagctcccacccaccgcctctgggcagccactcctaactctgca

SEQ ID NO: 514641 - DNA, 201 bp, Homo sapiens
caataaagatgctgccattggtcagaagggagggatgggtggctgcctgctggaattcctggcacttcagctatcacccaacattaaagccaactggacawcccagggtcatagagggcactgtgtagacccaggtagcttgtgaggtcatgaaaaagcatatgtggttaagagagtactggaattggagccagaagaact

SEQ ID NO: 514642 - DNA, 201 bp, Homo sapiens
tgtttcctctgcattcctgcccccaccaccaaccctgaccagattttgtcttataatagggcagttttattctgcgcttgtattttgtattttgtttcccstgcattcctgcccccaccaccaaccctgatcagattttgtcttataatagggcagttttattctgcccttgtattttgtgttttccatccactctgcttc

SEQ ID NO: 514643 - DNA, 201 bp, Homo sapiens
actcatgttgttgaagggtctacttttagatcaattgtcttcaataatgaaagatgacaatttaatgatctcttacaattttgcctcatcccctcctttcstgttcccacatccttcacatatttttagtagaattatgacttgatgtttacactgtgatggtgaaatagttgcaggtgagccatgtagtgtgctatgata

SEQ ID NO: 514644 - DNA, 201 bp, Homo sapiens
ctgcattcctgcccccaccaccaaccctgaccagattttgtcttataatagggcagttttattctgcgcttgtattttgtattttgtttcccctgcattcstgcccccaccaccaaccctgatcagattttgtcttataatagggcagttttattctgcccttgtattttgtgttttccatccactctgcttcgttgcctt

SEQ ID NO: 514645 - DNA, 201 bp, Homo sapiens
caccaaccctgaccagattttgtcttataatagggcagttttattctgcgcttgtattttgtattttgtttcccctgcattcctgcccccaccaccaaccstgatcagattttgtcttataatagggcagttttattctgcccttgtattttgtgttttccatccactctgcttcgttgcctttcctcccttttcttgcct

SEQ ID NO: 514646 - DNA, 201 bp, Homo sapiens
tttcccctgcattcctgcccccaccaccaaccctgatcagattttgtcttataatagggcagttttattctgcccttgtattttgtgttttccatccactstgcttcgttgcctttcctcccttttcttgcctatgccagatttttttaagttgtgatgagggaaaacatttgcatatgtatatgtatatgtgtgttcgtg

SEQ ID NO: 514647 - DNA, 201 bp, Homo sapiens
gctggggcttttttgttttttgtttgtttgtttgtttgttttttgttttttgttttttttttgagacggagtctcgttgtgtcacccaggctggactgcasccatgcgatctcggctcaccgcaacctccacctcccaggttcaagtgattctcttgcctcagcctcctgagtagctgggattacaggcacccaccaccac

SEQ ID NO: 514648 - DNA, 201 bp, Homo sapiens
tgtggcttgttgcttagtaaaccttaacaagagtaagtgggcggggaccaacaaatgtaagtatcagtgggtcttttttcttagaccaattagtttcccckaagaattctccaacctcttgcttaggggttatgagcctggctatcagaattctgggagcttagtaaggggattggagggaaggtatctttttgttcagca

SEQ ID NO: 514649 - DNA, 201 bp, Homo sapiens
taactttatatggttaccctatctacaggaaatgtagcattaacaatgttattcgtggtcagtaaaaaacccttaggtagttctctctaaagggatcctakgaatgaatgattggagggtagtgtgcctctcacctttgactatcttctgtccagtgtactcttacttaaagtggtaaaatctctaatattgtttttaatt

SEQ ID NO: 514650 - DNA, 201 bp, Homo sapiens
ctctgagtcaactgataggaaatttttctattcttagcacttcaaatccaagaagtaaaatgaaataagctactttatgtttttgttttgttgttgctcakgatgtacatttttggtggatgggtcccacataagggggaaaatactgagacttcacctcatgattgtgaatggagatgtaccagttcattttcttaccta

SEQ ID NO: 514651 - DNA, 201 bp, Homo sapiens
agaaaacatcaacaagcccaaactgagggacattctagatcttctacaaagaatatgtgagcagtactattcagaagtttcaaagtgaaggaaaacaaggraagactaagaaataatcaaaaactggaggagacaaaggagacattacaactgaatgtgatgttgtgttccggattggatcctggaacaaaaaaagacatt

SEQ ID NO: 514652 - DNA, 201 bp, Homo sapiens
taaacttagttgtgtttttgaaaagcaagcatgaaattaaacattgtagatccaaatgaggtaggttttaaaaatcaacaataaaagatgtaacatctaaygcaattattttagtaaaaatgaacattttgtattctaaagatagactcaacataataagtgataacagaggaaacttaagaacctttaacctgttttttc

SEQ ID NO: 514653 - DNA, 201 bp, Homo sapiens
ctccttctaggattaaacacatttccaaatctgaagactcatatagtttggtagtttcgtactggattgttttgtttatagatatatttgtctaagaaaataaataaataaataaataaataaataaataaatagaataagaaccccaaactatttttatttgacctactgtagctgtgtttatctgagtaaactttccct

SEQ ID NO: 514654 - DNA, 201 bp, Homo sapiens
tcttctataagtattgatctatttaggttttcaacctttcataatttttagtaattttttttgagaagttacccatttatctagatttttaaatttatttytaaaagttataagacagccaggtgtggtggtacgcacctatagtcccagctgcttgggagtctgaggcaggaggatcatctgaacccaggagtttaaatc

SEQ ID NO: 514655 - DNA, 201 bp, Homo sapiens
aatagttctgaagctctgagtcaactgataggaaatttttctattcttagcacttcaaatccaagaagtaaaatgaaataagctactttatgtttttgttytgttgttgctcaggatgtacatttttggtggatgggtcccacataagggggaaaatactgagacttcacctcatgattgtgaatggagatgtaccagttc

SEQ ID NO: 514656 - DNA, 201 bp, Homo sapiens
ccttaaaaggttatagcttcatactttcaaaaattccttttttgtcatttgaattgggttttggagaaatctcctgaagagcaaatgtgtttaatctatcrtgtttaatgaaaattctcaagatttatttatacttattttataaaattccagttagactgagtgtctgattttaagcaaaaagcacattccagatgtaag

SEQ ID NO: 514657 - DNA, 201 bp, Homo sapiens
gttttttgtttaagtgatatcaatgaccaaagttatatgaaatttaatcctcttcggttactatatgcatacaattttaaatttgactttggatgtcatakatcaattgagtgtctctctgactgaggtacccttagtatattataggcaatattgatttttaagtatattatagttgaaatattcttcactttaagtaac

SEQ ID NO: 514658 - DNA, 201 bp, Homo sapiens
gcacttcaaatccaagaagtaaaatgaaataagctactttatgtttttgttttgttgttgctcaggatgtacatttttggtggatgggtcccacataaggsggaaaatactgagacttcacctcatgattgtgaatggagatgtaccagttcattttcttacctaaatctgggtgagtcttttaagagttactcattgaat

SEQ ID NO: 514659 - DNA, 201 bp, Homo sapiens
tatgtttttggtggaatgtgtggtgctcgcctggatgacctatggcagcttgacttaggtaagtttaacttgattcaggctcaggaatagggcaaattaaraaatgctttgaaaaatattattgattgcagtatttattgagttgtacttagatttataaccagcacttgtagccccagggacagtgtatgtgtgatatga

SEQ ID NO: 514660 - DNA, 201 bp, Homo sapiens
gtctattaaatcaatgttttatgtatttattattattgcttttagagatgtgttcttgctatgttgctcaggctggataactcctaggctcaagtaatctycccacctcagcctcctgagtagctgggagtacaggcatgtgccattgcacctggctctattaaatgaatgttcgaagcttttttattttgtgagtctagg

SEQ ID NO: 514661 - DNA, 201 bp, Homo sapiens
ggcaagcatgagaaacctggcaagcactaccttaatcaagtgatcaaggttaatatcactagtgataagttagtatcatttactccctaatatcatgtgawaagtgaaagtacctcggtggtattcccaaatccataacctcagcctaactatgagaaaacatcaacaagcccaaactgagggacattctagatcttctac

SEQ ID NO: 514662 - DNA, 201 bp, Homo sapiens
catttgatctatgatttagtggaaagtcaagaacaatggttcggtgtttagaatgaacgaggaaggtaaaaagttggatatccattatggatataatgcastttatttttctaaacattttatgcctaatggataattcatactaataccatttgtggtgctcatgtatgattttaaaactgaaagtaccaagaatcatat

SEQ ID NO: 514663 - DNA, 201 bp, Homo sapiens
gaggagacaaaggagacattacaactgaatgtgatgttgtgttccggattggatcctggaacaaaaaaagacattaattgaaaaactggtgaaatctgagktgtctatagttgagttaatagtattacaccaataatttcttagttttaacaaatgtggtaatattaggggaagctggagaaaagggaaagctggggtcag

SEQ ID NO: 514664 - DNA, 201 bp, Homo sapiens
tggtgctcatgtatgattttaaaactgaaagtaccaagaatcatatgacaagaacgataagacacaacaattatctgcagatatcatattaataattaccytttcccttttattttaggtcctcacacttcagcaaatgtaggtgttctaagtagttgcctggatgtaagaacagtaattcctgaaacatctgtatccagt

SEQ ID NO: 514665 - DNA, 201 bp, Homo sapiens
ctcagtgactttccacttaggagaaggctcttagctccagcttttctgtcttacatcttatctactattttctcttctgccattctctttttccttaaaargttatagcttcatactttcaaaaattccttttttgtcatttgaattgggttttggagaaatctcctgaagagcaaatgtgtttaatctatcgtgtttaat

SEQ ID NO: 514666 - DNA, 201 bp, Homo sapiens
gcggggaccaacaaatgtaagtatcagtgggtcttttttcttagaccaattagtttcccctaagaattctccaacctcttgcttaggggttatgagcctgrctatcagaattctgggagcttagtaaggggattggagggaaggtatctttttgttcagcatttagactttcatttaattcctattttcagtaggggtgcc

SEQ ID NO: 514667 - DNA, 201 bp, Homo sapiens
aggctgaagcaaaagtatcacttgaacccaggtagtggaggttgcagtgagctgagatcatgccactgcactccagcctgggcaacaagcaagactctgtyttaaaaaaaaaaaaaaaattcacacacacacgcacacaagcacacatatactgcagtacgtgtgtgtgtgtgtgtgtgtgtatgtgtgtgtgtatatata

SEQ ID NO: 514668 - DNA, 201 bp, Homo sapiens
ggaggctgaggcaggagaatggtgtgaacccaagagacggagcttgtagtgagccgagattgtgccactgcactccagcctgggtgaccgagcaagactcygtctcaaaaaataaataaataaatagtcacacagaaatgaacccttacagttcaaactcatgttgttgaagggtctacttttagatcaattgtcttcaat

SEQ ID NO: 514669 - DNA, 201 bp, Homo sapiens
tcgggaaactcatgaccttcattactgatgatttcttccctcaatttcttttcttttttttttataaactagtcctctgattttgctttttatcttctgtkttctctgtgtattccaatttttacattttaaatatatccaaccacatttttaatttctaaaagcctcattttattctttatttctgttaatagcacccta

SEQ ID NO: 514670 - DNA, 201 bp, Homo sapiens
tgtattccaatttttacattttaaatatatccaaccacatttttaatttctaaaagcctcattttattctttatttctgttaatagcaccctattcttgtktcataaatataatatctttccttctctcttgaagaattatacttcaaaaattttggagttttagtctgctctttgttatgtttctttttttcaagctcct

SEQ ID NO: 514671 - DNA, 201 bp, Homo sapiens
aggtcctttcagcaaaatcagtgaatttaaaacttgtattcctggttttcctggagctccttctgcagtcagaatttcaaaggtgagacatcgggtcaagrcttgttggtgattttaaattatttgaaatttcacatgtgaagtaaactgtcagtttagaaattcttgttaccatctaatgaaatgagagatacctaaaag

SEQ ID NO: 514672 - DNA, 201 bp, Homo sapiens
ctccagcgttttcttgtactctgcacctctgccaccactgactgcactgggccctggggcacaaatgggccacatctcagtgactttccacttaggagaargctcttagctccagcttttctgtcttacatcttatctactattttctcttctgccattctctttttccttaaaaggttatagcttcatactttcaaaaat

SEQ ID NO: 514673 - DNA, 201 bp, Homo sapiens
atctactattttctcttctgccattctctttttccttaaaaggttatagcttcatactttcaaaaattccttttttgtcatttgaattgggttttggagawatctcctgaagagcaaatgtgtttaatctatcgtgtttaatgaaaattctcaagatttatttatacttattttataaaattccagttagactgagtgtct

SEQ ID NO: 514674 - DNA, 201 bp, Homo sapiens
caaatgtgtttaatctatcgtgtttaatgaaaattctcaagatttatttatacttattttataaaattccagttagactgagtgtctgattttaagcaaaragcacattccagatgtaaggattttggaatgaaataaaccaaattcgaattctagctgttacttactggctacctggctgtaggtgtattacttaagttc

SEQ ID NO: 514675 - DNA, 201 bp, Homo sapiens
aacagtagcaccaccaattaagggcaagcacagggcatattatagacaagtatcctcagagctatgagaaattatgagccaacaataaaaatagagagagmacagtaacaaaaaacaggtaattagaaagaacaacaatattagggtatttgaatgaagccaggtcacttttatggttaggtagacctataggtttaataa

SEQ ID NO: 514676 - DNA, 201 bp, Homo sapiens
tttatcttctgttttctctgtgtattccaatttttacattttaaatatatccaaccacatttttaatttctaaaagcctcattttattctttatttctgtkaatagcaccctattcttgtttcataaatataatatctttccttctctcttgaagaattatacttcaaaaattttggagttttagtctgctctttgttatg

SEQ ID NO: 514677 - DNA, 201 bp, Homo sapiens
gataatacatacatatatgtacttttgaggtttttttttgttattagtcatttcaacttaatttctgtgagcaagagttttcatttgacctaaatttaacytttagaatctttaagaattctctttagtttttattttctttcaatcatgactttatgggttatgaccatatatttacctttatcagctttcatctttcca

SEQ ID NO: 514678 - DNA, 201 bp, Homo sapiens
tagactttcatttaattcctattttcagtaggggtgcctctccccatacttgtatcatcctcatacttgtatcacttgagcgataccgtagcgtagtctakagactcacatttcaacctttctgcctatttcccatcttcagctagaatggaggagaggaatttctctggcttggtatgctgggagagcagaactagggct

SEQ ID NO: 514679 - DNA, 201 bp, Homo sapiens
gcgtagtctagagactcacatttcaacctttctgcctatttcccatcttcagctagaatggaggagaggaatttctctggcttggtatgctgggagagcasaactagggctacagcccttcttaaacaggcttctgtgtgacaggcctccagcgttttcttgtactctgcacctctgccaccactgactgcactgggccct

SEQ ID NO: 514680 - DNA, 201 bp, Homo sapiens
ttttggaatgaaataaaccaaattcgaattctagctgttacttactggctacctggctgtaggtgtattacttaagttctctgagtatcattttcttcatmtataaaaaaagggtcaagttatcttactgataggattcttgtgaagattaagtaagatacagagtttatggatatatatagtacactgcctgccataatg

SEQ ID NO: 514681 - DNA, 201 bp, Homo sapiens
ccaactacttgggaggctgaggtgggaggatcacttgagccaggaggtcaaggctgcagtgagccatgttcaggccactgcactccagcctggatgacagmgtgagatgctgtctcaaaaaaaaaaattattaaatggacaatttctgagagagaattgccaaggaaatagatgttcattttgaatctcccgaagatatgc

SEQ ID NO: 514682 - DNA, 201 bp, Homo sapiens
tatatgtgtatatatgtgtaaattacattaatggttaaaagataaggtgtgttatggaacataaaacttgaatggctgtattgctagctgcttaataggarcacaacagaatattgcaatagtggattgacataaatgtagggtagcccaataatctctgatatttggttgtcttacataggccaaatttggtatgcatgg

SEQ ID NO: 514683 - DNA, 201 bp, Homo sapiens
ttgaacacttgtgaggttctttcttgtttatgaagtgcatcacagtaggtcttggtagagactaacgaatatgcttactaagattcattatttttatttgrtaaactgccatctacctcagtagactgttttcaaggaaattgatgtaggtattggctcatacgttctgagtatgactgaagaccagtaaaggcataggtc

SEQ ID NO: 514684 - DNA, 201 bp, Homo sapiens
atgtgtacttatgtgtttattattttgccatttctaaatgtcacacaaacaaacatctaaagatgtactttaaaaatatgtataaaatattttctttactrtgtattttgtttactgaagaatatcagttactaaattgaacacttgtgaggttctttcttgtttatgaagtgcatcacagtaggtcttggtagagactaa

SEQ ID NO: 514685 - DNA, 201 bp, Homo sapiens
cgccggcgcccgcggccacgtgaccccagcacagctggaggcgggtccccgccctccccagggagcagccggttgaggcgggagcggtgcattgtgggcasaggggcgggggttgggaagatggcggctcccagcctcctcaactggaggcgagtttcttccttcacggggccggtcccccgcgcccggcacggacaccga

SEQ ID NO: 514686 - DNA, 201 bp, Homo sapiens
aattgtatttgttatttgagttggagccagttgttttataaaagttgttgaagagagtttttacaactttatagaatgaaaacaagtttaaagctattacttttttttttaactttaaagactcttctagttagctcactttgtcatgtgtgatagcctaaatattaaaaaaatgtgaattataagcatgtacctctgctg

SEQ ID NO: 514687 - DNA, 201 bp, Homo sapiens
gtgaccccagcacagctggaggcgggtccccgccctccccagggagcagccggttgaggcgggagcggtgcattgtgggcagaggggcgggggttgggaaratggcggctcccagcctcctcaactggaggcgagtttcttccttcacggggccggtcccccgcgcccggcacggacaccgagcggtggccatccgggagc

SEQ ID NO: 514688 - DNA, 201 bp, Homo sapiens
ttcttccttcacggggccggtcccccgcgcccggcacggacaccgagcggtggccatccgggagctgatgatcatctttggagggggaaatgagggcatckcggatgagctgcacgtctacaacacgggtaggcgcggcggcggctcgtcggccccgcctgctggagctgcggagggggaggggaggcgaggcggcggccg

SEQ ID NO: 514689 - DNA, 201 bp, Homo sapiens
tgacttggagaatgcctgtcactcctgtgtttgaattggcatccctgtttcactgtcagttgacctaatctgttaagactttatttacttatgagttgttratgttgtggtgtttatccaaatacctacttgtagatcactgcatggacttattaaatcttgaaatttttcgtatattcaataagagtcttcataaatttt

SEQ ID NO: 514690 - DNA, 201 bp, Homo sapiens
ttttaaacaaccagatctcatgagaactcactatacaatactaaggggggatggtgctaaaccattcatgagaactctgcccctacgatccaatcacctcycatcaggtcctacctccaacactaaggattacaattctacatgagatttggtgggaaaacagatccaaatcatatcaccaagttacattgtattctgtgt

SEQ ID NO: 514691 - DNA, 201 bp, Homo sapiens
aggattgcttgagcccaggagtttgagactgcagtgcagtatgatagcacctgtgaatagccactacattccaaactgggcaacatggcaatacctatctytaaatttaaaaaaaaaaaaaaacttatacaatcactgaggtggagagttttttgtttgtttgtttgtttatttgagacagggtcttgctctgtcacccaa

SEQ ID NO: 514692 - DNA, 201 bp, Homo sapiens
cttgagcccaggagtttgagactgcagtgcagtatgatagcacctgtgaatagccactacattccaaactgggcaacatggcaatacctatctctaaattwaaaaaaaaaaaaaaacttatacaatcactgaggtggagagttttttgtttgtttgtttgtttatttgagacagggtcttgctctgtcacccaagctggag

SEQ ID NO: 514693 - DNA, 201 bp, Homo sapiens
taaaaatcaacaataaaagatgtaacatctaatgcaattattttagtaaaaatgaacattttgtattctaaagatagactcaacataataagtgataacasaggaaacttaagaacctttaacctgttttttcccccccccttcaagaatgttgaaggtatccacctttcctgggaacctccaacctcaccttctggaaat

SEQ ID NO: 514694 - DNA, 201 bp, Homo sapiens
ggaatattcagcctacttggctatccgcacagcacagatacaagataatccaagtcaacttgtgttcatgaggatttattgtggtcttaagacatcatgtrtagtaactgctgggcaacttgcaaatgcacatattgattatacatccaggcctgccattgtgttcaggatatcagcaaagaatgaaaagggatatggacc

SEQ ID NO: 514695 - DNA, 201 bp, Homo sapiens
atttcatcacccaggtattaagcctagtacccattagttatttttcctgatcctctccctcttcccaccctccactctctgataggccccaatgtgtgttstctccctctatgtgtccatgtgatttcaagcaaaattacagcatccaaatcacagaaaggcagggaaatctggtatgcttctaaatttgttcttgttatt

SEQ ID NO: 514696 - DNA, 201 bp, Homo sapiens
gtgtttggcaggtaacggtcaagagcccctccgtgagccgcgctctaaagcggcggggacgtggtgaggcggccttgtgtctgcatactcggtgtggacgyccttctggactggccctcggaaagaggactgtcataacttgagcaccactgcagatcacaagtgcccctgggcagggagcccctatctttgaggacctct

SEQ ID NO: 514697 - DNA, 201 bp, Homo sapiens
ggtccttaatcctgcctgcacttgagagttatctctgaggtaaacaaacaaacaaacacagattcccaagctcttcctcaaatctagtgaagcagaatctwtaggaaaatgcccaggtagctctgtttttgaagaaagcttcacagatcgctgtgacagaagcctgaattgaaaacccaggccaagggaagcctagctgca

SEQ ID NO: 514698 - DNA, 201 bp, Homo sapiens
ttgccctgtacattgtaagatgtttggcagcatccctgcctctacctactagatgccagtaacagccccctccagttgtgacaactaaaaatgtcaccagrcattaccaaatgtcttctggggggcagaatcatccccagttgagacccactgatattgatgatatatatttgctgatagtatatgataaccgttgtttgt

SEQ ID NO: 514699 - DNA, 201 bp, Homo sapiens
cacatttttccagagaggatttcagtcaacttaagcaaactattaagaaaacatataacctttggtaaagatactactttttaaactttaatatgtaactytaaaaatatttaattatattttattgaagctagttaagagcatatcagtctgaacctttctcattccttcaggagtcaggatggaccctcacagacaagg

SEQ ID NO: 514700 - DNA, 201 bp, Homo sapiens
caccagacattaccaaatgtcttctggggggcagaatcatccccagttgagacccactgatattgatgatatatatttgctgatagtatatgataaccgtkgtttgttataatcggttttcattttattttggcaactagctacgaatcagtggtttctgccagctgttagaggagatatccctccaggctgtgctgccca

SEQ ID NO: 514701 - DNA, 201 bp, Homo sapiens
ttaataatgatattgttcataatttttcaaaagattgcaacattactaacattgtttaacacattttaatattattcaagtaatgtattattcaagtaaastattattcaagtaatattattcaagtaatgtaaacttcacattttatagctttatagaaaatgtttccacttcacttaaaacccaaagtttcctggcaag

SEQ ID NO: 514702 - DNA, 201 bp, Homo sapiens
gggattagccgacgtgagccaccgtgctgtgccgcaaattcttaagtattaagtactgcaggactcacagagggatagttggcattggtatcaactgacakattcacaactttgaataaaactttccacatttggaaaatcaccatgcctggcccctaggctatactttgaaaaccactgctttagtgttttagaaattgt

SEQ ID NO: 514703 - DNA, 201 bp, Homo sapiens
aaagcttttctgtcattacttgtctgtattttctacagtagcatgtattgtttttgtaatgtaaaaagagtttaattttaaaattaagatagttgaaaaartaatgaaacaagagagtaaatgctttctgtggaagaagcatatactagcaagcaagaaaaaaatatagaaaattcaacttactagtttatctttgaaatt

SEQ ID NO: 514704 - DNA, 201 bp, Homo sapiens
ttggtggcctggcaaacgaaagcgaagattcaaacaataatgttcccaggtatgctgactctttcagaccaaatgcttattttatgatttagagtaggaayattttattttttccatctttaatttttaaaagggatgatgcttagctttttgcatttcaacctaacagtggacagatttgtgtgtgtttgtgttttcctt

SEQ ID NO: 514705 - DNA, 201 bp, Homo sapiens
catttactccctaatatcatgtgataagtgaaagtacctcggtggtattcccaaatccataacctcagcctaactatgagaaaacatcaacaagcccaaastgagggacattctagatcttctacaaagaatatgtgagcagtactattcagaagtttcaaagtgaaggaaaacaagggaagactaagaaataatcaaaaa

SEQ ID NO: 514706 - DNA, 201 bp, Homo sapiens
agctgtagccaggcgtggtggctcatgcctataatcccagcactttgggaggccaaggtggaaggatggcctgagcccaggaggttgagtttgcagtggaycgttatcatgccactgtactctagcctgggcaacagaacaagatcctgtctcaaaaaaaaaaaaaaaaaaaaatctctggttggcataaaaaaaaaaata

SEQ ID NO: 514707 - DNA, 201 bp, Homo sapiens
ctcacctttgactatcttctgtccagtgtactcttacttaaagtggtaaaatctctaatattgtttttaattcacaattggtggcaccctaagcacacttrtttattacaaatacagtcatccctcggtatctgtggaagatttatttaggacctcccctaataccaaaatccatggatgctcaagtccctgatataaaat

SEQ ID NO: 514708 - DNA, 201 bp, Homo sapiens
ttcaagatcagcctgggcaacatggcaaaaccccatctctaccaaaaatacaaaaaattagctgggcatggtggcacgcgcctgtggtcacagctactcaraggctgaggtgagaggatttcttgagcctgggaggtggaggttgcagtgagccgagatcgtgctgctgcactccagcctgggtgacagagttagacctta

SEQ ID NO: 514709 - DNA, 201 bp, Homo sapiens
tgacagtaactctcttgtgcattctataaatagggttaccttatgtcctggtttacctgggatgattctggtttatgcttattgtcttgtgtaattatcartagtacaatactccctttcactctgaaaaatgtcctgttggggatgataactttatatggttaccctatctacaggaaatgtagcattaacaatgttatt

SEQ ID NO: 514710 - DNA, 201 bp, Homo sapiens
atgtaccagttcattttcttacctaaatctgggtgagtcttttaagagttactcattgaattaatctttattaataagataatttttgtaattttgttaaraacaaaagattagtcatggatatttctatcttttcagatacaacagagtggaccaccctagtatcagattctcaggaagataaaaaaaattcaagaccaa

SEQ ID NO: 514711 - DNA, 201 bp, Homo sapiens
gcgcccggcacggacaccgagcggtggccatccgggagctgatgatcatctttggagggggaaatgagggcatcgcggatgagctgcacgtctacaacacrggtaggcgcggcggcggctcgtcggccccgcctgctggagctgcggagggggaggggaggcgaggcggcggccgcggccctgacagctgtcaccgcccgg

SEQ ID NO: 514712 - DNA, 201 bp, Homo sapiens
gtatttttaatagagactaacatggggtttcaccgcgttagccaggatggtctcgatctcctgacctcgtgatctgcccaccttggcctcccaaagtgctgggattacaggcgtgagccactgcgcccggccaaatttattcttttttatggctgcaatatttttttctttttaagcccgaataatattcacatagtgttt

SEQ ID NO: 514713 - DNA, 201 bp, Homo sapiens
tctgccggttgcccaggatcagcgctaaagttaccaaacctttttaagcctcacaattttcagttgtaaaatagagatttttatactcacccagcagggcrttttgtaagaattaaatgatacagatcagggtttttcaacagcagcactctcgaccttttgggccaggtaattctttgttgaggttgggggaagctgccc

SEQ ID NO: 514714 - DNA, 201 bp, Homo sapiens
ggccagagcaggaggattgcttgagcacaggaggccaggactacagtgagccatgtttacatcagtgcattccagccagggcaacagaacaagactgtttaaaaaaaaaaaaaaaaagtaaaatttgtacaaaaaggcttactgggattttgatagggatttcactgattatatatcagtttgaggagaatcaccatctta

SEQ ID NO: 514715 - DNA, 201 bp, Homo sapiens
tcctaagttttttattctttttgaggatattatgaatccatttggtttcttttttttttttgagatggagtctcgctctgtcgcccaggctggagtgcagkggcgcaatctcagctcactgcaagctccgcctcctgggttcacgccattctcctgcctcagcctcccgagtagctgggactacaggcgcccgccaccatg

SEQ ID NO: 514716 - DNA, 201 bp, Homo sapiens
accaaattcgaattctagctgttacttactggctacctggctgtaggtgtattacttaagttctctgagtatcattttcttcatctataaaaaaagggtcragttatcttactgataggattcttgtgaagattaagtaagatacagagtttatggatatatatagtacactgcctgccataatgcctggcatagttgtgg

SEQ ID NO: 514717 - DNA, 201 bp, Homo sapiens
attattgttgattcttaggagttctttacatatatatatttttatatgttccaaatatgttttctaagtcttctgtttgcctttttttttttttttgagayggagtctagctgcatcgccgaggctggagtgcagtggagcgatctcggctcactgcagcctccacctcatgggttcaagcgattctcctgcctcagcctc

SEQ ID NO: 514718 - DNA, 201 bp, Homo sapiens
taaggattttggaatgaaataaaccaaattcgaattctagctgttacttactggctacctggctgtaggtgtattacttaagttctctgagtatcattttyttcatctataaaaaaagggtcaagttatcttactgataggattcttgtgaagattaagtaagatacagagtttatggatatatatagtacactgcctgcc

SEQ ID NO: 514719 - DNA, 201 bp, Homo sapiens
tccgggagctgatgatcatctttggagggggaaatgagggcatcgcggatgagctgcacgtctacaacacgggtaggcgcggcggcggctcgtcggccccscctgctggagctgcggagggggaggggaggcgaggcggcggccgcggccctgacagctgtcaccgcccggtcactgcttccttgggcgggcggcggggag

SEQ ID NO: 514720 - DNA, 201 bp, Homo sapiens
gtctagctgcatcgccgaggctggagtgcagtggagcgatctcggctcactgcagcctccacctcatgggttcaagcgattctcctgcctcagcctcccargtagctgggattacaggctcccaccaccatgcctagctaatttttgtatttttagtagaggcagggtttcactttgttggccaggctggtctcgaactcc

SEQ ID NO: 514721 - DNA, 201 bp, Homo sapiens
ttgtttctgtttagaacattaatgcatttgtgatatacttttgtgactagtgtaaggctttttacttcttttcctagttgattttcaattttcccaacacyatttattaaataagccatgttttctattggtttgaaattccatctctgtcatatcttaattcttgtataaatgtgtctctctaggctttctataccaggg

SEQ ID NO: 514722 - DNA, 201 bp, Homo sapiens
ttttataaaattccagttagactgagtgtctgattttaagcaaaaagcacattccagatgtaaggattttggaatgaaataaaccaaattcgaattctagstgttacttactggctacctggctgtaggtgtattacttaagttctctgagtatcattttcttcatctataaaaaaagggtcaagttatcttactgatagg

SEQ ID NO: 514723 - DNA, 201 bp, Homo sapiens
cttttattatatttaaataacttaattccttgaatatttagaagaaattttccatatttacctgggattggtatatgatcttttattgccttttcaatttyttctataagtattgatctatttaggttttcaacctttcataatttttagtaattttttttgagaagttacccatttatctagatttttaaatttatttct

SEQ ID NO: 514724 - DNA, 201 bp, Homo sapiens
tgagtttgccatggaaatctgtgaatatggaagagtaacttgaatgtctactggaacatatattttaattccagaagttagctggttatttgtcatttgtyccaaaagtagttttttagtgccttctgatgggatttagattaaaatgtattgatatgatgttgcactattgacaatataggagtgctttcttgattttgt

SEQ ID NO: 514725 - DNA, 201 bp, Homo sapiens
cagcacagatacaagataatccaagtcaacttgtgttcatgaggatttattgtggtcttaagacatcatgtatagtaactgctgggcaacttgcaaatgcrcatattgattatacatccaggcctgccattgtgttcaggatatcagcaaagaatgaaaagggatatggaccagctacacaagttcggtggcttcaaggta

SEQ ID NO: 514726 - DNA, 201 bp, Homo sapiens
tttcataatttttagtaattttttttgagaagttacccatttatctagatttttaaatttatttctaaaagttataagacagccaggtgtggtggtacgcmcctatagtcccagctgcttgggagtctgaggcaggaggatcatctgaacccaggagtttaaatctagcctgggcaatataatgagcccctgtctgtgaaa

SEQ ID NO: 514727 - DNA, 201 bp, Homo sapiens
tttttagtttattttctttgactctttaactctattccatttctttcaacttttgttcctaacctttttttttttttttttttagaggcagaatctcattstgtcacccaggctagagggtggtgacacaatcatagcttactgcagccttgaactcttgggttcaagctatactcccacctcagccttctgagtagctag

SEQ ID NO: 514728 - DNA, 201 bp, Homo sapiens
ctagatttttaaatttatttctaaaagttataagacagccaggtgtggtggtacgcacctatagtcccagctgcttgggagtctgaggcaggaggatcatytgaacccaggagtttaaatctagcctgggcaatataatgagcccctgtctgtgaaaataaaaaaaaaaaaattatttatttaaaaatgttttaaagttat

SEQ ID NO: 514729 - DNA, 201 bp, Homo sapiens
gagaagttacccatttatctagatttttaaatttatttctaaaagttataagacagccaggtgtggtggtacgcacctatagtcccagctgcttgggagtytgaggcaggaggatcatctgaacccaggagtttaaatctagcctgggcaatataatgagcccctgtctgtgaaaataaaaaaaaaaaaattatttattta

SEQ ID NO: 514730 - DNA, 201 bp, Homo sapiens
ctggcaagcactaccttaatcaagtgatcaaggttaatatcactagtgataagttagtatcatttactccctaatatcatgtgataagtgaaagtacctckgtggtattcccaaatccataacctcagcctaactatgagaaaacatcaacaagcccaaactgagggacattctagatcttctacaaagaatatgtgagca

SEQ ID NO: 514731 - DNA, 201 bp, Homo sapiens
gtgcacattatttcatcacccaggtattaagcctagtacccattagttatttttcctgatcctctccctcttcccaccctccactctctgataggccccartgtgtgttgtctccctctatgtgtccatgtgatttcaagcaaaattacagcatccaaatcacagaaaggcagggaaatctggtatgcttctaaatttgtt

SEQ ID NO: 514732 - DNA, 201 bp, Homo sapiens
tacaataccctctggctgttttttattgtgataaaatacatgtaacataaaatttgctgtcttagccatttttaagtttacagttggtggcattaaatatrtatttaaaaattatattttaatgtatctgataagttatgtaaatcttatctgataaattgtttaatttttagttgatgaaacatatgcactgcctgcaac

SEQ ID NO: 514733 - DNA, 201 bp, Homo sapiens
aaacattcttttgcctacctcctttttctgtatgttccatatatttttgaatcttattccaggttatgataaatattaaaaattaactttgtagtaagttyttcttagtggttatttagatctcataaccatatatttgaacatcagtttagatgtaatcataaattactaccatttctcttattcaaagtattatttctt

SEQ ID NO: 514734 - DNA, 201 bp, Homo sapiens
tttctttgactctttaactctattccatttctttcaacttttgttcctaacctttttttttttttttttttagaggcagaatctcattctgtcacccaggmtagagggtggtgacacaatcatagcttactgcagccttgaactcttgggttcaagctatactcccacctcagccttctgagtagctaggactagaggcac

SEQ ID NO: 514735 - DNA, 201 bp, Homo sapiens
gcataaaaaaaaaaatagatctggttgacatcaggtcaaatgggccctgatttctgcctaatgagcctttctcttccagcagccatcaggcttgtcttaaraactcctagggccctaaaggaacacagtttaaagttttttgtttaagtgatatcaatgaccaaagttatatgaaatttaatcctcttcggttactatatg

SEQ ID NO: 514736 - DNA, 201 bp, Homo sapiens
ttgctagtgatttgttattttatttatttcaaagagccattttttagttttattgactgtctgtttttctttttagtttattttctttgactctttaactmtattccatttctttcaacttttgttcctaacctttttttttttttttttttagaggcagaatctcattctgtcacccaggctagagggtggtgacacaat

SEQ ID NO: 514737 - DNA, 201 bp, Homo sapiens
ttagattagcacacactattgaaatacaatcagaatgtgtctttcctaccatgaataaatttagcaaacttttttttagacaagattggttctagactgtrtattaacaattcttccaacttgcttgatttctaatttgataaattctttattcttttgaaataggaattgtattgcatctttagtgaacattctctgaag

SEQ ID NO: 514738 - DNA, 201 bp, Homo sapiens
cctgatcagattttgtcttataatagggcagttttattctgcccttgtattttgtgttttccatccactctgcttcgttgcctttcctcccttttcttgcmtatgccagatttttttaagttgtgatgagggaaaacatttgcatatgtatatgtatatgtgtgttcgtgtacgtgcgtgtttatacatctgtgtctgtgt

SEQ ID NO: 514739 - DNA, 201 bp, Homo sapiens
gcgacaaaactctgactataaaatgaaagctatcatttccatgttttatacaggaagctattagagtagttcacgctagcatatacttttacaatcaattmtttcctcctttttcccaaacagaattaattcactacctcttttcttttcacatcatgttttgtttgtttgtttgtatgttgagttccaataagcctttat

SEQ ID NO: 514740 - DNA, 201 bp, Homo sapiens
aaatgtataatatcatgattgttctatagagaaaccaccggcaccatctcaagtacagctgatcaaagccactaccaactcctttcatgtcaagtgggatraagtgtctacagttgagggctatcttttgcagttgagtacagacttgccataccaagctgcatcatcagattcttcagcagcaccaaatatgcaaggtaa

SEQ ID NO: 514741 - DNA, 201 bp, Homo sapiens
atgttgaaggtatccacctttcctgggaacctccaacctcaccttctggaaatattttggaatattcagcctacttggctatccgcacagcacagatacamgataatccaagtcaacttgtgttcatgaggatttattgtggtcttaagacatcatgtatagtaactgctgggcaacttgcaaatgcacatattgattata

SEQ ID NO: 514742 - DNA, 201 bp, Homo sapiens
aatatcatgattgttctatagagaaaccaccggcaccatctcaagtacagctgatcaaagccactaccaactcctttcatgtcaagtgggatgaagtgtcyacagttgagggctatcttttgcagttgagtacagacttgccataccaagctgcatcatcagattcttcagcagcaccaaatatgcaaggtaacataattt

SEQ ID NO: 514743 - DNA, 201 bp, Homo sapiens
cggcaccatctcaagtacagctgatcaaagccactaccaactcctttcatgtcaagtgggatgaagtgtctacagttgagggctatcttttgcagttgagyacagacttgccataccaagctgcatcatcagattcttcagcagcaccaaatatgcaaggtaacataattttcatgcttaaagtatgtgtgctcacatgct

SEQ ID NO: 514744 - DNA, 201 bp, Homo sapiens
gagatcatgccactgcactccagcctgggcaacaagcaagactctgtcttaaaaaaaaaaaaaaaattcacacacacacgcacacaagcacacatatactrcagtacgtgtgtgtgtgtgtgtgtgtgtatgtgtgtgtgtatatatatatacatatatatatatatgtatatatatatacacacatacactgcagaaaag

SEQ ID NO: 514745 - DNA, 201 bp, Homo sapiens
ggtggtgacacaatcatagcttactgcagccttgaactcttgggttcaagctatactcccacctcagccttctgagtagctaggactagaggcacatgcasccatgcctggctaaatttttaagttttttgttgagacaggatcttgccatgttgtccaggctggtcttgaactcctggcctcaagcagtcctcctacctc

SEQ ID NO: 514746 - DNA, 201 bp, Homo sapiens
gaccacttgctatggtctgaatatttgtgtcccccaaaatttcctatgttgaaacccaatccctagtatgatggtactaaaaggttagacttttgagaaayaactaggtctcatacataggagagtggcacaaggctctgccctcatgaatgggattggtgccctgataagagacctggctagtcccttccaccatgtgag

SEQ ID NO: 514747 - DNA, 201 bp, Homo sapiens
tcaaacaagaatccataactgaccagaagagagcaagagctgagggaaaataaccaataagctagcagtgacagcctattactactgaagaggtacttttwaaaatgctattttaagtcaggtgctctgtttttatttaaaatagtttaagtctagagagcttattaaaaataaacaactgctagttctatctttagtatt

SEQ ID NO: 514748 - DNA, 201 bp, Homo sapiens
tataatacccctaccatacaaagtatcgccaaggactaatataatacccctaccatacaaagtatcgccaaggactaatataatacccctaccatacaaartatcgccaaggactaatataatacccctaccatacaaaatatcgccaaggactaatataatacccctaccatacaaaatatcaccaaggactaatataat

SEQ ID NO: 514749 - DNA, 201 bp, Homo sapiens
aagaaacatcaccaaggactaatataatacccctaccatacaaaatatcaccaaggactaatataatacccctactatacaaaatatcaccaaggactaayataatacccctaccatacaaaatatcgccaaggactaatataatacccctaccatacaaagtatcgccaaggactaatataatacccctaccatacaaag

SEQ ID NO: 514750 - DNA, 201 bp, Homo sapiens
ccgcttccggagaactcaagctcccgattgtgcccgaaggaacccgaagggagaccccgcctcattcctcacgccgagctccagaccccgcctcctttccrgagcccgtctgttccccttcgggtccaaagcttttggctcctccttgttccgagcccgaaggcccgccccttcacgtactcggagctcggatcccagtgt

SEQ ID NO: 514751 - DNA, 201 bp, Homo sapiens
ctaaaggactcatagcttagcaaccatagcccttcaaggcttttcatggctgtggcgggccccattaggtaccaaaagaagaagaaccccattgtcagtgractgtaccacccagcccacccaccttcctaccctacaggcaccctctgggccaccctcccttgctgccctagcaagtctgacagccagagggccattgcc

SEQ ID NO: 514752 - DNA, 201 bp, Homo sapiens
tgccgaagtgagccgaagtttgtggccccgcttccggagaactcaagctcccgattgtgcccgaaggaacccgaagggagaccccgcctcattcctcacgscgagctccagaccccgcctcctttccagagcccgtctgttccccttcgggtccaaagcttttggctcctccttgttccgagcccgaaggcccgccccttc

SEQ ID NO: 514753 - DNA, 201 bp, Homo sapiens
cccacatccggccgagtctgtggccccgcccacatcggaacagtgaccctaaggactcgactacctccgaagaaagccgaaacatgtggctccgcccacastggcctcagctctccgttctcgactattgccgaagtgagccgaagtttgtggccccgcttccggagaactcaagctcccgattgtgcccgaaggaacccg

SEQ ID NO: 514754 - DNA, 201 bp, Homo sapiens
tttaatagagctggggtttctccatgttggtcaggctgatctcgaactcctgaccttgtgatctgcccacctcagccttccaaagtgctgggattacaggygtgagccaccgcatccggccttcatctgcttttctttctcccctgccttctgcgtctggtccctgtgtgtttgtcccagtccgctacatccatgtcatgg

SEQ ID NO: 514755 - DNA, 201 bp, Homo sapiens
cgcgggtagatcacctgaggttaggagtttgagaccatcctggccaacatggtaaaactccgtctctactaaaaatacaaaaatgagccgggtgtggtggstcacacctgtaatcccagctactcaggaggctgaggcaggataattgcttgaacctggaaggtggaggttgcagtgagccaagatcccgccattgcactc

SEQ ID NO: 514756 - DNA, 201 bp, Homo sapiens
acctgttgactccgcctatcatcctagcgtcacttgtacccaactatctacgaagtaaaccgaagcttgtggccccacccacatccggccgagtctgtggscccgcccacatcggaacagtgaccctaaggactcgactacctccgaagaaagccgaaacatgtggctccgcccacagtggcctcagctctccgttctcga

SEQ ID NO: 514757 - DNA, 201 bp, Homo sapiens
ggggtttctccatgttggtcaggctgatctcgaactcctgaccttgtgatctgcccacctcagccttccaaagtgctgggattacaggcgtgagccaccgyatccggccttcatctgcttttctttctcccctgccttctgcgtctggtccctgtgtgtttgtcccagtccgctacatccatgtcatggagagaggtggac

SEQ ID NO: 514758 - DNA, 201 bp, Homo sapiens
ggccagctgcgggtggctcacgcctgtaatcccagcactttgggaggctgacgcgggtagatcacctgaggttaggagtttgagaccatcctggccaacakggtaaaactccgtctctactaaaaatacaaaaatgagccgggtgtggtggctcacacctgtaatcccagctactcaggaggctgaggcaggataattgct

SEQ ID NO: 514759 - DNA, 201 bp, Homo sapiens
agctgagatcgtaccattgcactccagcctgggcaacaagagcaaaactccatctcaaaaataaataaacaaatagaaatactcattctaggccagctgcgggtggctcacgcctgtaatcccagcactttgggaggctgacgcgggtagatcacctgaggttaggagtttgagaccatcctggccaacatggtaaaactc

SEQ ID NO: 514760 - DNA, 201 bp, Homo sapiens
gggaaactgaggtgcgggtgcgcgggcctggggacggccgtcccatggcttccatctgagccacctcgggaccccagcactcctggcgccctcttctcatmgcttggcctatgacaggtcaccgtgtgtaaatctttcccaataaagtgttgcacaaaggcatcgtgtccgtgcaggtatctgggtgataaacggtgggaa

SEQ ID NO: 514761 - DNA, 201 bp, Homo sapiens
tggcctggccaccgttcatattcattcatatccacctctctcttcttgagccctggacctcggaaataaagaaaaagtggaggattgcagggtcttcaccygaagcttctcttaacctcattctctgttggtgtgtgtttctatgtggctgagcctcttctcccactgtttcaatcatactcattcggtccctacatccac

SEQ ID NO: 514762 - DNA, 201 bp, Homo sapiens
agtttcactcctgttgcccaggctggagtgcaatggtacgatcttggcttaccgcaacctccgcctcccaggttcaagcgattctcctgcctcagcctccygagtagctggaattacaggcactcaccaccatgcccggctaattttttgtatttttagtagagacagggtttttccatgttggtcaggctgatctcgaac

SEQ ID NO: 514763 - DNA, 201 bp, Homo sapiens
ataagcttcccatttcacaaaggggaaactgaggtgcgggtgcgcgggcctggggacggccgtcccatggcttccatctgagccacctcgggaccccagcrctcctggcgccctcttctcatcgcttggcctatgacaggtcaccgtgtgtaaatctttcccaataaagtgttgcacaaaggcatcgtgtccgtgcaggta

SEQ ID NO: 514764 - DNA, 201 bp, Homo sapiens
acctcatcaaaggttttttttccaataacagctttagggaactctaattcacatactcatccacttaaaacatacaactcttggcttctttaatttcctggaaaaaaaaaaaaacacaaaacatacaactccctgatttttagtatattcaccgagttgtgcagacatgaccattgtgtagttatattcagaacagtttca

SEQ ID NO: 514765 - DNA, 201 bp, Homo sapiens
ctcgggaccccagcactcctggcgccctcttctcatcgcttggcctatgacaggtcaccgtgtgtaaatctttcccaataaagtgttgcacaaaggcatcstgtccgtgcaggtatctgggtgataaacggtgggaaggacttagtccaccaagtcccagggtgaggtacagcccccccgcccagcccaggaaccaaactg

SEQ ID NO: 514766 - DNA, 201 bp, Homo sapiens
aaggttttttttccaataacagctttagggaactctaattcacatactcatccacttaaaacatacaactcttggcttctttaatttcctggaaaaaaaamaaaacacaaaacatacaactccctgatttttagtatattcaccgagttgtgcagacatgaccattgtgtagttatattcagaacagtttcataccctgca

SEQ ID NO: 514767 - DNA, 201 bp, Homo sapiens
gtaggagaggggtgtggagctccgaaggaggtgcaggttggagacccgggctcctctgggtggtctcgaagaagggctggggggtccggatatctggtttyacaagggccgggggatgggggatccaaagagggggtctgggttcctggatcctcgctggaagagggggctcggaggtctagattcctgggctgtcgaaga

SEQ ID NO: 514768 - DNA, 201 bp, Homo sapiens
ccagccctggtgagaatttggtggagggaggagagggagaggaggggagagggggaagcaacctgtttcctctttgagtctttttcagcttctgcctcatstctagctgtctcttgttgatcagctcatttctctgtttcatgtttgtttgtttgtttgtttttctttctttctttctttttgagatggagtttcgctcct

SEQ ID NO: 514769 - DNA, 201 bp, Homo sapiens
acaactcttggcttctttaatttcctggaaaaaaaaaaaaacacaaaacatacaactccctgatttttagtatattcaccgagttgtgcagacatgaccaytgtgtagttatattcagaacagtttcataccctgcaaagaaaccccatgtccatcatcccacaaacctccatccatccctggtaaccagtaattgacttt

SEQ ID NO: 514770 - DNA, 201 bp, Homo sapiens
agccctgcgggggcggctgagcccagggggccagaaggcctgggactgggtgcactggttcctgaagatgcgcgcctatgactacatgtgcatgggcttcktgctgctctccttggccgacacccttcggtactgggcctccatctacttctgtatccacttcctggccctggcagccctggggctggggctggctttagg

SEQ ID NO: 514771 - DNA, 201 bp, Homo sapiens
aacggaaggggcccctgggcagtgggttttgggcaaattccctttctttgcatccacaatgtggggtcggagcttgggggcaggtcctgggagtgggaagsctcttccttgtgtctttcgctccacttttagctcatcgcaccaatattgcagacttggaaggaagcataagcttcccatttcacaaaggggaaactgagg

SEQ ID NO: 514772 - DNA, 201 bp, Homo sapiens
acctcccccttcagtggctccccgggattttacctccaacacaccctgggggtgggacgtcacctcacttgctgccctgggcacagcattccccattcacrtgcccttgggcaggtcttcacctcccagctcctcctggggtgaggaaataacccacatagggtaacagtaggtgccattgggtgcttgcggtgtgccaga

SEQ ID NO: 514773 - DNA, 201 bp, Homo sapiens
gtgaacctgggaggcggagcttgcagtgagccaagatcgcgccactgcactctagcctgggcgacagagcgagactctgtctcaaaaaaaaaaaaaaaaaaccactgggctgaagaattaagacttgttggtcctgggagaggaagggcagtggaatataaaatgttaaatctttaaagaagaagagggtcttgataggac

SEQ ID NO: 514774 - DNA, 201 bp, Homo sapiens
gacctgggaccccaggttaagaaccaccgggctgcccgggtgtggtgtctgacacctgtgatcccagcactttgggaggccaaggcgggcagatcacgagrtcaggagatcgagaccatcctggctaacacggtgaaaccccgtctctactaaaaatagaaaagaaaattagccgggcgtggtggcgggcgcctgtagtcc

SEQ ID NO: 514775 - DNA, 201 bp, Homo sapiens
caccttgttattagggatgataaccacaacttccctggcaactgcagtgtccgacaatttagaagggaccatccttggcggcttctctgaatatactgagyttggttgctaaaggactcatagcttagcaaccatagcccttcaaggcttttcatggctgtggcgggccccattaggtaccaaaagaagaagaaccccatt

SEQ ID NO: 514776 - DNA, 201 bp, Homo sapiens
agctggaattacaggcactcaccaccatgcccggctaattttttgtatttttagtagagacagggtttttccatgttggtcaggctgatctcgaactcccracctcaggtgatccgcctgcctcggcctcccaaagtgctgggattacaggcgtgagccaccgcgcccggccaaaattattttttttaaagggtgtgtaga

SEQ ID NO: 514777 - DNA, 201 bp, Homo sapiens
tggtgtctgacacctgtgatcccagcactttgggaggccaaggcgggcagatcacgaggtcaggagatcgagaccatcctggctaacacggtgaaaccccrtctctactaaaaatagaaaagaaaattagccgggcgtggtggcgggcgcctgtagtcccagctactcgggaggctgaggcaggagaatggcgtgaacctg

SEQ ID NO: 514778 - DNA, 201 bp, Homo sapiens
agttgcagcaggaaacgcgcatttaggatgactgaaggagtggccaccaattgggcaggatgtagaagagcaagaagggatggtgcctgaaccccagcccsgcagaaggagccgttcccaaccctaggcccaggggaaatgggtcaggttgtggtacctggatggaaaaagggttgtgtaggcctggtgcagtggctcata

SEQ ID NO: 514779 - DNA, 201 bp, Homo sapiens
ctgcccgggtgtggtgtctgacacctgtgatcccagcactttgggaggccaaggcgggcagatcacgaggtcaggagatcgagaccatcctggctaacacrgtgaaaccccgtctctactaaaaatagaaaagaaaattagccgggcgtggtggcgggcgcctgtagtcccagctactcgggaggctgaggcaggagaatg

SEQ ID NO: 514780 - DNA, 201 bp, Homo sapiens
gagccgagattgcgccactgcactccagcatgggcggcagagcgagactccgtctgaacaacaacaacaaaaaatacagaaattagctgagtttggtggcrcttgcctgtaatcccagctacttgggaggctgaggcataagaatcgcttgaatccaagaggcagaggctgcagtgagccttgtcgtgtggcaacagagcg

SEQ ID NO: 514781 - DNA, 201 bp, Homo sapiens
tctttacaaagaaaaaaaaagaggctgggcgcggtggctcagacctgtaatcccagcactttgggaggccaaggtgggtggatcacaaggtcaggagatcragaccatcctggccaacgtggtgaaaccccatctctactaaaaatacaaaaatggctgggtgcagtggctcacgcctgtaatcccagcactttggtaggc

SEQ ID NO: 514782 - DNA, 201 bp, Homo sapiens
agatggagtttcgctcctgttgcccaggctgcagttcagtggcacgatcttggctcactgcaacctccacctcccgggttcaagcgattctcttgcctcascctcccaagtagctgggattacaggcatgctccaccatgcctggctaatcttgaatttttaatagagctggggtttctccatgttggtcaggctgatctc

SEQ ID NO: 514783 - DNA, 201 bp, Homo sapiens
ttgcccaggctgcagttcagtggcacgatcttggctcactgcaacctccacctcccgggttcaagcgattctcttgcctcagcctcccaagtagctgggaytacaggcatgctccaccatgcctggctaatcttgaatttttaatagagctggggtttctccatgttggtcaggctgatctcgaactcctgaccttgtgat

SEQ ID NO: 514784 - DNA, 201 bp, Homo sapiens
tccgaaggaggtgcaggttggagacccgggctcctctgggtggtctcgaagaagggctggggggtccggatatctggtttcacaagggccgggggatgggrgatccaaagagggggtctgggttcctggatcctcgctggaagagggggctcggaggtctagattcctgggctgtcgaagaggaagggtccgggaggggtg

SEQ ID NO: 514785 - DNA, 201 bp, Homo sapiens
gtggcacgatcttggctcactgcaacctccacctcccgggttcaagcgattctcttgcctcagcctcccaagtagctgggattacaggcatgctccaccaygcctggctaatcttgaatttttaatagagctggggtttctccatgttggtcaggctgatctcgaactcctgaccttgtgatctgcccacctcagccttcc

SEQ ID NO: 514786 - DNA, 201 bp, Homo sapiens
tacagctactgctacgtgggaatcatgacaggtgagtggggctgccctaacaactctgccgctctgtctcctgtgtccccttccgccctgagtgcctgttstgtgttcccgccctgcccagggcaacctccatcctagcatctgctgctgtgagggtgggcatgtgtctgggtctacgtctcacacctccgctggaccaga

SEQ ID NO: 514787 - DNA, 201 bp, Homo sapiens
acctccacctcccgggttcaagcgattctcttgcctcagcctcccaagtagctgggattacaggcatgctccaccatgcctggctaatcttgaatttttartagagctggggtttctccatgttggtcaggctgatctcgaactcctgaccttgtgatctgcccacctcagccttccaaagtgctgggattacaggcgtga

SEQ ID NO: 514788 - DNA, 201 bp, Homo sapiens
acctcccgggttcaagcgattctcttgcctcagcctcccaagtagctgggattacaggcatgctccaccatgcctggctaatcttgaatttttaatagagmtggggtttctccatgttggtcaggctgatctcgaactcctgaccttgtgatctgcccacctcagccttccaaagtgctgggattacaggcgtgagccacc

SEQ ID NO: 514789 - DNA, 201 bp, Homo sapiens
cctcccgggttcaagcgattctcttgcctcagcctcccaagtagctgggattacaggcatgctccaccatgcctggctaatcttgaatttttaatagagcyggggtttctccatgttggtcaggctgatctcgaactcctgaccttgtgatctgcccacctcagccttccaaagtgctgggattacaggcgtgagccaccg

SEQ ID NO: 514790 - DNA, 201 bp, Homo sapiens
tctcttgcctcagcctcccaagtagctgggattacaggcatgctccaccatgcctggctaatcttgaatttttaatagagctggggtttctccatgttggycaggctgatctcgaactcctgaccttgtgatctgcccacctcagccttccaaagtgctgggattacaggcgtgagccaccgcatccggccttcatctgct

SEQ ID NO: 514791 - DNA, 201 bp, Homo sapiens
ctcagcctcccaagtagctgggattacaggcatgctccaccatgcctggctaatcttgaatttttaatagagctggggtttctccatgttggtcaggctgrtctcgaactcctgaccttgtgatctgcccacctcagccttccaaagtgctgggattacaggcgtgagccaccgcatccggccttcatctgcttttctttc

SEQ ID NO: 514792 - DNA, 201 bp, Homo sapiens
tggctcacacctgtaatcccagctactcaggaggctgaggcaggataattgcttgaacctggaaggtggaggttgcagtgagccaagatcccgccattgcmctccagcctgggccttcccgggcaagattccatctcaaaaaaaaaagaaaagaaaagaaagaaaactcgttctggatgctgaaggagaattgaagtggaa

SEQ ID NO: 514793 - DNA, 201 bp, Homo sapiens
ccctacatccaccctcctgtcctctctgcccttctgtgtttctgtctctaaacgaatggggagagctgggggaggattggtggctggactcgtggagtgartggccaaggccgagacttctgtgcccaacacagtgcgcctcctgcttttgcccagctcctgccacgccctggctctggcctggactttctcctatctcct

SEQ ID NO: 514794 - DNA, 201 bp, Homo sapiens
ccgggtgtggcggcgggtgcatgtagtcccagctactggggaggctgaggcaggagaatggtgtgaacccgggagacggagcttgcagtgagccgagatcrcgccactgcactccagcctgggcaacagagcgagactctgtctcaaaaacaaacaaacaaaaaaacacaaaaaacaaacaaaaataattattaatttaat

SEQ ID NO: 514795 - DNA, 201 bp, Homo sapiens
tgagcccagggggccagaaggcctgggactgggtgcactggttcctgaagatgcgcgcctatgactacatgtgcatgggcttcgtgctgctctccttggcygacacccttcggtactgggcctccatctacttctgtatccacttcctggccctggcagccctggggctggggctggctttaggtgggggcagccccagcc

SEQ ID NO: 514796 - DNA, 201 bp, Homo sapiens
tccacttcctggccctggcagccctggggctggggctggctttaggtgggggcagccccagccggcggaaggcagcatcccagcccaccagccttgccccrgagaagctccgggaggagtaagctgtcacgacgctccctctgccagctggtcccgggaattctgtgaaccaggctgctgtctcctccccagaaagagtcc

SEQ ID NO: 514797 - DNA, 201 bp, Homo sapiens
gttcttccgagccctcagcctcctgggcctgcccactcccacgcccttcaccaatgccgtccagctgctgctgacgctgaaggtcagactcggggcttgcmactcccctccagcctccctgtgggccccttcacctcccactttacctcccccttcagtggctccccgggattttacctccaacacaccctgggggtggga

SEQ ID NO: 514798 - DNA, 201 bp, Homo sapiens
agattcctgggctgtcgaagaggaagggtccgggaggggtgccgtttctgggtttttaaaagaggggcgtcttcaaatctgggtccccagtatgggtgcgkggagtagctttgatttctgcgttcgcaaaggaggggcttgggtgctgggagatccccacactttcctgggttctccaaggacaggagagctggaggcctg

SEQ ID NO: 514799 - DNA, 201 bp, Homo sapiens
tcctgggttctccaaggacaggagagctggaggcctgtgcgctcaaaggaggggctgggggtggattcctgtctcctccaaggaggaaggggctggagtcygggttgctaggttctcaaaggagaggagctgaggctcatactccatcatcctcaaaaactggggtctagaaggctgggttcctggatcctcgaagaggga

SEQ ID NO: 514800 - DNA, 201 bp, Homo sapiens
cttcacccgaagcttctcttaacctcattctctgttggtgtgtgtttctatgtggctgagcctcttctcccactgtttcaatcatactcattcggtccctrcatccaccctcctgtcctctctgcccttctgtgtttctgtctctaaacgaatggggagagctgggggaggattggtggctggactcgtggagtgagtggc

SEQ ID NO: 514801 - DNA, 201 bp, Homo sapiens
gggtttcaccgcgttagccaggatggtctcgatctcctgaccttgtgatccacctgcctcggcctcccaaagtgctgggattacaggcgtgagccaccgcrcccggcgattttttttttttttttaatgagatcatttcatgtgtttagggagcctgcctgctgtgatcttcctttctgatggttctgaggccacaccact

SEQ ID NO: 514802 - DNA, 201 bp, Homo sapiens
caccaccacgcccagctaattttttgtattttttagtagagacagggtttcaccgcgttagccaggatggtctcgatctcctgaccttgtgatccacctgsctcggcctcccaaagtgctgggattacaggcgtgagccaccgcgcccggcgattttttttttttttttaatgagatcatttcatgtgtttagggagcctg

SEQ ID NO: 514803 - DNA, 201 bp, Homo sapiens
gcagcggcacctgtgggcagagggaggcaggaggcatctgtgggtcctagtctctgggatggatcccaaagcactttacacatcctgatgtctcttctacygcttgggtgccgataggctgcaaaaccccactttggctaagcctcaaggcgttagagggaaggaaatgatggaaatccatggagaatgaaaaagctgctt

SEQ ID NO: 514804 - DNA, 201 bp, Homo sapiens
ggccccggttcggtccgggggagatggcgcagcccatcctgggccatgggagcctgcagcccgcctcggccgctggcctggcgtccctggagctcgactcrtcgctggaccagtacgtgcagattcgcatcttcaaaataatcgtgattggggactccaacgtgggcaagacctgcctgaccttccgcttctgcgggggta

SEQ ID NO: 514805 - DNA, 201 bp, Homo sapiens
gcaggggagggtgtgggccgaggcgcggcggcggctggagcagcgcggtagggtccttcgccagagcatccggtccgagggcgcacacaggcagaaggctsgcggctcgtccactctcctccctctctcctcctctccctggcttttgtgttggtgcctccgagctgcaaggagggtgcgctggaggaggaggaggggggc

SEQ ID NO: 514806 - DNA, 201 bp, Homo sapiens
aggcgggagccctgggtttactttttgcaccttgattatctcaactcaggtgtgagatgcagaaaatgttcagagataaaagagatgttacagattctgtratccagtgtcctcctcttgcagataggaaactgagactcagagagggaaagtgacttgcccaagatcacacagggccaggcctagaactcatgtctccta

SEQ ID NO: 514807 - DNA, 201 bp, Homo sapiens
tttgggaagccgaggcaggcggatcacctgagatcgggagttcaagaccagcctgaccaacatggagaaactccgtctctactaaaaatataaaattagcygggcgtggtggcacatgcctgtaatgccagctactcaggagtctgaggtgggagaattgcttgaacccaggtggcagaggttgcagtgagccgagatcgc

SEQ ID NO: 514808 - DNA, 201 bp, Homo sapiens
ggtggctcatgcctgtaatcccagctctttgggaagccgaggcaggcggatcacctgagatcgggagttcaagaccagcctgaccaacatggagaaactcygtctctactaaaaatataaaattagccgggcgtggtggcacatgcctgtaatgccagctactcaggagtctgaggtgggagaattgcttgaacccaggtg

SEQ ID NO: 514809 - DNA, 201 bp, Homo sapiens
tttttagtagagttgaggtttctccatgttggtcaggctggtctcaaattcctgacctcaggtgatctgcccgcctcagcttcccaaagtgctgggattayaggcgtgagccaccgcacccgtcctgtcacttcatttttatagtgctacagaaccatgttttctcctctctgttcatgttcccttttctgactccacctt

SEQ ID NO: 514810 - DNA, 201 bp, Homo sapiens
tgggaccatagcatatgaaaacttttgaggctgggcgtggtggctcatgcctgtaatcccagctctttgggaagccgaggcaggcggatcacctgagatcrggagttcaagaccagcctgaccaacatggagaaactccgtctctactaaaaatataaaattagccgggcgtggtggcacatgcctgtaatgccagctact

SEQ ID NO: 514811 - DNA, 201 bp, Homo sapiens
ttcaagcaattctcttgcctcagcctcccccgtagctgggattacaggcatgcaccaccatgcccggctaattttgtatttttagtagagttgaggtttcwccatgttggtcaggctggtctcaaattcctgacctcaggtgatctgcccgcctcagcttcccaaagtgctgggattataggcgtgagccaccgcacccgt

SEQ ID NO: 514812 - DNA, 201 bp, Homo sapiens
ttttttattttttttgaaatggagttttgctctttttgcccaggctggagtgcaatggcgtgatctcggctcactgcaacctccgactccctggttcaagsaattctcttgcctcagcctcccccgtagctgggattacaggcatgcaccaccatgcccggctaattttgtatttttagtagagttgaggtttctccatgt

SEQ ID NO: 514813 - DNA, 201 bp, Homo sapiens
gtcacggcttgtcactttttttattttttttgaaatggagttttgctctttttgcccaggctggagtgcaatggcgtgatctcggctcactgcaacctccractccctggttcaagcaattctcttgcctcagcctcccccgtagctgggattacaggcatgcaccaccatgcccggctaattttgtatttttagtagagt

SEQ ID NO: 514814 - DNA, 201 bp, Homo sapiens
gcatggtggcgcacgactgtaatcccagctcctcagaaggctgaagtggtagaatctcttgaacccaggatgtggaggttgcagtgagctgagatcacacyactgcactccagcctgggcgacagaacaagactctcatctcaaaataataaataaataaataaatagggcttgaaggtgagattttaatactaactttgt

SEQ ID NO: 514815 - DNA, 201 bp, Homo sapiens
tcatctgtcaaagaaccacttcctgtgtcacggcttgtcactttttttattttttttgaaatggagttttgctctttttgcccaggctggagtgcaatggygtgatctcggctcactgcaacctccgactccctggttcaagcaattctcttgcctcagcctcccccgtagctgggattacaggcatgcaccaccatgccc

SEQ ID NO: 514816 - DNA, 201 bp, Homo sapiens
gggcatggtggcgcacgactgtaatcccagctcctcagaaggctgaagtggtagaatctcttgaacccaggatgtggaggttgcagtgagctgagatcacrccactgcactccagcctgggcgacagaacaagactctcatctcaaaataataaataaataaataaatagggcttgaaggtgagattttaatactaacttt

SEQ ID NO: 514817 - DNA, 201 bp, Homo sapiens
ctgggcatggtggcgcacgactgtaatcccagctcctcagaaggctgaagtggtagaatctcttgaacccaggatgtggaggttgcagtgagctgagatcrcaccactgcactccagcctgggcgacagaacaagactctcatctcaaaataataaataaataaataaatagggcttgaaggtgagattttaatactaact

SEQ ID NO: 514818 - DNA, 201 bp, Homo sapiens
gcctgtaatcccagcactttgggaggctcgatcatttgaggtcaggaattcaagactagcctggccaacatggtgaaaccccatctctactaaaaatacamaaattagctgggcatggtggcgcacgactgtaatcccagctcctcagaaggctgaagtggtagaatctcttgaacccaggatgtggaggttgcagtgagc

SEQ ID NO: 514819 - DNA, 201 bp, Homo sapiens
tagccaggcgcagtggcacacgcctgttatcccagctacttgggaggctgaggcaggagaatcgcttgaacctgggaggtggaggttgcagtgagctgagwttgcaccactgcactccagcctgggcaacagagcaacagtccatctcaaaaaaaaaaaaaaaaaaaaaaaaaaagcaagcaagcgagcagtgttcaggag

SEQ ID NO: 514820 - DNA, 201 bp, Homo sapiens
aaattagccaggcgcagtggcacacgcctgttatcccagctacttgggaggctgaggcaggagaatcgcttgaacctgggaggtggaggttgcagtgagcygagattgcaccactgcactccagcctgggcaacagagcaacagtccatctcaaaaaaaaaaaaaaaaaaaaaaaaaaagcaagcaagcgagcagtgttca

SEQ ID NO: 514821 - DNA, 201 bp, Homo sapiens
cccggagtgagaggcacccccttcacgcgcgcgcgcgcacacggtgccggcgcacgcacacacgggcggacacacacacacgcgcgcacacacacacgcasagagctcgctcgcctcgagcgcacgaacgtggacgttctctttgtgtggagccctcaaggggggttggggccccggttcggtccgggggagatggcgcag

SEQ ID NO: 514822 - DNA, 201 bp, Homo sapiens
tctctatgaaataaaaaaaatatgaaaattagttgggtgtgctggtgcgtgcctgtagtcccagttactccgaaggctgaagagggaggattgcttgcgcmtaggaggttgaggctgcagtgagccatgattgcactgctgcactccagcctgggtgacacaatgagatcttgtctggaaaagagagagagagagagagag

SEQ ID NO: 514823 - DNA, 201 bp, Homo sapiens
gcctgtagtcccagttactccgaaggctgaagagggaggattgcttgcgcctaggaggttgaggctgcagtgagccatgattgcactgctgcactccagcstgggtgacacaatgagatcttgtctggaaaagagagagagagagagagagaaagagaccaggcgtggtggctcacacctagagtcccagcactttgggag

SEQ ID NO: 514824 - DNA, 201 bp, Homo sapiens
tccaccaccacgcccagctaattttttgtattttttagtagagacagggtttcaccgcgttagccaggatggtctcgatctcctgaccttgtgatccacckgcctcggcctcccaaagtgctgggattacaggcgtgagccaccgcgcccggcgattttttttttttttttaatgagatcatttcatgtgtttagggagcc

SEQ ID NO: 514825 - DNA, 201 bp, Homo sapiens
gctgggactacaggcgtccaccaccacgcccagctaattttttgtattttttagtagagacagggtttcaccgcgttagccaggatggtctcgatctcctraccttgtgatccacctgcctcggcctcccaaagtgctgggattacaggcgtgagccaccgcgcccggcgattttttttttttttttaatgagatcatttc

SEQ ID NO: 514826 - DNA, 201 bp, Homo sapiens
attctcctgtctcagcctcccgagtagctgggactacaggcgtccaccaccacgcccagctaattttttgtattttttagtagagacagggtttcaccgcrttagccaggatggtctcgatctcctgaccttgtgatccacctgcctcggcctcccaaagtgctgggattacaggcgtgagccaccgcgcccggcgatttt

SEQ ID NO: 514827 - DNA, 201 bp, Homo sapiens
gcaagctccgcctcccaggttcacgccattctcctgtctcagcctcccgagtagctgggactacaggcgtccaccaccacgcccagctaattttttgtatkttttagtagagacagggtttcaccgcgttagccaggatggtctcgatctcctgaccttgtgatccacctgcctcggcctcccaaagtgctgggattacag

SEQ ID NO: 514828 - DNA, 201 bp, Homo sapiens
atcacctgagccctcatgcctcagcactcctccaacctatttatttttgagacagagtcttgctctgtcgcccaggctggagtgcagtggcgccatctcgrctcactgcaagctccgcctcccaggttcacgccattctcctgtctcagcctcccgagtagctgggactacaggcgtccaccaccacgcccagctaatttt

SEQ ID NO: 514829 - DNA, 201 bp, Homo sapiens
tcccagctactcgggaggccaaggtgggaggatcacctgagccctcatgcctcagcactcctccaacctatttatttttgagacagagtcttgctctgtcrcccaggctggagtgcagtggcgccatctcgactcactgcaagctccgcctcccaggttcacgccattctcctgtctcagcctcccgagtagctgggacta

SEQ ID NO: 514830 - DNA, 201 bp, Homo sapiens
gggcagatcacttgagcctaggaatttgagaccagcctgggcaacatggggaaaccccatctctacaaaaaatacaaaaattagccgggtgtggtggtgcrtgcctgtagtcccagctactcgggaggccaaggtgggaggatcacctgagccctcatgcctcagcactcctccaacctatttatttttgagacagagtct

SEQ ID NO: 514831 - DNA, 201 bp, Homo sapiens
aggcccaggtgggcagatcacttgagcctaggaatttgagaccagcctgggcaacatggggaaaccccatctctacaaaaaatacaaaaattagccgggtrtggtggtgcatgcctgtagtcccagctactcgggaggccaaggtgggaggatcacctgagccctcatgcctcagcactcctccaacctatttatttttga

SEQ ID NO: 514832 - DNA, 201 bp, Homo sapiens
tgggaggcccaggtgggcagatcacttgagcctaggaatttgagaccagcctgggcaacatggggaaaccccatctctacaaaaaatacaaaaattagccrggtgtggtggtgcatgcctgtagtcccagctactcgggaggccaaggtgggaggatcacctgagccctcatgcctcagcactcctccaacctatttattt

SEQ ID NO: 514833 - DNA, 201 bp, Homo sapiens
tgatgcccagctaatttttatatttttagtagagatggggtttcaccatgttagccaggctggtctcgaactcctgacctcaggtgatccacctgcctcgrcctcccaaagtgctgggattacaggcgggagccctgggtttactttttgcaccttgattatctcaactcaggtgtgagatgcagaaaatgttcagagata

SEQ ID NO: 514834 - DNA, 201 bp, Homo sapiens
gataagtccattctgctcatctgtcaaagaaccacttcctgtgtcacggcttgtcactttttttattttttttgaaatggagttttgctctttttgcccakgctggagtgcaatggcgtgatctcggctcactgcaacctccgactccctggttcaagcaattctcttgcctcagcctcccccgtagctgggattacaggc

SEQ ID NO: 514835 - DNA, 201 bp, Homo sapiens
ttttttttgtatttctagtagagatgggatttcaccatgttggccaggctggtctcgaactcctgacctcagatgatccacctgcctcagcctcccaaagygctgggattacaggcatgagccactgtacctgaccccactgtatagacatgaactttagctattccttttctgatgagcatttaggtttttcctgtttta

SEQ ID NO: 514836 - DNA, 201 bp, Homo sapiens
cccgagtagctgggactataggtacacaccaccaggcctggctaattttttttgtatttctagtagagatgggatttcaccatgttggccaggctggtctygaactcctgacctcagatgatccacctgcctcagcctcccaaagtgctgggattacaggcatgagccactgtacctgaccccactgtatagacatgaact

SEQ ID NO: 514837 - DNA, 201 bp, Homo sapiens
agcctcccgagtagctgggactataggtacacaccaccaggcctggctaattttttttgtatttctagtagagatgggatttcaccatgttggccaggctrgtctcgaactcctgacctcagatgatccacctgcctcagcctcccaaagtgctgggattacaggcatgagccactgtacctgaccccactgtatagacat

SEQ ID NO: 514838 - DNA, 201 bp, Homo sapiens
tacaggccccggacaacccactgcgtgtcttggcagcggcctcccaggctgcctggggcccgcgagtgcacctgctcactcattaagacagagcatccctktatcccaaggcgcgggtcgggtagagggtgggggtagaggggacggggtagcggggaccgggaaggcgcggctcagctgcccgctgctcccgaggtgaaa

SEQ ID NO: 514839 - DNA, 201 bp, Homo sapiens
ttgtttattctttttgagacggagtctcactgtgttgcccaggctgaagtgcagtggcccgatctcggcttactgcaaccaccgcctcccgggttcaagcrattcttgtgtctcagcctcccgagtagctgggactataggtacacaccaccaggcctggctaattttttttgtatttctagtagagatgggatttcacca

SEQ ID NO: 514840 - DNA, 201 bp, Homo sapiens
ccgggcgtggtggcacatgcctgtaatgccagctactcaggagtctgaggtgggagaattgcttgaacccaggtggcagaggttgcagtgagccgagatcmcgccatttcactctagcctgggcaacaggaacgaaattctgtctcaaaaaaaaaataaaagaaaagaaaaaagaaaaattctgtattctgcattttcact

SEQ ID NO: 514841 - DNA, 201 bp, Homo sapiens
gccgggcgtggtggcacatgcctgtaatgccagctactcaggagtctgaggtgggagaattgcttgaacccaggtggcagaggttgcagtgagccgagatygcgccatttcactctagcctgggcaacaggaacgaaattctgtctcaaaaaaaaaataaaagaaaagaaaaaagaaaaattctgtattctgcattttcac

SEQ ID NO: 514842 - DNA, 201 bp, Homo sapiens
aaaaaaattctcagtggctcaagccagtaatcccagcactttgggaggctgaggcaggcggatcacgaggtgaggagatcgagaccatcctggctaacacrgtgaaaccccatctctactaaaaatacaaaaaattatccaggcgtggtggcgggcacctgtggtcccagctacttgggaggctgaggcaggagaatggcg

SEQ ID NO: 514843 - DNA, 201 bp, Homo sapiens
atggagaaactccgtctctactaaaaatataaaattagccgggcgtggtggcacatgcctgtaatgccagctactcaggagtctgaggtgggagaattgcktgaacccaggtggcagaggttgcagtgagccgagatcgcgccatttcactctagcctgggcaacaggaacgaaattctgtctcaaaaaaaaaataaaaga

SEQ ID NO: 514844 - DNA, 201 bp, Homo sapiens
ccagagcatccggtccgagggcgcacacaggcagaaggctcgcggctcgtccactctcctccctctctcctcctctccctggcttttgtgttggtgcctcygagctgcaaggagggtgcgctggaggaggaggaggggggcccggagtgagaggcacccccttcacgcgcgcgcgcgcacacggtgccggcgcacgcacac

SEQ ID NO: 514845 - DNA, 201 bp, Homo sapiens
gccaacacggcaaaaccccatctctactaaaaatacaaaaattagccaggcgcagtggcacacgcctgttatcccagctacttgggaggctgaggcaggaraatcgcttgaacctgggaggtggaggttgcagtgagctgagattgcaccactgcactccagcctgggcaacagagcaacagtccatctcaaaaaaaaaaa

SEQ ID NO: 514846 - DNA, 201 bp, Homo sapiens
aaaattagccaggcgcagtggcacacgcctgttatcccagctacttgggaggctgaggcaggagaatcgcttgaacctgggaggtggaggttgcagtgagytgagattgcaccactgcactccagcctgggcaacagagcaacagtccatctcaaaaaaaaaaaaaaaaaaaaaaaaaaagcaagcaagcgagcagtgttc

SEQ ID NO: 514847 - DNA, 201 bp, Homo sapiens
caatttatttttaagttcacttttttgttacctaaggtcaggagtttgagaccagcctggccaacacggcaaaaccccatctctactaaaaatacaaaaaktagccaggcgcagtggcacacgcctgttatcccagctacttgggaggctgaggcaggagaatcgcttgaacctgggaggtggaggttgcagtgagctgag

SEQ ID NO: 514848 - DNA, 201 bp, Homo sapiens
cacttcgccacctcactatcctacctttcctgttacagggccacgatttcaacccagattcagagaccatgccctttaccactgcatttcactctacaggrcaatattcagtcccctagattgggggagtttgacagggggagatagaatgccaggcagccagtcttgctctttcttctaggccagggacttagggttata

SEQ ID NO: 514849 - DNA, 201 bp, Homo sapiens
gccactgcgcctggcctccaatttatttttaagttcacttttttgttacctaaggtcaggagtttgagaccagcctggccaacacggcaaaaccccatctytactaaaaatacaaaaattagccaggcgcagtggcacacgcctgttatcccagctacttgggaggctgaggcaggagaatcgcttgaacctgggaggtgg

SEQ ID NO: 514850 - DNA, 201 bp, Homo sapiens
cagtattgttatcattcccattttatagataaggagactgaggctaagagagatgaaataacccagtggcacatggatctgagcttcagcctttgactctygagcccaagcacttcgccacctcactatcctacctttcctgttacagggccacgatttcaacccagattcagagaccatgccctttaccactgcatttca

SEQ ID NO: 514851 - DNA, 201 bp, Homo sapiens
gataagtgcttaatacaggcttttttggggaagatgatattttcaaggggacaaagccttgtgacactgctcatggaggagtcctctgagggcagattccraaggagctcagagtggcgtgtgggagtggggagatggtgaccctgcttcttgtaaagctgctgcaatctcaggaccatgctggcaggcgagagaccagca

SEQ ID NO: 514852 - DNA, 201 bp, Homo sapiens
gggattacaggcgtgagccactgcgcctggcctccaatttatttttaagttcacttttttgttacctaaggtcaggagtttgagaccagcctggccaacayggcaaaaccccatctctactaaaaatacaaaaattagccaggcgcagtggcacacgcctgttatcccagctacttgggaggctgaggcaggagaatcgct

SEQ ID NO: 514853 - DNA, 201 bp, Homo sapiens
caactgatttggtgtagttagagccacactgtaattaattatcaaggccatccctagggtattgaagccccatttgctgtctccaatcattatgttccccrccctcaccccatcaaagcatttacaattgagtcctgatgaactcaattgtatgaacatcaagaaaagcctccaatgagtaggcaataataataataataa

SEQ ID NO: 514854 - DNA, 201 bp, Homo sapiens
gctggaggaggaggaggggggcccggagtgagaggcacccccttcacgcgcgcgcgcgcacacggtgccggcgcacgcacacacgggcggacacacacacrcgcgcgcacacacacacgcacagagctcgctcgcctcgagcgcacgaacgtggacgttctctttgtgtggagccctcaaggggggttggggccccggttc

SEQ ID NO: 514855 - DNA, 201 bp, Homo sapiens
atgctgggattacaggcgtgagccactgcgcctggcctccaatttatttttaagttcacttttttgttacctaaggtcaggagtttgagaccagcctggcyaacacggcaaaaccccatctctactaaaaatacaaaaattagccaggcgcagtggcacacgcctgttatcccagctacttgggaggctgaggcaggagaa

SEQ ID NO: 514856 - DNA, 201 bp, Homo sapiens
cctcctgagtagctgggattataggcacctgccatgatgcccagctaatttttatatttttagtagagatggggtttcaccatgttagccaggctggtctygaactcctgacctcaggtgatccacctgcctcgacctcccaaagtgctgggattacaggcgggagccctgggtttactttttgcaccttgattatctcaa

SEQ ID NO: 514857 - DNA, 201 bp, Homo sapiens
gagggaggaagaagctagaaagtgagggatgacagatgaacacgagtggaagagtcaccacccagtggccttgaaggaatttttaaactattccttctctyctaacaccccagtacttagccaaactggactttacagtctctggcaaagattccagactttttcccagagggcagagcctgtgacagtgtgactcactag

SEQ ID NO: 514858 - DNA, 201 bp, Homo sapiens
ttctcctgcctcagcctcctgagtagctgggattataggcacctgccatgatgcccagctaatttttatatttttagtagagatggggtttcaccatgttrgccaggctggtctcgaactcctgacctcaggtgatccacctgcctcgacctcccaaagtgctgggattacaggcgggagccctgggtttactttttgcac

SEQ ID NO: 514859 - DNA, 201 bp, Homo sapiens
tcactgcaacctcggcctcctgggttcaagcagttctcctgcctcagcctcctgagtagctgggattataggcacctgccatgatgcccagctaatttttrtatttttagtagagatggggtttcaccatgttagccaggctggtctcgaactcctgacctcaggtgatccacctgcctcgacctcccaaagtgctgggat

SEQ ID NO: 514860 - DNA, 201 bp, Homo sapiens
gctggagtgctgtggcaccatctcggctcactgcaagctccgtcttccgggctcatgccattctctggcctcagcctcccgagtagctgggactacaggcrcctgccaccacacccagctaatttttttatattttttggtagagacggggtttaactgtgttagccagtatggtctcgatctcctgatctcgtgatccgc

SEQ ID NO: 514861 - DNA, 201 bp, Homo sapiens; identical to SEQ ID NO: 484652

SEQ ID NO: 514862 - DNA, 201 bp, Homo sapiens; identical to SEQ ID NO: 484693

SEQ ID NO: 514863 - DNA, 201 bp, Homo sapiens; identical to SEQ ID NO: 484654

SEQ ID NO: 514864 - DNA, 201 bp, Homo sapiens; identical to SEQ ID NO: 484695

SEQ ID NO: 514865 - DNA, 201 bp, Homo sapiens; identical to SEQ ID NO: 484656

SEQ ID NO: 514866 - DNA, 201 bp, Homo sapiens; identical to SEQ ID NO: 484696

SEQ ID NO: 514867 - DNA, 201 bp, Homo sapiens; identical to SEQ ID NO: 484558

SEQ ID NO: 514868 - DNA, 201 bp, Homo sapiens; identical to SEQ ID NO: 484509

SEQ ID NO: 514869 - DNA, 201 bp, Homo sapiens; identical to SEQ ID NO: 484430

SEQ ID NO: 514870 - DNA, 201 bp, Homo sapiens; identical to SEQ ID NO: 484431

SEQ ID NO: 514871 - DNA, 201 bp, Homo sapiens; identical to SEQ ID NO: 484433

SEQ ID NO: 514872 - DNA, 201 bp, Homo sapiens; identical to SEQ ID NO: 484614

SEQ ID NO: 514873 - DNA, 201 bp, Homo sapiens; identical to SEQ ID NO: 484617

SEQ ID NO: 514874 - DNA, 201 bp, Homo sapiens; identical to SEQ ID NO: 484348

SEQ ID NO: 514875 - DNA, 201 bp, Homo sapiens; identical to SEQ ID NO: 484350

SEQ ID NO: 514876 - DNA, 201 bp, Homo sapiens; identical to SEQ ID NO: 484351

SEQ ID NO: 514877 - DNA, 201 bp, Homo sapiens; identical to SEQ ID NO: 484353

SEQ ID NO: 514878 - DNA, 201 bp, Homo sapiens; identical to SEQ ID NO: 484355

SEQ ID NO: 514879 - DNA, 201 bp, Homo sapiens; identical to SEQ ID NO: 484357

SEQ ID NO: 514880 - DNA, 201 bp, Homo sapiens; identical to SEQ ID NO: 484358

SEQ ID NO: 514881 - DNA, 201 bp, Homo sapiens; identical to SEQ ID NO: 484359

SEQ ID NO: 514882 - DNA, 201 bp, Homo sapiens; identical to SEQ ID NO: 484669

SEQ ID NO: 514883 - DNA, 201 bp, Homo sapiens; identical to SEQ ID NO: 484670

SEQ ID NO: 514884 - DNA, 201 bp, Homo sapiens; identical to SEQ ID NO: 484642

SEQ ID NO: 514885 - DNA, 201 bp, Homo sapiens; identical to SEQ ID NO: 484672

SEQ ID NO: 514886 - DNA, 201 bp, Homo sapiens; identical to SEQ ID NO: 484674

SEQ ID NO: 514887 - DNA, 201 bp, Homo sapiens; identical to SEQ ID NO: 484678

SEQ ID NO: 514888 - DNA, 201 bp, Homo sapiens; identical to SEQ ID NO: 484680

SEQ ID NO: 514889 - DNA, 201 bp, Homo sapiens; identical to SEQ ID NO: 484278

SEQ ID NO: 514890 - DNA, 201 bp, Homo sapiens; identical to SEQ ID NO: 484279

SEQ ID NO: 514891 - DNA, 201 bp, Homo sapiens; identical to SEQ ID NO: 484280

SEQ ID NO: 514892 - DNA, 201 bp, Homo sapiens; identical to SEQ ID NO: 484381

SEQ ID NO: 514893 - DNA, 201 bp, Homo sapiens; identical to SEQ ID NO: 484471

SEQ ID NO: 514894 - DNA, 201 bp, Homo sapiens; identical to SEQ ID NO: 484384

SEQ ID NO: 514895 - DNA, 201 bp, Homo sapiens; identical to SEQ ID NO: 484477

SEQ ID NO: 514896 - DNA, 201 bp, Homo sapiens; identical to SEQ ID NO: 484478

SEQ ID NO: 514897 - DNA, 201 bp, Homo sapiens; identical to SEQ ID NO: 484482

SEQ ID NO: 514898 - DNA, 201 bp, Homo sapiens; identical to SEQ ID NO: 484485

SEQ ID NO: 514899 - DNA, 201 bp, Homo sapiens; identical to SEQ ID NO: 484392

SEQ ID NO: 514900 - DNA, 201 bp, Homo sapiens; identical to SEQ ID NO: 484393

SEQ ID NO: 514901 - DNA, 201 bp, Homo sapiens; identical to SEQ ID NO: 484395

SEQ ID NO: 514902 - DNA, 201 bp, Homo sapiens
tctttctttgtcttctctggaaaatgctcttggaaacagatcatattaatcagattggctataggtaagtcaaaaacctaatttgcattccatttggcaarttgttgtatccatacaacaatggagtttatgttttactctctgccttccagagtattagagagaattggagccagggccttggtagcccatgtgaggaca

SEQ ID NO: 514903 - DNA, 201 bp, Homo sapiens
tcgagtaagtgactttgtgaaggaaaattccccagagcactggttacagaatgactggcacaccaagcacatgaattatcacaaggtactagtcctaattrgtatttcaaatagtccttttaaagccatacttgagtatttgatgaagtgatttggccgttttctctctggttctaatgttttttctcttgtctatataga

SEQ ID NO: 514904 - DNA, 201 bp, Homo sapiens
ggcccacagcaaggataaactccatttgtggtaggattataattttaaatatgccaaatagtacctgatttttagtaatctaattattgaacaaagctgarggatgttctcttaatatgtgccttggtggcttgtcattttggtgactctctaagagcttaatataatgcctttcccttgttttcacttactctgtgtgcc

SEQ ID NO: 514905 - DNA, 201 bp, Homo sapiens
gatatgtgatgctaaattgttgcttcataatctgaagaagtaaatatttaatgaaagatagtttatagtttatcatgttattctagtatctaaatataccytgtggtttatgctattgtgggtgtttatgctccagtggtccacctctggcaaagtatttggaggtgagaaactgaaattttaaatggcaaactgaaattt

SEQ ID NO: 514906 - DNA, 201 bp, Homo sapiens
gacatttagacaaaatgcgatattttcaactttggaaagcctgtgcaaattgatcttcaactatctgaactaaaaataaaattcccaaccttcagtctcaytgaaacatttttataagccatttttaaaccaaaccaatgcctatttcagcatatatgttcattaaatatttgtgaagtgaatgaagtactgctgtgttca

SEQ ID NO: 514907 - DNA, 201 bp, Homo sapiens
gttgctaaatataatggcacttttagtccatctgacagtcttcaacctagattataagatatgtgatgctaaattgttgcttcataatctgaagaagtaartatttaatgaaagatagtttatagtttatcatgttattctagtatctaaatataccctgtggtttatgctattgtgggtgtttatgctccagtggtccac

SEQ ID NO: 514908 - DNA, 201 bp, Homo sapiens
tttacagaaaacggaagttatagaagaggcttttcctgggtgagtgtatgcgtggcagagttttgtgtttttatgtgattgtgtctgtcagattttacttrgtttcgtgttggaaggttataagatccactattctgattgtgtgtaattacctttttaaaacgaatgacaaataatgtaatttttatttttttagcatgt

SEQ ID NO: 514909 - DNA, 201 bp, Homo sapiens
ttaggtactgtagatattcctgacttaatttttgacagaaaagttaagggtaatcttgagtcatggcatatattgaaagaccatcagctttaactgtaaatttcctagttgttcttgctttgtcaaaatcgtactatttttgctttccttttaaaatcattaactgtatgataatcactacatgcctaaaaatatgtaggt

SEQ ID NO: 514910 - DNA, 201 bp, Homo sapiens
aaagtaatagccagtgagagatgtgagattaattagaaatattattgttaccaaattaaaaggaactttaaaaaattatattttattgtaatactttgtawatactgtatgaacaaaattcaaacaatttaaataatttcaagtcacaggagatttttatcttcaaattttaggtttcttactgaagtacttcttcctata

SEQ ID NO: 514911 - DNA, 201 bp, Homo sapiens
ttttccaaaggataaataacaaaattctctactatgcattgccctttgtcaaattgaaacaatgatgtccatagtggaagtcaaaagttaatgggaagtckgttttgtaggaaacctgaaaacattttttcatgaagcttatcctgtataataatataacatgatgcagctttaatagactaaatctaaccttgacttctt

SEQ ID NO: 514912 - DNA, 201 bp, Homo sapiens
cttctgaaatgctactcaaacttctatgtgtattcccactgtacatttcacacagaaactataatacctataggaacaaagatagcattaataaataattrcataaaattgaacttttaaaaaaatacaaattaacattatggaagttattttcattttttctttttaatggaacgtgaatatttaggttcctgcagcaga

SEQ ID NO: 514913 - DNA, 201 bp, Homo sapiens
cagcaaggataaactccatttgtggtaggattataattttaaatatgccaaatagtacctgatttttagtaatctaattattgaacaaagctgagggatgktctcttaatatgtgccttggtggcttgtcattttggtgactctctaagagcttaatataatgcctttcccttgttttcacttactctgtgtgccaagtac

SEQ ID NO: 514914 - DNA, 201 bp, Homo sapiens
tttccttattcattcatttaataagtacatattgaatatcaactgtgttctatgtatagaaggtacagaagtaaataaaatagatgtggtcctagccttgwgatactttgaaaatatgagcaattagaccctgagttgattctccaaaactcccactagagggaggaagtagcagtaagtcactgtgtttctttacagagt

SEQ ID NO: 514915 - DNA, 201 bp, Homo sapiens
aatgaggtatgttctttttattaatttggttccatgtcagggaattgatacgagtatagtataaacctttatttcatgattttatgtgcgtattatttcayagtcaggtacatttgagaaaaaaaagttagctttattttattacaaaagtaaatattttttattataggaattctaggataaacaaacccaaagaaagta

SEQ ID NO: 514916 - DNA, 201 bp, Homo sapiens
gaaactgcagttttagtggacataaggacttctataaaaagaagtaaagtataatcaagtataattttaaatgtttccttgcaaaaaaaaatctaaacaaygttttcacatttagctcttttaagagaattttttaaaaaatgctctaaccatttatcatcttctcaattccacagaaatatccagagaagttgtattttg

SEQ ID NO: 514917 - DNA, 201 bp, Homo sapiens
aggtacatttgagaaaaaaaagttagctttattttattacaaaagtaaatattttttattataggaattctaggataaacaaacccaaagaaagtaattgwtgtaatctctacatgagagataagcattataaaaattttttgcacattttttttcattttttatagatagttaagaatgaggactagtgtagctagagct

SEQ ID NO: 514918 - DNA, 201 bp, Homo sapiens
tcagaaggtatgtactaaatcttatggtcggagtgacttcacctgttgattactgtattttagactgctgtgggcattccctagtgattttagaactgacrgaagttctgagccctaatttctgtcctgtttagtgcttttatagtttcttaactttttactttcttgtcactgtaaaaacaggattcagtcattcattct

SEQ ID NO: 514919 - DNA, 201 bp, Homo sapiens
tttctctctttagttacttggaaacctagtatcagactttgtggataccttcaggcccacagcaaggataaactccatttgtggtaggattataattttamatatgccaaatagtacctgatttttagtaatctaattattgaacaaagctgagggatgttctcttaatatgtgccttggtggcttgtcattttggtgact

SEQ ID NO: 514920 - DNA, 201 bp, Homo sapiens
ttcccacctagaacttctgagaaggactgccacttctcttcacaggagatggcaggattgtcagacttgatacttcatttggttttcattttatgagacascccttaaccaccttttcatagtggtatctgtaatgaagacattgttgtgtttatacagacagataataaatagaaacctggttcatagacttgtgagtta

SEQ ID NO: 514921 - DNA, 201 bp, Homo sapiens
tttggggaatactgaacagttggtttgggatagactagacgtctaaggaaattataatagtgagattttactttgttaaaatctaggctttcagatggccytcatgattttacacaggttgaacattttcatataatttttctgttgtttttcaaaggccatgcgtagtcacgaaggaaatgaagcccaggtttgttattt

SEQ ID NO: 514922 - DNA, 201 bp, Homo sapiens
ggtcatatatgtttggggaatactgaacagttggtttgggatagactagacgtctaaggaaattataatagtgagattttactttgttaaaatctaggctytcagatggccctcatgattttacacaggttgaacattttcatataatttttctgttgtttttcaaaggccatgcgtagtcacgaaggaaatgaagcccag

SEQ ID NO: 514923 - DNA, 201 bp, Homo sapiens
cctttgtcaaattgaaacaatgatgtccatagtggaagtcaaaagttaatgggaagtctgttttgtaggaaacctgaaaacattttttcatgaagcttatyctgtataataatataacatgatgcagctttaatagactaaatctaaccttgacttcttaagttcaacttcattccgtgcttctcagcctcttgttacaat

SEQ ID NO: 514924 - DNA, 201 bp, Homo sapiens
cttggctagagcaactcatgtaacaggtacggtgaatatgtgactacaaacaacaacagatgaattaaagtgtgccatgattctactaattactatagttrtaacatactaaaaagatacttttcatttgtttgaaaaaagcctgttgttttgatatcttcactatttcactcatttatggaagctcttttgtgtaccatc

SEQ ID NO: 514925 - DNA, 201 bp, Homo sapiens
aatggtaagccagaaataggcaagaaaggtcatatatgtttggggaatactgaacagttggtttgggatagactagacgtctaaggaaattataatagtgmgattttactttgttaaaatctaggctttcagatggccctcatgattttacacaggttgaacattttcatataatttttctgttgtttttcaaaggccatg

SEQ ID NO: 514926 - DNA, 201 bp, Homo sapiens
acatgttaagaaacttctcatctaccccacgacactccttagtttattgtctccggatatgtgtaaatcctgctttaaatgtgagaagttgaaattctctrattaaagtacgttttaatgtgtttttatttcttaggtagagaagattatctgtaacttaaaaccagctttaaaacttcgtcttcgattcatcacacacat

SEQ ID NO: 514927 - DNA, 201 bp, Homo sapiens
caataactcttcttagataactgattgttgaacaaaactttcttgggggtaggaggaaacaagggcaggtataatacaattttttgtattaaaaagtgaayctcatacttcaaaaggtatggaacattaattgtctaaaaataaaagatatcagaattgagaagattaatgttttttcatatcttgtctcattttattttt

SEQ ID NO: 514928 - DNA, 201 bp, Homo sapiens
gtgctcataccaagtgaaaaagcctgatatctttttattattatttgacctcattgaatctttgaagggctattggggaatccccaagaggtctacagacyacacttgagaactgatgttttaaagagatagttattggttttagcaacctcaaatacgtttatgtaaattattttgttttacataaagaaccctcttcaa

SEQ ID NO: 514929 - DNA, 201 bp, Homo sapiens
ggaatttattttctgaagcaaaagaatgactcattagaaaataattttcatattaatgtcttataactattaaaagaaataggctcatgaaacctaggtawaccttggttgcatctgtggctattatatgtcatatttataagaacccacctgaaagaccaaccatttatacctgtggttaatcaaatggttgcttttaat

SEQ ID NO: 514930 - DNA, 201 bp, Homo sapiens
agtttggcatggctagggaggcctcaggaaacttagaataatggcaaaaggcacctcatcacagggtggtgggagagagaatgagtgcccagtgaaggggsaatccccatataaaaccattagatcttgtgagaactaactcactatcatgagaacagtattgggggaactgtccctcatgatttaaatggtttttctcat

SEQ ID NO: 514931 - DNA, 201 bp, Homo sapiens
actttttcctgtaaagggccatgtagtaaatattttaagcttcgtaggctacagaatctgttgcagctactcagctctgccattggactgcaaaagcagtkgtgttccaataaaactttacaaaaacaggtgccaggctggatttggcccatggattatagttggctgatctctgccctagacatttagacaaaatgcgat

SEQ ID NO: 514932 - DNA, 201 bp, Homo sapiens
aatgcgatattttcaactttggaaagcctgtgcaaattgatcttcaactatctgaactaaaaataaaattcccaaccttcagtctcattgaaacatttttrtaagccatttttaaaccaaaccaatgcctatttcagcatatatgttcattaaatatttgtgaagtgaatgaagtactgctgtgttcacatttacttaaaa

SEQ ID NO: 514933 - DNA, 201 bp, Homo sapiens
aaaaccagccgggtggggtggctcactcctgtaatcccagcactttgggaggccgaagccggtggattgcttgagttcaggagttcgagaccagcctgggmaacatggcaagaccccatctctatccttgttctaaaaagatacatataaataaacaagaaacaaagtgtacagaaaatgaggaagcatgttttatgacaa

SEQ ID NO: 514934 - DNA, 201 bp, Homo sapiens
taattagtcccatcctggcctccagctacccagtttctttcgtaggcagccagtgttaccagtctcttgccatcccctcttagatatcctggctggttttktttgtttgtttgtttgtttgtttgtttgttttaacacaagtgttctgtaccctgtttgtttcaactttatcatgtattagggttggtcatttgtattagt

SEQ ID NO: 514935 - DNA, 201 bp, Homo sapiens
ttagtaagatttcatgatgatgtgttttaattttttaaaagtaaaaattaaaaatttatttttatttgagaatgctctgcgatagtaggaaaagcttgacmaagcacctgtgaatatgtgttacttaaagcaagtaaaaacatataccaaataaagcatcttgtaataatttcaaaattttatggctgttagaccttctga

SEQ ID NO: 514936 - DNA, 201 bp, Homo sapiens
ttacccccttacctatgaacctcctggattcactgacagttcatgccaaaatgaggtatgttctttttattaatttggttccatgtcagggaattgatacragtatagtataaacctttatttcatgattttatgtgcgtattatttcatagtcaggtacatttgagaaaaaaaagttagctttattttattacaaaagta

SEQ ID NO: 514937 - DNA, 201 bp, Homo sapiens
aaggaatcttggagataatctagtcaagcttatgtattttccagacacagaaattcaggccttaattgctgagttgctcaaggtgacctagagtttattartgtcagaatcaagtctagaactggtttattaactccatatccagtgctctttctactataaccaatgaaataaacttctaatcctctttttaggcattct

SEQ ID NO: 514938 - DNA, 201 bp, Homo sapiens
gtgccagtgcttccatttataaagccctatttttaaggacatatagcttggccataaaacttgctcagtgttgaaactttgcatgccaaacctcaccctartagcagtatctcttttattattttaagttttttcttctgaaaaatttgccaagtttccttgtttggacaagcttttgtacatgtgaaactgaaactgctt

SEQ ID NO: 514939 - DNA, 201 bp, Homo sapiens
gtcttccgtacaggttcctgctgttggctgggctcgggagggaacgctccaggtaaagcgctgggggaggaagcgacgccgaggagctacggtttcctccrgaggtctccgcccctctgcccctatattcccagagctcgagtctgatccgggccttgccgggcaccctggaaaggcgggggtgatagtacagatggagac

SEQ ID NO: 514940 - DNA, 201 bp, Homo sapiens
ttaggtaatgcttgtgggctcaaaaccagatgtttctgcccaggggctgaaattaatcactttaattagtttgtaaccctttacttttgctgcacaacctyaacaccttatggcttaaaacagtaatactcaggttttaaaattattcatggttttagtggttgactcggcttaggagacactttttactcaaggtcataa

SEQ ID NO: 514941 - DNA, 201 bp, Homo sapiens
ttcttttctttatgactgcttagcaatggcagttgagactggtctccttccacccaggtacgtttaatgggtatgagcaatctgaagaattttcttttctrtatgtgattggaaattggttgaggttgttgttgtaaaaaggtaagagaatgaagaagaaggtgaggtttatcaagtaatcctttatataatacctcaggt

SEQ ID NO: 514942 - DNA, 201 bp, Homo sapiens; identical to SEQ ID NO: 291542

SEQ ID NO: 514943 - DNA, 201 bp, Homo sapiens; identical to SEQ ID NO: 291868

SEQ ID NO: 514944 - DNA, 201 bp, Homo sapiens; identical to SEQ ID NO: 292117

SEQ ID NO: 514945 - DNA, 201 bp, Homo sapiens; identical to SEQ ID NO: 291653

SEQ ID NO: 514946 - DNA, 201 bp, Homo sapiens; identical to SEQ ID NO: 291797

SEQ ID NO: 514947 - DNA, 201 bp, Homo sapiens; identical to SEQ ID NO: 291528

SEQ ID NO: 514948 - DNA, 201 bp, Homo sapiens; identical to SEQ ID NO: 292120

SEQ ID NO: 514949 - DNA, 201 bp, Homo sapiens; identical to SEQ ID NO: 291607

SEQ ID NO: 514950 - DNA, 201 bp, Homo sapiens; identical to SEQ ID NO: 291798

SEQ ID NO: 514951 - DNA, 201 bp, Homo sapiens; identical to SEQ ID NO: 292185

SEQ ID NO: 514952 - DNA, 201 bp, Homo sapiens; identical to SEQ ID NO: 291872

SEQ ID NO: 514953 - DNA, 201 bp, Homo sapiens; identical to SEQ ID NO: 291906

SEQ ID NO: 514954 - DNA, 201 bp, Homo sapiens; identical to SEQ ID NO: 291908

SEQ ID NO: 514955 - DNA, 201 bp, Homo sapiens
ggagcacaggtgggactgcagaggccaggaacctgtgatggggggagctggaggggaggaacagggagggggatctgggcagcatctggccaggatgaccrggctctctgccctttcaggccaagaggcccaagagcctggacacagcctgtggcatgtccctctatgaggtgggtaggacaactgggctgagcagagatg

SEQ ID NO: 514956 - DNA, 201 bp, Homo sapiens
ggggcaggcctggtggcaggggcgtaggggacttggaggaacctgaggccagctctcataggccctgtgagccctcattgtcacaggggacagccaggtgrcaaagtgagggtgactcccttgccagggcagcccagaggagctgtggggcactgggacaagcagagtccctgggggcgcagctgggcagagacctgcctt

SEQ ID NO: 514957 - DNA, 201 bp, Homo sapiens
cactttctctgcctgtggcatcgaaggccccgggcaccatggcccaggccctgggggaggacctggtgcagcctcccgagctgcaggatgactccagctcyttggggtccgactcagagctcagcgggcctggcccatatcgccaggccgaccgctatggattcattgggggcagctcagcagagccagggtaagggggca

SEQ ID NO: 514958 - DNA, 201 bp, Homo sapiens
cagtgagggtgagtggggcagccagtggctggggcaggagccttggggtgtgggtggggaggtagctcaccagctccagggttccctttttgagcctcaartcacaggactgggtgtgccgaaggtgatggcctggtgcctggcgctacatcacccatcacccatcacccaggcaccgcctggtgcagagctgggccaggg

SEQ ID NO: 514959 - DNA, 201 bp, Homo sapiens
gcccacaggcacctgctgggtgcttgctggctccagatatggatggcatctgagcatcaagtgatcaagaccttcattttggcgggggtggggatgggagrcgacagtaaccaaattcacaagatagtaactcttccccaaagcatctgtggctcttgaggctaacttggccagtacagcggcctgtgttacccgaaatgc

SEQ ID NO: 514960 - DNA, 201 bp, Homo sapiens
ggggcctgccagcaggagctatggaggctgcctagtggagcccttggcctcacccacaggtaaagatgcagtgccggaaaggcatcccgtctgccctgcgygcccgatgctggcccctgttgtgtggggcccatgtgtgccagaagaacagccctggcacctatcaggtgagggagtgggcaggggccccaattcccctac

SEQ ID NO: 514961 - DNA, 201 bp, Homo sapiens
tccgtggtacatactgggtcaggcactagcatggaggagggtcacagagtggggcacgtgaggacccatggaaccgtcctggtgcccaggccctcacaagyaccaaagccagcaccaaaggagtcagggaaggggttggctgagtcaagggaccccagagggcaccaggaataaaatcttcttgaacagatgccttggatg

SEQ ID NO: 514962 - DNA, 201 bp, Homo sapiens
gcacgagatgtttgtgtcgcctcagggccacgggtacgaggccggtgatgcccagggacccccagccccacaagccccaggtgctccagcccactttcccyagcccagctctacagtcttgcatctcaggggacccaggaaggcccagggaggctgaggcctgggcagaggcccccagagggtggagaagggggtgcctgc

SEQ ID NO: 514963 - DNA, 201 bp, Homo sapiens
gcagccagtggctggggcaggagccttggggtgtgggtggggaggtagctcaccagctccagggttccctttttgagcctcaaatcacaggactgggtgtrccgaaggtgatggcctggtgcctggcgctacatcacccatcacccatcacccaggcaccgcctggtgcagagctgggccagggaggcttccagaggaggc

SEQ ID NO: 514964 - DNA, 201 bp, Homo sapiens
cagcccctgctgcacgggggaaactgagtcccagagcaggaagccaaagcgagaatggggacttagttcctgtcccctgagcttcagagaacacaaaaacstgaggcctccagtggctttctgtggctccccagtgaggctgtcagcccctcagtcctcagccacttcctgggctggggacctcacagtttcctgttcctg

SEQ ID NO: 514965 - DNA, 201 bp, Homo sapiens
tcctgggtgacagccaaccagtccctcccccaatacacacccactcaccccttcagtctcctgcttctgcccacgtcggagccacatcctttcctgtcccygtgacaagcattggcagctcctgggtcacaggtcaccccacagggctcccagagatccctagggccaggagctgggttcacctgggtagcctggagggtg

SEQ ID NO: 514966 - DNA, 201 bp, Homo sapiens
ccgggccacccacctgcagacctcatccgccaacgggagatgaagtgggtggagatgacctcgcactgggagaaaaccatgtcccggcggtacaagaaggkgaggggggcaggggccccacttggcttccatggctcattcctctctgcctcagcccacatcttggcaaaatgtacccaccctgtgtcccagcacctccgg

SEQ ID NO: 514967 - DNA, 201 bp, Homo sapiens
agactggaaactcaccgcccagattcaaatcccagctcggccagttgttggctttggggcttcttgggcaaggacttcacctttcagaagctgtttccccmctgtaaagtggaagtttaaaacgcccccctccgccgggcatggtggctcacgcctgtaatcccagcactttgggaggctgaggtgggcagatcacttgag

SEQ ID NO: 514968 - DNA, 201 bp, Homo sapiens
gttgcagtgagctgagatcgcaccactacactccagcctgggcaacagagcgagactccatctcaaaaaaaaaaaagaaaagaaaaaaatagccaggtgtrgtggcatgtgactgtagtcccagctactgaggaggctgaggtgggaggatcagatcgcttgagcccaggaggttgaggctgcaggaagtcatgatcgcgc

SEQ ID NO: 514969 - DNA, 201 bp, Homo sapiens
agaaaagaaaaaaatagccaggtgtagtggcatgtgactgtagtcccagctactgaggaggctgaggtgggaggatcagatcgcttgagcccaggaggttraggctgcaggaagtcatgatcgcgccactgccccgctgcattccagcctgggcaacagagcaagacctgtctcaaaaaatagatagatagacagataggt

SEQ ID NO: 514970 - DNA, 201 bp, Homo sapiens
gggcaaagtggttaggacccattctcaaaaaaaaaaaaaaaaaaaaaacctgaaaacagaccaaaaaaaaaaaccacacacacgcaaagatagatggtttrcatatggtaaattctctttatggtacacagttctgtgaatttttgacacacgcatgcagttgtgtaaccactatcacaatccagctattgaccaattagt

SEQ ID NO: 514971 - DNA, 201 bp, Homo sapiens
agcctgggcaacagagcaagacctgtctcaaaaaatagatagatagacagataggtagacagacagacagacagacagacagacagacagacagatagatdgatagatagatgagggcctggcacttggtatgcgctgaataaatgcttgctcagtgggtggatggatggatggatggacaaatggatggataaatgaatg

SEQ ID NO: 514972 - DNA, 201 bp, Homo sapiens
agcccctccaacccagtcctcttgggtttttatggaagcttcatgacatcagcattccttcccccagggtatcgggcaggaccctctctggggacagtggttttttttttgttgttttttttttgagacggagttttgctcttatcgcccaggctggagtgcaatggcatgatctcagctcaccacaacctgcgcctcctg

SEQ ID NO: 514973 - DNA, 201 bp, Homo sapiens
tacttccttagaattctgccaccctgggaggccctgcttctaattccagtgcttcttggtcctgctttcttccttgggaatccaggccactaggatgtacycccacttccttgggggtgcatgtaagtttctctgaatgaggaaaggcagagggaggctagcccagggtcagtccataattcagaccataactgactagag

SEQ ID NO: 514974 - DNA, 201 bp, Homo sapiens
tttgggaggccaaggtgggtggatcacctgacgtcaggagttcaagaccagcctggccaacatggtgaaaccccaactctactaaaaatacaaaaattagytgggcatggtggcgcatgcctaaaatcccagctactcgagaggctgagactggagaattgcttgagcccgggaggcggaggttgcagtgagccgagattg

SEQ ID NO: 514975 - DNA, 201 bp, Homo sapiens
ctccccagagctgaatggccaaatgctgttctgagccaccaatcccttcccctcggacctttcagagcctcaccacaatctggccactgaagttcacaccygggctgggagcagtggtttatgcctgcaatcccagcactttgggaggccgaggtgggcggatcacttgaggtcaggagtttgagatcagcctggccaaca

SEQ ID NO: 514976 - DNA, 201 bp, Homo sapiens
taagactcaaccgcaaaaaaagaaaaacagaaaacctgaaaacaaaccaaaaaaaaaaaacaaacacaaaaatatatatggttttcatgcagtaaattctstttatggtacacagttctgtgaattttgacacatgcatgcaattgtgtaaccactatcacaatccagctattgaccaattagtgtggttacacaattacc

SEQ ID NO: 514977 - DNA, 201 bp, Homo sapiens
ctgaggtgggaggatctcttgagcccaggagatcgaggctgcagcgagctgtgcttgtgccactgcactccagcctgggcaatggtgagaccctgtcaagaaaaaaaaaaaaaaaaagatagagagagagagagagagtgaagagagaggaaggaagggaggaaggaaagaagaaggaaggaagggaaggagggagggagg

SEQ ID NO: 514978 - DNA, 201 bp, Homo sapiens
caagcaattcttctgcttcagcctcctgagtagctgggattacagctgggattacaccaagcccagctaatttttgtatttttagtagagtcggggtttcrccatgttggccaggctggtctcgaactcctgacctcaggtgatccacccgcctcagcctcccaaagtgctgggattataggcatgagccaccacacccgg

SEQ ID NO: 514979 - DNA, 201 bp, Homo sapiens
aggctcagcttattcttctgcagttctctataaccaagactcattttctctcatcaaaaacaagtacagagagtttgatgtgtttatctcttttttcttcytcttcttttttttttttttcttttttgagatggagtctctctctgttgcccaggctggagtataatggtgccatctaggctcactgcaacctccgcctcc

SEQ ID NO: 514980 - DNA, 201 bp, Homo sapiens
ttttttttttcttttttgagatggagtctctctctgttgcccaggctggagtataatggtgccatctaggctcactgcaacctccgcctcctgattcaagygattctcctgcctcagcctcctaaattggtgggattacaggagcccaccaccacatccggctacctttgtgtattttttagtagagacggggttttgcca

SEQ ID NO: 514981 - DNA, 201 bp, Homo sapiens
tgcctcctgcctcccttccctgcgcactcagcctccaaaacacacagcctcctaagagcccttggaacactccagcctcgtgcctcagggcctttgcacaygcagtttcctagaatgctcttctctctcctgtcctccctccccttctgtggctatggggtggttgcttcagtctcttgctggcctctgctctaaatcctg

SEQ ID NO: 514982 - DNA, 201 bp, Homo sapiens
aggccaaggtgggtggatcacctgacgtcaggagttcaagaccagcctggccaacatggtgaaaccccaactctactaaaaatacaaaaattagctgggcrtggtggcgcatgcctaaaatcccagctactcgagaggctgagactggagaattgcttgagcccgggaggcggaggttgcagtgagccgagattgcaccat

SEQ ID NO: 514983 - DNA, 201 bp, Homo sapiens
caagtaggaagaggagagatggccctgccctggggtctatggggacaaagaccctgccctgggggggtctgaggggacacagccctgccctggggggtccraggggacacatactacccctgggggaccctctctggttccaggtcccaattgttgggatggagctggggaggcctgagcagccagggtgccggagggcac

SEQ ID NO: 514984 - DNA, 201 bp, Homo sapiens
gaccctgccctgggggggtctgaggggacacagccctgccctggggggtccgaggggacacatactacccctgggggaccctctctggttccaggtcccarttgttgggatggagctggggaggcctgagcagccagggtgccggagggcactgggcctgtgtgtagctgcctgtgacctccccgctgcccccgggcctcc

SEQ ID NO: 514985 - DNA, 201 bp, Homo sapiens
ctggaaggtgcgtggggccgggccagaggagggcggggacgctggggctgggtgtgagccctgaaagatcttgaagggtgctggagtccaggcatctcctrggctggggaccctgcggggctcactcaggtcaggtctagcgggtctcagggcatcgaggagcatgggtgtctgtggagttgggacctggggctcctgtaa

SEQ ID NO: 514986 - DNA, 201 bp, Homo sapiens
ctccactgaaaatacaaaaattagccaggtgtggtagcacatgcttgtgaccccagctgcttgggaggccgagacatgagaatcacttgaacccaggaggyggaggttgcagtgagctgagatcacaccgctgcactctagcctgggtgacagagtgagattctgtctcaaaaaattaaaaaaaagaaagaaagaaacagc

SEQ ID NO: 514987 - DNA, 201 bp, Homo sapiens
ggatgggttcctatgggcctggggctggggatcctcagtccctttgaacctgaagtcttcatggggttggaatctcagctccctgatgggccctcaggacrcatcttccaaccccatgggtggtctcaggcccagaggcaccactgccttgtcccctcatctcggcccccaggtgctgaactgctctggacatatgagggc

SEQ ID NO: 514988 - DNA, 201 bp, Homo sapiens
tttctagatctggaggaatgttctgaaatacaaatcaacatatacatatgtatataaattttttttgaaataaagtcttgctttgtcatgcaggctggagwgccgtggcacaaacagggctcgctgcagccctgacccacctgagcctcccaagtagctgggactataggtgcgcactaccatgcctaatttttttttgta

SEQ ID NO: 514989 - DNA, 201 bp, Homo sapiens
taaagtcttgctttgtcatgcaggctggagagccgtggcacaaacagggctcgctgcagccctgacccacctgagcctcccaagtagctgggactataggygcgcactaccatgcctaatttttttttgtattttttgtagagatggagtttcatcatgttgcccaggctggtcttaaactcctgagttcaagcgacccac

SEQ ID NO: 514990 - DNA, 201 bp, Homo sapiens
agcctcccaaagtgctgggattacaggcgtgagccactgtgcctggccctccctagtattaccactatctaacccaacgttgtccaataaaagcatgatgycagccacatatgtcatttggaatttttttttttttctttgagacagagccttgctctgccacccaggctggaaccacattaaaaaggtaaacggaatgct

SEQ ID NO: 514991 - DNA, 201 bp, Homo sapiens
catgatgtcagccacatatgtcatttggaatttttttttttttctttgagacagagccttgctctgccacccaggctggaaccacattaaaaaggtaaacrgaatgctgggcatggtaactcacacctgtaatcccaacactttgggaggccaaggccaggagtttgagaatagtcttggcaacatagggagaccccatct

SEQ ID NO: 514992 - DNA, 201 bp, Homo sapiens
ccaaagacagggttcaaatcccatctcacccacttcctggtggtgtggaattgtgtcagtgactgccgctctgagcctcactttcagatcctggaaatackggcaggccgggtgcggtggctcaggcctgttattccagcactttgggaggctgaggtgggcggattgcttgagttcaagaccagcctgggcaacatggca

SEQ ID NO: 514993 - DNA, 201 bp, Homo sapiens
ggctcactgtaacctcaaacctgggttcaagtgatcctctgtctcaccctcccaaattatagccgcttccggctataattttgtatgaaagaggccaggcrtggtggcttacacctgtaatcccagaatttggggaggccaaggtgggaggatcacttgagttcaggagttcaagaccagcctgggcaacaaaatgacaca

SEQ ID NO: 514994 - DNA, 201 bp, Homo sapiens
caaaaaatacaaaaattagctgggcgtgctgatacgcacctgtggtcccagctacataagaggctgaggctggaggatggctttagcctaggatactgagkctgcagtgagccatattcatgccattgcactccagcctgggcaacagagcgacagcctgtctcaaaagaaaagaaagaaaagaaaagagaaactttgggt

SEQ ID NO: 514995 - DNA, 201 bp, Homo sapiens
ggccacgtgcagtggctcacacctgtaatcccagcactttgagaggccaagatgggaggatagcttgagttcaggagttcagtgtttcacctgggcaacayggcaaaaccctgtctccaccaaaaatacaaaaaatttgccagatgttgtggcacatgcctgtggtcccagctacttgggaggctgaggtgggaagatcat

SEQ ID NO: 514996 - DNA, 201 bp, Homo sapiens
caagatgggaggatagcttgagttcaggagttcagtgtttcacctgggcaacacggcaaaaccctgtctccaccaaaaatacaaaaaatttgccagatgtkgtggcacatgcctgtggtcccagctacttgggaggctgaggtgggaagatcatgtgagcctgggaggtggaagttgcagtgagccaagattgcaccagta

SEQ ID NO: 514997 - DNA, 201 bp, Homo sapiens
cggcaaaaccctgtctccaccaaaaatacaaaaaatttgccagatgttgtggcacatgcctgtggtcccagctacttgggaggctgaggtgggaagatcaygtgagcctgggaggtggaagttgcagtgagccaagattgcaccagtacactccagcctgggtgacagagcaagacccagtcgcaaacaaacaaacaaaaa

SEQ ID NO: 514998 - DNA, 201 bp, Homo sapiens
gccagatgttgtggcacatgcctgtggtcccagctacttgggaggctgaggtgggaagatcatgtgagcctgggaggtggaagttgcagtgagccaagatygcaccagtacactccagcctgggtgacagagcaagacccagtcgcaaacaaacaaacaaaaaaataataaaaagtttatcctcctaggtgcagagtgcaa

SEQ ID NO: 514999 - DNA, 201 bp, Homo sapiens
ttattttcatattcaagatcacaccactgtgtaagtagcggagctgggatttgaacccaggccactgactacagagtccttgctgtgaaccactacacagyagtgcttgatgaggatatatttgtggaatgatgaatgagttaactgaatgtgtcacacgtgcacatattcgagcccaagtgtatggagcatgtgagcata

SEQ ID NO: 515000 - DNA, 201 bp, Homo sapiens
agggcctgatcctcagccccacccaactctccaaaagccaacttgcacagcgagcatttagattgtctctgcagccagagactgtgtgaagggaggtgccrgggacataaggatgtatttctaaacctgttcccttgagtatgaaaaacatctatgaatagaaacagcataaataaaatcttattcataaaaattacagcc

SEQ ID NO: 515001 - DNA, 201 bp, Homo sapiens
cattgccttctgtaataggacatcacctgaacaggctttctgggctggagccaaggaccctccctgactcccacctccctttctgccttgtaccccagccrggtggaagagaccggagtggtgctgtccctggagcaaacggagcaacactctcgcagacccattcagcggggcgccccctctcagaaggacacccctaac

SEQ ID NO: 515002 - DNA, 201 bp, Homo sapiens
gccaaggaccctccctgactcccacctccctttctgccttgtaccccagccaggtggaagagaccggagtggtgctgtccctggagcaaacggagcaacaytctcgcagacccattcagcggggcgccccctctcagaaggacacccctaaccctggggacagccttggtatggggcagggctggggccgggaggggttgt

SEQ ID NO: 515003 - DNA, 201 bp, Homo sapiens
cgaacccaggaggcagaggctgcagtgaactgagatagtgccactgcactccattctgggcaacagagctagactccatctcaaaaataaaaataaagttyacacctggcccagcaggggtcctccaggccccttccttaccctcacactaagaacagtggccatcctgacctgctgaagatgtcaactgtgttcctgggg

SEQ ID NO: 515004 - DNA, 201 bp, Homo sapiens
gcactccattctgggcaacagagctagactccatctcaaaaataaaaataaagttcacacctggcccagcaggggtcctccaggccccttccttaccctcwcactaagaacagtggccatcctgacctgctgaagatgtcaactgtgttcctggggttggtatggagggctctggcccttggccctcagtcaccagcccgt

SEQ ID NO: 515005 - DNA, 201 bp, Homo sapiens
gggggattccctacgtctctggctgccccgcccctctggccaagagcggcttcggggttcccgatttctcgctacccaaggctcatttaccctcctggttrggggtggaacttgggattcctgataaattaggggtgattgcatttgagcagtccccaggcttctgcgggagatattcgccctccacatattgatccctct

SEQ ID NO: 515006 - DNA, 201 bp, Homo sapiens
cccctcctagaggttctgcttccctcggatgggtcccaaggaggggatgagaaaaagcctgaagactggaaactcaccgcccagattcaaatcccagctcrgccagttgttggctttggggcttcttgggcaaggacttcacctttcagaagctgtttccccactgtaaagtggaagtttaaaacgcccccctccgccggg

SEQ ID NO: 515007 - DNA, 201 bp, Homo sapiens
tttatggaagcttcatgacatcagcattccttcccccagggtatcgggcaggaccctctctggggacagtggttttttttttgttgttttttttttgagayggagttttgctcttatcgcccaggctggagtgcaatggcatgatctcagctcaccacaacctgcgcctcctggattcaagcaatgctcctgcctcagcct

SEQ ID NO: 515008 - DNA, 201 bp, Homo sapiens
gctcccacctgtaattccagtactttgggaggccaaggtgggaggatcacttgagctcaggagtttgagaccagcctgggcaacatggtgagacccccatytctacaaaaaaatttgtaaaaattagccaaaagctggatgcggtggctcacacctataatcccagcactttggaaggccaaagtaggcagatcacttgag

SEQ ID NO: 515009 - DNA, 201 bp, Homo sapiens
tcctggattcaagcaatgctcctgcctcagcctcccaagtagctgagattacaggcgcacactaccacgcccagttaatttttttatttttagtagagacrgggtttcaccatgtttgtcaggctggtctcgaactcctgacctcatgatccacccgcctcggcctcccaaagtgctaggattacaggcatgagccaccgc

SEQ ID NO: 515010 - DNA, 201 bp, Homo sapiens
gctactcgggaggctgaggtgggagaatcacttgaaccagggaggtggaggttgcagtgagctgagatcgcaccactacactccagcctgggcaacagagygagactccatctcaaaaaaaaaaaagaaaagaaaaaaatagccaggtgtagtggcatgtgactgtagtcccagctactgaggaggctgaggtgggaggat

SEQ ID NO: 515011 - DNA, 201 bp, Homo sapiens
agcggccctaggcgcgccacagagaggagcgaggcgccagaggcaccatggactggcaagaccacaggtaaaatcagggctaggaagggctccacagtgtwgcccttccaggcccagggagcgccgcgaactcgacagggccacacatcgaggcctgcgcagccgcggcccagcactccacgagccccggccccacgtggc

SEQ ID NO: 515012 - DNA, 201 bp, Homo sapiens
attcaaatcccagctcggccagttgttggctttggggcttcttgggcaaggacttcacctttcagaagctgtttccccactgtaaagtggaagtttaaaaygcccccctccgccgggcatggtggctcacgcctgtaatcccagcactttgggaggctgaggtgggcagatcacttgaggtcaagagttcgagagcagcct

SEQ ID NO: 515013 - DNA, 201 bp, Homo sapiens
agcctggacatgaagttcacctactgtgacgacaggtgggcaggggccccctcttccgtctgcccaagttcaagtgctgtttccctccccacctccacacycccgcatttctctctctccttctctctctctctctcacttcatccatctctctctctctttgtgtgcctgcctgtctctgaattttctacatgcctttta

SEQ ID NO: 515014 - DNA, 201 bp, Homo sapiens
cccgctgcattccagcctgggcaacagagcaagacctgtctcaaaaaatagatagatagacagataggtagacagacagacagacagacagacagacagayagacagatagatagatagatagatgagggcctggcacttggtatgcgctgaataaatgcttgctcagtgggtggatggatggatggatggacaaatggat

SEQ ID NO: 515015 - DNA, 201 bp, Homo sapiens
gcctgtgacctccccgctgcccccgggcctccccagccctgtccaggaggaaggtggaggcccccacggagcggtgcttctccttgcgcatgaagagtacrctcaccagccgcgggcgcaccctcaacctcaaggcggccacctggaaggtgcgtggggccgggccagaggagggcggggacgctggggctgggtgtgagc

SEQ ID NO: 515016 - DNA, 201 bp, Homo sapiens
gctgccttgccatttgcccagactgctctcaaactcctgggctcaagccatcctcccacttcggcctcccaaagtgttgggattacaggtgtgagccaccrcacctggcctccttttatctttcattctctttctgtctctgagtctttctcttagtgtctgtctctctttgtcccttttcttaaatgagtcaatttgtgt

SEQ ID NO: 515017 - DNA, 201 bp, Homo sapiens
tttacttttcttggaggctttacccccttagaagtctgttccctgggagtcccttcttctctagagttctgtccctctggaaggtcctgccctccatgagtttgaaccccttcgaggcttccccctcatctctatattacaattccccttaggccctggccccttcatattttgaccctggggagttccatccacttagaa

SEQ ID NO: 515018 - DNA, 201 bp, Homo sapiens
tgagttttacaggccaaattaaggctgtgttccttctggaggctccaggaaagaatctgtttccctgccttttccagctgctagagctgggcccacctgcmtccatctccctatctcaagactaacgttaggcaggccgggcgaggtggctaacacctgtaatctcagcacttcgggaggctaaagcaggaagattgagcc

SEQ ID NO: 515019 - DNA, 201 bp, Homo sapiens
cgggaattaggatgtggacatctttgggggtcattattcaacccaccacactcctcttgttctgtttcttactccttttctctcggtcacaatccttctcracatcttgctggctttgttcctgtgtcctctgctgctacttccctctgcctaccctctctctcacccagtagcatcctgaccagaccccactccgcccca

SEQ ID NO: 515020 - DNA, 201 bp, Homo sapiens
ttcatttctcttgggtaaacagctaggattggaatggataggttatatagtaactgtatatttaatctaagaaactgccatggctgggcacagtggctgaygcctgtaatcccagcactttgggaggccgaggagggcagatcagttgaggccaggagtttgagaccagcctggccaacatggcgaaacaccgtctccact

SEQ ID NO: 515021 - DNA, 201 bp, Homo sapiens
gtttcttactccttttctctcggtcacaatccttctcgacatcttgctggctttgttcctgtgtcctctgctgctacttccctctgcctaccctctctctyacccagtagcatcctgaccagaccccactccgccccacccccaggattgcagaagtggctggctatagtcccgatgacctgatcggctgttccgcctacg

SEQ ID NO: 515022 - DNA, 201 bp, Homo sapiens
cactccgccccacccccaggattgcagaagtggctggctatagtcccgatgacctgatcggctgttccgcctacgagtacatccacgcgctggactccgaygcggtcagcaagagcatccacacctgtatgtatcccatttccccaggtgcgaagccagctgccacatggcccccagctgacaccaggaccccccagctcc

SEQ ID NO: 515023 - DNA, 201 bp, Homo sapiens
ccccaggatgcactgcctccccacctcaacaccagctccctgctccccaagccccaaggaactgtctccttccttgccccctcatacccagtccccagatmtttctctccccatttgcccccttggtggccctgatccctcccgatccccctcctcagtgctgagcaagggccaggcagtaacagggcagtatcgcttcct

SEQ ID NO: 515024 - DNA, 201 bp, Homo sapiens
tgtgcacgtgtacacatatgaggaatgtgtgtcaccatgtaaatgccggtgtgtgtgtctgcatggacacaggtatgtgtatgggtgtgtagactgttaawttttttttttttttttttttttttttttgcgtgaacctctgcttaagtggattgttaattcaaattagaaaggggtctttatttggcctggcatggtggc

SEQ ID NO: 515025 - DNA, 201 bp, Homo sapiens
ttcggcctcccaaagtgttgggattacaggtgtgagccaccgcacctggcctccttttatctttcattctctttctgtctctgagtctttctcttagtgtytgtctctctttgtcccttttcttaaatgagtcaatttgtgtcaagcagttaatatggtgcccagcacacaggaagcattcaataaattgtcgataggcca

SEQ ID NO: 515026 - DNA, 201 bp, Homo sapiens
acacctgtaaatcccagaactttgggaggccaggggaggaggattgctagagcctgggggttcaagaccagcctgggcaaagtggttaggacccattctcaaaaaaaaaaaaaaaaaaaaaacctgaaaacagaccaaaaaaaaaaaccacacacacgcaaagatagatggtttacatatggtaaattctctttatggtac

SEQ ID NO: 515027 - DNA, 201 bp, Homo sapiens
attacaggcatgagccactgcacccggcccatgttgtggtttatatcagtagttcctttgtaaatagtgaacagtattccatggtatgaatagagcacagkttttttttttatccattcaccagttagaagacattgggctgtttccaagtttgggtgattacaaaaaaacagctactgtaaacattctcatacaagattt

SEQ ID NO: 515028 - DNA, 201 bp, Homo sapiens
caggcgtgagccactgtgcctggccctccctagtattaccactatctaacccaacgttgtccaataaaagcatgatgtcagccacatatgtcatttggaatttttttttttttctttgagacagagccttgctctgccacccaggctggaaccacattaaaaaggtaaacggaatgctgggcatggtaactcacacctgta

SEQ ID NO: 515029 - DNA, 201 bp, Homo sapiens
agtgcaaaggcccttaggtggggactgtatctatcttttttggggtgtggggggacagggtgtgtcttgctctgttgcccaggctggagcacagtggtgcratcacagctcactgcagccttgaactcctgggctcaagcgatcctcccatctcagtctcccaagtagctgggactacacttgtagctgggactacaagtg

SEQ ID NO: 515030 - DNA, 201 bp, Homo sapiens
atagtgaacagtattccatggtatgaatagagcacagtttttttttttatccattcaccagttagaagacattgggctgtttccaagtttgggtgattacaaaaaaacagctactgtaaacattctcatacaagattttatgagatcacatgttttcatttctcttgggtaaacagctaggattggaatggatgggttata

SEQ ID NO: 515031 - DNA, 201 bp, Homo sapiens
ctccctaattccagaccccagcctcctaaatctattctgggcttcccaccccactgaacttacccaattccttctttcagtcttaagttttcccattctaracccctaccctctaggctgtgctgctcctggacttcatgcctctccattctcattgcctacaatctctgtgccccagaaccccctccacttcccacccca

SEQ ID NO: 515032 - DNA, 201 bp, Homo sapiens
taaacagctaggattggaatggatgggttatatagtaagtgtatatttaatctaagaaactgccatggctgggcacagtggctcacgcctgtaatcccagyactttgggaagccaaggaaggaggatgactagagcctctgaggtgaagaccagcctgggcaaagtggttaagactcaaccgcaaaaaaagaaaaacagaa

SEQ ID NO: 515033 - DNA, 201 bp, Homo sapiens
agaaacctccatgggtcagctatctggaagcccctccaacccagtcctcttgggtttttatggaagcttcatgacatcagcattccttcccccagggtatygggcaggaccctctctggggacagtggttttttttttgttgttttttttttgagacggagttttgctcttatcgcccaggctggagtgcaatggcatgat

SEQ ID NO: 515034 - DNA, 201 bp, Homo sapiens
gaaggaggatgactagagcctctgaggtgaagaccagcctgggcaaagtggttaagactcaaccgcaaaaaaagaaaaacagaaaacctgaaaacaaaccaaaaaaaaaaaacaaacacaaaaatatatatggttttcatgcagtaaattctgtttatggtacacagttctgtgaattttgacacatgcatgcaattgtgt

SEQ ID NO: 515035 - DNA, 201 bp, Homo sapiens
tttactaaaaatacaaaaattagccagatgtggtggcgtgtgcctataatctgagctacttgggaggctgaggcaggagaatcacttgaaccccggaggcrgaggttgcaatgagtggagatcagaccactgcactccagcctgggcgacagagtgagactccatctcaaaaaaaaaaaaaaagaaaaaagaattatacct

SEQ ID NO: 515036 - DNA, 201 bp, Homo sapiens
ctttacccctgagacagctgaactctccattgtttccccactaaactccaggctccaagacctttaaccccagaggatttgtttgaaagtcttggcctcakgctgggtgcggtggctcatgcctgtactctcagtactttgggaggctgaggtggggagattatctgaggtcaggagttcaagaccagcctgactaacatg

SEQ ID NO: 515037 - DNA, 201 bp, Homo sapiens
agtctcactctgtcgcccaggctggagtgcagtggcgcgatctcggctcactgcaaactccatctcccgggttcacgccattctcctgcctcagcctcccragtagctgggaccacaggcagctgccaccacgcctggttattttttttgtatttttagtagagacagggtttcaccgtgttatccaggatggtctcaatc

SEQ ID NO: 515038 - DNA, 201 bp, Homo sapiens
ccccctggaatcgacttccccggggaggccccgccccctttgagttcctggcctgctgggagtcccgcccccctcgaagtctatcacttgtgaggccccgyccctggaacgcgccctttggaagccccgcctccttaggactcagaaaatccgctaacccttcaactcttacgatttggtcctctaggagactctcccaga

SEQ ID NO: 515039 - DNA, 201 bp, Homo sapiens; identical to SEQ ID NO: 420511

SEQ ID NO: 515040 - DNA, 201 bp, Homo sapiens; identical to SEQ ID NO: 420512

SEQ ID NO: 515041 - DNA, 201 bp, Homo sapiens; identical to SEQ ID NO: 420515

SEQ ID NO: 515042 - DNA, 201 bp, Homo sapiens; identical to SEQ ID NO: 420422

SEQ ID NO: 515043 - DNA, 201 bp, Homo sapiens; identical to SEQ ID NO: 420517

SEQ ID NO: 515044 - DNA, 201 bp, Homo sapiens; identical to SEQ ID NO: 420518

SEQ ID NO: 515045 - DNA, 201 bp, Homo sapiens; identical to SEQ ID NO: 420519

SEQ ID NO: 515046 - DNA, 201 bp, Homo sapiens; identical to SEQ ID NO: 420423

SEQ ID NO: 515047 - DNA, 201 bp, Homo sapiens; identical to SEQ ID NO: 420424

SEQ ID NO: 515048 - DNA, 201 bp, Homo sapiens; identical to SEQ ID NO: 420520

SEQ ID NO: 515049 - DNA, 201 bp, Homo sapiens; identical to SEQ ID NO: 420425

SEQ ID NO: 515050 - DNA, 201 bp, Homo sapiens; identical to SEQ ID NO: 420426

SEQ ID NO: 515051 - DNA, 201 bp, Homo sapiens; identical to SEQ ID NO: 420428

SEQ ID NO: 515052 - DNA, 201 bp, Homo sapiens; identical to SEQ ID NO: 420429

SEQ ID NO: 515053 - DNA, 201 bp, Homo sapiens; identical to SEQ ID NO: 420431

SEQ ID NO: 515054 - DNA, 201 bp, Homo sapiens; identical to SEQ ID NO: 420434

SEQ ID NO: 515055 - DNA, 201 bp, Homo sapiens; identical to SEQ ID NO: 420435

SEQ ID NO: 515056 - DNA, 201 bp, Homo sapiens; identical to SEQ ID NO: 420437

SEQ ID NO: 515057 - DNA, 201 bp, Homo sapiens; identical to SEQ ID NO: 420531

SEQ ID NO: 515058 - DNA, 201 bp, Homo sapiens; identical to SEQ ID NO: 420532

SEQ ID NO: 515059 - DNA, 201 bp, Homo sapiens; identical to SEQ ID NO: 420533

SEQ ID NO: 515060 - DNA, 201 bp, Homo sapiens; identical to SEQ ID NO: 420535

SEQ ID NO: 515061 - DNA, 201 bp, Homo sapiens; identical to SEQ ID NO: 420537

SEQ ID NO: 515062 - DNA, 201 bp, Homo sapiens; identical to SEQ ID NO: 420538

SEQ ID NO: 515063 - DNA, 201 bp, Homo sapiens; identical to SEQ ID NO: 420439

SEQ ID NO: 515064 - DNA, 201 bp, Homo sapiens; identical to SEQ ID NO: 420540

SEQ ID NO: 515065 - DNA, 201 bp, Homo sapiens; identical to SEQ ID NO: 420440

SEQ ID NO: 515066 - DNA, 201 bp, Homo sapiens; identical to SEQ ID NO: 420541

SEQ ID NO: 515067 - DNA, 201 bp, Homo sapiens; identical to SEQ ID NO: 420441

SEQ ID NO: 515068 - DNA, 201 bp, Homo sapiens; identical to SEQ ID NO: 420442

SEQ ID NO: 515069 - DNA, 201 bp, Homo sapiens; identical to SEQ ID NO: 420443

SEQ ID NO: 515070 - DNA, 201 bp, Homo sapiens; identical to SEQ ID NO: 420545

SEQ ID NO: 515071 - DNA, 201 bp, Homo sapiens; identical to SEQ ID NO: 420444

SEQ ID NO: 515072 - DNA, 201 bp, Homo sapiens; identical to SEQ ID NO: 420445

SEQ ID NO: 515073 - DNA, 201 bp, Homo sapiens; identical to SEQ ID NO: 420547

SEQ ID NO: 515074 - DNA, 201 bp, Homo sapiens; identical to SEQ ID NO: 420446

SEQ ID NO: 515075 - DNA, 201 bp, Homo sapiens; identical to SEQ ID NO: 420546

SEQ ID NO: 515076 - DNA, 201 bp, Homo sapiens; identical to SEQ ID NO: 420447

SEQ ID NO: 515077 - DNA, 201 bp, Homo sapiens; identical to SEQ ID NO: 420448

SEQ ID NO: 515078 - DNA, 201 bp, Homo sapiens; identical to SEQ ID NO: 420549

SEQ ID NO: 515079 - DNA, 201 bp, Homo sapiens; identical to SEQ ID NO: 420550

SEQ ID NO: 515080 - DNA, 201 bp, Homo sapiens; identical to SEQ ID NO: 420449

SEQ ID NO: 515081 - DNA, 201 bp, Homo sapiens
  misc_feature (1)...(201): n = A,T,C or G
gggtgggagggaaggggcgtgcacactgaggccgaggtgggggcacagcggctgtccccaggctgcccagccctggattccatgaacgcggaagtcaggcngcccgggcaccagtgctgatggtgcaaccctggacatgtttaacctccaagtcttggtttctgcaccccaaaactgtccatagctaagctgctcacaccg

SEQ ID NO: 515082 - DNA, 201 bp, Homo sapiens; identical to SEQ ID NO: 420450

SEQ ID NO: 515083 - DNA, 201 bp, Homo sapiens; identical to SEQ ID NO: 420451

SEQ ID NO: 515084 - DNA, 201 bp, Homo sapiens; identical to SEQ ID NO: 420452

SEQ ID NO: 515085 - DNA, 201 bp, Homo sapiens; identical to SEQ ID NO: 420454

SEQ ID NO: 515086 - DNA, 201 bp, Homo sapiens; identical to SEQ ID NO: 420453

SEQ ID NO: 515087 - DNA, 201 bp, Homo sapiens; identical to SEQ ID NO: 420455

SEQ ID NO: 515088 - DNA, 201 bp, Homo sapiens; identical to SEQ ID NO: 420459

SEQ ID NO: 515089 - DNA, 201 bp, Homo sapiens; identical to SEQ ID NO: 420559

SEQ ID NO: 515090 - DNA, 201 bp, Homo sapiens; identical to SEQ ID NO: 420557

SEQ ID NO: 515091 - DNA, 201 bp, Homo sapiens; identical to SEQ ID NO: 420461

SEQ ID NO: 515092 - DNA, 201 bp, Homo sapiens; identical to SEQ ID NO: 420462

SEQ ID NO: 515093 - DNA, 201 bp, Homo sapiens; identical to SEQ ID NO: 420561

SEQ ID NO: 515094 - DNA, 201 bp, Homo sapiens; identical to SEQ ID NO: 420563

SEQ ID NO: 515095 - DNA, 201 bp, Homo sapiens; identical to SEQ ID NO: 420467

SEQ ID NO: 515096 - DNA, 201 bp, Homo sapiens; identical to SEQ ID NO: 420565

SEQ ID NO: 515097 - DNA, 201 bp, Homo sapiens; identical to SEQ ID NO: 420569

SEQ ID NO: 515098 - DNA, 201 bp, Homo sapiens; identical to SEQ ID NO: 420570

SEQ ID NO: 515099 - DNA, 201 bp, Homo sapiens; identical to SEQ ID NO: 420571

SEQ ID NO: 515100 - DNA, 201 bp, Homo sapiens; identical to SEQ ID NO: 420475

SEQ ID NO: 515101 - DNA, 201 bp, Homo sapiens; identical to SEQ ID NO: 420573

SEQ ID NO: 515102 - DNA, 201 bp, Homo sapiens; identical to SEQ ID NO: 420480

SEQ ID NO: 515103 - DNA, 201 bp, Homo sapiens; identical to SEQ ID NO: 420482

SEQ ID NO: 515104 - DNA, 201 bp, Homo sapiens; identical to SEQ ID NO: 420483

SEQ ID NO: 515105 - DNA, 201 bp, Homo sapiens; identical to SEQ ID NO: 420484

SEQ ID NO: 515106 - DNA, 201 bp, Homo sapiens; identical to SEQ ID NO: 420577

SEQ ID NO: 515107 - DNA, 201 bp, Homo sapiens; identical to SEQ ID NO: 420487

SEQ ID NO: 515108 - DNA, 201 bp, Homo sapiens; identical to SEQ ID NO: 420488

SEQ ID NO: 515109 - DNA, 201 bp, Homo sapiens; identical to SEQ ID NO: 420489

SEQ ID NO: 515110 - DNA, 201 bp, Homo sapiens; identical to SEQ ID NO: 420494

SEQ ID NO: 515111 - DNA, 201 bp, Homo sapiens; identical to SEQ ID NO: 420589

SEQ ID NO: 515112 - DNA, 201 bp, Homo sapiens; identical to SEQ ID NO: 420590

SEQ ID NO: 515113 - DNA, 201 bp, Homo sapiens; identical to SEQ ID NO: 420506

SEQ ID NO: 515114 - DNA, 201 bp, Homo sapiens; identical to SEQ ID NO: 420592

SEQ ID NO: 515115 - DNA, 201 bp, Homo sapiens; identical to SEQ ID NO: 420508

SEQ ID NO: 515116 - DNA, 201 bp, Homo sapiens; identical to SEQ ID NO: 420509

SEQ ID NO: 515117 - DNA, 201 bp, Homo sapiens; identical to SEQ ID NO: 420593

SEQ ID NO: 515118 - DNA, 201 bp, Homo sapiens
tagcgacaagggatttgctcgcacggcattggctccatcccctagtcgctggacagctctttttttgattggctcaaatcctgtaaagggcttgaccagtytctacatagtcaccgtccgcttttcctgagttctccctcccaattggctccagcttcctgggggcgtggccaagccctcctcttcccagaattggcccgg

SEQ ID NO: 515119 - DNA, 201 bp, Homo sapiens; identical to SEQ ID NO: 282989

SEQ ID NO: 515120 - DNA, 201 bp, Homo sapiens
atagggacgggcccagggaggagccaccctcagggggcggggccgggagggccattgccccgggaccaaggcggggagaatggtccagcccgcgttcggawgctgacgtgcgttccacagggggcagggctcaaggagtcgcctgagccgggggggcggggccatgggaggttcttccctggggcggtggacgggagggtg

SEQ ID NO: 515121 - DNA, 201 bp, Homo sapiens
tacagctgccgcctgcatcccagaccgcctgcatcccgctcggagcgggtccgagccctgctccctcccagcgcaccttttccacgacacggatgacaccrgcgatgagagagtctcggtcctgatacttcttagcgctggtgtgcaggtacactccgcccttctcaaacaccacctgagttggggggaaccagcgagggc

SEQ ID NO: 515122 - DNA, 201 bp, Homo sapiens
gattgggtctgtcgtctctctccgcctagcgacagattccttctattaagggattggctcgctgagttctaagctctaaatgggtcaactcctttgttttycgcctagcgacaagggatttgctcgcacggcattggctccatcccctagtcgctggacagctctttttttgattggctcaaatcctgtaaagggcttgac

SEQ ID NO: 515123 - DNA, 201 bp, Homo sapiens
gttatccgccccatttttcagaaggggagactgaggcctagggaagcaaaacctcttgctcatagtttgtcagcggcagaggtctgattggaacatgactraaaccccagcccagatcctcagacatgagacggtgcactcagccttaatggctagcaggcaacagcacttccactgtgtaggaagcaatgtcctaggcca

SEQ ID NO: 515124 - DNA, 201 bp, Homo sapiens
ggacctcctctagaagctgaagggtaaggaggacccccaggtcttggctactctcctgttgggtagcattacagggtgcccctggaccttggcaaagaggyctgtggaagtcgccctgtcctttttgctcatgtctcctgagttgggggagccctcacaactcactcaccctatttcactctttaatcccgtggctactcc

SEQ ID NO: 515125 - DNA, 201 bp, Homo sapiens
tctcggtcctgatacttcttagcgctggtgtgcaggtacactccgcccttctcaaacaccacctgagttggggggaaccagcgagggctggggcccaagcsaggggaccagcctggggagccaatagggacgggcccagggaggagccaccctcagggggcggggccgggagggccattgccccgggaccaaggcggggag

SEQ ID NO: 515126 - DNA, 201 bp, Homo sapiens
acacagcaggtttgagacagagtcagggcaaggacccagcccccctgccctcgctcttctcacccagtaaggagacgcaccctgcattgtctgcttagggycgacctgtcctgcaaacacaaatccctgaccttgggggaattcacagtctgatgcaggaggcagccaggttacagctatcacaagctcaggtgacatgaa

SEQ ID NO: 515127 - DNA, 201 bp, Homo sapiens
cagaagctgaagcggaaatattgaagtccagggagggagcgccccgggccgcgtccgccccgtcccacactacgcccccgccccactcccggggcctgctmatctgaggccgatccgggaccggcctccttgcgtctcccattcccaagattgtcccgcctctgccaatccccgccgtccttccagcccacgacctgccgc

SEQ ID NO: 515128 - DNA, 201 bp, Homo sapiens
aactccctgagtgagtcagataggtgagatgccaggtgtggaatcccagcactgaataggtgctcagcaaacaccaacatcaatgatcgtgagtcataaarggcctgcaaatttcattcagactccagactccctgctcccttcaccctggtgggctggaccacagctgtgcctgaatccgtgcagtggcggtgtgcttac

SEQ ID NO: 515129 - DNA, 201 bp, Homo sapiens; identical to SEQ ID NO: 283012

SEQ ID NO: 515130 - DNA, 201 bp, Homo sapiens
atggatgaggacgccaccctccaggaccttccccccttctgtgagtcagaccccgagagtacagatggtgagtgtcccaggctgttcccctcccgacctgrgggcaggcacacggccgacacaaaggcagggacagaagctgaagtccaccctctctttcagatggcagcctgagcgaggagacccccgccggccccccca

SEQ ID NO: 515131 - DNA, 201 bp, Homo sapiens
tagaaactgggttggtttttgccgatgaccaggcaggctgctagaggaagttgtttttgaggtgaaggaaatgggtctcagaagcttcagggaggtggagrtggtggctgtggcagtggccgtggctgaggaggaggacacatggagcatggctaggtgctgcctggcctgggcctctaactcaggtcatccacagggctc

SEQ ID NO: 515132 - DNA, 201 bp, Homo sapiens
ccatcaaattcaacacaagccccacgtggaattctaaattttctagacaccatgttaaaagagtaaaaaaagcagatgaaattccttttttttttttttttgcccaggctggcttcgaactcttgggctcggtgatccgcctgcctcggcctcccaaagtgctggggttgcaggcctgagccaccacgcccggctcgttcg

SEQ ID NO: 515133 - DNA, 201 bp, Homo sapiens
gccccgcctcctccttttcctagtcagcgtgttgtcacttccggagaaaacagttcccctccgggccggacagtggtagcggcccgacccgttctagagamggagcgggtgaaaccatttttcagaagggggttattccactggaacctcgagggtggatcggagtcacgtggcgcagacgctgaaggtggatccggctac

SEQ ID NO: 515134 - DNA, 201 bp, Homo sapiens
atcctggtggtgtcccttagtagccatgggacctcgggcaagtgacttaacttctctgggcctccaggtctccatttgtgaaacagaggtcatagtcatcscatgtttctctaaggctgtgttttgagtcacattgtcccgaacagatcgtagaggtttcatgttagcagcccgttgtgtgcagctgagagggtggcagat

SEQ ID NO: 515135 - DNA, 201 bp, Homo sapiens
aatcctggtggtgtcccttagtagccatgggacctcgggcaagtgacttaacttctctgggcctccaggtctccatttgtgaaacagaggtcatagtcatyccatgtttctctaaggctgtgttttgagtcacattgtcccgaacagatcgtagaggtttcatgttagcagcccgttgtgtgcagctgagagggtggcaga

SEQ ID NO: 515136 - DNA, 201 bp, Homo sapiens
accctgcattgtctgcttagggtcgacctgtcctgcaaacacaaatccctgaccttgggggaattcacagtctgatgcaggaggcagccaggttacagctrtcacaagctcaggtgacatgaatgctcatggaggaagcccagggcatcggatgggctcctgaagtcatctgatgcaccctgggggatcagggacaacaga

SEQ ID NO: 515137 - DNA, 201 bp, Homo sapiens
atccaaagaggacagccacatcgtgctccccctcctgtggggaacacgtctcactttcctctaatctctccctgatcttacacgaaactcgtctatcgggrcgggttcttcctccatctctcagctccttggaggaaacaggacctcctctagaagctgaagggtaaggaggacccccaggtcttggctactctcctgttg

SEQ ID NO: 515138 - DNA, 201 bp, Homo sapiens
gccgaggccctgcaccgccagctaaccgcctgccccgtgagtccccgtccgccccgcagcgccccgcccgaaccccgaccgacccccgcccccttctcacsttcaccttccgcttttcgcttctctcatcccgtgcctccaggagctgccccacaacgtgcaggagatcctggggctggccccgcccgcagagccccacag

SEQ ID NO: 515139 - DNA, 201 bp, Homo sapiens
ctgtgcgtcacctcccgcctcccagctccccgcaggactcccgcctctaccttgtcttcccccacgactcctctgctctctccaactccttccaccacctrcagctctttgaccaggacagctccaatgtggtgtcagtgagtgtccccagcaggaggcctggcgggtgtgggcagggagggacgagaaggggcgggccgt

SEQ ID NO: 515140 - DNA, 201 bp, Homo sapiens
caccctcccgtccaccgccccagggaagaacctcccatggccccgcccccccggctcaggcgactccttgagccctgccccctgtggaacgcacgtcagcwtccgaacgcgggctggaccattctccccgccttggtcccggggcaatggccctcccggccccgccccctgagggtggctcctccctgggcccgtccctat

SEQ ID NO: 515141 - DNA, 201 bp, Homo sapiens
gttagttgggagcgcagtgggggtggggccgcgtaggtttcccttctgccccatgccatgcctgctcccagcaaggtcctccgggcaggtgggtggggacyttccctccccgagtacgtgctcagaatgctcccggaggcctgagaagcatgtctcgcccagcgcacttctgagcccccagagggccagcccggtgtgtct

SEQ ID NO: 515142 - DNA, 201 bp, Homo sapiens
gccctcgctggttccccccaactcaggtggtgtttgagaagggcggagtgtacctgcacaccagcgctaagaagtatcaggaccgagactctctcatcgcyggtgtcatccgtgtcgtggaaaaggtgcgctgggagggagcagggctcggacccgctccgagcgggatgcaggcggtctgggatgcaggcggcagctgta

SEQ ID NO: 515143 - DNA, 201 bp, Homo sapiens
gctatgaacctgactgggctgtcatcagcactgtgcggccacagccctgccactcagagcccacgagaggtaggctgaggtggcggcccttgagaagcacrtgtgggccaggtaggacacatcttgccctcagtggtcacggtcccaagggctttgctgcccacaatcaagaaggccaccagtcaccaccttccagtccca

SEQ ID NO: 515144 - DNA, 201 bp, Homo sapiens
agtgccaggacaggtggaagaatggggcagggccagaacaaggccccactgagctgcctgccctcctgcacccccagggtctgagccccagcctgcggcgygaggcctggaagttcctcctagggtacctcagctgggaaggcacagctgaggagcacaaggcccacatacgcaagaaaacgtgagtcctcaggaggccct

SEQ ID NO: 515145 - DNA, 201 bp, Homo sapiens
ccagcctgcggcgcgaggcctggaagttcctcctagggtacctcagctgggaaggcacagctgaggagcacaaggcccacatacgcaagaaaacgtgagtyctcaggaggccctgccctgccaggcatgacacctggtacctcctagggcaccaatgggcaagttctgtggacgctggttgtgaacctgctgtatctgggc

SEQ ID NO: 515146 - DNA, 201 bp, Homo sapiens
tagttgggagcgcagtgggggtggggccgcgtaggtttcccttctgccccatgccatgcctgctcccagcaaggtcctccgggcaggtgggtggggacctkccctccccgagtacgtgctcagaatgctcccggaggcctgagaagcatgtctcgcccagcgcacttctgagcccccagagggccagcccggtgtgtcttc

SEQ ID NO: 515147 - DNA, 201 bp, Homo sapiens
cagggaaccacaggagggcctcaggcataagtgcgagtgggagatagagggagccccctgcctccccaagaccagtgagagggcatcttgggggaaagctkcatgggctgttggggaatggccctgggggagcaaggccagggacaggatgggaaagaaggggagcccagctcccttcaggcccagtctcagttctgtcaa

SEQ ID NO: 515148 - DNA, 201 bp, Homo sapiens
gtggtggcgagcacctgtaatcccagctactcaggaggctgagacaggagaatcacttgagccaaggttgcaccactgcattccagcctgggcgacagagygagactttgtctcaaaaaaaaagaaaaaagaaagttaaagttgctgtttgatatcattgtttttcttgagtgcagatggtgatgataataagttaaactt

SEQ ID NO: 515149 - DNA, 201 bp, Homo sapiens
ctccccgccttggtcccggggcaatggccctcccggccccgccccctgagggtggctcctccctgggcccgtccctattggctccccaggctggtcccctsgcttgggccccagccctcgctggttccccccaactcaggtggtgtttgagaagggcggagtgtacctgcacaccagcgctaagaagtatcaggaccgaga

SEQ ID NO: 515150 - DNA, 201 bp, Homo sapiens
agattccacccaaatcctcttctccaagaaggtaggctccacccgctttgcccttctccactcgctttttttctaggtccgtgctgttgtaagtcatttgmgggacctgcgtacaatcccagacctactcgtggggcatgtgtgaccctgtttaggcttgggtactctgcctctccttttgctcctctctgtgaaatgggc

SEQ ID NO: 515151 - DNA, 201 bp, Homo sapiens
cacagcctgagggagccgcctccgaccttcccccgccacccgacgatgagcccgagcctggattcgaggtcatttcctgtgtgagtagtgagtggaccctycctgttatttctggccgtgtctccctgggcgcatgatttcatttccctgggcctcagtttcctctttggtaaaacggggatggtaatgggacaccctcag

SEQ ID NO: 515152 - DNA, 201 bp, Homo sapiens
gcgtggccggggctgtccaggggagcgctgcgggcttggctgcagcctgaccccatgtccccccaggctacgtccagggcatgagtgatcttctctccccsatcctctacgtcattcagaacgaggtggatgctttctggtgtttctgtggcttcatggagctcgtggtgaggcttgggtcaggggtgggacacaggccta

SEQ ID NO: 515153 - DNA, 201 bp, Homo sapiens
ggctgcagcgtgacccctcggggctgtgaaagaaacacaactcacactgatttaaaggcaggcaaagagttgaccagcacatataactaaaaagtcaaaarggagtattgatttcaggcaggacccaggtcccaaaatgttagaaacagttatcctttttccctctgagttcgttattctctggggccccagtatccgtgg

SEQ ID NO: 515154 - DNA, 201 bp, Homo sapiens
gtagccggatccaccttcagcgtctgcgccacgtgactccgatccaccctcgaggttccagtggaataacccccttctgaaaaatggtttcacccgctccktctctagaacgggtcgggccgctaccactgtccggcccggaggggaactgttttctccggaagtgacaacacgctgactaggaaaaggaggaggcggggc

SEQ ID NO: 515155 - DNA, 201 bp, Homo sapiens
ctctgggtcattcaaagtcttctgaaacatcacttttcttgactgcgcggcattgtgtccacctgcaagatgtggtagatttgatgtaacttgacctgctrgagattcgggtcctttgcagtttttcatcacggtgcatagtctgggtaatttcttctttaggttcacttccaagaagtggaattttgttcaggacagtgc

SEQ ID NO: 515156 - DNA, 201 bp, Homo sapiens
gactccagtgggggtgactcatgtgcttctgaggaggaaccaacctttgaccccggctatgaacctgactgggctgtcatcagcactgtgcggccacagcyctgccactcagagcccacgagaggtaggctgaggtggcggcccttgagaagcacgtgtgggccaggtaggacacatcttgccctcagtggtcacggtccc

SEQ ID NO: 515157 - DNA, 201 bp, Homo sapiens
gggtgccaggcctggggacgggcgtggccggggctgtccaggggagcgctgcgggcttggctgcagcctgaccccatgtccccccaggctacgtccagggyatgagtgatcttctctccccgatcctctacgtcattcagaacgaggtggatgctttctggtgtttctgtggcttcatggagctcgtggtgaggcttgggt

SEQ ID NO: 515158 - DNA, 201 bp, Homo sapiens
cgaactcctgacctcaggtgatccacccgcctcaccctcccaaagtgctggggttacaggcgtgcgccatcgcacccggccttcagcttaaatttttgctaacagcgtatctaggagtgtcagttcccttagcgctcaccagcagcgggcagaggtctgtttcgtcgggcgtgctgggcgtcctgcctcccttccatgtcc

SEQ ID NO: 515159 - DNA, 201 bp, Homo sapiens
aggctccctcctaactcttgctcctggtctcagtctgtctcctctctttatatctggctctattctctgtctttggggttttggagagaggtcctcagcgsgggagggagggagttggggaaagagactgcttgcaggggatctctggtggggtcagtctctgaagtcctcctctccagaagccctgcccaagaagagcca

SEQ ID NO: 515160 - DNA, 201 bp, Homo sapiens
tttttgggtttccggccagaggcatgctgggagcgtcacatgcaaattgagcgtgcacccagcgttccgccctttctacgctgggccggttatcgacccgkcccagtgcgcaggcgcgggaaagttgaactaataaagtttgtacgagttcagtggaggagaccgcaagttgagtggaggaggcggcggtggggccccgga

SEQ ID NO: 515161 - DNA, 201 bp, Homo sapiens
caggggcatggctagattaactcagttacagtagagattggccctgattggctgttgaggcaagggcctggcatggcttagggactcacgttccaggccastatcccgggggtagtttggcagagaccctggagtctggcttgattggctaatatggatgaggggtggcctagaaccttagcatctagaacgatcctgaac

SEQ ID NO: 515162 - DNA, 201 bp, Homo sapiens
aactcttcactctctctggatctctgtctaatcccactccagtgtcctgaccctcctcgagctcaacctttcctcctcctgctaggaccctgccccctcayccctgtgcccttctgtctgggtctctgtccccttgtctgggtgtctgtcaccctccgctctctggttcctcgccttcccgtctctaatctcacagggctg

SEQ ID NO: 515163 - DNA, 201 bp, Homo sapiens
ggaacccacccctgtcttggagctccgggtagctctcaaactcgaggctgcgcaccccctttcccgtcagctgagctctagagcgctggggctttcttttygatcgacttcttgaaataaaaccaactttatcattctttgggtaacagacccaaaagccgatgggacggcccgctgggctgttcccgcccctatgccctt

SEQ ID NO: 515164 - DNA, 201 bp, Homo sapiens
tcaaatcccaagactctcttccccatctctgactctgtcccccaactcttcactctctctggatctctgtctaatcccactccagtgtcctgaccctcctygagctcaacctttcctcctcctgctaggaccctgccccctcatccctgtgcccttctgtctgggtctctgtccccttgtctgggtgtctgtcaccctccg

SEQ ID NO: 515165 - DNA, 201 bp, Homo sapiens
ccagcatgcagagtgttggaatctggatttgtacacaaagccacgactctgaattgttcaaatcccaagactctcttccccatctctgactctgtcccccractcttcactctctctggatctctgtctaatcccactccagtgtcctgaccctcctcgagctcaacctttcctcctcctgctaggaccctgccccctcat

SEQ ID NO: 515166 - DNA, 201 bp, Homo sapiens
agtcttcctattccactcagggctgtggggtggtggttgccctacctgtttttgccaaaaataaattgtttaaaacttttcttattaaaaacgttacaaartattcaattgtctgttcttacacttgggaactaaagttttaaggagaggagatttggttcagagatttctgtggcttacgcaaattgaggaaagaaccag

SEQ ID NO: 515167 - DNA, 201 bp, Homo sapiens
gagagaggtcctcagcgggggagggagggagttggggaaagagactgcttgcaggggatctctggtggggtcagtctctgaagtcctcctctccagaagcyctgcccaagaagagccaacagacttcctgagccgccttcgaagatgtcttccctgctccctggggcgaggagcagccccctctgagtcccctcggccttg

SEQ ID NO: 515168 - DNA, 201 bp, Homo sapiens
tgctccactttccccagagtacacagcctgcctttccactctccgtgcagacccatcctctttcccgctcctcgctctcggacgccaccaacgctctcccrggctcttccgcgttacctacgatggaaggtcggggcgtgcgggcagctggaacccacccctgtcttggagctccgggtagctctcaaactcgaggctgcg

SEQ ID NO: 515169 - DNA, 201 bp, Homo sapiens
ggtcagcctgggcaacacggtgaaaccccatttctactaaaatacaaaaaattagccaggtatggcggcgtgcgcctgtagtcccagctactcatgaggcygaggcaggagaattgcgagactccgtttcccaaaatcaatacataaataaataataaataaaatgggaatcattgccacctgccaaggtagttgggggaa

SEQ ID NO: 515170 - DNA, 201 bp, Homo sapiens
cctctttcccgctcctcgctctcggacgccaccaacgctctcccgggctcttccgcgttacctacgatggaaggtcggggcgtgcgggcagctggaacccmcccctgtcttggagctccgggtagctctcaaactcgaggctgcgcaccccctttcccgtcagctgagctctagagcgctggggctttctttttgatcgac

SEQ ID NO: 515171 - DNA, 201 bp, Homo sapiens
cctcgctctcggacgccaccaacgctctcccgggctcttccgcgttacctacgatggaaggtcggggcgtgcgggcagctggaacccacccctgtcttggrgctccgggtagctctcaaactcgaggctgcgcaccccctttcccgtcagctgagctctagagcgctggggctttctttttgatcgacttcttgaaataaa

SEQ ID NO: 515172 - DNA, 201 bp, Homo sapiens
ttgaacctgggaggcagaggttgtagtgagccgagattgcaccactgcactccagcctgggcaacaagagcggggctctgtctcaaaaaataaataaatamaaatttttaaaattaataataattagcaaagcatggtagctcacacgtttactcccagctactcaggaggcagaggagccgggaggatcacttgagccca

SEQ ID NO: 515173 - DNA, 201 bp, Homo sapiens
taatcccagcactttgggaggccgagttgggtggatgacttgaggtcaggagttcgagaccagcctggccaacatggtgaaaccccatctctactaaaaawacaaaaatcggacaggtgtggtggtgcgcttctgtaatcccagctactcagaaggctgaggcaggagaatcgcttgagcccaggaggtggaggttgcagt

SEQ ID NO: 515174 - DNA, 201 bp, Homo sapiens
atcccagcactttgggaggccgagttgggtggatgacttgaggtcaggagttcgagaccagcctggccaacatggtgaaaccccatctctactaaaaatamaaaaatcggacaggtgtggtggtgcgcttctgtaatcccagctactcagaaggctgaggcaggagaatcgcttgagcccaggaggtggaggttgcagtga

SEQ ID NO: 515175 - DNA, 201 bp, Homo sapiens
tccagtgtcctgaccctcctcgagctcaacctttcctcctcctgctaggaccctgccccctcatccctgtgcccttctgtctgggtctctgtccccttgtstgggtgtctgtcaccctccgctctctggttcctcgccttcccgtctctaatctcacagggctgatgtggacgctgctgtatggggggaacacctgccctg

SEQ ID NO: 515176 - DNA, 201 bp, Homo sapiens
cctttttcaggcatagttactctcaacaagaacctcctataaattatattgtcacaagaagtctcttatttttgccataattgccccatcatggcataattgcaggtatttcagctgccaacacaccaggccaaactgccttgttggagtgctgtgtttctagaccctttggtttgtctgcagagatctatctttagtggc

SEQ ID NO: 515177 - DNA, 201 bp, Homo sapiens
ggcagcgttgaggaggctccagcagagatccagtgctaagggccctagaggggctggtggcatcccctcaatcttggtcctctctccccagagttgtgtgrgaccccagggtatctagcgccagagatccttaaatgctccatggatgaaacccacccaggctatggcaaggaggtcgacctgtgagttcctggtctcccc

SEQ ID NO: 515178 - DNA, 201 bp, Homo sapiens
gcccactaatgatcctgctaccctcttgaagaccagcccggtacctctctccccactggccaggactctgagatcagagctggggtggaagggagccattytgaacgccacgcctggcccggtcagtgctgcatgcactgcatatgaaataaaatctgctacacgccagggagaacaggtgtcctgtgtctgtctggcttg

SEQ ID NO: 515179 - DNA, 201 bp, Homo sapiens
tttcccagctgggcctgtggggtgatcttgttcacactcctggctggctcgccacccttctggcaccggcggcagatcctgatgttacgcatgatcatggrgggccagtaccagttcagttcccccgagtgggatgaccgttccagcactgtcaaagacctggtgagcgggggctgagaggacagtaggggaggcccaaga

SEQ ID NO: 515180 - DNA, 201 bp, Homo sapiens
cctatgcccctccttcccttaggatgcggaagggagagctgtttgactatctcacagagaaggtggccctctctgaaaaggaaaccaggtaagggttgagyctgaagccccaggggtgagcagggggtgggacagggcagggaggagccgaggaggagactgcacccgcctccccttcccccaggtccatcatgcggtctc

SEQ ID NO: 515181 - DNA, 201 bp, Homo sapiens
ctgggccttttcccatcatgggccctgaagaggagggagactctgctgctataactgaggatgaggccgtgcttgtgctgggctaggacctcaaccccagrgattcccaggaagcagaactctccagaagaagggttttgatcattccagctcctctgggctctggcctcaggcccactaatgatcctgctaccctcttga

SEQ ID NO: 515182 - DNA, 201 bp, Homo sapiens
cgagatctgaagcccgagaatattctcctagatgacaatatgcagatccgactttcagatttcgggttctcctgccacttggaacctggcgagaagcttcraggtgaggggatctagtgccctaataggcttgggaggggagacccaggcctgatgagattggttggctgggtctgagtaccaagtccctggtgccaagaa

SEQ ID NO: 515183 - DNA, 201 bp, Homo sapiens
gtacttttcccgtttgtggaatcatctttgcctctgcccactgcatcctctccttggcttgggtaattcaggcttcactttaaacctccagggcagcttargtccccttgctttctgttctcccatcttcttcattcacaacacgtcttactgtattgttatttctcacttgccttcaggtagacagtgagctcggtaagg

SEQ ID NO: 515184 - DNA, 201 bp, Homo sapiens; identical to SEQ ID NO: 230290

SEQ ID NO: 515185 - DNA, 201 bp, Homo sapiens
gggtgggacagggcagggaggagccgaggaggagactgcacccgcctccccttcccccaggtccatcatgcggtctctgctggaagcagtgagctttctcyatgccaacaacattgtgcatcgagatctgaagcccgagaatattctcctagatgacaatatgcagatccgactttcagatttcgggttctcctgccactt

SEQ ID NO: 515186 - DNA, 201 bp, Homo sapiens
tgcggcacctcatcgacaactgtgccttccggctctacgggcactgggtaaagaaaggggagcagcagaaccgggcggctctctttcagcaccggcccccygggccttttcccatcatgggccctgaagaggagggagactctgctgctataactgaggatgaggccgtgcttgtgctgggctaggacctcaaccccaggg

SEQ ID NO: 515187 - DNA, 201 bp, Homo sapiens
agtagtagcagctgctactatttattacttactatattccaggctgtgttctaagcactttatatttcttaacttcctccagttttcagtcactcagtagrtgtctgtactatcatatccatcatatgaatatatcacatatgataggtaccaactatctgagtgaaaactggaagaaatgttctaaaatgacagtgttct

SEQ ID NO: 515188 - DNA, 201 bp, Homo sapiens
catataggaaaatacccaaaacaagtatacagttcattaacacaaagcaaacgtgaataaccacattcagtaaagaaattggaacactgtcaacacttcamagcctcctttatactcctcccaatcactgctacttcctttcttcccacaggtaaccaccattctgacttctagcagtgtcatttaattttgtctgcattt

SEQ ID NO: 515189 - DNA, 201 bp, Homo sapiens; identical to SEQ ID NO: 229954

SEQ ID NO: 515190 - DNA, 201 bp, Homo sapiens
tgatagggaggtggggaaaccagaacagaacagagcctttgcaaagctgtccattcgtttactcaacagagactgaatgtctctggtttctgccaggcacrgttctaggtcctagggatatgtatcagtgatgtatcccgataggcggaaaaaatctctacagttgaggttatggggagatcagtacatcccctcttgtcc

SEQ ID NO: 515191 - DNA, 201 bp, Homo sapiens; identical to SEQ ID NO: 229946

SEQ ID NO: 515192 - DNA, 201 bp, Homo sapiens
ttacacagctagagcagagaatgatcccaggcagcccagctccagaatctgctgtttgatccctatgcagtaaacctgttagaagcatgtcatccagcccytttttttatttttatttttaatttttttttgagacagagtcttgctctgttgcccaggctggagtgcagtcacatgatctcggctcactcaaacttctgc

SEQ ID NO: 515193 - DNA, 201 bp, Homo sapiens; identical to SEQ ID NO: 230301

SEQ ID NO: 515194 - DNA, 201 bp, Homo sapiens; identical to SEQ ID NO: 230273

SEQ ID NO: 515195 - DNA, 201 bp, Homo sapiens; identical to SEQ ID NO: 230288

SEQ ID NO: 515196 - DNA, 201 bp, Homo sapiens; identical to SEQ ID NO: 230322

SEQ ID NO: 515197 - DNA, 201 bp, Homo sapiens; identical to SEQ ID NO: 230269

SEQ ID NO: 515198 - DNA, 201 bp, Homo sapiens; identical to SEQ ID NO: 230297

SEQ ID NO: 515199 - DNA, 201 bp, Homo sapiens; identical to SEQ ID NO: 230286

SEQ ID NO: 515200 - DNA, 201 bp, Homo sapiens; identical to SEQ ID NO: 230291

SEQ ID NO: 515201 - DNA, 201 bp, Homo sapiens; identical to SEQ ID NO: 230248

SEQ ID NO: 515202 - DNA, 201 bp, Homo sapiens; identical to SEQ ID NO: 230280

SEQ ID NO: 515203 - DNA, 201 bp, Homo sapiens; identical to SEQ ID NO: 230281

SEQ ID NO: 515204 - DNA, 201 bp, Homo sapiens; identical to SEQ ID NO: 230270

SEQ ID NO: 515205 - DNA, 201 bp, Homo sapiens; identical to SEQ ID NO: 230341

SEQ ID NO: 515206 - DNA, 201 bp, Homo sapiens; identical to SEQ ID NO: 230362

SEQ ID NO: 515207 - DNA, 201 bp, Homo sapiens; identical to SEQ ID NO: 230342

SEQ ID NO: 515208 - DNA, 201 bp, Homo sapiens; identical to SEQ ID NO: 230255

SEQ ID NO: 515209 - DNA, 201 bp, Homo sapiens; identical to SEQ ID NO: 230268

SEQ ID NO: 515210 - DNA, 201 bp, Homo sapiens
ggagagaggtcagggtgagagggccaggctgctcagggggagggagcaaggagaggccccagccagggagacagatggactgaagcagagggtgggggaargggcgcagggggaggctgctgcctccgatcaaacgatgatgcttgcacccctgaggagcatgggaagcccgtgtgtgtcagtgctggggcacgcatatgt

SEQ ID NO: 515211 - DNA, 201 bp, Homo sapiens
gtgcctgagtttgagtcatcccatcagctgtgtgatcttgggcaagttacccaatctctctgcgcctccacctcctcatctgtccagtgagaataagaatrtgacctcatggagtggtcgtgaggattaaacaagagatgcaggctgggtgcagtggctcacacctgtcatcccagcgctttgggaggccaaggagagagg

SEQ ID NO: 515212 - DNA, 201 bp, Homo sapiens
aggtttcagctagtaaatgacaccggatttgaccctggccactccactgcggtggaggcgctcatggcggagaagggtgattgtagctctctccctcgtcrccctagatcaaaatggactcacagatgacgaagcaggcgctgaatgagattgagacgaggcacaatgagatcatcaagctggagaccagcatccgcgagc

SEQ ID NO: 515213 - DNA, 201 bp, Homo sapiens
agggagggggcatctctccgagacagggagggaagaggtggcctccggagagagccagagggccagggcctgagacagggtgacccagaggtgggagatgrggatgcagaggagagggccatggaacacgggccgtgctctgcttgggggaactggggcaccccgggcagtcaagggctgatgcaggccccaggtctgcag

SEQ ID NO: 515214 - DNA, 201 bp, Homo sapiens
gattgtagctctctccctcgtcaccctagatcaaaatggactcacagatgacgaagcaggcgctgaatgagattgagacgaggcacaatgagatcatcaarctggagaccagcatccgcgagctgcacgatatgtttgtggacatggccatgctcgtagagagccaggtactggctctgccacccatgccactctgggagc

SEQ ID NO: 515215 - DNA, 201 bp, Homo sapiens
tgggaggccaaggcaggtagatcacctgaggtcaggagttcgagaccagcctggccaacatggcaaaactctgtctctattaaaaatacaaaaattagccrggcatggtggcacgtgcctgtaatcccagctactagggggctgaggcaggaggatcacttgaacctgggaggcggaggttgcagtgagccgagatcttgc

SEQ ID NO: 515216 - DNA, 201 bp, Homo sapiens
gctggctcctaacaccaccctggggcaccgctgcccgcaactcgccctggggatgacgtttctccccgggcctggcgctgccgcggggtgttgaccattcrtacgccccggaccctcgccccatgtgccccgggtctcccgcccatcgctgcgccctctctcccgcagcgatcgagcaaagcattgaacaggaggaggggc

SEQ ID NO: 515217 - DNA, 201 bp, Homo sapiens
ttgtagagacatgatcttgctatgttgcccaggctggtcttgaactcctgggttcaagtgatcctcccaccagagcctcccaaagtgctgggattacaggygtgagccactacaactggcctgagttatttagctctatgcctcagtttccccatctataaaagggggctataataatacctccaaggggactgttgtaag

SEQ ID NO: 515218 - DNA, 201 bp, Homo sapiens
gtgcagctgaaagccagtgtgtccacacatgtcagtgcggctcagctgtgagtctgcgtgcgggtgaacgccagcatcagtgcatctccgtgtgggtgtcggggggcctattcctgtgtgccttgggtgtcagctcttctgtctgtgtctcgagtctgtctgtcggtggcagtggtgctgtgggtgggtaaatctctttgt

SEQ ID NO: 515219 - DNA, 201 bp, Homo sapiens
acacctgtcatcccagcgctttgggaggccaaggagagaggatctcttgagcccaggagttcgagaccagcctgggcaatatagtgagatcccatctctcaaaaaaaaaaaaaaaaaaaaggaaaaagaaaaaaaaagaaatgcaaagcacttgtaataggacccaactcgtggtaatcagcacatatatgttacatcctc

SEQ ID NO: 515220 - DNA, 201 bp, Homo sapiens
aaggaatttctacaaagttccaggagccagattattaaacagtcagaaagcacaaaaccccagctttcccccttgctccagttctttggagaaagatataygataggaaatgagggaaaggagactgtctaaattgcatctgagccctgctggttccaccagcatgaaggttcaccagaaaaaggtgatcttccgagtggc

SEQ ID NO: 515221 - DNA, 201 bp, Homo sapiens
aacgagatgtaaaagtgtcactgtgtaagtaaggcatttttcctggttacagagactcaaacattggaggtgatctttttgataccctatgctagatataytagaacatatttagtcaaatggcaaatggccatatgcatgtgttgaggctgaatacaacacttattcctttctagaaagacctgataaaaaatgatggta

SEQ ID NO: 515222 - DNA, 201 bp, Homo sapiens
tttaatggaatattgaatgagcattacatttttatgttttcaaaaatgatttggtggcattggaaaatcttagtgacataataaggtataaaaacaggatsaaaacaaccacatatagtgtgattaaaaaaagtttgtgtataaaaaaacaggaaggaaatatttcaagctgttagtgtttttctgtgggtgatagtgtga

SEQ ID NO: 515223 - DNA, 201 bp, Homo sapiens
atgtgccttttgtgccctccaagagctcaagggtaggtaattgttatatctttagcatgtgaaaatgctttttatgtaacagttcaccgaaaatctcttarttctccgaattttggaggatttggggcgggcagcgaggctgtcccctgtcaccttgttttgtacctggtatggtaaatcgttttgctgcattgcatccaa

SEQ ID NO: 515224 - DNA, 201 bp, Homo sapiens
ctttagaattgcaaccttgccaatggacctgatcggttttggttatgcagccctcgtgacatttggaagcatttttggatataagcggagaggtaagcctwacccaaattttcatgaaagggaattagtgggggtttggaggttgtgctaggtcatgtgaggctctgtaagtaggatgagaagctaaagatgccttagagg

SEQ ID NO: 515225 - DNA, 201 bp, Homo sapiens
atagttcctggaggaccaaggccatgtcttagcacttaccattgcttcctgctgccttgcctaaagaaaatgctaaataaatagctgttaagtcgaattgrgtacaaatatatgttataatactatggtatgattcattaactaaattacaaattcaccctacctcagttttctcagtgtgctgaaatagtaatagcctta

SEQ ID NO: 515226 - DNA, 201 bp, Homo sapiens
tagttcctggaggaccaaggccatgtcttagcacttaccattgcttcctgctgccttgcctaaagaaaatgctaaataaatagctgttaagtcgaattggstacaaatatatgttataatactatggtatgattcattaactaaattacaaattcaccctacctcagttttctcagtgtgctgaaatagtaatagccttac

SEQ ID NO: 515227 - DNA, 201 bp, Homo sapiens
aaatatatgttataatactatggtatgattcattaactaaattacaaattcaccctacctcagttttctcagtgtgctgaaatagtaatagccttacacaygtcaagcttaaaataggtgtaagggtgaatgagaagagtaatcattggagcagctaatatttgttgagtgctcagtatgtgcaggcactgttctaagtgc

SEQ ID NO: 515228 - DNA, 201 bp, Homo sapiens
tcacagttgattgcaacctctgcctcgcaggttcaagggattttccggtctcagcctcctgagtagctgggattacagacatgcaccaccatgccacgtcygggtaatttgttgtatatttagtagagaaggggtttcaccatgttgactgggctggtctcaaactcctgacctgaagtgatccaccagcctctgccttcc

SEQ ID NO: 515229 - DNA, 201 bp, Homo sapiens
tcatccaggctggagtgcagtggcacaatcacggctcattgcaacctcaacctccagggctcaagcaatcctcccaactcagcatcctgagtagctgggaycacacgtgcatgccatcacacccagctaattttttgtatttttactagagatggggttttgccatgttgatcaggttggtctcaaattcctgggtttaag

SEQ ID NO: 515230 - DNA, 201 bp, Homo sapiens
tggaatgaattcctttccttttgggattctctttgtgatctcatatttttttccccttccaggtggtgttccgtctttgattgctggtctttttgttggaygtttggccggctatggagcttaccgtgtctccaatgacaaacgagatgtaaaagtgtcactgtgtaagtaaggcatttttcctggttacagagactcaaa

SEQ ID NO: 515231 - DNA, 201 bp, Homo sapiens
cccgtgatccagtcacctcccaccaggccccacctccaacactcaggatcacaattcaacatgaaatttgggtggggacacacagccaaaccatataagcrtatcatttttagatacattccctccccaaaacttttttattttgtataatttgtcctttcccccttgctttagaattgcaaccttgccaatggacctgat

SEQ ID NO: 515232 - DNA, 201 bp, Homo sapiens
tctagttgatttattattcaaagtgccttggtcgtgtatggaaaaaaatataaatgaagacaaaattgttctatatttgaaggagagtgagagatttgggttttttttttttttagttatttttataaggggctagggatatttttagtaatgaggttgtgttagatgtatcagccagatgtagtgatattaggattttta

SEQ ID NO: 515233 - DNA, 201 bp, Homo sapiens
gcctctcttccaccacaaaactctcacttcacttcatcatcagttgcatagttaattgatttaatctccctcaggaccactgcttattattaaatgaggatttttttttttttgctttacataatcgtggtaccaaaaaactgagttatattgatcctgtgtgttgtaatgaaaacattgttaaatattcagttatcatat

SEQ ID NO: 515234 - DNA, 201 bp, Homo sapiens
caaggacattttctctagttgatttattattcaaagtgccttggtcgtgtatggaaaaaaatataaatgaagacaaaattgttctatatttgaaggagagwgagagatttgggttttttttttttttagttatttttataaggggctagggatatttttagtaatgaggttgtgttagatgtatcagccagatgtagtgat

SEQ ID NO: 515235 - DNA, 201 bp, Homo sapiens
gttctatatttgaaggagagtgagagatttgggttttttttttttttagttatttttataaggggctagggatatttttagtaatgaggttgtgttagatrtatcagccagatgtagtgatattaggatttttattgatatgcatttaaatagttcacaagtatttattgtcagtcattttattttttatatcaataaaca

SEQ ID NO: 515236 - DNA, 201 bp, Homo sapiens
attttcactgtcaaagacaatgtctaaataacttctattacagaacagaaaagaacatctgggcatttttgcctgcctttatgagaggtggaaagaaagtggggagagagatatagagagtgtgtgtatgtgtgtgtgtgtgtgtgtgtgtgtgtgtgtgtgtgtgtggaaggaatcattttattctaactcacatctctt

SEQ ID NO: 515237 - DNA, 201 bp, Homo sapiens
ctaaactcagcctcatttttcctcaagattcacccatctgcaacactaaatgtgttcatttaaatctaatactcagtcccttttagagagtttgacagagygacagtgtgatacagttatttcaagtttttaagggacagaaatttaatatttttaagagtttttaagagagaagttttaatattttttaaaagataaaca

SEQ ID NO: 515238 - DNA, 201 bp, Homo sapiens
ggaggaagaagccatttgctccagatcactttgatagtacagactagagtcaaggaaattaggaggtaattaataagggtagaagtcaggggagaaggttyaaagggaggtggcatacaggggatagtcgggcttttggaggtggacagggagggaggacatttcaggcatggaagtgaaaagtgaagattgtagtgtcac

SEQ ID NO: 515239 - DNA, 201 bp, Homo sapiens
agggtgtggtcatgattacatgagttgatacacataaggcacctagaatgccttagaatggcacctagcacatagtaattgctcaaaaacattataacctytttattattattatttgtttagccatcattcagtcagcaaatggtttttggacccaggttctccctacatgctacatcctactgtaccacttctcggcca

SEQ ID NO: 515240 - DNA, 201 bp, Homo sapiens
ggaaggcaaaggggaagcaagcatgtcttcacatggcgacaggagggggagagcacgtgaagggggaagtgctacacgctttcaaacatccagatcttgtragaactttagatcatggaacagcactagggggatgttgctaaaccattagcagccacccccgtgatccagtcacctcccaccaggccccacctccaacac

SEQ ID NO: 515241 - DNA, 201 bp, Homo sapiens
gacatccatctgtaaagaatgagaggactaatatctgtacagacatgaaagaattataagatggagttgtggaagttaaggaatttagaggaggaagaagscatttgctccagatcactttgatagtacagactagagtcaaggaaattaggaggtaattaataagggtagaagtcaggggagaaggttcaaagggaggtg

SEQ ID NO: 515242 - DNA, 201 bp, Homo sapiens
atcagaggtgatgttgcatagaggttaggactgagacttccctaagtcagagaactttgttttgctgtataaccttcaggcattgcttgcattctctgtgygccactttcctcatctggaaaatgaggataatcatgacagtacataccatagggtgtggtcatgattacatgagttgatacacataaggcacctagaatg

SEQ ID NO: 515243 - DNA, 201 bp, Homo sapiens
acatgtttggtttacatgttcgctttttttcagcagctaactcagttatcagaggtgatgttgcatagaggttaggactgagacttccctaagtcagagawctttgttttgctgtataaccttcaggcattgcttgcattctctgtgcgccactttcctcatctggaaaatgaggataatcatgacagtacataccatagg

SEQ ID NO: 515244 - DNA, 201 bp, Homo sapiens
ccgggaggtggaggttgcagtgagctgagatcacgccactgtactccagcctgggtgacagagcaagactctgtctcaacaacaacaacaacaacaacaamaaaaaaaaaaaaaagaaaaagaaaaggtctttctcttttgaagatatttcaggaatggattttaacatgtttgtttacccagaaaccttttcggcgaggt

SEQ ID NO: 515245 - DNA, 201 bp, Homo sapiens
ccattgtttaaactgaattagtcaatctccaagaagacatccatctgtaaagaatgagaggactaatatctgtacagacatgaaagaattataagatggarttgtggaagttaaggaatttagaggaggaagaagccatttgctccagatcactttgatagtacagactagagtcaaggaaattaggaggtaattaataag

SEQ ID NO: 515246 - DNA, 201 bp, Homo sapiens
ttggaatttattccaaagcagtgagatatgcacaaagactgatgttcattgcaactttatttctagtgaaaacacaatagactgaaaaattaggaacaacytaacagttcaccagtaaggagatgtttgaaaaaatgttttgtccatttaatggaatattgaatgagcattacatttttatgttttcaaaaatgatttggt

SEQ ID NO: 515247 - DNA, 201 bp, Homo sapiens
tgatgcacagtaggatgtcattgtcatccatttaacttcatgctggggctatattgtattctttagtgatttgccattgattaagtgtggatgtctctgcyaccacagaagagctatcttgcaaggaaactaatgacaaagccattgtttaaactgaattagtcaatctccaagaagacatccatctgtaaagaatgagag

SEQ ID NO: 515248 - DNA, 201 bp, Homo sapiens
ttaaagtggctaattcagttatgtctgggatgttttaatcctccaaggggttgagctgggagagcccccaagccaaggattagtaacactactgggtaggygagtgcatggccctttctgtcttatgccagataaaagtgactctccctttgtctttgttttattttaaatccagcctcatgatgatcctgagacttgtct

SEQ ID NO: 515249 - DNA, 201 bp, Homo sapiens
agacagccttgcattatttcatttaattcacaaacatcttttagattctgcactgccttaagacttaacctaaaaaagcaaggctgacgcttttttagctwcttcccttgttaagtttaatgggagaatatccacagaaaaaatggaaacctgtgtgtttaaagtcaccaggacacttgactttcatctcacttgaaagag

SEQ ID NO: 515250 - DNA, 201 bp, Homo sapiens
aagcttaaactacaacttgtcacataaaggaagtcttaagtggagttcacagaatgataatgtatctatttgtcatttgtgttatatttgaaattattagraattatgctttttccattttaattgtattgctgccagtgctatttttttctttaaaaaattttattcttagcacactgttatgtcctaactgaatgtatt

SEQ ID NO: 515251 - DNA, 201 bp, Homo sapiens
ttggtgctgtcatctcctgtgcctcagcttccctcccccatacccttcctcatagtaagttctagtggatgactctgagatcagctcaaaattcttcttctttttttttttttttttttttgagacgcccaggctggagtgcagtggcacgatcacagttgattgcaacctctgcctcgcaggttcaagggattttccggt

SEQ ID NO: 515252 - DNA, 201 bp, Homo sapiens
tggtgctgtcatctcctgtgcctcagcttccctcccccatacccttcctcatagtaagttctagtggatgactctgagatcagctcaaaattcttcttctttttttttttttttttttttgagacgcccaggctggagtgcagtggcacgatcacagttgattgcaacctctgcctcgcaggttcaagggattttccggtc

SEQ ID NO: 515253 - DNA, 201 bp, Homo sapiens
ggtgctgtcatctcctgtgcctcagcttccctcccccatacccttcctcatagtaagttctagtggatgactctgagatcagctcaaaattcttcttctttttttttttttttttttttgagacgcccaggctggagtgcagtggcacgatcacagttgattgcaacctctgcctcgcaggttcaagggattttccggtct

SEQ ID NO: 515254 - DNA, 201 bp, Homo sapiens
ctaatgggtctcttttggcctcttgaacctgttgccttccttattgaggttaataggggtttggcacaacatctctccaaggtcccagctgggaccctgtytgatctgggcatccttaggctcccagtccttgctgggtgccactccttgttatggtacccacacctctcctcttagggctcattcacacatctgcctcct

SEQ ID NO: 515255 - DNA, 201 bp, Homo sapiens
gctgtcatctcctgtgcctcagcttccctcccccatacccttcctcatagtaagttctagtggatgactctgagatcagctcaaaattcttcttctttttytttttttttttttttgagacgcccaggctggagtgcagtggcacgatcacagttgattgcaacctctgcctcgcaggttcaagggattttccggtctcag

SEQ ID NO: 515256 - DNA, 201 bp, Homo sapiens
atctctccaaggtcccagctgggaccctgtctgatctgggcatccttaggctcccagtccttgctgggtgccactccttgttatggtacccacacctctcstcttagggctcattcacacatctgcctcctacagctgtgttgtactatagttcctggaggaccaaggccatgtcttagcacttaccattgcttcctgctg

SEQ ID NO: 515257 - DNA, 201 bp, Homo sapiens
ttaaataagatgatgcatggtacacatttcacatggtgcctggcatagaataaagttttaatcttcttgtttttttctgctgctactgccctgccagtggraggtctgtgagccatgaggcataatacctttttctagttttgtactctagttttgtattatgttctaagctgccagtggctcgaatgtcttagaatgtgt

SEQ ID NO: 515258 - DNA, 201 bp, Homo sapiens
aattttgagttaaatcaaggttgccaggtggaggtcattgaggggagggtgttaagagaaaatgctgcataaattgcatgatgtttgcaagcggttgtttkcctgcccagctcaccaccactggactccctcctctgtaagcccctaatgggtctcttttggcctcttgaacctgttgccttccttattgaggttaatagg

SEQ ID NO: 515259 - DNA, 201 bp, Homo sapiens
attttctctagttgatttattattcaaagtgccttggtcgtgtatggaaaaaaatataaatgaagacaaaattgttctatatttgaaggagagtgagagayttgggttttttttttttttagttatttttataaggggctagggatatttttagtaatgaggttgtgttagatgtatcagccagatgtagtgatattagga

SEQ ID NO: 515260 - DNA, 201 bp, Homo sapiens
tgaaggtgcctgtatcatactagaagtaatggaatgaattcctttccttttgggattctctttgtgatctcatatttttttccccttccaggtggtgttcygtctttgattgctggtctttttgttggatgtttggccggctatggagcttaccgtgtctccaatgacaaacgagatgtaaaagtgtcactgtgtaagtaa

SEQ ID NO: 515261 - DNA, 201 bp, Homo sapiens
ttctctagttgatttattattcaaagtgccttggtcgtgtatggaaaaaaatataaatgaagacaaaattgttctatatttgaaggagagtgagagatttgggttttttttttttttagttatttttataaggggctagggatatttttagtaatgaggttgtgttagatgtatcagccagatgtagtgatattaggattt

SEQ ID NO: 515262 - DNA, 201 bp, Homo sapiens
tctccaatgacaaacgagatgtaaaagtgtcactgtgtaagtaaggcatttttcctggttacagagactcaaacattggaggtgatctttttgataccctrtgctagatatattagaacatatttagtcaaatggcaaatggccatatgcatgtgttgaggctgaatacaacacttattcctttctagaaagacctgataa

SEQ ID NO: 515263 - DNA, 201 bp, Homo sapiens
tgaaattacattagctgtgaggtctctgatttcaagggcttgttgtccacctgcacaatatggtttcttggcctcctgcaagagccccctactaagtgatmctggaagcccccaagggtattatgggttcacaaggaagctcactttgtagtataatgtgggttaaaagcatgggccacagaatcaagcattcctgcattc

SEQ ID NO: 515264 - DNA, 201 bp, Homo sapiens
ttagttgtgtgaccttgggcatctcacttcagtctctcacagcctcaattatcacattagtaaaatttaccttgtagaaatattattattccccatcatgyccttaaagaatttggtctccaaatatagtaaactctgatgatagctttttaaccagttcctaactttttttttttttaataaactttaggggataggaaa

SEQ ID NO: 515265 - DNA, 201 bp, Homo sapiens
atgttttaaaaattcatctttttgctgcatgatgtgtatagctatagttcattcattttagattgtattccatgctgtgaatatagcagaacttttcctttaaaaaagatggctatataactataaaatctcagtcatattcaacaataagcaaatatttcttacatatatgttggtgggttggctaggacagctctgatg

SEQ ID NO: 515266 - DNA, 201 bp, Homo sapiens
ttcgagtgctgacattgttctgatttccagggtattattgggaggattagtttgcaaggcaaagaaattgggtgggtgtctggtcagttgtttgctgggggtagcagctatcttctagtgatgggatatgcaccctttgtgttcctcaggccccacctcagcaagtccattcctcctctccatgatcaggcccactccttg

SEQ ID NO: 515267 - DNA, 201 bp, Homo sapiens
tttttggattttgaagtatctgagagttggaacctatctgaatcttcctattatgtgaataccaaatttataaaatgttagacattttttatagaaatgayatttttaaaagttattatcctttgttataataaagaagtcgttcttcaaaagactctagtacttctcaaatttaatatgcagacaaattccctagggatt

SEQ ID NO: 515268 - DNA, 201 bp, Homo sapiens
gtgtagagttttattattaatatcctttataacctacacatatattttttttttggtagtatacttcataataaaaattaaaagtaaagagtatttagaamgaaaagatctaagcacagttctcattcttgcccccagttgtattactaatattttagcattaaaagaataataggaaaaagaggggggaaggaacatcta

SEQ ID NO: 515269 - DNA, 201 bp, Homo sapiens
gagtgatgtccttggataggtgaaaggggatggcacctagaacacaagtggagagactggcttcagataagagccaggacaggccgggcgcagtggctcasgcctgtaatcccagcactttgagaggccgcggcaggcagatcacgaggtcaggagatcgagaccgtcctggctaacagtgaaaccccgtctctactaaaa

SEQ ID NO: 515270 - DNA, 201 bp, Homo sapiens
actctgtcaccctgccttgagtgcggtggcgtgatctcagctcactgcaacctctgcctcccgggttccagctgttcttctgcctcagcctcccaagtagstggaactataggcgcgtgccaccatgcccggctaatttttgtatttttagtagagacggggtttcaccatattggtcaggctggtcttgaactcctgacc

SEQ ID NO: 515271 - DNA, 201 bp, Homo sapiens
gcttgaacccaggaggcagaggttgcagtgagctgagatcgtgccactgcactccagcttgggtgacagagcgagactccgtctcaaaaaaaaaaaaaaaatggaattagtgtctatttttaaaggtccagttatgtgctcctataaaattattaaactgtctagagatctgttaactaatttatatatttttttctttta

SEQ ID NO: 515272 - DNA, 201 bp, Homo sapiens
tgcttgaacccaggaggcagaggttgcagtgagctgagatcgtgccactgcactccagcttgggtgacagagcgagactccgtctcaaaaaaaaaaaaaaaatggaattagtgtctatttttaaaggtccagttatgtgctcctataaaattattaaactgtctagagatctgttaactaatttatatatttttttctttt

SEQ ID NO: 515273 - DNA, 201 bp, Homo sapiens
cctagggtccttagttgcctttgggacaaggttcccatcagtttctggggttcatggccctctggtaagttattaatatgtcatggtcaaaaacacagackcttaagctctgcagacttacaacttggaggagctgagtttgtgccctaactcaatgtcttccccatactggctgctgagctttggtttccttcacctgca

SEQ ID NO: 515274 - DNA, 201 bp, Homo sapiens
ctactcgggaggcttagacaggagaattgcttgaacccaggaggcagaggttgcagtgagctgagatcgtgccactgcactccagcttgggtgacagagcragactccgtctcaaaaaaaaaaaaaaaatggaattagtgtctatttttaaaggtccagttatgtgctcctataaaattattaaactgtctagagatctgt

SEQ ID NO: 515275 - DNA, 201 bp, Homo sapiens
atataaagtgctcagtggacatttgttgtttttggtaacgtgcttgtttagcacgcacagtccctggtgcagttcttttttttttttttttttgagacgamgtctcactttgttgcccaggctggagtgcagtggcatgatcttggctcactgcaacctccacctcctggttcaagtgattctcctgcctcagcctcccta

SEQ ID NO: 515276 - DNA, 201 bp, Homo sapiens
tccttggctccaactctccacgtaactattgttattggaagccgtagtctattttcatttcttttcacactcatacatattcactcaaccctgaggctgastcagaaagagtttgggtcactctttttttccagccatttgttggcctgctgatcgttcattcagttggcaaacctggagcgtgtaccttgtgccacactt

SEQ ID NO: 515277 - DNA, 201 bp, Homo sapiens
gcaagactctgtctcaaaaaaaaaaaaaaaaaggcataacttcctcagaagtctcaaatctgtgggccccagactgtatttatcacacaagtatgttttgyttgtgctacacagaattttttttaacttaattgtcaatgctttaaaaattagggaatttcacataaaacccaggtttccaatgtctttggaaaaatcagg

SEQ ID NO: 515278 - DNA, 201 bp, Homo sapiens
tcttcttgaatgctaagttgcttacttcataatatgctttcctattggttactttctgttgctgggaccttaactatacttgggggattgccaggattctkaggcatacctttttcactttcaaattaattgtccataggcaggagttaatccataaattaacaaacgtcactctcagacaatacccttataattctggga

SEQ ID NO: 515279 - DNA, 201 bp, Homo sapiens
gtcctggagtaaaattagaacagatttaagggtacatattctaccaaagcaatacattgttctagtaattgatggagaaggtaataaagcatcagtcttasagcagatgggtcacttgttctgaaaagatgctaagtgtggtattctggattttattttgacagaaaagttttagagacagtctttgatgaagtcatcatg

SEQ ID NO: 515280 - DNA, 201 bp, Homo sapiens
catatggagaggtatttaaccggcatggagctggtatccaggagggctgcagaatcctcttgaaccagtcgtgtggcggtccagagccatgctgggatacrgacagagccagaggctcaggtgtatattcttgcctgcagcagagggcagtctgtgtgcaggtggattggaccattgtgcccttcctctgcatgagctctg

SEQ ID NO: 515281 - DNA, 201 bp, Homo sapiens
tgtgaactgtaccatatttttgtacagctttggagacagaatacaataccagttttgttctgcatctctgatgttataaactttcagtatgatacgttttyacccgtgctcagtttagtgtcttacccaagtctaccctaccgatccaccataaagagctttctaaaataaagccttagttaatctggggcatagagaagt

SEQ ID NO: 515282 - DNA, 201 bp, Homo sapiens
gggtgaacagaaataagcaatgcttctgtaaggcacaatgtcacttctgctcatattgcattagtcaagtcaagccaagccataggacatgtccaacatcrggtgggaaagtgtcctccccctgaggaggctgggagtaatgtatacttgctgagcagaaatctaatacagacatttgggttgtttccagtttttgactat

SEQ ID NO: 515283 - DNA, 201 bp, Homo sapiens
ttttatggcaggtgaagggagagttacactttaaatgctaaactattttaagttatgtccagtatacttggcttgacctcaggggcctctcttttagggtrtaaattcacagcccccatattgtgaacagagaggactctggaaatgcctctgtatcattactgttgccaagtgcaaggcaaaggcaggactaatccaatg

SEQ ID NO: 515284 - DNA, 201 bp, Homo sapiens
agaattgcccagtgctgccagagtgagtgagtgtaattctcctttcaggtaaagataggctatctcaacactgctgagtgattcataaacatatcaaccartagcattaacccattttatttcctgtccttagtgtctgaagatgctcaccagttttctgtgtacagtaaggcagcatgctaaaatgcttttgttcagttc

SEQ ID NO: 515285 - DNA, 201 bp, Homo sapiens
cttaactcccaggtttagcggcgacagggggcgcgcggttgacaagggcaggcgccccggggaagtaggagcaggggcgccggtgagccgcagccgcagcsgcagcctagccccgagggagggaggaggagccgagggagacgcgggacccggagccccgcgggccaccgcccctgccggccgcgcagctgggaggatgcg

SEQ ID NO: 515286 - DNA, 201 bp, Homo sapiens
aagattaaccctaattactttgttctcccaatgttttcactgagtcaagaagtcttcattttgttaggaaaaaatcatataatctatatttttgtgtcttktttgtttgtttcatgtaatacttttcagtttttgctactttgcatgatgattcatcctggcttttctgtcttcaatttattgcattctttaaaacagttt

SEQ ID NO: 515287 - DNA, 201 bp, Homo sapiens
cactaggcaacccacaacttcctctcatgtctcggtggaatttctactgcttccagcctccaccttggaaaacgggcaagggagaatgagggaaagccagrtcagaaagagaaggacttcatgacaaaatgtcccaactcgctggttaagcaactgactcctaccagaacttgatccgaagtgtcctatgcatttggatgc

SEQ ID NO: 515288 - DNA, 201 bp, Homo sapiens
ttaatgagttaaatcagggaaatggccactccttaaaatgtttttaattggtgtgtcaaggaacttaactcaaaaatgagggccgggcgtgatggctcacrttggtagtccttgcactttgggaggccaaggcaggtgtatcacttgagatcaggggttcgagtccagcctggccaacacggtgaaaccccatctctacta

SEQ ID NO: 515289 - DNA, 201 bp, Homo sapiens
cactgtgcagtactgccctccacagtcctgctcacctctcccatctctccccactcaccccctgtcttgctggcacccaagggatttcttgccttagggcrgaaaaagcagtctcacccacatttaggaccccttaagatcccagtttctactttaaacagccttaccaagggatttcttaaaatgaaaactgccctgtct

SEQ ID NO: 515290 - DNA, 201 bp, Homo sapiens
tggccaacacggtgaaaccccatctctactaaaaataacaaaaaattgcctgacgtggtggcatgcacctgtagtcccagctactcgggaggcttagacaggagaattgcttgaacccaggaggcagaggttgcagtgagctgagatcgtgccactgcactccagcttgggtgacagagcgagactccgtctcaaaaaaaa

SEQ ID NO: 515291 - DNA, 201 bp, Homo sapiens
ttgtagcagcaatgtttccttttctgttcttttctgggaagactctatcaacatcctccagataaggattagaagcatctcatgttctttcctccctaackgttcccttggtatatgtctccaacatattacattctcttccctttgtacaatgggaacaagcagactcttaaacacaccaactgtgttctgagtaaagca

SEQ ID NO: 515292 - DNA, 201 bp, Homo sapiens
ctggccaacacggtgaaaccccatctctactaaaaataacaaaaaattgcctgacgtggtggcatgcacctgtagtcccagctactcgggaggcttagacaggagaattgcttgaacccaggaggcagaggttgcagtgagctgagatcgtgccactgcactccagcttgggtgacagagcgagactccgtctcaaaaaaa

SEQ ID NO: 515293 - DNA, 201 bp, Homo sapiens
tacaataccagttttgttctgcatctctgatgttataaactttcagtatgatacgtttttacccgtgctcagtttagtgtcttacccaagtctaccctacygatccaccataaagagctttctaaaataaagccttagttaatctggggcatagagaagtgttgtacctcacaaaccaacgtgaatctcattatacttaaa

SEQ ID NO: 515294 - DNA, 201 bp, Homo sapiens
cctggccaacacggtgaaaccccatctctactaaaaataacaaaaaattgcctgacgtggtggcatgcacctgtagtcccagctactcgggaggcttagacaggagaattgcttgaacccaggaggcagaggttgcagtgagctgagatcgtgccactgcactccagcttgggtgacagagcgagactccgtctcaaaaaa

SEQ ID NO: 515295 - DNA, 201 bp, Homo sapiens
gcctggccaacacggtgaaaccccatctctactaaaaataacaaaaaattgcctgacgtggtggcatgcacctgtagtcccagctactcgggaggcttagacaggagaattgcttgaacccaggaggcagaggttgcagtgagctgagatcgtgccactgcactccagcttgggtgacagagcgagactccgtctcaaaaa

SEQ ID NO: 515296 - DNA, 201 bp, Homo sapiens
ttaactaatttatatatttttttcttttaggtggggaccaaggcatactgaacacattttttagcagctgggcaacaacagatatcagaaaacacctgccrtttatttataacctaagcagcatctctatatactcctacctcccggcatttaaagtgtaagtgcagatggtttaactattgttggagatgttgagggcag

SEQ ID NO: 515297 - DNA, 201 bp, Homo sapiens
atacactagaatctttaccaaagggctttccaaactaggttttactaggggaaacacactaaagggtataaactgcttcatgattggttagttcactttgrtccgatggaattaagttttgaagtatttgggccaggtgtgatggctcatgcctgtaatctcagcactgtgggaggccaaggcagttggatcacctgaggt

SEQ ID NO: 515298 - DNA, 201 bp, Homo sapiens
tatcacatgggtagattggtgtgactaccaccatagtcaagatgcagagtagttccatcacaaggacccttcatcatattcttttttttttttttttttttgagaccgagtctcactctgtcaccctgccttgagtgcggtggcgtgatctcagctcactgcaacctctgcctcccgggttccagctgttcttctgcctca

SEQ ID NO: 515299 - DNA, 201 bp, Homo sapiens
cggaaggccaaggcaggtggatcacttgaggtcaggagttccagaccagcctggccaaaatggttaaaccccatctctactaaaaatgcaaaaattagccrggtgtggtggcacatgcctgtagtcccagcttcttgggaggctgaggtgggagaatcacttgaaccctggaagcagaggcaatgagctgaggtacgccac

SEQ ID NO: 515300 - DNA, 201 bp, Homo sapiens
cctccagtagaaacactgcatttttctgtgaacacatccacttcacaagccttgtttctgatacttagtatctagagctgggttgagaaaagtctgttacrgttgctagaggttttcattaaaacttatcagatgagaggcttttttaggataagaggtgagaactgggcaaaagttgtgaagcagcaattctgttatatg

SEQ ID NO: 515301 - DNA, 201 bp, Homo sapiens
aagatgtgttggacttatgcttgatagcaataaaatatttctttatggacaatgactttgtctaatggcagtaacctttgcctctggttttcaatatgttrttatataaaaattataaatatagtaaaagtaaatagtcttaaatataaaaattaagaattatataaaaataattttggttaggtgttgtgctgtaggcac

SEQ ID NO: 515302 - DNA, 201 bp, Homo sapiens
catagtcagttttaagtcccggaattttcagctcagaccagttttacagatgactgtatctcagtgtgaatatctcgcaggtcatgtttttaacctctttyctgtgttcatcagaaactggtggggcctgatgtccactgacaagccacacaggctgttgatggctgagcatttgcagctgcttttgcaacccttctcatg

SEQ ID NO: 515303 - DNA, 201 bp, Homo sapiens
cctttgtgacactaaccacaaacgatgcctacgccaaaggtgccctggtcctgggatcatctctgaaacagcacaggaccaccaggaggctggtcgtgctygccacccctcaggtctcagactccatgaggtgaggacctcgctgccaccccagcatccaaggggctctgacatccttctccctgttgctgacatcattgg

SEQ ID NO: 515304 - DNA, 201 bp, Homo sapiens
tcggtgaaatgaggctgatgaacttgactctgaagaaatcaacctgaatgcaagttgaggtttattttcttttcccctgtgactaatatatcttaagagtrcttgtatagttgaagagttaagtgcttaaaaattgtctattttgtctgtatgtgttagtttcaaaaacctaagtcagaggaattcatattttgtaatttg

SEQ ID NO: 515305 - DNA, 201 bp, Homo sapiens
gaagaattgtcagcagcaccagacccagggtggcctgactgcttcaattccggagtcttcgtttatcagccttcagttgaaacatacaatcagctgttgcwtcttgcttctgagcaaggtagttttgatggtatgtatttgctatcttcatgtctgataagctgttaatagtaatttctaggggctgctcttctcaggaat

SEQ ID NO: 515306 - DNA, 201 bp, Homo sapiens
aaaaaaatattaaacattagctaggcatggtggcctgtgctactcaggaggctaagggtgggaagttagaggctgtagtgaactgtcatgctactgcactscagcctgggtgacagagtgagacactgtctcttaagaaagaaagctatagaaaagtgctactaagtgctgcttatctttttgtcagtactcagaatccac

SEQ ID NO: 515307 - DNA, 201 bp, Homo sapiens
aggcattcatacatccattcatataacaaatattaattgagagcctgctatctagctagcactggggacctgccattggtacagttcagggcagcagcttscctgatgtctctgagctaggcaaagtcaggtctgaaccagggtccttctcaactctggttgggttatgtgttgtggtggggtgggtggtggtggtgggtg

SEQ ID NO: 515308 - DNA, 201 bp, Homo sapiens
gttactggctgtttctcaactactaaactagtcatgaaaattctatctgatcttttggtaacatcaggtcacagggataattttaacggctcacataagcrgtattattgctggcttgtgttcaaactatgtcttgtgatctggacgacccttttgagattctatcaagttaaaattagaacatttattttaagagatgta

SEQ ID NO: 515309 - DNA, 201 bp, Homo sapiens
cacacaagtatgttttgtttgtgctacacagaattttttttaacttaattgtcaatgctttaaaaattagggaatttcacataaaacccaggtttccaatktctttggaaaaatcaggtatttggtaggatatgtcaaatgtgactgttacaggtttgtggtctaagtgactggaatgatagagttgccatttcctgaaat

SEQ ID NO: 515310 - DNA, 201 bp, Homo sapiens
ggctaagaatgacatgctgcctccaggagagtctccctagtggcctggtgttgtaagtccttccctgacctggtctgtgaagagaggccagcctagaagakaatgttgttgactaggtcctagtgtaggttattaaagtctgggttcgagtgctgacattgttctgatttccagggtattattgggaggattagtttgcaa

SEQ ID NO: 515311 - DNA, 201 bp, Homo sapiens
gcgtgagagaggagaggtgtgcagttggttgtgggagaagggcttgtgtgtggctctgcccatgtgggcaagtgagtctgagaaggtgcatgagtgagtcrcaatataatagagaacatgagccacagaagtgggcaagaggatgcttgacattgctgccacgattcccagagaagtgtcgcacaagcagtgccgtctttc

SEQ ID NO: 515312 - DNA, 201 bp, Homo sapiens
atgtgggcaagtgagtctgagaaggtgcatgagtgagtcgcaatataatagagaacatgagccacagaagtgggcaagaggatgcttgacattgctgccaygattcccagagaagtgtcgcacaagcagtgccgtctttctcggtatctgactgaacaatgcacgtaaagagcttagtgaggactaaaattgctcctgtgt

SEQ ID NO: 515313 - DNA, 201 bp, Homo sapiens
gacatttatattaagtctaggcaaatcatgggcggaagcttagcagttaaaacaagaggatcaaacagtttaatacaagaggatctaagtaggtgctgtgrctccaggccgggaagttgagtcaggaggggtgggcgtccgaggaggtggaaggaatatctcattcttatgtactctgtttcggttttaggcttatgggtt

SEQ ID NO: 515314 - DNA, 201 bp, Homo sapiens
ttcaggttcctttgctgtgtaaataactgtttagttgtacagttagagcataatgggagttaaaaggactcctgaaccttcatataaggtggccattgttsggtccaggcagagatccctcatatcaagccaagtgctgccctagatgagttctaggaacattcttgtgatatgactgccttacacaaagttgcaaaatct

SEQ ID NO: 515315 - DNA, 201 bp, Homo sapiens
aaaagctggtcctctaaaacctctgaccattcactaccactatccatttccatagatagtaggtgtgtaacagtttgattaaagtagtgtcaggccgggcmcgtaatgtcaggcccacacctgtaatcccagcactttgggaggcagaggcaggtggatcgcttgaatagcctgggcaacatggtgaaacctcgtctctac

SEQ ID NO: 515316 - DNA, 201 bp, Homo sapiens
aagaaacctacttacatcctaacactttgtgatttgtttcattgcaatgtgggtagctgttgggaggctacatcactgtgcagtactgccctccacagtcytgctcacctctcccatctctccccactcaccccctgtcttgctggcacccaagggatttcttgccttagggcagaaaaagcagtctcacccacatttagg

SEQ ID NO: 515317 - DNA, 201 bp, Homo sapiens
ggtagggaaggaccatcaggtgggagcagggctaggtgtgtctgagctcagactctccttgggtgggtgttgctgtggctgctgtgggggatgggggtgasattcccaggtcactggatttgtgtacctaggaggattatggctgcttctgctgagtcatgcaggttgtcagggaagtcggggagagccggcagtcacagg

SEQ ID NO: 515318 - DNA, 201 bp, Homo sapiens
tgtgtgggttcagtagttgaggcagtcattgtgaacagatggaatgcactggtacccatttactgggcacatgatgatgcaggcatgcctgttcagtgacrgcatggtcaaggcaagggtcactatatgagcagtaaccagatccccatccattgatggtcactccagattcttctctcttactcccttacactgtctctt

SEQ ID NO: 515319 - DNA, 201 bp, Homo sapiens
gagtgtgtaggtgaagactgtggatttcaggcaaaaaacatgaatgaagttatagagcagggaaaatgtggggcaggttttagtttgaacttggagtaggrgtcctggaggggagactgtaggagataatactggaatttgcaaagcagatcatgtccctcctttgttcagaacttacagcctctcatctgatttagagaa

SEQ ID NO: 515320 - DNA, 201 bp, Homo sapiens
tgcagtcaatcccctatctctgtggctactccttccctgtatagatacccttctcaccccatgtgggatttgatataccatgttgggttgcccccatatgyaaatgtcctccttaccttgtttagcctctaataccctacaccaggctgttgcttcatgtgagtgttcttaccctgctggagttctaacacaccatgtcag

SEQ ID NO: 515321 - DNA, 201 bp, Homo sapiens
ctacaagctatcacacaatatcctccctgtgcctcaattcccatttcccatgactttcttccttgcttccccttctctagctatattagtctccttgatckggccaatagagattccacctcagggcttgtttcctctgcttgaagctctcctttcccacatggctgcatggctcatgcctctttcaggtcacctttatga

SEQ ID NO: 515322 - DNA, 201 bp, Homo sapiens
agtggctttctctgtttttaaatataatggtatttaaatgattactatattgttgaaagtttccaaagaaattttttaattacattttttaacccagaaaytttaaaatattttaatactttaaaatctataacttatacctaaccttaaaattttcttttttaatcctttttccaattaaaaacacccatatactgcaga

SEQ ID NO: 515323 - DNA, 201 bp, Homo sapiens
ttcctccacccagttgcccatccctctcagatacagatggttttaaagagcttttcctaccaatcattaaaatgtacaaattaaaatagcagtgagatackactttttccactcaggagataagcaaatatttaacagcctcagatattaatggtaagtttataggaaaatgagtattttcataaatcactggtcagagtg

SEQ ID NO: 515324 - DNA, 201 bp, Homo sapiens
tggcacatggctcatattcaaatatttattggacaaaaaagaaaatgactgcagcaaaaagagtgtgagggagggaaggagttggatatggatcctatggyagtttatgttcaggcaaaggaataaaaatttaacgtattagtcagtgggtagccattgaacggtttgaagagtggagtaaaggcaaaagcatttagttta

SEQ ID NO: 515325 - DNA, 201 bp, Homo sapiens
ccagcttgtatacccctaaaagaagattcactgatgaaaattttttaaataaatagactggtagagaacactgatcagtatcccctaataaatccactttrtcctcggatggtttctatcatgtaaacataggattaaactcttagcacaaataaaatggaatgttttcgtctctacattcaggtgcgaaatagtttttta

SEQ ID NO: 515326 - DNA, 201 bp, Homo sapiens
taagtggaccctacagttcaaactcatgttgttcaaggaccgactatatatactaggtcttaattttttaatgtttattttaaaactagtacattacattrtttctttctattggtcacttgtctacttagaattcctatatatcctttctgatagtaaaatatttccacaagattgttaacaggtttctaaagttttttc

SEQ ID NO: 515327 - DNA, 201 bp, Homo sapiens
ctaatgtgactgtcacttctctgatgtgcagcatagtagtggaaagcacagactgctccattttttttggtgtcaaattttggctttcccagctgtgtgamtttggggaagttacttcatctatttgtgccagtttttatttagctatcaaacaaaaataaaaatacctaagtcataggtttattatgggaactcagtaag

SEQ ID NO: 515328 - DNA, 201 bp, Homo sapiens
ttccagttgattttttatgtatcaaccaagagactttaaaataaaatgttattatgatgattcacttgcctattgtagctttgcattactagctgtgcccygaaatatatgatatactttaggtagatttctacaatttaacattcttgagagaacctcacttaggtgtaaaaaataaattttaattaatgtacattatgg

SEQ ID NO: 515329 - DNA, 201 bp, Homo sapiens
acattttctgtccatgaaattgtgaagaaggaaaaataaaaccatgcacagtatatataggattcagtattatccatgctttcaggcatccactggggacmccccacaggtaaggggggactactttatgcatgtttaagttataaccatctgctttcaaataatataccacttcatggatagtgtaagaacatgacaaca

SEQ ID NO: 515330 - DNA, 201 bp, Homo sapiens
cccatgtacacctagcttttcttcagccctcccttgtgggcctactcacaacagctttgcaaaaagcacagctttctcttcctatctctagcacatttgcmttcttactaaagtaaacaggctctcagtgtagggatttagagggcttcctgctaattgccagcttgtaaacttaattggactgtctccctgggcactgtt

SEQ ID NO: 515331 - DNA, 201 bp, Homo sapiens
ggagcaaacagaatcgaaacaacacaactacctcgttggtcataatatacagcactgccctagcactgtttagaaccttagtgccagtgatacggaattasagacaaaaagtcacaaccctaattccaaagtactcaaaatgttacagattttgaagcattttggatttttagatttgggatgctgtgcttgtcctgagcg

SEQ ID NO: 515332 - DNA, 201 bp, Homo sapiens
acagtcttataggctctttaaaagatctaaatgtggaatttccaaggattttttaaagttttgtttctcatttttaatgtataagattaatatttattacraagtatttttcctcggaagagtagattccttgaaatagaagattccaactagcagatttttaaaagaaaacccagtataaagaacagatttttcttatga

SEQ ID NO: 515333 - DNA, 201 bp, Homo sapiens
atgttggccaggctggtcttgaactcctaacctcatgatccacctgcctcagcctcccaaagtgctgggattacaggcgtgagccactgcgcccgagcccrtgtctgtttttataccagttccatgctttttgggttaccataagtttgtattatattttagtagcgtgccttcagctttggtctttttgctcacattgct

SEQ ID NO: 515334 - DNA, 201 bp, Homo sapiens
tatgtacttgataaaacattacttctcattaaatcatattgaggtcatctctgcattaaaattcagaaccaacaagtttgatcactgtataaccactttacacacacacacacacacacacacacacacacacacacccccacaccattttctctttcaaggctttcttgacactatattatcttagtctgtcttttaaat

SEQ ID NO: 515335 - DNA, 201 bp, Homo sapiens
cttcactgctctccttaaactcacattatcagctccctattcctctcaacagagcatctcaccttttgtcagttcattaagtttatctgcttcttacgackcccccactcaaccacttatcaatatgcacatgaatctttccctctcagttcagtgaaaaagaatcccttcctcttgtccaagactagcgccaccactatt

SEQ ID NO: 515336 - DNA, 201 bp, Homo sapiens
ttccagtaatatgttgaatagaagtggtaaaagtgagcatccttgtctttttccagttctcagggggaatgctttcaacttttccccattcagtattatgktggctgtgggtttgtcatagatggcttttattacattaaggtctgtcccttctatgctgactttgctgaaggtttaatcctaatgggatgccggattttg

SEQ ID NO: 515337 - DNA, 201 bp, Homo sapiens
tattgaggtcatctctgcattaaaattcagaaccaacaagtttgatcactgtataaccactttacacacacacacacacacacacacacacacacacacacccccacaccattttctctttcaaggctttcttgacactatattatcttagtctgtcttttaaattgactctttattggagaattaccagactatctatct

SEQ ID NO: 515338 - DNA, 201 bp, Homo sapiens
ctgtggatcccataacattccctttgacacctttactttgtcaccctccccggccccatctatcttggaacagcagcagataaacaggcccaaactacacyataaaaacagactaacaaaactcttccctaaaatggtttcccatctgttgctgatctaatattcaccttcctttcatagccaaactcattgaaataatac

SEQ ID NO: 515339 - DNA, 201 bp, Homo sapiens
ttgtattttcatgtctagatctctagcaaggctaaggaagttttcctcgattattccctcaaatatgttttccagacttttagatttctcttcttccttgkgtacaccaattattcttaggtttggacacttaacaaatcccaaacttcttataggctttcttcacatttataaattattttttctttgtctttgatggat

SEQ ID NO: 515340 - DNA, 201 bp, Homo sapiens
attgaggtcatctctgcattaaaattcagaaccaacaagtttgatcactgtataaccactttacacacacacacacacacacacacacacacacacacacccccacaccattttctctttcaaggctttcttgacactatattatcttagtctgtcttttaaattgactctttattggagaattaccagactatctatctt

SEQ ID NO: 515341 - DNA, 201 bp, Homo sapiens
cttgatcatggtgtattgtcttgttgatgtcttgttggattcagtttgctagtattttgttgaggatttttgcaactgtgttcatcaggtatattggcccrtaggtttttggcctataggtttttttctttgtcatatccttgtctggttttggtattgaggtaatgttgacctcatagaatgagttaggagaatttttgc

SEQ ID NO: 515342 - DNA, 201 bp, Homo sapiens
ctcccctattttttatttattgacttatcagtcaccctgtttgcagtcaatcccctatctctgtggctactccttccctgtatagatacccttctcacccyatgtgggatttgatataccatgttgggttgcccccatatgtaaatgtcctccttaccttgtttagcctctaataccctacaccaggctgttgcttcatgt

SEQ ID NO: 515343 - DNA, 201 bp, Homo sapiens
aattcaataataaaacagttggcttttctttgttgggagagtttttattactgattaaatcttgttaatgaagaaaaaactcgctctcttcaggttttctrtttcttcctggtataatcttggtaggttgtatatgtccaggaacttatgcatttcctgtaggttttccaatttgttggtgtatagttgttcataaaagtc

SEQ ID NO: 515344 - DNA, 201 bp, Homo sapiens
gtatgtttgtgtatacacacaacattgtacctgaggaatcttaaatgttcagctagtgagtttaatatcatgcccttgataattagtcttccttgggcaatttttttttttttttttttttttggagactgagtcttgctctgtcgcccaggctggagtgcagtggcacaatcttcgctcactgcaacctctgcctcctaa

SEQ ID NO: 515345 - DNA, 201 bp, Homo sapiens
cttttttcttgttagtctagctagaaatgtatagattttcatcttttcagtgaaccaattttcttgtgttatttattagtctctatcttgtttagttctgycctgatctttattatttctctttttctactaattttgggttttgtttgttgcttttctagttccttcaggtgcattgttaggtagtttatttgaaatctt

SEQ ID NO: 515346 - DNA, 201 bp, Homo sapiens
tctcattgttcagttcccacctatgagtgagaatatgcagtgtttggttttctgtccttgtgatagcttgctgagaatgacggtttccagcttcatccatktccctacaaaggacatgaactcatccttttttatggctgcatagtactccatgatgtatatgtgccacattttcttaatccagcctatcattgatggaca

SEQ ID NO: 515347 - DNA, 201 bp, Homo sapiens
gctgagaatgaaaagtgttgaagtctccaactattgtatttaagtctgtctctccatttatatgtaacaatatttgttctgtgtgtgtgtgtgtgtgtgcrtgtgtgtgtgtgtgtgtgtttctgcgttgggtgcatacatatttagagttgttagaccctcttgctgaaatgatcccttcatcattacataatcaccttc

SEQ ID NO: 515348 - DNA, 201 bp, Homo sapiens
agtgccgcagtaaacatacgtgtgcatgtgtctttatagcagcatgatttataatcctttggatatacacccagtaatgggatggctggatcaaatggtatttctagttctagatccttgaggaattgccacactgtcttccacaatggttgaactttttaaaaaacaaatttgttactcctctgcttaaaacccttctac

SEQ ID NO: 515349 - DNA, 201 bp, Homo sapiens
tgagaatgaaaagtgttgaagtctccaactattgtatttaagtctgtctctccatttatatgtaacaatatttgttctgtgtgtgtgtgtgtgtgtgcatrtgtgtgtgtgtgtgtgtttctgcgttgggtgcatacatatttagagttgttagaccctcttgctgaaatgatcccttcatcattacataatcaccttcct

SEQ ID NO: 515350 - DNA, 201 bp, Homo sapiens
aagaaaactacagaccaacgttcttgatagatattggagcaaaagtcattaacaaaataccagccaacgaaattcttaggcatagtaaaaagataatacaycatgatcaagtaaaatttactgatgtaaagtaaggatggttcaacataagaaaatcattctaatcacattaacagaatgaaagatgagaactacataatc

SEQ ID NO: 515351 - DNA, 201 bp, Homo sapiens
tctttctgtttttttgatgcaggtgtttattgctataaatttccctcttagcactgctttcactgtgtcccaaaaacacagcacaggcttgggtatattgkgtttccatttgcatttatttatttattcatttattatttatttattttagacagaatctcactcactctgttgcccaggctggagtgcagtggcgcaatc

SEQ ID NO: 515352 - DNA, 201 bp, Homo sapiens
atatgtatccatgtgccatattggtgtgctgcacccattaactcatcatttacattaggtatatctcctaatgctatccctaccccctcctccctcccccmaccccacaacaggccccagtgtgtgatgttccgttccttaccctgtgtccaagtgttctcattgttcaattcccacctatgagtgagaacatgcagtgtt

SEQ ID NO: 515353 - DNA, 201 bp, Homo sapiens
attagatcccatttgtcaattttggcttttgttgccattgcttttggcgttttagacatgaagtccttgtccatgcctatgtcctgaatggtattgcctargttttcttctagggtttttatggttttaggtctaacatttaagtctttaatccatcttgaattaatttttgtttaaggtgtaaggaagggatccagtttc

SEQ ID NO: 515354 - DNA, 201 bp, Homo sapiens
ttttcatttgagctcacttcatagcagtctttgatttctaaccttttcaaaacaataaccctgaattgacaaattattttggtatttaagcattggtttarataagagcatttcagtgttctcttgcctttattttagctatttaggagttattcctgaaattcaatttattttctcttcaaagttacgttttttcaattt

SEQ ID NO: 515355 - DNA, 201 bp, Homo sapiens
attactctagagacatgaagtctgggttttggcttcaggaaatatcactttggaaattacactttaggtcagattaaatataaaaagttgaaatatgcatmtaaaatgaattaagttaccatattgactagaacttcttgattgcaaagggatctttaaaaagcatttttattactgttatttgaaattacattcagaatg

SEQ ID NO: 515356 - DNA, 201 bp, Homo sapiens
tcatgatagagttgtttgctggtggccactggtcaacgatgatgcttggccttgggcccccatttcttctgagaaggacagagccaatctactcctcctgrgttatgctcaaggaagactagaggtaaatctaaaacaaatatgtacattttaataaagtgtaaataaaatagaattattagattttctattctgaaataa

SEQ ID NO: 515357 - DNA, 201 bp, Homo sapiens
taacatccaactgttggctgaagaccgcttacccagggagactctgcaattcagtaaattatttgatgcctccagcagtcttgttcaaatgcaatggatasctcctcaggttgtttctcagaagggtgaaggtagtgatatctatgatctcctcttcctcaggtttgaaagaggacctttgggtgtgctgttgtttaaact

SEQ ID NO: 515358 - DNA, 201 bp, Homo sapiens
tggattccactatattggaatatagagatcaaatcagcaaatatgcaaggagattcttccatcacttgctcaggtgaatgatatgtttggattgattagcrtcagactaattacttatttcaggagacatcctctttaattaaaatattccatagtaaggctatgtgtttcctaacagtccatctcctcaaagaaatatac

SEQ ID NO: 515359 - DNA, 201 bp, Homo sapiens
gtctcagaactgctcttggaaaagtcaccagtcacttcctacttgataaatacatgtctcttacattgtttgatgacttttcagcatttgatggttgctgwccactcccactttcacagaaccctcatcaaacagccttctatgatcccaaatgcaactttctatcacatttttatgctcttcttctgcctactcatgaaa

SEQ ID NO: 515360 - DNA, 201 bp, Homo sapiens
aacaagaggtaattaaagctaacatcttcactctcatagaatttttaaaatcacaggcaacgtgtgtatgtgtgtgtatgtctgtctgtctctctttctaraaaacaaacagtatgatttttctcttggaaatttggtacaaagcaattttcctcaagagttattttcaaagagttattttaacattatactttacccaag

SEQ ID NO: 515361 - DNA, 201 bp, Homo sapiens
atgacttcaagtgttttgacctgagcaattggaaaaacaaaattgttactgacaagattgataagactccagaaagaacaggtatgtgggaaaagaccagragtttggttttggaaatgttgagtttgagtgagaaattcagaagtgagttctgagacagggctatgaagggaaatatatatatttaaaatgtttttcttg

SEQ ID NO: 515362 - DNA, 201 bp, Homo sapiens
ctactctattgaagtctgaaaagaaacatgcagagaaaatataatcaagaatttatttggcagatttataacatctgcagagctcagagctcaaggaaagmccataacacataaaatatgagcatcaataaatgttcagaatgtgtcactggatgtgaaatatatttgtatttcctttgtgtttaatacaatgtagacaca

SEQ ID NO: 515363 - DNA, 201 bp, Homo sapiens
tgaggacttatttctggttttttttttttacatgttttaagtttgttttgtatattctttattcttttcttcctctcttactgtttattattgtagtttgytgggattctgtagtagtaacatttgactcctttctcttattgtgtgtctgctctaccagtgagttttatactttatgtgttttcatggtggtagatatca

SEQ ID NO: 515364 - DNA, 201 bp, Homo sapiens
tttatgcattttatttccagtgactcacagttacttttaaagaactttaatctgttctaactacatgtgctaggtgattaaggtcactatgaattctgacstggtccttctcctttcttccatcttatcttgtcacgaaaacactctactaagatctgcggctggaagacggacatgcatttagttaatttcccaagttcc

SEQ ID NO: 515365 - DNA, 201 bp, Homo sapiens
acttatttctggttttttttttttacatgttttaagtttgttttgtatattctttattcttttcttcctctcttactgtttattattgtagtttgctgggwttctgtagtagtaacatttgactcctttctcttattgtgtgtctgctctaccagtgagttttatactttatgtgttttcatggtggtagatatcatcctt

SEQ ID NO: 515366 - DNA, 201 bp, Homo sapiens
atcatatagtgtaaatgatcactaaacttattcctacggtctaactgaaactttgtatgttttgatcagcatcttccctttccccaccactatcacctccagcctctgtcatcaccttcctgtttctatgaaatcaatttaaaaaaaatccatatataacaagtgagatcatacagtatctgtctttctgtacctagcttc

SEQ ID NO: 515367 - DNA, 201 bp, Homo sapiens
ttattctctttgaagcaattgtgaatgggagttcgctcgtgatttggctctctctttgtctgttatgggtgcataagaatgcttgtgatttttgcacattrattttgtatcctgagactttgctgaagttgcttatcagcttaaggaaattttaggctgagacgatggggttttctagatatacaatcatgtcatctgcaa

SEQ ID NO: 515368 - DNA, 201 bp, Homo sapiens
tgcaatgaattagtacattactttgggtagtatgaacattttaacactactgtttctactaatccatgaatatgggatatctttccatttatttatttttwaattttattgattgattgattgattgagacagagtctcactctgttgcccaggctagagtgcagtggagtgatcttgactgacggcagcctccacccccc

SEQ ID NO: 515369 - DNA, 201 bp, Homo sapiens
tgaaatctttttctggaaattcttgaattctttttgattggaatccgatgttgggggattattatatttctttggaggttttatatttccttgctttttcrtacttcccgtgctcttacattgatagctgcccatctggtgtaatagttgtttcttccagttttttgaatttgtttttgtaggggatgactttttcctgaa

SEQ ID NO: 515370 - DNA, 201 bp, Homo sapiens
aggtcaggagtttgagactagcctgatcatcatggtgaaaccccgtctctactaaaaatacaaaagctagccaggcgtggtggtgcgtgcctgtaatcccrgctactcaagaggcagaggcaagagaatcacttgaactgaagaggcagaggtttcagtgagctgagatcatgccactgcactccagcctggcaacagagt

SEQ ID NO: 515371 - DNA, 201 bp, Homo sapiens
attatatttctttggaggttttatatttccttgctttttcatacttcccgtgctcttacattgatagctgcccatctggtgtaatagttgtttcttccagttttttgaatttgtttttgtaggggatgactttttcctgaagttatatcaattctcttggttggatggggtgttttggctttgattctgagtgtgttcagt

SEQ ID NO: 515372 - DNA, 201 bp, Homo sapiens
accttatttggtcctcccaaattatctctaaaggagaaactactgtattggtgaattttttagaagtttttttctttaataatttcaacttttattttagmttcagggggcatatgtgcaggtttgttacatgggtatattgcatgatgctaagatttggggtatgaatgatccccatcacccaggtagtaagcaatagta

SEQ ID NO: 515373 - DNA, 201 bp, Homo sapiens
cttttgttttttctccttaagtcagttctctgtagtaaatcaactaatttttttttaattcttaactatatttacttttgtttcctgacatgtaggaggcacttacgtgtttttttttaacttactgaatgaacaaaactcagatgttatttatgttttgtttcaattaatgatgtcatctgatataattttctcatttcc

SEQ ID NO: 515374 - DNA, 201 bp, Homo sapiens
ctcttaatactgtgtttactgcacccagagatttcggtaagttgtgtctctgttttcattaatttcaagaaattatttgatttctgccttaatgcccaaartaattcaagagtaagttgtttaatttccatgtaattgtgtggttttgagagacctttgatattgatttctatttttattgcactgtggtctaagagtgtc

SEQ ID NO: 515375 - DNA, 201 bp, Homo sapiens
ttttgttttttctccttaagtcagttctctgtagtaaatcaactaatttttttttaattcttaactatatttacttttgtttcctgacatgtaggaggcacttacgtgtttttttttaacttactgaatgaacaaaactcagatgttatttatgttttgtttcaattaatgatgtcatctgatataattttctcatttccc

SEQ ID NO: 515376 - DNA, 201 bp, Homo sapiens
aaggacatgaactatgcaaaagaagacatacaagcccccaagaaacatgaaaaaatgctaatcatcactaaccatcagagagatgcaaatcaaaaccacartgagacactctatcaatcacaccagccatttgtgtgaggaaagtaatagagatggccattcaataagttttcccttaaataagactgtatttttatattg

SEQ ID NO: 515377 - DNA, 201 bp, Homo sapiens
tttgttttttctccttaagtcagttctctgtagtaaatcaactaatttttttttaattcttaactatatttacttttgtttcctgacatgtaggaggcacttacgtgtttttttttaacttactgaatgaacaaaactcagatgttatttatgttttgtttcaattaatgatgtcatctgatataattttctcatttccct

SEQ ID NO: 515378 - DNA, 201 bp, Homo sapiens
attgctataatcatgaaaaggttcacatgatataccacctgccattttgggcatgtcatcttatttaacaattaactcatgaagctgtagctgcattttgttttttttttttttagaaaatatttatttttaattttcatttgagactaggggaatgcatgtacaggtttgttacaagggtatattgcctaatgctgaggt

SEQ ID NO: 515379 - DNA, 201 bp, Homo sapiens
ttgttttttctccttaagtcagttctctgtagtaaatcaactaatttttttttaattcttaactatatttacttttgtttcctgacatgtaggaggcacttacgtgtttttttttaacttactgaatgaacaaaactcagatgttatttatgttttgtttcaattaatgatgtcatctgatataattttctcatttccctc

SEQ ID NO: 515380 - DNA, 201 bp, Homo sapiens
gctggaatatgctagtgtggaggtccgaaaagtctggactcttaagaataccttgtctcaaagtccttggccatgcctatggtctgaatggtatttcctasgtttgcttctagggtttttatggttttaggtctaacatttaagtctttaatccatcttgaattaatttttgtataaggcgtaaggaagggatccagtttc

SEQ ID NO: 515381 - DNA, 201 bp, Homo sapiens
gttcctgcattaattcacttagtggcctccagctgtatccctgttgctagaaaggacatacttttgttcttttttatggctgcatagtatttcatggtgtgtgtgtgtgtgtgtgtgtgtgtgtgtgtgtgtgtgtgtgtgtataacattttctttatccagtccaccattcgatgggcacctgggtggattccatgtttt

SEQ ID NO: 515382 - DNA, 201 bp, Homo sapiens
ttcctgcattaattcacttagtggcctccagctgtatccctgttgctagaaaggacatacttttgttcttttttatggctgcatagtatttcatggtgtgtgtgtgtgtgtgtgtgtgtgtgtgtgtgtgtgtgtgtgtgtataacattttctttatccagtccaccattcgatgggcacctgggtggattccatgttttt

SEQ ID NO: 515383 - DNA, 201 bp, Homo sapiens
ggcctgaagttttctttttttgttgtgtctctgccagattttggtatcaggatgatgctggcttcgtagaatgagttagggaggagtccctcctcctcaatttttttttttttttggaatagtttcaataggattggtaccagttcttctttttacgtctggtagaattcggctgtgaatccatctggtccaaggcttttt

SEQ ID NO: 515384 - DNA, 201 bp, Homo sapiens
ttttttttttttttagaaaatatttatttttaattttcatttgagactaggggaatgcatgtacaggtttgttacaagggtatattgcctaatgctgaggwttcggcttctattgaccctgtcacccagagagtgaatatagtacctaacaagtttttcagcccttgcccctctctttccctctttccttttggagccacc

SEQ ID NO: 515385 - DNA, 201 bp, Homo sapiens
attggcctgtctttagcacctcaaggagaagactcatttccagataacctccctccctcttgcccaacccacagacatattttacaacaaagaatactgartggctcttctaacaggtaagaaatgttgaactgaggaaattgctccataaagtatttagtattacctgttcaaatgcgaactaatagcaaagcaagaata

SEQ ID NO: 515386 - DNA, 201 bp, Homo sapiens
aaaagttccactgggatatgtgaatgttgttctgtaatcttacttataagggagttagcagaaattgtacttagtatttcactcacatattaatcattttyaacagaactcctgggacccttggacagaggggatatgctaaatgaagcatttattggcctgtctttagcacctcaaggagaagactcatttccagataac

SEQ ID NO: 515387 - DNA, 201 bp, Homo sapiens
caccatcagtgatggtaattacccccatgtgcaaatcaattgcctacattaacagtggggcaggagaaatagtgtgtcaacaggtagactaattattaccwctggggacttgcaaacacaacaagtaattgcttgtaatagcgtacttacaccccctgggaccaatacaagtttcgactaatatttaatatcaaagttttt

SEQ ID NO: 515388 - DNA, 201 bp, Homo sapiens
ccaaatgtccatcaatgatagactggattaagaaaatgtggcacatatacaccatggaatactatgcagccataaaaaaggatgagttcatgtccattgtrgggacatggatgaagctggaaaccatcattctgagcaaactatcacaaggacagaaaaccaaacactgcatgttctcactcataagtgggaattgaagaa

SEQ ID NO: 515389 - DNA, 201 bp, Homo sapiens
gtaccctagaacttaaagtataataaaaaataaaaataaaaactagttacgcttattttttttgtctttttttttttttttcctttttctggagaacaaggcatcatgctacctgacttcaaactacactacaaggctacagtaaccaaaacagcatggtactggtcccaaaacagagatatagaccaatggaacagaaca

SEQ ID NO: 515390 - DNA, 201 bp, Homo sapiens
taccctagaacttaaagtataataaaaaataaaaataaaaactagttacgcttattttttttgtctttttttttttttttcctttttctggagaacaaggcatcatgctacctgacttcaaactacactacaaggctacagtaaccaaaacagcatggtactggtcccaaaacagagatatagaccaatggaacagaacag

SEQ ID NO: 515391 - DNA, 201 bp, Homo sapiens
aggaaaatgaaaacatcttgtggtgaattcagagggtggaatgctctacagcagtttaaatgactgaactagagctatgtgatcatgtgaaatctgaaaaraataagttgagcaaaaaaattacagtatgacaaaatacaataacatttacataaaattttaaaacattcaggataatgctataacacattgttcttgatt

SEQ ID NO: 515392 - DNA, 201 bp, Homo sapiens
attagcacacaatttagagcagtctggagtgaatgaaaagaaatatgataaaataagcatataatagcctctaaggtattagtaatgttctgtttcttaasatgagtggtaaatatcagggtatagtaaattattaaataaattattaaattattaaaaataaaaaattatttttaaactgtgtatatatacacatacata

SEQ ID NO: 515393 - DNA, 201 bp, Homo sapiens
accctagaacttaaagtataataaaaaataaaaataaaaactagttacgcttattttttttgtctttttttttttttttcctttttctggagaacaaggcatcatgctacctgacttcaaactacactacaaggctacagtaaccaaaacagcatggtactggtcccaaaacagagatatagaccaatggaacagaacaga

SEQ ID NO: 515394 - DNA, 201 bp, Homo sapiens
tagatacccagtagtgggattgccggatcaaatggtagttctacttttagttctttaaggaatctccacactgttttccatagtggctgtactagtttacrttcccaacagcagcatagaagtgttctctgatcactgcatccatgccaacatctactgtttttttatgttttgattatggccattcttgaaggagtaaag

SEQ ID NO: 515395 - DNA, 201 bp, Homo sapiens
aaaagttgccccacagagattaggggtgtgcctaaaattactcacatggaactcagattgcctgaatctggattggattattttgataaagagtaaaataytacattgattttaatttcatctagcatatgaagggtaaggtcatggtatgaatttgtgataatagacaagtataccatgtagattattaaaataaatgtt

SEQ ID NO: 515396 - DNA, 201 bp, Homo sapiens
gggaggcggaggttgcaatgagccgagatagggccactgcactccagcctgggtaacagagcgaggctccgtctcaaataataataataataaaataaataaataaaagaacaatctgtattttaaagcatgctgtattttatgagaaacatccaatttaactttaagatattaaacagaaacacatatatgttcccatca

SEQ ID NO: 515397 - DNA, 201 bp, Homo sapiens
atctactgtttttttatgttttgattatggccattcttgaaggagtaaagtggtattgcactgtggttttgatttgcatttccctgatcattagtgatgtkgagcattttttcatatgtttgttggccatttctgtatcttcttttgagaattgtccattcctgtccttagcccactttttttatgggatttttttttttc

SEQ ID NO: 515398 - DNA, 201 bp, Homo sapiens
atggaactcagattgcctgaatctggattggattattttgataaagagtaaaatactacattgattttaatttcatctagcatatgaagggtaaggtcatrgtatgaatttgtgataatagacaagtataccatgtagattattaaaataaatgttttatatacaattttatttttgtcttgagaggagaggaattctata

SEQ ID NO: 515399 - DNA, 201 bp, Homo sapiens
ggaggcggaggttgcaatgagccgagatagggccactgcactccagcctgggtaacagagcgaggctccgtctcaaataataataataataaaataaataaataaaagaacaatctgtattttaaagcatgctgtattttatgagaaacatccaatttaactttaagatattaaacagaaacacatatatgttcccatcat

SEQ ID NO: 515400 - DNA, 201 bp, Homo sapiens
ttctcccactgggttgtctgtttactctgctgactgttccttttgttctttgcaaaagctctttagtttaattaagtcccagctatttatctttgtttttktttgtttgtttgtttgtttgttttttgagacagagtctcactctgtagcccaggctggatcttggctcactgcaacctccacctcccaggttcacaccat

SEQ ID NO: 515401 - DNA, 201 bp, Homo sapiens
gaggcggaggttgcaatgagccgagatagggccactgcactccagcctgggtaacagagcgaggctccgtctcaaataataataataataaaataaataaataaaagaacaatctgtattttaaagcatgctgtattttatgagaaacatccaatttaactttaagatattaaacagaaacacatatatgttcccatcata

SEQ ID NO: 515402 - DNA, 201 bp, Homo sapiens
gggtgttgctgtggctgctgtgggggatgggggtgacattcccaggtcactggatttgtgtacctaggaggattatggctgcttctgctgagtcatgcagrttgtcagggaagtcggggagagccggcagtcacaggccttacccagctcccacacaaaccaaagggcctgtctcactctcactgcctcacacaacagtcc

SEQ ID NO: 515403 - DNA, 201 bp, Homo sapiens
aggcggaggttgcaatgagccgagatagggccactgcactccagcctgggtaacagagcgaggctccgtctcaaataataataataataaaataaataaataaaagaacaatctgtattttaaagcatgctgtattttatgagaaacatccaatttaactttaagatattaaacagaaacacatatatgttcccatcatac

SEQ ID NO: 515404 - DNA, 201 bp, Homo sapiens
cctgatggtagtttcttttgctgtgcagaagctctttagtttaattagatcccatttgtcaattttggctttagttgccattgcttttggtgttttagacrtgaagtccttgcccatgcctatgtcctgaatggtactgcctaggttttcttctagggtttttatggttttaggtctaacatttaagtctttaaatccatc

SEQ ID NO: 515405 - DNA, 201 bp, Homo sapiens
aaaatattcaaaaggataggtatttttatagatgttgataagttaatagctataaaattatatattaatatagcccatttcaaccaagagaattttttttaacttttatgtaggtttgtgggtacacatgcaggtttgttatataggtaaacgtgtcacgggggtttgctgtacatattatttcatcacacaggtattaag

SEQ ID NO: 515406 - DNA, 201 bp, Homo sapiens
gtagttttgcttttagctctttgaggaattgctatattgctttccacaatgattgaactaatttacactcccccctcacagtgcataagcattcccttttytccacaaccttgccagcatctgttatttttttactttttaataatagccattctttgtggacctgggaggcggagcttgcagtgagccaagatcgtgcca

SEQ ID NO: 515407 - DNA, 201 bp, Homo sapiens
atttattaaataggggatcctctccccattgcttgtttttgtgtcaggtttgttgaagatcagatagttgtagatgtgtggtgttatttctgaggtgtctyttctttctcttccattggtctatatatcagttttggtaccagtaccatgctgctatggttactgtagcctttagtatagtttgaagtcaggtagtgtgat

SEQ ID NO: 515408 - DNA, 201 bp, Homo sapiens
tttttgtgtcaggtttgttgaagatcagatagttgtagatgtgtggtgttatttctgaggtgtctcttctttctcttccattggtctatatatcagttttsgtaccagtaccatgctgctatggttactgtagcctttagtatagtttgaagtcaggtagtgtgatgcctccagcgtgttcttttggcttaggattgtctt

SEQ ID NO: 515409 - DNA, 201 bp, Homo sapiens
ctatccgtgagcatggaatgttcttccatttgtttgtgtcctcttttattttgttgagcagtggtttgtaattctccttgaagtggtccttcccatccctygtaagttggattcctaggtattttattctctttgaagcaattgtgaatgggagttccctcatgatttggctctctgtttgtctgttattggtgtacagga

SEQ ID NO: 515410 - DNA, 201 bp, Homo sapiens
aattgccttctttgtctcttttgatctttgttggtttaaagtctgttttatcagagactaggattgcaacccctgctttttttttttttgttttccatttktgtggtagatcttcctccatccctttattttcaggctatgtgtgtctctgaacgtgaaatgggtctcctgaatacagcacattgatgggtcttgactctt

SEQ ID NO: 515411 - DNA, 201 bp, Homo sapiens
ggtagtgtgatgcctccagcgtgttcttttggcttaggattgtcttggctatatgggctcctttttggttccatatgaaatttaaagtaattttttctaaktctgtgaagaatgtcaatggtagttttatgggaatagcattgaatctgtaaattactctggctttgcctactttttaacgggtttgtttttctcttgtaa

SEQ ID NO: 515412 - DNA, 201 bp, Homo sapiens
ttgccttctttgtctcttttgatctttgttggtttaaagtctgttttatcagagactaggattgcaacccctgctttttttttttttgttttccatttttktggtagatcttcctccatccctttattttcaggctatgtgtgtctctgaacgtgaaatgggtctcctgaatacagcacattgatgggtcttgactcttta

SEQ ID NO: 515413 - DNA, 201 bp, Homo sapiens
atttaaagtaattttttctaagtctgtgaagaatgtcaatggtagttttatgggaatagcattgaatctgtaaattactctggctttgcctactttttaaygggtttgtttttctcttgtaaatttgtttaagttccttatagatgctggatattagacctttgtcagatatacagtttacaaatattttctcccattctg

SEQ ID NO: 515414 - DNA, 201 bp, Homo sapiens
gttttgcatgtctgttaaaacacacacacatgcatgcactcatgctctctctttctcacatactctgtctctctctcttcccgccccccgcccttcttccyctctctctctctctcaatctctcctttcaccctctaaattacccagttacctgtcaaacagaaggctttctgcccatgtacacctagcttttcttcagcc

SEQ ID NO: 515415 - DNA, 201 bp, Homo sapiens
ctttacactttttggtcttttttgtctttaacaaatataaaaaattatctgaaagcctttttccaaatccaaacaaatctaaactttaaaattcacttctmatctttttgtatgcattcaaagtgatcaattttcataaagaaatgctccctagaaatgtaaattaagctcctaacgttaaagataggaaaacagtagaag

SEQ ID NO: 515416 - DNA, 201 bp, Homo sapiens
caatgtgaagaagaaatttaaaaagtaatcccatttataatagccacaaataaaataaaatacctaggaattaatttaaccaaagaagtgaaagatctgtwtaatgaaaactagaaaacactgatgaaagaaattgaagagaacaccaaaaagtagaaagatattccatgttcatggattggaagaatcaatattgataaa

SEQ ID NO: 515417 - DNA, 201 bp, Homo sapiens
tctgggcatccatgtggagttttcatgtataattcaagttactgcatatataaacaggtagttgcatgtgcagttttcccactagggagcatttatgagatttttttttttttcagatgcttgttatgcaagcctttggaaaatttgacatgaaaggtgtagcttacaatttaaaattgtaaagatagatcatgggtcgta

SEQ ID NO: 515418 - DNA, 201 bp, Homo sapiens
agaaacatgcagagaaaatataatcaagaatttatttggcagatttataacatctgcagagctcagagctcaaggaaagaccataacacataaaatatgarcatcaataaatgttcagaatgtgtcactggatgtgaaatatatttgtatttcctttgtgtttaatacaatgtagacacaaccttaataatcctttacact

SEQ ID NO: 515419 - DNA, 201 bp, Homo sapiens
taaactgcagaatttcttgaaaataaaactaaagaaaatcctatatatatataaaatgattgagttattagggtaaaatatatagtacttaatgtttatawcaataaaaatgaaatttaagaaaatcagaaaatcttaaaagctgtgaaatagagcagtcctcaaaaaaaaaggcagaaggaaggactgaattaaaaaagc

SEQ ID NO: 515420 - DNA, 201 bp, Homo sapiens
atacctgggtgattaaataatctgttcaacaggcccccatgatatgagtttacctacgtaacaaaccttcacatgtatccccaaacctaaaataaaagttaaaaaaaaagagaaatactttagtggttgataagccctttcctgccacttggtctttatctccccagctgagttgcactagtgtagcttcccagccatggt

SEQ ID NO: 515421 - DNA, 201 bp, Homo sapiens
tttatacattctaaccattctaatcatatgattagaattattagaatattattagaatggttggaacatatacataaaaatatatatatacatatatatayacacacacacacatatatatatgtatctccccccaagagaactgaaaatacatctccacacaagaacttatacatgaatacttaaagcaccattattcat

SEQ ID NO: 515422 - DNA, 201 bp, Homo sapiens
gttattagggtaaaatatatagtacttaatgtttatatcaataaaaatgaaatttaagaaaatcagaaaatcttaaaagctgtgaaatagagcagtcctcaaaaaaaaaggcagaaggaaggactgaattaaaaaagcagaaattaatgctagaatttatagaagttaaatctagaaaatagaaaaacaacagaactaaca

SEQ ID NO: 515423 - DNA, 201 bp, Homo sapiens
tgattaaataatctgttcaacaggcccccatgatatgagtttacctacgtaacaaaccttcacatgtatccccaaacctaaaataaaagttaaaaaaaaaragaaatactttagtggttgataagccctttcctgccacttggtctttatctccccagctgagttgcactagtgtagcttcccagccatggtgtgtgctct

SEQ ID NO: 515424 - DNA, 201 bp, Homo sapiens
tatttccatataggcacatcaactcatatcaaagatttctaagatgagaagggaaaactcaatgttaaagacaaacttttgtacataaatataacacatthtaattgcatatttttcctgttttgcttacttatttttctaatgaaaagaactgtcaacaatatatatgtgggtatttcttacacaggaaggcataacttc

SEQ ID NO: 515425 - DNA, 201 bp, Homo sapiens
aagtgctgggattataggcgtgagccactgcgcccagcggtgattatagaatctaaatgagaaaatgcatgtaaagcattcaacacatagtaggggctctrtaaataactgagaagagaactttctccttgatcaaacataaaatggtaacattaaaagttttggcgattttccaaatttgccaagatttagaaacaaata

SEQ ID NO: 515426 - DNA, 201 bp, Homo sapiens
ttgatcgtggtggataagcttttttgatgtgctgctggattcggtttgccagtgttttattgaggatttttgcttcgatgttcatcagggatattggtctmaaattctcttttttgtgtgtgtctctgccaggcttttgtatcaggatgatgctggcctcataaaatgagttagggaggattccctctttttctattgatt

SEQ ID NO: 515427 - DNA, 201 bp, Homo sapiens
atttccatataggcacatcaactcatatcaaagatttctaagatgagaagggaaaactcaatgttaaagacaaacttttgtacataaatataacacattataattgcatatttttcctgttttgcttacttatttttctaatgaaaagaactgtcaacaatatatatgtgggtatttcttacacaggaaggcataacttcc

SEQ ID NO: 515428 - DNA, 201 bp, Homo sapiens
tgcacttctaatagaaaatattctttcatggaaagtgcctgtcaaggtaatatgattagctgtatcaatggtgcaacccatgtagttaaacggaccatcartttgaaggaaggataagggatgctcaccaagacattaaaggcattagcacaggagagggcaaagcacctgggatgaggcatttactcagtgttcactgct

SEQ ID NO: 515429 - DNA, 201 bp, Homo sapiens
cctctttttctattgattggaatagtttcagaaggaatggtaccaactcctctttgtacctctggtagaatttggctgtgaatccgtctggttctggacaytttttggttggtaggctattaattattgcctcaacttcagagcctgttattggtttattcagagattcaacttctttctgttttagtcttgggagagtgt

SEQ ID NO: 515430 - DNA, 201 bp, Homo sapiens
gctccatttagcacagcatttaggcagagggagagagagttgaaagagcactgcacagataatttgtggacagaaattttagtcctaattgttcctctaaygagatgattgaatttgtgcaaattactttaccctcatagatttcagtttccatatttataaattaaggggtttagggtctctcagagttgatttatggga

SEQ ID NO: 515431 - DNA, 201 bp, Homo sapiens
gtatattctcttgattaggggtagagaattctgtagatgtctattaggtctgcttggtgcagagctgagttcaagtcctggatatccttgttaaccttctrtctcattgatctgttgaatattgacagtgggatgttaaagtctcccattattattgtgtgggagtctaagtctctttgtaggtctctaaggacttgcttt

SEQ ID NO: 515432 - DNA, 201 bp, Homo sapiens
tgttaattttatgttaaaaaatcattgagggcctctattagaaaggctttaatccagacatgaatttgtttgtttctgtgaaagttaggggcactactaayctgggtctcttttagcccctggcttaatcagaattcttgggtttagctcttttacttgccttaatcaacagtctgagcttatcacctttaacttgagttt

SEQ ID NO: 515433 - DNA, 201 bp, Homo sapiens
ttcaattcctttctgttagttagttttccttctaacagtcagatccctcagctgcagggctgttggagtttgctggaggtccactccagaccctgtttgcytgggtatcaccagtcgaggctcagttggaaatgcagaaatcacccgtcttctgtgtcagtcacactgggagatgcagactggagctgttcctattcagcc

SEQ ID NO: 515434 - DNA, 201 bp, Homo sapiens
aaaataaacacaattgccttttgatttctatagctgagagggattcaggcaaatataggaggtactaacaagaagaggcaacgtattttctaagctatcayagtcagcagtgtctacttggggttatgtttattcttgaaagttatacttaaggcctccacaggctctgcgcctcagcccctcctaaatgtaataactttg

SEQ ID NO: 515435 - DNA, 201 bp, Homo sapiens
cagttgcatccatgttgctgcaaaggacatgatttcattcttttttatgactgactacatagtattccatggtgtatatgtaccacattttcattatccakttcaccattatgggcactaaggttgtttccatatctttgcacttgtgagtagtgctacaataagcttacaaggccgggtatctttggtagcacaattttc

SEQ ID NO: 515436 - DNA, 201 bp, Homo sapiens
aaatttgatgtcacataaaattgttcctgtgatttttttttttccaaaaaccattcttagcttgggttagacttggatggcaggtcacagtttgctgattycttgtttagagtatgatcacttaaggctgcattgtagataataaactgaaacgagacaaggctcctaggtacaagtgtgaagtaaacaaagaggtgggtt

SEQ ID NO: 515437 - DNA, 201 bp, Homo sapiens
gttttctgcacatagctagccaattttcccaacaccatttattaaaaagggaatcctttccccattgcttgtttttgtcaggtttgtcaaagatcaaatgrttgtagatgtgtggcattatttctgaggcctctgttccatttgcctatatatctgtttttggtaccagtaccacgctgttttgtttaccgtagacttgta

SEQ ID NO: 515438 - DNA, 201 bp, Homo sapiens
aggcccgatataaagatcttatcaatgaatgtaaatgggctgaactcacttataaaaagttcagattagtaacagagcaaaatctaaaactaggctgaatrtaagatacacagatagatacacagacaagggaaggaaggaggaggaggaagaatgagagattgatttagaatggttgaaaataaaggataaacaaagatg

SEQ ID NO: 515439 - DNA, 201 bp, Homo sapiens
atataagataagatcaataaagaaataaaggacttctcttttttttcccccaaggcggcagatcagagactcttttagcatgcttcacctatttggaagcaaaaaaaaaaaaaaacacacacacacacaaaacagtgcacagtcatatagtgctcttttattcaagaaggagcacagaaattcaaatcctggaaaataaaa

SEQ ID NO: 515440 - DNA, 201 bp, Homo sapiens
aaaaattcaaaaaataacatgttggtaaggatgcagagaaaatggaacacttacacactgttagtgggaatgtaaattagtataacctgtatggaaaaccrtatggagatttctcatagaactgcaaatagaactgccattctaggcagcaatcccactactggctatctacccaaaggaaaaataattagatctaaaaga

SEQ ID NO: 515441 - DNA, 201 bp, Homo sapiens
gcatatctaatatgaaccatgttaatttctgggtattgcaaagtggaagtgatatatatttccatctttgtgcttcttgtattgtttgaattattttttaygaacatagatacattttacaaaaacaagaataattattttgtccatattaaaaaaaaatctaaataagtggaagtatatatatccagatgtgaacagtgg

SEQ ID NO: 515442 - DNA, 201 bp, Homo sapiens
tagctcacgccagtaatcccagcattttgggatgctgaggcacacagatcacttgaggtcaggagttcaagaccagcctggccaacatgatgaaaccccayctctactaaaaataaaaatacaaaaattaactgggtgtggtggcacatgcctgcagtcccagctactcaggaggccgaggcaggagaatcgcttgaacac

SEQ ID NO: 515443 - DNA, 201 bp, Homo sapiens
tcctaagtgaattaacaggaacaaaaaccaagtgccacatattctcatttataaatgagagctaaacattgagcatacatggacattaatatgggaacgasagacactgtggactactagatgggagaggaaaggacaggtcattggttgaaaaactacctatcaggtattaggttcactacatgggtgacgggatccata

SEQ ID NO: 515444 - DNA, 201 bp, Homo sapiens
gtctttaatccattggggtttgggatgtgtgtgtgtgtgtgtgtgtgtgtgtgttggctcctgtgtccttttaaccctattagtctttggcagcagcttarcttttatggcatgagatgtcccagactcatcttgtaaattccttgtaaattccctgtcttacacctagaatctactatttctccatttcttctgttttct

SEQ ID NO: 515445 - DNA, 201 bp, Homo sapiens
tgctataatcatgaaaaggttcacatgatataccacctgccattttgggcatgtcatcttatttaacaattaactcatgaagctgtagctgcattttgttktttttttttttagaaaatatttatttttaattttcatttgagactaggggaatgcatgtacaggtttgttacaagggtatattgcctaatgctgaggttt

SEQ ID NO: 515446 - DNA, 201 bp, Homo sapiens
taaatgtaataactttgcacatatggaagatcctagtaggccaaatcccttctgtttgaaaatatttttccaatcagaaggacaaaaacagtatcacagawatatgttaaataaacagctcttttcttttatatattcttgttcacaactaacataatatttttttctgccttgtaggtaccagaggtttgaaaaggcatt

SEQ ID NO: 515447 - DNA, 201 bp, Homo sapiens
ataataaattttgttaacctagaaaatatgtgaaaaataatgtcaagaaatttctctaagaaaagtattgcagaagttaaaggaaaaatacaatagcatgtatatatatatatatacatgaagttcagaaagcaggattaatggatggaaagaaggaagatgaatgcatggataatttagggatacatatataaatgtggc

SEQ ID NO: 515448 - DNA, 201 bp, Homo sapiens
tgcctgtagtcccagctactcaggaggcggaggcagagattacaatgagctaagactgcacgactgcactccagcctgggcaatacagcaagactctgtcaaaaaaaaaaaaaaaaacacgctctcaataaactaggtactgaaggaacatacctcaaaataataagagccatatatgacaaacccatagccaaaatcata

SEQ ID NO: 515449 - DNA, 201 bp, Homo sapiens
ggtggtggcacgcacctgcagccctagctacttgggaggctgaggtaggaggatcacttgggccaagagtttgaggttacagtgagttgtgatcatgccastgcactccagcctgggcaacagagcgagaccctgtctataaaaaacaaaaaatactaagagtgatgggaaagctgaggtctagtcttggctaaactagta

SEQ ID NO: 515450 - DNA, 201 bp, Homo sapiens
taataaattttgttaacctagaaaatatgtgaaaaataatgtcaagaaatttctctaagaaaagtattgcagaagttaaaggaaaaatacaatagcatgtatatatatatatatacatgaagttcagaaagcaggattaatggatggaaagaaggaagatgaatgcatggataatttagggatacatatataaatgtggca

SEQ ID NO: 515451 - DNA, 201 bp, Homo sapiens
agacatccatatataaatctagaacccttgaatgggacagcatacttcctgagagaactggaatgaaggaagtcatgagatgcagaaaggaatggtagacaaaaaaaaaaaaaaaatcataaacttgtggaaacctaaacaaaaattgatcatataaagcatatacactaatgtctaattcagggggttaaaaattaaaat

SEQ ID NO: 515452 - DNA, 201 bp, Homo sapiens
aagatacttgtacatgcatttttatagtggagcaattcacaattgcaaaatcatggaaccaacccaaatgcccatcatcaacaagtggataaagaaactgktgtgtgtgtgtgtgtgtgtgtgtgtgtatacacatatatacatacacatatacacacacatacatgtatatatgtgtatatatgtgtttatgtgtatata

SEQ ID NO: 515453 - DNA, 201 bp, Homo sapiens
acaattctaaatgtgtgtaacatagcttcagtgtacacaaaagtccactgtcaatagttaaagaattttaactcctttcatttagtaattgatagattaascaaacaaagtgtcaggaaataggagatttgaacaatactgtataattgaaatcttgatttaatggacatgtgtagagtccaacaagtggagactatactt

SEQ ID NO: 515454 - DNA, 201 bp, Homo sapiens
aaaccatcaaatcttgtgagaactcttcactatcataagaacggcatggggaaaactgcccccatgattcagttacctccacctggtcccacccttgacaygtgggaattattacaattcaaggtgagatttgggtggggacacacagccaaatcatatcaccatcccttgaaccaaaacgaacaaggctgaccttatttg

SEQ ID NO: 515455 - DNA, 201 bp, Homo sapiens
gtcatggaaagaacacctaccatgcatacttctagggtagttattgagctcaaatgaaatatttgaaagttcttagcaaaaggtaactgaatattattacratttttgttatagctgtagtaaattcctgccattctttggggttacatacagcagaatagtcttctgaatccctttagtagagcatagcactggttagaa

SEQ ID NO: 515456 - DNA, 201 bp, Homo sapiens
agtaaagaacaacatggacagagacctaaaggaaatcaggtaaattatatgaacaaaggggaatttcaacagagatagacattattaaaagaaccaaccaraaattctggaaatgaaaaatataatgggcacactggggatagtcaaacttaaaaattcactagagggattcaatagcagacttggacagaagaaagaata

SEQ ID NO: 515457 - DNA, 201 bp, Homo sapiens
atactctatatattttttgagacagggtctctgttgcccactctggagtgcagtggcctgttcatgactcactgcagcctcaacctctcaggctcaatcartcgtcccaccttagcctcccgagtagctgggactataggctcaccccatcacacttggctaatttttaaattttttgtagagatagggtttcaccatgtt

SEQ ID NO: 515458 - DNA, 201 bp, Homo sapiens
tgggtaataagtcatcagaaatgttcaaggattttcaaggaaatgatgaacataatgattgaaaagatagggattctcaggagaaacatagaaactgtatgtttttttaaaagcaaaatagaaattctagaagtaagaaatataaaacctgaaatgaaacatttactcagtagaagattggacataataaagggtcagtga

SEQ ID NO: 515459 - DNA, 201 bp, Homo sapiens
atagcaacctgctgcacttcctgtttttactatcacccaaagaggggagtaatacatatagaatagggagtgtgtgcatatatatatgtgtgtgtgtgcgtatatatatatatatatatatatatatatatgcacatacacatacacggtatttacatgttgacaattacattaatagagcatcttgaagtataagtgtat

SEQ ID NO: 515460 - DNA, 201 bp, Homo sapiens
atttccagataatctgcctctttccctccctctctcttcccctcccctcacccacttcctttctacacacacacacacacacacacacacacacacacacmcaaccaaaaaaaaaaaaaaaaaagggattctaccgattttaccaggatatgcatgtaacaatacctcattaaagaggaaaaaattgggttgcaaaaaata

SEQ ID NO: 515461 - DNA, 201 bp, Homo sapiens
ttattgtaagatttgtgccttttaactgaagtggtgcagtatgaattctaggtagactgtgataagttaaaattgcatattatggtgccaagaggattttwaaaaaaatgtaaataggtatgttgctttaaaaagtcaaaagaggaaattttaaaatacttttaaaatattcaatccaaaagaagacagaaaaggaggaca

SEQ ID NO: 515462 - DNA, 201 bp, Homo sapiens
tagcaacctgctgcacttcctgtttttactatcacccaaagaggggagtaatacatatagaatagggagtgtgtgcatatatatatgtgtgtgtgtgcgtatatatatatatatatatatatatatatatgcacatacacatacacggtatttacatgttgacaattacattaatagagcatcttgaagtataagtgtata

SEQ ID NO: 515463 - DNA, 201 bp, Homo sapiens
tttccagataatctgcctctttccctccctctctcttcccctcccctcacccacttcctttctacacacacacacacacacacacacacacacacacacacaaccaaaaaaaaaaaaaaaaaagggattctaccgattttaccaggatatgcatgtaacaatacctcattaaagaggaaaaaattgggttgcaaaaaatag

SEQ ID NO: 515464 - DNA, 201 bp, Homo sapiens
taaataacgaccgtaagttcaaactggatggatactcaaaaagcagacatgaatttttttttttaaagtcagagattgtcagactggataaaaagcaagamctaattatgtttggtgtataagggaagcactttaattattatgacacaaataaatttaaagaaaaaatgtgaaaaatatatatcctgcaaacagtaaata

SEQ ID NO: 515465 - DNA, 201 bp, Homo sapiens
attgaatttgtgcaaattactttaccctcatagatttcagtttccatatttataaattaaggggtttagggtctctcagagttgatttatgggagaggagrtacatggactctggagaaactgctattccctgcccagaaaaatatttttaagaatatgtgaataaaatacatcacacacacacacacacacacacacaca

SEQ ID NO: 515466 - DNA, 201 bp, Homo sapiens
aagcttgttttattctgctgttaatatttgtgattgcattgtgaaattcttgtattgtgttattcagctctgtcagacctgttaggttttatatacatatacacacacacacacacacacacatacatatatacatacatacacacacatatacgtacacacacacacatatatatacacacacatatatgtgtgtggggg

SEQ ID NO: 515467 - DNA, 201 bp, Homo sapiens
agacaaagtgacttcaaaaacaaagaaagtatcaccagagataagagagacattataatgacaaaagtttaatcaggcagacatgacaatcctaaagaagrtaactgagcttcaaatgcatgaagcaaaagccgacaaaccaaaaaagaaatagataaatataataattcatagaacatgtcaaaaaatcatgaatatata

SEQ ID NO: 515468 - DNA, 201 bp, Homo sapiens
atttgagctcacttcatagcagtctttgatttctaaccttttcaaaacaataaccctgaattgacaaattattttggtatttaagcattggtttagataaragcatttcagtgttctcttgcctttattttagctatttaggagttattcctgaaattcaatttattttctcttcaaagttacgttttttcaatttattca

SEQ ID NO: 515469 - DNA, 201 bp, Homo sapiens
agcttgttttattctgctgttaatatttgtgattgcattgtgaaattcttgtattgtgttattcagctctgtcagacctgttaggttttatatacatatacacacacacacacacacacacatacatatatacatacatacacacacatatacgtacacacacacacatatatatacacacacatatatgtgtgtgggggt

SEQ ID NO: 515470 - DNA, 201 bp, Homo sapiens
attaagtttgagtaatgatatcagtgttaatttcatgattttattggtttgattgtggttatgtaagtgaatgtcctaatttgtggaaaagaaacgctgargtattcaagaatatgttggcaacttactctgaaatggttcagaaaaaaagtgatctttgtactgtacttgaaacttttctgtatctttgagattacttaa

SEQ ID NO: 515471 - DNA, 201 bp, Homo sapiens
ttgagattacttaaaaaatataaattttcacttactatcacagatctagactctactattacatgcattctctcaatagatgctgtgtggtttggaagtcratttggccacagaaatgctgcttttaattctttgtctttaggacattattctgcttttgaaaattcaggtaacctctccaaactcattattactgtgcca

SEQ ID NO: 515472 - DNA, 201 bp, Homo sapiens
tggtgcctctagttagccatcttgaaagcctcctccccaccgtgaataatttccagaaaaatataaatggctaaaatcgacataagaaataaaaaaaaatkaaatagtccagtaaccccacagagaaaattcaaacagtaatcaaaaatagaactcctgaaaggaagcacttggttttatttacgagttctacaaaacctt

SEQ ID NO: 515473 - DNA, 201 bp, Homo sapiens
gagcagtgacttatgcctgtaatcccatcactttgggaggctacagtgagaggatcacttgagcccaggagtttgaaaccagcctgggcaacatggcaaayttgtctctacaaaaaaaaataaaaacaaaaacaaaacaaaactagccaagtggggtggcatgtgcctgtagtcccactacttgggaggctgagatgggag

SEQ ID NO: 515474 - DNA, 201 bp, Homo sapiens
cacacagtagcaacagcaacaacagaagtatttgccctttcctgaaattcaaaagccgtacatacataaggtaagccacttatctgggaaagacttctggygtggctgttgcaacctgaggaaagcataacctgaagtgacttgggacttacctatattacagacacagatgggaggaaaaaatgaaaaggaaaggcagcc

SEQ ID NO: 515475 - DNA, 201 bp, Homo sapiens
ctaactgaaactttgtatgttttgatcagcatcttccctttccccaccactatcacctccagcctctgtcatcaccttcctgtttctatgaaatcaatttwaaaaaaatccatatataacaagtgagatcatacagtatctgtctttctgtacctagcttctttcacttagcataatgtcctctagttccatccatattgt

SEQ ID NO: 515476 - DNA, 201 bp, Homo sapiens
aggagtacatgtgcaggtttgttatataggtaaattgcatgtcacagaggtttggtgtacagattattttgtcacccaggaaataagtatagtacccaatrggtaggttttctgtcctcaccctccttccaccctccaccctcaggtaggccttgggtctgttgttcccttctttgtgtccatatgtactcaatgtttagc

SEQ ID NO: 515477 - DNA, 201 bp, Homo sapiens
tcatgccgtctgcaaatctgactttgttttttctagctttccttctcttgcttgattgttctagctagtacttacagtactgtactgatcaggagtggtgwaagtgggcatccttttcttgttcagttcttagaagaaatactttcagcttttgcctattcagtatgatgctagctgtctgtttttcatatatggccttta

SEQ ID NO: 515478 - DNA, 201 bp, Homo sapiens
ccccaccactatcacctccagcctctgtcatcaccttcctgtttctatgaaatcaatttaaaaaaaatccatatataacaagtgagatcatacagtatctktctttctgtacctagcttctttcacttagcataatgtcctctagttccatccatattgtcacaaatgaaaaaattttcttatttttaaaggctatatata

SEQ ID NO: 515479 - DNA, 201 bp, Homo sapiens
taatatatgaacatataaaagtgttatatttttataggaaatggattataggtactcaaaagtcaaaacgggagtctagtcagaaagctattgaagtgctytaggcaagataagatgagggcataaactacagtggtaatagtagagatgaagaaatagaaagattaggatgtagtttagaagaagacgagccaagaaggg

SEQ ID NO: 515480 - DNA, 201 bp, Homo sapiens
gaagagaataagaaacttaaagtgctccccccacaataatagtcctggctcaaaaagtttagtgatgaaattctacctaacctgtaaaaatcagattaccygtggttcttaaactttactagaacattaaaaaagaggaaattgtcaaaattgatattataaagtacaacattgatctaaaaccttaaaacctattgtact

SEQ ID NO: 515481 - DNA, 201 bp, Homo sapiens
tatgacacttgaggaagaggaattctggtttccgtgaatcacttttgggggaaaaagaggagggagacaggagagcagtagaacgtctgagataccttgcytcagagaccttcaaatcccctttaaagtgctcagcatgccagagtgccatactctggggtctagtggtctgagcctcaacaacccctacttcagcactca

SEQ ID NO: 515482 - DNA, 201 bp, Homo sapiens
ctttcatttcaataagaaaaggctgttctttcctaagttatctactttggttctctattcaaccattgaaacaaaatactaaaaattttatgtaagtacgracactgtgacaaaccgttagtaaagttgaaagcaaacaatcagggaagaaagagtatgaaggaagatccaattacaatattaaagaattcactgcagaat

SEQ ID NO: 515483 - DNA, 201 bp, Homo sapiens
atgtggatgcccacattgcatctacaccacctggaaatcaacaggtagacaagcctagcctacattctcctcctcaaggaagtgcccacaaaagatgtggsttactggctacataaaaagacaggacattggggaccacataccttttgggacatagtgaaaattgaggactaccactatgatataaagatatagtactca

SEQ ID NO: 515484 - DNA, 201 bp, Homo sapiens
tacaatgtgatgttttgatctatgtatacattgcagaaagattcccttgagctaattcacatattgttaccttaccaatttattttttatgatcataacawtaaaaatcttttttgaaggccaggagcagtgacttatgcctgtaatcccatcactttgggaggctacagtgagaggatcacttgagcccaggagtttgaa

SEQ ID NO: 515485 - DNA, 201 bp, Homo sapiens
tttctcctagctgttgacgttggtgctcgtgacctctttatggtgagtcattttcagagatgattttgtgccttcagttctaaggctaagttgtcagcttytgtgaccataaaaaggattactgtcattttgcagccttagacacagggtgggaaagcattattccatcttgacttgcaggtttgctttcgtgaaactggt

SEQ ID NO: 515486 - DNA, 201 bp, Homo sapiens
gctgtactaatttgcattcccagcagcagtatacacaggttcccttctcctcatatcctcaccaacacttgttctttttttcttttttgacattagtagcyattctaacaggcatgaggtgatatctcgttgtggttttaatttgtgtttccttggtgattagagatgttgagtgtttttcatatatctgttggcatctac

SEQ ID NO: 515487 - DNA, 201 bp, Homo sapiens
tcggtctcagtttagccaataacaatataaagtgtccatgttagttcaaatcaccttcatccagtagcctttctactgataggctaatcctaaaccatgakgatttttacacataaaagatgaaaatctaaaataagggaagtatagaagtggttttactgtcctttttatttgcaaaagcaaacagtcattattcagaat

SEQ ID NO: 515488 - DNA, 201 bp, Homo sapiens
gtgattctttgtatttctgtggtatacagttataatgtctcctctttcatttctgattttatttgaatcttctcttttttctttgttagtttaccaaaagkttagtcagttttgtttatcttttcaaaaaccaacttttagttttcttgatctcttctgttatttttctaatatctattttgtttcctttttctctattat

SEQ ID NO: 515489 - DNA, 201 bp, Homo sapiens
tattgatagcccaaggtctgctttaaagaagctcaaaatattgagagcattaaagcctcagagttctatttaagctcatgaatctactatatacatttaargttccatgtagaaattgcctaaaaggatttatttttttaatagattcattcttactatctaaatttcatctagccagaggtctatagcctatagattgaa

SEQ ID NO: 515490 - DNA, 201 bp, Homo sapiens
ccacataggctcagctattccatagtaactgaggggaggtgaaatgggaggttcataatataaactgaacccactgtcactgcatctcatctcggcttcaratgattcttactctccctgctatgctttccattttttcttgtgccataacaattggggtatttcacttcattgagtattggacattactttttccaggca

SEQ ID NO: 515491 - DNA, 201 bp, Homo sapiens
accatttattaaataaattggaaaggacaataaattgttctttcccattgcatgttcttggctgctttgttgaaaatcaactgaccataaatacttggatktgtatctgggctttctatcttgtaccattcttcaatgtgtctgtttttatgccagtactatgctgcttttgtttcaatagctttataatatgttttgaag

SEQ ID NO: 515492 - DNA, 201 bp, Homo sapiens
tgttctttcccattgcatgttcttggctgctttgttgaaaatcaactgaccataaatacttggatttgtatctgggctttctatcttgtaccattcttcartgtgtctgtttttatgccagtactatgctgcttttgtttcaatagctttataatatgttttgaagttattgtgttgcctccagctttgttccttttgtgc

SEQ ID NO: 515493 - DNA, 201 bp, Homo sapiens
attaaatcatattgaggtcatctctgcattaaaattcagaaccaacaagtttgatcactgtataaccactttacacacacacacacacacacacacacacmcacacacacccccacaccattttctctttcaaggctttcttgacactatattatcttagtctgtcttttaaattgactctttattggagaattaccagac

SEQ ID NO: 515494 - DNA, 201 bp, Homo sapiens
taaatcatattgaggtcatctctgcattaaaattcagaaccaacaagtttgatcactgtataaccactttacacacacacacacacacacacacacacacmcacacacccccacaccattttctctttcaaggctttcttgacactatattatcttagtctgtcttttaaattgactctttattggagaattaccagacta

SEQ ID NO: 515495 - DNA, 201 bp, Homo sapiens
tgaacaattttttgttttttctgtatgtaagattgtgtcatcaacaaacagaatttcacaccttcctttcctataaggatactttttatttcttttccatrtataattgcactggctaggatttccagtgctgtgttgaatagaagtgataagagtaggtatccttgtcttatttctgatcttagaggaaaaactttcaac

SEQ ID NO: 515496 - DNA, 201 bp, Homo sapiens
atccccatccattgatggtcactccagattcttctctcttactcccttacactgtctcttacaaatcatcagtgcccatatgctgtcgattctttctttamaagatcacttacatccctttcttttgttatattccagctgccaccaccccaattcaggtccttgttactgaatattagtgttgtctgttcctttaatacc

SEQ ID NO: 515497 - DNA, 201 bp, Homo sapiens
ttagtcctaattgttcctctaacgagatgattgaatttgtgcaaattactttaccctcatagatttcagtttccatatttataaattaaggggtttagggyctctcagagttgatttatgggagaggaggtacatggactctggagaaactgctattccctgcccagaaaaatatttttaagaatatgtgaataaaataca

SEQ ID NO: 515498 - DNA, 201 bp, Homo sapiens
atatatggcctttattgtgttgaggtatattccttccatatttttttgagtttttatcatgaccagatgttgaattttgtcaggtgctttttctgcatctrttgagatggtcatgcagtttttgtccttcatcttgttaatacactgtatcacacttattgatttatatatgttgaaccatacttgcgtttctgggataaa

SEQ ID NO: 515499 - DNA, 201 bp, Homo sapiens
gaagttattgtgttgcctccagctttgttccttttgtgcaagattgttggctctctagggtattatctggttccatattgattttaggactgttttttctrttttgctaaaaaaaaatgacattggaattttgataggaattgcaatgaattagtacattactttgggtagtatgaacattttaacactactgtttctact

SEQ ID NO: 515500 - DNA, 201 bp, Homo sapiens
tacagctgttcatagtagtagtagtatgttgtgattctttgtatttctgtggtatacagttataatgtctcctctttcatttctgattttatttgaatctkctcttttttctttgttagtttaccaaaaggttagtcagttttgtttatcttttcaaaaaccaacttttagttttcttgatctcttctgttatttttctaa

SEQ ID NO: 515501 - DNA, 201 bp, Homo sapiens
ctttagcttctaagtttttctagaagccatagaaaaaaggttttcaggtctcttttggaaaagaaatatttaaaagtatacaactatcaagttgcatgagrtatttcactttttataagaagccatttctttcagcagttactagagtttgtttttcagaggagtgggtagcaatctgtcatcaaagtgttgacaagtgaa

SEQ ID NO: 515502 - DNA, 201 bp, Homo sapiens
ttggttgttcagaaagatgcttcatttatacatgtttgtgagttttccaagattgttcctgttactgatttatagtttcatgccatcgtggtcagaaaatrtatgatttcagtcttcctaaatttgttaagacttgttttgtggcccagcatatcatatgttctgaagaatgttcaatgtactcttgaaaagaatttatat

SEQ ID NO: 515503 - DNA, 201 bp, Homo sapiens
tgacaaggtagaggtggtatagctgcgggccactccaaaattttccactatcttttctatttgtagataaaggatttctgttttttttttttttcatttgmgctcacttcatagcagtctttgatttctaaccttttcaaaacaataaccctgaattgacaaattattttggtatttaagcattggtttagataagagcat

SEQ ID NO: 515504 - DNA, 201 bp, Homo sapiens
aggcgcctgccaccgcacccagctaatttttgtatttttagtagagatggggtttcaccatcttggccaggttggccttgaactcctgacctcgtgatccmcccgcctcagcgtcccaaagtgctgggattacaggcgtgagccaccgtgcccagccgatatctttccatttatttgtgtcttctttaatttctttcatca

SEQ ID NO: 515505 - DNA, 201 bp, Homo sapiens
gatcttatagcccacacttacgtctaaacataaagtactcataatagtaccacaaatagaaccatctatatatgggtatgtttcttgtttcttttctttctttttttttttttttggcttatatggttgtatatcagtgttctatagttttaaaattaactagaataagttttagatattcttgaccatttgttttgacct

SEQ ID NO: 515506 - DNA, 201 bp, Homo sapiens
tttttgttatagctgtagtaaattcctgccattctttggggttacatacagcagaatagtcttctgaatccctttagtagagcatagcactggttagaatsctggtgctgaagagaccttgctaggtcagcacattacctacattgacttattcttccacatgggccatgtggtgctgagttcaaatttgtgctagttggc

SEQ ID NO: 515507 - DNA, 201 bp, Homo sapiens
ggacatttagtgctatgaaattccttcctaacactgccttagctatgtcccagagattctgttatgctgtatctttgttcttattattttcaaagaacttmtggatttctgccttaatttcattgtttatccaaaagtcattcaggagcatattttttaatttccatgtaattgcatggttttgagcgatattcataattt

SEQ ID NO: 515508 - DNA, 201 bp, Homo sapiens
gtcctgccaagtgaggaggaacaggattgggaaactgcttaaaaaagcaccctggccacgttttggtagagcagctgtgctgtgctggggatcctttccayccctggtcagcttggactctccaaagcctgactggagcagctaaggcacccaaatagcaaagattgtggcctgcccctcccaccaggagcgccttctcag

SEQ ID NO: 515509 - DNA, 201 bp, Homo sapiens
tctttaatatctcatgcacttatgcagaaatttgcatttcaagattcttttgagaaagtaaatacatcttgagagtcttccccattttctagttcaataayttcaaggtttggacatcacatttcgcagtaaggacagtgaactaaagcaaaactgataaacacagcagctgttggccaaggtatcagcaacaaaatctgt

SEQ ID NO: 515510 - DNA, 201 bp, Homo sapiens
cctcccaaagtgctgggattacaggcgtgagccaccgcacccagcctttttactaaaagtatatcttgtctgatggaagtatagctatctccaatctttcygtttctatttgaatggaatatctttttcccatccatttactttcagtctgtgtgtcctcagaggtgaagtgagcctcttgtacacagcatgtagttgcgt

SEQ ID NO: 515511 - DNA, 201 bp, Homo sapiens
ttttccaaaaaccattcttagcttgggttagacttggatggcaggtcacagtttgctgattccttgtttagagtatgatcacttaaggctgcattgtagawaataaactgaaacgagacaaggctcctaggtacaagtgtgaagtaaacaaagaggtgggttctttcaggcccatttcctcaggtccagcaacctcatagt

SEQ ID NO: 515512 - DNA, 201 bp, Homo sapiens
ggttctggtcccattgtcccagaggcagcctccccagtacacatcactgcccacttcccaggtgcaggacagtatgtgggctagagtgctgcaaacctggkcatacctgagtctagccggtgcctcaatgctacagccctctgggctgatgttgggggaaatgtcagcagggctccagtgatgtggacattcaggggctat

SEQ ID NO: 515513 - DNA, 201 bp, Homo sapiens
tccatttagacttgtgatatgacattttaattttataaagtgactccaaaaaggggccaacaaataaaaaaaaaagactaaacatcttacaatgtttcatkatggctctctccaagatgcatgattcttttatatttttaattgacagataacaattgtgtctgtttatggggtacaatgtgatgtgtgtatatttgtggg

SEQ ID NO: 515514 - DNA, 201 bp, Homo sapiens
tagatattcttgaccatttgttttgacctattaattttaagatcagtttatcaagttgaggggattttgattagagctccactgagttttacagaatataktgggtcagaattgaaatcttcataaatgtattgtcttcctaggtataaacatgtgtatgtctgtattttaatcagatgttcatttatgttctttagtaat

SEQ ID NO: 515515 - DNA, 201 bp, Homo sapiens
aactgaagttatcatgtaggtacttatataacaagacagaaaatttccataaatctttattgatgaaattaaaagaggacaatttttgtgatatagctctrtatatgtgaagaatggaatccttttcagaggaggtaacacttcacttaattggatttgaaagctggtgtttcctatcatcaaaatctttagctgacgttc

SEQ ID NO: 515516 - DNA, 201 bp, Homo sapiens
gcactagataaaggtgaattggcactagctgaagtggcaagaaaaagagctagtgacattgatgcagaatcaataacctctggggttggtaagaattaacrctatttttaagtgctttttattttaatcaatagttagtatcatttctatttatgtttggaggacatggatggttaatttgaattactttgtttgtaaaga

SEQ ID NO: 515517 - DNA, 201 bp, Homo sapiens
aaagaattctctcctatatcaggcaaagtatttcatatgagattttgggtttgatgggtgattgtttttgtttagaagctgctagaatcattttaaaccayagtattctgaagaagacagatcagaagccttagaatgaatttgaaagtccatttaaattttataacataaaaaatgaaagtttataaaaattactgtaat

SEQ ID NO: 515518 - DNA, 201 bp, Homo sapiens
tgggtagaggaggtctcttgtggttcagattgcagcagtccatagtggggatgtggaccgctgaagttttgtgacttactctttcctggcattaccaagcscctcagggtcccagtcaatcttggatgaggtggccacttgctttcttttccttctgtacctcaggtgtttcccatgacttctctgttagactctagttct

SEQ ID NO: 515519 - DNA, 201 bp, Homo sapiens
gttaattgataaataataattgcatatatttatggggtacaatgtgatgttttgctataggcatacatagtggaatgattaaatcaagctagttaacatakccatcatctcacataccatttttttttgtggtgagtacatttgaaatctgatactttagccattttgaaatatacaacacattattattaactttagcca

SEQ ID NO: 515520 - DNA, 201 bp, Homo sapiens
agtccaacctgggttacaaggtttttaaaaagacaaatgtgctcagagttggttaacaacgtagtgaggatatttgttatttgatataggattcaaagggrtgaacgtcatggaggcaagagcatgcatacattggttagataactaatctatgcctggaggcaggagcagtgatttggagactatggacagcatcctaca

SEQ ID NO: 515521 - DNA, 201 bp, Homo sapiens
caataggctttgtttctggatgctttcagaaggccaagtgtctgcacaggatcttcatgtgtggctagattcttgctctcggtttcacaagctatgtatamtggaagagtattttttgtgttgtaatttaggctgcaatccagtagatggcgcttaagagtaatgactggcagataagttcttagccacgtggctcttgta

SEQ ID NO: 515522 - DNA, 201 bp, Homo sapiens
atttttcaaaccaggaaattaccagcattctttttaactggtggcacacttgagtaagattcaagatgtttagagctctttaaaaaacttgtgtctttcaraaaacctgcatgacatataatgcttgaagactaaaaaggatgttgatttggtcctctcccaccttgcccatctagttattattaaagatttttacaaact

SEQ ID NO: 515523 - DNA, 201 bp, Homo sapiens
cttgaatgcaggctccatgaggccagggagggcaagggcattgtctgttttgttcattgctgtattctcagcacttggaacagtgcctggctcatatgatwtactaaatatatatattttggggtaaatgagtgaatttatgaaaaagtggctgtacctattctttgagaaggattctgaaggaatgtccaacctcacttg

SEQ ID NO: 515524 - DNA, 201 bp, Homo sapiens
taccatgtttataggaatgatgacgttatatgatggggaaatatcctccatccctatccctctagccatttaggaaaacaaagcaggaagttaagtcctarccaattttctgggaattttccttagttgtcctgtaccctgccttttattccagggtatcagatataatgagggccatctttgcattttaaagctatttaa

SEQ ID NO: 515525 - DNA, 201 bp, Homo sapiens
acatttctcaatgtgatgacatactaaatccaggaaaagaagtgtatttttcctctttctagagtttatttctggatggttaaccaaggatacactagagyatgtttattctaatgggccatatttcaaataacagttgtggcgaatgattctttttactatttctaaggtatcttggttttattggcaatagaagataat

SEQ ID NO: 515526 - DNA, 201 bp, Homo sapiens
ttaagcttatattctgagttgttttttactttttccttaaaagaagtgaacattttttcaaaatagggttttgttttcattctttcaaaattatttctctrtaactggcacttcaaatatatattttatttccaaatgaattttgaataaataacacaaatatatcaacacaaccaccagtacacaattgatgctttggct

SEQ ID NO: 515527 - DNA, 201 bp, Homo sapiens
agggccatctttgcattttaaagctatttaaaattagtaagagtgaaagagaatgtgaagagattatcacaaaatttcagcaaaatgaagaaactccccarttcaccaaaatgcatctcacttcctgtgtattctctgatgaggttactgtggccagcggataattcctagccagaaagcttagtgtacccactttgagcc

SEQ ID NO: 515528 - DNA, 201 bp, Homo sapiens
ttaggagaagaatattatttatatcttttaagcatcattactaagaaaatgatttaccttacaaagtattgtttcttcatattaaatatagaattaaggaygactttgatattttcatcgtttatctgctttaaaatgtataaagattgaaatttcagttaaagtagatttaacatttgtttgctccctcctaaaactctt

SEQ ID NO: 515529 - DNA, 201 bp, Homo sapiens
catgctgtggaaatatttaattaaggaggctctaaagttgggaacaccaggggcagtagaagacgacctgctgaactgaaaacaggcacgaaatggaaggwagcctacatactgatgggtgaggtcttcttaatcccacttggttctgagaatgtcatacctatttgtacactttccaagaaagaaggagcttgagatatt

SEQ ID NO: 515530 - DNA, 201 bp, Homo sapiens
aactaaggatcactagatatttgaggaatatcttcaacaggaaagaaaacaaaatgaataggtgaatgggtctctgaagaaacagagataatgtaggaagsggggaaaaaagtacaacagagacctaaggaaaaatactaaatccatgaagcaagaaacaaaaacagaagcttcagaaaacatttgaagttatacaggtct

SEQ ID NO: 515531 - DNA, 201 bp, Homo sapiens
gactaatttgccttttttcaaacttaaatggattcatacctatattcttttgtatttggctccttttattcaacattatgaatctgagaatctttcgtatkttgcatatagttataattcttccactcttcttgctgtataacaatattccaatgcatgaatgtacttcaatttattctactttagatggatatttgggtt

SEQ ID NO: 515532 - DNA, 201 bp, Homo sapiens
ctgagtcttgctctgtcgcccaggctggagtgcagtggcacaatcttcgctcactgcaacctctgcctcctaagttctagcaattctcctgccttagcctmccgagtagctgggactacaggcgtgcaccaccacacctgactaattttttatttttagtagagatggggtttcaccatattggccagggtggtcttgaac

SEQ ID NO: 515533 - DNA, 201 bp, Homo sapiens
tttttaatcaggttttatcagttttgtagaaacttaaaaagtgacttattttaaatttataactttgtattaaatgtacaagttagaatgtgatataaatrtatgtataaactaagcatctaaggttaagtgtgaaaacacagcaaatttatattcgtgatatttgagaatattacgttttatatatatatatgtcaatgt

SEQ ID NO: 515534 - DNA, 201 bp, Homo sapiens
gggaccatgtgatgtcagttgaggatgctgctccacattgagccattgtggcagttgtctaatgtctgcatagggccattttctcttactttgggctgagygaacctgtagcgaggagctttcaaaaaatattggtgctctgattagtcttaccattaggaaaaaagaagggctaccccaaaaatgccagtcctaagagat

SEQ ID NO: 515535 - DNA, 201 bp, Homo sapiens
aacatgagaatccccaaaagttaatgtttggtgggccattaaggaatcttgcattaccagccctccatttttattgtgatataattcatataccctaaaaytcacccttttaaagtgtacaatttaatagtttttagtatactcaaaagtttgccaccatcgccactgtcttagcccattttctgttgctagaacagaata

SEQ ID NO: 515536 - DNA, 201 bp, Homo sapiens
ttgctagtttggggacattctcctggattatatcctgaagtatgttttccaacttggttccattctccttatctctttcaggtaccccaatcaatcgcagrttcggactttttacataaccccatagttcttggaggttttgttcgttccttttcattcttttatctctaatcttgtctgcctttcttatttcagcaagat

SEQ ID NO: 515537 - DNA, 201 bp, Homo sapiens
aggagctgatgcaaaacagtcggtgtgtgctgagcaaatggaagaacaaatatgtctgtcaggtaaaatgatttgacaagcctttgcagtgtttaaccaayggagctgaaaactatgtagtaattggtattcttgtgttatgttaggtaatggacaaaaacttttttagcagtggttatttcatagtttgaattctagttg

SEQ ID NO: 515538 - DNA, 201 bp, Homo sapiens
tccattgctggcgacctagtgtgatcttttgggggtactaaagagccttgttgtgtcctgttaccagagttggttttctggtttcttctcatttgggtagkctccgtcagacggaaggtctagggttgaaggctgttgttcagattcttttgtccctctgcgtgttctcttgatgtagtactctccccctcttcctatgga

SEQ ID NO: 515539 - DNA, 201 bp, Homo sapiens
atttgtgtgtgtataaaacattcacacatcacacatatctctgtacatttatctgattatttcctgaaaataaatttctataaatggaattactgagtcasaagtgtgtatacattttaaggaatcttgatatgtattgtcatatattcctgtcactatttttttgtgaaatttacttactacacccacagttgaaataat

SEQ ID NO: 515540 - DNA, 201 bp, Homo sapiens
taaattggaaaaagagtagaaaaactatatttgcaaatgacatgattctattttgaaaattccagagagtccacataaaaaccattatgttacaggaaagsggtcctgatccagaccccaagagagggttcttggatcttgtgcaagaaagaattcagggtgagtctgcagtgcaaagtaaaagcaagtttatttaaaaaa

SEQ ID NO: 515541 - DNA, 201 bp, Homo sapiens
attactatttttttttagagacacagtcttgctgtcttgcccaggttggacttaaaactcttgggctcaagcagtcctcccgccttagcctcctgtgaggstgggacaataggtgtatgccactgttcctggctttattatttcttccgttaatgtttgagagaattcaccagtgaagacatcttaacatgcaggtcgtgt

SEQ ID NO: 515542 - DNA, 201 bp, Homo sapiens
aaggaacattgctccaaggctagagcttccatttcttaatccttacaatgatcacacaaatgtgttgggcattaaaagtccatcattcttgtcattagaakaattcaaagattatgtcttccttaggaggtaattagaagtgtcattacatggaagccaagaaatgttgttttatagaaagcaatatgtattcagaatctc

SEQ ID NO: 515543 - DNA, 201 bp, Homo sapiens
taaaagagaagccattttaaaccatgaaagaaggaaaaacaccatagaaaagtctggtagtttcaattaagattgtgaacaggtatttcctatcctactgkgaatggtatttgctgtatttcttccccttttctattttctcttttctcttttggcccactataggagacatattgctcatctttgatattctctgatgct

SEQ ID NO: 515544 - DNA, 201 bp, Homo sapiens
aaataaaaaaaaaagactaaacatcttacaatgtttcattatggctctctccaagatgcatgattcttttatatttttaattgacagataacaattgtgtstgtttatggggtacaatgtgatgtgtgtatatttgtggggtacaatgtgatgttttgatctatgtatacattgcagaaagattcccttgagctaattcac

SEQ ID NO: 515545 - DNA, 201 bp, Homo sapiens
ctaagtagaaaattggcttaccaagcagctgaaaacaaaacaaaacaaaggaaacatagaaataagctctctgtgactgaattatgtgattttcagaggasaaacatttttaaattattttatggatattagaaaactgctggtctaatttcacaccacagaactctaaacaacagtccacacatatattttagacgtagt

SEQ ID NO: 515546 - DNA, 201 bp, Homo sapiens
gggccaccagtgctttatcagcatgagcgccattgtaaaccatcttcttagacagaagctcactccagagagagaaggtcagacttgaaatatttttcatwgatgagttttgtatatacatgaaatagattttattgagttattttttgaggttgtttttgagtcatggtattggagattaaatgataaaaatgttagtgc

SEQ ID NO: 515547 - DNA, 201 bp, Homo sapiens
catgaaaggtctaaaatggaggctgagagcctcagaaggaaaggacagagttggagttcgctcccctctactcaccattttgatgaatgttgtacttggtrtcctagacaaggttcccattatgaagtggctacattgtctgggttataaaccctggggttcattgtcatgcaccaggaaaatttagggcacagacacaca

SEQ ID NO: 515548 - DNA, 201 bp, Homo sapiens
ttgttatttttttactagttcctctaggtgcaatgttagattgttaatttgagagctttctaacttcgtgatgtaggcatttactgcgggaaattttcctsttaacattcctttcacccagagattttgtatgttgtgtctctgttttcgttgatttcaaaaaattttaaaatttctgccttaatttcattgtttactcaa

SEQ ID NO: 515549 - DNA, 201 bp, Homo sapiens
tgtcgcagagcaacaactttgtgctacatattatgccttacaagttgaggacattacaaagagggtctcgaggctcgtatgcaccccgtacctcacagcargttggctgaagggtaccttccagaaaccaaagtctatgaatgcccagactggccaaatgtgaagcctgccttcaacagaggagcacatgaactaatagcc

SEQ ID NO: 515550 - DNA, 201 bp, Homo sapiens
gctccagtgttggatgcatatatatttaggatagttagatcatcttgttgaatcgaacctttttttattattattatgtaatacccttctttgtccttctygactattgttaaagtctgttttatctgatgtaagaatagtggccccggctcttttttgatttctgtttgcatgatagatctttctccatagtttctttcc

SEQ ID NO: 515551 - DNA, 201 bp, Homo sapiens
tttttattcaacttgcaactccatgccttttaagtgggatgtcaggaccatttacattcaaagttaatactgatatgtgagattttgatgctgtcattgtrttactagctggttgttttgtagatgatgtttagttgcttttgatgtgtagttgctttatagtatttgtgggctatgtgcttacttgtgtttttgtggtag

SEQ ID NO: 515552 - DNA, 201 bp, Homo sapiens
ttcagcacattcgcagcatctctctgtggtgtagggggaaagataagcccctcgccagatccattcccgggccttggggatccccctccgatcactcgcaycgcgcccaatacctttgttaggtattctaggcctcaggctttcttagataggggctgtggctggcagacaggctatacccttcccagataaccctgtgga

SEQ ID NO: 515553 - DNA, 201 bp, Homo sapiens
tgcttatacttactagtaaatatgtatgtttttctaaacttttctttttattctggtaagacatttatatatttatcctgtatacaaatgacagatttcaytgaaaacgattacaaataagagaggtatccatttgaaaacaattgctactattttgtttttaattgataatttgaataagtaaagatgtagagcaatagg

SEQ ID NO: 515554 - DNA, 201 bp, Homo sapiens
acaggaattagggtgaggatgtccaatttgatttcaaaatttgacaagttttgtggtgcctgtcttctgttagtacacacaacttgttagtaagtagttawttaggaatgaaataaaaatctttttctttcaatctctgtgtattatatttccaaatggctattaacttattaggacataaatacttattaagttgcttta

SEQ ID NO: 515555 - DNA, 201 bp, Homo sapiens
gcatcaaattcacttcaggaagaaaaaaaaaatgcttccttcccaggcctgtattattgaatgcagtattcaggcttcaaatagtttcatttaggtaatayatatagtctcaagaatgggagtcctcacatttgacacgctctgttaaatatatagttcattcaaaccccgtccaagatattgctatgcagtcacttattt

SEQ ID NO: 515556 - DNA, 201 bp, Homo sapiens
cctttccttatatacagcttttaaaatatgattctgagtgaagaacaggcaaaagagcctactctgcctactactctgttgtcctcaggaagccaaaggartagagagaagaggagatatacaccattatcgcttttgcccatgaaaatggtaggccacctaccattctcatttttgtctattaattttgacattgaaata

SEQ ID NO: 515557 - DNA, 201 bp, Homo sapiens
ccctcactttccttatctttagaatgcagattataatacctaactttggggtattgaaaatgttaaataagacaatgcatgaaaagtcaaacagtatcctrttttcttgcttactactattattattggtgaggttactctttacggaaacttatgcacattcaagtattttcctttgtttttttatagacagtcttgctt

SEQ ID NO: 515558 - DNA, 201 bp, Homo sapiens
atatatatacacacatatatgtatatgtatgtgtatgtatatatatataatgcttgagatttaattttgtagatggaaattgaagctgtggaagcagataygatcacccaaggatagcagatagaagaggacctaagacagaattttgaggaatattagacagaaacagaaaaatggtacttaaggaagagtggtcagaaa

SEQ ID NO: 515559 - DNA, 201 bp, Homo sapiens
ttatgtcttgaatatgttgaggtcaacatgagacatgttgatattttaaatcttgaaaaaaataccctgcactccaaaatgcataaatcatttccaaacakagatgaattgaggaaaaatagcatcctggaggacaaaacacctcaggcattcatcccctgacctaaccaaatgacagatcttgaagcaacttcaaagctg

SEQ ID NO: 515560 - DNA, 201 bp, Homo sapiens
aagcatcagattgatgtaaaggtgagcttaaatatttacacaaaatagaagaatggaaaattatgtcttgaatatgttgaggtcaacatgagacatgttgrtattttaaatcttgaaaaaaataccctgcactccaaaatgcataaatcatttccaaacatagatgaattgaggaaaaatagcatcctggaggacaaaaca

SEQ ID NO: 515561 - DNA, 201 bp, Homo sapiens
ggggtccagttttagtttttctgcatatggctagccagttctctcagcaccatttatttattatactttaagttctagggtacatgtgcacaacgtgcagrtttgttacatatgtatgcatgtgccatgttggtttgctgcacccatcaactggtcatttacattaggtatttctcctaatgctatgcctcccccaggccc

SEQ ID NO: 515562 - DNA, 201 bp, Homo sapiens
ttctagaggaaacaaatttgacaaggaggttaaaaatacagggccccgaaggcaagtaataataagatggctgtcttgggacctagaaaggggagaagacrtgttgcccaactccagaggttggtttacgagtttgaaaggcatctgatttcagaagccttttcctgtaaatgccgggcgatatctcatactgtccctgac

SEQ ID NO: 515563 - DNA, 201 bp, Homo sapiens
gacagtgtttcaccatgttagccaggatggtctcaatctcctgacctcatgatccgcctacctcggcctcccaaagtgctgggattagaggcgtgagccascgtgcctggcctgcaactgcttttgacattttcattgtgaaatctttgtccatgcctatgtcctgaatggttttgcctagattttcttctagggtttctg

SEQ ID NO: 515564 - DNA, 201 bp, Homo sapiens
aactccagaggttggtttacgagtttgaaaggcatctgatttcagaagccttttcctgtaaatgccgggcgatatctcatactgtccctgactggttagtrtaaaagcaacgttcttcccctaagaatgtgcaaagtcctcctttctcagcagtgaggaagtctaggcctcgggggttttggagagtcactgctgccagag

SEQ ID NO: 515565 - DNA, 201 bp, Homo sapiens
accaaggtttgtttgtctgagggccatgacaaaggctgcagcatttctctgatcttgcttttccttttgggcctgttcctcttcatccctattatagaacmccgaggttgccaggtttaataatgcctccagattttgtttagggcctggggcttgcttttggagctttctcctgatatctgcagctgattgggtaataaa

SEQ ID NO: 515566 - DNA, 201 bp, Homo sapiens
accctcacaaaatgttataatttttgctttcaacagactagtgtatattaaataaaggtaatggagttctttatatttgcccaggtatttactgtttctcytacttttcattctttcttgaagatctgcatttccatctcgcatttattttagcctaaagagcttcttttagtctttcttacggtgtagttctacttgtga

SEQ ID NO: 515567 - DNA, 201 bp, Homo sapiens
tattactatttttttttagagacacagtcttgctgtcttgcccaggttggacttaaaactcttgggctcaagcagtcctcccgccttagcctcctgtgagsctgggacaataggtgtatgccactgttcctggctttattatttcttccgttaatgtttgagagaattcaccagtgaagacatcttaacatgcaggtcgtg

SEQ ID NO: 515568 - DNA, 201 bp, Homo sapiens
atgccattattcaattcctttttatggctgagtagtattccatagtatatatatatcacattttctttatccgctcgttgattggtatttggactggttcyatatttttgcaattgcaaattttgctactataaacatgcaggtgcaagtatcttttttgtataatgacttcttttcctctgagcagatcccagtagtggg

SEQ ID NO: 515569 - DNA, 201 bp, Homo sapiens
atggttttcagctccatcaggtcatctaaggtcttctctacactgttgattctagttagccattcgtccagtattttttcaaggtttttagcttctttgcratgggttcaaacttcctcctttagctcagagaagtttgttattaccgattttctgaagccttcttctctcaactcgtcaaagtcattctccatccagctt

SEQ ID NO: 515570 - DNA, 201 bp, Homo sapiens
tgttaacaggtttctaaagttttttcctttgtctacccagccctactaattagaaatatatttctaataagcaatttaccaataatttcagaattgacaarggtggtaggttgaaggagattaactaatcatttaaagtccaactttgtgttggtaagttcttattcattctttttaactttttaagatattctgctaacc

SEQ ID NO: 515571 - DNA, 201 bp, Homo sapiens
attgccttctttgtctcttttgatctttgttggtttaaagtctgttttatcagagactaggattgcaacccctgctttttttttttttgttttccattttygtggtagatcttcctccatccctttattttcaggctatgtgtgtctctgaacgtgaaatgggtctcctgaatacagcacattgatgggtcttgactcttt

SEQ ID NO: 515572 - DNA, 201 bp, Homo sapiens
ctttcacatattgatggacgtttggtttgtttccagattttcgctaacagattaaaaatgctatgtactttcatctacaagtctttgtatgaacatatatwttcatttctcttgtcaaaaacctacaagtttaaaatggctgggccatatgctaagtgtttgttcaactttagaagaaactgttttctaaaatgattgtgt

SEQ ID NO: 515573 - DNA, 201 bp, Homo sapiens
tttcacggttgtcttaaaattgcaatagagatatatttctactccaatatgcctgtttatttgtattattttaaagaacatttctgctatatcgatttcarttcccaatgaagaaaggtcagttttctccttttagccaaagacagtaaatgtttagcacactgtgagttgattttactggaagtactagttcaaactgtg

SEQ ID NO: 515574 - DNA, 201 bp, Homo sapiens
tattttcctttgtttttttatagacagtcttgctttgtcacccagcctggaatgcagtggcatgatactagctcactgtagcctcaaactcctgtgctcamgtgatcctcccacctcagcctcctgagtagctaggattataggtacgtgccaccgtgcctggctaattttttaatttttttgtagagacgaggtcttgct

SEQ ID NO: 515575 - DNA, 201 bp, Homo sapiens
tatttgtagtcttttatcgcttctccccttccactccttcctccaagtccccacagtcctttgtatcattcttaggcctttgcatctttataacttagctyccacatatcagtgagaacataagatttttggttttccattcttgagttgcttcacttagaataatagtctccaatctcatccaggtcactgcaaatactg

SEQ ID NO: 515576 - DNA, 201 bp, Homo sapiens
tttataacttagctcccacatatcagtgagaacataagatttttggttttccattcttgagttgcttcacttagaataatagtctccaatctcatccaggycactgcaaatactgttaattcattcctttttatggctgtgtagtattccatcatatgtatatatgtgtgtgtgtatatatatgtgtgtgtgtgtgtgtgt

SEQ ID NO: 515577 - DNA, 201 bp, Homo sapiens
taccttataatcttcctgacagtgtctagctattttttaagttgaattacttctttattactttttaaaatgcagatatcttttaaacacttgttacttartatgagaataaatctttaaaaattggcattttattactgctttctggaatctttaaaattaaataatttttatgcattagagtaggtgtatatatatctc

SEQ ID NO: 515578 - DNA, 201 bp, Homo sapiens
tatctgacagcaaatatttatagaacatttactatgtttaagaacctgggtataaaatagtaagttacctgttatggctcaagttgcttacagttttgtgsaggagacaaacaagtaaatacgtagttaaaatcttaagtgtgtaagatgatgttatgattgaggaaagcacaacccatctaactgaatcctagtggggcc

SEQ ID NO: 515579 - DNA, 201 bp, Homo sapiens
gcctaaatatttgccctggcatgcttatactggtccaagcaagcattaagtcatagcctgtttctcttccttatttgaaggtgtttttacctttcttagcrttccacaagttacttcctccttcctttgttctcctctgcctttgcctcttttaacaagttctaagttgctagccagtcgggacaaatacaaaatgtgagg

SEQ ID NO: 515580 - DNA, 201 bp, Homo sapiens
ctatcacttttattgatcttttcaaagcaccagctttttgttgcatttatcttttgtatttttgtttgtttcaatttcatttagttctgctctgatcttgrttatttcctttcttctgctgggtttgggtttggtttgttcttgtttctgtaattccttgaagtgaccttagaatgtcagtttctgctctttcagtctttt

SEQ ID NO: 515581 - DNA, 201 bp, Homo sapiens
tacttttacatttataaatatttgcatcaagttaatgggattagccattttttgaaaaaggccaaatttgaaaatgagagttgtggatgtcagttgtgatyttagtctcagcacccagttatttctgtagttttagtgaataagtattgagataagtggtgaaaatggccctactaacagaagcagggagccagtcattca

SEQ ID NO: 515582 - DNA, 201 bp, Homo sapiens
gccgaggcaggcgaatcacgaggtcaggagatcgagaccatactggctaacacggtgaaaccctgtctctactgaaaaaaaaaataccaaaaattagctgkacctagtggcacgcacctgtagtcccagctattcaggaggctgaggcaggagaattgcttgaaccaagaggcggaggttgcagtgagctgagatcgcgcc

SEQ ID NO: 515583 - DNA, 201 bp, Homo sapiens
acaaaacaaaacaaacaaaaaaacagctctaagacataagtccttctctcagtaattacgggttaactgttcactgtctgaaatgcttgttaccagaagtrttttggatttggggtttgtttggtggtgtttttttttttttttcaattttggaatatttacaggtacatactgagatatcttgaggatggtacccaggtc

SEQ ID NO: 515584 - DNA, 201 bp, Homo sapiens
tcatatcctcctccctcaagtagaccccagtgtctgtttttttcttctttgtgttcataagtttttatcatttagctcccacttataagtgagaacatgcrgtatttggttttctgtttctgcattagtttgctaaggataatggcgttcagctccgtccaagttcctgcaaaaaacattatcttgttctttttaatggct

SEQ ID NO: 515585 - DNA, 201 bp, Homo sapiens
ttaaacaaagcgagaagaagaaaaaaccaagtacatgattatgtgtctgggcagatgatcattatcaagtttacatgggagagagtaaaatatatataaamtatatgtgggaaaaatagaaacagtgctgaaataattaggttgctgaattataacccagtagactacatgaattaatttatggtatgatacgaataacta

SEQ ID NO: 515586 - DNA, 201 bp, Homo sapiens
ggttaactgttcactgtctgaaatgcttgttaccagaagtattttggatttggggtttgtttggtggtgtttttttttttttttcaattttggaatatttrcaggtacatactgagatatcttgaggatggtacccaggtctaaacacaaaacaccttacacacatagcctgaaggcaattttatataatatttttgataa

SEQ ID NO: 515587 - DNA, 201 bp, Homo sapiens
aaaagtattcagtgggttaagggatatgggactggaatacacgatatgggatttttgccattccttgcctcctttggtttcctctggagcctgattatctrtacgtccactgcttctgtgatttgcctgatttctttgcagtaattttcctttctgttaaagtttactggagttggtttctgttgttttaaacaaagcgag

SEQ ID NO: 515588 - DNA, 201 bp, Homo sapiens
tggttaaaaactgtgtcctgattcagaaagtagaagaaaatagggattttctaaatctaatcttatttcagttgctatcgggggaaattcagccagacatygggtaaaattcacccccgatatttcacgtaggttcttttctatcttccctaagtgtcggccagtctgagaaataaagggacagagtacaaaagagagaaa

SEQ ID NO: 515589 - DNA, 201 bp, Homo sapiens
gaaggcaattttatataatatttttgataattttgtgcatgcaacaaagctgtctacattgaaccaatggaatgtaaaggtgtcactgtctgagccacccrtgtggacaatctgtaattgtttggcatcaccatcattcctgactgaatttatatgctaccaataagcagtcattttcttacacattcattcataagtact

SEQ ID NO: 515590 - DNA, 201 bp, Homo sapiens
gattggttaaaaactgtgtcctgattcagaaagtagaagaaaatagggattttctaaatctaatcttatttcagttgctatcgggggaaattcagccagayattgggtaaaattcacccccgatatttcacgtaggttcttttctatcttccctaagtgtcggccagtctgagaaataaagggacagagtacaaaagagag

SEQ ID NO: 515591 - DNA, 201 bp, Homo sapiens
acaatgtttctgtattgtaccaatccttcttccattgtttgctttagtttcagtgcttgtttcatagaagggtctgtgtcagaagtagtcaaaagcagtcktgaacagtcagaacccttctgccagattgtctgtcaatttgttttctggcactggttcttctatgtcttcttcctcatggtctgactactcatagtcgga

SEQ ID NO: 515592 - DNA, 201 bp, Homo sapiens
ctagtttaggcttctcaagtcatatggcctctatctcaactactcaactccgacactatagtacaaaagcagccttagacaatatgtaaacaaacaagcawggctatgctccaataaaactttatttggacactgaaatttgaatttcatataattttcacatctaaaaatatatctttcttgtattttttcaaccatttg

SEQ ID NO: 515593 - DNA, 201 bp, Homo sapiens
atttttgcccgcccatgtttattacagaactattcacaatagccaaaatatggaagcaacctaagtgcccattaatggatggatggataaagaaaatgtgktatatatacacaatggaatattattcagccatcaaaaaatgaaatcatgtcacttgctacgacgtggatggaaatggaggtcattatgttaagtgaaata

SEQ ID NO: 515594 - DNA, 201 bp, Homo sapiens
ttagtagagacagggtttcaacatgttggccaggatggtctcgatctcttgacctcatgatctgcccgcctcggcctcccaaagtgctgggattacaggcrtgagccaccacgcccagcccaacagtccatatcttaattagaagaacagaacagagagaattatgtagtctaagaaaaaattcttttgaaaaatatacag

SEQ ID NO: 515595 - DNA, 201 bp, Homo sapiens
ttcccttttctcagccttgtctcaggcctcagcctttgacctagattactatgttttgacaaagatactattaaataacatcagtaactttcaagaggttkccctattacatgaatgttctactccagttttgctgcagaaaactgggtgattctcactcataattccgaatggaattaacaaagaatttcttgtttcctc

SEQ ID NO: 515596 - DNA, 201 bp, Homo sapiens
tttctgtggaactcctctgaaacaaataagttttaaaaagatttccacttttaagtgcttgaaaaatcttatacaagcctttccattgacagatcttgtgstttgtttttgtaatgctgtttgcagccaaagggaccaattgtcagcttctctctgatgccaccacatagatctaatcttcaaggtggtactgaaggactc

SEQ ID NO: 515597 - DNA, 201 bp, Homo sapiens
atattccacagtgtaccacattttctttatccagtctgtgattgatgggcatttaggttgattccatgtctctactattgtgaatggtgctgcaacaaacrtttgtgtgcatgtatctttatggcagaatgatttatattcctctggatatatacccaataatgggattcctaggtcaaatagtagttttgcttttagctc

SEQ ID NO: 515598 - DNA, 201 bp, Homo sapiens
cccccaatctttgttttatgctcttggtcctaagagtaaaagtgaattttctttcattttaaaaggatcaacagatgtgtttttgttgttatcagtgtatsttatagcaaatattagttgagaaggagatcagtcccacatttctagcacttaatgcaagcaatataggtttttttctttatggaaaaattaactcttttt

SEQ ID NO: 515599 - DNA, 201 bp, Homo sapiens
ttcccaaagtgctgggattacaagtgtgagccactgcacctggcctcttgactttgtaaataatcaccattctgactgatgtgagatgtatctcattgtgsttttgatttgcatttctctaatgatcagtgatgatgagctttttttcatatgtttgttggctgcataaatgtcttcttctgagaagtgtctgttcgtatc

SEQ ID NO: 515600 - DNA, 201 bp, Homo sapiens
gtgtgagccactgcacctggcctcttgactttgtaaataatcaccattctgactgatgtgagatgtatctcattgtggttttgatttgcatttctctaatkatcagtgatgatgagctttttttcatatgtttgttggctgcataaatgtcttcttctgagaagtgtctgttcgtatcctttgcccactttttgatggggt

SEQ ID NO: 515601 - DNA, 201 bp, Homo sapiens
tgtctgttcgtatcctttgcccactttttgatggggttgtttgttttgttcttgtaaatttgtttaagttccttgtagattctggatattagacctttgtyagatgggtagattgcaaaacttttctcccattctgtagattgcctgttcactctgatgatagtttctttggctgtgcagaggctctttaatttaattaga

SEQ ID NO: 515602 - DNA, 201 bp, Homo sapiens
ttggcttttagacttttttagtggacagaaaagaaaatactttttttttttttctcagccaggagtagtggttcacacctgtaatcccagcactttgggtrgtgggtggatcacgtgaggccagaaattcaagaccagcctggtgaacatggtgaaaccctgtctctactaaaacaaaaacaaaaacaaaaacaaatatta

SEQ ID NO: 515603 - DNA, 201 bp, Homo sapiens
gtatatataccacattttctttatcctgtcaaccactgatgagcatctaggttgattccatgtccttcctattgtgaatagtgctgtgatgaacatacacwtcacatatctttatgttagaacaatttatattcctttgggtatatactcagtaatgggattgctgggttgaatagtagttctgttttaagttctttgaga

SEQ ID NO: 515604 - DNA, 201 bp, Homo sapiens
tttctgaataaatatgcagtcctaggtgtgaagttgaagaaaaaccaaagtttatctgaatgtacttgatatatttcttaacaggttctgagttctgtccrcacagaatgggacccactggatgttcgctttggcaccaaacagccttatcaggtgttcacagtggagcactccgtaagtgtagacaaagagcccatggct

SEQ ID NO: 515605 - DNA, 201 bp, Homo sapiens
ccaggtagcaaatagtttaggcttgcttgcttgcttgctttattgattcattcattgattgagacagggtcttggtttttcacttaggttggaatgcagtsgtgtgatcatagctcactataaccttgaactcctgggctcaagcaatcctcctatcttagcctccaaaggagctaagactacaggcatgtgccaccatgc

SEQ ID NO: 515606 - DNA, 201 bp, Homo sapiens
ttttaaatgtgtgtaaagttaatttacacaaattttaatttaaaaaattttaatttgtgtaaattaattacaccaaagaagttttaatctgtgaaactttyaattttaaattacatttaattttttgaataataaatacacacatggctcagaattccaaaggtttctagttaaagggtctactgccaaacttgttctgta

SEQ ID NO: 515607 - DNA, 201 bp, Homo sapiens
tgagatttttttttttttcagatgcttgttatgcaagcctttggaaaatttgacatgaaaggtgtagcttacaatttaaaattgtaaagatagatcatggrtcgtagtttaaaatagaatgctttcatatgtaaacgtgacagtgcctaatgccaatatgctaagatttttggagttagactcttagattaggtcagttag

SEQ ID NO: 515608 - DNA, 201 bp, Homo sapiens
atcattttagggaggaatgattcttaacaatattgagtctcctaatccataaaagtagtacccttctccaattatttaggtgttcattagtttctctctgygtagttttataattttaagtgtaaaggtcttgtacatgctttgttatatttatccctaagtattgcatgtttttggattatattgtaaatatttttatta

SEQ ID NO: 515609 - DNA, 201 bp, Homo sapiens
agtttctctctgtgtagttttataattttaagtgtaaaggtcttgtacatgctttgttatatttatccctaagtattgcatgtttttggattatattgtaratatttttattacaatttttattgttcattgggattatgtagaaataaatttttaaaatattgactatgtatcctgcaatcctgttaagctcattcttag

SEQ ID NO: 515610 - DNA, 201 bp, Homo sapiens
acttgctcaggtgaatgatatgtttggattgattagcgtcagactaattacttatttcaggagacatcctctttaattaaaatattccatagtaaggctaygtgtttcctaacagtccatctcctcaaagaaatatacatcttcttttggtcttatttaatttgttattgttttcattttaaggaaatatttgaatattat

SEQ ID NO: 515611 - DNA, 201 bp, Homo sapiens
aggtcgatgctgtcaggcaaccatgactgtacattttggtattgattggaattgctacattcaatttcttcctagctcacatttctccttttccttccttygctaaaaatggggagaattttgaacatatgtcttttttatatatgtgtcagaagaatttggtaaattctgacaccttcttacgcacatgtttaacatgca

SEQ ID NO: 515612 - DNA, 201 bp, Homo sapiens
tcaagggctttgatgtatattctcttatttttttctcagaaactcctgttaaagtagtagtatcatttgacaagtgagtaaactgaggcatagataagtgkcttgcttagatcaaataacaagttattggtggtgtcacatctttgaactgattttgattccctgttccttactcttcccttaaaaccatttatctattat

SEQ ID NO: 515613 - DNA, 201 bp, Homo sapiens
cagtaagataggtgcttggtttacaaaggttgtgtactcagaggataggagacataactgagagctcatgcagaatgggaggttgtatcagacatccatayataaatctagaacccttgaatgggacagcatacttcctgagagaactggaatgaaggaagtcatgagatgcagaaaggaatggtagacaaaaaaaaaaaa

SEQ ID NO: 515614 - DNA, 201 bp, Homo sapiens
tcacatatgttgattgatgtcacatgtctccctaaaatgtatgaaaccaaactgtgctctgaccaccttgggcacatatcagaaccttctgatgctgtgtyacaggcacgcatcctcaactttggcagaataaactttctaaattaactgagacctgtctcagttagatattcagggttcacaaggtgaaagaaataaaca

SEQ ID NO: 515615 - DNA, 201 bp, Homo sapiens
aactttggcagaataaactttctaaattaactgagacctgtctcagttagatattcagggttcacaaggtgaaagaaataaacactgaaagctataatacmttcctgaaagaaattaagacttaaataaatgtaaagacaccccatgttcatggattaaaagacttggtattgttaagccggcaattgtaaacaaagtaat

SEQ ID NO: 515616 - DNA, 201 bp, Homo sapiens
ttctcaaaaatagggaaagccaatctatgaattcatatgaaactacaaagtgcccccaacaatcttgaaaaagaacaaagtttgtatatttccccttcctkatttcaaaacttattacaagtgggtttttattaacttgtcaagataattctatgtggaatgtgttgttgaaaagagtcaaactctgtaaaatattttaag

SEQ ID NO: 515617 - DNA, 201 bp, Homo sapiens
cctgtattattaggaatatttgttgtgtctttgcatgattttggtatcaggatgatactggttttgtagaatgaattagggaggaatccttccaacttgattttttttttttttttttttggaatagtttcactaagtttggtaccagctctcctttgtatatctgataaaagtagtccatgagttcatctggtcctgggc

SEQ ID NO: 515618 - DNA, 201 bp, Homo sapiens
gcatgattcttttatatttttaattgacagataacaattgtgtctgtttatggggtacaatgtgatgtgtgtatatttgtggggtacaatgtgatgttttkatctatgtatacattgcagaaagattcccttgagctaattcacatattgttaccttaccaatttattttttatgatcataacaataaaaatcttttttga

SEQ ID NO: 515619 - DNA, 201 bp, Homo sapiens
agaggttattgaaaatattgaaatgacttcataggtcctagcactctgttgagagttttattgtgagaatggattaagaggtaattttgacatacaaaacmctacagacatggaccaacctaggtgtgctatcacagtggtgggtttgggtccacatataatagcactgagctatgtgtcttggggaagaggtaggacagg

SEQ ID NO: 515620 - DNA, 201 bp, Homo sapiens
caggctcactcagaccacaggggacaagcagagctaagaagaccagtattattaacataatttgttctcctggcagtactgggtactattcatagtcttgrtgactacagtattaataaacaccactgatgacccaaataataataacaaattttctagtcactctgagcagaatattgttttactttctatttccagata

SEQ ID NO: 515621 - DNA, 201 bp, Homo sapiens
tgtgggttcctttcccccttgagtgctggctgtagatcatgacttggcactcctggggtgcctacttaagctctggagagatctcagtgtttatgttcctyccccaacttggaggcagcagaggaagggacctcatagtggttatggccaagtgttgtatgcttgtctcctggaggctcttctccagagagatgcaggtca

SEQ ID NO: 515622 - DNA, 201 bp, Homo sapiens
atgcactcctgtgttcatcaccgcactattcacaacagcaatgacatggaatccactcatgtgcctatcaatggtgaatttgataaagaaaatgtggtacmtgtataccatggaatactatgcatctgtaaataaagaaatcatgttctttgtagcagtgtggatgcagctgaaggccataatcctaagtgaattaacagg

SEQ ID NO: 515623 - DNA, 201 bp, Homo sapiens
gtcttggtaaaattctgaaacaggcaaaatgtgccctttcccccaatcttagccctctagtttatcaaaacctgcctctccagtccttgtttcctctcccrgaggtcttagttttcacacttggataaaaccaagacttttgctgtttagggcaggacttagggaagatatagggactttcacggttgtcttaaaattgca

SEQ ID NO: 515624 - DNA, 201 bp, Homo sapiens
tggtaattacttaacttccaggtatttctgggaaaaaacctagtcccatgagcatgtcttggtaaaattctgaaacaggcaaaatgtgccctttcccccartcttagccctctagtttatcaaaacctgcctctccagtccttgtttcctctcccggaggtcttagttttcacacttggataaaaccaagacttttgctgt

SEQ ID NO: 515625 - DNA, 201 bp, Homo sapiens
aggatttttacacataaaagatgaaaatctaaaataagggaagtatagaagtggttttactgtcctttttatttgcaaaagcaaacagtcattattcagawtgctgcattgttactcttcatacataactttattgatagcccaaggtctgctttaaagaagctcaaaatattgagagcattaaagcctcagagttctatt

SEQ ID NO: 515626 - DNA, 201 bp, Homo sapiens
ttgtggagaaagagctccataaatctacataagagtcaccttgagtctttggctgaactctgagctatgcattcatagagtgagatgacttgaggctaggmaaagaacaataacaggcagttccatgtctcccagaaagggagctgccctagaatccctgctggggattggctgggagcagcctgtgggaattatatgttc

SEQ ID NO: 515627 - DNA, 201 bp, Homo sapiens
actgcatgtactgcagagcggttctacagaaagggcactgggagtcttcaagccaaagttgcccaactaaagtgccttatgtcacctagaaacagactgcmttagtattgctctttctgaataatcacccattgcctaggagcagcttatggaaagtgtagtcctaacatgaaaatacagtgataaacttcagaatgcagc

SEQ ID NO: 515628 - DNA, 201 bp, Homo sapiens
ggaactgatacagaggttcggttttttcacatccctcaggctggaatagcatttctggcagtgtgtatctaaagcatgtaaagacatgtaatacctatatrtctgagaaaatacctagctgtctcagtcaagggatggcaaatggggaaagcagcagacagaccaaagaaacctgggaaagaaaaggatgaggagaaagat

SEQ ID NO: 515629 - DNA, 201 bp, Homo sapiens
gataaaggggaattcttatacaccgttggtgagaatgtaaattagtatagccactatgaagaacagaatggaggttcctcgaaaaactaaaaccagaactrctatataattcagccattttactactgctttaaatatatactactgcatatatatccaaaagaaatgaaatcactatatccaacagatttttgcccgccc

SEQ ID NO: 515630 - DNA, 201 bp, Homo sapiens
atctgcattttttaaataagataaacatagagcagaggaagcaatcagatatgcatttgtctcactcaggtgggcagagggatgactttgagttatgtccyttgtcccttacctgtgaagataagctatcaatttacattgtcagggtaaaagtcaacagaactgttttagggtaaagatcttggggcccacaagaaattt

SEQ ID NO: 515631 - DNA, 201 bp, Homo sapiens
ttttctcaaaaatagggaaagccaatctatgaattcatatgaaactacaaagtgcccccaacaatcttgaaaaagaacaaagtttgtatatttccccttcmtgatttcaaaacttattacaagtgggtttttattaacttgtcaagataattctatgtggaatgtgttgttgaaaagagtcaaactctgtaaaatatttta

SEQ ID NO: 515632 - DNA, 201 bp, Homo sapiens
tggtcagttgggggatagaactacctggaggaaaatggagaacctatgaccacattttgctgcagctgccccacttacaagggctgacgcacaccccctcycccacccccgcccccaacacacaccgcgcgcctccctgggctccatgctggctgaagctttgtctctgcttactctctgggcagatacccctgccaattc

SEQ ID NO: 515633 - DNA, 201 bp, Homo sapiens
tttttgacattagtagccattctaacaggcatgaggtgatatctcgttgtggttttaatttgtgtttccttggtgattagagatgttgagtgtttttcatrtatctgttggcatctacctctcttttgagaaatgtctgctcagatacttttaccagcttttaactgagttttcttactattgagttgtttgaattcctta

SEQ ID NO: 515634 - DNA, 201 bp, Homo sapiens
tagctaggcatctggccgggggtacatccatgttttacagggcctgaagctgatataatttgaggaattttttttttaagaaaaaggatttacattttcaratacaaaattagataccagaaaggacttctacaagtaagtggaaatgaagcttaagcttcattagcttcatggaaaattcatctctgtatctggcacata

SEQ ID NO: 515635 - DNA, 201 bp, Homo sapiens
tattttcttgattcatttagactatgaccatttcccagacatttgttgtcttaatccgttttctgctgctacaacagcataccacagactgggtaatttayaaagaaaacagatttattcagttaacagctctagaggctgggaagtctgagagcatggtgctgggatctggtaagagtgatcccatggtgaagggtagac

SEQ ID NO: 515636 - DNA, 201 bp, Homo sapiens
attgaaggagttttcacttgttttagtgctgctatgtttgaattccacagcacagcttgagacaagccttggaaccttctatgctccaacaagaccacttytggattccactatattggaatatagagatcaaatcagcaaatatgcaaggagattcttccatcacttgctcaggtgaatgatatgtttggattgattagc

SEQ ID NO: 515637 - DNA, 201 bp, Homo sapiens
tggttcagaaaggcaggacaactcaaagcaggggcttccgggctataggtaaatttaaacattttctagttgacaattggttgagtgtatctgaagacatrggatcaacagaaaggaaatgttcaggttaagataaaggattgtggtgaccaagttttattgtgtagcggaagctctcagatagcggacttcagagagaac

SEQ ID NO: 515638 - DNA, 201 bp, Homo sapiens
aaaaagttgcactcatagtaatacagaataggatggtggttaccagaaagttagggaaatgaggcattctggaaaagaagagatgttaggcaaagggtacmaaaaaaattcagtcagccctgaaaaatttggatatttcacatttaaaatttttttaaatgaaaagacctttgggggaagggtaataatgaaaaaaattga

SEQ ID NO: 515639 - DNA, 201 bp, Homo sapiens
ggagcacattttgctgagtaaaataagccaggaacagaggacaaatatgacttattccactcatatgagaaatctaaagtcagactcatagaaacatggartagaatagttattgccagggccagtgggagggggaacaacatgtgttagtcaaagagcacaaagtttcagatatgcaagatgagtaagacctagagatct

SEQ ID NO: 515640 - DNA, 201 bp, Homo sapiens
atggcctcgattctagaggaaacaaatttgacaaggaggttaaaaatacagggccccgaaggcaagtaataataagatggctgtcttgggacctagaaagrggagaagacatgttgcccaactccagaggttggtttacgagtttgaaaggcatctgatttcagaagccttttcctgtaaatgccgggcgatatctcatac

SEQ ID NO: 515641 - DNA, 201 bp, Homo sapiens
gtaaaataagccaggaacagaggacaaatatgacttattccactcatatgagaaatctaaagtcagactcatagaaacatggagtagaatagttattgccmgggccagtgggagggggaacaacatgtgttagtcaaagagcacaaagtttcagatatgcaagatgagtaagacctagagatctaacgtacagtgtaatac

SEQ ID NO: 515642 - DNA, 201 bp, Homo sapiens
gggcacagacacacatgaggagtttaggaacagaggtttaataggtagaagagaagagaaagagcaacagcttcctccgtagaggaagaggtctcctagargaaagggccagctggccaagtttatagtccagtttgaggaggtggtgtctgatttatatagggctcatagattggttccatcaggtatgatgtttacata

SEQ ID NO: 515643 - DNA, 201 bp, Homo sapiens
actataatttgttggcagtcatgctcgattggttcctcatcctctgggagaaaagtggcagggttgagggccacgaacttatgtatttgaagcaccagtcsctcaaggagtagcgcctgttatctaagtaggcggttgtccgatagccataaactttttttagcacctagtaagccatttacatcatgagttgtccagaca

SEQ ID NO: 515644 - DNA, 201 bp, Homo sapiens
ttactttagaactagtaaataggaaaatctatttttactatttactataattgtggatttcattacttctactttcagctctttcagagtttgcatcaacyattttaaagccattgacctttttcatgaaatggctttttcccccaataatagttactgttctgaagtttactggtcctttattaatataggcatttcagc

SEQ ID NO: 515645 - DNA, 201 bp, Homo sapiens
acgaacttatgtatttgaagcaccagtccctcaaggagtagcgcctgttatctaagtaggcggttgtccgatagccataaactttttttagcacctagtamgccatttacatcatgagttgtccagacagtgagatcctttccttgtattattttgatagcctctgacactaagacagccaccgctgcaactacctgtaaa

SEQ ID NO: 515646 - DNA, 201 bp, Homo sapiens
ttgcacgtaacattttcagtctaagatgggccagaatgacaaaaatgaggaaataaatcagcaaagtaacaataaggagctctcatgtgggtggatacatmcacacacacacacacacacacagagtgtatatatatgtctatacacacaaagtacatatcaaaatgtatatatatatatatactctgataatagagacac

SEQ ID NO: 515647 - DNA, 201 bp, Homo sapiens
ttgtagagatctttcacctccctggttagctgtattcctgcttattttattctttttgtggctattgtgaatggaattgcattcttgatttggctctcagyttggacattattggtgtatagaaatgcaactcattttgcactaattttgtatcctgcaactttgccaaagctgtgtatcagatctaggagtctttgggca

SEQ ID NO: 515648 - DNA, 201 bp, Homo sapiens
atagaaatgcaactcattttgcactaattttgtatcctgcaactttgccaaagctgtgtatcagatctaggagtctttgggcagagactatgggattttgyaggtatagaatcttatcatctgagaagggagatagtttgacttcctctcttcctatttattaatagatgccttttatttcttttctggaagcttttagtt

SEQ ID NO: 515649 - DNA, 201 bp, Homo sapiens
ttttatttttatttatttatttatttattttgaggcagagactcactctcttgcccaggctggaatgcagtggcacaatctcagctcactgcaacctctgyctcccaggttcaagtaatccttgtgcctcagcctcctgagtagctgggaatacaggcacccaccaccatatctggctcagttttgtatttttagtagagg

SEQ ID NO: 515650 - DNA, 201 bp, Homo sapiens
cttcaaatgctcaaatcccaacaaaagacgacaaggcatacaaagaaacgggaccatggcctgaccaaaggaacaaaattaagctccagaaatttgccttraagaaatgcagatctgtaagcttcctaaaaaagaatttataataactctcataaagatgatcaagacctacaagagaacacagaactgcacagaaatcag

SEQ ID NO: 515651 - DNA, 201 bp, Homo sapiens
gcctacattctcctcctcaaggaagtgcccacaaaagatgtggcttactggctacataaaaagacaggacattggggaccacataccttttgggacatagwgaaaattgaggactaccactatgatataaagatatagtactcatctatcagcaatgtcctacctgtgcacagcaacacctcaggccctttccacacaata

SEQ ID NO: 515652 - DNA, 201 bp, Homo sapiens
catggcttcagccggtccctccgttcagggcccctgacttcccacaacaagttgcaatgagggagccagttatataaaggaatccagcaacgaatcctttytttttttttttttttgaggcaggtcttgctctgttgctcaggctaaagttcagtggcatgatcatggctcactgcagcctctacttcctgggctcaagtg

SEQ ID NO: 515653 - DNA, 201 bp, Homo sapiens
ataaactaatcacagagaaaaatgattcttctttaatgtttatcacctgtgtattgtctacaaaattaacaaaagccagccacagctttcttgattatatrtactttaaaatggcatttttatgttatttatcctctcaactgccatccaaattattatatcatccattttgtagacattccagctttcaaagggattact

SEQ ID NO: 515654 - DNA, 201 bp, Homo sapiens
tcagagagagttgtgttttctcaagcttctctgcatatctgcaccagatgtcattcattccctgtcagtcaccttttctccattttccccctcttatagtractcttattcacccttcaagactaccatcagagatcagttcctcctctttggctccacagcactctgcacatatgtgctataaaatctatcatacttttt

SEQ ID NO: 515655 - DNA, 201 bp, Homo sapiens
taattatgagcacatcaaagactaactgcttgcttgactgcagaggtctatacaagactgtattacttgtatatcttaagagatgtacagttttcagtaawcttattaagtatgctatgattatcaaacctttgttcctttctttgtggtgacataatgtcaatcacagaatgtgacatatggtaattaagaattggtgtt

SEQ ID NO: 515656 - DNA, 201 bp, Homo sapiens
ctattgaccctgtcacccagagagtgaatatagtacctaacaagtttttcagcccttgcccctctctttccctctttccttttggagccaccagtgtgtgytgttcccatatttacatctgtgtatacccagggtttagctgctcctactttataagagaacatagaatatttcattttctgtttctgcattatttcactt

SEQ ID NO: 515657 - DNA, 201 bp, Homo sapiens
ctctttccctctttccttttggagccaccagtgtgtgctgttcccatatttacatctgtgtatacccagggtttagctgctcctactttataagagaacayagaatatttcattttctgtttctgcattatttcacttatgataatgcctccagttgcatccatgttgctgcaaaggacatgatttcattcttttttatga

SEQ ID NO: 515658 - DNA, 201 bp, Homo sapiens
tttatttgtttatttgcaggaaatcagagatggtggttctctcaaaatgattcactttggtctggtgtaaacattaagaaaaaaagaaaactgccttcttyatatctaaacttttcatggcctgatacagacttaaaatcccccgtgtggatttttaacaagagacagtatgaatcatataaattagttaagagttttgag

SEQ ID NO: 515659 - DNA, 201 bp, Homo sapiens
gatggggataggttagaaaaggacaatgacaaatctggcacattataaaaaaatcacccttttcaaatgggtgccttttatgtaacaaataattcacataygtgtctttggttttagaaaacaaaagcattatgccagcattttgcttttaacatattttgagtcttatttgccttaatattatctaagagcagtgtgtcc

SEQ ID NO: 515660 - DNA, 201 bp, Homo sapiens
aatgcctccttttgaaaattaaacagaaccccacatatcaaactagtaagagagtcatcctggatttgggagaattagtggaggtatgtgagatttcctcrtacttttaaggttctttccaacatgagattctatgatcctatttatcaggcacctttgagtagacaagtcaagtctcagttccctaagctaacctcctgt

SEQ ID NO: 515661 - DNA, 201 bp, Homo sapiens
gaatatcatgattatgtaagaagctaccctaatacccactctgttccatttgcattgctgtgataaccttaacaactctttttttctgttgtgagagaaayagactggattcattgtacagatagaggtaagagtggggatagtctgcttattaggcgtgacattgaacaaatgaatcttaagacttttcttcaccctaga

SEQ ID NO: 515662 - DNA, 201 bp, Homo sapiens
gttttgacagctttttgttgctcagagtcattgtcagctttgcctcaagtgaaagtttatacacaggtttgtttttgtaccagctgtcatattttaatttyatctttcctgcaacaagttcatgtttcatccaagtctgcaaaacctgactgactgcaaacatgagtattttgttgtaattgaaggagttttcacttgttt

SEQ ID NO: 515663 - DNA, 201 bp, Homo sapiens
gtggctttacagtaagtggctttacagtaagtcttgaaatcaggtactgttagtccttcaactttattcttctttttcctattattttgactattctagakcctttccatgtctatataagttttgaaactggcttgtttcacctgatgggattttgactgagattgtgttggatctatagatcattttagggaggaatga

SEQ ID NO: 515664 - DNA, 201 bp, Homo sapiens
cactgtttattctagttagccattcgtctaacttttttcaaggtttttagcttcctcgtgatgggtttgaacatgctcctttagcttggagaagtttgttmttaccaaccttctgaagcctacttctgtcaactcgtcgaagtcattctccgtccagctttgttccacttctggcgaggagctgcgatcctttggaggaga

SEQ ID NO: 515665 - DNA, 201 bp, Homo sapiens
cttctcgttttatttcattaatttaatcttcaatcaccaataccctttcttccacttgattgaatcggctattgaagcttgtgcatgcatcacaaagttcycgtgccatggttttcagctccatcaggtcatttatgttcttctctacactgtttattctagttagccattcgtctaacttttttcaaggtttttagcttc

SEQ ID NO: 515666 - DNA, 201 bp, Homo sapiens
tgtcatgaaatctttgccagggcctgtgcccaaatggtatttcctaggttaccttgcagggttttcatagttttaggttttacatttaagtctttaatccrtctttaattgatttttctgtatggtgtaaagatggggtccagtttcaatcttctgtatatggctagccagttatcccagtacaatatactgaataagaag

SEQ ID NO: 515667 - DNA, 201 bp, Homo sapiens
ttctgctctccaagatgttttacagttacaccactgtccttttctcaaaaagctcgactttctgtgcaataaatataaatgcttcttctttttcttatcamtgttacccgtacaattatttaatatagactatttggacatttcatgaatatctttacaaagagcagagaatacacaaaacgacacagtgagtaatacaca

SEQ ID NO: 515668 - DNA, 201 bp, Homo sapiens
ttcattaacttaatcacttttagcataaaacaacagtttatcctcctgtgtatacaagtcatttatagtggttgttccaacacccttctgctctccaagaygttttacagttacaccactgtccttttctcaaaaagctcgactttctgtgcaataaatataaatgcttcttctttttcttatcactgttacccgtacaat

SEQ ID NO: 515669 - DNA, 201 bp, Homo sapiens
agatttatgggacatcatcaaatataccaatatatacattatgggagtcccagaaggggaagagagaaaggatcagaaagattatgtgaagaaataatgaycaaaaccctcccaaattttaggaaatacatggatccacaaatccaagatgctcattgaacagagaaaggatcagaaagatgatctgaagaaataatgacc

SEQ ID NO: 515670 - DNA, 201 bp, Homo sapiens
ttctcccattctgtagattgcctgttcactctgatgatagtttctttggctgtgcagaggctctttaatttaattagatcccatttgtcaattttggcttytgttgcaattgcttttggttttttcgtcatgaagtctttgctcatgcctgtgtcctgaatggtattacctaggttttcttctcgggtttttatgattttg

SEQ ID NO: 515671 - DNA, 201 bp, Homo sapiens
tggcagcagtagtggcagcaggcggggtgggcctgatgtcatgctctcaaaaggcaggtgcaggtgctagtgttggtgggtgggatgggttgattccccaygtcctcaaatggtgtgcttgggcagtggaagcagtggcagtgggcagagtagacctatcttcaggtttctttatggtacatgcagtcactggcagtgggc

SEQ ID NO: 515672 - DNA, 201 bp, Homo sapiens
cttcccaagtagctgggattacaggtgcattccaccatgcccagctaatttttgtatttttagtagagatggggttttgccatgaaggccaggctggtctygaactcttggtctcaagtgatccgcctgcctcagcctcccaaagtgctgggattacaggtgtgagccactgcgcctggcctgcttccccatccttatatg

SEQ ID NO: 515673 - DNA, 201 bp, Homo sapiens
ttctcccttcattacacaccatatatttcgttcttttttcttagcatcatatcttggacttggtcatctcttgactagtaattcaacctaagctgattttsggagaaaaaccagctgcatgaatataagatgagagatgtcttagtatggacaagtttggatttttaaaagtctggttttttctaggtattttcaataact

SEQ ID NO: 515674 - DNA, 201 bp, Homo sapiens
atcccttaggagaggcagagacagagtaggtaggcaggactactatcctccaccctggaaactctgctctggaacttggccaaaggagacgccaaatcacrgtggttattcagcagcaccacactttaggaggtatgtttcacaggtcccttggacaggaactccttgccagccttcacatactgctgggataatcccttt

SEQ ID NO: 515675 - DNA, 201 bp, Homo sapiens
ttttctctgagtctccaaagtccattgtatcattcttacaatattgtgtcgtcatagcttagctcccacttgtgagtgagaacatacgatgtttagttttscattcctgagttacttcacttagaataatagtctccaattccatccaggttgctgcaaatgccattattcaattcctttttatggctgagtagtattcca

SEQ ID NO: 515676 - DNA, 201 bp, Homo sapiens
tgcttgacatgataaacaaacagtgtatttaatatctaagccagaggcccttgctcccacattcctgatctatggccacgccagtgtcttgttttttaaargttgggagttgagggaatcctgttgtgctaaatccccacaagtctgatggtagaagttttaaagaagctaaacttaaacagtagaattgtaagtgaggaa

SEQ ID NO: 515677 - DNA, 201 bp, Homo sapiens
aactttaacttccatacctgcattttgtctgcactactgggtaatttcacaaacccttgccaatcgacagctagaaagaacttcagacaaaaaaaaactamaacgactcagagtaaaccttctaatatgccaagcaataaacagtagttatcagaagacataatccaagttggagacaccattttcctccaaaacatatcc

SEQ ID NO: 515678 - DNA, 201 bp, Homo sapiens
ctgattaaatgaaagagcttctgcacagcaaaagaaactatcaacagagtaaacagacaatctatagaatgggagatgatagtcacagattatgcatccarcagaggtctactacccagaatctataaggaaattaaacaaatcaacaagaaaaaacaaccccattaaaaagtgggcaaagaacatgaacagacacttctc

SEQ ID NO: 515679 - DNA, 201 bp, Homo sapiens
ccgcagtaaacatacggagaagcacacagtattaaggagaggaaatcctataccccatgaattcttccatttcagtctttcagaaaaggagggctggaatytagcctattccctgaatgtgatctgggagagcctgcaactaaattgaaataatcctgctatttttttattcagcagagatgagcagtgctgtaagaaacc

SEQ ID NO: 515680 - DNA, 201 bp, Homo sapiens
tctacaaaaccttcaaaaacatgtaattcctacaagcttattctaacatgagaatatacaacaagccaagtaaattcttaatttggtaaaataaaatatcrattctttccatatattttcacttttaaaatgatgattcattgttgtgacctaatacaagaaagactgtggaacatttatataaatgttaacaattgatta

SEQ ID NO: 515681 - DNA, 201 bp, Homo sapiens
ggaaattgggccaaattcacttttacaacaaacccatttttttgataactaacccactcctgtgataacagcattaatttgttcatgatggcagagacttyatgacctaatcctctcttaagggccccaccttccaataccattgcattggcaattaagtttcaacatgtgttttggtgggacattcatatcatagcattt

SEQ ID NO: 515682 - DNA, 201 bp, Homo sapiens
caacatgtgttttggtgggacattcatatcatagcatttaattgtgtaaatcaaacatttaaactaaattcctaggctaaatctatcaaaaattattaaaygaagtcagaagatagccacttgagaggtgatatagatactagatatgtctttcaccagatcctaaagcttaattaactctgtcagacctcaggggcatgg

SEQ ID NO: 515683 - DNA, 201 bp, Homo sapiens
agtgtctctatggatttgccccatctacacatttcatatatatgaaattatacaatatgtggctttatgtgtctattggctttttctttttgaagaacctmtaatcagtgataaattttacttggcagtgcttccgtattttttcatttccatactacagtggttattccattaaatgatgctatttttcaacaagcagag

SEQ ID NO: 515684 - DNA, 201 bp, Homo sapiens
gtatgttcttgagggctatggagaagatcagttggctgtaaatatgtggatttatctctgtgtctctagtctgttccattgatctatgtgtctgttgttayacgaatatcatgctgttttggtttctatatccttgtaatatgttttgaagtcaggtagtgtgatgcctccagatttgttctttttggtcaggattgcttt

SEQ ID NO: 515685 - DNA, 201 bp, Homo sapiens
gccccgaaggcaagtaataataagatggctgtcttgggacctagaaaggggagaagacatgttgcccaactccagaggttggtttacgagtttgaaaggcrtctgatttcagaagccttttcctgtaaatgccgggcgatatctcatactgtccctgactggttagtgtaaaagcaacgttcttcccctaagaatgtgcaa

SEQ ID NO: 515686 - DNA, 201 bp, Homo sapiens
agggcacagacacacatgaggagtttaggaacagaggtttaataggtagaagagaagagaaagagcaacagcttcctccgtagaggaagaggtctcctagmggaaagggccagctggccaagtttatagtccagtttgaggaggtggtgtctgatttatatagggctcatagattggttccatcaggtatgatgtttacat

SEQ ID NO: 515687 - DNA, 201 bp, Homo sapiens
ttgcagtgagctgagattgtgccattgcactccagcctgggcaacagggcgagactccgtctcaaaaaaaaaaaaaagtatttttggtgttaatgctaatrtcatatccaagtgtggtggctcgcacctgtaatcccagcactttgggaggttgaggcaggtggatcacttgaggtcaagagttcgagaccagctgggcca

SEQ ID NO: 515688 - DNA, 201 bp, Homo sapiens
gtaaatctttatccttactaataggcttagcatgatggtactagccattaaaatagtaataatcattcaattgaggtaaagaactcagatatttatactgytattatagtagtctccccttatctgctaatttcctttctgtggtatcaattacctgcagtcaaccacagcccaaaaatattatatggaaaattccagaaa

SEQ ID NO: 515689 - DNA, 201 bp, Homo sapiens
agtggacctaggaagttggctctcaggctctggtgagcacacactttggttctggtcccattgtcccagaggcagcctccccagtacacatcactgcccayttcccaggtgcaggacagtatgtgggctagagtgctgcaaacctggtcatacctgagtctagccggtgcctcaatgctacagccctctgggctgatgttg

SEQ ID NO: 515690 - DNA, 201 bp, Homo sapiens
ttgggggaaatgtcagcagggctccagtgatgtggacattcaggggctattgtgccccagagaagcatatcatttcttgtgactgggctctcaaagtgacrtcatgctacagctgcttgagtcttgggggatgtgggatgcagcgcaaactacctgtctggaacagtgccactgcatggactccgagaagtccctatacta

SEQ ID NO: 515691 - DNA, 201 bp, Homo sapiens
atttgtccaaaggaaatgttattttaaaataaacataaagaggattgtatcaatattttacacatttatgtgtaggtgaaatagcatgaatttgaatgtgytgaaggcaactttgaccagggtttaaacctgtaaagctgtagaatacgaataaaatttttcaattatcaatggatttgaactaatcaaagcatcatacag

SEQ ID NO: 515692 - DNA, 201 bp, Homo sapiens
tcttctctctttttctttattagtctagctagtggtctatctatcttattaattctttcaaggaaccagctcctggattcattgatcttttgtatgtttgttgtgtgtgtgtgtgtgtgtgtgtgtgtgtgtgtgtgtgtgtgctgtctgtctgtctgtcttgatttcctttagttcagctctgattttggttatttcttg

SEQ ID NO: 515693 - DNA, 201 bp, Homo sapiens
cacactcttggatattaatgtcttaccaaagaaaaatagcaattaacatttttattccctgacaaaactttgtcaaacactttattaaaaacttgtatttkccctcacagcttaaaataatttatttaaatacttgcctttagttatagctgtgatctccaattcagaaaaatttgcttatactagaaaactaagaaactt

SEQ ID NO: 515694 - DNA, 201 bp, Homo sapiens
ctttttttgctttccatttgcttggtaaattttccttcatcgttttattttgagcctttgtgtgtctttgcacgtgagatgggtcgcttgaatacagcacrctgttggggtcttgattctttatctagcttgtcattctgtgtcttttaattgggggcatttagtccatttacatttacggttaaatgagtgaatttgatt

SEQ ID NO: 515695 - DNA, 201 bp, Homo sapiens
agaactgttgctagggagctagtgtacttgtttggaggtagggggacactctgacttttgaatcaccaaagttcttgtgcggatcctttctcatctgagcrggctggtattgtctttttggatttgctgtcgttgaatggggctttttgtttttatataatttatttcccttgagtttttaactgtggttcaagttgagta

SEQ ID NO: 515696 - DNA, 201 bp, Homo sapiens
aaaagagagacttactttattttcatgtattttttgttttgtttttttctcttttattgatacataatttacatatttgtggggtacatgtgagtgtttayatgcaaagaatgtgtaatgatcaagtgtgagtaattgggatgtctgttaacttgagtgggtagtatttttacatgttggtattacttcaagttctctctt

SEQ ID NO: 515697 - DNA, 201 bp, Homo sapiens
tatatacttgtatgttgctgatgtttaagatagtaattgattttctttaataggtttctgaataaatatgcagtcctaggtgtgaagttgaagaaaaaccraagtttatctgaatgtacttgatatatttcttaacaggttctgagttctgtccgcacagaatgggacccactggatgttcgctttggcaccaaacagcct

SEQ ID NO: 515698 - DNA, 201 bp, Homo sapiens
atacaataatgaaataaatctttatatttgccaattatctaatagtattatttttcttataagttatttacttaatgtacaatgcacctaaacattctaamatttgcatctttcatatctttgtggtaagcattgacattaatggtggaaaatcatggtgaatgagaaactgtccctaggtaatttacaagataggaggaa

SEQ ID NO: 515699 - DNA, 201 bp, Homo sapiens
gaggcaagagaatcgcttgaaccttggaggtggaggttgcagtgagccaagactgcaccattgcactccagcctgggtgaccagagtgagactctgtctcaaaaaaaaaaaaaaaaaaaaaaggcaaacgggcatataaaaatgtgctcaacatcactgatcatcagagaaatgcaaatcaaaactacagtgggatatcat

SEQ ID NO: 515700 - DNA, 201 bp, Homo sapiens
ggtaccagttcttctttttacgtctggtagaattcggctgtgaatccatctggtccaaggctttttttggttggtaggatttttattactgattcaatttyggaacacattattggtctgttcaggttttcactttctttctggttcaatcttgaggggttgtgtgtttccaggaatgtatctatttcctacagattttct

SEQ ID NO: 515701 - DNA, 201 bp, Homo sapiens
tttatgtgacaaatcacatttatcgatttgtgtatgttgaaccaaccttgcatcccagggataaaacctacttgattgtggtgaattaactttttgatgtrctgctggatttggttttctagtgttttgttgaggatttttgcatctgtgttcatcagggatattggcctgaagttttctttttttgttgtgtctctgcca

SEQ ID NO: 515702 - DNA, 201 bp, Homo sapiens
tccccaaatatcagtgtatattgaaatagtcacaggaaaaaaaatcacatatgattagattgacaattattgtttattcctaatatctttaatatttttayaaaatgctataatgatattcaagagactttagtgatttcagttaatatgtatgtttgaaaatagctttttgtaacatatcagtggaaaaatctattcatt

SEQ ID NO: 515703 - DNA, 201 bp, Homo sapiens
agtaaaaaaaaaaaaaaaagcatgcctgccctttgctctgttagtaaactagcttgattttctaagactgcttgctatttttgaaaaaatagtcaagaacraagcagtgccttgcttgcaggaatgtgagagacttctagagaattattgtccagcacctcaaaacataatttttatccttatttcactcatattcttaaa

SEQ ID NO: 515704 - DNA, 201 bp, Homo sapiens
tcttctttaatttctttcatcaatgttttacagttttcagtgtataggtttttcatctgtttggttaaatttgctcctatgtattttcttttttggtgctrgtataaatggaattgttttcttaatttttttttggataagtttttgtatgttgattttataacctgcaactttactgattttataagctgcaaaatcaac

SEQ ID NO: 515705 - DNA, 201 bp, Homo sapiens
gaggggaagttatctaccaatacacctggttctatgtatcttttaaaaagctccagcaaagctttacttttgtgatacatgtacctccagcaaagacccasaacgtccaagaagttgctacatctgaactgtcttctaaatacctttaggaaactgttgctatggatgttataacaaacatgtcctctcaaggatgacctt

SEQ ID NO: 515706 - DNA, 201 bp, Homo sapiens
gggctttggaattagacagatttgtgttaaaaatatagctacatcacttttccactttataaagtagggaaatactaccttatatggtgattagaaaatcttttttttttttttgaaatggagtctggctgtatcgcacaggctggagtgcaatagcgtgatcttggctcactgcaacctccgtatcctgggttcaagcga

SEQ ID NO: 515707 - DNA, 201 bp, Homo sapiens
atgttattccatgattcatcagctttgagtctgttgccttgaaggtgaaacaatttcttccaatgttgatatttcataatctcatagataacaagcatacscatatgcatagtcctttcagaagttttaaacatttggagatgaatgaattatgctgccacaaatggaaaggagcagtataaaattataatggtgatatcc

SEQ ID NO: 515708 - DNA, 201 bp, Homo sapiens
taattattgcctcaacttcagagcctgttattggtttattcagagattcaacttctttctgttttagtcttgggagagtgtatatgtccaggaatttatcmatttcttctagattttctagtttatttgcatagaggtgtttatagtattctctgatggtatttctgtaggataggtggtgatatcccctttatcattttt

SEQ ID NO: 515709 - DNA, 201 bp, Homo sapiens
agccaccgtgcctggctgatatgtgggtttgatcctgtcattgtgctgttagctggttattatgttagcttgtttgtatggttgcttgatagtgacactgscctgtgtgtttaagtgtgtttttatattagctggtagcagccttttctttctatatttaatgctcctttcaagatctcttgtaaggcaggcctggtggta

SEQ ID NO: 515710 - DNA, 201 bp, Homo sapiens
ttggcaggttttgtctgactcctttactgcaacctgttttatcagcaaggtctttatgacctgtattttgtgctaatctcctatctcatcctgtgacttaraatgccttaacttgctgggttgcagcccagtaggtttcagcctcatttttacccagttcctatttaagatggagttgctccggttcacgtgcctctgaca

SEQ ID NO: 515711 - DNA, 201 bp, Homo sapiens
cgttatttagtaaggtaatatttaattcaaattgtagaaaatgtttgaaataccattctaacaacatccagcaaagatattaaaggatcattaagtttcamatctctgaaatagaatgttggctcttgatacccaaggcactttggaactcacaagatcttatgcttttttatagtatacaattatttaaccacagctagg

SEQ ID NO: 515712 - DNA, 201 bp, Homo sapiens
attgtcattatatttgttattcttttttgttgttgtagtttgtattgctgctgtagcatctggctgaaatgctcctccacatacctgactgtaggagaatratagaggaaatggcatgataagaatgagagggccattcaagagtatgttagggtggagtgtatggcacatgcacctgacagcaataacttaagtataccc

SEQ ID NO: 515713 - DNA, 201 bp, Homo sapiens
tgatgagtgtgggcatctttgtcttattcctgttcttaaggggaatgcttccagcttttgccatttagtatgatgttggctatgggtttgtcatagatggmtcttactttgaggtctgttccttctatgcctagcttgttgagggttttttatcaaggaggatgttggattttatcaaaggctttttccatgtctattgag

SEQ ID NO: 515714 - DNA, 201 bp, Homo sapiens
tgtcctatgttaagtactgtgacaaacattaccttatttggtcctcccaaattatctctaaaggagaaactactgtattggtgaattttttagaagttttyttctttaataatttcaacttttattttagcttcagggggcatatgtgcaggtttgttacatgggtatattgcatgatgctaagatttggggtatgaatga

SEQ ID NO: 515715 - DNA, 201 bp, Homo sapiens
atttggtcctcccaaattatctctaaaggagaaactactgtattggtgaattttttagaagtttttttctttaataatttcaacttttattttagcttcasggggcatatgtgcaggtttgttacatgggtatattgcatgatgctaagatttggggtatgaatgatccccatcacccaggtagtaagcaatagtacccaa

SEQ ID NO: 515716 - DNA, 201 bp, Homo sapiens
atatactacattttcttcattcaatccatcattgatgggttcctaggttgattccatgtctttgctattgtgagtagtgctgtgatgaacatacaagtgcrtgtgtctttttggcaaaacaatttattttcctttgggtatatactcaggaatgggatcaacgggttgaatgatagttctcagtttttgagaaatctccag

SEQ ID NO: 515717 - DNA, 201 bp, Homo sapiens
tcacagcaaagctagaaaaacaaccctcttttcttctaaaattgaatatccctatgacccaattcacattgaatgctctacttaccaagaaaaaagttttkttttttttaaaagcatcagattgatgtaaaggtgagcttaaatatttacacaaaatagaagaatggaaaattatgtcttgaatatgttgaggtcaacatg

SEQ ID NO: 515718 - DNA, 201 bp, Homo sapiens
aaagaatctgcacatctctgtgcgttagactaaggccctgctggcatgagctcatgaggggatctcctaatttgtggactgctcagatctgtggaaaaagkgtggtttcttgggcagggtagcacaatttctcaccccctcttggctgaggggtgggagcttcctttcccccatgtagctcccaggtgggctgtcacacca

SEQ ID NO: 515719 - DNA, 201 bp, Homo sapiens
aactttctgatttgctgctggattcaatgtgttagaattttgttgaggatttttgcatttatgttcatcaggcatattggcctgtggttttcttttttcawtgtgtctttgccaggttttggtatcagggtggttctggcttcatagaatgagttatgaaggagttccctcctacctgatttttggaatagtttcagtagg

SEQ ID NO: 515720 - DNA, 201 bp, Homo sapiens
aaatatagttaatgctgttgggaatgtgtgagataaagaatctacgcatgagaacataggagaagccagtataatggcagaactaagttttatagaagacsagagagagagaaagcattggttgatgcatttgaagatgtttaagacagagtggaaggaagttcagagagtactgcagaaaggtctggagtggagggaagc

SEQ ID NO: 515721 - DNA, 201 bp, Homo sapiens
ctctactaaaaatataaaaattagcctggtgtgatggcacatgtctgtaatcccagctccttgggaggctgaggcaggggaattgcttgaacccaggaggyggaggttgcagtgagctgagattgcaccattgcactccagccagggtgacagagtgagactccatctcagaaaaaaaaaaaagaaagaaagaaaaagaaa

SEQ ID NO: 515722 - DNA, 201 bp, Homo sapiens
ggttttcttttaaccttaggatccggaatgcggttggtgcgccgtcccgctttgcttttatccgctgtgcggatgcctgcaagctcgccggtcccttttcygagcggagtatgagggctgtgggaatgcagctattttggagggggtggtgccctggagtaggtgcacccccgaccccaaatggagctcttccagagttat

SEQ ID NO: 515723 - DNA, 201 bp, Homo sapiens
agcaactcctgctcttttttgttttctgctttcatgaaagagcttcagcacagcaatagaaactatcaatgaagtaaacaggcaatctacaaaatgggagrtgttcacaaactatgcatacaacaaaggcctaatatccagaatctgtgagaaaattaaataaatcacaagaaaaaaataacccaattaaaagtgggcaaa

SEQ ID NO: 515724 - DNA, 201 bp, Homo sapiens
ttatggtagaaatatttgaattattctcttctagctattttgaaatgtgtaatagattactgttaagtatagtcattctactgatctgtgaaacaccattygtatctattaataaactgctcttcatcatcccccaccccaccttcccagcctctggtacccacaagtctattctctatcttcatgagagccacctttttt

SEQ ID NO: 515725 - DNA, 201 bp, Homo sapiens
atgtgttgcagacattcattttttgttaaggcaacaaacagagcattaaactgttatgctatatttggagttatgcttaacattttttttgcccagcctcrcgttatttagtaaggtaatatttaattcaaattgtagaaaatgtttgaaataccattctaacaacatccagcaaagatattaaaggatcattaagtttca

SEQ ID NO: 515726 - DNA, 201 bp, Homo sapiens
aattacccatatggccatcaataggaaaatgtaaaaatatattgaaaatgaatagaacatagctacacaccaacatggattcattgaaatccattggattsattgaaaatgaattcattttcattggattcattgaaaatgaatatagctacacaccaacatggatgagcatcaaaaatacaatgttaattgaaaaaagca

SEQ ID NO: 515727 - DNA, 201 bp, Homo sapiens
tttttatttcacatattgtttttatgtgtagaagttggatttgggtcttttaaaaaatatctttcatgtctactacatttgtttaacatgtggaatacagytataatcattgttttaatattctagtctccaggttataacatgtctgccagtcctgggttggttttagttaatttttatttccattatgggccatatttt

SEQ ID NO: 515728 - DNA, 201 bp, Homo sapiens
gttaccatattgactagaacttcttgattgcaaagggatctttaaaaagcatttttattactgttatttgaaattacattcagaatgtttgaaactgcatygtggaactaccttatagtgaagacttcaaaagaacatggtcttttctggctatgaaaatctgattttattattaagttgcctgtgagaaacctgttaatg

SEQ ID NO: 515729 - DNA, 201 bp, Homo sapiens
aatctggaacagtttattggccctctttgtctttcatgacattgacatttctgaagagtataggctagttttttggagaccatccctcaatttgggtttgyttgatgtttttttgtggttaaattcaggcttgcatttttgggaggaagattacataggtgatgttgtggcctaatcagagcattaaatcagtatgtctta

SEQ ID NO: 515730 - DNA, 201 bp, Homo sapiens
tggagaccatccctcaatttgggtttgtttgatgtttttttgtggttaaattcaggcttgcatttttgggaggaagattacataggtgatgttgtggcctwatcagagcattaaatcagtatgtcttattatttatgatgttgattttaatcatttggttaaggtattcaccagatttctttactataaaattactatttc

SEQ ID NO: 515731 - DNA, 201 bp, Homo sapiens
ttcatgtgttcttgttatttaatatgaatgaaatattaataactaattgtttaaagtgcagtatttaagttaattccatgtataattaaaaaatttaaatrcattaacatttcacaacatagtctatgattgggattaggactgtttgtgtttgctgttcaaatattcagtataatatttgatatttggataaactgctat

SEQ ID NO: 515732 - DNA, 201 bp, Homo sapiens
ttaactcaataatgatattatgccagttgaagtaccacgtattgaatgcaaaactggcaaaactgatgaatatccactgagaaataatcagttccattttmcaggacataatttgcatttctatggacaggaattatttgtattattatcagttttctacaacttttctctctactgagttgtagcatggcctagtcaatg

SEQ ID NO: 515733 - DNA, 201 bp, Homo sapiens
aaacaagcgtttcaaatagtactatgtgcacttttataaatatctcccattacaaatgagaggctgttgtggaatttttagagctctttagagagagaggttttttttgtttttttttttaggaatttattcagcatttatagtcagagacttcttccttctttctaacctaaagtagttatattactcttaaacttgttt

SEQ ID NO: 515734 - DNA, 201 bp, Homo sapiens
ggcatttaatgcacggaagaaagtaaattcagatcaacccaaaatttactattgtagcctgtttcctccttaccctttcctacttcacctatcactatccmctgtgcactttaatctactgtcatacttgggtcatgccatctttttttttttttttttttttgagacggagtctcgctctgtcgcccaggctggagtgca

SEQ ID NO: 515735 - DNA, 201 bp, Homo sapiens
tcctccttttcagttgtttggaatagttttaaaagaaatggtactagttcctctttgtacctgtggtagagttcagctgtaaattcatttggtcctggcgtttttttggttggtaggccatttgttgctgtctcaatttcagaacttgttattggtctgtttagggattcagcttcttcctggttcagtcttgggagggtg

SEQ ID NO: 515736 - DNA, 201 bp, Homo sapiens
aagtgttgacaagtgaaatctgacaaggtagaggtggtatagctgcgggccactccaaaattttccactatcttttctatttgtagataaaggatttctgttttttttttttttcatttgagctcacttcatagcagtctttgatttctaaccttttcaaaacaataaccctgaattgacaaattattttggtatttaagc

SEQ ID NO: 515737 - DNA, 201 bp, Homo sapiens
tcacatttcgcagtaaggacagtgaactaaagcaaaactgataaacacagcagctgttggccaaggtatcagcaacaaaatctgtgtctaaacttagaagsaaagattgcaaaaatacaccagcctgtctttcactacatttcaaaggatcttctcttctgttaaatgaagttaaagaaactctgtatgctggaatatgct

SEQ ID NO: 515738 - DNA, 201 bp, Homo sapiens
aaattagttaatggactacaggactcaggcaagtgcaaaaacaagagaatggatggtgcctgagagggtaagagagttcattgcattttgcttgcctgacmcctcccttggaacagaagaaatagagtgaaacttaagtccagcatgctaacttgtttgtgggttgcagtgctttgctcagggaactgatgagaatgacag

SEQ ID NO: 515739 - DNA, 201 bp, Homo sapiens
cttcctccttcctttgttctcctctgcctttgcctcttttaacaagttctaagttgctagccagtcgggacaaatacaaaatgtgaggtcccattccagcyaatggaaactggacacagcagtagggtggacgcatcaggttataaatgaccctgtctcctttgtttggtgtactctcgtggcaaaactgctggtgagtgt

SEQ ID NO: 515740 - DNA, 201 bp, Homo sapiens
tgcctcagcctcccaaagtgctgggattacaggcgtgagccactgcgcccgagcccgtgtctgtttttataccagttccatgctttttgggttaccataastttgtattatattttagtagcgtgccttcagctttggtctttttgctcacattgctttggtatttagagttgtttgtggttctataatacttttaggatt

SEQ ID NO: 515741 - DNA, 201 bp, Homo sapiens
aacagagacagtttgacttcctctcttcctatttgaataccctttatttctttctcttgcctgattgccctggccagaaattccaatactatgttgaatargagtggtgagagagggcatccttgtcttgtgctggttttcaaagggaatgcttccagcttttgcccattcaatataatattggctgtgggttgtcataaa

SEQ ID NO: 515742 - DNA, 201 bp, Homo sapiens
gttatggtgttgatttgagatctttctagctttttgatgtgggcatttagtactataaatttcccttatgacactgcttcagctgtgccccagagattctrttatgttttctctttgttctctttggtttcaaagaacttcttgatttctgtcttaatttcattatttacccaggagtcattcaggaggaggttgttcaat

SEQ ID NO: 515743 - DNA, 201 bp, Homo sapiens
ccatagtgcagggattgtgaatacatgaagaaaactctttcaagacttggtttttaaaccaaggagaatggtggtcattggaattagaggaagggtgtgtrtgtgtgtgtgtgtgtgtgtgtgtgtgtgtgtgtgtgtgtgtttcttaagatgggagacaaatatagttaatgctgttgggaatgtgtgagataaagaatc

SEQ ID NO: 515744 - DNA, 201 bp, Homo sapiens
gtgtgtgtgtttcttaagatgggagacaaatatagttaatgctgttgggaatgtgtgagataaagaatctacgcatgagaacataggagaagccagtatawtggcagaactaagttttatagaagacgagagagagagaaagcattggttgatgcatttgaagatgtttaagacagagtggaaggaagttcagagagtact

SEQ ID NO: 515745 - DNA, 201 bp, Homo sapiens
atgctgtctctattaaaaatacaaaattaaccttatgtggtggctcacgcctgtaatcccagatacttgggagactgaggcaggagaattgcctgaatccrggaggtggaagttgcagtgagctgagatcgcgccgctgcactcccgcctggctgacaagagtgaaactccatctccaaaaaagaaagaaacaaacaaagg

SEQ ID NO: 515746 - DNA, 201 bp, Homo sapiens
tatatgtgccacattttcttgatccagtctatcattgatggacatttgggttggttccaagtcttcgctattgtgaatagtgccgcagtaaacatacgtgkgcatgtgtctttatagcagcatgatttataatcctttgggtatatgcccagtaatgggatggctgggtcaaatggtatttctagttctagatccttgagg

SEQ ID NO: 515747 - DNA, 201 bp, Homo sapiens
tgtctctattaaaaatacaaaattaaccttatgtggtggctcacgcctgtaatcccagatacttgggagactgaggcaggagaattgcctgaatccgggadgtggaagttgcagtgagctgagatcgcgccgctgcactcccgcctggctgacaagagtgaaactccatctccaaaaaagaaagaaacaaacaaaggacca

SEQ ID NO: 515748 - DNA, 201 bp, Homo sapiens
gattctgattcagtagatctgggctggagcctatggctctgcatttctaataagctctcaagtgatatgctgctagtatatactatagtatatactgtacrtagtaaatactgtaatgcaaggtagccatacacatatatatgaaaatgattggcactttcatactatgttaaggtttggttttttatttctctagagttc

SEQ ID NO: 515749 - DNA, 201 bp, Homo sapiens
atgtttagcagcaatccctggcctctgtctactgaatgccagtagtttcccaaccccagtcacggcaaccaaataactctccagacattgccaaatgtctsctggggggaggaagatagtaaaaagtcatccttggttaagaaccacaaccctagagaaacccctatatgacatcacctctctgaaagccacacatacaaa

SEQ ID NO: 515750 - DNA, 201 bp, Homo sapiens
gatgtatatgtgccacattttcttaatccagcctatcattgatggacatttgggttggttccaagtctttgctattgtgaatagtgccgcagtaaacataygtgtgcatgtgtctttatagcagcatgatttataatcctttggatatacacccagtaatgggatggctggatcaaatggtatttctagttctagatcctt

SEQ ID NO: 515751 - DNA, 201 bp, Homo sapiens
actgaatgccagtagtttcccaaccccagtcacggcaaccaaataactctccagacattgccaaatgtctcctggggggaggaagatagtaaaaagtcatycttggttaagaaccacaaccctagagaaacccctatatgacatcacctctctgaaagccacacatacaaaaatatggaaagccagaaaacaaaataaaaa

SEQ ID NO: 515752 - DNA, 201 bp, Homo sapiens
ggataaagaagtctttgactagataatatccaaaacataagatgtcttaaactaaactcatcattttcccctcaaactccaaacttgctcctccatatgtrgtctctgtcgttcttgattctctataacccacttacaattaatccaaccaatcaaattcaattgattaatgctcctaaatatttctagaaactagcccta

SEQ ID NO: 515753 - DNA, 201 bp, Homo sapiens
taaatgttgactgaaccaaactagacctatgcaggcttaggtaccttctcagtaacactagttttaccaaaattttattatgaaaagttttaaatatacartaaagttctaagaaggtacagtaaacatccgtatgcccactatttggattcgaccattaatgtcttacaataattgcgttatcacttatctgtccattaa

SEQ ID NO: 515754 - DNA, 201 bp, Homo sapiens
gtacaggcacatgccaccagccaattaaaaaattattttttttaagagacagggtcttgctattttgcctgggctgctctcagactcttggccccagtcartcctcctgccttggcctccaaaagtgctgggattataggtgtgagccactatgcctggccaatgaatacttttgaagagcagaaatcctcttctaactaa

SEQ ID NO: 515755 - DNA, 201 bp, Homo sapiens
tgttattttggttcatggttctgcaggctgtacaggaagcatggtgctggcatctgctcctggtgaggcctcaggaagctttcaatcatggtggaaggcawtggagtcattgtcattgtatcacatggcaagagggggaggttccagactcttaaataacccgatctcacttgaactcagagtgagaacttgctatctcaa

SEQ ID NO: 515756 - DNA, 201 bp, Homo sapiens
gtgcagtacaccaacatggcatgtatacgtacatatgtaacaaacttgcacgttgtgcacatgtaccctagaacttaaagtataacaaaacaatctcatgrtttttgtcctcgatttacagtgaattttacaagggagactttttataaccagaattctcactgcagtcctatagcaggacaggacattcccatactccaa

SEQ ID NO: 515757 - DNA, 201 bp, Homo sapiens
atgggaacgagagacactgtggactactagatgggagaggaaaggacaggtcattggttgaaaaactacctatcaggtattaggttcactacatgggtgaygggatccataccccaaaccttagcatcacacaatattcccatgtagcaaacctgcacatgtacctcctttatctaaaataaaagttgagccgagcacagt

SEQ ID NO: 515758 - DNA, 201 bp, Homo sapiens
acccaggaggtggaggttgcagtgagctaagattgagccattgcactctagcctgggcaacagagtgagactccatctcaataataataataataataataataaataaatgttgatatttaataaaattagagacaaatatttagaaattttcattgtttcaaaatattttattatttaattagatttcaggatagaaag

SEQ ID NO: 515759 - DNA, 201 bp, Homo sapiens
cccaggaggtggaggttgcagtgagctaagattgagccattgcactctagcctgggcaacagagtgagactccatctcaataataataataataataataataaataaatgttgatatttaataaaattagagacaaatatttagaaattttcattgtttcaaaatattttattatttaattagatttcaggatagaaagc

SEQ ID NO: 515760 - DNA, 201 bp, Homo sapiens
tcctcttttatttcattgagcagtggtttgtagttctccttgaagaggtccttcacatcccttgtaagttggattcctaggtattttattctctttgaagsaattgtgaatgggagttcactcatgatttggctctctgtttgtctattattggtgtataggaatgcttgtgatttttgcacattgattttgtatcctgag

SEQ ID NO: 515761 - DNA, 201 bp, Homo sapiens
ccaggaggtggaggttgcagtgagctaagattgagccattgcactctagcctgggcaacagagtgagactccatctcaataataataataataataataataaataaatgttgatatttaataaaattagagacaaatatttagaaattttcattgtttcaaaatattttattatttaattagatttcaggatagaaagca

SEQ ID NO: 515762 - DNA, 201 bp, Homo sapiens
ttattgtgtgggagtctaagctctttgtaggtctctaaggacttgctttatgaatctgggtgctcctgtactgggtgcatatgtatttaggagagttagctcttcttgttgaattgatccctttaccattatgtaatgcccttctttgtctcttttgatctttgttggcttaaagtctgttttatcagagactaggattgc

SEQ ID NO: 515763 - DNA, 201 bp, Homo sapiens
ctgccattaatttggagttttctattttaatttattttagactgatttactgtcatggaattattcttcaacttagtattatttttcatgtaattataatrtccgtagtcattttgcaacattatatcatcaatacccatataagcacaattaaatatacatggtatctcctaccattattatatggtaatagagtcagtc

SEQ ID NO: 515764 - DNA, 201 bp, Homo sapiens
tattgtgtgggagtctaagctctttgtaggtctctaaggacttgctttatgaatctgggtgctcctgtactgggtgcatatgtatttaggagagttagctcttcttgttgaattgatccctttaccattatgtaatgcccttctttgtctcttttgatctttgttggcttaaagtctgttttatcagagactaggattgca

SEQ ID NO: 515765 - DNA, 201 bp, Homo sapiens
tccatgtagaagggatcctcagtatgttaacagatacttttctcattagtaatcattgaggccagaaggcagtgagaagacatatgcaaactgtttaaagaaaaaaaaaaaatcacctgtaatcccagcactttgggaggccgaggtgggcagatcacttgaggtcaggagtttgagaccagcctggccaacatggcaaaa

SEQ ID NO: 515766 - DNA, 201 bp, Homo sapiens
attgtgtgggagtctaagctctttgtaggtctctaaggacttgctttatgaatctgggtgctcctgtactgggtgcatatgtatttaggagagttagctcttcttgttgaattgatccctttaccattatgtaatgcccttctttgtctcttttgatctttgttggcttaaagtctgttttatcagagactaggattgcaa

SEQ ID NO: 515767 - DNA, 201 bp, Homo sapiens
ccagctactcggaaggctgaggcaggagaatcgaacctgggaggcagagggtgcagtgagctgagatggcaccactgcactccagcctgggtaacagagtaactcaaagaaaaaaaccaacaacaaagaattttatatccagcaaaattatctcttaaaaatgagggagaattaagacattctagataaaagatgagggag

SEQ ID NO: 515768 - DNA, 201 bp, Homo sapiens
ggacttgctttatgaatctgggtgctcctgtactgggtgcatatgtatttaggagagttagctcttcttgttgaattgatccctttaccattatgtaatgmccttctttgtctcttttgatctttgttggcttaaagtctgttttatcagagactaggattgcaacccctgcttttttttgttttccatttgcttggtaga

SEQ ID NO: 515769 - DNA, 201 bp, Homo sapiens
cagctactcggaaggctgaggcaggagaatcgaacctgggaggcagagggtgcagtgagctgagatggcaccactgcactccagcctgggtaacagagtaactcaaagaaaaaaaccaacaacaaagaattttatatccagcaaaattatctcttaaaaatgagggagaattaagacattctagataaaagatgagggagt

SEQ ID NO: 515770 - DNA, 201 bp, Homo sapiens
ctggcctcatagaatgagttaaagaagaatcccttctcagtttttggagaaatttcagaaggaatggtactagcccttctttgtacatttagtagaatttwgcagtgaatctgtctggtctagggtcttttctggtgggtaggttttttattactgattcaattttgaaactacttattggtctttccagggatttagttt

SEQ ID NO: 515771 - DNA, 201 bp, Homo sapiens
cggacttcagagagaacaggttgtaaaatgtttcttagtggacttaaacgtgttcctagctcttagttgattatctcctggatctgcaaaggaaggaaggmaaacaaaggggaaaagggaaaggggattctctacagaatgtgaatttttcccacaagagactttgcatgacaatttcaaggtatgacaaggaaatatatt

SEQ ID NO: 515772 - DNA, 201 bp, Homo sapiens
gaaactacttattggtctttccagggatttagtttcttcctggttcagccttgggaggttgtatgttctcaagaagttactcatttctggtagatttcctrgctgtgttcatagaggtgttcataatagtctctgagggtttttggtatttctgtggggcaagtggtgacatcctttttgtcattcgtgattgtgtttatt

SEQ ID NO: 515773 - DNA, 201 bp, Homo sapiens
attgttagaaaggcctttcccagaaagcctgacacctgtgtctttagtctggcagctgcgctagtagcttttaactggccgacaggtgcctggtatttagmccccgaattctaaggaaaaataggaaagaatagcaagcgaaaggggtccgatggtactcaccacttggcaataggcgatagtctcacttcttggcgatag

SEQ ID NO: 515774 - DNA, 201 bp, Homo sapiens
gatcttctctctttttctttattagtctagctagtggtctatctatcttattaattctttcaaggaaccagctcctggattcattgatcttttgtatgtttgttgtgtgtgtgtgtgtgtgtgtgtgtgtgtgtgtgtgtgtgtgctgtctgtctgtctgtcttgatttcctttagttcagctctgattttggttatttct

SEQ ID NO: 515775 - DNA, 201 bp, Homo sapiens
actatatattcctagggtatatacttaggagtgaaatttctggtcacaggcaatacacatctttaattttaataaataattccaaatatttcctagagtarttttgccaatttatatttccactaaacaagtataagagtttccatttctccacatcttgctaatacttaaacactcaggtttttaaatgtttgccatccc

SEQ ID NO: 515776 - DNA, 201 bp, Homo sapiens
atcttctctctttttctttattagtctagctagtggtctatctatcttattaattctttcaaggaaccagctcctggattcattgatcttttgtatgtttgttgtgtgtgtgtgtgtgtgtgtgtgtgtgtgtgtgtgtgtgtgctgtctgtctgtctgtcttgatttcctttagttcagctctgattttggttatttctt

SEQ ID NO: 515777 - DNA, 201 bp, Homo sapiens
aaaaatacaaaaattagccagggaatcactggaacccaggaggtggaggttgcattgagccattgagccgtgccactgcactccagcctgggtgacagggygagactccgtctcaaaataaaataaaataaaataaaataaaataaaataaaaagggtaaatgctctggaaagtctcaccaatagaattgaacaaggagaa

SEQ ID NO: 515778 - DNA, 201 bp, Homo sapiens
atcttattaattctttcaaggaaccagctcctggattcattgatcttttgtatgtttgttgtgtgtgtgtgtgtgtgtgtgtgtgtgtgtgtgtgtgtgtgctgtctgtctgtctgtcttgatttcctttagttcagctctgattttggttatttcttgtcttccgctagctttggggtttgtttgctcttgtttctctag

SEQ ID NO: 515779 - DNA, 201 bp, Homo sapiens
ttgaagaaagaaatagacagcaatgcagtaatattaggagacttcaataacctgctttcaataatcgataggacaaccagacagaagatcaataaggacarcagaagacttgaaaaacactacagaccaactggatggaacagacacatacagaactctccactcaattcctatcaaaatctcaatatatctttgcagaaa

SEQ ID NO: 515780 - DNA, 201 bp, Homo sapiens
ctacttattttaaccattacctagctctaggcttcatgagattataaactttaattctaagaaaactgtttgggtaaaagtcctctggggaatatatatakagagagagagagtaattcaagtataaagttctctgacactttgaattagtttactaaacctttggtactacaatggctacatctttaatagaatacatta

SEQ ID NO: 515781 - DNA, 201 bp, Homo sapiens
gttatagggaaactgaagcagaaagtatgcctaagagtaacctagtttgtaaataaaacattttatcatacttgttaagaaaactgatttttagcagggtrtggtagttccagctacttagggggctgaagtaggaggatcacttgaccctaggagtttgaggctgcagtgagctatgattgcaccactgcactccagcct

SEQ ID NO: 515782 - DNA, 201 bp, Homo sapiens
gaaactggaccccttcattagatcatatacaaaaattaactcgagatggattaaagacttaaatgtaaaacccaaaactataaaaaccctagaagaaaacytagataataccattcaggacacaggcatgggcacagatttcatgatgaagatgccaaaagtaactgcaacaaaagcaaaattgactaatgggatccaatt

SEQ ID NO: 515783 - DNA, 201 bp, Homo sapiens
tagtttacaattaaagtaagcaatgaactatttttaaaatcactacttattttaaccattacctagctctaggcttcatgagattataaactttaattctmagaaaactgtttgggtaaaagtcctctggggaatatatatatagagagagagagtaattcaagtataaagttctctgacactttgaattagtttactaaa

SEQ ID NO: 515784 - DNA, 201 bp, Homo sapiens
tgggtaaaagtcctctggggaatatatatatagagagagagagtaattcaagtataaagttctctgacactttgaattagtttactaaacctttggtactrcaatggctacatctttaatagaatacattactgcctgttcacttctcaagaaaaagtatgtccctcagatttccttgttcagtgcagtggctcacacctg

SEQ ID NO: 515785 - DNA, 201 bp, Homo sapiens
aacccagattgaattaagaatattgaactgtattcaggcttctggctgttgtcttgtcaagtacaacttactatgattccctgaatgcattcatcccatgrttcagttaaatatccatttagtttatattttatcatactactaagttataaagtatcggcactcaacattgaaaatggtttcacattgatttctgaagca

SEQ ID NO: 515786 - DNA, 201 bp, Homo sapiens
gtggtccattttaagatttttgcacactttatccagagctttttgttttcttttatttgagacagggtctggctctgttgcccaggctggagtgcagtggygcgatctcagctcactgcaacttctacctcatggctttaagtgatcctcccacctgagcctcccaggtagctagcactacaggcccgtgccaccacacct

SEQ ID NO: 515787 - DNA, 201 bp, Homo sapiens
actgagtttcttaaggtgagaaagactaatgtcattagtttttctaaactttttagtcctaccacaggacatcaagcattaggggattttgaaaatacccyataaaagtaaatgtagttatagctgacatctagctgatgataacttttgaatgatactaattttaaaacttgcaaggtccaaaatgacagaagtttaggt

SEQ ID NO: 515788 - DNA, 201 bp, Homo sapiens
tgcaattaataacaaaaacttcattggagatttttagtatctaaaaagaactatagaacaatctgtattttcgctagctgcagtggctcacacctgtaatsccagcactttgggaggccgaggtgggcagatcatgaggtcaagagatcaagaccatcctggccaaccaacatggtgaaaccctgtctctactaaaaaaat

SEQ ID NO: 515789 - DNA, 201 bp, Homo sapiens
gggtgtttgtgtatgcatatatataaatttactaaatacttttctggcattctgtgaaacttagccagaatttaatttttatttcctttatttacatgccragtgggtattattaatcataattgtgatctattatattggagcaggaaaggatatgagttaaatcatagaaataaaatgtgaattttggaggaaaaataa

SEQ ID NO: 515790 - DNA, 201 bp, Homo sapiens
aagcctggggcaaatacttaattcttttccaatgacagtagagcaacactatggtaaagagtgtgagttttggagcaagactgccaggctccatgtcctaytatgcaattgagtagctatgggagcttggacaagttaagggttgccagatttagcaaaaatacagaatgcccagttaagtctgaatttcagataataaat

SEQ ID NO: 515791 - DNA, 201 bp, Homo sapiens
gcatatatataaatttactaaatacttttctggcattctgtgaaacttagccagaatttaatttttatttcctttatttacatgccgagtgggtattattratcataattgtgatctattatattggagcaggaaaggatatgagttaaatcatagaaataaaatgtgaattttggaggaaaaataaaataaaactgggaa

SEQ ID NO: 515792 - DNA, 201 bp, Homo sapiens
tggtttggaggagatggcagttcctaattccacctgtattagtccattctcatgctgctatggataaatatctaagactgggtaatttataaaggaaagargtttagttgactcacagttctgcatagctgaggagacctcaggaaccttataatcatggcaaaaggcaaaggagaagcagacaggacagagtgaatgcca

SEQ ID NO: 515793 - DNA, 201 bp, Homo sapiens
tgacaaaccagcaatagtaaatccttccatatcaataattactttaaatatgaataatccaactactagtcaaaagacatattgactgaatggattttttwaaaaactctaacactctgctgcacacaagagactcattttagattcaacacataagctgaaatggaaaggatggaaaaaatatttcatgtaactagttac

SEQ ID NO: 515794 - DNA, 201 bp, Homo sapiens
ccatgcccggcctcctcttttgccttttaagtttctgctgagaggtctgttgctagcctgacgtagttccctttgtaagtgacctgacccttctgtctagsccccattaagattttttctttgatgttgactttgggcaatctgaagagtatgtgccttggggatggttgtcttttatagtatcttgcatgggttctctgt

SEQ ID NO: 515795 - DNA, 201 bp, Homo sapiens
aatttgtacacattttaaactataacatttgactggaattttcaggaatggtgaaatacaggatattttaataggataaaagttttaatcatgatcattaygtagtcaagttgctttgagtggtcaagtggtagaattgagtggaataatttgctaggacctcctcttttaactttagttaaacaagataaaacattattc

SEQ ID NO: 515796 - DNA, 201 bp, Homo sapiens
ttccctctgagaaatgccagtgagtcataggtttgatttctttacataatcccatattttgtagaggttttactcatttttaaaaattcttttaaaaattrtttgtcttactgagttgatttgaactggtctttgagttctgagattcttttcctagtttagtctattatgttgttaatgcttccaattgtattttgaaat

SEQ ID NO: 515797 - DNA, 201 bp, Homo sapiens
atgcttgaaatgggataaaggaagggaaaaatgagatgagatgccttttcacttcttttctagagaacataaagctgcttcatttccattcagcaaactcycccaaacaataaactttatttagaggaaacatatctttaatttaaggtacaatactttccatgtacattgtgtgaattgttaagggtgttgacagttaaa

SEQ ID NO: 515798 - DNA, 201 bp, Homo sapiens
ctaattcatttgtcaacaaacaccttcagcttgaaccaacttttatcagtaatgtgaaccagtatcaatcacgtgatggcaacttattctgccctttagtrtctaagcaggtactttaacttttcagatgtgtagacttgataatgctttctgagtatggtggtaatttcatgatctcttactcagaacaggtccttgaat

SEQ ID NO: 515799 - DNA, 201 bp, Homo sapiens
agaaaccatagtgcagggattgtgaatacatgaagaaaactctttcaagacttggtttttaaaccaaggagaatggtggtcattggaattagaggaagggkgtgtgtgtgtgtgtgtgtgtgtgtgtgtgtgtgtgtgtgtgtgtgtttcttaagatgggagacaaatatagttaatgctgttgggaatgtgtgagataaa

SEQ ID NO: 515800 - DNA, 201 bp, Homo sapiens
ttctgctatctttggggttagtttattcttgtttttctagttcctctaggtgtgatgttagattgttaatctgagatctttctaactttttggtgcaggcrtttagttctataaactttggagagatcttttttgtataggcaatgaaatgaggttacagtggaaatgctccataaattgcaaaaaattgagagccagtgc

SEQ ID NO: 515801 - DNA, 201 bp, Homo sapiens
actttttatcactttcttgtatacccatatagcttttatcaccgagtgtgcatccccagaaaccatagtttaatattagccacttaagacattttaatgtrtatcttaaatctcttttaatgtagaagtcccccatccatcctttctttttctgtaaaatttgtctgttgaaactgtagtgtcccacagtctggattttat

SEQ ID NO: 515802 - DNA, 201 bp, Homo sapiens
ctctcagttctttctcttttttgatgttagcagctattcaatgttcaatgcctagatccattaattcattagggttgcaaaatggtaatattataattatrttatttatttttcattgattacttgggatacttctataaagagacacttccactcaactcctatgtgtttcccaatggttgtacttatatagggtaaaca

SEQ ID NO: 515803 - DNA, 201 bp, Homo sapiens
caagaaaaacaaaacactggacgctggccatccgtttcttgtgtaacagtcttccctccctggccatttttaatactgcgtagcctgtggtttagctaacwcactgcctgtgtttctgtgcttttcttctttgtcctaccctattgccttagaattaaaacagagatattttcctttagatttttagactttcatcagact

SEQ ID NO: 515804 - DNA, 201 bp, Homo sapiens
gaacataggagaagccagtataatggcagaactaagttttatagaagacgagagagagagaaagcattggttgatgcatttgaagatgtttaagacagagyggaaggaagttcagagagtactgcagaaaggtctggagtggagggaagcagtgggagatggcctaggaaagagagggagtgagcacattattactgcata

SEQ ID NO: 515805 - DNA, 201 bp, Homo sapiens
cgcagaccttcgcagtgagtgctacagctcttaaaggtggcacatctggaggtgtttcttcctcccagtgggttcatggtctcactgacttcaggagtgawgctgcagaccttcacggtgagtgttacagctcataaaggcagcacggacccaaagagtgagcagcagcaagatttattgtgaagagcgaaagaacaaagc

SEQ ID NO: 515806 - DNA, 201 bp, Homo sapiens
agatattttcctttagatttttagactttcatcagacttttcacctcataaaagttttttcttcttcctttaattatctatactgtttttccccttcttaytgtttgccttttcaccatgcctttgttagaactttttaccctgttcgttatcacaggcattctcttttgaattctaatgaccagttcctgaaatccccaa

SEQ ID NO: 515807 - DNA, 201 bp, Homo sapiens
atgcccctgcactccagcctggtgacagagcgagactccatctccaaaaaaaaaaaaaaaaatatatatatatatacacacacacatatatatatatatayacacacacatatatatatatatatatatgtatgaataattagtattgccagatagttacaatggaatggggacaaatgcaaaactgcagtgaatgcatgg

SEQ ID NO: 515808 - DNA, 201 bp, Homo sapiens
actgtttgccttttcaccatgcctttgttagaactttttaccctgttcgttatcacaggcattctcttttgaattctaatgaccagttcctgaaatccccracatgtattttaagactctttagttattagatttcagaattcaccaagtctaggaagtacctgaagacaggattaagaccaagaacccagtaagtgaagg

SEQ ID NO: 515809 - DNA, 201 bp, Homo sapiens
atggctgaacagtatttcatgatgtatatttaccacattttctttgattatactttaggttcttggacacatgtgcggaacatgcaggtttgtcacatagstatacatgtgccattggttttctgcacccatcaacccatcatctacattagttatttctcctaatgctgtctctcccctagcccccgaccccctgacagg

SEQ ID NO: 515810 - DNA, 201 bp, Homo sapiens
cagtttgcactatataaatatcagccataaattctaaataaccaaatatggattttatttagtgtctgtgtttttcattctttttttgtttcattctgctmttcttgccaaataatccagggctttctcattagaaacaacaataatagccgctatttactcagtgctcctgtcccctgcatttagttacattatttttaa

SEQ ID NO: 515811 - DNA, 201 bp, Homo sapiens
gctcctggattcattgatcttttgtatgtttgttgtgtgtgtgtgtgtgtgtgtgtgtgtgtgtgtgtgtgtgtgctgtctgtctgtctgtcttgatttcytttagttcagctctgattttggttatttcttgtcttccgctagctttggggtttgtttgctcttgtttctctagttcctctaggtgtgatgttaggttgt

SEQ ID NO: 515812 - DNA, 201 bp, Homo sapiens
gtagaattcggctgtgaatctgtctggtcctgggctttttttggttggtaggctattaattactgcctcaatttcagaacttgttattggtctattcaggkattcaacttcttcctggtttagtcttgggagggtgtacgtgtccaggaatttgtctatttcttctagattttctagttgatttgcatagaggtgtttata

SEQ ID NO: 515813 - DNA, 201 bp, Homo sapiens
tcaaggaggctgaagataggagcccaataccttctagcttgtagggtttctgctgagaaatctgctgttaatctgataggttttcctttttaggttaccasgtgcttctgtctcacagctcttaaaattctttcctttgtcttaacctgatgacaatgtgcctaagcaatgatctttttgcgatgaatttcccagatgttt

SEQ ID NO: 515814 - DNA, 201 bp, Homo sapiens
tccaaattcccttagagtttgcttgtctgaagaggatcttatttgtcctttgagtatcaaacttagtttggctggatataaaattcttggttgaaaaatcttttttttttttttttttttgagatagggtctcactccattgcccaggctgatgtgccgtggcacaatcatggctcactgcagctttgacctccccaggct

SEQ ID NO: 515815 - DNA, 201 bp, Homo sapiens
tggtctattcagggattcaacttcttcctggtttagtcttgggagggtgtacgtgtccaggaatttgtctatttcttctagattttctagttgatttgcakagaggtgtttatagtattctctgatggtagtttgtatttctgtgatcattggtggtatcccctttatcattttttattgtgtctatttgattcttctcta

SEQ ID NO: 515816 - DNA, 201 bp, Homo sapiens
ccaaattcccttagagtttgcttgtctgaagaggatcttatttgtcctttgagtatcaaacttagtttggctggatataaaattcttggttgaaaaatcttttttttttttttttttttgagatagggtctcactccattgcccaggctgatgtgccgtggcacaatcatggctcactgcagctttgacctccccaggctc

SEQ ID NO: 515817 - DNA, 201 bp, Homo sapiens
attctctgatggtagtttgtatttctgtgatcattggtggtatcccctttatcattttttattgtgtctatttgattcttctctattttctttattagtcwggctagcagtctatgtattttgttaatcttttcaaataggtcctggattcattgatttttgaagggtcatttgtgtctctatctccttcagtatgctttg

SEQ ID NO: 515818 - DNA, 201 bp, Homo sapiens
gtgacctgctccttctctctagctgcctttaacattttttctttcattttgaccttggagaatctgatgactatttgtctttgggatgatcttcttgggtagtattctgcaggagttctgtgcattttctgaatttgaatgttggcctctctagtgaggttggggaaattttcatggatgatatcttgaaatgtgttttcc

SEQ ID NO: 515819 - DNA, 201 bp, Homo sapiens
attttgttgggctggcttgaacagcagtcgtatggggtcctgggtctacatcttaacctaaagtaccctttcttctgacagaaccatacagaaagacacayaaagcacaccagagtgtctacagcttgacaccaacctcacaaatcctttttcattaaaactttacagagaatattagcaattatccttatttatcccttt

SEQ ID NO: 515820 - DNA, 201 bp, Homo sapiens
acacagatatccttgtaggatttcctttcatcattattctggaaattcttttttctttgttcttgtgttgaatcccttatttcctggattctttttttttytaatttttaaaaattatactttaagttctgggatacatgtgcagaacgtgcggtttgttacataggtatacatgtgccatggtggtttgctgaacccatc

SEQ ID NO: 515821 - DNA, 201 bp, Homo sapiens
gctggcttgaacagcagtcgtatggggtcctgggtctacatcttaacctaaagtaccctttcttctgacagaaccatacagaaagacacataaagcacacmagagtgtctacagcttgacaccaacctcacaaatcctttttcattaaaactttacagagaatattagcaattatccttatttatcccttttaccaatttg

SEQ ID NO: 515822 - DNA, 201 bp, Homo sapiens
gtacctctggtagaattcggctgtgaatccatctggtccttggctttttttggttggtagactatatattactgcctcaatttcagaacttgtttttggtstgttcagggattcaacttcttcctggtttagtcttgggagggtatatgtgtctaggaatttatccatttcttctagattttctagtttatttgtgtagag

SEQ ID NO: 515823 - DNA, 201 bp, Homo sapiens
ccttgtcttgttcctgttttaagggggaatgcttgcaaattttctccattcagtatgatgtttgctgtgggcttgtcatagatggccgtttttattttgargtatgttccctcaatgcatagtttgccaagggtttttatcatgaagggatgctggattttatcaaatgcttttttttttttttgcatctactgagatgat

SEQ ID NO: 515824 - DNA, 201 bp, Homo sapiens
aattatgtggttaattttagaataagggctatgtggtgctgagaagaatgtgtattctgttgacttggggtggagagttctgtagatgtctattaggtccmcttggtccagaggtgagttcaagtcctgtatatccttgttaattttctgtcttgttgatgtgcctaatattgacagtgggatgttaaagtctcccactat

SEQ ID NO: 515825 - DNA, 201 bp, Homo sapiens
cttctcataaattcattatggagactaaaagagccaactttcaaattgctaacaagatctttccatttcctctttgggtttgtcttttcttttctttttctttttttttttttttttttgagccggagtcttgctctgtcgcccaggctggagtgcagtggcgcgatctcggctcactgcaagctccacctcccgggttca

SEQ ID NO: 515826 - DNA, 201 bp, Homo sapiens
tctcagagttgatttatgggagaggaggtacatggactctggagaaactgctattccctgcccagaaaaatatttttaagaatatgtgaataaaatacatmacacacacacacacacacacacacacacacacacacacaatttagtacgtaatttcagaaggctcttgtgaggattaaatgaaataatgaatataaagtg

SEQ ID NO: 515827 - DNA, 201 bp, Homo sapiens
agtgttgacaagtgaaatctgacaaggtagaggtggtatagctgcgggccactccaaaattttccactatcttttctatttgtagataaaggatttctgttttttttttttttcatttgagctcacttcatagcagtctttgatttctaaccttttcaaaacaataaccctgaattgacaaattattttggtatttaagca

SEQ ID NO: 515828 - DNA, 201 bp, Homo sapiens
ctatgtacttgataaaacattacttctcattaaatcatattgaggtcatctctgcattaaaattcagaaccaacaagtttgatcactgtataaccactttmcacacacacacacacacacacacacacacacacacacccccacaccattttctctttcaaggctttcttgacactatattatcttagtctgtcttttaaa

SEQ ID NO: 515829 - DNA, 201 bp, Homo sapiens
ggtttcaccatgttgaccaggctggtctcgaactcctggcctcaagtgatctgcctgcctcggcctcccgaagtgctgggattataggcgtgagccactgygcccagcggtgattatagaatctaaatgagaaaatgcatgtaaagcattcaacacatagtaggggctctgtaaataactgagaagagaactttctccttg

SEQ ID NO: 515830 - DNA, 201 bp, Homo sapiens
gccttgattgtaccactacactccagcctgggtgacagagtgagaccttatctcaaaaaaaaaaaaaaaagcttgtgtaaaaaaaaactgaaaagcagccyggcgaggtggctcacgcctgtaatcccagcactttgggaggccaaggtggggagattgcctgaggtcaagagttcaagaccagcccggccaacacgggaa

SEQ ID NO: 515831 - DNA, 201 bp, Homo sapiens
tgatctttttgcgatgaatttcccagatgttttctgtgcttcttgtatttggatgtctctagcaaggctgggaaagttttccttgattattctcccaattwtgttttccaaacttttcaaattctcttcttcctcaggaacaccaattattcttaggtttggtcatttaacgtgatcccagacttcttggaggttttgttc

SEQ ID NO: 515832 - DNA, 201 bp, Homo sapiens
agtgtatattaaataaaggtaatggagttctttatatttgcccaggtatttactgtttctcctacttttcattctttcttgaagatctgcatttccatctmgcatttattttagcctaaagagcttcttttagtctttcttacggtgtagttctacttgtgataaattttcttggtttcttcctgcaaatgtctttattac

SEQ ID NO: 515833 - DNA, 201 bp, Homo sapiens
atccaaaaatctcagtgaattccaaatataagaaatcaatacctaggcacaccatatcttggcacagcatagacaaattactgaaaactagtgatgagagmtaaatctttaaaatacccaggaaacaaaaaattgtatctttaaaatacccaggaaacaaaaaagagcaacagctaatacgaattatgactgacttcaaat

SEQ ID NO: 515834 - DNA, 201 bp, Homo sapiens
cagtaggattggtacaagttcttctttatacatctagtataattcagctgcaaatccatctggtccggggctttttaaaaattggtaggctttctggctargcacggtggctcacgcctgtaatcccagcactttgggaggccgaggtgggcagatcatgaggtcaggagatcgagaccatcctggctaacacggtgaaac

SEQ ID NO: 515835 - DNA, 201 bp, Homo sapiens
aagtagggcaatgctatatcatctcatttaactgctactaccaacagatgaggtaggtattagcttaatttttgatcagcatagttaaaagcttagctccrgagtcaaagttgcctgggtttggatcattactctaacacttactagctttgtgatggtagtaatattatttaacctctctctgccatggtttcctcatct

SEQ ID NO: 515836 - DNA, 201 bp, Homo sapiens
aaaaatatgccacaactgaaaatgaacgcaggacacaggcaattaaacaaaaatgcaggctgaatgcagtggctttacacctgtaatccctgcactttcgraggcttaggtgggaggatcgcttgagcccaggagttttgagaccagcctgggcaacatagtgagaccctgtctctacgaacaattttttttaattagcca

SEQ ID NO: 515837 - DNA, 201 bp, Homo sapiens
gctgaatgcagtggctttacacctgtaatccctgcactttcggaggcttaggtgggaggatcgcttgagcccaggagttttgagaccagcctgggcaacayagtgagaccctgtctctacgaacaattttttttaattagccaggtgtggtggtgcttggttgtggtcctagctactcaggaggctgaggtgggaggattg

SEQ ID NO: 515838 - DNA, 201 bp, Homo sapiens
ggcttaggtgggaggatcgcttgagcccaggagttttgagaccagcctgggcaacatagtgagaccctgtctctacgaacaattttttttaattagccagrtgtggtggtgcttggttgtggtcctagctactcaggaggctgaggtgggaggattgctggagcccaggaagttaaagctctagtgagctgtgattgcgcc

SEQ ID NO: 515839 - DNA, 201 bp, Homo sapiens
aatgagcctcaggtaacaaaggcttttcaagacaagccaataaagcataaagccatcttccctaaaaaaaaattcaaaaaattaatatttagacaaatackgaaccagaagtttattttttaaatgtccaatgttatgcctgattatctgctatgaataaattcatagaacatttaactatattatgtttgggtatagaca

SEQ ID NO: 515840 - DNA, 201 bp, Homo sapiens
cactccacaaaggctagagttacagaaagcctctttagaggcagtaaatgccaattgtctttctgaaggaaaaagtacaagcgaatgtctaactttgcacrgagtagtcaaatcttacgtcataattgatgctgtcagatactataggaagagcgttagtcttttaattggggggttgggggtaatctccagacggttaat

SEQ ID NO: 515841 - DNA, 201 bp, Homo sapiens
caaactgtattatgtctaatgattataaaaataatttggtaattaattcatgaatattctgtatactttaggatcataaattttatttttccagctacagyctaagaacagaaataaatccaacaggggcttaattagattaaatatgacacttacctgtcgaacagttgaaaactgtgccacttgttgctgttgccattg

SEQ ID NO: 515842 - DNA, 201 bp, Homo sapiens
tgaggtgatggctatcctaattactgattattatacattgtatgcatgtatcaaaatatcacatatactccataaatatgtacaattattattgtgcctgmgtgataaagcatgaaattatgattattatgtatcaataaaattaaaaataagaactttggtatgggcaaaatgtacttaaagacgcttaactttaaattg

SEQ ID NO: 515843 - DNA, 201 bp, Homo sapiens
agaattgcttgaatccaagagacagaggttgcagtgagccaagattgtgccactgcactccagactgggcaacaagagcaaaactccatctcaaaaaaataaataaaataaaataaaataaaataaaacctcacgatgaacatgagaccactacaaagttaaaccctattgtcttggaataaggttatctaccttttccta

SEQ ID NO: 515844 - DNA, 201 bp, Homo sapiens
atcctagctactcagggggctgaggcaagagaagctcttgaacctgagaggcagaggttgtgatgagctgagattgtgccactgcactccagcctgggcgraaaattgagacgcaaaaaaaaaagggggaaaaagagagcccttctatgattcctctacagtagttctgtcatttattgattattatacatgcttattttc

SEQ ID NO: 515845 - DNA, 201 bp, Homo sapiens
gaattgcttgaatccaagagacagaggttgcagtgagccaagattgtgccactgcactccagactgggcaacaagagcaaaactccatctcaaaaaaataaataaaataaaataaaataaaataaaacctcacgatgaacatgagaccactacaaagttaaaccctattgtcttggaataaggttatctaccttttcctaa

SEQ ID NO: 515846 - DNA, 201 bp, Homo sapiens
aattgcttgaatccaagagacagaggttgcagtgagccaagattgtgccactgcactccagactgggcaacaagagcaaaactccatctcaaaaaaataaataaaataaaataaaataaaataaaacctcacgatgaacatgagaccactacaaagttaaaccctattgtcttggaataaggttatctaccttttcctaac

SEQ ID NO: 515847 - DNA, 201 bp, Homo sapiens
tccttttcaacttctttgggtcaatttgagctaccacaacatctggacattgagctgcttcgatcctacaaataagtaataaacgcgataaattaaatttmtgttgtgctttgctcaggtgtagtaaaacaagcgatccacttccacagttcattgtgaaatcagaaaaaaattcagacttccaattgaggtactaaacaa

SEQ ID NO: 515848 - DNA, 201 bp, Homo sapiens
tggaaaaagttccttaaaaaataaaggggccaggtgaggtggctcacgcctgtgatcccaacgctttgggtggcagaggagggaggatcacttgaggccargagttccagaccagctggcaacagagactccctctctataaacaaacaaacaagcaaaaaataaaagataacataagtaacccatttaaagactcctttg

SEQ ID NO: 515849 - DNA, 201 bp, Homo sapiens
attgcttgaatccaagagacagaggttgcagtgagccaagattgtgccactgcactccagactgggcaacaagagcaaaactccatctcaaaaaaataaataaaataaaataaaataaaataaaacctcacgatgaacatgagaccactacaaagttaaaccctattgtcttggaataaggttatctaccttttcctaaca

SEQ ID NO: 515850 - DNA, 201 bp, Homo sapiens
ttgcttgaatccaagagacagaggttgcagtgagccaagattgtgccactgcactccagactgggcaacaagagcaaaactccatctcaaaaaaataaataaaataaaataaaataaaataaaacctcacgatgaacatgagaccactacaaagttaaaccctattgtcttggaataaggttatctaccttttcctaacac

SEQ ID NO: 515851 - DNA, 201 bp, Homo sapiens
ggctcacgcctgtgatcccaacgctttgggtggcagaggagggaggatcacttgaggccaggagttccagaccagctggcaacagagactccctctctataaacaaacaaacaagcaaaaaataaaagataacataagtaacccatttaaagactcctttgaaaggactggataatgtcctgaagtaagatgggcaacact

SEQ ID NO: 515852 - DNA, 201 bp, Homo sapiens
aggtaacaaaggcttttcaagacaagccaataaagcataaagccatcttccctaaaaaaaaattcaaaaaattaatatttagacaaatactgaaccagaartttattttttaaatgtccaatgttatgcctgattatctgctatgaataaattcatagaacatttaactatattatgtttgggtatagacaagaaagcctc

SEQ ID NO: 515853 - DNA, 201 bp, Homo sapiens
aatcaaattttgtcatggctcactgcattcttgaacccctggactcaagcaatcctcccaccttgacctcccaaagcactgggcttacaggtgtgagtcaytgtgcccagctttccttttttttttcttttttcttttttttttgagatggagtttcgttcttgttgcccaggctggagtgcaatggcacgatctcagctc

SEQ ID NO: 515854 - DNA, 201 bp, Homo sapiens
ttagtaagtaaaatgttaaagactaaaaattttttacatgatagtacttgaaaaaactaacttattaagtatatccaataaaactgtaacattgataagaygacattaatatgttgtatacaccatttcaaaatcttcagctaaagctaatattttcaagaattaaggacacttgaattagaatgacatttttaaaaccta

SEQ ID NO: 515855 - DNA, 201 bp, Homo sapiens
cacgcctgtaatcccagcactttgggaggccgaggcaggcgatcacatgaagtcaggagttcaagaccagcctggccaacatggcaaaaccccacctctamtaaaaatacaaaaaaaaaaaaaattagccggatgtggtggtgcacacctgtaatcccagctacccagaggctgaggcaggagaatcactcgagcctggga

SEQ ID NO: 515856 - DNA, 201 bp, Homo sapiens
cttgctgaaaaaccacctgcaagttacttaacctcaaatgctgtttcctcatctataaaaagtagttatcaataataactctccatagagggttgtagtamggattaaataagaaccattaaagagcttaggacaaagtcttgcatactgtaagaattcagtatatgtattaacaattcaaatactttcacacacaatgca

SEQ ID NO: 515857 - DNA, 201 bp, Homo sapiens
tggtggcaggtgcctgtaatcccagctacttgggaggctgaggcaggagaatcacttgaaaccaggaggtggaggctgcagtgagccgagatcgcgctacygcactccagcctgggcaacagagggagattccatgtcaaaacaaacaaataaataaaaaataaataaataccgtagcatcacatcaagtacagtcatgca

SEQ ID NO: 515858 - DNA, 201 bp, Homo sapiens
tcaggctggtctcgaactcctgacctcaagtgatctgcctgccttagcctcccaaagtggtgagattacaggcgtgagccaccatgcccggctgtacaacyttttttcaatacaatttcatcagttgtaatatcatcttgtagccatcttttttatttataatacataataaaatgtttaccatgttgtttttgtcctttt

SEQ ID NO: 515859 - DNA, 201 bp, Homo sapiens
caatttgagctaccacaacatctggacattgagctgcttcgatcctacaaataagtaataaacgcgataaattaaatttctgttgtgctttgctcaggtgyagtaaaacaagcgatccacttccacagttcattgtgaaatcagaaaaaaattcagacttccaattgaggtactaaacaatgtatttctgaaattatctgg

SEQ ID NO: 515860 - DNA, 201 bp, Homo sapiens
caactcttccactgcggactccgctggtacccacgccatggttttcaaaccagccagttccgctcggcgcatgcgcccattctaggtcacagcgcaggcgyactaatagacaccttaggcgcggagctgagcaagtggcagtttagggagcgttaactgcgcatgaacaaattgctgcttgcctcaaggttaaggctccgg

SEQ ID NO: 515861 - DNA, 201 bp, Homo sapiens
agaactttttccatttttatctaactttttgagggcaaaaaatacacttgaatgtttttgctttcataattgcataatactgtaaaatctcaactgaggcagtcagaaactatacttgtctgaggtttcattaattactggtttgctgagctaccaattacttaacctttctgaatctgtgtcattatctgtaaaaggaaa

SEQ ID NO: 515862 - DNA, 201 bp, Homo sapiens
gaactttttccatttttatctaactttttgagggcaaaaaatacacttgaatgtttttgctttcataattgcataatactgtaaaatctcaactgaggcagtcagaaactatacttgtctgaggtttcattaattactggtttgctgagctaccaattacttaacctttctgaatctgtgtcattatctgtaaaaggaaaa

SEQ ID NO: 515863 - DNA, 201 bp, Homo sapiens
aactttttccatttttatctaactttttgagggcaaaaaatacacttgaatgtttttgctttcataattgcataatactgtaaaatctcaactgaggcagtcagaaactatacttgtctgaggtttcattaattactggtttgctgagctaccaattacttaacctttctgaatctgtgtcattatctgtaaaaggaaaaa

SEQ ID NO: 515864 - DNA, 201 bp, Homo sapiens
ataacttgggggaaatttttccctggttcctactaaaggaacaataagaatcctgtgtcttaactgtacagtgatgaatatatatatatatattcatatakattatatatgtgtcttaactgtagtgaatatgtattcatatataataaatatatattaatatacatatatgaataaatatatttatcactgtagtcaaga

SEQ ID NO: 515865 - DNA, 201 bp, Homo sapiens
ccaagactttctcaatgaaggaagtagtatgttgatttacattctagtgtttcttatttgactacaaacaagtatagttcagattatacatatatatatayacacacacacacatatacaaatataaatataaatataaatactggctgggtgcagtggctcacgcctgtaattccaacactttgagaggtggaggcgggc

SEQ ID NO: 515866 - DNA, 201 bp, Homo sapiens
gaaaccaggaggtggaggctgcagtgagccgagatcgcgctactgcactccagcctgggcaacagagggagattccatgtcaaaacaaacaaataaataawaaataaataaataccgtagcatcacatcaagtacagtcatgcatcacttaatgaagggagatatattctgagaaatgcattgttaggtgatttttgaccc

SEQ ID NO: 515867 - DNA, 201 bp, Homo sapiens
ttgaacccaggaggcagaggttgcagtgagctgagatcctgccgcttcagtacagcctgggcaaaaggcgaaactctgtctcaaaaaaaaaaaaaaaaaargatgtatttgtaaaaataccatcagttggccaggcgcggtgggctcatgcctataatcccagcactttgggaggccgaggcgggtggatcacaaggtcgg

SEQ ID NO: 515868 - DNA, 201 bp, Homo sapiens
atcccagcactttgggaggccgaggcaggcgatcacatgaagtcaggagttcaagaccagcctggccaacatggcaaaaccccacctctactaaaaatacaaaaaaaaaaaaaattagccggatgtggtggtgcacacctgtaatcccagctacccagaggctgaggcaggagaatcactcgagcctgggaggcggaggct

SEQ ID NO: 515869 - DNA, 201 bp, Homo sapiens
gaggccgaggcaggcgatcacatgaagtcaggagttcaagaccagcctggccaacatggcaaaaccccacctctactaaaaatacaaaaaaaaaaaaaatyagccggatgtggtggtgcacacctgtaatcccagctacccagaggctgaggcaggagaatcactcgagcctgggaggcggaggctgcagtgagcagagat

SEQ ID NO: 515870 - DNA, 201 bp, Homo sapiens
tagaactttttccatttttatctaactttttgagggcaaaaaatacacttgaatgtttttgctttcataattgcataatactgtaaaatctcaactgaggyagtcagaaactatacttgtctgaggtttcattaattactggtttgctgagctaccaattacttaacctttctgaatctgtgtcattatctgtaaaaggaa

SEQ ID NO: 515871 - DNA, 201 bp, Homo sapiens
attttgcaaagcggaggctgcgacgggtcctgcagggggacagtgaggaaagggccgcctcgtctccgctcctgggggaccgcaggtgcgcagcggggagygggggcgggctggcggcggcgggctgggggctgggatcctggggtggtcccggctctgccctctcggtgccccggggccagcgaggtgtgctggaggctg

SEQ ID NO: 515872 - DNA, 201 bp, Homo sapiens
attacaaaatagtggctgggtgcggtggttcacgcctgtaatcccagcactttgggaggccgaggtgggtggatcacgaggtcaggagatcgagaccatcytagctaacatggtgaaaccctgtctctactaaaaatacaaaaaaaaaaactagccgggcgtggtggcgcatgcctgtaatcccagctactcgggaggctg

SEQ ID NO: 515873 - DNA, 201 bp, Homo sapiens
gctacatttttttcctgtgtatttagtaatggtttctgttggaaaagtaatgtaaaaatgagagtagaaaacagaattaatatttggcgacaccataggamaaaagtgatcctatcaaatagactccaagtttagcactatacccttgagacaaaaagcaatgaagtgtgtaagacaggaagtggtgactccagtttaatg

SEQ ID NO: 515874 - DNA, 201 bp, Homo sapiens
aatggttgttcctgtggcagccctgtttacaccactgaaagagagacctgacttaccacctattcaatatgaacctgttctgtgtagtaggaccacttgcygtgcagttttgaatcctttatggtaagtaaaatatatagaaaaactaatgtggcaatgtgattttaaaatgtcggggtttttctgcatatttttataaaa

SEQ ID NO: 515875 - DNA, 201 bp, Homo sapiens
gttgtacaagtaaattgtggaggatcttgaatgtcaggttgaggagtgagaagttgagtatttatttggtaagtaatggagagtcattgaaggtggacagrgggcagatttgagtcttagtatagttgaatcttaagattaaatggaagcagtctgtaggttgaaagtatatttacgaaaataatccaagtgagagggagt

SEQ ID NO: 515876 - DNA, 201 bp, Homo sapiens
caaaacaaaagaagatgttcactcttccacttttctctccactcttccctgtctgagatgagttaagcaggagaaatatccatgtttatagggattaggcycatagattagtttagaattaggaatgtgctactatataccataggattttaaaagaaagttgttcagatacctttgtttttaaatttcattgtaaacatt

SEQ ID NO: 515877 - DNA, 201 bp, Homo sapiens
gagagggagtaaaggcaagatggtgaaaggaatagatttgggagatattttaaaagtagactcaataggacttgattagaagttgcaggaaagtaattatkccagggcatggcaactatgcacaaaatctgaattctgattgaatcctggattaaagggagagaatagctataaagaacataattgggataatttgtgaga

SEQ ID NO: 515878 - DNA, 201 bp, Homo sapiens
agtgctgagattacaggcgtgacctactgcacccagccaatatttactatatgttaaaagttatattcaccatttaggtaaacttgtatatgttaaaagtrtgaattagatattggcagtatctaaaactacatggcttttaaaagttactttgactatcaatttgaatatgttcatgttttaggaagaaattaattttat

SEQ ID NO: 515879 - DNA, 201 bp, Homo sapiens
cgtggcaaaatgttaacagtcagtgaatgtaggtatgctatatgggtgtttattgtacttctctctcaactttaatgtagtcttgaatttttaaaaaacargtgaggggaaacagggtattttggggttttaagcctgagtgactaggaaaacatatgtcaataaatgggagagtggagagaaattgtttggtttagacac

SEQ ID NO: 515880 - DNA, 201 bp, Homo sapiens
gaccatattgattatggccatgttgagtgggctgttggcaatttgggtttgatggtcagggcaagaatgagaaaggtgataaagtcatcacagtaaatgcwtgtctgaagagagagtaaagaggtaaaggagagatgagacaaaaacttcaggggagtacaagtggtaggagtgtttagtgaattatcagagaggcagaat

SEQ ID NO: 515881 - DNA, 201 bp, Homo sapiens
tacggtaagggcacagaacttatttggagaccaagcataggaaagacacaaaagaacagatatttaagatcctcaggagacaatatgatcataagcagtayatggacgttaagcattggtaaggaggcagggcacttatttctgcaaaagcaaaaggtaagaagggtgaagacagaaaggtttttaggtggagtgaaaact

SEQ ID NO: 515882 - DNA, 201 bp, Homo sapiens
tagaataaagaaaagtatttcattgttatagatttttgaacaggaggaacaatagaaatagctaaaacatgtatgtctactgtgtgtactaggtactgttytgtttgctttatagaatttaactcatttaatcattacaacaacttgtgtaagataggtcctgttattatccttgttttacacatggggaaactaagacat

SEQ ID NO: 515883 - DNA, 201 bp, Homo sapiens
cgcctggcctttttttttgttgttctatgatacttgtgttctaaacatcaaaaacaaaagtaaaacaccaacaaaaaaatagaagagccaggtgcagtggygtgtgcttctcattccagctacttggaaagctcaagtgggaggatcacttgagcccaggagttaaagtccagcactggcaacatggtgagaccttgtctc

SEQ ID NO: 515884 - DNA, 201 bp, Homo sapiens
taattttttgtatttttagtagagatgggatttcaccatgttgaccaggctggtcttgaactcctgacctcaggtgacccacccgcctcagcctcccaaastgctgggattacaagtgcgagccaccacgcctggcctttttttttgttgttctatgatacttgtgttctaaacatcaaaaacaaaagtaaaacaccaaca

SEQ ID NO: 515885 - DNA, 201 bp, Homo sapiens
ataaaggtttagagaagaaaaatgaacatatataggacacaatttattctagacttctagaggagtgtgacttatagtttttttttttttttttttttttkttttttttttttgagatggagtttcgctcttattgcccggctggagtgcaatgtcatgatctcagctcactataacctctgcctcctgggttcaagcaat

SEQ ID NO: 515886 - DNA, 201 bp, Homo sapiens
tctcaaaaaaaaaaaaaaaaaaaaaaaaaagaaagtttattttgccaaggctgaggacacatgcctctggaggtcctgatgacatgcgtccaaggtggtcmgagcacagttggttttataaattttcgggagacatgagacatcaatcaacatatgtaagatgtatgttggttccatccagataggtgggacagctcaagt

SEQ ID NO: 515887 - DNA, 201 bp, Homo sapiens
ggagtgcagtggcgccttctcggctcactgcaagctccgcctcctaggttcacgccattctcctgcctcagccttccaaatagctgggactacaggcgtcygccagcatgcctggctgattttttgtgtttttagtagagatggggtttcaccgtgttagccaggatggtctccatctcctgaccttgtgatctgcccgcc

SEQ ID NO: 515888 - DNA, 201 bp, Homo sapiens
ctgaaccttcccttagatttattcagatttcagataaggaacttggaagtactgatgcttggcaaacttctcagtttatttatggctctcaacgtgtgtgmacacacacacacatgtgtgtgcacacattaaatttgacattcagaacatttgcttaaggaaacaacgacataccaaatgaaggactttttacaacttaca

SEQ ID NO: 515889 - DNA, 201 bp, Homo sapiens
agagcatgtggtgtttgcttttctattcctgtcttagtttgctgaggataatggcttccaactccatctgtgtccctgcaaaggacatgatctggttccatttttttttttttcgagaaggagcctcgccttgtcgcccaggctggagtgcagtggcacgatctcggctcactgcaacctcctcctccaggttcaagcaat

SEQ ID NO: 515890 - DNA, 201 bp, Homo sapiens
ccacgcctggatgattctttgtattttttgtgaagactgggtttcaccatattgcccaagctggtcttgaactcctggactcaagccatctgccgcctcargcctcccaaagtgctgagattacaggcgtgacctactgcacccagccaatatttactatatgttaaaagttatattcaccatttaggtaaacttgtatat

SEQ ID NO: 515891 - DNA, 201 bp, Homo sapiens
tgttgcccaagctggtctcaaactcctgggctcaagtgatcctcctgtgttggcctcccaaagtgcttgaattataggcatgagtcagcacacttggctcaaattttttttttttttggagacagagtcttgctctgccacccaggctggagtccagtggcacgatctcagctcactgcaacctctgccttccggattcaa

SEQ ID NO: 515892 - DNA, 201 bp, Homo sapiens
acgagaacagtatgggggaaactgccccctgacatgattcagttccctccatctggccctgccttaacaagtaaacttgaattgacaattcaaggtgagakgtgggtggggatgtagccaaatcatatcagccatataaaaagtagaaaatctgtaatttatttttatatgttcttagaatctttggtgttggtaatgagt

SEQ ID NO: 515893 - DNA, 201 bp, Homo sapiens
cgagaacagtatgggggaaactgccccctgacatgattcagttccctccatctggccctgccttaacaagtaaacttgaattgacaattcaaggtgagatgtgggtggggatgtagccaaatcatatcagccatataaaaagtagaaaatctgtaatttatttttatatgttcttagaatctttggtgttggtaatgagta

SEQ ID NO: 515894 - DNA, 201 bp, Homo sapiens
tttgagaccttcagaaggctaagttaggttccttaacatactctcataaaatacttcttacttctcttttgtaattcttataagagttataataaattaaytataagttgttattaatttgttttacatgctctttgaaggcagggactatgctttgtattccctagtgcctagtacggtattataaaataggtagcaaat

SEQ ID NO: 515895 - DNA, 201 bp, Homo sapiens
gtcatcagctgctgtatctggaggtatagatacacactgtttcttctttggttcattgctgctttttgtattttttgactccaaatatggagctttttggkcatcctcctttgggaagatctggggcttacttttgatatctgtgatgtgtttcgttgattcttttgataatccagtacaatttattgtttgaattcctca

SEQ ID NO: 515896 - DNA, 201 bp, Homo sapiens
actgttttgaatgcactggaaataagtatccttctaatcaattttagaatgaattatttttagtgctaggacatgtagcctgtgattatatgacaacagcrtagtaaattttgcttaggttttactccattatatttatacagcataatgctccaattcctcaaggagggcgtggtgcaatccagtttgtgactcagtatc

SEQ ID NO: 515897 - DNA, 201 bp, Homo sapiens
agtgtacttttcccaacactggtgctcgtatcatgatgttcattggtggtcctgctactcaggggcctggaatggtggttggagatgagttgaagacaccyataagatcgtggcatgacattgacaaagacaatgccaaatatgttaaaaagggaactaaggtaattttgactgttaaatatttttgccttattagaaaac

SEQ ID NO: 515898 - DNA, 201 bp, Homo sapiens
cagtttgatactataactggtattcagaattggagaaatattcattttttcttgataatttgttgtaatgtttctggtttgaaatatttaaacacttcatwgtacgtgtcagtaggtatctccttaaaaattattactgagagaaacattctatgcctttttaaatattcatgttaaagaatgcctttctgtttaggaaaa

SEQ ID NO: 515899 - DNA, 201 bp, Homo sapiens
tctaaatctgtatgctttcatttgtagtaaatgtttgttgcagataatctctttcaaagtacttaacagtgtatctgaaatactgtatgagaaactcctaytcaaattactgagacagtagcacagtaatgaatagtagaactcattaatctcttccagtaaactagattgccttttttccttaaaatgtaagagtgacaa

SEQ ID NO: 515900 - DNA, 201 bp, Homo sapiens
ccagactgtagaatgtactaatattttattttattttattttatttttactgctgagtaaaaagggaacaaggggctaaagtgcatttaatagtattccawttgatggatacaccacattttgtttaggaatccatcagttaatgaacatttcatttccactttttggctactgtgaataatggtcctttgaacatcgtgt

SEQ ID NO: 515901 - DNA, 201 bp, Homo sapiens
cattatgttggccaggctggtctcgaattcctgatctcaagagatccacccacctcggcctcctaaaattctgggattacaggtgtgagccaccccgcccrgcctccctcacattcttgatggtattgtttgcagcacaaaagttttaaattttgatgaaacctatttcatgctttttctttcttttttattttgagacgg

SEQ ID NO: 515902 - DNA, 201 bp, Homo sapiens
aaaagttttaaattttgatgaaacctatttcatgctttttctttcttttttattttgagacggagtcgctctgtcacccaggctggagtgcagtggcgtgrtctcggttcactgcaacttcttcctcccaggttcaagcgattctcctgcctcagcccaagtagctgggactacaagcgcctgccaccacgcccaactaat

SEQ ID NO: 515903 - DNA, 201 bp, Homo sapiens
ttctttcttttttattttgagacggagtcgctctgtcacccaggctggagtgcagtggcgtgatctcggttcactgcaacttcttcctcccaggttcaagygattctcctgcctcagcccaagtagctgggactacaagcgcctgccaccacgcccaactaatttgtttttgtatttttagtagagactgggtttcaccat

SEQ ID NO: 515904 - DNA, 201 bp, Homo sapiens
ggagtttccctcttgttgcccaagctggagtgcagtggcacgatctcggctcactgcaacctccgccccctgggttcaagtgattctgctgcctcagcctyctgagtagctgggactacaggcatgcgccactacgtccagctaatttttgtatttttagtagagacggggtttcaccatgttggtcaggctagtctcgga

SEQ ID NO: 515905 - DNA, 201 bp, Homo sapiens
gtgaagttggcaagacttctggatcaaggtcagtgtacaaagtttaattataaatttatgtaccagtaacattaaaaaatttaaaaggatacaatttctartaagcatcagagataacaaaaacttctaataatatcaaaagtaaaattatggtcaattagttataacacatcagttttattcttttgcctattttaattt

SEQ ID NO: 515906 - DNA, 201 bp, Homo sapiens
ctccactcttccctgtctgagatgagttaagcaggagaaatatccatgtttatagggattaggctcatagattagtttagaattaggaatgtgctactatrtaccataggattttaaaagaaagttgttcagatacctttgtttttaaatttcattgtaaacatttgattattttatttcttagaaaatatatgcttttct

SEQ ID NO: 515907 - DNA, 201 bp, Homo sapiens
ccactcttccctgtctgagatgagttaagcaggagaaatatccatgtttatagggattaggctcatagattagtttagaattaggaatgtgctactatatwccataggattttaaaagaaagttgttcagatacctttgtttttaaatttcattgtaaacatttgattattttatttcttagaaaatatatgcttttctct

SEQ ID NO: 515908 - DNA, 201 bp, Homo sapiens
ggagtgcaacggaatgatctcggctcaccacaaactttgcctccagggttcaagagattctcctgcctcagcctcctgagtagctgggattacaggcatayaccaccatgcctggctaattttgtatttttagtagagacggggtttcttcgtgttggtcaggctggtctcgaactcccgacctcaggtgatccgcctgtc

SEQ ID NO: 515909 - DNA, 201 bp, Homo sapiens
caagtgggcagagacgcatccgagtgaccaccattgctaggaagtaagttgtatttgttagagatttgattttcatatcacaggtatctgggttgtgtttycaaactggattcctattttgggtgacatccatgactagcaagtgaatatttgtgactaatagtattttatttatttctttctaacccagcttatttgcta

SEQ ID NO: 515910 - DNA, 201 bp, Homo sapiens
gtccatgtgttctcatcagtcagctcccacttgtaagtgagagcatgtggtgtttgcttttctattcctgtcttagtttgctgaggataatggcttccaaytccatctgtgtccctgcaaaggacatgatctggttccatttttttttttttcgagaaggagcctcgccttgtcgcccaggctggagtgcagtggcacgat

SEQ ID NO: 515911 - DNA, 201 bp, Homo sapiens
gagaaactcctattcaaattactgagacagtagcacagtaatgaatagtagaactcattaatctcttccagtaaactagattgccttttttccttaaaatrtaagagtgacaattatgtaacctattatttttctattcttattggctggaatgaggttagttcccaatttaattctatattattgtaacaatttttagtg

SEQ ID NO: 515912 - DNA, 201 bp, Homo sapiens
ttcatgtccctctggcttatatattacttgaaaattgatttcctagcaggactgacttctatcattcttgattattttcctcctctccaaattaatttctyctcttctgtgtaacaaattataactgttttgaatgcactggaaataagtatccttctaatcaattttagaatgaattatttttagtgctaggacatgtag

SEQ ID NO: 515913 - DNA, 201 bp, Homo sapiens
agatttgagcaaggggtttttgtctttttgtttttttccttttaaatacaaagtcttgttatgttgcctagactggtctccaactcctgggccccaagccwtcccagagtgttgggattacaggtgtgagccaccatgcccagccatccttttcttactttaacttaaaaattttttttttctttcttaaattttttttct

SEQ ID NO: 515914 - DNA, 201 bp, Homo sapiens
ctgttctgtgtagtaggaccacttgccgtgcagttttgaatcctttatggtaagtaaaatatatagaaaaactaatgtggcaatgtgattttaaaatgtcrgggtttttctgcatatttttataaaaatccctttgtttttgttcatactaattttttcaaattaggacagtcaaaacaatccagagagctgtaaaatttt

SEQ ID NO: 515915 - DNA, 201 bp, Homo sapiens
ttttttgagatggagtttcgctcttattgcccggctggagtgcaatgtcatgatctcagctcactataacctctgcctcctgggttcaagcaattctcctrcctcaccctcccgagtagctgggattacaggcatgtgccaccatgcccagctaattttgtgtttttagtagagatggggtttctccatgttggtcaggct

SEQ ID NO: 515916 - DNA, 201 bp, Homo sapiens
caatccagagagctgtaaaattttaggatcattctagttgtactgagttggtaatataaagagaccaaatgtaaaagtggcactataaaaactgttagatyccatcagtgtcttctgaatagtggtgctggatgtgtatcaacccatcttgcatcattagataagtcataattggccgggcgtggtggctcatgcctgtaa

SEQ ID NO: 515917 - DNA, 201 bp, Homo sapiens
tgtcttttaatttctttgtgctctcccttttctttgttctttcatgtccctctggcttatatattacttgaaaattgatttcctagcaggactgacttctrtcattcttgattattttcctcctctccaaattaatttctcctcttctgtgtaacaaattataactgttttgaatgcactggaaataagtatccttctaat

SEQ ID NO: 515918 - DNA, 201 bp, Homo sapiens
caatctgtgcagtttggcttaaatggcttcacttaggaattgtcttttaatttctttgtgctctcccttttctttgttctttcatgtccctctggcttatrtattacttgaaaattgatttcctagcaggactgacttctatcattcttgattattttcctcctctccaaattaatttctcctcttctgtgtaacaaatta

SEQ ID NO: 515919 - DNA, 201 bp, Homo sapiens
caccatgcctggctaatttttatagttttagtagagacagagtttcaccatgttgctgaggctgatcttgaactcctgagctcaagcaatctgcctgcctyagcctcccaaagtgttgtgattacaggtgtgagccaccgcaaccagcctagagatagggtcttgctgtttcccaggctgaactaaaacttctgggcttaa

SEQ ID NO: 515920 - DNA, 201 bp, Homo sapiens
gttcaagagattctcctgcctcagcctcctgagtagctgggattacaggcatacaccaccatgcctggctaattttgtatttttagtagagacggggtttmttcgtgttggtcaggctggtctcgaactcccgacctcaggtgatccgcctgtctcggcctcccaaagtgctgggattaccggcgtgagccacggggccca

SEQ ID NO: 515921 - DNA, 201 bp, Homo sapiens
tgtctcatgaccttcgctgtgctgctcagttaaaacagactacttgaagttgctagttatagaaaacaggaatctgtaaactcataggtttactcatatcrtaagagaaaggaaaatttgtttctcttttccttgtgtttgagggagtgctgggagggtctccagagcacattcctttgagccctggcttcttggataatg

SEQ ID NO: 515922 - DNA, 201 bp, Homo sapiens
tataaaaagtagaaaatctgtaatttatttttatatgttcttagaatctttggtgttggtaatgagtagtaataaaaaagcccaaagatatggtcagacgkgtgaagattaaaaacaaagaatggtcatagttttactacctggcgtcagcctctgaataacttagatttgagcaaggggtttttgtctttttgttttttt

SEQ ID NO: 515923 - DNA, 201 bp, Homo sapiens
ctcggcctcccaaagtgctgggattaccggcgtgagccacggggcccagccggtcctgatttctaaggtgttaatattgctgaatgaggggagaacattcwtattttgaacgttcttaagaggatcctggattttaaaatattttaaaattttgatacagaaataagaatcaaactccacaatgacaacctatttggaatt

SEQ ID NO: 515924 - DNA, 201 bp, Homo sapiens
cgtgttggtcaggctggtctcgaactcccgacctcaggtgatccgcctgtctcggcctcccaaagtgctgggattaccggcgtgagccacggggcccagcyggtcctgatttctaaggtgttaatattgctgaatgaggggagaacattcatattttgaacgttcttaagaggatcctggattttaaaatattttaaaatt

SEQ ID NO: 515925 - DNA, 201 bp, Homo sapiens
taccacagggaaagagacctttgcgttcctctggggtggcactttccatagctgtaggactgctggaggtagggaagatggttttgttttggaatgtaaagtgtgtgtgtgtgtgtgtgtgtgtgtgtgtgtgtgtgtgtgtgtgtatatatataattataaggataagaagaaccaaagtgctttttttcctccctattc

SEQ ID NO: 515926 - DNA, 201 bp, Homo sapiens
accacagggaaagagacctttgcgttcctctggggtggcactttccatagctgtaggactgctggaggtagggaagatggttttgttttggaatgtaaagtgtgtgtgtgtgtgtgtgtgtgtgtgtgtgtgtgtgtgtgtgtgtatatatataattataaggataagaagaaccaaagtgctttttttcctccctattct

SEQ ID NO: 515927 - DNA, 201 bp, Homo sapiens
gagtgcaacggaatgatctcggctcaccacaaactttgcctccagggttcaagagattctcctgcctcagcctcctgagtagctgggattacaggcatacrccaccatgcctggctaattttgtatttttagtagagacggggtttcttcgtgttggtcaggctggtctcgaactcccgacctcaggtgatccgcctgtct

SEQ ID NO: 515928 - DNA, 201 bp, Homo sapiens
tagctgtaggactgctggaggtagggaagatggttttgttttggaatgtaaagtgtgtgtgtgtgtgtgtgtgtgtgtgtgtgtgtgtgtgtgtgtgtatrtatataattataaggataagaagaaccaaagtgctttttttcctccctattctctcactcagcatcaacaaagaatacttctatggttttcccccacata

SEQ ID NO: 515929 - DNA, 201 bp, Homo sapiens
tgtatatgtatatgctgggtgtggtggtatgtgtctgtagtcctagctacttgggaggctgaagatgggagaaacacttgagccaggagttcaatgctgcrgggagctatgattctaccattgcactgcagcatgggcaatagaacgagaccctgtctcaaaaaaaacaccaaaagtattttcttgtttgtgcatctgctt

SEQ ID NO: 515930 - DNA, 201 bp, Homo sapiens
actgcaatgtgtggcattaaaaaagtgaaaataactaaaaaaatgcatatagttactaaatataagaatttaactaaaagaatggacatctcaacctattwatgtattcgcttaaaatatttatgaatgtttactatatgctagataccatgtaggctgtattagaagattgttaaatttttttttttaaaggagatggaa

SEQ ID NO: 515931 - DNA, 201 bp, Homo sapiens
agcactttgggaggccaaggcaggtggatcacttgaggtcaggagttcaagactagcctagtgaacatggtgaaaccccctctctactaatgttgtgggartcaggagactggagagactagtaagtagaacaggaggattttattgagtgcactcagaaccagtggattaacatccgaagactgggccctgaacaaagac

SEQ ID NO: 515932 - DNA, 201 bp, Homo sapiens
tttatgttctttttatccaatttaatggaagtataacgtactctaaaatggtagaatcatgtagctgtggagaggatgatgggacaaataatacaaagtgrgtaatcaactttaaaaatgacaaagctaaaaaattaatatgtacaagcagtttgcgtggtaaaggtctgtctatatctatgacgttttcttgggaatcag

SEQ ID NO: 515933 - DNA, 201 bp, Homo sapiens
ctgacctcaggtgatccgcccgcctcggcctcccaaagtgctgggatcacaggcatgagccactgcgcccggccagagtccagctatttttaattgacttrcagaattttagagttagatgggaccttgtgattttctagtccaagtctcttattttgctgatgagaaaaacaggattcagagaggttaattgtccaagat

SEQ ID NO: 515934 - DNA, 201 bp, Homo sapiens
gaagtgataggtttacttcatacatttttgagaaaatatctgtgtaatacctaagtactagttatgtactatccttgggagaattgagaaaacagtcattsaaaacattttttgttttgtgtttcagctattttaatgccttttgcagatgtgttttagatgcattttattttttttttttgttatggcacattagaattt

SEQ ID NO: 515935 - DNA, 201 bp, Homo sapiens
aatttgtttctcttttccttgtgtttgagggagtgctgggagggtctccagagcacattcctttgagccctggcttcttggataatgttatcgatactttrcctgggtctgggctttgcctgttactgcctttgggatgagttagcctaatacctaaagcttgtttccttctcttgtttaattttatttttctttatttgt

SEQ ID NO: 515936 - DNA, 201 bp, Homo sapiens
tatgttctgtataataaatgtggaagaggtttgcatagtcttagaatttatattcacatcagtaacatggaagctgttgctaaaaactggatttctaatcyccccctcacccccacgtcctggttgttttttctttattgccacctatgttacggtggagtttgacatcttctaactctcctctgaatatcccacaccttt

SEQ ID NO: 515937 - DNA, 201 bp, Homo sapiens
aaaaaagtaaccaaattagccagatttggaatttcagttctttatgttctttttatccaatttaatggaagtataacgtactctaaaatggtagaatcatrtagctgtggagaggatgatgggacaaataatacaaagtgggtaatcaactttaaaaatgacaaagctaaaaaattaatatgtacaagcagtttgcgtggt

SEQ ID NO: 515938 - DNA, 201 bp, Homo sapiens
taaagcttgtttccttctcttgtttaattttatttttctttatttgtttaatttcctgcctcactaaaaatacaaaaaaattagctgggcctggtggcagrtgcctgtaatcccagctacttgggaggttgaggcaggagaattgcttgaacccaataggcagaggttgcagtgagctgagatcgcgccattgcactgcag

SEQ ID NO: 515939 - DNA, 201 bp, Homo sapiens
aaaaaaacaaaaacaaaaaaaactcatgatttggaaatttggagacttctgaaagtcaaaattagctctaaattgatttttgataccagaattttcaaaaragtaaccaaattagccagatttggaatttcagttctttatgttctttttatccaatttaatggaagtataacgtactctaaaatggtagaatcatgtagc

SEQ ID NO: 515940 - DNA, 201 bp, Homo sapiens
ccaggccggcttgcagtggcacgatcatggcttacagagtagcctcaacctcctaggctcaagcaatcctcctaccatagcctctcgagtagctgggactrtagtcacgtgcaaccatgcctggctaattttcaaaattttttgtagagacaggatctcgctatgttgcccaagctggtctcaaactcctgggctcaagtg

SEQ ID NO: 515941 - DNA, 201 bp, Homo sapiens
gttgcctagactggtctccaactcctgggccccaagccatcccagagtgttgggattacaggtgtgagccaccatgcccagccatccttttcttactttarcttaaaaattttttttttctttcttaaattttttttcttgtggaattttatttttaggcagctgataaattttgtgaataggattcctttcctgagggat

SEQ ID NO: 515942 - DNA, 201 bp, Homo sapiens
tatgaattagatattggcagtatctaaaactacatggcttttaaaagttactttgactatcaatttgaatatgttcatgttttaggaagaaattaattttrttgaaattaggatttttgtaaaattgaactgaaatatgaactgatatgtcttttctttttttttaaaacagtcaagtggattatcgagcaaaactttggg

SEQ ID NO: 515943 - DNA, 201 bp, Homo sapiens
attggtaacttcttgtaaatagaatatttataggcaacagtgttagcttttattccaggaaataaattactaacacattttattttatttagtgtcagaartttggagaatatcataaagatgacccaagttccttcagattttcagaaactttctccctttatccacaggtaagtaggtaaaaggtccatattcttttct

SEQ ID NO: 515944 - DNA, 201 bp, Homo sapiens
ctggttcaagcaattcttgtgtctctgcctcccgagtagctgagattacagacacatgcgaccatacccggctaatcattttttgtatttttagtagagayggggtttcaccatgttggccaggctggtcttgaactcccaacctcaggtgatccacctgcttcggcctcccagagtgctaggattacaagcgtgagccac

SEQ ID NO: 515945 - DNA, 201 bp, Homo sapiens
gctgtaggactgctggaggtagggaagatggttttgttttggaatgtaaagtgtgtgtgtgtgtgtgtgtgtgtgtgtgtgtgtgtgtgtgtgtgtatatrtataattataaggataagaagaaccaaagtgctttttttcctccctattctctcactcagcatcaacaaagaatacttctatggttttcccccacatacc

SEQ ID NO: 515946 - DNA, 201 bp, Homo sapiens
taatttgctagaatggctcacagaactctaggaaacactttatgtttctcggtttatgataaagatattacgaagactatagatgaacagtcagatggactagatgcatagagtgaggtgtgggagaaggggttccaaatttctgtggcttctctggggcaccaccctccaggaacctccacatattcatttgtctggaag

SEQ ID NO: 515947 - DNA, 201 bp, Homo sapiens
aaatacttcctttctggtatagtaagttgttcagggctcatcttatccttttcctgctctggacctgaaatgaaaccacttaggagccctgtttccttttwgccttggttctaccaagaagataatgcttcatgtgcacccttaccctgggtgtcattaattctaggtcccagcggatggagctaagaagaagatgtatgt

SEQ ID NO: 515948 - DNA, 201 bp, Homo sapiens
ccggccaggcgcagtggctcatgcctgtaatcccagcactttgggaggccgaggcaggcggattacctgaagtcaggagttcgagaccagcctggccaacrtggtgaaatctcatctctactaaaaatacaaaaattagccgggggcggtggcacacgcctgtaatcccagctacttgggaggctgaggcaggagaattgc

SEQ ID NO: 515949 - DNA, 201 bp, Homo sapiens
tagctcactgcaacctccacctcctgggtttaagcaattctcctgcctcagcctcccaagtagctgggattataggtacccgccaccccgcctggctaatkttttgtatttttagtagagacagggtttcaccatgcttagccaggctggtctcgaactcctgacctcaggtgatccgcccacctcatcctcccaaagtgc

SEQ ID NO: 515950 - DNA, 201 bp, Homo sapiens
acagggtttcaaccatgttggccagactggtttcaaactcttgccctcaggtgatccacccacctcagcctcccaaagtgctgggattacaggcgtcagcmactgcgtccagcctctattttttttttttttgagacggagtctcgccttgttgcccaggctggagtgcagtggcgtgatcttggctcactgcgacctcca

SEQ ID NO: 515951 - DNA, 201 bp, Homo sapiens
cagggtttcaaccatgttggccagactggtttcaaactcttgccctcaggtgatccacccacctcagcctcccaaagtgctgggattacaggcgtcagccmctgcgtccagcctctattttttttttttttgagacggagtctcgccttgttgcccaggctggagtgcagtggcgtgatcttggctcactgcgacctccac

SEQ ID NO: 515952 - DNA, 201 bp, Homo sapiens
tattttttttttttttgagacggagtctcgccttgttgcccaggctggagtgcagtggcgtgatcttggctcactgcgacctccacctcccgcgttcaagygattctcctgcctcagcctcccgagtaggtgggactataggcgtctgccaccctgcccggctaattttttgtatttttagtagagatgggatttcaccat

SEQ ID NO: 515953 - DNA, 201 bp, Homo sapiens
cgcctcagcctcccaaagtgctgggattacaagtgcgagccaccacgcctggcctttttttttgttgttctatgatacttgtgttctaaacatcaaaaacraaagtaaaacaccaacaaaaaaatagaagagccaggtgcagtggcgtgtgcttctcattccagctacttggaaagctcaagtgggaggatcacttgagcc

SEQ ID NO: 515954 - DNA, 201 bp, Homo sapiens
ttaagaaagcttaagggtcattattttaagcaaaagaacatacagattttcatggcttttgtttttatcattatttgggattttgaacttctgaccaagtrtttagtaatttcacaccaaccttgtcataattgttgcacacataatttttatatgctgagttttggactcaacaatgtatttgttattttggatgtatga

SEQ ID NO: 515955 - DNA, 201 bp, Homo sapiens
actctgtcacttagattggagggcagtgttgtgattgtggctcactgtatctttgaccacctgggctcagatgatcctctcacctaagcctcctaagtaaytgggagtgcaggcatgtgccaccacgcctggatgattctttgtattttttgtgaagactgggtttcaccatattgcccaagctggtcttgaactcctgga

SEQ ID NO: 515956 - DNA, 201 bp, Homo sapiens
tatacatgataaatagttgataaatctttgtaaaagtaattaaatgaatattgcacaagtaatctctttacaggaaatgctggggctctctaaagtaccasttactcaagcaacacgtggtcctcaggtacagcagccacctccttccaacaggtaataaatatgatgaagagaatttgaccgtttctgtagctattttaa

SEQ ID NO: 515957 - DNA, 201 bp, Homo sapiens
atacgttagatacatatacatacatacacagttgctttgagaccttcagaaggctaagttaggttccttaacatactctcataaaatacttcttacttctsttttgtaattcttataagagttataataaattaattataagttgttattaatttgttttacatgctctttgaaggcagggactatgctttgtattcccta

SEQ ID NO: 515958 - DNA, 201 bp, Homo sapiens
gaagactgggtttcaccatattgcccaagctggtcttgaactcctggactcaagccatctgccgcctcaagcctcccaaagtgctgagattacaggcgtgrcctactgcacccagccaatatttactatatgttaaaagttatattcaccatttaggtaaacttgtatatgttaaaagtatgaattagatattggcagtat

SEQ ID NO: 515959 - DNA, 201 bp, Homo sapiens
tgcagatgaagctcctgatgttgacattggccagtcctttgcaaacaaatcaggccagaaaggttcaacatttatatcagctgctttaacaagggcattgwtctaatccactgtgatggtcacctcattgtcgtgcagaatgaggtccaaggagatacagaagaacttgagatggaggccatgatgtgggcgagtgcaggg

SEQ ID NO: 515960 - DNA, 201 bp, Homo sapiens
ctttctaagtaattctggtgcaactcctagttgagaacatttaccctagaagatgatagataagcctggcataaagttgacagatgtaaaatcagactttrgaggcttccaggtagaccaaaatgaagaagaaaggaagagatttttgagggtgagtctaatttgaaacttggcagactgaggtagtggtgctgcagttaa

SEQ ID NO: 515961 - DNA, 201 bp, Homo sapiens
ccaggtcacagataggtgagagacaggtaggtgagagacacaggtaggtgcattcttttgagtttctgattagcctttccgaaggagcaatcagatatgcrtttatcttactgagcagagggatgactttgaatagaatgggaggcaggtttgcccgaagcagtttccagcttgacttatccctttagtttaatgattttg

SEQ ID NO: 515962 - DNA, 201 bp, Homo sapiens
tttttttttctttttttttttttttttgacacggagtcttgctctgtcacccaggctggagtgcagtggcatgatcttgcaatctccgcctccttagttcragcgattctcctgcctcagcctcccgagtagctgggactacaggcgcatgccaccacacccggctaattttttttttctgtatttttagtagagaccggg

SEQ ID NO: 515963 - DNA, 201 bp, Homo sapiens
tactggttctttcattgatgtctcactgtgtgtattaccattttcctcttttattctggttattattttcatgatgataagccatagtgggtagaaggatraaatgttggatcacttgtctcatagaatcacctgtggtttaagaaagcttaagggtcattattttaagcaaaagaacatacagattttcatggcttttgt

SEQ ID NO: 515964 - DNA, 201 bp, Homo sapiens
tttattacaattgataactttaaaattaaatattgaatgactaactgattacatttaaataattaaatagactgtcaacagagactattataggagaatgygtcctgaaacatctctattcacatgcacgtgtgtatcccgtataagcagtatccaatatatgtatatatgactattttccattaacagattcctggatgt

SEQ ID NO: 515965 - DNA, 201 bp, Homo sapiens
gtctcccacccgtcccactgtgcagctcttggccttgtttgatggcgctccccgctccaaagcacacccgctccagagcaagagtttccaaagggggaggrggaggacctctcagtgcagcctctggggaccaccccactgtgggcagcaaccagggaagggaaacaaaatcagccctagcctctctttttggtgggggca

SEQ ID NO: 515966 - DNA, 201 bp, Homo sapiens
aactaagcattaaatattttattacaattgataactttaaaattaaatattgaatgactaactgattacatttaaataattaaatagactgtcaacagagrctattataggagaatgtgtcctgaaacatctctattcacatgcacgtgtgtatcccgtataagcagtatccaatatatgtatatatgactattttccatt

SEQ ID NO: 515967 - DNA, 201 bp, Homo sapiens
gggcgggagccagctctgtgccaggccacggagcagcagggggcagccgcacccagacacactgcccctgccccactgaggggacagggcccccccgccgragtctggggatggagagatgctcagaccgggggctctcagggtgggagaacaccccagctcacagggggcacccagcaaagctggctgggagatgggagg

SEQ ID NO: 515968 - DNA, 201 bp, Homo sapiens
gggtgtccaagttctgaggcctgaaagcttctgcagacaggcatagaacagggctcagaggaggggtccctgcttccctaaacttgggtagccagagttcrggatcctctcacaatcaggaccagggatcaaagcccagccctaggcaggctgatgtggggcagctcccccagcatgtagccctgtctcaggccccacatt

SEQ ID NO: 515969 - DNA, 201 bp, Homo sapiens
ccaggtcaaaggaggcagccttccctgcgctcctgctctaagtcttgaggttgtgctcttgtgggtgtccaagttctgaggcctgaaagcttctgcagacrggcatagaacagggctcagaggaggggtccctgcttccctaaacttgggtagccagagttcaggatcctctcacaatcaggaccagggatcaaagcccag

SEQ ID NO: 515970 - DNA, 201 bp, Homo sapiens
ggggcgggagccagctctgtgccaggccacggagcagcagggggcagccgcacccagacacactgcccctgccccactgaggggacagggcccccccgccraagtctggggatggagagatgctcagaccgggggctctcagggtgggagaacaccccagctcacagggggcacccagcaaagctggctgggagatgggag

SEQ ID NO: 515971 - DNA, 201 bp, Homo sapiens
gcatcaagaaggtttttcccgctaagcgtcatcactgtggagaggctgggctgtggccgcagcagaggcccccagggagtggcagagactgggaaaatggyggtcccccacccattctcctgctcttgcccaccacctgctccaggtcggtcggaggctctggctgtggatggagctgggaagcctggggctgaggaggct

SEQ ID NO: 515972 - DNA, 201 bp, Homo sapiens
gctgagacaccggctggcagggctggccccagggcaccctgtggccctggctctgctgtccccttggcaggtcctggccagatggcccggacgctgcttcyggtagggaggcagcctccagcctgcccaagcccaggccaccctatcgccccctacgcgccttgtctcctactcctgactcctacctgccctggaacatcc

SEQ ID NO: 515973 - DNA, 201 bp, Homo sapiens
tacccagcagcctgtggtcaggggcaccagagcagctggctaagacctgaagattctatacgaggttgttgtgactacatgcattatacagcacttgccartttgccatcttggatccttggaccggttgccttggcatcccgtagacacagcctcccaccccctcactccctgccggtgttgcctgatgcctgtctgaca

SEQ ID NO: 515974 - DNA, 201 bp, Homo sapiens
aaaggtaggtattagctccatttcccaggtggacaaatgaggctcagagaggttaagtaatttgcccaaggtcacacagctaatttgtagcaaaagctgaggttctaccccagatttatctgactccaaaaccatgcatttcccactattccacatagcctccccccaccaaccccagaagctaggggtgggtgatgggtg

SEQ ID NO: 515975 - DNA, 201 bp, Homo sapiens
cactcccagcagaaagaggaggaggaggagatggcagtggtcccgcaaggcctcttccggggtgggaagagcggagagctggagcaggaggaggagcggcyctccaaggagtgggaggactccaaacgctggagcaagatggaccagctggccaaggagctgacggctgagaagcggctggaggggcaggaggaggaggag

SEQ ID NO: 515976 - DNA, 201 bp, Homo sapiens
aggaggaggaggaggaggctgaggctggagaggaggctgtccccgaggaagaaggccccactgtagtgctgaacccccacccgagccttggctacaaggasatccggaaaggcgagagtacgtatgatggcgaagacctcaacgaacgtgtctgggagagggggatgggtgggaggagagccttctccataacctcattcc

SEQ ID NO: 515977 - DNA, 201 bp, Homo sapiens
ggaacatcctttgcagggcagccccacaactttaaacattgacgattccttctctgaacacaggcagctttctagaagtttcccttcctccatcctatccmctgggcacaactgcaataacttctgaccttttggtgaaagctgagaactcctgactgtaacatattctgtatgaactttatctaaagaaaaataaatctg

SEQ ID NO: 515978 - DNA, 201 bp, Homo sapiens
cgcagctgcgacgaggctggaggccatcctcccgggaggacagccttgaggcgggcctgcccctccaggtccgaggctaccccgaggagaagaaagaggargagggcagcgcaaaccgcagaccagaggttggtatggggcgggagccagctctgtgccaggccacggagcagcagggggcagccgcacccagacacactg

SEQ ID NO: 515979 - DNA, 201 bp, Homo sapiens
tcctggcaaccatgggctaggccgagggaagggggctcttcagggcactgtaagctttgttttccatgtgccctaaaagaacggactcccacctgtgcggraccatttgagaggaagtggggcctggataagaggccaccaagagcagtgtggggacagggcccccggcatcagccaccttcttgtgcataatgatcccga

SEQ ID NO: 515980 - DNA, 201 bp, Homo sapiens
ggacaaccgggacagttccatgaagctctccttccgggcccgggcctacggcttcaggggccctgggccgcagctgcgacgaggctggaggccatcctccygggaggacagccttgaggcgggcctgcccctccaggtccgaggctaccccgaggagaagaaagaggaggagggcagcgcaaaccgcagaccagaggttgg

SEQ ID NO: 515981 - DNA, 201 bp, Homo sapiens
gtttccaccagggcaggaccactggtggtggtgtgtctctccatgagaacagggcattacagcatgaatccagcatctgcttcccaacgaagcgagagtgwttttcagggctgggcttgtgtctggggtggggtgggggtacgaaggctgctctggcttcaggatgggccccactctgaggcctttgggacagaccaggcc

SEQ ID NO: 515982 - DNA, 201 bp, Homo sapiens
tgagggtcagagaaatttctactccccaccttcccagaaactattttcttccactagacaccacagttaaaatccaaaccatccaagagattccaacctcwgtttgctcaattatatttcctatgttttagttgcagataggacagaatttaaacctctaccactcattctagctgtgtgaccttgggaaaattccttaat

SEQ ID NO: 515983 - DNA, 201 bp, Homo sapiens
atatttcctatgttttagttgcagataggacagaatttaaacctctaccactcattctagctgtgtgaccttgggaaaattccttaatttctctgagctcygcctttttctccttttccttgaggggaggtgtaaagagtaggaatcatggatgtgaattgcctagcacataataggtcctcagtaaatgggcacttttat

SEQ ID NO: 515984 - DNA, 201 bp, Homo sapiens
tgaaaggtaggtattagctccatttcccaggtggacaaatgaggctcagagaggttaagtaatttgcccaaggtcacacagctaatttgtagcaaaagctraggttctaccccagatttatctgactccaaaaccatgcatttcccactattccacatagcctccccccaccaaccccagaagctaggggtgggtgatggg

SEQ ID NO: 515985 - DNA, 201 bp, Homo sapiens
gcagcaagcacccacctcctactgttgttggagggggcagggagtgctgggcacagctgggactattattacctggatagttatgtcatcatcagtgaccytggactagtgttttgttttgtttttaactaagcattaaatattttattacaattgataactttaaaattaaatattgaatgactaactgattacatttaa

SEQ ID NO: 515986 - DNA, 201 bp, Homo sapiens
agctgaggggccaacatcaggaataaggcacaggtgtggggacagtcagaggaggcagcggcggcggggggagaggggtctctgggtcatggctgcaggcrccaaccctgggctcagatgtaggcacagggcttggccttctccccgggcctggactcagcgtccaaggttagcagagcttgcctgaatcaagagctgtca

SEQ ID NO: 515987 - DNA, 201 bp, Homo sapiens
gggactggaacccacgttgcctgagaccagggctgggcatgctccctggcccacagctgcccaggaaagcccattgttggggaagaaatgagctgggctarctgaggggccaacatcaggaataaggcacaggtgtggggacagtcagaggaggcagcggcggcggggggagaggggtctctgggtcatggctgcaggcgc

SEQ ID NO: 515988 - DNA, 201 bp, Homo sapiens
gggtacgaaggctgctctggcttcaggatgggccccactctgaggcctttgggacagaccaggccatgtgtgagaacagagagggctttggggaggaggcrcgtaaacacagccacgtcagtaggattcctgtggccctttccaagctaacacactgttcttcctcccactcatgagccagcctgggcagcaagcacccac

SEQ ID NO: 515989 - DNA, 201 bp, Homo sapiens
tttcagggctgggcttgtgtctggggtggggtgggggtacgaaggctgctctggcttcaggatgggccccactctgaggcctttgggacagaccaggccaygtgtgagaacagagagggctttggggaggaggcacgtaaacacagccacgtcagtaggattcctgtggccctttccaagctaacacactgttcttcctcc

SEQ ID NO: 515990 - DNA, 201 bp, Homo sapiens
tacggcggggctgagacaccggctggcagggctggccccagggcaccctgtggccctggctctgctgtccccttggcaggtcctggccagatggcccggaygctgcttccggtagggaggcagcctccagcctgcccaagcccaggccaccctatcgccccctacgcgccttgtctcctactcctgactcctacctgccct

SEQ ID NO: 515991 - DNA, 201 bp, Homo sapiens
gtgcagcttccctaaaacccacggcctctgcagttcagtcattttaggaaatacctttatgaagtagtgagccactcatcactgatgatattcaagccaarcctggacaggatactggagtggagggttaagctgccatcttcccacagttagcctctatgcccagccccccagctccttccaggcttgatgcaaagcacg

SEQ ID NO: 515992 - DNA, 201 bp, Homo sapiens
cctgtggccctggctctgctgtccccttggcaggtcctggccagatggcccggacgctgcttccggtagggaggcagcctccagcctgcccaagcccaggscaccctatcgccccctacgcgccttgtctcctactcctgactcctacctgccctggaacatcctttgcagggcagccccacaactttaaacattgacgat

SEQ ID NO: 515993 - DNA, 201 bp, Homo sapiens
cacagtgaatagagacatgccaggtgcagcttccctaaaacccacggcctctgcagttcagtcattttaggaaatacctttatgaagtagtgagccactcrtcactgatgatattcaagccaagcctggacaggatactggagtggagggttaagctgccatcttcccacagttagcctctatgcccagccccccagctcc

SEQ ID NO: 515994 - DNA, 201 bp, Homo sapiens
gtgggaggactccaaacgctggagcaagatggaccagctggccaaggagctgacggctgagaagcggctggaggggcaggaggaggaggaggacaaccggracagttccatgaagctctccttccgggcccgggcctacggcttcaggggccctgggccgcagctgcgacgaggctggaggccatcctcccgggaggacag

SEQ ID NO: 515995 - DNA, 201 bp, Homo sapiens
tggaacatcctttgcagggcagccccacaactttaaacattgacgattccttctctgaacacaggcagctttctagaagtttcccttcctccatcctatcmactgggcacaactgcaataacttctgaccttttggtgaaagctgagaactcctgactgtaacatattctgtatgaactttatctaaagaaaaataaatct

SEQ ID NO: 515996 - DNA, 201 bp, Homo sapiens
ggccaaggagctgacggctgagaagcggctggaggggcaggaggaggaggaggacaaccgggacagttccatgaagctctccttccgggcccgggcctacrgcttcaggggccctgggccgcagctgcgacgaggctggaggccatcctcccgggaggacagccttgaggcgggcctgcccctccaggtccgaggctaccc

SEQ ID NO: 515997 - DNA, 201 bp, Homo sapiens
gaagcctggggctgaggaggctcaggaccccgaagggaagggagaacaggagcactcccagcagaaagaggaggaggaggagatggcagtggtcccgcaargcctcttccggggtgggaagagcggagagctggagcaggaggaggagcggctctccaaggagtgggaggactccaaacgctggagcaagatggaccagct

SEQ ID NO: 515998 - DNA, 201 bp, Homo sapiens
tcagcttcaactacggtttaggagaggccctggctcccgctgcgggcctgtcagggtctttcctcactctccagctgccgggcttctggggtgaggatgaggggaagaggcaggctccagctaacccacccctctgagccgagagggtcttgcaaagcctggcatcaagaaggtttttcccgctaagcgtcatcactgtgg

SEQ ID NO: 515999 - DNA, 201 bp, Homo sapiens
ggctggcctcaccctgggtcctggcaaccatgggctaggccgagggaagggggctcttcagggcactgtaagctttgttttccatgtgccctaaaagaacrgactcccacctgtgcgggaccatttgagaggaagtggggcctggataagaggccaccaagagcagtgtggggacagggcccccggcatcagccaccttct

SEQ ID NO: 516000 - DNA, 201 bp, Homo sapiens
gcataaagccaagagccagcactgcggctgctgagcctggggacagcttgcaaaagaagatatcaaagattgcttgctttccctgctgtcctgctgtgggracttccccagcttcctctgagctgcacgtgcagcggaagaggcctgcatcttacctgctgggccgaggtgcctggcttcaggctgtcttgaacactctga

SEQ ID NO: 516001 - DNA, 201 bp, Homo sapiens
ctgacacatggtaagcactgtgttaagggttttctattatcattgctatcactgtctggctaagaaagcagagctgtgtccctgagccagggatcatggamtcccaaagacaaaagcaaataccctctgtcctcactagaaattcaccctagagcctccagggactgagccccatgctcaaaccagccccaacctgcccct

SEQ ID NO: 516002 - DNA, 201 bp, Homo sapiens
ctgtgttcccaggtgatgaaatgcatcgttgaggtcatctccgacacactttccaagcccagccccatgcctgtcagccaggaatgttttgagacactccraggaggtatgagctggaggctaggggtgagggctgctgcctgctgggctgggaggctaggacatgggtgtgtggcttttggtggaattaatgatttaact

SEQ ID NO: 516003 - DNA, 201 bp, Homo sapiens
ctcctacctgccctggaacatcctttgcagggcagccccacaactttaaacattgacgattccttctctgaacacaggcagctttctagaagtttcccttyctccatcctatccactgggcacaactgcaataacttctgaccttttggtgaaagctgagaactcctgactgtaacatattctgtatgaactttatctaaa

SEQ ID NO: 516004 - DNA, 201 bp, Homo sapiens
gaagaaggccccactgtagtgctgaacccccacccgagccttggctacaaggagatccggaaaggcgagagtacgtatgatggcgaagacctcaacgaacrtgtctgggagagggggatgggtgggaggagagccttctccataacctcattccaccttcataacaaccctgaaaggtaggtattagctccatttcccagg

SEQ ID NO: 516005 - DNA, 201 bp, Homo sapiens
cgctgcttccggtagggaggcagcctccagcctgcccaagcccaggccaccctatcgccccctacgcgccttgtctcctactcctgactcctacctgcccyggaacatcctttgcagggcagccccacaactttaaacattgacgattccttctctgaacacaggcagctttctagaagtttcccttcctccatcctatcc

SEQ ID NO: 516006 - DNA, 201 bp, Homo sapiens
tgctcccaggtgtagtcaatgtgtgctcacatgccgcccagggattcacccatcccatgatgaacatggagtgagaatatgaagctgtgactccttgcatrcgacaacaccatgggtgtttggagacagtaacctacatcctatttccaaacagggtagagccagggaaggtctttgtctcctctgggcagtccagaagga

SEQ ID NO: 516007 - DNA, 201 bp, Homo sapiens
tctccaagatcacacagctaggataccacattacggtgggcaccatcatcaaagatcactcatttatcagatgcctaattatccacagcacctttgcaggyacaggataagactttcagaggcgtggctgtggttgacctgggatatgctcccaggtgtagtcaatgtgtgctcacatgccgcccagggattcacccatcc

SEQ ID NO: 516008 - DNA, 201 bp, Homo sapiens
tctctgaacacaggcagctttctagaagtttcccttcctccatcctatccactgggcacaactgcaataacttctgaccttttggtgaaagctgagaactmctgactgtaacatattctgtatgaactttatctaaagaaaaataaatctgttctgggctctttcctctgaattttttcgcctctcaacttaagagtggag

SEQ ID NO: 516009 - DNA, 201 bp, Homo sapiens
tgctgagcctggggacagcttgcaaaagaagatatcaaagattgcttgctttccctgctgtcctgctgtggggacttccccagcttcctctgagctgcacrtgcagcggaagaggcctgcatcttacctgctgggccgaggtgcctggcttcaggctgtcttgaacactctgaatccagtaggctccccaggggctggtgg

SEQ ID NO: 516010 - DNA, 201 bp, Homo sapiens
actgattacatttaaataattaaatagactgtcaacagagactattataggagaatgtgtcctgaaacatctctattcacatgcacgtgtgtatcccgtayaagcagtatccaatatatgtatatatgactattttccattaacagattcctggatgtatttctgtccatccgtctatccgtccactccctcttgggctcc

SEQ ID NO: 516011 - DNA, 201 bp, Homo sapiens
agttttcagcaccgcggacagcgcctccgcctcccgcctgaccctgcagtgtggcctccgcctgggacccacaagacacttgggcctgactcccaaccccscggggcaactcccccttgtgcccaccccttgtctgggcttggcgcctcggttgcatcagggccagtgccggttgcgcggtggccggccaaggtcactgcg

SEQ ID NO: 516012 - DNA, 201 bp, Homo sapiens
cccctcttcccctttcatctcacgctccccgcctttctgcccttgacttctacttctccatatcatccctcacaatccccttcctccatctcttcccccgmcccccccacctctggggtctctctccccttcgtctgtctcccacccgtcccactgtgcagctcttggccttgtttgatggcgctccccgctccaaagcac

SEQ ID NO: 516013 - DNA, 201 bp, Homo sapiens
tggctgagctggggctgttttttccaggctctagtgctcatccaaatctctgacttgagggtcagagaaatttctactccccaccttcccagaaactattytcttccactagacaccacagttaaaatccaaaccatccaagagattccaacctcagtttgctcaattatatttcctatgttttagttgcagataggacag

SEQ ID NO: 516014 - DNA, 201 bp, Homo sapiens
ttctggcttactgtgccttccatgccactggccaggctggcccgagtgaaccccaatgtctctcctaggaccaggagctggagagcctgtcggccattgargcagagctggagaaagtggcccaccagctgcaggcactacggcggggctgagacaccggctggcagggctggccccagggcaccctgtggccctggctct

SEQ ID NO: 516015 - DNA, 201 bp, Homo sapiens
acttatctctaagttttcttttaccataaaaagagagcaagtgtgatatgttgaatagaaagagaaacatactatttacagctgccttttttttttttttygctatcaatcacaggtatacaagtacttgcctttactcctgcatgtagaagactcttatgagcgagataatgcagagaaggcctttcatataaatttata

SEQ ID NO: 516016 - DNA, 201 bp, Homo sapiens
aatttgcaaattgataaatttaacaacttttgggtggcatgtagtctagagtatagatacttcttgacttatgaggagactacattcctataaatccgttrtaaaatgaaaatccatttaatacccccaataaacccatcctaaagtaaaaaaaaaacgaagccattataggtcagggactgtctccgtactaattgaatg

SEQ ID NO: 516017 - DNA, 201 bp, Homo sapiens
gaaaggcattggtgagaggcaacatacttgccttgttcctgatctcagcaggaaatcttcaattttatgttagctctatggttttgtagatattctttatytacattaaatatgttagctgtatggttttgtatatattctttatcaggttcaggtagttcccctcttttcctagtttactgagaggcttttgaaaatcat

SEQ ID NO: 516018 - DNA, 201 bp, Homo sapiens
cttttgtgggccctacagttgcatgtggctttctaaattcccaggaatatattttcaaagcctcctgtggatcatctcatttcccaggtaatttacttttragcttttttagttatcttatgttttgctccagttattagctacacctgagtcagtgacaatattcaacagctgcctatgattatttgacaaatgcctctg

SEQ ID NO: 516019 - DNA, 201 bp, Homo sapiens
ctgccatttttgctgacatgtgtaaagtgatcatttctaattgtaaaattccttttgcatttattagctggaatactttacaggacttttcctcatcaacygttagttaccatttaatatagtttgtaagaatgatagaataaatgcatggcaagaatctttacttctcaaatttcagagattttgatgggaaattatatt

SEQ ID NO: 516020 - DNA, 201 bp, Homo sapiens
atatcccaaacataatggaaaaagcacacacaaataagcttatattatataattccatatacctatgtatatatcaagtataaaagtaggcaaaacaagcyactgatggtggcacacacctatagttccagctatttgggaggctgaggcgggaagatcacttgagcccagaagttcaggttcaacctgagcaacatagca

SEQ ID NO: 516021 - DNA, 201 bp, Homo sapiens
ttaagcccaggagttcaagactagcctgggcagcatagtgagaccctgtctctacaaaaataaaaataaataaaataatataatctggtaaatctgaaaaycagattctaccccctgcccagaatatgttactgtttctggtggttgttgtttatttctttttaactactcctataaagtttgtattgtttctcatagata

SEQ ID NO: 516022 - DNA, 201 bp, Homo sapiens
tgcaacctccacctcccaggttcaagctattctcatgcctcagcctcctgagtaactgggactgcaagcatgtgccacctcatcctgctgatttttgtacktttagtagagacggggtttcgccatgttggccaggctggtctggaactcctggcctcaagtgatccgcccaccttggcctcccaaagtgctgggattaca

SEQ ID NO: 516023 - DNA, 201 bp, Homo sapiens
ttttttttttttttttttttggtggagctggagtcttactatattacccaagctggttttgaactcctggctaaagagatcctccctcctaggcttcccaragagctggggttacaggcatgagccaccacatccaacccccttctgggactttgactggggttctgttgaatctgttggtcaatttggagagtattgata

SEQ ID NO: 516024 - DNA, 201 bp, Homo sapiens
tattcataagaatttatagacttacaaatattcacataaagctatgcatatactaacattgtaagtatatatatttcggtccagatgtgtcagattttgcygatcttccttttttgtttgaccttgacttcatacaccaagcaaaaacattttttttttctattttacatgtgtattctaaactatagctagttaagacag

SEQ ID NO: 516025 - DNA, 201 bp, Homo sapiens
ctgaaggcaaatgaggagcaaagtcacatcttacatggcggcaggcaagagaacatgtgcaggggaactcccctttataaaatcatcagatctcatgagayttactctcctgagaacagcatgggaaagatctgcccccatgattcaattacctcccactgggtccttcccaaaacacatgggaattttgggagctacaat

SEQ ID NO: 516026 - DNA, 201 bp, Homo sapiens
acatgctgcccctgtatgtgcatagcctccctcattatcaacatcctttaccagaatggtacatttgttgcagtcaatgaacctgcattgacaattgtcgmtgaaagttcatagtttagagttcacctttggtgttatgtattctgtgagtctggatccatgtttaatgatactcattcaccattacagtatcattcagag

SEQ ID NO: 516027 - DNA, 201 bp, Homo sapiens
ttacaaagctgaaagtttctttaaagtgttatctacaactgtgttaacttcctttctggaaagcctgctcataaagtagcacttgttgattatataagatrctttttgtgtttaaatacgtgtcattcttttttttcacaacattcccgaatcttacataataaatcttattttaattatttagcaaattccattgcatgc

SEQ ID NO: 516028 - DNA, 201 bp, Homo sapiens
ttcagattgaatatgaacacagagcaccagagtgccgtctgggtctgaaggaaggccgtccattctcaggggtcactgcatgtttggacttctgtgctcaygcccacagagacttgcacaacatgcagaatggcagcacattggtaagttgggctgaggacagcttagcagctgttgagtctgttctcacactgctaataa

SEQ ID NO: 516029 - DNA, 201 bp, Homo sapiens
gatggatggccacttcatgggagccacctctagattaccacccaatctgagcaatccaaacatggactataaaaatggtgaacatcattcaccttctcacrtaatccataactacagtgcagctccgggcatgttcaacagctctcttcatgccctgcatctccaaaacaaggagaatgacatgctttcccacacagctaa

SEQ ID NO: 516030 - DNA, 201 bp, Homo sapiens
ctcagagaaagggtgggtgggcaatgtcaatttgtcttatctccctgtaccattttgttgctattttcattaataacaggtaggatggttttatggtaatrtatatgtcactgatctggatcaactaggccaccaacacaaatctgaatactgagaggagaaagatacacacacacacacacgttttctttgggacctgta

SEQ ID NO: 516031 - DNA, 201 bp, Homo sapiens
aaatgaatttttaataggtgctgttaatcaaatggctttacttgaggcagaataacaaagcattgatgttctttttgctcccttgattcttattatggacygtctcatacttgaaactattttatacatttcctaaaacttaagtacccaaaatatgaagccatcaaatatgttcaagttttaatatttatatatgaaaat

SEQ ID NO: 516032 - DNA, 201 bp, Homo sapiens
gccgtaggttctggtttcctaacttctgatccagaagaacaaacacaaggcctaccaaccaccccaacatctaaaatcatcactaatcatgtactcagcamctgctcattattaggaggctatgctagtttctgaaaagcagaagtagtaaatgataactggggctatagtgcatcctaatataaccatgtttcattccag

SEQ ID NO: 516033 - DNA, 201 bp, Homo sapiens
acagtgcaaaagagcctgactacatattacagtgggtaaaatggatcggtcttgtaattggaggcagtggtgaggggaaaatagatacatgttatatatawatatatatatatatatgttctataccaacaaagggttcagggtataattttgcatgtaaaggggtgacccagagtagagataaagaacaaaatattctgt

SEQ ID NO: 516034 - DNA, 201 bp, Homo sapiens
tctcaataaataaataaaatttttaaaaagtttgatattgacatacctacatacacaccattatacacaagtggatcagaatagagaatccttaagtagayccaacatatataatatggtcaattgatttttaacaaagatgattcaattgggaagggataaccattttatccagtagtatctgaacagttggaaagccat

SEQ ID NO: 516035 - DNA, 201 bp, Homo sapiens
ttttttcactaagttttgtatttctaatgccttagacaaaaaattgtgctggacaatgatcagaaccctgactttgctcttatctttgcttaatgggtgtygtatatcactagtggagtttcttacctacatttaagtatcctcactagccttcataaaataatcatcaacatcaaagatacctgtttctgttctctctta

SEQ ID NO: 516036 - DNA, 201 bp, Homo sapiens
aaaattgtgctggacaatgatcagaaccctgactttgctcttatctttgcttaatgggtgttgtatatcactagtggagtttcttacctacatttaagtaycctcactagccttcataaaataatcatcaacatcaaagatacctgtttctgttctctcttaccctgtccacagaacttttgcgactttcaggaccagtca

SEQ ID NO: 516037 - DNA, 201 bp, Homo sapiens
taaagaagtgaaagagttgtatagtaaattaaattgtaaacaaaacttttttaatgcaatgctttagtattttagtactgtaaaaaaattaaatatatacatatatatatatatatatatatatatatatatgagtttgaagcagaattcacatcatgatggtgctactcagcctgctacaaatatatcataatgtgagct

SEQ ID NO: 516038 - DNA, 201 bp, Homo sapiens
aaagaagtgaaagagttgtatagtaaattaaattgtaaacaaaacttttttaatgcaatgctttagtattttagtactgtaaaaaaattaaatatatacatatatatatatatatatatatatatatatatgagtttgaagcagaattcacatcatgatggtgctactcagcctgctacaaatatatcataatgtgagcta

SEQ ID NO: 516039 - DNA, 201 bp, Homo sapiens
agttttacatctaaatacttaggttatggaaaccaaaatatgcagggagatggtttcagcagttgtaccattagaccaaatgtacatcatgtagggaaatkgcctccttatcccactcatgagatggatggccacttcatgggagccacctctagattaccacccaatctgagcaatccaaacatggactataaaaatggt

SEQ ID NO: 516040 - DNA, 201 bp, Homo sapiens
aagaagtgaaagagttgtatagtaaattaaattgtaaacaaaacttttttaatgcaatgctttagtattttagtactgtaaaaaaattaaatatatacatatatatatatatatatatatatatatatatgagtttgaagcagaattcacatcatgatggtgctactcagcctgctacaaatatatcataatgtgagctaa

SEQ ID NO: 516041 - DNA, 201 bp, Homo sapiens
agaagtgaaagagttgtatagtaaattaaattgtaaacaaaacttttttaatgcaatgctttagtattttagtactgtaaaaaaattaaatatatacatatatatatatatatatatatatatatatatgagtttgaagcagaattcacatcatgatggtgctactcagcctgctacaaatatatcataatgtgagctaag

SEQ ID NO: 516042 - DNA, 201 bp, Homo sapiens
ctacaaatatatcataatgtgagctaagaattcattaaatgtttgagtgatgttcctacttgtcatatacctcaacactagtttggcaataggatattgawctgagagtgaaagcattgtgtaccatcatttttttccaagtccttttttttattgttaaaaaaaaaagcataccttttttcaatacttgatttcttagca

SEQ ID NO: 516043 - DNA, 201 bp, Homo sapiens
cttgtcatatacctcaacactagtttggcaataggatattgaactgagagtgaaagcattgtgtaccatcatttttttccaagtccttttttttattgttaaaaaaaaaagcataccttttttcaatacttgatttcttagcaagtataacttgaacttcaacctttttgttctaaaaattcagggatatttcagctcatg

SEQ ID NO: 516044 - DNA, 201 bp, Homo sapiens
ctctccatttagaagataaattctgtgattcacaagcctctttttatttataatagcccttcccctttctttatgaatttgaatttgttttttaaagaaastgtgattttctctgtaaaattccccacattctggatttggccgatttcatcttggttcttttgtttaacctattcctctatccccagtatcttctgtgga

SEQ ID NO: 516045 - DNA, 201 bp, Homo sapiens
gaatatctatgaaaagtttttaaacactattaatagttggattaatactgttattttgtttagctagtatcacaaagtataaggagtgctttgatactgtygtaaaagtttaattctcagcaagaacttctgaaataaatcaagctataaaaataaataaatgaatgagtctatgttgctagatttaaagttgggtcattt

SEQ ID NO: 516046 - DNA, 201 bp, Homo sapiens
tcaacaacaaaagcattaagtgaaagtctattacaaactaaacactgtgtttagtcactgggaacataaaggtgagcagtgccatctctgtctgtctttamgaattccgtctttgctgggtacggtggctcacacctttaatcccaacactttgggaggccaaggcaggtggatcacctgaggtcaggagttctagaccag

SEQ ID NO: 516047 - DNA, 201 bp, Homo sapiens
tgtaatcccagctactcggaaggctaaggcaggagaatagcttgaacctgggaggtggaggttgcagtgagccgaagtcaaaccattgcactccagcctakgcaacaagagcgaaactccatctcaaaaaaaaaaaaaaattcatctttaactgggtgcggtagtttatgcctgtaatcccagctacccaggagaccagga

SEQ ID NO: 516048 - DNA, 201 bp, Homo sapiens
tgagccatgattgcatcactgtgctccatcctgggtgacaaagatgacccagattctaaaaaaaaagcaaaaaacaaaagaattccttctttagtggagayagagacatataaaataaatagcaattttagaattacacagttccagctggaatagaagaatgtgcacatttctaaaaaaatttaaaaacaaaacccaaaa

SEQ ID NO: 516049 - DNA, 201 bp, Homo sapiens
tacacagcagacatggacaagggactaatcctaaaatgatttagctactcttcttttccactgtggactttaacagtcccaaacatttttttttttttttsgttcgaacaatagaggcaaattaaacgatggtctatttgtaagttattttatgtcaaattatgtttttagaaatgtgtatgaatatctatgaaaagtttt

SEQ ID NO: 516050 - DNA, 201 bp, Homo sapiens
gaccagtcatgcagcagtcccagcagccccagcctctacagaagcagccaccacagccccagcagcagcagagaccccagcagcagcagccacatcacccycagacagagtctgtcaactcttattctgcttctggatccaccaatccatacatgagacggcccaatccagttagtccttatccaaactcttcacacactt

SEQ ID NO: 516051 - DNA, 201 bp, Homo sapiens
gttattttatgtcaaattatgtttttagaaatgtgtatgaatatctatgaaaagtttttaaacactattaatagttggattaatactgttattttgtttasctagtatcacaaagtataaggagtgctttgatactgttgtaaaagtttaattctcagcaagaacttctgaaataaatcaagctataaaaataaataaatg

SEQ ID NO: 516052 - DNA, 201 bp, Homo sapiens
caaattatgtttttagaaatgtgtatgaatatctatgaaaagtttttaaacactattaatagttggattaatactgttattttgtttagctagtatcacaragtataaggagtgctttgatactgttgtaaaagtttaattctcagcaagaacttctgaaataaatcaagctataaaaataaataaatgaatgagtctatg

SEQ ID NO: 516053 - DNA, 201 bp, Homo sapiens
ttaaatctatgtaagattagagagagaagaaagctattgcaatcattgggcaagagattttaaggacctaaagaaatggcaggaattaagtatgtacactmactaaggtggagcttagagaacttggtgactagatgtatggatgagaaaagaatttggagatacaacaaatttccagtttggacaggtagttctattaac

SEQ ID NO: 516054 - DNA, 201 bp, Homo sapiens
ggaaactaaaacattgctgagataaattatagaaaacttcagtaactggagagatacactatgttaatggatcaaaagactaaatattattaagatgtcakttctccccaaactaatcaatatgttcaatacatgatgtttcaaaaccccagcaggttttttgaaagaattggacaagatggctgtaaaatatatatactt

SEQ ID NO: 516055 - DNA, 201 bp, Homo sapiens
tctttgtccagtggcctaacatctggactttttcaggaatagcctctattgactactttataggggccatactttgtttctgtttctcttaattgtttagmcattttaaactaatgtaatggctgagagcagtggctcgtgcctgtaatcccagcacgttgagaggccaaagcaggagcatcacttaagcccaggagttca

SEQ ID NO: 516056 - DNA, 201 bp, Homo sapiens
agggttaaatatgtatgggaaaagtaacaaggtgctcagagacatgaatttgaagacttctgtgcagaaagtgacaggctcattaataccatctcatgttraagttatttctaaagtcagtccattgtgatcacatttctctcaagaatatcttctaattttattttagatcacattagatcacattgtctccattgatca

SEQ ID NO: 516057 - DNA, 201 bp, Homo sapiens
gcctcccaaagtgctgggattacaggtgtaggccaccatgcccagccagcttttccataattcttataaatgccaatgcctgaaatggaatctgacatataaaaaattacatgaagaacttttattattttgcatttgaaaaccatgaaaaatagttggaccagagtctcagaaagcttgtagtttgttagtttaactgct

SEQ ID NO: 516058 - DNA, 201 bp, Homo sapiens
aaatgaagaaaagagaaagttaggtttgacagagtacaaaggaggagagacaagagagtgaaaatagtattaagttgcatattacctgtatcagccaaatstttaccttttcattttttatatttttacttcagttatcttatggaaatttcttaaacagagagagttaggtgtcaggtatgtgaaaagacatgaaatttg

SEQ ID NO: 516059 - DNA, 201 bp, Homo sapiens
tttgtttcttcacttccaatctgggtggctttatgtttttttcttgcctgattacccagttagaacttccagaaaatgtcaggtacaattaacaactgcaracatccttgtcttattcattttagaaagaaatttttagtttttcaccattaagtatgatactagttgtaggttttgtttaaaaaaagactgtgtcaagtt

SEQ ID NO: 516060 - DNA, 201 bp, Homo sapiens
ctttctttatgaatttgaatttgttttttaaagaaactgtgattttctctgtaaaattccccacattctggatttggccgatttcatcttggttcttttghttaacctattcctctatccccagtatcttctgtggactggtagtttgactggttctttttcttttcttttttttttttttttttttttttgagacaggct

SEQ ID NO: 516061 - DNA, 201 bp, Homo sapiens
cattattaggaggctatgctagtttctgaaaagcagaagtagtaaatgataactggggctatagtgcatcctaatataaccatgtttcattccaggaaggygacagagagtaagatgatgagaaggatgtttagaatcaagaagaatttgcctctgatagagcatgggttctgtgaagtaaaatggaaaggagcactagat

SEQ ID NO: 516062 - DNA, 201 bp, Homo sapiens
caggtatgtgaaaagacatgaaatttgtgttcagaagtatgagatgaggcaaatgtgatactaccaaaaacagaggaagtcatttcgtagaaaaaactttyagcctgtttttgaagaggcttcacatctagcacatctatttttgaagtgtgaaaagcaagagagtgcttcattttgggggagtgttgcttcttcccatag

SEQ ID NO: 516063 - DNA, 201 bp, Homo sapiens
tttgcctaccatgtttcttgggtttccatatgcattttaagatcagcttctccgtttcctttctggatttttttttttttttttttttttttttttttggkggagctggagtcttactatattacccaagctggttttgaactcctggctaaagagatcctccctcctaggcttcccagagagctggggttacaggcatga

SEQ ID NO: 516064 - DNA, 201 bp, Homo sapiens
aaaacagaagtatgacttttaaaagtttcatttacaaagctgaaagtttctttaaagtgttatctacaactgtgttaacttcctttctggaaagcctgctyataaagtagcacttgttgattatataagatactttttgtgtttaaatacgtgtcattcttttttttcacaacattcccgaatcttacataataaatctta

SEQ ID NO: 516065 - DNA, 201 bp, Homo sapiens
ggatttttttttttttttttttttttttttttttggtggagctggagtcttactatattacccaagctggttttgaactcctggctaaagagatcctccckcctaggcttcccagagagctggggttacaggcatgagccaccacatccaacccccttctgggactttgactggggttctgttgaatctgttggtcaattt

SEQ ID NO: 516066 - DNA, 201 bp, Homo sapiens
tttttttttttttttttggtggagctggagtcttactatattacccaagctggttttgaactcctggctaaagagatcctccctcctaggcttcccagagwgctggggttacaggcatgagccaccacatccaacccccttctgggactttgactggggttctgttgaatctgttggtcaatttggagagtattgatatct

SEQ ID NO: 516067 - DNA, 201 bp, Homo sapiens
ttgatgttgttcatcaaatttgagaagttttcggccattatttttcaaatattcttcctattctttattcttcatcctctactttggggacctgcattatrtctatgttggtatgctttatggtcttccacagatctctgaggttctgtttatgttttcatttttcagactgaataatctcaattgacttatcttcaagtc

SEQ ID NO: 516068 - DNA, 201 bp, Homo sapiens
agatctgaaaaagctgattctgacaatatttatcagtacttttattgcttttatggaggataaaattttcagagatccttattctgccatttttgctgacatgtgtaaagtgatcatttctaattgtaaaattccttttgcatttattagctggaatactttacaggacttttcctcatcaaccgttagttaccatttaat

SEQ ID NO: 516069 - DNA, 201 bp, Homo sapiens
tcagttggaaaaagcctcatttttaatattcctctactgtgctgataatcctgtataacactaaaagaatagatgaatgttcacggtgctacacagaaatyttttttttttttttttttgagatggagtttcgctcttgttgcccaggctggagtgcaatggcgcgatcttggttcaccgcgacctccacctcccaggttc

SEQ ID NO: 516070 - DNA, 201 bp, Homo sapiens
aaggccgtccattctcaggggtcactgcatgtttggacttctgtgctcatgcccacagagacttgcacaacatgcagaatggcagcacattggtaagttgrgctgaggacagcttagcagctgttgagtctgttctcacactgctaataaagacatatgcaagactgggtaatttataaaggaaagagatttaattgactc

SEQ ID NO: 516071 - DNA, 201 bp, Homo sapiens
gatctgaaaaagctgattctgacaatatttatcagtacttttattgcttttatggaggataaaattttcagagatccttattctgccatttttgctgacatgtgtaaagtgatcatttctaattgtaaaattccttttgcatttattagctggaatactttacaggacttttcctcatcaaccgttagttaccatttaata

SEQ ID NO: 516072 - DNA, 201 bp, Homo sapiens
agcaatccaaacatggactataaaaatggtgaacatcattcaccttctcacataatccataactacagtgcagctccgggcatgttcaacagctctcttcrtgccctgcatctccaaaacaaggagaatgacatgctttcccacacagctaatgggttatcaaagatgcttccagctcttaaccatgatagaactgcttgt

SEQ ID NO: 516073 - DNA, 201 bp, Homo sapiens
ctaagctcagtctaccacccatccatacactttaccagccaaggtttggaaatagccagagttttacatctaaatacttaggttatggaaaccaaaatatrcagggagatggtttcagcagttgtaccattagaccaaatgtacatcatgtagggaaattgcctccttatcccactcatgagatggatggccacttcatgg

SEQ ID NO: 516074 - DNA, 201 bp, Homo sapiens
cattattaacataaaaataggcagaactactatattcttagagaagttactgttagggagacagacagtgagtgactgaaaggcaaaatgaggggaaattccaggggatagtaaatattttgtttcttagtgtgggttctacttaactgggtattttccatttgtaaactgtaaaattatgtgcacttttctgtatgtgta

SEQ ID NO: 516075 - DNA, 201 bp, Homo sapiens
aaaggctgtttccaggtgccttggtttgatgcctccctaccccattgtccaccagacccatctgagaaagggtctaaagaagataaaactcaagtcaggtrtcagtgaccttggttaaaccttaacgaggcacataaggcagggtgagccctagtgaaagctggcagtcagtcaaaggctgcaataaaaggcaaatgccac

SEQ ID NO: 516076 - DNA, 201 bp, Homo sapiens
  misc_feature (1)...(201): n = A,T,C or G
tttgaccactgcttcttcccatgccgcttccagatgaatctgaggcctccaggccagactcgatccctctatcccacagcactgggtgctgactccacacntccccctggcttaccgctgggtctggcctccccatttctcccccaggggtaccccacttgctgccaaccatccacccctgacccccatctcacctgtccc

SEQ ID NO: 516077 - DNA, 201 bp, Homo sapiens
gctggccaccccctagtggactctgcatagcccatggccagtgtgcccttgccatggtctcgaggatggaaaagccaggtcatcatgtgatttcccactcrcataatagacaccaacttactcatttttgttttttgtttagacagggtctcactctgttggccaggctggagtgtagtggcatgatcatggctcactgca

SEQ ID NO: 516078 - DNA, 201 bp, Homo sapiens
cactcacataatagacaccaacttactcatttttgttttttgtttagacagggtctcactctgttggccaggctggagtgtagtggcatgatcatggctcactgcagcctcaacctcctgggctcaagcgatcctcctgcctcaacctcccacgtagctgggattagaggcatgcaccaccatgcccagctaattaaaaaa

SEQ ID NO: 516079 - DNA, 201 bp, Homo sapiens
atgggggttcgccatgttgcccaggctgggctcaggcgatcctcccaccttggcctcccaaagtgctgggattacaggtgtgagccaccgcgcccagccargtgttcttgatttaacaattccagagagaactatgttaaagtttttttttaatgactgaatttgtgaacttctcttcataattttgtcaaacgtgtctgc

SEQ ID NO: 516080 - DNA, 201 bp, Homo sapiens
ttttttctttgtgtgtgatgatctgttgaacaaaaacgttcatttattccattgatagcctctggtataccaggacctatggtaggtgctgagaatatatrtatttattatagagcaattaacttattctttccaagaatctttgcttcctcactccttaagagtctgaatattttagcttctgggagattttaccttttc

SEQ ID NO: 516081 - DNA, 201 bp, Homo sapiens
acacaatggtagactctagaagggctaaagacctaaatgagaatggtaacaccacaaaattaatacgtctcttatctacaaatctgaaatccagaacactstgaaaattaaatgctttttcttaacccacatggcagcaaaacttgagctgaggtgaagctatttataatcatgtatttatcctgcttaatgtgaatatcc

SEQ ID NO: 516082 - DNA, 201 bp, Homo sapiens
ttgttaggtgctcttgaccattttttttctattaggaaaaggctgggaaggagaagcttgagtcattaccttaggcatagagaggggatggatgagctgtkaagattactactaataagtagaggtgggaccagtgcaaattgtgctgggtgcaatatttttttttaacttagcaataaagatgctatgacagtgtcaatc

SEQ ID NO: 516083 - DNA, 201 bp, Homo sapiens
tcactgcagttttaaaaaactattattataaaaactttcaaacattcagaaaaatttaaaaatagtattagagggccaggcatggtggctcatgcctgtartccaagcatttggggaggcttaggtgggagtatcacttgaggccaggaattcaagaccaacctggtgaaaaagagcgagaccttgtcttaaaaaaaaaaa

SEQ ID NO: 516084 - DNA, 201 bp, Homo sapiens
ttacacattgctgtggatcggtattacaattctaccttgttttgtttgtttgtttgtttttgagatggagttttgcttttgttgcccaggctggagtgcartggggcggtctcagctcagtgcaacgtccacctcccgggttcaagtgattctcctgcctcagcctcgcaagtagctgggatcacaagtgtgtgccaccat

SEQ ID NO: 516085 - DNA, 201 bp, Homo sapiens
ttcttttgacccaggaaggagctctttcaggactgtggcacccagagccgtggccctcctgccatgccattgttcccacttccctgcccttgggagtcttrgagacagctgactagctgccctgaggggtccaccgctctcaccttctcactggtggctgctgccattctcctgggctctgcacagaaagctttggtcctt

SEQ ID NO: 516086 - DNA, 201 bp, Homo sapiens
tgctcataagttctagtggttctgaaaagaataggtttaaaagtgaggtataagattatgtatgatgttgatgttatgtgtgaggttgatgtttacctttyttggttgacaaatctggtattggtcctctgacaagaatggaaactgtatgtttggacaaaaatactgaagatacagatactgaagttcacaagtatcatg

SEQ ID NO: 516087 - DNA, 201 bp, Homo sapiens
tcctatcagccagtagggtggacagtagggtagacagtgcctttaggagcccagaaatcaactattggtcctgtatagattctctgtgaaagtttccttcrttgtccttttcccttccctaactgtttttccccttttcccctccaaacacctcccccaaccccacacacactccataaaaaagggaagttagttggaggt

SEQ ID NO: 516088 - DNA, 201 bp, Homo sapiens
tgaggctgggtgtgggctgatcacttgaggtcaggagttcgagaccagcctggccaacattgtgaaaacccatttctactaaaactacaaaaattagccargtgaagaaaaaaaaattagccaggtgttgtgttgtggtgaatgcttgtaatcccagctactcaagaggccaaggagggaagattgcttgaacccaggagg

SEQ ID NO: 516089 - DNA, 201 bp, Homo sapiens
gttggtagtagcttgagccctctgaaaagtaattaatccatacttcataaagagttgttctgaaattagtcacctctgtactgtactgtttttttttgttktttttttttttttttttgaggagtctcgctctgtcaccaggctggagtgcagtggcatgatctccactcactgcaacctctgcctcctgggctcaagcaa

SEQ ID NO: 516090 - DNA, 201 bp, Homo sapiens
agttttgccaccctgctggagatctgtttgaaatgtttaaaatggagcagccggcaggcggctggcatagacaggtgtggctgctgtacggagggcccagycggcgagtctcgcgggggctttgcaggacccgggctgtggtcacccgtactgcatgcagcaggcttggctccgcgactctcgcctccctccatctttttt

SEQ ID NO: 516091 - DNA, 201 bp, Homo sapiens
atccttaggtaggggtgtttttaatgacagtggatcactaaggttgtggttctagaatcttgaagttagcccaaaacctaaatcttaacctcagtcagttwgtttgtttgtttgtttgtttattgagacagagtctcactctgtcacccaggctggagtgcagtggcatgatctgagctcactgcaacgtccacttcccgg

SEQ ID NO: 516092 - DNA, 201 bp, Homo sapiens
caaaagtcaaaggacattctaaatggagagtggtggagttcctatgggggcactctcttatagttgtctgccttcaatcgcctcagattttttttttttttcttttgagacagggtcttattctgtcacccaggctggagtgcagtggcgagatcatagctcactgcagtctcagactcctgggctcagttgatcctccca

SEQ ID NO: 516093 - DNA, 201 bp, Homo sapiens
gacatgggggatcctgggttgggtggagtactggttttccacgaaacctgttgcatatcaggagccagccattcttgctttgtactttttttttttttttttttttttttttgagacagagttttgttcttgttgcccaggctggagggtaatgatgcgatctctgctcactgcaacctccacttccctggttcaagccat

SEQ ID NO: 516094 - DNA, 201 bp, Homo sapiens
catgccaggctaatttttgtattttttagtagagatggggttttaccatgttagccaggctggtcttgaactcctgaacctcaagtgatttcctgtctcakcctcccaaagtgctgagattacagccgtgagccactacaccgggcttgatgttgctttttaatccagactgacagtctttgcccctaaactggaatgttt

SEQ ID NO: 516095 - DNA, 201 bp, Homo sapiens
ggtcttcccgtgaatctgcatctttttgtaacagggagcctgtcacggtggggcattattgcctggctgttggcacatgactggggaaaaggaggattcasagaatctggatgaattcattttatgaacttctggtgacaggccagcaaaaggttggagggggatttcccaggctcctagcgggagggcaaaaaaggcctg

SEQ ID NO: 516096 - DNA, 201 bp, Homo sapiens
aattctgtaaactttaatttgtgaaatagtgttgggggagaaacgattagtgactaatttagggtaacacttagaagtagcttgtgaattgttaggatgatattttaatctctgacagacctccggatatcattggagcttttctgacctcatggaactctgccctgagtgagaagcaggacatgattgcctttggctctt

SEQ ID NO: 516097 - DNA, 201 bp, Homo sapiens
atatagcatgtaagagacatgggggatcctgggttgggtggagtactggttttccacgaaacctgttgcatatcaggagccagccattcttgctttgtacyttttttttttttttttttttttttttgagacagagttttgttcttgttgcccaggctggagggtaatgatgcgatctctgctcactgcaacctccacttc

SEQ ID NO: 516098 - DNA, 201 bp, Homo sapiens
caattctgtaaactttaatttgtgaaatagtgttgggggagaaacgattagtgactaatttagggtaacacttagaagtagcttgtgaattgttaggatgatattttaatctctgacagacctccggatatcattggagcttttctgacctcatggaactctgccctgagtgagaagcaggacatgattgcctttggctct

SEQ ID NO: 516099 - DNA, 201 bp, Homo sapiens
tgccagaaaactacagttctaccagaaagtatcccaaaagattttcactgtatataggaacctgcagttagggatcctccagatgttgtgggatattggtkgttactgttttgaaactgaggtatagttgacataccataatattcatacattataaatgtacaatgagatttagtaaatatatagttatgaaaccatcac

SEQ ID NO: 516100 - DNA, 201 bp, Homo sapiens
tcaattctgtaaactttaatttgtgaaatagtgttgggggagaaacgattagtgactaatttagggtaacacttagaagtagcttgtgaattgttaggatgatattttaatctctgacagacctccggatatcattggagcttttctgacctcatggaactctgccctgagtgagaagcaggacatgattgcctttggctc

SEQ ID NO: 516101 - DNA, 201 bp, Homo sapiens
ttgaatctttttgaggaattgccagcctgttttccaaaggaattgcacaattttatactcccaccaacagtatataagggttctgattctccacatcttttccaacacttattattacctgtctatttgataatagcagtcatagtggttctgatgtggtatcattatagttttgatttgcaaaggatattgggcatcttt

SEQ ID NO: 516102 - DNA, 201 bp, Homo sapiens
aagattgctcctgcctttagggtactttatggagggtaatatctgttggatcactcttttaactactgtgaaatagggttgacttttggggtatctctttycccccccctgcaaatagcctggggtttgttttcatttggtttggttttttgtcaattctgtaaactttaatttgtgaaatagtgttgggggagaaacgat

SEQ ID NO: 516103 - DNA, 201 bp, Homo sapiens
cttttagcatctggtttctttaagttaccataatgttttcaaggttcactcacattgtagcatgcagcactttattcctttttttttttttttttttttgktaagacggagcctcgctctgtcacccaggctggagtgcggtggcgtgatttcggttcactgcaacctccgcctcccgggttcaagcaattcttcctcagc

SEQ ID NO: 516104 - DNA, 201 bp, Homo sapiens
tgatctctgttgtgggtcctgcactgtgcctgccactcacattttttgagtacatgaatttgagtactttatgttcatcatctcacttaatcatcactctractctatggagtaagactgttctctcccacccccattgtgcaggtaaggaaacaggtttggggaggttaaggaactcacacaagatcaggtggttagtag

SEQ ID NO: 516105 - DNA, 201 bp, Homo sapiens
gtggagaacggggtctcactgtgttgcccgggcaggtctcaaactcctgagtccaagtgatcctcccaccgtggcctctcaaaatgctgggattacaggcrtgagccaccacaccaggcctggtcttctagctttgttaatgatggatttataaccacccagaggttagaaatacagccctttcccgaagctccaccaaag

SEQ ID NO: 516106 - DNA, 201 bp, Homo sapiens
tcaactgattttcaacaagggtgtcaagaccattcaatagagaaagaatagtgttttcaatagatgctactgggacaactgaatatccatatggaaaagaatgtggtttggacccctacctcacaccacatacaaaaattaattccaaatggatcaaagacctaaatataagaactaaaactttgatctgcagtagctgga

SEQ ID NO: 516107 - DNA, 201 bp, Homo sapiens
tcaggaggctgaggcacaagaatcacttgaacccagaggcggcactccagcctgggcaacagaatgagactgtctcaaaaaaaaaaagaaagaaagaaaaagaatatcactaataacagacatttatttcatcttattaagtgcccggcacagttctaaatgcttaacattcaattattgaatcctcaccccttgaggtga

SEQ ID NO: 516108 - DNA, 201 bp, Homo sapiens
ctcaggaggctgaggcacaagaatcacttgaacccagaggcggcactccagcctgggcaacagaatgagactgtctcaaaaaaaaaaagaaagaaagaaaaagaatatcactaataacagacatttatttcatcttattaagtgcccggcacagttctaaatgcttaacattcaattattgaatcctcaccccttgaggtg

SEQ ID NO: 516109 - DNA, 201 bp, Homo sapiens
actcaggaggctgaggcacaagaatcacttgaacccagaggcggcactccagcctgggcaacagaatgagactgtctcaaaaaaaaaaagaaagaaagaaaaagaatatcactaataacagacatttatttcatcttattaagtgcccggcacagttctaaatgcttaacattcaattattgaatcctcaccccttgaggt

SEQ ID NO: 516110 - DNA, 201 bp, Homo sapiens
ttcttttatcctgctgcctgcctgagtattctgggaatcctacaaggatttgagggagcccttgggattccaacctaacaaattagttttctgtaatattrttctagtccatttagattgtgtaaatgatctaaatggtgtaaccatttaatatcaaaagtataacagcatttaagtcagcttttcgaagaaacttttatt

SEQ ID NO: 516111 - DNA, 201 bp, Homo sapiens
gctactcaggaggctgaggcacaagaatcacttgaacccagaggcggcactccagcctgggcaacagaatgagactgtctcaaaaaaaaaaagaaagaaagaaaaagaatatcactaataacagacatttatttcatcttattaagtgcccggcacagttctaaatgcttaacattcaattattgaatcctcaccccttga

SEQ ID NO: 516112 - DNA, 201 bp, Homo sapiens
tgtgaggtagtatcccatagtattcatttgcatttctctaatgaattagtgatattgagcatcttttcatgtgtttattggccatttgtatatcttttttrgagaaatatctatttatatgtccatgtttgaatcaggttgcctcttttcttttcttttgatacggagttttgccctgttgcccaggctgaagtgcagtgg

SEQ ID NO: 516113 - DNA, 201 bp, Homo sapiens
ctcaaatgagtccttgaaggaggacaggtccagggtctgttctgatggtcatcctccacattgaccctgagcccacatggctgtcattcgagagtgtccayatgtactgtggatgtactggatctggagaaaacatttcatcccattctcctctctttcaggtttcaagtgccccatttgctccaagtctgtggcttctga

SEQ ID NO: 516114 - DNA, 201 bp, Homo sapiens
ttttttgccttcccttccttcttttatcatacttcatccttttgagttaaatttccttcttccagaggtaggctttaacactgttttttagtgagagtctrttggtgctaaactctttttgcttacctaaaagtgtttttatttgtcataaccattggataatttagctagttataaaagtctgggttggcatttactgtt

SEQ ID NO: 516115 - DNA, 201 bp, Homo sapiens
gcaccttaatcattcttaacacactttgtaagtattttatctgtttacttttttctgtgtatggtttgcctaaagtctaagctccgtgagagcaggactgygttccttgatctctgttgtgggtcctgcactgtgcctgccactcacattttttgagtacatgaatttgagtactttatgttcatcatctcacttaatcat

SEQ ID NO: 516116 - DNA, 201 bp, Homo sapiens
gatgttgatgttatgtgtgaggttgatgtttacctttcttggttgacaaatctggtattggtcctctgacaagaatggaaactgtatgtttggacaaaaawactgaagatacagatactgaagttcacaagtatcatgatgtgagaggatagatcattttcatttcaaggacttggttcatggaaaaaccttttttttttt

SEQ ID NO: 516117 - DNA, 201 bp, Homo sapiens
gttagcatgcagtggtgtgatcatggctcactatagcctcaacctccccaggctcaggggatcctcctgcctcagcttcccaagtagctggaactacaggyacgccgccacgtctggctgatttttgtattttctgtagagatggggttttgccctgttgcccaggctcatctcaaactcctggactcaagtgattcacct

SEQ ID NO: 516118 - DNA, 201 bp, Homo sapiens
gaaattgtttagttattttttttgtctactttgtccttccttccattctttattagttttttatttgctggaatttggaatccctttttttttttttgagrtggagtctctcactttgtcacccaggctggaatgcaatggtgcaatctcagctcactgcaaactccgcctccagagttcaagcaattctcctgcctcagc

SEQ ID NO: 516119 - DNA, 201 bp, Homo sapiens
gttcccgatgccaagggatgaatgggatacctaccgtctggaaactaggctttctgcgaggctgcggagcctggcgatttagggactcacggcgtgtgttmacttgtggaagggcagagcgaagcctacctattggagttccatttattggcatcaccctcctcagagaagaggtcgtgtctggctgagagcaagtcagcc

SEQ ID NO: 516120 - DNA, 201 bp, Homo sapiens
aagtgctgggattacaggtgtgagcaccacacccggcctggaatccttttttttatgtctttaatcttttaaaaattttttagaccaggtctcgctctgtwgcccaggctgggtgcagtagcacgatcatagcttactgcagcctcagccttccaagctcaggcaattctcctgcctcagcctcccgagcagctgggacca

SEQ ID NO: 516121 - DNA, 201 bp, Homo sapiens
gtcatggaattgaggggcaggccacctcctcaagggtgcatgtgtttctgtatgtgtgcacgtgtgtgtgtgtgtgtgtgtgtgtgtgtgtgtgtgtgtgtaaactagaggctttacacctaaggctctcttttgcaaaagccagtcctttaccactggaggcaaagagaggccagttgtctccagtccttccagtggact

SEQ ID NO: 516122 - DNA, 201 bp, Homo sapiens
ttagtaaggttattctaatacaaatacagatggtgacagttttgttttcttctttgctctgctagagtcaccaggtttgatcaacacttggagtttttttwaatatattgatttggtcctggataaagaggtgccagattaagaaaagctccttaagaagcaatttattccttagccaggggcttggcctgtttggtgtag

SEQ ID NO: 516123 - DNA, 201 bp, Homo sapiens
tgtcatggaattgaggggcaggccacctcctcaagggtgcatgtgtttctgtatgtgtgcacgtgtgtgtgtgtgtgtgtgtgtgtgtgtgtgtgtgtgtgtaaactagaggctttacacctaaggctctcttttgcaaaagccagtcctttaccactggaggcaaagagaggccagttgtctccagtccttccagtggac

SEQ ID NO: 516124 - DNA, 201 bp, Homo sapiens
ttgtcatggaattgaggggcaggccacctcctcaagggtgcatgtgtttctgtatgtgtgcacgtgtgtgtgtgtgtgtgtgtgtgtgtgtgtgtgtgtgkgtaaactagaggctttacacctaaggctctcttttgcaaaagccagtcctttaccactggaggcaaagagaggccagttgtctccagtccttccagtgga

SEQ ID NO: 516125 - DNA, 201 bp, Homo sapiens
ttttcacttggaatgattgaaactcgtgctgctccttccgcgtgcatgtgtaaaacgagccacagactgctagtctgttctgctctcctgctgtccgtgascgttgctagacctcctgtatggaggcagtgtggtgccatggaaggaggcgatgcagtagagtcaggccggcataagtggcttctctgcatgtgtgtcagc

SEQ ID NO: 516126 - DNA, 201 bp, Homo sapiens
ttctaagccatagtactaaaagcaaatgatgtctgcgcaaaaacaggtaatagacaaatgaaatagaataatgatctcagagaaagacccatatacatacrggaatttaatatacgataaaggggcaccatgaatcaatgggagaaggatggattgcttaatagataatgttaggagaattgactaattaaaatggagaaa

SEQ ID NO: 516127 - DNA, 201 bp, Homo sapiens
tgaccactgctcctctggttctggttctagtttttcccttgtcatggaattgaggggcaggccacctcctcaagggtgcatgtgtttctgtatgtgtgcaygtgtgtgtgtgtgtgtgtgtgtgtgtgtgtgtgtgtgtgtaaactagaggctttacacctaaggctctcttttgcaaaagccagtcctttaccactggag

SEQ ID NO: 516128 - DNA, 201 bp, Homo sapiens
ttcagagtcgggttgaccagatgtcccttctggattctaagtccagcagatggcccattgggcagccagcccactggccccaggagcatagggaccttcaygtttggcagggcagcagggccgcctagcccaggccggcctctccattcacaccaccgatagcctgaatgactgcagtaactccccactgctctgcaagct

SEQ ID NO: 516129 - DNA, 201 bp, Homo sapiens
attttaaacattaatgtagaaagcggaagtttcccccatgatccctctggtgtatatgtctccaaatttttgcctctggatgaatgggtgtgtgtaaagcygtagaaagcacattatgcttgtttcacaacttctctttcttatttaatgtcctcttcattgtttcatgttgttccatgtacatgtgtggattttattatt

SEQ ID NO: 516130 - DNA, 201 bp, Homo sapiens
atgaccactgctcctctggttctggttctagtttttcccttgtcatggaattgaggggcaggccacctcctcaagggtgcatgtgtttctgtatgtgtgcrcgtgtgtgtgtgtgtgtgtgtgtgtgtgtgtgtgtgtgtgtaaactagaggctttacacctaaggctctcttttgcaaaagccagtcctttaccactgga

SEQ ID NO: 516131 - DNA, 201 bp, Homo sapiens
tttctgcaggaaattaatctcaaacaaaaaagatggcttgtaagatgacaggaaggggtttagaaagaggcagcatttgcagaaggaagaggaagaagttrcaaaagaaggaaagccctggagcaggtgagggagttggaaaggctgaactcgcacatgctgtgcagaagcagaagacaacagacctttgtggtttccaaa

SEQ ID NO: 516132 - DNA, 201 bp, Homo sapiens
tttttgagtacatgaatttgagtactttatgttcatcatctcacttaatcatcactctaactctatggagtaagactgttctctcccacccccattgtgcrggtaaggaaacaggtttggggaggttaaggaactcacacaagatcaggtggttagtaggtggtggagatgggattggaatgcaggttggctggtgccaga

SEQ ID NO: 516133 - DNA, 201 bp, Homo sapiens
ctgcctcagcctcccaaagtgctgggattacaggggagccaccgtgcccggccatgtccaaatttttgtgtagacattttcttgttttacttaaaaaaaawttttttttctaaggttttttgtttgtttgtttgtttgttttgtttgttttgagaaagggtctcactttgtcccccaggctggagagcagtggtgtgatct

SEQ ID NO: 516134 - DNA, 201 bp, Homo sapiens
gtaggtgctgcagaggttaaagagagactgttggtttccagttggcagtatggaaagtgccagtcgtagtgcacagtgctcgagaggttcaaaggaaacgrtgatggcacccggcagagatgggagctgctggccaccccctagtggactctgcatagcccatggccagtgtgcccttgccatggtctcgaggatggaaaa

SEQ ID NO: 516135 - DNA, 201 bp, Homo sapiens
gtaattaatccatacttcataaagagttgttctgaaattagtcacctctgtactgtactgtttttttttgttttttttttttttttttttgaggagtctcrctctgtcaccaggctggagtgcagtggcatgatctccactcactgcaacctctgcctcctgggctcaagcaattctcttgcttcagcctcccaagtagct

SEQ ID NO: 516136 - DNA, 201 bp, Homo sapiens
taaaaagtaataataataaaatattgaataaatgtattaaggaaatgtttgtatcagagtgcagaagcacccaaaagttcgcactgtccaggaaatggctrttgagtactttgccaacccctgcctggggtcataagcccaggtcaccatgctgtctgcttttcccccctatctctgggcacttccaggtgggggtgggtg

SEQ ID NO: 516137 - DNA, 201 bp, Homo sapiens
agctatgactgaaacattcatgccattgcagccagtgccctggaaagctataagcaagtcttaagacctgtgataagggctgacttgcaagctagctgccrtccatcttaatatctgacgagcccagtcatgttggctgtgtttaattgatccatttcctacttgcttcctcaacccagaggccaagggcagcacaaaagg

SEQ ID NO: 516138 - DNA, 201 bp, Homo sapiens
gttcctggacgtgagaccctcacaaagaccaaccattcctctaatagccatttaacggtactgcagttcatgggaaaatgtcctcattcttaggagatagwtgctggattatataggtgaatgccttcaagaaatgtgtaatttaattccaaatagttccccccaaaatacacaaagcaaataaggccaaaatgttcattg

SEQ ID NO: 516139 - DNA, 201 bp, Homo sapiens
ggaggcctgcaaggccctaacacaagtggggaaaccaggaacaggtggctacaggaaagaggactgtgggagggagctgtagtggcctcagtaggaaagtwtgaagcgctccaggcctgagctttagttggctgcccccactatcctcattgcgggtggcccagctcaccaaaacaattgcattgcacttcaaagggctgg

SEQ ID NO: 516140 - DNA, 201 bp, Homo sapiens
ctcatgtttgtgatcctctatctggacagctctccagaatcctgtgttgcccctgttctgcctttctgggatgggagagaaggtgagggagccggcgagcmggttctaccctctctgctaagggcctagcacgctttgatgaggttcctggacgtgagaccctcacaaagaccaaccattcctctaatagccatttaacgg

SEQ ID NO: 516141 - DNA, 201 bp, Homo sapiens
gcaggcagctcggggcagggagcagcagtgcaggcctggcctgtgtccccgtgcccagcgggctcccggagcagcattccagagcctcctgcagagccagygaaggaaagctctagagggagacgactccaccgcctctctgctctgacccttctcaggcccgcctgatgtgctggaccatccccctgctgccacggcccc

SEQ ID NO: 516142 - DNA, 201 bp, Homo sapiens
ctgaaatcaaggtgtctgcagtgctgtgctgcttctggaggctctaggggagaatccatttccttgtctttcccagctcctggaggccacgctttccttgrctcatggtcccttcctctaacttcaaagctaatggcaaagcatcttcaaatctctgtctgtctgcttccatagtcatgtcttcttctctgcctctctctt

SEQ ID NO: 516143 - DNA, 201 bp, Homo sapiens
cattctcctgccttggcctcctaggtagctgggattacaggcatgcaccaccatacccggctaattttgtatttgtagtactggctaattttgtgtttgtrgtagagacgtggtttcaccatgttggccaggctggtcttgaactgctgacctcaggtgatccacccgcctcagcctcccaaagtgctgggaatacaggtg

SEQ ID NO: 516144 - DNA, 201 bp, Homo sapiens
tgaacttctggtgacaggccagcaaaaggttggagggggatttcccaggctcctagcgggagggcaaaaaaggcctggcaggaggaaaacaggtctgtctrctaggtcaggcatctagaaaattggccaaaagggatgtgggggccgctatttgctaattggcaagttgagtgatgaagttacatcttaagattcttttgg

SEQ ID NO: 516145 - DNA, 201 bp, Homo sapiens
aagctggggtcatgccacccggtgaggctccatatgccagcatgtagcacagagcctactgggtgacccttccaacagccccttgagaggagagggcacartgctgcataagttggtgtctaaagggtgtggagttgtatttaagcctttactatcacattgtgaatatttatgggtggatttatttcgtgtctggaattt

SEQ ID NO: 516146 - DNA, 201 bp, Homo sapiens
gcaggctgactgcccttaatttgttatctctttccggttgtacagctgggcctttttcacacatttccgtgaagtgtgatgttcattcatccaacagataytttcaagagcccatcatatgccaggctctagggctacagcagtaaaataaacagactctgccttcaaggggcttatactgtaagggggccacagacagca

SEQ ID NO: 516147 - DNA, 201 bp, Homo sapiens
aacacagttgtggcctactggactgtgccctctgggttccagcctccatctacctgtgttggaggtgcagctgaacagaggatgccctgatgacagggtascaggactgggtccaaggcaggaaggtagcctgtagtgtagctgcgtgccaggaccccagcctgagttgatggtgtttttgttttttgttttttgtttttt

SEQ ID NO: 516148 - DNA, 201 bp, Homo sapiens
tgctgcctcaacttactgggctccagccatcctcctgcctcagcctcccaagtagctgggaccacaggcatgtgcaaccatgcctggctaatttttatatwtttggtagagacagggtttcaccatgttgcccacgctggtcttgaatacctgagatcaagtgatctacctgccttggcctcctaaagtgctgggattaga

SEQ ID NO: 516149 - DNA, 201 bp, Homo sapiens
aagtttttgtttggtattttaatagacagatttattggtcagtgttttctagagaaacagatccgacagagtgagagagagagagagagagagagagagartgagtgtgtgtgtgtgtgtgtgtgtagagatttattataagaaactggcttacatgattatggaagctgagaaatcccatgatctaccatctgcaagctg

SEQ ID NO: 516150 - DNA, 201 bp, Homo sapiens
ggcatttcctggccagacctgtctatcctactgcctagcttgtaggtaatccctagtgtctaagaactagaagaaattcttgggctactgcaccaagaggragaggatctcctttttcaacagatggtccatcctttaaataagacatctccaaaatacaagccaagtgtttccctggagactttacatccacactttctg

SEQ ID NO: 516151 - DNA, 201 bp, Homo sapiens
tttgttttctaattgttattggcatgtggaggagtgctgttgacttttgtgtgtgtagatcttgcgtctagcaactttgctgaacttgtgttagttattamcatttgtagattttcttgcctttcctaatatagataatcatatcacagctgtttcctccttttaagcccttaaatcttttgcctaccatgttactttgct

SEQ ID NO: 516152 - DNA, 201 bp, Homo sapiens
tcctcctactcttcattgttggtgggaggaatgagaacctggaggctgtcctagctgtctgtgacttgatttagcatagggggaaagggctgacctttttyctgccagcagtactgtcaaggcctgcccaggtggcagccgaagtagctcccttcatgcccactgcacaccacagcatggtggcaggggcgcctgcagtct

SEQ ID NO: 516153 - DNA, 201 bp, Homo sapiens
gtctcaaaaaacaaagacttaattattttaatagagcagttttaggttcacagcaaaattaagaggaaggtccaatgattttctgtatatcctcatttttwaaaattgagttgtttgtcagtgagttgtaagagtttatgtattatgaatatgtcttttgtcagatatgatttgcaactattttctcccaatgtgtggcct

SEQ ID NO: 516154 - DNA, 201 bp, Homo sapiens
ggccaaggtgggaggaatgcttgagcccaagagttggagaccaacctgggtaacatagtgagaccccatctctctctctctctctctctctctctctctcbctctgtctctctgtctatatatatgtatatatatatacacacatagatatgtatacgtatctatatacatagatttatatacataaatataaaattgagg

SEQ ID NO: 516155 - DNA, 201 bp, Homo sapiens
gaatgtctggtgacattcccttgtagaccttcttgttgggtggcctacttcctagtaccttagctgtaactcaactcccctcctgcactcaaggaatcacrctggaatacaggggagtaaatgatgctattatagggataaccttgaatctgttctgagttatcagaaacataagtacctgcaaggtgtagttttgttctt

SEQ ID NO: 516156 - DNA, 201 bp, Homo sapiens
ttcgccatgttggcctggctggtctcgaactcctgacctcaagcgatctgcccaccttggcctcccaattacgggtgtgaaccaccgtacctggccacaggtaccttttgatggctcattccctcacgtgtctggttctccacagagacctcagcaagggccgtcaatccaaatgctgatggtggcctctctatgtggcct

SEQ ID NO: 516157 - DNA, 201 bp, Homo sapiens
aggagaattgtttgagcccggggtgcagaggttgcagtgagccaagatcgtgccattgcactccagcctgggtgacagagtgagactcagtctccgagggraaaaaaaaaaaaaagcgtgcttagagcagaggttcatgggattaaatgcaacaatgtaaataaatctcccagaacctgcctggcacgtaggagtggctct

SEQ ID NO: 516158 - DNA, 201 bp, Homo sapiens
tctttcctcctggttccggtcagttcagaggatttaacaatcacaagtgtcctgcaaaaatgcctgaacattattcttaggccctcgtggattttttttttcagaaaacttaaacaaaaaaagacttactaagaaatatgtacagctacccctgttttcaggcactatgtttgagaacattttagccattgatgttcacac

SEQ ID NO: 516159 - DNA, 201 bp, Homo sapiens
cccagaggggcggacccccatctccagccattctgtctcctttggttatgggatgacctctcccccgacctctggctccgagcgggtaagggcagaggccrtcagacaggtgtccactgtgccggcgggaaggtgcgagcatcccaagtgcagagcagagtggagttgccagaggtgtgctctggtttgagggctcaggtg

SEQ ID NO: 516160 - DNA, 201 bp, Homo sapiens
attttgttacagcagctcaaactgactaagatatcctgcttcataattttcagcagagccagggaaccccagctactctcctttaagagttgatccaggcygggcatggtggctcgtgcctgtaatctcagcactttgggaggccaaggtgggcggaccacgaggtcaggagatcgagaccgtcctggccaacatggtgaa

SEQ ID NO: 516161 - DNA, 201 bp, Homo sapiens
aagtttaacttatgcatctttgtttctgttcatttcattttaatgcagacatcagtgtacttccttgacacagatcattaactacagttagttaactgcarttccatatttgtttacaggttttttttctggttgaggtaaaatttgcagacaatgaaatctcaaatcttaagtgtatatttggtggattttgacaaacac

SEQ ID NO: 516162 - DNA, 201 bp, Homo sapiens
catggtgaaaccccgtctctactaaaaatacaaaaactagccaggcgtggtggtgggcgcctgtaatcctagctactcgggaggctgagacaggaaaatcrcttgaacccaggaggcgggggttgcagtgagccgagatagtgccactgcactccagtctgggtgacagagtgagactccatctcaaataaaagcggggtg

SEQ ID NO: 516163 - DNA, 201 bp, Homo sapiens
tcgttttgtaataggtcttgctacatggaagggcaaaactgtgttggctaactgaatctttctaagggacaaataagggaatccagatagaataaacacartgaagtacagagtaccaggaactgctctgtttaaagctggtattcttttttaatgataggacatctggcaaacccaccctaatgggcagtttcatttttt

SEQ ID NO: 516164 - DNA, 201 bp, Homo sapiens
tccagaatcctgtgttgcccctgttctgcctttctgggatgggagagaaggtgagggagccggcgagcaggttctaccctctctgctaagggcctagcacrctttgatgaggttcctggacgtgagaccctcacaaagaccaaccattcctctaatagccatttaacggtactgcagttcatgggaaaatgtcctcattct

SEQ ID NO: 516165 - DNA, 201 bp, Homo sapiens
ctatcatataggactcatatgaatcaaatgagtttgtagcatatccacatcactcacaacagtgcccagcaggtagtaagtgatcagtaatgtaagctgtyaatatttaatgtcactggataaagctttatgatttttttgaagatcttgaattccttttgttaggataccctatagttttggtccttactgttaatagta

SEQ ID NO: 516166 - DNA, 201 bp, Homo sapiens
aggtgccagattaagaaaagctccttaagaagcaatttattccttagccaggggcttggcctgtttggtgtagcagagtgaccagattcattctggtcttwcaggtgctatcttgaccgctttcatttttataaataagggattcatcttccctggcctcaggatcgtcataacagctgctttgcaagaaattcgatggaa

SEQ ID NO: 516167 - DNA, 201 bp, Homo sapiens
atcttatttgagttgtaaaagaactctcatctgtgtttaaacgaacatttaaaatattcctaaaaaagaaaaacattctaaggttatttattttttttttwaagctgttgctgttacatgtgactgagcaactgtgtgggcaagagtaaaagtactggcatagaacctggaaacaagagtttagaatgaagttgaacccat

SEQ ID NO: 516168 - DNA, 201 bp, Homo sapiens
agtcttttcttttcttttcttttctttttttttgagatggagtctcgctgtgtcacccaggctggagttcagtggcgcgatcttggctcactgcaggcccygcctcccaggttcacgccattctcttgcttcagcctcccaagtagctgggactacaggcgctcgccaccacacccagctaatttttttgtatttttagtg

SEQ ID NO: 516169 - DNA, 201 bp, Homo sapiens
cccttctcagtttgtgtcaccctttcaggtgggtcctcgggctagccagatgttctagacagaaaatgaccacaagttgtcctggtggccaggaagctgasagtgacttctctcgcaactcatgtgcctggggacttaaggatcgaatcggttccattttatgctttttccttggggttcctggtggggggctttgaggag

SEQ ID NO: 516170 - DNA, 201 bp, Homo sapiens
gggaccaattaaataataagccagcaaagagctcgacccccactgcagaggacatttcgtaagaggggattcataggagccccactttctctttcccagcyctctgttctgaagaatctgaatgtgtctaacttgtttcagagttcactgtttctttccatttttctttctgatgggatgattgcttctgccaatggctag

SEQ ID NO: 516171 - DNA, 201 bp, Homo sapiens
gctggctagttcctccagtaaaaatcgtattagaatctatgatcatgggaatccttatttttctcctgcttttttttaaagggaatgtttcctgcttttggaagcatcacatatgtttttggtatattgcctttattctcttttattcctactttgctaaattatcacaaacagcaattttatcaacagttttccttgtat

SEQ ID NO: 516172 - DNA, 201 bp, Homo sapiens
tctgcctcccgggttcaagcaattctcatgccatagcctccagagtagctgggactacaggcgtctgtcaccatgcctggcttttttttttttttttttttgtatgagtagagatggggtttcaccatgttggtcaggctggtctcgaactcctgacctcaggtgattcacctgcctcggcctcccagagtgctgggatta

SEQ ID NO: 516173 - DNA, 201 bp, Homo sapiens
tggcatgatctcggctcactgcaatctctacctcccgggttcaagcgattctcctgcctcagccttgtgagtagctgggattacaggcatgtgccaccackcccaactaatttttgtatttttagtagatatggggtttcaccgtgttggtcaggctggtctcgaactcctgacctcatgatccacccacctcagcttccc

SEQ ID NO: 516174 - DNA, 201 bp, Homo sapiens
tgttggccaggctggtcttgtactcctgacctcaagtgatctgcctgccttggccttccaaagtgctgggattacaggcttgagccactgcacccagcctrtttttattttttgagacagagtcttgctctgtcacccaggccggagtgcagtggcctgatctcgactgactgcaacgtctgcctcccgggttcaagcaat

SEQ ID NO: 516175 - DNA, 201 bp, Homo sapiens
gtggcatgatctcggctcactgcaatctctacctcccgggttcaagcgattctcctgcctcagccttgtgagtagctgggattacaggcatgtgccaccaygcccaactaatttttgtatttttagtagatatggggtttcaccgtgttggtcaggctggtctcgaactcctgacctcatgatccacccacctcagcttcc

SEQ ID NO: 516176 - DNA, 201 bp, Homo sapiens
caggcatgtgccaccacagccggctaattttgtacttttagtagagatggggtttcgccaattggccaggctggtcttgaactcctgacctcaagtgatcygcccaccttggcctcccagagtgctgggattgcaggcgtgagccaccatgcccagctgggagaagctttaacctggattcaggaacagaggtaggagaac

SEQ ID NO: 516177 - DNA, 201 bp, Homo sapiens
ggctaacacggtgaaacaccgtctctactaaaaaaatacagaaaaattagctgggcatggtggcaggcgcctgtagtcccagctactcaggaggctgaggyaggagaatgacatgaacccgggaggtggagcttgcagtgagccaagattgcgccactgcactccagcctgggcgacagagcaagactccgtctcaaaaaa

SEQ ID NO: 516178 - DNA, 201 bp, Homo sapiens
gtctcgctgggctgaaatcaaggtgtctgcagtgctgtgctgcttctggaggctctaggggagaatccatttccttgtctttcccagctcctggaggccasgctttccttggctcatggtcccttcctctaacttcaaagctaatggcaaagcatcttcaaatctctgtctgtctgcttccatagtcatgtcttcttctct

SEQ ID NO: 516179 - DNA, 201 bp, Homo sapiens
agcaattctcttgcttcagcctcccaagtagctggaattacaggcatgtgccaccacagccggctaattttgtacttttagtagagatggggtttcgccarttggccaggctggtcttgaactcctgacctcaagtgatccgcccaccttggcctcccagagtgctgggattgcaggcgtgagccaccatgcccagctggg

SEQ ID NO: 516180 - DNA, 201 bp, Homo sapiens
gcacggtggctcacgcctgtaatcccagcactttgggaggccaaggcgggcggatcacgaggtcaggagatcgagaccatcctggctaacacggtgaaacmccgtctctactaaaaaaatacagaaaaattagctgggcatggtggcaggcgcctgtagtcccagctactcaggaggctgaggtaggagaatgacatgaac

SEQ ID NO: 516181 - DNA, 201 bp, Homo sapiens
ggatggaccacggtttgtttaatccatccgaggacctttttaaaatacttgtgcccagatgcagtggctcactcctgtaatcccggcacttggtgaggtcraggcgggaggattgcttgaccccaggaattcgagaccatactgggcaacatggcaaaaccctgtctctacccaaaatacaaaaattagctgggcgtggtg

SEQ ID NO: 516182 - DNA, 201 bp, Homo sapiens
ggcagttgatgtgggtttctagatacctttcactgagttgaagaaattcccttttgtaacttgtcggctctcgagaatagaaccattagggcctgcctttrccagttaagcatttttggcagaaggactgcacagatgatgatgtgtccttcccactgcatcctatcaggaagctcatgatgtcagtctgtccgtggcttg

SEQ ID NO: 516183 - DNA, 201 bp, Homo sapiens
tttccttggcttgcagatggtggtcttctccgcttctccgtgtcctgacatggtcttccctttgtatgtgtctgtgtcctcatcattctttttttttttttgagacaaggtctggctttgttgcctaggttagcatgcagtggtgtgatcatggctcactatagcctcaacctccccaggctcaggggatcctcctgcctc

SEQ ID NO: 516184 - DNA, 201 bp, Homo sapiens
tatttttatttttgagatggagtttcactctcgttgcccaagctagagtacaatggcacgatctcagctcattgcaatctccacctcctgggttcaagcarttctcctgcctcagcctcccaagtagctgggattacaggcacgcaccaccatgcctggctaattttttttatttttagtagaaacggggtttcaccatgt

SEQ ID NO: 516185 - DNA, 201 bp, Homo sapiens
ctgggctcaagtgatcctcccacctcagcctcccaaatagctggcactacaggccactgtgtcccgctgtcatttagaatttaatgtttgctttttttttwatttttatttttgagatggagtttcactctcgttgcccaagctagagtacaatggcacgatctcagctcattgcaatctccacctcctgggttcaagcaa

SEQ ID NO: 516186 - DNA, 201 bp, Homo sapiens
aggggttggcaaggtagcttagtgcaccccacctcccagaggggcggacccccatctccagccattctgtctcctttggttatgggatgacctctcccccracctctggctccgagcgggtaagggcagaggccgtcagacaggtgtccactgtgccggcgggaaggtgcgagcatcccaagtgcagagcagagtggagtt

SEQ ID NO: 516187 - DNA, 201 bp, Homo sapiens; identical to SEQ ID NO: 285016

SEQ ID NO: 516188 - DNA, 201 bp, Homo sapiens
ctggctctggggctggggcagcctggagactgatgcacaggagacagggttggggggagggctggtggccagcctcccggctgttgggtgagcttttctcycttcagtcttagagcatcccctttctctctctccctcactgtcccccctgttcttctcctgagcacagatcctcatgatccggtacccgagcagtcagct

SEQ ID NO: 516189 - DNA, 201 bp, Homo sapiens
atggaggaaatgaggactaaggccccacagcagatcccaggcagggccagaattatgtattcatcactttcaagttattgccacgcatgggagtcagggakagcccagtcaatacagactgcctgccctcctgctcttcaccagggttcttttctagaaggagacagccttctgtggccagagagcttggggtaggaccca

SEQ ID NO: 516190 - DNA, 201 bp, Homo sapiens; identical to SEQ ID NO: 285022

SEQ ID NO: 516191 - DNA, 201 bp, Homo sapiens
ggcgtttgagaccagcctggccaacatggtgaaaccccatctctactaaaaaaaaatacaaaaattagccgcgcatggtggcaggtgcctgtaatcccagytacttgggaggctgagacaagagaatagcttgaacctgggaggcggaggttgcagtgagccgagaccacgccactgcactccagcctgggcaagaagagg

SEQ ID NO: 516192 - DNA, 201 bp, Homo sapiens
ctctcagagggctcttctgccatcccttgtctccctgaggccatcatcaaacaggacagagttggaagaggagactgggaggcagcaagaggggtcacatrccagctcaggggagaatggagtactgtctcagtttctaaccactctgtgcaagtaagcatcttacaactggctcttcctcccctcactaagaagacccaa

SEQ ID NO: 516193 - DNA, 201 bp, Homo sapiens
aaggtgacacatggcttttcagactcagcagggtgacttgcctcagaggctatatcccagtgggggaacaaagaggagcctggtaaaaaacagccaagccmccaagacctcagcccaggcagaagctgctctaggacctgggcctctcagagggctcttctgccatcccttgtctccctgaggccatcatcaaacaggaca

SEQ ID NO: 516194 - DNA, 201 bp, Homo sapiens
caagaagagggaaacacagtctcaaagagagagagagagagagagagtaggatgctgggatttcctgatcttcctcttgtttgtctgtgtctgtctatctkacttttcagacctaaaaaaaaggacagtgctgtgaagccagacaggtgagtcttttggactccagctgagtaggggtatggggagtacaagtgagtccag

SEQ ID NO: 516195 - DNA, 201 bp, Homo sapiens
cccgagcagtcagctgggggagatgtccctggaagaacacagccagtgtgaatgcaggtgccagccaggcccaacttctgagctcgcagaggccaggcttkgggggtgctgggtatggtggtccacagaactggggaccaggttcctaagagtagaaccaaggggccgggcgtggtagctcacgcctgtaatcccagcact

SEQ ID NO: 516196 - DNA, 201 bp, Homo sapiens
aaggccccacagcagatcccaggcagggccagaattatgtattcatcactttcaagttattgccacgcatgggagtcagggatagcccagtcaatacagaytgcctgccctcctgctcttcaccagggttcttttctagaaggagacagccttctgtggccagagagcttggggtaggacccagatctactgagtgacctt

SEQ ID NO: 516197 - DNA, 201 bp, Homo sapiens
cctgggcaagaagagggaaacacagtctcaaagagagagagagagagagagagtaggatgctgggatttcctgatcttcctcttgtttgtctgtgtctgtstatcttacttttcagacctaaaaaaaaggacagtgctgtgaagccagacaggtgagtcttttggactccagctgagtaggggtatggggagtacaagtga

SEQ ID NO: 516198 - DNA, 201 bp, Homo sapiens
tcaggagtcagatacaggagggacaatgccagcagaggatgtcaagggctgtggtgaggggtacctggcctcgtctttcagaggtcagagatctcttggargaggtgacatctgcccggagtagaaatgtaggacacagcttttccagcttgcagttcgggccttcccagaagcccctgtggtagacatctgcccttacct

SEQ ID NO: 516199 - DNA, 201 bp, Homo sapiens
acatagtggaacccttgtccacccttacctgatgtgtttctcaccatccgtgtcccgcagtgaggccatggggtgaaatcatatgggcagggccagtgggkgctcccgaggagtgtcaggaggggatgacctttgcaaaaggttcatccttcgccctgcagcctccagtgcccagggccgagtggtgtggcaggatgctca

SEQ ID NO: 516200 - DNA, 201 bp, Homo sapiens
gcgctggggctgtggagatccggagtcgccacagctcctaccccgcggggacggaggacgacgaagggatgggggaggagcccagcccctttcggggccgytcgcgctcggcgccccccaacctctgggcagcacagcgctatggccgcgagctccggaggatgagtgacgagtttgtggactcctttaaggtgagcgcca

SEQ ID NO: 516201 - DNA, 201 bp, Homo sapiens
gggggcgctacggtgggagaggaagccaggggtacctgcctctgccttccagggccaccgttggccccagctgtgccttgactacgtaacatcttgtcctyacagcccagagcatgttccagatcccagagtttgagccgagtgagcaggaagactccagctctgcagagaggggcctgggccccagccccgcaggggacg

SEQ ID NO: 516202 - DNA, 201 bp, Homo sapiens
ggtacctgcctctgccttccagggccaccgttggccccagctgtgccttgactacgtaacatcttgtcctcacagcccagagcatgttccagatcccagartttgagccgagtgagcaggaagactccagctctgcagagaggggcctgggccccagccccgcaggggacgggccctcaggctccggcaagcatcatcgcc

SEQ ID NO: 516203 - DNA, 201 bp, Homo sapiens
aagctccgccccctcccagtgaccttcgctccacatcccgaaactccacccgttcccactgccctgggcagccatcttgaatatgggcggaagtacttccstcaggcctatgcaaaaagaggatccgtgctgtctcctttggagggagggctgacccagattcccttccggtgcgtgtgaagccacggaaggcttggtccc

SEQ ID NO: 516204 - DNA, 201 bp, Homo sapiens
ttattttaatttttgtagagacaagggtctttctgtgttgctcaggctggtctcgaactcctggcctcaagcagtccttttgccttggcctcccaaagtgytgggattacaggcatgagccaccacattgggcctatatttttaagttatggacaaaaatccaaagaactatattttgtaacgtgaacattctatgaaatt

SEQ ID NO: 516205 - DNA, 201 bp, Homo sapiens
gccactgtgctggccactgacgtcagcctcccccggcagcagattgtgtgtggtcggcatgtggtaggggcaggatccaaacccagcccttgcctgatggyagagcttcactgctccaaacggtctggaacaccactgttttaattaagtgtgcaattcagtgtgcaagtgtcttgtaattaagtgtgcctctgtttcctc

SEQ ID NO: 516206 - DNA, 201 bp, Homo sapiens
cagctcctaccccgcggggacggaggacgacgaagggatgggggaggagcccagcccctttcggggccgctcgcgctcggcgccccccaacctctgggcakcacagcgctatggccgcgagctccggaggatgagtgacgagtttgtggactcctttaaggtgagcgccagtccccagcgtgccaggacctgaagtaccag

SEQ ID NO: 516207 - DNA, 201 bp, Homo sapiens
gcttggtcccatcggaagttttgggttttccgcccacagccgccggaagtggctccgtggccccgccctcaggctccgggctttcccccaggcgcctgcgytaagtcgcgagccaggtttaaccgttgcgtcaccgggacccgagcccccgcgatgccctgggggccgtgctcactaccaaatgttaataaagcccgcgtc

SEQ ID NO: 516208 - DNA, 201 bp, Homo sapiens
gccaccgcgtctggccgctagaggtggcttttaagcatctggtgggatttttagcagggtgctagtgggagctggcagggacttggagtctgaaccagagwtgtgcttgtctcagtccagttaggggtaggggcttcaggtgtgtgcaaaggaaggaatggtagatgtggggtccaagctggctgagcttcagggaaggga

SEQ ID NO: 516209 - DNA, 201 bp, Homo sapiens
catgtaacccttttctccctccaccagaagggacttcctcgcccgaagagcgcgggcacagcaacgcagatgcggcaaagctccagctggacgcgagtctyccagtcctggtgggatcggaacttgggcaggggaagctccgccccctcccagtgaccttcgctccacatcccgaaactccacccgttcccactgccctgg

SEQ ID NO: 516210 - DNA, 201 bp, Homo sapiens
agggggtttaggaaagggtatttggagacctaaagttgaaggtcattctaaggactctggcattgcctttgagtaaaaacctggaaaggatttgagcagargcagcatggtcagatttagacattcagagagtcaccagggaggtggtgagaagtagctgatccctggatttatttttaaagcagaactggcaggatctgc

SEQ ID NO: 516211 - DNA, 201 bp, Homo sapiens
atatgggcggaagtacttccctcaggcctatgcaaaaagaggatccgtgctgtctcctttggagggagggctgacccagattcccttccggtgcgtgtgaagccacggaaggcttggtcccatcggaagttttgggttttccgcccacagccgccggaagtggctccgtggccccgccctcaggctccgggctttccccca

SEQ ID NO: 516212 - DNA, 201 bp, Homo sapiens
tccgtggccccgccctcaggctccgggctttcccccaggcgcctgcgctaagtcgcgagccaggtttaaccgttgcgtcaccgggacccgagcccccgcgrtgccctgggggccgtgctcactaccaaatgttaataaagcccgcgtctgtgccgccgaggcttttctgtgcgtcgactggggctccggcaggccggggta

SEQ ID NO: 516213 - DNA, 201 bp, Homo sapiens
ctggagccaaggccacagggatgatgggaagagagttccaggcagagagaagggcagatggtaaggcctcgagggcaacacctgctcctggctagggtggrcctaggggagggggtttaggaaagggtatttggagacctaaagttgaaggtcattctaaggactctggcattgcctttgagtaaaaacctggaaaggatt

SEQ ID NO: 516214 - DNA, 201 bp, Homo sapiens
accccgcggggacggaggacgacgaagggatgggggaggagcccagcccctttcggggccgctcgcgctcggcgccccccaacctctgggcagcacagcgmtatggccgcgagctccggaggatgagtgacgagtttgtggactcctttaaggtgagcgccagtccccagcgtgccaggacctgaagtaccaggccgcccc

SEQ ID NO: 516215 - DNA, 201 bp, Homo sapiens
ggtcccatcggaagttttgggttttccgcccacagccgccggaagtggctccgtggccccgccctcaggctccgggctttcccccaggcgcctgcgctaartcgcgagccaggtttaaccgttgcgtcaccgggacccgagcccccgcgatgccctgggggccgtgctcactaccaaatgttaataaagcccgcgtctgtg

SEQ ID NO: 516216 - DNA, 201 bp, Homo sapiens
cgatgtagaacagacactatgaaatagctaccaacccaggggttgccaggaggccccatgaaggtcttgcactaataatacttcttgctttttttttttttcttttgagaaaaaaagcctgtcgcccaggctggagtgcagtggcgtgatctcggctcactgcgacctctccctcctgggttcaaacgattcttctgcctc

SEQ ID NO: 516217 - DNA, 201 bp, Homo sapiens
cagaatgcccaggcactctgatcacagcctatcttaccctaggcctttccggattccgtcctctcgttcccttactcgctttttttttttttttttttttktgagacaaagtctcactctgtctcccagactgccagactggagtgcaatggtgagatctcagctcactgcaacctccgcctcccaggttcaagtgattct

SEQ ID NO: 516218 - DNA, 201 bp, Homo sapiens
gcaagttcttaacctctgcctctgtttcctcatctgtacaacagggagagctggatattcacctggctgggactctcagaggcctcaggctatgaggggcyggtagggggctttcctgctctcatttgttgtcatggcgatcctggcagatggggaactgcccccatttcacagaagacactggggccccaaagggttgga

SEQ ID NO: 516219 - DNA, 201 bp, Homo sapiens
agcagaggttgcagtgagccaagatcacatcactgtactccagcctgggtgacaaagcaagactccctctaaaaaaaaaaaaatacatatatatatatatwcacacacacacacacacacacaccaaatatatacacacacacacacataaatatatgtatatttgtatttacatatatataattcaatttacacaaatgg

SEQ ID NO: 516220 - DNA, 201 bp, Homo sapiens
gggccagactgcagggttcaaacgtggctctacccttcctagcaggttgagcttgagcaggttaattaactccatctgcctgagtttcctcatctgtaaaygggaatagaactagtcccacctcgcagggctgtggcgaggacctgatgagttaatataggaaaagtgcttggaaacagtgcctggcgcagaggaggggct

SEQ ID NO: 516221 - DNA, 201 bp, Homo sapiens
agttggggtcccgggggcatgatccacacaggttgggtcagctggtgggaagcttgggatggagttatttgatggtgacaaggcctaggttatgtccctgrgaatgagtctgaggggagagtgggacaagatcatggtagaaggagtagcaaggtacagaaaggagacagggtgctggtggagtggcagaggacaggagta

SEQ ID NO: 516222 - DNA, 201 bp, Homo sapiens
caaagtgttgggattactggcgtgagccactgcgcctacttgctttttttttttttctcgaggtagagtttcactctgtcacccaggctggagtgcagtgrcgtgatctcagctcactgcaagctccgcctcccgggttcacgccattgtcctgcctcaccctcccgagtagctggaactaaggcgccagccaccatgccc

SEQ ID NO: 516223 - DNA, 201 bp, Homo sapiens
caggcgctgctcccgcggcgactgggggattctgcctaattcacctcccagccggtgcagagaggaccggagagcggtggaggcccggactgcagcagcgytggggccacctcccagcgtccccaccctaggaggctgcatgcggattgaagagctgcgcctgggggctgggccggccccgctgatcccgacctagcgagc

SEQ ID NO: 516224 - DNA, 201 bp, Homo sapiens
ccacaatgcacagtgaaaacttcaaatatttggtactgcgcagtgaaaacccaaatatttgtgcgcagtatacatactgcagtgaggacaggtgaacacaygtagattggttgggagaaggcctactttattcaaatgtaatcatgcaagacaatttttaaatgactgctttaattttgaaattaactttttttttgagat

SEQ ID NO: 516225 - DNA, 201 bp, Homo sapiens
tccctctgctccagcatggggcgggctccgggcacggctgctcggcaggcgctgctcccgcggcgactgggggattctgcctaattcacctcccagccggygcagagaggaccggagagcggtggaggcccggactgcagcagcgttggggccacctcccagcgtccccaccctaggaggctgcatgcggattgaagagct

SEQ ID NO: 516226 - DNA, 201 bp, Homo sapiens
ggaggaggcgcagaacgagcagacccgcgaactcaagctcaagtagggcccgcagctcttttcatcccgggtccccacagccagccatcattactcaggcytctcctcccctaaggcctcatcctgactgtctcctctcccatgagtcctttaggaataaaatgcgtctgagggctgagggatgggcccacgtgctggagt

SEQ ID NO: 516227 - DNA, 201 bp, Homo sapiens
gattggttgggagaaggcctactttattcaaatgtaatcatgcaagacaatttttaaatgactgctttaattttgaaattaactttttttttgagatggartttcgttcttgttgctgaggctggagtgcaatggcacgatctcagctcattgcaaccctgcctcccgggttcaagggattctcctgcctcatcctcccta

SEQ ID NO: 516228 - DNA, 201 bp, Homo sapiens
agagccaggactggaacccaggtcttctgatgcccccagccctgtgctctttccaaggcatctcagattcctccatgtttgctcactgtgtgactcagggmaaccgcctttccctctccagccctcaggcttccattcacctaatgaggaggagaagcctgaccttgctccctggggagtgggtgaaacagtcactatgta

SEQ ID NO: 516229 - DNA, 201 bp, Homo sapiens
atcatggtagccacactggggccagcttctcacagctacgatgagagcctctccaccttgcgctttgccaaccgagccaagaacatcaagaacaagccccrggtgaacgaggaccccaaggacacactgctgcgggaattccaagaggagattgcccgcctgaaggcccagctggagaagagggggatgctggggaagcgg

SEQ ID NO: 516230 - DNA, 201 bp, Homo sapiens
ccttggatctaaggcagtatggggcacagatgatagaacggccaagagatcagggcggccagcaccagaattcttgcaccagaggcatagcccacaaaatmtcacagtcttagagttggcaggagctttggaaaactgagacctggacttgcccagggccacacaggtgagttgaggagagcctagcccctttatatatgg

SEQ ID NO: 516231 - DNA, 201 bp, Homo sapiens
tctcctctcccatgagtcctttaggaataaaatgcgtctgagggctgagggatgggcccacgtgctggagtttcttctacctcctctgcctgtatttgatkaacccctcaaaatggacgctaggtgctggccaaaagtaactccgaaggccctgaggctaccatctttgcataagaatcagtgattttaaattttttaaaa

SEQ ID NO: 516232 - DNA, 201 bp, Homo sapiens
gaaggaggagaagacagctcgccgcccacccccatcccattttcctcttcctttatctcattgttgccgaagctgtttacggcagcgctccctctgctccwgcatggggcgggctccgggcacggctgctcggcaggcgctgctcccgcggcgactgggggattctgcctaattcacctcccagccggtgcagagaggacc

SEQ ID NO: 516233 - DNA, 201 bp, Homo sapiens
gcctcagtttacctttctgtaaaatagagggttggcctgggtgatctctgaggctctacctatctgataattctatggcctatattaatctgagcagcaarccaaccgacccctgccccgaggcctcatcacagttaatatccaattccccataaccctgagagatgtcaggacctcagcatccttcctgagctgtttcct

SEQ ID NO: 516234 - DNA, 201 bp, Homo sapiens
gagctgagctggaacccatggacctcatgctgtttcagttcttagctgggcaaagtgggaccatgaacagattctgctccctgggaaaatggtcccctggrccttacagtgcaggagccattgcttgctatcattaggaaagagatttgggggttatgcaggaggtagggtggaaaaagcaccaaactctataccagagac

SEQ ID NO: 516235 - DNA, 201 bp, Homo sapiens
ggtgccgccccctcagcaggaaggaggaggctgctggtcacgagcagatcctgaccatggacgtgaaactgggccaggtgaccctgcggaacccccgcgcygccccgggggagctgcccaagaccttcacctttgacgccgtgtatgatgccagctccaagcaggccgacctgtatgacgaaaccgtgaggcccctgatag

SEQ ID NO: 516236 - DNA, 201 bp, Homo sapiens
ctcctcccagctaatttttttttctttttttttggtattttttgtagagacagggttttgccatgttacccaggctgatctcgagctcctgggctgaagcratctgcctgccttgtcctctcaaagttctaggattacaggcgtgagccactgcgcctggccacgtcagctttttattttgaaaacaagaattgcaagaat

SEQ ID NO: 516237 - DNA, 201 bp, Homo sapiens
gcagtgagccaagatcactccattgcgctccagcctgggcaacaagagcaagactccgtctcaaaaaaaaaaaagaaaagaaaagaaaaggtctttctgcygggcatggtggctcatgcctgtaatcctgtaatcccagcattttgggaggccgaggcgggtggatcacttggcgtcaggagtttgagaccagcctggcca

SEQ ID NO: 516238 - DNA, 201 bp, Homo sapiens
ttgccacaccaagcagcctctgagtggcacctgtccccacccagctctacgccaagctgcaggcggtgaaggcggagatccaggaccagcatgatgagtayatccgcgtgcggcaggacctggaggaggcgcagaacgagcagacccgcgaactcaagctcaagtagggcccgcagctcttttcatcccgggtccccacag

SEQ ID NO: 516239 - DNA, 201 bp, Homo sapiens
tgtgatgtgcctccatctgtgtgactaacgcctctggagtaggccagctcttaggggctggggtctccatccacatggggcagagcctggcaaaggcatgrccctgggaactgagaggagggttcccaggggctctgcaggattgggtgggagcagtggatgtgggccatgggccatggtgaagccaggtcccgagacagg

SEQ ID NO: 516240 - DNA, 201 bp, Homo sapiens
catcagcctccacaagccacctggtactaattcctgggccttccacaaggtggtgtgagttctttgccaactgtatgactgtttccctaaatcatcaagarccacagtttgttggtcttaccaatcaaccattatactacttggggagagggtgaggcagcttggaaggcagtgtgatgtgcctccatctgtgtgactaac

SEQ ID NO: 516241 - DNA, 201 bp, Homo sapiens
ccttccttctttccttcctttctttctttctctctctctttctctctttctctttctctctttctctttctctctctctttctctctttctctttctctttctttctttctctttctccctttctttattttcttccttacttccttgcttgctttcttgctttcttttttcttgagtctcactctgtcacccaggctgga

SEQ ID NO: 516242 - DNA, 201 bp, Homo sapiens
ggaattacagtgctgagaatctcagacatgccaccctgggtcccacaggtctactagcccagggtcttccctttggcaggggcactgctagctggtgggcragaggacgtgatagctctccataacatcagcctccacaagccacctggtactaattcctgggccttccacaaggtggtgtgagttctttgccaactgtat

SEQ ID NO: 516243 - DNA, 201 bp, Homo sapiens
cttccttctttccttcctttctttctttctctctctctttctctctttctctttctctctttctctttctctctctctttctctctttctctttctctttctttctttctctttctccctttctttattttcttccttacttccttgcttgctttcttgctttcttttttcttgagtctcactctgtcacccaggctggag

SEQ ID NO: 516244 - DNA, 201 bp, Homo sapiens
ttcatttattaaatgcggaggagaatagtccctcttagggggggatggaaaccatggtgttaaaggcttagctcagcatctaatagatacttagcgctccrcaaatgtttgccagccatcctggaacataggcggtgttccaatattgtagatgacagacctgaagggattaatttgcccaaagcctcgaggtaagtgggt

SEQ ID NO: 516245 - DNA, 201 bp, Homo sapiens
aaccattcacagattttaaaaattaaaatagctaccttaaaacagcatactttaattaatttttacagtaatacctataataactttttttttttttgagrcagtctcgctctgtcacccaggctggagtgcagtggcgctatctcagctcactgcaagctccacctcccgggttcacgccattctcctgcctcagcctcc

SEQ ID NO: 516246 - DNA, 201 bp, Homo sapiens
gaggatgcagtgtaagggattcttccctctcatggtcctgcaaatgctgacctggagtgtgaaggaggagcctaggatgggtttaggtctgtggcaaggcratgcggtaagaggggagatcattaaccaggagcgcaggcggctgcagtgtggcagcatggacagcctccagggctcaaggcctcttcctcctgccttggc

SEQ ID NO: 516247 - DNA, 201 bp, Homo sapiens
cttgaaccagggggtcggaagttgcagtgagccgaggttgtgccacagcactccagcctggtgacagcgagactccgtttccaaaaaaaaaaaaaaaaaamaaaacagaagaaacaacacacaatgaaggctgggtgacagtgagactctgactcaaaaaaaaaaaaaacagccaggtgcagtgattcacgtctgtaatcc

SEQ ID NO: 516248 - DNA, 201 bp, Homo sapiens
cctcctgagtagctgggattacaggcatgtgccattatgcccagctaattttgtatttttagtagagatggggtttctccatgttggtcagactggtctcraactcccaacctcaggtgatccgcctgccttggcctcccaaagtgccgggattacaggcgctagccaccgcaccgggcccccagggagctggaattctct

SEQ ID NO: 516249 - DNA, 201 bp, Homo sapiens
aagttttttgtttttaattctctttctttttttgagacagggtctcactgttgcccaagctaaagtgcattggcgcaatctcagctcactgcagcctcaayctcccaggctcaagtgatccgcctgccacagccttgcgagtagctgggaccacaggcccacaccaccatgcctgacccatttttatattttttatagaga

SEQ ID NO: 516250 - DNA, 201 bp, Homo sapiens
gattaggttgccacccccatcctcctcctagccctggtggaccaacctttcctgtgtacccaaagcaaacagaccagttgccctagattccccgaggggcrccctctgtgcctccctagtgttcctgctgacaataagagccttgtgctgggacctgagacactagaggggaaaactccattctccctgaaagccacaagg

SEQ ID NO: 516251 - DNA, 201 bp, Homo sapiens
acatgatcacggctcactgcagccttgacctcccaggctcaggtgatcctcccacctcagcctctcgagtagctgggattacaggtgtgtgctaccatacyctgctaatttttttttgtattttttgtagagacagggtcttgctatgttgcccaggctggactcaaatttctgggctcaagggatccacatgcctcagcc

SEQ ID NO: 516252 - DNA, 201 bp, Homo sapiens
tgagaccagcctgatcaacatggtgaaaccccatctctactaaaaatacaaaaattagccgggcatggtggcgcgcacttgtaatcccagctactcaggargctgaggcagaattgcttgaacctgggaggtggaggtggcagtgagccgagatcatgccactgcaatccagcctgggcgacagagcgagacaacgtctca

SEQ ID NO: 516253 - DNA, 201 bp, Homo sapiens
ggagttcgagaccagcctggccaacacggcaaaaccccatctctactaaaaatagaaaaattagctgggtgtggtggcatgtgcctgtagtctcagctacrtgggaggctgaggcaggagaatcgcttgaacgtggcaggtgaaggttgcagtgagccaagatcgcgccactgcagaaaaaaaagagagcccaaggaaggg

SEQ ID NO: 516254 - DNA, 201 bp, Homo sapiens
gatcatgaaccggcttttcctggactgtgaggaggagcagtggaagttccagccactggtgccagccggcgtgtgagtctctaacccagctgtctgggctrggggacttgtgggtccactccaggtcggggctggtgaggggcctgaggccttgcctgcagggagacagatgttttgtggattggggaaaagatggggagg

SEQ ID NO: 516255 - DNA, 201 bp, Homo sapiens
ctcctgcctcagcctcccaaacaatggggaccacaggcataagccaccacacctggctctggagtgttacaaaatctccccaggtgtttctaacatgcagygatatttgagagcaagtgtcttttgattataaagaataaagaatgctagagccacataaaatgctggggaaaatgaagggtctcagggttgaaatggaca

SEQ ID NO: 516256 - DNA, 201 bp, Homo sapiens
aggggcaccctctgtgcctccctagtgttcctgctgacaataagagccttgtgctgggacctgagacactagaggggaaaactccattctccctgaaagcyacaaggccccatctgggacacatctggtgtccactcccagaaggaccacagagcagggaagcaaaatctctccagctagcaatgttgtggaccctttgca

SEQ ID NO: 516257 - DNA, 201 bp, Homo sapiens
caaccattatactacttggggagagggtgaggcagcttggaaggcagtgtgatgtgcctccatctgtgtgactaacgcctctggagtaggccagctcttaggggctggggtctccatccacatggggcagagcctggcaaaggcatggccctgggaactgagaggagggttcccaggggctctgcaggattgggtgggagc

SEQ ID NO: 516258 - DNA, 201 bp, Homo sapiens
caatagtacatcagctgtcatagaggttttccaccctggctggagctagaatacctgcagagagtctgatttaaagggtcccaggtcttaggttttgtgaytctgcatttgaagccaggctagaaaaccactgctccaatgacatttgctggagttggatgctggcgaggcttcactctgaagggttatcttatgcttaga

SEQ ID NO: 516259 - DNA, 201 bp, Homo sapiens
ggggtttcaacatgttggccaggctggtctcaaacccctgacctcaggttatccacccgcctcagcctcccaaactgctaggattacaggcgtgagccacyatgcgcctggccttgagtaagtttttttaacctctctgaacccaaattttttcatctgtaaagtggggataacaatatgtaccttgcaggactgtcaagg

SEQ ID NO: 516260 - DNA, 201 bp, Homo sapiens
ccagtgtcctcctgagagatgatactagagtccttggggggaacccccaccctgtggcatagaatgaggtgttgcccgattcaaaaatttcacaaaataatttttttttttttttgagactcagactcactctgtcgcccaggctgaaatgcagtggcacgatctcagctcactgaaacctccatctcccaggttcaagca

SEQ ID NO: 516261 - DNA, 201 bp, Homo sapiens
aaagtgttgggattacaggtgtgagccactgtgcccagccacaaaataataataattttttttttttgagacagagtctcgctctgtcacccaggctggartgcagtggcatgatctcggttcactcaacctccgcctcccaggttgaagtgattctctcacctcagcatcctgaatagctgggactacaggtgcatgcta

SEQ ID NO: 516262 - DNA, 201 bp, Homo sapiens
ttcaattctcttgagtatatgcctagtagtggaagtgctgggttatatggtaagtctatgtttaacttttttttttacattctcactaatagtgtatgagrgtttcattttctctacatcctcaccaacatgtgttactgtctgtctttaaattatagtcatcctagtggatctgaactggtatccattgtgggttttttt

SEQ ID NO: 516263 - DNA, 201 bp, Homo sapiens
cttttatccttgctcatttcatttgtatccccacttgaaattagcaagtggaattgaaaataaatcataatcacagctgccatgtgttaagccctgtggcrggtgtactgtgctaagtgcttgtcttgtttaatctcagaaattctgtatgatagggatgatatatctgaggctcagagatagtaagccacttccccaagt

SEQ ID NO: 516264 - DNA, 201 bp, Homo sapiens
acgttgtaaataagttgccattttcctaattttcccactcccctcttagaggggatggctctgcatttccagcagcgtctgcagcaggactgtctccttgmtgccactgccactgaggctgcctctcctcacgggcacgcctcccggcatcctgtaagctcagctgcagacccagctggggcttctggagccttatctttc

SEQ ID NO: 516265 - DNA, 201 bp, Homo sapiens
gctaataatatgcatgccccttacaccagtccttttcagacatttatgtgcatccaaattacctgggaatctcagtacaatatggatctcaattcactagrtctgaatttcttatttgatttgcttatttatttttgagatagggcgttgctatgttgcccaagctgatcttgaacccctgggctcaagcgatcctcctgc

SEQ ID NO: 516266 - DNA, 201 bp, Homo sapiens
agggccaggcacagtggctcatgcctgtaatcccagcactttgggaggctgaggtgggtggatcaccataggtcgggagttcaagaccagcctgaccaacrtggagaaaccctgtctctacaaaactacaaaattagccgggtgtggtggtgcgcgcctgtaatcccagctacttggaaggctgagacaggagactcattt

SEQ ID NO: 516267 - DNA, 201 bp, Homo sapiens
tatttattcgcggagctcagttcgtgttggggagatgccctcgcctgagccgtctgggcctaccgtggtcactgcgtagcctctttttcttctgacttgakagctcccccagtcagatctcaggcttgtccccctgtcagctgcctccagaagggaaggtagccagtgcctgagaagacagtcccttttctacccaccgca

SEQ ID NO: 516268 - DNA, 201 bp, Homo sapiens
gagcctcagacaacctcattcagcctcttgggctccttttcaaggacattaataacctcaccaacatagctcatgcccttcagctttgacaagaactcacrgcttcccaaactctgctttctgcccaccttggatgggaactgtggaccaagcaattaccatcgccttggaacctgcaggaaatggaacagcaattgagac

SEQ ID NO: 516269 - DNA, 201 bp, Homo sapiens
attatattatatatatattaggtaaagtggaaatagcaagacataagcttgtgtttatactatgtccatagaggtgaaaaaagggccaggcacagtggctyatgcctgtaatcccagcactttgggaggctgaggtgggtggatcaccataggtcgggagttcaagaccagcctgaccaacatggagaaaccctgtctcta

SEQ ID NO: 516270 - DNA, 201 bp, Homo sapiens
cttcatctgtcacaggaaacagaagcccaggcacaatcttttccagctttgcctgttacccctgtttctgaattgcatctttaaggtattattttgttgamaatagatcctttattcactagttacgcaaattggttcctagggggatactccttaccttcctttgtgatggcccaaaatgtctctaggtatctcaagtga

SEQ ID NO: 516271 - DNA, 201 bp, Homo sapiens
gcacgtatcacctcattcatcacttggacacatcgcctttgcattgtcttgtcacacctccctcacagtcttatagcacaatatacccaaatcagcccccscagtccgagggctgggcccaaggtatggtcggaggaggagctcctgcctgcggttttgtgtatgtgtgtatgtgtgtgcgtgtttgtgtgcgtgtttacc

SEQ ID NO: 516272 - DNA, 201 bp, Homo sapiens
tgtccccttggcttcggatggaggcctttctgttgagctgaaatgcacctgcagctgggtgctgccagcagcttgcaggccccagccctgttccaatcaaygcagttgacaataaaggaatgagtatcgtcacggagttgactgccttacttctcttccctttgtttcttcctactttaactccctccctttttcattttc

SEQ ID NO: 516273 - DNA, 201 bp, Homo sapiens
aatgtggaaataaaaaagtaaaggaaaaaaatctatttctaagccaagaaaggaatctcatgcatgacatatttccgagcatgggagtgaagcagacagcwtggggtgagactggggagaaggagggagcagagaccctgcacctggactgaggcccacccacagatttcatgccagagccaaccccatcttcccagcaca

SEQ ID NO: 516274 - DNA, 201 bp, Homo sapiens
ttcatcccctccccattgtctctttcatttcttcttcccttactgctgactcctcaagatgtacaatcagggcgctggaaaaggagaaataggtctgtgarggaaggggtggctatattttctaagagatggaagcggggtctgttgagattgttgttttggttttgctttttgtggcaagtggtgggtaaaataccaatg

SEQ ID NO: 516275 - DNA, 201 bp, Homo sapiens
gtgggaggattgcttgaacctaggaggttgaggcttcactgagctgtgattataccacttcactccacctggcctggtcaacagagtgagaccctgtctcaaaaaaaaaaaaaaaaaggcaattatgatttaccaatgttctctactacacttaaatacaaattatatgaacagtaattacagaatgctctaatataataa

SEQ ID NO: 516276 - DNA, 201 bp, Homo sapiens
tgccgctgctccgccccatccccttctgtttttctctctcattctccagtggcggcggcggggaaggcggaggcagaggcagcagcagccgcgctggctgsaatgaatgatcccccagcttggggggaggactccaggtgagcctctgccctcgggaggcccgggacccccggccgcccacgaccggcagcccacgctatg

SEQ ID NO: 516277 - DNA, 201 bp, Homo sapiens
agctgggactacaggtgcgcgccaccacgtcctgctattttttttttttttttttttgagacagagtcttgctctgtcacccaagctggagtgcagtggcrtgatctcagctcactgcaagctccgcttcccagcttcacaccattctcctgcctcagactcccgagtagctgggactacaggcacccgccaccacgccag

SEQ ID NO: 516278 - DNA, 201 bp, Homo sapiens
ggagaatcacttgaacccggaaggcggatgttgcggtgagccgagatcacgccactgcactccagcctgggtgacagagcaagactctgtctcaaaaaagaaaaaaaaaaaaaagatgattccttgctttctgtaccatttgctgattcaccttggaagcaggccagggttagaaaccagcctgagtgaaggacagtgaag

SEQ ID NO: 516279 - DNA, 201 bp, Homo sapiens
ctgccgctgctccgccccatccccttctgtttttctctctcattctccagtggcggcggcggggaaggcggaggcagaggcagcagcagccgcgctggctscaatgaatgatcccccagcttggggggaggactccaggtgagcctctgccctcgggaggcccgggacccccggccgcccacgaccggcagcccacgctat

SEQ ID NO: 516280 - DNA, 201 bp, Homo sapiens
aggttgcagtgagccgagatcacgccactgcactctagcctgggcaacgaagtgagactctgtctcaaaataataataataataataataataataataawaataatacttcatgcctatgatgctgtaataaaaatggttccattatttactgctggcagtagtttaagtcattagaatgataattgacaatatgttcca

SEQ ID NO: 516281 - DNA, 201 bp, Homo sapiens
atcccagcactttgggaggctgaggcaggcggatcacttgaggtcaggagttcgagaccagcctggccaacacggcaaaaccccatctctactaaaaatasaaaaattagctgggtgtggtggcatgtgcctgtagtctcagctacgtgggaggctgaggcaggagaatcgcttgaacgtggcaggtgaaggttgcagtga

SEQ ID NO: 516282 - DNA, 201 bp, Homo sapiens
agttttccagttagatgtggagtgggaggaggaacccaggtgcttgtgaaatgccatggcccattgagggagctggaattcttttttttcttttttgagayggagttttgctcttgttgcccaggctggagtacaatggcgtgatctcggctcaccacaacctccgcctcccgtgttcaagcgattctcctgcctcagcct

SEQ ID NO: 516283 - DNA, 201 bp, Homo sapiens
ggttgggcacagcggggagttcagaaaaggacccgcagcctcatcctgggctgagtcggtagactctgagcctgcagccctgcggcccaggctgggtgacyggggcctcgttgccacaccaagcagcctctgagtggcacctgtccccacccagctctacgccaagctgcaggcggtgaaggcggagatccaggaccagca

SEQ ID NO: 516284 - DNA, 201 bp, Homo sapiens
cccgtccttggcctagaaacgtcgtgagcgggagatgcagcaggagatgatgctccgggacgaggagactatggagctccggggcacctacacatccctgyagcaggaggtggaggtcaaaaccaagaaactcaagaaggtgagacgctgcagcaggaccggttaaggtgtgctggaggcccagcagtctctgcccaaggg

SEQ ID NO: 516285 - DNA, 201 bp, Homo sapiens
gcgtgtgcgtgtgtgcaggggtgagaatctggcagatggtgcctctgcctgctcttcttcgcctcctttatttaattcatgttatttattcgcggagctcwgttcgtgttggggagatgccctcgcctgagccgtctgggcctaccgtggtcactgcgtagcctctttttcttctgacttgagagctcccccagtcagatc

SEQ ID NO: 516286 - DNA, 201 bp, Homo sapiens
tgacccagccttgactgggagcctagaggctgtgtgacccaggaccacgaacctaacccctctgggccccgcacctgatctgtaaactgctcagactacaytatatatatccttaggttcatccagttctgacactggaacattctgttgtctggatttgctgaagagaaaccctctagaaagtcacaaataagcaaggga

SEQ ID NO: 516287 - DNA, 201 bp, Homo sapiens
atttctgagattttggtgcacccatcacccacttttaaaaaattaaacaaaaattaatctgaattttttaaaggaaaaagccctttgtcagggttctatgktttaaaaaagacgggggggacatataaaagatatatgttaatgcctagttggaagatttgcttaaaggtaatgaataattgaggaaaatccagggttgat

SEQ ID NO: 516288 - DNA, 201 bp, Homo sapiens
tcccaaagtgctgggattataggcgtgagccaccgcgcccggcctgatgtgttctgatgtgttctttatgtgtatcattttgcttcatcctcacggtagcrtgaatcttcatctgactagtgaggatactgaggcacattaaggaatgaacattccaagttcgcacacctagaaagtggtagggccagagttacgagccca

SEQ ID NO: 516289 - DNA, 201 bp, Homo sapiens
tctctttccacagatccagctctgcagctatagaggctgtacaaggcacaccctcatgctcagaccttataggacacccacacttgtggtttggtatatcwagaatttttaatatcctgagaagttcctgggcattaactccacctcatactaaaaaattactttctagttgtctcactttcttcccagatatactcaaca

SEQ ID NO: 516290 - DNA, 201 bp, Homo sapiens
tgatcttgccaccgcactccagcctggacaacagagcgagaccccaactcacaaaaaaagaaaatgaaacaaaatggtctctctttccacagatccagctytgcagctatagaggctgtacaaggcacaccctcatgctcagaccttataggacacccacacttgtggtttggtatatctagaatttttaatatcctgaga

SEQ ID NO: 516291 - DNA, 201 bp, Homo sapiens
gataagtaaatttctacaaaaaaaaatggttaatgttcattgactggctttttaagtgtatattttggaggacgggtgaagaggtaataacgaaagcaagygagtgaattaggatttcaaagtgccctaatagtgtgagtctccagttcctagaatatgaagagtgctgtcgttggggtgaaaccatgagactgacagatc

SEQ ID NO: 516292 - DNA, 201 bp, Homo sapiens
tggtactgcatgcctgtagtcctagctgctcaggaggctgacatggaaggatggcttgagcctaggagttcgaggtttcagtgagccttgatcttgccacsgcactccagcctggacaacagagcgagaccccaactcacaaaaaaagaaaatgaaacaaaatggtctctctttccacagatccagctctgcagctataga

SEQ ID NO: 516293 - DNA, 201 bp, Homo sapiens
acaacaacaaccaccgcccgccccagcccatcctggagtcagccttggagaagaacatggagaattacctgcaggaacagaaggagcggctggaggaggakaaggcagccatccaggatgaccgcagcctggtgagcgaggagaagcagaagctgctggaggagaaggagaagatgctggaggacctgcggcgggaacagc

SEQ ID NO: 516294 - DNA, 201 bp, Homo sapiens
cagaggttgcagtgagccgagatcacaccactgcactccagcctggtgacagagtgagactccgtctcaaaaaagaaaaaaagagaattaaacaagagaaygaacataaagcactttgcacagtttctggcacacaagtgttaagtaaataattattattgctatgtcaaaccacctaatagatgttttcacttggccacc

SEQ ID NO: 516295 - DNA, 201 bp, Homo sapiens
cggccaagtacaaggtaagggccccagaggagctgggcactcgagatgtccccgcaggggatcccggcaaggaggctcttctttgagagtctgtgacctgscctgaagtggaggttctccctcagcaccgcacactgccctcctgccaaatgtgcccccagagcagccaggcaaattgctgtgataccgggctgccaggta

SEQ ID NO: 516296 - DNA, 201 bp, Homo sapiens
ttttatagatgagaaaacagagctccattgaggtgaaataactctcccaaggccacatggttggtatagtaaaactatgtaaacccagctggatttgacayaaaatctgatgctcttttaggcttaaaaaattaggaatatcaggttgggaactggttcctgaggaggtgctgaaaaattataggagtaggctgggcaaat

SEQ ID NO: 516297 - DNA, 201 bp, Homo sapiens
tgtaatcccagcactgtgggaggccgaggcaggtggatcacctgaggtcaggagttcgagaccagcctggttaacatggtgaacccctgtctctactaaawatacaaaaattagccaggcgtggtgatgggtgcctatagtcccagctacttgggaggctgaggcaggagaattgcttgaacctgggaggtggaggttgca

SEQ ID NO: 516298 - DNA, 201 bp, Homo sapiens
caacaccagctgggtcctggttgccaggattaggttgccacccccatcctcctcctagccctggtggaccaacctttcctgtgtacccaaagcaaacagaycagttgccctagattccccgaggggcaccctctgtgcctccctagtgttcctgctgacaataagagccttgtgctgggacctgagacactagaggggaaa

SEQ ID NO: 516299 - DNA, 201 bp, Homo sapiens
cacctgtaatcccagcactgtgggaggccgaggcaggtggatcacctgaggtcaggagttcgagaccagcctggttaacatggtgaacccctgtctctacyaaaaatacaaaaattagccaggcgtggtgatgggtgcctatagtcccagctacttgggaggctgaggcaggagaattgcttgaacctgggaggtggaggt

SEQ ID NO: 516300 - DNA, 201 bp, Homo sapiens
cccagcactttgggagccgaggcaggtggatcacctgaggtcaggagtttgagaccagcctgatcaacatggtgaaaccccatctctactaaaaatacaamaattagccgggcatggtggcgcgcacttgtaatcccagctactcaggaggctgaggcagaattgcttgaacctgggaggtggaggtggcagtgagccgag

SEQ ID NO: 516301 - DNA, 201 bp, Homo sapiens
gggctacaagaggcctatcagccagtatgctcgggttgccatggcaatggggtcccaccccaggtacagggtaagaagcggagaggggagaaagagcctaygggagggaggccgggcgaggtgtctcacacctgtaatcccagcactgtgggaggccgaggcaggtggatcacctgaggtcaggagttcgagaccagcctg

SEQ ID NO: 516302 - DNA, 201 bp, Homo sapiens
ggctgaggcagaattgcttgaacctgggaggtggaggtggcagtgagccgagatcatgccactgcaatccagcctgggcgacagagcgagacaacgtctcaaaaaaaaaaaaaaaacaaaaacaaaaaaggccgggcgcagtggctcatgcctgtaatcccagcactttgggaggctgaggcaggtggatcacgaggtcag

SEQ ID NO: 516303 - DNA, 201 bp, Homo sapiens
gctgaggcagaattgcttgaacctgggaggtggaggtggcagtgagccgagatcatgccactgcaatccagcctgggcgacagagcgagacaacgtctcaaaaaaaaaaaaaaaacaaaaacaaaaaaggccgggcgcagtggctcatgcctgtaatcccagcactttgggaggctgaggcaggtggatcacgaggtcagg

SEQ ID NO: 516304 - DNA, 201 bp, Homo sapiens
ccacagtcataatcttgtataatattaaagttactttaaaaaacatttttgcactggcgcggtggctcacgcctgtaatcccagcactttgggaggccaargcgggcagatcacctgaggtcgggagttcgagaccagcctgaccaacatggagaaaccccgtctctactaaaaatacaaaattagccaggtgtggtggca

SEQ ID NO: 516305 - DNA, 201 bp, Homo sapiens
ctgaggcagaattgcttgaacctgggaggtggaggtggcagtgagccgagatcatgccactgcaatccagcctgggcgacagagcgagacaacgtctcaaaaaaaaaaaaaaaacaaaaacaaaaaaggccgggcgcagtggctcatgcctgtaatcccagcactttgggaggctgaggcaggtggatcacgaggtcagga

SEQ ID NO: 516306 - DNA, 201 bp, Homo sapiens
gccattatttgatataaaataatataaggtgaggtgccttccacagtcataatcttgtataatattaaagttactttaaaaaacatttttgcactggcgcrgtggctcacgcctgtaatcccagcactttgggaggccaaggcgggcagatcacctgaggtcgggagttcgagaccagcctgaccaacatggagaaacccc

SEQ ID NO: 516307 - DNA, 201 bp, Homo sapiens
gaattgcttgaacctgggaggtggaggtggcagtgagccgagatcatgccactgcaatccagcctgggcgacagagcgagacaacgtctcaaaaaaaaaamaaaaacaaaaacaaaaaaggccgggcgcagtggctcatgcctgtaatcccagcactttgggaggctgaggcaggtggatcacgaggtcaggagatcgaga

SEQ ID NO: 516308 - DNA, 201 bp, Homo sapiens
cattccttccctttcttctttctttcccttccttccttccttctttccttcctttctttctttctctctctctttctctctttctctttctctctttctctttctctctctctttctctctttctctttctctttctttctttctctttctccctttctttattttcttccttacttccttgcttgctttcttgctttctt

SEQ ID NO: 516309 - DNA, 201 bp, Homo sapiens
attccttccctttcttctttctttcccttccttccttccttctttccttcctttctttctttctctctctctttctctctttctctttctctctttctctttctctctctctttctctctttctctttctctttctttctttctctttctccctttctttattttcttccttacttccttgcttgctttcttgctttcttt

SEQ ID NO: 516310 - DNA, 201 bp, Homo sapiens
cttccctttcttctttctttcccttccttccttccttctttccttcctttctttctttctctctctctttctctctttctctttctctctttctctttctctctctctttctctctttctctttctctttctttctttctctttctccctttctttattttcttccttacttccttgcttgctttcttgctttcttttttc

SEQ ID NO: 516311 - DNA, 201 bp, Homo sapiens
tggaaggcagtgtgatgtgcctccatctgtgtgactaacgcctctggagtaggccagctcttaggggctggggtctccatccacatggggcagagcctggyaaaggcatggccctgggaactgagaggagggttcccaggggctctgcaggattgggtgggagcagtggatgtgggccatgggccatggtgaagccaggtc

SEQ ID NO: 516312 - DNA, 201 bp, Homo sapiens
tccctttcttctttctttcccttccttccttccttctttccttcctttctttctttctctctctctttctctctttctctttctctctttctctttctctctctctttctctctttctctttctctttctttctttctctttctccctttctttattttcttccttacttccttgcttgctttcttgctttcttttttctt

SEQ ID NO: 516313 - DNA, 201 bp, Homo sapiens
tccttccttctttccttcctttctttctttctctctctctttctctctttctctttctctctttctctttctctctctctttctctctttctctttctctttctttctttctctttctccctttctttattttcttccttacttccttgcttgctttcttgctttcttttttcttgagtctcactctgtcacccaggctgg

SEQ ID NO: 516314 - DNA, 201 bp, Homo sapiens
gatagacatgtaatttagtgcttcctattattccaggatacagaaatgaacaatagtgtctaccacctggatgtacactgtttaataggtgaaatagataygtaaaagcaattaaaatatgataaatgctatgagagagatgtaaaaagtgttataggtgatctgataatggactgattgattacctggcagttttaagga

SEQ ID NO: 516315 - DNA, 201 bp, Homo sapiens
ctcaataaaatactggcaaaccgaatccagcagcacatcaaaaagcttatccaccaagatcaagttggcttcatctctgggatgcaaggctggttcaacgwacacaaatcagtaaacgtaattcatcatataaacagaaccaaagacagaaaccacatgattatctcagtagatgcagaaaaggccttcaacaaaattcag

SEQ ID NO: 516316 - DNA, 201 bp, Homo sapiens
gtagcttgattgaattaataattgtgagcccatagacacaagggaagtgagaaacagtgctctggtgacatgataaatatatgtgtcaaccaccatttcarctattaaaaactcctgttatctccttgtttgaatttcaggtcattaaattgtataaccatcatttgaattgtagtggctctgagtcctaattaggagaat

SEQ ID NO: 516317 - DNA, 201 bp, Homo sapiens
ctggatgtacactgtttaataggtgaaatagatatgtaaaagcaattaaaatatgataaatgctatgagagagatgtaaaaagtgttataggtgatctgakaatggactgattgattacctggcagttttaaggaagcctttaaaaataatatatttgaactgggttttaaagaatgatataaatgttgctaatacaccaa

SEQ ID NO: 516318 - DNA, 201 bp, Homo sapiens
aaaaccactcaactacatggaaagtgaacaacctgctcctgaatgactactgggtgaataatgaaatgaaggcagaaataaagatgttctttgaaaccaaygagaacaaagacacaacataccagattctttgggacacattcaaagcagtgtgtagagggaaatttatagcactaaatgcccacaagagaaagcaggaaa

SEQ ID NO: 516319 - DNA, 201 bp, Homo sapiens
tgattgaattaataattgtgagcccatagacacaagggaagtgagaaacagtgctctggtgacatgataaatatatgtgtcaaccaccatttcagctattraaaactcctgttatctccttgtttgaatttcaggtcattaaattgtataaccatcatttgaattgtagtggctctgagtcctaattaggagaatggtgat

SEQ ID NO: 516320 - DNA, 201 bp, Homo sapiens
attttccattctgaaacatagttagtggatttatatcaaaggatttcaaatagaagaacatcatgatgagaataattttaggatttatatactctactttrgggggtggagagttctttttacctaggcttagggaatagaaagtggtgtagagaatataacttcaattacttctttcatcatttttcttcctttagtcca

SEQ ID NO: 516321 - DNA, 201 bp, Homo sapiens
aaacatctaggtagagtaaaaatatgatactaaagtcttacgggaccactgttgtatatgtggtctgttgtttactacatcatcatctggcacctgacatyacattcattttagctaaacttaactgataagacatgagtgtttgaagagcaagattcatctgtagactttacatatacaatactcttttggggaaaataa

SEQ ID NO: 516322 - DNA, 201 bp, Homo sapiens
acatgagtgtttgaagagcaagattcatctgtagactttacatatacaatactcttttggggaaaataagaatataaagaattaaccttgaaattaagaaytcttgcatttccctctagtgcctttcttgaacttttaaattcatatttttaattaaaaatttcttgatctaggctaggcatggtggctcacacctgtaat

SEQ ID NO: 516323 - DNA, 201 bp, Homo sapiens
tgctctgttcaaaaaatggagtcattttttaaacacatggagcagtaacccataatgaggtataatagacctaaccatgaaacacagaaaacttaaccatrttctacttctgctttgtatatagtgatcaccagcagcttgcaaaacttatccaggagtcgccaaccgttgaactgaaagacaagttggagtgtgaattgg

SEQ ID NO: 516324 - DNA, 201 bp, Homo sapiens
tttagtcacttagcatattcatctaagaaacatctttcaaatactgaatatatttaatattctttatgaataagctttaacttctttgatgaatttaaatyggagtttatccaagtaagtttttttaaaagcacctgcgaaattctgtttccaaaggaataagtcatacattaaatatgtgaaatatatttatgttgctaa

SEQ ID NO: 516325 - DNA, 201 bp, Homo sapiens
aggggtttccaagcccagcaccagcacccttgcccttttccatcaggggttcagcctagggtccccgctggtgggcggctcccgagtcttggagaagagcrcgagaacctagaccgcccccgaagtgcggagaccccctgggcaggctgaaagatggcggcggcgtctgtctctgcggcttctggttctcacttgtcggta

SEQ ID NO: 516326 - DNA, 201 bp, Homo sapiens
acccttgcccttttccatcaggggttcagcctagggtccccgctggtgggcggctcccgagtcttggagaagagcacgagaacctagaccgcccccgaagygcggagaccccctgggcaggctgaaagatggcggcggcgtctgtctctgcggcttctggttctcacttgtcggtaagaagcagttggcgcgagtgggccc

SEQ ID NO: 516327 - DNA, 201 bp, Homo sapiens
ctgtgagcgtaggcggccctgagggggtgtgttgcaggggtttccaagcccagcaccagcacccttgcccttttccatcaggggttcagcctagggtcccygctggtgggcggctcccgagtcttggagaagagcacgagaacctagaccgcccccgaagtgcggagaccccctgggcaggctgaaagatggcggcggcgt

SEQ ID NO: 516328 - DNA, 201 bp, Homo sapiens
atttggtgaaggaataaattatgttaataaatggacaagaatactttgggttgagtaagaggactcaattcgtaaaagacggcagctctccctacctagtrtatagtttaaattagtgtttagacaaaatgattctaaataattacttggaaatgttttaagatttatataatataggtgactgttagaatcaatgtttat

SEQ ID NO: 516329 - DNA, 201 bp, Homo sapiens
gtagtccgccgtctctcgagcgcttactagtcgttgcttatgctgtttcctatccctgcagtgcctcccactcccatccacattaacttcgttgtgtgatrctcgtagccagaacgcgcgcttcctgtcacctagaattactggaacttcaatgtggaaatgcccttttggagaggcgacagggggaattgattttaaata

SEQ ID NO: 516330 - DNA, 201 bp, Homo sapiens
cgcggcattggaaagctttgataggaagtaaatgttggagctcttatttctccagttagcaaatgttcgatgcctggtatactgttagggtccaaatgaayagaatagaaaccctgctttgaaggagaaaaacactgaagagaaactacacgtaattagtgattactgcgcagtatagtttaggaagtgctaccgtagtag

SEQ ID NO: 516331 - DNA, 201 bp, Homo sapiens
ctggggcacacataggctcaaaataaaaggatggaggaagatctaccaagcaaatggaaaacaaaaaaaggcaggggttgcaatcctagtctctgataaarcggactagatcaaaagagacaaagaaggccattacataatggtaaagggatcaattcaacaagaagagctaacctaaatatatatgcgcccaatacagga

SEQ ID NO: 516332 - DNA, 201 bp, Homo sapiens
aatttcccttaaaaatgttttatggctatcatacattttataatattaaatataagatttactttttgagaataataaaatgaataccttcatgttcctctgtgtcttctttctccttcccacacccacccactaccacgtattttaagattataatgtatggtatttatataggactacctggcaaggcataatccttaa

SEQ ID NO: 516333 - DNA, 201 bp, Homo sapiens
ttctatatttttttcctacttattttaaagttgaagccttttatgtccttaatttacttgaaattaatttgtatgctgtgagatagggatccagtgtaacrgttttacttaaaatacacaattgtccccacactacttgttgaaaattcatcctatccccaatggtttgcaatatgttcatttccatatgtgtatgggtgt

SEQ ID NO: 516334 - DNA, 201 bp, Homo sapiens
taccagccactgcaaaaacatgccaaattgtaaagaccatcgagactaggaagaaactgcatcaactaacgagcaaaataaccagctaacatcataatgayaggatcaaattcacacataacaatattaaccttaaatgtaaacaggctaaatgctccaattaaaagacacagactggcaaattggataccaagagtcaag

SEQ ID NO: 516335 - DNA, 201 bp, Homo sapiens
aataaagaccttcctttaccatactgttttgaagcagtgttctgttgaatgcatctgaatttaatttgcacttagtctctattacatccaatttaccagtkcccacctactgttttgtatttgagttttatctaggtaatatcttgcagctgtgttgcatgtgccacttataaagaaagcaagtaatatgcatttttaaat

SEQ ID NO: 516336 - DNA, 201 bp, Homo sapiens
ctgaaggaacaactaaacatggaaaggaacaaccggtaccagccactgcaaaaacatgccaaattgtaaagaccatcgagactaggaagaaactgcatcawctaacgagcaaaataaccagctaacatcataatgataggatcaaattcacacataacaatattaaccttaaatgtaaacaggctaaatgctccaattaaa

SEQ ID NO: 516337 - DNA, 201 bp, Homo sapiens
cttaagcaatttcagttttataaaggacacaactcagaaacagccaaatggaggagacatagggcaaggtgtgaaagggcttctgtatcctctggtgcagsaccttcccagcatatcagtatgttcaacaatctagaagctccccaaacctcattattcaagagttttcattgagctttcattacataaatacataattga

SEQ ID NO: 516338 - DNA, 201 bp, Homo sapiens
ggcagaaactacaagccagaagagagtgggggccaatattcaacattcttaaagaaaagaattttcaacccagaatttcatatccagccaaactaagcttygtaagtgaaggagaaataaaatcctttacagacaagcaaatgctgagagattttgttaccaccaggcctgccttacaagatctcctgaaggaacaactaa

SEQ ID NO: 516339 - DNA, 201 bp, Homo sapiens
taagaaattctaggagtttttgaatctgtatctgaaaccaaggacaaaagactaaatatattttttattataccacagggcatacagataataaaaatgtrtatgtcatgaggagtgatataaaatagtaaagggcaagcccactaacatacaaaatgtagaacagaggtagttccatttggggaactagtttgttagtta

SEQ ID NO: 516340 - DNA, 201 bp, Homo sapiens
acctcttctcctccaaaggaacacagctccttgccagcaacagaacaaagcttgatggagaatgactttgacgagttgagagaagaaggcttcaaacgatyggtgataacaaacttctctgagctaaaggaagatatttgaacccattgcaaagaagctaaaaaccttgaaaaaagattagacgaatggctaactagaata

SEQ ID NO: 516341 - DNA, 201 bp, Homo sapiens
tggatgaacattttgaatagctggtagtcatatcttccaccttagccctcagcttcttagttacttcccccagtctaggaccatctgtcagtaggaagtcrcctacaacaaataaaactccacagttagcatctcctgggttgaaattattatgtggaatcctaaatttaacagaatctcattcatgacagaatggtgtac

SEQ ID NO: 516342 - DNA, 201 bp, Homo sapiens
aattggagtttatccaagtaagtttttttaaaagcacctgcgaaattctgtttccaaaggaataagtcatacattaaatatgtgaaatatatttatgttgstaatcattttatatcagccaacaatgtagtactaccagatgcagtggtgacatcacactcaagggttttcaaccagagagaaacatgattcatatattta

SEQ ID NO: 516343 - DNA, 201 bp, Homo sapiens
atttctgcatttccaactgagataccgggttcatctcactggggcttgtcagacagtgagtgcagtccatggagtatgagccgaagcagggcagggtgttktctcacccgggaagcgcaaggggttgggccattccctttcctagccaagggaagccttgacacacagtacctggaaaatcaggacactcccaccctaata

SEQ ID NO: 516344 - DNA, 201 bp, Homo sapiens
acaaatgtgattacgtcaactcaaaagccaatatatgctttttaagtaaaacctgaaataaaatgaaacaaaaaataaatagctgacaaaggtgtttactrccatacaaataaaaacgatggatggcagtactactgtcaaacagttagtataggcaaatagcagcttcatgtaatactaaataaaaacaaataataccta

SEQ ID NO: 516345 - DNA, 201 bp, Homo sapiens
tttttatttttctgaacgtatatttcacagtatatatttttaactgcggtatttacattcattgtatcatttaagtatttctgcacagcatttgtattcargttgtatgaacattattttcttcttgtgtctggcatatggctatattcagactaatatgaaacactttaaaagttgtatttctttaatgattgaattgta

SEQ ID NO: 516346 - DNA, 201 bp, Homo sapiens
agaacattagggactcaaacatggctagcactttccatcttttttttttttcggcttgtaactagcttcattttttctagctacaaaagagctttttttttgcctagcaggaaacattactaaaaattactgagttttaagttgaaccagttctggctttgatgtttcggacaaaagtcccaagaagacaagcaagcatta

SEQ ID NO: 516347 - DNA, 201 bp, Homo sapiens
ggttacttgctgctgggtatcatgtagaaggagagggagttaggatggtgattccactgactaaaatggagaaagctgagaagttcagagagcagaacagktttgttgactgttgattggtagccatatgatagacacacagtgccaagtgctctgagtatatcttctcatttaattttcacaaaaggcttctgaggtggg

SEQ ID NO: 516348 - DNA, 201 bp, Homo sapiens
aaacgaaataatagataatctgagttttaaagaatgagcacagttctataagaagaaaagttcaacaagagtacagcatgtgaaaggtttataaacgtgayatgatttttttttttttttttttgagacagtctcactctgtcacccaggctggagtgcggtggcatgatcttggctcactacaacctctgcctcccaggt

SEQ ID NO: 516349 - DNA, 201 bp, Homo sapiens
atgcatatatcctcagtgaaattaaataacttgcccaagtaccagcttactgggaaatggcagagctgggatgaaactagccttttcaactctaaaacttyggctgttttttcaaagttcatgtatgaaaaagaaatacaagcaaattattcctgtaggagtaaggagtaatggtctaatttgttgcttatactaattaga

SEQ ID NO: 516350 - DNA, 201 bp, Homo sapiens
gttctacacatcagagtatagcaggttggcaatttaagaaaattaagttgcatgacattcaaacaacatagattttaaaaagcaaaaaaaaaaaaaaaaaaatgactgaagcccacagtagagcaaaaatcagttgcagtaagtttcttattcaaaaataagcacaaaacaaaatatccatttacaaagttctaacaggaa

SEQ ID NO: 516351 - DNA, 201 bp, Homo sapiens
caaaaataaaattcttttcatagtattaatacattaccaattacatctgttcatccatctggaaattgcttctttgcctcctcagactagtttctagaatrtctttctcctcttctcccatttgtgaaaatccttcccattcttcttttctctgtgtctgattttttgcctccttcatgagtctttccttcaactcccctt

SEQ ID NO: 516352 - DNA, 201 bp, Homo sapiens
gtaggtagtctctcatgtttcttttttttttttattttttattgtttttttggagacagagtctcactctgtcaccaggctggagtgcagtggcgggatcycggctcactgcaacctccgcctcctggattcaagctattgctattctcttgcctcagcctcctgagtagctgggactacagacgcgcccagctagttttt

SEQ ID NO: 516353 - DNA, 201 bp, Homo sapiens
ttaatgacagaaatgtcccaagcaataaatagacccaggtggacttgaagaacattagggactcaaacatggctagcactttccatcttttttttttttcrgcttgtaactagcttcattttttctagctacaaaagagctttttttttgcctagcaggaaacattactaaaaattactgagttttaagttgaaccagttc

SEQ ID NO: 516354 - DNA, 201 bp, Homo sapiens
ccagcacccttgcccttttccatcaggggttcagcctagggtccccgctggtgggcggctcccgagtcttggagaagagcacgagaacctagaccgccccmgaagtgcggagaccccctgggcaggctgaaagatggcggcggcgtctgtctctgcggcttctggttctcacttgtcggtaagaagcagttggcgcgagtg

SEQ ID NO: 516355 - DNA, 201 bp, Homo sapiens
ctgcagtcaacataattttataatcaaacttgaagcggactttagaaagtacttaaaatgcggattttaaaagtattatttttgtgtgcttgactgtaackctatagttggtttctacatgtgctcctattaataaaatgtattaataagtaatagttactaatacatttactaattttaattaataagtaatatattaat

SEQ ID NO: 516356 - DNA, 201 bp, Homo sapiens
attttttaaaatagttctttatatataattaaaattaggtttaaattttcaaaatatgagactatgctataggcagtgcttgcttgaaaagtctcatttttaaatctccctggcatgaggtgcccacttcccctttccaaagcaaccattaaacatactttgtttctactattggtggagtttttctatatttaaaaatac

SEQ ID NO: 516357 - DNA, 201 bp, Homo sapiens
atggaagcaaaagccaaccaaataactaaagttcgaaaataccaagcccaggtaactcagttttccttcactcaagtttctaatgattaagaaaaaaaaaacactttaattcaaatattaaatgatgacactaagtgtatcatagataaatatctacaggagatacttctttactgaagacatttgttcattgagaattgg

SEQ ID NO: 516358 - DNA, 201 bp, Homo sapiens
gcttattgctcctaggctacaaacctatacagcatgttactctactactaaatactatatgcagttgtaacacaatggtaagtatttgtgtatataaacawctaggtagagtaaaaatatgatactaaagtcttacgggaccactgttgtatatgtggtctgttgtttactacatcatcatctggcacctgacatcacatt

SEQ ID NO: 516359 - DNA, 201 bp, Homo sapiens
ggatgaatttgggcaaatgagcttgtgagtttttgtttttttttttaaattcagtttagctctaaaacctcattttttaaaaacttgttgactttattaaatcttactttcctttgttgagcaagtatggttgagcacaatccttataccaaccaagttactgggactttaacaaatacaactaataagggtaaaatctct

SEQ ID NO: 516360 - DNA, 201 bp, Homo sapiens
agatggtagatatggcaaaaaaggttggaggtgaaggatttcaagatacgaattttggagaaattaaagagtcagtagacaccatgatagaggaattaacrgaagatgactgggatggataagagtgctttcaaaccagtgccacaagatgaagaagacaacacagaagtaatgtcagaaaacaagttgacattagataat

SEQ ID NO: 516361 - DNA, 201 bp, Homo sapiens
aataccagcttaaatcctaacctataatgggtgctgaaaagtgtttactgaaataaaagtaactaaatagtgtgatgtcttttaagaattttagtactctrtaatcactaacctagaagcctctttattataagatactgtgtctcgatgataacgaaaatttttaattaatggttaaagcaactgataaggttctacaca

SEQ ID NO: 516362 - DNA, 201 bp, Homo sapiens
cactgtagcccaggagttcgagactgtagtaagcgatgatggcaccactgtactccagcataggcaacagagtaagatcctctttaaaaaattttttttawaaaaaaaaggaaattgtgaatctgtcactgcagctactctagcaggtgccaaaaccttgtgctttttgcaaaatagctttttatctcattgaaaatgcag

SEQ ID NO: 516363 - DNA, 201 bp, Homo sapiens
gttatgttagcttctttgagtctacattataaaaagtgtaaataaccatatacctctgtatctctgaaatttgtttaatgactccagtgagatagtagatractttgtaaaactcttcagaattgttacttagcatagcatttttgtgctttcttacaccagagatcttcgtatttaggtgacctgtacatttgtgagaag

SEQ ID NO: 516364 - DNA, 201 bp, Homo sapiens
tcactgtagcccaggagttcgagactgtagtaagcgatgatggcaccactgtactccagcataggcaacagagtaagatcctctttaaaaaattttttttwaaaaaaaaaggaaattgtgaatctgtcactgcagctactctagcaggtgccaaaaccttgtgctttttgcaaaatagctttttatctcattgaaaatgca

SEQ ID NO: 516365 - DNA, 201 bp, Homo sapiens
tggaacactgcggcccgtggtctcaggaagagactggataaaaaaagtcacctctgataagtcaactcaagccaattttatgtgcttactgaggtgcataygtgaagacttgaatacataatgagagctatacattgttaatgaaaatgcttaatattataaattgcatttaaagtgtgctcatatataaataaatatgac

SEQ ID NO: 516366 - DNA, 201 bp, Homo sapiens
tgaaatacacaagaatgtctttcatgtcagccttgtaatattttcacaataaccttggtgattaatgacctaatctcttgatttgtccctctgactttttaggtccttcgaccaagctgcacagtagctccatattaatttcccttaaaaatgttttatggctatcatacattttataatattaaatataagatttacttt

SEQ ID NO: 516367 - DNA, 201 bp, Homo sapiens
ccattcacagtccagagaaatgtaaacagagataaagatgcagtatgaaatcataactgtataaaattaactgtagtacatactgtacgactgataatttkgtagccaccttctgttgccattgtgatgagctcaagggttgggagtattcacttaaaatgccacgtgacgctaatcatcttcaaatgagcagttcatctc

SEQ ID NO: 516368 - DNA, 201 bp, Homo sapiens
cacaccccagcatatccttgtgatactacagttgctgacataaagaacaaaaatgaaatgttcagccagtttcaataataaatataagtgcagaaataaartatcagcaacattgtgtactgttgggtataatttaatgaaggagtgcaaaaaatgtttgatattacaaagtctttagtgaatttgcctctgattcagaag

SEQ ID NO: 516369 - DNA, 201 bp, Homo sapiens
ttgaaatacacaagaatgtctttcatgtcagccttgtaatattttcacaataaccttggtgattaatgacctaatctcttgatttgtccctctgactttttaggtccttcgaccaagctgcacagtagctccatattaatttcccttaaaaatgttttatggctatcatacattttataatattaaatataagatttactt

SEQ ID NO: 516370 - DNA, 201 bp, Homo sapiens
tcccatcagaaataaggctgccatttccaacagcgttggaaaagcacttagcttatcaaacagctgatcttaacagtaggcaacatttaaaaaaaaaaaaacttgttaaaactataccatgaactgagaacacaactcgtattcagatttcacggttatgaagattaacaactgttatattcaactgttttcgacattgat

SEQ ID NO: 516371 - DNA, 201 bp, Homo sapiens
aggctgaggcgggaggatcactgaggctgaagtgaggtatgatagtgccactgctctccagcctgggcgacagagcgaccctgtctccataaaataaaatwttaaataaacgtttaattgagctgcactatgccaaggacacctaggtgagcattggcactgggatatagtcagctgttaatacttatacggtacccttga

SEQ ID NO: 516372 - DNA, 201 bp, Homo sapiens
ggcgataggtttcagttaggttctaggtaacgtttattgagtgattgctctggaattgataaacttcgactggtggaaaaggcaggaaagcaactatgatkgggcataatgaaattaattccatatggaggtatgggcagcattgtgttgaaatacacaagaatgtctttcatgtcagccttgtaatattttcacaataac

SEQ ID NO: 516373 - DNA, 201 bp, Homo sapiens
acaagaatgtctttcatgtcagccttgtaatattttcacaataaccttggtgattaatgacctaatctcttgatttgtccctctgactttttaggtccttygaccaagctgcacagtagctccatattaatttcccttaaaaatgttttatggctatcatacattttataatattaaatataagatttactttttgagaat

SEQ ID NO: 516374 - DNA, 201 bp, Homo sapiens
gatttttcaggtttcttcctgtgtgtgtgtctgtttcatgtctgcattttttctagttatattgtagtctcattgcataccagcaagaataagctgacttygataaaatgtattagtctcctatttgagacctgtaatatcctaggcactgaaaaatttggtgaaggaataaattatgttaataaatggacaagaatactt

SEQ ID NO: 516375 - DNA, 201 bp, Homo sapiens
atgatacgaaattgggattcttccttttcaatcttaatagctgttattcttttttttttttcttagtgtgcagactagggaaatgaagtacaatgttgacyagaattgatgtaggtatctttgtcttactcctgattttaaaaggaatatttcaagttttccaccattaagtatgtttgccatcttttcttgtaaaacttc

SEQ ID NO: 516376 - DNA, 201 bp, Homo sapiens
gagaaatcaaagatgcatattacaggtttggcccctgcccccccgccccttaatctacaacaacataaacctgtgtttatgttaatgacagaaatgtcccmagcaataaatagacccaggtggacttgaagaacattagggactcaaacatggctagcactttccatcttttttttttttcggcttgtaactagcttcatt

SEQ ID NO: 516377 - DNA, 201 bp, Homo sapiens
ccggggcctgtcgtgggttggggggaggggggagggatagcattagaagatatacctaatgtaaatgatgagttaatgggtgcagcacagcaacatggcayatgtatacatatgtaacaaacctgcacgttgagcacatgtaccctagagcttaaagtataattaaaaaaaaaaaaaacgtgatgggaaagaattaggtat

SEQ ID NO: 516378 - DNA, 201 bp, Homo sapiens
gatactgtgtctcgatgataacgaaaatttttaattaatggttaaagcaactgataaggttctacacatcagagtatagcaggttggcaatttaagaaaawtaagttgcatgacattcaaacaacatagattttaaaaagcaaaaaaaaaaaaaaaaaaatgactgaagcccacagtagagcaaaaatcagttgcagtaag

SEQ ID NO: 516379 - DNA, 201 bp, Homo sapiens
attctcactatttaataatgctaaagtgaaaaaacctacatatttgttttgtctcaatttattttacacatataggaaaaaatttaaataaccaaatgacrgtcattatctttgggtaataggattattggttatttttcagtgtgttttttctcagtcttctacatttactgcagtcaacataattttataatcaaactt

SEQ ID NO: 516380 - DNA, 201 bp, Homo sapiens
gtttgcaatatgttcatttccatatgtgtatgggtgtgttacctggctctttgtccctttgttgtatttgtctctcctacttagatacccacttggaggtrggggggtcatttacctccttgttactcaagagaaatattagctattgttggtcctttgcttttcttcagtagaaattctggaacctgctgttggaatttt

SEQ ID NO: 516381 - DNA, 201 bp, Homo sapiens
attaatggttaaagcaactgataaggttctacacatcagagtatagcaggttggcaatttaagaaaattaagttgcatgacattcaaacaacatagatttwaaaaagcaaaaaaaaaaaaaaaaaaatgactgaagcccacagtagagcaaaaatcagttgcagtaagtttcttattcaaaaataagcacaaaacaaaata

SEQ ID NO: 516382 - DNA, 201 bp, Homo sapiens
atttttcaggtttcttcctgtgtgtgtgtctgtttcatgtctgcattttttctagttatattgtagtctcattgcataccagcaagaataagctgacttcrataaaatgtattagtctcctatttgagacctgtaatatcctaggcactgaaaaatttggtgaaggaataaattatgttaataaatggacaagaatacttt

SEQ ID NO: 516383 - DNA, 201 bp, Homo sapiens
actgagataccgggttcatctcactggggcttgtcagacagtgagtgcagtccatggagtatgagccgaagcagggcagggtgttgtctcacccgggaagygcaaggggttgggccattccctttcctagccaagggaagccttgacacacagtacctggaaaatcaggacactcccaccctaatactgtgcttttccaat

SEQ ID NO: 516384 - DNA, 201 bp, Homo sapiens
agtgtatgatcaatttgacatttaaagtttttctttcaatacaaaaacactttttctatgacttaacaaatgtaaacatatgaaactgtaaatataatttwaaaaatacaaagtttatctgatctcgaggttgggaagaactgtccaagtatataaagaaagaaaacatgatgggaggaaacaccacacccaagactgtgt

SEQ ID NO: 516385 - DNA, 201 bp, Homo sapiens
cacagcagtctgagatccaactgcaaggctgcagcgaggctgggggaggggcatccgcaattgctgaagcttgagtaggtaaacagcggtctggaagctcraactgggtggagcccaccgcagctcaaagaggcctgcctgcctctgtagactaacctctccgggtaggccatagctgaacaaaaggcagcagaaacttct

SEQ ID NO: 516386 - DNA, 201 bp, Homo sapiens
tagcttttatttctacagcattaacttgaggctctcatttttcctagttgcagactggtctagaaacaaatagacttatctttgaagataaggcaactccrtgtgttcccaatgcaagaagaattaaaaaaaagaagtcaaaaccaccagaaaaggtgtgaagacagaaccaaatcaggcaaaatgctgattacttggtat

SEQ ID NO: 516387 - DNA, 201 bp, Homo sapiens
agactaacctctccgggtaggccatagctgaacaaaaggcagcagaaacttctgcagacttaaacattcctgtctgacagctttgaagagagcagtggttytcccagcacggagtttgagatctgagaacggacagactgcctcttcaagtggatccctgacccccaagtagcctaactgggagatacctcccagtagggg

SEQ ID NO: 516388 - DNA, 201 bp, Homo sapiens
ttgggtctttttccatccacttagttttgttctttgaatgtactgttactctgtggtttttataccttccttctatctctttgaacgctataaacaattcycaattttttttaattatttgatgttttcaaagtgttaatcctcgtttgtttggctttatttattgattctcccttatggtatctttttttttatgggaac

SEQ ID NO: 516389 - DNA, 201 bp, Homo sapiens
cttctagtgcatctctaaatttattgacttattttgtattaaatctgatacagttccttctcaaatatttaccttctgatcaatttgtagatttgttgttkttttccctcagtgtgctttctgagttatatagccacatggcttaatttttgaccaacaaaatttctttgcccattttctctttagggttggccacttcac

SEQ ID NO: 516390 - DNA, 201 bp, Homo sapiens
gcttgaaaccaggaggcggaggttgttgtgagccgagatcacgccatttcactccagtcagggcaacaagagcgaaactccatctcaaaaaaaaaaaaaaattaaatgtttttgagtatccttaaggcttgcatcacttggtttaagttgctctctgagctaattttagttttaattatttcatttgggagatatttaata

SEQ ID NO: 516391 - DNA, 201 bp, Homo sapiens
aaaatactttaaaatatgaatttccccaatctggaaaggccaaaatcatgagatctggacaggcacctggcagtccaaattgtcctcataaactgcagacrgttttggtacatataggcagatttgaaacaaacactattccagacaggttttttgttttgttttgttttgtttttttaaaaaggaaagttgaaagttggc

SEQ ID NO: 516392 - DNA, 201 bp, Homo sapiens
atacaaaaaattagccgggcgtggtggcgggcgcctatagtcccagctactggggaggctgaggcaggagaatggcatgaacctgggaggcggagcttgcrgtgagccgagatcagccactgcactctggcctgggcgacagagcgagactctatctcaaaaataaaaaaagtataaaaggatattatacatagaattcaa

SEQ ID NO: 516393 - DNA, 201 bp, Homo sapiens
gaacaaaaggcagcagaaacttctgcagacttaaacattcctgtctgacagctttgaagagagcagtggttctcccagcacggagtttgagatctgagaayggacagactgcctcttcaagtggatccctgacccccaagtagcctaactgggagatacctcccagtaggggccgactgacacctcatacagccgggtccc

SEQ ID NO: 516394 - DNA, 201 bp, Homo sapiens
tttttaccaataatagtccttgagttagtatatttgaaattatcctagtataatggtttacgggtggattacttgaggtcgggtttgagagcagcctggcyaacatggtgaaaccccatctctactaaaaatacaaaaattagctgggcgtggtggcaggcgcctataatcccagctactcaggaggctcaggcaggagaa

SEQ ID NO: 516395 - DNA, 201 bp, Homo sapiens
ggtctggaagctcaaactgggtggagcccaccgcagctcaaagaggcctgcctgcctctgtagactaacctctccgggtaggccatagctgaacaaaaggmagcagaaacttctgcagacttaaacattcctgtctgacagctttgaagagagcagtggttctcccagcacggagtttgagatctgagaacggacagactg

SEQ ID NO: 516396 - DNA, 201 bp, Homo sapiens
aacaattctcaattttttttaattatttgatgttttcaaagtgttaatcctcgtttgtttggctttatttattgattctcccttatggtatctttttttttatgggaacttaataaagaaaagttatatggtggtctcattttttcatttattgtgttaattccacaataaattcctcagttgtgtgggcagccttgtgag

SEQ ID NO: 516397 - DNA, 201 bp, Homo sapiens
ttgaagcggactttagaaagtacttaaaatgcggattttaaaagtattatttttgtgtgcttgactgtaactctatagttggtttctacatgtgctcctaytaataaaatgtattaataagtaatagttactaatacatttactaattttaattaataagtaatatattaataagacagtaatgtactttaggactgttat

SEQ ID NO: 516398 - DNA, 201 bp, Homo sapiens
caccagagatcttcgtatttaggtgacctgtacatttgtgagaagatatctcaacatcagtctcaaatatattgattgatcaattgattggatctcactckgtctcactctgtcacccaggctggagtgtagtggcatgatctcggttcactgcaacctctacctcctaggctcaggtgattctcatgcctcatcctcccg

SEQ ID NO: 516399 - DNA, 201 bp, Homo sapiens
catacacatgtatgtttattgcggcacggttcacaatagcaaagacttggaaccagcctaaatgtccatcaagactggattaagaaaatgtggcacatatrcaccatggaatactatgcagctgtaaaaaagattgagttcatgtcctttgtagggacatggatgaagctggaaaccatcattctgaacaaactattgcaa

SEQ ID NO: 516400 - DNA, 201 bp, Homo sapiens
ggctaaattttttaccactttataaaagtctttgaaatttttttaccatagtaatggggtttttacttgagcacatttcaaacactcaatgtctttttttwaatttattattattttttgtgagacagaatctcactgtcgcccaggctggagtgcaatggtgcgatctcagctcactgcaacctccacccctccacactc

SEQ ID NO: 516401 - DNA, 201 bp, Homo sapiens
acaccagagatcttcgtatttaggtgacctgtacatttgtgagaagatatctcaacatcagtctcaaatatattgattgatcaattgattggatctcactstgtctcactctgtcacccaggctggagtgtagtggcatgatctcggttcactgcaacctctacctcctaggctcaggtgattctcatgcctcatcctccc

SEQ ID NO: 516402 - DNA, 201 bp, Homo sapiens
gaattcaaagaatgaggaatcaaagcacaatcaaggtttgttgatgaagaaaattaaaattctatcaaaataagtgttgtgcagtattaagtattctaaargaaatagtacattagtgttttgtagcggtatcttcaagtactacaaaactgcattgtattctggtgcattttgaggagcaaatgctgttgtcatacatgg

SEQ ID NO: 516403 - DNA, 201 bp, Homo sapiens
tacaccagagatcttcgtatttaggtgacctgtacatttgtgagaagatatctcaacatcagtctcaaatatattgattgatcaattgattggatctcactctgtctcactctgtcacccaggctggagtgtagtggcatgatctcggttcactgcaacctctacctcctaggctcaggtgattctcatgcctcatcctcc

SEQ ID NO: 516404 - DNA, 201 bp, Homo sapiens
ctaattctccaagaagcagtcatacgtacacttgaatcttcagtttcttcagcacttgaatgtaaagctgtattgtcatatatcaagtactgagtgaagtrcctaaaactgtgctagttgacactactttataagctgtttgtgttgctggtggttttatatttagattccaactagattgttattctggcatcttgggaa

SEQ ID NO: 516405 - DNA, 201 bp, Homo sapiens
ttacaccagagatcttcgtatttaggtgacctgtacatttgtgagaagatatctcaacatcagtctcaaatatattgattgatcaattgattggatctcactctgtctcactctgtcacccaggctggagtgtagtggcatgatctcggttcactgcaacctctacctcctaggctcaggtgattctcatgcctcatcctc

SEQ ID NO: 516406 - DNA, 201 bp, Homo sapiens
aagttatatggtggtctcattttttcatttattgtgttaattccacaataaattcctcagttgtgtgggcagccttgtgagccagttgtgaatttgccttkggttaggcttgatggttttcactggttctggctgggcagggtggcttacacctgtaatgccagcacttaggaggccaagccagacagatcacttgagtgc

SEQ ID NO: 516407 - DNA, 201 bp, Homo sapiens
ttgcaaactatagcttagaaatatcagaagttaagaaaaagttggtatgtcatagatgcataaaattgactatgtcaatactagtgcattttatcatttaytaccataaaatatacacaagttttttttaattataatttatcaaaacaatttgcacacagactacgtgacgccattcacagtccagagaaatgtaaacag

SEQ ID NO: 516408 - DNA, 201 bp, Homo sapiens
tcttacaccagagatcttcgtatttaggtgacctgtacatttgtgagaagatatctcaacatcagtctcaaatatattgattgatcaattgattggatctcactctgtctcactctgtcacccaggctggagtgtagtggcatgatctcggttcactgcaacctctacctcctaggctcaggtgattctcatgcctcatcc

SEQ ID NO: 516409 - DNA, 201 bp, Homo sapiens
acaaacttaccacaatgcaggcccttgcagaagtcagtgcatgtgtctttttattgttaacatatatcagggtggtttttttttaatgttaattattttayatcactggatatttatagcattaaaagtgatcttataatgaagaaatatattggagttttaaaaagaaaatataaatttggagagaatgttcacatttta

SEQ ID NO: 516410 - DNA, 201 bp, Homo sapiens
tctcgtatattttcaatccacagttgatcaaatccatggatgcaaaacacacagatacagagggcttaccgtgtatgctttctaccctcagtcagctttcrgttctcattggagagaattagacttaaatatttgagcaatcatacaacagtatttgagaagatgtctcagtaattaattcttgtgtgtgataggtctctt

SEQ ID NO: 516411 - DNA, 201 bp, Homo sapiens
ctccattataatttcctggggaactcttaaaatactttaaaatatgaatttccccaatctggaaaggccaaaatcatgagatctggacaggcacctggcartccaaattgtcctcataaactgcagacagttttggtacatataggcagatttgaaacaaacactattccagacaggttttttgttttgttttgttttgtt

SEQ ID NO: 516412 - DNA, 201 bp, Homo sapiens
ggttataatttttcattttcatttgggtctttttccatccacttagttttgttctttgaatgtactgttactctgtggtttttataccttccttctatctytttgaacgctataaacaattctcaattttttttaattatttgatgttttcaaagtgttaatcctcgtttgtttggctttatttattgattctcccttatg

SEQ ID NO: 516413 - DNA, 201 bp, Homo sapiens
attactgactcttacatatctattttactcagcaatcttccagacttaattctcataattgaggattttttgttttgttctatttagtcatgatacgaaaytgggattcttccttttcaatcttaatagctgttattcttttttttttttcttagtgtgcagactagggaaatgaagtacaatgttgaccagaattgatgt

SEQ ID NO: 516414 - DNA, 201 bp, Homo sapiens
aatgttttgaagaccaaggtttatatttaagttttatttctttgagaacttatgatatacagtcatgcatcactgaatgacaaagatgtgctctgagaaakacatcattaggcgattttcttttccttgtgctaacataagagtgtgctaagcttatagcttattgctcctaggctacaaacctatacagcatgttactct

SEQ ID NO: 516415 - DNA, 201 bp, Homo sapiens
agataatgtcactatataaaactacatattaggtaaatagctataagccaaggcaactgagctaagaacagtatccacttatatcagtcatttattgatgscccctatggtttcatcttaatgttattttcctagaagtagttatgtgaagggccaaataacagcatagaaaaacactgctcagtgtttttctcttttttg

SEQ ID NO: 516416 - DNA, 201 bp, Homo sapiens
ttactctactactaaatactatatgcagttgtaacacaatggtaagtatttgtgtatataaacatctaggtagagtaaaaatatgatactaaagtcttacrggaccactgttgtatatgtggtctgttgtttactacatcatcatctggcacctgacatcacattcattttagctaaacttaactgataagacatgagtgt

SEQ ID NO: 516417 - DNA, 201 bp, Homo sapiens
aaacactttaattcaaatattaaatgatgacactaagtgtatcatagataaatatctacaggagatacttctttactgaagacatttgttcattgagaatkggtaagtggattaagaaagaagacacttttagtcacttagcatattcatctaagaaacatctttcaaatactgaatatatttaatattctttatgaataa

SEQ ID NO: 516418 - DNA, 201 bp, Homo sapiens
ttttccttcctgccttggttatttggtatagctggagaaacagaagttagagaagcagaagaaggaattaaaagctaccaaaaagactcttgatgaagaargaaacagcagcagccgttctggaatcacagggaccacaaataagaaagattttatgaaactgagacctggagaaaaaaggagaaaaaatcttcagttatt

SEQ ID NO: 516419 - DNA, 201 bp, Homo sapiens
taatcatgatattcagtcaaggcattatggtttttaatcttgaaacttagagaaccctttgaatatttgcttttactggtgtacagtatgagtggaatatraactgtacacataattatcatgttgatataaatcataatttcaactagatcaagacatgttaaccttttataaatttaaagtcaataaagcaccttttta

SEQ ID NO: 516420 - DNA, 201 bp, Homo sapiens
taaaacagtaaactaaaaagtaggaaaagtcagaaaggtggagaactaccaagacagcaatattagagaaatcaaagatgcatattacaggtttggccccygcccccccgccccttaatctacaacaacataaacctgtgtttatgttaatgacagaaatgtcccaagcaataaatagacccaggtggacttgaagaacat

SEQ ID NO: 516421 - DNA, 201 bp, Homo sapiens
aatacatgcgaaatatgataaagcatgccgaaatggagaggacatctgtcttagagaaacaagtaagtaaagcacctcacagattgatactcaagaacagytatggggaaaactaattgaataaagactttttttctttcggtgaggattaatggtgctgttacagcccaggactgaaatttcttggcatcagttatgaaa

SEQ ID NO: 516422 - DNA, 201 bp, Homo sapiens
tttcttacaccagagatcttcgtatttaggtgacctgtacatttgtgagaagatatctcaacatcagtctcaaatatattgattgatcaattgattggatmtcactctgtctcactctgtcacccaggctggagtgtagtggcatgatctcggttcactgcaacctctacctcctaggctcaggtgattctcatgcctcat

SEQ ID NO: 516423 - DNA, 201 bp, Homo sapiens
cctttagtccacaagccctagccatgccgtggtagccaatgttcagcttgtcttgcatctaatgaagcaacacagtaaagctttgtgcaatgatcgagtcrtcaacagtattcctttggcaaagcaagtatcttcacgaggtggtaaaagtaagaagttgtcagtaacacctccctcctccaacggtattaatgaggagtt

SEQ ID NO: 516424 - DNA, 201 bp, Homo sapiens
tttttttctaactttacttttagaatattgcttacaatacataaaacaaaaatgcttccagtcaacagcaggctattacattttagggcaaaatttattayagttctcagttacataagtgggagctgaatgatcagaacccatggacacatagtggggaacaacatacactggagcctgtttggtgggggagttggtcaa

SEQ ID NO: 516425 - DNA, 201 bp, Homo sapiens
ctttcttacaccagagatcttcgtatttaggtgacctgtacatttgtgagaagatatctcaacatcagtctcaaatatattgattgatcaattgattggawctcactctgtctcactctgtcacccaggctggagtgtagtggcatgatctcggttcactgcaacctctacctcctaggctcaggtgattctcatgcctca

SEQ ID NO: 516426 - DNA, 201 bp, Homo sapiens
tctaatgaagcaacacagtaaagctttgtgcaatgatcgagtcatcaacagtattcctttggcaaagcaagtatcttcacgaggtggtaaaagtaagaagytgtcagtaacacctccctcctccaacggtattaatgaggagttgtcagaagtcttacagactttacaggatgaatttgggcaaatgagcttgtgagtttt

SEQ ID NO: 516427 - DNA, 201 bp, Homo sapiens
tttagtttttaattattgatcattagaaaatcttttaagactgattgcctgagggaattctcactatttaataatgctaaagtgaaaaaacctacatatttgttttgtctcaatttattttacacatataggaaaaaatttaaataaccaaatgacagtcattatctttgggtaataggattattggttatttttcagtgt

SEQ ID NO: 516428 - DNA, 201 bp, Homo sapiens
tgaactgggttttaaagaatgatataaatgttgctaatacaccaaaaaaatgtcatctgcaaatatggtttgttcacaaaatggagagaaggggaggatgrtaggacatgaggctaggaaatgtaggttgcagctcaatgatgtgtatgtagggccttattttccattctgaaacatagttagtggatttatatcaaagga

SEQ ID NO: 516429 - DNA, 201 bp, Homo sapiens
ttttagtttttaattattgatcattagaaaatcttttaagactgattgcctgagggaattctcactatttaataatgctaaagtgaaaaaacctacatatdtgttttgtctcaatttattttacacatataggaaaaaatttaaataaccaaatgacagtcattatctttgggtaataggattattggttatttttcagtg

SEQ ID NO: 516430 - DNA, 201 bp, Homo sapiens
cttgtgtatatttttttaaaacttactcctttttctgttatgaatctagagtttgcattcattagttttgtagacatcttaactctattataaaatcggawtgtttatatgcttaacattatgctagatgccctgcaatggaaaaaaaaaatactaggcagttgtccttcagtatccatgagtgaattggttctcagaccc

SEQ ID NO: 516431 - DNA, 201 bp, Homo sapiens
ctttttagtttttaattattgatcattagaaaatcttttaagactgattgcctgagggaattctcactatttaataatgctaaagtgaaaaaacctacatrtttgttttgtctcaatttattttacacatataggaaaaaatttaaataaccaaatgacagtcattatctttgggtaataggattattggttatttttcag

SEQ ID NO: 516432 - DNA, 201 bp, Homo sapiens
ggtaaatagctataagccaaggcaactgagctaagaacagtatccacttatatcagtcatttattgatgccccctatggtttcatcttaatgttattttcytagaagtagttatgtgaagggccaaataacagcatagaaaaacactgctcagtgtttttctcttttttgattgtcaaattatcaagccgtattgaatatt

SEQ ID NO: 516433 - DNA, 201 bp, Homo sapiens
gaacattccatactcatggataggaagaatcaatatcgtggaaatagccatactgcccaaggtaatttatagattcaatgccatccccatcaagctaccamtgactttcgtcacagaattggaaaaaactactttaaagttcatacagcaccaaaaaaaacagcccacattaccaagacaatcctgagccattaaagtgat

SEQ ID NO: 516434 - DNA, 201 bp, Homo sapiens
atttagatataggtagatattcgaataagcacgtagcacattctgcttgtcctcacatccagatcatttctaggactaattctccaagaagcagtcatacrtacacttgaatcttcagtttcttcagcacttgaatgtaaagctgtattgtcatatatcaagtactgagtgaagtgcctaaaactgtgctagttgacacta

SEQ ID NO: 516435 - DNA, 201 bp, Homo sapiens
cctatcgtctcagcccaaaatctcctcaagttgataagcaacttcagcaaagtctcaggatacaaaatcaatgtgcaaaaatcacaagcattcttatacascaataacagacacacagccaaatcatgagtgaactctcattcacaattgcttcaaagacaataaaatccctaggaatccaacttacaagggatgtgaagg

SEQ ID NO: 516436 - DNA, 201 bp, Homo sapiens
ctcacgtttcagggcgctgtcagtccagcttctgacgcaattctggaggtcggcgggaatgcctagattgccccgcgctccccaagcttccattcactgtkgctgtgtcgaagctgcaccctctggctcccagtgaaactgggctggccgcccctgttccccagcccttattcaccttttggcgtagcaaccaaccccggt

SEQ ID NO: 516437 - DNA, 201 bp, Homo sapiens
tcatttttaaatctccctggcatgaggtgcccacttcccctttccaaagcaaccattaaacatactttgtttctactattggtggagtttttctatatttwaaaatacatatatatttcagaggatttttattttgctttttggcatttcagactttgatcagtgttaagtgcacttgtattgctttttaatctgttaatt

SEQ ID NO: 516438 - DNA, 201 bp, Homo sapiens
atctatttataaagtggaatagtacattgagattgttggtttagtgtttaaaacaaaagcaaaatatctttgagaagtctatcaggtttttcttacacacrtgatagacatgtaatttagtgcttcctattattccaggatacagaaatgaacaatagtgtctaccacctggatgtacactgtttaataggtgaaatagat

SEQ ID NO: 516439 - DNA, 201 bp, Homo sapiens
caggcaggagaaagaaataaagggtattcagttaggaaaagaggaagtcaaattgtccctgtttgcagattacatggttgtatatttagaaaaccctatcrtctcagcccaaaatctcctcaagttgataagcaacttcagcaaagtctcaggatacaaaatcaatgtgcaaaaatcacaagcattcttatacaccaataa

SEQ ID NO: 516440 - DNA, 201 bp, Homo sapiens; identical to SEQ ID NO: 272319

SEQ ID NO: 516441 - DNA, 201 bp, Homo sapiens
cccagctccaccactttctcacaagtgagctggggccaggtgattaaccttccaagccttaggtttccttttcagcaaaatagaaacgatgatagtacctmtaatatctggagttaaggtgaggatgaaatgagacaacacatctgaagggcataggcacagagtaagtgctcaatggcaaatgacccatcatctttaagg

SEQ ID NO: 516442 - DNA, 201 bp, Homo sapiens
ttgagctctctctgctctaacaggcagcccagcccagctcattcagctgcttttcttcctccctccacttagactgactctttctttctggggatcagatmtgttcttcaggggagcagttctcagcaggtacactgcaaacaactgagatgtgtattgcatggaatttgttaccactgttggtaaaactgcccaagtttt

SEQ ID NO: 516443 - DNA, 201 bp, Homo sapiens
accctcccgccgccaccacacagtataactgttgactgggctctttcatctctagaccatgaacagtcctttgagggcagggaccatcacagagtctggcmagagtgggtgcttgggtggtgtgtttgagtgaatagaggaggaaggctggtccttgttctccctgagatgatttatttgatcttcaccttatcctatagg

SEQ ID NO: 516444 - DNA, 201 bp, Homo sapiens
tggtctcgatctcctgacctcatgatccacccgcctcagcctcccaaagtgctgggatgacaggcatgagccaccgcgcccggcctaaatctcagttcttyaaaagcaaatctggaaacaagcaatatggcctgtagcactttcttctctccactgtttgagtttaagcccatctcccacttcctctcccattctttcatc

SEQ ID NO: 516445 - DNA, 201 bp, Homo sapiens; identical to SEQ ID NO: 272377

SEQ ID NO: 516446 - DNA, 201 bp, Homo sapiens
gggaaaaactcaaaagggagacggtgagtgctcctgggccagccctattttataaaagaaaaaacaaaaaattagccaggcatggtggcaggcgcctgtartcccagctactcgggaggctgaggcaggagaatggcgtgaacctgggaggaggggtttgcagtgagccaagatcgtgccactgtactccagcctgggcga

SEQ ID NO: 516447 - DNA, 201 bp, Homo sapiens; identical to SEQ ID NO: 272351

SEQ ID NO: 516448 - DNA, 201 bp, Homo sapiens
agcgagactccgtctcaaaaaaaaaaaaaaaaaaagacccaggagaaggaatagcgtgtgtaccccagccagatagcagcagggctgacgctggagtcagrtctcctggtgctcggtgtgcttttagttctgctggaagcagaatgtcacaggagcgtatgaacagaatcctcagttatgtgacataggtagctggtgctg

SEQ ID NO: 516449 - DNA, 201 bp, Homo sapiens
tcagtctctctcctcccttccacccccaaaatgcctttcaaatgaacagtgatgagtgcctgtatctgtatggcgaatcagacacaatccccacttctatygtgtagtggaggagttagacacatacacagctataatgctaggaaggtgggtaaaggccatacaaaaactaataagttaacatttattgagtgcttgctg

SEQ ID NO: 516450 - DNA, 201 bp, Homo sapiens; identical to SEQ ID NO: 272353

SEQ ID NO: 516451 - DNA, 201 bp, Homo sapiens
cccaggcagaggtccctcctacacagctagctgtactttctccctcattccccaatcaggggcctcttagctgcctctctggctatttgtataagagttamtcttccaaattccaagcccctaaaatgatctccccaacgttagctggagtaatggtcctatatgcccagggcatgaccctggatatctacccttctcaaa

SEQ ID NO: 516452 - DNA, 201 bp, Homo sapiens; identical to SEQ ID NO: 272380

SEQ ID NO: 516453 - DNA, 201 bp, Homo sapiens
agctgtactgtttccactgtggcaaaacatcctgtttctgattcctggtcctctccatttccttatgcatgaccttgggaaatgcatccaaattaacgtgygttttaaggaccccatctgcagagcagatacggtatttctctgtctcccaaaaggtagaagactaggatcactgatttcataaggtactaaaagcacttt

SEQ ID NO: 516454 - DNA, 201 bp, Homo sapiens; identical to SEQ ID NO: 272383

SEQ ID NO: 516455 - DNA, 201 bp, Homo sapiens; identical to SEQ ID NO: 272323

SEQ ID NO: 516456 - DNA, 201 bp, Homo sapiens; identical to SEQ ID NO: 272369

SEQ ID NO: 516457 - DNA, 201 bp, Homo sapiens
gctctcagtctggtgatcccctcattcagctattcgttcaacaggtcattcattcgttcgccaaaaactgaatgtccagtgcatgctaggtactggggatrcagaggtggataggctctggtacccttgctacacagctcccagtccaggggggagacaactttcagtatgtcaagtgctgtggtagaggtgagaatggaa

SEQ ID NO: 516458 - DNA, 201 bp, Homo sapiens
cgaccctaatgcgctagtggacgaggatgctgtttgctgtatctgcaatgatggtgagtgccagaacagcaatgtcatcctcttctgtgacatgtgcaacytggccgtgcaccaggagtgctacggtgtcccctatatccctgagggccagtggctgtgccgccgttgcctgcagtcaccctctcgtgctgtggattgtgc

SEQ ID NO: 516459 - DNA, 201 bp, Homo sapiens
ctcaccccaacttcctccttccgtgcttaagtgatcctcccactcagcctcctgagtagctgcaactacaggcacatgccaccatgcccagctagtttttwaaattttttgtagagatggggtttcaccatgttgcctaggctagtcttgaattcctggactcaagtgatccacccacctcagcctcccaaagtgctggga

SEQ ID NO: 516460 - DNA, 201 bp, Homo sapiens
gggaaatctcaaccatgtgatgctgagttccctgtttgtaccgtaggtacatcgagaagtctgcagaggagctggacgaggaagtagagtatgacatggaygaggaggactacatctggctggatatcatgaatgagcgtcggaagacagagggtgtaagtcccatcccgcaggagatctttgagtacctaatggaccgac

SEQ ID NO: 516461 - DNA, 201 bp, Homo sapiens
gctgagggtcagcattgcagttctagtagcatgataccctctctgtccccacttcagacatactctctaagttcttgaggaggaaaagccttgggaggacmtggactgaaccaaactgggctcttattatatcctcagatcattgatccaaagatgccccgagaaggtatgttccaccatggggttcccatccctgtgccc

SEQ ID NO: 516462 - DNA, 201 bp, Homo sapiens
tgcagtgagccaagatcgtgccactgtactccagcctgggcgacagagcgagactccgtctcaaaaaaaaaaaaaaaaaaagacccaggagaaggaatagygtgtgtaccccagccagatagcagcagggctgacgctggagtcaggtctcctggtgctcggtgtgcttttagttctgctggaagcagaatgtcacaggag

SEQ ID NO: 516463 - DNA, 201 bp, Homo sapiens
ccagaatccagctttcctttcccctgtgctatatgcctgcctctaactgtggtgggaggaggttgctggatgtgtttcaggggggcttgttaggagcaggkttcggggcaataaggaggatatctccacttaaaacaaacctgccctgcccttccaggtacctgactacctagaccacatcaaaaagcccatggacttttt

SEQ ID NO: 516464 - DNA, 201 bp, Homo sapiens
aagaggtgatgagggcccagatatgggctatggtggaggagatggcatttggagacactgtagaggtaggctggccagaatctggtgactccaagtgaggrggagggctagaaagactggggtctctggtgcaaatggccaggaactcatccccagccttatgttaactgatctgtgtattctagatgtgacagcatgggg

SEQ ID NO: 516465 - DNA, 201 bp, Homo sapiens
tgactccatagctgtactgtttccactgtggcaaaacatcctgtttctgattcctggtcctctccatttccttatgcatgaccttgggaaatgcatccaamttaacgtgtgttttaaggaccccatctgcagagcagatacggtatttctctgtctcccaaaaggtagaagactaggatcactgatttcataaggtactaa

SEQ ID NO: 516466 - DNA, 201 bp, Homo sapiens
tggacttcccctccctcccaatggcccttgagctctctctgctctaacaggcagcccagcccagctcattcagctgcttttcttcctccctccacttagaytgactctttctttctggggatcagatatgttcttcaggggagcagttctcagcaggtacactgcaaacaactgagatgtgtattgcatggaatttgttac

SEQ ID NO: 516467 - DNA, 201 bp, Homo sapiens
acacaatccccacttctatcgtgtagtggaggagttagacacatacacagctataatgctaggaaggtgggtaaaggccatacaaaaactaataagttaasatttattgagtgcttgctgcacaccaggcactgtcctaagcactttacctgcattaactcatttaatgctcagaatagctatgtgaaataggttcagatt

SEQ ID NO: 516468 - DNA, 201 bp, Homo sapiens
tgccagagtctaggccacctatagcatgccaggcaaggagcaccttctctgtgtgacaagcaccgagagcagccctcaattccaggcctgttggcatagtragtgatacaggttggacattaagagcactgggctggaggttgaatgcctctgcctctgccactcccttgttatgtgacctatctatgttttgattaactt

SEQ ID NO: 516469 - DNA, 201 bp, Homo sapiens; identical to SEQ ID NO: 272376

SEQ ID NO: 516470 - DNA, 201 bp, Homo sapiens
ggctccggcatgacttggagcgagctcggctgctcgtggaattgatccgcaagcgggaaaaactcaaaagggagacggtgagtgctcctgggccagccctrttttataaaagaaaaaacaaaaaattagccaggcatggtggcaggcgcctgtagtcccagctactcgggaggctgaggcaggagaatggcgtgaacctgg

SEQ ID NO: 516471 - DNA, 201 bp, Homo sapiens
ggagcggcaggggtcagctcaggaatcccggggagccgggaccaaagcgtggggcggcagggggccggggtggcgaggtctacggtctccggagttggggstcccccttcccggcccgactttccccgccgacctccccaagtggggtcggagccccggcgggcgcccccggcgatgagcccggactcgaggtggccggtg

SEQ ID NO: 516472 - DNA, 201 bp, Homo sapiens
tcattcgttcgccaaaaactgaatgtccagtgcatgctaggtactggggatacagaggtggataggctctggtacccttgctacacagctcccagtccagrggggagacaactttcagtatgtcaagtgctgtggtagaggtgagaatggaatgctgtggaaacagctccccatgggagagtcagagaagttgtgtcagaa

SEQ ID NO: 516473 - DNA, 201 bp, Homo sapiens
ccatccctacccaggctcagcttgcacagcacctggcatcacactgggcacacagtaactgcttagggatccttactgaaggacttcattcattcactctwtcattcaacaaacactcccaacaccttctctattccagagagggtccctcacctccaagtctagaggaagaagtctgtaattcttcaggaggcatctgat

SEQ ID NO: 516474 - DNA, 201 bp, Homo sapiens
ggagggggtgtacaattgtgtactgaggatgtttggagttaggtgtgtaaggacttggggtttggtttggaatacaggagcttccaggggatggggtagargagctggagggtgtagggtacgtctggtatatgagggtgtgtgtgtgtgtgtctgggtgtcatcttgtgtgggtgcgggtggatgtgtgttttggggtgt

SEQ ID NO: 516475 - DNA, 201 bp, Homo sapiens
gtcaggagttcaagaccatcctggccaacatggcaaaaccctgtctctactaaaaataaaagaattagccacacatggtggtgcgtgcctgtaatcccagstacttgggaagctgaggcaggagaattacttgaacctcggagatgggggttgcagtgagctgagatcgcgccactgcactccagcctgggcaacaaagtg

SEQ ID NO: 516476 - DNA, 201 bp, Homo sapiens
ccacagcccctgaagtcctggcccagaagccctacagcaaggctgtggattgctggtccataggtgtcatcgcctacatcttgtaagtggggcttggccayggtaggctgtggctccagagttgtcctctcgcctactttcctctcttccttcctctgctctccctctgccctcccttccttccctccctcccttccttcc

SEQ ID NO: 516477 - DNA, 201 bp, Homo sapiens
ccctagtagctgggattacaggcacctgccaccacgcccggctaatttttgtatttttagtagagatggggtttcgccatgttggccaggctggtctcgawctcctgacctcaggtgatccacccgcctcggcctcccaaagtgctaggcatgagccaccacacccaactcctggcagagcatttctaataagacccagag

SEQ ID NO: 516478 - DNA, 201 bp, Homo sapiens
gggcacttggggtgtgacatgcctggttttgaattctggctctgctactgcctaactgtgggttcttgggtgagtcactttgcctccaaaggcatcagttwcctcatctgttaggtgagattatacagactggcctagcagggaagcagtgaggatggcattaaatcaagcactaatccagggtctggcataaaataggca

SEQ ID NO: 516479 - DNA, 201 bp, Homo sapiens
ggacacgggctgctctcccaatagccctgggttcttgaagagaaagaagtcgagagaatgaaggtgccagtcagtccatttaacttgctgccaagagctargtgttctagcctaggtttgggaactgaggctggagatggctctgttcttggtgctgggaatgcagaaataactcaaacctggtctctgcccttcaagttg

SEQ ID NO: 516480 - DNA, 201 bp, Homo sapiens
ttgtatttggtaggcctccatgtgggtttcagactctgcctctagagcttacactcgagtctcctttcctagaagattctgcccctggatgggtgggcagrgtcccctgggaaaaaggtcctgttccaggagtggaatctcacaccagaggccctagtcagggcaccttctcctcattctcccttagagaaaaagagagaa

SEQ ID NO: 516481 - DNA, 201 bp, Homo sapiens
ttcctttagggctttacagtgcacacctgaggtttagagacagttcccccccacaccctcttgagccttgtccttcctggaatttttggccttcttgagarcttccttgattttcttatgacagccatgaagccacagtggcttttggggatccattatttctcagaaggtgcttggagcggcagaaggttctaccagcct

SEQ ID NO: 516482 - DNA, 201 bp, Homo sapiens
actgctgcgtggagccgggcacagaactgtcccccacactgccccaccagctctagggccctggacctcgggtcatgatcctctgcgtgggagggcttggsggcagcctgctccccttccctccctgaaccgggagtttctctgccctgtcccctcctcacctgcttccctaccactcctcactgcattttccatacaaat

SEQ ID NO: 516483 - DNA, 201 bp, Homo sapiens
gccccaagctgaccctgccttggccctcccatcctcctcctttcctgctttggacaaatcatttaaactctctaagccttaaattgcccctttataaaatrgggatcacaatttccacttggcagggttgtggggaacatcagaagtcctttatttcaagtgcctggcctaacatgacagatgtgatggaggtgccagtgc

SEQ ID NO: 516484 - DNA, 201 bp, Homo sapiens
ggaaagagtggcataggcagaagcaatggcaagtgcaaaggccctgaggagggcaagatggcggcacatacaaggaacagaaaggataatgtagctagaasaggagtgagcaggcagggctggtagagtttataaagggggaactccttccatggctcctgcctgacccctgagactgccccagtgctccaccccggagcc

SEQ ID NO: 516485 - DNA, 201 bp, Homo sapiens
aagtggaaggtgagtccatatccctagttctggtcccagcctccccaggactcctccccatccctacccaggctcagcttgcacagcacctggcatcacaytgggcacacagtaactgcttagggatccttactgaaggacttcattcattcactctttcattcaacaaacactcccaacaccttctctattccagagagg

SEQ ID NO: 516486 - DNA, 201 bp, Homo sapiens
gtggcttttggggatccattatttctcagaaggtgcttggagcggcagaaggttctaccagcctctaaccatctctgattgccccttctcttccctcctgmccttcaagccagagaatctgctgtactacagcctggatgaagactccaaaatcatgatctccgactttggcctctccaagatggaggacccgggcagtgt

SEQ ID NO: 516487 - DNA, 201 bp, Homo sapiens
gcactaatccagggtctggcataaaataggcattcaaacattcctttagggctttacagtgcacacctgaggtttagagacagttcccccccacaccctcytgagccttgtccttcctggaatttttggccttcttgagagcttccttgattttcttatgacagccatgaagccacagtggcttttggggatccattattt

SEQ ID NO: 516488 - DNA, 201 bp, Homo sapiens
gctgagtccagggtggggcttcctctggtcaattaatgcttcctgtttcccacagcccaggccctgtggcagcactatctagggcctaaactgtccccagmttttcacttctggatgacagtgggtgggacacgggctgctctcccaatagccctgggttcttgaagagaaagaagtcgagagaatgaaggtgccagtcag

SEQ ID NO: 516489 - DNA, 201 bp, Homo sapiens
gctgctgacaccagtggctgggggtgaggagcgggctctgcagaagggcatgggtggtccacaaaggtgcacccgggctggagtggagggcctgcccctgyggccacctctgttctgtcttcccatgcagggccggcagctggctgttgctgtcgagactgctgcgtggagccgggcacagaactgtcccccacactgccc

SEQ ID NO: 516490 - DNA, 201 bp, Homo sapiens
ttccttgattttcttatgacagccatgaagccacagtggcttttggggatccattatttctcagaaggtgcttggagcggcagaaggttctaccagcctcyaaccatctctgattgccccttctcttccctcctgcccttcaagccagagaatctgctgtactacagcctggatgaagactccaaaatcatgatctccgac

SEQ ID NO: 516491 - DNA, 201 bp, Homo sapiens
tgtggtgcggcacatgaggaaactgcagctgggcaccagccaggaggggcaggggcagacggcgagccatggggagctgctgacaccagtggctgggggtraggagcgggctctgcagaagggcatgggtggtccacaaaggtgcacccgggctggagtggagggcctgcccctgcggccacctctgttctgtcttcccat

SEQ ID NO: 516492 - DNA, 201 bp, Homo sapiens
gtggtgagggagccagacattggaggtgtggggaaagagtggcataggcagaagcaatggcaagtgcaaaggccctgaggagggcaagatggcggcacatwcaaggaacagaaaggataatgtagctagaacaggagtgagcaggcagggctggtagagtttataaagggggaactccttccatggctcctgcctgacccc

SEQ ID NO: 516493 - DNA, 201 bp, Homo sapiens
ctgctggatgagacagacctcagcagaggaagggccaggctggatagggttagatggggccaggaagggacagagtgagcaggaccatttctcatgctccygggacccagatggggagtcaggagggagaggtctggggagctccagctgtggctgttgttgctgtggtaacagtgcagaaagagctatttaaaaatgtgg

SEQ ID NO: 516494 - DNA, 201 bp, Homo sapiens
cctcgggtcatgatcctctgcgtgggagggcttgggggcagcctgctccccttccctccctgaaccgggagtttctctgccctgtcccctcctcacctgcytccctaccactcctcactgcattttccatacaaatgtttctattttattgttccttcttgtaataaagggaagataaaaccatccttagcgctgtctccc

SEQ ID NO: 516495 - DNA, 201 bp, Homo sapiens
acagggtttcaacatgtcagcaaggctggtctcaaactcctgacctcaggtgacccacccgcctcagcctcccaaagtgctgggattacaggcatgcaccrccatgtccgggtatgttaattattttatttatttattttattataaagacggggtctcactgtgttgcccagtctggagtgcagtggctattcacagaca

SEQ ID NO: 516496 - DNA, 201 bp, Homo sapiens
tgaacccgggaggcagagactgcaatcacggcactgcactccagcctggggaacaagagtaaaactccgtctcaaaaaaaaaaaaaaaaaaaaaaaaaaawtatatatatatatatatatatatgcaatggacttcattggctgtgtcaggggaaaaggaggcaaggtcctggtccactgtgaggctggaatctcccattc

SEQ ID NO: 516497 - DNA, 201 bp, Homo sapiens
cagtcaatcctcatttctttctccccccaggattagcaacttaaaaattttctttctgtttctatggatttacgtattctagatatttcttataaattatktcatacaacttatggcatttgtgtctgctcactgaagcctaaacctcccagggccaagcgatcctcccacctcagcctcctgagtagcttggactacagg

SEQ ID NO: 516498 - DNA, 201 bp, Homo sapiens
agcctggccaagtagtgaaacctcatctctacaaaagtacaaaaattagccagctgtggtggtgagtgcctgtaatcccagctactggggaggctgaggcmcaagaatcacttgaacccgggaggcagagactgcaatcacggcactgcactccagcctggggaacaagagtaaaactccgtctcaaaaaaaaaaaaaaaa

SEQ ID NO: 516499 - DNA, 201 bp, Homo sapiens
cctctggcctcagtttccccttgcaagaccgacctagttggccagggaggggcaggcccccgtctgacccgcctctgtccccacagcccccagcggcgccygggccgggccgggctggcggaggaggcttccggaaatacagattcattttatttaagcgtccgtggcaccgacagggaccccagagcccagagaggggcg

SEQ ID NO: 516500 - DNA, 201 bp, Homo sapiens
tctctccccacacaagcacagccctcccccgcggcctctgcttccgcgtccctgtgtcgtctccgcggagtctcatgctcttccttcctccccccagccgrctcagttcggggaagctgcaggagttcggcgtgggtgatggcagcaagctgaccttggtacccaccgtggaagcgggcctcatggtaaatggccatgggg

SEQ ID NO: 516501 - DNA, 201 bp, Homo sapiens
ccccccgctcccgaaaacccggcgccgtcatcgagagctttgtgaatcacgccccgggggtcttctcagggaccttctctggtaggtgtcacagcacatgygtgagctcacgtgtgtcccgtgaccctgtgcatttggggtctacatccacccacaggcgactccacatattctgggcatacacaggctgtgtccgtctgc

SEQ ID NO: 516502 - DNA, 201 bp, Homo sapiens
gcgagaagctcacggctgccccctcagcctccctgctgcagggccagagccagatccgcatgtgcaagcccccgggtgagtggccaccctcgggggtcctrccttccccgcccgcctgggcttctcaaggcccctctgtgtgagctggtgggctcaggagcagctgacctgcccaggggctgggggggatggcagctgccg

SEQ ID NO: 516503 - DNA, 201 bp, Homo sapiens
cagccccctccgcccccaccgaggagcccccctccagccgctgtggcttccccagagcgagtttctccttttttacatttctgctgagggctgggggtggyggcttgggtgacactccttccgccttccgtgacccccatcgtgagagggtggggatctcgtcaccctcccctcctctctctggcctttgttctctacccc

SEQ ID NO: 516504 - DNA, 201 bp, Homo sapiens
ccgacctggcccccagaactacctcctgcgagaagctcacggctgccccctcagcctccctgctgcagggccagagccagatccgcatgtgcaagcccccrggtgagtggccaccctcgggggtcctaccttccccgcccgcctgggcttctcaaggcccctctgtgtgagctggtgggctcaggagcagctgacctgccc

SEQ ID NO: 516505 - DNA, 201 bp, Homo sapiens
cgtgagagggtggggatctcgtcaccctcccctcctctctctggcctttgttctctaccccgaaaggggagggggcgggggtgcccagccctggggccagygaggcctagacaggatgttaggaaaatatttagtaagcggccaggagggaggctggggctggccctcacccggttcccggttttgctgcggacttttttt

SEQ ID NO: 516506 - DNA, 201 bp, Homo sapiens
ggccccgaggcccgcacccccttccgctttcccagcggcatgtagagtcctgccctttccctacatcgcgggggcagggcgggggccgggagctgggtggyctgccatgggggtggccacagcagcagcagcagtggcgtgggggcagagccggggtcccgagccagggcgggggctgcaggtgatttcctggggcgagtg

SEQ ID NO: 516507 - DNA, 201 bp, Homo sapiens
aagcgtccgtggcaccgacagggaccccagagcccagagaggggcggcgagaggccccaggtcacagcgcggggggactgggccgggctgggctgggggcrccgcaagctggggctcccagctgacggaccgctctccttgcaggtcagtgacttcctgtcgggccgttcgccactgacactggccttgcgtgtgggcgac

SEQ ID NO: 516508 - DNA, 201 bp, Homo sapiens
ggtctacatccacccacaggcgactccacatattctgggcatacacaggctgtgtccgtctgctcacttcacatgtcccccaggaatcccccacacacackcctggccctgcccggggggccgcgggtcaccaggtgcctgcatactggggacgtgtcccgctcccgccccgtggtccctcgtgcacatcagcccacatgt

SEQ ID NO: 516509 - DNA, 201 bp, Homo sapiens
gcccccgcacacaggcagtagcccctccctcggtacctgtccgcacacacactacctggggcccccaccccgccagccagcagggccctctccaccccctrttccagcccaggattccgaccccacactcaggcccctctcctccctctctttgtagtctcaggcctcaaggccggaacagtccgtgatgcaagctctcga

SEQ ID NO: 516510 - DNA, 201 bp, Homo sapiens
ggtcttctcagggaccttctctggtaggtgtcacagcacatgtgtgagctcacgtgtgtcccgtgaccctgtgcatttggggtctacatccacccacaggygactccacatattctgggcatacacaggctgtgtccgtctgctcacttcacatgtcccccaggaatcccccacacacacgcctggccctgcccggggggc

SEQ ID NO: 516511 - DNA, 201 bp, Homo sapiens
tgggcatacacaggctgtgtccgtctgctcacttcacatgtcccccaggaatcccccacacacacgcctggccctgcccggggggccgcgggtcaccaggygcctgcatactggggacgtgtcccgctcccgccccgtggtccctcgtgcacatcagcccacatgtccacgccattgcctgagctcatgagctcacacccg

SEQ ID NO: 516512 - DNA, 201 bp, Homo sapiens
tgtctgacctcaggggcatttgctggggtctggggtggtcctctgtgttcagcaggtggaggctttgggagtcacaggccactacctcctttgcaggggaycggcttcggcagacagaaaaccgcgccacgcgctgcaaggtggaacggctgcagctgcttctgcagcagaaacggctccgtagaaaggcccggcgggacg

SEQ ID NO: 516513 - DNA, 201 bp, Homo sapiens; identical to SEQ ID NO: 286591

SEQ ID NO: 516514 - DNA, 201 bp, Homo sapiens
aaaagttctgaccgtggtttcctggactcttcatgggctttgcttcctacctccttcacccttcactcctgccctcctcttcctcctcctcctcctcctcygtctgtctcctttcacctctgcgccaggtcggtcctccctgccaaccttccccagctccaatatgtagcagtctctctggatggcggagagtgaaggaga

SEQ ID NO: 516515 - DNA, 201 bp, Homo sapiens
ggcgtgacatcggcaccatcctgcagatcctgaacgacctcctgagcgccacccggcactaccagggcatgcccccttcgctggcccagctccgctgccaygcccagtgctccccggcctcaccggcccccgacctggcccccagaactacctcctgcgagaagctcacggctgccccctcagcctccctgctgcagggcc

SEQ ID NO: 516516 - DNA, 201 bp, Homo sapiens
accgcgccgcgtcccggtcgcgcccgccgccctttgaaggagaagcaagtgccgtccccacccccggaaggcgcccccaggagccggagcgacctcggagmgccactcggattttggatttcggtctcgcattccgcggccgggactttctcgaggaggacgcgcgctgctccgcgcccccgagtgcccggaggacccggc

SEQ ID NO: 516517 - DNA, 201 bp, Homo sapiens
cagctgcttctgcagcagaaacggctccgtagaaaggcccggcgggacgcgcggggtccgtaccactggtcacccagccgcaaggccggccgcagcgacascagtagcagcgggggcggcggcagccccagcgaggcctccggcttgggcctcgacttcgaggactccgtgtggaagccagaagtcaaccctgacatcaag

SEQ ID NO: 516518 - DNA, 201 bp, Homo sapiens
gagggtgcatgttctccagccgcgtgaccatgggcagtcactgccctctcacctggcggggaaaccgaggtggagagaggttgcgccagccacccctagaccccccacccacttgctgcctaaggcctcccccaaccccaggggtgtgaggggtgtgaccagcttgggcttggcccaacccggctccagcggagtcacgga

SEQ ID NO: 516519 - DNA, 201 bp, Homo sapiens
tcctgtcttggccttgtggcccgcaggcactgtggggtctgatcctgcccccatacgtccccagcacaggctgtccctggggctctgtcccgtccacattrgtggccctgcagccccaacgtcccctcccctctgccagttggagtctggaatgtgggtggacgatggtctgctctcttcccactgaacgctgtccggcgg

SEQ ID NO: 516520 - DNA, 201 bp, Homo sapiens
ctggcctgtgcctgcgcgtggcagggtccaagctcgggagcggtggcctctgcccgtggttggcagcctggagccactgcggtccagacgcctcctgggaygctgtggaaatccacagacagcctcgtgccgcctcaccccagggcacccgagtcctcgtgctcacgggagtcgcgtggggctcagggctggagcagcctc

SEQ ID NO: 516521 - DNA, 201 bp, Homo sapiens
gggccccttgtccttgccctccaggggccagccttgagttaggtgggccctagaaggcagccaacatgtcctgccctgaccctccacctcctccctaggahccctgtgcctcctgcagagagacccgcatggccccggggtcctggagcgggtggagcggctgaagcaggatctgctggacaaagtgcggcggctgggccg

SEQ ID NO: 516522 - DNA, 201 bp, Homo sapiens
cccccatcctgccctaaattccacctggcgtggggatgccttgcccagggctggcggcaggtgggccggggcccgggtcgggagccaggagccacagctcrggggcgccttgtgacgtgtcattgcagtgggccgaggccctgaacgtgttccagcaggcggccgactggatcggcctggagtcgcgcaagtccctgtggg

SEQ ID NO: 516523 - DNA, 201 bp, Homo sapiens
agttggggccggggaggccaggaaaggcgctgtgggcagcacaaaggagttgggtggcactgctgatggcgggtgggggtgagtggggaggggaaggagcsccttttggttccggcccaggaggtagcaggagctgcagcccaggctgggaccggtcatgcccgagggagaggcggccggggagcaccactctccaccacc

SEQ ID NO: 516524 - DNA, 201 bp, Homo sapiens
ggtgggcgaggggctcgtgggaacaccgtgcatcccgggtgggcgaggggctcgtgggaacgccgggcatcccaggtgggctcggggctcgtgggaacacygtgcattgtgggtgagcacggcgagggcctaggtgggcaaggggctcgtggaagcgccatgcatcctgggtgagcgagggtactgggtgagactgggcgg

SEQ ID NO: 516525 - DNA, 201 bp, Homo sapiens
agcaggtgtgggatgggccagactaccctccacatggattgaagacacacaagggcacctccatttcaaaggaccggaagtctggagtgagtggggatttrgcttaacgtctgctcaggagaaaaagacgtgtaggttagaggggaccacaggctcaagctcagcatgttaaaaggtttttagcgtgtgtggcttttagcg

SEQ ID NO: 516526 - DNA, 201 bp, Homo sapiens
agcttaacgtctgctcaggagaaaaagacgtgtaggttagaggggaccacaggctcaagctcagcatgttaaaaggtttttagcgtgtgtggcttttagcktgtgtgtgtgtgtgtgtgtgtgtgtgtgcgtgcagttgcggtctcgctctgttgcccaggctggtctccacctcctgggctcacgcagtcctcccagcac

SEQ ID NO: 516527 - DNA, 201 bp, Homo sapiens
tcatgcccgagggagaggcggccggggagcaccactctccaccaccgttggactctcaggacgtccccgtctccctctgcagatcatgatgctgccgccaycgccgccaccacggagcgagaagcccagatagacgccccggcggccccgggtcctggagtcccgccgcctgctgcccggccgaggaccccaccccgcctg

SEQ ID NO: 516528 - DNA, 201 bp, Homo sapiens
tttaatttgtattctcccagttttccttcctcagactgctttcctggaacttggctttctttcgtcttaaaatattaagaacctggccgggtgcagtggcwcacgcttgtaatcccagcactttgggaggccgaggcaggcgaatcacgaggtcaggagttcgagaccacctggacaacatggtgaaaccacgtctgtact

SEQ ID NO: 516529 - DNA, 201 bp, Homo sapiens
ccaaaagactgaaaataaacacaagacccgagcgggctcctcacagcagcagaagccgcgtggaagctgcttggctgccacagaaagccgcaccaccctgkccaggcggacaggcctttaaccgccaggtagcagtgaggcccgctcggagcatggggaccctgctttggagccccgcagcccggcctggaggctgtttcc

SEQ ID NO: 516530 - DNA, 201 bp, Homo sapiens
cttctcgtcagctaccaggtgagctgggcccagccgagagctccctcccctgccctctcatgggacctaaggagagggctcagcacaggcatctccattgyggggagcgcttggctggcctagaagctgggagtgcccattttatagctgaggagatggaggccctgggggagcaccttgctgcaggggcagacagagccg

SEQ ID NO: 516531 - DNA, 201 bp, Homo sapiens
ccctcctggggaggcgagcacagcagcagagtgagggatgtggccgtcaccccaggcctggcaggttctggccccacagaggccccacagcagggctggtrgctcacagtcctctgccgtcccacagtgcgtggtcatcgggctgcagtccacgggcgaggcgcgcacgcgggaggtgctgggggagaacgatgggcacct

SEQ ID NO: 516532 - DNA, 201 bp, Homo sapiens
ggccggggcccgggtcgggagccaggagccacagctcaggggcgccttgtgacgtgtcattgcagtgggccgaggccctgaacgtgttccagcaggcggcygactggatcggcctggagtcgcgcaagtccctgtggggccagttctggtcggcacaccagcgcttcttcaagtatctgtgcatcgcagccaaggtgcgcc

SEQ ID NO: 516533 - DNA, 201 bp, Homo sapiens
aggagcagagtgtgcagagccagccagaggaggaggacgaggctgaggaggaggaggcggaggagctggggcacacagagacctacgccgactacgtgccrtccaagtgtgagtggcccggctgcacccagccctgggacaggttcaaacccttttgtgggaccgagaccctgcaggtgaccaccgcccgcacagcccaca

SEQ ID NO: 516534 - DNA, 201 bp, Homo sapiens
gcctccgccgcaagttccaccgggtaggcggccgccgggcgcagctttcgctcgggttgccggccctgaccccgcccaggctcatgcggccctgtgtcccyaggtcaccgcggaggaggccaaggagccctgggagagtggctacgctttgtcgctgacgcactgcagccacagcgcctggtgagggcgggccggggacca

SEQ ID NO: 516535 - DNA, 201 bp, Homo sapiens
tccgtgggggctgaggggctggggtttgcctccaagaagctcctgaaggacctgggtgggccaggcctagagcaggggttgtagggcagcagggcccccakgttcttcgggcctagcctctagccgtgccccagtgcgactcagtggaggtgtctggtgagggaggcatggctgggagccaggcctggcaagtcccttccc

SEQ ID NO: 516536 - DNA, 201 bp, Homo sapiens
ctccagtggggcctcgaggggcctctggctgcggccatgggggtgcaggtgtgttactgagggagtgggttgagcaccccatctcacctcccccccccccrtctccctccagcccgttcatgagctccgcctccttcctcggcagccagccctgcccagacaccagctatgcccccgtggccaccgcctccagcttgccac

SEQ ID NO: 516537 - DNA, 201 bp, Homo sapiens
attttactcctgggatcatctggagagaggcgcccctgggcggggggcccccaggaccttctccttgctgtgtcctttgccatcctcagggtgacagggcrgggggttccgacctgagccctccctggaggacggtgatcctgggtttctgcccgtagcgctctcctccttcgaggcgggagtgaggtgtgggtcaagggg

SEQ ID NO: 516538 - DNA, 201 bp, Homo sapiens
tgggcgttctcaggagtggcgggtcctgggggattgcagagggtgggcgttctcaggagtgggcacagcctgaagtgttgggttgtggggggacttggaartgggccccgggtgcagggtcgccccagcccggcacccacgcatccccttctgtctctggatgggcccgtcctggacagtgcatagtagtgggatcacaca

SEQ ID NO: 516539 - DNA, 201 bp, Homo sapiens
gtgaccgcgtccgtcaagtccgcctccccagtagagtctgtgaggggaccttcctggaaagtagggtctttttggatgtcattgggtagggatcaagatgrgatgaggtagctctgaaatccagcacaagggtcctcagaagagacaggagagattgggagctggcgccacgctggaggccggggctggggcggtgtggcc

SEQ ID NO: 516540 - DNA, 201 bp, Homo sapiens
cccagttttccccactcagggccgtagcagagcggggcaaagccagccggaccctgagtctgtgctggggtgaccgcgtccgtcaagtccgcctccccagyagagtctgtgaggggaccttcctggaaagtagggtctttttggatgtcattgggtagggatcaagatgagatgaggtagctctgaaatccagcacaaggg

SEQ ID NO: 516541 - DNA, 201 bp, Homo sapiens
ttttttgagacagtctcgtgctgtcatctaggctggagtgctgtggtgtgatctcagttcactgcaacctctgcctcttgggtttaagcgattctcccccstcagcctctcgagtagctggaactacaggtgcccgcctccacacccagctaattttgtgtattttttggtagagaacggtgtttctccatgttggccagg

SEQ ID NO: 516542 - DNA, 201 bp, Homo sapiens
gtcatctaggctggagtgctgtggtgtgatctcagttcactgcaacctctgcctcttgggtttaagcgattctcccccgtcagcctctcgagtagctggarctacaggtgcccgcctccacacccagctaattttgtgtattttttggtagagaacggtgtttctccatgttggccaggttggtttcaaactcctgaccgc

SEQ ID NO: 516543 - DNA, 201 bp, Homo sapiens
tccttggtcggggggaggggagcttcctgggcgctgggttccgaccccgtcctcagggcgctgagtctggccagtacacctttccctgtgagagaagcacrtgggctcctggggtatggggcggtgaggctgcagtgccccttccacctccaggcaaccggggccactgccgttcctcgtggggcggggagaacttgctcg

SEQ ID NO: 516544 - DNA, 201 bp, Homo sapiens
cgtcagcctcctgcctctggcaggctcgtatgggtgagaggaagccagatttccaccttgcaggggttgagatccaggctcctgcccccaacagcgtttctttttttttttttgagacggagtctcgctctttcacccaggctggagtgcagtggcccgatctcggctcactgcaagcgccgcctcccgggttcatgccat

SEQ ID NO: 516545 - DNA, 201 bp, Homo sapiens
ctgcccgcccgccccccatggtagccggctgccactccgacctgggcttccctcgtggagttctcagccgcacaggcgtttgccccccaccaggaaggtgsggtcttgggtggtcaggacctgggctcctggggtcgcccccgtccttcagaatactccttaacccacgtgtgcctcagatcgtgttcgacgagtgtcaca

SEQ ID NO: 516546 - DNA, 201 bp, Homo sapiens
agggatctgaagtctgggatctggggtctgagatctgggatctgggatctgaggtctgggttctgggatctggggtctggttccccagatgtggtttcttyctaaaaggcatcggcctcacattcctggcttgggactcttgctctgtccaagggtacgggactgagtgccagcaaccaccactactccacttggctctga

SEQ ID NO: 516547 - DNA, 201 bp, Homo sapiens
gcggcatgtacatcgcacgccagctcagcttctccggcgtcaccttccgcatcgaggagatcccgctggccccagccttcgagtgcgtctacaaccgcgcrgccctgctggtgagcctgcgcacccgacccggggacccctgtgcgtttcccgggtgaaattgctcccccgtggccttgcagatgccacaggcgtcatcag

SEQ ID NO: 516548 - DNA, 201 bp, Homo sapiens
tagccaggctggtctcgatctcctgacctcgtgatccacccgccttggcctcccaaagtgctgggattacaggcgtgagccaccgcggctggccccccccyctttttttttttttttttgaggattttcgttcttgttgcccaggctggagtgcggtggtaggatcttggctcactgtctcctccaactcccgggttcaag

SEQ ID NO: 516549 - DNA, 201 bp, Homo sapiens
tccccctggccctgtggcttccactttcggggttggcttgggatgaagcaccaaggcccctccccagggcctcctttattccctttccaggcctgcattcrgcaccgtgctgaccatgcctggtggggctgtggggtcagctgagcagccctgacctggtggagctcctgacggcggggtcagatgtcaggcagggccacg

SEQ ID NO: 516550 - DNA, 201 bp, Homo sapiens
ctgcattcggcaccgtgctgaccatgcctggtggggctgtggggtcagctgagcagccctgacctggtggagctcctgacggcggggtcagatgtcaggcrgggccacgctcaactccgggtcctccctcgcatggcgggggctgctgcgcaggggttgctggatcctacctgttgggcgtgtgaccctggctcgggctgg

SEQ ID NO: 516551 - DNA, 201 bp, Homo sapiens
tggagtctgggccgcccctccagctgccctgcgacctctctcgctcaggcctgcctgggactcagtgacctcggcttggcccctcggccgcagggtttacrgtggggcagtaggagcccagagatgtggcttggttttggggaagagccagtgactggcccttcgtgtcagcagtgagccccgcccagcccttggggtccc

SEQ ID NO: 516552 - DNA, 201 bp, Homo sapiens
ctgctgcgcaggggttgctggatcctacctgttgggcgtgtgaccctggctcgggctggacgccttgtttgcttcagggcagtggagtcttgacctcctcsgggcacaccctgtggaagacccacagtgccgccgctgcctcctcctcctcctcctcctgttcctcctcctcctcctgttcctcctcctcctcctcctgtg

SEQ ID NO: 516553 - DNA, 201 bp, Homo sapiens
ggtactgcagggaaggcagggttggggggcggggcaggggcaggggtctagggagggccggatctaagagcctgggggagggggtagatgggggctggagracgtggggctcagtggtctggaggagggccgggtctaggacccccaggggggaagggggcttctaggggctcagggaggtggcatccaggggtctggggg

SEQ ID NO: 516554 - DNA, 201 bp, Homo sapiens
ctcctggggaggcgagcacagcagcagagtgagggatgtggccgtcaccccaggcctggcaggttctggccccacagaggccccacagcagggctggtggmtcacagtcctctgccgtcccacagtgcgtggtcatcgggctgcagtccacgggcgaggcgcgcacgcgggaggtgctgggggagaacgatgggcacctca

SEQ ID NO: 516555 - DNA, 201 bp, Homo sapiens
ccccgtccttcagaatactccttaacccacgtgtgcctcagatcgtgttcgacgagtgtcacaaagccaagaatgccggctccaccaagatgggcaaggcygtgctagacctgcagaacaagctgcccctggcccgcgtggtctacgccagcgccacaggtggggcggtgcggatcccacgtgacccacccgcagcagcgt

SEQ ID NO: 516556 - DNA, 201 bp, Homo sapiens
gcccaggctggccagccacctgtgggtcaggattccagtccaggctgagcagccacctctgggtcaggattccagcctgaggctcccccggcctcctggcrgtcaccacccaccccaggttgtagccctcagtccagcccacctgagcccagctgctgctatggtgcccactttacagatgggggaaactgaggcccagag

SEQ ID NO: 516557 - DNA, 201 bp, Homo sapiens
cttgctctgtcctgctgcgtctcctccacctgctcctccaccttgctgcggtctggccctcggtgaccctgtccttccctgcagggcgacctcggggacgmggggccaaagccccccggctggcgtgcgagacagcgggcgtcatccgcatcagtgacgacagcagcacggagtcggaccctggcctggacagcgacttca

SEQ ID NO: 516558 - DNA, 201 bp, Homo sapiens
ctcctgagtagcagacgtgagctcccccctgcccgacttgactttaacttttcaaactgttttagaatgacagaaaagctgcagggacagtgcagagagtycccgtgcacccactcccgggctccctgctgttctatctcccgtctgtggctgtcacggctgatgaaccaacatccgtacgccaccgttaactcctgaggc

SEQ ID NO: 516559 - DNA, 201 bp, Homo sapiens
cacgggctctggccgtgctcacgggggctgtgtccatccgcaggggcgttggcgccatggagatcgtggccatggacatgaaggtcagcggcatgtacatygcacgccagctcagcttctccggcgtcaccttccgcatcgaggagatcccgctggccccagccttcgagtgcgtctacaaccgcgcggccctgctggtga

SEQ ID NO: 516560 - DNA, 201 bp, Homo sapiens
agacccgggctctggagcccctgtggctggtggcccggcttcctgcaagccacttgcacggggtcttctcacgggtgcaggagctcagggtgcccaggctgccggcctctgtgcaggggaggagctgtgggcttttgctgataaacttattttatgcaaaagctggaggagcggggcagcggtcaccccgagggctttgcc

SEQ ID NO: 516561 - DNA, 201 bp, Homo sapiens
cgtccctcagggttgccccgggccccttgtccttgccctccaggggccagccttgagttaggtgggccctagaaggcagccaacatgtcctgccctgaccytccacctcctccctaggacccctgtgcctcctgcagagagacccgcatggccccggggtcctggagcgggtggagcggctgaagcaggatctgctggaca

SEQ ID NO: 516562 - DNA, 201 bp, Homo sapiens
ggaaagtagggtctttttggatgtcattgggtagggatcaagatgagatgaggtagctctgaaatccagcacaagggtcctcagaagagacaggagagatkgggagctggcgccacgctggaggccggggctggggcggtgtggccacaggtcagtttctcctggagccccagggctggaagaggtgggtcagagctgtgg

SEQ ID NO: 516563 - DNA, 201 bp, Homo sapiens
ttggctcactgcaacctccgcttcccaggttcaagcgattttcctgcctcagcctcccgagcagctgagaccacaggcatgcaccaccatgcctggctaatttttttttttttttttttggtagagacagggtttctccatgttggtcaggctggtctcaaactcctgacctgtggtgatccgcccgcctcagcctcccaa

SEQ ID NO: 516564 - DNA, 201 bp, Homo sapiens
tcgccggaggccccatcctcggtgtgtgttgtttagagtctgggaggagccatcccaggccacacccatctaatggtcgtgtgggggccgcctgcccgccygccccccatggtagccggctgccactccgacctgggcttccctcgtggagttctcagccgcacaggcgtttgccccccaccaggaaggtggggtcttggg

SEQ ID NO: 516565 - DNA, 201 bp, Homo sapiens
tgtatcactgcactccagcgtgggtgacagagcaagaccctgtctcaaaaaaacaaacaaaaaagaaaacaggttccaggtatcctcctccgatggcaacrtcctgcgatatcatggtttagggatcccacccttcctcgccggaggccccatcctcggtgtgtgttgtttagagtctgggaggagccatcccaggccaca

SEQ ID NO: 516566 - DNA, 201 bp, Homo sapiens
gccctgtgggtaccacacaagtgaccatcatcattcaccacagggctccggcttggtttcttggttctgataagtgggatgagtgaccatagatgtggtcstgatgtttgccatgatgccgtgggcagagggtggccactgagctgctccccaagtcaggaaggtgccaaccccagctgatagtgtggtgggcacagttca

SEQ ID NO: 516567 - DNA, 201 bp, Homo sapiens
aagggctggaggccactggagctcactaccctggatgtggccacccagcccccagctttgctcagggtttaggactccggatagaagacttttctggtccygggaggctggccctgtgggtaccacacaagtgaccatcatcattcaccacagggctccggcttggtttcttggttctgataagtgggatgagtgaccata

SEQ ID NO: 516568 - DNA, 201 bp, Homo sapiens
gtggggctggggaagggctggaggccactggagctcactaccctggatgtggccacccagcccccagctttgctcagggtttaggactccggatagaagayttttctggtcctgggaggctggccctgtgggtaccacacaagtgaccatcatcattcaccacagggctccggcttggtttcttggttctgataagtggga

SEQ ID NO: 516569 - DNA, 201 bp, Homo sapiens
ccgagaccctgcaggtgaccaccgcccgcacagcccacagagggaatgtgaagcttcagggagggccggagagcccggggacaggttctacaatccaggcktatacaaaaccggggttcgcagaggggagaagtggaaaggaacctcagaggcactgggaggatttttatgcatttgcccctcctgcaagccgctggccac

SEQ ID NO: 516570 - DNA, 201 bp, Homo sapiens
cacccctgggtcactcagctgcccatggtcagcctggcccctgcccctgggggagcccagtgcccgcggccgctcaggcctgcagtctccgctgagctccygccacgcacgcaggagcagagtgtgcagagccagccagaggaggaggacgaggctgaggaggaggaggcggaggagctggggcacacagagacctacgcc

SEQ ID NO: 516571 - DNA, 201 bp, Homo sapiens
gaggcgaggacggggcagtggggagcctccctctggtggccaggctgcgagggcccaccagctgtgacctgtcccgtctggcccgggctgacatcctgctycccttccagctgttccagctcagcaggccgtttgcaggcttcgaggactttctgccctcccacagcaccccgcttctcgtcagctaccaggtgagctggg

SEQ ID NO: 516572 - DNA, 201 bp, Homo sapiens
aggctccgggcagtccttctccccagggtggggccgcagtgggatgtgttctctggtcactacagtggcaggcatccttgccccatctctcacagaggagstgctgccctcgaggggcctcagggactgcacccacgggggttcttggagagtgcagggctgccctgggccacccaccctgtgtgctgggagccatcgggt

SEQ ID NO: 516573 - DNA, 201 bp, Homo sapiens
tctagccgtgccccagtgcgactcagtggaggtgtctggtgagggaggcatggctgggagccaggcctggcaagtcccttccccaatccgggcctgtccasgagagaagcttctagactttgggagcagacgttggacatgtctctgggactgagcgccttccggtgagggcccatgccagcctccgcacgctcccggcac

SEQ ID NO: 516574 - DNA, 201 bp, Homo sapiens
tcagtgttggcgtctggacagtgggcatgacgacgggccacaccaccccccgacccacccgttcacaggctttacacgcccagtcagttcggagacccctsggtgggccacagactcatccagaggcccagcacacctgtctgccaaggcctggggtcagctccccgaggacagtgtcactgcccaccctggtgaatctgc

SEQ ID NO: 516575 - DNA, 201 bp, Homo sapiens
gccttgggtggggtcttgtgcaggtggggaaactgaggcacggggcagttaaatgactccccaggagataccagcaggggcgggatgggaccctgactgcrgggcctccctagcctctcggcctgtcaccctgcccggagggcttagccgggctgcaccgcaggtcctctgcttcccactcactgatgcccgctgtctctt

SEQ ID NO: 516576 - DNA, 201 bp, Homo sapiens
cttctttattttctttctttcttttctgtctctgtttttctctagttttttgttttgttttgagatggagttttgcttttggtgtctaagctggagtgcartggtgtgatctatctcggctcatggcaaactctgcctcccaggttcaagcgattctcctgtctcagcctcctgagtagctgggattacagacgcgcacca

SEQ ID NO: 516577 - DNA, 201 bp, Homo sapiens
ggccctggccctggccctaggctgcagctgctccccagccccccagggagctgctggtctctggaaaaggagctaggggcttcgagggaggggcaggggtrggaagaccagcatgtgaggcccctctccccgcagacatgaagcagggcctgctgtctgtgggcattggtggccgggagtcccggaatggctgcctggacg

SEQ ID NO: 516578 - DNA, 201 bp, Homo sapiens
gattacacggggattacaggcttcaaactttcttccaggcctcttcctccgggccagggcagccggcactgcttcctgactgaggggtgctgtgctgtttygggtgccctccctgggatgtctctccctgactcggccctggaagaggagcagcggggacatgggacccagagagtttgtggcaggcccagcaggtgccgt

SEQ ID NO: 516579 - DNA, 201 bp, Homo sapiens
cccaatgtgaggtcccatcaggtgtctgccccgcggtgtctaggcccctgtgatgcgccagggtcctcacagtgcgggcaagagtgtggccgcgggcgggytcgcggcccggggttgccccagcaagtgcatcattgacacttggttttctaccaaagcgagaacgttcttttcccaggacgctaccacttgttcctgccc

SEQ ID NO: 516580 - DNA, 201 bp, Homo sapiens
ggccctggggagcgaggatggggaggcgaggacggggcagtggggagcctccctctggtggccaggctgcgagggcccaccagctgtgacctgtcccgtcyggcccgggctgacatcctgctccccttccagctgttccagctcagcaggccgtttgcaggcttcgaggactttctgccctcccacagcaccccgcttctc

SEQ ID NO: 516581 - DNA, 201 bp, Homo sapiens
tgagtagcagacgtgagctcccccctgcccgacttgactttaacttttcaaactgttttagaatgacagaaaagctgcagggacagtgcagagagtccccrtgcacccactcccgggctccctgctgttctatctcccgtctgtggctgtcacggctgatgaaccaacatccgtacgccaccgttaactcctgaggcccac

SEQ ID NO: 516582 - DNA, 201 bp, Homo sapiens
gggaaggggcgggaggttttctggggtgaaggagggtgggaaggggcgggaggttttctggggtgaaggagggtgggaaggggcgggaggttttctggggkgaaggagggtgggaaggggcgggaggttttctggggtgggtgaaggagggtgggaagggcacttttcccacagagggcagcagctgggctgggttctgca

SEQ ID NO: 516583 - DNA, 201 bp, Homo sapiens
caccgttaactcctgaggcccacgctttgcttggattgcctcagtttcccccatgtcctttcctgcccaggaccccacgtggtgtttaggcgtctcctcargcccctctgggctgtgatggtttctcagaggcccgtgtttcagatgcgttgggcggtcctggggctggtcgggtggtgtggatgccctggagtagtcggg

SEQ ID NO: 516584 - DNA, 201 bp, Homo sapiens
ctgctgtctgtgggcattggtggccgggagtcccggaatggctgcctggacgtggagaagggtgagtgccccacacccaggcccagaggcgctcctgtctytcatctcatgcaaccttggcctcgggtggtgagcaaagcagggagagggattcccagcgcagcctgaggcttggctccctcccctaccagactgttccat

SEQ ID NO: 516585 - DNA, 201 bp, Homo sapiens
gctgccagccctgctggagagaagcttctggagggagagcctggggagcctggcgggagggaaggaggccctggggacggcggccacccctctcccaagcrcaggagctggccaagggggccggagtggggaagggcagagaagcctccctgccagccacattttactcctgggatcatctggagagaggcgcccctgggc

SEQ ID NO: 516586 - DNA, 201 bp, Homo sapiens
cagagaagcctccctgccagccacattttactcctgggatcatctggagagaggcgcccctgggcggggggcccccaggaccttctccttgctgtgtcctytgccatcctcagggtgacagggcggggggttccgacctgagccctccctggaggacggtgatcctgggtttctgcccgtagcgctctcctccttcgaggc

SEQ ID NO: 516587 - DNA, 201 bp, Homo sapiens
ccagccctgggtcagcctgtccttgccccgcccccttcttctctttcaccccttctctgcctctttctgtgtgttccttctctctttcctttctttctttytttttttttttttttgagacagagttttgctcttgttgctcaggctggagtgcaatggcacgatcttggctcactgcaacctccgcttcccaggttcaag

SEQ ID NO: 516588 - DNA, 201 bp, Homo sapiens
cccggccccggcccacccgacggggtccacgggcacttgccccgctccgagtgcccggggtcacgtcgtgcggaatgctgccccagtggacgcggcgtgayctccacctgaccttcctggcccggagcccggctccacccgcccccgtgggccctggagaagggtccccatggggatgtgaatgggaggctactcatggcc

SEQ ID NO: 516589 - DNA, 201 bp, Homo sapiens
ctcagtgttggcgtctggacagtgggcatgacgacgggccacaccaccccccgacccacccgttcacaggctttacacgcccagtcagttcggagaccccygggtgggccacagactcatccagaggcccagcacacctgtctgccaaggcctggggtcagctccccgaggacagtgtcactgcccaccctggtgaatctg

SEQ ID NO: 516590 - DNA, 201 bp, Homo sapiens
gccagccagaggaggaggacgaggctgaggaggaggaggcggaggagctggggcacacagagacctacgccgactacgtgccgtccaagtgtgagtggccyggctgcacccagccctgggacaggttcaaacccttttgtgggaccgagaccctgcaggtgaccaccgcccgcacagcccacagagggaatgtgaagcttc

SEQ ID NO: 516591 - DNA, 201 bp, Homo sapiens
ccccactgtcccccactgccccccgctgtccccatctccccgctgtctccctgttgtcaccccgtcccttgctgtccccccgctgtcccatccgccgctgyccccccactatcccccactgtttccctactgtccccctgctgtccccccaccatcccccgctgtccccccactgccccccactgtcccctgctgtccctc

SEQ ID NO: 516592 - DNA, 201 bp, Homo sapiens
ccatcccccagccatccgtcccggggtccacactgtctcagtgttggcgtctggacagtgggcatgacgacgggccacaccaccccccgacccacccgttyacaggctttacacgcccagtcagttcggagacccctgggtgggccacagactcatccagaggcccagcacacctgtctgccaaggcctggggtcagctcc

SEQ ID NO: 516593 - DNA, 201 bp, Homo sapiens
ccctctatgctccatctctctgtctccctctcagtctctgtctctgtctccctctttgtctctgtctccctctctgtctctgtctctctgtctctgtctcyatctccgcctctgtctctctgtctccctctctgtctctgtctgtgtctccctctctgcttgtctctgcccctgtctctctgtctccctctctgtctctgt

SEQ ID NO: 516594 - DNA, 201 bp, Homo sapiens
cctctatgctccatctctctgtctccctctcagtctctgtctctgtctccctctttgtctctgtctccctctctgtctctgtctctctgtctctgtctccrtctccgcctctgtctctctgtctccctctctgtctctgtctgtgtctccctctctgcttgtctctgcccctgtctctctgtctccctctctgtctctgtc

SEQ ID NO: 516595 - DNA, 201 bp, Homo sapiens
ccgtggactccctgtcggacatcgtggacacgcccgacttcctgccggctgacagcctcaaccaggtgtccaccatctgggacgataaccctgccccctcsacccacgataaggtcagtgcgcccggtgcccccagccagccccgacccaccagcgtggcctccccagcccgggacccacacggtccagtgaggtctcagt

SEQ ID NO: 516596 - DNA, 201 bp, Homo sapiens
acacttttggatgccgaagcaggcagatcacttgaggtcaggagttcaaaaccaggctggccaacatggtgaaaccccgtccctagtaaaaatacaaaaamattagctgggcatggtggcgcacacctgtaatccctgctacttgggaggatgaggcaggagaattgcttgaacctgggagggccgtggtgtctcccattc

SEQ ID NO: 516597 - DNA, 201 bp, Homo sapiens
ggaggggccttggtgtctcccgtaccaccctcaccgggcctggccttgtcttccaggactcctcctattttgaggacttctccaacatctccatcttctcytcgtccgtggactccctgtcggacatcgtggacacgcccgacttcctgccggctgacagcctcaaccaggtgtccaccatctgggacgataaccctgccc

SEQ ID NO: 516598 - DNA, 201 bp, Homo sapiens
gggaggctgaggcaggggaatcgcttgaacctgagaggtggagattgcagtgagccgagatcatgccactgcactccaacttgggtgacagaaaaaactcttgtctcaaaaaaattaataaaaataaaatattggctaggtgcagtgggtcacgcctgttgtaatcccagcactttggaaggctgaggcgggcaaatcacc

SEQ ID NO: 516599 - DNA, 201 bp, Homo sapiens
tacttgggaggatgaggcaggagaattgcttgaacctgggagggccgtggtgtctcccattcccacatgctccagtgtgtggagggccgtggtgtctcccrtccccacgtgctccagtgcgtggaggggccttggtgtctcccgtaccaccctcaccgggcctggccttgtcttccaggactcctcctattttgaggactt

SEQ ID NO: 516600 - DNA, 201 bp, Homo sapiens
gctgggcatggtggcgcacacctgtaatccctgctacttgggaggatgaggcaggagaattgcttgaacctgggagggccgtggtgtctcccattcccacrtgctccagtgtgtggagggccgtggtgtctcccatccccacgtgctccagtgcgtggaggggccttggtgtctcccgtaccaccctcaccgggcctggcc

SEQ ID NO: 516601 - DNA, 201 bp, Homo sapiens
ctgcagtctggggagaccgaggcccatgcccacctgggcattctgcacgtccgccgggtgccccaaagggggctggtcctgcggcggggcacgggtggggktgcgtgttgacagcgcctgtgggagatccgccccgtacagtaattctcctcgcactgccggtaattgccctgacttacggggccggcatcatttcctgaa

SEQ ID NO: 516602 - DNA, 201 bp, Homo sapiens
tcctcttcgccacctactccgccctgattggggagagccaggccggcggccagcaccgcactcgcctccggcagatcctggactggtgtggggaggccttygagggcgtcgtatcctgctgggggcaatcgggaggggagggctggattagggggtcggagggaaaaggaggatggaggagtgggagaggaggggtgggag

SEQ ID NO: 516603 - DNA, 201 bp, Homo sapiens
tgggtttaagcgattctcccccgtcagcctctcgagtagctggaactacaggtgcccgcctccacacccagctaattttgtgtattttttggtagagaacrgtgtttctccatgttggccaggttggtttcaaactcctgaccgcaagtgatctgcccgcctcggcctcccacagtgctgggatgacaggcgtgagccacg

SEQ ID NO: 516604 - DNA, 201 bp, Homo sapiens
tgagcccagctgctgctatggtgcccactttacagatgggggaaactgaggcccagagaggggaggtcaggggttataccactggtcagaggcagagctgrggcttggggctgggcagtccctacccctgtggaggcagtgaggtcacagtgtttggtccgcgacaggaggcttagtctcgccccagctggtctcagggag

SEQ ID NO: 516605 - DNA, 201 bp, Homo sapiens
ggggactttgcttcggcggcaggggcttctcggggacctcagcctgcaggggtggggtggggagagccccaggggggcgcagcagggcctgaggtgcgctyggcatgcgtggggtgctgggtgaagggaggcggtcttggccgcagtttccctgcctgtggtttgggggcaccaggaacagcagctggtccccgtggaacg

SEQ ID NO: 516606 - DNA, 201 bp, Homo sapiens
agagccagccagaggaggaggacgaggctgaggaggaggaggcggaggagctggggcacacagagacctacgccgactacgtgccgtccaagtgtgagtgrcccggctgcacccagccctgggacaggttcaaacccttttgtgggaccgagaccctgcaggtgaccaccgcccgcacagcccacagagggaatgtgaagc

SEQ ID NO: 516607 - DNA, 201 bp, Homo sapiens
ggaggctgaggcaggggaatcgcttgaacctgagaggtggagattgcagtgagccgagatcatgccactgcactccaacttgggtgacagaaaaaactcttgtctcaaaaaaattaataaaaataaaatattggctaggtgcagtgggtcacgcctgttgtaatcccagcactttggaaggctgaggcgggcaaatcacct

SEQ ID NO: 516608 - DNA, 201 bp, Homo sapiens
tgggcaacagagtgaaactccatctcaaaaataaataaataagccaggcgtggtggttcacgcctataatcccagcactttgggaggctgaggcaggtggmtcacgaggtcaggagatcgacaccatcctggccaacatggtgaaaccccatctctactaaaatacaaaagattagccaggcgtggtggtgggcgcctgta

SEQ ID NO: 516609 - DNA, 201 bp, Homo sapiens
ggagtgcagtggtgtgatcataacttactgcagcttccacctctctagctcaagtgattctcctgccatggcctcctgagcagctgggaccacaggtgccygccaccatgcgcagctggtttttgtattttttgtggagatgggatctcactatgttgcccaggctggtcttgaacttcctgggctcaagctgtttgccca

SEQ ID NO: 516610 - DNA, 201 bp, Homo sapiens
ctgggcgcggggcgccggaggtgggtggggtagtgcccagcaggtccctaggcggcgcacccctatcctcagtctgacctgctccagggaccctgggctgygctgtcacattggggcctggggagcaagtcggagtctgtgcttgttctttctgtttcgttgctttccaggtcttttaaaaactgagacaaaattcacata

SEQ ID NO: 516611 - DNA, 201 bp, Homo sapiens
agtttcctggggagccgtgccagcctcccagggctgctgtgaggaagcagcacacacagcttcaaaggccaggactctgtcccctcccagccctggagccyggaagtccaaagtcaaggtgcggacagggccgcgctccttccggcccctccagcatctgggggatccgggcatcccctggctgtggccgcagggctggga

SEQ ID NO: 516612 - DNA, 201 bp, Homo sapiens
agagcccacccagcgcctccagggacgccgggcacggatggtgctggggcagggacggtgggtgtctccctggatgaactgattaacattctgaaaagttaaaaaaaaaaaaaaaaatctctaaaatgtgtagccggggcctcccctggctgcttcttcccggaatgcctgttgttcccgcctgctcagaacgtccttcct

SEQ ID NO: 516613 - DNA, 201 bp, Homo sapiens
gggcctgggcaggtgcaggaggggccggcagagccgcccacagacagccttagagagggagactcagcaggaagctgtgcgccagggttcggccctgcccrgctgcagcaccagaagacactgaggcggcggccccagggcccataccaggcacctggccggaaccctgacagaagggagcccagtttcctggggagccgt

SEQ ID NO: 516614 - DNA, 201 bp, Homo sapiens
tacgtacgcacgtgcattctgtgtgtgcgtcgtacggacgtgtgcgcgttctgtgtgtgtgttgtacggatgtgggtgcgttgtgtgtgtgtgaatgtgcrtgcctgtggctgtgtgctcctgtgcatgtgtgtgttgctcgtgtgtttcatacgcgtgtgttttatgggtgcacattgtgtgcgtgtctgtgcatccgtg

SEQ ID NO: 516615 - DNA, 201 bp, Homo sapiens
ggccccactgtgtctgtctgtgatggaggcgtggagggccccactgtgtctgtctgtgtgtccgtgatggacgcttgtgctgcttccacccgtggccgtcrtgagttgtgccgccgtgagcacgggtgcaaacttcccagtggacacgttttcgtttctcttgggctcatacccaggagtaggtatgggttgacagcagct

SEQ ID NO: 516616 - DNA, 201 bp, Homo sapiens
gcgtgtctgtgcatccgtgtttgtgtgttgtgtgtgcctgtgcacccgtgtttgtgttgtgtgtgtgcctgtgtgtacccatgttcatgagtcggttatgygtgtctgtattttgtgtgttgcccgtgcctgtgtgcctgtcctcgtatgttgtgtgtgtgtattttggtggttgtgtgtattttgtgtgtgtgctcatgt

SEQ ID NO: 516617 - DNA, 201 bp, Homo sapiens
ccactgtttttgttcatgatagacgcgtggaggtaccaggtaccacagtgtctgtctgtgatggacgcgtggaggggcccactgtgtctgtccatgtgtcygtgatggacctgtggagggccccactgtgtctgtctgtgatggacgcgtggaggacccactgtgtctgtccgtgatggacgcatggagggccccactgtg

SEQ ID NO: 516618 - DNA, 201 bp, Homo sapiens
tgcatccgtgtttgtgtgttgtgtgtgcctgtgcacccgtgtttgtgttgtgtgtgtgcctgtgtgtacccatgttcatgagtcggttatgtgtgtctgtrttttgtgtgttgcccgtgcctgtgtgcctgtcctcgtatgttgtgtgtgtgtattttggtggttgtgtgtattttgtgtgtgtgctcatgttatgtgtgt

SEQ ID NO: 516619 - DNA, 201 bp, Homo sapiens
tgctcgtgcaaacgtgtactttgtgtgcatgttgtgtgtgcccgcatgttgcctgtgcacctgtgtccgttatgcacgtgtccgttgtgtgtgttgtgtgygtgctgcgtgttctcatgcacccctgcttgtgcatgtcttgtgcacgtgtgttttgtatgtgtgcgtgtgttgtgtgcacgtgtgtggcctgtccctgtg

SEQ ID NO: 516620 - DNA, 201 bp, Homo sapiens
tcttctccagggtgtgtcttctccagagtgcctctccgttggttttgtctggggttgtctcctgactggatggaggaatccctcagacggcaccatgtacrgtgcggcgtggaccggagtgcctggcgttgcgcgtgttgtgctgatgctggtaactttggccgcttggcggggacggggttccttcaccatccatttcct

SEQ ID NO: 516621 - DNA, 201 bp, Homo sapiens
acgtgtaggttagaggggaccacaggctcaagctcagcatgttaaaaggtttttagcgtgtgtggcttttagcgtgtgtgtgtgtgtgtgtgtgtgtgtgygcgtgcagttgcggtctcgctctgttgcccaggctggtctccacctcctgggctcacgcagtcctcccagcactgggattacagccacgggccaccgcac

SEQ ID NO: 516622 - DNA, 201 bp, Homo sapiens
cccacccgcagcagcgtctttctgcctggctgtccccgcgaaggggtatcccacacgcgtactcagcctccgtctgcaccctgctcctcctcggacactgrggcacctctgcgcctgtcccaaggccacgctggctctcttcaggcccatggctccaaccccgcagggcccctcgtcgggcggtcccaacttagtcgtccc

SEQ ID NO: 516623 - DNA, 201 bp, Homo sapiens
agatgggcaaggctgtgctagacctgcagaacaagctgcccctggcccgcgtggtctacgccagcgccacaggtggggcggtgcggatcccacgtgacccmcccgcagcagcgtctttctgcctggctgtccccgcgaaggggtatcccacacgcgtactcagcctccgtctgcaccctgctcctcctcggacactggggc

SEQ ID NO: 516624 - DNA, 201 bp, Homo sapiens
ggcttatacaaaaccggggttcgcagaggggagaagtggaaaggaacctcagaggcactgggaggatttttatgcatttgcccctcctgcaagccgctggycacgcccccaaccaacccagcaggccgcggccacacccccgacccggccagccctgaccactcctccacccaggcattcctggccacgcccatgacccgc

SEQ ID NO: 516625 - DNA, 201 bp, Homo sapiens
gattcccagcgcagcctgaggcttggctccctcccctaccagactgttccatcaccaagttcctgaaccgcatcctggggctggaggtgcacaagcagaaygccctgttccagtacttctcagacaccttcgaccacctcatcgagatggacaagcgggagggcaaatacgacatgggcatcctgggtgagcacaggtgcc

SEQ ID NO: 516626 - DNA, 201 bp, Homo sapiens
ttccctgacccctaagttattgcccgctcacctctcccaggccccaggccgcggagctggcagggtggcgcctgcggtttctatgtatttatagcaagttytgatgtacatatgtaaaggacttttttaaatatatgtgccttttgcctacttcccacggagtctgctcctcagcctgtgggacagggagggaagggcagg

SEQ ID NO: 516627 - DNA, 201 bp, Homo sapiens
ccatggggtggggacatcggctcctggcgagggtgttgggtaagcctggcctggagtcagacccaccagagattcggccaacctggagccactcacgcctscactgacctcgggctgagcctccaggccactggtcaccatttcccaaagcaggctccccgcaccccagccccgtgcagcttctgagaagtcagggccccg

SEQ ID NO: 516628 - DNA, 201 bp, Homo sapiens
atctcggaaacacaccctggggactaatccaggagggaggggaagacagagcggcactatttatagtggcaggaaactggaatctccccagaggctctacrgtggggaaataattaagcgaattatgggatgtggagacagaggagccatcttcaaggatccgagcgggagcaggaaggtgttagcagtgacagtcgggga

SEQ ID NO: 516629 - DNA, 201 bp, Homo sapiens
cctgtggggcgaacatcacagacacccctcggcagtccatcctcagagggctttgggcagcttcctgccatgttctgaccgtccagagggggctctgagcyggggccagggtacccctctcgtagcagggtccctgttgcggcccagacccctcctgtccccctccctagttcctgagtcccttggggttgaggctggatc

SEQ ID NO: 516630 - DNA, 201 bp, Homo sapiens
ccccgctccgagtgcccggggtcacgtcgtgcggaatgctgccccagtggacgcggcgtgatctccacctgaccttcctggcccggagcccggctccaccygcccccgtgggccctggagaagggtccccatggggatgtgaatgggaggctactcatggccccagcttttcaagaagcacatttgaggagattctccctg

SEQ ID NO: 516631 - DNA, 201 bp, Homo sapiens
aaggattggccaagaccccagatcccagcgggcctgtcccttcccctaaagggccgttctggcaagggtgtcgcaggtccccgtgggcagctggaagggcygccaagggtcccagctctggtggcagtgggttgtagcgtcctgactgcagggagcaggcagaggccgcggacagttgggacggcctggcagggtgacccc

SEQ ID NO: 516632 - DNA, 201 bp, Homo sapiens
gtttctttttttttttttgagacggagtctcgctctttcacccaggctggagtgcagtggcccgatctcggctcactgcaagcgccgcctcccgggttcaygccattctcctgcctcggcctcccgagtagctgggactacaggcacccgccaccacgcctggataattttttgtattttttagtagagacggggtttcac

SEQ ID NO: 516633 - DNA, 201 bp, Homo sapiens
tggggcggcggttgcagctgcaagtggggtcacggctgcaggtggggtcgcggctgcaggtggggtcacggctgcaggtggggtcgcggctgtggggcggyggtcacagctgcaggaggccatcacggctgtgaggtcaccggaggccgcaagtccgctctgtcttatggccgtggctctgtgcggggttcccgggacacc

SEQ ID NO: 516634 - DNA, 201 bp, Homo sapiens
tcatctaggctggagtgctgtggtgtgatctcagttcactgcaacctctgcctcttgggtttaagcgattctcccccgtcagcctctcgagtagctggaaytacaggtgcccgcctccacacccagctaattttgtgtattttttggtagagaacggtgtttctccatgttggccaggttggtttcaaactcctgaccgca

SEQ ID NO: 516635 - DNA, 201 bp, Homo sapiens
caccacgcctggataattttttgtattttttagtagagacggggtttcaccgtgttagccaggctggtctcgatctcctgacctcgtgatccacccgcctyggcctcccaaagtgctgggattacaggcgtgagccaccgcggctggcccccccccctttttttttttttttttgaggattttcgttcttgttgcccaggc

SEQ ID NO: 516636 - DNA, 201 bp, Homo sapiens
catattagctgagccttgtgaaatcgccagcccccgccccctgcacccggtcctaggatgcgagttgtgcgcccgccaggtagagggtgattgccctgtcytgagcccatctggaggccagtgtgcggtggtcatagctgcaggtggggtcacggctgtggggcggcggttgcagccgcaggtggggtcatggctgcaggt

SEQ ID NO: 516637 - DNA, 201 bp, Homo sapiens
ttagtagagacggggtttcaccgtgttagccaggctggtctcgatctcctgacctcgtgatccacccgccttggcctcccaaagtgctgggattacaggcrtgagccaccgcggctggcccccccccctttttttttttttttttgaggattttcgttcttgttgcccaggctggagtgcggtggtaggatcttggctcac

SEQ ID NO: 516638 - DNA, 201 bp, Homo sapiens
caccgtgttagccaggctggtctcgatctcctgacctcgtgatccacccgccttggcctcccaaagtgctgggattacaggcgtgagccaccgcggctggcccccccccctttttttttttttttttgaggattttcgttcttgttgcccaggctggagtgcggtggtaggatcttggctcactgtctcctccaactcccg

SEQ ID NO: 516639 - DNA, 201 bp, Homo sapiens
agccaggctggtctcgatctcctgacctcgtgatccacccgccttggcctcccaaagtgctgggattacaggcgtgagccaccgcggctggcccccccccytttttttttttttttttgaggattttcgttcttgttgcccaggctggagtgcggtggtaggatcttggctcactgtctcctccaactcccgggttcaagc

SEQ ID NO: 516640 - DNA, 201 bp, Homo sapiens
gccaggctggtctcgatctcctgacctcgtgatccacccgccttggcctcccaaagtgctgggattacaggcgtgagccaccgcggctggccccccccccyttttttttttttttttgaggattttcgttcttgttgcccaggctggagtgcggtggtaggatcttggctcactgtctcctccaactcccgggttcaagcg

SEQ ID NO: 516641 - DNA, 201 bp, Homo sapiens
agccgtctcccacccctgggtcactcagctgcccatggtcagcctggcccctgcccctgggggagcccagtgcccgcggccgctcaggcctgcagtctccrctgagctcccgccacgcacgcaggagcagagtgtgcagagccagccagaggaggaggacgaggctgaggaggaggaggcggaggagctggggcacacaga

SEQ ID NO: 516642 - DNA, 201 bp, Homo sapiens
ccaggctggtctcgatctcctgacctcgtgatccacccgccttggcctcccaaagtgctgggattacaggcgtgagccaccgcggctggcccccccccctttttttttttttttttgaggattttcgttcttgttgcccaggctggagtgcggtggtaggatcttggctcactgtctcctccaactcccgggttcaagcga

SEQ ID NO: 516643 - DNA, 201 bp, Homo sapiens
caccactttcggggcccctggggtgcaggtgtccggcatgttggtcattgtgcaccagtcgaggtgcccttgggagacctggccctgcgccttgtggtaagggggggtccacccggggtccgtgctccctggacgcagcctgggccagtggtgccctggtcctttcacgggtgggctgggctctgagcaggcagcgagccc

SEQ ID NO: 516644 - DNA, 201 bp, Homo sapiens
accactttcggggcccctggggtgcaggtgtccggcatgttggtcattgtgcaccagtcgaggtgcccttgggagacctggccctgcgccttgtggtaagggggggtccacccggggtccgtgctccctggacgcagcctgggccagtggtgccctggtcctttcacgggtgggctgggctctgagcaggcagcgagcccg

SEQ ID NO: 516645 - DNA, 201 bp, Homo sapiens
gcctgtgcccatgtgcccatgcttgcgtgtgttgctcacacatgtattttgtgtgtgtttgtgttgtgggtgcatgtgtatgacctttgcacccgtgctcrtgcaaacgtgtactttgtgtgcatgttgtgtgtgcccgcatgttgcctgtgcacctgtgtccgttatgcacgtgtccgttgtgtgtgttgtgtgcgtgct

SEQ ID NO: 516646 - DNA, 201 bp, Homo sapiens
gacaggcagccggcagacccccacccagcagtgtgtgttgtaggggggccgtggcccctcctggggaggcgagcacagcagcagagtgagggatgtggccrtcaccccaggcctggcaggttctggccccacagaggccccacagcagggctggtggctcacagtcctctgccgtcccacagtgcgtggtcatcgggctgc

SEQ ID NO: 516647 - DNA, 201 bp, Homo sapiens
gcacagcagcagagtgagggatgtggccgtcaccccaggcctggcaggttctggccccacagaggccccacagcagggctggtggctcacagtcctctgcygtcccacagtgcgtggtcatcgggctgcagtccacgggcgaggcgcgcacgcgggaggtgctgggggagaacgatgggcacctcaactgcttcgtctcgg

SEQ ID NO: 516648 - DNA, 201 bp, Homo sapiens
tggaggggcggcggggggtggggaggaggcctcaggcccatcagcccaaggcctggcactgccacgtgtgcttccccagcacccagaggtgctgaatgtgsgtcgctcgtttcactgcctcgggctgcccagcactcccagggaagccagcccctccgcagcccttcctgccccgtccccgccaggctcagctgccaactg

SEQ ID NO: 516649 - DNA, 201 bp, Homo sapiens
agcacacggggagggctgggtgtgtccagctgccgggttgaagcctaaaagcgaggtcaccccaacctggttctcgtcctggcctgcccgctgtccgcccrgcagtgtgggtggactctcagccttgcccctcgcctctgcactctcgcccccaacccccgggaggttggccggcacctgcaccctcgggctgggacgaag

SEQ ID NO: 516650 - DNA, 201 bp, Homo sapiens
cccccaacccccgggaggttggccggcacctgcaccctcgggctgggacgaagagcagactgccagccccgtggtcaccttgcctccctgctgggaggtgyggtcacccgtcacagggcccaggactcaggagagggctcagccctgcgggcgaaggcaaacctggggttctggccaagacggggatttcggatgcgtggg

SEQ ID NO: 516651 - DNA, 201 bp, Homo sapiens
gccagtccacagaagagaagtgggcgtgtggttgcaggggctgtagaggcgggggagtgactgctgttggggacacggctgtgttttgggggagcggaatrttttggaattagaagctgtggtggtctgccttagaatacgttgaaaccgttgagtcatatgctccggacaggtgcccctcctggtgtggattgtatctca

SEQ ID NO: 516652 - DNA, 201 bp, Homo sapiens
cagggcgacctcggggacgcggggccaaagccccccggctggcgtgcgagacagcgggcgtcatccgcatcagtgacgacagcagcacggagtcggacccyggcctggacagcgacttcaactcctcccccgagtccctggtggatgacgacgttgtcatcgttgatgcagtcgggctccccagtgacgaccggggtgagg

SEQ ID NO: 516653 - DNA, 201 bp, Homo sapiens
gcccggtcctgtccgggacccccacagggacccaggggtgcgtccagctcctggagagcaaccccgcctggcctcagctcctcgtgtgagaataaactccrcgtctcactttcagaggcgtgttcctgtcgctaattcagaagcactttccgtccaccaagagaaagcgggacagaggagcgggcagcaagcggaaacgta

SEQ ID NO: 516654 - DNA, 201 bp, Homo sapiens
aataaaagtgtttaacagaaagtaagacctccctgtccttcggaatccccagttgtcaccacagggttgagcacggtgtccccgggaactggtcaggcagccctgcagccagcttgcatcaaggggtgatgggcagctgtcctgtctcaacccgtaggacggcaacagtgatggcatcaccccaccccccgggggcccctc

SEQ ID NO: 516655 - DNA, 201 bp, Homo sapiens
gcaggctcaaggctccgctgccagtggcaggtcttgcgtggaccctgccatggaacgcttagggaagaggaagcaacagacagcctgaaggacacagacgygggtgctgagcgagacccggggggcgggacacggacgcgggtgctgagcgagacccctcccaccttccgttttcagggtctccacggtcccttggggagc

SEQ ID NO: 516656 - DNA, 201 bp, Homo sapiens
gcatgagggggacaggccttgggccacatgggtggcacacaggggccagtcagcctgagggtgcctggtggtccaggcggaggccccgtgagagctcagcrtggcagcgtggccctgaagctcagtcccacggaggcctcagcctggggccgcactcgtgccctgtgccctggctctcctgcggattcccctgggcctctt

SEQ ID NO: 516657 - DNA, 201 bp, Homo sapiens
gctgggccctggctggggtcagcagatcggactggcgggcctggtgccgctgtctcagtgacctgctttgtgactcgtgcccgtgcttcccggagccttgygattgacctccatccccagcaagaacaagcgtccaagtgaaaccgaaagaggcggccttggccttggttccaggccccgctgcgttttgaaagtgatgtg

SEQ ID NO: 516658 - DNA, 201 bp, Homo sapiens
tgccgctgtctcagtgacctgctttgtgactcgtgcccgtgcttcccggagccttgtgattgacctccatccccagcaagaacaagcgtccaagtgaaacygaaagaggcggccttggccttggttccaggccccgctgcgttttgaaagtgatgtgcgccaggttccggaaggcggctcactcgcgtttcctgggagtct

SEQ ID NO: 516659 - DNA, 201 bp, Homo sapiens
ttcgggcctggcgggcagtaaacgtttctggaactgactcacttgctggggaggggcagccagggagggtcacggagaaagtccctgcccgccatggcccyggaccgccgtcggctgcccgtccagcctggagtgaggaggcgtcttcctttgcatgtcaggtaaactgaggaaagctgcctctggggtctgctgcgctcg

SEQ ID NO: 516660 - DNA, 201 bp, Homo sapiens
caaggctccgctgccagtggcaggtcttgcgtggaccctgccatggaacgcttagggaagaggaagcaacagacagcctgaaggacacagacgcgggtgcygagcgagacccggggggcgggacacggacgcgggtgctgagcgagacccctcccaccttccgttttcagggtctccacggtcccttggggagcccattga

SEQ ID NO: 516661 - DNA, 201 bp, Homo sapiens
gaaaaggagctaggggcttcgagggaggggcaggggtgggaagaccagcatgtgaggcccctctccccgcagacatgaagcagggcctgctgtctgtgggyattggtggccgggagtcccggaatggctgcctggacgtggagaagggtgagtgccccacacccaggcccagaggcgctcctgtctctcatctcatgcaac

SEQ ID NO: 516662 - DNA, 201 bp, Homo sapiens
accactgtaggacatagggaagctgagacacgggtggccagactcctgcgaggccacaacactgacggccggttttgtccctgtctcggctgcagatgacsggcaggaaaggccgcgtggtgtccaggcccgacgggacggtggccttcgagtcgcgggcagagcagggtctgtccatcgaccacgtgaacctcagggaga

SEQ ID NO: 516663 - DNA, 201 bp, Homo sapiens
gccccctcccccagctctggtgaggcggctcctgccccacttggaggatgtgggaggggtggggaggttacactgagagggggatactcgagctcctcatycacagcctctgggcccctaaaaggagtgggagcgtgtccccggagcctgctcccgtactcagtggccggctttgctcctggctggccgttcaggagcctg

SEQ ID NO: 516664 - DNA, 201 bp, Homo sapiens
cgccatgctgcactgcccctactggaacaccttctcgctgccgccataccctgccttctccagcgacagccggtgagtaccgggaccctccccgcctggcycccaggcttgctcattctgaagtcacagttacaaacggagttctgggtgcagggcgcgagggcccaaagtcttgttgaggggtttggagggtggtgtgca

SEQ ID NO: 516665 - DNA, 201 bp, Homo sapiens
gctcaggcgcggactctcccggagaacccagaccagggcccaggacagcagtgccttgaccttggccttggagccgtggccgtggagcagccagcccaccyggacctctgacctgctgggcccagagagggcgcgtgggtgtcgttgtcagcagctacgtttgagggaaggtggatcaggccgcactggcgaacctggagt

SEQ ID NO: 516666 - DNA, 201 bp, Homo sapiens
gtttgaggctctgaacaaggtaacactcccttcccggggcgggcgaggccctcgggggcaggggtctgggaggtgggaccccattcaggacggccgggccmcctgccggagcagccggcatctcatcctagagtccgaggccgccaggatctaaaaaaatccccaccccgccccgtccgtctcttctggcagtgagaggga

SEQ ID NO: 516667 - DNA, 201 bp, Homo sapiens
ctggcgaacctggagttcctgcttctgtgatttcgggccctcagttccctcctccaggcgtggagcagcgcctaactgtgcggccattgtcaggacagggygcgtagctccagcagtcagcgctgaagtctcgctctaagcggtcttggagctgccgtcctcaagcccagcccgaagccagaagggactcttcctcctcct

SEQ ID NO: 516668 - DNA, 201 bp, Homo sapiens
tcccttcccggggcgggcgaggccctcgggggcaggggtctgggaggtgggaccccattcaggacggccgggccccctgccggagcagccggcatctcatyctagagtccgaggccgccaggatctaaaaaaatccccaccccgccccgtccgtctcttctggcagtgagagggaatctgccggaaggttccgaggcagag

SEQ ID NO: 516669 - DNA, 201 bp, Homo sapiens
tggcgaacctggagttcctgcttctgtgatttcgggccctcagttccctcctccaggcgtggagcagcgcctaactgtgcggccattgtcaggacagggtrcgtagctccagcagtcagcgctgaagtctcgctctaagcggtcttggagctgccgtcctcaagcccagcccgaagccagaagggactcttcctcctcctc

SEQ ID NO: 516670 - DNA, 201 bp, Homo sapiens
agataccagcaggggcgggatgggaccctgactgcggggcctccctagcctctcggcctgtcaccctgcccggagggcttagccgggctgcaccgcaggtyctctgcttcccactcactgatgcccgctgtctcttctagagcgccatgctgcactgcccctactggaacaccttctcgctgccgccataccctgccttct

SEQ ID NO: 516671 - DNA, 201 bp, Homo sapiens
actctctggagacctccactgggaccactggaccccctgttaccatgacaactggctctctggagccctccagcggggccagtggaccccaggtctctagygtaaaactatctacaatgatgtctccaacgacctccaccaacgcaagcactgtgcccttccggaacccagatgagaactcacgaggcatgctgccagtgg

SEQ ID NO: 516672 - DNA, 201 bp, Homo sapiens
aggtcccagctcttgctcctgcctgtttgcctggaaatggccacgcttctccttctccttggggtgctggtggtaagcccagacgctctggggagcacaayagcagtgcagacacccacctccggagagcctttggtctctactagcgagcccctgagctcaaagatgtacaccacttcaataacaagtgaccctaaggcc

SEQ ID NO: 516673 - DNA, 201 bp, Homo sapiens
ccagtgaggatggggctgtggacgccccagctcctgatgagcccgaagggggagacggggctgccccttaagtgtcggtgaatagtgaggctggaggccgsaatctcagccagcctccagcaccttccctctcaccatcccactgccccctcgctcccatgtttccacccggcaccctgatcctcacccgaatctcctttt

SEQ ID NO: 516674 - DNA, 201 bp, Homo sapiens; identical to SEQ ID NO: 287004

SEQ ID NO: 516675 - DNA, 201 bp, Homo sapiens; identical to SEQ ID NO: 287006

SEQ ID NO: 516676 - DNA, 201 bp, Homo sapiens; identical to SEQ ID NO: 287009

SEQ ID NO: 516677 - DNA, 201 bp, Homo sapiens; identical to SEQ ID NO: 286999

SEQ ID NO: 516678 - DNA, 201 bp, Homo sapiens; identical to SEQ ID NO: 287010

SEQ ID NO: 516679 - DNA, 201 bp, Homo sapiens; identical to SEQ ID NO: 287001

SEQ ID NO: 516680 - DNA, 201 bp, Homo sapiens; identical to SEQ ID NO: 117285

SEQ ID NO: 516681 - DNA, 201 bp, Homo sapiens; identical to SEQ ID NO: 117259

SEQ ID NO: 516682 - DNA, 201 bp, Homo sapiens; identical to SEQ ID NO: 117291

SEQ ID NO: 516683 - DNA, 201 bp, Homo sapiens
tcacatcaacctcaacagcaggtagcacgtgctttctgtaggctacctcaaatgagtttttaagtagtttattgactttttggtgatcagaggtaacattrtatattagctgacatcatttttgtttctccaggtatgcagaaacacatcgagtatatgctattgtattagtgtctgcgtacacatcagacttgggggatg

SEQ ID NO: 516684 - DNA, 201 bp, Homo sapiens
tctttggttttgttaatacagtctggtctcctgctgtggtcctgcagttttaaaagttgtgaactgctgaatagttgcctgtttgaaaggtggggcagcgytggattcagactgccactatcaaatgacagactttttctttaccctgaaccttaagttacagcacgagagagcatctggctgcccttcatggagacagag

SEQ ID NO: 516685 - DNA, 201 bp, Homo sapiens
tcagctcactctaacctgcacctcccgggttcaagtgattctcatctcagcctcccaagtagtgtgaactaaaggcatgtgccaccacgcctggctaattyttgtatttttagtagagacagggtttcaccatgttggccaggctggtctcgaactcctggcctcaagtgatccacccacctcagccgcccaaagtgttgg

SEQ ID NO: 516686 - DNA, 201 bp, Homo sapiens
cgtacacatcagacttgggggatgaaaatgagcgtgcaagtggtaagtccaaaggtagaaatctgagcaaagcccttctctagacatggggctgtctgttyaggttgtaaaaacagtgctgtctttcagataggctaaaaaattctaatagcatatgagaaagatataccacctatctttggatataagtttgcactttga

SEQ ID NO: 516687 - DNA, 201 bp, Homo sapiens
gaagaacctgtctcttaaaaaaaaaaatttttttttaattaaaaaaacccaccctttttcatttcccaacattttttggctattatgatcgctatgtgttmcttcaaataatttccagtgaatccacacttgatgttgcaaagcctaagtttgctgcagaaatacaatttcctacacttcatacctaaaggagattcagag

SEQ ID NO: 516688 - DNA, 201 bp, Homo sapiens
gagctgcactgtgatgagaagactatcatcattggccacagttctggggccatcgcggccatgaggtgcgatctttgttaaactgctatcccctttgtggsctccagtcatgcttgcttgagaaataccttgcgtatatcttaaatttctgttgcagaggaaacagtgctgacctctaaagtggtaacataatctgtccta

SEQ ID NO: 516689 - DNA, 201 bp, Homo sapiens
agagagcatctggctgcccttcatggagacagagctgcactgtgatgagaagactatcatcattggccacagttctggggccatcgcggccatgaggtgcsatctttgttaaactgctatcccctttgtgggctccagtcatgcttgcttgagaaataccttgcgtatatcttaaatttctgttgcagaggaaacagtgct

SEQ ID NO: 516690 - DNA, 201 bp, Homo sapiens
attgttgccatgtggaaatggggcagagtgttgccaattttctgattttttgtgtggaaaaaaatctccaaattgtagtttttaaatttggggaatgcaaatatatatatatatatacacacacacacacacacacatacacatacaatccatatacatatggagtatgtaagttggcaataacagtatacatcaaaaaat

SEQ ID NO: 516691 - DNA, 201 bp, Homo sapiens
ttgttgccatgtggaaatggggcagagtgttgccaattttctgattttttgtgtggaaaaaaatctccaaattgtagtttttaaatttggggaatgcaaatatatatatatatatacacacacacacacacacacatacacatacaatccatatacatatggagtatgtaagttggcaataacagtatacatcaaaaaatt

SEQ ID NO: 516692 - DNA, 201 bp, Homo sapiens
taagatagacctataggattgttgaactttgctgccaaatatagtaaccagtaaccacagctagctgtaaaattgaaaattcagttcagtcaaactagccwtatttcaagtgctcaacagccactggtggctattggttaccttactgaccagccaatataggctatttccgtcattatagaaagctctattggacaacat

SEQ ID NO: 516693 - DNA, 201 bp, Homo sapiens
aatggggcagagtgttgccaattttctgattttttgtgtggaaaaaaatctccaaattgtagtttttaaatttggggaatgcaaatatatatatatatatacacacacacacacacacacatacacatacaatccatatacatatggagtatgtaagttggcaataacagtatacatcaaaaaatttacaaacactgcaag

SEQ ID NO: 516694 - DNA, 201 bp, Homo sapiens
ttgtcccaagcagtcacttaggctgtcacatgaattgcatgtcagggaatcttgccaaatttcataacctttcagccacactgattaaagttacaagagtrtttcaggatggaaccacaaaattatggtacactcccagtgtaagaatgttatatgctgccaggggttgtctggaaaaggaagagctccttgtattattga

SEQ ID NO: 516695 - DNA, 201 bp, Homo sapiens
atggggcagagtgttgccaattttctgattttttgtgtggaaaaaaatctccaaattgtagtttttaaatttggggaatgcaaatatatatatatatatacacacacacacacacacacatacacatacaatccatatacatatggagtatgtaagttggcaataacagtatacatcaaaaaatttacaaacactgcaaga

SEQ ID NO: 516696 - DNA, 201 bp, Homo sapiens
tagctgtaaaattgaaaattcagttcagtcaaactagccatatttcaagtgctcaacagccactggtggctattggttaccttactgaccagccaatatargctatttccgtcattatagaaagctctattggacaacattggtctaggacatatattttgtattttcccctcacccaccatccaataatgagtaatagca

SEQ ID NO: 516697 - DNA, 201 bp, Homo sapiens
tgacatcctgtttatttcttgtctgtctcctgccaatagaatgtagactccatgaaggcagggctttgttcactctggcactgaaaccccattgcctagamgagagcctggcatatggtagattgtgtctgcagtgttactcacctgcgaatccccagtccttaggattcgtatgcacatccctactgctctcattagaat

SEQ ID NO: 516698 - DNA, 201 bp, Homo sapiens
aggctgggctcagctccgctggacccgcgctggggaactctggcctcgctgcactcatggcttctcctagcaaggcagtgattgttcccgggaacggaggyggggatgtgaccacccacggctggtatggctgggtgaaaaaggagctggagaaggtaagcgcccaacgccgctgctccgtgaagtcagcctggagggagg

SEQ ID NO: 516699 - DNA, 201 bp, Homo sapiens
aagtctttgctgaaagtaccagcatagactgtatgatttctgctattttgcatcccaatataggagtagaataatatctactatcagctgattactagacrcatagaacatccagttaagttccgtaagtgcctgaaaaacaaacacaagtttcaacattcaatctaagttacaaatagcacttccattttccatagactc

SEQ ID NO: 516700 - DNA, 201 bp, Homo sapiens
aggtaagcgcccaacgccgctgctccgtgaagtcagcctggagggagggacggcgggagaggactgagggctgaagtttgaataggcgtctaatcccctcyagcaaagccctgtgtgttttcctgcctctcccccgctgccttctcttaaagtctgagctagtggtcgaattttgactggtaaaactgcctggaagacttc

SEQ ID NO: 516701 - DNA, 201 bp, Homo sapiens
taggattcgtatgcacatccctactgctctcattagaatattacatctccccttttagccttataaggcctagtgggtagggacttagctggctgaataarctaagtttagcctataagggttgagtttctttcatatttgctaggcaaaatgacaaaggataatagtttttatttgtcccaagcagtcacttaggctgtc

SEQ ID NO: 516702 - DNA, 201 bp, Homo sapiens
ctcagctccgctggacccgcgctggggaactctggcctcgctgcactcatggcttctcctagcaaggcagtgattgttcccgggaacggaggcggggatgwgaccacccacggctggtatggctgggtgaaaaaggagctggagaaggtaagcgcccaacgccgctgctccgtgaagtcagcctggagggagggacggcgg

SEQ ID NO: 516703 - DNA, 201 bp, Homo sapiens
ttttaatggcaaaaactgcaattacttttgtaccaacctaagagttagctgggtgtctacttgccaggcactgtaatgggcaccaggaacacaaagatcartaggactcatgcctgcctttaaggagctgacaatttattgagagaaatgtacataagacaacacaaatgaataatataaggcaatgtggagtgtgtggta

SEQ ID NO: 516704 - DNA, 201 bp, Homo sapiens
agcccttctctagacatggggctgtctgttcaggttgtaaaaacagtgctgtctttcagataggctaaaaaattctaatagcatatgagaaagatataccrcctatctttggatataagtttgcactttgatttcttcccaagctgtaagtctagaactgaaccctagaggcctggttttagttgaaccatataccacctc

SEQ ID NO: 516705 - DNA, 201 bp, Homo sapiens
agaagtgcttctaactcacacggaggctctgctcctttgcgtctctatgtgggtcgccagtaggtattttagaatatctagaagggagattatccatgggyactgaaagatcatttttttttccccataggatacttcacccgcccctggcagtgggagaagatcaaggccaactgcccttacattgtgcagtttggctct

SEQ ID NO: 516706 - DNA, 201 bp, Homo sapiens
agaaagatataccacctatctttggatataagtttgcactttgatttcttcccaagctgtaagtctagaactgaaccctagaggcctggttttagttgaascatataccacctcttcacgagtaactgtggtatcaagccctacagatttgaaaacaaaagaagtgcttctaactcacacggaggctctgctcctttgcgt

SEQ ID NO: 516707 - DNA, 201 bp, Homo sapiens
ccacagttctggggccatcgcggccatgaggtgcgatctttgttaaactgctatcccctttgtgggctccagtcatgcttgcttgagaaataccttgcgtrtatcttaaatttctgttgcagaggaaacagtgctgacctctaaagtggtaacataatctgtcctaattccttcctggttttgctagtggattgaaagaaa

SEQ ID NO: 516708 - DNA, 201 bp, Homo sapiens
ccactttcagaacacagagtttcatgaactgattactgttgtaaagtctttgctgaaagtaccagcatagactgtatgatttctgctattttgcatcccartataggagtagaataatatctactatcagctgattactagacacatagaacatccagttaagttccgtaagtgcctgaaaaacaaacacaagtttcaaca

SEQ ID NO: 516709 - DNA, 201 bp, Homo sapiens
cccacctttcccccctttctattccacaaaactgccattgtcatcatggcccgttctcaatgagctgttgggtacacctcccagacggggtggtggccggrcagaggggctcctcacttcccagtaggggcggccgggcagaggcgcccctcacctcccggatggggtaagccatagaaaattctagtaaggattaggaaa

SEQ ID NO: 516710 - DNA, 201 bp, Homo sapiens
tgaataaatgtgaattttagaatgttgcaagagtttttttgcttttttttttgagatggagtctcgctctgttgcccaggccagagtgctgtggcgtgatsttggctcactgcaacctctgcctcctgggttcaagtgattctcctgtgtcagcctcccaagtagctgggattacaggcatgcgccatcacgcctggctaa

SEQ ID NO: 516711 - DNA, 201 bp, Homo sapiens
cacggaggctctgctcctttgcgtctctatgtgggtcgccagtaggtattttagaatatctagaagggagattatccatgggcactgaaagatcatttttktttccccataggatacttcacccgcccctggcagtgggagaagatcaaggccaactgcccttacattgtgcagtttggctctactgacgacccgttcctt

SEQ ID NO: 516712 - DNA, 201 bp, Homo sapiens
cagagttacaaccccaaaggtcagggctggagcttctgagagtatgctgtctccaaatttctgtatcacgttcctgtgccacgttttacctactccctggmacacagtctatttggctccaggtcagtctgtctagaacacatttgttcatgcctctctatagatgcaggcctgtagaggcaaatatgggtgtacaaatgc

SEQ ID NO: 516713 - DNA, 201 bp, Homo sapiens
aaagcacctgggcatggtaaaatttaattttcaactttgcaccaacttgatttttcccttctatatgtctacaaatattttcaggcagaatttgtgggtaytatacttgaggcataggtataaaactttacagcatctatttgaggtcctaatgtttaaaaatgtcatattgctacttttgttctgggtatgcctatgact

SEQ ID NO: 516714 - DNA, 201 bp, Homo sapiens
gggcccgggtccgagctggacacttgcatgatgccgtgtgcttccctccatgtgtggttccaaggccaggccctcaacgccgccttgtcagtgcactagcygcccagcttgcctcctgattcctctggaggcagggactctgttctttatcttttttttcttcccaccacatgctttgtatgtaacaaacaccagtacatt

SEQ ID NO: 516715 - DNA, 201 bp, Homo sapiens
tctctgatactatccatttggtttttttgtttgtttgtttgtttttttgagacggagtctcactctgtcccccaggttggaatacagtggtgtgatctcarctcactgcaacctccacctcctgggttgaagcgattctcctgcctcagcctcccaagtagctgggatagcgggcgtgagccactatgcctggctaatttt

SEQ ID NO: 516716 - DNA, 201 bp, Homo sapiens
gatagcgggcgtgagccactatgcctggctaatttttatatttatagtagagatggggtttcaccctgttggccaggctggtctcgagctcctgatctcaratgatccacccaccttggcctcccaaagtgctgggattacaggtgtgagccaccgcatctggcctgatactatccctttgaagaaactttctactcctat

SEQ ID NO: 516717 - DNA, 201 bp, Homo sapiens
tggctaatttttatatttatagtagagatggggtttcaccctgttggccaggctggtctcgagctcctgatctcaaatgatccacccaccttggcctcccraagtgctgggattacaggtgtgagccaccgcatctggcctgatactatccctttgaagaaactttctactcctatttctttctctacctcctctttaagg

SEQ ID NO: 516718 - DNA, 201 bp, Homo sapiens
tcacgaggtcaggagatcgagatcatcttggctaacacagtgaaaccccatctctactaaaactacaaaaaaaaaaaaattagccgggcttggtggcaggyacctgtagtcccagctaccctggaggctgaggcaggagaatggcatggacccgggaggtggagcttgcagtgagtccagatcatgccactgcactccaat

SEQ ID NO: 516719 - DNA, 201 bp, Homo sapiens
aataaataaataaataaacaaacaaatataaagttggtttcttttgagcagcatatagttaggcctagctttttaaaaaaaaccatacctgacaactcctrtgttctaattggagtatttagagtatatatagagtattctaactgatacctcggtaaatatgaattttttccactttggctggtgtaagcatgagctttg

SEQ ID NO: 516720 - DNA, 201 bp, Homo sapiens
ggtgaaaccttggtgccatggtacagtaatgaaggactaaataggataagagtgtgggaatgagctcagctccaacgtggagactagtgtgggcaacgagrcaatccggtgcacagtatccaagccttctagttgctgaggagctgttcagatcaataggtcacaggatcaggagccaacttgtctggaaaggcatggcag

SEQ ID NO: 516721 - DNA, 201 bp, Homo sapiens
ttgttttttgagacagggtctcgctgtgtcacccagactggagtgtagtggtgtgatcttgggtcactgcaacctccgcctcgtgggttcaagcaattctygtgcctcagcctcctgagtagctgggattacaggtgtgcaccaccacaacccagctaattttttgtacttttggtagagatggggttttgctatgttggc

SEQ ID NO: 516722 - DNA, 201 bp, Homo sapiens
tgcctcaagcaaggggtcaggtattaaatggctgttttaatatttttctaatatattgctcaatatttttgtagaagttaatttaatttacttcagtgatrcattttaaactccttaaagattttgctaatatataatggcagaatcttagggaataagggtgggagtcgattttaaataaaaacagactataacaccaaa

SEQ ID NO: 516723 - DNA, 201 bp, Homo sapiens
cccccctgctttttaactttttgttttttctctttagtgttattgtactgtcttaaaaagttgtagttattatttttgattggttcataatttagtctttytatttaagtcaagagaagttcacacaccacaatgccagtgttatgctattctgtgtttctctgtgtgcttactattacccatgaattttggaccttcgga

SEQ ID NO: 516724 - DNA, 201 bp, Homo sapiens
cggctttattttcagctgtgacagggcagtaccgagttcagtgtacagtcccccagtcactgtgctctccctccccaaagtgcacacattctctttccatsctgtatagctgctgctgggggatggggaaggatggtatcagtgattcaagaccgtctctcctgcccttctcgatgcctcttttcacaatatgaagttaaa

SEQ ID NO: 516725 - DNA, 201 bp, Homo sapiens
gatggagctactcccaggctaggacccctgggtcccagaaagtgaaaagcttccctctgattctcaccagcggttctctttatcttcatcagagaggaagycactctcctttttctccatagggatcaatgcatggctgcaggcacatctgcaggtgtggaggatgagggtgatggcgtcaaaggaaggagcaggggcaga

SEQ ID NO: 516726 - DNA, 201 bp, Homo sapiens
gtgtttggatgagcatctgaggcataaagctttggagactttaaaacactgaccattattagcaattttgcgaataagaagaaggatgcacaaaatgcccrctatctcattcatcttccttgtcaataagcatcagaaaagttgtttggggtcctatttggggcagggactttaaatcttcatgtcagagaagctgcatgt

SEQ ID NO: 516727 - DNA, 201 bp, Homo sapiens
ggaggcagggactctgttctttatcttttttttcttcccaccacatgctttgtatgtaacaaacaccagtacatttggaaagaatatgttagaattgtttyaacttttgtattttaggatttcttgtactcaccaccttctcccagtttgaaatattgttattgggtataaaagcatagagttccataaactgaacagctt

SEQ ID NO: 516728 - DNA, 201 bp, Homo sapiens
ttccactgtatatggcttttttttctcatttgcacttaggggataagtatcagaagctgtaacatttgttcactcattcagtgattatttttgagcacacrtgtaccaggcactgttctacgtgttgaaaataaaacctaaacaaaagacgtaaaggtctcacacctcctgaagctgacatgcctactgcattctagtaca

SEQ ID NO: 516729 - DNA, 201 bp, Homo sapiens
ggtgtgagctactatgcccctccttttttttctaaagaagaagtcaatttattggctcattcgttcctcaggggagtatattttctgaactgtcatacttyggctgaccttgaacactttataaagtatgcaaaataaattttaggattcacctgattgcttttcctagagctctagtcataataaaactagtgtggagtt

SEQ ID NO: 516730 - DNA, 201 bp, Homo sapiens
tatatgaacttttcctgttcaaattagttgtggtttctatgtcctgattggactctgactgatacagaattggtagtgggattggtcccaggaaataaacygggaaatgggattttggaagtggtttggtcttgtcctttgcttgggaacagtgccgagctccttgccaatgggaaatgggacactggtgatccatagcat

SEQ ID NO: 516731 - DNA, 201 bp, Homo sapiens
gggaacagtgccgagctccttgccaatgggaaatgggacactggtgatccatagcatgagggggcatcacagttaatcaggctgtcacctgtggctgattrtgatgacgtgccaattgaagcaagtatcttgaatggccaagtaactgctgcacttgactctatgacagtgacaatgactacaaaaactgtggtggaggat

SEQ ID NO: 516732 - DNA, 201 bp, Homo sapiens
ggccaggctggtctcaaactcctgacctcaggtgatgcgcccacctcagcctcccaaagtgctggattacaggcataagccaccatgcccgccaggatggsgtaacaattgataagctaatatacatgaacaaaatccattctatttttagtaaggtatgctgtccaagagtttaatttgccaataggatctataatatta

SEQ ID NO: 516733 - DNA, 201 bp, Homo sapiens
atcacagttaatcaggctgtcacctgtggctgattgtgatgacgtgccaattgaagcaagtatcttgaatggccaagtaactgctgcacttgactctatgrcagtgacaatgactacaaaaactgtggtggaggatgtattctcctgagtccatgggagcattcacagaaagaaaacgacaagctcaggacctttaagtca

SEQ ID NO: 516734 - DNA, 201 bp, Homo sapiens
tgacagtcttgttacccttgtcactctgtgcctcctgcccaatggatgtagtttgcccttatgtctgaggatgcccttctgtctgaggataccagccttcrttttcttgaaatgtttgtgataacctcacctgggcagatggcttgaaaggggatgtttattctcctcacagggggttgtgggtggtttaaacccatcaca

SEQ ID NO: 516735 - DNA, 201 bp, Homo sapiens
gccatcttcgctgaggccttagccttgtggatgaaataatcttggatcccatagccctatttgagatggctcaactgacaccatgtggagcagagatgaamcgtccctgcagagcattgaccatattcttgacccacagaagtatgggcagtaaagtggttgatgttttaaaccactaagttttggggtgttttgtttggt

SEQ ID NO: 516736 - DNA, 201 bp, Homo sapiens
cgttttaactagttttgctgcatttaaattaagtgctgctcttcagcttttgtgtacagctataagtgcacattggaatttatatgtatatatatatagakagagagagagagagagaaaatgactgctggttcagtgtgtgtccctcagatcataccactacgagtgcctcagcctggaaaagctaaccatgaaattgat

SEQ ID NO: 516737 - DNA, 201 bp, Homo sapiens
ctcgttttaactagttttgctgcatttaaattaagtgctgctcttcagcttttgtgtacagctataagtgcacattggaatttatatgtatatatatatakagagagagagagagagagaaaatgactgctggttcagtgtgtgtccctcagatcataccactacgagtgcctcagcctggaaaagctaaccatgaaattg

SEQ ID NO: 516738 - DNA, 201 bp, Homo sapiens
gcatctgaaaattataacaaataaaatgaaacaaaacaacccctttatgcacattattattgttttaaagtgtgtgctgcaaatggagtatatgcacgttrttattctttataaaatgttgtcacacttgccaggccacttctatcaaggtaagtcatctcaattattaaaaattaagaacctcaatactctggtggccaa

SEQ ID NO: 516739 - DNA, 201 bp, Homo sapiens
ctgggtaacattgaaactcaaggctgttttccagccccagcttttactctatgccgagctctcttgcagttctctatgtgtagttcccatcagccagggckgtgtgggtggcttgggcctactctggtttatgttgcttatgtgcatagcctcctgtcaactaaggctatgtggagagctatcaagcccctatcattgaat

SEQ ID NO: 516740 - DNA, 201 bp, Homo sapiens
aggtaattttatataatattttaaataacatagtgcatgaaacaaagttttgactgcatttcaactgtgacccatcacataggtcagtttggatttaggascattttagattttagattttcagattagagatattcagcatatagtaatcagaacagcatggtactagcataaaaacaggcatgtagaccaatggacaag

SEQ ID NO: 516741 - DNA, 201 bp, Homo sapiens
cttctgttatgcgatctgctgttgagtcgctctggtgattttttttttttttttttgagatggagtctcgctctgtcccccaggctggagtgcagtggtaygatctcggctcactgcaagctccgcctcccgggttcacgccattctcctgcctcagcctcccaagtagctgggactacaggcgcccgcctctggcgattt

SEQ ID NO: 516742 - DNA, 201 bp, Homo sapiens
ttgttatattagccttcttttcccccatttatagttctcttaatttattcctttggattatttcctaagcccaatgaagctttgctcttactcacctccctttttttttttttttttttttgagacggagtctcgctctgccacccaggctggagtgcggtggcgtgatcccgactcactgcaacctccgcctcctgggtt

SEQ ID NO: 516743 - DNA, 201 bp, Homo sapiens
cttctgtgttaattaaatatttggttaaatttagagtttgacatctcagaatttgtacactgttacttaaggcaatgagtcccacacccacagttatgaaytctctctacaactcttttaaaagcttatctctgctactgtccacgaagatggttgtgaagttagcatcagactgaattatagtcaagtctcaaacaaggt

SEQ ID NO: 516744 - DNA, 201 bp, Homo sapiens
gatgaaattccttagcttttctttgggaagatctttgtttctccttcatgtttgaaagatatttttgccagacatatactattctagggtaaaactttttwaatttttttcagcattttaaatatgtcatgccactctctcctggcctataggatttctgctgaaaagcctgctactgaaggtattggaggtccattggat

SEQ ID NO: 516745 - DNA, 201 bp, Homo sapiens
gtggtaagcgtcatgaagaagataacatggtaatgagatagagcagtggttctcagaggcgatccccagacctgcagcatcagcatcacgtgggaacttayttgaaacacacattctcaggcctgatgagcaaggtgggagatgagtgagaaggtggctggggccagagtatctagagctgtggttctcaatcatggctgc

SEQ ID NO: 516746 - DNA, 201 bp, Homo sapiens
tagcttggcaggtggcagaaaactctttcctaatttcctagttccatgtttgtatcattcctaccagaatgaactcatattcaacaaaagggaatggccargagaaattcacatcctccaccaaagctcattcctcttactagcagatttcagaaacacaggctcaggatctcactaggtgagaggcccagagaaatgctg

SEQ ID NO: 516747 - DNA, 201 bp, Homo sapiens
tcacgcctgtaatcccagcaatttgggaggccgaggtgggcggtctcaggagtttgagaccagcctcgccaacatggcaaaaccccatctctactaaaaawacaaaaattagccgggcatggtggcaggcatctataatcctagctactcgggagtctgaggccaaagaatctttcaaacctgggaggcagaggttgcagt

SEQ ID NO: 516748 - DNA, 201 bp, Homo sapiens
ccacgggacttcatttaagaatacgtgcatggctggcacagtggcttacgcctgtaatcccagcactttgggaggctgaggctggcgtatcacctgaggtygggagttcaagaccagcctgaccaacatggagaaaccccgtctctactaaaaatacaaaattagtcgggcgtagtggtgcatgcctgtaatcccagttac

SEQ ID NO: 516749 - DNA, 201 bp, Homo sapiens
agagtgagaatccatctcaaaaaaaaaaaaaaaaaaagaaagaaagttagtttatgaatctgtgttgggatccattcaaagtcatcctgggtcacatgtcrgcccatgggctgtgggttggacaacctggctttacagggattgttttttaggtcagtgtttgaatatttttcttacctcaggagggctcttcttagctgt

SEQ ID NO: 516750 - DNA, 201 bp, Homo sapiens
aatttttgtggatacatagttggtgtatatatttatgggtacatgagatgttttgatacaggcatgtaatatataataaccacatcatggaagatggggtrtatcacagtccattttagagtaatttaactcaattctactgaaatatagaaatttcactcctttcctctttctttttcttttcttttcttttttttcttt

SEQ ID NO: 516751 - DNA, 201 bp, Homo sapiens
gagtgagaatccatctcaaaaaaaaaaaaaaaaaaagaaagaaagttagtttatgaatctgtgttgggatccattcaaagtcatcctgggtcacatgtcgrcccatgggctgtgggttggacaacctggctttacagggattgttttttaggtcagtgtttgaatatttttcttacctcaggagggctcttcttagctgtt

SEQ ID NO: 516752 - DNA, 201 bp, Homo sapiens
ataaatattgcttctatatatgttataaactgaaaaatgcggtgttatacaatcttatgtcatttaaagaagatgagataaaagttctatggagtcatttrtatctgccctcatatttattatatctggtcttctcacttcctcctgtgaactcaagtgatcatctagtgtcatttcctttcagcctgaagaacttccttc

SEQ ID NO: 516753 - DNA, 201 bp, Homo sapiens
attttgccttcatttttgaaggatggtttgctgcagatgtaattctggtttagcaattattttctctttcagctctttgaatttgtcattctactgccttytgccctccattgtttttgatgcgtggttttttctcttgctactttcagtattttctctttgtctttgaccttcaacagtctgattataatgtgtttaagt

SEQ ID NO: 516754 - DNA, 201 bp, Homo sapiens
taatgtgtttaagtgtgggtctctttgtgtttgtctttcttgggattgactgagcttattggatgtgctgagtattggttttcctccagtgtgggaaataytggccattgtttcttccattctttttctgttcctttctctctttcccttacttgttgctgtgcttgattttgccccatacgtttttgatgttctgcttat

SEQ ID NO: 516755 - DNA, 201 bp, Homo sapiens
ccttcagtttttatgtgcaagataaaccagaccttttccttgtgcagatgggcttgtgtgcagaatgcagaagcttggtacccatgaacactcccatctgygtggtgtgtgaggcccctcttgctctacagctgcagccacaggcaagcctccacttgaaggtaatgaaatgtgattctgtaaaaacatgaatgaaataca

SEQ ID NO: 516756 - DNA, 201 bp, Homo sapiens
atgcttaaaaagccactgcaggaagccactatacagtcctggaagtctttctccagacttcttatatatgggagagagaaatctatttttctcttatttargcctgtgttattttgggtgttctgtcaagcacagcaaatctattcttattaatacatttattcaggatgtttgaagataatatcactgcaaactctttgg

SEQ ID NO: 516757 - DNA, 201 bp, Homo sapiens
tcatgctacaatttcctatggatatttttctttttttttttaacatctctcttttctacaatgaacatgtttttactcttaataggaataaaataataaawgtaattggtattttattttctattatttactttttaattgacacatagtaattgtacatatttatggggtacatagtgttatttgatacaaataatgtgt

SEQ ID NO: 516758 - DNA, 201 bp, Homo sapiens
gatcagatgagatcgggaatgttcagggtggtacggctgtagaccaaaccttacattctaagatctattcataccttcagtttttatgtgcaagataaacyagaccttttccttgtgcagatgggcttgtgtgcagaatgcagaagcttggtacccatgaacactcccatctgcgtggtgtgtgaggcccctcttgctcta

SEQ ID NO: 516759 - DNA, 201 bp, Homo sapiens
aggagaattgcttgaacctgggtgatggaggttgcagtgagccgagatcgcgccagtgcactccagcctaggcaacagagcaagactccgtctcaaaaaaraaaaaaaaaaaaaaaaaaagtcccggtgctccccaaacttttccaatatgctcattatttagctagtataataaatttgacctactgatacaggctttcc

SEQ ID NO: 516760 - DNA, 201 bp, Homo sapiens
cgccactatgcccggctaatttttgtatttttttaagtagagatgaggtttcaccatgttggccaggctagtctagaacttctgacctcaggtgatctgcycccctcaacctcccaaagtagtgggattataggcgtgagccaccacacccagccaagttgaggaaatttttacctgtttccaatttgctgagagcttctt

SEQ ID NO: 516761 - DNA, 201 bp, Homo sapiens
tttttttttttttaattatacttttaagttctgggatacatgtgcagaacatgcaggtttgttacataggtgtacatgtgccatggtggtttgctgcaccyatcaacccatcatctaggttttaagccccacatgcattaggtatttgtcctaatgcttttcctcctcttgccccccacccccgacagaccccggtgtgtg

SEQ ID NO: 516762 - DNA, 201 bp, Homo sapiens
ctcccagctctatgtcttcaattcaaatcagtggaatgagatagtcagattacacttcatgagctttaagcatagaaaagagggaactgttgttgctctgkcgggtgggcccatgccagagagatggtgaaaccttggtgccatggtacagtaatgaaggactaaataggataagagtgtgggaatgagctcagctccaac

SEQ ID NO: 516763 - DNA, 201 bp, Homo sapiens
gaaaaactggatatttacatgcagaagcatgaaattagatccttatctcacaccatatactaaaatcaacacaaaatggattaaactgaaaaacttctatyggaaaacatagggaaaaagcttatgacattagtctgggcaatgatttttttcggatatgacccccaaagcaccggcaacaaaagcaaaaaatagacaaac

SEQ ID NO: 516764 - DNA, 201 bp, Homo sapiens
tctgccttgtgagctctgctctaataaatcacttgcacatgaatattgtctcagagtctgcttctggggcacctgacctaagacaataaaattctgaacawctcatgctcagatgtcacattggaaattctaacagtcagaatgaaaggtcccagaacaatttaatccatccagatcgtgcacttaaatcatacactgtta

SEQ ID NO: 516765 - DNA, 201 bp, Homo sapiens
tttatttctctggcttctctgaagtcagaggtgagacttttgaagtcctttacagggcttggggaaattcatttgtggggtgcacttttggacctaaaaamcgaagtccctcttttcctctccttcccacccttcctctggttcctggacaggagagtggctccaggagtctctcctgccgggtttaatcaaatagaaatt

SEQ ID NO: 516766 - DNA, 201 bp, Homo sapiens
gttttggtttggttttgttttgctttgttttgagacagattcttgctctgtcaaccaggctggagtgcagtagcacaatcttggctcactgcaaacctccscctcctgggttccagcaattctcgttcctcagctgcctgtgtagctgggattacagggtcacaccaccacacccagctaagttttgtatttttagtagag

SEQ ID NO: 516767 - DNA, 201 bp, Homo sapiens
ccaaagcagccagctgctccttggcctcaggtggtcagcctgtgtgggaaggtgagcccagtgcccctgcgtcttccgcctgcatatgagaaaccgggcaycagactcacgtgaaatctcccaagttttaaatggtggcaactaattcaaatgtgtcttaaaccctgtgcagactggaaagggacccaagagaacttttta

SEQ ID NO: 516768 - DNA, 201 bp, Homo sapiens
ttcaggaagtagcaggctcttccctgggacaggagcaggcagccacgtgagggtgcagggggatcagtccgggtgcacacagacttctgtgtctggcctcrttatgtagacgcccattttactgcattttgctttcacgacatgccattgaggtaggtcatattatttccactttccaggtgaggaaactgaggctcagag

SEQ ID NO: 516769 - DNA, 201 bp, Homo sapiens
ttggcctcaggtggtcagcctgtgtgggaaggtgagcccagtgcccctgcgtcttccgcctgcatatgagaaaccgggcaccagactcacgtgaaatctcycaagttttaaatggtggcaactaattcaaatgtgtcttaaaccctgtgcagactggaaagggacccaagagaactttttagagtgatggaaatgttttat

SEQ ID NO: 516770 - DNA, 201 bp, Homo sapiens
tggtttggtttccctgtcagatttcatctactttcagtcttcttggaatttctcaaaattactaattcaccgatggtcagtaccgttttagagtttcccayatctttagagttttgtgttttaaaaatatatgccaagaatagttctaaaaggagctttggagaaaagggcagtggatgccacctgctccatccccagcct

SEQ ID NO: 516771 - DNA, 201 bp, Homo sapiens
ttatatataaagatgaatttatggcatttaaaaatataaaaagataagttactcagccaggcccagtgactcacgcctgtaatcccagcacttagggaggstgaggcaggcagatcatgaggtcaggtgatcgagaccatcctggctaacatggtgaaaccccatctctattaaaaatacaaaaaattagccaggcatagt

SEQ ID NO: 516772 - DNA, 201 bp, Homo sapiens
tgtccttaatataaaatagtgtccatgcggtaaccttgcctgaagcaaggttttggagcagcaagattgatattagatgtggatatttgtgctgtgggctrttaaagaccactcacacactcacacatgcacacactcatagtcacctgtccttgtgacttagaattcaatgttggaaagaaagtgtttgccttgagtgaa

SEQ ID NO: 516773 - DNA, 201 bp, Homo sapiens
cacccagttggccttttcaatttaaaaagtcttatctttctttaggttaggaaaaatttgttctattatctctttggcattttctcccctccatttttctrttctctttctagaactgttagttggacagtggatggcttgaattaactccatatgtctgtctttcttttctgtttttccatagtttcatctatttttttc

SEQ ID NO: 516774 - DNA, 201 bp, Homo sapiens
atctgcaggtgtggaggatgagggtgatggcgtcaaaggaaggagcaggggcagagagagttcagaccgtcaatgcctattcatttctacttccagtcatkactcctgccctccttcactcctgccacctctgcataggagcctttcaggagtcctggcgccactccagcctccatttcagttgcccactcctccctcact

SEQ ID NO: 516775 - DNA, 201 bp, Homo sapiens
ggagcaggggcagagagagttcagaccgtcaatgcctattcatttctacttccagtcatgactcctgccctccttcactcctgccacctctgcataggagyctttcaggagtcctggcgccactccagcctccatttcagttgcccactcctccctcactaggtcaaacctgaccaggaaatacggagagaaaccctggca

SEQ ID NO: 516776 - DNA, 201 bp, Homo sapiens
acattttgaaatcacagagcctctttaaaggtttcagggtagagccacctctgagaactgaagtcactgtgacctcttggggagaggtttggggaggtggraccaggaggggcccagcctggcctccatggcagggtagagtcaagctcttagggtcacatgttcaagtccttcagtgcacctccgtttctccatttcctt

SEQ ID NO: 516777 - DNA, 201 bp, Homo sapiens
gcatgttcgttgcatgttttcttgtctggagaagtgttggaataagaaacactggggcaggaaagtatgctgtactttgaattttaatgacgtccttgctwacagcttaagatcatgaaggaggatcaagcagtccaaccaagttagatttcttgacccaccgccgggagccatgggggcatctaaccaaacagaggaaat

SEQ ID NO: 516778 - DNA, 201 bp, Homo sapiens
aaagtatgctgtactttgaattttaatgacgtccttgctaacagcttaagatcatgaaggaggatcaagcagtccaaccaagttagatttcttgacccacygccgggagccatgggggcatctaaccaaacagaggaaatgctggagttgtagggtttgggggaagggtggagtttgggtgaaatataaatgaaagcagag

SEQ ID NO: 516779 - DNA, 201 bp, Homo sapiens
ataatgaattcaaagatgagatttagaaaatgtgcctcaaaactttgcaaggagtttggttttgctgggctgcaacaatgctggggtgctgtgggttatasgagatggcaccttctctaccagactttgtagctcagatttttccctgtgggccctgaaggttgaaagtggggacaggttttaaccagacttgatttgtag

SEQ ID NO: 516780 - DNA, 201 bp, Homo sapiens
aatacctaattttttgtaacaaatgaaataatccaaagatataccaaaaagtgtataatttcttcactctacctccatttctatttctctgaaataaccarcgttagcagcttagagtgtccttttatgtatttttctagattcacagaaacatatttatgtatattcatacatttagatttggtttggtttggtttttta

SEQ ID NO: 516781 - DNA, 201 bp, Homo sapiens
cagtgcagaatttccaacttaccttttgaaaaccaaacgaatacttttttcagtgtgtttgtttgtttgtttgtggttttgtttcttttaaaactacattsaggctgggcatggtggctcacacctataattccagcactttagggggctgaagtgggaggatcacttgaggccaggagctggacaccagactgggcaaca

SEQ ID NO: 516782 - DNA, 201 bp, Homo sapiens
ctctcgttttaactagttttgctgcatttaaattaagtgctgctcttcagcttttgtgtacagctataagtgcacattggaatttatatgtatatatatakagagagagagagagagagagaaaatgactgctggttcagtgtgtgtccctcagatcataccactacgagtgcctcagcctggaaaagctaaccatgaaat

SEQ ID NO: 516783 - DNA, 201 bp, Homo sapiens
cctttattgaatctatttatgtctctatttaaagttggtttctggccgggcgcggtggctcacgcctgtaatcccagcactttgggaggccgaggtgggcsgatcacgaggtcaggagatcgagatcatcttggctaacacagtgaaaccccatctctactaaaactacaaaaaaaaaaaaattagccgggcttggtggca

SEQ ID NO: 516784 - DNA, 201 bp, Homo sapiens
ttcttttttttttttttgagacggagtcttgctctgtcacccaggctggtgtgcagtggcgcggtctcagctcactgcaagctccgcctcccgggttcacrccattctcctgcctcagcctccccagcagctgggactacaggcgcccaccaccacactcggctaatttttttgtatttttagtagagacggggtttcacc

SEQ ID NO: 516785 - DNA, 201 bp, Homo sapiens
tcattttagaaatatacatctaggccaggctcggtggctcatatctgtaatcagaacactttgggaggccgaggcaggcagatcacctgaggtcaggagtktgagaccagcctggccaacatagcaaaaccccatctctactaaaagtacaaaaattagccaggtgtggtggtgggtgcctgtaatcccagctactcagga

SEQ ID NO: 516786 - DNA, 201 bp, Homo sapiens
gactacaggcgcccaccaccacactcggctaatttttttgtatttttagtagagacggggtttcaccgtgttagccaggatggtctcaatctcctgacctygtgatccgcctgcctcagcctcccaaagtgctgggattacaggcatgagccactgcacccagccactactctctttctttggcagtcttttcacttcttc

SEQ ID NO: 516787 - DNA, 201 bp, Homo sapiens
aaattagccaggtgtggtggtgggtgcctgtaatcccagctactcaggaggctgaggcaggagaatggcttgaacccgggaggcggaggttgcagtgagcygagatcatgccactgtactccagcctgggtgacaagagcaagactccgtctaaaaaaaaaagaagtatagatctattgtattgtagcttctcagtcagaa

SEQ ID NO: 516788 - DNA, 201 bp, Homo sapiens
tatctccatgaaggaatgtgagctctatgtactaatttattaattggtgaaactcatcatagctgtactcctttgggaaaaaaacaaaacaaaacaaaacaaaaaaaacactatttccggggctcatcttgtctgggaattttttatcttttttgaattgggagggggattagagaatatagtactgatcctgcctttaaa

SEQ ID NO: 516789 - DNA, 201 bp, Homo sapiens
aaagaagcaaggttgtcagggtgcctgccctcccctccccgcccatgtggggaacagaagttttgtcacctgggtaactttgtagctctgttcatcgtagrtcaggtcttgaggttcctgattctcctctcctttgatctgaaagcactttagttgcatcagctctgtaaaggacatctgttatacttcataggatggcga

SEQ ID NO: 516790 - DNA, 201 bp, Homo sapiens
cataaacttatactgtgtggggccagtaaatccttagcccttggggtgttaatcaatgttttcatcatgaatcgtgaaaacaccaagggaagacagacctyagtgtattccccatgaaaatatccccatgaagttaatgcagaaagaaaatatcatacggttgtctccagatctcacaccactgcagaggagactggtaca

SEQ ID NO: 516791 - DNA, 201 bp, Homo sapiens
caagaatgtggctctcctgtcccacccatatttggctgtcgtctcccacccccagaaggagctcaggtgagcagcagaattcttaaaaacatctttcattsgttgatctgatctttatttgcagcagtaacacagtgcttggtacacatgaactgcacatataaatacttgttgaagaattactggctgattgaactctta

SEQ ID NO: 516792 - DNA, 201 bp, Homo sapiens
agcttggcctcagtagtggcctgtgtttaatgagattgggatagcagaagtttcccaggtatatcagtttgctaaggttgccacagcaaaaccccacagaytgtgtggcttaaagaacagaaatttattttctcatagttctgcaggctggaagtttaagatcaaggcgccagcaggtttggtttctggtgaggcttctct

SEQ ID NO: 516793 - DNA, 201 bp, Homo sapiens
tctttctgtttactgtttaagccatgaaatggaacgtctactcagtgtcacggttttcacactggagaaacacacacacacacacacacacacacacacacccaaccttacacataaccagtgcagaatttccaacttaccttttgaaaaccaaacgaatacttttttcagtgtgtttgtttgtttgtttgtggttttgtt

SEQ ID NO: 516794 - DNA, 201 bp, Homo sapiens
cctcagcctggatgactgttagccctgaggcctccacgggacttcatttaagaatacgtgcatggctggcacagtggcttacgcctgtaatcccagcactytgggaggctgaggctggcgtatcacctgaggtcgggagttcaagaccagcctgaccaacatggagaaaccccgtctctactaaaaatacaaaattagtcg

SEQ ID NO: 516795 - DNA, 201 bp, Homo sapiens
atcaattttgagaaaaaaaaaaaaaaagaacaaagccagagacatcacacttcctgagctactataaagctatacaggctgagtatcacttatctgaaatrgttgggaccagaagtatttggattttaggttttctggactttggaatatttatgtatttataatgagatatcttgatgatgggacccaagtctaaacatg

SEQ ID NO: 516796 - DNA, 201 bp, Homo sapiens
agctactcgggaggctgaggcaggagaattgcttgaagccaggaggcggaggttgcagtgagccgagatggcgccactgtactccagcctgggagacagarcaagactccatctcaaaaaaaaaaaagaaaaagaaaaaagaaataaagcagtgaatgtatatcctgctaatacgtattcttcaaaatcttaaatatgtgt

SEQ ID NO: 516797 - DNA, 201 bp, Homo sapiens
tatattgctggtaggaacagaagtggtatacattcatatattgctggcatatcacttgtgtttctactagcaatatataaaggttccagtttctctgcatyatctccaacacttgatatcacctgtcatttttttcttttcttttctttttttttttttttgttgttgttgttattgagacggagtcttgctctgtcgccc

SEQ ID NO: 516798 - DNA, 201 bp, Homo sapiens
actttgcatgggaggctggcattagcctgtggggaagtgaactcattcacatttcatttacagacaggtatgtctttgtcatcccctccaccttcccacaycccatagtccattgtcttcgttgactctgtatgcacactgctttttgaaattgagaacattgtagccacctatttcttgggtttcctgccagcctatttt

SEQ ID NO: 516799 - DNA, 201 bp, Homo sapiens
actgtgttcagaaatgattatctctgcaccagggttggacattgaagctgcttctctatgtcagagtggcctagattccccaggcaagagttgaatgtttygttcttactgagaatttcaaacagcaaagtttctgataatctgtgatttaagagaacagggtttctcagtgagtaagaaagacaaggcatgcaaagaggg

SEQ ID NO: 516800 - DNA, 201 bp, Homo sapiens
cacctcctgctgtgtggcctggttcctaacaagccacagataagtacagtccatggcccgggggttggggacccctggtctaccggtatcaaatgggtgtrtactagtttcctaagcaccatcaactaggtggctaacaacgacagaaatctattgtcttacagctctggagactagaagtctaaaatcaaggtgttggca

SEQ ID NO: 516801 - DNA, 201 bp, Homo sapiens
ctgtaatcccagcactttgggaggccgaggtgggcggatcacgaggtcaggagatcgagatcatcttggctaacacagtgaaaccccatctctactaaaaytacaaaaaaaaaaaaattagccgggcttggtggcaggcacctgtagtcccagctaccctggaggctgaggcaggagaatggcatggacccgggaggtgga

SEQ ID NO: 516802 - DNA, 201 bp, Homo sapiens
tgccaccatgcttgactaatttttttgttgtatttttagtagagatggggtttcaccatattggccaggctggttttgaacaactgacctcaggtgatccrcccgccttggcctcccaaagtgctgggattacaggcatgagccaccgcgcccggccggtatcaccaatcattttaatcatgatattccctttttaccatt

SEQ ID NO: 516803 - DNA, 201 bp, Homo sapiens
caaacaactcaatagtaagtaaacaaataatgccattaaaaatgggcaaagggagcagtcctgcatggcttctgctagcagaagctgcatggtagggcaamctgctgtgctctggggccagatgatgctccagggtggatgaggcacctgcaaatccagctgagcattgcaagccacccagggagagattttttcaaaagc

SEQ ID NO: 516804 - DNA, 201 bp, Homo sapiens
atgtttgtatcattcctaccagaatgaactcatattcaacaaaagggaatggccaggagaaattcacatcctccaccaaagctcattcctcttactagcaratttcagaaacacaggctcaggatctcactaggtgagaggcccagagaaatgctgtttgcttttggacaagagctgcccttcctcactgcattggcgatt

SEQ ID NO: 516805 - DNA, 201 bp, Homo sapiens
aagtctcaaacaaggtgagtaagcctccagaagttattcatttgagaactgaccgattagtaaattgagacaatttatagaaatgcttctgtgtaatccayagaaaggaaaagtttcacacattatgaaatgctactagaggcaagcaatttcatagaattagataaacaagttaaacctcagacaggcacatgaagatat

SEQ ID NO: 516806 - DNA, 201 bp, Homo sapiens
ccccttgagtagctgggactacaggtgcacgccaccatgctcggctaatttttatattattagtagaggcagggtttcaccatgttggccaggctggtctygaacttttgacctcaagtgatccacctgcctcggcctcccaaagtgttggattacaggcgtgagccaccatgctcggcctcttttgaaattctataatag

SEQ ID NO: 516807 - DNA, 201 bp, Homo sapiens
ttttcaaatatagaaacactatttaatttggcaaccttcaccatgtgttgtaggcaaaaaacaaaacaaaacaaaaaaaaacctcaaatccttgcaattckgtgtggctgtgatataggaattatttttccagcaatgcaggtttggccacattttgggaacatttaaaagccccaaaccaaatgcagtacctggctggcc

SEQ ID NO: 516808 - DNA, 201 bp, Homo sapiens
cgcaatctcagctcactgcaagttctgcgtcccggtttctggcaattttcctgcctcagcctcctgagtagctgggactacaggcgcctgccaccacgccyggctaattttttgtatttttagtagagatggggtttcaccatgttagccaggatggtctcgaactcctgacctcgtgatccgcccgcctcggcctcccaa

SEQ ID NO: 516809 - DNA, 201 bp, Homo sapiens
atcagctggggaatggacataaaaattgtggtatatccataaaatggaatactactcaacaataacaatgaacgagttacaacaacatagatgagtctccaaaaaaaacaaataaataaaaaatccagacacgtaagatgaccacatatgtataattacatttatgttaaatttctagaaaagacaaaactatagagatag

SEQ ID NO: 516810 - DNA, 201 bp, Homo sapiens
gacacgtaagatgaccacatatgtataattacatttatgttaaatttctagaaaagacaaaactatagagataggaaacagatcagtggttgcctaggagrttggataggagtgactgcacacaggcacaagggaattcttttgggtgatggaaatgtcctaaatatttccactgtggtgatactcacaaaattgtgtaca

SEQ ID NO: 516811 - DNA, 201 bp, Homo sapiens
taaacaattataagggcttgtaagggaattaagaggaaaaaaccaaaaagataaagctgtttttttttttttttgtatttacaccaatatttatttttacyatttctgatgttctttactcttctctgtggacctgagtttctgtctggtatcatatcccttcacacagaggaactccctttatcacttcttagagtgcag

SEQ ID NO: 516812 - DNA, 201 bp, Homo sapiens
tgcagagaatttctctttgatttacctgaaggagtttccctctaattgcacagaaatgaaggcaagcgcacacaaagaggccctctgttctcgggtgtctrtgaatgctgggggctgatgtggcctctcttgagtaggtttctattctagataacagagcggtccctgaagcaaaacgggatagagctgggcagatagagt

SEQ ID NO: 516813 - DNA, 201 bp, Homo sapiens
tctattctagataacagagcggtccctgaagcaaaacgggatagagctgggcagatagagtgaactaaaatgtgtgtctttagggaaaagtgcccttagcmaatgttttccctggtgtgcgtgttcttagtattgtgcctggcatatgtggtaatacacattcagttaccaattgaatcagtcattcattgactcagtaaa

SEQ ID NO: 516814 - DNA, 201 bp, Homo sapiens
ccctttgctcgcttctgtcaagaatgtggctctcctgtcccacccatatttggctgtcgtctcccacccccagaaggagctcaggtgagcagcagaattcktaaaaacatctttcattggttgatctgatctttatttgcagcagtaacacagtgcttggtacacatgaactgcacatataaatacttgttgaagaattac

SEQ ID NO: 516815 - DNA, 201 bp, Homo sapiens
ctgtagcagaaactagtccctttgaattccctcgttcagcctggggactcacagtcttacaatgaccctttccaaaggacttcctcacaaggtccttactmagtgcttttttgagagttgagatttcattttagaaatatacatctaggccaggctcggtggctcatatctgtaatcagaacactttgggaggccgaggca

SEQ ID NO: 516816 - DNA, 201 bp, Homo sapiens
ttatttctctgatctgagtaaactggctggcctatttagctcacatctctaatgaatcttctagtcttcttttaactgctttttaacacaccctccattgytttgaaagcagccttaggcttgaactttcccacactttgttacaaatgaagtctgtttctttggggagagattctgaactctgttttttgacctgcctct

SEQ ID NO: 516817 - DNA, 201 bp, Homo sapiens
tcagcactgtgtaaagaagttcagtatagattactgaattagaagagatgccacatgaagaagaacagagcacctgagccagcacccaacccaaagactcyagacatttgaatgagtgcaggtgaaggctgagccatcccagacagctcccagtagtttgtgccatcttcgctgaggccttagccttgtggatgaaataat

SEQ ID NO: 516818 - DNA, 201 bp, Homo sapiens
gagtgagagactgaggcaagttttagagcaggagtgaaagtttattgaaaagttttagagcaggaacgaaaggaagtacactttgaagaaggccaagcggstgacttgagagattcaagtgtgctgttcagcccttaatgtggggcttatacattggcatgtttccagagtttgcattacttctaccctgattcctcttgg

SEQ ID NO: 516819 - DNA, 201 bp, Homo sapiens
ggcacttcttccatggccttgcagaaatcacttcttgtgatttcgctactggtacctataacctaagaatctggagatagagataattaattatcttacaytgagagccatctctgatgactgttttgacttgcatttctttgaggttaaaccttttcactcgtttattgactactggcattttttaaaatgaattatgtc

SEQ ID NO: 516820 - DNA, 201 bp, Homo sapiens
cccaaggtttagcgtcagaaattctgatttaattggtctgatgtggggtttgagcatcgttaaaaaaaaaaaaaaccacccctaaatgattctaacggtcwggtatggttgagagtcacagatactagtctgaccgtaagaagtttgaattctattctaattgtaaatggtatctgtttggcaggcaagacacagtcccat

SEQ ID NO: 516821 - DNA, 201 bp, Homo sapiens
catttctttgaggttaaaccttttcactcgtttattgactactggcattttttaaaatgaattatgtctgcctgcctttataataaaacactcaagactaygtatttatttaagtatcgcatgcaaataacaaaaaagttttagagtgaagggttagtctcctctctctctaagtcccacagttctcctctcagaagcaat

SEQ ID NO: 516822 - DNA, 201 bp, Homo sapiens
agaaaagcatggtttccaaacccagttgcatatcagaatcacccagggactgaaggctcagtgttgctacatccaatgaatttgcatgagaaggcagaaamctacatctttatgtgtaataacataatttaaagttttgactgttagttaaaattttgaaacactatgggagccaatgccaaataaaactcaatggcaggc

SEQ ID NO: 516823 - DNA, 201 bp, Homo sapiens
aaaaaaaaatctcataatgttctaagaaagtttaagaatctgtggcccggcgcggtggctcacgcctgtaatcccagcaatttgggaggccgaggtgggcsgtctcaggagtttgagaccagcctcgccaacatggcaaaaccccatctctactaaaaatacaaaaattagccgggcatggtggcaggcatctataatcct

SEQ ID NO: 516824 - DNA, 201 bp, Homo sapiens
aaaaaaaaaatctcataatgttctaagaaagtttaagaatctgtggcccggcgcggtggctcacgcctgtaatcccagcaatttgggaggccgaggtgggyggtctcaggagtttgagaccagcctcgccaacatggcaaaaccccatctctactaaaaatacaaaaattagccgggcatggtggcaggcatctataatcc

SEQ ID NO: 516825 - DNA, 201 bp, Homo sapiens
tttcaaccatgacctggggcataaattgcttcacggactggtttaattaaatttggcatcctttacagcaggggtatccaatcttttggtttccctgggcsgcactagaagaattgtcttgggccacacataaaatacactaatgctaatggtagctgttgagctaaaaaaaaaaaaatctcataatgttctaagaaagtt

SEQ ID NO: 516826 - DNA, 201 bp, Homo sapiens
aagcctccagaagttattcatttgagaactgaccgattagtaaattgagacaatttatagaaatgcttctgtgtaatccatagaaaggaaaagtttcacayattatgaaatgctactagaggcaagcaatttcatagaattagataaacaagttaaacctcagacaggcacatgaagatatagtgagaacaggagttgttc

SEQ ID NO: 516827 - DNA, 201 bp, Homo sapiens
acatattcttatttggttttcctttcatgtgtttatttatattctcttatttcaggaagaattcttccttctttttttatttttattttttataggcagastcttgctctgttacccaggctggagtgcaatgatacaaatcacagctcactgcaatctcaaactcctgggcttgagcaatgctcctgcctcagcctccca

SEQ ID NO: 516828 - DNA, 201 bp, Homo sapiens
cccaggttggaatacagtggtgtgatctcagctcactgcaacctccacctcctgggttgaagcgattctcctgcctcagcctcccaagtagctgggatagygggcgtgagccactatgcctggctaatttttatatttatagtagagatggggtttcaccctgttggccaggctggtctcgagctcctgatctcaaatgat

SEQ ID NO: 516829 - DNA, 201 bp, Homo sapiens
accaatagaatgtttcagaaatgatgccaagggcttctgagatcacaagaagtattgtagtttctgctttggtttcttgggacaaaaacactggcaggggrttggggtagtcaggtactatggaggaagtctgactacctgaggcttccatactgtgaggaagcccaagctaaccacatgagagagagagggagggacaga

SEQ ID NO: 516830 - DNA, 201 bp, Homo sapiens
gtacaggggatatgcaaggagcccctaagatatacttttgcatatcccctatacctagaatgatgtctggtacataataggtattcagcaaacattcattktaatgaattagtgagttttactcaaaatgcaagaaagatgaattgaaactacaagatagtattttttttaacctaggaaattaggaaaactaaaagaaaa

SEQ ID NO: 516831 - DNA, 201 bp, Homo sapiens
tcctggatcaggctggaagttgctgagaaagacaggagcaaggaagatgaggcaaaggctggaaaaccctattagttccaagtacacttttcttgagataytttttattctgattagagttgttttctataagtaaaatgcaagattgattaaattatattctaattttaaaaatgtcttctgcctcacgcatggccccga

SEQ ID NO: 516832 - DNA, 201 bp, Homo sapiens
tgatgattttgagatctttcttcagaatgtgaacatttgctgctataaatttctgtttgagctttgctttcactgcgtcccataagtttcggtgtaccttyattttctttctttctttcttttgagataggatctcactttgtcacccaggctggagtgcggtggcacaatcatggcacactgcagccttgacctcctggg

SEQ ID NO: 516833 - DNA, 201 bp, Homo sapiens
caccttagccttccagagtgctaggattacaggcataagcccctgtgtccagcaccatgaatcagggttttttgtccattctgacaatccctgtttgtttkttttttaaattggattgtttcatccatctacatttaatgttattattgataaagttggacttatcattttgctttttgttttccaaatgtttctaaatgc

SEQ ID NO: 516834 - DNA, 201 bp, Homo sapiens
actacattcaggctgggcatggtggctcacacctataattccagcactttagggggctgaagtgggaggatcacttgaggccaggagctggacaccagacygggcaacacagtcggatcccatctctacaaaaacaaatggaaaaaaaaaaacccaaaaaaacctacagatatttgtctgacactatttacagtaactcct

SEQ ID NO: 516835 - DNA, 201 bp, Homo sapiens
actttttcactacatactttgagttatttccttagtggttactatagggttttcctcatacatcttaacagactatacttcaagtttatactaaattaatyccaatgaaatatataaattctacccctataattcaattccctcttcccaacttttgtggcattattttctaatataacattatgtttatgtttacatata

SEQ ID NO: 516836 - DNA, 201 bp, Homo sapiens
tggagactttaaaacactgaccattattagcaattttgcgaataagaagaaggatgcacaaaatgcccgctatctcattcatcttccttgtcaataagcawcagaaaagttgtttggggtcctatttggggcagggactttaaatcttcatgtcagagaagctgcatgttttctgcagagtacaattggctagaaaggtgt

SEQ ID NO: 516837 - DNA, 201 bp, Homo sapiens
gagtacaattggctagaaaggtgttataatttctactttaaacaattataagggcttgtaagggaattaagaggaaaaaaccaaaaagataaagctgtttktttttttttttgtatttacaccaatatttatttttactatttctgatgttctttactcttctctgtggacctgagtttctgtctggtatcatatcccttc

SEQ ID NO: 516838 - DNA, 201 bp, Homo sapiens
ataatggcagaatcttagggaataagggtgggagtcgattttaaataaaaacagactataacaccaaattgggccaaattcattgatatgtttgcagcttrtagagattctggactaaatgtgttagtgaaagaagacgatacagaaaacaaaatatgaacaagtcccattggttgatttttctctgtttatactagttgg

SEQ ID NO: 516839 - DNA, 201 bp, Homo sapiens
attcacacttggcagcctgagaccttcccatcatgacaccctaattccaagacattgaaggactttaagcagagaaatgacacaatcacttataaaggatmtaaaggtgactgggacagccacatgcagggaggctggcagacccctgttgaaaggctattgtgatggtcccaatgtgagacgagggggctggggcttcag

SEQ ID NO: 516840 - DNA, 201 bp, Homo sapiens
agaggttcaggcaggagaatcgcttgaactcgggaggcagaggttgcagtgagctaagatcgcaccactgcactccagtcaggatgacaggagtgaaactycgtctcaaaaaaaaaaaaaaagattacaaatgcatgtatcttttgactcagcagtaactagttctacatatttgtcttgcccatatatttacagaaataa

SEQ ID NO: 516841 - DNA, 201 bp, Homo sapiens
tcacacttggcagcctgagaccttcccatcatgacaccctaattccaagacattgaaggactttaagcagagaaatgacacaatcacttataaaggatctmaaggtgactgggacagccacatgcagggaggctggcagacccctgttgaaaggctattgtgatggtcccaatgtgagacgagggggctggggcttcaggg

SEQ ID NO: 516842 - DNA, 201 bp, Homo sapiens
cagtttgaaggagttaataaggctttcaagagagagtaaaaaataaggtcattctttatgcctctcaccattctgctctgtgtccactaagtgtctattcygaaaggtactgttagtatttcagatgtgctcagcttagggaaaatatttatttaaaaacgtttgagttttcaactcaaaaggtgaatgccttagctggtt

SEQ ID NO: 516843 - DNA, 201 bp, Homo sapiens
ttcaaggcaggcaagtaatgaaactataatccattcagattgtcactgtattttggttccttctttctcagtgagcagatcttgccttttattaccttacytctgctcacagtcaggtccttataactgaagtcattatcaaccattgcaaagcatctttactgatttctcagccttttgtcagtctcctatccaccctga

SEQ ID NO: 516844 - DNA, 201 bp, Homo sapiens
tctttattcccaaatatctgcaaagcctccccactgtgaagagtcaattagatccatctgagaaggatgtgtgacgcttcaggcactgggtgtgagcatcrataagaaagattcaaggagttaggccagaggatgggctagcctacagtaaggcggccaacccagaggtcttggtcacagggatgttgttgggattgacag

SEQ ID NO: 516845 - DNA, 201 bp, Homo sapiens
agtaaggcggccaacccagaggtcttggtcacagggatgttgttgggattgacagaggaagtttataggggtttcacttaagcttgaccatgaacctgatrctagagaggaggttggtagatgcaggcatgggtgggactcaagtgtgatcaaggcaaggatctacactgggcaggggccgccttcgggggctaagccaac

SEQ ID NO: 516846 - DNA, 201 bp, Homo sapiens
tctgttgccttggaaactacaaagatacatggggaacactgtgttcagaaatgattatctctgcaccagggttggacattgaagctgcttctctatgtcaragtggcctagattccccaggcaagagttgaatgttttgttcttactgagaatttcaaacagcaaagtttctgataatctgtgatttaagagaacagggtt

SEQ ID NO: 516847 - DNA, 201 bp, Homo sapiens
attatgtataattacagatgctcaaagaataatgtttttaatatcattgtagacgtccaggtaggtgaaagaactgaccctaaaactttgaaagatcttcrcttttcagagagtccattggaaatcccagcttatggtggaggatcaggttctagaccacccacccgccagtcccaggtaacttctaaggacaatctttag

SEQ ID NO: 516848 - DNA, 201 bp, Homo sapiens
aatcccagctactcgggaggctgaggcacaataatcacttgaagccaggaggtggaggctgcagtgagccgagatcatgccacttcacttcagcctgtgcracagaggaagactctgtctcaaaacaaaaaaccttgtatatatatatttttttgtggcaggggtggggttttcacaaagttgcccaggctggtcttgaac

SEQ ID NO: 516849 - DNA, 201 bp, Homo sapiens
taatgttgtcactcctgctttcttttgatgtgtgtgtacctccctttattgaatctatttatgtctctatttaaagttggtttctggccgggcgcggtggytcacgcctgtaatcccagcactttgggaggccgaggtgggcggatcacgaggtcaggagatcgagatcatcttggctaacacagtgaaaccccatctcta

SEQ ID NO: 516850 - DNA, 201 bp, Homo sapiens
gagcaaagacaagctatctctgctatgccctctctgaatccatagcataataaagtggtggtggtttaatttcactaagtttggggtggtttttcacacckcagttgatagtcagaagaagccttatttgacacccaggaattttgaagctcagagaggtttggtgacctgcccaagactacactgctgggtctcatgggg

SEQ ID NO: 516851 - DNA, 201 bp, Homo sapiens
agtctcgctctgccacccaggctggagtgcggtggcgtgatcccgactcactgcaacctccgcctcctgggttcaagcgattctcctgcctcagcctcccrgataattttttgtgtttttagtagagacagggtttcactgtgttagccagaatagtctcgatcgcctgacctcgtgatccacccgccttggcctcccgaa

SEQ ID NO: 516852 - DNA, 201 bp, Homo sapiens
tttgaaattgagaacattgtagccacctatttcttgggtttcctgccagcctattttgaatgttgaagggaagaaatacgagtatatgcactttaaatacrgtgatgatctattttatgtttataaaacgtttctgatgaaaattaaaattacttccaggtgactcttgctttgtaccggaagaagctggcacttactagc

SEQ ID NO: 516853 - DNA, 201 bp, Homo sapiens
caaaagcaaagttgagctttagcctgatccaaggggaactctggagaatgaattaaaccacaaagttgtccccagttgaggcaaggaggagagggagcatracctctagggcaaagcagcatccacctactgagggcactttgctggggaaggaggtccagcagtaagctcttagcagctacacaacagctggggtgagta

SEQ ID NO: 516854 - DNA, 201 bp, Homo sapiens
gttgtctggtcgtttgacaaatgaagactagttgggtagtgcagatgctggcctggtgcccagcatgaggatggaccctgaagtccctgtgtgagtggacrggcatgtcgtggacagacgtccctggagggagtgtgggcagggagcaggagaaagccttcagatcccctgtgttgctggtggaaaaggtcttcctctggt

SEQ ID NO: 516855 - DNA, 201 bp, Homo sapiens
ctataagtgcacattggaatttatatgtatatatatatagagagagagagagagagagaaaatgactgctggttcagtgtgtgtccctcagatcataccaytacgagtgcctcagcctggaaaagctaaccatgaaattgataacaatacgcttttggaaatgaaatcaggtaagaatcacatatgtttgaaattgtttaa

SEQ ID NO: 516856 - DNA, 201 bp, Homo sapiens
catatatttaggaagattgagataatgactaactgctttatacaaagatgtcagtgaaatttattaatgaggtgattaggatgcagttgagcagaaattaaaagaaaaaagtgattgaccagtctgtttttgctggttattttaatataaatcaaatgctatttgaatagattctcttttttaatgttgaaattgtcttat

SEQ ID NO: 516857 - DNA, 201 bp, Homo sapiens
atatatttaggaagattgagataatgactaactgctttatacaaagatgtcagtgaaatttattaatgaggtgattaggatgcagttgagcagaaattaaaagaaaaaagtgattgaccagtctgtttttgctggttattttaatataaatcaaatgctatttgaatagattctcttttttaatgttgaaattgtcttata

SEQ ID NO: 516858 - DNA, 201 bp, Homo sapiens
tatatttaggaagattgagataatgactaactgctttatacaaagatgtcagtgaaatttattaatgaggtgattaggatgcagttgagcagaaattaaaagaaaaaagtgattgaccagtctgtttttgctggttattttaatataaatcaaatgctatttgaatagattctcttttttaatgttgaaattgtcttataa

SEQ ID NO: 516859 - DNA, 201 bp, Homo sapiens
tgaggcacgagaaccacttgaacccaggaggcggaggctgcagtgagccaagattgcaccattgcactccagcctgggtgacagagcaaacctccatctcaaaaaaaaaaaaaaaagaatgctgtgttaatggtgatggactctacagatgggctctacattgtttttatactgttcaattaacttttgtttcctcctgtt

SEQ ID NO: 516860 - DNA, 201 bp, Homo sapiens
atttccctttggagttaacagaatcctagtgcgtgcaattactaatttgggagtgggaggagttgtgctcctgacctgagcctacattttatcattaccakagcacatgcagattgtttcttgaagattcagacaaggagaggaacacagtaaaggatgtaaagaatgttaatgtctggtttgaggatatgttataatttt

SEQ ID NO: 516861 - DNA, 201 bp, Homo sapiens
acaaagtgttattgcgatgaaaaaatagtggcgtgaataatacccgctcacagcccaagacatttgatgtatcttgggcctcagtgtttgttggattttayaatttcatgaggaagatttgtatttttttaaaaagttctatatttctgtgtgttccacttgatgtcaaatctgtattcttaggttgtagggttccattaa

SEQ ID NO: 516862 - DNA, 201 bp, Homo sapiens
ctgtaatcctaccactttgggaggctgaggtgggcgaatcacttgaggctgaggtcaggacttcgggaccagcctgtccaacatggtgaaaccccatctcyattaaaaatacaaaaattagcctgacatgatggtgcatgcctgtaatcccagctactcgggaggctgaggcacgagaaccacttgaacccaggaggcgga

SEQ ID NO: 516863 - DNA, 201 bp, Homo sapiens
agatgacacgggggaaattcctcaatattctagagaagcccaagaagtagcagctgcttgcggacaggatgtcctggggtccgaaaccaagctcccttccyggtgcacctctaacaatgcacacctcactgcttgcttgggagaggccagagggtgtacctccaggactgccctctcccctgctcctggcactctacacgt

SEQ ID NO: 516864 - DNA, 201 bp, Homo sapiens
actcctgacctcaagtaatccgcccaccttggcagccaccgcatccggcccaggctacacttcttataagaataatagggtctcctcacactttttatgtktctgaatggatatattattttttgacagcctattactagttctccacccaaatggatggctgagatagaacgtgatgacatcgacatgttgaaaggtaag

SEQ ID NO: 516865 - DNA, 201 bp, Homo sapiens
accctcccgcccccctgctccaagctccagatttcaaaatatttcttgagcaggccttatataatgggatacgagtagctggaattgttttcgaagatatwtttgtcatgggcagctatgaatgtacacaaccttttctgccttagaggtttgttttttaatataaacctccttaaaatacaatttttatacccagagagt

SEQ ID NO: 516866 - DNA, 201 bp, Homo sapiens
tctctactaaaactacaaaattagctgggcatgacaacgcacccctgtaatcccagctacttggaaggctaaggcaggagaatcgcttggatgcctgaggygaaggttgcagtgacccgagatcgcaccattgcattccaacctgggcagtaagagcgaaacttcatctcaaacaaacaaaatatccacataaaaaataaa

SEQ ID NO: 516867 - DNA, 201 bp, Homo sapiens
acatccagtttactgaaataggttctgttcctgatatccgcacctggccctctcttgaagatcttgtgggggaaagtactccatatttgcaaagctctctrcctgcatagtgtctacaccgaggacaaactcttggtgagcaaacttaagcgctcaaaggagggaggaggaatttttttttttttttttttttgagacgga

SEQ ID NO: 516868 - DNA, 201 bp, Homo sapiens
ataacgtggacaggaacagaagtgtgaagtcacatggtgcatttgaagacctgctagttgttcctgtgtagcaggagcatatggaagaaaagcaagagacraagttgttcattagatgtgagctccatgagagccaggacctcacctggcccattcgttattgtatccacattgcctagtgcataacagatgcttagtaaa

SEQ ID NO: 516869 - DNA, 201 bp, Homo sapiens
tgaagttcatggctgacatgatggaaggaataagcagctctgcctgagtgggggtttcaggaaaagcttcacagaagagacactggaagctgggtcttgargagcacataaaaatctgccagatggacatcagcagtactggaatacgaaagaggggaggagtgatgggcctgtttaagtaattagaataacgtggacagg

SEQ ID NO: 516870 - DNA, 201 bp, Homo sapiens
ggagaagcaatattaaatgctttcttataatcaggttatttcatcttttgcgttctcgtcagccactaatcttgtaattttatcttaacaaaatacagaasttgctttgacatagtttgttctttactcatcatgtttttcagtacatagaacttatggtttgggtaaccttatattcatgattgtcttaacattaggatt

SEQ ID NO: 516871 - DNA, 201 bp, Homo sapiens
ttcatattaggttaaaaataaataagtatatatgaacattttcatttataaacatgttgtcttttaatattccaaaaatattgtttttaatggaaaatgattttttttttttttgagacagaatttctctctgttgcccaggctggagtacagtggcgcaatcttggctcactgcaacctacacccctcaggttcaagtga

SEQ ID NO: 516872 - DNA, 201 bp, Homo sapiens
ctttataatttaactttgtttgcagcaatggaggaaacctttcttgttaagacaattaaggtgtctatgctttctatcatcactgctatatatatatatattttttttttttttgagatagagtctccctctgttgcccaggctagagcacagtagcgtgatctcggctcactgcaacctccgcctcacaggttcaactga

SEQ ID NO: 516873 - DNA, 201 bp, Homo sapiens
gtattcctagtggttgggtcttaactattataaactacatgttttaaatctaatttaacattagcagattaatgcaagtgaaatatattttcttatttgtattaattatattcagtatagagtgtatctttttatttaattacaagatttaataccagaaattctgagattaaaaaaaaatcttacccaagttctccctac

SEQ ID NO: 516874 - DNA, 201 bp, Homo sapiens
tattcctagtggttgggtcttaactattataaactacatgttttaaatctaatttaacattagcagattaatgcaagtgaaatatattttcttatttgtattaattatattcagtatagagtgtatctttttatttaattacaagatttaataccagaaattctgagattaaaaaaaaatcttacccaagttctccctaca

SEQ ID NO: 516875 - DNA, 201 bp, Homo sapiens
attcctagtggttgggtcttaactattataaactacatgttttaaatctaatttaacattagcagattaatgcaagtgaaatatattttcttatttgtattaattatattcagtatagagtgtatctttttatttaattacaagatttaataccagaaattctgagattaaaaaaaaatcttacccaagttctccctacaa

SEQ ID NO: 516876 - DNA, 201 bp, Homo sapiens
ttcctagtggttgggtcttaactattataaactacatgttttaaatctaatttaacattagcagattaatgcaagtgaaatatattttcttatttgtattaattatattcagtatagagtgtatctttttatttaattacaagatttaataccagaaattctgagattaaaaaaaaatcttacccaagttctccctacaat

SEQ ID NO: 516877 - DNA, 201 bp, Homo sapiens
gtacatgtgtggataaatgctcaaattgtttgtcttgtccaggcagattctgtagccatggttcttaacctagagtcctcatatgtggggtttgttttttkttttttttttttggtgagatggagtctcactctgtcacccaggctagaagcagtggcatgatctcagctcactgcagcctccacctcctgggttcaagta

SEQ ID NO: 516878 - DNA, 201 bp, Homo sapiens
actgccttttcagagaagtatgtatttttctctctattgatgaacatgtttgataaaagctgggatacttgttaaaacgttcccacacacggctggatacmttatggaactattcatgtcatatatctgtgccaaccgtaagaaaaatatgccttccaaattcctttagttctcttcagtttccataaaatgttattttta

SEQ ID NO: 516879 - DNA, 201 bp, Homo sapiens
tctccacccaaatggatggctgagatagaacgtgatgacatcgacatgttgaaaggtaagtgatgctagttaccacttttaactggatatttatgtttttmcatagaccacctctctattttttttttctgtttccttacaagtatttttggcttcagacttctcatttaaacctccttatttgtagtttttcatgtctgc

SEQ ID NO: 516880 - DNA, 201 bp, Homo sapiens
tttaattagccaacagtctcacagtgttggaggaaaacgttattaaaaaagaaaagaacaatacaataaaatattatttggataataaattgtgtatctaytgttctttgaaatgactctgcaagagggattgataactttgtattaaaggtttaataaatataggtgctggagaatgattcaatcacatgtctccaggtt

SEQ ID NO: 516881 - DNA, 201 bp, Homo sapiens
cattatcatatgtgaattatatctcagtaaagctttttactaaagaacgctgtggctgggtgcagtggctcatgcctgtaatcccagcactttgggaggcygagacaggcagatcacttgagatcaggatttcaagttcagcctggccaacatggtaaaacctcgtctctactaaaaagtacagaacattagcctgctgtg

SEQ ID NO: 516882 - DNA, 201 bp, Homo sapiens
aaagaatttccaggctgtggtgcagggagagggacccaggcagaggctggtgggcttcctgagttgaagaaatggagctgagagtgtggagaggccaagasagctagagttcacaggacagcagagtaccggagaggagagggcggcacagagaaagaagagagatccacagagggtcctcctggagtatttagctgagga

SEQ ID NO: 516883 - DNA, 201 bp, Homo sapiens
gttaatttgagaatgacttaggacacagaataagtctttttttaaacttaattttttttttgagatggggtcttgctatgttgcccaggctgatcttgaaytcctggcctcaagcactcttcccatcttggcctcccaaagtgctgggattacaggcatgaaccaccacgcctgtctgggacagagaataagtcttgatgg

SEQ ID NO: 516884 - DNA, 201 bp, Homo sapiens
aattacaatcccccaaaatttcttgaaacttgaaagttcattttaaaattttatagaaaatcaaagagccagtaaaagctaagaggctcctgggtaggtgyagtggctcatgcctgtaaccctagccctttggaaggctgaggtgggaggattgcttgagctcaggagtttgagaccagcctgggcaacatgatgaaaccc

SEQ ID NO: 516885 - DNA, 201 bp, Homo sapiens
aaattgataaatcgcatgatttaccacgtttcaatatcttaagtttagacagcagacagacatagtcgattctgtggttgatttagagataagtacagagmaaaccaagcaaactgaaaaactcagggaaaacaaaaaaaaatgtgcaagtaaggaaaagtaatcatagttaataatatgccttagctataaatagtattt

SEQ ID NO: 516886 - DNA, 201 bp, Homo sapiens
gaggtgcccagtttccccgctctgtaccaggcgtgtggaggagggcactagggagggactcattctgggtaaaaggacaggggggtcgccctgtgccttcyttatctctatttgggcgaggctgagggtcgaggaggagatgtttctggaggacgtggcttactgtagttttctccttggggtacccattgaaaggatcag

SEQ ID NO: 516887 - DNA, 201 bp, Homo sapiens
ctggggcaggagaatcgcttgaaaccaggagatgtaggttgcagtgagaggaaatcgccactgtactccagcctgagcaacaaagcaagactccatctcamaaaaaaaaaaaaaaaaaaaagattgctctcccaccctcttagccacattgaattttcttactttccttatttatttatttttttattgaaaaaaaaatat

SEQ ID NO: 516888 - DNA, 201 bp, Homo sapiens
gtggcgcaatctcggctcactgcaagctccgcctcccgggttcacgccattctcctgcctcagcctccggagtagctgggactacaggtgcccgccaccaygcccggctaattttttgtatttttagtagagatggggtttcaccgtattagctaggatggtctccatcttctgacctcgtgatccgcctgcctcggcctc

SEQ ID NO: 516889 - DNA, 201 bp, Homo sapiens
ggaggtagcaatacaggcactttttttttcattcctttggttcattcctaggaatacaggcatattatttagtcatttaagacataaaggtaatataaaakaatcagctaaacagagtgaaagtgattgccatgggaaggagttaatggagaattacaggttttcttttctttttttttttttttgagacagagtctcagt

SEQ ID NO: 516890 - DNA, 201 bp, Homo sapiens
gattacaggcatgagccaccgcgcccggccaagatctttaaattaaaacgttattgctcacatattttcagttttgtgtcatgaaatctgtgtgcccaaamaatccaaaatatataattcattttctgggtgggaagcaactatatttctgtctcatgatgggaaatagaacccaaaattcaaggctttagcaatatgttg

SEQ ID NO: 516891 - DNA, 201 bp, Homo sapiens
attcaagagtcatagtgcaaatctcatcaaggcatgtatccccaaaccactcaggctggtatctctcctggggaagaggccaacactggcctctgctgctttttttttttttttttttttagaaaaagaaagaaaaactaattatcaacctgcagcaaatgtcattcaactcaaatccatgaaggataaaagcataggaga

SEQ ID NO: 516892 - DNA, 201 bp, Homo sapiens
cgggatcatgcctgtgaatagctgctgcactccagcttgggcaacaaagtgagaccccttctcttaaaaaaacaaaaactaaaacagtataatacatttgaaaaaaaaaaatggtacacctagcctgggcaacatgtcaaggtcccatctctgcaaacaaattaaaaaattagccaggtatggtggtgcatgcttgtggtc

SEQ ID NO: 516893 - DNA, 201 bp, Homo sapiens
gtaaggggatgtttgtatattatgccataagatatgcatcagaacaccctagataaagttttaacttaatgtgagaataacatatcatgcaatggtccaaatacattttactaaactgataggtcactcaaccattcattagtctctcctatgtctttttgagttatttagaaactgtgacttagtaagcaaaaacacagc

SEQ ID NO: 516894 - DNA, 201 bp, Homo sapiens
tttagttgtctatagtggtttgtttttacccccttttaggttagttggtgatgattgaatctgttgtgatagcaacttgatatataatttaaatcaatctrcatttttaaattaaatcttcctatgattcttttttccgattttaggttttcattgatcatttgtttgctttgtgattccagccagagagatgacacgggg

SEQ ID NO: 516895 - DNA, 201 bp, Homo sapiens
taaggggatgtttgtatattatgccataagatatgcatcagaacaccctagataaagttttaacttaatgtgagaataacatatcatgcaatggtccaaatacattttactaaactgataggtcactcaaccattcattagtctctcctatgtctttttgagttatttagaaactgtgacttagtaagcaaaaacacagcc

SEQ ID NO: 516896 - DNA, 201 bp, Homo sapiens
tctcactccgtcacccaggctggggtgcagtggcgccatctcaactcactggaacctctgcctcccgggttcaagtgattatcctgcctcagcctcccgartagctgggattacaggcgcgcacaccacgcgtggctaatttttggatttttagtggagacggggtttcaccatgttggacaggctggtctcaaacacacc

SEQ ID NO: 516897 - DNA, 201 bp, Homo sapiens
aaatcatgacttgacataggggtcatgcttctctcctgcacggcatacaccagtagctgatgaccagtgggcccctcttggcatagttattagaatggaarcggtgttgccttcctgtgaaaccttgtaatcttagagaataaatccagaatcaaaaaaatagttgacaggctgggcgaggtggctcatgcctataatcct

SEQ ID NO: 516898 - DNA, 201 bp, Homo sapiens
agctgttacatgtagggcaatatgtctttaagtagggataagttactctaaaagaaatgaatcttagatagttttcccaccaagcatcctattgcttaagkaaactttctgtttgaaatgaaacaaatagttttacagtagctagcatttattgaatgcctgtgtgactttgtattaatcctaccttgaatgaatgaggaa

SEQ ID NO: 516899 - DNA, 201 bp, Homo sapiens
agaaaatagttaaagatgctttggtttttccaggaaagtggttttccaaaaattttcaaataatgatggtaatacattaaaaaatatatcactcaacaagkttgtcagaaaacttacacatcaaatcaagaaaacagtgagttaaggaaagaggaaaacacaccttcactttcttttttttttttttttaagacggagtct

SEQ ID NO: 516900 - DNA, 201 bp, Homo sapiens
ggactggcatttgtgcacaagcatattacctttttatttttaaactaaatggccaatgatatgttttgatcaacatcagatggagataagatggggataamtactgattctgtggcaatgccccctttctccattagtggcatgctcattcagctcttatctttatacttcattaagttattttgcctcatcatttaataa

SEQ ID NO: 516901 - DNA, 201 bp, Homo sapiens
tgatgaacatgtttgataaaagctgggatacttgttaaaacgttcccacacacggctggatacattatggaactattcatgtcatatatctgtgccaaccrtaagaaaaatatgccttccaaattcctttagttctcttcagtttccataaaatgttatttttatcatgtgtaagagtactgttagggaatctcgtagcca

SEQ ID NO: 516902 - DNA, 201 bp, Homo sapiens
acagatttcatctattgatttcataagtaagtgatgcaagttttaatgactaatgtgagactaacattttccttattcgttcctttccaattctaagataytttaatgcatcaactgaatagtgaagtcattattgcaaatgcttttatcacatagtgccgaagttagttagcaaatagttaaagaaaatagttaaagatg

SEQ ID NO: 516903 - DNA, 201 bp, Homo sapiens
agaattcaatctgattcagaatataaaaatattctactgtcccatcattttttgttctttaataagctttaacattgaagtataatgtatataaagaaaarcacacaaattataatgtacaactcaatgattttcataaaattaacactcccctgtaaccgttggtcaaaacagatcaagatacagaacgttgcgcctggt

SEQ ID NO: 516904 - DNA, 201 bp, Homo sapiens
atacctgttaacaacagctagctccatctcaaaggcagcattgcctttgagaatagtctctttctgtgggaaagcatgtctttgactttatttgaatcttyctaatatctagtacatagtgtgtgctccatgtgactgccttcactcttcaccaccccctccatgcttcttttctgcacagcacacactgataactgatca

SEQ ID NO: 516905 - DNA, 201 bp, Homo sapiens
atgattctcacaaaccctcgcagggctgctggctgacctcatctcgatactgaaccgcaagagaaacatgatctctctcctgtctcctcagtttgggaccrttgccgtggcagcaagagaagcgggggacgttctcggcccctcgccctgagagtcgcgaggagaatcagtattgagcttttaagtgtcgtcttgcacagg

SEQ ID NO: 516906 - DNA, 201 bp, Homo sapiens
aattataatcaagagaggtttttattggcttctcagtgtgaagatgtaaccctttcccttccctgggggtcaagaagactaggccttcatcatccctagaygttagctgttgccagctgccagccccttgaagtcagatagacagggcaggaaagttgtctgaatatgcaggtcatttgaaattatctatactgtgatcct

SEQ ID NO: 516907 - DNA, 201 bp, Homo sapiens
aaccacagatacttctttgaaaacaaagtgaatcatggcatactcctgctatatatatatatatattttttttaattaatttatttattttagagacaggktctcactctgtcactcaggctggagtgcagtggtgtgaacttggcccacctcagcttcgacctcctggactgaagggatcctcccaccttagcctcccaa

SEQ ID NO: 516908 - DNA, 201 bp, Homo sapiens
gattttttgtaggggaagggggttggagagtaggcagagtataaattaatttggatggtgttggtttcaaagtagcattccatgtaattctgcagaaagtrtgataaataagaaaatgggccaggcatggtggctcatgccataatcccagcactttgggaggccaaggtgggcagatcacctgagattgggagtttgaga

SEQ ID NO: 516909 - DNA, 201 bp, Homo sapiens
tacctaaagacagctacaaagctcattagtgacagaacctggcatctgaatcttgagatcatgaaaagggaaaggcatgttaacatttatgagcctgttaygtttcttacatgtgtatactcatttaattctcactactattctttattattcccatttaaacagatgaggtaacttgaggttcagagagcttcaattatt

SEQ ID NO: 516910 - DNA, 201 bp, Homo sapiens
ttccacttgatgtcaaatctgtattcttaggttgtagggttccattaaaaaaaataaataatctcagcccctcctccctccacccccgtttccccccacaytcattttgtataatatggtaatgatatcaccgtagcagtaattacgggtcatcttcatttctttcatctctgcctgttctggtggcttcattcctttgac

SEQ ID NO: 516911 - DNA, 201 bp, Homo sapiens
tccatgtttcttgatcctatctgttgatgagggctggaagttcaagaaagtataaatttaaattattttaacctgaaaaataaagccagagaacttgattsaaaagcaccccaaagactgtgttgaaatctgcattgcaaatactgatggaaacttatccttgttttctttgttttatgcattactttaccatcttgccat

SEQ ID NO: 516912 - DNA, 201 bp, Homo sapiens
ctaactacatataacaacaagacccctggatgcagcttaaggtttctttctatttcatttatttatttatttttgagacagggtctcactctattgctcargctggagtgtagtgacacgatcatccctctccctattgatggatatttgagttgtttctcatcttcagttattacaaatagtactgaactgaataggcat

SEQ ID NO: 516913 - DNA, 201 bp, Homo sapiens
aagtttaaatttgaagtaacaggaattggtccaaaatatttgttgttgctcatgttttaaataagcgacattggattatatcagcactgggataattcccrttaggtattatgactgcaatttacatgcaattggaaattagtgattgagagggaaacagattgccaaattatcttccaaaaaggtactccccactccata

SEQ ID NO: 516914 - DNA, 201 bp, Homo sapiens
taacatttattattctattaaatcggcaactgtttggcttccctgaaatacagttcaaagaagaatggcagaaaaaatgttaaatttttcctcttttcatytgtcaattttcagaatgagttgaagtgactgaggacttttttaaaatatcatagatgtttgtatttgttgtatttagatctattacaatcattattcttt

SEQ ID NO: 516915 - DNA, 201 bp, Homo sapiens
gctccggaggtgcccagtttccccgctctgtaccaggcgtgtggaggagggcactagggagggactcattctgggtaaaaggacaggggggtcgccctgtsccttccttatctctatttgggcgaggctgagggtcgaggaggagatgtttctggaggacgtggcttactgtagttttctccttggggtacccattgaaag

SEQ ID NO: 516916 - DNA, 201 bp, Homo sapiens
taatgtaagtagatgttttagaattgcaatatttattggtttagtatttgtcatccttagaaatgttaatgatgtatttttatattgataatataaatttrtgtacagtatgtgtgtatatgtatttcaggatgttatagtattgtactttgtatgtgatggtttttgtgtcttcataataaatatgtcccttttacagga

SEQ ID NO: 516917 - DNA, 201 bp, Homo sapiens
aaggttaggttgtaggggctttgattttaatttaaacttattatcgattgatatttctgtatctcactaaatgcggttgaagagtgtgtgtgtgtgtgtgygcgcgcgcgcatgtggccaaaaaatagtgccataatgtcaaattcttcctttgctctgtttttgagagttgatgacatcaggcacttttcagtgtttggg

SEQ ID NO: 516918 - DNA, 201 bp, Homo sapiens
ggccatttgcagtggctcacacctgtaatcccagcattttggaaggacagagtgagaggatcacttattaaggtcaggagttcaagaccagctctggcaaygtagcgagacctcatctacaaaaaaatttttaagaagaaaaaaagccggtccaggcatggtggccagctactcagggggctaaggtgggaggactgtttg

SEQ ID NO: 516919 - DNA, 201 bp, Homo sapiens
gggctaaggtgggaggactgtttgagcctaggaggttgaggctgcagcgagccatgatcacaccagtgccctccagcctgggtgatagcaagaccctgtcaaaaaaaaaaaaaaaattctagtacatgcttatgcttatactagaatctaattaaccagattttcccccgtctattgtgttttgccacattatgtataatt

SEQ ID NO: 516920 - DNA, 201 bp, Homo sapiens
aaattatggtctgtattatcattgaaatagtattctttcatttaatacacatttactatatgttaaccataagcaggttaagctgtagagtttcagtgatacagactattatactcaatataattttctggctgaggatccttttgtgttctaattattttaaactagtagttcatgaattttttaaataagattattcag

SEQ ID NO: 516921 - DNA, 201 bp, Homo sapiens
aattatggtctgtattatcattgaaatagtattctttcatttaatacacatttactatatgttaaccataagcaggttaagctgtagagtttcagtgatacagactattatactcaatataattttctggctgaggatccttttgtgttctaattattttaaactagtagttcatgaattttttaaataagattattcaga

SEQ ID NO: 516922 - DNA, 201 bp, Homo sapiens
attatggtctgtattatcattgaaatagtattctttcatttaatacacatttactatatgttaaccataagcaggttaagctgtagagtttcagtgatacagactattatactcaatataattttctggctgaggatccttttgtgttctaattattttaaactagtagttcatgaattttttaaataagattattcagaa

SEQ ID NO: 516923 - DNA, 201 bp, Homo sapiens
ttatggtctgtattatcattgaaatagtattctttcatttaatacacatttactatatgttaaccataagcaggttaagctgtagagtttcagtgatacagactattatactcaatataattttctggctgaggatccttttgtgttctaattattttaaactagtagttcatgaattttttaaataagattattcagaaa

SEQ ID NO: 516924 - DNA, 201 bp, Homo sapiens
ttgtgctttttatttatttgtttatttttttgagacaaggtctcactctgtcacccaggttagagtgctgtggcgcaatctcggctcactgcaacttctgmctcccaggctcaagcagtcctcccaccccagccttctgagttgctgggaccacaggtgcccaccatgcccagctaattctttgtattttttgtggagagg

SEQ ID NO: 516925 - DNA, 201 bp, Homo sapiens
gcagtaaaattggattagtgaggtcatcatttacatatacagttgttgatagtgtgagggcaaagtattaatagtagaaatttagttagactagtggaatkttaacttaagctattcctttttgtgacttgttagctatcaaactggcctggacctgaaagttagtcttgctacctatctcaaaagcttcttttgagaaga

SEQ ID NO: 516926 - DNA, 201 bp, Homo sapiens
cttgttttatctgtaccccctttatcacactttttgttatgttgtttactataatattttaaggcaaatcctagatgtcataccatttcattcataaataygttcatacatatctctaaccagaagatccccccttttttgaaacactaccattattaacatatcaaacagaataaaataataattatttaataacatcta

SEQ ID NO: 516927 - DNA, 201 bp, Homo sapiens
cccaccttggcttcccaagttggtgggattacaggcgtgagccaccacacccggcccccacattttaagtttggataattttatcctagtgatgtcatttracatgttcttctttcccgccaaatttcctgtaagctgatagagctagataatggattgggtttggattcagtctttttggcaagaatgcttcataatggt

SEQ ID NO: 516928 - DNA, 201 bp, Homo sapiens
gtcagtatagcctgaaagacaagagaaacgggatggtttataggagttcccatttggttgaaagctagaagccctaattgaccttaaagtaacatgctatrggatggtgggattgtcccctctgacagcacatatgaaatagttcatctatataatagaaacgcacacacacgaaagagaatcttctgacttaaatacaac

SEQ ID NO: 516929 - DNA, 201 bp, Homo sapiens
gctatatttccagggaagcatttggtgaggttttctttttattatagaaaatttttaagctaactaaagtacagagaatgttacaatgaaccctgtgtacycatccccagcttcaaaaatgatcaactttctgctattcttgttttatctgtaccccctttatcacactttttgttatgttgtttactataatattttaag

SEQ ID NO: 516930 - DNA, 201 bp, Homo sapiens
ggctaaaatctattatatgtgttctccatatttcttgtataagccagtccccagcatctgatgttttgagaagtgcatggagtttcctaaactttgcacaraagaatatcctggggccgggcatggtggctcacgcctgtaatcccagcactttgggaggccgaggcaggtggatcataggtcaaaagatcgagaccatcc

SEQ ID NO: 516931 - DNA, 201 bp, Homo sapiens
ccacattgtatttatctacctggtgatgggcgtttgagttgttttcactacttggctacttcaaataatgctgctgtgaacattcaggttcaaccaaaacwcacaactttttgggtaaacatgttttcattttcttaggtttatagctagaggtggaattcctgggtcatgtggtaactctatatctgatctattgaggaa

SEQ ID NO: 516932 - DNA, 201 bp, Homo sapiens
aattacctgagcatggtggtacgcacttgtaatcccagctactggagagactgagaggtgggaggatcacttgagccaggaggtagaagctacagtgagcygtgatcatgccactgcactctagcctgggtgatggagcaagactctgtctcaaaaaaaaaaaaaaaaaaaaggaaaaaagaaaagaaaaggaaagaatgg

SEQ ID NO: 516933 - DNA, 201 bp, Homo sapiens
ttctctttgtcttttgctcataaatcattggtactacttcattacccataggataaaatttaggccccttagtgtggcattcaaaatcctttgcattctgrccctcgccggattactctagccttcttacatctcctctaccaaaacacatgcactgtctctgtctgaagcttcgggaaattgttctttttctgggtagtt

SEQ ID NO: 516934 - DNA, 201 bp, Homo sapiens
tgcaattgtaagagcacataatgggcacacagtaaaatgtctactaactgattaaactagtttagaactctaaccttctgattttgaggccagtggtctarcatataaaaatgctgcttttcactttcactttggcattggtatgaatgcaattaaaattaatgaagtgaaaaaaatacattttaaatttaattattaaga

SEQ ID NO: 516935 - DNA, 201 bp, Homo sapiens
tgtatttgcattaaaaacaagatttttttttttttgtccttacagattattcatctactctaggggttggcttttacttgacaccctaatctggtgtttcratgtctaaatcctctttcctgcattaattgagaggatgacatgggtgaaaaataagcagtaggaactgatgaatccccaaggaccagtgatcctgttttt

SEQ ID NO: 516936 - DNA, 201 bp, Homo sapiens
ggttcacgccattctcctgcctcagcctcccaagtagctgggactacaggcgcctgccaccacgcccagctaatttttttttttgtatttttagtagagayggggtttcaccgtggtctcgatctcctgacctcgtgatccgctcgcctcggcctcccaaagtactgggattacaggcgtgagccaccgcgcccagcctag

SEQ ID NO: 516937 - DNA, 201 bp, Homo sapiens
gaaataaaaagggataggtgaacatgttaattaagctctaccacaggaatgtaatcaacaaaacccagaatttgaaaaatctacagaacaaatgactaggyttaacaaatgatggggaaataaaatgcaggtggaactatgacaatcagatttattcattgtaatattcttcatcagtcttatacctagagtagcaggctt

SEQ ID NO: 516938 - DNA, 201 bp, Homo sapiens
agacccctggatgcagcttaaggtttctttctatttcatttatttatttatttttgagacagggtctcactctattgctcaggctggagtgtagtgacacratcatccctctccctattgatggatatttgagttgtttctcatcttcagttattacaaatagtactgaactgaataggcatgtgagtaactctaaagtgg

SEQ ID NO: 516939 - DNA, 201 bp, Homo sapiens
agttatagctgaaattatggttcctctaattagtttctctttttctgctttcctactgagaaaggtaatgaagtattttttcctgctttttattatttatrccaaagtagagtgaacggaataatgacccatggcccagcttcagtaatcaacatatagccaatcttgttttacttataacaatttcctgtagctacttta

SEQ ID NO: 516940 - DNA, 201 bp, Homo sapiens
agggagaatgcagcaaaaagattctttttctggtattctcaacatctgagagattgtcttcccttagcaaatgtaactctaacaaattcttattaaatatraggtctatgaaatctacctataaaatgagcacctggcacttctgtggtaaattagagagtcagcttgtcgctttcaagacaggaccttgacattcatgag

SEQ ID NO: 516941 - DNA, 201 bp, Homo sapiens
ttcttattaagtgggtaagcttatctgaggaattttgcaatagtgggaaaattccctgatttgtgtgtgtttaagattgggggaggagttacggatccatyttctacttattcagtggtaattaagcttgaaaacttgtataacaagagttcccaacccaaggaagttgctactagagaagagtggaaagaaatgatgttg

SEQ ID NO: 516942 - DNA, 201 bp, Homo sapiens
gtacaagtcaatgggtttttaatacagtcatatgttgcttaactctggggatatgttctcagaaattcaacattaggtgatttcattgtgtgaacatcatrgtgtgttcttacacaaacctagatagtatagcctactacacacctaggctatatggtatagcctattactcataggccacaaacctgtacagtatgttac

SEQ ID NO: 516943 - DNA, 201 bp, Homo sapiens
aatgaatgaggaaaggagctcagaaaaataacttggtaatttgcctatgtggcccagggtcaatgtaagagctgaagtcctgctcttttcacaatattacrttgtctcctttgtttcctggccactcatattacaatctcctaaaagcaacctgttattgctcttctgaatatgagaaacccagtggaaagtaatttgtcc

SEQ ID NO: 516944 - DNA, 201 bp, Homo sapiens
agaaggttaggttgtaggggctttgattttaatttaaacttattatcgattgatatttctgtatctcactaaatgcggttgaagagtgtgtgtgtgtgtgygcgcgcgcgcgcatgtggccaaaaaatagtgccataatgtcaaattcttcctttgctctgtttttgagagttgatgacatcaggcacttttcagtgtttg

SEQ ID NO: 516945 - DNA, 201 bp, Homo sapiens
attgaccttaaagtaacatgctatgggatggtgggattgtcccctctgacagcacatatgaaatagttcatctatataatagaaacgcacacacacgaaaragaatcttctgacttaaatacaactttcatggagttcttcaccacttatctgtctctgttaaaatctgaaaatctagcccatggctaaaatctattatat

SEQ ID NO: 516946 - DNA, 201 bp, Homo sapiens
ctttgggaggccaaggctgttgcatcactggaggccaggagttcaagaccagcctggccaacatggtgaaaccccatctctcctgaaaatacaaatattakccgggcgttatggcgcatgcctttagtctgagctactccgaagtctgagacacaagaatcacttgaatgggaggtagaggttgcagtgagccaagattgc

SEQ ID NO: 516947 - DNA, 201 bp, Homo sapiens
gtggtgcaatctcgactcactgcaagctccgcctcccgggttcacgccattctcctgcctcagcctccccagtagctgggactacaggcacccaccaccaygcctggctaattttttttgtatttttagtagagatggagtttcaccgtgttagccaggatggtcacgatctcctgacctcgtgatctgcccacctcggcc

SEQ ID NO: 516948 - DNA, 201 bp, Homo sapiens
tgatcgtctcttctctgccccttcattctcccctccccttttccttggagaccactctagtaaagatagatgctaaatccattaaataaagattagactcsgtcgtagtagaaaatggcagcttagctagatccccaggcaaattggagccttttgcaatacagaaaattaaaatatacatttttaacaagtgtgctatct

SEQ ID NO: 516949 - DNA, 201 bp, Homo sapiens
tgtgtattccaccctgagctcaggtattccaccctgagctccagttataattcagaaagtatattagggaaaagagaagcattctgaaggtaagaagtcartctaattcattgactttttatggtggagtgtggtggaataattactggatttactaggtaacaaatgatttttcttttttttttttttttgagacggagt

SEQ ID NO: 516950 - DNA, 201 bp, Homo sapiens
gttttccaaagtggttatatcaatttacaaacctatcagcaatttcagttgctccaagtccttaccaacaggtgtattctcagtcttttaacttctagtcrttctaataaatggtatcttaatgtggttttaatttgcatttccttaatgactaatgaggttgagcacctttttgtatgtttattggccatttggataaca

SEQ ID NO: 516951 - DNA, 201 bp, Homo sapiens
ttcttccaagattctcaaggttaaggactgtattgtagccttaacactgagtacaatagatagcaatagagggctatagttttggtaaaaattctaattckttgggccgggcatggtgactcatgcctgtaatcccaacactttggaaggcctaggcaggcggatcatttgaggtcaggagttcgagaccagcctcgccaa

SEQ ID NO: 516952 - DNA, 201 bp, Homo sapiens
actcatttttagttctaccatcctcatcccaactatatatcgattttattgatatataggtttccttcccttagacaaaaacattttatatttggaaggartcttggaagttcattgcaggaatgaagaaattgaagccaaggtgagctatattaagtacctgctacatgaaaggcataatgctaggtgctttgggagacc

SEQ ID NO: 516953 - DNA, 201 bp, Homo sapiens
aggctggtctcaaacccctgacctcgggtgatctgcccgccttggcctcccaaagtgctaggattacaggcatgagccaccatgcctggctgaatttttgyattatttttatacaggtgaggtatcattgcccaggctggtcttgaactcctgggctcaagtgatcctcttgccatagcctcccaagtagctgggactgaa

SEQ ID NO: 516954 - DNA, 201 bp, Homo sapiens
cttttaagtcaaaatatagtatctttgttattaaaaacagtacagcataatacaaattctgatgttatttgaatttaaacagaattgaatttatgaagtaytttttctttaattatatggcagtaatgtcccaatgctcaaattttttatccagaccattgattaattagattttctgccagttctcttgcgagaacaaag

SEQ ID NO: 516955 - DNA, 201 bp, Homo sapiens
ctcctaggttcaagtgattctcctgtttcagccttctgagtagctgggactacaggcgcctgccaccacacccagctaatcgttctatttttagtagagayagggtttcgccaggttggccaggctggtctcaaacccctgacctcgggtgatctgcccgccttggcctcccaaagtgctaggattacaggcatgagccac

SEQ ID NO: 516956 - DNA, 201 bp, Homo sapiens
gattacttagtgtttttttgtgtgttttgttttgttttttgagacagagtttcgctcttgttgcccaggctggagtgcaatggcatgatctcagctcgcckcaacctctgcctcctgggttcaagtgattctcctgcctcagccccctgaatagctgggattacaggcttgcaccaccacgcctggctaattttgtatttt

SEQ ID NO: 516957 - DNA, 201 bp, Homo sapiens
ttaaaatggtaaaatttatgtatatttcaccacagttgaaaaaaaaagccaagtaatacaagtagaagtaattgttattaaactttttagtttatttttamattgtttttacaaactttggggattttagagatgtgttccttgagtttgatttttttcccctgtcatctctcaatttagtttcctttctttggccaggaa

SEQ ID NO: 516958 - DNA, 201 bp, Homo sapiens
ggagtgcagtggtacaatctcagctgtctgcaacctttgcctcctaggttcaagtgattctcctgtttcagccttctgagtagctgggactacaggcgccygccaccacacccagctaatcgttctatttttagtagagacagggtttcgccaggttggccaggctggtctcaaacccctgacctcgggtgatctgcccgc

SEQ ID NO: 516959 - DNA, 201 bp, Homo sapiens
ggtcttgaggagcacataaaaatctgccagatggacatcagcagtactggaatacgaaagaggggaggagtgatgggcctgtttaagtaattagaataacrtggacaggaacagaagtgtgaagtcacatggtgcatttgaagacctgctagttgttcctgtgtagcaggagcatatggaagaaaagcaagagacgaagtt

SEQ ID NO: 516960 - DNA, 201 bp, Homo sapiens
tgtgtttttgtttttttgttttttttaatgtgaaaaaaatacctactttatagagttgatttggaggtaaatgacttgatgcatgtaaagtgttttgcttrtcacataataggttctgagtacattttaattaaaaaaagagaaagacgcaaagctgaaataatgtttctcaaccctaccttttgtgcatgacagaatcat

SEQ ID NO: 516961 - DNA, 201 bp, Homo sapiens
aggggacgggtgtttattgacttagtcaatagttggctaatgttggccaggctggtctcaaactcctgacctcaagtgatccacccgcctcagcctcccamagtgttgggattacaggtgtgagccaccatgcctggcctatgtccagaaattcttaacatgtaacccaattcactcaggttttagattaagtatgtttcc

SEQ ID NO: 516962 - DNA, 201 bp, Homo sapiens
gggttcaccatcttggtcaggctggtctcaaactcctgacctcaagtgatccacctacctcagcctcccaaagtgctgggattacaggtgtgagccaccgygcctggccttttaaaattttttgtggagaagaggtctcactatatttcccaggctggtcttgaactcctgggttcaagtgatcctcctgctccagcctcc

SEQ ID NO: 516963 - DNA, 201 bp, Homo sapiens
aacaagccactcaagaaatggtcagtttttaaaattgctgagcagaacctgctatagatatttccagtatggagaagagaaacacttggatttctgatttstgtatgtttaccaaaacagattctaagatataagaaaaatattgctagagtaatattttcttttatgcagctagcatagtgagtccaagagtttattttt

SEQ ID NO: 516964 - DNA, 201 bp, Homo sapiens
ctacttcattcttttaaatatatttcattgtatggatatattatagtttatgtattcatacattatttggaaacttaagttatatctactttgtagttttkttttttttttaatttgagcaagggtctcactctgtcacccaggctttgtgcagtggcgtgatcacagctgactgcagcctcaacctcctgggctcaagtg

SEQ ID NO: 516965 - DNA, 201 bp, Homo sapiens
gactgtatcttatcaactatttggttacctcgaaaactgcttctactggcatgatgggataaatgattctttttctttctttattagttttcagaataatsagtttgttccctaagcatcagtaaagtttattttaatgactttcaatggaatcaaaaacttggtgtggcatttgttatttttttaaatccacacaattaa

SEQ ID NO: 516966 - DNA, 201 bp, Homo sapiens
taatctggggaatccgatcagcccaagaagaataaaggcactgacactggaagttctacaactaaacagcctgatcacactgtagcaaagcttacagtcarcaagcctagctcctacttgagttttcaagcagctttttagtctcctattcttacataggaaaagaaattaccaatgtttgagaaaagcccctaaaatgaa

SEQ ID NO: 516967 - DNA, 201 bp, Homo sapiens
aggctggtctcgaactcctgacctcaggtgatccacctgcctcagcgtcccaaagtgctgggattacaggtgtgagccaccgtgcctagccaacaataatwattattattatatatatgtatatatatatatatgttttttttagacggagtttcgctctagttgcccaggctggagtgcaattgctcagtgttggctcac

SEQ ID NO: 516968 - DNA, 201 bp, Homo sapiens
gtgtgagccaccatgcccggcctgcactgaaaatgtagcaaattatgcacgcattatatgctgaggccatctctccctccacacccaggccttcactctcsggtcaggaaattagaagagactaatctggggaatccgatcagcccaagaagaataaaggcactgacactggaagttctacaactaaacagcctgatcaca

SEQ ID NO: 516969 - DNA, 201 bp, Homo sapiens
ttgtatttttagtagagatggggtttcaccgtattagctaggatggtctccatcttctgacctcgtgatccgcctgcctcggcctcccaaagtgctgggaytacaggcgtgagccactgcgcccagccgtttttgttttttttttccttttgagacagggtctcactctgtcacctaggctggagtggagtgacacgatct

SEQ ID NO: 516970 - DNA, 201 bp, Homo sapiens
aaccaaaactgtataagagaaatgcttgtttctgccaaatgagtcccatgagcacagctgagattgttcagaattatcttctacctcaaaatttggtgttmtttcaatttccatagcattgctttgcaactgattgccgttttccttgaccatcgtgaatttagctgacatgaaatagctttaaaatttagaatgagaaac

SEQ ID NO: 516971 - DNA, 201 bp, Homo sapiens
aagagtgaggtttggtaagggagaatgatttatttgtattctatcacggaccagtggcatcaatagttacagaactcatatctctagacttccaggtgagygttccagtttatgtcctttgagattgaagtatcatatacattaatgtgtttcctgtcttcttggttcatctggatgttttgttctagggacagatctgga

SEQ ID NO: 516972 - DNA, 201 bp, Homo sapiens
agtcagggcgagcacttttgggctccagccccacggtagcatctaggggtgggtgcctgtgactcccaaagcccaagtgggcatgtataacagtgcactcttttttttttttttttttgagatggagtcttgctttgttgcccaggctggagtgcagtggtgtgatcttggctcactgcaacctccacctcccaggttcaa

SEQ ID NO: 516973 - DNA, 201 bp, Homo sapiens
ttgtttgtttgtttgtttgtttttttgagatggcgtctcattctgttgcctgggctggagtacagtggtgcaatcttggctcactgtaacctctgcctccygggtttaagcaattctcctccctcagcctcctgagtagctgggattacaggcgcctgctaccacacccagctaattttttgtatttttagtagagacagg

SEQ ID NO: 516974 - DNA, 201 bp, Homo sapiens
tagctttgcacctatttaggttacagcataaaatctaggaactccactttgaagggatcatggttattcttaattagaaattgtcaatttagccttaagtrttttattttttgaaatgttttatgataatgtgaagtaaaccatgccattatttctcatttttcccttggttaacaaattaggatatacaaatcttcaaat

SEQ ID NO: 516975 - DNA, 201 bp, Homo sapiens
tatggaacctcgttttcccgccgacggttggccacgtcacgtgacatgggttggaagatggcgtctcccacagacggtaagagccggcttagagatctttkcctgcagcctccttctttgctctactgggaacatccactctgtctctgcccctcgaacatacatttctttcttgggctcttctcctttcccttttatttt

SEQ ID NO: 516976 - DNA, 201 bp, Homo sapiens
gcttactgcagcctccaactcctgagttcaagccatcctcctgcctcagcctcctaagtagctaggactataggtgtgcattaccatgcccaactaactgttttttttttttttttttttgagacagggtcttcctctgttgcccagtttggagtgcagtggtgtgatcatggctcatttcagcctcaacttcccgggctc

SEQ ID NO: 516977 - DNA, 201 bp, Homo sapiens
tttgataaaataaaagcctgcctcctctgttagtaatgaattagagctgcagggaactggaaacaaaatgaaagagcctggataatataggctaatggttytcagactttagcatgagttagaatcacctgtagggctggctaaaccatggatcctgtgctcaagctcttgagtttctgattcagtagatttggtatggag

SEQ ID NO: 516978 - DNA, 201 bp, Homo sapiens
tcagcatcccaaagtgccaggattacaggagtgagccactgcgcccagctggctactgttattttttaaaaatataacaatagtttcattattataactamaatttttttaacaaacttgttaaatatcatcaaatagccaatcagggtttagatttctgtagttgactcataaatgcctttatacagttcattttttgag

SEQ ID NO: 516979 - DNA, 201 bp, Homo sapiens
aatttagaatgagaaacaattacattgatgtgtattgaacttcttacatacagtctctctttgttttattgtgtgtagtgtatttgcattaaaaacaagatttttttttttttgtccttacagattattcatctactctaggggttggcttttacttgacaccctaatctggtgtttcaatgtctaaatcctctttcctgc

SEQ ID NO: 516980 - DNA, 201 bp, Homo sapiens
agaattgaatttatgaagtattttttctttaattatatggcagtaatgtcccaatgctcaaattttttatccagaccattgattaattagattttctgccmgttctcttgcgagaacaaagccagaaggacagggcaagcttcctttgtgcttcaggatagaggtaagaggtgcctttgtctttagtgaagaaacccaggt

SEQ ID NO: 516981 - DNA, 201 bp, Homo sapiens
atttagaatgagaaacaattacattgatgtgtattgaacttcttacatacagtctctctttgttttattgtgtgtagtgtatttgcattaaaaacaagatttttttttttttgtccttacagattattcatctactctaggggttggcttttacttgacaccctaatctggtgtttcaatgtctaaatcctctttcctgca

SEQ ID NO: 516982 - DNA, 201 bp, Homo sapiens
tgcttgtcttctcagctaaattgtaaggcccttgtagtgaactcagggactgtgctttatattacttctgtatattacagaataggactatacgaatgcakgttgaatagatggaatcattttatatttacaattaagtaagaaaatggaaacatagccatcaaagcagtcaaggaacaggtaggcacttaccctttctat

SEQ ID NO: 516983 - DNA, 201 bp, Homo sapiens
gctgcttgggaggctggggcaggagaatcgcttgaaaccaggagatgtaggttgcagtgagaggaaatcgccactgtactccagcctgagcaacaaagcargactccatctcacaaaaaaaaaaaaaaaaaaaagattgctctcccaccctcttagccacattgaattttcttactttccttatttatttatttttttatt

SEQ ID NO: 516984 - DNA, 201 bp, Homo sapiens
ttggagacagggtctctgttgcccaggctagagtgcggtggtgcagtcatagctcactgcagccttgacctcccaggttcaagcaatcctcccagcccagmctctccagtagctggaaccacaggacagtgccaccatgcctgactgatttttttttttttaatttttattttgtagagatggggtctccctgtgttgccc

SEQ ID NO: 516985 - DNA, 201 bp, Homo sapiens
aaggacaggggggtcgccctgtgccttccttatctctatttgggcgaggctgagggtcgaggaggagatgtttctggaggacgtggcttactgtagttttytccttggggtacccattgaaaggatcagttctcttctgattgagcgcacggatggaatgattctcacaaaccctcgcagggctgctggctgacctcatct

SEQ ID NO: 516986 - DNA, 201 bp, Homo sapiens
atcaggttatttcatcttttgcgttctcgtcagccactaatcttgtaattttatcttaacaaaatacagaacttgctttgacatagtttgttctttactcwtcatgtttttcagtacatagaacttatggtttgggtaaccttatattcatgattgtcttaacattaggatttggggatagaccttaattagtatcacatt

SEQ ID NO: 516987 - DNA, 201 bp, Homo sapiens
acagggtctctgttgcccaggctagagtgcggtggtgcagtcatagctcactgcagccttgacctcccaggttcaagcaatcctcccagcccagactctcsagtagctggaaccacaggacagtgccaccatgcctgactgatttttttttttttaatttttattttgtagagatggggtctccctgtgttgcccaggctg

SEQ ID NO: 516988 - DNA, 201 bp, Homo sapiens
taatgaggaaaaagctatatttccagggaagcatttggtgaggttttctttttattatagaaaatttttaagctaactaaagtacagagaatgttacaatraaccctgtgtacccatccccagcttcaaaaatgatcaactttctgctattcttgttttatctgtaccccctttatcacactttttgttatgttgtttact

SEQ ID NO: 516989 - DNA, 201 bp, Homo sapiens
ctcaggctggtatctctcctggggaagaggccaacactggcctctgctgctttttttttttttttttttttagaaaaagaaagaaaaactaattatcaacstgcagcaaatgtcattcaactcaaatccatgaaggataaaagcataggagacaaatgttcctggagacagggttgagctgtcacttgtctttttaatgga

SEQ ID NO: 516990 - DNA, 201 bp, Homo sapiens
cactgcgcccagccgaattttcttaatttcatgtatgactaattttctcttctaatcatttcatttttcttgaattgttatattctctcccaacttttctytttttaacgacattgagctctcctcttcctgtcttccattagcacctttcctaacaaccttatttgttcttcaattgttatttatgcttgtcttctcagc

SEQ ID NO: 516991 - DNA, 201 bp, Homo sapiens
actctttaaattaattattcatagtaaagggaaagggtttgccttttgaaaaaagtatatcttttccatttttctaagtcttctacagtttaggccatacyggttttcagaaatcccttctagttaaagtctactaaacactaactaacttactctttactttctcaagcactaatggaaatactggattataaccaatct

SEQ ID NO: 516992 - DNA, 201 bp, Homo sapiens
tgccatctacaagccaaagagagaggcctggaacagagctttgcctcacagccctcagaaggaatggacaattctagcattagctcaagctgctgtatgakgtacttgtgtgaaggattatttatgggcccaaatacccttctctctataggagtttataatctctatagactaaaaggaattaggtccccaaggttgctg

SEQ ID NO: 516993 - DNA, 201 bp, Homo sapiens
ataatttagcttatagttgaaatatataatatctttatctgggagtctgaggtattgattagggttagagaatgtttaggagaacctggatgaaagaaacytactggtaaattggctgtaggctacagtgacatgggatacagactcttctgtttgcaaaatagtcttctaccaactcgtggattccaggtcatagtcctc

SEQ ID NO: 516994 - DNA, 201 bp, Homo sapiens
tatacaaaggaaaagtttggacatggagacagacatgcatagagggaagacagtgaaaagagacacagggagaagatgccatctacaagccaaagagagargcctggaacagagctttgcctcacagccctcagaaggaatggacaattctagcattagctcaagctgctgtatgatgtacttgtgtgaaggattatttat

SEQ ID NO: 516995 - DNA, 201 bp, Homo sapiens
taattttcagcagagagtttctatgacttttatcagattttttaagagatctctgttatggattgaattttgtcccctgaaaaagatatgttggagtcctsttccttatttggagataggctctttacagaggtaattaagttaaaatgaggtcattgtgtggggcctcatcccaatatggctgaagtctttatacaaagg

SEQ ID NO: 516996 - DNA, 201 bp, Homo sapiens
gtgtgtgtacatgtataattttcagcagagagtttctatgacttttatcagattttttaagagatctctgttatggattgaattttgtcccctgaaaaagrtatgttggagtcctcttccttatttggagataggctctttacagaggtaattaagttaaaatgaggtcattgtgtggggcctcatcccaatatggctgaa

SEQ ID NO: 516997 - DNA, 201 bp, Homo sapiens
tttttgatctatgtaaaaacttgttgtgattttttttctttttttctttttttttgttttgagatggagtttcgctcttgtcgcccaggctggagtgcaayggcgtgatctcagctcaccgcaacctccgcctccgtggttcaagctattctcctgcctcagcctcccgagtaactgggattacaggcatacgccaccacg

SEQ ID NO: 516998 - DNA, 201 bp, Homo sapiens
agatatctagttcagtcatattacctaggcaacaggtaatgttttagatagtgaatggtgagttatttgatctcaaagaaatcaatatgtgaaataggatrtacataacttcagaagttgacttgtgaagtccctattttctttggctggtcattaggctgctaagtagaatgactgacttttgtatggttttcttccaca

SEQ ID NO: 516999 - DNA, 201 bp, Homo sapiens
tttaaaataaagctttcaaatatttagccattttgaataacaaaagaatgaagtgtcctgttcagcaactgtttgggtgactacttcatacaaggctatgyaggggataggaagataattactgccctcttgtagattaaaatctagtaggaaaggaagataagacaactaaggtaaatgattcttaaaaaaatatagagg

SEQ ID NO: 517000 - DNA, 201 bp, Homo sapiens
ggcatttcatgacagaaaggtattcattatatataaggataatagcaagtgacaaaatgcagaacatacaattttacagcaggtgtttttttttttttttmttttgagagcatggacatagacaaatggctggaaggaaatacaccagtatgttttaatgactatcttgagtggtttttaaaattttctgaattttccaaa

SEQ ID NO: 517001 - DNA, 201 bp, Homo sapiens
gtattaagtactcagtaggagcaaagaaccatttggaatgtctgtcaatcttaaatagaactgcagctgtttggctgagaggtgaaatggacctggatttyttttttttggcgggggggctttgaaagtagtttttgtataacaaagaggtgatgagaactaaagtgattacaaaagtgttcataggagttcagtttcttt

SEQ ID NO: 517002 - DNA, 201 bp, Homo sapiens
gtgataagattcatgatgattgtgaagtaatagactgaaattaaggtaaaaacctgggattcttgaggtatttaaacagctgaacatatcaagaaagtctwcttatgctaggtgtagataatgactgtggcatgataaatgagattaaaaaaaaacacctttatttgattttagaagtaattcattgttctttatgaaatg

SEQ ID NO: 517003 - DNA, 201 bp, Homo sapiens
acattaaaaaatatatcactcaacaagtttgtcagaaaacttacacatcaaatcaagaaaacagtgagttaaggaaagaggaaaacacaccttcactttcttttttttttttttttaagacggagtctcactccgtcacccaggctggggtgcagtggcgccatctcaactcactggaacctctgcctcccgggttcaagt

SEQ ID NO: 517004 - DNA, 201 bp, Homo sapiens
gttgcagtgagccaagatcatgtgctacggcactccagcctgggtgacagagtgagactctgtctcaaaaaaacaaaacaaacaaacaaaaacaaaaacaaaaacaaaaccagttttgacctagtggacccccaaaagaagtatggcgagcccaggatctgcaggtgttccctgaccacactttgagatttgttgccttag

SEQ ID NO: 517005 - DNA, 201 bp, Homo sapiens
ttgcagtgagccaagatcatgtgctacggcactccagcctgggtgacagagtgagactctgtctcaaaaaaacaaaacaaacaaacaaaaacaaaaacaaaaacaaaaccagttttgacctagtggacccccaaaagaagtatggcgagcccaggatctgcaggtgttccctgaccacactttgagatttgttgccttaga

SEQ ID NO: 517006 - DNA, 201 bp, Homo sapiens
tgcagtgagccaagatcatgtgctacggcactccagcctgggtgacagagtgagactctgtctcaaaaaaacaaaacaaacaaacaaaaacaaaaacaaaaacaaaaccagttttgacctagtggacccccaaaagaagtatggcgagcccaggatctgcaggtgttccctgaccacactttgagatttgttgccttagag

SEQ ID NO: 517007 - DNA, 201 bp, Homo sapiens
cgtaacagagtaccattagaattatctgcagtataatgttactacttacacaattactgatttaagtttctgtacatgtgtggataaatgctcaaattgtytgtcttgtccaggcagattctgtagccatggttcttaacctagagtcctcatatgtggggtttgttttttgttttttttttttggtgagatggagtctca

SEQ ID NO: 517008 - DNA, 201 bp, Homo sapiens
gcagtgagccaagatcatgtgctacggcactccagcctgggtgacagagtgagactctgtctcaaaaaaacaaaacaaacaaacaaaaacaaaaacaaaaacaaaaccagttttgacctagtggacccccaaaagaagtatggcgagcccaggatctgcaggtgttccctgaccacactttgagatttgttgccttagagt

SEQ ID NO: 517009 - DNA, 201 bp, Homo sapiens
cagccgtaagttatttatttctagagatcagaaatcgaatttatttaactctatcaccacagttcacaaatggcccttaataattttgaatgctattactyaaagccaaataacacaaaatttcagaattttcttgcaacttcttatgttgcaagttacattgatgttatatccagatggttataattttcctcccaggtc

SEQ ID NO: 517010 - DNA, 201 bp, Homo sapiens
cagtgagccaagatcatgtgctacggcactccagcctgggtgacagagtgagactctgtctcaaaaaaacaaaacaaacaaacaaaaacaaaaacaaaaacaaaaccagttttgacctagtggacccccaaaagaagtatggcgagcccaggatctgcaggtgttccctgaccacactttgagatttgttgccttagagta

SEQ ID NO: 517011 - DNA, 201 bp, Homo sapiens
ccatgttggtcaggctgttcttgaactcccgacctcaggtgatccgcccacctcagtctcccaaagtgctgggattacaggcgtgagccactgcgcccagycgtaagttatttatttctagagatcagaaatcgaatttatttaactctatcaccacagttcacaaatggcccttaataattttgaatgctattacttaaa

SEQ ID NO: 517012 - DNA, 201 bp, Homo sapiens
ggctgaggcatgagaatcttgagcctgcgagactgaggttgcaatgagccaagatcgcaccactgcactccagcctgggcaacagagcaagactctgtctaaaaaaacaaaacaaaacaaaacaaaaacaacaaccctggaggaggaacagattgtaaggaaagattatgcatttagtttttgacatggggtttggctttg

SEQ ID NO: 517013 - DNA, 201 bp, Homo sapiens
acaggttcaactgattcttgtacctcagcctcccgagagccaggattacaggtgtgcgtcacatgcccggctaatttttgtatttttagtagagatggagkttcaccatgttggccaggctggtctcaaactcctgacctcaagtaatcctctcgcctcagcctcccaaagtgctgggattataggcgtgagccaccgtgc

SEQ ID NO: 517014 - DNA, 201 bp, Homo sapiens
tagttctccacccaaatggatggctgagatagaacgtgatgacatcgacatgttgaaaggtaagtgatgctagttaccacttttaactggatatttatgtytttccatagaccacctctctattttttttttctgtttccttacaagtatttttggcttcagacttctcatttaaacctccttatttgtagtttttcatgt

SEQ ID NO: 517015 - DNA, 201 bp, Homo sapiens
tactcaccaccacacctggctcattttttgatattttttttttctgtggagatgggattgctctgtgctgcccaggctgggattacagggatgagccaccrtgctcagcatactcctgcttatcaaagttctatgtctccttgggtcctacaagataacattcaaattctcaggctttcacaaagtgccttcctgacactg

SEQ ID NO: 517016 - DNA, 201 bp, Homo sapiens
ttaacaaacttgttaaatatcatcaaatagccaatcagggtttagatttctgtagttgactcataaatgcctttatacagttcattttttgagtctggatstaaataaggttcatatactgtatttgatatgtctctgaaatcttttttagcctgtcatacttccacctgcattttatttccccttgtcatttgttaaacc

SEQ ID NO: 517017 - DNA, 201 bp, Homo sapiens
cctgtcttccatctgctttacgtgttgtttcttaaggctgagtgaattaacgatttctgtttatatattgtgtaaaatgcaagtcatttcaagtaacaatyaagttgttttggtatactcccatgcttttcctcttggttctgctttagagagttagggtcttgcagtcatttttaaactcatttttagttctaccatcct

SEQ ID NO: 517018 - DNA, 201 bp, Homo sapiens
tttcagaactggggagtctcaccacggctaatttgatggagaaggttcgaggcctacagaacctagcctatcagctggggctggatgagtgtgagtacccygatcgcatttgttcaggggtgtattccaccctgagctgtgtattccaccctgagctcaggtattccaccctgagctccagttataattcagaaagtatat

SEQ ID NO: 517019 - DNA, 201 bp, Homo sapiens
ttattatggattgaaaatcagataattgtattgtgttaaattttttgagtttgttaattatattgtagctatgtaggagaatatccttgttcttaggagayaatgctgaagtatttagggatgaactatcatggtgtctgcagctagctctcagatagctcaggaataaaacaacaaaatttaaaaatataaatagatgaa

SEQ ID NO: 517020 - DNA, 201 bp, Homo sapiens
acacaaacatgagcgccggatggatgaaagggggtgggggatctgatcgtctcttctctgccccttcattctcccctccccttttccttggagaccactcyagtaaagatagatgctaaatccattaaataaagattagactcggtcgtagtagaaaatggcagcttagctagatccccaggcaaattggagccttttgca

SEQ ID NO: 517021 - DNA, 201 bp, Homo sapiens
agcaaattatgcacgcattatatgctgaggccatctctccctccacacccaggccttcactctccggtcaggaaattagaagagactaatctggggaatcygatcagcccaagaagaataaaggcactgacactggaagttctacaactaaacagcctgatcacactgtagcaaagcttacagtcagcaagcctagctcct

SEQ ID NO: 517022 - DNA, 201 bp, Homo sapiens
ttttaattatgttgaggcatagaaatatttaaagtagtttgcattggaattgaaaaactgaactatgagtttcttccacttcattaaaaagtttcttaaamtttacattgttccctacataaaagctgagcagaattttatcaggcaattgcctcaaagttataatctggacaatctttctgtaataaaacccatatgtca

SEQ ID NO: 517023 - DNA, 201 bp, Homo sapiens
cttaaggctgagtgaattaacgatttctgtttatatattgtgtaaaatgcaagtcatttcaagtaacaattaagttgttttggtatactcccatgcttttsctcttggttctgctttagagagttagggtcttgcagtcatttttaaactcatttttagttctaccatcctcatcccaactatatatcgattttattgata

SEQ ID NO: 517024 - DNA, 201 bp, Homo sapiens
taaatcaatctgcatttttaaattaaatcttcctatgattcttttttccgattttaggttttcattgatcatttgtttgctttgtgattccagccagagaratgacacgggggaaattcctcaatattctagagaagcccaagaagtagcagctgcttgcggacaggatgtcctggggtccgaaaccaagctcccttcccg

SEQ ID NO: 517025 - DNA, 201 bp, Homo sapiens
tggccaggctggtctcgaacttctgtcctcaagtgatttgcccgcctggcctcccaaagtgctgggattacaggtgtgagccaccacgcccggccccggcytgattttttgaagtacattttcttctctttgtcttttgctcataaatcattggtactacttcattacccataggataaaatttaggccccttagtgtggc

SEQ ID NO: 517026 - DNA, 201 bp, Homo sapiens
cttgagtaaaccctggtgtcagcttagaattcctaagtgctatggtgtttctaagtgagattgagggatatccaagaataaactttgctatttaagtgacttttttttttttttttgagacagagtttcactctttttgcccaggctggagtgcagtggcatgatctcagctcactgcaacctctgcctcccaggttcaag

SEQ ID NO: 517027 - DNA, 201 bp, Homo sapiens
ttgagtccaagagtgaggctgcagtgagctgtgattgcaccctcaccccaccccctatcctctgcactccagcctgggagacagagtgagaccctgcctcaaaaaaaaaaaaaaaaggcatctttgaaatgaataacttaacaatttaaactactatcagggttatataggtgaaaaggttgtgaatatatagtctgttaa

SEQ ID NO: 517028 - DNA, 201 bp, Homo sapiens
ataggtgaaaaggttgtgaatatatagtctgttaattatgataaagtgcaaccatatataacaggaaatctaaaataattgtggcttacacaaggtagcattttttttttttttcaacaaaaaggaaagctggaggtagatgcacctagcaggtagggcagttccaaaggtgtcatcaaggactaaagtttccatccttcc

SEQ ID NO: 517029 - DNA, 201 bp, Homo sapiens
gggaaaagtagtctctttcaacaactggtgctggaaaacaatatccacatgaggccaggcatggtggctcatgcctgtaaacccagcaatttgggacgccraggtgggtggatcacttgaggtcaggagtttgagaccagcctgaccaacatgatgaaacctcatctctactaaaactacaaaattagctgggcatgacaa

SEQ ID NO: 517030 - DNA, 201 bp, Homo sapiens
atggagaattacaggttttcttttctttttttttttttttgagacagagtctcagtcacccagactgaagtacacagtggcacaatcttggctccctgcarcctccatctccagggttcaagcgattctcctgcctcagcttcccaagtagctgggattacaggcacatgccaccacgcctgactaatttttgtatttttg

SEQ ID NO: 517031 - DNA, 201 bp, Homo sapiens
gtcatatatttaggaagattgagataatgactaactgctttatacaaagatgtcagtgaaatttattaatgaggtgattaggatgcagttgagcagaaattaaaagaaaaaagtgattgaccagtctgtttttgctggttattttaatataaatcaaatgctatttgaatagattctcttttttaatgttgaaattgtctt

SEQ ID NO: 517032 - DNA, 201 bp, Homo sapiens
tcatatatttaggaagattgagataatgactaactgctttatacaaagatgtcagtgaaatttattaatgaggtgattaggatgcagttgagcagaaattaaaagaaaaaagtgattgaccagtctgtttttgctggttattttaatataaatcaaatgctatttgaatagattctcttttttaatgttgaaattgtctta

SEQ ID NO: 517033 - DNA, 201 bp, Homo sapiens
gcttgttaagacaagctggaattggggaagaggaattcttgttttttttgagacagcctccatttgttacccaggctggagtgcagtggcgtgatcactgytcagtgcagcctcgatctcctgggctaaagcaatcctcctactcagcctccctagtagctaggaccacaggcatgtgccaccatgtgatgctaattgaaa

SEQ ID NO: 517034 - DNA, 201 bp, Homo sapiens
ttcatagttttacagttttctctactgtccgactccacaacatttcatcatcccaaaaaggatccccatatccaggagatgattaaaaaaagaaaaagaaktcccattattagtatcattgaccatgtctctctttctccagcccctggcaaccattaatctgctttctgtgtctggatttgcctgttctggacatttcat

SEQ ID NO: 517035 - DNA, 201 bp, Homo sapiens
ttcataccgtacacatacaaatcataaacttggacacaaaaattgtatggtagtacttagttataatatgaatacccagtgcttgagaaaatgctcgtgtyaatttttaaagattattgaagtgaaaacactgaaataaaaagatgtcatagataacataaaaaggacagtaaatagttgtctggttcctcagagatttta

SEQ ID NO: 517036 - DNA, 201 bp, Homo sapiens
aaattagctgggtgtggtggcatgtgcctgtaatcccaactactcaggaggctgaggtgcaagaatcacttgaacctgggagggggaggttgcagtgaacygagatcatgccactgcactccagcctgggtgacagagtgagactccatctaaaatataaaaagaagaaaagggtgcaactaagtgatttttagtagtaat

SEQ ID NO: 517037 - DNA, 201 bp, Homo sapiens
taggttgtcatcgttggcagggcgcagtggtttatgcctgtaatcttggcactttgggaggctgaggcgagcagatcactttagcccacgagttcgagacyagcctgggcaacacagtgaagccccgtttctacaaaaaaaaaaaaatacaaaaattagctgggtgtggtggcatacacctgtaatcccagctacttgaaa

SEQ ID NO: 517038 - DNA, 201 bp, Homo sapiens
acactccatcctaggagacagagcgagactccatctcaaaaaaaaaaattttgactgggtgcaatggctcatgcctgtaatcccagcactttgggaggccraggcgagtggatcacctgaggtcaggagttccagaccagcctgaccaacatggtgaaatcccatctctactaaaaatacaaaaattagctggggcatggt

SEQ ID NO: 517039 - DNA, 201 bp, Homo sapiens
atcctgtattaagatttcttgcctttctattctctttttatattactttccaaattcactgataatgcttatcagacaggattaacttggaagaaatagargaatgtgggaaatagaggaatagagttttagagttgttaatgagaggcttaatgatccagataggtgtatctctggattcacttttcattgaaacatttt

SEQ ID NO: 517040 - DNA, 201 bp, Homo sapiens
tgtcctagaggtccatggaagactaactgaaaaagaaggcatattttttgtggttgccatggtcctataccaaagaggttttgtgaaggcagcattacagwaggtctggaaaggaccagcagctgggagcagggagtgtgctaaagccctcctggtgtactcttcctgccttcccccatatactgaagtttgagaggctgg

SEQ ID NO: 517041 - DNA, 201 bp, Homo sapiens
gaataagaaaaatatgtgtggaagaaaagtcagggatttatgatactttatgtgggaaacttggaaggagcatttccatttatatcttgtaaatggttagttttttttttttttttctcgacacagagtcttgctctgtcgcccgggctggagtacagtggagcgatctcggctcactgcaatctccatctcctaggtcca

SEQ ID NO: 517042 - DNA, 201 bp, Homo sapiens
tgtggaagaaaagtcagggatttatgatactttatgtgggaaacttggaaggagcatttccatttatatcttgtaaatggttagttttttttttttttttctcgacacagagtcttgctctgtcgcccgggctggagtacagtggagcgatctcggctcactgcaatctccatctcctaggtccaagcgattcccctacct

SEQ ID NO: 517043 - DNA, 201 bp, Homo sapiens
ccagttgcttactgggaagcttgtatggaagccctttaagctcatagtaaacacattagaagtgggaagtgaccgttaatgggcacagggtttccttgtgmggtgatgaaatattgtaaaattgatcgtggttctgcttgtacaactctgaatgaactaaagatattttaattgtactctttaaatgagtcaatagtatgg

SEQ ID NO: 517044 - DNA, 201 bp, Homo sapiens
gctttttttttgagtctcgctgtgttgcccaggctggaatacagtggcgcaatctcagctcactgcaacctccacctcccaggttcaagtgattctcctgsctcagcctcccaagtagctgggattacaggcatacaccaccacacccagctaatttttgtatttttggtagggacgggttttcaccatgttggccaggct

SEQ ID NO: 517045 - DNA, 201 bp, Homo sapiens
tgaggcaggagaatcacttgaacctgggaagcggaggttgcagtaagccgagattgcgccactgcactccagcctgggtgacagagcgagacgccgtctcaaaaaaaaaaaaaaaaaaagggacatggagagtctctgagccagggcaaataaaaagcttgcttggtttctaacttttcatatattttgtttcttccaggt

SEQ ID NO: 517046 - DNA, 201 bp, Homo sapiens
aagctaccggtggagagtctcaaacattaaactgtgtggtacagtctaaaagaatagtataatctagcagtgctgttccctcccagaaagctcagctcccrtattgtcactgtgccagccttactagccattttctgaactttccccgggcactctgtttcaaggctctgctcacagtattcctggtgcctgaaatttcct

SEQ ID NO: 517047 - DNA, 201 bp, Homo sapiens
ttattttttgattaccattcaaatgaaaataaaaagttaaaatttctcatagagaactagagttccctatgaatattttgaaacattaaatcttttttttytttggtctttttttttccctttttatggagaatgaggttttgctctgttgccagacaggtctcaaactcctggactcagggtctcctcctgcctctggct

SEQ ID NO: 517048 - DNA, 201 bp, Homo sapiens
acgtgtggcccaggatacctttgaatgcagcccaacacaaattcgtaaactttcttaaaacattatgagatttttttgtttgtttgcttttaaagctcacyagctgtcattagtattagtatattttatgtgtggtccaagacatttcttctttcagtgtggctcagggaagccaaaagattggacacccttgcactaaca

SEQ ID NO: 517049 - DNA, 201 bp, Homo sapiens
tcttctgtatatatttcagtatatgcctctaacaagatacaatattaaaaactataatatctttaccacttcaaacaaagataacaataatttattgtatyctctaatagtctatgttctttttttcctccccctcaaaaatatcttatggttggtttgctagagtcaggattcaaacaatgtctgtatattgcatttgtt

SEQ ID NO: 517050 - DNA, 201 bp, Homo sapiens
ggatctcctgagttggggaggtcgaggctgcagtgaaccgagatcatgccactggattccagcctgggcaacaaaatgagaccctgtctcaaaaaaaaaaraagaaaaaatttaaaagaaaaaagcatgatgttaacagacctttcattagaaatcaattagctggagttctggggttggtgggaagattccttcacggca

SEQ ID NO: 517051 - DNA, 201 bp, Homo sapiens
atagactcagaatatttgattgccagagttaaaatgccagccttatgacatggctaaagtgctgtcccaaggccacagtgacatctatcagtccgtgcatstgtttgctttggaagtagatagccttcattcacccctgtagtgcattctccatcctccactcttaatactttttactatgaattattttttctataattc

SEQ ID NO: 517052 - DNA, 201 bp, Homo sapiens
ctccgctgatgggaaaaactactccctccgctactgcggggtggcagtgacgtcaacgaattagctgacctgttttttcgggcttcgcggacataggagtyccgaaggccgagagtgagtgagtgagtgggagcggggcggctgcggctcctcctgtccggggcggagccctgcgtcgcgggcctggggaggccccgccag

SEQ ID NO: 517053 - DNA, 201 bp, Homo sapiens
ctgccactgggctgcaaaaaaataaattacttgaatctccccttggcccaggctgaggtactatcttgtcctatacacttctacttggtcactttgctttyttcgttaatggaacatacagtagcatgttaagagggatttcatgtttttgtttttttaaagttaaaaattacatgatgcagagattcaggttttccttta

SEQ ID NO: 517054 - DNA, 201 bp, Homo sapiens
cagtacccagtaaaaacctggtgtctatgaattcccagcccagccttggtggagagtccttgaacctaccaaataccaattctatcctgggagttgatgayggtaagacttccaactctcctttatttgggaaaaatgggctgcaactaggggctaaggaatggggtgtctccacaatgtatgtttaaatctcatttctta

SEQ ID NO: 517055 - DNA, 201 bp, Homo sapiens
gagcaaaactccatctctaaataaataaataaaagagagagaacagccgcatcagggtcctgagagcactacctttgggaaacgctcttcaaattttaacttttttttttttaaatgtaattttaaaaattatcaaaacaatatggttgccttttagaaatattggaaaattgagaaaagaaaattaagtcacaccagcct

SEQ ID NO: 517056 - DNA, 201 bp, Homo sapiens
acatgcccagctttttttttgagtctcgctgtgttgcccaggctggaatacagtggcgcaatctcagctcactgcaacctccacctcccaggttcaagtgwttctcctggctcagcctcccaagtagctgggattacaggcatacaccaccacacccagctaatttttgtatttttggtagggacgggttttcaccatgtt

SEQ ID NO: 517057 - DNA, 201 bp, Homo sapiens
actacaggctcacaccaccacatctagctaatttctattattttgtagaaatggagtctttgtgttgcctgggctcgtcctgaactcctggcctcaagtgstattcccaccttggcctcccaaaatgttgttgggattacaggcatgagccaccacacttggctgagttttagtagtttttaaaaaatagatttcttagtg

SEQ ID NO: 517058 - DNA, 201 bp, Homo sapiens
caaggggaagccagaacatgacaagtggagaggaggaactggaaagttacttatgaggaaagcaagctactgcagcaggagcaaggaagttggagagttayaatcaatcagggatgtacatttcagagttgagatcttagaagtagagcagttttttaatatgatgacaagttctaagcagaggtggcaaactggtatcct

SEQ ID NO: 517059 - DNA, 201 bp, Homo sapiens
cccaagctgatctcaaactcctgggctcaagtaatcttcctgcctcagcctccagagtagctgggattacaggcgtgagccaccacccagctatagttttaacaaagtcttcagttgattctgatatatccagtttttggacttactgtttgccttgagagtcaataggggctttgacttgtcatctctagcaaagagtgt

SEQ ID NO: 517060 - DNA, 201 bp, Homo sapiens
ggtggcatatatactaaaagatcattgagaggcaacacttgctaggtagcccagttgaaattataacatgaattaaataaatcagagtaggtaagtcattmgactctgaataaagttggtgggaaaagagagtaacaggtaatcagttcatcagaagactgagtctttatctcattttctgtctctaggagagaaaccttt

SEQ ID NO: 517061 - DNA, 201 bp, Homo sapiens
atatataaaaatataaggcatatataaaatataaaaataaaaggcatatatatacatacatatatacacatacatatatatacacatacatacatatatatcacacacacacacacacacacacatacatatatatatatatatatatacacacatactttttttttttttgagatggagtcttgctctgttgccaggctg

SEQ ID NO: 517062 - DNA, 201 bp, Homo sapiens
ctgaagaaggtaggttaatgcaactctccagctcttgggccaggagggagaaggaaatataggcttacattccaaggaaaagggcaaggctgtctggtggsatatatactaaaagatcattgagaggcaacacttgctaggtagcccagttgaaattataacatgaattaaataaatcagagtaggtaagtcattagactc

SEQ ID NO: 517063 - DNA, 201 bp, Homo sapiens
tatataaaaatataaggcatatataaaatataaaaataaaaggcatatatatacatacatatatacacatacatatatatacacatacatacatatatatcacacacacacacacacacacacatacatatatatatatatatatatacacacatactttttttttttttgagatggagtcttgctctgttgccaggctgg

SEQ ID NO: 517064 - DNA, 201 bp, Homo sapiens
tactagggaggctgaggcaggagaatcgcttgaacccaggagacagaggatgcagtgagtggagattgtgccattgtactccagactgggcaacaagagcraaactctgtcttgaaaaaaaaaaaaaaaagtaaatctgttaattcagtggcttactatgagggcttactatgtgccaggcactatgctgaatatttacct

SEQ ID NO: 517065 - DNA, 201 bp, Homo sapiens
atatataaaatataaaaataaaaggcatatatatacatacatatatacacatacatatatatacacatacatacatatatatcacacacacacacacacayacacatacatatatatatatatatatatacacacatactttttttttttttgagatggagtcttgctctgttgccaggctggagtgcagtggcgagatct

SEQ ID NO: 517066 - DNA, 201 bp, Homo sapiens
tataaaaataaaaggcatatatatacatacatatatacacatacatatatatacacatacatacatatatatcacacacacacacacacacacacatacatatatatatatatatatatacacacatactttttttttttttgagatggagtcttgctctgttgccaggctggagtgcagtggcgagatctcggctaactg

SEQ ID NO: 517067 - DNA, 201 bp, Homo sapiens
tatatacatacatatatacacatacatatatatacacatacatacatatatatcacacacacacacacacacacacatacatatatatatatatatatatmcacacatactttttttttttttgagatggagtcttgctctgttgccaggctggagtgcagtggcgagatctcggctaactgcaagctccacctcctgggt

SEQ ID NO: 517068 - DNA, 201 bp, Homo sapiens
ctgagggatgagtatacaattaaaacattgaaaaaagctaccggtggagagtctcaaacattaaactgtgtggtacagtctaaaagaatagtataatctarcagtgctgttccctcccagaaagctcagctcccatattgtcactgtgccagccttactagccattttctgaactttccccgggcactctgtttcaaggct

SEQ ID NO: 517069 - DNA, 201 bp, Homo sapiens
ttaaaacattgaaaaaagctaccggtggagagtctcaaacattaaactgtgtggtacagtctaaaagaatagtataatctagcagtgctgttccctcccakaaagctcagctcccatattgtcactgtgccagccttactagccattttctgaactttccccgggcactctgtttcaaggctctgctcacagtattcctgg

SEQ ID NO: 517070 - DNA, 201 bp, Homo sapiens
atttcctttgagaacttaaaagtaacaaataagcatgggctcctaccttgaacctatgagatcagtttaaggggtggtgctaggcatctgtagttttttgyttgattttttttgtttaagagacaggatctcactttgtcacccagggtggagtacagtggcgccatcatagctcactgcagcctcgaactcctgtgctca

SEQ ID NO: 517071 - DNA, 201 bp, Homo sapiens
acaactaaaaagaaacaaactgttcactataaagatagaaagcttctcatcatcatgacagaatcagaaatcaaggcccttaattcttataatcaaggttgggggggggacatctaattattattttcagctgtgtttctaataaagccttcttttgaagagatcagcaaatttgtttggcactctgctgggtgctttata

SEQ ID NO: 517072 - DNA, 201 bp, Homo sapiens
tctccgtatcagtctctccagtcctcagtttcctgcaataggactacaggctcacaccaccacatctagctaatttctattattttgtagaaatggagtctttgtgttgcctgggctcgtcctgaactcctggcctcaagtggtattcccaccttggcctcccaaaatgttgttgggattacaggcatgagccaccacact

SEQ ID NO: 517073 - DNA, 201 bp, Homo sapiens
tatgatcacccagagagtgtgagagtggggaaaaaaggtcagtgcaaaactatggaactctttatttaaggtacagggtagggcaggagaacttgtaaagragggaagaaacaaagactaaaatagttggatgaacatcagcagagtggaggcatgaaacccaggagaaatcattgtatcaaatgctactgacaggcccag

SEQ ID NO: 517074 - DNA, 201 bp, Homo sapiens
cctgttccatggagagaagaggatggaaagtcaggctgcagtgacttgagtatacatacttgcttttttttttttttttgagatggagtgtcactctgtcscccaggctggagtgtagtgacgcaatcttggctcactgcaacctccgcctcccctcccaggttcaagctattctcctgcctcagcctcctaagtagctgg

SEQ ID NO: 517075 - DNA, 201 bp, Homo sapiens; identical to SEQ ID NO: 287569

SEQ ID NO: 517076 - DNA, 201 bp, Homo sapiens
accctaaagagggtggcagggaatatgacaaggggatattaggaacacaggattgaaatccttgaggaaagcacatgtcctagaggtccatggaagactawctgaaaaagaaggcatattttttgtggttgccatggtcctataccaaagaggttttgtgaaggcagcattacagtaggtctggaaaggaccagcagctgg

SEQ ID NO: 517077 - DNA, 201 bp, Homo sapiens
ggggcatatttaacttagtcatacttaaaatagaaagaacctttattattttattattttggagaattggtgtgtctggtgaccatttgaatatgtagagrgagagggaggactctagtatgactcatatcttgtttgggaaattatgtagtgccatttactgagatcgcacaggaagagcaaggcttgggggaggatgat

SEQ ID NO: 517078 - DNA, 201 bp, Homo sapiens
atccactcatcatcattatgatttgagatggggtcttgctctgtcacccaggctggagtgcagtagtgtaatcatagctcaatgtaaccttgaactcctasgctcaaggcatcctcccacctcagcctcctgaatagctaggactataggcatgtaccaccagtccagctaactttttgtggtttttttggtagaaatgag

SEQ ID NO: 517079 - DNA, 201 bp, Homo sapiens
aaacaacaagaacatcttcatttcttaagcccaggtgatagttactctgtcaccaccaaaaaagacgcatctgagaaaatggcaataaaaacagatacttytgaatttttccacaaagatagtttttttaaaaaagcttgagaaaggtgctttagttagagcaggcactcttgctatcaatcatcctgtctccacagctac

SEQ ID NO: 517080 - DNA, 201 bp, Homo sapiens
ccatatttacattgagttcacattcttgaactcaagaaccagtataagagattcccagctagttttgactacctcttagaatgctttccaaatcaaggcamaaatagaaattacaaattctataatatttctcataaagtacctttgctaagtttgactgcaaagatctggatcttggcctccattaaaaacacactattc

SEQ ID NO: 517081 - DNA, 201 bp, Homo sapiens
ggagtttgagaccagcctgggcaacacaggaaaaccccatgtctacaaaaaataaaataaaattagctggtcctagctacttgggaggctgaggtgagagsatcacttgggcccaggaagttgaggctgtagtgagccatgatcttgccactacactccagtctgggtgacagagccaaactctttaaaaaaaaaaaagaa

SEQ ID NO: 517082 - DNA, 201 bp, Homo sapiens
tagtttttcagagcatgttatcttcacttacagtctaagttgtttgaaatacagaaacgttttaattttgcataagatgttgtatatcagatcagcaaagscctttgggccaaatccccacctgtttttataattaaagttttatgggaacataggcatccacattacttacaaattgtctaaggctgctactatggcaaa

SEQ ID NO: 517083 - DNA, 201 bp, Homo sapiens
tttgagactgagtctcactctgtggcccaggtcaagagtgcagtggcgtgatctcggctcactgcaacctctgcctcccaggttcaagcaattctcctgcytcaagtctcccaattagctgggattacaggcacctgccaccaagccccactaatttttgtatttttagtagagacgggcttttaccatgttggccaggct

SEQ ID NO: 517084 - DNA, 201 bp, Homo sapiens
cgtctctactaaaaatacaaaattagctgggcgtggtggcgcatgcatgtaatcccagctactcaggaaggctgagacagaactgcttgaacccgggaggyggaggttgcagtgagtggagatcgcaccactgcactccagcctgggcaacaagagcgaaacttggtctcccaaaaaaaaaaaaaatcaccccaaatataa

SEQ ID NO: 517085 - DNA, 201 bp, Homo sapiens
tggcaataaaaacagatacttttgaatttttccacaaagatagtttttttaaaaaagcttgagaaaggtgctttagttagagcaggcactcttgctatcartcatcctgtctccacagctactgagaaaatatccactcatcatcattatgatttgagatggggtcttgctctgtcacccaggctggagtgcagtagtgta

SEQ ID NO: 517086 - DNA, 201 bp, Homo sapiens
agagtggaagcaggaatgtgcatatgagaaagcatcacctgcagctgggagcagctgggagtcaagagcaggagcaaactggtgaggagggtgggcatagyggaacgctgtactacttctagggttccaagagccaaatcactgtcctgcctgcttatctggaaattttctgattctgttttgggtagatagacctggtct

SEQ ID NO: 517087 - DNA, 201 bp, Homo sapiens
ccgcctgcctcggcctcccaaaatgctgggattacaggcgtgagccactgctcccggcctaaatggttacttttttacaatgaaaaatgaggatttcaggyagcttagaaagagagagggagaaaccaacaggacaaaaaaacatttattcagttacttttttttttttttgagatggagtcttgctctgtcgcccaggct

SEQ ID NO: 517088 - DNA, 201 bp, Homo sapiens
accttgtgttccgcctgcctcggcctcccaaaatgctgggattacaggcgtgagccactgctcccggcctaaatggttacttttttacaatgaaaaatgakgatttcaggtagcttagaaagagagagggagaaaccaacaggacaaaaaaacatttattcagttacttttttttttttttgagatggagtcttgctctgt

SEQ ID NO: 517089 - DNA, 201 bp, Homo sapiens
cttcttttattcttcttaacctaacaagagcaggtattctttccttttttttgggctctgcttatgcctaagaaaaaaattaggggtggggcatatttaamttagtcatacttaaaatagaaagaacctttattattttattattttggagaattggtgtgtctggtgaccatttgaatatgtagagggagagggaggact

SEQ ID NO: 517090 - DNA, 201 bp, Homo sapiens
tgcctttggaacataaagccatctctctgttcttctgtgagacaaagtttttatttgtgtaatgagaatgctgtctgttgctataaggatgttagcttccmagagatgttgggtgctgtgtatcaaaatggtgggctcctagagataggtgctacataaagctgtggtattttccctttactagatgatactacaaatcat

SEQ ID NO: 517091 - DNA, 201 bp, Homo sapiens
catatgcataaacttttgtcaaaacctctgtagcttggatcctttcagtattacattagtttttatggtgctcttccgtcttttctcctcttttcttttctttttttttttgagacagagtctcgctccgttgcccaggctggagtgcagtggtgcgttctcggctcactgcaacctctgcctcccaggttcaagcgattc

SEQ ID NO: 517092 - DNA, 201 bp, Homo sapiens
tattgaatattctccattattctctaatatctttgggggtacccaggattacagggttctgggcatacatgttaatgcttttgccaggacttttcttttthttgttgtgacccattgtctttgcttatatttaaagtttttgatcttgatatcattggttctttcctaagtcactttttctggtaactgctttggaatgaa

SEQ ID NO: 517093 - DNA, 201 bp, Homo sapiens
tcaaaaatatcttatggttggtttgctagagtcaggattcaaacaatgtctgtatattgcatttgtttaatacttctcttaattctctttataatagtccttttttttcagtatggttatctatttaaggaactgggttttttgttttgttttgtttttgtttttgttttgagactgagtctcactctgtggcccaggtca

SEQ ID NO: 517094 - DNA, 201 bp, Homo sapiens
acctgaagaaccaccggcgcatccacacaggtgtgtgcagcaccaacattcctttgggcagtctgctccttggctctgcatgtttgcctctccttaggaargactcaagtgggaatagaaatgaaggtctggggttgttgctagaactctgaagatgggatttctttttcaaatgacttgttgcacttataataacattta

SEQ ID NO: 517095 - DNA, 201 bp, Homo sapiens
caggtctcaaactcctggactcagggtctcctcctgcctctggctccctaagtgctgggattttaggtgtgagcaaccatccccagccaaactctaaactrtttgttttcaaaatacttagttctgtttatgactaccatagtgctacttagaatggttcattttaacattttggtgggacccttaaagttcagattcttc

SEQ ID NO: 517096 - DNA, 201 bp, Homo sapiens
ctatgttgcccaagctgatctcaaactcctgggctcaagtaatcttcctgcctcagcctccagagtagctgggattacaggcgtgagccaccacccagctrtagttttaacaaagtcttcagttgattctgatatatccagtttttggacttactgtttgccttgagagtcaataggggctttgacttgtcatctctagca

SEQ ID NO: 517097 - DNA, 201 bp, Homo sapiens
agcaggaggagtttcagtgatttcttagccttgccttattctatgtattcatttttcctattttatgattatattaatattcttattgtatctataaaacrgaatccagaaagcccctactatcactgatttgaatcactgtattagcatgatttttttggccggtgcagtggctcatgcctgtaatcccagcactttggg

SEQ ID NO: 517098 - DNA, 201 bp, Homo sapiens
gcatccacattacttacaaattgtctaaggctgctactatggcaaagctgagtagttgtaacagaaaccatacggcagccgggcgcagtggttcacacctrtaatcccagcactttgggaggccaaggtgggcagatcactggaggtcaggagttcaagaccagcctggccaacatgatagaactcaaatacactcttttc

SEQ ID NO: 517099 - DNA, 201 bp, Homo sapiens
caatgtatgtttaaatctcatttcttatgagtagctgtggtatgagtagcatttgtgttcttattctctggggtggattagtcaatctgtttaaaaaaaawttttttttcattgaagataatataataaaagaataaaaagaaaaaattcttaagaaaaaattattcctaatcctagcatcctagcccaactatttctatc

SEQ ID NO: 517100 - DNA, 201 bp, Homo sapiens
tgtttatgactaccatagtgctacttagaatggttcattttaacattttggtgggacccttaaagttcagattcttcctgagatatatgtgccaatctccrgatgctgaaaccttcagcatttcctcttacattgaagaaatagtgtcatatttgccaatgagaagcagcgtagggaggggagcttgcaatttagaatctg

SEQ ID NO: 517101 - DNA, 201 bp, Homo sapiens
cctctgtggaactgtaaatagggttgagtgtgatgggacatgggatgaagagatgggctggagaggaaaattgagagctggaaagataagctagtctcttsaaaggtcttacaaggcatgattttatcctgggggcactgaagaaccactgcatggtttgaagtagggtatgacgtgatcagatttgtgtattcagaatat

SEQ ID NO: 517102 - DNA, 201 bp, Homo sapiens
aaactctaaactgtttgttttcaaaatacttagttctgtttatgactaccatagtgctacttagaatggttcattttaacattttggtgggacccttaaarttcagattcttcctgagatatatgtgccaatctccggatgctgaaaccttcagcatttcctcttacattgaagaaatagtgtcatatttgccaatgagaa

SEQ ID NO: 517103 - DNA, 201 bp, Homo sapiens
ccccttttaaagaaaaaataatatacatcctggggtttgaattgtttttattgtaatgtctcttaaatatgcaaaaacataaattctgtgtaaacttcatrtacttagagctcttataccatcatgaaatcaaaacagtttttatcagttaataggaataaaactaccaaatccatgaaaataaaaataacattaagtcat

SEQ ID NO: 517104 - DNA, 201 bp, Homo sapiens
ttctctttataatagtccttttttttcagtatggttatctatttaaggaactgggttttttgttttgttttgtttttgtttttgttttgagactgagtctyactctgtggcccaggtcaagagtgcagtggcgtgatctcggctcactgcaacctctgcctcccaggttcaagcaattctcctgcctcaagtctcccaatt

SEQ ID NO: 517105 - DNA, 201 bp, Homo sapiens
ggggaagccagaacatgacaagtggagaggaggaactggaaagttacttatgaggaaagcaagctactgcagcaggagcaaggaagttggagagttataawcaatcagggatgtacatttcagagttgagatcttagaagtagagcagttttttaatatgatgacaagttctaagcagaggtggcaaactggtatcctgta

SEQ ID NO: 517106 - DNA, 201 bp, Homo sapiens
gtaatgacaagcctgtagactaaaggtagaaagatgatagcctgctcttcagtgagaagtttgaggtaaaaggcgaaggtcaggaatagcttatttaggasatggagagtttctgggccaggcgcagtggctcacgcctgtaatcccagtactttgggaggccgacgtgggcgaatcacgaggtcaggagttcaagaccag

SEQ ID NO: 517107 - DNA, 201 bp, Homo sapiens
agcaattgttactgtggtagctgaggtagaggccagggttaaagagatggggagtggatgggaggtaagacaatagatacacaagttagaaggtacacttsttcaagaagcttgactttaaaggaacagggaagaaggtaaatagctagagaagtacttggggttttctaattctttttaaaaataagggtgagagacttg

SEQ ID NO: 517108 - DNA, 201 bp, Homo sapiens
atagtctatgttctttttttcctccccctcaaaaatatcttatggttggtttgctagagtcaggattcaaacaatgtctgtatattgcatttgtttaatayttctcttaattctctttataatagtccttttttttcagtatggttatctatttaaggaactgggttttttgttttgttttgtttttgtttttgttttgag

SEQ ID NO: 517109 - DNA, 201 bp, Homo sapiens
attggcgactgcttttaagggtggctttggttcccttacctgcttgcctaagacttttgcctgtttcatacatagttttaattcagttaaaagtgctaacrccatattattctaaatcctgtattaagatttcttgcctttctattctctttttatattactttccaaattcactgataatgcttatcagacaggattaac

SEQ ID NO: 517110 - DNA, 201 bp, Homo sapiens
aaaagaaaaaattcttaagaaaaaattattcctaatcctagcatcctagcccaactatttctatctttcctattgcagttatggaagaacttaacttttaraacatttaaacagaacataaccaggttttacagaggagatataaagcaatttctccataccttcaaaagccatatcttctggagaaaagaaagggctctc

SEQ ID NO: 517111 - DNA, 201 bp, Homo sapiens
ttgtgttcttattctctggggtggattagtcaatctgtttaaaaaaaaattttttttcattgaagataatataataaaagaataaaaagaaaaaattcttragaaaaaattattcctaatcctagcatcctagcccaactatttctatctttcctattgcagttatggaagaacttaacttttagaacatttaaacagaac

SEQ ID NO: 517112 - DNA, 201 bp, Homo sapiens
tacataggataagacggacatctttggacatagctctatccatatttaagatagttttttagattattagaggttgaaatactgcatcaaagcgtagtatytttatgggttttgatgcctgttgagcttgttgtattttaaaagaagtgtttcggtttgaattctttatttgcttgcttgttgtgattttttttgtatatg

SEQ ID NO: 517113 - DNA, 201 bp, Homo sapiens
ttggccaggctggtctcgaactattgacctcaagtgatccacctgcttcagcctatcaaagtgctgggattacagttgtaagccaccacacccaacccttcacagcatattttgaagtgacagtgccatatttaatcaaccattccctaattgggggtgtgtgtgtgtgtatacattgcttccagttgtttattacatagg

SEQ ID NO: 517114 - DNA, 201 bp, Homo sapiens
ctctaaataaataaataaaagagagagaacagccgcatcagggtcctgagagcactacctttgggaaacgctcttcaaattttaacttttttttttttaartgtaattttaaaaattatcaaaacaatatggttgccttttagaaatattggaaaattgagaaaagaaaattaagtcacaccagcctaccacacggtatag

SEQ ID NO: 517115 - DNA, 201 bp, Homo sapiens
gggtctgcaggcacatgccaccacacctagctaattttttgtattttagttgagacggagttgcaccatgttggccaggatggtctcaatctcctgacctygtgttccgcctgcctcggcctcccaaaatgctgggattacaggcgtgagccactgctcccggcctaaatggttacttttttacaatgaaaaatgaggatt

SEQ ID NO: 517116 - DNA, 201 bp, Homo sapiens
accttgtgcacagagtatttcacattttgctgctgtaattttgggacatattcctagaagtgggattcctaggtcaaagggcaagtgcatctacaattttkctagatctggtcagattcccccaaagaggtttttgtattttgcattcccagcaaaatacaatcagcaatgatgattgctgtaccatgtgtttgtcaattg

SEQ ID NO: 517117 - DNA, 201 bp, Homo sapiens
cttgatctcctgacctcaagtaatctgcccgcctcggcctcccaaagtgctgggattacatgtgtgaaccactgcacctggctaaaataaatttattttarattcagggggtacatgtgcaggtttgttacaagggtatattccaagatgctgaagtttgggctactaatgaccctgttgaccaagcagtgaacatagtac

SEQ ID NO: 517118 - DNA, 201 bp, Homo sapiens
cctagaatctgtagttttaaaagtttccctagtgagtttgatggtaactagtgctgatccatgaacaagcatttgagtaacacagtgataaaagatttccrcatgggaagagtttaagctttttaatttttttagatggagtcttgctttgtcacccaggctggagtgcagtggcgccatctcgactcactgcaacctctg

SEQ ID NO: 517119 - DNA, 201 bp, Homo sapiens
gcctggattacaggagtaagccaccgtgcccggccttttttttttttttttttttttttttttttgacagagtctcactctggctcaggctagagtgcagkggcatgatcttggctcactgcaacttccacctcctgggttcaagcaattctcctgcctcaacctcccaagcagctgggattatatgcgcccgccaccacg

SEQ ID NO: 517120 - DNA, 201 bp, Homo sapiens
ggcaggactccctacacatcatcaagatactgaaggagtctattgacagttgcttccaccctttgcctttatcatccttaggaattcaggagtcacccttsgtccaaacctaggatcaggagtcctagtggaactcatctgttctccaggcagagccacagatgtgcagggttagtgctgactcacacttctgtttcctcc

SEQ ID NO: 517121 - DNA, 201 bp, Homo sapiens
gtgaagccccacatgctattatgcttctttcttatgtggaggagttgcccaaagcaggtccaggggagagcagattgaatgttaatgacttggtattaacyactttttcctccctctcctttcttggcaggactgctgtttatgctcattacgaggaggggccctgcagagagcaaatgatgacaggtaagtttcctgagc

SEQ ID NO: 517122 - DNA, 201 bp, Homo sapiens
ttagtgcttcgcttgcatcatctgagctaatcacagcgaccctgcagggcagggggttgggatccccattttacaggtggagaaactgagactcaagtcarctcacacagccaaggtcacatagctaataaacggcagagaccggatctgtattcagagttttgacttcggagccggtgttcttgaatctctaggctttgt

SEQ ID NO: 517123 - DNA, 201 bp, Homo sapiens
gagtctcgctgtgttgcccaggctggagtgcagtggcacaatctcactcactgcaatctctgcctcccaggtttaagcgattctcctacctcagcctcccrtgtagctgggattacaggtgcccaccaccacgcctggctaatttttttgtatttttagtagagacggggtttcaccatgttggtcaggctggtctcgaac

SEQ ID NO: 517124 - DNA, 201 bp, Homo sapiens; identical to SEQ ID NO: 319962

SEQ ID NO: 517125 - DNA, 201 bp, Homo sapiens
aacttcgggtttctccacacttggagctgcccttgcagaggacttagtccaggtggagatgagtatgtaagcagtatagagcagtggaaggtgcacttaakagtgggctgtgggcaaatttcctggtatgtaaaacagggagaacagtatacctgccatgcaaagtttctgccaggttcatgaaaagcgcctgtttagaaa

SEQ ID NO: 517126 - DNA, 201 bp, Homo sapiens
tgttaaggctttttcttttcttttttttttttttttttgagatggagtgtcgctctgtcacccaggctggagtgcagtggcacaatcttggctcattgcarcctccgcctcccaggttcaagtgattttccttcctcggcctcccgagtagctgggagcccgccaccacgcccggccaatttttttgtatttttagtagag

SEQ ID NO: 517127 - DNA, 201 bp, Homo sapiens; identical to SEQ ID NO: 319963

SEQ ID NO: 517128 - DNA, 201 bp, Homo sapiens
gtcatgtcatctgatatgtctgggctttgcattttatagaagacagcaaggaccccaggggttttatgacttaccctttgttactcagctaagttgtggtrgagctcagaattccagttctgtggacttctgccatttgaagcagctgcttcaagtctgctcttgttcaggtgactcaagaggctggagagtttatgatca

SEQ ID NO: 517129 - DNA, 201 bp, Homo sapiens
ccttctgtttctcacatggaattcagccaggggcttcagtctcctcagccttttttccctttttgttaaggctttttcttttcttttttttttttttttttgagatggagtgtcgctctgtcacccaggctggagtgcagtggcacaatcttggctcattgcagcctccgcctcccaggttcaagtgattttccttcctcg

SEQ ID NO: 517130 - DNA, 201 bp, Homo sapiens
gccttctgtttctcacatggaattcagccaggggcttcagtctcctcagccttttttccctttttgttaaggctttttcttttcttttttttttttttttttgagatggagtgtcgctctgtcacccaggctggagtgcagtggcacaatcttggctcattgcagcctccgcctcccaggttcaagtgattttccttcctc

SEQ ID NO: 517131 - DNA, 201 bp, Homo sapiens
ctcgatctcttgacctcgtgatccacccgccttggcctcccaaagggctgggattacaggtgtgagccaccgtgcccggccaaccttaactcttaaaacayctaccttgctggccaacctgctgaccgatgagagaatttacataaaggcatgttgaagaaatgtggggctctgcaggtgaaaggctgtatccttcctgcc

SEQ ID NO: 517132 - DNA, 201 bp, Homo sapiens
cctctgcctcctgggttcaagtgattctcctgcctcagcctcccgagtagctaggattacaggtgtgtgctacgacgcccagctaatttttgtatctttartagagacggggtttcaccatgttggccaggcttgtctcgaactcctgacctcaagtgatctgcccgcttcagcctcccaaagtgctgggattacaggcat

SEQ ID NO: 517133 - DNA, 201 bp, Homo sapiens
acatggaattcagccaggggcttcagtctcctcagccttttttccctttttgttaaggctttttcttttcttttttttttttttttttgagatggagtgtygctctgtcacccaggctggagtgcagtggcacaatcttggctcattgcagcctccgcctcccaggttcaagtgattttccttcctcggcctcccgagtag

SEQ ID NO: 517134 - DNA, 201 bp, Homo sapiens
tggcgcaatcttggctcactgcaacctttagcctcccgggttcaagtgattctcctgcctcagcctcccgagtagctaggattgcaggtgcccgccaccaygcccagctaattttttgtatttttagtagagacagggtttcactgtgttggccaggctggtctcaaacttatgacctcaggcgatgcacccgctttggcc

SEQ ID NO: 517135 - DNA, 201 bp, Homo sapiens
ccaaaaaaatgtcggttattacaagttaaatatttcaaacgcagataaagaaaaggctgatcttcatccaccttctccagtgccgtctccttaagtggtawtagctccctccacacctttttctctgctcatacaaacatacacacatataaaatagtgttatttgttttgtttttaaaagagaatggcatcatgccatat

SEQ ID NO: 517136 - DNA, 201 bp, Homo sapiens
cagtgagaacatttaacatccaccctcttaatatttttcaagatctttagattttctagcatgggctaggtagccaggtctctgctgagctcagacttgcmttacctgcaggagactttggaggaaatggcagctgccccttactgagtgtctgctgagtgccaggcggtgctcaggagtcttatttatgagccctgtaga

SEQ ID NO: 517137 - DNA, 201 bp, Homo sapiens
aatgcagtcttaaatcaacctttccctttgcaagccaggccagagtttcagatgcactttctgtcctggctgatgttctcccctggagaagcagcagctawctgaggaatgaacagtatctgctagcgcgaagtcttggcagtgtataaggagaaggtggcctattttacttttaataggtcagctgctgctcaccccttt

SEQ ID NO: 517138 - DNA, 201 bp, Homo sapiens
gttcccttcaggttgttcctccaaaagagtggaagccacgagcatcctatgatgacattgatgatttggtcattcctgcccccattcaacagctggtgackgggcagtctggcctctttactcagtacaacatacagaagaaagccatgactgttcgagagttccgcaagatagccaatagcgataagtgagtggaaaccc

SEQ ID NO: 517139 - DNA, 201 bp, Homo sapiens
ggtagctgatgagttcttgaaagggtgggttggctctcagataatgaaatgaggcagtgtggtttctgcagaaaaaagatgactgactaatctaatgaaargggtatacatttaagaagagaaatacatttagatttttcagaaccctcaaacaagattctgtggcaaaagctattttaaccacttttattggcttgaaat

SEQ ID NO: 517140 - DNA, 201 bp, Homo sapiens
tgggtgaaccacttgaggtcaggagttcaagaccagcctgggcaacatggtgaaaccccgactctactaaaaatataaaattagctgggagtggtggtgcrcacctataatcccagctcctcgggaatctgaggcaggagaatcacttgaacccgggaggcggaggttgcagtgagccgatattgtgtcactgcactccag

SEQ ID NO: 517141 - DNA, 201 bp, Homo sapiens
gtgtgcagtgttctcacggccgctgcccaactgccttccatgtgagctgcgcccaggctgccggtgtgatgatgcagcctgacgactggccttttgtggtmttcattacctgctttcggcacaagattcctaatttggaggtgagagagggtgtcattctagaatcctcttgacagttttcatggtcattttctctgcatg

SEQ ID NO: 517142 - DNA, 201 bp, Homo sapiens
acttggctagtttgaatctaaaagaagtttttttttttttaattaaattttcagtattaagctaaagagtatagatatttttagactgggtgcattggctmacttctataatcccatcactttgggaggccgaggttggaggatcactggaggccaggaatttgagaccaacctgggcaacattgcaggacttcatttcta

SEQ ID NO: 517143 - DNA, 201 bp, Homo sapiens
ttccacattttttatgaagacactgcctggtggaaatcagggctaaaaagccacaacattgccatagttttttgttcttttgtttttgagacagagtctcrccctgccacccaggctagaggttagtggtatgatcatagattactgtaacctcaaacaccggggtcaagggatcctcctgcttcaccctcccaagtagct

SEQ ID NO: 517144 - DNA, 201 bp, Homo sapiens
agtggtgtaagaagcatgatccggtgctaacctagggcagtgggcagtggcctaggtgggcagtgggggtggcactgcttccacatactcagaggagagayggttctggttctcaccttcctgggtcccaggcatgtgctggtggaagtcagtggtcacccaggtgagggaggaagcgctgtcagcaggcccaaaagagaa

SEQ ID NO: 517145 - DNA, 201 bp, Homo sapiens
acacgggggctcttccaggctatcccactgctttctaattttttttctgaacaggcctgaggcatttcttagcagcagacttccaagactagagtcactcyctcagatgacagaaagctttcttttcgtcatggaaaaaatactaatacttggggagcagcagtgtgtgcttaacacataagggattgcgaggctattcag

SEQ ID NO: 517146 - DNA, 201 bp, Homo sapiens
cagaaagctttcttttcgtcatggaaaaaatactaatacttggggagcagcagtgtgtgcttaacacataagggattgcgaggctattcagcatgcttccygttctccagagtgttattcttgttggtgagacaaacattggttctctctcctctctctgtgctgacccatctttgagtctcagcatttttttttttctat

SEQ ID NO: 517147 - DNA, 201 bp, Homo sapiens
caggaggtgagtcagagtgagctcttccccaaggaggatctgagttctgagcagtatgagatgacggagtgcccggcagccctcgcccctgtgaggcccamccatagctctgtgcggcaagttgaggatggtcttaccttcccaggttagttgactatggtgtattttccacaaccctaactcatatatgtgtcccgtgtt

SEQ ID NO: 517148 - DNA, 201 bp, Homo sapiens
cattcagggattatcactcataattgttttcatattttaattttttttttttttgagacggagtttcgcttttgttgcccgggctggagtgcaatggcgcsatctcagcttaccgcaacctccgcctcccgggttcaagtgattctcctgcctcagccacctgagtagctgggattataggcatgcgccaccatgcccggc

SEQ ID NO: 517149 - DNA, 201 bp, Homo sapiens
ccctttgaaggtaaatggtgtcagttccagtggtagccgtgaaagtcaatgaggaatgctatggtcttcacgtccatagtgttttgacattattcccaatrtttgtcagagatgacagcttacttgtgacctactctgatttgtaggttcagagcctcggtttctatgcaaatgtaacttgccctggactgtcattgcctt

SEQ ID NO: 517150 - DNA, 201 bp, Homo sapiens
aaaaatgtgttcagaattgggaagtataaaatgaggttcttaagtccattaggcattaaaaccacatccacacacgttaatactcttgtttatccattccragatttctctgttgaaatttttaggggtttcctttactctagggaagcagcagggtcgggcctttgactgatagtagtagacttgcttgtgtgttcctgg

SEQ ID NO: 517151 - DNA, 201 bp, Homo sapiens
aagccaccatcagaattaattgactgggaggaataagggacagatagtcaaggtttgggggcagaagctgagcaactttgtccatccctggagaggtcttrtagcactggatctatatttgtagacaactgggttccttagagcacccttatgttcccccacccccactttaagcatccccaagctgtaatctgggctgcc

SEQ ID NO: 517152 - DNA, 201 bp, Homo sapiens
cagggaggactggacacgtagggaaaagctcctccctctgcctggtcaggggtcagggaaacactggaggttttggtgaaggtgactcttacaaggtaagyaggaccttcccaggcggacagagagagaggagggatgtagaaagggagtcccagatgggaggagcagggcacaggcatggagatgggaattttttttttt

SEQ ID NO: 517153 - DNA, 201 bp, Homo sapiens
atgtgtatgtgtgtttcagattattctgactccactgaagtcaaatttgaagagcttaaaaatgtcaaactagaagaggaggatgaggaggaagaacaagmagcagctgccttggatctttctgtgaatcctgcgtctgtagggggacgccttgtcttctcaggctccaaaaagaaatcatcttctagcctgggctctggc

SEQ ID NO: 517154 - DNA, 201 bp, Homo sapiens
agcacacagtgtctttgtgagggtactagctgttcttctgaatgactgatgaggatttgggaagcacatcgtgtggagcaggaatagcatctccaagactsattttaaaaatggaatgctaagggagccaagcagtcccagactttccaactccagctgctcctctgcagcagagatgtcagtgacatcctcctttggaga

SEQ ID NO: 517155 - DNA, 201 bp, Homo sapiens
tggttcagggaggtgaatgctgttggaaagccttagctcttcacatgctgctgggttttggttgtctgtggatatgtagggaccttgggtcttggtctgtragcccattttctccctgggtggccacctgaatctagcaaggtgtagtttaagtagagtctcttcagagagttgaggatgttgtgcttgttaaggaagacc

SEQ ID NO: 517156 - DNA, 201 bp, Homo sapiens
aatgtttgtcagagatgacagcttacttgtgacctactctgatttgtaggttcagagcctcggtttctatgcaaatgtaacttgccctggactgtcattgyctttgcagcatgttgatgagtggaatattggccggctgagaacaatcctggacttggtggaaaaggagagtgggatcaccattgagggtgtgaacacccc

SEQ ID NO: 517157 - DNA, 201 bp, Homo sapiens
tcagcattttagtgaaggtgctgcagataacagcagtgaataagatggatgagatacctaccctcacacagataggagactggtcaggaggtagaaagtgwgagagaatgctcatacggtgtggggacagctctgaaggggaagaagtgggtgctaaggtccacataagagggatagatgggattaaagaaggcttctttc

SEQ ID NO: 517158 - DNA, 201 bp, Homo sapiens; identical to SEQ ID NO: 319992

SEQ ID NO: 517159 - DNA, 201 bp, Homo sapiens
gataggagactggtcaggaggtagaaagtgtgagagaatgctcatacggtgtggggacagctctgaaggggaagaagtgggtgctaaggtccacataagarggatagatgggattaaagaaggcttctttcaaagaggtgacaagtgagacctaaaacatgagaaggacataaccgggtggagtggtggtgggcttagcag

SEQ ID NO: 517160 - DNA, 201 bp, Homo sapiens
tgggtgctaaggtccacataagagggatagatgggattaaagaaggcttctttcaaagaggtgacaagtgagacctaaaacatgagaaggacataaccggstggagtggtggtgggcttagcagctgggagattgagggaagtgtatccaggcagttggaaccacagacgcagagctcctggattaagacagcacatgagg

SEQ ID NO: 517161 - DNA, 201 bp, Homo sapiens
gaaggacataaccgggtggagtggtggtgggcttagcagctgggagattgagggaagtgtatccaggcagttggaaccacagacgcagagctcctggattragacagcacatgagggccaggcgtggtggctcacacctgtaatcccagcactttgggaagccgaggtgggtggatcacctgaagtcaggagttggagacc

SEQ ID NO: 517162 - DNA, 201 bp, Homo sapiens
gctaggtctcttaagtgtcagatccatctttcactttgttttccatcttcctcttgcctgcccccagttaggcctttcaagcatttaaaaatactgagcayttttaaatactgaggttatatagtgacatccttctttttttttcttttaaaaaatgttattatatgaacaacattataaaggagagtaatattatgtacc

SEQ ID NO: 517163 - DNA, 201 bp, Homo sapiens
agctaatattttttattatttgctgcccagtttggtcttgaactcctgggctcaagcgatcctcctgcctcagcctcccaaagtgctgggattataggcaygagccactgcatccggctgacaccttaactccttttatttatttttttttttgagacagaatctcgctctgtcgccaggctagagtgcagtggcgtgatc

SEQ ID NO: 517164 - DNA, 201 bp, Homo sapiens
aaatgttaaagaaaaaattgaactttatgctttgtttcttttaagtggacttagatttgtatgtctggagaacataggaaagcctgggtagatgatactayagctgcattactgaaaaaagatcagggatacaagtgactggagaaaaggtcctaaatagtttcaaagctctataagaacagaggcagcttgggtgacctt

SEQ ID NO: 517165 - DNA, 201 bp, Homo sapiens
taaggaatttttaaaaatgtgttcagaattgggaagtataaaatgaggttcttaagtccattaggcattaaaaccacatccacacacgttaatactcttgyttatccattccgagatttctctgttgaaatttttaggggtttcctttactctagggaagcagcagggtcgggcctttgactgatagtagtagacttgctt

SEQ ID NO: 517166 - DNA, 201 bp, Homo sapiens
gttgctgcaattaggcagctggttggtggcaaaagtggatcagggttagcatgcctgtgacttactgtgttttggtgaatgtgggtaaatcaaagtaactrtctagtaaaattgactgttaggttggctggtaactacatgcttcctggactctgactggcttgccaggtttctcatctgtctttttgtttcttgtgttcc

SEQ ID NO: 517167 - DNA, 201 bp, Homo sapiens
attggtgcggagctataaggatcctcagaggtcacattggtgatgcatcctctttatcattccgatgagaagcacaggtgtgaagtgactccaggattgcrgagctagtgtggagcactgtgttaacctgtaccctttcaattaaataggctttttcccaggaagtgctcaaagctgtgaggcatttctccgccacaagat

SEQ ID NO: 517168 - DNA, 201 bp, Homo sapiens
caatctatggtgcagatgtgaatggtaccctctatgaaaaggtgaggctcactggaaaccctctgtgcagtgtttttgtaattttgtaatacctttttttyggcccggcacgtagtaggcacctaaaagctgtttggtgaatgggtggatgaacagatgatctacccccagctgatgttgctgtgctggcctaattgtggg

SEQ ID NO: 517169 - DNA, 201 bp, Homo sapiens
tgaccccgagttagtgcccaggtagatttgccccagtagcatgtgctctctgcctttttttccctgcttcccttcatgtttgaaggtcctgcaaggataayatgccctcagcctgtgaaccaaaacaatctggttataaaccatcttgcacttgtttccatgtggagggaggagctaggacgtgggggtgagttggaagca

SEQ ID NO: 517170 - DNA, 201 bp, Homo sapiens
aatactttatatgcattgttcagtctttgtattactgcttaattaatcttattacagagtcaagtttttgtgggaattttttggggtgggaggtgcaggamgccaataaataacacctgtcctttttcctctcaattcggaactatttaattgatgatacaagagtcaggcatatggagctcagaatgtcgctttatttac

SEQ ID NO: 517171 - DNA, 201 bp, Homo sapiens
aattcttgctgtcactggaataggggattatgtcttgtaatgttcataatgcctaataaacccctgtaagtggtttacatgtttctttttactttcaaaaaggtactgtaccccacgctatagtgagtttgaagagctcgagcggaaatactggaaaaatcttacattcaatcctccaatctatggtgcagatgtgaatgg

SEQ ID NO: 517172 - DNA, 201 bp, Homo sapiens
aatcttattacagagtcaagtttttgtgggaattttttggggtgggaggtgcaggaagccaataaataacacctgtcctttttcctctcaattcggaactmtttaattgatgatacaagagtcaggcatatggagctcagaatgtcgctttatttacaagttaaaatgattgaagaaagtgacttttaacctgtgactaaa

SEQ ID NO: 517173 - DNA, 201 bp, Homo sapiens
gcagtgagaacatttaacatccaccctcttaatatttttcaagatctttagattttctagcatgggctaggtagccaggtctctgctgagctcagacttgyattacctgcaggagactttggaggaaatggcagctgccccttactgagtgtctgctgagtgccaggcggtgctcaggagtcttatttatgagccctgtag

SEQ ID NO: 517174 - DNA, 201 bp, Homo sapiens
ttagacagttgatatagttccggtctgattaagtctatggtcatgtaagtcttcatggacatcagtaggaaaaggtccctgatatcctcactccaccataytcctccatactgctgcagcatccttactcacgtaagcacagatcacatcttctttgcttctctacaccttcttcttttcctgggcaggcctttgcacaca

SEQ ID NO: 517175 - DNA, 201 bp, Homo sapiens
atcagtggagcatggtctccttggctgcctgaagcccagagatccaggatgatcatcactgccgagcctcagctccagcttggttggtgactgggccctgkcaccttcagggagagcagagtcaatcgtacatgttactcttgactaacatcaggccctgtcctacctggtcctctccttcctgatctgatgtcagtgccc

SEQ ID NO: 517176 - DNA, 201 bp, Homo sapiens
tacttggtgagtgtcagccactgcgtagggcgcttgggcatatagcaggggtacttacaaatgagccctcttggagcagcttccttttggctggttcaggraggtgaatgctgttggaaagccttagctcttcacatgctgctgggttttggttgtctgtggatatgtagggaccttgggtcttggtctgtaagcccattt

SEQ ID NO: 517177 - DNA, 201 bp, Homo sapiens
tacctgacatagcacctaggaccctggtgtctcatcctcctagcatctccaggactgctgctgtcctgatgaacagtgtcttcagcaggatggctctgttstagctgtctccctttctgctttttttatggaagcattccctcctctcaggactgtgtcccagtctaaacctgttcctgttcttataacaacaaatcccat

SEQ ID NO: 517178 - DNA, 201 bp, Homo sapiens
aggtcgggctccctctgagccagaaaagtcatgttttctcatcatatcagagagtcttttaaaaagaagtgtagtgaggatgagactcaagggcattggtratgtcgtgatttaagtctgcagtgctattggtggctgagccaggggatctgtgctctgaggagaatttatcctgggccatatgggaaagaaaggaggaac

SEQ ID NO: 517179 - DNA, 201 bp, Homo sapiens
tgtgaccagaaggtgacgctggagaaataggagatgatgtagggctgtctgccattttcatttgctcacttggaagcttaagaagccatttatattttaaragagggagtggtgtgatcagtgctgtttagcagtcacttggaaggtcattgaggctagatttgttagagaaaggcttgtatctgtcttgggtcaggtatg

SEQ ID NO: 517180 - DNA, 201 bp, Homo sapiens
agtggtgtgatcagtgctgtttagcagtcacttggaaggtcattgaggctagatttgttagagaaaggcttgtatctgtcttgggtcaggtatgacccaamgatgtggtctgccgacagccaggcagcactgtggactgacaccctgggctgggctggcttctcttcagcagattttctttcccttttttctcttcaaatt

SEQ ID NO: 517181 - DNA, 201 bp, Homo sapiens
tgaagtcttccttaatgtaggccagcgcctctcccccttttttcctcaccattgacttaatcaagaagctgtcattgattgtccagtaaagggttttttargtactgcactgatgttttggaagattgttctggaggcagtataaagattttgagggggaggaagaaggaggcaaaattagaaattgtttaacagaggttc

SEQ ID NO: 517182 - DNA, 201 bp, Homo sapiens
accttgtgatccgcctgcctgggcctcccaagtgctgggattacaggcgtgagccattgctgctggccagctctgctaatttttaaagtttttgtagaaayaggattttgccatgttgctggtctcaaactcttgggctcaagtgatcctcctgcctcagcctcccaaagtgttgggattacaggcatgagccactgtact

SEQ ID NO: 517183 - DNA, 201 bp, Homo sapiens
aggacgagccatttctgggcacgtggcagcagtcgctgatctcccagctgaggggctgagcactggaatgctgtggctgcactggccccagtccatagagrggtcaactatgctggctggactggctgccttgttcctggcctaggacttagcttcataactatcacctgcaccgactaggctgaggtgctggtacttgcc

SEQ ID NO: 517184 - DNA, 201 bp, Homo sapiens
cattgaatcccaaggagctcatcgggcagggctagccaaggtaaggagctgggattgttcaaatggttttgttacctagggcagagcagtaagatttttttcctacatttgggccggaactgtgttttactgaaagttgggtggggtgatgactttagtgaatgcggttctatttgcaagttaattcccgttgttaacatc

SEQ ID NO: 517185 - DNA, 201 bp, Homo sapiens
tttactgttgtatgcccctccccctacttttaaaaaaatttcaattcaagcataacaattcagtgatatgcacacattttaactgtacagctcaatgaaawtttacatatgtaaactgtataattttgcttcctgcaattttcacttaacgtagtgaacattttccctcatcattcagtattcacaaatggaatgatctgg

SEQ ID NO: 517186 - DNA, 201 bp, Homo sapiens
ctgaagtcaaatttgaagagcttaaaaatgtcaaactagaagaggaggatgaggaggaagaacaagaagcagctgccttggatctttctgtgaatcctgcrtctgtagggggacgccttgtcttctcaggctccaaaaagaaatcatcttctagcctgggctctggctcttcacgggattctatctcttctgattcagaaa

SEQ ID NO: 517187 - DNA, 201 bp, Homo sapiens
ttcagtattcacaaatggaatgatctggggccacttttggctttgtaaatggaacagatgtcagtgtgttaattttttagttgtgagtgtgagcctgcctrtctgtttctgtttcttccattctatcttggtcactcctgtttggccaggataaagaaaaaaatctgtgcttgggttctgggcaccatggctcctgattac

SEQ ID NO: 517188 - DNA, 201 bp, Homo sapiens
tagtagagacagggtttcactgtgttagccaggacggtctcgatctcctgacctcgtgatccgcccacctcggcctcccaaagtgctgggattacaggtgygagccaccgcgcccggccgaggctgtttctaagatgccgtttgtgccttggctaagggagtgttcttggtaaaggctccagaaacctgagagccagagca

SEQ ID NO: 517189 - DNA, 201 bp, Homo sapiens
gctgtgtgcctcctgctctggggcatctgtggcttcattggtggatctctttgggtccagctctaggatgccaggaaggcattcacagcagcaggtgccargggaccagctcagtctcagctgggacctgcacagcatagcaggtaggtaagtggtccttacctgctgtggtggttaaagtggcatggctgccgctgagcc

SEQ ID NO: 517190 - DNA, 201 bp, Homo sapiens
tctgcaagctccgcctcctgggttcacaccattctcctgcctcagactcccgagtagctgggactacaggcgcctgccaccacacctggctaattttttgyatttttagtagagatggggtttcaccatgttagccaggatggtcttgatctcctgacctggtgatctgcctgcctcagcctcccaaagtgctgcgattac

SEQ ID NO: 517191 - DNA, 201 bp, Homo sapiens
agtagagacggggtttcaccatgttggccaggcttgtctcgaactcctgacctcaagtgatctgcccgcttcagcctcccaaagtgctgggattacaggcrtgagccaccgcacccagccccacaatatcctttaatcttcagtccatgcccatctttccctgcatgtcccaagaatgtgttttatagttatttcttttga

SEQ ID NO: 517192 - DNA, 201 bp, Homo sapiens
ctggtctcgaactcctgaccttgtgatccacccacctcggcctcccaaagtgctgggattacaggcgtgagccaccacgcccagcctttttttttttttttgagacggagtcttactcactctgttgcccaggctggagtgcagtggcatgatcttggctcactgcaacctctgcctcctgggttcaagtgattctcctgc

SEQ ID NO: 517193 - DNA, 201 bp, Homo sapiens
ccctggtcccatcaccatgtcctcaaacagaaagaatcatctgtaccagtctttctttgcaaagaaaactgcgtgctgctagggtaccctattttccctakaagtacctgggaatcagtattttctgcaattccttgaaacctgcatctgttgccgtctaaattatccttgagggcattctagtgcaataggagagcccag

SEQ ID NO: 517194 - DNA, 201 bp, Homo sapiens
tgtcaaaggcagcggcatccagccaagtgtctctggcatcacatcactcggacagactcttctgcttccttcttctgttgtaagccccattgggattacaytgggcccacctggatgatccagggtacgctccctattttaaacactatctgattagcaatcttaattctcctttaccatgttagaataacatattcacag

SEQ ID NO: 517195 - DNA, 201 bp, Homo sapiens
tcccagctactcaggaggctgaggcaggagaattgctcgaatctgagaggcggaggttgcgctgagctgggatcttgccattgcactccagcctgggcaayagagtgagactccatctcaaaaaaaaaaaaaaaaaaaggaaaatatggtcactttcttagatgataactatgccattattatacctaagaaaactacaaa

SEQ ID NO: 517196 - DNA, 201 bp, Homo sapiens
atttgtcttgtacaacataatttttttgtttgttttagaaacggggtcttactgtgttgcccaagcctttgtgaacacagctcactgcagcctcaactttytgggctcaagcaatcctcttgcctcagcctctcaagtaggtgggactacaggcatacaccacgcctggctaatttttttttttttttttttttttttgag

SEQ ID NO: 517197 - DNA, 201 bp, Homo sapiens
gcgggaggcagagcttgcagtgagccgagattgcaccactgcactccagcctgggtgacagagcaagactctgtctcaaaaaaaaaaaaaaaaaaaaaaaraaaaaaaagaattccagttttgttgatagcagtttttgggggtcagggaaagtcagtcttgtagggatgaatggcaggaagatgctgtaaggatctggga

SEQ ID NO: 517198 - DNA, 201 bp, Homo sapiens
agagtgcagtggtgctatttaggctcactgcaatctccgcctcctgggttcaagcaattctcctgcctcagcttcccaagtagctgggactataggcgccygccacaccacccggctaattttttgtatttgttgtagatacagggtttcaccatgttagacaggatggtcttgatctcctgaccttgtgatccgcctgcc

SEQ ID NO: 517199 - DNA, 201 bp, Homo sapiens
aaatgctaatatttgtttgaaagcctgaattttactattggcaacagatactgacttttgttttccttgacatgacaggcgttcacttcatgcattttcargaagatgtctgccagatacctaagtctgaaaagccatagtttgtcagtcacttttttctttttttaaattttcatagagttttttaaagacagggtcctg

SEQ ID NO: 517200 - DNA, 201 bp, Homo sapiens
acaataggggagttaattgtatttcagagagaatgttaggtctctaaaatttattattccctaggttgacattaaagtgtaaggcagttacttagtcagatttttttttttttttttttgagatggagtcttactctgtggcgcgggctagagtgcagtggtgctatttaggctcactgcaatctccgcctcctgggttca

SEQ ID NO: 517201 - DNA, 201 bp, Homo sapiens
ttttctgaacaggcctgaggcatttcttagcagcagacttccaagactagagtcactctctcagatgacagaaagctttcttttcgtcatggaaaaaataytaatacttggggagcagcagtgtgtgcttaacacataagggattgcgaggctattcagcatgcttcctgttctccagagtgttattcttgttggtgagac

SEQ ID NO: 517202 - DNA, 201 bp, Homo sapiens
attaaccactttttcctccctctcctttcttggcaggactgctgtttatgctcattacgaggaggggccctgcagagagcaaatgatgacaggtaagtttyctgagcagtgccttggaatgcacaggctcagttccgaagcacacagtgtctttgtgagggtactagctgttcttctgaatgactgatgaggatttgggaa

SEQ ID NO: 517203 - DNA, 201 bp, Homo sapiens
gctaaatttatgggaagagctaaatttatggaggaaatgtggtactggtctcttccaatgtcctggctgggatggtgggtatctggaaaggcttgttttarctcccatctcttctctcctttttacttttactttcccatgcttatctttccctgataaggaggaactaattgatcttcatctccatatgccaggcctgca

SEQ ID NO: 517204 - DNA, 201 bp, Homo sapiens
ccaagccattgattccagaaatgtgcttcacttcgactggctgcagcacggacatcaacctttctactccttatcttgaggaggatggcaccagcatactygtttcctgcaagaagtgcagcgtccgggtccatgccagtgagtgctgctcacctttctctgtgtcctgtcccaggagtatgggcctgctcactggaagtt

SEQ ID NO: 517205 - DNA, 201 bp, Homo sapiens
gttgcaaagtggccctctttcaggcctcatttccttgcttaatggattttgctaaccctgcatctcctgatgtcagtataaccaagttttaaatacgttgrttagaaagaaacccttctgtagtgtttctgagtcaatcctgtacatttaaatctaattacatttgctctgacattatgtaaatgcagtcttaaatcaacc

SEQ ID NO: 517206 - DNA, 201 bp, Homo sapiens
caacagagaaggcagggctggtgtggtggtcactaagtaccacaaactggagtgtccctgtggagtagtcaggtcagaagccagaccgtagttggggaagrctctgccatgagtgagttacaatctaatagaagaggcgatcatacaagtttgacaacagtgtggtaaatacataatcaaaggaagaacgtgatagatggc

SEQ ID NO: 517207 - DNA, 201 bp, Homo sapiens
agtgtcgaagccctgggtggcagcacatatggcacactcattcagggaacagcaaggggggccagcatggctggggcagagtgcctgggcaggctagcagrcgtgcttggaaatgaggccgtcacatactttgtgatcctgtttgcatcaagggcaagttcagaatgagaagggcatggttgagggcaccagagatggcaa

SEQ ID NO: 517208 - DNA, 201 bp, Homo sapiens
tatgttgcacaggctggtctcaaactcctgggctcaagcagtcctcctacttcagccttgcaaagtgctaggattacaggcatgagccactgtacccggcycatctcagcattttagtgaaggtgctgcagataacagcagtgaataagatggatgagatacctaccctcacacagataggagactggtcaggaggtagaa

SEQ ID NO: 517209 - DNA, 201 bp, Homo sapiens
ggactataggcgcccgccacaccacccggctaattttttgtatttgttgtagatacagggtttcaccatgttagacaggatggtcttgatctcctgacctygtgatccgcctgcctgggcctcccaagtgctgggattacaggcgtgagccattgctgctggccagctctgctaatttttaaagtttttgtagaaatagga

SEQ ID NO: 517210 - DNA, 201 bp, Homo sapiens
gctccgtgctgtccatctggatgtgtcgagagggcctgcttctcagccaccgcctcggacctgcgctggtccccctgcaccgcctgcctcgaaccctggaygcccggattgcccgcctggcccagtgtaagctcctcctctgtgtggggtcagatacccccaacgtaaggggtagaatttcaggcagtggagtgggaggtg

SEQ ID NO: 517211 - DNA, 201 bp, Homo sapiens
ggccttgacagtagctgctgccactccatggagtggggtccccacacaggcttcggatgcagtaggctgcggtacctgctgctcctctgcattctgagaarcccaaacaccccgattcatttcttggatagggaaactgaggctccactgcacagcggggcagtggggatggagggagtctgaaaagcccggggcctcaga

SEQ ID NO: 517212 - DNA, 201 bp, Homo sapiens
attgcccgcctggcccagtgtaagctcctcctctgtgtggggtcagatacccccaacgtaaggggtagaatttcaggcagtggagtgggaggtgggggggktgtcataggttttttaaagatagggccagccagcccccttgcagggaggcagggacagacatcctaaaagattattcagggcaaggcatggtggcgcctg

SEQ ID NO: 517213 - DNA, 201 bp, Homo sapiens
ctgcactccagcctgggcgacagagcgagactccgtctcaaaaaaaaaaaaaagattattcattgtttatatggaattcagatttagccgggcacctgtaytgtatcgggcaagcccacaaatgtctgcttcgatgcacccctctggggttgggtgtgccccctaaccccccagcacagtcctggccactccagtcctgct

SEQ ID NO: 517214 - DNA, 201 bp, Homo sapiens
gggtgtgagtgtgtacgtgccccccagtgccgcccagagagggtgcatgagcagctcagcaagagggtggggaaatttgggacctgggagtgagacgagawgccgtctaggcctggcgtcccagcaagggtcttcgtttgcaggggtacagagagggtagggggctccctcccaccccctgcacccactgaccccccctcc

SEQ ID NO: 517215 - DNA, 201 bp, Homo sapiens
ggttttggaccagcgtaggggtgtgagtgtgtacgtgccccccagtgccgcccagagagggtgcatgagcagctcagcaagagggtggggaaatttgggayctgggagtgagacgagaagccgtctaggcctggcgtcccagcaagggtcttcgtttgcaggggtacagagagggtagggggctccctcccaccccctgca

SEQ ID NO: 517216 - DNA, 201 bp, Homo sapiens
aatggggtgagagaggggcccagaggaggtgagttagagaccccggtcagctcagctcaaggtgagacgggctggaaagcggcccagaaaggatggaccakgttctgggcagccaatataggctcagggttcagaaaggggttttggaccagcgtaggggtgtgagtgtgtacgtgccccccagtgccgcccagagagggt

SEQ ID NO: 517217 - DNA, 201 bp, Homo sapiens
gggggccccggatgcgatggagctgcgcgagctgacgccctgggctgggcggcccccaggtccgcgccgtcgggcggggccccggcggcggcgcgcgcgtkcgcggttgggggcgcggccttgcgggctgcgcgagctggaggtgcgcgtgagcgagctgggcctgggctacgcgtccgacgagacggtgctgttccgcta

SEQ ID NO: 517218 - DNA, 201 bp, Homo sapiens
  misc_feature (1)...(201): n = A,T,C or G
aatgttacttagatgtggtcgatacagggtaatgcaaacagagagctgaatatgaagagcctaatacttgctctgtaagttgttcatggcattatgagaanatttgttctcctaaaagctcaggatgccagctccttcttaataaaatattagtttagctctattgggttgcaattaacctctttgtcatggactgcctaa

SEQ ID NO: 517219 - DNA, 201 bp, Homo sapiens
ccaaaaagggagaaatgggtcaaaacaaaggagttccaggactttgttttgaagtctgaagttcagtagggcagccattaaaccttaaagctcaaaaatawtctcctttgatcccatgtctaacatccaaggcatactgatgaaaagtgtgggctcccaaggccttgggtagctgtgcacctgacgttttgcaggatacag

SEQ ID NO: 517220 - DNA, 201 bp, Homo sapiens
aattgggtctttttaaaatatgtaataataatctcaaattctgacatcaaagctccagcagtttaattagaagtctttcaaagggttgacacaattcttaygcttcccaagtaaacataggttgtactaagtcttcaagatatgaacattctttagaaccagacagacccagacacaggaacgcagatactattttcctat

SEQ ID NO: 517221 - DNA, 201 bp, Homo sapiens
tgtctaccagatactgatattcaacaagcagcagagtgactaagaacattgcctttacagtgcagacatagtacaaaatccaagtttccctgtgtgtgatmtaagccacgtcatttaacctcttacagcccagtgtctgtatcagtaaatgggaataattatagtatacatgtgttggaaagagtaaacattaaacatgct

SEQ ID NO: 517222 - DNA, 201 bp, Homo sapiens
gttaaaaatatttttctaacttatcttaaggctgcttctttgatttgtttagaaacatgtttcatttccaaatatttcgggatcttccagatatctttctrttactcatttctagtttaattccactttggtctgataacatactttttaagatttatatttttttaaatttattaaggtagttttatggcccagaatgtt

SEQ ID NO: 517223 - DNA, 201 bp, Homo sapiens
attgtattttcatttttctttagttaaaaatatttttctaacttatcttaaggctgcttctttgatttgtttagaaacatgtttcatttccaaatatttcrggatcttccagatatctttctgttactcatttctagtttaattccactttggtctgataacatactttttaagatttatatttttttaaatttattaagg

SEQ ID NO: 517224 - DNA, 201 bp, Homo sapiens
caaggatgtggaacaacagaaattctcattcatcgctgatgggaatacataatggtgctgccactttggaaaacagacagtttgaaagtttcttacaaaastaaacatagtcttaccatatgattcagcaatcatgtttcttggtatttacccaaatatgtttaaaacttatgtccacatataaacctgcacatgaatgtt

SEQ ID NO: 517225 - DNA, 201 bp, Homo sapiens
ttaagcatatgaaaaggtgttcagcaatatatgccatttgtcaattgaaaattttaaaacatcaaaagagatacatttaaacagataccactacacacctrttagaatagtcaaactccaaaatactaacaccgccaagtgttggcaaggatgtggaacaacagaaattctcattcatcgctgatgggaatacataatggt

SEQ ID NO: 517226 - DNA, 201 bp, Homo sapiens
accttcactccaaggaagattctgtttcttctttggatactctctctactaaccatatattggctcagatatacattaatgaaattccatagaaatgtagyttgctttctcccttctgttttcatgcgtactacttcaaggggccatttaactggaaaatttatactgtatcttgtaaaatattgaaaagggagtaaatct

SEQ ID NO: 517227 - DNA, 201 bp, Homo sapiens
atataatcccttcacaccctgataatttttgtaacttttcattaagcatgcaattatttcaaaattaaactatcaaaaatgagaagaagaagaggaggagraagaaaaggaggaggaggaggagaagaagaggaagaagaggagaatcaggaaaacaggtgctggtaagttactattttcctcctcctttcttaaaacatc

SEQ ID NO: 517228 - DNA, 201 bp, Homo sapiens
aatagactgggataaatcaatacaggcatagagtatgtttcatatatgaacaaggaaacttttatatttgtcacagttatttaaatatgcttctcctattrgtcaaaaacaactttaaggattcctcactcaattaaaagctacatccatgattttttcttatccaaatgctaatcaattttgatatcttaaaatatcccc

SEQ ID NO: 517229 - DNA, 201 bp, Homo sapiens
tccttagtgatcttgggggcccaagatgttttcctttcacacccaggaccaaaattttaagaacactgactgtggtaagggatattaagaataggattaawagatatcaaggggataggataaattagttttgaaggatgatggagggagggtttgaagtttaatctaaactaccaagattgttaaaactcctattttatt

SEQ ID NO: 517230 - DNA, 201 bp, Homo sapiens
taatgatgtattcaagtaggttcatcaattgtaacagatgtaccactctggtgtgggatttccatagtgggagaatctatgcatgtttgggagcaaagggtacagtacatgggaaatctctgcacctcctcaattttgctacaaacctaaaagcggtcttaaaaattaaagtctatttttaaaaaggctcacactctttac

SEQ ID NO: 517231 - DNA, 201 bp, Homo sapiens
catggcttcctgcagcctcaacctccctggctcaagaaatcctcccacctgagcctcctgagtagctgaggctacaggcatgtgccaccatgtctggctarttttttttcttattttttgtagagacaaagtctcactatgttacccagggtggtcttaaactccttggctcaaacaatcctcccaccttggcctcccaaa

SEQ ID NO: 517232 - DNA, 201 bp, Homo sapiens
cagcagttctctagaacttaatcatcttgtgtaactgaaacttgtatgcattgaatagcaactccccattttcctcctctgtttctatgtgtttgactactttagatacctcaaataagtggtatcatgcggtatttgtcctttaatgattggtttatttcacttagcataatgtcctcaaggtttatctttttgatcatc

SEQ ID NO: 517233 - DNA, 201 bp, Homo sapiens
gttttttgttttgttttgttttgtttttcttttttcttttttttctttttttttttttttttttttttgagacggagtcttgctctgtagccaggctggartgcagtggcacaattttggctcactgcaaactctgcctcctgggttcaagtgattctcctgtctcagcctccgaagtagctggattacaagtacgcgcca

SEQ ID NO: 517234 - DNA, 201 bp, Homo sapiens
taggattctggttatagtatcctgagatcttgattctataaagaattatgaagtttattaaaagatatagaggtctttcctaaaaaaaaaaaaaaaaaaacctaaaggtaatcacagacttaacatctctattccaccattgttgctattaagaaaaacaaacagaaataaggttaacaaattaatgatagcagaatcatc

SEQ ID NO: 517235 - DNA, 201 bp, Homo sapiens
ataaaaaagtataaaaaaagagtctagtagcgactaggtatccagaaatgctatgcatcattatcaccacaaaatcatttcccaaacaaaaagaataatcatatatatatatatatatatatcatatatatatataatcttggccacatataatcatagcactgcctcttccactagccatcactcctatcagtcttctct

SEQ ID NO: 517236 - DNA, 201 bp, Homo sapiens
taaaaaagtataaaaaaagagtctagtagcgactaggtatccagaaatgctatgcatcattatcaccacaaaatcatttcccaaacaaaaagaataatcatatatatatatatatatatatcatatatatatataatcttggccacatataatcatagcactgcctcttccactagccatcactcctatcagtcttctctt

SEQ ID NO: 517237 - DNA, 201 bp, Homo sapiens
tatctcccttcttagcctgttgacttaaaggtaggaagagcccaaagtgtccaggtggcaatcttaacttccagtttaatggaatctttgttgtgtctcckggctcctccctctggaaccaagacctctaggtcagcagaatgtaatatcgcaggaacaggaagtgaaaattttgctagtggatccctaggggtgatggtg

SEQ ID NO: 517238 - DNA, 201 bp, Homo sapiens
gtaattctgacttcaaaagaccattccaccattctattcatccagctgcctcaggacgatggggaacatggtaagaccagtgaattccatgaacatgagcscactgccacacttctttagctgtaaagtgagtgccttggtcagaggcaatgctgtatggaataccatgatggaggataaggcattccatgagtccatgga

SEQ ID NO: 517239 - DNA, 201 bp, Homo sapiens
caatgctgtatggaataccatgatggaggataaggcattccatgagtccatggatggtagttttggcagaagcactgcatgcaggataggcaaacctatayctggagtaagtgtctattccagtgaggacaaacctctgccctttccatgatggaagagttccaatataatcaacctgccaccaggtagcgggctgattac

SEQ ID NO: 517240 - DNA, 201 bp, Homo sapiens
agagttggttcttatctgcacttctgcctggtatatctcaggctaggctccacacctagtacatgattaaaattgcttaccaaccagggttttcaccaaargtaaaagtcactaaaagttaataacataacatgtaattgagactactgaagatacagttttacatgtaaggtgtgtaaggaaagtggaatggacttttgg

SEQ ID NO: 517241 - DNA, 201 bp, Homo sapiens
gtaatctatggtaaaataatttttgcactggtttccatgatatagacctcttaatttactgtgaccaggacaattgcaacatctgtaaaagtttttgagtwaggccattcacaactcagtgtaatcctgtgtataaatgtgaatgtaactgaagatgactgatttttcctgacacaattacccaaaaacaaacaaatgaca

SEQ ID NO: 517242 - DNA, 201 bp, Homo sapiens
caaatctctagtatgaaggttaaaagtcaaaatggtcaaaaataaccatagctacagtaagtaacttacagtaagtaagtcacaagaaggaaaaaaaaggrcctacaaaataaccaagcaacaatgacaaaagggcaagaataagtctttacctatcaatacccttaaacgtaaatggattaaattatccaatcaaaagac

SEQ ID NO: 517243 - DNA, 201 bp, Homo sapiens
ggcagatcacctgaggtcaggagttcaagaccagcctggccaatgtggagaaaccccgtctctactaaaaatacaaaaattagctgggtgtggtggcgggygcttgtaatcccagctactctggaggctgaggcaggagaatcacttgaacctgggaggcggaggttgcaatgagccaagatcacgccactgcacttcaac

SEQ ID NO: 517244 - DNA, 201 bp, Homo sapiens
gcagtgaaccaagttcacaccactgcactccagcctgggcgacaaagcgagactccatctcaaaaaaaaaaaaaaaaaaaaaaaaaaaaagaatgagtcayttcataccaagtgggagtgaggtgctttggaaaatcatctggctatattgtaacagttgaacatgcatatattcaaagacccaagaatttcacttgcaga

SEQ ID NO: 517245 - DNA, 201 bp, Homo sapiens
tgcagtgaaccaagttcacaccactgcactccagcctgggcgacaaagcgagactccatctcaaaaaaaaaaaaaaaaaaaaaaaaaaaaagaatgagtcrcttcataccaagtgggagtgaggtgctttggaaaatcatctggctatattgtaacagttgaacatgcatatattcaaagacccaagaatttcacttgcag

SEQ ID NO: 517246 - DNA, 201 bp, Homo sapiens
atgtagctgatgacacatgtctttgtcgcttctattttgtttctatttttttcctatgttaagttaggaaaaggcacatttccccccaccatctccatttmcacacacacacacacacacacacacacacacacacacggtataattatgatctgatctgatgattgataatagcatgagatgtatctttcaggatatttg

SEQ ID NO: 517247 - DNA, 201 bp, Homo sapiens
tcattggtttcactttagagataaagttcctgtgactagacttcatatataaaaatgagacctaaagtttttgcttcagaatcatcgtgaaccaattctamcaggtttttcacaatattagttttgcagtaacaacaaacagcaattgttaccattttttaacttgttaggcagcaaatgtcttgggccactggctttcca

SEQ ID NO: 517248 - DNA, 201 bp, Homo sapiens
tgggatgcaaggctggttcaatatacgcaaatcaataaatgtaatccagcatataaacagagccaaagacaaaaaccacatgattatctcaatagatgcasaaaaggcctttgacaaaattcaacaaccttcatgctaaaaactctcaataaattaggtattgatgggacgtatttcaaaataataagagctatctatgac

SEQ ID NO: 517249 - DNA, 201 bp, Homo sapiens
gttccacagtctgccatctgcaaccaggagacccaagaaagccgatattgcaattcaagtccaaagacctaagaaccaggccaatggtgtaaattccagtycaaaagcaagacgagatgagatgttccagatcaagtagtaaggcagaaaaaaggagagaattcctccttcttccatctctttttctattcaggccctcaa

SEQ ID NO: 517250 - DNA, 201 bp, Homo sapiens
ctatctatgacaaacccacagccaatatcatactgaatgggcaaaaactggaagcattccctttgaaaactggcacaagacagggatgccctctctcaccrctcctattcaacatagtgttggaagttctggccagggcaattaggcaggagaaggaaataaagggtattcaattaggaaaagaggaagtcaaattgtccc

SEQ ID NO: 517251 - DNA, 201 bp, Homo sapiens
ctactcgggaggctgaggcaggagaatggcgtgaacccgggaggcagagcttgcagtgagccgagatcgtgccactgcactccagcctgggtgacagagcragactctgcctcaaaaacaaacaaaaagactctaaactagaaactatggagctaaaggaagataagcctctgaagccacaatggaagcaattctttgaga

SEQ ID NO: 517252 - DNA, 201 bp, Homo sapiens
aatcccagcactttgggaggccgaggcgggcggatcacgaggtcaggagatcgagaccatcccggctaacacggtgaaaccccgtctctactaaaaatacaaaaaaaaaaattagccgggcgtggtggcaggcgcctgtagtcccagctacttgggaggctgagtcaggagaatggcgtgaacccgggaggcggagcttgc

SEQ ID NO: 517253 - DNA, 201 bp, Homo sapiens
aagttacaacaaataaccttgtacctatatcagattgtctaagcacaaatttttagaagaaaaattagtaggtaaaatgccaaaacatctttaaggctgtygccaaactgcatcctagaaaaggtaaaccaaattacactctaaccaactgtgtatgagagtatgttgcatgttcttaataatatctctctttaatcttcc

SEQ ID NO: 517254 - DNA, 201 bp, Homo sapiens
aaataaatttccgttgttgaaactactcagtctatggtattttgtgatagtaagccaagcagactaatacaagggttaaagaaatattggcaaggggtacmagactaacctgtgcattgaactaagtggtatagagatgtttaataaaaatgagtctaggccaggcgcggtggctcacacctgtaatcccagcactttggg

SEQ ID NO: 517255 - DNA, 201 bp, Homo sapiens
cgcacctgcctgatatttgattgcatttgatcagcaattaatgcagaccctaatccagatataaaaaaatgctggaaatcattcactatctctgatgcaayagcgttcatcaaaactgcaatggattaattaaaaccagaaattgcaaatacctgctggaagaacttatggattgaagtcatgaatgattttaaaggcttc

SEQ ID NO: 517256 - DNA, 201 bp, Homo sapiens
gcggatcacgaggtcaggagatcgagaccatcccggctaacacggtgaaaccccgtctctactaaaaatacaaaaaaaaaaattagccgggcgtggtggcrggcgcctgtagtcccagctacttgggaggctgagtcaggagaatggcgtgaacccgggaggcggagcttgcagtgagccgagatcgcgccactgcactcc

SEQ ID NO: 517257 - DNA, 201 bp, Homo sapiens
cagaattatcaatagatatttcagacttggtttcaaccataaaatcattctttactttttttaatgaacaccttcctttatgctcaacatataaattagawataagcagaattatgctgacagaagcttcgctggaaaggcagactcccaggcaggattgcttagagcacattcagtcattcatttagctgatgattatta

SEQ ID NO: 517258 - DNA, 201 bp, Homo sapiens
tgaaaatgaaaatgttgaggttgtatttttaccttcaaatacaacctccttgtttcagccctttgaccaggacatcatttggtttatcagtgccacacgcrcctgcctgatatttgattgcatttgatcagcaattaatgcagaccctaatccagatataaaaaaatgctggaaatcattcactatctctgatgcaacagc

SEQ ID NO: 517259 - DNA, 201 bp, Homo sapiens
ctctactaaaaatacaaaaaaaaaaattagccgggcgtggtggcaggcgcctgtagtcccagctacttgggaggctgagtcaggagaatggcgtgaacccrggaggcggagcttgcagtgagccgagatcgcgccactgcactccagcctgggggacagagcgagactccgtctcaaaaaaaaaaaaaaaaaaaaaagtgg

SEQ ID NO: 517260 - DNA, 201 bp, Homo sapiens
atgcagatggagatgcagatggagatggagatgcagatgcagatgcagatggagacggagatggagagcagatagagatggaaatggagatggagatggaygtgcagatggagatggatacagggacagggatggagatgaagatggagatggagatgagaaggcacccagccatcctgaatcttctatgaaaatgaaaat

SEQ ID NO: 517261 - DNA, 201 bp, Homo sapiens
cgagaccatcccggctaaaaacggtgaaaccccgtctctactaaaaatacaaaaaaaattagccgggcgtagtggcgggcgcctgtagtcccagctacttrggaggctgaggcaggagaatggcgtgaacccgggaggcggagcttgcagtgagccgagatcccgccactgcactccagcctgggcgacagagcgagactc

SEQ ID NO: 517262 - DNA, 201 bp, Homo sapiens
ggcaggagaatggcgtgaacccggaaggcggagcttgcagtgagcggagatcgcgccacagcactcccgcctgggcgacagaacgagactccttctcaaaaaaaaaaaaaaaaaaaaaaaaaaattatcctctgtttgggtatcagatagtaagaattccaggctataaatgtactgaaaacttacacagtttagcaaatg

SEQ ID NO: 517263 - DNA, 201 bp, Homo sapiens
tcagaaaaagctgatttaaatcctagctctacctccagttagcaataggaatttaggcaaatcacttaatttttctttgtatcagttttatctgaaaaaartgtggataataatatctatgtcttttttttttttttctcgagacaagagtctcactctgtcatgcgggctggagtgcaatggcacgatctcggctcactg

SEQ ID NO: 517264 - DNA, 201 bp, Homo sapiens
gtgtgtccaggatgcaaatccaaggggtcagattccaaacagtcttaaccattccactctcctgctcctcaaggtaacttttatactttctcctggactcygtgaaaactcggatagatgaatgggtgaagtaggaagtcgtgcagcagtttcacacccagcaggtcacccttcacagagcgtttgccatggagaaccatc

SEQ ID NO: 517265 - DNA, 201 bp, Homo sapiens
tagctctacctccagttagcaataggaatttaggcaaatcacttaatttttctttgtatcagttttatctgaaaaaaatgtggataataatatctatgtcttttttttttttttctcgagacaagagtctcactctgtcatgcgggctggagtgcaatggcacgatctcggctcactgcaacctctacctccagggttcaa

SEQ ID NO: 517266 - DNA, 201 bp, Homo sapiens
cgtggtgcgtctaggaatggaaaatgttacaaataagcagggcactttatagttccttcactatgttccactgtctaaacaaagaatcagtgctatctgtrtattattattattattgatcattaatgtctactcctcatttggaagcaggagctatatcatttgccttctggcattcctagaacctacccaactactgag

SEQ ID NO: 517267 - DNA, 201 bp, Homo sapiens
atttaggcaaatcacttaatttttctttgtatcagttttatctgaaaaaaatgtggataataatatctatgtcttttttttttttttctcgagacaagagyctcactctgtcatgcgggctggagtgcaatggcacgatctcggctcactgcaacctctacctccagggttcaagcgattctcccacctcagcctcccgag

SEQ ID NO: 517268 - DNA, 201 bp, Homo sapiens
tttatttcatttaagctttttttcctctgtgcttcattatgttctgcagaatccatgctggaaggtttaatttatttaagtgataaaagcttcttaaacttaacagggaacatggccaactgagctttccatttcaaaagtaggacatttgatcataaaagtgatatcaaaattgaataatttgaatgtgtactgaacttt

SEQ ID NO: 517269 - DNA, 201 bp, Homo sapiens
ttatttcatttaagctttttttcctctgtgcttcattatgttctgcagaatccatgctggaaggtttaatttatttaagtgataaaagcttcttaaacttaacagggaacatggccaactgagctttccatttcaaaagtaggacatttgatcataaaagtgatatcaaaattgaataatttgaatgtgtactgaactttg

SEQ ID NO: 517270 - DNA, 201 bp, Homo sapiens
gaaaaactacaaaacatagacatatattaaagaaaacctaaataaatggaaagatctcatgtttacatattagaaaacaatattgctaacatggcaatacyacccaagttaatctatagttttgatacaattttcatcaaaatttcaacagcccatttttcagaaattgataaactgactctaaattttagatgaaaatgc

SEQ ID NO: 517271 - DNA, 201 bp, Homo sapiens
ccatgttctgggaacttcacaagaagtactttcctagatataattctctggtctgatttaatcttttgctttcttgacatcatgtttctttctctctctcwctcactcactcgctctctctctctctctctctctttctatggcaaatagattggcaactgtattgaagggttcaggcttggtggaaaggtcagattccta

SEQ ID NO: 517272 - DNA, 201 bp, Homo sapiens
ggcttttggcatatttaaatgccaaaggccacagttgacaactaagacataacaatcataaataatctgtacaccaaataacacagcagtaaatgttatakagcataaaccacaagagatgcaaggagacatagataaaacgcatgaatgataagatatgttaacccaccactctcagtaccagggcaaatcaaaaggatt

SEQ ID NO: 517273 - DNA, 201 bp, Homo sapiens
ggacatttgatcataaaagtgatatcaaaattgaataatttgaatgtgtactgaactttgaaatccaataaaggcaagaaaaaaaaggttagaatcatttrtttaatgtcatggattcagtgttacataatttgaggaaaagagagaggtgttttctctcaaatggctcatcactttctagatctgtgaatcgactaggaa

SEQ ID NO: 517274 - DNA, 201 bp, Homo sapiens
gacctacaggttaaatagacagatattatagcaatgaacctctgatggatttagcaaggttgggatattctctagtgacaagtagcttgagacaaatggtwaatagcaatgggaacgttttgatcaagagctacataaatccggatgataaacacatgacagaggagcatgaaccagcagaactaacagacctatgcaaag

SEQ ID NO: 517275 - DNA, 201 bp, Homo sapiens
ccaaatctctagtatgaaggttaaaagtcaaaatggtcaaaaataaccatagctacagtaagtaacttacagtaagtaagtcacaagaaggaaaaaaaagracctacaaaataaccaagcaacaatgacaaaagggcaagaataagtctttacctatcaatacccttaaacgtaaatggattaaattatccaatcaaaaga

SEQ ID NO: 517276 - DNA, 201 bp, Homo sapiens
tcaaggacagaagatcttcatcacgaccatcagggacatcttcaatttcattcattcatatgaaaaattaagattgagcacaaaactcttaagaattgttyagatactggggatacaagaaacggacagaggcctacctctcatggagcttacattctgaaggaaaagaaaaaccaagtacacgtgggttcggatcgtggt

SEQ ID NO: 517277 - DNA, 201 bp, Homo sapiens
atcagtatatcaaagagatgtttgcactcctatgttttttgcagcactgtttacaatagctaagaattggaagcaccctaagcgttcatcagtagatgaakgcataaagaaaacgtggtatgtatgcacacctgagaactattcatccatgataaagaatgagatcctgtcatttgcaaaaccatggttggaattggagat

SEQ ID NO: 517278 - DNA, 201 bp, Homo sapiens
tgtcatattctacttatctttagttgtgttacttttgggtggaagaacctcaaattccatatatttctgtaattagaggtagtctcctattatctttgggyagtgtgagaagagtttttgccattttctaaagcacagtttcctttggcccagttgaaactccagggagttgtgaccctgaaggaaagataatctctgaag

SEQ ID NO: 517279 - DNA, 201 bp, Homo sapiens
ggtccaaatgactctttgagcaaactcaaccaaagttttaagtaaaagaaaactaactgtagccaagctgctctcaaacatagaaaacactatgctacgtwtttttttttttttttttttttgagacggaatctcgctctgtcgcccaggctggagtgcagtggcggaatctcggctcactgcaagctccgcctcccgggt

SEQ ID NO: 517280 - DNA, 201 bp, Homo sapiens
cttatatcttaggcttattgcagaaattaaatgaaagggcatgagttgagcctagtttagcctggcacatagcaagggcagaggaaatactagctcttatyatcactacggaacatctgtcttcctacagagtttattgttgcttaaactctctacaaaagcaattttcttttttcactttccactctgtctgcagtcttc

SEQ ID NO: 517281 - DNA, 201 bp, Homo sapiens
atcctcaagatactggaaatactaatgaggagattgacacaattataccttaggaagattattgtggtggcagcgaaacattgaaatggaggttgaagctsatgatagatttattaactcctgacctcaagtgatttgcccacctcggcctcccaaagtgctaggattacaggcatgagccaccatgctgggcctacagtg

SEQ ID NO: 517282 - DNA, 201 bp, Homo sapiens
acttcattaaaaaggagggtggagtatactgtggttttataatcattttttataaatgatcagcactgttaatttcctaggaattttccactggaagagasaaaaatcttattgatctctctcttctcacatttacatatattttacatgtatacaaagcatattacatgtatgtgtttctttggaggtcctttgcccctt

SEQ ID NO: 517283 - DNA, 201 bp, Homo sapiens
ttggaaatcaattacatcttgaaactctcctgttttctttttctaagaaaacatttagagttgaagcctacgatatcgttcatattataactaagtcttasaacttttgcaactgtgaagtgtgagaaataatggctgtcttttctacctcattcaattaacgaatctgacatcctgactcaaccctaactctaacctatg

SEQ ID NO: 517284 - DNA, 201 bp, Homo sapiens
atgaaaaactgtgttttagaaatgagtgacttgccaaagtcacctgcatagtaagtggcttagccagggtttctttttttctttttttttcttttttttcttttttttttttgagatggagtctcgctttgtctcccaggctggagtgcagtggagatcttggctcactgcaagctctgcctcccgggttcacaccattct

SEQ ID NO: 517285 - DNA, 201 bp, Homo sapiens
tgagatggagtctcgctttgtctcccaggctggagtgcagtggagatcttggctcactgcaagctctgcctcccgggttcacaccattctcctgcctcagsctcccgagtagctgggactacaggcgcccgccactacgcccggctaattttttgtatttttagtagagacggggttttaccgtgttagccaggatgggct

SEQ ID NO: 517286 - DNA, 201 bp, Homo sapiens
ttttattagaataaaatcttttaaaacatttagaaatgatgtctgccagtcttcaatgattgatgtccaaagtcattatgttaaaaattatcataaatacwagcttgaagacattttcagagaagcaaataataattcttatctattaaaaaaataagtgatttagctcgtagattttttttacacacataaagaatgagc

SEQ ID NO: 517287 - DNA, 201 bp, Homo sapiens
tgggaacttcacaagaagtactttcctagatataattctctggtctgatttaatcttttgctttcttgacatcatgtttctttctctctctctctcactcrctcgctctctctctctctctctctctttctatggcaaatagattggcaactgtattgaagggttcaggcttggtggaaaggtcagattcctaatctcatc

SEQ ID NO: 517288 - DNA, 201 bp, Homo sapiens
agatggagacggagatgcagatagagatgcagatgcagatggagatgcagatggagatggagatgcagatgcagatgcagatggagacggagatggagagmagatagagatggaaatggagatggagatggacgtgcagatggagatggatacagggacagggatggagatgaagatggagatggagatgagaaggcaccc

SEQ ID NO: 517289 - DNA, 201 bp, Homo sapiens
agctagaggcattattctctctgatttcaaattatattacaaagcttcaataatcagaatagtatggtactggcattaaaacaaacatgtagaccaatggmacaggacagagaatccaaaaataaacccacacctgtaaagtcaactaatcttcagcaaagatgccaagagtacacaatggggaaagaacagtatcttcaa

SEQ ID NO: 517290 - DNA, 201 bp, Homo sapiens
gaacttcacaagaagtactttcctagatataattctctggtctgatttaatcttttgctttcttgacatcatgtttctttctctctctctctcactcactcgctctctctctctctctctctctttctatggcaaatagattggcaactgtattgaagggttcaggcttggtggaaaggtcagattcctaatctcatcttt

SEQ ID NO: 517291 - DNA, 201 bp, Homo sapiens
aacttcacaagaagtactttcctagatataattctctggtctgatttaatcttttgctttcttgacatcatgtttctttctctctctctctcactcactcgctctctctctctctctctctctttctatggcaaatagattggcaactgtattgaagggttcaggcttggtggaaaggtcagattcctaatctcatctttg

SEQ ID NO: 517292 - DNA, 201 bp, Homo sapiens
gaacaggacagagaatccaaaaataaacccacacctgtaaagtcaactaatcttcagcaaagatgccaagagtacacaatggggaaagaacagtatcttcwataaattgttttgggaaaactagttatctgcatacaaaagaataaaattgggacttcatctcacatcatatccaaaaatccactcaaaatggattaaata

SEQ ID NO: 517293 - DNA, 201 bp, Homo sapiens
tcaagctaccaagagctctacggggaaataatcctaattactccatggattagctagcatccttctgtagaagatctgaatttaaataacttgtgcataamacctgtattagccaattcatattctaattgaaacacagtggcataaatggccagacagacagacaaagaataggcacttattttcagcaatatccataat

SEQ ID NO: 517294 - DNA, 201 bp, Homo sapiens
aacaagactattttccactgaatttattttatttgtaaaaaatagcatttgtaggatattgaaaattataattggctactttaaaaaatactaatcacagrccaggtgcagtggcttacacctgtaatccctgcactttgggaggctgaggcaggaggatcacttgaggtcaggagttcaagaccagcctggccaatatgg

SEQ ID NO: 517295 - DNA, 201 bp, Homo sapiens
ttcaataaattgttttgggaaaactagttatctgcatacaaaagaataaaattgggacttcatctcacatcatatccaaaaatccactcaaaatggattamatacttgaacataagaattgaaatcataaaagtcctagaagaaaacatggagggaaatttccttaaaattggtcttggcaatgatttttttgatatgaca

SEQ ID NO: 517296 - DNA, 201 bp, Homo sapiens
actgctagtttaaaattatctcatagcttcccactgttctaaaatctgttttgtttatacagccttgcacagtcgggtccaggcttaccactctagctccrttctcttctgctcactctccatccaattttcaattctttgaatatgtcattctccctcgaacacagggattatgcacttgctgttctttgtaaatggaat

SEQ ID NO: 517297 - DNA, 201 bp, Homo sapiens
tggcttcctatcacattcagagcagaaatgaaagtccttactgacagaggaggagcattgctatcttagacaagcccctcattctaaagttcaccttaataaaaaaaaaaagctgtctaaatccaaagggcatcagcctgatggctaaggtcagcatgaccataaaccacaaataacatctccagacagaaacattccaaa

SEQ ID NO: 517298 - DNA, 201 bp, Homo sapiens
gaatggccaagaagcatatgagaaggtactcaacatcattagtcattaggaaatgcaagtcaaaaccacaatgagatgtcacctcacacatgataggatgmctattatcaaaaagtcaaaagatagcaattgttcacaatgatatgaagaaaagggaccacttatacactgttggtgggaatgtaaattagtacagccatt

SEQ ID NO: 517299 - DNA, 201 bp, Homo sapiens
cattgcagcattatttacaatagccaagatatggaatcaacctagtgaccatcaacagatgaatgaataaagaaaatgtctatatatttttaagtattatwaagccttgaaaaaaagaaaatcctgctgccatttgcaataacatggatgaacctggaggacattatgttaagtgaaacaagccaggcacagaaagacaat

SEQ ID NO: 517300 - DNA, 201 bp, Homo sapiens
catattgcaatgcgccagagtttagtgcttagacctcttctctattcacattcaatatcaaggagggttcaaccagtctcatgactttaaatatcagctcygtatcaacaattccagaatgtatgtgtccagccaggacctctcccctgaactccagatttgtctatgggactgcctacgagacatatgtacttacgtgtc

SEQ ID NO: 517301 - DNA, 201 bp, Homo sapiens
ctgccgacaagtccaactggctcctttaatgctgctgccttagcagctgtatctgcaaaggagtctcccttagccacattagagtctcctttttgacgtcytctgcaatggattacagctacttccttgggcagcaaaacagcatctaatagatttagaatttctaagtgatgttttacaggagaacccttagcagctcag

SEQ ID NO: 517302 - DNA, 201 bp, Homo sapiens
ttagcagctcagagtccctgttccttctagatagcagcaagagcatgaagtaccagaaaggcatacttagaatcagtgtaaatgttaactcttaaatcttytcttaattgcagggctctaataagagctattaattctgccttttgagctgaggtagaagctggtaaggcctgagattcaattacctcatgttaactgaca

SEQ ID NO: 517303 - DNA, 201 bp, Homo sapiens
cagtggggaagagcatcaagtgggctcttggggtcccagattgcaggctttggttattggatgacatttctgaacctatcctgacccagagggaatcctabtgtcctgaaggatgagttctgggcctagcagcattcaccacaagctgaatgaagaaaccttgggccttaagaaaacattggaggtaccctggtagtactt

SEQ ID NO: 517304 - DNA, 201 bp, Homo sapiens
tccacgttcttctgccatggcttcagccggtccctccgtttggggtccctgacttcccgcaacagaccttgtatcacccttcaggccaggcagacaaccasagagaaaagaaaatgtgtaaccacagaaatgagagagagacaaagacagtgacaagacagaaatagagaggttgagtgagtgagattacacattctttgc

SEQ ID NO: 517305 - DNA, 201 bp, Homo sapiens
ctaataaatgtccatgaaatcttcacaatccacgttcttctgccatggcttcagccggtccctccgtttggggtccctgacttcccgcaacagaccttgtmtcacccttcaggccaggcagacaaccagagagaaaagaaaatgtgtaaccacagaaatgagagagagacaaagacagtgacaagacagaaatagagaggt

SEQ ID NO: 517306 - DNA, 201 bp, Homo sapiens
gaatgcttcatatatgctaaagtaacatacaataagcatttcaaaatgtttcagcagaaaatattgcaagtggatggtatagaaggaaaataaggggagayagaaaaataaatgatgcaaggaagacaagaaggataggcttgcatcagctctagagaattaaagaaattagtgctaagatatttgataagctagaagtat

SEQ ID NO: 517307 - DNA, 201 bp, Homo sapiens
attctctactaaactctggaaaacttactctgagaacaataaaaaaatgggaaaaatgaacctttcaggttaaagcagggatgcagggtggggtaaacttwttcattcatttattccaatgtgtcaactgtgctaagtgctaggcttataatggggtacaaaaccctcacataacctccagtgtgatgccctgcctactca

SEQ ID NO: 517308 - DNA, 201 bp, Homo sapiens
tagcagcaacagattagcagcccccagagaagagtttacatcgtttctgaaattctctactaaactctggaaaacttactctgagaacaataaaaaaatgkgaaaaatgaacctttcaggttaaagcagggatgcagggtggggtaaactttttcattcatttattccaatgtgtcaactgtgctaagtgctaggcttata

SEQ ID NO: 517309 - DNA, 201 bp, Homo sapiens
actcctatgggggcaaatggtacagggaagctagaggcttaggaagaatgatgtggagggatagggaaaagaaggcaggtcatggagagaaaatagccagkatactaatgtatgtcagtagcagcaacagattagcagcccccagagaagagtttacatcgtttctgaaattctctactaaactctggaaaacttactctg

SEQ ID NO: 517310 - DNA, 201 bp, Homo sapiens
atctacgtggcccatcatgaaagtactgattactcttattatcatgtgtcacctaaggacactgtgagaggactaataatttttgctgtcccagagtattracagtcaaatagtctactgagtgtgattacatttaaatatagcatcatcaaaccaagcggggagagagagagaggtcagcgaaggcgtaccagagagcca

SEQ ID NO: 517311 - DNA, 201 bp, Homo sapiens
aaattactatgtttttcgtatcatggggaaataaaaagtctatgatatagtaagaatagcaataaactagagtatgaactcatgataaactttatttcctkctcctctcccaaaaaagtttagaaaagcatagcaaaattaacaaaagtagataattctgcccccaacatcagaattcactttgtgtaataagcaatacta

SEQ ID NO: 517312 - DNA, 201 bp, Homo sapiens
gtcataataatgaaaacagctattgattatatcaaaattatgatctaaatatagagaagatttagaaaattggaaaatgcatatatatgcacatatatattatgtgtgtgtgtgtgtgtatgtgtgtgtgtttatgtgtgtgtgtgtagtggtagttaagagacataggacaggaaagagaattatataattttattttca

SEQ ID NO: 517313 - DNA, 201 bp, Homo sapiens
tggaacccacatacaggaaaagtgggctcttggtatacacaagtttcaaataacacaaatactgtatttttcatctgcatttgggcaaaaaaaaattggcrtgtaagtggaccctcgtggttcaaacctgtgttattcaagggccaaccacactacaagagtcaactaccaaacaggttgccttgttgaagggaaatttgt

SEQ ID NO: 517314 - DNA, 201 bp, Homo sapiens
tcataataatgaaaacagctattgattatatcaaaattatgatctaaatatagagaagatttagaaaattggaaaatgcatatatatgcacatatatattatgtgtgtgtgtgtgtgtatgtgtgtgtgtttatgtgtgtgtgtgtagtggtagttaagagacataggacaggaaagagaattatataattttattttcat

SEQ ID NO: 517315 - DNA, 201 bp, Homo sapiens
acagaaaggctctgatcaaacatcagaagccactgaaatctccctgtgagtaaatggacacacttttttcaaatgcagatttctttctttctttctttcttttttttttttttgagatagagtctcactctgtcacccaggctggagtgcagtggcatgatctcactgcaacctccgcctcccgggttcaagcaattcttc

SEQ ID NO: 517316 - DNA, 201 bp, Homo sapiens
ctcttatgtgggaacacagtgagaagctggatatttgcaagccaggaaaagaaccctcaccagggaaccaaactggccagtaatttgatcatacacttccyagcctccagaactgtgagaaataaattcctgctgcttaagacacccaatgtatcatattttgttatggcagtccaagctgactaagacagctgctttcat

SEQ ID NO: 517317 - DNA, 201 bp, Homo sapiens
atagagaggtcccatcttaatacaacattatcccaaataggaaagatatgggtgtgtaaagtaagatttaatatacaattgttgggtgttatttatctgtyatattcagaaatatgttgctattatgctttgcatggattgacgccaacaaatacttcatgagaataaagaactccaagttattacttcataaatcttata

SEQ ID NO: 517318 - DNA, 201 bp, Homo sapiens
gccaaggcaggcagatcacgaggtcaggagttcaagacctgcctgaccaacagggtgaaaccccgtctttactaaaaatccaaaaacaacattagccaggygtggtggcacatgcctgtaatcccagctactcaggaggctgaggcaggacaatcacttgaacccaggaggcagaggttggggtgagtggagatcacacca

SEQ ID NO: 517319 - DNA, 201 bp, Homo sapiens
aagcctgatatttattcacagaaaaagagaaggagcaatttctgtctgttgagatttccaaaagatactactgtctgcagctaacaaatcccttcctaacraggggtgggccattcaagagaaaaccaaagtccttgaagagcagcttaaaggataggtaaaatgacatctatgggcttttccatctattcccctgaccat

SEQ ID NO: 517320 - DNA, 201 bp, Homo sapiens
ttaatagcagaattgatcaagcatgagaaacaactagtgagcttaaagacaggctatttgaaaatagacagaagagaaaaaagaagaaaaaagaagaaaayatgactaaagttctggaaaatagcctcaaaacggcaaatctaagagttactggtcttaaagagaaggtagagagacagaggaatagaaaatttaaaggga

SEQ ID NO: 517321 - DNA, 201 bp, Homo sapiens
ataagccaaacctagcctaaatcagcagaaccacccaattgaactgcagactcatgagttgaataaattatggtggatattatctataaagctttagagtkatttgacatgcaggaaaaaagataactgataaaaatgtaagaaaagtgcatatgttacatgcttatgagcacagaatttcatatttctaggacagaacac

SEQ ID NO: 517322 - DNA, 201 bp, Homo sapiens
aatcacattcctgggcacttatcccagagaactaagaactaatgtccatattaaaaacctatacacaaatgttcacagcagctttgtgttttttgtgtggtttttttttttattttcagttccagggtacatgtgcaggatgtgcaggtttgttacatgggtaaatgtgtgccatggtggtttgctgcaatatcaacccat

SEQ ID NO: 517323 - DNA, 201 bp, Homo sapiens
ctttagtagcttagaaacctcaattgccttttcagaccaggtaggaaaagccttgatccaaccccaactggtaaaggtgtcaatgaacactaataaatatktaaatattttacatgggggcatctgggtatagtctgtttgccaatcttcaccagggtatgctcccctgtgctgaacaggccttactagaggaggaggtga

SEQ ID NO: 517324 - DNA, 201 bp, Homo sapiens
aaaagacagtctcttcaataaattgtgctgggaaaactggatatccatatccaaaagaatgaaactagacccctatctttcaccatatctaaaaattaaawcaaaatggattaaagacttaaatctatgtccttaacttatgaatgtactgaaagaaaacattgtggaaattctccagaaccttggactgggcagatttct

SEQ ID NO: 517325 - DNA, 201 bp, Homo sapiens
ttccttctgaaactattccaatcaatagaaaaagagggaatcctccctaactaattttatgaggccagcatcattctgataccaaagccgggcagagacayaacaaaaaaagagaattttagaccaatatccttgatgaacattgatgcaaaaatcctcaataaaatactggcaaaccgaatccagcagcacatcaaaaag

SEQ ID NO: 517326 - DNA, 201 bp, Homo sapiens
atggaagagatgaggagaaatggaaatttagatctagcaagtataattggctattcatgaaggagagaaggaatagaaccaactctgaaccaaatacagtwtcggaaacccaactgaatatacgtgaaaatttccactgtaggtagattcagaaggtagatggtaagaagcagtgagagaacattttgttggagcttccag

SEQ ID NO: 517327 - DNA, 201 bp, Homo sapiens
cttttatccaaaacacaggcaataacaaacactggtgagggtgtggagagaagggaacccttgtatactgttggtcggaatgtaaattagtacagcactayggagaacagtttggaggctcctcaaaaaactaaaaatagaactaccatatgatctagcacccccactgctgggtatatacccaaaagaaaagaaatcagt

SEQ ID NO: 517328 - DNA, 201 bp, Homo sapiens
ttctgaaactattccaatcaatagaaaaagagggaatcctccctaactaattttatgaggccagcatcattctgataccaaagccgggcagagacataacmaaaaaagagaattttagaccaatatccttgatgaacattgatgcaaaaatcctcaataaaatactggcaaaccgaatccagcagcacatcaaaaagctta

SEQ ID NO: 517329 - DNA, 201 bp, Homo sapiens
ttggtgacagagcgagactccatctcaaaaaaaaaaaaaaaaagttacaaatagttaatatgacctagtatttgatggcacaacagggtgactatagtcartagtaatttaattgtacattttaaaatatctaaaagtatgattggattgcttataatataaaggataaatgcttgaggagatagataccccacttaccct

SEQ ID NO: 517330 - DNA, 201 bp, Homo sapiens; identical to SEQ ID NO: 263572

SEQ ID NO: 517331 - DNA, 201 bp, Homo sapiens
ggccagggcaattaggcaggagaaggaaataaaggatattcaattaggaaaagaggaagtcaaattgtctctgtttgcagatgacatgattgtatatctasaaaaccccattgtctcagcccaaaatctccttaagctgataagcaacttcagcaaagtctcaggatacaaaatcaaagtacaatcttaaggttagtttag

SEQ ID NO: 517332 - DNA, 201 bp, Homo sapiens
ttggtaagatattaaatctatctctggtcttctttcatcaaaattagtcagctgtttttgacaagctgaagcacacctgaggattgaatagtcccactgtytgaaatccagactaaagtagcagttttctaaattaggcatattttttctgaagagcctttaagaaaatgagagaatgcttagataatttgaaatcctgtg

SEQ ID NO: 517333 - DNA, 201 bp, Homo sapiens
catccagtcacagtctgagtgcagagcacatggtctttgttcctttagggggtattctacttccaagaacttggtacccaggtatacctgttaaatcctaracacttctcattgctgaatgggcttatattcagtaatcctttcattctctcaaacaggcatatattcaacctagagtggctataatgaagactagcttta

SEQ ID NO: 517334 - DNA, 201 bp, Homo sapiens
aggcaggagaatcacttgaacctgggaggcggaggttgcaatgagccaagatcacgccactgcacttcaacctgggtgacagaatgagactcactctctcaaaaaaaaaaaaaaaggattatggtccattgtaatgtgctacaaagctacagatcagaatcagcatggaagcttttcaaatacatgtctgttgagcttcta

SEQ ID NO: 517335 - DNA, 201 bp, Homo sapiens
tctgccataggttctatggcactacttcctcttggtttttagccaaccctccaactgacgccctctcaaaatcactttccagggctatccttctccatgcttctatttcatgttaggattctcatgattgccctcagtcctcttctggttgatctactgcatatctaggtttcaaccatcttccatatatgaatcattctc

SEQ ID NO: 517336 - DNA, 201 bp, Homo sapiens
gaaatgatacaaacaaatggaaaaacattctacactcacggataggaaaaatcaatattgttaaaataactataatgtccaatggtatttatagattcaaygctatttccatcaaacttccaatgatatttttcacagaattagaaaaaactattctaaaatttatatggaaccaaaaaaagaggctaaatagccaaaata

SEQ ID NO: 517337 - DNA, 201 bp, Homo sapiens
tactcaggtcatggttacactaaaaacccagactttaccactaagccatatactcatataacaaaactgcactcgaaccccttaaatttatacaaattataaaaaaattaaaaacaaagaaaaagtaaaacaaggcctaagtagttaggataagaaaatttgcatgtatcctaagtttaaatcaatgccaaaaggcattaa

SEQ ID NO: 517338 - DNA, 201 bp, Homo sapiens
aagaaaatttgcatgtatcctaagtttaaatcaatgccaaaaggcattaaggaagaaaataatacacacatttaagtcttaacattaatacaaacccttgytttctaattcaaaaggagtattttcctttaaatgaaaatgatgtgatagagcacatcatttattaatcatatcaaatattaatggctgagaattcataag

SEQ ID NO: 517339 - DNA, 201 bp, Homo sapiens
tggttaaataaatacatacataaagtaagcaaatgagtcaactttcctctgcttctctctcatcccttttctgaatatgtttaaacttattggaaactacrgaattgtgttcttattattgaaaaaaaaaccccagcaggtccttctgctcaattcagtttagcttctgactctcacacatgggatcttaatctccagtag

SEQ ID NO: 517340 - DNA, 201 bp, Homo sapiens
tgctgatttgaggacctttgaggatacagatttcctaccaacctttatatatggagcactggttaccctcaagtccataccaaggtcagacaatccactargcagattcacagaattctgcatatcatcatattcatggttatgactattgcagcataagatacaaagaaaatttagcaaagggaaaaggggcatgggcaa

SEQ ID NO: 517341 - DNA, 201 bp, Homo sapiens
caatctggagaaaaatatgttcttgctatcttgaaagtgaagaaaatattcagaaataatttaaaatctcaggcatgcttattgtagccagcagtattcaygtaacatatattttaagtttcaaggaaatgaaattcgcttgactgccttatggacaaatataacacttatttttaaatggttcattctcttttactcata

SEQ ID NO: 517342 - DNA, 201 bp, Homo sapiens
ttgctggtattgataattatacattgcccagaagttataaaaatcagcactgaatgttgttgctgctgctgctgctgcacatccatccccagtaatgttayactccagctgtaagttttgattttaacatattttcaaagtcatttcttcacatttaacttaaaatataaaacttggttgttatagactgaatgtttatgt

SEQ ID NO: 517343 - DNA, 201 bp, Homo sapiens
caaggaataagagaaatggacacactcaaaatatgtcagtagactgttaagtcattacagtctttcaggtttgacactatatatccaataaaaaaaatgcrtaacctttgtgccaaaaatcttctagaaatttgctcccaaataggtaattgtccatgtaccaaaatacttatgaaaatcatttttatcatattattttta

SEQ ID NO: 517344 - DNA, 201 bp, Homo sapiens
gtttcagtctgcaaacttgtaggaccatctgaggaagaaatagaaatcctgtttgttgaccaaaaaaatccagtagcatatttctagtaagatcaataaastaccagcaacaaaactcacagaataattgtcaacaattaggaagcaaatcccagggaaaatagtaaagcactctataggaaatgctcttgattatgtaac

SEQ ID NO: 517345 - DNA, 201 bp, Homo sapiens
tgtacctctatgttctgtttttccattttacaattcggattgatcatgcctggggacttttttctaagtttacatagcaatccttcttaaatcactgtagrgcagcaagaaaaccttgctggtattgataattatacattgcccagaagttataaaaatcagcactgaatgttgttgctgctgctgctgctgcacatccat

SEQ ID NO: 517346 - DNA, 201 bp, Homo sapiens
cagtggtatttttgtgttccctctttgtttcttgttatctctctttccacccaccacttcccacaacaaattgagggggaggggtggtaattgaaacttcygttaaatcagtcccatggaaatggagcatggcaaaccaatactaaccacagaggaaaaaaaacttaaatgttttaatttggatgtgaaaatttctcattt

SEQ ID NO: 517347 - DNA, 201 bp, Homo sapiens
gtaacttacttatgccttcaagacttgcttgagtcggatcacatatatatcacttccatttgatgatagaatgctgctgtgcatgactcactttatgactrgataggtcagaaagcacccagttcatgatagacagtttaggttgcacagtgacttgattacccatagtcaaatgttcagtttccaccaaagcccagtaac

SEQ ID NO: 517348 - DNA, 201 bp, Homo sapiens
caacgactattgatattatttcctatatgccctaaagaaccacttaactttagaaagttaatcacaaacctgcattaatcaattactaatgtaacaaagayggaagaaatggagagaggaagaggaatgaagggaaagatgtgggaagattgtttacttgaaaaaattataagaaattaacataacagtaaaaacaaagaa

SEQ ID NO: 517349 - DNA, 201 bp, Homo sapiens
tgcttttagaaaattatttgttttcttcaagaagagctgttctcctctgagtataacaaattacaatttcacaacagaaagctattattttaaaaaaatgkagtcagtttttctgctattatttgatgccagtgcaggacaattttttaagacagatttttaagacagattttgttagacctgtgtaggaggaatacagtg

SEQ ID NO: 517350 - DNA, 201 bp, Homo sapiens
gaagaagaatatgccaacatacttgatgaagtggaagaacatattgaaggtcatcagaagtgctaacaaatgagaaactagaagaacttgttgagtcaccyacagaggaagaagaagtgaagcagaactagcaatgtggatactatggaaagttgctgaagtgtttcaaattgtacagacaataatggacagaattatgga

SEQ ID NO: 517351 - DNA, 201 bp, Homo sapiens
tgaagcagagtaagactgaagtggccatgatgggctatgtaagcaaagagacaaagcaaaagagaagaaagactaagtgaatttgtcagggctctccagaraaacaggactaacaggacatgatggacatgaaaatggaaatggagatggagatatggagatggagatatggaaatggaggtgcagatggagatggataca

SEQ ID NO: 517352 - DNA, 201 bp, Homo sapiens
ccccattttccaggtgtcaaaatttccttgcacccaactctgctgaaatttctatggtccttagtagcaattataaatctaggatacatgagctgcttttrtttgtgttttaattctgcttattctggtggcatgctcacatactgtgctgagagaagatgaaatttgctgctaattaccaaggtttgtgcttctaaacat

SEQ ID NO: 517353 - DNA, 201 bp, Homo sapiens
gctaccaagagctctacggggaaataatcctaattactccatggattagctagcatccttctgtagaagatctgaatttaaataacttgtgcataacaccygtattagccaattcatattctaattgaaacacagtggcataaatggccagacagacagacaaagaataggcacttattttcagcaatatccataatgtag

SEQ ID NO: 517354 - DNA, 201 bp, Homo sapiens
gaaatcagcttttaaaaacctagtatttggttttattctcagtattaaaaacctagaccctttttacttcatgtacattgtgtccatcttttgtccaatgrcaaatcagattgctgctgaacactataaaaattaaggacaaaatttaaaaaccagaaatcaggctacggttccagctacacatttattggtagaatgcac

SEQ ID NO: 517355 - DNA, 201 bp, Homo sapiens
ggacaatgaagggaaaggttaaagagtagagactacaggttggcattgaggtgtttttttatagtagggtagcactggaaggaatttctgtagaggcgatwccgtggagagccacatgaattcgggtcataggtcaggagaggagtgttataagcaatgggaaagcaagtacaaagactctgagacaggcctaagactgat

SEQ ID NO: 517356 - DNA, 201 bp, Homo sapiens
gagttcataagagttcaacttgtatgaattaaatggtgtgaaaaatatatatccttacttatcaatgtagtattaaaagaaatcagcttttaaaaacctartatttggttttattctcagtattaaaaacctagaccctttttacttcatgtacattgtgtccatcttttgtccaatggcaaatcagattgctgctgaaca

SEQ ID NO: 517357 - DNA, 201 bp, Homo sapiens
aatatataaatctctcataataatttctgattcctccagcactgataccataatcaataattaatagctgcttaattttcacaggtagtaccatatcaggmaactggatagaaaccacaaaacagtaataagctctgtttcataagcattgggcccttattctaaatagattttatacatgaatgattacatagtccattt

SEQ ID NO: 517358 - DNA, 201 bp, Homo sapiens
tgataccataatcaataattaatagctgcttaattttcacaggtagtaccatatcaggcaactggatagaaaccacaaaacagtaataagctctgtttcawaagcattgggcccttattctaaatagattttatacatgaatgattacatagtccatttccatttccttttgtagagtgcaatttaaagacagaaaaaaaa

SEQ ID NO: 517359 - DNA, 201 bp, Homo sapiens
tacatagtccatttccatttccttttgtagagtgcaatttaaagacagaaaaaaaattgcaaactacatttgttatctgaacctctaacccagataacaarttacattgctttttcctattcagaattcactgctccaactcaagctaccaagagctctacggggaaataatcctaattactccatggattagctagcatc

SEQ ID NO: 517360 - DNA, 201 bp, Homo sapiens
ggggaagattttaaaatgcacattttagattgaagggaacttaaaactacagtcttccctcggtatacgagggggactggttccaggatcccctcacacasccagatccttacataccgaagtcctgctgtctgccctgtggaacccacatacaggaaaagtgggctcttggtatacacaagtttcaaataacacaaatac

SEQ ID NO: 517361 - DNA, 201 bp, Homo sapiens
ccatctgcaaccaggagacccaagaaagccgatattgcaattcaagtccaaagacctaagaaccaggccaatggtgtaaattccagtccaaaagcaagacdagatgagatgttccagatcaagtagtaaggcagaaaaaaggagagaattcctccttcttccatctctttttctattcaggccctcaacagattggataat

SEQ ID NO: 517362 - DNA, 201 bp, Homo sapiens
tgggagactggagtctatttcacctctgcagtctcgaccgtaagagacggccacgcccggcggggggtggggggcagtttagagacctaccgccaggtgcrcattctctttctcagggatgttccatgctgagaaaaagaattcagtgatatttctcccatttgcttttgaaagaagagaactatggctctgttccgccgg

SEQ ID NO: 517363 - DNA, 201 bp, Homo sapiens
tctttaacagttttatgaagatagggaaggatttgtgtgcttgttcactgccagattccccaatacttataataaaggagtacctcaatatatatatatakagagagaggtgaatagatgcataaaatcaagtaagggatttgtttttttcatttaaaggatgacattcagagaagaataaatccttcttatgtcgttgct

SEQ ID NO: 517364 - DNA, 201 bp, Homo sapiens
attcactatagtgttattaatgataaccctagatttttttaaaaccctatatgtccaatagctatggcaattgtaaaaatatgtgtaaaatattaatgtcyaaagaattaaaacagcttttgaggtaacatgcaaaaaattcctaacttataatgttaattaagaaataaatgaagaataatatgaatatggttacaacta

SEQ ID NO: 517365 - DNA, 201 bp, Homo sapiens
accaaacaccacatgttcttactcataagtcggagctgaataatgagagcatgtggacacagggaggggaataacacacactggggcctgatggggggctkccagggacggggagggagagcatcaagaagaacagttaacgcatgcagggcttaatacctaggtgatggattgattggtgcagcaaaccaccatgacaca

SEQ ID NO: 517366 - DNA, 201 bp, Homo sapiens
ccacaacataaaaatgcaagctgaaacacaagtactgatgtagaagctgcagcaagttatccagaagatctgctaaaataactgatgaaggtgactagacyagacaacagatttttaatgcagatgaaacagccttctattaaaagaagatgccatctgggactttcatagatagagagaagtcaaaaactggcttcaaaa

SEQ ID NO: 517367 - DNA, 201 bp, Homo sapiens
taatgagagcatgtggacacagggaggggaataacacacactggggcctgatggggggctgccagggacggggagggagagcatcaagaagaacagttaaygcatgcagggcttaatacctaggtgatggattgattggtgcagcaaaccaccatgacacaggtttacctctgtaacagacctgcctgtcctgcacgtgta

SEQ ID NO: 517368 - DNA, 201 bp, Homo sapiens
aatactgcaataaacatgggggtgcagatatctctaggaggtgataaattcatcacctttgggtatttacccagtagagggatattgagtcacacagtagkactattgttaattttttaataaacctccatattgttttccataatggctgctccaaactacactcccaccaacggtattccaggattctcttttctccac

SEQ ID NO: 517369 - DNA, 201 bp, Homo sapiens
accaattaataaaaacaaaaacaaaaattacaatcatagctattatttggcttcagagtacttgcaaagtagtaaagatcactctaattataacatattcrtaaggattcagagatttcaatatatcccaaagcacagtatgtttagggatagtgtatttactcactattctcaatgcaggcaagagccatccttctctat

SEQ ID NO: 517370 - DNA, 201 bp, Homo sapiens
ataagctggacttcattaaaatgtaaaattctgctctgcaaaagtcacagtcaaaagaatgagaagacaagccacaaactgagagaaaatatttgcaaaakacatctaataaagtactatcatctaaaaactaaaaagaactcttaaaacaacaattaaaaaaatgcacaaaagatctgaacacacatcttaccaaagaag

SEQ ID NO: 517371 - DNA, 201 bp, Homo sapiens
tctttttgataatagtcttcctaacaggtgtgaggtgatatctcataatgactttaatttgcactcccctgatgattagtgatttgagcaccttttcatayacctgatggttatttttatgttttatttggagaaatttctgctcaggtttcttgctcactttttaatagggttatttattttctgctattgagttgtaag

SEQ ID NO: 517372 - DNA, 201 bp, Homo sapiens
ctgtaaatttagagaaaagatttctgagcacatttaggccaccataattaacctatggaaatccagaggtaagcactgggttttttagttgtatttccctwactactgctgaagttaagcttgtttacatgttcatcgaccatttatatttctgcatttgagaactgtctgtatctcttgtctatgtttctattatgttat

SEQ ID NO: 517373 - DNA, 201 bp, Homo sapiens
cattgccaaggccaatatcaaggtgttttttcctgtatgttctcatcaacgtgttttatggtttcaggtctcacaggcattttatccattttgagttgacttttttttttgtatgggtggaaaataaggtcctaattttatccttttgcatgtggaaatccagttttctcagcaccatatattgaaaaactattaatttcc

SEQ ID NO: 517374 - DNA, 201 bp, Homo sapiens
aagttactgccaagatacaataaggatacaggcattgggtaaatgctcccactccaaaaagggagaaatgggtcaaaacaaaggagttccaggactttgtyttgaagtctgaagttcagtagggcagccattaaaccttaaagctcaaaaataatctcctttgatcccatgtctaacatccaaggcatactgatgaaaagt

SEQ ID NO: 517375 - DNA, 201 bp, Homo sapiens
ataatgatgtattcaagtaggttcatcaattgtaacagatgtaccactctggtgtgggatttccatagtgggagaatctatgcatgtttgggagcaaagggtacagtacatgggaaatctctgcacctcctcaattttgctacaaacctaaaagcggtcttaaaaattaaagtctatttttaaaaaggctcacactcttta

SEQ ID NO: 517376 - DNA, 201 bp, Homo sapiens
aaatatttcatgattccactcatatgaagtgtctataatagttacattcatagaagcagagaatataatagtggctgtcagggcttggaagatgggggaarggatagtttttgttcaatgggtatacagtttcagttatgctagatgaattaagttttagatatctgctgtacacatagagcctatacttcacaacacagt

SEQ ID NO: 517377 - DNA, 201 bp, Homo sapiens
cacagtcttttcacaaaccatgaaaccacagaccacgtgccaaatctgatctgccacctgcttaaagttgtattggaacatagccacactcatctgtttaygtattgtttatggctgttttagcactacaaaagcagaggtgagtagtttgcaacagagaccatatggctcacaaagcctaagatagtcactatctgccca

SEQ ID NO: 517378 - DNA, 201 bp, Homo sapiens
attcacatctcattttttctttttgtaataaaaataaggagatttttaattttgagcagtataagttataaattttctttgataatgcacacgtttataattttttttttttttgagacaaagtctcactctgtcgcccaggctggagtacagtggcgtgatctcagctcactgcaacctcagcctcctgggttcaagcaa

SEQ ID NO: 517379 - DNA, 201 bp, Homo sapiens
tgagtcaacttaataaagcagaacttaaaaatatacatatatatcttttctatgtatatacctttatatatatatatatatatatatatatatatatatayacacacacacacacacatatcagggtgtgaagggattatatatttaatattttatatatttaatatattatatatttaatatttaatatataattaaata

SEQ ID NO: 517380 - DNA, 201 bp, Homo sapiens
tagacagatattatagcaatgaacctctgatggatttagcaaggttgggatattctctagtgacaagtagcttgagacaaatggtaaatagcaatgggaamgttttgatcaagagctacataaatccggatgataaacacatgacagaggagcatgaaccagcagaactaacagacctatgcaaagaagcagagagactca

SEQ ID NO: 517381 - DNA, 201 bp, Homo sapiens
cttgactcaacctacataatgacacagtgcttgatcatttttacagtgctaatccatatatttaagggattggagagagatacctgccggagatgggcttsaggaatgatgtagtatcagggatggcctggatctaatgagtacagagaaaatgatcgagcagaggttgtatataacagcagaggacttccaaaaaacaga

SEQ ID NO: 517382 - DNA, 201 bp, Homo sapiens
agccaggacctctcccctgaactccagatttgtctatgggactgcctacgagacatatgtacttacgtgtctatgcagcgtctcaaacttaacatgacttrtcaaaacttagctcttaattctagcacatctctctcctctgttttccccaaattatttcccatccttaagagatatataaaccaaaaaaactcttggagt

SEQ ID NO: 517383 - DNA, 201 bp, Homo sapiens
attcaaagtactaaagaaaaaaacccttttaccctagaatagttatctggcaaagatatccttcaaacatacaggaaagataaagactttcctagacaagrgaagctgagggttttcataaataccatatctgtcctacaagaaatgctaaaggtagttcttcaatctgaaagaataggacattaatgagcaataagaaat

SEQ ID NO: 517384 - DNA, 201 bp, Homo sapiens
ggagtcagcacatgatcctgcagaagtcatgcggtgataacctcatttcttgcttaatagagttaacatgtttttcagatttatctatactttggtgaggygctgaaaaagatcttcaataatagcctagcagggaagactggatgctcattcagttaggtagattcttaattagttgcaggaccttaccaaaagattatg

SEQ ID NO: 517385 - DNA, 201 bp, Homo sapiens
tctgagatcagggtgccagcatggtcaggctctggtgagggccctcttcctagcttgcagacagccagcttctcactgtgtcttcatatggtggaagagartcctgttgtctctccctcttcttatgaggagaccagctccactggatcagggctccactctcatttaacccatttaatcttaattaccttcttaaaggcc

SEQ ID NO: 517386 - DNA, 201 bp, Homo sapiens
tccaatatgactgatgtcctttataaaaagagacagataggaacagtgggaagatgacatgaagacacatagtggggaaatagccaggtggctggagtgawccctctaccagcccaggaactcaaaagattgccaacaaacaacagaagctaaaagagacaaggaaggattcttctctagagctgtcagagagactatggc

SEQ ID NO: 517387 - DNA, 201 bp, Homo sapiens
ggatagacatagtgttggctcgatgtggtaactgagagcagccttcacatttgggaaaatggaaccgtttcaaagtcagtggagtgtgacaagtggtaggmacacaggaaggtcaggtaaaatgcaggtcccctgtgcaatatttgggacatactaaaaacatcagacattataaatctgaattggacatatgtattcttt

SEQ ID NO: 517388 - DNA, 201 bp, Homo sapiens
taggaacacaggaaggtcaggtaaaatgcaggtcccctgtgcaatatttgggacatactaaaaacatcagacattataaatctgaattggacatatgtatyctttaacaaatattctttgtttattcgaattttaattttacctgggagtcctgtatttttgtttgctaaatttggcaaccctattggtatataatagaca

SEQ ID NO: 517389 - DNA, 201 bp, Homo sapiens
aatgatgtattcaagtaggttcatcaattgtaacagatgtaccactctggtgtgggatttccatagtgggagaatctatgcatgtttgggagcaaagggtacagtacatgggaaatctctgcacctcctcaattttgctacaaacctaaaagcggtcttaaaaattaaagtctatttttaaaaaggctcacactctttaca

SEQ ID NO: 517390 - DNA, 201 bp, Homo sapiens
atgatgtattcaagtaggttcatcaattgtaacagatgtaccactctggtgtgggatttccatagtgggagaatctatgcatgtttgggagcaaagggtacagtacatgggaaatctctgcacctcctcaattttgctacaaacctaaaagcggtcttaaaaattaaagtctatttttaaaaaggctcacactctttacaa

SEQ ID NO: 517391 - DNA, 201 bp, Homo sapiens
tctatcttatatttactatgttagcatataaatatgtatctttataatatagttttttgttctgttttttactttaaaagatgtatattgtaatgtatttmttttgatatttaaaacttttgtattaaaacttacctacatataacccttaatcttttttccttactaatgatatctgtaagatcaagttgattttccttc

SEQ ID NO: 517392 - DNA, 201 bp, Homo sapiens
tgatgtattcaagtaggttcatcaattgtaacagatgtaccactctggtgtgggatttccatagtgggagaatctatgcatgtttgggagcaaagggtacagtacatgggaaatctctgcacctcctcaattttgctacaaacctaaaagcggtcttaaaaattaaagtctatttttaaaaaggctcacactctttacaaa

SEQ ID NO: 517393 - DNA, 201 bp, Homo sapiens
ttctcctctgacctcattattacttccttttatatctgtggatttcaggaaactgctgcagatatttgagcagaaaatgatctaaaaggtcatttggcaatttttttttttttttttttttttgccaagcgtatatcctacactgtccccaaacatgcaacattttttattttatcacttatatatactgttactgccctt

SEQ ID NO: 517394 - DNA, 201 bp, Homo sapiens
tcttctaataggtgagttaagcataactggtaggttagggctaagctctatcttatatttactatgttagcatataaatatgtatctttataatatagttktttgttctgttttttactttaaaagatgtatattgtaatgtatttcttttgatatttaaaacttttgtattaaaacttacctacatataacccttaatct

SEQ ID NO: 517395 - DNA, 201 bp, Homo sapiens
taatgttgggagatgaagacaaatagaatgtatttaggtcatgagggatctgccctcatgcatggattaatgctgctataaaaagggcttgcagaagcggwgtgctgtcttctgctacatgaagacacatttgtcttgtttgctcttctgccttccaccatgtgaggacagcccccacaggacaccacatgccagtgcctt

SEQ ID NO: 517396 - DNA, 201 bp, Homo sapiens
aaatttccttatttatttcatttgcctggtatacctttacccatctctttatgtttggcttttattattgttgagattttgtgtgtgtgtgtgtgcgtgcrtgcatgtgtgtgtgtgtgtgtgtgtgtgtgtgtgtgtgtgtcagcattttcaaggattttcctttgtaagccaatctaaaaatatttttcttctaatagg

SEQ ID NO: 517397 - DNA, 201 bp, Homo sapiens
caacagtgtacaagagttcccttttctccacatccttaccaacatctgctattttttgtctttttaatggccattctgattgttgtgagatggtatctcaytgtagttttaatttgcatttctctgatgattagtgatgtcaagtattttttcatatactgttggccatttgtatgtattcttttgaaaaatatctattca

SEQ ID NO: 517398 - DNA, 201 bp, Homo sapiens
actcttactgtacaacttgccttcttaagtaaggtaaggcctagggacgtgtggagttagtcatgccccctagctatgctggagagttggttcttatctgyacttctgcctggtatatctcaggctaggctccacacctagtacatgattaaaattgcttaccaaccagggttttcaccaaaagtaaaagtcactaaaagt

SEQ ID NO: 517399 - DNA, 201 bp, Homo sapiens
acctctggttttctgtgttaattcacctaggataatggcctccagctgcatccatgttactgcaaaggacacgatttcattgttttttttatggctgtatrgtttcccatggtgtatatgtatcacattttctttaatccaccattgatgggcacttaggttgatcccatgtctttgctattgtgaacagcactgcaatga

SEQ ID NO: 517400 - DNA, 201 bp, Homo sapiens
ccaggcccaactgcagtggcactatctcggctcactgcgagctccacctcctgggttcatgccattctcctgcctcagactcctgagtagctgggactacaaggcgcctgccaccacgcccggctaattttttgtatttttagtagagacggggtttcaccgtgttaaccaggatggtctcgatttcctgacctcgtgatc

SEQ ID NO: 517401 - DNA, 201 bp, Homo sapiens
cgtactgggctacacttccagagagttaagccattctaagccacaggataagataagaggttggcacaagatacaggtcataaagacctttctgataaaawagcttgcagtaaagaaactggctaaatcctaccaaaaccatgatggccacaagagtgacctctgatcatcctcactactacactcccatcagtgccatga

SEQ ID NO: 517402 - DNA, 201 bp, Homo sapiens
ataacacatccatggtctgggtgaatttaaagtcctctttctctttctataacagcattccttctggataccgaaataataaacagaaatttattctaggyccagttgtaatggttggaggtgtacctgactgtagaatcctggtctaattcagcatgctctccagtatggttctcacaactccacctggctcttttggaa

SEQ ID NO: 517403 - DNA, 201 bp, Homo sapiens
cctgggttcatgccattctcctgcctcagactcctgagtagctgggactacaaggcgcctgccaccacgcccggctaattttttgtatttttagtagagayggggtttcaccgtgttaaccaggatggtctcgatttcctgacctcgtgatccgcccgcctcggccttccaaagtgctgagattacaggtgtcagccaccg

SEQ ID NO: 517404 - DNA, 201 bp, Homo sapiens
tactattatctctatttcacaaaggttaataacacatccatggtctgggtgaatttaaagtcctctttctctttctataacagcattccttctggataccraaataataaacagaaatttattctaggtccagttgtaatggttggaggtgtacctgactgtagaatcctggtctaattcagcatgctctccagtatggtt

SEQ ID NO: 517405 - DNA, 201 bp, Homo sapiens
ggatggtctcgatttcctgacctcgtgatccgcccgcctcggccttccaaagtgctgagattacaggtgtcagccaccgcgcccggccagaaagagctatyttaagctcagagctaccatttctttccccacagtagaaacagccccctgctaatcagagcactggacctacagaacagaggctgcaaactaaaatttcaa

SEQ ID NO: 517406 - DNA, 201 bp, Homo sapiens
taaatacctttctgtaaacaaagtagttcgttttcatcctatctgagattgtagccaggaaaattgccaataacaataattttcaatgaaaaaattaaaayacttacagccaaccatcatcatagccaccgaaaacatcttctccacatctgtggtaggagctatgtttccaaatcctatggttgtaaggcttgtcatggt

SEQ ID NO: 517407 - DNA, 201 bp, Homo sapiens
gatctttttagtccccatgacaagtgatgttcccatccttaaaagaatgagccagtcaggagcttgagaccagcctggccaacatggcaaaacgctatctmtactaaaaatacaaaaattagccgggtgtggtggcaggcacctgtagtcctagctacccgggaggctgaagcaggataatcatttgaacctgggaggtgg

SEQ ID NO: 517408 - DNA, 201 bp, Homo sapiens
aagaaataaaaaagaacaccaaaaatttaatcctttaaaaaaccatacagtgcaaatactattatctctatttcacaaaggttaataacacatccatggtstgggtgaatttaaagtcctctttctctttctataacagcattccttctggataccgaaataataaacagaaatttattctaggtccagttgtaatggttg

SEQ ID NO: 517409 - DNA, 201 bp, Homo sapiens
agcaactagaattctagaaagtcagaaatgaaagtgggtaaggcagatcaaagattgtccaagcaccgagaaacctgaatccttcatttttaatatatttmatttaaaaaggaaaattttaattgtcattaaaataataaaataagtaaaaggatctcagaataaaatgacagactcttaattccataatcttatatctag

SEQ ID NO: 517410 - DNA, 201 bp, Homo sapiens
gtgatgttcccatccttaaaagaatgagccagtcaggagcttgagaccagcctggccaacatggcaaaacgctatctctactaaaaatacaaaaattagcygggtgtggtggcaggcacctgtagtcctagctacccgggaggctgaagcaggataatcatttgaacctgggaggtggaggttgcagtgaaccaagttcac

SEQ ID NO: 517411 - DNA, 201 bp, Homo sapiens
ccaagttcacaccactgcactccagcctgggcgacaaagcgagactccatctcaaaaaaaaaaaaaaaaaaaaaaaaaaaaagaatgagtcacttcatacsaagtgggagtgaggtgctttggaaaatcatctggctatattgtaacagttgaacatgcatatattcaaagacccaagaatttcacttgcagatatatatg

SEQ ID NO: 517412 - DNA, 201 bp, Homo sapiens
attaaaataataaaataagtaaaaggatctcagaataaaatgacagactcttaattccataatcttatatctagactaacacaggaaacctcaaagcacamctgcaagctggcactgaaaagccactgttactgtcaaagctgaaatttcagctcatgagagtttcataaaaattgcttgaaggcattacaattaaattag

SEQ ID NO: 517413 - DNA, 201 bp, Homo sapiens
ctatctctactaaaaatacaaaaattagccgggtgtggtggcaggcacctgtagtcctagctacccgggaggctgaagcaggataatcatttgaacctggraggtggaggttgcagtgaaccaagttcacaccactgcactccagcctgggcgacaaagcgagactccatctcaaaaaaaaaaaaaaaaaaaaaaaaaaaa

SEQ ID NO: 517414 - DNA, 201 bp, Homo sapiens
ccaggtacttagaagtgggggaaatggggagatttgatcaaagggtatgaactttcagtgataagatgaataagttctgaagacctaatgtatagcatggmgactatagtcaataatagtgtatacttgaaatttgctaagaaagtagatcttaagtattcttaccacacacataaacataaaaggtaactgtgaggtggt

SEQ ID NO: 517415 - DNA, 201 bp, Homo sapiens
gggtgtggtggcaggcacctgtagtcctagctacccgggaggctgaagcaggataatcatttgaacctgggaggtggaggttgcagtgaaccaagttcacmccactgcactccagcctgggcgacaaagcgagactccatctcaaaaaaaaaaaaaaaaaaaaaaaaaaaaagaatgagtcacttcataccaagtgggagt

SEQ ID NO: 517416 - DNA, 201 bp, Homo sapiens
ctagaagaaaacatggagggaaatttccttaaaattggtcttggcaatgatttttttgatatgacaccaaaagtacaagcaacaaaagtaaaaacaaacaygtgggaccacatcaaacaaaatagtttctgcacagcaaaagaaacaattatcaaaatgaaaaggcgacctacagaatgggaggaaatatttgcaaaccac

SEQ ID NO: 517417 - DNA, 201 bp, Homo sapiens
tagtcctagctacccgggaggctgaagcaggataatcatttgaacctgggaggtggaggttgcagtgaaccaagttcacaccactgcactccagcctgggmgacaaagcgagactccatctcaaaaaaaaaaaaaaaaaaaaaaaaaaaaagaatgagtcacttcataccaagtgggagtgaggtgctttggaaaatcatc

SEQ ID NO: 517418 - DNA, 201 bp, Homo sapiens
tttgagtattctgagaatagtaacaataattttgtacttaaaagcttaaaacatgcttgcaatgttatttgactagatctcataacaactgtgtaacatakgtaggactatataattatgtctagaaccagagctctttttctggcttattatcctatgatataataatgcaaatgatatacattctgggttccaccttat

SEQ ID NO: 517419 - DNA, 201 bp, Homo sapiens
acaacttcccaaccatttcactggctgttctgaaagacttgaatgagtcacgactgacctggctcttggggttcaccagcctagttatgacctgatttcasaatggacaaagaaggacagatctttttatctaacagccttgtggagcaagatttgatgaataaaatacatcttaagttgacctcttttgacaggaacaga

SEQ ID NO: 517420 - DNA, 201 bp, Homo sapiens
aaggtagattaaaaaaaacaattgcaaataagatggattaaatacctttctgtaaacaaagtagttcgttttcatcctatctgagattgtagccaggaaarttgccaataacaataattttcaatgaaaaaattaaaatacttacagccaaccatcatcatagccaccgaaaacatcttctccacatctgtggtaggagct

SEQ ID NO: 517421 - DNA, 201 bp, Homo sapiens
cgttcattgtaaaatgaaatcatacacaatatctacgtggcccatcatgaaagtactgattactcttattatcatgtgtcacctaaggacactgtgagagractaataatttttgctgtcccagagtattgacagtcaaatagtctactgagtgtgattacatttaaatatagcatcatcaaaccaagcggggagagagag

SEQ ID NO: 517422 - DNA, 201 bp, Homo sapiens
aaaaaaaatgcgtaacctttgtgccaaaaatcttctagaaatttgctcccaaataggtaattgtccatgtaccaaaatacttatgaaaatcatttttatcrtattatttttaatattaatattggaagtaatttaaatgttcttcaatatagaattgcttaaataaagaatgttacagccatacaaagtagcactatacaa

SEQ ID NO: 517423 - DNA, 201 bp, Homo sapiens
cgtgatctgcctgcctcagcctcccaaagtgctgggattacaggcgtgagccaccacgcccagccagccagggtttcaatccaagtgtggctgatgttcaygttcttaaccacaaccataccccaaataattggttaattggaggaacactaccaaaaggaagacacaattaaagagaaggacaataaatttctcaggcat

SEQ ID NO: 517424 - DNA, 201 bp, Homo sapiens
agcaatggtttgtttaattagtagggaccccttctaaattcaattagtatagccacctagaataattatagtacttgggagaaactacaaaataagaacamtataaaacccaagcttagatggcttttactctatactagaagaagcattgtttcttaatgattaataatcattagctaaaatcacagagtttatcaaaaa

SEQ ID NO: 517425 - DNA, 201 bp, Homo sapiens
gcaggtcccctgtgcaatatttgggacatactaaaaacatcagacattataaatctgaattggacatatgtattctttaacaaatattctttgtttattcraattttaattttacctgggagtcctgtatttttgtttgctaaatttggcaaccctattggtatataatagacaaggaaattcctattttgtaatgtctac

SEQ ID NO: 517426 - DNA, 201 bp, Homo sapiens
aacaaatattctttgtttattcgaattttaattttacctgggagtcctgtatttttgtttgctaaatttggcaaccctattggtatataatagacaaggamattcctattttgtaatgtctacatgtcctgccatgcagagactataatgaaagatttggtattactgacatctgagaatttgtgggcaccttaggcaaga

SEQ ID NO: 517427 - DNA, 201 bp, Homo sapiens
tccatgctggaaggtttaatttatttaagtgataaaagcttcttaaacttaacagggaacatggccaactgagctttccatttcaaaagtaggacatttgmtcataaaagtgatatcaaaattgaataatttgaatgtgtactgaactttgaaatccaataaaggcaagaaaaaaaaggttagaatcatttgtttaatgtc

SEQ ID NO: 517428 - DNA, 201 bp, Homo sapiens
acaaactgaggagtatgtttaatttgattctgtgtgtctggtccaatgtgggaggggttgagaaggacaaagaagaaaaaagataagaaaacagaagaaaraaatattagcctcttgatattataaaaacacaaattaatgtgtttttattttaccataaaacaattcacttttgaacattcaaaactgtggcatgtaatc

SEQ ID NO: 517429 - DNA, 201 bp, Homo sapiens
ccacaacataccaaaacttaagggaagcaataaaaatcgtttttagagggaagtttatagcaacaagtgcctacatgagaaaagaagaccctaaataatcaactaatattatagctcagtgaactagaaaaagaagaacaaactaagcccaaagttagtagaaggaaagaaataataaagatttgagcagaaataaatgaa

SEQ ID NO: 517430 - DNA, 201 bp, Homo sapiens
tttaaaaggtcagtgaaactacaagttggttttttgaaaagataagcaaaattgacaaacctttagctatactaaggaaagagagagaagactcaaaaaartcagaaatcaaagaggagacaatacaactgataccacagaaatacaaaggatcataactattatgaacaattaaaatccaacaaactgtctaatcttgaa

SEQ ID NO: 517431 - DNA, 201 bp, Homo sapiens
caaatatgcagttgaattctctattgcatttttcactgtgttcattgtattcttaagctccagaattcctgtttggttcttttttgtgactttatttattraacttcttattttgttcacgtattacttttctgatgtctctgagttctgtgtgtgtgtatctatatatatattatatattatatataattatatatgaca

SEQ ID NO: 517432 - DNA, 201 bp, Homo sapiens
actggaagaattaatattgttaaaacgtccatactacccaaagcaatccacagattcaatgtaattccaaccaaaaccccaaagacatgtttcacagaaayagaaaaaaaaaatcctaaagttcatctggaaccacaaaagaccccaatagccaaagtaattttgaacgaaaagaacaaagccagagtcattatactacca

SEQ ID NO: 517433 - DNA, 201 bp, Homo sapiens
ggctttccaaaggcagggctttgatgaaatttagagcttctactgtgctttgctcttaatctcgtgtctttactgtcttacaggcagatatttgactaaawaacagtgcttttacatacctgtgaaagtattttctaaaattagaaatatacttttaagtgtatttactgcccagaaaaatacaaacaatattgttttcta

SEQ ID NO: 517434 - DNA, 201 bp, Homo sapiens
tgttgtttcttacacattatttatgcatgcattactgccatggaaaattctaggaatatattctatataataatatatattctaggaatatattctatatrataatatattctaggaatatataatattcctatatattctaggaatatatatatatattctatatatattctaggaatatattatatatattatatatat

SEQ ID NO: 517435 - DNA, 201 bp, Homo sapiens
ggaagaattaatattgttaaaacgtccatactacccaaagcaatccacagattcaatgtaattccaaccaaaaccccaaagacatgtttcacagaaacagaaaaaaaaaatcctaaagttcatctggaaccacaaaagaccccaatagccaaagtaattttgaacgaaaagaacaaagccagagtcattatactaccagat

SEQ ID NO: 517436 - DNA, 201 bp, Homo sapiens
acaaacagcaattgttaccattttttaacttgttaggcagcaaatgtcttgggccactggctttccaaaggcagggctttgatgaaatttagagcttctamtgtgctttgctcttaatctcgtgtctttactgtcttacaggcagatatttgactaaataacagtgcttttacatacctgtgaaagtattttctaaaatta

SEQ ID NO: 517437 - DNA, 201 bp, Homo sapiens
tgcatgcattactgccatggaaaattctaggaatatattctatataataatatatattctaggaatatattctatataataatatattctaggaatatatwatattcctatatattctaggaatatatatatatattctatatatattctaggaatatattatatatattatatatatataatggacatatatatacacat

SEQ ID NO: 517438 - DNA, 201 bp, Homo sapiens
atgcctaatgaaatattatacagcctttaaaaagaaaggagcattgtcatttgtgacaacatggatgaacctggaggacattattttaagcgaaataagtyagacatagaaaaacaccatatgatcttacttacatgtgcaatgtaaaaaaagtcaaactcatagaaacagagaaaaatggtggctaccaaaggctgaagg

SEQ ID NO: 517439 - DNA, 201 bp, Homo sapiens
tgactagacttcatatataaaaatgagacctaaagtttttgcttcagaatcatcgtgaaccaattctaccaggtttttcacaatattagttttgcagtaamaacaaacagcaattgttaccattttttaacttgttaggcagcaaatgtcttgggccactggctttccaaaggcagggctttgatgaaatttagagcttct

SEQ ID NO: 517440 - DNA, 201 bp, Homo sapiens
accaaataatgaatcggtaaataagatacaggaaatccatacaaaagaatattctttatttatttattttatctatttattttttttgagacggagtctcrctcagtcacccaggctggagtgcagtggcacaatctcagctcactgaaagctccgccttccgggttcacgccattctcctgcctcagcctcccgagtagc

SEQ ID NO: 517441 - DNA, 201 bp, Homo sapiens
gaatatatgaaatagcttgacttagccattccacaatgtagacatatatcaaagcattatgtttcctagactatctttttaaaaacttcaagttggtttgaaaaaaaaaaaaaaactctgagttgttatgtctgattgactatgtgagcaaatactttagggtatactatacctggcaaatacttgaattgtccatattct

SEQ ID NO: 517442 - DNA, 201 bp, Homo sapiens
cactttagagataaagttcctgtgactagacttcatatataaaaatgagacctaaagtttttgcttcagaatcatcgtgaaccaattctaccaggtttttmacaatattagttttgcagtaacaacaaacagcaattgttaccattttttaacttgttaggcagcaaatgtcttgggccactggctttccaaaggcagggc

SEQ ID NO: 517443 - DNA, 201 bp, Homo sapiens
tcgtagagacagggtttcaccttgtttagccaggatggtctcgatctcctgatctcgtgatccgcccacctcagcctcccaaagtgctgggattacaggcrtgagccaccgtgcctggccaagaatattctttagatataaaaatataaagtactgattcatgccacaatatggatgaactttggaaacaggtcaagtgaa

SEQ ID NO: 517444 - DNA, 201 bp, Homo sapiens
ttgccaggtatatcctaaagtatttgctcacatagtcaattagacctcagacctaacaactcaaagagtgtttttcaaaccaacttaaagtttttaaaaakgtagtctaggaaatatgctctccattcatctttatacttgaagtttaagtccagtaattgagaccatcaaagagttaagaaattggactgtgctcaccag

SEQ ID NO: 517445 - DNA, 201 bp, Homo sapiens
gtgaagtattataggttaaacctcattggtttcactttagagataaagttcctgtgactagacttcatatataaaaatgagacctaaagtttttgcttcaraatcatcgtgaaccaattctaccaggtttttcacaatattagttttgcagtaacaacaaacagcaattgttaccattttttaacttgttaggcagcaaat

SEQ ID NO: 517446 - DNA, 201 bp, Homo sapiens
ccatagacacagaaaatagaacagtggttgtcaggggtgcaggggaggttgaaatagaaagtaactgcttatgggaatgggaattctttgggggatgatgaaaatgttctggaattagatagtggtgattgttgcataaccttgtggaaatactaaaaactactaaattgtacatttttaaataatgaattttataatatg

SEQ ID NO: 517447 - DNA, 201 bp, Homo sapiens
caacttaaagtttttaaaaaggtagtctaggaaatatgctctccattcatctttatacttgaagtttaagtccagtaattgagaccatcaaagagttaagwaattggactgtgctcaccagaccttacctcgaggccttaataattgcattttaactatatgcactctgagtttatggaggacaaacatgaaaactgcttt

SEQ ID NO: 517448 - DNA, 201 bp, Homo sapiens
aattaactttatgaattgtgaaacctctatcttcatgtggttaattcagcttttctttatttttttgtcattccattaagtaatttattttgttatatactttttttttttttgagatggagtctcactctgtcacccaggctggagtgcagtgggggtttgttgtacagattatttcatcagccaggtattaagcctaat

SEQ ID NO: 517449 - DNA, 201 bp, Homo sapiens
aatataaggaggcacttcctctttatagagcaatttattcagacaacaggaaaataactacacttaggttaatactactacatattaattcctaaaggagwtcatacacaaatcatgggatcaataatcctggctgataaaaaattctggacaaaggaaggttatattcagtcaataaaggcaatataagagcatgtggga

SEQ ID NO: 517450 - DNA, 201 bp, Homo sapiens
cttatttatttcatttgcctggtatacctttacccatctctttatgtttggcttttattattgttgagattttgtgtgtgtgtgtgtgcgtgcgtgcatgkgtgtgtgtgtgtgtgtgtgtgtgtgtgtgtgtgtcagcattttcaaggattttcctttgtaagccaatctaaaaatatttttcttctaataggtgagtta

SEQ ID NO: 517451 - DNA, 201 bp, Homo sapiens
gacccaaagcatatcattccatccctggcccctcccaaacctcatgtccttctcacatttcaaaacacaatcacaccttcccaacagtcccccaaagtctwaagtcattccagcattaacccaaaaacccaagtccaaagtctcatcttagacaaggcaagttccttctgcctatgagcctgtaaaatcaaaaacaagtta

SEQ ID NO: 517452 - DNA, 201 bp, Homo sapiens
atacagaagagtaaatgatcaggaatagacaaagcctggaattgtaccctaccagatccaaaatatattacaaagatataagaattaagaaaacacaacaytgattcagaaatagacaacttgatcaataaaatagaatacaaattagagaagtgggtcaatatttgtgaacattttgtatataagaaaaaaacatcagca

SEQ ID NO: 517453 - DNA, 201 bp, Homo sapiens
cagcattaacccaaaaacccaagtccaaagtctcatcttagacaaggcaagttccttctgcctatgagcctgtaaaatcaaaaacaagttactgccaagayacaataaggatacaggcattgggtaaatgctcccactccaaaaagggagaaatgggtcaaaacaaaggagttccaggactttgttttgaagtctgaagtt

SEQ ID NO: 517454 - DNA, 201 bp, Homo sapiens
gttcacatcattctcctgcctcagcctcccgagtagctgggaaaattcaacataatcttaatcaaaagccaagtagaatgtttccatggaacttgatgagrtaattctgaaattcatacagaagagtaaatgatcaggaatagacaaagcctggaattgtaccctaccagatccaaaatatattacaaagatataagaatt

SEQ ID NO: 517455 - DNA, 201 bp, Homo sapiens
gggaaaaaaacagtttgttaagcatcaatatgtagtaaataggaggctaccattcttgaacacatttcatcttcacaggactacagtgatctccattttayaggttaggaatctgaaatgcaatgaagtcaacgggtttgttagttgtcaggggagcagagatgagcacagacatgacagacggatacgtctgactttcaa

SEQ ID NO: 517456 - DNA, 201 bp, Homo sapiens
taataaagaacttagtggatcaaccaatagtcgatgttctcctgctgttagtcacatgagggcattgtgcaagatgaaggtcatcttctaccacaatgacrtcttcaaaatattaaagatactttcccaagcatcccaagggtctccttgactctccattatgaatctatccacaaagaccttatttaaatgattttcaaa

SEQ ID NO: 517457 - DNA, 201 bp, Homo sapiens
tcccttgtttatgatgcctgtcactctatcagagaagaaatgaaataagtctgccatgatttgtcttcacagtgccacactgactatttcctagtttatcrtgcatttttattctctcccacatgatggtctcattgacaacttcatgcaagtctggaaggaaagggcaactgccaaggttagtatataataagagtcctg

SEQ ID NO: 517458 - DNA, 201 bp, Homo sapiens
agtagattttaaatgatctcgccaaaaaataaataaataaataaggtgacagatatgttaaatggcttgatttattcattccataatgtatacacttctawcaaaacatgactttttaccccataaatctatacagtaaaaaaaattgaggccgggcgcggtggctcacgcctgtaatcccagcactttgggaggccgagg

SEQ ID NO: 517459 - DNA, 201 bp, Homo sapiens
aaaaaaactgcacggataaagagaaaggagaattgaactttgtcttagctctaccatggccctgtttgacccagaacaaggcccaagaataaaatgtattrctgcctcttctacagcacaggaatattatgagaactgatagatgtcaataagtgaaaaaggaagaacacagttaggttaaaaaaaatcaaatgaaaaatg

SEQ ID NO: 517460 - DNA, 201 bp, Homo sapiens
ttcataaaaattgcttgaaggcattacaattaaattagaattattcagctaaagaacataaagccacttctctcccaaaaaaatattagcttaatattgtmcataatatttttatagacaagtgaaatttttaaatctttttttactaacttttatttttaattaaagaatcttaataaagcagaaacattttaaaattca

SEQ ID NO: 517461 - DNA, 201 bp, Homo sapiens
gtcacgaattctaactctagccctccaatccatgacaacgtgaactaatacaacaaagcattatttattcaatgctaccatgtatatatcagaggctgtamactctcagtgaaggccacagtgatggggctgtcgcaaatgaccattctacaaatttagatgtgcttagggtaacaatgatgcatgatactctgttttgag

SEQ ID NO: 517462 - DNA, 201 bp, Homo sapiens
tcattttagggaagaaaaatgtaccaacaccaccatcttgggaagcaaaattcatctcatacttacttcagctagtcttgaatgtttatggaccacctctsttttattcattggcgtgagctgctgcaaaacacttcggctatttgtcaaagcccgtgtcaatcgggcaaatttcgtccaaccttaaaaataaggaaagaa

SEQ ID NO: 517463 - DNA, 201 bp, Homo sapiens
aaattctgcttcctatttaaagtcatacagtcagtcaataaatagttataaagcaattcttagacattgttaagaaggtagataaggaccatggcaggtatttttttttttcaaggaattggcaataagttaaagaaaaaaaaggagggggtgggtgttgctaagcagatattcccccgctttgaatggcctctagaaact

SEQ ID NO: 517464 - DNA, 201 bp, Homo sapiens
atttaaagtcatacagtcagtcaataaatagttataaagcaattcttagacattgttaagaaggtagataaggaccatggcaggtatttttttttttcaakgaattggcaataagttaaagaaaaaaaaggagggggtgggtgttgctaagcagatattcccccgctttgaatggcctctagaaacttgtgaatttaaatc

SEQ ID NO: 517465 - DNA, 201 bp, Homo sapiens
agtctttacctatcaatacccttaaacgtaaatggattaaattatccaatcaaaagacagggtggctgaatggatattaaaaaagaaacaagatctaactmtattctacctataagaactattttagatttaaggacacacatgggctgaaagttaaagaatggaagatattccatgcaaacagtagccaaaagagagcag

SEQ ID NO: 517466 - DNA, 201 bp, Homo sapiens
tgtttctgctttattcctcagtttgtccaagaattatcaggtattgaagtaagcagaactgatacttcttttgctctaggcagtaggtttttgtttggggygaggatggacagaggtgtgttgtttgtttgggtttagtattctctccaaggtaagcccttagtaaattgaactcaaatgcttttaagctcagatccacca

SEQ ID NO: 517467 - DNA, 201 bp, Homo sapiens
gacaaaagggcaagaataagtctttacctatcaatacccttaaacgtaaatggattaaattatccaatcaaaagacagggtggctgaatggatattaaaamagaaacaagatctaactatattctacctataagaactattttagatttaaggacacacatgggctgaaagttaaagaatggaagatattccatgcaaaca

SEQ ID NO: 517468 - DNA, 201 bp, Homo sapiens; identical to SEQ ID NO: 263717

SEQ ID NO: 517469 - DNA, 201 bp, Homo sapiens
agtaagtaagtcacaagaaggaaaaaaaaggacctacaaaataaccaagcaacaatgacaaaagggcaagaataagtctttacctatcaatacccttaaaygtaaatggattaaattatccaatcaaaagacagggtggctgaatggatattaaaaaagaaacaagatctaactatattctacctataagaactattttag

SEQ ID NO: 517470 - DNA, 201 bp, Homo sapiens; identical to SEQ ID NO: 263720

SEQ ID NO: 517471 - DNA, 201 bp, Homo sapiens
aaaatatcttttgaattttacttaggtagttttgtgtgagtttaggggtgtgatagtggctctatttgaagatttttctatataatgaacttaatccatgscttcacttctttttttagtaagttttattgtatatacttgagatttaacatgtaacattatggaacacataaagatagtaaaatcactatagtgaatcac

SEQ ID NO: 517472 - DNA, 201 bp, Homo sapiens; identical to SEQ ID NO: 263722

SEQ ID NO: 517473 - DNA, 201 bp, Homo sapiens
tattaaatacacattattcagtaactatgtattgtgccccaagccaattaaaacttgccacaacttagttccccaagaatgcccttccctctctacctagycaaccttatacaggttctcggagtccagcccaagagctccccatccacaattacaaagctgaaggacccaggttgagtaaaacatggagactcaaatgta

SEQ ID NO: 517474 - DNA, 201 bp, Homo sapiens
cagttatgctagatgaattaagttttagatatctgctgtacacatagagcctatacttcacaacacagtactgtgaacttcaaaatttgttaagagggtakatctcatattaagtgttcttaccatgaaaaaaggacagaagaaagctatgggagttttaggatgtgtctattaccttgattatggtaatggtattaagag

SEQ ID NO: 517475 - DNA, 201 bp, Homo sapiens
tatggtacacttaagaataatcaatgcttttgactcagtattttcacttctgagaatcaaaagattagaactactgcatgtaatattcactatagtgttaytaatgataaccctagatttttttaaaaccctatatgtccaatagctatggcaattgtaaaaatatgtgtaaaatattaatgtccaaagaattaaaacagc

SEQ ID NO: 517476 - DNA, 201 bp, Homo sapiens
gctagcattaaatgcattttcaacttccaatattttcaacttaacaatggcattgttagttgaggggcacataaataagtaatatcaccacagccacataygaggaatatacataacaagcagcctgcctctctttaaaacaaaacaattatagaaagctaagaattccaaatcgctcttcagcaactgagaaatgtaact

SEQ ID NO: 517477 - DNA, 201 bp, Homo sapiens
taaattgctatctgacatatggagtatgaagtgaattgcttttttttctttataggtatcctgatcagaatttaaagatttttcagaaacaaagaccttcrtgaggtcacaggtagccctttgttgagtcttttcagtcccagtaactatatacaacttaatacaataaataatctcaacggaatatttagacattgtcaa

SEQ ID NO: 517478 - DNA, 201 bp, Homo sapiens
agaattataaaaattgacaccagttataacaggaaacaggttgtgagggaagaaagccgcttggtgttactcagcaaattggcacccatggagacaggcayagcgtttctgggtcctgttgaaaaaccaacaacagttttctgtctctagcttgtcttcttatcagaagactgagtccacaccagtgtgcactcagctgtc

SEQ ID NO: 517479 - DNA, 201 bp, Homo sapiens
accatgaggagtatccttaaaggaaaaggaaaaatagattaatctgtatgttttcaaaattcttcctaaggtagattcacggttcagttttacaatcaacrtagcacatgttgtccatccagcaacagaattcacacaataaattgctatctgacatatggagtatgaagtgaattgcttttttttctttataggtatcct

SEQ ID NO: 517480 - DNA, 201 bp, Homo sapiens
tgcacatactataagatgtgctaatgaagttgcagattgttgtaaaaggttactatgaaaggagaatttaaacagaaattatgagagtgtatattctcttytgtactgtaattcaatagatgaaatttaactttgttttatcacccttggcaggaaaatcattcaacctctgagtctcagatagatgatttgtgagaaatt

SEQ ID NO: 517481 - DNA, 201 bp, Homo sapiens
aatcagggagtaaagtgtacatcacacagtctttttctaactactggactacacatctgagactgccctggactacacatctgagactgctaaaccatgawaaaaggtgcctataaccctgaacttggggctccataaaatgttttttctcatgcgaaactcagctcattaaagaaaagaaaaaagacaaagttttcttta

SEQ ID NO: 517482 - DNA, 201 bp, Homo sapiens
tgtatcttgatttaaaaaagggaggaactaataccagaatagttaagactttattagatgatatcatttaataatagaatatttagatatgaatagaaccrgtagtgaacgtgatgacaagggaagtcatacttcccaggagtgttaaaatatttctatacatcaaaaaatgccaaacaaaatgccatatttggttgactt

SEQ ID NO: 517483 - DNA, 201 bp, Homo sapiens
atcatacttttcagggagaatatggttcctgtcaacacgggcattattctaacatacacacatagctggatgtgcctttcctttcaaagacttggctatgstacagtatagtttgaggtttataaagcactttgaaaatatacaaattactgtatcttgatttaaaaaagggaggaactaataccagaatagttaagactt

SEQ ID NO: 517484 - DNA, 201 bp, Homo sapiens
ctctttgccttcacacatgcttttcctttttactggcatgtcccatcttccctttctctgtctagtcatcactgatttatctgtcaaagcacagattatcyttctttctaccatgaatacagtatagacacagctttctcatagaatttagtaatacatagaagaaaatgagagtaagaggtgttgtaatttgttgttgtt

SEQ ID NO: 517485 - DNA, 201 bp, Homo sapiens
ttacctttctgtaccttaattattcctcttggggtgatgtgacatctaaagttcttcttagctctaagacaattatgttaactaaaattattatgatatcmcttatcctgagaacatagtaagcatataataactaagatgatcagttttcactattgaccaggctcataaataatcatcgaagaataatagttgaaaata

SEQ ID NO: 517486 - DNA, 201 bp, Homo sapiens
aatgttactagacaagctttttacctttctgtaccttaattattcctcttggggtgatgtgacatctaaagttcttcttagctctaagacaattatgttarctaaaattattatgatatcccttatcctgagaacatagtaagcatataataactaagatgatcagttttcactattgaccaggctcataaataatcatcg

SEQ ID NO: 517487 - DNA, 201 bp, Homo sapiens
gatcttaatgctcaaaaaagattcttgaaatcccaccaatttttttaaaaaacataattaagaaacccacaactgaaaaccaaaacctactaatgttactrgacaagctttttacctttctgtaccttaattattcctcttggggtgatgtgacatctaaagttcttcttagctctaagacaattatgttaactaaaatta

SEQ ID NO: 517488 - DNA, 201 bp, Homo sapiens
agaatcaccactttttctctggaaacttctctctaatgactgaataaattagcagttcaaattacgcagcacagaaaggctctgatcaaacatcagaagcyactgaaatctccctgtgagtaaatggacacacttttttcaaatgcagatttctttctttctttctttcttttttttttttttgagatagagtctcactct

SEQ ID NO: 517489 - DNA, 201 bp, Homo sapiens
cagagataaaaagttataaccgcctaatgtgagcatgatgaggttagagttacagaatggaagagaatttggtaataaatttaaaagaagcaacataagawactaagaaaaaaaattgtgataatgactacactaggggaaatcaaatgttgtacaggaaaataatcacagtataacatatgactcagttgtaaatagcat

SEQ ID NO: 517490 - DNA, 201 bp, Homo sapiens
tggaaaatattaaagatgaaaacatttcagtttgaattagtgcatattcaaagttgagaaaattttcatttgaattctgtaacatataattatgtcacttycaacatgaaagtgaattagacacaaactaaatgctttaaatacaacatagcaaacaaaagcacataatcaatttatgaactagttgtataactttatagg

SEQ ID NO: 517491 - DNA, 201 bp, Homo sapiens
tatgaataattaaatagagaaaagacagtagtccacaataaatggaggtagaacaacaggatctccacataaaacaaaaagaatactgattcttacttcayattatatgtaaaaattttgaaaatagatcaaagacctgaaggtaaaactaaagctagaaatttctaaaagaaaacataggatagaatcctttccccattg

SEQ ID NO: 517492 - DNA, 201 bp, Homo sapiens
gtaagaaggattagtatgatgcaaatgcaaaagattctaggattactaatacagttactgaaataactaatgaaatgttctaagcgtcattttctttaccrtgtaaaagatcatttatctcaattcttcaggctatcataaacatgaaaatatgtttttcacaatgaacaaaacattgtaaactttatcaatgctagccta

SEQ ID NO: 517493 - DNA, 201 bp, Homo sapiens
gagattaagaccagcctggtgttagaaattgtcaatgttacgttgttgattaggttttattgccttcctttaagaaatgttggcctggtgctatggctcaygcctgtatcccagcactttgggaggccgaggcaggcaaatcatgaggtcaggagtttgagaacagcctggccaagatagtgaaaccccatctctactgaa

SEQ ID NO: 517494 - DNA, 201 bp, Homo sapiens
ctatgcagccacaaaaatgaatgcagtcatgtcctgtgcagcaatatggaggcagctagaagccattatcctaaattaacacagaaacagaaaatcaaatrctgcatggtctcacttacaagtaggagctaaacattgggtacacacagatgtaaagacaggaacaacagacactggggactctaaaagagagaagggagg

SEQ ID NO: 517495 - DNA, 201 bp, Homo sapiens
aaaagtaaatcatagagtagccatatgacccagcaattctactcctatatagccaagagaattgaaaacatatagtcacacaaaaacttgtacatgaatgytcacagcagcatcatttatgatagccaaaaagtagaaacaacccacatattcattaattgatgaattgacaaaaatgtagtgtatccatacaatgaaata

SEQ ID NO: 517496 - DNA, 201 bp, Homo sapiens
actgggttataaaatgtactcccaaaagggtctgtccttctcttgaggtaggatcagtgttagtatatttcctgatggcctcaactaaacgcccttgaaayaaagctggattcacatctttgccctgagaaactttcttaaccttctcatagttaacaggcttttgcatacattccttcatcccttccaaccaacaagtga

SEQ ID NO: 517497 - DNA, 201 bp, Homo sapiens
attcctactcttgcctgtaattccaggactttgggaggctgaggcgtgcagatcacaaggtcaggagatcaagaccattctagctaacacaatgaaacctmatctctactaaaaagaccaaaaaaaattagctgggcgtggtggcatgtgcctgtactcccagctacttgggaggttgaggcaggagaaccgcttgaatct

SEQ ID NO: 517498 - DNA, 201 bp, Homo sapiens
gaagtggccggcactgccaataacctaaatagtttggggtcctgagaatgatccctatggaatagccaggagcttctcataacttctgagaaatcatgtcwtaatatgtcttctggctgattctcaaaaaaattcatttttgcttctaaatctttgttcatacagttcccttgtggtgggtttaaaaacattaccacaaat

SEQ ID NO: 517499 - DNA, 201 bp, Homo sapiens
tctatgccaaccttggaacactcgtcacttctccatgtttctcagaaattttaaacccagcttggaaagaagcagaggaagaaagaaagtgagggaggttytacaagaaacacagccagagactgctgatgatgcacagtcactcagaggttcccagaaggaaaatgaagccttttttgtgacatgatttttcaaaatcta

SEQ ID NO: 517500 - DNA, 201 bp, Homo sapiens
ataatttgacagagacatccttataaacttgcaggggtaaatacatgttgaactctgagaagactgcctgacacctggtattcactcagaaaacattaccygcagtaggagaaacatgactttatgagcatgcagagctctagtcaacatgacaaaatgtaagagtcatcttttctgaagaatcagatgatccaaagttat

SEQ ID NO: 517501 - DNA, 201 bp, Homo sapiens
caaattatattctttgaaagaagatgaatctttctctttttatagtttataaaaattcatatagccaatctaagcatataaacaatatagtttatttctcrgggttaaacaatttgtagagtcaaagaaaaatcatgttaagctaattaactgtaacctggccttcactcttataaattgctcatgataagagatcaaata

SEQ ID NO: 517502 - DNA, 201 bp, Homo sapiens
ttacttttgcaccaatctaatatcttctttcaatcaattatgtagtttgtgaactgtagttgacttcaaatgccgccgcttttcttctcctccacttcttscatccacaaactccaattcccagtaattagtactttcaaccagatatcaaggagaagaaacagatgaaaactaatttaaggtaatcaaatataataactt

SEQ ID NO: 517503 - DNA, 201 bp, Homo sapiens
cactaccatgagaacagtatgggggaaactgctcccattattcaattatttccacctggctctgcccttgacatgtagggattattacaattcaaggtgasatttgggtggagagacagccaaaccatatcattatactatgttatataaatttatcaattgatataaattgagctaaaagtctaaaggaatacaagacta

SEQ ID NO: 517504 - DNA, 201 bp, Homo sapiens
gttagaggctcaacttaggggagttagagtctctcccaagacagagtgggttagaggcacctcttaataaaaggcaaggatgcctgactgacattgggttmgaggcccaacttaggagggttagagtcccttctaagatttagggggttagaggcccctcttggtaaagtccctctcagctaagaacaggtttggcactat

SEQ ID NO: 517505 - DNA, 201 bp, Homo sapiens
acctgctggggatccttccttccaagtttttaataggacccagtctcccagctgtgttgtaacaagattctcttccttaggaggggaagggagtctttgayttccatattcaagaagtgtgttttgcacttgtcccaagttgatcacataactctgtagcttgaaagtatctatgtctattaggaggtctgtagttaagaa

SEQ ID NO: 517506 - DNA, 201 bp, Homo sapiens
ccaggacttggtgcaatcaatgcagaatgaacaaatcaatcattgagtgagggggtaaatcctgaccctctatgcctggaaggcactttatctgatgtcaygtggtagctagtctatcctgcagcttccctgaggatttactcaagccttccacattcttcccaccaggaacttgcccagtcccagtgtgattcctctcct

SEQ ID NO: 517507 - DNA, 201 bp, Homo sapiens
gttcatggcattatgagaatatttgttctcctaaaagctcaggatgccagctccttcttaataaaatattagtttagctctattgggttgcaattaacctytttgtcatggactgcctaatcttaaaaataaaaagaagtcacagaggcagttaaatcaatctactagactgcaacacaagattctaatctataagtaaaa

SEQ ID NO: 517508 - DNA, 201 bp, Homo sapiens
ttcttttcttaagccactaaatgtgattagttatgtaactatgatcaatttaacgttaataacacagagtggttctcaattgggcagaggtcctggaggargagggtagtgagtcctttatgacacacatcacagcccaagagaatactctgaagaacaatttttaatatgtaatatagttttatattttaaaatggaaaa

SEQ ID NO: 517509 - DNA, 201 bp, Homo sapiens
aaaatgttccatcagtctgtgattgtatgtgcaggatacagcttgagaacatcagcctaccagccatgtggctgagtcaactaagtagttttcaggaccaytgaagccatcctagctgataccacatgaacttgaaataagtcataccctcatagccctgtgcaaattgtagattcatgaataaaataaataattattctt

SEQ ID NO: 517510 - DNA, 201 bp, Homo sapiens
agttttatagagaccccttacattattttaccttttaaatgaaggtatcatatagtcaatccatgtactttactgttaatagtaataattaggttaatttrtgacaatttcataagggtctttttatatgctctcctgcagacttacagacttcagataactgctaattgtgcaagctaatcatacttaaggtcttagtaa

SEQ ID NO: 517511 - DNA, 201 bp, Homo sapiens
tatcttgatataagcatataatgtataatgatcaaatcagggtaattggttatcatttctttgtgttaggaacattccagttccactcttccagttctcakgcaatttacaatcaattattattacccatagttgccctattgtgctactgaacctggatcttacttgtatttttgtacccattaaccaactgctctttat

SEQ ID NO: 517512 - DNA, 201 bp, Homo sapiens
tattactgccttctagtttaacaaattacgacacatttcatcttttagggtacattaaatgtacacacaaaatatattctgctcatataaaagtttaagayaaaatatgaagaacctgctaatgtattaaaagtctgcagcactaataagtgaagaattatcaacatcccattaagtttggcctattataaaaatatccat

SEQ ID NO: 517513 - DNA, 201 bp, Homo sapiens
aattatgaagtttattaaaagatatagaggtctttcctaaaaaaaaaaaaaaaaaaacctaaaggtaatcacagacttaacatctctattccaccattgtwgctattaagaaaaacaaacagaaataaggttaacaaattaatgatagcagaatcatctaacaaatatggaattttacattttcagaaaagagaaataaga

SEQ ID NO: 517514 - DNA, 201 bp, Homo sapiens
gttttccatgttgaaatgaagaggttactaggattctggttatagtatcctgagatcttgattctataaagaattatgaagtttattaaaagatatagagktctttcctaaaaaaaaaaaaaaaaaaacctaaaggtaatcacagacttaacatctctattccaccattgttgctattaagaaaaacaaacagaaataagg

SEQ ID NO: 517515 - DNA, 201 bp, Homo sapiens
gaagtacctttctttaactgcaaatgaacaaggaaacaaaatattatttaaggcagtccatggtaggtacccagaaatttttccctgccacatggcatgcrcactttgagacacactgcatgccagtgcatcagaccctaactccatcttgaatcagacagttaagcatgtcctcaaggggaggcttgaagacaatctact

SEQ ID NO: 517516 - DNA, 201 bp, Homo sapiens
gagtggagaggagaaagctacaaaaagcactggatgagaaatgaaaaataacaaacgcagtcaaataataataacaacagaaatcaaagaaattgaaacaytgtttcttaaaagtttagtttataaaattcaaatctgcataattctacttttaccttaaaaactgaaaaagtctcggaagcattatggtctcatttaaaa

SEQ ID NO: 517517 - DNA, 201 bp, Homo sapiens
cccccttatgccatgcacataacctgctttattgttcttcacaacacttacccctacctgacattggattgtgaatatgcttgttgtctgtataacctgaygctctctccaaaatgtaaactccttgagatccggctgttctctgtcaaattgaatataatattcccaggacttggtgcaatcaatgcagaatgaacaaat

SEQ ID NO: 517518 - DNA, 201 bp, Homo sapiens
actaaaagtggattttcagtactgaatataaattatataaatgaatacaaaatcaaaagcaatcagcctgagccaaaagacaggcatcttttagtcattaycattaaaaaaaaatcaagaaagagatgggagagtgagtggagaggagaaagctacaaaaagcactggatgagaaatgaaaaataacaaacgcagtcaaat

SEQ ID NO: 517519 - DNA, 201 bp, Homo sapiens
gttttccaccttcagaccagttatttgactgttagcacacaggtaatttgaattttattataaaataggtgaaaagtttcagcttctaacaatctttcacrtccaaattctattgtttttttctattactttccttgactctcatcttcacaacttaaatgcagtctctccttttttaaaatctgacatggcttcctgtat

SEQ ID NO: 517520 - DNA, 201 bp, Homo sapiens
aagtttccctgtgtgtgatctaagccacgtcatttaacctcttacagcccagtgtctgtatcagtaaatgggaataattatagtatacatgtgttggaaaragtaaacattaaacatgctaagattattggccttctgaattcacaaagattaaaagaaaattaatacctagtactgacaatgttattctgaaaaaagaca

SEQ ID NO: 517521 - DNA, 201 bp, Homo sapiens
aaaccaaataataactaccagattaaacaagtgaagtctctacggatgtactgacatttcaaattgtgttattagacaagagggatcttaattgaaacagktggatgtaacactgggagttgggctgggttgtttctcatttaacagtgactggttttccctaggcaggctgcttcccattaacttctcatttattatcaa

SEQ ID NO: 517522 - DNA, 201 bp, Homo sapiens
ttctctaacagaaaacttaaatgatgatgaagcattaatccttaatagtaaaaatgatttgaagtttgaggtttggagttttgtttgcttccctgttatayggaaggacagcactcaagtgtattgagaatggctgaataaatgaactacttctgatcatactgtcttctatgatttatcaaattatatgaatcagtaaaa

SEQ ID NO: 517523 - DNA, 201 bp, Homo sapiens
ggttaaacttccggtcaggcctcagctttcagcataaaagaattttacctccttttacaattttccatgttttcctctaagcataaaatattttattacayagtaaataagccatcattaaatcaaaatttctctaacagaaaacttaaatgatgatgaagcattaatccttaatagtaaaaatgatttgaagtttgaggt

SEQ ID NO: 517524 - DNA, 201 bp, Homo sapiens
aaccaaggcaggcaaggtacataagagttttgagatgatgatactgtaatttttaaataggatagaaatctgacaattggactagagatctaaaaagtctyaagtggaggtcagcaaactctgaaggccaaattggactcatcatcggtatttgtacagccactgagtatataatggtttctatgtttttaaatagttatc

SEQ ID NO: 517525 - DNA, 201 bp, Homo sapiens
aatcagtttccattatttttaaatatttgtagtaataatgtttttatcaatacataattttaactcctatctctcaaatttatctacctctcaccacctcmactgtcatcaccttagatcacactaacagcatctctctcctctatctacgggagtttcctaactgtcaaggcatttgtttaaacctattcaatctgttct

SEQ ID NO: 517526 - DNA, 201 bp, Homo sapiens
gccatcctcaacacttccacactatccatttaacccctcctgtcttcactttttgaaaggccagcagaaattcctattggtcattattataaacacttcakattattctttctccatcatgtcatctctgatttactcctttctggctagataacatcacataattctgctgaatggttttgctttaaaatgatgagtata

SEQ ID NO: 517527 - DNA, 201 bp, Homo sapiens
gtctattgagcatacgtactctgtgcttaagtctgtgtgttctctacagctattcattctttctcacagattctggatgctccatctatttgataacaaamgtatgaactgaaaatgatgttcaagtatagatcaaataaatgtgatacagccagtacaaacactactcctgctagtctcatcctttcttggaaccctaag

SEQ ID NO: 517528 - DNA, 201 bp, Homo sapiens
ttctttcttcattcattcattcttcctttcttttttctttctgtctctttgttcctttctttctttctctcttactttgtctctcttgcttttatccttcrttctcttgctccttcccttacttcctccctcctgccttcctgtttcccttttttctactataatgagagaacatgctttcatttgttctgcctaattgaa

SEQ ID NO: 517529 - DNA, 201 bp, Homo sapiens
tgtgttgcctttcaaatgctacaaaaatcatataattgtctttgactagtcaaatgtggctagaaaatataatattgctcctacacagaatagtcaaatcrtgagaggcagttcttgctttacacagttcctgtatgcacagatttcagtcactgtggtttagttaaataacaccagttccacagcacagttcaaatttca

SEQ ID NO: 517530 - DNA, 201 bp, Homo sapiens
tatatgtatcacattttctttaatccaccattgatgggcacttaggttgatcccatgtctttgctattgtgaacagcactgcaatgaacatatgggtgtaygtgtcttttcagtagaacgatttgttttcttttgcatatatacctagtaattgaaattgctggatggaatggtagttctgttttaagtcctttgagaaat

SEQ ID NO: 517531 - DNA, 201 bp, Homo sapiens
tgtttttctcccaaacacaaatttaatctcaacaaggacttcattttttgttggctttgtttactgatgcaccctaaatacctagaacatatagcatttgkcacatgaaagtgcacaaggcatatctattgcatgaataggttatatcttgcaccttagagggagcacaaaatagtagcagaatgaatactgactaccact

SEQ ID NO: 517532 - DNA, 201 bp, Homo sapiens
acaaaggttaataacacatccatggtctgggtgaatttaaagtcctctttctctttctataacagcattccttctggataccgaaataataaacagaaatytattctaggtccagttgtaatggttggaggtgtacctgactgtagaatcctggtctaattcagcatgctctccagtatggttctcacaactccacctggc

SEQ ID NO: 517533 - DNA, 201 bp, Homo sapiens
ttaggcataccttatagctatagtaattaagacagcgtgatgttggcagagggacagacacatagatcgatggaacaggatagaaaacccagaaatatacsaacacagatatgctcaactaagtttttaccaaggagcaaaagcattttaacagaggaaagatagtatttcaaccaactgtgctggagaaattagacatca

SEQ ID NO: 517534 - DNA, 201 bp, Homo sapiens
tataaatgtaataaaatatggacaagagctgtatcctaaaaattacatttgatgaaattgatgaaagaaatcaaggaatttgtggagagatataccatgtkaataaattggaaggcctaaaacagtaaatatgtgaattgtccctaaattaacctttacatttatgcaactcttataaaaatcccagaaaattttctttgt

SEQ ID NO: 517535 - DNA, 201 bp, Homo sapiens
atgtaaaagagaccctcaagcatctcttaaagcctcgaataattctatccgtctcaaatcctgcaaacatgatctactttgtgcccatggcagatcgaagrcagcaaattgataaaaatgttcctggaggtgaatgtactgatggtaaggaaaaaccatagaccacagcctaatgccaaagaaatattcaaaaagctaaag

SEQ ID NO: 517536 - DNA, 201 bp, Homo sapiens
gcagccaacaatcatatgggaaaaaaaaaagcttttcttaaataacaggtacatgataatgatttctataattaaatatagggtacattatcttaactaaytttgtatcaatgctattgataagacttgaaaacagaacagtaaacactgctagttgtttacttagtaatatatgtgctatcatagtaattaaaatgctag

SEQ ID NO: 517537 - DNA, 201 bp, Homo sapiens
ttataaaatgaataagttctagagacctaatgtgcaccttgttgactgtaattaataataactgtcacgacacacacagagaacaaaggtaactgtgtgaratgatagatatgttaattagcttgcttttggtagtcattcacatatatatcaaattctcacattgcacactttgaatacatataatttttgtcaattata

SEQ ID NO: 517538 - DNA, 201 bp, Homo sapiens
aatctttcttttggcaaaagttctcaccagtggctcttaagctatgtgtttccattgataatttagtctccctaatattctaacataatttttaactctayggtttgtatatgggagtccaagtaagcttaagccttttaattacattcagatttttgttaaatttcagaaaagattacttagctattctgttacctacct

SEQ ID NO: 517539 - DNA, 201 bp, Homo sapiens
ttggaatgcatacccatgggtaaaagggaataactgtatatagatgttgatatttaggaagagagagagatgtattgtgaggaatgggctcaaatgattayggaggcagagaagttccacagtctgccatctgcaaccaggagacccaagaaagccgatattgcaattcaagtccaaagacctaagaaccaggccaatggt

SEQ ID NO: 517540 - DNA, 201 bp, Homo sapiens
ccctacttcatctcatcatgtaggcattttttcatctcacatcatcgtaagaaaaagggtgagtatagtaacaatgagatgttttggaagagagcaaacasattcacataacttttattacagtacattatagtaattcttctatgttgttatattgtttatttcttactgtgcctaatttataaattaaactttatcata

SEQ ID NO: 517541 - DNA, 201 bp, Homo sapiens
aacttcctaacctgcagagctgtgagctaaataggcttcttttctttataaattacccagcctcaggcattctgttatagctacacataatggactaagasagccatccctgtatatttctcaatgtaccaccacacctcagaagtcaaaccaaatacacagtcattcataacactaaagagcagaaatttaacaattgat

SEQ ID NO: 517542 - DNA, 201 bp, Homo sapiens
gtcaaaataggtcacagagtagtaaatgaagtaaagaatatattgattgattatattttttatattacttctaaatccaaaaagaatttgagagttgatgrtataaaagaatatatatatattcagatacatacatacatattctcatatgccatatgtgtgtatattcatgtgtctgtgtgcatatagattttttaaatc

SEQ ID NO: 517543 - DNA, 201 bp, Homo sapiens
taattggatatcaagatttccagtattccctttcataaatcaagttacaacaaataaccttgtacctatatcagattgtctaagcacaaatttttagaagwaaaattagtaggtaaaatgccaaaacatctttaaggctgtcgccaaactgcatcctagaaaaggtaaaccaaattacactctaaccaactgtgtatgaga

SEQ ID NO: 517544 - DNA, 201 bp, Homo sapiens
ttataatcaattcctatgctatgaaatacatattttaaaaccaaatttcaatccttgtacaatatcccatcaaatatttatggcacaattaatttaaccaktacattataattggatatcaagatttccagtattccctttcataaatcaagttacaacaaataaccttgtacctatatcagattgtctaagcacaaattt

SEQ ID NO: 517545 - DNA, 201 bp, Homo sapiens
ctggggaaaaaaaaatgaatgtcatggtctgaaaaagaaaacctttttcaaattctttatgatattcactaaacccaaagtcaagaggtatcttagcaaakattctcaagctccaaagatgtaacctccacattttgactacagaactcttagtgaaacacatatattatcatgtcatctctgttttcttaaaatatctga

SEQ ID NO: 517546 - DNA, 201 bp, Homo sapiens
cagtttgtaatgtggactcgccctgaattctttcttgcatgagatccaagaaccctctcttggggtctgaatcaggaccgctttcctgtaacatatttctrgtgaccacagaagggactgtagtgcagaaaccctgacccaacggctatctttgggtaagtgttggggtcctgtaacaatgacagtatgtaagaaaccatt

SEQ ID NO: 517547 - DNA, 201 bp, Homo sapiens
gtgtatggagtagccattctttcactcctttactttcttaataaacttgcttaataagtcacagtttgtaatgtggactcgccctgaattctttcttgcakgagatccaagaaccctctcttggggtctgaatcaggaccgctttcctgtaacatatttctggtgaccacagaagggactgtagtgcagaaaccctgaccc

SEQ ID NO: 517548 - DNA, 201 bp, Homo sapiens
ttatcagaaggtcaatagtagcctaaagctaggtcacaatgcctacatcattcaccctacttcatctcatcatgtaggcattttttcatctcacatcatcrtaagaaaaagggtgagtatagtaacaatgagatgttttggaagagagcaaacacattcacataacttttattacagtacattatagtaattcttctatgt

SEQ ID NO: 517549 - DNA, 201 bp, Homo sapiens
catgatttctcaaaatcagcaaatatccagtccactcaatgcccaccctctctccagctggtttcttagaattaggaccaaagaaggtccacactttgtgytttgttaatgtgtctcttaatctacacatttccctctcctttttttaatctgttgaagtcaaatttatttatataaaaaaacagattgtttgtcttatag

SEQ ID NO: 517550 - DNA, 201 bp, Homo sapiens
cttgatttattctgagtatgaaacaaaagcaaaaatgcttattaatgtaaaagatatccctctcacatttctaagggcagcattacaatttcaaactatawtgactgctatgtaaagaagactcataatggagttttcccagaaaaacaaacaagcatactgataaattaagcggcttgcacgtattccttaagaactttg

SEQ ID NO: 517551 - DNA, 201 bp, Homo sapiens
aaaatcctattcattttagaacaatattttatcatggaaaaactcaaacatacaaaaaaacaggtaaatagcataataattcccccatttacccacaactyggctagagtaattattaacttatcaccacccttgtttcttctacatctctcttttaacagcaaactcctggccccactggattattttgaagcaaatcca

SEQ ID NO: 517552 - DNA, 201 bp, Homo sapiens
tttattaaagaagtctaacaacagaactgaaaagaaattaagatctttaaaaaatctaatacgggaaagcatttcctgcctcatttgtgtaggtaaaggtyagaaatctgcatcaaaacataaactctcttttatatacaaaccccctgctgggcctcacagctgaggccagcaaggtcctttaccaccatattcactgtg

SEQ ID NO: 517553 - DNA, 201 bp, Homo sapiens
ttcaataacatcaacaccctaaattgcttagcatcactgtctcttcattatgcccactatcaaaattcaagtcctggctcaattaccagctttcttcacawctgtattatgaactgctcaagacagttatacagtgggttccactataaattcattaccatcactttcaatgcatctgtcaactacctagcaagtttcctg

SEQ ID NO: 517554 - DNA, 201 bp, Homo sapiens
ttgtgtaggtaaaggtcagaaatctgcatcaaaacataaactctcttttatatacaaaccccctgctgggcctcacagctgaggccagcaaggtcctttaycaccatattcactgtgttgcctatatccacaaagtgtcatatctctggatctgttctacccgactccacccccaatctgggcagtttcattctctaggga

SEQ ID NO: 517555 - DNA, 201 bp, Homo sapiens
aagaactccaagttattacttcataaatcttataaatatttctaaaagccaatctcacctaaaacttaacatcaccttgggtgatatccatggaggtgagmcttccaatagcctggccttggagtttcttcaccaatccatctccaacaacctttctacttctcctcagacacccactttcatgatcaaaatctaaaattt

SEQ ID NO: 517556 - DNA, 201 bp, Homo sapiens
acctcacctacttcacccaataattccttgagctctacgggatgtattatatataagagaaaaattaataaacttttcaaagactttagttccaggactaytactttgtcacttaatattgagggattatagcacattatctaactcctcaggttcttggatttttcatttataaaatggagacaatgttatattctctga

SEQ ID NO: 517557 - DNA, 201 bp, Homo sapiens
taatacaacattatcccaaataggaaagatatgggtgtgtaaagtaagatttaatatacaattgttgggtgttatttatctgttatattcagaaatatgtygctattatgctttgcatggattgacgccaacaaatacttcatgagaataaagaactccaagttattacttcataaatcttataaatatttctaaaagcca

SEQ ID NO: 517558 - DNA, 201 bp, Homo sapiens
ttcatatttctaggacagaacactggggcaatatagatatcgcgttaatagagaggtcccatcttaatacaacattatcccaaataggaaagatatgggtrtgtaaagtaagatttaatatacaattgttgggtgttatttatctgttatattcagaaatatgttgctattatgctttgcatggattgacgccaacaaata

SEQ ID NO: 517559 - DNA, 201 bp, Homo sapiens
gcatttcagccatcctagactactcaggccctagccaactcagcggctgaccacagatgcatgagtaaacttagttgagataagccaaacctagcctaaakcagcagaaccacccaattgaactgcagactcatgagttgaataaattatggtggatattatctataaagctttagagttatttgacatgcaggaaaaaag

SEQ ID NO: 517560 - DNA, 201 bp, Homo sapiens
cttgtcatacccagttgcatgattttgcacctacactttgcattctcacaatacaatgttctggtagattgtttcaaaaacatagctgtgtttatttttcyccctgtatccatacccctctgcaatgttacttataattcctcccatcaagacagagggtctgtttcctatctcttaaatctagactgactttaggacttg

SEQ ID NO: 517561 - DNA, 201 bp, Homo sapiens
caattaagtggagatgaaagagcaggaatacagacttgtcatacccagttgcatgattttgcacctacactttgcattctcacaatacaatgttctggtasattgtttcaaaaacatagctgtgtttatttttccccctgtatccatacccctctgcaatgttacttataattcctcccatcaagacagagggtctgtttc

SEQ ID NO: 517562 - DNA, 201 bp, Homo sapiens
cagggtcaccctgtgttgagccctgattccgcagctccttctgctgcttgaacttctggaagagctttctgactgggtggtccacgggaatgctgagggtyacctcattcttctgccggaggcgctcctcctcctctttcttcacatcactgatcttacgaaagatgatctgtggaacgggagagatagtcacagcctgat

SEQ ID NO: 517563 - DNA, 201 bp, Homo sapiens
tgaaatcacaaggctatggctaatcacaaggtgaaaattatctcctaatctcttccaagaatattaaaacctgggaacatcaattgttgaaacctggcagwttatgaaaaatatattataagccatagtatataaagacttcctcagaaattaatcaagaagagatgcctctaccaagtatagattaaaagttcaaatggg

SEQ ID NO: 517564 - DNA, 201 bp, Homo sapiens
ctacataggagagaagctaattatccatgggtattaaagatggttgtttaaaaaggcattagaaaactaagtagaaaaattagaagacgaagttcataaamatgttctgattcaaccagccatcaaattaatataacccatcttcggcaaagttgacaaaaacaagcaatggggaaaagactcactattcaataaatggtg

SEQ ID NO: 517565 - DNA, 201 bp, Homo sapiens
gagctctaattaattggctgaaacaaaaataagcacttcaatattctgaaagcaaaataaaaaactataatgccttttagttcatgtaactttagtaatayttgcaaaataaaaacagctttaaaaattattaataaaataaaaacatttagtctaaattatgcaggtcagatattaagtttgctaaatgctttaaggtca

SEQ ID NO: 517566 - DNA, 201 bp, Homo sapiens
cttgctgataaaacaggttgcagtaaagaagctggtctaccaaaaccaagatggccacggagtgacctctgattgtcctcactactacactcccatcagcrccatgacagtttacgaatgtcatggcaacgtcagaaagttatccaatatggtctaaaaaggggaggcatgaataacccaccccctgtttagcatatcatc

SEQ ID NO: 517567 - DNA, 201 bp, Homo sapiens
cacattggaggtggattcagaaaacaaaatcaacaaaagcaccctggcaacttgacatactggcactggcagactaactccactcttgatatatttttttmactctgaagattttccttttacaaataaattcatgtccaggaagggacaagggtattgaccagccttctgtaaggcttgggtggttggaaatgtcagtgc

SEQ ID NO: 517568 - DNA, 201 bp, Homo sapiens
cagcctggatgggactgtgctctagcggacttcgggcctccccagccttatccaaacgaaggtcactttttgtaattccactgtcacaagaatctgttttycttagtgggtttttggtcacactgttctctgaatcactgctcttggggtcctcagacaatagccccattgactcagctttagtgacattattccagtctt

SEQ ID NO: 517569 - DNA, 201 bp, Homo sapiens
ggcttctgtaattccagcactttgggaggccaaggcgggtagatcacttgagctcagtagctcgagaccagcctgggcaacatggtgaaaccctgtctctrctaaaaagacaaaaaaaacaaaaattagctggccgtggtggtgcatgcctgtagttctagctacttgggaggctgaagtgggagaatcaccttatcccag

SEQ ID NO: 517570 - DNA, 201 bp, Homo sapiens
cctcctccacactttcagctcactacttaggttgaccgtgatgagggagaaagttctggggtaaaatgatctattttcaagcctccattcatttactaatkgggaaagtcactaagcttctctggacctcacttggctcctctctaaagaaaagggttgaactagacaggttctgttgcccttctgagactaacacccttc

SEQ ID NO: 517571 - DNA, 201 bp, Homo sapiens
gaggatgcacccgtgacacatcctcaggaagtcctgacgacatgtgcccaacatgatcgggacacagcttggttttatacattttaaggtgatatgagacrtcaatcaatatatgtaagaagtacattggttccagtctggaaaggtgggacaacttgaagcaaaggcaggaagactggaagcagagagggagctttcagg

SEQ ID NO: 517572 - DNA, 201 bp, Homo sapiens
cgctgggattggccaagacttagctattgttacaggcacatactcctaaatcaggttttcaatcttgtctacctattaagctacgttacagttcatccacmaggactcaaatacagaagtacagaatccttctcaggccatatttagttcactttaacgtgcctcttattaagtgctgagatgcagcacatacaagatatt

SEQ ID NO: 517573 - DNA, 201 bp, Homo sapiens
atacttaacacagtttccccctcaattatctttgttcaaattgcctagttaacagtaggaaaatgtttcttctgcctataacagatctaaactaaagttaygggcttttgagaaatgcattttactataaacctctatcaacaaaggaggaacagagggcatagaggaaattggcaagtgagtcaacagaacacaacatat

SEQ ID NO: 517574 - DNA, 201 bp, Homo sapiens
ttttctttcttgtattattgttacttgtcttctgtttttcctttaccttatgctatattatttatttataaaataaaatgctaccacttaaaaaatttttytaagttttttgaacttttgttcaaaagttgaaacatttgctttatgctgtgaggggataggcagattcaggaaatagaaatctggctctcaagaagtctt

SEQ ID NO: 517575 - DNA, 201 bp, Homo sapiens
aattatacctcaataaaggtgtgttgctgtgatagaaatgtgtatgagtatgggcagtgatcacagaagcgtatagagaaacaaaaagcaatcacaaggayaaaggagtgagattcaaagcacaggttttctttttttctttcttgtattattgttacttgtcttctgtttttcctttaccttatgctatattatttattt

SEQ ID NO: 517576 - DNA, 201 bp, Homo sapiens
ttggtggaaaggtcagattcctaatctcatctttgcccccaaactgattcttaacagattttttttaatacaatggattttaattttatttttatttcccycctacctagtctaatttcatttccatatctacatacaagccagccaacactaatctggcatcacctctttcatttagtgccatgttaaacataactagcc

SEQ ID NO: 517577 - DNA, 201 bp, Homo sapiens
aaaaaaaacctgaggcttagggagatttaaaaatcttccccaagtctacacagtgaagagtgacaaagcagggtttctaaccaaggttcattggacttaargactaggctactctgatttaagaatacttgaactaaatttttgtaactggcctggagtaaaggaaattaaatgattaaagaggttgaatcacttactcat

SEQ ID NO: 517578 - DNA, 201 bp, Homo sapiens
ccagtactagccaggattctaactagctatgtgatcactattctttatttaaatagtgattaaaagatggggctgaacttgcttcttttcagctctatctrtctttgaatatacaacaacacaagaggtcagtacctgaagcttcaaaagaaaaagatatatataatctattttatactccttaaattattcctaaggtaa

SEQ ID NO: 517579 - DNA, 201 bp, Homo sapiens
aatattccttcctattttcttcaactttcttgtccaaggacacgttgcaattaagtggagatgaaagagcaggaatacagacttgtcatacccagttgcaygattttgcacctacactttgcattctcacaatacaatgttctggtagattgtttcaaaaacatagctgtgtttatttttccccctgtatccatacccctc

SEQ ID NO: 517580 - DNA, 201 bp, Homo sapiens
taattcagccaatattccttcctattttcttcaactttcttgtccaaggacacgttgcaattaagtggagatgaaagagcaggaatacagacttgtcatayccagttgcatgattttgcacctacactttgcattctcacaatacaatgttctggtagattgtttcaaaaacatagctgtgtttatttttccccctgtatc

SEQ ID NO: 517581 - DNA, 201 bp, Homo sapiens
ttgtggattccacattaaagagatgtgagatgttatcagcataaaataatatcttgcaatgataaagccatccaaaatacaaatcaattctcttatctgaycgtcgctaataatagcaggtagataattcagccaatattccttcctattttcttcaactttcttgtccaaggacacgttgcaattaagtggagatgaaag

SEQ ID NO: 517582 - DNA, 201 bp, Homo sapiens
agtcttagatattcattgattttctgcttcatttcactccaaactttccaatctttctgtgccctcctctgcacttcagtggctttctgcctctatcccarcctctgagctattagtacacaaatccctgaggttccactgtggaacagaatatcaaatacatcaagtgcataacagaacacaacagggtgaatggaggac

SEQ ID NO: 517583 - DNA, 201 bp, Homo sapiens
ctacatcattgctgcaatattaatcttcctgaaaggcagcactgagcatatcgtccaagggcttatcacagacattaagcataatctcttgaacaggcctycaatgcccgcaatcccatctctgtctatgctgccaggtcatttccctctatgcctctgcatagccctagtgctccaatcaaaccaaactcctttttgccc

SEQ ID NO: 517584 - DNA, 201 bp, Homo sapiens
ccctggatttaaaaaaaaaaaaaaaattacaccacattttcaggaaaaaaaaaggctggggaaacaatacaatggctcaccttcataaatttaaccatccmattatatattaagaacatatgtatattataggtctgattttaagaaaacaaaaaagtcaaaatgataaactttaaaaaaatagatatcttcctacccaaa

SEQ ID NO: 517585 - DNA, 201 bp, Homo sapiens
caagaaattaaaacataacatcagaaaaaaatcacctatactaaaagaaagacaggaaggaagtaaagaaggaagacaaaccagaaaacacataacaaaawggcagaagtaagtccttacttatcaatacaacattaaatgtacatggaataaactcatcagtcagaagacgtagagtggctgaagggatgattaaaaaaa

SEQ ID NO: 517586 - DNA, 201 bp, Homo sapiens
tttatggaaggcagggagcagggagggtcaaagaatgtgactttccctggactctgacatcaaccttgattccacttacacctaaatcatttgtttacgaraatagggatttctgtctgctttgctaactgctatatctctagtgtctgtaacatttgtaacatttgtaataaacaaatgttatgcattagttcaataacc

SEQ ID NO: 517587 - DNA, 201 bp, Homo sapiens
tttctcacctatactaggggacaaatgagacagagctggatctgtattttgctgtcgagaaatgtaaaagtaactgggaaagagaaagaatcgagctctgstacattagatgacagaattctgagtattgcacattgttcctttccccctttttacgcccgggagataggaagttaagtaattttaaacatagctcccttg

SEQ ID NO: 517588 - DNA, 201 bp, Homo sapiens
ggtggggtgtggtggctcactcctgttaatcccacaccttaggaggctgaggcgggcagatcatctgaggtcaggagttcaagaccagcctggccatcacrgcgaaaccctatctctattaaactacaaaaaaaaaaaatagctgggcgtggtggcaggtgtctgtaatcccagctacttgtgaggctgaggcaggagaat

SEQ ID NO: 517589 - DNA, 201 bp, Homo sapiens
agaactgtgagaaatatgtatttgttgtttaagcaacccccagtatatggcaatttagtacagcagcccaaacgaagacatataggtactacttttactcatgctgtttgggcagcaacccacataacttagcttttgtgccactattcccacatataactgttttctttctctctggtcactataattcattcccacata

SEQ ID NO: 517590 - DNA, 201 bp, Homo sapiens
ccagagagaaatttccaaaatgaaaatctgcctattctatccactgcttaaaccccttcaatggctctagtttgagctgtttcaaggcacacgggatgctytactgctgctctgacccttacctctatcctcagttttagcagctggaactctcatgcctatggtttctgtgctattgataacaaaccacttacagtttct

SEQ ID NO: 517591 - DNA, 201 bp, Homo sapiens
tgtttcaaggcacacgggatgctctactgctgctctgacccttacctctatcctcagttttagcagctggaactctcatgcctatggtttctgtgctattrataacaaaccacttacagtttctagttaaagtcataatattttatgcctccatgccttttgaggtctgcatctctccctaagatacctttgaccatgctg

SEQ ID NO: 517592 - DNA, 201 bp, Homo sapiens
agttaaagtcataatattttatgcctccatgccttttgaggtctgcatctctccctaagatacctttgaccatgctgtttgactttggccaagtgtttcasggaaagcaccatcatttctttccaggaagcccctcctcttgcccctatttacccaatccccacatacactagcattatgccttctccactagcctcctgc

SEQ ID NO: 517593 - DNA, 201 bp, Homo sapiens
ctttaaaaaatactaatcacagaccaggtgcagtggcttacacctgtaatccctgcactttgggaggctgaggcaggaggatcacttgaggtcaggagttyaagaccagcctggccaatatggtgaaaccccatctctactaaaaatgcaaaaattagctgggcatggtggtgggtgcctataatcccagctacttgggag

SEQ ID NO: 517594 - DNA, 201 bp, Homo sapiens
caatgcccagtagcactggaattgccacctaatcattagcatttgaaaatttggaaaaatattcagaagaatatcatcattttaattctaagttcttagcrttgaatttgtagcacatctaagctcatttgaacaaaatgataaagaaaaaccctcaccctcatgttctgctgggaatgtaagaatacagcacccagtact

SEQ ID NO: 517595 - DNA, 201 bp, Homo sapiens
gagaagaaatgataaaaataaaacaaatatctcatgtgaaaaaaatacaaatatttgctaaatcaatgaataatttgacagagacatccttataaacttgmaggggtaaatacatgttgaactctgagaagactgcctgacacctggtattcactcagaaaacattacctgcagtaggagaaacatgactttatgagcatg

SEQ ID NO: 517596 - DNA, 201 bp, Homo sapiens
gttaaatcctagacacttctcattgctgaatgggcttatattcagtaatcctttcattctctcaaacaggcatatattcaacctagagtggctataatgawgactagctttataaaccctttctcctagtcttaattgtaaaaacctatacaaaagtgtatcctaaggtcaactttaatttaggaattcagtattaactag

SEQ ID NO: 517597 - DNA, 201 bp, Homo sapiens
taactttttctaaaaggagttggctgcagaggccttttcaacaatgcttattgtcaaatatttattataaagttaggtttagtttggggtttgggttttaytcaaaagtttacttagtttcttatccaaatcagtttcttatcaaaatctgaaactacatgtttctaatccacaagaatgaccagactgtccaagctaatt

SEQ ID NO: 517598 - DNA, 201 bp, Homo sapiens
aaatgctggcagctgcaatagaatcttgtcaccagtgtcaaaaatagagattgttaaattctaatgcagatgctctgaactgactccctcagaggtgaatrtaaaaatacagacatagaggtaagtctcatgctcagccaagtctggcacactttgatccagtgccttgctactcaaagtatgggccagcatcacctggga

SEQ ID NO: 517599 - DNA, 201 bp, Homo sapiens; identical to SEQ ID NO: 263552

SEQ ID NO: 517600 - DNA, 201 bp, Homo sapiens
tttcttcaagggttagaaggttaaaaacgaatcaaagacccttaattccaaatggtcccctagagattattaccagtgtttctcaatcttgactgcacagytgagtggagtgaaagttgagggagattggagggggccacctaggagttattcatccccgtccccaaatgccaaagattctgttttaattggtcttgagta

SEQ ID NO: 517601 - DNA, 201 bp, Homo sapiens
ctttgtctctcttgcttttatccttcgttctcttgctccttcccttacttcctccctcctgccttcctgtttcccttttttctactataatgagagaacaygctttcatttgttctgcctaattgaaatttttgaggttctcgttgtgatcaaatatacagtttaaaatttccatatttatttgaaaggaactttatattc

SEQ ID NO: 517602 - DNA, 201 bp, Homo sapiens
gacatgtatatacacaatacacaattgaaaaaatttctcagactacatttactcactacatgagaggtactctacaatttctaacctatttcaattttggstgcattaatcaagacctgttaaatcaatttcatagcccaatgaaggggtgtaccttacaattttaaaagcatgctttaaacaactctgcaaaggctttac

SEQ ID NO: 517603 - DNA, 201 bp, Homo sapiens
tgaaaagtctaatttaaaatagaatttaaaagtcttcctttaaattaaaattattcaaagatattttcaaccacataatacagataatttagaaactatcmgtattccaaataaaagagatatttttgttctattttacacagaaaagtaggtttgcttttgtataaattaatataaaatgattgaaaatccaatcatatt

SEQ ID NO: 517604 - DNA, 201 bp, Homo sapiens
ctttggttttcatgctggtttctaggagtggaatctctaaccctgcattagataatctaggtccaaggtctctaattgtttctcatgagcccatcatgccycatctaagcaacctgaacttgttttcagatggtctctgctgaatggttgaactctgagattaggacaatacaatttcagtcaaaagctaatgggatttat

SEQ ID NO: 517605 - DNA, 201 bp, Homo sapiens
cacactgtggaatcctttggttttcatgctggtttctaggagtggaatctctaaccctgcattagataatctaggtccaaggtctctaattgtttctcatragcccatcatgcctcatctaagcaacctgaacttgttttcagatggtctctgctgaatggttgaactctgagattaggacaatacaatttcagtcaaaag

SEQ ID NO: 517606 - DNA, 201 bp, Homo sapiens
tcatctggaaccacaaaagaccccaatagccaaagtaattttgaacgaaaagaacaaagccagagtcattatactaccagatatcaaaatctactacaaarttatagtacaaaagcagcacggtactggcataaaaatagacacaaagacaaataaaacataatagagagcccagaaatcaagccacacatttataaacca

SEQ ID NO: 517607 - DNA, 201 bp, Homo sapiens
ttcccactgtttcctgtcttagagaatggggccaccatccatacaattttatcagccagtaatctgggagccatcaatcaacatttatcccattaccctcrtatctaattaattaccaatcgcattacttttatctcctaaaactctttcaaatctctctagttctcttcatctccatgatcatcacccaactccagccct

SEQ ID NO: 517608 - DNA, 201 bp, Homo sapiens
agagctattataactcagaaataaaaacacaaaagaaaaataattttaaaatcatcaaaaaatttgaatagacatttattgaaagaagatctataaatggscaataggcatatgaaaagatactcatcattagtcattggagaaatgcaaattaaaactacaataagctatcatttcacatcctctaggatggctgtagta

SEQ ID NO: 517609 - DNA, 201 bp, Homo sapiens
atgacccagcaattctactcctatatagccaagagaattgaaaacatatagtcacacaaaaacttgtacatgaatgctcacagcagcatcatttatgatasccaaaaagtagaaacaacccacatattcattaattgatgaattgacaaaaatgtagtgtatccatacaatgaaatactattcagccgcaaaaagaaatac

SEQ ID NO: 517610 - DNA, 201 bp, Homo sapiens
gactcataagttttttaagaagaaataaaacacttcctccattctcaacgtttctaatgttcaaaatcacagtacactaaataaatatgagttttactatkatatcatctccctgcattgataaccaacagtaagagagtttttattgttttgacaaacatttttaaagatgctaaaaccatcataatttttattgagtat

SEQ ID NO: 517611 - DNA, 201 bp, Homo sapiens
aaaaatagaaaaacggaactcttgtaatcttatgggggaatgcaaattcatagaaccatttggaaaactgcttgatgagtatctactaaagctgaagatakacacactatagattcagcaattttactcttaggtactccttccagaaaaggttgtacacatgtagataaaaaggcatgtacaaggaggtaggcagcaaca

SEQ ID NO: 517612 - DNA, 201 bp, Homo sapiens
ccgtataactaaatcaactctaaatagactgcagattgtaatgtgatacgtaaaaaaacataaagcttttcaaagaaaaaacaggagaaaatcttcataaygttgggatacgataagatttcttaaacatcacacaaaagtggtaaccataaagggaaaaaaagaataaatcagattacattaaaattcagatttttttct

SEQ ID NO: 517613 - DNA, 201 bp, Homo sapiens
ttcatgtacattgtgtccatcttttgtccaatggcaaatcagattgctgctgaacactataaaaattaaggacaaaatttaaaaaccagaaatcaggctayggttccagctacacatttattggtagaatgcacaataacctgtactgtttctatcagcaaagaggtttatttcatttaagctttttttcctctgtgcttc

SEQ ID NO: 517614 - DNA, 201 bp, Homo sapiens
agctccccgaaggtagaagatgaatttcagagttcaagtcccatcaagctagagaagcttgaaaaacacctcaagccttccatctaaacagagaaggccaygcattaggagtaagaaacaagtcataggatgaacggatatgccctgggactaaaataaaaaatgtagaaattagaccaacacgaaaaataatcttaaaat

SEQ ID NO: 517615 - DNA, 201 bp, Homo sapiens
aacacccaaataaataaaatcagagatgaaaaaggataaagtataaccaatacagcagaaattcaaagaatcattagaggctactgagaacaactacataycaatagattggaaaacctagaagaaatagataaatgtctagacacatacgacctgcaaatacattaaaccataaagaaatccaaaacttgatagaccaac

SEQ ID NO: 517616 - DNA, 201 bp, Homo sapiens
caaaaaaaccctccttattaaaggagctctagtacattgatcacaatagtgaaagtggaagaataaaatatttgaaattaattctaacttagaaaggaggrtgacaattttcgagaagatagaaaagatgctctctttatacagaaagttacattctgaaaagccaaagaattgtttaaatgactcataagttttttaaga

SEQ ID NO: 517617 - DNA, 201 bp, Homo sapiens
tgagaacaactacatatcaatagattggaaaacctagaagaaatagataaatgtctagacacatacgacctgcaaatacattaaaccataaagaaatccaraacttgatagaccaacaagaagtaattagaagcagtaactaaaaagtctcccagcaaaaaacagctgggacacaatggcttcacagttgaattttattaa

SEQ ID NO: 517618 - DNA, 201 bp, Homo sapiens
tatataatgcataccttaccacatacaaatctcatcccagagaaaggtcacaacaatcaacacaaatttaccaaacgtgaatgacttgttctgagaacaaygactacttctactaggctttctcacaaaagagtctgaggctggcaaaaggccatattggtagagattcccctcaagtagctaccacatattcacattgcc

SEQ ID NO: 517619 - DNA, 201 bp, Homo sapiens
tgttgagtatactgttggtttttgtcatgttggtttttttccctccaaactctgatggaaagtctatatcaccagatattatgtcattatataatgcataycttaccacatacaaatctcatcccagagaaaggtcacaacaatcaacacaaatttaccaaacgtgaatgacttgttctgagaacaacgactacttctact

SEQ ID NO: 517620 - DNA, 201 bp, Homo sapiens
gaggaaacagcaaaaagataaatgtaagtaaccatgcaaataaagtgaattagaaaggggagttgttgagtatactgttggtttttgtcatgttggttttyttccctccaaactctgatggaaagtctatatcaccagatattatgtcattatataatgcataccttaccacatacaaatctcatcccagagaaaggtcac

SEQ ID NO: 517621 - DNA, 201 bp, Homo sapiens
caataaataaattgactcatcttatgaagtgactgttcatttcaaaaaagaaagcaagaacaatttgaggaaacagcaaaaagataaatgtaagtaaccaygcaaataaagtgaattagaaaggggagttgttgagtatactgttggtttttgtcatgttggtttttttccctccaaactctgatggaaagtctatatcac

SEQ ID NO: 517622 - DNA, 201 bp, Homo sapiens
acaggcgtttcctgttgaagcgagaatgttttccaaacttgggaagaatttagtaaccatcaatttccatcaaagataatagtagactttgctatcatttsctattaacaataaataaattgactcatcttatgaagtgactgttcatttcaaaaaagaaagcaagaacaatttgaggaaacagcaaaaagataaatgtaa

SEQ ID NO: 517623 - DNA, 201 bp, Homo sapiens
ttgatgtaaaatgaaaaataagataagccattccttaagtaaaattactaaaaacaaatgtttccattatcaagtgcactactttgaggcaatgtctcacrctgttattcctttgttagtctactaataaaaagagaaatcgaattttaattccaaatattccacagataaaaaatgtttcaagtaaatggagaggataaa

SEQ ID NO: 517624 - DNA, 201 bp, Homo sapiens
  misc_feature (1)...(201): n = A,T,C or G
tatccttcactaaagaggaaaacaaaagcaaaactcaatgtagatagtgcacagaaaggaggcacaagttttaacttacaatgctatggggtatatatccnattggctataagcaggcacttatctgcatagagagttatctggaaagaaccagataggcctgaacaatgatcagataataatttcaatccattaacataa

SEQ ID NO: 517625 - DNA, 201 bp, Homo sapiens
aaaatagaaaaattagccaggtatggtggcgcacacctatagtcccagctactcaggaggctgaggtggggggaccacttgagactgggagatggaaattwcagtgagctgaaatgacaccactacactccagcccaagcaacagagtgagaccttgactaaaagacaaacaaaaaaaatgctctataaaatttcttactc

SEQ ID NO: 517626 - DNA, 201 bp, Homo sapiens
acgtctgtaatcccagcactttgggaggccaaggggggtcagataacttgagcccaagtgtttgaaaccagcctgggcaacatggcgaaaccctgactctrtaaaaaatagaaaaattagccaggtatggtggcgcacacctatagtcccagctactcaggaggctgaggtggggggaccacttgagactgggagatggaa

SEQ ID NO: 517627 - DNA, 201 bp, Homo sapiens
tccttctcaggccatatttagttcactttaacgtgcctcttattaagtgctgagatgcagcacatacaagatatttacattacggatatgtgttaaacatytaccatgttccaagctctgttttggagttaggaatatatctgtaaacaaagcaaaaatcctgagatattttatatgatgtctgacggtgaagggggctac

SEQ ID NO: 517628 - DNA, 201 bp, Homo sapiens
caagtgagtcaacagaacacaacatatttttctgggtacccagaactgaaacaattatgaaaacagtttgttggcaaaatatagcagagttggccctccayacctgtgggtttctcatcaatggattcaatgaaccacaaatagaaaatatttggggtaaaaaatggatggctgcgtctgtactaaatgtgtacagatatt

SEQ ID NO: 517629 - DNA, 201 bp, Homo sapiens; identical to SEQ ID NO: 263584

SEQ ID NO: 517630 - DNA, 201 bp, Homo sapiens; identical to SEQ ID NO: 263586

SEQ ID NO: 517631 - DNA, 201 bp, Homo sapiens
gaaagggaagcagcacacattgctttaaattaagaactctgtaatatcattatgcatttaatcagaaaaagtcactgaagtgctggcgtagaaagagcagytggatatatggggtaatagatgtctctttaagaaggtaactgtcagtgcatggggatatgtcatctgttcagcacaacatgaccctacaaagcaacatac

SEQ ID NO: 517632 - DNA, 201 bp, Homo sapiens
ttaagctcagatccaccagtttctgctgggaaattctcaactacttaatttcttgctttcttcaggttaaaaaaaatctcccctaccttaccttatctagrgtaagtccttactgagatgatccactacatctggggcttcaccaaatcttctgagcaaccctgtaaggtaggtgtcctaattctggagagcctcagtgtg

SEQ ID NO: 517633 - DNA, 201 bp, Homo sapiens
aattgttacgttttggctctaaagctcaccatggtatgaggtgttgaaattccaatcatattgattcaaaattaacaatgctcagccaggtgtatggcccrcgtctgtaatcccagcactttgggaggccaaggggggtcagataacttgagcccaagtgtttgaaaccagcctgggcaacatggcgaaaccctgactcta

SEQ ID NO: 517634 - DNA, 201 bp, Homo sapiens
aaattattctttccataatctagcaacatctactctagggactacacaacagaataaataaaaactgaaaagtaacttgaaaaagtcaactattacaattktaattcaacaaaattcaatcaactaaccaactgagctctagttagatttcacccaaaccattccaccaattgttacgttttggctctaaagctcaccatg

SEQ ID NO: 517635 - DNA, 201 bp, Homo sapiens
tggtagattacagcaactggtttttgcatgttaaaccagccttgcataagtgggataaaccccacttggttgtcataattctttttagatattgttggatycaatttttgtagaggattttgaatctatattcatgaaaaatattggtttggaaggccgaggcaggcagatcacgaggtcaggagatcgagaccatcctgg

SEQ ID NO: 517636 - DNA, 201 bp, Homo sapiens
gttacaagaggctgggaagggtagttggggagtaagatggggagatggttaatgggtataagaaaaaaatagttagaatattataggctttatatagatgytccttatcaaactagagaagctcccctctattcaaactttactgagagtttttatcatgaacaagtgctggatttcagcaagtgctttctctctgctgac

SEQ ID NO: 517637 - DNA, 201 bp, Homo sapiens
taatcatagattgattacaaggaagaggtacgttcaaattagttggctgccatcacatgttgtagttattttcccagatatgaatcagaaataaaattcasagtgagtccatttatttaagtctttcaatcatatgtctaagtttcttggtaaaaatatcgatacaagtaggagattaatgttaattccagtcaattttgg

SEQ ID NO: 517638 - DNA, 201 bp, Homo sapiens
aattatcagctaagtatttataagatcatagccagaaatatctatattaaatcattttagggaagaaaaatgtaccaacaccaccatcttgggaagcaaarttcatctcatacttacttcagctagtcttgaatgtttatggaccacctctgttttattcattggcgtgagctgctgcaaaacacttcggctatttgtcaa

SEQ ID NO: 517639 - DNA, 201 bp, Homo sapiens
agaggtttttctgaggcacaaaggtcattttcctggcacatgagacaccaaccaccaccatttcactatatgccaccctaccttctccttccccatatgarttcaactacagtaaagtcatactcaacgtcaccatactacctcatctctgaccctttgtacatgctggcctccctggtaggaataaactatatcccttct

SEQ ID NO: 517640 - DNA, 201 bp, Homo sapiens
atctgtagcgtgatacagttatcttactctgctctttacccagtatcaggcattaaaattcactgtaccattgccaatttgatttgtaatttaatgttaayttgtacttccctaattataagaggtattgatctttttccatagaatttgtttcttctttgtaaatttcagagtctatttttatagttgtgcattatgatt

SEQ ID NO: 517641 - DNA, 201 bp, Homo sapiens
cataccagtaatacaaattatggttatagaagacatgtgaacaataaagctattagctgcctcagagttctgtcctcattttttttctccttagtctcagrgtaacatcgtctagtcacatgacttgaacagccataactgtgaagatgacactgaagcctacaattcaaactcaaatatccttccagagtgccagaccca

SEQ ID NO: 517642 - DNA, 201 bp, Homo sapiens
attgtgattattattactagttaatatttagttatattaatgtcttattttggtcttcagaaacatgtctgcacatcaaaggattcatctttccccaagcyaacagtgctatttagagcagaaaaccaaaagtctttttgttagccatggtctaagaaaaactccatagtcttctaaattcagggaacatactttacttcc

SEQ ID NO: 517643 - DNA, 201 bp, Homo sapiens
tatatttcccagtctacaggctgccttttcattttgttgattgtttcccttgctgtacagaaacgttttagtgtgatgtaaccctatttatttatttttgsttttatggctcaagcttttggtgttatatccaaaaagtcattgccaaggccaatatcaaggtgttttttcctgtatgttctcatcaacgtgttttatggt

SEQ ID NO: 517644 - DNA, 201 bp, Homo sapiens
aggtcaggagtttgagaccagcctggccaacatggtgaaatcccatttctactaaaaatacaaaaattagctgggcacagtggcgggcgcctgtaatcccygctactcaggaggctgaggaaggagaatggcttgaacccaggaggcggaggttgcagtgagccgagatcacgccactgctctccagcctgggtgacagag

SEQ ID NO: 517645 - DNA, 201 bp, Homo sapiens
gagggagatatctattttatagatgtgtgtaaggtaaagtggaaaataaagacttataagttctttataaaacatatgagacaggagaaatttaggtggargacagcatagaagacacatacattttaaatttataggcaggaagtctctttctaatttttaaatgagcaaaaaaggcaaagggaaaatcaagaataaatt

SEQ ID NO: 517646 - DNA, 201 bp, Homo sapiens
gactatgtgagcaaatactttagggtatactatacctggcaaatacttgaattgtccatattctatattattgattaaaatgtagatattttgaaaaatgrtattgaagagaaaggcaaagtcttattgtatactataaacatattcaatttttacttgttgattttttaaaaaatttttaagaaaagtattgcaatatag

SEQ ID NO: 517647 - DNA, 201 bp, Homo sapiens
tgggtgaagaaaagaaaaaaaagtagttggaacacccattgtcactcctagaccatttcttcgaagatgctcgtattgctactgaaatagatgcaatctgygacacatgtacaccaagcaaatactttatgcctgtttgatatccaattccagtatgtttttcatttacaaaagatcattgctactgagaagcttcattga

SEQ ID NO: 517648 - DNA, 201 bp, Homo sapiens
cacacatgcatattttcactgcaacactactcacaatagtaaagacatgaaatcaacctaaatgcttatcaatggtagactagataaggaaaatggggtatatatacacactggaatactacacagccataaaaagaacaaaatcatgttctttgcagtaatgcagatacagcaggaggctattgccctaagtgaattaac

SEQ ID NO: 517649 - DNA, 201 bp, Homo sapiens
aaaatggacacatagaccaatggaacaagttagataacccagttataaatccacacacctacaaccatctgaactttgagaaagctgacaaaaacaagcartaggaaaaggactccctattccataaatagtgctaagataactcgctagccatatgcagaagactaaaacttgaccctcgccttttatcatgtgcaaaaa

SEQ ID NO: 517650 - DNA, 201 bp, Homo sapiens
  misc_feature (1)...(201): n = A,T,C or G
caatagcacaggtaactaaagcagaaattaccaaatgaaattacatcaaactaaaaagctgtacagcaaaggaaacaatcaacagagtgaagagacaaccnatggagtaataaaatatatctacaaaccaaacatataaggggttaatatgcaaaatatataagaaactcaacttgatagtaagaaaacaaataaccagat

SEQ ID NO: 517651 - DNA, 201 bp, Homo sapiens
tcagcaaagataccaaaaacatacaatgaggaaagggcaatctcttcaatcaaggatgttgggaaaactggatatcccacatcagaagaataaaattagaygctcatctcacaccatatatacaaattaactcaaaatggattgaagacttcaacatcaaacctgaaactataaaactgctggaagaaaacatagaaggaa

SEQ ID NO: 517652 - DNA, 201 bp, Homo sapiens
taaacaagttcagtaaagttgtaggatatgaaatcaacatatgaaaaacagttctataacaacaagctatccaaataagcaatcaagaaaacaataccatytacaatagtaacaaaaaaaaaaaacagtacttaggaataaatttaaccaagaaggtgaaagatctatacactggaaattgcaaaacattgataaaagaaa

SEQ ID NO: 517653 - DNA, 201 bp, Homo sapiens
ttgccatcatctctgcctaaataccattcctttccctcctcaccttgtcaccttcatttatttagatcttaactcaattgacatgacctcagggaatcttkccctgactgctgatgaggttatatccctgttatataattttttgacatgatgtacctctccttcacagccattcacaagtgcagttttacacctatttgt

SEQ ID NO: 517654 - DNA, 201 bp, Homo sapiens
tcatcactctgacccttgcccacgatactcgcctacaatagcctcattgacttttcttatattcttgtaaaagccaagttctctcccagcataaggacttyttatttgccatcatctctgcctaaataccattcctttccctcctcaccttgtcaccttcatttatttagatcttaactcaattgacatgacctcagggaa

SEQ ID NO: 517655 - DNA, 201 bp, Homo sapiens
gagcaaagaaaaaaaaaacagatgggatgaaataggaatacgtttctcaaaaataaaaatgagaaaatgtcaaggggaaagtttctttcttttccgttgayacagtgaaaaaacaattctgagtgattctgggtgctaagggagaagattgtcttctctatggccccctttcacttgttgtcgctctgttgtgtaacagac

SEQ ID NO: 517656 - DNA, 201 bp, Homo sapiens
gagaaataatatattacaatgtattataataataataacaacagagtaaagaattttccatctgagcagtctacagactagaatctataggaacatcttargataattaagttagtaatattatcataatgaacatattttaataatagacatattctatattgactcttctatatattatgaattgaaattactggttgt

SEQ ID NO: 517657 - DNA, 201 bp, Homo sapiens
gcttgcagtgagccgagacagagcccctgcactcctgcttgagcgacagagtgagactccgtctcaaaaaaaaaaaaaaaagaaagaaaattgtatttagygtggatttactttgcatttcttgaatatgagctaagttgagagaatcttttaatatatattacataattataaatgtataaataaaagtattacatagtt

SEQ ID NO: 517658 - DNA, 201 bp, Homo sapiens
agtagtcccagctacttgggaagctgaggccggagaatggcgtgaacccgggaggcggagcttgcagtgagccgagacagagcccctgcactcctgcttgrgcgacagagtgagactccgtctcaaaaaaaaaaaaaaaagaaagaaaattgtatttagtgtggatttactttgcatttcttgaatatgagctaagttgag

SEQ ID NO: 517659 - DNA, 201 bp, Homo sapiens
ttactgaggtaaatgcctgggaaggacaaaatggggaggaggggaacacgaagagcctttggactacaatgcagttctaacacctgtgaaagagggaaggmagactcaggtaggaagaaaaagcttacacttttacacagtaaatggatagtcccagagcaaaagttgcagttatggacaagttatagtattcccaccata

SEQ ID NO: 517660 - DNA, 201 bp, Homo sapiens
aagccagggttatttacgcaagaattttactgaggtaaatgcctgggaaggacaaaatggggaggaggggaacacgaagagcctttggactacaatgcagktctaacacctgtgaaagagggaaggaagactcaggtaggaagaaaaagcttacacttttacacagtaaatggatagtcccagagcaaaagttgcagttat

SEQ ID NO: 517661 - DNA, 201 bp, Homo sapiens
tataacaaattttttagaagactttaaatcctcattcataattggtcttcataaaaataataatgcaatttaacatttattaagtagttgctgtataaaaractgctctgggtcaaacagtgggataaaataaagattagtaaaacacaccctttgctctcaataagtgtgtatgttgaaaacaaatatgtaacaacaaaa

SEQ ID NO: 517662 - DNA, 201 bp, Homo sapiens
aatcccagcactttgggaggccaagacgggtggatcatgaggtcaagagatcgagaccatcctggctaacatggtgaaaccctgtctctactaaaaatacraaaataaaattagccaggcatggtggcagcgcctgtagtcccagctactcaggaggctgtggcaggagaatggcgtgaacccaggaagcagagcttgcag

SEQ ID NO: 517663 - DNA, 201 bp, Homo sapiens
taagatgtcattaaatagatgttcttttttaaaacttgttagatttcaatattgaagacaagaagaagtgattctaaaattccagtagcatcatattgaayataaaattgagcaaatctaaaaatctgtaatctatggtaaaataatttttgcactggtttccatgatatagacctcttaatttactgtgaccaggacaat

SEQ ID NO: 517664 - DNA, 201 bp, Homo sapiens
gtagaaagatctcaaattaacaatgtaatatcacacctagaggaactagaaaaacaagaacaaaccaactgcaaatctagcagaagaaaagaaataaccamaatcagagctgaactgaacaaaattgaaacgtgaaaaagcatgaaagatcaacaaaccaaaagtttttcctttgaaagaataaataaaactaacagatct

SEQ ID NO: 517665 - DNA, 201 bp, Homo sapiens
tctctttaacagttttatgaagatagggaaggatttgtgtgcttgttcactgccagattccccaatacttataataaaggagtacctcaatatatatatakagagagagaggtgaatagatgcataaaatcaagtaagggatttgtttttttcatttaaaggatgacattcagagaagaataaatccttcttatgtcgttg

SEQ ID NO: 517666 - DNA, 201 bp, Homo sapiens
cttttttcaacaattttaatgaccatatgtgatcatatggaatgttaaggctataagaaaatgatactggagaaaacaatgtcaatgaaagactgtgagayacatgaagaaggagttcaaagagtagctccattttctttttcctcacttccctatactttggctcagctccttccttttttcaggctcacttccctaata

SEQ ID NO: 517667 - DNA, 201 bp, Homo sapiens
cctcgtatctaattaattaccaatcgcattacttttatctcctaaaactctttcaaatctctctagttctcttcatctccatgatcatcacccaactccarccctctatcatctctcccctagactactcaggtaactgtctgatttactcagaacctctgtgggagtccttcaatggattttttatactgaagccaaacg

SEQ ID NO: 517668 - DNA, 201 bp, Homo sapiens
ttttgatattatggtgttatcatgtcatcgcacccattatttcccaaaagttccatggttcctttacttgatttaaaaagtagaaagataggtgcttatgycaatattttaaaatgtactttcctacactgctagcttcaagatataggatgctgacttaatggcataaatattttatttctattgaatttttcatgttaa

SEQ ID NO: 517669 - DNA, 201 bp, Homo sapiens
caaaagtattttctttccttctgtatagacatgctcatatatttgaagtgtggccataaaataatgagcaatttttatgtgtgacctttgtattttgcccwtatctgtgtatagtccctgtagccaatgcaactagctatccacaaaattctgtgctcctccttgcattgtacagctttcttactgggaaatagctgtcca

SEQ ID NO: 517670 - DNA, 201 bp, Homo sapiens
agaatcacctgggggtatcgacgtagaataaatctatgaaatcttttggttttgttttgcttttggttgttatgaaagtttaactgaattatttttattcwtgccttatttaggatttttacctattaaaatttaattatgttaacttgtttttattaaagaagtctaacaacagaactgaaaagaaattaagatctttaa

SEQ ID NO: 517671 - DNA, 201 bp, Homo sapiens
ggagttcaagaccagcctggccatcacggcgaaaccctatctctattaaactacaaaaaaaaaaaatagctgggcgtggtggcaggtgtctgtaatcccasctacttgtgaggctgaggcaggagaatcgcttgaactcgggaggcagaggttgcagtgagccaagatcacaccactgcactccagcctgggagacagagc

SEQ ID NO: 517672 - DNA, 201 bp, Homo sapiens
aacagaactatctaccctgtcatctaaatcaaaaacatagaattgtcctggactcaaccccttgtttcacacactattctaatgtattaacaaatgtgttsactctaatcttaatgtgtctgcaatccacccacttctgctaccactatcctgctgacaaccgtggtcatgctaacttacttactgctaggacttcctcac

SEQ ID NO: 517673 - DNA, 201 bp, Homo sapiens
ttcttcctcacacagaaacattccaagcttctgttaagccccctcaccctaaaaccaatatatactcttagtctgtaagagaaagcactcctgaccaaaaytggccagaagtccgtctcaggttttatctaaagtaaacctgtctttactgccgagccacagttcatgtttcttttctctttctttaactcttacgcttac

SEQ ID NO: 517674 - DNA, 201 bp, Homo sapiens
ttctggtgaactacagaagggacgatactgaagaaaccaccctccctacaaaggaagcagaccgcagcactgactggataactttgggtaagtggtgggcwacccagataaagaatgggattgggttagaggctcaacttaggggagttagagtctctcccaagacagagtgggttagaggcacctcttaataaaaggcaa

SEQ ID NO: 517675 - DNA, 201 bp, Homo sapiens
ataaccatctcaactgagttactcgtggtgagtcatcatttatgttggcctaatgtagtctgagatagtctcactcatgtttatattttctggaagccccraagccacccttataaattgaaagagacacagtaatagagatagagaatgcaacaaagattctgtatcatcatagaactccaatcacagaataaattaaat

SEQ ID NO: 517676 - DNA, 201 bp, Homo sapiens
cccaaagtttgcttttgggctcatagaaaaaagatttttaaagatcaaacttgtggtttctttggcaatgtaattttctcaaaaactttagtaagcttctratctatttacagtcaattccatgttctgggaacttcacaagaagtactttcctagatataattctctggtctgatttaatcttttgctttcttgacatca

SEQ ID NO: 517677 - DNA, 201 bp, Homo sapiens; identical to SEQ ID NO: 263685
  misc_feature (1)...(201): n = A,T,C or G

SEQ ID NO: 517678 - DNA, 201 bp, Homo sapiens
agaggcatagacaaggtattcttctcaccattatagacttgcacaagctttaagaatgacaaaggccatatattgataaatattgtacgaatgcttcatayatgctaaagtaacatacaataagcatttcaaaatgtttcagcagaaaatattgcaagtggatggtatagaaggaaaataaggggagacagaaaaataaat

SEQ ID NO: 517679 - DNA, 201 bp, Homo sapiens; identical to SEQ ID NO: 263688

SEQ ID NO: 517680 - DNA, 201 bp, Homo sapiens
ttagagtttgatgatttcacaccaatgatattggaatacaaactaacataaaaactgcaacttactctatagtttaaaatatatttaactgccctgagagragatatattagaaaatgatgacactttgatttgccatagtcagtgtaagatctgctgtacctaatacatagctttacattgttatattccttcttttgtt

SEQ ID NO: 517681 - DNA, 201 bp, Homo sapiens; identical to SEQ ID NO: 263690

SEQ ID NO: 517682 - DNA, 201 bp, Homo sapiens
aaacagtggattctgaaaacctccaagccagaaaacactactaatgagatttgagaacacagaggggctctgagactgcatgtttgatttgaaaggagagagcacagctcaacggagggtcatgccaatattcctgcagtgtggcacaggtgcaaataaatgctgaggctctgaaaacagtcttctcatcgtttacggctc

SEQ ID NO: 517683 - DNA, 201 bp, Homo sapiens
tgtgttctttataacaatgtcaaacaattggcatcttcttagggtcactgcttaattttattagacagaacaaacctgatgtgagaaataattaacttcgrgggaaagcccctggttcaatgaagcctttttattagaacagtaaaacaattaagtttgttgtgccattgacgtgccttctctgatttctgatgagaaaaa

SEQ ID NO: 517684 - DNA, 201 bp, Homo sapiens
aagacgcatccttgttctagattatttctctatttgaaatgaaatcctaactcctgtgtccttgtcacctcctggaatccttccctgtttcctccccttgracaaactgaattcatctcctttatgccgcctgtgtactgagaataaccctctcgtagcacttatctgactcatgatctctcactagactggagcctcctg

SEQ ID NO: 517685 - DNA, 201 bp, Homo sapiens
  misc_feature (1)...(201): n = A,T,C or G
ctgtggtttagttaaataacaccagttccacagcacagttcaaatttcagtttccacagtatgttaactgtgagtaattgcacaaagtgcaagctttgccncttgatcttcagtctacaaatcactggaaaataacagatgcaccttcacaaccagtcactgatcacatcacttctttcaaagcctgtcagtattggaaac

SEQ ID NO: 517686 - DNA, 201 bp, Homo sapiens
gagaagcaaaagatgaattctgaatgaggaaatctggaagtctttagagatggtgttactttagctgggtcttaaaggacttcaacaggcagagaaagggrgaggatgtaagggcattccagacagagggaataaattggacaggagaagtaaagggttcaagaagaacttagatttgtggtaactttacctataattaga

SEQ ID NO: 517687 - DNA, 201 bp, Homo sapiens; identical to SEQ ID NO: 263719

SEQ ID NO: 517688 - DNA, 201 bp, Homo sapiens; identical to SEQ ID NO: 263723

SEQ ID NO: 517689 - DNA, 201 bp, Homo sapiens; identical to SEQ ID NO: 263728

SEQ ID NO: 517690 - DNA, 201 bp, Homo sapiens; identical to SEQ ID NO: 263729
  misc_feature (1)...(201): n = A,T,C or G

SEQ ID NO: 517691 - DNA, 201 bp, Homo sapiens
gcaatctcagttcactgcaatctccaccttctgggttcaagtgattcccctgcctcagcctccggagtagctgggactacaggcatgcaccaccaaacccrgctaattttttgtattttagtagaggcggggttttaccatgttggtcaggctggtctcgatctcctgacctcgtgatccgcctgcctcggccttccaaag

SEQ ID NO: 517692 - DNA, 201 bp, Homo sapiens
atccaaaatgcttaccacaatttgtaattatatatttgatgtaggcttggtgaacgcctgcctcccctaccagactctgagttccatgaggtcaggggccrtgtctatttgttcattactgtacactcacaaatgttttatgaatatatcaaataaaaaattctgcttcctatttaaagtcatacagtcagtcaataaata

SEQ ID NO: 517693 - DNA, 201 bp, Homo sapiens
ttgtagtttgcaaatattttctcccattatgtaggctgccactttactcagttgatggtttcttttgctatgcataacctgtttagtttcattagttcccrtgtgtcaatttttgatttttcttcagtttcttttgaggacttactcataaatgcttttccaaggctgatgactagaatggtgtttcctagtttttttttt

SEQ ID NO: 517694 - DNA, 201 bp, Homo sapiens
taataatgctaccaacaaaacatatctgatacatccatttctccccatttccactactaccatcccaggccagaccaccatcatatcttgcgtcgactacygcaagaccagacctaactggtctcccactctttctcctcctcccctcaacctttacggaagtagcttttgggactatgaggtttttccactgcactagga

SEQ ID NO: 517695 - DNA, 201 bp, Homo sapiens
ataaatctggtattaatagcagacaaaatgttccttaatctacaagtcattgctagacataaatgcaaatattgctagagatacaataatgtaaaaataayggatagaggtatcataaattattgctacataatagaaattatatgcagaatagttatatgtaattactcataattattaatggttaatagttggtggatg

SEQ ID NO: 517696 - DNA, 201 bp, Homo sapiens
gagtcccctcctccccattaatagccagtgtttccaattttgctaatgctttactgacatcacaagcaaagtgaaaatgactaaagacaatgcatgagtcycttgagcaagcatctgagaaacaaatagcaataactccttattagcatgacttttagccatggattataagtaatgagtaacagatgtctgatctggtgt

SEQ ID NO: 517697 - DNA, 201 bp, Homo sapiens
cggttgttctgcttaagggattcactggttttcacataggccagagacgtctgaatgggagtaatctgtgacacagtcaccacgctggttccggtgatggrggctccattctgtaaggagcggctctctacctggagttggttcctctcagggtcaccctgtgttgagccctgattccgcagctccttctgctgcttgaac

SEQ ID NO: 517698 - DNA, 201 bp, Homo sapiens
aatgtcatgacttcttcatctgaagaatcaagttcttatatttaaatgtgagtagtaatgaatcatttgattagaagcttatgtgtccaaagtagtcatgycctaatggcatggcacagaaggaaagtcaagtcctctgagtagtggcagatcacacacataaaaataggtaataatttttttaacttaaaaaagtctaag

SEQ ID NO: 517699 - DNA, 201 bp, Homo sapiens
atactagaagaagcattgtttcttaatgattaataatcattagctaaaatcacagagtttatcaaaaaaatgtattcatctttaaagcatctgtagggcastaatacacccctgaagcttttttaaaaaattactcttggctttcatcccacagtataatcttgaacagagaagcaacaatgttagcctcaaacatcccag

SEQ ID NO: 517700 - DNA, 201 bp, Homo sapiens
cttaccattttggccaattaatcaaatactcagtgtcacatctgcttaggacaagttacatacaaattagcctccactggtttctttgacacacatacatrgaaacacttctgtaaatattctcatgcatttcataaagtgatggtaattttttttgactgcttggagcaatcacatgtaaagaatttctcctaaaaatgg

SEQ ID NO: 517701 - DNA, 201 bp, Homo sapiens
tttctttataagtctcccaacaagcttaccattttggccaattaatcaaatactcagtgtcacatctgcttaggacaagttacatacaaattagcctccaytggtttctttgacacacatacatggaaacacttctgtaaatattctcatgcatttcataaagtgatggtaattttttttgactgcttggagcaatcacat

SEQ ID NO: 517702 - DNA, 201 bp, Homo sapiens
ttgttctgcttaagggattcactggttttcacataggccagagacgtctgaatgggagtaatctgtgacacagtcaccacgctggttccggtgatggaggytccattctgtaaggagcggctctctacctggagttggttcctctcagggtcaccctgtgttgagccctgattccgcagctccttctgctgcttgaacttc

SEQ ID NO: 517703 - DNA, 201 bp, Homo sapiens
aggcattccatgagtccatggatggtagttttggcagaagcactgcatgcaggataggcaaacctatacctggagtaagtgtctattccagtgaggacaawcctctgccctttccatgatggaagagttccaatataatcaacctgccaccaggtagcgggctgattacccagagtaatggtgccatatcgagggctcggt

SEQ ID NO: 517704 - DNA, 201 bp, Homo sapiens
tcagataaaatagatttcaagtcaaaaactgtcacaagagacaaataagctcattatttaatgttaaaggcatcaatttatcaagtatataacaactgtawatatatatgtacccaacattggagcatcaaaatatataaagcaagtgttaatggacttgatggaaaaaatgcatagagatgcaataacagcacaggactt

SEQ ID NO: 517705 - DNA, 201 bp, Homo sapiens
atcagataaaatagatttcaagtcaaaaactgtcacaagagacaaataagctcattatttaatgttaaaggcatcaatttatcaagtatataacaactgtwaatatatatgtacccaacattggagcatcaaaatatataaagcaagtgttaatggacttgatggaaaaaatgcatagagatgcaataacagcacaggact

SEQ ID NO: 517706 - DNA, 201 bp, Homo sapiens
agaagagtttttgccattttctaaagcacagtttcctttggcccagttgaaactccagggagttgtgaccctgaaggaaagataatctctgaagagacaaytgagtatttctagttgaggacagcatggtgtaagaatgggaaagtatgagagttcacagtcaattgatgatatcagagtggaaggagggacagtagaaga

SEQ ID NO: 517707 - DNA, 201 bp, Homo sapiens
tagaccttgaaagagctttgtgcgaggcagtctctagactctccttactctccaaagcagagccagtaggcttaaacacatgctaccattttgcagcttcyggtccccttcaaggacaccttgtgtttttgttttgttttgtttttaactttcttctacatatattaaatacactacctttatggaaggcagggagcaggg

SEQ ID NO: 517708 - DNA, 201 bp, Homo sapiens
ctgatgggcttttgaatgaactagtctttttcagagcctatagaaaaaaaagaaaggtcaccagagagttgtccgtataatttgactcattaagcacaagwtgtgaaaagtctctgaatcccaagacttttgaggagagaaaacaaaaagcacaaactcaaaataataaaatgtgacagatatatgatgagatgggtgcaa

SEQ ID NO: 517709 - DNA, 201 bp, Homo sapiens
aacaaactgtctaatcttgaagaaataaatttctagacacatagagcctaccaagactaaatcatgaagaaaaagaaaatctgaatagaccaataacaaayaaggagattaatcactaacaaaaattctcccatcaaagaaaagcccagaacctgatactttcactgcttactaattcaatctttctcaaactcttccaaa

SEQ ID NO: 517710 - DNA, 201 bp, Homo sapiens
aaagcaggatgttcattaaaaaccttccggtttagatgaacacagatatcagctctcatgtccttgggacagatggagaggacctaaagaaggtgagagaygaataagtgaaaaggaaagaggaaggggccacttcagaaaaacaatcatccaacaaatatttattgactatgactatgtctgctacactgctacacacct

SEQ ID NO: 517711 - DNA, 201 bp, Homo sapiens
gaagtgtcttacaagtctaaggagtcaaaggtcacaatttgggggtggcagagcaacttggagttggggaaatcctttaattgatggagtgataaacttcygcataatatacctcaaatccttcttgtggccaaaactgggcaggcatagggtgagacaataaggaatccagcagacagcaatggtaaagggctaaagaga

SEQ ID NO: 517712 - DNA, 201 bp, Homo sapiens
caaaaaattaaaaacataaaaatattttttaaatgagcaaaggacatgaacagatacttttcaaaagaagacatacatgcagccaacaagcatatggaaamattctcaacatcaatagtcattagagaaatgcacatcaaaactacaatgagataccatctcacaccagttggaatggctattcttaaaaagtcaaaaaac

SEQ ID NO: 517713 - DNA, 201 bp, Homo sapiens
gacattatgttaagtgaaacaagccaggcacagaaagacaatgcatgatctcacttacaagtggaatctgaaaaagttgaactcatagaatcagagtagawaggtagttaccaggtacttagaagtgggggaaatggggagatttgatcaaagggtatgaactttcagtgataagatgaataagttctgaagacctaatgt

SEQ ID NO: 517714 - DNA, 201 bp, Homo sapiens
ctatttatatgtatataaaaacaatgttacaggccttatatatatacaatttttaagacgtgtagaaaaaaagggtggaacagctttttagggggttaagsctctggctccctctcctttttaccttttttatgcaaattacccccagagagaaatatttcagaggactagcagtttttaagtattttaagtaataataat

SEQ ID NO: 517715 - DNA, 201 bp, Homo sapiens
tcatttcactatttatatgtatataaaaacaatgttacaggccttatatatatacaatttttaagacgtgtagaaaaaaagggtggaacagctttttaggrggttaagcctctggctccctctcctttttaccttttttatgcaaattacccccagagagaaatatttcagaggactagcagtttttaagtattttaagta

SEQ ID NO: 517716 - DNA, 201 bp, Homo sapiens
aatggaagagatgaggagaaatggaaatttagatctagcaagtataattggctattcatgaaggagagaaggaatagaaccaactctgaaccaaatacagwttcggaaacccaactgaatatacgtgaaaatttccactgtaggtagattcagaaggtagatggtaagaagcagtgagagaacattttgttggagcttcca

SEQ ID NO: 517717 - DNA, 201 bp, Homo sapiens
acctgccggagatgggcttcaggaatgatgtagtatcagggatggcctggatctaatgagtacagagaaaatgatcgagcagaggttgtatataacagcaraggacttccaaaaaacagagaccatgcagaacagctgggaagccaagcagacagtaagtagacctacaggttaaatagacagatattatagcaatgaacc

SEQ ID NO: 517718 - DNA, 201 bp, Homo sapiens
aaccctatgtgaaaagtttagacccttgactcaacctacataatgacacagtgcttgatcatttttacagtgctaatccatatatttaagggattggagaragatacctgccggagatgggcttcaggaatgatgtagtatcagggatggcctggatctaatgagtacagagaaaatgatcgagcagaggttgtatataac

SEQ ID NO: 517719 - DNA, 201 bp, Homo sapiens
catttcataagcatttcacaagtaagtagactcacaggcaacgataatttccatcctacatcctccaagcatttgaaaaatgactgtaaacaaaatatagrctgtttcactttgcagtttcatcagccaaatcccatttgatggaagtggtataaaatcaagctagtgaagcaacttaagatctttaatatactgctttta

SEQ ID NO: 517720 - DNA, 201 bp, Homo sapiens
tcaaataaacctcttttgtttataaattacccagtctcagatagtatctttatagcagtgtgaaaacagactaatacaatgacttcaccaaacaaactgarcaagaaaccaggcaccaatcccagagagacagagatatgtcacctttcagaagcagaattcaaaatagctgctttgaggaaactcaaagaaattcaagat

SEQ ID NO: 517721 - DNA, 201 bp, Homo sapiens
gaaacataaagtaataaaatgtatttggcttatggaggaacaggaagtctaacagaggtctcgaacattaaatactgggtgattgttaaaattcagatacygtttattaaagctacatccaaaagtacatacataattctaagatggtgactgcaattaaggaatttatattattactgtcatcaacctttcattttattt

SEQ ID NO: 517722 - DNA, 201 bp, Homo sapiens
tgttttgtgttaataggagaaaaaaaggcatttcctttgggaagactcagtattatcttaggcaagtgtagaagtgtttatttctgcaatttcaagcacaytgcattgctgtatatgaaattccttgccactaaacgttatacttagcttataagagggtgattctggttacaggaaaggggtcccgatccagaccccaag

SEQ ID NO: 517723 - DNA, 201 bp, Homo sapiens
attgcctaaagcaaactttcatgatagaaatgctgcaatctccacatcagtacagattttaatgccacaattatattagagaaagcattattcacataagkcacattaagacagaattaaatcacagtgattaatttgcttgtgggttaaagctgaattcaaaaatctataaaactaaatatgtggaaatgatagaaggaa

SEQ ID NO: 517724 - DNA, 201 bp, Homo sapiens
tttctgacaacaaatcaaatgtaaaaacattgagcacctattatgatttgggatactaaataaagacaaaaagaactgttcatatcttgagcatgaattaygaagagaagtataaccacataagtttgcatattatagattcgtaagtagataaactaaatgaaaatggagtgtctcagcacctgacaccacatttcacac

SEQ ID NO: 517725 - DNA, 201 bp, Homo sapiens
tccagctaatttttgtatttttagtagagacagggtttcaccatgttgtccaggatggtctcgctcctgacctcatgatccactcacgttgacctccccasgtgctaggattacaggcatgagctgccacaccctgcagaatctctttcttacataacaatttttccttttatttcaatctattcactatatttttctaca

SEQ ID NO: 517726 - DNA, 201 bp, Homo sapiens
aagcgatggttttccgctaagactctagtttagactcacctggggagctgtgaataaaagtataatgggcctcacccctagagattctaatttaaattagwttgggacagggtatatagatatctctttttctaagttccctgggtaattctaatgtgcagccagggttgaaaaccactgttctaggtcagtgattccaaa

SEQ ID NO: 517727 - DNA, 201 bp, Homo sapiens
acgcgccaccacatccagctaatttttgtatttttagtagagacagggtttcaccatgttgtccaggatggtctcgctcctgacctcatgatccactcacrttgacctccccaggtgctaggattacaggcatgagctgccacaccctgcagaatctctttcttacataacaatttttccttttatttcaatctattcact

SEQ ID NO: 517728 - DNA, 201 bp, Homo sapiens
taaaaattttaaaaagaagggctttttacctttagctttatttttaacatgcatatagtaaaatggttcaacttaacatagtggaaacattgatgaatttkatttagttaaactctttaaaatggtgtgtttttatttacattttaaaaattgcacccaacactttggccattgaaagaatctataaacagtaagattttt

SEQ ID NO: 517729 - DNA, 201 bp, Homo sapiens
tcccagccctttgggaggccaaagtgggaggatcacttgagcccagaagtttgagaccaccctgggtaacacagggagaccctatctctacaataaaattwaaaaaaaaaaatagatatgcatggtggtgcatgcccgtggtcctagctacttgggaggctgaggcaggaggatcacctgagctcaggaatctgaggttcc

SEQ ID NO: 517730 - DNA, 201 bp, Homo sapiens
tgcctcctgggttcaagtgattctcctgtctcagcctccgaagtagctggattacaagtacgcgccaccacatccagctaatttttgtatttttagtagasacagggtttcaccatgttgtccaggatggtctcgctcctgacctcatgatccactcacgttgacctccccaggtgctaggattacaggcatgagctgcca

SEQ ID NO: 517731 - DNA, 201 bp, Homo sapiens; identical to SEQ ID NO: 263896

SEQ ID NO: 517732 - DNA, 201 bp, Homo sapiens; identical to SEQ ID NO: 263899

SEQ ID NO: 517733 - DNA, 201 bp, Homo sapiens
tccctacctccatctgcacgcaaatgcttgggccaaaaccttgggagtcatccttcacacctcatccatgtcatccaatccattactagatcctaataatkctaccaacaaaacatatctgatacatccatttctccccatttccactactaccatcccaggccagaccaccatcatatcttgcgtcgactaccgcaagac

SEQ ID NO: 517734 - DNA, 201 bp, Homo sapiens
taaacatttctaacaatcaatataccacaaggatccctgacccaaatattctcccttctccgtaccaccaagtaagtttctgcaaaaaagctggtgagttycaattaggctactggttgcctgatatacaaactggtgacagtaatacccaccattctggatagttacggagactaaataaagtaagcagtctttataaac

SEQ ID NO: 517735 - DNA, 201 bp, Homo sapiens
tgaacctggaggacattatgttaagtgaaacaagccaggcacagaaagacaatgcatgatctcacttacaagtggaatctgaaaaagttgaactcatagawtcagagtagaaaggtagttaccaggtacttagaagtgggggaaatggggagatttgatcaaagggtatgaactttcagtgataagatgaataagttctga

SEQ ID NO: 517736 - DNA, 201 bp, Homo sapiens
ctggccacttttcttgtcacacaactgactggtttcatcttgggaataagggataagttgtcttcaggcctggtctaggccatacccagctcgcctaggcmtctggcagttatcgttcatgtgtgtctgacctagaaaactttgaggaacaggtggtttgggcttgtagcaggatttatttattcttggatcccttgctct

SEQ ID NO: 517737 - DNA, 201 bp, Homo sapiens
ttgcaataacatggatgaacctggaggacattatgttaagtgaaacaagccaggcacagaaagacaatgcatgatctcacttacaagtggaatctgaaaawgttgaactcatagaatcagagtagaaaggtagttaccaggtacttagaagtgggggaaatggggagatttgatcaaagggtatgaactttcagtgataag

SEQ ID NO: 517738 - DNA, 201 bp, Homo sapiens
atagccaagatatggaatcaacctagtgaccatcaacagatgaatgaataaagaaaatgtctatatatttttaagtattataaagccttgaaaaaaagaaratcctgctgccatttgcaataacatggatgaacctggaggacattatgttaagtgaaacaagccaggcacagaaagacaatgcatgatctcacttacaag

SEQ ID NO: 517739 - DNA, 201 bp, Homo sapiens
gacaataataatataactcaaagggtgacaaaaggataatgcaaataaagttacaaattataacgtgttacacaatggctgaaatatgactggaatgtacrgatgggactagaatgccccttccccaccccagcctcactccctagcttctccaggattctccaggaaccatgctttccaaaaggcagtgtgtcactgtgt

SEQ ID NO: 517740 - DNA, 201 bp, Homo sapiens
ctttattgaaaggaaaatagaattggattcacagaagcaatctatctctgttataatattgggcagtcatggtataacagaggacttttgcatttggaggwccacttacaaagtggataatttatggacaagtcgtatatcctctctgacccatagtttcatcagtaaaataaggacaataataatataactcaaagggtg

SEQ ID NO: 517741 - DNA, 201 bp, Homo sapiens
cttaagcatgcaggagacctgaaactcctgaggctaatgataaaaataatttatatttaaaacaagtaaacatatcctcccacagaagaaagaactgaacrtggactaaagtttacctcctggactttcattcccaaagaagtgaggtttttgcgggacactttgtatatctgtttactactacagaagattttaacttca

SEQ ID NO: 517742 - DNA, 201 bp, Homo sapiens
ctgacagacacaaagtgatgtctgtgaatgcatggctcaattgatggtccatgctccaaggactgatctgggtctagttttgctatttttaattatgatcycaggcttgcaacatgacatcatattttcggggtctcaatatgcactaactcttaagcatgcaggagacctgaaactcctgaggctaatgataaaaataat

SEQ ID NO: 517743 - DNA, 201 bp, Homo sapiens
ttaaggcatcacaccctcctagttggtgcagttgcccatctaatacaaaggctaacttagtcactaaaagattctctggaggggagctgtcttaggcactragccacaatctcaagtgagtgcaatgctatctatgccaaccttggaacactcgtcacttctccatgtttctcagaaattttaaacccagcttggaaagaa

SEQ ID NO: 517744 - DNA, 201 bp, Homo sapiens
ttgggcctgatgttgtacatgttatccctaatcaggaaaacttcatttcttccttcactgatcactcatcaggcaataagtcacagactcacaaagccgcrattcccaaggtcagaagtggcaactagaacacatgttccttaaattctaattcttggctgaaataattgcaaatttaaactcttcctaagtagtctagga

SEQ ID NO: 517745 - DNA, 201 bp, Homo sapiens
tgggagtgaggtgctttggaaaatcatctggctatattgtaacagttgaacatgcatatattcaaagacccaagaatttcacttgcagatatatatgcaasagaaatgtctgtatatatgcagcgaatcttgtgaactacagtgggtatagcatatatacagtgggtatagctccaaactgaaaattactcaaagattcat

SEQ ID NO: 517746 - DNA, 201 bp, Homo sapiens
aataacaaaagcaaccattagtggactcctactctatgctaggtattgggcctgatgttgtacatgttatccctaatcaggaaaacttcatttcttccttyactgatcactcatcaggcaataagtcacagactcacaaagccgcgattcccaaggtcagaagtggcaactagaacacatgttccttaaattctaattctt

SEQ ID NO: 517747 - DNA, 201 bp, Homo sapiens
  misc_feature (1)...(201): n = A,T,C or G
cgcaattcccccatttgcaaaatggtgtttaacttaattgcttaaaggacgtattgggagaacttggcacataggcattcccaaaacagttttctgcagangtgaatttttctacctaacactttttttaaatcacaaaaatatgcttttctcagctgatgttcaaaacctttcagctatttacaagactttttaaaagct

SEQ ID NO: 517748 - DNA, 201 bp, Homo sapiens
ttgaagaggtagttgcactcctttgttcattgcagcattatttacaatagccaagatatggaatcaacctagtgaccatcaacagatgaatgaataaagaraatgtctatatatttttaagtattataaagccttgaaaaaaagaaaatcctgctgccatttgcaataacatggatgaacctggaggacattatgttaagt

SEQ ID NO: 517749 - DNA, 201 bp, Homo sapiens
aagtcaggaactggtatataacaaatagaaatatgtgaaggcacaagaaatgccttcaaaggtgtaattatctgttaggtgataaaacactgaagggaagrttccattacaatcaaagagacacatttacattacaatcaaagagacacttttctcattatattctcttcatgccacagtgcagtaaagcccctccaaata

SEQ ID NO: 517750 - DNA, 201 bp, Homo sapiens
gaagaacagacaaccatcctgcagaaatcagagcaaaaaacaccctgaaacaacttcccaaccatttcactggctgttctgaaagacttgaatgagtcacractgacctggctcttggggttcaccagcctagttatgacctgatttcagaatggacaaagaaggacagatctttttatctaacagccttgtggagcaaga

SEQ ID NO: 517751 - DNA, 201 bp, Homo sapiens
gacataggaagaacagacaaccatcctgcagaaatcagagcaaaaaacaccctgaaacaacttcccaaccatttcactggctgttctgaaagacttgaatragtcacgactgacctggctcttggggttcaccagcctagttatgacctgatttcagaatggacaaagaaggacagatctttttatctaacagccttgtgg

SEQ ID NO: 517752 - DNA, 201 bp, Homo sapiens
aatcccttcacaccctgataatttttgtaacttttcattaagcatgcaattatttcaaaattaaactatcaaaaatgagaagaagaagaggaggaggaagraaaggaggaggaggaggagaagaagaggaagaagaggagaatcaggaaaacaggtgctggtaagttactattttcctcctcctttcttaaaacatcatta

SEQ ID NO: 517753 - DNA, 201 bp, Homo sapiens
cttggtcaacatagtgagacccccgtgtctttaaaaaaaaaaaaatatatatatatatatatataaaattgattatattaaaaatagttttcttctttaactatttttatcctttttggattctttctaatagagtacttttacatattttctataatgagttctaacaataattcattgaaatgtgtccttttaattggg

SEQ ID NO: 517754 - DNA, 201 bp, Homo sapiens
gcttggtcaacatagtgagacccccgtgtctttaaaaaaaaaaaaatatatatatatatatatataaaattgattatattaaaaatagttttcttctttaactatttttatcctttttggattctttctaatagagtacttttacatattttctataatgagttctaacaataattcattgaaatgtgtccttttaattgg

SEQ ID NO: 517755 - DNA, 201 bp, Homo sapiens
taatatattaagtatcaataatatgagctttgttagagattagttatcttaaaaaagagttaatatttagctcctctaaatggattgttcatacagtcaamtcttttttgaaacctttgctctgtccggtggtgaaacagtgcttgttttataaatttattatagataatactgaaagtataaaatatttatgtaatagtg

SEQ ID NO: 517756 - DNA, 201 bp, Homo sapiens
atggaattttagaagaaaaatgcacaggaaaagtctttacccttctttgtattcacagactaagtgatacacacacacacacacacacacacacacacacatatacatacatacatatatttgtatataagtttttcattttttcagtttagttattttctgacttcctatgctattttctttagggaggacagtgtaaat

SEQ ID NO: 517757 - DNA, 201 bp, Homo sapiens
tatggaattttagaagaaaaatgcacaggaaaagtctttacccttctttgtattcacagactaagtgatacacacacacacacacacacacacacacacacatatacatacatacatatatttgtatataagtttttcattttttcagtttagttattttctgacttcctatgctattttctttagggaggacagtgtaaa

SEQ ID NO: 517758 - DNA, 201 bp, Homo sapiens
agttttaaataatatattaagtatcaataatatgagctttgttagagattagttatcttaaaaaagagttaatatttagctcctctaaatggattgttcayacagtcaactcttttttgaaacctttgctctgtccggtggtgaaacagtgcttgttttataaatttattatagataatactgaaagtataaaatatttat

SEQ ID NO: 517759 - DNA, 201 bp, Homo sapiens
ctctgtctcccgggttcaagcgattctcctgcctcagcctcctgagcagctgggactacaggcacgtgccaccacgcccggttaattttgtttttttttttcagtagagacggggtttcatcatgttggccaggctggtcttgaactcctgacctcaggtgatctgcctgcctcaaccttccaaagtgctgggatttcagg

SEQ ID NO: 517760 - DNA, 201 bp, Homo sapiens
gttctttcttttaatgcccactgctactaccctagtttaggacctcattattatttgcttgtaccattaaaattcttaactgatgtctctgttctccaatmtatccctcctagatctgccatattatcttttaaaaatatatctcttccctcttgaaaaactgtcagtagcctcctgttctaaattcttaggtattgaaga

SEQ ID NO: 517761 - DNA, 201 bp, Homo sapiens
atttttacttgaggattcaaatggttttgttgggattattcaagacaggaaatggtaaattgggaattttacttagaaatatacttatcatgcataaaatycatactttaataacacttcagtcatagttctctgtttaagtgaaaatagactctataataatcatttttaggttgtattttacttgtttttttatcccca

SEQ ID NO: 517762 - DNA, 201 bp, Homo sapiens
aaaaatacttgttggtatcatgattaggtttataatcaaccaagtctcaagtaggaatggacaacctagccttttattgtgaccagtggaactgagccagktttcattaaccattgctggccatgtgttttaaacctactgaactgtaaaccacagacgtataggcacataccatactcataaaaggcatttatattgttt

SEQ ID NO: 517763 - DNA, 201 bp, Homo sapiens
tttaaaactgatcttattcacctatttctcattgaaaaataaagtgatcttaatttatctagaaatttacttaaactaagatttttttctgtccttggtcyttgtctcttagtaaaaaatgtatttaaaagtatcattgatggccaggcacaggggctcacacctgtaattccagcactttggaaggccaaggcaggagga

SEQ ID NO: 517764 - DNA, 201 bp, Homo sapiens
aaggcaggcagatcacttgaggtcaggagttagagaccagcctggccaacatggtgaaactccatctctactaaaaatacaaaaattaaccaggcgtgctygcttgaacctaggaggcagaggttacagtgagccaaggtcgtgacactgcactctagcctgggcaacagagtgagactctgtcaaaaaaaacaagaaaag

SEQ ID NO: 517765 - DNA, 201 bp, Homo sapiens
gcactttggaaggccaaggcaggaggattgcttgaggccaggagttcaagaccagcttggtcaacatagtgagacccccgtgtctttaaaaaaaaaaaaawatatatatatatatatataaaattgattatattaaaaatagttttcttctttaactatttttatcctttttggattctttctaatagagtacttttacat

SEQ ID NO: 517766 - DNA, 201 bp, Homo sapiens
aacatagtgagacccccgtgtctttaaaaaaaaaaaaatatatatatatatatatataaaattgattatattaaaaatagttttcttctttaactatttttatcctttttggattctttctaatagagtacttttacatattttctataatgagttctaacaataattcattgaaatgtgtccttttaattggggtgtatt

SEQ ID NO: 517767 - DNA, 201 bp, Homo sapiens
tggtcaacatagtgagacccccgtgtctttaaaaaaaaaaaaatatatatatatatatatataaaattgattatattaaaaatagttttcttctttaactatttttatcctttttggattctttctaatagagtacttttacatattttctataatgagttctaacaataattcattgaaatgtgtccttttaattggggt

SEQ ID NO: 517768 - DNA, 201 bp, Homo sapiens
tggaagatcagtttacgagagcctatgactttgagactgaagataagaaagatctgagtggatcagaggaagatgttattgaaggtgcagtacatctcatkttgggcagtgatgtccttcagttcatttgttttgaacccattgagactatcgtacaacttagtttgtaaagcattttcaggtatggtcttccctcccccg

SEQ ID NO: 517769 - DNA, 201 bp, Homo sapiens
gagcgcgagcgcaaccgcgtcaagttggtcaacctgggctttgccacccttcgggagcacgtccccaacggcgcggccaacaagaagatgagtaaggtggrgacactgcgctcggcggtcgagtacatccgcgcgctgcagcagctgctggacgagcatgacgcggtgagcgccgccttccaggcaggcgtcctgtcgccc

SEQ ID NO: 517770 - DNA, 201 bp, Homo sapiens
ccccagccgcagccccagcagcccttcctgccgcccgcagcctgtttctttgccacggccgcagccgcggcggccgcagccgccgcagcggcagcgcagascgcgcagcagcagcagcagcagcagcagcagcagcagcaggcgccgcagctgagaccggcggccgacggccagccctcagggggcggtcacaagtcagcg

SEQ ID NO: 517771 - DNA, 201 bp, Homo sapiens
agtgggctcctggcagaagggagcagcacacgcgttatagtaactcccatcacctctaacacgcacagctgaaagttcttgctcgggtcccttcacctccycgccctttcttaaagtgcagttcttagccctctagaaacgagttggtgtctttcgtctcagtagcccccaccccaataagctgtagacattggtttacag

SEQ ID NO: 517772 - DNA, 201 bp, Homo sapiens
gacccggcgcaagagagcgcagccttagtaggagaggaacgcgagacgcggcagagcgcgttcagcactgacttttgctgctgcttctgcttttttttttyttagaaacaagaaggcgccagcggcagcctcacacgcgagcgccacgcgaggctcccgaagccaacccgcgaagggaggaggggagggaggaggaggcgg

SEQ ID NO: 517773 - DNA, 201 bp, Homo sapiens
tcacacgcgagcgccacgcgaggctcccgaagccaacccgcgaagggaggaggggagggaggaggaggcggcgtgcagggaggagaaaaagcattttcacyttttttgctcccactctaagaagtctcccggggattttgtatatattttttaacttccgtcagggctcccgcttcatatttccttttctttccctctctg

SEQ ID NO: 517774 - DNA, 201 bp, Homo sapiens
aagcattttcactttttttgctcccactctaagaagtctcccggggattttgtatatattttttaacttccgtcagggctcccgcttcatatttccttttytttccctctctgttcctgcacccaagttctctctgtgtccccctcgcgggccccgcacctcgcgtcccggatcgctctgattccgcgactccttggccgc

SEQ ID NO: 517775 - DNA, 201 bp, Homo sapiens
agcatgacgcggtgagcgccgccttccaggcaggcgtcctgtcgcccaccatctcccccaactactccaacgacttgaactccatggccggctcgccggtstcatcctactcgtcggacgagggctcttacgacccgctcagccccgaggagcaggagcttctcgacttcaccaactggttctgaggggctcggcctggtc

SEQ ID NO: 517776 - DNA, 201 bp, Homo sapiens
cagaagggagcagcacacgcgttatagtaactcccatcacctctaacacgcacagctgaaagttcttgctcgggtcccttcacctccccgccctttcttaragtgcagttcttagccctctagaaacgagttggtgtctttcgtctcagtagcccccaccccaataagctgtagacattggtttacagtgaaactatgcta

SEQ ID NO: 517777 - DNA, 201 bp, Homo sapiens
gtgaggacatgacgagtgatgaggagcgcatggtcatctgtgaggaggaaggggatgatgatgtcattggtgagcattgcagggcccagaatcttgcccargacccagcaggccaaggctcagagggtgggcagaacttggatccaggcccctaggcccctttgttttcttttccacttggtttatggttgcatgtggcca

SEQ ID NO: 517778 - DNA, 201 bp, Homo sapiens
tgctccccaccgtttttctatctccagcccaggccacagccgccttccaggcccgctatgcagacatctttccctccaaggtttgtctgcagttgaagatycgtgaggtgcgccagaagatcatgcaggctgccactcccacggagcagccccctggagctgaggctcctctccctgtaccgccccccactggcaccgctg

SEQ ID NO: 517779 - DNA, 201 bp, Homo sapiens
caaaatggctcctgtgagggctgcaagctggagggtggtgcaggccttgggccacagggaggcgcctgtggaatagggggagttcatgcaccccttttttycccagaggggctggactcaggttagtttgggggtgggggctcctgcactttgccacaggcacggggagggttttctcctcaccccctctgccctcccaac

SEQ ID NO: 517780 - DNA, 201 bp, Homo sapiens
ggtccaccctgaggttaagccttgagtaatggaaacagcacttgagttagagctctgggctggtacatcttgactgcatgatcttgccacagtttattcartctctgaggctcattttttcacctgaacaatgggtgtaataaagcatacctccctaggtggctgtgaggattcaatgaaccagataatacatacaagctc

SEQ ID NO: 517781 - DNA, 201 bp, Homo sapiens
cgatggaccgtgagcgtgtgaggttgtacatctgtgtgagcaggtatgtgaggtgtgacagcgtgggtgtaagacagagggcatatgtgcccgtggggtgygtaggagataatgggtgtggcacgaaagtgtgtctgtatgtctgtgaggagtgtgagtgtgagtaggtgagggctcaggatgcctcgcccagccctacgc

SEQ ID NO: 517782 - DNA, 201 bp, Homo sapiens
aaggtgagggcctgcctttctctctacctgctggatgttggcccctgtaccccatcatttctttgtcttttttttcagtcttttctccttctccatgtatytggttctctgtcttgccatcttccgtgatgtctctgtgcatcctgactctctcaagtcctcagtgtctgtaccctcctccttctctgtgtccccacctct

SEQ ID NO: 517783 - DNA, 201 bp, Homo sapiens
cccctgggaccaaggcagcggctcccagcggccctgcacccaccaccagcatccgtttcaccctcccaccgggcacttccaccaacggcaaagtcctggcygccactgcacccactcctggcatccccatcctgcagtctgtaccctccgccccaccccccaaaggtgagacctgggccgggcagcactaggggaggggcc

SEQ ID NO: 517784 - DNA, 201 bp, Homo sapiens
tgcaggcacaggcaaggatgagcccagggaggtactgagtctggggaagccaaggggcagggacaactcagtggttcatgggggctgataagggaggatcrggtaggtttctcactggaggtgacatttgagctgaagtatgaggaatgagtagatttcagaatagtcaaagaaaggaaaaggcaattccacctgaaacag

SEQ ID NO: 517785 - DNA, 201 bp, Homo sapiens
gtcacctcgtacgggcccacgagctctgtagctctaggcttcacctcgctggggcccagcggccccgccttcgtgcagcccctgctctcaggtgaggggcrgcctggcaggcagtgctggggacccagggtggggctgaggcagtccgggccctaacttggtctcctgcttcttcttctctgtctttcagcaggccaagcc

SEQ ID NO: 517786 - DNA, 201 bp, Homo sapiens
cacagggaggcgcctgtggaatagggggagttcatgcaccccttttttccccagaggggctggactcaggttagtttgggggtgggggctcctgcactttkccacaggcacggggagggttttctcctcaccccctctgccctcccaacttgggttgtactttctaagaaggtgattccccctgcccttgcccccttcccc

SEQ ID NO: 517787 - DNA, 201 bp, Homo sapiens
aagagccaggatttgaactcagactgtgcggctccagatcccaggcccttaagcactttcaataataacaatgataacaataatacctactctactgagcraagactgtgtgcctaaccccgggcttggggccgtttcatcagctccgcctgatgctgtgaagtagattgccaggcctgttgtccaggggtagactgagga

SEQ ID NO: 517788 - DNA, 201 bp, Homo sapiens
tgaacggccaccaggtgggacagggagtgctgaccctgagcggccccctggagccacatgccctgagagcccaggacccggacccccacaccctttggggktggtggaatctggtaagggtccgcctcccaccacggaggaggaggcctccggccccccaggagagccccggctggacagtgagacagagagtgaccatga

SEQ ID NO: 517789 - DNA, 201 bp, Homo sapiens
ttgcctcttaacttccagcccagtcagtttctcccgtgcaggccccgcccccgggtggctcagcccagctgctgcctgggaaggtcctagtgcctctggcygcccctagcatgtcagtgcggggtggaggggccggccagccactgccactggtgagcccgcccttctcagtacctgtgcagaatggtgcccagcccccca

SEQ ID NO: 517790 - DNA, 201 bp, Homo sapiens
ctctgtggacaagtgagcatgggctggggccttggtggagcgtgttagggtggcgggagtgggagcagctgcaggctgaggcgggggaggtgaccctgccrgccctccagcagggtcctgtcagaagtggacttcgaagagcgctttgctgagttgcctgagtttcggcctgaggaggtgctgccctcccccaccctgcag

SEQ ID NO: 517791 - DNA, 201 bp, Homo sapiens
cagccccccactgcccccacctgctgaggagcggaccagcgccaagggccctgagaccatggtgagcgcctgcaggccgtggggctcccactgccacttgrctgtgcctctccattgacgtctttgcttttctgtcctactcttctttccatgcctgtgtgtctctcaggttaaagggtcccctctgtcccttctgcctgc

SEQ ID NO: 517792 - DNA, 201 bp, Homo sapiens
ggctcaggccagcggttggctagccagcaccacatgaacctctctccaggcctccttactttcaggagggctgccccccagggaatgggcctgctgcaacyccagagggcaggaatcagcaggaatgagatgctggactggtggtgggtggtggtttttttttttcaccaagtggcccagaaattccagcctgcttctgcc

SEQ ID NO: 517793 - DNA, 201 bp, Homo sapiens
gtgccatactcctccctgcggcgcaccctggaccagcgccgggccctggtcatgcagctctttcaggaccatggcttcttcccgtcaggtgagcctgtctyggagtcttggggtcactcgggtgggacttatctgtacatctcatcctgtgctccccaccgtttttctatctccagcccaggccacagccgccttccaggc

SEQ ID NO: 517794 - DNA, 201 bp, Homo sapiens
gtcataaacaagcaaatgacagagccagaatgtaaaccccagttcggcgggcccccagcaccatagttggggccactgcagctcgcaaacacccctgatgkgctgcttccacttattgaggttgtctggtgtgcctggcggtgttctggggcacatttttggagtgagcctatgggtatggcagttctgtgaggttagatg

SEQ ID NO: 517795 - DNA, 201 bp, Homo sapiens
ctacctcagcctcccgagtagctgagactacaggtgcacaccagcacgcctggctaatttttgtattttttatagagacggggttttgccatgttgcctakgctggtcttgagctcctgggctcaagccatccacctgtcttggcctcccaaagtgttagagttacaggcttgaggtactacacctggctcattgtgtata

SEQ ID NO: 517796 - DNA, 201 bp, Homo sapiens
ggagttcaagaccagcctaaccaatatggtgaaaccccgtctctacaaaaaatacaaaaatcagccgggcatggtggcatgcccctgtaatcccagctactcgggaggctgaggcaggagaattgcttgaacccaggaggcagaagttgcagtgacctgagattgcaccagtgcactccagcctgggtgacagagtgagac

SEQ ID NO: 517797 - DNA, 201 bp, Homo sapiens
atatggtttacacagaacagggtatacaggatgggttgggagctgagggactatcacaagtgctttgattggctttgggcatttagatgacacccccccccatcattacaggtgacttgtcattcaaattcttcctgatttcatttcagagattaaataactgtgagggggcccgtcagggtaggggctagagggtatatg

SEQ ID NO: 517798 - DNA, 201 bp, Homo sapiens
ggcaccccatcagggtggcccagagctggtgagtgacttccagatggaagacagcctggggcaccaccatcctgccagtcacccctgggccaggcacaggkctccttggcctgtcttgaattatgacccattttttccacccagtggccatggctgacattggccttctccctgccatcactgccatggtgtgaattcagg

SEQ ID NO: 517799 - DNA, 201 bp, Homo sapiens
gcggttggtggaggatgggctgtacggggcgcccgagcccaacggctcctggacgggcatggttggcgagctcatcaaccgggtatggctggactggggcygggaaagatgcatggacccggcgagtgagggagggcgggcagctgggcagccagtcgaacctcagaagcagcctggctggtggcagaagaggaaggagcc

SEQ ID NO: 517800 - DNA, 201 bp, Homo sapiens
tgtgttttccaggcctcggaactgggaatgacctcagcgttttacaagtacatcctcaccaccatggtgtgtatgccctctggcccatctctgcccccacytccttcccatcacagctgtcccattagggcttagccccaggcctcaccacctcttcctggtcccaggacttccccatcctgcatctggacggtattgtgg

SEQ ID NO: 517801 - DNA, 201 bp, Homo sapiens
ctgctgtctccaagcctccgtcctggtcccagactggctctttctgttcctctgagcctcatcctctgcctgcggtgggccttggccctgtccccaccccrtccagtctctatctcctggatatgtctttccgcttttgagcccccatttcctgtgtctcttgggcccctctctgactctgcccaacttctctctttgctg

SEQ ID NO: 517802 - DNA, 201 bp, Homo sapiens
acctgccaacgtggtgaaacctcatctctactaaaaatacaaacattagtcaggcgtgctggcaggtgcctgtaatcccaactactcaggaagctgaggcrggagaatcacttgaacccgggagtggccaagatcacaccactgcactccagcctgggtgacagagtgagactctgtctcaagaaaaaaaaaaaaattaca

SEQ ID NO: 517803 - DNA, 201 bp, Homo sapiens
ggacctccccctgtggtaagggtgccaggcctttaagcacccactgatatgtcactggacgtgggctgctcttggggagagtcaggactttgggtgagggracgctcttctactgacagagctgagagccatcagccacctacaccctgggcagctgaggcaatgagtgccccactcctgaaacagagtctgggtagccac

SEQ ID NO: 517804 - DNA, 201 bp, Homo sapiens
agggaagttatttgagggtttgagggtggcagctcaggggcctttggggctcctctgcctaggcagcctcttatccatcccacccccgcctctgtcccacygcagctgtcagccgccctgatgtttgacgccgtgcacgtggtggtgagcgctgtccgagagctgaaccgcagccaggagatcggtgtgaagcctctggcc

SEQ ID NO: 517805 - DNA, 201 bp, Homo sapiens
atggcaatgacatttacagggagaacactggaggaggagctggagcgtgaaggataggcggagtttggccttgccctgctgtgggatagccgagtgtgccragctgcacaggaatagtcaccaccgtcatcacaacagcagcagctgtcatttgttgatttcacaccatgtgcgaggaacttttcaagtgttacttaacat

SEQ ID NO: 517806 - DNA, 201 bp, Homo sapiens
agcacagagctgtctgggctgtgattggggagctcagaggacggtcccagaggaggttcctgacccagtcagatatcccagtagggcttcccagaagagaygatacccaaactgattcccaaaggtcatgaaggagttagcaaggtgaagggggtgtgggagaaggggagtgtatttggagcaggggaaatagcatctaca

SEQ ID NO: 517807 - DNA, 201 bp, Homo sapiens
tccatgttcaacacgtcccaccccttctaccctgagtttgtccgcagcctcaacatgtcctggagggagaactgtgaagccagcacctacctgggccctgyggtgagcacacagatacccagtcacacccagaaacactctgcacagatacttctggggccccctttcagacctcactcagatcatgctcagaaccctctc

SEQ ID NO: 517808 - DNA, 201 bp, Homo sapiens
gttagccagggtggtctcgatctcctgacttcgtgatccacccgccttggcctcccaaagtgcagggattacaggcgtgagccaccacgcccagccgggartcagtatttctaaggtttcactctgaccatggcccccatccctcccaactctcccttggtcacttggtgcgatgagtcctctgacctccctgtttccatt

SEQ ID NO: 517809 - DNA, 201 bp, Homo sapiens
aggtggctcctaggctgtctctgcagccattgtcctcaacttttccctaggtcctcctttcctcacgccctcctggccagaaaaccacaaaacctcagatytagccagtagcttggctttgcctgccttcccccaaccccagctgcaccaggcgcacatgcgaccccttatccatgcctccagcctctgtcttacctccag

SEQ ID NO: 517810 - DNA, 201 bp, Homo sapiens
tccctcgttgggtttctctttctccccaggctctgtttgttgtggggctccagggctcagtccttagactgcttctcttctcggtctttctccactacttsaatgatcccaccagccaaatggctcttaagacccactatgtgctggtgattcttgtgttagttatctattgctatcataacaaatgaccttaacagcttt

SEQ ID NO: 517811 - DNA, 201 bp, Homo sapiens
tgcggtggcgggtgcctgtagtcccagctactccggaggctgaggcaggagaatggcgcgaacctgggaggcggagcttgcagtgagccgagatcgccccmctgcattccagcctgggcgacagagcaagactccatctcaaaaaaaaaaaaaaaaaaagaaaagaaaaaaagaaaaaaaaagatgtttttaaatatttat

SEQ ID NO: 517812 - DNA, 201 bp, Homo sapiens
accatgtgcgaggaacttttcaagtgttacttaacataattttcatagcagtccttcatggcctgaggatcactgcccagtgtgagatctggagtccccartgcacagggctgcagccaggtgtgtctgacttaaggcccgtgccctttccagccctccagctgggaacttgggaagctcggagtacactgatggagtggc

SEQ ID NO: 517813 - DNA, 201 bp, Homo sapiens
tttcactattctctctcttccatgccccgtatctgatctcttagcagatcctattggctccaccttcagaatatatccagaatccagacctttctcaggtygctctggtccagccatccctatctcctgcccgggttattgtcatagcttcctccatgagctccctgctcttgccttggcctccctacaatctgttctcaa

SEQ ID NO: 517814 - DNA, 201 bp, Homo sapiens
ggccgaggctggcggatcacctgaggtcaggagttcaagatcagcctggccaacatggtgaaaccccatctctactaaaaatacaaaaattagccgggcakggtggtgcacacctgtaatcccagctactcgggaggctgagatgggaggatcgcttgaacccgggaggtggagattgcagtaagctgagattgcaccact

SEQ ID NO: 517815 - DNA, 201 bp, Homo sapiens
ctgtttctggctgccaggtgagtccactgcctactgggaaggaaggggctggaggaggcacgagccgaggcctctgggaccgacctgcctcttctctctcrgaactgtccttggcctcccctttggggcctcggattccctgtgccctcctttctcagttttgtgccctgtgtctgagtctcattcttccccttgtggctc

SEQ ID NO: 517816 - DNA, 201 bp, Homo sapiens
ggtggaggtgcactcaccgggccccccaggtgggtggtgggcacagtggctgtggggatgacttggacctggcctggacagtttgtccatctcctctctcycctctacctttggctctgtcttcctttgatcaccttgcattctcctgggttgagggagacttcctggaggatgggaagggctcggggaaaggaagcggct

SEQ ID NO: 517817 - DNA, 201 bp, Homo sapiens
tgggagccagacagccccaggacctcagatgggccggtcaggctcccaggtccctggtagggcaggggctgggtgtgaggctcaggccaggggtgtctccrggtctcactccctctccccacagggccgcaagcctggctacttctccttcctggaccccttctcccctgctgtgtggctcttcatgcttcttgcctacct

SEQ ID NO: 517818 - DNA, 201 bp, Homo sapiens
tacaggagcacgccaccatgcccggttaagtggtttttttttttttttttttttgagacggagtcttgctctgttgcccaggctggagtgcagaggtgcgmtctcggctcactgcaacttctgcctcccaagttcatgccattcccctgcctcagcctccctagtagctgggactacaggcgcccaccaccacgcctagca

SEQ ID NO: 517819 - DNA, 201 bp, Homo sapiens
ttttttgagacggagtcttgctctgttgcccaggctggagtgcagaggtgcgatctcggctcactgcaacttctgcctcccaagttcatgccattcccctrcctcagcctccctagtagctgggactacaggcgcccaccaccacgcctagcaaattttttttgtatttttagtagagacggggtttcactatgttggcca

SEQ ID NO: 517820 - DNA, 201 bp, Homo sapiens
tctgaccgagtacctctgttcccaagtgcccaggggtggggtccggggaccctaatagaggggaggaggccaggctgtgatggaccctctcctgcgggtcyagttctttgacccaggccaggtactgtacacgtatgagtcgccggccggctacgggctcattggactgcaggtggcggcctacgtgtggttctgctatgc

SEQ ID NO: 517821 - DNA, 201 bp, Homo sapiens; identical to SEQ ID NO: 148497

SEQ ID NO: 517822 - DNA, 201 bp, Homo sapiens; identical to SEQ ID NO: 148507

SEQ ID NO: 517823 - DNA, 201 bp, Homo sapiens
aggtgcgatctcggctcactgcaacttctgcctcccaagttcatgccattcccctgcctcagcctccctagtagctgggactacaggcgcccaccaccacrcctagcaaattttttttgtatttttagtagagacggggtttcactatgttggccaggatggtctcgatctcctgacctcatgatccgcccgcctcggcct

SEQ ID NO: 517824 - DNA, 201 bp, Homo sapiens; identical to SEQ ID NO: 148501

SEQ ID NO: 517825 - DNA, 201 bp, Homo sapiens
gaaccctatccttctccagcagaccacaaggtctgaaatgaaggggaaccagaaagggcaacaggcatgacccagtgtcccagcttctgactccagggatstacaacgtaccccgtgtagggagtgggcccagccaccgagggaggggacaggtccccatcctttgcctcagaggctgacataggtacagactcgctcacc

SEQ ID NO: 517826 - DNA, 201 bp, Homo sapiens
aagctacatgcagccagtggctatcatacagtgcaggacgctgaccctaagcaatcagtgacagctcagtgatcaggcctctgatggaggaagcacaggcsgagttttgttgaagggaaaaggtgagggtccagggcatttggagagcccagaggggacgcctaatccagtgtgaatggcttcagggaagtgtggtggatg

SEQ ID NO: 517827 - DNA, 201 bp, Homo sapiens; identical to SEQ ID NO: 148510

SEQ ID NO: 517828 - DNA, 201 bp, Homo sapiens
tggttagctgaaactttgaaagaggattcattcttcagaggcaaggaatcggagtcctatgtctttctcgcgccttgaaggttacttagctaaagctaagrtagcgagaaacagtacttttcaggtccttccatgatctacattcgtccttgttctcggaggacccagactctatggttaatgatgaagaggggcctctat

SEQ ID NO: 517829 - DNA, 201 bp, Homo sapiens
taaaagcgttatccatgaaaggaaaaattgattaattggaccttatcaaaattaagaacttatgttctttaaagacactataaagagaataaaaagacaamccagcatattttaaaaactcttgaacaacctaaaaaatcctgtatctaggctgggagcggtggctcacgcctgttatcccagcactttgggaggccaagg

SEQ ID NO: 517830 - DNA, 201 bp, Homo sapiens
ggcctttctgtcctcagtcaagctatggctgttatcaaagagaagattgaggaaaagaggggtgtgttcaatgttcaaatggaggtgagatcaatagattyatttttaataatgactcaggaggttcctaaaaggagttcttgtaggtaaataagagctgtcggccttggaatgtcatattgtaggatggtcattcaggcc

SEQ ID NO: 517831 - DNA, 201 bp, Homo sapiens
agaggaagcaatcaaatgtgaagacaaattcacaaaatccaaaactgtaagttgatctttgagtcaaattagtccactatctgtgtgtttaataaataatwtgaaatcttaatttcatactgctactaccttaaagtattgcttatgatctaatattctcaaattagtactagaagtgttttgaagccgttttaggttaaa

SEQ ID NO: 517832 - DNA, 201 bp, Homo sapiens
ttttcaggtccttccatgatctacattcgtccttgttctcggaggacccagactctatggttaatgatgaagaggggcctctattcgttcagcgcttgcgsatgcgaggaggttccgcatgcgcggtggagtgagcgaagcgcacgctgaggaggatcggcggccggtgagggggaagcaagtctggtctctgtgattgaa

SEQ ID NO: 517833 - DNA, 201 bp, Homo sapiens
ccgagtggattgtacagcctctacaatatgccgaaagtgagaatgccatgacgatggggcggtctcaggagaacgctgtgacaccgtaactcttaaccccrgctcaggacgctgagcactttgctttttccaggcttgagaattccatcttttcttccgccccaacagctctaccaaaaatttcccctgcgtctcagtgga

SEQ ID NO: 517834 - DNA, 201 bp, Homo sapiens
gtatttaaatgttctaacagatcagaacatgaaatgccctcctaaatgtcagctgttgtcacacagtagctccaacactttgagcatttttaagggagtgrcctcatttcactagagacaaatctttaagaatagttctaaaattgggcttgtgatttccatttctgatgtctccagattggcacccctttctagttcaat

SEQ ID NO: 517835 - DNA, 201 bp, Homo sapiens
aaaacaagacaaaccagttcttaataatgttcaaagttggacccatagagacatgctaagcactacatcatgctaagaagaacagttattactcagctgcyatacttcagccattctacttttacaccaagaacaaaatggctagagatttttttaaaaatacaaatgccagtaccttgccgagacttgttcactgatttg

SEQ ID NO: 517836 - DNA, 201 bp, Homo sapiens
gtagaattggcaattacgttttggggtgatttgttaatacagcagattaataaaatctcaagcatcctaatagttgtgggttctgtaggtacattcataawtgaatttttgtctttctcttttagattaatctaatagctcctcctcggtatgtaatgactacgacaaccctggagagaacagaaggcctttctgtcctca

SEQ ID NO: 517837 - DNA, 201 bp, Homo sapiens
tctggagaaggaaaaggaagaaataggggaaagataggcatttgactacctttcatttggataattgaaaattattagttctctccagtaaggtaatggartatatataattacctgataataaaaatttatttctgaaaacaattcagaatctctcatcttgtacagattgagtatcccttatccccaaatccaaaatgc

SEQ ID NO: 517838 - DNA, 201 bp, Homo sapiens
gccaaggcaggaggatcacttgaggccagtgagctgtgatcactccagtgcactcgagcctgggtgacagggcaagaccctgtctcaaaaaaaaaaaaaamaaccaaaaatcttgaatctcccatcaaagccttttcattaaaaatacaatttcatctactccctactgtacctttcactgatgtcaagtggctatcaatt

SEQ ID NO: 517839 - DNA, 201 bp, Homo sapiens
agaaaacaggaatctttctgaccttggattaggcaaagatttcttagatagcacactaaaagcgttatccatgaaaggaaaaattgattaattggaccttrtcaaaattaagaacttatgttctttaaagacactataaagagaataaaaagacaaaccagcatattttaaaaactcttgaacaacctaaaaaatcctgta

SEQ ID NO: 517840 - DNA, 201 bp, Homo sapiens
tagatcagtatttcactgataccacgaggaaaagaacaaacaaaacttaaaagtattcatacaccttgctaacctaaaagacagcagggacaagatacatrtgaggacaaggtatacacccagttctgaataacttgaagaacaggcttggcaaagaagtaagtttatccaaatcttgaatttctgccaggcatggtagct

SEQ ID NO: 517841 - DNA, 201 bp, Homo sapiens
tacggggtttttttgtttgtttaaatagaaatgaggtctttctattttgtccaggttggtctcagaccctgagcttcaagtgatccttgagcctcagcccyccaaagtgctgggattacagaagtgagccaatgcacttggccaaaatacagttcttgattttcaaccctgttctgggatgagggtaacggagacaaccag

SEQ ID NO: 517842 - DNA, 201 bp, Homo sapiens
ctggagaaggaaaaggaagaaataggggaaagataggcatttgactacctttcatttggataattgaaaattattagttctctccagtaaggtaatggaawatatataattacctgataataaaaatttatttctgaaaacaattcagaatctctcatcttgtacagattgagtatcccttatccccaaatccaaaatgct

SEQ ID NO: 517843 - DNA, 201 bp, Homo sapiens
tttactatgaataacataccatcaacagtattcctttacttaccctttatgttgcaaagagacttgtgcctcctgaagaaatagtattcatagtcatatcscttcaggattctcttacatgattgcccatgttttttaaccatcaaattaagccttgcttcccctaaaagcatcacctttactgtttggagaagcttggta

SEQ ID NO: 517844 - DNA, 201 bp, Homo sapiens
tgaggaaaagaggggtgtgttcaatgttcaaatggaggtgagatcaatagattcatttttaataatgactcaggaggttcctaaaaggagttcttgtaggyaaataagagctgtcggccttggaatgtcatattgtaggatggtcattcaggcctttgatcactaatggtgttagggtcaccccccgtccccagccagggg

SEQ ID NO: 517845 - DNA, 201 bp, Homo sapiens
aataactgactatgcagggtatttgaaattagcctggagtttggttgatatattttgaaaggtggctgatactttttacatcagaacacataagagtattmtagcatgttgtgatattgaggttctgtgggttaaagacattctggatttgatgtcggattacttgagtttagctcctacgctagtacttattaagcattt

SEQ ID NO: 517846 - DNA, 201 bp, Homo sapiens
tggcttaagaatgcctttaagcagttttctgccctgggcgggccaggtgttccttgccctcattcctgtaaacccacaaccttccagcttgggcgttaggrccattatggacatgtcgcagtgctgcagagattttgtttatggccagtcttggggccagtttatggctagattttagggggctttctcccaacacaaagt

SEQ ID NO: 517847 - DNA, 201 bp, Homo sapiens
tcgtgattctctcctcagggagtaataataacaacttgtatttgtatagccgttttccatttatagtgtgtggtttctatatatttgatctatgcgagcaytctgtagtaaggagagatgctagtttcttctttttccagaggaggaaacaagttcagagatactgtgttactgtcaagacttgatccaggtcttaggacc

SEQ ID NO: 517848 - DNA, 201 bp, Homo sapiens
atggctgtaactcagaaggattcttccatcagtttagttcagagacaaattatccattatactgatgataattgcagttagtttagccaccaaagatacayggaaatgataattctttctattcagtatcgcagtgaactgtttatactattgcattagatccctgtgttgatttgcttttgctacattaacaaatcaccc

SEQ ID NO: 517849 - DNA, 201 bp, Homo sapiens
gccaccaaagatacacggaaatgataattctttctattcagtatcgcagtgaactgtttatactattgcattagatccctgtgttgatttgcttttgctayattaacaaatcaccccaaaacgtaattgccaattctgtaggaccctaaattactgtcctgtagaattggcaattacgttttggggtgatttgttaataca

SEQ ID NO: 517850 - DNA, 201 bp, Homo sapiens
gctaaaacaaaaaatctatattctctttttttgggggatggagtctcactctgtcgccaggctggagtgcagtggcacgatcttggctcactgcaacctcygactccctggttcaagcaattctcctgtctcagcctccagagtagctgggattacaggcacacaccaccatgcccagctaatttttgtatttttggtaga

SEQ ID NO: 517851 - DNA, 201 bp, Homo sapiens
agacatttaaggcagaaataagatgagtcataataaaatttcagaaagttaaggaggtaggccaggcacggtggctcacacttataattccagcaatttcrgatgctgagacaggaggatcgcttgaggtcaggatttcaagaccagcctggcaatatagggagaccccatctctataaaaattttaaaaaattagctggg

SEQ ID NO: 517852 - DNA, 201 bp, Homo sapiens
agagaaacttgaactttgtagtaatggagattaaagctattctcaagattaggtatacctattcaataaaagaaaggaatatttgggagtattggggatargagaagctagacattgtgaattcaaggaaaaagaattatgagaggaggatgcattttagtttattttgtgattaaaatttttttagtttttgttgttttg

SEQ ID NO: 517853 - DNA, 201 bp, Homo sapiens
gaatcggagtcctatgtctttctcgcgccttgaaggttacttagctaaagctaagatagcgagaaacagtacttttcaggtccttccatgatctacattcrtccttgttctcggaggacccagactctatggttaatgatgaagaggggcctctattcgttcagcgcttgcgcatgcgaggaggttccgcatgcgcggtgg

SEQ ID NO: 517854 - DNA, 201 bp, Homo sapiens
atcctaatagttgtgggttctgtaggtacattcataaatgaatttttgtctttctcttttagattaatctaatagctcctcctcggtatgtaatgactackacaaccctggagagaacagaaggcctttctgtcctcagtcaagctatggctgttatcaaagagaagattgaggaaaagaggggtgtgttcaatgttcaaa

SEQ ID NO: 517855 - DNA, 201 bp, Homo sapiens
tcattcttcagaggcaaggaatcggagtcctatgtctttctcgcgccttgaaggttacttagctaaagctaagatagcgagaaacagtacttttcaggtcyttccatgatctacattcgtccttgttctcggaggacccagactctatggttaatgatgaagaggggcctctattcgttcagcgcttgcgcatgcgaggag

SEQ ID NO: 517856 - DNA, 201 bp, Homo sapiens
aaccaaggaaggatgtataaatatgattaaggtttctggaaatagatcctttgagatgtgacagaaaagactgaatttatttgtttaataaacctagagawagttgaagggttcaaaatgggcataaaataatgactaagaaatgaggattttattattatatattcacataggtagggttcagtcagtcagtgaacatat

SEQ ID NO: 517857 - DNA, 201 bp, Homo sapiens
tttcagaactaagttgagtaatataggggatatatatttgtgaaaaataatttttacttatatttttcagaggatttgacacgataagcctcatctgatgraagagaggaataaataattcacctatatgtgtttgaggttgtgacagacttataaaatctttttaaaaaataaagctataatttatattaagttctgtgg

SEQ ID NO: 517858 - DNA, 201 bp, Homo sapiens
ttcggctgtgaaaccatctggtcctggactttttttgattggtaaactcttaattattgtctctatttctgagcctgttattggtctattcagagattcawcttcttcctggtttagtcttgggagggtgtgtgtgtcgaggaatttatccatttcttctagattttctagtttatttgtgtagaggtgtttatagtattc

SEQ ID NO: 517859 - DNA, 201 bp, Homo sapiens
ttctcgaggagtatcttagtggcgttctctgtatttcctgaatttgaatgttggcctgccttgctagattggggaagttctcctggataatatcctgcagagtgttttccagcttggttccattctccccgtcactttcaggtacaccaattagatgtacatttggtcttttcacatagtcacatatttcttggaggcttt

SEQ ID NO: 517860 - DNA, 201 bp, Homo sapiens
tgaggaggcagtctgtcggtgttcagatctccagctgcgtgctggaagaaccactactctcttcaaagctgtcagacagggacatttaagactgcagaggytattgctcttttgtttgtctgtgccctgcccccagaggtagagcctacagaggcagtctggcctccttgagctgtggtgggctccacgcagttcgagctt

SEQ ID NO: 517861 - DNA, 201 bp, Homo sapiens
aaaaattagccagtgtggtcgcatgtgcctgtagtcccagctactcagaaggctgaggcaggagaatcacttgaacctgggaggcagaggttgcagtgagkcgagatcatgccactgcactccagcctgggtgacagagtgagactccatctcccaaaaaaaaaaaaaatatatatatatatatatatatatatatgtata

SEQ ID NO: 517862 - DNA, 201 bp, Homo sapiens
cttgaacctgggaggcagaggttgcagtgaggcgagatcatgccactgcactccagcctgggtgacagagtgagactccatctcccaaaaaaaaaaaaaawatatatatatatatatatatatatatgtatatttatattttgtaaatatgttttcctagagtgtggtttgttattttattttttaatgatgtttcttgaa

SEQ ID NO: 517863 - DNA, 201 bp, Homo sapiens
tgttacaaacactatcatcagtcaattccagagtatttgcttaagaggatatcctccttcgagatctttattactaaagattcttcttccgtctttattawtattattattattattattattattattattattattatttgagtctatttccttctctagataagcttttctaagtctgggaacatctcttgttcattt

SEQ ID NO: 517864 - DNA, 201 bp, Homo sapiens
gaagttataaattttgatgaagtcagatttatgaatgtttttcttttaaggtaatttttgtgtcctatctaaggaaccttttccttcccccaagtcacaamgatagttctcctgtttagaaactttgtagtttttgcatttatagttgggttcctgatccatcttgtattaatttttatgtatggtatacagtacctgttt

SEQ ID NO: 517865 - DNA, 201 bp, Homo sapiens
tataaattttgatgaagtcagatttatgaatgtttttcttttaaggtaatttttgtgtcctatctaaggaaccttttccttcccccaagtcacaaagatarttctcctgtttagaaactttgtagtttttgcatttatagttgggttcctgatccatcttgtattaatttttatgtatggtatacagtacctgtttgggtt

SEQ ID NO: 517866 - DNA, 201 bp, Homo sapiens
tttccccccaggtatgggtattacctaaagttgcatggttttctgtggttcttctcactacatttttacttttaaagccttatttctttatcaattatatracaacagtaacaaaaacagaaagggctttagttttgtgccgtacttttcaaagtcaggaaaatgtacctgaattacttaatggtatttttcaagactcag

SEQ ID NO: 517867 - DNA, 201 bp, Homo sapiens
tatctgctctgttggtgattttaaaaatttaaaaaacatatcaatgagtgtaagtcattgttctctaagttctgccccagctttaggcttgagaaccatgrcatctatctcatgagttttttccgagggaaagatagatggaatgttggaagggcagtttgtgtgtcatttatgaactttgtcttatcgtacttatggcaa

SEQ ID NO: 517868 - DNA, 201 bp, Homo sapiens
atggtgggaagaaggtttttcttgcttctccttttccaacgttagtcataggaggacctgtgtgcctgaggatcaggatggtgctttcttagtgttcctayttctttcccagaggccaacaatttgtatctgttacttcagggtacaggtggcttttctgtccctccccagactcgcaactgaagtttgtcttgttttgtt

SEQ ID NO: 517869 - DNA, 201 bp, Homo sapiens
gaatgttactaatgagaatggactttttagtatacgcctaaagtcaatataatgaagtgttttgaactgcctgtggtcctagatttctaatatgtctgttrttatactaataagatcttaagactgaagagcattttatagtattcagtgaacttgcatgtaaatatgcactgtggatattattaattcccttcttttttt

SEQ ID NO: 517870 - DNA, 201 bp, Homo sapiens
cacgccattctcctgcctcaggctcccgagtagctgggactacaggcacctgccaccacgcccagctaattttttgtattttcagtagagacagggtttcmccgtgttagccaggacggtctcgatctcctgacctcgtgatctgccttccttggcctcgacctcccaaagtgctgggattacaggcgtgagccaccgcgc

SEQ ID NO: 517871 - DNA, 201 bp, Homo sapiens
tggactatttcaactgtctcctggccgaggactgcttcaagcttaattaacatggatactgcttactaccgcccactcctcccaaccctccaaaaaaaaamccccaaattcagaaaacaaaacaaaaaatagtcttccccttttaaccatgatacttcctgcttaaacttctttggtggtttcttgtgtcttccaccaatg

SEQ ID NO: 517872 - DNA, 201 bp, Homo sapiens
caagtagctggattacaggcacctgccactgtgcctggctactttttctatttttagtagagacggggtttcaccatgttggccaggctggtctgaaactmctgtcctcaggtgatccacctgcctcggcttcccagagtgctgggctcacaggtgtgcgccaccacacccagacaacaatgactaattaataacagtagt

SEQ ID NO: 517873 - DNA, 201 bp, Homo sapiens
tgaacatcaaggctccaaggtaaagttacatttaaatgatatttaatatcttaaggctaaattttattcagttctttattctcttaaagtcctacagcctrcaagcatgaagccaacaggatgtaaaacaacctaaaaccccctttgagataacagatttattaaacaattgtcttaaatgctaaaattgaagtttgaaga

SEQ ID NO: 517874 - DNA, 201 bp, Homo sapiens
tagttgctctttaaaaagtaaagtgaacaattgactaaaattttgacgagaatattcttgataaaataaaatctgctaaaaatatgtcattcagagagaaraaggatgtcattctgatttttaaaaacaaaaaccataaaaatatttttggaaatggataatgactgaaaatttgggcttcttcagcagatttttctgttt

SEQ ID NO: 517875 - DNA, 201 bp, Homo sapiens
ctgactatagaatttgaaaatctagatacttcggtattaagttggctctacttttaaaatttatcttgaatttacccacttctctccacctcttatcatcytaggataattgccatcatttctttagtggactatcacagtaacattccacctggtgtctctattcatctgtgtaccccataatctagtctataagccttt

SEQ ID NO: 517876 - DNA, 201 bp, Homo sapiens
ggaatgcttccagtttttgtccattcagtatgatattggctgtgggtttgtcatagatagctcttattattttgagatatgtcccatcaatacctaatttmttgagagtttttagcatgaagtgttgttgagttttgtcaaaggccttttctgcctctattgagataatcatgtgttttttgtcgttggttctgttaatat

SEQ ID NO: 517877 - DNA, 201 bp, Homo sapiens
aaaatttatcttgaatttacccacttctctccacctcttatcatcttaggataattgccatcatttctttagtggactatcacagtaacattccacctggkgtctctattcatctgtgtaccccataatctagtctataagcctttgggtggtttcctaaataaatgaatgatggtaaataaacaatattaaacaaatcag

SEQ ID NO: 517878 - DNA, 201 bp, Homo sapiens
catcaatacctaatttattgagagtttttagcatgaagtgttgttgagttttgtcaaaggccttttctgcctctattgagataatcatgtgttttttgtcrttggttctgttaatatgctggattatgattattgatttgtgtatgttgaaccagccttgcatcccaggaatgaagcccacttgatcatggtggataagtg

SEQ ID NO: 517879 - DNA, 201 bp, Homo sapiens
ctacatgtgaaaagatagaatagcttttaaaagatatttttttgatcacagcccattaaaaatgttctttaattttatattttattataaaattcttaatrtaaatctagaatagctgcaaggaatcttagcaatacagttactcatgcattactaatgctttggtgtagaatataaaaggtattctagtatattctcctc

SEQ ID NO: 517880 - DNA, 201 bp, Homo sapiens
tttccatgtagttgagtggttttcagtgagtttcttaatcctgaattctagtttgattgcactgtggtctgagagacagtttgttatcatttctgctcttytacatttactgaggagtgctttacttccaactatgtggtcaattttggaataggtgtggtgtggtgctgaaaagaatgtatattctgttgatttgggttg

SEQ ID NO: 517881 - DNA, 201 bp, Homo sapiens
aacagcacaactaatggctaatacttctaatgtgaggaatttaattcatctttaaaatgattataaataagtagcaatatgaaaataataataagaggtaktaagttccttcatttttctaacagggtcaacatatttcactggcacctattcacaagcttgaagaagctctgtatgaataccagccactgcagatagaga

SEQ ID NO: 517882 - DNA, 201 bp, Homo sapiens
ttagttttgttagaaactaggaagctgtcttccaaagtggctataccatttcacattcccaccagcaaggaatgagagtccctgttgctccagatctgcaycagcattttatgttgtcattggagttttgccattctaataggagtgccttagaagtagtggaagtgataataaagatgaatcagacctagaaactgccct

SEQ ID NO: 517883 - DNA, 201 bp, Homo sapiens
agtggtgtggtaagtcatttgtattttatgctatttaatatgagacaccattgggtcatgaacaagggtgagaaatgagctaattttcattttaaagataygattttggctgttctgtagagactacatttggaggaagaaggtgggtaagtgttggggataagtagtcgaagtaaggagaacagttgggaaatcttagca

SEQ ID NO: 517884 - DNA, 201 bp, Homo sapiens
tgcaccaccacacccagctaattttgtatttttactacagacaaggtttctccatgttggtcaggctggtctcgaacttccgacctcaggtgatctgcccrcctcaccctcccaaagtgctgggattacaggcttgagccaccatgcccactctatactttcatgtttctaagtagtggccttttgttaaagtctgaagaa

SEQ ID NO: 517885 - DNA, 201 bp, Homo sapiens
tgaggcaggagaatggcatgaaacctggaggcggaacttgcagtgagccgagatcgcaccactgtactccagcctgggcgacagaatgaggctccatctcaaaaaaaaaaaaaaaaaaaaaaaaaaaaagtcaataaatgaaagctgcttctctattcaaagttagggattgttggttcatatcttcttttccacactcca

SEQ ID NO: 517886 - DNA, 201 bp, Homo sapiens
agatttaacttctatagatctgagtcactttctaaattgttactggaaacagtaattgtaaattagctgagtaaatgtgcctttgctaatatgaacactcmtaaaatttcagagcacttcacagtttcaaagcatcatttcattgattcttaactacaattctaggagataagcaaggcaagtataattattgctgcattc

SEQ ID NO: 517887 - DNA, 201 bp, Homo sapiens
agttgaaccagtgaacagacctcaaagttttttttttccctgattcattactagataatttgtgtcaataaatatccatgcaagtaaatcttagtcttttyggaacaagcgaaggcacattggtcatctcataaattaggattgagattctacggctgaggatctggtgcttcttcattctattttgtttgtttgcaaact

SEQ ID NO: 517888 - DNA, 201 bp, Homo sapiens
gatttatgaatctacaacagccttttcttattatggaatgttaatattttttgtaaagtgtcctccataatgtgaatatttagtttgacatgaaatgcttrtggaaaagacataatttaaaataaaagtcttgttgtttttagttttccctttttacatttcttattgaacttgaactattcttacaggagagttctgatc

SEQ ID NO: 517889 - DNA, 201 bp, Homo sapiens
ttccagctacccgggaggctgaggcaggagaatcgcttgaacttgggaggcggaggctgcagtgagcagagatcacacctctgcactccattctgggcaayagagcaagactctgtctcaaaaaaaaaaaaaaaaaaaaaagacattgtgtggtaaaatgattatgatattctttttttttccttcccttacattatggta

SEQ ID NO: 517890 - DNA, 201 bp, Homo sapiens
atttaatgttaaatcctacccccatagtactggtctcaggaaaggtatgtggcctgttcagggttgttataaattatcaggaacaatatacaagaagtgcytaaattataaaattttataaacttataaaacttcaaattgtcaagattttggtaagcgaggcactttaatttcactttctagaactcataattttctagg

SEQ ID NO: 517891 - DNA, 201 bp, Homo sapiens
aatattatttgcaaacatcaaaaaattctaaacttaatatctttcctccttctgaacaaaacaaagaccttagaatgcttaaactcaggcttcccctcccttttttttttttttttttttttgctgtttttgttgctactttgtcttattgttattgttgtttttggctcatctttgctccttacatcctgcttttcccat

SEQ ID NO: 517892 - DNA, 201 bp, Homo sapiens
gattttttaagtctttgagtttagtctgctttcagtaaaaataaggtataggtaccaaaataagcaaacctcgtttttactttcctggtttctgcttatamgatttacacatatttaaaataaacccatgaaaaacaggaatagtgtcatgggattggctaaatagtcagagcaattacctccaggctcccaaacccaact

SEQ ID NO: 517893 - DNA, 201 bp, Homo sapiens
aaccattaactagttttcagaatggttttgctttttagtgatagttgtgtgagcgcactgttgctctggttgtttttaaatctcactgaggtaggcttcargttgttaatgtaaatctttatagctttggctgaacttcctacaagagctgtgggtcttgatagctgagatcagctggctgatctctcttaatggcagtta

SEQ ID NO: 517894 - DNA, 201 bp, Homo sapiens
actgcctgtggaagtttgttacatttttgtttggacttcatgaagccatatgttttttgttttttgttttttttaagatggagtctcgctctgtcgcccargctggagtgcagtggcgtgatcttggctcgctgcgacctccacctcccgggttcaagcgattctcctgcctcagcctcctgagtagctgggattacaggt

SEQ ID NO: 517895 - DNA, 201 bp, Homo sapiens
ttttgttccataaaaaattagtttttgcaaatgagtccaattaggaacaaaatatatcaagaataaactttggattttttcctcttctttacttcctgttractaattgtagcgggttctctccaaagcatgttcttggcgtaggaaaactgtgtggcctgttttgaacctaaggatgacaggtggaaataatttttctct

SEQ ID NO: 517896 - DNA, 201 bp, Homo sapiens
ccaatcttttctggaaacaccttcacagacgcacccagaaataatgttttaccagccatcaggagatcctttagcccagtcaagttgacacataaaattcyatatgataattagtactttgaagacaaataaaggataaaaggatggatagtgattggagtagtgtgctatttttggtgattgaaatcttttgtaagatgg

SEQ ID NO: 517897 - DNA, 201 bp, Homo sapiens
cgctctgttgcccaggctggagtgcagtggcatgatcttggctcactgttcagcagttcttttacttttgttattcatttggttgtcagttagcaaatagytatgaagtgcctactgtgtgccagttactgttctgggtgctgagaaaacagtagtgagccaaacagaggagtaaatgtctactatcatgaagcttaaatt

SEQ ID NO: 517898 - DNA, 201 bp, Homo sapiens
ttcatagccagaaagaagtcagccacttatggtagctcacacctctcattccaggattttgggaggctgaggcaggcagatagcttgagcccaagagttcragagcagcctgggcaacatggcaaaaaatacaaaaattagctaggcatggtgatgggaggtagctactcaggaggctgaggtgggagaatcacctgagcc

SEQ ID NO: 517899 - DNA, 201 bp, Homo sapiens
tttctctcaattcttccagatttaaaattgcgtatgataaaactgaatagacttttgcctttatacctaaatgagcctggattttcaacagtgattatgayaaattgatgttctgaaataagttggccttttgagaagaaaaaaatgaaattatagatcaaactggtcatttgagtctgtttgatggctttactcaacaaa

SEQ ID NO: 517900 - DNA, 201 bp, Homo sapiens
gccattttatctgttaaagaaacagcaagataagatgatttcaaaatttccttccagttttaggattatctgttaaagaaacagcaagataagatgatttyaaaatttccttccagttttaggattctgtgttacttctcttactataatctccttacccatgattcttctcacttattttacaaagcatttaaaatttat

SEQ ID NO: 517901 - DNA, 201 bp, Homo sapiens
ctgaggttggatctggtagatgttgaggatggtgagagttgtgaaagatcattggatttggttgcttagaggatggcctattaaatacaagaggtagattktgagtggttggtaaagatagtggaatcaccattttaactaaggatcagaggtaactttttgagagtgctgcttgtctggagcctccctctgactgttttg

SEQ ID NO: 517902 - DNA, 201 bp, Homo sapiens
gctactctggagactgaggcaggagaatcgcttgaacccgggaggcagaggttgcagtaagtccagattgtgccactgcactccagcctcggcaacaaagygagactctatctgaaaaataaaaattatgtaaaattgcaagcctagatttattttttagttagtttgaaaatcagatttccaaatggatcctggacactt

SEQ ID NO: 517903 - DNA, 201 bp, Homo sapiens
ggatttcagccacatcaactaccctgcattctgatctctgcctatttggcttagcacaatcactattcccttgttaaactcttgcttgctgggccatggtyatggcaattgttgccatatagaaagctgaggtatttgtagggctcaccttgtgagtttcccatctctcagggatgtcctgtcctgcctgttgtctaatgc

SEQ ID NO: 517904 - DNA, 201 bp, Homo sapiens
tttctttacacatgaaatttttggtccaaatgatatttaaccaactaactggctaatctattaaagcattctatttcagaaaagcttcatttttggtaccrttgattgcattagcacattacttctgatagtgggcatagattatttttttttctaaagtgatgttttttccaaagtgatattgtggttttactcttggaa

SEQ ID NO: 517905 - DNA, 201 bp, Homo sapiens
taaaaagcaggatatatatcaattggggtttggtcaggaaagcaaaaaccaccctagatatttcaagccatgaagaatttacttcaggcaattacaggctkacaaacctgttaggaagggctagacagtaatgtaagagaaactgccccattcagaaagtcagaaagaacaggaattgttgaaaaactgctgctgctgatt

SEQ ID NO: 517906 - DNA, 201 bp, Homo sapiens
atggctgagaagacaaatgcagttgccctaaggcttgaataaccttggcatgttggaaggaaagaaagaagagaggggtagaatgataggaatgaagctgragagttaggtaggggtcaggtcatgtagtatcttcagtggtgtggtaagtcatttgtattttatgctatttaatatgagacaccattgggtcatgaacaa

SEQ ID NO: 517907 - DNA, 201 bp, Homo sapiens
tgctcttcatattcttatgtaacttggtttttatgttttttttttttttttgctaagcattgtttctgagagtcagtcgtattgatgcatgtacatagctrtaacttatttattttcacttctgatagtattccattgtatcaataacaagtttatccattctcttgtcaatggacatttggttgtttctgttgttctttt

SEQ ID NO: 517908 - DNA, 201 bp, Homo sapiens
aatgtaccagatgctttacataaattttcatgtttcatctttcaaaacactaataaggagtgcatatggtagttctgtttttaattttttgaggaacttcygtactgttttccatgatggctttacaatttacattctcattaacactgtactaggggttctctgttctccacacccttgcgaacccttgttatatattgc

SEQ ID NO: 517909 - DNA, 201 bp, Homo sapiens
acatgtgcacagtgcacagcctcccccattattaacatcctgcaccagagtggtacattgttacaatcaatgaacctacattgagatatcattatcacacraagtctgtagtttacactaggattcatttttggtgctgtataccctatgagttttgacaaacgtataataatgtgtatctaccattatatcatacagagt

SEQ ID NO: 517910 - DNA, 201 bp, Homo sapiens
cttgtttgaccatggattatttagaggttgttgttctaatttaattccactttggtttgagggcatgctttgtatgatcccaatttttaaaatttaccgtkacttatgttatggccaaatatattttttattgtggagaatgttccacaagtacttgaaattttattctatatttgggaagaatgtgttagatgttagtta

SEQ ID NO: 517911 - DNA, 201 bp, Homo sapiens
taatttcacttaggatttaagtttgcctatttctgggctctatttaatggaaaagttaaaatcagtagtaaactgtctagtttgctaataaacagtgtttyttaaactgttttgaacatactagtagagctctacatgggatatcaatttgaccgcttacttttcagtagattcataccataagaaaccaagataatttag

SEQ ID NO: 517912 - DNA, 201 bp, Homo sapiens
aatagcagtgagataggtgttgggttttaatgtttgagagcttcaaattctggctctgtgagttatgcttttgggacttgggcaaataaccttattcatgyttggaataaccttacagtgtattgtttgtgagaataagataatataatgaaatgctcaatctttgagcagccttcttagatgttgtcaaatgcaaagatg

SEQ ID NO: 517913 - DNA, 201 bp, Homo sapiens
aatattcatactgtttgcatgtatgttttcatatatcttggatatatacttaggaatgaatgctggatcatgtaacaaatttgtatttaacttttcagaarctgccaaactgttttataaagtggctgtacattttacattcctactggcatgagggtttccattttccacatcctcagcaatgtttattattgtcatttt

SEQ ID NO: 517914 - DNA, 201 bp, Homo sapiens
agggcccggtaatttgaggtggaggaaactaatatgaactttacatttcatttcaatattaattccaagccagtgtgctttaaggattgtcacaaacataytatgactggacaggaagagtgcttgcctcttggtcttgagtgacaagccctgccctctgcccctagctgagaactcaaagcattgttaagtagcactaaa

SEQ ID NO: 517915 - DNA, 201 bp, Homo sapiens
ttttttctatttagagctataataagaaaaaataaattgagacagtggtttttaatttgaaaaagagaaatgaaatatttattcatctacttttaaaatgragaaacaataatatgtatgtgaaatctttcttctgtactgtaaaactagctacacaaataacatcaccctcccttgactctcaaaataaaatactaaacc

SEQ ID NO: 517916 - DNA, 201 bp, Homo sapiens
attagcttctattcctttttcttcacggctattgtaccaacctgattcattgggtatgaatgagacctgcttcatctgaaaacttttaaaatagtaattcrcttttatggttcttttcttactttttaaaggaagagacttgtattatctgattatgatttgcatttattattgctgttacctttgcttctaaattaaaat

SEQ ID NO: 517917 - DNA, 201 bp, Homo sapiens
agtaaattattacaataaaatgttttaatttatatttttacaggacccttaaaaaagcagattcaatttattattggactttgtttacttctcccgtatcrtggtagaattcagtagatcccgtggatcttatttaaaattgtctccattgggaaatgaaacctcattgtatagctcaggttaactgagaaaacaatagat

SEQ ID NO: 517918 - DNA, 201 bp, Homo sapiens
ctaactggttcttgctgttatatatgaaaactattaaatgtaattttctacataatattttactgaattctaatagtttctatacctagttctattaggtraatatctgggtttttatctaggagtcagtcagctgaaaaaaaattttttttcttttcaatgctatatttgtgactttaggtttatattttattgtatttt

SEQ ID NO: 517919 - DNA, 201 bp, Homo sapiens
tttgacggagtctcgctctgttgcccaggctggagtgcagtggcatgatcttggctcactgttcagcagttcttttacttttgttattcatttggttgtcrgttagcaaatagctatgaagtgcctactgtgtgccagttactgttctgggtgctgagaaaacagtagtgagccaaacagaggagtaaatgtctactatca

SEQ ID NO: 517920 - DNA, 201 bp, Homo sapiens
aaccaggagaaccagggaagttcatagtataactcacgctgaatccaaaggcctgagaattaagggagccagtgatgtgactctcagtttgaggttgaagkcctgagaatggagacttagcgggggtggaggtgaaagtcatggagtatgaaggcccaagaaccttgagttatgatgtccaaggacagagtaaatgtccca

SEQ ID NO: 517921 - DNA, 201 bp, Homo sapiens
aaagcattctatttcagaaaagcttcatttttggtaccgttgattgcattagcacattacttctgatagtgggcatagattatttttttttctaaagtgawgttttttccaaagtgatattgtggttttactcttggaagaaagtacaagttttctgtgggcctaagtattaaaaatgttttttaaaaacttgaaattgtt

SEQ ID NO: 517922 - DNA, 201 bp, Homo sapiens
gattttcgctctgttgcccaggctagagtgcagtggcacgatcttggctcactgcaagctctgcctcccaggttcatggcattcttctgcctcagcctccsgagtagctgggactacaggtgcctgtcaccacgcccagctaattttttgtatttttagtagagagggggtttcactgtgttagcctggatggtctcaatc

SEQ ID NO: 517923 - DNA, 201 bp, Homo sapiens
agaaatgcaaattaaaatcacaatgagatatcatttcacatctgttagaatgggtattatcaaaaagatgagataagtgttgatgaggatatggagaaaarggaatccttgtatgctgttggtgggaatgtgaattagtacagccattttggagaacagtatggaagttcctcaaatactaaaaacagaactaccatatga

SEQ ID NO: 517924 - DNA, 201 bp, Homo sapiens
ggattttcgctctgttgcccaggctagagtgcagtggcacgatcttggctcactgcaagctctgcctcccaggttcatggcattcttctgcctcagcctcyggagtagctgggactacaggtgcctgtcaccacgcccagctaattttttgtatttttagtagagagggggtttcactgtgttagcctggatggtctcaat

SEQ ID NO: 517925 - DNA, 201 bp, Homo sapiens
tatctagggctacggaatatgaaaagaaaatagaatctcaccatttgttgcctcttgctttgtttcagcctccttacccaatgtaggtgttacttcctggyagttttattaatagcttagtctctcctgtccttgtgtttgaaggcatgcagtgtagctgctttgctaatttgtgatgggtttagcatcagattttttgga

SEQ ID NO: 517926 - DNA, 201 bp, Homo sapiens
gaaacatatacagagaaggtgaggaataggtttaggggatgaactacaaggagatcttgattctgggattaagattctgactgagctatgattaaaaaaawatatatatatatatacacacacacactgcatatatatgtgtgtgtgtgtgtgttgctccaagataaagtaatttgaaggtgtggacaacatggggcccat

SEQ ID NO: 517927 - DNA, 201 bp, Homo sapiens
ttgttgttgttgttttgagacggattttcgctctgttgcccaggctagagtgcagtggcacgatcttggctcactgcaagctctgcctcccaggttcatgscattcttctgcctcagcctccggagtagctgggactacaggtgcctgtcaccacgcccagctaattttttgtatttttagtagagagggggtttcactgt

SEQ ID NO: 517928 - DNA, 201 bp, Homo sapiens
ctgcaaggtagtctcttagattttgatctttcattggtaattccttgcaatttactgattctttacaggtacattacaatatttacagattttcttgatcyagtattttttagactatgtcatgaaaaatggaggagtcgcttcaattttttgtgttttggaaattagtgaatcccttagaagtaaataataccataattt

SEQ ID NO: 517929 - DNA, 201 bp, Homo sapiens
cagctctgcataccagagcgggagaggagttgcaagacacatttggacagctctcatctccctacaactgagtcaacagcaggagggtatttcttggagcrctgtggtaacttttccatgaagcaggtcttcttccttaggaaggcttagttgttgcctttatcccctcatttgttacagttaacatctatagcctgatgt

SEQ ID NO: 517930 - DNA, 201 bp, Homo sapiens
ttattgtttgtataacttctgcaaggtagtctcttagattttgatctttcattggtaattccttgcaatttactgattctttacaggtacattacaatatwtacagattttcttgatctagtattttttagactatgtcatgaaaaatggaggagtcgcttcaattttttgtgttttggaaattagtgaatcccttagaag

SEQ ID NO: 517931 - DNA, 201 bp, Homo sapiens
attgtacgatttctacaaatttgtgaattttctagtttttcttccattattggttgctaacctcatcctgttatgattggggaagatactttgtatgataycaattttttaaaaatttattaacacttaaattatggcctaaaatatggcctgtcctggaaaatgttccatgtgcactttagaggaatgtgtagtgtattt

SEQ ID NO: 517932 - DNA, 201 bp, Homo sapiens
aggtgtgagacactgtgcttggtcagatttttcttgttttttaatgttagcactcatagctataaattttcctcttagtactcttttgctgtgtcccatamgttttggtatggcttgttcttgtttttattcatttccaactattttctaattttccttgcgattttttttgaaacattggttatttaatagtgtattgta

SEQ ID NO: 517933 - DNA, 201 bp, Homo sapiens
gatctcctgacctcgtgatccgcttgcctcggcctcccaaagtgctgggattacaggcgtgagccactgcgcccagccttttttttttttttttttttttkgaaacaaggaggaaaaggaaagtttatagttatagaaatattctttgtagttaagatgtgaaagtgggctttattgttaaataagctattttttaaaaaa

SEQ ID NO: 517934 - DNA, 201 bp, Homo sapiens
aaatagacatatatgtatgtgtatatacatgcatacacagcacacatgtccacacatatttaaattattagaacattaccaaaacagaaatagtcattcasaattacttcaattgattttctaaaaggctgcttggagatactttctttggaaatagtcactagaattacagtagtttaaagctaccagaatgaaatattc

SEQ ID NO: 517935 - DNA, 201 bp, Homo sapiens
tgggagcaaagggcgttgttagtttcaacactggggaggaaaatgggaaaagaaggcgttgtgactttaaatagactgtagccgctagccccgagcggctytggcctgctttgaactgcgggttctcagtgtggcatccagcagtttgtcaggttcccccttccatagccaatgagtatcccgactgtatttccaggcttt

SEQ ID NO: 517936 - DNA, 201 bp, Homo sapiens
aggcaggagaatcgcttgaacttgggaggcggaggctgcagtgagcagagatcacacctctgcactccattctgggcaacagagcaagactctgtctcaaaaaaaaaaaaaaaaaaaaaagacattgtgtggtaaaatgattatgatattctttttttttccttcccttacattatggtattttgtcagtaatttttctat

SEQ ID NO: 517937 - DNA, 201 bp, Homo sapiens
caaaagatgacagtgcacccagagaaaagtctcagaaagctattcaggatgaaatccgttcagtcatcagacagatcacagctacagtgacatttctgccrctgttggaagtttcttgttcatttgatctgctgatttacacagacaaagatttggttgtacctggaaaatgggaagagtcgggaccacagtttattacca

SEQ ID NO: 517938 - DNA, 201 bp, Homo sapiens
cctgtaggccctgtccctcatttgtctttttactgtttactttacattttgaaagaaattagagaaaaatcatttatatggggaaaaatgaattatacttrccatgaaattgtgtgctaccaggaagttattaccatgcagctgctgcagtgatgacaggctgacatcaccctataatgaccagaacagcatagtataaaa

SEQ ID NO: 517939 - DNA, 201 bp, Homo sapiens
atcatttcttggtctcattttaaaatgtgaactattgaatgaaaggctgatccagaaactgttgttgcttaacaaaagaaaatagtggaaagaatatactrtgaaaaaaaagtgggtaaatcgagtccaagaaactaaaaagcaatagaaaaagtcagagaccccaagaacaaaaacaagaaagatgaaacaaataataaa

SEQ ID NO: 517940 - DNA, 201 bp, Homo sapiens
acttaaggttgatagcataaacaaacaaacaaacaaataagcaaaatcaaaactagtaaaaactctacactttaactttgtccccttgctttttaactttytgttgttctatttatatcttattgtactacgtcttgaaaagttgtagttattatgtttaattgatttatcttttagttttcctacttaagagtagtttat

SEQ ID NO: 517941 - DNA, 201 bp, Homo sapiens
ataatctcctggtaggagaacttgttcctctctgtatactggatgatgccatccaacgccatcatgttgccataggtcttactgcagatgacaaaggtatyctagtactgtgagcactggtcgggggcagctgctccacctgcagtgacaaggcatgggtgggccacagactgcatgtcttgcagaatcagtcctataaat

SEQ ID NO: 517942 - DNA, 201 bp, Homo sapiens
gcgcctggccataactactattttcactaagtatacaagtgatttatttaatgtgagctgttcatttgtgaatgattatggaaataaaaaaaaaagacttrttggcaaagtgttgaatagataactttattgttattattttatttctttcatgtactccagcagataaagataatgtaccttctgaacctactcttaaaa

SEQ ID NO: 517943 - DNA, 201 bp, Homo sapiens
tgttgtttatagagattttttaaaataataaaactgaataaaagtctttttaaaatgaacatgtactgacagttctaaacaatgttggttttcaaatactygtttctgaaaaaatcttttgttggtccaagttctcaaaaatcactgtaattacttttaaatctaatagtatatatgtaagctattaacatctttatttct

SEQ ID NO: 517944 - DNA, 201 bp, Homo sapiens
tatgtaagggggcaggctagacctagttgatgatacaggtctttatagaccatggtcaagacttgggtttttactttgaaggagatgcgaagtcataggakaattttgaacagaagttgccataatattactttcatctagaaaggtctgtcatcagagagtagatggtgggcaatggtggcaaggggcagcgtgaatgca

SEQ ID NO: 517945 - DNA, 201 bp, Homo sapiens
aattaatctcagaaagaaagcactaagttaaaaaaagtaaattattacaataaaatgttttaatttatatttttacaggacccttaaaaaagcagattcartttattattggactttgtttacttctcccgtatcatggtagaattcagtagatcccgtggatcttatttaaaattgtctccattgggaaatgaaacctca

SEQ ID NO: 517946 - DNA, 201 bp, Homo sapiens
acctggctctagtcttgcaagttttaaatcttttttatgcagttatggaaaaaatatgtttctgcttgaagcagttgtcaaacaagcttctttcatcaacrgtcagacacagggcagctgaatgaggctgtttagtctagagtgaatgctcatgagattacaaggtcactgaggaaatataattgtgtagttggttccaga

SEQ ID NO: 517947 - DNA, 201 bp, Homo sapiens
tgtttttaaaaaaaccaacttttagtttcattgattttttttctttctattgtatgtctaatctctattttatttctactctgatctttatttccatcctkactgtaactttgggcttccttacactaactagttctttaaagtgtaatatcaggttatttgagattttttttctttttaagtattgtcttttattagtat

SEQ ID NO: 517948 - DNA, 201 bp, Homo sapiens
gcaagaaaatgaatttttctcaactcttttggccattgtactttttttcttgctagacgcttatgaataactcctttggaaaatgtattaatatgtaatgygtttacttctttgtttttgggcatggattgtgtgtcatgatctatttatttaatttagagtgtgaagcaacgtgtactggcttgtggtacttttttttgc

SEQ ID NO: 517949 - DNA, 201 bp, Homo sapiens
gttttttttttttaaaataatttatttcctcttgcatttagtgcttcattattgctgattttattgggtctgtttcatggaatatcctcctcatctttctkttttagtcttctatggtggtggtacttcttagaacatgaagatttaaataagggttagaattccctgtaaagtaggtttagcctgattgtctattttttc

SEQ ID NO: 517950 - DNA, 201 bp, Homo sapiens
aaattatgtagaaaacaaaatgtgagttataaaacttagtaataatactggcttttagactaatttttttaaaaaagatattagtctcttaaatcttacartgttataccttttgattatcttttttacttacacctcttgtatgctctattttgtgctttttaattttttaaaaaagtttgttttaaaagttaggataat

SEQ ID NO: 517951 - DNA, 201 bp, Homo sapiens
aattatttttttaaatgtgttagtttcttaaattatgtagaaaacaaaatgtgagttataaaacttagtaataatactggcttttagactaatttttttaraaaagatattagtctcttaaatcttacaatgttataccttttgattatcttttttacttacacctcttgtatgctctattttgtgctttttaatttttta

SEQ ID NO: 517952 - DNA, 201 bp, Homo sapiens
atatgttgatttaaaaaataatgctgctttttaaacttgcagtaattattactaagtgcgggtttggaaatgacacaaaggttatatactgtgaacattaraatgagactatgaggatcaaacagcaatcatttttattctttcaaacttaataggtaactgtactcaatatttactattaaaaataagattataataaaa

SEQ ID NO: 517953 - DNA, 201 bp, Homo sapiens
cttaagtattatcttccttggaaggtaatccagctcttgaaaatacccattctgtgtgagcctttctggaccttgctgtctaatttctgaaatgcacacgsagtgttggtgagactgtaaatgtacttctttaattgtcacagtatttttcctttccctcacttaccctcctctcttttactcctctcccctcccttttac

SEQ ID NO: 517954 - DNA, 201 bp, Homo sapiens
atagtcaaaacagtttaaagcagagggagacaatgctgttccttttatgttttgtgttctcctgtagttttgagactcatgcctttctcaaaagtaattgyatgtgaccacaaatatatcactgtagttagtgtctatatgagccttattagttctaagccaatacaaggaatttataggaatgcttattaaatatccaga

SEQ ID NO: 517955 - DNA, 201 bp, Homo sapiens
tctggctgaaacaggcgcctgcgagagtctgtaggagggaaaccgccatggacgatcagggttgccctcggtgtaagaccaccaaatatcggaacccctcyttgaagctgatggtgaatgtgtgcggacacactctgtgagttgggcggcagtggattccctgggggagagacgcgctgggtgggaggagaggaccgggag

SEQ ID NO: 517956 - DNA, 201 bp, Homo sapiens
aacttcctgggctcaagcgatccttgcacttcagcctcccaagtagctgggactacaggccactatgcccagctaatttacttttattttttattttattwatttaatttgagatggagtcttgctctgtcgcccaagctggagtgcagtgacacaatctcggctcactgcaacctccgcctccgcctcctgggttcaagc

SEQ ID NO: 517957 - DNA, 201 bp, Homo sapiens
ctgtagtatattaagtgtacaatatcaatatgactaaaaaacagtgtgcataccttaattaaaatatactttactgctaaaaattgctaacaatcatctgmgccttcgaaagtgactataatctttgtgctagtagaaggtcttgcccagatgttgatggctcctgactgatcaggatggtgattgctgaaggttggggtg

SEQ ID NO: 517958 - DNA, 201 bp, Homo sapiens
cctgtccttttgggtttttatgggggcttctttcctatagccaagattgataaatgactggccactggtgattaactcaacctcctgcccctcacctcttyccagaggttggtggaactgaaagttcccaacacactaattacaaagttggttccctttgcaataagcccctgttctgaggctatccaggaccacccagcc

SEQ ID NO: 517959 - DNA, 201 bp, Homo sapiens
aatttgctttgcccagatctatcagaggaatcattgtctgtagcagctacagcattatgacatgtattacttaaataacaagacttcaatgtcagaattastccttgacccatgggcttttgaatggatgttgtgttagcaggcatgaaaacaacattcatgtccttgcacatatccatcagaggtcttaggtgaccagat

SEQ ID NO: 517960 - DNA, 201 bp, Homo sapiens
tatttagtgtcaatagttgggaaaattcacaaataatgaattatactctatgagttttatgtaatattctttcctttaccacggtaaaggaaaaattgttratagtcaaactgttggcttcagaatttatggcagtggttgaatttattccagaaaatttgtctcatgatctgtctagacatgagcataggcagaaataat

SEQ ID NO: 517961 - DNA, 201 bp, Homo sapiens
gaggagcctgatgtaggacgattgcctgaatctgggagggcaaggctgcagagagctgtgacaacttcactgcattctcaaaaaaaaaaaaaaaaaaaaawatatatatatatatatatatatataaaataggtatatatatacatatgtgtgtatatatatgtctgtgtgtgtatgtatatatttaaagatcaatgttag

SEQ ID NO: 517962 - DNA, 201 bp, Homo sapiens
ttctaactattgttttagtgaaacttcctacctcagcaaatcttccaggctccagacctgcgatgacaggtggaaagatttcttcttgctgctatgtcatrtaattggacagttaaggcctgtagagctgtagccccatagaggccctcataatcttttctctttgcttccttttttaccctctctttctccaatctatct

SEQ ID NO: 517963 - DNA, 201 bp, Homo sapiens
gttgaagtttgaaggctattagagaaaattacgtgttagctatagtttattttggtatgtgtatttttgtgtatatagatatacacacatgggcatagtawatatatgtgtgtatatatgtatatatatacctatatattattaatctgtctttttcatttacaatttaggctttactctttactctttgttaatagtttt

SEQ ID NO: 517964 - DNA, 201 bp, Homo sapiens
agggaatcaccctgcgtgggagtgccgaaatcgtggacgagttcttctcattcggcatcaacagcattttatatcagcgtggcatttatccatctgaaatytttactcgagtgcagaaatacggactcaccttgcttgtaactactgatcttgagctcataaaatacctaaataatgtggtggaacaactaaaagattggt

SEQ ID NO: 517965 - DNA, 201 bp, Homo sapiens
tatgccagttgtacttgttattgtagttatgtagttatgtaattaaatacatatttaatattatatgtaatttaaatatttaaagtgtgtaaggttggggaaaaaattgtaaaactctagaaggattctgtttctcaggtttttaagtcacttcttaaaaaatggaaattggccaggtgcagtgactcgcgcctgtaatca

SEQ ID NO: 517966 - DNA, 201 bp, Homo sapiens
cataatgtgaatatttagtttgacatgaaatgcttatggaaaagacataatttaaaataaaagtcttgttgtttttagttttccctttttacatttcttaytgaacttgaactattcttacaggagagttctgatctccctgttgctctgcttttggctcagcataaagatagatctacccaattagaaatgcaacttgag

SEQ ID NO: 517967 - DNA, 201 bp, Homo sapiens
atcatataacatgatgattaaataattcttagtaatttactgtattcattagtgcaattaattacaacagattggtttagaataccactgcagtttgaatktctggttttcatttttaaacttatttttagattttgttatgtttatttttcagtctttatacaatgttataaatgttaaaatactttaaatttttatgac
